United States Patent Application Publication US 2005/0244851 A1 - sequence listing, part 97

SEQ ID NO: 3780609 - DNA, 25 bp, Homo sapien
gaggcctatgtgacagggctcagca

SEQ ID NO: 3780610 - DNA, 25 bp, Homo sapien
tcttgaagggactcacaatttttcc

SEQ ID NO: 3780611 - DNA, 25 bp, Homo sapien
tataaggagccaaacatcgggtaac

SEQ ID NO: 3780612 - DNA, 25 bp, Homo sapien
catttgttgcaccctgggacacgct

SEQ ID NO: 3780613 - DNA, 25 bp, Homo sapien
tcaccagtgtgcgggaaagagtctg

SEQ ID NO: 3780614 - DNA, 25 bp, Homo sapien
accagtgtgcgggaaagagtctgga

SEQ ID NO: 3780615 - DNA, 25 bp, Homo sapien
aaggtcaccagtgtgcgggaaagag

SEQ ID NO: 3780616 - DNA, 25 bp, Homo sapien
catttagacttcttgtacttgtgca

SEQ ID NO: 3780617 - DNA, 25 bp, Homo sapien
tcagtgatactgataattcccagca

SEQ ID NO: 3780618 - DNA, 25 bp, Homo sapien
tatatatgctccctgcttgtagaag

SEQ ID NO: 3780619 - DNA, 25 bp, Homo sapien
caatatagttagatgtgtatgcatc

SEQ ID NO: 3780620 - DNA, 25 bp, Homo sapien
ttcttgctgatctgccatgcagtct

SEQ ID NO: 3780621 - DNA, 25 bp, Homo sapien
tgactttcccatgtagggtctaact

SEQ ID NO: 3780622 - DNA, 25 bp, Homo sapien
tcttcctatgcaatggcaagacatc

SEQ ID NO: 3780623 - DNA, 25 bp, Homo sapien
gcaagacatctgtgattgcttctct

SEQ ID NO: 3780624 - DNA, 25 bp, Homo sapien
ttccacaatcttccgtaattaccat

SEQ ID NO: 3780625 - DNA, 25 bp, Homo sapien
cttccacaatcttccgtaattacca

SEQ ID NO: 3780626 - DNA, 25 bp, Homo sapien
tgccacagtacgcagggccacgtgg

SEQ ID NO: 3780627 - DNA, 25 bp, Homo sapien
ggtggccagtggattaggaaacaat

SEQ ID NO: 3780628 - DNA, 25 bp, Homo sapien
catatcatgccacagtacgcagggc

SEQ ID NO: 3780629 - DNA, 25 bp, Homo sapien
ggcactgagtgatagtttgttactc

SEQ ID NO: 3780630 - DNA, 25 bp, Homo sapien
gcattcagcagttttggactgagat

SEQ ID NO: 3780631 - DNA, 25 bp, Homo sapien
tcatggttgcgtgtgatacggcagt

SEQ ID NO: 3780632 - DNA, 25 bp, Homo sapien
cttaatagaggcgtcagcaggcgga

SEQ ID NO: 3780633 - DNA, 25 bp, Homo sapien
tcagcaggcggaaattcacgggctt

SEQ ID NO: 3780634 - DNA, 25 bp, Homo sapien
tcacgggcttgctgcactatgttca

SEQ ID NO: 3780635 - DNA, 25 bp, Homo sapien
gaagagaaagggctgatttgcttaa

SEQ ID NO: 3780636 - DNA, 25 bp, Homo sapien
gaaacagagacttgctctgttgctc

SEQ ID NO: 3780637 - DNA, 25 bp, Homo sapien
tggctcactgtaacctcggcctcct

SEQ ID NO: 3780638 - DNA, 25 bp, Homo sapien
gggttcaagtgattctattgcctca

SEQ ID NO: 3780639 - DNA, 25 bp, Homo sapien
aggctggagtacagtggcccaatct

SEQ ID NO: 3780640 - DNA, 25 bp, Homo sapien
gcttgtttatcaatgttgtcactgc

SEQ ID NO: 3780641 - DNA, 25 bp, Homo sapien
gcagtttcaggcttgtctccacatt

SEQ ID NO: 3780642 - DNA, 25 bp, Homo sapien
cagagttccagattgaacttcacca

SEQ ID NO: 3780643 - DNA, 25 bp, Homo sapien
ggccgctacgctctgcagagttcca

SEQ ID NO: 3780644 - DNA, 25 bp, Homo sapien
aaaaacatcttgtgctttactgctc

SEQ ID NO: 3780645 - DNA, 25 bp, Homo sapien
aaacatcttgtgctttactgctccc

SEQ ID NO: 3780646 - DNA, 25 bp, Homo sapien
gatgttctgataacaaaatatttcc

SEQ ID NO: 3780647 - DNA, 25 bp, Homo sapien
acatcttgtgctttactgctcccat

SEQ ID NO: 3780648 - DNA, 25 bp, Homo sapien
taacgtagttcagtacttgaagtta

SEQ ID NO: 3780649 - DNA, 25 bp, Homo sapien
ggttgtaacgtagttcagtacttga

SEQ ID NO: 3780650 - DNA, 25 bp, Homo sapien
tccaaagctatctgccttttatccc

SEQ ID NO: 3780651 - DNA, 25 bp, Homo sapien
tcagaggttgtaacgtagttcagta

SEQ ID NO: 3780652 - DNA, 25 bp, Homo sapien
caggaagcttattgttgcatgtact

SEQ ID NO: 3780653 - DNA, 25 bp, Homo sapien
tattgttgcatgtacttgaaccatc

SEQ ID NO: 3780654 - DNA, 25 bp, Homo sapien
tacttgaaccatcccggtctgcagg

SEQ ID NO: 3780655 - DNA, 25 bp, Homo sapien
tctgtgagtcaggaagcttattgtt

SEQ ID NO: 3780656 - DNA, 25 bp, Homo sapien
tcctggcctgcaatgcagaggccag

SEQ ID NO: 3780657 - DNA, 25 bp, Homo sapien
tatcctggcctgcaatgcagaggcc

SEQ ID NO: 3780658 - DNA, 25 bp, Homo sapien
atcctggcctgcaatgcagaggcca

SEQ ID NO: 3780659 - DNA, 25 bp, Homo sapien
ggtctgcccagacgtaaatcccagc

SEQ ID NO: 3780660 - DNA, 25 bp, Homo sapien
ccacattccggagctgtgaaaggtc

SEQ ID NO: 3780661 - DNA, 25 bp, Homo sapien
tgtgaaaggtctgcccagacgtaaa

SEQ ID NO: 3780662 - DNA, 25 bp, Homo sapien
tctctgtcagtgctaacagatggca

SEQ ID NO: 3780663 - DNA, 25 bp, Homo sapien
tttccttctattaacagagtcacca

SEQ ID NO: 3780664 - DNA, 25 bp, Homo sapien
ttccttctattaacagagtcaccat

SEQ ID NO: 3780665 - DNA, 25 bp, Homo sapien
ttatagcttcgccactgggattctt

SEQ ID NO: 3780666 - DNA, 25 bp, Homo sapien
tagcagtagatttgttttcgcactc

SEQ ID NO: 3780667 - DNA, 25 bp, Homo sapien
tgaagtagaatatgtgattatagct

SEQ ID NO: 3780668 - DNA, 25 bp, Homo sapien
tgttttcgcactcaaattatctgag

SEQ ID NO: 3780669 - DNA, 25 bp, Homo sapien
ggcaggatcaaacccaaccagatag

SEQ ID NO: 3780670 - DNA, 25 bp, Homo sapien
taatctacacattgacctgggtgtc

SEQ ID NO: 3780671 - DNA, 25 bp, Homo sapien
gagtctcatgtaaaaggttccagca

SEQ ID NO: 3780672 - DNA, 25 bp, Homo sapien
taagatttctcctagcggaactggc

SEQ ID NO: 3780673 - DNA, 25 bp, Homo sapien
cattcaatcagtgtttcttgagccc

SEQ ID NO: 3780674 - DNA, 25 bp, Homo sapien
tcattcaatcagtgtttcttgagcc

SEQ ID NO: 3780675 - DNA, 25 bp, Homo sapien
tatccctgcaggtcctagggcctca

SEQ ID NO: 3780676 - DNA, 25 bp, Homo sapien
ctggattatccctgcaggtcctagg

SEQ ID NO: 3780677 - DNA, 25 bp, Homo sapien
gattatccctgcaggtcctagggcc

SEQ ID NO: 3780678 - DNA, 25 bp, Homo sapien
ggattatccctgcaggtcctagggc

SEQ ID NO: 3780679 - DNA, 25 bp, Homo sapien
tgtaaaacatctgttcccctgtgct

SEQ ID NO: 3780680 - DNA, 25 bp, Homo sapien
tcttcacacctgttgtaaaacatct

SEQ ID NO: 3780681 - DNA, 25 bp, Homo sapien
acctccacaccctttgatggcgtca

SEQ ID NO: 3780682 - DNA, 25 bp, Homo sapien
cctccacaccctttgatggcgtcat

SEQ ID NO: 3780683 - DNA, 25 bp, Homo sapien
tcatttgaatccggagacactgagt

SEQ ID NO: 3780684 - DNA, 25 bp, Homo sapien
gatgaaagagacctcatagtctgaa

SEQ ID NO: 3780685 - DNA, 25 bp, Homo sapien
cacagctagtgctgactttgatgaa

SEQ ID NO: 3780686 - DNA, 25 bp, Homo sapien
agcaggtggtcttcacagctagtgc

SEQ ID NO: 3780687 - DNA, 25 bp, Homo sapien
gaaaatagcccatgtcgtgttgcgt

SEQ ID NO: 3780688 - DNA, 25 bp, Homo sapien
ggacgaatcatctttggatacaaag

SEQ ID NO: 3780689 - DNA, 25 bp, Homo sapien
cctccaaatgtcaagaaagggacat

SEQ ID NO: 3780690 - DNA, 25 bp, Homo sapien
accctgctcatggatggacgaatca

SEQ ID NO: 3780691 - DNA, 25 bp, Homo sapien
ttataacctgggaagcttcacattc

SEQ ID NO: 3780692 - DNA, 25 bp, Homo sapien
gagcatcagttcttatgagaccaga

SEQ ID NO: 3780693 - DNA, 25 bp, Homo sapien
tggcagttggtacagaacagataac

SEQ ID NO: 3780694 - DNA, 25 bp, Homo sapien
actagccaggaaagacagtcaagga

SEQ ID NO: 3780695 - DNA, 25 bp, Homo sapien
tggaccttttccttagtgcccctga

SEQ ID NO: 3780696 - DNA, 25 bp, Homo sapien
tactttggaaaacctgcacctctgc

SEQ ID NO: 3780697 - DNA, 25 bp, Homo sapien
tctgcaagatgccacgtgtacggat

SEQ ID NO: 3780698 - DNA, 25 bp, Homo sapien
tagtcatctatcattcccagagcag

SEQ ID NO: 3780699 - DNA, 25 bp, Homo sapien
catgcctgaggccaactaggagcaa

SEQ ID NO: 3780700 - DNA, 25 bp, Homo sapien
taaagcagtgccttatgatgctaag

SEQ ID NO: 3780701 - DNA, 25 bp, Homo sapien
gcagcaggcattcatgagaattcca

SEQ ID NO: 3780702 - DNA, 25 bp, Homo sapien
gaccagcctgactagtgttaagata

SEQ ID NO: 3780703 - DNA, 25 bp, Homo sapien
ggtatactagagagtcaactgttgg

SEQ ID NO: 3780704 - DNA, 25 bp, Homo sapien
tgtcaatgctgcagacaagtcaagt

SEQ ID NO: 3780705 - DNA, 25 bp, Homo sapien
aaatcaagagtgtcatagagacagc

SEQ ID NO: 3780706 - DNA, 25 bp, Homo sapien
gccaaagactagagagggaatacag

SEQ ID NO: 3780707 - DNA, 25 bp, Homo sapien
gattgcataacagtccaccattgta

SEQ ID NO: 3780708 - DNA, 25 bp, Homo sapien
aaaactattgctgatggacaaagtg

SEQ ID NO: 3780709 - DNA, 25 bp, Homo sapien
tgtttaagttgaatcccctatgtat

SEQ ID NO: 3780710 - DNA, 25 bp, Homo sapien
cactcgttctcttcactatagcaaa

SEQ ID NO: 3780711 - DNA, 25 bp, Homo sapien
aattcagtcacatccaagatgtgca

SEQ ID NO: 3780712 - DNA, 25 bp, Homo sapien
tattagagaaggtgcaactgtacat

SEQ ID NO: 3780713 - DNA, 25 bp, Homo sapien
caaaatggtcatcaatgctttggac

SEQ ID NO: 3780714 - DNA, 25 bp, Homo sapien
gttcttgttcccatgtgagaaaaca

SEQ ID NO: 3780715 - DNA, 25 bp, Homo sapien
taatcagtgactaggtaaagatact

SEQ ID NO: 3780716 - DNA, 25 bp, Homo sapien
cgcttactgaccatgcagctgtaaa

SEQ ID NO: 3780717 - DNA, 25 bp, Homo sapien
tgaccaaagtatcgcttactgacca

SEQ ID NO: 3780718 - DNA, 25 bp, Homo sapien
tacattcatgaccaaagtatcgctt

SEQ ID NO: 3780719 - DNA, 25 bp, Homo sapien
tgcagctgtaaaccttctgtgccta

SEQ ID NO: 3780720 - DNA, 25 bp, Homo sapien
aagtcatacgtagtttctgttgcag

SEQ ID NO: 3780721 - DNA, 25 bp, Homo sapien
gcactgtaacctaagtcatacgtag

SEQ ID NO: 3780722 - DNA, 25 bp, Homo sapien
ggagattgcactgtaacctaagtca

SEQ ID NO: 3780723 - DNA, 25 bp, Homo sapien
acttgtggagattgcactgtaacct

SEQ ID NO: 3780724 - DNA, 25 bp, Homo sapien
tcagaagtgctgtaagaggttctcc

SEQ ID NO: 3780725 - DNA, 25 bp, Homo sapien
ggtagacccctcattagtcccatga

SEQ ID NO: 3780726 - DNA, 25 bp, Homo sapien
cacataagggtaacgtgggattcct

SEQ ID NO: 3780727 - DNA, 25 bp, Homo sapien
ttacttttaaatgctggtcacctcc

SEQ ID NO: 3780728 - DNA, 25 bp, Homo sapien
tgcccatggaggactgacctcctcc

SEQ ID NO: 3780729 - DNA, 25 bp, Homo sapien
gcccatggaggactgacctcctcca

SEQ ID NO: 3780730 - DNA, 25 bp, Homo sapien
cccatggaggactgacctcctccat

SEQ ID NO: 3780731 - DNA, 25 bp, Homo sapien
taggatctgcattcaccttttcaag

SEQ ID NO: 3780732 - DNA, 25 bp, Homo sapien
tttatctgtatctcatcaacttgct

SEQ ID NO: 3780733 - DNA, 25 bp, Homo sapien
tatctgtatctcatcaacttgctct

SEQ ID NO: 3780734 - DNA, 25 bp, Homo sapien
acactaggatctgcattcacctttt

SEQ ID NO: 3780735 - DNA, 25 bp, Homo sapien
tctagaagacatgtgagacacaaac

SEQ ID NO: 3780736 - DNA, 25 bp, Homo sapien
aattggagatgccagtgagtcgtaa

SEQ ID NO: 3780737 - DNA, 25 bp, Homo sapien
ggagatgggttgaattggagatgcc

SEQ ID NO: 3780738 - DNA, 25 bp, Homo sapien
tgagtcgtaagtgggagcaagtcta

SEQ ID NO: 3780739 - DNA, 25 bp, Homo sapien
ttctcatagccattaacttcagcat

SEQ ID NO: 3780740 - DNA, 25 bp, Homo sapien
gaagctggagtactctgggtgaacc

SEQ ID NO: 3780741 - DNA, 25 bp, Homo sapien
agctggagtactctgggtgaaccat

SEQ ID NO: 3780742 - DNA, 25 bp, Homo sapien
ttaggtgatatttggcaccagaagc

SEQ ID NO: 3780743 - DNA, 25 bp, Homo sapien
cagaagctggagtactctgggtgaa

SEQ ID NO: 3780744 - DNA, 25 bp, Homo sapien
gttagcattgtgcatcatcagcatc

SEQ ID NO: 3780745 - DNA, 25 bp, Homo sapien
agcatcaactcttccaaacacagag

SEQ ID NO: 3780746 - DNA, 25 bp, Homo sapien
ggttagcattgtgcatcatcagcat

SEQ ID NO: 3780747 - DNA, 25 bp, Homo sapien
ctggttagcattgtgcatcatcagc

SEQ ID NO: 3780748 - DNA, 25 bp, Homo sapien
tgatctcagtgcgttcatagcctca

SEQ ID NO: 3780749 - DNA, 25 bp, Homo sapien
tatagctgtgatccaatgtaccctg

SEQ ID NO: 3780750 - DNA, 25 bp, Homo sapien
tttgaaagaccccagatagaagtgg

SEQ ID NO: 3780751 - DNA, 25 bp, Homo sapien
tagcgctacactacaagagattgtg

SEQ ID NO: 3780752 - DNA, 25 bp, Homo sapien
ctgagatcccccatgagggccagca

SEQ ID NO: 3780753 - DNA, 25 bp, Homo sapien
tgagatcccccatgagggccagcag

SEQ ID NO: 3780754 - DNA, 25 bp, Homo sapien
ggaatgattttatgtgcccgacaca

SEQ ID NO: 3780755 - DNA, 25 bp, Homo sapien
gcagcactgcatctcgtatgttgag

SEQ ID NO: 3780756 - DNA, 25 bp, Homo sapien
tcctgcaagagtagaccctgttcac

SEQ ID NO: 3780757 - DNA, 25 bp, Homo sapien
ccctgttcacaagggcattgcagca

SEQ ID NO: 3780758 - DNA, 25 bp, Homo sapien
gtggaaaacttctccgatacctgag

SEQ ID NO: 3780759 - DNA, 25 bp, Homo sapien
gaatgccaataatagcagttcacag

SEQ ID NO: 3780760 - DNA, 25 bp, Homo sapien
tctccgatacctgagaccaggaatg

SEQ ID NO: 3780761 - DNA, 25 bp, Homo sapien
aaagtgcccaaagcgcacactgtcc

SEQ ID NO: 3780762 - DNA, 25 bp, Homo sapien
ctgtagtccaagccgtacttcagaa

SEQ ID NO: 3780763 - DNA, 25 bp, Homo sapien
tagtccaagccgtacttcagaaccg

SEQ ID NO: 3780764 - DNA, 25 bp, Homo sapien
caagccgtacttcagaaccgggagg

SEQ ID NO: 3780765 - DNA, 25 bp, Homo sapien
cgtacttcagaaccgggaggctttg

SEQ ID NO: 3780766 - DNA, 25 bp, Homo sapien
gttatctgaatgtaatcgatactca

SEQ ID NO: 3780767 - DNA, 25 bp, Homo sapien
cccctgtggtaaagttatctgaatg

SEQ ID NO: 3780768 - DNA, 25 bp, Homo sapien
tactgcagttgtacccctgtggtaa

SEQ ID NO: 3780769 - DNA, 25 bp, Homo sapien
ctttactgcagttgtacccctgtgg

SEQ ID NO: 3780770 - DNA, 25 bp, Homo sapien
ccaggctcttgcaccggggagagcc

SEQ ID NO: 3780771 - DNA, 25 bp, Homo sapien
caccaggctcttgcaccggggagag

SEQ ID NO: 3780772 - DNA, 25 bp, Homo sapien
accaggctcttgcaccggggagagc

SEQ ID NO: 3780773 - DNA, 25 bp, Homo sapien
ccaccaggctcttgcaccggggaga

SEQ ID NO: 3780774 - DNA, 25 bp, Homo sapien
actgtcagtagttatgtgctgtttc

SEQ ID NO: 3780775 - DNA, 25 bp, Homo sapien
tctctccacaatttaacgactgatt

SEQ ID NO: 3780776 - DNA, 25 bp, Homo sapien
cattctgggaattccactgtcagta

SEQ ID NO: 3780777 - DNA, 25 bp, Homo sapien
ttcgttgaactgaagctgtgagtcc

SEQ ID NO: 3780778 - DNA, 25 bp, Homo sapien
tctctgattctgcacaagagcctga

SEQ ID NO: 3780779 - DNA, 25 bp, Homo sapien
tgtgcgtgagagtgactcctgacac

SEQ ID NO: 3780780 - DNA, 25 bp, Homo sapien
aagagcctgaagatttgtccgtcat

SEQ ID NO: 3780781 - DNA, 25 bp, Homo sapien
ttgcacaatcaaacacagaattctc

SEQ ID NO: 3780782 - DNA, 25 bp, Homo sapien
gaagccacagcactgatggaggtca

SEQ ID NO: 3780783 - DNA, 25 bp, Homo sapien
cacatggacaggtgagctctgcgga

SEQ ID NO: 3780784 - DNA, 25 bp, Homo sapien
caaggtcattaggaaaagtctggag

SEQ ID NO: 3780785 - DNA, 25 bp, Homo sapien
tattgaaagtaaacgctgagctgtg

SEQ ID NO: 3780786 - DNA, 25 bp, Homo sapien
tactttctacggctgtgtctaccaa

SEQ ID NO: 3780787 - DNA, 25 bp, Homo sapien
tttctcagcccgcatactttctacg

SEQ ID NO: 3780788 - DNA, 25 bp, Homo sapien
taccaagacttgaaaggcatattct

SEQ ID NO: 3780789 - DNA, 25 bp, Homo sapien
agtcatagacatctagtccaatttg

SEQ ID NO: 3780790 - DNA, 25 bp, Homo sapien
gagacagattaggtactcagaagac

SEQ ID NO: 3780791 - DNA, 25 bp, Homo sapien
acagattaggtactcagaagaccca

SEQ ID NO: 3780792 - DNA, 25 bp, Homo sapien
caccctggagacagattaggtactc

SEQ ID NO: 3780793 - DNA, 25 bp, Homo sapien
ccctggagacagattaggtactcag

SEQ ID NO: 3780794 - DNA, 25 bp, Homo sapien
agtagacaggtccaaacaaattagg

SEQ ID NO: 3780795 - DNA, 25 bp, Homo sapien
gagtagacaggtccaaacaaattag

SEQ ID NO: 3780796 - DNA, 25 bp, Homo sapien
aacaaattaggaccacaggagttca

SEQ ID NO: 3780797 - DNA, 25 bp, Homo sapien
tgaccttgtcatgggagctactcaa

SEQ ID NO: 3780798 - DNA, 25 bp, Homo sapien
tagctttgtaattgctcccttgacc

SEQ ID NO: 3780799 - DNA, 25 bp, Homo sapien
gaaaatccagcatcatgcctcacca

SEQ ID NO: 3780800 - DNA, 25 bp, Homo sapien
gctgcaaaaccacacccatcaaaag

SEQ ID NO: 3780801 - DNA, 25 bp, Homo sapien
tcactgaaggcattagggagctgct

SEQ ID NO: 3780802 - DNA, 25 bp, Homo sapien
tgcagcatccgcagtcaacaacagc

SEQ ID NO: 3780803 - DNA, 25 bp, Homo sapien
cagacacagcactcctgacaatgga

SEQ ID NO: 3780804 - DNA, 25 bp, Homo sapien
gacacgacgagcctcactgaaggca

SEQ ID NO: 3780805 - DNA, 25 bp, Homo sapien
ttcttgttgtcctcattttatcccc

SEQ ID NO: 3780806 - DNA, 25 bp, Homo sapien
tgttgtcctcattttatccccagaa

SEQ ID NO: 3780807 - DNA, 25 bp, Homo sapien
cttgttgtcctcattttatccccag

SEQ ID NO: 3780808 - DNA, 25 bp, Homo sapien
tcttcttgttgtcctcattttatcc

SEQ ID NO: 3780809 - DNA, 25 bp, Homo sapien
ttgctgccgctctcacatcgtctcc

SEQ ID NO: 3780810 - DNA, 25 bp, Homo sapien
tgctgccgctctcacatcgtctcca

SEQ ID NO: 3780811 - DNA, 25 bp, Homo sapien
gaatttctgtagttaagaagtcaga

SEQ ID NO: 3780812 - DNA, 25 bp, Homo sapien
tgctaatgacttgagctgggtgaac

SEQ ID NO: 3780813 - DNA, 25 bp, Homo sapien
ctgaatcccggtaacaacagctggc

SEQ ID NO: 3780814 - DNA, 25 bp, Homo sapien
ggtgaactgggagaggattatagat

SEQ ID NO: 3780815 - DNA, 25 bp, Homo sapien
cacaagacggcatgtacggaaatca

SEQ ID NO: 3780816 - DNA, 25 bp, Homo sapien
gacgggctagttggcttatgaacag

SEQ ID NO: 3780817 - DNA, 25 bp, Homo sapien
tgatatctcctatcttatgacgggc

SEQ ID NO: 3780818 - DNA, 25 bp, Homo sapien
gatgggctagttggctcatgatatc

SEQ ID NO: 3780819 - DNA, 25 bp, Homo sapien
gattgaaacacagggccgtgatgcc

SEQ ID NO: 3780820 - DNA, 25 bp, Homo sapien
ttaggaagtcgtagcattgcaatgc

SEQ ID NO: 3780821 - DNA, 25 bp, Homo sapien
gcaaagcaacgtgaactgtctgtgg

SEQ ID NO: 3780822 - DNA, 25 bp, Homo sapien
gatgccaggaaaactggatcgccac

SEQ ID NO: 3780823 - DNA, 25 bp, Homo sapien
cagatgaaagcctgaagatttcaga

SEQ ID NO: 3780824 - DNA, 25 bp, Homo sapien
ggactgcgctagaaaagtcacactt

SEQ ID NO: 3780825 - DNA, 25 bp, Homo sapien
gcttttgtaaattgagggactgcgc

SEQ ID NO: 3780826 - DNA, 25 bp, Homo sapien
tcctcaagatgttgtggacagaagc

SEQ ID NO: 3780827 - DNA, 25 bp, Homo sapien
caagctcagcttgtatataaccctg

SEQ ID NO: 3780828 - DNA, 25 bp, Homo sapien
gtatctccatctgcgagtctctgga

SEQ ID NO: 3780829 - DNA, 25 bp, Homo sapien
ggaaaaataactgggagactccaca

SEQ ID NO: 3780830 - DNA, 25 bp, Homo sapien
agacccaggcatgctttcccaagct

SEQ ID NO: 3780831 - DNA, 25 bp, Homo sapien
cttttgtagtacataaataagattt

SEQ ID NO: 3780832 - DNA, 25 bp, Homo sapien
gctgaactgggaccttgtggctagt

SEQ ID NO: 3780833 - DNA, 25 bp, Homo sapien
aggactggccgctgaactgggacct

SEQ ID NO: 3780834 - DNA, 25 bp, Homo sapien
tggtgtggctcctaacccaagggca

SEQ ID NO: 3780835 - DNA, 25 bp, Homo sapien
ggctcctggtgtggctcctaaccca

SEQ ID NO: 3780836 - DNA, 25 bp, Homo sapien
aactgtggcctatttatcccctggg

SEQ ID NO: 3780837 - DNA, 25 bp, Homo sapien
tccaggagggaatttaggagcctta

SEQ ID NO: 3780838 - DNA, 25 bp, Homo sapien
gctttcacagcctcatagacaatgg

SEQ ID NO: 3780839 - DNA, 25 bp, Homo sapien
ggagccttagtaattaactgtggcc

SEQ ID NO: 3780840 - DNA, 25 bp, Homo sapien
gcccaaatataacctgcagcagtat

SEQ ID NO: 3780841 - DNA, 25 bp, Homo sapien
gatcctgtgatactctctgtgccca

SEQ ID NO: 3780842 - DNA, 25 bp, Homo sapien
agaccaactgcccaaatataacctg

SEQ ID NO: 3780843 - DNA, 25 bp, Homo sapien
cttatcagcaaggttcctgctgagc

SEQ ID NO: 3780844 - DNA, 25 bp, Homo sapien
gcaagtgactgacgagaaagacctg

SEQ ID NO: 3780845 - DNA, 25 bp, Homo sapien
gaaagacctgaaaccgctctgtgct

SEQ ID NO: 3780846 - DNA, 25 bp, Homo sapien
taggataaggaccaaccctgggaga

SEQ ID NO: 3780847 - DNA, 25 bp, Homo sapien
gaatgtcccctggaacgtctgtttc

SEQ ID NO: 3780848 - DNA, 25 bp, Homo sapien
tggttctgcatgctttcctcctctt

SEQ ID NO: 3780849 - DNA, 25 bp, Homo sapien
aggcatcactcatgtcctggttctg

SEQ ID NO: 3780850 - DNA, 25 bp, Homo sapien
ctgccatccacagtgcctccagcta

SEQ ID NO: 3780851 - DNA, 25 bp, Homo sapien
tcaggcatcactcatgtcctggttc

SEQ ID NO: 3780852 - DNA, 25 bp, Homo sapien
ctgcgctggccgactgcactaatgc

SEQ ID NO: 3780853 - DNA, 25 bp, Homo sapien
tgcgctggccgactgcactaatgca

SEQ ID NO: 3780854 - DNA, 25 bp, Homo sapien
gaaagccctgtaaagtatagacaac

SEQ ID NO: 3780855 - DNA, 25 bp, Homo sapien
caaaagcggtgatagacaaatagaa

SEQ ID NO: 3780856 - DNA, 25 bp, Homo sapien
atagacaacaaaagcggtgatagac

SEQ ID NO: 3780857 - DNA, 25 bp, Homo sapien
ctacacatccaacaaggggttaata

SEQ ID NO: 3780858 - DNA, 25 bp, Homo sapien
tccctctagagtgggcacaaagcga

SEQ ID NO: 3780859 - DNA, 25 bp, Homo sapien
taatgcacacactggtggtgggctc

SEQ ID NO: 3780860 - DNA, 25 bp, Homo sapien
tggaagacggtccttctggagactg

SEQ ID NO: 3780861 - DNA, 25 bp, Homo sapien
cacaaagcgaaatggatcctgcaac

SEQ ID NO: 3780862 - DNA, 25 bp, Homo sapien
gatactgccggctgaaactcatctg

SEQ ID NO: 3780863 - DNA, 25 bp, Homo sapien
aagttcccagttggctcaggtcctc

SEQ ID NO: 3780864 - DNA, 25 bp, Homo sapien
gcctgaaaacccgtgagtctgagta

SEQ ID NO: 3780865 - DNA, 25 bp, Homo sapien
gggtggactaaagctccccgactgc

SEQ ID NO: 3780866 - DNA, 25 bp, Homo sapien
gagtaaatttataatcgaatggaaa

SEQ ID NO: 3780867 - DNA, 25 bp, Homo sapien
aaataaataactgtgctgtcttgtg

SEQ ID NO: 3780868 - DNA, 25 bp, Homo sapien
catacttacggaatatgaaaaacag

SEQ ID NO: 3780869 - DNA, 25 bp, Homo sapien
tcatttcatacttacggaatatgaa

SEQ ID NO: 3780870 - DNA, 25 bp, Homo sapien
cacctctgatgcgatttgatgtgag

SEQ ID NO: 3780871 - DNA, 25 bp, Homo sapien
taagactagcatccaaatcgcatag

SEQ ID NO: 3780872 - DNA, 25 bp, Homo sapien
tgtcatgttaaatctcagacccggg

SEQ ID NO: 3780873 - DNA, 25 bp, Homo sapien
catgctccaagaaaccacggtgaga

SEQ ID NO: 3780874 - DNA, 25 bp, Homo sapien
cacttgcagggaacacattaaagcc

SEQ ID NO: 3780875 - DNA, 25 bp, Homo sapien
gatgttgctctagtccaccaaggct

SEQ ID NO: 3780876 - DNA, 25 bp, Homo sapien
gcataggttagtcctttgggcagca

SEQ ID NO: 3780877 - DNA, 25 bp, Homo sapien
tctatcataggagaccacttgcagg

SEQ ID NO: 3780878 - DNA, 25 bp, Homo sapien
cagttagttgcgaggaaagggtcca

SEQ ID NO: 3780879 - DNA, 25 bp, Homo sapien
cattgtaacattccgtgaagcccct

SEQ ID NO: 3780880 - DNA, 25 bp, Homo sapien
gatactatgcaaactggataccatg

SEQ ID NO: 3780881 - DNA, 25 bp, Homo sapien
caaaaaatcctatggcattcccagg

SEQ ID NO: 3780882 - DNA, 25 bp, Homo sapien
gaagtttctagatccctaaggccac

SEQ ID NO: 3780883 - DNA, 25 bp, Homo sapien
catgaacacaattagcagcaccagg

SEQ ID NO: 3780884 - DNA, 25 bp, Homo sapien
taaatagataccagtcagcctaggg

SEQ ID NO: 3780885 - DNA, 25 bp, Homo sapien
caataataggaacgcgcagtgcagc

SEQ ID NO: 3780886 - DNA, 25 bp, Homo sapien
cactgtaatcgtacatggctcggta

SEQ ID NO: 3780887 - DNA, 25 bp, Homo sapien
aactcaatgtaattcgctgggagca

SEQ ID NO: 3780888 - DNA, 25 bp, Homo sapien
gatgtagtcgccgtctctaaaggag

SEQ ID NO: 3780889 - DNA, 25 bp, Homo sapien
ccatcgtcaataggctgcacgttga

SEQ ID NO: 3780890 - DNA, 25 bp, Homo sapien
tagatttggtgaatgctgcattgat

SEQ ID NO: 3780891 - DNA, 25 bp, Homo sapien
tttggtgaatgctgcattgatctca

SEQ ID NO: 3780892 - DNA, 25 bp, Homo sapien
gaatgctgcattgatctcatggatg

SEQ ID NO: 3780893 - DNA, 25 bp, Homo sapien
tgcattgatctcatggatgacacac

SEQ ID NO: 3780894 - DNA, 25 bp, Homo sapien
tttgctgataggctccgggaagaac

SEQ ID NO: 3780895 - DNA, 25 bp, Homo sapien
tgctgataggctccgggaagaacag

SEQ ID NO: 3780896 - DNA, 25 bp, Homo sapien
ttgctgataggctccgggaagaaca

SEQ ID NO: 3780897 - DNA, 25 bp, Homo sapien
cgaggcgaggggaagcggaccccat

SEQ ID NO: 3780898 - DNA, 25 bp, Homo sapien
gccacgaggcgaggggaagcggacc

SEQ ID NO: 3780899 - DNA, 25 bp, Homo sapien
ccagtgccacgaggcgaggggaagc

SEQ ID NO: 3780900 - DNA, 25 bp, Homo sapien
agtgccacgaggcgaggggaagcgg

SEQ ID NO: 3780901 - DNA, 25 bp, Homo sapien
gggagccagaatttaatgccaaaaa

SEQ ID NO: 3780902 - DNA, 25 bp, Homo sapien
aggcggtcaacccttcctgcttggg

SEQ ID NO: 3780903 - DNA, 25 bp, Homo sapien
tcagaacccaaactcttgactatac

SEQ ID NO: 3780904 - DNA, 25 bp, Homo sapien
tactatggcatgttgagcagagaag

SEQ ID NO: 3780905 - DNA, 25 bp, Homo sapien
cagttaaacttaattagcctcacaa

SEQ ID NO: 3780906 - DNA, 25 bp, Homo sapien
caactagatagctttagattttaga

SEQ ID NO: 3780907 - DNA, 25 bp, Homo sapien
ctgacagaactgagctaaaccataa

SEQ ID NO: 3780908 - DNA, 25 bp, Homo sapien
ttagcctcacaaaccaagaaaatca

SEQ ID NO: 3780909 - DNA, 25 bp, Homo sapien
ggcctctagctgtaacatgatttat

SEQ ID NO: 3780910 - DNA, 25 bp, Homo sapien
cagaaactaaccaagcaccgttcca

SEQ ID NO: 3780911 - DNA, 25 bp, Homo sapien
aagcaccgttccacttaagagaggg

SEQ ID NO: 3780912 - DNA, 25 bp, Homo sapien
tatggcctctagctgtaacatgatt

SEQ ID NO: 3780913 - DNA, 25 bp, Homo sapien
gaaaagctagggtaaatctcggaga

SEQ ID NO: 3780914 - DNA, 25 bp, Homo sapien
tccttcatcagacggtcttgttacc

SEQ ID NO: 3780915 - DNA, 25 bp, Homo sapien
cagacggtcttgttacctcactgca

SEQ ID NO: 3780916 - DNA, 25 bp, Homo sapien
cctcactgcagcatgaaaagctagg

SEQ ID NO: 3780917 - DNA, 25 bp, Homo sapien
tcgtctccgagacctgtaccgaaag

SEQ ID NO: 3780918 - DNA, 25 bp, Homo sapien
tgtcgcctatagtgactcgcctttt

SEQ ID NO: 3780919 - DNA, 25 bp, Homo sapien
gaatgggatcgagaccagtgtcgcc

SEQ ID NO: 3780920 - DNA, 25 bp, Homo sapien
aaagtactgctggaatgggatcgag

SEQ ID NO: 3780921 - DNA, 25 bp, Homo sapien
gacttctagactgaatattgtcttc

SEQ ID NO: 3780922 - DNA, 25 bp, Homo sapien
atcaaggtcgaagatggagccagga

SEQ ID NO: 3780923 - DNA, 25 bp, Homo sapien
ggagacttctagactgaatattgtc

SEQ ID NO: 3780924 - DNA, 25 bp, Homo sapien
tattgtcttccaggggatcaaggtc

SEQ ID NO: 3780925 - DNA, 25 bp, Homo sapien
cggccgacaaacgccgtcagcttac

SEQ ID NO: 3780926 - DNA, 25 bp, Homo sapien
ttataggcagcatcgctgaccacct

SEQ ID NO: 3780927 - DNA, 25 bp, Homo sapien
tctccacgatgtgagggtggacccc

SEQ ID NO: 3780928 - DNA, 25 bp, Homo sapien
tctctctgtcacaggatcgtccacg

SEQ ID NO: 3780929 - DNA, 25 bp, Homo sapien
caacaatgattccaggtctcctgtc

SEQ ID NO: 3780930 - DNA, 25 bp, Homo sapien
tttattaaatgacaggtgtacactg

SEQ ID NO: 3780931 - DNA, 25 bp, Homo sapien
cactggctgcgtgcagattgtctac

SEQ ID NO: 3780932 - DNA, 25 bp, Homo sapien
tggctgcgtgcagattgtctacatg

SEQ ID NO: 3780933 - DNA, 25 bp, Homo sapien
aggtgtacactgcactggctgcgtg

SEQ ID NO: 3780934 - DNA, 25 bp, Homo sapien
taatgccatccgtgcactggatccg

SEQ ID NO: 3780935 - DNA, 25 bp, Homo sapien
ccatgctttgttagttatcggatta

SEQ ID NO: 3780936 - DNA, 25 bp, Homo sapien
caagccaaccacatttccatgcttt

SEQ ID NO: 3780937 - DNA, 25 bp, Homo sapien
tatcggattaatagtgaagtaatgc

SEQ ID NO: 3780938 - DNA, 25 bp, Homo sapien
catagcaggtgtatctaaaatcaga

SEQ ID NO: 3780939 - DNA, 25 bp, Homo sapien
catctgtttatggtcctgggtatat

SEQ ID NO: 3780940 - DNA, 25 bp, Homo sapien
tctaaaatcagacttggtctacctt

SEQ ID NO: 3780941 - DNA, 25 bp, Homo sapien
tggtctacctttcatctgtttatgg

SEQ ID NO: 3780942 - DNA, 25 bp, Homo sapien
gacacggctaacatatcatgaatcg

SEQ ID NO: 3780943 - DNA, 25 bp, Homo sapien
cacaagcaaaggaggaccgcaagta

SEQ ID NO: 3780944 - DNA, 25 bp, Homo sapien
gatactcatgtacaccactggactt

SEQ ID NO: 3780945 - DNA, 25 bp, Homo sapien
tgtaaattgcaaagcctaaatgctg

SEQ ID NO: 3780946 - DNA, 25 bp, Homo sapien
ttccatttcaggagttacacttaaa

SEQ ID NO: 3780947 - DNA, 25 bp, Homo sapien
ttcaggagttacacttaaagtggta

SEQ ID NO: 3780948 - DNA, 25 bp, Homo sapien
caggagttacacttaaagtggtagc

SEQ ID NO: 3780949 - DNA, 25 bp, Homo sapien
catttcaggagttacacttaaagtg

SEQ ID NO: 3780950 - DNA, 25 bp, Homo sapien
ttcagaggttgagttgtatttaaaa

SEQ ID NO: 3780951 - DNA, 25 bp, Homo sapien
tcccataagagagtacatgtgtcca

SEQ ID NO: 3780952 - DNA, 25 bp, Homo sapien
tttattttaatgagttagtcaggga

SEQ ID NO: 3780953 - DNA, 25 bp, Homo sapien
tgctggcatcttaaatcaatctatt

SEQ ID NO: 3780954 - DNA, 25 bp, Homo sapien
tgcatttgatagtgtaagaaaaaag

SEQ ID NO: 3780955 - DNA, 25 bp, Homo sapien
aatgcatttgatagtgtaagaaaaa

SEQ ID NO: 3780956 - DNA, 25 bp, Homo sapien
atgcatttgatagtgtaagaaaaaa

SEQ ID NO: 3780957 - DNA, 25 bp, Homo sapien
caatgcatttgatagtgtaagaaaa

SEQ ID NO: 3780958 - DNA, 25 bp, Homo sapien
gtggatcagaaattgcagttccccg

SEQ ID NO: 3780959 - DNA, 25 bp, Homo sapien
tgcagttccccgttgaagttctccc

SEQ ID NO: 3780960 - DNA, 25 bp, Homo sapien
cagaaattgcagttccccgttgaag

SEQ ID NO: 3780961 - DNA, 25 bp, Homo sapien
tcagctctggtggatcagaaattgc

SEQ ID NO: 3780962 - DNA, 25 bp, Homo sapien
cagagtagcgctgccttgttaacta

SEQ ID NO: 3780963 - DNA, 25 bp, Homo sapien
tagaacattagtacagggcccagca

SEQ ID NO: 3780964 - DNA, 25 bp, Homo sapien
aaacaaacagtgctgacctcatggg

SEQ ID NO: 3780965 - DNA, 25 bp, Homo sapien
gagcctcattatctccacccaggag

SEQ ID NO: 3780966 - DNA, 25 bp, Homo sapien
catttgggtacttaatgaagatctc

SEQ ID NO: 3780967 - DNA, 25 bp, Homo sapien
caggacaatgcccagtacatttggg

SEQ ID NO: 3780968 - DNA, 25 bp, Homo sapien
taaggtacagcaacacagtcccaaa

SEQ ID NO: 3780969 - DNA, 25 bp, Homo sapien
gaagatctcttgaataagcaaacac

SEQ ID NO: 3780970 - DNA, 25 bp, Homo sapien
gatgacttcatcaccccggcattaa

SEQ ID NO: 3780971 - DNA, 25 bp, Homo sapien
aaaaggaacatccaaaaatgcagag

SEQ ID NO: 3780972 - DNA, 25 bp, Homo sapien
cacaggtgaacttgtgttatgggag

SEQ ID NO: 3780973 - DNA, 25 bp, Homo sapien
caaaagaattaatgctgcatgtaca

SEQ ID NO: 3780974 - DNA, 25 bp, Homo sapien
tcagctgctcctggtttcgcctcac

SEQ ID NO: 3780975 - DNA, 25 bp, Homo sapien
actcagctgctcctggtttcgcctc

SEQ ID NO: 3780976 - DNA, 25 bp, Homo sapien
cactcagctgctcctggtttcgcct

SEQ ID NO: 3780977 - DNA, 25 bp, Homo sapien
cgcactcagctgctcctggtttcgc

SEQ ID NO: 3780978 - DNA, 25 bp, Homo sapien
tctctctatctccggggtcatgctt

SEQ ID NO: 3780979 - DNA, 25 bp, Homo sapien
ggagtggccttgtagttttgctctt

SEQ ID NO: 3780980 - DNA, 25 bp, Homo sapien
agtggccttgtagttttgctcttta

SEQ ID NO: 3780981 - DNA, 25 bp, Homo sapien
tggccttgtagttttgctctttata

SEQ ID NO: 3780982 - DNA, 25 bp, Homo sapien
cggagtggccttgtagttttgctct

SEQ ID NO: 3780983 - DNA, 25 bp, Homo sapien
gaaatggctgttgcatgtttaatct

SEQ ID NO: 3780984 - DNA, 25 bp, Homo sapien
aatggctgttgcatgtttaatctct

SEQ ID NO: 3780985 - DNA, 25 bp, Homo sapien
ggctgttgcatgtttaatctcttct

SEQ ID NO: 3780986 - DNA, 25 bp, Homo sapien
tggctgttgcatgtttaatctcttc

SEQ ID NO: 3780987 - DNA, 25 bp, Homo sapien
gatttttcttcactcgttcgatctc

SEQ ID NO: 3780988 - DNA, 25 bp, Homo sapien
cactcgttcgatctctgggctatct

SEQ ID NO: 3780989 - DNA, 25 bp, Homo sapien
ggctatctttcactgcagtgccagc

SEQ ID NO: 3780990 - DNA, 25 bp, Homo sapien
gatctctgggctatctttcactgca

SEQ ID NO: 3780991 - DNA, 25 bp, Homo sapien
caggagtatctgctatggtagaata

SEQ ID NO: 3780992 - DNA, 25 bp, Homo sapien
tgctatggtagaatagttagaaagc

SEQ ID NO: 3780993 - DNA, 25 bp, Homo sapien
ggtagaatagttagaaagcatcttc

SEQ ID NO: 3780994 - DNA, 25 bp, Homo sapien
aatttcaggagtatctgctatggta

SEQ ID NO: 3780995 - DNA, 25 bp, Homo sapien
tggctatagatttcagatgtcctct

SEQ ID NO: 3780996 - DNA, 25 bp, Homo sapien
gctatagatttcagatgtcctcttg

SEQ ID NO: 3780997 - DNA, 25 bp, Homo sapien
tatagatttcagatgtcctcttggc

SEQ ID NO: 3780998 - DNA, 25 bp, Homo sapien
atctgggatatccatgctcacttgc

SEQ ID NO: 3780999 - DNA, 25 bp, Homo sapien
tggccatctcggatgctttcttagc

SEQ ID NO: 3781000 - DNA, 25 bp, Homo sapien
ctcggatgctttcttagctctctgg

SEQ ID NO: 3781001 - DNA, 25 bp, Homo sapien
catctcggatgctttcttagctctc

SEQ ID NO: 3781002 - DNA, 25 bp, Homo sapien
ggctggccatctcggatgctttctt

SEQ ID NO: 3781003 - DNA, 25 bp, Homo sapien
ccctttaatttcagtctccagatct

SEQ ID NO: 3781004 - DNA, 25 bp, Homo sapien
tccctttaattattgactccaggtc

SEQ ID NO: 3781005 - DNA, 25 bp, Homo sapien
tcttggcatgctgcatttcaagggt

SEQ ID NO: 3781006 - DNA, 25 bp, Homo sapien
actcgctatctctgcagccttcttg

SEQ ID NO: 3781007 - DNA, 25 bp, Homo sapien
gcatttcaagggtgtcagtgccagc

SEQ ID NO: 3781008 - DNA, 25 bp, Homo sapien
tcgctttgctctttggatatcaaga

SEQ ID NO: 3781009 - DNA, 25 bp, Homo sapien
ccatttcagaggctcgctttgctct

SEQ ID NO: 3781010 - DNA, 25 bp, Homo sapien
ttgccatttcagaggctcgctttgc

SEQ ID NO: 3781011 - DNA, 25 bp, Homo sapien
ttgctctttggatatcaagaacttc

SEQ ID NO: 3781012 - DNA, 25 bp, Homo sapien
tcttgtctaaatccagtgatgacct

SEQ ID NO: 3781013 - DNA, 25 bp, Homo sapien
aattctggagtcttgtctaaatcca

SEQ ID NO: 3781014 - DNA, 25 bp, Homo sapien
tctggagtcttgtctaaatccagtg

SEQ ID NO: 3781015 - DNA, 25 bp, Homo sapien
gagtcttgtctaaatccagtgatga

SEQ ID NO: 3781016 - DNA, 25 bp, Homo sapien
atgatggtgtctcaacaaattcaag

SEQ ID NO: 3781017 - DNA, 25 bp, Homo sapien
ttgaagcttgatatgatggtgtctc

SEQ ID NO: 3781018 - DNA, 25 bp, Homo sapien
aacaaattcaagcattggctttccc

SEQ ID NO: 3781019 - DNA, 25 bp, Homo sapien
gcttgatatgatggtgtctcaacaa

SEQ ID NO: 3781020 - DNA, 25 bp, Homo sapien
aagaaaagcatatacaaatcgaaag

SEQ ID NO: 3781021 - DNA, 25 bp, Homo sapien
agaaaagcatatacaaatcgaaagt

SEQ ID NO: 3781022 - DNA, 25 bp, Homo sapien
gaaaagcatatacaaatcgaaagtc

SEQ ID NO: 3781023 - DNA, 25 bp, Homo sapien
ctgactttggaggacggcattgcct

SEQ ID NO: 3781024 - DNA, 25 bp, Homo sapien
gactttggaggacggcattgccttt

SEQ ID NO: 3781025 - DNA, 25 bp, Homo sapien
gacggcattgcctttatggtgcaga

SEQ ID NO: 3781026 - DNA, 25 bp, Homo sapien
tggaggacggcattgcctttatggt

SEQ ID NO: 3781027 - DNA, 25 bp, Homo sapien
tttcctcaaagagctttttatattc

SEQ ID NO: 3781028 - DNA, 25 bp, Homo sapien
tcctcaaagagctttttatattctc

SEQ ID NO: 3781029 - DNA, 25 bp, Homo sapien
tgttttcctcaaagagctttttata

SEQ ID NO: 3781030 - DNA, 25 bp, Homo sapien
cctcaaagagctttttatattctcg

SEQ ID NO: 3781031 - DNA, 25 bp, Homo sapien
aacaaatttgggagatctgaaactg

SEQ ID NO: 3781032 - DNA, 25 bp, Homo sapien
acaaatttgggagatctgaaactgg

SEQ ID NO: 3781033 - DNA, 25 bp, Homo sapien
caaatttgggagatctgaaactgga

SEQ ID NO: 3781034 - DNA, 25 bp, Homo sapien
gaagcactttcaagaggattgtaat

SEQ ID NO: 3781035 - DNA, 25 bp, Homo sapien
aagaagcactttcaagaggattgta

SEQ ID NO: 3781036 - DNA, 25 bp, Homo sapien
aagcactttcaagaggattgtaatg

SEQ ID NO: 3781037 - DNA, 25 bp, Homo sapien
aaagaagcactttcaagaggattgt

SEQ ID NO: 3781038 - DNA, 25 bp, Homo sapien
tccacggcatgttcaaaatctggtc

SEQ ID NO: 3781039 - DNA, 25 bp, Homo sapien
aaatctggtcttccaattacagcgg

SEQ ID NO: 3781040 - DNA, 25 bp, Homo sapien
gaaagtttagaagcttccacggcat

SEQ ID NO: 3781041 - DNA, 25 bp, Homo sapien
cttccaattacagcgggctctttat

SEQ ID NO: 3781042 - DNA, 25 bp, Homo sapien
tattccttgtcctttcttgtattct

SEQ ID NO: 3781043 - DNA, 25 bp, Homo sapien
ttccttgtcctttcttgtattctgc

SEQ ID NO: 3781044 - DNA, 25 bp, Homo sapien
attccttgtcctttcttgtattctg

SEQ ID NO: 3781045 - DNA, 25 bp, Homo sapien
tatgatcttagagatctgggttgcc

SEQ ID NO: 3781046 - DNA, 25 bp, Homo sapien
agttctgcactgtacgtgtgggtgt

SEQ ID NO: 3781047 - DNA, 25 bp, Homo sapien
cgtgtgggtgtcctgcacgtctttc

SEQ ID NO: 3781048 - DNA, 25 bp, Homo sapien
gcttatgatcttagagatctgggtt

SEQ ID NO: 3781049 - DNA, 25 bp, Homo sapien
gtgaatttcgtctcttcagtgtcaa

SEQ ID NO: 3781050 - DNA, 25 bp, Homo sapien
accccagatcaccagaccaccttct

SEQ ID NO: 3781051 - DNA, 25 bp, Homo sapien
aatactggaaactcgggatttctct

SEQ ID NO: 3781052 - DNA, 25 bp, Homo sapien
ctaacccgtggccttttgtgtgaat

SEQ ID NO: 3781053 - DNA, 25 bp, Homo sapien
tctggtgtttattgacctccatggc

SEQ ID NO: 3781054 - DNA, 25 bp, Homo sapien
ctccttcatgtgggcataatctgag

SEQ ID NO: 3781055 - DNA, 25 bp, Homo sapien
tattgacctccatggcatgtttaac

SEQ ID NO: 3781056 - DNA, 25 bp, Homo sapien
cctccatggcatgtttaacctcagg

SEQ ID NO: 3781057 - DNA, 25 bp, Homo sapien
caaaaacactgtcaattgtggctgg

SEQ ID NO: 3781058 - DNA, 25 bp, Homo sapien
ggagctgtgtaacttctcctgcaaa

SEQ ID NO: 3781059 - DNA, 25 bp, Homo sapien
agagaattagaaaggtcagctttaa

SEQ ID NO: 3781060 - DNA, 25 bp, Homo sapien
gctggcatccgcttataaagagaat

SEQ ID NO: 3781061 - DNA, 25 bp, Homo sapien
tagagaacgctttcaatgagacatg

SEQ ID NO: 3781062 - DNA, 25 bp, Homo sapien
tgttccagaaaatgcaagtcgttag

SEQ ID NO: 3781063 - DNA, 25 bp, Homo sapien
ggttcaagggaacacaatagattgc

SEQ ID NO: 3781064 - DNA, 25 bp, Homo sapien
tctgcacgggagaatggaacatagc

SEQ ID NO: 3781065 - DNA, 25 bp, Homo sapien
atggtttagcataggactgtcagtc

SEQ ID NO: 3781066 - DNA, 25 bp, Homo sapien
tttttacatggtttagcataggact

SEQ ID NO: 3781067 - DNA, 25 bp, Homo sapien
ttacatggtttagcataggactgtc

SEQ ID NO: 3781068 - DNA, 25 bp, Homo sapien
agtcacaaatgtacacttatccttg

SEQ ID NO: 3781069 - DNA, 25 bp, Homo sapien
atgagttccgtgcattttctggcca

SEQ ID NO: 3781070 - DNA, 25 bp, Homo sapien
gccaattccatgcttaagtcttcaa

SEQ ID NO: 3781071 - DNA, 25 bp, Homo sapien
atcgctaatgagttccgtgcatttt

SEQ ID NO: 3781072 - DNA, 25 bp, Homo sapien
taagtcttcaataacaggcttatag

SEQ ID NO: 3781073 - DNA, 25 bp, Homo sapien
atatcctcaaatacagggaccctca

SEQ ID NO: 3781074 - DNA, 25 bp, Homo sapien
taaaatttactcatgtggcgtcctt

SEQ ID NO: 3781075 - DNA, 25 bp, Homo sapien
agaaaaggatcccagaggtctacca

SEQ ID NO: 3781076 - DNA, 25 bp, Homo sapien
cagtgcccttgagatgctgacgtct

SEQ ID NO: 3781077 - DNA, 25 bp, Homo sapien
tctctggtgctctggcagaaatgcc

SEQ ID NO: 3781078 - DNA, 25 bp, Homo sapien
aggcttgcagtgcagttatttctca

SEQ ID NO: 3781079 - DNA, 25 bp, Homo sapien
ggcttgcagtgcagttatttctcat

SEQ ID NO: 3781080 - DNA, 25 bp, Homo sapien
catcacgtaatatgttcttagggac

SEQ ID NO: 3781081 - DNA, 25 bp, Homo sapien
gaaatcaatacacctaaagccctct

SEQ ID NO: 3781082 - DNA, 25 bp, Homo sapien
aaacaccacgtgcaatgtgaacaca

SEQ ID NO: 3781083 - DNA, 25 bp, Homo sapien
gaatttcaagccaaagggatcctta

SEQ ID NO: 3781084 - DNA, 25 bp, Homo sapien
tagatgcctctaagatattggacac

SEQ ID NO: 3781085 - DNA, 25 bp, Homo sapien
tctgggtggcactcttaataattta

SEQ ID NO: 3781086 - DNA, 25 bp, Homo sapien
tttctgggtggcactcttaataatt

SEQ ID NO: 3781087 - DNA, 25 bp, Homo sapien
ttctgggtggcactcttaataattt

SEQ ID NO: 3781088 - DNA, 25 bp, Homo sapien
taggcttagggaggaacatactgag

SEQ ID NO: 3781089 - DNA, 25 bp, Homo sapien
ggcactgccgatccttcacattgaa

SEQ ID NO: 3781090 - DNA, 25 bp, Homo sapien
gccacaggcaattcctagagtaagt

SEQ ID NO: 3781091 - DNA, 25 bp, Homo sapien
catgccctgctgtaaattgttttga

SEQ ID NO: 3781092 - DNA, 25 bp, Homo sapien
tatttatcagggacaggaacctttc

SEQ ID NO: 3781093 - DNA, 25 bp, Homo sapien
acactgcacttgaggagaggaaaca

SEQ ID NO: 3781094 - DNA, 25 bp, Homo sapien
gagctaaatgctgggtaaattcggg

SEQ ID NO: 3781095 - DNA, 25 bp, Homo sapien
cgggtgggtcgctattattcaacta

SEQ ID NO: 3781096 - DNA, 25 bp, Homo sapien
ccacgcctggcttgatttaactttc

SEQ ID NO: 3781097 - DNA, 25 bp, Homo sapien
taggtataaaatgcgtgcccatctg

SEQ ID NO: 3781098 - DNA, 25 bp, Homo sapien
tctgaagttcctcaaggcaataggc

SEQ ID NO: 3781099 - DNA, 25 bp, Homo sapien
tcctagggaatgaactcagactatt

SEQ ID NO: 3781100 - DNA, 25 bp, Homo sapien
tgaggatgaacatttctggtaaaat

SEQ ID NO: 3781101 - DNA, 25 bp, Homo sapien
gagttagaatccaagctccaggcca

SEQ ID NO: 3781102 - DNA, 25 bp, Homo sapien
aaaatgatatatgcatgacacaatg

SEQ ID NO: 3781103 - DNA, 25 bp, Homo sapien
acacacaggagttagaatccaagct

SEQ ID NO: 3781104 - DNA, 25 bp, Homo sapien
tgtgtgctcctgaaacattaaccga

SEQ ID NO: 3781105 - DNA, 25 bp, Homo sapien
caaacgtcatccaagaaaagggaga

SEQ ID NO: 3781106 - DNA, 25 bp, Homo sapien
taaacagtccagagatagacccatg

SEQ ID NO: 3781107 - DNA, 25 bp, Homo sapien
gacccaagtaacacaattctggagg

SEQ ID NO: 3781108 - DNA, 25 bp, Homo sapien
ggaacatctaaccaatcgacatctg

SEQ ID NO: 3781109 - DNA, 25 bp, Homo sapien
tcttttaccacacaggagcatggag

SEQ ID NO: 3781110 - DNA, 25 bp, Homo sapien
tcgacatctgctgtgtggacagtca

SEQ ID NO: 3781111 - DNA, 25 bp, Homo sapien
cctagaatgatgctaactggaaaac

SEQ ID NO: 3781112 - DNA, 25 bp, Homo sapien
tcaatcgtggaaaatcagtactgtt

SEQ ID NO: 3781113 - DNA, 25 bp, Homo sapien
tccagtcaatcgtggaaaatcagta

SEQ ID NO: 3781114 - DNA, 25 bp, Homo sapien
ctttactccagtcaatcgtggaaaa

SEQ ID NO: 3781115 - DNA, 25 bp, Homo sapien
tcgtggaaaatcagtactgtttagg

SEQ ID NO: 3781116 - DNA, 25 bp, Homo sapien
agaatcattataggcccaacttcca

SEQ ID NO: 3781117 - DNA, 25 bp, Homo sapien
atacatgagaatcattataggccca

SEQ ID NO: 3781118 - DNA, 25 bp, Homo sapien
tcattataggcccaacttccactct

SEQ ID NO: 3781119 - DNA, 25 bp, Homo sapien
catgagaatcattataggcccaact

SEQ ID NO: 3781120 - DNA, 25 bp, Homo sapien
tatcacagttggagcgtgagcacac

SEQ ID NO: 3781121 - DNA, 25 bp, Homo sapien
caacctgagagcatgtctgagacta

SEQ ID NO: 3781122 - DNA, 25 bp, Homo sapien
tctgagactagctatcccaggcttg

SEQ ID NO: 3781123 - DNA, 25 bp, Homo sapien
ttggcattgcttcgacatacagaga

SEQ ID NO: 3781124 - DNA, 25 bp, Homo sapien
tctgtgttctgcattgacggctgtg

SEQ ID NO: 3781125 - DNA, 25 bp, Homo sapien
gctcctaagatagtgtcaagctcag

SEQ ID NO: 3781126 - DNA, 25 bp, Homo sapien
caagctcagaaaaggtaccttcaga

SEQ ID NO: 3781127 - DNA, 25 bp, Homo sapien
gacggctgtgcttagatcttgtacc

SEQ ID NO: 3781128 - DNA, 25 bp, Homo sapien
gaaatgccacttatcatcaaaggcc

SEQ ID NO: 3781129 - DNA, 25 bp, Homo sapien
ctttacagtcaaagccccagattct

SEQ ID NO: 3781130 - DNA, 25 bp, Homo sapien
caatgtcatgtccagacccaatgtt

SEQ ID NO: 3781131 - DNA, 25 bp, Homo sapien
taaaggtgtatacgtgtcaggtaac

SEQ ID NO: 3781132 - DNA, 25 bp, Homo sapien
tagaggtctcagctagcactaagcc

SEQ ID NO: 3781133 - DNA, 25 bp, Homo sapien
atgaaattcacacaaggccaggaga

SEQ ID NO: 3781134 - DNA, 25 bp, Homo sapien
taaatatggcagtgggctaggccct

SEQ ID NO: 3781135 - DNA, 25 bp, Homo sapien
ttgcaagagggcctcccaggctaga

SEQ ID NO: 3781136 - DNA, 25 bp, Homo sapien
ttacaaacagagaccaaatccctag

SEQ ID NO: 3781137 - DNA, 25 bp, Homo sapien
catgcatgagttgacccaattacat

SEQ ID NO: 3781138 - DNA, 25 bp, Homo sapien
gctaactcacaaaatctcagggaac

SEQ ID NO: 3781139 - DNA, 25 bp, Homo sapien
gacctaattgcctcatacacgataa

SEQ ID NO: 3781140 - DNA, 25 bp, Homo sapien
gagtcccttgaatgtctggcgatgg

SEQ ID NO: 3781141 - DNA, 25 bp, Homo sapien
cccttgaatgtctggcgatggttgt

SEQ ID NO: 3781142 - DNA, 25 bp, Homo sapien
atgtctggcgatggttgtgctttga

SEQ ID NO: 3781143 - DNA, 25 bp, Homo sapien
tagcctgagtcccttgaatgtctgg

SEQ ID NO: 3781144 - DNA, 25 bp, Homo sapien
tgttgtcattacagctacccagaaa

SEQ ID NO: 3781145 - DNA, 25 bp, Homo sapien
gaaaaggcaagttcacccactctca

SEQ ID NO: 3781146 - DNA, 25 bp, Homo sapien
acatgcagactgagtggtcatttcc

SEQ ID NO: 3781147 - DNA, 25 bp, Homo sapien
tatcccacacctcagtaacatgcag

SEQ ID NO: 3781148 - DNA, 25 bp, Homo sapien
tcatccagaaatgcacatcagagcc

SEQ ID NO: 3781149 - DNA, 25 bp, Homo sapien
agagccatcatgctattgaataaac

SEQ ID NO: 3781150 - DNA, 25 bp, Homo sapien
cagagccatcatgctattgaataaa

SEQ ID NO: 3781151 - DNA, 25 bp, Homo sapien
agaaatgcacatcagagccatcatg

SEQ ID NO: 3781152 - DNA, 25 bp, Homo sapien
tagctcaggagtgtccgtgacgatg

SEQ ID NO: 3781153 - DNA, 25 bp, Homo sapien
tctctgtagctcaggagtgtccgtg

SEQ ID NO: 3781154 - DNA, 25 bp, Homo sapien
gtgtccgtgacgatgctgaagcccc

SEQ ID NO: 3781155 - DNA, 25 bp, Homo sapien
caggagtgtccgtgacgatgctgaa

SEQ ID NO: 3781156 - DNA, 25 bp, Homo sapien
atctcccagcatgggtaaagatcca

SEQ ID NO: 3781157 - DNA, 25 bp, Homo sapien
ctccatctcccagcatgggtaaaga

SEQ ID NO: 3781158 - DNA, 25 bp, Homo sapien
ccatctcccagcatgggtaaagatc

SEQ ID NO: 3781159 - DNA, 25 bp, Homo sapien
tcccagcatgggtaaagatccacat

SEQ ID NO: 3781160 - DNA, 25 bp, Homo sapien
cacaaagtgccggaactataagcat

SEQ ID NO: 3781161 - DNA, 25 bp, Homo sapien
tcacaaagtgccggaactataagca

SEQ ID NO: 3781162 - DNA, 25 bp, Homo sapien
ctcacaaagtgccggaactataagc

SEQ ID NO: 3781163 - DNA, 25 bp, Homo sapien
aatgtcattctgcttgggcccatga

SEQ ID NO: 3781164 - DNA, 25 bp, Homo sapien
cattgccaatgagccaggtggttcc

SEQ ID NO: 3781165 - DNA, 25 bp, Homo sapien
taacgaaacccacgtcaagatgagt

SEQ ID NO: 3781166 - DNA, 25 bp, Homo sapien
catccagtggacaatatgacaagcc

SEQ ID NO: 3781167 - DNA, 25 bp, Homo sapien
aaaggccgacctccatttcactgcc

SEQ ID NO: 3781168 - DNA, 25 bp, Homo sapien
ctttagatagaagccggaagtcagc

SEQ ID NO: 3781169 - DNA, 25 bp, Homo sapien
gtcagcacgtcacattcacttaaga

SEQ ID NO: 3781170 - DNA, 25 bp, Homo sapien
tcactgccctttagatagaagccgg

SEQ ID NO: 3781171 - DNA, 25 bp, Homo sapien
tgtgaaggcaaagatccacatctgc

SEQ ID NO: 3781172 - DNA, 25 bp, Homo sapien
agaaattgcatcaggtacaaactta

SEQ ID NO: 3781173 - DNA, 25 bp, Homo sapien
ggttgatcactatcctagctcccat

SEQ ID NO: 3781174 - DNA, 25 bp, Homo sapien
aaattgcatcaggtacaaacttagc

SEQ ID NO: 3781175 - DNA, 25 bp, Homo sapien
aacttagcaggttgatcactatcct

SEQ ID NO: 3781176 - DNA, 25 bp, Homo sapien
gtagtacctggtcaaacttgatgtg

SEQ ID NO: 3781177 - DNA, 25 bp, Homo sapien
aacgtagtacctggtcaaacttgat

SEQ ID NO: 3781178 - DNA, 25 bp, Homo sapien
agtacctggtcaaacttgatgtgtc

SEQ ID NO: 3781179 - DNA, 25 bp, Homo sapien
cgtagtacctggtcaaacttgatgt

SEQ ID NO: 3781180 - DNA, 25 bp, Homo sapien
ggtccttaccctgacgtctgcagag

SEQ ID NO: 3781181 - DNA, 25 bp, Homo sapien
taccattcttgtggactggaaacct

SEQ ID NO: 3781182 - DNA, 25 bp, Homo sapien
caggagtaaatcttttggagcaggg

SEQ ID NO: 3781183 - DNA, 25 bp, Homo sapien
ggcccagcaatagaaccccacttat

SEQ ID NO: 3781184 - DNA, 25 bp, Homo sapien
gacctcattgcccaggtagtgaaca

SEQ ID NO: 3781185 - DNA, 25 bp, Homo sapien
acatagtacccaatactttgtcaac

SEQ ID NO: 3781186 - DNA, 25 bp, Homo sapien
tttaatgacctcattgcccaggtag

SEQ ID NO: 3781187 - DNA, 25 bp, Homo sapien
aatgacctcattgcccaggtagtga

SEQ ID NO: 3781188 - DNA, 25 bp, Homo sapien
tgtcccatgctgcactatggtaggg

SEQ ID NO: 3781189 - DNA, 25 bp, Homo sapien
tacacagggttgcagaatgttgacc

SEQ ID NO: 3781190 - DNA, 25 bp, Homo sapien
gaaatagctacagagaggccctgag

SEQ ID NO: 3781191 - DNA, 25 bp, Homo sapien
gaatgttgaccttctgcaaagaaca

SEQ ID NO: 3781192 - DNA, 25 bp, Homo sapien
gaactgatttcctcgctctgttagg

SEQ ID NO: 3781193 - DNA, 25 bp, Homo sapien
tagcaatctgatgtaccctttctct

SEQ ID NO: 3781194 - DNA, 25 bp, Homo sapien
acccaccacaccatatataagcaaa

SEQ ID NO: 3781195 - DNA, 25 bp, Homo sapien
tttgtggattgagctaaaaacacac

SEQ ID NO: 3781196 - DNA, 25 bp, Homo sapien
tcataaaatccctagaccacagctc

SEQ ID NO: 3781197 - DNA, 25 bp, Homo sapien
gcagtgtttccctatcctaattaag

SEQ ID NO: 3781198 - DNA, 25 bp, Homo sapien
ccatgcagctgacacctttggaggg

SEQ ID NO: 3781199 - DNA, 25 bp, Homo sapien
ttgatcctgcctcctaacttcttca

SEQ ID NO: 3781200 - DNA, 25 bp, Homo sapien
tagacatagatacgcaaacgcaggc

SEQ ID NO: 3781201 - DNA, 25 bp, Homo sapien
tacaaacggtgctgtcatagacatc

SEQ ID NO: 3781202 - DNA, 25 bp, Homo sapien
caaggcatgtggctatagagctcta

SEQ ID NO: 3781203 - DNA, 25 bp, Homo sapien
ttcacaggcatacctccaaggcatg

SEQ ID NO: 3781204 - DNA, 25 bp, Homo sapien
ggagccacccttctagagtctgatg

SEQ ID NO: 3781205 - DNA, 25 bp, Homo sapien
cagccactcctgctaaagcttgaga

SEQ ID NO: 3781206 - DNA, 25 bp, Homo sapien
cactgatggagttcactataccctg

SEQ ID NO: 3781207 - DNA, 25 bp, Homo sapien
gacccgaaaagcattaggagccacc

SEQ ID NO: 3781208 - DNA, 25 bp, Homo sapien
tacagataagttacaggaagtatgg

SEQ ID NO: 3781209 - DNA, 25 bp, Homo sapien
gaggagaaagccgaatgaaatacag

SEQ ID NO: 3781210 - DNA, 25 bp, Homo sapien
ttggcatctgatccatggaaagagg

SEQ ID NO: 3781211 - DNA, 25 bp, Homo sapien
gaagcaatcaaaccattttcgatcc

SEQ ID NO: 3781212 - DNA, 25 bp, Homo sapien
tccctagtttcactttacacagtca

SEQ ID NO: 3781213 - DNA, 25 bp, Homo sapien
ttacacagtcaactgtgggctgaaa

SEQ ID NO: 3781214 - DNA, 25 bp, Homo sapien
ctcttatccctagtttcactttaca

SEQ ID NO: 3781215 - DNA, 25 bp, Homo sapien
actttacacagtcaactgtgggctg

SEQ ID NO: 3781216 - DNA, 25 bp, Homo sapien
ccccgcaggtgaactataatgttgc

SEQ ID NO: 3781217 - DNA, 25 bp, Homo sapien
gcaagcagtaaaagcctgatgcccc

SEQ ID NO: 3781218 - DNA, 25 bp, Homo sapien
tgtttctaagtcagggctttggatc

SEQ ID NO: 3781219 - DNA, 25 bp, Homo sapien
tagggatcacctaatttacaaagag

SEQ ID NO: 3781220 - DNA, 25 bp, Homo sapien
gccaattgtggtgttctcatctttg

SEQ ID NO: 3781221 - DNA, 25 bp, Homo sapien
aatatgaacaaagtgacaggaggaa

SEQ ID NO: 3781222 - DNA, 25 bp, Homo sapien
tctaacatggttgaccgggagccaa

SEQ ID NO: 3781223 - DNA, 25 bp, Homo sapien
tttgttcatgctgtcaatgtgacat

SEQ ID NO: 3781224 - DNA, 25 bp, Homo sapien
tatctgccaccgtggtgaaggactg

SEQ ID NO: 3781225 - DNA, 25 bp, Homo sapien
gtatctgccaccgtggtgaaggact

SEQ ID NO: 3781226 - DNA, 25 bp, Homo sapien
tcactttgctgcttcaggcgaagat

SEQ ID NO: 3781227 - DNA, 25 bp, Homo sapien
gcttcaggcgaagattttcaggtgt

SEQ ID NO: 3781228 - DNA, 25 bp, Homo sapien
tattagacctttgtccaatgggtta

SEQ ID NO: 3781229 - DNA, 25 bp, Homo sapien
tgtccaatgggttacttgcataaat

SEQ ID NO: 3781230 - DNA, 25 bp, Homo sapien
ggttacttgcataaattttctccca

SEQ ID NO: 3781231 - DNA, 25 bp, Homo sapien
gacctttgtccaatgggttacttgc

SEQ ID NO: 3781232 - DNA, 25 bp, Homo sapien
tagaccgtgacatgtgggatgatcc

SEQ ID NO: 3781233 - DNA, 25 bp, Homo sapien
gggatgatccttttgactggcagag

SEQ ID NO: 3781234 - DNA, 25 bp, Homo sapien
acagctcagtacatgcccagatgca

SEQ ID NO: 3781235 - DNA, 25 bp, Homo sapien
aatgccctgacccagtaaatggagc

SEQ ID NO: 3781236 - DNA, 25 bp, Homo sapien
ctacagatgtcccatcaaaagcttg

SEQ ID NO: 3781237 - DNA, 25 bp, Homo sapien
tgtcccatcaaaagcttgcaaagcc

SEQ ID NO: 3781238 - DNA, 25 bp, Homo sapien
cagatgtcccatcaaaagcttgcaa

SEQ ID NO: 3781239 - DNA, 25 bp, Homo sapien
cccatcaaaagcttgcaaagccact

SEQ ID NO: 3781240 - DNA, 25 bp, Homo sapien
ccttgtcatttgcatgggcaatttc

SEQ ID NO: 3781241 - DNA, 25 bp, Homo sapien
tcaccaggaggaacatcctgcactg

SEQ ID NO: 3781242 - DNA, 25 bp, Homo sapien
aatgcaaagtgagcggttctccaag

SEQ ID NO: 3781243 - DNA, 25 bp, Homo sapien
ccctcgcacgctgtcctcaaagagt

SEQ ID NO: 3781244 - DNA, 25 bp, Homo sapien
tgcatttccgaatttcatcagtaaa

SEQ ID NO: 3781245 - DNA, 25 bp, Homo sapien
cacctggccctgatctgttaattta

SEQ ID NO: 3781246 - DNA, 25 bp, Homo sapien
taatcgtgaacaccagcttactcca

SEQ ID NO: 3781247 - DNA, 25 bp, Homo sapien
ttaaagccagacttatttttgcatt

SEQ ID NO: 3781248 - DNA, 25 bp, Homo sapien
tactgcgttgattaaaactctttcc

SEQ ID NO: 3781249 - DNA, 25 bp, Homo sapien
ggaatgacctcttgaatatacaacg

SEQ ID NO: 3781250 - DNA, 25 bp, Homo sapien
tcagtcatgtaacattaggaaaatt

SEQ ID NO: 3781251 - DNA, 25 bp, Homo sapien
cagctggaaaagcataatgctctgt

SEQ ID NO: 3781252 - DNA, 25 bp, Homo sapien
taaacactttaaattgagccttcaa

SEQ ID NO: 3781253 - DNA, 25 bp, Homo sapien
aaatacataaatgctggagagtgct

SEQ ID NO: 3781254 - DNA, 25 bp, Homo sapien
gtgaaatacataaatgctggagagt

SEQ ID NO: 3781255 - DNA, 25 bp, Homo sapien
gccttcaaactgtaattcattaaga

SEQ ID NO: 3781256 - DNA, 25 bp, Homo sapien
ggtgcacaccaccaagctcggctaa

SEQ ID NO: 3781257 - DNA, 25 bp, Homo sapien
tataggcgtgagccactgcacctgg

SEQ ID NO: 3781258 - DNA, 25 bp, Homo sapien
aggtgcacaccaccaagctcggcta

SEQ ID NO: 3781259 - DNA, 25 bp, Homo sapien
aggcgtgagccactgcacctggcca

SEQ ID NO: 3781260 - DNA, 25 bp, Homo sapien
taaggatgtacccaaagaatgatgg

SEQ ID NO: 3781261 - DNA, 25 bp, Homo sapien
gaacatcaccaggtttggtgccacc

SEQ ID NO: 3781262 - DNA, 25 bp, Homo sapien
ggaaacttgctcataagggctccca

SEQ ID NO: 3781263 - DNA, 25 bp, Homo sapien
cgaaactgaggaacttaactgggct

SEQ ID NO: 3781264 - DNA, 25 bp, Homo sapien
catgaatggtagtgccagggtccac

SEQ ID NO: 3781265 - DNA, 25 bp, Homo sapien
cattggacgcattttatcataggac

SEQ ID NO: 3781266 - DNA, 25 bp, Homo sapien
ccatcaagtcaagggaaccagacgc

SEQ ID NO: 3781267 - DNA, 25 bp, Homo sapien
tcttgccaacaagctgaaacaggag

SEQ ID NO: 3781268 - DNA, 25 bp, Homo sapien
agaagccagcccaagatattacagt

SEQ ID NO: 3781269 - DNA, 25 bp, Homo sapien
taggtttgccaataacagagttgca

SEQ ID NO: 3781270 - DNA, 25 bp, Homo sapien
ctgctctacaaagggccgtaactgc

SEQ ID NO: 3781271 - DNA, 25 bp, Homo sapien
tgcacactcctctgttgaacaaggc

SEQ ID NO: 3781272 - DNA, 25 bp, Homo sapien
gggctgacctctgtgcaatcaacag

SEQ ID NO: 3781273 - DNA, 25 bp, Homo sapien
gataaagagtgcaaagcatggctct

SEQ ID NO: 3781274 - DNA, 25 bp, Homo sapien
gcaacacttttgcaccctgtgtaaa

SEQ ID NO: 3781275 - DNA, 25 bp, Homo sapien
ggatgaggccgtccagtttcccgtg

SEQ ID NO: 3781276 - DNA, 25 bp, Homo sapien
actcttgataaggtcagccttttcc

SEQ ID NO: 3781277 - DNA, 25 bp, Homo sapien
ttttcaactcttgataaggtcagcc

SEQ ID NO: 3781278 - DNA, 25 bp, Homo sapien
tttactttgtatctacttaatgact

SEQ ID NO: 3781279 - DNA, 25 bp, Homo sapien
tactttgtatctacttaatgactaa

SEQ ID NO: 3781280 - DNA, 25 bp, Homo sapien
tgagagaatcaagtggtttttgctg

SEQ ID NO: 3781281 - DNA, 25 bp, Homo sapien
ttctacagattgaaatagttttgga

SEQ ID NO: 3781282 - DNA, 25 bp, Homo sapien
cagattgaaatagttttggaaggaa

SEQ ID NO: 3781283 - DNA, 25 bp, Homo sapien
tacagattgaaatagttttggaagg

SEQ ID NO: 3781284 - DNA, 25 bp, Homo sapien
gtggttcagggcctgtacatattca

SEQ ID NO: 3781285 - DNA, 25 bp, Homo sapien
tgtggttcagggcctgtacatattc

SEQ ID NO: 3781286 - DNA, 25 bp, Homo sapien
tgtacatattcatagacagtattta

SEQ ID NO: 3781287 - DNA, 25 bp, Homo sapien
cctgtacatattcatagacagtatt

SEQ ID NO: 3781288 - DNA, 25 bp, Homo sapien
tcttttaattgacagagtttagacc

SEQ ID NO: 3781289 - DNA, 25 bp, Homo sapien
tatatcgtcatgctatttgttttct

SEQ ID NO: 3781290 - DNA, 25 bp, Homo sapien
cttttaattgacagagtttagacca

SEQ ID NO: 3781291 - DNA, 25 bp, Homo sapien
ttgagtttaaatatatcgtcatgct

SEQ ID NO: 3781292 - DNA, 25 bp, Homo sapien
taccagtaatttctctgaggccaat

SEQ ID NO: 3781293 - DNA, 25 bp, Homo sapien
ggcaacatcactaacaaagattagg

SEQ ID NO: 3781294 - DNA, 25 bp, Homo sapien
tgtgttcactggcaccaatctatga

SEQ ID NO: 3781295 - DNA, 25 bp, Homo sapien
caatcctcacctgagatacgtgtgt

SEQ ID NO: 3781296 - DNA, 25 bp, Homo sapien
taaagaccctaatgcaatgaaacca

SEQ ID NO: 3781297 - DNA, 25 bp, Homo sapien
cacatcaggattcaaagtttcaaag

SEQ ID NO: 3781298 - DNA, 25 bp, Homo sapien
gaaccattataatcaggcctgggcc

SEQ ID NO: 3781299 - DNA, 25 bp, Homo sapien
ggctcattagggtcacttttaacaa

SEQ ID NO: 3781300 - DNA, 25 bp, Homo sapien
gactgaagctgactctccgcagcca

SEQ ID NO: 3781301 - DNA, 25 bp, Homo sapien
tggttataccttctggtcccagaga

SEQ ID NO: 3781302 - DNA, 25 bp, Homo sapien
ggatgggcggcttgtagagactgaa

SEQ ID NO: 3781303 - DNA, 25 bp, Homo sapien
cagcaccttcttagatacgttgaac

SEQ ID NO: 3781304 - DNA, 25 bp, Homo sapien
aggaacaacaattctcttagcactc

SEQ ID NO: 3781305 - DNA, 25 bp, Homo sapien
aatataacccactattcctaagcat

SEQ ID NO: 3781306 - DNA, 25 bp, Homo sapien
gaacaacaattctcttagcactctc

SEQ ID NO: 3781307 - DNA, 25 bp, Homo sapien
tataacccactattcctaagcattc

SEQ ID NO: 3781308 - DNA, 25 bp, Homo sapien
ctcttacagctgcacgtgtcaggca

SEQ ID NO: 3781309 - DNA, 25 bp, Homo sapien
tgtcaggcagcatcatttacatcac

SEQ ID NO: 3781310 - DNA, 25 bp, Homo sapien
tcatgcagagggtactccgttcacc

SEQ ID NO: 3781311 - DNA, 25 bp, Homo sapien
catttacatcaccacgtggccctgt

SEQ ID NO: 3781312 - DNA, 25 bp, Homo sapien
tctctcatataagctagaggacagc

SEQ ID NO: 3781313 - DNA, 25 bp, Homo sapien
tacagaagctcttagcaaccgttgc

SEQ ID NO: 3781314 - DNA, 25 bp, Homo sapien
gattagtaaagcacaaacactctct

SEQ ID NO: 3781315 - DNA, 25 bp, Homo sapien
aaagaattgcaatgccctggtaaag

SEQ ID NO: 3781316 - DNA, 25 bp, Homo sapien
cagatatttatcaccatgccaagca

SEQ ID NO: 3781317 - DNA, 25 bp, Homo sapien
agcattcggacttgaggctgcaggc

SEQ ID NO: 3781318 - DNA, 25 bp, Homo sapien
gagtaagaagaatccgcctccacgg

SEQ ID NO: 3781319 - DNA, 25 bp, Homo sapien
tccacggaaggaacaagagaacatc

SEQ ID NO: 3781320 - DNA, 25 bp, Homo sapien
taaagtatgtggactttggtccgtg

SEQ ID NO: 3781321 - DNA, 25 bp, Homo sapien
ttcatggctcatcactcccaggacg

SEQ ID NO: 3781322 - DNA, 25 bp, Homo sapien
tggtccgtggttcccaaagcagctt

SEQ ID NO: 3781323 - DNA, 25 bp, Homo sapien
cagctttggaatagcatcagtgatg

SEQ ID NO: 3781324 - DNA, 25 bp, Homo sapien
acagacctcggaatgtgacctattt

SEQ ID NO: 3781325 - DNA, 25 bp, Homo sapien
gaattgtatatgtattggagtccaa

SEQ ID NO: 3781326 - DNA, 25 bp, Homo sapien
gacttttcttagtgaacctgttgga

SEQ ID NO: 3781327 - DNA, 25 bp, Homo sapien
cctttcttctctagcatcaaaaaca

SEQ ID NO: 3781328 - DNA, 25 bp, Homo sapien
cactgctaagggacatgattccagt

SEQ ID NO: 3781329 - DNA, 25 bp, Homo sapien
gttccaggaccacatctacagggtt

SEQ ID NO: 3781330 - DNA, 25 bp, Homo sapien
gatgtctgactactggctctcctaa

SEQ ID NO: 3781331 - DNA, 25 bp, Homo sapien
aaagtaactcaacgtcagccccaga

SEQ ID NO: 3781332 - DNA, 25 bp, Homo sapien
tttgccaataggacagactcgtgta

SEQ ID NO: 3781333 - DNA, 25 bp, Homo sapien
tgatggcgacagtgtgaagcatgcc

SEQ ID NO: 3781334 - DNA, 25 bp, Homo sapien
gctcaggatgtaaagaggcaaccca

SEQ ID NO: 3781335 - DNA, 25 bp, Homo sapien
aagaatccgcccataattagtgacc

SEQ ID NO: 3781336 - DNA, 25 bp, Homo sapien
caggctacggcctatcctagtgttg

SEQ ID NO: 3781337 - DNA, 25 bp, Homo sapien
gggtagcagcccatagtgcgaaaaa

SEQ ID NO: 3781338 - DNA, 25 bp, Homo sapien
gaaactgatgcttggcaatcgagag

SEQ ID NO: 3781339 - DNA, 25 bp, Homo sapien
tcgagagacttgctcagtaggccag

SEQ ID NO: 3781340 - DNA, 25 bp, Homo sapien
acatctcaacgtttctgggcactca

SEQ ID NO: 3781341 - DNA, 25 bp, Homo sapien
tttgagcccagaaccctcttagcag

SEQ ID NO: 3781342 - DNA, 25 bp, Homo sapien
tgcaccacgtgaattagagccaatg

SEQ ID NO: 3781343 - DNA, 25 bp, Homo sapien
cattgacccggagaaattatggcgg

SEQ ID NO: 3781344 - DNA, 25 bp, Homo sapien
cacggtgtaggaggatcgaagacat

SEQ ID NO: 3781345 - DNA, 25 bp, Homo sapien
tggccctgccctgtaaagaatcctg

SEQ ID NO: 3781346 - DNA, 25 bp, Homo sapien
tattccaataggaagcacggtgtag

SEQ ID NO: 3781347 - DNA, 25 bp, Homo sapien
cagggccacccaaaggcattgttat

SEQ ID NO: 3781348 - DNA, 25 bp, Homo sapien
gaagatgcatagacgttacccaaca

SEQ ID NO: 3781349 - DNA, 25 bp, Homo sapien
tgatcgtcaacaaagtacatggccc

SEQ ID NO: 3781350 - DNA, 25 bp, Homo sapien
gcaatttcattacccgccacatggg

SEQ ID NO: 3781351 - DNA, 25 bp, Homo sapien
tataaacaggtaactggcccctgcc

SEQ ID NO: 3781352 - DNA, 25 bp, Homo sapien
ttgtagttgttcatgttgagtgcca

SEQ ID NO: 3781353 - DNA, 25 bp, Homo sapien
gagtgccatcttgcagacctcacaa

SEQ ID NO: 3781354 - DNA, 25 bp, Homo sapien
gcagacctcacaatggaaacatcct

SEQ ID NO: 3781355 - DNA, 25 bp, Homo sapien
tgttcatgttgagtgccatcttgca

SEQ ID NO: 3781356 - DNA, 25 bp, Homo sapien
taaaatgctggacctcggactctgc

SEQ ID NO: 3781357 - DNA, 25 bp, Homo sapien
tgcacgagagctatgtaagtacccc

SEQ ID NO: 3781358 - DNA, 25 bp, Homo sapien
actctgcccgggatgactgtcagga

SEQ ID NO: 3781359 - DNA, 25 bp, Homo sapien
tgttcacccgaagtcaggcaagctg

SEQ ID NO: 3781360 - DNA, 25 bp, Homo sapien
cttatccaggcagttgactttctcg

SEQ ID NO: 3781361 - DNA, 25 bp, Homo sapien
ggtgggatacacgacttttccgcaa

SEQ ID NO: 3781362 - DNA, 25 bp, Homo sapien
tacacgacttttccgcaacgggcgc

SEQ ID NO: 3781363 - DNA, 25 bp, Homo sapien
tgactttctcggtgggatacacgac

SEQ ID NO: 3781364 - DNA, 25 bp, Homo sapien
agccgctgtgacatcccccggcgag

SEQ ID NO: 3781365 - DNA, 25 bp, Homo sapien
ccaggagccgctgtgacatcccccg

SEQ ID NO: 3781366 - DNA, 25 bp, Homo sapien
aggagccgctgtgacatcccccggc

SEQ ID NO: 3781367 - DNA, 25 bp, Homo sapien
ccgcaccgcctcctggcaggcggga

SEQ ID NO: 3781368 - DNA, 25 bp, Homo sapien
ctctcgggctcgcaggcgctgggtc

SEQ ID NO: 3781369 - DNA, 25 bp, Homo sapien
tgcgtcgctcgcactccaggtacgg

SEQ ID NO: 3781370 - DNA, 25 bp, Homo sapien
gccgggccacgggtgagtgcacggg

SEQ ID NO: 3781371 - DNA, 25 bp, Homo sapien
caggtacgggtgactcacacagtca

SEQ ID NO: 3781372 - DNA, 25 bp, Homo sapien
ggtcatccaaccctatctgcttaag

SEQ ID NO: 3781373 - DNA, 25 bp, Homo sapien
ccgggaatccggtccagacttctgc

SEQ ID NO: 3781374 - DNA, 25 bp, Homo sapien
tgaaacagctcatccgggaatccgg

SEQ ID NO: 3781375 - DNA, 25 bp, Homo sapien
ggtgtgccaaatttgctaacagggc

SEQ ID NO: 3781376 - DNA, 25 bp, Homo sapien
ctgcggattccagacgcagtctgat

SEQ ID NO: 3781377 - DNA, 25 bp, Homo sapien
tctgatgggcttctttattctatca

SEQ ID NO: 3781378 - DNA, 25 bp, Homo sapien
gattccagacgcagtctgatgggct

SEQ ID NO: 3781379 - DNA, 25 bp, Homo sapien
gcggattccagacgcagtctgatgg

SEQ ID NO: 3781380 - DNA, 25 bp, Homo sapien
ataaagagataggagtgtcagcggc

SEQ ID NO: 3781381 - DNA, 25 bp, Homo sapien
aaagagataggagtgtcagcggcaa

SEQ ID NO: 3781382 - DNA, 25 bp, Homo sapien
taaagagataggagtgtcagcggca

SEQ ID NO: 3781383 - DNA, 25 bp, Homo sapien
tgtcctgctgagacgtgcacactcc

SEQ ID NO: 3781384 - DNA, 25 bp, Homo sapien
tgttgccatggttcactcagaccag

SEQ ID NO: 3781385 - DNA, 25 bp, Homo sapien
cgtgtcctgctgagacgtgcacact

SEQ ID NO: 3781386 - DNA, 25 bp, Homo sapien
gcgtgtcctgctgagacgtgcacac

SEQ ID NO: 3781387 - DNA, 25 bp, Homo sapien
cctggggggactcttttcagatgcc

SEQ ID NO: 3781388 - DNA, 25 bp, Homo sapien
gagtcccagggtcgaatcttaagag

SEQ ID NO: 3781389 - DNA, 25 bp, Homo sapien
tcttaagaggatgtcctgagaagcc

SEQ ID NO: 3781390 - DNA, 25 bp, Homo sapien
cttggtttgcccgtggatccacacg

SEQ ID NO: 3781391 - DNA, 25 bp, Homo sapien
caatttcagcaagggagaaaatccc

SEQ ID NO: 3781392 - DNA, 25 bp, Homo sapien
catctctcaatttcagcaagggaga

SEQ ID NO: 3781393 - DNA, 25 bp, Homo sapien
tctctcaatttcagcaagggagaaa

SEQ ID NO: 3781394 - DNA, 25 bp, Homo sapien
ctcaatttcagcaagggagaaaatc

SEQ ID NO: 3781395 - DNA, 25 bp, Homo sapien
gacagttgagcgtgcattttttgct

SEQ ID NO: 3781396 - DNA, 25 bp, Homo sapien
tggacagttgagcgtgcattttttg

SEQ ID NO: 3781397 - DNA, 25 bp, Homo sapien
tccctggacagttgagcgtgcattt

SEQ ID NO: 3781398 - DNA, 25 bp, Homo sapien
cctggacagttgagcgtgcattttt

SEQ ID NO: 3781399 - DNA, 25 bp, Homo sapien
tatcactggaattgcacgatcatct

SEQ ID NO: 3781400 - DNA, 25 bp, Homo sapien
taaaagttacatgcttcccaagatc

SEQ ID NO: 3781401 - DNA, 25 bp, Homo sapien
gaaaactgttcaagccttaagcaac

SEQ ID NO: 3781402 - DNA, 25 bp, Homo sapien
gataggcaaaccagaatatcactgg

SEQ ID NO: 3781403 - DNA, 25 bp, Homo sapien
catgggtctttcctgtctaagaagc

SEQ ID NO: 3781404 - DNA, 25 bp, Homo sapien
ccagggctccgttgacatgggtctt

SEQ ID NO: 3781405 - DNA, 25 bp, Homo sapien
tatttgccaagctctgcgtctggaa

SEQ ID NO: 3781406 - DNA, 25 bp, Homo sapien
caaggaagacccctgacatgaatag

SEQ ID NO: 3781407 - DNA, 25 bp, Homo sapien
agtttggtagtttctagagcaccca

SEQ ID NO: 3781408 - DNA, 25 bp, Homo sapien
tgtatttcttcatcaggactttggg

SEQ ID NO: 3781409 - DNA, 25 bp, Homo sapien
tgtgtatttcttcatcaggactttg

SEQ ID NO: 3781410 - DNA, 25 bp, Homo sapien
tctaaagaacattccagctttgaag

SEQ ID NO: 3781411 - DNA, 25 bp, Homo sapien
tcgcagcctctaaccacactgctag

SEQ ID NO: 3781412 - DNA, 25 bp, Homo sapien
ctgaggccaaggcattgttctgaca

SEQ ID NO: 3781413 - DNA, 25 bp, Homo sapien
caaggcattgttctgacaactgccc

SEQ ID NO: 3781414 - DNA, 25 bp, Homo sapien
ttgttctgacaactgcccttgactc

SEQ ID NO: 3781415 - DNA, 25 bp, Homo sapien
tgtttcgtgtgtccctggtctcctg

SEQ ID NO: 3781416 - DNA, 25 bp, Homo sapien
catgccagtgtgacccagggcagag

SEQ ID NO: 3781417 - DNA, 25 bp, Homo sapien
gcctcaatgtcctccaactcagaca

SEQ ID NO: 3781418 - DNA, 25 bp, Homo sapien
ctgttctgtttcgtgtgtccctggt

SEQ ID NO: 3781419 - DNA, 25 bp, Homo sapien
gcctccatgcgggtgcccctcccta

SEQ ID NO: 3781420 - DNA, 25 bp, Homo sapien
accgcctccatgcgggtgcccctcc

SEQ ID NO: 3781421 - DNA, 25 bp, Homo sapien
cgcctccatgcgggtgcccctccct

SEQ ID NO: 3781422 - DNA, 25 bp, Homo sapien
ctccatgcgggtgcccctccctagc

SEQ ID NO: 3781423 - DNA, 25 bp, Homo sapien
tgcatttgcccgggggaccagcaag

SEQ ID NO: 3781424 - DNA, 25 bp, Homo sapien
ctgcatttgcccgggggaccagcaa

SEQ ID NO: 3781425 - DNA, 25 bp, Homo sapien
gctattaagtctccaaccagcaggg

SEQ ID NO: 3781426 - DNA, 25 bp, Homo sapien
gaatgttcatactcacccttggagg

SEQ ID NO: 3781427 - DNA, 25 bp, Homo sapien
taaacatcaggctgcaccaggtgtg

SEQ ID NO: 3781428 - DNA, 25 bp, Homo sapien
gactgggatccagcaggagactaaa

SEQ ID NO: 3781429 - DNA, 25 bp, Homo sapien
ttctgagaatcttcacatctaatcc

SEQ ID NO: 3781430 - DNA, 25 bp, Homo sapien
gcagcctagaccactggaatgagcc

SEQ ID NO: 3781431 - DNA, 25 bp, Homo sapien
tgcagcctagaccactggaatgagc

SEQ ID NO: 3781432 - DNA, 25 bp, Homo sapien
ggcgcatattcggttcaagatgacc

SEQ ID NO: 3781433 - DNA, 25 bp, Homo sapien
tttggcttgccgttgctgaaaagca

SEQ ID NO: 3781434 - DNA, 25 bp, Homo sapien
gcaaattgtgtcagccctgctataa

SEQ ID NO: 3781435 - DNA, 25 bp, Homo sapien
tcagggaggacccaatgtcagtgtc

SEQ ID NO: 3781436 - DNA, 25 bp, Homo sapien
ggtatccgtttgcacactcagccat

SEQ ID NO: 3781437 - DNA, 25 bp, Homo sapien
ctggtatccgtttgcacactcagcc

SEQ ID NO: 3781438 - DNA, 25 bp, Homo sapien
tggtatccgtttgcacactcagcca

SEQ ID NO: 3781439 - DNA, 25 bp, Homo sapien
ctgtaattccagttactcaaggagg

SEQ ID NO: 3781440 - DNA, 25 bp, Homo sapien
gtaattccagttactcaaggaggct

SEQ ID NO: 3781441 - DNA, 25 bp, Homo sapien
tgagcaacatagcaaggcccaccat

SEQ ID NO: 3781442 - DNA, 25 bp, Homo sapien
cctgagcaacatagcaaggcccacc

SEQ ID NO: 3781443 - DNA, 25 bp, Homo sapien
gctcagtgttcagccctctgttcat

SEQ ID NO: 3781444 - DNA, 25 bp, Homo sapien
gtaagacgtataggaacaacactgg

SEQ ID NO: 3781445 - DNA, 25 bp, Homo sapien
aatgcctggcagctggtaaatgctc

SEQ ID NO: 3781446 - DNA, 25 bp, Homo sapien
aaatgctctgtctgctacatcccag

SEQ ID NO: 3781447 - DNA, 25 bp, Homo sapien
gaaaacttggactaagagactggca

SEQ ID NO: 3781448 - DNA, 25 bp, Homo sapien
ccttgcattaggcagggttaccagg

SEQ ID NO: 3781449 - DNA, 25 bp, Homo sapien
gcttcaccccggaatctgtccaaaa

SEQ ID NO: 3781450 - DNA, 25 bp, Homo sapien
caaaactcattctggttgaagcaaa

SEQ ID NO: 3781451 - DNA, 25 bp, Homo sapien
gatggcaatggctcttgaaaagtgc

SEQ ID NO: 3781452 - DNA, 25 bp, Homo sapien
ctcctgcctgttcttaggccaatca

SEQ ID NO: 3781453 - DNA, 25 bp, Homo sapien
gtccagatcgcgtctcctgcctgtt

SEQ ID NO: 3781454 - DNA, 25 bp, Homo sapien
tcaatgtaagtttctgattggtcca

SEQ ID NO: 3781455 - DNA, 25 bp, Homo sapien
ttctgattggtccagatcgcgtctc

SEQ ID NO: 3781456 - DNA, 25 bp, Homo sapien
cgtgagagaagaacgcagacttcct

SEQ ID NO: 3781457 - DNA, 25 bp, Homo sapien
agaacgcagacttcctcagcctagg

SEQ ID NO: 3781458 - DNA, 25 bp, Homo sapien
gctccgtgagagaagaacgcagact

SEQ ID NO: 3781459 - DNA, 25 bp, Homo sapien
tactcactcaggacatctggattct

SEQ ID NO: 3781460 - DNA, 25 bp, Homo sapien
tttatgctgctgagctttcctgatt

SEQ ID NO: 3781461 - DNA, 25 bp, Homo sapien
tgctgctgagctttcctgattgttt

SEQ ID NO: 3781462 - DNA, 25 bp, Homo sapien
atgctgctgagctttcctgattgtt

SEQ ID NO: 3781463 - DNA, 25 bp, Homo sapien
agttttatgctgctgagctttcctg

SEQ ID NO: 3781464 - DNA, 25 bp, Homo sapien
ggttgcatccccagagatggaagtc

SEQ ID NO: 3781465 - DNA, 25 bp, Homo sapien
taaacatgttttgtaaggttctgtg

SEQ ID NO: 3781466 - DNA, 25 bp, Homo sapien
ttgtaaggttctgtggttgcatccc

SEQ ID NO: 3781467 - DNA, 25 bp, Homo sapien
gcatccccagagatggaagtcaagg

SEQ ID NO: 3781468 - DNA, 25 bp, Homo sapien
gatctttcttcgtccggctttctca

SEQ ID NO: 3781469 - DNA, 25 bp, Homo sapien
gagaagttgagcatgttttcgtgtt

SEQ ID NO: 3781470 - DNA, 25 bp, Homo sapien
ggatatgatgaatactttccatttc

SEQ ID NO: 3781471 - DNA, 25 bp, Homo sapien
tttctcaccagcaaaggatatgatg

SEQ ID NO: 3781472 - DNA, 25 bp, Homo sapien
gtgagatgatacgatgcctacctgg

SEQ ID NO: 3781473 - DNA, 25 bp, Homo sapien
tgatgacgtgagatgatacgatgcc

SEQ ID NO: 3781474 - DNA, 25 bp, Homo sapien
tctcgtgatgacgtgagatgatacg

SEQ ID NO: 3781475 - DNA, 25 bp, Homo sapien
cgttcttctcgtgatgacgtgagat

SEQ ID NO: 3781476 - DNA, 25 bp, Homo sapien
tcagccatcttcagagtaagaatcc

SEQ ID NO: 3781477 - DNA, 25 bp, Homo sapien
cagccatcttcagagtaagaatccc

SEQ ID NO: 3781478 - DNA, 25 bp, Homo sapien
gccatcttcagagtaagaatccctc

SEQ ID NO: 3781479 - DNA, 25 bp, Homo sapien
catcttcagagtaagaatccctcac

SEQ ID NO: 3781480 - DNA, 25 bp, Homo sapien
ccatcattgtcattgcgggcatgtt

SEQ ID NO: 3781481 - DNA, 25 bp, Homo sapien
tcagaccaccctccgatacaaagag

SEQ ID NO: 3781482 - DNA, 25 bp, Homo sapien
aaacagaaaggttggacggcagcac

SEQ ID NO: 3781483 - DNA, 25 bp, Homo sapien
gggaagtcaaccgtagtgtctgaaa

SEQ ID NO: 3781484 - DNA, 25 bp, Homo sapien
atatgtagtcgagctattatctctg

SEQ ID NO: 3781485 - DNA, 25 bp, Homo sapien
tatgtagtcgagctattatctctgt

SEQ ID NO: 3781486 - DNA, 25 bp, Homo sapien
tgtagtcgagctattatctctgtca

SEQ ID NO: 3781487 - DNA, 25 bp, Homo sapien
gtagtcgagctattatctctgtcag

SEQ ID NO: 3781488 - DNA, 25 bp, Homo sapien
tagcttcaatataaaggttactgca

SEQ ID NO: 3781489 - DNA, 25 bp, Homo sapien
tataagattttctgcgtgacttctg

SEQ ID NO: 3781490 - DNA, 25 bp, Homo sapien
gcaatgtcatagcaggatctctctg

SEQ ID NO: 3781491 - DNA, 25 bp, Homo sapien
tatattggcgaacagatgtaaagtt

SEQ ID NO: 3781492 - DNA, 25 bp, Homo sapien
aatataagccaagatgtcaaactgt

SEQ ID NO: 3781493 - DNA, 25 bp, Homo sapien
tcaaactgtgaactgcagttcaacc

SEQ ID NO: 3781494 - DNA, 25 bp, Homo sapien
ctgtgaactgcagttcaaccctgac

SEQ ID NO: 3781495 - DNA, 25 bp, Homo sapien
caagatgtcaaactgtgaactgcag

SEQ ID NO: 3781496 - DNA, 25 bp, Homo sapien
caccccgtcttcatatggatggagc

SEQ ID NO: 3781497 - DNA, 25 bp, Homo sapien
taccaccccgtcttcatatggatgg

SEQ ID NO: 3781498 - DNA, 25 bp, Homo sapien
ccccgtcttcatatggatggagcat

SEQ ID NO: 3781499 - DNA, 25 bp, Homo sapien
tgctaccaccccgtcttcatatgga

SEQ ID NO: 3781500 - DNA, 25 bp, Homo sapien
gaataaccaacaagggcatccacag

SEQ ID NO: 3781501 - DNA, 25 bp, Homo sapien
ctggaataaccaacaagggcatcca

SEQ ID NO: 3781502 - DNA, 25 bp, Homo sapien
aaccaacaagggcatccacagatat

SEQ ID NO: 3781503 - DNA, 25 bp, Homo sapien
caagggcatccacagatatgaaata

SEQ ID NO: 3781504 - DNA, 25 bp, Homo sapien
tagagtccagacaaatgtaagtata

SEQ ID NO: 3781505 - DNA, 25 bp, Homo sapien
tacttccgcaatatcccataagcca

SEQ ID NO: 3781506 - DNA, 25 bp, Homo sapien
tccagaacctgtgcaacatacttac

SEQ ID NO: 3781507 - DNA, 25 bp, Homo sapien
tgtggcggctaaaacaactgttggg

SEQ ID NO: 3781508 - DNA, 25 bp, Homo sapien
ctgatatatcacttcttccaggagc

SEQ ID NO: 3781509 - DNA, 25 bp, Homo sapien
gaatagtatgtctgtctgatatatc

SEQ ID NO: 3781510 - DNA, 25 bp, Homo sapien
taagcttttgaatagtatgtctgtc

SEQ ID NO: 3781511 - DNA, 25 bp, Homo sapien
tatatcacttcttccaggagcctcc

SEQ ID NO: 3781512 - DNA, 25 bp, Homo sapien
tatatatgtccaggtgtaacacaca

SEQ ID NO: 3781513 - DNA, 25 bp, Homo sapien
ccttggcaaagtgcacgcatggtga

SEQ ID NO: 3781514 - DNA, 25 bp, Homo sapien
aattgtgctcaacccagtgaatgct

SEQ ID NO: 3781515 - DNA, 25 bp, Homo sapien
caaaagcatgctccaagactgactg

SEQ ID NO: 3781516 - DNA, 25 bp, Homo sapien
tgtatcaacataggaaggagacacc

SEQ ID NO: 3781517 - DNA, 25 bp, Homo sapien
taaaaataattgtccatatggaatc

SEQ ID NO: 3781518 - DNA, 25 bp, Homo sapien
tatctccaggaccacaaatttgact

SEQ ID NO: 3781519 - DNA, 25 bp, Homo sapien
ggagacacccactatcccaagactc

SEQ ID NO: 3781520 - DNA, 25 bp, Homo sapien
gcttgctcatctaggggttcccgga

SEQ ID NO: 3781521 - DNA, 25 bp, Homo sapien
ttgcttgctcatctaggggttcccg

SEQ ID NO: 3781522 - DNA, 25 bp, Homo sapien
gtaagtggagagtttgcccgggtgc

SEQ ID NO: 3781523 - DNA, 25 bp, Homo sapien
aacaccccctagcagggcgcgaggt

SEQ ID NO: 3781524 - DNA, 25 bp, Homo sapien
ctggactggcgacccaaactcctac

SEQ ID NO: 3781525 - DNA, 25 bp, Homo sapien
tggactggcgacccaaactcctaca

SEQ ID NO: 3781526 - DNA, 25 bp, Homo sapien
tggcgacccaaactcctacacttcc

SEQ ID NO: 3781527 - DNA, 25 bp, Homo sapien
actggcgacccaaactcctacactt

SEQ ID NO: 3781528 - DNA, 25 bp, Homo sapien
ttcccgccgaacgagaaagcgcgga

SEQ ID NO: 3781529 - DNA, 25 bp, Homo sapien
gaaagcaatcgtgagcgcggatcag

SEQ ID NO: 3781530 - DNA, 25 bp, Homo sapien
gcggaccccttgcaagcagcatata

SEQ ID NO: 3781531 - DNA, 25 bp, Homo sapien
agcatatagcctcggcgtgacccgt

SEQ ID NO: 3781532 - DNA, 25 bp, Homo sapien
gaatctggagttcgctgaggacact

SEQ ID NO: 3781533 - DNA, 25 bp, Homo sapien
caatttaaaagtggccgcctaggcg

SEQ ID NO: 3781534 - DNA, 25 bp, Homo sapien
gaagggaatttactgcggatggcac

SEQ ID NO: 3781535 - DNA, 25 bp, Homo sapien
gatggcaccggaacctgaattgact

SEQ ID NO: 3781536 - DNA, 25 bp, Homo sapien
caggcccgccgctacagggagaagt

SEQ ID NO: 3781537 - DNA, 25 bp, Homo sapien
tgcgcatccgcggaagaagtcctgg

SEQ ID NO: 3781538 - DNA, 25 bp, Homo sapien
tgccaccttaagagtcgggtccgcg

SEQ ID NO: 3781539 - DNA, 25 bp, Homo sapien
caatctcgcctgtcgaaatcgctag

SEQ ID NO: 3781540 - DNA, 25 bp, Homo sapien
tcccggattcagaagcggcctcagt

SEQ ID NO: 3781541 - DNA, 25 bp, Homo sapien
gggaggctaattgcacacgaacgcc

SEQ ID NO: 3781542 - DNA, 25 bp, Homo sapien
tgcagccgttaggtaacgaacccga

SEQ ID NO: 3781543 - DNA, 25 bp, Homo sapien
agctttccatcattcggccgcgaga

SEQ ID NO: 3781544 - DNA, 25 bp, Homo sapien
tccgccgtgcgccaccctgagggct

SEQ ID NO: 3781545 - DNA, 25 bp, Homo sapien
agcgccacccgcgtcgcctctccgc

SEQ ID NO: 3781546 - DNA, 25 bp, Homo sapien
accctgagggctcccgcgattgcat

SEQ ID NO: 3781547 - DNA, 25 bp, Homo sapien
ctctccgccgtgcgccaccctgagg

SEQ ID NO: 3781548 - DNA, 25 bp, Homo sapien
tcttactcggatggagacatcgcgg

SEQ ID NO: 3781549 - DNA, 25 bp, Homo sapien
gagcacagttaccaatgcgttcagc

SEQ ID NO: 3781550 - DNA, 25 bp, Homo sapien
tgtactgtggacacgagtccgcgga

SEQ ID NO: 3781551 - DNA, 25 bp, Homo sapien
ggccgaaccctacatgtcctctgta

SEQ ID NO: 3781552 - DNA, 25 bp, Homo sapien
tattctctggggtcatgaagctccc

SEQ ID NO: 3781553 - DNA, 25 bp, Homo sapien
atgtcaatcaagcaaacagattcag

SEQ ID NO: 3781554 - DNA, 25 bp, Homo sapien
taacaataccggagttctctgatca

SEQ ID NO: 3781555 - DNA, 25 bp, Homo sapien
tatttaacaataccggagttctctg

SEQ ID NO: 3781556 - DNA, 25 bp, Homo sapien
gtgtccctagcagccgacttggtgt

SEQ ID NO: 3781557 - DNA, 25 bp, Homo sapien
tgtgactgaaaacaatccccctgct

SEQ ID NO: 3781558 - DNA, 25 bp, Homo sapien
aaacaatccccctgctccaagcagc

SEQ ID NO: 3781559 - DNA, 25 bp, Homo sapien
ttgcccattaggctgtgactgaaaa

SEQ ID NO: 3781560 - DNA, 25 bp, Homo sapien
agtttgcaagcccaaatattttctg

SEQ ID NO: 3781561 - DNA, 25 bp, Homo sapien
taagtttgcaagcccaaatattttc

SEQ ID NO: 3781562 - DNA, 25 bp, Homo sapien
aagtttgcaagcccaaatattttct

SEQ ID NO: 3781563 - DNA, 25 bp, Homo sapien
ccagagtgaggacattttgtagatt

SEQ ID NO: 3781564 - DNA, 25 bp, Homo sapien
tcaaatttaagtaaagcccatgtat

SEQ ID NO: 3781565 - DNA, 25 bp, Homo sapien
ctgagggaatcatgcataaagaagc

SEQ ID NO: 3781566 - DNA, 25 bp, Homo sapien
tgggaattgttagatgatttgaaga

SEQ ID NO: 3781567 - DNA, 25 bp, Homo sapien
cattcacattatagcaggtaactgg

SEQ ID NO: 3781568 - DNA, 25 bp, Homo sapien
tcaatgagactttgcacatcgcgat

SEQ ID NO: 3781569 - DNA, 25 bp, Homo sapien
gagccgcatactaaatcctggagca

SEQ ID NO: 3781570 - DNA, 25 bp, Homo sapien
ttgacatgctattcctttggccagg

SEQ ID NO: 3781571 - DNA, 25 bp, Homo sapien
tgcttccaattcatctagagatcct

SEQ ID NO: 3781572 - DNA, 25 bp, Homo sapien
cttggagtatacactaaagtagtgg

SEQ ID NO: 3781573 - DNA, 25 bp, Homo sapien
gagatcacagttaaaatcaatcttg

SEQ ID NO: 3781574 - DNA, 25 bp, Homo sapien
gaaattcacaatcaggatgcttcca

SEQ ID NO: 3781575 - DNA, 25 bp, Homo sapien
tatagcctaaccagaatagctcagc

SEQ ID NO: 3781576 - DNA, 25 bp, Homo sapien
gataaaccagttagagactcacaga

SEQ ID NO: 3781577 - DNA, 25 bp, Homo sapien
tgaatgttaaccaagatcttccgct

SEQ ID NO: 3781578 - DNA, 25 bp, Homo sapien
cattccggtagtagtgatgtacacc

SEQ ID NO: 3781579 - DNA, 25 bp, Homo sapien
tatttggacccaacgtagaggaaga

SEQ ID NO: 3781580 - DNA, 25 bp, Homo sapien
tcctggagccaacttaaactgatct

SEQ ID NO: 3781581 - DNA, 25 bp, Homo sapien
tgttcaaggcaattcccaccgtatc

SEQ ID NO: 3781582 - DNA, 25 bp, Homo sapien
taaagagggcaagcactaacaacag

SEQ ID NO: 3781583 - DNA, 25 bp, Homo sapien
ccggttaggcaccagtcgccccgca

SEQ ID NO: 3781584 - DNA, 25 bp, Homo sapien
cggttaggcaccagtcgccccgcag

SEQ ID NO: 3781585 - DNA, 25 bp, Homo sapien
ggttaggcaccagtcgccccgcagc

SEQ ID NO: 3781586 - DNA, 25 bp, Homo sapien
tataaaggcggataacctgactgtg

SEQ ID NO: 3781587 - DNA, 25 bp, Homo sapien
tggtatcactctggaaagcctcggc

SEQ ID NO: 3781588 - DNA, 25 bp, Homo sapien
tagaccattgaaagtcgcccagaca

SEQ ID NO: 3781589 - DNA, 25 bp, Homo sapien
gactaagtgtcaaagctggaggcca

SEQ ID NO: 3781590 - DNA, 25 bp, Homo sapien
gactggcctcgtcacatagtattac

SEQ ID NO: 3781591 - DNA, 25 bp, Homo sapien
caagatagcaaggatctgagataca

SEQ ID NO: 3781592 - DNA, 25 bp, Homo sapien
tatttggatgcaggtattctcagcc

SEQ ID NO: 3781593 - DNA, 25 bp, Homo sapien
cagcctcggtcctttacaataagag

SEQ ID NO: 3781594 - DNA, 25 bp, Homo sapien
tcaaaatgcgataaaccaggactcc

SEQ ID NO: 3781595 - DNA, 25 bp, Homo sapien
tgtcactatcaagagttcggccatg

SEQ ID NO: 3781596 - DNA, 25 bp, Homo sapien
caagtgcctgagttctggtaccaaa

SEQ ID NO: 3781597 - DNA, 25 bp, Homo sapien
taagtgcaactactcttggagaggg

SEQ ID NO: 3781598 - DNA, 25 bp, Homo sapien
tgtttaaggaatacgccggccacaa

SEQ ID NO: 3781599 - DNA, 25 bp, Homo sapien
gctttcccagtactagtgtccggta

SEQ ID NO: 3781600 - DNA, 25 bp, Homo sapien
gcccagctgccatttccatatagga

SEQ ID NO: 3781601 - DNA, 25 bp, Homo sapien
tacctgtaggacgagggcttctagc

SEQ ID NO: 3781602 - DNA, 25 bp, Homo sapien
tccttggctgtggttaacaaggcgt

SEQ ID NO: 3781603 - DNA, 25 bp, Homo sapien
tttgagccagtggatttaaggaagg

SEQ ID NO: 3781604 - DNA, 25 bp, Homo sapien
ggctgtggttaacaaggcgtcctcc

SEQ ID NO: 3781605 - DNA, 25 bp, Homo sapien
tcagggcatgcaaaaccttccttgg

SEQ ID NO: 3781606 - DNA, 25 bp, Homo sapien
ttgtaaaaaggtgaggttcatattc

SEQ ID NO: 3781607 - DNA, 25 bp, Homo sapien
tgcactcgcactttagcttatttgt

SEQ ID NO: 3781608 - DNA, 25 bp, Homo sapien
tcattagcactactgtcttctactt

SEQ ID NO: 3781609 - DNA, 25 bp, Homo sapien
tggcaatgtcttgtcgcctgtgtca

SEQ ID NO: 3781610 - DNA, 25 bp, Homo sapien
gcatttcctagcctctcggagtatt

SEQ ID NO: 3781611 - DNA, 25 bp, Homo sapien
ccaggcagttaattgtcaggtcagt

SEQ ID NO: 3781612 - DNA, 25 bp, Homo sapien
tcaggatcagtctgcgaagagggca

SEQ ID NO: 3781613 - DNA, 25 bp, Homo sapien
gctgctcctgcagcgttcacttcag

SEQ ID NO: 3781614 - DNA, 25 bp, Homo sapien
tactcttgaggtcgggaagtctgcc

SEQ ID NO: 3781615 - DNA, 25 bp, Homo sapien
cggcatcctcgaaagcagcgggttt

SEQ ID NO: 3781616 - DNA, 25 bp, Homo sapien
tggtacaagaagttggcctgcgcct

SEQ ID NO: 3781617 - DNA, 25 bp, Homo sapien
aagctggtgcgcctgaatcggatgc

SEQ ID NO: 3781618 - DNA, 25 bp, Homo sapien
gagccggagctggagtccgactcgg

SEQ ID NO: 3781619 - DNA, 25 bp, Homo sapien
tccgagctgacttcactggaatccg

SEQ ID NO: 3781620 - DNA, 25 bp, Homo sapien
gactcggtggacgagtcctcctcct

SEQ ID NO: 3781621 - DNA, 25 bp, Homo sapien
gagctgacttcactggaatccgagg

SEQ ID NO: 3781622 - DNA, 25 bp, Homo sapien
gagccaaaatccgagtcgttggccg

SEQ ID NO: 3781623 - DNA, 25 bp, Homo sapien
actggagccaaaatccgagtcgttg

SEQ ID NO: 3781624 - DNA, 25 bp, Homo sapien
cgcgtggtccgagtaggagctggac

SEQ ID NO: 3781625 - DNA, 25 bp, Homo sapien
atccgagtcgttggccgcgtggtcc

SEQ ID NO: 3781626 - DNA, 25 bp, Homo sapien
aggcgggcagaagccgttgaccaga

SEQ ID NO: 3781627 - DNA, 25 bp, Homo sapien
ggaggcgggcagaagccgttgacca

SEQ ID NO: 3781628 - DNA, 25 bp, Homo sapien
gaggggggtggtgactctgctgcgg

SEQ ID NO: 3781629 - DNA, 25 bp, Homo sapien
gaggcgggcagaagccgttgaccag

SEQ ID NO: 3781630 - DNA, 25 bp, Homo sapien
ccgcgcttgcgcttgcagcggtagc

SEQ ID NO: 3781631 - DNA, 25 bp, Homo sapien
gcgcgccggcgtgaggcgcgagcag

SEQ ID NO: 3781632 - DNA, 25 bp, Homo sapien
caggcagtccttggcgccgccgcgc

SEQ ID NO: 3781633 - DNA, 25 bp, Homo sapien
ttgcagcggtagctcaggctccccg

SEQ ID NO: 3781634 - DNA, 25 bp, Homo sapien
cagcaggctccgaaaataagcaggg

SEQ ID NO: 3781635 - DNA, 25 bp, Homo sapien
gcacagcaggctccgaaaataagca

SEQ ID NO: 3781636 - DNA, 25 bp, Homo sapien
caggctccgaaaataagcagggtcc

SEQ ID NO: 3781637 - DNA, 25 bp, Homo sapien
ctccgaaaataagcagggtccgagg

SEQ ID NO: 3781638 - DNA, 25 bp, Homo sapien
ggtttgcacggcgagcgcacgatct

SEQ ID NO: 3781639 - DNA, 25 bp, Homo sapien
cgagcgcacgatctccgggtagtgc

SEQ ID NO: 3781640 - DNA, 25 bp, Homo sapien
acggcgagcgcacgatctccgggta

SEQ ID NO: 3781641 - DNA, 25 bp, Homo sapien
cacgatctccgggtagtgcgagccg

SEQ ID NO: 3781642 - DNA, 25 bp, Homo sapien
cggcggcggcgcccgggcgctggga

SEQ ID NO: 3781643 - DNA, 25 bp, Homo sapien
ggcggcggcgcccgggcgctgggac

SEQ ID NO: 3781644 - DNA, 25 bp, Homo sapien
gcgctgattggcaggggccgcgcgg

SEQ ID NO: 3781645 - DNA, 25 bp, Homo sapien
cgcgctgattggcaggggccgcgcg

SEQ ID NO: 3781646 - DNA, 25 bp, Homo sapien
tgcgcgctgattggcaggggccgcg

SEQ ID NO: 3781647 - DNA, 25 bp, Homo sapien
cgctgattggcaggggccgcgcggc

SEQ ID NO: 3781648 - DNA, 25 bp, Homo sapien
ctcaggccccgccaaagttggtgct

SEQ ID NO: 3781649 - DNA, 25 bp, Homo sapien
ccgccaaagttggtgcttgtccttc

SEQ ID NO: 3781650 - DNA, 25 bp, Homo sapien
gcggcggcgcctttgtggccagggc

SEQ ID NO: 3781651 - DNA, 25 bp, Homo sapien
ggccccgccaaagttggtgcttgtc

SEQ ID NO: 3781652 - DNA, 25 bp, Homo sapien
tccagatcgcagtggtgcttcttca

SEQ ID NO: 3781653 - DNA, 25 bp, Homo sapien
taatgatgaggtagccgagcctcac

SEQ ID NO: 3781654 - DNA, 25 bp, Homo sapien
tttgcaggaggtgtagagcgcttcc

SEQ ID NO: 3781655 - DNA, 25 bp, Homo sapien
tcttcccgggagatgagcgtgcatt

SEQ ID NO: 3781656 - DNA, 25 bp, Homo sapien
gatccccaccatttgcagtaaatat

SEQ ID NO: 3781657 - DNA, 25 bp, Homo sapien
acatgtatgtatgttaatcctcagc

SEQ ID NO: 3781658 - DNA, 25 bp, Homo sapien
catgtatgtatgttaatcctcagcc

SEQ ID NO: 3781659 - DNA, 25 bp, Homo sapien
atatatacgtgacgcatacatacac

SEQ ID NO: 3781660 - DNA, 25 bp, Homo sapien
taaagccagcgctgattggacactc

SEQ ID NO: 3781661 - DNA, 25 bp, Homo sapien
taaactatcggagctcagaaacagc

SEQ ID NO: 3781662 - DNA, 25 bp, Homo sapien
aaccatccggtttctgatctgccag

SEQ ID NO: 3781663 - DNA, 25 bp, Homo sapien
tgttggtctgagtccccgatgcaga

SEQ ID NO: 3781664 - DNA, 25 bp, Homo sapien
aattaaccgtactggattggaggcg

SEQ ID NO: 3781665 - DNA, 25 bp, Homo sapien
gaggaggtagtttcacgtcagaccc

SEQ ID NO: 3781666 - DNA, 25 bp, Homo sapien
tcaagccgaaagagagataccccac

SEQ ID NO: 3781667 - DNA, 25 bp, Homo sapien
gaccggctgggagctccaaagttaa

SEQ ID NO: 3781668 - DNA, 25 bp, Homo sapien
agcaagggtcctcccagtcgcatta

SEQ ID NO: 3781669 - DNA, 25 bp, Homo sapien
tcctccaaaaatagacacatccgcg

SEQ ID NO: 3781670 - DNA, 25 bp, Homo sapien
ggtgtcgttttcaaggatatccaaa

SEQ ID NO: 3781671 - DNA, 25 bp, Homo sapien
tcgcattaccacgatcccaaggcgg

SEQ ID NO: 3781672 - DNA, 25 bp, Homo sapien
caagaagtgcatccggaaattaagg

SEQ ID NO: 3781673 - DNA, 25 bp, Homo sapien
aggtagtttgcctgacaagatgaaa

SEQ ID NO: 3781674 - DNA, 25 bp, Homo sapien
tgaaatctcggccataattccccac

SEQ ID NO: 3781675 - DNA, 25 bp, Homo sapien
tctgtaactcaggaggttgggattt

SEQ ID NO: 3781676 - DNA, 25 bp, Homo sapien
gaatggatctcgtgatatttcaggc

SEQ ID NO: 3781677 - DNA, 25 bp, Homo sapien
taccatccagcgagttggctttctt

SEQ ID NO: 3781678 - DNA, 25 bp, Homo sapien
taaacgtaaccgagaggcagcaatg

SEQ ID NO: 3781679 - DNA, 25 bp, Homo sapien
gcaatgaacaatgcctcgtcacagc

SEQ ID NO: 3781680 - DNA, 25 bp, Homo sapien
tttgcctgatgtgcagatccagatg

SEQ ID NO: 3781681 - DNA, 25 bp, Homo sapien
aaatttgttgaccatgtcagctgac

SEQ ID NO: 3781682 - DNA, 25 bp, Homo sapien
tgataaatttgttgaccatgtcagc

SEQ ID NO: 3781683 - DNA, 25 bp, Homo sapien
tgcagatccagatgtataaagtact

SEQ ID NO: 3781684 - DNA, 25 bp, Homo sapien
aacatatagagactgaagtggtgac

SEQ ID NO: 3781685 - DNA, 25 bp, Homo sapien
cacaagggccaaacatatagagact

SEQ ID NO: 3781686 - DNA, 25 bp, Homo sapien
tacacaagggccaaacatatagaga

SEQ ID NO: 3781687 - DNA, 25 bp, Homo sapien
acatatagagactgaagtggtgaca

SEQ ID NO: 3781688 - DNA, 25 bp, Homo sapien
gctcagccatactgaaatcctgagc

SEQ ID NO: 3781689 - DNA, 25 bp, Homo sapien
tactgaaatcctgagccaccacgag

SEQ ID NO: 3781690 - DNA, 25 bp, Homo sapien
gccatactgaaatcctgagccacca

SEQ ID NO: 3781691 - DNA, 25 bp, Homo sapien
gggagcactggagccaatcactgtc

SEQ ID NO: 3781692 - DNA, 25 bp, Homo sapien
tgtttgaaggggtttctgcgcacaa

SEQ ID NO: 3781693 - DNA, 25 bp, Homo sapien
tgaaggggtttctgcgcacaaaatg

SEQ ID NO: 3781694 - DNA, 25 bp, Homo sapien
aggtagtggctatgggagagatgta

SEQ ID NO: 3781695 - DNA, 25 bp, Homo sapien
gcgcacaaaatgtgtaggtagtggc

SEQ ID NO: 3781696 - DNA, 25 bp, Homo sapien
ctttttactgccctccaagcggcga

SEQ ID NO: 3781697 - DNA, 25 bp, Homo sapien
tataaacggatcgatgtgtgcggga

SEQ ID NO: 3781698 - DNA, 25 bp, Homo sapien
tcgagcacgtgaaacgcgacttttt

SEQ ID NO: 3781699 - DNA, 25 bp, Homo sapien
ggtacgctggttatccgcaagtctg

SEQ ID NO: 3781700 - DNA, 25 bp, Homo sapien
cgcgctctccggtgccgcgcggcca

SEQ ID NO: 3781701 - DNA, 25 bp, Homo sapien
tttacccaggatccctcgcgcgggc

SEQ ID NO: 3781702 - DNA, 25 bp, Homo sapien
gcgggccgcgctcgtgccgagctgg

SEQ ID NO: 3781703 - DNA, 25 bp, Homo sapien
gtgccgcgcggccactttttaccca

SEQ ID NO: 3781704 - DNA, 25 bp, Homo sapien
tcggaggaaggagcctttacagcgt

SEQ ID NO: 3781705 - DNA, 25 bp, Homo sapien
cggaggaaggagcctttacagcgtg

SEQ ID NO: 3781706 - DNA, 25 bp, Homo sapien
ctcggaggaaggagcctttacagcg

SEQ ID NO: 3781707 - DNA, 25 bp, Homo sapien
tgatagtgacagtactgccaggaac

SEQ ID NO: 3781708 - DNA, 25 bp, Homo sapien
taaaaagtacagtcgccacagagac

SEQ ID NO: 3781709 - DNA, 25 bp, Homo sapien
tgccaggaacgctgaaggactaaga

SEQ ID NO: 3781710 - DNA, 25 bp, Homo sapien
cacagagacaactaggtgttcagga

SEQ ID NO: 3781711 - DNA, 25 bp, Homo sapien
acctggagagttacctttattcaca

SEQ ID NO: 3781712 - DNA, 25 bp, Homo sapien
gagctatggcgtccggccttattta

SEQ ID NO: 3781713 - DNA, 25 bp, Homo sapien
tggagagttacctttattcacataa

SEQ ID NO: 3781714 - DNA, 25 bp, Homo sapien
atggcgtccggccttatttagcttt

SEQ ID NO: 3781715 - DNA, 25 bp, Homo sapien
tctaagactataagactaaatcttt

SEQ ID NO: 3781716 - DNA, 25 bp, Homo sapien
tacagcagtgttattactttttggt

SEQ ID NO: 3781717 - DNA, 25 bp, Homo sapien
agagtatagtgacagtgatctcagc

SEQ ID NO: 3781718 - DNA, 25 bp, Homo sapien
tctgtatttcagctttccttgtgtt

SEQ ID NO: 3781719 - DNA, 25 bp, Homo sapien
tagactttctaatctgatcctataa

SEQ ID NO: 3781720 - DNA, 25 bp, Homo sapien
tctgaggtgattcctcactttctct

SEQ ID NO: 3781721 - DNA, 25 bp, Homo sapien
gacagcatcttgatattgtagccca

SEQ ID NO: 3781722 - DNA, 25 bp, Homo sapien
tagcccacgctgaccttgaaagtga

SEQ ID NO: 3781723 - DNA, 25 bp, Homo sapien
ggattacagcactttttcaagtggt

SEQ ID NO: 3781724 - DNA, 25 bp, Homo sapien
gtctcagggtggtccgccctcctcg

SEQ ID NO: 3781725 - DNA, 25 bp, Homo sapien
gctggtctcagggtggtccgccctc

SEQ ID NO: 3781726 - DNA, 25 bp, Homo sapien
acagcactttttcaagtggtgtgag

SEQ ID NO: 3781727 - DNA, 25 bp, Homo sapien
tattttgaaccataatgttccacaa

SEQ ID NO: 3781728 - DNA, 25 bp, Homo sapien
ggatacaagataccagaaagaatta

SEQ ID NO: 3781729 - DNA, 25 bp, Homo sapien
taagtagagacatctatttgttttg

SEQ ID NO: 3781730 - DNA, 25 bp, Homo sapien
agtcattgtgcccaacctcttttca

SEQ ID NO: 3781731 - DNA, 25 bp, Homo sapien
tgcgtgtcattactgttcagggagc

SEQ ID NO: 3781732 - DNA, 25 bp, Homo sapien
aatttgcgtgtcattactgttcagg

SEQ ID NO: 3781733 - DNA, 25 bp, Homo sapien
cgtgtcattactgttcagggagcat

SEQ ID NO: 3781734 - DNA, 25 bp, Homo sapien
tttgcgtgtcattactgttcaggga

SEQ ID NO: 3781735 - DNA, 25 bp, Homo sapien
tatgttttgattccaaatattggga

SEQ ID NO: 3781736 - DNA, 25 bp, Homo sapien
tgctcctggcccccactggttattt

SEQ ID NO: 3781737 - DNA, 25 bp, Homo sapien
gttttgattccaaatattgggattg

SEQ ID NO: 3781738 - DNA, 25 bp, Homo sapien
gtatgttttgattccaaatattggg

SEQ ID NO: 3781739 - DNA, 25 bp, Homo sapien
gattggatctcaggtgttaatttta

SEQ ID NO: 3781740 - DNA, 25 bp, Homo sapien
gcacgataaaggctcagtgcagtta

SEQ ID NO: 3781741 - DNA, 25 bp, Homo sapien
cagtgcagttattgatctcctgggc

SEQ ID NO: 3781742 - DNA, 25 bp, Homo sapien
tatttatcttacatgtggcaggtca

SEQ ID NO: 3781743 - DNA, 25 bp, Homo sapien
aaggaaccagagcatatatttaaaa

SEQ ID NO: 3781744 - DNA, 25 bp, Homo sapien
tctaacacctgcgtagaagcaattc

SEQ ID NO: 3781745 - DNA, 25 bp, Homo sapien
cacctgcgtagaagcaattctgcct

SEQ ID NO: 3781746 - DNA, 25 bp, Homo sapien
ggtctctaacacctgcgtagaagca

SEQ ID NO: 3781747 - DNA, 25 bp, Homo sapien
gacttaacagtgtgttcagcttgtt

SEQ ID NO: 3781748 - DNA, 25 bp, Homo sapien
aatcatgacttaacagtgtgttcag

SEQ ID NO: 3781749 - DNA, 25 bp, Homo sapien
aaaatcatgacttaacagtgtgttc

SEQ ID NO: 3781750 - DNA, 25 bp, Homo sapien
catgacttaacagtgtgttcagctt

SEQ ID NO: 3781751 - DNA, 25 bp, Homo sapien
ttggaatcaggttggttgtaagcat

SEQ ID NO: 3781752 - DNA, 25 bp, Homo sapien
tgagcgatgggttgagagacccagt

SEQ ID NO: 3781753 - DNA, 25 bp, Homo sapien
gccttctcttgcgtcctacattgtc

SEQ ID NO: 3781754 - DNA, 25 bp, Homo sapien
atcaggttggttgtaagcatctgcc

SEQ ID NO: 3781755 - DNA, 25 bp, Homo sapien
gatagatgtggtaatcataactgta

SEQ ID NO: 3781756 - DNA, 25 bp, Homo sapien
gggaatcttcgtaacctccttgata

SEQ ID NO: 3781757 - DNA, 25 bp, Homo sapien
catgccatagtaatctggaggttag

SEQ ID NO: 3781758 - DNA, 25 bp, Homo sapien
aactgtagtaatcttcatgccatag

SEQ ID NO: 3781759 - DNA, 25 bp, Homo sapien
ctctaatcggaagcggcatgcgagg

SEQ ID NO: 3781760 - DNA, 25 bp, Homo sapien
catagccataacagctgctcgtctg

SEQ ID NO: 3781761 - DNA, 25 bp, Homo sapien
caatatttcgtctgtgcccaagttt

SEQ ID NO: 3781762 - DNA, 25 bp, Homo sapien
ttttccaatatttcgtctgtgccca

SEQ ID NO: 3781763 - DNA, 25 bp, Homo sapien
tcaggttgatcatagagaatgacgt

SEQ ID NO: 3781764 - DNA, 25 bp, Homo sapien
catcaggttgatcatagagaatgac

SEQ ID NO: 3781765 - DNA, 25 bp, Homo sapien
gtcatcaggttgatcatagagaatg

SEQ ID NO: 3781766 - DNA, 25 bp, Homo sapien
aggttgatcatagagaatgacgtcc

SEQ ID NO: 3781767 - DNA, 25 bp, Homo sapien
cagaaatgcgcactccatgttgttt

SEQ ID NO: 3781768 - DNA, 25 bp, Homo sapien
gaaatgcgcactccatgttgtttac

SEQ ID NO: 3781769 - DNA, 25 bp, Homo sapien
tgccacagaaatgcgcactccatgt

SEQ ID NO: 3781770 - DNA, 25 bp, Homo sapien
cacagaaatgcgcactccatgttgt

SEQ ID NO: 3781771 - DNA, 25 bp, Homo sapien
cagggcgaatttcatagctgtcaca

SEQ ID NO: 3781772 - DNA, 25 bp, Homo sapien
cacagaaagtggtaaatgcctaccc

SEQ ID NO: 3781773 - DNA, 25 bp, Homo sapien
agtggtaaatgcctaccctctattc

SEQ ID NO: 3781774 - DNA, 25 bp, Homo sapien
cagaaagtggtaaatgcctaccctc

SEQ ID NO: 3781775 - DNA, 25 bp, Homo sapien
gaaagtggtaaatgcctaccctcta

SEQ ID NO: 3781776 - DNA, 25 bp, Homo sapien
cagacagtggatctatgataagacg

SEQ ID NO: 3781777 - DNA, 25 bp, Homo sapien
tgttccaattctaggttgcacacca

SEQ ID NO: 3781778 - DNA, 25 bp, Homo sapien
ctctgttccaattctaggttgcaca

SEQ ID NO: 3781779 - DNA, 25 bp, Homo sapien
catctcttggtattttacctacaaa

SEQ ID NO: 3781780 - DNA, 25 bp, Homo sapien
aaggccttgatcttcacttcatcag

SEQ ID NO: 3781781 - DNA, 25 bp, Homo sapien
gtggttacattcagagtataatcat

SEQ ID NO: 3781782 - DNA, 25 bp, Homo sapien
cattcagagtataatcatttctctc

SEQ ID NO: 3781783 - DNA, 25 bp, Homo sapien
ggccttgatcttcacttcatcaggt

SEQ ID NO: 3781784 - DNA, 25 bp, Homo sapien
tacaagctatcaatccagggcagag

SEQ ID NO: 3781785 - DNA, 25 bp, Homo sapien
tttcatcaagatcgatacaagctat

SEQ ID NO: 3781786 - DNA, 25 bp, Homo sapien
gctgggcccgtgagaaccagtgcaa

SEQ ID NO: 3781787 - DNA, 25 bp, Homo sapien
gcccgtgagaaccagtgcaaggcat

SEQ ID NO: 3781788 - DNA, 25 bp, Homo sapien
gaggagtttcaatgtagagtttcaa

SEQ ID NO: 3781789 - DNA, 25 bp, Homo sapien
tgctgggcttgcgtgtatagtccca

SEQ ID NO: 3781790 - DNA, 25 bp, Homo sapien
tacaggtagtgagagtacttaactc

SEQ ID NO: 3781791 - DNA, 25 bp, Homo sapien
tttggatttagcaccaaggaagtca

SEQ ID NO: 3781792 - DNA, 25 bp, Homo sapien
cactcttgcacaggggtcctactaa

SEQ ID NO: 3781793 - DNA, 25 bp, Homo sapien
gtcactcttgcacaggggtcctact

SEQ ID NO: 3781794 - DNA, 25 bp, Homo sapien
catgtcactcttgcacaggggtcct

SEQ ID NO: 3781795 - DNA, 25 bp, Homo sapien
actcttgcacaggggtcctactaat

SEQ ID NO: 3781796 - DNA, 25 bp, Homo sapien
tttcacagtttcagttatcttcagt

SEQ ID NO: 3781797 - DNA, 25 bp, Homo sapien
tcttttcacagtttcagttatcttc

SEQ ID NO: 3781798 - DNA, 25 bp, Homo sapien
ttttcacagtttcagttatcttcag

SEQ ID NO: 3781799 - DNA, 25 bp, Homo sapien
cttttcacagtttcagttatcttca

SEQ ID NO: 3781800 - DNA, 25 bp, Homo sapien
tacagactcagatctgcgtaatgac

SEQ ID NO: 3781801 - DNA, 25 bp, Homo sapien
taatgacagttactctcactcccaa

SEQ ID NO: 3781802 - DNA, 25 bp, Homo sapien
aactccaggcagtgtaaagtcatct

SEQ ID NO: 3781803 - DNA, 25 bp, Homo sapien
tgtacataaaggagagtctggaagc

SEQ ID NO: 3781804 - DNA, 25 bp, Homo sapien
ttgggtaattccagccttcctacag

SEQ ID NO: 3781805 - DNA, 25 bp, Homo sapien
ctggagatttgggtaattccagcct

SEQ ID NO: 3781806 - DNA, 25 bp, Homo sapien
ggagatttgggtaattccagccttc

SEQ ID NO: 3781807 - DNA, 25 bp, Homo sapien
gatttgggtaattccagccttccta

SEQ ID NO: 3781808 - DNA, 25 bp, Homo sapien
cttgaagataggcttcaaagactct

SEQ ID NO: 3781809 - DNA, 25 bp, Homo sapien
atttggctggtgagtcccccactgg

SEQ ID NO: 3781810 - DNA, 25 bp, Homo sapien
ttttgttgctcttggttccttgaag

SEQ ID NO: 3781811 - DNA, 25 bp, Homo sapien
atttggctggtgagtccaccactgg

SEQ ID NO: 3781812 - DNA, 25 bp, Homo sapien
cgactctgctaaggcagcctgtttg

SEQ ID NO: 3781813 - DNA, 25 bp, Homo sapien
catccatccattagaggcacaaggt

SEQ ID NO: 3781814 - DNA, 25 bp, Homo sapien
gacagtctcagccatataaacagga

SEQ ID NO: 3781815 - DNA, 25 bp, Homo sapien
tacattattgagacaggccgactct

SEQ ID NO: 3781816 - DNA, 25 bp, Homo sapien
tgactccactctgttgtctttcagg

SEQ ID NO: 3781817 - DNA, 25 bp, Homo sapien
cctttgtagcctgtgagactctaca

SEQ ID NO: 3781818 - DNA, 25 bp, Homo sapien
aatagctacttaagtcatctccctg

SEQ ID NO: 3781819 - DNA, 25 bp, Homo sapien
gcgtcgtccacactgtagccaaagt

SEQ ID NO: 3781820 - DNA, 25 bp, Homo sapien
aaggtggatgttgtaccagtcctac

SEQ ID NO: 3781821 - DNA, 25 bp, Homo sapien
catagcccagttcatcatgtcttaa

SEQ ID NO: 3781822 - DNA, 25 bp, Homo sapien
tatccccatggtgcctctcaaagtg

SEQ ID NO: 3781823 - DNA, 25 bp, Homo sapien
tgtcttaatcgttcctcctctccta

SEQ ID NO: 3781824 - DNA, 25 bp, Homo sapien
tgttctctggagtaaatggagctgc

SEQ ID NO: 3781825 - DNA, 25 bp, Homo sapien
tttctagaacaaggtctcttcctac

SEQ ID NO: 3781826 - DNA, 25 bp, Homo sapien
aggtctcttcctacttcagacttcc

SEQ ID NO: 3781827 - DNA, 25 bp, Homo sapien
tacttcagacttcctcagtgatgat

SEQ ID NO: 3781828 - DNA, 25 bp, Homo sapien
cttgtcggctttctagaacaaggtc

SEQ ID NO: 3781829 - DNA, 25 bp, Homo sapien
tcttggcttggaggtacccagtctt

SEQ ID NO: 3781830 - DNA, 25 bp, Homo sapien
tctttccgaaagactcatcaagggt

SEQ ID NO: 3781831 - DNA, 25 bp, Homo sapien
taagctgtgggatctttccactaaa

SEQ ID NO: 3781832 - DNA, 25 bp, Homo sapien
tgctctcttcagtaagccgtcttcc

SEQ ID NO: 3781833 - DNA, 25 bp, Homo sapien
tgacatgtccaagtagtcatgcctg

SEQ ID NO: 3781834 - DNA, 25 bp, Homo sapien
gaatggatttagcagttcaccaaga

SEQ ID NO: 3781835 - DNA, 25 bp, Homo sapien
tccttaaggattggttgacatgtcc

SEQ ID NO: 3781836 - DNA, 25 bp, Homo sapien
gatcagtctgtctttaccgtttaag

SEQ ID NO: 3781837 - DNA, 25 bp, Homo sapien
tgatctcgttattgatttaaagcga

SEQ ID NO: 3781838 - DNA, 25 bp, Homo sapien
taaagcgatggtattcaatatagat

SEQ ID NO: 3781839 - DNA, 25 bp, Homo sapien
tacttaaatgtctaatgatctcgtt

SEQ ID NO: 3781840 - DNA, 25 bp, Homo sapien
tattgatttaaagcgatggtattca

SEQ ID NO: 3781841 - DNA, 25 bp, Homo sapien
tactgattccttgaacagcagtaag

SEQ ID NO: 3781842 - DNA, 25 bp, Homo sapien
tattctagctcctactactgattcc

SEQ ID NO: 3781843 - DNA, 25 bp, Homo sapien
taggaaacagctttttacctgataa

SEQ ID NO: 3781844 - DNA, 25 bp, Homo sapien
taaacagttttgcagtgttctttaa

SEQ ID NO: 3781845 - DNA, 25 bp, Homo sapien
cactagctagtggaatgcagcctgt

SEQ ID NO: 3781846 - DNA, 25 bp, Homo sapien
gagtaccggtgttgtctatgcctta

SEQ ID NO: 3781847 - DNA, 25 bp, Homo sapien
agagtccggctcaacaaggctcagg

SEQ ID NO: 3781848 - DNA, 25 bp, Homo sapien
tccagtggacaaagtaccagcagct

SEQ ID NO: 3781849 - DNA, 25 bp, Homo sapien
tgttctagcacttcatctggctgcc

SEQ ID NO: 3781850 - DNA, 25 bp, Homo sapien
cagctatgaagaaacgcaacaagaa

SEQ ID NO: 3781851 - DNA, 25 bp, Homo sapien
acaaaggattaattgctgcaaggac

SEQ ID NO: 3781852 - DNA, 25 bp, Homo sapien
caagaaactcaatgcacaacaaagg

SEQ ID NO: 3781853 - DNA, 25 bp, Homo sapien
tgacagtaccgcagagtgattcccc

SEQ ID NO: 3781854 - DNA, 25 bp, Homo sapien
gggagccacgcttttgatgtgacag

SEQ ID NO: 3781855 - DNA, 25 bp, Homo sapien
tgtatgacagcccttccactttggg

SEQ ID NO: 3781856 - DNA, 25 bp, Homo sapien
aagacccagctgtaattagacctcc

SEQ ID NO: 3781857 - DNA, 25 bp, Homo sapien
gacaggtgactcatccatcaactcc

SEQ ID NO: 3781858 - DNA, 25 bp, Homo sapien
gactctagaaagtcgtctcttctcc

SEQ ID NO: 3781859 - DNA, 25 bp, Homo sapien
tgactcatccatcaactcctgcgag

SEQ ID NO: 3781860 - DNA, 25 bp, Homo sapien
tctcccaaggcgaaggattaccttc

SEQ ID NO: 3781861 - DNA, 25 bp, Homo sapien
ggctccgggacgtcgacctcgtcat

SEQ ID NO: 3781862 - DNA, 25 bp, Homo sapien
tagctgcatgtttgtaagtgtccgc

SEQ ID NO: 3781863 - DNA, 25 bp, Homo sapien
catgtgcgccttgtgctctgggaag

SEQ ID NO: 3781864 - DNA, 25 bp, Homo sapien
tacactggctggttgccgtctgcac

SEQ ID NO: 3781865 - DNA, 25 bp, Homo sapien
caagacagaaaagccaagtcgctgt

SEQ ID NO: 3781866 - DNA, 25 bp, Homo sapien
atgtgcagtccgtgttgtgggtcaa

SEQ ID NO: 3781867 - DNA, 25 bp, Homo sapien
aaagccaagtcgctgtcttacgctg

SEQ ID NO: 3781868 - DNA, 25 bp, Homo sapien
aagatcaagcactgggccaagacag

SEQ ID NO: 3781869 - DNA, 25 bp, Homo sapien
gaagggaacgatgatcccataatcc

SEQ ID NO: 3781870 - DNA, 25 bp, Homo sapien
caagcagaagggaacgatgatccca

SEQ ID NO: 3781871 - DNA, 25 bp, Homo sapien
ctaccaagcagaagggaacgatgat

SEQ ID NO: 3781872 - DNA, 25 bp, Homo sapien
gcagaagggaacgatgatcccataa

SEQ ID NO: 3781873 - DNA, 25 bp, Homo sapien
ggaggtaccaccttacaatgaaatg

SEQ ID NO: 3781874 - DNA, 25 bp, Homo sapien
ttgctttcataagtgcgttatgtac

SEQ ID NO: 3781875 - DNA, 25 bp, Homo sapien
tttgctttcataagtgcgttatgta

SEQ ID NO: 3781876 - DNA, 25 bp, Homo sapien
gaggtaccaccttacaatgaaatgt

SEQ ID NO: 3781877 - DNA, 25 bp, Homo sapien
cttgtctactttcaatgggagagcc

SEQ ID NO: 3781878 - DNA, 25 bp, Homo sapien
tgtctactttcaatgggagagccat

SEQ ID NO: 3781879 - DNA, 25 bp, Homo sapien
ccttgtctactttcaatgggagagc

SEQ ID NO: 3781880 - DNA, 25 bp, Homo sapien
ttgtctactttcaatgggagagcca

SEQ ID NO: 3781881 - DNA, 25 bp, Homo sapien
tgcgagcctttgcctgggtgcagac

SEQ ID NO: 3781882 - DNA, 25 bp, Homo sapien
ctagaatcataaaggcctggacatg

SEQ ID NO: 3781883 - DNA, 25 bp, Homo sapien
ggacatggctatggctggagtttga

SEQ ID NO: 3781884 - DNA, 25 bp, Homo sapien
tcccaggcatcactggtaactagaa

SEQ ID NO: 3781885 - DNA, 25 bp, Homo sapien
agaccacacaggcaggttgccatac

SEQ ID NO: 3781886 - DNA, 25 bp, Homo sapien
cctccagcttattggagaggagacc

SEQ ID NO: 3781887 - DNA, 25 bp, Homo sapien
tccagcttattggagaggagaccac

SEQ ID NO: 3781888 - DNA, 25 bp, Homo sapien
aggagaccacacaggcaggttgcca

SEQ ID NO: 3781889 - DNA, 25 bp, Homo sapien
gacatgagggaagcaccatagctcc

SEQ ID NO: 3781890 - DNA, 25 bp, Homo sapien
catagctccctgaatagagtggagg

SEQ ID NO: 3781891 - DNA, 25 bp, Homo sapien
tctggaaccaccaagctgaccctca

SEQ ID NO: 3781892 - DNA, 25 bp, Homo sapien
cctgaatagagtggaggattctgcc

SEQ ID NO: 3781893 - DNA, 25 bp, Homo sapien
catggtttgcagcaaactcaacggc

SEQ ID NO: 3781894 - DNA, 25 bp, Homo sapien
ctcatggtttgcagcaaactcaacg

SEQ ID NO: 3781895 - DNA, 25 bp, Homo sapien
tggtttgcagcaaactcaacggcat

SEQ ID NO: 3781896 - DNA, 25 bp, Homo sapien
ggtttgcagcaaactcaacggcatc

SEQ ID NO: 3781897 - DNA, 25 bp, Homo sapien
agcaggcaaggtcgggtgctctctg

SEQ ID NO: 3781898 - DNA, 25 bp, Homo sapien
tggtagcactgccaccttgctggtt

SEQ ID NO: 3781899 - DNA, 25 bp, Homo sapien
taagttgcccgcgtacattgaattg

SEQ ID NO: 3781900 - DNA, 25 bp, Homo sapien
ttggctcccgtaacaagcagatgga

SEQ ID NO: 3781901 - DNA, 25 bp, Homo sapien
cgaggacgctcttggtttggggcca

SEQ ID NO: 3781902 - DNA, 25 bp, Homo sapien
gaggacgctcttggtttggggccat

SEQ ID NO: 3781903 - DNA, 25 bp, Homo sapien
aatgaaggtgaacatcatctcccag

SEQ ID NO: 3781904 - DNA, 25 bp, Homo sapien
tgaaggtgaacatcatctcccagaa

SEQ ID NO: 3781905 - DNA, 25 bp, Homo sapien
aggtgaacatcatctcccagaatat

SEQ ID NO: 3781906 - DNA, 25 bp, Homo sapien
agaaatattgaggtacaaaatgcaa

SEQ ID NO: 3781907 - DNA, 25 bp, Homo sapien
cagcaacttgtacctagcgatacag

SEQ ID NO: 3781908 - DNA, 25 bp, Homo sapien
tcaaccagcaacttgtacctagcga

SEQ ID NO: 3781909 - DNA, 25 bp, Homo sapien
caacttgtacctagcgatacagtct

SEQ ID NO: 3781910 - DNA, 25 bp, Homo sapien
cagttcaaccagcaacttgtaccta

SEQ ID NO: 3781911 - DNA, 25 bp, Homo sapien
cataatcgggtctttcagcctgcta

SEQ ID NO: 3781912 - DNA, 25 bp, Homo sapien
gaggcgtactagcatcataatcggg

SEQ ID NO: 3781913 - DNA, 25 bp, Homo sapien
gactttatcagctgcctgggacaga

SEQ ID NO: 3781914 - DNA, 25 bp, Homo sapien
cagtgtggtcatcatgtggccggtc

SEQ ID NO: 3781915 - DNA, 25 bp, Homo sapien
gcctggcactgaccacatacggaga

SEQ ID NO: 3781916 - DNA, 25 bp, Homo sapien
tacttctgcaaaccagtcggagagg

SEQ ID NO: 3781917 - DNA, 25 bp, Homo sapien
tgtacactcagggacatgcatggcc

SEQ ID NO: 3781918 - DNA, 25 bp, Homo sapien
cagaaggacagtgtgctcggagctc

SEQ ID NO: 3781919 - DNA, 25 bp, Homo sapien
ttgctcttggacgggacacatctgg

SEQ ID NO: 3781920 - DNA, 25 bp, Homo sapien
tcttggacgggacacatctggctat

SEQ ID NO: 3781921 - DNA, 25 bp, Homo sapien
cttgctcttggacgggacacatctg

SEQ ID NO: 3781922 - DNA, 25 bp, Homo sapien
gctcttggacgggacacatctggct

SEQ ID NO: 3781923 - DNA, 25 bp, Homo sapien
tctgcgtcctctcgctgggtgatca

SEQ ID NO: 3781924 - DNA, 25 bp, Homo sapien
ttctcaggctctcctcgtcgctgga

SEQ ID NO: 3781925 - DNA, 25 bp, Homo sapien
tgatcatgtcatcgggcaaggtggt

SEQ ID NO: 3781926 - DNA, 25 bp, Homo sapien
gttctgctatgtcaaagtccttctg

SEQ ID NO: 3781927 - DNA, 25 bp, Homo sapien
cacagagcaggcagcgcactaggca

SEQ ID NO: 3781928 - DNA, 25 bp, Homo sapien
ttaaggagacggtgagaacagcagc

SEQ ID NO: 3781929 - DNA, 25 bp, Homo sapien
gtgaattaaggagacggtgagaaca

SEQ ID NO: 3781930 - DNA, 25 bp, Homo sapien
ggcaaggtgaattaaggagacggtg

SEQ ID NO: 3781931 - DNA, 25 bp, Homo sapien
ttgtcaaaatactaggaagcctctg

SEQ ID NO: 3781932 - DNA, 25 bp, Homo sapien
tgtacgtaacacataagctctgcta

SEQ ID NO: 3781933 - DNA, 25 bp, Homo sapien
tgggaaacgttggtgccctatgtac

SEQ ID NO: 3781934 - DNA, 25 bp, Homo sapien
gatgatgccaagtgacgaggccacc

SEQ ID NO: 3781935 - DNA, 25 bp, Homo sapien
taaatggatcacactgcttacggat

SEQ ID NO: 3781936 - DNA, 25 bp, Homo sapien
gaaggtcattttcccctgtgctagc

SEQ ID NO: 3781937 - DNA, 25 bp, Homo sapien
tgtgctagcctattaagccagctgt

SEQ ID NO: 3781938 - DNA, 25 bp, Homo sapien
caagctccaggaagatctacgtcag

SEQ ID NO: 3781939 - DNA, 25 bp, Homo sapien
ccagatttagagttcattaggcaaa

SEQ ID NO: 3781940 - DNA, 25 bp, Homo sapien
tgagatagaggaagtatgaactcac

SEQ ID NO: 3781941 - DNA, 25 bp, Homo sapien
tggcttgctggtgcccgtatttcaa

SEQ ID NO: 3781942 - DNA, 25 bp, Homo sapien
ggagatatgaccagatttagagttc

SEQ ID NO: 3781943 - DNA, 25 bp, Homo sapien
tggggagcaggtcactgaatccttc

SEQ ID NO: 3781944 - DNA, 25 bp, Homo sapien
ctggggagcaggtcactgaatcctt

SEQ ID NO: 3781945 - DNA, 25 bp, Homo sapien
gaaagaccctcagtcgtctgtcgca

SEQ ID NO: 3781946 - DNA, 25 bp, Homo sapien
tgaacacagttcattggatcttagg

SEQ ID NO: 3781947 - DNA, 25 bp, Homo sapien
cagagagattaaatggatagctcca

SEQ ID NO: 3781948 - DNA, 25 bp, Homo sapien
gaaacgattccatgtaagctccatg

SEQ ID NO: 3781949 - DNA, 25 bp, Homo sapien
tggaatgccagtctcatagaaactg

SEQ ID NO: 3781950 - DNA, 25 bp, Homo sapien
cacagtagcaatatgaggtaggcat

SEQ ID NO: 3781951 - DNA, 25 bp, Homo sapien
aaatgattaacctaggtctctggcc

SEQ ID NO: 3781952 - DNA, 25 bp, Homo sapien
gaggctaaatctgccccttgaatcc

SEQ ID NO: 3781953 - DNA, 25 bp, Homo sapien
gctagctgcattccttgagtcttgg

SEQ ID NO: 3781954 - DNA, 25 bp, Homo sapien
tgtaatagtccgctctcacatggct

SEQ ID NO: 3781955 - DNA, 25 bp, Homo sapien
gatcttgtgagacctctgtcccgag

SEQ ID NO: 3781956 - DNA, 25 bp, Homo sapien
caaatttccctctaagaagtgtgct

SEQ ID NO: 3781957 - DNA, 25 bp, Homo sapien
cttgggaagagccatatccatggca

SEQ ID NO: 3781958 - DNA, 25 bp, Homo sapien
tatctgaggaactaatattgtgggc

SEQ ID NO: 3781959 - DNA, 25 bp, Homo sapien
caccacattgtgattccaagcagaa

SEQ ID NO: 3781960 - DNA, 25 bp, Homo sapien
tataaagctcaatgcctagggtgac

SEQ ID NO: 3781961 - DNA, 25 bp, Homo sapien
aaatatctattgcagacacggaatc

SEQ ID NO: 3781962 - DNA, 25 bp, Homo sapien
aatatctattgcagacacggaatca

SEQ ID NO: 3781963 - DNA, 25 bp, Homo sapien
tgtcacagatcgacccaattcgtgg

SEQ ID NO: 3781964 - DNA, 25 bp, Homo sapien
cacagatcgacccaattcgtgggca

SEQ ID NO: 3781965 - DNA, 25 bp, Homo sapien
gggcaatcttttcccatcgacctgg

SEQ ID NO: 3781966 - DNA, 25 bp, Homo sapien
ccaattcgtgggcaatcttttccca

SEQ ID NO: 3781967 - DNA, 25 bp, Homo sapien
gcatactgctttgccacttaaaacc

SEQ ID NO: 3781968 - DNA, 25 bp, Homo sapien
tacagcagccatgagggtggccatg

SEQ ID NO: 3781969 - DNA, 25 bp, Homo sapien
taatctggagccaactgtagctgtg

SEQ ID NO: 3781970 - DNA, 25 bp, Homo sapien
tgtagctgtgaaagtcaaatgaatg

SEQ ID NO: 3781971 - DNA, 25 bp, Homo sapien
gaacattattgggtaaactgaaggc

SEQ ID NO: 3781972 - DNA, 25 bp, Homo sapien
gagcaaggccttggttgtatttctg

SEQ ID NO: 3781973 - DNA, 25 bp, Homo sapien
gtaaactgaaggcaactccatccat

SEQ ID NO: 3781974 - DNA, 25 bp, Homo sapien
tatttctgaacattattgggtaaac

SEQ ID NO: 3781975 - DNA, 25 bp, Homo sapien
gaaacaataacactatcatcaactt

SEQ ID NO: 3781976 - DNA, 25 bp, Homo sapien
aatgattttcttaagacctcctagg

SEQ ID NO: 3781977 - DNA, 25 bp, Homo sapien
aggaagttcatacaagagccaaatt

SEQ ID NO: 3781978 - DNA, 25 bp, Homo sapien
cagtgctctataaaagttacgttct

SEQ ID NO: 3781979 - DNA, 25 bp, Homo sapien
cgtatttaaggactaacatgacact

SEQ ID NO: 3781980 - DNA, 25 bp, Homo sapien
gagcactgctaaatctatgctagaa

SEQ ID NO: 3781981 - DNA, 25 bp, Homo sapien
gaaagactttacaatgtgacactag

SEQ ID NO: 3781982 - DNA, 25 bp, Homo sapien
ggaaaccaaagttagatgcatcact

SEQ ID NO: 3781983 - DNA, 25 bp, Homo sapien
tccccacctgtcaagggcagggtga

SEQ ID NO: 3781984 - DNA, 25 bp, Homo sapien
ttcttgtgcctcagtgatatggttt

SEQ ID NO: 3781985 - DNA, 25 bp, Homo sapien
tcagctccctgccacctcaggctcc

SEQ ID NO: 3781986 - DNA, 25 bp, Homo sapien
cacctgtcaagggcagggtgaggtg

SEQ ID NO: 3781987 - DNA, 25 bp, Homo sapien
gaaaaaactcctacaggatgagaga

SEQ ID NO: 3781988 - DNA, 25 bp, Homo sapien
tgtaaaatggttcggctgcagtgga

SEQ ID NO: 3781989 - DNA, 25 bp, Homo sapien
tatcactgcacaccctagggtggct

SEQ ID NO: 3781990 - DNA, 25 bp, Homo sapien
tggaatcctcgtatattgctagtga

SEQ ID NO: 3781991 - DNA, 25 bp, Homo sapien
tctttccagctttatctcatattct

SEQ ID NO: 3781992 - DNA, 25 bp, Homo sapien
cagctttatctcatattctactcct

SEQ ID NO: 3781993 - DNA, 25 bp, Homo sapien
tccagctttatctcatattctactc

SEQ ID NO: 3781994 - DNA, 25 bp, Homo sapien
tttccagctttatctcatattctac

SEQ ID NO: 3781995 - DNA, 25 bp, Homo sapien
tatttcttatttaattcattgcagc

SEQ ID NO: 3781996 - DNA, 25 bp, Homo sapien
ttatttcttatttaattcattgcag

SEQ ID NO: 3781997 - DNA, 25 bp, Homo sapien
atttcttatttaattcattgcagcc

SEQ ID NO: 3781998 - DNA, 25 bp, Homo sapien
taattgggtgcttgattaacttaac

SEQ ID NO: 3781999 - DNA, 25 bp, Homo sapien
tcccaagattatgctctctcagcag

SEQ ID NO: 3782000 - DNA, 25 bp, Homo sapien
tctcccaacctttagagaccaggat

SEQ ID NO: 3782001 - DNA, 25 bp, Homo sapien
ggtcaccatgactaattgggtgctt

SEQ ID NO: 3782002 - DNA, 25 bp, Homo sapien
ctgtgcccggtcataaactatattt

SEQ ID NO: 3782003 - DNA, 25 bp, Homo sapien
actgtgcccggtcataaactatatt

SEQ ID NO: 3782004 - DNA, 25 bp, Homo sapien
gaaatttaaagcattaacacttaga

SEQ ID NO: 3782005 - DNA, 25 bp, Homo sapien
agaggaaatttaaagcattaacact

SEQ ID NO: 3782006 - DNA, 25 bp, Homo sapien
cattggtatatcaataataaagctg

SEQ ID NO: 3782007 - DNA, 25 bp, Homo sapien
gacacttgtgaggaaaatctacatg

SEQ ID NO: 3782008 - DNA, 25 bp, Homo sapien
gacaacgggttcacaggtatatctg

SEQ ID NO: 3782009 - DNA, 25 bp, Homo sapien
tatctgtatgtcaaagagcatgaaa

SEQ ID NO: 3782010 - DNA, 25 bp, Homo sapien
acctcctgggttcaagtgattctcc

SEQ ID NO: 3782011 - DNA, 25 bp, Homo sapien
ccttggctcaccgtaacctcaacct

SEQ ID NO: 3782012 - DNA, 25 bp, Homo sapien
gtgaccttggctcaccgtaacctca

SEQ ID NO: 3782013 - DNA, 25 bp, Homo sapien
tgcctcaagctctcaagtagctggg

SEQ ID NO: 3782014 - DNA, 25 bp, Homo sapien
gattaagaccgtgtggtagtagcac

SEQ ID NO: 3782015 - DNA, 25 bp, Homo sapien
tggaactaagcagaacatgtggaaa

SEQ ID NO: 3782016 - DNA, 25 bp, Homo sapien
tagtagcacaaggatgaacaagtag

SEQ ID NO: 3782017 - DNA, 25 bp, Homo sapien
tggaaaacaacaagctgcattaaac

SEQ ID NO: 3782018 - DNA, 25 bp, Homo sapien
cattcatgttagtggctgctgactc

SEQ ID NO: 3782019 - DNA, 25 bp, Homo sapien
tcttcaagtttgaccatgggattgc

SEQ ID NO: 3782020 - DNA, 25 bp, Homo sapien
tctattggtagagggtcttgcattc

SEQ ID NO: 3782021 - DNA, 25 bp, Homo sapien
aaccctgctagttcctttatcagtg

SEQ ID NO: 3782022 - DNA, 25 bp, Homo sapien
gtttctaaaggtgtgtatacaggaa

SEQ ID NO: 3782023 - DNA, 25 bp, Homo sapien
tgtatacaggaaattcaggttttgg

SEQ ID NO: 3782024 - DNA, 25 bp, Homo sapien
tggaagttccatgatcataagactg

SEQ ID NO: 3782025 - DNA, 25 bp, Homo sapien
ctgttttttctgtgttcggttcctg

SEQ ID NO: 3782026 - DNA, 25 bp, Homo sapien
ccctatgttaccacaggcaaagtgt

SEQ ID NO: 3782027 - DNA, 25 bp, Homo sapien
tgttctaacctaaactgcggctgct

SEQ ID NO: 3782028 - DNA, 25 bp, Homo sapien
tcccatccgtgagcaccctatgtta

SEQ ID NO: 3782029 - DNA, 25 bp, Homo sapien
taagtgcttcatcctacagggtgtg

SEQ ID NO: 3782030 - DNA, 25 bp, Homo sapien
tcagttctagtcagtgcatcttcct

SEQ ID NO: 3782031 - DNA, 25 bp, Homo sapien
atatttagcataaaactgcccagca

SEQ ID NO: 3782032 - DNA, 25 bp, Homo sapien
gttcagttctagtcagtgcatcttc

SEQ ID NO: 3782033 - DNA, 25 bp, Homo sapien
atttagcataaaactgcccagcatc

SEQ ID NO: 3782034 - DNA, 25 bp, Homo sapien
cagatagtctataggaataccactt

SEQ ID NO: 3782035 - DNA, 25 bp, Homo sapien
cctcagatagtctataggaatacca

SEQ ID NO: 3782036 - DNA, 25 bp, Homo sapien
ctccttggctcaaacctcagatagt

SEQ ID NO: 3782037 - DNA, 25 bp, Homo sapien
gctcaaacctcagatagtctatagg

SEQ ID NO: 3782038 - DNA, 25 bp, Homo sapien
gctttgccctctggctacaatattg

SEQ ID NO: 3782039 - DNA, 25 bp, Homo sapien
tgctttgccctctggctacaatatt

SEQ ID NO: 3782040 - DNA, 25 bp, Homo sapien
gccctctggctacaatattgtactt

SEQ ID NO: 3782041 - DNA, 25 bp, Homo sapien
ttgccctctggctacaatattgtac

SEQ ID NO: 3782042 - DNA, 25 bp, Homo sapien
ctggccaatatttaagatttcctga

SEQ ID NO: 3782043 - DNA, 25 bp, Homo sapien
cattaaacagggatatttatgctta

SEQ ID NO: 3782044 - DNA, 25 bp, Homo sapien
gattatataagatacaacagtttcc

SEQ ID NO: 3782045 - DNA, 25 bp, Homo sapien
tacgtaattatagagcataggctcc

SEQ ID NO: 3782046 - DNA, 25 bp, Homo sapien
taggcaatgcacaaccaaatgagtt

SEQ ID NO: 3782047 - DNA, 25 bp, Homo sapien
tatgagagaaactgatggtctgaac

SEQ ID NO: 3782048 - DNA, 25 bp, Homo sapien
taagttctgactgctgaagacctgt

SEQ ID NO: 3782049 - DNA, 25 bp, Homo sapien
taggcaacctatacatcctgatggg

SEQ ID NO: 3782050 - DNA, 25 bp, Homo sapien
aatggtcctatatcacaagagtggt

SEQ ID NO: 3782051 - DNA, 25 bp, Homo sapien
aacaatggtcctatatcacaagagt

SEQ ID NO: 3782052 - DNA, 25 bp, Homo sapien
caagagtggtacataaagtacacgt

SEQ ID NO: 3782053 - DNA, 25 bp, Homo sapien
ggtcctatatcacaagagtggtaca

SEQ ID NO: 3782054 - DNA, 25 bp, Homo sapien
tgttccaattaccaatccagataac

SEQ ID NO: 3782055 - DNA, 25 bp, Homo sapien
atctaaaattaatacaaaggtcatc

SEQ ID NO: 3782056 - DNA, 25 bp, Homo sapien
atccagataacttcgggtgaaaaag

SEQ ID NO: 3782057 - DNA, 25 bp, Homo sapien
aattaccaatccagataacttcggg

SEQ ID NO: 3782058 - DNA, 25 bp, Homo sapien
tgaggtaatgcttttagtgtaaggc

SEQ ID NO: 3782059 - DNA, 25 bp, Homo sapien
ggtaatgcttttagtgtaaggcaaa

SEQ ID NO: 3782060 - DNA, 25 bp, Homo sapien
aaaccaaatccccagtttgcatgga

SEQ ID NO: 3782061 - DNA, 25 bp, Homo sapien
aatccccagtttgcatggaagcaaa

SEQ ID NO: 3782062 - DNA, 25 bp, Homo sapien
ttttctgaagcaccgagttttgata

SEQ ID NO: 3782063 - DNA, 25 bp, Homo sapien
tctgaagcaccgagttttgatacat

SEQ ID NO: 3782064 - DNA, 25 bp, Homo sapien
gaagcaccgagttttgatacatcca

SEQ ID NO: 3782065 - DNA, 25 bp, Homo sapien
gcaccgagttttgatacatccacac

SEQ ID NO: 3782066 - DNA, 25 bp, Homo sapien
atgaagttcaggactgtcagtcatg

SEQ ID NO: 3782067 - DNA, 25 bp, Homo sapien
cagtcatgtgcatctccatagcaat

SEQ ID NO: 3782068 - DNA, 25 bp, Homo sapien
agttcaggactgtcagtcatgtgca

SEQ ID NO: 3782069 - DNA, 25 bp, Homo sapien
tcatgtgcatctccatagcaatcaa

SEQ ID NO: 3782070 - DNA, 25 bp, Homo sapien
tataaaattaaggaggctagttcat

SEQ ID NO: 3782071 - DNA, 25 bp, Homo sapien
taaggaggctagttcatttgattta

SEQ ID NO: 3782072 - DNA, 25 bp, Homo sapien
aattaaggaggctagttcatttgat

SEQ ID NO: 3782073 - DNA, 25 bp, Homo sapien
aaattaaggaggctagttcatttga

SEQ ID NO: 3782074 - DNA, 25 bp, Homo sapien
tagtagaatacaggctgtcgccaat

SEQ ID NO: 3782075 - DNA, 25 bp, Homo sapien
tgctcatttttctcacccgcctgta

SEQ ID NO: 3782076 - DNA, 25 bp, Homo sapien
tgaacaagagtaatgccagctcagc

SEQ ID NO: 3782077 - DNA, 25 bp, Homo sapien
agattgaccaaaccacagcataatg

SEQ ID NO: 3782078 - DNA, 25 bp, Homo sapien
tccattgatcagaatatcatcatac

SEQ ID NO: 3782079 - DNA, 25 bp, Homo sapien
aagtccattgatcagaatatcatca

SEQ ID NO: 3782080 - DNA, 25 bp, Homo sapien
ctggaagtccattgatcagaatatc

SEQ ID NO: 3782081 - DNA, 25 bp, Homo sapien
ggaagtccattgatcagaatatcat

SEQ ID NO: 3782082 - DNA, 25 bp, Homo sapien
taggaaacatgtctatgacaatttc

SEQ ID NO: 3782083 - DNA, 25 bp, Homo sapien
taaataactgtgataccaaaatgca

SEQ ID NO: 3782084 - DNA, 25 bp, Homo sapien
tgcatctgatttcagagaaaacaca

SEQ ID NO: 3782085 - DNA, 25 bp, Homo sapien
tatcaatttaactgctattcccttt

SEQ ID NO: 3782086 - DNA, 25 bp, Homo sapien
ctctgccttcgttcatcatccttta

SEQ ID NO: 3782087 - DNA, 25 bp, Homo sapien
gccttcgttcatcatcctttaaaac

SEQ ID NO: 3782088 - DNA, 25 bp, Homo sapien
ttcgttcatcatcctttaaaacttc

SEQ ID NO: 3782089 - DNA, 25 bp, Homo sapien
tgccttcgttcatcatcctttaaaa

SEQ ID NO: 3782090 - DNA, 25 bp, Homo sapien
gaaagcttacgatatgcttttctga

SEQ ID NO: 3782091 - DNA, 25 bp, Homo sapien
aagttagtgaaagcttacgatatgc

SEQ ID NO: 3782092 - DNA, 25 bp, Homo sapien
ttctgatgtctgcagatgatgcatc

SEQ ID NO: 3782093 - DNA, 25 bp, Homo sapien
tattcttgtctggatgtaaagttag

SEQ ID NO: 3782094 - DNA, 25 bp, Homo sapien
tactgtaccttccaatagcaatgtc

SEQ ID NO: 3782095 - DNA, 25 bp, Homo sapien
cttccaatagcaatgtcaaatgaac

SEQ ID NO: 3782096 - DNA, 25 bp, Homo sapien
atagcaatgtcaaatgaactcatct

SEQ ID NO: 3782097 - DNA, 25 bp, Homo sapien
tctgcttctgcctactgtaccttcc

SEQ ID NO: 3782098 - DNA, 25 bp, Homo sapien
tctggatacataggtctgaaactca

SEQ ID NO: 3782099 - DNA, 25 bp, Homo sapien
tgctagagtaatgggtacagatacc

SEQ ID NO: 3782100 - DNA, 25 bp, Homo sapien
aatccgcaggccagagaagacaatg

SEQ ID NO: 3782101 - DNA, 25 bp, Homo sapien
cagcactgacagtatgtttccagag

SEQ ID NO: 3782102 - DNA, 25 bp, Homo sapien
gattttagaacgtatcccctacaga

SEQ ID NO: 3782103 - DNA, 25 bp, Homo sapien
aacatagtttcagccatccattggg

SEQ ID NO: 3782104 - DNA, 25 bp, Homo sapien
gaccttatcagttacagtggaggca

SEQ ID NO: 3782105 - DNA, 25 bp, Homo sapien
gagactactggacattaggaaccca

SEQ ID NO: 3782106 - DNA, 25 bp, Homo sapien
cttctcagggtagagctctagctcc

SEQ ID NO: 3782107 - DNA, 25 bp, Homo sapien
ttctcagggtagagctctagctcca

SEQ ID NO: 3782108 - DNA, 25 bp, Homo sapien
tctcagggtagagctctagctccat

SEQ ID NO: 3782109 - DNA, 25 bp, Homo sapien
gtggcaccaacacatggttcactgc

SEQ ID NO: 3782110 - DNA, 25 bp, Homo sapien
ggcctgacttttttcgtgtgttatg

SEQ ID NO: 3782111 - DNA, 25 bp, Homo sapien
ttgaaaatcattcctactgtccctg

SEQ ID NO: 3782112 - DNA, 25 bp, Homo sapien
tcgtgtgttatgttgcatttagcat

SEQ ID NO: 3782113 - DNA, 25 bp, Homo sapien
aatgccctgaagacaatacactctt

SEQ ID NO: 3782114 - DNA, 25 bp, Homo sapien
tctagaattccagtattgaggttat

SEQ ID NO: 3782115 - DNA, 25 bp, Homo sapien
gctatggaaaagtcatcaatctata

SEQ ID NO: 3782116 - DNA, 25 bp, Homo sapien
aaaggcagcttcacttggcatagaa

SEQ ID NO: 3782117 - DNA, 25 bp, Homo sapien
tatatacctagggtggacgcgttcc

SEQ ID NO: 3782118 - DNA, 25 bp, Homo sapien
gatatctggagaacaaagtcattcc

SEQ ID NO: 3782119 - DNA, 25 bp, Homo sapien
actttgcactgcagactcgccctga

SEQ ID NO: 3782120 - DNA, 25 bp, Homo sapien
gacacttctaaagagtaccagtgag

SEQ ID NO: 3782121 - DNA, 25 bp, Homo sapien
aatgtatttagctgtgcaacgttca

SEQ ID NO: 3782122 - DNA, 25 bp, Homo sapien
tctgcagtcaatcccggttccaata

SEQ ID NO: 3782123 - DNA, 25 bp, Homo sapien
tatgcagtcttatgtgtctggctgt

SEQ ID NO: 3782124 - DNA, 25 bp, Homo sapien
taggcatccctatttacccattgag

SEQ ID NO: 3782125 - DNA, 25 bp, Homo sapien
gattagagaccttatgttacccaag

SEQ ID NO: 3782126 - DNA, 25 bp, Homo sapien
tacatgttgtttccagcttgacagc

SEQ ID NO: 3782127 - DNA, 25 bp, Homo sapien
tggtattacggcaacccaactttga

SEQ ID NO: 3782128 - DNA, 25 bp, Homo sapien
tcagaggccataccaacgttcaagg

SEQ ID NO: 3782129 - DNA, 25 bp, Homo sapien
aatactatgtaacccgtgatgcagc

SEQ ID NO: 3782130 - DNA, 25 bp, Homo sapien
gagtgaaatcagtacggccattttg

SEQ ID NO: 3782131 - DNA, 25 bp, Homo sapien
aatccagagccgattaagatgcaca

SEQ ID NO: 3782132 - DNA, 25 bp, Homo sapien
gtgatgcagctaacccattctgggt

SEQ ID NO: 3782133 - DNA, 25 bp, Homo sapien
agctgatgtgattgtctaatataaa

SEQ ID NO: 3782134 - DNA, 25 bp, Homo sapien
gctgatgtgattgtctaatataaaa

SEQ ID NO: 3782135 - DNA, 25 bp, Homo sapien
atagtgagggttcctaatcagtgtt

SEQ ID NO: 3782136 - DNA, 25 bp, Homo sapien
agtgagggttcctaatcagtgtttt

SEQ ID NO: 3782137 - DNA, 25 bp, Homo sapien
tcatgagtgcttataaggttccaca

SEQ ID NO: 3782138 - DNA, 25 bp, Homo sapien
gttccacagattttgaacgctgtac

SEQ ID NO: 3782139 - DNA, 25 bp, Homo sapien
tgagtgcttataaggttccacagat

SEQ ID NO: 3782140 - DNA, 25 bp, Homo sapien
tataaggttccacagattttgaacg

SEQ ID NO: 3782141 - DNA, 25 bp, Homo sapien
ggaatacatgtacttggatctggtc

SEQ ID NO: 3782142 - DNA, 25 bp, Homo sapien
tgggaatacatgtacttggatctgg

SEQ ID NO: 3782143 - DNA, 25 bp, Homo sapien
atacatgtacttggatctggtctac

SEQ ID NO: 3782144 - DNA, 25 bp, Homo sapien
agtgggaatacatgtacttggatct

SEQ ID NO: 3782145 - DNA, 25 bp, Homo sapien
tgtcaaaactgcatatgtctgctcc

SEQ ID NO: 3782146 - DNA, 25 bp, Homo sapien
agtcaatccggctaaggtacaatgg

SEQ ID NO: 3782147 - DNA, 25 bp, Homo sapien
tcttacctacccacagcaaactttg

SEQ ID NO: 3782148 - DNA, 25 bp, Homo sapien
ttgttccaggcctttgacaccttca

SEQ ID NO: 3782149 - DNA, 25 bp, Homo sapien
tggtccctcatgtttggctagtcac

SEQ ID NO: 3782150 - DNA, 25 bp, Homo sapien
gattatatcacgaaggtggagtcct

SEQ ID NO: 3782151 - DNA, 25 bp, Homo sapien
ggtgccatctatgaccagaaggccc

SEQ ID NO: 3782152 - DNA, 25 bp, Homo sapien
ggtccctgaaagtcatctaacaaag

SEQ ID NO: 3782153 - DNA, 25 bp, Homo sapien
cttccaatcgcatcccaagtccttt

SEQ ID NO: 3782154 - DNA, 25 bp, Homo sapien
ggcttctcttccaatcgcatcccaa

SEQ ID NO: 3782155 - DNA, 25 bp, Homo sapien
acacctccaacctggttagacgctt

SEQ ID NO: 3782156 - DNA, 25 bp, Homo sapien
cctggttagacgcttcaaattcctc

SEQ ID NO: 3782157 - DNA, 25 bp, Homo sapien
gctaaaaagatgacgaagtacaaag

SEQ ID NO: 3782158 - DNA, 25 bp, Homo sapien
gatgacgaagtacaaagtaagaaaa

SEQ ID NO: 3782159 - DNA, 25 bp, Homo sapien
aacaggctaaaaagatgacgaagta

SEQ ID NO: 3782160 - DNA, 25 bp, Homo sapien
aagatgacgaagtacaaagtaagaa

SEQ ID NO: 3782161 - DNA, 25 bp, Homo sapien
ccagaacgccggagcagagagaagg

SEQ ID NO: 3782162 - DNA, 25 bp, Homo sapien
ttccccagaacgccggagcagagag

SEQ ID NO: 3782163 - DNA, 25 bp, Homo sapien
cccagaacgccggagcagagagaag

SEQ ID NO: 3782164 - DNA, 25 bp, Homo sapien
tcttccccagaacgccggagcagag

SEQ ID NO: 3782165 - DNA, 25 bp, Homo sapien
ctgctgcaccccgaggaactggtag

SEQ ID NO: 3782166 - DNA, 25 bp, Homo sapien
cactaagtcaaacaactccaggtct

SEQ ID NO: 3782167 - DNA, 25 bp, Homo sapien
gctgcaccccgaggaactggtagaa

SEQ ID NO: 3782168 - DNA, 25 bp, Homo sapien
ctccactaagtcaaacaactccagg

SEQ ID NO: 3782169 - DNA, 25 bp, Homo sapien
ggcgtccaggaagctgcgccggctg

SEQ ID NO: 3782170 - DNA, 25 bp, Homo sapien
gtccaggaagctgcgccggctggga

SEQ ID NO: 3782171 - DNA, 25 bp, Homo sapien
cgtccaggaagctgcgccggctggg

SEQ ID NO: 3782172 - DNA, 25 bp, Homo sapien
ggcggcgtccaggaagctgcgccgg

SEQ ID NO: 3782173 - DNA, 25 bp, Homo sapien
tgggctcggaaaggtcacccgccgc

SEQ ID NO: 3782174 - DNA, 25 bp, Homo sapien
cgcgctgggctcggaaaggtcaccc

SEQ ID NO: 3782175 - DNA, 25 bp, Homo sapien
ttggccgagagctgggacgtggcgg

SEQ ID NO: 3782176 - DNA, 25 bp, Homo sapien
cgccgcgcagctccgttggccgaga

SEQ ID NO: 3782177 - DNA, 25 bp, Homo sapien
gcagccagcgctacgttccgaagac

SEQ ID NO: 3782178 - DNA, 25 bp, Homo sapien
ctgtcagtgaaaagcgcgggcaggc

SEQ ID NO: 3782179 - DNA, 25 bp, Homo sapien
gcacagtgggtgaggcttcccttcg

SEQ ID NO: 3782180 - DNA, 25 bp, Homo sapien
ccaggcctacacacagctgtagagg

SEQ ID NO: 3782181 - DNA, 25 bp, Homo sapien
tgagagacagggacggttatagcca

SEQ ID NO: 3782182 - DNA, 25 bp, Homo sapien
gagagacagggacggttatagccat

SEQ ID NO: 3782183 - DNA, 25 bp, Homo sapien
ctgagagacagggacggttatagcc

SEQ ID NO: 3782184 - DNA, 25 bp, Homo sapien
gctgagagacagggacggttatagc

SEQ ID NO: 3782185 - DNA, 25 bp, Homo sapien
tcagttcagtatatggtcaaccagg

SEQ ID NO: 3782186 - DNA, 25 bp, Homo sapien
tcagccccggttgattcatacatct

SEQ ID NO: 3782187 - DNA, 25 bp, Homo sapien
tcatacatctttctaacatcactgg

SEQ ID NO: 3782188 - DNA, 25 bp, Homo sapien
tcaggaaggtgcttcccgccttcag

SEQ ID NO: 3782189 - DNA, 25 bp, Homo sapien
ctgaaggagatatttgcctggttgg

SEQ ID NO: 3782190 - DNA, 25 bp, Homo sapien
tgcttgctgcctttataccaccagt

SEQ ID NO: 3782191 - DNA, 25 bp, Homo sapien
tgcctggttggaggtgcatcaaact

SEQ ID NO: 3782192 - DNA, 25 bp, Homo sapien
ggtgcatcaaactgtgtgcttgctg

SEQ ID NO: 3782193 - DNA, 25 bp, Homo sapien
gctctttcgaatagtgctttgcctg

SEQ ID NO: 3782194 - DNA, 25 bp, Homo sapien
tgtagtggctccaccataatagtgg

SEQ ID NO: 3782195 - DNA, 25 bp, Homo sapien
ttccttttcagcacggtccacatgc

SEQ ID NO: 3782196 - DNA, 25 bp, Homo sapien
ggtgtagtccagcatgcagaatggc

SEQ ID NO: 3782197 - DNA, 25 bp, Homo sapien
gagtttcactactacatactgtaag

SEQ ID NO: 3782198 - DNA, 25 bp, Homo sapien
caccagaatgtaggtagactggagt

SEQ ID NO: 3782199 - DNA, 25 bp, Homo sapien
ttggctaggatgtgagttctctgag

SEQ ID NO: 3782200 - DNA, 25 bp, Homo sapien
gactggagttctttaacagcagtga

SEQ ID NO: 3782201 - DNA, 25 bp, Homo sapien
cattctcctcccataaattgggtta

SEQ ID NO: 3782202 - DNA, 25 bp, Homo sapien
ccattctcctcccataaattgggtt

SEQ ID NO: 3782203 - DNA, 25 bp, Homo sapien
cctttttagtgacaaatgttaccat

SEQ ID NO: 3782204 - DNA, 25 bp, Homo sapien
gtgacaaatgttaccattctcctcc

SEQ ID NO: 3782205 - DNA, 25 bp, Homo sapien
tatcatccatgcccctcaacttttc

SEQ ID NO: 3782206 - DNA, 25 bp, Homo sapien
tatatcatccatgcccctcaacttt

SEQ ID NO: 3782207 - DNA, 25 bp, Homo sapien
atatcatccatgcccctcaactttt

SEQ ID NO: 3782208 - DNA, 25 bp, Homo sapien
tgcaaagatacgaatttctttaggg

SEQ ID NO: 3782209 - DNA, 25 bp, Homo sapien
aaaatagcacagaaatgccatcaag

SEQ ID NO: 3782210 - DNA, 25 bp, Homo sapien
taggagccatgggttacgctgcaga

SEQ ID NO: 3782211 - DNA, 25 bp, Homo sapien
cacactgcacataacaagtccccaa

SEQ ID NO: 3782212 - DNA, 25 bp, Homo sapien
ccaaaaccacggcacatccacctct

SEQ ID NO: 3782213 - DNA, 25 bp, Homo sapien
tgtgacacagcagaacccgtttcca

SEQ ID NO: 3782214 - DNA, 25 bp, Homo sapien
gtattactccttgtactgttcccca

SEQ ID NO: 3782215 - DNA, 25 bp, Homo sapien
aaaaccacggcacatccacctctcc

SEQ ID NO: 3782216 - DNA, 25 bp, Homo sapien
tactatcactaagggctgtgtcaag

SEQ ID NO: 3782217 - DNA, 25 bp, Homo sapien
tcactaagggctgtgtcaaggccac

SEQ ID NO: 3782218 - DNA, 25 bp, Homo sapien
taagggctgtgtcaaggccaccaca

SEQ ID NO: 3782219 - DNA, 25 bp, Homo sapien
ggctttactatcactaagggctgtg

SEQ ID NO: 3782220 - DNA, 25 bp, Homo sapien
gcagccaaggttccttgaggagaga

SEQ ID NO: 3782221 - DNA, 25 bp, Homo sapien
tgggttgaatggtaaatgttggttc

SEQ ID NO: 3782222 - DNA, 25 bp, Homo sapien
gagatgtagcgttccacacgtttaa

SEQ ID NO: 3782223 - DNA, 25 bp, Homo sapien
aatgtgggttgaatggtaaatgttg

SEQ ID NO: 3782224 - DNA, 25 bp, Homo sapien
tccacctgtatcttatttattctca

SEQ ID NO: 3782225 - DNA, 25 bp, Homo sapien
gccctcttgtccagataatgcctac

SEQ ID NO: 3782226 - DNA, 25 bp, Homo sapien
taatgcctacttcggttctctgttc

SEQ ID NO: 3782227 - DNA, 25 bp, Homo sapien
tgtccagataatgcctacttcggtt

SEQ ID NO: 3782228 - DNA, 25 bp, Homo sapien
gagtagtgccttgtgtaatccatcg

SEQ ID NO: 3782229 - DNA, 25 bp, Homo sapien
ccaataacagggtggcgaagtacac

SEQ ID NO: 3782230 - DNA, 25 bp, Homo sapien
ttgatcaagtagctcgcacgcaggg

SEQ ID NO: 3782231 - DNA, 25 bp, Homo sapien
ccttgaaagtaatggaagctgctcc

SEQ ID NO: 3782232 - DNA, 25 bp, Homo sapien
tcgtgcctgtaatcttaagtgcttc

SEQ ID NO: 3782233 - DNA, 25 bp, Homo sapien
tgcctgtaatcttaagtgcttcagg

SEQ ID NO: 3782234 - DNA, 25 bp, Homo sapien
gaaaactgttgagaagtctttatac

SEQ ID NO: 3782235 - DNA, 25 bp, Homo sapien
cacatactctgagtttagagcatta

SEQ ID NO: 3782236 - DNA, 25 bp, Homo sapien
gatgaggcagcctatgcggagctca

SEQ ID NO: 3782237 - DNA, 25 bp, Homo sapien
atgagcgagatgaggcagcctatgc

SEQ ID NO: 3782238 - DNA, 25 bp, Homo sapien
cagcctatgcggagctcagggccat

SEQ ID NO: 3782239 - DNA, 25 bp, Homo sapien
tgcatgagcgagatgaggcagccta

SEQ ID NO: 3782240 - DNA, 25 bp, Homo sapien
tgcaccggccgaaagcgaagggctc

SEQ ID NO: 3782241 - DNA, 25 bp, Homo sapien
ccggctggccgcgtagtgtaagggt

SEQ ID NO: 3782242 - DNA, 25 bp, Homo sapien
tatcccggaggcctgaactcgattt

SEQ ID NO: 3782243 - DNA, 25 bp, Homo sapien
cgctcacctgcagccgggagaggac

SEQ ID NO: 3782244 - DNA, 25 bp, Homo sapien
tttcggttaacagccgaacgcgcta

SEQ ID NO: 3782245 - DNA, 25 bp, Homo sapien
cgcgctaaccgattgcgccacagag

SEQ ID NO: 3782246 - DNA, 25 bp, Homo sapien
gaacgcgctaaccgattgcgccaca

SEQ ID NO: 3782247 - DNA, 25 bp, Homo sapien
gcgtccctgggtgggctcgaaccac

SEQ ID NO: 3782248 - DNA, 25 bp, Homo sapien
taagcgacgcgtcttggtccaatca

SEQ ID NO: 3782249 - DNA, 25 bp, Homo sapien
tagaagccgagttccctgaaagcgt

SEQ ID NO: 3782250 - DNA, 25 bp, Homo sapien
gacgatgctgctttgtacttggtaa

SEQ ID NO: 3782251 - DNA, 25 bp, Homo sapien
gagttcccgttgcatggtaagacaa

SEQ ID NO: 3782252 - DNA, 25 bp, Homo sapien
catttactgttagaccctgtgctaa

SEQ ID NO: 3782253 - DNA, 25 bp, Homo sapien
attattcctcatctagcagcccaag

SEQ ID NO: 3782254 - DNA, 25 bp, Homo sapien
gcaagtgctctcgtgtatttacagt

SEQ ID NO: 3782255 - DNA, 25 bp, Homo sapien
ggaatcaagtactcgcccagtgcct

SEQ ID NO: 3782256 - DNA, 25 bp, Homo sapien
tagcgaactggatattgcaacgtca

SEQ ID NO: 3782257 - DNA, 25 bp, Homo sapien
caatggcaaaatgaaaaaggaggct

SEQ ID NO: 3782258 - DNA, 25 bp, Homo sapien
aatgtccctaaacgtcaggttgtct

SEQ ID NO: 3782259 - DNA, 25 bp, Homo sapien
taggcacctttgctacctctattga

SEQ ID NO: 3782260 - DNA, 25 bp, Homo sapien
cactggggtatatcaagctttacaa

SEQ ID NO: 3782261 - DNA, 25 bp, Homo sapien
agtgttcctcctcttatcctgggtt

SEQ ID NO: 3782262 - DNA, 25 bp, Homo sapien
ctgttaacctcttggtaagctgata

SEQ ID NO: 3782263 - DNA, 25 bp, Homo sapien
acctcttggtaagctgataaacctg

SEQ ID NO: 3782264 - DNA, 25 bp, Homo sapien
ccctccactgtctcccctgcagaac

SEQ ID NO: 3782265 - DNA, 25 bp, Homo sapien
gtctcccctgcagaaccaattcctt

SEQ ID NO: 3782266 - DNA, 25 bp, Homo sapien
cctccactgtctcccctgcagaacc

SEQ ID NO: 3782267 - DNA, 25 bp, Homo sapien
tcccctgcagaaccaattccttgca

SEQ ID NO: 3782268 - DNA, 25 bp, Homo sapien
taacgaatggaattgtgaagtatgt

SEQ ID NO: 3782269 - DNA, 25 bp, Homo sapien
cttaacgaatggaattgtgaagtat

SEQ ID NO: 3782270 - DNA, 25 bp, Homo sapien
tggaattgtgaagtatgtcttctgg

SEQ ID NO: 3782271 - DNA, 25 bp, Homo sapien
ctacttaacgaatggaattgtgaag

SEQ ID NO: 3782272 - DNA, 25 bp, Homo sapien
aaacatcttcaagcctcctacgttg

SEQ ID NO: 3782273 - DNA, 25 bp, Homo sapien
caaacatcttcaagcctcctacgtt

SEQ ID NO: 3782274 - DNA, 25 bp, Homo sapien
aacatcttcaagcctcctacgttgg

SEQ ID NO: 3782275 - DNA, 25 bp, Homo sapien
acatcttcaagcctcctacgttggc

SEQ ID NO: 3782276 - DNA, 25 bp, Homo sapien
ggctgctcctttctttgtaccccat

SEQ ID NO: 3782277 - DNA, 25 bp, Homo sapien
tttgtaccccattttatctcattca

SEQ ID NO: 3782278 - DNA, 25 bp, Homo sapien
ccagaaatggctgctcctttctttg

SEQ ID NO: 3782279 - DNA, 25 bp, Homo sapien
gagatccagaaatggctgctccttt

SEQ ID NO: 3782280 - DNA, 25 bp, Homo sapien
gagtcactcagatagaaaagatgtc

SEQ ID NO: 3782281 - DNA, 25 bp, Homo sapien
tccagctttttactgagggaagccc

SEQ ID NO: 3782282 - DNA, 25 bp, Homo sapien
agggaagcccgtcacttgaaattgc

SEQ ID NO: 3782283 - DNA, 25 bp, Homo sapien
taccacgactaaggagagtcactca

SEQ ID NO: 3782284 - DNA, 25 bp, Homo sapien
taagagaaagttcaacggctaagct

SEQ ID NO: 3782285 - DNA, 25 bp, Homo sapien
tcctagacggcaaaaagcagattta

SEQ ID NO: 3782286 - DNA, 25 bp, Homo sapien
tatcaccattgcaggataagctggc

SEQ ID NO: 3782287 - DNA, 25 bp, Homo sapien
tgcgtgttgtaagccgactattcta

SEQ ID NO: 3782288 - DNA, 25 bp, Homo sapien
tcatctctcaaggatggtttccttc

SEQ ID NO: 3782289 - DNA, 25 bp, Homo sapien
cctaaagctacttagtaaaagatat

SEQ ID NO: 3782290 - DNA, 25 bp, Homo sapien
tcaaatctagccaccgaatgcaagt

SEQ ID NO: 3782291 - DNA, 25 bp, Homo sapien
ttggtaggtgttcttatccactcaa

SEQ ID NO: 3782292 - DNA, 25 bp, Homo sapien
atgcagtgaggagtctaacgggata

SEQ ID NO: 3782293 - DNA, 25 bp, Homo sapien
gaagttacatttcgatagccacagg

SEQ ID NO: 3782294 - DNA, 25 bp, Homo sapien
ggagtgggagaagttacatttcgat

SEQ ID NO: 3782295 - DNA, 25 bp, Homo sapien
tttcgatagccacaggaggaattca

SEQ ID NO: 3782296 - DNA, 25 bp, Homo sapien
tcttttcatattcggtctggaatgc

SEQ ID NO: 3782297 - DNA, 25 bp, Homo sapien
ttcatattcggtctggaatgctgaa

SEQ ID NO: 3782298 - DNA, 25 bp, Homo sapien
ttcattcttggctatgccctgtcgc

SEQ ID NO: 3782299 - DNA, 25 bp, Homo sapien
gtcgcctgccgagcctcttttcata

SEQ ID NO: 3782300 - DNA, 25 bp, Homo sapien
tgggagctagcaacacaaggacaca

SEQ ID NO: 3782301 - DNA, 25 bp, Homo sapien
tagcaacacaaggacacaggttcat

SEQ ID NO: 3782302 - DNA, 25 bp, Homo sapien
aagtcttgggagctagcaacacaag

SEQ ID NO: 3782303 - DNA, 25 bp, Homo sapien
caaatcaaagtcttgggagctagca

SEQ ID NO: 3782304 - DNA, 25 bp, Homo sapien
tcagtgtctagctatggtatgacgc

SEQ ID NO: 3782305 - DNA, 25 bp, Homo sapien
aaagccaatgctagtggcagggtca

SEQ ID NO: 3782306 - DNA, 25 bp, Homo sapien
gctgttttctgactaggtggcccta

SEQ ID NO: 3782307 - DNA, 25 bp, Homo sapien
cctaaagcagtggtgtgctagagcc

SEQ ID NO: 3782308 - DNA, 25 bp, Homo sapien
tgtttacacaggttctacgcctaga

SEQ ID NO: 3782309 - DNA, 25 bp, Homo sapien
taagcgatccggtcagtgactgcgg

SEQ ID NO: 3782310 - DNA, 25 bp, Homo sapien
tcaagttgctatgatcactccagcg

SEQ ID NO: 3782311 - DNA, 25 bp, Homo sapien
tgcaattcaagcttccagggctagg

SEQ ID NO: 3782312 - DNA, 25 bp, Homo sapien
ttgagaggtagatttggatgaaacg

SEQ ID NO: 3782313 - DNA, 25 bp, Homo sapien
acgggttcctgaaatcgggagctgc

SEQ ID NO: 3782314 - DNA, 25 bp, Homo sapien
tactggtatttccagcctcggcggc

SEQ ID NO: 3782315 - DNA, 25 bp, Homo sapien
ccgcagcgccctttgttgagaggta

SEQ ID NO: 3782316 - DNA, 25 bp, Homo sapien
gccaatagacctcgaaaatcatcag

SEQ ID NO: 3782317 - DNA, 25 bp, Homo sapien
tttgcctagccccagtactccagtg

SEQ ID NO: 3782318 - DNA, 25 bp, Homo sapien
tatgaatggaaccagcaacagcccc

SEQ ID NO: 3782319 - DNA, 25 bp, Homo sapien
caccaatcttcttttgccaatagac

SEQ ID NO: 3782320 - DNA, 25 bp, Homo sapien
tgctaatacatgtgactatcgtcca

SEQ ID NO: 3782321 - DNA, 25 bp, Homo sapien
tactcctatggacgttaattgaaaa

SEQ ID NO: 3782322 - DNA, 25 bp, Homo sapien
aaagatggactacatgtgatactcc

SEQ ID NO: 3782323 - DNA, 25 bp, Homo sapien
gccattacagctttctagatgctaa

SEQ ID NO: 3782324 - DNA, 25 bp, Homo sapien
gattcgcttttgtaagaatcagatg

SEQ ID NO: 3782325 - DNA, 25 bp, Homo sapien
gatggcattatgcttgttgtacaat

SEQ ID NO: 3782326 - DNA, 25 bp, Homo sapien
cataacaggaaacagtattgtatga

SEQ ID NO: 3782327 - DNA, 25 bp, Homo sapien
catattggtatatgacataacagga

SEQ ID NO: 3782328 - DNA, 25 bp, Homo sapien
cattgctgacttatagtgatgtggc

SEQ ID NO: 3782329 - DNA, 25 bp, Homo sapien
gacctaaatttgtacagtcccattg

SEQ ID NO: 3782330 - DNA, 25 bp, Homo sapien
taaaccagcaggttgctaaaagaag

SEQ ID NO: 3782331 - DNA, 25 bp, Homo sapien
tatagaggattacaacaggtaaacg

SEQ ID NO: 3782332 - DNA, 25 bp, Homo sapien
aatctacacatggaatccagtctct

SEQ ID NO: 3782333 - DNA, 25 bp, Homo sapien
gatttagtttagtacttagtcagaa

SEQ ID NO: 3782334 - DNA, 25 bp, Homo sapien
cctaatacacgaagaatgatagttg

SEQ ID NO: 3782335 - DNA, 25 bp, Homo sapien
gaatggaggccccataagattttta

SEQ ID NO: 3782336 - DNA, 25 bp, Homo sapien
aaaagcccaagtcacaggtccgaag

SEQ ID NO: 3782337 - DNA, 25 bp, Homo sapien
gagaccgacaccgaggttagtgcag

SEQ ID NO: 3782338 - DNA, 25 bp, Homo sapien
tcctcaggagcggaagatcttccaa

SEQ ID NO: 3782339 - DNA, 25 bp, Homo sapien
tcttccaactaagccggagagcggg

SEQ ID NO: 3782340 - DNA, 25 bp, Homo sapien
cgcaccctactccagcaagaaagag

SEQ ID NO: 3782341 - DNA, 25 bp, Homo sapien
cagcaagaaagagcctgaagcccct

SEQ ID NO: 3782342 - DNA, 25 bp, Homo sapien
tttgtctgtatcagctattggctcc

SEQ ID NO: 3782343 - DNA, 25 bp, Homo sapien
ccagcagctgtaaagcggtacggga

SEQ ID NO: 3782344 - DNA, 25 bp, Homo sapien
agggcgctcttctacgtcccgcgcg

SEQ ID NO: 3782345 - DNA, 25 bp, Homo sapien
gcgaagtaggccgaccggcgcggcc

SEQ ID NO: 3782346 - DNA, 25 bp, Homo sapien
agttttctggcagcgctagcgccgc

SEQ ID NO: 3782347 - DNA, 25 bp, Homo sapien
gaggctccggcagggaccttcgccc

SEQ ID NO: 3782348 - DNA, 25 bp, Homo sapien
acaccaagctccaataatttgtttt

SEQ ID NO: 3782349 - DNA, 25 bp, Homo sapien
caccaagctccaataatttgttttt

SEQ ID NO: 3782350 - DNA, 25 bp, Homo sapien
aattaagtaaaaagattgtggccat

SEQ ID NO: 3782351 - DNA, 25 bp, Homo sapien
cactggcttttgagctgcagaagca

SEQ ID NO: 3782352 - DNA, 25 bp, Homo sapien
catcactggcttttgagctgcagaa

SEQ ID NO: 3782353 - DNA, 25 bp, Homo sapien
taaaaagattgtggccatcactggc

SEQ ID NO: 3782354 - DNA, 25 bp, Homo sapien
aatttagtggctgaattgagaaatg

SEQ ID NO: 3782355 - DNA, 25 bp, Homo sapien
gattccaaggcttagtgtgaaaaaa

SEQ ID NO: 3782356 - DNA, 25 bp, Homo sapien
gagcaacttgggtatgtgactctac

SEQ ID NO: 3782357 - DNA, 25 bp, Homo sapien
gaaatgctgtaagtgcaaaatacac

SEQ ID NO: 3782358 - DNA, 25 bp, Homo sapien
tctaccctaagcgagaggtgcaggc

SEQ ID NO: 3782359 - DNA, 25 bp, Homo sapien
tgtatacgtcatgttgccgccgctc

SEQ ID NO: 3782360 - DNA, 25 bp, Homo sapien
tgctggcacccgctgtcaagatagg

SEQ ID NO: 3782361 - DNA, 25 bp, Homo sapien
tctgccgaatggaacgtggtgactc

SEQ ID NO: 3782362 - DNA, 25 bp, Homo sapien
cggacggcctgtcggaatggtcacc

SEQ ID NO: 3782363 - DNA, 25 bp, Homo sapien
tcttcgttccgatttgagccctggc

SEQ ID NO: 3782364 - DNA, 25 bp, Homo sapien
agaagccggcatttgtggccgccca

SEQ ID NO: 3782365 - DNA, 25 bp, Homo sapien
tccgcctcagcgaaagaaaggagaa

SEQ ID NO: 3782366 - DNA, 25 bp, Homo sapien
tctctgggaccaagttctcacagca

SEQ ID NO: 3782367 - DNA, 25 bp, Homo sapien
cctgcggtttttctgctgctctgag

SEQ ID NO: 3782368 - DNA, 25 bp, Homo sapien
gctgctctgagacggtctctgggac

SEQ ID NO: 3782369 - DNA, 25 bp, Homo sapien
gtcgccgtcagggtcgtgctcctta

SEQ ID NO: 3782370 - DNA, 25 bp, Homo sapien
ggggatcccatcatcttcgaatttt

SEQ ID NO: 3782371 - DNA, 25 bp, Homo sapien
ggggctgctagctgatttggggatc

SEQ ID NO: 3782372 - DNA, 25 bp, Homo sapien
gctgctagctgatttggggatccca

SEQ ID NO: 3782373 - DNA, 25 bp, Homo sapien
tgtggggctgctagctgatttgggg

SEQ ID NO: 3782374 - DNA, 25 bp, Homo sapien
tgagaatgtttcatccagattttgc

SEQ ID NO: 3782375 - DNA, 25 bp, Homo sapien
tttcatccagattttgcctgaccat

SEQ ID NO: 3782376 - DNA, 25 bp, Homo sapien
ctttcacccttccatgagaatgttt

SEQ ID NO: 3782377 - DNA, 25 bp, Homo sapien
ttcacccttccatgagaatgtttca

SEQ ID NO: 3782378 - DNA, 25 bp, Homo sapien
ttctcatatttgcagaatcagattc

SEQ ID NO: 3782379 - DNA, 25 bp, Homo sapien
tgcagaatcagattctttccttata

SEQ ID NO: 3782380 - DNA, 25 bp, Homo sapien
atcttctcatatttgcagaatcaga

SEQ ID NO: 3782381 - DNA, 25 bp, Homo sapien
tctcatatttgcagaatcagattct

SEQ ID NO: 3782382 - DNA, 25 bp, Homo sapien
cttcaatcggatgcatacagaggtt

SEQ ID NO: 3782383 - DNA, 25 bp, Homo sapien
cagaggttgtaatgtgcaagactcc

SEQ ID NO: 3782384 - DNA, 25 bp, Homo sapien
caagactccagcatgagaagggcag

SEQ ID NO: 3782385 - DNA, 25 bp, Homo sapien
gaagggcaggctactatggccaaga

SEQ ID NO: 3782386 - DNA, 25 bp, Homo sapien
ccaaatgtaggctcaggaggcagct

SEQ ID NO: 3782387 - DNA, 25 bp, Homo sapien
ccatgtgtttctaatcccggaagat

SEQ ID NO: 3782388 - DNA, 25 bp, Homo sapien
caaacataacattggtgtgtcacgc

SEQ ID NO: 3782389 - DNA, 25 bp, Homo sapien
tgctggctccgctaataccaaggca

SEQ ID NO: 3782390 - DNA, 25 bp, Homo sapien
cggaacgcgcgttgcgacgacaaat

SEQ ID NO: 3782391 - DNA, 25 bp, Homo sapien
taagcagctctggaaacgggcagac

SEQ ID NO: 3782392 - DNA, 25 bp, Homo sapien
gagccgcgttgccataggaaccgta

SEQ ID NO: 3782393 - DNA, 25 bp, Homo sapien
catttatgggcgtcggcgctaagca

SEQ ID NO: 3782394 - DNA, 25 bp, Homo sapien
cgttcggacaggagaagctaaccgc

SEQ ID NO: 3782395 - DNA, 25 bp, Homo sapien
ttcgcgcgcattttccgggagttga

SEQ ID NO: 3782396 - DNA, 25 bp, Homo sapien
gtacaaacggcaaaagcttcgcgcg

SEQ ID NO: 3782397 - DNA, 25 bp, Homo sapien
aaaagcagagatccgagaaccgcgt

SEQ ID NO: 3782398 - DNA, 25 bp, Homo sapien
tccgaaatgctggatactgcggccg

SEQ ID NO: 3782399 - DNA, 25 bp, Homo sapien
agccagggccgcatgtacctactgt

SEQ ID NO: 3782400 - DNA, 25 bp, Homo sapien
ccatttccttaacgcgcggtctgtc

SEQ ID NO: 3782401 - DNA, 25 bp, Homo sapien
taacaaagagacgagacctaactgg

SEQ ID NO: 3782402 - DNA, 25 bp, Homo sapien
aatattaataagctgcgcggctccg

SEQ ID NO: 3782403 - DNA, 25 bp, Homo sapien
tgtcgctccgggctataaatattaa

SEQ ID NO: 3782404 - DNA, 25 bp, Homo sapien
gaaagcatatgctgcacctctgcgc

SEQ ID NO: 3782405 - DNA, 25 bp, Homo sapien
tttgtattccgcagtccaacctgga

SEQ ID NO: 3782406 - DNA, 25 bp, Homo sapien
ctgagggtcctgtgtgcagaacatt

SEQ ID NO: 3782407 - DNA, 25 bp, Homo sapien
cagagacacacaattgggacagagg

SEQ ID NO: 3782408 - DNA, 25 bp, Homo sapien
tcaaggattagctaaagacactgtc

SEQ ID NO: 3782409 - DNA, 25 bp, Homo sapien
taaagacactgtcaggaccgagtat

SEQ ID NO: 3782410 - DNA, 25 bp, Homo sapien
tgtcaggaccgagtatttaaaatgt

SEQ ID NO: 3782411 - DNA, 25 bp, Homo sapien
tagcgcagcatgtaagtggataacc

SEQ ID NO: 3782412 - DNA, 25 bp, Homo sapien
catggctgcaggatacgtctcaaaa

SEQ ID NO: 3782413 - DNA, 25 bp, Homo sapien
tgtgtgatgccaacacggtgcctga

SEQ ID NO: 3782414 - DNA, 25 bp, Homo sapien
tctaaaagcatacacagattggccc

SEQ ID NO: 3782415 - DNA, 25 bp, Homo sapien
gttcatgtctgtccgaggctgcgca

SEQ ID NO: 3782416 - DNA, 25 bp, Homo sapien
caaggaggtttgcttcctgcaagat

SEQ ID NO: 3782417 - DNA, 25 bp, Homo sapien
caggtagctgtaaagcgagtagccc

SEQ ID NO: 3782418 - DNA, 25 bp, Homo sapien
tcagaaatagctagaacgatgctgg

SEQ ID NO: 3782419 - DNA, 25 bp, Homo sapien
tactgttctgggttcacggtggaga

SEQ ID NO: 3782420 - DNA, 25 bp, Homo sapien
ccaaaaagcgctttgaatactgttc

SEQ ID NO: 3782421 - DNA, 25 bp, Homo sapien
gttcacggtggagatctccgcgcca

SEQ ID NO: 3782422 - DNA, 25 bp, Homo sapien
tcaagatgtggccaataaagtccaa

SEQ ID NO: 3782423 - DNA, 25 bp, Homo sapien
tgcaccgtaaccaggtgaggcacaa

SEQ ID NO: 3782424 - DNA, 25 bp, Homo sapien
gcccattccctgcaccgtaaccagg

SEQ ID NO: 3782425 - DNA, 25 bp, Homo sapien
catcttgcccacgggggaaggagct

SEQ ID NO: 3782426 - DNA, 25 bp, Homo sapien
attccctgcaccgtaaccaggtgag

SEQ ID NO: 3782427 - DNA, 25 bp, Homo sapien
ggggtgccactgttcccctttctga

SEQ ID NO: 3782428 - DNA, 25 bp, Homo sapien
gcagcacacaggggtgccactgttc

SEQ ID NO: 3782429 - DNA, 25 bp, Homo sapien
cacaggggtgccactgttccccttt

SEQ ID NO: 3782430 - DNA, 25 bp, Homo sapien
agcagcacacaggggtgccactgtt

SEQ ID NO: 3782431 - DNA, 25 bp, Homo sapien
ggagttttgctaagtgagcatgtgc

SEQ ID NO: 3782432 - DNA, 25 bp, Homo sapien
caaagggcaagcacggagttttgct

SEQ ID NO: 3782433 - DNA, 25 bp, Homo sapien
ctgcaaagggcaagcacggagtttt

SEQ ID NO: 3782434 - DNA, 25 bp, Homo sapien
gcatgtgctgtttttagacacccat

SEQ ID NO: 3782435 - DNA, 25 bp, Homo sapien
gtaatatttccaggcctcggctgca

SEQ ID NO: 3782436 - DNA, 25 bp, Homo sapien
cttgaatgcagagagaatggtcccc

SEQ ID NO: 3782437 - DNA, 25 bp, Homo sapien
taacacagcgttcctttgctgacag

SEQ ID NO: 3782438 - DNA, 25 bp, Homo sapien
gcagcttaacacagcgttcctttgc

SEQ ID NO: 3782439 - DNA, 25 bp, Homo sapien
cgtgtggcacactatggaggcgaac

SEQ ID NO: 3782440 - DNA, 25 bp, Homo sapien
gccatattggctaggatacactcca

SEQ ID NO: 3782441 - DNA, 25 bp, Homo sapien
ccatattggctaggataggagagat

SEQ ID NO: 3782442 - DNA, 25 bp, Homo sapien
aaaaccccatcagcaaggcagtagg

SEQ ID NO: 3782443 - DNA, 25 bp, Homo sapien
acgaggattcctcgccagttctctc

SEQ ID NO: 3782444 - DNA, 25 bp, Homo sapien
ggagctccaaaagtgtccccttgag

SEQ ID NO: 3782445 - DNA, 25 bp, Homo sapien
gaagggtcaaacgaggattcctcgc

SEQ ID NO: 3782446 - DNA, 25 bp, Homo sapien
ccttgaggtcatacaagtgggaagg

SEQ ID NO: 3782447 - DNA, 25 bp, Homo sapien
gaataccatagctatcgacaatgtg

SEQ ID NO: 3782448 - DNA, 25 bp, Homo sapien
cacacagcaggaataccatagctat

SEQ ID NO: 3782449 - DNA, 25 bp, Homo sapien
catagctatcgacaatgtgactgaa

SEQ ID NO: 3782450 - DNA, 25 bp, Homo sapien
gcaggaataccatagctatcgacaa

SEQ ID NO: 3782451 - DNA, 25 bp, Homo sapien
tattaatcctgtatacttgggaagt

SEQ ID NO: 3782452 - DNA, 25 bp, Homo sapien
aagtgtcttaagcagacaatcatgc

SEQ ID NO: 3782453 - DNA, 25 bp, Homo sapien
tcctgtatacttgggaagtgtctta

SEQ ID NO: 3782454 - DNA, 25 bp, Homo sapien
tacttgggaagtgtcttaagcagac

SEQ ID NO: 3782455 - DNA, 25 bp, Homo sapien
gatgtcaataattgccatgaagtac

SEQ ID NO: 3782456 - DNA, 25 bp, Homo sapien
atgagtaaggatgtcaataattgcc

SEQ ID NO: 3782457 - DNA, 25 bp, Homo sapien
taaggatgtcaataattgccatgaa

SEQ ID NO: 3782458 - DNA, 25 bp, Homo sapien
gcatcataatgagtaaggatgtcaa

SEQ ID NO: 3782459 - DNA, 25 bp, Homo sapien
tgggacatgtgacaacaccagtgcc

SEQ ID NO: 3782460 - DNA, 25 bp, Homo sapien
tgcaaaaagggtccacagtaatcaa

SEQ ID NO: 3782461 - DNA, 25 bp, Homo sapien
gtcaaaccacttcacatgcaaaaag

SEQ ID NO: 3782462 - DNA, 25 bp, Homo sapien
tcacatgcaaaaagggtccacagta

SEQ ID NO: 3782463 - DNA, 25 bp, Homo sapien
aaagtcaaaccacttcacatgcaaa

SEQ ID NO: 3782464 - DNA, 25 bp, Homo sapien
tgttcggctctctccacatcatgaa

SEQ ID NO: 3782465 - DNA, 25 bp, Homo sapien
gtgagctgttcagtgtattcccggg

SEQ ID NO: 3782466 - DNA, 25 bp, Homo sapien
taattccatagacgtcgatgttcgg

SEQ ID NO: 3782467 - DNA, 25 bp, Homo sapien
gatgttcggatcgaactccccggga

SEQ ID NO: 3782468 - DNA, 25 bp, Homo sapien
aggcaacagggtgagtcagccacac

SEQ ID NO: 3782469 - DNA, 25 bp, Homo sapien
gacagaggcaacagggtgagtcagc

SEQ ID NO: 3782470 - DNA, 25 bp, Homo sapien
ggggacagaggcaacagggtgagtc

SEQ ID NO: 3782471 - DNA, 25 bp, Homo sapien
acagaggcaacagggtgagtcagcc

SEQ ID NO: 3782472 - DNA, 25 bp, Homo sapien
cagcatgctctgtggaggcgattgt

SEQ ID NO: 3782473 - DNA, 25 bp, Homo sapien
catgctctgtggaggcgattgttac

SEQ ID NO: 3782474 - DNA, 25 bp, Homo sapien
tcagcatgctctgtggaggcgattg

SEQ ID NO: 3782475 - DNA, 25 bp, Homo sapien
cctggaattcagcatgctctgtgga

SEQ ID NO: 3782476 - DNA, 25 bp, Homo sapien
gcagtcctgtccaggtcaacaaggt

SEQ ID NO: 3782477 - DNA, 25 bp, Homo sapien
aaggtgctttccacgtgtgctttcc

SEQ ID NO: 3782478 - DNA, 25 bp, Homo sapien
aaagtaaaggcactgtgtccacatc

SEQ ID NO: 3782479 - DNA, 25 bp, Homo sapien
tgtgctttccacgaagcaccacaca

SEQ ID NO: 3782480 - DNA, 25 bp, Homo sapien
tcagggtccaggaaggttcacggtc

SEQ ID NO: 3782481 - DNA, 25 bp, Homo sapien
caaacagtggcagcccatctgcggg

SEQ ID NO: 3782482 - DNA, 25 bp, Homo sapien
tttgagaccttcagcacaacgttcc

SEQ ID NO: 3782483 - DNA, 25 bp, Homo sapien
ttccactccgaccttgggctcaggg

SEQ ID NO: 3782484 - DNA, 25 bp, Homo sapien
gaatgcagagtggctgagcagcctc

SEQ ID NO: 3782485 - DNA, 25 bp, Homo sapien
atgcagagtggctgagcagcctctg

SEQ ID NO: 3782486 - DNA, 25 bp, Homo sapien
gtggctgagcagcctctgggctatg

SEQ ID NO: 3782487 - DNA, 25 bp, Homo sapien
gggaatgcagagtggctgagcagcc

SEQ ID NO: 3782488 - DNA, 25 bp, Homo sapien
taaacatgagaactgactttccact

SEQ ID NO: 3782489 - DNA, 25 bp, Homo sapien
tgcgttcagctttctgggtcccaga

SEQ ID NO: 3782490 - DNA, 25 bp, Homo sapien
ccctagaatctcggcagctgccagg

SEQ ID NO: 3782491 - DNA, 25 bp, Homo sapien
gagactgcgcatcctcccctagaat

SEQ ID NO: 3782492 - DNA, 25 bp, Homo sapien
ggaggctgccttaaagcagctttcc

SEQ ID NO: 3782493 - DNA, 25 bp, Homo sapien
gaggctgccttaaagcagctttccc

SEQ ID NO: 3782494 - DNA, 25 bp, Homo sapien
tggaggctgccttaaagcagctttc

SEQ ID NO: 3782495 - DNA, 25 bp, Homo sapien
aggctgccttaaagcagctttcccc

SEQ ID NO: 3782496 - DNA, 25 bp, Homo sapien
cttctggggcccacttgagctctgc

SEQ ID NO: 3782497 - DNA, 25 bp, Homo sapien
gagagcttggccccatccacttctg

SEQ ID NO: 3782498 - DNA, 25 bp, Homo sapien
agagcttggccccatccacttctgg

SEQ ID NO: 3782499 - DNA, 25 bp, Homo sapien
tccacttctggggcccacttgagct

SEQ ID NO: 3782500 - DNA, 25 bp, Homo sapien
gtcaactcctagcacaacccaaaaa

SEQ ID NO: 3782501 - DNA, 25 bp, Homo sapien
gaagaaataaaggtgcagtcaactc

SEQ ID NO: 3782502 - DNA, 25 bp, Homo sapien
ccgggcagcccagagtaattttcct

SEQ ID NO: 3782503 - DNA, 25 bp, Homo sapien
cttactgtcgtcttccagtgaggaa

SEQ ID NO: 3782504 - DNA, 25 bp, Homo sapien
catattcttctcagtatcaaggatt

SEQ ID NO: 3782505 - DNA, 25 bp, Homo sapien
cataattgctaaaaccatattcttc

SEQ ID NO: 3782506 - DNA, 25 bp, Homo sapien
aaaccatattcttctcagtatcaag

SEQ ID NO: 3782507 - DNA, 25 bp, Homo sapien
accatattcttctcagtatcaagga

SEQ ID NO: 3782508 - DNA, 25 bp, Homo sapien
aagtgacccaggctatgttaaccag

SEQ ID NO: 3782509 - DNA, 25 bp, Homo sapien
cattatggacgaaagccccttggac

SEQ ID NO: 3782510 - DNA, 25 bp, Homo sapien
tgtgctagtcccacaatgtgtaagg

SEQ ID NO: 3782511 - DNA, 25 bp, Homo sapien
tgggcaggtcagtcttcatgggcca

SEQ ID NO: 3782512 - DNA, 25 bp, Homo sapien
cttgttgttgtcatcaatataaatc

SEQ ID NO: 3782513 - DNA, 25 bp, Homo sapien
ttccaggaagaccttcttgttgttg

SEQ ID NO: 3782514 - DNA, 25 bp, Homo sapien
gaaatcattatctttcagagttggc

SEQ ID NO: 3782515 - DNA, 25 bp, Homo sapien
aatataaatcttttggccctcatta

SEQ ID NO: 3782516 - DNA, 25 bp, Homo sapien
aggagaaggcttgaataccaccggg

SEQ ID NO: 3782517 - DNA, 25 bp, Homo sapien
taaaataggagaaggcttgaatacc

SEQ ID NO: 3782518 - DNA, 25 bp, Homo sapien
aacaataaaataggagaaggcttga

SEQ ID NO: 3782519 - DNA, 25 bp, Homo sapien
ccggggggcgccagtgagccccaat

SEQ ID NO: 3782520 - DNA, 25 bp, Homo sapien
aggctttttgtaacacatttcatgt

SEQ ID NO: 3782521 - DNA, 25 bp, Homo sapien
cttagactcactttcttacaagaag

SEQ ID NO: 3782522 - DNA, 25 bp, Homo sapien
tggaatactttcccaggaaccctca

SEQ ID NO: 3782523 - DNA, 25 bp, Homo sapien
ggtcagacagactccatatcataag

SEQ ID NO: 3782524 - DNA, 25 bp, Homo sapien
ggagacatgcagcacgaggttagcc

SEQ ID NO: 3782525 - DNA, 25 bp, Homo sapien
agcacgaggttagccatctgccctt

SEQ ID NO: 3782526 - DNA, 25 bp, Homo sapien
caaataacatgttatcttgtctcag

SEQ ID NO: 3782527 - DNA, 25 bp, Homo sapien
tgtctcagaacagctctatccataa

SEQ ID NO: 3782528 - DNA, 25 bp, Homo sapien
tacaaagatgacgtctgcagagcag

SEQ ID NO: 3782529 - DNA, 25 bp, Homo sapien
tccaagcttgtagtcactgggtctg

SEQ ID NO: 3782530 - DNA, 25 bp, Homo sapien
gtgggcagcgacagcttaatgtagc

SEQ ID NO: 3782531 - DNA, 25 bp, Homo sapien
taaactcttggtgtaaaactgccta

SEQ ID NO: 3782532 - DNA, 25 bp, Homo sapien
gggccgagtctttatttgcgctgaa

SEQ ID NO: 3782533 - DNA, 25 bp, Homo sapien
tctgtgcgtctagtcctgagctggg

SEQ ID NO: 3782534 - DNA, 25 bp, Homo sapien
tgtacgaccctctgtacttgctggg

SEQ ID NO: 3782535 - DNA, 25 bp, Homo sapien
taaggcgggacgattgctgtacgac

SEQ ID NO: 3782536 - DNA, 25 bp, Homo sapien
ctccgctaatgtgacgtgtaaatgc

SEQ ID NO: 3782537 - DNA, 25 bp, Homo sapien
taatgtgacgtgtaaatgcacaaac

SEQ ID NO: 3782538 - DNA, 25 bp, Homo sapien
cgctaatgtgacgtgtaaatgcaca

SEQ ID NO: 3782539 - DNA, 25 bp, Homo sapien
gtgacgtgtaaatgcacaaacacag

SEQ ID NO: 3782540 - DNA, 25 bp, Homo sapien
cactgtcatacggagtgatgcccga

SEQ ID NO: 3782541 - DNA, 25 bp, Homo sapien
ggctgtcctgcttcccgttcggata

SEQ ID NO: 3782542 - DNA, 25 bp, Homo sapien
ccaggtcgactaggcatggctcagc

SEQ ID NO: 3782543 - DNA, 25 bp, Homo sapien
ccgttcggataaaatgagcccttca

SEQ ID NO: 3782544 - DNA, 25 bp, Homo sapien
gctgaactgcatacaagacctacaa

SEQ ID NO: 3782545 - DNA, 25 bp, Homo sapien
taatgtcaaaggtgacggtttggtc

SEQ ID NO: 3782546 - DNA, 25 bp, Homo sapien
tacaaaataggacctacgggatggc

SEQ ID NO: 3782547 - DNA, 25 bp, Homo sapien
tccacaaactgggatatgacagctg

SEQ ID NO: 3782548 - DNA, 25 bp, Homo sapien
tctgagtgaaaatctggaaagtgct

SEQ ID NO: 3782549 - DNA, 25 bp, Homo sapien
cattcccatacctaacagcagtgct

SEQ ID NO: 3782550 - DNA, 25 bp, Homo sapien
tgctccacgtgtgcttgggatactc

SEQ ID NO: 3782551 - DNA, 25 bp, Homo sapien
gaaagtgctcacaagagtcactgca

SEQ ID NO: 3782552 - DNA, 25 bp, Homo sapien
tttccagaatacccctcatggttta

SEQ ID NO: 3782553 - DNA, 25 bp, Homo sapien
tccagaatacccctcatggtttatg

SEQ ID NO: 3782554 - DNA, 25 bp, Homo sapien
cagaatacccctcatggtttatggg

SEQ ID NO: 3782555 - DNA, 25 bp, Homo sapien
cctcatggtttatggggttcttatc

SEQ ID NO: 3782556 - DNA, 25 bp, Homo sapien
gtgatggtcaggccaggacttctcc

SEQ ID NO: 3782557 - DNA, 25 bp, Homo sapien
caggaaagcttcatttgaaacaaga

SEQ ID NO: 3782558 - DNA, 25 bp, Homo sapien
aaccacatctctggaggaaggtcca

SEQ ID NO: 3782559 - DNA, 25 bp, Homo sapien
atagagaagattttagtgatggtca

SEQ ID NO: 3782560 - DNA, 25 bp, Homo sapien
ggagcaatgacgcaagcaaatcctt

SEQ ID NO: 3782561 - DNA, 25 bp, Homo sapien
gcaatgacgcaagcaaatcctttaa

SEQ ID NO: 3782562 - DNA, 25 bp, Homo sapien
ttacaaacgaggacaaagtcagatg

SEQ ID NO: 3782563 - DNA, 25 bp, Homo sapien
tcagatgacctatactcaaacccca

SEQ ID NO: 3782564 - DNA, 25 bp, Homo sapien
ccgagctcaggctatcctgtagcct

SEQ ID NO: 3782565 - DNA, 25 bp, Homo sapien
ctcccgagctcaggctatcctgtag

SEQ ID NO: 3782566 - DNA, 25 bp, Homo sapien
gagctcaggctatcctgtagcctca

SEQ ID NO: 3782567 - DNA, 25 bp, Homo sapien
agctcaggctatcctgtagcctcag

SEQ ID NO: 3782568 - DNA, 25 bp, Homo sapien
tctcatcgggtcaatacagtgtttc

SEQ ID NO: 3782569 - DNA, 25 bp, Homo sapien
actctcatcgggtcaatacagtgtt

SEQ ID NO: 3782570 - DNA, 25 bp, Homo sapien
agtgtttctcgctggtggcagcaga

SEQ ID NO: 3782571 - DNA, 25 bp, Homo sapien
aatacagtgtttctcgctggtggca

SEQ ID NO: 3782572 - DNA, 25 bp, Homo sapien
tcactagcttctctagccactgtag

SEQ ID NO: 3782573 - DNA, 25 bp, Homo sapien
tagcttctctagccactgtagagcc

SEQ ID NO: 3782574 - DNA, 25 bp, Homo sapien
cactagcttctctagccactgtaga

SEQ ID NO: 3782575 - DNA, 25 bp, Homo sapien
actagcttctctagccactgtagag

SEQ ID NO: 3782576 - DNA, 25 bp, Homo sapien
tgcttcgcagcccatgcggaatggg

SEQ ID NO: 3782577 - DNA, 25 bp, Homo sapien
gccactggccgcttctctagccctg

SEQ ID NO: 3782578 - DNA, 25 bp, Homo sapien
tgcggaatgggcttctcatccctcc

SEQ ID NO: 3782579 - DNA, 25 bp, Homo sapien
gaccatggctctctgtccggcctgt

SEQ ID NO: 3782580 - DNA, 25 bp, Homo sapien
aggcttcacgaaaagagctggtgct

SEQ ID NO: 3782581 - DNA, 25 bp, Homo sapien
taccgccaaggcttcacgaaaagag

SEQ ID NO: 3782582 - DNA, 25 bp, Homo sapien
ccaggggcacaaaatggcttgcttg

SEQ ID NO: 3782583 - DNA, 25 bp, Homo sapien
tgtgtgctctgagcagtaccgccaa

SEQ ID NO: 3782584 - DNA, 25 bp, Homo sapien
cccaaatggtctctgcggtaactac

SEQ ID NO: 3782585 - DNA, 25 bp, Homo sapien
taagagcgtgaaagcgttgagacca

SEQ ID NO: 3782586 - DNA, 25 bp, Homo sapien
tgacagcggaatcagacaggacatt

SEQ ID NO: 3782587 - DNA, 25 bp, Homo sapien
tctgcaaaagctttcgagtgtcctc

SEQ ID NO: 3782588 - DNA, 25 bp, Homo sapien
acattaagccggtacatgcccaaga

SEQ ID NO: 3782589 - DNA, 25 bp, Homo sapien
aagaagggtgatcccatgacattcc

SEQ ID NO: 3782590 - DNA, 25 bp, Homo sapien
taagtcgtatttcctatacacagac

SEQ ID NO: 3782591 - DNA, 25 bp, Homo sapien
gacaaacggtggctgaatacatttc

SEQ ID NO: 3782592 - DNA, 25 bp, Homo sapien
gaaattagatgagtgaaacattttc

SEQ ID NO: 3782593 - DNA, 25 bp, Homo sapien
cagcattggtacttgattctgattt

SEQ ID NO: 3782594 - DNA, 25 bp, Homo sapien
agtctttggttttgatcattaaaga

SEQ ID NO: 3782595 - DNA, 25 bp, Homo sapien
aattcctgagtagagtttcaccttg

SEQ ID NO: 3782596 - DNA, 25 bp, Homo sapien
tctgttctctagcacgatgcgctgt

SEQ ID NO: 3782597 - DNA, 25 bp, Homo sapien
taactgggtctgtgaatgcctgggc

SEQ ID NO: 3782598 - DNA, 25 bp, Homo sapien
caccagcgggtgttaactccaagga

SEQ ID NO: 3782599 - DNA, 25 bp, Homo sapien
gatttacagctacagctttagccgg

SEQ ID NO: 3782600 - DNA, 25 bp, Homo sapien
gagggtctcaccagcgacagatgct

SEQ ID NO: 3782601 - DNA, 25 bp, Homo sapien
gcttggtgccatagggagaactgct

SEQ ID NO: 3782602 - DNA, 25 bp, Homo sapien
ggaatggcttgacttccggtagccc

SEQ ID NO: 3782603 - DNA, 25 bp, Homo sapien
ccatctcccagtgatacagtttgaa

SEQ ID NO: 3782604 - DNA, 25 bp, Homo sapien
tttcagcggctccttgagtagggct

SEQ ID NO: 3782605 - DNA, 25 bp, Homo sapien
cagcatgaacacaataccgaagagt

SEQ ID NO: 3782606 - DNA, 25 bp, Homo sapien
ctcctggtggcacaatgctcacctg

SEQ ID NO: 3782607 - DNA, 25 bp, Homo sapien
taagtgggcttattctcctgtgaga

SEQ ID NO: 3782608 - DNA, 25 bp, Homo sapien
ttgtgacacaccatagtaaggactc

SEQ ID NO: 3782609 - DNA, 25 bp, Homo sapien
gaaggttccagaatggcccctgtac

SEQ ID NO: 3782610 - DNA, 25 bp, Homo sapien
gaatggctgctccacgtatgaccgc

SEQ ID NO: 3782611 - DNA, 25 bp, Homo sapien
gggtcagaggccttcccaaacattg

SEQ ID NO: 3782612 - DNA, 25 bp, Homo sapien
ttcaagttgaagctacatgatacca

SEQ ID NO: 3782613 - DNA, 25 bp, Homo sapien
gctacatgataccaaagctcccaat

SEQ ID NO: 3782614 - DNA, 25 bp, Homo sapien
cccaatgaattcacgtcagtgcggg

SEQ ID NO: 3782615 - DNA, 25 bp, Homo sapien
gataccaaagctcccaatgaattca

SEQ ID NO: 3782616 - DNA, 25 bp, Homo sapien
ggctgaagtcttcgtaattctgcat

SEQ ID NO: 3782617 - DNA, 25 bp, Homo sapien
aagtcttcgtaattctgcatcagtg

SEQ ID NO: 3782618 - DNA, 25 bp, Homo sapien
gtgccacagtctaccagaaaccagg

SEQ ID NO: 3782619 - DNA, 25 bp, Homo sapien
atcagtgccacagtctaccagaaac

SEQ ID NO: 3782620 - DNA, 25 bp, Homo sapien
gatgatgtatcttttgtcgtaggaa

SEQ ID NO: 3782621 - DNA, 25 bp, Homo sapien
tcttttgtcgtaggaagtgtgaaaa

SEQ ID NO: 3782622 - DNA, 25 bp, Homo sapien
tcactggtaatagtcttgatgatgt

SEQ ID NO: 3782623 - DNA, 25 bp, Homo sapien
tcaggatgttgtgcatttcggccac

SEQ ID NO: 3782624 - DNA, 25 bp, Homo sapien
ggagtcgttggggaggggtgcgctc

SEQ ID NO: 3782625 - DNA, 25 bp, Homo sapien
tgtgactcttccgttcagatctcct

SEQ ID NO: 3782626 - DNA, 25 bp, Homo sapien
ctcccatgtgactcttccgttcaga

SEQ ID NO: 3782627 - DNA, 25 bp, Homo sapien
gactcttccgttcagatctcctctt

SEQ ID NO: 3782628 - DNA, 25 bp, Homo sapien
catgtgactcttccgttcagatctc

SEQ ID NO: 3782629 - DNA, 25 bp, Homo sapien
ccttgccccaacctcttgacaatgg

SEQ ID NO: 3782630 - DNA, 25 bp, Homo sapien
tgccccaacctcttgacaatggccg

SEQ ID NO: 3782631 - DNA, 25 bp, Homo sapien
tccaagaagcctcctccttgcccca

SEQ ID NO: 3782632 - DNA, 25 bp, Homo sapien
aacctcttgacaatggccgtccagc

SEQ ID NO: 3782633 - DNA, 25 bp, Homo sapien
ggcccccagaaagtctcgtctccat

SEQ ID NO: 3782634 - DNA, 25 bp, Homo sapien
cctggcccccagaaagtctcgtctc

SEQ ID NO: 3782635 - DNA, 25 bp, Homo sapien
tggcccccagaaagtctcgtctcca

SEQ ID NO: 3782636 - DNA, 25 bp, Homo sapien
ctggcccccagaaagtctcgtctcc

SEQ ID NO: 3782637 - DNA, 25 bp, Homo sapien
tgtgtaaagccaccctcgtataagg

SEQ ID NO: 3782638 - DNA, 25 bp, Homo sapien
tataagggaacatgccaataccgtg

SEQ ID NO: 3782639 - DNA, 25 bp, Homo sapien
gaagatccaagactcaaccaggcct

SEQ ID NO: 3782640 - DNA, 25 bp, Homo sapien
accccgccagagagttgaagaccaa

SEQ ID NO: 3782641 - DNA, 25 bp, Homo sapien
gataaaccagacgatggagccccta

SEQ ID NO: 3782642 - DNA, 25 bp, Homo sapien
taaccaccacattgatttagagccg

SEQ ID NO: 3782643 - DNA, 25 bp, Homo sapien
tagagccgcttgtccaaaatgcaag

SEQ ID NO: 3782644 - DNA, 25 bp, Homo sapien
ttaatcagagtggtctccacagacc

SEQ ID NO: 3782645 - DNA, 25 bp, Homo sapien
gcatttcagcaactaaattggtcat

SEQ ID NO: 3782646 - DNA, 25 bp, Homo sapien
tacttgtgaatcatcctccacttgc

SEQ ID NO: 3782647 - DNA, 25 bp, Homo sapien
gaaggaaaaccagttcatgtctttg

SEQ ID NO: 3782648 - DNA, 25 bp, Homo sapien
tgtgaagagtttaacggacttgcca

SEQ ID NO: 3782649 - DNA, 25 bp, Homo sapien
ggagattttcttaagacactgaagc

SEQ ID NO: 3782650 - DNA, 25 bp, Homo sapien
aaggcagaggagattttcttaagac

SEQ ID NO: 3782651 - DNA, 25 bp, Homo sapien
ttcttaagacactgaagctatctgc

SEQ ID NO: 3782652 - DNA, 25 bp, Homo sapien
gacactgaagctatctgctgttaat

SEQ ID NO: 3782653 - DNA, 25 bp, Homo sapien
cagattttctgattgggatactcaa

SEQ ID NO: 3782654 - DNA, 25 bp, Homo sapien
caaaggctgtgttgagcacttaact

SEQ ID NO: 3782655 - DNA, 25 bp, Homo sapien
acgaatctggctcgctatatgaaac

SEQ ID NO: 3782656 - DNA, 25 bp, Homo sapien
gattaggactagatttgaagggact

SEQ ID NO: 3782657 - DNA, 25 bp, Homo sapien
acaggcagctctgctagcctgttaa

SEQ ID NO: 3782658 - DNA, 25 bp, Homo sapien
ggcagctctgctagcctgttaattt

SEQ ID NO: 3782659 - DNA, 25 bp, Homo sapien
agctctgctagcctgttaatttcca

SEQ ID NO: 3782660 - DNA, 25 bp, Homo sapien
gcagctctgctagcctgttaatttc

SEQ ID NO: 3782661 - DNA, 25 bp, Homo sapien
cagatcccaattgacacagcaaaag

SEQ ID NO: 3782662 - DNA, 25 bp, Homo sapien
tcccaattgacacagcaaaagtcat

SEQ ID NO: 3782663 - DNA, 25 bp, Homo sapien
aaagtcatggcaaaacccatttcct

SEQ ID NO: 3782664 - DNA, 25 bp, Homo sapien
aagtcatggcaaaacccatttccta

SEQ ID NO: 3782665 - DNA, 25 bp, Homo sapien
caggttacggaagaccatcgggcag

SEQ ID NO: 3782666 - DNA, 25 bp, Homo sapien
tacggaagaccatcgggcagtattc

SEQ ID NO: 3782667 - DNA, 25 bp, Homo sapien
ctctcccgcaggttacggaagacca

SEQ ID NO: 3782668 - DNA, 25 bp, Homo sapien
agaccatcgggcagtattccttaaa

SEQ ID NO: 3782669 - DNA, 25 bp, Homo sapien
gagagagtcaatcagacttgcatct

SEQ ID NO: 3782670 - DNA, 25 bp, Homo sapien
acaggtgtgcttcctagaaccaggt

SEQ ID NO: 3782671 - DNA, 25 bp, Homo sapien
cactgagttccacaggtagccaaag

SEQ ID NO: 3782672 - DNA, 25 bp, Homo sapien
gccaaagaagggttcagagttcact

SEQ ID NO: 3782673 - DNA, 25 bp, Homo sapien
aacataacagggatttgaacatggc

SEQ ID NO: 3782674 - DNA, 25 bp, Homo sapien
aagtcatctggcatcaacataacag

SEQ ID NO: 3782675 - DNA, 25 bp, Homo sapien
tttgaacatggctcagttcattgat

SEQ ID NO: 3782676 - DNA, 25 bp, Homo sapien
gaagtcatctggcatcaacataaca

SEQ ID NO: 3782677 - DNA, 25 bp, Homo sapien
tgaggaggacttgacttgaatgtgt

SEQ ID NO: 3782678 - DNA, 25 bp, Homo sapien
actatccaggtgaggaggacttgac

SEQ ID NO: 3782679 - DNA, 25 bp, Homo sapien
tgggttattactatccaggtgagga

SEQ ID NO: 3782680 - DNA, 25 bp, Homo sapien
taaatagcatgggttattactatcc

SEQ ID NO: 3782681 - DNA, 25 bp, Homo sapien
tggcaaacacagtatagttctctct

SEQ ID NO: 3782682 - DNA, 25 bp, Homo sapien
aatcccctttggcaaacacagtata

SEQ ID NO: 3782683 - DNA, 25 bp, Homo sapien
tatagttctctctgtactgctggtc

SEQ ID NO: 3782684 - DNA, 25 bp, Homo sapien
agttctctctgtactgctggtcaca

SEQ ID NO: 3782685 - DNA, 25 bp, Homo sapien
cagataagagccacgtgcagatgac

SEQ ID NO: 3782686 - DNA, 25 bp, Homo sapien
tacaacgtggtccattcaaaagggc

SEQ ID NO: 3782687 - DNA, 25 bp, Homo sapien
gagaggaagggtaccatgctgccat

SEQ ID NO: 3782688 - DNA, 25 bp, Homo sapien
cattgatgcacagaaaagacgggat

SEQ ID NO: 3782689 - DNA, 25 bp, Homo sapien
acggtgcgctgcctgttgctgtcca

SEQ ID NO: 3782690 - DNA, 25 bp, Homo sapien
cttcgggcacgggaagacccagctc

SEQ ID NO: 3782691 - DNA, 25 bp, Homo sapien
ccatcgcatgagaggcacaggactg

SEQ ID NO: 3782692 - DNA, 25 bp, Homo sapien
agcccaagaagcttcgggcacggga

SEQ ID NO: 3782693 - DNA, 25 bp, Homo sapien
gcaatcgcacctttggcctgggtca

SEQ ID NO: 3782694 - DNA, 25 bp, Homo sapien
ggtcactccccgaggggacactgga

SEQ ID NO: 3782695 - DNA, 25 bp, Homo sapien
tgctctgctgcaatcgcacctttgg

SEQ ID NO: 3782696 - DNA, 25 bp, Homo sapien
gcacgggaggagccagttaccatct

SEQ ID NO: 3782697 - DNA, 25 bp, Homo sapien
aaatattaataattccgccagtggg

SEQ ID NO: 3782698 - DNA, 25 bp, Homo sapien
aattccgccagtgggcggcagcaca

SEQ ID NO: 3782699 - DNA, 25 bp, Homo sapien
taataattccgccagtgggcggcag

SEQ ID NO: 3782700 - DNA, 25 bp, Homo sapien
ctggcggaaaggccctagaaatatt

SEQ ID NO: 3782701 - DNA, 25 bp, Homo sapien
tgtcagtggacgggcaccgccactc

SEQ ID NO: 3782702 - DNA, 25 bp, Homo sapien
tcagtggacgggcaccgccactcca

SEQ ID NO: 3782703 - DNA, 25 bp, Homo sapien
agtggacgggcaccgccactccaca

SEQ ID NO: 3782704 - DNA, 25 bp, Homo sapien
ctgtcagtggacgggcaccgccact

SEQ ID NO: 3782705 - DNA, 25 bp, Homo sapien
tctaaaacctgactggagagcaaca

SEQ ID NO: 3782706 - DNA, 25 bp, Homo sapien
tgtatagctgtgtaaaccaacatgg

SEQ ID NO: 3782707 - DNA, 25 bp, Homo sapien
gggacaagtcgtctgtcttccagca

SEQ ID NO: 3782708 - DNA, 25 bp, Homo sapien
caccggacatgggaggaaagccttt

SEQ ID NO: 3782709 - DNA, 25 bp, Homo sapien
caagggtcttccacaagggcggtgt

SEQ ID NO: 3782710 - DNA, 25 bp, Homo sapien
tctaaggcaagggtcgcaagggtct

SEQ ID NO: 3782711 - DNA, 25 bp, Homo sapien
cacgaaggaagcgtctaactcaggg

SEQ ID NO: 3782712 - DNA, 25 bp, Homo sapien
gaaaaaccaaagtgctcacgaagga

SEQ ID NO: 3782713 - DNA, 25 bp, Homo sapien
aacaggatatttggcggtgggcttt

SEQ ID NO: 3782714 - DNA, 25 bp, Homo sapien
tatttgtgatacgatcctctcctct

SEQ ID NO: 3782715 - DNA, 25 bp, Homo sapien
acagtccccaggtatttgtgatacg

SEQ ID NO: 3782716 - DNA, 25 bp, Homo sapien
catgctcctggcatttagttggcag

SEQ ID NO: 3782717 - DNA, 25 bp, Homo sapien
ctgctgggatacatgacacattgtg

SEQ ID NO: 3782718 - DNA, 25 bp, Homo sapien
ctgggatacatgacacattgtgctt

SEQ ID NO: 3782719 - DNA, 25 bp, Homo sapien
catgacacattgtgctttcattgct

SEQ ID NO: 3782720 - DNA, 25 bp, Homo sapien
ggatacatgacacattgtgctttca

SEQ ID NO: 3782721 - DNA, 25 bp, Homo sapien
tttgcctgtgtgcaaggtcttttac

SEQ ID NO: 3782722 - DNA, 25 bp, Homo sapien
ctttgcctgtgtgcaaggtctttta

SEQ ID NO: 3782723 - DNA, 25 bp, Homo sapien
ccagagctgtctgcaatatgttcca

SEQ ID NO: 3782724 - DNA, 25 bp, Homo sapien
tgcttcacacaactggtcaccaagg

SEQ ID NO: 3782725 - DNA, 25 bp, Homo sapien
tttctcggatctttgccccagtatg

SEQ ID NO: 3782726 - DNA, 25 bp, Homo sapien
taaatgctaaacactcgcatgtagt

SEQ ID NO: 3782727 - DNA, 25 bp, Homo sapien
gtaggggtgtagatactgtcaagca

SEQ ID NO: 3782728 - DNA, 25 bp, Homo sapien
tactgtcaagcaaaactttctgaaa

SEQ ID NO: 3782729 - DNA, 25 bp, Homo sapien
gggtgtagatactgtcaagcaaaac

SEQ ID NO: 3782730 - DNA, 25 bp, Homo sapien
gatactgtcaagcaaaactttctga

SEQ ID NO: 3782731 - DNA, 25 bp, Homo sapien
aagcagtgtaaagtgcaccggccaa

SEQ ID NO: 3782732 - DNA, 25 bp, Homo sapien
gctggatggaatcatccaggtggca

SEQ ID NO: 3782733 - DNA, 25 bp, Homo sapien
aagtgcaccggccaaaaggctgcag

SEQ ID NO: 3782734 - DNA, 25 bp, Homo sapien
gcagtgaggttcaatggctggatgg

SEQ ID NO: 3782735 - DNA, 25 bp, Homo sapien
tgtggagcccaatgagacctagtgg

SEQ ID NO: 3782736 - DNA, 25 bp, Homo sapien
gactcggagggtactctggagacca

SEQ ID NO: 3782737 - DNA, 25 bp, Homo sapien
gatgggcacatcctaatatccaggc

SEQ ID NO: 3782738 - DNA, 25 bp, Homo sapien
gaacagggtcctggcttaacaaggc

SEQ ID NO: 3782739 - DNA, 25 bp, Homo sapien
cacctagtgtgtggtttgaggcaaa

SEQ ID NO: 3782740 - DNA, 25 bp, Homo sapien
gaaacagagaggtcctggcggcatt

SEQ ID NO: 3782741 - DNA, 25 bp, Homo sapien
gcggcatttgcatccctggttccag

SEQ ID NO: 3782742 - DNA, 25 bp, Homo sapien
tctgaccttcggactttcacgcagg

SEQ ID NO: 3782743 - DNA, 25 bp, Homo sapien
agacattgcttgtccctaaagttgg

SEQ ID NO: 3782744 - DNA, 25 bp, Homo sapien
tgtgatgtgcctctcgatgaagaca

SEQ ID NO: 3782745 - DNA, 25 bp, Homo sapien
cgatgaagacattgcttgtccctaa

SEQ ID NO: 3782746 - DNA, 25 bp, Homo sapien
gcctctcgatgaagacattgcttgt

SEQ ID NO: 3782747 - DNA, 25 bp, Homo sapien
gatttgtgcaagagtggagtttccg

SEQ ID NO: 3782748 - DNA, 25 bp, Homo sapien
gagtttccgggttcctgtgtcagcc

SEQ ID NO: 3782749 - DNA, 25 bp, Homo sapien
tagtgttgcatcgttccactggagg

SEQ ID NO: 3782750 - DNA, 25 bp, Homo sapien
tattgactgttgctgaagcataccc

SEQ ID NO: 3782751 - DNA, 25 bp, Homo sapien
tacggagcattaagacctcaatgac

SEQ ID NO: 3782752 - DNA, 25 bp, Homo sapien
taagacctcaatgaccccagacctt

SEQ ID NO: 3782753 - DNA, 25 bp, Homo sapien
tcgatctgctctacggagcattaag

SEQ ID NO: 3782754 - DNA, 25 bp, Homo sapien
tcctctcaactcctatggcacattt

SEQ ID NO: 3782755 - DNA, 25 bp, Homo sapien
gatgagttctgactcccgtgtgagg

SEQ ID NO: 3782756 - DNA, 25 bp, Homo sapien
catcttgctgctacaagggtgcaaa

SEQ ID NO: 3782757 - DNA, 25 bp, Homo sapien
gcttcagggacagacgtatgaccca

SEQ ID NO: 3782758 - DNA, 25 bp, Homo sapien
cactgttaagggaagagacactgtc

SEQ ID NO: 3782759 - DNA, 25 bp, Homo sapien
agccaggccatggtaaactatatga

SEQ ID NO: 3782760 - DNA, 25 bp, Homo sapien
gagactctaggtagaactacacctg

SEQ ID NO: 3782761 - DNA, 25 bp, Homo sapien
tggtaaactatatgagactctaggt

SEQ ID NO: 3782762 - DNA, 25 bp, Homo sapien
aactatatgagactctaggtagaac

SEQ ID NO: 3782763 - DNA, 25 bp, Homo sapien
tcttactttgtagcactcaggccac

SEQ ID NO: 3782764 - DNA, 25 bp, Homo sapien
taatgtacactttggctctagggcc

SEQ ID NO: 3782765 - DNA, 25 bp, Homo sapien
gacgcactgctttgacacgaaaaaa

SEQ ID NO: 3782766 - DNA, 25 bp, Homo sapien
ggagataactctgttggcaacgcag

SEQ ID NO: 3782767 - DNA, 25 bp, Homo sapien
gctacagaaatatgtggcgccagaa

SEQ ID NO: 3782768 - DNA, 25 bp, Homo sapien
gaatactttactcaccccacaggga

SEQ ID NO: 3782769 - DNA, 25 bp, Homo sapien
ttagctggacgtagaaagtgggacc

SEQ ID NO: 3782770 - DNA, 25 bp, Homo sapien
ggctagaaaccctactgagatcact

SEQ ID NO: 3782771 - DNA, 25 bp, Homo sapien
tgggatcatatggttgctgcgcagc

SEQ ID NO: 3782772 - DNA, 25 bp, Homo sapien
tcccataagaatgagaatgtgaaca

SEQ ID NO: 3782773 - DNA, 25 bp, Homo sapien
gcgcagcaaaagatcccataagaat

SEQ ID NO: 3782774 - DNA, 25 bp, Homo sapien
tggttgctgcgcagcaaaagatccc

SEQ ID NO: 3782775 - DNA, 25 bp, Homo sapien
ttcacggtttctgagcagaagttag

SEQ ID NO: 3782776 - DNA, 25 bp, Homo sapien
cactggccttaaataggagaacact

SEQ ID NO: 3782777 - DNA, 25 bp, Homo sapien
ccgatacctggtatgtagtgtgtac

SEQ ID NO: 3782778 - DNA, 25 bp, Homo sapien
gaagttagaaacaccggatgcaaat

SEQ ID NO: 3782779 - DNA, 25 bp, Homo sapien
ggaaaggttgccttgccacctatct

SEQ ID NO: 3782780 - DNA, 25 bp, Homo sapien
gactgtgagatcaaaggccatatat

SEQ ID NO: 3782781 - DNA, 25 bp, Homo sapien
gtttagatgcaatatactatgatgc

SEQ ID NO: 3782782 - DNA, 25 bp, Homo sapien
tagttctatgggatagattatcaga

SEQ ID NO: 3782783 - DNA, 25 bp, Homo sapien
gggtactaacggtttcacatgatgc

SEQ ID NO: 3782784 - DNA, 25 bp, Homo sapien
tttgccctgatcatgtaaaatgcct

SEQ ID NO: 3782785 - DNA, 25 bp, Homo sapien
tacaccaagacattaatctgggagg

SEQ ID NO: 3782786 - DNA, 25 bp, Homo sapien
catgattgaaaggactcttagccac

SEQ ID NO: 3782787 - DNA, 25 bp, Homo sapien
ggaggccagctatctaacacattta

SEQ ID NO: 3782788 - DNA, 25 bp, Homo sapien
gcaaccaatgtttcagtctaagtca

SEQ ID NO: 3782789 - DNA, 25 bp, Homo sapien
aaaagaccgatgtacaataggcagt

SEQ ID NO: 3782790 - DNA, 25 bp, Homo sapien
ttatcctactacagaaaaagaccga

SEQ ID NO: 3782791 - DNA, 25 bp, Homo sapien
tccctcatggagcttcttagcagag

SEQ ID NO: 3782792 - DNA, 25 bp, Homo sapien
aaaggtacatctgcttaactgggca

SEQ ID NO: 3782793 - DNA, 25 bp, Homo sapien
tgggcaactgctatagtccaggcac

SEQ ID NO: 3782794 - DNA, 25 bp, Homo sapien
cacagtgatgacctattgcttccaa

SEQ ID NO: 3782795 - DNA, 25 bp, Homo sapien
tttttaacctagcaactatcaggcc

SEQ ID NO: 3782796 - DNA, 25 bp, Homo sapien
ccaggaggcaatggtagccctcaaa

SEQ ID NO: 3782797 - DNA, 25 bp, Homo sapien
cctgtgtagagagcacacaaccctt

SEQ ID NO: 3782798 - DNA, 25 bp, Homo sapien
gaggagtactctgttgcatacctta

SEQ ID NO: 3782799 - DNA, 25 bp, Homo sapien
ctttatttttgcgtagctgaggcca

SEQ ID NO: 3782800 - DNA, 25 bp, Homo sapien
cttctttatttttgcgtagctgagg

SEQ ID NO: 3782801 - DNA, 25 bp, Homo sapien
ttctttatttttgcgtagctgaggc

SEQ ID NO: 3782802 - DNA, 25 bp, Homo sapien
tttatttttgcgtagctgaggccat

SEQ ID NO: 3782803 - DNA, 25 bp, Homo sapien
atctctcctggaatcgcccagcgct

SEQ ID NO: 3782804 - DNA, 25 bp, Homo sapien
gaacgttcctggctacaataagcac

SEQ ID NO: 3782805 - DNA, 25 bp, Homo sapien
cagcgcttccttgcccggaacgttc

SEQ ID NO: 3782806 - DNA, 25 bp, Homo sapien
gttcctggctacaataagcaccaca

SEQ ID NO: 3782807 - DNA, 25 bp, Homo sapien
aatgtccagtatcagctcgagctcc

SEQ ID NO: 3782808 - DNA, 25 bp, Homo sapien
tccaatgtccagtatcagctcgagc

SEQ ID NO: 3782809 - DNA, 25 bp, Homo sapien
cttccaatgtccagtatcagctcga

SEQ ID NO: 3782810 - DNA, 25 bp, Homo sapien
caatgtccagtatcagctcgagctc

SEQ ID NO: 3782811 - DNA, 25 bp, Homo sapien
ggtgggtccttatagcactgcttat

SEQ ID NO: 3782812 - DNA, 25 bp, Homo sapien
cttgtccacagctgtccgatacaca

SEQ ID NO: 3782813 - DNA, 25 bp, Homo sapien
tgttcctgaccatttcggcaagtgt

SEQ ID NO: 3782814 - DNA, 25 bp, Homo sapien
ccgccctgccaagtcatctgaagtt

SEQ ID NO: 3782815 - DNA, 25 bp, Homo sapien
gaacccgtgcaataacagaaaccgc

SEQ ID NO: 3782816 - DNA, 25 bp, Homo sapien
caataacagaaaccgcattactggt

SEQ ID NO: 3782817 - DNA, 25 bp, Homo sapien
cccgtgcaataacagaaaccgcatt

SEQ ID NO: 3782818 - DNA, 25 bp, Homo sapien
ctgtggaacccgtgcaataacagaa

SEQ ID NO: 3782819 - DNA, 25 bp, Homo sapien
ttggtgggatctgcaaatgcggaac

SEQ ID NO: 3782820 - DNA, 25 bp, Homo sapien
gaacatgcagatacaaagggcctac

SEQ ID NO: 3782821 - DNA, 25 bp, Homo sapien
tattatctctgtgaatcccatagca

SEQ ID NO: 3782822 - DNA, 25 bp, Homo sapien
tgcgagatcattgatagatgaattt

SEQ ID NO: 3782823 - DNA, 25 bp, Homo sapien
tgggaacctgcattatcttccagct

SEQ ID NO: 3782824 - DNA, 25 bp, Homo sapien
gttaaaaggcccgaaatgctcatcc

SEQ ID NO: 3782825 - DNA, 25 bp, Homo sapien
tctgtagttaaaaggcccgaaatgc

SEQ ID NO: 3782826 - DNA, 25 bp, Homo sapien
gaaatgctcatccatataccggccc

SEQ ID NO: 3782827 - DNA, 25 bp, Homo sapien
ggatacggcggactaccttttcata

SEQ ID NO: 3782828 - DNA, 25 bp, Homo sapien
tcaagatgtggcagtgggtccctct

SEQ ID NO: 3782829 - DNA, 25 bp, Homo sapien
tccacaggttagatgtcacatgcca

SEQ ID NO: 3782830 - DNA, 25 bp, Homo sapien
cacaagtggctgtcagtaatacctg

SEQ ID NO: 3782831 - DNA, 25 bp, Homo sapien
gacatgcccaactgttataagtgtg

SEQ ID NO: 3782832 - DNA, 25 bp, Homo sapien
tgtgtctggatcagtacaaccacct

SEQ ID NO: 3782833 - DNA, 25 bp, Homo sapien
gaaacacaggctataagggtctctc

SEQ ID NO: 3782834 - DNA, 25 bp, Homo sapien
tatgttcccactcaaagtatcagcc

SEQ ID NO: 3782835 - DNA, 25 bp, Homo sapien
cttttcagagggcagactcgggcca

SEQ ID NO: 3782836 - DNA, 25 bp, Homo sapien
agttgaaagcagctcttttcagagg

SEQ ID NO: 3782837 - DNA, 25 bp, Homo sapien
gcagactcgggccaggcagcctatg

SEQ ID NO: 3782838 - DNA, 25 bp, Homo sapien
ggcagcctatgtggaagccatcttc

SEQ ID NO: 3782839 - DNA, 25 bp, Homo sapien
cccatgtgcgtacatctttggtcaa

SEQ ID NO: 3782840 - DNA, 25 bp, Homo sapien
tcagacctgatactcccacactgcc

SEQ ID NO: 3782841 - DNA, 25 bp, Homo sapien
cacactgcccatgtgcgtacatctt

SEQ ID NO: 3782842 - DNA, 25 bp, Homo sapien
tgatactcccacactgcccatgtgc

SEQ ID NO: 3782843 - DNA, 25 bp, Homo sapien
gctgacagggttattcaggtcagct

SEQ ID NO: 3782844 - DNA, 25 bp, Homo sapien
ctgacagggttattcaggtcagctc

SEQ ID NO: 3782845 - DNA, 25 bp, Homo sapien
gatgtgctaattacagtgctaggcc

SEQ ID NO: 3782846 - DNA, 25 bp, Homo sapien
taatatatcaccatccaaactgcat

SEQ ID NO: 3782847 - DNA, 25 bp, Homo sapien
gtatttcgaaggctatgctggcaga

SEQ ID NO: 3782848 - DNA, 25 bp, Homo sapien
tctcaaccctgtgaagtcatatcat

SEQ ID NO: 3782849 - DNA, 25 bp, Homo sapien
ggacagagacctgcctgaaactgcc

SEQ ID NO: 3782850 - DNA, 25 bp, Homo sapien
caccaaggacaccatgaattctcca

SEQ ID NO: 3782851 - DNA, 25 bp, Homo sapien
tccagctctattactcggacagaga

SEQ ID NO: 3782852 - DNA, 25 bp, Homo sapien
aaagacccacggatgtccagaacca

SEQ ID NO: 3782853 - DNA, 25 bp, Homo sapien
ctttccccaacgccaacaggcaagc

SEQ ID NO: 3782854 - DNA, 25 bp, Homo sapien
tttccccaacgccaacaggcaagcg

SEQ ID NO: 3782855 - DNA, 25 bp, Homo sapien
aggaagactccccgccaagggctct

SEQ ID NO: 3782856 - DNA, 25 bp, Homo sapien
gccaaaaagccgacttgtgcccagt

SEQ ID NO: 3782857 - DNA, 25 bp, Homo sapien
gacgccagagccatatttacatcgg

SEQ ID NO: 3782858 - DNA, 25 bp, Homo sapien
tatttacatcggctgctgctttgcc

SEQ ID NO: 3782859 - DNA, 25 bp, Homo sapien
gatgcgggagaagcgcagggatgcc

SEQ ID NO: 3782860 - DNA, 25 bp, Homo sapien
atgcacacgggacccccgacccgca

SEQ ID NO: 3782861 - DNA, 25 bp, Homo sapien
tgcacacgggacccccgacccgcac

SEQ ID NO: 3782862 - DNA, 25 bp, Homo sapien
aacagcttcactttctgcgctacga

SEQ ID NO: 3782863 - DNA, 25 bp, Homo sapien
agcagcgggtcgctggcccgaaaca

SEQ ID NO: 3782864 - DNA, 25 bp, Homo sapien
cccacatgaggacgctgagcagcgg

SEQ ID NO: 3782865 - DNA, 25 bp, Homo sapien
gtcttgctcgccaggacagaggacc

SEQ ID NO: 3782866 - DNA, 25 bp, Homo sapien
gcgccccggcccgtatcctgcgccc

SEQ ID NO: 3782867 - DNA, 25 bp, Homo sapien
gccgcctcctatgtcccctccaccg

SEQ ID NO: 3782868 - DNA, 25 bp, Homo sapien
gctcagccccactcggctcgctccg

SEQ ID NO: 3782869 - DNA, 25 bp, Homo sapien
gcccggcagactgcgctcggctcgc

SEQ ID NO: 3782870 - DNA, 25 bp, Homo sapien
gcggataaccgtctggcctttcaga

SEQ ID NO: 3782871 - DNA, 25 bp, Homo sapien
ctttcagaccctcgatatgggcctc

SEQ ID NO: 3782872 - DNA, 25 bp, Homo sapien
cacattgccgggtcagtccctgaaa

SEQ ID NO: 3782873 - DNA, 25 bp, Homo sapien
gagacccagccaggtgtgaaatgct

SEQ ID NO: 3782874 - DNA, 25 bp, Homo sapien
tcatccaaaatgatatctgcttctc

SEQ ID NO: 3782875 - DNA, 25 bp, Homo sapien
agtcccctcgtcgtaatttcctgct

SEQ ID NO: 3782876 - DNA, 25 bp, Homo sapien
tcccctcgtcgtaatttcctgcttg

SEQ ID NO: 3782877 - DNA, 25 bp, Homo sapien
catcactgctcttagtggtttaaaa

SEQ ID NO: 3782878 - DNA, 25 bp, Homo sapien
aagctgccaaaccatcaacattcgc

SEQ ID NO: 3782879 - DNA, 25 bp, Homo sapien
atcaacattcgccaaaggtctggaa

SEQ ID NO: 3782880 - DNA, 25 bp, Homo sapien
ttgtcaagctgccaaaccatcaaca

SEQ ID NO: 3782881 - DNA, 25 bp, Homo sapien
acattcgccaaaggtctggaagaga

SEQ ID NO: 3782882 - DNA, 25 bp, Homo sapien
gcatacagcctatgcgtttttcggg

SEQ ID NO: 3782883 - DNA, 25 bp, Homo sapien
tgcatacagcctatgcgtttttcgg

SEQ ID NO: 3782884 - DNA, 25 bp, Homo sapien
gcatcatcttcccaatgcatacagc

SEQ ID NO: 3782885 - DNA, 25 bp, Homo sapien
ttcccaatgcatacagcctatgcgt

SEQ ID NO: 3782886 - DNA, 25 bp, Homo sapien
ccatatgtcagcaccaccaactgca

SEQ ID NO: 3782887 - DNA, 25 bp, Homo sapien
catcagcagaagatacattaagtgg

SEQ ID NO: 3782888 - DNA, 25 bp, Homo sapien
actgcaacatcagcagaagatacat

SEQ ID NO: 3782889 - DNA, 25 bp, Homo sapien
tctccatatgtcagcaccaccaact

SEQ ID NO: 3782890 - DNA, 25 bp, Homo sapien
cttccttttggtgacccaagttgat

SEQ ID NO: 3782891 - DNA, 25 bp, Homo sapien
ggaaggtagtggtggtttgaagctg

SEQ ID NO: 3782892 - DNA, 25 bp, Homo sapien
tagtggtggtttgaagctgtttcct

SEQ ID NO: 3782893 - DNA, 25 bp, Homo sapien
tccttttggtgacccaagttgatgg

SEQ ID NO: 3782894 - DNA, 25 bp, Homo sapien
tccttctcggtcactgctagctaca

SEQ ID NO: 3782895 - DNA, 25 bp, Homo sapien
cactgctagctacacttccgctgta

SEQ ID NO: 3782896 - DNA, 25 bp, Homo sapien
tctcggtcactgctagctacacttc

SEQ ID NO: 3782897 - DNA, 25 bp, Homo sapien
ctagctacacttccgctgtatggca

SEQ ID NO: 3782898 - DNA, 25 bp, Homo sapien
attttctaccgggtgcctgtcttca

SEQ ID NO: 3782899 - DNA, 25 bp, Homo sapien
cagttgcagaaagcccctccaaatt

SEQ ID NO: 3782900 - DNA, 25 bp, Homo sapien
tttcagttgcagaaagcccctccaa

SEQ ID NO: 3782901 - DNA, 25 bp, Homo sapien
ttcagttgcagaaagcccctccaaa

SEQ ID NO: 3782902 - DNA, 25 bp, Homo sapien
gtctttgatcatatgttccaaattg

SEQ ID NO: 3782903 - DNA, 25 bp, Homo sapien
gtcagccgaactttttgataacatt

SEQ ID NO: 3782904 - DNA, 25 bp, Homo sapien
atatgttccaaattgtcagccgaac

SEQ ID NO: 3782905 - DNA, 25 bp, Homo sapien
gtcttcttgtgcaataattaaaatg

SEQ ID NO: 3782906 - DNA, 25 bp, Homo sapien
ctctgggtaccggagatggctctcc

SEQ ID NO: 3782907 - DNA, 25 bp, Homo sapien
ctagggattgcctctgggtaccgga

SEQ ID NO: 3782908 - DNA, 25 bp, Homo sapien
tctgggtaccggagatggctctcca

SEQ ID NO: 3782909 - DNA, 25 bp, Homo sapien
gggcagaccctagggattgcctctg

SEQ ID NO: 3782910 - DNA, 25 bp, Homo sapien
agaagggcagaaggctgtcctccca

SEQ ID NO: 3782911 - DNA, 25 bp, Homo sapien
tcagaagggcagaaggctgtcctcc

SEQ ID NO: 3782912 - DNA, 25 bp, Homo sapien
cagaagggcagaaggctgtcctccc

SEQ ID NO: 3782913 - DNA, 25 bp, Homo sapien
gaagggcagaaggctgtcctcccac

SEQ ID NO: 3782914 - DNA, 25 bp, Homo sapien
ccttcatcccatgggaacctttgtc

SEQ ID NO: 3782915 - DNA, 25 bp, Homo sapien
ttcacaggctcctagaaaaccacac

SEQ ID NO: 3782916 - DNA, 25 bp, Homo sapien
ttcttcacaggctcctagaaaacca

SEQ ID NO: 3782917 - DNA, 25 bp, Homo sapien
tcacaggctcctagaaaaccacaca

SEQ ID NO: 3782918 - DNA, 25 bp, Homo sapien
gttccatctggaagaagcgtaagga

SEQ ID NO: 3782919 - DNA, 25 bp, Homo sapien
ttctacggtgacatggacttctgag

SEQ ID NO: 3782920 - DNA, 25 bp, Homo sapien
tatccaaactcaaggacgaaaggtc

SEQ ID NO: 3782921 - DNA, 25 bp, Homo sapien
ctctggaggccgaaatatccaaact

SEQ ID NO: 3782922 - DNA, 25 bp, Homo sapien
tgcagatggtagcctggccagtgcc

SEQ ID NO: 3782923 - DNA, 25 bp, Homo sapien
tgtgcagatggtagcctggccagtg

SEQ ID NO: 3782924 - DNA, 25 bp, Homo sapien
ctgtgcagatggtagcctggccagt

SEQ ID NO: 3782925 - DNA, 25 bp, Homo sapien
cagatggtagcctggccagtgccat

SEQ ID NO: 3782926 - DNA, 25 bp, Homo sapien
tatatttctattgatcatttggaca

SEQ ID NO: 3782927 - DNA, 25 bp, Homo sapien
tactcagaagttgtaaagctgctct

SEQ ID NO: 3782928 - DNA, 25 bp, Homo sapien
catttggacattcttttttgggtag

SEQ ID NO: 3782929 - DNA, 25 bp, Homo sapien
caggaaactgtgattagtaaaatgg

SEQ ID NO: 3782930 - DNA, 25 bp, Homo sapien
gcttttacagtaaccagtgtgtaga

SEQ ID NO: 3782931 - DNA, 25 bp, Homo sapien
ccaagcagagattccgcctaggtat

SEQ ID NO: 3782932 - DNA, 25 bp, Homo sapien
tccctcttgcaattgctccctgtgt

SEQ ID NO: 3782933 - DNA, 25 bp, Homo sapien
gctaaggtgtatttgcaggtcttcc

SEQ ID NO: 3782934 - DNA, 25 bp, Homo sapien
tgttggtctcgctgcctttcccaga

SEQ ID NO: 3782935 - DNA, 25 bp, Homo sapien
gaggctttcgtattcttgttggtct

SEQ ID NO: 3782936 - DNA, 25 bp, Homo sapien
tcgtattcttgttggtctcgctgcc

SEQ ID NO: 3782937 - DNA, 25 bp, Homo sapien
gatgactccagctcaattaaatgaa

SEQ ID NO: 3782938 - DNA, 25 bp, Homo sapien
gctccaacagagagtgcttggagta

SEQ ID NO: 3782939 - DNA, 25 bp, Homo sapien
ctctgagtctggtgacaggtcttga

SEQ ID NO: 3782940 - DNA, 25 bp, Homo sapien
tctgagtctggtgacaggtcttgaa

SEQ ID NO: 3782941 - DNA, 25 bp, Homo sapien
ctgagtgcttattacaggcaaaggc

SEQ ID NO: 3782942 - DNA, 25 bp, Homo sapien
caggaagtgactgaatccacaaaga

SEQ ID NO: 3782943 - DNA, 25 bp, Homo sapien
caaagatggtctgagtgcttattac

SEQ ID NO: 3782944 - DNA, 25 bp, Homo sapien
gaatccacaaagatggtctgagtgc

SEQ ID NO: 3782945 - DNA, 25 bp, Homo sapien
tgaataagatgcttcacggtctttg

SEQ ID NO: 3782946 - DNA, 25 bp, Homo sapien
tagacacatcagcagatgatttcca

SEQ ID NO: 3782947 - DNA, 25 bp, Homo sapien
cggtctttgttgggaataacctctg

SEQ ID NO: 3782948 - DNA, 25 bp, Homo sapien
ctggttgagtgacagatatagacac

SEQ ID NO: 3782949 - DNA, 25 bp, Homo sapien
tgggttctcggttgggttctatgtc

SEQ ID NO: 3782950 - DNA, 25 bp, Homo sapien
ttctcggttgggttctatgtccttc

SEQ ID NO: 3782951 - DNA, 25 bp, Homo sapien
ctcggttgggttctatgtccttcat

SEQ ID NO: 3782952 - DNA, 25 bp, Homo sapien
tctgggttctcggttgggttctatg

SEQ ID NO: 3782953 - DNA, 25 bp, Homo sapien
tggcccaagcctcggtacagcctgg

SEQ ID NO: 3782954 - DNA, 25 bp, Homo sapien
gctgatcttgtggagacacggttcc

SEQ ID NO: 3782955 - DNA, 25 bp, Homo sapien
tgtggagacacggttcctctctgac

SEQ ID NO: 3782956 - DNA, 25 bp, Homo sapien
ccccatgtgctgatcttgtggagac

SEQ ID NO: 3782957 - DNA, 25 bp, Homo sapien
ttgaactgctcgcaagctgaaaggg

SEQ ID NO: 3782958 - DNA, 25 bp, Homo sapien
tgaaaggggtttcagaacaggccag

SEQ ID NO: 3782959 - DNA, 25 bp, Homo sapien
caaagcgttctttgaactgctcgca

SEQ ID NO: 3782960 - DNA, 25 bp, Homo sapien
ggccagttagtctcctcaaggactg

SEQ ID NO: 3782961 - DNA, 25 bp, Homo sapien
tggggtgcctttctttgagggcaaa

SEQ ID NO: 3782962 - DNA, 25 bp, Homo sapien
cttggatattttcaagcacccgaaa

SEQ ID NO: 3782963 - DNA, 25 bp, Homo sapien
caagcacccgaaagatgaacgacat

SEQ ID NO: 3782964 - DNA, 25 bp, Homo sapien
aggcccttcctccgcagagagctgt

SEQ ID NO: 3782965 - DNA, 25 bp, Homo sapien
cttctgcccaatggtagcctttact

SEQ ID NO: 3782966 - DNA, 25 bp, Homo sapien
gagtttgagcaaacgtggtagataa

SEQ ID NO: 3782967 - DNA, 25 bp, Homo sapien
taaagttgtaccagagcttctcttg

SEQ ID NO: 3782968 - DNA, 25 bp, Homo sapien
tactccctggtaacgctctaaagtg

SEQ ID NO: 3782969 - DNA, 25 bp, Homo sapien
agtgcttcatacatcctatcccttg

SEQ ID NO: 3782970 - DNA, 25 bp, Homo sapien
tcatacatcctatcccttgaaatgt

SEQ ID NO: 3782971 - DNA, 25 bp, Homo sapien
cctatcccttgaaatgttaaagtca

SEQ ID NO: 3782972 - DNA, 25 bp, Homo sapien
catcctatcccttgaaatgttaaag

SEQ ID NO: 3782973 - DNA, 25 bp, Homo sapien
actgtccaactttctcttaatgctc

SEQ ID NO: 3782974 - DNA, 25 bp, Homo sapien
tctcttaatgctccttccctcaaaa

SEQ ID NO: 3782975 - DNA, 25 bp, Homo sapien
ctgtccaactttctcttaatgctcc

SEQ ID NO: 3782976 - DNA, 25 bp, Homo sapien
aactgtccaactttctcttaatgct

SEQ ID NO: 3782977 - DNA, 25 bp, Homo sapien
gggtcatagggtaaattgccatgga

SEQ ID NO: 3782978 - DNA, 25 bp, Homo sapien
tctagtggccttggttttaaggcca

SEQ ID NO: 3782979 - DNA, 25 bp, Homo sapien
tgggtcatagggtaaattgccatgg

SEQ ID NO: 3782980 - DNA, 25 bp, Homo sapien
ctggtttacaatgtgtgctgaatgc

SEQ ID NO: 3782981 - DNA, 25 bp, Homo sapien
tctggtttacaatgtgtgctgaatg

SEQ ID NO: 3782982 - DNA, 25 bp, Homo sapien
ggtttacaatgtgtgctgaatgcat

SEQ ID NO: 3782983 - DNA, 25 bp, Homo sapien
tatccacagtctggacctctggatt

SEQ ID NO: 3782984 - DNA, 25 bp, Homo sapien
taaatgactgccatgtgaccctcgg

SEQ ID NO: 3782985 - DNA, 25 bp, Homo sapien
gattccttatcaagcttctgagagc

SEQ ID NO: 3782986 - DNA, 25 bp, Homo sapien
gaccctcggaggtgttctcagtgcc

SEQ ID NO: 3782987 - DNA, 25 bp, Homo sapien
cacaaaagccatacaggagggcctg

SEQ ID NO: 3782988 - DNA, 25 bp, Homo sapien
taggaatcaccagaagtgaggacag

SEQ ID NO: 3782989 - DNA, 25 bp, Homo sapien
tctgtataagccagtgaagtcgtct

SEQ ID NO: 3782990 - DNA, 25 bp, Homo sapien
tcagctagaccatgaaaagcatctt

SEQ ID NO: 3782991 - DNA, 25 bp, Homo sapien
tcactaagaatcagagatagcagct

SEQ ID NO: 3782992 - DNA, 25 bp, Homo sapien
tgaaacatccagagactcccgcttc

SEQ ID NO: 3782993 - DNA, 25 bp, Homo sapien
caggagtgggactttctgttgtgaa

SEQ ID NO: 3782994 - DNA, 25 bp, Homo sapien
gcaggagtgggactttctgttgtga

SEQ ID NO: 3782995 - DNA, 25 bp, Homo sapien
tgtaaggaatgcactgcagccctgc

SEQ ID NO: 3782996 - DNA, 25 bp, Homo sapien
caccttgcggagaatggaagtttcc

SEQ ID NO: 3782997 - DNA, 25 bp, Homo sapien
gcaccatgctctggccagtacaact

SEQ ID NO: 3782998 - DNA, 25 bp, Homo sapien
ggaagctggtcccacagtcaagagc

SEQ ID NO: 3782999 - DNA, 25 bp, Homo sapien
tgcgcattgaaatgcgcatttgcat

SEQ ID NO: 3783000 - DNA, 25 bp, Homo sapien
gagagttgaaggcttgtcgatgatt

SEQ ID NO: 3783001 - DNA, 25 bp, Homo sapien
tgaaggcttgtcgatgattgcgcat

SEQ ID NO: 3783002 - DNA, 25 bp, Homo sapien
tcgatgattgcgcattgaaatgcgc

SEQ ID NO: 3783003 - DNA, 25 bp, Homo sapien
tttattggtctctcatgtaattgga

SEQ ID NO: 3783004 - DNA, 25 bp, Homo sapien
taccagaagattgccagtgctccag

SEQ ID NO: 3783005 - DNA, 25 bp, Homo sapien
caagactagcatattgactccacac

SEQ ID NO: 3783006 - DNA, 25 bp, Homo sapien
tgaaggcaggcaatccaagactagc

SEQ ID NO: 3783007 - DNA, 25 bp, Homo sapien
cacgcaggcatgtcaaagtaactat

SEQ ID NO: 3783008 - DNA, 25 bp, Homo sapien
caagtgctgactaaacacacggtgg

SEQ ID NO: 3783009 - DNA, 25 bp, Homo sapien
acagatcagtgtttgggctgcggat

SEQ ID NO: 3783010 - DNA, 25 bp, Homo sapien
tttatggacgactctagaaaatgca

SEQ ID NO: 3783011 - DNA, 25 bp, Homo sapien
tcctgctgcctggaacaacacatcg

SEQ ID NO: 3783012 - DNA, 25 bp, Homo sapien
tccgaggctcatggtacgtctggct

SEQ ID NO: 3783013 - DNA, 25 bp, Homo sapien
gcacctcttggcatgttaatgacag

SEQ ID NO: 3783014 - DNA, 25 bp, Homo sapien
ggactgactgtcgaataactgggca

SEQ ID NO: 3783015 - DNA, 25 bp, Homo sapien
cagagcaatgctgcgggtgacgtca

SEQ ID NO: 3783016 - DNA, 25 bp, Homo sapien
tttgcaccctgcagcgtgtcactgg

SEQ ID NO: 3783017 - DNA, 25 bp, Homo sapien
gctgcgggtgacgtcagcacctctg

SEQ ID NO: 3783018 - DNA, 25 bp, Homo sapien
tccttttgcaccctgcagcgtgtca

SEQ ID NO: 3783019 - DNA, 25 bp, Homo sapien
catcttcaagagtcccgttcccttg

SEQ ID NO: 3783020 - DNA, 25 bp, Homo sapien
gttcccttgccaccccttcacgtgc

SEQ ID NO: 3783021 - DNA, 25 bp, Homo sapien
ttcacgtgcaccctcaatttccaca

SEQ ID NO: 3783022 - DNA, 25 bp, Homo sapien
atcttcaagagtcccgttcccttgc

SEQ ID NO: 3783023 - DNA, 25 bp, Homo sapien
gagaacatagcctgcgtgattttaa

SEQ ID NO: 3783024 - DNA, 25 bp, Homo sapien
tatcttgacaaacacaccaggtgca

SEQ ID NO: 3783025 - DNA, 25 bp, Homo sapien
ccagtttaatcctttgtggacagag

SEQ ID NO: 3783026 - DNA, 25 bp, Homo sapien
tattgagttgtgttttgtggcccaa

SEQ ID NO: 3783027 - DNA, 25 bp, Homo sapien
tgcccaaagactgctgagcccctgt

SEQ ID NO: 3783028 - DNA, 25 bp, Homo sapien
aacaaaagacggagggagctgagaa

SEQ ID NO: 3783029 - DNA, 25 bp, Homo sapien
gttgccgctggggatgacaagaaag

SEQ ID NO: 3783030 - DNA, 25 bp, Homo sapien
agttccagccgtacatactcaatgg

SEQ ID NO: 3783031 - DNA, 25 bp, Homo sapien
gacgcaggatttctaggccacttga

SEQ ID NO: 3783032 - DNA, 25 bp, Homo sapien
caaccagttatgtgtcgtggaatca

SEQ ID NO: 3783033 - DNA, 25 bp, Homo sapien
actcaatggagggaaactgctgtcc

SEQ ID NO: 3783034 - DNA, 25 bp, Homo sapien
ctaacccagcaagcagcaagaggga

SEQ ID NO: 3783035 - DNA, 25 bp, Homo sapien
tcatgttgatatatgtagcacggac

SEQ ID NO: 3783036 - DNA, 25 bp, Homo sapien
tagctggaagtacagccgaacgcaa

SEQ ID NO: 3783037 - DNA, 25 bp, Homo sapien
tagcacggactgattggtttaaaca

SEQ ID NO: 3783038 - DNA, 25 bp, Homo sapien
cagctgtgtggcattctgttgcgtc

SEQ ID NO: 3783039 - DNA, 25 bp, Homo sapien
tctcgcagcaagtgataggctccag

SEQ ID NO: 3783040 - DNA, 25 bp, Homo sapien
tgctctgcatgcgaatttgctccag

SEQ ID NO: 3783041 - DNA, 25 bp, Homo sapien
tcgtcccagtggacggtctcgcagc

SEQ ID NO: 3783042 - DNA, 25 bp, Homo sapien
gagtcccacgacagttcgtcccagt

SEQ ID NO: 3783043 - DNA, 25 bp, Homo sapien
ttgctgttcacacgatttgtcatct

SEQ ID NO: 3783044 - DNA, 25 bp, Homo sapien
acacctaaccttggtgcctgctcgg

SEQ ID NO: 3783045 - DNA, 25 bp, Homo sapien
tgcctagagccggttggggcacacc

SEQ ID NO: 3783046 - DNA, 25 bp, Homo sapien
gggcacacctaaccttggtgcctgc

SEQ ID NO: 3783047 - DNA, 25 bp, Homo sapien
tttgccattattggcattctgaagg

SEQ ID NO: 3783048 - DNA, 25 bp, Homo sapien
gttcagatcaacagcatttgcccac

SEQ ID NO: 3783049 - DNA, 25 bp, Homo sapien
tgcttcagacctatgagaccctctg

SEQ ID NO: 3783050 - DNA, 25 bp, Homo sapien
gacgaacacatcctccctggttctg

SEQ ID NO: 3783051 - DNA, 25 bp, Homo sapien
aatgtgacgtataattattgctccg

SEQ ID NO: 3783052 - DNA, 25 bp, Homo sapien
tgctccgactaggtttagattttac

SEQ ID NO: 3783053 - DNA, 25 bp, Homo sapien
ggacagaatggaaaatgtgacgtat

SEQ ID NO: 3783054 - DNA, 25 bp, Homo sapien
aattattgctccgactaggtttaga

SEQ ID NO: 3783055 - DNA, 25 bp, Homo sapien
ttgggggcaattctgccatcagccc

SEQ ID NO: 3783056 - DNA, 25 bp, Homo sapien
gcattgggggcaattctgccatcag

SEQ ID NO: 3783057 - DNA, 25 bp, Homo sapien
ctaaatctcctggccatccccgatc

SEQ ID NO: 3783058 - DNA, 25 bp, Homo sapien
actggggcctcaaaggggccaggtg

SEQ ID NO: 3783059 - DNA, 25 bp, Homo sapien
tgtggacaagggtaaaatttgtcat

SEQ ID NO: 3783060 - DNA, 25 bp, Homo sapien
gtggacaagggtaaaatttgtcatc

SEQ ID NO: 3783061 - DNA, 25 bp, Homo sapien
tggacaagggtaaaatttgtcatcc

SEQ ID NO: 3783062 - DNA, 25 bp, Homo sapien
ctgtggacaagggtaaaatttgtca

SEQ ID NO: 3783063 - DNA, 25 bp, Homo sapien
gttgcctccgcaggctcggccttta

SEQ ID NO: 3783064 - DNA, 25 bp, Homo sapien
gatccccttgcttttagatttgagc

SEQ ID NO: 3783065 - DNA, 25 bp, Homo sapien
gatttgagcagatggcccatggttt

SEQ ID NO: 3783066 - DNA, 25 bp, Homo sapien
gcccatggtttgaggcggttgcctc

SEQ ID NO: 3783067 - DNA, 25 bp, Homo sapien
tcccagaaccttcgccattccggga

SEQ ID NO: 3783068 - DNA, 25 bp, Homo sapien
agcgcacctggctccacgaggctcc

SEQ ID NO: 3783069 - DNA, 25 bp, Homo sapien
cattccgggactctcatgcccagaa

SEQ ID NO: 3783070 - DNA, 25 bp, Homo sapien
agcaccaaggccagcgcacctggct

SEQ ID NO: 3783071 - DNA, 25 bp, Homo sapien
ccagttcctctttgcacggggaagc

SEQ ID NO: 3783072 - DNA, 25 bp, Homo sapien
tctttgcacggggaagcagttagga

SEQ ID NO: 3783073 - DNA, 25 bp, Homo sapien
cagttaggaagagcatccctttcct

SEQ ID NO: 3783074 - DNA, 25 bp, Homo sapien
agcagttaggaagagcatccctttc

SEQ ID NO: 3783075 - DNA, 25 bp, Homo sapien
cctcctggattaatgcttggtgcca

SEQ ID NO: 3783076 - DNA, 25 bp, Homo sapien
actctgctcttgctcgatgacagcc

SEQ ID NO: 3783077 - DNA, 25 bp, Homo sapien
tgtcaccacgatccgcagttcttcg

SEQ ID NO: 3783078 - DNA, 25 bp, Homo sapien
ttttgaagccagaatcgactctgct

SEQ ID NO: 3783079 - DNA, 25 bp, Homo sapien
atcttattagaatgacagtagcttt

SEQ ID NO: 3783080 - DNA, 25 bp, Homo sapien
atgacagtagctttcaagtcattca

SEQ ID NO: 3783081 - DNA, 25 bp, Homo sapien
gcagcacaagtggcgacattcccat

SEQ ID NO: 3783082 - DNA, 25 bp, Homo sapien
gctagcagcacaagtggcgacattc

SEQ ID NO: 3783083 - DNA, 25 bp, Homo sapien
tagcagcacaagtggcgacattccc

SEQ ID NO: 3783084 - DNA, 25 bp, Homo sapien
cgctagcagcacaagtggcgacatt

SEQ ID NO: 3783085 - DNA, 25 bp, Homo sapien
tgttcacttctcgctgcgccgcggg

SEQ ID NO: 3783086 - DNA, 25 bp, Homo sapien
caggtgtcgccttttgaaaccgcca

SEQ ID NO: 3783087 - DNA, 25 bp, Homo sapien
tgaaaccgccattcaggcggccgct

SEQ ID NO: 3783088 - DNA, 25 bp, Homo sapien
cggccgcgcttgcaggtgtcgcctt

SEQ ID NO: 3783089 - DNA, 25 bp, Homo sapien
caaaggctcatctgccgggcttggg

SEQ ID NO: 3783090 - DNA, 25 bp, Homo sapien
tttatgcgcattcgcgtctcagcac

SEQ ID NO: 3783091 - DNA, 25 bp, Homo sapien
gcatggtccgcaaaagacaggtggc

SEQ ID NO: 3783092 - DNA, 25 bp, Homo sapien
tggcagtggcagtcttgcatgatac

SEQ ID NO: 3783093 - DNA, 25 bp, Homo sapien
acctcgcctcatcatttgatttccg

SEQ ID NO: 3783094 - DNA, 25 bp, Homo sapien
ggagagcgggtgtcccacctcgcct

SEQ ID NO: 3783095 - DNA, 25 bp, Homo sapien
ctttgccgtgggctgggcgtcggcc

SEQ ID NO: 3783096 - DNA, 25 bp, Homo sapien
tgatttccgccagcgtctgaggacg

SEQ ID NO: 3783097 - DNA, 25 bp, Homo sapien
tggctgcccagtcccgatttggttt

SEQ ID NO: 3783098 - DNA, 25 bp, Homo sapien
gtgtctgctatacaaacgccccggg

SEQ ID NO: 3783099 - DNA, 25 bp, Homo sapien
gagatcctagctgccgggacagaaa

SEQ ID NO: 3783100 - DNA, 25 bp, Homo sapien
caagactaacggcagcaggaggtca

SEQ ID NO: 3783101 - DNA, 25 bp, Homo sapien
gccaggatttaacttgaactttcca

SEQ ID NO: 3783102 - DNA, 25 bp, Homo sapien
ggcctgccaggatttaacttgaact

SEQ ID NO: 3783103 - DNA, 25 bp, Homo sapien
ctctccggggagacaaccgctgtgc

SEQ ID NO: 3783104 - DNA, 25 bp, Homo sapien
agacaaccgctgtgccggggaagaa

SEQ ID NO: 3783105 - DNA, 25 bp, Homo sapien
agggcctgagcccaggcgcatttag

SEQ ID NO: 3783106 - DNA, 25 bp, Homo sapien
agcccaggcgcatttagcagctgtt

SEQ ID NO: 3783107 - DNA, 25 bp, Homo sapien
ttctcactgacctctcccaacgcca

SEQ ID NO: 3783108 - DNA, 25 bp, Homo sapien
tgagcccaggcgcatttagcagctg

SEQ ID NO: 3783109 - DNA, 25 bp, Homo sapien
ctagctgagaccaatggccctgaag

SEQ ID NO: 3783110 - DNA, 25 bp, Homo sapien
ccaatggccctgaagtaattggctt

SEQ ID NO: 3783111 - DNA, 25 bp, Homo sapien
cttaggggagcagatgttttccttt

SEQ ID NO: 3783112 - DNA, 25 bp, Homo sapien
tcctttatggcctctagctgagacc

SEQ ID NO: 3783113 - DNA, 25 bp, Homo sapien
gacataggtcttggtggggcatcca

SEQ ID NO: 3783114 - DNA, 25 bp, Homo sapien
tccatgtgttcaccatgaggccact

SEQ ID NO: 3783115 - DNA, 25 bp, Homo sapien
catgtgttcaccatgaggccactcc

SEQ ID NO: 3783116 - DNA, 25 bp, Homo sapien
tggagcactgggcattctttgaaga

SEQ ID NO: 3783117 - DNA, 25 bp, Homo sapien
cctgggcatctctggccggcaaaca

SEQ ID NO: 3783118 - DNA, 25 bp, Homo sapien
gccctgggcatctctggccggcaaa

SEQ ID NO: 3783119 - DNA, 25 bp, Homo sapien
ccctgggcatctctggccggcaaac

SEQ ID NO: 3783120 - DNA, 25 bp, Homo sapien
aggaggcactgtgggttagttaaca

SEQ ID NO: 3783121 - DNA, 25 bp, Homo sapien
tgggttagttaacactctcataaaa

SEQ ID NO: 3783122 - DNA, 25 bp, Homo sapien
cactgtgggttagttaacactctca

SEQ ID NO: 3783123 - DNA, 25 bp, Homo sapien
ctccttcccatgaaggaggcactgt

SEQ ID NO: 3783124 - DNA, 25 bp, Homo sapien
gaaacgattcccacgacgggatgtg

SEQ ID NO: 3783125 - DNA, 25 bp, Homo sapien
gctttacaggccgtggaagccacag

SEQ ID NO: 3783126 - DNA, 25 bp, Homo sapien
agagagacagggctgccagaaagca

SEQ ID NO: 3783127 - DNA, 25 bp, Homo sapien
ggtctggccaacaggtgttcggatt

SEQ ID NO: 3783128 - DNA, 25 bp, Homo sapien
cttctgggtcctgggctgcagctgc

SEQ ID NO: 3783129 - DNA, 25 bp, Homo sapien
tatttcaaacttgttctttttgtgc

SEQ ID NO: 3783130 - DNA, 25 bp, Homo sapien
acttgttctttttgtgcttctgggt

SEQ ID NO: 3783131 - DNA, 25 bp, Homo sapien
gcttctgggtcctgggctgcagctg

SEQ ID NO: 3783132 - DNA, 25 bp, Homo sapien
taaaacaagcaaagagagaggccct

SEQ ID NO: 3783133 - DNA, 25 bp, Homo sapien
aacaagcaaagagagaggcccttac

SEQ ID NO: 3783134 - DNA, 25 bp, Homo sapien
ctaaaacaagcaaagagagaggccc

SEQ ID NO: 3783135 - DNA, 25 bp, Homo sapien
aaaacaagcaaagagagaggccctt

SEQ ID NO: 3783136 - DNA, 25 bp, Homo sapien
ttcaatgatacacttggacttgagg

SEQ ID NO: 3783137 - DNA, 25 bp, Homo sapien
tgggaactgtaaagcatgacatgtg

SEQ ID NO: 3783138 - DNA, 25 bp, Homo sapien
tgtctttacacaatatgggaactgt

SEQ ID NO: 3783139 - DNA, 25 bp, Homo sapien
ggtttgcctgtctttaatgtaccat

SEQ ID NO: 3783140 - DNA, 25 bp, Homo sapien
catcctggcctattgttttcccttg

SEQ ID NO: 3783141 - DNA, 25 bp, Homo sapien
ttgaaaagtccaaggctactctagt

SEQ ID NO: 3783142 - DNA, 25 bp, Homo sapien
taccaggatttaacaaatcaaccat

SEQ ID NO: 3783143 - DNA, 25 bp, Homo sapien
gatccgtacgattaagcagatgtta

SEQ ID NO: 3783144 - DNA, 25 bp, Homo sapien
tgcggggtggcatgatgaatgattt

SEQ ID NO: 3783145 - DNA, 25 bp, Homo sapien
acaggtgcggggtggcatgatgaat

SEQ ID NO: 3783146 - DNA, 25 bp, Homo sapien
aataggtctggagggttttcaatgc

SEQ ID NO: 3783147 - DNA, 25 bp, Homo sapien
ttcaatgccaagaccacaggtgcgg

SEQ ID NO: 3783148 - DNA, 25 bp, Homo sapien
ttctcttggacttttaagcagatag

SEQ ID NO: 3783149 - DNA, 25 bp, Homo sapien
tttttgccaagctcaagggctcttc

SEQ ID NO: 3783150 - DNA, 25 bp, Homo sapien
gcgtttgtgcgcaagtgactctcct

SEQ ID NO: 3783151 - DNA, 25 bp, Homo sapien
taatgaagcgcctctaaggcggagg

SEQ ID NO: 3783152 - DNA, 25 bp, Homo sapien
aaacaacctgttgcgctgacatcgc

SEQ ID NO: 3783153 - DNA, 25 bp, Homo sapien
ctgacatcgctttggagaggcgccg

SEQ ID NO: 3783154 - DNA, 25 bp, Homo sapien
actgatccccgcaacttaaggccaa

SEQ ID NO: 3783155 - DNA, 25 bp, Homo sapien
tctgctatctttgcgcatggaagtc

SEQ ID NO: 3783156 - DNA, 25 bp, Homo sapien
gtcaaagtttagcagacaagaggag

SEQ ID NO: 3783157 - DNA, 25 bp, Homo sapien
gcaggtgtagaagtgcctaataacc

SEQ ID NO: 3783158 - DNA, 25 bp, Homo sapien
caagagttcttcttgcgtgcagcgc

SEQ ID NO: 3783159 - DNA, 25 bp, Homo sapien
ggagatggtagctgggccacccctc

SEQ ID NO: 3783160 - DNA, 25 bp, Homo sapien
ttgattggttggtggaaatggctgg

SEQ ID NO: 3783161 - DNA, 25 bp, Homo sapien
ttggttggtggaaatggctggcagc

SEQ ID NO: 3783162 - DNA, 25 bp, Homo sapien
ggttgattggttggtggaaatggct

SEQ ID NO: 3783163 - DNA, 25 bp, Homo sapien
gattggttggtggaaatggctggca

SEQ ID NO: 3783164 - DNA, 25 bp, Homo sapien
ctgactccgattaaccctctctggt

SEQ ID NO: 3783165 - DNA, 25 bp, Homo sapien
attaaccctctctggtgaaactctg

SEQ ID NO: 3783166 - DNA, 25 bp, Homo sapien
tccgattaaccctctctggtgaaac

SEQ ID NO: 3783167 - DNA, 25 bp, Homo sapien
aagccaattcatttctaaaggagaa

SEQ ID NO: 3783168 - DNA, 25 bp, Homo sapien
taagatgcggctaggtgccctgtgc

SEQ ID NO: 3783169 - DNA, 25 bp, Homo sapien
tccagagcctacgattcagatacag

SEQ ID NO: 3783170 - DNA, 25 bp, Homo sapien
taaacggtgtctggcattccagcag

SEQ ID NO: 3783171 - DNA, 25 bp, Homo sapien
tcagatacaggctcttaacaaggcc

SEQ ID NO: 3783172 - DNA, 25 bp, Homo sapien
tccttaaaggcgtggaaaggagcgc

SEQ ID NO: 3783173 - DNA, 25 bp, Homo sapien
tgggttaatcaacagtctctgcggg

SEQ ID NO: 3783174 - DNA, 25 bp, Homo sapien
tgaggtctattcgagcgcagtgctg

SEQ ID NO: 3783175 - DNA, 25 bp, Homo sapien
gcacaaggcgcgcattgaggtctat

SEQ ID NO: 3783176 - DNA, 25 bp, Homo sapien
tagagatcattggtgaaacggcacc

SEQ ID NO: 3783177 - DNA, 25 bp, Homo sapien
tcagcccttctggagagtaataaac

SEQ ID NO: 3783178 - DNA, 25 bp, Homo sapien
ttggaaagctaatcagtacaccggc

SEQ ID NO: 3783179 - DNA, 25 bp, Homo sapien
tagatgggtgatttcagttcagccc

SEQ ID NO: 3783180 - DNA, 25 bp, Homo sapien
aatgaaggcccaactctattcccca

SEQ ID NO: 3783181 - DNA, 25 bp, Homo sapien
tagaacataacaaattatgcaatgt

SEQ ID NO: 3783182 - DNA, 25 bp, Homo sapien
tgcaatgttcacagatgcgcttcac

SEQ ID NO: 3783183 - DNA, 25 bp, Homo sapien
tctttatgaaagaccgggctgccaa

SEQ ID NO: 3783184 - DNA, 25 bp, Homo sapien
gaacacagaagctcagcgagaccag

SEQ ID NO: 3783185 - DNA, 25 bp, Homo sapien
agcagacagccagcataagtccatc

SEQ ID NO: 3783186 - DNA, 25 bp, Homo sapien
taagtccatcaatgaccagctgaac

SEQ ID NO: 3783187 - DNA, 25 bp, Homo sapien
tcaatgaccagctgaacacagaagc

SEQ ID NO: 3783188 - DNA, 25 bp, Homo sapien
cagagggaagaacattacatgtcaa

SEQ ID NO: 3783189 - DNA, 25 bp, Homo sapien
gagggaagaacattacatgtcaaag

SEQ ID NO: 3783190 - DNA, 25 bp, Homo sapien
ttcagagggaagaacattacatgtc

SEQ ID NO: 3783191 - DNA, 25 bp, Homo sapien
tcttcagagggaagaacattacatg

SEQ ID NO: 3783192 - DNA, 25 bp, Homo sapien
tgatcactgactacatccacatgct

SEQ ID NO: 3783193 - DNA, 25 bp, Homo sapien
agggctgcctgatcactgactacat

SEQ ID NO: 3783194 - DNA, 25 bp, Homo sapien
ctacatccacatgcttaccgtctat

SEQ ID NO: 3783195 - DNA, 25 bp, Homo sapien
gtgaaagttgaagggctgcctgatc

SEQ ID NO: 3783196 - DNA, 25 bp, Homo sapien
aagaggatatagctgtcatggtcgt

SEQ ID NO: 3783197 - DNA, 25 bp, Homo sapien
tcatggtcgttctagactgcactaa

SEQ ID NO: 3783198 - DNA, 25 bp, Homo sapien
acaatgacttgaagaggatatagct

SEQ ID NO: 3783199 - DNA, 25 bp, Homo sapien
tctagactgcactaataagggtttt

SEQ ID NO: 3783200 - DNA, 25 bp, Homo sapien
aattgaaggatgtgtcagcaagcac

SEQ ID NO: 3783201 - DNA, 25 bp, Homo sapien
gtgtgtgccttgtaaacatctcatt

SEQ ID NO: 3783202 - DNA, 25 bp, Homo sapien
gcaagcactgcaaactgacgaaaca

SEQ ID NO: 3783203 - DNA, 25 bp, Homo sapien
caaactgacgaaacagtgtgtgcct

SEQ ID NO: 3783204 - DNA, 25 bp, Homo sapien
aggacacaggtgtttactttgttga

SEQ ID NO: 3783205 - DNA, 25 bp, Homo sapien
tactttgttgaagtaaggagcagtg

SEQ ID NO: 3783206 - DNA, 25 bp, Homo sapien
tggtgaggacacaggtgtttacttt

SEQ ID NO: 3783207 - DNA, 25 bp, Homo sapien
ttgaagtaaggagcagtgtagagtt

SEQ ID NO: 3783208 - DNA, 25 bp, Homo sapien
gcttctatttgagactccaaaccat

SEQ ID NO: 3783209 - DNA, 25 bp, Homo sapien
ttctatttgagactccaaaccatgt

SEQ ID NO: 3783210 - DNA, 25 bp, Homo sapien
aatgcttctatttgagactccaaac

SEQ ID NO: 3783211 - DNA, 25 bp, Homo sapien
ttaatgcttctatttgagactccaa

SEQ ID NO: 3783212 - DNA, 25 bp, Homo sapien
ccatctcttcgtcataggcagcagc

SEQ ID NO: 3783213 - DNA, 25 bp, Homo sapien
catctcttcgtcataggcagcagct

SEQ ID NO: 3783214 - DNA, 25 bp, Homo sapien
gctaccagggttactcctaccatgg

SEQ ID NO: 3783215 - DNA, 25 bp, Homo sapien
tcataggctccctcctgctgttggg

SEQ ID NO: 3783216 - DNA, 25 bp, Homo sapien
tccagactttgacgactagcaccac

SEQ ID NO: 3783217 - DNA, 25 bp, Homo sapien
tgttgggctacatcagcaaagtggg

SEQ ID NO: 3783218 - DNA, 25 bp, Homo sapien
gtacctggctttaagattctgagca

SEQ ID NO: 3783219 - DNA, 25 bp, Homo sapien
gagaagagtcacagtggaactgtac

SEQ ID NO: 3783220 - DNA, 25 bp, Homo sapien
cagtggaactgtacctggctttaag

SEQ ID NO: 3783221 - DNA, 25 bp, Homo sapien
acctggctttaagattctgagcaga

SEQ ID NO: 3783222 - DNA, 25 bp, Homo sapien
atagacttattcccagggtttgagg

SEQ ID NO: 3783223 - DNA, 25 bp, Homo sapien
atctggagagactaggattggagaa

SEQ ID NO: 3783224 - DNA, 25 bp, Homo sapien
aagttgggatctggagagactagga

SEQ ID NO: 3783225 - DNA, 25 bp, Homo sapien
agagactaggattggagaaactgac

SEQ ID NO: 3783226 - DNA, 25 bp, Homo sapien
agcgatgtaatacaccaggcagcag

SEQ ID NO: 3783227 - DNA, 25 bp, Homo sapien
gtggtcaacagtccactgccagcat

SEQ ID NO: 3783228 - DNA, 25 bp, Homo sapien
gccacctccggcttgactctggtga

SEQ ID NO: 3783229 - DNA, 25 bp, Homo sapien
tccaaagacagtggtcaacagtcca

SEQ ID NO: 3783230 - DNA, 25 bp, Homo sapien
ttctagaacgtagtcactggtcatt

SEQ ID NO: 3783231 - DNA, 25 bp, Homo sapien
cactggtcatttctatgcaaaattt

SEQ ID NO: 3783232 - DNA, 25 bp, Homo sapien
tcccttgggaaattatactgatttc

SEQ ID NO: 3783233 - DNA, 25 bp, Homo sapien
agtcactggtcatttctatgcaaaa

SEQ ID NO: 3783234 - DNA, 25 bp, Homo sapien
tctttatgtagaccaaggctgccac

SEQ ID NO: 3783235 - DNA, 25 bp, Homo sapien
ctctttatgtagaccaaggctgcca

SEQ ID NO: 3783236 - DNA, 25 bp, Homo sapien
cctagctcctgcagaaacagttgtg

SEQ ID NO: 3783237 - DNA, 25 bp, Homo sapien
ctcctgcagaaacagttgtgatgat

SEQ ID NO: 3783238 - DNA, 25 bp, Homo sapien
tagctcctgcagaaacagttgtgat

SEQ ID NO: 3783239 - DNA, 25 bp, Homo sapien
gctcctgcagaaacagttgtgatga

SEQ ID NO: 3783240 - DNA, 25 bp, Homo sapien
cctgcatgagcaaatggactggcta

SEQ ID NO: 3783241 - DNA, 25 bp, Homo sapien
catccagttgtaggttgaggaatcc

SEQ ID NO: 3783242 - DNA, 25 bp, Homo sapien
cagcagcatagagttcatgcatgtc

SEQ ID NO: 3783243 - DNA, 25 bp, Homo sapien
catgcatgtctctgagagtgtgatt

SEQ ID NO: 3783244 - DNA, 25 bp, Homo sapien
atgtggcctcaaagctgtggtgctg

SEQ ID NO: 3783245 - DNA, 25 bp, Homo sapien
catggtcgcagaatgtggcctcaaa

SEQ ID NO: 3783246 - DNA, 25 bp, Homo sapien
gccccagcagatgatacactcatgg

SEQ ID NO: 3783247 - DNA, 25 bp, Homo sapien
tctttggcattttagctttctgggc

SEQ ID NO: 3783248 - DNA, 25 bp, Homo sapien
tttacacttaagctgccatactttt

SEQ ID NO: 3783249 - DNA, 25 bp, Homo sapien
ttacacttaagctgccatacttttt

SEQ ID NO: 3783250 - DNA, 25 bp, Homo sapien
ctttacacttaagctgccatacttt

SEQ ID NO: 3783251 - DNA, 25 bp, Homo sapien
acacagtcacattaggccacgcttg

SEQ ID NO: 3783252 - DNA, 25 bp, Homo sapien
accacatggacagcagaacttgctc

SEQ ID NO: 3783253 - DNA, 25 bp, Homo sapien
tcacattaggccacgcttgtgtcat

SEQ ID NO: 3783254 - DNA, 25 bp, Homo sapien
ttccatggcatacagggacacagtc

SEQ ID NO: 3783255 - DNA, 25 bp, Homo sapien
ttcataatgaagctcttctcttaat

SEQ ID NO: 3783256 - DNA, 25 bp, Homo sapien
cataatgaagctcttctcttaatct

SEQ ID NO: 3783257 - DNA, 25 bp, Homo sapien
tttcataatgaagctcttctcttaa

SEQ ID NO: 3783258 - DNA, 25 bp, Homo sapien
tcataatgaagctcttctcttaatc

SEQ ID NO: 3783259 - DNA, 25 bp, Homo sapien
gaatataatcttctgccaccgtcct

SEQ ID NO: 3783260 - DNA, 25 bp, Homo sapien
tacaaggtgcttttgcgtggtactt

SEQ ID NO: 3783261 - DNA, 25 bp, Homo sapien
tgatcccgtagagtccaggctgggc

SEQ ID NO: 3783262 - DNA, 25 bp, Homo sapien
tccaacgcactcagaaggtaattca

SEQ ID NO: 3783263 - DNA, 25 bp, Homo sapien
ttctctgcatcctgacgctatcaca

SEQ ID NO: 3783264 - DNA, 25 bp, Homo sapien
tgacgctatcacacctgtactgtgc

SEQ ID NO: 3783265 - DNA, 25 bp, Homo sapien
tgtgctctctgactccgggtctgcc

SEQ ID NO: 3783266 - DNA, 25 bp, Homo sapien
gtactgtgctctctgactccgggtc

SEQ ID NO: 3783267 - DNA, 25 bp, Homo sapien
tttgaatagttttgtgatccttttc

SEQ ID NO: 3783268 - DNA, 25 bp, Homo sapien
gacacaaggcctagcaggactgtga

SEQ ID NO: 3783269 - DNA, 25 bp, Homo sapien
ggcatagtggacacaaggcctagca

SEQ ID NO: 3783270 - DNA, 25 bp, Homo sapien
tagtggacacaaggcctagcaggac

SEQ ID NO: 3783271 - DNA, 25 bp, Homo sapien
gcaggcatagtggacacaaggccta

SEQ ID NO: 3783272 - DNA, 25 bp, Homo sapien
cagatagggattaagaagtaagttc

SEQ ID NO: 3783273 - DNA, 25 bp, Homo sapien
taagttcaagatccaagtgtggctg

SEQ ID NO: 3783274 - DNA, 25 bp, Homo sapien
tgcccttgacattcgcagccttctt

SEQ ID NO: 3783275 - DNA, 25 bp, Homo sapien
tcttcctgctgttcagatggccggt

SEQ ID NO: 3783276 - DNA, 25 bp, Homo sapien
ctctgaaatgatctgaagcagcctc

SEQ ID NO: 3783277 - DNA, 25 bp, Homo sapien
ctaggtttgattttggagagctggt

SEQ ID NO: 3783278 - DNA, 25 bp, Homo sapien
cttttctaggtttgattttggagag

SEQ ID NO: 3783279 - DNA, 25 bp, Homo sapien
ggtttgattttggagagctggtttc

SEQ ID NO: 3783280 - DNA, 25 bp, Homo sapien
tgttttgacagtactcgcatcttgc

SEQ ID NO: 3783281 - DNA, 25 bp, Homo sapien
tctttatattggtctagttcttctt

SEQ ID NO: 3783282 - DNA, 25 bp, Homo sapien
cagtactcgcatcttgcaaagaaac

SEQ ID NO: 3783283 - DNA, 25 bp, Homo sapien
tatttgttttgacagtactcgcatc

SEQ ID NO: 3783284 - DNA, 25 bp, Homo sapien
ttggtcaatgggcagccataggtgg

SEQ ID NO: 3783285 - DNA, 25 bp, Homo sapien
gaggaagctcatgctgattggtcaa

SEQ ID NO: 3783286 - DNA, 25 bp, Homo sapien
gagaagaccccacagcgaataactc

SEQ ID NO: 3783287 - DNA, 25 bp, Homo sapien
aggtcatcctgatatctgttcagct

SEQ ID NO: 3783288 - DNA, 25 bp, Homo sapien
tatcagcaagtcactaagggcagcc

SEQ ID NO: 3783289 - DNA, 25 bp, Homo sapien
tgggtcataacagcgcctgggcttg

SEQ ID NO: 3783290 - DNA, 25 bp, Homo sapien
cacagtttggcacagagtcacagag

SEQ ID NO: 3783291 - DNA, 25 bp, Homo sapien
gatggcctatctctcctctgtaaga

SEQ ID NO: 3783292 - DNA, 25 bp, Homo sapien
tacattcctttgataacagctatgg

SEQ ID NO: 3783293 - DNA, 25 bp, Homo sapien
gataacagctatggcatcagctaac

SEQ ID NO: 3783294 - DNA, 25 bp, Homo sapien
ctggtacattcctttgataacagct

SEQ ID NO: 3783295 - DNA, 25 bp, Homo sapien
cctttgataacagctatggcatcag

SEQ ID NO: 3783296 - DNA, 25 bp, Homo sapien
gattgaaggattttctcatcttatc

SEQ ID NO: 3783297 - DNA, 25 bp, Homo sapien
tgaaggattttctcatcttatcctc

SEQ ID NO: 3783298 - DNA, 25 bp, Homo sapien
gaaggattttctcatcttatcctca

SEQ ID NO: 3783299 - DNA, 25 bp, Homo sapien
ctgattgaaggattttctcatctta

SEQ ID NO: 3783300 - DNA, 25 bp, Homo sapien
tggtgaagagactcaaagattcctc

SEQ ID NO: 3783301 - DNA, 25 bp, Homo sapien
gattcctctttcagtcggtcctcaa

SEQ ID NO: 3783302 - DNA, 25 bp, Homo sapien
taggatcctgtcatgcagaatggtg

SEQ ID NO: 3783303 - DNA, 25 bp, Homo sapien
actgaagcaattgtttgaggaaccc

SEQ ID NO: 3783304 - DNA, 25 bp, Homo sapien
cagcagtgatagaggggcaaggatg

SEQ ID NO: 3783305 - DNA, 25 bp, Homo sapien
ggcaaggatgttcctatctggtggg

SEQ ID NO: 3783306 - DNA, 25 bp, Homo sapien
tggctgtatctccacaagcaacaag

SEQ ID NO: 3783307 - DNA, 25 bp, Homo sapien
gcagcagtgatagaggggcaaggat

SEQ ID NO: 3783308 - DNA, 25 bp, Homo sapien
gaatcagtttgagtggcatggtctg

SEQ ID NO: 3783309 - DNA, 25 bp, Homo sapien
acttttgcgtagatgaactcaattc

SEQ ID NO: 3783310 - DNA, 25 bp, Homo sapien
ctgtgctaacttttgcgtagatgaa

SEQ ID NO: 3783311 - DNA, 25 bp, Homo sapien
cactggaatcagtttgagtggcatg

SEQ ID NO: 3783312 - DNA, 25 bp, Homo sapien
ctttcagcaagtttcgcagccactg

SEQ ID NO: 3783313 - DNA, 25 bp, Homo sapien
agcaagtttcgcagccactgggcaa

SEQ ID NO: 3783314 - DNA, 25 bp, Homo sapien
agttgtcacaccctctggcaagttt

SEQ ID NO: 3783315 - DNA, 25 bp, Homo sapien
gaccagcagttgtcacaccctctgg

SEQ ID NO: 3783316 - DNA, 25 bp, Homo sapien
gaattgttcaatagaggcctcgagg

SEQ ID NO: 3783317 - DNA, 25 bp, Homo sapien
gaactggaattgttcaatagaggcc

SEQ ID NO: 3783318 - DNA, 25 bp, Homo sapien
tagaggcctcgaggccctccatgat

SEQ ID NO: 3783319 - DNA, 25 bp, Homo sapien
ctcctctgtctcaggcgagtcgccc

SEQ ID NO: 3783320 - DNA, 25 bp, Homo sapien
tggcctcccagcgtgtgccaaaggt

SEQ ID NO: 3783321 - DNA, 25 bp, Homo sapien
ggaaaagcagtgaacccatctaata

SEQ ID NO: 3783322 - DNA, 25 bp, Homo sapien
gaattcccgagcttctcgcttccta

SEQ ID NO: 3783323 - DNA, 25 bp, Homo sapien
ccatctaataactatgctcatgaca

SEQ ID NO: 3783324 - DNA, 25 bp, Homo sapien
agcaggctgcctaataagctgtctc

SEQ ID NO: 3783325 - DNA, 25 bp, Homo sapien
gccacaaacgtaggcgttcctggac

SEQ ID NO: 3783326 - DNA, 25 bp, Homo sapien
acctgccacaaacgtaggcgttcct

SEQ ID NO: 3783327 - DNA, 25 bp, Homo sapien
gcaggctgcctaataagctgtctcc

SEQ ID NO: 3783328 - DNA, 25 bp, Homo sapien
ttctcaagtccactaggcaggctga

SEQ ID NO: 3783329 - DNA, 25 bp, Homo sapien
ccagattcccagaagaaagcattgg

SEQ ID NO: 3783330 - DNA, 25 bp, Homo sapien
aaagcattggattggcccagttgca

SEQ ID NO: 3783331 - DNA, 25 bp, Homo sapien
ccacatgtatcaggcagagattaac

SEQ ID NO: 3783332 - DNA, 25 bp, Homo sapien
acatatgcatgaatacccagtcatc

SEQ ID NO: 3783333 - DNA, 25 bp, Homo sapien
atgcatgaatacccagtcatcacgc

SEQ ID NO: 3783334 - DNA, 25 bp, Homo sapien
acacatatgcatgaatacccagtca

SEQ ID NO: 3783335 - DNA, 25 bp, Homo sapien
ctcacacatatgcatgaatacccag

SEQ ID NO: 3783336 - DNA, 25 bp, Homo sapien
aaaagacgcggcggttccacgagtg

SEQ ID NO: 3783337 - DNA, 25 bp, Homo sapien
tagcttcggagacaggtaagacccc

SEQ ID NO: 3783338 - DNA, 25 bp, Homo sapien
aggtcgaggcgggaaacagcttgag

SEQ ID NO: 3783339 - DNA, 25 bp, Homo sapien
gagtggtggctaggacccataatcc

SEQ ID NO: 3783340 - DNA, 25 bp, Homo sapien
gaggcctgaggtaaacaaccgcggc

SEQ ID NO: 3783341 - DNA, 25 bp, Homo sapien
tgacgcggccgcgaggcctgaggta

SEQ ID NO: 3783342 - DNA, 25 bp, Homo sapien
cggccgcgaggcctgaggtaaacaa

SEQ ID NO: 3783343 - DNA, 25 bp, Homo sapien
ccgcgaggcctgaggtaaacaaccg

SEQ ID NO: 3783344 - DNA, 25 bp, Homo sapien
agcccgagaccggtgagtgccagcc

SEQ ID NO: 3783345 - DNA, 25 bp, Homo sapien
cgagcaccgggaagccgccgctgtc

SEQ ID NO: 3783346 - DNA, 25 bp, Homo sapien
tacccccttcaaggtctcgctgcag

SEQ ID NO: 3783347 - DNA, 25 bp, Homo sapien
cgccgccaagatgcccgccttctcc

SEQ ID NO: 3783348 - DNA, 25 bp, Homo sapien
caggacaagtatctgcggcagagga

SEQ ID NO: 3783349 - DNA, 25 bp, Homo sapien
tcggaacttccgactgagcgagcac

SEQ ID NO: 3783350 - DNA, 25 bp, Homo sapien
gcaactgcctctaccgagctgtcag

SEQ ID NO: 3783351 - DNA, 25 bp, Homo sapien
gagacgagaagctggccctatacct

SEQ ID NO: 3783352 - DNA, 25 bp, Homo sapien
tctatgacgtgttccattttgacaa

SEQ ID NO: 3783353 - DNA, 25 bp, Homo sapien
taatttgcaagctgatttctcacag

SEQ ID NO: 3783354 - DNA, 25 bp, Homo sapien
aactggtgtaccttcatctatgacg

SEQ ID NO: 3783355 - DNA, 25 bp, Homo sapien
tgatgtttcatgatagctttgggtg

SEQ ID NO: 3783356 - DNA, 25 bp, Homo sapien
tcttttaagggatagtagcaggtct

SEQ ID NO: 3783357 - DNA, 25 bp, Homo sapien
taggattgccctgtattgatgtaga

SEQ ID NO: 3783358 - DNA, 25 bp, Homo sapien
tctgtgacaagataagcctcctgct

SEQ ID NO: 3783359 - DNA, 25 bp, Homo sapien
ccttggcagttatagcaggagaaca

SEQ ID NO: 3783360 - DNA, 25 bp, Homo sapien
ttctccaaaatgacttgctctgttt

SEQ ID NO: 3783361 - DNA, 25 bp, Homo sapien
atcccacatccagtctctagcaatt

SEQ ID NO: 3783362 - DNA, 25 bp, Homo sapien
cactaatctgctgtgatcttgaagg

SEQ ID NO: 3783363 - DNA, 25 bp, Homo sapien
caattcctagtgtgactgttttctc

SEQ ID NO: 3783364 - DNA, 25 bp, Homo sapien
ttggtggtgccccacacaacattcc

SEQ ID NO: 3783365 - DNA, 25 bp, Homo sapien
ttctgtggttggtggtgccccacac

SEQ ID NO: 3783366 - DNA, 25 bp, Homo sapien
ggttggtggtgccccacacaacatt

SEQ ID NO: 3783367 - DNA, 25 bp, Homo sapien
tgtggttggtggtgccccacacaac

SEQ ID NO: 3783368 - DNA, 25 bp, Homo sapien
tgaatttggcagttcagagtcagat

SEQ ID NO: 3783369 - DNA, 25 bp, Homo sapien
gtgcaccatgaccaagatttatctg

SEQ ID NO: 3783370 - DNA, 25 bp, Homo sapien
ttaggagggcatttcccgtggacat

SEQ ID NO: 3783371 - DNA, 25 bp, Homo sapien
cagaaaagtggaggcgattgaaact

SEQ ID NO: 3783372 - DNA, 25 bp, Homo sapien
tcttacatacccgttacaaaagcaa

SEQ ID NO: 3783373 - DNA, 25 bp, Homo sapien
tagattggatctagtgaccccgaag

SEQ ID NO: 3783374 - DNA, 25 bp, Homo sapien
cagagaccttttctactcagtaaca

SEQ ID NO: 3783375 - DNA, 25 bp, Homo sapien
accccgaagccactgtgacagttga

SEQ ID NO: 3783376 - DNA, 25 bp, Homo sapien
attctagttatacatttgtctaaaa

SEQ ID NO: 3783377 - DNA, 25 bp, Homo sapien
ttctagttatacatttgtctaaaat

SEQ ID NO: 3783378 - DNA, 25 bp, Homo sapien
tattctagttatacatttgtctaaa

SEQ ID NO: 3783379 - DNA, 25 bp, Homo sapien
tgtctttggtttgaatttcctcctg

SEQ ID NO: 3783380 - DNA, 25 bp, Homo sapien
tgatttctgctgatagccaggccta

SEQ ID NO: 3783381 - DNA, 25 bp, Homo sapien
ttactgatttctgctgatagccagg

SEQ ID NO: 3783382 - DNA, 25 bp, Homo sapien
gatttctgctgatagccaggcctac

SEQ ID NO: 3783383 - DNA, 25 bp, Homo sapien
actgatttctgctgatagccaggcc

SEQ ID NO: 3783384 - DNA, 25 bp, Homo sapien
tgtgctaactcctgatttgacttgc

SEQ ID NO: 3783385 - DNA, 25 bp, Homo sapien
cactccgggattctagaattatact

SEQ ID NO: 3783386 - DNA, 25 bp, Homo sapien
caccaaagtgtttccggtcatctag

SEQ ID NO: 3783387 - DNA, 25 bp, Homo sapien
tggaatatctctccttgtgctaact

SEQ ID NO: 3783388 - DNA, 25 bp, Homo sapien
gacactgtctatcatagagccacat

SEQ ID NO: 3783389 - DNA, 25 bp, Homo sapien
caagacactgtctatcatagagcca

SEQ ID NO: 3783390 - DNA, 25 bp, Homo sapien
gtctacagagagattgagctctggc

SEQ ID NO: 3783391 - DNA, 25 bp, Homo sapien
tagtctacagagagattgagctctg

SEQ ID NO: 3783392 - DNA, 25 bp, Homo sapien
ccctacttggtaggattgcaaaact

SEQ ID NO: 3783393 - DNA, 25 bp, Homo sapien
caaaactatcttatgaacccagcag

SEQ ID NO: 3783394 - DNA, 25 bp, Homo sapien
aaagtcgagaggattgaagcgtgcc

SEQ ID NO: 3783395 - DNA, 25 bp, Homo sapien
tcttgatgatcctgcttgttggaac

SEQ ID NO: 3783396 - DNA, 25 bp, Homo sapien
gagatattctctggtgtcaaactca

SEQ ID NO: 3783397 - DNA, 25 bp, Homo sapien
tgagtcgttttgaactcagctctag

SEQ ID NO: 3783398 - DNA, 25 bp, Homo sapien
ctagtgagaagtctgagatattctc

SEQ ID NO: 3783399 - DNA, 25 bp, Homo sapien
tgaactcagctctagtgagaagtct

SEQ ID NO: 3783400 - DNA, 25 bp, Homo sapien
tgcttttcaatgttcatggtgcaaa

SEQ ID NO: 3783401 - DNA, 25 bp, Homo sapien
tgttcatggtgcaaaccatcctgtt

SEQ ID NO: 3783402 - DNA, 25 bp, Homo sapien
tctttctgggaattgttcatttcca

SEQ ID NO: 3783403 - DNA, 25 bp, Homo sapien
tccatgggctctgcatgcttttcaa

SEQ ID NO: 3783404 - DNA, 25 bp, Homo sapien
cagagaattctagcctgctgacgct

SEQ ID NO: 3783405 - DNA, 25 bp, Homo sapien
gctgacgcttacttagtatctgtgg

SEQ ID NO: 3783406 - DNA, 25 bp, Homo sapien
cgcttacttagtatctgtggctgaa

SEQ ID NO: 3783407 - DNA, 25 bp, Homo sapien
tctagcctgctgacgcttacttagt

SEQ ID NO: 3783408 - DNA, 25 bp, Homo sapien
tgccccaagatatggactgtggagc

SEQ ID NO: 3783409 - DNA, 25 bp, Homo sapien
gaaggctctgaaacatgctcagtct

SEQ ID NO: 3783410 - DNA, 25 bp, Homo sapien
ggcacccaccgtgccccaagatatg

SEQ ID NO: 3783411 - DNA, 25 bp, Homo sapien
caagatatggactgtggagcgttca

SEQ ID NO: 3783412 - DNA, 25 bp, Homo sapien
gaatgcctgaatcttaagctgacta

SEQ ID NO: 3783413 - DNA, 25 bp, Homo sapien
tgacattgaaccaagcttgtgtgcc

SEQ ID NO: 3783414 - DNA, 25 bp, Homo sapien
gggctcagtgatatgctcaatgtcc

SEQ ID NO: 3783415 - DNA, 25 bp, Homo sapien
tgcataaatagactctagggtccca

SEQ ID NO: 3783416 - DNA, 25 bp, Homo sapien
gcaggtctccctttatccccatagg

SEQ ID NO: 3783417 - DNA, 25 bp, Homo sapien
ttattctagtcaaacacagagccag

SEQ ID NO: 3783418 - DNA, 25 bp, Homo sapien
catgtggtaggtggagattgctctc

SEQ ID NO: 3783419 - DNA, 25 bp, Homo sapien
gcacccagatcctgacggcatgtgg

SEQ ID NO: 3783420 - DNA, 25 bp, Homo sapien
actgcccattgggagagctctacac

SEQ ID NO: 3783421 - DNA, 25 bp, Homo sapien
caagtctcgaatgatgggggacgtc

SEQ ID NO: 3783422 - DNA, 25 bp, Homo sapien
gacgtcaaattgtgggtgactgccc

SEQ ID NO: 3783423 - DNA, 25 bp, Homo sapien
tacacgtccagagcaagtgtttgct

SEQ ID NO: 3783424 - DNA, 25 bp, Homo sapien
aacctcagaacgattatgatagtgt

SEQ ID NO: 3783425 - DNA, 25 bp, Homo sapien
taacctcagaacgattatgatagtg

SEQ ID NO: 3783426 - DNA, 25 bp, Homo sapien
cctcagaacgattatgatagtgttc

SEQ ID NO: 3783427 - DNA, 25 bp, Homo sapien
gttaacctcagaacgattatgatag

SEQ ID NO: 3783428 - DNA, 25 bp, Homo sapien
gaagaatttacgtaggtcatcacca

SEQ ID NO: 3783429 - DNA, 25 bp, Homo sapien
cactatgtatatgaagcagcctctg

SEQ ID NO: 3783430 - DNA, 25 bp, Homo sapien
ggagccccaaggatactaaaagtga

SEQ ID NO: 3783431 - DNA, 25 bp, Homo sapien
tatatttgtccgaagtagcctccat

SEQ ID NO: 3783432 - DNA, 25 bp, Homo sapien
accagtcatgtgttcctggacctta

SEQ ID NO: 3783433 - DNA, 25 bp, Homo sapien
ccttagatttaggagtgagtgtcgc

SEQ ID NO: 3783434 - DNA, 25 bp, Homo sapien
atttaggagtgagtgtcgctgagca

SEQ ID NO: 3783435 - DNA, 25 bp, Homo sapien
tgtgttcctggaccttagatttagg

SEQ ID NO: 3783436 - DNA, 25 bp, Homo sapien
ccaagggtggtagttccagtggcca

SEQ ID NO: 3783437 - DNA, 25 bp, Homo sapien
gtggtagttccagtggccacacttg

SEQ ID NO: 3783438 - DNA, 25 bp, Homo sapien
gtgcccaagggtggtagttccagtg

SEQ ID NO: 3783439 - DNA, 25 bp, Homo sapien
tggtggtgcccaagggtggtagttc

SEQ ID NO: 3783440 - DNA, 25 bp, Homo sapien
gagatctagaagcgaccctgagctt

SEQ ID NO: 3783441 - DNA, 25 bp, Homo sapien
ctggagatctagaagcgaccctgag

SEQ ID NO: 3783442 - DNA, 25 bp, Homo sapien
ggagatctagaagcgaccctgagct

SEQ ID NO: 3783443 - DNA, 25 bp, Homo sapien
tggagatctagaagcgaccctgagc

SEQ ID NO: 3783444 - DNA, 25 bp, Homo sapien
tcagggagagtcttatcagctccgt

SEQ ID NO: 3783445 - DNA, 25 bp, Homo sapien
ggtatttcacttcttcgggcatgcc

SEQ ID NO: 3783446 - DNA, 25 bp, Homo sapien
cttccttcagcagggcatcaaagtt

SEQ ID NO: 3783447 - DNA, 25 bp, Homo sapien
gccatgtcagtaatacctcgttcaa

SEQ ID NO: 3783448 - DNA, 25 bp, Homo sapien
aaggttggggagcacagttttgatg

SEQ ID NO: 3783449 - DNA, 25 bp, Homo sapien
tctgctgccctgacataggtccacc

SEQ ID NO: 3783450 - DNA, 25 bp, Homo sapien
ttgatggtaaagagtctgataaatg

SEQ ID NO: 3783451 - DNA, 25 bp, Homo sapien
ggtaaagagtctgataaatgatgtc

SEQ ID NO: 3783452 - DNA, 25 bp, Homo sapien
acttaaaactgccaagtggttgctg

SEQ ID NO: 3783453 - DNA, 25 bp, Homo sapien
cattgtgaaagtagctggcttccct

SEQ ID NO: 3783454 - DNA, 25 bp, Homo sapien
tgtgaaagtagctggcttccctcat

SEQ ID NO: 3783455 - DNA, 25 bp, Homo sapien
ctggcattgtgaaagtagctggctt

SEQ ID NO: 3783456 - DNA, 25 bp, Homo sapien
catctacatgcagacgtgacctttc

SEQ ID NO: 3783457 - DNA, 25 bp, Homo sapien
ctctttattcacatctacatgcaga

SEQ ID NO: 3783458 - DNA, 25 bp, Homo sapien
gcagacgtgacctttccttgtatat

SEQ ID NO: 3783459 - DNA, 25 bp, Homo sapien
tacatgcagacgtgacctttccttg

SEQ ID NO: 3783460 - DNA, 25 bp, Homo sapien
tgcactagcctacagaagccgtgag

SEQ ID NO: 3783461 - DNA, 25 bp, Homo sapien
cacggttggagaaggtctcaccacc

SEQ ID NO: 3783462 - DNA, 25 bp, Homo sapien
cgtgagaaatgtccacggttggaga

SEQ ID NO: 3783463 - DNA, 25 bp, Homo sapien
cactagcctacagaagccgtgagaa

SEQ ID NO: 3783464 - DNA, 25 bp, Homo sapien
agcctgagaactggcttgagcaaac

SEQ ID NO: 3783465 - DNA, 25 bp, Homo sapien
aaactcaacctcttcctgcaagtgg

SEQ ID NO: 3783466 - DNA, 25 bp, Homo sapien
tcggtgagttctcccaaaaatagcc

SEQ ID NO: 3783467 - DNA, 25 bp, Homo sapien
tgtccttgtactcaatatcggtgag

SEQ ID NO: 3783468 - DNA, 25 bp, Homo sapien
tgagcacgacttttccaacactctt

SEQ ID NO: 3783469 - DNA, 25 bp, Homo sapien
cggatgcccctcaccagaagtgagc

SEQ ID NO: 3783470 - DNA, 25 bp, Homo sapien
tccggatgcccctcaccagaagtga

SEQ ID NO: 3783471 - DNA, 25 bp, Homo sapien
caccagaagtgagcacgacttttcc

SEQ ID NO: 3783472 - DNA, 25 bp, Homo sapien
cccaccttgtcggagagttttagat

SEQ ID NO: 3783473 - DNA, 25 bp, Homo sapien
tagatttcaactgatagcaattatt

SEQ ID NO: 3783474 - DNA, 25 bp, Homo sapien
ctccaagaacccatggacatttgtc

SEQ ID NO: 3783475 - DNA, 25 bp, Homo sapien
tttatctcagttccctttctccaag

SEQ ID NO: 3783476 - DNA, 25 bp, Homo sapien
cttgccttttattgtctaaagggag

SEQ ID NO: 3783477 - DNA, 25 bp, Homo sapien
catagtcagcattgagtacatcttg

SEQ ID NO: 3783478 - DNA, 25 bp, Homo sapien
tgccttttattgtctaaagggagta

SEQ ID NO: 3783479 - DNA, 25 bp, Homo sapien
cagcattgagtacatcttgcctttt

SEQ ID NO: 3783480 - DNA, 25 bp, Homo sapien
tgacagtcaacacttgcatcatggg

SEQ ID NO: 3783481 - DNA, 25 bp, Homo sapien
cagcagagctcagatgaacagggaa

SEQ ID NO: 3783482 - DNA, 25 bp, Homo sapien
gcatcatgggaggtattagctggca

SEQ ID NO: 3783483 - DNA, 25 bp, Homo sapien
tagctggcatacagcacgtgaatcc

SEQ ID NO: 3783484 - DNA, 25 bp, Homo sapien
gtgagaattgtgtagttggcctcat

SEQ ID NO: 3783485 - DNA, 25 bp, Homo sapien
gccgggtcagtcgatgagacaaaga

SEQ ID NO: 3783486 - DNA, 25 bp, Homo sapien
tgagacaaagatgctgcacctgatg

SEQ ID NO: 3783487 - DNA, 25 bp, Homo sapien
aagatgctgcacctgatgtatctgc

SEQ ID NO: 3783488 - DNA, 25 bp, Homo sapien
tctgctgcctgggatccttctataa

SEQ ID NO: 3783489 - DNA, 25 bp, Homo sapien
gaacagaagatgatttcccactaca

SEQ ID NO: 3783490 - DNA, 25 bp, Homo sapien
tatgaattcttggaaacttgggagc

SEQ ID NO: 3783491 - DNA, 25 bp, Homo sapien
aaagtgggccacataggcagggcca

SEQ ID NO: 3783492 - DNA, 25 bp, Homo sapien
ggccagagctagattaggggtttct

SEQ ID NO: 3783493 - DNA, 25 bp, Homo sapien
ctgctgccagcactgattttccttg

SEQ ID NO: 3783494 - DNA, 25 bp, Homo sapien
tgctgccagcactgattttccttgt

SEQ ID NO: 3783495 - DNA, 25 bp, Homo sapien
gctgccagcactgattttccttgta

SEQ ID NO: 3783496 - DNA, 25 bp, Homo sapien
tgctcgtgctgccacttttcaatgg

SEQ ID NO: 3783497 - DNA, 25 bp, Homo sapien
cctgtggacaacaggagtattgctc

SEQ ID NO: 3783498 - DNA, 25 bp, Homo sapien
tgctgtatcagatccatcctgtgga

SEQ ID NO: 3783499 - DNA, 25 bp, Homo sapien
gtgcttctctgcttagctggtctgc

SEQ ID NO: 3783500 - DNA, 25 bp, Homo sapien
tgtagcccagcatcattaaactcct

SEQ ID NO: 3783501 - DNA, 25 bp, Homo sapien
ctcagaatgattccttccctgcttg

SEQ ID NO: 3783502 - DNA, 25 bp, Homo sapien
tttcttggccactggtggttgctgc

SEQ ID NO: 3783503 - DNA, 25 bp, Homo sapien
gggtgaatgcttgcgtaagatcttt

SEQ ID NO: 3783504 - DNA, 25 bp, Homo sapien
cagcttctggcggaggttcacgcag

SEQ ID NO: 3783505 - DNA, 25 bp, Homo sapien
cgcttgttcggagtgctttcgccca

SEQ ID NO: 3783506 - DNA, 25 bp, Homo sapien
gccccgggctggagatttgcttcga

SEQ ID NO: 3783507 - DNA, 25 bp, Homo sapien
gcttcgagtaggctagaggcgccct

SEQ ID NO: 3783508 - DNA, 25 bp, Homo sapien
gctcttcttccccaagccgaactcc

SEQ ID NO: 3783509 - DNA, 25 bp, Homo sapien
ggttgaaaggactctgagctcttct

SEQ ID NO: 3783510 - DNA, 25 bp, Homo sapien
ctgccgcgggggtggaggttgaaag

SEQ ID NO: 3783511 - DNA, 25 bp, Homo sapien
tggctgccttgctggaacctgccgc

SEQ ID NO: 3783512 - DNA, 25 bp, Homo sapien
cctctagcgcagctttttaaaggca

SEQ ID NO: 3783513 - DNA, 25 bp, Homo sapien
gagcgtggaaaccaactctcccaca

SEQ ID NO: 3783514 - DNA, 25 bp, Homo sapien
ccctaaacctctagcgcagcttttt

SEQ ID NO: 3783515 - DNA, 25 bp, Homo sapien
ctacaggagcgtggaaaccaactct

SEQ ID NO: 3783516 - DNA, 25 bp, Homo sapien
tgaaactgcaagtcgggcagaaacg

SEQ ID NO: 3783517 - DNA, 25 bp, Homo sapien
tccaggtgaattgaaagtcgtttcc

SEQ ID NO: 3783518 - DNA, 25 bp, Homo sapien
ttctcgccaagcaagcgggaggcgc

SEQ ID NO: 3783519 - DNA, 25 bp, Homo sapien
tgcagtcctggcatgccctgaaact

SEQ ID NO: 3783520 - DNA, 25 bp, Homo sapien
gaagaggccaccactcggctggcag

SEQ ID NO: 3783521 - DNA, 25 bp, Homo sapien
tggcagccgcgagcggcggccgaac

SEQ ID NO: 3783522 - DNA, 25 bp, Homo sapien
gcggccgaacctcggccccagactc

SEQ ID NO: 3783523 - DNA, 25 bp, Homo sapien
cccggcacgctcgcccgggagatac

SEQ ID NO: 3783524 - DNA, 25 bp, Homo sapien
cccttccccctcttgcgcatttcgc

SEQ ID NO: 3783525 - DNA, 25 bp, Homo sapien
ccttccccctcttgcgcatttcgca

SEQ ID NO: 3783526 - DNA, 25 bp, Homo sapien
tgtggggcatgagagcgaggtggct

SEQ ID NO: 3783527 - DNA, 25 bp, Homo sapien
gcagctgcgctggtgtggggcatga

SEQ ID NO: 3783528 - DNA, 25 bp, Homo sapien
cagcctcggcccgaagtaagtgcag

SEQ ID NO: 3783529 - DNA, 25 bp, Homo sapien
cagaagtttgcgtcggttgccccgc

SEQ ID NO: 3783530 - DNA, 25 bp, Homo sapien
cccccagcgcgagtgggaggcacat

SEQ ID NO: 3783531 - DNA, 25 bp, Homo sapien
taagtgcagcagaagtttgcgtcgg

SEQ ID NO: 3783532 - DNA, 25 bp, Homo sapien
ggacagggcagcaaaggacttggtt

SEQ ID NO: 3783533 - DNA, 25 bp, Homo sapien
gctcccatctctgagagcggtctcc

SEQ ID NO: 3783534 - DNA, 25 bp, Homo sapien
ccatctctgagagcggtctcccatg

SEQ ID NO: 3783535 - DNA, 25 bp, Homo sapien
tgaagcttggactgggtgttcccca

SEQ ID NO: 3783536 - DNA, 25 bp, Homo sapien
caaatgtcaggagcagttgagtttt

SEQ ID NO: 3783537 - DNA, 25 bp, Homo sapien
tcaggagcagttgagttttcttttc

SEQ ID NO: 3783538 - DNA, 25 bp, Homo sapien
ttaagccaaattaatattcattgca

SEQ ID NO: 3783539 - DNA, 25 bp, Homo sapien
aatattcattgcaaatgtcaggagc

SEQ ID NO: 3783540 - DNA, 25 bp, Homo sapien
gtagccaggatgactttttcaggcc

SEQ ID NO: 3783541 - DNA, 25 bp, Homo sapien
cagtagccaggatgactttttcagg

SEQ ID NO: 3783542 - DNA, 25 bp, Homo sapien
ctgctcagtagccaggatgactttt

SEQ ID NO: 3783543 - DNA, 25 bp, Homo sapien
gctcagtagccaggatgactttttc

SEQ ID NO: 3783544 - DNA, 25 bp, Homo sapien
cattccttctctggttgcttaattg

SEQ ID NO: 3783545 - DNA, 25 bp, Homo sapien
tttgggatgattgtatctggcttgt

SEQ ID NO: 3783546 - DNA, 25 bp, Homo sapien
gcttgttacagcttctctagctctc

SEQ ID NO: 3783547 - DNA, 25 bp, Homo sapien
tggcttgttacagcttctctagctc

SEQ ID NO: 3783548 - DNA, 25 bp, Homo sapien
ttgcaggaggacttgtatatctggt

SEQ ID NO: 3783549 - DNA, 25 bp, Homo sapien
caggaggacttgtatatctggtcca

SEQ ID NO: 3783550 - DNA, 25 bp, Homo sapien
tgtgtaactcttgactttgccttca

SEQ ID NO: 3783551 - DNA, 25 bp, Homo sapien
ggaagacatgccatgtgtaactctt

SEQ ID NO: 3783552 - DNA, 25 bp, Homo sapien
ttgtaactgtacttggcccaccgat

SEQ ID NO: 3783553 - DNA, 25 bp, Homo sapien
gaaagctaatgaaccgtctgaggag

SEQ ID NO: 3783554 - DNA, 25 bp, Homo sapien
tgaccgacaggtgtggaagtactcc

SEQ ID NO: 3783555 - DNA, 25 bp, Homo sapien
taataacatcacgtcgagttgctcg

SEQ ID NO: 3783556 - DNA, 25 bp, Homo sapien
tgtaattgtcaggactgacactcac

SEQ ID NO: 3783557 - DNA, 25 bp, Homo sapien
aaatacacagacaaatcacagactg

SEQ ID NO: 3783558 - DNA, 25 bp, Homo sapien
atcacagactgtgtaattgtcagga

SEQ ID NO: 3783559 - DNA, 25 bp, Homo sapien
cacagacaaatcacagactgtgtaa

SEQ ID NO: 3783560 - DNA, 25 bp, Homo sapien
cagggatctacagctgtggcaccca

SEQ ID NO: 3783561 - DNA, 25 bp, Homo sapien
agctgtggcacccacggcggacgct

SEQ ID NO: 3783562 - DNA, 25 bp, Homo sapien
aatccagggatctacagctgtggca

SEQ ID NO: 3783563 - DNA, 25 bp, Homo sapien
gctgtggcacccacggcggacgctt

SEQ ID NO: 3783564 - DNA, 25 bp, Homo sapien
tctgttgaatcattcgtttagcaaa

SEQ ID NO: 3783565 - DNA, 25 bp, Homo sapien
gaatcattcgtttagcaaacattcc

SEQ ID NO: 3783566 - DNA, 25 bp, Homo sapien
ttcgtttagcaaacattccatctac

SEQ ID NO: 3783567 - DNA, 25 bp, Homo sapien
tagcaaacattccatctaccacctg

SEQ ID NO: 3783568 - DNA, 25 bp, Homo sapien
ttggtggttaccatgtcttctacac

SEQ ID NO: 3783569 - DNA, 25 bp, Homo sapien
ggtggttaccatgtcttctacacca

SEQ ID NO: 3783570 - DNA, 25 bp, Homo sapien
gtggttaccatgtcttctacaccag

SEQ ID NO: 3783571 - DNA, 25 bp, Homo sapien
tggtggttaccatgtcttctacacc

SEQ ID NO: 3783572 - DNA, 25 bp, Homo sapien
aatgaaaatgtagtacaattaaacg

SEQ ID NO: 3783573 - DNA, 25 bp, Homo sapien
tgaaaatgtagtacaattaaacgta

SEQ ID NO: 3783574 - DNA, 25 bp, Homo sapien
caatgaaaatgtagtacaattaaac

SEQ ID NO: 3783575 - DNA, 25 bp, Homo sapien
tcaatgaaaatgtagtacaattaaa

SEQ ID NO: 3783576 - DNA, 25 bp, Homo sapien
aaataatgtcttggctgtaagtccg

SEQ ID NO: 3783577 - DNA, 25 bp, Homo sapien
tgtccacacagaagttcgcctgctg

SEQ ID NO: 3783578 - DNA, 25 bp, Homo sapien
cactgatagttgctaaccatgcaca

SEQ ID NO: 3783579 - DNA, 25 bp, Homo sapien
ttggctgtaagtccgctgcctgaaa

SEQ ID NO: 3783580 - DNA, 25 bp, Homo sapien
gtaactgctgctacagccgccttgt

SEQ ID NO: 3783581 - DNA, 25 bp, Homo sapien
gcaagcacaaagcacacccctagct

SEQ ID NO: 3783582 - DNA, 25 bp, Homo sapien
aagttgggcttctgtcagtaagagc

SEQ ID NO: 3783583 - DNA, 25 bp, Homo sapien
agttgggcttctgtcagtaagagct

SEQ ID NO: 3783584 - DNA, 25 bp, Homo sapien
taagttgggcttctgtcagtaagag

SEQ ID NO: 3783585 - DNA, 25 bp, Homo sapien
ttcagcccctttcgctgtagcagat

SEQ ID NO: 3783586 - DNA, 25 bp, Homo sapien
tgtagcagatacagaagtggacacc

SEQ ID NO: 3783587 - DNA, 25 bp, Homo sapien
gtgattatgggcagagtcttcagcc

SEQ ID NO: 3783588 - DNA, 25 bp, Homo sapien
taatcatagtaatgagccctgtgcc

SEQ ID NO: 3783589 - DNA, 25 bp, Homo sapien
tgtgtgaacatttctccttgatgcc

SEQ ID NO: 3783590 - DNA, 25 bp, Homo sapien
acttaatgctgagcccgtagctgtc

SEQ ID NO: 3783591 - DNA, 25 bp, Homo sapien
gcccagaccctgcatttacttaatg

SEQ ID NO: 3783592 - DNA, 25 bp, Homo sapien
tcaggatgatgcagttcgctcagga

SEQ ID NO: 3783593 - DNA, 25 bp, Homo sapien
cttgctccttagtgcttgtttgatc

SEQ ID NO: 3783594 - DNA, 25 bp, Homo sapien
ggttgccttggcaataatttgtcct

SEQ ID NO: 3783595 - DNA, 25 bp, Homo sapien
gactccaggcattcagcgacagaaa

SEQ ID NO: 3783596 - DNA, 25 bp, Homo sapien
ttccgtctgccccagagcaccttct

SEQ ID NO: 3783597 - DNA, 25 bp, Homo sapien
gtcagattggggtaattgtacttcc

SEQ ID NO: 3783598 - DNA, 25 bp, Homo sapien
tccatttgtcagattggggtaattg

SEQ ID NO: 3783599 - DNA, 25 bp, Homo sapien
catttgtcagattggggtaattgta

SEQ ID NO: 3783600 - DNA, 25 bp, Homo sapien
ctctcgttccatttgtcagattggg

SEQ ID NO: 3783601 - DNA, 25 bp, Homo sapien
tattctcggttactattctgtaaac

SEQ ID NO: 3783602 - DNA, 25 bp, Homo sapien
ttcgactcctcaaatgctccaaggg

SEQ ID NO: 3783603 - DNA, 25 bp, Homo sapien
tgtgggtcagagcttcgtgaactgt

SEQ ID NO: 3783604 - DNA, 25 bp, Homo sapien
gctccaagggctatcatattctcgg

SEQ ID NO: 3783605 - DNA, 25 bp, Homo sapien
gtgtctcagacagcttctgaataat

SEQ ID NO: 3783606 - DNA, 25 bp, Homo sapien
gacaaaaccagtattgctgacaatc

SEQ ID NO: 3783607 - DNA, 25 bp, Homo sapien
ttgaggcatgtggttcttcttcttg

SEQ ID NO: 3783608 - DNA, 25 bp, Homo sapien
caatcttcttgtgaatcttgtagta

SEQ ID NO: 3783609 - DNA, 25 bp, Homo sapien
tgtgactttatcttccttaatgcag

SEQ ID NO: 3783610 - DNA, 25 bp, Homo sapien
cgtacgttctgatttccatggcctc

SEQ ID NO: 3783611 - DNA, 25 bp, Homo sapien
tagtcctgcccctcgtacgttctga

SEQ ID NO: 3783612 - DNA, 25 bp, Homo sapien
ggattgggcctcatgagcagctctg

SEQ ID NO: 3783613 - DNA, 25 bp, Homo sapien
tgtccttgcctgtatagctctttgt

SEQ ID NO: 3783614 - DNA, 25 bp, Homo sapien
tgggtaaagatgcagtggttagctc

SEQ ID NO: 3783615 - DNA, 25 bp, Homo sapien
atctgttaccaaatcatgactctcc

SEQ ID NO: 3783616 - DNA, 25 bp, Homo sapien
tgactctcctgacagtcagcctggg

SEQ ID NO: 3783617 - DNA, 25 bp, Homo sapien
gtaacgcagataagtttagccccat

SEQ ID NO: 3783618 - DNA, 25 bp, Homo sapien
ttgtaacgcagataagtttagcccc

SEQ ID NO: 3783619 - DNA, 25 bp, Homo sapien
tgtaacgcagataagtttagcccca

SEQ ID NO: 3783620 - DNA, 25 bp, Homo sapien
agttgtaacgcagataagtttagcc

SEQ ID NO: 3783621 - DNA, 25 bp, Homo sapien
gaccaccaactgttactctgcagac

SEQ ID NO: 3783622 - DNA, 25 bp, Homo sapien
tctgcagacaaaccacatgtgcggt

SEQ ID NO: 3783623 - DNA, 25 bp, Homo sapien
agacaaaccacatgtgcggtttggg

SEQ ID NO: 3783624 - DNA, 25 bp, Homo sapien
atttttaggtactgaccaccaactg

SEQ ID NO: 3783625 - DNA, 25 bp, Homo sapien
tccttgggccctcggtttaatgctg

SEQ ID NO: 3783626 - DNA, 25 bp, Homo sapien
aatgctgtccaccacccatgagcaa

SEQ ID NO: 3783627 - DNA, 25 bp, Homo sapien
ttctatggcaagaaacatcgaacac

SEQ ID NO: 3783628 - DNA, 25 bp, Homo sapien
tcatacaggatttcatatctgcagg

SEQ ID NO: 3783629 - DNA, 25 bp, Homo sapien
gattggatgaggagtagcagcttct

SEQ ID NO: 3783630 - DNA, 25 bp, Homo sapien
attagaacctggcatggtgggtcca

SEQ ID NO: 3783631 - DNA, 25 bp, Homo sapien
tagcattagaacctggcatggtggg

SEQ ID NO: 3783632 - DNA, 25 bp, Homo sapien
tgattggatgaggagtagcagcttc

SEQ ID NO: 3783633 - DNA, 25 bp, Homo sapien
gtggtgctggctctttgaaacgtac

SEQ ID NO: 3783634 - DNA, 25 bp, Homo sapien
agtggtgctggctctttgaaacgta

SEQ ID NO: 3783635 - DNA, 25 bp, Homo sapien
tgaagtggtgctggctctttgaaac

SEQ ID NO: 3783636 - DNA, 25 bp, Homo sapien
tcatgaagtggtgctggctctttga

SEQ ID NO: 3783637 - DNA, 25 bp, Homo sapien
ctgcagctgttagtagacgaatcat

SEQ ID NO: 3783638 - DNA, 25 bp, Homo sapien
tgtgggtgatgccttcagtgccgag

SEQ ID NO: 3783639 - DNA, 25 bp, Homo sapien
ccttcagtgccgagggtggctgtag

SEQ ID NO: 3783640 - DNA, 25 bp, Homo sapien
gtagggtctgcagctgttagtagac

SEQ ID NO: 3783641 - DNA, 25 bp, Homo sapien
gttcctcttattgctaactgtgtgg

SEQ ID NO: 3783642 - DNA, 25 bp, Homo sapien
agtagccaagtgttcctcttattgc

SEQ ID NO: 3783643 - DNA, 25 bp, Homo sapien
tgatttccagtagccaagtgttcct

SEQ ID NO: 3783644 - DNA, 25 bp, Homo sapien
aactgtgtggatgttaacatgggca

SEQ ID NO: 3783645 - DNA, 25 bp, Homo sapien
gctggttcatccattcgactgttat

SEQ ID NO: 3783646 - DNA, 25 bp, Homo sapien
ttagtaggacgttaggtgtaagctg

SEQ ID NO: 3783647 - DNA, 25 bp, Homo sapien
cgactgttatgaacagccgcagacc

SEQ ID NO: 3783648 - DNA, 25 bp, Homo sapien
caagttgtgatgaatgtcaaggaag

SEQ ID NO: 3783649 - DNA, 25 bp, Homo sapien
taatggagaccttgctttgactgag

SEQ ID NO: 3783650 - DNA, 25 bp, Homo sapien
caccctgcgggtaacttgtcttcta

SEQ ID NO: 3783651 - DNA, 25 bp, Homo sapien
gcacagacagccgatgaagtacatg

SEQ ID NO: 3783652 - DNA, 25 bp, Homo sapien
ttacagtgacgtgtgacagccagcc

SEQ ID NO: 3783653 - DNA, 25 bp, Homo sapien
aggaaatcactgctgggcaagctgc

SEQ ID NO: 3783654 - DNA, 25 bp, Homo sapien
gccagtcttgatgtgcaacattcac

SEQ ID NO: 3783655 - DNA, 25 bp, Homo sapien
aaggaaatcactgctgggcaagctg

SEQ ID NO: 3783656 - DNA, 25 bp, Homo sapien
caagctgccagtcttgatgtgcaac

SEQ ID NO: 3783657 - DNA, 25 bp, Homo sapien
actgtggacatttgtagatgctggg

SEQ ID NO: 3783658 - DNA, 25 bp, Homo sapien
attttgggtgagtagatgtaggttt

SEQ ID NO: 3783659 - DNA, 25 bp, Homo sapien
tgctgggatgctcaagggagatttt

SEQ ID NO: 3783660 - DNA, 25 bp, Homo sapien
gagagtcactagatctattgattta

SEQ ID NO: 3783661 - DNA, 25 bp, Homo sapien
gctgaattgcaatttccaaaaccat

SEQ ID NO: 3783662 - DNA, 25 bp, Homo sapien
tgctgaattgcaatttccaaaacca

SEQ ID NO: 3783663 - DNA, 25 bp, Homo sapien
tgaatctagaggagcctcttcaact

SEQ ID NO: 3783664 - DNA, 25 bp, Homo sapien
ctgaatctagaggagcctcttcaac

SEQ ID NO: 3783665 - DNA, 25 bp, Homo sapien
gagcctcttcaactagaacgactgc

SEQ ID NO: 3783666 - DNA, 25 bp, Homo sapien
caactagaacgactgcaaaattctg

SEQ ID NO: 3783667 - DNA, 25 bp, Homo sapien
tttgctttagtctctggtcatccac

SEQ ID NO: 3783668 - DNA, 25 bp, Homo sapien
cagaggtagacatcggacacttttg

SEQ ID NO: 3783669 - DNA, 25 bp, Homo sapien
ttttggtaaggtcgctgactggcta

SEQ ID NO: 3783670 - DNA, 25 bp, Homo sapien
gagagggactagaagcccttttgta

SEQ ID NO: 3783671 - DNA, 25 bp, Homo sapien
cttctctttcagcatacataggcat

SEQ ID NO: 3783672 - DNA, 25 bp, Homo sapien
ttcttctctttcagcatacataggc

SEQ ID NO: 3783673 - DNA, 25 bp, Homo sapien
aaaggctggcaatttcttgctttcc

SEQ ID NO: 3783674 - DNA, 25 bp, Homo sapien
ccttcttctctttcagcatacatag

SEQ ID NO: 3783675 - DNA, 25 bp, Homo sapien
cagtctcttttgactgtcgctggac

SEQ ID NO: 3783676 - DNA, 25 bp, Homo sapien
aagacttttctgagtgaattgcagc

SEQ ID NO: 3783677 - DNA, 25 bp, Homo sapien
gacttttctgagtgaattgcagctt

SEQ ID NO: 3783678 - DNA, 25 bp, Homo sapien
tgtcgctggacttttccaactcgtt

SEQ ID NO: 3783679 - DNA, 25 bp, Homo sapien
ttggtagggccacggtccagatgga

SEQ ID NO: 3783680 - DNA, 25 bp, Homo sapien
cagctccttcgagcagcacagggtc

SEQ ID NO: 3783681 - DNA, 25 bp, Homo sapien
ttgagacattgtgcttgtgtatttc

SEQ ID NO: 3783682 - DNA, 25 bp, Homo sapien
agcagtttaggcttggtagggccac

SEQ ID NO: 3783683 - DNA, 25 bp, Homo sapien
tgtttctagctctttctttgaaagc

SEQ ID NO: 3783684 - DNA, 25 bp, Homo sapien
gtttctagctctttctttgaaagca

SEQ ID NO: 3783685 - DNA, 25 bp, Homo sapien
cttcccagaatttgcggtgaatttt

SEQ ID NO: 3783686 - DNA, 25 bp, Homo sapien
ttcccagaatttgcggtgaatttta

SEQ ID NO: 3783687 - DNA, 25 bp, Homo sapien
cccagaatttgcggtgaattttagt

SEQ ID NO: 3783688 - DNA, 25 bp, Homo sapien
tcccagaatttgcggtgaattttag

SEQ ID NO: 3783689 - DNA, 25 bp, Homo sapien
ctagaaccaaggctccaaattccct

SEQ ID NO: 3783690 - DNA, 25 bp, Homo sapien
tgctgtctaccgtcagctgacagca

SEQ ID NO: 3783691 - DNA, 25 bp, Homo sapien
gctgtctaccgtcagctgacagcag

SEQ ID NO: 3783692 - DNA, 25 bp, Homo sapien
ctgtctaccgtcagctgacagcagg

SEQ ID NO: 3783693 - DNA, 25 bp, Homo sapien
cccttaaccagccagataaactgaa

SEQ ID NO: 3783694 - DNA, 25 bp, Homo sapien
tggaataagtgataccaccgccagt

SEQ ID NO: 3783695 - DNA, 25 bp, Homo sapien
actgagcttgcaactctaggaggga

SEQ ID NO: 3783696 - DNA, 25 bp, Homo sapien
caacactgcgggacaatggaataag

SEQ ID NO: 3783697 - DNA, 25 bp, Homo sapien
caagatcatgtctgggattgaccct

SEQ ID NO: 3783698 - DNA, 25 bp, Homo sapien
tgaccaaagtcaaatccgaaccata

SEQ ID NO: 3783699 - DNA, 25 bp, Homo sapien
tgagcatagttcagcatcatcccac

SEQ ID NO: 3783700 - DNA, 25 bp, Homo sapien
tgtcgctgtggaagccaagatcatg

SEQ ID NO: 3783701 - DNA, 25 bp, Homo sapien
tgggcattggatccctatggggtct

SEQ ID NO: 3783702 - DNA, 25 bp, Homo sapien
gcattggatccctatggggtctgtg

SEQ ID NO: 3783703 - DNA, 25 bp, Homo sapien
ttgggcattggatccctatggggtc

SEQ ID NO: 3783704 - DNA, 25 bp, Homo sapien
agttgggcattggatccctatgggg

SEQ ID NO: 3783705 - DNA, 25 bp, Homo sapien
tgtccttactcccatgagcatgacc

SEQ ID NO: 3783706 - DNA, 25 bp, Homo sapien
atgaccatgtcttgtttggcatggc

SEQ ID NO: 3783707 - DNA, 25 bp, Homo sapien
caggctcttggagcggcatagccac

SEQ ID NO: 3783708 - DNA, 25 bp, Homo sapien
agcatgaccatgaccatgtcttgtt

SEQ ID NO: 3783709 - DNA, 25 bp, Homo sapien
tctcatcaggacacccgatgtgagc

SEQ ID NO: 3783710 - DNA, 25 bp, Homo sapien
tgcaggaatgtctcatcaggacacc

SEQ ID NO: 3783711 - DNA, 25 bp, Homo sapien
cgctaatgtcaagcctgcaggaatg

SEQ ID NO: 3783712 - DNA, 25 bp, Homo sapien
taaatggctacgctaatgtcaagcc

SEQ ID NO: 3783713 - DNA, 25 bp, Homo sapien
caagcaaaggtgctctactgacacc

SEQ ID NO: 3783714 - DNA, 25 bp, Homo sapien
gcaaatgcttcaccgctgctaggca

SEQ ID NO: 3783715 - DNA, 25 bp, Homo sapien
tcttttccatagcaaatgcttcacc

SEQ ID NO: 3783716 - DNA, 25 bp, Homo sapien
gctgctaggcaagcaaaggtgctct

SEQ ID NO: 3783717 - DNA, 25 bp, Homo sapien
tccaaatcaggaccatctgcaagga

SEQ ID NO: 3783718 - DNA, 25 bp, Homo sapien
aaagctgaagtgaaatcattattta

SEQ ID NO: 3783719 - DNA, 25 bp, Homo sapien
ttctcggcaggtggtctccttttct

SEQ ID NO: 3783720 - DNA, 25 bp, Homo sapien
tttatgcagataattttctcggcag

SEQ ID NO: 3783721 - DNA, 25 bp, Homo sapien
tggaaagagggccttgatcgaggca

SEQ ID NO: 3783722 - DNA, 25 bp, Homo sapien
gcatgcgtgtggaaacttcccctga

SEQ ID NO: 3783723 - DNA, 25 bp, Homo sapien
gatcgaggcagggaaggccttccca

SEQ ID NO: 3783724 - DNA, 25 bp, Homo sapien
ggcatgcatgcgtgtggaaacttcc

SEQ ID NO: 3783725 - DNA, 25 bp, Homo sapien
taggtggcaggatggggttgtccag

SEQ ID NO: 3783726 - DNA, 25 bp, Homo sapien
ttactctgtgacattgtaggtggca

SEQ ID NO: 3783727 - DNA, 25 bp, Homo sapien
tctgtgacattgtaggtggcaggat

SEQ ID NO: 3783728 - DNA, 25 bp, Homo sapien
tactctgtgacattgtaggtggcag

SEQ ID NO: 3783729 - DNA, 25 bp, Homo sapien
ctcctctgcataaacgcttgtccgt

SEQ ID NO: 3783730 - DNA, 25 bp, Homo sapien
tgcataaacgcttgtccgttgctga

SEQ ID NO: 3783731 - DNA, 25 bp, Homo sapien
cctctgcataaacgcttgtccgttg

SEQ ID NO: 3783732 - DNA, 25 bp, Homo sapien
tctgcataaacgcttgtccgttgct

SEQ ID NO: 3783733 - DNA, 25 bp, Homo sapien
tctgtagccagttggttcaaccacc

SEQ ID NO: 3783734 - DNA, 25 bp, Homo sapien
tgatgcattatccagggaactggaa

SEQ ID NO: 3783735 - DNA, 25 bp, Homo sapien
cacctgatgcattatccagggaact

SEQ ID NO: 3783736 - DNA, 25 bp, Homo sapien
cctgatgcattatccagggaactgg

SEQ ID NO: 3783737 - DNA, 25 bp, Homo sapien
ctgatgcattatccagggaactgga

SEQ ID NO: 3783738 - DNA, 25 bp, Homo sapien
gtgctcccagtagctctaagagcag

SEQ ID NO: 3783739 - DNA, 25 bp, Homo sapien
ccagtgctcccagtagctctaagag

SEQ ID NO: 3783740 - DNA, 25 bp, Homo sapien
cagtgctcccagtagctctaagagc

SEQ ID NO: 3783741 - DNA, 25 bp, Homo sapien
cccagtgctcccagtagctctaaga

SEQ ID NO: 3783742 - DNA, 25 bp, Homo sapien
ggaagtagggtgctgcattcttcct

SEQ ID NO: 3783743 - DNA, 25 bp, Homo sapien
ttccgtggaagtagggtgctgcatt

SEQ ID NO: 3783744 - DNA, 25 bp, Homo sapien
tccctattctttagatactgtctgc

SEQ ID NO: 3783745 - DNA, 25 bp, Homo sapien
tctttagatactgtctgcctcgacc

SEQ ID NO: 3783746 - DNA, 25 bp, Homo sapien
acttgttcaccatttgcttctgcca

SEQ ID NO: 3783747 - DNA, 25 bp, Homo sapien
gatcttaggcctcatgtgtctctca

SEQ ID NO: 3783748 - DNA, 25 bp, Homo sapien
gatcataggctgcatgtgtctctgc

SEQ ID NO: 3783749 - DNA, 25 bp, Homo sapien
gtgtctctcatgatcaagggccaga

SEQ ID NO: 3783750 - DNA, 25 bp, Homo sapien
tagccctctgtgttagtagacataa

SEQ ID NO: 3783751 - DNA, 25 bp, Homo sapien
gaagtgtatcattagagtctagccc

SEQ ID NO: 3783752 - DNA, 25 bp, Homo sapien
aattatttgcctacaggcccgagaa

SEQ ID NO: 3783753 - DNA, 25 bp, Homo sapien
gaaaggaatagattgtgtacctgga

SEQ ID NO: 3783754 - DNA, 25 bp, Homo sapien
aattcagactgcttgcttaacaaga

SEQ ID NO: 3783755 - DNA, 25 bp, Homo sapien
gaaagaagcaaccagctgaattcag

SEQ ID NO: 3783756 - DNA, 25 bp, Homo sapien
tttaagtggagcctagatccctagg

SEQ ID NO: 3783757 - DNA, 25 bp, Homo sapien
ggagaatctctgaggaacccgcaca

SEQ ID NO: 3783758 - DNA, 25 bp, Homo sapien
ttagtccagcaaatgtcggtcagtc

SEQ ID NO: 3783759 - DNA, 25 bp, Homo sapien
gactgtgttcgggttttctcaagcc

SEQ ID NO: 3783760 - DNA, 25 bp, Homo sapien
cttgatgacacttgggtgactgtgt

SEQ ID NO: 3783761 - DNA, 25 bp, Homo sapien
ctttgacttcagaaggtcaccttga

SEQ ID NO: 3783762 - DNA, 25 bp, Homo sapien
tattacaatttgcacagtatgggaa

SEQ ID NO: 3783763 - DNA, 25 bp, Homo sapien
tacaatttgcacagtatgggaatat

SEQ ID NO: 3783764 - DNA, 25 bp, Homo sapien
tattattacaatttgcacagtatgg

SEQ ID NO: 3783765 - DNA, 25 bp, Homo sapien
catattattacaatttgcacagtat

SEQ ID NO: 3783766 - DNA, 25 bp, Homo sapien
cagttttgccaagggaagttgagca

SEQ ID NO: 3783767 - DNA, 25 bp, Homo sapien
aagttgagcacaggctaacagccgc

SEQ ID NO: 3783768 - DNA, 25 bp, Homo sapien
tgaacatcaaactgctgccatgcct

SEQ ID NO: 3783769 - DNA, 25 bp, Homo sapien
taacagccgccatgaatcgtccttg

SEQ ID NO: 3783770 - DNA, 25 bp, Homo sapien
ccaagtttcttagaggatccacttg

SEQ ID NO: 3783771 - DNA, 25 bp, Homo sapien
agtttcttagaggatccacttgtat

SEQ ID NO: 3783772 - DNA, 25 bp, Homo sapien
tcccaagtttcttagaggatccact

SEQ ID NO: 3783773 - DNA, 25 bp, Homo sapien
gctcccaagtttcttagaggatcca

SEQ ID NO: 3783774 - DNA, 25 bp, Homo sapien
caaggagcaagattttgaatggagg

SEQ ID NO: 3783775 - DNA, 25 bp, Homo sapien
gggtataccctgagccatcgcccag

SEQ ID NO: 3783776 - DNA, 25 bp, Homo sapien
atggggtataccctgagccatcgcc

SEQ ID NO: 3783777 - DNA, 25 bp, Homo sapien
aaggagcaagattttgaatggaggt

SEQ ID NO: 3783778 - DNA, 25 bp, Homo sapien
gtgctgtagactcagttgcctttct

SEQ ID NO: 3783779 - DNA, 25 bp, Homo sapien
ttggtgctgtagactcagttgcctt

SEQ ID NO: 3783780 - DNA, 25 bp, Homo sapien
ccttggtgctgtagactcagttgcc

SEQ ID NO: 3783781 - DNA, 25 bp, Homo sapien
ggtgctgtagactcagttgcctttc

SEQ ID NO: 3783782 - DNA, 25 bp, Homo sapien
ctagctcttggcttgctgccttgcc

SEQ ID NO: 3783783 - DNA, 25 bp, Homo sapien
agctcttggcttgctgccttgccac

SEQ ID NO: 3783784 - DNA, 25 bp, Homo sapien
tagctcttggcttgctgccttgcca

SEQ ID NO: 3783785 - DNA, 25 bp, Homo sapien
ggcagcttgtccttcaccaaaaggt

SEQ ID NO: 3783786 - DNA, 25 bp, Homo sapien
aaggtgtgtcccaggtatctctgca

SEQ ID NO: 3783787 - DNA, 25 bp, Homo sapien
gtcccaggtatctctgcacatctca

SEQ ID NO: 3783788 - DNA, 25 bp, Homo sapien
ttcaccaaaaggtgtgtcccaggta

SEQ ID NO: 3783789 - DNA, 25 bp, Homo sapien
gccctggttgacaaacacaaggaat

SEQ ID NO: 3783790 - DNA, 25 bp, Homo sapien
cgtatggtagaatggtcagcagccc

SEQ ID NO: 3783791 - DNA, 25 bp, Homo sapien
agcaggattgccctggttgacaaac

SEQ ID NO: 3783792 - DNA, 25 bp, Homo sapien
ggtcagcagccctaaattcccgtgg

SEQ ID NO: 3783793 - DNA, 25 bp, Homo sapien
cctgcggacttatctggagagaaaa

SEQ ID NO: 3783794 - DNA, 25 bp, Homo sapien
tatctctggcgatctgtcctgctca

SEQ ID NO: 3783795 - DNA, 25 bp, Homo sapien
cctgatccaaatgtagccctgtgta

SEQ ID NO: 3783796 - DNA, 25 bp, Homo sapien
tgctcagctataaacacagcgttag

SEQ ID NO: 3783797 - DNA, 25 bp, Homo sapien
caaattcagcctacagttgactgtt

SEQ ID NO: 3783798 - DNA, 25 bp, Homo sapien
taaactgaccacgtgaatgtcctga

SEQ ID NO: 3783799 - DNA, 25 bp, Homo sapien
tcatagattatgactggctcaggtg

SEQ ID NO: 3783800 - DNA, 25 bp, Homo sapien
gactgttttatgtgcaaccaatggc

SEQ ID NO: 3783801 - DNA, 25 bp, Homo sapien
caaaacacacaggtcactcgaggtc

SEQ ID NO: 3783802 - DNA, 25 bp, Homo sapien
ggccattgttcagcacacattcttg

SEQ ID NO: 3783803 - DNA, 25 bp, Homo sapien
tcacaatctggaacataggctggcc

SEQ ID NO: 3783804 - DNA, 25 bp, Homo sapien
taaatcaatctcaaaccttgctgga

SEQ ID NO: 3783805 - DNA, 25 bp, Homo sapien
ggatccagccttcacaatatgctaa

SEQ ID NO: 3783806 - DNA, 25 bp, Homo sapien
cattgcctggcagctaagggcttgg

SEQ ID NO: 3783807 - DNA, 25 bp, Homo sapien
cagtcttcaaaaaatgcgggtggcc

SEQ ID NO: 3783808 - DNA, 25 bp, Homo sapien
tagctgtgatcgttaaggactctta

SEQ ID NO: 3783809 - DNA, 25 bp, Homo sapien
gaaagtggtagtcagctagaggaaa

SEQ ID NO: 3783810 - DNA, 25 bp, Homo sapien
tagtcagctagaggaaattgccaca

SEQ ID NO: 3783811 - DNA, 25 bp, Homo sapien
acacctggaaagtggtagtcagcta

SEQ ID NO: 3783812 - DNA, 25 bp, Homo sapien
caaaattagatggaaattttcagtg

SEQ ID NO: 3783813 - DNA, 25 bp, Homo sapien
ttaaatgcgaaacaatggcttgagt

SEQ ID NO: 3783814 - DNA, 25 bp, Homo sapien
gaaacaatggcttgagtttaggtct

SEQ ID NO: 3783815 - DNA, 25 bp, Homo sapien
gcgaaacaatggcttgagtttaggt

SEQ ID NO: 3783816 - DNA, 25 bp, Homo sapien
aatgcgaaacaatggcttgagttta

SEQ ID NO: 3783817 - DNA, 25 bp, Homo sapien
gaccctttgcaatccagtatgcact

SEQ ID NO: 3783818 - DNA, 25 bp, Homo sapien
ccgtatctcggaggatctgcagaag

SEQ ID NO: 3783819 - DNA, 25 bp, Homo sapien
taccgtctgttaactccgtatctcg

SEQ ID NO: 3783820 - DNA, 25 bp, Homo sapien
gaaggtccgcgttgaccctttgcaa

SEQ ID NO: 3783821 - DNA, 25 bp, Homo sapien
gtgcagtggcgagatgtccgcttat

SEQ ID NO: 3783822 - DNA, 25 bp, Homo sapien
gtggcgagatgtccgcttattgcaa

SEQ ID NO: 3783823 - DNA, 25 bp, Homo sapien
cagtggcgagatgtccgcttattgc

SEQ ID NO: 3783824 - DNA, 25 bp, Homo sapien
cgagatgtccgcttattgcaacctc

SEQ ID NO: 3783825 - DNA, 25 bp, Homo sapien
tagaagactaatgaggacagaagct

SEQ ID NO: 3783826 - DNA, 25 bp, Homo sapien
tacagtggctgagatggtaccttca

SEQ ID NO: 3783827 - DNA, 25 bp, Homo sapien
taaacagaaatggttgccctggaat

SEQ ID NO: 3783828 - DNA, 25 bp, Homo sapien
tgcactcagcccaccatttgtttta

SEQ ID NO: 3783829 - DNA, 25 bp, Homo sapien
ccttttccattataggatcagtcac

SEQ ID NO: 3783830 - DNA, 25 bp, Homo sapien
tcccttttccattataggatcagtc

SEQ ID NO: 3783831 - DNA, 25 bp, Homo sapien
cccttttccattataggatcagtca

SEQ ID NO: 3783832 - DNA, 25 bp, Homo sapien
caaatgctgttttgggtcctaacca

SEQ ID NO: 3783833 - DNA, 25 bp, Homo sapien
tgaatatgtttaagttgcctggaat

SEQ ID NO: 3783834 - DNA, 25 bp, Homo sapien
taaatttattgtaggtcagggcatc

SEQ ID NO: 3783835 - DNA, 25 bp, Homo sapien
ttcccttggcaaaaggaatcccaga

SEQ ID NO: 3783836 - DNA, 25 bp, Homo sapien
tcagttcatcttaccttgccgggct

SEQ ID NO: 3783837 - DNA, 25 bp, Homo sapien
tggactgctcccagaacattaaagg

SEQ ID NO: 3783838 - DNA, 25 bp, Homo sapien
aaaggttagaaagccgagtgctgcc

SEQ ID NO: 3783839 - DNA, 25 bp, Homo sapien
tgagaactacggaaaagagacccat

SEQ ID NO: 3783840 - DNA, 25 bp, Homo sapien
gtccctcaaagcccagggatcaggg

SEQ ID NO: 3783841 - DNA, 25 bp, Homo sapien
actatttccagcaagctctttgtcc

SEQ ID NO: 3783842 - DNA, 25 bp, Homo sapien
tggtgtcatcacgagggtgatcact

SEQ ID NO: 3783843 - DNA, 25 bp, Homo sapien
gctgcctgttgacctggtgtcatca

SEQ ID NO: 3783844 - DNA, 25 bp, Homo sapien
attccagcgaaaatcagcattgagg

SEQ ID NO: 3783845 - DNA, 25 bp, Homo sapien
tgtttgtgagcgtgtctactcaagt

SEQ ID NO: 3783846 - DNA, 25 bp, Homo sapien
gcttctaccctgttcaactgtgatg

SEQ ID NO: 3783847 - DNA, 25 bp, Homo sapien
tacaaaatagatgtgggcggtttct

SEQ ID NO: 3783848 - DNA, 25 bp, Homo sapien
tcttctttattctgtggaactggat

SEQ ID NO: 3783849 - DNA, 25 bp, Homo sapien
tccccactgccagagtggagattct

SEQ ID NO: 3783850 - DNA, 25 bp, Homo sapien
ctttattctgtggaactggattctg

SEQ ID NO: 3783851 - DNA, 25 bp, Homo sapien
tgccagagtggagattcttctttat

SEQ ID NO: 3783852 - DNA, 25 bp, Homo sapien
gcttctgggctaggagagacaccat

SEQ ID NO: 3783853 - DNA, 25 bp, Homo sapien
caaagtatgtgagtcagttatgatc

SEQ ID NO: 3783854 - DNA, 25 bp, Homo sapien
tgcatgccatgctagctcaaaaaac

SEQ ID NO: 3783855 - DNA, 25 bp, Homo sapien
tatgatcaattgtgccataatcgac

SEQ ID NO: 3783856 - DNA, 25 bp, Homo sapien
tgggcagccggccatagctgtcttc

SEQ ID NO: 3783857 - DNA, 25 bp, Homo sapien
ttagctttgtctctatcccaggaca

SEQ ID NO: 3783858 - DNA, 25 bp, Homo sapien
tcttcattcttggtgcaactcagag

SEQ ID NO: 3783859 - DNA, 25 bp, Homo sapien
actgccctgtagagaaatattcctc

SEQ ID NO: 3783860 - DNA, 25 bp, Homo sapien
attttctctctccttcttctctttt

SEQ ID NO: 3783861 - DNA, 25 bp, Homo sapien
tttctctctccttcttctctttttc

SEQ ID NO: 3783862 - DNA, 25 bp, Homo sapien
cattttctctctccttcttctcttt

SEQ ID NO: 3783863 - DNA, 25 bp, Homo sapien
ttctctctccttcttctctttttcc

SEQ ID NO: 3783864 - DNA, 25 bp, Homo sapien
tggctagatggcaggaatccacaaa

SEQ ID NO: 3783865 - DNA, 25 bp, Homo sapien
caaacacctgccaagatagtattgt

SEQ ID NO: 3783866 - DNA, 25 bp, Homo sapien
atccacaaacacctgccaagatagt

SEQ ID NO: 3783867 - DNA, 25 bp, Homo sapien
cctgccaagatagtattgtgatcat

SEQ ID NO: 3783868 - DNA, 25 bp, Homo sapien
ctcttgggctgttagataaaatatt

SEQ ID NO: 3783869 - DNA, 25 bp, Homo sapien
tgccattctcttgggctgttagata

SEQ ID NO: 3783870 - DNA, 25 bp, Homo sapien
tgggtttccataatgccattctctt

SEQ ID NO: 3783871 - DNA, 25 bp, Homo sapien
aaatatttacaacccatccctccat

SEQ ID NO: 3783872 - DNA, 25 bp, Homo sapien
ccttggacagttatggacagaagcc

SEQ ID NO: 3783873 - DNA, 25 bp, Homo sapien
gagatgcctctgcattttgcccaac

SEQ ID NO: 3783874 - DNA, 25 bp, Homo sapien
tctcattgcgtaaaagtctgtgccc

SEQ ID NO: 3783875 - DNA, 25 bp, Homo sapien
tccccttatgagttattcgcctgaa

SEQ ID NO: 3783876 - DNA, 25 bp, Homo sapien
gcacagtctgtgcagctcgaggacg

SEQ ID NO: 3783877 - DNA, 25 bp, Homo sapien
gctgtggagtgtgatgacgccacct

SEQ ID NO: 3783878 - DNA, 25 bp, Homo sapien
cctcttaggctgtgtgtgaaagtag

SEQ ID NO: 3783879 - DNA, 25 bp, Homo sapien
cctttgaggacggacgcacagtctg

SEQ ID NO: 3783880 - DNA, 25 bp, Homo sapien
cacagtggcggtgtaaagggtcaga

SEQ ID NO: 3783881 - DNA, 25 bp, Homo sapien
gagaagcacattacagccacagtgg

SEQ ID NO: 3783882 - DNA, 25 bp, Homo sapien
gtgtaaagggtcagactgaccactg

SEQ ID NO: 3783883 - DNA, 25 bp, Homo sapien
aagcacattacagccacagtggcgg

SEQ ID NO: 3783884 - DNA, 25 bp, Homo sapien
tgtcctttgcataacccaagtccag

SEQ ID NO: 3783885 - DNA, 25 bp, Homo sapien
aagatctgcagaggctattgtgtcc

SEQ ID NO: 3783886 - DNA, 25 bp, Homo sapien
tcaaagtctgttggcattgatggca

SEQ ID NO: 3783887 - DNA, 25 bp, Homo sapien
gcacagatttaccaattaactggag

SEQ ID NO: 3783888 - DNA, 25 bp, Homo sapien
ctggtgctaattggaaagggtacct

SEQ ID NO: 3783889 - DNA, 25 bp, Homo sapien
gggtacctggtcagcgcatttattt

SEQ ID NO: 3783890 - DNA, 25 bp, Homo sapien
cctggtcagcgcatttatttcactt

SEQ ID NO: 3783891 - DNA, 25 bp, Homo sapien
tggtgctaattggaaagggtacctg

SEQ ID NO: 3783892 - DNA, 25 bp, Homo sapien
ggctgtttcaagagtttccacggaa

SEQ ID NO: 3783893 - DNA, 25 bp, Homo sapien
taaacgcttaggatatcgcagcctg

SEQ ID NO: 3783894 - DNA, 25 bp, Homo sapien
cactgcaaagtgtggccgctacttg

SEQ ID NO: 3783895 - DNA, 25 bp, Homo sapien
tccacggaatgaaggtaaacgctta

SEQ ID NO: 3783896 - DNA, 25 bp, Homo sapien
tgacactggtccctctgccgggcat

SEQ ID NO: 3783897 - DNA, 25 bp, Homo sapien
ttgacactggtccctctgccgggca

SEQ ID NO: 3783898 - DNA, 25 bp, Homo sapien
tggttttctgaatgtggcctacagt

SEQ ID NO: 3783899 - DNA, 25 bp, Homo sapien
ggttttctgaatgtggcctacagtt

SEQ ID NO: 3783900 - DNA, 25 bp, Homo sapien
ggatcttcatattctttttcatcat

SEQ ID NO: 3783901 - DNA, 25 bp, Homo sapien
gatcttcatattctttttcatcata

SEQ ID NO: 3783902 - DNA, 25 bp, Homo sapien
tcttcatattctttttcatcataat

SEQ ID NO: 3783903 - DNA, 25 bp, Homo sapien
ttggatcttcatattctttttcatc

SEQ ID NO: 3783904 - DNA, 25 bp, Homo sapien
aaaaagaccattggaaagaaatgct

SEQ ID NO: 3783905 - DNA, 25 bp, Homo sapien
aaagaccattggaaagaaatgctgt

SEQ ID NO: 3783906 - DNA, 25 bp, Homo sapien
ctgtaaaagcagaaaaaaagaccat

SEQ ID NO: 3783907 - DNA, 25 bp, Homo sapien
agcagaaaaaaagaccattggaaag

SEQ ID NO: 3783908 - DNA, 25 bp, Homo sapien
gactcaacagctgctaagactacag

SEQ ID NO: 3783909 - DNA, 25 bp, Homo sapien
actcaacagctgctaagactacagc

SEQ ID NO: 3783910 - DNA, 25 bp, Homo sapien
gctgatgtccatgaccccttcgttt

SEQ ID NO: 3783911 - DNA, 25 bp, Homo sapien
aaacctgtgcgtatccatcataaac

SEQ ID NO: 3783912 - DNA, 25 bp, Homo sapien
tattctccctaagaagtaaggctcc

SEQ ID NO: 3783913 - DNA, 25 bp, Homo sapien
tcttggttgcatctgacaagtgtca

SEQ ID NO: 3783914 - DNA, 25 bp, Homo sapien
acatgtgttagttcccagcctgtgt

SEQ ID NO: 3783915 - DNA, 25 bp, Homo sapien
atgtgttagttcccagcctgtgtcc

SEQ ID NO: 3783916 - DNA, 25 bp, Homo sapien
gacatgtgttagttcccagcctgtg

SEQ ID NO: 3783917 - DNA, 25 bp, Homo sapien
catgtgttagttcccagcctgtgtc

SEQ ID NO: 3783918 - DNA, 25 bp, Homo sapien
tctgagctgcacacattgacttgac

SEQ ID NO: 3783919 - DNA, 25 bp, Homo sapien
cttggagaacaatcgagactggttg

SEQ ID NO: 3783920 - DNA, 25 bp, Homo sapien
gccagctactctgccgtggttgaag

SEQ ID NO: 3783921 - DNA, 25 bp, Homo sapien
gaatcagcgatgtttggctacccat

SEQ ID NO: 3783922 - DNA, 25 bp, Homo sapien
gggcctgtgggaactttttgtcatc

SEQ ID NO: 3783923 - DNA, 25 bp, Homo sapien
gaactttttgtcatctggggggaca

SEQ ID NO: 3783924 - DNA, 25 bp, Homo sapien
gtcatctggggggacaaaggctttc

SEQ ID NO: 3783925 - DNA, 25 bp, Homo sapien
atctggggggacaaaggctttcttg

SEQ ID NO: 3783926 - DNA, 25 bp, Homo sapien
caaagtggactttcctcgaggtgga

SEQ ID NO: 3783927 - DNA, 25 bp, Homo sapien
aagaagtgccgttagaataggaagg

SEQ ID NO: 3783928 - DNA, 25 bp, Homo sapien
ccctgtgctggtgttagattctctg

SEQ ID NO: 3783929 - DNA, 25 bp, Homo sapien
tctgtggcccattgatgagatgctc

SEQ ID NO: 3783930 - DNA, 25 bp, Homo sapien
cctactaggaacacgaaaatggttg

SEQ ID NO: 3783931 - DNA, 25 bp, Homo sapien
aacacgaaaatggttgtagaatgtg

SEQ ID NO: 3783932 - DNA, 25 bp, Homo sapien
gtgactctgtgttctatctgaatgg

SEQ ID NO: 3783933 - DNA, 25 bp, Homo sapien
ttctatctgaatgggggctgagact

SEQ ID NO: 3783934 - DNA, 25 bp, Homo sapien
cggtatctctattgatactgttaga

SEQ ID NO: 3783935 - DNA, 25 bp, Homo sapien
tttttcatcaagctcgttcattatt

SEQ ID NO: 3783936 - DNA, 25 bp, Homo sapien
tactacggtatctctattgatactg

SEQ ID NO: 3783937 - DNA, 25 bp, Homo sapien
cgttcattattactacggtatctct

SEQ ID NO: 3783938 - DNA, 25 bp, Homo sapien
tcagaatgcctttaacccagtgagc

SEQ ID NO: 3783939 - DNA, 25 bp, Homo sapien
tttaacccagtgagctgaagagcag

SEQ ID NO: 3783940 - DNA, 25 bp, Homo sapien
gaaaagcttgtgtactcagaatgcc

SEQ ID NO: 3783941 - DNA, 25 bp, Homo sapien
tgtataatcatggtcagcagaaaag

SEQ ID NO: 3783942 - DNA, 25 bp, Homo sapien
cagagatccctcacacaggatcact

SEQ ID NO: 3783943 - DNA, 25 bp, Homo sapien
cacacaggatcacttttctggctgg

SEQ ID NO: 3783944 - DNA, 25 bp, Homo sapien
acaggatcacttttctggctgggct

SEQ ID NO: 3783945 - DNA, 25 bp, Homo sapien
ctcacacaggatcacttttctggct

SEQ ID NO: 3783946 - DNA, 25 bp, Homo sapien
tgttgggctcaaaactttccacaca

SEQ ID NO: 3783947 - DNA, 25 bp, Homo sapien
ctccacgttgatttagcaggtatat

SEQ ID NO: 3783948 - DNA, 25 bp, Homo sapien
aaatcaagcttgtaaatgctccacg

SEQ ID NO: 3783949 - DNA, 25 bp, Homo sapien
tgtgagaggcctaataaaatccagt

SEQ ID NO: 3783950 - DNA, 25 bp, Homo sapien
tcccgcagccggtgttacttatcat

SEQ ID NO: 3783951 - DNA, 25 bp, Homo sapien
cgctctgtgattttctgtgcttttt

SEQ ID NO: 3783952 - DNA, 25 bp, Homo sapien
catagcagctcttcaaatctatcat

SEQ ID NO: 3783953 - DNA, 25 bp, Homo sapien
gtccatagcagctcttcaaatctat

SEQ ID NO: 3783954 - DNA, 25 bp, Homo sapien
ttccctgtccatagcagctcttcaa

SEQ ID NO: 3783955 - DNA, 25 bp, Homo sapien
tggctccatatgagctgcccgtggg

SEQ ID NO: 3783956 - DNA, 25 bp, Homo sapien
tccatatgagctgcccgtgggcagc

SEQ ID NO: 3783957 - DNA, 25 bp, Homo sapien
cgtgggcagcgggtaatgggtatca

SEQ ID NO: 3783958 - DNA, 25 bp, Homo sapien
taatgggtatcactgccctttcatc

SEQ ID NO: 3783959 - DNA, 25 bp, Homo sapien
gcctaatgatttggggaagtcttta

SEQ ID NO: 3783960 - DNA, 25 bp, Homo sapien
tgcgggtttggggttgcctaatgat

SEQ ID NO: 3783961 - DNA, 25 bp, Homo sapien
ggttgcctaatgatttggggaagtc

SEQ ID NO: 3783962 - DNA, 25 bp, Homo sapien
tggggaagtctttacaaggttgtga

SEQ ID NO: 3783963 - DNA, 25 bp, Homo sapien
tgacgagctcaagaacttttatctc

SEQ ID NO: 3783964 - DNA, 25 bp, Homo sapien
gcttgacgagctcaagaacttttat

SEQ ID NO: 3783965 - DNA, 25 bp, Homo sapien
ttatctctggtccacttttacccat

SEQ ID NO: 3783966 - DNA, 25 bp, Homo sapien
atgcttgacgagctcaagaactttt

SEQ ID NO: 3783967 - DNA, 25 bp, Homo sapien
cagggtgtctaccagcacctgggtg

SEQ ID NO: 3783968 - DNA, 25 bp, Homo sapien
tgagcagggtgtctaccagcacctg

SEQ ID NO: 3783969 - DNA, 25 bp, Homo sapien
agagagccccggccatgagcagggt

SEQ ID NO: 3783970 - DNA, 25 bp, Homo sapien
gccatgagcagggtgtctaccagca

SEQ ID NO: 3783971 - DNA, 25 bp, Homo sapien
tcttcagcatgtgacctcccgtgtg

SEQ ID NO: 3783972 - DNA, 25 bp, Homo sapien
ctgggttggactcctcagaagctga

SEQ ID NO: 3783973 - DNA, 25 bp, Homo sapien
cagctgtaaaatgggcgcttagatg

SEQ ID NO: 3783974 - DNA, 25 bp, Homo sapien
gacggctcatccacataacctcagt

SEQ ID NO: 3783975 - DNA, 25 bp, Homo sapien
caataaccaaacagtgcattccttg

SEQ ID NO: 3783976 - DNA, 25 bp, Homo sapien
gccaagcttgtcctgaacgttccta

SEQ ID NO: 3783977 - DNA, 25 bp, Homo sapien
cagcaggaaagaagtggctcagctt

SEQ ID NO: 3783978 - DNA, 25 bp, Homo sapien
agatctcttgttacatgcttgccaa

SEQ ID NO: 3783979 - DNA, 25 bp, Homo sapien
gaatcgcctctgagaatcttgtttg

SEQ ID NO: 3783980 - DNA, 25 bp, Homo sapien
ggtgccccagaatcgcctctgagaa

SEQ ID NO: 3783981 - DNA, 25 bp, Homo sapien
gacacctgttttaaccctccagcag

SEQ ID NO: 3783982 - DNA, 25 bp, Homo sapien
agccatttccacaccggtgccccag

SEQ ID NO: 3783983 - DNA, 25 bp, Homo sapien
cccagctgcacaacccactgcccat

SEQ ID NO: 3783984 - DNA, 25 bp, Homo sapien
tggctgcattgccattaaagggcag

SEQ ID NO: 3783985 - DNA, 25 bp, Homo sapien
gctgcattgccattaaagggcagga

SEQ ID NO: 3783986 - DNA, 25 bp, Homo sapien
cattgccattaaagggcaggaagct

SEQ ID NO: 3783987 - DNA, 25 bp, Homo sapien
ctgagagcccgaacttcaccttcaa

SEQ ID NO: 3783988 - DNA, 25 bp, Homo sapien
agctgcctgagagcccgaacttcac

SEQ ID NO: 3783989 - DNA, 25 bp, Homo sapien
agcccgaacttcaccttcaacagtg

SEQ ID NO: 3783990 - DNA, 25 bp, Homo sapien
tcagctgcctgagagcccgaacttc

SEQ ID NO: 3783991 - DNA, 25 bp, Homo sapien
gaagattgagacatcaacacagcag

SEQ ID NO: 3783992 - DNA, 25 bp, Homo sapien
acatcaacacagcagcaaaaatatc

SEQ ID NO: 3783993 - DNA, 25 bp, Homo sapien
ctgaagattgagacatcaacacagc

SEQ ID NO: 3783994 - DNA, 25 bp, Homo sapien
agacatcaacacagcagcaaaaata

SEQ ID NO: 3783995 - DNA, 25 bp, Homo sapien
tatgtttgactcagttgatcgacac

SEQ ID NO: 3783996 - DNA, 25 bp, Homo sapien
ttgtgacatcaaaggtcgtgctttg

SEQ ID NO: 3783997 - DNA, 25 bp, Homo sapien
cagttgatcgacacatgtatttgat

SEQ ID NO: 3783998 - DNA, 25 bp, Homo sapien
tcaaaggtcgtgctttgccttgttc

SEQ ID NO: 3783999 - DNA, 25 bp, Homo sapien
ggacacagggaagcagattgtgtct

SEQ ID NO: 3784000 - DNA, 25 bp, Homo sapien
gaggaggcttctgtcggtgtcagag

SEQ ID NO: 3784001 - DNA, 25 bp, Homo sapien
aggaggcttctgtcggtgtcagagc

SEQ ID NO: 3784002 - DNA, 25 bp, Homo sapien
agtttgttgttgggacacagggaag

SEQ ID NO: 3784003 - DNA, 25 bp, Homo sapien
ctggccccaaaactagcaggtgttc

SEQ ID NO: 3784004 - DNA, 25 bp, Homo sapien
cctggccccaaaactagcaggtgtt

SEQ ID NO: 3784005 - DNA, 25 bp, Homo sapien
ccctgctgtgccgactgcggagaaa

SEQ ID NO: 3784006 - DNA, 25 bp, Homo sapien
tgccgactgcggagaaacatacctg

SEQ ID NO: 3784007 - DNA, 25 bp, Homo sapien
tggccagaaatcgaataaggaatcc

SEQ ID NO: 3784008 - DNA, 25 bp, Homo sapien
tctttgcagaatagcttgcagtgtc

SEQ ID NO: 3784009 - DNA, 25 bp, Homo sapien
catcagtgatcacgcgtgggcaggc

SEQ ID NO: 3784010 - DNA, 25 bp, Homo sapien
tgggcaggcatgaggaacatcgttc

SEQ ID NO: 3784011 - DNA, 25 bp, Homo sapien
ctcttgtaatgacgaatccatgcat

SEQ ID NO: 3784012 - DNA, 25 bp, Homo sapien
tgtaatgacgaatccatgcatgcat

SEQ ID NO: 3784013 - DNA, 25 bp, Homo sapien
ttgtaatgacgaatccatgcatgca

SEQ ID NO: 3784014 - DNA, 25 bp, Homo sapien
atgacgaatccatgcatgcatgcta

SEQ ID NO: 3784015 - DNA, 25 bp, Homo sapien
cctggaagataccagctgtgctgac

SEQ ID NO: 3784016 - DNA, 25 bp, Homo sapien
tgtgctgacagcggttgtagccaga

SEQ ID NO: 3784017 - DNA, 25 bp, Homo sapien
acagcggttgtagccagaggtctct

SEQ ID NO: 3784018 - DNA, 25 bp, Homo sapien
gtctctggggatcgcctaccttctc

SEQ ID NO: 3784019 - DNA, 25 bp, Homo sapien
gtttcctttccagaatcccctctgc

SEQ ID NO: 3784020 - DNA, 25 bp, Homo sapien
ggtgattgcagttccttgcccggcg

SEQ ID NO: 3784021 - DNA, 25 bp, Homo sapien
ggtttgccctctctatctttccttc

SEQ ID NO: 3784022 - DNA, 25 bp, Homo sapien
tctttccttctcgtttcagatgtat

SEQ ID NO: 3784023 - DNA, 25 bp, Homo sapien
tgagtatgttgggttttttgacagt

SEQ ID NO: 3784024 - DNA, 25 bp, Homo sapien
ctgatctgaaagttggctcctctgg

SEQ ID NO: 3784025 - DNA, 25 bp, Homo sapien
cccagacttcaaaagtctggcagca

SEQ ID NO: 3784026 - DNA, 25 bp, Homo sapien
gctgccaattcccagacttcaaaag

SEQ ID NO: 3784027 - DNA, 25 bp, Homo sapien
tggaatagcagccacaaggtctgtg

SEQ ID NO: 3784028 - DNA, 25 bp, Homo sapien
gaagcttcggagttacaaatgccta

SEQ ID NO: 3784029 - DNA, 25 bp, Homo sapien
gataactcggtcctttgccaactag

SEQ ID NO: 3784030 - DNA, 25 bp, Homo sapien
ggatcgtcaaaatagcccaggagct

SEQ ID NO: 3784031 - DNA, 25 bp, Homo sapien
gaaaaatgccttcggcactgccaag

SEQ ID NO: 3784032 - DNA, 25 bp, Homo sapien
agtcagggcatgaacaaacaagggc

SEQ ID NO: 3784033 - DNA, 25 bp, Homo sapien
aaacctgttcactattgcatcctgg

SEQ ID NO: 3784034 - DNA, 25 bp, Homo sapien
tttttcctcataccagagtcagggc

SEQ ID NO: 3784035 - DNA, 25 bp, Homo sapien
gttacctagcacgtattaagggctc

SEQ ID NO: 3784036 - DNA, 25 bp, Homo sapien
tgtgtccacggcagctagcatgtta

SEQ ID NO: 3784037 - DNA, 25 bp, Homo sapien
caaatggcggaaccacctagtaggg

SEQ ID NO: 3784038 - DNA, 25 bp, Homo sapien
gattgactctttggccatgtaacac

SEQ ID NO: 3784039 - DNA, 25 bp, Homo sapien
tgacagagcgaaaccatgttaaaac

SEQ ID NO: 3784040 - DNA, 25 bp, Homo sapien
tatcagcattcaactgtaacaacta

SEQ ID NO: 3784041 - DNA, 25 bp, Homo sapien
gtggcctcagaatgtgtaaggagaa

SEQ ID NO: 3784042 - DNA, 25 bp, Homo sapien
aaaaaattgcgctgtgaaagttatc

SEQ ID NO: 3784043 - DNA, 25 bp, Homo sapien
ttgaggcaggttgtttaagaccagc

SEQ ID NO: 3784044 - DNA, 25 bp, Homo sapien
taacagaacccattgctacttaaaa

SEQ ID NO: 3784045 - DNA, 25 bp, Homo sapien
aatacatcttggtagtagaaaaaat

SEQ ID NO: 3784046 - DNA, 25 bp, Homo sapien
tgggcaacgtaacagaacccattgc

SEQ ID NO: 3784047 - DNA, 25 bp, Homo sapien
cagcacatagagtagttttcccaca

SEQ ID NO: 3784048 - DNA, 25 bp, Homo sapien
tccgctttgagggatgtaaccacat

SEQ ID NO: 3784049 - DNA, 25 bp, Homo sapien
tggtaacccacgctcttgcattgtg

SEQ ID NO: 3784050 - DNA, 25 bp, Homo sapien
taaaagtatatatcgggaccggcag

SEQ ID NO: 3784051 - DNA, 25 bp, Homo sapien
taacaatatggcaccctaaaaacca

SEQ ID NO: 3784052 - DNA, 25 bp, Homo sapien
agttactggaacgtgtaacagtagt

SEQ ID NO: 3784053 - DNA, 25 bp, Homo sapien
atatggcaccctaaaaaccaactgt

SEQ ID NO: 3784054 - DNA, 25 bp, Homo sapien
aacgcattcgtttattcaatgtaag

SEQ ID NO: 3784055 - DNA, 25 bp, Homo sapien
tgaggttgggcattcgctgcagaac

SEQ ID NO: 3784056 - DNA, 25 bp, Homo sapien
cattcgctgcagaactagcattttt

SEQ ID NO: 3784057 - DNA, 25 bp, Homo sapien
gttgggcattcgctgcagaactagc

SEQ ID NO: 3784058 - DNA, 25 bp, Homo sapien
tgggcattcgctgcagaactagcat

SEQ ID NO: 3784059 - DNA, 25 bp, Homo sapien
tactggtgcgtaggcgttccctggc

SEQ ID NO: 3784060 - DNA, 25 bp, Homo sapien
agaggtactggtgcgtaggcgttcc

SEQ ID NO: 3784061 - DNA, 25 bp, Homo sapien
tgtctggggatctccgatttctcct

SEQ ID NO: 3784062 - DNA, 25 bp, Homo sapien
ggtcagaggtactggtgcgtaggcg

SEQ ID NO: 3784063 - DNA, 25 bp, Homo sapien
aaagcgacagctgagagttggtgac

SEQ ID NO: 3784064 - DNA, 25 bp, Homo sapien
catcttctgagctgctaggctgtgc

SEQ ID NO: 3784065 - DNA, 25 bp, Homo sapien
cgtgctgagcaaagtgccagagtca

SEQ ID NO: 3784066 - DNA, 25 bp, Homo sapien
tcttcatggaaaaccttgccaggga

SEQ ID NO: 3784067 - DNA, 25 bp, Homo sapien
ttgtgacacggtcaaacatcatatt

SEQ ID NO: 3784068 - DNA, 25 bp, Homo sapien
aaacaatattgtgacacggtcaaac

SEQ ID NO: 3784069 - DNA, 25 bp, Homo sapien
catttggaatagaggcatgggatag

SEQ ID NO: 3784070 - DNA, 25 bp, Homo sapien
ccttcatttggaatagaggcatggg

SEQ ID NO: 3784071 - DNA, 25 bp, Homo sapien
tgatataggttattaaacatcacat

SEQ ID NO: 3784072 - DNA, 25 bp, Homo sapien
gatataggttattaaacatcacatt

SEQ ID NO: 3784073 - DNA, 25 bp, Homo sapien
ctgatataggttattaaacatcaca

SEQ ID NO: 3784074 - DNA, 25 bp, Homo sapien
tttgttgagtcactagtagctgaat

SEQ ID NO: 3784075 - DNA, 25 bp, Homo sapien
gattttgttgagtcactagtagctg

SEQ ID NO: 3784076 - DNA, 25 bp, Homo sapien
agattttgttgagtcactagtagct

SEQ ID NO: 3784077 - DNA, 25 bp, Homo sapien
ttttgttgagtcactagtagctgaa

SEQ ID NO: 3784078 - DNA, 25 bp, Homo sapien
aacatggtcagtattagccaatctt

SEQ ID NO: 3784079 - DNA, 25 bp, Homo sapien
agtattagccaatctttactgcttt

SEQ ID NO: 3784080 - DNA, 25 bp, Homo sapien
atagaacacagtggatagtcagagc

SEQ ID NO: 3784081 - DNA, 25 bp, Homo sapien
aacacagtggatagtcagagctcac

SEQ ID NO: 3784082 - DNA, 25 bp, Homo sapien
ttggccgccctagctacaattgaga

SEQ ID NO: 3784083 - DNA, 25 bp, Homo sapien
cattaccgtgtgatagactcctccc

SEQ ID NO: 3784084 - DNA, 25 bp, Homo sapien
agaccccagttccatagcagtgcag

SEQ ID NO: 3784085 - DNA, 25 bp, Homo sapien
gaactttgaagagtgttggccgccc

SEQ ID NO: 3784086 - DNA, 25 bp, Homo sapien
caacatcagtatagatttgcctgtg

SEQ ID NO: 3784087 - DNA, 25 bp, Homo sapien
gatttgcctgtgtcagtaagagctg

SEQ ID NO: 3784088 - DNA, 25 bp, Homo sapien
tgttcaacatcagtatagatttgcc

SEQ ID NO: 3784089 - DNA, 25 bp, Homo sapien
cagtatagatttgcctgtgtcagta

SEQ ID NO: 3784090 - DNA, 25 bp, Homo sapien
cactggctgggagtctactgtgctt

SEQ ID NO: 3784091 - DNA, 25 bp, Homo sapien
gctgggagtctactgtgctttcctc

SEQ ID NO: 3784092 - DNA, 25 bp, Homo sapien
actcctgtccttccaatgttggtga

SEQ ID NO: 3784093 - DNA, 25 bp, Homo sapien
ccaatgttggtgagtaaatgatcta

SEQ ID NO: 3784094 - DNA, 25 bp, Homo sapien
atattcattagatcagaaactgagc

SEQ ID NO: 3784095 - DNA, 25 bp, Homo sapien
tgtatattcattagatcagaaactg

SEQ ID NO: 3784096 - DNA, 25 bp, Homo sapien
tatattcattagatcagaaactgag

SEQ ID NO: 3784097 - DNA, 25 bp, Homo sapien
tattcattagatcagaaactgagct

SEQ ID NO: 3784098 - DNA, 25 bp, Homo sapien
gttgacattgttggcgcgccaggat

SEQ ID NO: 3784099 - DNA, 25 bp, Homo sapien
aactactgagtacaaatgctgacag

SEQ ID NO: 3784100 - DNA, 25 bp, Homo sapien
gtgtcccaaatgaaactactgagta

SEQ ID NO: 3784101 - DNA, 25 bp, Homo sapien
cgcaaagcggacaatagcaaagcag

SEQ ID NO: 3784102 - DNA, 25 bp, Homo sapien
ccttcttctgtgaaaaaccagtcat

SEQ ID NO: 3784103 - DNA, 25 bp, Homo sapien
aagaggctcttcagcaccttcttct

SEQ ID NO: 3784104 - DNA, 25 bp, Homo sapien
gcaccttcttctgtgaaaaaccagt

SEQ ID NO: 3784105 - DNA, 25 bp, Homo sapien
cttcttctgtgaaaaaccagtcatg

SEQ ID NO: 3784106 - DNA, 25 bp, Homo sapien
aagggtgggaccaaacactattgct

SEQ ID NO: 3784107 - DNA, 25 bp, Homo sapien
gttgtcttctgatgttcgaacaagg

SEQ ID NO: 3784108 - DNA, 25 bp, Homo sapien
gatgttcgaacaagggtgggaccaa

SEQ ID NO: 3784109 - DNA, 25 bp, Homo sapien
ggaccaaacactattgctaggtttc

SEQ ID NO: 3784110 - DNA, 25 bp, Homo sapien
tctgaattttctgccactgtcttca

SEQ ID NO: 3784111 - DNA, 25 bp, Homo sapien
tgccactgtcttcagatgagctgaa

SEQ ID NO: 3784112 - DNA, 25 bp, Homo sapien
ttttctgaattttctgccactgtct

SEQ ID NO: 3784113 - DNA, 25 bp, Homo sapien
cactgtcttcagatgagctgaaagg

SEQ ID NO: 3784114 - DNA, 25 bp, Homo sapien
aagtgtttcataatgatgttcaggc

SEQ ID NO: 3784115 - DNA, 25 bp, Homo sapien
ttaagtgtttcataatgatgttcag

SEQ ID NO: 3784116 - DNA, 25 bp, Homo sapien
gtgtttcataatgatgttcaggcaa

SEQ ID NO: 3784117 - DNA, 25 bp, Homo sapien
taatgatgttcaggcaaatcgtgaa

SEQ ID NO: 3784118 - DNA, 25 bp, Homo sapien
ttggcttcaataaaatcagcatatt

SEQ ID NO: 3784119 - DNA, 25 bp, Homo sapien
tcctgcttcctttgaccaagacatt

SEQ ID NO: 3784120 - DNA, 25 bp, Homo sapien
gacattttgtccttgttcaatttaa

SEQ ID NO: 3784121 - DNA, 25 bp, Homo sapien
ttcatctggtatctttcacgggagt

SEQ ID NO: 3784122 - DNA, 25 bp, Homo sapien
cattgtaccttatgatgtcagaagc

SEQ ID NO: 3784123 - DNA, 25 bp, Homo sapien
aaactgcttatcacattcaaatctc

SEQ ID NO: 3784124 - DNA, 25 bp, Homo sapien
catatccagttccaccaaaggggga

SEQ ID NO: 3784125 - DNA, 25 bp, Homo sapien
tcatatccagttccaccaaaggggg

SEQ ID NO: 3784126 - DNA, 25 bp, Homo sapien
caactaatttgcaacatatgtcaac

SEQ ID NO: 3784127 - DNA, 25 bp, Homo sapien
tcttgcatacttgagatggctgcat

SEQ ID NO: 3784128 - DNA, 25 bp, Homo sapien
cagccattcccttgttgagttcttc

SEQ ID NO: 3784129 - DNA, 25 bp, Homo sapien
tcatcttgtatatcaatatcagcca

SEQ ID NO: 3784130 - DNA, 25 bp, Homo sapien
tgatacgaatcctagcatgggtgtt

SEQ ID NO: 3784131 - DNA, 25 bp, Homo sapien
tacaggtcagaaatacttagggaaa

SEQ ID NO: 3784132 - DNA, 25 bp, Homo sapien
gagaatgtggaaaccgttccgctga

SEQ ID NO: 3784133 - DNA, 25 bp, Homo sapien
gatctgggaatagataaaacctgca

SEQ ID NO: 3784134 - DNA, 25 bp, Homo sapien
tcggacgccgaaagttcctgtagca

SEQ ID NO: 3784135 - DNA, 25 bp, Homo sapien
attagtatgagctggtgggcagtca

SEQ ID NO: 3784136 - DNA, 25 bp, Homo sapien
gcagtcatctagtcggacgccgaaa

SEQ ID NO: 3784137 - DNA, 25 bp, Homo sapien
ccgaaagttcctgtagcagttggct

SEQ ID NO: 3784138 - DNA, 25 bp, Homo sapien
actcttccttcggagagtgtgggct

SEQ ID NO: 3784139 - DNA, 25 bp, Homo sapien
ttccttcggagagtgtgggctttga

SEQ ID NO: 3784140 - DNA, 25 bp, Homo sapien
gcaaagtttgcctgatgctgagact

SEQ ID NO: 3784141 - DNA, 25 bp, Homo sapien
aagtttgcctgatgctgagactctg

SEQ ID NO: 3784142 - DNA, 25 bp, Homo sapien
taattagatccctgttagtgactcc

SEQ ID NO: 3784143 - DNA, 25 bp, Homo sapien
gactaattagatccctgttagtgac

SEQ ID NO: 3784144 - DNA, 25 bp, Homo sapien
ttagatccctgttagtgactccagt

SEQ ID NO: 3784145 - DNA, 25 bp, Homo sapien
ttcgactaattagatccctgttagt

SEQ ID NO: 3784146 - DNA, 25 bp, Homo sapien
cattgctagatttgcttgataaagt

SEQ ID NO: 3784147 - DNA, 25 bp, Homo sapien
gttaatgataagaaaatacttgagc

SEQ ID NO: 3784148 - DNA, 25 bp, Homo sapien
gcattcctgagtattaaaagagaac

SEQ ID NO: 3784149 - DNA, 25 bp, Homo sapien
tcctactgtgaaaataccttgatga

SEQ ID NO: 3784150 - DNA, 25 bp, Homo sapien
tgtaagagatgtctatcaagcaagc

SEQ ID NO: 3784151 - DNA, 25 bp, Homo sapien
gtaaagtgaatgaccccgaaggaca

SEQ ID NO: 3784152 - DNA, 25 bp, Homo sapien
tcggacgtggtgagtcgaaacacat

SEQ ID NO: 3784153 - DNA, 25 bp, Homo sapien
caagcaagcattaacactgatgggc

SEQ ID NO: 3784154 - DNA, 25 bp, Homo sapien
gtttatttgtcagggtctgcatttc

SEQ ID NO: 3784155 - DNA, 25 bp, Homo sapien
taatctggatatcatgccattttat

SEQ ID NO: 3784156 - DNA, 25 bp, Homo sapien
atggtttatttgtcagggtctgcat

SEQ ID NO: 3784157 - DNA, 25 bp, Homo sapien
tctggatatcatgccattttatgta

SEQ ID NO: 3784158 - DNA, 25 bp, Homo sapien
agccacccttccttggcagcatcac

SEQ ID NO: 3784159 - DNA, 25 bp, Homo sapien
gaggaagaatcttttctggacccag

SEQ ID NO: 3784160 - DNA, 25 bp, Homo sapien
aggaagaatcttttctggacccaga

SEQ ID NO: 3784161 - DNA, 25 bp, Homo sapien
gccacccttccttggcagcatcact

SEQ ID NO: 3784162 - DNA, 25 bp, Homo sapien
tcccttcagactagatacgtgctta

SEQ ID NO: 3784163 - DNA, 25 bp, Homo sapien
cagactagatacgtgcttaaaggac

SEQ ID NO: 3784164 - DNA, 25 bp, Homo sapien
cttgattcccttcagactagatacg

SEQ ID NO: 3784165 - DNA, 25 bp, Homo sapien
gattcccttcagactagatacgtgc

SEQ ID NO: 3784166 - DNA, 25 bp, Homo sapien
taatcatccagaccctcatcatatg

SEQ ID NO: 3784167 - DNA, 25 bp, Homo sapien
gtaatcatccagaccctcatcatat

SEQ ID NO: 3784168 - DNA, 25 bp, Homo sapien
tgtaatcatccagaccctcatcata

SEQ ID NO: 3784169 - DNA, 25 bp, Homo sapien
aggtagaggctgatataacagcaga

SEQ ID NO: 3784170 - DNA, 25 bp, Homo sapien
cagggatatgtgcaatatcatgatc

SEQ ID NO: 3784171 - DNA, 25 bp, Homo sapien
tcatgatcaatgctagggctagttg

SEQ ID NO: 3784172 - DNA, 25 bp, Homo sapien
tcaatgctagggctagttggttcat

SEQ ID NO: 3784173 - DNA, 25 bp, Homo sapien
agagactaacattgggcttactcat

SEQ ID NO: 3784174 - DNA, 25 bp, Homo sapien
gagaagagactaacattgggcttac

SEQ ID NO: 3784175 - DNA, 25 bp, Homo sapien
tgggagaagagactaacattgggct

SEQ ID NO: 3784176 - DNA, 25 bp, Homo sapien
aaggcgtgggagaagagactaacat

SEQ ID NO: 3784177 - DNA, 25 bp, Homo sapien
taaccaaaaggtcaatgctgtatct

SEQ ID NO: 3784178 - DNA, 25 bp, Homo sapien
tcaaagtcatctggagatttggtta

SEQ ID NO: 3784179 - DNA, 25 bp, Homo sapien
taacattcagcttcttcaaagtcat

SEQ ID NO: 3784180 - DNA, 25 bp, Homo sapien
tatcttaataaccaaaaggtcaatg

SEQ ID NO: 3784181 - DNA, 25 bp, Homo sapien
gaatgaggcaaacctagagaccctg

SEQ ID NO: 3784182 - DNA, 25 bp, Homo sapien
catataaatggcgtgctccctggag

SEQ ID NO: 3784183 - DNA, 25 bp, Homo sapien
aaaaaagcccctgcatcgcatgcct

SEQ ID NO: 3784184 - DNA, 25 bp, Homo sapien
gggcgctcttcacaggcattccata

SEQ ID NO: 3784185 - DNA, 25 bp, Homo sapien
ggataagatctttgagcagagaccc

SEQ ID NO: 3784186 - DNA, 25 bp, Homo sapien
tagaaaccagctgtacctgtccctg

SEQ ID NO: 3784187 - DNA, 25 bp, Homo sapien
ttctgtgtctgtgcgtgggatacct

SEQ ID NO: 3784188 - DNA, 25 bp, Homo sapien
gggcctttcagatcacgggaggatt

SEQ ID NO: 3784189 - DNA, 25 bp, Homo sapien
tacttcggactttcacaagaggtga

SEQ ID NO: 3784190 - DNA, 25 bp, Homo sapien
tatgtggacctctcgacgtgcatca

SEQ ID NO: 3784191 - DNA, 25 bp, Homo sapien
gacctgtcttgtgaaataccccgag

SEQ ID NO: 3784192 - DNA, 25 bp, Homo sapien
tgtgacatgcgtggaaggagctttc

SEQ ID NO: 3784193 - DNA, 25 bp, Homo sapien
tataggccctaccaggttgtgtcag

SEQ ID NO: 3784194 - DNA, 25 bp, Homo sapien
tcatgagaggtgcttcgacgtcgtc

SEQ ID NO: 3784195 - DNA, 25 bp, Homo sapien
ttctcagaaggcacaatgacagtcc

SEQ ID NO: 3784196 - DNA, 25 bp, Homo sapien
gacacactgcgttgccgtatctgga

SEQ ID NO: 3784197 - DNA, 25 bp, Homo sapien
tctattactaacaggcaggcatgca

SEQ ID NO: 3784198 - DNA, 25 bp, Homo sapien
acacagggactatgttcagcatctg

SEQ ID NO: 3784199 - DNA, 25 bp, Homo sapien
aattaagaccttcagcagccatgct

SEQ ID NO: 3784200 - DNA, 25 bp, Homo sapien
gagctcatcagtgcaacacagggac

SEQ ID NO: 3784201 - DNA, 25 bp, Homo sapien
tgctgtgacatcctttgtaaactgt

SEQ ID NO: 3784202 - DNA, 25 bp, Homo sapien
gtgctgtgacatcctttgtaaactg

SEQ ID NO: 3784203 - DNA, 25 bp, Homo sapien
cagtgctgtgacatcctttgtaaac

SEQ ID NO: 3784204 - DNA, 25 bp, Homo sapien
ctgtgacatcctttgtaaactgtag

SEQ ID NO: 3784205 - DNA, 25 bp, Homo sapien
ttttccatgctgattagaatcatac

SEQ ID NO: 3784206 - DNA, 25 bp, Homo sapien
tgtactgtctggtacagcatttccc

SEQ ID NO: 3784207 - DNA, 25 bp, Homo sapien
cccacaacatccttgtgtagtttta

SEQ ID NO: 3784208 - DNA, 25 bp, Homo sapien
gaatcataccaatacttttctgcaa

SEQ ID NO: 3784209 - DNA, 25 bp, Homo sapien
gatttctcaaaaccacgacgacact

SEQ ID NO: 3784210 - DNA, 25 bp, Homo sapien
tataaacttattcaccatggaggcc

SEQ ID NO: 3784211 - DNA, 25 bp, Homo sapien
taatagaagtatacggctggaacta

SEQ ID NO: 3784212 - DNA, 25 bp, Homo sapien
atagtctacattacagtcacaggtc

SEQ ID NO: 3784213 - DNA, 25 bp, Homo sapien
ctaacagccctgttttgcctattag

SEQ ID NO: 3784214 - DNA, 25 bp, Homo sapien
ttactagctcttgtgaattcaacag

SEQ ID NO: 3784215 - DNA, 25 bp, Homo sapien
caccgagcccgggtagaactaatat

SEQ ID NO: 3784216 - DNA, 25 bp, Homo sapien
gcccaaatggatactttacaacata

SEQ ID NO: 3784217 - DNA, 25 bp, Homo sapien
cctttggtccaaggatgaactagaa

SEQ ID NO: 3784218 - DNA, 25 bp, Homo sapien
gaaggcaacactaggacaaactctt

SEQ ID NO: 3784219 - DNA, 25 bp, Homo sapien
tgtcacttaattgcaaaaacttggc

SEQ ID NO: 3784220 - DNA, 25 bp, Homo sapien
gagagcattaagagttcactgtaga

SEQ ID NO: 3784221 - DNA, 25 bp, Homo sapien
taacactaagttccaatgttgtatc

SEQ ID NO: 3784222 - DNA, 25 bp, Homo sapien
aacactaagttccaatgttgtatca

SEQ ID NO: 3784223 - DNA, 25 bp, Homo sapien
cataacactaagttccaatgttgta

SEQ ID NO: 3784224 - DNA, 25 bp, Homo sapien
gcataacactaagttccaatgttgt

SEQ ID NO: 3784225 - DNA, 25 bp, Homo sapien
tttgaattaaagcaattacttggga

SEQ ID NO: 3784226 - DNA, 25 bp, Homo sapien
ccattgacttttataattcggtcac

SEQ ID NO: 3784227 - DNA, 25 bp, Homo sapien
attaaagcaattacttgggaatagg

SEQ ID NO: 3784228 - DNA, 25 bp, Homo sapien
tgggaataggttttgccaataacac

SEQ ID NO: 3784229 - DNA, 25 bp, Homo sapien
gggtaatacattaacagtacatcct

SEQ ID NO: 3784230 - DNA, 25 bp, Homo sapien
gcttaaaatacgacagatgatacat

SEQ ID NO: 3784231 - DNA, 25 bp, Homo sapien
taaagaaatcccacatgcatactaa

SEQ ID NO: 3784232 - DNA, 25 bp, Homo sapien
cttcatcttcccaatcatgtggggc

SEQ ID NO: 3784233 - DNA, 25 bp, Homo sapien
tcaaaagcaggtcctccttctttaa

SEQ ID NO: 3784234 - DNA, 25 bp, Homo sapien
taactagaatgcagaccagaaagac

SEQ ID NO: 3784235 - DNA, 25 bp, Homo sapien
gataaaggaatcaccaggcacagat

SEQ ID NO: 3784236 - DNA, 25 bp, Homo sapien
taactctaagaagtggccatgggct

SEQ ID NO: 3784237 - DNA, 25 bp, Homo sapien
tgggctaaactgcacatggacatgg

SEQ ID NO: 3784238 - DNA, 25 bp, Homo sapien
ttccaaagtaatggctgagagactg

SEQ ID NO: 3784239 - DNA, 25 bp, Homo sapien
cacccaccttagaagctgttgagaa

SEQ ID NO: 3784240 - DNA, 25 bp, Homo sapien
caaagtcttagaatgcagccagtac

SEQ ID NO: 3784241 - DNA, 25 bp, Homo sapien
ctgtggtagaaacttagagactgcc

SEQ ID NO: 3784242 - DNA, 25 bp, Homo sapien
tatggcggtgataataacacccacc

SEQ ID NO: 3784243 - DNA, 25 bp, Homo sapien
tcccctgggtatatcaagggatgac

SEQ ID NO: 3784244 - DNA, 25 bp, Homo sapien
cttaatcaacaacgcacaatgccag

SEQ ID NO: 3784245 - DNA, 25 bp, Homo sapien
gacatgaatgtgtgcagattagcat

SEQ ID NO: 3784246 - DNA, 25 bp, Homo sapien
tgtttccaatacatgggttccacag

SEQ ID NO: 3784247 - DNA, 25 bp, Homo sapien
ctcctctgtttccattttcttcatc

SEQ ID NO: 3784248 - DNA, 25 bp, Homo sapien
cattgttaccaagctgtcttgctgc

SEQ ID NO: 3784249 - DNA, 25 bp, Homo sapien
tacttggtctctttcattgttacca

SEQ ID NO: 3784250 - DNA, 25 bp, Homo sapien
ttgaagtttatctacttggtctctt

SEQ ID NO: 3784251 - DNA, 25 bp, Homo sapien
ttgctgccatgttatctacctctag

SEQ ID NO: 3784252 - DNA, 25 bp, Homo sapien
taactgttttgggacctggccagga

SEQ ID NO: 3784253 - DNA, 25 bp, Homo sapien
gccaggagaatgtttcatcttcaga

SEQ ID NO: 3784254 - DNA, 25 bp, Homo sapien
catcttcagacagtgatacagtttc

SEQ ID NO: 3784255 - DNA, 25 bp, Homo sapien
taatgtaaaaccaaagccttgagat

SEQ ID NO: 3784256 - DNA, 25 bp, Homo sapien
tagataacccttctgataccctggc

SEQ ID NO: 3784257 - DNA, 25 bp, Homo sapien
ggttctgagcacgaattcaatatcc

SEQ ID NO: 3784258 - DNA, 25 bp, Homo sapien
taaagagcactatggattaagaaac

SEQ ID NO: 3784259 - DNA, 25 bp, Homo sapien
accttatcagatagtccaacagcaa

SEQ ID NO: 3784260 - DNA, 25 bp, Homo sapien
ctgcttctctttggcgcaaaactcc

SEQ ID NO: 3784261 - DNA, 25 bp, Homo sapien
tcaggcttttatctgcctgactccc

SEQ ID NO: 3784262 - DNA, 25 bp, Homo sapien
catcttatgtgcaccttattggcac

SEQ ID NO: 3784263 - DNA, 25 bp, Homo sapien
tctgaaatccctttaaatcaggctt

SEQ ID NO: 3784264 - DNA, 25 bp, Homo sapien
tgccgctgatctgttagatcttata

SEQ ID NO: 3784265 - DNA, 25 bp, Homo sapien
ccgctgatctgttagatcttataac

SEQ ID NO: 3784266 - DNA, 25 bp, Homo sapien
gccgctgatctgttagatcttataa

SEQ ID NO: 3784267 - DNA, 25 bp, Homo sapien
cgctgatctgttagatcttataaca

SEQ ID NO: 3784268 - DNA, 25 bp, Homo sapien
ttggaactagtatggtatgaccgtc

SEQ ID NO: 3784269 - DNA, 25 bp, Homo sapien
atttcgttccttacattagggccag

SEQ ID NO: 3784270 - DNA, 25 bp, Homo sapien
gacaggatttgaatgtgtgcagcca

SEQ ID NO: 3784271 - DNA, 25 bp, Homo sapien
ggccagtttcatggtgatgcaacac

SEQ ID NO: 3784272 - DNA, 25 bp, Homo sapien
cttttgtaacactggaagatggcat

SEQ ID NO: 3784273 - DNA, 25 bp, Homo sapien
ttttcttttgtaacactggaagatg

SEQ ID NO: 3784274 - DNA, 25 bp, Homo sapien
tcttttgtaacactggaagatggca

SEQ ID NO: 3784275 - DNA, 25 bp, Homo sapien
ttcttttgtaacactggaagatggc

SEQ ID NO: 3784276 - DNA, 25 bp, Homo sapien
ggacaagctccttaacacaactgtg

SEQ ID NO: 3784277 - DNA, 25 bp, Homo sapien
taagttgtggctcgtggacaagctc

SEQ ID NO: 3784278 - DNA, 25 bp, Homo sapien
gaaggacatgcactctgactagact

SEQ ID NO: 3784279 - DNA, 25 bp, Homo sapien
gactgcccgggtctggattcttgat

SEQ ID NO: 3784280 - DNA, 25 bp, Homo sapien
cagagttggtccagctttgagttgt

SEQ ID NO: 3784281 - DNA, 25 bp, Homo sapien
ctgagctaatagcatccacagttcc

SEQ ID NO: 3784282 - DNA, 25 bp, Homo sapien
tccagcaaaggcaaacggcatgaag

SEQ ID NO: 3784283 - DNA, 25 bp, Homo sapien
ttaggcggaaacatcagagttggtc

SEQ ID NO: 3784284 - DNA, 25 bp, Homo sapien
tatatattgtaacaccaagctggga

SEQ ID NO: 3784285 - DNA, 25 bp, Homo sapien
cagtggtcaggacaaaatcaggtac

SEQ ID NO: 3784286 - DNA, 25 bp, Homo sapien
ttacagcctatacccagcacagtgg

SEQ ID NO: 3784287 - DNA, 25 bp, Homo sapien
tacaaaagatatacaccaatggccc

SEQ ID NO: 3784288 - DNA, 25 bp, Homo sapien
gtgtctctgctcatcccatatgcac

SEQ ID NO: 3784289 - DNA, 25 bp, Homo sapien
cacctgtggaaaaccagccatctgt

SEQ ID NO: 3784290 - DNA, 25 bp, Homo sapien
tctgtgcattttggcaatgcccgtt

SEQ ID NO: 3784291 - DNA, 25 bp, Homo sapien
tgtgtccctgcacatattagtgtct

SEQ ID NO: 3784292 - DNA, 25 bp, Homo sapien
ctcactgcaagttccatttcccggg

SEQ ID NO: 3784293 - DNA, 25 bp, Homo sapien
ctgcaagttccatttcccgggttca

SEQ ID NO: 3784294 - DNA, 25 bp, Homo sapien
ggctcactgcaagttccatttcccg

SEQ ID NO: 3784295 - DNA, 25 bp, Homo sapien
tcggctcactgcaagttccatttcc

SEQ ID NO: 3784296 - DNA, 25 bp, Homo sapien
tgagaaacatgatggccactctccc

SEQ ID NO: 3784297 - DNA, 25 bp, Homo sapien
cctgagaaacatgatggccactctc

SEQ ID NO: 3784298 - DNA, 25 bp, Homo sapien
gaattctcagtatgcaacctgagaa

SEQ ID NO: 3784299 - DNA, 25 bp, Homo sapien
ttctcagtatgcaacctgagaaaca

SEQ ID NO: 3784300 - DNA, 25 bp, Homo sapien
gaaaaccttgaattagtcatcaaca

SEQ ID NO: 3784301 - DNA, 25 bp, Homo sapien
tctcttgaaatctaaatgatctgac

SEQ ID NO: 3784302 - DNA, 25 bp, Homo sapien
tgacaacagtgggtacaacatgaca

SEQ ID NO: 3784303 - DNA, 25 bp, Homo sapien
attgtctaacccctgactgtgatcc

SEQ ID NO: 3784304 - DNA, 25 bp, Homo sapien
acagattgcacaacaaactccaatt

SEQ ID NO: 3784305 - DNA, 25 bp, Homo sapien
acaaactccaattgtggttgatcat

SEQ ID NO: 3784306 - DNA, 25 bp, Homo sapien
tccaattgtggttgatcatgcagtc

SEQ ID NO: 3784307 - DNA, 25 bp, Homo sapien
ccatgcacaatacagattgcacaac

SEQ ID NO: 3784308 - DNA, 25 bp, Homo sapien
taacttgagtacattgaaaggactc

SEQ ID NO: 3784309 - DNA, 25 bp, Homo sapien
gataatctagacactcaattctgct

SEQ ID NO: 3784310 - DNA, 25 bp, Homo sapien
cgtactgcaagctcaactcttacaa

SEQ ID NO: 3784311 - DNA, 25 bp, Homo sapien
caaactgaatccaaccgtactgcaa

SEQ ID NO: 3784312 - DNA, 25 bp, Homo sapien
cttggattcaagacgattttcatgc

SEQ ID NO: 3784313 - DNA, 25 bp, Homo sapien
tggattcaagacgattttcatgcct

SEQ ID NO: 3784314 - DNA, 25 bp, Homo sapien
ctccgccacttggattcaagacgat

SEQ ID NO: 3784315 - DNA, 25 bp, Homo sapien
ccacttggattcaagacgattttca

SEQ ID NO: 3784316 - DNA, 25 bp, Homo sapien
gcacaatacccaattttataagaac

SEQ ID NO: 3784317 - DNA, 25 bp, Homo sapien
taagaacatggcaacttaaaccata

SEQ ID NO: 3784318 - DNA, 25 bp, Homo sapien
aactattttagtgaaagcaatccaa

SEQ ID NO: 3784319 - DNA, 25 bp, Homo sapien
gccatcatccagattagattgtgaa

SEQ ID NO: 3784320 - DNA, 25 bp, Homo sapien
tctgggtactcactttgctgatggc

SEQ ID NO: 3784321 - DNA, 25 bp, Homo sapien
gcttctgccgaaatgccacttaatg

SEQ ID NO: 3784322 - DNA, 25 bp, Homo sapien
acttaatgatccctgctgctgctac

SEQ ID NO: 3784323 - DNA, 25 bp, Homo sapien
gataggccccactcaatacattaaa

SEQ ID NO: 3784324 - DNA, 25 bp, Homo sapien
catccggtgcaaaagaaagtgagac

SEQ ID NO: 3784325 - DNA, 25 bp, Homo sapien
gaacaaattacaggaaccgccaatg

SEQ ID NO: 3784326 - DNA, 25 bp, Homo sapien
gatgctagatgctaccctaaccagc

SEQ ID NO: 3784327 - DNA, 25 bp, Homo sapien
tagagccagcccttgtttcaaggac

SEQ ID NO: 3784328 - DNA, 25 bp, Homo sapien
agacagaccagtccgacgcgtggcc

SEQ ID NO: 3784329 - DNA, 25 bp, Homo sapien
ctcgcaggccttgagcttgtcacca

SEQ ID NO: 3784330 - DNA, 25 bp, Homo sapien
tcaccatctccctcagacagaccag

SEQ ID NO: 3784331 - DNA, 25 bp, Homo sapien
gcaggccttgagcttgtcaccatct

SEQ ID NO: 3784332 - DNA, 25 bp, Homo sapien
gggcagggctgttgaaacagacaac

SEQ ID NO: 3784333 - DNA, 25 bp, Homo sapien
cgtgccagggaataaaggttttcag

SEQ ID NO: 3784334 - DNA, 25 bp, Homo sapien
tttggagtccacattggacgtggcg

SEQ ID NO: 3784335 - DNA, 25 bp, Homo sapien
cagacaacgtgccagggaataaagg

SEQ ID NO: 3784336 - DNA, 25 bp, Homo sapien
tagagcagagggctgtgcatgttgt

SEQ ID NO: 3784337 - DNA, 25 bp, Homo sapien
aatgggatcacactttccaagcccc

SEQ ID NO: 3784338 - DNA, 25 bp, Homo sapien
ttatgcagccttcaagaaaaaatgt

SEQ ID NO: 3784339 - DNA, 25 bp, Homo sapien
tggctgttatgcagccttcaagaaa

SEQ ID NO: 3784340 - DNA, 25 bp, Homo sapien
tcgggcccggcggccgaagcgcggc

SEQ ID NO: 3784341 - DNA, 25 bp, Homo sapien
gcggcgagctgaagcggagacgctg

SEQ ID NO: 3784342 - DNA, 25 bp, Homo sapien
cggcgagctgaagcggagacgctgg

SEQ ID NO: 3784343 - DNA, 25 bp, Homo sapien
cagaggaagcgggacgagtggatcc

SEQ ID NO: 3784344 - DNA, 25 bp, Homo sapien
gagtggatccgcacggggctggccg

SEQ ID NO: 3784345 - DNA, 25 bp, Homo sapien
ccggctccgggacagcgcgccccgc

SEQ ID NO: 3784346 - DNA, 25 bp, Homo sapien
agcgggacgagtggatccgcacggg

SEQ ID NO: 3784347 - DNA, 25 bp, Homo sapien
tctgtcttgaataacacgggaccgg

SEQ ID NO: 3784348 - DNA, 25 bp, Homo sapien
gggacaagcctataacagcgacatc

SEQ ID NO: 3784349 - DNA, 25 bp, Homo sapien
ccgcgaacgccaagtgacagaagcg

SEQ ID NO: 3784350 - DNA, 25 bp, Homo sapien
tctcccaagcgctgaacggcagcgt

SEQ ID NO: 3784351 - DNA, 25 bp, Homo sapien
tgttagagtccaaaactcgctgtgg

SEQ ID NO: 3784352 - DNA, 25 bp, Homo sapien
taacaaaggctcctccaagacggag

SEQ ID NO: 3784353 - DNA, 25 bp, Homo sapien
gaaacagtgcctcctttgagagaca

SEQ ID NO: 3784354 - DNA, 25 bp, Homo sapien
tgtgtccgggcatgaaaaccatcag

SEQ ID NO: 3784355 - DNA, 25 bp, Homo sapien
tccagtcccgcgtttccataagagg

SEQ ID NO: 3784356 - DNA, 25 bp, Homo sapien
taagagggtcagcaaataaaaggag

SEQ ID NO: 3784357 - DNA, 25 bp, Homo sapien
ctgggtctaacagggttaatctctt

SEQ ID NO: 3784358 - DNA, 25 bp, Homo sapien
taacagggttaatctcttcctgaaa

SEQ ID NO: 3784359 - DNA, 25 bp, Homo sapien
agagttgctctgttgggttaatctc

SEQ ID NO: 3784360 - DNA, 25 bp, Homo sapien
agttgctctgttgggttaatctctt

SEQ ID NO: 3784361 - DNA, 25 bp, Homo sapien
tgctctgttgggttaatctctttaa

SEQ ID NO: 3784362 - DNA, 25 bp, Homo sapien
ttgctctgttgggttaatctcttta

SEQ ID NO: 3784363 - DNA, 25 bp, Homo sapien
aagggcctggtagcgaggcagagcc

SEQ ID NO: 3784364 - DNA, 25 bp, Homo sapien
tttgttcggacagcggattctctcg

SEQ ID NO: 3784365 - DNA, 25 bp, Homo sapien
ggaccacatccctgcggactctttg

SEQ ID NO: 3784366 - DNA, 25 bp, Homo sapien
tattttgaaaccacgcaagggcctg

SEQ ID NO: 3784367 - DNA, 25 bp, Homo sapien
aaggctcctcgtgcaaaatgttctg

SEQ ID NO: 3784368 - DNA, 25 bp, Homo sapien
tgtcactcgggcagtggcatgctca

SEQ ID NO: 3784369 - DNA, 25 bp, Homo sapien
cagatggttggttcactttccacaa

SEQ ID NO: 3784370 - DNA, 25 bp, Homo sapien
caatcaaaattgtaggcactatgct

SEQ ID NO: 3784371 - DNA, 25 bp, Homo sapien
tctgaatagcccagaggtgcgtaca

SEQ ID NO: 3784372 - DNA, 25 bp, Homo sapien
gataaactggctcgggcacaactgt

SEQ ID NO: 3784373 - DNA, 25 bp, Homo sapien
tgagtgaattccacggccgataaac

SEQ ID NO: 3784374 - DNA, 25 bp, Homo sapien
ggtgcgtacatcaaaggaggccact

SEQ ID NO: 3784375 - DNA, 25 bp, Homo sapien
tccctgtcctgccagagcttccatc

SEQ ID NO: 3784376 - DNA, 25 bp, Homo sapien
gtcctgccagagcttccatcctcat

SEQ ID NO: 3784377 - DNA, 25 bp, Homo sapien
cctgtcctgccagagcttccatcct

SEQ ID NO: 3784378 - DNA, 25 bp, Homo sapien
tgtcctgccagagcttccatcctca

SEQ ID NO: 3784379 - DNA, 25 bp, Homo sapien
tatcatgcgactttgagcaacccga

SEQ ID NO: 3784380 - DNA, 25 bp, Homo sapien
ggttttccgaacaagcttcagacta

SEQ ID NO: 3784381 - DNA, 25 bp, Homo sapien
tcgtccaggctgaatacaaggtttt

SEQ ID NO: 3784382 - DNA, 25 bp, Homo sapien
tctgaggattggagaaacggatgca

SEQ ID NO: 3784383 - DNA, 25 bp, Homo sapien
aggatccactgagcctggaattata

SEQ ID NO: 3784384 - DNA, 25 bp, Homo sapien
tgcccagattcaggctatttcttga

SEQ ID NO: 3784385 - DNA, 25 bp, Homo sapien
tggaattatagctcaatgttgtagc

SEQ ID NO: 3784386 - DNA, 25 bp, Homo sapien
acttgagttctgagtattggcttca

SEQ ID NO: 3784387 - DNA, 25 bp, Homo sapien
gtgacaattcagatacttagcccat

SEQ ID NO: 3784388 - DNA, 25 bp, Homo sapien
ttagctaggctaataggtctgcagt

SEQ ID NO: 3784389 - DNA, 25 bp, Homo sapien
cataacagcccttggtatggtcagt

SEQ ID NO: 3784390 - DNA, 25 bp, Homo sapien
tctaaacatgatgtagaaaagttgt

SEQ ID NO: 3784391 - DNA, 25 bp, Homo sapien
cagtgggagggtctgaaacttccaa

SEQ ID NO: 3784392 - DNA, 25 bp, Homo sapien
tttataaaggtcaatctctcgcccc

SEQ ID NO: 3784393 - DNA, 25 bp, Homo sapien
cagttgcaagtatcaggtccccagg

SEQ ID NO: 3784394 - DNA, 25 bp, Homo sapien
aagatatgaatcaaggcacgccacc

SEQ ID NO: 3784395 - DNA, 25 bp, Homo sapien
ggtgatctgtccttcttggccttcc

SEQ ID NO: 3784396 - DNA, 25 bp, Homo sapien
tgatctgtccttcttggccttccaa

SEQ ID NO: 3784397 - DNA, 25 bp, Homo sapien
gatgggggttttgacatgttggcca

SEQ ID NO: 3784398 - DNA, 25 bp, Homo sapien
tcaggtgatctgtccttcttggcct

SEQ ID NO: 3784399 - DNA, 25 bp, Homo sapien
gctagaacctaataacaatacgcca

SEQ ID NO: 3784400 - DNA, 25 bp, Homo sapien
cacatttaggacagggcataacagt

SEQ ID NO: 3784401 - DNA, 25 bp, Homo sapien
caatacgccacatacggttcagaac

SEQ ID NO: 3784402 - DNA, 25 bp, Homo sapien
gagcattgaaagcactcgcccctaa

SEQ ID NO: 3784403 - DNA, 25 bp, Homo sapien
taaacacagttgagtacatccatgc

SEQ ID NO: 3784404 - DNA, 25 bp, Homo sapien
gacataccgtcatcacataccggaa

SEQ ID NO: 3784405 - DNA, 25 bp, Homo sapien
cgagcaaagctcgtttcataacatc

SEQ ID NO: 3784406 - DNA, 25 bp, Homo sapien
agctccaatcaagagccccgagcaa

SEQ ID NO: 3784407 - DNA, 25 bp, Homo sapien
tcacaaggcggagtgtttaatttgg

SEQ ID NO: 3784408 - DNA, 25 bp, Homo sapien
taatagctgcattcccggtataggg

SEQ ID NO: 3784409 - DNA, 25 bp, Homo sapien
gatagcattgctgagtcacaaggcg

SEQ ID NO: 3784410 - DNA, 25 bp, Homo sapien
cttcccaagtacaggcgtaaatatg

SEQ ID NO: 3784411 - DNA, 25 bp, Homo sapien
cgtgctcattgatgacgcatatgtg

SEQ ID NO: 3784412 - DNA, 25 bp, Homo sapien
tttttctttaccgtgctcattgatg

SEQ ID NO: 3784413 - DNA, 25 bp, Homo sapien
cgatatttttctttaccgtgctcat

SEQ ID NO: 3784414 - DNA, 25 bp, Homo sapien
agactcgatatttttctttaccgtg

SEQ ID NO: 3784415 - DNA, 25 bp, Homo sapien
attgtaatctaaggcatatcccacc

SEQ ID NO: 3784416 - DNA, 25 bp, Homo sapien
tattcattgtaatctaaggcatatc

SEQ ID NO: 3784417 - DNA, 25 bp, Homo sapien
gaagtattcattgtaatctaaggca

SEQ ID NO: 3784418 - DNA, 25 bp, Homo sapien
ttcattgtaatctaaggcatatccc

SEQ ID NO: 3784419 - DNA, 25 bp, Homo sapien
ttcacaagaagaaaacgactggttc

SEQ ID NO: 3784420 - DNA, 25 bp, Homo sapien
tgtacttgggtacagccagtgggct

SEQ ID NO: 3784421 - DNA, 25 bp, Homo sapien
ccacagtgactatgaccaacgatgc

SEQ ID NO: 3784422 - DNA, 25 bp, Homo sapien
ccagtgggcttatagcctgggcaaa

SEQ ID NO: 3784423 - DNA, 25 bp, Homo sapien
gcataagaatccctctaaacctcca

SEQ ID NO: 3784424 - DNA, 25 bp, Homo sapien
caattcaggcttgctaaaggtcacc

SEQ ID NO: 3784425 - DNA, 25 bp, Homo sapien
tgcgttgtctggtaatagttccgga

SEQ ID NO: 3784426 - DNA, 25 bp, Homo sapien
taaaggtcaccattgtgcgttgtct

SEQ ID NO: 3784427 - DNA, 25 bp, Homo sapien
tcagtccagcgggatcaggtcttcc

SEQ ID NO: 3784428 - DNA, 25 bp, Homo sapien
cagtccagcgggatcaggtcttcct

SEQ ID NO: 3784429 - DNA, 25 bp, Homo sapien
cagcgggatcaggtcttcctctact

SEQ ID NO: 3784430 - DNA, 25 bp, Homo sapien
tccagcgggatcaggtcttcctcta

SEQ ID NO: 3784431 - DNA, 25 bp, Homo sapien
ggtctaaagccgtcacttctggatg

SEQ ID NO: 3784432 - DNA, 25 bp, Homo sapien
agtcaggtctaaagccgtcacttct

SEQ ID NO: 3784433 - DNA, 25 bp, Homo sapien
gtcaggtctaaagccgtcacttctg

SEQ ID NO: 3784434 - DNA, 25 bp, Homo sapien
aaagccgtcacttctggatgttctc

SEQ ID NO: 3784435 - DNA, 25 bp, Homo sapien
gctaccttaatcatgttgggcttgt

SEQ ID NO: 3784436 - DNA, 25 bp, Homo sapien
tcatgttgggcttgtatttctctat

SEQ ID NO: 3784437 - DNA, 25 bp, Homo sapien
ctggctaccttaatcatgttgggct

SEQ ID NO: 3784438 - DNA, 25 bp, Homo sapien
cttaatcatgttgggcttgtatttc

SEQ ID NO: 3784439 - DNA, 25 bp, Homo sapien
ggacagataaattcaacaaaatgca

SEQ ID NO: 3784440 - DNA, 25 bp, Homo sapien
aaaggacagataaattcaacaaaat

SEQ ID NO: 3784441 - DNA, 25 bp, Homo sapien
gcaaaaaggacagataaattcaaca

SEQ ID NO: 3784442 - DNA, 25 bp, Homo sapien
acagataaattcaacaaaatgcatt

SEQ ID NO: 3784443 - DNA, 25 bp, Homo sapien
tggcgcacacaggcaattgtgtaac

SEQ ID NO: 3784444 - DNA, 25 bp, Homo sapien
tcctgaaggaaacgtggccatttgc

SEQ ID NO: 3784445 - DNA, 25 bp, Homo sapien
tattagtccactactgccataggga

SEQ ID NO: 3784446 - DNA, 25 bp, Homo sapien
tgtttgatgagacaagcgtgctcct

SEQ ID NO: 3784447 - DNA, 25 bp, Homo sapien
taaagtcgcccacaaatactgttgc

SEQ ID NO: 3784448 - DNA, 25 bp, Homo sapien
tgaaatcagggacgctatctggccc

SEQ ID NO: 3784449 - DNA, 25 bp, Homo sapien
taaatttggagagcatgcacccagt

SEQ ID NO: 3784450 - DNA, 25 bp, Homo sapien
aatttggttcagtgagctagtttcc

SEQ ID NO: 3784451 - DNA, 25 bp, Homo sapien
ttgcacagccacgaaaatccctggg

SEQ ID NO: 3784452 - DNA, 25 bp, Homo sapien
catcatgggttcagctgtgacagcc

SEQ ID NO: 3784453 - DNA, 25 bp, Homo sapien
cgtgctcggtaaatgcatcatgggt

SEQ ID NO: 3784454 - DNA, 25 bp, Homo sapien
cattgctaatggagaccgtgctcgg

SEQ ID NO: 3784455 - DNA, 25 bp, Homo sapien
tctcttttctgtgttagtcacaaac

SEQ ID NO: 3784456 - DNA, 25 bp, Homo sapien
ctatggaggagtaccttgaggcttg

SEQ ID NO: 3784457 - DNA, 25 bp, Homo sapien
cgttggttttgggtacatgacagtg

SEQ ID NO: 3784458 - DNA, 25 bp, Homo sapien
tatttggagggaatgatcgttggtt

SEQ ID NO: 3784459 - DNA, 25 bp, Homo sapien
tgataacctttcacggagaggctga

SEQ ID NO: 3784460 - DNA, 25 bp, Homo sapien
aagaatgagtgaacagcgtgggtca

SEQ ID NO: 3784461 - DNA, 25 bp, Homo sapien
gtagcagcctactatcctaaggcag

SEQ ID NO: 3784462 - DNA, 25 bp, Homo sapien
cattgctgttaaccatcgtcgctct

SEQ ID NO: 3784463 - DNA, 25 bp, Homo sapien
ctgaaatgcaggtcaccgatgcccc

SEQ ID NO: 3784464 - DNA, 25 bp, Homo sapien
aatgcggtctgagcacagttacatg

SEQ ID NO: 3784465 - DNA, 25 bp, Homo sapien
gacctcaatgcggtctgagcacagt

SEQ ID NO: 3784466 - DNA, 25 bp, Homo sapien
cccagacctcaatgcggtctgagca

SEQ ID NO: 3784467 - DNA, 25 bp, Homo sapien
cagcgttgaaagatcatcgcctccg

SEQ ID NO: 3784468 - DNA, 25 bp, Homo sapien
tttccagccagcgttgaaagatcat

SEQ ID NO: 3784469 - DNA, 25 bp, Homo sapien
atcgcctccgattatctgcatctca

SEQ ID NO: 3784470 - DNA, 25 bp, Homo sapien
agatcatcgcctccgattatctgca

SEQ ID NO: 3784471 - DNA, 25 bp, Homo sapien
caccagtaggacagttttgccaatg

SEQ ID NO: 3784472 - DNA, 25 bp, Homo sapien
cacatggttcaggtagggccaggcc

SEQ ID NO: 3784473 - DNA, 25 bp, Homo sapien
caagaatgctgtgatgttgcaatcc

SEQ ID NO: 3784474 - DNA, 25 bp, Homo sapien
catgctgaaccaggaaacgtcttta

SEQ ID NO: 3784475 - DNA, 25 bp, Homo sapien
tcagaggcataagttgaaatggaca

SEQ ID NO: 3784476 - DNA, 25 bp, Homo sapien
aggagaaatcaacatctccgtagga

SEQ ID NO: 3784477 - DNA, 25 bp, Homo sapien
agaaatcaacatctccgtaggaatg

SEQ ID NO: 3784478 - DNA, 25 bp, Homo sapien
cagaggcataagttgaaatggacag

SEQ ID NO: 3784479 - DNA, 25 bp, Homo sapien
tgtacttattggctctccctggacc

SEQ ID NO: 3784480 - DNA, 25 bp, Homo sapien
gtttgtacttattggctctccctgg

SEQ ID NO: 3784481 - DNA, 25 bp, Homo sapien
tacttattggctctccctggaccca

SEQ ID NO: 3784482 - DNA, 25 bp, Homo sapien
tttgtacttattggctctccctgga

SEQ ID NO: 3784483 - DNA, 25 bp, Homo sapien
tggtttttctagagagctatttaca

SEQ ID NO: 3784484 - DNA, 25 bp, Homo sapien
agagctatttacagtcagcagggca

SEQ ID NO: 3784485 - DNA, 25 bp, Homo sapien
cagtcagcagggcatggagtgatcc

SEQ ID NO: 3784486 - DNA, 25 bp, Homo sapien
tttctagagagctatttacagtcag

SEQ ID NO: 3784487 - DNA, 25 bp, Homo sapien
tttgactgaatctatcttcatgtcc

SEQ ID NO: 3784488 - DNA, 25 bp, Homo sapien
cagcatttgactgaatctatcttca

SEQ ID NO: 3784489 - DNA, 25 bp, Homo sapien
tgactgaatctatcttcatgtccat

SEQ ID NO: 3784490 - DNA, 25 bp, Homo sapien
cttccagcatttgactgaatctatc

SEQ ID NO: 3784491 - DNA, 25 bp, Homo sapien
tcagaaggtatagtcttggaggcat

SEQ ID NO: 3784492 - DNA, 25 bp, Homo sapien
gcaggacggcctccccagataatga

SEQ ID NO: 3784493 - DNA, 25 bp, Homo sapien
gatattggccatcctaaatcaacca

SEQ ID NO: 3784494 - DNA, 25 bp, Homo sapien
taggggtctcagcaggacggcctcc

SEQ ID NO: 3784495 - DNA, 25 bp, Homo sapien
gataaatccactggtccacaagcag

SEQ ID NO: 3784496 - DNA, 25 bp, Homo sapien
gccaagtaggtgacacagtcctggt

SEQ ID NO: 3784497 - DNA, 25 bp, Homo sapien
tattgaccattcgtatacgagtgac

SEQ ID NO: 3784498 - DNA, 25 bp, Homo sapien
gaaaatgacaccgaggccaagtagg

SEQ ID NO: 3784499 - DNA, 25 bp, Homo sapien
aggtgggttttgtctgtcacagtca

SEQ ID NO: 3784500 - DNA, 25 bp, Homo sapien
aaggtgggttttgtctgtcacagtc

SEQ ID NO: 3784501 - DNA, 25 bp, Homo sapien
ggtgggttttgtctgtcacagtcat

SEQ ID NO: 3784502 - DNA, 25 bp, Homo sapien
tctggacaggcaaggtgggttttgt

SEQ ID NO: 3784503 - DNA, 25 bp, Homo sapien
gccacgaagcccatgtgtaggtttt

SEQ ID NO: 3784504 - DNA, 25 bp, Homo sapien
cacgaagcccatgtgtaggttttcc

SEQ ID NO: 3784505 - DNA, 25 bp, Homo sapien
ccacgaagcccatgtgtaggttttc

SEQ ID NO: 3784506 - DNA, 25 bp, Homo sapien
gagctacctgctcccgtgtgagcat

SEQ ID NO: 3784507 - DNA, 25 bp, Homo sapien
tctgagctacctgctcccgtgtgag

SEQ ID NO: 3784508 - DNA, 25 bp, Homo sapien
tgagctacctgctcccgtgtgagca

SEQ ID NO: 3784509 - DNA, 25 bp, Homo sapien
gctctgagctacctgctcccgtgtg

SEQ ID NO: 3784510 - DNA, 25 bp, Homo sapien
tgttattggctttactgttagttcg

SEQ ID NO: 3784511 - DNA, 25 bp, Homo sapien
ggcactgttattggctttactgtta

SEQ ID NO: 3784512 - DNA, 25 bp, Homo sapien
gctgtggcactgttattggctttac

SEQ ID NO: 3784513 - DNA, 25 bp, Homo sapien
tattggctttactgttagttcgtct

SEQ ID NO: 3784514 - DNA, 25 bp, Homo sapien
tcttggtaactgaaaccggatgtgg

SEQ ID NO: 3784515 - DNA, 25 bp, Homo sapien
tgtggaaacagggaatgagcacttg

SEQ ID NO: 3784516 - DNA, 25 bp, Homo sapien
gacagtgagccctagaatggtccag

SEQ ID NO: 3784517 - DNA, 25 bp, Homo sapien
tgctactgtacacctcactggatct

SEQ ID NO: 3784518 - DNA, 25 bp, Homo sapien
ctccagagggtatttggagattctt

SEQ ID NO: 3784519 - DNA, 25 bp, Homo sapien
tctccagagggtatttggagattct

SEQ ID NO: 3784520 - DNA, 25 bp, Homo sapien
tccagagggtatttggagattcttg

SEQ ID NO: 3784521 - DNA, 25 bp, Homo sapien
gcctgatcaaccctagcgatcaatg

SEQ ID NO: 3784522 - DNA, 25 bp, Homo sapien
tgatgccacagccagatagccctca

SEQ ID NO: 3784523 - DNA, 25 bp, Homo sapien
tagccagcccgatcagcctgatcaa

SEQ ID NO: 3784524 - DNA, 25 bp, Homo sapien
gagacacctacctagccagcccgat

SEQ ID NO: 3784525 - DNA, 25 bp, Homo sapien
gttctctattgggtattagtgacat

SEQ ID NO: 3784526 - DNA, 25 bp, Homo sapien
tagctgaccctttgggtaactgcat

SEQ ID NO: 3784527 - DNA, 25 bp, Homo sapien
cattgcacagttttaaattgcaaga

SEQ ID NO: 3784528 - DNA, 25 bp, Homo sapien
gtttataagatgattcattgcacag

SEQ ID NO: 3784529 - DNA, 25 bp, Homo sapien
acaagcacagataacaagagctgac

SEQ ID NO: 3784530 - DNA, 25 bp, Homo sapien
gactgatttaaaccctttgttctga

SEQ ID NO: 3784531 - DNA, 25 bp, Homo sapien
taacaagagctgactgatttaaacc

SEQ ID NO: 3784532 - DNA, 25 bp, Homo sapien
cagataacaagagctgactgattta

SEQ ID NO: 3784533 - DNA, 25 bp, Homo sapien
tccgaatttttctggatttggcctc

SEQ ID NO: 3784534 - DNA, 25 bp, Homo sapien
aatataataagggtcagggccaagt

SEQ ID NO: 3784535 - DNA, 25 bp, Homo sapien
aaatataataagggtcagggccaag

SEQ ID NO: 3784536 - DNA, 25 bp, Homo sapien
caaatataataagggtcagggccaa

SEQ ID NO: 3784537 - DNA, 25 bp, Homo sapien
aaaaattgcactcttcattttcata

SEQ ID NO: 3784538 - DNA, 25 bp, Homo sapien
cattttcataacattattgattctt

SEQ ID NO: 3784539 - DNA, 25 bp, Homo sapien
tcataacattattgattcttttatc

SEQ ID NO: 3784540 - DNA, 25 bp, Homo sapien
tttaaaaattgcactcttcattttc

SEQ ID NO: 3784541 - DNA, 25 bp, Homo sapien
ttcggctgatgttcttaaggtgttc

SEQ ID NO: 3784542 - DNA, 25 bp, Homo sapien
taaggtgttctacgagatcagcaca

SEQ ID NO: 3784543 - DNA, 25 bp, Homo sapien
gacaaatcgatctgaatttcggctg

SEQ ID NO: 3784544 - DNA, 25 bp, Homo sapien
cacacacaggaccatgatgtcacta

SEQ ID NO: 3784545 - DNA, 25 bp, Homo sapien
tccacaatgataccatgagggatga

SEQ ID NO: 3784546 - DNA, 25 bp, Homo sapien
caatgataccatgagggatgaggac

SEQ ID NO: 3784547 - DNA, 25 bp, Homo sapien
ctgtccacaatgataccatgaggga

SEQ ID NO: 3784548 - DNA, 25 bp, Homo sapien
cacaatgataccatgagggatgagg

SEQ ID NO: 3784549 - DNA, 25 bp, Homo sapien
aattcaagtcataccctggccaatc

SEQ ID NO: 3784550 - DNA, 25 bp, Homo sapien
ctgtgggtacgtgaataaattcaag

SEQ ID NO: 3784551 - DNA, 25 bp, Homo sapien
ataaattcaagtcataccctggcca

SEQ ID NO: 3784552 - DNA, 25 bp, Homo sapien
aagtcataccctggccaatcatcca

SEQ ID NO: 3784553 - DNA, 25 bp, Homo sapien
aaacataacaaaagagtatcacttg

SEQ ID NO: 3784554 - DNA, 25 bp, Homo sapien
tggtattttttcatcagaaatttgt

SEQ ID NO: 3784555 - DNA, 25 bp, Homo sapien
ttggttatggtattttttcatcaga

SEQ ID NO: 3784556 - DNA, 25 bp, Homo sapien
aacataacaaaagagtatcacttga

SEQ ID NO: 3784557 - DNA, 25 bp, Homo sapien
atgagctccttctggcggagacttt

SEQ ID NO: 3784558 - DNA, 25 bp, Homo sapien
tgttctgtcagaacatgagctcctt

SEQ ID NO: 3784559 - DNA, 25 bp, Homo sapien
ccttctggcggagactttttctgat

SEQ ID NO: 3784560 - DNA, 25 bp, Homo sapien
gtgttctgtcagaacatgagctcct

SEQ ID NO: 3784561 - DNA, 25 bp, Homo sapien
tcgcccgtagtctggcgcctcctcg

SEQ ID NO: 3784562 - DNA, 25 bp, Homo sapien
acgcctcgcccgtagtctggcgcct

SEQ ID NO: 3784563 - DNA, 25 bp, Homo sapien
cctcgcccgtagtctggcgcctcct

SEQ ID NO: 3784564 - DNA, 25 bp, Homo sapien
acgacgcctcgcccgtagtctggcg

SEQ ID NO: 3784565 - DNA, 25 bp, Homo sapien
gggaagacggcgcgggaaggagcag

SEQ ID NO: 3784566 - DNA, 25 bp, Homo sapien
ggaagacggcgcgggaaggagcagg

SEQ ID NO: 3784567 - DNA, 25 bp, Homo sapien
agggaagacggcgcgggaaggagca

SEQ ID NO: 3784568 - DNA, 25 bp, Homo sapien
gagcagctgccaagccgctaccgct

SEQ ID NO: 3784569 - DNA, 25 bp, Homo sapien
ctgccggatggtcgcgtgcagcccc

SEQ ID NO: 3784570 - DNA, 25 bp, Homo sapien
ctaccgctccccctgagcgcgggcc

SEQ ID NO: 3784571 - DNA, 25 bp, Homo sapien
cgccccctgccggatggtcgcgtgc

SEQ ID NO: 3784572 - DNA, 25 bp, Homo sapien
gttttgcaagaacatctggtcagat

SEQ ID NO: 3784573 - DNA, 25 bp, Homo sapien
cagttttgcaagaacatctggtcag

SEQ ID NO: 3784574 - DNA, 25 bp, Homo sapien
agttttgcaagaacatctggtcaga

SEQ ID NO: 3784575 - DNA, 25 bp, Homo sapien
gtcagcagcaactttgcctggtgtc

SEQ ID NO: 3784576 - DNA, 25 bp, Homo sapien
tagtgggtccaatgctaatgttgtg

SEQ ID NO: 3784577 - DNA, 25 bp, Homo sapien
catatgatgttcaccagcattggct

SEQ ID NO: 3784578 - DNA, 25 bp, Homo sapien
ctgtgttaataagcatagtgggtcc

SEQ ID NO: 3784579 - DNA, 25 bp, Homo sapien
tgtggctggtattaatggcattaac

SEQ ID NO: 3784580 - DNA, 25 bp, Homo sapien
ccagtgctataaaggaaggccagat

SEQ ID NO: 3784581 - DNA, 25 bp, Homo sapien
gaaccatgtgtgcagatctcagagg

SEQ ID NO: 3784582 - DNA, 25 bp, Homo sapien
tacctcagtactatgggaatgccag

SEQ ID NO: 3784583 - DNA, 25 bp, Homo sapien
ccaggcagctatgtaggatgagaga

SEQ ID NO: 3784584 - DNA, 25 bp, Homo sapien
gagagaatctgatcagtcactggtc

SEQ ID NO: 3784585 - DNA, 25 bp, Homo sapien
tctatccaagtttgggatcccgtgg

SEQ ID NO: 3784586 - DNA, 25 bp, Homo sapien
ggtgtctactcccaagtgactgcag

SEQ ID NO: 3784587 - DNA, 25 bp, Homo sapien
cgtggtagggatcacctttccagga

SEQ ID NO: 3784588 - DNA, 25 bp, Homo sapien
ggcaacaatgttcatctaggacaac

SEQ ID NO: 3784589 - DNA, 25 bp, Homo sapien
taggacaacactgtagaccatagag

SEQ ID NO: 3784590 - DNA, 25 bp, Homo sapien
gaccatagagaaaagtctagattct

SEQ ID NO: 3784591 - DNA, 25 bp, Homo sapien
acatttaaggcaactcccactcatg

SEQ ID NO: 3784592 - DNA, 25 bp, Homo sapien
gaaaaaagcctgaaagactcccata

SEQ ID NO: 3784593 - DNA, 25 bp, Homo sapien
tgagtgactgcagaaaagggttcct

SEQ ID NO: 3784594 - DNA, 25 bp, Homo sapien
tgtccagaggataaaaaccagtgta

SEQ ID NO: 3784595 - DNA, 25 bp, Homo sapien
gcttacttagcgatgcaaacgggaa

SEQ ID NO: 3784596 - DNA, 25 bp, Homo sapien
acaatgtgttggagacagtttagag

SEQ ID NO: 3784597 - DNA, 25 bp, Homo sapien
caagaaggcacgtgttactatttcc

SEQ ID NO: 3784598 - DNA, 25 bp, Homo sapien
atttccagttcaaaatacttaacag

SEQ ID NO: 3784599 - DNA, 25 bp, Homo sapien
actgcaaatgtcatgggccacagga

SEQ ID NO: 3784600 - DNA, 25 bp, Homo sapien
ttatatgtggaaaacgtgacactag

SEQ ID NO: 3784601 - DNA, 25 bp, Homo sapien
tcttcttgtgtaagtgaataactca

SEQ ID NO: 3784602 - DNA, 25 bp, Homo sapien
gaattacattgtggaactggaacac

SEQ ID NO: 3784603 - DNA, 25 bp, Homo sapien
gcatattgcctaagcattctgatta

SEQ ID NO: 3784604 - DNA, 25 bp, Homo sapien
caattatgccaatgtcgtgttctag

SEQ ID NO: 3784605 - DNA, 25 bp, Homo sapien
gaccgagagggactggaattcttta

SEQ ID NO: 3784606 - DNA, 25 bp, Homo sapien
ctctgcttgcggatcttctttggta

SEQ ID NO: 3784607 - DNA, 25 bp, Homo sapien
gaattctttatgcacctcttcccag

SEQ ID NO: 3784608 - DNA, 25 bp, Homo sapien
gatttgctatcatcacatcaaaggg

SEQ ID NO: 3784609 - DNA, 25 bp, Homo sapien
gggtaactctgtagcgaccgtaatg

SEQ ID NO: 3784610 - DNA, 25 bp, Homo sapien
tcataaggcgtccagtggatgattt

SEQ ID NO: 3784611 - DNA, 25 bp, Homo sapien
tgtagcgaccgtaatgggaagctga

SEQ ID NO: 3784612 - DNA, 25 bp, Homo sapien
tccctttcttcatcggagagccttt

SEQ ID NO: 3784613 - DNA, 25 bp, Homo sapien
tacatatgtattcaggtgtgacacc

SEQ ID NO: 3784614 - DNA, 25 bp, Homo sapien
tataacgatcatagtcttcttgggc

SEQ ID NO: 3784615 - DNA, 25 bp, Homo sapien
tatttcctcgtttcgcttacatatg

SEQ ID NO: 3784616 - DNA, 25 bp, Homo sapien
cccatgacaggatgatcagtcttca

SEQ ID NO: 3784617 - DNA, 25 bp, Homo sapien
tattgatgtactttggaactagtcc

SEQ ID NO: 3784618 - DNA, 25 bp, Homo sapien
ggctttttagccactcccatgatga

SEQ ID NO: 3784619 - DNA, 25 bp, Homo sapien
cccatgatgatatcagctgcatttg

SEQ ID NO: 3784620 - DNA, 25 bp, Homo sapien
ctttttgggcacgttccgatcaaag

SEQ ID NO: 3784621 - DNA, 25 bp, Homo sapien
catgagatatgggttgagagaggat

SEQ ID NO: 3784622 - DNA, 25 bp, Homo sapien
ttcatgagatatgggttgagagagg

SEQ ID NO: 3784623 - DNA, 25 bp, Homo sapien
tcatgagatatgggttgagagagga

SEQ ID NO: 3784624 - DNA, 25 bp, Homo sapien
tttcatgagatatgggttgagagag

SEQ ID NO: 3784625 - DNA, 25 bp, Homo sapien
ttaatattaaaaataaagcatgata

SEQ ID NO: 3784626 - DNA, 25 bp, Homo sapien
ctgctaatgcttttaatattaaaaa

SEQ ID NO: 3784627 - DNA, 25 bp, Homo sapien
tattaaaaataaagcatgataaaac

SEQ ID NO: 3784628 - DNA, 25 bp, Homo sapien
taaaaataaagcatgataaaaccta

SEQ ID NO: 3784629 - DNA, 25 bp, Homo sapien
acttttgctggtcccatagttttca

SEQ ID NO: 3784630 - DNA, 25 bp, Homo sapien
cttcaacttttgctggtcccatagt

SEQ ID NO: 3784631 - DNA, 25 bp, Homo sapien
ggtacttcaacttttgctggtccca

SEQ ID NO: 3784632 - DNA, 25 bp, Homo sapien
caacttttgctggtcccatagtttt

SEQ ID NO: 3784633 - DNA, 25 bp, Homo sapien
gtcatcttttacagttgccttaaaa

SEQ ID NO: 3784634 - DNA, 25 bp, Homo sapien
atcttttacagttgccttaaaaatg

SEQ ID NO: 3784635 - DNA, 25 bp, Homo sapien
tttacagttgccttaaaaatggata

SEQ ID NO: 3784636 - DNA, 25 bp, Homo sapien
ttacagttgccttaaaaatggatat

SEQ ID NO: 3784637 - DNA, 25 bp, Homo sapien
taaaatggtcatctcacagcgccag

SEQ ID NO: 3784638 - DNA, 25 bp, Homo sapien
caaaaagacggtaaactctgaggcg

SEQ ID NO: 3784639 - DNA, 25 bp, Homo sapien
gttctaagaagtccctacagatggg

SEQ ID NO: 3784640 - DNA, 25 bp, Homo sapien
catgacttcccattgactctgaggc

SEQ ID NO: 3784641 - DNA, 25 bp, Homo sapien
tattattaaaaattccagtatatgt

SEQ ID NO: 3784642 - DNA, 25 bp, Homo sapien
ccattcttgtttcaagtgatagtct

SEQ ID NO: 3784643 - DNA, 25 bp, Homo sapien
aattaatactgagtattccccattc

SEQ ID NO: 3784644 - DNA, 25 bp, Homo sapien
atatgtatgcttaattaatactgag

SEQ ID NO: 3784645 - DNA, 25 bp, Homo sapien
tcaagtcactgggtatgaggttata

SEQ ID NO: 3784646 - DNA, 25 bp, Homo sapien
actcagaagagcacgttggatccat

SEQ ID NO: 3784647 - DNA, 25 bp, Homo sapien
cactcagaagagcacgttggatcca

SEQ ID NO: 3784648 - DNA, 25 bp, Homo sapien
tgggtatgaggttataaatgcactc

SEQ ID NO: 3784649 - DNA, 25 bp, Homo sapien
ttctctccggattgctaagcgtcgt

SEQ ID NO: 3784650 - DNA, 25 bp, Homo sapien
taagcgtcgttgactgtgcggttgc

SEQ ID NO: 3784651 - DNA, 25 bp, Homo sapien
ctctctcgggaagaaaacaccctat

SEQ ID NO: 3784652 - DNA, 25 bp, Homo sapien
tcttcttcgccttctgaaggaccac

SEQ ID NO: 3784653 - DNA, 25 bp, Homo sapien
gatcggagtgctcggataggctaca

SEQ ID NO: 3784654 - DNA, 25 bp, Homo sapien
taaggtttttgtgagcaggccccaa

SEQ ID NO: 3784655 - DNA, 25 bp, Homo sapien
tgcgcaggcgtcacccaataaggtt

SEQ ID NO: 3784656 - DNA, 25 bp, Homo sapien
taggctacagtgagaaaggagagtc

SEQ ID NO: 3784657 - DNA, 25 bp, Homo sapien
gctttagcggctcgtggacactgct

SEQ ID NO: 3784658 - DNA, 25 bp, Homo sapien
tacggtgctccgtctcctgtggagg

SEQ ID NO: 3784659 - DNA, 25 bp, Homo sapien
tactcgctggtcatctcaactctgc

SEQ ID NO: 3784660 - DNA, 25 bp, Homo sapien
aactctgcgcgcatttttcctgctg

SEQ ID NO: 3784661 - DNA, 25 bp, Homo sapien
tatggaacctctcactgttttgtgg

SEQ ID NO: 3784662 - DNA, 25 bp, Homo sapien
ctagactgggcttgagctcatggcc

SEQ ID NO: 3784663 - DNA, 25 bp, Homo sapien
gaagtctctccgtagaataagcgct

SEQ ID NO: 3784664 - DNA, 25 bp, Homo sapien
gggtcttgacgtcctaatcagccaa

SEQ ID NO: 3784665 - DNA, 25 bp, Homo sapien
tctggttaacttgctaagatcctga

SEQ ID NO: 3784666 - DNA, 25 bp, Homo sapien
aatagatcccacaataaaccactga

SEQ ID NO: 3784667 - DNA, 25 bp, Homo sapien
tattgggcagccttaatggaacatt

SEQ ID NO: 3784668 - DNA, 25 bp, Homo sapien
tatatgccgtttatgactcctctct

SEQ ID NO: 3784669 - DNA, 25 bp, Homo sapien
cagtcgtggagttcacaccaagcag

SEQ ID NO: 3784670 - DNA, 25 bp, Homo sapien
aatgggttagcgcatcaaggtctcc

SEQ ID NO: 3784671 - DNA, 25 bp, Homo sapien
ctgagttataaagggacgggtaatg

SEQ ID NO: 3784672 - DNA, 25 bp, Homo sapien
aagttctgaatctgagcattctgag

SEQ ID NO: 3784673 - DNA, 25 bp, Homo sapien
gggtgatttaccatacaggccactt

SEQ ID NO: 3784674 - DNA, 25 bp, Homo sapien
gccaagttgcttccctgtagtataa

SEQ ID NO: 3784675 - DNA, 25 bp, Homo sapien
tggtattatgcaccttccctcctgg

SEQ ID NO: 3784676 - DNA, 25 bp, Homo sapien
ctgcattctgggcataggcatagcc

SEQ ID NO: 3784677 - DNA, 25 bp, Homo sapien
tctcataacacacactccaacaggg

SEQ ID NO: 3784678 - DNA, 25 bp, Homo sapien
cagaaattggtccacactgctctaa

SEQ ID NO: 3784679 - DNA, 25 bp, Homo sapien
aatttctcaaatagatccgcagcag

SEQ ID NO: 3784680 - DNA, 25 bp, Homo sapien
cagggagccaaagaataccatgacc

SEQ ID NO: 3784681 - DNA, 25 bp, Homo sapien
tctaaggccccctattaggctggct

SEQ ID NO: 3784682 - DNA, 25 bp, Homo sapien
gagacaaggatatctctaaggcccc

SEQ ID NO: 3784683 - DNA, 25 bp, Homo sapien
taaggccccctattaggctggctgc

SEQ ID NO: 3784684 - DNA, 25 bp, Homo sapien
gatgagacaaggatatctctaaggc

SEQ ID NO: 3784685 - DNA, 25 bp, Homo sapien
tgaaatcgaccctggtttgcagcta

SEQ ID NO: 3784686 - DNA, 25 bp, Homo sapien
catgctccgtggtgaacaatctcca

SEQ ID NO: 3784687 - DNA, 25 bp, Homo sapien
gctatatggttgatgctgccagaca

SEQ ID NO: 3784688 - DNA, 25 bp, Homo sapien
cataggtgttggacacgtgtggcca

SEQ ID NO: 3784689 - DNA, 25 bp, Homo sapien
cctttgtttcgggtagtgctcttat

SEQ ID NO: 3784690 - DNA, 25 bp, Homo sapien
tggcagcctgtctgcgccttgactc

SEQ ID NO: 3784691 - DNA, 25 bp, Homo sapien
cagggtggcagcctgtctgcgcctt

SEQ ID NO: 3784692 - DNA, 25 bp, Homo sapien
ttgactcctctacgtcagcactgct

SEQ ID NO: 3784693 - DNA, 25 bp, Homo sapien
gactttctggtaagataggaatggg

SEQ ID NO: 3784694 - DNA, 25 bp, Homo sapien
ggaaggactttctggtaagatagga

SEQ ID NO: 3784695 - DNA, 25 bp, Homo sapien
tctacagtagcttcctatcgtcttc

SEQ ID NO: 3784696 - DNA, 25 bp, Homo sapien
gaatgggttttagcgaatgtctaca

SEQ ID NO: 3784697 - DNA, 25 bp, Homo sapien
gcaccactgcagaggtaggttctgc

SEQ ID NO: 3784698 - DNA, 25 bp, Homo sapien
cagaggtaggttctgctggtgccaa

SEQ ID NO: 3784699 - DNA, 25 bp, Homo sapien
atgtttccagccaaaggcacctgca

SEQ ID NO: 3784700 - DNA, 25 bp, Homo sapien
tctgctggtgccaaatactctgcaa

SEQ ID NO: 3784701 - DNA, 25 bp, Homo sapien
tttgcataatgctctgtgtgtgagt

SEQ ID NO: 3784702 - DNA, 25 bp, Homo sapien
tgtccatcttgtgcctgctttgcat

SEQ ID NO: 3784703 - DNA, 25 bp, Homo sapien
tgcataatgctctgtgtgtgagtgc

SEQ ID NO: 3784704 - DNA, 25 bp, Homo sapien
ctgcagaatcggagccagtgggata

SEQ ID NO: 3784705 - DNA, 25 bp, Homo sapien
ccaaatttcagtttcaggaccagtt

SEQ ID NO: 3784706 - DNA, 25 bp, Homo sapien
tcacgaatcagcttgtcatatctgg

SEQ ID NO: 3784707 - DNA, 25 bp, Homo sapien
tctgcattaacaggaagatctccac

SEQ ID NO: 3784708 - DNA, 25 bp, Homo sapien
tctttccacatcatggattttactt

SEQ ID NO: 3784709 - DNA, 25 bp, Homo sapien
gacattcacgcttggcaacaggcta

SEQ ID NO: 3784710 - DNA, 25 bp, Homo sapien
ggcaacaggctaaggttgagcacct

SEQ ID NO: 3784711 - DNA, 25 bp, Homo sapien
aaggttgagcaccttgattcctgtc

SEQ ID NO: 3784712 - DNA, 25 bp, Homo sapien
gaaacagacattcacgcttggcaac

SEQ ID NO: 3784713 - DNA, 25 bp, Homo sapien
ctttcaggatcttaggtgccttctc

SEQ ID NO: 3784714 - DNA, 25 bp, Homo sapien
actagggggcggctagacatttcga

SEQ ID NO: 3784715 - DNA, 25 bp, Homo sapien
caggatcttaggtgccttctctaca

SEQ ID NO: 3784716 - DNA, 25 bp, Homo sapien
tagggggcggctagacatttcgatt

SEQ ID NO: 3784717 - DNA, 25 bp, Homo sapien
gctgaactgcccacttaatggtgca

SEQ ID NO: 3784718 - DNA, 25 bp, Homo sapien
aatgacgaccggaagagtggcctgt

SEQ ID NO: 3784719 - DNA, 25 bp, Homo sapien
ctatgttgacacctattcctgggca

SEQ ID NO: 3784720 - DNA, 25 bp, Homo sapien
taagagacattctgtgatctggccc

SEQ ID NO: 3784721 - DNA, 25 bp, Homo sapien
taactgacaacaagaaagatgattt

SEQ ID NO: 3784722 - DNA, 25 bp, Homo sapien
tctctccttaaagcacagctggtag

SEQ ID NO: 3784723 - DNA, 25 bp, Homo sapien
gcatacatttttacacgttcccctc

SEQ ID NO: 3784724 - DNA, 25 bp, Homo sapien
tactccctcagctaagatgagccta

SEQ ID NO: 3784725 - DNA, 25 bp, Homo sapien
tacaagggtttggttgcggccaagc

SEQ ID NO: 3784726 - DNA, 25 bp, Homo sapien
gtttgcggccaaacctaaaggctgc

SEQ ID NO: 3784727 - DNA, 25 bp, Homo sapien
gctgattgacagaggagccgaccaa

SEQ ID NO: 3784728 - DNA, 25 bp, Homo sapien
taaaggacgtcttcgctcctcggga

SEQ ID NO: 3784729 - DNA, 25 bp, Homo sapien
aacgcgcctcaatgagagcggcggt

SEQ ID NO: 3784730 - DNA, 25 bp, Homo sapien
ttctgaacgcgcctcaatgagagcg

SEQ ID NO: 3784731 - DNA, 25 bp, Homo sapien
tggagcagcgtcttcggcggccgcg

SEQ ID NO: 3784732 - DNA, 25 bp, Homo sapien
cagcagcttctgaacgcgcctcaat

SEQ ID NO: 3784733 - DNA, 25 bp, Homo sapien
ctgactccagccgctgggagcgcga

SEQ ID NO: 3784734 - DNA, 25 bp, Homo sapien
ccagccgctgggagcgcgaggccat

SEQ ID NO: 3784735 - DNA, 25 bp, Homo sapien
gactccagccgctgggagcgcgagg

SEQ ID NO: 3784736 - DNA, 25 bp, Homo sapien
actccagccgctgggagcgcgaggc

SEQ ID NO: 3784737 - DNA, 25 bp, Homo sapien
agaaactcgccgaggaggtgcccat

SEQ ID NO: 3784738 - DNA, 25 bp, Homo sapien
ctccaggctgcgaggtgcgtaatcc

SEQ ID NO: 3784739 - DNA, 25 bp, Homo sapien
tttctgcgacggtagcttagccacc

SEQ ID NO: 3784740 - DNA, 25 bp, Homo sapien
ccacaggtgacttgatttctgcgac

SEQ ID NO: 3784741 - DNA, 25 bp, Homo sapien
gcagaacttgcaggacgacctggat

SEQ ID NO: 3784742 - DNA, 25 bp, Homo sapien
ttcaagtggtctccgccttatctgg

SEQ ID NO: 3784743 - DNA, 25 bp, Homo sapien
tgatgctgcagagcaataagtcgcg

SEQ ID NO: 3784744 - DNA, 25 bp, Homo sapien
ccttatctggagtgcgagaacggga

SEQ ID NO: 3784745 - DNA, 25 bp, Homo sapien
gatgttcccagcaactgagccaagc

SEQ ID NO: 3784746 - DNA, 25 bp, Homo sapien
ttcaccagtggctatcgccatcttg

SEQ ID NO: 3784747 - DNA, 25 bp, Homo sapien
caagctggctgttttagatgttccc

SEQ ID NO: 3784748 - DNA, 25 bp, Homo sapien
ggagcctaataagtcagttaaggac

SEQ ID NO: 3784749 - DNA, 25 bp, Homo sapien
caagacgtttatgtgtattcatcca

SEQ ID NO: 3784750 - DNA, 25 bp, Homo sapien
ccaagacgtttatgtgtattcatcc

SEQ ID NO: 3784751 - DNA, 25 bp, Homo sapien
acgtttatgtgtattcatccaggac

SEQ ID NO: 3784752 - DNA, 25 bp, Homo sapien
agacgtttatgtgtattcatccagg

SEQ ID NO: 3784753 - DNA, 25 bp, Homo sapien
tgtttcaaatcccatcacaagtgga

SEQ ID NO: 3784754 - DNA, 25 bp, Homo sapien
tggaaggcctttcccacaatgctat

SEQ ID NO: 3784755 - DNA, 25 bp, Homo sapien
tctgcttataaattactgcatatgt

SEQ ID NO: 3784756 - DNA, 25 bp, Homo sapien
cacaagtggatctttttggaaggcc

SEQ ID NO: 3784757 - DNA, 25 bp, Homo sapien
tggatttctgggggcaggttccttc

SEQ ID NO: 3784758 - DNA, 25 bp, Homo sapien
tgggggcaggttccttctttatctg

SEQ ID NO: 3784759 - DNA, 25 bp, Homo sapien
tctgggggcaggttccttctttatc

SEQ ID NO: 3784760 - DNA, 25 bp, Homo sapien
gggcaggttccttctttatctgaaa

SEQ ID NO: 3784761 - DNA, 25 bp, Homo sapien
gcagcaggagaagtatgggatacat

SEQ ID NO: 3784762 - DNA, 25 bp, Homo sapien
ttgcagaggcatttgggacacagag

SEQ ID NO: 3784763 - DNA, 25 bp, Homo sapien
gttctttccatcataccgtgctgcc

SEQ ID NO: 3784764 - DNA, 25 bp, Homo sapien
ggagcctggtactgtatttgcagag

SEQ ID NO: 3784765 - DNA, 25 bp, Homo sapien
acatagggatctgggcctgtgtcta

SEQ ID NO: 3784766 - DNA, 25 bp, Homo sapien
tcctactgtagcatgtgcacggcct

SEQ ID NO: 3784767 - DNA, 25 bp, Homo sapien
gcaaatgtctgttggaagaccttgg

SEQ ID NO: 3784768 - DNA, 25 bp, Homo sapien
tagcctaaagtctttgcggcaaatg

SEQ ID NO: 3784769 - DNA, 25 bp, Homo sapien
aaatgtatctggtgtgctttctgga

SEQ ID NO: 3784770 - DNA, 25 bp, Homo sapien
tctggtgagactaaaggaaagccgt

SEQ ID NO: 3784771 - DNA, 25 bp, Homo sapien
cgtacttgacagcttcatctggaaa

SEQ ID NO: 3784772 - DNA, 25 bp, Homo sapien
gcatcccatgaaatcacactggtga

SEQ ID NO: 3784773 - DNA, 25 bp, Homo sapien
ttgtcccattacacaggttgccttg

SEQ ID NO: 3784774 - DNA, 25 bp, Homo sapien
gaagtttcgtggctttagatcttta

SEQ ID NO: 3784775 - DNA, 25 bp, Homo sapien
attacacaggttgccttgtcactct

SEQ ID NO: 3784776 - DNA, 25 bp, Homo sapien
tatatatggcataaggatccagctt

SEQ ID NO: 3784777 - DNA, 25 bp, Homo sapien
ttttggcttcacataagctttctta

SEQ ID NO: 3784778 - DNA, 25 bp, Homo sapien
tcttggtccctccattttggcttca

SEQ ID NO: 3784779 - DNA, 25 bp, Homo sapien
cataagctttcttatgcctctccat

SEQ ID NO: 3784780 - DNA, 25 bp, Homo sapien
cttggatcttggtccctccattttg

SEQ ID NO: 3784781 - DNA, 25 bp, Homo sapien
cctagcaagtagcttcaggaaggac

SEQ ID NO: 3784782 - DNA, 25 bp, Homo sapien
gcagcttgtgtacccttgagtgaag

SEQ ID NO: 3784783 - DNA, 25 bp, Homo sapien
ttgacctagcaagtagcttcaggaa

SEQ ID NO: 3784784 - DNA, 25 bp, Homo sapien
cctgatagtatgtttagaggttcta

SEQ ID NO: 3784785 - DNA, 25 bp, Homo sapien
catctatcttagtatggattctgtc

SEQ ID NO: 3784786 - DNA, 25 bp, Homo sapien
ccttccaggttgatgaaacacaagc

SEQ ID NO: 3784787 - DNA, 25 bp, Homo sapien
aacacaagcttgtgactagctcatc

SEQ ID NO: 3784788 - DNA, 25 bp, Homo sapien
gctcatcttcctcacgttcatctat

SEQ ID NO: 3784789 - DNA, 25 bp, Homo sapien
ttctttggccttttggattgacttc

SEQ ID NO: 3784790 - DNA, 25 bp, Homo sapien
tatttctttggccttttggattgac

SEQ ID NO: 3784791 - DNA, 25 bp, Homo sapien
tttggccttttggattgacttcagc

SEQ ID NO: 3784792 - DNA, 25 bp, Homo sapien
tctttggccttttggattgacttca

SEQ ID NO: 3784793 - DNA, 25 bp, Homo sapien
caaagtgaatttattgctatcaaaa

SEQ ID NO: 3784794 - DNA, 25 bp, Homo sapien
tgaatttattgctatcaaaagagac

SEQ ID NO: 3784795 - DNA, 25 bp, Homo sapien
gaatttattgctatcaaaagagaca

SEQ ID NO: 3784796 - DNA, 25 bp, Homo sapien
agtgaatttattgctatcaaaagag

SEQ ID NO: 3784797 - DNA, 25 bp, Homo sapien
tcagaagtaacttaagtttgataac

SEQ ID NO: 3784798 - DNA, 25 bp, Homo sapien
taacttaagtttgataactgagaca

SEQ ID NO: 3784799 - DNA, 25 bp, Homo sapien
gtaacttaagtttgataactgagac

SEQ ID NO: 3784800 - DNA, 25 bp, Homo sapien
gaagtaacttaagtttgataactga

SEQ ID NO: 3784801 - DNA, 25 bp, Homo sapien
gtatttacgacttgccatcatctcc

SEQ ID NO: 3784802 - DNA, 25 bp, Homo sapien
tccaggaagataagtatttacgact

SEQ ID NO: 3784803 - DNA, 25 bp, Homo sapien
gacagcccatgcttcgtccaggaag

SEQ ID NO: 3784804 - DNA, 25 bp, Homo sapien
gccctgtgtatgctgctcgacttcg

SEQ ID NO: 3784805 - DNA, 25 bp, Homo sapien
tcagcctatcgtacgcgtaaatgga

SEQ ID NO: 3784806 - DNA, 25 bp, Homo sapien
cctatcgtacgcgtaaatggaggtt

SEQ ID NO: 3784807 - DNA, 25 bp, Homo sapien
aatggaggttgctttatggagataa

SEQ ID NO: 3784808 - DNA, 25 bp, Homo sapien
cgtacgcgtaaatggaggttgcttt

SEQ ID NO: 3784809 - DNA, 25 bp, Homo sapien
atcagggactccgacctgttgagca

SEQ ID NO: 3784810 - DNA, 25 bp, Homo sapien
agatcagggactccgacctgttgag

SEQ ID NO: 3784811 - DNA, 25 bp, Homo sapien
cagggactccgacctgttgagcaag

SEQ ID NO: 3784812 - DNA, 25 bp, Homo sapien
aagatcagggactccgacctgttga

SEQ ID NO: 3784813 - DNA, 25 bp, Homo sapien
taatttgaacttcaacaccagtccc

SEQ ID NO: 3784814 - DNA, 25 bp, Homo sapien
acaccagtccctcgtctccctttct

SEQ ID NO: 3784815 - DNA, 25 bp, Homo sapien
caacaccagtccctcgtctcccttt

SEQ ID NO: 3784816 - DNA, 25 bp, Homo sapien
aagaattgactctaatctcttagcc

SEQ ID NO: 3784817 - DNA, 25 bp, Homo sapien
ttgactctaatctcttagccttgtt

SEQ ID NO: 3784818 - DNA, 25 bp, Homo sapien
aattgactctaatctcttagccttg

SEQ ID NO: 3784819 - DNA, 25 bp, Homo sapien
gaattgactctaatctcttagcctt

SEQ ID NO: 3784820 - DNA, 25 bp, Homo sapien
cagtcaggaccaacaaaggcacatc

SEQ ID NO: 3784821 - DNA, 25 bp, Homo sapien
gttaaacagtcaccttcacagtcag

SEQ ID NO: 3784822 - DNA, 25 bp, Homo sapien
ccaacatggtggatagcatcttcac

SEQ ID NO: 3784823 - DNA, 25 bp, Homo sapien
gagagaagttttcttccccgagtgc

SEQ ID NO: 3784824 - DNA, 25 bp, Homo sapien
cactgggatctctccatccgagcag

SEQ ID NO: 3784825 - DNA, 25 bp, Homo sapien
tctggtctgctggagatggcctcac

SEQ ID NO: 3784826 - DNA, 25 bp, Homo sapien
caaggatcgtttaactccttctcag

SEQ ID NO: 3784827 - DNA, 25 bp, Homo sapien
tgcctctccttgaacaattctttct

SEQ ID NO: 3784828 - DNA, 25 bp, Homo sapien
ctcatcattgtaccttgtcagcatc

SEQ ID NO: 3784829 - DNA, 25 bp, Homo sapien
agagcttcacacctttgactctcag

SEQ ID NO: 3784830 - DNA, 25 bp, Homo sapien
tcattgtaccttgtcagcatccctc

SEQ ID NO: 3784831 - DNA, 25 bp, Homo sapien
gagcttcacacctttgactctcaga

SEQ ID NO: 3784832 - DNA, 25 bp, Homo sapien
cggaactttcccacaatatgctttt

SEQ ID NO: 3784833 - DNA, 25 bp, Homo sapien
cactccggaactttcccacaatatg

SEQ ID NO: 3784834 - DNA, 25 bp, Homo sapien
tggctgtaactatacgctccacact

SEQ ID NO: 3784835 - DNA, 25 bp, Homo sapien
tatacgctccacactccggaacttt

SEQ ID NO: 3784836 - DNA, 25 bp, Homo sapien
gacggctgcacccatgatttctgtg

SEQ ID NO: 3784837 - DNA, 25 bp, Homo sapien
tcttggcttgtttttggacggctgc

SEQ ID NO: 3784838 - DNA, 25 bp, Homo sapien
tgatttctgtgatgtgccagaggcc

SEQ ID NO: 3784839 - DNA, 25 bp, Homo sapien
cctgctgtcgcctgggcccagagtc

SEQ ID NO: 3784840 - DNA, 25 bp, Homo sapien
cttctcaatgcatgtgcaggctgca

SEQ ID NO: 3784841 - DNA, 25 bp, Homo sapien
gcaaacatttgctaggttgtccttc

SEQ ID NO: 3784842 - DNA, 25 bp, Homo sapien
cccattgtaaactttggtggcaata

SEQ ID NO: 3784843 - DNA, 25 bp, Homo sapien
tgctttacaacatgaagtataactc

SEQ ID NO: 3784844 - DNA, 25 bp, Homo sapien
ctccagtggtgagggtcacagaagg

SEQ ID NO: 3784845 - DNA, 25 bp, Homo sapien
cctccagtggtgagggtcacagaag

SEQ ID NO: 3784846 - DNA, 25 bp, Homo sapien
gctggaacgttgtggactgcattct

SEQ ID NO: 3784847 - DNA, 25 bp, Homo sapien
cgttgtggactgcattcttgttcct

SEQ ID NO: 3784848 - DNA, 25 bp, Homo sapien
aagaggctggaacgttgtggactgc

SEQ ID NO: 3784849 - DNA, 25 bp, Homo sapien
aaagcaagaggctggaacgttgtgg

SEQ ID NO: 3784850 - DNA, 25 bp, Homo sapien
ctgactgcggcaccaagtggcctcg

SEQ ID NO: 3784851 - DNA, 25 bp, Homo sapien
tggcctcgatacacggggtactctg

SEQ ID NO: 3784852 - DNA, 25 bp, Homo sapien
tcagcaaagtgcattccgctgactg

SEQ ID NO: 3784853 - DNA, 25 bp, Homo sapien
gcaaagtgcattccgctgactgcgg

SEQ ID NO: 3784854 - DNA, 25 bp, Homo sapien
ctcttgggatctgtgttgctgccat

SEQ ID NO: 3784855 - DNA, 25 bp, Homo sapien
gtctggtgacggctgctgagatcct

SEQ ID NO: 3784856 - DNA, 25 bp, Homo sapien
tggtctggtgacggctgctgagatc

SEQ ID NO: 3784857 - DNA, 25 bp, Homo sapien
ggtctggtgacggctgctgagatcc

SEQ ID NO: 3784858 - DNA, 25 bp, Homo sapien
tcaagaaacttcagctcccttcttc

SEQ ID NO: 3784859 - DNA, 25 bp, Homo sapien
cagctcccttcttccactggacact

SEQ ID NO: 3784860 - DNA, 25 bp, Homo sapien
cctcaagaaacttcagctcccttct

SEQ ID NO: 3784861 - DNA, 25 bp, Homo sapien
ttcagctcccttcttccactggaca

SEQ ID NO: 3784862 - DNA, 25 bp, Homo sapien
gttgcagtatccctagccccactgg

SEQ ID NO: 3784863 - DNA, 25 bp, Homo sapien
ggacttgtatgaatggccccacgaa

SEQ ID NO: 3784864 - DNA, 25 bp, Homo sapien
tcttacttctaatcagtgaaattcc

SEQ ID NO: 3784865 - DNA, 25 bp, Homo sapien
caccttgggttgcagtatccctagc

SEQ ID NO: 3784866 - DNA, 25 bp, Homo sapien
taaagtaagcattggccacaggagc

SEQ ID NO: 3784867 - DNA, 25 bp, Homo sapien
cccagagcggaagttggaactgaac

SEQ ID NO: 3784868 - DNA, 25 bp, Homo sapien
tccgtctaagacctaatgagatgtc

SEQ ID NO: 3784869 - DNA, 25 bp, Homo sapien
tgaattagttgagagacgctgggaa

SEQ ID NO: 3784870 - DNA, 25 bp, Homo sapien
tctgactgatcataaggtaagaaga

SEQ ID NO: 3784871 - DNA, 25 bp, Homo sapien
actgatcataaggtaagaagagaac

SEQ ID NO: 3784872 - DNA, 25 bp, Homo sapien
cttcatctgactgatcataaggtaa

SEQ ID NO: 3784873 - DNA, 25 bp, Homo sapien
gatcataaggtaagaagagaactat

SEQ ID NO: 3784874 - DNA, 25 bp, Homo sapien
ccatagactcggaaactccactgct

SEQ ID NO: 3784875 - DNA, 25 bp, Homo sapien
actccatagactcggaaactccact

SEQ ID NO: 3784876 - DNA, 25 bp, Homo sapien
tccatagactcggaaactccactgc

SEQ ID NO: 3784877 - DNA, 25 bp, Homo sapien
aaactccatagactcggaaactcca

SEQ ID NO: 3784878 - DNA, 25 bp, Homo sapien
caataaaaccttgttcctgaagcct

SEQ ID NO: 3784879 - DNA, 25 bp, Homo sapien
caccagatgttcttaaacggtttct

SEQ ID NO: 3784880 - DNA, 25 bp, Homo sapien
tgaagcctctttcatattcctgatc

SEQ ID NO: 3784881 - DNA, 25 bp, Homo sapien
catctgttaggtgtgttaaagagaa

SEQ ID NO: 3784882 - DNA, 25 bp, Homo sapien
ttgtgtaactgccaacactgtggcc

SEQ ID NO: 3784883 - DNA, 25 bp, Homo sapien
tggccacattactgatgaaggtgcc

SEQ ID NO: 3784884 - DNA, 25 bp, Homo sapien
tggaagtgtcatctgttaggtgtgt

SEQ ID NO: 3784885 - DNA, 25 bp, Homo sapien
agtttgtcttttgtgcccgcttggt

SEQ ID NO: 3784886 - DNA, 25 bp, Homo sapien
gaatttcacaaggtacagcttaatg

SEQ ID NO: 3784887 - DNA, 25 bp, Homo sapien
aaatattgccagttgttgagtggcc

SEQ ID NO: 3784888 - DNA, 25 bp, Homo sapien
gctggtttttgaccaattctggcca

SEQ ID NO: 3784889 - DNA, 25 bp, Homo sapien
gcttcctcatagaaacaatcatcag

SEQ ID NO: 3784890 - DNA, 25 bp, Homo sapien
ttggccaagaagtgtccaatgggac

SEQ ID NO: 3784891 - DNA, 25 bp, Homo sapien
tcctcaggattcatgtggcagccac

SEQ ID NO: 3784892 - DNA, 25 bp, Homo sapien
cacatgagcatatgaagggacagag

SEQ ID NO: 3784893 - DNA, 25 bp, Homo sapien
tagcctgaagttactgggtactctg

SEQ ID NO: 3784894 - DNA, 25 bp, Homo sapien
cagtttggattttagcctgaagtta

SEQ ID NO: 3784895 - DNA, 25 bp, Homo sapien
gagatagttaaacctgaaaggcttg

SEQ ID NO: 3784896 - DNA, 25 bp, Homo sapien
gttttgctgtaagatttgtcagttt

SEQ ID NO: 3784897 - DNA, 25 bp, Homo sapien
tacagtcctaggcagttacagatgg

SEQ ID NO: 3784898 - DNA, 25 bp, Homo sapien
cataaaaaaccagtcacacacatac

SEQ ID NO: 3784899 - DNA, 25 bp, Homo sapien
tataactgcttatcctacaaacatg

SEQ ID NO: 3784900 - DNA, 25 bp, Homo sapien
tgaatcagaataccctgtatctacc

SEQ ID NO: 3784901 - DNA, 25 bp, Homo sapien
ggtgcaaggatcattcccccagtca

SEQ ID NO: 3784902 - DNA, 25 bp, Homo sapien
ctcttgctccttgatgttgtccggg

SEQ ID NO: 3784903 - DNA, 25 bp, Homo sapien
tcacttgcacatgggaagagagcaa

SEQ ID NO: 3784904 - DNA, 25 bp, Homo sapien
tccttgatgttgtccgggggtgcaa

SEQ ID NO: 3784905 - DNA, 25 bp, Homo sapien
ctccctgacagtaatgtacatccat

SEQ ID NO: 3784906 - DNA, 25 bp, Homo sapien
tccatttctagagttgaaactttgc

SEQ ID NO: 3784907 - DNA, 25 bp, Homo sapien
ttcagtgtagttgtaagcacatgca

SEQ ID NO: 3784908 - DNA, 25 bp, Homo sapien
gaaactttgctattcagtgtagttg

SEQ ID NO: 3784909 - DNA, 25 bp, Homo sapien
ctgtagtattccaggtggtcgacct

SEQ ID NO: 3784910 - DNA, 25 bp, Homo sapien
gcatgtcttctataccatctactgt

SEQ ID NO: 3784911 - DNA, 25 bp, Homo sapien
aaaactgcttgtaagtacaaataca

SEQ ID NO: 3784912 - DNA, 25 bp, Homo sapien
tggtcgacctctgggctatgatcat

SEQ ID NO: 3784913 - DNA, 25 bp, Homo sapien
gagactgctaggttcggcttgtagg

SEQ ID NO: 3784914 - DNA, 25 bp, Homo sapien
attgcttagctatatgagagactgc

SEQ ID NO: 3784915 - DNA, 25 bp, Homo sapien
gcttgtagggttggtaagtgcaatc

SEQ ID NO: 3784916 - DNA, 25 bp, Homo sapien
gcaataggcctgattgtaagacaga

SEQ ID NO: 3784917 - DNA, 25 bp, Homo sapien
tatttgtctaacagtgccctctacg

SEQ ID NO: 3784918 - DNA, 25 bp, Homo sapien
tttctggacctctcctttcctgtgg

SEQ ID NO: 3784919 - DNA, 25 bp, Homo sapien
cctctacgcaagactgcatcagggc

SEQ ID NO: 3784920 - DNA, 25 bp, Homo sapien
ctgctgcagggtatttgtctaacag

SEQ ID NO: 3784921 - DNA, 25 bp, Homo sapien
ggctttgcctgggtcttgatctgtt

SEQ ID NO: 3784922 - DNA, 25 bp, Homo sapien
gaaatgttccatagtgccccatggc

SEQ ID NO: 3784923 - DNA, 25 bp, Homo sapien
tcaacgaagaaatgttccatagtgc

SEQ ID NO: 3784924 - DNA, 25 bp, Homo sapien
tccatagtgccccatggctttgcct

SEQ ID NO: 3784925 - DNA, 25 bp, Homo sapien
gctcctttcgctgggcaacatagga

SEQ ID NO: 3784926 - DNA, 25 bp, Homo sapien
tctctgctcctttcgctgggcaaca

SEQ ID NO: 3784927 - DNA, 25 bp, Homo sapien
tctcctgttaccaaggtcagctctc

SEQ ID NO: 3784928 - DNA, 25 bp, Homo sapien
tttctcctgttaccaaggtcagctc

SEQ ID NO: 3784929 - DNA, 25 bp, Homo sapien
gcttcttccattttctgtcatgcat

SEQ ID NO: 3784930 - DNA, 25 bp, Homo sapien
gctttttctctagcttcttccattt

SEQ ID NO: 3784931 - DNA, 25 bp, Homo sapien
tttctctagcttcttccattttctg

SEQ ID NO: 3784932 - DNA, 25 bp, Homo sapien
ctgttggctgctttttctctagctt

SEQ ID NO: 3784933 - DNA, 25 bp, Homo sapien
acagcacctgttagttggtctccca

SEQ ID NO: 3784934 - DNA, 25 bp, Homo sapien
tcagacaaggttagacacgttcata

SEQ ID NO: 3784935 - DNA, 25 bp, Homo sapien
agcacctgttagttggtctcccatc

SEQ ID NO: 3784936 - DNA, 25 bp, Homo sapien
tagacacgttcatatggccacagac

SEQ ID NO: 3784937 - DNA, 25 bp, Homo sapien
ctcatcttctccgtattgttcccat

SEQ ID NO: 3784938 - DNA, 25 bp, Homo sapien
tttagtatatgtgctgccaaggcaa

SEQ ID NO: 3784939 - DNA, 25 bp, Homo sapien
taggggtcatgctcatcttctccgt

SEQ ID NO: 3784940 - DNA, 25 bp, Homo sapien
gggtcatgctcatcttctccgtatt

SEQ ID NO: 3784941 - DNA, 25 bp, Homo sapien
ccaaggacctgcaccagcactggtc

SEQ ID NO: 3784942 - DNA, 25 bp, Homo sapien
gataatgagaaggtcagcaacaaac

SEQ ID NO: 3784943 - DNA, 25 bp, Homo sapien
ggggaccagcgctcagcataccaag

SEQ ID NO: 3784944 - DNA, 25 bp, Homo sapien
aaggacctgcaccagcactggtctc

SEQ ID NO: 3784945 - DNA, 25 bp, Homo sapien
gccgctggcttggtagaacaatgca

SEQ ID NO: 3784946 - DNA, 25 bp, Homo sapien
cataaccaagattcacaggtccagg

SEQ ID NO: 3784947 - DNA, 25 bp, Homo sapien
tatattagccatcatcctgaagccg

SEQ ID NO: 3784948 - DNA, 25 bp, Homo sapien
tttgaagactccatcacagttccag

SEQ ID NO: 3784949 - DNA, 25 bp, Homo sapien
ccatttggttatggcttggaacaca

SEQ ID NO: 3784950 - DNA, 25 bp, Homo sapien
catggtaacacaagccagatttggc

SEQ ID NO: 3784951 - DNA, 25 bp, Homo sapien
cacttgaaggtttatgacatttgga

SEQ ID NO: 3784952 - DNA, 25 bp, Homo sapien
tcattcacgctgctcaacctcatca

SEQ ID NO: 3784953 - DNA, 25 bp, Homo sapien
catcctcagtgagtgccttatcaag

SEQ ID NO: 3784954 - DNA, 25 bp, Homo sapien
ccttatcaagcttattacttcatgg

SEQ ID NO: 3784955 - DNA, 25 bp, Homo sapien
gacaagagggctgcacttgatccaa

SEQ ID NO: 3784956 - DNA, 25 bp, Homo sapien
gagggctgcacttgatccaacatca

SEQ ID NO: 3784957 - DNA, 25 bp, Homo sapien
cagatttgagttgaatcagccacag

SEQ ID NO: 3784958 - DNA, 25 bp, Homo sapien
tcagatttgagttgaatcagccaca

SEQ ID NO: 3784959 - DNA, 25 bp, Homo sapien
taccaacgtgattgtattgcaagtc

SEQ ID NO: 3784960 - DNA, 25 bp, Homo sapien
tttatagagactgacaacaattacc

SEQ ID NO: 3784961 - DNA, 25 bp, Homo sapien
catcagggcaaggtatttggaaaag

SEQ ID NO: 3784962 - DNA, 25 bp, Homo sapien
gagactgacaacaattaccaacgtg

SEQ ID NO: 3784963 - DNA, 25 bp, Homo sapien
atttgtattcctgcagaaaacttaa

SEQ ID NO: 3784964 - DNA, 25 bp, Homo sapien
tatttgtattcctgcagaaaactta

SEQ ID NO: 3784965 - DNA, 25 bp, Homo sapien
ggtattgctgggggaaatttctcca

SEQ ID NO: 3784966 - DNA, 25 bp, Homo sapien
ctgggggaaatttctccatcagtct

SEQ ID NO: 3784967 - DNA, 25 bp, Homo sapien
tcagcaatgtaggtgggcactagcc

SEQ ID NO: 3784968 - DNA, 25 bp, Homo sapien
caatcgtagtgatgacaaaggccac

SEQ ID NO: 3784969 - DNA, 25 bp, Homo sapien
tgccctgggacattggacatcatag

SEQ ID NO: 3784970 - DNA, 25 bp, Homo sapien
tatcgagtcaacgaagtgccaagcc

SEQ ID NO: 3784971 - DNA, 25 bp, Homo sapien
gaatatgttcaggatctcctagagg

SEQ ID NO: 3784972 - DNA, 25 bp, Homo sapien
cacactgtcaataggagacaataac

SEQ ID NO: 3784973 - DNA, 25 bp, Homo sapien
ggttttccacactggtaacatcctg

SEQ ID NO: 3784974 - DNA, 25 bp, Homo sapien
tcattcgaagttaatggatgcttca

SEQ ID NO: 3784975 - DNA, 25 bp, Homo sapien
aatctctggagatcggcgtgcttca

SEQ ID NO: 3784976 - DNA, 25 bp, Homo sapien
ggcccaactgtcacttttgccgtgg

SEQ ID NO: 3784977 - DNA, 25 bp, Homo sapien
gaaggtaaactctcacaccagccat

SEQ ID NO: 3784978 - DNA, 25 bp, Homo sapien
aatacagtacatttgccgggtgtgg

SEQ ID NO: 3784979 - DNA, 25 bp, Homo sapien
cactgcacatatccaccttactttt

SEQ ID NO: 3784980 - DNA, 25 bp, Homo sapien
gccactgcacatatccaccttactt

SEQ ID NO: 3784981 - DNA, 25 bp, Homo sapien
actgcacatatccaccttacttttt

SEQ ID NO: 3784982 - DNA, 25 bp, Homo sapien
agccactgcacatatccaccttact

SEQ ID NO: 3784983 - DNA, 25 bp, Homo sapien
tatcacatattatggagccactgga

SEQ ID NO: 3784984 - DNA, 25 bp, Homo sapien
atatcacatattatggagccactgg

SEQ ID NO: 3784985 - DNA, 25 bp, Homo sapien
gatatcacatattatggagccactg

SEQ ID NO: 3784986 - DNA, 25 bp, Homo sapien
aaggtctggaaaggattgcaaagga

SEQ ID NO: 3784987 - DNA, 25 bp, Homo sapien
gcaatacccaatatgtccctagaga

SEQ ID NO: 3784988 - DNA, 25 bp, Homo sapien
tcaagagaatctggccatcagggtc

SEQ ID NO: 3784989 - DNA, 25 bp, Homo sapien
tcaatggatgaaggtatagcaatac

SEQ ID NO: 3784990 - DNA, 25 bp, Homo sapien
gcactgggccagtccatgagggctc

SEQ ID NO: 3784991 - DNA, 25 bp, Homo sapien
gtggatggcgcggatggcgcggcct

SEQ ID NO: 3784992 - DNA, 25 bp, Homo sapien
caagggccctgcgaggatgtggatg

SEQ ID NO: 3784993 - DNA, 25 bp, Homo sapien
gggccgggagcagaatttgctccag

SEQ ID NO: 3784994 - DNA, 25 bp, Homo sapien
cttgaacgagctggatgggagagct

SEQ ID NO: 3784995 - DNA, 25 bp, Homo sapien
ttctcagaacaagcaggtcggtgga

SEQ ID NO: 3784996 - DNA, 25 bp, Homo sapien
aagatcttgtgggtgaacccgagga

SEQ ID NO: 3784997 - DNA, 25 bp, Homo sapien
actgcgttccgggtgatttctcaga

SEQ ID NO: 3784998 - DNA, 25 bp, Homo sapien
tttcctgaagtggcattgtcttagt

SEQ ID NO: 3784999 - DNA, 25 bp, Homo sapien
cttttcctgaagtggcattgtctta

SEQ ID NO: 3785000 - DNA, 25 bp, Homo sapien
ttttcctgaagtggcattgtcttag

SEQ ID NO: 3785001 - DNA, 25 bp, Homo sapien
ctgtttggctcatcatgtagtaatt

SEQ ID NO: 3785002 - DNA, 25 bp, Homo sapien
tgtgtgtgtactgctcaggcaggct

SEQ ID NO: 3785003 - DNA, 25 bp, Homo sapien
catcatgtagtaatttgtgcctctc

SEQ ID NO: 3785004 - DNA, 25 bp, Homo sapien
tgcatatgtgataagagggtttcga

SEQ ID NO: 3785005 - DNA, 25 bp, Homo sapien
cccagtcagagctcttacacttgta

SEQ ID NO: 3785006 - DNA, 25 bp, Homo sapien
aatacttcgaaatttattgacgtgc

SEQ ID NO: 3785007 - DNA, 25 bp, Homo sapien
tattagccaggtccacatctttcac

SEQ ID NO: 3785008 - DNA, 25 bp, Homo sapien
gataacatgatcttcaccccagtgt

SEQ ID NO: 3785009 - DNA, 25 bp, Homo sapien
tggcttcgcagacggcctctcaggc

SEQ ID NO: 3785010 - DNA, 25 bp, Homo sapien
gctctgggctgtggacctgttgctc

SEQ ID NO: 3785011 - DNA, 25 bp, Homo sapien
tgggctgtggacctgttgctcttct

SEQ ID NO: 3785012 - DNA, 25 bp, Homo sapien
tctccctctggcttcgcagacggcc

SEQ ID NO: 3785013 - DNA, 25 bp, Homo sapien
tgggagggtcaaacctgaggtgtgc

SEQ ID NO: 3785014 - DNA, 25 bp, Homo sapien
gggagggtcaaacctgaggtgtgca

SEQ ID NO: 3785015 - DNA, 25 bp, Homo sapien
atgggagggtcaaacctgaggtgtg

SEQ ID NO: 3785016 - DNA, 25 bp, Homo sapien
tgccgtccatattcacccatctgtt

SEQ ID NO: 3785017 - DNA, 25 bp, Homo sapien
gactgtttcacctgccgtccatatt

SEQ ID NO: 3785018 - DNA, 25 bp, Homo sapien
tcacaattccattctttttgcggac

SEQ ID NO: 3785019 - DNA, 25 bp, Homo sapien
tctttttgcggactgtttcacctgc

SEQ ID NO: 3785020 - DNA, 25 bp, Homo sapien
tttggccattatccagtcgtttcga

SEQ ID NO: 3785021 - DNA, 25 bp, Homo sapien
aaacctgttgagaattatcgcagat

SEQ ID NO: 3785022 - DNA, 25 bp, Homo sapien
gaattatcgcagatacgtttggcca

SEQ ID NO: 3785023 - DNA, 25 bp, Homo sapien
tccagtcgtttcgattgtgcctttc

SEQ ID NO: 3785024 - DNA, 25 bp, Homo sapien
cctgggtttcacttgcaggtgctgg

SEQ ID NO: 3785025 - DNA, 25 bp, Homo sapien
agccaacccctacgacttcaggagg

SEQ ID NO: 3785026 - DNA, 25 bp, Homo sapien
taaccgttcaacgaggcagtcaccg

SEQ ID NO: 3785027 - DNA, 25 bp, Homo sapien
ttcaggaggctcctgcgcaaaacct

SEQ ID NO: 3785028 - DNA, 25 bp, Homo sapien
gatgtatttcatctcaagcttgctc

SEQ ID NO: 3785029 - DNA, 25 bp, Homo sapien
gcggttgaatcttagagaaaaaagc

SEQ ID NO: 3785030 - DNA, 25 bp, Homo sapien
tggccaacagaacacttgctagcgg

SEQ ID NO: 3785031 - DNA, 25 bp, Homo sapien
tcgaagatgtatttcatctcaagct

SEQ ID NO: 3785032 - DNA, 25 bp, Homo sapien
tcgcctgcacgatgccttcccaatc

SEQ ID NO: 3785033 - DNA, 25 bp, Homo sapien
ccttcccaatctgcgtgactgtctt

SEQ ID NO: 3785034 - DNA, 25 bp, Homo sapien
gatgccttcccaatctgcgtgactg

SEQ ID NO: 3785035 - DNA, 25 bp, Homo sapien
tgcacgatgccttcccaatctgcgt

SEQ ID NO: 3785036 - DNA, 25 bp, Homo sapien
ttagatccaaagtactccagagctg

SEQ ID NO: 3785037 - DNA, 25 bp, Homo sapien
aacaaagaaccagcctctgcgaggc

SEQ ID NO: 3785038 - DNA, 25 bp, Homo sapien
agttctgcaaccctagactgctggc

SEQ ID NO: 3785039 - DNA, 25 bp, Homo sapien
caaagcaaattaccgtctagggagg

SEQ ID NO: 3785040 - DNA, 25 bp, Homo sapien
tattcttccttgcagcgcgagcctg

SEQ ID NO: 3785041 - DNA, 25 bp, Homo sapien
taggaccccggactgattgattttc

SEQ ID NO: 3785042 - DNA, 25 bp, Homo sapien
gaaacaaactgtgcggtgagtgccc

SEQ ID NO: 3785043 - DNA, 25 bp, Homo sapien
tgcaacaggaaacttcttcgggcgc

SEQ ID NO: 3785044 - DNA, 25 bp, Homo sapien
atcgatgacggctggcttccctagg

SEQ ID NO: 3785045 - DNA, 25 bp, Homo sapien
taccgtgcccgagaattcagaattg

SEQ ID NO: 3785046 - DNA, 25 bp, Homo sapien
tccaaagtggatgtcaactacgcgt

SEQ ID NO: 3785047 - DNA, 25 bp, Homo sapien
taaaagcgagaaatgcgggacctgc

SEQ ID NO: 3785048 - DNA, 25 bp, Homo sapien
acatattcacggtgttgaagatgag

SEQ ID NO: 3785049 - DNA, 25 bp, Homo sapien
tacctagtaccccaccaggagataa

SEQ ID NO: 3785050 - DNA, 25 bp, Homo sapien
gcatagcatctttggatctctctct

SEQ ID NO: 3785051 - DNA, 25 bp, Homo sapien
cagggagtatctgttattcagccca

SEQ ID NO: 3785052 - DNA, 25 bp, Homo sapien
cactcaccaccacgcccagacaatt

SEQ ID NO: 3785053 - DNA, 25 bp, Homo sapien
gcactcaccaccacgcccagacaat

SEQ ID NO: 3785054 - DNA, 25 bp, Homo sapien
ggcactcaccaccacgcccagacaa

SEQ ID NO: 3785055 - DNA, 25 bp, Homo sapien
ctcaccaccacgcccagacaatttt

SEQ ID NO: 3785056 - DNA, 25 bp, Homo sapien
cccagaatgtggtgagcccagaaaa

SEQ ID NO: 3785057 - DNA, 25 bp, Homo sapien
aagagaaatttacctccaggccagt

SEQ ID NO: 3785058 - DNA, 25 bp, Homo sapien
gaggaatgaagcacactcccagaat

SEQ ID NO: 3785059 - DNA, 25 bp, Homo sapien
taatgacatcatcctggcgccatat

SEQ ID NO: 3785060 - DNA, 25 bp, Homo sapien
gctgagaataagcacatagctgccc

SEQ ID NO: 3785061 - DNA, 25 bp, Homo sapien
atagctgcccgactatccggagcct

SEQ ID NO: 3785062 - DNA, 25 bp, Homo sapien
gatgctaattgatccaacctgctgt

SEQ ID NO: 3785063 - DNA, 25 bp, Homo sapien
gagacagagatgctaattgatccaa

SEQ ID NO: 3785064 - DNA, 25 bp, Homo sapien
tgttccctgtcaaagtgtcagaaga

SEQ ID NO: 3785065 - DNA, 25 bp, Homo sapien
gttccctgtcaaagtgtcagaagag

SEQ ID NO: 3785066 - DNA, 25 bp, Homo sapien
gatcggcaatatcatccaggacagc

SEQ ID NO: 3785067 - DNA, 25 bp, Homo sapien
catgacatatggcagagatcggcaa

SEQ ID NO: 3785068 - DNA, 25 bp, Homo sapien
ggcagagatcggcaatatcatccag

SEQ ID NO: 3785069 - DNA, 25 bp, Homo sapien
tcggcaatatcatccaggacagctg

SEQ ID NO: 3785070 - DNA, 25 bp, Homo sapien
ggtgatgaagaagttctgcactcac

SEQ ID NO: 3785071 - DNA, 25 bp, Homo sapien
tgcaagtcatggtgatgaagaagtt

SEQ ID NO: 3785072 - DNA, 25 bp, Homo sapien
tcatggtgatgaagaagttctgcac

SEQ ID NO: 3785073 - DNA, 25 bp, Homo sapien
tcattgcaagtcatggtgatgaaga

SEQ ID NO: 3785074 - DNA, 25 bp, Homo sapien
ggcagctggatcattctcactacac

SEQ ID NO: 3785075 - DNA, 25 bp, Homo sapien
ttcagaacagatcccttgttcaggg

SEQ ID NO: 3785076 - DNA, 25 bp, Homo sapien
gggttcctttagtgcagatagggat

SEQ ID NO: 3785077 - DNA, 25 bp, Homo sapien
tccttctacctgtggcagctggatc

SEQ ID NO: 3785078 - DNA, 25 bp, Homo sapien
ctacatagtctgctttaggatggaa

SEQ ID NO: 3785079 - DNA, 25 bp, Homo sapien
gaggtcatatagaacatcactggca

SEQ ID NO: 3785080 - DNA, 25 bp, Homo sapien
gagggctactctttcggattaagca

SEQ ID NO: 3785081 - DNA, 25 bp, Homo sapien
ctgtgtccttccaaggtgcaggtaa

SEQ ID NO: 3785082 - DNA, 25 bp, Homo sapien
taacatgactgaatgtattgaatgc

SEQ ID NO: 3785083 - DNA, 25 bp, Homo sapien
catcagatttgggaactgcttggcc

SEQ ID NO: 3785084 - DNA, 25 bp, Homo sapien
tattgaatgcaataacatctggaga

SEQ ID NO: 3785085 - DNA, 25 bp, Homo sapien
aaaaattggcctggttcgtatgcca

SEQ ID NO: 3785086 - DNA, 25 bp, Homo sapien
tgagctactcttggtacatctaata

SEQ ID NO: 3785087 - DNA, 25 bp, Homo sapien
gctactcttggtacatctaatacta

SEQ ID NO: 3785088 - DNA, 25 bp, Homo sapien
ggtacatctaatactacatctattt

SEQ ID NO: 3785089 - DNA, 25 bp, Homo sapien
tcttggtacatctaatactacatct

SEQ ID NO: 3785090 - DNA, 25 bp, Homo sapien
gaccagatgccatagtacgtacctg

SEQ ID NO: 3785091 - DNA, 25 bp, Homo sapien
gctgctcagaatggtagtagcctaa

SEQ ID NO: 3785092 - DNA, 25 bp, Homo sapien
catcataggcagacgtgataatcaa

SEQ ID NO: 3785093 - DNA, 25 bp, Homo sapien
gtagcctaaccagtcagaccagatg

SEQ ID NO: 3785094 - DNA, 25 bp, Homo sapien
tcactgagtcaataattcaacagat

SEQ ID NO: 3785095 - DNA, 25 bp, Homo sapien
ttctccaacagtctgtttattctgc

SEQ ID NO: 3785096 - DNA, 25 bp, Homo sapien
cactgagtcaataattcaacagatt

SEQ ID NO: 3785097 - DNA, 25 bp, Homo sapien
acagatttttctccaacagtctgtt

SEQ ID NO: 3785098 - DNA, 25 bp, Homo sapien
aagacttccttaccacagaaggtga

SEQ ID NO: 3785099 - DNA, 25 bp, Homo sapien
cacgggcccgcttactttcctgcct

SEQ ID NO: 3785100 - DNA, 25 bp, Homo sapien
tctggttcagaattagtggtggtaa

SEQ ID NO: 3785101 - DNA, 25 bp, Homo sapien
cctttcctcgtctggttcagaatta

SEQ ID NO: 3785102 - DNA, 25 bp, Homo sapien
taggctaccagtgccttaggccaca

SEQ ID NO: 3785103 - DNA, 25 bp, Homo sapien
ggtcagagacagctcaggaacttca

SEQ ID NO: 3785104 - DNA, 25 bp, Homo sapien
ctcaggaacttcatcggcataggct

SEQ ID NO: 3785105 - DNA, 25 bp, Homo sapien
tcggcataggctaccagtgccttag

SEQ ID NO: 3785106 - DNA, 25 bp, Homo sapien
atctgaccacatttgctgcgcaatt

SEQ ID NO: 3785107 - DNA, 25 bp, Homo sapien
catttgctgcgcaattgcaactggc

SEQ ID NO: 3785108 - DNA, 25 bp, Homo sapien
tgctgcgcaattgcaactggctgga

SEQ ID NO: 3785109 - DNA, 25 bp, Homo sapien
gaccacatttgctgcgcaattgcaa

SEQ ID NO: 3785110 - DNA, 25 bp, Homo sapien
tgacaccagtgctccaagagtacct

SEQ ID NO: 3785111 - DNA, 25 bp, Homo sapien
tcacttgggcaagctgctgacacca

SEQ ID NO: 3785112 - DNA, 25 bp, Homo sapien
tccactgagctcagatacttccgca

SEQ ID NO: 3785113 - DNA, 25 bp, Homo sapien
aggacatgaccaggcctcacttggg

SEQ ID NO: 3785114 - DNA, 25 bp, Homo sapien
ggttctgaacaagccatgcctgaca

SEQ ID NO: 3785115 - DNA, 25 bp, Homo sapien
caccaggttctgaacaagccatgcc

SEQ ID NO: 3785116 - DNA, 25 bp, Homo sapien
gcctgacaagtctggcattcttgca

SEQ ID NO: 3785117 - DNA, 25 bp, Homo sapien
cacccaatcccagtatagcatcttt

SEQ ID NO: 3785118 - DNA, 25 bp, Homo sapien
atgtttcactgaagcactcctccag

SEQ ID NO: 3785119 - DNA, 25 bp, Homo sapien
ttttaaagcacacagctagtggatg

SEQ ID NO: 3785120 - DNA, 25 bp, Homo sapien
tgtcaactttgtagttaaccacagc

SEQ ID NO: 3785121 - DNA, 25 bp, Homo sapien
gagtgacccatctgataagacatcc

SEQ ID NO: 3785122 - DNA, 25 bp, Homo sapien
gcgcacgacactttcgggccctggg

SEQ ID NO: 3785123 - DNA, 25 bp, Homo sapien
cgagctccgcggcactggagtcccc

SEQ ID NO: 3785124 - DNA, 25 bp, Homo sapien
gagcgcggccgctcggccaccagcc

SEQ ID NO: 3785125 - DNA, 25 bp, Homo sapien
tccctggagcgcacgacactttcgg

SEQ ID NO: 3785126 - DNA, 25 bp, Homo sapien
atctggatgcccttggaggatgcca

SEQ ID NO: 3785127 - DNA, 25 bp, Homo sapien
gatgctcatctggatgcccttggag

SEQ ID NO: 3785128 - DNA, 25 bp, Homo sapien
cctgatgctcatctggatgcccttg

SEQ ID NO: 3785129 - DNA, 25 bp, Homo sapien
gctcatctggatgcccttggaggat

SEQ ID NO: 3785130 - DNA, 25 bp, Homo sapien
aacatgacgtggaaagccccagcat

SEQ ID NO: 3785131 - DNA, 25 bp, Homo sapien
tagttgcatggcaaactgaagccag

SEQ ID NO: 3785132 - DNA, 25 bp, Homo sapien
gctggtaaatatagttgcatggcaa

SEQ ID NO: 3785133 - DNA, 25 bp, Homo sapien
ccagcatgacgtgtttctcctgtgt

SEQ ID NO: 3785134 - DNA, 25 bp, Homo sapien
tgttcctgtttacagctgtcaaagc

SEQ ID NO: 3785135 - DNA, 25 bp, Homo sapien
atctgttcctgtttacagctgtcaa

SEQ ID NO: 3785136 - DNA, 25 bp, Homo sapien
ttcctgtttacagctgtcaaagcca

SEQ ID NO: 3785137 - DNA, 25 bp, Homo sapien
tctgttcctgtttacagctgtcaaa

SEQ ID NO: 3785138 - DNA, 25 bp, Homo sapien
taagccttcttgaactctctcatgt

SEQ ID NO: 3785139 - DNA, 25 bp, Homo sapien
ctaagccttcttgaactctctcatg

SEQ ID NO: 3785140 - DNA, 25 bp, Homo sapien
ccttccctgacatataagcctttga

SEQ ID NO: 3785141 - DNA, 25 bp, Homo sapien
caccttccctgacatataagccttt

SEQ ID NO: 3785142 - DNA, 25 bp, Homo sapien
gacatataagcctttgaagacacag

SEQ ID NO: 3785143 - DNA, 25 bp, Homo sapien
ccctgacatataagcctttgaagac

SEQ ID NO: 3785144 - DNA, 25 bp, Homo sapien
agcaaagcagctcggatagcgccac

SEQ ID NO: 3785145 - DNA, 25 bp, Homo sapien
tgtcaggaacccgtttgtcaagccc

SEQ ID NO: 3785146 - DNA, 25 bp, Homo sapien
gccccgcagagcagtcgaggtaagt

SEQ ID NO: 3785147 - DNA, 25 bp, Homo sapien
aggatctggcctcgtgaacgcgtgc

SEQ ID NO: 3785148 - DNA, 25 bp, Homo sapien
cagcttttgggggactagaggatgt

SEQ ID NO: 3785149 - DNA, 25 bp, Homo sapien
tgcagcttggaagggcagaccctga

SEQ ID NO: 3785150 - DNA, 25 bp, Homo sapien
gactagaggatgtgacctgccacca

SEQ ID NO: 3785151 - DNA, 25 bp, Homo sapien
ttttgggggactagaggatgtgacc

SEQ ID NO: 3785152 - DNA, 25 bp, Homo sapien
cgtggacttgccagatttggtgttt

SEQ ID NO: 3785153 - DNA, 25 bp, Homo sapien
agaattctcagatatcctactgacc

SEQ ID NO: 3785154 - DNA, 25 bp, Homo sapien
tcagatatcctactgacctggccat

SEQ ID NO: 3785155 - DNA, 25 bp, Homo sapien
gcctttctctgatgacgtggacttg

SEQ ID NO: 3785156 - DNA, 25 bp, Homo sapien
atgagccaccatacaccacagattg

SEQ ID NO: 3785157 - DNA, 25 bp, Homo sapien
aatcttggcacacagtttggtgaca

SEQ ID NO: 3785158 - DNA, 25 bp, Homo sapien
caccacagattgttggtaatcttgg

SEQ ID NO: 3785159 - DNA, 25 bp, Homo sapien
gtccagttgagatagattcatgaga

SEQ ID NO: 3785160 - DNA, 25 bp, Homo sapien
taggccttcatatctacaaacgtgg

SEQ ID NO: 3785161 - DNA, 25 bp, Homo sapien
ttttggtcagttgtcctggcggccc

SEQ ID NO: 3785162 - DNA, 25 bp, Homo sapien
tatgctgcatccttgctataactgc

SEQ ID NO: 3785163 - DNA, 25 bp, Homo sapien
tcaacttccaattgctcatcgctgg

SEQ ID NO: 3785164 - DNA, 25 bp, Homo sapien
cttccttggctgtcgaatgcttctg

SEQ ID NO: 3785165 - DNA, 25 bp, Homo sapien
aggtgaggcgtagcctgcttccttg

SEQ ID NO: 3785166 - DNA, 25 bp, Homo sapien
gcttccttggctgtcgaatgcttct

SEQ ID NO: 3785167 - DNA, 25 bp, Homo sapien
agtaggtgaggcgtagcctgcttcc

SEQ ID NO: 3785168 - DNA, 25 bp, Homo sapien
taaatggctcctctagttggctctt

SEQ ID NO: 3785169 - DNA, 25 bp, Homo sapien
aacagggctgcatctagaaagctgc

SEQ ID NO: 3785170 - DNA, 25 bp, Homo sapien
ataccagtcacatgtgaacagggct

SEQ ID NO: 3785171 - DNA, 25 bp, Homo sapien
gccttgagtcgattctaaagacatg

SEQ ID NO: 3785172 - DNA, 25 bp, Homo sapien
tatggtttactcagtgtacaaattt

SEQ ID NO: 3785173 - DNA, 25 bp, Homo sapien
attacacgtgctagtttgaatatgt

SEQ ID NO: 3785174 - DNA, 25 bp, Homo sapien
aaaatatggtttactcagtgtacaa

SEQ ID NO: 3785175 - DNA, 25 bp, Homo sapien
gaaatttctctattacacgtgctag

SEQ ID NO: 3785176 - DNA, 25 bp, Homo sapien
gaggatcctttggatgccagatagt

SEQ ID NO: 3785177 - DNA, 25 bp, Homo sapien
cctttggatgccagatagtgcatga

SEQ ID NO: 3785178 - DNA, 25 bp, Homo sapien
ccagatagtgcatgaagcacattgg

SEQ ID NO: 3785179 - DNA, 25 bp, Homo sapien
ggcgaaagaggatcctttggatgcc

SEQ ID NO: 3785180 - DNA, 25 bp, Homo sapien
cacacgacacgatatacaggagcag

SEQ ID NO: 3785181 - DNA, 25 bp, Homo sapien
tcatggccggcacaagggttctgca

SEQ ID NO: 3785182 - DNA, 25 bp, Homo sapien
gcagctctgtgatccacaaggcgga

SEQ ID NO: 3785183 - DNA, 25 bp, Homo sapien
gtctaccagcgtacagacagcaaag

SEQ ID NO: 3785184 - DNA, 25 bp, Homo sapien
cttcaagaacaggttgtgaaaggca

SEQ ID NO: 3785185 - DNA, 25 bp, Homo sapien
ttgtgaaaggcagccgaccacggcg

SEQ ID NO: 3785186 - DNA, 25 bp, Homo sapien
aaaggcagccgaccacggcgtagca

SEQ ID NO: 3785187 - DNA, 25 bp, Homo sapien
agaacaggttgtgaaaggcagccga

SEQ ID NO: 3785188 - DNA, 25 bp, Homo sapien
gaggtggcagtactaccagactcca

SEQ ID NO: 3785189 - DNA, 25 bp, Homo sapien
cccaggtagggtggcaacggatact

SEQ ID NO: 3785190 - DNA, 25 bp, Homo sapien
tcttcaattgttgggcagtggcaga

SEQ ID NO: 3785191 - DNA, 25 bp, Homo sapien
ttggcaaccagaagataccccaggt

SEQ ID NO: 3785192 - DNA, 25 bp, Homo sapien
ttgaattaaatgacacgagttcccc

SEQ ID NO: 3785193 - DNA, 25 bp, Homo sapien
tacctagttccaataagcatgattg

SEQ ID NO: 3785194 - DNA, 25 bp, Homo sapien
tcacagtctatacaaggaatgatgt

SEQ ID NO: 3785195 - DNA, 25 bp, Homo sapien
aaggtaagaggtacaggccatcgcc

SEQ ID NO: 3785196 - DNA, 25 bp, Homo sapien
caatccgaaaaatgcagagtgtcaa

SEQ ID NO: 3785197 - DNA, 25 bp, Homo sapien
taaataccacgaaatgcaatccgaa

SEQ ID NO: 3785198 - DNA, 25 bp, Homo sapien
cacacgtaggtgatatactcaaaga

SEQ ID NO: 3785199 - DNA, 25 bp, Homo sapien
aaaagatgtaggtgacacacgtagg

SEQ ID NO: 3785200 - DNA, 25 bp, Homo sapien
ttgtgcttaatgatagaagaactcc

SEQ ID NO: 3785201 - DNA, 25 bp, Homo sapien
gctttctcggctgccgaatgcttct

SEQ ID NO: 3785202 - DNA, 25 bp, Homo sapien
tgcttaatgatagaagaactcctta

SEQ ID NO: 3785203 - DNA, 25 bp, Homo sapien
taggtaaggtgtagcctgctttctc

SEQ ID NO: 3785204 - DNA, 25 bp, Homo sapien
aatacctgataggatgcgttgggcc

SEQ ID NO: 3785205 - DNA, 25 bp, Homo sapien
tggtgactcctaccatgaggcaggt

SEQ ID NO: 3785206 - DNA, 25 bp, Homo sapien
gggactctcagatccttgcacctga

SEQ ID NO: 3785207 - DNA, 25 bp, Homo sapien
cctgataaggcggtaggtcaactct

SEQ ID NO: 3785208 - DNA, 25 bp, Homo sapien
tttgaatctgaatgtttactggacc

SEQ ID NO: 3785209 - DNA, 25 bp, Homo sapien
ggtgctgccctgtccggaagctttg

SEQ ID NO: 3785210 - DNA, 25 bp, Homo sapien
tgccctgtccggaagctttgttcct

SEQ ID NO: 3785211 - DNA, 25 bp, Homo sapien
tgtgtggcctgtgatagtcgtttga

SEQ ID NO: 3785212 - DNA, 25 bp, Homo sapien
ccaccctgccccaggggcgctgcct

SEQ ID NO: 3785213 - DNA, 25 bp, Homo sapien
aacacctccacccaccctgccccag

SEQ ID NO: 3785214 - DNA, 25 bp, Homo sapien
acccaccctgccccaggggcgctgc

SEQ ID NO: 3785215 - DNA, 25 bp, Homo sapien
accctgccccaggggcgctgcctca

SEQ ID NO: 3785216 - DNA, 25 bp, Homo sapien
gttcagtaagcattttataaagcca

SEQ ID NO: 3785217 - DNA, 25 bp, Homo sapien
aattcatctgaattgggccctgcag

SEQ ID NO: 3785218 - DNA, 25 bp, Homo sapien
taaggtctgacgcagtagaactgct

SEQ ID NO: 3785219 - DNA, 25 bp, Homo sapien
cctgagagcaaacaggaaaggtctc

SEQ ID NO: 3785220 - DNA, 25 bp, Homo sapien
cttggtattgaaggtctgccgccat

SEQ ID NO: 3785221 - DNA, 25 bp, Homo sapien
gccctgtgatgcagtaattctactt

SEQ ID NO: 3785222 - DNA, 25 bp, Homo sapien
ccctgtgatgcagtaattctacttc

SEQ ID NO: 3785223 - DNA, 25 bp, Homo sapien
ttaggttctttgacatccatcgagg

SEQ ID NO: 3785224 - DNA, 25 bp, Homo sapien
gacatccatcgagggataatgttcc

SEQ ID NO: 3785225 - DNA, 25 bp, Homo sapien
taatgttccggtatgatgaagtcta

SEQ ID NO: 3785226 - DNA, 25 bp, Homo sapien
ccatcgagggataatgttccggtat

SEQ ID NO: 3785227 - DNA, 25 bp, Homo sapien
tttttgctatgactgcaggcgtggc

SEQ ID NO: 3785228 - DNA, 25 bp, Homo sapien
caaaagagttcgtggctgcaagggt

SEQ ID NO: 3785229 - DNA, 25 bp, Homo sapien
aacagattgcaaaaggcagccgacc

SEQ ID NO: 3785230 - DNA, 25 bp, Homo sapien
ggcgcgcggtagtatttcttgctaa

SEQ ID NO: 3785231 - DNA, 25 bp, Homo sapien
ctgcctttgggttccgatctccttt

SEQ ID NO: 3785232 - DNA, 25 bp, Homo sapien
agaaaggcccgaggccgtcaggagg

SEQ ID NO: 3785233 - DNA, 25 bp, Homo sapien
atagcccattctttcagggtctcct

SEQ ID NO: 3785234 - DNA, 25 bp, Homo sapien
agaaaccctggagtcatctaaagtc

SEQ ID NO: 3785235 - DNA, 25 bp, Homo sapien
tcctcataccaggaggcgcgtgctg

SEQ ID NO: 3785236 - DNA, 25 bp, Homo sapien
gaataccacaagagcggtgctgtcc

SEQ ID NO: 3785237 - DNA, 25 bp, Homo sapien
cgcttgattaggatactgtcgggcc

SEQ ID NO: 3785238 - DNA, 25 bp, Homo sapien
tgttgttgagcctctcagtcgggct

SEQ ID NO: 3785239 - DNA, 25 bp, Homo sapien
gaaacccagtggtgtggaaccagcc

SEQ ID NO: 3785240 - DNA, 25 bp, Homo sapien
gaatgagccatttccaagttcactg

SEQ ID NO: 3785241 - DNA, 25 bp, Homo sapien
tgtccatcaacagaatcactgggcc

SEQ ID NO: 3785242 - DNA, 25 bp, Homo sapien
tgactgactcctgtgagaatgagcc

SEQ ID NO: 3785243 - DNA, 25 bp, Homo sapien
ttgtcttgatttaccgtaggagtaa

SEQ ID NO: 3785244 - DNA, 25 bp, Homo sapien
gaatctgtcattctagtcctataaa

SEQ ID NO: 3785245 - DNA, 25 bp, Homo sapien
actgttaatatccacatgtaaggcc

SEQ ID NO: 3785246 - DNA, 25 bp, Homo sapien
gaagtctgcattgaagtccacatga

SEQ ID NO: 3785247 - DNA, 25 bp, Homo sapien
gaaagtagaaggtagctagctgatc

SEQ ID NO: 3785248 - DNA, 25 bp, Homo sapien
ttagacaacaggttatatacaaatt

SEQ ID NO: 3785249 - DNA, 25 bp, Homo sapien
ggtagctagctgatcactaatgata

SEQ ID NO: 3785250 - DNA, 25 bp, Homo sapien
cataaaatttagacaacaggttata

SEQ ID NO: 3785251 - DNA, 25 bp, Homo sapien
gaatctgcaaaaatccgtcacattg

SEQ ID NO: 3785252 - DNA, 25 bp, Homo sapien
taatgttgctagtgccaggtaatgg

SEQ ID NO: 3785253 - DNA, 25 bp, Homo sapien
gagtgcctactcacaaatcaactgt

SEQ ID NO: 3785254 - DNA, 25 bp, Homo sapien
tcccttcaattaagaggagacacac

SEQ ID NO: 3785255 - DNA, 25 bp, Homo sapien
tttaaagcaaatcagtgaaggaaag

SEQ ID NO: 3785256 - DNA, 25 bp, Homo sapien
taaagcaaatcagtgaaggaaagga

SEQ ID NO: 3785257 - DNA, 25 bp, Homo sapien
aaagcaaatcagtgaaggaaaggac

SEQ ID NO: 3785258 - DNA, 25 bp, Homo sapien
agcaaatcagtgaaggaaaggacaa

SEQ ID NO: 3785259 - DNA, 25 bp, Homo sapien
tttgcttgtttcacatggagacctt

SEQ ID NO: 3785260 - DNA, 25 bp, Homo sapien
ggagactcaattcacgttaagacac

SEQ ID NO: 3785261 - DNA, 25 bp, Homo sapien
gcttgtttcacatggagaccttgga

SEQ ID NO: 3785262 - DNA, 25 bp, Homo sapien
cacgttaagacacctaagtacgagt

SEQ ID NO: 3785263 - DNA, 25 bp, Homo sapien
tagcgttagtaaccatgctgcactg

SEQ ID NO: 3785264 - DNA, 25 bp, Homo sapien
gattttaatattagtctgacatagc

SEQ ID NO: 3785265 - DNA, 25 bp, Homo sapien
gacatagcgttagtaaccatgctgc

SEQ ID NO: 3785266 - DNA, 25 bp, Homo sapien
ttagtctgacatagcgttagtaacc

SEQ ID NO: 3785267 - DNA, 25 bp, Homo sapien
gtaatggtacaatctgaatcatgat

SEQ ID NO: 3785268 - DNA, 25 bp, Homo sapien
catgattcgttaaatattatacccc

SEQ ID NO: 3785269 - DNA, 25 bp, Homo sapien
tattcagcaatacataaactgcctc

SEQ ID NO: 3785270 - DNA, 25 bp, Homo sapien
cagcaatacataaactgcctcaaag

SEQ ID NO: 3785271 - DNA, 25 bp, Homo sapien
actcgattgcagactccttcatacc

SEQ ID NO: 3785272 - DNA, 25 bp, Homo sapien
gaacagaccagtcactcgattgcag

SEQ ID NO: 3785273 - DNA, 25 bp, Homo sapien
cagtatagtgcatgattgattcaac

SEQ ID NO: 3785274 - DNA, 25 bp, Homo sapien
tttgtataatcatatattgcaacaa

SEQ ID NO: 3785275 - DNA, 25 bp, Homo sapien
ctcaatataattcttgggggcccaa

SEQ ID NO: 3785276 - DNA, 25 bp, Homo sapien
catctgcatatggatcattatactg

SEQ ID NO: 3785277 - DNA, 25 bp, Homo sapien
atcaaacatgggaatgtcatctggt

SEQ ID NO: 3785278 - DNA, 25 bp, Homo sapien
catgggaatgtcatctggtggaggt

SEQ ID NO: 3785279 - DNA, 25 bp, Homo sapien
caaacatgggaatgtcatctggtgg

SEQ ID NO: 3785280 - DNA, 25 bp, Homo sapien
aacatgggaatgtcatctggtggag

SEQ ID NO: 3785281 - DNA, 25 bp, Homo sapien
cttattccaaggttcagatcgggac

SEQ ID NO: 3785282 - DNA, 25 bp, Homo sapien
ctaaaaattcagtctcctgtggaca

SEQ ID NO: 3785283 - DNA, 25 bp, Homo sapien
gctagtaaaacataagcacgggatg

SEQ ID NO: 3785284 - DNA, 25 bp, Homo sapien
gaaagcctagatcctaaagattcga

SEQ ID NO: 3785285 - DNA, 25 bp, Homo sapien
tctaccctccttggaataatgtgct

SEQ ID NO: 3785286 - DNA, 25 bp, Homo sapien
tgaatatacaaccaagggctccagg

SEQ ID NO: 3785287 - DNA, 25 bp, Homo sapien
ctctcgagggatgaaagggctatta

SEQ ID NO: 3785288 - DNA, 25 bp, Homo sapien
gaaaatgggtacagacccctcctga

SEQ ID NO: 3785289 - DNA, 25 bp, Homo sapien
taggctgctacatgcattcattatc

SEQ ID NO: 3785290 - DNA, 25 bp, Homo sapien
cacccactttgagtgtcataagaaa

SEQ ID NO: 3785291 - DNA, 25 bp, Homo sapien
aaggagaatcactgactgacccaag

SEQ ID NO: 3785292 - DNA, 25 bp, Homo sapien
aatatagtaccaagagcctctttag

SEQ ID NO: 3785293 - DNA, 25 bp, Homo sapien
ggagtctggcacgtaacatcgggta

SEQ ID NO: 3785294 - DNA, 25 bp, Homo sapien
taaactgctggtattcttcccggag

SEQ ID NO: 3785295 - DNA, 25 bp, Homo sapien
cacaaatatttgactggcaggaggg

SEQ ID NO: 3785296 - DNA, 25 bp, Homo sapien
gccaattggatcacacatttcctga

SEQ ID NO: 3785297 - DNA, 25 bp, Homo sapien
cactcacactgaaatggatagcatg

SEQ ID NO: 3785298 - DNA, 25 bp, Homo sapien
tattcaggaacaatcttcgtgggcc

SEQ ID NO: 3785299 - DNA, 25 bp, Homo sapien
cctgaacttcattcgagagaagatc

SEQ ID NO: 3785300 - DNA, 25 bp, Homo sapien
tgggcctggatgtagccaaaatgtg

SEQ ID NO: 3785301 - DNA, 25 bp, Homo sapien
tgttttcctgcaccctggccacgaa

SEQ ID NO: 3785302 - DNA, 25 bp, Homo sapien
ttttcctgcaccctggccacgaagc

SEQ ID NO: 3785303 - DNA, 25 bp, Homo sapien
gttttcctgcaccctggccacgaag

SEQ ID NO: 3785304 - DNA, 25 bp, Homo sapien
tctgtggagtcaactgaggcatagg

SEQ ID NO: 3785305 - DNA, 25 bp, Homo sapien
ctgtggagtcaactgaggcataggg

SEQ ID NO: 3785306 - DNA, 25 bp, Homo sapien
aaaggccaagttgtgcttagccaat

SEQ ID NO: 3785307 - DNA, 25 bp, Homo sapien
caaagaacagtttgcaaatgaaaca

SEQ ID NO: 3785308 - DNA, 25 bp, Homo sapien
gcagaagtcagttacaaggaccaca

SEQ ID NO: 3785309 - DNA, 25 bp, Homo sapien
tggagtacatttcccacaagcaaac

SEQ ID NO: 3785310 - DNA, 25 bp, Homo sapien
actactactacaacaccaacagtaa

SEQ ID NO: 3785311 - DNA, 25 bp, Homo sapien
tttaaaatctgaggccaaatttgct

SEQ ID NO: 3785312 - DNA, 25 bp, Homo sapien
ccaacagtaactcagattgaaggat

SEQ ID NO: 3785313 - DNA, 25 bp, Homo sapien
aaataatccacacaagcattgctaa

SEQ ID NO: 3785314 - DNA, 25 bp, Homo sapien
caattgttgtctatcactggcaaga

SEQ ID NO: 3785315 - DNA, 25 bp, Homo sapien
tactacgctgtctcaaacatgccaa

SEQ ID NO: 3785316 - DNA, 25 bp, Homo sapien
gagtaattaagcaggcatcacaaac

SEQ ID NO: 3785317 - DNA, 25 bp, Homo sapien
tatactcaatatagacacgtctcga

SEQ ID NO: 3785318 - DNA, 25 bp, Homo sapien
gagttgtgtcgagatatctgcctgg

SEQ ID NO: 3785319 - DNA, 25 bp, Homo sapien
attttgagaataaagtggacctcca

SEQ ID NO: 3785320 - DNA, 25 bp, Homo sapien
gagggagttcgtctgtatccaccag

SEQ ID NO: 3785321 - DNA, 25 bp, Homo sapien
ctccattaacatgaggctgagcaga

SEQ ID NO: 3785322 - DNA, 25 bp, Homo sapien
ctatcacagtgctcactgggagaag

SEQ ID NO: 3785323 - DNA, 25 bp, Homo sapien
aggtggtgctggtggagctccagaa

SEQ ID NO: 3785324 - DNA, 25 bp, Homo sapien
gagaagtggtgccagaggtggtgct

SEQ ID NO: 3785325 - DNA, 25 bp, Homo sapien
cactgggagaagtggtgccagaggt

SEQ ID NO: 3785326 - DNA, 25 bp, Homo sapien
tactgctaccactgttttctcgact

SEQ ID NO: 3785327 - DNA, 25 bp, Homo sapien
actgttttctcgacttccacttcct

SEQ ID NO: 3785328 - DNA, 25 bp, Homo sapien
tgggaatgccaatactactgctacc

SEQ ID NO: 3785329 - DNA, 25 bp, Homo sapien
tccaatagtgggtggcgaaggtgta

SEQ ID NO: 3785330 - DNA, 25 bp, Homo sapien
tccaagcctagcaggactggtcata

SEQ ID NO: 3785331 - DNA, 25 bp, Homo sapien
cctagcaggactggtcatatagtca

SEQ ID NO: 3785332 - DNA, 25 bp, Homo sapien
gcaggactggtcatatagtcattag

SEQ ID NO: 3785333 - DNA, 25 bp, Homo sapien
aagcctagcaggactggtcatatag

SEQ ID NO: 3785334 - DNA, 25 bp, Homo sapien
gaagagctgtggactaagccatact

SEQ ID NO: 3785335 - DNA, 25 bp, Homo sapien
taccagcagaagcatagttacaagt

SEQ ID NO: 3785336 - DNA, 25 bp, Homo sapien
gaagaggcctaagattaccagcaga

SEQ ID NO: 3785337 - DNA, 25 bp, Homo sapien
taagtctcagacaccaataggcgaa

SEQ ID NO: 3785338 - DNA, 25 bp, Homo sapien
gatttgttctcgacagtgtgccagt

SEQ ID NO: 3785339 - DNA, 25 bp, Homo sapien
gacttggcggtttctgagtaggagg

SEQ ID NO: 3785340 - DNA, 25 bp, Homo sapien
cagtgttccccggcctgacatggga

SEQ ID NO: 3785341 - DNA, 25 bp, Homo sapien
tttctgagtaggaggatttgttctc

SEQ ID NO: 3785342 - DNA, 25 bp, Homo sapien
ctaaaatgtagaaagaaatgctttt

SEQ ID NO: 3785343 - DNA, 25 bp, Homo sapien
taaaatgtagaaagaaatgctttta

SEQ ID NO: 3785344 - DNA, 25 bp, Homo sapien
ttctgaaccccaatcctgtgcaggc

SEQ ID NO: 3785345 - DNA, 25 bp, Homo sapien
tgcacagtgataacttagccagatt

SEQ ID NO: 3785346 - DNA, 25 bp, Homo sapien
tgcatgagacctaacactttactgg

SEQ ID NO: 3785347 - DNA, 25 bp, Homo sapien
caatgtgtagtcctaaagcatcact

SEQ ID NO: 3785348 - DNA, 25 bp, Homo sapien
tgtgcgagaaatttggtacacttca

SEQ ID NO: 3785349 - DNA, 25 bp, Homo sapien
ctcatttatagaaactgtgcgagaa

SEQ ID NO: 3785350 - DNA, 25 bp, Homo sapien
tcatttatagaaactgtgcgagaaa

SEQ ID NO: 3785351 - DNA, 25 bp, Homo sapien
atttatagaaactgtgcgagaaatt

SEQ ID NO: 3785352 - DNA, 25 bp, Homo sapien
gctattgcacttcagtgagaccctg

SEQ ID NO: 3785353 - DNA, 25 bp, Homo sapien
gagcctagaaagttgtgagctgtga

SEQ ID NO: 3785354 - DNA, 25 bp, Homo sapien
taagatctcatttcaggctaggcac

SEQ ID NO: 3785355 - DNA, 25 bp, Homo sapien
caatgttggcaagtgttagtaggaa

SEQ ID NO: 3785356 - DNA, 25 bp, Homo sapien
tataaagctttagtttctacactgt

SEQ ID NO: 3785357 - DNA, 25 bp, Homo sapien
acattataaagctttagtttctaca

SEQ ID NO: 3785358 - DNA, 25 bp, Homo sapien
aaatcttcctatgtaaacattataa

SEQ ID NO: 3785359 - DNA, 25 bp, Homo sapien
ccagccaaggccaattctttctttg

SEQ ID NO: 3785360 - DNA, 25 bp, Homo sapien
tatggcaatcgtaagcatgaagcct

SEQ ID NO: 3785361 - DNA, 25 bp, Homo sapien
tattattcccaaaaatcgaaccaga

SEQ ID NO: 3785362 - DNA, 25 bp, Homo sapien
cacagtaatccagtcatcccttggt

SEQ ID NO: 3785363 - DNA, 25 bp, Homo sapien
cccttggtatatcaaggaggcttgg

SEQ ID NO: 3785364 - DNA, 25 bp, Homo sapien
aatggaggatattcactactaagac

SEQ ID NO: 3785365 - DNA, 25 bp, Homo sapien
gatcagtctagtttaaagcaccttg

SEQ ID NO: 3785366 - DNA, 25 bp, Homo sapien
tacaatcctagccacatccctggat

SEQ ID NO: 3785367 - DNA, 25 bp, Homo sapien
taaatcccaaggtggatagtaacac

SEQ ID NO: 3785368 - DNA, 25 bp, Homo sapien
gtaacagatctagcaacagcaccag

SEQ ID NO: 3785369 - DNA, 25 bp, Homo sapien
tccaaatgcttgcaaaatgacccat

SEQ ID NO: 3785370 - DNA, 25 bp, Homo sapien
tcagatcaatcagctaggacaagct

SEQ ID NO: 3785371 - DNA, 25 bp, Homo sapien
tagtttatcctgagcagagacagcg

SEQ ID NO: 3785372 - DNA, 25 bp, Homo sapien
tgataaaattgcaccccaaccttag

SEQ ID NO: 3785373 - DNA, 25 bp, Homo sapien
gaaagacatagaattcacaacacaa

SEQ ID NO: 3785374 - DNA, 25 bp, Homo sapien
tatttactggatatgcaaattagct

SEQ ID NO: 3785375 - DNA, 25 bp, Homo sapien
tgccagctgctaaagagaatctatt

SEQ ID NO: 3785376 - DNA, 25 bp, Homo sapien
tcatccagaactgtgtaatcgatag

SEQ ID NO: 3785377 - DNA, 25 bp, Homo sapien
atataccttacagggcgctccatat

SEQ ID NO: 3785378 - DNA, 25 bp, Homo sapien
aaaataccaatctctcttcgtgcca

SEQ ID NO: 3785379 - DNA, 25 bp, Homo sapien
taatcgataggtttccgaatatacc

SEQ ID NO: 3785380 - DNA, 25 bp, Homo sapien
gcaacagtcttctaattggtccact

SEQ ID NO: 3785381 - DNA, 25 bp, Homo sapien
tcaatggtaccttaaagtgaacgtg

SEQ ID NO: 3785382 - DNA, 25 bp, Homo sapien
cagtctgctctctatggtgtaacca

SEQ ID NO: 3785383 - DNA, 25 bp, Homo sapien
ttggtccacttgtacccagtctggc

SEQ ID NO: 3785384 - DNA, 25 bp, Homo sapien
tgcagaattattcaggacacgattt

SEQ ID NO: 3785385 - DNA, 25 bp, Homo sapien
ttcacccttcctacttcactcacac

SEQ ID NO: 3785386 - DNA, 25 bp, Homo sapien
tattcaggacacgatttcaaattac

SEQ ID NO: 3785387 - DNA, 25 bp, Homo sapien
ttaaaagagcatcccacatggtccc

SEQ ID NO: 3785388 - DNA, 25 bp, Homo sapien
ttttagtgtacgtgctgcagaagtg

SEQ ID NO: 3785389 - DNA, 25 bp, Homo sapien
tagtgtacgtgctgcagaagtgacc

SEQ ID NO: 3785390 - DNA, 25 bp, Homo sapien
ttagtgtacgtgctgcagaagtgac

SEQ ID NO: 3785391 - DNA, 25 bp, Homo sapien
gtgtacgtgctgcagaagtgaccac

SEQ ID NO: 3785392 - DNA, 25 bp, Homo sapien
cattaacttataatacatatggaca

SEQ ID NO: 3785393 - DNA, 25 bp, Homo sapien
taatacatatggacactaattaatg

SEQ ID NO: 3785394 - DNA, 25 bp, Homo sapien
ctgacaacaattcattaacttataa

SEQ ID NO: 3785395 - DNA, 25 bp, Homo sapien
tggacactaattaatgttacttttc

SEQ ID NO: 3785396 - DNA, 25 bp, Homo sapien
gcctcctgagtgagtagctgggatt

SEQ ID NO: 3785397 - DNA, 25 bp, Homo sapien
ctcccaggttgaagtaatttgcctc

SEQ ID NO: 3785398 - DNA, 25 bp, Homo sapien
cagggtttcaccatcttggtcaggc

SEQ ID NO: 3785399 - DNA, 25 bp, Homo sapien
tcccaggttgaagtaatttgcctca

SEQ ID NO: 3785400 - DNA, 25 bp, Homo sapien
gcttggatatccagcaactggagta

SEQ ID NO: 3785401 - DNA, 25 bp, Homo sapien
ggaagactccattctccgaagctga

SEQ ID NO: 3785402 - DNA, 25 bp, Homo sapien
gtataggctttggtctcctctaaag

SEQ ID NO: 3785403 - DNA, 25 bp, Homo sapien
tatttgataagcaacactagctaga

SEQ ID NO: 3785404 - DNA, 25 bp, Homo sapien
tctctaatccaaacctatacccaaa

SEQ ID NO: 3785405 - DNA, 25 bp, Homo sapien
cccattccttctagaaatgtcacat

SEQ ID NO: 3785406 - DNA, 25 bp, Homo sapien
cttctagaaatgtcacatctgtcac

SEQ ID NO: 3785407 - DNA, 25 bp, Homo sapien
ttccttctagaaatgtcacatctgt

SEQ ID NO: 3785408 - DNA, 25 bp, Homo sapien
cttccaggaagaatccataatcact

SEQ ID NO: 3785409 - DNA, 25 bp, Homo sapien
accttccaggaagaatccataatca

SEQ ID NO: 3785410 - DNA, 25 bp, Homo sapien
ccttccaggaagaatccataatcac

SEQ ID NO: 3785411 - DNA, 25 bp, Homo sapien
agcaatttgtgaggcccaagtggga

SEQ ID NO: 3785412 - DNA, 25 bp, Homo sapien
aattccagcaatttgtgaggcccaa

SEQ ID NO: 3785413 - DNA, 25 bp, Homo sapien
tgagcagcacagcaagacctcgtct

SEQ ID NO: 3785414 - DNA, 25 bp, Homo sapien
tccagcaatttgtgaggcccaagtg

SEQ ID NO: 3785415 - DNA, 25 bp, Homo sapien
gagtttgagagcagacacagcaaca

SEQ ID NO: 3785416 - DNA, 25 bp, Homo sapien
aggagtttgagagcagacacagcaa

SEQ ID NO: 3785417 - DNA, 25 bp, Homo sapien
ttgagagcagacacagcaacacagc

SEQ ID NO: 3785418 - DNA, 25 bp, Homo sapien
tttgagagcagacacagcaacacag

SEQ ID NO: 3785419 - DNA, 25 bp, Homo sapien
gtcctcttattagctacatgttaca

SEQ ID NO: 3785420 - DNA, 25 bp, Homo sapien
gatctctaggctctttcatcctaca

SEQ ID NO: 3785421 - DNA, 25 bp, Homo sapien
ttgctcctggtaacccactctttta

SEQ ID NO: 3785422 - DNA, 25 bp, Homo sapien
tctattcatttagcaggaattccaa

SEQ ID NO: 3785423 - DNA, 25 bp, Homo sapien
cactcagcatactgcctccaggtca

SEQ ID NO: 3785424 - DNA, 25 bp, Homo sapien
tatgcccgataaggaattgctgggt

SEQ ID NO: 3785425 - DNA, 25 bp, Homo sapien
ctttaggtatatgcccgataaggaa

SEQ ID NO: 3785426 - DNA, 25 bp, Homo sapien
aaggtgatctcacttcctttaggta

SEQ ID NO: 3785427 - DNA, 25 bp, Homo sapien
cttctccaatccatcccgtaccaat

SEQ ID NO: 3785428 - DNA, 25 bp, Homo sapien
ctaactggtcactgtccatccagtc

SEQ ID NO: 3785429 - DNA, 25 bp, Homo sapien
ccaatccatcccgtaccaatgtaag

SEQ ID NO: 3785430 - DNA, 25 bp, Homo sapien
cccgtaccaatgtaagatgaatctt

SEQ ID NO: 3785431 - DNA, 25 bp, Homo sapien
cattcttagcaccaaagtcagcagc

SEQ ID NO: 3785432 - DNA, 25 bp, Homo sapien
ttcttagcaccaaagtcagcagcac

SEQ ID NO: 3785433 - DNA, 25 bp, Homo sapien
attcttagcaccaaagtcagcagca

SEQ ID NO: 3785434 - DNA, 25 bp, Homo sapien
cccttctgcggcttcagcctcgtcc

SEQ ID NO: 3785435 - DNA, 25 bp, Homo sapien
ctcccttctgcggcttcagcctcgt

SEQ ID NO: 3785436 - DNA, 25 bp, Homo sapien
ttctgcggcttcagcctcgtccctg

SEQ ID NO: 3785437 - DNA, 25 bp, Homo sapien
cttctgcggcttcagcctcgtccct

SEQ ID NO: 3785438 - DNA, 25 bp, Homo sapien
cagtgggctggtcactccggcgggt

SEQ ID NO: 3785439 - DNA, 25 bp, Homo sapien
gcgggtcctcgacccggccagcgcc

SEQ ID NO: 3785440 - DNA, 25 bp, Homo sapien
ccgcccagtgggctggtcactccgg

SEQ ID NO: 3785441 - DNA, 25 bp, Homo sapien
gctggtcactccggcgggtcctcga

SEQ ID NO: 3785442 - DNA, 25 bp, Homo sapien
tcagcgccctcttgccagacgggat

SEQ ID NO: 3785443 - DNA, 25 bp, Homo sapien
gtatgtagttgttttcacagtagtc

SEQ ID NO: 3785444 - DNA, 25 bp, Homo sapien
ccagacgggatctcctcctctagta

SEQ ID NO: 3785445 - DNA, 25 bp, Homo sapien
gccacccgagtcaggttctggtaac

SEQ ID NO: 3785446 - DNA, 25 bp, Homo sapien
tttccacccctctgcatcgcttcct

SEQ ID NO: 3785447 - DNA, 25 bp, Homo sapien
gccgaggctccgagcacctcacagc

SEQ ID NO: 3785448 - DNA, 25 bp, Homo sapien
cgcctggtattgtgggacggcacct

SEQ ID NO: 3785449 - DNA, 25 bp, Homo sapien
ctggtattgtgggacggcacctcct

SEQ ID NO: 3785450 - DNA, 25 bp, Homo sapien
gaggcagcaaggtccgccgaggctc

SEQ ID NO: 3785451 - DNA, 25 bp, Homo sapien
ctgaacattgatgcttcgtgtctct

SEQ ID NO: 3785452 - DNA, 25 bp, Homo sapien
ctcttgcgggggtggggcattagga

SEQ ID NO: 3785453 - DNA, 25 bp, Homo sapien
attgatgcttcgtgtctcttgcggg

SEQ ID NO: 3785454 - DNA, 25 bp, Homo sapien
attaggaggcctcttggcgaccgcg

SEQ ID NO: 3785455 - DNA, 25 bp, Homo sapien
gtggcggcaggaagtagtctggcag

SEQ ID NO: 3785456 - DNA, 25 bp, Homo sapien
tggcggcaggaagtagtctggcagg

SEQ ID NO: 3785457 - DNA, 25 bp, Homo sapien
ccgcctgtgttcttggccttggagg

SEQ ID NO: 3785458 - DNA, 25 bp, Homo sapien
aggggaagcccctgccgcctgtgtt

SEQ ID NO: 3785459 - DNA, 25 bp, Homo sapien
tggggccgtgcggggcccagagtgc

SEQ ID NO: 3785460 - DNA, 25 bp, Homo sapien
ccagagtgctcctgccggttcccga

SEQ ID NO: 3785461 - DNA, 25 bp, Homo sapien
cttggggccgtgcggggcccagagt

SEQ ID NO: 3785462 - DNA, 25 bp, Homo sapien
agagtgctcctgccggttcccgagg

SEQ ID NO: 3785463 - DNA, 25 bp, Homo sapien
ctgcaaacaagcgacggcagcattc

SEQ ID NO: 3785464 - DNA, 25 bp, Homo sapien
tgcaaacaagcgacggcagcattca

SEQ ID NO: 3785465 - DNA, 25 bp, Homo sapien
atgtgtttgggccttttccagaaca

SEQ ID NO: 3785466 - DNA, 25 bp, Homo sapien
gaaagatacttcctggctacttctt

SEQ ID NO: 3785467 - DNA, 25 bp, Homo sapien
tcttgaaagttaatctgaaaataca

SEQ ID NO: 3785468 - DNA, 25 bp, Homo sapien
gagtgagcaaagaattttcaacatt

SEQ ID NO: 3785469 - DNA, 25 bp, Homo sapien
caaagcagtttacatctataaagca

SEQ ID NO: 3785470 - DNA, 25 bp, Homo sapien
agcaaagagagcaattcacaggcat

SEQ ID NO: 3785471 - DNA, 25 bp, Homo sapien
aacaaagcaaagagagcaattcaca

SEQ ID NO: 3785472 - DNA, 25 bp, Homo sapien
aaaacaaagcaaagagagcaattca

SEQ ID NO: 3785473 - DNA, 25 bp, Homo sapien
caaagcaaagagagcaattcacagg

SEQ ID NO: 3785474 - DNA, 25 bp, Homo sapien
gacaaaactttatatgagattcagc

SEQ ID NO: 3785475 - DNA, 25 bp, Homo sapien
gagtagggtatttgataaagcccac

SEQ ID NO: 3785476 - DNA, 25 bp, Homo sapien
gacgtggtacacaaaaccgtatgaa

SEQ ID NO: 3785477 - DNA, 25 bp, Homo sapien
accgtatgaaaaagctgaggttctg

SEQ ID NO: 3785478 - DNA, 25 bp, Homo sapien
cgtgctgagtgcaggaacaatgttt

SEQ ID NO: 3785479 - DNA, 25 bp, Homo sapien
gtgctgagtgcaggaacaatgtttg

SEQ ID NO: 3785480 - DNA, 25 bp, Homo sapien
tgctgagtgcaggaacaatgtttga

SEQ ID NO: 3785481 - DNA, 25 bp, Homo sapien
gcacaagtgtcgctgaacctgggag

SEQ ID NO: 3785482 - DNA, 25 bp, Homo sapien
acaacaacgaaagagtacattggac

SEQ ID NO: 3785483 - DNA, 25 bp, Homo sapien
gtacattggacacagaaacaatgga

SEQ ID NO: 3785484 - DNA, 25 bp, Homo sapien
gctgaggcacaagtgtcgctgaacc

SEQ ID NO: 3785485 - DNA, 25 bp, Homo sapien
tccttttgacacaaagcttgactca

SEQ ID NO: 3785486 - DNA, 25 bp, Homo sapien
tggaaggtctgcagttgttagagaa

SEQ ID NO: 3785487 - DNA, 25 bp, Homo sapien
caaagcttgactcatggaaggtctg

SEQ ID NO: 3785488 - DNA, 25 bp, Homo sapien
aaggtctgcagttgttagagaatca

SEQ ID NO: 3785489 - DNA, 25 bp, Homo sapien
aggatcccgccaaggatggccgcct

SEQ ID NO: 3785490 - DNA, 25 bp, Homo sapien
cttagaaaggatcccgccaaggatg

SEQ ID NO: 3785491 - DNA, 25 bp, Homo sapien
aaaggatcccgccaaggatggccgc

SEQ ID NO: 3785492 - DNA, 25 bp, Homo sapien
agaaaggatcccgccaaggatggcc

SEQ ID NO: 3785493 - DNA, 25 bp, Homo sapien
agcccacaccagaaggtcttccgct

SEQ ID NO: 3785494 - DNA, 25 bp, Homo sapien
cacaccagaaggtcttccgctcctc

SEQ ID NO: 3785495 - DNA, 25 bp, Homo sapien
gcccacaccagaaggtcttccgctc

SEQ ID NO: 3785496 - DNA, 25 bp, Homo sapien
ccagcccacaccagaaggtcttccg

SEQ ID NO: 3785497 - DNA, 25 bp, Homo sapien
cagagatgctttagccatgctcagc

SEQ ID NO: 3785498 - DNA, 25 bp, Homo sapien
agcaaactctaggcaggaggaagga

SEQ ID NO: 3785499 - DNA, 25 bp, Homo sapien
aacttaagcagtatctgccgcctcc

SEQ ID NO: 3785500 - DNA, 25 bp, Homo sapien
tgtggatgcctctgggggaacttgg

SEQ ID NO: 3785501 - DNA, 25 bp, Homo sapien
ggggaacttgggtcagcaatggcca

SEQ ID NO: 3785502 - DNA, 25 bp, Homo sapien
ggagtccagcgctactgctgcctct

SEQ ID NO: 3785503 - DNA, 25 bp, Homo sapien
caggactcttgctggctcccaaatt

SEQ ID NO: 3785504 - DNA, 25 bp, Homo sapien
gtgctgctgtcaggactcttgctgg

SEQ ID NO: 3785505 - DNA, 25 bp, Homo sapien
aaagcagtggagtccagcgctactg

SEQ ID NO: 3785506 - DNA, 25 bp, Homo sapien
tgctcccgtatatcgcggcctgcat

SEQ ID NO: 3785507 - DNA, 25 bp, Homo sapien
tcagatagccccacttgtggctggc

SEQ ID NO: 3785508 - DNA, 25 bp, Homo sapien
tcgcggcctgcatcttcacagtctg

SEQ ID NO: 3785509 - DNA, 25 bp, Homo sapien
tgggcacctctgctcccgtatatcg

SEQ ID NO: 3785510 - DNA, 25 bp, Homo sapien
tgtgaacccttgtgccaattggggc

SEQ ID NO: 3785511 - DNA, 25 bp, Homo sapien
gaacccttgtgccaattggggctgg

SEQ ID NO: 3785512 - DNA, 25 bp, Homo sapien
tctgtgaacccttgtgccaattggg

SEQ ID NO: 3785513 - DNA, 25 bp, Homo sapien
gctctgtgaacccttgtgccaattg

SEQ ID NO: 3785514 - DNA, 25 bp, Homo sapien
agcttgggtcttcgcttgcacccaa

SEQ ID NO: 3785515 - DNA, 25 bp, Homo sapien
gcttgcacccaagtctgcagggctc

SEQ ID NO: 3785516 - DNA, 25 bp, Homo sapien
catatgcaatagttcagtgtgggcc

SEQ ID NO: 3785517 - DNA, 25 bp, Homo sapien
tgcatatgcaatagttcagtgtggg

SEQ ID NO: 3785518 - DNA, 25 bp, Homo sapien
tttggcctaggatggtgactcacgc

SEQ ID NO: 3785519 - DNA, 25 bp, Homo sapien
tctctctgatgccaaaggtggtgca

SEQ ID NO: 3785520 - DNA, 25 bp, Homo sapien
tgaatctaaacagtatccgtcgcct

SEQ ID NO: 3785521 - DNA, 25 bp, Homo sapien
gaacaacattggtcaggcctgatgg

SEQ ID NO: 3785522 - DNA, 25 bp, Homo sapien
ggggtcctgcgctactaccacctcc

SEQ ID NO: 3785523 - DNA, 25 bp, Homo sapien
gtcttctggtgccgctgtcaggaca

SEQ ID NO: 3785524 - DNA, 25 bp, Homo sapien
ggtcttctggtgccgctgtcaggac

SEQ ID NO: 3785525 - DNA, 25 bp, Homo sapien
ggtcctgcgctactaccacctccac

SEQ ID NO: 3785526 - DNA, 25 bp, Homo sapien
gctagcccaattgcggctcgcagtg

SEQ ID NO: 3785527 - DNA, 25 bp, Homo sapien
tgagctagcccaattgcggctcgca

SEQ ID NO: 3785528 - DNA, 25 bp, Homo sapien
agcgtgttccgggtgcttctggtcc

SEQ ID NO: 3785529 - DNA, 25 bp, Homo sapien
ggaaagcgtgttccgggtgcttctg

SEQ ID NO: 3785530 - DNA, 25 bp, Homo sapien
aaatgtgcctcacgcagtgtctgac

SEQ ID NO: 3785531 - DNA, 25 bp, Homo sapien
caaggaacgcattgtgaactgctgt

SEQ ID NO: 3785532 - DNA, 25 bp, Homo sapien
ctaatgatcgctttggtagagcaac

SEQ ID NO: 3785533 - DNA, 25 bp, Homo sapien
taccgaagcctcataacaagcacat

SEQ ID NO: 3785534 - DNA, 25 bp, Homo sapien
ctggtgctgctgtcaggtccctcac

SEQ ID NO: 3785535 - DNA, 25 bp, Homo sapien
ctttgggcgtctcctggtgctgctg

SEQ ID NO: 3785536 - DNA, 25 bp, Homo sapien
cctggtgctgctgtcaggtccctca

SEQ ID NO: 3785537 - DNA, 25 bp, Homo sapien
tgggcgtctcctggtgctgctgtca

SEQ ID NO: 3785538 - DNA, 25 bp, Homo sapien
gcagcctgcgccttcgttgtatgca

SEQ ID NO: 3785539 - DNA, 25 bp, Homo sapien
ttcaactgggcaggttccatagcag

SEQ ID NO: 3785540 - DNA, 25 bp, Homo sapien
tgtatgcacacttgtagacgtcaga

SEQ ID NO: 3785541 - DNA, 25 bp, Homo sapien
agcagaccccacttgcaactggcag

SEQ ID NO: 3785542 - DNA, 25 bp, Homo sapien
cttctcaggcagcttgggtgttcgc

SEQ ID NO: 3785543 - DNA, 25 bp, Homo sapien
cctgaagagcgccaactgatggtac

SEQ ID NO: 3785544 - DNA, 25 bp, Homo sapien
gggtgttcgcttgtccccaagtctg

SEQ ID NO: 3785545 - DNA, 25 bp, Homo sapien
tgcctcacgcaatctctgaaacatt

SEQ ID NO: 3785546 - DNA, 25 bp, Homo sapien
gcatcttaccgacagctgtgcagga

SEQ ID NO: 3785547 - DNA, 25 bp, Homo sapien
tgttactaagtgtgaattgtccagc

SEQ ID NO: 3785548 - DNA, 25 bp, Homo sapien
gatttggaactatgctgcaggagca

SEQ ID NO: 3785549 - DNA, 25 bp, Homo sapien
tgtgcaggaagaccagccaaaacac

SEQ ID NO: 3785550 - DNA, 25 bp, Homo sapien
ctctaccgtaatgaaatctgtggca

SEQ ID NO: 3785551 - DNA, 25 bp, Homo sapien
ttattagaatgaagaagcgtacctc

SEQ ID NO: 3785552 - DNA, 25 bp, Homo sapien
tcagccattactttaggagagagag

SEQ ID NO: 3785553 - DNA, 25 bp, Homo sapien
gagtcccaatgtggctagctaagtt

SEQ ID NO: 3785554 - DNA, 25 bp, Homo sapien
gcaggacggctccaaacaccttatc

SEQ ID NO: 3785555 - DNA, 25 bp, Homo sapien
tcaaagcctcaggatggctccgcag

SEQ ID NO: 3785556 - DNA, 25 bp, Homo sapien
tcttctggtgccgatgtgctgctag

SEQ ID NO: 3785557 - DNA, 25 bp, Homo sapien
aatcagacagggcagactccaaatc

SEQ ID NO: 3785558 - DNA, 25 bp, Homo sapien
tgtgggggccctgcctggggctggc

SEQ ID NO: 3785559 - DNA, 25 bp, Homo sapien
cctggggctggctttggtgcacatg

SEQ ID NO: 3785560 - DNA, 25 bp, Homo sapien
ctgtgggggccctgcctggggctgg

SEQ ID NO: 3785561 - DNA, 25 bp, Homo sapien
cctgcctggggctggctttggtgca

SEQ ID NO: 3785562 - DNA, 25 bp, Homo sapien
catggggcaactccgctcttctcgg

SEQ ID NO: 3785563 - DNA, 25 bp, Homo sapien
tggggcaactccgctcttctcgggc

SEQ ID NO: 3785564 - DNA, 25 bp, Homo sapien
ggggcaactccgctcttctcgggca

SEQ ID NO: 3785565 - DNA, 25 bp, Homo sapien
gggcaactccgctcttctcgggcag

SEQ ID NO: 3785566 - DNA, 25 bp, Homo sapien
ggctccgcagaagccctgcgcaggc

SEQ ID NO: 3785567 - DNA, 25 bp, Homo sapien
cactcatagatgtcagagccgcaga

SEQ ID NO: 3785568 - DNA, 25 bp, Homo sapien
gctttggtgcacatgtgacaagtca

SEQ ID NO: 3785569 - DNA, 25 bp, Homo sapien
gtcagagccgcagaacggctccgca

SEQ ID NO: 3785570 - DNA, 25 bp, Homo sapien
ttatcagctgtggttcctgttgatc

SEQ ID NO: 3785571 - DNA, 25 bp, Homo sapien
ttattttatcagctgtggttcctgt

SEQ ID NO: 3785572 - DNA, 25 bp, Homo sapien
tattttatcagctgtggttcctgtt

SEQ ID NO: 3785573 - DNA, 25 bp, Homo sapien
ttttatcagctgtggttcctgttga

SEQ ID NO: 3785574 - DNA, 25 bp, Homo sapien
caggatctttttgagacacccaggc

SEQ ID NO: 3785575 - DNA, 25 bp, Homo sapien
gacaggatctttttgagacacccag

SEQ ID NO: 3785576 - DNA, 25 bp, Homo sapien
tgagacaggatctttttgagacacc

SEQ ID NO: 3785577 - DNA, 25 bp, Homo sapien
cctggcctgttgtattgtgtaaaaa

SEQ ID NO: 3785578 - DNA, 25 bp, Homo sapien
agagaaccactccagactgattttt

SEQ ID NO: 3785579 - DNA, 25 bp, Homo sapien
gagaaccactccagactgattttta

SEQ ID NO: 3785580 - DNA, 25 bp, Homo sapien
gggtctaacatgcagctcactccac

SEQ ID NO: 3785581 - DNA, 25 bp, Homo sapien
cttccttagaggtttcagcaggaca

SEQ ID NO: 3785582 - DNA, 25 bp, Homo sapien
catagccacctacccttttagagaa

SEQ ID NO: 3785583 - DNA, 25 bp, Homo sapien
tcaacatgacattaaacgaagggtc

SEQ ID NO: 3785584 - DNA, 25 bp, Homo sapien
tttaattgcaaggaaggcgtagtac

SEQ ID NO: 3785585 - DNA, 25 bp, Homo sapien
ggcgtagtacagtgcaacaaaagat

SEQ ID NO: 3785586 - DNA, 25 bp, Homo sapien
cttgtttaattgcaaggaaggcgta

SEQ ID NO: 3785587 - DNA, 25 bp, Homo sapien
aacaaaagatgatgagcatgcagaa

SEQ ID NO: 3785588 - DNA, 25 bp, Homo sapien
gatccagtggcattacggtggtttg

SEQ ID NO: 3785589 - DNA, 25 bp, Homo sapien
taaacacataagaaatcctgttagc

SEQ ID NO: 3785590 - DNA, 25 bp, Homo sapien
cattacggtggtttgcattcttgga

SEQ ID NO: 3785591 - DNA, 25 bp, Homo sapien
tgttagcagctatgctcattgcaga

SEQ ID NO: 3785592 - DNA, 25 bp, Homo sapien
tcagtgatcataattgaaaccagcc

SEQ ID NO: 3785593 - DNA, 25 bp, Homo sapien
aaccatagcaaagctggcctgagaa

SEQ ID NO: 3785594 - DNA, 25 bp, Homo sapien
catagcaaagctggcctgagaattg

SEQ ID NO: 3785595 - DNA, 25 bp, Homo sapien
cataattgaaaccagccacacacat

SEQ ID NO: 3785596 - DNA, 25 bp, Homo sapien
ctgctgaggatccagacattcagct

SEQ ID NO: 3785597 - DNA, 25 bp, Homo sapien
agggactccagcactctccagggct

SEQ ID NO: 3785598 - DNA, 25 bp, Homo sapien
tccaagtcactaattccaaacaagt

SEQ ID NO: 3785599 - DNA, 25 bp, Homo sapien
gctccataggtgcattccagaagca

SEQ ID NO: 3785600 - DNA, 25 bp, Homo sapien
tctgcatcataccatccttcaatat

SEQ ID NO: 3785601 - DNA, 25 bp, Homo sapien
cagcttttacctggcttggtgtcat

SEQ ID NO: 3785602 - DNA, 25 bp, Homo sapien
tctggtaaaatctctaccgtgcagt

SEQ ID NO: 3785603 - DNA, 25 bp, Homo sapien
cctgcccagcttttacctggcttgg

SEQ ID NO: 3785604 - DNA, 25 bp, Homo sapien
cttgccagaagttgtcaattccctc

SEQ ID NO: 3785605 - DNA, 25 bp, Homo sapien
ttgccagaagttgtcaattccctct

SEQ ID NO: 3785606 - DNA, 25 bp, Homo sapien
tgccagaagttgtcaattccctctc

SEQ ID NO: 3785607 - DNA, 25 bp, Homo sapien
ggcattacgtaggataagattattg

SEQ ID NO: 3785608 - DNA, 25 bp, Homo sapien
cgtaggcattacgtaggataagatt

SEQ ID NO: 3785609 - DNA, 25 bp, Homo sapien
tagtaacgtaggcattacgtaggat

SEQ ID NO: 3785610 - DNA, 25 bp, Homo sapien
tacgtaggataagattattgttgct

SEQ ID NO: 3785611 - DNA, 25 bp, Homo sapien
cctggaaaattgcatcctattcccc

SEQ ID NO: 3785612 - DNA, 25 bp, Homo sapien
ggaaaattgcatcctattcccccaa

SEQ ID NO: 3785613 - DNA, 25 bp, Homo sapien
tattcccccaattgcaacctcatct

SEQ ID NO: 3785614 - DNA, 25 bp, Homo sapien
attgcatcctattcccccaattgca

SEQ ID NO: 3785615 - DNA, 25 bp, Homo sapien
cctgttgccttctgttgagtgagta

SEQ ID NO: 3785616 - DNA, 25 bp, Homo sapien
gaaatcatcaggagacggagttgta

SEQ ID NO: 3785617 - DNA, 25 bp, Homo sapien
tgagagatgttcctacaggttcccc

SEQ ID NO: 3785618 - DNA, 25 bp, Homo sapien
gagttgtagaagtagaccaccctgt

SEQ ID NO: 3785619 - DNA, 25 bp, Homo sapien
cagtcagatatgtgtttgtctcagg

SEQ ID NO: 3785620 - DNA, 25 bp, Homo sapien
cataagacaacatagacaatatggc

SEQ ID NO: 3785621 - DNA, 25 bp, Homo sapien
gaagaagcagtcagatatgtgtttg

SEQ ID NO: 3785622 - DNA, 25 bp, Homo sapien
tttaacataagacaacatagacaat

SEQ ID NO: 3785623 - DNA, 25 bp, Homo sapien
caaaggttccaccttgggctgcagt

SEQ ID NO: 3785624 - DNA, 25 bp, Homo sapien
gttagagcacttctttgggcaacca

SEQ ID NO: 3785625 - DNA, 25 bp, Homo sapien
tgggcaaccattactctagacttct

SEQ ID NO: 3785626 - DNA, 25 bp, Homo sapien
tgcagtgagcatatctaacgccata

SEQ ID NO: 3785627 - DNA, 25 bp, Homo sapien
ctccataagatagcaattgccagta

SEQ ID NO: 3785628 - DNA, 25 bp, Homo sapien
tctccataagatagcaattgccagt

SEQ ID NO: 3785629 - DNA, 25 bp, Homo sapien
tgaccagaaacctcatcttcaggga

SEQ ID NO: 3785630 - DNA, 25 bp, Homo sapien
tatttgggttcctgacacatgggcc

SEQ ID NO: 3785631 - DNA, 25 bp, Homo sapien
cactgttcactcaggaggatgtgcc

SEQ ID NO: 3785632 - DNA, 25 bp, Homo sapien
gcttctagtcccaagtcaaaggttg

SEQ ID NO: 3785633 - DNA, 25 bp, Homo sapien
gtcctttgtcctgcacctgcgaaga

SEQ ID NO: 3785634 - DNA, 25 bp, Homo sapien
gcatcctattgagcctttgatcagc

SEQ ID NO: 3785635 - DNA, 25 bp, Homo sapien
gcggaggaagcactcagatacacat

SEQ ID NO: 3785636 - DNA, 25 bp, Homo sapien
tgacatagacaatagggcggaggaa

SEQ ID NO: 3785637 - DNA, 25 bp, Homo sapien
ggaaggcttattcctaaggtcatgt

SEQ ID NO: 3785638 - DNA, 25 bp, Homo sapien
aatatgatacgtaaaaaagaaagat

SEQ ID NO: 3785639 - DNA, 25 bp, Homo sapien
tggagataaaatatgatacgtaaaa

SEQ ID NO: 3785640 - DNA, 25 bp, Homo sapien
caattagagcagttctttggacaac

SEQ ID NO: 3785641 - DNA, 25 bp, Homo sapien
tctgcataacacagcaattgccagt

SEQ ID NO: 3785642 - DNA, 25 bp, Homo sapien
taggacaatcattgtaatggctatc

SEQ ID NO: 3785643 - DNA, 25 bp, Homo sapien
aaatttgtggataaaatgttatggc

SEQ ID NO: 3785644 - DNA, 25 bp, Homo sapien
tcttttgtatacaggtctgggctgg

SEQ ID NO: 3785645 - DNA, 25 bp, Homo sapien
tcgggtcagggaaatcaacttggct

SEQ ID NO: 3785646 - DNA, 25 bp, Homo sapien
gttttatggccattccccagatggg

SEQ ID NO: 3785647 - DNA, 25 bp, Homo sapien
tgtgaacatagagctcgccaattga

SEQ ID NO: 3785648 - DNA, 25 bp, Homo sapien
tgtcagggcctatgttcacaacctt

SEQ ID NO: 3785649 - DNA, 25 bp, Homo sapien
acatagtcatgaggggtttcatcag

SEQ ID NO: 3785650 - DNA, 25 bp, Homo sapien
gcatctattgcaggtctgtcctgga

SEQ ID NO: 3785651 - DNA, 25 bp, Homo sapien
ggaagtgagacattggtcagtcatc

SEQ ID NO: 3785652 - DNA, 25 bp, Homo sapien
catgaggggtttcatcagaaggtcc

SEQ ID NO: 3785653 - DNA, 25 bp, Homo sapien
gagacaccttgtcccttattggcta

SEQ ID NO: 3785654 - DNA, 25 bp, Homo sapien
cacaaacagtaggaagggaacccat

SEQ ID NO: 3785655 - DNA, 25 bp, Homo sapien
taaactacgctcactctatcagggt

SEQ ID NO: 3785656 - DNA, 25 bp, Homo sapien
tcacggaggttaacctattgacagg

SEQ ID NO: 3785657 - DNA, 25 bp, Homo sapien
ggctggagtctggataaaatgagaa

SEQ ID NO: 3785658 - DNA, 25 bp, Homo sapien
tgaagcagcatcactgatggagtaa

SEQ ID NO: 3785659 - DNA, 25 bp, Homo sapien
gaaatcaaggatgcggacacacaag

SEQ ID NO: 3785660 - DNA, 25 bp, Homo sapien
aatgcttgctttgtagagctcggca

SEQ ID NO: 3785661 - DNA, 25 bp, Homo sapien
tatagtagcttaaccatggacaaac

SEQ ID NO: 3785662 - DNA, 25 bp, Homo sapien
caaagtcaacattggccagtaatgg

SEQ ID NO: 3785663 - DNA, 25 bp, Homo sapien
gcccgaatggcacaacctaaagcta

SEQ ID NO: 3785664 - DNA, 25 bp, Homo sapien
ggtgaagttctgagtagtagccaga

SEQ ID NO: 3785665 - DNA, 25 bp, Homo sapien
ggaatgcccactaaagtaatcaggg

SEQ ID NO: 3785666 - DNA, 25 bp, Homo sapien
ataaagaggcatcgtgtctgcaacc

SEQ ID NO: 3785667 - DNA, 25 bp, Homo sapien
gatgcaatgagaagatcactgggtc

SEQ ID NO: 3785668 - DNA, 25 bp, Homo sapien
taatcaccatgaaacccaattgagg

SEQ ID NO: 3785669 - DNA, 25 bp, Homo sapien
tatgtaaatttgatggcactgtaac

SEQ ID NO: 3785670 - DNA, 25 bp, Homo sapien
cagttcctgcacaacaaaatgatgt

SEQ ID NO: 3785671 - DNA, 25 bp, Homo sapien
taatgacaacttagtggtttggctg

SEQ ID NO: 3785672 - DNA, 25 bp, Homo sapien
tgagaacagctatataaatcagtgc

SEQ ID NO: 3785673 - DNA, 25 bp, Homo sapien
tatgatacaaaaatacgttccttta

SEQ ID NO: 3785674 - DNA, 25 bp, Homo sapien
gtcacataaacagcccagtaataaa

SEQ ID NO: 3785675 - DNA, 25 bp, Homo sapien
tgtcacataaacagcccagtaataa

SEQ ID NO: 3785676 - DNA, 25 bp, Homo sapien
ccctagaggggaagctattgatcca

SEQ ID NO: 3785677 - DNA, 25 bp, Homo sapien
gggaagctattgatccagattccaa

SEQ ID NO: 3785678 - DNA, 25 bp, Homo sapien
gatccagattccaattcagcagcag

SEQ ID NO: 3785679 - DNA, 25 bp, Homo sapien
aacctgtacatattctcttgatgct

SEQ ID NO: 3785680 - DNA, 25 bp, Homo sapien
cttctttgagttctctagttatatt

SEQ ID NO: 3785681 - DNA, 25 bp, Homo sapien
tgagttctctagttatatttttttc

SEQ ID NO: 3785682 - DNA, 25 bp, Homo sapien
tatttttttccaactcctgctgcat

SEQ ID NO: 3785683 - DNA, 25 bp, Homo sapien
ttatatttttttccaactcctgctg

SEQ ID NO: 3785684 - DNA, 25 bp, Homo sapien
gctgagggcaactacttttgagaaa

SEQ ID NO: 3785685 - DNA, 25 bp, Homo sapien
ttgagaaaaggacaccaggtcagac

SEQ ID NO: 3785686 - DNA, 25 bp, Homo sapien
gaaaaggacaccaggtcagacataa

SEQ ID NO: 3785687 - DNA, 25 bp, Homo sapien
ccagaacccaggagggaggtgctct

SEQ ID NO: 3785688 - DNA, 25 bp, Homo sapien
tattgaggtagacaaggtgccatcg

SEQ ID NO: 3785689 - DNA, 25 bp, Homo sapien
ggcagcctgaggtccaacattaata

SEQ ID NO: 3785690 - DNA, 25 bp, Homo sapien
taataaagggagcacatctgcaact

SEQ ID NO: 3785691 - DNA, 25 bp, Homo sapien
tagcttaggagaaactgaacactgc

SEQ ID NO: 3785692 - DNA, 25 bp, Homo sapien
gagtgaaatcgtaaggctggattgc

SEQ ID NO: 3785693 - DNA, 25 bp, Homo sapien
taaggctggattgcaaggttcctct

SEQ ID NO: 3785694 - DNA, 25 bp, Homo sapien
ctatgagtgaaatcgtaaggctgga

SEQ ID NO: 3785695 - DNA, 25 bp, Homo sapien
atcgtaaggctggattgcaaggttc

SEQ ID NO: 3785696 - DNA, 25 bp, Homo sapien
tcaattaaacaactcggtatttcac

SEQ ID NO: 3785697 - DNA, 25 bp, Homo sapien
tagcacagataattatgacctttac

SEQ ID NO: 3785698 - DNA, 25 bp, Homo sapien
gaattgcctgaacctagacatagag

SEQ ID NO: 3785699 - DNA, 25 bp, Homo sapien
gcataagtcaattaaacaactcggt

SEQ ID NO: 3785700 - DNA, 25 bp, Homo sapien
cctggtagtgagagtggtgaacaaa

SEQ ID NO: 3785701 - DNA, 25 bp, Homo sapien
ttgaggtagagatcactaagttttc

SEQ ID NO: 3785702 - DNA, 25 bp, Homo sapien
tgctattatttgaagcccgtggatt

SEQ ID NO: 3785703 - DNA, 25 bp, Homo sapien
ttggtgttgacctctgctagcctct

SEQ ID NO: 3785704 - DNA, 25 bp, Homo sapien
taattcttctagatagagttgctta

SEQ ID NO: 3785705 - DNA, 25 bp, Homo sapien
agttgcttatatttttccagttcgg

SEQ ID NO: 3785706 - DNA, 25 bp, Homo sapien
tagtttacttgacaaagattttcta

SEQ ID NO: 3785707 - DNA, 25 bp, Homo sapien
atctgacttttcattgaagcaaaat

SEQ ID NO: 3785708 - DNA, 25 bp, Homo sapien
agttttcttgagatgctgcttgtgc

SEQ ID NO: 3785709 - DNA, 25 bp, Homo sapien
tctaagttttcttgagatgctgctt

SEQ ID NO: 3785710 - DNA, 25 bp, Homo sapien
taagttttcttgagatgctgcttgt

SEQ ID NO: 3785711 - DNA, 25 bp, Homo sapien
taaactgctctaagttttcttgaga

SEQ ID NO: 3785712 - DNA, 25 bp, Homo sapien
tgatcacttcttgttccaacttctt

SEQ ID NO: 3785713 - DNA, 25 bp, Homo sapien
caactcctcttgaagaatttggttc

SEQ ID NO: 3785714 - DNA, 25 bp, Homo sapien
tttgaacctgcagtctccagttctg

SEQ ID NO: 3785715 - DNA, 25 bp, Homo sapien
cctttctatatgacttctcaggttg

SEQ ID NO: 3785716 - DNA, 25 bp, Homo sapien
ctgaatgaagacaataatatagtgt

SEQ ID NO: 3785717 - DNA, 25 bp, Homo sapien
tagtgtaataatgaaggaagtagcc

SEQ ID NO: 3785718 - DNA, 25 bp, Homo sapien
atgaaggaagtagcctgagaatagc

SEQ ID NO: 3785719 - DNA, 25 bp, Homo sapien
gacaataatatagtgtaataatgaa

SEQ ID NO: 3785720 - DNA, 25 bp, Homo sapien
aatctccatggaaactaaattctcc

SEQ ID NO: 3785721 - DNA, 25 bp, Homo sapien
tcaaattgactagtttttaaatctc

SEQ ID NO: 3785722 - DNA, 25 bp, Homo sapien
gactagtttttaaatctccatggaa

SEQ ID NO: 3785723 - DNA, 25 bp, Homo sapien
gcttattaatctgaatatccatttc

SEQ ID NO: 3785724 - DNA, 25 bp, Homo sapien
cacatacttatacatgaatggttga

SEQ ID NO: 3785725 - DNA, 25 bp, Homo sapien
acatttttgacgtctgagttaaggg

SEQ ID NO: 3785726 - DNA, 25 bp, Homo sapien
gcagagaaagcatgtataaagacac

SEQ ID NO: 3785727 - DNA, 25 bp, Homo sapien
tacatttgatatccgttgaccactg

SEQ ID NO: 3785728 - DNA, 25 bp, Homo sapien
aattacattccagtgactgttttaa

SEQ ID NO: 3785729 - DNA, 25 bp, Homo sapien
aaattacattccagtgactgtttta

SEQ ID NO: 3785730 - DNA, 25 bp, Homo sapien
cacctgacttcaagatgagctatct

SEQ ID NO: 3785731 - DNA, 25 bp, Homo sapien
aatcaaatcttactaagacaatttt

SEQ ID NO: 3785732 - DNA, 25 bp, Homo sapien
aaacataacttttgcctgattcttg

SEQ ID NO: 3785733 - DNA, 25 bp, Homo sapien
taacttttgcctgattcttgtggct

SEQ ID NO: 3785734 - DNA, 25 bp, Homo sapien
ttaacttggcattatctttttcaag

SEQ ID NO: 3785735 - DNA, 25 bp, Homo sapien
gtaatttcttagcaaacacctgaag

SEQ ID NO: 3785736 - DNA, 25 bp, Homo sapien
tgacttcacacagatgtacttatga

SEQ ID NO: 3785737 - DNA, 25 bp, Homo sapien
ctagttgtggtttgtggataatgca

SEQ ID NO: 3785738 - DNA, 25 bp, Homo sapien
tcaaaagtaggtgatttggcaactc

SEQ ID NO: 3785739 - DNA, 25 bp, Homo sapien
cttgtgatcttgcatcttctcagca

SEQ ID NO: 3785740 - DNA, 25 bp, Homo sapien
ctgacagcttctgtatgtcgatcct

SEQ ID NO: 3785741 - DNA, 25 bp, Homo sapien
ttttgcttgtgatcttgcatcttct

SEQ ID NO: 3785742 - DNA, 25 bp, Homo sapien
tctgtatgtcgatcctgtgcttctt

SEQ ID NO: 3785743 - DNA, 25 bp, Homo sapien
catcagagcactggactgaaaacac

SEQ ID NO: 3785744 - DNA, 25 bp, Homo sapien
taacgtgacgtaacctccagtgaag

SEQ ID NO: 3785745 - DNA, 25 bp, Homo sapien
tctaaattaatacgataacgtgacg

SEQ ID NO: 3785746 - DNA, 25 bp, Homo sapien
cgtgacgtaacctccagtgaagcct

SEQ ID NO: 3785747 - DNA, 25 bp, Homo sapien
taatacgataacgtgacgtaacctc

SEQ ID NO: 3785748 - DNA, 25 bp, Homo sapien
tctctgagggcatctctcgtgtgat

SEQ ID NO: 3785749 - DNA, 25 bp, Homo sapien
tgcacaatagcatgaaactggtctt

SEQ ID NO: 3785750 - DNA, 25 bp, Homo sapien
tcagctgtcagaacactaagccgtc

SEQ ID NO: 3785751 - DNA, 25 bp, Homo sapien
cacgatcatgtatagcagcagccaa

SEQ ID NO: 3785752 - DNA, 25 bp, Homo sapien
atgctatttttatgcgataggtctt

SEQ ID NO: 3785753 - DNA, 25 bp, Homo sapien
catgctatttttatgcgataggtct

SEQ ID NO: 3785754 - DNA, 25 bp, Homo sapien
tttatgcgataggtctttttcttct

SEQ ID NO: 3785755 - DNA, 25 bp, Homo sapien
gagccatttcaatctccttttgttt

SEQ ID NO: 3785756 - DNA, 25 bp, Homo sapien
gtaacattctggcattctgttctcg

SEQ ID NO: 3785757 - DNA, 25 bp, Homo sapien
cattctggcattctgttctcgagaa

SEQ ID NO: 3785758 - DNA, 25 bp, Homo sapien
aacattctggcattctgttctcgag

SEQ ID NO: 3785759 - DNA, 25 bp, Homo sapien
cagaaaacagagactaagcatctat

SEQ ID NO: 3785760 - DNA, 25 bp, Homo sapien
catctattaggtgccaagatttatc

SEQ ID NO: 3785761 - DNA, 25 bp, Homo sapien
taagcatctattaggtgccaagatt

SEQ ID NO: 3785762 - DNA, 25 bp, Homo sapien
tattaggtgccaagatttatcatga

SEQ ID NO: 3785763 - DNA, 25 bp, Homo sapien
gagactcagttcaagctgttgtttc

SEQ ID NO: 3785764 - DNA, 25 bp, Homo sapien
caattccatctccagtgtttggaga

SEQ ID NO: 3785765 - DNA, 25 bp, Homo sapien
catctccagtgtttggagactcagt

SEQ ID NO: 3785766 - DNA, 25 bp, Homo sapien
agactcagttcaagctgttgtttca

SEQ ID NO: 3785767 - DNA, 25 bp, Homo sapien
tgcagttaaatatgtttatcttaaa

SEQ ID NO: 3785768 - DNA, 25 bp, Homo sapien
gcagttaaatatgtttatcttaaaa

SEQ ID NO: 3785769 - DNA, 25 bp, Homo sapien
cagttaaatatgtttatcttaaaat

SEQ ID NO: 3785770 - DNA, 25 bp, Homo sapien
ctgcagttaaatatgtttatcttaa

SEQ ID NO: 3785771 - DNA, 25 bp, Homo sapien
gatagctccctttgtagtacattaa

SEQ ID NO: 3785772 - DNA, 25 bp, Homo sapien
aaagagcacagttctcgttcccatt

SEQ ID NO: 3785773 - DNA, 25 bp, Homo sapien
caaagagcacagttctcgttcccat

SEQ ID NO: 3785774 - DNA, 25 bp, Homo sapien
gtagtacattaaccttgtcttccat

SEQ ID NO: 3785775 - DNA, 25 bp, Homo sapien
gatgactgagttaagtcatcaacat

SEQ ID NO: 3785776 - DNA, 25 bp, Homo sapien
cataaaattcttgtaactagagtgg

SEQ ID NO: 3785777 - DNA, 25 bp, Homo sapien
tagagtggggtagctcacaatcctc

SEQ ID NO: 3785778 - DNA, 25 bp, Homo sapien
tctgaggctgtttcagatgactgag

SEQ ID NO: 3785779 - DNA, 25 bp, Homo sapien
ttcttttcattagatgttttcttag

SEQ ID NO: 3785780 - DNA, 25 bp, Homo sapien
ttcattagatgttttcttagtaggc

SEQ ID NO: 3785781 - DNA, 25 bp, Homo sapien
cttttcattagatgttttcttagta

SEQ ID NO: 3785782 - DNA, 25 bp, Homo sapien
tttcattagatgttttcttagtagg

SEQ ID NO: 3785783 - DNA, 25 bp, Homo sapien
tttcaggactcacaatgcaggtact

SEQ ID NO: 3785784 - DNA, 25 bp, Homo sapien
caggtactatgcattatcctaagca

SEQ ID NO: 3785785 - DNA, 25 bp, Homo sapien
tggtcagtagcagacccaaaattca

SEQ ID NO: 3785786 - DNA, 25 bp, Homo sapien
taacacccttacatgatggaaaccc

SEQ ID NO: 3785787 - DNA, 25 bp, Homo sapien
gctttctgaggctttgacatgcaaa

SEQ ID NO: 3785788 - DNA, 25 bp, Homo sapien
aagataatggatcaagctttctgag

SEQ ID NO: 3785789 - DNA, 25 bp, Homo sapien
tactgggtcactcccaaaagcatgc

SEQ ID NO: 3785790 - DNA, 25 bp, Homo sapien
catagctgttcatgatgctactgtc

SEQ ID NO: 3785791 - DNA, 25 bp, Homo sapien
caagttctctcaaacgccgtctgtg

SEQ ID NO: 3785792 - DNA, 25 bp, Homo sapien
tattgcctctcagtccaagttctct

SEQ ID NO: 3785793 - DNA, 25 bp, Homo sapien
tccactatagtcagggctccatggt

SEQ ID NO: 3785794 - DNA, 25 bp, Homo sapien
gcagcatggaaacagtcgatattct

SEQ ID NO: 3785795 - DNA, 25 bp, Homo sapien
agtaaactggccttcccaaacactg

SEQ ID NO: 3785796 - DNA, 25 bp, Homo sapien
aacactggtgaattcacagattctt

SEQ ID NO: 3785797 - DNA, 25 bp, Homo sapien
tagcaggccaccagttagtaaactg

SEQ ID NO: 3785798 - DNA, 25 bp, Homo sapien
tcacagattctttcgaggtccgttt

SEQ ID NO: 3785799 - DNA, 25 bp, Homo sapien
tagcaccatcatgtatgtttgctga

SEQ ID NO: 3785800 - DNA, 25 bp, Homo sapien
agcatcatcagtagcaccatcatgt

SEQ ID NO: 3785801 - DNA, 25 bp, Homo sapien
gaaattgctgatgatcagtttctcc

SEQ ID NO: 3785802 - DNA, 25 bp, Homo sapien
ttgctgatgatcagtttctccactc

SEQ ID NO: 3785803 - DNA, 25 bp, Homo sapien
tgtcaccacgtggtggagaagacct

SEQ ID NO: 3785804 - DNA, 25 bp, Homo sapien
ttcttgtaagcgtctgtaccagcag

SEQ ID NO: 3785805 - DNA, 25 bp, Homo sapien
cattttgcacacaaggaagtcctga

SEQ ID NO: 3785806 - DNA, 25 bp, Homo sapien
tatactgaggcacacgtctgatgtc

SEQ ID NO: 3785807 - DNA, 25 bp, Homo sapien
gacatgaaagtggacgattaatttg

SEQ ID NO: 3785808 - DNA, 25 bp, Homo sapien
acatgaaagtggacgattaatttgc

SEQ ID NO: 3785809 - DNA, 25 bp, Homo sapien
ttcttctgatgctacttctaagtca

SEQ ID NO: 3785810 - DNA, 25 bp, Homo sapien
gctcttcttctgatgctacttctaa

SEQ ID NO: 3785811 - DNA, 25 bp, Homo sapien
tgctcttcttctgatgctacttcta

SEQ ID NO: 3785812 - DNA, 25 bp, Homo sapien
tcttctgatgctacttctaagtcat

SEQ ID NO: 3785813 - DNA, 25 bp, Homo sapien
cattcctcctgctttatttggaaca

SEQ ID NO: 3785814 - DNA, 25 bp, Homo sapien
gatgtttgtacatccttcattcctc

SEQ ID NO: 3785815 - DNA, 25 bp, Homo sapien
gctttggatgtttgtacatccttca

SEQ ID NO: 3785816 - DNA, 25 bp, Homo sapien
cagaatctttcatttcaatggtagg

SEQ ID NO: 3785817 - DNA, 25 bp, Homo sapien
aagtgaagatatctctcaggagact

SEQ ID NO: 3785818 - DNA, 25 bp, Homo sapien
gtttagccatcttaaagtttcttga

SEQ ID NO: 3785819 - DNA, 25 bp, Homo sapien
tctagtttagccatcttaaagtttc

SEQ ID NO: 3785820 - DNA, 25 bp, Homo sapien
tagccatcttaaagtttcttgatcc

SEQ ID NO: 3785821 - DNA, 25 bp, Homo sapien
agtttagccatcttaaagtttcttg

SEQ ID NO: 3785822 - DNA, 25 bp, Homo sapien
ctgaacagccgaactacaggcccat

SEQ ID NO: 3785823 - DNA, 25 bp, Homo sapien
taatcgtctgtttgagtgtaaatgc

SEQ ID NO: 3785824 - DNA, 25 bp, Homo sapien
tagtttaccccaattctagcatgcc

SEQ ID NO: 3785825 - DNA, 25 bp, Homo sapien
caagatcagtccaaagcaacatata

SEQ ID NO: 3785826 - DNA, 25 bp, Homo sapien
tctgcttgttcatttcctatatttt

SEQ ID NO: 3785827 - DNA, 25 bp, Homo sapien
agccccagctaaaggatcaacatac

SEQ ID NO: 3785828 - DNA, 25 bp, Homo sapien
cagctaaaggatcaacatacttctg

SEQ ID NO: 3785829 - DNA, 25 bp, Homo sapien
ggatcaacatacttctgtggaaaat

SEQ ID NO: 3785830 - DNA, 25 bp, Homo sapien
taagaaagtagttccttatggatgt

SEQ ID NO: 3785831 - DNA, 25 bp, Homo sapien
tatgcagcagtaatatacttagcac

SEQ ID NO: 3785832 - DNA, 25 bp, Homo sapien
aaatgaatcctgcaaattagcagaa

SEQ ID NO: 3785833 - DNA, 25 bp, Homo sapien
ttagcagaattatactatgcagcag

SEQ ID NO: 3785834 - DNA, 25 bp, Homo sapien
ttaaaataatagtaacaaccataga

SEQ ID NO: 3785835 - DNA, 25 bp, Homo sapien
taatagtaacaaccatagaaagtac

SEQ ID NO: 3785836 - DNA, 25 bp, Homo sapien
aataatagtaacaaccatagaaagt

SEQ ID NO: 3785837 - DNA, 25 bp, Homo sapien
aaataatagtaacaaccatagaaag

SEQ ID NO: 3785838 - DNA, 25 bp, Homo sapien
cctaatcctaatgcggacatcatat

SEQ ID NO: 3785839 - DNA, 25 bp, Homo sapien
atcccaaggtgattctatatcttcc

SEQ ID NO: 3785840 - DNA, 25 bp, Homo sapien
tgtcctaatcctaatgcggacatca

SEQ ID NO: 3785841 - DNA, 25 bp, Homo sapien
ctcagaatcccaaggtgattctata

SEQ ID NO: 3785842 - DNA, 25 bp, Homo sapien
gatacacagatatattcatgagaac

SEQ ID NO: 3785843 - DNA, 25 bp, Homo sapien
aaggttgatgcagtctcaggaaaaa

SEQ ID NO: 3785844 - DNA, 25 bp, Homo sapien
catatacaagtctatctccattcat

SEQ ID NO: 3785845 - DNA, 25 bp, Homo sapien
gatgcagtctcaggaaaaaattggt

SEQ ID NO: 3785846 - DNA, 25 bp, Homo sapien
tagtggagcactttcaataatatca

SEQ ID NO: 3785847 - DNA, 25 bp, Homo sapien
gagcactttcaataatatcaatacc

SEQ ID NO: 3785848 - DNA, 25 bp, Homo sapien
ttgctctagtggagcactttcaata

SEQ ID NO: 3785849 - DNA, 25 bp, Homo sapien
atttgtttgctctagtggagcactt

SEQ ID NO: 3785850 - DNA, 25 bp, Homo sapien
tttcatttcaaggatgcagggatgg

SEQ ID NO: 3785851 - DNA, 25 bp, Homo sapien
tcaatagatgcatcattatgaggat

SEQ ID NO: 3785852 - DNA, 25 bp, Homo sapien
tactgaaactactccaaaaggttga

SEQ ID NO: 3785853 - DNA, 25 bp, Homo sapien
gaaacacgtaactcctctagcttga

SEQ ID NO: 3785854 - DNA, 25 bp, Homo sapien
gcactggactttgattgatgttgta

SEQ ID NO: 3785855 - DNA, 25 bp, Homo sapien
cataagaccagggtttgctaacgac

SEQ ID NO: 3785856 - DNA, 25 bp, Homo sapien
catcttgactatcggaatctctatc

SEQ ID NO: 3785857 - DNA, 25 bp, Homo sapien
tgtaggaaggctttcaaccacaact

SEQ ID NO: 3785858 - DNA, 25 bp, Homo sapien
gctttgctaagcttggttttgggac

SEQ ID NO: 3785859 - DNA, 25 bp, Homo sapien
ttgctaagcttggttttgggacatt

SEQ ID NO: 3785860 - DNA, 25 bp, Homo sapien
ttagctttgctaagcttggttttgg

SEQ ID NO: 3785861 - DNA, 25 bp, Homo sapien
tcattagctttgctaagcttggttt

SEQ ID NO: 3785862 - DNA, 25 bp, Homo sapien
aaattgaggtcttcgtcatctgagg

SEQ ID NO: 3785863 - DNA, 25 bp, Homo sapien
atcaacacccggtttgccagaaagc

SEQ ID NO: 3785864 - DNA, 25 bp, Homo sapien
gaggtaggccatgaatcatcaacac

SEQ ID NO: 3785865 - DNA, 25 bp, Homo sapien
tcatctgaggtaggccatgaatcat

SEQ ID NO: 3785866 - DNA, 25 bp, Homo sapien
aaaatgagtgaattcatttctttaa

SEQ ID NO: 3785867 - DNA, 25 bp, Homo sapien
aaatatagaaaaatgagtgaattca

SEQ ID NO: 3785868 - DNA, 25 bp, Homo sapien
agaaaaatgagtgaattcatttctt

SEQ ID NO: 3785869 - DNA, 25 bp, Homo sapien
caaaaaccagcttacaattttcaat

SEQ ID NO: 3785870 - DNA, 25 bp, Homo sapien
catagcatctccaacctttaagtct

SEQ ID NO: 3785871 - DNA, 25 bp, Homo sapien
tccatagcatctccaacctttaagt

SEQ ID NO: 3785872 - DNA, 25 bp, Homo sapien
gcatctccaacctttaagtcttcag

SEQ ID NO: 3785873 - DNA, 25 bp, Homo sapien
gctccatagcatctccaacctttaa

SEQ ID NO: 3785874 - DNA, 25 bp, Homo sapien
cacagattgaagtactagatggcat

SEQ ID NO: 3785875 - DNA, 25 bp, Homo sapien
agtactgggctctgaaattagtttg

SEQ ID NO: 3785876 - DNA, 25 bp, Homo sapien
ttttccgctgggttcactagatcca

SEQ ID NO: 3785877 - DNA, 25 bp, Homo sapien
tgataaagaaggaagagtactgggc

SEQ ID NO: 3785878 - DNA, 25 bp, Homo sapien
tgcttaaggagtcttcagagctttc

SEQ ID NO: 3785879 - DNA, 25 bp, Homo sapien
ctgcttaaggagtcttcagagcttt

SEQ ID NO: 3785880 - DNA, 25 bp, Homo sapien
gcttaaggagtcttcagagctttca

SEQ ID NO: 3785881 - DNA, 25 bp, Homo sapien
tgagaagaatgtttaggtatccttt

SEQ ID NO: 3785882 - DNA, 25 bp, Homo sapien
atattctgaaattagttggtgactg

SEQ ID NO: 3785883 - DNA, 25 bp, Homo sapien
ttctttatattctgaaattagttgg

SEQ ID NO: 3785884 - DNA, 25 bp, Homo sapien
tttatattctgaaattagttggtga

SEQ ID NO: 3785885 - DNA, 25 bp, Homo sapien
tgctgatcttctctacattgttcaa

SEQ ID NO: 3785886 - DNA, 25 bp, Homo sapien
atgtgtgtgtcatctttatacaggg

SEQ ID NO: 3785887 - DNA, 25 bp, Homo sapien
ggaacgcttcaagaatgtgtgtgtc

SEQ ID NO: 3785888 - DNA, 25 bp, Homo sapien
atgctgatcttctctacattgttca

SEQ ID NO: 3785889 - DNA, 25 bp, Homo sapien
aactctgctgaacaaaaagcctgac

SEQ ID NO: 3785890 - DNA, 25 bp, Homo sapien
cctgactatacttgatgattcataa

SEQ ID NO: 3785891 - DNA, 25 bp, Homo sapien
aaactctgctgaacaaaaagcctga

SEQ ID NO: 3785892 - DNA, 25 bp, Homo sapien
aagcctgactatacttgatgattca

SEQ ID NO: 3785893 - DNA, 25 bp, Homo sapien
tccaacttatctactgcatttacat

SEQ ID NO: 3785894 - DNA, 25 bp, Homo sapien
caacttatctactgcatttacattt

SEQ ID NO: 3785895 - DNA, 25 bp, Homo sapien
gcttttttccacttactgcaagtaa

SEQ ID NO: 3785896 - DNA, 25 bp, Homo sapien
ctttccaacttatctactgcattta

SEQ ID NO: 3785897 - DNA, 25 bp, Homo sapien
gctttgttgctactgatatgtcctc

SEQ ID NO: 3785898 - DNA, 25 bp, Homo sapien
gtgttgccatggacatccgcaagat

SEQ ID NO: 3785899 - DNA, 25 bp, Homo sapien
ttctagcagaatagttgcacatttc

SEQ ID NO: 3785900 - DNA, 25 bp, Homo sapien
catccgcaagatttggatcagcacc

SEQ ID NO: 3785901 - DNA, 25 bp, Homo sapien
gttgtcacagacattgagctggcat

SEQ ID NO: 3785902 - DNA, 25 bp, Homo sapien
tgtccaccaggagagttactacttc

SEQ ID NO: 3785903 - DNA, 25 bp, Homo sapien
tgttttcgttgtcacagacattgag

SEQ ID NO: 3785904 - DNA, 25 bp, Homo sapien
ctgtccaccaggagagttactactt

SEQ ID NO: 3785905 - DNA, 25 bp, Homo sapien
atgagagtgacaggactttttataa

SEQ ID NO: 3785906 - DNA, 25 bp, Homo sapien
aggactttttataaactgtagtgca

SEQ ID NO: 3785907 - DNA, 25 bp, Homo sapien
tgacaggactttttataaactgtag

SEQ ID NO: 3785908 - DNA, 25 bp, Homo sapien
ctttttataaactgtagtgcactgt

SEQ ID NO: 3785909 - DNA, 25 bp, Homo sapien
tcctctataaacatccaaacattct

SEQ ID NO: 3785910 - DNA, 25 bp, Homo sapien
aacagctctcatacttgaccagagc

SEQ ID NO: 3785911 - DNA, 25 bp, Homo sapien
caacagctctcatacttgaccagag

SEQ ID NO: 3785912 - DNA, 25 bp, Homo sapien
agctctcatacttgaccagagctct

SEQ ID NO: 3785913 - DNA, 25 bp, Homo sapien
taacccagaagttgctatattatgg

SEQ ID NO: 3785914 - DNA, 25 bp, Homo sapien
gttgtcactgacatacctcactgca

SEQ ID NO: 3785915 - DNA, 25 bp, Homo sapien
gaaactgcttatctcattatgcacc

SEQ ID NO: 3785916 - DNA, 25 bp, Homo sapien
ccgcgcctgacgaataacagatttt

SEQ ID NO: 3785917 - DNA, 25 bp, Homo sapien
cattacccgcgctggcagctttgtg

SEQ ID NO: 3785918 - DNA, 25 bp, Homo sapien
agatctcggtctcggacgtggtagc

SEQ ID NO: 3785919 - DNA, 25 bp, Homo sapien
caaaaggatctgctgcactttcgcc

SEQ ID NO: 3785920 - DNA, 25 bp, Homo sapien
tttgtggatcttgccgagatctcgg

SEQ ID NO: 3785921 - DNA, 25 bp, Homo sapien
tcatgtctctctcggctcttaacgg

SEQ ID NO: 3785922 - DNA, 25 bp, Homo sapien
gatcccgctagacacaagtgcgcat

SEQ ID NO: 3785923 - DNA, 25 bp, Homo sapien
ggttaccaagcaagcgatcccgcta

SEQ ID NO: 3785924 - DNA, 25 bp, Homo sapien
acataacaagtcagccccggctggc

SEQ ID NO: 3785925 - DNA, 25 bp, Homo sapien
tgggcgctgaaaaattcaacttacg

SEQ ID NO: 3785926 - DNA, 25 bp, Homo sapien
gaaccaaatggaaacctgggcgctg

SEQ ID NO: 3785927 - DNA, 25 bp, Homo sapien
tgcataaggcgaatcacagaagagc

SEQ ID NO: 3785928 - DNA, 25 bp, Homo sapien
gacgcatcggtgagcttgaggaaaa

SEQ ID NO: 3785929 - DNA, 25 bp, Homo sapien
tatgagatccacacctaaaaacgtc

SEQ ID NO: 3785930 - DNA, 25 bp, Homo sapien
aaagtaatggaaatccgggtgcact

SEQ ID NO: 3785931 - DNA, 25 bp, Homo sapien
gatcgtataaagcagtagttccaac

SEQ ID NO: 3785932 - DNA, 25 bp, Homo sapien
caaaagcagtgaggaaaacaattac

SEQ ID NO: 3785933 - DNA, 25 bp, Homo sapien
tttaagattatcaaccaaaaggtca

SEQ ID NO: 3785934 - DNA, 25 bp, Homo sapien
taatgtaacaagcttcctgtaacaa

SEQ ID NO: 3785935 - DNA, 25 bp, Homo sapien
aaaaacgggcagaatgataacaact

SEQ ID NO: 3785936 - DNA, 25 bp, Homo sapien
gagacatccatgtattatgctggca

SEQ ID NO: 3785937 - DNA, 25 bp, Homo sapien
ttaatgaagtcaacgtcaagaatat

SEQ ID NO: 3785938 - DNA, 25 bp, Homo sapien
ggttgtaataccaatacaatgtgtt

SEQ ID NO: 3785939 - DNA, 25 bp, Homo sapien
tttaatgaagtcaacgtcaagaata

SEQ ID NO: 3785940 - DNA, 25 bp, Homo sapien
aagaatataatctggttgtaatacc

SEQ ID NO: 3785941 - DNA, 25 bp, Homo sapien
atctgtagatcctataacagcatgt

SEQ ID NO: 3785942 - DNA, 25 bp, Homo sapien
catctgtagatcctataacagcatg

SEQ ID NO: 3785943 - DNA, 25 bp, Homo sapien
tcatctgtagatcctataacagcat

SEQ ID NO: 3785944 - DNA, 25 bp, Homo sapien
tgacgcagggtaacacaaagttcac

SEQ ID NO: 3785945 - DNA, 25 bp, Homo sapien
gcttttgaaaccaagcacagttata

SEQ ID NO: 3785946 - DNA, 25 bp, Homo sapien
caaagttcacttcggaggggactga

SEQ ID NO: 3785947 - DNA, 25 bp, Homo sapien
caacttggcatttctgacgcagggt

SEQ ID NO: 3785948 - DNA, 25 bp, Homo sapien
tgtgtttccgagactgcttttaatc

SEQ ID NO: 3785949 - DNA, 25 bp, Homo sapien
aaaggctatattcctggctctgtgt

SEQ ID NO: 3785950 - DNA, 25 bp, Homo sapien
tctctgaagtacatttcattaggga

SEQ ID NO: 3785951 - DNA, 25 bp, Homo sapien
cattagggagagtgacagtaatgct

SEQ ID NO: 3785952 - DNA, 25 bp, Homo sapien
ttttattcatggtcaatctggaaca

SEQ ID NO: 3785953 - DNA, 25 bp, Homo sapien
tggaacataattactgcatcttaag

SEQ ID NO: 3785954 - DNA, 25 bp, Homo sapien
cactgatgtatatagaaggctaaag

SEQ ID NO: 3785955 - DNA, 25 bp, Homo sapien
tcaaatctagtagagtaaccaaaca

SEQ ID NO: 3785956 - DNA, 25 bp, Homo sapien
tcataatgagaataacccaaactgg

SEQ ID NO: 3785957 - DNA, 25 bp, Homo sapien
taacccaaactggataaatgtgaca

SEQ ID NO: 3785958 - DNA, 25 bp, Homo sapien
tgccatgggatgctaatttgcaata

SEQ ID NO: 3785959 - DNA, 25 bp, Homo sapien
tcaaaatatatttgccatgggatgc

SEQ ID NO: 3785960 - DNA, 25 bp, Homo sapien
gcaagcatccatatcaagagagtta

SEQ ID NO: 3785961 - DNA, 25 bp, Homo sapien
agcgttgtaaaagtagactactgca

SEQ ID NO: 3785962 - DNA, 25 bp, Homo sapien
aaccagcaagcatccatatcaagag

SEQ ID NO: 3785963 - DNA, 25 bp, Homo sapien
gactactgcaatgctacttgtattc

SEQ ID NO: 3785964 - DNA, 25 bp, Homo sapien
tctcataggtcaataaagcttctgc

SEQ ID NO: 3785965 - DNA, 25 bp, Homo sapien
aagtctcataggtcaataaagcttc

SEQ ID NO: 3785966 - DNA, 25 bp, Homo sapien
aaagtctcataggtcaataaagctt

SEQ ID NO: 3785967 - DNA, 25 bp, Homo sapien
caagatatgttttgctcgttcatat

SEQ ID NO: 3785968 - DNA, 25 bp, Homo sapien
tatttcttgttcgatggcagattgg

SEQ ID NO: 3785969 - DNA, 25 bp, Homo sapien
ttcttatttcttgttcgatggcaga

SEQ ID NO: 3785970 - DNA, 25 bp, Homo sapien
ttatttcttgttcgatggcagattg

SEQ ID NO: 3785971 - DNA, 25 bp, Homo sapien
tcttatttcttgttcgatggcagat

SEQ ID NO: 3785972 - DNA, 25 bp, Homo sapien
tcactcattccaaatttggtaacca

SEQ ID NO: 3785973 - DNA, 25 bp, Homo sapien
aaatttggtaaccatccgctttgct

SEQ ID NO: 3785974 - DNA, 25 bp, Homo sapien
cactcattccaaatttggtaaccat

SEQ ID NO: 3785975 - DNA, 25 bp, Homo sapien
ccatttgtgcaagcagctgggctct

SEQ ID NO: 3785976 - DNA, 25 bp, Homo sapien
tccatttgtgcaagcagctgggctc

SEQ ID NO: 3785977 - DNA, 25 bp, Homo sapien
aatatgcaataatggcatgaccaga

SEQ ID NO: 3785978 - DNA, 25 bp, Homo sapien
tgcaataatggcatgaccagattca

SEQ ID NO: 3785979 - DNA, 25 bp, Homo sapien
catcttttgtgtaatatgcaataat

SEQ ID NO: 3785980 - DNA, 25 bp, Homo sapien
tgtgtaatatgcaataatggcatga

SEQ ID NO: 3785981 - DNA, 25 bp, Homo sapien
cgagctataatttctggatcaacgg

SEQ ID NO: 3785982 - DNA, 25 bp, Homo sapien
gcagcctggttcacaagattctcca

SEQ ID NO: 3785983 - DNA, 25 bp, Homo sapien
tctgctccggaaaagccaacagtac

SEQ ID NO: 3785984 - DNA, 25 bp, Homo sapien
ccagctccttcatggtaaccatttc

SEQ ID NO: 3785985 - DNA, 25 bp, Homo sapien
aaaagagaacacaacgctaataagt

SEQ ID NO: 3785986 - DNA, 25 bp, Homo sapien
gtaaaaagagaacacaacgctaata

SEQ ID NO: 3785987 - DNA, 25 bp, Homo sapien
ctaatgtaaaaagagaacacaacgc

SEQ ID NO: 3785988 - DNA, 25 bp, Homo sapien
tgtaaaaagagaacacaacgctaat

SEQ ID NO: 3785989 - DNA, 25 bp, Homo sapien
ccttggaactgtaacttgcatgtca

SEQ ID NO: 3785990 - DNA, 25 bp, Homo sapien
tctggccttggaactgtaacttgca

SEQ ID NO: 3785991 - DNA, 25 bp, Homo sapien
gtaacttgcatgtcaaaacgaccag

SEQ ID NO: 3785992 - DNA, 25 bp, Homo sapien
ccttttacatctggccttggaactg

SEQ ID NO: 3785993 - DNA, 25 bp, Homo sapien
tgataactccttcattgggtttaaa

SEQ ID NO: 3785994 - DNA, 25 bp, Homo sapien
gcctctgggaagtttgtggctccta

SEQ ID NO: 3785995 - DNA, 25 bp, Homo sapien
cctctgggaagtttgtggctcctat

SEQ ID NO: 3785996 - DNA, 25 bp, Homo sapien
ctattatgataactccttcattggg

SEQ ID NO: 3785997 - DNA, 25 bp, Homo sapien
tacataccttcacaattatctggtc

SEQ ID NO: 3785998 - DNA, 25 bp, Homo sapien
tcattaatcaaataacagccaagaa

SEQ ID NO: 3785999 - DNA, 25 bp, Homo sapien
ccaccaattcatctctgactacata

SEQ ID NO: 3786000 - DNA, 25 bp, Homo sapien
ctactgtgcccggtgactgttttta

SEQ ID NO: 3786001 - DNA, 25 bp, Homo sapien
cttgagttcttgcatgagggactac

SEQ ID NO: 3786002 - DNA, 25 bp, Homo sapien
aatttgcataagatcaattctacgt

SEQ ID NO: 3786003 - DNA, 25 bp, Homo sapien
gagggactactctgtttcctataca

SEQ ID NO: 3786004 - DNA, 25 bp, Homo sapien
gggaggcatcaccatattctaagaa

SEQ ID NO: 3786005 - DNA, 25 bp, Homo sapien
catccatttcagcaagaagttgatt

SEQ ID NO: 3786006 - DNA, 25 bp, Homo sapien
cacaaggagcattcgcctttgcttc

SEQ ID NO: 3786007 - DNA, 25 bp, Homo sapien
gaagttgatttatggtctgccttga

SEQ ID NO: 3786008 - DNA, 25 bp, Homo sapien
tatggatgcattggagattcaattc

SEQ ID NO: 3786009 - DNA, 25 bp, Homo sapien
ttcccttaacaaaatttagcactgc

SEQ ID NO: 3786010 - DNA, 25 bp, Homo sapien
tcccttaacaaaatttagcactgca

SEQ ID NO: 3786011 - DNA, 25 bp, Homo sapien
cccttaacaaaatttagcactgcat

SEQ ID NO: 3786012 - DNA, 25 bp, Homo sapien
ccttaacaaaatttagcactgcatc

SEQ ID NO: 3786013 - DNA, 25 bp, Homo sapien
caaacatctcatcaaattcggatcc

SEQ ID NO: 3786014 - DNA, 25 bp, Homo sapien
tcaaattcggatccagaagcataat

SEQ ID NO: 3786015 - DNA, 25 bp, Homo sapien
cagctcgggcaagaagtgtctttcc

SEQ ID NO: 3786016 - DNA, 25 bp, Homo sapien
agatttctgatacggctggctccca

SEQ ID NO: 3786017 - DNA, 25 bp, Homo sapien
taaaggtggtatgtggaatgtctcc

SEQ ID NO: 3786018 - DNA, 25 bp, Homo sapien
caattgttgagtctaagtggatagg

SEQ ID NO: 3786019 - DNA, 25 bp, Homo sapien
tgtctcctgatatgggcttttccag

SEQ ID NO: 3786020 - DNA, 25 bp, Homo sapien
gacatgacagggagaatcttgaggc

SEQ ID NO: 3786021 - DNA, 25 bp, Homo sapien
tccaatggcccctggttcaagacca

SEQ ID NO: 3786022 - DNA, 25 bp, Homo sapien
caccacacccagtaatgtcctaatt

SEQ ID NO: 3786023 - DNA, 25 bp, Homo sapien
caggctggttggaactccaatggcc

SEQ ID NO: 3786024 - DNA, 25 bp, Homo sapien
taatattattctggagttacataga

SEQ ID NO: 3786025 - DNA, 25 bp, Homo sapien
aatcatgataaagaaaagatatctt

SEQ ID NO: 3786026 - DNA, 25 bp, Homo sapien
tcatgataaagaaaagatatcttac

SEQ ID NO: 3786027 - DNA, 25 bp, Homo sapien
tcaaatcatgataaagaaaagatat

SEQ ID NO: 3786028 - DNA, 25 bp, Homo sapien
tttttccatcaaatcatgataaaga

SEQ ID NO: 3786029 - DNA, 25 bp, Homo sapien
tggaagtttacctccaagaatagta

SEQ ID NO: 3786030 - DNA, 25 bp, Homo sapien
atggaattaacctgaccttctctgt

SEQ ID NO: 3786031 - DNA, 25 bp, Homo sapien
gattatcaaggcttcccttttgaaa

SEQ ID NO: 3786032 - DNA, 25 bp, Homo sapien
taactttagataatggacacgtttg

SEQ ID NO: 3786033 - DNA, 25 bp, Homo sapien
tgcaaagtctccttactatccccaa

SEQ ID NO: 3786034 - DNA, 25 bp, Homo sapien
ccctaaagtagtgtaattgcaccgt

SEQ ID NO: 3786035 - DNA, 25 bp, Homo sapien
tggcaagagaatccccacttgagga

SEQ ID NO: 3786036 - DNA, 25 bp, Homo sapien
ccagaaggaggcatcaaggaggttc

SEQ ID NO: 3786037 - DNA, 25 bp, Homo sapien
tcttgagctgggtacttataacaca

SEQ ID NO: 3786038 - DNA, 25 bp, Homo sapien
tcaaataatcactgcaccaacctct

SEQ ID NO: 3786039 - DNA, 25 bp, Homo sapien
caattgttccctttatacaattcca

SEQ ID NO: 3786040 - DNA, 25 bp, Homo sapien
tacaattccaacagggttcatagcc

SEQ ID NO: 3786041 - DNA, 25 bp, Homo sapien
cacgctgatgactgaagttttcaaa

SEQ ID NO: 3786042 - DNA, 25 bp, Homo sapien
gataccattgtcacctaactcactg

SEQ ID NO: 3786043 - DNA, 25 bp, Homo sapien
ggtacaccaatgacctactgctaaa

SEQ ID NO: 3786044 - DNA, 25 bp, Homo sapien
gaatttaacccctgctactccacta

SEQ ID NO: 3786045 - DNA, 25 bp, Homo sapien
caaatggttagttctcacttggccc

SEQ ID NO: 3786046 - DNA, 25 bp, Homo sapien
cattagtcagcttgactctgaagtc

SEQ ID NO: 3786047 - DNA, 25 bp, Homo sapien
cagcagctaaaatagggcctagcac

SEQ ID NO: 3786048 - DNA, 25 bp, Homo sapien
caaagatcagtaagaggtacaggta

SEQ ID NO: 3786049 - DNA, 25 bp, Homo sapien
tgtgtcaagcacatacattatctgt

SEQ ID NO: 3786050 - DNA, 25 bp, Homo sapien
gaatcaagccctgttgttgtccgga

SEQ ID NO: 3786051 - DNA, 25 bp, Homo sapien
ccctttaacatgttcaaaggtgaca

SEQ ID NO: 3786052 - DNA, 25 bp, Homo sapien
cgaagagaatcagacgggttcgcct

SEQ ID NO: 3786053 - DNA, 25 bp, Homo sapien
aacgaagagaatcagacgggttcgc

SEQ ID NO: 3786054 - DNA, 25 bp, Homo sapien
acgaagagaatcagacgggttcgcc

SEQ ID NO: 3786055 - DNA, 25 bp, Homo sapien
tggttttttgtgtgagtgcttgagc

SEQ ID NO: 3786056 - DNA, 25 bp, Homo sapien
ggttttttgtgtgagtgcttgagct

SEQ ID NO: 3786057 - DNA, 25 bp, Homo sapien
gagacgtcgtgtccttgatttcaaa

SEQ ID NO: 3786058 - DNA, 25 bp, Homo sapien
tctgtgtttcagctaatctctcgga

SEQ ID NO: 3786059 - DNA, 25 bp, Homo sapien
aatctctcggaggtagactggagac

SEQ ID NO: 3786060 - DNA, 25 bp, Homo sapien
cttcacgaatgatggcgctatattc

SEQ ID NO: 3786061 - DNA, 25 bp, Homo sapien
aagagctgggattaggtctgagaac

SEQ ID NO: 3786062 - DNA, 25 bp, Homo sapien
tcaactctgataaactgtgatttca

SEQ ID NO: 3786063 - DNA, 25 bp, Homo sapien
gaacttaaatctatcatgcccagct

SEQ ID NO: 3786064 - DNA, 25 bp, Homo sapien
taaaggtaaatagagaagtcagagg

SEQ ID NO: 3786065 - DNA, 25 bp, Homo sapien
ctcaccaagagtctgatatacagat

SEQ ID NO: 3786066 - DNA, 25 bp, Homo sapien
tgtggttcattactgagtgtctgta

SEQ ID NO: 3786067 - DNA, 25 bp, Homo sapien
cattcagtcgtgagacatttagaaa

SEQ ID NO: 3786068 - DNA, 25 bp, Homo sapien
tctgatatacagattttcactgtgg

SEQ ID NO: 3786069 - DNA, 25 bp, Homo sapien
agtactgaagatctgaacaaatgct

SEQ ID NO: 3786070 - DNA, 25 bp, Homo sapien
ctggccagtactgaagatctgaaca

SEQ ID NO: 3786071 - DNA, 25 bp, Homo sapien
caagcaagaggaacgtaatgtacta

SEQ ID NO: 3786072 - DNA, 25 bp, Homo sapien
gctcttgaatgatgtcgatacaagc

SEQ ID NO: 3786073 - DNA, 25 bp, Homo sapien
gtgctaaaatatttaattggaacaa

SEQ ID NO: 3786074 - DNA, 25 bp, Homo sapien
tgctaaaatatttaattggaacaaa

SEQ ID NO: 3786075 - DNA, 25 bp, Homo sapien
atgggatgtatgccaatgggaagaa

SEQ ID NO: 3786076 - DNA, 25 bp, Homo sapien
gacatgggatgtatgccaatgggaa

SEQ ID NO: 3786077 - DNA, 25 bp, Homo sapien
catgggatgtatgccaatgggaaga

SEQ ID NO: 3786078 - DNA, 25 bp, Homo sapien
agacatgggatgtatgccaatggga

SEQ ID NO: 3786079 - DNA, 25 bp, Homo sapien
gatagactggcctagcatggtggct

SEQ ID NO: 3786080 - DNA, 25 bp, Homo sapien
tgataatcctcaccagtccatggag

SEQ ID NO: 3786081 - DNA, 25 bp, Homo sapien
ggcatttggagaaacccgcagtgta

SEQ ID NO: 3786082 - DNA, 25 bp, Homo sapien
gaacctgaactaagccgtgactaag

SEQ ID NO: 3786083 - DNA, 25 bp, Homo sapien
ccagttatcggttgtgtccaagctc

SEQ ID NO: 3786084 - DNA, 25 bp, Homo sapien
gaaacaatgttaagcttcgtcagga

SEQ ID NO: 3786085 - DNA, 25 bp, Homo sapien
catggatctgtacccttcgaatatt

SEQ ID NO: 3786086 - DNA, 25 bp, Homo sapien
tgctggctccatgaacatggatctg

SEQ ID NO: 3786087 - DNA, 25 bp, Homo sapien
gctggttttgagaaactgacactcc

SEQ ID NO: 3786088 - DNA, 25 bp, Homo sapien
gcattgatgagatgactcagaggaa

SEQ ID NO: 3786089 - DNA, 25 bp, Homo sapien
tgttttttggtgtatggaaggcatt

SEQ ID NO: 3786090 - DNA, 25 bp, Homo sapien
tcaggaactacatctcgatgctggt

SEQ ID NO: 3786091 - DNA, 25 bp, Homo sapien
ttcaatgcattcatctgatcaaacc

SEQ ID NO: 3786092 - DNA, 25 bp, Homo sapien
tgcattcatctgatcaaacccagaa

SEQ ID NO: 3786093 - DNA, 25 bp, Homo sapien
tctgatcaaacccagaaacacctct

SEQ ID NO: 3786094 - DNA, 25 bp, Homo sapien
ttcatctgatcaaacccagaaacac

SEQ ID NO: 3786095 - DNA, 25 bp, Homo sapien
tgatgcccaataacaagcagctgct

SEQ ID NO: 3786096 - DNA, 25 bp, Homo sapien
aactgatgcccaataacaagcagct

SEQ ID NO: 3786097 - DNA, 25 bp, Homo sapien
agctgcttcagtttgttagccagta

SEQ ID NO: 3786098 - DNA, 25 bp, Homo sapien
aataacaagcagctgcttcagtttg

SEQ ID NO: 3786099 - DNA, 25 bp, Homo sapien
gttgcaccgtgctcgacaaggaaaa

SEQ ID NO: 3786100 - DNA, 25 bp, Homo sapien
tgcaccgtgctcgacaaggaaaaca

SEQ ID NO: 3786101 - DNA, 25 bp, Homo sapien
gggttgcaccgtgctcgacaaggaa

SEQ ID NO: 3786102 - DNA, 25 bp, Homo sapien
gcaccgtgctcgacaaggaaaacat

SEQ ID NO: 3786103 - DNA, 25 bp, Homo sapien
gcctgccgaaactgtgcccctctgt

SEQ ID NO: 3786104 - DNA, 25 bp, Homo sapien
gctactgcaacgacagacaatccgc

SEQ ID NO: 3786105 - DNA, 25 bp, Homo sapien
ggcgggccctcagcgacctcacccg

SEQ ID NO: 3786106 - DNA, 25 bp, Homo sapien
acctcacccgcctgccgaaactgtg

SEQ ID NO: 3786107 - DNA, 25 bp, Homo sapien
tcgccgcccacgaagagtgtaaggc

SEQ ID NO: 3786108 - DNA, 25 bp, Homo sapien
agaactggtttctacgcctcgcgag

SEQ ID NO: 3786109 - DNA, 25 bp, Homo sapien
cccgcggaagtagttgacatttaca

SEQ ID NO: 3786110 - DNA, 25 bp, Homo sapien
gagaacagcctttaccctctttgga

SEQ ID NO: 3786111 - DNA, 25 bp, Homo sapien
cgagtagttgggattcccgccacca

SEQ ID NO: 3786112 - DNA, 25 bp, Homo sapien
tagttgggattcccgccaccacacc

SEQ ID NO: 3786113 - DNA, 25 bp, Homo sapien
tgcctggccttatgctggttccttt

SEQ ID NO: 3786114 - DNA, 25 bp, Homo sapien
ccgtgcctggccttatgctggttcc

SEQ ID NO: 3786115 - DNA, 25 bp, Homo sapien
tgatcaccaagcaccaatttgcaat

SEQ ID NO: 3786116 - DNA, 25 bp, Homo sapien
cactctacttgactaatcttgtaaa

SEQ ID NO: 3786117 - DNA, 25 bp, Homo sapien
tacccacagatagttggaattcaga

SEQ ID NO: 3786118 - DNA, 25 bp, Homo sapien
gctgagtacccacaaatacccacag

SEQ ID NO: 3786119 - DNA, 25 bp, Homo sapien
atttcatccttatcagcttggtttt

SEQ ID NO: 3786120 - DNA, 25 bp, Homo sapien
cactgacaatattttaggtctataa

SEQ ID NO: 3786121 - DNA, 25 bp, Homo sapien
gaagtgatatatatttacactgaca

SEQ ID NO: 3786122 - DNA, 25 bp, Homo sapien
ctgctctttggggtttgtaattatt

SEQ ID NO: 3786123 - DNA, 25 bp, Homo sapien
agtagtagatccctttagacagaca

SEQ ID NO: 3786124 - DNA, 25 bp, Homo sapien
cccagactgcttgtaatgattcaca

SEQ ID NO: 3786125 - DNA, 25 bp, Homo sapien
ggaagttttggaaggcatacaggaa

SEQ ID NO: 3786126 - DNA, 25 bp, Homo sapien
caaggtacatctaagtgagcaggaa

SEQ ID NO: 3786127 - DNA, 25 bp, Homo sapien
aagcaccctatgaagcagacactag

SEQ ID NO: 3786128 - DNA, 25 bp, Homo sapien
catcagtgggttatgtctagcctgc

SEQ ID NO: 3786129 - DNA, 25 bp, Homo sapien
tattcctatggaagcatttggcccg

SEQ ID NO: 3786130 - DNA, 25 bp, Homo sapien
cactaagaggttaagagtccagtct

SEQ ID NO: 3786131 - DNA, 25 bp, Homo sapien
caagaaagattatgggcagcccaca

SEQ ID NO: 3786132 - DNA, 25 bp, Homo sapien
ggttttctactacatgccatggcaa

SEQ ID NO: 3786133 - DNA, 25 bp, Homo sapien
agtgaatatgaccattcttcctgtg

SEQ ID NO: 3786134 - DNA, 25 bp, Homo sapien
caagagttgtgaatgcccaagaaag

SEQ ID NO: 3786135 - DNA, 25 bp, Homo sapien
tacacaaactaaactactggacaac

SEQ ID NO: 3786136 - DNA, 25 bp, Homo sapien
cacaatccagttcattctgaggtca

SEQ ID NO: 3786137 - DNA, 25 bp, Homo sapien
tatcacaatggtacctttgaaaagc

SEQ ID NO: 3786138 - DNA, 25 bp, Homo sapien
tccttcaagttcaagggcagggtaa

SEQ ID NO: 3786139 - DNA, 25 bp, Homo sapien
ccaaccactgtgcaataaaaggcca

SEQ ID NO: 3786140 - DNA, 25 bp, Homo sapien
accaggagacatctcgaagggccac

SEQ ID NO: 3786141 - DNA, 25 bp, Homo sapien
tatgatggcaaacgttagcacacca

SEQ ID NO: 3786142 - DNA, 25 bp, Homo sapien
ccttctttgatagtataaatacacc

SEQ ID NO: 3786143 - DNA, 25 bp, Homo sapien
aggagcagtctgcaatgttgatgtt

SEQ ID NO: 3786144 - DNA, 25 bp, Homo sapien
ggagcagtctgcaatgttgatgttg

SEQ ID NO: 3786145 - DNA, 25 bp, Homo sapien
gagcagtctgcaatgttgatgttga

SEQ ID NO: 3786146 - DNA, 25 bp, Homo sapien
gtaaatgcaaatgaaggtgacttag

SEQ ID NO: 3786147 - DNA, 25 bp, Homo sapien
tgtaaatgcaaatgaaggtgactta

SEQ ID NO: 3786148 - DNA, 25 bp, Homo sapien
taaatgcaaatgaaggtgacttagc

SEQ ID NO: 3786149 - DNA, 25 bp, Homo sapien
ctgtaaatgcaaatgaaggtgactt

SEQ ID NO: 3786150 - DNA, 25 bp, Homo sapien
caataagcacaagaaggtatgatac

SEQ ID NO: 3786151 - DNA, 25 bp, Homo sapien
ttatgtcaatatgatcaacgcagac

SEQ ID NO: 3786152 - DNA, 25 bp, Homo sapien
aacgcagactccacattgctttcca

SEQ ID NO: 3786153 - DNA, 25 bp, Homo sapien
caatatgatcaacgcagactccaca

SEQ ID NO: 3786154 - DNA, 25 bp, Homo sapien
tcatcagcacgagggcgatctgctc

SEQ ID NO: 3786155 - DNA, 25 bp, Homo sapien
gcaaagcagtcagcgtttccagttt

SEQ ID NO: 3786156 - DNA, 25 bp, Homo sapien
gctcattgaggctgcctcgggaccc

SEQ ID NO: 3786157 - DNA, 25 bp, Homo sapien
tcgctcaagtgttgcatcctatgtc

SEQ ID NO: 3786158 - DNA, 25 bp, Homo sapien
ggtgctccgctgttattcctgccat

SEQ ID NO: 3786159 - DNA, 25 bp, Homo sapien
gaattcgtcagtttctccgcctcgc

SEQ ID NO: 3786160 - DNA, 25 bp, Homo sapien
tcctccatgcttgacttcacctttt

SEQ ID NO: 3786161 - DNA, 25 bp, Homo sapien
tcgcttctcccggtgtggtgctccg

SEQ ID NO: 3786162 - DNA, 25 bp, Homo sapien
tgttgccatttccaggaggtacttg

SEQ ID NO: 3786163 - DNA, 25 bp, Homo sapien
ccattgttggacgtaaagctgtcta

SEQ ID NO: 3786164 - DNA, 25 bp, Homo sapien
tgaatatcttcacgaaatccagaat

SEQ ID NO: 3786165 - DNA, 25 bp, Homo sapien
gaatgaccacccaagtaatactgaa

SEQ ID NO: 3786166 - DNA, 25 bp, Homo sapien
tctgaatcgcttgtcaaatgctgaa

SEQ ID NO: 3786167 - DNA, 25 bp, Homo sapien
catagaatcacagtaaacttcactg

SEQ ID NO: 3786168 - DNA, 25 bp, Homo sapien
attgttccatagaatcacagtaaac

SEQ ID NO: 3786169 - DNA, 25 bp, Homo sapien
cactgtctgaatcgcttgtcaaatg

SEQ ID NO: 3786170 - DNA, 25 bp, Homo sapien
acatcttcaacatgatcatcattta

SEQ ID NO: 3786171 - DNA, 25 bp, Homo sapien
tcttcaacatgatcatcatttatat

SEQ ID NO: 3786172 - DNA, 25 bp, Homo sapien
ctgtaacatcttcaacatgatcatc

SEQ ID NO: 3786173 - DNA, 25 bp, Homo sapien
tgtaacatcttcaacatgatcatca

SEQ ID NO: 3786174 - DNA, 25 bp, Homo sapien
tccagtttgccccaagttttcatca

SEQ ID NO: 3786175 - DNA, 25 bp, Homo sapien
ggaagaactggcatgaatgtcattc

SEQ ID NO: 3786176 - DNA, 25 bp, Homo sapien
caatgggctttacttcttcagtgct

SEQ ID NO: 3786177 - DNA, 25 bp, Homo sapien
ggtgaatgcaaacagcagattttcc

SEQ ID NO: 3786178 - DNA, 25 bp, Homo sapien
cttcctcagactcggctccactgtc

SEQ ID NO: 3786179 - DNA, 25 bp, Homo sapien
ggagtagaagtgagaacattaccaa

SEQ ID NO: 3786180 - DNA, 25 bp, Homo sapien
gtagaagtgagaacattaccaagat

SEQ ID NO: 3786181 - DNA, 25 bp, Homo sapien
cagactcggctccactgtcactgct

SEQ ID NO: 3786182 - DNA, 25 bp, Homo sapien
ccaagtggccaaagctatatcccga

SEQ ID NO: 3786183 - DNA, 25 bp, Homo sapien
aaaagcaaattgtccaagtggccaa

SEQ ID NO: 3786184 - DNA, 25 bp, Homo sapien
gccaaagctatatcccgagggtaaa

SEQ ID NO: 3786185 - DNA, 25 bp, Homo sapien
gagggtaaatacatcagagcttctc

SEQ ID NO: 3786186 - DNA, 25 bp, Homo sapien
catttagagattttctccagtcgga

SEQ ID NO: 3786187 - DNA, 25 bp, Homo sapien
taaacatttagagattttctccagt

SEQ ID NO: 3786188 - DNA, 25 bp, Homo sapien
aacatttagagattttctccagtcg

SEQ ID NO: 3786189 - DNA, 25 bp, Homo sapien
cttctaaacatttagagattttctc

SEQ ID NO: 3786190 - DNA, 25 bp, Homo sapien
tttgtcctcgacaatttcataaaat

SEQ ID NO: 3786191 - DNA, 25 bp, Homo sapien
ggttatatcagaactcctgccactc

SEQ ID NO: 3786192 - DNA, 25 bp, Homo sapien
gacacgcagcaattcttcaactttc

SEQ ID NO: 3786193 - DNA, 25 bp, Homo sapien
cataaaatggacctatgacacgcag

SEQ ID NO: 3786194 - DNA, 25 bp, Homo sapien
tggtctatggtagtcagcaactctg

SEQ ID NO: 3786195 - DNA, 25 bp, Homo sapien
aattatctgattgctgctcctctga

SEQ ID NO: 3786196 - DNA, 25 bp, Homo sapien
tgagcagttctcaccttcaagcaat

SEQ ID NO: 3786197 - DNA, 25 bp, Homo sapien
caactctgataggattacatgctca

SEQ ID NO: 3786198 - DNA, 25 bp, Homo sapien
gaaagcgaagactaaattcctcagg

SEQ ID NO: 3786199 - DNA, 25 bp, Homo sapien
gagtatgctgatcactagaagccta

SEQ ID NO: 3786200 - DNA, 25 bp, Homo sapien
gttcaatggaatcactaactcagtc

SEQ ID NO: 3786201 - DNA, 25 bp, Homo sapien
gcatggacaccagaaaagaggcatc

SEQ ID NO: 3786202 - DNA, 25 bp, Homo sapien
atttcttcaacatatgcaatcatgg

SEQ ID NO: 3786203 - DNA, 25 bp, Homo sapien
caacatatgcaatcatggcttcctc

SEQ ID NO: 3786204 - DNA, 25 bp, Homo sapien
tcttcaacatatgcaatcatggctt

SEQ ID NO: 3786205 - DNA, 25 bp, Homo sapien
acatatgcaatcatggcttcctctt

SEQ ID NO: 3786206 - DNA, 25 bp, Homo sapien
atcacccagtgaactccaagcatcc

SEQ ID NO: 3786207 - DNA, 25 bp, Homo sapien
ctcatgtgatccactgttttgacct

SEQ ID NO: 3786208 - DNA, 25 bp, Homo sapien
ccactgcgcccagccagccatgttt

SEQ ID NO: 3786209 - DNA, 25 bp, Homo sapien
ctgcgcccagccagccatgttttaa

SEQ ID NO: 3786210 - DNA, 25 bp, Homo sapien
cctcatgtgatccactgttttgacc

SEQ ID NO: 3786211 - DNA, 25 bp, Homo sapien
tttcaaatttttgcccgacatgtaa

SEQ ID NO: 3786212 - DNA, 25 bp, Homo sapien
ttcaaatttttgcccgacatgtaaa

SEQ ID NO: 3786213 - DNA, 25 bp, Homo sapien
tttttgcccgacatgtaaacctcca

SEQ ID NO: 3786214 - DNA, 25 bp, Homo sapien
tcaaatttttgcccgacatgtaaac

SEQ ID NO: 3786215 - DNA, 25 bp, Homo sapien
ttccaataggatcccaaaatccagg

SEQ ID NO: 3786216 - DNA, 25 bp, Homo sapien
tttacagggtccttcagttgcctgc

SEQ ID NO: 3786217 - DNA, 25 bp, Homo sapien
cagttgcctgcttatagaagctata

SEQ ID NO: 3786218 - DNA, 25 bp, Homo sapien
gggtccttcagttgcctgcttatag

SEQ ID NO: 3786219 - DNA, 25 bp, Homo sapien
tcagacaacaccatagaaggaaaga

SEQ ID NO: 3786220 - DNA, 25 bp, Homo sapien
catattattgttgtattcagttagt

SEQ ID NO: 3786221 - DNA, 25 bp, Homo sapien
tgccctcctccaatagaatgtttga

SEQ ID NO: 3786222 - DNA, 25 bp, Homo sapien
tgatgtgttgaatatttgttaccta

SEQ ID NO: 3786223 - DNA, 25 bp, Homo sapien
tcaaattgctgaaaaccgaagatag

SEQ ID NO: 3786224 - DNA, 25 bp, Homo sapien
tacgtcttgcttctaagactctgca

SEQ ID NO: 3786225 - DNA, 25 bp, Homo sapien
taaatacaagaaggagatcagccac

SEQ ID NO: 3786226 - DNA, 25 bp, Homo sapien
aaagctctgcaaatcgtgaacaggg

SEQ ID NO: 3786227 - DNA, 25 bp, Homo sapien
ttcacggccgcctcaaacctagtct

SEQ ID NO: 3786228 - DNA, 25 bp, Homo sapien
tggatcaccttcacggccgcctcaa

SEQ ID NO: 3786229 - DNA, 25 bp, Homo sapien
cgtgcacggatctcgtgtccgccat

SEQ ID NO: 3786230 - DNA, 25 bp, Homo sapien
cctcaaacctagtctcgtgcacgga

SEQ ID NO: 3786231 - DNA, 25 bp, Homo sapien
aggtctgtcggcgggaatcaggcag

SEQ ID NO: 3786232 - DNA, 25 bp, Homo sapien
gtctgtcggcgggaatcaggcagca

SEQ ID NO: 3786233 - DNA, 25 bp, Homo sapien
cccaaggtctgtcggcgggaatcag

SEQ ID NO: 3786234 - DNA, 25 bp, Homo sapien
gtcccaaggtctgtcggcgggaatc

SEQ ID NO: 3786235 - DNA, 25 bp, Homo sapien
tatccaggccacacagatcgaagcg

SEQ ID NO: 3786236 - DNA, 25 bp, Homo sapien
gtgactaaggtcacgaatccggccc

SEQ ID NO: 3786237 - DNA, 25 bp, Homo sapien
gcggatcaacatgccccaaaaggag

SEQ ID NO: 3786238 - DNA, 25 bp, Homo sapien
agcgaagcgggtcagttcccctttg

SEQ ID NO: 3786239 - DNA, 25 bp, Homo sapien
gcggagccgctctcccaccctgggg

SEQ ID NO: 3786240 - DNA, 25 bp, Homo sapien
gaagagcatgtctagcagaagacag

SEQ ID NO: 3786241 - DNA, 25 bp, Homo sapien
ggaagagcatgtctagcagaagaca

SEQ ID NO: 3786242 - DNA, 25 bp, Homo sapien
acagagggggtccgggcatcggtgg

SEQ ID NO: 3786243 - DNA, 25 bp, Homo sapien
gtccgtctgtcagtccgtgccctcc

SEQ ID NO: 3786244 - DNA, 25 bp, Homo sapien
gtctgtcagtccgtgccctccccac

SEQ ID NO: 3786245 - DNA, 25 bp, Homo sapien
agtccgtctgtcagtccgtgccctc

SEQ ID NO: 3786246 - DNA, 25 bp, Homo sapien
ccgtctgtcagtccgtgccctcccc

SEQ ID NO: 3786247 - DNA, 25 bp, Homo sapien
cagcagcagtgcagcaaaccccacc

SEQ ID NO: 3786248 - DNA, 25 bp, Homo sapien
cgcagcagcagtgcagcaaacccca

SEQ ID NO: 3786249 - DNA, 25 bp, Homo sapien
cagcagtgcagcaaaccccacccac

SEQ ID NO: 3786250 - DNA, 25 bp, Homo sapien
cggaggacccactggcgccgccgcc

SEQ ID NO: 3786251 - DNA, 25 bp, Homo sapien
ggaccgatgtgtccgctctggcagc

SEQ ID NO: 3786252 - DNA, 25 bp, Homo sapien
caaggacgcgcgcggtccgtctgtc

SEQ ID NO: 3786253 - DNA, 25 bp, Homo sapien
tctggcagccgggtggacgaagtgc

SEQ ID NO: 3786254 - DNA, 25 bp, Homo sapien
cactgtgcgcgcttttgttcagaag

SEQ ID NO: 3786255 - DNA, 25 bp, Homo sapien
tggggatgcgcggttgggttctgca

SEQ ID NO: 3786256 - DNA, 25 bp, Homo sapien
ggggatgcgcggttgggttctgcac

SEQ ID NO: 3786257 - DNA, 25 bp, Homo sapien
ctggggatgcgcggttgggttctgc

SEQ ID NO: 3786258 - DNA, 25 bp, Homo sapien
gcgtccggcgttcctgctagctctt

SEQ ID NO: 3786259 - DNA, 25 bp, Homo sapien
gctcttccggttaggcgtctctgtc

SEQ ID NO: 3786260 - DNA, 25 bp, Homo sapien
ttggtattgccggacaaggcctgtc

SEQ ID NO: 3786261 - DNA, 25 bp, Homo sapien
tgccccgcgggcttatgggaaatgt

SEQ ID NO: 3786262 - DNA, 25 bp, Homo sapien
caacaaaattgagagcacttgggag

SEQ ID NO: 3786263 - DNA, 25 bp, Homo sapien
gaggctttagagagccattacctaa

SEQ ID NO: 3786264 - DNA, 25 bp, Homo sapien
tcagacgttatcatggaggctttag

SEQ ID NO: 3786265 - DNA, 25 bp, Homo sapien
tggaacaaaacttggaggcaccttg

SEQ ID NO: 3786266 - DNA, 25 bp, Homo sapien
aattgtaaaatctccaccccctgag

SEQ ID NO: 3786267 - DNA, 25 bp, Homo sapien
caaaggagggaacgacggccctgtg

SEQ ID NO: 3786268 - DNA, 25 bp, Homo sapien
tggcccttgttgtttacgctaagta

SEQ ID NO: 3786269 - DNA, 25 bp, Homo sapien
gggaacgacggccctgtgcttcctc

SEQ ID NO: 3786270 - DNA, 25 bp, Homo sapien
atggcccttgttgtttacgctaagt

SEQ ID NO: 3786271 - DNA, 25 bp, Homo sapien
tctgaatgagaaagattcatcctga

SEQ ID NO: 3786272 - DNA, 25 bp, Homo sapien
tataatcaaagtcgttagtatttcg

SEQ ID NO: 3786273 - DNA, 25 bp, Homo sapien
tcaaagtcgttagtatttcggtcac

SEQ ID NO: 3786274 - DNA, 25 bp, Homo sapien
tccatcttcttgtgatgaccatcgg

SEQ ID NO: 3786275 - DNA, 25 bp, Homo sapien
gaccatcggtgagaataaatctcaa

SEQ ID NO: 3786276 - DNA, 25 bp, Homo sapien
aaatattgccaagatgagtttgttg

SEQ ID NO: 3786277 - DNA, 25 bp, Homo sapien
agtttgttgttatagccatatcctg

SEQ ID NO: 3786278 - DNA, 25 bp, Homo sapien
ccatatcctggaacttcttttgtga

SEQ ID NO: 3786279 - DNA, 25 bp, Homo sapien
cctggaacttcttttgtgagctcac

SEQ ID NO: 3786280 - DNA, 25 bp, Homo sapien
gagggaacgtggctgttgggttagc

SEQ ID NO: 3786281 - DNA, 25 bp, Homo sapien
gggatgagggaacgtggctgttggg

SEQ ID NO: 3786282 - DNA, 25 bp, Homo sapien
aacgtggctgttgggttagctgaat

SEQ ID NO: 3786283 - DNA, 25 bp, Homo sapien
ggaacgtggctgttgggttagctga

SEQ ID NO: 3786284 - DNA, 25 bp, Homo sapien
ctggggacgagaacaatgggtaatt

SEQ ID NO: 3786285 - DNA, 25 bp, Homo sapien
gggacgagaacaatgggtaattgaa

SEQ ID NO: 3786286 - DNA, 25 bp, Homo sapien
gtctcagtttgcttaatagttggcc

SEQ ID NO: 3786287 - DNA, 25 bp, Homo sapien
caggtcagtgcccacgttgttgtat

SEQ ID NO: 3786288 - DNA, 25 bp, Homo sapien
taagttgaatgcagtcccagcggaa

SEQ ID NO: 3786289 - DNA, 25 bp, Homo sapien
aagttgaatgcagtcccagcggaat

SEQ ID NO: 3786290 - DNA, 25 bp, Homo sapien
ctaagttgaatgcagtcccagcgga

SEQ ID NO: 3786291 - DNA, 25 bp, Homo sapien
aatggtgtaggttaagtcttttgct

SEQ ID NO: 3786292 - DNA, 25 bp, Homo sapien
ggccatgcgggagcaagttttatga

SEQ ID NO: 3786293 - DNA, 25 bp, Homo sapien
gccttgagtgttctgtgggccatgc

SEQ ID NO: 3786294 - DNA, 25 bp, Homo sapien
gcgagcatcagtctaatgaggtaat

SEQ ID NO: 3786295 - DNA, 25 bp, Homo sapien
gaggtagggcttttgcaggggtgga

SEQ ID NO: 3786296 - DNA, 25 bp, Homo sapien
ctgaggtagggcttttgcaggggtg

SEQ ID NO: 3786297 - DNA, 25 bp, Homo sapien
gtagggcttttgcaggggtggaggc

SEQ ID NO: 3786298 - DNA, 25 bp, Homo sapien
tgcaggggtggaggcagaaggcaca

SEQ ID NO: 3786299 - DNA, 25 bp, Homo sapien
ttggcagcgttctctgcaaatgcct

SEQ ID NO: 3786300 - DNA, 25 bp, Homo sapien
tggcagcgttctctgcaaatgcctg

SEQ ID NO: 3786301 - DNA, 25 bp, Homo sapien
ctgtggttagatagtttctaatttc

SEQ ID NO: 3786302 - DNA, 25 bp, Homo sapien
tgtggttagatagtttctaatttct

SEQ ID NO: 3786303 - DNA, 25 bp, Homo sapien
ctaatttcttttcaaatatttggca

SEQ ID NO: 3786304 - DNA, 25 bp, Homo sapien
tcttttcaaatatttggcatttaaa

SEQ ID NO: 3786305 - DNA, 25 bp, Homo sapien
gaaggctggactgcataagcatggc

SEQ ID NO: 3786306 - DNA, 25 bp, Homo sapien
gctggactgcataagcatggcagtt

SEQ ID NO: 3786307 - DNA, 25 bp, Homo sapien
ggactgcataagcatggcagttttt

SEQ ID NO: 3786308 - DNA, 25 bp, Homo sapien
tagaaggctggactgcataagcatg

SEQ ID NO: 3786309 - DNA, 25 bp, Homo sapien
ttttcataagttgagttgttggatg

SEQ ID NO: 3786310 - DNA, 25 bp, Homo sapien
tcataagttgagttgttggatgcag

SEQ ID NO: 3786311 - DNA, 25 bp, Homo sapien
ttcataagttgagttgttggatgca

SEQ ID NO: 3786312 - DNA, 25 bp, Homo sapien
ttattttcataagttgagttgttgg

SEQ ID NO: 3786313 - DNA, 25 bp, Homo sapien
tatggtgtttgtcagaaatgcactg

SEQ ID NO: 3786314 - DNA, 25 bp, Homo sapien
aatgtatggtgtttgtcagaaatgc

SEQ ID NO: 3786315 - DNA, 25 bp, Homo sapien
gtatggtgtttgtcagaaatgcact

SEQ ID NO: 3786316 - DNA, 25 bp, Homo sapien
tgtatggtgtttgtcagaaatgcac

SEQ ID NO: 3786317 - DNA, 25 bp, Homo sapien
agatcagtttctccagttcaacagt

SEQ ID NO: 3786318 - DNA, 25 bp, Homo sapien
gatcagtttctccagttcaacagtc

SEQ ID NO: 3786319 - DNA, 25 bp, Homo sapien
aagatcagtttctccagttcaacag

SEQ ID NO: 3786320 - DNA, 25 bp, Homo sapien
agcaggcctttaaatgaatcgttat

SEQ ID NO: 3786321 - DNA, 25 bp, Homo sapien
gatcaatacacgacagcgtctcacc

SEQ ID NO: 3786322 - DNA, 25 bp, Homo sapien
ctgagatcaatacacgacagcgtct

SEQ ID NO: 3786323 - DNA, 25 bp, Homo sapien
acagcgtctcacctccgcaggtaca

SEQ ID NO: 3786324 - DNA, 25 bp, Homo sapien
agcgtctcacctccgcaggtacaga

SEQ ID NO: 3786325 - DNA, 25 bp, Homo sapien
tgcagaaggttcaatctctgttgtg

SEQ ID NO: 3786326 - DNA, 25 bp, Homo sapien
gcagaaggttcaatctctgttgtgg

SEQ ID NO: 3786327 - DNA, 25 bp, Homo sapien
cagaaggttcaatctctgttgtgga

SEQ ID NO: 3786328 - DNA, 25 bp, Homo sapien
ctgcagaaggttcaatctctgttgt

SEQ ID NO: 3786329 - DNA, 25 bp, Homo sapien
tggaggaactacattcttcttcagg

SEQ ID NO: 3786330 - DNA, 25 bp, Homo sapien
tgctttggaggaactacattcttct

SEQ ID NO: 3786331 - DNA, 25 bp, Homo sapien
ggaactacattcttcttcaggggtg

SEQ ID NO: 3786332 - DNA, 25 bp, Homo sapien
cttagggtgctttggaggaactaca

SEQ ID NO: 3786333 - DNA, 25 bp, Homo sapien
caggtttgaatgttccggagattga

SEQ ID NO: 3786334 - DNA, 25 bp, Homo sapien
tgaatgttccggagattgagctaca

SEQ ID NO: 3786335 - DNA, 25 bp, Homo sapien
ggtttgaatgttccggagattgagc

SEQ ID NO: 3786336 - DNA, 25 bp, Homo sapien
agtcaggtttgaatgttccggagat

SEQ ID NO: 3786337 - DNA, 25 bp, Homo sapien
agtctcctgttgaattgctaaaggt

SEQ ID NO: 3786338 - DNA, 25 bp, Homo sapien
cttctcagcagtctgtggatgctca

SEQ ID NO: 3786339 - DNA, 25 bp, Homo sapien
ttgctaaaggtccagcatcttccgg

SEQ ID NO: 3786340 - DNA, 25 bp, Homo sapien
gaattgctaaaggtccagcatcttc

SEQ ID NO: 3786341 - DNA, 25 bp, Homo sapien
tggaggcttaacagagacattgggc

SEQ ID NO: 3786342 - DNA, 25 bp, Homo sapien
ggtgggcccccgtgctggatagtgg

SEQ ID NO: 3786343 - DNA, 25 bp, Homo sapien
tacatcattacctggtcctgagagc

SEQ ID NO: 3786344 - DNA, 25 bp, Homo sapien
ggatagtgggaggttctacatcatt

SEQ ID NO: 3786345 - DNA, 25 bp, Homo sapien
tggggtctcctgccgagtctgagaa

SEQ ID NO: 3786346 - DNA, 25 bp, Homo sapien
gggtctcctgccgagtctgagaaga

SEQ ID NO: 3786347 - DNA, 25 bp, Homo sapien
ctcttggtttgcaggaggttccatc

SEQ ID NO: 3786348 - DNA, 25 bp, Homo sapien
gctggggtctcctgccgagtctgag

SEQ ID NO: 3786349 - DNA, 25 bp, Homo sapien
ctaatggaaagttcacgctccgtag

SEQ ID NO: 3786350 - DNA, 25 bp, Homo sapien
ttcacgctccgtaggatgacatgga

SEQ ID NO: 3786351 - DNA, 25 bp, Homo sapien
aaagttcacgctccgtaggatgaca

SEQ ID NO: 3786352 - DNA, 25 bp, Homo sapien
cgctccgtaggatgacatggaggct

SEQ ID NO: 3786353 - DNA, 25 bp, Homo sapien
cctgctgggttgaagaaggaggtgt

SEQ ID NO: 3786354 - DNA, 25 bp, Homo sapien
ctgctgggttgaagaaggaggtgtg

SEQ ID NO: 3786355 - DNA, 25 bp, Homo sapien
ctgcctgatgacctgcagccccatc

SEQ ID NO: 3786356 - DNA, 25 bp, Homo sapien
tgcagccccatctagatctgcagtt

SEQ ID NO: 3786357 - DNA, 25 bp, Homo sapien
gccccatctagatctgcagtttgaa

SEQ ID NO: 3786358 - DNA, 25 bp, Homo sapien
ccatctagatctgcagtttgaacct

SEQ ID NO: 3786359 - DNA, 25 bp, Homo sapien
tgtgcaactgagaactgccctggcc

SEQ ID NO: 3786360 - DNA, 25 bp, Homo sapien
aaatcctggtgtgcaactgagaact

SEQ ID NO: 3786361 - DNA, 25 bp, Homo sapien
attgaaatcctggtgtgcaactgag

SEQ ID NO: 3786362 - DNA, 25 bp, Homo sapien
cctggtgtgcaactgagaactgccc

SEQ ID NO: 3786363 - DNA, 25 bp, Homo sapien
aggcgacctcgcctccggatattca

SEQ ID NO: 3786364 - DNA, 25 bp, Homo sapien
aggaagtcaggcgacctcgcctccg

SEQ ID NO: 3786365 - DNA, 25 bp, Homo sapien
gcgacctcgcctccggatattcaga

SEQ ID NO: 3786366 - DNA, 25 bp, Homo sapien
aagtcaggcgacctcgcctccggat

SEQ ID NO: 3786367 - DNA, 25 bp, Homo sapien
agggtaatcgaagtcatcgtcgtcc

SEQ ID NO: 3786368 - DNA, 25 bp, Homo sapien
cagctcctccgggtaagggtaatcg

SEQ ID NO: 3786369 - DNA, 25 bp, Homo sapien
taagggtaatcgaagtcatcgtcgt

SEQ ID NO: 3786370 - DNA, 25 bp, Homo sapien
cgggtaagggtaatcgaagtcatcg

SEQ ID NO: 3786371 - DNA, 25 bp, Homo sapien
tgatcacttctagcgattaaaggag

SEQ ID NO: 3786372 - DNA, 25 bp, Homo sapien
agagcccctttgtgaaatacgagaa

SEQ ID NO: 3786373 - DNA, 25 bp, Homo sapien
tacaaatgggtattctgcagtagag

SEQ ID NO: 3786374 - DNA, 25 bp, Homo sapien
ggtttgttaatgtctctatgctcca

SEQ ID NO: 3786375 - DNA, 25 bp, Homo sapien
ggtccattggcctgtgagatttctc

SEQ ID NO: 3786376 - DNA, 25 bp, Homo sapien
gtgagatttctctcgcagggctgtg

SEQ ID NO: 3786377 - DNA, 25 bp, Homo sapien
ccctttttggtccattggcctgtga

SEQ ID NO: 3786378 - DNA, 25 bp, Homo sapien
ttcccagctcttgctcccggggtgg

SEQ ID NO: 3786379 - DNA, 25 bp, Homo sapien
aattaccctgagttggctggcctga

SEQ ID NO: 3786380 - DNA, 25 bp, Homo sapien
gcatggatagactcaaattaccctg

SEQ ID NO: 3786381 - DNA, 25 bp, Homo sapien
ctatgtgaaaatgcgagtggctagt

SEQ ID NO: 3786382 - DNA, 25 bp, Homo sapien
cgagtggctagtattcgcatggata

SEQ ID NO: 3786383 - DNA, 25 bp, Homo sapien
tttctgccggttccttggacttctc

SEQ ID NO: 3786384 - DNA, 25 bp, Homo sapien
ccttgcctgtccttttgcactgcag

SEQ ID NO: 3786385 - DNA, 25 bp, Homo sapien
cactgcagcagtatctgagttgatc

SEQ ID NO: 3786386 - DNA, 25 bp, Homo sapien
gagttgatcatctttttggtaaagg

SEQ ID NO: 3786387 - DNA, 25 bp, Homo sapien
gcgttaagtaaatgcgggacgtgaa

SEQ ID NO: 3786388 - DNA, 25 bp, Homo sapien
cgtgaagcagatgatacgggctttg

SEQ ID NO: 3786389 - DNA, 25 bp, Homo sapien
taaatgcgggacgtgaagcagatga

SEQ ID NO: 3786390 - DNA, 25 bp, Homo sapien
ttacagcgttaagtaaatgcgggac

SEQ ID NO: 3786391 - DNA, 25 bp, Homo sapien
actgcatctggtacccggacactga

SEQ ID NO: 3786392 - DNA, 25 bp, Homo sapien
tgagagttaaatgggcccagaaaca

SEQ ID NO: 3786393 - DNA, 25 bp, Homo sapien
tctggtacccggacactgagtaacc

SEQ ID NO: 3786394 - DNA, 25 bp, Homo sapien
gaaaacataagcatgctagtgagag

SEQ ID NO: 3786395 - DNA, 25 bp, Homo sapien
tgttttcagtacaacaagattccag

SEQ ID NO: 3786396 - DNA, 25 bp, Homo sapien
caactactagtcattgagctcctgg

SEQ ID NO: 3786397 - DNA, 25 bp, Homo sapien
ctgtgtctctaatgtatttgctgga

SEQ ID NO: 3786398 - DNA, 25 bp, Homo sapien
ttgaacgttaaatactgattgatcc

SEQ ID NO: 3786399 - DNA, 25 bp, Homo sapien
aagaaaagatatagtttgaggagac

SEQ ID NO: 3786400 - DNA, 25 bp, Homo sapien
gcggttcgctcttccccgcgtgcga

SEQ ID NO: 3786401 - DNA, 25 bp, Homo sapien
tttgtcttgcgaaagaatttcctcc

SEQ ID NO: 3786402 - DNA, 25 bp, Homo sapien
acagtagtggcgcttcggccgcgcc

SEQ ID NO: 3786403 - DNA, 25 bp, Homo sapien
agcaagaaatagcacggcgcgccac

SEQ ID NO: 3786404 - DNA, 25 bp, Homo sapien
ttcccggaatccgtgcaggggcact

SEQ ID NO: 3786405 - DNA, 25 bp, Homo sapien
caccccttcccggaatccgtgcagg

SEQ ID NO: 3786406 - DNA, 25 bp, Homo sapien
ctggccacgcctgcaatcatagcaa

SEQ ID NO: 3786407 - DNA, 25 bp, Homo sapien
ttctccgtgtttaggtagaaacatg

SEQ ID NO: 3786408 - DNA, 25 bp, Homo sapien
ccgtgtttaggtagaaacatgactc

SEQ ID NO: 3786409 - DNA, 25 bp, Homo sapien
aagccagaggcgatggtttccgctt

SEQ ID NO: 3786410 - DNA, 25 bp, Homo sapien
cagaggcgatggtttccgcttctgc

SEQ ID NO: 3786411 - DNA, 25 bp, Homo sapien
ttgacttggtctgctgccttttgca

SEQ ID NO: 3786412 - DNA, 25 bp, Homo sapien
tgacttggtctgctgccttttgcaa

SEQ ID NO: 3786413 - DNA, 25 bp, Homo sapien
gacttggtctgctgccttttgcaat

SEQ ID NO: 3786414 - DNA, 25 bp, Homo sapien
ttttactatatgtacagctgatgcc

SEQ ID NO: 3786415 - DNA, 25 bp, Homo sapien
catgctgatcttctcgaagttgttt

SEQ ID NO: 3786416 - DNA, 25 bp, Homo sapien
ttactatatgtacagctgatgccag

SEQ ID NO: 3786417 - DNA, 25 bp, Homo sapien
tctcgaagttgtttcaattttacta

SEQ ID NO: 3786418 - DNA, 25 bp, Homo sapien
tagcaacagcataacctcctgcagt

SEQ ID NO: 3786419 - DNA, 25 bp, Homo sapien
tgaagaagaatgctgactctctcta

SEQ ID NO: 3786420 - DNA, 25 bp, Homo sapien
tgactctctctaatgatccatgaca

SEQ ID NO: 3786421 - DNA, 25 bp, Homo sapien
gaagaatgctgactctctctaatga

SEQ ID NO: 3786422 - DNA, 25 bp, Homo sapien
tttcctcgcttcttttcgttatgac

SEQ ID NO: 3786423 - DNA, 25 bp, Homo sapien
tcgcttcttttcgttatgaccagta

SEQ ID NO: 3786424 - DNA, 25 bp, Homo sapien
gcttcttttcgttatgaccagtaaa

SEQ ID NO: 3786425 - DNA, 25 bp, Homo sapien
cctcgcttcttttcgttatgaccag

SEQ ID NO: 3786426 - DNA, 25 bp, Homo sapien
tcaaatattttgaaaataacattgg

SEQ ID NO: 3786427 - DNA, 25 bp, Homo sapien
tgaaaataacattggttaaggtcta

SEQ ID NO: 3786428 - DNA, 25 bp, Homo sapien
caaatattttgaaaataacattggt

SEQ ID NO: 3786429 - DNA, 25 bp, Homo sapien
ttttcacttggatgtctgcaccacg

SEQ ID NO: 3786430 - DNA, 25 bp, Homo sapien
tgtctgcaccacgtgacagcagttt

SEQ ID NO: 3786431 - DNA, 25 bp, Homo sapien
gaatatttgcataagcctccctcca

SEQ ID NO: 3786432 - DNA, 25 bp, Homo sapien
ggactgggaccagaatctaccagaa

SEQ ID NO: 3786433 - DNA, 25 bp, Homo sapien
agaagtgttattacttccacatggc

SEQ ID NO: 3786434 - DNA, 25 bp, Homo sapien
tgccagaagtgttattacttccaca

SEQ ID NO: 3786435 - DNA, 25 bp, Homo sapien
tgttttcactgtcacggacatcaag

SEQ ID NO: 3786436 - DNA, 25 bp, Homo sapien
catcaagccggcactttctgtctgc

SEQ ID NO: 3786437 - DNA, 25 bp, Homo sapien
gaagtgtcccatctcactgttccca

SEQ ID NO: 3786438 - DNA, 25 bp, Homo sapien
tcactagctttttacccctgtgggc

SEQ ID NO: 3786439 - DNA, 25 bp, Homo sapien
gaaagtctttcaccaggcaagtgac

SEQ ID NO: 3786440 - DNA, 25 bp, Homo sapien
tcactgttcccatgcagtgttctgt

SEQ ID NO: 3786441 - DNA, 25 bp, Homo sapien
taaggttttgcagctggaggtttta

SEQ ID NO: 3786442 - DNA, 25 bp, Homo sapien
ttgcagctggaggttttaaaaaatc

SEQ ID NO: 3786443 - DNA, 25 bp, Homo sapien
tgcagctggaggttttaaaaaatcc

SEQ ID NO: 3786444 - DNA, 25 bp, Homo sapien
cgacacgccaacagtgtcatattct

SEQ ID NO: 3786445 - DNA, 25 bp, Homo sapien
gtgtacaacgacacgccaacagtgt

SEQ ID NO: 3786446 - DNA, 25 bp, Homo sapien
gattccagtgtacaacgacacgcca

SEQ ID NO: 3786447 - DNA, 25 bp, Homo sapien
aatgagattccagtgtacaacgaca

SEQ ID NO: 3786448 - DNA, 25 bp, Homo sapien
cagtccccacggctgtgcggagcag

SEQ ID NO: 3786449 - DNA, 25 bp, Homo sapien
ggcagtccccacggctgtgcggagc

SEQ ID NO: 3786450 - DNA, 25 bp, Homo sapien
tcctggctgccgcggcagtccccac

SEQ ID NO: 3786451 - DNA, 25 bp, Homo sapien
ctggctgccgcggcagtccccacgg

SEQ ID NO: 3786452 - DNA, 25 bp, Homo sapien
gggccaggggcagcggggcacaggg

SEQ ID NO: 3786453 - DNA, 25 bp, Homo sapien
gcagcggggcacagggggtggtcgc

SEQ ID NO: 3786454 - DNA, 25 bp, Homo sapien
acagggggtggtcgcgcccaggagc

SEQ ID NO: 3786455 - DNA, 25 bp, Homo sapien
gggcacagggggtggtcgcgcccag

SEQ ID NO: 3786456 - DNA, 25 bp, Homo sapien
gcgcaaggccggacccaggcgccca

SEQ ID NO: 3786457 - DNA, 25 bp, Homo sapien
gtggcgcaaggccggacccaggcgc

SEQ ID NO: 3786458 - DNA, 25 bp, Homo sapien
ggcgcaaggccggacccaggcgccc

SEQ ID NO: 3786459 - DNA, 25 bp, Homo sapien
cgcaaggccggacccaggcgcccac

SEQ ID NO: 3786460 - DNA, 25 bp, Homo sapien
caacacggccatggcgcgcagctga

SEQ ID NO: 3786461 - DNA, 25 bp, Homo sapien
gcaacacggccatggcgcgcagctg

SEQ ID NO: 3786462 - DNA, 25 bp, Homo sapien
tctgtttgcatgcttcaggatcagg

SEQ ID NO: 3786463 - DNA, 25 bp, Homo sapien
tagactataaaactagggccattgc

SEQ ID NO: 3786464 - DNA, 25 bp, Homo sapien
gagtgactctaatgaataaggacga

SEQ ID NO: 3786465 - DNA, 25 bp, Homo sapien
taatttgcattctctgtatcacgac

SEQ ID NO: 3786466 - DNA, 25 bp, Homo sapien
tctgcaagttaagctaggagggctg

SEQ ID NO: 3786467 - DNA, 25 bp, Homo sapien
gacatgtggtccacgcctgaggcag

SEQ ID NO: 3786468 - DNA, 25 bp, Homo sapien
gaaaggttttatatagccctgagcc

SEQ ID NO: 3786469 - DNA, 25 bp, Homo sapien
tatgacaagatgactgcagcagtcc

SEQ ID NO: 3786470 - DNA, 25 bp, Homo sapien
gaccatcaaggtcaagaagactctt

SEQ ID NO: 3786471 - DNA, 25 bp, Homo sapien
ggtcaagaagactcttcatactttt

SEQ ID NO: 3786472 - DNA, 25 bp, Homo sapien
aggtgaccatcaaggtcaagaagac

SEQ ID NO: 3786473 - DNA, 25 bp, Homo sapien
tcaaggtcaagaagactcttcatac

SEQ ID NO: 3786474 - DNA, 25 bp, Homo sapien
cccagagctgtcgcccttgagaagc

SEQ ID NO: 3786475 - DNA, 25 bp, Homo sapien
ttgaagaggttggagcacggctccc

SEQ ID NO: 3786476 - DNA, 25 bp, Homo sapien
aagaggttggagcacggctccccag

SEQ ID NO: 3786477 - DNA, 25 bp, Homo sapien
tgcaggtaatgcttgaagaggttgg

SEQ ID NO: 3786478 - DNA, 25 bp, Homo sapien
tgtgtgagtctgtacgacattgttc

SEQ ID NO: 3786479 - DNA, 25 bp, Homo sapien
catacgattgaagctccatgtgtgt

SEQ ID NO: 3786480 - DNA, 25 bp, Homo sapien
tgtgagtctgtacgacattgttcat

SEQ ID NO: 3786481 - DNA, 25 bp, Homo sapien
ctgaagcattgatcatacgattgaa

SEQ ID NO: 3786482 - DNA, 25 bp, Homo sapien
tcatttgtaagagtatgtgcccaac

SEQ ID NO: 3786483 - DNA, 25 bp, Homo sapien
gctcttctgaacacatagatgtaaa

SEQ ID NO: 3786484 - DNA, 25 bp, Homo sapien
tgactctctcggatcttctttaaag

SEQ ID NO: 3786485 - DNA, 25 bp, Homo sapien
gacacagatagagttatcagctctg

SEQ ID NO: 3786486 - DNA, 25 bp, Homo sapien
aatgttagccattcccggttggtga

SEQ ID NO: 3786487 - DNA, 25 bp, Homo sapien
tgtttctggcaggacagagatagct

SEQ ID NO: 3786488 - DNA, 25 bp, Homo sapien
agagatagctaacaagaaatgttag

SEQ ID NO: 3786489 - DNA, 25 bp, Homo sapien
ccctgcctcttgacctgaagaaagt

SEQ ID NO: 3786490 - DNA, 25 bp, Homo sapien
cagaatgccatgaaacccgttaccc

SEQ ID NO: 3786491 - DNA, 25 bp, Homo sapien
cactttgtaacactgggtagcctag

SEQ ID NO: 3786492 - DNA, 25 bp, Homo sapien
tgaagatgtatgctttcgctgcagc

SEQ ID NO: 3786493 - DNA, 25 bp, Homo sapien
gaacatagctgctgatgcaaccaat

SEQ ID NO: 3786494 - DNA, 25 bp, Homo sapien
taatatcatgctgaaaatttggaaa

SEQ ID NO: 3786495 - DNA, 25 bp, Homo sapien
ttctcattaggatcttggctgttac

SEQ ID NO: 3786496 - DNA, 25 bp, Homo sapien
ctatgcgtcgtaattagaataacaa

SEQ ID NO: 3786497 - DNA, 25 bp, Homo sapien
ctgttgtctgaatgaagccccggga

SEQ ID NO: 3786498 - DNA, 25 bp, Homo sapien
cacttgccagatttcgaaggtctaa

SEQ ID NO: 3786499 - DNA, 25 bp, Homo sapien
tttcaaccagcataggcagactact

SEQ ID NO: 3786500 - DNA, 25 bp, Homo sapien
cagttccatgttcatctgggacaga

SEQ ID NO: 3786501 - DNA, 25 bp, Homo sapien
taaccctgggaccataatctgaaaa

SEQ ID NO: 3786502 - DNA, 25 bp, Homo sapien
caaggttggtcttatgccaggcaga

SEQ ID NO: 3786503 - DNA, 25 bp, Homo sapien
tagacactgccgcttttgaatagac

SEQ ID NO: 3786504 - DNA, 25 bp, Homo sapien
gacattggacatccgctctcgtatg

SEQ ID NO: 3786505 - DNA, 25 bp, Homo sapien
tcataatccctgtatataaggccag

SEQ ID NO: 3786506 - DNA, 25 bp, Homo sapien
tgcagcctcccgttttgttttactc

SEQ ID NO: 3786507 - DNA, 25 bp, Homo sapien
tacacggtgtgcagcctcccgtttt

SEQ ID NO: 3786508 - DNA, 25 bp, Homo sapien
acatacacggtgtgcagcctcccgt

SEQ ID NO: 3786509 - DNA, 25 bp, Homo sapien
cggtgtgcagcctcccgttttgttt

SEQ ID NO: 3786510 - DNA, 25 bp, Homo sapien
aatggcaccccaatgtgcaacagca

SEQ ID NO: 3786511 - DNA, 25 bp, Homo sapien
agaaatcactccaaaggccgcaaca

SEQ ID NO: 3786512 - DNA, 25 bp, Homo sapien
aatgtgcaacagcaggccaaagccg

SEQ ID NO: 3786513 - DNA, 25 bp, Homo sapien
aactatgatgacaaatggcacccca

SEQ ID NO: 3786514 - DNA, 25 bp, Homo sapien
aggggctaataagctccctcggaat

SEQ ID NO: 3786515 - DNA, 25 bp, Homo sapien
ggctaataagctccctcggaattat

SEQ ID NO: 3786516 - DNA, 25 bp, Homo sapien
caaggtcagggccaaagatttggtg

SEQ ID NO: 3786517 - DNA, 25 bp, Homo sapien
aaagccaaggtcagggccaaagatt

SEQ ID NO: 3786518 - DNA, 25 bp, Homo sapien
gttgtctggaaagcgatgtaaagtg

SEQ ID NO: 3786519 - DNA, 25 bp, Homo sapien
tgatgtgactgcaaacagaatgatg

SEQ ID NO: 3786520 - DNA, 25 bp, Homo sapien
tccagttgtctggaaagcgatgtaa

SEQ ID NO: 3786521 - DNA, 25 bp, Homo sapien
aatgatgagaatgtatgccaggtga

SEQ ID NO: 3786522 - DNA, 25 bp, Homo sapien
tctggggagcaagtcttcctcatcc

SEQ ID NO: 3786523 - DNA, 25 bp, Homo sapien
ggggagcaagtcttcctcatccctc

SEQ ID NO: 3786524 - DNA, 25 bp, Homo sapien
gattctggggagcaagtcttcctca

SEQ ID NO: 3786525 - DNA, 25 bp, Homo sapien
ttacgattctggggagcaagtcttc

SEQ ID NO: 3786526 - DNA, 25 bp, Homo sapien
ttctcctggcctccctgtaaaccca

SEQ ID NO: 3786527 - DNA, 25 bp, Homo sapien
ctccctgtaaacccacaccaccagg

SEQ ID NO: 3786528 - DNA, 25 bp, Homo sapien
ctggcctccctgtaaacccacacca

SEQ ID NO: 3786529 - DNA, 25 bp, Homo sapien
gcctccctgtaaacccacaccacca

SEQ ID NO: 3786530 - DNA, 25 bp, Homo sapien
cacgtcgtactcagggtcctcggtc

SEQ ID NO: 3786531 - DNA, 25 bp, Homo sapien
caccagaagcgagacgaaattggct

SEQ ID NO: 3786532 - DNA, 25 bp, Homo sapien
ccgattcctgagattcctggtacca

SEQ ID NO: 3786533 - DNA, 25 bp, Homo sapien
gcccctctaggcagtcggtgtgaca

SEQ ID NO: 3786534 - DNA, 25 bp, Homo sapien
gattcttcctcttaggaagcgcagg

SEQ ID NO: 3786535 - DNA, 25 bp, Homo sapien
ggaggaacagcaggtgaaaagcagc

SEQ ID NO: 3786536 - DNA, 25 bp, Homo sapien
gagatcccaccagacggtttcctgg

SEQ ID NO: 3786537 - DNA, 25 bp, Homo sapien
ggtgaaaagcagctgcggagatccc

SEQ ID NO: 3786538 - DNA, 25 bp, Homo sapien
catccttagggggtgctccttggac

SEQ ID NO: 3786539 - DNA, 25 bp, Homo sapien
ccttggactgcttcgacaatgccat

SEQ ID NO: 3786540 - DNA, 25 bp, Homo sapien
ggaatgccaggtccgcatccttagg

SEQ ID NO: 3786541 - DNA, 25 bp, Homo sapien
ctggatgaggaatgccaggtccgca

SEQ ID NO: 3786542 - DNA, 25 bp, Homo sapien
gacagagggaccatgctacatgtgt

SEQ ID NO: 3786543 - DNA, 25 bp, Homo sapien
cctggagtgtagagcctgagacaga

SEQ ID NO: 3786544 - DNA, 25 bp, Homo sapien
catgctacatgtgtcctaatgggaa

SEQ ID NO: 3786545 - DNA, 25 bp, Homo sapien
aatgggaaagggctcttcttgagta

SEQ ID NO: 3786546 - DNA, 25 bp, Homo sapien
gggattctgggtcgcgcagccgtgg

SEQ ID NO: 3786547 - DNA, 25 bp, Homo sapien
ggtcgcgcagccgtggagctacctc

SEQ ID NO: 3786548 - DNA, 25 bp, Homo sapien
agccgtggagctacctcaaggcgga

SEQ ID NO: 3786549 - DNA, 25 bp, Homo sapien
tggagctacctcaaggcggaactgg

SEQ ID NO: 3786550 - DNA, 25 bp, Homo sapien
ggatggacgaggacgtgctaaccac

SEQ ID NO: 3786551 - DNA, 25 bp, Homo sapien
gccgcgacgggaactgtaaactgca

SEQ ID NO: 3786552 - DNA, 25 bp, Homo sapien
caagtccaggtgaggcggaggtgcg

SEQ ID NO: 3786553 - DNA, 25 bp, Homo sapien
cgggtcgtgacgagggtggctgggc

SEQ ID NO: 3786554 - DNA, 25 bp, Homo sapien
gcccaagttctctgggtcgctctcc

SEQ ID NO: 3786555 - DNA, 25 bp, Homo sapien
cccaagttctctgggtcgctctccc

SEQ ID NO: 3786556 - DNA, 25 bp, Homo sapien
gagacatagctttcccacttgaggg

SEQ ID NO: 3786557 - DNA, 25 bp, Homo sapien
tgcctcgaacctctcggggttcagg

SEQ ID NO: 3786558 - DNA, 25 bp, Homo sapien
cccgagacccgggagacatagcttt

SEQ ID NO: 3786559 - DNA, 25 bp, Homo sapien
gacccgggagacatagctttcccac

SEQ ID NO: 3786560 - DNA, 25 bp, Homo sapien
tcttgtagagagatacattgagact

SEQ ID NO: 3786561 - DNA, 25 bp, Homo sapien
tagaatgtctctcaatttgtgtatg

SEQ ID NO: 3786562 - DNA, 25 bp, Homo sapien
gtccagtatgtccttaacggttaga

SEQ ID NO: 3786563 - DNA, 25 bp, Homo sapien
tgtttttcagaacatagtgtcagtg

SEQ ID NO: 3786564 - DNA, 25 bp, Homo sapien
ttagcattcttctttcttggcaatt

SEQ ID NO: 3786565 - DNA, 25 bp, Homo sapien
agcattcttctttcttggcaattag

SEQ ID NO: 3786566 - DNA, 25 bp, Homo sapien
tagcattcttctttcttggcaatta

SEQ ID NO: 3786567 - DNA, 25 bp, Homo sapien
tctgaagagctcaattgctgcatgt

SEQ ID NO: 3786568 - DNA, 25 bp, Homo sapien
ttgctgcatgtgagattcaccagag

SEQ ID NO: 3786569 - DNA, 25 bp, Homo sapien
cacagtcagccatggatagtcttct

SEQ ID NO: 3786570 - DNA, 25 bp, Homo sapien
gcagctcttgacttttaacacgcat

SEQ ID NO: 3786571 - DNA, 25 bp, Homo sapien
ggcagtggacagcactcttaacagt

SEQ ID NO: 3786572 - DNA, 25 bp, Homo sapien
caagatctgagttagtggttggctg

SEQ ID NO: 3786573 - DNA, 25 bp, Homo sapien
tttcctgtcaatccaaccattctga

SEQ ID NO: 3786574 - DNA, 25 bp, Homo sapien
atccccgttactgtactagctagac

SEQ ID NO: 3786575 - DNA, 25 bp, Homo sapien
gttactgtactagctagaccgctca

SEQ ID NO: 3786576 - DNA, 25 bp, Homo sapien
caaccattctgatccccgttactgt

SEQ ID NO: 3786577 - DNA, 25 bp, Homo sapien
cctcacgcccctggtttgaattctt

SEQ ID NO: 3786578 - DNA, 25 bp, Homo sapien
ggagcttctgcttgtcccataacaa

SEQ ID NO: 3786579 - DNA, 25 bp, Homo sapien
ctttaggttactttgcatcagcaga

SEQ ID NO: 3786580 - DNA, 25 bp, Homo sapien
cctcatttacagcagtgggactggt

SEQ ID NO: 3786581 - DNA, 25 bp, Homo sapien
catcgaccccgggtaaaatgttatg

SEQ ID NO: 3786582 - DNA, 25 bp, Homo sapien
tattttagggaccttgcagtttgca

SEQ ID NO: 3786583 - DNA, 25 bp, Homo sapien
ggtgtacctttataagtacattcaa

SEQ ID NO: 3786584 - DNA, 25 bp, Homo sapien
cacagtttgcagtctacagtttttt

SEQ ID NO: 3786585 - DNA, 25 bp, Homo sapien
cattgataggttaaagaagcttggt

SEQ ID NO: 3786586 - DNA, 25 bp, Homo sapien
aaggcatattgcttccagattctga

SEQ ID NO: 3786587 - DNA, 25 bp, Homo sapien
gattagctcagttgcttaactggag

SEQ ID NO: 3786588 - DNA, 25 bp, Homo sapien
tatcttacggcttccataatggcta

SEQ ID NO: 3786589 - DNA, 25 bp, Homo sapien
tagtagtactgagattgacccaaac

SEQ ID NO: 3786590 - DNA, 25 bp, Homo sapien
aagggtcttttgcagatggtacaaa

SEQ ID NO: 3786591 - DNA, 25 bp, Homo sapien
cagttgtaatatctaaggtcaggca

SEQ ID NO: 3786592 - DNA, 25 bp, Homo sapien
cagctgaagaatatgtactattgtg

SEQ ID NO: 3786593 - DNA, 25 bp, Homo sapien
tcagtaacttctcaccagggatgga

SEQ ID NO: 3786594 - DNA, 25 bp, Homo sapien
gggtaatatctccatctcgaggtcc

SEQ ID NO: 3786595 - DNA, 25 bp, Homo sapien
tccaaggttatacagggagggtcac

SEQ ID NO: 3786596 - DNA, 25 bp, Homo sapien
gacccttgtgaatacattggcccta

SEQ ID NO: 3786597 - DNA, 25 bp, Homo sapien
taaaatctgatgatagagcccaaat

SEQ ID NO: 3786598 - DNA, 25 bp, Homo sapien
cgctgctgcacaatgcatcctgtgt

SEQ ID NO: 3786599 - DNA, 25 bp, Homo sapien
tctgtgtatattatcagatgcctcc

SEQ ID NO: 3786600 - DNA, 25 bp, Homo sapien
tcatgtttgacagatggcctgcttt

SEQ ID NO: 3786601 - DNA, 25 bp, Homo sapien
aaaacttatcagccaaagatgtcat

SEQ ID NO: 3786602 - DNA, 25 bp, Homo sapien
cctgctcattgataacatccctggc

SEQ ID NO: 3786603 - DNA, 25 bp, Homo sapien
tttggctcgcttttggccatgagaa

SEQ ID NO: 3786604 - DNA, 25 bp, Homo sapien
tccctggcagattccacgatctttg

SEQ ID NO: 3786605 - DNA, 25 bp, Homo sapien
gccatgagaagggtcacattttcag

SEQ ID NO: 3786606 - DNA, 25 bp, Homo sapien
aattttacccagacaagcagctgca

SEQ ID NO: 3786607 - DNA, 25 bp, Homo sapien
aacaattttacccagacaagcagct

SEQ ID NO: 3786608 - DNA, 25 bp, Homo sapien
ctgtggcaggttactgtgcttaaac

SEQ ID NO: 3786609 - DNA, 25 bp, Homo sapien
taaactggttttatccataaatgga

SEQ ID NO: 3786610 - DNA, 25 bp, Homo sapien
cagcccgtggtagaagaattggcct

SEQ ID NO: 3786611 - DNA, 25 bp, Homo sapien
ctttagatacccaggacccaaactg

SEQ ID NO: 3786612 - DNA, 25 bp, Homo sapien
gaattggcctttgcaacggctctag

SEQ ID NO: 3786613 - DNA, 25 bp, Homo sapien
gcatagcatgttggattgaggagca

SEQ ID NO: 3786614 - DNA, 25 bp, Homo sapien
tactaaaggcagagtggggagagcc

SEQ ID NO: 3786615 - DNA, 25 bp, Homo sapien
gcagagtggggagagccaatgtttt

SEQ ID NO: 3786616 - DNA, 25 bp, Homo sapien
aggcagagtggggagagccaatgtt

SEQ ID NO: 3786617 - DNA, 25 bp, Homo sapien
agagtggggagagccaatgttttca

SEQ ID NO: 3786618 - DNA, 25 bp, Homo sapien
ggactgcgacttcccatatggctaa

SEQ ID NO: 3786619 - DNA, 25 bp, Homo sapien
caaattggtgattctggtcgtccgg

SEQ ID NO: 3786620 - DNA, 25 bp, Homo sapien
tcgtgggttctcgtttgactgagga

SEQ ID NO: 3786621 - DNA, 25 bp, Homo sapien
gcagaaggtgcaagatgctggcatc

SEQ ID NO: 3786622 - DNA, 25 bp, Homo sapien
aggtctgtgatttcaggaagctgta

SEQ ID NO: 3786623 - DNA, 25 bp, Homo sapien
gaagctgtaagaagtctgaatgtac

SEQ ID NO: 3786624 - DNA, 25 bp, Homo sapien
atttcaggaagctgtaagaagtctg

SEQ ID NO: 3786625 - DNA, 25 bp, Homo sapien
gtctgtgatttcaggaagctgtaag

SEQ ID NO: 3786626 - DNA, 25 bp, Homo sapien
tggcaagcttacttcctgttgtaaa

SEQ ID NO: 3786627 - DNA, 25 bp, Homo sapien
cagcttacaccactgaaagttggca

SEQ ID NO: 3786628 - DNA, 25 bp, Homo sapien
ggccagataggaaaacgcccaactc

SEQ ID NO: 3786629 - DNA, 25 bp, Homo sapien
taaatgctgattgtagcaggtccat

SEQ ID NO: 3786630 - DNA, 25 bp, Homo sapien
cttcctcctccttcacccccgacat

SEQ ID NO: 3786631 - DNA, 25 bp, Homo sapien
ttctcaaagtggagctggtggaaag

SEQ ID NO: 3786632 - DNA, 25 bp, Homo sapien
tggtggaaagcagtaacattaagtg

SEQ ID NO: 3786633 - DNA, 25 bp, Homo sapien
gtggagctggtggaaagcagtaaca

SEQ ID NO: 3786634 - DNA, 25 bp, Homo sapien
taacattaagtgaagcctggagatt

SEQ ID NO: 3786635 - DNA, 25 bp, Homo sapien
tatccttatattcaaccgaccgtgg

SEQ ID NO: 3786636 - DNA, 25 bp, Homo sapien
gagtctatgccaacctgagtatcct

SEQ ID NO: 3786637 - DNA, 25 bp, Homo sapien
ccgaccgtggatggaaaatatttga

SEQ ID NO: 3786638 - DNA, 25 bp, Homo sapien
tgcattgttgacacagtgggccctc

SEQ ID NO: 3786639 - DNA, 25 bp, Homo sapien
aacatgccactatgccacccaggta

SEQ ID NO: 3786640 - DNA, 25 bp, Homo sapien
ctgggattactggatgggtgccttg

SEQ ID NO: 3786641 - DNA, 25 bp, Homo sapien
ggatgggtgccttgctttactttca

SEQ ID NO: 3786642 - DNA, 25 bp, Homo sapien
aggaacatgccactatgccacccag

SEQ ID NO: 3786643 - DNA, 25 bp, Homo sapien
tttaaatctgtcaagaactcctggc

SEQ ID NO: 3786644 - DNA, 25 bp, Homo sapien
gattaggcccgtctggaatgatgca

SEQ ID NO: 3786645 - DNA, 25 bp, Homo sapien
ccacgttggagcttattgtcgggaa

SEQ ID NO: 3786646 - DNA, 25 bp, Homo sapien
tacaacgttctgtggatcgctgcac

SEQ ID NO: 3786647 - DNA, 25 bp, Homo sapien
catagctgcgttgatctccttccaa

SEQ ID NO: 3786648 - DNA, 25 bp, Homo sapien
tatgggacgacttctggatgatgca

SEQ ID NO: 3786649 - DNA, 25 bp, Homo sapien
gatgatgcagctggtagttccctgc

SEQ ID NO: 3786650 - DNA, 25 bp, Homo sapien
caagatttgttaaggccatagctgc

SEQ ID NO: 3786651 - DNA, 25 bp, Homo sapien
acagaaagtaaacgatcaaactcac

SEQ ID NO: 3786652 - DNA, 25 bp, Homo sapien
aacagaaagtaaacgatcaaactca

SEQ ID NO: 3786653 - DNA, 25 bp, Homo sapien
tgcagtttgcattgaaaatgccatc

SEQ ID NO: 3786654 - DNA, 25 bp, Homo sapien
gcagtttgcattgaaaatgccatcg

SEQ ID NO: 3786655 - DNA, 25 bp, Homo sapien
gaaaagcaggaacggccaatgggaa

SEQ ID NO: 3786656 - DNA, 25 bp, Homo sapien
aaagcaggaacggccaatgggaaca

SEQ ID NO: 3786657 - DNA, 25 bp, Homo sapien
aagcaggaacggccaatgggaacat

SEQ ID NO: 3786658 - DNA, 25 bp, Homo sapien
ctgaaaagcaggaacggccaatggg

SEQ ID NO: 3786659 - DNA, 25 bp, Homo sapien
ttattggatccgttttccagagtgt

SEQ ID NO: 3786660 - DNA, 25 bp, Homo sapien
cccttattggatccgttttccagag

SEQ ID NO: 3786661 - DNA, 25 bp, Homo sapien
cacccttattggatccgttttccag

SEQ ID NO: 3786662 - DNA, 25 bp, Homo sapien
tcacccttattggatccgttttcca

SEQ ID NO: 3786663 - DNA, 25 bp, Homo sapien
ctgtaaagaaaagcaaaaattcaat

SEQ ID NO: 3786664 - DNA, 25 bp, Homo sapien
tgcagaacccgtcaatgtatcaatg

SEQ ID NO: 3786665 - DNA, 25 bp, Homo sapien
tatgggttgcagaacccgtcaatgt

SEQ ID NO: 3786666 - DNA, 25 bp, Homo sapien
tatcaaatatgttatgggttgcaga

SEQ ID NO: 3786667 - DNA, 25 bp, Homo sapien
cgtcaatgtatcaatgccatcaatg

SEQ ID NO: 3786668 - DNA, 25 bp, Homo sapien
ccaccactggcggtcataggggtcc

SEQ ID NO: 3786669 - DNA, 25 bp, Homo sapien
cactggcggtcataggggtcctgac

SEQ ID NO: 3786670 - DNA, 25 bp, Homo sapien
ctggcggtcataggggtcctgacac

SEQ ID NO: 3786671 - DNA, 25 bp, Homo sapien
ccactggcggtcataggggtcctga

SEQ ID NO: 3786672 - DNA, 25 bp, Homo sapien
tagtagctccagaaacaatcagaca

SEQ ID NO: 3786673 - DNA, 25 bp, Homo sapien
ctagtagctccagaaacaatcagac

SEQ ID NO: 3786674 - DNA, 25 bp, Homo sapien
tgggtgactgggtggtcggcaacgg

SEQ ID NO: 3786675 - DNA, 25 bp, Homo sapien
ggtgactgggtggtcggcaacggca

SEQ ID NO: 3786676 - DNA, 25 bp, Homo sapien
tgactgggtggtcggcaacggcatt

SEQ ID NO: 3786677 - DNA, 25 bp, Homo sapien
ttgggtgactgggtggtcggcaacg

SEQ ID NO: 3786678 - DNA, 25 bp, Homo sapien
caaagccaaaagcatctcccaaagc

SEQ ID NO: 3786679 - DNA, 25 bp, Homo sapien
tcttctgaagccaggcacggacaaa

SEQ ID NO: 3786680 - DNA, 25 bp, Homo sapien
taagacctcattagctttcaatgca

SEQ ID NO: 3786681 - DNA, 25 bp, Homo sapien
tgagggagtacaaaactctcttctg

SEQ ID NO: 3786682 - DNA, 25 bp, Homo sapien
tgtaccacgtgcacaagctttccga

SEQ ID NO: 3786683 - DNA, 25 bp, Homo sapien
gatcttctggcgtttgaggaaggga

SEQ ID NO: 3786684 - DNA, 25 bp, Homo sapien
atgaattgctgtgatggaaggtcct

SEQ ID NO: 3786685 - DNA, 25 bp, Homo sapien
gaatcttccttcaactgtaccacgt

SEQ ID NO: 3786686 - DNA, 25 bp, Homo sapien
aattacatttgtagcgctagcgaaa

SEQ ID NO: 3786687 - DNA, 25 bp, Homo sapien
gaaatattggcaagaaggagtggaa

SEQ ID NO: 3786688 - DNA, 25 bp, Homo sapien
tagcgctagcgaaaattattaaaat

SEQ ID NO: 3786689 - DNA, 25 bp, Homo sapien
gagtcctcactcaaagaacctaagt

SEQ ID NO: 3786690 - DNA, 25 bp, Homo sapien
tgtgctacaagcttaacgacatagt

SEQ ID NO: 3786691 - DNA, 25 bp, Homo sapien
gaaaagtcaggtctagtgtgctaca

SEQ ID NO: 3786692 - DNA, 25 bp, Homo sapien
gattaggtgcacaactgccaagtaa

SEQ ID NO: 3786693 - DNA, 25 bp, Homo sapien
tcaagcaccatagttcaggaagtct

SEQ ID NO: 3786694 - DNA, 25 bp, Homo sapien
caccagggaggtttactggtgccat

SEQ ID NO: 3786695 - DNA, 25 bp, Homo sapien
ctgtcaccagggaggtttactggtg

SEQ ID NO: 3786696 - DNA, 25 bp, Homo sapien
tcaccagggaggtttactggtgcca

SEQ ID NO: 3786697 - DNA, 25 bp, Homo sapien
gtcaccagggaggtttactggtgcc

SEQ ID NO: 3786698 - DNA, 25 bp, Homo sapien
gaacaagcacttctgtgaagctgcc

SEQ ID NO: 3786699 - DNA, 25 bp, Homo sapien
gggaatgagaaagtctcttaatgga

SEQ ID NO: 3786700 - DNA, 25 bp, Homo sapien
cttctgtgaagctgccccgggatgt

SEQ ID NO: 3786701 - DNA, 25 bp, Homo sapien
ccccgggatgtgactgaccactgaa

SEQ ID NO: 3786702 - DNA, 25 bp, Homo sapien
tgatgccgccgtaagacttttttaa

SEQ ID NO: 3786703 - DNA, 25 bp, Homo sapien
cttgatgccgccgtaagactttttt

SEQ ID NO: 3786704 - DNA, 25 bp, Homo sapien
ttgatgccgccgtaagactttttta

SEQ ID NO: 3786705 - DNA, 25 bp, Homo sapien
cccagagtgtcccatgcaccaataa

SEQ ID NO: 3786706 - DNA, 25 bp, Homo sapien
ttttgttccatgtctccaaccgcag

SEQ ID NO: 3786707 - DNA, 25 bp, Homo sapien
catgcaccaataaacgacttctttt

SEQ ID NO: 3786708 - DNA, 25 bp, Homo sapien
caaatggatactacctcccagagtg

SEQ ID NO: 3786709 - DNA, 25 bp, Homo sapien
gcctctctccccgtagtagctggga

SEQ ID NO: 3786710 - DNA, 25 bp, Homo sapien
cccatcatggtagtgttcgtggcca

SEQ ID NO: 3786711 - DNA, 25 bp, Homo sapien
aaggtaacggttcaacaagctgctc

SEQ ID NO: 3786712 - DNA, 25 bp, Homo sapien
tcattggagctaaaagatcccgagt

SEQ ID NO: 3786713 - DNA, 25 bp, Homo sapien
cagtttctgatgacgatggagacac

SEQ ID NO: 3786714 - DNA, 25 bp, Homo sapien
taagccgacgtcttgcattagcaaa

SEQ ID NO: 3786715 - DNA, 25 bp, Homo sapien
tgagtcatcactgcttacgctaagc

SEQ ID NO: 3786716 - DNA, 25 bp, Homo sapien
gcttaaatctggctgtcgaacggta

SEQ ID NO: 3786717 - DNA, 25 bp, Homo sapien
tacgctaagccgttcagcattgcct

SEQ ID NO: 3786718 - DNA, 25 bp, Homo sapien
tctgttgaccagtactgtctccagc

SEQ ID NO: 3786719 - DNA, 25 bp, Homo sapien
tttgctcctttcacacacagagtac

SEQ ID NO: 3786720 - DNA, 25 bp, Homo sapien
ctccagcaagagtgtttttgtcctt

SEQ ID NO: 3786721 - DNA, 25 bp, Homo sapien
tgtctccagcaagagtgtttttgtc

SEQ ID NO: 3786722 - DNA, 25 bp, Homo sapien
tttactagaatccaactccaaaaca

SEQ ID NO: 3786723 - DNA, 25 bp, Homo sapien
ttactagaatccaactccaaaacat

SEQ ID NO: 3786724 - DNA, 25 bp, Homo sapien
cgggttgtcgttcatattctcttca

SEQ ID NO: 3786725 - DNA, 25 bp, Homo sapien
ggattccttcgggttgtcgttcata

SEQ ID NO: 3786726 - DNA, 25 bp, Homo sapien
gtattttacatgaaacaggtctcct

SEQ ID NO: 3786727 - DNA, 25 bp, Homo sapien
taatctactatggattccttcgggt

SEQ ID NO: 3786728 - DNA, 25 bp, Homo sapien
gacagcgcatcctgcattctttcct

SEQ ID NO: 3786729 - DNA, 25 bp, Homo sapien
tgacagcgcatcctgcattctttcc

SEQ ID NO: 3786730 - DNA, 25 bp, Homo sapien
acagcgcatcctgcattctttcctg

SEQ ID NO: 3786731 - DNA, 25 bp, Homo sapien
ctgacagcgcatcctgcattctttc

SEQ ID NO: 3786732 - DNA, 25 bp, Homo sapien
gagaggtaattcagaaactcccaca

SEQ ID NO: 3786733 - DNA, 25 bp, Homo sapien
tctccaggtagaagcgccacgtgga

SEQ ID NO: 3786734 - DNA, 25 bp, Homo sapien
tggagagccacacgaactctaagcg

SEQ ID NO: 3786735 - DNA, 25 bp, Homo sapien
aactctaagcgttcccgctcttcag

SEQ ID NO: 3786736 - DNA, 25 bp, Homo sapien
tgcactagcgtcatctgcgagccga

SEQ ID NO: 3786737 - DNA, 25 bp, Homo sapien
ggccaagagtatcttctcggtcttg

SEQ ID NO: 3786738 - DNA, 25 bp, Homo sapien
gagccgagggccaagagtatcttct

SEQ ID NO: 3786739 - DNA, 25 bp, Homo sapien
cgtcatctgcgagccgagggccaag

SEQ ID NO: 3786740 - DNA, 25 bp, Homo sapien
tgcttgaggggtcgcgccatgtctt

SEQ ID NO: 3786741 - DNA, 25 bp, Homo sapien
ggtcgcgccatgtcttgcagggcct

SEQ ID NO: 3786742 - DNA, 25 bp, Homo sapien
gggtcgcgccatgtcttgcagggcc

SEQ ID NO: 3786743 - DNA, 25 bp, Homo sapien
ccactgcttgaggggtcgcgccatg

SEQ ID NO: 3786744 - DNA, 25 bp, Homo sapien
gcctggcagggtatgcggctggctc

SEQ ID NO: 3786745 - DNA, 25 bp, Homo sapien
cagggtatgcggctggctctcgaaa

SEQ ID NO: 3786746 - DNA, 25 bp, Homo sapien
tccctcggggatctcttgtctgctc

SEQ ID NO: 3786747 - DNA, 25 bp, Homo sapien
atgcggctggctctcgaaacttccc

SEQ ID NO: 3786748 - DNA, 25 bp, Homo sapien
ttgtggtcaggggaaaggtcgccga

SEQ ID NO: 3786749 - DNA, 25 bp, Homo sapien
cttgtggtcaggggaaaggtcgccg

SEQ ID NO: 3786750 - DNA, 25 bp, Homo sapien
cattttgacgaaaccgaatctctgt

SEQ ID NO: 3786751 - DNA, 25 bp, Homo sapien
cgactggtagtaacattttgacgaa

SEQ ID NO: 3786752 - DNA, 25 bp, Homo sapien
gttttactaagcagcgacgccgcag

SEQ ID NO: 3786753 - DNA, 25 bp, Homo sapien
caattccacccgaaacgactggtag

SEQ ID NO: 3786754 - DNA, 25 bp, Homo sapien
ccttagtctccaccaagctctttgg

SEQ ID NO: 3786755 - DNA, 25 bp, Homo sapien
tcgagtgaccgaagagaagtccgcg

SEQ ID NO: 3786756 - DNA, 25 bp, Homo sapien
cgactgctcggcttcgcctgtttct

SEQ ID NO: 3786757 - DNA, 25 bp, Homo sapien
tgtttctctgcaccgagctcagtcc

SEQ ID NO: 3786758 - DNA, 25 bp, Homo sapien
cacccctccgggccgcaggcgggca

SEQ ID NO: 3786759 - DNA, 25 bp, Homo sapien
ctccgggccgcaggcgggcagggcc

SEQ ID NO: 3786760 - DNA, 25 bp, Homo sapien
gcagggcccccaggggagtgcgcat

SEQ ID NO: 3786761 - DNA, 25 bp, Homo sapien
agggcccccaggggagtgcgcatac

SEQ ID NO: 3786762 - DNA, 25 bp, Homo sapien
aggacaccgctgtagggccggccac

SEQ ID NO: 3786763 - DNA, 25 bp, Homo sapien
tccgaggcgcctccgtcctcaaaca

SEQ ID NO: 3786764 - DNA, 25 bp, Homo sapien
tccggtgtctcaggccgaggttgtc

SEQ ID NO: 3786765 - DNA, 25 bp, Homo sapien
gcgggccgtcgggaatgcccacctc

SEQ ID NO: 3786766 - DNA, 25 bp, Homo sapien
tcggttggtagggacgcgcggcgcg

SEQ ID NO: 3786767 - DNA, 25 bp, Homo sapien
tgtcggttggtagggacgcgcggcg

SEQ ID NO: 3786768 - DNA, 25 bp, Homo sapien
gtcggttggtagggacgcgcggcgc

SEQ ID NO: 3786769 - DNA, 25 bp, Homo sapien
gtgtcggttggtagggacgcgcggc

SEQ ID NO: 3786770 - DNA, 25 bp, Homo sapien
tgctcagacccctgcaggttcaggg

SEQ ID NO: 3786771 - DNA, 25 bp, Homo sapien
agtgctcagacccctgcaggttcag

SEQ ID NO: 3786772 - DNA, 25 bp, Homo sapien
tgagagtgctcagacccctgcaggt

SEQ ID NO: 3786773 - DNA, 25 bp, Homo sapien
agagtgctcagacccctgcaggttc

SEQ ID NO: 3786774 - DNA, 25 bp, Homo sapien
tcgtagcccctcgacacccgcctct

SEQ ID NO: 3786775 - DNA, 25 bp, Homo sapien
ggtgtcagccgcgagctcgtagccc

SEQ ID NO: 3786776 - DNA, 25 bp, Homo sapien
tccgcagcgcgggtgtcagccgcga

SEQ ID NO: 3786777 - DNA, 25 bp, Homo sapien
aatcagtgccattctcttccgcagc

SEQ ID NO: 3786778 - DNA, 25 bp, Homo sapien
ctgtaaaggtgtcagaagcccaagg

SEQ ID NO: 3786779 - DNA, 25 bp, Homo sapien
aggtgtcagaagcccaaggcaggag

SEQ ID NO: 3786780 - DNA, 25 bp, Homo sapien
gtaaaggtgtcagaagcccaaggca

SEQ ID NO: 3786781 - DNA, 25 bp, Homo sapien
aaggtgtcagaagcccaaggcagga

SEQ ID NO: 3786782 - DNA, 25 bp, Homo sapien
ctcacctctggggtcgcggaggccc

SEQ ID NO: 3786783 - DNA, 25 bp, Homo sapien
cactgtcggggagagccagcagctc

SEQ ID NO: 3786784 - DNA, 25 bp, Homo sapien
cacctctggggtcgcggaggccctg

SEQ ID NO: 3786785 - DNA, 25 bp, Homo sapien
cctctggggtcgcggaggccctgag

SEQ ID NO: 3786786 - DNA, 25 bp, Homo sapien
gccgcggagccgcagagttacagcc

SEQ ID NO: 3786787 - DNA, 25 bp, Homo sapien
gcgcggcggacttcgcccgccccat

SEQ ID NO: 3786788 - DNA, 25 bp, Homo sapien
cggcgtcaggagcaagtccgcgcgg

SEQ ID NO: 3786789 - DNA, 25 bp, Homo sapien
ttacagccccaaggcgcgcggcgga

SEQ ID NO: 3786790 - DNA, 25 bp, Homo sapien
ggctctcccgcctcgagactaggcg

SEQ ID NO: 3786791 - DNA, 25 bp, Homo sapien
gcctcgagactaggcgcactcccat

SEQ ID NO: 3786792 - DNA, 25 bp, Homo sapien
cgcctcgagactaggcgcactccca

SEQ ID NO: 3786793 - DNA, 25 bp, Homo sapien
ctcccgcctcgagactaggcgcact

SEQ ID NO: 3786794 - DNA, 25 bp, Homo sapien
ggctccagcgcgctcaccaccgcca

SEQ ID NO: 3786795 - DNA, 25 bp, Homo sapien
gcatgttctccacgcgggctccagc

SEQ ID NO: 3786796 - DNA, 25 bp, Homo sapien
caccgccgtcgtctcggctttattt

SEQ ID NO: 3786797 - DNA, 25 bp, Homo sapien
gccgcatgttctccacgcgggctcc

SEQ ID NO: 3786798 - DNA, 25 bp, Homo sapien
cccgggaacaggaatagcgaggcct

SEQ ID NO: 3786799 - DNA, 25 bp, Homo sapien
tgcgggcgcggtatccacgttcccg

SEQ ID NO: 3786800 - DNA, 25 bp, Homo sapien
ggtggagaggaagcgtccgcgcccg

SEQ ID NO: 3786801 - DNA, 25 bp, Homo sapien
tcatgtttcctgactgccggtccca

SEQ ID NO: 3786802 - DNA, 25 bp, Homo sapien
tcacttcacaggtagaaactcaacg

SEQ ID NO: 3786803 - DNA, 25 bp, Homo sapien
caggtagaaactcaacgccaatacg

SEQ ID NO: 3786804 - DNA, 25 bp, Homo sapien
tcaacgccaatacgttcacttttca

SEQ ID NO: 3786805 - DNA, 25 bp, Homo sapien
gaaactcaacgccaatacgttcact

SEQ ID NO: 3786806 - DNA, 25 bp, Homo sapien
ataggatgatttcaacagcttcagc

SEQ ID NO: 3786807 - DNA, 25 bp, Homo sapien
taggatgatttcaacagcttcagcg

SEQ ID NO: 3786808 - DNA, 25 bp, Homo sapien
taataggatgatttcaacagcttca

SEQ ID NO: 3786809 - DNA, 25 bp, Homo sapien
ctgtaataggatgatttcaacagct

SEQ ID NO: 3786810 - DNA, 25 bp, Homo sapien
aaaggctccacttcctgttcttctt

SEQ ID NO: 3786811 - DNA, 25 bp, Homo sapien
ggtagaaaggctccacttcctgttc

SEQ ID NO: 3786812 - DNA, 25 bp, Homo sapien
ggctccacttcctgttcttcttcat

SEQ ID NO: 3786813 - DNA, 25 bp, Homo sapien
gtagaaaggctccacttcctgttct

SEQ ID NO: 3786814 - DNA, 25 bp, Homo sapien
gaagtgctgtgatcaagaaaccact

SEQ ID NO: 3786815 - DNA, 25 bp, Homo sapien
ggactcttgtatgtggacaccagaa

SEQ ID NO: 3786816 - DNA, 25 bp, Homo sapien
caggaagtgctgtgatcaagaaacc

SEQ ID NO: 3786817 - DNA, 25 bp, Homo sapien
caccagaaagtctgctaattctgga

SEQ ID NO: 3786818 - DNA, 25 bp, Homo sapien
ggctttttggtctgcactggtgttt

SEQ ID NO: 3786819 - DNA, 25 bp, Homo sapien
tttttggtctgcactggtgtttgtg

SEQ ID NO: 3786820 - DNA, 25 bp, Homo sapien
gctttttggtctgcactggtgtttg

SEQ ID NO: 3786821 - DNA, 25 bp, Homo sapien
aaggctttttggtctgcactggtgt

SEQ ID NO: 3786822 - DNA, 25 bp, Homo sapien
gaccaaagaagggacctcctctatc

SEQ ID NO: 3786823 - DNA, 25 bp, Homo sapien
ccaaagaagggacctcctctatcag

SEQ ID NO: 3786824 - DNA, 25 bp, Homo sapien
ttgaccaaagaagggacctcctcta

SEQ ID NO: 3786825 - DNA, 25 bp, Homo sapien
aaagaagggacctcctctatcaggg

SEQ ID NO: 3786826 - DNA, 25 bp, Homo sapien
aacaaaaagacatagccatcgtttc

SEQ ID NO: 3786827 - DNA, 25 bp, Homo sapien
gctttgcgatgataccaggaatctg

SEQ ID NO: 3786828 - DNA, 25 bp, Homo sapien
gccatcgtttcatcaagctttgcga

SEQ ID NO: 3786829 - DNA, 25 bp, Homo sapien
aagacatagccatcgtttcatcaag

SEQ ID NO: 3786830 - DNA, 25 bp, Homo sapien
tcatatacgtatattctcatattct

SEQ ID NO: 3786831 - DNA, 25 bp, Homo sapien
ttttattaaaatcgccacaaataca

SEQ ID NO: 3786832 - DNA, 25 bp, Homo sapien
tacaaaagcatcactgaactaaaaa

SEQ ID NO: 3786833 - DNA, 25 bp, Homo sapien
taaaatcgccacaaatacaaaagca

SEQ ID NO: 3786834 - DNA, 25 bp, Homo sapien
tatcacatgtcatatctcgaaaaca

SEQ ID NO: 3786835 - DNA, 25 bp, Homo sapien
tgtcctgtgtcatgtagaatttgat

SEQ ID NO: 3786836 - DNA, 25 bp, Homo sapien
actgtttcccaatttaggctttctg

SEQ ID NO: 3786837 - DNA, 25 bp, Homo sapien
tctggccatgggagtgacatgtcct

SEQ ID NO: 3786838 - DNA, 25 bp, Homo sapien
ccttctctgtagcaagagccagcct

SEQ ID NO: 3786839 - DNA, 25 bp, Homo sapien
tcaagtgtatcttgccttctctgta

SEQ ID NO: 3786840 - DNA, 25 bp, Homo sapien
ccagcctgcggatattggatataca

SEQ ID NO: 3786841 - DNA, 25 bp, Homo sapien
ttggatatacaaccagctgcagctt

SEQ ID NO: 3786842 - DNA, 25 bp, Homo sapien
atggcttttactgacctcctcgtag

SEQ ID NO: 3786843 - DNA, 25 bp, Homo sapien
ttttactgacctcctcgtagcccac

SEQ ID NO: 3786844 - DNA, 25 bp, Homo sapien
ggcttttactgacctcctcgtagcc

SEQ ID NO: 3786845 - DNA, 25 bp, Homo sapien
ttactgacctcctcgtagcccacat

SEQ ID NO: 3786846 - DNA, 25 bp, Homo sapien
tgccaactgtaagcctggagatttc

SEQ ID NO: 3786847 - DNA, 25 bp, Homo sapien
gagtgccaactgtaagcctggagat

SEQ ID NO: 3786848 - DNA, 25 bp, Homo sapien
ggagtgccaactgtaagcctggaga

SEQ ID NO: 3786849 - DNA, 25 bp, Homo sapien
atggagtgccaactgtaagcctgga

SEQ ID NO: 3786850 - DNA, 25 bp, Homo sapien
aataattgaatgtgagcgctgccag

SEQ ID NO: 3786851 - DNA, 25 bp, Homo sapien
cactaccaaataattgaatgtgagc

SEQ ID NO: 3786852 - DNA, 25 bp, Homo sapien
ccaaataattgaatgtgagcgctgc

SEQ ID NO: 3786853 - DNA, 25 bp, Homo sapien
taccaaataattgaatgtgagcgct

SEQ ID NO: 3786854 - DNA, 25 bp, Homo sapien
tccaggccctgccttgtcgctggct

SEQ ID NO: 3786855 - DNA, 25 bp, Homo sapien
aggccctgccttgtcgctggctgac

SEQ ID NO: 3786856 - DNA, 25 bp, Homo sapien
caggccctgccttgtcgctggctga

SEQ ID NO: 3786857 - DNA, 25 bp, Homo sapien
gctccaggccctgccttgtcgctgg

SEQ ID NO: 3786858 - DNA, 25 bp, Homo sapien
gatgcctgtcaaaatctagcctgcg

SEQ ID NO: 3786859 - DNA, 25 bp, Homo sapien
caccctgtacggctctcttggaaag

SEQ ID NO: 3786860 - DNA, 25 bp, Homo sapien
caaaatctagcctgcgtttcgccca

SEQ ID NO: 3786861 - DNA, 25 bp, Homo sapien
ggaaacccttgacctgatgcctgtc

SEQ ID NO: 3786862 - DNA, 25 bp, Homo sapien
cttcttggccctgaggagatgggct

SEQ ID NO: 3786863 - DNA, 25 bp, Homo sapien
ctgaagccagcacctccaattctgt

SEQ ID NO: 3786864 - DNA, 25 bp, Homo sapien
tgaggagatgggctgctgaagccag

SEQ ID NO: 3786865 - DNA, 25 bp, Homo sapien
ctacatggcttcttggccctgagga

SEQ ID NO: 3786866 - DNA, 25 bp, Homo sapien
tcatcctcgtcatcttcccgttgag

SEQ ID NO: 3786867 - DNA, 25 bp, Homo sapien
cctcgtcatcttcccgttgagtagc

SEQ ID NO: 3786868 - DNA, 25 bp, Homo sapien
cttcatcctcgtcatcttcccgttg

SEQ ID NO: 3786869 - DNA, 25 bp, Homo sapien
atcctcgtcatcttcccgttgagta

SEQ ID NO: 3786870 - DNA, 25 bp, Homo sapien
taaaattggatccatgcacttcaaa

SEQ ID NO: 3786871 - DNA, 25 bp, Homo sapien
aattggatccatgcacttcaaactc

SEQ ID NO: 3786872 - DNA, 25 bp, Homo sapien
aggaaatctgcataaaattggatcc

SEQ ID NO: 3786873 - DNA, 25 bp, Homo sapien
agaaggaaatctgcataaaattgga

SEQ ID NO: 3786874 - DNA, 25 bp, Homo sapien
cctaaactgcccaccgtgaggattt

SEQ ID NO: 3786875 - DNA, 25 bp, Homo sapien
ggctcttgagttgcctttccagatc

SEQ ID NO: 3786876 - DNA, 25 bp, Homo sapien
cagatcctaaactgcccaccgtgag

SEQ ID NO: 3786877 - DNA, 25 bp, Homo sapien
ggctttgcagggaatgtcgcttaag

SEQ ID NO: 3786878 - DNA, 25 bp, Homo sapien
ctctgggtcacagcaaggatgctcc

SEQ ID NO: 3786879 - DNA, 25 bp, Homo sapien
tctctgggtcacagcaaggatgctc

SEQ ID NO: 3786880 - DNA, 25 bp, Homo sapien
tgtgctgccctgtgaccacatggtc

SEQ ID NO: 3786881 - DNA, 25 bp, Homo sapien
tgtgaccacatggtcccgtactggt

SEQ ID NO: 3786882 - DNA, 25 bp, Homo sapien
tactggtcactcagagtgagaccta

SEQ ID NO: 3786883 - DNA, 25 bp, Homo sapien
acatggtcccgtactggtcactcag

SEQ ID NO: 3786884 - DNA, 25 bp, Homo sapien
tgctaggcttcaaaaacgatgggtg

SEQ ID NO: 3786885 - DNA, 25 bp, Homo sapien
tggctctctggaacgccagtacatg

SEQ ID NO: 3786886 - DNA, 25 bp, Homo sapien
cacttgcctggtatagacatttgca

SEQ ID NO: 3786887 - DNA, 25 bp, Homo sapien
tgccaatgctggacatacttctgat

SEQ ID NO: 3786888 - DNA, 25 bp, Homo sapien
tccctgggctgatacatttgaaaag

SEQ ID NO: 3786889 - DNA, 25 bp, Homo sapien
tattcctatcacactgtattggagg

SEQ ID NO: 3786890 - DNA, 25 bp, Homo sapien
gaagtctgtgcaaaatcataaagag

SEQ ID NO: 3786891 - DNA, 25 bp, Homo sapien
gatttttcaacataagtggatcagg

SEQ ID NO: 3786892 - DNA, 25 bp, Homo sapien
tgtggctggtgcaaaccgagacata

SEQ ID NO: 3786893 - DNA, 25 bp, Homo sapien
ggtgcaaaccgagacatactagaaa

SEQ ID NO: 3786894 - DNA, 25 bp, Homo sapien
tagccactagtgagcacttaaaatg

SEQ ID NO: 3786895 - DNA, 25 bp, Homo sapien
gcacagtctggcaaggaaaccgcta

SEQ ID NO: 3786896 - DNA, 25 bp, Homo sapien
gcagcaggaattaggaacaaagaca

SEQ ID NO: 3786897 - DNA, 25 bp, Homo sapien
gcaggaatgtttgtacaactggaaa

SEQ ID NO: 3786898 - DNA, 25 bp, Homo sapien
catttgacgagaagtcggcagcagg

SEQ ID NO: 3786899 - DNA, 25 bp, Homo sapien
aataacaagcatttgacgagaagtc

SEQ ID NO: 3786900 - DNA, 25 bp, Homo sapien
aaaccacaaagtcattcaactgtac

SEQ ID NO: 3786901 - DNA, 25 bp, Homo sapien
ttctgagagttggtacaaggcctga

SEQ ID NO: 3786902 - DNA, 25 bp, Homo sapien
gcagttatcggcgtcttctgagagt

SEQ ID NO: 3786903 - DNA, 25 bp, Homo sapien
gagctgtcgcccgatgcacgttggt

SEQ ID NO: 3786904 - DNA, 25 bp, Homo sapien
gatttcagataacgcactagtggag

SEQ ID NO: 3786905 - DNA, 25 bp, Homo sapien
tgttggtaatggcagcacatacact

SEQ ID NO: 3786906 - DNA, 25 bp, Homo sapien
aggaacaactccatgatctgtgata

SEQ ID NO: 3786907 - DNA, 25 bp, Homo sapien
gacaataagttccaaaccaccaaca

SEQ ID NO: 3786908 - DNA, 25 bp, Homo sapien
tttcagtaaattgacaataagttcc

SEQ ID NO: 3786909 - DNA, 25 bp, Homo sapien
gtgttacaacttatctctatatgca

SEQ ID NO: 3786910 - DNA, 25 bp, Homo sapien
tgtgttacaacttatctctatatgc

SEQ ID NO: 3786911 - DNA, 25 bp, Homo sapien
tgttacaacttatctctatatgcat

SEQ ID NO: 3786912 - DNA, 25 bp, Homo sapien
aaagcgggcatgctggaaaaggaca

SEQ ID NO: 3786913 - DNA, 25 bp, Homo sapien
tgttgggtagaaaagcgggcatgct

SEQ ID NO: 3786914 - DNA, 25 bp, Homo sapien
taaggaagatttcacactcggggta

SEQ ID NO: 3786915 - DNA, 25 bp, Homo sapien
cactcggggtagttgctaaagcagg

SEQ ID NO: 3786916 - DNA, 25 bp, Homo sapien
ctttgtagactagcagcctctattg

SEQ ID NO: 3786917 - DNA, 25 bp, Homo sapien
ttgtagactagcagcctctattgca

SEQ ID NO: 3786918 - DNA, 25 bp, Homo sapien
tcatccctttgtagactagcagcct

SEQ ID NO: 3786919 - DNA, 25 bp, Homo sapien
tccctttgtagactagcagcctcta

SEQ ID NO: 3786920 - DNA, 25 bp, Homo sapien
ttgttgacgattcttcaaatgttcg

SEQ ID NO: 3786921 - DNA, 25 bp, Homo sapien
gcatacaagagagggcagttcctgg

SEQ ID NO: 3786922 - DNA, 25 bp, Homo sapien
gagatgtgatcaagcagagatcttt

SEQ ID NO: 3786923 - DNA, 25 bp, Homo sapien
cgtgttgccgcaatgataaatgcat

SEQ ID NO: 3786924 - DNA, 25 bp, Homo sapien
gggctcctgcaatgtggtgcacatt

SEQ ID NO: 3786925 - DNA, 25 bp, Homo sapien
tcctgcaatgtggtgcacattccta

SEQ ID NO: 3786926 - DNA, 25 bp, Homo sapien
ctttccacgtgatagggctcctgca

SEQ ID NO: 3786927 - DNA, 25 bp, Homo sapien
tagggctcctgcaatgtggtgcaca

SEQ ID NO: 3786928 - DNA, 25 bp, Homo sapien
tgtttgtgtttatcaaggccattga

SEQ ID NO: 3786929 - DNA, 25 bp, Homo sapien
tttatcaaggccattgatttctgta

SEQ ID NO: 3786930 - DNA, 25 bp, Homo sapien
taagacgatgctggatatgaggaca

SEQ ID NO: 3786931 - DNA, 25 bp, Homo sapien
aggcttgagcgctgagcccagctgc

SEQ ID NO: 3786932 - DNA, 25 bp, Homo sapien
gggaccacaacaaacgaactccatc

SEQ ID NO: 3786933 - DNA, 25 bp, Homo sapien
tgcatttttgatgcatggacagagt

SEQ ID NO: 3786934 - DNA, 25 bp, Homo sapien
cacgtctgggtgaggatttttcagc

SEQ ID NO: 3786935 - DNA, 25 bp, Homo sapien
gaactccatctaagcgatcaattat

SEQ ID NO: 3786936 - DNA, 25 bp, Homo sapien
tgggcatgaataacaggtaacttgt

SEQ ID NO: 3786937 - DNA, 25 bp, Homo sapien
aatctagcattaggaattaaaatca

SEQ ID NO: 3786938 - DNA, 25 bp, Homo sapien
ctagcattaggaattaaaatcatta

SEQ ID NO: 3786939 - DNA, 25 bp, Homo sapien
ctttgttgggcatgaataacaggta

SEQ ID NO: 3786940 - DNA, 25 bp, Homo sapien
ggttctactgcacaagcaccaactg

SEQ ID NO: 3786941 - DNA, 25 bp, Homo sapien
ggttcacaagtggttgaatgccacc

SEQ ID NO: 3786942 - DNA, 25 bp, Homo sapien
tgtaacattcacaagaagagcttgg

SEQ ID NO: 3786943 - DNA, 25 bp, Homo sapien
gaagtcccaccaaggtttcaatggc

SEQ ID NO: 3786944 - DNA, 25 bp, Homo sapien
taagttcatcataagaaagaggaga

SEQ ID NO: 3786945 - DNA, 25 bp, Homo sapien
ctaagttcatcataagaaagaggag

SEQ ID NO: 3786946 - DNA, 25 bp, Homo sapien
cagtgttattgagtagactggccaa

SEQ ID NO: 3786947 - DNA, 25 bp, Homo sapien
caagggcttaagtcctccgtgcagc

SEQ ID NO: 3786948 - DNA, 25 bp, Homo sapien
ggaacatttccatatagcccctgtg

SEQ ID NO: 3786949 - DNA, 25 bp, Homo sapien
tgtgacagcagctaaccgctcttta

SEQ ID NO: 3786950 - DNA, 25 bp, Homo sapien
gctttgattgcagcccggtagtttt

SEQ ID NO: 3786951 - DNA, 25 bp, Homo sapien
cagctgctcattctcactatttagg

SEQ ID NO: 3786952 - DNA, 25 bp, Homo sapien
taggttcttgacaaggttttcaatg

SEQ ID NO: 3786953 - DNA, 25 bp, Homo sapien
gtaaatggccatggcgcagtgctcc

SEQ ID NO: 3786954 - DNA, 25 bp, Homo sapien
ctgatgcacactcttgcaatgtccc

SEQ ID NO: 3786955 - DNA, 25 bp, Homo sapien
tgatgcacactcttgcaatgtcccc

SEQ ID NO: 3786956 - DNA, 25 bp, Homo sapien
gatgcacactcttgcaatgtcccca

SEQ ID NO: 3786957 - DNA, 25 bp, Homo sapien
atgcacactcttgcaatgtccccac

SEQ ID NO: 3786958 - DNA, 25 bp, Homo sapien
catgtgcacagtctagtagagcaac

SEQ ID NO: 3786959 - DNA, 25 bp, Homo sapien
gcaggttttgtggaatcatgtgcac

SEQ ID NO: 3786960 - DNA, 25 bp, Homo sapien
tcatacagactcgattgggcaggtt

SEQ ID NO: 3786961 - DNA, 25 bp, Homo sapien
agcagccgagccaacagaggaatgc

SEQ ID NO: 3786962 - DNA, 25 bp, Homo sapien
tttggtgatacccccgtgctgcctc

SEQ ID NO: 3786963 - DNA, 25 bp, Homo sapien
cagtttggtgatacccccgtgctgc

SEQ ID NO: 3786964 - DNA, 25 bp, Homo sapien
agtttggtgatacccccgtgctgcc

SEQ ID NO: 3786965 - DNA, 25 bp, Homo sapien
tggtgatacccccgtgctgcctcac

SEQ ID NO: 3786966 - DNA, 25 bp, Homo sapien
tcttttaaacttggcaacattcgcg

SEQ ID NO: 3786967 - DNA, 25 bp, Homo sapien
tgtggagaatcaagtatattcacca

SEQ ID NO: 3786968 - DNA, 25 bp, Homo sapien
ttcgcgatagtctcggctgccaaac

SEQ ID NO: 3786969 - DNA, 25 bp, Homo sapien
acattttagactcttgtgtggagaa

SEQ ID NO: 3786970 - DNA, 25 bp, Homo sapien
ccccaaggtcaacaatattctgtct

SEQ ID NO: 3786971 - DNA, 25 bp, Homo sapien
cccccaaggtcaacaatattctgtc

SEQ ID NO: 3786972 - DNA, 25 bp, Homo sapien
catttgacttcatcggtttcaagca

SEQ ID NO: 3786973 - DNA, 25 bp, Homo sapien
caacatctctgatggccaactggca

SEQ ID NO: 3786974 - DNA, 25 bp, Homo sapien
tcttgagctaagctgaaatccctca

SEQ ID NO: 3786975 - DNA, 25 bp, Homo sapien
aatttatcagcacttccaggcctcc

SEQ ID NO: 3786976 - DNA, 25 bp, Homo sapien
tggccttccaaacatgaatactgag

SEQ ID NO: 3786977 - DNA, 25 bp, Homo sapien
tgttgactctcactcgaatgaagaa

SEQ ID NO: 3786978 - DNA, 25 bp, Homo sapien
gaatactgagttcctttatggcaag

SEQ ID NO: 3786979 - DNA, 25 bp, Homo sapien
tgcaataaagatagaagcctggact

SEQ ID NO: 3786980 - DNA, 25 bp, Homo sapien
aaccatcaggatagcagaaggcaga

SEQ ID NO: 3786981 - DNA, 25 bp, Homo sapien
tagcaagatgccctgcgagatacag

SEQ ID NO: 3786982 - DNA, 25 bp, Homo sapien
ggcgagcctgtgcacactagcaaga

SEQ ID NO: 3786983 - DNA, 25 bp, Homo sapien
taatgtggtctctctactcaagaag

SEQ ID NO: 3786984 - DNA, 25 bp, Homo sapien
gccattgagtaagcggcagaatttc

SEQ ID NO: 3786985 - DNA, 25 bp, Homo sapien
ccaaggccattgagtaagcggcaga

SEQ ID NO: 3786986 - DNA, 25 bp, Homo sapien
aaggccattgagtaagcggcagaat

SEQ ID NO: 3786987 - DNA, 25 bp, Homo sapien
ggccattgagtaagcggcagaattt

SEQ ID NO: 3786988 - DNA, 25 bp, Homo sapien
tactctggtattctgcttcctgatc

SEQ ID NO: 3786989 - DNA, 25 bp, Homo sapien
taattactctggtattctgcttcct

SEQ ID NO: 3786990 - DNA, 25 bp, Homo sapien
tcaactggtctttccaacgtcaaag

SEQ ID NO: 3786991 - DNA, 25 bp, Homo sapien
caaagatcatgcttctaattactct

SEQ ID NO: 3786992 - DNA, 25 bp, Homo sapien
cacttgcttcctgacgatggtcagg

SEQ ID NO: 3786993 - DNA, 25 bp, Homo sapien
tcactttctgaggagctatcgctaa

SEQ ID NO: 3786994 - DNA, 25 bp, Homo sapien
tgaatttgccaatattctgatggca

SEQ ID NO: 3786995 - DNA, 25 bp, Homo sapien
gagctatcgctaacagtttcctcaa

SEQ ID NO: 3786996 - DNA, 25 bp, Homo sapien
tccgtgtgaaacagatggtcttggt

SEQ ID NO: 3786997 - DNA, 25 bp, Homo sapien
tgctcttccgtgtgaaacagatggt

SEQ ID NO: 3786998 - DNA, 25 bp, Homo sapien
cgaagtaattgtgctcttccgtgtg

SEQ ID NO: 3786999 - DNA, 25 bp, Homo sapien
aattgtgctcttccgtgtgaaacag

SEQ ID NO: 3787000 - DNA, 25 bp, Homo sapien
cccatctcttggtcatttgattcct

SEQ ID NO: 3787001 - DNA, 25 bp, Homo sapien
ccagtttaagcttggttcccatctc

SEQ ID NO: 3787002 - DNA, 25 bp, Homo sapien
ttaacagtggtcttccagtttaagc

SEQ ID NO: 3787003 - DNA, 25 bp, Homo sapien
aagcttggttcccatctcttggtca

SEQ ID NO: 3787004 - DNA, 25 bp, Homo sapien
ctttgccaagctgatccttttcctt

SEQ ID NO: 3787005 - DNA, 25 bp, Homo sapien
gctttgccaagctgatccttttcct

SEQ ID NO: 3787006 - DNA, 25 bp, Homo sapien
ggctttgccaagctgatccttttcc

SEQ ID NO: 3787007 - DNA, 25 bp, Homo sapien
cataattaacgtccccttcatcatc

SEQ ID NO: 3787008 - DNA, 25 bp, Homo sapien
tataaattgaaccttttctctcata

SEQ ID NO: 3787009 - DNA, 25 bp, Homo sapien
ctcataattaacgtccccttcatca

SEQ ID NO: 3787010 - DNA, 25 bp, Homo sapien
taaattgaaccttttctctcataat

SEQ ID NO: 3787011 - DNA, 25 bp, Homo sapien
tgctgttcagcagagaagtgagagc

SEQ ID NO: 3787012 - DNA, 25 bp, Homo sapien
ctcctatatgcatgtaaggcactct

SEQ ID NO: 3787013 - DNA, 25 bp, Homo sapien
gcatgtaaggcactctgctgttcag

SEQ ID NO: 3787014 - DNA, 25 bp, Homo sapien
tatatgcatgtaaggcactctgctg

SEQ ID NO: 3787015 - DNA, 25 bp, Homo sapien
agccaacatgtaacaaccctccagg

SEQ ID NO: 3787016 - DNA, 25 bp, Homo sapien
cccgtgatggctgggtccccattaa

SEQ ID NO: 3787017 - DNA, 25 bp, Homo sapien
tggatcctccttgtagaattttgtt

SEQ ID NO: 3787018 - DNA, 25 bp, Homo sapien
tccccattaaggacttggatcctcc

SEQ ID NO: 3787019 - DNA, 25 bp, Homo sapien
caatgtcgtatttctcctttcacca

SEQ ID NO: 3787020 - DNA, 25 bp, Homo sapien
caggctaggttattaggctccgtca

SEQ ID NO: 3787021 - DNA, 25 bp, Homo sapien
gaatcagctaaaggaagactgaaag

SEQ ID NO: 3787022 - DNA, 25 bp, Homo sapien
ggctccgtcattagaatcagctaaa

SEQ ID NO: 3787023 - DNA, 25 bp, Homo sapien
tcaccatcgtgaggtttcaccagca

SEQ ID NO: 3787024 - DNA, 25 bp, Homo sapien
tcctgcactgcaagtaatgcacaga

SEQ ID NO: 3787025 - DNA, 25 bp, Homo sapien
atttccccacgaatttgtctccacg

SEQ ID NO: 3787026 - DNA, 25 bp, Homo sapien
cggtggggctcgacatccatttgaa

SEQ ID NO: 3787027 - DNA, 25 bp, Homo sapien
tagattccaagactgtttggtttcc

SEQ ID NO: 3787028 - DNA, 25 bp, Homo sapien
ctgaggtatattcaatagattccaa

SEQ ID NO: 3787029 - DNA, 25 bp, Homo sapien
cgtttgagcagttctatatccttct

SEQ ID NO: 3787030 - DNA, 25 bp, Homo sapien
tcttcaccgtcatgggacttaaact

SEQ ID NO: 3787031 - DNA, 25 bp, Homo sapien
tctctggtaattttgccaagaatat

SEQ ID NO: 3787032 - DNA, 25 bp, Homo sapien
tgattgaggaggtgcagatccaatt

SEQ ID NO: 3787033 - DNA, 25 bp, Homo sapien
caagaatatttaatgcaattgagtt

SEQ ID NO: 3787034 - DNA, 25 bp, Homo sapien
tgcttaagcagcatagcaatcttca

SEQ ID NO: 3787035 - DNA, 25 bp, Homo sapien
tgtattataatcagagcccaggatt

SEQ ID NO: 3787036 - DNA, 25 bp, Homo sapien
caggatttttactatggggtctctg

SEQ ID NO: 3787037 - DNA, 25 bp, Homo sapien
ccaggatttttactatggggtctct

SEQ ID NO: 3787038 - DNA, 25 bp, Homo sapien
gctttactcttcaagacttgatacc

SEQ ID NO: 3787039 - DNA, 25 bp, Homo sapien
tcagctttactcttcaagacttgat

SEQ ID NO: 3787040 - DNA, 25 bp, Homo sapien
tttactcttcaagacttgataccct

SEQ ID NO: 3787041 - DNA, 25 bp, Homo sapien
tactcttcaagacttgataccctcg

SEQ ID NO: 3787042 - DNA, 25 bp, Homo sapien
ctaacaggctacagccccctgtgct

SEQ ID NO: 3787043 - DNA, 25 bp, Homo sapien
ttccagaagctgagaaggttctctt

SEQ ID NO: 3787044 - DNA, 25 bp, Homo sapien
taacaggctacagccccctgtgctt

SEQ ID NO: 3787045 - DNA, 25 bp, Homo sapien
agaaggttctctttcaaaccacatg

SEQ ID NO: 3787046 - DNA, 25 bp, Homo sapien
caataagtaacaagcgtgacagctg

SEQ ID NO: 3787047 - DNA, 25 bp, Homo sapien
cagttttggcaataagtaacaagcg

SEQ ID NO: 3787048 - DNA, 25 bp, Homo sapien
tttggcaataagtaacaagcgtgac

SEQ ID NO: 3787049 - DNA, 25 bp, Homo sapien
caacacatgcttgggcttccttcaa

SEQ ID NO: 3787050 - DNA, 25 bp, Homo sapien
aaaggctgtccatttttatcaactt

SEQ ID NO: 3787051 - DNA, 25 bp, Homo sapien
tgccttcttcaaggcactcttggtt

SEQ ID NO: 3787052 - DNA, 25 bp, Homo sapien
ttggttttcatcagcgccaggcaag

SEQ ID NO: 3787053 - DNA, 25 bp, Homo sapien
gatgttaaagcatctggtactttcc

SEQ ID NO: 3787054 - DNA, 25 bp, Homo sapien
cacggtcaagacctggatgttaaag

SEQ ID NO: 3787055 - DNA, 25 bp, Homo sapien
ttccagttccatgtccggcagcagt

SEQ ID NO: 3787056 - DNA, 25 bp, Homo sapien
ggtgatttcgaggattccagttcca

SEQ ID NO: 3787057 - DNA, 25 bp, Homo sapien
tgcgtcaatttcctcagagccacac

SEQ ID NO: 3787058 - DNA, 25 bp, Homo sapien
tgtccggcagcagtccactgcgtca

SEQ ID NO: 3787059 - DNA, 25 bp, Homo sapien
gggatccaccgtgctcagacctgag

SEQ ID NO: 3787060 - DNA, 25 bp, Homo sapien
agttttattcaagaaggttggtgag

SEQ ID NO: 3787061 - DNA, 25 bp, Homo sapien
gaaccgtagcaatgcacaagtttta

SEQ ID NO: 3787062 - DNA, 25 bp, Homo sapien
tcaagaaggttggtgagtttaagaa

SEQ ID NO: 3787063 - DNA, 25 bp, Homo sapien
tccaagtctagtgaaccgtagcaat

SEQ ID NO: 3787064 - DNA, 25 bp, Homo sapien
caccctgccccccgcagtcggcgcc

SEQ ID NO: 3787065 - DNA, 25 bp, Homo sapien
ctgcagcaccctgccccccgcagtc

SEQ ID NO: 3787066 - DNA, 25 bp, Homo sapien
agcaccctgccccccgcagtcggcg

SEQ ID NO: 3787067 - DNA, 25 bp, Homo sapien
cctgccccccgcagtcggcgcccgc

SEQ ID NO: 3787068 - DNA, 25 bp, Homo sapien
tccgcgcatccaagattcccgcgga

SEQ ID NO: 3787069 - DNA, 25 bp, Homo sapien
atccaagattcccgcggacccgttg

SEQ ID NO: 3787070 - DNA, 25 bp, Homo sapien
agattcccgcggacccgttgcaccg

SEQ ID NO: 3787071 - DNA, 25 bp, Homo sapien
ggacctccgcgcatccaagattccc

SEQ ID NO: 3787072 - DNA, 25 bp, Homo sapien
agcaagagccccaactggaacacca

SEQ ID NO: 3787073 - DNA, 25 bp, Homo sapien
gggataaaggagtgggaatattgag

SEQ ID NO: 3787074 - DNA, 25 bp, Homo sapien
agagccccaactggaacaccagtga

SEQ ID NO: 3787075 - DNA, 25 bp, Homo sapien
ctaccagcaagagccccaactggaa

SEQ ID NO: 3787076 - DNA, 25 bp, Homo sapien
cataatattatacggattcagctca

SEQ ID NO: 3787077 - DNA, 25 bp, Homo sapien
attatacggattcagctcaaagcag

SEQ ID NO: 3787078 - DNA, 25 bp, Homo sapien
tgtcataatattatacggattcagc

SEQ ID NO: 3787079 - DNA, 25 bp, Homo sapien
atattatacggattcagctcaaagc

SEQ ID NO: 3787080 - DNA, 25 bp, Homo sapien
gcaggtcacaacctggtgaggagca

SEQ ID NO: 3787081 - DNA, 25 bp, Homo sapien
ccttcggaaggatcctggagtagtc

SEQ ID NO: 3787082 - DNA, 25 bp, Homo sapien
ttcggaaggatcctggagtagtccc

SEQ ID NO: 3787083 - DNA, 25 bp, Homo sapien
tcggaaggatcctggagtagtccca

SEQ ID NO: 3787084 - DNA, 25 bp, Homo sapien
gaaggatcctggagtagtcccagtc

SEQ ID NO: 3787085 - DNA, 25 bp, Homo sapien
aactatgtcgttgtttgccaaattc

SEQ ID NO: 3787086 - DNA, 25 bp, Homo sapien
accaagatctgagcaactatgtcgt

SEQ ID NO: 3787087 - DNA, 25 bp, Homo sapien
tctgagcaactatgtcgttgtttgc

SEQ ID NO: 3787088 - DNA, 25 bp, Homo sapien
ccaagatctgagcaactatgtcgtt

SEQ ID NO: 3787089 - DNA, 25 bp, Homo sapien
acagctctgagagcggtatctggga

SEQ ID NO: 3787090 - DNA, 25 bp, Homo sapien
cccttgcacagctgagatcactagc

SEQ ID NO: 3787091 - DNA, 25 bp, Homo sapien
tgagatcactagcatcatgcaatac

SEQ ID NO: 3787092 - DNA, 25 bp, Homo sapien
catgcaatacagctctgagagcggt

SEQ ID NO: 3787093 - DNA, 25 bp, Homo sapien
gccatgccgctgttgacagcaggaa

SEQ ID NO: 3787094 - DNA, 25 bp, Homo sapien
gaaagctatgaaacctgccggcagt

SEQ ID NO: 3787095 - DNA, 25 bp, Homo sapien
ctcattgaggacattaagcatcggg

SEQ ID NO: 3787096 - DNA, 25 bp, Homo sapien
cgatgagaagccatgccgctgttga

SEQ ID NO: 3787097 - DNA, 25 bp, Homo sapien
ttctctgaacaaagccgaggctggc

SEQ ID NO: 3787098 - DNA, 25 bp, Homo sapien
tgtgggtatttttctcggttcttca

SEQ ID NO: 3787099 - DNA, 25 bp, Homo sapien
tctgctgaggtcctatagctgccat

SEQ ID NO: 3787100 - DNA, 25 bp, Homo sapien
gttttgctccaacccagaacaagct

SEQ ID NO: 3787101 - DNA, 25 bp, Homo sapien
cgtgaactatccagcactgaagtag

SEQ ID NO: 3787102 - DNA, 25 bp, Homo sapien
tgaactatccagcactgaagtagtc

SEQ ID NO: 3787103 - DNA, 25 bp, Homo sapien
gtgaactatccagcactgaagtagt

SEQ ID NO: 3787104 - DNA, 25 bp, Homo sapien
aaaataaggccactcaaatcttgtt

SEQ ID NO: 3787105 - DNA, 25 bp, Homo sapien
taatgcccacgttcattccaaagga

SEQ ID NO: 3787106 - DNA, 25 bp, Homo sapien
ggccactcaaatcttgttaaactga

SEQ ID NO: 3787107 - DNA, 25 bp, Homo sapien
aaactgatattgtattcattgtgcc

SEQ ID NO: 3787108 - DNA, 25 bp, Homo sapien
gctgcacaagtcttttgaaactgtt

SEQ ID NO: 3787109 - DNA, 25 bp, Homo sapien
tacaaaaacacgcaaggagacttaa

SEQ ID NO: 3787110 - DNA, 25 bp, Homo sapien
aatcatcataaacttcccagctgca

SEQ ID NO: 3787111 - DNA, 25 bp, Homo sapien
gaaactgttctgtcgtaacgaagtc

SEQ ID NO: 3787112 - DNA, 25 bp, Homo sapien
tcaaagtaagtagattcaacccgac

SEQ ID NO: 3787113 - DNA, 25 bp, Homo sapien
gacagcattggtctgctgcattgct

SEQ ID NO: 3787114 - DNA, 25 bp, Homo sapien
cctcctgatgcacagtgcctttgct

SEQ ID NO: 3787115 - DNA, 25 bp, Homo sapien
gacttctccttgtgatcttgacagc

SEQ ID NO: 3787116 - DNA, 25 bp, Homo sapien
catgccccaagccaaaaaactgctc

SEQ ID NO: 3787117 - DNA, 25 bp, Homo sapien
ccaagccaaaaaactgctcttgtaa

SEQ ID NO: 3787118 - DNA, 25 bp, Homo sapien
gccccaagccaaaaaactgctcttg

SEQ ID NO: 3787119 - DNA, 25 bp, Homo sapien
tgccccaagccaaaaaactgctctt

SEQ ID NO: 3787120 - DNA, 25 bp, Homo sapien
gatttgggactattttgctcttcgt

SEQ ID NO: 3787121 - DNA, 25 bp, Homo sapien
gtactgtctttagttgcattccaca

SEQ ID NO: 3787122 - DNA, 25 bp, Homo sapien
ccacacattttgttatgctgtattt

SEQ ID NO: 3787123 - DNA, 25 bp, Homo sapien
tctactgtatgcattaagtgctatg

SEQ ID NO: 3787124 - DNA, 25 bp, Homo sapien
atgtagggttaggattatggccgtc

SEQ ID NO: 3787125 - DNA, 25 bp, Homo sapien
gagggcaggactataaaggattttc

SEQ ID NO: 3787126 - DNA, 25 bp, Homo sapien
tatggccgtcatattgacaagcacc

SEQ ID NO: 3787127 - DNA, 25 bp, Homo sapien
tcagtcatccttagtacattggcct

SEQ ID NO: 3787128 - DNA, 25 bp, Homo sapien
gaaatagtataatggaatagatcac

SEQ ID NO: 3787129 - DNA, 25 bp, Homo sapien
ttaattttagacatggcaagttcaa

SEQ ID NO: 3787130 - DNA, 25 bp, Homo sapien
tacatcacttcatatcacagtagaa

SEQ ID NO: 3787131 - DNA, 25 bp, Homo sapien
tctaccatgggaaatagtataatgg

SEQ ID NO: 3787132 - DNA, 25 bp, Homo sapien
tagctctgcgcttaaggtctggacc

SEQ ID NO: 3787133 - DNA, 25 bp, Homo sapien
ttaagaccacgtctaccggctgggc

SEQ ID NO: 3787134 - DNA, 25 bp, Homo sapien
caatgattttcgacgggcagggctt

SEQ ID NO: 3787135 - DNA, 25 bp, Homo sapien
gcctgcccggctaaatctgtgatga

SEQ ID NO: 3787136 - DNA, 25 bp, Homo sapien
acacatggcgtttgaaataaggctg

SEQ ID NO: 3787137 - DNA, 25 bp, Homo sapien
gaagcgctgaactcccatacatact

SEQ ID NO: 3787138 - DNA, 25 bp, Homo sapien
tcggatcttatactaacacatggcg

SEQ ID NO: 3787139 - DNA, 25 bp, Homo sapien
taacattcaaactcgacagcagcag

SEQ ID NO: 3787140 - DNA, 25 bp, Homo sapien
tttgagctcattgaatgccacagtg

SEQ ID NO: 3787141 - DNA, 25 bp, Homo sapien
gggtctctgtctctaatttgtcaaa

SEQ ID NO: 3787142 - DNA, 25 bp, Homo sapien
tgactttccattatctgtgcagatt

SEQ ID NO: 3787143 - DNA, 25 bp, Homo sapien
acagtgaggtcatcatttattataa

SEQ ID NO: 3787144 - DNA, 25 bp, Homo sapien
tagggcttaaattctagtgtcctta

SEQ ID NO: 3787145 - DNA, 25 bp, Homo sapien
tctctcaaacgctctattgatggag

SEQ ID NO: 3787146 - DNA, 25 bp, Homo sapien
cgctctattgatggaggctttataa

SEQ ID NO: 3787147 - DNA, 25 bp, Homo sapien
ttgtttctctcaaacgctctattga

SEQ ID NO: 3787148 - DNA, 25 bp, Homo sapien
catactgaaatgctcacatgaggtg

SEQ ID NO: 3787149 - DNA, 25 bp, Homo sapien
cagggtacagccatcagtggaagga

SEQ ID NO: 3787150 - DNA, 25 bp, Homo sapien
aaagggcttccgcaggtcattctag

SEQ ID NO: 3787151 - DNA, 25 bp, Homo sapien
caaaatgcccttcagttctagtggg

SEQ ID NO: 3787152 - DNA, 25 bp, Homo sapien
ttttagcaaggacagaccgaactga

SEQ ID NO: 3787153 - DNA, 25 bp, Homo sapien
gaactgagtctatacttgtgccgta

SEQ ID NO: 3787154 - DNA, 25 bp, Homo sapien
ggacagaccgaactgagtctatact

SEQ ID NO: 3787155 - DNA, 25 bp, Homo sapien
gtctatacttgtgccgtagtagttg

SEQ ID NO: 3787156 - DNA, 25 bp, Homo sapien
tttaaaacaattataggtggcaaga

SEQ ID NO: 3787157 - DNA, 25 bp, Homo sapien
aaaagacgtttctgctgaacacgta

SEQ ID NO: 3787158 - DNA, 25 bp, Homo sapien
attataggtggcaagataaaattca

SEQ ID NO: 3787159 - DNA, 25 bp, Homo sapien
ttaaatgcattggaatcatttgtga

SEQ ID NO: 3787160 - DNA, 25 bp, Homo sapien
aatacacttcaaatggagaactctc

SEQ ID NO: 3787161 - DNA, 25 bp, Homo sapien
tcagttgtctaaaacgggacaggca

SEQ ID NO: 3787162 - DNA, 25 bp, Homo sapien
tgtctaaaacgggacaggcatgtgc

SEQ ID NO: 3787163 - DNA, 25 bp, Homo sapien
aacgggacaggcatgtgcttataaa

SEQ ID NO: 3787164 - DNA, 25 bp, Homo sapien
aaaatgtattcaacaccatcactct

SEQ ID NO: 3787165 - DNA, 25 bp, Homo sapien
atgaaaatgtattcaacaccatcac

SEQ ID NO: 3787166 - DNA, 25 bp, Homo sapien
gaaaatgtattcaacaccatcactc

SEQ ID NO: 3787167 - DNA, 25 bp, Homo sapien
aatgtattcaacaccatcactctcc

SEQ ID NO: 3787168 - DNA, 25 bp, Homo sapien
caatactggtggtataagcaaagca

SEQ ID NO: 3787169 - DNA, 25 bp, Homo sapien
gagaatcttatcatcaggcaagcca

SEQ ID NO: 3787170 - DNA, 25 bp, Homo sapien
acatctctcatagggagttacatgg

SEQ ID NO: 3787171 - DNA, 25 bp, Homo sapien
taaagtatgtttgttgccctaggtc

SEQ ID NO: 3787172 - DNA, 25 bp, Homo sapien
ctgggaggtctagatgagtgagtgc

SEQ ID NO: 3787173 - DNA, 25 bp, Homo sapien
ccaaaaatctgtgtaatttagcgca

SEQ ID NO: 3787174 - DNA, 25 bp, Homo sapien
cagtgcttgataccatacgtgcttg

SEQ ID NO: 3787175 - DNA, 25 bp, Homo sapien
aaacctaagagtagggaagctgtga

SEQ ID NO: 3787176 - DNA, 25 bp, Homo sapien
ggaacactgagtagcgcagaactca

SEQ ID NO: 3787177 - DNA, 25 bp, Homo sapien
gaacactgagtagcgcagaactcac

SEQ ID NO: 3787178 - DNA, 25 bp, Homo sapien
aggaacactgagtagcgcagaactc

SEQ ID NO: 3787179 - DNA, 25 bp, Homo sapien
taggaacactgagtagcgcagaact

SEQ ID NO: 3787180 - DNA, 25 bp, Homo sapien
actgtcacgccatagtgctgggtgt

SEQ ID NO: 3787181 - DNA, 25 bp, Homo sapien
ggggcactgtcacgccatagtgctg

SEQ ID NO: 3787182 - DNA, 25 bp, Homo sapien
ctttcgtttcagttcattcagccct

SEQ ID NO: 3787183 - DNA, 25 bp, Homo sapien
gatcagcagctttcgtttcagttca

SEQ ID NO: 3787184 - DNA, 25 bp, Homo sapien
gaggtggtcattcactaccaccttc

SEQ ID NO: 3787185 - DNA, 25 bp, Homo sapien
gctgtccagtatcaattctctggca

SEQ ID NO: 3787186 - DNA, 25 bp, Homo sapien
acactgctgtccagtatcaattctc

SEQ ID NO: 3787187 - DNA, 25 bp, Homo sapien
tcccgaggtggtcattcactaccac

SEQ ID NO: 3787188 - DNA, 25 bp, Homo sapien
attcctggtctccacgcataaacca

SEQ ID NO: 3787189 - DNA, 25 bp, Homo sapien
cagcagtaacatcacgcattcctgg

SEQ ID NO: 3787190 - DNA, 25 bp, Homo sapien
gtctccacgcataaaccaggacctt

SEQ ID NO: 3787191 - DNA, 25 bp, Homo sapien
gtaacatcacgcattcctggtctcc

SEQ ID NO: 3787192 - DNA, 25 bp, Homo sapien
gcatctccagtttaggactatgtcg

SEQ ID NO: 3787193 - DNA, 25 bp, Homo sapien
gagcatcagtatttagcatctccag

SEQ ID NO: 3787194 - DNA, 25 bp, Homo sapien
ttaggactatgtcgagggaatatcc

SEQ ID NO: 3787195 - DNA, 25 bp, Homo sapien
tgtgccacttgggagcatcagtatt

SEQ ID NO: 3787196 - DNA, 25 bp, Homo sapien
tttcattagtttgtcgccgatacgg

SEQ ID NO: 3787197 - DNA, 25 bp, Homo sapien
caaccaagacaacgagtctgtattt

SEQ ID NO: 3787198 - DNA, 25 bp, Homo sapien
cacttcttcgtatgtgggtacgtca

SEQ ID NO: 3787199 - DNA, 25 bp, Homo sapien
cagctgtgtcgtactgatcactctt

SEQ ID NO: 3787200 - DNA, 25 bp, Homo sapien
tttatatcagctgcaaagttcaaaa

SEQ ID NO: 3787201 - DNA, 25 bp, Homo sapien
tacattctcttcaaaaagaatattc

SEQ ID NO: 3787202 - DNA, 25 bp, Homo sapien
ttatatcagctgcaaagttcaaaat

SEQ ID NO: 3787203 - DNA, 25 bp, Homo sapien
ttttatatcagctgcaaagttcaaa

SEQ ID NO: 3787204 - DNA, 25 bp, Homo sapien
ttgcacacactgtgggggcctgtac

SEQ ID NO: 3787205 - DNA, 25 bp, Homo sapien
tgcatcctgtcttggtgcctttgaa

SEQ ID NO: 3787206 - DNA, 25 bp, Homo sapien
agggcctttgcatacgctgtctggg

SEQ ID NO: 3787207 - DNA, 25 bp, Homo sapien
ctttgtacacgctgttgggggcctg

SEQ ID NO: 3787208 - DNA, 25 bp, Homo sapien
tcatttcagataaaacgaggtaatg

SEQ ID NO: 3787209 - DNA, 25 bp, Homo sapien
agatcctcctccgtggccaagtgct

SEQ ID NO: 3787210 - DNA, 25 bp, Homo sapien
agaaagagatcctcctccgtggcca

SEQ ID NO: 3787211 - DNA, 25 bp, Homo sapien
taatgacttcgaggaaagcaacaga

SEQ ID NO: 3787212 - DNA, 25 bp, Homo sapien
ctgttgttaccagcatagtcagcat

SEQ ID NO: 3787213 - DNA, 25 bp, Homo sapien
ctatataggttccactgttgttacc

SEQ ID NO: 3787214 - DNA, 25 bp, Homo sapien
gttgttaccagcatagtcagcatct

SEQ ID NO: 3787215 - DNA, 25 bp, Homo sapien
atataggttccactgttgttaccag

SEQ ID NO: 3787216 - DNA, 25 bp, Homo sapien
ctaccacactcaactgtttcctcat

SEQ ID NO: 3787217 - DNA, 25 bp, Homo sapien
caacaaattttgtccttaacatatc

SEQ ID NO: 3787218 - DNA, 25 bp, Homo sapien
tcctgtaaatttaacaataacctga

SEQ ID NO: 3787219 - DNA, 25 bp, Homo sapien
cagagactcgctttcagaagggtgg

SEQ ID NO: 3787220 - DNA, 25 bp, Homo sapien
cctaaattactaagaggatagcaat

SEQ ID NO: 3787221 - DNA, 25 bp, Homo sapien
tgcaagggacatgtgtgacactcct

SEQ ID NO: 3787222 - DNA, 25 bp, Homo sapien
tcacatgggcaaggttaaatcccca

SEQ ID NO: 3787223 - DNA, 25 bp, Homo sapien
cgtggtgagtcctgcacactgggca

SEQ ID NO: 3787224 - DNA, 25 bp, Homo sapien
taccgcaatccgtcctaaaagtctg

SEQ ID NO: 3787225 - DNA, 25 bp, Homo sapien
tattcctaagtgttaagacattcca

SEQ ID NO: 3787226 - DNA, 25 bp, Homo sapien
taccggtaccgtgtgcagtgaattc

SEQ ID NO: 3787227 - DNA, 25 bp, Homo sapien
gattatcaactgacaaatgtttgcc

SEQ ID NO: 3787228 - DNA, 25 bp, Homo sapien
gtgaattcgttattttactcaatgc

SEQ ID NO: 3787229 - DNA, 25 bp, Homo sapien
aacatctaggcgaggtggaacaggg

SEQ ID NO: 3787230 - DNA, 25 bp, Homo sapien
ggtcatttcgctgtttaatgtacag

SEQ ID NO: 3787231 - DNA, 25 bp, Homo sapien
tttatttggtcatttcgctgtttaa

SEQ ID NO: 3787232 - DNA, 25 bp, Homo sapien
tggaacagggaatttatgggatgca

SEQ ID NO: 3787233 - DNA, 25 bp, Homo sapien
tccaaagggataggctaaaggtcag

SEQ ID NO: 3787234 - DNA, 25 bp, Homo sapien
ttcagtagtcatacggtagccatcc

SEQ ID NO: 3787235 - DNA, 25 bp, Homo sapien
tagtctggtaataactccaaaggga

SEQ ID NO: 3787236 - DNA, 25 bp, Homo sapien
tgttcctgagaactgatgatcccaa

SEQ ID NO: 3787237 - DNA, 25 bp, Homo sapien
aaacatcagggtttggtttctctgc

SEQ ID NO: 3787238 - DNA, 25 bp, Homo sapien
ttctctgcattcttattaacaaact

SEQ ID NO: 3787239 - DNA, 25 bp, Homo sapien
tctgcattcttattaacaaacttac

SEQ ID NO: 3787240 - DNA, 25 bp, Homo sapien
ataaacatcagggtttggtttctct

SEQ ID NO: 3787241 - DNA, 25 bp, Homo sapien
aatatttctggtcgtctcaaagcca

SEQ ID NO: 3787242 - DNA, 25 bp, Homo sapien
cctgttggaaactttcaggggctga

SEQ ID NO: 3787243 - DNA, 25 bp, Homo sapien
tgaaccaatatttctggtcgtctca

SEQ ID NO: 3787244 - DNA, 25 bp, Homo sapien
tttctggtcgtctcaaagccaatct

SEQ ID NO: 3787245 - DNA, 25 bp, Homo sapien
gctcataatctgaagaatatctccc

SEQ ID NO: 3787246 - DNA, 25 bp, Homo sapien
cctcattaggattatagtcaaagag

SEQ ID NO: 3787247 - DNA, 25 bp, Homo sapien
gcttccttacatggaattgccttat

SEQ ID NO: 3787248 - DNA, 25 bp, Homo sapien
catcagcttcgtgtttcgcttgcca

SEQ ID NO: 3787249 - DNA, 25 bp, Homo sapien
ctttgctgccgggtataatcttaaa

SEQ ID NO: 3787250 - DNA, 25 bp, Homo sapien
ttgctgccgggtataatcttaaatg

SEQ ID NO: 3787251 - DNA, 25 bp, Homo sapien
ctctttgctgccgggtataatctta

SEQ ID NO: 3787252 - DNA, 25 bp, Homo sapien
tgctgccgggtataatcttaaatgt

SEQ ID NO: 3787253 - DNA, 25 bp, Homo sapien
tatcccgttgacttccctaagttca

SEQ ID NO: 3787254 - DNA, 25 bp, Homo sapien
cactggtatcccgttgacttcccta

SEQ ID NO: 3787255 - DNA, 25 bp, Homo sapien
gacttccctaagttcatcaccaaca

SEQ ID NO: 3787256 - DNA, 25 bp, Homo sapien
cttttatcctccactggtatcccgt

SEQ ID NO: 3787257 - DNA, 25 bp, Homo sapien
attctggccacaatgatcgccccgg

SEQ ID NO: 3787258 - DNA, 25 bp, Homo sapien
ttctggccacaatgatcgccccggt

SEQ ID NO: 3787259 - DNA, 25 bp, Homo sapien
tgattctggccacaatgatcgcccc

SEQ ID NO: 3787260 - DNA, 25 bp, Homo sapien
atgattctggccacaatgatcgccc

SEQ ID NO: 3787261 - DNA, 25 bp, Homo sapien
gttcatccttcttaatggtagctcc

SEQ ID NO: 3787262 - DNA, 25 bp, Homo sapien
tgttcatccttcttaatggtagctc

SEQ ID NO: 3787263 - DNA, 25 bp, Homo sapien
tggttgccaaacgttacagcctttc

SEQ ID NO: 3787264 - DNA, 25 bp, Homo sapien
tggtttgctctataggatacagggc

SEQ ID NO: 3787265 - DNA, 25 bp, Homo sapien
gatacagggcaaagtgacaggatcc

SEQ ID NO: 3787266 - DNA, 25 bp, Homo sapien
taggtcatccagtgcaagctcagtg

SEQ ID NO: 3787267 - DNA, 25 bp, Homo sapien
catggtatgcaccatcagatttggc

SEQ ID NO: 3787268 - DNA, 25 bp, Homo sapien
ggtatctactcatatctgagcacca

SEQ ID NO: 3787269 - DNA, 25 bp, Homo sapien
gatttggccctatcatggtatctac

SEQ ID NO: 3787270 - DNA, 25 bp, Homo sapien
tctttagacatcaatgttccatttc

SEQ ID NO: 3787271 - DNA, 25 bp, Homo sapien
tgagccacagtatcatgtacagaga

SEQ ID NO: 3787272 - DNA, 25 bp, Homo sapien
cactgggtcgtaattcttctgagcc

SEQ ID NO: 3787273 - DNA, 25 bp, Homo sapien
ccagacggattatttttactgagtc

SEQ ID NO: 3787274 - DNA, 25 bp, Homo sapien
gttctctatttttgaccagacggat

SEQ ID NO: 3787275 - DNA, 25 bp, Homo sapien
tttggtcatatacagggcagtcccc

SEQ ID NO: 3787276 - DNA, 25 bp, Homo sapien
gagcagtggctcttaactgagggca

SEQ ID NO: 3787277 - DNA, 25 bp, Homo sapien
gaaacaatgtgagcctatgactgcc

SEQ ID NO: 3787278 - DNA, 25 bp, Homo sapien
gaggtctcccttgagtcctgagcaa

SEQ ID NO: 3787279 - DNA, 25 bp, Homo sapien
gggttttgacagtagtttcaacagc

SEQ ID NO: 3787280 - DNA, 25 bp, Homo sapien
cagtagtttcaacagctctctgatc

SEQ ID NO: 3787281 - DNA, 25 bp, Homo sapien
tgacagtagtttcaacagctctctg

SEQ ID NO: 3787282 - DNA, 25 bp, Homo sapien
taatggcttgttctgaagctcttcg

SEQ ID NO: 3787283 - DNA, 25 bp, Homo sapien
ccccagcacttcgtccatgtgaatg

SEQ ID NO: 3787284 - DNA, 25 bp, Homo sapien
tttattgcaaggagggcaaacccca

SEQ ID NO: 3787285 - DNA, 25 bp, Homo sapien
aaaccccagcacttcgtccatgtga

SEQ ID NO: 3787286 - DNA, 25 bp, Homo sapien
cagcacttcgtccatgtgaatggtc

SEQ ID NO: 3787287 - DNA, 25 bp, Homo sapien
taacataagctcagtgatgacagga

SEQ ID NO: 3787288 - DNA, 25 bp, Homo sapien
aacataagctcagtgatgacaggac

SEQ ID NO: 3787289 - DNA, 25 bp, Homo sapien
ttaacataagctcagtgatgacagg

SEQ ID NO: 3787290 - DNA, 25 bp, Homo sapien
cagtgagctcggagagtcacactta

SEQ ID NO: 3787291 - DNA, 25 bp, Homo sapien
acatcccagtgagctcggagagtca

SEQ ID NO: 3787292 - DNA, 25 bp, Homo sapien
cttctgcttttcactcataggatca

SEQ ID NO: 3787293 - DNA, 25 bp, Homo sapien
tcacacgcatctgtctgcactagga

SEQ ID NO: 3787294 - DNA, 25 bp, Homo sapien
accatggagaatgggcaccggactc

SEQ ID NO: 3787295 - DNA, 25 bp, Homo sapien
gggcaccggactctgcttctcatag

SEQ ID NO: 3787296 - DNA, 25 bp, Homo sapien
caccggactctgcttctcatagtag

SEQ ID NO: 3787297 - DNA, 25 bp, Homo sapien
gactctgcttctcatagtagtgtag

SEQ ID NO: 3787298 - DNA, 25 bp, Homo sapien
tctaacctgactgcagttacttgtt

SEQ ID NO: 3787299 - DNA, 25 bp, Homo sapien
caaaactcatctaacctgactgcag

SEQ ID NO: 3787300 - DNA, 25 bp, Homo sapien
ctatcacaaaactcatctaacctga

SEQ ID NO: 3787301 - DNA, 25 bp, Homo sapien
actcatctaacctgactgcagttac

SEQ ID NO: 3787302 - DNA, 25 bp, Homo sapien
cttcttctgagcgtctttcacaaat

SEQ ID NO: 3787303 - DNA, 25 bp, Homo sapien
cgtctttcacaaatagtcagtttct

SEQ ID NO: 3787304 - DNA, 25 bp, Homo sapien
gtctttcacaaatagtcagtttctc

SEQ ID NO: 3787305 - DNA, 25 bp, Homo sapien
cgggaaagagagacctgcttaggaa

SEQ ID NO: 3787306 - DNA, 25 bp, Homo sapien
agtatggccaccaaaggaccaaaga

SEQ ID NO: 3787307 - DNA, 25 bp, Homo sapien
gaccaaagaactccaagttcagaga

SEQ ID NO: 3787308 - DNA, 25 bp, Homo sapien
gagcaggttattaattcgttgttca

SEQ ID NO: 3787309 - DNA, 25 bp, Homo sapien
tctggtcttacaactcttgtgtgaa

SEQ ID NO: 3787310 - DNA, 25 bp, Homo sapien
aaaatctggtcttacaactcttgtg

SEQ ID NO: 3787311 - DNA, 25 bp, Homo sapien
cttacaactcttgtgtgaatgtttc

SEQ ID NO: 3787312 - DNA, 25 bp, Homo sapien
ttacaactcttgtgtgaatgtttca

SEQ ID NO: 3787313 - DNA, 25 bp, Homo sapien
ccaggtctaggatgatgcaatgtac

SEQ ID NO: 3787314 - DNA, 25 bp, Homo sapien
aactgccaggtctaggatgatgcaa

SEQ ID NO: 3787315 - DNA, 25 bp, Homo sapien
caaactgccaggtctaggatgatgc

SEQ ID NO: 3787316 - DNA, 25 bp, Homo sapien
tcacaaactgccaggtctaggatga

SEQ ID NO: 3787317 - DNA, 25 bp, Homo sapien
ccaaagggatactgaaaatggtgca

SEQ ID NO: 3787318 - DNA, 25 bp, Homo sapien
aaatcctggcgtatagcatggaaca

SEQ ID NO: 3787319 - DNA, 25 bp, Homo sapien
tcctggcgtatagcatggaacacag

SEQ ID NO: 3787320 - DNA, 25 bp, Homo sapien
agcaatgtagccaaagggatactga

SEQ ID NO: 3787321 - DNA, 25 bp, Homo sapien
gtctccgctctgtcagaccaggtgg

SEQ ID NO: 3787322 - DNA, 25 bp, Homo sapien
ttaccagctgctgctacccaagtct

SEQ ID NO: 3787323 - DNA, 25 bp, Homo sapien
ccgctctgtcagaccaggtggccat

SEQ ID NO: 3787324 - DNA, 25 bp, Homo sapien
ggccaaggagcgttaccagctgctg

SEQ ID NO: 3787325 - DNA, 25 bp, Homo sapien
caaacttcctctttataagtatatt

SEQ ID NO: 3787326 - DNA, 25 bp, Homo sapien
tgtgttgtgatttacaacctgcccc

SEQ ID NO: 3787327 - DNA, 25 bp, Homo sapien
gagactgtattactcaaacttcctc

SEQ ID NO: 3787328 - DNA, 25 bp, Homo sapien
ttttcctagtccaaagaggtctatg

SEQ ID NO: 3787329 - DNA, 25 bp, Homo sapien
taacagcttcgactgcaggcagaag

SEQ ID NO: 3787330 - DNA, 25 bp, Homo sapien
tccccagagggcaactattatttag

SEQ ID NO: 3787331 - DNA, 25 bp, Homo sapien
tctctggtttacttggtggtgcccc

SEQ ID NO: 3787332 - DNA, 25 bp, Homo sapien
cacgcccgtcggtgaatggaacaag

SEQ ID NO: 3787333 - DNA, 25 bp, Homo sapien
ggtcaggtcttcctggctatccaca

SEQ ID NO: 3787334 - DNA, 25 bp, Homo sapien
aggtcttcctggctatccacatgtg

SEQ ID NO: 3787335 - DNA, 25 bp, Homo sapien
ttttttcaccaaacatatcccagag

SEQ ID NO: 3787336 - DNA, 25 bp, Homo sapien
gtcttcctggctatccacatgtggc

SEQ ID NO: 3787337 - DNA, 25 bp, Homo sapien
ccgagactctttagggaggtgacct

SEQ ID NO: 3787338 - DNA, 25 bp, Homo sapien
tagtgcagtgttccacggtagcgta

SEQ ID NO: 3787339 - DNA, 25 bp, Homo sapien
cagatgcgggttactcgtggcgtcc

SEQ ID NO: 3787340 - DNA, 25 bp, Homo sapien
gaaatgttgcaacagtgcctgcccg

SEQ ID NO: 3787341 - DNA, 25 bp, Homo sapien
actggatactcccacaagtgctgtt

SEQ ID NO: 3787342 - DNA, 25 bp, Homo sapien
tactcccacaagtgctgttagaaat

SEQ ID NO: 3787343 - DNA, 25 bp, Homo sapien
tggatactcccacaagtgctgttag

SEQ ID NO: 3787344 - DNA, 25 bp, Homo sapien
gatactcccacaagtgctgttagaa

SEQ ID NO: 3787345 - DNA, 25 bp, Homo sapien
agaacgacccaacacagaggccgag

SEQ ID NO: 3787346 - DNA, 25 bp, Homo sapien
tgcccagtcgcaagtattcctctag

SEQ ID NO: 3787347 - DNA, 25 bp, Homo sapien
tctagggcaatgcaaagaacgaccc

SEQ ID NO: 3787348 - DNA, 25 bp, Homo sapien
ggtgtgcacctctatagcaccagct

SEQ ID NO: 3787349 - DNA, 25 bp, Homo sapien
cagataattaatttcctgatgactg

SEQ ID NO: 3787350 - DNA, 25 bp, Homo sapien
atttcctgatgactgctactgctgt

SEQ ID NO: 3787351 - DNA, 25 bp, Homo sapien
tttcctgatgactgctactgctgtc

SEQ ID NO: 3787352 - DNA, 25 bp, Homo sapien
gataattaatttcctgatgactgct

SEQ ID NO: 3787353 - DNA, 25 bp, Homo sapien
catcacattactgtagccagcattc

SEQ ID NO: 3787354 - DNA, 25 bp, Homo sapien
tcacattactgtagccagcattcat

SEQ ID NO: 3787355 - DNA, 25 bp, Homo sapien
ctcatcacattactgtagccagcat

SEQ ID NO: 3787356 - DNA, 25 bp, Homo sapien
ctctcatcacattactgtagccagc

SEQ ID NO: 3787357 - DNA, 25 bp, Homo sapien
cctgtggcacaagggtctgacttca

SEQ ID NO: 3787358 - DNA, 25 bp, Homo sapien
tggaactaatgggacgacgtcagcg

SEQ ID NO: 3787359 - DNA, 25 bp, Homo sapien
gaaaaatgacccgactggccagttg

SEQ ID NO: 3787360 - DNA, 25 bp, Homo sapien
caacgctgcttatgggaaaaatgac

SEQ ID NO: 3787361 - DNA, 25 bp, Homo sapien
tcaagtgtggcaaacagttcctagc

SEQ ID NO: 3787362 - DNA, 25 bp, Homo sapien
ggagggcatccctgagttgatctta

SEQ ID NO: 3787363 - DNA, 25 bp, Homo sapien
tccctagtgttggtgacagaaaaac

SEQ ID NO: 3787364 - DNA, 25 bp, Homo sapien
cagtaacttttacctaggagggcat

SEQ ID NO: 3787365 - DNA, 25 bp, Homo sapien
aactgcccctcttggggtcacatac

SEQ ID NO: 3787366 - DNA, 25 bp, Homo sapien
caaagatggaatgagaactgcccct

SEQ ID NO: 3787367 - DNA, 25 bp, Homo sapien
ttaagcaaagatggaatgagaactg

SEQ ID NO: 3787368 - DNA, 25 bp, Homo sapien
agcaaagatggaatgagaactgccc

SEQ ID NO: 3787369 - DNA, 25 bp, Homo sapien
tgtcactcccagatcccgttgacaa

SEQ ID NO: 3787370 - DNA, 25 bp, Homo sapien
tcactcccagatcccgttgacaaag

SEQ ID NO: 3787371 - DNA, 25 bp, Homo sapien
cagatcccgttgacaaagctggcat

SEQ ID NO: 3787372 - DNA, 25 bp, Homo sapien
ctcccagatcccgttgacaaagctg

SEQ ID NO: 3787373 - DNA, 25 bp, Homo sapien
cctgcagccacgttgtctaccaaga

SEQ ID NO: 3787374 - DNA, 25 bp, Homo sapien
ggacaccctgccttcggacagccac

SEQ ID NO: 3787375 - DNA, 25 bp, Homo sapien
cgttgtctaccaagatctgtatatt

SEQ ID NO: 3787376 - DNA, 25 bp, Homo sapien
acaggtcagcccaccgctctccgga

SEQ ID NO: 3787377 - DNA, 25 bp, Homo sapien
tatggaatcgatttactacaacaca

SEQ ID NO: 3787378 - DNA, 25 bp, Homo sapien
tattactgactgttgtatggaatcg

SEQ ID NO: 3787379 - DNA, 25 bp, Homo sapien
ttgtcggaacgcagccataattatt

SEQ ID NO: 3787380 - DNA, 25 bp, Homo sapien
aacacaaaaataccagctgtaaagt

SEQ ID NO: 3787381 - DNA, 25 bp, Homo sapien
tttgctgagaagacccacggtggta

SEQ ID NO: 3787382 - DNA, 25 bp, Homo sapien
aaaacttgcatccactagaggctca

SEQ ID NO: 3787383 - DNA, 25 bp, Homo sapien
gaagatctgcatgattcggtgaacc

SEQ ID NO: 3787384 - DNA, 25 bp, Homo sapien
taactgaaatacacgcatggtggaa

SEQ ID NO: 3787385 - DNA, 25 bp, Homo sapien
tgatatgataagagagcctgcacct

SEQ ID NO: 3787386 - DNA, 25 bp, Homo sapien
tcctctctggaatggctccacttct

SEQ ID NO: 3787387 - DNA, 25 bp, Homo sapien
ctgggcttctgatatgataagagag

SEQ ID NO: 3787388 - DNA, 25 bp, Homo sapien
tgggaggagcctagcccactcctct

SEQ ID NO: 3787389 - DNA, 25 bp, Homo sapien
atggaaccaccacagtacataggca

SEQ ID NO: 3787390 - DNA, 25 bp, Homo sapien
cagtacataggcatttatttagctt

SEQ ID NO: 3787391 - DNA, 25 bp, Homo sapien
acagtacataggcatttatttagct

SEQ ID NO: 3787392 - DNA, 25 bp, Homo sapien
gaaccaccacagtacataggcattt

SEQ ID NO: 3787393 - DNA, 25 bp, Homo sapien
tggagtgctggctgtaaatcaagtc

SEQ ID NO: 3787394 - DNA, 25 bp, Homo sapien
acacacacaggacttaatgacgacc

SEQ ID NO: 3787395 - DNA, 25 bp, Homo sapien
aatcaagtcggcctgcccaaacaca

SEQ ID NO: 3787396 - DNA, 25 bp, Homo sapien
acaggacttaatgacgacctcagtg

SEQ ID NO: 3787397 - DNA, 25 bp, Homo sapien
aggtaggttacacctccattccatc

SEQ ID NO: 3787398 - DNA, 25 bp, Homo sapien
tctaaggtaggttacacctccattc

SEQ ID NO: 3787399 - DNA, 25 bp, Homo sapien
cttctaaggtaggttacacctccat

SEQ ID NO: 3787400 - DNA, 25 bp, Homo sapien
aaggtaggttacacctccattccat

SEQ ID NO: 3787401 - DNA, 25 bp, Homo sapien
taaagacaattaggggccaggcgcg

SEQ ID NO: 3787402 - DNA, 25 bp, Homo sapien
aagaatcatttgaacatgagaggca

SEQ ID NO: 3787403 - DNA, 25 bp, Homo sapien
cacacggatgacttgaggtaaggag

SEQ ID NO: 3787404 - DNA, 25 bp, Homo sapien
tagaaaatggggctaatcaggcgtg

SEQ ID NO: 3787405 - DNA, 25 bp, Homo sapien
ctcccaagtacaatgtttgaatatt

SEQ ID NO: 3787406 - DNA, 25 bp, Homo sapien
tgaacagacagtgcttaagatcggg

SEQ ID NO: 3787407 - DNA, 25 bp, Homo sapien
tcaaagtacataagattagatcatt

SEQ ID NO: 3787408 - DNA, 25 bp, Homo sapien
taagatcggggtattctgcaaagac

SEQ ID NO: 3787409 - DNA, 25 bp, Homo sapien
tcagttcagcaactgccaagactgc

SEQ ID NO: 3787410 - DNA, 25 bp, Homo sapien
cagccaggaattcagttcagcaact

SEQ ID NO: 3787411 - DNA, 25 bp, Homo sapien
tcagcaactgccaagactgctatac

SEQ ID NO: 3787412 - DNA, 25 bp, Homo sapien
agttcagcaactgccaagactgcta

SEQ ID NO: 3787413 - DNA, 25 bp, Homo sapien
cattcctgtaaaaggaagtgcacag

SEQ ID NO: 3787414 - DNA, 25 bp, Homo sapien
gccttggagaagctaaattttgttc

SEQ ID NO: 3787415 - DNA, 25 bp, Homo sapien
gagaacctgctgtttatgaacattc

SEQ ID NO: 3787416 - DNA, 25 bp, Homo sapien
ttgttcaaagcctaggagaacctgc

SEQ ID NO: 3787417 - DNA, 25 bp, Homo sapien
tctgtaaacaccaagttcataccac

SEQ ID NO: 3787418 - DNA, 25 bp, Homo sapien
gaaatgaccgctcttaatctgtaaa

SEQ ID NO: 3787419 - DNA, 25 bp, Homo sapien
gacttgccatatcatacacagcctg

SEQ ID NO: 3787420 - DNA, 25 bp, Homo sapien
aattgttattagacaggaaaatgtc

SEQ ID NO: 3787421 - DNA, 25 bp, Homo sapien
tacagtgtctaaggtgagtgggcca

SEQ ID NO: 3787422 - DNA, 25 bp, Homo sapien
ttgcccttgaatctgcgtgaaacgg

SEQ ID NO: 3787423 - DNA, 25 bp, Homo sapien
cgtgaaacggcaaggttctgagcaa

SEQ ID NO: 3787424 - DNA, 25 bp, Homo sapien
agtgggccactatggagactttgcc

SEQ ID NO: 3787425 - DNA, 25 bp, Homo sapien
gcggtccgcgggcaggaggcgcact

SEQ ID NO: 3787426 - DNA, 25 bp, Homo sapien
ctgctctgggctgccgcggtccgcg

SEQ ID NO: 3787427 - DNA, 25 bp, Homo sapien
gggctgccgcggtccgcgggcagga

SEQ ID NO: 3787428 - DNA, 25 bp, Homo sapien
aggaggcgcactcgctctggcccct

SEQ ID NO: 3787429 - DNA, 25 bp, Homo sapien
accgccgcagaggacaatcgggagc

SEQ ID NO: 3787430 - DNA, 25 bp, Homo sapien
gcggcgggcgcagaacgcacgagcc

SEQ ID NO: 3787431 - DNA, 25 bp, Homo sapien
gcgcagaacgcacgagcccagtggg

SEQ ID NO: 3787432 - DNA, 25 bp, Homo sapien
tcgggagccagcgggctcggcaccg

SEQ ID NO: 3787433 - DNA, 25 bp, Homo sapien
gcagaactccctcattggtcggcaa

SEQ ID NO: 3787434 - DNA, 25 bp, Homo sapien
tgtgtttcatggacgagcaacctcc

SEQ ID NO: 3787435 - DNA, 25 bp, Homo sapien
gcgaaggcgataggcgtctcagact

SEQ ID NO: 3787436 - DNA, 25 bp, Homo sapien
ttgaagacgcctctccagcagaact

SEQ ID NO: 3787437 - DNA, 25 bp, Homo sapien
gaatggaacacccactcttgcctgg

SEQ ID NO: 3787438 - DNA, 25 bp, Homo sapien
gaggcacttttaagagtcaccaagg

SEQ ID NO: 3787439 - DNA, 25 bp, Homo sapien
tcatggtctgcctcactgacactgc

SEQ ID NO: 3787440 - DNA, 25 bp, Homo sapien
tgagatttgtctccaaataccaggg

SEQ ID NO: 3787441 - DNA, 25 bp, Homo sapien
cccaagggagcatcgcaagcaaagt

SEQ ID NO: 3787442 - DNA, 25 bp, Homo sapien
ccctgtccctggtatatgagcagaa

SEQ ID NO: 3787443 - DNA, 25 bp, Homo sapien
gaagcttccttatctcgccacttga

SEQ ID NO: 3787444 - DNA, 25 bp, Homo sapien
tacttaccatgttgatctcccaagg

SEQ ID NO: 3787445 - DNA, 25 bp, Homo sapien
taaaactatcgaagtgaccgagtac

SEQ ID NO: 3787446 - DNA, 25 bp, Homo sapien
tcattattcagggtgggcggtccaa

SEQ ID NO: 3787447 - DNA, 25 bp, Homo sapien
gggtcaacttgaaatcactacacat

SEQ ID NO: 3787448 - DNA, 25 bp, Homo sapien
gaccgagtacttatcaacagtggaa

SEQ ID NO: 3787449 - DNA, 25 bp, Homo sapien
ggtaaaactcagtgctctctagagc

SEQ ID NO: 3787450 - DNA, 25 bp, Homo sapien
aagcccagatcctgcaccatagaag

SEQ ID NO: 3787451 - DNA, 25 bp, Homo sapien
cgctcttggcgggtcttgtctctct

SEQ ID NO: 3787452 - DNA, 25 bp, Homo sapien
gctgtcattgacaccccgctcttgg

SEQ ID NO: 3787453 - DNA, 25 bp, Homo sapien
tgaagaagacaaagtttcctttagc

SEQ ID NO: 3787454 - DNA, 25 bp, Homo sapien
aagaagacaaagtttcctttagcag

SEQ ID NO: 3787455 - DNA, 25 bp, Homo sapien
ctgaagaagacaaagtttcctttag

SEQ ID NO: 3787456 - DNA, 25 bp, Homo sapien
gaagaagacaaagtttcctttagca

SEQ ID NO: 3787457 - DNA, 25 bp, Homo sapien
acgctctcaacagcaaagccaagtg

SEQ ID NO: 3787458 - DNA, 25 bp, Homo sapien
ctggcacaacgctctcaacagcaaa

SEQ ID NO: 3787459 - DNA, 25 bp, Homo sapien
aaagccaagtggcagaaagtgctgg

SEQ ID NO: 3787460 - DNA, 25 bp, Homo sapien
tgctgggccacattgccagggtaca

SEQ ID NO: 3787461 - DNA, 25 bp, Homo sapien
tgtgcagcaaaaagagtgatacttc

SEQ ID NO: 3787462 - DNA, 25 bp, Homo sapien
cacgaggcggcaatcaagatgctgc

SEQ ID NO: 3787463 - DNA, 25 bp, Homo sapien
ttgagggcttaacacaagcaacacg

SEQ ID NO: 3787464 - DNA, 25 bp, Homo sapien
gagatcttagttcctcatggcactg

SEQ ID NO: 3787465 - DNA, 25 bp, Homo sapien
tgttttaggatcactcacgaggcgg

SEQ ID NO: 3787466 - DNA, 25 bp, Homo sapien
tccatctccagcgtgcattgcggtg

SEQ ID NO: 3787467 - DNA, 25 bp, Homo sapien
tctccagcgtgcattgcggtgtgtc

SEQ ID NO: 3787468 - DNA, 25 bp, Homo sapien
gcaaggaaagcatccccacattctg

SEQ ID NO: 3787469 - DNA, 25 bp, Homo sapien
gcattgcggtgtgtctttgaatgga

SEQ ID NO: 3787470 - DNA, 25 bp, Homo sapien
tgccccatgtattacattcgtaggg

SEQ ID NO: 3787471 - DNA, 25 bp, Homo sapien
gaacaattgcgtcttttcccacatt

SEQ ID NO: 3787472 - DNA, 25 bp, Homo sapien
tcatgaaggtttcctgcactatgca

SEQ ID NO: 3787473 - DNA, 25 bp, Homo sapien
tgagataattaaaggttctgcccca

SEQ ID NO: 3787474 - DNA, 25 bp, Homo sapien
gatgacaatctgctttctggctgcg

SEQ ID NO: 3787475 - DNA, 25 bp, Homo sapien
cattgactccttctttacatccaca

SEQ ID NO: 3787476 - DNA, 25 bp, Homo sapien
catattatttcgtagctttctccca

SEQ ID NO: 3787477 - DNA, 25 bp, Homo sapien
gagtctctccaccatattatttcgt

SEQ ID NO: 3787478 - DNA, 25 bp, Homo sapien
ttcacaagtaggctcggtagtcaca

SEQ ID NO: 3787479 - DNA, 25 bp, Homo sapien
agccaaaggacaattctgcaagaga

SEQ ID NO: 3787480 - DNA, 25 bp, Homo sapien
ctgggtctcacatgagtgggatctg

SEQ ID NO: 3787481 - DNA, 25 bp, Homo sapien
gaacatgtacttcaagccaaaggac

SEQ ID NO: 3787482 - DNA, 25 bp, Homo sapien
ggggaagagtgtgaccccagccagg

SEQ ID NO: 3787483 - DNA, 25 bp, Homo sapien
ccaacggggaagagtgtgaccccag

SEQ ID NO: 3787484 - DNA, 25 bp, Homo sapien
ctgaaccaacggggaagagtgtgac

SEQ ID NO: 3787485 - DNA, 25 bp, Homo sapien
tgaaccaacggggaagagtgtgacc

SEQ ID NO: 3787486 - DNA, 25 bp, Homo sapien
tccatttgaaattaacgagcttccc

SEQ ID NO: 3787487 - DNA, 25 bp, Homo sapien
ccatccttttctgggttgattattt

SEQ ID NO: 3787488 - DNA, 25 bp, Homo sapien
ccaagttgttttgttcggataatga

SEQ ID NO: 3787489 - DNA, 25 bp, Homo sapien
gcttcccacgatgaagccaagttgt

SEQ ID NO: 3787490 - DNA, 25 bp, Homo sapien
aacacatcctgaagcaatatactag

SEQ ID NO: 3787491 - DNA, 25 bp, Homo sapien
tcctgaagcaatatactagtcactg

SEQ ID NO: 3787492 - DNA, 25 bp, Homo sapien
gaagcaatatactagtcactgtcac

SEQ ID NO: 3787493 - DNA, 25 bp, Homo sapien
gaagatggtgacaccataagaaggg

SEQ ID NO: 3787494 - DNA, 25 bp, Homo sapien
ctataagaccgtcttggtgtaaatt

SEQ ID NO: 3787495 - DNA, 25 bp, Homo sapien
ggctttgtcatagagtattttcccc

SEQ ID NO: 3787496 - DNA, 25 bp, Homo sapien
ttcccctctctataagaccgtcttg

SEQ ID NO: 3787497 - DNA, 25 bp, Homo sapien
gctttgtcatagagtattttcccct

SEQ ID NO: 3787498 - DNA, 25 bp, Homo sapien
cggccggttgcaatttgagggctct

SEQ ID NO: 3787499 - DNA, 25 bp, Homo sapien
gtgctctgtacaacttgttctgctc

SEQ ID NO: 3787500 - DNA, 25 bp, Homo sapien
ggctctgtgctctgtacaacttgtt

SEQ ID NO: 3787501 - DNA, 25 bp, Homo sapien
ggttgcaatttgagggctctgtgct

SEQ ID NO: 3787502 - DNA, 25 bp, Homo sapien
gaacatcatcaacgcctaatggcag

SEQ ID NO: 3787503 - DNA, 25 bp, Homo sapien
cccgcaatgagctgtggacatgaac

SEQ ID NO: 3787504 - DNA, 25 bp, Homo sapien
gctccacacgatcagagaaactgcc

SEQ ID NO: 3787505 - DNA, 25 bp, Homo sapien
aaaacaactccgagagctggcttca

SEQ ID NO: 3787506 - DNA, 25 bp, Homo sapien
ctagcagttatgggagctggtggat

SEQ ID NO: 3787507 - DNA, 25 bp, Homo sapien
tagcagttatgggagctggtggatt

SEQ ID NO: 3787508 - DNA, 25 bp, Homo sapien
gcttgcgagggccttcatcgtttgc

SEQ ID NO: 3787509 - DNA, 25 bp, Homo sapien
tcattggaaaacttccatgcctaag

SEQ ID NO: 3787510 - DNA, 25 bp, Homo sapien
aacttccatgcctaagaacagcttg

SEQ ID NO: 3787511 - DNA, 25 bp, Homo sapien
ttttctctctccactcggtgcactt

SEQ ID NO: 3787512 - DNA, 25 bp, Homo sapien
tcatgtggaggccttgccttatgct

SEQ ID NO: 3787513 - DNA, 25 bp, Homo sapien
tatgctctattgagaaattattggc

SEQ ID NO: 3787514 - DNA, 25 bp, Homo sapien
ggccttgccttatgctctattgaga

SEQ ID NO: 3787515 - DNA, 25 bp, Homo sapien
gctctattgagaaattattggcatg

SEQ ID NO: 3787516 - DNA, 25 bp, Homo sapien
ggtatcacacgcttgcagcaaccag

SEQ ID NO: 3787517 - DNA, 25 bp, Homo sapien
ccagaacgtgacttctcctgagtac

SEQ ID NO: 3787518 - DNA, 25 bp, Homo sapien
acgcttgcagcaaccagaacgtgac

SEQ ID NO: 3787519 - DNA, 25 bp, Homo sapien
ttaatgacagggtatcacacgcttg

SEQ ID NO: 3787520 - DNA, 25 bp, Homo sapien
aggggtccatatggcgttttctgga

SEQ ID NO: 3787521 - DNA, 25 bp, Homo sapien
catatggcgttttctggattcccat

SEQ ID NO: 3787522 - DNA, 25 bp, Homo sapien
ggtccatatggcgttttctggattc

SEQ ID NO: 3787523 - DNA, 25 bp, Homo sapien
tccatatggcgttttctggattccc

SEQ ID NO: 3787524 - DNA, 25 bp, Homo sapien
catgtgcagcagtgacttggatagg

SEQ ID NO: 3787525 - DNA, 25 bp, Homo sapien
gggtgatcagcgttgcagccacatc

SEQ ID NO: 3787526 - DNA, 25 bp, Homo sapien
gataggatgctacccagatgggcag

SEQ ID NO: 3787527 - DNA, 25 bp, Homo sapien
tacgcaccctggactgaagaaatgt

SEQ ID NO: 3787528 - DNA, 25 bp, Homo sapien
ctcttcgcttcctagagctgcgtct

SEQ ID NO: 3787529 - DNA, 25 bp, Homo sapien
tccctcttcgcttcctagagctgcg

SEQ ID NO: 3787530 - DNA, 25 bp, Homo sapien
tttttccctcttcgcttcctagagc

SEQ ID NO: 3787531 - DNA, 25 bp, Homo sapien
tttccctcttcgcttcctagagctg

SEQ ID NO: 3787532 - DNA, 25 bp, Homo sapien
gggaatggagagtgtgggacttgca

SEQ ID NO: 3787533 - DNA, 25 bp, Homo sapien
aatggagagtgtgggacttgcaaca

SEQ ID NO: 3787534 - DNA, 25 bp, Homo sapien
gaatggagagtgtgggacttgcaac

SEQ ID NO: 3787535 - DNA, 25 bp, Homo sapien
ctgggaatggagagtgtgggacttg

SEQ ID NO: 3787536 - DNA, 25 bp, Homo sapien
aggccccgcatcctctgagactgcc

SEQ ID NO: 3787537 - DNA, 25 bp, Homo sapien
tctgagactgcctctggcttggtta

SEQ ID NO: 3787538 - DNA, 25 bp, Homo sapien
ggttacagctccctttagccaagct

SEQ ID NO: 3787539 - DNA, 25 bp, Homo sapien
gcctctggcttggttacagctccct

SEQ ID NO: 3787540 - DNA, 25 bp, Homo sapien
ggttattattagccagtttggagtg

SEQ ID NO: 3787541 - DNA, 25 bp, Homo sapien
cagtttggagtgtggaactacaagt

SEQ ID NO: 3787542 - DNA, 25 bp, Homo sapien
agtttggagtgtggaactacaagta

SEQ ID NO: 3787543 - DNA, 25 bp, Homo sapien
ttattattagccagtttggagtgtg

SEQ ID NO: 3787544 - DNA, 25 bp, Homo sapien
ccttcaggggaccaggtgatgggag

SEQ ID NO: 3787545 - DNA, 25 bp, Homo sapien
tgggagttaattcctcaacctgcat

SEQ ID NO: 3787546 - DNA, 25 bp, Homo sapien
aggtgatgggagttaattcctcaac

SEQ ID NO: 3787547 - DNA, 25 bp, Homo sapien
tgatgggagttaattcctcaacctg

SEQ ID NO: 3787548 - DNA, 25 bp, Homo sapien
tgatcccacttcctggcgagtcggg

SEQ ID NO: 3787549 - DNA, 25 bp, Homo sapien
aggatgcgcatctggcctgtgattg

SEQ ID NO: 3787550 - DNA, 25 bp, Homo sapien
gagtcgggtagcagtggacacctct

SEQ ID NO: 3787551 - DNA, 25 bp, Homo sapien
cagatcccccagcttagagccaaga

SEQ ID NO: 3787552 - DNA, 25 bp, Homo sapien
cagtccaacaaggaccagatgggag

SEQ ID NO: 3787553 - DNA, 25 bp, Homo sapien
tgtcaaggaagtacagccaagcatt

SEQ ID NO: 3787554 - DNA, 25 bp, Homo sapien
atgcagctgagacacgcacagtcca

SEQ ID NO: 3787555 - DNA, 25 bp, Homo sapien
aagagccaggtctggtgcgtccatg

SEQ ID NO: 3787556 - DNA, 25 bp, Homo sapien
tgtccacacacctttgaagccttgg

SEQ ID NO: 3787557 - DNA, 25 bp, Homo sapien
tccctctctccagcgacatggtttg

SEQ ID NO: 3787558 - DNA, 25 bp, Homo sapien
cagaccatatgttgacccagataag

SEQ ID NO: 3787559 - DNA, 25 bp, Homo sapien
cactgaggctttcaacttgtgaaga

SEQ ID NO: 3787560 - DNA, 25 bp, Homo sapien
gtattccattatcagggtcaattgg

SEQ ID NO: 3787561 - DNA, 25 bp, Homo sapien
taaaagggtgttgataagagtattc

SEQ ID NO: 3787562 - DNA, 25 bp, Homo sapien
gagtattccattatcagggtcaatt

SEQ ID NO: 3787563 - DNA, 25 bp, Homo sapien
aagggtgttgataagagtattccat

SEQ ID NO: 3787564 - DNA, 25 bp, Homo sapien
gacaacaattgcatccactttcaga

SEQ ID NO: 3787565 - DNA, 25 bp, Homo sapien
tatgctgacaacaattgcatccact

SEQ ID NO: 3787566 - DNA, 25 bp, Homo sapien
tttcagaaaactgtcttcgatatgg

SEQ ID NO: 3787567 - DNA, 25 bp, Homo sapien
ggtacaatttcttgagagacttctg

SEQ ID NO: 3787568 - DNA, 25 bp, Homo sapien
gtttgagggttcattctctcatcag

SEQ ID NO: 3787569 - DNA, 25 bp, Homo sapien
caaaaaagcctgtgcggtgttagct

SEQ ID NO: 3787570 - DNA, 25 bp, Homo sapien
agatgaatacatctgagaggaaaaa

SEQ ID NO: 3787571 - DNA, 25 bp, Homo sapien
tagcttaaattagaagcggtttgag

SEQ ID NO: 3787572 - DNA, 25 bp, Homo sapien
aacagtggagtgatccaaggcaagt

SEQ ID NO: 3787573 - DNA, 25 bp, Homo sapien
gaaacagtggagtgatccaaggcaa

SEQ ID NO: 3787574 - DNA, 25 bp, Homo sapien
cagtggagtgatccaaggcaagttt

SEQ ID NO: 3787575 - DNA, 25 bp, Homo sapien
ctgaaacagtggagtgatccaaggc

SEQ ID NO: 3787576 - DNA, 25 bp, Homo sapien
tctcaattccactaactaaacagag

SEQ ID NO: 3787577 - DNA, 25 bp, Homo sapien
cttgttctcaattccactaactaaa

SEQ ID NO: 3787578 - DNA, 25 bp, Homo sapien
tccactaactaaacagagggttgta

SEQ ID NO: 3787579 - DNA, 25 bp, Homo sapien
aacagagggttgtagtcacagcatc

SEQ ID NO: 3787580 - DNA, 25 bp, Homo sapien
cagtgagttgactgtttaggaagcc

SEQ ID NO: 3787581 - DNA, 25 bp, Homo sapien
gccagtgtttgcaagaggccttctt

SEQ ID NO: 3787582 - DNA, 25 bp, Homo sapien
taacaggcgttcagttacgctgaca

SEQ ID NO: 3787583 - DNA, 25 bp, Homo sapien
tcaactagattaagagagttggctc

SEQ ID NO: 3787584 - DNA, 25 bp, Homo sapien
agatactatcttcataatttgaatt

SEQ ID NO: 3787585 - DNA, 25 bp, Homo sapien
gatactatcttcataatttgaattc

SEQ ID NO: 3787586 - DNA, 25 bp, Homo sapien
tcagatactatcttcataatttgaa

SEQ ID NO: 3787587 - DNA, 25 bp, Homo sapien
cagatactatcttcataatttgaat

SEQ ID NO: 3787588 - DNA, 25 bp, Homo sapien
gaaggttttgaggacgtggatgctg

SEQ ID NO: 3787589 - DNA, 25 bp, Homo sapien
tatgtttactatgatggaaggtttt

SEQ ID NO: 3787590 - DNA, 25 bp, Homo sapien
cgagtcttatgtttactatgatgga

SEQ ID NO: 3787591 - DNA, 25 bp, Homo sapien
cgtggatgctgtgttgagctgatgg

SEQ ID NO: 3787592 - DNA, 25 bp, Homo sapien
gttgacaggggtaatgattgccagc

SEQ ID NO: 3787593 - DNA, 25 bp, Homo sapien
caggggtaatgattgccagctgcag

SEQ ID NO: 3787594 - DNA, 25 bp, Homo sapien
ggtaatgattgccagctgcagggtc

SEQ ID NO: 3787595 - DNA, 25 bp, Homo sapien
gacaggggtaatgattgccagctgc

SEQ ID NO: 3787596 - DNA, 25 bp, Homo sapien
ccaaagtagaagatcattgtattca

SEQ ID NO: 3787597 - DNA, 25 bp, Homo sapien
tatactggggctgcggaagttgcat

SEQ ID NO: 3787598 - DNA, 25 bp, Homo sapien
tagtgacactattcactggcaaaac

SEQ ID NO: 3787599 - DNA, 25 bp, Homo sapien
ttgacctgagaattaatactcctgc

SEQ ID NO: 3787600 - DNA, 25 bp, Homo sapien
tccaggatttggtcaagaatgaaag

SEQ ID NO: 3787601 - DNA, 25 bp, Homo sapien
ttggtcaagaatgaaagcttcctag

SEQ ID NO: 3787602 - DNA, 25 bp, Homo sapien
aatgaaagcttcctagatacaggtg

SEQ ID NO: 3787603 - DNA, 25 bp, Homo sapien
gcttcctagatacaggtggcatttg

SEQ ID NO: 3787604 - DNA, 25 bp, Homo sapien
gatctgaatatgtaggtcctggaca

SEQ ID NO: 3787605 - DNA, 25 bp, Homo sapien
gtaacttcctggcacaacagagccc

SEQ ID NO: 3787606 - DNA, 25 bp, Homo sapien
caagcacggttgcatcacacattag

SEQ ID NO: 3787607 - DNA, 25 bp, Homo sapien
tgttgtagcactgtaactccctggc

SEQ ID NO: 3787608 - DNA, 25 bp, Homo sapien
caatgtttgcaagtatcaccactac

SEQ ID NO: 3787609 - DNA, 25 bp, Homo sapien
ctgtacaattcagtgccttccagta

SEQ ID NO: 3787610 - DNA, 25 bp, Homo sapien
aagaaacccattaagcagcaactcc

SEQ ID NO: 3787611 - DNA, 25 bp, Homo sapien
taacccctagcatccaccaatgttt

SEQ ID NO: 3787612 - DNA, 25 bp, Homo sapien
tttatctctactccagtctttacta

SEQ ID NO: 3787613 - DNA, 25 bp, Homo sapien
tataaaattgcctttgagcactgct

SEQ ID NO: 3787614 - DNA, 25 bp, Homo sapien
gaaggttaggttgctgattctaggt

SEQ ID NO: 3787615 - DNA, 25 bp, Homo sapien
aatgtaggcatgtgcagctataaaa

SEQ ID NO: 3787616 - DNA, 25 bp, Homo sapien
tattgagaatcctttgtacgtgagg

SEQ ID NO: 3787617 - DNA, 25 bp, Homo sapien
taattagtaggaaggacattgcccc

SEQ ID NO: 3787618 - DNA, 25 bp, Homo sapien
catgaatcacctttatacattgtgc

SEQ ID NO: 3787619 - DNA, 25 bp, Homo sapien
tcttgtaaggcaggactactagtga

SEQ ID NO: 3787620 - DNA, 25 bp, Homo sapien
ttgggcttccacagtcacaactgct

SEQ ID NO: 3787621 - DNA, 25 bp, Homo sapien
taccagcagtgtgctctgacagaat

SEQ ID NO: 3787622 - DNA, 25 bp, Homo sapien
gagtggaaacactctacccatattt

SEQ ID NO: 3787623 - DNA, 25 bp, Homo sapien
tttaatccttttaaccatcatgtca

SEQ ID NO: 3787624 - DNA, 25 bp, Homo sapien
gttttaaggaagtgtgctgatcatc

SEQ ID NO: 3787625 - DNA, 25 bp, Homo sapien
gtatacatgttttcctggcgaaggg

SEQ ID NO: 3787626 - DNA, 25 bp, Homo sapien
caaaagccaccagatacacttagag

SEQ ID NO: 3787627 - DNA, 25 bp, Homo sapien
taagccagtttcaggttacgataca

SEQ ID NO: 3787628 - DNA, 25 bp, Homo sapien
taaacaccctagaactgcaagcaaa

SEQ ID NO: 3787629 - DNA, 25 bp, Homo sapien
gggactcccctcatgcatatactgg

SEQ ID NO: 3787630 - DNA, 25 bp, Homo sapien
tctgtattcgttgctgtgtgtgacc

SEQ ID NO: 3787631 - DNA, 25 bp, Homo sapien
tactggtatgcttgatagagtccca

SEQ ID NO: 3787632 - DNA, 25 bp, Homo sapien
catcaaagctgggacattttctacc

SEQ ID NO: 3787633 - DNA, 25 bp, Homo sapien
cttcctatttgagcaagcctgatgg

SEQ ID NO: 3787634 - DNA, 25 bp, Homo sapien
tgctcaccctgcatgtacatgtggc

SEQ ID NO: 3787635 - DNA, 25 bp, Homo sapien
gagtttaaggctttctcaagtcttc

SEQ ID NO: 3787636 - DNA, 25 bp, Homo sapien
tctcagtctttaccagtaggctctg

SEQ ID NO: 3787637 - DNA, 25 bp, Homo sapien
aagaaaacaaggccatcctgctccc

SEQ ID NO: 3787638 - DNA, 25 bp, Homo sapien
gaaaagaaaacaaggccatcctgct

SEQ ID NO: 3787639 - DNA, 25 bp, Homo sapien
aaaagaaaacaaggccatcctgctc

SEQ ID NO: 3787640 - DNA, 25 bp, Homo sapien
aagaaaagaaaacaaggccatcctg

SEQ ID NO: 3787641 - DNA, 25 bp, Homo sapien
gagaaatgcgctcttggagtttcct

SEQ ID NO: 3787642 - DNA, 25 bp, Homo sapien
gattctgacaatttgtgccaatgta

SEQ ID NO: 3787643 - DNA, 25 bp, Homo sapien
gacaatttgtgccaatgtattcact

SEQ ID NO: 3787644 - DNA, 25 bp, Homo sapien
gttttgtggagaaatgcgctcttgg

SEQ ID NO: 3787645 - DNA, 25 bp, Homo sapien
catttggtagtggagtagacaagga

SEQ ID NO: 3787646 - DNA, 25 bp, Homo sapien
ggactgattcttgaagaacttcaac

SEQ ID NO: 3787647 - DNA, 25 bp, Homo sapien
ctccaaaggactgattcttgaagaa

SEQ ID NO: 3787648 - DNA, 25 bp, Homo sapien
gaagaacttcaacatttggtagtgg

SEQ ID NO: 3787649 - DNA, 25 bp, Homo sapien
cctgcagcagtacataaaatcaaat

SEQ ID NO: 3787650 - DNA, 25 bp, Homo sapien
gcaataagctctacatctggcagat

SEQ ID NO: 3787651 - DNA, 25 bp, Homo sapien
taggtctagcaataacgtaacttct

SEQ ID NO: 3787652 - DNA, 25 bp, Homo sapien
cgtttcttctctcaatgtacctgca

SEQ ID NO: 3787653 - DNA, 25 bp, Homo sapien
ctttcaccaatggacttcagcgagg

SEQ ID NO: 3787654 - DNA, 25 bp, Homo sapien
accaatggacttcagcgaggaagaa

SEQ ID NO: 3787655 - DNA, 25 bp, Homo sapien
ggtgggcagggcaccgctgggtatg

SEQ ID NO: 3787656 - DNA, 25 bp, Homo sapien
gcagggcaccgctgggtatggaaaa

SEQ ID NO: 3787657 - DNA, 25 bp, Homo sapien
tgaggtgggatgacccgtaagcccc

SEQ ID NO: 3787658 - DNA, 25 bp, Homo sapien
actcagactggacgacagcgcgaga

SEQ ID NO: 3787659 - DNA, 25 bp, Homo sapien
tgagatggttcagcgttgttcccaa

SEQ ID NO: 3787660 - DNA, 25 bp, Homo sapien
taaatttccagtctcaagcgccgct

SEQ ID NO: 3787661 - DNA, 25 bp, Homo sapien
agcagcggcccgaaggcgccggagc

SEQ ID NO: 3787662 - DNA, 25 bp, Homo sapien
gcgcggcgtccggtgaggggcagcg

SEQ ID NO: 3787663 - DNA, 25 bp, Homo sapien
tgccccgcggagggccggtggcgcg

SEQ ID NO: 3787664 - DNA, 25 bp, Homo sapien
gctcggttccggcttccagcagcgg

SEQ ID NO: 3787665 - DNA, 25 bp, Homo sapien
acatctgaaactagcaccgcggatc

SEQ ID NO: 3787666 - DNA, 25 bp, Homo sapien
tagcgctctccagcaaggtttagtg

SEQ ID NO: 3787667 - DNA, 25 bp, Homo sapien
tttttcagctgtcacgaccggaggg

SEQ ID NO: 3787668 - DNA, 25 bp, Homo sapien
tcagaagtcgatacaggcccttcgg

SEQ ID NO: 3787669 - DNA, 25 bp, Homo sapien
ttcatcgaagagtcaccccagtagc

SEQ ID NO: 3787670 - DNA, 25 bp, Homo sapien
ccagtagcggtgatcacagacatga

SEQ ID NO: 3787671 - DNA, 25 bp, Homo sapien
aaaatgttgcggagatctgatagtc

SEQ ID NO: 3787672 - DNA, 25 bp, Homo sapien
gacatgaaaagatgcgagacgccgg

SEQ ID NO: 3787673 - DNA, 25 bp, Homo sapien
cattttatagtgagatatttagtca

SEQ ID NO: 3787674 - DNA, 25 bp, Homo sapien
gctaatgatgtgtttggcactaaga

SEQ ID NO: 3787675 - DNA, 25 bp, Homo sapien
taatgatgtgtttggcactaagatg

SEQ ID NO: 3787676 - DNA, 25 bp, Homo sapien
tattgctaatgatgtgtttggcact

SEQ ID NO: 3787677 - DNA, 25 bp, Homo sapien
agtcacggtgctgtgcaacattgca

SEQ ID NO: 3787678 - DNA, 25 bp, Homo sapien
gaataacaccgcaataaatggcact

SEQ ID NO: 3787679 - DNA, 25 bp, Homo sapien
gatggaagatacctgatacgagaca

SEQ ID NO: 3787680 - DNA, 25 bp, Homo sapien
gacttcttgtgaaagtggccactca

SEQ ID NO: 3787681 - DNA, 25 bp, Homo sapien
taagggaattgagcatctgtggaat

SEQ ID NO: 3787682 - DNA, 25 bp, Homo sapien
ggaatttggtatcagctggagcatc

SEQ ID NO: 3787683 - DNA, 25 bp, Homo sapien
acccagccttagaggtgattttaag

SEQ ID NO: 3787684 - DNA, 25 bp, Homo sapien
tactgagacatgactgtacctaaat

SEQ ID NO: 3787685 - DNA, 25 bp, Homo sapien
cttatttgaccgtggaagcatgggt

SEQ ID NO: 3787686 - DNA, 25 bp, Homo sapien
ggtgtacaacaaggatccaatttca

SEQ ID NO: 3787687 - DNA, 25 bp, Homo sapien
cattcttctgcgtgcggctatccag

SEQ ID NO: 3787688 - DNA, 25 bp, Homo sapien
tgtgggagttctacagtctcagacc

SEQ ID NO: 3787689 - DNA, 25 bp, Homo sapien
aattttgataggtataagtcacggt

SEQ ID NO: 3787690 - DNA, 25 bp, Homo sapien
taggtgtttatatcctgactcaggt

SEQ ID NO: 3787691 - DNA, 25 bp, Homo sapien
ctaataacaactggtaatataggtg

SEQ ID NO: 3787692 - DNA, 25 bp, Homo sapien
agtcacggttatttaagttgaacag

SEQ ID NO: 3787693 - DNA, 25 bp, Homo sapien
gaactgggtactcgccactcaatta

SEQ ID NO: 3787694 - DNA, 25 bp, Homo sapien
cataaacgatttacattagagcacg

SEQ ID NO: 3787695 - DNA, 25 bp, Homo sapien
tacaaggtgatgatcagctacagct

SEQ ID NO: 3787696 - DNA, 25 bp, Homo sapien
taatggaatttgaccctgtgggaaa

SEQ ID NO: 3787697 - DNA, 25 bp, Homo sapien
ccatccaatctgaaagtagaagaaa

SEQ ID NO: 3787698 - DNA, 25 bp, Homo sapien
aatattatttgaatagaggcttgtt

SEQ ID NO: 3787699 - DNA, 25 bp, Homo sapien
gttttctgaaacaccatccaatctg

SEQ ID NO: 3787700 - DNA, 25 bp, Homo sapien
tgtgcccagcttagtatacagtatt

SEQ ID NO: 3787701 - DNA, 25 bp, Homo sapien
gaaagcaggagcacaatctagaatc

SEQ ID NO: 3787702 - DNA, 25 bp, Homo sapien
tgcctaataaagcttggaaagtcag

SEQ ID NO: 3787703 - DNA, 25 bp, Homo sapien
ggtgtcttataccagctttggcata

SEQ ID NO: 3787704 - DNA, 25 bp, Homo sapien
gccttagacgacgtaggagacttga

SEQ ID NO: 3787705 - DNA, 25 bp, Homo sapien
gatgaggtcccactttatagcccaa

SEQ ID NO: 3787706 - DNA, 25 bp, Homo sapien
gacaattctctacatcactgggcca

SEQ ID NO: 3787707 - DNA, 25 bp, Homo sapien
ggtaccaccacaccgttgtagagat

SEQ ID NO: 3787708 - DNA, 25 bp, Homo sapien
gaattggaacttgtaccttcctgca

SEQ ID NO: 3787709 - DNA, 25 bp, Homo sapien
taggagtgatgaaaggccaaggaca

SEQ ID NO: 3787710 - DNA, 25 bp, Homo sapien
gtacagcattcagagtaacagagga

SEQ ID NO: 3787711 - DNA, 25 bp, Homo sapien
gatcttgggaaggtactgacctgta

SEQ ID NO: 3787712 - DNA, 25 bp, Homo sapien
gaagaagatcttgggaaggtactga

SEQ ID NO: 3787713 - DNA, 25 bp, Homo sapien
attttattcaggggcaaatctgcac

SEQ ID NO: 3787714 - DNA, 25 bp, Homo sapien
tattgattgcgtaggtataccttca

SEQ ID NO: 3787715 - DNA, 25 bp, Homo sapien
gcttaaagcttgttcttgactacca

SEQ ID NO: 3787716 - DNA, 25 bp, Homo sapien
tcctagataggcaaatgatgagtca

SEQ ID NO: 3787717 - DNA, 25 bp, Homo sapien
catattggcagagtgttaccttgtg

SEQ ID NO: 3787718 - DNA, 25 bp, Homo sapien
gacatttcaggttagtactccagta

SEQ ID NO: 3787719 - DNA, 25 bp, Homo sapien
catgaacctgtctctcctcgaagtc

SEQ ID NO: 3787720 - DNA, 25 bp, Homo sapien
tgacaagcagcaaggtcatgaacct

SEQ ID NO: 3787721 - DNA, 25 bp, Homo sapien
tactccagtagttaagcaaggacca

SEQ ID NO: 3787722 - DNA, 25 bp, Homo sapien
caagccagcctgattatgcctaatt

SEQ ID NO: 3787723 - DNA, 25 bp, Homo sapien
tactctctgagtaacaacttgggtt

SEQ ID NO: 3787724 - DNA, 25 bp, Homo sapien
cagattgctctgaaagtagttctaa

SEQ ID NO: 3787725 - DNA, 25 bp, Homo sapien
tatacagtcaaatatcaagccagcc

SEQ ID NO: 3787726 - DNA, 25 bp, Homo sapien
ttgtagagtgaagccatgggaagcc

SEQ ID NO: 3787727 - DNA, 25 bp, Homo sapien
gactttggaccgttaagctgggcaa

SEQ ID NO: 3787728 - DNA, 25 bp, Homo sapien
ggacttaaaagtactgctggacagg

SEQ ID NO: 3787729 - DNA, 25 bp, Homo sapien
caagcgccaggcgatttgtgtctaa

SEQ ID NO: 3787730 - DNA, 25 bp, Homo sapien
gccaggaattgttacccatttccaa

SEQ ID NO: 3787731 - DNA, 25 bp, Homo sapien
cgcgggaaataattcactctgcgca

SEQ ID NO: 3787732 - DNA, 25 bp, Homo sapien
caacgcgggaaataattcactctgc

SEQ ID NO: 3787733 - DNA, 25 bp, Homo sapien
gagagggcaacgcgggaaataattc

SEQ ID NO: 3787734 - DNA, 25 bp, Homo sapien
tcactaggtcacctggtttcacagg

SEQ ID NO: 3787735 - DNA, 25 bp, Homo sapien
gccaatgagaaatgagatgctgctt

SEQ ID NO: 3787736 - DNA, 25 bp, Homo sapien
caggtttcacctgtggtttagaaga

SEQ ID NO: 3787737 - DNA, 25 bp, Homo sapien
cgttttaggagtaaataagccaatg

SEQ ID NO: 3787738 - DNA, 25 bp, Homo sapien
ggacagcacccacatgttgagagca

SEQ ID NO: 3787739 - DNA, 25 bp, Homo sapien
aggactgcgtcacaggctgcaagca

SEQ ID NO: 3787740 - DNA, 25 bp, Homo sapien
gctgcaagcacaggagagttatcca

SEQ ID NO: 3787741 - DNA, 25 bp, Homo sapien
tagtcaccttgttcgcagagctacc

SEQ ID NO: 3787742 - DNA, 25 bp, Homo sapien
taacagcccttgtggcttgcagagg

SEQ ID NO: 3787743 - DNA, 25 bp, Homo sapien
taaagcataagctagcccagcgagg

SEQ ID NO: 3787744 - DNA, 25 bp, Homo sapien
gatttctgacggctgcggacttcaa

SEQ ID NO: 3787745 - DNA, 25 bp, Homo sapien
cccagcgaggatgatgtgctacagt

SEQ ID NO: 3787746 - DNA, 25 bp, Homo sapien
tgaactacacttactgaacagcttg

SEQ ID NO: 3787747 - DNA, 25 bp, Homo sapien
gaaggccttttgagttctgctggac

SEQ ID NO: 3787748 - DNA, 25 bp, Homo sapien
aagctggaattcgtatgacggagtc

SEQ ID NO: 3787749 - DNA, 25 bp, Homo sapien
tgacggagtcttatctgaactacac

SEQ ID NO: 3787750 - DNA, 25 bp, Homo sapien
cattctggctataggataactctgg

SEQ ID NO: 3787751 - DNA, 25 bp, Homo sapien
tttgatccaggtgttccggaatacc

SEQ ID NO: 3787752 - DNA, 25 bp, Homo sapien
gatcaatttctggagttgacctagc

SEQ ID NO: 3787753 - DNA, 25 bp, Homo sapien
gctttcatctaagaaggagatctgg

SEQ ID NO: 3787754 - DNA, 25 bp, Homo sapien
aatgcagaactggtatgtggtaaac

SEQ ID NO: 3787755 - DNA, 25 bp, Homo sapien
agtgtagccaaagtgggcaagtgct

SEQ ID NO: 3787756 - DNA, 25 bp, Homo sapien
ttagaggcatgaaagtgatgacaac

SEQ ID NO: 3787757 - DNA, 25 bp, Homo sapien
ccattaatgggattataagttgata

SEQ ID NO: 3787758 - DNA, 25 bp, Homo sapien
ctttatcataataattttcctccat

SEQ ID NO: 3787759 - DNA, 25 bp, Homo sapien
tcagcagcagccgaaagagggtgct

SEQ ID NO: 3787760 - DNA, 25 bp, Homo sapien
tgatgcacgcgtcccatcagcagca

SEQ ID NO: 3787761 - DNA, 25 bp, Homo sapien
tctgggtccactgatctcttgatgc

SEQ ID NO: 3787762 - DNA, 25 bp, Homo sapien
aaagagggtgctcgggcgggagtga

SEQ ID NO: 3787763 - DNA, 25 bp, Homo sapien
tctaggagccgcagggatggcatcc

SEQ ID NO: 3787764 - DNA, 25 bp, Homo sapien
tcagccacgtgaggtcaatgttcat

SEQ ID NO: 3787765 - DNA, 25 bp, Homo sapien
tcccggtgccaggtgtaaatgcgcc

SEQ ID NO: 3787766 - DNA, 25 bp, Homo sapien
gtaaatgcgccccagcaacacgtgg

SEQ ID NO: 3787767 - DNA, 25 bp, Homo sapien
cacagagagacaaatgctgatgtca

SEQ ID NO: 3787768 - DNA, 25 bp, Homo sapien
acattttgtgaagtaaaataagaca

SEQ ID NO: 3787769 - DNA, 25 bp, Homo sapien
aaatgctgatgtcacttatatgtgg

SEQ ID NO: 3787770 - DNA, 25 bp, Homo sapien
atttgtgacaacattgaacctggag

SEQ ID NO: 3787771 - DNA, 25 bp, Homo sapien
aaaagaaacgtttcatgaatttgtg

SEQ ID NO: 3787772 - DNA, 25 bp, Homo sapien
gtatatgtattgctgaagcgagcac

SEQ ID NO: 3787773 - DNA, 25 bp, Homo sapien
aaagaaacgtttcatgaatttgtgt

SEQ ID NO: 3787774 - DNA, 25 bp, Homo sapien
ttagtatatgtattgctgaagcgag

SEQ ID NO: 3787775 - DNA, 25 bp, Homo sapien
gctactataaaccaaagagtgtaaa

SEQ ID NO: 3787776 - DNA, 25 bp, Homo sapien
tattgctactataaaccaaagagtg

SEQ ID NO: 3787777 - DNA, 25 bp, Homo sapien
aattggttgttcgttggactgtata

SEQ ID NO: 3787778 - DNA, 25 bp, Homo sapien
ctgtatatgagggaaaattattgct

SEQ ID NO: 3787779 - DNA, 25 bp, Homo sapien
gctaactttgacaactcggtcaaca

SEQ ID NO: 3787780 - DNA, 25 bp, Homo sapien
cactctgtatgcaggatggaaaacc

SEQ ID NO: 3787781 - DNA, 25 bp, Homo sapien
aaaccctgctaactttgacaactcg

SEQ ID NO: 3787782 - DNA, 25 bp, Homo sapien
aactcggtcaacagattcaatgcac

SEQ ID NO: 3787783 - DNA, 25 bp, Homo sapien
tatatttgatgcaaagtgagaccct

SEQ ID NO: 3787784 - DNA, 25 bp, Homo sapien
gagttcaagcatgttcaccccgaaa

SEQ ID NO: 3787785 - DNA, 25 bp, Homo sapien
ccttgtgactgggtgcacaatgaag

SEQ ID NO: 3787786 - DNA, 25 bp, Homo sapien
ctgtttcctgtaccatgggatggag

SEQ ID NO: 3787787 - DNA, 25 bp, Homo sapien
gtttctctgtaagagtctctttcat

SEQ ID NO: 3787788 - DNA, 25 bp, Homo sapien
tcccttgccttatctgtgagtctcg

SEQ ID NO: 3787789 - DNA, 25 bp, Homo sapien
ctgtgagtctcgtttctctgtaaga

SEQ ID NO: 3787790 - DNA, 25 bp, Homo sapien
gccttatctgtgagtctcgtttctc

SEQ ID NO: 3787791 - DNA, 25 bp, Homo sapien
tacccatcacgttggagacaccagc

SEQ ID NO: 3787792 - DNA, 25 bp, Homo sapien
tctttgagcgttgtagcttcacagg

SEQ ID NO: 3787793 - DNA, 25 bp, Homo sapien
taagacgcagctctgggagatcagg

SEQ ID NO: 3787794 - DNA, 25 bp, Homo sapien
tccatcggacatttacccatcacgt

SEQ ID NO: 3787795 - DNA, 25 bp, Homo sapien
tgtatttataaagcgacatttccac

SEQ ID NO: 3787796 - DNA, 25 bp, Homo sapien
ttgtatttataaagcgacatttcca

SEQ ID NO: 3787797 - DNA, 25 bp, Homo sapien
tttggagaggtacacagaaccgtga

SEQ ID NO: 3787798 - DNA, 25 bp, Homo sapien
gacaaggtcgggtcactctgctcat

SEQ ID NO: 3787799 - DNA, 25 bp, Homo sapien
cagcagctggctgaagaaatccaag

SEQ ID NO: 3787800 - DNA, 25 bp, Homo sapien
aatggaatcctaaagtggcctcagc

SEQ ID NO: 3787801 - DNA, 25 bp, Homo sapien
tcaaaaaatatatgccccacaaaac

SEQ ID NO: 3787802 - DNA, 25 bp, Homo sapien
tggagcccgcacctgtgcatactct

SEQ ID NO: 3787803 - DNA, 25 bp, Homo sapien
gctgccgagcagatggagcccgcac

SEQ ID NO: 3787804 - DNA, 25 bp, Homo sapien
cgagcagatggagcccgcacctgtg

SEQ ID NO: 3787805 - DNA, 25 bp, Homo sapien
tgcacagcaaaatcagggacacagt

SEQ ID NO: 3787806 - DNA, 25 bp, Homo sapien
cctgagaggatcatgcgtggacacg

SEQ ID NO: 3787807 - DNA, 25 bp, Homo sapien
tgatttgaaaactagggtccagctc

SEQ ID NO: 3787808 - DNA, 25 bp, Homo sapien
taatggatggtttgccctggttggc

SEQ ID NO: 3787809 - DNA, 25 bp, Homo sapien
gaggaagagctgtggagccctcaag

SEQ ID NO: 3787810 - DNA, 25 bp, Homo sapien
acctgctgctcaccacgaaatgcct

SEQ ID NO: 3787811 - DNA, 25 bp, Homo sapien
aagagctgtggagccctcaagagcc

SEQ ID NO: 3787812 - DNA, 25 bp, Homo sapien
tgctcaccacgaaatgcctcctcaa

SEQ ID NO: 3787813 - DNA, 25 bp, Homo sapien
gaagttgtaaatcagacgccacaca

SEQ ID NO: 3787814 - DNA, 25 bp, Homo sapien
gccgcaagtccctctgaaagcatgg

SEQ ID NO: 3787815 - DNA, 25 bp, Homo sapien
tggagatcttccagtgcacaccacg

SEQ ID NO: 3787816 - DNA, 25 bp, Homo sapien
aatgagcaggtcttccgatcaggac

SEQ ID NO: 3787817 - DNA, 25 bp, Homo sapien
gaagctgcagccagtggtttccgat

SEQ ID NO: 3787818 - DNA, 25 bp, Homo sapien
tggtttccgatctgcctgaactgcc

SEQ ID NO: 3787819 - DNA, 25 bp, Homo sapien
cagctggagagggacatcccgaagc

SEQ ID NO: 3787820 - DNA, 25 bp, Homo sapien
ctcagcgagcaggtctctctgcagg

SEQ ID NO: 3787821 - DNA, 25 bp, Homo sapien
gacacagttttcagagggagatcct

SEQ ID NO: 3787822 - DNA, 25 bp, Homo sapien
gaaaagatgtgtccccagacttggc

SEQ ID NO: 3787823 - DNA, 25 bp, Homo sapien
cagctgattgcgaggccaagttcca

SEQ ID NO: 3787824 - DNA, 25 bp, Homo sapien
tgaaaacacatgaagcagcctcagg

SEQ ID NO: 3787825 - DNA, 25 bp, Homo sapien
tccttgattaggtggaccaactgct

SEQ ID NO: 3787826 - DNA, 25 bp, Homo sapien
gacaaacgggtgttggctcagacac

SEQ ID NO: 3787827 - DNA, 25 bp, Homo sapien
tgctacaacccatagacaaacgggt

SEQ ID NO: 3787828 - DNA, 25 bp, Homo sapien
ttttcatgtcctgtgctctcggcac

SEQ ID NO: 3787829 - DNA, 25 bp, Homo sapien
gagactctaccaacttcaaaaactg

SEQ ID NO: 3787830 - DNA, 25 bp, Homo sapien
tgaacgcgctaatgaaacggacccc

SEQ ID NO: 3787831 - DNA, 25 bp, Homo sapien
tactctttcagcagttaagcgggcc

SEQ ID NO: 3787832 - DNA, 25 bp, Homo sapien
gaagaatgttatggccaggattgaa

SEQ ID NO: 3787833 - DNA, 25 bp, Homo sapien
tctttgcgccaagggtaatttagaa

SEQ ID NO: 3787834 - DNA, 25 bp, Homo sapien
aattagtaactagatccctggtctc

SEQ ID NO: 3787835 - DNA, 25 bp, Homo sapien
gaaattctagatctgtattctctcc

SEQ ID NO: 3787836 - DNA, 25 bp, Homo sapien
gagtggtaaaccagatctttgcgcc

SEQ ID NO: 3787837 - DNA, 25 bp, Homo sapien
acaaatgcttcttgttctccctcat

SEQ ID NO: 3787838 - DNA, 25 bp, Homo sapien
ttgtttctgtgaccctctgtcacaa

SEQ ID NO: 3787839 - DNA, 25 bp, Homo sapien
cctggctccttgtttctgtgaccct

SEQ ID NO: 3787840 - DNA, 25 bp, Homo sapien
aaaggacaaatgcttcttgttctcc

SEQ ID NO: 3787841 - DNA, 25 bp, Homo sapien
tcgggaggccgaaacatgagactca

SEQ ID NO: 3787842 - DNA, 25 bp, Homo sapien
catttatgtagtgccctcctgacct

SEQ ID NO: 3787843 - DNA, 25 bp, Homo sapien
taataggtcaggagctcatacaagt

SEQ ID NO: 3787844 - DNA, 25 bp, Homo sapien
cccatggcaggagttgataggacaa

SEQ ID NO: 3787845 - DNA, 25 bp, Homo sapien
cgatagaatttggatggatgtttac

SEQ ID NO: 3787846 - DNA, 25 bp, Homo sapien
ctaaagaggaaagatctctcttctg

SEQ ID NO: 3787847 - DNA, 25 bp, Homo sapien
aagaaatgaaggcttggaacagcga

SEQ ID NO: 3787848 - DNA, 25 bp, Homo sapien
ggatgtttactctcacagagctcaa

SEQ ID NO: 3787849 - DNA, 25 bp, Homo sapien
tagagcttgtttatcagccagtctg

SEQ ID NO: 3787850 - DNA, 25 bp, Homo sapien
cacgtctactaaatctagagcttgt

SEQ ID NO: 3787851 - DNA, 25 bp, Homo sapien
ttgtaaccacgtctactaaatctag

SEQ ID NO: 3787852 - DNA, 25 bp, Homo sapien
gcttgtttatcagccagtctgcagc

SEQ ID NO: 3787853 - DNA, 25 bp, Homo sapien
tattggtacacattctgtttctctt

SEQ ID NO: 3787854 - DNA, 25 bp, Homo sapien
aatgggaaagctggcctcctgcgcc

SEQ ID NO: 3787855 - DNA, 25 bp, Homo sapien
aggaatgggaaagctggcctcctgc

SEQ ID NO: 3787856 - DNA, 25 bp, Homo sapien
tttattggtacacattctgtttctc

SEQ ID NO: 3787857 - DNA, 25 bp, Homo sapien
gcttggcattcaatcgatgttatca

SEQ ID NO: 3787858 - DNA, 25 bp, Homo sapien
gcattcaatcgatgttatcaaaacc

SEQ ID NO: 3787859 - DNA, 25 bp, Homo sapien
tcaatcgatgttatcaaaacctgtg

SEQ ID NO: 3787860 - DNA, 25 bp, Homo sapien
tggcattcaatcgatgttatcaaaa

SEQ ID NO: 3787861 - DNA, 25 bp, Homo sapien
ggagtttatccctttcccatatgag

SEQ ID NO: 3787862 - DNA, 25 bp, Homo sapien
tcttgacaagtcgaagcctctaagt

SEQ ID NO: 3787863 - DNA, 25 bp, Homo sapien
gatctgcttcagaacaggagaggaa

SEQ ID NO: 3787864 - DNA, 25 bp, Homo sapien
tagacagagcactggagagtgtccc

SEQ ID NO: 3787865 - DNA, 25 bp, Homo sapien
tctttccacaacccgtggctggccc

SEQ ID NO: 3787866 - DNA, 25 bp, Homo sapien
tccacaacccgtggctggccctcat

SEQ ID NO: 3787867 - DNA, 25 bp, Homo sapien
ctctttccacaacccgtggctggcc

SEQ ID NO: 3787868 - DNA, 25 bp, Homo sapien
tttccacaacccgtggctggccctc

SEQ ID NO: 3787869 - DNA, 25 bp, Homo sapien
tgcttgtggtaaaatgatatagacg

SEQ ID NO: 3787870 - DNA, 25 bp, Homo sapien
gatatagacgatatcgtcttgaggg

SEQ ID NO: 3787871 - DNA, 25 bp, Homo sapien
ttgcttgtggtaaaatgatatagac

SEQ ID NO: 3787872 - DNA, 25 bp, Homo sapien
aaatgatatagacgatatcgtcttg

SEQ ID NO: 3787873 - DNA, 25 bp, Homo sapien
taacaccgcaggatctttcccaaga

SEQ ID NO: 3787874 - DNA, 25 bp, Homo sapien
gatactctagatgtacaagcttgaa

SEQ ID NO: 3787875 - DNA, 25 bp, Homo sapien
tttcccaagagctgttgcatcactg

SEQ ID NO: 3787876 - DNA, 25 bp, Homo sapien
tgccatttagcaggagatactctag

SEQ ID NO: 3787877 - DNA, 25 bp, Homo sapien
ttctgagtttggatgagatcaggtg

SEQ ID NO: 3787878 - DNA, 25 bp, Homo sapien
tctgagtttggatgagatcaggtgc

SEQ ID NO: 3787879 - DNA, 25 bp, Homo sapien
gattattaaacgaaggagtcccgca

SEQ ID NO: 3787880 - DNA, 25 bp, Homo sapien
ttgcaaatgcaacggcgagtcagcc

SEQ ID NO: 3787881 - DNA, 25 bp, Homo sapien
gcgtttaagcccagaaagaattgtc

SEQ ID NO: 3787882 - DNA, 25 bp, Homo sapien
gagtcagcctggaaagtcggcacca

SEQ ID NO: 3787883 - DNA, 25 bp, Homo sapien
actgaaatgtgcattaagatctttg

SEQ ID NO: 3787884 - DNA, 25 bp, Homo sapien
tgtggaaaatcatgggtttcggctc

SEQ ID NO: 3787885 - DNA, 25 bp, Homo sapien
tgaaatgtgcattaagatctttggc

SEQ ID NO: 3787886 - DNA, 25 bp, Homo sapien
gggtttcggctccacagcttcacac

SEQ ID NO: 3787887 - DNA, 25 bp, Homo sapien
tgagcagtctcttgcctacatcaca

SEQ ID NO: 3787888 - DNA, 25 bp, Homo sapien
caccctcggagtgagggcttgagca

SEQ ID NO: 3787889 - DNA, 25 bp, Homo sapien
tcaaaatctttgtgggatattccag

SEQ ID NO: 3787890 - DNA, 25 bp, Homo sapien
tcacacagaggtggtatggttttaa

SEQ ID NO: 3787891 - DNA, 25 bp, Homo sapien
ctgcattggagaccacattcccaga

SEQ ID NO: 3787892 - DNA, 25 bp, Homo sapien
catctgggtctcctttgggcactgg

SEQ ID NO: 3787893 - DNA, 25 bp, Homo sapien
cattcccagatagttcctgaggcag

SEQ ID NO: 3787894 - DNA, 25 bp, Homo sapien
cagggggcagaaaaccatctgggtc

SEQ ID NO: 3787895 - DNA, 25 bp, Homo sapien
ttggcttctagtgcaccctggctgg

SEQ ID NO: 3787896 - DNA, 25 bp, Homo sapien
cctggagagttacacagttggcttc

SEQ ID NO: 3787897 - DNA, 25 bp, Homo sapien
tagccacatggtgcatagagcctgg

SEQ ID NO: 3787898 - DNA, 25 bp, Homo sapien
gcacctattgactcatcctggagag

SEQ ID NO: 3787899 - DNA, 25 bp, Homo sapien
cattggaaagccagaggtaccgaga

SEQ ID NO: 3787900 - DNA, 25 bp, Homo sapien
caaagaactaggaaacaatctgaag

SEQ ID NO: 3787901 - DNA, 25 bp, Homo sapien
ctagtgtggagcattggaaagccag

SEQ ID NO: 3787902 - DNA, 25 bp, Homo sapien
gcaaagaactaggaaacaatctgaa

SEQ ID NO: 3787903 - DNA, 25 bp, Homo sapien
tgcttgctcatgatccactggactg

SEQ ID NO: 3787904 - DNA, 25 bp, Homo sapien
cactggactggacgccatacctaat

SEQ ID NO: 3787905 - DNA, 25 bp, Homo sapien
caatggcatgccttgttgccaggct

SEQ ID NO: 3787906 - DNA, 25 bp, Homo sapien
catacctaattgcaaaagtcgctgg

SEQ ID NO: 3787907 - DNA, 25 bp, Homo sapien
tagactctcccaaatgggcgctctt

SEQ ID NO: 3787908 - DNA, 25 bp, Homo sapien
actctcccaaatgggcgctctttca

SEQ ID NO: 3787909 - DNA, 25 bp, Homo sapien
cccaaatgggcgctctttcatgttt

SEQ ID NO: 3787910 - DNA, 25 bp, Homo sapien
ccaaatgggcgctctttcatgtttt

SEQ ID NO: 3787911 - DNA, 25 bp, Homo sapien
tcatcatatcgtcaacagccagaaa

SEQ ID NO: 3787912 - DNA, 25 bp, Homo sapien
ttcattccactagagcggctccaag

SEQ ID NO: 3787913 - DNA, 25 bp, Homo sapien
cagccagaaacatagatacaaccgg

SEQ ID NO: 3787914 - DNA, 25 bp, Homo sapien
gtgcaggcctcagcgttccgtatcg

SEQ ID NO: 3787915 - DNA, 25 bp, Homo sapien
ttcatgcgtttcaggaagctgtctc

SEQ ID NO: 3787916 - DNA, 25 bp, Homo sapien
ccttcatgcgtttcaggaagctgtc

SEQ ID NO: 3787917 - DNA, 25 bp, Homo sapien
catgcgtttcaggaagctgtctcgg

SEQ ID NO: 3787918 - DNA, 25 bp, Homo sapien
atgcgtttcaggaagctgtctcggc

SEQ ID NO: 3787919 - DNA, 25 bp, Homo sapien
caaaggaacaactccatgttttcta

SEQ ID NO: 3787920 - DNA, 25 bp, Homo sapien
atatgtggccaaaggaacaactcca

SEQ ID NO: 3787921 - DNA, 25 bp, Homo sapien
gcccctcctctttctctttgtgttc

SEQ ID NO: 3787922 - DNA, 25 bp, Homo sapien
ctcctctttctctttgtgttcgtca

SEQ ID NO: 3787923 - DNA, 25 bp, Homo sapien
ccctcctctttctctttgtgttcgt

SEQ ID NO: 3787924 - DNA, 25 bp, Homo sapien
atatcgggtgcccctcctctttctc

SEQ ID NO: 3787925 - DNA, 25 bp, Homo sapien
attactggaagatggcggtgccggc

SEQ ID NO: 3787926 - DNA, 25 bp, Homo sapien
ctttggcgaattactggaagatggc

SEQ ID NO: 3787927 - DNA, 25 bp, Homo sapien
gcgaattactggaagatggcggtgc

SEQ ID NO: 3787928 - DNA, 25 bp, Homo sapien
cgaattactggaagatggcggtgcc

SEQ ID NO: 3787929 - DNA, 25 bp, Homo sapien
agaatgcagtaggaccaggtgactg

SEQ ID NO: 3787930 - DNA, 25 bp, Homo sapien
tgatgccagcaccagggatccaggt

SEQ ID NO: 3787931 - DNA, 25 bp, Homo sapien
taaaaccagtggcatgtctgtcatt

SEQ ID NO: 3787932 - DNA, 25 bp, Homo sapien
agggtccattggaaatacatccttt

SEQ ID NO: 3787933 - DNA, 25 bp, Homo sapien
aagccacctttcaaggaatcctggg

SEQ ID NO: 3787934 - DNA, 25 bp, Homo sapien
taggtctgggacctaaaccagattc

SEQ ID NO: 3787935 - DNA, 25 bp, Homo sapien
caattagagttgatatgtggatgcc

SEQ ID NO: 3787936 - DNA, 25 bp, Homo sapien
tgagccctggaagctataggtctgg

SEQ ID NO: 3787937 - DNA, 25 bp, Homo sapien
gcactgtcacccatggttttaatga

SEQ ID NO: 3787938 - DNA, 25 bp, Homo sapien
tctttgtcagttccaaaattgcaaa

SEQ ID NO: 3787939 - DNA, 25 bp, Homo sapien
gtagtgaagcttatcagtatttgtc

SEQ ID NO: 3787940 - DNA, 25 bp, Homo sapien
tgcccatagggataatcaactctcc

SEQ ID NO: 3787941 - DNA, 25 bp, Homo sapien
ccctccccctgcacacacagcccct

SEQ ID NO: 3787942 - DNA, 25 bp, Homo sapien
cagccctccccctgcacacacagcc

SEQ ID NO: 3787943 - DNA, 25 bp, Homo sapien
caggccagccctccccctgcacaca

SEQ ID NO: 3787944 - DNA, 25 bp, Homo sapien
tccccctgcacacacagcccctcac

SEQ ID NO: 3787945 - DNA, 25 bp, Homo sapien
ttgatggtcctgacagcccattctg

SEQ ID NO: 3787946 - DNA, 25 bp, Homo sapien
ctgacagcccattctgggccaccat

SEQ ID NO: 3787947 - DNA, 25 bp, Homo sapien
tgatggtcctgacagcccattctgg

SEQ ID NO: 3787948 - DNA, 25 bp, Homo sapien
ctcttgatggtcctgacagcccatt

SEQ ID NO: 3787949 - DNA, 25 bp, Homo sapien
catacggtaatgtcagctcggccaa

SEQ ID NO: 3787950 - DNA, 25 bp, Homo sapien
tctgtaccacgggagcttgtagagc

SEQ ID NO: 3787951 - DNA, 25 bp, Homo sapien
gggaacgccctgattgtctctggaa

SEQ ID NO: 3787952 - DNA, 25 bp, Homo sapien
tattcatgagctcgtgtcaccggga

SEQ ID NO: 3787953 - DNA, 25 bp, Homo sapien
aaggagcttgactgttttctggttt

SEQ ID NO: 3787954 - DNA, 25 bp, Homo sapien
aggagcttgactgttttctggtttc

SEQ ID NO: 3787955 - DNA, 25 bp, Homo sapien
tagactgaagactgcctcctaggaa

SEQ ID NO: 3787956 - DNA, 25 bp, Homo sapien
cgctgtttgcagagtgtagactgaa

SEQ ID NO: 3787957 - DNA, 25 bp, Homo sapien
tcgtacacgaaagtgccaggaccct

SEQ ID NO: 3787958 - DNA, 25 bp, Homo sapien
gaccctcatgttgcacggttccagg

SEQ ID NO: 3787959 - DNA, 25 bp, Homo sapien
taaggtctgcagacgatttgaactg

SEQ ID NO: 3787960 - DNA, 25 bp, Homo sapien
tgcaaaagcgtatttaacgataagt

SEQ ID NO: 3787961 - DNA, 25 bp, Homo sapien
tcagtttcagtaaccgtgcaaaagc

SEQ ID NO: 3787962 - DNA, 25 bp, Homo sapien
gaactgggtgttgcttcagtttcag

SEQ ID NO: 3787963 - DNA, 25 bp, Homo sapien
gagctgaagctatgattgatgatat

SEQ ID NO: 3787964 - DNA, 25 bp, Homo sapien
ctgctgcaggttggaagaaatttag

SEQ ID NO: 3787965 - DNA, 25 bp, Homo sapien
aagctatgattgatgatattttcac

SEQ ID NO: 3787966 - DNA, 25 bp, Homo sapien
ctcattgagatgtctgatgttccac

SEQ ID NO: 3787967 - DNA, 25 bp, Homo sapien
ctcatgtgtgcgtaggaagagcaca

SEQ ID NO: 3787968 - DNA, 25 bp, Homo sapien
tgattctgacacagtgaccgggctg

SEQ ID NO: 3787969 - DNA, 25 bp, Homo sapien
tgactgtagacaggccactcatttt

SEQ ID NO: 3787970 - DNA, 25 bp, Homo sapien
gaagagcacaagcagctgtgtgctg

SEQ ID NO: 3787971 - DNA, 25 bp, Homo sapien
attttggactctggcgctccagcac

SEQ ID NO: 3787972 - DNA, 25 bp, Homo sapien
cattttggactctggcgctccagca

SEQ ID NO: 3787973 - DNA, 25 bp, Homo sapien
gctccagcactgttttcattctttc

SEQ ID NO: 3787974 - DNA, 25 bp, Homo sapien
tctggcgctccagcactgttttcat

SEQ ID NO: 3787975 - DNA, 25 bp, Homo sapien
gggaattacattacacttaagagca

SEQ ID NO: 3787976 - DNA, 25 bp, Homo sapien
tttggccagattccctttatagacc

SEQ ID NO: 3787977 - DNA, 25 bp, Homo sapien
catgtctggtatggaaggaaatcac

SEQ ID NO: 3787978 - DNA, 25 bp, Homo sapien
caatgcgttcaatgttcctgggaga

SEQ ID NO: 3787979 - DNA, 25 bp, Homo sapien
gagactgttaaagggttgatccagg

SEQ ID NO: 3787980 - DNA, 25 bp, Homo sapien
tgctcagggaccattgctgacccat

SEQ ID NO: 3787981 - DNA, 25 bp, Homo sapien
tggagtagaacttgggtcttccaac

SEQ ID NO: 3787982 - DNA, 25 bp, Homo sapien
tccggcctgggagacttttggagta

SEQ ID NO: 3787983 - DNA, 25 bp, Homo sapien
tattgtgctttgtttcaatccgtcc

SEQ ID NO: 3787984 - DNA, 25 bp, Homo sapien
cctttgtctgtaatctacttggaga

SEQ ID NO: 3787985 - DNA, 25 bp, Homo sapien
cagcctggttgaggttgtgttccta

SEQ ID NO: 3787986 - DNA, 25 bp, Homo sapien
gttcctacaggttgcgagtctcagt

SEQ ID NO: 3787987 - DNA, 25 bp, Homo sapien
ttgaattttctaaggaactggagtc

SEQ ID NO: 3787988 - DNA, 25 bp, Homo sapien
agtcttggctagagcttccttgacc

SEQ ID NO: 3787989 - DNA, 25 bp, Homo sapien
agagatcagtcttggctagagcttc

SEQ ID NO: 3787990 - DNA, 25 bp, Homo sapien
gtcataagccctggaaataaagaga

SEQ ID NO: 3787991 - DNA, 25 bp, Homo sapien
ccagttgatggctgcattctctcca

SEQ ID NO: 3787992 - DNA, 25 bp, Homo sapien
attctctccaggcagaaatgcagct

SEQ ID NO: 3787993 - DNA, 25 bp, Homo sapien
ctctccaggcagaaatgcagctttc

SEQ ID NO: 3787994 - DNA, 25 bp, Homo sapien
aggcagaaatgcagctttctctagc

SEQ ID NO: 3787995 - DNA, 25 bp, Homo sapien
ttctctctattgtttttcctccgta

SEQ ID NO: 3787996 - DNA, 25 bp, Homo sapien
tgtgggtttctctctattgtttttc

SEQ ID NO: 3787997 - DNA, 25 bp, Homo sapien
tctctctattgtttttcctccgtac

SEQ ID NO: 3787998 - DNA, 25 bp, Homo sapien
agaatgtcagctctcatgcgggcgg

SEQ ID NO: 3787999 - DNA, 25 bp, Homo sapien
attcccggtgactggtgctgcttga

SEQ ID NO: 3788000 - DNA, 25 bp, Homo sapien
ctagcaagccattcccggtgactgg

SEQ ID NO: 3788001 - DNA, 25 bp, Homo sapien
aggggccacgctgatagccacacgg

SEQ ID NO: 3788002 - DNA, 25 bp, Homo sapien
taaagggacctcatccctctgtgct

SEQ ID NO: 3788003 - DNA, 25 bp, Homo sapien
catgctggacccaccgtatgccttt

SEQ ID NO: 3788004 - DNA, 25 bp, Homo sapien
tctggtagccgtgctttcccatgct

SEQ ID NO: 3788005 - DNA, 25 bp, Homo sapien
tgctctccccgtaaagggacctcat

SEQ ID NO: 3788006 - DNA, 25 bp, Homo sapien
ttcaaggtttaactcatgatgaact

SEQ ID NO: 3788007 - DNA, 25 bp, Homo sapien
tcatgatgaactttcttacattttc

SEQ ID NO: 3788008 - DNA, 25 bp, Homo sapien
catttcaaggtttaactcatgatga

SEQ ID NO: 3788009 - DNA, 25 bp, Homo sapien
tcacatttcaaggtttaactcatga

SEQ ID NO: 3788010 - DNA, 25 bp, Homo sapien
gcgagccaagggtaaaacaatagga

SEQ ID NO: 3788011 - DNA, 25 bp, Homo sapien
taactgtataaagcgagccaagggt

SEQ ID NO: 3788012 - DNA, 25 bp, Homo sapien
ctgtatggacaaggattgttgggta

SEQ ID NO: 3788013 - DNA, 25 bp, Homo sapien
cattcaaatattgtcaaaacaggac

SEQ ID NO: 3788014 - DNA, 25 bp, Homo sapien
tgtttctctattcccctgtccatct

SEQ ID NO: 3788015 - DNA, 25 bp, Homo sapien
gcttttacaaggttattcatggcta

SEQ ID NO: 3788016 - DNA, 25 bp, Homo sapien
caggtagatataaagcttttacaag

SEQ ID NO: 3788017 - DNA, 25 bp, Homo sapien
atggctatttgaatacatcctttat

SEQ ID NO: 3788018 - DNA, 25 bp, Homo sapien
aacccatgaacccatgatcctttga

SEQ ID NO: 3788019 - DNA, 25 bp, Homo sapien
ttctgtcttgaacccatgaacccat

SEQ ID NO: 3788020 - DNA, 25 bp, Homo sapien
tcttgaacccatgaacccatgatcc

SEQ ID NO: 3788021 - DNA, 25 bp, Homo sapien
tgtcttgaacccatgaacccatgat

SEQ ID NO: 3788022 - DNA, 25 bp, Homo sapien
aaaagtctggtccaatgacctttgc

SEQ ID NO: 3788023 - DNA, 25 bp, Homo sapien
ggaaaaattatagcctccaccgtca

SEQ ID NO: 3788024 - DNA, 25 bp, Homo sapien
ttctccagcggtcctcatgctgcca

SEQ ID NO: 3788025 - DNA, 25 bp, Homo sapien
tccaccgtcactaaatccaaaagtc

SEQ ID NO: 3788026 - DNA, 25 bp, Homo sapien
cagggtcaatgagctgtgggtcatt

SEQ ID NO: 3788027 - DNA, 25 bp, Homo sapien
ggaggcagggtcaatgagctgtggg

SEQ ID NO: 3788028 - DNA, 25 bp, Homo sapien
ggtcaatgagctgtgggtcattatt

SEQ ID NO: 3788029 - DNA, 25 bp, Homo sapien
ggcagggtcaatgagctgtgggtca

SEQ ID NO: 3788030 - DNA, 25 bp, Homo sapien
gttttatatgttccactggtgacga

SEQ ID NO: 3788031 - DNA, 25 bp, Homo sapien
gcgttttatatgttccactggtgac

SEQ ID NO: 3788032 - DNA, 25 bp, Homo sapien
cttgcgttttatatgttccactggt

SEQ ID NO: 3788033 - DNA, 25 bp, Homo sapien
tttatatgttccactggtgacgatg

SEQ ID NO: 3788034 - DNA, 25 bp, Homo sapien
gccagtgctgatctcaatgttcatg

SEQ ID NO: 3788035 - DNA, 25 bp, Homo sapien
cattaagcctgcctctaattccagt

SEQ ID NO: 3788036 - DNA, 25 bp, Homo sapien
tgtcctgagattcaagccagtgctg

SEQ ID NO: 3788037 - DNA, 25 bp, Homo sapien
actaaaagtgacaaacatgcctgca

SEQ ID NO: 3788038 - DNA, 25 bp, Homo sapien
actagcaacatctgagtcagctcac

SEQ ID NO: 3788039 - DNA, 25 bp, Homo sapien
gcaacatctgagtcagctcactctc

SEQ ID NO: 3788040 - DNA, 25 bp, Homo sapien
ccatattccaacactagcaacatct

SEQ ID NO: 3788041 - DNA, 25 bp, Homo sapien
ctttccatgagtcatactctagcat

SEQ ID NO: 3788042 - DNA, 25 bp, Homo sapien
gcccaaaagttgtgtctaagcctac

SEQ ID NO: 3788043 - DNA, 25 bp, Homo sapien
ccaaatagggacgagcagtggtcct

SEQ ID NO: 3788044 - DNA, 25 bp, Homo sapien
gagaactgagccgacaaaggtagag

SEQ ID NO: 3788045 - DNA, 25 bp, Homo sapien
agccagttcctgtccgccagggaag

SEQ ID NO: 3788046 - DNA, 25 bp, Homo sapien
ctcccgagtagggcgaggctaattt

SEQ ID NO: 3788047 - DNA, 25 bp, Homo sapien
aagatggttcatttgctaccttgca

SEQ ID NO: 3788048 - DNA, 25 bp, Homo sapien
aagaaaagtactgtaagctgcgtgg

SEQ ID NO: 3788049 - DNA, 25 bp, Homo sapien
cttccttttgatgcggttacaagat

SEQ ID NO: 3788050 - DNA, 25 bp, Homo sapien
gtaagctgcgtggttgtaattggat

SEQ ID NO: 3788051 - DNA, 25 bp, Homo sapien
tgcccataaattacaacagagtctg

SEQ ID NO: 3788052 - DNA, 25 bp, Homo sapien
tacaacaaggaatctagtagcagtc

SEQ ID NO: 3788053 - DNA, 25 bp, Homo sapien
aaagtggtcacaattggcttgggcc

SEQ ID NO: 3788054 - DNA, 25 bp, Homo sapien
caggaggtaggagttttgcccataa

SEQ ID NO: 3788055 - DNA, 25 bp, Homo sapien
cttcctgccacccgtaattttcctg

SEQ ID NO: 3788056 - DNA, 25 bp, Homo sapien
ttcattcacgctgagaaagtttgtc

SEQ ID NO: 3788057 - DNA, 25 bp, Homo sapien
ttcacgctgagaaagtttgtccttc

SEQ ID NO: 3788058 - DNA, 25 bp, Homo sapien
gctgagaaagtttgtccttcctgcc

SEQ ID NO: 3788059 - DNA, 25 bp, Homo sapien
tgtctcttgagaccgtctctggcat

SEQ ID NO: 3788060 - DNA, 25 bp, Homo sapien
aactgctcggggcaagaacatcagt

SEQ ID NO: 3788061 - DNA, 25 bp, Homo sapien
gctcggggcaagaacatcagtctgt

SEQ ID NO: 3788062 - DNA, 25 bp, Homo sapien
ctgtttgtctcttgagaccgtctct

SEQ ID NO: 3788063 - DNA, 25 bp, Homo sapien
ctccagtttcacaatcaacaatgta

SEQ ID NO: 3788064 - DNA, 25 bp, Homo sapien
gtttatgaaaagatcactggagact

SEQ ID NO: 3788065 - DNA, 25 bp, Homo sapien
cactggagactccagtttcacaatc

SEQ ID NO: 3788066 - DNA, 25 bp, Homo sapien
aagatcactggagactccagtttca

SEQ ID NO: 3788067 - DNA, 25 bp, Homo sapien
tcagggaacaagtggtccttcactg

SEQ ID NO: 3788068 - DNA, 25 bp, Homo sapien
tgaagtctaacgaagctctgagctg

SEQ ID NO: 3788069 - DNA, 25 bp, Homo sapien
ggtgtggctcccaaacgtcctcttc

SEQ ID NO: 3788070 - DNA, 25 bp, Homo sapien
acactgactggcagtacggatgaag

SEQ ID NO: 3788071 - DNA, 25 bp, Homo sapien
cactcgggcactaggtaaatgatga

SEQ ID NO: 3788072 - DNA, 25 bp, Homo sapien
tcataagtgccaacgggtaaccaga

SEQ ID NO: 3788073 - DNA, 25 bp, Homo sapien
ggtaaccagaattctatgtcccaga

SEQ ID NO: 3788074 - DNA, 25 bp, Homo sapien
cccagaaactggtggtgcactgaac

SEQ ID NO: 3788075 - DNA, 25 bp, Homo sapien
acacggtgaagatgatacatggaca

SEQ ID NO: 3788076 - DNA, 25 bp, Homo sapien
cagccagacacggtgaagatgatac

SEQ ID NO: 3788077 - DNA, 25 bp, Homo sapien
gccagacacggtgaagatgatacat

SEQ ID NO: 3788078 - DNA, 25 bp, Homo sapien
cagacacggtgaagatgatacatgg

SEQ ID NO: 3788079 - DNA, 25 bp, Homo sapien
ctgctgctgctcgaaactgaaccct

SEQ ID NO: 3788080 - DNA, 25 bp, Homo sapien
cctgtgcgggtgatcccagtctcac

SEQ ID NO: 3788081 - DNA, 25 bp, Homo sapien
aaccctgtgcgggtgatcccagtct

SEQ ID NO: 3788082 - DNA, 25 bp, Homo sapien
ctgctcgaaactgaaccctgtgcgg

SEQ ID NO: 3788083 - DNA, 25 bp, Homo sapien
tccatcatgtaggaaaacctgtaaa

SEQ ID NO: 3788084 - DNA, 25 bp, Homo sapien
tgaatcatcagtcagcaacgaaagg

SEQ ID NO: 3788085 - DNA, 25 bp, Homo sapien
ttcacttgaaggttcagcgtcttgt

SEQ ID NO: 3788086 - DNA, 25 bp, Homo sapien
tgaggactgttctcaccagtctttg

SEQ ID NO: 3788087 - DNA, 25 bp, Homo sapien
gctaaacatttagctctaaaagcca

SEQ ID NO: 3788088 - DNA, 25 bp, Homo sapien
tggtttttccagataagcaggtaat

SEQ ID NO: 3788089 - DNA, 25 bp, Homo sapien
gagaattcaatagtgtttattgcag

SEQ ID NO: 3788090 - DNA, 25 bp, Homo sapien
tattgcaggttcacttaagacagct

SEQ ID NO: 3788091 - DNA, 25 bp, Homo sapien
cagatgacaaccagatctgctcggg

SEQ ID NO: 3788092 - DNA, 25 bp, Homo sapien
cacctttggatagtcaagtcatctc

SEQ ID NO: 3788093 - DNA, 25 bp, Homo sapien
tatttacaaggcaccgtgaggagcg

SEQ ID NO: 3788094 - DNA, 25 bp, Homo sapien
tagagcaggtgtacattcagccttc

SEQ ID NO: 3788095 - DNA, 25 bp, Homo sapien
gcagaggagcaacccaagaaggttt

SEQ ID NO: 3788096 - DNA, 25 bp, Homo sapien
tattgggggccgaagttcccaggca

SEQ ID NO: 3788097 - DNA, 25 bp, Homo sapien
ttgtcatgcagctgcgcagaggagc

SEQ ID NO: 3788098 - DNA, 25 bp, Homo sapien
agagctgggctgtgtcgtttgtcat

SEQ ID NO: 3788099 - DNA, 25 bp, Homo sapien
cgggcacctgaagtgctgtgggggc

SEQ ID NO: 3788100 - DNA, 25 bp, Homo sapien
ggcacctgaagtgctgtgggggccc

SEQ ID NO: 3788101 - DNA, 25 bp, Homo sapien
tgaacgggcacctgaagtgctgtgg

SEQ ID NO: 3788102 - DNA, 25 bp, Homo sapien
gctcctgacactgaacgggcacctg

SEQ ID NO: 3788103 - DNA, 25 bp, Homo sapien
agctgccagattggccacaagtttg

SEQ ID NO: 3788104 - DNA, 25 bp, Homo sapien
tgtctgagaagcaatctcccagact

SEQ ID NO: 3788105 - DNA, 25 bp, Homo sapien
gatgtctgagaagcaatctcccaga

SEQ ID NO: 3788106 - DNA, 25 bp, Homo sapien
acagtagctgccagattggccacaa

SEQ ID NO: 3788107 - DNA, 25 bp, Homo sapien
gagagcacagagttgttctaccaga

SEQ ID NO: 3788108 - DNA, 25 bp, Homo sapien
gggtccccagattagctgcatcacc

SEQ ID NO: 3788109 - DNA, 25 bp, Homo sapien
ttaaccaggatagacatgagagtgt

SEQ ID NO: 3788110 - DNA, 25 bp, Homo sapien
cttcatccctgtaggagggtaggta

SEQ ID NO: 3788111 - DNA, 25 bp, Homo sapien
tcagctgaccacgtggagaggaggc

SEQ ID NO: 3788112 - DNA, 25 bp, Homo sapien
cacgtggagaggaggctctgagagg

SEQ ID NO: 3788113 - DNA, 25 bp, Homo sapien
agctgaccacgtggagaggaggctc

SEQ ID NO: 3788114 - DNA, 25 bp, Homo sapien
accacgtggagaggaggctctgaga

SEQ ID NO: 3788115 - DNA, 25 bp, Homo sapien
gctgacggcgtagggagaaggctct

SEQ ID NO: 3788116 - DNA, 25 bp, Homo sapien
gaaggctctctggtcggctgaccgc

SEQ ID NO: 3788117 - DNA, 25 bp, Homo sapien
ctctgggaggtcagttgaccacgtg

SEQ ID NO: 3788118 - DNA, 25 bp, Homo sapien
gagaggaggctctcggagatcggct

SEQ ID NO: 3788119 - DNA, 25 bp, Homo sapien
ggctcttggaggtcagctgactgca

SEQ ID NO: 3788120 - DNA, 25 bp, Homo sapien
gccgaccatgttgggaggaggctct

SEQ ID NO: 3788121 - DNA, 25 bp, Homo sapien
tcttggaggtcagctgactgcatgg

SEQ ID NO: 3788122 - DNA, 25 bp, Homo sapien
aggaggctctggcaggtcggccgac

SEQ ID NO: 3788123 - DNA, 25 bp, Homo sapien
tattgcggccgtggagctgttccca

SEQ ID NO: 3788124 - DNA, 25 bp, Homo sapien
gcatgtactgctgcctattgcggcc

SEQ ID NO: 3788125 - DNA, 25 bp, Homo sapien
gagactctgggaggtcagctaacca

SEQ ID NO: 3788126 - DNA, 25 bp, Homo sapien
agttctctccggtactacgccacgt

SEQ ID NO: 3788127 - DNA, 25 bp, Homo sapien
cagagcgatcagtcactgaactctg

SEQ ID NO: 3788128 - DNA, 25 bp, Homo sapien
gttttgtagggacatacagcatcat

SEQ ID NO: 3788129 - DNA, 25 bp, Homo sapien
gatgtagttcaagctctgcagctag

SEQ ID NO: 3788130 - DNA, 25 bp, Homo sapien
caagctctgcagctagttttgtagg

SEQ ID NO: 3788131 - DNA, 25 bp, Homo sapien
tcagcaggatgtagttcaagctctg

SEQ ID NO: 3788132 - DNA, 25 bp, Homo sapien
caactgtccgttcccagagctttgg

SEQ ID NO: 3788133 - DNA, 25 bp, Homo sapien
caggtgtttagttcgtaggccagtc

SEQ ID NO: 3788134 - DNA, 25 bp, Homo sapien
tcatgctggcagatcatcactgatg

SEQ ID NO: 3788135 - DNA, 25 bp, Homo sapien
cagtgataacatgaggagcagaaca

SEQ ID NO: 3788136 - DNA, 25 bp, Homo sapien
tctacaaagggtctcaaggaaacag

SEQ ID NO: 3788137 - DNA, 25 bp, Homo sapien
caggacccaggaagtactgctacac

SEQ ID NO: 3788138 - DNA, 25 bp, Homo sapien
tgcactctcccgagcacagagaggt

SEQ ID NO: 3788139 - DNA, 25 bp, Homo sapien
tccacttgcggaagcagcaccattg

SEQ ID NO: 3788140 - DNA, 25 bp, Homo sapien
cgttgacttcaggtcctacctgcat

SEQ ID NO: 3788141 - DNA, 25 bp, Homo sapien
gcgccagcattactggctgagaaat

SEQ ID NO: 3788142 - DNA, 25 bp, Homo sapien
agcaaccagcgccagcattactggc

SEQ ID NO: 3788143 - DNA, 25 bp, Homo sapien
gagaaatctcgttgacttcaggtcc

SEQ ID NO: 3788144 - DNA, 25 bp, Homo sapien
ttatttggaggtggttgtccagaca

SEQ ID NO: 3788145 - DNA, 25 bp, Homo sapien
tttccatgcaactctaggaggagcc

SEQ ID NO: 3788146 - DNA, 25 bp, Homo sapien
cggccgttacagttgtttccatgca

SEQ ID NO: 3788147 - DNA, 25 bp, Homo sapien
gttgccatcgcacatctctaccagt

SEQ ID NO: 3788148 - DNA, 25 bp, Homo sapien
ctatgcaaatgcatcccatgagctt

SEQ ID NO: 3788149 - DNA, 25 bp, Homo sapien
tatgcaaatgcatcccatgagctta

SEQ ID NO: 3788150 - DNA, 25 bp, Homo sapien
atgcaaatgcatcccatgagcttac

SEQ ID NO: 3788151 - DNA, 25 bp, Homo sapien
cagatatccgataactgttctctga

SEQ ID NO: 3788152 - DNA, 25 bp, Homo sapien
tatccgataactgttctctgaagcc

SEQ ID NO: 3788153 - DNA, 25 bp, Homo sapien
tggagatacagatatccgataactg

SEQ ID NO: 3788154 - DNA, 25 bp, Homo sapien
gtcctggagatacagatatccgata

SEQ ID NO: 3788155 - DNA, 25 bp, Homo sapien
taagcaggaatccacattcccaaga

SEQ ID NO: 3788156 - DNA, 25 bp, Homo sapien
tatttccagatattgcccacaggag

SEQ ID NO: 3788157 - DNA, 25 bp, Homo sapien
cccaggttctttcttggaatagcca

SEQ ID NO: 3788158 - DNA, 25 bp, Homo sapien
tagtttagaccttagataagcagga

SEQ ID NO: 3788159 - DNA, 25 bp, Homo sapien
agagtgaatctgacatctccttggg

SEQ ID NO: 3788160 - DNA, 25 bp, Homo sapien
cgagtcaacgtcttctggctcaatt

SEQ ID NO: 3788161 - DNA, 25 bp, Homo sapien
ggtcacaggaatgttcgagtcaacg

SEQ ID NO: 3788162 - DNA, 25 bp, Homo sapien
gaagaagcagatgactcctccgtgc

SEQ ID NO: 3788163 - DNA, 25 bp, Homo sapien
gggacaaattatacactgcccaggc

SEQ ID NO: 3788164 - DNA, 25 bp, Homo sapien
caagaggagaacctgaatagcaaat

SEQ ID NO: 3788165 - DNA, 25 bp, Homo sapien
caaatgaatcttgacaattagcttc

SEQ ID NO: 3788166 - DNA, 25 bp, Homo sapien
gaggagaacctgaatagcaaatgaa

SEQ ID NO: 3788167 - DNA, 25 bp, Homo sapien
ctttggagtgagacgtgtatgttct

SEQ ID NO: 3788168 - DNA, 25 bp, Homo sapien
gtgtatgttctcctataagtcacag

SEQ ID NO: 3788169 - DNA, 25 bp, Homo sapien
tgagacgtgtatgttctcctataag

SEQ ID NO: 3788170 - DNA, 25 bp, Homo sapien
ggagtgagacgtgtatgttctccta

SEQ ID NO: 3788171 - DNA, 25 bp, Homo sapien
gtcacattttggcatctggaagacc

SEQ ID NO: 3788172 - DNA, 25 bp, Homo sapien
tgtaatgtcacattttggcatctgg

SEQ ID NO: 3788173 - DNA, 25 bp, Homo sapien
tggaagaccttatttcctttgccag

SEQ ID NO: 3788174 - DNA, 25 bp, Homo sapien
tggcatctggaagaccttatttcct

SEQ ID NO: 3788175 - DNA, 25 bp, Homo sapien
atttccaatttatgaaccgtgtgtc

SEQ ID NO: 3788176 - DNA, 25 bp, Homo sapien
cacgagccaatctaatttccaattt

SEQ ID NO: 3788177 - DNA, 25 bp, Homo sapien
ttctccacgagccaatctaatttcc

SEQ ID NO: 3788178 - DNA, 25 bp, Homo sapien
taatttccaatttatgaaccgtgtg

SEQ ID NO: 3788179 - DNA, 25 bp, Homo sapien
cacctgtagccgtggttgaccatgt

SEQ ID NO: 3788180 - DNA, 25 bp, Homo sapien
tgtttcttcccaacgtgactgagga

SEQ ID NO: 3788181 - DNA, 25 bp, Homo sapien
aagtttgttatagcttctgggacag

SEQ ID NO: 3788182 - DNA, 25 bp, Homo sapien
ttgaccatgtgatgtgaatctgtac

SEQ ID NO: 3788183 - DNA, 25 bp, Homo sapien
gggtgtggaagtgagcgtgcgccag

SEQ ID NO: 3788184 - DNA, 25 bp, Homo sapien
aggccccttcctgacatgtgtggtc

SEQ ID NO: 3788185 - DNA, 25 bp, Homo sapien
catgtgtggtcttcgcgggtgtgga

SEQ ID NO: 3788186 - DNA, 25 bp, Homo sapien
tgcgccagtttggagcaggcaggct

SEQ ID NO: 3788187 - DNA, 25 bp, Homo sapien
cagtaagagtttccaccgttgccat

SEQ ID NO: 3788188 - DNA, 25 bp, Homo sapien
acaggcagtaagagtttccaccgtt

SEQ ID NO: 3788189 - DNA, 25 bp, Homo sapien
aggcagtaagagtttccaccgttgc

SEQ ID NO: 3788190 - DNA, 25 bp, Homo sapien
gcagtaagagtttccaccgttgcca

SEQ ID NO: 3788191 - DNA, 25 bp, Homo sapien
tttgcctctaaggcaatctggagtc

SEQ ID NO: 3788192 - DNA, 25 bp, Homo sapien
ttttctgctctactattgacccagc

SEQ ID NO: 3788193 - DNA, 25 bp, Homo sapien
ggcaatctggagtcttcgccactgg

SEQ ID NO: 3788194 - DNA, 25 bp, Homo sapien
agtcttcgccactgggtttgccaag

SEQ ID NO: 3788195 - DNA, 25 bp, Homo sapien
gaagtagagacagccggacagtttg

SEQ ID NO: 3788196 - DNA, 25 bp, Homo sapien
gacatcccataggacacactaatag

SEQ ID NO: 3788197 - DNA, 25 bp, Homo sapien
tagaactggttctgaactgggaacc

SEQ ID NO: 3788198 - DNA, 25 bp, Homo sapien
tcatgctgtgtcgttaaactgcaca

SEQ ID NO: 3788199 - DNA, 25 bp, Homo sapien
agctctagaaggtcagattcttcag

SEQ ID NO: 3788200 - DNA, 25 bp, Homo sapien
tagaaggtcagattcttcagcagcc

SEQ ID NO: 3788201 - DNA, 25 bp, Homo sapien
aggtcagattcttcagcagccttcg

SEQ ID NO: 3788202 - DNA, 25 bp, Homo sapien
tctagaaggtcagattcttcagcag

SEQ ID NO: 3788203 - DNA, 25 bp, Homo sapien
ttttacataatgaggcatgctcggg

SEQ ID NO: 3788204 - DNA, 25 bp, Homo sapien
ttatgtggccgcttgaaaacaggaa

SEQ ID NO: 3788205 - DNA, 25 bp, Homo sapien
tgaccgcaaggaaagctagtgtcct

SEQ ID NO: 3788206 - DNA, 25 bp, Homo sapien
caaacaccgccctgtgggttagagg

SEQ ID NO: 3788207 - DNA, 25 bp, Homo sapien
cgttcttggtctgtagagtggctct

SEQ ID NO: 3788208 - DNA, 25 bp, Homo sapien
gtttatatctgaggaatctacttcc

SEQ ID NO: 3788209 - DNA, 25 bp, Homo sapien
ccactaagtgacttctttccagaca

SEQ ID NO: 3788210 - DNA, 25 bp, Homo sapien
ccaagtgccggtcgtgcggtgcctt

SEQ ID NO: 3788211 - DNA, 25 bp, Homo sapien
cggtggacgcgagcaggtgttggct

SEQ ID NO: 3788212 - DNA, 25 bp, Homo sapien
caggaccagcatgggtggtggcggt

SEQ ID NO: 3788213 - DNA, 25 bp, Homo sapien
tggtggcggtggacgcgagcaggtg

SEQ ID NO: 3788214 - DNA, 25 bp, Homo sapien
tgtgtggggtggtcccctgatctcc

SEQ ID NO: 3788215 - DNA, 25 bp, Homo sapien
aatcttctaactatttgattttaag

SEQ ID NO: 3788216 - DNA, 25 bp, Homo sapien
ctcgctttactatgtcttattattt

SEQ ID NO: 3788217 - DNA, 25 bp, Homo sapien
atattgacttaaatcttctaactat

SEQ ID NO: 3788218 - DNA, 25 bp, Homo sapien
cttctaactatttgattttaagctt

SEQ ID NO: 3788219 - DNA, 25 bp, Homo sapien
ggtggccgatttggttcctgataag

SEQ ID NO: 3788220 - DNA, 25 bp, Homo sapien
cttacatggcggaaagggacagcga

SEQ ID NO: 3788221 - DNA, 25 bp, Homo sapien
tgcaaagtcccagatcacagtggtg

SEQ ID NO: 3788222 - DNA, 25 bp, Homo sapien
ttcctgctgtgtgcttacatggcgg

SEQ ID NO: 3788223 - DNA, 25 bp, Homo sapien
acatttttggatcttctcaggagct

SEQ ID NO: 3788224 - DNA, 25 bp, Homo sapien
acgctatgcaaggacacacattcca

SEQ ID NO: 3788225 - DNA, 25 bp, Homo sapien
tgggaggccaaagaagcctgcagct

SEQ ID NO: 3788226 - DNA, 25 bp, Homo sapien
caggagctctttctgatataaacgc

SEQ ID NO: 3788227 - DNA, 25 bp, Homo sapien
gggctccgcgatgagcctttcaggt

SEQ ID NO: 3788228 - DNA, 25 bp, Homo sapien
tctgggctccgcgatgagcctttca

SEQ ID NO: 3788229 - DNA, 25 bp, Homo sapien
aaccagtcatctgggctccgcgatg

SEQ ID NO: 3788230 - DNA, 25 bp, Homo sapien
gtcatctgggctccgcgatgagcct

SEQ ID NO: 3788231 - DNA, 25 bp, Homo sapien
agggtggattgcttgggttcagaag

SEQ ID NO: 3788232 - DNA, 25 bp, Homo sapien
tggattgcttgggttcagaagttcg

SEQ ID NO: 3788233 - DNA, 25 bp, Homo sapien
ttgcttgggttcagaagttcgaaac

SEQ ID NO: 3788234 - DNA, 25 bp, Homo sapien
ccaaggagggtggattgcttgggtt

SEQ ID NO: 3788235 - DNA, 25 bp, Homo sapien
cgctgcaagtgtccacgatggcggc

SEQ ID NO: 3788236 - DNA, 25 bp, Homo sapien
tcaaccgctgcaagtgtccacgatg

SEQ ID NO: 3788237 - DNA, 25 bp, Homo sapien
gggcgcctcgcctcgagcccctcgg

SEQ ID NO: 3788238 - DNA, 25 bp, Homo sapien
agaagacgtaactttcccgcttgag

SEQ ID NO: 3788239 - DNA, 25 bp, Homo sapien
tcttagtagagttgctgacccagca

SEQ ID NO: 3788240 - DNA, 25 bp, Homo sapien
gagcaacacagttgacccgccaagg

SEQ ID NO: 3788241 - DNA, 25 bp, Homo sapien
gacattatgtcacttggagcaacac

SEQ ID NO: 3788242 - DNA, 25 bp, Homo sapien
tcctccatagatggatgaacgctgt

SEQ ID NO: 3788243 - DNA, 25 bp, Homo sapien
ctctgcacatcgtcctcagagtgct

SEQ ID NO: 3788244 - DNA, 25 bp, Homo sapien
catcgtcctcagagtgctcggtctt

SEQ ID NO: 3788245 - DNA, 25 bp, Homo sapien
agagggggtgtccactatggttata

SEQ ID NO: 3788246 - DNA, 25 bp, Homo sapien
ggtgtccactatggttatagatggg

SEQ ID NO: 3788247 - DNA, 25 bp, Homo sapien
agcagcgagttgctgtgtgaggcca

SEQ ID NO: 3788248 - DNA, 25 bp, Homo sapien
tggaggtgatatcggcctcagtgct

SEQ ID NO: 3788249 - DNA, 25 bp, Homo sapien
tgaggccaccagaatggaggtgata

SEQ ID NO: 3788250 - DNA, 25 bp, Homo sapien
caccagaatggaggtgatatcggcc

SEQ ID NO: 3788251 - DNA, 25 bp, Homo sapien
ggttctcaaattggagtgcctgtga

SEQ ID NO: 3788252 - DNA, 25 bp, Homo sapien
gacttcttaacagctccccaagtga

SEQ ID NO: 3788253 - DNA, 25 bp, Homo sapien
ctaactctggtacatgggaactatc

SEQ ID NO: 3788254 - DNA, 25 bp, Homo sapien
gggttggtcccagacatggtgtctt

SEQ ID NO: 3788255 - DNA, 25 bp, Homo sapien
ttaaggattttgattaggagggcta

SEQ ID NO: 3788256 - DNA, 25 bp, Homo sapien
aggattttgattaggagggctaccg

SEQ ID NO: 3788257 - DNA, 25 bp, Homo sapien
attaggagggctaccggttgtcagt

SEQ ID NO: 3788258 - DNA, 25 bp, Homo sapien
ttgattaggagggctaccggttgtc

SEQ ID NO: 3788259 - DNA, 25 bp, Homo sapien
tgaatgtgtccgtgtctcctacatg

SEQ ID NO: 3788260 - DNA, 25 bp, Homo sapien
tccttacactcgagctgcttgggtg

SEQ ID NO: 3788261 - DNA, 25 bp, Homo sapien
gtctcctacatgacctagtttctcc

SEQ ID NO: 3788262 - DNA, 25 bp, Homo sapien
ggaaatctccttacactcgagctgc

SEQ ID NO: 3788263 - DNA, 25 bp, Homo sapien
cagaccatgaaggtactgccctagg

SEQ ID NO: 3788264 - DNA, 25 bp, Homo sapien
gtagaggagggcagtcatggccaca

SEQ ID NO: 3788265 - DNA, 25 bp, Homo sapien
tgagttactccccaggccaggtgcg

SEQ ID NO: 3788266 - DNA, 25 bp, Homo sapien
cattgaggccctgcggctgagttac

SEQ ID NO: 3788267 - DNA, 25 bp, Homo sapien
tgtcgcttccgtatttccttccctg

SEQ ID NO: 3788268 - DNA, 25 bp, Homo sapien
ggctgcccctcgccagatgcaaagg

SEQ ID NO: 3788269 - DNA, 25 bp, Homo sapien
ctcctttgtcgcttccgtatttcct

SEQ ID NO: 3788270 - DNA, 25 bp, Homo sapien
gctgcccctcgccagatgcaaaggt

SEQ ID NO: 3788271 - DNA, 25 bp, Homo sapien
gaactgaatgttggagaccctcctc

SEQ ID NO: 3788272 - DNA, 25 bp, Homo sapien
aggaagaactgaatgttggagaccc

SEQ ID NO: 3788273 - DNA, 25 bp, Homo sapien
gaatgaggaagaactgaatgttgga

SEQ ID NO: 3788274 - DNA, 25 bp, Homo sapien
tgttggagaccctcctcagtaaagg

SEQ ID NO: 3788275 - DNA, 25 bp, Homo sapien
cggaccagaggaatcagtcgcaggt

SEQ ID NO: 3788276 - DNA, 25 bp, Homo sapien
gatcctgcggaccagaggaatcagt

SEQ ID NO: 3788277 - DNA, 25 bp, Homo sapien
cagaggaatcagtcgcaggtgctgt

SEQ ID NO: 3788278 - DNA, 25 bp, Homo sapien
aatcagtcgcaggtgctgttgccgg

SEQ ID NO: 3788279 - DNA, 25 bp, Homo sapien
tttccatacagactccacactcgca

SEQ ID NO: 3788280 - DNA, 25 bp, Homo sapien
ctttagacactgtgaaatcagtggg

SEQ ID NO: 3788281 - DNA, 25 bp, Homo sapien
tccacactcgcagcgcatccatggt

SEQ ID NO: 3788282 - DNA, 25 bp, Homo sapien
tagtcctcaaggatcagctttagac

SEQ ID NO: 3788283 - DNA, 25 bp, Homo sapien
tatcacaaaatgacatgtgtactgt

SEQ ID NO: 3788284 - DNA, 25 bp, Homo sapien
ctgatacttttatttgggagtccta

SEQ ID NO: 3788285 - DNA, 25 bp, Homo sapien
tgacatgtgtactgtttacaaccgg

SEQ ID NO: 3788286 - DNA, 25 bp, Homo sapien
tgggagtcctatatcacaaaatgac

SEQ ID NO: 3788287 - DNA, 25 bp, Homo sapien
gattctccagagtccatgccattaa

SEQ ID NO: 3788288 - DNA, 25 bp, Homo sapien
tggtgttgttggacgtgaccgtgag

SEQ ID NO: 3788289 - DNA, 25 bp, Homo sapien
ccctggtgcagtggtgttgttggac

SEQ ID NO: 3788290 - DNA, 25 bp, Homo sapien
ggcattgcctagctggaacaagaag

SEQ ID NO: 3788291 - DNA, 25 bp, Homo sapien
ggcagggcgttgtattcatccctcg

SEQ ID NO: 3788292 - DNA, 25 bp, Homo sapien
agggcgttgtattcatccctcgtca

SEQ ID NO: 3788293 - DNA, 25 bp, Homo sapien
gcgggcagggcgttgtattcatccc

SEQ ID NO: 3788294 - DNA, 25 bp, Homo sapien
cgttgtattcatccctcgtcatgtc

SEQ ID NO: 3788295 - DNA, 25 bp, Homo sapien
agtcttcgtcggtgagatagatctc

SEQ ID NO: 3788296 - DNA, 25 bp, Homo sapien
cgtcttccacgagggtgatctgatt

SEQ ID NO: 3788297 - DNA, 25 bp, Homo sapien
tcaagcttcagaggatcgaccccct

SEQ ID NO: 3788298 - DNA, 25 bp, Homo sapien
ttttacagagcttggctaagacgtc

SEQ ID NO: 3788299 - DNA, 25 bp, Homo sapien
ttttaaaaccactgtgtgaatatga

SEQ ID NO: 3788300 - DNA, 25 bp, Homo sapien
tctggaaaaatgtttagggactgtc

SEQ ID NO: 3788301 - DNA, 25 bp, Homo sapien
gccaccacgcgcacctaataattta

SEQ ID NO: 3788302 - DNA, 25 bp, Homo sapien
gaatatgaacaaactattctgggta

SEQ ID NO: 3788303 - DNA, 25 bp, Homo sapien
gaaagtggctcaactgtgccacaga

SEQ ID NO: 3788304 - DNA, 25 bp, Homo sapien
gaagcctgactcttctccggctgga

SEQ ID NO: 3788305 - DNA, 25 bp, Homo sapien
tgcacaacagtaaatggccccgctg

SEQ ID NO: 3788306 - DNA, 25 bp, Homo sapien
tgagttatatccttctgaaagtggc

SEQ ID NO: 3788307 - DNA, 25 bp, Homo sapien
tgaagcttaccagaccccttaccca

SEQ ID NO: 3788308 - DNA, 25 bp, Homo sapien
cttacccaccatgatgcctaaccaa

SEQ ID NO: 3788309 - DNA, 25 bp, Homo sapien
acccaccatgatgcctaaccaaccc

SEQ ID NO: 3788310 - DNA, 25 bp, Homo sapien
cttaccagaccccttacccaccatg

SEQ ID NO: 3788311 - DNA, 25 bp, Homo sapien
tcagcgatgtcctctctgtgctccc

SEQ ID NO: 3788312 - DNA, 25 bp, Homo sapien
cccagctgggaaacatattggtgaa

SEQ ID NO: 3788313 - DNA, 25 bp, Homo sapien
catctctgtgatctcagcgatgtcc

SEQ ID NO: 3788314 - DNA, 25 bp, Homo sapien
ccagcgtggataaggtaagacttgg

SEQ ID NO: 3788315 - DNA, 25 bp, Homo sapien
ctgtagttacacagattgcaatgtc

SEQ ID NO: 3788316 - DNA, 25 bp, Homo sapien
tgtagttacacagattgcaatgtca

SEQ ID NO: 3788317 - DNA, 25 bp, Homo sapien
caatgtcagtagaccccagggagac

SEQ ID NO: 3788318 - DNA, 25 bp, Homo sapien
gcaatgtcagtagaccccagggaga

SEQ ID NO: 3788319 - DNA, 25 bp, Homo sapien
gatcttgttctcgatgggccaccag

SEQ ID NO: 3788320 - DNA, 25 bp, Homo sapien
cagtgatcttgttctcgatgggcca

SEQ ID NO: 3788321 - DNA, 25 bp, Homo sapien
gaaccagtgatcttgttctcgatgg

SEQ ID NO: 3788322 - DNA, 25 bp, Homo sapien
cttgttctcgatgggccaccagcct

SEQ ID NO: 3788323 - DNA, 25 bp, Homo sapien
ggataatgcatgtgccactcaaggg

SEQ ID NO: 3788324 - DNA, 25 bp, Homo sapien
gatgttgtccctcttgactgcagtg

SEQ ID NO: 3788325 - DNA, 25 bp, Homo sapien
gttagcaccgcatatctccaaagag

SEQ ID NO: 3788326 - DNA, 25 bp, Homo sapien
tggagcgcacatctcactgcagaca

SEQ ID NO: 3788327 - DNA, 25 bp, Homo sapien
ctctcttactggtggctgattttcc

SEQ ID NO: 3788328 - DNA, 25 bp, Homo sapien
tttccaagcatgacatgtgcactgg

SEQ ID NO: 3788329 - DNA, 25 bp, Homo sapien
tgagatcccggtgcaagatgaggtc

SEQ ID NO: 3788330 - DNA, 25 bp, Homo sapien
gacatgtgcactgggcaaactttca

SEQ ID NO: 3788331 - DNA, 25 bp, Homo sapien
tgtggagacttggtatggcagaccc

SEQ ID NO: 3788332 - DNA, 25 bp, Homo sapien
gacgggtgaccatgcagcaacaaga

SEQ ID NO: 3788333 - DNA, 25 bp, Homo sapien
aatggctggagcaatggcagtcgac

SEQ ID NO: 3788334 - DNA, 25 bp, Homo sapien
tcttgaatgcaaacataatggctgg

SEQ ID NO: 3788335 - DNA, 25 bp, Homo sapien
aaactctgtggctgcaaaatcccca

SEQ ID NO: 3788336 - DNA, 25 bp, Homo sapien
gctcgggcagggtacacaaactctg

SEQ ID NO: 3788337 - DNA, 25 bp, Homo sapien
ggcgcgctgtacagatcttcctgca

SEQ ID NO: 3788338 - DNA, 25 bp, Homo sapien
agggtacacaaactctgtggctgca

SEQ ID NO: 3788339 - DNA, 25 bp, Homo sapien
tggcttactggaactgcttaacaaa

SEQ ID NO: 3788340 - DNA, 25 bp, Homo sapien
cagagtgttgggttgtactaacgga

SEQ ID NO: 3788341 - DNA, 25 bp, Homo sapien
gttactatatgtaaggtgctggctg

SEQ ID NO: 3788342 - DNA, 25 bp, Homo sapien
tatgaggatactccattgctgccca

SEQ ID NO: 3788343 - DNA, 25 bp, Homo sapien
ctcgtgtattgtgactttgctgcta

SEQ ID NO: 3788344 - DNA, 25 bp, Homo sapien
tgctactatgcagtcctgcttccag

SEQ ID NO: 3788345 - DNA, 25 bp, Homo sapien
tgaagcatgcaatcgtaggctttcc

SEQ ID NO: 3788346 - DNA, 25 bp, Homo sapien
gcatcccagaatccgagtggctcgg

SEQ ID NO: 3788347 - DNA, 25 bp, Homo sapien
ctgcaagggagaaactccaagagtt

SEQ ID NO: 3788348 - DNA, 25 bp, Homo sapien
tgcaagggagaaactccaagagttc

SEQ ID NO: 3788349 - DNA, 25 bp, Homo sapien
tctgatgggcctcaaatgccttggg

SEQ ID NO: 3788350 - DNA, 25 bp, Homo sapien
gacatgtgaccctaggaagctcttc

SEQ ID NO: 3788351 - DNA, 25 bp, Homo sapien
tgcttggcgccaatcaggtactcaa

SEQ ID NO: 3788352 - DNA, 25 bp, Homo sapien
gtggtccaagtaaaccctctgatgg

SEQ ID NO: 3788353 - DNA, 25 bp, Homo sapien
tccttgatcttgttcgcagcggtcc

SEQ ID NO: 3788354 - DNA, 25 bp, Homo sapien
tgttgacgttaagcaccaccatgga

SEQ ID NO: 3788355 - DNA, 25 bp, Homo sapien
ggacctcaggctgctacagtgacag

SEQ ID NO: 3788356 - DNA, 25 bp, Homo sapien
gctttgcatccgtgccacaggtaga

SEQ ID NO: 3788357 - DNA, 25 bp, Homo sapien
tcagcccccagcttataaaaattct

SEQ ID NO: 3788358 - DNA, 25 bp, Homo sapien
tctttccaagagagggaaaggcaaa

SEQ ID NO: 3788359 - DNA, 25 bp, Homo sapien
aaggcaaagtcgaattccagcagta

SEQ ID NO: 3788360 - DNA, 25 bp, Homo sapien
tccaagagagggaaaggcaaagtcg

SEQ ID NO: 3788361 - DNA, 25 bp, Homo sapien
ccgcctccccgagtgcaccaccatc

SEQ ID NO: 3788362 - DNA, 25 bp, Homo sapien
cgcctccccgagtgcaccaccatcc

SEQ ID NO: 3788363 - DNA, 25 bp, Homo sapien
tgcaggaaacaggggggctcctttc

SEQ ID NO: 3788364 - DNA, 25 bp, Homo sapien
ggctcctttccctggagaacctgga

SEQ ID NO: 3788365 - DNA, 25 bp, Homo sapien
ctgcaggaaacaggggggctccttt

SEQ ID NO: 3788366 - DNA, 25 bp, Homo sapien
gctcctttccctggagaacctggac

SEQ ID NO: 3788367 - DNA, 25 bp, Homo sapien
agaagtagacgcacttctctttgcc

SEQ ID NO: 3788368 - DNA, 25 bp, Homo sapien
gccggccttgccagaagaagtagac

SEQ ID NO: 3788369 - DNA, 25 bp, Homo sapien
gacgtgcccttctcactcacggtgg

SEQ ID NO: 3788370 - DNA, 25 bp, Homo sapien
ctccaccgtcatcagcgccgacgtg

SEQ ID NO: 3788371 - DNA, 25 bp, Homo sapien
cgaggagaagcaaatgtctggctca

SEQ ID NO: 3788372 - DNA, 25 bp, Homo sapien
tccccgggcctgcaaggaccagtgg

SEQ ID NO: 3788373 - DNA, 25 bp, Homo sapien
gcagctgagacacccgaggagaagc

SEQ ID NO: 3788374 - DNA, 25 bp, Homo sapien
ttccccgggcctgcaaggaccagtg

SEQ ID NO: 3788375 - DNA, 25 bp, Homo sapien
ggaaaaaaccacaagcgctcactaa

SEQ ID NO: 3788376 - DNA, 25 bp, Homo sapien
gagaagccttgatgtgcaagttcaa

SEQ ID NO: 3788377 - DNA, 25 bp, Homo sapien
cagcggcctcggcaatgctaggttg

SEQ ID NO: 3788378 - DNA, 25 bp, Homo sapien
tgctaggttgttaggaattcggcct

SEQ ID NO: 3788379 - DNA, 25 bp, Homo sapien
aggccatagccacggccgacgttca

SEQ ID NO: 3788380 - DNA, 25 bp, Homo sapien
acgttcactccgtccaggatggtgc

SEQ ID NO: 3788381 - DNA, 25 bp, Homo sapien
catccgtgtcacatcgtatgccttg

SEQ ID NO: 3788382 - DNA, 25 bp, Homo sapien
cgtatgccttgacatcagtcctggg

SEQ ID NO: 3788383 - DNA, 25 bp, Homo sapien
accaagccccgagttttgaggcttg

SEQ ID NO: 3788384 - DNA, 25 bp, Homo sapien
ttttgaggcttggtcgccggaatac

SEQ ID NO: 3788385 - DNA, 25 bp, Homo sapien
gttttgaggcttggtcgccggaata

SEQ ID NO: 3788386 - DNA, 25 bp, Homo sapien
agttttgaggcttggtcgccggaat

SEQ ID NO: 3788387 - DNA, 25 bp, Homo sapien
atctcttcagttccgtccaatccag

SEQ ID NO: 3788388 - DNA, 25 bp, Homo sapien
cattcgatctcttcagttccgtcca

SEQ ID NO: 3788389 - DNA, 25 bp, Homo sapien
ttctcattcgatctcttcagttccg

SEQ ID NO: 3788390 - DNA, 25 bp, Homo sapien
gggttcttctcattcgatctcttca

SEQ ID NO: 3788391 - DNA, 25 bp, Homo sapien
aaaacaacaatcctttgcacgtagg

SEQ ID NO: 3788392 - DNA, 25 bp, Homo sapien
taatctattataacggcacccatag

SEQ ID NO: 3788393 - DNA, 25 bp, Homo sapien
taaagagtctagtacatgcagggaa

SEQ ID NO: 3788394 - DNA, 25 bp, Homo sapien
gaaattcatagaccaattcaatgga

SEQ ID NO: 3788395 - DNA, 25 bp, Homo sapien
tctttcccatgccatacgtaaactt

SEQ ID NO: 3788396 - DNA, 25 bp, Homo sapien
ggttccattccataagtgctttgcc

SEQ ID NO: 3788397 - DNA, 25 bp, Homo sapien
taagcggattgcattctccaggatc

SEQ ID NO: 3788398 - DNA, 25 bp, Homo sapien
tacgtaaacttcactaccaaaatca

SEQ ID NO: 3788399 - DNA, 25 bp, Homo sapien
tcatataccgcaggcactcatggtc

SEQ ID NO: 3788400 - DNA, 25 bp, Homo sapien
cagttgaatcaggtgcaacagggtc

SEQ ID NO: 3788401 - DNA, 25 bp, Homo sapien
gatcatggtgatacatacaggaggg

SEQ ID NO: 3788402 - DNA, 25 bp, Homo sapien
gacagtgagtcaaacggaggaagac

SEQ ID NO: 3788403 - DNA, 25 bp, Homo sapien
cccagtagtcgtcatcaggaacaag

SEQ ID NO: 3788404 - DNA, 25 bp, Homo sapien
tagtttctattatggctgcttcata

SEQ ID NO: 3788405 - DNA, 25 bp, Homo sapien
ggaacaagtttgtcatccatgagac

SEQ ID NO: 3788406 - DNA, 25 bp, Homo sapien
gaattttcccccagtagtcgtcatc

SEQ ID NO: 3788407 - DNA, 25 bp, Homo sapien
aacaggagagcatcacattttacat

SEQ ID NO: 3788408 - DNA, 25 bp, Homo sapien
gataagaagaacaggagagcatcac

SEQ ID NO: 3788409 - DNA, 25 bp, Homo sapien
agaacaggagagcatcacattttac

SEQ ID NO: 3788410 - DNA, 25 bp, Homo sapien
taagaagaacaggagagcatcacat

SEQ ID NO: 3788411 - DNA, 25 bp, Homo sapien
taagtagctctacaaccaagttccc

SEQ ID NO: 3788412 - DNA, 25 bp, Homo sapien
caaccaagttccctctttgtctgaa

SEQ ID NO: 3788413 - DNA, 25 bp, Homo sapien
tcaatggtttggatataagtagctc

SEQ ID NO: 3788414 - DNA, 25 bp, Homo sapien
tggtaactggtttggccacccagaa

SEQ ID NO: 3788415 - DNA, 25 bp, Homo sapien
ttgagcgccgaagctcgaggttcca

SEQ ID NO: 3788416 - DNA, 25 bp, Homo sapien
gagcgccgaagctcgaggttccacc

SEQ ID NO: 3788417 - DNA, 25 bp, Homo sapien
gcgccgaagctcgaggttccaccag

SEQ ID NO: 3788418 - DNA, 25 bp, Homo sapien
cgaagctcgaggttccaccagcctg

SEQ ID NO: 3788419 - DNA, 25 bp, Homo sapien
catgatgatggcactagcggctgct

SEQ ID NO: 3788420 - DNA, 25 bp, Homo sapien
catgtgcgtgggttaatgaaggctc

SEQ ID NO: 3788421 - DNA, 25 bp, Homo sapien
gagacgccctggttcatctttggaa

SEQ ID NO: 3788422 - DNA, 25 bp, Homo sapien
acatgtgggaaaccctcctggaggg

SEQ ID NO: 3788423 - DNA, 25 bp, Homo sapien
tagagttctgttccgtcaggttgac

SEQ ID NO: 3788424 - DNA, 25 bp, Homo sapien
aacccgccagggtgacttctgagaa

SEQ ID NO: 3788425 - DNA, 25 bp, Homo sapien
tccgcaggctgacgttgctgaagtt

SEQ ID NO: 3788426 - DNA, 25 bp, Homo sapien
ggcacggcgctgttgttagagttct

SEQ ID NO: 3788427 - DNA, 25 bp, Homo sapien
ccatgaaggcaacgtttaatctctg

SEQ ID NO: 3788428 - DNA, 25 bp, Homo sapien
ttgtgctcggccacggaagacgtca

SEQ ID NO: 3788429 - DNA, 25 bp, Homo sapien
aggagatcttctcttgccgccagca

SEQ ID NO: 3788430 - DNA, 25 bp, Homo sapien
gctcagtgtattcctgaaggagatc

SEQ ID NO: 3788431 - DNA, 25 bp, Homo sapien
gtgagcaccgtttcgtgcatcccgc

SEQ ID NO: 3788432 - DNA, 25 bp, Homo sapien
gatcgaaaatgacatcgaagtcctc

SEQ ID NO: 3788433 - DNA, 25 bp, Homo sapien
gtgacagtgagcaccgtttcgtgca

SEQ ID NO: 3788434 - DNA, 25 bp, Homo sapien
tgggtgcataaggatcgaaaatgac

SEQ ID NO: 3788435 - DNA, 25 bp, Homo sapien
aacttcaggtccgattctaactgca

SEQ ID NO: 3788436 - DNA, 25 bp, Homo sapien
acttcaggtccgattctaactgcat

SEQ ID NO: 3788437 - DNA, 25 bp, Homo sapien
ggtgcctcttgttttaccgcaaatg

SEQ ID NO: 3788438 - DNA, 25 bp, Homo sapien
gtgcctcttgttttaccgcaaatgg

SEQ ID NO: 3788439 - DNA, 25 bp, Homo sapien
tttcacacgtaccacgactgtggga

SEQ ID NO: 3788440 - DNA, 25 bp, Homo sapien
gacaaccaactgcaaacgtagactg

SEQ ID NO: 3788441 - DNA, 25 bp, Homo sapien
acacgttaacttgggcaaatgcagc

SEQ ID NO: 3788442 - DNA, 25 bp, Homo sapien
caagccgatattccaaaatgaacgg

SEQ ID NO: 3788443 - DNA, 25 bp, Homo sapien
gggacatgacacagacagtaaccca

SEQ ID NO: 3788444 - DNA, 25 bp, Homo sapien
ggggacatgacacagacagtaaccc

SEQ ID NO: 3788445 - DNA, 25 bp, Homo sapien
ggacatgacacagacagtaacccaa

SEQ ID NO: 3788446 - DNA, 25 bp, Homo sapien
gtgttggaagtcctgtccatctccc

SEQ ID NO: 3788447 - DNA, 25 bp, Homo sapien
tctggaccgactgtgcgtgttggaa

SEQ ID NO: 3788448 - DNA, 25 bp, Homo sapien
cagggcaggtctggaccgactgtgc

SEQ ID NO: 3788449 - DNA, 25 bp, Homo sapien
tgtgcgtgttggaagtcctgtccat

SEQ ID NO: 3788450 - DNA, 25 bp, Homo sapien
ggaattcctgcatggagaaagtatc

SEQ ID NO: 3788451 - DNA, 25 bp, Homo sapien
gaattcctgcatggagaaagtatcc

SEQ ID NO: 3788452 - DNA, 25 bp, Homo sapien
gagacacatgaaagggaaagggagg

SEQ ID NO: 3788453 - DNA, 25 bp, Homo sapien
attcctgcatggagaaagtatccag

SEQ ID NO: 3788454 - DNA, 25 bp, Homo sapien
cagtcacctactctcttcgggaaca

SEQ ID NO: 3788455 - DNA, 25 bp, Homo sapien
tcacagatgtcaatgtggacaaggg

SEQ ID NO: 3788456 - DNA, 25 bp, Homo sapien
gaaaccaaagcggaaagtcatcaag

SEQ ID NO: 3788457 - DNA, 25 bp, Homo sapien
gaattctaggtacaacaaccagtca

SEQ ID NO: 3788458 - DNA, 25 bp, Homo sapien
ctgggtcgagtcgttggccgctcct

SEQ ID NO: 3788459 - DNA, 25 bp, Homo sapien
aactgggtcgagtcgttggccgctc

SEQ ID NO: 3788460 - DNA, 25 bp, Homo sapien
ggtcgagtcgttggccgctcctctg

SEQ ID NO: 3788461 - DNA, 25 bp, Homo sapien
gaactgggtcgagtcgttggccgct

SEQ ID NO: 3788462 - DNA, 25 bp, Homo sapien
gaaaactttatccatgtgagcacac

SEQ ID NO: 3788463 - DNA, 25 bp, Homo sapien
gccactgatgttctgcgggcaggta

SEQ ID NO: 3788464 - DNA, 25 bp, Homo sapien
cctacatgcacggtaacatttctac

SEQ ID NO: 3788465 - DNA, 25 bp, Homo sapien
gagcccacagaagtggctttaaact

SEQ ID NO: 3788466 - DNA, 25 bp, Homo sapien
gatatgacaaccaaacgcgatgcat

SEQ ID NO: 3788467 - DNA, 25 bp, Homo sapien
atatgacaaccaaacgcgatgcatg

SEQ ID NO: 3788468 - DNA, 25 bp, Homo sapien
cagtaaaaaatgaccggttgccaag

SEQ ID NO: 3788469 - DNA, 25 bp, Homo sapien
aaggcaaaaccatgtgacagtaaaa

SEQ ID NO: 3788470 - DNA, 25 bp, Homo sapien
agaggaatcgtaaatgcatattact

SEQ ID NO: 3788471 - DNA, 25 bp, Homo sapien
gactgggcggtgagagtgatgagca

SEQ ID NO: 3788472 - DNA, 25 bp, Homo sapien
ccttggatgcggaactggaagagat

SEQ ID NO: 3788473 - DNA, 25 bp, Homo sapien
gaagggccgactgtatacacttaaa

SEQ ID NO: 3788474 - DNA, 25 bp, Homo sapien
aaatatatctagttgtccctcagcg

SEQ ID NO: 3788475 - DNA, 25 bp, Homo sapien
ggaagtttgctccacatttcagccc

SEQ ID NO: 3788476 - DNA, 25 bp, Homo sapien
tggagcaggcccatcgcggcactgt

SEQ ID NO: 3788477 - DNA, 25 bp, Homo sapien
tgtgaaaccctgagccactcattca

SEQ ID NO: 3788478 - DNA, 25 bp, Homo sapien
cctgagccactcattcaataactgc

SEQ ID NO: 3788479 - DNA, 25 bp, Homo sapien
ttccctgtcagcttcgcatgtgaaa

SEQ ID NO: 3788480 - DNA, 25 bp, Homo sapien
ggaatagcaggagaataagtagaag

SEQ ID NO: 3788481 - DNA, 25 bp, Homo sapien
agcaggagaataagtagaagcatat

SEQ ID NO: 3788482 - DNA, 25 bp, Homo sapien
gattaatcgacacaaaagacaggta

SEQ ID NO: 3788483 - DNA, 25 bp, Homo sapien
gacaggtatttatgggcagcaggaa

SEQ ID NO: 3788484 - DNA, 25 bp, Homo sapien
tctccactccggacaaaggctgtgt

SEQ ID NO: 3788485 - DNA, 25 bp, Homo sapien
gagggtgcacgaaggaaccacccag

SEQ ID NO: 3788486 - DNA, 25 bp, Homo sapien
ggatcaggattacccacgcgaagtg

SEQ ID NO: 3788487 - DNA, 25 bp, Homo sapien
gccaccatcgagaggacacctgtgt

SEQ ID NO: 3788488 - DNA, 25 bp, Homo sapien
aagcagattagaaatggcactatca

SEQ ID NO: 3788489 - DNA, 25 bp, Homo sapien
aatggcactatcatccgcaactcct

SEQ ID NO: 3788490 - DNA, 25 bp, Homo sapien
gattagaaatggcactatcatccgc

SEQ ID NO: 3788491 - DNA, 25 bp, Homo sapien
tagaaatggcactatcatccgcaac

SEQ ID NO: 3788492 - DNA, 25 bp, Homo sapien
gcctggtcagggcatcgcaatcacc

SEQ ID NO: 3788493 - DNA, 25 bp, Homo sapien
tcagggcatcgcaatcaccttcaag

SEQ ID NO: 3788494 - DNA, 25 bp, Homo sapien
ggcatcgcaatcaccttcaagtatt

SEQ ID NO: 3788495 - DNA, 25 bp, Homo sapien
agaagagcctggtcagggcatcgca

SEQ ID NO: 3788496 - DNA, 25 bp, Homo sapien
tgatgagctgaccataacgccggct

SEQ ID NO: 3788497 - DNA, 25 bp, Homo sapien
tggaaggaacttctagagtcccctc

SEQ ID NO: 3788498 - DNA, 25 bp, Homo sapien
aaagatggaaggttccggcacctgc

SEQ ID NO: 3788499 - DNA, 25 bp, Homo sapien
tcagcacacaaaaggaacgtaggaa

SEQ ID NO: 3788500 - DNA, 25 bp, Homo sapien
caaggctagagctactccgtgcagc

SEQ ID NO: 3788501 - DNA, 25 bp, Homo sapien
tagagctactccgtgcagcaagcgc

SEQ ID NO: 3788502 - DNA, 25 bp, Homo sapien
ctctccgtcagcaaggctagagcta

SEQ ID NO: 3788503 - DNA, 25 bp, Homo sapien
tcagcaaggctagagctactccgtg

SEQ ID NO: 3788504 - DNA, 25 bp, Homo sapien
cacgtgtcatgactgtctgtccttc

SEQ ID NO: 3788505 - DNA, 25 bp, Homo sapien
cgtgtcatgactgtctgtccttctc

SEQ ID NO: 3788506 - DNA, 25 bp, Homo sapien
tcagacaccccgcaagcagtgggca

SEQ ID NO: 3788507 - DNA, 25 bp, Homo sapien
cccacgtgtcatgactgtctgtcct

SEQ ID NO: 3788508 - DNA, 25 bp, Homo sapien
tgagcacagccggcgggtgactgaa

SEQ ID NO: 3788509 - DNA, 25 bp, Homo sapien
cacagccggcgggtgactgaaaaca

SEQ ID NO: 3788510 - DNA, 25 bp, Homo sapien
ctgagcacagccggcgggtgactga

SEQ ID NO: 3788511 - DNA, 25 bp, Homo sapien
agcacagccggcgggtgactgaaaa

SEQ ID NO: 3788512 - DNA, 25 bp, Homo sapien
agaggctgtctgagaaacacctgac

SEQ ID NO: 3788513 - DNA, 25 bp, Homo sapien
ggtcgtcagaggctgtctgagaaac

SEQ ID NO: 3788514 - DNA, 25 bp, Homo sapien
cgaaccgaggggtcgtcagaggctg

SEQ ID NO: 3788515 - DNA, 25 bp, Homo sapien
acgaaccgaggggtcgtcagaggct

SEQ ID NO: 3788516 - DNA, 25 bp, Homo sapien
ttttagcttcaaagagcttattgtc

SEQ ID NO: 3788517 - DNA, 25 bp, Homo sapien
aatagatccgcttattttagcttca

SEQ ID NO: 3788518 - DNA, 25 bp, Homo sapien
tattttagcttcaaagagcttattg

SEQ ID NO: 3788519 - DNA, 25 bp, Homo sapien
tttagcttcaaagagcttattgtct

SEQ ID NO: 3788520 - DNA, 25 bp, Homo sapien
aaaaccttagccagcgttcaggtgg

SEQ ID NO: 3788521 - DNA, 25 bp, Homo sapien
ggtcactggattatcaaccccaagg

SEQ ID NO: 3788522 - DNA, 25 bp, Homo sapien
ccaggaacctcttttgcttcgtgct

SEQ ID NO: 3788523 - DNA, 25 bp, Homo sapien
agggcaactgcagtcaactggcctc

SEQ ID NO: 3788524 - DNA, 25 bp, Homo sapien
gagtaggaattaggtggcacacgct

SEQ ID NO: 3788525 - DNA, 25 bp, Homo sapien
gactctcagtgtgtaccctaagggc

SEQ ID NO: 3788526 - DNA, 25 bp, Homo sapien
taggtttaaaatctctgcatgggaa

SEQ ID NO: 3788527 - DNA, 25 bp, Homo sapien
ccaagagtgatgttagtcggaaggc

SEQ ID NO: 3788528 - DNA, 25 bp, Homo sapien
ttcttgatgagggaccgccctgctt

SEQ ID NO: 3788529 - DNA, 25 bp, Homo sapien
cttcttgatgagggaccgccctgct

SEQ ID NO: 3788530 - DNA, 25 bp, Homo sapien
tcttgatgagggaccgccctgcttc

SEQ ID NO: 3788531 - DNA, 25 bp, Homo sapien
aaaacataaagccatgaagcactta

SEQ ID NO: 3788532 - DNA, 25 bp, Homo sapien
aacctactttagctcaatgatgatg

SEQ ID NO: 3788533 - DNA, 25 bp, Homo sapien
tgttctaagccctattcttttccta

SEQ ID NO: 3788534 - DNA, 25 bp, Homo sapien
gaagcacttacagtctcttaatatc

SEQ ID NO: 3788535 - DNA, 25 bp, Homo sapien
tccaaagaattcctccattccaaaa

SEQ ID NO: 3788536 - DNA, 25 bp, Homo sapien
acatgtgctggcagggttaccattg

SEQ ID NO: 3788537 - DNA, 25 bp, Homo sapien
tctacatgtgctggcagggttacca

SEQ ID NO: 3788538 - DNA, 25 bp, Homo sapien
catgggatggcctccaaagaattcc

SEQ ID NO: 3788539 - DNA, 25 bp, Homo sapien
ctgggcctacgcaggacataaattc

SEQ ID NO: 3788540 - DNA, 25 bp, Homo sapien
tctgagagggtcgaggagccgacgt

SEQ ID NO: 3788541 - DNA, 25 bp, Homo sapien
cgacgtctgggcctacgcaggacat

SEQ ID NO: 3788542 - DNA, 25 bp, Homo sapien
gagccgacgtctgggcctacgcagg

SEQ ID NO: 3788543 - DNA, 25 bp, Homo sapien
cactgttccagcagggaatgctggc

SEQ ID NO: 3788544 - DNA, 25 bp, Homo sapien
agggccaccgtgacaggtgcctgcc

SEQ ID NO: 3788545 - DNA, 25 bp, Homo sapien
gggaaacggtgcctcctcttccata

SEQ ID NO: 3788546 - DNA, 25 bp, Homo sapien
gaaacggtgcctcctcttccatagc

SEQ ID NO: 3788547 - DNA, 25 bp, Homo sapien
tctgaacagactgggctcagggatc

SEQ ID NO: 3788548 - DNA, 25 bp, Homo sapien
gcatagctgctaaataaagtgtccc

SEQ ID NO: 3788549 - DNA, 25 bp, Homo sapien
cttctgttagccagcaggtgtgtgt

SEQ ID NO: 3788550 - DNA, 25 bp, Homo sapien
gatctcttggagaccatgataagtt

SEQ ID NO: 3788551 - DNA, 25 bp, Homo sapien
gtgagtcaagaaggccctcccctgt

SEQ ID NO: 3788552 - DNA, 25 bp, Homo sapien
cagctgtccccgtctgctcggaagt

SEQ ID NO: 3788553 - DNA, 25 bp, Homo sapien
tagacatggttttgctgggtgagtc

SEQ ID NO: 3788554 - DNA, 25 bp, Homo sapien
cgcacatggattcttgcagagcttc

SEQ ID NO: 3788555 - DNA, 25 bp, Homo sapien
attccttcggttcatccccgaggtg

SEQ ID NO: 3788556 - DNA, 25 bp, Homo sapien
ttctgggaacagcatatttagattc

SEQ ID NO: 3788557 - DNA, 25 bp, Homo sapien
tccttccctggctcggttcaggatg

SEQ ID NO: 3788558 - DNA, 25 bp, Homo sapien
gtgatgggagggttcgcccgttcca

SEQ ID NO: 3788559 - DNA, 25 bp, Homo sapien
tcagtggcacttgcattgtggtcaa

SEQ ID NO: 3788560 - DNA, 25 bp, Homo sapien
tctccggcatacattggagcaaccg

SEQ ID NO: 3788561 - DNA, 25 bp, Homo sapien
ggctgccaagcttgcgatttcagaa

SEQ ID NO: 3788562 - DNA, 25 bp, Homo sapien
ggctttgtgcgaagatctccggcat

SEQ ID NO: 3788563 - DNA, 25 bp, Homo sapien
ctgttccgggtagaaatcgcttttg

SEQ ID NO: 3788564 - DNA, 25 bp, Homo sapien
gatagcgagcgttcattctcctctg

SEQ ID NO: 3788565 - DNA, 25 bp, Homo sapien
acttttcggccaagcttagagtgga

SEQ ID NO: 3788566 - DNA, 25 bp, Homo sapien
tcgcttttgagactggctgggacaa

SEQ ID NO: 3788567 - DNA, 25 bp, Homo sapien
tgccttggcctctcaaagtgctggg

SEQ ID NO: 3788568 - DNA, 25 bp, Homo sapien
ctgccttggcctctcaaagtgctgg

SEQ ID NO: 3788569 - DNA, 25 bp, Homo sapien
taggattactggcacatgccaccat

SEQ ID NO: 3788570 - DNA, 25 bp, Homo sapien
ctaggattactggcacatgccacca

SEQ ID NO: 3788571 - DNA, 25 bp, Homo sapien
gggctaggaagtctcgccattacag

SEQ ID NO: 3788572 - DNA, 25 bp, Homo sapien
tgcacagcgctcctagctacagtgg

SEQ ID NO: 3788573 - DNA, 25 bp, Homo sapien
gaagtctcgccattacagggtgggt

SEQ ID NO: 3788574 - DNA, 25 bp, Homo sapien
ccagaacacgaagcggggataggtt

SEQ ID NO: 3788575 - DNA, 25 bp, Homo sapien
aggaaataagagatagtggctaccc

SEQ ID NO: 3788576 - DNA, 25 bp, Homo sapien
gaagcattaaggacagcatagtttt

SEQ ID NO: 3788577 - DNA, 25 bp, Homo sapien
aaatcacgaaagaacttcaaaagca

SEQ ID NO: 3788578 - DNA, 25 bp, Homo sapien
gtcttgagaatacatgtcttggtgt

SEQ ID NO: 3788579 - DNA, 25 bp, Homo sapien
cagctgtgtttcttgagcgtcgctt

SEQ ID NO: 3788580 - DNA, 25 bp, Homo sapien
gagcgtcgctttggaacattttgtt

SEQ ID NO: 3788581 - DNA, 25 bp, Homo sapien
gtggctgcgatgaccacctcttcag

SEQ ID NO: 3788582 - DNA, 25 bp, Homo sapien
tgtcctgcagacggcgtagcctctg

SEQ ID NO: 3788583 - DNA, 25 bp, Homo sapien
ctcttggcggcgacgctcagcttgg

SEQ ID NO: 3788584 - DNA, 25 bp, Homo sapien
aaaagcaacctcttggcggcgacgc

SEQ ID NO: 3788585 - DNA, 25 bp, Homo sapien
ggcgacgctcagcttggctcgttca

SEQ ID NO: 3788586 - DNA, 25 bp, Homo sapien
gacgctcagcttggctcgttcatcc

SEQ ID NO: 3788587 - DNA, 25 bp, Homo sapien
catcgacagttggcgtttctgaatg

SEQ ID NO: 3788588 - DNA, 25 bp, Homo sapien
cgtcagtgtggtaaaactcctgtgt

SEQ ID NO: 3788589 - DNA, 25 bp, Homo sapien
cagtgtggtaaaactcctgtgtcat

SEQ ID NO: 3788590 - DNA, 25 bp, Homo sapien
ctttcgttctgctgaagttataggt

SEQ ID NO: 3788591 - DNA, 25 bp, Homo sapien
ctatccgattcctttcgttctgctg

SEQ ID NO: 3788592 - DNA, 25 bp, Homo sapien
tctaaatctctcggaagtttttcta

SEQ ID NO: 3788593 - DNA, 25 bp, Homo sapien
tccgattcctttcgttctgctgaag

SEQ ID NO: 3788594 - DNA, 25 bp, Homo sapien
caggagaaaaatagcgtcttggttt

SEQ ID NO: 3788595 - DNA, 25 bp, Homo sapien
tctcccgttccacaccggtgggcaa

SEQ ID NO: 3788596 - DNA, 25 bp, Homo sapien
ccggtgggcaagccaggtccttcag

SEQ ID NO: 3788597 - DNA, 25 bp, Homo sapien
caccggtgggcaagccaggtccttc

SEQ ID NO: 3788598 - DNA, 25 bp, Homo sapien
ggtagtttttgagccattttccgca

SEQ ID NO: 3788599 - DNA, 25 bp, Homo sapien
tagttccccattagtaggcagaagc

SEQ ID NO: 3788600 - DNA, 25 bp, Homo sapien
attttccgcatagtcgccctgcacg

SEQ ID NO: 3788601 - DNA, 25 bp, Homo sapien
catgcacgtaaggaaggagacattc

SEQ ID NO: 3788602 - DNA, 25 bp, Homo sapien
cacaggtcgaggagtgaatcattct

SEQ ID NO: 3788603 - DNA, 25 bp, Homo sapien
tatgattcaatgcagaacacaacac

SEQ ID NO: 3788604 - DNA, 25 bp, Homo sapien
gaatcattctgccagggacgtgcaa

SEQ ID NO: 3788605 - DNA, 25 bp, Homo sapien
cagggacgtgcaagtgacacagctg

SEQ ID NO: 3788606 - DNA, 25 bp, Homo sapien
taaggcccttcggtcttggagctgg

SEQ ID NO: 3788607 - DNA, 25 bp, Homo sapien
tcttgggacacaggctcactttgaa

SEQ ID NO: 3788608 - DNA, 25 bp, Homo sapien
tgaatgtagagaaccatctcgctcc

SEQ ID NO: 3788609 - DNA, 25 bp, Homo sapien
cagatgccaggaacgcacttcggag

SEQ ID NO: 3788610 - DNA, 25 bp, Homo sapien
ttctgggcttctcactagcccatca

SEQ ID NO: 3788611 - DNA, 25 bp, Homo sapien
tcacagcaggcttaccaaagtcctc

SEQ ID NO: 3788612 - DNA, 25 bp, Homo sapien
gtcctcatttctagagggatcttct

SEQ ID NO: 3788613 - DNA, 25 bp, Homo sapien
tgagggggttgtgccacgttttcca

SEQ ID NO: 3788614 - DNA, 25 bp, Homo sapien
agaactgggctatcccttccgtcac

SEQ ID NO: 3788615 - DNA, 25 bp, Homo sapien
agacatggagaactgggctatccct

SEQ ID NO: 3788616 - DNA, 25 bp, Homo sapien
tggagaactgggctatcccttccgt

SEQ ID NO: 3788617 - DNA, 25 bp, Homo sapien
acatggagaactgggctatcccttc

SEQ ID NO: 3788618 - DNA, 25 bp, Homo sapien
gaaatgacacgtaatggactggcgc

SEQ ID NO: 3788619 - DNA, 25 bp, Homo sapien
ggtttctggcgtcactagcttggcg

SEQ ID NO: 3788620 - DNA, 25 bp, Homo sapien
gtatctgcgggttggacatagccac

SEQ ID NO: 3788621 - DNA, 25 bp, Homo sapien
ttctagaaccgtcaagctgggaggt

SEQ ID NO: 3788622 - DNA, 25 bp, Homo sapien
ttaaaggacaatccacacagacgca

SEQ ID NO: 3788623 - DNA, 25 bp, Homo sapien
gaatgcgtgctcctgatcagagaca

SEQ ID NO: 3788624 - DNA, 25 bp, Homo sapien
tatttttcccagagatgagccagtg

SEQ ID NO: 3788625 - DNA, 25 bp, Homo sapien
tcaaaaggagactgaagcgcggttc

SEQ ID NO: 3788626 - DNA, 25 bp, Homo sapien
ccagttgataagtgaaggtgtgtcc

SEQ ID NO: 3788627 - DNA, 25 bp, Homo sapien
gtgtgtccccttcggaatctttctg

SEQ ID NO: 3788628 - DNA, 25 bp, Homo sapien
tccccttcggaatctttctggagaa

SEQ ID NO: 3788629 - DNA, 25 bp, Homo sapien
aaccactcatgtttgggtttccctg

SEQ ID NO: 3788630 - DNA, 25 bp, Homo sapien
ggcaattctcttgtaagcagctgac

SEQ ID NO: 3788631 - DNA, 25 bp, Homo sapien
tgctatagagttcatattcacttca

SEQ ID NO: 3788632 - DNA, 25 bp, Homo sapien
ggcgataacagcacgactctgtcac

SEQ ID NO: 3788633 - DNA, 25 bp, Homo sapien
aaaagaacggagtctattatagtca

SEQ ID NO: 3788634 - DNA, 25 bp, Homo sapien
tatagtcgccctgttgtgctaacac

SEQ ID NO: 3788635 - DNA, 25 bp, Homo sapien
tcctatgacatagggtgcctgtgaa

SEQ ID NO: 3788636 - DNA, 25 bp, Homo sapien
ttttgtacccgttaggtgctggaca

SEQ ID NO: 3788637 - DNA, 25 bp, Homo sapien
tctgtgggactcctcatttggctca

SEQ ID NO: 3788638 - DNA, 25 bp, Homo sapien
tctctcagtgcatggaaacagacca

SEQ ID NO: 3788639 - DNA, 25 bp, Homo sapien
tgtcagaaaacctgcctgctagtgg

SEQ ID NO: 3788640 - DNA, 25 bp, Homo sapien
gattctagagtatggcagggagcac

SEQ ID NO: 3788641 - DNA, 25 bp, Homo sapien
cacgagagcgtggaaggtcaagcac

SEQ ID NO: 3788642 - DNA, 25 bp, Homo sapien
tagatgacaagagagtgcagcagtg

SEQ ID NO: 3788643 - DNA, 25 bp, Homo sapien
tctggatgctcgagtatgtggtgac

SEQ ID NO: 3788644 - DNA, 25 bp, Homo sapien
ttagagatgaccaggtgtgcacccc

SEQ ID NO: 3788645 - DNA, 25 bp, Homo sapien
caattaccccaaagctttaagcagg

SEQ ID NO: 3788646 - DNA, 25 bp, Homo sapien
aaggaggagtctcgcccagagaaag

SEQ ID NO: 3788647 - DNA, 25 bp, Homo sapien
gggaccgtggcacttcagtgaagga

SEQ ID NO: 3788648 - DNA, 25 bp, Homo sapien
cctcaggggatagctgtgggtcacc

SEQ ID NO: 3788649 - DNA, 25 bp, Homo sapien
aagagaaggtcgaggaactctcggc

SEQ ID NO: 3788650 - DNA, 25 bp, Homo sapien
agcacctccgggtcggaagagccgt

SEQ ID NO: 3788651 - DNA, 25 bp, Homo sapien
ggcatagtccttggattcaccggca

SEQ ID NO: 3788652 - DNA, 25 bp, Homo sapien
cagagaactagcatctctgcttgac

SEQ ID NO: 3788653 - DNA, 25 bp, Homo sapien
gaagagccgtcacccacatggaggg

SEQ ID NO: 3788654 - DNA, 25 bp, Homo sapien
cctggacttggtatagcgggataaa

SEQ ID NO: 3788655 - DNA, 25 bp, Homo sapien
caattctttcggctttggactccag

SEQ ID NO: 3788656 - DNA, 25 bp, Homo sapien
catggtacccgaaccatagggtgag

SEQ ID NO: 3788657 - DNA, 25 bp, Homo sapien
taaatactcggagtcggcctcggga

SEQ ID NO: 3788658 - DNA, 25 bp, Homo sapien
gacaagtgagctgccgtcattggac

SEQ ID NO: 3788659 - DNA, 25 bp, Homo sapien
gatgagttgggtcctctgggaaaga

SEQ ID NO: 3788660 - DNA, 25 bp, Homo sapien
acaagtgatggatgctggtttccgg

SEQ ID NO: 3788661 - DNA, 25 bp, Homo sapien
tatttcacgtgggaggccataggat

SEQ ID NO: 3788662 - DNA, 25 bp, Homo sapien
gagaggcccctatcttagagcacag

SEQ ID NO: 3788663 - DNA, 25 bp, Homo sapien
tctggccacaggaaattggaaactg

SEQ ID NO: 3788664 - DNA, 25 bp, Homo sapien
tccgttacccaacaatgtgcgaggg

SEQ ID NO: 3788665 - DNA, 25 bp, Homo sapien
caaggtgcagctttgactctagcgc

SEQ ID NO: 3788666 - DNA, 25 bp, Homo sapien
ctctgcaagaggatgggctgagtgt

SEQ ID NO: 3788667 - DNA, 25 bp, Homo sapien
ttccaggcgcctggcaattctttct

SEQ ID NO: 3788668 - DNA, 25 bp, Homo sapien
ctccagcaggcggtgagtcaccaat

SEQ ID NO: 3788669 - DNA, 25 bp, Homo sapien
gtcgctggctctcatgtatcgaggg

SEQ ID NO: 3788670 - DNA, 25 bp, Homo sapien
taagaattctttcttctttggttca

SEQ ID NO: 3788671 - DNA, 25 bp, Homo sapien
tcttctttggttcaaagatttgtct

SEQ ID NO: 3788672 - DNA, 25 bp, Homo sapien
ttctttggttcaaagatttgtctta

SEQ ID NO: 3788673 - DNA, 25 bp, Homo sapien
ctttggttcaaagatttgtcttaat

SEQ ID NO: 3788674 - DNA, 25 bp, Homo sapien
gatactgactacaaggatattactg

SEQ ID NO: 3788675 - DNA, 25 bp, Homo sapien
caatagcttaaattcataagggcgc

SEQ ID NO: 3788676 - DNA, 25 bp, Homo sapien
gttcatggagaataaaggtctctct

SEQ ID NO: 3788677 - DNA, 25 bp, Homo sapien
ggagaaatggccaaagttcatggag

SEQ ID NO: 3788678 - DNA, 25 bp, Homo sapien
gagtagctgggacttgcccagctaa

SEQ ID NO: 3788679 - DNA, 25 bp, Homo sapien
agtagctgggacttgcccagctaat

SEQ ID NO: 3788680 - DNA, 25 bp, Homo sapien
gtagctgggacttgcccagctaatt

SEQ ID NO: 3788681 - DNA, 25 bp, Homo sapien
cgagtagctgggacttgcccagcta

SEQ ID NO: 3788682 - DNA, 25 bp, Homo sapien
gagagtcctaaacattggcagagcc

SEQ ID NO: 3788683 - DNA, 25 bp, Homo sapien
ctatcacccgttcagttcctcagga

SEQ ID NO: 3788684 - DNA, 25 bp, Homo sapien
taaacctgtattccggctgacagcg

SEQ ID NO: 3788685 - DNA, 25 bp, Homo sapien
tattcttacttttggcctctggagc

SEQ ID NO: 3788686 - DNA, 25 bp, Homo sapien
gaagaaagatgctcatgataaagtc

SEQ ID NO: 3788687 - DNA, 25 bp, Homo sapien
gcatgtgcgccttgaccagtggaaa

SEQ ID NO: 3788688 - DNA, 25 bp, Homo sapien
caaacacgtgtgagtgcctccttgg

SEQ ID NO: 3788689 - DNA, 25 bp, Homo sapien
gcacgggctgttcgccgctcagcag

SEQ ID NO: 3788690 - DNA, 25 bp, Homo sapien
ctttaggaagtgcaactaaaagctg

SEQ ID NO: 3788691 - DNA, 25 bp, Homo sapien
taaaagctgagcatcgattcctctt

SEQ ID NO: 3788692 - DNA, 25 bp, Homo sapien
ttcctctttcgtggttagcgagctg

SEQ ID NO: 3788693 - DNA, 25 bp, Homo sapien
tctttatcttcgagtgagaactcct

SEQ ID NO: 3788694 - DNA, 25 bp, Homo sapien
tctgacgctgatgaaacacaagcac

SEQ ID NO: 3788695 - DNA, 25 bp, Homo sapien
ccgagggcaccgatcatcaatgaaa

SEQ ID NO: 3788696 - DNA, 25 bp, Homo sapien
gacatgcttgtaaaattcaggacgg

SEQ ID NO: 3788697 - DNA, 25 bp, Homo sapien
gcacctgtgagggtccagactcttc

SEQ ID NO: 3788698 - DNA, 25 bp, Homo sapien
ctttcctttgacgtgggaatccaag

SEQ ID NO: 3788699 - DNA, 25 bp, Homo sapien
ttcctttgacgtgggaatccaagga

SEQ ID NO: 3788700 - DNA, 25 bp, Homo sapien
tttgacgtgggaatccaaggaagct

SEQ ID NO: 3788701 - DNA, 25 bp, Homo sapien
cctttgacgtgggaatccaaggaag

SEQ ID NO: 3788702 - DNA, 25 bp, Homo sapien
agaatttgaaagctcccaaatagct

SEQ ID NO: 3788703 - DNA, 25 bp, Homo sapien
gctggaaaaccctgggcttctgaac

SEQ ID NO: 3788704 - DNA, 25 bp, Homo sapien
caaatagctggaaaaccctgggctt

SEQ ID NO: 3788705 - DNA, 25 bp, Homo sapien
aatagctggaaaaccctgggcttct

SEQ ID NO: 3788706 - DNA, 25 bp, Homo sapien
gattaaacagataagtttttcagtg

SEQ ID NO: 3788707 - DNA, 25 bp, Homo sapien
tacaggtggttttggattaaacaga

SEQ ID NO: 3788708 - DNA, 25 bp, Homo sapien
gattttagtgcacccttacctgagc

SEQ ID NO: 3788709 - DNA, 25 bp, Homo sapien
accgcacctgactgcaaatgatttt

SEQ ID NO: 3788710 - DNA, 25 bp, Homo sapien
actgtgtagcgcaggtcacagcggc

SEQ ID NO: 3788711 - DNA, 25 bp, Homo sapien
tcagggactgtgtagcgcaggtcac

SEQ ID NO: 3788712 - DNA, 25 bp, Homo sapien
gtattaaaccttcagggactgtgta

SEQ ID NO: 3788713 - DNA, 25 bp, Homo sapien
tgtagcgcaggtcacagcggcagct

SEQ ID NO: 3788714 - DNA, 25 bp, Homo sapien
tgaggcaactctcctttgggggcca

SEQ ID NO: 3788715 - DNA, 25 bp, Homo sapien
acccctgcaacgctgtcctttgagg

SEQ ID NO: 3788716 - DNA, 25 bp, Homo sapien
ctatttggggagtcagacgctgtca

SEQ ID NO: 3788717 - DNA, 25 bp, Homo sapien
gacgctgtcacttgttctggctgat

SEQ ID NO: 3788718 - DNA, 25 bp, Homo sapien
cagtctttcagaacaggtccccagc

SEQ ID NO: 3788719 - DNA, 25 bp, Homo sapien
ggagggcgtgtttgtgatatttcac

SEQ ID NO: 3788720 - DNA, 25 bp, Homo sapien
ccccttgctgattgatgcggggtag

SEQ ID NO: 3788721 - DNA, 25 bp, Homo sapien
gatatttcacactttcatgattggc

SEQ ID NO: 3788722 - DNA, 25 bp, Homo sapien
gcacattgcaactttgatctcctga

SEQ ID NO: 3788723 - DNA, 25 bp, Homo sapien
aaagaagacaacgaggacaccgctc

SEQ ID NO: 3788724 - DNA, 25 bp, Homo sapien
ctattccttatagagacagtggcct

SEQ ID NO: 3788725 - DNA, 25 bp, Homo sapien
gctccatgctcaaaagagacaccag

SEQ ID NO: 3788726 - DNA, 25 bp, Homo sapien
ggctcgggttctccggcttcgtaca

SEQ ID NO: 3788727 - DNA, 25 bp, Homo sapien
taatagaacagtactaggccacgtc

SEQ ID NO: 3788728 - DNA, 25 bp, Homo sapien
cattctgtccttcggacagtcacct

SEQ ID NO: 3788729 - DNA, 25 bp, Homo sapien
cgtacaggacacaagctcactgcca

SEQ ID NO: 3788730 - DNA, 25 bp, Homo sapien
tcctctaacttaggcaaaggaggag

SEQ ID NO: 3788731 - DNA, 25 bp, Homo sapien
cagctggccaacagtgtggtgggaa

SEQ ID NO: 3788732 - DNA, 25 bp, Homo sapien
ctttgtctcctctaacttaggcaaa

SEQ ID NO: 3788733 - DNA, 25 bp, Homo sapien
tgtctcctctaacttaggcaaagga

SEQ ID NO: 3788734 - DNA, 25 bp, Homo sapien
tttttaacccggacacatgcttgtg

SEQ ID NO: 3788735 - DNA, 25 bp, Homo sapien
tggatacagtgagacaaactccctg

SEQ ID NO: 3788736 - DNA, 25 bp, Homo sapien
gattcctgaactgcactatacctcc

SEQ ID NO: 3788737 - DNA, 25 bp, Homo sapien
gtatcagttgaagtactaacccctc

SEQ ID NO: 3788738 - DNA, 25 bp, Homo sapien
gcttctgcattgctggtttctctct

SEQ ID NO: 3788739 - DNA, 25 bp, Homo sapien
ctctcttcagctccttggctgtcat

SEQ ID NO: 3788740 - DNA, 25 bp, Homo sapien
ctgtgcttctgcattgctggtttct

SEQ ID NO: 3788741 - DNA, 25 bp, Homo sapien
tctctcttcagctccttggctgtca

SEQ ID NO: 3788742 - DNA, 25 bp, Homo sapien
atatcgtccaagcaggcaacgcggt

SEQ ID NO: 3788743 - DNA, 25 bp, Homo sapien
gcagtctgggctcatcgcaatcttt

SEQ ID NO: 3788744 - DNA, 25 bp, Homo sapien
cagcacggctctgctagggtatgga

SEQ ID NO: 3788745 - DNA, 25 bp, Homo sapien
caatagcagcaaagaaggcgaattc

SEQ ID NO: 3788746 - DNA, 25 bp, Homo sapien
ggccatgtagtctgtggccccatca

SEQ ID NO: 3788747 - DNA, 25 bp, Homo sapien
agctcgctgtttctgcagggcgagc

SEQ ID NO: 3788748 - DNA, 25 bp, Homo sapien
caggacagctaggacagctcgctgt

SEQ ID NO: 3788749 - DNA, 25 bp, Homo sapien
tcattccacacgtggccctagggaa

SEQ ID NO: 3788750 - DNA, 25 bp, Homo sapien
agctgtgtctagtgggctctgtagc

SEQ ID NO: 3788751 - DNA, 25 bp, Homo sapien
tagctatgcaccaccataatttgtc

SEQ ID NO: 3788752 - DNA, 25 bp, Homo sapien
gagcaggtgtcacatatgagagcac

SEQ ID NO: 3788753 - DNA, 25 bp, Homo sapien
tccttcacgaggattccttcttcag

SEQ ID NO: 3788754 - DNA, 25 bp, Homo sapien
tcacgcctgtaatcccagcacttcg

SEQ ID NO: 3788755 - DNA, 25 bp, Homo sapien
aaagggagaggccgggcgctgtggc

SEQ ID NO: 3788756 - DNA, 25 bp, Homo sapien
cttcggggggccgaggcagttggat

SEQ ID NO: 3788757 - DNA, 25 bp, Homo sapien
agcacttcggggggccgaggcagtt

SEQ ID NO: 3788758 - DNA, 25 bp, Homo sapien
tgacgactgaaactcgagactcctt

SEQ ID NO: 3788759 - DNA, 25 bp, Homo sapien
gacttcttaccatcctgacgactga

SEQ ID NO: 3788760 - DNA, 25 bp, Homo sapien
cagctgggagaaacgatgtgaaaga

SEQ ID NO: 3788761 - DNA, 25 bp, Homo sapien
tgcagaacaggacaaggctgtggcc

SEQ ID NO: 3788762 - DNA, 25 bp, Homo sapien
taagttattccctggtactgaattg

SEQ ID NO: 3788763 - DNA, 25 bp, Homo sapien
gttattccctggtactgaattgcat

SEQ ID NO: 3788764 - DNA, 25 bp, Homo sapien
agttattccctggtactgaattgca

SEQ ID NO: 3788765 - DNA, 25 bp, Homo sapien
tattccctggtactgaattgcattg

SEQ ID NO: 3788766 - DNA, 25 bp, Homo sapien
ttactgtagcaagtgtggtcttttc

SEQ ID NO: 3788767 - DNA, 25 bp, Homo sapien
tactgtagcaagtgtggtcttttct

SEQ ID NO: 3788768 - DNA, 25 bp, Homo sapien
ctgctgtttggaggtacagctttcc

SEQ ID NO: 3788769 - DNA, 25 bp, Homo sapien
acaagcagggcacatccctgagtca

SEQ ID NO: 3788770 - DNA, 25 bp, Homo sapien
tgacaagcagggcacatccctgagt

SEQ ID NO: 3788771 - DNA, 25 bp, Homo sapien
gacaagcagggcacatccctgagtc

SEQ ID NO: 3788772 - DNA, 25 bp, Homo sapien
ctccaaccccttcacgggcaaggct

SEQ ID NO: 3788773 - DNA, 25 bp, Homo sapien
aaccccttcacgggcaaggctcaag

SEQ ID NO: 3788774 - DNA, 25 bp, Homo sapien
cagctcaaggcttcccatcctgact

SEQ ID NO: 3788775 - DNA, 25 bp, Homo sapien
ccttcacgggcaaggctcaaggagc

SEQ ID NO: 3788776 - DNA, 25 bp, Homo sapien
gaagatgtgaactgagttgcgaaaa

SEQ ID NO: 3788777 - DNA, 25 bp, Homo sapien
gtaagaagaagatgtgaactgagtt

SEQ ID NO: 3788778 - DNA, 25 bp, Homo sapien
tgtgaactgagttgcgaaaatcaaa

SEQ ID NO: 3788779 - DNA, 25 bp, Homo sapien
gaagaagatgtgaactgagttgcga

SEQ ID NO: 3788780 - DNA, 25 bp, Homo sapien
tctgagacttgtacaatcacaacag

SEQ ID NO: 3788781 - DNA, 25 bp, Homo sapien
ctcctcgctgccatcattgcagaat

SEQ ID NO: 3788782 - DNA, 25 bp, Homo sapien
cattgcagaatctgagacttgtaca

SEQ ID NO: 3788783 - DNA, 25 bp, Homo sapien
cttgtacaatcacaacagcctctga

SEQ ID NO: 3788784 - DNA, 25 bp, Homo sapien
tctcctcctcctctccatcctccat

SEQ ID NO: 3788785 - DNA, 25 bp, Homo sapien
gtgtctcctcctcctctccatcctc

SEQ ID NO: 3788786 - DNA, 25 bp, Homo sapien
ctctggtggtgtctcctcctcctct

SEQ ID NO: 3788787 - DNA, 25 bp, Homo sapien
tctggtggtgtctcctcctcctctc

SEQ ID NO: 3788788 - DNA, 25 bp, Homo sapien
gactcccaaggtttgccattgtcca

SEQ ID NO: 3788789 - DNA, 25 bp, Homo sapien
cagactcccaaggtttgccattgtc

SEQ ID NO: 3788790 - DNA, 25 bp, Homo sapien
actcccaaggtttgccattgtccat

SEQ ID NO: 3788791 - DNA, 25 bp, Homo sapien
agactcccaaggtttgccattgtcc

SEQ ID NO: 3788792 - DNA, 25 bp, Homo sapien
tccatggactttacgctccaggaga

SEQ ID NO: 3788793 - DNA, 25 bp, Homo sapien
ccttcaaggtgactggagccaactg

SEQ ID NO: 3788794 - DNA, 25 bp, Homo sapien
tccaggagataccaaatggcccagt

SEQ ID NO: 3788795 - DNA, 25 bp, Homo sapien
ggtctcaaccagtcagaactcagag

SEQ ID NO: 3788796 - DNA, 25 bp, Homo sapien
cagagaagtaatcagaccccttgtt

SEQ ID NO: 3788797 - DNA, 25 bp, Homo sapien
tcataagagaatgtgcttccacccc

SEQ ID NO: 3788798 - DNA, 25 bp, Homo sapien
cagtcggttgactatggatcctcaa

SEQ ID NO: 3788799 - DNA, 25 bp, Homo sapien
tcattcgagcaagggtcccagggaa

SEQ ID NO: 3788800 - DNA, 25 bp, Homo sapien
ccaccgtagacagctaattttcagc

SEQ ID NO: 3788801 - DNA, 25 bp, Homo sapien
actacgggcataggccaccgtagac

SEQ ID NO: 3788802 - DNA, 25 bp, Homo sapien
cataggccaccgtagacagctaatt

SEQ ID NO: 3788803 - DNA, 25 bp, Homo sapien
ccgtagacagctaattttcagcaaa

SEQ ID NO: 3788804 - DNA, 25 bp, Homo sapien
cagtgtggccaccaagtgctccact

SEQ ID NO: 3788805 - DNA, 25 bp, Homo sapien
gattttgggctaaaagtggcaactc

SEQ ID NO: 3788806 - DNA, 25 bp, Homo sapien
ggcaactcaagatccaggtagcttt

SEQ ID NO: 3788807 - DNA, 25 bp, Homo sapien
taaagtagcccagtaacaatcgaac

SEQ ID NO: 3788808 - DNA, 25 bp, Homo sapien
aactggaagccgtgaaaattctttg

SEQ ID NO: 3788809 - DNA, 25 bp, Homo sapien
tggccagaggcgctagaatttaaac

SEQ ID NO: 3788810 - DNA, 25 bp, Homo sapien
gactgacagaagtcattatgcgcaa

SEQ ID NO: 3788811 - DNA, 25 bp, Homo sapien
taatcaaacacagaacaaaccatgg

SEQ ID NO: 3788812 - DNA, 25 bp, Homo sapien
ggagaatgatctcacttgcctgtgg

SEQ ID NO: 3788813 - DNA, 25 bp, Homo sapien
tggtattctgtacccaaggacactc

SEQ ID NO: 3788814 - DNA, 25 bp, Homo sapien
caaggacactcacacggtctgtgag

SEQ ID NO: 3788815 - DNA, 25 bp, Homo sapien
cctccatgtaagaatcaggtaaatc

SEQ ID NO: 3788816 - DNA, 25 bp, Homo sapien
cccagtgatagaagtgaccaggtga

SEQ ID NO: 3788817 - DNA, 25 bp, Homo sapien
catcaatgctcatgttagccaggga

SEQ ID NO: 3788818 - DNA, 25 bp, Homo sapien
gaccaggtgaatcgtcttaaaaaga

SEQ ID NO: 3788819 - DNA, 25 bp, Homo sapien
taaggccccatgaaccaagcaatct

SEQ ID NO: 3788820 - DNA, 25 bp, Homo sapien
gaccatagcaatctccagggcttta

SEQ ID NO: 3788821 - DNA, 25 bp, Homo sapien
tatgcccaagggtatctacaggaat

SEQ ID NO: 3788822 - DNA, 25 bp, Homo sapien
tcgcaagttctagaaatcaagccct

SEQ ID NO: 3788823 - DNA, 25 bp, Homo sapien
ggaaacatgctcagacagatggcac

SEQ ID NO: 3788824 - DNA, 25 bp, Homo sapien
tgtataatcctcgttcctctaagtt

SEQ ID NO: 3788825 - DNA, 25 bp, Homo sapien
tataatcctcgttcctctaagttaa

SEQ ID NO: 3788826 - DNA, 25 bp, Homo sapien
tctgtataatcctcgttcctctaag

SEQ ID NO: 3788827 - DNA, 25 bp, Homo sapien
atttctgtataatcctcgttcctct

SEQ ID NO: 3788828 - DNA, 25 bp, Homo sapien
gaaacctgaggacacttcagcctgg

SEQ ID NO: 3788829 - DNA, 25 bp, Homo sapien
tagtgtcctcgaggctgaacttccc

SEQ ID NO: 3788830 - DNA, 25 bp, Homo sapien
gaatccagcttttgatgtcttcgag

SEQ ID NO: 3788831 - DNA, 25 bp, Homo sapien
aaagatcacgatgtcagcaagcaac

SEQ ID NO: 3788832 - DNA, 25 bp, Homo sapien
actttcacaaatccgctgcccaggg

SEQ ID NO: 3788833 - DNA, 25 bp, Homo sapien
tcttccgtgcattctgatctcctgg

SEQ ID NO: 3788834 - DNA, 25 bp, Homo sapien
tctcctgggcttggcatcactttca

SEQ ID NO: 3788835 - DNA, 25 bp, Homo sapien
taggactcccttgcaaaatcttccg

SEQ ID NO: 3788836 - DNA, 25 bp, Homo sapien
tctgaagaagtcttggcctttttct

SEQ ID NO: 3788837 - DNA, 25 bp, Homo sapien
gaagtacaccaaagctcccgatctc

SEQ ID NO: 3788838 - DNA, 25 bp, Homo sapien
tctgaaaccttcaagaagtacacca

SEQ ID NO: 3788839 - DNA, 25 bp, Homo sapien
aagaagtacaccaaagctcccgatc

SEQ ID NO: 3788840 - DNA, 25 bp, Homo sapien
caaaggtgtatttcgagtcttccac

SEQ ID NO: 3788841 - DNA, 25 bp, Homo sapien
gagaatgataagatgacgctcccac

SEQ ID NO: 3788842 - DNA, 25 bp, Homo sapien
tattctagggccaggattctcaagt

SEQ ID NO: 3788843 - DNA, 25 bp, Homo sapien
cagccacatggagttaagaaaaccc

SEQ ID NO: 3788844 - DNA, 25 bp, Homo sapien
ttcatgtcacctggatccccacatc

SEQ ID NO: 3788845 - DNA, 25 bp, Homo sapien
tcatgtcacctggatccccacatct

SEQ ID NO: 3788846 - DNA, 25 bp, Homo sapien
caatgcaggcttctctggagaggca

SEQ ID NO: 3788847 - DNA, 25 bp, Homo sapien
gacagtggaaactgaccttgcccga

SEQ ID NO: 3788848 - DNA, 25 bp, Homo sapien
tcatcatgatgagcagccaatgcag

SEQ ID NO: 3788849 - DNA, 25 bp, Homo sapien
tctgcacaggttcacaaacgttact

SEQ ID NO: 3788850 - DNA, 25 bp, Homo sapien
ttctgttatggcagcacgaagtgga

SEQ ID NO: 3788851 - DNA, 25 bp, Homo sapien
cgaagtggacttagacaatgatgtt

SEQ ID NO: 3788852 - DNA, 25 bp, Homo sapien
aaaagtgcgtacatttctctgttgc

SEQ ID NO: 3788853 - DNA, 25 bp, Homo sapien
tctttatcacgagagtggatttgct

SEQ ID NO: 3788854 - DNA, 25 bp, Homo sapien
atttgtgttcttgccccaatctcat

SEQ ID NO: 3788855 - DNA, 25 bp, Homo sapien
ggatttgtgttcttgccccaatctc

SEQ ID NO: 3788856 - DNA, 25 bp, Homo sapien
gatttgtgttcttgccccaatctca

SEQ ID NO: 3788857 - DNA, 25 bp, Homo sapien
ttgtgttcttgccccaatctcatgt

SEQ ID NO: 3788858 - DNA, 25 bp, Homo sapien
gaatagaatagaataccagtaccac

SEQ ID NO: 3788859 - DNA, 25 bp, Homo sapien
ccaatccaaggccattaaatttgta

SEQ ID NO: 3788860 - DNA, 25 bp, Homo sapien
gaatggactaatgcatagccctttt

SEQ ID NO: 3788861 - DNA, 25 bp, Homo sapien
cagcttttctttggcagatggatat

SEQ ID NO: 3788862 - DNA, 25 bp, Homo sapien
taatgtgttaaccacaaaagtgtca

SEQ ID NO: 3788863 - DNA, 25 bp, Homo sapien
gcaagcaaagccaataatgtgttaa

SEQ ID NO: 3788864 - DNA, 25 bp, Homo sapien
tcttctaacagtgcaagcaaagcca

SEQ ID NO: 3788865 - DNA, 25 bp, Homo sapien
atctcttctaacagtgcaagcaaag

SEQ ID NO: 3788866 - DNA, 25 bp, Homo sapien
taaatcatggcttcgatgtgaaatg

SEQ ID NO: 3788867 - DNA, 25 bp, Homo sapien
tctcagcttttcaagtcctcaaggc

SEQ ID NO: 3788868 - DNA, 25 bp, Homo sapien
ctcaaggccatccacttgaactctc

SEQ ID NO: 3788869 - DNA, 25 bp, Homo sapien
cttaacgccgatatttaaatcatgg

SEQ ID NO: 3788870 - DNA, 25 bp, Homo sapien
tgacagcacaggttcttaaaaggac

SEQ ID NO: 3788871 - DNA, 25 bp, Homo sapien
tgccctggttgagagacgcctatat

SEQ ID NO: 3788872 - DNA, 25 bp, Homo sapien
caaaatagcaactgacgccaagggc

SEQ ID NO: 3788873 - DNA, 25 bp, Homo sapien
ttagtacactcctgcaaaaccctgg

SEQ ID NO: 3788874 - DNA, 25 bp, Homo sapien
ctgatgagggaccagatcaaaatcc

SEQ ID NO: 3788875 - DNA, 25 bp, Homo sapien
actgcaggcaccgacttcacttttc

SEQ ID NO: 3788876 - DNA, 25 bp, Homo sapien
tccttggaacaccaggcgcagagac

SEQ ID NO: 3788877 - DNA, 25 bp, Homo sapien
tgcaggcaccgacttcacttttcat

SEQ ID NO: 3788878 - DNA, 25 bp, Homo sapien
gatgcattctgcttttccaaactga

SEQ ID NO: 3788879 - DNA, 25 bp, Homo sapien
tccaaactgaagctgggacttccga

SEQ ID NO: 3788880 - DNA, 25 bp, Homo sapien
ttattgttttaagatgtcaaggatg

SEQ ID NO: 3788881 - DNA, 25 bp, Homo sapien
tccttgctacactaaccagctgttt

SEQ ID NO: 3788882 - DNA, 25 bp, Homo sapien
taggatgttactcccacccacacag

SEQ ID NO: 3788883 - DNA, 25 bp, Homo sapien
cactgcactgcaattgtctctaaaa

SEQ ID NO: 3788884 - DNA, 25 bp, Homo sapien
cctctccaggctaggatgttactcc

SEQ ID NO: 3788885 - DNA, 25 bp, Homo sapien
ctgcactgcaattgtctctaaaaca

SEQ ID NO: 3788886 - DNA, 25 bp, Homo sapien
catttgcctaggatgtaacgcccat

SEQ ID NO: 3788887 - DNA, 25 bp, Homo sapien
tgggccctgagttatcaccttaagg

SEQ ID NO: 3788888 - DNA, 25 bp, Homo sapien
gcccatttggccgtttggagtcgat

SEQ ID NO: 3788889 - DNA, 25 bp, Homo sapien
tggcagttggaacactgagctggac

SEQ ID NO: 3788890 - DNA, 25 bp, Homo sapien
acacttccgctcagacctgtcttga

SEQ ID NO: 3788891 - DNA, 25 bp, Homo sapien
gctctgttgtgacacccagcacacg

SEQ ID NO: 3788892 - DNA, 25 bp, Homo sapien
ctcagacctgtcttgaagggaaggc

SEQ ID NO: 3788893 - DNA, 25 bp, Homo sapien
gaagggaaggctctgttgtgacacc

SEQ ID NO: 3788894 - DNA, 25 bp, Homo sapien
actcaagagctcctgagaacatgta

SEQ ID NO: 3788895 - DNA, 25 bp, Homo sapien
tatggatcatgacctgtgacacaga

SEQ ID NO: 3788896 - DNA, 25 bp, Homo sapien
tatgtgctttacagagacagaagac

SEQ ID NO: 3788897 - DNA, 25 bp, Homo sapien
ggtggagtcaaagattttctgtctg

SEQ ID NO: 3788898 - DNA, 25 bp, Homo sapien
cagctgaactccacatgatactgca

SEQ ID NO: 3788899 - DNA, 25 bp, Homo sapien
tgaactccacatgatactgcaaaca

SEQ ID NO: 3788900 - DNA, 25 bp, Homo sapien
agctgaactccacatgatactgcaa

SEQ ID NO: 3788901 - DNA, 25 bp, Homo sapien
gctgaactccacatgatactgcaaa

SEQ ID NO: 3788902 - DNA, 25 bp, Homo sapien
tttagaaagcaaccaatctccaatg

SEQ ID NO: 3788903 - DNA, 25 bp, Homo sapien
gaaagcaaccaatctccaatgtagc

SEQ ID NO: 3788904 - DNA, 25 bp, Homo sapien
gagaatccaccatctcttcatgggc

SEQ ID NO: 3788905 - DNA, 25 bp, Homo sapien
tcttccgctagtcaaaactcagtga

SEQ ID NO: 3788906 - DNA, 25 bp, Homo sapien
aggatgtaatttccaaagcctagaa

SEQ ID NO: 3788907 - DNA, 25 bp, Homo sapien
taggatgtaatttccaaagcctaga

SEQ ID NO: 3788908 - DNA, 25 bp, Homo sapien
tcatttatgtcgcacaaacaaattt

SEQ ID NO: 3788909 - DNA, 25 bp, Homo sapien
catttatgtcgcacaaacaaattta

SEQ ID NO: 3788910 - DNA, 25 bp, Homo sapien
atttatgtcgcacaaacaaatttac

SEQ ID NO: 3788911 - DNA, 25 bp, Homo sapien
tattcggacaaatacgatgacaagg

SEQ ID NO: 3788912 - DNA, 25 bp, Homo sapien
caaggagtttgagtatcgacatgtc

SEQ ID NO: 3788913 - DNA, 25 bp, Homo sapien
tatcgacatgtcatgctgcccaagg

SEQ ID NO: 3788914 - DNA, 25 bp, Homo sapien
agccaagctggtccctaaaacccat

SEQ ID NO: 3788915 - DNA, 25 bp, Homo sapien
tccaacctaccagcagattcagagg

SEQ ID NO: 3788916 - DNA, 25 bp, Homo sapien
aaattttgggcacactgctcagtga

SEQ ID NO: 3788917 - DNA, 25 bp, Homo sapien
caaatgggccctggcttaccaagga

SEQ ID NO: 3788918 - DNA, 25 bp, Homo sapien
gaaaagcttactctacacaaatggg

SEQ ID NO: 3788919 - DNA, 25 bp, Homo sapien
tgatgcagggctgaagtgtgcacac

SEQ ID NO: 3788920 - DNA, 25 bp, Homo sapien
tttgagctgatgcagggctgaagtg

SEQ ID NO: 3788921 - DNA, 25 bp, Homo sapien
aaggagacaagctgtagacccagct

SEQ ID NO: 3788922 - DNA, 25 bp, Homo sapien
aggagacaagctgtagacccagctg

SEQ ID NO: 3788923 - DNA, 25 bp, Homo sapien
tctctgtcacaactctgcaacttgg

SEQ ID NO: 3788924 - DNA, 25 bp, Homo sapien
gcagtatgggccatacaggtctctg

SEQ ID NO: 3788925 - DNA, 25 bp, Homo sapien
ggtctatcaaacagaggcaacccaa

SEQ ID NO: 3788926 - DNA, 25 bp, Homo sapien
catcagaaacggctgagtgaggagt

SEQ ID NO: 3788927 - DNA, 25 bp, Homo sapien
caatacaaaggccaagatggaagta

SEQ ID NO: 3788928 - DNA, 25 bp, Homo sapien
ctacctgggtaaatacataagagct

SEQ ID NO: 3788929 - DNA, 25 bp, Homo sapien
cagtggaaatagttactacctgggt

SEQ ID NO: 3788930 - DNA, 25 bp, Homo sapien
gatataatatcacttaaaggtagac

SEQ ID NO: 3788931 - DNA, 25 bp, Homo sapien
ggaaaagggcaggatctcgtgtccc

SEQ ID NO: 3788932 - DNA, 25 bp, Homo sapien
cataactgggtcttatcagaaccac

SEQ ID NO: 3788933 - DNA, 25 bp, Homo sapien
cagggtgattcatcctgcagaggac

SEQ ID NO: 3788934 - DNA, 25 bp, Homo sapien
cagggtcagaggtccgtctttctac

SEQ ID NO: 3788935 - DNA, 25 bp, Homo sapien
gggatcaaggcagaaaccagaggct

SEQ ID NO: 3788936 - DNA, 25 bp, Homo sapien
aggctgctggttgcgatgcacagca

SEQ ID NO: 3788937 - DNA, 25 bp, Homo sapien
ccagaggctgctggttgcgatgcac

SEQ ID NO: 3788938 - DNA, 25 bp, Homo sapien
caagcaccattgaggggatcaaggc

SEQ ID NO: 3788939 - DNA, 25 bp, Homo sapien
aaacttaccccaagtcaaagagcag

SEQ ID NO: 3788940 - DNA, 25 bp, Homo sapien
tagagcagccttggatagaaacaaa

SEQ ID NO: 3788941 - DNA, 25 bp, Homo sapien
gctgaattggccagaggaaagctga

SEQ ID NO: 3788942 - DNA, 25 bp, Homo sapien
caaagccatgtattggaaaccctgg

SEQ ID NO: 3788943 - DNA, 25 bp, Homo sapien
aacaagtaagtctctttacaatgac

SEQ ID NO: 3788944 - DNA, 25 bp, Homo sapien
tacagtttaacaaaggcgcctgtct

SEQ ID NO: 3788945 - DNA, 25 bp, Homo sapien
gcctcccctgacagactatatctgg

SEQ ID NO: 3788946 - DNA, 25 bp, Homo sapien
taacattgacataacagaaacaagt

SEQ ID NO: 3788947 - DNA, 25 bp, Homo sapien
ggcaagttctctcccatatgcgaag

SEQ ID NO: 3788948 - DNA, 25 bp, Homo sapien
tgtgatccaaaataacgccgcctgt

SEQ ID NO: 3788949 - DNA, 25 bp, Homo sapien
tccgtacaatggaagcgacggccca

SEQ ID NO: 3788950 - DNA, 25 bp, Homo sapien
tgtaagtacagttgccccagcagct

SEQ ID NO: 3788951 - DNA, 25 bp, Homo sapien
tttccagatggagtgcaacaagtgg

SEQ ID NO: 3788952 - DNA, 25 bp, Homo sapien
ctttccagatggagtgcaacaagtg

SEQ ID NO: 3788953 - DNA, 25 bp, Homo sapien
gatcttgctcctaactctttacacg

SEQ ID NO: 3788954 - DNA, 25 bp, Homo sapien
taactctttacacgcctccaattgg

SEQ ID NO: 3788955 - DNA, 25 bp, Homo sapien
tccaattggttatgcacgcagctca

SEQ ID NO: 3788956 - DNA, 25 bp, Homo sapien
aaatgcacaaaagcagggatcttgc

SEQ ID NO: 3788957 - DNA, 25 bp, Homo sapien
tgtaaactccttgggcgactggacc

SEQ ID NO: 3788958 - DNA, 25 bp, Homo sapien
gagaaggaggaatcactaactgtac

SEQ ID NO: 3788959 - DNA, 25 bp, Homo sapien
aaggcccaccacaaaattacacagt

SEQ ID NO: 3788960 - DNA, 25 bp, Homo sapien
taagaacagtcagttcagggcaact

SEQ ID NO: 3788961 - DNA, 25 bp, Homo sapien
agccagagcgagactgacccgcgcc

SEQ ID NO: 3788962 - DNA, 25 bp, Homo sapien
gagcgcagcggcgcgtcctggcgtc

SEQ ID NO: 3788963 - DNA, 25 bp, Homo sapien
gcgcagcgccccgtcgcagcggccc

SEQ ID NO: 3788964 - DNA, 25 bp, Homo sapien
ctcggccaccgcgcggagggacttt

SEQ ID NO: 3788965 - DNA, 25 bp, Homo sapien
ggatcgccgcttcccgccgacagcg

SEQ ID NO: 3788966 - DNA, 25 bp, Homo sapien
ttcccgccgacagcggctcggcggc

SEQ ID NO: 3788967 - DNA, 25 bp, Homo sapien
cccgacttctcagcagcgccgcggc

SEQ ID NO: 3788968 - DNA, 25 bp, Homo sapien
tcccggtggcaggatcgccgcttcc

SEQ ID NO: 3788969 - DNA, 25 bp, Homo sapien
cgggatgattcacttcgctccttac

SEQ ID NO: 3788970 - DNA, 25 bp, Homo sapien
gggtccccgctcgggatgattcact

SEQ ID NO: 3788971 - DNA, 25 bp, Homo sapien
tccccgctcgggatgattcacttcg

SEQ ID NO: 3788972 - DNA, 25 bp, Homo sapien
gctcgggatgattcacttcgctcct

SEQ ID NO: 3788973 - DNA, 25 bp, Homo sapien
ccaccccttgcgacccgcgcggcgg

SEQ ID NO: 3788974 - DNA, 25 bp, Homo sapien
cccaccccttgcgacccgcgcggcg

SEQ ID NO: 3788975 - DNA, 25 bp, Homo sapien
caccccttgcgacccgcgcggcggc

SEQ ID NO: 3788976 - DNA, 25 bp, Homo sapien
aggacacgaactcgcgcccggagcc

SEQ ID NO: 3788977 - DNA, 25 bp, Homo sapien
cttcccaaaacaggggccagtgcgc

SEQ ID NO: 3788978 - DNA, 25 bp, Homo sapien
aggggggccaagcacaagcacccct

SEQ ID NO: 3788979 - DNA, 25 bp, Homo sapien
ggaccacgctgggacgactctcggg

SEQ ID NO: 3788980 - DNA, 25 bp, Homo sapien
gatgaatcggcataagcacgtccta

SEQ ID NO: 3788981 - DNA, 25 bp, Homo sapien
gggtccagccgcgtcctcggaggtg

SEQ ID NO: 3788982 - DNA, 25 bp, Homo sapien
gaaaccgcgatgaatcggcataagc

SEQ ID NO: 3788983 - DNA, 25 bp, Homo sapien
gtggcccaaggaaaccgcgatgaat

SEQ ID NO: 3788984 - DNA, 25 bp, Homo sapien
cagagcccgactgcgcccgccctcc

SEQ ID NO: 3788985 - DNA, 25 bp, Homo sapien
gcgcgctcctgcagagcccgactgc

SEQ ID NO: 3788986 - DNA, 25 bp, Homo sapien
tccgcgcgctcctgcagagcccgac

SEQ ID NO: 3788987 - DNA, 25 bp, Homo sapien
ctcctcgcccacctgccgggcccgg

SEQ ID NO: 3788988 - DNA, 25 bp, Homo sapien
gctctgctgcccggaggcagccgct

SEQ ID NO: 3788989 - DNA, 25 bp, Homo sapien
cggctctgctgcccggaggcagccg

SEQ ID NO: 3788990 - DNA, 25 bp, Homo sapien
tctgctgcccggaggcagccgctta

SEQ ID NO: 3788991 - DNA, 25 bp, Homo sapien
ctgctgcccggaggcagccgcttac

SEQ ID NO: 3788992 - DNA, 25 bp, Homo sapien
gggataaataaaatctggcgacctg

SEQ ID NO: 3788993 - DNA, 25 bp, Homo sapien
cctgagaggcccctttgagtctcca

SEQ ID NO: 3788994 - DNA, 25 bp, Homo sapien
cagaccttccagggataaataaaat

SEQ ID NO: 3788995 - DNA, 25 bp, Homo sapien
taaaatctggcgacctgtgccaacg

SEQ ID NO: 3788996 - DNA, 25 bp, Homo sapien
ccagttgcaaaggagaccgtccttg

SEQ ID NO: 3788997 - DNA, 25 bp, Homo sapien
taggtgctctgtaaaggcttgtatg

SEQ ID NO: 3788998 - DNA, 25 bp, Homo sapien
gggtacagttaagcaaagcttggag

SEQ ID NO: 3788999 - DNA, 25 bp, Homo sapien
cagagagcccagatttatggagctc

SEQ ID NO: 3789000 - DNA, 25 bp, Homo sapien
gcccagatttatggagctcttggag

SEQ ID NO: 3789001 - DNA, 25 bp, Homo sapien
tttgtcctctgagggaaatgactga

SEQ ID NO: 3789002 - DNA, 25 bp, Homo sapien
agagtcagctacattggggaacaat

SEQ ID NO: 3789003 - DNA, 25 bp, Homo sapien
ttgtcctctgagggaaatgactgaa

SEQ ID NO: 3789004 - DNA, 25 bp, Homo sapien
tccttccagcctcctgttggctgtc

SEQ ID NO: 3789005 - DNA, 25 bp, Homo sapien
cctccttccagcctcctgttggctg

SEQ ID NO: 3789006 - DNA, 25 bp, Homo sapien
tccctccttccagcctcctgttggc

SEQ ID NO: 3789007 - DNA, 25 bp, Homo sapien
cttccagcctcctgttggctgtcat

SEQ ID NO: 3789008 - DNA, 25 bp, Homo sapien
gaatcttcacatccacctgagaatc

SEQ ID NO: 3789009 - DNA, 25 bp, Homo sapien
cagaagaagaagttttctttggaat

SEQ ID NO: 3789010 - DNA, 25 bp, Homo sapien
tggaatcttcacatccacctgagaa

SEQ ID NO: 3789011 - DNA, 25 bp, Homo sapien
tttggaatcttcacatccacctgag

SEQ ID NO: 3789012 - DNA, 25 bp, Homo sapien
agggcactgtaagctgtgtctaagg

SEQ ID NO: 3789013 - DNA, 25 bp, Homo sapien
tctaaggtgatggctctttcaaaaa

SEQ ID NO: 3789014 - DNA, 25 bp, Homo sapien
tcttctttagttcccctcctatcga

SEQ ID NO: 3789015 - DNA, 25 bp, Homo sapien
aagtccccaaaccatattcacaagg

SEQ ID NO: 3789016 - DNA, 25 bp, Homo sapien
cttcacaatgtcaatggagtcagca

SEQ ID NO: 3789017 - DNA, 25 bp, Homo sapien
gaatatcataagtgcatatacagct

SEQ ID NO: 3789018 - DNA, 25 bp, Homo sapien
aatttagagacatcgtctggtctgt

SEQ ID NO: 3789019 - DNA, 25 bp, Homo sapien
gcatctctgagaaaaatgctcaggg

SEQ ID NO: 3789020 - DNA, 25 bp, Homo sapien
ggaaaccggcaattataaatgcatg

SEQ ID NO: 3789021 - DNA, 25 bp, Homo sapien
catggcggaatggaactcccaatta

SEQ ID NO: 3789022 - DNA, 25 bp, Homo sapien
tattgatggtgcttggagctgagcc

SEQ ID NO: 3789023 - DNA, 25 bp, Homo sapien
ttcacttgacacgtgagaaattccg

SEQ ID NO: 3789024 - DNA, 25 bp, Homo sapien
caccatccaggtagtttcacgaacc

SEQ ID NO: 3789025 - DNA, 25 bp, Homo sapien
tcagcaacgttttgtggattgaagt

SEQ ID NO: 3789026 - DNA, 25 bp, Homo sapien
caacgttttgtggattgaagtgtcc

SEQ ID NO: 3789027 - DNA, 25 bp, Homo sapien
ccaggtagtttcacgaaccaagtgg

SEQ ID NO: 3789028 - DNA, 25 bp, Homo sapien
gtgacctatcgcctgaggctggacc

SEQ ID NO: 3789029 - DNA, 25 bp, Homo sapien
ggctggaccaagaggacaccttcct

SEQ ID NO: 3789030 - DNA, 25 bp, Homo sapien
cctgctgtgggtgacctatcgcctg

SEQ ID NO: 3789031 - DNA, 25 bp, Homo sapien
gaagtctcttgatatcctgtccctc

SEQ ID NO: 3789032 - DNA, 25 bp, Homo sapien
aaggaagccggagaactcagggcct

SEQ ID NO: 3789033 - DNA, 25 bp, Homo sapien
gatgtcgtgacagatgtgctccttc

SEQ ID NO: 3789034 - DNA, 25 bp, Homo sapien
tggaaagtgctgatgtcgtgacaga

SEQ ID NO: 3789035 - DNA, 25 bp, Homo sapien
cgtgtaatgatgatgtcccgccagc

SEQ ID NO: 3789036 - DNA, 25 bp, Homo sapien
agatccatgtgctagcaagcatccc

SEQ ID NO: 3789037 - DNA, 25 bp, Homo sapien
agaggtgaagtaagatccatgtgct

SEQ ID NO: 3789038 - DNA, 25 bp, Homo sapien
gaggtgaagtaagatccatgtgcta

SEQ ID NO: 3789039 - DNA, 25 bp, Homo sapien
cagaggatgcccgtggctattctct

SEQ ID NO: 3789040 - DNA, 25 bp, Homo sapien
gatgcccgtggctattctctttgca

SEQ ID NO: 3789041 - DNA, 25 bp, Homo sapien
tgcccgtggctattctctttgcaac

SEQ ID NO: 3789042 - DNA, 25 bp, Homo sapien
tggacccagaggatgcccgtggcta

SEQ ID NO: 3789043 - DNA, 25 bp, Homo sapien
tcactggtcggttcatactcctttt

SEQ ID NO: 3789044 - DNA, 25 bp, Homo sapien
tagtttgatcaggtttcactggtcg

SEQ ID NO: 3789045 - DNA, 25 bp, Homo sapien
gcagcccgcactgttcctagtttga

SEQ ID NO: 3789046 - DNA, 25 bp, Homo sapien
tgggttgggctctgtttctatgaac

SEQ ID NO: 3789047 - DNA, 25 bp, Homo sapien
tcccacattggtccctactttttca

SEQ ID NO: 3789048 - DNA, 25 bp, Homo sapien
cccacattggtccctactttttcag

SEQ ID NO: 3789049 - DNA, 25 bp, Homo sapien
ccacattggtccctactttttcagt

SEQ ID NO: 3789050 - DNA, 25 bp, Homo sapien
gaaggtccgtgcgaaacacaagaag

SEQ ID NO: 3789051 - DNA, 25 bp, Homo sapien
tgtggtccatatcttctccgaggcc

SEQ ID NO: 3789052 - DNA, 25 bp, Homo sapien
ttctccgaggccctcatgctgagaa

SEQ ID NO: 3789053 - DNA, 25 bp, Homo sapien
ggcaatgtcaccttatcccaggaga

SEQ ID NO: 3789054 - DNA, 25 bp, Homo sapien
caaggtatgcacacattcgcgtgta

SEQ ID NO: 3789055 - DNA, 25 bp, Homo sapien
cactaaagaagggtgaagggcactt

SEQ ID NO: 3789056 - DNA, 25 bp, Homo sapien
aagggcactttggaacaaggtatgc

SEQ ID NO: 3789057 - DNA, 25 bp, Homo sapien
gctttgctgagagcctataggtccc

SEQ ID NO: 3789058 - DNA, 25 bp, Homo sapien
caaggccttgattccaagcccgagt

SEQ ID NO: 3789059 - DNA, 25 bp, Homo sapien
caatggagcgcgaatgcacactgtc

SEQ ID NO: 3789060 - DNA, 25 bp, Homo sapien
agctcttcacagacgggctgggacg

SEQ ID NO: 3789061 - DNA, 25 bp, Homo sapien
ctgtcctcggccagggttctgagct

SEQ ID NO: 3789062 - DNA, 25 bp, Homo sapien
tggcaaaaactgaactcaatggttc

SEQ ID NO: 3789063 - DNA, 25 bp, Homo sapien
gaaccttgataactggcaaaaactg

SEQ ID NO: 3789064 - DNA, 25 bp, Homo sapien
ctggcagaaccttgataactggcaa

SEQ ID NO: 3789065 - DNA, 25 bp, Homo sapien
ggcaaaaactgaactcaatggttct

SEQ ID NO: 3789066 - DNA, 25 bp, Homo sapien
catggtgtcatttttgcgaggtgca

SEQ ID NO: 3789067 - DNA, 25 bp, Homo sapien
gagcttcgagatgatgaggacgcca

SEQ ID NO: 3789068 - DNA, 25 bp, Homo sapien
tgatctgcctccagtaaataaacgg

SEQ ID NO: 3789069 - DNA, 25 bp, Homo sapien
ggctcttagcatgctgaagctggga

SEQ ID NO: 3789070 - DNA, 25 bp, Homo sapien
ctatcctataggcacagctcttgct

SEQ ID NO: 3789071 - DNA, 25 bp, Homo sapien
tcctataggcacagctcttgctctt

SEQ ID NO: 3789072 - DNA, 25 bp, Homo sapien
ctataggcacagctcttgctcttcc

SEQ ID NO: 3789073 - DNA, 25 bp, Homo sapien
tatcctataggcacagctcttgctc

SEQ ID NO: 3789074 - DNA, 25 bp, Homo sapien
tgtactcacggcgatttctccctcg

SEQ ID NO: 3789075 - DNA, 25 bp, Homo sapien
ggcactctgtactcacggcgatttc

SEQ ID NO: 3789076 - DNA, 25 bp, Homo sapien
ctgtggcactctgtactcacggcga

SEQ ID NO: 3789077 - DNA, 25 bp, Homo sapien
ttctccctcgcttttggagctgcct

SEQ ID NO: 3789078 - DNA, 25 bp, Homo sapien
acgttcatgttaaccagaacagaaa

SEQ ID NO: 3789079 - DNA, 25 bp, Homo sapien
atttacgttcatgttaaccagaaca

SEQ ID NO: 3789080 - DNA, 25 bp, Homo sapien
tacgttcatgttaaccagaacagaa

SEQ ID NO: 3789081 - DNA, 25 bp, Homo sapien
tttacgttcatgttaaccagaacag

SEQ ID NO: 3789082 - DNA, 25 bp, Homo sapien
cagctgctcaaattgcaggagacaa

SEQ ID NO: 3789083 - DNA, 25 bp, Homo sapien
ggcattgtttggcagcggctcgaca

SEQ ID NO: 3789084 - DNA, 25 bp, Homo sapien
gaagttaaacaggacgctggctttc

SEQ ID NO: 3789085 - DNA, 25 bp, Homo sapien
acagaagtgtggttcgtgcgtcccc

SEQ ID NO: 3789086 - DNA, 25 bp, Homo sapien
taggaggaacagaggccttgagtcc

SEQ ID NO: 3789087 - DNA, 25 bp, Homo sapien
ttaggaggaacagaggccttgagtc

SEQ ID NO: 3789088 - DNA, 25 bp, Homo sapien
aacattgagttagcatgagggccac

SEQ ID NO: 3789089 - DNA, 25 bp, Homo sapien
tgaggaatgctcgtctgctccagga

SEQ ID NO: 3789090 - DNA, 25 bp, Homo sapien
catgaagtgcaagacgcaaaccctt

SEQ ID NO: 3789091 - DNA, 25 bp, Homo sapien
gtttggcaatcaggacatagaggga

SEQ ID NO: 3789092 - DNA, 25 bp, Homo sapien
tctagaagtcgcttctgagaattgt

SEQ ID NO: 3789093 - DNA, 25 bp, Homo sapien
gaagtcgcttctgagaattgtggtc

SEQ ID NO: 3789094 - DNA, 25 bp, Homo sapien
ctctctagaagtcgcttctgagaat

SEQ ID NO: 3789095 - DNA, 25 bp, Homo sapien
gtcgcttctgagaattgtggtccat

SEQ ID NO: 3789096 - DNA, 25 bp, Homo sapien
cattctgaatccacaaggaaaggcc

SEQ ID NO: 3789097 - DNA, 25 bp, Homo sapien
aaggaaaggccttcacactatacat

SEQ ID NO: 3789098 - DNA, 25 bp, Homo sapien
tccattctgaatccacaaggaaagg

SEQ ID NO: 3789099 - DNA, 25 bp, Homo sapien
gctccattctgaatccacaaggaaa

SEQ ID NO: 3789100 - DNA, 25 bp, Homo sapien
ctcgaaggtaaatggctggcttcac

SEQ ID NO: 3789101 - DNA, 25 bp, Homo sapien
tcaaaattccctctctcgaaggtaa

SEQ ID NO: 3789102 - DNA, 25 bp, Homo sapien
tctctcgaaggtaaatggctggctt

SEQ ID NO: 3789103 - DNA, 25 bp, Homo sapien
tccctctctcgaaggtaaatggctg

SEQ ID NO: 3789104 - DNA, 25 bp, Homo sapien
tttgtgcgggcccttgcagaaggac

SEQ ID NO: 3789105 - DNA, 25 bp, Homo sapien
cgggcccttgcagaaggacacagat

SEQ ID NO: 3789106 - DNA, 25 bp, Homo sapien
ggctcttttgaggagctcttgcagc

SEQ ID NO: 3789107 - DNA, 25 bp, Homo sapien
ctcttttgaggagctcttgcagctt

SEQ ID NO: 3789108 - DNA, 25 bp, Homo sapien
gcagaaggaagttatttgagagaag

SEQ ID NO: 3789109 - DNA, 25 bp, Homo sapien
caagaccaccatgcccaataggagc

SEQ ID NO: 3789110 - DNA, 25 bp, Homo sapien
agcaagaccaccatgcccaatagga

SEQ ID NO: 3789111 - DNA, 25 bp, Homo sapien
gggcagaaggaagttatttgagaga

SEQ ID NO: 3789112 - DNA, 25 bp, Homo sapien
tctccagtattctttttcgttgctc

SEQ ID NO: 3789113 - DNA, 25 bp, Homo sapien
gtattctttttcgttgctcttccca

SEQ ID NO: 3789114 - DNA, 25 bp, Homo sapien
ctgttagcgccttctctccttcaga

SEQ ID NO: 3789115 - DNA, 25 bp, Homo sapien
ccttggccctgttagcgccttctct

SEQ ID NO: 3789116 - DNA, 25 bp, Homo sapien
cctgggcttcctgcactccctgtgg

SEQ ID NO: 3789117 - DNA, 25 bp, Homo sapien
tgggcttcctgcactccctgtggcc

SEQ ID NO: 3789118 - DNA, 25 bp, Homo sapien
ccccgagtgcctgggcttcctgcac

SEQ ID NO: 3789119 - DNA, 25 bp, Homo sapien
ggcttcctgcactccctgtggccat

SEQ ID NO: 3789120 - DNA, 25 bp, Homo sapien
ttggctcttgtctctagacttaatt

SEQ ID NO: 3789121 - DNA, 25 bp, Homo sapien
gtcttctctcgaggggggtccattc

SEQ ID NO: 3789122 - DNA, 25 bp, Homo sapien
tgttctccaaggcttggctcttgtc

SEQ ID NO: 3789123 - DNA, 25 bp, Homo sapien
ctctcgaggggggtccattctctct

SEQ ID NO: 3789124 - DNA, 25 bp, Homo sapien
ttggtttctggccacagtcaaccat

SEQ ID NO: 3789125 - DNA, 25 bp, Homo sapien
ctttggtttctggccacagtcaacc

SEQ ID NO: 3789126 - DNA, 25 bp, Homo sapien
tttggtttctggccacagtcaacca

SEQ ID NO: 3789127 - DNA, 25 bp, Homo sapien
tggtttctggccacagtcaaccatg

SEQ ID NO: 3789128 - DNA, 25 bp, Homo sapien
gggggagaaagtcaggctcacaaat

SEQ ID NO: 3789129 - DNA, 25 bp, Homo sapien
agaaagtcaggctcacaaatctcat

SEQ ID NO: 3789130 - DNA, 25 bp, Homo sapien
gagaaagtcaggctcacaaatctca

SEQ ID NO: 3789131 - DNA, 25 bp, Homo sapien
gggagaaagtcaggctcacaaatct

SEQ ID NO: 3789132 - DNA, 25 bp, Homo sapien
cctcgcagccttgccttgggttctg

SEQ ID NO: 3789133 - DNA, 25 bp, Homo sapien
cagccagcccatgctgaaatgaatg

SEQ ID NO: 3789134 - DNA, 25 bp, Homo sapien
caactaacagtcctcctagaacgtg

SEQ ID NO: 3789135 - DNA, 25 bp, Homo sapien
aagcatggtcctccaagcacgcgac

SEQ ID NO: 3789136 - DNA, 25 bp, Homo sapien
gctgaaattggccaagaaggcctct

SEQ ID NO: 3789137 - DNA, 25 bp, Homo sapien
tagccacatcgtccctggctgtttt

SEQ ID NO: 3789138 - DNA, 25 bp, Homo sapien
cgtccctggctgttttgctgaaatt

SEQ ID NO: 3789139 - DNA, 25 bp, Homo sapien
attggccaagaaggcctctcccatg

SEQ ID NO: 3789140 - DNA, 25 bp, Homo sapien
cctctatgggatgaaatgctgtcca

SEQ ID NO: 3789141 - DNA, 25 bp, Homo sapien
tctatgagctaacagcactaccacg

SEQ ID NO: 3789142 - DNA, 25 bp, Homo sapien
gacaaaggccttggttctatgagct

SEQ ID NO: 3789143 - DNA, 25 bp, Homo sapien
tagaccaggtatgttccatgctgag

SEQ ID NO: 3789144 - DNA, 25 bp, Homo sapien
catgatttttgcaagtcttcccagg

SEQ ID NO: 3789145 - DNA, 25 bp, Homo sapien
gtctcgattgtatctgggcgcctca

SEQ ID NO: 3789146 - DNA, 25 bp, Homo sapien
ggttgtctatttcactcggaacttg

SEQ ID NO: 3789147 - DNA, 25 bp, Homo sapien
tattttatggcttcggtgtgaggaa

SEQ ID NO: 3789148 - DNA, 25 bp, Homo sapien
caacaacagaagcacgagcaccttc

SEQ ID NO: 3789149 - DNA, 25 bp, Homo sapien
gcacgagcaccttctagactcagca

SEQ ID NO: 3789150 - DNA, 25 bp, Homo sapien
agacaacaacagaagcacgagcacc

SEQ ID NO: 3789151 - DNA, 25 bp, Homo sapien
cttctagactcagcaaaggtttggg

SEQ ID NO: 3789152 - DNA, 25 bp, Homo sapien
gagccatcttcgaatcttctcttta

SEQ ID NO: 3789153 - DNA, 25 bp, Homo sapien
gacctggagccatcttcgaatcttc

SEQ ID NO: 3789154 - DNA, 25 bp, Homo sapien
tctttatcttgccacctgcatccaa

SEQ ID NO: 3789155 - DNA, 25 bp, Homo sapien
gaggtctatgcgttctataaattcc

SEQ ID NO: 3789156 - DNA, 25 bp, Homo sapien
tcagggtgcactttcggactgccat

SEQ ID NO: 3789157 - DNA, 25 bp, Homo sapien
cagcaccctagctctcaggaacatg

SEQ ID NO: 3789158 - DNA, 25 bp, Homo sapien
gtcagggtgcactttcggactgcca

SEQ ID NO: 3789159 - DNA, 25 bp, Homo sapien
accctagctctcaggaacatggtca

SEQ ID NO: 3789160 - DNA, 25 bp, Homo sapien
actttattcactgctcccctgaggg

SEQ ID NO: 3789161 - DNA, 25 bp, Homo sapien
tccaggcctgaacaagtgaagcttg

SEQ ID NO: 3789162 - DNA, 25 bp, Homo sapien
gaagcaggcccattttgttgtcaga

SEQ ID NO: 3789163 - DNA, 25 bp, Homo sapien
tggaacagacgttgtcctactgacc

SEQ ID NO: 3789164 - DNA, 25 bp, Homo sapien
gcaaaaagcacctcatcatggacga

SEQ ID NO: 3789165 - DNA, 25 bp, Homo sapien
tcttcaagggttgtggagatcctct

SEQ ID NO: 3789166 - DNA, 25 bp, Homo sapien
tcctctcaagggtgaagccaagggc

SEQ ID NO: 3789167 - DNA, 25 bp, Homo sapien
caacaagactggttggctgggcccc

SEQ ID NO: 3789168 - DNA, 25 bp, Homo sapien
tccctgagccagctgataatcatgt

SEQ ID NO: 3789169 - DNA, 25 bp, Homo sapien
cagagcaaatccctgagccagctga

SEQ ID NO: 3789170 - DNA, 25 bp, Homo sapien
gagcaaatccctgagccagctgata

SEQ ID NO: 3789171 - DNA, 25 bp, Homo sapien
aaatccctgagccagctgataatca

SEQ ID NO: 3789172 - DNA, 25 bp, Homo sapien
ccaacagcttccaggtgctggtgct

SEQ ID NO: 3789173 - DNA, 25 bp, Homo sapien
tgaaccaacagcttccaggtgctgg

SEQ ID NO: 3789174 - DNA, 25 bp, Homo sapien
cacctgaaccaacagcttccaggtg

SEQ ID NO: 3789175 - DNA, 25 bp, Homo sapien
ggctgggaaaggccctcttcttgga

SEQ ID NO: 3789176 - DNA, 25 bp, Homo sapien
gagaagatggtaggcgagattggaa

SEQ ID NO: 3789177 - DNA, 25 bp, Homo sapien
agatggtaggcgagattggaaatga

SEQ ID NO: 3789178 - DNA, 25 bp, Homo sapien
gatggtaggcgagattggaaatgag

SEQ ID NO: 3789179 - DNA, 25 bp, Homo sapien
gaagatggtaggcgagattggaaat

SEQ ID NO: 3789180 - DNA, 25 bp, Homo sapien
agatatgtgcaaatggacatgagtt

SEQ ID NO: 3789181 - DNA, 25 bp, Homo sapien
tgcaaatggacatgagtttcgggaa

SEQ ID NO: 3789182 - DNA, 25 bp, Homo sapien
atgagtttcgggaagacactgtgcc

SEQ ID NO: 3789183 - DNA, 25 bp, Homo sapien
tgagtttcgggaagacactgtgcct

SEQ ID NO: 3789184 - DNA, 25 bp, Homo sapien
cattgacccggagccatatttgagt

SEQ ID NO: 3789185 - DNA, 25 bp, Homo sapien
tcattcattggagcatagccctggc

SEQ ID NO: 3789186 - DNA, 25 bp, Homo sapien
tactgtgtccagaagactgggaccc

SEQ ID NO: 3789187 - DNA, 25 bp, Homo sapien
cagtgcagatatgaggagagtgtcc

SEQ ID NO: 3789188 - DNA, 25 bp, Homo sapien
cccttctttctcaggccactttcac

SEQ ID NO: 3789189 - DNA, 25 bp, Homo sapien
tctttctcaggccactttcactttt

SEQ ID NO: 3789190 - DNA, 25 bp, Homo sapien
tcacttttgtaactgagtgtggatt

SEQ ID NO: 3789191 - DNA, 25 bp, Homo sapien
ctttcacttttgtaactgagtgtgg

SEQ ID NO: 3789192 - DNA, 25 bp, Homo sapien
gggagagtcttatgcccgctgccag

SEQ ID NO: 3789193 - DNA, 25 bp, Homo sapien
cattgaagtagtttggataggagaa

SEQ ID NO: 3789194 - DNA, 25 bp, Homo sapien
ttcctgctctcgtccaagaaggtgg

SEQ ID NO: 3789195 - DNA, 25 bp, Homo sapien
gacagtgctagggagagtcttatgc

SEQ ID NO: 3789196 - DNA, 25 bp, Homo sapien
gccagatctcggatgctggtatgtt

SEQ ID NO: 3789197 - DNA, 25 bp, Homo sapien
tttcccaagctaacacatgccgctt

SEQ ID NO: 3789198 - DNA, 25 bp, Homo sapien
tgttattctccctgatggccagatc

SEQ ID NO: 3789199 - DNA, 25 bp, Homo sapien
caagctaacacatgccgcttccatt

SEQ ID NO: 3789200 - DNA, 25 bp, Homo sapien
ctctgtcttcactcctctcccatgc

SEQ ID NO: 3789201 - DNA, 25 bp, Homo sapien
ctgtcttcactcctctcccatgcct

SEQ ID NO: 3789202 - DNA, 25 bp, Homo sapien
tctgtcttcactcctctcccatgcc

SEQ ID NO: 3789203 - DNA, 25 bp, Homo sapien
cactgccgacatttagaattaagga

SEQ ID NO: 3789204 - DNA, 25 bp, Homo sapien
tgttagagatataaggaacacagtc

SEQ ID NO: 3789205 - DNA, 25 bp, Homo sapien
tcaacaggtaaagctgactgacaca

SEQ ID NO: 3789206 - DNA, 25 bp, Homo sapien
tatgaataggcaccttttcaacagg

SEQ ID NO: 3789207 - DNA, 25 bp, Homo sapien
taatggagtgcagtatccttccgga

SEQ ID NO: 3789208 - DNA, 25 bp, Homo sapien
tccttccggagcattaacttcttcc

SEQ ID NO: 3789209 - DNA, 25 bp, Homo sapien
agggcaaggctaaagtcttctctcg

SEQ ID NO: 3789210 - DNA, 25 bp, Homo sapien
cataatgcggatttctcaaacgtgg

SEQ ID NO: 3789211 - DNA, 25 bp, Homo sapien
tccatggagtatgagctttacgtgt

SEQ ID NO: 3789212 - DNA, 25 bp, Homo sapien
tggagtatgagctttacgtgtgttt

SEQ ID NO: 3789213 - DNA, 25 bp, Homo sapien
ggagtatgagctttacgtgtgtttt

SEQ ID NO: 3789214 - DNA, 25 bp, Homo sapien
catggagtatgagctttacgtgtgt

SEQ ID NO: 3789215 - DNA, 25 bp, Homo sapien
tgccctctcttgttgccttatttgc

SEQ ID NO: 3789216 - DNA, 25 bp, Homo sapien
tctcagggaaggctggtattgttgc

SEQ ID NO: 3789217 - DNA, 25 bp, Homo sapien
tgccttatttgcctggcccttttag

SEQ ID NO: 3789218 - DNA, 25 bp, Homo sapien
ggctggtattgttgcttggtgtcct

SEQ ID NO: 3789219 - DNA, 25 bp, Homo sapien
caatacaaaaggcaacgcggcagtt

SEQ ID NO: 3789220 - DNA, 25 bp, Homo sapien
gctggacccgtgaatctgagagact

SEQ ID NO: 3789221 - DNA, 25 bp, Homo sapien
gactggaccatatgccgatcgcttg

SEQ ID NO: 3789222 - DNA, 25 bp, Homo sapien
tgagcgctcagctatctgggagaag

SEQ ID NO: 3789223 - DNA, 25 bp, Homo sapien
tacaggcggcggcagccagccacgc

SEQ ID NO: 3789224 - DNA, 25 bp, Homo sapien
tgaaaatacaggcggcggcagccag

SEQ ID NO: 3789225 - DNA, 25 bp, Homo sapien
aaatacaggcggcggcagccagcca

SEQ ID NO: 3789226 - DNA, 25 bp, Homo sapien
ctgaaaatacaggcggcggcagcca

SEQ ID NO: 3789227 - DNA, 25 bp, Homo sapien
ctcctggaaatgccatggctcagat

SEQ ID NO: 3789228 - DNA, 25 bp, Homo sapien
cttcagtgccggagaagaacgtttc

SEQ ID NO: 3789229 - DNA, 25 bp, Homo sapien
ccggagaagaacgtttctgtcgctc

SEQ ID NO: 3789230 - DNA, 25 bp, Homo sapien
tccctggaactgctcctggaaatgc

SEQ ID NO: 3789231 - DNA, 25 bp, Homo sapien
ttgatctcaacatgataggccagga

SEQ ID NO: 3789232 - DNA, 25 bp, Homo sapien
aagctatatatctgggaacccaggg

SEQ ID NO: 3789233 - DNA, 25 bp, Homo sapien
taagaagaaagctttccactggcct

SEQ ID NO: 3789234 - DNA, 25 bp, Homo sapien
gggcgctgagcgaccaacttttgat

SEQ ID NO: 3789235 - DNA, 25 bp, Homo sapien
aagaccctgcgcttcaacttgtaga

SEQ ID NO: 3789236 - DNA, 25 bp, Homo sapien
gggttttgctacgtccatgctccat

SEQ ID NO: 3789237 - DNA, 25 bp, Homo sapien
cgagtttaagtgatcagcaggcgtt

SEQ ID NO: 3789238 - DNA, 25 bp, Homo sapien
cacgccacttgcacggagaatgatt

SEQ ID NO: 3789239 - DNA, 25 bp, Homo sapien
gccgtgctggggtctgtccaccatc

SEQ ID NO: 3789240 - DNA, 25 bp, Homo sapien
gtgctggggtctgtccaccatcaag

SEQ ID NO: 3789241 - DNA, 25 bp, Homo sapien
ccgtgctggggtctgtccaccatca

SEQ ID NO: 3789242 - DNA, 25 bp, Homo sapien
cgtgctggggtctgtccaccatcaa

SEQ ID NO: 3789243 - DNA, 25 bp, Homo sapien
catgtggcgtttcccacaggcagaa

SEQ ID NO: 3789244 - DNA, 25 bp, Homo sapien
tttggtataaatcgtgcagcacaag

SEQ ID NO: 3789245 - DNA, 25 bp, Homo sapien
gcagcacaagattggcataattcaa

SEQ ID NO: 3789246 - DNA, 25 bp, Homo sapien
cataattcaagcatagtgcgccgtc

SEQ ID NO: 3789247 - DNA, 25 bp, Homo sapien
gtggttccatccctctctgtgtcat

SEQ ID NO: 3789248 - DNA, 25 bp, Homo sapien
tctgtgtcatctagtcctaaccctt

SEQ ID NO: 3789249 - DNA, 25 bp, Homo sapien
taggaccctcatgtacagcctctgc

SEQ ID NO: 3789250 - DNA, 25 bp, Homo sapien
ttctaaagatgttaggaccctcatg

SEQ ID NO: 3789251 - DNA, 25 bp, Homo sapien
gtcaattgcaagctgaccacttggg

SEQ ID NO: 3789252 - DNA, 25 bp, Homo sapien
gcttttccagccagtcaattgcaag

SEQ ID NO: 3789253 - DNA, 25 bp, Homo sapien
aaccctgagcaacgtaggactgtag

SEQ ID NO: 3789254 - DNA, 25 bp, Homo sapien
tcagtttcccatggagttttggtcc

SEQ ID NO: 3789255 - DNA, 25 bp, Homo sapien
tggtgagacacaaatatctccaaaa

SEQ ID NO: 3789256 - DNA, 25 bp, Homo sapien
ctggtgagacacaaatatctccaaa

SEQ ID NO: 3789257 - DNA, 25 bp, Homo sapien
ctggccatgacccagtccgcagtca

SEQ ID NO: 3789258 - DNA, 25 bp, Homo sapien
cagtccgcagtcacgtacagacgta

SEQ ID NO: 3789259 - DNA, 25 bp, Homo sapien
cagtcacgtacagacgtagttttcc

SEQ ID NO: 3789260 - DNA, 25 bp, Homo sapien
cgtacagacgtagttttccaattgt

SEQ ID NO: 3789261 - DNA, 25 bp, Homo sapien
tcatctgtgctttgccggcatttta

SEQ ID NO: 3789262 - DNA, 25 bp, Homo sapien
tttacactgtgcagagaaatacaag

SEQ ID NO: 3789263 - DNA, 25 bp, Homo sapien
gtatgttactgagcaggccagccgc

SEQ ID NO: 3789264 - DNA, 25 bp, Homo sapien
tgaaatagcaaggatatttacactg

SEQ ID NO: 3789265 - DNA, 25 bp, Homo sapien
gcgatgactgcagccggcaatcggc

SEQ ID NO: 3789266 - DNA, 25 bp, Homo sapien
ccagcctgatctgggggcgatgact

SEQ ID NO: 3789267 - DNA, 25 bp, Homo sapien
accagcctgatctgggggcgatgac

SEQ ID NO: 3789268 - DNA, 25 bp, Homo sapien
atctgggggcgatgactgcagccgg

SEQ ID NO: 3789269 - DNA, 25 bp, Homo sapien
gaatttcagctgacctaggtggaga

SEQ ID NO: 3789270 - DNA, 25 bp, Homo sapien
cctgtcttaggtattaatggtgccc

SEQ ID NO: 3789271 - DNA, 25 bp, Homo sapien
atgaatgtctcacatctcggctctg

SEQ ID NO: 3789272 - DNA, 25 bp, Homo sapien
ccttgctccgtgacaatgaatgtct

SEQ ID NO: 3789273 - DNA, 25 bp, Homo sapien
caagtatcgcagaggctttccaagg

SEQ ID NO: 3789274 - DNA, 25 bp, Homo sapien
cccacactgctgatgaaccaaggac

SEQ ID NO: 3789275 - DNA, 25 bp, Homo sapien
tttcgacaggcaggttgctagccca

SEQ ID NO: 3789276 - DNA, 25 bp, Homo sapien
tagtagggcctgtctttcatacgga

SEQ ID NO: 3789277 - DNA, 25 bp, Homo sapien
aactcagccagaacacgcaaacgtg

SEQ ID NO: 3789278 - DNA, 25 bp, Homo sapien
tgcctccgagttgggaaagtagttg

SEQ ID NO: 3789279 - DNA, 25 bp, Homo sapien
cagaagccccaaaccgagatgctgt

SEQ ID NO: 3789280 - DNA, 25 bp, Homo sapien
gaaatccaagcagttatgcacatgg

SEQ ID NO: 3789281 - DNA, 25 bp, Homo sapien
taaattcaagacctctgggaaagct

SEQ ID NO: 3789282 - DNA, 25 bp, Homo sapien
gctgctgtgaaaactggagtgcact

SEQ ID NO: 3789283 - DNA, 25 bp, Homo sapien
tccagccacaaaaaacgaagttatg

SEQ ID NO: 3789284 - DNA, 25 bp, Homo sapien
ggtaattctagttgatacggcagca

SEQ ID NO: 3789285 - DNA, 25 bp, Homo sapien
gacaatggcgtgtttgcaaatgatc

SEQ ID NO: 3789286 - DNA, 25 bp, Homo sapien
tccttaaaaatctgccgcctaacaa

SEQ ID NO: 3789287 - DNA, 25 bp, Homo sapien
gataatactgagtgcaaagcagaca

SEQ ID NO: 3789288 - DNA, 25 bp, Homo sapien
ggtaagggacagagctttaaagcaa

SEQ ID NO: 3789289 - DNA, 25 bp, Homo sapien
gaaatcttcacccagaatgagagca

SEQ ID NO: 3789290 - DNA, 25 bp, Homo sapien
ggcaagtttcctagtggcagtggta

SEQ ID NO: 3789291 - DNA, 25 bp, Homo sapien
aaagtgctgaaacaccgggcaacag

SEQ ID NO: 3789292 - DNA, 25 bp, Homo sapien
ttcgcaacggaatgcaagctccacc

SEQ ID NO: 3789293 - DNA, 25 bp, Homo sapien
cacggtacacatgcttcacaggcac

SEQ ID NO: 3789294 - DNA, 25 bp, Homo sapien
cacacggtacacatgcttcacaggc

SEQ ID NO: 3789295 - DNA, 25 bp, Homo sapien
cagcacacggtacacatgcttcaca

SEQ ID NO: 3789296 - DNA, 25 bp, Homo sapien
ctgcagcacacggtacacatgcttc

SEQ ID NO: 3789297 - DNA, 25 bp, Homo sapien
cctgagccattgtgagcacaagttc

SEQ ID NO: 3789298 - DNA, 25 bp, Homo sapien
tggaaacagggcacaggtcgctgcc

SEQ ID NO: 3789299 - DNA, 25 bp, Homo sapien
aacagggcacaggtcgctgccgtga

SEQ ID NO: 3789300 - DNA, 25 bp, Homo sapien
actgagccctgagccattgtgagca

SEQ ID NO: 3789301 - DNA, 25 bp, Homo sapien
catggcatggggcgagctcttcctc

SEQ ID NO: 3789302 - DNA, 25 bp, Homo sapien
ggacggagcacagacgggtccctga

SEQ ID NO: 3789303 - DNA, 25 bp, Homo sapien
tttccttggcgcttccagctgggcc

SEQ ID NO: 3789304 - DNA, 25 bp, Homo sapien
accccacgccgtggcatggcatggg

SEQ ID NO: 3789305 - DNA, 25 bp, Homo sapien
aggagacatagcctgagacgcagcc

SEQ ID NO: 3789306 - DNA, 25 bp, Homo sapien
gcaaggagacatagcctgagacgca

SEQ ID NO: 3789307 - DNA, 25 bp, Homo sapien
tagcctgagacgcagcccagtgaag

SEQ ID NO: 3789308 - DNA, 25 bp, Homo sapien
acatagcctgagacgcagcccagtg

SEQ ID NO: 3789309 - DNA, 25 bp, Homo sapien
tgggctcgctggccgtaccgtacgg

SEQ ID NO: 3789310 - DNA, 25 bp, Homo sapien
gttgtaagaggagccgatgctgacc

SEQ ID NO: 3789311 - DNA, 25 bp, Homo sapien
gaactcggcttggtcttcgttccca

SEQ ID NO: 3789312 - DNA, 25 bp, Homo sapien
ccgtacggggtgttgtgcagctcct

SEQ ID NO: 3789313 - DNA, 25 bp, Homo sapien
aggccagggccggcccagcactcac

SEQ ID NO: 3789314 - DNA, 25 bp, Homo sapien
ccaagactgccccaggccagggccg

SEQ ID NO: 3789315 - DNA, 25 bp, Homo sapien
ccccaggccagggccggcccagcac

SEQ ID NO: 3789316 - DNA, 25 bp, Homo sapien
ccaggccagggccggcccagcactc

SEQ ID NO: 3789317 - DNA, 25 bp, Homo sapien
agtacagagcgtgtcctttctgcag

SEQ ID NO: 3789318 - DNA, 25 bp, Homo sapien
gtacagagcgtgtcctttctgcagc

SEQ ID NO: 3789319 - DNA, 25 bp, Homo sapien
agggacaccagcgacgagggcccac

SEQ ID NO: 3789320 - DNA, 25 bp, Homo sapien
cattctcaaccacaaagggatttgg

SEQ ID NO: 3789321 - DNA, 25 bp, Homo sapien
gccccacttcagagcaggtattttt

SEQ ID NO: 3789322 - DNA, 25 bp, Homo sapien
tcccgccgccgctgactgaagtggg

SEQ ID NO: 3789323 - DNA, 25 bp, Homo sapien
tcggcctgataggagggcctctgct

SEQ ID NO: 3789324 - DNA, 25 bp, Homo sapien
gagggcctctgctgcgtgggctctg

SEQ ID NO: 3789325 - DNA, 25 bp, Homo sapien
tggcaggcggcgctagcccacagat

SEQ ID NO: 3789326 - DNA, 25 bp, Homo sapien
gctctgtggaccccactgcattggc

SEQ ID NO: 3789327 - DNA, 25 bp, Homo sapien
tcgtcgtcactctggcggcgtgcag

SEQ ID NO: 3789328 - DNA, 25 bp, Homo sapien
tcacacttaatctgagccactccct

SEQ ID NO: 3789329 - DNA, 25 bp, Homo sapien
tgggtgcccctggtcctcgtcgtca

SEQ ID NO: 3789330 - DNA, 25 bp, Homo sapien
tgcagcgcgcagtgggggagaagac

SEQ ID NO: 3789331 - DNA, 25 bp, Homo sapien
acgcccacgccctcgccgggcacag

SEQ ID NO: 3789332 - DNA, 25 bp, Homo sapien
tgtgcgtggcccacaacagctgtct

SEQ ID NO: 3789333 - DNA, 25 bp, Homo sapien
atgtgtcacgtgagggctgcccaac

SEQ ID NO: 3789334 - DNA, 25 bp, Homo sapien
accaggtagggcagcaacgcccacg

SEQ ID NO: 3789335 - DNA, 25 bp, Homo sapien
ggcctcagacatgaagcgcaactcg

SEQ ID NO: 3789336 - DNA, 25 bp, Homo sapien
atgaagcgcaactcggcccgcgggt

SEQ ID NO: 3789337 - DNA, 25 bp, Homo sapien
aaggcgctgactcttgggcctctca

SEQ ID NO: 3789338 - DNA, 25 bp, Homo sapien
gcctctcagcccactcagtcctggg

SEQ ID NO: 3789339 - DNA, 25 bp, Homo sapien
acatccttgagcctcgttcttgcaa

SEQ ID NO: 3789340 - DNA, 25 bp, Homo sapien
tcacatccttgagcctcgttcttgc

SEQ ID NO: 3789341 - DNA, 25 bp, Homo sapien
catccttgagcctcgttcttgcaaa

SEQ ID NO: 3789342 - DNA, 25 bp, Homo sapien
tccttgagcctcgttcttgcaaaat

SEQ ID NO: 3789343 - DNA, 25 bp, Homo sapien
catctcgggaaaacgtaaatcattt

SEQ ID NO: 3789344 - DNA, 25 bp, Homo sapien
gacatggcagttcattacatctcgg

SEQ ID NO: 3789345 - DNA, 25 bp, Homo sapien
gttcattacatctcgggaaaacgta

SEQ ID NO: 3789346 - DNA, 25 bp, Homo sapien
aaacgtaaatcatttcttcagctgt

SEQ ID NO: 3789347 - DNA, 25 bp, Homo sapien
tggccttggacagctgggcccgtct

SEQ ID NO: 3789348 - DNA, 25 bp, Homo sapien
aggcagcgcccacccggccgccgtg

SEQ ID NO: 3789349 - DNA, 25 bp, Homo sapien
ctcagaggcaaaaaaggattcacac

SEQ ID NO: 3789350 - DNA, 25 bp, Homo sapien
caacttggggacgtctggccttgga

SEQ ID NO: 3789351 - DNA, 25 bp, Homo sapien
gatcttcaggatcgagcgggctgac

SEQ ID NO: 3789352 - DNA, 25 bp, Homo sapien
gaggccacgacgtgctggacactga

SEQ ID NO: 3789353 - DNA, 25 bp, Homo sapien
tgtgtgtagcaccaagaacgcttcc

SEQ ID NO: 3789354 - DNA, 25 bp, Homo sapien
gactccctgaccgagactagggcct

SEQ ID NO: 3789355 - DNA, 25 bp, Homo sapien
tctgcgaggtcgagagaaaccagcg

SEQ ID NO: 3789356 - DNA, 25 bp, Homo sapien
tgttttcaaagcatgcgggcagcgg

SEQ ID NO: 3789357 - DNA, 25 bp, Homo sapien
tgcaggtcgagtgaagtcccaaaca

SEQ ID NO: 3789358 - DNA, 25 bp, Homo sapien
ccggagttccggaagcaaagcgctt

SEQ ID NO: 3789359 - DNA, 25 bp, Homo sapien
tcacacagatgccacgtcagggcct

SEQ ID NO: 3789360 - DNA, 25 bp, Homo sapien
acacagatgccacgtcagggccttg

SEQ ID NO: 3789361 - DNA, 25 bp, Homo sapien
acagatgccacgtcagggccttggt

SEQ ID NO: 3789362 - DNA, 25 bp, Homo sapien
agctcttcatcgccccagccggcca

SEQ ID NO: 3789363 - DNA, 25 bp, Homo sapien
acgggctccaactgcgccactcgca

SEQ ID NO: 3789364 - DNA, 25 bp, Homo sapien
gagctcccgagtccctcgggcctgg

SEQ ID NO: 3789365 - DNA, 25 bp, Homo sapien
ctcgcaccccgcctgggccgcgctg

SEQ ID NO: 3789366 - DNA, 25 bp, Homo sapien
cgccgcctccgagggggagaggtct

SEQ ID NO: 3789367 - DNA, 25 bp, Homo sapien
cgccccacacccaagtccctgctct

SEQ ID NO: 3789368 - DNA, 25 bp, Homo sapien
cacccaagtccctgctctccttcat

SEQ ID NO: 3789369 - DNA, 25 bp, Homo sapien
cccacacccaagtccctgctctcct

SEQ ID NO: 3789370 - DNA, 25 bp, Homo sapien
acacccaagtccctgctctccttca

SEQ ID NO: 3789371 - DNA, 25 bp, Homo sapien
tcggcagcccgatcccgttgtacat

SEQ ID NO: 3789372 - DNA, 25 bp, Homo sapien
acaggttgcgctggacgtagccgtt

SEQ ID NO: 3789373 - DNA, 25 bp, Homo sapien
tccaggatgtcaggattaggccgct

SEQ ID NO: 3789374 - DNA, 25 bp, Homo sapien
tccagctcgaggcatcgcagctcga

SEQ ID NO: 3789375 - DNA, 25 bp, Homo sapien
tcgaaaggtcgccactttttcctga

SEQ ID NO: 3789376 - DNA, 25 bp, Homo sapien
gcccccagggttcacatccttctcc

SEQ ID NO: 3789377 - DNA, 25 bp, Homo sapien
ctcctccttgcccccagggttcaca

SEQ ID NO: 3789378 - DNA, 25 bp, Homo sapien
ttgcccccagggttcacatccttct

SEQ ID NO: 3789379 - DNA, 25 bp, Homo sapien
cctccttgcccccagggttcacatc

SEQ ID NO: 3789380 - DNA, 25 bp, Homo sapien
cagaacacaagtataagcaggagcc

SEQ ID NO: 3789381 - DNA, 25 bp, Homo sapien
ggacagagccatattcagaacacaa

SEQ ID NO: 3789382 - DNA, 25 bp, Homo sapien
gcagccagagtagagtccagagtca

SEQ ID NO: 3789383 - DNA, 25 bp, Homo sapien
tccagagtcatcgagggagagcgca

SEQ ID NO: 3789384 - DNA, 25 bp, Homo sapien
cacgacgctgaggatcaaaagagct

SEQ ID NO: 3789385 - DNA, 25 bp, Homo sapien
tgccaactggtgagtctccgtgacc

SEQ ID NO: 3789386 - DNA, 25 bp, Homo sapien
ttgtttagcttctcgggcacgacgc

SEQ ID NO: 3789387 - DNA, 25 bp, Homo sapien
caaaagagctgccatctacgtaaga

SEQ ID NO: 3789388 - DNA, 25 bp, Homo sapien
agcaacacagctcacaccgtaacct

SEQ ID NO: 3789389 - DNA, 25 bp, Homo sapien
agagatgggtggtagaacaaacatt

SEQ ID NO: 3789390 - DNA, 25 bp, Homo sapien
tgacccactgtgactaacccttgga

SEQ ID NO: 3789391 - DNA, 25 bp, Homo sapien
ggcagcaacacagctcacaccgtaa

SEQ ID NO: 3789392 - DNA, 25 bp, Homo sapien
agaactgctagactcccgaacaagg

SEQ ID NO: 3789393 - DNA, 25 bp, Homo sapien
gttggtgagcgagaactgctagact

SEQ ID NO: 3789394 - DNA, 25 bp, Homo sapien
tggtgagcgagaactgctagactcc

SEQ ID NO: 3789395 - DNA, 25 bp, Homo sapien
gagcgagaactgctagactcccgaa

SEQ ID NO: 3789396 - DNA, 25 bp, Homo sapien
tttctaaaacacttgaatgtcctaa

SEQ ID NO: 3789397 - DNA, 25 bp, Homo sapien
gtttctaaaacacttgaatgtccta

SEQ ID NO: 3789398 - DNA, 25 bp, Homo sapien
ttctaaaacacttgaatgtcctaat

SEQ ID NO: 3789399 - DNA, 25 bp, Homo sapien
atggattcaaaagcaagctcatcct

SEQ ID NO: 3789400 - DNA, 25 bp, Homo sapien
tggattcaaaagcaagctcatcctg

SEQ ID NO: 3789401 - DNA, 25 bp, Homo sapien
ggattcaaaagcaagctcatcctgc

SEQ ID NO: 3789402 - DNA, 25 bp, Homo sapien
ggccctcccacttacaatctctctc

SEQ ID NO: 3789403 - DNA, 25 bp, Homo sapien
tttctttctctcccgtcgaggagag

SEQ ID NO: 3789404 - DNA, 25 bp, Homo sapien
tcccgtcgaggagagctgctctctg

SEQ ID NO: 3789405 - DNA, 25 bp, Homo sapien
tttctctcccgtcgaggagagctgc

SEQ ID NO: 3789406 - DNA, 25 bp, Homo sapien
tctcccgtcgaggagagctgctctc

SEQ ID NO: 3789407 - DNA, 25 bp, Homo sapien
agaaacacctctgcctgaattcagc

SEQ ID NO: 3789408 - DNA, 25 bp, Homo sapien
tctgcctgaattcagcaaaccttct

SEQ ID NO: 3789409 - DNA, 25 bp, Homo sapien
aaaacataagaaacacctctgcctg

SEQ ID NO: 3789410 - DNA, 25 bp, Homo sapien
cctctgcctgaattcagcaaacctt

SEQ ID NO: 3789411 - DNA, 25 bp, Homo sapien
tatgcttacgtttcttggactcaga

SEQ ID NO: 3789412 - DNA, 25 bp, Homo sapien
gcttacgtttcttggactcagattc

SEQ ID NO: 3789413 - DNA, 25 bp, Homo sapien
ctatgcttacgtttcttggactcag

SEQ ID NO: 3789414 - DNA, 25 bp, Homo sapien
acgtttcttggactcagattctgac

SEQ ID NO: 3789415 - DNA, 25 bp, Homo sapien
aaggaattgagcttcactccaagaa

SEQ ID NO: 3789416 - DNA, 25 bp, Homo sapien
tgcgccccctatgagttaaagagct

SEQ ID NO: 3789417 - DNA, 25 bp, Homo sapien
gaaagagggagtgttgacacaagga

SEQ ID NO: 3789418 - DNA, 25 bp, Homo sapien
tgacacaaggaagatcaaggaattg

SEQ ID NO: 3789419 - DNA, 25 bp, Homo sapien
ccttagatttacgtttgctctttgg

SEQ ID NO: 3789420 - DNA, 25 bp, Homo sapien
tttgtccttagatttacgtttgctc

SEQ ID NO: 3789421 - DNA, 25 bp, Homo sapien
agatttacgtttgctctttggagtg

SEQ ID NO: 3789422 - DNA, 25 bp, Homo sapien
atttacgtttgctctttggagtggg

SEQ ID NO: 3789423 - DNA, 25 bp, Homo sapien
tcctaagcaaattccccacaaattc

SEQ ID NO: 3789424 - DNA, 25 bp, Homo sapien
tcaaccctttaccagtcagggacat

SEQ ID NO: 3789425 - DNA, 25 bp, Homo sapien
tcagggacataactcattcaactcc

SEQ ID NO: 3789426 - DNA, 25 bp, Homo sapien
taaggtggcgttcacttacttccta

SEQ ID NO: 3789427 - DNA, 25 bp, Homo sapien
tcagcagaagttgaacggtgggccc

SEQ ID NO: 3789428 - DNA, 25 bp, Homo sapien
cgactgcgggaagtatcggaggagg

SEQ ID NO: 3789429 - DNA, 25 bp, Homo sapien
tgcgggaagtatcggaggaggaagc

SEQ ID NO: 3789430 - DNA, 25 bp, Homo sapien
aagcagagtcagcagaagttgaacg

SEQ ID NO: 3789431 - DNA, 25 bp, Homo sapien
tattaaattaattaacccatcattc

SEQ ID NO: 3789432 - DNA, 25 bp, Homo sapien
tgtccatcctgttgctttagcctgt

SEQ ID NO: 3789433 - DNA, 25 bp, Homo sapien
agccttccccgattaaggaagccag

SEQ ID NO: 3789434 - DNA, 25 bp, Homo sapien
ggcagtccatatacatcagaacgaa

SEQ ID NO: 3789435 - DNA, 25 bp, Homo sapien
gtcttccgaatggtctgtgcagcgc

SEQ ID NO: 3789436 - DNA, 25 bp, Homo sapien
caaaaagcctttagtcgcacaactc

SEQ ID NO: 3789437 - DNA, 25 bp, Homo sapien
ttcctaactggacaaccctcttcca

SEQ ID NO: 3789438 - DNA, 25 bp, Homo sapien
ctgcaggagttaattgaggacgtgg

SEQ ID NO: 3789439 - DNA, 25 bp, Homo sapien
aacacaatcccaaagagcgttctcc

SEQ ID NO: 3789440 - DNA, 25 bp, Homo sapien
tggttcactgaaaggcgcatctccc

SEQ ID NO: 3789441 - DNA, 25 bp, Homo sapien
cagtctccgggctactaggccgttg

SEQ ID NO: 3789442 - DNA, 25 bp, Homo sapien
taggctgtttcgtagcagtctccgg

SEQ ID NO: 3789443 - DNA, 25 bp, Homo sapien
taggccgttgtgtgctggtagtacc

SEQ ID NO: 3789444 - DNA, 25 bp, Homo sapien
gttattacctctccctttcacatca

SEQ ID NO: 3789445 - DNA, 25 bp, Homo sapien
tgcaatccaatgaacatcaccaact

SEQ ID NO: 3789446 - DNA, 25 bp, Homo sapien
tctatcctaaatctatacatttgca

SEQ ID NO: 3789447 - DNA, 25 bp, Homo sapien
catcacatgtctatcctaaatctat

SEQ ID NO: 3789448 - DNA, 25 bp, Homo sapien
taaagggttcacaattcagtctagt

SEQ ID NO: 3789449 - DNA, 25 bp, Homo sapien
gaaactagaggcatcatacggagta

SEQ ID NO: 3789450 - DNA, 25 bp, Homo sapien
tctgcagatgcagtaagagaactag

SEQ ID NO: 3789451 - DNA, 25 bp, Homo sapien
atataaaacctaacatccagtgaga

SEQ ID NO: 3789452 - DNA, 25 bp, Homo sapien
catgtcgctcagcaaggagcggagt

SEQ ID NO: 3789453 - DNA, 25 bp, Homo sapien
caaggagcggagtgggagcaggtgg

SEQ ID NO: 3789454 - DNA, 25 bp, Homo sapien
gagccgccatgtcgctcagcaagga

SEQ ID NO: 3789455 - DNA, 25 bp, Homo sapien
cggagaggggctaggtcgagttgca

SEQ ID NO: 3789456 - DNA, 25 bp, Homo sapien
acggtcccgagttggagaggcctca

SEQ ID NO: 3789457 - DNA, 25 bp, Homo sapien
tgaacggtcccgagttggagaggcc

SEQ ID NO: 3789458 - DNA, 25 bp, Homo sapien
gtcccgagttggagaggcctcagat

SEQ ID NO: 3789459 - DNA, 25 bp, Homo sapien
gtggtgaacggtcccgagttggaga

SEQ ID NO: 3789460 - DNA, 25 bp, Homo sapien
tatcccgttttgctcggccatgtga

SEQ ID NO: 3789461 - DNA, 25 bp, Homo sapien
catgtgagcgattcttagatgtggg

SEQ ID NO: 3789462 - DNA, 25 bp, Homo sapien
agaaatctctcggtgggaccctgga

SEQ ID NO: 3789463 - DNA, 25 bp, Homo sapien
gctggcatgccgagaaactttggta

SEQ ID NO: 3789464 - DNA, 25 bp, Homo sapien
gatcgccctctcttagcggtggcag

SEQ ID NO: 3789465 - DNA, 25 bp, Homo sapien
ctctcttagcggtggcagggctacg

SEQ ID NO: 3789466 - DNA, 25 bp, Homo sapien
cgagaccgagatcgccctctcttag

SEQ ID NO: 3789467 - DNA, 25 bp, Homo sapien
gggttcgagaccgagatcgccctct

SEQ ID NO: 3789468 - DNA, 25 bp, Homo sapien
gggatctagagtgggacctccctcg

SEQ ID NO: 3789469 - DNA, 25 bp, Homo sapien
gaacgagatctacccctagtggctg

SEQ ID NO: 3789470 - DNA, 25 bp, Homo sapien
gtatttctgctcctagaccagcctg

SEQ ID NO: 3789471 - DNA, 25 bp, Homo sapien
gagatcgggatcgagaatgacctct

SEQ ID NO: 3789472 - DNA, 25 bp, Homo sapien
tcttggtgtcctagaccgagacctc

SEQ ID NO: 3789473 - DNA, 25 bp, Homo sapien
gtctaactaagcttctactgcggga

SEQ ID NO: 3789474 - DNA, 25 bp, Homo sapien
tcctggctggtgatctactacgaga

SEQ ID NO: 3789475 - DNA, 25 bp, Homo sapien
gatcgggtcctagatctgcgcctag

SEQ ID NO: 3789476 - DNA, 25 bp, Homo sapien
gatccagaaagacttggccccggtg

SEQ ID NO: 3789477 - DNA, 25 bp, Homo sapien
caaaatagctctcgcctggtggtgt

SEQ ID NO: 3789478 - DNA, 25 bp, Homo sapien
gatactgatctgcttcgccgtggag

SEQ ID NO: 3789479 - DNA, 25 bp, Homo sapien
tgttctcgacgtcaccctactagga

SEQ ID NO: 3789480 - DNA, 25 bp, Homo sapien
tcttgtcttattggagatctggatg

SEQ ID NO: 3789481 - DNA, 25 bp, Homo sapien
tgaagacctggaccgacctccctta

SEQ ID NO: 3789482 - DNA, 25 bp, Homo sapien
ctggaccgacctcccttaggtgatg

SEQ ID NO: 3789483 - DNA, 25 bp, Homo sapien
tatcttgtcttattggagatctgga

SEQ ID NO: 3789484 - DNA, 25 bp, Homo sapien
tccagatttcaacataggactcgct

SEQ ID NO: 3789485 - DNA, 25 bp, Homo sapien
tttcaacataggactcgctgagaac

SEQ ID NO: 3789486 - DNA, 25 bp, Homo sapien
gatttcaacataggactcgctgaga

SEQ ID NO: 3789487 - DNA, 25 bp, Homo sapien
caacataggactcgctgagaactca

SEQ ID NO: 3789488 - DNA, 25 bp, Homo sapien
ctgccccaagagagaattcgagtcc

SEQ ID NO: 3789489 - DNA, 25 bp, Homo sapien
tgccccaagagagaattcgagtcca

SEQ ID NO: 3789490 - DNA, 25 bp, Homo sapien
taaaggtgatccaaagctgttctcc

SEQ ID NO: 3789491 - DNA, 25 bp, Homo sapien
tgaataccagtgaagactcaggcct

SEQ ID NO: 3789492 - DNA, 25 bp, Homo sapien
ttctggagaaaaatgtggcccaccc

SEQ ID NO: 3789493 - DNA, 25 bp, Homo sapien
taactcagaactgctgtgtccagag

SEQ ID NO: 3789494 - DNA, 25 bp, Homo sapien
tctgaggcaaagctttcggttctgg

SEQ ID NO: 3789495 - DNA, 25 bp, Homo sapien
ggtatatctttcattccaggagagg

SEQ ID NO: 3789496 - DNA, 25 bp, Homo sapien
gatgatggagaacgactcctcggcc

SEQ ID NO: 3789497 - DNA, 25 bp, Homo sapien
tcttgagaggatcccgaacgacttc

SEQ ID NO: 3789498 - DNA, 25 bp, Homo sapien
agaggaatcagaaccactctgtgcc

SEQ ID NO: 3789499 - DNA, 25 bp, Homo sapien
agctttaggttcaggagaggaatca

SEQ ID NO: 3789500 - DNA, 25 bp, Homo sapien
ggatagtcgagatttgctgtcaacc

SEQ ID NO: 3789501 - DNA, 25 bp, Homo sapien
agaccgactcctctgccgaagtggg

SEQ ID NO: 3789502 - DNA, 25 bp, Homo sapien
tgaagttcgagatctggacctacgt

SEQ ID NO: 3789503 - DNA, 25 bp, Homo sapien
tcgagatctagagcgtttccacggg

SEQ ID NO: 3789504 - DNA, 25 bp, Homo sapien
gatcgagatctccttcgggtgaccg

SEQ ID NO: 3789505 - DNA, 25 bp, Homo sapien
gatccagacctatctcgacgtcggg

SEQ ID NO: 3789506 - DNA, 25 bp, Homo sapien
aacagtggcgttcgagatctagagc

SEQ ID NO: 3789507 - DNA, 25 bp, Homo sapien
ttctgagactcatgagaggcaccgg

SEQ ID NO: 3789508 - DNA, 25 bp, Homo sapien
gcgttcgagagtcagccaggttcac

SEQ ID NO: 3789509 - DNA, 25 bp, Homo sapien
gctaggacgactgaagcagctcatt

SEQ ID NO: 3789510 - DNA, 25 bp, Homo sapien
tgaggtttgcaccagacaatgctgg

SEQ ID NO: 3789511 - DNA, 25 bp, Homo sapien
tggtgaggttctgccactgacacgc

SEQ ID NO: 3789512 - DNA, 25 bp, Homo sapien
ctgtggcatgtgcagaccgaggacc

SEQ ID NO: 3789513 - DNA, 25 bp, Homo sapien
gctggagccatcctagcactggtga

SEQ ID NO: 3789514 - DNA, 25 bp, Homo sapien
agaggtcatcctagattggcttggg

SEQ ID NO: 3789515 - DNA, 25 bp, Homo sapien
gcccgttcagaggtcatcctagatt

SEQ ID NO: 3789516 - DNA, 25 bp, Homo sapien
cgttcagaggtcatcctagattggc

SEQ ID NO: 3789517 - DNA, 25 bp, Homo sapien
gagcccgttcagaggtcatcctaga

SEQ ID NO: 3789518 - DNA, 25 bp, Homo sapien
tggagggagaagagactgtgaagga

SEQ ID NO: 3789519 - DNA, 25 bp, Homo sapien
agggagaagagactgtgaaggagcc

SEQ ID NO: 3789520 - DNA, 25 bp, Homo sapien
ggagaagagactgtgaaggagcctg

SEQ ID NO: 3789521 - DNA, 25 bp, Homo sapien
gagaagagactgtgaaggagcctgg

SEQ ID NO: 3789522 - DNA, 25 bp, Homo sapien
gcacaggagacctcggctgatcctg

SEQ ID NO: 3789523 - DNA, 25 bp, Homo sapien
ggtggtctgggcaatcaaacaacgg

SEQ ID NO: 3789524 - DNA, 25 bp, Homo sapien
cgtggtcgttgccactgccccagag

SEQ ID NO: 3789525 - DNA, 25 bp, Homo sapien
gcggctaatgcagaaggctgctggg

SEQ ID NO: 3789526 - DNA, 25 bp, Homo sapien
tgtgatcaccagcagaggacgtggt

SEQ ID NO: 3789527 - DNA, 25 bp, Homo sapien
acaggaaggctagagccctctgagt

SEQ ID NO: 3789528 - DNA, 25 bp, Homo sapien
ttcagtgccacctcaggttgcacag

SEQ ID NO: 3789529 - DNA, 25 bp, Homo sapien
gctagagccctctgagtcactagaa

SEQ ID NO: 3789530 - DNA, 25 bp, Homo sapien
aaggctagagccctctgagtcacta

SEQ ID NO: 3789531 - DNA, 25 bp, Homo sapien
gaaccttcggagacttttatctgtc

SEQ ID NO: 3789532 - DNA, 25 bp, Homo sapien
gaaaacttatcattatcctctagag

SEQ ID NO: 3789533 - DNA, 25 bp, Homo sapien
ctctagagaatgaaccttcggagac

SEQ ID NO: 3789534 - DNA, 25 bp, Homo sapien
ctgtagagacggaaaacttatcatt

SEQ ID NO: 3789535 - DNA, 25 bp, Homo sapien
gagttcctcttgaggtctaactgcc

SEQ ID NO: 3789536 - DNA, 25 bp, Homo sapien
tcctcttgaggtctaactgccatcc

SEQ ID NO: 3789537 - DNA, 25 bp, Homo sapien
ccagggagttcctcttgaggtctaa

SEQ ID NO: 3789538 - DNA, 25 bp, Homo sapien
tcttgaggtctaactgccatccctc

SEQ ID NO: 3789539 - DNA, 25 bp, Homo sapien
tgacccaacctctgctaacagaagc

SEQ ID NO: 3789540 - DNA, 25 bp, Homo sapien
aagctgggtagtctccttcctcgga

SEQ ID NO: 3789541 - DNA, 25 bp, Homo sapien
gagccagcaattctctggagagcag

SEQ ID NO: 3789542 - DNA, 25 bp, Homo sapien
cagcataagggatcaaggttaaacc

SEQ ID NO: 3789543 - DNA, 25 bp, Homo sapien
tccctctcgaacagcctcctttggg

SEQ ID NO: 3789544 - DNA, 25 bp, Homo sapien
gctagagcgcctcttccgtttggct

SEQ ID NO: 3789545 - DNA, 25 bp, Homo sapien
ctgctagagcgcctcttccgtttgg

SEQ ID NO: 3789546 - DNA, 25 bp, Homo sapien
tccggaggacgtccctctcgaacag

SEQ ID NO: 3789547 - DNA, 25 bp, Homo sapien
gccaggcttagcaggggaaggggag

SEQ ID NO: 3789548 - DNA, 25 bp, Homo sapien
ggccaggcttagcaggggaagggga

SEQ ID NO: 3789549 - DNA, 25 bp, Homo sapien
ggcttcttggggcttgcaggtttgg

SEQ ID NO: 3789550 - DNA, 25 bp, Homo sapien
ttcttggggcttgcaggtttgggca

SEQ ID NO: 3789551 - DNA, 25 bp, Homo sapien
ctccgctcgccagggggtggcttct

SEQ ID NO: 3789552 - DNA, 25 bp, Homo sapien
tggggcttgcaggtttgggcaaggc

SEQ ID NO: 3789553 - DNA, 25 bp, Homo sapien
gaaccctgggaacaggctatgtgtt

SEQ ID NO: 3789554 - DNA, 25 bp, Homo sapien
gcaacagggagacaaagctagaacc

SEQ ID NO: 3789555 - DNA, 25 bp, Homo sapien
gaccagagccctggcagtagcaaca

SEQ ID NO: 3789556 - DNA, 25 bp, Homo sapien
ttcgccagaacagggtgcaacgagc

SEQ ID NO: 3789557 - DNA, 25 bp, Homo sapien
gccacagggcgtcccgaaggatttg

SEQ ID NO: 3789558 - DNA, 25 bp, Homo sapien
ccctctggctacatgtggaagagaa

SEQ ID NO: 3789559 - DNA, 25 bp, Homo sapien
gggaagtagccagatgtgcgtttta

SEQ ID NO: 3789560 - DNA, 25 bp, Homo sapien
gatgtgcgttttagaaaggtccctc

SEQ ID NO: 3789561 - DNA, 25 bp, Homo sapien
ttcaccaggcggacaaggaaattcc

SEQ ID NO: 3789562 - DNA, 25 bp, Homo sapien
tccttagactgcaaggcgctgggtg

SEQ ID NO: 3789563 - DNA, 25 bp, Homo sapien
tcttgcagaacgaggagttcaccag

SEQ ID NO: 3789564 - DNA, 25 bp, Homo sapien
caaaggcatgggctctccttagact

SEQ ID NO: 3789565 - DNA, 25 bp, Homo sapien
aggtcctgaccaccaaacctcacac

SEQ ID NO: 3789566 - DNA, 25 bp, Homo sapien
cacacgggccagcactcaggaccac

SEQ ID NO: 3789567 - DNA, 25 bp, Homo sapien
accctttcaagcacacgggccagca

SEQ ID NO: 3789568 - DNA, 25 bp, Homo sapien
gggaacacagtaggacccaatagca

SEQ ID NO: 3789569 - DNA, 25 bp, Homo sapien
gcgagtagctgagggaccgagagtc

SEQ ID NO: 3789570 - DNA, 25 bp, Homo sapien
ctggggcgagggacggcgacgctcc

SEQ ID NO: 3789571 - DNA, 25 bp, Homo sapien
agtagctgagggaccgagagtccct

SEQ ID NO: 3789572 - DNA, 25 bp, Homo sapien
ggcgacgctccacaggcgagtagct

SEQ ID NO: 3789573 - DNA, 25 bp, Homo sapien
taggtgtctccctcctgcgcttgtg

SEQ ID NO: 3789574 - DNA, 25 bp, Homo sapien
ctggaggagcggtgtctcatgggcc

SEQ ID NO: 3789575 - DNA, 25 bp, Homo sapien
gtgtctccctcctgcgcttgtggct

SEQ ID NO: 3789576 - DNA, 25 bp, Homo sapien
gcggtgtctcatgggccgagggcta

SEQ ID NO: 3789577 - DNA, 25 bp, Homo sapien
ggagattaacatttcacaggaacaa

SEQ ID NO: 3789578 - DNA, 25 bp, Homo sapien
caagggctgccaaggttcaaaggag

SEQ ID NO: 3789579 - DNA, 25 bp, Homo sapien
aagaagggacactccttgtggctcc

SEQ ID NO: 3789580 - DNA, 25 bp, Homo sapien
ggtgtggtggaatcccccaaagaca

SEQ ID NO: 3789581 - DNA, 25 bp, Homo sapien
aaccccccagaacacatgaaccagg

SEQ ID NO: 3789582 - DNA, 25 bp, Homo sapien
aaaccccccagaacacatgaaccag

SEQ ID NO: 3789583 - DNA, 25 bp, Homo sapien
caaaccccccagaacacatgaacca

SEQ ID NO: 3789584 - DNA, 25 bp, Homo sapien
ggacagtagggaccaactaattcca

SEQ ID NO: 3789585 - DNA, 25 bp, Homo sapien
aagaacaccttatacaacctccagt

SEQ ID NO: 3789586 - DNA, 25 bp, Homo sapien
ggctggggtatcctgaactgtatcc

SEQ ID NO: 3789587 - DNA, 25 bp, Homo sapien
gaacttctggatacaagtggggcca

SEQ ID NO: 3789588 - DNA, 25 bp, Homo sapien
tgcctttaagaaacatgaaaagttg

SEQ ID NO: 3789589 - DNA, 25 bp, Homo sapien
caaaatgcctttaagaaacatgaaa

SEQ ID NO: 3789590 - DNA, 25 bp, Homo sapien
aaccaaaatgcctttaagaaacatg

SEQ ID NO: 3789591 - DNA, 25 bp, Homo sapien
atgcctttaagaaacatgaaaagtt

SEQ ID NO: 3789592 - DNA, 25 bp, Homo sapien
tggtgcctttaagcagcaggctggg

SEQ ID NO: 3789593 - DNA, 25 bp, Homo sapien
cccagcctgctgcttaaaggcacca

SEQ ID NO: 3789594 - DNA, 25 bp, Homo sapien
gcctttaagcagcaggctgggccaa

SEQ ID NO: 3789595 - DNA, 25 bp, Homo sapien
gagcccacagggagtgggacccatc

SEQ ID NO: 3789596 - DNA, 25 bp, Homo sapien
aggacagcacaggaactgccaagca

SEQ ID NO: 3789597 - DNA, 25 bp, Homo sapien
caagttctcagccagggtctcagga

SEQ ID NO: 3789598 - DNA, 25 bp, Homo sapien
tgccaagcacaagccccaaaaggag

SEQ ID NO: 3789599 - DNA, 25 bp, Homo sapien
tcaggatctgggagacaggacagca

SEQ ID NO: 3789600 - DNA, 25 bp, Homo sapien
gcttgtgcttggcagttcctgtgct

SEQ ID NO: 3789601 - DNA, 25 bp, Homo sapien
tcctgagaccctggctgagaacttg

SEQ ID NO: 3789602 - DNA, 25 bp, Homo sapien
tgtctcccagatcctgagaccctgg

SEQ ID NO: 3789603 - DNA, 25 bp, Homo sapien
agttcctgtgctgtcctgtctccca

SEQ ID NO: 3789604 - DNA, 25 bp, Homo sapien
ggatgggtcccactccctgtgggct

SEQ ID NO: 3789605 - DNA, 25 bp, Homo sapien
tggcccagcctgctgcttaaaggca

SEQ ID NO: 3789606 - DNA, 25 bp, Homo sapien
tagatgccgaggcaaaaatcgcacc

SEQ ID NO: 3789607 - DNA, 25 bp, Homo sapien
gccgaggttctacgcagttcaaaaa

SEQ ID NO: 3789608 - DNA, 25 bp, Homo sapien
caaatgcagcgctaagacttgccga

SEQ ID NO: 3789609 - DNA, 25 bp, Homo sapien
tgatgaggttaacggcccatggcca

SEQ ID NO: 3789610 - DNA, 25 bp, Homo sapien
cctggtttctggtggacatcctgag

SEQ ID NO: 3789611 - DNA, 25 bp, Homo sapien
tgtgtatccccgcttcatggatggg

SEQ ID NO: 3789612 - DNA, 25 bp, Homo sapien
gagcatcagcacgtgaaggcaactg

SEQ ID NO: 3789613 - DNA, 25 bp, Homo sapien
tatttatgagctgatgcgcggtgag

SEQ ID NO: 3789614 - DNA, 25 bp, Homo sapien
gggacacacacgagttgaactaacc

SEQ ID NO: 3789615 - DNA, 25 bp, Homo sapien
taaaaggtagacagacgctgggcgt

SEQ ID NO: 3789616 - DNA, 25 bp, Homo sapien
gattgtttcccaggtctaacacacc

SEQ ID NO: 3789617 - DNA, 25 bp, Homo sapien
ttaagactcccaatcagaaaggccc

SEQ ID NO: 3789618 - DNA, 25 bp, Homo sapien
ccggcttcccgagtccagcccgagc

SEQ ID NO: 3789619 - DNA, 25 bp, Homo sapien
ggcttcccgagtccagcccgagcca

SEQ ID NO: 3789620 - DNA, 25 bp, Homo sapien
gcttcccgagtccagcccgagccag

SEQ ID NO: 3789621 - DNA, 25 bp, Homo sapien
ttcccgagtccagcccgagccagca

SEQ ID NO: 3789622 - DNA, 25 bp, Homo sapien
tcccgcctgtagcgccccgagctca

SEQ ID NO: 3789623 - DNA, 25 bp, Homo sapien
ggtcccgcctgtagcgccccgagct

SEQ ID NO: 3789624 - DNA, 25 bp, Homo sapien
ccggtcccgcctgtagcgccccgag

SEQ ID NO: 3789625 - DNA, 25 bp, Homo sapien
tgcccccggtcccgcctgtagcgcc

SEQ ID NO: 3789626 - DNA, 25 bp, Homo sapien
gttctcgggacctggaacagagagc

SEQ ID NO: 3789627 - DNA, 25 bp, Homo sapien
cctggaacagagagcagtagatggg

SEQ ID NO: 3789628 - DNA, 25 bp, Homo sapien
gaacagagagcagtagatgggcccc

SEQ ID NO: 3789629 - DNA, 25 bp, Homo sapien
tggaacagagagcagtagatgggcc

SEQ ID NO: 3789630 - DNA, 25 bp, Homo sapien
tgggatggacagacggacgcggctg

SEQ ID NO: 3789631 - DNA, 25 bp, Homo sapien
ctgggatggacagacggacgcggct

SEQ ID NO: 3789632 - DNA, 25 bp, Homo sapien
ggatggacagacggacgcggctgag

SEQ ID NO: 3789633 - DNA, 25 bp, Homo sapien
gggatggacagacggacgcggctga

SEQ ID NO: 3789634 - DNA, 25 bp, Homo sapien
gcccgcgcgcggactccactccgcc

SEQ ID NO: 3789635 - DNA, 25 bp, Homo sapien
cacatcggtggcgtctcctcaggcg

SEQ ID NO: 3789636 - DNA, 25 bp, Homo sapien
caccagcgcgtgaatttcccggtgg

SEQ ID NO: 3789637 - DNA, 25 bp, Homo sapien
cagtgcgcagccgagagcacccagc

SEQ ID NO: 3789638 - DNA, 25 bp, Homo sapien
gctactgtttgctcatcctggaggc

SEQ ID NO: 3789639 - DNA, 25 bp, Homo sapien
tgggtggctactgtttgctcatcct

SEQ ID NO: 3789640 - DNA, 25 bp, Homo sapien
tggctactgtttgctcatcctggag

SEQ ID NO: 3789641 - DNA, 25 bp, Homo sapien
catcctggaggccattagcaagtct

SEQ ID NO: 3789642 - DNA, 25 bp, Homo sapien
tgcgtcagggttcacaatgatgtcc

SEQ ID NO: 3789643 - DNA, 25 bp, Homo sapien
tgcgtaaaaccccaagtgcgtcagg

SEQ ID NO: 3789644 - DNA, 25 bp, Homo sapien
tttgtaacgactgctgtaggcccgc

SEQ ID NO: 3789645 - DNA, 25 bp, Homo sapien
tggaagactcgatgcaaatgggctg

SEQ ID NO: 3789646 - DNA, 25 bp, Homo sapien
ggtagagggtaatgctcaccccgca

SEQ ID NO: 3789647 - DNA, 25 bp, Homo sapien
aaaaatcattgcctgaggcttctgt

SEQ ID NO: 3789648 - DNA, 25 bp, Homo sapien
ctgctgtgcttgtgtagcgggaaca

SEQ ID NO: 3789649 - DNA, 25 bp, Homo sapien
aacaggggtagagggtaatgctcac

SEQ ID NO: 3789650 - DNA, 25 bp, Homo sapien
ttatgccatatctttactgtgcctc

SEQ ID NO: 3789651 - DNA, 25 bp, Homo sapien
gctgaaacctctgcccctcacgggt

SEQ ID NO: 3789652 - DNA, 25 bp, Homo sapien
tacaactgctctggtatttagtgca

SEQ ID NO: 3789653 - DNA, 25 bp, Homo sapien
agtgtgttacaactgctctggtatt

SEQ ID NO: 3789654 - DNA, 25 bp, Homo sapien
catggaatcccagatcatactacgg

SEQ ID NO: 3789655 - DNA, 25 bp, Homo sapien
catactacggctagagggctgttca

SEQ ID NO: 3789656 - DNA, 25 bp, Homo sapien
tgttgtttaagatggtgacctgtgc

SEQ ID NO: 3789657 - DNA, 25 bp, Homo sapien
tcctcagcaccagcacaaaacatgg

SEQ ID NO: 3789658 - DNA, 25 bp, Homo sapien
ggggagcagcatgggtgagcccagg

SEQ ID NO: 3789659 - DNA, 25 bp, Homo sapien
tggggagcagcatgggtgagcccag

SEQ ID NO: 3789660 - DNA, 25 bp, Homo sapien
ctggggagcagcatgggtgagccca

SEQ ID NO: 3789661 - DNA, 25 bp, Homo sapien
cagtccatccttgtcacagaccaag

SEQ ID NO: 3789662 - DNA, 25 bp, Homo sapien
accaggccgattgggttgaccgcag

SEQ ID NO: 3789663 - DNA, 25 bp, Homo sapien
cacactgatgttggtgtagacacca

SEQ ID NO: 3789664 - DNA, 25 bp, Homo sapien
tgggttgaccgcagtccattcccca

SEQ ID NO: 3789665 - DNA, 25 bp, Homo sapien
gcctgggtgtactgtgggacatcac

SEQ ID NO: 3789666 - DNA, 25 bp, Homo sapien
tttggcctgggtgtactgtgggaca

SEQ ID NO: 3789667 - DNA, 25 bp, Homo sapien
tactgtgggacatcaccctccggat

SEQ ID NO: 3789668 - DNA, 25 bp, Homo sapien
gtgtactgtgggacatcaccctccg

SEQ ID NO: 3789669 - DNA, 25 bp, Homo sapien
ggtgagccaatactgtggtccccac

SEQ ID NO: 3789670 - DNA, 25 bp, Homo sapien
caaaaggggccggaatctgatccag

SEQ ID NO: 3789671 - DNA, 25 bp, Homo sapien
cagaggaggtgagccaatactgtgg

SEQ ID NO: 3789672 - DNA, 25 bp, Homo sapien
aaccctgtccctgaagcgcccacag

SEQ ID NO: 3789673 - DNA, 25 bp, Homo sapien
ggactggcaattccgcctgctaata

SEQ ID NO: 3789674 - DNA, 25 bp, Homo sapien
aattccgcctgctaataggtcagcc

SEQ ID NO: 3789675 - DNA, 25 bp, Homo sapien
tacaatttggcaggactggcaattc

SEQ ID NO: 3789676 - DNA, 25 bp, Homo sapien
ggtcagccccccactggtgagtgat

SEQ ID NO: 3789677 - DNA, 25 bp, Homo sapien
tctcccgcggcctgacgccccctct

SEQ ID NO: 3789678 - DNA, 25 bp, Homo sapien
ctcccgcggcctgacgccccctctg

SEQ ID NO: 3789679 - DNA, 25 bp, Homo sapien
cgcggcctgacgccccctctgcctc

SEQ ID NO: 3789680 - DNA, 25 bp, Homo sapien
ctctcccgcggcctgacgccccctc

SEQ ID NO: 3789681 - DNA, 25 bp, Homo sapien
ccggcttcctgagtccagcccgagc

SEQ ID NO: 3789682 - DNA, 25 bp, Homo sapien
gcttcctgagtccagcccgagccag

SEQ ID NO: 3789683 - DNA, 25 bp, Homo sapien
ttcctgagtccagcccgagccagca

SEQ ID NO: 3789684 - DNA, 25 bp, Homo sapien
ggcttcctgagtccagcccgagcca

SEQ ID NO: 3789685 - DNA, 25 bp, Homo sapien
gataacggcgccgcctcctgcgact

SEQ ID NO: 3789686 - DNA, 25 bp, Homo sapien
ctgataacggcgccgcctcctgcga

SEQ ID NO: 3789687 - DNA, 25 bp, Homo sapien
tgataacggcgccgcctcctgcgac

SEQ ID NO: 3789688 - DNA, 25 bp, Homo sapien
tccacgccaacagagttctcgatcc

SEQ ID NO: 3789689 - DNA, 25 bp, Homo sapien
ttccacgccaacagagttctcgatc

SEQ ID NO: 3789690 - DNA, 25 bp, Homo sapien
tttccacgccaacagagttctcgat

SEQ ID NO: 3789691 - DNA, 25 bp, Homo sapien
gaggcagccccccaagcccgacctc

SEQ ID NO: 3789692 - DNA, 25 bp, Homo sapien
ggcagccccccaagcccgacctctc

SEQ ID NO: 3789693 - DNA, 25 bp, Homo sapien
gccgcgggaggcagccccccaagcc

SEQ ID NO: 3789694 - DNA, 25 bp, Homo sapien
ctgagccgcgggaggcagcccccca

SEQ ID NO: 3789695 - DNA, 25 bp, Homo sapien
tggctgagcaggctcactccgcata

SEQ ID NO: 3789696 - DNA, 25 bp, Homo sapien
tccacccacgatgcgcgacgtgatg

SEQ ID NO: 3789697 - DNA, 25 bp, Homo sapien
cgcatacgtgggaatcccacaggcg

SEQ ID NO: 3789698 - DNA, 25 bp, Homo sapien
gtgatgacccgtcggccgcatggtc

SEQ ID NO: 3789699 - DNA, 25 bp, Homo sapien
ccacccggagggatcactaaggtca

SEQ ID NO: 3789700 - DNA, 25 bp, Homo sapien
accatccacccggagggatcactaa

SEQ ID NO: 3789701 - DNA, 25 bp, Homo sapien
ctgcaggctccagaaggatggcatg

SEQ ID NO: 3789702 - DNA, 25 bp, Homo sapien
aactggaccatccacccggagggat

SEQ ID NO: 3789703 - DNA, 25 bp, Homo sapien
gcagacagcttcaccaaggcaatgt

SEQ ID NO: 3789704 - DNA, 25 bp, Homo sapien
aattccccaggtagcgagggctcag

SEQ ID NO: 3789705 - DNA, 25 bp, Homo sapien
cccagcagtctgtccggttctcaaa

SEQ ID NO: 3789706 - DNA, 25 bp, Homo sapien
caatgtcatagggtgaattccccag

SEQ ID NO: 3789707 - DNA, 25 bp, Homo sapien
ggctattgtgcctatgcaggggaac

SEQ ID NO: 3789708 - DNA, 25 bp, Homo sapien
ctgcaagcaagaggggcatagcctg

SEQ ID NO: 3789709 - DNA, 25 bp, Homo sapien
acaggcctgcgccaaactggcctcc

SEQ ID NO: 3789710 - DNA, 25 bp, Homo sapien
gcctatgcaggggaacaggtgaaca

SEQ ID NO: 3789711 - DNA, 25 bp, Homo sapien
gattcctcagccaaaaggagccgag

SEQ ID NO: 3789712 - DNA, 25 bp, Homo sapien
taacaacctgggaactagcctctga

SEQ ID NO: 3789713 - DNA, 25 bp, Homo sapien
tctgtagaatggcaacaatggccct

SEQ ID NO: 3789714 - DNA, 25 bp, Homo sapien
ttgttgcagcactcttagggacccc

SEQ ID NO: 3789715 - DNA, 25 bp, Homo sapien
ctggagggtgtggggagatggcagt

SEQ ID NO: 3789716 - DNA, 25 bp, Homo sapien
tggagggtgtggggagatggcagtg

SEQ ID NO: 3789717 - DNA, 25 bp, Homo sapien
gatgtccttgcggaaactgtacttg

SEQ ID NO: 3789718 - DNA, 25 bp, Homo sapien
aagaggtggttgcacatagagttgt

SEQ ID NO: 3789719 - DNA, 25 bp, Homo sapien
tccaaagatgtccttgcggaaactg

SEQ ID NO: 3789720 - DNA, 25 bp, Homo sapien
gagttgtttatgatggcgacctgaa

SEQ ID NO: 3789721 - DNA, 25 bp, Homo sapien
gaagcaggcatccttcccgccttgg

SEQ ID NO: 3789722 - DNA, 25 bp, Homo sapien
catccttcccgccttgggcattgcc

SEQ ID NO: 3789723 - DNA, 25 bp, Homo sapien
cgccttgggcattgccagcacaaac

SEQ ID NO: 3789724 - DNA, 25 bp, Homo sapien
tcccgccttgggcattgccagcaca

SEQ ID NO: 3789725 - DNA, 25 bp, Homo sapien
ctgcagagtggggcaacagtctcca

SEQ ID NO: 3789726 - DNA, 25 bp, Homo sapien
gctgggtagactgggtgcacatcct

SEQ ID NO: 3789727 - DNA, 25 bp, Homo sapien
gagggtcaaataaggcacagggaca

SEQ ID NO: 3789728 - DNA, 25 bp, Homo sapien
agcagccaagcctccgtttctgcat

SEQ ID NO: 3789729 - DNA, 25 bp, Homo sapien
tggggagcagcggggctgaggtcag

SEQ ID NO: 3789730 - DNA, 25 bp, Homo sapien
ctggggagcagcggggctgaggtca

SEQ ID NO: 3789731 - DNA, 25 bp, Homo sapien
ggggagcagcggggctgaggtcagc

SEQ ID NO: 3789732 - DNA, 25 bp, Homo sapien
ctccaatctgataccacagtccatt

SEQ ID NO: 3789733 - DNA, 25 bp, Homo sapien
cattcttgttacaggccaagggtcc

SEQ ID NO: 3789734 - DNA, 25 bp, Homo sapien
gtggtggctgatattggtgtagaca

SEQ ID NO: 3789735 - DNA, 25 bp, Homo sapien
gtgtagacaccgggccgattgggcc

SEQ ID NO: 3789736 - DNA, 25 bp, Homo sapien
tggtggctgatattggtgtagacac

SEQ ID NO: 3789737 - DNA, 25 bp, Homo sapien
accgggccgattgggccgaccacag

SEQ ID NO: 3789738 - DNA, 25 bp, Homo sapien
gagggaaaaagagtagcggccagga

SEQ ID NO: 3789739 - DNA, 25 bp, Homo sapien
aagagggaaaaagagtagcggccag

SEQ ID NO: 3789740 - DNA, 25 bp, Homo sapien
gagtagcggccaggaggggtctggc

SEQ ID NO: 3789741 - DNA, 25 bp, Homo sapien
agggaaaaagagtagcggccaggag

SEQ ID NO: 3789742 - DNA, 25 bp, Homo sapien
tattaccaaacaagacagaagagaa

SEQ ID NO: 3789743 - DNA, 25 bp, Homo sapien
aaccagggcctgacttggcagtggc

SEQ ID NO: 3789744 - DNA, 25 bp, Homo sapien
ccccaggctgcatgggctcaggtag

SEQ ID NO: 3789745 - DNA, 25 bp, Homo sapien
caactggaatgtgtttattaccaaa

SEQ ID NO: 3789746 - DNA, 25 bp, Homo sapien
gctgtaacacaaatcccacgccgtg

SEQ ID NO: 3789747 - DNA, 25 bp, Homo sapien
taccctggtgcgtgtgttgctcctt

SEQ ID NO: 3789748 - DNA, 25 bp, Homo sapien
cactattcccaagtttcaagttgag

SEQ ID NO: 3789749 - DNA, 25 bp, Homo sapien
ccttctactagtgcaagtgttgaaa

SEQ ID NO: 3789750 - DNA, 25 bp, Homo sapien
ccttggggaggctcccggatgtgca

SEQ ID NO: 3789751 - DNA, 25 bp, Homo sapien
cttggggaggctcccggatgtgcag

SEQ ID NO: 3789752 - DNA, 25 bp, Homo sapien
gggaggctcccggatgtgcagtatt

SEQ ID NO: 3789753 - DNA, 25 bp, Homo sapien
aggctcccggatgtgcagtatttgc

SEQ ID NO: 3789754 - DNA, 25 bp, Homo sapien
gactgggcgtctggttgtgccgggc

SEQ ID NO: 3789755 - DNA, 25 bp, Homo sapien
acatcgcctttatactctcctgggc

SEQ ID NO: 3789756 - DNA, 25 bp, Homo sapien
gcgtctggttgtgccgggcaccctc

SEQ ID NO: 3789757 - DNA, 25 bp, Homo sapien
gggcaccctccacatcgcctttata

SEQ ID NO: 3789758 - DNA, 25 bp, Homo sapien
cccaggagggcaagcgtgagcagca

SEQ ID NO: 3789759 - DNA, 25 bp, Homo sapien
ccccccaggagggcaagcgtgagca

SEQ ID NO: 3789760 - DNA, 25 bp, Homo sapien
gaaaatccccatgcggtgatatggg

SEQ ID NO: 3789761 - DNA, 25 bp, Homo sapien
gattgagggcagaccccactgactt

SEQ ID NO: 3789762 - DNA, 25 bp, Homo sapien
ccagagttagtctgggacaagggcc

SEQ ID NO: 3789763 - DNA, 25 bp, Homo sapien
agggaagaaaatccccatgcggtga

SEQ ID NO: 3789764 - DNA, 25 bp, Homo sapien
ggtgctgaaatacttgcctcctcca

SEQ ID NO: 3789765 - DNA, 25 bp, Homo sapien
catggtcgtagtcttcagtggtgct

SEQ ID NO: 3789766 - DNA, 25 bp, Homo sapien
tacagacacccgcagccctgtgatt

SEQ ID NO: 3789767 - DNA, 25 bp, Homo sapien
ttttcaccaggagaagacctacaga

SEQ ID NO: 3789768 - DNA, 25 bp, Homo sapien
gccctgagttcctgaaactgtggga

SEQ ID NO: 3789769 - DNA, 25 bp, Homo sapien
tgccctgagttcctgaaactgtggg

SEQ ID NO: 3789770 - DNA, 25 bp, Homo sapien
ccctgagttcctgaaactgtgggat

SEQ ID NO: 3789771 - DNA, 25 bp, Homo sapien
tgtgatcttgagctcgttacccagc

SEQ ID NO: 3789772 - DNA, 25 bp, Homo sapien
cctccttcccgggatgcagagagtc

SEQ ID NO: 3789773 - DNA, 25 bp, Homo sapien
agcaccatcagactttgggtccctg

SEQ ID NO: 3789774 - DNA, 25 bp, Homo sapien
gaggcaaagctttggacgtccagat

SEQ ID NO: 3789775 - DNA, 25 bp, Homo sapien
gagatctggccatcaagcttcccaa

SEQ ID NO: 3789776 - DNA, 25 bp, Homo sapien
gacccacgggtgagtttgctgagta

SEQ ID NO: 3789777 - DNA, 25 bp, Homo sapien
taactggtggctcagtggtcggctc

SEQ ID NO: 3789778 - DNA, 25 bp, Homo sapien
cataccccggaggaaagcttggaag

SEQ ID NO: 3789779 - DNA, 25 bp, Homo sapien
gattcagattcagcgtcccgactca

SEQ ID NO: 3789780 - DNA, 25 bp, Homo sapien
gcgtcccgactcagttactccagta

SEQ ID NO: 3789781 - DNA, 25 bp, Homo sapien
cagattcagcgtcccgactcagtta

SEQ ID NO: 3789782 - DNA, 25 bp, Homo sapien
tggtggattcagattcagcgtcccg

SEQ ID NO: 3789783 - DNA, 25 bp, Homo sapien
gaggtcacattcatacccgaaggaa

SEQ ID NO: 3789784 - DNA, 25 bp, Homo sapien
cgttgaatggcaagtctgatcacca

SEQ ID NO: 3789785 - DNA, 25 bp, Homo sapien
tgatttttgtccacagaccccaggt

SEQ ID NO: 3789786 - DNA, 25 bp, Homo sapien
tgcctgggcttggattatcaacacg

SEQ ID NO: 3789787 - DNA, 25 bp, Homo sapien
tgtgggcccaccttcatagggtcct

SEQ ID NO: 3789788 - DNA, 25 bp, Homo sapien
tagggtcctgttgtcccgtgacggc

SEQ ID NO: 3789789 - DNA, 25 bp, Homo sapien
cagctgggtggcctcttagaaaatt

SEQ ID NO: 3789790 - DNA, 25 bp, Homo sapien
ttcatcccagggtggacggtgtcct

SEQ ID NO: 3789791 - DNA, 25 bp, Homo sapien
tcatcgttagggtcacagcgtccag

SEQ ID NO: 3789792 - DNA, 25 bp, Homo sapien
tcagtttccctgtgagacacggtgg

SEQ ID NO: 3789793 - DNA, 25 bp, Homo sapien
tcttagacgcatggccagagcagtg

SEQ ID NO: 3789794 - DNA, 25 bp, Homo sapien
catccttgtgtggttgccatggcca

SEQ ID NO: 3789795 - DNA, 25 bp, Homo sapien
tgttcccatagcaacgaatagggct

SEQ ID NO: 3789796 - DNA, 25 bp, Homo sapien
gggcttccacatcgcagcccagtag

SEQ ID NO: 3789797 - DNA, 25 bp, Homo sapien
tgcaggagctacaggtccttctggt

SEQ ID NO: 3789798 - DNA, 25 bp, Homo sapien
tgttccagccccttagatacggtgt

SEQ ID NO: 3789799 - DNA, 25 bp, Homo sapien
caagcccgggttgcgccaggtctct

SEQ ID NO: 3789800 - DNA, 25 bp, Homo sapien
tcccaagcccgggttgcgccaggtc

SEQ ID NO: 3789801 - DNA, 25 bp, Homo sapien
attcacagctttcgggaagtgggtt

SEQ ID NO: 3789802 - DNA, 25 bp, Homo sapien
ctgattcacagctttcgggaagtgg

SEQ ID NO: 3789803 - DNA, 25 bp, Homo sapien
acccagcaatctcgggcaagtcact

SEQ ID NO: 3789804 - DNA, 25 bp, Homo sapien
acttaaccgccctaagctgcctcag

SEQ ID NO: 3789805 - DNA, 25 bp, Homo sapien
taaccgccctaagctgcctcagttt

SEQ ID NO: 3789806 - DNA, 25 bp, Homo sapien
gtcacttaaccgccctaagctgcct

SEQ ID NO: 3789807 - DNA, 25 bp, Homo sapien
caccctgtctcagggatagcggcat

SEQ ID NO: 3789808 - DNA, 25 bp, Homo sapien
ttcctggccaccctgtctcagggat

SEQ ID NO: 3789809 - DNA, 25 bp, Homo sapien
ggccaccctgtctcagggatagcgg

SEQ ID NO: 3789810 - DNA, 25 bp, Homo sapien
ctggccaccctgtctcagggatagc

SEQ ID NO: 3789811 - DNA, 25 bp, Homo sapien
cacacgagtgcaggtgtctctttga

SEQ ID NO: 3789812 - DNA, 25 bp, Homo sapien
tgaacagtgttgctgcgatgaacac

SEQ ID NO: 3789813 - DNA, 25 bp, Homo sapien
tatggcttcgtagtatcccactgtg

SEQ ID NO: 3789814 - DNA, 25 bp, Homo sapien
tgcgatgaacacacgagtgcaggtg

SEQ ID NO: 3789815 - DNA, 25 bp, Homo sapien
ccagcctcagctcgcgctgttacct

SEQ ID NO: 3789816 - DNA, 25 bp, Homo sapien
aaggccgcgggtgccctgtcttctg

SEQ ID NO: 3789817 - DNA, 25 bp, Homo sapien
ggtcacagcgcgagcatgcgcagca

SEQ ID NO: 3789818 - DNA, 25 bp, Homo sapien
agctcgcgctgttacctcaagccgg

SEQ ID NO: 3789819 - DNA, 25 bp, Homo sapien
ggaccggcgggcgagtgcggacctc

SEQ ID NO: 3789820 - DNA, 25 bp, Homo sapien
ggcgagtgcggacctccttcgtgtg

SEQ ID NO: 3789821 - DNA, 25 bp, Homo sapien
tgcaaccgtgggacgaggccggcgg

SEQ ID NO: 3789822 - DNA, 25 bp, Homo sapien
ctcccgagctgcaaccgtgggacga

SEQ ID NO: 3789823 - DNA, 25 bp, Homo sapien
tgttaatagatgacaggcaagggtg

SEQ ID NO: 3789824 - DNA, 25 bp, Homo sapien
gcaagggtgaagtcatcgcaaaagt

SEQ ID NO: 3789825 - DNA, 25 bp, Homo sapien
tctgcgtaacggaaatagtggtgaa

SEQ ID NO: 3789826 - DNA, 25 bp, Homo sapien
ccagacgatatggacagctgctccc

SEQ ID NO: 3789827 - DNA, 25 bp, Homo sapien
gaaatacactcttatatatatggtg

SEQ ID NO: 3789828 - DNA, 25 bp, Homo sapien
aaggtggcaagacagttctgtggag

SEQ ID NO: 3789829 - DNA, 25 bp, Homo sapien
aacaaacattaaatgctaggaccac

SEQ ID NO: 3789830 - DNA, 25 bp, Homo sapien
agtcttaacgacaaatgttgggcca

SEQ ID NO: 3789831 - DNA, 25 bp, Homo sapien
gcggcatgcaactatagtcacagct

SEQ ID NO: 3789832 - DNA, 25 bp, Homo sapien
ggcggcatgcaactatagtcacagc

SEQ ID NO: 3789833 - DNA, 25 bp, Homo sapien
tggatcccaccgtcactgaggactc

SEQ ID NO: 3789834 - DNA, 25 bp, Homo sapien
cagcgatgtggagatgttgtggatc

SEQ ID NO: 3789835 - DNA, 25 bp, Homo sapien
tctgagctagtgctggcgctgccct

SEQ ID NO: 3789836 - DNA, 25 bp, Homo sapien
cttgcgtctgagctagtgctggcgc

SEQ ID NO: 3789837 - DNA, 25 bp, Homo sapien
agcaggtggatttctcctactccca

SEQ ID NO: 3789838 - DNA, 25 bp, Homo sapien
ggtggatttctcctactcccaggca

SEQ ID NO: 3789839 - DNA, 25 bp, Homo sapien
caggtggatttctcctactcccagg

SEQ ID NO: 3789840 - DNA, 25 bp, Homo sapien
tggatttctcctactcccaggcaag

SEQ ID NO: 3789841 - DNA, 25 bp, Homo sapien
gggctgcctcaatggcccgctgggc

SEQ ID NO: 3789842 - DNA, 25 bp, Homo sapien
tgggtcctgcctgctccgtttctgc

SEQ ID NO: 3789843 - DNA, 25 bp, Homo sapien
acacccttgcgcttggcccccgcca

SEQ ID NO: 3789844 - DNA, 25 bp, Homo sapien
ctggaggagggccttggcaagggtg

SEQ ID NO: 3789845 - DNA, 25 bp, Homo sapien
gtccctctgagtcccagagcactgc

SEQ ID NO: 3789846 - DNA, 25 bp, Homo sapien
cctgagactccagcagagggatgga

SEQ ID NO: 3789847 - DNA, 25 bp, Homo sapien
taggttccttgaaagctccaagcct

SEQ ID NO: 3789848 - DNA, 25 bp, Homo sapien
ccagagcactgctcacaccaggcct

SEQ ID NO: 3789849 - DNA, 25 bp, Homo sapien
gtcatttccaggaaacttgaggcca

SEQ ID NO: 3789850 - DNA, 25 bp, Homo sapien
cccaaccagtggatgctccagggcc

SEQ ID NO: 3789851 - DNA, 25 bp, Homo sapien
cctctgcctgactgagaagtgactg

SEQ ID NO: 3789852 - DNA, 25 bp, Homo sapien
tgggaagccgcagccatcgcctctg

SEQ ID NO: 3789853 - DNA, 25 bp, Homo sapien
ggggtctaccaggcctcactctcac

SEQ ID NO: 3789854 - DNA, 25 bp, Homo sapien
ttgggggtctaccaggcctcactct

SEQ ID NO: 3789855 - DNA, 25 bp, Homo sapien
tgttgggggtctaccaggcctcact

SEQ ID NO: 3789856 - DNA, 25 bp, Homo sapien
tgggggtctaccaggcctcactctc

SEQ ID NO: 3789857 - DNA, 25 bp, Homo sapien
ttacagggacttgccgggcgccaca

SEQ ID NO: 3789858 - DNA, 25 bp, Homo sapien
cagggggcaaagttctccccagcag

SEQ ID NO: 3789859 - DNA, 25 bp, Homo sapien
aggaggccccgctgctaatccactg

SEQ ID NO: 3789860 - DNA, 25 bp, Homo sapien
cccgctgctaatccactgtcttctg

SEQ ID NO: 3789861 - DNA, 25 bp, Homo sapien
ccagaagccctgcggacagagaaga

SEQ ID NO: 3789862 - DNA, 25 bp, Homo sapien
ccccagaagccctgcggacagagaa

SEQ ID NO: 3789863 - DNA, 25 bp, Homo sapien
cccagaagccctgcggacagagaag

SEQ ID NO: 3789864 - DNA, 25 bp, Homo sapien
gccgcatgtgcttttgtcaggttcc

SEQ ID NO: 3789865 - DNA, 25 bp, Homo sapien
tgagcctcaaaggacccagaagcct

SEQ ID NO: 3789866 - DNA, 25 bp, Homo sapien
cagttgtcaaagaatgaggactcat

SEQ ID NO: 3789867 - DNA, 25 bp, Homo sapien
gaggctcgctgacttgggagctcaa

SEQ ID NO: 3789868 - DNA, 25 bp, Homo sapien
gtgaatggatatccataattgcatt

SEQ ID NO: 3789869 - DNA, 25 bp, Homo sapien
tgtgaatggatatccataattgcat

SEQ ID NO: 3789870 - DNA, 25 bp, Homo sapien
aatgtgaatggatatccataattgc

SEQ ID NO: 3789871 - DNA, 25 bp, Homo sapien
aaaatgtgaatggatatccataatt

SEQ ID NO: 3789872 - DNA, 25 bp, Homo sapien
gtgaactaagtaagctgctattgca

SEQ ID NO: 3789873 - DNA, 25 bp, Homo sapien
gaactaagtaagctgctattgcaac

SEQ ID NO: 3789874 - DNA, 25 bp, Homo sapien
gggcaccgttcttggagctactgca

SEQ ID NO: 3789875 - DNA, 25 bp, Homo sapien
ctaagtaagctgctattgcaacccc

SEQ ID NO: 3789876 - DNA, 25 bp, Homo sapien
gatttcacgcatccctgcagtgggc

SEQ ID NO: 3789877 - DNA, 25 bp, Homo sapien
tctgtcctaggaacatacgaggcta

SEQ ID NO: 3789878 - DNA, 25 bp, Homo sapien
cgaggctatttcaggattgcttaca

SEQ ID NO: 3789879 - DNA, 25 bp, Homo sapien
tgcttacaacctggaggcaaccggg

SEQ ID NO: 3789880 - DNA, 25 bp, Homo sapien
tgccttccctggtgtcgagtttatg

SEQ ID NO: 3789881 - DNA, 25 bp, Homo sapien
acatccccggcggttcctctgaaat

SEQ ID NO: 3789882 - DNA, 25 bp, Homo sapien
ttcgcactaggaccctcagggacca

SEQ ID NO: 3789883 - DNA, 25 bp, Homo sapien
ccctagatgtcctccgcgttctgta

SEQ ID NO: 3789884 - DNA, 25 bp, Homo sapien
gcgagcgtcgaccccgcgacccagg

SEQ ID NO: 3789885 - DNA, 25 bp, Homo sapien
agcgagcgtcgaccccgcgacccag

SEQ ID NO: 3789886 - DNA, 25 bp, Homo sapien
gcagcgagcgtcgaccccgcgaccc

SEQ ID NO: 3789887 - DNA, 25 bp, Homo sapien
cagcgagcgtcgaccccgcgaccca

SEQ ID NO: 3789888 - DNA, 25 bp, Homo sapien
cacatagggtgctgacaggtcactc

SEQ ID NO: 3789889 - DNA, 25 bp, Homo sapien
catcagctgggcgtcataaacactc

SEQ ID NO: 3789890 - DNA, 25 bp, Homo sapien
tctccagccttagtgcatcatcagc

SEQ ID NO: 3789891 - DNA, 25 bp, Homo sapien
gccactccaattctccacatagggt

SEQ ID NO: 3789892 - DNA, 25 bp, Homo sapien
acgtgagtgagaagcgtcaccatca

SEQ ID NO: 3789893 - DNA, 25 bp, Homo sapien
aaatcccgtaacttctctgggctgg

SEQ ID NO: 3789894 - DNA, 25 bp, Homo sapien
acacctgggtcacggcgctggcttg

SEQ ID NO: 3789895 - DNA, 25 bp, Homo sapien
cttcacacgtgagtgagaagcgtca

SEQ ID NO: 3789896 - DNA, 25 bp, Homo sapien
gccagtaaggtggagctcaggagtt

SEQ ID NO: 3789897 - DNA, 25 bp, Homo sapien
cgttagccagtaaggtggagctcag

SEQ ID NO: 3789898 - DNA, 25 bp, Homo sapien
tagccagtaaggtggagctcaggag

SEQ ID NO: 3789899 - DNA, 25 bp, Homo sapien
ttagccagtaaggtggagctcagga

SEQ ID NO: 3789900 - DNA, 25 bp, Homo sapien
caggtgctctactaaacatcagaag

SEQ ID NO: 3789901 - DNA, 25 bp, Homo sapien
taatcctgccactcaaatgcacaac

SEQ ID NO: 3789902 - DNA, 25 bp, Homo sapien
ctagttacctacctgcctcctaaag

SEQ ID NO: 3789903 - DNA, 25 bp, Homo sapien
atactaaaatgacccctaatcctgc

SEQ ID NO: 3789904 - DNA, 25 bp, Homo sapien
atgaggtccccagggcagtcaaact

SEQ ID NO: 3789905 - DNA, 25 bp, Homo sapien
tgcaacatacgacatgccaggcaca

SEQ ID NO: 3789906 - DNA, 25 bp, Homo sapien
caatgaatgtgaaccgctgacctgg

SEQ ID NO: 3789907 - DNA, 25 bp, Homo sapien
acacttcaacatcgaggctcaggga

SEQ ID NO: 3789908 - DNA, 25 bp, Homo sapien
cattaggatagctttatgcatggct

SEQ ID NO: 3789909 - DNA, 25 bp, Homo sapien
ttgtcctcctaaagcaaccccagtc

SEQ ID NO: 3789910 - DNA, 25 bp, Homo sapien
ctaaagcaaccccagtcattgcttg

SEQ ID NO: 3789911 - DNA, 25 bp, Homo sapien
taggatagctttatgcatggctcct

SEQ ID NO: 3789912 - DNA, 25 bp, Homo sapien
tctcatgatctactgactgagccag

SEQ ID NO: 3789913 - DNA, 25 bp, Homo sapien
atgatctactgactgagccagccgg

SEQ ID NO: 3789914 - DNA, 25 bp, Homo sapien
agtctcatgatctactgactgagcc

SEQ ID NO: 3789915 - DNA, 25 bp, Homo sapien
tcatgatctactgactgagccagcc

SEQ ID NO: 3789916 - DNA, 25 bp, Homo sapien
tcgcacatagagtgcccatctcctg

SEQ ID NO: 3789917 - DNA, 25 bp, Homo sapien
aatatccataggtgtggagcggcag

SEQ ID NO: 3789918 - DNA, 25 bp, Homo sapien
gaactcagagaccagcgccagtgcg

SEQ ID NO: 3789919 - DNA, 25 bp, Homo sapien
cgagaaatatccataggtgtggagc

SEQ ID NO: 3789920 - DNA, 25 bp, Homo sapien
ccgggatgacgtccgtgcctggctt

SEQ ID NO: 3789921 - DNA, 25 bp, Homo sapien
tcctcatcttggtcggaggctgtga

SEQ ID NO: 3789922 - DNA, 25 bp, Homo sapien
atctccagggacaggacgcagtgca

SEQ ID NO: 3789923 - DNA, 25 bp, Homo sapien
tctgttcaggcatctctagggctgg

SEQ ID NO: 3789924 - DNA, 25 bp, Homo sapien
atggtgtcctcaggaactccaggga

SEQ ID NO: 3789925 - DNA, 25 bp, Homo sapien
tcagggcactgccacgggcccaccc

SEQ ID NO: 3789926 - DNA, 25 bp, Homo sapien
ttgctcatcgggcgcgtggcagtgg

SEQ ID NO: 3789927 - DNA, 25 bp, Homo sapien
cgtggcagtggccccgcatcactgt

SEQ ID NO: 3789928 - DNA, 25 bp, Homo sapien
ggcgcgtggcagtggccccgcatca

SEQ ID NO: 3789929 - DNA, 25 bp, Homo sapien
agtcattttagctttgagtacattt

SEQ ID NO: 3789930 - DNA, 25 bp, Homo sapien
gtcattttagctttgagtacatttt

SEQ ID NO: 3789931 - DNA, 25 bp, Homo sapien
ccccgtagcacgtcctcaggaactc

SEQ ID NO: 3789932 - DNA, 25 bp, Homo sapien
cccgcttgtagaggaacgactcgtg

SEQ ID NO: 3789933 - DNA, 25 bp, Homo sapien
tcccgcttgtagaggaacgactcgt

SEQ ID NO: 3789934 - DNA, 25 bp, Homo sapien
tctcccgcttgtagaggaacgactc

SEQ ID NO: 3789935 - DNA, 25 bp, Homo sapien
gtccatgtcctggtgctcgtctggg

SEQ ID NO: 3789936 - DNA, 25 bp, Homo sapien
agagcaaactatccacgcctcggag

SEQ ID NO: 3789937 - DNA, 25 bp, Homo sapien
ggccctccatatcgggctggtggca

SEQ ID NO: 3789938 - DNA, 25 bp, Homo sapien
tcggagcagcgtgtccacttggctc

SEQ ID NO: 3789939 - DNA, 25 bp, Homo sapien
tctcccgccggtagaggaaggactc

SEQ ID NO: 3789940 - DNA, 25 bp, Homo sapien
caaaagctgcaggatccggaagagc

SEQ ID NO: 3789941 - DNA, 25 bp, Homo sapien
aagctgcaggatccggaagagccac

SEQ ID NO: 3789942 - DNA, 25 bp, Homo sapien
ctgcaggatccggaagagccactgg

SEQ ID NO: 3789943 - DNA, 25 bp, Homo sapien
cccaaaagctgcaggatccggaaga

SEQ ID NO: 3789944 - DNA, 25 bp, Homo sapien
cgaggcggggacctcgcagcactgt

SEQ ID NO: 3789945 - DNA, 25 bp, Homo sapien
tcaggagcgggggtgaggacgaggc

SEQ ID NO: 3789946 - DNA, 25 bp, Homo sapien
gcggggacctcgcagcactgtctct

SEQ ID NO: 3789947 - DNA, 25 bp, Homo sapien
tgaggacgaggcggggacctcgcag

SEQ ID NO: 3789948 - DNA, 25 bp, Homo sapien
ggatgaccccacgatgaaggacaca

SEQ ID NO: 3789949 - DNA, 25 bp, Homo sapien
cagaggatcagtcacgcaaaagcgg

SEQ ID NO: 3789950 - DNA, 25 bp, Homo sapien
cagtcagccgcgagcaggtttctag

SEQ ID NO: 3789951 - DNA, 25 bp, Homo sapien
caacctgcggttgtggatgatcgga

SEQ ID NO: 3789952 - DNA, 25 bp, Homo sapien
ctggggaccacgagacagaagaggt

SEQ ID NO: 3789953 - DNA, 25 bp, Homo sapien
aatatccagcaaggggctgcgcacg

SEQ ID NO: 3789954 - DNA, 25 bp, Homo sapien
ccttccacacggatgaaaatatcca

SEQ ID NO: 3789955 - DNA, 25 bp, Homo sapien
gggcacgctttatccccttccacac

SEQ ID NO: 3789956 - DNA, 25 bp, Homo sapien
caggaggaccctgaggggcacagca

SEQ ID NO: 3789957 - DNA, 25 bp, Homo sapien
ggaggaccctgaggggcacagcagc

SEQ ID NO: 3789958 - DNA, 25 bp, Homo sapien
ctgaggggcacagcagcacaggagc

SEQ ID NO: 3789959 - DNA, 25 bp, Homo sapien
ccctgaggggcacagcagcacagga

SEQ ID NO: 3789960 - DNA, 25 bp, Homo sapien
ccatgtggagcagggaggctcggga

SEQ ID NO: 3789961 - DNA, 25 bp, Homo sapien
gccatgtggagcagggaggctcggg

SEQ ID NO: 3789962 - DNA, 25 bp, Homo sapien
ggccatgtggagcagggaggctcgg

SEQ ID NO: 3789963 - DNA, 25 bp, Homo sapien
gagagggaggacctggcgggtggct

SEQ ID NO: 3789964 - DNA, 25 bp, Homo sapien
aggcagggagcagcgtccactgtcc

SEQ ID NO: 3789965 - DNA, 25 bp, Homo sapien
tgtgccttgcccagaggataccctt

SEQ ID NO: 3789966 - DNA, 25 bp, Homo sapien
catcgtggacacatcgggtggcagt

SEQ ID NO: 3789967 - DNA, 25 bp, Homo sapien
caggcttgcatgcagggtgcgccgt

SEQ ID NO: 3789968 - DNA, 25 bp, Homo sapien
tgcctggttggtcagaggaatgacc

SEQ ID NO: 3789969 - DNA, 25 bp, Homo sapien
gtgtctgctgcgtcactcgtccgtc

SEQ ID NO: 3789970 - DNA, 25 bp, Homo sapien
ccgcgcaggtagaggtgtgacccca

SEQ ID NO: 3789971 - DNA, 25 bp, Homo sapien
tgcaggtggcggccaagcgtcccac

SEQ ID NO: 3789972 - DNA, 25 bp, Homo sapien
cctcctcctcacagtgaggtggccc

SEQ ID NO: 3789973 - DNA, 25 bp, Homo sapien
tggccccgagatgagacctcccaca

SEQ ID NO: 3789974 - DNA, 25 bp, Homo sapien
gggactggtcaggtgaggcccctgc

SEQ ID NO: 3789975 - DNA, 25 bp, Homo sapien
tctcccgccggtagaggaaggactc

SEQ ID NO: 3789976 - DNA, 25 bp, Homo sapien
catgatgcggtggccctgggttatg

SEQ ID NO: 3789977 - DNA, 25 bp, Homo sapien
ggtggccctgggttatggcgcggct

SEQ ID NO: 3789978 - DNA, 25 bp, Homo sapien
tgccccccagggaagtcctcaggaa

SEQ ID NO: 3789979 - DNA, 25 bp, Homo sapien
tgcggtggccctgggttatggcgcg

SEQ ID NO: 3789980 - DNA, 25 bp, Homo sapien
ctgggccgtggtggggagccgctcc

SEQ ID NO: 3789981 - DNA, 25 bp, Homo sapien
gctcccgttgcctcaaggcctccag

SEQ ID NO: 3789982 - DNA, 25 bp, Homo sapien
ccaggtcaggctgatggcagtggct

SEQ ID NO: 3789983 - DNA, 25 bp, Homo sapien
gtggggagccgctcccgttgcctca

SEQ ID NO: 3789984 - DNA, 25 bp, Homo sapien
aggagaacacgtcttgaagcacagc

SEQ ID NO: 3789985 - DNA, 25 bp, Homo sapien
gagaacacgtcttgaagcacagctg

SEQ ID NO: 3789986 - DNA, 25 bp, Homo sapien
gaacacgtcttgaagcacagctgaa

SEQ ID NO: 3789987 - DNA, 25 bp, Homo sapien
ctttcaggagaacacgtcttgaagc

SEQ ID NO: 3789988 - DNA, 25 bp, Homo sapien
ggtcatgcaccattagataacaaat

SEQ ID NO: 3789989 - DNA, 25 bp, Homo sapien
aattggtcatgcaccattagataac

SEQ ID NO: 3789990 - DNA, 25 bp, Homo sapien
catgcaccattagataacaaataca

SEQ ID NO: 3789991 - DNA, 25 bp, Homo sapien
ttgttgtaattggtcatgcaccatt

SEQ ID NO: 3789992 - DNA, 25 bp, Homo sapien
gggccaagcattgcggctcatgctt

SEQ ID NO: 3789993 - DNA, 25 bp, Homo sapien
gccaagcattgcggctcatgcttgt

SEQ ID NO: 3789994 - DNA, 25 bp, Homo sapien
ggggccaagcattgcggctcatgct

SEQ ID NO: 3789995 - DNA, 25 bp, Homo sapien
tcaggcctgctgtgttacattaatt

SEQ ID NO: 3789996 - DNA, 25 bp, Homo sapien
ccagctacctgggatcactcacagt

SEQ ID NO: 3789997 - DNA, 25 bp, Homo sapien
ccaagggtgaaccttgcacacaggc

SEQ ID NO: 3789998 - DNA, 25 bp, Homo sapien
tgggatcactcacagtgatcttgca

SEQ ID NO: 3789999 - DNA, 25 bp, Homo sapien
tctctactgatctggtatgcaggca

SEQ ID NO: 3790000 - DNA, 25 bp, Homo sapien
ccatcatactagtggctgggattta

SEQ ID NO: 3790001 - DNA, 25 bp, Homo sapien
tgtgtctattcagtgatcacacggt

SEQ ID NO: 3790002 - DNA, 25 bp, Homo sapien
cttgagggactcacaggacttagcc

SEQ ID NO: 3790003 - DNA, 25 bp, Homo sapien
gttgagaatctatccctatcggcca

SEQ ID NO: 3790004 - DNA, 25 bp, Homo sapien
tcgccaagagagtatgagggttcca

SEQ ID NO: 3790005 - DNA, 25 bp, Homo sapien
ttaaatagccatcccagtgggtgtg

SEQ ID NO: 3790006 - DNA, 25 bp, Homo sapien
gggccattttgcatcgtcgccaaga

SEQ ID NO: 3790007 - DNA, 25 bp, Homo sapien
tcgccatccagtctgacgtctttga

SEQ ID NO: 3790008 - DNA, 25 bp, Homo sapien
gactcgccatccagtctgacgtctt

SEQ ID NO: 3790009 - DNA, 25 bp, Homo sapien
actgggactcgccatccagtctgac

SEQ ID NO: 3790010 - DNA, 25 bp, Homo sapien
atccagtctgacgtctttgatgtcc

SEQ ID NO: 3790011 - DNA, 25 bp, Homo sapien
ctgaggagacgcgaagaccatcgat

SEQ ID NO: 3790012 - DNA, 25 bp, Homo sapien
caaacctaggtggatgggaagtgcc

SEQ ID NO: 3790013 - DNA, 25 bp, Homo sapien
gaccatcgatgctttggaagaatga

SEQ ID NO: 3790014 - DNA, 25 bp, Homo sapien
ccaaacctaggtggatgggaagtgc

SEQ ID NO: 3790015 - DNA, 25 bp, Homo sapien
ttctccgccgacatgaggacaccat

SEQ ID NO: 3790016 - DNA, 25 bp, Homo sapien
acagctgcgtctgcaagcgccagct

SEQ ID NO: 3790017 - DNA, 25 bp, Homo sapien
tcactttgcaccgtgctgagcagag

SEQ ID NO: 3790018 - DNA, 25 bp, Homo sapien
ccaaaggtcaggaaggcgccaccgc

SEQ ID NO: 3790019 - DNA, 25 bp, Homo sapien
atctcgggaatgacgcctgccgtgg

SEQ ID NO: 3790020 - DNA, 25 bp, Homo sapien
ccttgcagtgcatggtgggttccgt

SEQ ID NO: 3790021 - DNA, 25 bp, Homo sapien
cttgttagtaaggaggaggctctgc

SEQ ID NO: 3790022 - DNA, 25 bp, Homo sapien
cggactgctccctctgactggtgaa

SEQ ID NO: 3790023 - DNA, 25 bp, Homo sapien
tcttgggcatgtggagagcttcccc

SEQ ID NO: 3790024 - DNA, 25 bp, Homo sapien
tcttctaaggtcaaagcaggcgtga

SEQ ID NO: 3790025 - DNA, 25 bp, Homo sapien
catctggtggccctggaactttgca

SEQ ID NO: 3790026 - DNA, 25 bp, Homo sapien
aatgtcctgccatatccgggcctgg

SEQ ID NO: 3790027 - DNA, 25 bp, Homo sapien
tctgtctcctgagaacccccttggg

SEQ ID NO: 3790028 - DNA, 25 bp, Homo sapien
tgtctcctgagaacccccttgggta

SEQ ID NO: 3790029 - DNA, 25 bp, Homo sapien
ccccttgggtacgtctggcttctgg

SEQ ID NO: 3790030 - DNA, 25 bp, Homo sapien
gggtacgtctggcttctggtccttg

SEQ ID NO: 3790031 - DNA, 25 bp, Homo sapien
agtgatagcccgctcaggtccaaca

SEQ ID NO: 3790032 - DNA, 25 bp, Homo sapien
caaaggctgcagtgatagcccgctc

SEQ ID NO: 3790033 - DNA, 25 bp, Homo sapien
ccggctacggttaagtgcctccagc

SEQ ID NO: 3790034 - DNA, 25 bp, Homo sapien
tgtgcacaaaatggccccggctacg

SEQ ID NO: 3790035 - DNA, 25 bp, Homo sapien
tgccgccagctgacactttggaagc

SEQ ID NO: 3790036 - DNA, 25 bp, Homo sapien
gtcgttgccgccagctgacactttg

SEQ ID NO: 3790037 - DNA, 25 bp, Homo sapien
cgccagctgacactttggaagcagg

SEQ ID NO: 3790038 - DNA, 25 bp, Homo sapien
cctcgaatgtcgttgccgccagctg

SEQ ID NO: 3790039 - DNA, 25 bp, Homo sapien
tgtctgcccggtttctcttggcggg

SEQ ID NO: 3790040 - DNA, 25 bp, Homo sapien
gggagcatccgggaccacctgtctg

SEQ ID NO: 3790041 - DNA, 25 bp, Homo sapien
tccacagaggatgtcctaggggcag

SEQ ID NO: 3790042 - DNA, 25 bp, Homo sapien
ccaactgcgcttcccgacgagggag

SEQ ID NO: 3790043 - DNA, 25 bp, Homo sapien
tcttcggatccgcacgcccctcccg

SEQ ID NO: 3790044 - DNA, 25 bp, Homo sapien
gtccagatgccgctggcctgacgga

SEQ ID NO: 3790045 - DNA, 25 bp, Homo sapien
tttcttcggatccgcacgcccctcc

SEQ ID NO: 3790046 - DNA, 25 bp, Homo sapien
gatgccgctggcctgacggaggaag

SEQ ID NO: 3790047 - DNA, 25 bp, Homo sapien
tctgcccctagaggcgtctctctgt

SEQ ID NO: 3790048 - DNA, 25 bp, Homo sapien
acctagggggcgttgtcctctgaca

SEQ ID NO: 3790049 - DNA, 25 bp, Homo sapien
tcaaccaaggataggtcaccctcgc

SEQ ID NO: 3790050 - DNA, 25 bp, Homo sapien
tctcagcgagctctgggcggtgcct

SEQ ID NO: 3790051 - DNA, 25 bp, Homo sapien
agccctgcagggcttgtgtccccat

SEQ ID NO: 3790052 - DNA, 25 bp, Homo sapien
ctgcagcagcgggaggaagaggaga

SEQ ID NO: 3790053 - DNA, 25 bp, Homo sapien
ggaagccctgcagggcttgtgtccc

SEQ ID NO: 3790054 - DNA, 25 bp, Homo sapien
aggaagccctgcagggcttgtgtcc

SEQ ID NO: 3790055 - DNA, 25 bp, Homo sapien
gactgtgcaggctcccagccgaggc

SEQ ID NO: 3790056 - DNA, 25 bp, Homo sapien
ggctcccagccgaggccccacgcgg

SEQ ID NO: 3790057 - DNA, 25 bp, Homo sapien
ctggactgtgcaggctcccagccga

SEQ ID NO: 3790058 - DNA, 25 bp, Homo sapien
tgcaggctcccagccgaggccccac

SEQ ID NO: 3790059 - DNA, 25 bp, Homo sapien
cccgcgcgggccagtgcggttctgg

SEQ ID NO: 3790060 - DNA, 25 bp, Homo sapien
ggtggccgcggtagtcagccccatt

SEQ ID NO: 3790061 - DNA, 25 bp, Homo sapien
ttctggtggccgcggtagtcagccc

SEQ ID NO: 3790062 - DNA, 25 bp, Homo sapien
cagtgcggttctggtggccgcggta

SEQ ID NO: 3790063 - DNA, 25 bp, Homo sapien
gcggccgtgggggtcgctggcgctg

SEQ ID NO: 3790064 - DNA, 25 bp, Homo sapien
ggtcgctggcgctgctgtagctgtg

SEQ ID NO: 3790065 - DNA, 25 bp, Homo sapien
cgtgggggtcgctggcgctgctgta

SEQ ID NO: 3790066 - DNA, 25 bp, Homo sapien
cagcggccgtgggggtcgctggcgc

SEQ ID NO: 3790067 - DNA, 25 bp, Homo sapien
cggcagaagttgtgcgcgcccagcc

SEQ ID NO: 3790068 - DNA, 25 bp, Homo sapien
ggcagaagttgtgcgcgcccagccc

SEQ ID NO: 3790069 - DNA, 25 bp, Homo sapien
gtagcgccagtagatgccctcctct

SEQ ID NO: 3790070 - DNA, 25 bp, Homo sapien
tctcagccacgtagcaccacggctg

SEQ ID NO: 3790071 - DNA, 25 bp, Homo sapien
ggatgtcgcagtagcgccagtagat

SEQ ID NO: 3790072 - DNA, 25 bp, Homo sapien
cggctgcacgtcaccgtctgggtta

SEQ ID NO: 3790073 - DNA, 25 bp, Homo sapien
tcagacttccgtgactccgaaaaca

SEQ ID NO: 3790074 - DNA, 25 bp, Homo sapien
gtcagacttccgtgactccgaaaac

SEQ ID NO: 3790075 - DNA, 25 bp, Homo sapien
agtcagacttccgtgactccgaaaa

SEQ ID NO: 3790076 - DNA, 25 bp, Homo sapien
cagacttccgtgactccgaaaacaa

SEQ ID NO: 3790077 - DNA, 25 bp, Homo sapien
tggtaccccttcatgcggcagaagc

SEQ ID NO: 3790078 - DNA, 25 bp, Homo sapien
tccacaaagcatcccaggtagcctg

SEQ ID NO: 3790079 - DNA, 25 bp, Homo sapien
agcgtaggcacacctggaccgtgag

SEQ ID NO: 3790080 - DNA, 25 bp, Homo sapien
gaccgtgagcttcgtggaggtgccg

SEQ ID NO: 3790081 - DNA, 25 bp, Homo sapien
caaccgagtgttgggagttgagtgt

SEQ ID NO: 3790082 - DNA, 25 bp, Homo sapien
gggtcactggtctgggcccgtgagc

SEQ ID NO: 3790083 - DNA, 25 bp, Homo sapien
gagtgtggtctttaggtccaggtca

SEQ ID NO: 3790084 - DNA, 25 bp, Homo sapien
cagaaaccggtgtctgggtttggca

SEQ ID NO: 3790085 - DNA, 25 bp, Homo sapien
ggccaggtcgctttcagagccacag

SEQ ID NO: 3790086 - DNA, 25 bp, Homo sapien
gagccacagaagcaggcgtaaccgg

SEQ ID NO: 3790087 - DNA, 25 bp, Homo sapien
tccagggtggccgaaacagatctgg

SEQ ID NO: 3790088 - DNA, 25 bp, Homo sapien
gccgaaacagatctggtcacagtcg

SEQ ID NO: 3790089 - DNA, 25 bp, Homo sapien
cccagccgcccatcgccgccacaca

SEQ ID NO: 3790090 - DNA, 25 bp, Homo sapien
agggcccagctgcagttccggtccg

SEQ ID NO: 3790091 - DNA, 25 bp, Homo sapien
taggtgagcgcgaagccttgcgcgt

SEQ ID NO: 3790092 - DNA, 25 bp, Homo sapien
cgcgcgcgtcgcttcggaaggtgag

SEQ ID NO: 3790093 - DNA, 25 bp, Homo sapien
tagatgacgccctgaggcgctgtcc

SEQ ID NO: 3790094 - DNA, 25 bp, Homo sapien
gggtcctcagcggcgtcctgcagcc

SEQ ID NO: 3790095 - DNA, 25 bp, Homo sapien
tgggtcctcagcggcgtcctgcagc

SEQ ID NO: 3790096 - DNA, 25 bp, Homo sapien
aatcgcggccggcggagccccaggc

SEQ ID NO: 3790097 - DNA, 25 bp, Homo sapien
tcgcggccggcggagccccaggcct

SEQ ID NO: 3790098 - DNA, 25 bp, Homo sapien
cccaatcgcggccggcggagcccca

SEQ ID NO: 3790099 - DNA, 25 bp, Homo sapien
ccaatcgcggccggcggagccccag

SEQ ID NO: 3790100 - DNA, 25 bp, Homo sapien
tgcgggcacacggctgcggtgagga

SEQ ID NO: 3790101 - DNA, 25 bp, Homo sapien
ccctgactcactcccgtcccgcgcg

SEQ ID NO: 3790102 - DNA, 25 bp, Homo sapien
gcgggcacacggctgcggtgaggat

SEQ ID NO: 3790103 - DNA, 25 bp, Homo sapien
ctgcgggcacacggctgcggtgagg

SEQ ID NO: 3790104 - DNA, 25 bp, Homo sapien
cgtcggcgcagcggacgcagcagcc

SEQ ID NO: 3790105 - DNA, 25 bp, Homo sapien
cagccccaggagcagcagcagcagc

SEQ ID NO: 3790106 - DNA, 25 bp, Homo sapien
cggcgcagcggacgcagcagcccca

SEQ ID NO: 3790107 - DNA, 25 bp, Homo sapien
agcagcagcagcaccgagacagccg

SEQ ID NO: 3790108 - DNA, 25 bp, Homo sapien
cagctccccaccaccggtccgccct

SEQ ID NO: 3790109 - DNA, 25 bp, Homo sapien
agaacccaggagttccttcctagct

SEQ ID NO: 3790110 - DNA, 25 bp, Homo sapien
acccaggagttccttcctagctctg

SEQ ID NO: 3790111 - DNA, 25 bp, Homo sapien
tccagctccccaccaccggtccgcc

SEQ ID NO: 3790112 - DNA, 25 bp, Homo sapien
tgtgcgtggacccaaagcctcgctc

SEQ ID NO: 3790113 - DNA, 25 bp, Homo sapien
tgcagcgtcctgctctacctgcgat

SEQ ID NO: 3790114 - DNA, 25 bp, Homo sapien
agacatcagccgagccggtccaatc

SEQ ID NO: 3790115 - DNA, 25 bp, Homo sapien
gatcccgcgcgcgatcctgtgcgtg

SEQ ID NO: 3790116 - DNA, 25 bp, Homo sapien
ttttcccggagccagcagacagctc

SEQ ID NO: 3790117 - DNA, 25 bp, Homo sapien
gggctgttggtaccacacagcccag

SEQ ID NO: 3790118 - DNA, 25 bp, Homo sapien
gagcagggcaaggccacccctcggg

SEQ ID NO: 3790119 - DNA, 25 bp, Homo sapien
ccctcggggctgttggtaccacaca

SEQ ID NO: 3790120 - DNA, 25 bp, Homo sapien
ccggtagcccgcggcagaaccctca

SEQ ID NO: 3790121 - DNA, 25 bp, Homo sapien
cggtagcccgcggcagaaccctcag

SEQ ID NO: 3790122 - DNA, 25 bp, Homo sapien
ggtagcccgcggcagaaccctcagc

SEQ ID NO: 3790123 - DNA, 25 bp, Homo sapien
agcggagatgagcgagcgcagggag

SEQ ID NO: 3790124 - DNA, 25 bp, Homo sapien
gagcggagatgagcgagcgcaggga

SEQ ID NO: 3790125 - DNA, 25 bp, Homo sapien
gcggagatgagcgagcgcagggagc

SEQ ID NO: 3790126 - DNA, 25 bp, Homo sapien
tttggtctccccaaggcgaccagag

SEQ ID NO: 3790127 - DNA, 25 bp, Homo sapien
acagcatctcaggtgtccatctcgc

SEQ ID NO: 3790128 - DNA, 25 bp, Homo sapien
gttcaaagacctccgaaaccagaga

SEQ ID NO: 3790129 - DNA, 25 bp, Homo sapien
ggtcaggccaagtcccagataatag

SEQ ID NO: 3790130 - DNA, 25 bp, Homo sapien
cggtggccggtagtctctctgcagc

SEQ ID NO: 3790131 - DNA, 25 bp, Homo sapien
ccaaggcagacgcgccgcagggaca

SEQ ID NO: 3790132 - DNA, 25 bp, Homo sapien
ggtcggctccgccaaggcagacgcg

SEQ ID NO: 3790133 - DNA, 25 bp, Homo sapien
caggctcctagttcccgccggccgg

SEQ ID NO: 3790134 - DNA, 25 bp, Homo sapien
accgcgcgggcagcccgtgctcctg

SEQ ID NO: 3790135 - DNA, 25 bp, Homo sapien
ctcgatcggcgcacgcgctggctag

SEQ ID NO: 3790136 - DNA, 25 bp, Homo sapien
gccgcagcgcgggaaggcccatcac

SEQ ID NO: 3790137 - DNA, 25 bp, Homo sapien
cacccatcgccctgcgctcgatcgg

SEQ ID NO: 3790138 - DNA, 25 bp, Homo sapien
tgaactgcaggtgcggcggcgagct

SEQ ID NO: 3790139 - DNA, 25 bp, Homo sapien
ttattgaactgcaggtgcggcggcg

SEQ ID NO: 3790140 - DNA, 25 bp, Homo sapien
gtgcggcggcgagctggcccagtcc

SEQ ID NO: 3790141 - DNA, 25 bp, Homo sapien
gcggcggcgagctggcccagtccag

SEQ ID NO: 3790142 - DNA, 25 bp, Homo sapien
ctggcgggccggtacccggtcagca

SEQ ID NO: 3790143 - DNA, 25 bp, Homo sapien
gatgttgcccagttcgttgtgcagg

SEQ ID NO: 3790144 - DNA, 25 bp, Homo sapien
tgcccagttcgttgtgcaggtagaa

SEQ ID NO: 3790145 - DNA, 25 bp, Homo sapien
gtagatgttgcccagttcgttgtgc

SEQ ID NO: 3790146 - DNA, 25 bp, Homo sapien
ggaagtagagaccatgatccccact

SEQ ID NO: 3790147 - DNA, 25 bp, Homo sapien
ggctaaggcagcgaaacctcaagtt

SEQ ID NO: 3790148 - DNA, 25 bp, Homo sapien
tctccccatacaagcaggtcacagg

SEQ ID NO: 3790149 - DNA, 25 bp, Homo sapien
acggttcagacacaacacaggacag

SEQ ID NO: 3790150 - DNA, 25 bp, Homo sapien
tgaccccagggcatggtcattggca

SEQ ID NO: 3790151 - DNA, 25 bp, Homo sapien
aggccacgcaatgtgtgcctcccag

SEQ ID NO: 3790152 - DNA, 25 bp, Homo sapien
accccagggcatggtcattggcacc

SEQ ID NO: 3790153 - DNA, 25 bp, Homo sapien
gggtgcaaggcaggccacgcaatgt

SEQ ID NO: 3790154 - DNA, 25 bp, Homo sapien
ccttggtggcacataaagaggtgat

SEQ ID NO: 3790155 - DNA, 25 bp, Homo sapien
caagggtgttgacaaggcagacccc

SEQ ID NO: 3790156 - DNA, 25 bp, Homo sapien
gaggagccgggcgtacacagcgctg

SEQ ID NO: 3790157 - DNA, 25 bp, Homo sapien
ttgacaaggcagaccccacacatgt

SEQ ID NO: 3790158 - DNA, 25 bp, Homo sapien
tgcatgatctggtgggagttgcccc

SEQ ID NO: 3790159 - DNA, 25 bp, Homo sapien
cgacaacacagtgtagcccaccagg

SEQ ID NO: 3790160 - DNA, 25 bp, Homo sapien
ccagtagtcaaagcggccaggtccc

SEQ ID NO: 3790161 - DNA, 25 bp, Homo sapien
gggcagacgggctacatttaccagt

SEQ ID NO: 3790162 - DNA, 25 bp, Homo sapien
tgaactctcagagcaagacgtgacc

SEQ ID NO: 3790163 - DNA, 25 bp, Homo sapien
ctctgcctggccgtgtctaataaaa

SEQ ID NO: 3790164 - DNA, 25 bp, Homo sapien
ggtttccttccagctgacacagtaa

SEQ ID NO: 3790165 - DNA, 25 bp, Homo sapien
tccacagggaagaacgggtgaacag

SEQ ID NO: 3790166 - DNA, 25 bp, Homo sapien
cgaggactgtctgctcacggcaggc

SEQ ID NO: 3790167 - DNA, 25 bp, Homo sapien
ctcagaacagtgccctgaaccgccc

SEQ ID NO: 3790168 - DNA, 25 bp, Homo sapien
tgcacgaggactgtctgctcacggc

SEQ ID NO: 3790169 - DNA, 25 bp, Homo sapien
ctgtgcacgaggactgtctgctcac

SEQ ID NO: 3790170 - DNA, 25 bp, Homo sapien
ctctcggaagtcaggcagagaagga

SEQ ID NO: 3790171 - DNA, 25 bp, Homo sapien
tgcaggctctcggaagtcaggcaga

SEQ ID NO: 3790172 - DNA, 25 bp, Homo sapien
accttgcaggctctcggaagtcagg

SEQ ID NO: 3790173 - DNA, 25 bp, Homo sapien
ggctgcggggaaggcccaggcgccc

SEQ ID NO: 3790174 - DNA, 25 bp, Homo sapien
aggccaggaggcagaaggggcagcc

SEQ ID NO: 3790175 - DNA, 25 bp, Homo sapien
ccccaggccaggaggcagaaggggc

SEQ ID NO: 3790176 - DNA, 25 bp, Homo sapien
ctttccccaggccaggaggcagaag

SEQ ID NO: 3790177 - DNA, 25 bp, Homo sapien
cccaggccaggaggcagaaggggca

SEQ ID NO: 3790178 - DNA, 25 bp, Homo sapien
acttgatgagactccctgcccggaa

SEQ ID NO: 3790179 - DNA, 25 bp, Homo sapien
atgagactccctgcccggaagacag

SEQ ID NO: 3790180 - DNA, 25 bp, Homo sapien
tccctgcccggaagacagcaagggc

SEQ ID NO: 3790181 - DNA, 25 bp, Homo sapien
tgcccggaagacagcaagggccctg

SEQ ID NO: 3790182 - DNA, 25 bp, Homo sapien
ccctgaagtaaagactcttccatga

SEQ ID NO: 3790183 - DNA, 25 bp, Homo sapien
ctgaagtaaagactcttccatgaca

SEQ ID NO: 3790184 - DNA, 25 bp, Homo sapien
caggtccctgaagtaaagactcttc

SEQ ID NO: 3790185 - DNA, 25 bp, Homo sapien
cccaggtccctgaagtaaagactct

SEQ ID NO: 3790186 - DNA, 25 bp, Homo sapien
accagctttaccagatctgtagcca

SEQ ID NO: 3790187 - DNA, 25 bp, Homo sapien
caaaggggcccaaatctggatgcca

SEQ ID NO: 3790188 - DNA, 25 bp, Homo sapien
ctagggcagtggaggctagagggcc

SEQ ID NO: 3790189 - DNA, 25 bp, Homo sapien
ggagaagtgagatgttgagcccggg

SEQ ID NO: 3790190 - DNA, 25 bp, Homo sapien
tgctcccaggccactgtgggggcca

SEQ ID NO: 3790191 - DNA, 25 bp, Homo sapien
ctgctcccaggccactgtgggggcc

SEQ ID NO: 3790192 - DNA, 25 bp, Homo sapien
ctcccaggccactgtgggggccata

SEQ ID NO: 3790193 - DNA, 25 bp, Homo sapien
cccaggccactgtgggggccataga

SEQ ID NO: 3790194 - DNA, 25 bp, Homo sapien
ttctgtggcttcacgcccccatcat

SEQ ID NO: 3790195 - DNA, 25 bp, Homo sapien
tctgtggcttcacgcccccatcata

SEQ ID NO: 3790196 - DNA, 25 bp, Homo sapien
gcttctgtggcttcacgcccccatc

SEQ ID NO: 3790197 - DNA, 25 bp, Homo sapien
tgtggcttcacgcccccatcatagc

SEQ ID NO: 3790198 - DNA, 25 bp, Homo sapien
tcccagcccatgcctgaccacgaat

SEQ ID NO: 3790199 - DNA, 25 bp, Homo sapien
cccagcccatgcctgaccacgaatc

SEQ ID NO: 3790200 - DNA, 25 bp, Homo sapien
ttcccagcccatgcctgaccacgaa

SEQ ID NO: 3790201 - DNA, 25 bp, Homo sapien
aatctctccaatcctgcctcttccg

SEQ ID NO: 3790202 - DNA, 25 bp, Homo sapien
ccattcttagtggaagggctcgtgg

SEQ ID NO: 3790203 - DNA, 25 bp, Homo sapien
ccccttggactaagccagacaccag

SEQ ID NO: 3790204 - DNA, 25 bp, Homo sapien
gcaaacctgagaggctctctgcgcc

SEQ ID NO: 3790205 - DNA, 25 bp, Homo sapien
ggctgggcgagcctcacctaggttt

SEQ ID NO: 3790206 - DNA, 25 bp, Homo sapien
ctgggcgagcctcacctaggttttg

SEQ ID NO: 3790207 - DNA, 25 bp, Homo sapien
atcccagggatacccctagaatcct

SEQ ID NO: 3790208 - DNA, 25 bp, Homo sapien
cagggatacccctagaatcctggct

SEQ ID NO: 3790209 - DNA, 25 bp, Homo sapien
tgcagcacctgcgaaggtcctgaac

SEQ ID NO: 3790210 - DNA, 25 bp, Homo sapien
gcagcacctgcgaaggtcctgaacc

SEQ ID NO: 3790211 - DNA, 25 bp, Homo sapien
ctgcagcacctgcgaaggtcctgaa

SEQ ID NO: 3790212 - DNA, 25 bp, Homo sapien
cttctggggcttctcagcccctcca

SEQ ID NO: 3790213 - DNA, 25 bp, Homo sapien
tggcttctggggcttctcagcccct

SEQ ID NO: 3790214 - DNA, 25 bp, Homo sapien
tggggcttctcagcccctccaaagc

SEQ ID NO: 3790215 - DNA, 25 bp, Homo sapien
tctggggcttctcagcccctccaaa

SEQ ID NO: 3790216 - DNA, 25 bp, Homo sapien
ggctccggccactgggaaggccgct

SEQ ID NO: 3790217 - DNA, 25 bp, Homo sapien
gggctccggccactgggaaggccgc

SEQ ID NO: 3790218 - DNA, 25 bp, Homo sapien
gctccggccactgggaaggccgctg

SEQ ID NO: 3790219 - DNA, 25 bp, Homo sapien
gacagagtggctgagccctgccctc

SEQ ID NO: 3790220 - DNA, 25 bp, Homo sapien
tcctggtgccctgactctgctctgc

SEQ ID NO: 3790221 - DNA, 25 bp, Homo sapien
ctgggaagggacagagtggctgagc

SEQ ID NO: 3790222 - DNA, 25 bp, Homo sapien
gctcctggtgccctgactctgctct

SEQ ID NO: 3790223 - DNA, 25 bp, Homo sapien
gcttcggaggtttcacgcccactcc

SEQ ID NO: 3790224 - DNA, 25 bp, Homo sapien
tcggaggtttcacgcccactcccag

SEQ ID NO: 3790225 - DNA, 25 bp, Homo sapien
tggcttcggaggtttcacgcccact

SEQ ID NO: 3790226 - DNA, 25 bp, Homo sapien
ctggcttcggaggtttcacgcccac

SEQ ID NO: 3790227 - DNA, 25 bp, Homo sapien
gttcctgcccctggaagagtgccag

SEQ ID NO: 3790228 - DNA, 25 bp, Homo sapien
agtgccagcgcccaaaccacttctg

SEQ ID NO: 3790229 - DNA, 25 bp, Homo sapien
ggttcctgcccctggaagagtgcca

SEQ ID NO: 3790230 - DNA, 25 bp, Homo sapien
gctcctcccctaagaatgagggttg

SEQ ID NO: 3790231 - DNA, 25 bp, Homo sapien
aagagctcctcccctaagaatgagg

SEQ ID NO: 3790232 - DNA, 25 bp, Homo sapien
ctcctcccctaagaatgagggttgg

SEQ ID NO: 3790233 - DNA, 25 bp, Homo sapien
gagctcctcccctaagaatgagggt

SEQ ID NO: 3790234 - DNA, 25 bp, Homo sapien
tccacaccctgacagttcactaagg

SEQ ID NO: 3790235 - DNA, 25 bp, Homo sapien
cacccacaggaatggcattggcagg

SEQ ID NO: 3790236 - DNA, 25 bp, Homo sapien
cctaggccatgtggagtgcgggtcc

SEQ ID NO: 3790237 - DNA, 25 bp, Homo sapien
tcactaagggcgcatgcccaggaag

SEQ ID NO: 3790238 - DNA, 25 bp, Homo sapien
gccccagctcccatcccattcccat

SEQ ID NO: 3790239 - DNA, 25 bp, Homo sapien
ctaggaaggccccagctcccatccc

SEQ ID NO: 3790240 - DNA, 25 bp, Homo sapien
tcccatcccattcccatcaccagat

SEQ ID NO: 3790241 - DNA, 25 bp, Homo sapien
agctcccatcccattcccatcacca

SEQ ID NO: 3790242 - DNA, 25 bp, Homo sapien
gagagcaggggctcacggaccccac

SEQ ID NO: 3790243 - DNA, 25 bp, Homo sapien
gagggtgggacaaggccatagatgc

SEQ ID NO: 3790244 - DNA, 25 bp, Homo sapien
tgtgtcttctagaatcccagtgtgg

SEQ ID NO: 3790245 - DNA, 25 bp, Homo sapien
cttctggacctctgatatcccctgg

SEQ ID NO: 3790246 - DNA, 25 bp, Homo sapien
ccttgaccagcttgggtgtcctcca

SEQ ID NO: 3790247 - DNA, 25 bp, Homo sapien
ccatggccagccgaggcctggcttg

SEQ ID NO: 3790248 - DNA, 25 bp, Homo sapien
agagcccatctgttgggacccagag

SEQ ID NO: 3790249 - DNA, 25 bp, Homo sapien
tgactgcagtcaaagttggatttgg

SEQ ID NO: 3790250 - DNA, 25 bp, Homo sapien
ccaaagccattttgagcggcaggac

SEQ ID NO: 3790251 - DNA, 25 bp, Homo sapien
agagggtgagggatcctttcctctg

SEQ ID NO: 3790252 - DNA, 25 bp, Homo sapien
tcagtttctcagagggttgggccac

SEQ ID NO: 3790253 - DNA, 25 bp, Homo sapien
ggttggctcagaacaggcatggtcc

SEQ ID NO: 3790254 - DNA, 25 bp, Homo sapien
ggagcctgtaccttctttgttcaaa

SEQ ID NO: 3790255 - DNA, 25 bp, Homo sapien
ggtctgagatcttgctggagcctgt

SEQ ID NO: 3790256 - DNA, 25 bp, Homo sapien
gtctatagccattttgagtggtggg

SEQ ID NO: 3790257 - DNA, 25 bp, Homo sapien
ctatagccattttgagtggtggggc

SEQ ID NO: 3790258 - DNA, 25 bp, Homo sapien
ggtctatagccattttgagtggtgg

SEQ ID NO: 3790259 - DNA, 25 bp, Homo sapien
ctggtctatagccattttgagtggt

SEQ ID NO: 3790260 - DNA, 25 bp, Homo sapien
tctggggtttgacggcccccacata

SEQ ID NO: 3790261 - DNA, 25 bp, Homo sapien
tggggtttgacggcccccacatagc

SEQ ID NO: 3790262 - DNA, 25 bp, Homo sapien
ctggggtttgacggcccccacatag

SEQ ID NO: 3790263 - DNA, 25 bp, Homo sapien
tgggctcccagcccaattctgtact

SEQ ID NO: 3790264 - DNA, 25 bp, Homo sapien
ggctcccagcccaattctgtactgg

SEQ ID NO: 3790265 - DNA, 25 bp, Homo sapien
ctcccagcccaattctgtactggaa

SEQ ID NO: 3790266 - DNA, 25 bp, Homo sapien
cccagcccaattctgtactggaatc

SEQ ID NO: 3790267 - DNA, 25 bp, Homo sapien
ctgctccagggccattctgaggtgg

SEQ ID NO: 3790268 - DNA, 25 bp, Homo sapien
ccagggccattctgaggtggggggc

SEQ ID NO: 3790269 - DNA, 25 bp, Homo sapien
tccagggccattctgaggtgggggg

SEQ ID NO: 3790270 - DNA, 25 bp, Homo sapien
gctccagggccattctgaggtgggg

SEQ ID NO: 3790271 - DNA, 25 bp, Homo sapien
tgtgccttcatgtcccctctaaagc

SEQ ID NO: 3790272 - DNA, 25 bp, Homo sapien
gggagacagaagcccgggagagcca

SEQ ID NO: 3790273 - DNA, 25 bp, Homo sapien
ggagacagaagcccgggagagccag

SEQ ID NO: 3790274 - DNA, 25 bp, Homo sapien
ctcagcccattcccattccctaatc

SEQ ID NO: 3790275 - DNA, 25 bp, Homo sapien
gctgagcactcagcccattcccatt

SEQ ID NO: 3790276 - DNA, 25 bp, Homo sapien
actcagcccattcccattccctaat

SEQ ID NO: 3790277 - DNA, 25 bp, Homo sapien
ctggctgagcactcagcccattccc

SEQ ID NO: 3790278 - DNA, 25 bp, Homo sapien
ccaaatcggttctgggctgtcaaga

SEQ ID NO: 3790279 - DNA, 25 bp, Homo sapien
ccaaatccaaatcggttctgggctg

SEQ ID NO: 3790280 - DNA, 25 bp, Homo sapien
ctgctccaaatccaaatcggttctg

SEQ ID NO: 3790281 - DNA, 25 bp, Homo sapien
aatccaaatcggttctgggctgtca

SEQ ID NO: 3790282 - DNA, 25 bp, Homo sapien
ctggcttcagaggcttcacattccc

SEQ ID NO: 3790283 - DNA, 25 bp, Homo sapien
tcagaggcttcacattccctccaag

SEQ ID NO: 3790284 - DNA, 25 bp, Homo sapien
ggcttcagaggcttcacattccctc

SEQ ID NO: 3790285 - DNA, 25 bp, Homo sapien
cttcagaggcttcacattccctcca

SEQ ID NO: 3790286 - DNA, 25 bp, Homo sapien
gctggactcccggtccatttccatg

SEQ ID NO: 3790287 - DNA, 25 bp, Homo sapien
ggctggactcccggtccatttccat

SEQ ID NO: 3790288 - DNA, 25 bp, Homo sapien
tctgaggcttcatccccgctcctag

SEQ ID NO: 3790289 - DNA, 25 bp, Homo sapien
gcatctgaggcttcatccccgctcc

SEQ ID NO: 3790290 - DNA, 25 bp, Homo sapien
ggcatctgaggcttcatccccgctc

SEQ ID NO: 3790291 - DNA, 25 bp, Homo sapien
atctgaggcttcatccccgctccta

SEQ ID NO: 3790292 - DNA, 25 bp, Homo sapien
tggcttctgggccttcataaccccc

SEQ ID NO: 3790293 - DNA, 25 bp, Homo sapien
tctgggccttcataacccccaaata

SEQ ID NO: 3790294 - DNA, 25 bp, Homo sapien
tgggccttcataacccccaaatagc

SEQ ID NO: 3790295 - DNA, 25 bp, Homo sapien
gcttctgggccttcataacccccaa

SEQ ID NO: 3790296 - DNA, 25 bp, Homo sapien
ctgtagccattctgggctaaggggc

SEQ ID NO: 3790297 - DNA, 25 bp, Homo sapien
tctgtagccattctgggctaagggg

SEQ ID NO: 3790298 - DNA, 25 bp, Homo sapien
tggcttctgaggtttcatgccctct

SEQ ID NO: 3790299 - DNA, 25 bp, Homo sapien
ctggcttctgaggtttcatgccctc

SEQ ID NO: 3790300 - DNA, 25 bp, Homo sapien
gcttctgaggtttcatgccctctcc

SEQ ID NO: 3790301 - DNA, 25 bp, Homo sapien
ttctgaggtttcatgccctctccag

SEQ ID NO: 3790302 - DNA, 25 bp, Homo sapien
cgttcttgcaccatggggagacagg

SEQ ID NO: 3790303 - DNA, 25 bp, Homo sapien
ccgttcttgcaccatggggagacag

SEQ ID NO: 3790304 - DNA, 25 bp, Homo sapien
gttcttgcaccatggggagacaggg

SEQ ID NO: 3790305 - DNA, 25 bp, Homo sapien
ccccagccaggtccctggtgtgtat

SEQ ID NO: 3790306 - DNA, 25 bp, Homo sapien
gagccccagccaggtccctggtgtg

SEQ ID NO: 3790307 - DNA, 25 bp, Homo sapien
ctggcaggagccccagccaggtccc

SEQ ID NO: 3790308 - DNA, 25 bp, Homo sapien
tggcaggagccccagccaggtccct

SEQ ID NO: 3790309 - DNA, 25 bp, Homo sapien
tgaggcttcaaggtccctcgcaggc

SEQ ID NO: 3790310 - DNA, 25 bp, Homo sapien
acttctgaggcttcaaggtccctcg

SEQ ID NO: 3790311 - DNA, 25 bp, Homo sapien
tgacttctgaggcttcaaggtccct

SEQ ID NO: 3790312 - DNA, 25 bp, Homo sapien
tctgaggcttcaaggtccctcgcag

SEQ ID NO: 3790313 - DNA, 25 bp, Homo sapien
cagggcccattttcatggccgtgtc

SEQ ID NO: 3790314 - DNA, 25 bp, Homo sapien
tggtaacttgccattctgcactgcg

SEQ ID NO: 3790315 - DNA, 25 bp, Homo sapien
cggagcgaccctcgcattgcaggga

SEQ ID NO: 3790316 - DNA, 25 bp, Homo sapien
cttgccattctgcactgcggaaggg

SEQ ID NO: 3790317 - DNA, 25 bp, Homo sapien
gaggagcatcggagcgaccctcgca

SEQ ID NO: 3790318 - DNA, 25 bp, Homo sapien
gtttcagtccccactggatggctgg

SEQ ID NO: 3790319 - DNA, 25 bp, Homo sapien
tttctgaggtttcagtccccactgg

SEQ ID NO: 3790320 - DNA, 25 bp, Homo sapien
tttcagtccccactggatggctggc

SEQ ID NO: 3790321 - DNA, 25 bp, Homo sapien
tgaggtttcagtccccactggatgg

SEQ ID NO: 3790322 - DNA, 25 bp, Homo sapien
cctggccttcgggtgcctgaatagc

SEQ ID NO: 3790323 - DNA, 25 bp, Homo sapien
cagaggatagacctagctgagagtt

SEQ ID NO: 3790324 - DNA, 25 bp, Homo sapien
gaatagcttaggcagcctagggaaa

SEQ ID NO: 3790325 - DNA, 25 bp, Homo sapien
ggagacagaggatagacctagctga

SEQ ID NO: 3790326 - DNA, 25 bp, Homo sapien
ctccttggaggccaaagatcgacct

SEQ ID NO: 3790327 - DNA, 25 bp, Homo sapien
ccttggaggccaaagatcgacctta

SEQ ID NO: 3790328 - DNA, 25 bp, Homo sapien
gaggccaaagatcgaccttagggac

SEQ ID NO: 3790329 - DNA, 25 bp, Homo sapien
ccaaagatcgaccttagggactctg

SEQ ID NO: 3790330 - DNA, 25 bp, Homo sapien
gttctgctcccggtccatagccatt

SEQ ID NO: 3790331 - DNA, 25 bp, Homo sapien
tcccggtccatagccatttggaggc

SEQ ID NO: 3790332 - DNA, 25 bp, Homo sapien
tctgctcccggtccatagccatttg

SEQ ID NO: 3790333 - DNA, 25 bp, Homo sapien
tgctcccggtccatagccatttgga

SEQ ID NO: 3790334 - DNA, 25 bp, Homo sapien
tgtggctcgaggccaccattaaaac

SEQ ID NO: 3790335 - DNA, 25 bp, Homo sapien
agggggatgcggacagacagactga

SEQ ID NO: 3790336 - DNA, 25 bp, Homo sapien
tgccagcttccgctcaacatgggtc

SEQ ID NO: 3790337 - DNA, 25 bp, Homo sapien
gaccagctcatagacagggggatgc

SEQ ID NO: 3790338 - DNA, 25 bp, Homo sapien
cagcttccgctcaacatgggtcggg

SEQ ID NO: 3790339 - DNA, 25 bp, Homo sapien
ggctcccaggacaccattcccataa

SEQ ID NO: 3790340 - DNA, 25 bp, Homo sapien
tgggcctcggggaagaccctggctc

SEQ ID NO: 3790341 - DNA, 25 bp, Homo sapien
caggacaccattcccataacctaaa

SEQ ID NO: 3790342 - DNA, 25 bp, Homo sapien
ctggctgtgggtgggcctcggggaa

SEQ ID NO: 3790343 - DNA, 25 bp, Homo sapien
attcctaaaaccattggccccatgg

SEQ ID NO: 3790344 - DNA, 25 bp, Homo sapien
ttcctaaaaccattggccccatgga

SEQ ID NO: 3790345 - DNA, 25 bp, Homo sapien
tattcctaaaaccattggccccatg

SEQ ID NO: 3790346 - DNA, 25 bp, Homo sapien
tcctaaaaccattggccccatggaa

SEQ ID NO: 3790347 - DNA, 25 bp, Homo sapien
gctttggggtacaccagagcttcca

SEQ ID NO: 3790348 - DNA, 25 bp, Homo sapien
ggggtacaccagagcttccacccca

SEQ ID NO: 3790349 - DNA, 25 bp, Homo sapien
ctttggggtacaccagagcttccac

SEQ ID NO: 3790350 - DNA, 25 bp, Homo sapien
ttggggtacaccagagcttccaccc

SEQ ID NO: 3790351 - DNA, 25 bp, Homo sapien
cagcatattcatctccagcctgata

SEQ ID NO: 3790352 - DNA, 25 bp, Homo sapien
gtgggccagcgagagttccacagca

SEQ ID NO: 3790353 - DNA, 25 bp, Homo sapien
ctgatatccaggcttcaagccggcc

SEQ ID NO: 3790354 - DNA, 25 bp, Homo sapien
ggctcctggcctcagcatattcatc

SEQ ID NO: 3790355 - DNA, 25 bp, Homo sapien
agggcccagggctcagctctgcctc

SEQ ID NO: 3790356 - DNA, 25 bp, Homo sapien
cggagggcccagggctcagctctgc

SEQ ID NO: 3790357 - DNA, 25 bp, Homo sapien
ggcccagggctcagctctgcctcag

SEQ ID NO: 3790358 - DNA, 25 bp, Homo sapien
ccagggctcagctctgcctcagttt

SEQ ID NO: 3790359 - DNA, 25 bp, Homo sapien
ttgctgcctctcttcacgtcggggc

SEQ ID NO: 3790360 - DNA, 25 bp, Homo sapien
ggccattgctgcctctcttcacgtc

SEQ ID NO: 3790361 - DNA, 25 bp, Homo sapien
cattgctgcctctcttcacgtcggg

SEQ ID NO: 3790362 - DNA, 25 bp, Homo sapien
gccattgctgcctctcttcacgtcg

SEQ ID NO: 3790363 - DNA, 25 bp, Homo sapien
caagcagggaagcacgtttgtggtt

SEQ ID NO: 3790364 - DNA, 25 bp, Homo sapien
tgtggttctagcatggaggagaccc

SEQ ID NO: 3790365 - DNA, 25 bp, Homo sapien
ttttccatgcacaaggcccctaact

SEQ ID NO: 3790366 - DNA, 25 bp, Homo sapien
taggcggtcaccaagtgatgccctc

SEQ ID NO: 3790367 - DNA, 25 bp, Homo sapien
gccagggcgagagcggagggcgtcg

SEQ ID NO: 3790368 - DNA, 25 bp, Homo sapien
gggcaacggcgggtgcggcagggac

SEQ ID NO: 3790369 - DNA, 25 bp, Homo sapien
gcgggcccggcccaatcgcgagtgg

SEQ ID NO: 3790370 - DNA, 25 bp, Homo sapien
ccaatcgcgagtgggcgcgggcgcg

SEQ ID NO: 3790371 - DNA, 25 bp, Homo sapien
agcagccatgggtcgcgggtctcgg

SEQ ID NO: 3790372 - DNA, 25 bp, Homo sapien
tggcaggggaaaggcggacagcagc

SEQ ID NO: 3790373 - DNA, 25 bp, Homo sapien
cgacaggaagaaatgcggggacagg

SEQ ID NO: 3790374 - DNA, 25 bp, Homo sapien
aagggagagggtcgcgcgggcagcg

SEQ ID NO: 3790375 - DNA, 25 bp, Homo sapien
ttattaagttgtagaggctgcacag

SEQ ID NO: 3790376 - DNA, 25 bp, Homo sapien
gtggggtgcaggcaaagctggagag

SEQ ID NO: 3790377 - DNA, 25 bp, Homo sapien
ctttattaagttgtagaggctgcac

SEQ ID NO: 3790378 - DNA, 25 bp, Homo sapien
gaactttattaagttgtagaggctg

SEQ ID NO: 3790379 - DNA, 25 bp, Homo sapien
cacattacgttctgggaagacggct

SEQ ID NO: 3790380 - DNA, 25 bp, Homo sapien
caggaactcctgtgatgcggccaca

SEQ ID NO: 3790381 - DNA, 25 bp, Homo sapien
tatcctaggtttcaggcgggtccta

SEQ ID NO: 3790382 - DNA, 25 bp, Homo sapien
taaatttgctactgcggtcaggccg

SEQ ID NO: 3790383 - DNA, 25 bp, Homo sapien
ctgcaggcggggttttaaggcccag

SEQ ID NO: 3790384 - DNA, 25 bp, Homo sapien
aaaagcgtccgtagcatctgtgcat

SEQ ID NO: 3790385 - DNA, 25 bp, Homo sapien
gggaggaaaagcgtccgtagcatct

SEQ ID NO: 3790386 - DNA, 25 bp, Homo sapien
ggaaaagcgtccgtagcatctgtgc

SEQ ID NO: 3790387 - DNA, 25 bp, Homo sapien
cgcaggttcccactgagcgactctg

SEQ ID NO: 3790388 - DNA, 25 bp, Homo sapien
ctgggctgagctcgcacaggccctc

SEQ ID NO: 3790389 - DNA, 25 bp, Homo sapien
ctcctgccggctggcgcaggttccc

SEQ ID NO: 3790390 - DNA, 25 bp, Homo sapien
tcccactgagcgactctgacagtgc

SEQ ID NO: 3790391 - DNA, 25 bp, Homo sapien
tccgtgcctcttgcaggtgtttctg

SEQ ID NO: 3790392 - DNA, 25 bp, Homo sapien
cccaggcggcctaggtgactcagag

SEQ ID NO: 3790393 - DNA, 25 bp, Homo sapien
tggcccctcggttaggtcttctcag

SEQ ID NO: 3790394 - DNA, 25 bp, Homo sapien
tcgtagtcccgctcggctgagtggt

SEQ ID NO: 3790395 - DNA, 25 bp, Homo sapien
tcttgtccagtccagatgcacccga

SEQ ID NO: 3790396 - DNA, 25 bp, Homo sapien
ccgcggtgagcacgatacgggcctt

SEQ ID NO: 3790397 - DNA, 25 bp, Homo sapien
cacacgtggtacactgggcacctgt

SEQ ID NO: 3790398 - DNA, 25 bp, Homo sapien
gatacgggccttggcaccttcgtcc

SEQ ID NO: 3790399 - DNA, 25 bp, Homo sapien
gtgtcctgggcaacggaaggaaaca

SEQ ID NO: 3790400 - DNA, 25 bp, Homo sapien
tgcagccaggtgtagcttgggcttt

SEQ ID NO: 3790401 - DNA, 25 bp, Homo sapien
tcatcaggccaaggtcgaaagggcg

SEQ ID NO: 3790402 - DNA, 25 bp, Homo sapien
tttggagccaacgagctgctgctgt

SEQ ID NO: 3790403 - DNA, 25 bp, Homo sapien
gccggcagggacccacggccgccgc

SEQ ID NO: 3790404 - DNA, 25 bp, Homo sapien
ctgcgcccgccgctgtctgcgcccg

SEQ ID NO: 3790405 - DNA, 25 bp, Homo sapien
agtgcacgtcctgcgcccgccgctg

SEQ ID NO: 3790406 - DNA, 25 bp, Homo sapien
cgccgccggccggcagggacccacg

SEQ ID NO: 3790407 - DNA, 25 bp, Homo sapien
accggcgcagcgagccccgagccat

SEQ ID NO: 3790408 - DNA, 25 bp, Homo sapien
acggagcgcagcaacgccagccaga

SEQ ID NO: 3790409 - DNA, 25 bp, Homo sapien
acgaggagccgcagcaaccggcgca

SEQ ID NO: 3790410 - DNA, 25 bp, Homo sapien
cagcacgaggagccgcagcaaccgg

SEQ ID NO: 3790411 - DNA, 25 bp, Homo sapien
tctctctccattcgaagtacttcgg

SEQ ID NO: 3790412 - DNA, 25 bp, Homo sapien
tcggacttgtggaactgaagacccc

SEQ ID NO: 3790413 - DNA, 25 bp, Homo sapien
ctgaggcccggattgtgaatgaagc

SEQ ID NO: 3790414 - DNA, 25 bp, Homo sapien
ggagcgagctgtttgaaggccacct

SEQ ID NO: 3790415 - DNA, 25 bp, Homo sapien
tcggccggctcgaataacgtgagtc

SEQ ID NO: 3790416 - DNA, 25 bp, Homo sapien
tagttagaccctgtacggaccaggc

SEQ ID NO: 3790417 - DNA, 25 bp, Homo sapien
tagctgggcactgaagtcaccggat

SEQ ID NO: 3790418 - DNA, 25 bp, Homo sapien
ggcgtgccccttcctagactaaaca

SEQ ID NO: 3790419 - DNA, 25 bp, Homo sapien
ctggggagggggcctcgggtcagag

SEQ ID NO: 3790420 - DNA, 25 bp, Homo sapien
cccaggcagaagtcgctgtgcggtc

SEQ ID NO: 3790421 - DNA, 25 bp, Homo sapien
acttgtccaggtccgcgctccagga

SEQ ID NO: 3790422 - DNA, 25 bp, Homo sapien
gcaagacgcgcagtccatgcacttg

SEQ ID NO: 3790423 - DNA, 25 bp, Homo sapien
ggtcgcgccctgcaagacgcgcagt

SEQ ID NO: 3790424 - DNA, 25 bp, Homo sapien
tcgtctccagaccaaaaagccagaa

SEQ ID NO: 3790425 - DNA, 25 bp, Homo sapien
agcacgaaggtcaggctcagagcgc

SEQ ID NO: 3790426 - DNA, 25 bp, Homo sapien
tctctcctgcggcatcgtctccaga

SEQ ID NO: 3790427 - DNA, 25 bp, Homo sapien
cagcacgaaggtcaggctcagagcg

SEQ ID NO: 3790428 - DNA, 25 bp, Homo sapien
actggatcagcgccacagctgggca

SEQ ID NO: 3790429 - DNA, 25 bp, Homo sapien
ctggatcagcgccacagctgggcag

SEQ ID NO: 3790430 - DNA, 25 bp, Homo sapien
ccctctccgccggtctcctctatgg

SEQ ID NO: 3790431 - DNA, 25 bp, Homo sapien
tcactggatcagcgccacagctggg

SEQ ID NO: 3790432 - DNA, 25 bp, Homo sapien
ttagggccagccctcctagtgggcc

SEQ ID NO: 3790433 - DNA, 25 bp, Homo sapien
gcagagactggctctagaatggatg

SEQ ID NO: 3790434 - DNA, 25 bp, Homo sapien
aatgaatgatgagtgggcgagcccc

SEQ ID NO: 3790435 - DNA, 25 bp, Homo sapien
caaatgctgcagttccttagtcagt

SEQ ID NO: 3790436 - DNA, 25 bp, Homo sapien
tcttccgcgcccgcgcagaacctcg

SEQ ID NO: 3790437 - DNA, 25 bp, Homo sapien
tccgcgcccgcgcagaacctcgcgg

SEQ ID NO: 3790438 - DNA, 25 bp, Homo sapien
gccacgcgccgcccgtcttccgcgc

SEQ ID NO: 3790439 - DNA, 25 bp, Homo sapien
acgcgccgcccgtcttccgcgcccg

SEQ ID NO: 3790440 - DNA, 25 bp, Homo sapien
cgaagacccccgacattaagaagtg

SEQ ID NO: 3790441 - DNA, 25 bp, Homo sapien
ttaagaagtggtgtccaccgcagcc

SEQ ID NO: 3790442 - DNA, 25 bp, Homo sapien
ccccgacattaagaagtggtgtcca

SEQ ID NO: 3790443 - DNA, 25 bp, Homo sapien
taggagccgaggtgagcgccgcgaa

SEQ ID NO: 3790444 - DNA, 25 bp, Homo sapien
gacgcaacctcacgaggccttacgt

SEQ ID NO: 3790445 - DNA, 25 bp, Homo sapien
ctagagcggttcctctccgtggcgc

SEQ ID NO: 3790446 - DNA, 25 bp, Homo sapien
ctaccgccttcggcgcgaaggtggc

SEQ ID NO: 3790447 - DNA, 25 bp, Homo sapien
gtggctggtgcgtaccgtcccgaac

SEQ ID NO: 3790448 - DNA, 25 bp, Homo sapien
cccagaggcaccgcgagcggcacag

SEQ ID NO: 3790449 - DNA, 25 bp, Homo sapien
ctgacccagaggcaccgcgagcggc

SEQ ID NO: 3790450 - DNA, 25 bp, Homo sapien
tgacccagaggcaccgcgagcggca

SEQ ID NO: 3790451 - DNA, 25 bp, Homo sapien
agaggcaccgcgagcggcacagctc

SEQ ID NO: 3790452 - DNA, 25 bp, Homo sapien
atggagccgctgcaaggcctggaac

SEQ ID NO: 3790453 - DNA, 25 bp, Homo sapien
tggagccgctgcaaggcctggaaca

SEQ ID NO: 3790454 - DNA, 25 bp, Homo sapien
agccgctgcaaggcctggaacacct

SEQ ID NO: 3790455 - DNA, 25 bp, Homo sapien
ggagccgctgcaaggcctggaacac

SEQ ID NO: 3790456 - DNA, 25 bp, Homo sapien
caatctgcccgtaattgttgccagc

SEQ ID NO: 3790457 - DNA, 25 bp, Homo sapien
taattgttgccagccgccagaaact

SEQ ID NO: 3790458 - DNA, 25 bp, Homo sapien
ctgaagatggcaatctgcccgtaat

SEQ ID NO: 3790459 - DNA, 25 bp, Homo sapien
cagaaacttcccacatggtgagacg

SEQ ID NO: 3790460 - DNA, 25 bp, Homo sapien
acgggggcatccgtcccatgagggc

SEQ ID NO: 3790461 - DNA, 25 bp, Homo sapien
gccagggctaatgggtggacagcgg

SEQ ID NO: 3790462 - DNA, 25 bp, Homo sapien
gcatccgtcccatgagggccaagtg

SEQ ID NO: 3790463 - DNA, 25 bp, Homo sapien
agggccaagtgccagggctaatggg

SEQ ID NO: 3790464 - DNA, 25 bp, Homo sapien
ttctgagctcaaagcagaggacaag

SEQ ID NO: 3790465 - DNA, 25 bp, Homo sapien
ggcttctgagctcaaagcagaggac

SEQ ID NO: 3790466 - DNA, 25 bp, Homo sapien
tctttggcttctgagctcaaagcag

SEQ ID NO: 3790467 - DNA, 25 bp, Homo sapien
tcctctttggcttctgagctcaaag

SEQ ID NO: 3790468 - DNA, 25 bp, Homo sapien
tggaaagtcaccaccggcttcttac

SEQ ID NO: 3790469 - DNA, 25 bp, Homo sapien
cttggaaagtcaccaccggcttctt

SEQ ID NO: 3790470 - DNA, 25 bp, Homo sapien
ttggaaagtcaccaccggcttctta

SEQ ID NO: 3790471 - DNA, 25 bp, Homo sapien
tgagtgagccaatcccacccaaagt

SEQ ID NO: 3790472 - DNA, 25 bp, Homo sapien
gagtgagccaatcccacccaaagtc

SEQ ID NO: 3790473 - DNA, 25 bp, Homo sapien
ctgagtgagccaatcccacccaaag

SEQ ID NO: 3790474 - DNA, 25 bp, Homo sapien
gtgagccaatcccacccaaagtcct

SEQ ID NO: 3790475 - DNA, 25 bp, Homo sapien
gaaaccatgctatagacgggcccat

SEQ ID NO: 3790476 - DNA, 25 bp, Homo sapien
ttcttgagcatctccgcccaaagcc

SEQ ID NO: 3790477 - DNA, 25 bp, Homo sapien
catccccagcactaagcagatgtcg

SEQ ID NO: 3790478 - DNA, 25 bp, Homo sapien
gatgtcgatcggtggaaaccatgct

SEQ ID NO: 3790479 - DNA, 25 bp, Homo sapien
agccctttcccaagctcgactcctt

SEQ ID NO: 3790480 - DNA, 25 bp, Homo sapien
gccctttcccaagctcgactcctta

SEQ ID NO: 3790481 - DNA, 25 bp, Homo sapien
gacctcaaaggctctctctgggtcc

SEQ ID NO: 3790482 - DNA, 25 bp, Homo sapien
tgtatggaggctgacgacgccacag

SEQ ID NO: 3790483 - DNA, 25 bp, Homo sapien
ctgtatggaggctgacgacgccaca

SEQ ID NO: 3790484 - DNA, 25 bp, Homo sapien
tatggaggctgacgacgccacagct

SEQ ID NO: 3790485 - DNA, 25 bp, Homo sapien
ggaggctgacgacgccacagctcct

SEQ ID NO: 3790486 - DNA, 25 bp, Homo sapien
cagcagcaaagcgttgatctcaggc

SEQ ID NO: 3790487 - DNA, 25 bp, Homo sapien
cagcaaagcgttgatctcaggcact

SEQ ID NO: 3790488 - DNA, 25 bp, Homo sapien
gaccagcagcaaagcgttgatctca

SEQ ID NO: 3790489 - DNA, 25 bp, Homo sapien
gcagcaaagcgttgatctcaggcac

SEQ ID NO: 3790490 - DNA, 25 bp, Homo sapien
gtccatagtgtgcaactgacagtct

SEQ ID NO: 3790491 - DNA, 25 bp, Homo sapien
gtcccagtttcaaggtccatagtgt

SEQ ID NO: 3790492 - DNA, 25 bp, Homo sapien
caaggtccatagtgtgcaactgaca

SEQ ID NO: 3790493 - DNA, 25 bp, Homo sapien
cagtttcaaggtccatagtgtgcaa

SEQ ID NO: 3790494 - DNA, 25 bp, Homo sapien
ccaaagtcgaacagctccatcctcg

SEQ ID NO: 3790495 - DNA, 25 bp, Homo sapien
gaacagctccatcctcgccacctga

SEQ ID NO: 3790496 - DNA, 25 bp, Homo sapien
aagtcgaacagctccatcctcgcca

SEQ ID NO: 3790497 - DNA, 25 bp, Homo sapien
cagctccatcctcgccacctgacag

SEQ ID NO: 3790498 - DNA, 25 bp, Homo sapien
tatagacctcgatcgtctggacctc

SEQ ID NO: 3790499 - DNA, 25 bp, Homo sapien
gacctcgatcgtctggacctccttg

SEQ ID NO: 3790500 - DNA, 25 bp, Homo sapien
ctcgtgcttatagacctcgatcgtc

SEQ ID NO: 3790501 - DNA, 25 bp, Homo sapien
gcttatagacctcgatcgtctggac

SEQ ID NO: 3790502 - DNA, 25 bp, Homo sapien
agttgccaaacatccaatccagcgc

SEQ ID NO: 3790503 - DNA, 25 bp, Homo sapien
agcgcccattgtggggcctcgagca

SEQ ID NO: 3790504 - DNA, 25 bp, Homo sapien
acatccaatccagcgcccattgtgg

SEQ ID NO: 3790505 - DNA, 25 bp, Homo sapien
catccagtcggaatcagttgccaaa

SEQ ID NO: 3790506 - DNA, 25 bp, Homo sapien
aaggtgacgtgcttctgtggcgccc

SEQ ID NO: 3790507 - DNA, 25 bp, Homo sapien
aggatcggaggtgccagagggtgag

SEQ ID NO: 3790508 - DNA, 25 bp, Homo sapien
tggaggatcggaggtgccagagggt

SEQ ID NO: 3790509 - DNA, 25 bp, Homo sapien
tggtagaaggtgacgtgcttctgtg

SEQ ID NO: 3790510 - DNA, 25 bp, Homo sapien
gggccttcagctccccgctcagctg

SEQ ID NO: 3790511 - DNA, 25 bp, Homo sapien
acatccacccggcagctgttgcctg

SEQ ID NO: 3790512 - DNA, 25 bp, Homo sapien
acagggagaaggctcggtaacccag

SEQ ID NO: 3790513 - DNA, 25 bp, Homo sapien
ttggtgaagacatccacccggcagc

SEQ ID NO: 3790514 - DNA, 25 bp, Homo sapien
cccaggttggtgaagacatccaccc

SEQ ID NO: 3790515 - DNA, 25 bp, Homo sapien
aaaaacactctaaaaccctgagctg

SEQ ID NO: 3790516 - DNA, 25 bp, Homo sapien
aaacactctaaaaccctgagctggc

SEQ ID NO: 3790517 - DNA, 25 bp, Homo sapien
acactctaaaaccctgagctggctg

SEQ ID NO: 3790518 - DNA, 25 bp, Homo sapien
tgaaaaacactctaaaaccctgagc

SEQ ID NO: 3790519 - DNA, 25 bp, Homo sapien
taagctgcttgaagcagtgaacttg

SEQ ID NO: 3790520 - DNA, 25 bp, Homo sapien
ctggctccggcatgtgtccatgccc

SEQ ID NO: 3790521 - DNA, 25 bp, Homo sapien
ggctccggcatgtgtccatgccctc

SEQ ID NO: 3790522 - DNA, 25 bp, Homo sapien
ctaagctgcttgaagcagtgaactt

SEQ ID NO: 3790523 - DNA, 25 bp, Homo sapien
caaacatgacgtcctccttgaagga

SEQ ID NO: 3790524 - DNA, 25 bp, Homo sapien
tactctctatcatttcccgggtctc

SEQ ID NO: 3790525 - DNA, 25 bp, Homo sapien
gcagaagtcgactcaaacatgacgt

SEQ ID NO: 3790526 - DNA, 25 bp, Homo sapien
tccttactctctatcatttcccggg

SEQ ID NO: 3790527 - DNA, 25 bp, Homo sapien
ctgttccttaatgcctagccttctt

SEQ ID NO: 3790528 - DNA, 25 bp, Homo sapien
cacttgctgttccttaatgcctagc

SEQ ID NO: 3790529 - DNA, 25 bp, Homo sapien
acttgctgttccttaatgcctagcc

SEQ ID NO: 3790530 - DNA, 25 bp, Homo sapien
ttccttaatgcctagccttctttct

SEQ ID NO: 3790531 - DNA, 25 bp, Homo sapien
ctagcccagtgttggagaacagcct

SEQ ID NO: 3790532 - DNA, 25 bp, Homo sapien
tcactagcccagtgttggagaacag

SEQ ID NO: 3790533 - DNA, 25 bp, Homo sapien
agatcactagcccagtgttggagaa

SEQ ID NO: 3790534 - DNA, 25 bp, Homo sapien
ggaagatcactagcccagtgttgga

SEQ ID NO: 3790535 - DNA, 25 bp, Homo sapien
ggtaaagctgttgtgtcgggccctc

SEQ ID NO: 3790536 - DNA, 25 bp, Homo sapien
gccctggagcactggaatgagcttt

SEQ ID NO: 3790537 - DNA, 25 bp, Homo sapien
tgacatgagctctccagatgggccc

SEQ ID NO: 3790538 - DNA, 25 bp, Homo sapien
aagtaaacagaaactccgagccgcg

SEQ ID NO: 3790539 - DNA, 25 bp, Homo sapien
gcttctctgggcttccgacgcctgg

SEQ ID NO: 3790540 - DNA, 25 bp, Homo sapien
ggccccaacacctgggcagctaggt

SEQ ID NO: 3790541 - DNA, 25 bp, Homo sapien
agcccggcggcttcgggtgagagcc

SEQ ID NO: 3790542 - DNA, 25 bp, Homo sapien
tgggctgggaccaccgtgacactca

SEQ ID NO: 3790543 - DNA, 25 bp, Homo sapien
gggaggacgagactgcagtgatggt

SEQ ID NO: 3790544 - DNA, 25 bp, Homo sapien
ggacgagactgcagtgatggtgcca

SEQ ID NO: 3790545 - DNA, 25 bp, Homo sapien
tgcgtgacagagcaaaatcccatct

SEQ ID NO: 3790546 - DNA, 25 bp, Homo sapien
gaggacgagactgcagtgatggtgc

SEQ ID NO: 3790547 - DNA, 25 bp, Homo sapien
gaacccgggagcggaggctgctgtg

SEQ ID NO: 3790548 - DNA, 25 bp, Homo sapien
acccgggagcggaggctgctgtgag

SEQ ID NO: 3790549 - DNA, 25 bp, Homo sapien
gctgagatggcaccactgtactcca

SEQ ID NO: 3790550 - DNA, 25 bp, Homo sapien
tgagatggcaccactgtactccagc

SEQ ID NO: 3790551 - DNA, 25 bp, Homo sapien
agttcctcgtcatcaggtcatcatg

SEQ ID NO: 3790552 - DNA, 25 bp, Homo sapien
acagcagttcctcgtcatcaggtca

SEQ ID NO: 3790553 - DNA, 25 bp, Homo sapien
gtcatcatgaaagtcaacaagttga

SEQ ID NO: 3790554 - DNA, 25 bp, Homo sapien
catgaaagtcaacaagttgagccgg

SEQ ID NO: 3790555 - DNA, 25 bp, Homo sapien
gggctgtaatcacttcatcctggga

SEQ ID NO: 3790556 - DNA, 25 bp, Homo sapien
tttccagagggtcacatagcagcac

SEQ ID NO: 3790557 - DNA, 25 bp, Homo sapien
ttggcaaatgcaacgagcgagggct

SEQ ID NO: 3790558 - DNA, 25 bp, Homo sapien
caggaggcgctcaagatgtgctacg

SEQ ID NO: 3790559 - DNA, 25 bp, Homo sapien
ccaagttatttctaccagactgctt

SEQ ID NO: 3790560 - DNA, 25 bp, Homo sapien
cccaagttatttctaccagactgct

SEQ ID NO: 3790561 - DNA, 25 bp, Homo sapien
ctgggtctggacccaagttatttct

SEQ ID NO: 3790562 - DNA, 25 bp, Homo sapien
cccgggaatcccaggatggttgaga

SEQ ID NO: 3790563 - DNA, 25 bp, Homo sapien
tgcgcggtggagtcagcggagggtc

SEQ ID NO: 3790564 - DNA, 25 bp, Homo sapien
gcaccgagtagggagggatcggccg

SEQ ID NO: 3790565 - DNA, 25 bp, Homo sapien
aggtctggatgtgccgcggcggcct

SEQ ID NO: 3790566 - DNA, 25 bp, Homo sapien
caggctcacgtcctgcgccgagggc

SEQ ID NO: 3790567 - DNA, 25 bp, Homo sapien
cgccgagggcttcggggcgcgcgcg

SEQ ID NO: 3790568 - DNA, 25 bp, Homo sapien
tgcgccgagggcttcggggcgcgcg

SEQ ID NO: 3790569 - DNA, 25 bp, Homo sapien
ggctcacgtcctgcgccgagggctt

SEQ ID NO: 3790570 - DNA, 25 bp, Homo sapien
cggcaggtaaccatagcgagtcagc

SEQ ID NO: 3790571 - DNA, 25 bp, Homo sapien
atggcatcgcgcaacttctcagggc

SEQ ID NO: 3790572 - DNA, 25 bp, Homo sapien
ggtaaccatagcgagtcagccagtc

SEQ ID NO: 3790573 - DNA, 25 bp, Homo sapien
cccgcgaacctctgcatgactttga

SEQ ID NO: 3790574 - DNA, 25 bp, Homo sapien
agggttcgcttcttccacacgctgc

SEQ ID NO: 3790575 - DNA, 25 bp, Homo sapien
acacgctgccgctcagagcgtaccg

SEQ ID NO: 3790576 - DNA, 25 bp, Homo sapien
catgtcagggttcgcttcttccaca

SEQ ID NO: 3790577 - DNA, 25 bp, Homo sapien
gcgtaccggcgacgccgcctgacca

SEQ ID NO: 3790578 - DNA, 25 bp, Homo sapien
aggccatcagggcatagctcatgag

SEQ ID NO: 3790579 - DNA, 25 bp, Homo sapien
tcagggcatagctcatgaggacccg

SEQ ID NO: 3790580 - DNA, 25 bp, Homo sapien
catcagggcatagctcatgaggacc

SEQ ID NO: 3790581 - DNA, 25 bp, Homo sapien
gcatagctcatgaggacccgcacgg

SEQ ID NO: 3790582 - DNA, 25 bp, Homo sapien
gggaatccacctcatgaaatgtgag

SEQ ID NO: 3790583 - DNA, 25 bp, Homo sapien
tcaaagtgagtgtccccggagatgg

SEQ ID NO: 3790584 - DNA, 25 bp, Homo sapien
caggtctcctcatcgtcaaagtgag

SEQ ID NO: 3790585 - DNA, 25 bp, Homo sapien
atgaggatgtcgggctcctggccct

SEQ ID NO: 3790586 - DNA, 25 bp, Homo sapien
aggatctctcataagagaggagatt

SEQ ID NO: 3790587 - DNA, 25 bp, Homo sapien
ggatctctcataagagaggagattt

SEQ ID NO: 3790588 - DNA, 25 bp, Homo sapien
taagacgctcgttggatccattccc

SEQ ID NO: 3790589 - DNA, 25 bp, Homo sapien
tctttgtaatggtgttgagcgctca

SEQ ID NO: 3790590 - DNA, 25 bp, Homo sapien
catccttgcctctatgcatgcattt

SEQ ID NO: 3790591 - DNA, 25 bp, Homo sapien
tctgtcagtctatcaatccccgatc

SEQ ID NO: 3790592 - DNA, 25 bp, Homo sapien
atcaaccggtgagccgcctgccagc

SEQ ID NO: 3790593 - DNA, 25 bp, Homo sapien
gaagcccagctcctcatcaaccggt

SEQ ID NO: 3790594 - DNA, 25 bp, Homo sapien
gacccagaggattcacacgccagcc

SEQ ID NO: 3790595 - DNA, 25 bp, Homo sapien
agctcctcatcaaccggtgagccgc

SEQ ID NO: 3790596 - DNA, 25 bp, Homo sapien
ataggccaccttacacaccgatggg

SEQ ID NO: 3790597 - DNA, 25 bp, Homo sapien
gaacacagagctcctctagcaggca

SEQ ID NO: 3790598 - DNA, 25 bp, Homo sapien
gaggacagaataaggccccgtctca

SEQ ID NO: 3790599 - DNA, 25 bp, Homo sapien
gagcctacaaggtgcgtgccattct

SEQ ID NO: 3790600 - DNA, 25 bp, Homo sapien
agaaagtgggtgagagctgcggccg

SEQ ID NO: 3790601 - DNA, 25 bp, Homo sapien
gaaagtgggtgagagctgcggccgc

SEQ ID NO: 3790602 - DNA, 25 bp, Homo sapien
gtacttgtcagggtcgcccaccgga

SEQ ID NO: 3790603 - DNA, 25 bp, Homo sapien
ccggaccctggtagaagggcctcat

SEQ ID NO: 3790604 - DNA, 25 bp, Homo sapien
tagagttgctgcaggccatcgcggt

SEQ ID NO: 3790605 - DNA, 25 bp, Homo sapien
catcgcggtcatcctgagacaggcg

SEQ ID NO: 3790606 - DNA, 25 bp, Homo sapien
cactggatggggcaatgatggtttc

SEQ ID NO: 3790607 - DNA, 25 bp, Homo sapien
gaaagagtcaggcaggtgtgcgtcc

SEQ ID NO: 3790608 - DNA, 25 bp, Homo sapien
atggtttcgcggcaggtccctctcc

SEQ ID NO: 3790609 - DNA, 25 bp, Homo sapien
aggaaagagtcaggcaggtgtgcgt

SEQ ID NO: 3790610 - DNA, 25 bp, Homo sapien
cggaggagccaggggtttccttgtg

SEQ ID NO: 3790611 - DNA, 25 bp, Homo sapien
gtgggcttgtcatatggggtttggg

SEQ ID NO: 3790612 - DNA, 25 bp, Homo sapien
ttggcgatggcgtcaaaattgccct

SEQ ID NO: 3790613 - DNA, 25 bp, Homo sapien
ggcgtcaaaattgccctcacatcga

SEQ ID NO: 3790614 - DNA, 25 bp, Homo sapien
tgccctcacatcgatcagggatggg

SEQ ID NO: 3790615 - DNA, 25 bp, Homo sapien
agtttcccctcggatgttggcgatg

SEQ ID NO: 3790616 - DNA, 25 bp, Homo sapien
gggtcccatctggaaatcaagggcg

SEQ ID NO: 3790617 - DNA, 25 bp, Homo sapien
tctggaaatcaagggcgcaatggat

SEQ ID NO: 3790618 - DNA, 25 bp, Homo sapien
ggaggggtcccatctggaaatcaag

SEQ ID NO: 3790619 - DNA, 25 bp, Homo sapien
aatcaagggcgcaatggatctaggg

SEQ ID NO: 3790620 - DNA, 25 bp, Homo sapien
cgctaaagaggaggattcggccgtc

SEQ ID NO: 3790621 - DNA, 25 bp, Homo sapien
tctcggtgccgagcataggcggcct

SEQ ID NO: 3790622 - DNA, 25 bp, Homo sapien
gattcggccgtctcggtgccgagca

SEQ ID NO: 3790623 - DNA, 25 bp, Homo sapien
ctcccagaagcggtgcagccgtgcg

SEQ ID NO: 3790624 - DNA, 25 bp, Homo sapien
gaggtcaggggtgggctccccgcgc

SEQ ID NO: 3790625 - DNA, 25 bp, Homo sapien
ctgcagggtggaggccgggaggtca

SEQ ID NO: 3790626 - DNA, 25 bp, Homo sapien
tcaggggtgggctccccgcgccggc

SEQ ID NO: 3790627 - DNA, 25 bp, Homo sapien
gcgccggccccagcgcgccccgccg

SEQ ID NO: 3790628 - DNA, 25 bp, Homo sapien
tcgtcgtagcgccagtactgccggc

SEQ ID NO: 3790629 - DNA, 25 bp, Homo sapien
caggtaggtcttcccgttctgtggc

SEQ ID NO: 3790630 - DNA, 25 bp, Homo sapien
ctgcgttgctgacggtgacatcgtc

SEQ ID NO: 3790631 - DNA, 25 bp, Homo sapien
ttctgtggccacgagaacacggcgt

SEQ ID NO: 3790632 - DNA, 25 bp, Homo sapien
aacccgcaggtcaccgcgctcccca

SEQ ID NO: 3790633 - DNA, 25 bp, Homo sapien
ccagtaacccgcaggtcaccgcgct

SEQ ID NO: 3790634 - DNA, 25 bp, Homo sapien
gtaacccgcaggtcaccgcgctccc

SEQ ID NO: 3790635 - DNA, 25 bp, Homo sapien
cagtaacccgcaggtcaccgcgctc

SEQ ID NO: 3790636 - DNA, 25 bp, Homo sapien
gcctggttgagctcgcactgacaat

SEQ ID NO: 3790637 - DNA, 25 bp, Homo sapien
cgtccggctcggtcttgatgctgtt

SEQ ID NO: 3790638 - DNA, 25 bp, Homo sapien
gacaatcgcaggtttcggacacggg

SEQ ID NO: 3790639 - DNA, 25 bp, Homo sapien
ggccaacgtcctgcggcctggttga

SEQ ID NO: 3790640 - DNA, 25 bp, Homo sapien
ctgttcggtctggatggctcccccc

SEQ ID NO: 3790641 - DNA, 25 bp, Homo sapien
tgttcggtctggatggctcccccca

SEQ ID NO: 3790642 - DNA, 25 bp, Homo sapien
gctgttcggtctggatggctccccc

SEQ ID NO: 3790643 - DNA, 25 bp, Homo sapien
cctgaaggcgggttccggtggcagc

SEQ ID NO: 3790644 - DNA, 25 bp, Homo sapien
tgcgctccgagaaaagctggctctt

SEQ ID NO: 3790645 - DNA, 25 bp, Homo sapien
tgcgcgggagatcccccctgcttag

SEQ ID NO: 3790646 - DNA, 25 bp, Homo sapien
ggcgacgaccgacgcatggtcccag

SEQ ID NO: 3790647 - DNA, 25 bp, Homo sapien
gacagcaacttaggaagtggcccct

SEQ ID NO: 3790648 - DNA, 25 bp, Homo sapien
tcggtgtggcctgaacatattggtc

SEQ ID NO: 3790649 - DNA, 25 bp, Homo sapien
gacagaggcccaaatcgtttcctgg

SEQ ID NO: 3790650 - DNA, 25 bp, Homo sapien
caatccccgcgactagttaaaatgc

SEQ ID NO: 3790651 - DNA, 25 bp, Homo sapien
agagggaaagtccagactcgggaca

SEQ ID NO: 3790652 - DNA, 25 bp, Homo sapien
aaagtccagactcgggacagctggc

SEQ ID NO: 3790653 - DNA, 25 bp, Homo sapien
gggaaagtccagactcgggacagct

SEQ ID NO: 3790654 - DNA, 25 bp, Homo sapien
aggaatgagggtccgtccctggctg

SEQ ID NO: 3790655 - DNA, 25 bp, Homo sapien
ggaggccttgctgagtgcgtgaaaa

SEQ ID NO: 3790656 - DNA, 25 bp, Homo sapien
gccttgctgagtgcgtgaaaaacag

SEQ ID NO: 3790657 - DNA, 25 bp, Homo sapien
gagtgcgtgaaaaacagacagagac

SEQ ID NO: 3790658 - DNA, 25 bp, Homo sapien
gggtagtgggcggagcctctctcag

SEQ ID NO: 3790659 - DNA, 25 bp, Homo sapien
tgcacgcagtcttcctggcacaaat

SEQ ID NO: 3790660 - DNA, 25 bp, Homo sapien
cacgcagtcttcctggcacaaatac

SEQ ID NO: 3790661 - DNA, 25 bp, Homo sapien
tctgcacgcagtcttcctggcacaa

SEQ ID NO: 3790662 - DNA, 25 bp, Homo sapien
cttctgcacgcagtcttcctggcac

SEQ ID NO: 3790663 - DNA, 25 bp, Homo sapien
gatgacccagctccactgagacagt

SEQ ID NO: 3790664 - DNA, 25 bp, Homo sapien
gagatgacccagctccactgagaca

SEQ ID NO: 3790665 - DNA, 25 bp, Homo sapien
ctgagatgacccagctccactgaga

SEQ ID NO: 3790666 - DNA, 25 bp, Homo sapien
tgacccagctccactgagacagtca

SEQ ID NO: 3790667 - DNA, 25 bp, Homo sapien
aagaaagtgtctcagagaagcaccc

SEQ ID NO: 3790668 - DNA, 25 bp, Homo sapien
acaggtgtgaggaaaagaaagtgtc

SEQ ID NO: 3790669 - DNA, 25 bp, Homo sapien
aaagtgtctcagagaagcaccctcc

SEQ ID NO: 3790670 - DNA, 25 bp, Homo sapien
ctggcgaggaacaggtgtgaggaaa

SEQ ID NO: 3790671 - DNA, 25 bp, Homo sapien
ggcggccaaaagttcaaggagccaa

SEQ ID NO: 3790672 - DNA, 25 bp, Homo sapien
cggccaaaagttcaaggagccaagg

SEQ ID NO: 3790673 - DNA, 25 bp, Homo sapien
gcggccaaaagttcaaggagccaag

SEQ ID NO: 3790674 - DNA, 25 bp, Homo sapien
ggccaaaagttcaaggagccaaggc

SEQ ID NO: 3790675 - DNA, 25 bp, Homo sapien
cattcgggccttcagcttcttcatg

SEQ ID NO: 3790676 - DNA, 25 bp, Homo sapien
cagcttcttcatgtcatcagagagg

SEQ ID NO: 3790677 - DNA, 25 bp, Homo sapien
gcttcttcatgtcatcagagaggac

SEQ ID NO: 3790678 - DNA, 25 bp, Homo sapien
ttcgggccttcagcttcttcatgtc

SEQ ID NO: 3790679 - DNA, 25 bp, Homo sapien
gagcagaagtagggaggagcattac

SEQ ID NO: 3790680 - DNA, 25 bp, Homo sapien
ctgagcagaagtagggaggagcatt

SEQ ID NO: 3790681 - DNA, 25 bp, Homo sapien
tgagcagaagtagggaggagcatta

SEQ ID NO: 3790682 - DNA, 25 bp, Homo sapien
cctcagtgtcacacgctgagaccca

SEQ ID NO: 3790683 - DNA, 25 bp, Homo sapien
gagttggcaccaaagggccggatcc

SEQ ID NO: 3790684 - DNA, 25 bp, Homo sapien
agtgtcacacgctgagacccaggcc

SEQ ID NO: 3790685 - DNA, 25 bp, Homo sapien
gcaccaaagggccggatccttgtcc

SEQ ID NO: 3790686 - DNA, 25 bp, Homo sapien
tgtccacgtcctgattctgcatttt

SEQ ID NO: 3790687 - DNA, 25 bp, Homo sapien
tccacgtcctgattctgcattttgc

SEQ ID NO: 3790688 - DNA, 25 bp, Homo sapien
ctgtccacgtcctgattctgcattt

SEQ ID NO: 3790689 - DNA, 25 bp, Homo sapien
gtccacgtcctgattctgcattttg

SEQ ID NO: 3790690 - DNA, 25 bp, Homo sapien
cggggacatgtgacctggtgcctga

SEQ ID NO: 3790691 - DNA, 25 bp, Homo sapien
gggggcggggacatgtgacctggtg

SEQ ID NO: 3790692 - DNA, 25 bp, Homo sapien
gggacatgtgacctggtgcctgagg

SEQ ID NO: 3790693 - DNA, 25 bp, Homo sapien
ggcggggacatgtgacctggtgcct

SEQ ID NO: 3790694 - DNA, 25 bp, Homo sapien
accccacatcagtcagtcctcaagc

SEQ ID NO: 3790695 - DNA, 25 bp, Homo sapien
gccacgtctggcacccctgttgttt

SEQ ID NO: 3790696 - DNA, 25 bp, Homo sapien
gaacaaagcactcggttccaggccc

SEQ ID NO: 3790697 - DNA, 25 bp, Homo sapien
ctgttaggaacaaagcactcggttc

SEQ ID NO: 3790698 - DNA, 25 bp, Homo sapien
ctccagctctgccaggctcgacatc

SEQ ID NO: 3790699 - DNA, 25 bp, Homo sapien
ccagctctgccaggctcgacatcac

SEQ ID NO: 3790700 - DNA, 25 bp, Homo sapien
tccagctctgccaggctcgacatca

SEQ ID NO: 3790701 - DNA, 25 bp, Homo sapien
ggagggcacagggggttcatgctgc

SEQ ID NO: 3790702 - DNA, 25 bp, Homo sapien
gggagaggagggcacagggggttca

SEQ ID NO: 3790703 - DNA, 25 bp, Homo sapien
gcacagggggttcatgctgctcctg

SEQ ID NO: 3790704 - DNA, 25 bp, Homo sapien
agggcacagggggttcatgctgctc

SEQ ID NO: 3790705 - DNA, 25 bp, Homo sapien
tgggtgctgctcctcataataagcc

SEQ ID NO: 3790706 - DNA, 25 bp, Homo sapien
aataagccgccactgtctccaggta

SEQ ID NO: 3790707 - DNA, 25 bp, Homo sapien
ccaggtagccctctttgaagtcgtc

SEQ ID NO: 3790708 - DNA, 25 bp, Homo sapien
ctccaggtagccctctttgaagtcg

SEQ ID NO: 3790709 - DNA, 25 bp, Homo sapien
ttgcgggatcctcaacatccgggac

SEQ ID NO: 3790710 - DNA, 25 bp, Homo sapien
tgttgcctcggcaccgtaatccatc

SEQ ID NO: 3790711 - DNA, 25 bp, Homo sapien
cttgtcacaaaagctctccccaggc

SEQ ID NO: 3790712 - DNA, 25 bp, Homo sapien
ctttttcaagtagaggagtgagctc

SEQ ID NO: 3790713 - DNA, 25 bp, Homo sapien
agagggcctgcactgcatggaccag

SEQ ID NO: 3790714 - DNA, 25 bp, Homo sapien
gggttcagagcacttctggggtgtc

SEQ ID NO: 3790715 - DNA, 25 bp, Homo sapien
ggttcagagcacttctggggtgtca

SEQ ID NO: 3790716 - DNA, 25 bp, Homo sapien
ttggggttcagagcacttctggggt

SEQ ID NO: 3790717 - DNA, 25 bp, Homo sapien
gattggggttcagagcacttctggg

SEQ ID NO: 3790718 - DNA, 25 bp, Homo sapien
attaagatgccagggcgacagcacc

SEQ ID NO: 3790719 - DNA, 25 bp, Homo sapien
gtcagggtgggtgcgcggtgacggg

SEQ ID NO: 3790720 - DNA, 25 bp, Homo sapien
gatgccagggcgacagcaccaggtc

SEQ ID NO: 3790721 - DNA, 25 bp, Homo sapien
ttattaagatgccagggcgacagca

SEQ ID NO: 3790722 - DNA, 25 bp, Homo sapien
tgggaaacccacctccgcgatcatg

SEQ ID NO: 3790723 - DNA, 25 bp, Homo sapien
tgccctgggaaacccacctccgcga

SEQ ID NO: 3790724 - DNA, 25 bp, Homo sapien
ggaaacccacctccgcgatcatggt

SEQ ID NO: 3790725 - DNA, 25 bp, Homo sapien
cccacctccgcgatcatggtatctc

SEQ ID NO: 3790726 - DNA, 25 bp, Homo sapien
ctcaggcattctttatagctgtgtg

SEQ ID NO: 3790727 - DNA, 25 bp, Homo sapien
aggcattctttatagctgtgtgaaa

SEQ ID NO: 3790728 - DNA, 25 bp, Homo sapien
cattctttatagctgtgtgaaaacg

SEQ ID NO: 3790729 - DNA, 25 bp, Homo sapien
tctcaggcattctttatagctgtgt

SEQ ID NO: 3790730 - DNA, 25 bp, Homo sapien
tacccacaatgtgtcttggaagtaa

SEQ ID NO: 3790731 - DNA, 25 bp, Homo sapien
gtgtccttaccccaatcatctcaaa

SEQ ID NO: 3790732 - DNA, 25 bp, Homo sapien
gccgggctggagatgattgcatcat

SEQ ID NO: 3790733 - DNA, 25 bp, Homo sapien
ctcaggtgagactttggattggcct

SEQ ID NO: 3790734 - DNA, 25 bp, Homo sapien
gtgcatgcatccttctgtacatccc

SEQ ID NO: 3790735 - DNA, 25 bp, Homo sapien
tgtgcatgcatccttccaaccattc

SEQ ID NO: 3790736 - DNA, 25 bp, Homo sapien
aaccattcatacacgcctctgtgca

SEQ ID NO: 3790737 - DNA, 25 bp, Homo sapien
tctgcccatgcatccgtccatacat

SEQ ID NO: 3790738 - DNA, 25 bp, Homo sapien
ggcttcaatggtcttgctcaaatca

SEQ ID NO: 3790739 - DNA, 25 bp, Homo sapien
tggtgttttgatcacggccatatca

SEQ ID NO: 3790740 - DNA, 25 bp, Homo sapien
ggtcttgctcaaatcacatgtgcgc

SEQ ID NO: 3790741 - DNA, 25 bp, Homo sapien
tgcgctgatgaatgtccttgttgac

SEQ ID NO: 3790742 - DNA, 25 bp, Homo sapien
gctccttatccatcggtgagctgcc

SEQ ID NO: 3790743 - DNA, 25 bp, Homo sapien
aaagcccagctccttatccatcggt

SEQ ID NO: 3790744 - DNA, 25 bp, Homo sapien
cttatccatcggtgagctgcctgcc

SEQ ID NO: 3790745 - DNA, 25 bp, Homo sapien
gcccagctccttatccatcggtgag

SEQ ID NO: 3790746 - DNA, 25 bp, Homo sapien
ggtcagggtgggtgcgcggtgactg

SEQ ID NO: 3790747 - DNA, 25 bp, Homo sapien
gtcagggtgggtgcgcggtgactgg

SEQ ID NO: 3790748 - DNA, 25 bp, Homo sapien
agatgccagggcgacagcgccaggt

SEQ ID NO: 3790749 - DNA, 25 bp, Homo sapien
ttattaagatgccagggcgacagcg

SEQ ID NO: 3790750 - DNA, 25 bp, Homo sapien
tcctgtgaaacccacctccgtgatc

SEQ ID NO: 3790751 - DNA, 25 bp, Homo sapien
ttgtcctgtgaaacccacctccgtg

SEQ ID NO: 3790752 - DNA, 25 bp, Homo sapien
gtcctgtgaaacccacctccgtgat

SEQ ID NO: 3790753 - DNA, 25 bp, Homo sapien
tgtcctgtgaaacccacctccgtga

SEQ ID NO: 3790754 - DNA, 25 bp, Homo sapien
tgcaggcgagtgtcccacacttggg

SEQ ID NO: 3790755 - DNA, 25 bp, Homo sapien
ttatgcaggcgagtgtcccacactt

SEQ ID NO: 3790756 - DNA, 25 bp, Homo sapien
agcacatccggggtgcaattgagac

SEQ ID NO: 3790757 - DNA, 25 bp, Homo sapien
cacatccggggtgcaattgagacgg

SEQ ID NO: 3790758 - DNA, 25 bp, Homo sapien
tccacagcctgcacggggcgggcgg

SEQ ID NO: 3790759 - DNA, 25 bp, Homo sapien
gggcacctgcggcagtgggggcccc

SEQ ID NO: 3790760 - DNA, 25 bp, Homo sapien
cccgggaagggagtctccacagcct

SEQ ID NO: 3790761 - DNA, 25 bp, Homo sapien
cagagggggcacctgcggcagtggg

SEQ ID NO: 3790762 - DNA, 25 bp, Homo sapien
ttcagaaatcaacctgcccgctctc

SEQ ID NO: 3790763 - DNA, 25 bp, Homo sapien
tcctgcaagctgatcatctgcgccg

SEQ ID NO: 3790764 - DNA, 25 bp, Homo sapien
aggcctgggatgcccatcctgctct

SEQ ID NO: 3790765 - DNA, 25 bp, Homo sapien
tcctgccagcttgaagccttccacc

SEQ ID NO: 3790766 - DNA, 25 bp, Homo sapien
agaaagaacagctgagttgtttctc

SEQ ID NO: 3790767 - DNA, 25 bp, Homo sapien
aaagaacagctgagttgtttctccc

SEQ ID NO: 3790768 - DNA, 25 bp, Homo sapien
aagaacagctgagttgtttctccct

SEQ ID NO: 3790769 - DNA, 25 bp, Homo sapien
gctagaaagaacagctgagttgttt

SEQ ID NO: 3790770 - DNA, 25 bp, Homo sapien
tgtctccttgtcctgggtgtcctgg

SEQ ID NO: 3790771 - DNA, 25 bp, Homo sapien
gtgtctccttgtcctgggtgtcctg

SEQ ID NO: 3790772 - DNA, 25 bp, Homo sapien
cttaatgtgcagtgactcctgagtg

SEQ ID NO: 3790773 - DNA, 25 bp, Homo sapien
ccccagcttagaaggcatttcctga

SEQ ID NO: 3790774 - DNA, 25 bp, Homo sapien
gcttagaaggcatttcctgatgagg

SEQ ID NO: 3790775 - DNA, 25 bp, Homo sapien
tgtgcagtgactcctgagtgtcccc

SEQ ID NO: 3790776 - DNA, 25 bp, Homo sapien
caggcaccttgagccccatcctcct

SEQ ID NO: 3790777 - DNA, 25 bp, Homo sapien
cggagtgtggctcttcgggctccat

SEQ ID NO: 3790778 - DNA, 25 bp, Homo sapien
ctgcgatgccccctcggagtgtggc

SEQ ID NO: 3790779 - DNA, 25 bp, Homo sapien
cccctcggagtgtggctcttcgggc

SEQ ID NO: 3790780 - DNA, 25 bp, Homo sapien
cgccaggcaggaagagagctttctc

SEQ ID NO: 3790781 - DNA, 25 bp, Homo sapien
ccgccaggcaggaagagagctttct

SEQ ID NO: 3790782 - DNA, 25 bp, Homo sapien
tccgccaggcaggaagagagctttc

SEQ ID NO: 3790783 - DNA, 25 bp, Homo sapien
ctccgccaggcaggaagagagcttt

SEQ ID NO: 3790784 - DNA, 25 bp, Homo sapien
ctggtcctcccctctcgggaaagca

SEQ ID NO: 3790785 - DNA, 25 bp, Homo sapien
ccatctgccggtctctggtcctccc

SEQ ID NO: 3790786 - DNA, 25 bp, Homo sapien
ctctcgggaaagcacggggatccgg

SEQ ID NO: 3790787 - DNA, 25 bp, Homo sapien
gccatctgccggtctctggtcctcc

SEQ ID NO: 3790788 - DNA, 25 bp, Homo sapien
ttctgctgcgtgtggtccagccgtc

SEQ ID NO: 3790789 - DNA, 25 bp, Homo sapien
aagttctgctgcgtgtggtccagcc

SEQ ID NO: 3790790 - DNA, 25 bp, Homo sapien
gaggtacaaggccacatcctcgaaa

SEQ ID NO: 3790791 - DNA, 25 bp, Homo sapien
gtagaagttctgctgcgtgtggtcc

SEQ ID NO: 3790792 - DNA, 25 bp, Homo sapien
gcatctccccaaaactgatgggccc

SEQ ID NO: 3790793 - DNA, 25 bp, Homo sapien
cccaaaactgatgggcccaagtagg

SEQ ID NO: 3790794 - DNA, 25 bp, Homo sapien
tctccccaaaactgatgggcccaag

SEQ ID NO: 3790795 - DNA, 25 bp, Homo sapien
ctgtcacaggccttctggcgctgcc

SEQ ID NO: 3790796 - DNA, 25 bp, Homo sapien
ccttgccgtgcgcttgaggggccca

SEQ ID NO: 3790797 - DNA, 25 bp, Homo sapien
cagaaaggcctgctgaagggaaagc

SEQ ID NO: 3790798 - DNA, 25 bp, Homo sapien
aggggcccagaaaggcctgctgaag

SEQ ID NO: 3790799 - DNA, 25 bp, Homo sapien
gcccagaaaggcctgctgaagggaa

SEQ ID NO: 3790800 - DNA, 25 bp, Homo sapien
tgcctgccggctggagcccgaggcc

SEQ ID NO: 3790801 - DNA, 25 bp, Homo sapien
gcctgccggctggagcccgaggcct

SEQ ID NO: 3790802 - DNA, 25 bp, Homo sapien
aagtcgtttccagctagggacgagc

SEQ ID NO: 3790803 - DNA, 25 bp, Homo sapien
agaaagtcgtttccagctagggacg

SEQ ID NO: 3790804 - DNA, 25 bp, Homo sapien
cgtttccagctagggacgagcttcc

SEQ ID NO: 3790805 - DNA, 25 bp, Homo sapien
gtcgtttccagctagggacgagctt

SEQ ID NO: 3790806 - DNA, 25 bp, Homo sapien
ccaagggctgccacggatgaggtct

SEQ ID NO: 3790807 - DNA, 25 bp, Homo sapien
tcccaagggctgccacggatgaggt

SEQ ID NO: 3790808 - DNA, 25 bp, Homo sapien
gggctgccacggatgaggtctgcac

SEQ ID NO: 3790809 - DNA, 25 bp, Homo sapien
tgcgggacgccccactggactctcc

SEQ ID NO: 3790810 - DNA, 25 bp, Homo sapien
ctgcatccggggtgcgatctggctc

SEQ ID NO: 3790811 - DNA, 25 bp, Homo sapien
cccggagtctttggccggccctgag

SEQ ID NO: 3790812 - DNA, 25 bp, Homo sapien
atccggggtgcgatctggctcagcc

SEQ ID NO: 3790813 - DNA, 25 bp, Homo sapien
ggggtgcgatctggctcagccggct

SEQ ID NO: 3790814 - DNA, 25 bp, Homo sapien
ctggggctccgtgggactggggtct

SEQ ID NO: 3790815 - DNA, 25 bp, Homo sapien
gcactgctcgcaccggtagctcttc

SEQ ID NO: 3790816 - DNA, 25 bp, Homo sapien
ccggtgcgtcaccaggtgcgagtgc

SEQ ID NO: 3790817 - DNA, 25 bp, Homo sapien
ccgcagtcagtgcaggcgtagggct

SEQ ID NO: 3790818 - DNA, 25 bp, Homo sapien
ggtgcgagtgccagctgaagccctt

SEQ ID NO: 3790819 - DNA, 25 bp, Homo sapien
tgctgaatcagcgtggagtggtggc

SEQ ID NO: 3790820 - DNA, 25 bp, Homo sapien
ggctgaagctcttccggcaggcggg

SEQ ID NO: 3790821 - DNA, 25 bp, Homo sapien
gaatcagcgtggagtggtggctgaa

SEQ ID NO: 3790822 - DNA, 25 bp, Homo sapien
ctgaatcagcgtggagtggtggctg

SEQ ID NO: 3790823 - DNA, 25 bp, Homo sapien
tgggtgaccaagtccgagcggcggg

SEQ ID NO: 3790824 - DNA, 25 bp, Homo sapien
agcgcttggcgcagcggtcgcacac

SEQ ID NO: 3790825 - DNA, 25 bp, Homo sapien
gaccaagtccgagcggcgggtgaag

SEQ ID NO: 3790826 - DNA, 25 bp, Homo sapien
aagcgcttggcgcagcggtcgcaca

SEQ ID NO: 3790827 - DNA, 25 bp, Homo sapien
tgggtgcgctggtgcgcggtgaggt

SEQ ID NO: 3790828 - DNA, 25 bp, Homo sapien
cacggatagggcttgaccccagtgt

SEQ ID NO: 3790829 - DNA, 25 bp, Homo sapien
gttgtgcgcgatgaggttggaacgc

SEQ ID NO: 3790830 - DNA, 25 bp, Homo sapien
tgactagcgccgagctctgcgtgaa

SEQ ID NO: 3790831 - DNA, 25 bp, Homo sapien
tgtggatcttctcgtgccggtgcag

SEQ ID NO: 3790832 - DNA, 25 bp, Homo sapien
tggatcttctcgtgccggtgcaggt

SEQ ID NO: 3790833 - DNA, 25 bp, Homo sapien
tggtgtggatcttctcgtgccggtg

SEQ ID NO: 3790834 - DNA, 25 bp, Homo sapien
gtgtggatcttctcgtgccggtgca

SEQ ID NO: 3790835 - DNA, 25 bp, Homo sapien
ccaaggcctttaattcgcagagtgc

SEQ ID NO: 3790836 - DNA, 25 bp, Homo sapien
gcctttaattcgcagagtgcctgcc

SEQ ID NO: 3790837 - DNA, 25 bp, Homo sapien
tttaattcgcagagtgcctgccctt

SEQ ID NO: 3790838 - DNA, 25 bp, Homo sapien
aggcctttaattcgcagagtgcctg

SEQ ID NO: 3790839 - DNA, 25 bp, Homo sapien
caatgtgggccgttatctagctgat

SEQ ID NO: 3790840 - DNA, 25 bp, Homo sapien
ggcaggccgctacagacgaatcata

SEQ ID NO: 3790841 - DNA, 25 bp, Homo sapien
ttatatggaacctttggcaggccgc

SEQ ID NO: 3790842 - DNA, 25 bp, Homo sapien
ggatgactcacgtggctcttggcag

SEQ ID NO: 3790843 - DNA, 25 bp, Homo sapien
agctgctttgtccacgagttgctgc

SEQ ID NO: 3790844 - DNA, 25 bp, Homo sapien
cgcgttctctcaccagctgctttgt

SEQ ID NO: 3790845 - DNA, 25 bp, Homo sapien
tggccggagtcccgcgttctctcac

SEQ ID NO: 3790846 - DNA, 25 bp, Homo sapien
tgctgggcgtcaggggtcccacggc

SEQ ID NO: 3790847 - DNA, 25 bp, Homo sapien
ggctcgctgggaaactacgctacgc

SEQ ID NO: 3790848 - DNA, 25 bp, Homo sapien
tacggcccaggagatcccacttccg

SEQ ID NO: 3790849 - DNA, 25 bp, Homo sapien
gaaactacgctacgcaagcattccc

SEQ ID NO: 3790850 - DNA, 25 bp, Homo sapien
tcccagaaagccgttcgtccactga

SEQ ID NO: 3790851 - DNA, 25 bp, Homo sapien
gggaccagcacttcctagcagtgcg

SEQ ID NO: 3790852 - DNA, 25 bp, Homo sapien
cggccactcggagcccggtgcttga

SEQ ID NO: 3790853 - DNA, 25 bp, Homo sapien
gagcggcgatcgtacaggggcgtct

SEQ ID NO: 3790854 - DNA, 25 bp, Homo sapien
agcccggtgcttgatgttggagcca

SEQ ID NO: 3790855 - DNA, 25 bp, Homo sapien
gacacggcaggcgggaaggcgagcc

SEQ ID NO: 3790856 - DNA, 25 bp, Homo sapien
ccgcgctgtccaccgcagcctcgcc

SEQ ID NO: 3790857 - DNA, 25 bp, Homo sapien
aggcgggaaggcgagccagccggag

SEQ ID NO: 3790858 - DNA, 25 bp, Homo sapien
ggaaggcgagccagccggagccccg

SEQ ID NO: 3790859 - DNA, 25 bp, Homo sapien
tactttcagtctcccagagggatcc

SEQ ID NO: 3790860 - DNA, 25 bp, Homo sapien
aggctcagggttggtcggcttcaac

SEQ ID NO: 3790861 - DNA, 25 bp, Homo sapien
gtcggcttcaacctgggccccagaa

SEQ ID NO: 3790862 - DNA, 25 bp, Homo sapien
gagggatcccctgtggtagctgggc

SEQ ID NO: 3790863 - DNA, 25 bp, Homo sapien
cctgggcctccaagggggctgccat

SEQ ID NO: 3790864 - DNA, 25 bp, Homo sapien
tgttcccaggaggaatcttccactt

SEQ ID NO: 3790865 - DNA, 25 bp, Homo sapien
gaggaatcttccactttcacaatca

SEQ ID NO: 3790866 - DNA, 25 bp, Homo sapien
ttcacaatcagaagcccttctccct

SEQ ID NO: 3790867 - DNA, 25 bp, Homo sapien
gctgcttctgtaggtcctccaccaa

SEQ ID NO: 3790868 - DNA, 25 bp, Homo sapien
cgtagcagaattgccggaagcgctg

SEQ ID NO: 3790869 - DNA, 25 bp, Homo sapien
atgaggcccatgcacatccccgtag

SEQ ID NO: 3790870 - DNA, 25 bp, Homo sapien
gctggcggcaggcttcggaatccct

SEQ ID NO: 3790871 - DNA, 25 bp, Homo sapien
tctcgagctcagataccatccaggt

SEQ ID NO: 3790872 - DNA, 25 bp, Homo sapien
gagctcagataccatccaggtgccc

SEQ ID NO: 3790873 - DNA, 25 bp, Homo sapien
tcgagctcagataccatccaggtgc

SEQ ID NO: 3790874 - DNA, 25 bp, Homo sapien
ttctctcgagctcagataccatcca

SEQ ID NO: 3790875 - DNA, 25 bp, Homo sapien
gcaggaaccacaacatgctcatcag

SEQ ID NO: 3790876 - DNA, 25 bp, Homo sapien
caggaaccacaacatgctcatcagc

SEQ ID NO: 3790877 - DNA, 25 bp, Homo sapien
atcagcccgagaccagaccggggga

SEQ ID NO: 3790878 - DNA, 25 bp, Homo sapien
acatgctcatcagcccgagaccaga

SEQ ID NO: 3790879 - DNA, 25 bp, Homo sapien
tggggaacagacggccgcctccgtg

SEQ ID NO: 3790880 - DNA, 25 bp, Homo sapien
ctggggaacagacggccgcctccgt

SEQ ID NO: 3790881 - DNA, 25 bp, Homo sapien
ggggaacagacggccgcctccgtgc

SEQ ID NO: 3790882 - DNA, 25 bp, Homo sapien
cgtcgtctctccgggacgaccctct

SEQ ID NO: 3790883 - DNA, 25 bp, Homo sapien
ggacgaccctctttaagaagagcag

SEQ ID NO: 3790884 - DNA, 25 bp, Homo sapien
gggacgaccctctttaagaagagca

SEQ ID NO: 3790885 - DNA, 25 bp, Homo sapien
agaagacccggctcaggcctcccag

SEQ ID NO: 3790886 - DNA, 25 bp, Homo sapien
tggggtgagaagacccggctcaggc

SEQ ID NO: 3790887 - DNA, 25 bp, Homo sapien
ggtgagaagacccggctcaggcctc

SEQ ID NO: 3790888 - DNA, 25 bp, Homo sapien
ggaatggggtgagaagacccggctc

SEQ ID NO: 3790889 - DNA, 25 bp, Homo sapien
tcccgggagaaatagaatgggatgt

SEQ ID NO: 3790890 - DNA, 25 bp, Homo sapien
cttcccgggagaaatagaatgggat

SEQ ID NO: 3790891 - DNA, 25 bp, Homo sapien
ttcccgggagaaatagaatgggatg

SEQ ID NO: 3790892 - DNA, 25 bp, Homo sapien
gaagagatcccgctgagcagggtcc

SEQ ID NO: 3790893 - DNA, 25 bp, Homo sapien
atgtcccagaagagatcccgctgag

SEQ ID NO: 3790894 - DNA, 25 bp, Homo sapien
gttctcccgctttatgtcccagaag

SEQ ID NO: 3790895 - DNA, 25 bp, Homo sapien
agttctcccgctttatgtcccagaa

SEQ ID NO: 3790896 - DNA, 25 bp, Homo sapien
cagggacttctcactttggcctttg

SEQ ID NO: 3790897 - DNA, 25 bp, Homo sapien
tcactttggcctttgagcccaaaac

SEQ ID NO: 3790898 - DNA, 25 bp, Homo sapien
tgcagcagggacttctcactttggc

SEQ ID NO: 3790899 - DNA, 25 bp, Homo sapien
gacttctcactttggcctttgagcc

SEQ ID NO: 3790900 - DNA, 25 bp, Homo sapien
cgcactcggaacaggagaagggctt

SEQ ID NO: 3790901 - DNA, 25 bp, Homo sapien
ggtgcgcgcgctgcttgaagctctt

SEQ ID NO: 3790902 - DNA, 25 bp, Homo sapien
taggagcgcagcgagaagctcttgc

SEQ ID NO: 3790903 - DNA, 25 bp, Homo sapien
acacgccgatggtccagcaggtagg

SEQ ID NO: 3790904 - DNA, 25 bp, Homo sapien
cgagctccgagtgtgaggtaccctg

SEQ ID NO: 3790905 - DNA, 25 bp, Homo sapien
tctcagagcctcatgctagggcaag

SEQ ID NO: 3790906 - DNA, 25 bp, Homo sapien
aacaaagcaggatgtgccgtggctg

SEQ ID NO: 3790907 - DNA, 25 bp, Homo sapien
tcaaaggagcgggtcattagtgccg

SEQ ID NO: 3790908 - DNA, 25 bp, Homo sapien
ccagtgccgatggagcagggcgtta

SEQ ID NO: 3790909 - DNA, 25 bp, Homo sapien
tggtagtgccgatggagccggacgt

SEQ ID NO: 3790910 - DNA, 25 bp, Homo sapien
cgatggagccggacgttagtgacaa

SEQ ID NO: 3790911 - DNA, 25 bp, Homo sapien
ttagtgacaatggagtgggacacca

SEQ ID NO: 3790912 - DNA, 25 bp, Homo sapien
caccagtgccgttggagctggacgt

SEQ ID NO: 3790913 - DNA, 25 bp, Homo sapien
tggagctgggcgttggtgccaatgg

SEQ ID NO: 3790914 - DNA, 25 bp, Homo sapien
cgttggtgccaatggagcgaggcac

SEQ ID NO: 3790915 - DNA, 25 bp, Homo sapien
agcgaggcactggtgccggtggagc

SEQ ID NO: 3790916 - DNA, 25 bp, Homo sapien
tggtctgtccctgttcatggaaggc

SEQ ID NO: 3790917 - DNA, 25 bp, Homo sapien
gcagcagcaaagtgccaatgaagca

SEQ ID NO: 3790918 - DNA, 25 bp, Homo sapien
ttcacgtttattaatactcttctgt

SEQ ID NO: 3790919 - DNA, 25 bp, Homo sapien
tttcacgtttattaatactcttctg

SEQ ID NO: 3790920 - DNA, 25 bp, Homo sapien
tatattccaggtatccccaccctcc

SEQ ID NO: 3790921 - DNA, 25 bp, Homo sapien
aaggacgcagctccgcctggtcacg

SEQ ID NO: 3790922 - DNA, 25 bp, Homo sapien
atatattccaggtatccccaccctc

SEQ ID NO: 3790923 - DNA, 25 bp, Homo sapien
ctggacgccaaggacgcagctccgc

SEQ ID NO: 3790924 - DNA, 25 bp, Homo sapien
catctgcgtggccagccgcagggtc

SEQ ID NO: 3790925 - DNA, 25 bp, Homo sapien
gagtgtctgccatctgcgtggccag

SEQ ID NO: 3790926 - DNA, 25 bp, Homo sapien
caggctgtctcgagtgtctgccatc

SEQ ID NO: 3790927 - DNA, 25 bp, Homo sapien
tctccccaggctgtctcgagtgtct

SEQ ID NO: 3790928 - DNA, 25 bp, Homo sapien
gctgcccttggaccctggacgtcat

SEQ ID NO: 3790929 - DNA, 25 bp, Homo sapien
ctggaccgggacctccctcctctcg

SEQ ID NO: 3790930 - DNA, 25 bp, Homo sapien
ttggaccctggacgtcatacttccc

SEQ ID NO: 3790931 - DNA, 25 bp, Homo sapien
cagggcctggaacacgtcctccagg

SEQ ID NO: 3790932 - DNA, 25 bp, Homo sapien
cacagggcgcccgtgggcatccagc

SEQ ID NO: 3790933 - DNA, 25 bp, Homo sapien
cccacagggcgcccgtgggcatcca

SEQ ID NO: 3790934 - DNA, 25 bp, Homo sapien
tcctggaaccaagccagttcctcga

SEQ ID NO: 3790935 - DNA, 25 bp, Homo sapien
gctgctcctggaaccaagccagttc

SEQ ID NO: 3790936 - DNA, 25 bp, Homo sapien
ctgggggcatcaaggccactaaggc

SEQ ID NO: 3790937 - DNA, 25 bp, Homo sapien
tgggggcatcaaggccactaaggca

SEQ ID NO: 3790938 - DNA, 25 bp, Homo sapien
aggaagactttggggcagccccgca

SEQ ID NO: 3790939 - DNA, 25 bp, Homo sapien
accagggaccagtgaggagagcggc

SEQ ID NO: 3790940 - DNA, 25 bp, Homo sapien
cagggaccagtgaggagagcggcca

SEQ ID NO: 3790941 - DNA, 25 bp, Homo sapien
agggaccagtgaggagagcggccac

SEQ ID NO: 3790942 - DNA, 25 bp, Homo sapien
ccagggaccagtgaggagagcggcc

SEQ ID NO: 3790943 - DNA, 25 bp, Homo sapien
caacaggaaggcatagcaggcagag

SEQ ID NO: 3790944 - DNA, 25 bp, Homo sapien
tcctgcgatctaacagggcggacag

SEQ ID NO: 3790945 - DNA, 25 bp, Homo sapien
gagaccttcagccttggagaccaga

SEQ ID NO: 3790946 - DNA, 25 bp, Homo sapien
tcaggctcaaggttatggacttccc

SEQ ID NO: 3790947 - DNA, 25 bp, Homo sapien
ggctccacgcctcccaggcacagtg

SEQ ID NO: 3790948 - DNA, 25 bp, Homo sapien
gactcttcagccaccctgcggaaga

SEQ ID NO: 3790949 - DNA, 25 bp, Homo sapien
ccctcaaggagctccgaaggacggg

SEQ ID NO: 3790950 - DNA, 25 bp, Homo sapien
gcaggtgccccctgcggactcttca

SEQ ID NO: 3790951 - DNA, 25 bp, Homo sapien
ctgggctgtagggtccgttctcacg

SEQ ID NO: 3790952 - DNA, 25 bp, Homo sapien
ccgttctcacggtggtctcaaagcc

SEQ ID NO: 3790953 - DNA, 25 bp, Homo sapien
tagggtccgttctcacggtggtctc

SEQ ID NO: 3790954 - DNA, 25 bp, Homo sapien
ctgtagggtccgttctcacggtggt

SEQ ID NO: 3790955 - DNA, 25 bp, Homo sapien
cacagaggttagacttgtggtgcac

SEQ ID NO: 3790956 - DNA, 25 bp, Homo sapien
gaggtgacatagagacccagcttcc

SEQ ID NO: 3790957 - DNA, 25 bp, Homo sapien
gagcaccagtggaagttctcggctt

SEQ ID NO: 3790958 - DNA, 25 bp, Homo sapien
aagtgacgggccagatgcaggcaac

SEQ ID NO: 3790959 - DNA, 25 bp, Homo sapien
caggcctgcaacaggaagatcttgg

SEQ ID NO: 3790960 - DNA, 25 bp, Homo sapien
cccacggcaggcctgcaacaggaag

SEQ ID NO: 3790961 - DNA, 25 bp, Homo sapien
cagttgctcccggaactgggccagc

SEQ ID NO: 3790962 - DNA, 25 bp, Homo sapien
gcctcgggctgcacctcttgcccgt

SEQ ID NO: 3790963 - DNA, 25 bp, Homo sapien
ggaggtgcccgcagccagctccagt

SEQ ID NO: 3790964 - DNA, 25 bp, Homo sapien
cagctccagtaccaggggagagctg

SEQ ID NO: 3790965 - DNA, 25 bp, Homo sapien
gctccagtaccaggggagagctgtg

SEQ ID NO: 3790966 - DNA, 25 bp, Homo sapien
agctgtgggccccacaccagcatcc

SEQ ID NO: 3790967 - DNA, 25 bp, Homo sapien
ttgggcctcagcgtagatctgcagg

SEQ ID NO: 3790968 - DNA, 25 bp, Homo sapien
cttgggcctcagcgtagatctgcag

SEQ ID NO: 3790969 - DNA, 25 bp, Homo sapien
ggaggggtgcccctgcaggagctgc

SEQ ID NO: 3790970 - DNA, 25 bp, Homo sapien
tggaggggtgcccctgcaggagctg

SEQ ID NO: 3790971 - DNA, 25 bp, Homo sapien
ctggaggggtgcccctgcaggagct

SEQ ID NO: 3790972 - DNA, 25 bp, Homo sapien
cggctgagtagaccgtcaggatgtc

SEQ ID NO: 3790973 - DNA, 25 bp, Homo sapien
ctgagtagaccgtcaggatgtctgc

SEQ ID NO: 3790974 - DNA, 25 bp, Homo sapien
ctgcggctgagtagaccgtcaggat

SEQ ID NO: 3790975 - DNA, 25 bp, Homo sapien
cctctgcggctgagtagaccgtcag

SEQ ID NO: 3790976 - DNA, 25 bp, Homo sapien
tgagcccttgtcatcgcgataggcc

SEQ ID NO: 3790977 - DNA, 25 bp, Homo sapien
tctcccggggttggctctgaggacc

SEQ ID NO: 3790978 - DNA, 25 bp, Homo sapien
ttgtcatcgcgataggccacatagc

SEQ ID NO: 3790979 - DNA, 25 bp, Homo sapien
agcagctccagaaggtctctcccgg

SEQ ID NO: 3790980 - DNA, 25 bp, Homo sapien
cgccggagcgagctgcggatctcca

SEQ ID NO: 3790981 - DNA, 25 bp, Homo sapien
cagatatttattgcacggccacccc

SEQ ID NO: 3790982 - DNA, 25 bp, Homo sapien
tgccacgcctcgctctcagatgagg

SEQ ID NO: 3790983 - DNA, 25 bp, Homo sapien
tccaggcaggccttgcggagttcat

SEQ ID NO: 3790984 - DNA, 25 bp, Homo sapien
gaccacgaagggactcgaaccctca

SEQ ID NO: 3790985 - DNA, 25 bp, Homo sapien
tcaatcttctgatccggaatcagac

SEQ ID NO: 3790986 - DNA, 25 bp, Homo sapien
cgaaccctcaatcttctgatccgga

SEQ ID NO: 3790987 - DNA, 25 bp, Homo sapien
ggaatcagacgccttatccattagg

SEQ ID NO: 3790988 - DNA, 25 bp, Homo sapien
gccttatccattaggccaccggggc

SEQ ID NO: 3790989 - DNA, 25 bp, Homo sapien
tgccttatccattaggccaccgggg

SEQ ID NO: 3790990 - DNA, 25 bp, Homo sapien
ccttatccattaggccaccggggcg

SEQ ID NO: 3790991 - DNA, 25 bp, Homo sapien
aacccacaatccctggcttaggagg

SEQ ID NO: 3790992 - DNA, 25 bp, Homo sapien
cacaatccctggcttaggaggccaa

SEQ ID NO: 3790993 - DNA, 25 bp, Homo sapien
gtgggactcgaacccacaatccctg

SEQ ID NO: 3790994 - DNA, 25 bp, Homo sapien
cgaacccacaatccctggcttagga

SEQ ID NO: 3790995 - DNA, 25 bp, Homo sapien
gaacgtgagatgacataattcacag

SEQ ID NO: 3790996 - DNA, 25 bp, Homo sapien
cgtgagatgacataattcacagtat

SEQ ID NO: 3790997 - DNA, 25 bp, Homo sapien
caatggaacgtgagatgacataatt

SEQ ID NO: 3790998 - DNA, 25 bp, Homo sapien
gagatgacataattcacagtataca

SEQ ID NO: 3790999 - DNA, 25 bp, Homo sapien
ggacctctcgcacccaaagcgagaa

SEQ ID NO: 3791000 - DNA, 25 bp, Homo sapien
tgaacccgggacctctcgcacccaa

SEQ ID NO: 3791001 - DNA, 25 bp, Homo sapien
acccaaagcgagaatcataccccta

SEQ ID NO: 3791002 - DNA, 25 bp, Homo sapien
ccaaagcgagaatcatacccctaga

SEQ ID NO: 3791003 - DNA, 25 bp, Homo sapien
tccctaagcgagaaccacaccccta

SEQ ID NO: 3791004 - DNA, 25 bp, Homo sapien
tggtccctaagcgagaaccacaccc

SEQ ID NO: 3791005 - DNA, 25 bp, Homo sapien
tgtggtccctaagcgagaaccacac

SEQ ID NO: 3791006 - DNA, 25 bp, Homo sapien
ccctgtggtccctaagcgagaacca

SEQ ID NO: 3791007 - DNA, 25 bp, Homo sapien
catgctttgccgactgagctagcca

SEQ ID NO: 3791008 - DNA, 25 bp, Homo sapien
ccaacatggagctcgagcccacgac

SEQ ID NO: 3791009 - DNA, 25 bp, Homo sapien
atggagctcgagcccacgaccctga

SEQ ID NO: 3791010 - DNA, 25 bp, Homo sapien
ctttgccgactgagctagccaggct

SEQ ID NO: 3791011 - DNA, 25 bp, Homo sapien
tcctggatccaggactgagtactct

SEQ ID NO: 3791012 - DNA, 25 bp, Homo sapien
tgggagtgaatgaagacggtgtccg

SEQ ID NO: 3791013 - DNA, 25 bp, Homo sapien
actgcgggtacaggtgcttgactga

SEQ ID NO: 3791014 - DNA, 25 bp, Homo sapien
gacagcgcgcgaccggccgtttttc

SEQ ID NO: 3791015 - DNA, 25 bp, Homo sapien
caccaatccggcacaaatcggctga

SEQ ID NO: 3791016 - DNA, 25 bp, Homo sapien
aagtggatagagctcatcgccgtcc

SEQ ID NO: 3791017 - DNA, 25 bp, Homo sapien
cacaaatcggctgattccgaagtgg

SEQ ID NO: 3791018 - DNA, 25 bp, Homo sapien
gccgtccccaagtgattggcagaat

SEQ ID NO: 3791019 - DNA, 25 bp, Homo sapien
tgaacccgggacctctcgcacccga

SEQ ID NO: 3791020 - DNA, 25 bp, Homo sapien
ggacctctcgcacccgaagcgagaa

SEQ ID NO: 3791021 - DNA, 25 bp, Homo sapien
atcatacccctagaccaacgagcct

SEQ ID NO: 3791022 - DNA, 25 bp, Homo sapien
ctcgcacccgaagcgagaatcatac

SEQ ID NO: 3791023 - DNA, 25 bp, Homo sapien
gtggagctgagcgacccgggctgca

SEQ ID NO: 3791024 - DNA, 25 bp, Homo sapien
atacccggagcccatgtggagctga

SEQ ID NO: 3791025 - DNA, 25 bp, Homo sapien
cgtgcacactactcgatcactcaga

SEQ ID NO: 3791026 - DNA, 25 bp, Homo sapien
gggcgcgggactccctcgaggctga

SEQ ID NO: 3791027 - DNA, 25 bp, Homo sapien
ggtgacccctcacgttcagccccag

SEQ ID NO: 3791028 - DNA, 25 bp, Homo sapien
agtgtgtatggggtgacccctcacg

SEQ ID NO: 3791029 - DNA, 25 bp, Homo sapien
tgaatcaccataccaaacacctgga

SEQ ID NO: 3791030 - DNA, 25 bp, Homo sapien
tcttgggctggtgaatcaccatacc

SEQ ID NO: 3791031 - DNA, 25 bp, Homo sapien
gaagcgggtctgacccgtggattcc

SEQ ID NO: 3791032 - DNA, 25 bp, Homo sapien
tcgttcacacgaaatacctttgctg

SEQ ID NO: 3791033 - DNA, 25 bp, Homo sapien
agccgcagctgccaaactggagcaa

SEQ ID NO: 3791034 - DNA, 25 bp, Homo sapien
catccagccccgttggagggtgtgg

SEQ ID NO: 3791035 - DNA, 25 bp, Homo sapien
cgtggggctcgaacccacgaccctg

SEQ ID NO: 3791036 - DNA, 25 bp, Homo sapien
tcgaacccacgaccctgagattaag

SEQ ID NO: 3791037 - DNA, 25 bp, Homo sapien
tcatgctctaccgactgagctagcc

SEQ ID NO: 3791038 - DNA, 25 bp, Homo sapien
ctctaccgactgagctagccgggcg

SEQ ID NO: 3791039 - DNA, 25 bp, Homo sapien
tggagctcctcactacgcgacgcgg

SEQ ID NO: 3791040 - DNA, 25 bp, Homo sapien
gcagcgtttccaaggcgggcgtcca

SEQ ID NO: 3791041 - DNA, 25 bp, Homo sapien
atgtcccgccggagctggagctcct

SEQ ID NO: 3791042 - DNA, 25 bp, Homo sapien
cagtggtcgcggttcgcggaccctc

SEQ ID NO: 3791043 - DNA, 25 bp, Homo sapien
cccggtgtcttatgtattgtctgct

SEQ ID NO: 3791044 - DNA, 25 bp, Homo sapien
aggcatctctcccggtgtcttatgt

SEQ ID NO: 3791045 - DNA, 25 bp, Homo sapien
tctctcccggtgtcttatgtattgt

SEQ ID NO: 3791046 - DNA, 25 bp, Homo sapien
tctcccggtgtcttatgtattgtct

SEQ ID NO: 3791047 - DNA, 25 bp, Homo sapien
gactatggagcataaacgctgcttg

SEQ ID NO: 3791048 - DNA, 25 bp, Homo sapien
ctgggactatggagcataaacgctg

SEQ ID NO: 3791049 - DNA, 25 bp, Homo sapien
tgggactatggagcataaacgctgc

SEQ ID NO: 3791050 - DNA, 25 bp, Homo sapien
gggactatggagcataaacgctgct

SEQ ID NO: 3791051 - DNA, 25 bp, Homo sapien
ggacctctcgcacccaaagcgagaa

SEQ ID NO: 3791052 - DNA, 25 bp, Homo sapien
tgaacccgggacctctcgcacccaa

SEQ ID NO: 3791053 - DNA, 25 bp, Homo sapien
ccaaagcgagaatcatacccctaga

SEQ ID NO: 3791054 - DNA, 25 bp, Homo sapien
atcatacccctagaccaacgagccg

SEQ ID NO: 3791055 - DNA, 25 bp, Homo sapien
gcagccatactctggaatcctagaa

SEQ ID NO: 3791056 - DNA, 25 bp, Homo sapien
aaatttatgcccctgtagcgaccaa

SEQ ID NO: 3791057 - DNA, 25 bp, Homo sapien
tttcaccaaggcgagcgattcaggc

SEQ ID NO: 3791058 - DNA, 25 bp, Homo sapien
tttaaccgcagttgccgcagttggc

SEQ ID NO: 3791059 - DNA, 25 bp, Homo sapien
atcatacccctagaccaacgagcca

SEQ ID NO: 3791060 - DNA, 25 bp, Homo sapien
ggatttgaacccgggacctctcgca

SEQ ID NO: 3791061 - DNA, 25 bp, Homo sapien
agaatcatacccctagaccaacgag

SEQ ID NO: 3791062 - DNA, 25 bp, Homo sapien
ctcgcaccctaagcgagaatcatac

SEQ ID NO: 3791063 - DNA, 25 bp, Homo sapien
tgcgctgaggtctgtaagtcgagcc

SEQ ID NO: 3791064 - DNA, 25 bp, Homo sapien
acgtcctgcgctgaggtctgtaagt

SEQ ID NO: 3791065 - DNA, 25 bp, Homo sapien
ctgaggtctgtaagtcgagccgaat

SEQ ID NO: 3791066 - DNA, 25 bp, Homo sapien
tttgcagggcgtccacgtcctgcgc

SEQ ID NO: 3791067 - DNA, 25 bp, Homo sapien
gagatgacccgccagaggctccttc

SEQ ID NO: 3791068 - DNA, 25 bp, Homo sapien
tccgcagggcgctggcataaatctg

SEQ ID NO: 3791069 - DNA, 25 bp, Homo sapien
taaatctgtattctctgccgtccgc

SEQ ID NO: 3791070 - DNA, 25 bp, Homo sapien
cgctctgcgatctcccataaatgga

SEQ ID NO: 3791071 - DNA, 25 bp, Homo sapien
taagagtcccatgctctaccgactg

SEQ ID NO: 3791072 - DNA, 25 bp, Homo sapien
ctctaccgactgagctagccgggct

SEQ ID NO: 3791073 - DNA, 25 bp, Homo sapien
cccacgaccctgagattaagagtcc

SEQ ID NO: 3791074 - DNA, 25 bp, Homo sapien
cgtggggctcgaacccacgaccctg

SEQ ID NO: 3791075 - DNA, 25 bp, Homo sapien
gtacttggagcgataaagctcaagc

SEQ ID NO: 3791076 - DNA, 25 bp, Homo sapien
cagccgtggagtacttggagcgata

SEQ ID NO: 3791077 - DNA, 25 bp, Homo sapien
ttttctttgtggcagccgtggagta

SEQ ID NO: 3791078 - DNA, 25 bp, Homo sapien
ttctttgtggcagccgtggagtact

SEQ ID NO: 3791079 - DNA, 25 bp, Homo sapien
cgggacctctcgcatcctaagcgag

SEQ ID NO: 3791080 - DNA, 25 bp, Homo sapien
gacctctcgcatcctaagcgagaat

SEQ ID NO: 3791081 - DNA, 25 bp, Homo sapien
gggacctctcgcatcctaagcgaga

SEQ ID NO: 3791082 - DNA, 25 bp, Homo sapien
acccgggacctctcgcatcctaagc

SEQ ID NO: 3791083 - DNA, 25 bp, Homo sapien
gggacgccatagtgaacgagagaaa

SEQ ID NO: 3791084 - DNA, 25 bp, Homo sapien
caggcgcccgaaggaactagatttt

SEQ ID NO: 3791085 - DNA, 25 bp, Homo sapien
ttcttgcaacgcagcagcctccatt

SEQ ID NO: 3791086 - DNA, 25 bp, Homo sapien
ttcgcggagcccgactcgtctgatc

SEQ ID NO: 3791087 - DNA, 25 bp, Homo sapien
cagtaccttatccatcaggccactg

SEQ ID NO: 3791088 - DNA, 25 bp, Homo sapien
ttaggaggccagtaccttatccatc

SEQ ID NO: 3791089 - DNA, 25 bp, Homo sapien
ggccagtaccttatccatcaggcca

SEQ ID NO: 3791090 - DNA, 25 bp, Homo sapien
ggaggccagtaccttatccatcagg

SEQ ID NO: 3791091 - DNA, 25 bp, Homo sapien
gcacttgctggaccccaaatcctgg

SEQ ID NO: 3791092 - DNA, 25 bp, Homo sapien
cgaggtctttcatgcccaggagtca

SEQ ID NO: 3791093 - DNA, 25 bp, Homo sapien
aaatcctggaccgatgccaagactc

SEQ ID NO: 3791094 - DNA, 25 bp, Homo sapien
tgagtgacacgccaatctggacagc

SEQ ID NO: 3791095 - DNA, 25 bp, Homo sapien
ctctgagcaagaagcaccctcctgg

SEQ ID NO: 3791096 - DNA, 25 bp, Homo sapien
atgcgcttcccggagcacggctggc

SEQ ID NO: 3791097 - DNA, 25 bp, Homo sapien
ttctctcctgtttccgtagcggcag

SEQ ID NO: 3791098 - DNA, 25 bp, Homo sapien
cgccggaggcgcagggtctgagatt

SEQ ID NO: 3791099 - DNA, 25 bp, Homo sapien
tcttgtgctctaccggctgagctag

SEQ ID NO: 3791100 - DNA, 25 bp, Homo sapien
gagtcttgtgctctaccggctgagc

SEQ ID NO: 3791101 - DNA, 25 bp, Homo sapien
ttaagagtcttgtgctctaccggct

SEQ ID NO: 3791102 - DNA, 25 bp, Homo sapien
aagagtcttgtgctctaccggctga

SEQ ID NO: 3791103 - DNA, 25 bp, Homo sapien
cagacaaagaagacgaaatgcaaaa

SEQ ID NO: 3791104 - DNA, 25 bp, Homo sapien
ggcagacaaagaagacgaaatgcaa

SEQ ID NO: 3791105 - DNA, 25 bp, Homo sapien
gaggcagacaaagaagacgaaatgc

SEQ ID NO: 3791106 - DNA, 25 bp, Homo sapien
caaagaagacgaaatgcaaaagctt

SEQ ID NO: 3791107 - DNA, 25 bp, Homo sapien
catgaaaacgaaatacatctgtgtg

SEQ ID NO: 3791108 - DNA, 25 bp, Homo sapien
tctgagtctcgagtatgtgattggc

SEQ ID NO: 3791109 - DNA, 25 bp, Homo sapien
ggcacacggcgacaaagtggtcata

SEQ ID NO: 3791110 - DNA, 25 bp, Homo sapien
aggaaattgtccatgtccacgaaca

SEQ ID NO: 3791111 - DNA, 25 bp, Homo sapien
caggtgatgtgcatataagaagcca

SEQ ID NO: 3791112 - DNA, 25 bp, Homo sapien
tgtatacaacacagtagccatagtg

SEQ ID NO: 3791113 - DNA, 25 bp, Homo sapien
ggtgatcatgaccagggcaccctca

SEQ ID NO: 3791114 - DNA, 25 bp, Homo sapien
cagaaggacattcaggttggcaacc

SEQ ID NO: 3791115 - DNA, 25 bp, Homo sapien
cagaaaacaccaccctgccaactac

SEQ ID NO: 3791116 - DNA, 25 bp, Homo sapien
agacagaaaacaccaccctgccaac

SEQ ID NO: 3791117 - DNA, 25 bp, Homo sapien
gacagaaaacaccaccctgccaact

SEQ ID NO: 3791118 - DNA, 25 bp, Homo sapien
tcagacagaaaacaccaccctgcca

SEQ ID NO: 3791119 - DNA, 25 bp, Homo sapien
ctgcatagaagacagtgaattcaga

SEQ ID NO: 3791120 - DNA, 25 bp, Homo sapien
agacagtgaattcagaaacatacac

SEQ ID NO: 3791121 - DNA, 25 bp, Homo sapien
catagaagacagtgaattcagaaac

SEQ ID NO: 3791122 - DNA, 25 bp, Homo sapien
gaagacagtgaattcagaaacatac

SEQ ID NO: 3791123 - DNA, 25 bp, Homo sapien
tcactggtttgtccctctcatatgt

SEQ ID NO: 3791124 - DNA, 25 bp, Homo sapien
gaggaactcggagacactcactggt

SEQ ID NO: 3791125 - DNA, 25 bp, Homo sapien
ggagacactcactggtttgtccctc

SEQ ID NO: 3791126 - DNA, 25 bp, Homo sapien
agaggaggaactcggagacactcac

SEQ ID NO: 3791127 - DNA, 25 bp, Homo sapien
ggtttgagtcctgagtatgtgattg

SEQ ID NO: 3791128 - DNA, 25 bp, Homo sapien
aggagatggtttgagtcctgagtat

SEQ ID NO: 3791129 - DNA, 25 bp, Homo sapien
ggacggtggtggagaagcagttgtc

SEQ ID NO: 3791130 - DNA, 25 bp, Homo sapien
agttgtccacaaaggacatgttgct

SEQ ID NO: 3791131 - DNA, 25 bp, Homo sapien
ttgtggatgggaccctcaggacaac

SEQ ID NO: 3791132 - DNA, 25 bp, Homo sapien
gaaattgtccatgtcagcaagctca

SEQ ID NO: 3791133 - DNA, 25 bp, Homo sapien
tagggcagcctcagtaagaatcatc

SEQ ID NO: 3791134 - DNA, 25 bp, Homo sapien
cagcagagcattcgagttggcaacc

SEQ ID NO: 3791135 - DNA, 25 bp, Homo sapien
ttgtatagtcatctcactgttgtta

SEQ ID NO: 3791136 - DNA, 25 bp, Homo sapien
tctgttaacttttggtaaaatgaca

SEQ ID NO: 3791137 - DNA, 25 bp, Homo sapien
aaaggagtgcgacggcagtatccgc

SEQ ID NO: 3791138 - DNA, 25 bp, Homo sapien
tatctctcagaagttgttaaattct

SEQ ID NO: 3791139 - DNA, 25 bp, Homo sapien
tccccagattgacgttcaaggtggc

SEQ ID NO: 3791140 - DNA, 25 bp, Homo sapien
tttcctgcctggtgttgtgatatct

SEQ ID NO: 3791141 - DNA, 25 bp, Homo sapien
tgtactacttcctggagcagcaaga

SEQ ID NO: 3791142 - DNA, 25 bp, Homo sapien
ggaaggttccagacaatatcgcctc

SEQ ID NO: 3791143 - DNA, 25 bp, Homo sapien
gatcaggaaggcatatgacacccgc

SEQ ID NO: 3791144 - DNA, 25 bp, Homo sapien
tgctctggaatctaggccttgaaga

SEQ ID NO: 3791145 - DNA, 25 bp, Homo sapien
ctcggcagaagacgcactttcggca

SEQ ID NO: 3791146 - DNA, 25 bp, Homo sapien
tctgggagtgttccgcgcatgtgca

SEQ ID NO: 3791147 - DNA, 25 bp, Homo sapien
agtaatttactcacgtcacacggcc

SEQ ID NO: 3791148 - DNA, 25 bp, Homo sapien
aattgcgtgcaggtcgggtctcgct

SEQ ID NO: 3791149 - DNA, 25 bp, Homo sapien
ttaaaaagtagtggccggtctggca

SEQ ID NO: 3791150 - DNA, 25 bp, Homo sapien
gaacagcgatcttgcctgacacgtg

SEQ ID NO: 3791151 - DNA, 25 bp, Homo sapien
taaacatgaaagaagggcgacaggc

SEQ ID NO: 3791152 - DNA, 25 bp, Homo sapien
agctataggctgttgcggctgccaa

SEQ ID NO: 3791153 - DNA, 25 bp, Homo sapien
tttctaactaactggcaagtgtggc

SEQ ID NO: 3791154 - DNA, 25 bp, Homo sapien
gaaggtgaatacagcctcgatatgc

SEQ ID NO: 3791155 - DNA, 25 bp, Homo sapien
agtgcccctgagaacaccatgaagg

SEQ ID NO: 3791156 - DNA, 25 bp, Homo sapien
tagcacacagaaattcaccgcactg

SEQ ID NO: 3791157 - DNA, 25 bp, Homo sapien
gccagcgtcacaccctgctatgaag

SEQ ID NO: 3791158 - DNA, 25 bp, Homo sapien
tgctatgaagcactcacatgaggca

SEQ ID NO: 3791159 - DNA, 25 bp, Homo sapien
tgaggcaacgtaaagcacacacaat

SEQ ID NO: 3791160 - DNA, 25 bp, Homo sapien
taggtatatcacttggccagcgtca

SEQ ID NO: 3791161 - DNA, 25 bp, Homo sapien
ttgttgttatatctgttacaataca

SEQ ID NO: 3791162 - DNA, 25 bp, Homo sapien
gttgttatatctgttacaatacatc

SEQ ID NO: 3791163 - DNA, 25 bp, Homo sapien
gttatatctgttacaatacatctca

SEQ ID NO: 3791164 - DNA, 25 bp, Homo sapien
tatatctgttacaatacatctcaca

SEQ ID NO: 3791165 - DNA, 25 bp, Homo sapien
tcttgtttgctaggagaacttgcac

SEQ ID NO: 3791166 - DNA, 25 bp, Homo sapien
gctagtgtaagaagtctggttaccc

SEQ ID NO: 3791167 - DNA, 25 bp, Homo sapien
ggttaccctgagagcaccatgctgg

SEQ ID NO: 3791168 - DNA, 25 bp, Homo sapien
gaaatacagatgtggtgtgacctcc

SEQ ID NO: 3791169 - DNA, 25 bp, Homo sapien
aatctcagcgcgcaagttaggcgtc

SEQ ID NO: 3791170 - DNA, 25 bp, Homo sapien
gcctgctcgtgaccaatttccgggt

SEQ ID NO: 3791171 - DNA, 25 bp, Homo sapien
ctatatagaggacccacgcaagact

SEQ ID NO: 3791172 - DNA, 25 bp, Homo sapien
cccatgtaaggttggacggcgccag

SEQ ID NO: 3791173 - DNA, 25 bp, Homo sapien
tccttcgtgcgcatctcaggccgaa

SEQ ID NO: 3791174 - DNA, 25 bp, Homo sapien
tccagcttcactatcaggagccctt

SEQ ID NO: 3791175 - DNA, 25 bp, Homo sapien
gaagcggaaccgtctgaagcgcaag

SEQ ID NO: 3791176 - DNA, 25 bp, Homo sapien
gaagccacccatggcaaagctcttg

SEQ ID NO: 3791177 - DNA, 25 bp, Homo sapien
ggaaacagggcactcttcactgctt

SEQ ID NO: 3791178 - DNA, 25 bp, Homo sapien
gctggcgatctaactccatggctaa

SEQ ID NO: 3791179 - DNA, 25 bp, Homo sapien
gaaaacaggccgaaagagatcaagt

SEQ ID NO: 3791180 - DNA, 25 bp, Homo sapien
cagattgaggatttgaacgctggcg

SEQ ID NO: 3791181 - DNA, 25 bp, Homo sapien
taggtgcttctattcctcactatag

SEQ ID NO: 3791182 - DNA, 25 bp, Homo sapien
cagggcctcggtgccaaattatctt

SEQ ID NO: 3791183 - DNA, 25 bp, Homo sapien
tcaaagttcacaattaacggaggcc

SEQ ID NO: 3791184 - DNA, 25 bp, Homo sapien
ggaccaatgacctcagggcctcggt

SEQ ID NO: 3791185 - DNA, 25 bp, Homo sapien
ccagcttgaagctcggtgactctcg

SEQ ID NO: 3791186 - DNA, 25 bp, Homo sapien
ctcggtgactctcgtgctgtttcca

SEQ ID NO: 3791187 - DNA, 25 bp, Homo sapien
acttctgttccccgcccatggtttg

SEQ ID NO: 3791188 - DNA, 25 bp, Homo sapien
cattggctccagcttgaagctcggt

SEQ ID NO: 3791189 - DNA, 25 bp, Homo sapien
aaaaagagaaagccagggagcagat

SEQ ID NO: 3791190 - DNA, 25 bp, Homo sapien
aagagaaagccagggagcagataat

SEQ ID NO: 3791191 - DNA, 25 bp, Homo sapien
aggaaaaagagaaagccagggagca

SEQ ID NO: 3791192 - DNA, 25 bp, Homo sapien
gaggaaaaagagaaagccagggagc

SEQ ID NO: 3791193 - DNA, 25 bp, Homo sapien
ctggggcccagtcatctccttgtct

SEQ ID NO: 3791194 - DNA, 25 bp, Homo sapien
ccagtcatctccttgtcttccatgt

SEQ ID NO: 3791195 - DNA, 25 bp, Homo sapien
gggcccagtcatctccttgtcttcc

SEQ ID NO: 3791196 - DNA, 25 bp, Homo sapien
cagtcatctccttgtcttccatgtt

SEQ ID NO: 3791197 - DNA, 25 bp, Homo sapien
ctgaaacagcacaagatctccttta

SEQ ID NO: 3791198 - DNA, 25 bp, Homo sapien
tgaaacagcacaagatctcctttag

SEQ ID NO: 3791199 - DNA, 25 bp, Homo sapien
gaaacagcacaagatctcctttagc

SEQ ID NO: 3791200 - DNA, 25 bp, Homo sapien
cagtgagtccacattctcataactc

SEQ ID NO: 3791201 - DNA, 25 bp, Homo sapien
ataactctcctgcaccgtgtccctg

SEQ ID NO: 3791202 - DNA, 25 bp, Homo sapien
gatgtacattgccacgtcctctaag

SEQ ID NO: 3791203 - DNA, 25 bp, Homo sapien
gggccctcttactaggatcctgatg

SEQ ID NO: 3791204 - DNA, 25 bp, Homo sapien
gaatgttgatcctactacccctgaa

SEQ ID NO: 3791205 - DNA, 25 bp, Homo sapien
gtgaatgaataacgggcaggaccct

SEQ ID NO: 3791206 - DNA, 25 bp, Homo sapien
caggaccctggtcagaaatggcgca

SEQ ID NO: 3791207 - DNA, 25 bp, Homo sapien
ccctaggaagtgcacatggctcaga

SEQ ID NO: 3791208 - DNA, 25 bp, Homo sapien
ggaatatacacaaactgttcccagt

SEQ ID NO: 3791209 - DNA, 25 bp, Homo sapien
tagggaaacagtcttgttccctgcc

SEQ ID NO: 3791210 - DNA, 25 bp, Homo sapien
aaatctgacagcagttacttggaat

SEQ ID NO: 3791211 - DNA, 25 bp, Homo sapien
gtactgccactttcctctaccaggg

SEQ ID NO: 3791212 - DNA, 25 bp, Homo sapien
tctggacactgggatcccatagctt

SEQ ID NO: 3791213 - DNA, 25 bp, Homo sapien
actgggatcccatagctttcctcct

SEQ ID NO: 3791214 - DNA, 25 bp, Homo sapien
acactgggatcccatagctttcctc

SEQ ID NO: 3791215 - DNA, 25 bp, Homo sapien
tggacactgggatcccatagctttc

SEQ ID NO: 3791216 - DNA, 25 bp, Homo sapien
tccaggttctcaaatttctcttctc

SEQ ID NO: 3791217 - DNA, 25 bp, Homo sapien
cttccaggttctcaaatttctcttc

SEQ ID NO: 3791218 - DNA, 25 bp, Homo sapien
ttccaggttctcaaatttctcttct

SEQ ID NO: 3791219 - DNA, 25 bp, Homo sapien
ctcgggcctggtcaggaagcagcac

SEQ ID NO: 3791220 - DNA, 25 bp, Homo sapien
gatgttctcagagcatacagacgga

SEQ ID NO: 3791221 - DNA, 25 bp, Homo sapien
aatccccttgcgaccggtcatgagg

SEQ ID NO: 3791222 - DNA, 25 bp, Homo sapien
cagcacctgagggtggatgttctca

SEQ ID NO: 3791223 - DNA, 25 bp, Homo sapien
gtcgccccagttctctgccacttga

SEQ ID NO: 3791224 - DNA, 25 bp, Homo sapien
cttcggtcgccccagttctctgcca

SEQ ID NO: 3791225 - DNA, 25 bp, Homo sapien
tctctgccacttgaggctcctgcca

SEQ ID NO: 3791226 - DNA, 25 bp, Homo sapien
ctgcagttccttcggtcgccccagt

SEQ ID NO: 3791227 - DNA, 25 bp, Homo sapien
cacactcgggacacttataaggtcg

SEQ ID NO: 3791228 - DNA, 25 bp, Homo sapien
tttgccacacaagggacataaatgg

SEQ ID NO: 3791229 - DNA, 25 bp, Homo sapien
tagtgacaggaaacgtgggttccca

SEQ ID NO: 3791230 - DNA, 25 bp, Homo sapien
tggaactgtgagcaaagatctcccc

SEQ ID NO: 3791231 - DNA, 25 bp, Homo sapien
ctctggtgcctgattaaattggatc

SEQ ID NO: 3791232 - DNA, 25 bp, Homo sapien
tccgcactcatgacaggtatagggt

SEQ ID NO: 3791233 - DNA, 25 bp, Homo sapien
gatgactcataagacgggaactccg

SEQ ID NO: 3791234 - DNA, 25 bp, Homo sapien
tcccgtatgcgttctcaggtggcga

SEQ ID NO: 3791235 - DNA, 25 bp, Homo sapien
ctggggcaaagagaaaccccactgt

SEQ ID NO: 3791236 - DNA, 25 bp, Homo sapien
gaggtcatttggtcggctgggcagg

SEQ ID NO: 3791237 - DNA, 25 bp, Homo sapien
tcggctgggcagggaataccagctc

SEQ ID NO: 3791238 - DNA, 25 bp, Homo sapien
aacaggctcctctgaatatgccacc

SEQ ID NO: 3791239 - DNA, 25 bp, Homo sapien
acaggctcctctgaatatgccacct

SEQ ID NO: 3791240 - DNA, 25 bp, Homo sapien
tcctgttaggccatcgtagggcacg

SEQ ID NO: 3791241 - DNA, 25 bp, Homo sapien
tacatgtgtaatctgccaatgggca

SEQ ID NO: 3791242 - DNA, 25 bp, Homo sapien
ttaacagagaattccaccctgaggt

SEQ ID NO: 3791243 - DNA, 25 bp, Homo sapien
tggacagtcaggtgcccaaatcgca

SEQ ID NO: 3791244 - DNA, 25 bp, Homo sapien
ggaatctcattctccacaaagggtt

SEQ ID NO: 3791245 - DNA, 25 bp, Homo sapien
cagaggggagacagatcaacactcg

SEQ ID NO: 3791246 - DNA, 25 bp, Homo sapien
caacactcgggggtctagacagagg

SEQ ID NO: 3791247 - DNA, 25 bp, Homo sapien
cagatcaacactcgggggtctagac

SEQ ID NO: 3791248 - DNA, 25 bp, Homo sapien
ggagacagatcaacactcgggggtc

SEQ ID NO: 3791249 - DNA, 25 bp, Homo sapien
tcagttgcaagaccaaaatatcctg

SEQ ID NO: 3791250 - DNA, 25 bp, Homo sapien
ggaccatcttaacttccaccctgga

SEQ ID NO: 3791251 - DNA, 25 bp, Homo sapien
gtttcccacagatacacactactag

SEQ ID NO: 3791252 - DNA, 25 bp, Homo sapien
agaaggcttgagctcgggaactcaa

SEQ ID NO: 3791253 - DNA, 25 bp, Homo sapien
ctttttcacccgaagaacagctgga

SEQ ID NO: 3791254 - DNA, 25 bp, Homo sapien
aaacacatactaaactgaggcaggg

SEQ ID NO: 3791255 - DNA, 25 bp, Homo sapien
tcaatggagcgctgtttccatgact

SEQ ID NO: 3791256 - DNA, 25 bp, Homo sapien
taaaaaactggctcagacaaccaaa

SEQ ID NO: 3791257 - DNA, 25 bp, Homo sapien
agctctcgggagaattcagtatcag

SEQ ID NO: 3791258 - DNA, 25 bp, Homo sapien
cctgcagtaagggaatcagacctac

SEQ ID NO: 3791259 - DNA, 25 bp, Homo sapien
gagagaacaagcaagcacgcaagtg

SEQ ID NO: 3791260 - DNA, 25 bp, Homo sapien
agccgaaccgtatcagacctcatgg

SEQ ID NO: 3791261 - DNA, 25 bp, Homo sapien
gaacttctccgagaagtccaggcac

SEQ ID NO: 3791262 - DNA, 25 bp, Homo sapien
gcggttggaggaggctcgtgggccc

SEQ ID NO: 3791263 - DNA, 25 bp, Homo sapien
ggcactcacacttgcgccgggtgct

SEQ ID NO: 3791264 - DNA, 25 bp, Homo sapien
tctctggttctgcaaatcactcctg

SEQ ID NO: 3791265 - DNA, 25 bp, Homo sapien
tgagggcgaaggtagtaattactct

SEQ ID NO: 3791266 - DNA, 25 bp, Homo sapien
tgggtgagggcgaaggtagtaatta

SEQ ID NO: 3791267 - DNA, 25 bp, Homo sapien
tccataatgactgcaagctggggtt

SEQ ID NO: 3791268 - DNA, 25 bp, Homo sapien
tactctttgcttgatgttttgcctc

SEQ ID NO: 3791269 - DNA, 25 bp, Homo sapien
tgatgccacacctgagtttcagaga

SEQ ID NO: 3791270 - DNA, 25 bp, Homo sapien
ctttgttgatgccacacctgagttt

SEQ ID NO: 3791271 - DNA, 25 bp, Homo sapien
gccacacctgagtttcagagattcc

SEQ ID NO: 3791272 - DNA, 25 bp, Homo sapien
acacctgagtttcagagattccact

SEQ ID NO: 3791273 - DNA, 25 bp, Homo sapien
aactaagttggatgatgatagggtg

SEQ ID NO: 3791274 - DNA, 25 bp, Homo sapien
tgctgtaagagagagtttggactac

SEQ ID NO: 3791275 - DNA, 25 bp, Homo sapien
tgattttcaaggcttagaacatggg

SEQ ID NO: 3791276 - DNA, 25 bp, Homo sapien
gggattatagagaaattcttgaaaa

SEQ ID NO: 3791277 - DNA, 25 bp, Homo sapien
ggaaagatatctgcctaccagggaa

SEQ ID NO: 3791278 - DNA, 25 bp, Homo sapien
gacgaggacgtcagggcattgttac

SEQ ID NO: 3791279 - DNA, 25 bp, Homo sapien
tgtgcaaatgcagacggaactcata

SEQ ID NO: 3791280 - DNA, 25 bp, Homo sapien
cgaaatcggcatgcaattgggaacc

SEQ ID NO: 3791281 - DNA, 25 bp, Homo sapien
tcagtccattatcctccaatacaat

SEQ ID NO: 3791282 - DNA, 25 bp, Homo sapien
cagacaggactttgcaactggcagc

SEQ ID NO: 3791283 - DNA, 25 bp, Homo sapien
gctttctgagtgcataagacctcca

SEQ ID NO: 3791284 - DNA, 25 bp, Homo sapien
aaatgatcactcatggcttgcagga

SEQ ID NO: 3791285 - DNA, 25 bp, Homo sapien
gctcggagcccttatccaggtagat

SEQ ID NO: 3791286 - DNA, 25 bp, Homo sapien
gaaacttatcacacctgtcttgtgg

SEQ ID NO: 3791287 - DNA, 25 bp, Homo sapien
tgtcagggtccctgtagctcggagc

SEQ ID NO: 3791288 - DNA, 25 bp, Homo sapien
caagattcggtacaactgttcctga

SEQ ID NO: 3791289 - DNA, 25 bp, Homo sapien
caatacaaaaaagtaaatcctggag

SEQ ID NO: 3791290 - DNA, 25 bp, Homo sapien
tacaaaaaagtaaatcctggagcac

SEQ ID NO: 3791291 - DNA, 25 bp, Homo sapien
aaaaagtaaatcctggagcaccatt

SEQ ID NO: 3791292 - DNA, 25 bp, Homo sapien
caaaaaagtaaatcctggagcacca

SEQ ID NO: 3791293 - DNA, 25 bp, Homo sapien
gctatgtgtagccaatattgcagag

SEQ ID NO: 3791294 - DNA, 25 bp, Homo sapien
aatgtcagtctgtaccagttgaggg

SEQ ID NO: 3791295 - DNA, 25 bp, Homo sapien
tgcagcgcctaacatagtcacctgg

SEQ ID NO: 3791296 - DNA, 25 bp, Homo sapien
tcacctggtaagataggcattccac

SEQ ID NO: 3791297 - DNA, 25 bp, Homo sapien
gctttctgaggctcaaacgcaagcc

SEQ ID NO: 3791298 - DNA, 25 bp, Homo sapien
ggaggccgctcctcgctttctgagg

SEQ ID NO: 3791299 - DNA, 25 bp, Homo sapien
ccagcttggcttccgtggaggccgc

SEQ ID NO: 3791300 - DNA, 25 bp, Homo sapien
aaaggccgccgatctgaggagcgca

SEQ ID NO: 3791301 - DNA, 25 bp, Homo sapien
ggatgccaccggtattcaaagaagt

SEQ ID NO: 3791302 - DNA, 25 bp, Homo sapien
tgacatcggccggacacggaaatgc

SEQ ID NO: 3791303 - DNA, 25 bp, Homo sapien
caccgaaattctgcccaggatgcca

SEQ ID NO: 3791304 - DNA, 25 bp, Homo sapien
tgaagtgagccagcagaaacggcac

SEQ ID NO: 3791305 - DNA, 25 bp, Homo sapien
gccaggatggtagagcacaccagta

SEQ ID NO: 3791306 - DNA, 25 bp, Homo sapien
gatttaactggtgtgcctcctatcc

SEQ ID NO: 3791307 - DNA, 25 bp, Homo sapien
taagaaaattggcacccactggctg

SEQ ID NO: 3791308 - DNA, 25 bp, Homo sapien
cacaccagtagttctagctcaggag

SEQ ID NO: 3791309 - DNA, 25 bp, Homo sapien
gtttaacaaatgagatcctgtctgg

SEQ ID NO: 3791310 - DNA, 25 bp, Homo sapien
caattggtaccacgtttaacaaatg

SEQ ID NO: 3791311 - DNA, 25 bp, Homo sapien
ctgctcctgtgttaagacacccaat

SEQ ID NO: 3791312 - DNA, 25 bp, Homo sapien
tcctgtgttaagacacccaattggt

SEQ ID NO: 3791313 - DNA, 25 bp, Homo sapien
tgagggtccaagtacgcagccactt

SEQ ID NO: 3791314 - DNA, 25 bp, Homo sapien
caagagctcttaggatcgagacagt

SEQ ID NO: 3791315 - DNA, 25 bp, Homo sapien
gaaattccggaagtgccagcaagag

SEQ ID NO: 3791316 - DNA, 25 bp, Homo sapien
cctgggcagaatagtcaggaactgc

SEQ ID NO: 3791317 - DNA, 25 bp, Homo sapien
ctgtacatgtcaggaatctttcttc

SEQ ID NO: 3791318 - DNA, 25 bp, Homo sapien
cactgtacatgtcaggaatctttct

SEQ ID NO: 3791319 - DNA, 25 bp, Homo sapien
ctgcatcctatttcactgtacatgt

SEQ ID NO: 3791320 - DNA, 25 bp, Homo sapien
gcatcctatttcactgtacatgtca

SEQ ID NO: 3791321 - DNA, 25 bp, Homo sapien
tctccttggccaagccagactaggc

SEQ ID NO: 3791322 - DNA, 25 bp, Homo sapien
cctcagcctcgaggatagccgggat

SEQ ID NO: 3791323 - DNA, 25 bp, Homo sapien
tctgtgggcctgtagtttcaagtcc

SEQ ID NO: 3791324 - DNA, 25 bp, Homo sapien
taaggccagggaagtatctaccaca

SEQ ID NO: 3791325 - DNA, 25 bp, Homo sapien
tgagtcactgcacccggcccgtttt

SEQ ID NO: 3791326 - DNA, 25 bp, Homo sapien
tgggctcaggggatctgtctgcctt

SEQ ID NO: 3791327 - DNA, 25 bp, Homo sapien
ccaggctgggctcaggggatctgtc

SEQ ID NO: 3791328 - DNA, 25 bp, Homo sapien
ggctgggctcaggggatctgtctgc

SEQ ID NO: 3791329 - DNA, 25 bp, Homo sapien
gttgacttcaatcccacagttgtgg

SEQ ID NO: 3791330 - DNA, 25 bp, Homo sapien
cagacccgaggtcagcagatgtgtc

SEQ ID NO: 3791331 - DNA, 25 bp, Homo sapien
tgattatccctatagccagcgaagg

SEQ ID NO: 3791332 - DNA, 25 bp, Homo sapien
tctactatagggaggacattaccca

SEQ ID NO: 3791333 - DNA, 25 bp, Homo sapien
gaaataattcccatccttgttacca

SEQ ID NO: 3791334 - DNA, 25 bp, Homo sapien
tagaaataattcccatccttgttac

SEQ ID NO: 3791335 - DNA, 25 bp, Homo sapien
ctagaaataattcccatccttgtta

SEQ ID NO: 3791336 - DNA, 25 bp, Homo sapien
aataattcccatccttgttaccaca

SEQ ID NO: 3791337 - DNA, 25 bp, Homo sapien
tcatcttgggatacgcccactggtt

SEQ ID NO: 3791338 - DNA, 25 bp, Homo sapien
ccactggttgggactctgttggctt

SEQ ID NO: 3791339 - DNA, 25 bp, Homo sapien
cttgcagaccctcgtatgtattcca

SEQ ID NO: 3791340 - DNA, 25 bp, Homo sapien
tatgagtattcctgctgagctgttc

SEQ ID NO: 3791341 - DNA, 25 bp, Homo sapien
ggctggttttacaaatccacagagc

SEQ ID NO: 3791342 - DNA, 25 bp, Homo sapien
gctgcctggaaggacatcatagttg

SEQ ID NO: 3791343 - DNA, 25 bp, Homo sapien
cactagtctaaggaacagagttcac

SEQ ID NO: 3791344 - DNA, 25 bp, Homo sapien
gagttcacactgttattaccaagag

SEQ ID NO: 3791345 - DNA, 25 bp, Homo sapien
agacgtgctcaggtgtcactgtcca

SEQ ID NO: 3791346 - DNA, 25 bp, Homo sapien
tgtttgctcaggaaaagctagaatc

SEQ ID NO: 3791347 - DNA, 25 bp, Homo sapien
tcaggcaagacgtgctcaggtgtca

SEQ ID NO: 3791348 - DNA, 25 bp, Homo sapien
tggtgtttgtttgctcaggaaaagc

SEQ ID NO: 3791349 - DNA, 25 bp, Homo sapien
gccacttcttcaaatgtcaacaagc

SEQ ID NO: 3791350 - DNA, 25 bp, Homo sapien
ggccacttcttcaaatgtcaacaag

SEQ ID NO: 3791351 - DNA, 25 bp, Homo sapien
ccacttcttcaaatgtcaacaagct

SEQ ID NO: 3791352 - DNA, 25 bp, Homo sapien
gagtgggatccaataactcccattc

SEQ ID NO: 3791353 - DNA, 25 bp, Homo sapien
ctgagtgggatccaataactcccat

SEQ ID NO: 3791354 - DNA, 25 bp, Homo sapien
tgagtgggatccaataactcccatt

SEQ ID NO: 3791355 - DNA, 25 bp, Homo sapien
aggaaagactaaaatctgttgagca

SEQ ID NO: 3791356 - DNA, 25 bp, Homo sapien
gaaagactaaaatctgttgagcagg

SEQ ID NO: 3791357 - DNA, 25 bp, Homo sapien
aagactaaaatctgttgagcaggca

SEQ ID NO: 3791358 - DNA, 25 bp, Homo sapien
gactaaaatctgttgagcaggcaca

SEQ ID NO: 3791359 - DNA, 25 bp, Homo sapien
agggccttctgagtgtaatccagta

SEQ ID NO: 3791360 - DNA, 25 bp, Homo sapien
tgagtgtaatccagtaactccaatt

SEQ ID NO: 3791361 - DNA, 25 bp, Homo sapien
aatgacagtcttacagttttcctgc

SEQ ID NO: 3791362 - DNA, 25 bp, Homo sapien
ctagacaaatgacagtcttacagtt

SEQ ID NO: 3791363 - DNA, 25 bp, Homo sapien
gccactggccctcaactaggataga

SEQ ID NO: 3791364 - DNA, 25 bp, Homo sapien
gactgtttcaggatgaccaaagaca

SEQ ID NO: 3791365 - DNA, 25 bp, Homo sapien
taagaccaggtatggcaaagccaat

SEQ ID NO: 3791366 - DNA, 25 bp, Homo sapien
gacgctgacttgagtatcataagca

SEQ ID NO: 3791367 - DNA, 25 bp, Homo sapien
cttgctctagacaggagatcacttt

SEQ ID NO: 3791368 - DNA, 25 bp, Homo sapien
gacaggagatcactttaggtttggg

SEQ ID NO: 3791369 - DNA, 25 bp, Homo sapien
tgtaggagattttccggcactatcc

SEQ ID NO: 3791370 - DNA, 25 bp, Homo sapien
gggatacttgaacccatggctcttc

SEQ ID NO: 3791371 - DNA, 25 bp, Homo sapien
aagtttgagcagctcttgtttccag

SEQ ID NO: 3791372 - DNA, 25 bp, Homo sapien
tcagtgtcgtttttgagctttaacc

SEQ ID NO: 3791373 - DNA, 25 bp, Homo sapien
ccttttttgatatgacgcctgctga

SEQ ID NO: 3791374 - DNA, 25 bp, Homo sapien
cttgtgacgatccataagtttgagc

SEQ ID NO: 3791375 - DNA, 25 bp, Homo sapien
aagaaggcttgaccgcctgctgaag

SEQ ID NO: 3791376 - DNA, 25 bp, Homo sapien
tctaagaaggcttgaccgcctgctg

SEQ ID NO: 3791377 - DNA, 25 bp, Homo sapien
tgtctaagaaggcttgaccgcctgc

SEQ ID NO: 3791378 - DNA, 25 bp, Homo sapien
taagaaggcttgaccgcctgctgaa

SEQ ID NO: 3791379 - DNA, 25 bp, Homo sapien
gaatgaggacactggacaagcttct

SEQ ID NO: 3791380 - DNA, 25 bp, Homo sapien
catttcggcctcatgagactatgga

SEQ ID NO: 3791381 - DNA, 25 bp, Homo sapien
gactatggaaattggtaagcctgct

SEQ ID NO: 3791382 - DNA, 25 bp, Homo sapien
tgatgtccaactttgcaaaccgtgt

SEQ ID NO: 3791383 - DNA, 25 bp, Homo sapien
gggaaccgtctcctgctgactacat

SEQ ID NO: 3791384 - DNA, 25 bp, Homo sapien
tgtccaggtctccatgccaaatgag

SEQ ID NO: 3791385 - DNA, 25 bp, Homo sapien
caactcccatggaaattaagtctct

SEQ ID NO: 3791386 - DNA, 25 bp, Homo sapien
gctttatcctactgacattgcaagg

SEQ ID NO: 3791387 - DNA, 25 bp, Homo sapien
tcaaatttatcacctgaggctgctg

SEQ ID NO: 3791388 - DNA, 25 bp, Homo sapien
gctatacagacttttggcaatccat

SEQ ID NO: 3791389 - DNA, 25 bp, Homo sapien
caagttgtaagaaaatccataggct

SEQ ID NO: 3791390 - DNA, 25 bp, Homo sapien
ggcaatccatcaaatttatcacctg

SEQ ID NO: 3791391 - DNA, 25 bp, Homo sapien
tatgtggttccatgattaaggcagg

SEQ ID NO: 3791392 - DNA, 25 bp, Homo sapien
caaagttcactataggtctggagac

SEQ ID NO: 3791393 - DNA, 25 bp, Homo sapien
gaggctcacaatgctcacaactcat

SEQ ID NO: 3791394 - DNA, 25 bp, Homo sapien
tctcatacccgtcttagagcaagga

SEQ ID NO: 3791395 - DNA, 25 bp, Homo sapien
ggtgatgcttgatcctacagctcaa

SEQ ID NO: 3791396 - DNA, 25 bp, Homo sapien
tacagctcaatgatgttaccaagga

SEQ ID NO: 3791397 - DNA, 25 bp, Homo sapien
tcggttacaatgaacagaaacccca

SEQ ID NO: 3791398 - DNA, 25 bp, Homo sapien
ttcacgtagctgaaaagtactgggc

SEQ ID NO: 3791399 - DNA, 25 bp, Homo sapien
gagattgtcaagaattatctcttac

SEQ ID NO: 3791400 - DNA, 25 bp, Homo sapien
tacaaactgaactatttaagggtga

SEQ ID NO: 3791401 - DNA, 25 bp, Homo sapien
tgttccccaaagatggtttagggca

SEQ ID NO: 3791402 - DNA, 25 bp, Homo sapien
ctccactgagtaggaactgttcccc

SEQ ID NO: 3791403 - DNA, 25 bp, Homo sapien
cactctcattacgaggcatctggga

SEQ ID NO: 3791404 - DNA, 25 bp, Homo sapien
tccagggatcatcacgggcatctag

SEQ ID NO: 3791405 - DNA, 25 bp, Homo sapien
tcttctgagggcactttgaactcct

SEQ ID NO: 3791406 - DNA, 25 bp, Homo sapien
ggcatctagtatcccttccggacca

SEQ ID NO: 3791407 - DNA, 25 bp, Homo sapien
gaacaaagccctgcaaggagctatc

SEQ ID NO: 3791408 - DNA, 25 bp, Homo sapien
tgcaaggagctatcattcaccccgt

SEQ ID NO: 3791409 - DNA, 25 bp, Homo sapien
gcaaggagctatcattcaccccgtc

SEQ ID NO: 3791410 - DNA, 25 bp, Homo sapien
cagaacaaagccctgcaaggagcta

SEQ ID NO: 3791411 - DNA, 25 bp, Homo sapien
tggctgagccatagaagaggaacac

SEQ ID NO: 3791412 - DNA, 25 bp, Homo sapien
cagtttgatcatggcaggcacctcg

SEQ ID NO: 3791413 - DNA, 25 bp, Homo sapien
tgaactagtagcgaaagcaaggtcc

SEQ ID NO: 3791414 - DNA, 25 bp, Homo sapien
tcttggccggaagcagatacccata

SEQ ID NO: 3791415 - DNA, 25 bp, Homo sapien
accttttctactgcgtcacgccgga

SEQ ID NO: 3791416 - DNA, 25 bp, Homo sapien
cagaaaaggccctcacgaacacgaa

SEQ ID NO: 3791417 - DNA, 25 bp, Homo sapien
gaatcgccagccacgccaccttttc

SEQ ID NO: 3791418 - DNA, 25 bp, Homo sapien
aaaaggccctcacgaacacgaatcg

SEQ ID NO: 3791419 - DNA, 25 bp, Homo sapien
ggaattgaacctccagaaactgatt

SEQ ID NO: 3791420 - DNA, 25 bp, Homo sapien
tcccataacctgtatgactttctcg

SEQ ID NO: 3791421 - DNA, 25 bp, Homo sapien
aaaggaattgaacctccagaaactg

SEQ ID NO: 3791422 - DNA, 25 bp, Homo sapien
ccataacctgtatgactttctcgat

SEQ ID NO: 3791423 - DNA, 25 bp, Homo sapien
gaaatgttatctcatcagtaggctc

SEQ ID NO: 3791424 - DNA, 25 bp, Homo sapien
tcagtaggctcatttatctcattaa

SEQ ID NO: 3791425 - DNA, 25 bp, Homo sapien
caccacatgaaatgttatctcatca

SEQ ID NO: 3791426 - DNA, 25 bp, Homo sapien
tatctcattaacagcagtcatatta

SEQ ID NO: 3791427 - DNA, 25 bp, Homo sapien
tctgatgattggtgcacctgatacg

SEQ ID NO: 3791428 - DNA, 25 bp, Homo sapien
tggtgcacctgatacggcattcccc

SEQ ID NO: 3791429 - DNA, 25 bp, Homo sapien
gcccacacattcgtcataatttgtc

SEQ ID NO: 3791430 - DNA, 25 bp, Homo sapien
accgcccacacattcgtcataattt

SEQ ID NO: 3791431 - DNA, 25 bp, Homo sapien
taatgcttactcagccattttaccc

SEQ ID NO: 3791432 - DNA, 25 bp, Homo sapien
agatttacagtctaatgcttactca

SEQ ID NO: 3791433 - DNA, 25 bp, Homo sapien
tctaatgcttactcagccattttac

SEQ ID NO: 3791434 - DNA, 25 bp, Homo sapien
tttacagtctaatgcttactcagcc

SEQ ID NO: 3791435 - DNA, 25 bp, Homo sapien
tctgtgctacccattacaccaagtc

SEQ ID NO: 3791436 - DNA, 25 bp, Homo sapien
tgctacccattacaccaagtcctaa

SEQ ID NO: 3791437 - DNA, 25 bp, Homo sapien
ttctctgtgctacccattacaccaa

SEQ ID NO: 3791438 - DNA, 25 bp, Homo sapien
tgtgctacccattacaccaagtcct

SEQ ID NO: 3791439 - DNA, 25 bp, Homo sapien
catttatcacaacgcaagaattcct

SEQ ID NO: 3791440 - DNA, 25 bp, Homo sapien
taacttacatgcatttatcacaacg

SEQ ID NO: 3791441 - DNA, 25 bp, Homo sapien
tttatcagttctactaataagtggc

SEQ ID NO: 3791442 - DNA, 25 bp, Homo sapien
ttacatgcatttatcacaacgcaag

SEQ ID NO: 3791443 - DNA, 25 bp, Homo sapien
cactgaggacttaactaaagtgccc

SEQ ID NO: 3791444 - DNA, 25 bp, Homo sapien
ttcagagtaggaccaggtgaacata

SEQ ID NO: 3791445 - DNA, 25 bp, Homo sapien
tctttgggacagctgtttagaccct

SEQ ID NO: 3791446 - DNA, 25 bp, Homo sapien
gaaaggatgcattttacaggagaca

SEQ ID NO: 3791447 - DNA, 25 bp, Homo sapien
tgattccggctcactctgtccagac

SEQ ID NO: 3791448 - DNA, 25 bp, Homo sapien
tcttccttgggtgccaataggtcac

SEQ ID NO: 3791449 - DNA, 25 bp, Homo sapien
aatggctaagccacctgacatctcc

SEQ ID NO: 3791450 - DNA, 25 bp, Homo sapien
catgggatcttctagtcctctggta

SEQ ID NO: 3791451 - DNA, 25 bp, Homo sapien
taaatgagtgctggcagcgagcttc

SEQ ID NO: 3791452 - DNA, 25 bp, Homo sapien
ccctcagagagcatgtttatatgaa

SEQ ID NO: 3791453 - DNA, 25 bp, Homo sapien
tgcaggacagctccgaaagtcacat

SEQ ID NO: 3791454 - DNA, 25 bp, Homo sapien
tcgaccatgcccctaaggagaagct

SEQ ID NO: 3791455 - DNA, 25 bp, Homo sapien
catgtaaaagttaagggcctgaatc

SEQ ID NO: 3791456 - DNA, 25 bp, Homo sapien
tcctgttcctagcactgagaatggg

SEQ ID NO: 3791457 - DNA, 25 bp, Homo sapien
gaagacactgctctttgtaacccag

SEQ ID NO: 3791458 - DNA, 25 bp, Homo sapien
gggctaacatagtcctcacacaggg

SEQ ID NO: 3791459 - DNA, 25 bp, Homo sapien
tgaaagcagtactctcatcacagga

SEQ ID NO: 3791460 - DNA, 25 bp, Homo sapien
aagggctttagtgagcgctccaacc

SEQ ID NO: 3791461 - DNA, 25 bp, Homo sapien
gggaaaagccttaccagtgcattgt

SEQ ID NO: 3791462 - DNA, 25 bp, Homo sapien
tcccaggagaagatgagtcaccaga

SEQ ID NO: 3791463 - DNA, 25 bp, Homo sapien
aagcgatgctgttcctggccaagaa

SEQ ID NO: 3791464 - DNA, 25 bp, Homo sapien
ggtaagactcccttggctctgatgg

SEQ ID NO: 3791465 - DNA, 25 bp, Homo sapien
tgcagacagggatgaaaaggacttc

SEQ ID NO: 3791466 - DNA, 25 bp, Homo sapien
tctgcacctcctatggcaagcgatg

SEQ ID NO: 3791467 - DNA, 25 bp, Homo sapien
tctctgtcatcaggctggagtgcag

SEQ ID NO: 3791468 - DNA, 25 bp, Homo sapien
tacccatgagcatggcattctctct

SEQ ID NO: 3791469 - DNA, 25 bp, Homo sapien
ctctgcctcctgggttcaagtgatt

SEQ ID NO: 3791470 - DNA, 25 bp, Homo sapien
tggcacaatctcagctcactgcaac

SEQ ID NO: 3791471 - DNA, 25 bp, Homo sapien
tcactgttcagttacaacctatgag

SEQ ID NO: 3791472 - DNA, 25 bp, Homo sapien
actgttcagttacaacctatgagtg

SEQ ID NO: 3791473 - DNA, 25 bp, Homo sapien
ttcagttacaacctatgagtgacaa

SEQ ID NO: 3791474 - DNA, 25 bp, Homo sapien
tctcactgttcagttacaacctatg

SEQ ID NO: 3791475 - DNA, 25 bp, Homo sapien
tatgcagccatatcctacatggagg

SEQ ID NO: 3791476 - DNA, 25 bp, Homo sapien
ccatagcataatcagtaagcggcag

SEQ ID NO: 3791477 - DNA, 25 bp, Homo sapien
tgaatgagggcttgtattccccaca

SEQ ID NO: 3791478 - DNA, 25 bp, Homo sapien
tcagggtcgccctcactgagaaaat

SEQ ID NO: 3791479 - DNA, 25 bp, Homo sapien
gcagtgaagagtaccgaggcacacc

SEQ ID NO: 3791480 - DNA, 25 bp, Homo sapien
cagagtaagccagttcgttgaagca

SEQ ID NO: 3791481 - DNA, 25 bp, Homo sapien
gaagcttttagcaaactctgggaac

SEQ ID NO: 3791482 - DNA, 25 bp, Homo sapien
caggcagttttgctaccaggaggta

SEQ ID NO: 3791483 - DNA, 25 bp, Homo sapien
caggtgaactatatcgtcaggaaca

SEQ ID NO: 3791484 - DNA, 25 bp, Homo sapien
tgagtaattcgtcagcagacacaga

SEQ ID NO: 3791485 - DNA, 25 bp, Homo sapien
cacccaggaatgaccaacggcagtt

SEQ ID NO: 3791486 - DNA, 25 bp, Homo sapien
cacagaaccggctaaatgggagact

SEQ ID NO: 3791487 - DNA, 25 bp, Homo sapien
aaagactgccttcgcgggtgcagtg

SEQ ID NO: 3791488 - DNA, 25 bp, Homo sapien
aaaaagactgccttcgcgggtgcag

SEQ ID NO: 3791489 - DNA, 25 bp, Homo sapien
taaaaaagactgccttcgcgggtgc

SEQ ID NO: 3791490 - DNA, 25 bp, Homo sapien
cattaaaaaagactgccttcgcggg

SEQ ID NO: 3791491 - DNA, 25 bp, Homo sapien
tcagtagcaagcacacaggtctcgg

SEQ ID NO: 3791492 - DNA, 25 bp, Homo sapien
tttgggcgtcaggagacaactctct

SEQ ID NO: 3791493 - DNA, 25 bp, Homo sapien
taaacggtagagctaagcgaggcca

SEQ ID NO: 3791494 - DNA, 25 bp, Homo sapien
caatacgctctaaccggcgggtgga

SEQ ID NO: 3791495 - DNA, 25 bp, Homo sapien
cagtgttggagcttaaagttatctc

SEQ ID NO: 3791496 - DNA, 25 bp, Homo sapien
ttcagtgttggagcttaaagttatc

SEQ ID NO: 3791497 - DNA, 25 bp, Homo sapien
tgttggagcttaaagttatctccat

SEQ ID NO: 3791498 - DNA, 25 bp, Homo sapien
gcttcagtgttggagcttaaagtta

SEQ ID NO: 3791499 - DNA, 25 bp, Homo sapien
tgaaaatcttccacgagggtcacaa

SEQ ID NO: 3791500 - DNA, 25 bp, Homo sapien
tcgggttgcaaccactgacggcaga

SEQ ID NO: 3791501 - DNA, 25 bp, Homo sapien
cattggacatcgatgcctgacccga

SEQ ID NO: 3791502 - DNA, 25 bp, Homo sapien
aaaagcgtctgaagctctggcggca

SEQ ID NO: 3791503 - DNA, 25 bp, Homo sapien
ccctgagatctctcctaggagtctg

SEQ ID NO: 3791504 - DNA, 25 bp, Homo sapien
agccggtcataagctcctgcctggg

SEQ ID NO: 3791505 - DNA, 25 bp, Homo sapien
tgttctccaagctgagatccagttt

SEQ ID NO: 3791506 - DNA, 25 bp, Homo sapien
tcctaggagtctgcggttgaaagtc

SEQ ID NO: 3791507 - DNA, 25 bp, Homo sapien
gaaaagtaggtacaaccctgtcatg

SEQ ID NO: 3791508 - DNA, 25 bp, Homo sapien
gcctttgcagaaccatgagatacat

SEQ ID NO: 3791509 - DNA, 25 bp, Homo sapien
ccctgtcatgcactggattcttaaa

SEQ ID NO: 3791510 - DNA, 25 bp, Homo sapien
tacttacttgtagtatcaccaccat

SEQ ID NO: 3791511 - DNA, 25 bp, Homo sapien
aaactcagccatagcttgcatggaa

SEQ ID NO: 3791512 - DNA, 25 bp, Homo sapien
tctgtggccatatttggatctgtct

SEQ ID NO: 3791513 - DNA, 25 bp, Homo sapien
ttcatctgtggccatatttggatct

SEQ ID NO: 3791514 - DNA, 25 bp, Homo sapien
catagcttgcatggaagttcatctg

SEQ ID NO: 3791515 - DNA, 25 bp, Homo sapien
ttctaccaggcccctctaaacagag

SEQ ID NO: 3791516 - DNA, 25 bp, Homo sapien
ctaccaggcccctctaaacagagga

SEQ ID NO: 3791517 - DNA, 25 bp, Homo sapien
tctaccaggcccctctaaacagagg

SEQ ID NO: 3791518 - DNA, 25 bp, Homo sapien
atttctaccaggcccctctaaacag

SEQ ID NO: 3791519 - DNA, 25 bp, Homo sapien
aaaacacgaagtacctcattggatg

SEQ ID NO: 3791520 - DNA, 25 bp, Homo sapien
gattagtgccttcatgaaagagccc

SEQ ID NO: 3791521 - DNA, 25 bp, Homo sapien
ttgtattcacatcaccaggcttggc

SEQ ID NO: 3791522 - DNA, 25 bp, Homo sapien
cacaggactgtgtagaacaaggcca

SEQ ID NO: 3791523 - DNA, 25 bp, Homo sapien
gttcactcatatttgcccctcttgg

SEQ ID NO: 3791524 - DNA, 25 bp, Homo sapien
ctggtagtgagcaaatggcttttga

SEQ ID NO: 3791525 - DNA, 25 bp, Homo sapien
tcaggattctgcagaccattccctt

SEQ ID NO: 3791526 - DNA, 25 bp, Homo sapien
gacctgcctccgtgacaaccgaggt

SEQ ID NO: 3791527 - DNA, 25 bp, Homo sapien
gctcagactccgtttacctcctttg

SEQ ID NO: 3791528 - DNA, 25 bp, Homo sapien
tgttgcaaacggttgctcagactcc

SEQ ID NO: 3791529 - DNA, 25 bp, Homo sapien
tgctgatgtattccaccctgcaatg

SEQ ID NO: 3791530 - DNA, 25 bp, Homo sapien
tctctcagtgggtggctttttaggg

SEQ ID NO: 3791531 - DNA, 25 bp, Homo sapien
tcttcagctctgaattccacgtgaa

SEQ ID NO: 3791532 - DNA, 25 bp, Homo sapien
ctctccgcacgtgtagggtctctct

SEQ ID NO: 3791533 - DNA, 25 bp, Homo sapien
gctctgaattccacgtgaagctttt

SEQ ID NO: 3791534 - DNA, 25 bp, Homo sapien
gatcctctggtgcagcttcagggtt

SEQ ID NO: 3791535 - DNA, 25 bp, Homo sapien
ttagtccccatggtgaagtcggtga

SEQ ID NO: 3791536 - DNA, 25 bp, Homo sapien
ggtttgagctctggcgaaagctttt

SEQ ID NO: 3791537 - DNA, 25 bp, Homo sapien
cccatggtgaagtcggtgatgctgg

SEQ ID NO: 3791538 - DNA, 25 bp, Homo sapien
tgaaggtttgagctctggcgaaagc

SEQ ID NO: 3791539 - DNA, 25 bp, Homo sapien
tagaggataaagcaacagagggacg

SEQ ID NO: 3791540 - DNA, 25 bp, Homo sapien
gatttaacagtaagcgggccacctg

SEQ ID NO: 3791541 - DNA, 25 bp, Homo sapien
ctgtcatcatgcacggttgggccct

SEQ ID NO: 3791542 - DNA, 25 bp, Homo sapien
ccgtgtgaatctaaagcatggagtg

SEQ ID NO: 3791543 - DNA, 25 bp, Homo sapien
tgaattcccacaggcgttcagaagt

SEQ ID NO: 3791544 - DNA, 25 bp, Homo sapien
cactaaactagtgaatgaacccagg

SEQ ID NO: 3791545 - DNA, 25 bp, Homo sapien
tcagcacaaccgtgatttaggcagt

SEQ ID NO: 3791546 - DNA, 25 bp, Homo sapien
gttttggaagtctaactgcagccct

SEQ ID NO: 3791547 - DNA, 25 bp, Homo sapien
tctgctgtcacttgagatagcttca

SEQ ID NO: 3791548 - DNA, 25 bp, Homo sapien
gctcttgaggcctaaatagattaga

SEQ ID NO: 3791549 - DNA, 25 bp, Homo sapien
tgtccttagtacctatcccactgga

SEQ ID NO: 3791550 - DNA, 25 bp, Homo sapien
gaaaagttcacctctagatagctgc

SEQ ID NO: 3791551 - DNA, 25 bp, Homo sapien
tggtccctttaagaactgttctctc

SEQ ID NO: 3791552 - DNA, 25 bp, Homo sapien
ctttgtcacgaagtccctgtggcgt

SEQ ID NO: 3791553 - DNA, 25 bp, Homo sapien
ccgcagctttgtcacgaagtccctg

SEQ ID NO: 3791554 - DNA, 25 bp, Homo sapien
aacttggcagcggaattggtccctt

SEQ ID NO: 3791555 - DNA, 25 bp, Homo sapien
gggtcaccctaagactctacttcag

SEQ ID NO: 3791556 - DNA, 25 bp, Homo sapien
ttctttcgagttccggtgtctccca

SEQ ID NO: 3791557 - DNA, 25 bp, Homo sapien
cgagttccggtgtctcccagtcttc

SEQ ID NO: 3791558 - DNA, 25 bp, Homo sapien
tttctgtccttcttctcggaaacat

SEQ ID NO: 3791559 - DNA, 25 bp, Homo sapien
gctctggccagaccgaaatttcagg

SEQ ID NO: 3791560 - DNA, 25 bp, Homo sapien
tctggccagaccgaaatttcaggcc

SEQ ID NO: 3791561 - DNA, 25 bp, Homo sapien
tggccagaccgaaatttcaggccta

SEQ ID NO: 3791562 - DNA, 25 bp, Homo sapien
tgctctggccagaccgaaatttcag

SEQ ID NO: 3791563 - DNA, 25 bp, Homo sapien
ataaagagtaaatagtggtgatctc

SEQ ID NO: 3791564 - DNA, 25 bp, Homo sapien
aaataataaagagtaaatagtggtg

SEQ ID NO: 3791565 - DNA, 25 bp, Homo sapien
gtggtgatctctgggtgacaggaat

SEQ ID NO: 3791566 - DNA, 25 bp, Homo sapien
gtgacaggaatgtgttgccattttt

SEQ ID NO: 3791567 - DNA, 25 bp, Homo sapien
taaaggcggtaagaaccagagccat

SEQ ID NO: 3791568 - DNA, 25 bp, Homo sapien
ccatgaaggatacggtaaaggcggt

SEQ ID NO: 3791569 - DNA, 25 bp, Homo sapien
gatcagtatcaacttcccatgaagg

SEQ ID NO: 3791570 - DNA, 25 bp, Homo sapien
ggctctgtgtcagtttccgatcagt

SEQ ID NO: 3791571 - DNA, 25 bp, Homo sapien
ttgggagttaacacagaccaagcca

SEQ ID NO: 3791572 - DNA, 25 bp, Homo sapien
tctgtcctcactgtatctaacctgc

SEQ ID NO: 3791573 - DNA, 25 bp, Homo sapien
tggttgcagcttctagtaacgataa

SEQ ID NO: 3791574 - DNA, 25 bp, Homo sapien
tcagtatgagtaggtcaagaatctt

SEQ ID NO: 3791575 - DNA, 25 bp, Homo sapien
cttctcccaactcaggctggctccg

SEQ ID NO: 3791576 - DNA, 25 bp, Homo sapien
ggctggctccgcacttccttcctcc

SEQ ID NO: 3791577 - DNA, 25 bp, Homo sapien
aggctggctccgcacttccttcctc

SEQ ID NO: 3791578 - DNA, 25 bp, Homo sapien
gcaggacacagagcgctttgactca

SEQ ID NO: 3791579 - DNA, 25 bp, Homo sapien
gagggcatcattaatagcaggacac

SEQ ID NO: 3791580 - DNA, 25 bp, Homo sapien
ggcttacccatcagactcacaagag

SEQ ID NO: 3791581 - DNA, 25 bp, Homo sapien
gaaagcatttgtttcactaggcgcc

SEQ ID NO: 3791582 - DNA, 25 bp, Homo sapien
taatgtatgcatggatcaaaaccct

SEQ ID NO: 3791583 - DNA, 25 bp, Homo sapien
tcatggttctgaagggtttattaat

SEQ ID NO: 3791584 - DNA, 25 bp, Homo sapien
tggatcaaaaccctttcagtcagga

SEQ ID NO: 3791585 - DNA, 25 bp, Homo sapien
tttttgagacgatgtattagtctgt

SEQ ID NO: 3791586 - DNA, 25 bp, Homo sapien
cagaccctgagaacatttttcccag

SEQ ID NO: 3791587 - DNA, 25 bp, Homo sapien
agaccctgagaacatttttcccagg

SEQ ID NO: 3791588 - DNA, 25 bp, Homo sapien
ggaggcggcagcccgcggcacttcc

SEQ ID NO: 3791589 - DNA, 25 bp, Homo sapien
ccattggccgccgcccccacgtggc

SEQ ID NO: 3791590 - DNA, 25 bp, Homo sapien
aggcggcagcccgcggcacttccgc

SEQ ID NO: 3791591 - DNA, 25 bp, Homo sapien
gacggaggcggcagcccgcggcact

SEQ ID NO: 3791592 - DNA, 25 bp, Homo sapien
accgcgcggagcccgcaacgagtta

SEQ ID NO: 3791593 - DNA, 25 bp, Homo sapien
gagccgggaagtgggaccgcgcgga

SEQ ID NO: 3791594 - DNA, 25 bp, Homo sapien
gcgcggagcccgcaacgagttatgt

SEQ ID NO: 3791595 - DNA, 25 bp, Homo sapien
cggagcccgcaacgagttatgtaac

SEQ ID NO: 3791596 - DNA, 25 bp, Homo sapien
cgctgggggtgttgtagggctcagc

SEQ ID NO: 3791597 - DNA, 25 bp, Homo sapien
ctcgtgggggagccggcggccgctg

SEQ ID NO: 3791598 - DNA, 25 bp, Homo sapien
tgggggtgttgtagggctcagcgca

SEQ ID NO: 3791599 - DNA, 25 bp, Homo sapien
ctgggggtgttgtagggctcagcgc

SEQ ID NO: 3791600 - DNA, 25 bp, Homo sapien
ccctcggcgccccgccgcaggtccg

SEQ ID NO: 3791601 - DNA, 25 bp, Homo sapien
cccgccgcaggtccgagccccggcg

SEQ ID NO: 3791602 - DNA, 25 bp, Homo sapien
ccgccccctcggcgccccgccgcag

SEQ ID NO: 3791603 - DNA, 25 bp, Homo sapien
ctcggcgccccgccgcaggtccgag

SEQ ID NO: 3791604 - DNA, 25 bp, Homo sapien
caaagcgaactactctgttgggctg

SEQ ID NO: 3791605 - DNA, 25 bp, Homo sapien
tcacagtgctacatggactgccgca

SEQ ID NO: 3791606 - DNA, 25 bp, Homo sapien
gagtcgacctttggagtcacatgac

SEQ ID NO: 3791607 - DNA, 25 bp, Homo sapien
aaagtgtacgcctcaaggacttggc

SEQ ID NO: 3791608 - DNA, 25 bp, Homo sapien
tgggctatttcagcagagcaaggcc

SEQ ID NO: 3791609 - DNA, 25 bp, Homo sapien
cagtcatgagggcttcgtggattcc

SEQ ID NO: 3791610 - DNA, 25 bp, Homo sapien
caagcaaatgggacctctgggctat

SEQ ID NO: 3791611 - DNA, 25 bp, Homo sapien
cagttacgagcacccagttagcaag

SEQ ID NO: 3791612 - DNA, 25 bp, Homo sapien
tggcaccatctcaacttactgcaac

SEQ ID NO: 3791613 - DNA, 25 bp, Homo sapien
gctctatcactccggctggaatgca

SEQ ID NO: 3791614 - DNA, 25 bp, Homo sapien
agtggcaccatctcaacttactgca

SEQ ID NO: 3791615 - DNA, 25 bp, Homo sapien
gcagtggcaccatctcaacttactg

SEQ ID NO: 3791616 - DNA, 25 bp, Homo sapien
ccccactcagtcagtgtcagaagtg

SEQ ID NO: 3791617 - DNA, 25 bp, Homo sapien
gacaagaacatgacccaagagaagg

SEQ ID NO: 3791618 - DNA, 25 bp, Homo sapien
cagaagtggcgatgacaaggacgaa

SEQ ID NO: 3791619 - DNA, 25 bp, Homo sapien
caagagaaggacagaacgctaaacc

SEQ ID NO: 3791620 - DNA, 25 bp, Homo sapien
ccctccaaacaggatgggtaccagg

SEQ ID NO: 3791621 - DNA, 25 bp, Homo sapien
agccctccaaacaggatgggtacca

SEQ ID NO: 3791622 - DNA, 25 bp, Homo sapien
cctccaaacaggatgggtaccaggg

SEQ ID NO: 3791623 - DNA, 25 bp, Homo sapien
gccctccaaacaggatgggtaccag

SEQ ID NO: 3791624 - DNA, 25 bp, Homo sapien
aaagagcatggctgtaggtccactg

SEQ ID NO: 3791625 - DNA, 25 bp, Homo sapien
ctgtgtgcccatgaaaggaagagat

SEQ ID NO: 3791626 - DNA, 25 bp, Homo sapien
gatggggtcaaagagcatggctgta

SEQ ID NO: 3791627 - DNA, 25 bp, Homo sapien
tgtgtgcccatgaaaggaagagatg

SEQ ID NO: 3791628 - DNA, 25 bp, Homo sapien
gcacaggcaacctgcgaaaccagcc

SEQ ID NO: 3791629 - DNA, 25 bp, Homo sapien
gcaacctgcgaaaccagccggtaca

SEQ ID NO: 3791630 - DNA, 25 bp, Homo sapien
caggcaacctgcgaaaccagccggt

SEQ ID NO: 3791631 - DNA, 25 bp, Homo sapien
aacctgcgaaaccagccggtacagc

SEQ ID NO: 3791632 - DNA, 25 bp, Homo sapien
gcccagccgcccaggtttctgagct

SEQ ID NO: 3791633 - DNA, 25 bp, Homo sapien
cccagccgcccaggtttctgagctc

SEQ ID NO: 3791634 - DNA, 25 bp, Homo sapien
tcgtcttttatctggcagtccccac

SEQ ID NO: 3791635 - DNA, 25 bp, Homo sapien
agacctcgtcttttatctggcagtc

SEQ ID NO: 3791636 - DNA, 25 bp, Homo sapien
acctcgtcttttatctggcagtccc

SEQ ID NO: 3791637 - DNA, 25 bp, Homo sapien
caggtttctgcacaaccttcccttt

SEQ ID NO: 3791638 - DNA, 25 bp, Homo sapien
tcgatggggaaccagtcgccacaca

SEQ ID NO: 3791639 - DNA, 25 bp, Homo sapien
ggaggcgcaggctgacctcgctgag

SEQ ID NO: 3791640 - DNA, 25 bp, Homo sapien
aggaggcgcaggctgacctcgctga

SEQ ID NO: 3791641 - DNA, 25 bp, Homo sapien
tggggaaccagtcgccacacaggtg

SEQ ID NO: 3791642 - DNA, 25 bp, Homo sapien
gaacttcttgttggatgtgatatca

SEQ ID NO: 3791643 - DNA, 25 bp, Homo sapien
tactatcattcccacaatggcacct

SEQ ID NO: 3791644 - DNA, 25 bp, Homo sapien
gatatcacgataccatgagtctggg

SEQ ID NO: 3791645 - DNA, 25 bp, Homo sapien
cacctctgtaggttgcagcaaggga

SEQ ID NO: 3791646 - DNA, 25 bp, Homo sapien
gtcacaggctccttggacgacggct

SEQ ID NO: 3791647 - DNA, 25 bp, Homo sapien
ccagggacaagtgtcgttggccact

SEQ ID NO: 3791648 - DNA, 25 bp, Homo sapien
gccacttggattccttgggtcacag

SEQ ID NO: 3791649 - DNA, 25 bp, Homo sapien
gcccgtccaatgacagtgactgcca

SEQ ID NO: 3791650 - DNA, 25 bp, Homo sapien
tgaactctttcacgacgcccagact

SEQ ID NO: 3791651 - DNA, 25 bp, Homo sapien
gaagttggatgctagaatatctcca

SEQ ID NO: 3791652 - DNA, 25 bp, Homo sapien
cagacttaggatgtacgcgacttgt

SEQ ID NO: 3791653 - DNA, 25 bp, Homo sapien
acttgtgtgtcaacagagaagttgg

SEQ ID NO: 3791654 - DNA, 25 bp, Homo sapien
tgtgatcctttaaactttcaagtaa

SEQ ID NO: 3791655 - DNA, 25 bp, Homo sapien
ctgggcggtggttgatatgtgatcc

SEQ ID NO: 3791656 - DNA, 25 bp, Homo sapien
ggcggtggttgatatgtgatccttt

SEQ ID NO: 3791657 - DNA, 25 bp, Homo sapien
cggtggttgatatgtgatcctttaa

SEQ ID NO: 3791658 - DNA, 25 bp, Homo sapien
aggacatgcaggtaaatggctttgc

SEQ ID NO: 3791659 - DNA, 25 bp, Homo sapien
agatagtggtgctgcttgaagtctc

SEQ ID NO: 3791660 - DNA, 25 bp, Homo sapien
ggacccctcgaatggagtagtaata

SEQ ID NO: 3791661 - DNA, 25 bp, Homo sapien
tgtagaggacataggtgaagccatc

SEQ ID NO: 3791662 - DNA, 25 bp, Homo sapien
tcatgagacgaagtggcctctgctg

SEQ ID NO: 3791663 - DNA, 25 bp, Homo sapien
gattctcaacctttgtggcagcaag

SEQ ID NO: 3791664 - DNA, 25 bp, Homo sapien
cacaacacgatcaggtaagggagag

SEQ ID NO: 3791665 - DNA, 25 bp, Homo sapien
cacataagctagacggcctgtggag

SEQ ID NO: 3791666 - DNA, 25 bp, Homo sapien
ttaaggaagattccgacttgccctg

SEQ ID NO: 3791667 - DNA, 25 bp, Homo sapien
ctgttaaggaagattccgacttgcc

SEQ ID NO: 3791668 - DNA, 25 bp, Homo sapien
aagattccgacttgccctgaccacg

SEQ ID NO: 3791669 - DNA, 25 bp, Homo sapien
ggaagattccgacttgccctgacca

SEQ ID NO: 3791670 - DNA, 25 bp, Homo sapien
aggctggctagtgcagagcccaggt

SEQ ID NO: 3791671 - DNA, 25 bp, Homo sapien
tactcgatgccactcttggaagaga

SEQ ID NO: 3791672 - DNA, 25 bp, Homo sapien
gatgcccgaccatggcaggaagctg

SEQ ID NO: 3791673 - DNA, 25 bp, Homo sapien
atggtccggctgtactcgatgccac

SEQ ID NO: 3791674 - DNA, 25 bp, Homo sapien
tcttggaagagatgcccgaccatgg

SEQ ID NO: 3791675 - DNA, 25 bp, Homo sapien
ccacggatgggcatgctctgcgcat

SEQ ID NO: 3791676 - DNA, 25 bp, Homo sapien
gcaggccgacgagcccagttagatg

SEQ ID NO: 3791677 - DNA, 25 bp, Homo sapien
gagcccgtgtagcaccgggcctgca

SEQ ID NO: 3791678 - DNA, 25 bp, Homo sapien
ccacgatgttctgttcccgagcccg

SEQ ID NO: 3791679 - DNA, 25 bp, Homo sapien
ccatggagcctgctgtgttagcttg

SEQ ID NO: 3791680 - DNA, 25 bp, Homo sapien
cataaggtggtggactctgcagtcc

SEQ ID NO: 3791681 - DNA, 25 bp, Homo sapien
ggtgcacagcccagttgccatggag

SEQ ID NO: 3791682 - DNA, 25 bp, Homo sapien
aaaggcactgatggatccaaagtcg

SEQ ID NO: 3791683 - DNA, 25 bp, Homo sapien
cagggcactggtaactgcacggaag

SEQ ID NO: 3791684 - DNA, 25 bp, Homo sapien
caggtcagctgaatggagcatgcca

SEQ ID NO: 3791685 - DNA, 25 bp, Homo sapien
taggaaccgtcctgatgcgtgaccg

SEQ ID NO: 3791686 - DNA, 25 bp, Homo sapien
ctctgtgcttgcgaggaaagcctcc

SEQ ID NO: 3791687 - DNA, 25 bp, Homo sapien
tgtcaggtcagcagaggttcaagca

SEQ ID NO: 3791688 - DNA, 25 bp, Homo sapien
cctggccccagctgagttcaagagg

SEQ ID NO: 3791689 - DNA, 25 bp, Homo sapien
ctcagcagagattcaggcagtcagc

SEQ ID NO: 3791690 - DNA, 25 bp, Homo sapien
tcacatgatcgccactgattcgcag

SEQ ID NO: 3791691 - DNA, 25 bp, Homo sapien
gacagaacgctacaatctgttcaac

SEQ ID NO: 3791692 - DNA, 25 bp, Homo sapien
tctgagcccgaggacaaatgtccat

SEQ ID NO: 3791693 - DNA, 25 bp, Homo sapien
aatctgttcaacactgggctggaca

SEQ ID NO: 3791694 - DNA, 25 bp, Homo sapien
ctatttatttgctcgtaatgagaca

SEQ ID NO: 3791695 - DNA, 25 bp, Homo sapien
cttcttgtggcggacgtcagctccc

SEQ ID NO: 3791696 - DNA, 25 bp, Homo sapien
cttgtggcggacgtcagctcccatg

SEQ ID NO: 3791697 - DNA, 25 bp, Homo sapien
taggtccttcttgtggcggacgtca

SEQ ID NO: 3791698 - DNA, 25 bp, Homo sapien
ggtccttcttgtggcggacgtcagc

SEQ ID NO: 3791699 - DNA, 25 bp, Homo sapien
gaccaacaaacagcctcagttagat

SEQ ID NO: 3791700 - DNA, 25 bp, Homo sapien
ccaacaaacagcctcagttagatat

SEQ ID NO: 3791701 - DNA, 25 bp, Homo sapien
aacaaacagcctcagttagatatcc

SEQ ID NO: 3791702 - DNA, 25 bp, Homo sapien
cttgaccaacaaacagcctcagtta

SEQ ID NO: 3791703 - DNA, 25 bp, Homo sapien
cggatcatccgggaaacggacagag

SEQ ID NO: 3791704 - DNA, 25 bp, Homo sapien
tcttccggatcatccgggaaacgga

SEQ ID NO: 3791705 - DNA, 25 bp, Homo sapien
ccggatcatccgggaaacggacaga

SEQ ID NO: 3791706 - DNA, 25 bp, Homo sapien
tcatcttccggatcatccgggaaac

SEQ ID NO: 3791707 - DNA, 25 bp, Homo sapien
cttggcccccaccctgaggatgccg

SEQ ID NO: 3791708 - DNA, 25 bp, Homo sapien
ttctggtccctggagcggaaatagc

SEQ ID NO: 3791709 - DNA, 25 bp, Homo sapien
ccctggagcggaaatagcgtttggt

SEQ ID NO: 3791710 - DNA, 25 bp, Homo sapien
acctgtcggcccttgcgaagaccgg

SEQ ID NO: 3791711 - DNA, 25 bp, Homo sapien
cggcccttgcgaagaccggagagta

SEQ ID NO: 3791712 - DNA, 25 bp, Homo sapien
ccgtaggcctctggcgcgctcgaac

SEQ ID NO: 3791713 - DNA, 25 bp, Homo sapien
ttgtagcctcggctggcccgtaggc

SEQ ID NO: 3791714 - DNA, 25 bp, Homo sapien
tcggctggcccgtaggcctctggcg

SEQ ID NO: 3791715 - DNA, 25 bp, Homo sapien
tggcccgtaggcctctggcgcgctc

SEQ ID NO: 3791716 - DNA, 25 bp, Homo sapien
aggcccagcgctcgacgatctctat

SEQ ID NO: 3791717 - DNA, 25 bp, Homo sapien
cggaggtcgcggaaagacataacgc

SEQ ID NO: 3791718 - DNA, 25 bp, Homo sapien
aaagacataacgctcaggtccccag

SEQ ID NO: 3791719 - DNA, 25 bp, Homo sapien
tctatggcaaccaatggacccttgg

SEQ ID NO: 3791720 - DNA, 25 bp, Homo sapien
tttctctctttagtatctcatttct

SEQ ID NO: 3791721 - DNA, 25 bp, Homo sapien
tgagggattagctgtgaatttcatt

SEQ ID NO: 3791722 - DNA, 25 bp, Homo sapien
gaaaatggaattgagggattagctg

SEQ ID NO: 3791723 - DNA, 25 bp, Homo sapien
tggaattgagggattagctgtgaat

SEQ ID NO: 3791724 - DNA, 25 bp, Homo sapien
tgggtgtacggaaattttccataga

SEQ ID NO: 3791725 - DNA, 25 bp, Homo sapien
gaagcacttcagatacaagtccaaa

SEQ ID NO: 3791726 - DNA, 25 bp, Homo sapien
tatgtcgagggtatcccagggctct

SEQ ID NO: 3791727 - DNA, 25 bp, Homo sapien
ttttcacaagccagagaagcacttc

SEQ ID NO: 3791728 - DNA, 25 bp, Homo sapien
tgaactgggcaattgccttaatgaa

SEQ ID NO: 3791729 - DNA, 25 bp, Homo sapien
gaaaactcggtcctgttcagtatcc

SEQ ID NO: 3791730 - DNA, 25 bp, Homo sapien
gtatccacgtcaggcgggatgtcag

SEQ ID NO: 3791731 - DNA, 25 bp, Homo sapien
tgccttaatgaagaaaactcggtcc

SEQ ID NO: 3791732 - DNA, 25 bp, Homo sapien
actccacaaaataagtgtccactaa

SEQ ID NO: 3791733 - DNA, 25 bp, Homo sapien
aactccacaaaataagtgtccacta

SEQ ID NO: 3791734 - DNA, 25 bp, Homo sapien
acttcgctggtgaaatggtgccaca

SEQ ID NO: 3791735 - DNA, 25 bp, Homo sapien
acaaaaagaacttcgctggtgaaat

SEQ ID NO: 3791736 - DNA, 25 bp, Homo sapien
aaagaacttcgctggtgaaatggtg

SEQ ID NO: 3791737 - DNA, 25 bp, Homo sapien
gaacttcgctggtgaaatggtgcca

SEQ ID NO: 3791738 - DNA, 25 bp, Homo sapien
caagatcaaacttgaacttgttgac

SEQ ID NO: 3791739 - DNA, 25 bp, Homo sapien
agcagctcttttaccgcatacccat

SEQ ID NO: 3791740 - DNA, 25 bp, Homo sapien
catccccttggtcttcatagcatta

SEQ ID NO: 3791741 - DNA, 25 bp, Homo sapien
ggacagatgtgatcttcagcagctc

SEQ ID NO: 3791742 - DNA, 25 bp, Homo sapien
ctgggaggcagaggcgcagcgagcc

SEQ ID NO: 3791743 - DNA, 25 bp, Homo sapien
tgggaggcagaggcgcagcgagcca

SEQ ID NO: 3791744 - DNA, 25 bp, Homo sapien
acctgggaggcagaggcgcagcgag

SEQ ID NO: 3791745 - DNA, 25 bp, Homo sapien
gaacctgggaggcagaggcgcagcg

SEQ ID NO: 3791746 - DNA, 25 bp, Homo sapien
gaggtgatttcagacgcaagctgcc

SEQ ID NO: 3791747 - DNA, 25 bp, Homo sapien
tttcagacgcaagctgcctggctgc

SEQ ID NO: 3791748 - DNA, 25 bp, Homo sapien
tcaactctacttccatgccgagcaa

SEQ ID NO: 3791749 - DNA, 25 bp, Homo sapien
caagtcatacagagatgctcctttg

SEQ ID NO: 3791750 - DNA, 25 bp, Homo sapien
ttatttccagaggtctggcaatggc

SEQ ID NO: 3791751 - DNA, 25 bp, Homo sapien
tttttcagtctcgtttatttccaga

SEQ ID NO: 3791752 - DNA, 25 bp, Homo sapien
tcagtctcgtttatttccagaggtc

SEQ ID NO: 3791753 - DNA, 25 bp, Homo sapien
tctcgtttatttccagaggtctggc

SEQ ID NO: 3791754 - DNA, 25 bp, Homo sapien
ttttggcttctaaattagcttcatc

SEQ ID NO: 3791755 - DNA, 25 bp, Homo sapien
acactctgcagagtctctagtcgct

SEQ ID NO: 3791756 - DNA, 25 bp, Homo sapien
tcagaggccacattattgagcaggt

SEQ ID NO: 3791757 - DNA, 25 bp, Homo sapien
gtcgcttccgatttctttccagttc

SEQ ID NO: 3791758 - DNA, 25 bp, Homo sapien
tttctccagataagtgtcatactgc

SEQ ID NO: 3791759 - DNA, 25 bp, Homo sapien
ttcttgctccatcctatgatggtct

SEQ ID NO: 3791760 - DNA, 25 bp, Homo sapien
gctccatcctatgatggtcttcaag

SEQ ID NO: 3791761 - DNA, 25 bp, Homo sapien
ctccatcctatgatggtcttcaagc

SEQ ID NO: 3791762 - DNA, 25 bp, Homo sapien
tctggactgttctattcttcttcac

SEQ ID NO: 3791763 - DNA, 25 bp, Homo sapien
ctgtgtaaggactgctaagtttgtg

SEQ ID NO: 3791764 - DNA, 25 bp, Homo sapien
accactgtgtaaggactgctaagtt

SEQ ID NO: 3791765 - DNA, 25 bp, Homo sapien
ttctggactgttctattcttcttca

SEQ ID NO: 3791766 - DNA, 25 bp, Homo sapien
cttgagcttgttctgtatcaggcag

SEQ ID NO: 3791767 - DNA, 25 bp, Homo sapien
gagcttgttctgtatcaggcagaga

SEQ ID NO: 3791768 - DNA, 25 bp, Homo sapien
tgttctgtatcaggcagagagtgtt

SEQ ID NO: 3791769 - DNA, 25 bp, Homo sapien
ttccactcttgagcaggcgcttctc

SEQ ID NO: 3791770 - DNA, 25 bp, Homo sapien
gatggtgcggcaagatgcagctcct

SEQ ID NO: 3791771 - DNA, 25 bp, Homo sapien
tgtacctcaggctcaataagatttc

SEQ ID NO: 3791772 - DNA, 25 bp, Homo sapien
caatgtgtctccgaaaagcctgtgt

SEQ ID NO: 3791773 - DNA, 25 bp, Homo sapien
tgggcttgctcctagaactgtggct

SEQ ID NO: 3791774 - DNA, 25 bp, Homo sapien
cttccaactcactgtcggattcatc

SEQ ID NO: 3791775 - DNA, 25 bp, Homo sapien
cctggatgtctatgtccgagtcatc

SEQ ID NO: 3791776 - DNA, 25 bp, Homo sapien
atgtctatgtccgagtcatcgttac

SEQ ID NO: 3791777 - DNA, 25 bp, Homo sapien
cggattcatcgtcctcctggatgtc

SEQ ID NO: 3791778 - DNA, 25 bp, Homo sapien
attgtcatcggagtctccaccttgc

SEQ ID NO: 3791779 - DNA, 25 bp, Homo sapien
cccacaatgcgtttgccaggtcttc

SEQ ID NO: 3791780 - DNA, 25 bp, Homo sapien
tgtcatcggagtctccaccttgcat

SEQ ID NO: 3791781 - DNA, 25 bp, Homo sapien
ttgcatcgtgcccacaatgcgtttg

SEQ ID NO: 3791782 - DNA, 25 bp, Homo sapien
aagagatgagccatccacgagcaac

SEQ ID NO: 3791783 - DNA, 25 bp, Homo sapien
gtccagagcctcatgaggccaaacc

SEQ ID NO: 3791784 - DNA, 25 bp, Homo sapien
gggacagccaaacccagagtgcaca

SEQ ID NO: 3791785 - DNA, 25 bp, Homo sapien
gcaagcacattcacttgaaaagaga

SEQ ID NO: 3791786 - DNA, 25 bp, Homo sapien
tgcatttacctaagagagctggtgc

SEQ ID NO: 3791787 - DNA, 25 bp, Homo sapien
catttacctaagagagctggtgctg

SEQ ID NO: 3791788 - DNA, 25 bp, Homo sapien
ggaagtcttgcatttacctaagaga

SEQ ID NO: 3791789 - DNA, 25 bp, Homo sapien
tcttgcatttacctaagagagctgg

SEQ ID NO: 3791790 - DNA, 25 bp, Homo sapien
tgttaacaccatgagccctgatccg

SEQ ID NO: 3791791 - DNA, 25 bp, Homo sapien
ccttcatttctaggtggcggcccag

SEQ ID NO: 3791792 - DNA, 25 bp, Homo sapien
taagaagcactctgcatctgcgctg

SEQ ID NO: 3791793 - DNA, 25 bp, Homo sapien
tgaacacgtaaagcatggaaccctg

SEQ ID NO: 3791794 - DNA, 25 bp, Homo sapien
ttgtcactctcatccaggggttcag

SEQ ID NO: 3791795 - DNA, 25 bp, Homo sapien
catccaggggttcagatttccggac

SEQ ID NO: 3791796 - DNA, 25 bp, Homo sapien
gtcttccaaatcgtcatcctcgtca

SEQ ID NO: 3791797 - DNA, 25 bp, Homo sapien
cggacccttcgattgggcttggttg

SEQ ID NO: 3791798 - DNA, 25 bp, Homo sapien
gcttcagtgatcatgagtccagcca

SEQ ID NO: 3791799 - DNA, 25 bp, Homo sapien
tacgattccaaacatgagtccccag

SEQ ID NO: 3791800 - DNA, 25 bp, Homo sapien
caagtctgagggttttaatctgcca

SEQ ID NO: 3791801 - DNA, 25 bp, Homo sapien
tgtcccgtggatgtgaatcactaag

SEQ ID NO: 3791802 - DNA, 25 bp, Homo sapien
tgagtagctggacccaagggcgctt

SEQ ID NO: 3791803 - DNA, 25 bp, Homo sapien
tgccagaggaatgtcagcttcggac

SEQ ID NO: 3791804 - DNA, 25 bp, Homo sapien
taccaaccgtggaaacatgaaggtg

SEQ ID NO: 3791805 - DNA, 25 bp, Homo sapien
gaaacacttaggtagcgagctgcag

SEQ ID NO: 3791806 - DNA, 25 bp, Homo sapien
aaggcagtgctatacatggtgagac

SEQ ID NO: 3791807 - DNA, 25 bp, Homo sapien
aacacgctggcttccctgtcagtgg

SEQ ID NO: 3791808 - DNA, 25 bp, Homo sapien
tgaaataccctttggagctgttgcc

SEQ ID NO: 3791809 - DNA, 25 bp, Homo sapien
gaaacttccgtgctcaagcaaggca

SEQ ID NO: 3791810 - DNA, 25 bp, Homo sapien
taaaggagtccccaattctggcacc

SEQ ID NO: 3791811 - DNA, 25 bp, Homo sapien
gagttcagtctgtcgtcaggcacac

SEQ ID NO: 3791812 - DNA, 25 bp, Homo sapien
gggccctacagaaacctaacgctga

SEQ ID NO: 3791813 - DNA, 25 bp, Homo sapien
agaaacctcaggagccaaactggtg

SEQ ID NO: 3791814 - DNA, 25 bp, Homo sapien
tgtagtagctgggaaataaaacaaa

SEQ ID NO: 3791815 - DNA, 25 bp, Homo sapien
ctgactggatcctagactgcaggaa

SEQ ID NO: 3791816 - DNA, 25 bp, Homo sapien
tgcaagatctctgactggatcctag

SEQ ID NO: 3791817 - DNA, 25 bp, Homo sapien
tggatcacttgtagtagctgggaaa

SEQ ID NO: 3791818 - DNA, 25 bp, Homo sapien
tactcgggaagatgatatccttgca

SEQ ID NO: 3791819 - DNA, 25 bp, Homo sapien
tgatgcaccacggagtcgtctctga

SEQ ID NO: 3791820 - DNA, 25 bp, Homo sapien
gccatggatgaaggcctactcggga

SEQ ID NO: 3791821 - DNA, 25 bp, Homo sapien
gagcatccggacaggaaccatcatg

SEQ ID NO: 3791822 - DNA, 25 bp, Homo sapien
cctcccatacagtagttgggataac

SEQ ID NO: 3791823 - DNA, 25 bp, Homo sapien
ttacaagtcaaggaaggtgtgtttg

SEQ ID NO: 3791824 - DNA, 25 bp, Homo sapien
tctttgacgaggcacctgtctgcag

SEQ ID NO: 3791825 - DNA, 25 bp, Homo sapien
tcagtgacgcaggagtggcagcact

SEQ ID NO: 3791826 - DNA, 25 bp, Homo sapien
tgtactgcggatggtcctaaagtgg

SEQ ID NO: 3791827 - DNA, 25 bp, Homo sapien
cctctccaaacagggcgtttctttg

SEQ ID NO: 3791828 - DNA, 25 bp, Homo sapien
ggcaatttacactaattcagtaaca

SEQ ID NO: 3791829 - DNA, 25 bp, Homo sapien
ctgtgccttaagagggtaaaaatgg

SEQ ID NO: 3791830 - DNA, 25 bp, Homo sapien
aaaatgggcttaaaaggatatctag

SEQ ID NO: 3791831 - DNA, 25 bp, Homo sapien
gctctgtgtgagtttgaagaagtca

SEQ ID NO: 3791832 - DNA, 25 bp, Homo sapien
gtgacctggcgggactagacaccgc

SEQ ID NO: 3791833 - DNA, 25 bp, Homo sapien
tagacaccgctgtgcacaggcaggt

SEQ ID NO: 3791834 - DNA, 25 bp, Homo sapien
tcgcattcagaagatcaggtaacac

SEQ ID NO: 3791835 - DNA, 25 bp, Homo sapien
tacgtgtgctgacataatgccaggc

SEQ ID NO: 3791836 - DNA, 25 bp, Homo sapien
tgtgatcattgctaccacccaggaa

SEQ ID NO: 3791837 - DNA, 25 bp, Homo sapien
ggtgatccccgactccatgaggaag

SEQ ID NO: 3791838 - DNA, 25 bp, Homo sapien
cctgcagcaatggtaggaccggctt

SEQ ID NO: 3791839 - DNA, 25 bp, Homo sapien
caggtgaaagccctcatggatctgc

SEQ ID NO: 3791840 - DNA, 25 bp, Homo sapien
caattttaggcttacggagtctcgc

SEQ ID NO: 3791841 - DNA, 25 bp, Homo sapien
gctctgagaaccagcgttttctcct

SEQ ID NO: 3791842 - DNA, 25 bp, Homo sapien
ctcttcccctccgactggagtgcag

SEQ ID NO: 3791843 - DNA, 25 bp, Homo sapien
aaaacagccgctctgagaaccagcg

SEQ ID NO: 3791844 - DNA, 25 bp, Homo sapien
aactgtggacaacggaaggctgagc

SEQ ID NO: 3791845 - DNA, 25 bp, Homo sapien
gcctaacagcaagctaaacattgag

SEQ ID NO: 3791846 - DNA, 25 bp, Homo sapien
aacattgagaaccagggaaatgccc

SEQ ID NO: 3791847 - DNA, 25 bp, Homo sapien
gcttctctatgcagtgacaacacct

SEQ ID NO: 3791848 - DNA, 25 bp, Homo sapien
ggccaagcatggtggtcctcacctg

SEQ ID NO: 3791849 - DNA, 25 bp, Homo sapien
tgtttgaagagtatcagtgtggccc

SEQ ID NO: 3791850 - DNA, 25 bp, Homo sapien
tatacaaggtgtggtcctcagtgcg

SEQ ID NO: 3791851 - DNA, 25 bp, Homo sapien
cataagttttagtcacgtgccgggc

SEQ ID NO: 3791852 - DNA, 25 bp, Homo sapien
tgctatcattgggaagcccctgctc

SEQ ID NO: 3791853 - DNA, 25 bp, Homo sapien
tcttactggactcggatgaggagct

SEQ ID NO: 3791854 - DNA, 25 bp, Homo sapien
ccagaaaggcaaagagcgtcggtcc

SEQ ID NO: 3791855 - DNA, 25 bp, Homo sapien
gagcccaccaagaagcgaagctgtg

SEQ ID NO: 3791856 - DNA, 25 bp, Homo sapien
ggagcatcctcacgctgtctaaaga

SEQ ID NO: 3791857 - DNA, 25 bp, Homo sapien
accacagtttctcagcgcggttgcc

SEQ ID NO: 3791858 - DNA, 25 bp, Homo sapien
ggcacgctctgctcgttcctcagta

SEQ ID NO: 3791859 - DNA, 25 bp, Homo sapien
ccaggagtgtagagggaccacagtt

SEQ ID NO: 3791860 - DNA, 25 bp, Homo sapien
cacatcctgacatccgtgagcagag

SEQ ID NO: 3791861 - DNA, 25 bp, Homo sapien
gcgtctaacctgtatctggtagaaa

SEQ ID NO: 3791862 - DNA, 25 bp, Homo sapien
tttctccagctacaacagatggttg

SEQ ID NO: 3791863 - DNA, 25 bp, Homo sapien
gactcttgaaacttgcgtctaacct

SEQ ID NO: 3791864 - DNA, 25 bp, Homo sapien
cagcacaattggtcctacagcgaat

SEQ ID NO: 3791865 - DNA, 25 bp, Homo sapien
agctgccacagtgccttaaactcgc

SEQ ID NO: 3791866 - DNA, 25 bp, Homo sapien
gttgtatccgcgaacatttcctgag

SEQ ID NO: 3791867 - DNA, 25 bp, Homo sapien
aactaacagactccacctgaagcaa

SEQ ID NO: 3791868 - DNA, 25 bp, Homo sapien
gaggaaccagactttatctcacagc

SEQ ID NO: 3791869 - DNA, 25 bp, Homo sapien
gaacatatagagcaaaatcacacaa

SEQ ID NO: 3791870 - DNA, 25 bp, Homo sapien
gaaatgcagtgtaactcatctcgaa

SEQ ID NO: 3791871 - DNA, 25 bp, Homo sapien
tgatagggattatgctggtagatgc

SEQ ID NO: 3791872 - DNA, 25 bp, Homo sapien
tttgctgtctgaaacctcccttaaa

SEQ ID NO: 3791873 - DNA, 25 bp, Homo sapien
cttgttgactaggctggagcgtagt

SEQ ID NO: 3791874 - DNA, 25 bp, Homo sapien
ctcttgttgactaggctggagcgta

SEQ ID NO: 3791875 - DNA, 25 bp, Homo sapien
tcttgttgactaggctggagcgtag

SEQ ID NO: 3791876 - DNA, 25 bp, Homo sapien
gctcttgttgactaggctggagcgt

SEQ ID NO: 3791877 - DNA, 25 bp, Homo sapien
cacaggacaagttctaccatgccca

SEQ ID NO: 3791878 - DNA, 25 bp, Homo sapien
aatcccatcaccttgcggttgaggc

SEQ ID NO: 3791879 - DNA, 25 bp, Homo sapien
ggctgtcctactggccatgaagtgg

SEQ ID NO: 3791880 - DNA, 25 bp, Homo sapien
tcctctaatggcagaaagggtaggg

SEQ ID NO: 3791881 - DNA, 25 bp, Homo sapien
ggacactccacctaacaacagagaa

SEQ ID NO: 3791882 - DNA, 25 bp, Homo sapien
taactgacatctagaggacactcca

SEQ ID NO: 3791883 - DNA, 25 bp, Homo sapien
caagtgttcaagcttggagcactca

SEQ ID NO: 3791884 - DNA, 25 bp, Homo sapien
cagacaaatccactatcagagctgg

SEQ ID NO: 3791885 - DNA, 25 bp, Homo sapien
gcacattgaatgaacatcatactca

SEQ ID NO: 3791886 - DNA, 25 bp, Homo sapien
caaagcagcaggatacaaagtcagc

SEQ ID NO: 3791887 - DNA, 25 bp, Homo sapien
gaacattcacctttaccactactat

SEQ ID NO: 3791888 - DNA, 25 bp, Homo sapien
aaactaggcctaaacattacacaca

SEQ ID NO: 3791889 - DNA, 25 bp, Homo sapien
ctgatcttcggaggtgcctgggccc

SEQ ID NO: 3791890 - DNA, 25 bp, Homo sapien
tccaaagtccactggagtcacggtg

SEQ ID NO: 3791891 - DNA, 25 bp, Homo sapien
gaagctagtgacatgcaacttgctg

SEQ ID NO: 3791892 - DNA, 25 bp, Homo sapien
cttgagcccatgaggaggtgctgat

SEQ ID NO: 3791893 - DNA, 25 bp, Homo sapien
gccttctgaacggtggccggctcct

SEQ ID NO: 3791894 - DNA, 25 bp, Homo sapien
aagcttccctgtgttgtgctgctgg

SEQ ID NO: 3791895 - DNA, 25 bp, Homo sapien
ggcaggagtgcttccccgtgagctc

SEQ ID NO: 3791896 - DNA, 25 bp, Homo sapien
gagtgcttccccgtgagctcttcca

SEQ ID NO: 3791897 - DNA, 25 bp, Homo sapien
ccggcttatttatggctggcttcca

SEQ ID NO: 3791898 - DNA, 25 bp, Homo sapien
ggctggctctactcggctggctcta

SEQ ID NO: 3791899 - DNA, 25 bp, Homo sapien
ccaggaagcggtggccaagaaagta

SEQ ID NO: 3791900 - DNA, 25 bp, Homo sapien
ggtggcacttggacactctgggcac

SEQ ID NO: 3791901 - DNA, 25 bp, Homo sapien
tggtacagtacctgggatttgcttc

SEQ ID NO: 3791902 - DNA, 25 bp, Homo sapien
ttttctggctgcgtgtggtgcctca

SEQ ID NO: 3791903 - DNA, 25 bp, Homo sapien
tgggtaatgagtacacgaagatgtg

SEQ ID NO: 3791904 - DNA, 25 bp, Homo sapien
ttgcttcaaaatgccagccctgagg

SEQ ID NO: 3791905 - DNA, 25 bp, Homo sapien
tctgtctgtgtcagtcaatgctgcc

SEQ ID NO: 3791906 - DNA, 25 bp, Homo sapien
cagcctgtggcttgtggagtctcca

SEQ ID NO: 3791907 - DNA, 25 bp, Homo sapien
gaaggaagcccagcccttctgggat

SEQ ID NO: 3791908 - DNA, 25 bp, Homo sapien
ccaacggcaacgaggagaaaagctg

SEQ ID NO: 3791909 - DNA, 25 bp, Homo sapien
gattcatcgccatcaggtgcaggca

SEQ ID NO: 3791910 - DNA, 25 bp, Homo sapien
caacattcagaggttccagggctag

SEQ ID NO: 3791911 - DNA, 25 bp, Homo sapien
tagctaagactatgggtacggcacc

SEQ ID NO: 3791912 - DNA, 25 bp, Homo sapien
tgagacggcgtctaccagatggaaa

SEQ ID NO: 3791913 - DNA, 25 bp, Homo sapien
tcctcagagatgacgagaatgctgt

SEQ ID NO: 3791914 - DNA, 25 bp, Homo sapien
atgtcctcagagatgacgagaatgc

SEQ ID NO: 3791915 - DNA, 25 bp, Homo sapien
gacgagaatgctgtcaagaatctgg

SEQ ID NO: 3791916 - DNA, 25 bp, Homo sapien
aatgctgtcaagaatctggaatatc

SEQ ID NO: 3791917 - DNA, 25 bp, Homo sapien
tggagcctccgcctcactcgctgct

SEQ ID NO: 3791918 - DNA, 25 bp, Homo sapien
aaaccggccagtcacccagaggcac

SEQ ID NO: 3791919 - DNA, 25 bp, Homo sapien
tggaggatgagactctaagcctccc

SEQ ID NO: 3791920 - DNA, 25 bp, Homo sapien
cagaggcactccacctggtgctcac

SEQ ID NO: 3791921 - DNA, 25 bp, Homo sapien
gtctggatgttgaaggctgcgatct

SEQ ID NO: 3791922 - DNA, 25 bp, Homo sapien
ggctgcgatcttcagggacacggcc

SEQ ID NO: 3791923 - DNA, 25 bp, Homo sapien
gatgttgaaggctgcgatcttcagg

SEQ ID NO: 3791924 - DNA, 25 bp, Homo sapien
cacaatgtagctgacgagggtggca

SEQ ID NO: 3791925 - DNA, 25 bp, Homo sapien
cctcctggaccagggcgatgtcata

SEQ ID NO: 3791926 - DNA, 25 bp, Homo sapien
ttccccacggcagtcaggtggctgt

SEQ ID NO: 3791927 - DNA, 25 bp, Homo sapien
gcagcttccccacggcagtcaggtg

SEQ ID NO: 3791928 - DNA, 25 bp, Homo sapien
tctgacctcctggaccagggcgatg

SEQ ID NO: 3791929 - DNA, 25 bp, Homo sapien
acccttggggcccaagtgaagtgag

SEQ ID NO: 3791930 - DNA, 25 bp, Homo sapien
ggctgtgccgtggacgagatgtcac

SEQ ID NO: 3791931 - DNA, 25 bp, Homo sapien
ctgccgatagcgaggctgtgcccag

SEQ ID NO: 3791932 - DNA, 25 bp, Homo sapien
gacccctctggctgccgatagcgag

SEQ ID NO: 3791933 - DNA, 25 bp, Homo sapien
cactgaccacgtagtgataggtgtc

SEQ ID NO: 3791934 - DNA, 25 bp, Homo sapien
caggtagcgctccttatagctgttc

SEQ ID NO: 3791935 - DNA, 25 bp, Homo sapien
gtacacgaacaggtagcgctcctta

SEQ ID NO: 3791936 - DNA, 25 bp, Homo sapien
tgaccacgtagtgataggtgtctgg

SEQ ID NO: 3791937 - DNA, 25 bp, Homo sapien
caatggctggctctcggttgaaggt

SEQ ID NO: 3791938 - DNA, 25 bp, Homo sapien
ggctcgcagccatcatcgtagtagt

SEQ ID NO: 3791939 - DNA, 25 bp, Homo sapien
cgtagtagtagctgtccaccgcaga

SEQ ID NO: 3791940 - DNA, 25 bp, Homo sapien
ctgtgaaccgggagaagaacctgac

SEQ ID NO: 3791941 - DNA, 25 bp, Homo sapien
gacagccacgtcgtgtgaggcacac

SEQ ID NO: 3791942 - DNA, 25 bp, Homo sapien
ctgtggagacagccacgtcgtgtga

SEQ ID NO: 3791943 - DNA, 25 bp, Homo sapien
gagacagccacgtcgtgtgaggcac

SEQ ID NO: 3791944 - DNA, 25 bp, Homo sapien
agccacgtcgtgtgaggcacactcc

SEQ ID NO: 3791945 - DNA, 25 bp, Homo sapien
gagcgtcgatctcggctactgcgtc

SEQ ID NO: 3791946 - DNA, 25 bp, Homo sapien
aggtagacgtcatagagagcgtcga

SEQ ID NO: 3791947 - DNA, 25 bp, Homo sapien
gacgtcatagagagcgtcgatctcg

SEQ ID NO: 3791948 - DNA, 25 bp, Homo sapien
tcatagagagcgtcgatctcggcta

SEQ ID NO: 3791949 - DNA, 25 bp, Homo sapien
ctgggacatgcggaggccgctggtg

SEQ ID NO: 3791950 - DNA, 25 bp, Homo sapien
gggacatgcggaggccgctggtgcc

SEQ ID NO: 3791951 - DNA, 25 bp, Homo sapien
cccactgcccctgggagggcctcac

SEQ ID NO: 3791952 - DNA, 25 bp, Homo sapien
tgcggaggccgctggtgcccactgc

SEQ ID NO: 3791953 - DNA, 25 bp, Homo sapien
ctaccaggaaacgctgcctgtggcc

SEQ ID NO: 3791954 - DNA, 25 bp, Homo sapien
attgaagtcgcccatcaacatgacg

SEQ ID NO: 3791955 - DNA, 25 bp, Homo sapien
tgaagtcgcccatcaacatgacgtc

SEQ ID NO: 3791956 - DNA, 25 bp, Homo sapien
gcagcccgcattgaagtcgcccatc

SEQ ID NO: 3791957 - DNA, 25 bp, Homo sapien
ccgcattgaagtcgcccatcaacat

SEQ ID NO: 3791958 - DNA, 25 bp, Homo sapien
ggcttgtccacaggcggatggatga

SEQ ID NO: 3791959 - DNA, 25 bp, Homo sapien
gtggtgtcagcgctgtcggggatca

SEQ ID NO: 3791960 - DNA, 25 bp, Homo sapien
cgctgtcggggatcagccactggaa

SEQ ID NO: 3791961 - DNA, 25 bp, Homo sapien
tgaccactgggagggtctcacatag

SEQ ID NO: 3791962 - DNA, 25 bp, Homo sapien
agccgagtcgggaacaacggcgcct

SEQ ID NO: 3791963 - DNA, 25 bp, Homo sapien
ggagcagcatccctgcaaccacgat

SEQ ID NO: 3791964 - DNA, 25 bp, Homo sapien
ctggaagttaaagggaagagccgag

SEQ ID NO: 3791965 - DNA, 25 bp, Homo sapien
aggccataggcagcctggaagttaa

SEQ ID NO: 3791966 - DNA, 25 bp, Homo sapien
gctcctgtgtcccatcctcatgtgg

SEQ ID NO: 3791967 - DNA, 25 bp, Homo sapien
gtggctgtgcaagggaggacacata

SEQ ID NO: 3791968 - DNA, 25 bp, Homo sapien
tggctgtgcaagggaggacacatac

SEQ ID NO: 3791969 - DNA, 25 bp, Homo sapien
tgggcacagggtctgggctgagcct

SEQ ID NO: 3791970 - DNA, 25 bp, Homo sapien
ggcacagggtctgggctgagcctac

SEQ ID NO: 3791971 - DNA, 25 bp, Homo sapien
ctgcaggcaagtgggcacagggtct

SEQ ID NO: 3791972 - DNA, 25 bp, Homo sapien
agtgggcacagggtctgggctgagc

SEQ ID NO: 3791973 - DNA, 25 bp, Homo sapien
atcacctccactggatagtggtcac

SEQ ID NO: 3791974 - DNA, 25 bp, Homo sapien
catcacctccactggatagtggtca

SEQ ID NO: 3791975 - DNA, 25 bp, Homo sapien
agcatcacctccactggatagtggt

SEQ ID NO: 3791976 - DNA, 25 bp, Homo sapien
gcatcacctccactggatagtggtc

SEQ ID NO: 3791977 - DNA, 25 bp, Homo sapien
aggtatttcttaacccgagtgtgtg

SEQ ID NO: 3791978 - DNA, 25 bp, Homo sapien
atttcttaacccgagtgtgtgttgg

SEQ ID NO: 3791979 - DNA, 25 bp, Homo sapien
cttcctgcagttcaactggtgtggg

SEQ ID NO: 3791980 - DNA, 25 bp, Homo sapien
ctcttcctgcagttcaactggtgtg

SEQ ID NO: 3791981 - DNA, 25 bp, Homo sapien
tgttgacgaccctagggccatggtg

SEQ ID NO: 3791982 - DNA, 25 bp, Homo sapien
tacgagaacgccatgattgctgctg

SEQ ID NO: 3791983 - DNA, 25 bp, Homo sapien
tgggccgcttgaatgagctgcttgt

SEQ ID NO: 3791984 - DNA, 25 bp, Homo sapien
gctgcttgtcaaggccctggagcga

SEQ ID NO: 3791985 - DNA, 25 bp, Homo sapien
tggaataagtggtgacctgccccgt

SEQ ID NO: 3791986 - DNA, 25 bp, Homo sapien
catgtgaaatggaacctggccagcc

SEQ ID NO: 3791987 - DNA, 25 bp, Homo sapien
ccgagaagagccttgtgggagcacc

SEQ ID NO: 3791988 - DNA, 25 bp, Homo sapien
gagatgcatcttcctagccatggca

SEQ ID NO: 3791989 - DNA, 25 bp, Homo sapien
tatacagtgctgctcctaatgatgg

SEQ ID NO: 3791990 - DNA, 25 bp, Homo sapien
ggtgtgctcacatgtttcctaaggt

SEQ ID NO: 3791991 - DNA, 25 bp, Homo sapien
cagtttggccaataacggtaccttg

SEQ ID NO: 3791992 - DNA, 25 bp, Homo sapien
tgaacattttttcgtaccctctggc

SEQ ID NO: 3791993 - DNA, 25 bp, Homo sapien
tattgctggtgctggagttgtcccc

SEQ ID NO: 3791994 - DNA, 25 bp, Homo sapien
ggcctcatctgggaagctcacggat

SEQ ID NO: 3791995 - DNA, 25 bp, Homo sapien
cactgaactgaggacacgtctggcc

SEQ ID NO: 3791996 - DNA, 25 bp, Homo sapien
tgtccctgggctggataaggcaaag

SEQ ID NO: 3791997 - DNA, 25 bp, Homo sapien
ttttagcaggtgagccgcttccagc

SEQ ID NO: 3791998 - DNA, 25 bp, Homo sapien
catctggcacccgatttggagctgg

SEQ ID NO: 3791999 - DNA, 25 bp, Homo sapien
tgcaaggagttttccagcgaggccc

SEQ ID NO: 3792000 - DNA, 25 bp, Homo sapien
gctctgcctatgaaaccctcgggaa

SEQ ID NO: 3792001 - DNA, 25 bp, Homo sapien
cattgcacctggcagaacgttcctg

SEQ ID NO: 3792002 - DNA, 25 bp, Homo sapien
aagttccatcggacaacgtgggcca

SEQ ID NO: 3792003 - DNA, 25 bp, Homo sapien
tggaagccagtttggagcctctcct

SEQ ID NO: 3792004 - DNA, 25 bp, Homo sapien
cggtgcttacagacgcatgcgcgtg

SEQ ID NO: 3792005 - DNA, 25 bp, Homo sapien
cccgtagataggaggaccaactgta

SEQ ID NO: 3792006 - DNA, 25 bp, Homo sapien
agaaccatcaaacccacagacgccg

SEQ ID NO: 3792007 - DNA, 25 bp, Homo sapien
gcaaatgtggaacccgtagatagga

SEQ ID NO: 3792008 - DNA, 25 bp, Homo sapien
atgttggccgggctatcctccagcc

SEQ ID NO: 3792009 - DNA, 25 bp, Homo sapien
cattgacaccacttgagtccctggg

SEQ ID NO: 3792010 - DNA, 25 bp, Homo sapien
tactggtatcgggatgacacaggaa

SEQ ID NO: 3792011 - DNA, 25 bp, Homo sapien
gatgagcatctggtgctacctggct

SEQ ID NO: 3792012 - DNA, 25 bp, Homo sapien
acttagtgcgtctctctcctcagga

SEQ ID NO: 3792013 - DNA, 25 bp, Homo sapien
gagggcctttgtcccaattcataga

SEQ ID NO: 3792014 - DNA, 25 bp, Homo sapien
gaaataattgcccagaagcctcttg

SEQ ID NO: 3792015 - DNA, 25 bp, Homo sapien
tgcctgtgctgcctacaatgggaag

SEQ ID NO: 3792016 - DNA, 25 bp, Homo sapien
ggactattcaaaccggcacctcaga

SEQ ID NO: 3792017 - DNA, 25 bp, Homo sapien
tctaccacatcagccccctgtagct

SEQ ID NO: 3792018 - DNA, 25 bp, Homo sapien
cattggtgctatcagggttcgctgc

SEQ ID NO: 3792019 - DNA, 25 bp, Homo sapien
ttggtgctatcagggttcgctgcag

SEQ ID NO: 3792020 - DNA, 25 bp, Homo sapien
gcattggtgctatcagggttcgctg

SEQ ID NO: 3792021 - DNA, 25 bp, Homo sapien
tggatgtttgagtgatatgccgtca

SEQ ID NO: 3792022 - DNA, 25 bp, Homo sapien
agtgatatgccgtcatccctgtgca

SEQ ID NO: 3792023 - DNA, 25 bp, Homo sapien
caaaccatatcaaggagaaatggat

SEQ ID NO: 3792024 - DNA, 25 bp, Homo sapien
catatcaaggagaaatggatgtttg

SEQ ID NO: 3792025 - DNA, 25 bp, Homo sapien
ctcagcctctggctgatatttgtat

SEQ ID NO: 3792026 - DNA, 25 bp, Homo sapien
cctcctcagcctctggctgatattt

SEQ ID NO: 3792027 - DNA, 25 bp, Homo sapien
tgggctgaggtgatctgcctgtttc

SEQ ID NO: 3792028 - DNA, 25 bp, Homo sapien
gggctgaggtgatctgcctgtttca

SEQ ID NO: 3792029 - DNA, 25 bp, Homo sapien
tcatgtttaatcttagagtgaggaa

SEQ ID NO: 3792030 - DNA, 25 bp, Homo sapien
gggaaatcatgtttaatcttagagt

SEQ ID NO: 3792031 - DNA, 25 bp, Homo sapien
gagtgaggaaggcttttacaaccaa

SEQ ID NO: 3792032 - DNA, 25 bp, Homo sapien
tcttagagtgaggaaggcttttaca

SEQ ID NO: 3792033 - DNA, 25 bp, Homo sapien
gatggccgggattcacaaaggtcgc

SEQ ID NO: 3792034 - DNA, 25 bp, Homo sapien
acttgcagcggcctagacggatggc

SEQ ID NO: 3792035 - DNA, 25 bp, Homo sapien
cattccaggaatgcgcacagctagg

SEQ ID NO: 3792036 - DNA, 25 bp, Homo sapien
ttgacaacgcgatccaaggtcacgg

SEQ ID NO: 3792037 - DNA, 25 bp, Homo sapien
gctctaagcccacactcagaaagtg

SEQ ID NO: 3792038 - DNA, 25 bp, Homo sapien
tagcacagagctttgaaccttgagt

SEQ ID NO: 3792039 - DNA, 25 bp, Homo sapien
tccggtggagattgctgccactgct

SEQ ID NO: 3792040 - DNA, 25 bp, Homo sapien
cacccgtagggaaaccttgagccat

SEQ ID NO: 3792041 - DNA, 25 bp, Homo sapien
gaggcggcgcttcttcccgtgttca

SEQ ID NO: 3792042 - DNA, 25 bp, Homo sapien
cacagttagggtcgtcagttggtct

SEQ ID NO: 3792043 - DNA, 25 bp, Homo sapien
ggtctgaaactgcatttggcccact

SEQ ID NO: 3792044 - DNA, 25 bp, Homo sapien
cccgtgtggcgtttgaggaaatgct

SEQ ID NO: 3792045 - DNA, 25 bp, Homo sapien
tatctatacataatggctgaagcca

SEQ ID NO: 3792046 - DNA, 25 bp, Homo sapien
actctgtgggcgtctcccagtatta

SEQ ID NO: 3792047 - DNA, 25 bp, Homo sapien
taatgcaagcttataatgtatcccg

SEQ ID NO: 3792048 - DNA, 25 bp, Homo sapien
taggaattgactccggcgtgcacac

SEQ ID NO: 3792049 - DNA, 25 bp, Homo sapien
tgcagcagcggattctgcagcaaca

SEQ ID NO: 3792050 - DNA, 25 bp, Homo sapien
tggcggctcagatgggacagcttgg

SEQ ID NO: 3792051 - DNA, 25 bp, Homo sapien
taccgagaaatgttacggaggcagc

SEQ ID NO: 3792052 - DNA, 25 bp, Homo sapien
gctccatgggccagatggcggctca

SEQ ID NO: 3792053 - DNA, 25 bp, Homo sapien
ctcggcagatcgagcgtgaggccca

SEQ ID NO: 3792054 - DNA, 25 bp, Homo sapien
tgtaccgggtgaacatcaacaacag

SEQ ID NO: 3792055 - DNA, 25 bp, Homo sapien
acagggaagcctaccagccaggtgc

SEQ ID NO: 3792056 - DNA, 25 bp, Homo sapien
cacccgtgagcatgtcaccagctgg

SEQ ID NO: 3792057 - DNA, 25 bp, Homo sapien
tctgattggtggcttcgttgcttgg

SEQ ID NO: 3792058 - DNA, 25 bp, Homo sapien
tggctgtgtgttatgatggaccagt

SEQ ID NO: 3792059 - DNA, 25 bp, Homo sapien
gttcacccaagtatggccttcttgc

SEQ ID NO: 3792060 - DNA, 25 bp, Homo sapien
gccttcttgctgacaggtatcattt

SEQ ID NO: 3792061 - DNA, 25 bp, Homo sapien
ttgtgccagtgcgttctagcctgga

SEQ ID NO: 3792062 - DNA, 25 bp, Homo sapien
gccagtgcgttctagcctggatgag

SEQ ID NO: 3792063 - DNA, 25 bp, Homo sapien
aggattacttatggccaggcgttca

SEQ ID NO: 3792064 - DNA, 25 bp, Homo sapien
ggaggcgaacacaggaggattactt

SEQ ID NO: 3792065 - DNA, 25 bp, Homo sapien
tgtggccagggaacgttcctcagag

SEQ ID NO: 3792066 - DNA, 25 bp, Homo sapien
cacaatggtcctggttcagtgtacc

SEQ ID NO: 3792067 - DNA, 25 bp, Homo sapien
gagcagacattagggtctgccacca

SEQ ID NO: 3792068 - DNA, 25 bp, Homo sapien
agattcccttagctgagattgtgtc

SEQ ID NO: 3792069 - DNA, 25 bp, Homo sapien
tcattgatttgctagaagccacaag

SEQ ID NO: 3792070 - DNA, 25 bp, Homo sapien
taagaggcgccatccagagatagga

SEQ ID NO: 3792071 - DNA, 25 bp, Homo sapien
gtgtggcgtctgatcatcacttgct

SEQ ID NO: 3792072 - DNA, 25 bp, Homo sapien
cagaagagtagctgagttccctggc

SEQ ID NO: 3792073 - DNA, 25 bp, Homo sapien
ttttgaaattgcaggccagggtggt

SEQ ID NO: 3792074 - DNA, 25 bp, Homo sapien
ggtgtaatagtacaatcctgtaatc

SEQ ID NO: 3792075 - DNA, 25 bp, Homo sapien
taattagttgggtgtaatagtacaa

SEQ ID NO: 3792076 - DNA, 25 bp, Homo sapien
cacaacagactgtttataaagtttt

SEQ ID NO: 3792077 - DNA, 25 bp, Homo sapien
tgtaaaaaacatgcgcccttctggg

SEQ ID NO: 3792078 - DNA, 25 bp, Homo sapien
tatttcatcgcgtgaagaggccatg

SEQ ID NO: 3792079 - DNA, 25 bp, Homo sapien
catcagtaaagtgcacgtagctcgg

SEQ ID NO: 3792080 - DNA, 25 bp, Homo sapien
cagaaatcatgcagtaaggaccgtt

SEQ ID NO: 3792081 - DNA, 25 bp, Homo sapien
gcttgggagcttgctagtcacagaa

SEQ ID NO: 3792082 - DNA, 25 bp, Homo sapien
tgacggcggttcaagcaggcttctg

SEQ ID NO: 3792083 - DNA, 25 bp, Homo sapien
tctgacttgtccgtcgtatcccaaa

SEQ ID NO: 3792084 - DNA, 25 bp, Homo sapien
ccacaggtgttaaagaatccgtcca

SEQ ID NO: 3792085 - DNA, 25 bp, Homo sapien
caaaaaccattctgggaggcgtaag

SEQ ID NO: 3792086 - DNA, 25 bp, Homo sapien
tccccgtgctgatggtcactttgtc

SEQ ID NO: 3792087 - DNA, 25 bp, Homo sapien
actttgtccccacaggttgccagaa

SEQ ID NO: 3792088 - DNA, 25 bp, Homo sapien
taagagctgtgacgcggctctgaca

SEQ ID NO: 3792089 - DNA, 25 bp, Homo sapien
tcaatccatgcagcaatcctcacac

SEQ ID NO: 3792090 - DNA, 25 bp, Homo sapien
gtggactccagtgttgcggctgctc

SEQ ID NO: 3792091 - DNA, 25 bp, Homo sapien
gactccagtgttgcggctgctctga

SEQ ID NO: 3792092 - DNA, 25 bp, Homo sapien
cagtaatcatcgctgtggatggctc

SEQ ID NO: 3792093 - DNA, 25 bp, Homo sapien
ctgtgtccacagtaatcatcgctgt

SEQ ID NO: 3792094 - DNA, 25 bp, Homo sapien
aatagttgctttgagttgcaattgc

SEQ ID NO: 3792095 - DNA, 25 bp, Homo sapien
gtaaatagttgctttgagttgcaat

SEQ ID NO: 3792096 - DNA, 25 bp, Homo sapien
tacttcagcattgaatgtgtgtaaa

SEQ ID NO: 3792097 - DNA, 25 bp, Homo sapien
aggaagcaatacttcagcattgaat

SEQ ID NO: 3792098 - DNA, 25 bp, Homo sapien
ccgggaaaccaaggagctgcaaagt

SEQ ID NO: 3792099 - DNA, 25 bp, Homo sapien
gacacgagtttctaagcagctggca

SEQ ID NO: 3792100 - DNA, 25 bp, Homo sapien
acagaatctctgcagcggaaacgcc

SEQ ID NO: 3792101 - DNA, 25 bp, Homo sapien
tgagccttcctaaacagccagtgca

SEQ ID NO: 3792102 - DNA, 25 bp, Homo sapien
caagacatctctgggttctgacagc

SEQ ID NO: 3792103 - DNA, 25 bp, Homo sapien
gagagctaccgcgtcttgagcaaga

SEQ ID NO: 3792104 - DNA, 25 bp, Homo sapien
caaagtgcacggatcacagggtcat

SEQ ID NO: 3792105 - DNA, 25 bp, Homo sapien
tatgacttcgactacagagggaccg

SEQ ID NO: 3792106 - DNA, 25 bp, Homo sapien
tatgggttggtcattcagcgcttcc

SEQ ID NO: 3792107 - DNA, 25 bp, Homo sapien
tctcaggcgtttgtgattaggcagc

SEQ ID NO: 3792108 - DNA, 25 bp, Homo sapien
gacttaagactttcgctgggcttga

SEQ ID NO: 3792109 - DNA, 25 bp, Homo sapien
tctaatgaacttggaccccagggtc

SEQ ID NO: 3792110 - DNA, 25 bp, Homo sapien
gtgtgctgtcttacttaaaacactg

SEQ ID NO: 3792111 - DNA, 25 bp, Homo sapien
gaaagaatcgaactgtgtgctgtct

SEQ ID NO: 3792112 - DNA, 25 bp, Homo sapien
actgtgtgctgtcttacttaaaaca

SEQ ID NO: 3792113 - DNA, 25 bp, Homo sapien
aataagaaagaatcgaactgtgtgc

SEQ ID NO: 3792114 - DNA, 25 bp, Homo sapien
gtgtggtcactgacagtctttgcgt

SEQ ID NO: 3792115 - DNA, 25 bp, Homo sapien
cagtctttgcgtggccagtggccaa

SEQ ID NO: 3792116 - DNA, 25 bp, Homo sapien
tgcgtggccagtggccaaacccagg

SEQ ID NO: 3792117 - DNA, 25 bp, Homo sapien
aggctggctttgctagtggcctcat

SEQ ID NO: 3792118 - DNA, 25 bp, Homo sapien
acctgattggtcatgcagacagaac

SEQ ID NO: 3792119 - DNA, 25 bp, Homo sapien
ttgaaggctgtcatgggttgtgtcc

SEQ ID NO: 3792120 - DNA, 25 bp, Homo sapien
aaggacctgattggtcatgcagaca

SEQ ID NO: 3792121 - DNA, 25 bp, Homo sapien
catgggttgtgtccatgttgtttgg

SEQ ID NO: 3792122 - DNA, 25 bp, Homo sapien
gccggaagcgcatgcccattgaata

SEQ ID NO: 3792123 - DNA, 25 bp, Homo sapien
cattgaataatcacgttcgtcccac

SEQ ID NO: 3792124 - DNA, 25 bp, Homo sapien
taaccgcgctggtgtatgtgcgtgt

SEQ ID NO: 3792125 - DNA, 25 bp, Homo sapien
tgaaatggtagagttatggataacc

SEQ ID NO: 3792126 - DNA, 25 bp, Homo sapien
catcccttaaagatagccactgtta

SEQ ID NO: 3792127 - DNA, 25 bp, Homo sapien
gattatatcctcttaccaaagttcc

SEQ ID NO: 3792128 - DNA, 25 bp, Homo sapien
taagttagtgacttgctttccaagc

SEQ ID NO: 3792129 - DNA, 25 bp, Homo sapien
taattcagagacttcctttagctcc

SEQ ID NO: 3792130 - DNA, 25 bp, Homo sapien
tgtatcttccggctaggtttttggc

SEQ ID NO: 3792131 - DNA, 25 bp, Homo sapien
cactgcccgtgatagctcccttatt

SEQ ID NO: 3792132 - DNA, 25 bp, Homo sapien
ggtttttggctggtctcctgatctg

SEQ ID NO: 3792133 - DNA, 25 bp, Homo sapien
tcagggtggctgagatgttgacctt

SEQ ID NO: 3792134 - DNA, 25 bp, Homo sapien
ctgtggaaggcaccggagaggcggt

SEQ ID NO: 3792135 - DNA, 25 bp, Homo sapien
cccctcgatagatgtgacctccctt

SEQ ID NO: 3792136 - DNA, 25 bp, Homo sapien
cggagaggcggtttccctgtctctt

SEQ ID NO: 3792137 - DNA, 25 bp, Homo sapien
tcgatagatgtgacctcccttccag

SEQ ID NO: 3792138 - DNA, 25 bp, Homo sapien
tacatggcatgtggctgattctcca

SEQ ID NO: 3792139 - DNA, 25 bp, Homo sapien
catgcgtcacatgggataggctctc

SEQ ID NO: 3792140 - DNA, 25 bp, Homo sapien
cagctgcgcgtgtcatcagagcgga

SEQ ID NO: 3792141 - DNA, 25 bp, Homo sapien
gagcgtgcgcttgtccttcatcaca

SEQ ID NO: 3792142 - DNA, 25 bp, Homo sapien
catctgaaagcttaggtcaatttgg

SEQ ID NO: 3792143 - DNA, 25 bp, Homo sapien
gtggcagtccgatgttttggaaaac

SEQ ID NO: 3792144 - DNA, 25 bp, Homo sapien
tttggtcatagatgtggctggccat

SEQ ID NO: 3792145 - DNA, 25 bp, Homo sapien
ctgtggcagtccgatgttttggaaa

SEQ ID NO: 3792146 - DNA, 25 bp, Homo sapien
tgaatcctggactgacagtgttctt

SEQ ID NO: 3792147 - DNA, 25 bp, Homo sapien
ggaaggacttgcttgctcttgttgc

SEQ ID NO: 3792148 - DNA, 25 bp, Homo sapien
cactcgtaggactgagtgaatcctg

SEQ ID NO: 3792149 - DNA, 25 bp, Homo sapien
ttaccgatgattctgttgaggaagg

SEQ ID NO: 3792150 - DNA, 25 bp, Homo sapien
tccttttcgagacctttggctacca

SEQ ID NO: 3792151 - DNA, 25 bp, Homo sapien
gggtggcctactctgtccttttcga

SEQ ID NO: 3792152 - DNA, 25 bp, Homo sapien
taccatttccgggatgaagcctgct

SEQ ID NO: 3792153 - DNA, 25 bp, Homo sapien
gggagcttctccatgtgcatcgaag

SEQ ID NO: 3792154 - DNA, 25 bp, Homo sapien
tatgttgcctacagtcgctcgtttg

SEQ ID NO: 3792155 - DNA, 25 bp, Homo sapien
cagtcgctcgtttgtagtggccgta

SEQ ID NO: 3792156 - DNA, 25 bp, Homo sapien
ccatcctgggccgttctgtctttat

SEQ ID NO: 3792157 - DNA, 25 bp, Homo sapien
tgtagtggccgtagaggaaccgcat

SEQ ID NO: 3792158 - DNA, 25 bp, Homo sapien
atctgctttcatcaaggaaacttca

SEQ ID NO: 3792159 - DNA, 25 bp, Homo sapien
ttgattgacacaaaggaaggggctg

SEQ ID NO: 3792160 - DNA, 25 bp, Homo sapien
tgaaatgtggacagcatttgctgcc

SEQ ID NO: 3792161 - DNA, 25 bp, Homo sapien
tgccgacagaagcaaaccggctgcc

SEQ ID NO: 3792162 - DNA, 25 bp, Homo sapien
ctatgagatgtctgagtattctcaa

SEQ ID NO: 3792163 - DNA, 25 bp, Homo sapien
tttcacttccacaatcttgtccagc

SEQ ID NO: 3792164 - DNA, 25 bp, Homo sapien
caatcttgtccagctcagtaggtaa

SEQ ID NO: 3792165 - DNA, 25 bp, Homo sapien
gagatgtctgagtattctcaaatta

SEQ ID NO: 3792166 - DNA, 25 bp, Homo sapien
catccgaggcggcacttatctgaag

SEQ ID NO: 3792167 - DNA, 25 bp, Homo sapien
gcctcttatatgaggaggatctcaa

SEQ ID NO: 3792168 - DNA, 25 bp, Homo sapien
agaacatccggcctggcatccgagg

SEQ ID NO: 3792169 - DNA, 25 bp, Homo sapien
tgagtgaagcttccggcagaacatc

SEQ ID NO: 3792170 - DNA, 25 bp, Homo sapien
tgcaggcatgtgctatggtccctgg

SEQ ID NO: 3792171 - DNA, 25 bp, Homo sapien
gccctgccatgcctgcttatctgta

SEQ ID NO: 3792172 - DNA, 25 bp, Homo sapien
cccaaagtgctaagtgtaatcccaa

SEQ ID NO: 3792173 - DNA, 25 bp, Homo sapien
ggcatgtgctatggtccctggccct

SEQ ID NO: 3792174 - DNA, 25 bp, Homo sapien
acttctgagttgtccgattttatag

SEQ ID NO: 3792175 - DNA, 25 bp, Homo sapien
cgggatctatgtctggaagggccat

SEQ ID NO: 3792176 - DNA, 25 bp, Homo sapien
gccaagaactcatcgtctgcttctg

SEQ ID NO: 3792177 - DNA, 25 bp, Homo sapien
tgtaaaaaacatggacctggcgtgt

SEQ ID NO: 3792178 - DNA, 25 bp, Homo sapien
gaccctgcggacagggaccgatctc

SEQ ID NO: 3792179 - DNA, 25 bp, Homo sapien
tgagccggatggcagagccgtctct

SEQ ID NO: 3792180 - DNA, 25 bp, Homo sapien
tcagctcccgggctttgcggtcgct

SEQ ID NO: 3792181 - DNA, 25 bp, Homo sapien
acgcagacgcttagcggcggcgctt

SEQ ID NO: 3792182 - DNA, 25 bp, Homo sapien
tagccatctagtaagggatacagcg

SEQ ID NO: 3792183 - DNA, 25 bp, Homo sapien
cagcgcacaattgcaaatcaggata

SEQ ID NO: 3792184 - DNA, 25 bp, Homo sapien
tattctgcatattaaggcatagtct

SEQ ID NO: 3792185 - DNA, 25 bp, Homo sapien
gcatattaaggcatagtctctcccc

SEQ ID NO: 3792186 - DNA, 25 bp, Homo sapien
tcagtcagtacagatactcagtgtc

SEQ ID NO: 3792187 - DNA, 25 bp, Homo sapien
gaaacttaatgatccagagattccc

SEQ ID NO: 3792188 - DNA, 25 bp, Homo sapien
tggctgggatgaggctaatacattc

SEQ ID NO: 3792189 - DNA, 25 bp, Homo sapien
gccttgggcttttctttccgtcatg

SEQ ID NO: 3792190 - DNA, 25 bp, Homo sapien
agaggccaccgtgcctttgtaaaga

SEQ ID NO: 3792191 - DNA, 25 bp, Homo sapien
gagccagcctgggattgtcagcctt

SEQ ID NO: 3792192 - DNA, 25 bp, Homo sapien
tttgaacgaagccactcaacccgag

SEQ ID NO: 3792193 - DNA, 25 bp, Homo sapien
tctcggcactagaattcgccactct

SEQ ID NO: 3792194 - DNA, 25 bp, Homo sapien
tctgcgcgcggcctcgcgggagctg

SEQ ID NO: 3792195 - DNA, 25 bp, Homo sapien
tgcgcgcggcctcgcgggagctgta

SEQ ID NO: 3792196 - DNA, 25 bp, Homo sapien
gagctgtagttctccgtgtcctgct

SEQ ID NO: 3792197 - DNA, 25 bp, Homo sapien
gttctccgtgtcctgctggtgcagc

SEQ ID NO: 3792198 - DNA, 25 bp, Homo sapien
gtccaagattcccaggatccggagt

SEQ ID NO: 3792199 - DNA, 25 bp, Homo sapien
atccgaggcgccctttgccgtcccg

SEQ ID NO: 3792200 - DNA, 25 bp, Homo sapien
cgtcgccgggtccaagattcccagg

SEQ ID NO: 3792201 - DNA, 25 bp, Homo sapien
tagggcggccccagcatccgaggcg

SEQ ID NO: 3792202 - DNA, 25 bp, Homo sapien
gacattccaaggcaggcgtgggctt

SEQ ID NO: 3792203 - DNA, 25 bp, Homo sapien
tccaccgggtgctggcaacatctaa

SEQ ID NO: 3792204 - DNA, 25 bp, Homo sapien
tgtaagcaaaactgctcggcatcca

SEQ ID NO: 3792205 - DNA, 25 bp, Homo sapien
tagagaaactgcctaacaggttgct

SEQ ID NO: 3792206 - DNA, 25 bp, Homo sapien
attctgtaccacacttcgtggctgc

SEQ ID NO: 3792207 - DNA, 25 bp, Homo sapien
cttcgtggctgctagtggtttctgg

SEQ ID NO: 3792208 - DNA, 25 bp, Homo sapien
tgtaccacacttcgtggctgctagt

SEQ ID NO: 3792209 - DNA, 25 bp, Homo sapien
cacacttcgtggctgctagtggttt

SEQ ID NO: 3792210 - DNA, 25 bp, Homo sapien
acctgctgccacgtagagctgggaa

SEQ ID NO: 3792211 - DNA, 25 bp, Homo sapien
catgagggtgtttcgagtgggaagc

SEQ ID NO: 3792212 - DNA, 25 bp, Homo sapien
tgtgaccggccaagagacccacctt

SEQ ID NO: 3792213 - DNA, 25 bp, Homo sapien
accacactctgctgattactttctt

SEQ ID NO: 3792214 - DNA, 25 bp, Homo sapien
ggctgcagttcttatgatttcccat

SEQ ID NO: 3792215 - DNA, 25 bp, Homo sapien
ctggctgcagttcttatgatttccc

SEQ ID NO: 3792216 - DNA, 25 bp, Homo sapien
tgcagttcttatgatttcccatctc

SEQ ID NO: 3792217 - DNA, 25 bp, Homo sapien
agcagccacctttgccgacagctct

SEQ ID NO: 3792218 - DNA, 25 bp, Homo sapien
cttgagttttgaggccaacaggaag

SEQ ID NO: 3792219 - DNA, 25 bp, Homo sapien
gaccaggtaagctcttgagttttga

SEQ ID NO: 3792220 - DNA, 25 bp, Homo sapien
ctggccacggttgagccaccaggac

SEQ ID NO: 3792221 - DNA, 25 bp, Homo sapien
ccaccaggaccaggtaagctcttga

SEQ ID NO: 3792222 - DNA, 25 bp, Homo sapien
ggactgtgtctggtcgattcacatt

SEQ ID NO: 3792223 - DNA, 25 bp, Homo sapien
cgattcacattggagggtccctgaa

SEQ ID NO: 3792224 - DNA, 25 bp, Homo sapien
cattagaggacctgtattcttgttc

SEQ ID NO: 3792225 - DNA, 25 bp, Homo sapien
agggtccctgaatgagctttgtcca

SEQ ID NO: 3792226 - DNA, 25 bp, Homo sapien
tagaggacgtttctattcatccttc

SEQ ID NO: 3792227 - DNA, 25 bp, Homo sapien
ggtgtgcaatcccatgaccagccga

SEQ ID NO: 3792228 - DNA, 25 bp, Homo sapien
gacctcagcttacaagttaccccaa

SEQ ID NO: 3792229 - DNA, 25 bp, Homo sapien
actttgtcacgtgtctgagcccttg

SEQ ID NO: 3792230 - DNA, 25 bp, Homo sapien
agagaactgacatgtgagctgtgcc

SEQ ID NO: 3792231 - DNA, 25 bp, Homo sapien
ttctagctacacaggctttcggcct

SEQ ID NO: 3792232 - DNA, 25 bp, Homo sapien
gacccaggcaagttcgcttctgctt

SEQ ID NO: 3792233 - DNA, 25 bp, Homo sapien
gacatctgctgaatgggcgggtccc

SEQ ID NO: 3792234 - DNA, 25 bp, Homo sapien
ggagacgaaaaaggcatcccagaat

SEQ ID NO: 3792235 - DNA, 25 bp, Homo sapien
cagcgagtgcagtgagcggatacac

SEQ ID NO: 3792236 - DNA, 25 bp, Homo sapien
tcttcccagcgcagttggccttgag

SEQ ID NO: 3792237 - DNA, 25 bp, Homo sapien
tcgtgttgaaccacagactcgcgtt

SEQ ID NO: 3792238 - DNA, 25 bp, Homo sapien
tcacggtagaataacgacgaggccc

SEQ ID NO: 3792239 - DNA, 25 bp, Homo sapien
tcctagcttggtcccagcatttggg

SEQ ID NO: 3792240 - DNA, 25 bp, Homo sapien
tccgagcttccgcttggttcctagc

SEQ ID NO: 3792241 - DNA, 25 bp, Homo sapien
tcggtctcagtttccctcacggtag

SEQ ID NO: 3792242 - DNA, 25 bp, Homo sapien
cagcggcgggggcggtcgggatccg

SEQ ID NO: 3792243 - DNA, 25 bp, Homo sapien
tcagcggcgggggcggtcgggatcc

SEQ ID NO: 3792244 - DNA, 25 bp, Homo sapien
ctcagcggcgggggcggtcgggatc

SEQ ID NO: 3792245 - DNA, 25 bp, Homo sapien
cccaggctgcacaagtaggtggcaa

SEQ ID NO: 3792246 - DNA, 25 bp, Homo sapien
aggacagtacccatagccaggtgcg

SEQ ID NO: 3792247 - DNA, 25 bp, Homo sapien
taactgccgccgaggctcaagagat

SEQ ID NO: 3792248 - DNA, 25 bp, Homo sapien
tcagcagtatggtcttacagatggg

SEQ ID NO: 3792249 - DNA, 25 bp, Homo sapien
tagctgagaacttggagacaaggcc

SEQ ID NO: 3792250 - DNA, 25 bp, Homo sapien
tctctttgcagaaggaagcgggtcc

SEQ ID NO: 3792251 - DNA, 25 bp, Homo sapien
tgaggaacaccccttgccttggagt

SEQ ID NO: 3792252 - DNA, 25 bp, Homo sapien
ccttggagtgtcctgcgagtgcgct

SEQ ID NO: 3792253 - DNA, 25 bp, Homo sapien
atttttagacacaggcgcaatccag

SEQ ID NO: 3792254 - DNA, 25 bp, Homo sapien
caggcgcaatccagcctccccgaag

SEQ ID NO: 3792255 - DNA, 25 bp, Homo sapien
gcctccccgaagctcctctgtgctg

SEQ ID NO: 3792256 - DNA, 25 bp, Homo sapien
cagcctccccgaagctcctctgtgc

SEQ ID NO: 3792257 - DNA, 25 bp, Homo sapien
caggcagtgggctcccagctggtct

SEQ ID NO: 3792258 - DNA, 25 bp, Homo sapien
gccggagttggaggtggcagcaggc

SEQ ID NO: 3792259 - DNA, 25 bp, Homo sapien
tgagggggccggagttggaggtggc

SEQ ID NO: 3792260 - DNA, 25 bp, Homo sapien
tcccagctggtcttcacgcaggaac

SEQ ID NO: 3792261 - DNA, 25 bp, Homo sapien
cgagcggctcgtccagggagtgcat

SEQ ID NO: 3792262 - DNA, 25 bp, Homo sapien
cccggagcttggtgatactcagctt

SEQ ID NO: 3792263 - DNA, 25 bp, Homo sapien
atactcagcttcaggtcgagcggct

SEQ ID NO: 3792264 - DNA, 25 bp, Homo sapien
gtcctctcccgcttctctcttgccg

SEQ ID NO: 3792265 - DNA, 25 bp, Homo sapien
ctgagggcggggagcctggagagcc

SEQ ID NO: 3792266 - DNA, 25 bp, Homo sapien
agccaggtgtggggctgtcatccac

SEQ ID NO: 3792267 - DNA, 25 bp, Homo sapien
agggcggggagcctggagagccagg

SEQ ID NO: 3792268 - DNA, 25 bp, Homo sapien
cggggagcctggagagccaggtgtg

SEQ ID NO: 3792269 - DNA, 25 bp, Homo sapien
agaggggctgctgaaaagcgtccct

SEQ ID NO: 3792270 - DNA, 25 bp, Homo sapien
caggctgaggtccacgagaggggct

SEQ ID NO: 3792271 - DNA, 25 bp, Homo sapien
gctgaaaagcgtccctccaccttct

SEQ ID NO: 3792272 - DNA, 25 bp, Homo sapien
tgccctggcgctcgggggacagcga

SEQ ID NO: 3792273 - DNA, 25 bp, Homo sapien
ttggcccagcgacacaccagctgct

SEQ ID NO: 3792274 - DNA, 25 bp, Homo sapien
ggtctggcgagaggcacttgtcctt

SEQ ID NO: 3792275 - DNA, 25 bp, Homo sapien
ggcaggtctggcgagaggcacttgt

SEQ ID NO: 3792276 - DNA, 25 bp, Homo sapien
tctggcgagaggcacttgtccttgg

SEQ ID NO: 3792277 - DNA, 25 bp, Homo sapien
catgcggggtgacctgccccagact

SEQ ID NO: 3792278 - DNA, 25 bp, Homo sapien
cccagactccacactactcttgctg

SEQ ID NO: 3792279 - DNA, 25 bp, Homo sapien
agactccacactactcttgctggcc

SEQ ID NO: 3792280 - DNA, 25 bp, Homo sapien
atgcggggtgacctgccccagactc

SEQ ID NO: 3792281 - DNA, 25 bp, Homo sapien
agtggcagcagtaccccgcatcctt

SEQ ID NO: 3792282 - DNA, 25 bp, Homo sapien
cgggcttgacatggtaatcgttgac

SEQ ID NO: 3792283 - DNA, 25 bp, Homo sapien
tggcgttgaaacctcggccatggcg

SEQ ID NO: 3792284 - DNA, 25 bp, Homo sapien
gttgacatggtccaccaggtcttgc

SEQ ID NO: 3792285 - DNA, 25 bp, Homo sapien
ggcggggggcacggctcagctcact

SEQ ID NO: 3792286 - DNA, 25 bp, Homo sapien
gggcggggggcacggctcagctcac

SEQ ID NO: 3792287 - DNA, 25 bp, Homo sapien
tgtgtgcgaccggttgtggatcttc

SEQ ID NO: 3792288 - DNA, 25 bp, Homo sapien
cttctcgttggtgtgtgtgcggatg

SEQ ID NO: 3792289 - DNA, 25 bp, Homo sapien
gcggatgtggatgagcatcttgtac

SEQ ID NO: 3792290 - DNA, 25 bp, Homo sapien
tgctgcaggtcggacagcggtgtgg

SEQ ID NO: 3792291 - DNA, 25 bp, Homo sapien
ggtctcagctgagcgcccccttcat

SEQ ID NO: 3792292 - DNA, 25 bp, Homo sapien
gccggtctcagctgagcgccccctt

SEQ ID NO: 3792293 - DNA, 25 bp, Homo sapien
cccagccggtctcagctgagcgccc

SEQ ID NO: 3792294 - DNA, 25 bp, Homo sapien
gctgagcgcccccttcatgggccaa

SEQ ID NO: 3792295 - DNA, 25 bp, Homo sapien
tcaacccttatctctgaggcccggg

SEQ ID NO: 3792296 - DNA, 25 bp, Homo sapien
actgcattggaaaagggacccctgg

SEQ ID NO: 3792297 - DNA, 25 bp, Homo sapien
ctgtagtgaggagtgaagccgacct

SEQ ID NO: 3792298 - DNA, 25 bp, Homo sapien
tacccacgggaaccaggaaatggca

SEQ ID NO: 3792299 - DNA, 25 bp, Homo sapien
gttggaatagcgcttgttgcagccc

SEQ ID NO: 3792300 - DNA, 25 bp, Homo sapien
gtgcttaaagcggtcactggagttg

SEQ ID NO: 3792301 - DNA, 25 bp, Homo sapien
caaagtggccatgggccttgatgtg

SEQ ID NO: 3792302 - DNA, 25 bp, Homo sapien
tagtagggcttgtccacatagtggg

SEQ ID NO: 3792303 - DNA, 25 bp, Homo sapien
gcagcagcgggttcttggccagatt

SEQ ID NO: 3792304 - DNA, 25 bp, Homo sapien
aaggagggagaccacaggcaagccc

SEQ ID NO: 3792305 - DNA, 25 bp, Homo sapien
ttcttggccagattgagaggcagga

SEQ ID NO: 3792306 - DNA, 25 bp, Homo sapien
agcccagtccgccagccccaaaggg

SEQ ID NO: 3792307 - DNA, 25 bp, Homo sapien
cagctgagttgacgcccgtggacag

SEQ ID NO: 3792308 - DNA, 25 bp, Homo sapien
cagttcaccacagccggtttgagca

SEQ ID NO: 3792309 - DNA, 25 bp, Homo sapien
gtcttgtggccctccatgcccaggg

SEQ ID NO: 3792310 - DNA, 25 bp, Homo sapien
cagggccctggtgggcaccgaccca

SEQ ID NO: 3792311 - DNA, 25 bp, Homo sapien
taactagtgggaggcgccttgtcct

SEQ ID NO: 3792312 - DNA, 25 bp, Homo sapien
aagcaacgtgtcatgggtccagcac

SEQ ID NO: 3792313 - DNA, 25 bp, Homo sapien
tctgctgggagagggcaacttgcca

SEQ ID NO: 3792314 - DNA, 25 bp, Homo sapien
tgacgtcctggaatgtgcaacaaca

SEQ ID NO: 3792315 - DNA, 25 bp, Homo sapien
cacagcgcccggccctggttttgta

SEQ ID NO: 3792316 - DNA, 25 bp, Homo sapien
aagcacccgacaccataccaggcta

SEQ ID NO: 3792317 - DNA, 25 bp, Homo sapien
ccacagcgcccggccctggttttgt

SEQ ID NO: 3792318 - DNA, 25 bp, Homo sapien
tgggaatacaagcacccgacaccat

SEQ ID NO: 3792319 - DNA, 25 bp, Homo sapien
cccagatcattgtgatgggcgtgca

SEQ ID NO: 3792320 - DNA, 25 bp, Homo sapien
gttagcaagagcatccagggcagga

SEQ ID NO: 3792321 - DNA, 25 bp, Homo sapien
cagattttccccgtagccatgggca

SEQ ID NO: 3792322 - DNA, 25 bp, Homo sapien
tgcaggtaagcatgggtccgtctcc

SEQ ID NO: 3792323 - DNA, 25 bp, Homo sapien
gccccagggtcgagagtgagttact

SEQ ID NO: 3792324 - DNA, 25 bp, Homo sapien
cctctgggagctcggtcaagttcac

SEQ ID NO: 3792325 - DNA, 25 bp, Homo sapien
tttcttcctgaagccggtggttgca

SEQ ID NO: 3792326 - DNA, 25 bp, Homo sapien
gacagatctgtttccccgttggtaa

SEQ ID NO: 3792327 - DNA, 25 bp, Homo sapien
ggtcccgaagcaactgcgttcgagt

SEQ ID NO: 3792328 - DNA, 25 bp, Homo sapien
agcaactgcgttcgagtccgcgtcc

SEQ ID NO: 3792329 - DNA, 25 bp, Homo sapien
gtcctgggtcccgaagcaactgcgt

SEQ ID NO: 3792330 - DNA, 25 bp, Homo sapien
gggcaggccgcggcctcagtctttc

SEQ ID NO: 3792331 - DNA, 25 bp, Homo sapien
gtacttgggacttgtcccagctccc

SEQ ID NO: 3792332 - DNA, 25 bp, Homo sapien
acagtaatgggagctaggagccgcg

SEQ ID NO: 3792333 - DNA, 25 bp, Homo sapien
cctcgggtaagcacaggtctgggca

SEQ ID NO: 3792334 - DNA, 25 bp, Homo sapien
gacccacttataagcccaggcaagg

SEQ ID NO: 3792335 - DNA, 25 bp, Homo sapien
aggccccagggccagtagcaggagc

SEQ ID NO: 3792336 - DNA, 25 bp, Homo sapien
ggccccagggccagtagcaggagca

SEQ ID NO: 3792337 - DNA, 25 bp, Homo sapien
tacagccccaccgtgtcgggtggca

SEQ ID NO: 3792338 - DNA, 25 bp, Homo sapien
aaagctgcctgcgtcgagcatggtg

SEQ ID NO: 3792339 - DNA, 25 bp, Homo sapien
tgccgttctcaaagacgtacagccc

SEQ ID NO: 3792340 - DNA, 25 bp, Homo sapien
ctggcgatctggttctgtgacaggt

SEQ ID NO: 3792341 - DNA, 25 bp, Homo sapien
ttggcgagtggctggaagaccccgc

SEQ ID NO: 3792342 - DNA, 25 bp, Homo sapien
ggtgatttcatgcagcctgttggct

SEQ ID NO: 3792343 - DNA, 25 bp, Homo sapien
aggtagaggcgctcgaggcgccgca

SEQ ID NO: 3792344 - DNA, 25 bp, Homo sapien
tcgagcgtgtcgaaggcaccaggct

SEQ ID NO: 3792345 - DNA, 25 bp, Homo sapien
gcaggcttaggttgctcacatccag

SEQ ID NO: 3792346 - DNA, 25 bp, Homo sapien
caaaggcatgacacagacggagtaa

SEQ ID NO: 3792347 - DNA, 25 bp, Homo sapien
catccaggtcgtggaggttgcgcaa

SEQ ID NO: 3792348 - DNA, 25 bp, Homo sapien
aaagtcggcgtagtcaagctccagg

SEQ ID NO: 3792349 - DNA, 25 bp, Homo sapien
tgagaacttacgtggtgtggcagca

SEQ ID NO: 3792350 - DNA, 25 bp, Homo sapien
catgcgttaccagcacatggcaggg

SEQ ID NO: 3792351 - DNA, 25 bp, Homo sapien
acgttagggctcgtcagctgggcca

SEQ ID NO: 3792352 - DNA, 25 bp, Homo sapien
gtctgcacacatccccgaggttggg

SEQ ID NO: 3792353 - DNA, 25 bp, Homo sapien
gacgaattgcgtgagttttactcat

SEQ ID NO: 3792354 - DNA, 25 bp, Homo sapien
tgcgccgcccggctctaggtgggcc

SEQ ID NO: 3792355 - DNA, 25 bp, Homo sapien
gcccggctctaggtgggcctcgcgg

SEQ ID NO: 3792356 - DNA, 25 bp, Homo sapien
cgccgcccggctctaggtgggcctc

SEQ ID NO: 3792357 - DNA, 25 bp, Homo sapien
ccggctctaggtgggcctcgcggga

SEQ ID NO: 3792358 - DNA, 25 bp, Homo sapien
agcgtgtggagcaccgcgcagccat

SEQ ID NO: 3792359 - DNA, 25 bp, Homo sapien
ctctacccgatatagccggcagccg

SEQ ID NO: 3792360 - DNA, 25 bp, Homo sapien
caaccaccagcaaccagcgtgtgga

SEQ ID NO: 3792361 - DNA, 25 bp, Homo sapien
ggtctcaatgtcagcagcgctcggg

SEQ ID NO: 3792362 - DNA, 25 bp, Homo sapien
tgggctggtcgattcctccgttgaa

SEQ ID NO: 3792363 - DNA, 25 bp, Homo sapien
tgtaacaaagtacctaggcctctcc

SEQ ID NO: 3792364 - DNA, 25 bp, Homo sapien
gcaccacgtggtagaaagagcgtaa

SEQ ID NO: 3792365 - DNA, 25 bp, Homo sapien
tctagtctaactccatgaccttggg

SEQ ID NO: 3792366 - DNA, 25 bp, Homo sapien
caaaactagcacaattcaggtacgt

SEQ ID NO: 3792367 - DNA, 25 bp, Homo sapien
catttgcacaaattctagaggacac

SEQ ID NO: 3792368 - DNA, 25 bp, Homo sapien
cagcacaaaacacacggcataagaa

SEQ ID NO: 3792369 - DNA, 25 bp, Homo sapien
tcaggtacgtacaacacacagcaca

SEQ ID NO: 3792370 - DNA, 25 bp, Homo sapien
catagggcatcaatgattaacaata

SEQ ID NO: 3792371 - DNA, 25 bp, Homo sapien
taaatgtcctgtcctttttagaaca

SEQ ID NO: 3792372 - DNA, 25 bp, Homo sapien
aaataagcctccaagtcgttctaag

SEQ ID NO: 3792373 - DNA, 25 bp, Homo sapien
gacttttgacattatccatagggca

SEQ ID NO: 3792374 - DNA, 25 bp, Homo sapien
ttttaatagcaagacaccaactgct

SEQ ID NO: 3792375 - DNA, 25 bp, Homo sapien
aagaaacaaggatgttttagttcat

SEQ ID NO: 3792376 - DNA, 25 bp, Homo sapien
cttttttaatagcaagacaccaact

SEQ ID NO: 3792377 - DNA, 25 bp, Homo sapien
agaaacaaggatgttttagttcatc

SEQ ID NO: 3792378 - DNA, 25 bp, Homo sapien
ttcgaggcactcctaatatctgata

SEQ ID NO: 3792379 - DNA, 25 bp, Homo sapien
ctttctggctggcatttcgaggcac

SEQ ID NO: 3792380 - DNA, 25 bp, Homo sapien
gataataatcttctttggccaaagg

SEQ ID NO: 3792381 - DNA, 25 bp, Homo sapien
tggaaggaggcagtacaaatgaaag

SEQ ID NO: 3792382 - DNA, 25 bp, Homo sapien
caatggatccaaacacacgtttctc

SEQ ID NO: 3792383 - DNA, 25 bp, Homo sapien
cagacgataatagttaagtgttcac

SEQ ID NO: 3792384 - DNA, 25 bp, Homo sapien
tggagaaatcatggccctcatatgc

SEQ ID NO: 3792385 - DNA, 25 bp, Homo sapien
ccagttaaaagtgggcaatggatcc

SEQ ID NO: 3792386 - DNA, 25 bp, Homo sapien
gggatcatccttatttgtgtcaggg

SEQ ID NO: 3792387 - DNA, 25 bp, Homo sapien
cttggctttgggatcatccttattt

SEQ ID NO: 3792388 - DNA, 25 bp, Homo sapien
tgtcagggtgatacttcttggcaag

SEQ ID NO: 3792389 - DNA, 25 bp, Homo sapien
tgccagctgggagaacttctccttg

SEQ ID NO: 3792390 - DNA, 25 bp, Homo sapien
gcagtgaccgcatgcaccgaagtca

SEQ ID NO: 3792391 - DNA, 25 bp, Homo sapien
acaagattacttggcgcagggacat

SEQ ID NO: 3792392 - DNA, 25 bp, Homo sapien
gctgtcccaggtagcaatgcaacct

SEQ ID NO: 3792393 - DNA, 25 bp, Homo sapien
tggactgtatgacacaccaggctgt

SEQ ID NO: 3792394 - DNA, 25 bp, Homo sapien
ggacagcttggtgcctagggtaact

SEQ ID NO: 3792395 - DNA, 25 bp, Homo sapien
tttagggcacccagttaagatgcaa

SEQ ID NO: 3792396 - DNA, 25 bp, Homo sapien
tgaagacagaagtcagcaacacggt

SEQ ID NO: 3792397 - DNA, 25 bp, Homo sapien
gcaacacggtggattaggactctcc

SEQ ID NO: 3792398 - DNA, 25 bp, Homo sapien
tctgcaagccagaacaaccggagta

SEQ ID NO: 3792399 - DNA, 25 bp, Homo sapien
tattaagtggccctgtgtgcaaaca

SEQ ID NO: 3792400 - DNA, 25 bp, Homo sapien
taagtgtagggcgtgaagtgcttcc

SEQ ID NO: 3792401 - DNA, 25 bp, Homo sapien
cgccgtcgcgcatgctgggaaaatg

SEQ ID NO: 3792402 - DNA, 25 bp, Homo sapien
caggatcgaagcctgcagagccgta

SEQ ID NO: 3792403 - DNA, 25 bp, Homo sapien
gagccgtaggcatcgtactgcttcc

SEQ ID NO: 3792404 - DNA, 25 bp, Homo sapien
ttcctgaggctgatcaaacacggtc

SEQ ID NO: 3792405 - DNA, 25 bp, Homo sapien
tccagtagctatgctgggagccgct

SEQ ID NO: 3792406 - DNA, 25 bp, Homo sapien
ctgcaccttggtgccgggctcgttc

SEQ ID NO: 3792407 - DNA, 25 bp, Homo sapien
gagccgccacagtagtggcaatgct

SEQ ID NO: 3792408 - DNA, 25 bp, Homo sapien
gggctcgttccccttgccgttgcag

SEQ ID NO: 3792409 - DNA, 25 bp, Homo sapien
cagcttgattgaatgtcaactccat

SEQ ID NO: 3792410 - DNA, 25 bp, Homo sapien
tatgataccgcctgtctacagaagt

SEQ ID NO: 3792411 - DNA, 25 bp, Homo sapien
cagaagtacctgaagactcctggga

SEQ ID NO: 3792412 - DNA, 25 bp, Homo sapien
tgtgcactcaaacacactgcctagg

SEQ ID NO: 3792413 - DNA, 25 bp, Homo sapien
ttctcagtcagtggtgcaagccgtg

SEQ ID NO: 3792414 - DNA, 25 bp, Homo sapien
agggatcatcactcgctttttctgc

SEQ ID NO: 3792415 - DNA, 25 bp, Homo sapien
catctcctacacgtggaacgcatca

SEQ ID NO: 3792416 - DNA, 25 bp, Homo sapien
gcagaccacacagggcgatatgatg

SEQ ID NO: 3792417 - DNA, 25 bp, Homo sapien
cgatatgatgatggagccgcggcca

SEQ ID NO: 3792418 - DNA, 25 bp, Homo sapien
gcatcctcacggtctggccatcctc

SEQ ID NO: 3792419 - DNA, 25 bp, Homo sapien
ggcatcctcacggtctggccatcct

SEQ ID NO: 3792420 - DNA, 25 bp, Homo sapien
cacaggcatcctcacggtctggcca

SEQ ID NO: 3792421 - DNA, 25 bp, Homo sapien
caggcatcctcacggtctggccatc

SEQ ID NO: 3792422 - DNA, 25 bp, Homo sapien
aagagcctgagctatagaaataaag

SEQ ID NO: 3792423 - DNA, 25 bp, Homo sapien
gctgtacccccaagaagagcctgag

SEQ ID NO: 3792424 - DNA, 25 bp, Homo sapien
aaataaagaggtcggagtggatgtc

SEQ ID NO: 3792425 - DNA, 25 bp, Homo sapien
cgtcacgttgatcgtctcgtacagg

SEQ ID NO: 3792426 - DNA, 25 bp, Homo sapien
cacatgctggtcactcatgggttcc

SEQ ID NO: 3792427 - DNA, 25 bp, Homo sapien
tcccatgcgattatagactcaaggc

SEQ ID NO: 3792428 - DNA, 25 bp, Homo sapien
tctgtgtcctgaatgcgcccagttc

SEQ ID NO: 3792429 - DNA, 25 bp, Homo sapien
cactgtggcaaaagggatatgcacc

SEQ ID NO: 3792430 - DNA, 25 bp, Homo sapien
tctgaggcgaatacagagaatgatg

SEQ ID NO: 3792431 - DNA, 25 bp, Homo sapien
ggttctgaggcgaatacagagaatg

SEQ ID NO: 3792432 - DNA, 25 bp, Homo sapien
gagaaggttctgaggcgaatacaga

SEQ ID NO: 3792433 - DNA, 25 bp, Homo sapien
aggcgaatacagagaatgatgtggc

SEQ ID NO: 3792434 - DNA, 25 bp, Homo sapien
gaaaagccaatacagggtgcgtggc

SEQ ID NO: 3792435 - DNA, 25 bp, Homo sapien
ccaccacttgggtttctgggccaag

SEQ ID NO: 3792436 - DNA, 25 bp, Homo sapien
gcgtgcacctgacgacaaagcgaga

SEQ ID NO: 3792437 - DNA, 25 bp, Homo sapien
gcccgcccacaagcacatggaaatg

SEQ ID NO: 3792438 - DNA, 25 bp, Homo sapien
tttggaactcgtatcttgatgtgga

SEQ ID NO: 3792439 - DNA, 25 bp, Homo sapien
ccgtagccgtagctgttaatccggg

SEQ ID NO: 3792440 - DNA, 25 bp, Homo sapien
tcttgatgtggatgtagtggtctcc

SEQ ID NO: 3792441 - DNA, 25 bp, Homo sapien
tagtggtctccgtagccgtagctgt

SEQ ID NO: 3792442 - DNA, 25 bp, Homo sapien
catcaacaagaaaagcaacgggcca

SEQ ID NO: 3792443 - DNA, 25 bp, Homo sapien
gaaattatctaattaggccaggcgc

SEQ ID NO: 3792444 - DNA, 25 bp, Homo sapien
caccctcgcagcacatgggaagaga

SEQ ID NO: 3792445 - DNA, 25 bp, Homo sapien
ggtgagaacctaaggaccatgccct

SEQ ID NO: 3792446 - DNA, 25 bp, Homo sapien
cctcggcgtagctcaggatcaggct

SEQ ID NO: 3792447 - DNA, 25 bp, Homo sapien
tgagggtgacgccgttcaccgtccc

SEQ ID NO: 3792448 - DNA, 25 bp, Homo sapien
tcgtcctcggcgtagctcaggatca

SEQ ID NO: 3792449 - DNA, 25 bp, Homo sapien
cacatctgtctcgtcctcggcgtag

SEQ ID NO: 3792450 - DNA, 25 bp, Homo sapien
gcggagctatccatggtgctgccac

SEQ ID NO: 3792451 - DNA, 25 bp, Homo sapien
gcttcctgcggagctatccatggtg

SEQ ID NO: 3792452 - DNA, 25 bp, Homo sapien
acgcctagccttgcttcctgcggag

SEQ ID NO: 3792453 - DNA, 25 bp, Homo sapien
gcctcacgcctagccttgcttcctg

SEQ ID NO: 3792454 - DNA, 25 bp, Homo sapien
catctattccctaggctgagaggcc

SEQ ID NO: 3792455 - DNA, 25 bp, Homo sapien
gagcgtctgttaatccctggaaagc

SEQ ID NO: 3792456 - DNA, 25 bp, Homo sapien
aagtgggtcccaagatgacacggcg

SEQ ID NO: 3792457 - DNA, 25 bp, Homo sapien
cttccaagcaggcaggacgtgagga

SEQ ID NO: 3792458 - DNA, 25 bp, Homo sapien
gattttgctgttgccaaggccgtcc

SEQ ID NO: 3792459 - DNA, 25 bp, Homo sapien
tggagagaggtgttgtcccatgatt

SEQ ID NO: 3792460 - DNA, 25 bp, Homo sapien
ggctgcatcctactgcccgggctgt

SEQ ID NO: 3792461 - DNA, 25 bp, Homo sapien
tccactgtgacctttccgtggagag

SEQ ID NO: 3792462 - DNA, 25 bp, Homo sapien
aattagagttttagccctgcaagag

SEQ ID NO: 3792463 - DNA, 25 bp, Homo sapien
tgactagcaacagtggcagggcttc

SEQ ID NO: 3792464 - DNA, 25 bp, Homo sapien
actcaatagtcagggacaggcggcc

SEQ ID NO: 3792465 - DNA, 25 bp, Homo sapien
cctcccggaggtttgctgagaagga

SEQ ID NO: 3792466 - DNA, 25 bp, Homo sapien
cattaacctgtctaacgacagcccg

SEQ ID NO: 3792467 - DNA, 25 bp, Homo sapien
ggaaccttcaactgcttagcctgtg

SEQ ID NO: 3792468 - DNA, 25 bp, Homo sapien
cagcccgaagatcctgaaacacatg

SEQ ID NO: 3792469 - DNA, 25 bp, Homo sapien
gaaactgcgacatgctaccagcaga

SEQ ID NO: 3792470 - DNA, 25 bp, Homo sapien
aaatatctttttgcaatagataatc

SEQ ID NO: 3792471 - DNA, 25 bp, Homo sapien
tgcaatagataatcttatttacatt

SEQ ID NO: 3792472 - DNA, 25 bp, Homo sapien
tctttttgcaatagataatcttatt

SEQ ID NO: 3792473 - DNA, 25 bp, Homo sapien
ttttgcaatagataatcttatttac

SEQ ID NO: 3792474 - DNA, 25 bp, Homo sapien
catttaggtttgtgtgactaccatc

SEQ ID NO: 3792475 - DNA, 25 bp, Homo sapien
cattctatccattgactgaagcatt

SEQ ID NO: 3792476 - DNA, 25 bp, Homo sapien
gggccctaaatacaatgtagcaaaa

SEQ ID NO: 3792477 - DNA, 25 bp, Homo sapien
caatttaccagtatgctgggcccta

SEQ ID NO: 3792478 - DNA, 25 bp, Homo sapien
gtagcatccggttaagaggctctcc

SEQ ID NO: 3792479 - DNA, 25 bp, Homo sapien
gatttacacaaactcactgtgcacg

SEQ ID NO: 3792480 - DNA, 25 bp, Homo sapien
gatgttcatgcaagataaagaggta

SEQ ID NO: 3792481 - DNA, 25 bp, Homo sapien
cctcgctcattttggtctaactgga

SEQ ID NO: 3792482 - DNA, 25 bp, Homo sapien
aagactcatggacatagctttaatt

SEQ ID NO: 3792483 - DNA, 25 bp, Homo sapien
aattatctttgcctgacgcccaata

SEQ ID NO: 3792484 - DNA, 25 bp, Homo sapien
gctttaattatctttgcctgacgcc

SEQ ID NO: 3792485 - DNA, 25 bp, Homo sapien
ctcatggacatagctttaattatct

SEQ ID NO: 3792486 - DNA, 25 bp, Homo sapien
tgcaatctgcgaaactgagtctcaa

SEQ ID NO: 3792487 - DNA, 25 bp, Homo sapien
ggcctagagatgacacgccccttgt

SEQ ID NO: 3792488 - DNA, 25 bp, Homo sapien
tattcgcattcttcaaacagcggcc

SEQ ID NO: 3792489 - DNA, 25 bp, Homo sapien
taagtaggcgtgcttcggcaggaac

SEQ ID NO: 3792490 - DNA, 25 bp, Homo sapien
atagccgtgacgctgggagagggtg

SEQ ID NO: 3792491 - DNA, 25 bp, Homo sapien
tcgcccagcatagccgtgacgctgg

SEQ ID NO: 3792492 - DNA, 25 bp, Homo sapien
ccagcatagccgtgacgctgggaga

SEQ ID NO: 3792493 - DNA, 25 bp, Homo sapien
ctcgcccagcatagccgtgacgctg

SEQ ID NO: 3792494 - DNA, 25 bp, Homo sapien
atagcgccattgcactccagcctgg

SEQ ID NO: 3792495 - DNA, 25 bp, Homo sapien
gcactccagcctgggtgtcgcagca

SEQ ID NO: 3792496 - DNA, 25 bp, Homo sapien
actccagcctgggtgtcgcagcaag

SEQ ID NO: 3792497 - DNA, 25 bp, Homo sapien
agatagcgccattgcactccagcct

SEQ ID NO: 3792498 - DNA, 25 bp, Homo sapien
tccacaaggtgggtatgagaattaa

SEQ ID NO: 3792499 - DNA, 25 bp, Homo sapien
ggacagtgataacaattccacaagg

SEQ ID NO: 3792500 - DNA, 25 bp, Homo sapien
aaggacagtgataacaattccacaa

SEQ ID NO: 3792501 - DNA, 25 bp, Homo sapien
cacaaggtgggtatgagaattaaat

SEQ ID NO: 3792502 - DNA, 25 bp, Homo sapien
catgagagaatctactggccacaca

SEQ ID NO: 3792503 - DNA, 25 bp, Homo sapien
tgttcaaaagacacacgaggagctg

SEQ ID NO: 3792504 - DNA, 25 bp, Homo sapien
taagatgagcctagccatgagagaa

SEQ ID NO: 3792505 - DNA, 25 bp, Homo sapien
tagaaaggcacaaccaagagcaaac

SEQ ID NO: 3792506 - DNA, 25 bp, Homo sapien
agtgccggcccgacagccatgtttt

SEQ ID NO: 3792507 - DNA, 25 bp, Homo sapien
tcaccagtatgtaactccccagaca

SEQ ID NO: 3792508 - DNA, 25 bp, Homo sapien
ctgtcacttggctgtaactcactaa

SEQ ID NO: 3792509 - DNA, 25 bp, Homo sapien
taactgtataaatggcatatgtgac

SEQ ID NO: 3792510 - DNA, 25 bp, Homo sapien
ctgaaaagaggcaatcagacctgcc

SEQ ID NO: 3792511 - DNA, 25 bp, Homo sapien
aagaggcaatcagacctgccagacc

SEQ ID NO: 3792512 - DNA, 25 bp, Homo sapien
gaaaagaggcaatcagacctgccag

SEQ ID NO: 3792513 - DNA, 25 bp, Homo sapien
aaaagaggcaatcagacctgccaga

SEQ ID NO: 3792514 - DNA, 25 bp, Homo sapien
tttgatgactaacagggcaggccaa

SEQ ID NO: 3792515 - DNA, 25 bp, Homo sapien
cactcaaattacacaacaacctgag

SEQ ID NO: 3792516 - DNA, 25 bp, Homo sapien
gggaggatggcataccccaccactc

SEQ ID NO: 3792517 - DNA, 25 bp, Homo sapien
tgttccctggtgagatctatttttg

SEQ ID NO: 3792518 - DNA, 25 bp, Homo sapien
ctgcaatgagctagactgatccact

SEQ ID NO: 3792519 - DNA, 25 bp, Homo sapien
caatgagctagactgatccactgca

SEQ ID NO: 3792520 - DNA, 25 bp, Homo sapien
gctgcaatgagctagactgatccac

SEQ ID NO: 3792521 - DNA, 25 bp, Homo sapien
tgcaatgagctagactgatccactg

SEQ ID NO: 3792522 - DNA, 25 bp, Homo sapien
tatagtgtcaccacagactgctagc

SEQ ID NO: 3792523 - DNA, 25 bp, Homo sapien
gactgctagcaacaaggaaactgaa

SEQ ID NO: 3792524 - DNA, 25 bp, Homo sapien
tatgggctacagaggcactcgtacc

SEQ ID NO: 3792525 - DNA, 25 bp, Homo sapien
tatgcatgcagtagagaggttaaac

SEQ ID NO: 3792526 - DNA, 25 bp, Homo sapien
aatttcaggtcaggtaactcagtgc

SEQ ID NO: 3792527 - DNA, 25 bp, Homo sapien
taaattgctggcatgaggcactacc

SEQ ID NO: 3792528 - DNA, 25 bp, Homo sapien
gaagatggtaaatcctcctccatgg

SEQ ID NO: 3792529 - DNA, 25 bp, Homo sapien
gagactaagtccaacaaatttcagg

SEQ ID NO: 3792530 - DNA, 25 bp, Homo sapien
tccaggtaccccaggaccacaggcc

SEQ ID NO: 3792531 - DNA, 25 bp, Homo sapien
tgagggtccaggtaccccaggacca

SEQ ID NO: 3792532 - DNA, 25 bp, Homo sapien
gtccaggtaccccaggaccacaggc

SEQ ID NO: 3792533 - DNA, 25 bp, Homo sapien
caggctgagggtccaggtaccccag

SEQ ID NO: 3792534 - DNA, 25 bp, Homo sapien
gaggatttcttgagcctgggagaca

SEQ ID NO: 3792535 - DNA, 25 bp, Homo sapien
tgggaggctgatgtaggaggatttc

SEQ ID NO: 3792536 - DNA, 25 bp, Homo sapien
ggatttcttgagcctgggagacaga

SEQ ID NO: 3792537 - DNA, 25 bp, Homo sapien
ccagcctggccgacaaagtaagact

SEQ ID NO: 3792538 - DNA, 25 bp, Homo sapien
tcttgctgctctcgctcctctggtc

SEQ ID NO: 3792539 - DNA, 25 bp, Homo sapien
tgctgctgggtgtggttcttgctgc

SEQ ID NO: 3792540 - DNA, 25 bp, Homo sapien
tgtggttcttgctgctctcgctcct

SEQ ID NO: 3792541 - DNA, 25 bp, Homo sapien
tgggtgtggttcttgctgctctcgc

SEQ ID NO: 3792542 - DNA, 25 bp, Homo sapien
tgactcgtctaccccctctgaggtt

SEQ ID NO: 3792543 - DNA, 25 bp, Homo sapien
tcgtctaccccctctgaggtttcca

SEQ ID NO: 3792544 - DNA, 25 bp, Homo sapien
ctgactcgtctaccccctctgaggt

SEQ ID NO: 3792545 - DNA, 25 bp, Homo sapien
ttctgactcgtctaccccctctgag

SEQ ID NO: 3792546 - DNA, 25 bp, Homo sapien
ctgcccggtcgtgtgcttccttggt

SEQ ID NO: 3792547 - DNA, 25 bp, Homo sapien
agctccttcttaatgttgcctttca

SEQ ID NO: 3792548 - DNA, 25 bp, Homo sapien
actgggtgttttctgcccggtcgtg

SEQ ID NO: 3792549 - DNA, 25 bp, Homo sapien
gctccttcttaatgttgcctttcaa

SEQ ID NO: 3792550 - DNA, 25 bp, Homo sapien
atgacagtctggaacccaatgcggg

SEQ ID NO: 3792551 - DNA, 25 bp, Homo sapien
cacttttctcatgggaccaaggccc

SEQ ID NO: 3792552 - DNA, 25 bp, Homo sapien
gccgagagccagagcttaacgtcaa

SEQ ID NO: 3792553 - DNA, 25 bp, Homo sapien
taacgtcaagaaggaatggagtgtg

SEQ ID NO: 3792554 - DNA, 25 bp, Homo sapien
tcttcatgttcaggtccagggcgtt

SEQ ID NO: 3792555 - DNA, 25 bp, Homo sapien
tggatccgctccacgtacttctggg

SEQ ID NO: 3792556 - DNA, 25 bp, Homo sapien
tctcaaacaggtagaactgggtccc

SEQ ID NO: 3792557 - DNA, 25 bp, Homo sapien
ggagtttcagtgctcgctgggccac

SEQ ID NO: 3792558 - DNA, 25 bp, Homo sapien
cggcctggtccagttcattgaatat

SEQ ID NO: 3792559 - DNA, 25 bp, Homo sapien
ttcccatcgtgtacagggaacccat

SEQ ID NO: 3792560 - DNA, 25 bp, Homo sapien
agaaagggcatttacgcatgtctcc

SEQ ID NO: 3792561 - DNA, 25 bp, Homo sapien
gcatgtctcctttcccatcgtgtac

SEQ ID NO: 3792562 - DNA, 25 bp, Homo sapien
gtggagtctcctgctacacctgccc

SEQ ID NO: 3792563 - DNA, 25 bp, Homo sapien
gagacatggcatcagtggagtctcc

SEQ ID NO: 3792564 - DNA, 25 bp, Homo sapien
ctgtgtggcagcaccaataggagac

SEQ ID NO: 3792565 - DNA, 25 bp, Homo sapien
tggcagcaccaataggagacatggc

SEQ ID NO: 3792566 - DNA, 25 bp, Homo sapien
tcacatgtagtaccaggccaagagt

SEQ ID NO: 3792567 - DNA, 25 bp, Homo sapien
tagctgttcggaagggacagctgct

SEQ ID NO: 3792568 - DNA, 25 bp, Homo sapien
aggccaagagtccagcagctagggc

SEQ ID NO: 3792569 - DNA, 25 bp, Homo sapien
cacagccatagctgttcggaaggga

SEQ ID NO: 3792570 - DNA, 25 bp, Homo sapien
aggccagtggtcagtcgggaggagg

SEQ ID NO: 3792571 - DNA, 25 bp, Homo sapien
gggaggagggtaccggtgtggcatg

SEQ ID NO: 3792572 - DNA, 25 bp, Homo sapien
cagtcgggaggagggtaccggtgtg

SEQ ID NO: 3792573 - DNA, 25 bp, Homo sapien
ggtaggccagtggtcagtcgggagg

SEQ ID NO: 3792574 - DNA, 25 bp, Homo sapien
agcattttttaaaaagtcacctgag

SEQ ID NO: 3792575 - DNA, 25 bp, Homo sapien
ccagcattttttaaaaagtcacctg

SEQ ID NO: 3792576 - DNA, 25 bp, Homo sapien
tggcttttattggttgcctttctta

SEQ ID NO: 3792577 - DNA, 25 bp, Homo sapien
tggttgcctttcttaaacccagcat

SEQ ID NO: 3792578 - DNA, 25 bp, Homo sapien
tgcccagtgcggaatatggcccata

SEQ ID NO: 3792579 - DNA, 25 bp, Homo sapien
tggagcatttacacagcgcggagga

SEQ ID NO: 3792580 - DNA, 25 bp, Homo sapien
caaaaacagggactaccggaagcag

SEQ ID NO: 3792581 - DNA, 25 bp, Homo sapien
gggagatagtcacccatgtactgca

SEQ ID NO: 3792582 - DNA, 25 bp, Homo sapien
ctgggagccatgatggacgatgtcc

SEQ ID NO: 3792583 - DNA, 25 bp, Homo sapien
gatctttgcaagacggttagagtga

SEQ ID NO: 3792584 - DNA, 25 bp, Homo sapien
tagcagtgctggatacactttaaag

SEQ ID NO: 3792585 - DNA, 25 bp, Homo sapien
gttagagtgactttgctttggagac

SEQ ID NO: 3792586 - DNA, 25 bp, Homo sapien
tctatatatggcatccacgcatggg

SEQ ID NO: 3792587 - DNA, 25 bp, Homo sapien
ggcgcacccttaagcaacacagact

SEQ ID NO: 3792588 - DNA, 25 bp, Homo sapien
tctcggcagtggctgtaaggtcacc

SEQ ID NO: 3792589 - DNA, 25 bp, Homo sapien
cgcatgggatctgcaagctggagcc

SEQ ID NO: 3792590 - DNA, 25 bp, Homo sapien
gagcagttagccagttagtccccag

SEQ ID NO: 3792591 - DNA, 25 bp, Homo sapien
tggtagctaagaaggaacttgtccc

SEQ ID NO: 3792592 - DNA, 25 bp, Homo sapien
taggacagggtcacaaagcctgggt

SEQ ID NO: 3792593 - DNA, 25 bp, Homo sapien
ccctttgagtcagtgtgcagacccc

SEQ ID NO: 3792594 - DNA, 25 bp, Homo sapien
agcagcgaagatgtccagcgagcct

SEQ ID NO: 3792595 - DNA, 25 bp, Homo sapien
aggagaagcagcgaagatgtccagc

SEQ ID NO: 3792596 - DNA, 25 bp, Homo sapien
agcgaagatgtccagcgagcctccc

SEQ ID NO: 3792597 - DNA, 25 bp, Homo sapien
agaagcagcgaagatgtccagcgag

SEQ ID NO: 3792598 - DNA, 25 bp, Homo sapien
agcctgtggcagagatcggtccagt

SEQ ID NO: 3792599 - DNA, 25 bp, Homo sapien
gctcggtgccaaactgctctcgtgt

SEQ ID NO: 3792600 - DNA, 25 bp, Homo sapien
agtgtctcctccgactgccttagtg

SEQ ID NO: 3792601 - DNA, 25 bp, Homo sapien
ccttctctgagtagcacggatttga

SEQ ID NO: 3792602 - DNA, 25 bp, Homo sapien
cctgcgacgggaccgaggaatggag

SEQ ID NO: 3792603 - DNA, 25 bp, Homo sapien
agagtgacagctagggagaagccgg

SEQ ID NO: 3792604 - DNA, 25 bp, Homo sapien
cagtcctcatgcatgggagctcagg

SEQ ID NO: 3792605 - DNA, 25 bp, Homo sapien
ggaactgtgtggtatgcccaggccc

SEQ ID NO: 3792606 - DNA, 25 bp, Homo sapien
tatagttgaacccaagagcttggac

SEQ ID NO: 3792607 - DNA, 25 bp, Homo sapien
tacaatcggtttcagagcatcttcg

SEQ ID NO: 3792608 - DNA, 25 bp, Homo sapien
cgttaccccagaaggagattccatg

SEQ ID NO: 3792609 - DNA, 25 bp, Homo sapien
gaatcgtcttccattgtctgggcag

SEQ ID NO: 3792610 - DNA, 25 bp, Homo sapien
gcaggccactcttgatccttctggt

SEQ ID NO: 3792611 - DNA, 25 bp, Homo sapien
taaagccttccaccgggtggcaagc

SEQ ID NO: 3792612 - DNA, 25 bp, Homo sapien
caggagcgactccaagacttgcagg

SEQ ID NO: 3792613 - DNA, 25 bp, Homo sapien
tccccaggagcgactccaagacttg

SEQ ID NO: 3792614 - DNA, 25 bp, Homo sapien
tgaaagaatgccctgtaacatgaga

SEQ ID NO: 3792615 - DNA, 25 bp, Homo sapien
tgagagatctaaatgtcgcagggat

SEQ ID NO: 3792616 - DNA, 25 bp, Homo sapien
gccctgtaacatgagagatctaaat

SEQ ID NO: 3792617 - DNA, 25 bp, Homo sapien
agatctaaatgtcgcagggatgagc

SEQ ID NO: 3792618 - DNA, 25 bp, Homo sapien
acagtgcctggcctactgtatacta

SEQ ID NO: 3792619 - DNA, 25 bp, Homo sapien
agttcagtggcgcactcagttcact

SEQ ID NO: 3792620 - DNA, 25 bp, Homo sapien
tgcctggcctactgtatactatttc

SEQ ID NO: 3792621 - DNA, 25 bp, Homo sapien
gagttcagtggcgcactcagttcac

SEQ ID NO: 3792622 - DNA, 25 bp, Homo sapien
gataggccctgtgaaaatttgtctc

SEQ ID NO: 3792623 - DNA, 25 bp, Homo sapien
agcttgccccagcagatcacgttgg

SEQ ID NO: 3792624 - DNA, 25 bp, Homo sapien
cagccagccgtggttctagaatcac

SEQ ID NO: 3792625 - DNA, 25 bp, Homo sapien
gagctaacggaatgcgtcccgaagg

SEQ ID NO: 3792626 - DNA, 25 bp, Homo sapien
cctgatctgacagcgagtgaggcag

SEQ ID NO: 3792627 - DNA, 25 bp, Homo sapien
cagaaagtgaacgttgcccaggaaa

SEQ ID NO: 3792628 - DNA, 25 bp, Homo sapien
tctgcagaaagtgaacgttgcccag

SEQ ID NO: 3792629 - DNA, 25 bp, Homo sapien
cctctgcaagcctgaaaataatgcc

SEQ ID NO: 3792630 - DNA, 25 bp, Homo sapien
aggccaacaacgtggattccatttg

SEQ ID NO: 3792631 - DNA, 25 bp, Homo sapien
ctgggaatctgcaatgattcaaaca

SEQ ID NO: 3792632 - DNA, 25 bp, Homo sapien
ccttcccagttcttgctgcgtgtaa

SEQ ID NO: 3792633 - DNA, 25 bp, Homo sapien
tttttattattgcggagatgggtct

SEQ ID NO: 3792634 - DNA, 25 bp, Homo sapien
gagaggactttcttgagctcggcca

SEQ ID NO: 3792635 - DNA, 25 bp, Homo sapien
cacgtggtcgaagacattgctgagc

SEQ ID NO: 3792636 - DNA, 25 bp, Homo sapien
tgggcatgatgaccacctgcgaggt

SEQ ID NO: 3792637 - DNA, 25 bp, Homo sapien
tcttccggagcttgatcagatgcca

SEQ ID NO: 3792638 - DNA, 25 bp, Homo sapien
atgtaggggacatgctctggactcc

SEQ ID NO: 3792639 - DNA, 25 bp, Homo sapien
taggggacatgctctggactcctgt

SEQ ID NO: 3792640 - DNA, 25 bp, Homo sapien
tgtaggggacatgctctggactcct

SEQ ID NO: 3792641 - DNA, 25 bp, Homo sapien
aggggacatgctctggactcctgtc

SEQ ID NO: 3792642 - DNA, 25 bp, Homo sapien
agaaaatgtgaagccgggtatggct

SEQ ID NO: 3792643 - DNA, 25 bp, Homo sapien
tgttcaagaggtcctcttggctctc

SEQ ID NO: 3792644 - DNA, 25 bp, Homo sapien
gtgcagaagctttctgatgatagcc

SEQ ID NO: 3792645 - DNA, 25 bp, Homo sapien
gatagccgttgttcaagaggtcctc

SEQ ID NO: 3792646 - DNA, 25 bp, Homo sapien
gatggtgacctggagtgcatgaaga

SEQ ID NO: 3792647 - DNA, 25 bp, Homo sapien
gagtgcatgaagatcagtgagcaag

SEQ ID NO: 3792648 - DNA, 25 bp, Homo sapien
atggtgacctggagtgcatgaagat

SEQ ID NO: 3792649 - DNA, 25 bp, Homo sapien
gtgcatgaagatcagtgagcaagtc

SEQ ID NO: 3792650 - DNA, 25 bp, Homo sapien
tttgaagtcttcagcaaagatgtcc

SEQ ID NO: 3792651 - DNA, 25 bp, Homo sapien
ctgtattttgaagtcttcagcaaag

SEQ ID NO: 3792652 - DNA, 25 bp, Homo sapien
caaagatgtccattctttctgggtg

SEQ ID NO: 3792653 - DNA, 25 bp, Homo sapien
aagatgtccattctttctgggtgta

SEQ ID NO: 3792654 - DNA, 25 bp, Homo sapien
cccgctgcagtgcaaccatcttcca

SEQ ID NO: 3792655 - DNA, 25 bp, Homo sapien
tccagagcaccatgtcctcggtttt

SEQ ID NO: 3792656 - DNA, 25 bp, Homo sapien
cagagcaccatgtcctcggttttgg

SEQ ID NO: 3792657 - DNA, 25 bp, Homo sapien
agagcaccatgtcctcggttttggg

SEQ ID NO: 3792658 - DNA, 25 bp, Homo sapien
actccagagcaccatgtcctcggtt

SEQ ID NO: 3792659 - DNA, 25 bp, Homo sapien
ctcggagacctggatggcacgagta

SEQ ID NO: 3792660 - DNA, 25 bp, Homo sapien
cagactgccacaggtccagtggtga

SEQ ID NO: 3792661 - DNA, 25 bp, Homo sapien
cacgagtagcttcaaggtacttggt

SEQ ID NO: 3792662 - DNA, 25 bp, Homo sapien
tgccagacagtctgcagtagctggg

SEQ ID NO: 3792663 - DNA, 25 bp, Homo sapien
gagggcttctccctggcgagactga

SEQ ID NO: 3792664 - DNA, 25 bp, Homo sapien
cctttacttggacagctgcgagctg

SEQ ID NO: 3792665 - DNA, 25 bp, Homo sapien
gggaccccatccttgcgagttctat

SEQ ID NO: 3792666 - DNA, 25 bp, Homo sapien
ccatccttgcgagttctatccttgg

SEQ ID NO: 3792667 - DNA, 25 bp, Homo sapien
atcgggaccgatgctggcagcagag

SEQ ID NO: 3792668 - DNA, 25 bp, Homo sapien
ggaatcatcgcccaagatctgggat

SEQ ID NO: 3792669 - DNA, 25 bp, Homo sapien
cgtgtctgttgcaatggcggccatt

SEQ ID NO: 3792670 - DNA, 25 bp, Homo sapien
gatttcgtagatttcggaatcatcg

SEQ ID NO: 3792671 - DNA, 25 bp, Homo sapien
tcttcagggctcatggcctgcttgg

SEQ ID NO: 3792672 - DNA, 25 bp, Homo sapien
caggtatctgggctatgtggctcat

SEQ ID NO: 3792673 - DNA, 25 bp, Homo sapien
tagataactcaagcgctggttcagg

SEQ ID NO: 3792674 - DNA, 25 bp, Homo sapien
cagagagtcgtgtttgacaggtatc

SEQ ID NO: 3792675 - DNA, 25 bp, Homo sapien
tatgtccactgttgtcccgaggctg

SEQ ID NO: 3792676 - DNA, 25 bp, Homo sapien
ctttttctgcaatatgtccactgtt

SEQ ID NO: 3792677 - DNA, 25 bp, Homo sapien
ggaggctgccaatctttttctgcaa

SEQ ID NO: 3792678 - DNA, 25 bp, Homo sapien
tctgcaatatgtccactgttgtccc

SEQ ID NO: 3792679 - DNA, 25 bp, Homo sapien
gccttcgcagccagctcgctttccc

SEQ ID NO: 3792680 - DNA, 25 bp, Homo sapien
cagcctgttttgctgcagaacacag

SEQ ID NO: 3792681 - DNA, 25 bp, Homo sapien
agctgccttcgcagccagctcgctt

SEQ ID NO: 3792682 - DNA, 25 bp, Homo sapien
agccagctcgctttcccccagcctg

SEQ ID NO: 3792683 - DNA, 25 bp, Homo sapien
gatgtagcgatccttcatcatctct

SEQ ID NO: 3792684 - DNA, 25 bp, Homo sapien
tcatccatgcgaatctgcaggttct

SEQ ID NO: 3792685 - DNA, 25 bp, Homo sapien
caccgccttgtccaaagtgatgtag

SEQ ID NO: 3792686 - DNA, 25 bp, Homo sapien
tttggttgccccaaattctctcaag

SEQ ID NO: 3792687 - DNA, 25 bp, Homo sapien
cgtgctcttattcaccttgttcatt

SEQ ID NO: 3792688 - DNA, 25 bp, Homo sapien
tccagtcttttgatttgagcctgga

SEQ ID NO: 3792689 - DNA, 25 bp, Homo sapien
tcgtgctcttattcaccttgttcat

SEQ ID NO: 3792690 - DNA, 25 bp, Homo sapien
gaaaatgggagttgatgtgcctcct

SEQ ID NO: 3792691 - DNA, 25 bp, Homo sapien
caagtagagtgttaataatcctcaa

SEQ ID NO: 3792692 - DNA, 25 bp, Homo sapien
caattgctgaaaatgggagttgatg

SEQ ID NO: 3792693 - DNA, 25 bp, Homo sapien
tgtgcacagctgatgtgtgattttc

SEQ ID NO: 3792694 - DNA, 25 bp, Homo sapien
acagtctccaggtcaacgcggcttg

SEQ ID NO: 3792695 - DNA, 25 bp, Homo sapien
tcatggatcgtgaccttgaagagta

SEQ ID NO: 3792696 - DNA, 25 bp, Homo sapien
ccttgaagagtatgccctgaatcat

SEQ ID NO: 3792697 - DNA, 25 bp, Homo sapien
cctgccagggcactcctgtcagctt

SEQ ID NO: 3792698 - DNA, 25 bp, Homo sapien
cagcagcttccggacgattttccag

SEQ ID NO: 3792699 - DNA, 25 bp, Homo sapien
cagtcttaagccctcaatcagcagc

SEQ ID NO: 3792700 - DNA, 25 bp, Homo sapien
ctgtcaggatccagtcttaagccct

SEQ ID NO: 3792701 - DNA, 25 bp, Homo sapien
gcttccggacgattttccagacctc

SEQ ID NO: 3792702 - DNA, 25 bp, Homo sapien
agatgcacttcacgcgcttgaacag

SEQ ID NO: 3792703 - DNA, 25 bp, Homo sapien
cggtcacaggagatgcacttcacgc

SEQ ID NO: 3792704 - DNA, 25 bp, Homo sapien
acaggagatgcacttcacgcgcttg

SEQ ID NO: 3792705 - DNA, 25 bp, Homo sapien
gtcacaggagatgcacttcacgcgc

SEQ ID NO: 3792706 - DNA, 25 bp, Homo sapien
gctgcaagtactcgcagctgttggc

SEQ ID NO: 3792707 - DNA, 25 bp, Homo sapien
catctgttgccgctgcaagtactcg

SEQ ID NO: 3792708 - DNA, 25 bp, Homo sapien
tactcgcagctgttggcgctggctg

SEQ ID NO: 3792709 - DNA, 25 bp, Homo sapien
ggctttgcggatggtgatcagctgt

SEQ ID NO: 3792710 - DNA, 25 bp, Homo sapien
tccccgtagggatagagcgtcaaca

SEQ ID NO: 3792711 - DNA, 25 bp, Homo sapien
acttgcacttgaggctggtggcgtt

SEQ ID NO: 3792712 - DNA, 25 bp, Homo sapien
gctgtcatagtcgatcacgtgggga

SEQ ID NO: 3792713 - DNA, 25 bp, Homo sapien
tcaacaggttgcaggacttgcactt

SEQ ID NO: 3792714 - DNA, 25 bp, Homo sapien
tgttcacgcggcctttgtacaggat

SEQ ID NO: 3792715 - DNA, 25 bp, Homo sapien
cacgctggctgttcacgcggccttt

SEQ ID NO: 3792716 - DNA, 25 bp, Homo sapien
tttgcgacggccaagggctgagccc

SEQ ID NO: 3792717 - DNA, 25 bp, Homo sapien
tgccagctcctttgcgacggccaag

SEQ ID NO: 3792718 - DNA, 25 bp, Homo sapien
gagtgcacacggtcatacaggcttt

SEQ ID NO: 3792719 - DNA, 25 bp, Homo sapien
gggcactggagtgcacacggtcata

SEQ ID NO: 3792720 - DNA, 25 bp, Homo sapien
ggcagatggcgccaaatagggcact

SEQ ID NO: 3792721 - DNA, 25 bp, Homo sapien
ctggagtgcacacggtcatacaggc

SEQ ID NO: 3792722 - DNA, 25 bp, Homo sapien
gaaggtggtcgagctggcatcgtca

SEQ ID NO: 3792723 - DNA, 25 bp, Homo sapien
tcccttagggatggaatcagcggtg

SEQ ID NO: 3792724 - DNA, 25 bp, Homo sapien
ctggcatcgtcaggtgagggcccga

SEQ ID NO: 3792725 - DNA, 25 bp, Homo sapien
ctgccgactcgggactcaatgtgtg

SEQ ID NO: 3792726 - DNA, 25 bp, Homo sapien
acagtgcccttttccaacacacgtg

SEQ ID NO: 3792727 - DNA, 25 bp, Homo sapien
caacacacgtgctggcgtctgttgt

SEQ ID NO: 3792728 - DNA, 25 bp, Homo sapien
gggcagtccactttcgggtactcac

SEQ ID NO: 3792729 - DNA, 25 bp, Homo sapien
tcccttagtgttaatgagttcatgg

SEQ ID NO: 3792730 - DNA, 25 bp, Homo sapien
gagcactgctcatatttggacaacg

SEQ ID NO: 3792731 - DNA, 25 bp, Homo sapien
gtgtccccagggtctttgcagcggt

SEQ ID NO: 3792732 - DNA, 25 bp, Homo sapien
gccggaatggagttcttttgacaca

SEQ ID NO: 3792733 - DNA, 25 bp, Homo sapien
gagacctcctaggttggccggaatg

SEQ ID NO: 3792734 - DNA, 25 bp, Homo sapien
tggagggggtctgtcttttcaccac

SEQ ID NO: 3792735 - DNA, 25 bp, Homo sapien
cctgcgtgggaatcggctggaatcc

SEQ ID NO: 3792736 - DNA, 25 bp, Homo sapien
caccacggggagcttcagaagtaaa

SEQ ID NO: 3792737 - DNA, 25 bp, Homo sapien
catgcacgagtccaactcctgcgtg

SEQ ID NO: 3792738 - DNA, 25 bp, Homo sapien
gcagcccccttattaggacaatcgg

SEQ ID NO: 3792739 - DNA, 25 bp, Homo sapien
tgtgttattgtcctgcagtggtgct

SEQ ID NO: 3792740 - DNA, 25 bp, Homo sapien
ctccccactgaatccaagggcagcc

SEQ ID NO: 3792741 - DNA, 25 bp, Homo sapien
tgttgacattgagggctgtgttatt

SEQ ID NO: 3792742 - DNA, 25 bp, Homo sapien
caaatagtgtctcaacgaaggaggc

SEQ ID NO: 3792743 - DNA, 25 bp, Homo sapien
cacgctaggtcagggccaggaaaag

SEQ ID NO: 3792744 - DNA, 25 bp, Homo sapien
caaggtcacctagagctgctatgat

SEQ ID NO: 3792745 - DNA, 25 bp, Homo sapien
tgcaaggctatactcgtcctccggg

SEQ ID NO: 3792746 - DNA, 25 bp, Homo sapien
gccagggccggaacgggagcggcga

SEQ ID NO: 3792747 - DNA, 25 bp, Homo sapien
gccggaacgggagcggcgacagcgg

SEQ ID NO: 3792748 - DNA, 25 bp, Homo sapien
cggaccaggccgcacggacgctcgt

SEQ ID NO: 3792749 - DNA, 25 bp, Homo sapien
tcacgcggacatggcccggaccagg

SEQ ID NO: 3792750 - DNA, 25 bp, Homo sapien
tcgcctggatgtcgatgtcctccac

SEQ ID NO: 3792751 - DNA, 25 bp, Homo sapien
tagcgataggccgagttcgcctgga

SEQ ID NO: 3792752 - DNA, 25 bp, Homo sapien
ggacttcggagggtagcgataggcc

SEQ ID NO: 3792753 - DNA, 25 bp, Homo sapien
gcgatgcggcggctgagaatggagc

SEQ ID NO: 3792754 - DNA, 25 bp, Homo sapien
cattgccaataaaccccaggtgggc

SEQ ID NO: 3792755 - DNA, 25 bp, Homo sapien
gctgcattgccaataaaccccaggt

SEQ ID NO: 3792756 - DNA, 25 bp, Homo sapien
tgcattgccaataaaccccaggtgg

SEQ ID NO: 3792757 - DNA, 25 bp, Homo sapien
tgctgcattgccaataaaccccagg

SEQ ID NO: 3792758 - DNA, 25 bp, Homo sapien
tgggatgccgcggtgaggccagcct

SEQ ID NO: 3792759 - DNA, 25 bp, Homo sapien
aactgccagctcgtggtcaacgctc

SEQ ID NO: 3792760 - DNA, 25 bp, Homo sapien
ggcctgggctattccctccttggga

SEQ ID NO: 3792761 - DNA, 25 bp, Homo sapien
gccaactgccagctcgtggtcaacg

SEQ ID NO: 3792762 - DNA, 25 bp, Homo sapien
cacagtgtgcaatgaacgccaccag

SEQ ID NO: 3792763 - DNA, 25 bp, Homo sapien
ggtacacagtgtgcaatgaacgcca

SEQ ID NO: 3792764 - DNA, 25 bp, Homo sapien
tcttgtggtacacagtgtgcaatga

SEQ ID NO: 3792765 - DNA, 25 bp, Homo sapien
gtgtgcaatgaacgccaccagacat

SEQ ID NO: 3792766 - DNA, 25 bp, Homo sapien
gaacaccactaaaacaaaggcatcc

SEQ ID NO: 3792767 - DNA, 25 bp, Homo sapien
tcagggcagtcctcgaacaccacta

SEQ ID NO: 3792768 - DNA, 25 bp, Homo sapien
cctgcccgagggattcggactctgg

SEQ ID NO: 3792769 - DNA, 25 bp, Homo sapien
ccctgcccgagggattcggactctg

SEQ ID NO: 3792770 - DNA, 25 bp, Homo sapien
ggacactcaggagcgggcttgtccc

SEQ ID NO: 3792771 - DNA, 25 bp, Homo sapien
gcagccttggtctggagggacactc

SEQ ID NO: 3792772 - DNA, 25 bp, Homo sapien
cccgcactagctgctggcagacaag

SEQ ID NO: 3792773 - DNA, 25 bp, Homo sapien
tccccagcgctgacgtactgaggtg

SEQ ID NO: 3792774 - DNA, 25 bp, Homo sapien
cctgctcctccaagatgtgcaccat

SEQ ID NO: 3792775 - DNA, 25 bp, Homo sapien
ccagtcatggagcagggctgagaca

SEQ ID NO: 3792776 - DNA, 25 bp, Homo sapien
gcagggctgagacagggcccggccc

SEQ ID NO: 3792777 - DNA, 25 bp, Homo sapien
ctcaagccccagtcatggagcaggg

SEQ ID NO: 3792778 - DNA, 25 bp, Homo sapien
tcagcgggaattctgagaccttcag

SEQ ID NO: 3792779 - DNA, 25 bp, Homo sapien
aattctgagaccttcaggcgctgca

SEQ ID NO: 3792780 - DNA, 25 bp, Homo sapien
cgggaattctgagaccttcaggcgc

SEQ ID NO: 3792781 - DNA, 25 bp, Homo sapien
ggccttcagcgggaattctgagacc

SEQ ID NO: 3792782 - DNA, 25 bp, Homo sapien
gtgaccacgggaagagtccccgaga

SEQ ID NO: 3792783 - DNA, 25 bp, Homo sapien
gagaggaggagccgggtgaccacgg

SEQ ID NO: 3792784 - DNA, 25 bp, Homo sapien
cacgggaagagtccccgagaggagg

SEQ ID NO: 3792785 - DNA, 25 bp, Homo sapien
tgaccacgggaagagtccccgagag

SEQ ID NO: 3792786 - DNA, 25 bp, Homo sapien
tcccatgaaaaagtgcgaagcaaag

SEQ ID NO: 3792787 - DNA, 25 bp, Homo sapien
tcctcccatgaaaaagtgcgaagca

SEQ ID NO: 3792788 - DNA, 25 bp, Homo sapien
tctcctcccatgaaaaagtgcgaag

SEQ ID NO: 3792789 - DNA, 25 bp, Homo sapien
tgaaaaagtgcgaagcaaagtagtt

SEQ ID NO: 3792790 - DNA, 25 bp, Homo sapien
ctctgtttctcagtgacctgcccct

SEQ ID NO: 3792791 - DNA, 25 bp, Homo sapien
gctctgtttctcagtgacctgcccc

SEQ ID NO: 3792792 - DNA, 25 bp, Homo sapien
cagggagtctttgcggatgttcacc

SEQ ID NO: 3792793 - DNA, 25 bp, Homo sapien
ccgcagggagtctttgcggatgttc

SEQ ID NO: 3792794 - DNA, 25 bp, Homo sapien
tctttgcggatgttcaccaggctcc

SEQ ID NO: 3792795 - DNA, 25 bp, Homo sapien
gagtctttgcggatgttcaccaggc

SEQ ID NO: 3792796 - DNA, 25 bp, Homo sapien
tgccgttcaggaactcctccgatgc

SEQ ID NO: 3792797 - DNA, 25 bp, Homo sapien
ggcatcggcgtcgaaggtgaactcc

SEQ ID NO: 3792798 - DNA, 25 bp, Homo sapien
cctggcagtagatggtgatggccac

SEQ ID NO: 3792799 - DNA, 25 bp, Homo sapien
ggggctgtcggcatcgtctttgtac

SEQ ID NO: 3792800 - DNA, 25 bp, Homo sapien
tggctcacccctctcttgtagtgga

SEQ ID NO: 3792801 - DNA, 25 bp, Homo sapien
ttgtagtggacggtctcggactgta

SEQ ID NO: 3792802 - DNA, 25 bp, Homo sapien
tcgtcatccttccattccgagaagt

SEQ ID NO: 3792803 - DNA, 25 bp, Homo sapien
gagaagtcaatcttgaaggagggca

SEQ ID NO: 3792804 - DNA, 25 bp, Homo sapien
ttgcaagctgcagaccagatggacg

SEQ ID NO: 3792805 - DNA, 25 bp, Homo sapien
gggtctttgcaagctgcagaccaga

SEQ ID NO: 3792806 - DNA, 25 bp, Homo sapien
gtctttgcaagctgcagaccagatg

SEQ ID NO: 3792807 - DNA, 25 bp, Homo sapien
ctttgcaagctgcagaccagatgga

SEQ ID NO: 3792808 - DNA, 25 bp, Homo sapien
ggcctcagacctgggacccacaagg

SEQ ID NO: 3792809 - DNA, 25 bp, Homo sapien
tggccccagcgtaagtcagctcatg

SEQ ID NO: 3792810 - DNA, 25 bp, Homo sapien
gagagtggctaaacgtcaggaacac

SEQ ID NO: 3792811 - DNA, 25 bp, Homo sapien
catgaggcctgctagcagggcatgt

SEQ ID NO: 3792812 - DNA, 25 bp, Homo sapien
tgatctgttcggttttcacccctcc

SEQ ID NO: 3792813 - DNA, 25 bp, Homo sapien
tcccaggtagtcttacttttgagac

SEQ ID NO: 3792814 - DNA, 25 bp, Homo sapien
ccactcccaggtagtcttacttttg

SEQ ID NO: 3792815 - DNA, 25 bp, Homo sapien
ctcgctatgtggctcagactggact

SEQ ID NO: 3792816 - DNA, 25 bp, Homo sapien
tgaccgccagtgatccgactaactc

SEQ ID NO: 3792817 - DNA, 25 bp, Homo sapien
tcctgaccgccagtgatccgactaa

SEQ ID NO: 3792818 - DNA, 25 bp, Homo sapien
accgccagtgatccgactaactcag

SEQ ID NO: 3792819 - DNA, 25 bp, Homo sapien
gccagtgatccgactaactcagcct

SEQ ID NO: 3792820 - DNA, 25 bp, Homo sapien
ctggaagcctggagtcggtcaacaa

SEQ ID NO: 3792821 - DNA, 25 bp, Homo sapien
gcctggaagcctggagtcggtcaac

SEQ ID NO: 3792822 - DNA, 25 bp, Homo sapien
gaggagagagttgccaagaatggtc

SEQ ID NO: 3792823 - DNA, 25 bp, Homo sapien
gaagcctggagtcggtcaacaaatg

SEQ ID NO: 3792824 - DNA, 25 bp, Homo sapien
tgactactggaaacacgccccggtc

SEQ ID NO: 3792825 - DNA, 25 bp, Homo sapien
ctactggaaacacgccccggtccag

SEQ ID NO: 3792826 - DNA, 25 bp, Homo sapien
cacagcctggatgactactggaaac

SEQ ID NO: 3792827 - DNA, 25 bp, Homo sapien
ctccccgaccctggtaggcctgcgg

SEQ ID NO: 3792828 - DNA, 25 bp, Homo sapien
accctggtaggcctgcggcaccgag

SEQ ID NO: 3792829 - DNA, 25 bp, Homo sapien
tgcccgggactccaagctgctcaca

SEQ ID NO: 3792830 - DNA, 25 bp, Homo sapien
cctgcacagagtccatagagtcctg

SEQ ID NO: 3792831 - DNA, 25 bp, Homo sapien
gagcacgtgggcgtggccagtcact

SEQ ID NO: 3792832 - DNA, 25 bp, Homo sapien
aagagcacgtgggcgtggccagtca

SEQ ID NO: 3792833 - DNA, 25 bp, Homo sapien
gcacgtgggcgtggccagtcacttc

SEQ ID NO: 3792834 - DNA, 25 bp, Homo sapien
caagagcacgtgggcgtggccagtc

SEQ ID NO: 3792835 - DNA, 25 bp, Homo sapien
cttcacagagaagctgccgtccatg

SEQ ID NO: 3792836 - DNA, 25 bp, Homo sapien
gcttcacagagaagctgccgtccat

SEQ ID NO: 3792837 - DNA, 25 bp, Homo sapien
ggcttccataccaggggtcagtcca

SEQ ID NO: 3792838 - DNA, 25 bp, Homo sapien
aggcttccataccaggggtcagtcc

SEQ ID NO: 3792839 - DNA, 25 bp, Homo sapien
caggcttccataccaggggtcagtc

SEQ ID NO: 3792840 - DNA, 25 bp, Homo sapien
ggttgttcttgttctcaatgccata

SEQ ID NO: 3792841 - DNA, 25 bp, Homo sapien
gttgttcttgttctcaatgccatag

SEQ ID NO: 3792842 - DNA, 25 bp, Homo sapien
tcttgttctcaatgccatagatctc

SEQ ID NO: 3792843 - DNA, 25 bp, Homo sapien
tgttcttgttctcaatgccatagat

SEQ ID NO: 3792844 - DNA, 25 bp, Homo sapien
gatgccataatgaagcgggcctgtg

SEQ ID NO: 3792845 - DNA, 25 bp, Homo sapien
gggcctgtgagactttccaagagat

SEQ ID NO: 3792846 - DNA, 25 bp, Homo sapien
aggtgctccgctcccgccacgtgga

SEQ ID NO: 3792847 - DNA, 25 bp, Homo sapien
gggcccagatgccataatgaagcgg

SEQ ID NO: 3792848 - DNA, 25 bp, Homo sapien
accacacactcgttgctgttgtcgc

SEQ ID NO: 3792849 - DNA, 25 bp, Homo sapien
tgtcggcgcaggaggtacagaggca

SEQ ID NO: 3792850 - DNA, 25 bp, Homo sapien
gtgtcccgcaggtcggacaggcaca

SEQ ID NO: 3792851 - DNA, 25 bp, Homo sapien
ggcagggcaggatcagcgtgtcccg

SEQ ID NO: 3792852 - DNA, 25 bp, Homo sapien
ctgagacaaggacatcatgctgagg

SEQ ID NO: 3792853 - DNA, 25 bp, Homo sapien
acaaggacatcatgctgaggaagct

SEQ ID NO: 3792854 - DNA, 25 bp, Homo sapien
actgaggcaaaaacatcacgctggg

SEQ ID NO: 3792855 - DNA, 25 bp, Homo sapien
ggcaaaaacatcacgctggggaagc

SEQ ID NO: 3792856 - DNA, 25 bp, Homo sapien
cagaactcccgcaaacacagtatta

SEQ ID NO: 3792857 - DNA, 25 bp, Homo sapien
tgaagctccaggctgcacccgagac

SEQ ID NO: 3792858 - DNA, 25 bp, Homo sapien
gggcgctccaaagacgagagacaga

SEQ ID NO: 3792859 - DNA, 25 bp, Homo sapien
gacaggacgtgactgcaaatcagca

SEQ ID NO: 3792860 - DNA, 25 bp, Homo sapien
ttcttccgcaccgcccggatctgca

SEQ ID NO: 3792861 - DNA, 25 bp, Homo sapien
ggcccaggtcaaggccctgatcaag

SEQ ID NO: 3792862 - DNA, 25 bp, Homo sapien
gccatgtttctcctctagcatcaag

SEQ ID NO: 3792863 - DNA, 25 bp, Homo sapien
ggagccttctagagcaaaggcgctg

SEQ ID NO: 3792864 - DNA, 25 bp, Homo sapien
aaacattgaccccatttcagaaaca

SEQ ID NO: 3792865 - DNA, 25 bp, Homo sapien
acttcacaagcttccgggggacgtg

SEQ ID NO: 3792866 - DNA, 25 bp, Homo sapien
gctggacaggtctgactggctgtcc

SEQ ID NO: 3792867 - DNA, 25 bp, Homo sapien
acaccgtggcgcagaacttcacaag

SEQ ID NO: 3792868 - DNA, 25 bp, Homo sapien
tcttgccacaccgtggcgcagaact

SEQ ID NO: 3792869 - DNA, 25 bp, Homo sapien
tcccttttaggtttcttgctggcca

SEQ ID NO: 3792870 - DNA, 25 bp, Homo sapien
ttttaggtttcttgctggccaggga

SEQ ID NO: 3792871 - DNA, 25 bp, Homo sapien
cttttaggtttcttgctggccaggg

SEQ ID NO: 3792872 - DNA, 25 bp, Homo sapien
cagggaggcggggtgcggctttgat

SEQ ID NO: 3792873 - DNA, 25 bp, Homo sapien
aataggtgatttcttcataaagagg

SEQ ID NO: 3792874 - DNA, 25 bp, Homo sapien
ctcgtagccaggtgggacgctgtca

SEQ ID NO: 3792875 - DNA, 25 bp, Homo sapien
caggatgtggtcgatagccgcgagg

SEQ ID NO: 3792876 - DNA, 25 bp, Homo sapien
cgtccgagatgcctgaataggtgat

SEQ ID NO: 3792877 - DNA, 25 bp, Homo sapien
gcagggccagctctgcgccacccag

SEQ ID NO: 3792878 - DNA, 25 bp, Homo sapien
agggccagctctgcgccacccagtg

SEQ ID NO: 3792879 - DNA, 25 bp, Homo sapien
ccacgtcctcggagagcttctcctc

SEQ ID NO: 3792880 - DNA, 25 bp, Homo sapien
catcctcttcgtggatgggggaaga

SEQ ID NO: 3792881 - DNA, 25 bp, Homo sapien
ctcagcaagagccaacaagcacggg

SEQ ID NO: 3792882 - DNA, 25 bp, Homo sapien
tagcctagagctcagagagccgcgg

SEQ ID NO: 3792883 - DNA, 25 bp, Homo sapien
taaggagccgcgcagctcagcaaga

SEQ ID NO: 3792884 - DNA, 25 bp, Homo sapien
tccacagaccgaggctaaggagccg

SEQ ID NO: 3792885 - DNA, 25 bp, Homo sapien
cttgctgtggtgacgacgactcatc

SEQ ID NO: 3792886 - DNA, 25 bp, Homo sapien
catcaacctcttctgttatgaaact

SEQ ID NO: 3792887 - DNA, 25 bp, Homo sapien
tgtggtgacgacgactcatcaacct

SEQ ID NO: 3792888 - DNA, 25 bp, Homo sapien
gtgacgacgactcatcaacctcttc

SEQ ID NO: 3792889 - DNA, 25 bp, Homo sapien
actgaatgctggcaggtgttcccca

SEQ ID NO: 3792890 - DNA, 25 bp, Homo sapien
ctgcagggtcaacagcgcagcctga

SEQ ID NO: 3792891 - DNA, 25 bp, Homo sapien
cctaaggccccagtaagccagggct

SEQ ID NO: 3792892 - DNA, 25 bp, Homo sapien
catgcggtttgtgcccatggaagga

SEQ ID NO: 3792893 - DNA, 25 bp, Homo sapien
gctgtcctgcaggacattctcaatg

SEQ ID NO: 3792894 - DNA, 25 bp, Homo sapien
tcctgcaggacattctcaatggaag

SEQ ID NO: 3792895 - DNA, 25 bp, Homo sapien
tgtcctgcaggacattctcaatgga

SEQ ID NO: 3792896 - DNA, 25 bp, Homo sapien
ctgcaggacattctcaatggaagct

SEQ ID NO: 3792897 - DNA, 25 bp, Homo sapien
tctgctgtgagttgttcggggcagg

SEQ ID NO: 3792898 - DNA, 25 bp, Homo sapien
cttctgctgtgagttgttcggggca

SEQ ID NO: 3792899 - DNA, 25 bp, Homo sapien
gctgtgagttgttcggggcaggccg

SEQ ID NO: 3792900 - DNA, 25 bp, Homo sapien
tgctgtgagttgttcggggcaggcc

SEQ ID NO: 3792901 - DNA, 25 bp, Homo sapien
tgaggctagacaggaccgagctcag

SEQ ID NO: 3792902 - DNA, 25 bp, Homo sapien
cccagtgttcaccatctcatgggcc

SEQ ID NO: 3792903 - DNA, 25 bp, Homo sapien
tcagggccaagtccaagacaccagg

SEQ ID NO: 3792904 - DNA, 25 bp, Homo sapien
gctgaggctagacaggaccgagctc

SEQ ID NO: 3792905 - DNA, 25 bp, Homo sapien
ctataccaacagagcaggagtcggg

SEQ ID NO: 3792906 - DNA, 25 bp, Homo sapien
tataccaacagagcaggagtcgggc

SEQ ID NO: 3792907 - DNA, 25 bp, Homo sapien
ataccaacagagcaggagtcgggcc

SEQ ID NO: 3792908 - DNA, 25 bp, Homo sapien
catgaattgttaaagccacgaccgg

SEQ ID NO: 3792909 - DNA, 25 bp, Homo sapien
tgcggacgaagacccaaaaaccaga

SEQ ID NO: 3792910 - DNA, 25 bp, Homo sapien
cctcaggacaggacgcaagatactc

SEQ ID NO: 3792911 - DNA, 25 bp, Homo sapien
ccgatgcgaactcatggtgggacca

SEQ ID NO: 3792912 - DNA, 25 bp, Homo sapien
gcagcagtgggctcatggcacaaag

SEQ ID NO: 3792913 - DNA, 25 bp, Homo sapien
aaaggcagcccacgagggactgtgt

SEQ ID NO: 3792914 - DNA, 25 bp, Homo sapien
agcagtgggctcatggcacaaaggc

SEQ ID NO: 3792915 - DNA, 25 bp, Homo sapien
gtgagtcggcagcagtgggctcatg

SEQ ID NO: 3792916 - DNA, 25 bp, Homo sapien
gggcctcctatcttttagtgctggt

SEQ ID NO: 3792917 - DNA, 25 bp, Homo sapien
tcacagggcctcctatcttttagtg

SEQ ID NO: 3792918 - DNA, 25 bp, Homo sapien
acagggcctcctatcttttagtgct

SEQ ID NO: 3792919 - DNA, 25 bp, Homo sapien
gatgggggatgccaacctcacaggg

SEQ ID NO: 3792920 - DNA, 25 bp, Homo sapien
tgggccaccctggtagagggcgcct

SEQ ID NO: 3792921 - DNA, 25 bp, Homo sapien
ctgggccaccctggtagagggcgcc

SEQ ID NO: 3792922 - DNA, 25 bp, Homo sapien
agagagggggtctatgttttctaca

SEQ ID NO: 3792923 - DNA, 25 bp, Homo sapien
acagagccgccttctgtaaaacact

SEQ ID NO: 3792924 - DNA, 25 bp, Homo sapien
gtcaacagagggactcgctgggctc

SEQ ID NO: 3792925 - DNA, 25 bp, Homo sapien
gaaagggcctcttagagcctgcacc

SEQ ID NO: 3792926 - DNA, 25 bp, Homo sapien
catgggaatgcagagcgcagtcaaa

SEQ ID NO: 3792927 - DNA, 25 bp, Homo sapien
caaaagaagcgaagttctccctgac

SEQ ID NO: 3792928 - DNA, 25 bp, Homo sapien
acggcaccttccaccgatgcgcagg

SEQ ID NO: 3792929 - DNA, 25 bp, Homo sapien
gccggggccgtctgaaaggtgctga

SEQ ID NO: 3792930 - DNA, 25 bp, Homo sapien
accttccaccgatgcgcaggccggg

SEQ ID NO: 3792931 - DNA, 25 bp, Homo sapien
gaatcgtgacattcgcacggcacct

SEQ ID NO: 3792932 - DNA, 25 bp, Homo sapien
cactccccagctccggaagcttgac

SEQ ID NO: 3792933 - DNA, 25 bp, Homo sapien
gcactccccagctccggaagcttga

SEQ ID NO: 3792934 - DNA, 25 bp, Homo sapien
tgcactccccagctccggaagcttg

SEQ ID NO: 3792935 - DNA, 25 bp, Homo sapien
ctgcactccccagctccggaagctt

SEQ ID NO: 3792936 - DNA, 25 bp, Homo sapien
gagaacaagcccgtgctcagagtag

SEQ ID NO: 3792937 - DNA, 25 bp, Homo sapien
aggctgtgagccctgttctagatca

SEQ ID NO: 3792938 - DNA, 25 bp, Homo sapien
cactctccggtgaagggcgtctatt

SEQ ID NO: 3792939 - DNA, 25 bp, Homo sapien
cccggatggctactgcaaggcaaag

SEQ ID NO: 3792940 - DNA, 25 bp, Homo sapien
tgtcctgccaaggttcttacggctg

SEQ ID NO: 3792941 - DNA, 25 bp, Homo sapien
gaactcggtcaacccagggtgcagg

SEQ ID NO: 3792942 - DNA, 25 bp, Homo sapien
accgcggtggatgccctctgggcct

SEQ ID NO: 3792943 - DNA, 25 bp, Homo sapien
agccccgagtcagagcgcgacacgg

SEQ ID NO: 3792944 - DNA, 25 bp, Homo sapien
gctcctaccgatctggagccccaga

SEQ ID NO: 3792945 - DNA, 25 bp, Homo sapien
caaatacgctgtgtccctcttggga

SEQ ID NO: 3792946 - DNA, 25 bp, Homo sapien
gggtcacactcggatgcctggtgcc

SEQ ID NO: 3792947 - DNA, 25 bp, Homo sapien
gggactccctaactgtgccaaatac

SEQ ID NO: 3792948 - DNA, 25 bp, Homo sapien
gaggccgtgggccgtctccatggag

SEQ ID NO: 3792949 - DNA, 25 bp, Homo sapien
tggtggcgaggccgtgggccgtctc

SEQ ID NO: 3792950 - DNA, 25 bp, Homo sapien
tggtggtggcgaggccgtgggccgt

SEQ ID NO: 3792951 - DNA, 25 bp, Homo sapien
tggcgaggccgtgggccgtctccat

SEQ ID NO: 3792952 - DNA, 25 bp, Homo sapien
gacagttcactgtgctctttgatca

SEQ ID NO: 3792953 - DNA, 25 bp, Homo sapien
ggagcagcccctcggcaaagtctgg

SEQ ID NO: 3792954 - DNA, 25 bp, Homo sapien
tgtaccagttacaaatatatcaact

SEQ ID NO: 3792955 - DNA, 25 bp, Homo sapien
tctttgatcaagagtcaccacggcc

SEQ ID NO: 3792956 - DNA, 25 bp, Homo sapien
cagccccagccgctcagcccacagg

SEQ ID NO: 3792957 - DNA, 25 bp, Homo sapien
ctgttgcaggagcaggcagagccag

SEQ ID NO: 3792958 - DNA, 25 bp, Homo sapien
agagccagcggaggccacacgtggg

SEQ ID NO: 3792959 - DNA, 25 bp, Homo sapien
ggagcaggcagagccagcggaggcc

SEQ ID NO: 3792960 - DNA, 25 bp, Homo sapien
actgaggccgcgcaaacacggcaga

SEQ ID NO: 3792961 - DNA, 25 bp, Homo sapien
caggccgccacagtgacacgcaggg

SEQ ID NO: 3792962 - DNA, 25 bp, Homo sapien
cagaggacaaaaagcagcgacagcc

SEQ ID NO: 3792963 - DNA, 25 bp, Homo sapien
tgtttccttcattgaccgtgcctgg

SEQ ID NO: 3792964 - DNA, 25 bp, Homo sapien
gccacagaagcctgagacagaacaa

SEQ ID NO: 3792965 - DNA, 25 bp, Homo sapien
aaaaacaggacgaggtcgcccagag

SEQ ID NO: 3792966 - DNA, 25 bp, Homo sapien
tggaggggccttgtgatgtcaccaa

SEQ ID NO: 3792967 - DNA, 25 bp, Homo sapien
agcaccgggctgagacactctagct

SEQ ID NO: 3792968 - DNA, 25 bp, Homo sapien
gccatctgcggcccaggaggtttac

SEQ ID NO: 3792969 - DNA, 25 bp, Homo sapien
caggcccaggcactccctttgccat

SEQ ID NO: 3792970 - DNA, 25 bp, Homo sapien
ggctccgcaggggtggatccagccc

SEQ ID NO: 3792971 - DNA, 25 bp, Homo sapien
tggatccagccctgggtcaccaggc

SEQ ID NO: 3792972 - DNA, 25 bp, Homo sapien
gaggcggacctcatgctcggagcca

SEQ ID NO: 3792973 - DNA, 25 bp, Homo sapien
gatgctcggtccgagtgcacacaca

SEQ ID NO: 3792974 - DNA, 25 bp, Homo sapien
tgaacatgtgcgtgagcatgtgcaa

SEQ ID NO: 3792975 - DNA, 25 bp, Homo sapien
tgtgtacgtgtgagcgcatctgcgt

SEQ ID NO: 3792976 - DNA, 25 bp, Homo sapien
gcccgaacttcacgcaaagctctgg

SEQ ID NO: 3792977 - DNA, 25 bp, Homo sapien
taaaaacgaaccaacgatgagccca

SEQ ID NO: 3792978 - DNA, 25 bp, Homo sapien
tgagcccatctgagcacatcagacg

SEQ ID NO: 3792979 - DNA, 25 bp, Homo sapien
gagcacatcagacggcagcacatgg

SEQ ID NO: 3792980 - DNA, 25 bp, Homo sapien
cctcagatgtggagaataaggaccc

SEQ ID NO: 3792981 - DNA, 25 bp, Homo sapien
gatgtggagaataaggacccagaga

SEQ ID NO: 3792982 - DNA, 25 bp, Homo sapien
agaataaggacccagagagggcacc

SEQ ID NO: 3792983 - DNA, 25 bp, Homo sapien
cagatgtggagaataaggacccaga

SEQ ID NO: 3792984 - DNA, 25 bp, Homo sapien
ccttgtgtttgtactggagatgtct

SEQ ID NO: 3792985 - DNA, 25 bp, Homo sapien
cacttaccttgtgtttgtactggag

SEQ ID NO: 3792986 - DNA, 25 bp, Homo sapien
ttaccttgtgtttgtactggagatg

SEQ ID NO: 3792987 - DNA, 25 bp, Homo sapien
acttaccttgtgtttgtactggaga

SEQ ID NO: 3792988 - DNA, 25 bp, Homo sapien
caggctcgatccaggacagcacggg

SEQ ID NO: 3792989 - DNA, 25 bp, Homo sapien
caccctgctggcaggctcgatccag

SEQ ID NO: 3792990 - DNA, 25 bp, Homo sapien
gcttgagtgccccagtccccgagtc

SEQ ID NO: 3792991 - DNA, 25 bp, Homo sapien
gccatgcacgacagctgtcccgacc

SEQ ID NO: 3792992 - DNA, 25 bp, Homo sapien
agagatgccccggagccttgctccg

SEQ ID NO: 3792993 - DNA, 25 bp, Homo sapien
cccaagcccggagggagatggcctt

SEQ ID NO: 3792994 - DNA, 25 bp, Homo sapien
atggccccgtccatccgcaatggca

SEQ ID NO: 3792995 - DNA, 25 bp, Homo sapien
ccttggcacgaccacacgagccaga

SEQ ID NO: 3792996 - DNA, 25 bp, Homo sapien
gacagccgaaattccctgcggtttc

SEQ ID NO: 3792997 - DNA, 25 bp, Homo sapien
tgcggtttctccaccctcgatggcg

SEQ ID NO: 3792998 - DNA, 25 bp, Homo sapien
ttggcgccccaaagcggacagccga

SEQ ID NO: 3792999 - DNA, 25 bp, Homo sapien
tgtgggcgacgaacatcttccttgg

SEQ ID NO: 3793000 - DNA, 25 bp, Homo sapien
cttggcactgaccccgtccccgccg

SEQ ID NO: 3793001 - DNA, 25 bp, Homo sapien
cggcgtacagcatggcgtggcacga

SEQ ID NO: 3793002 - DNA, 25 bp, Homo sapien
atggcgtggcacgagtggctccagc

SEQ ID NO: 3793003 - DNA, 25 bp, Homo sapien
agctgcccagggttggcggcgtaca

SEQ ID NO: 3793004 - DNA, 25 bp, Homo sapien
tgatctgcttcagctccggaaccgc

SEQ ID NO: 3793005 - DNA, 25 bp, Homo sapien
gcgctgatctccacggcgtgcagct

SEQ ID NO: 3793006 - DNA, 25 bp, Homo sapien
cctcggtcaggtgcgagctcaggta

SEQ ID NO: 3793007 - DNA, 25 bp, Homo sapien
tcgcgcgagtgcaccgcgctgatct

SEQ ID NO: 3793008 - DNA, 25 bp, Homo sapien
agctgccgcgcgtacaggtgcgcca

SEQ ID NO: 3793009 - DNA, 25 bp, Homo sapien
tgccttccacggggccagagccaaa

SEQ ID NO: 3793010 - DNA, 25 bp, Homo sapien
gccttccacggggccagagccaaac

SEQ ID NO: 3793011 - DNA, 25 bp, Homo sapien
tcggtgccttccacggggccagagc

SEQ ID NO: 3793012 - DNA, 25 bp, Homo sapien
ccatcggtgccttccacggggccag

SEQ ID NO: 3793013 - DNA, 25 bp, Homo sapien
caacatgaggttcccaagttttaca

SEQ ID NO: 3793014 - DNA, 25 bp, Homo sapien
cagctttgccaaggacttaatggga

SEQ ID NO: 3793015 - DNA, 25 bp, Homo sapien
gcggatgtaacacagccctgaggga

SEQ ID NO: 3793016 - DNA, 25 bp, Homo sapien
acttaatgggagacccacgcagggc

SEQ ID NO: 3793017 - DNA, 25 bp, Homo sapien
tctgggtgtacagcgggacccgcac

SEQ ID NO: 3793018 - DNA, 25 bp, Homo sapien
ccgtgctcacgaaggcgttgctcag

SEQ ID NO: 3793019 - DNA, 25 bp, Homo sapien
gaggagctggcacttagccgtgctc

SEQ ID NO: 3793020 - DNA, 25 bp, Homo sapien
ggaagcctccgactcggtccttctg

SEQ ID NO: 3793021 - DNA, 25 bp, Homo sapien
cttcttctgcttctcggtggctgca

SEQ ID NO: 3793022 - DNA, 25 bp, Homo sapien
gcagccagggcctcaaccagcttct

SEQ ID NO: 3793023 - DNA, 25 bp, Homo sapien
tctgcttctcggtggctgcagccag

SEQ ID NO: 3793024 - DNA, 25 bp, Homo sapien
tctcctcgggcatcatgttgagcac

SEQ ID NO: 3793025 - DNA, 25 bp, Homo sapien
acgtacaagaggagggtctgagccc

SEQ ID NO: 3793026 - DNA, 25 bp, Homo sapien
gggtacacacaaacactctagaagc

SEQ ID NO: 3793027 - DNA, 25 bp, Homo sapien
gcttcgttgtacatagctgggcccc

SEQ ID NO: 3793028 - DNA, 25 bp, Homo sapien
ggaatgagctgaccgagacaaggca

SEQ ID NO: 3793029 - DNA, 25 bp, Homo sapien
tggtcgttctgagtggcagagtctc

SEQ ID NO: 3793030 - DNA, 25 bp, Homo sapien
gaagtaatcatggtggtggtctcag

SEQ ID NO: 3793031 - DNA, 25 bp, Homo sapien
catacatgtctgaagccgcttgtgt

SEQ ID NO: 3793032 - DNA, 25 bp, Homo sapien
tgtcccgtccgctgagctgtgagca

SEQ ID NO: 3793033 - DNA, 25 bp, Homo sapien
ccgctgcacccggcaaaaatttctt

SEQ ID NO: 3793034 - DNA, 25 bp, Homo sapien
accgctgcacccggcaaaaatttct

SEQ ID NO: 3793035 - DNA, 25 bp, Homo sapien
cataaggtggtccacccgactcggc

SEQ ID NO: 3793036 - DNA, 25 bp, Homo sapien
caaaacttgtggctgcggtgcagac

SEQ ID NO: 3793037 - DNA, 25 bp, Homo sapien
tcatgagcgtgggagatgactcccc

SEQ ID NO: 3793038 - DNA, 25 bp, Homo sapien
gaattgttgcgctgcaagacctgta

SEQ ID NO: 3793039 - DNA, 25 bp, Homo sapien
aaggtgaaggctgggatctccgcat

SEQ ID NO: 3793040 - DNA, 25 bp, Homo sapien
tgatttcttagccatttgtatttct

SEQ ID NO: 3793041 - DNA, 25 bp, Homo sapien
aattgatttcttagccatttgtatt

SEQ ID NO: 3793042 - DNA, 25 bp, Homo sapien
cagccagttgaacatttttaaattg

SEQ ID NO: 3793043 - DNA, 25 bp, Homo sapien
tgcgcccagccagttgaacattttt

SEQ ID NO: 3793044 - DNA, 25 bp, Homo sapien
ctgggtgctttcacagacctcctct

SEQ ID NO: 3793045 - DNA, 25 bp, Homo sapien
cctctgtgggcgtgacagttaccac

SEQ ID NO: 3793046 - DNA, 25 bp, Homo sapien
tgggcgtgacagttaccaccagcat

SEQ ID NO: 3793047 - DNA, 25 bp, Homo sapien
tttgcgatgcggttccacggggcga

SEQ ID NO: 3793048 - DNA, 25 bp, Homo sapien
gggcacagtaatgccctgtgcgccg

SEQ ID NO: 3793049 - DNA, 25 bp, Homo sapien
cctgtgcgccgtagcgttcctgtgg

SEQ ID NO: 3793050 - DNA, 25 bp, Homo sapien
attttctttatgtggttgtggtggg

SEQ ID NO: 3793051 - DNA, 25 bp, Homo sapien
actgctgtgagttacgggtttgtcg

SEQ ID NO: 3793052 - DNA, 25 bp, Homo sapien
cgagggcggcgcaaggcctgaggcc

SEQ ID NO: 3793053 - DNA, 25 bp, Homo sapien
gggcgtcccgcgctgcacttgctcg

SEQ ID NO: 3793054 - DNA, 25 bp, Homo sapien
gcgagggagcgtggcggcgagctgt

SEQ ID NO: 3793055 - DNA, 25 bp, Homo sapien
cccagcacaggtgggttccgcggcg

SEQ ID NO: 3793056 - DNA, 25 bp, Homo sapien
gaagctgaccggaaggtccgggtgc

SEQ ID NO: 3793057 - DNA, 25 bp, Homo sapien
catcagacagcgagccgggaagctg

SEQ ID NO: 3793058 - DNA, 25 bp, Homo sapien
ggacgtgtgcattccacggcgcccg

SEQ ID NO: 3793059 - DNA, 25 bp, Homo sapien
tgtcccggtgccgacccgcgagctt

SEQ ID NO: 3793060 - DNA, 25 bp, Homo sapien
ctctttcgggcctttgcgcgtcctg

SEQ ID NO: 3793061 - DNA, 25 bp, Homo sapien
gctgtcctgacagcgctataaacag

SEQ ID NO: 3793062 - DNA, 25 bp, Homo sapien
tcctgcctctcctgcaatgggattg

SEQ ID NO: 3793063 - DNA, 25 bp, Homo sapien
tcagcggagctttacattactagac

SEQ ID NO: 3793064 - DNA, 25 bp, Homo sapien
tgccttctcagtgcaccataatccg

SEQ ID NO: 3793065 - DNA, 25 bp, Homo sapien
tcagtgcaccataatccggggagct

SEQ ID NO: 3793066 - DNA, 25 bp, Homo sapien
ccttctcagtgcaccataatccggg

SEQ ID NO: 3793067 - DNA, 25 bp, Homo sapien
tctcagtgcaccataatccggggag

SEQ ID NO: 3793068 - DNA, 25 bp, Homo sapien
gagtctgagtccagagacgggagct

SEQ ID NO: 3793069 - DNA, 25 bp, Homo sapien
cgggagctggtctttgacagccttg

SEQ ID NO: 3793070 - DNA, 25 bp, Homo sapien
gccatgcctttatcgttggatgcca

SEQ ID NO: 3793071 - DNA, 25 bp, Homo sapien
ttgaggatggcatcccagggcccca

SEQ ID NO: 3793072 - DNA, 25 bp, Homo sapien
gtctttgagagccatttcagggacc

SEQ ID NO: 3793073 - DNA, 25 bp, Homo sapien
ctcgaaggcttatcacaatgcactg

SEQ ID NO: 3793074 - DNA, 25 bp, Homo sapien
acaaatgcagaatccctcgaaggct

SEQ ID NO: 3793075 - DNA, 25 bp, Homo sapien
gctattggtctgagcgtctttgaga

SEQ ID NO: 3793076 - DNA, 25 bp, Homo sapien
ccatcggcaggatcttcagccagct

SEQ ID NO: 3793077 - DNA, 25 bp, Homo sapien
caggccctggacttgtcgccatcgg

SEQ ID NO: 3793078 - DNA, 25 bp, Homo sapien
tgtcgccatcggcaggatcttcagc

SEQ ID NO: 3793079 - DNA, 25 bp, Homo sapien
gacttgtcgccatcggcaggatctt

SEQ ID NO: 3793080 - DNA, 25 bp, Homo sapien
ctcgggaagggactcttcagctgca

SEQ ID NO: 3793081 - DNA, 25 bp, Homo sapien
cgggaagggactcttcagctgcagc

SEQ ID NO: 3793082 - DNA, 25 bp, Homo sapien
ggaagggactcttcagctgcagcga

SEQ ID NO: 3793083 - DNA, 25 bp, Homo sapien
gaagggactcttcagctgcagcgac

SEQ ID NO: 3793084 - DNA, 25 bp, Homo sapien
agggcccggcggttcacagattctt

SEQ ID NO: 3793085 - DNA, 25 bp, Homo sapien
ctcggccatcccaagaagagcgctg

SEQ ID NO: 3793086 - DNA, 25 bp, Homo sapien
aggagagagtggcttcggcctgtgg

SEQ ID NO: 3793087 - DNA, 25 bp, Homo sapien
aagagcgctgacctcaccagagctt

SEQ ID NO: 3793088 - DNA, 25 bp, Homo sapien
ttctggaggatgtccgtctctatca

SEQ ID NO: 3793089 - DNA, 25 bp, Homo sapien
cccgggtgactttctggaggatgtc

SEQ ID NO: 3793090 - DNA, 25 bp, Homo sapien
caggcatcccgggtgactttctgga

SEQ ID NO: 3793091 - DNA, 25 bp, Homo sapien
gactttctggaggatgtccgtctct

SEQ ID NO: 3793092 - DNA, 25 bp, Homo sapien
gagcgagagcactggtggtccctcc

SEQ ID NO: 3793093 - DNA, 25 bp, Homo sapien
tgggagctgactccgcagcgtggca

SEQ ID NO: 3793094 - DNA, 25 bp, Homo sapien
tccggaggctccacgaggggcattt

SEQ ID NO: 3793095 - DNA, 25 bp, Homo sapien
gcagcgtggcagggcgcctccttca

SEQ ID NO: 3793096 - DNA, 25 bp, Homo sapien
tcttgtcccgccagactctgaagga

SEQ ID NO: 3793097 - DNA, 25 bp, Homo sapien
tgtcatccaaatcccacgcttcaag

SEQ ID NO: 3793098 - DNA, 25 bp, Homo sapien
acagttccaggtgcacgatttccct

SEQ ID NO: 3793099 - DNA, 25 bp, Homo sapien
tggttgtcttcttgtcccgccagac

SEQ ID NO: 3793100 - DNA, 25 bp, Homo sapien
tgggctccagtgttcaaggtcagac

SEQ ID NO: 3793101 - DNA, 25 bp, Homo sapien
gtgggctccagtgttcaaggtcaga

SEQ ID NO: 3793102 - DNA, 25 bp, Homo sapien
gggcccaggaaggtgctgcttgtgg

SEQ ID NO: 3793103 - DNA, 25 bp, Homo sapien
gtgaccagcctgcagccctctgtgt

SEQ ID NO: 3793104 - DNA, 25 bp, Homo sapien
gcctgcagccctctgtgtctgaggg

SEQ ID NO: 3793105 - DNA, 25 bp, Homo sapien
gaaggtgctgcttgtggggattcac

SEQ ID NO: 3793106 - DNA, 25 bp, Homo sapien
tttatttgcaggacttcccagagca

SEQ ID NO: 3793107 - DNA, 25 bp, Homo sapien
agcgtgcttaggagctgactgcgca

SEQ ID NO: 3793108 - DNA, 25 bp, Homo sapien
gcaaagccatgagtgtagtgacagt

SEQ ID NO: 3793109 - DNA, 25 bp, Homo sapien
cttaggagctgactgcgcacagaag

SEQ ID NO: 3793110 - DNA, 25 bp, Homo sapien
cctttgtggcccgagtggataggga

SEQ ID NO: 3793111 - DNA, 25 bp, Homo sapien
atgtatttaacataacacgggctgt

SEQ ID NO: 3793112 - DNA, 25 bp, Homo sapien
ataacacgggctgtcagtcacaggg

SEQ ID NO: 3793113 - DNA, 25 bp, Homo sapien
tatgggatttgaattacaaaccaac

SEQ ID NO: 3793114 - DNA, 25 bp, Homo sapien
actgcgtggtgcacaggagggccag

SEQ ID NO: 3793115 - DNA, 25 bp, Homo sapien
ctgttgtgggcgctcggcaccatgc

SEQ ID NO: 3793116 - DNA, 25 bp, Homo sapien
tccatgagcctgttgtgggcgctcg

SEQ ID NO: 3793117 - DNA, 25 bp, Homo sapien
ccttggactgcgtggtgcacaggag

SEQ ID NO: 3793118 - DNA, 25 bp, Homo sapien
tgaatctgcctctttggtgtcctgg

SEQ ID NO: 3793119 - DNA, 25 bp, Homo sapien
tgtcctggggagtgtcggcaggcac

SEQ ID NO: 3793120 - DNA, 25 bp, Homo sapien
ggtgtcctggggagtgtcggcaggc

SEQ ID NO: 3793121 - DNA, 25 bp, Homo sapien
cttcctgaatctgcctctttggtgt

SEQ ID NO: 3793122 - DNA, 25 bp, Homo sapien
ggccattctaaaggaccacaggagc

SEQ ID NO: 3793123 - DNA, 25 bp, Homo sapien
tggtaggcccagtcagtgctacaaa

SEQ ID NO: 3793124 - DNA, 25 bp, Homo sapien
gagccgggcctggctacaagtccca

SEQ ID NO: 3793125 - DNA, 25 bp, Homo sapien
ccgcccttggtaggcccagtcagtg

SEQ ID NO: 3793126 - DNA, 25 bp, Homo sapien
caggacaggtggctgttgcccttcc

SEQ ID NO: 3793127 - DNA, 25 bp, Homo sapien
gacaggtggctgttgcccttccacc

SEQ ID NO: 3793128 - DNA, 25 bp, Homo sapien
ctttctccctgtggcaggacaggtg

SEQ ID NO: 3793129 - DNA, 25 bp, Homo sapien
tcactgcagcttgcctttctccctg

SEQ ID NO: 3793130 - DNA, 25 bp, Homo sapien
ctgcgttaagcctcatgccctgggc

SEQ ID NO: 3793131 - DNA, 25 bp, Homo sapien
gtgggggactctgcgttaagcctca

SEQ ID NO: 3793132 - DNA, 25 bp, Homo sapien
tgccgcaggtcaataaagatggtgg

SEQ ID NO: 3793133 - DNA, 25 bp, Homo sapien
atctgccgcaggtcaataaagatgg

SEQ ID NO: 3793134 - DNA, 25 bp, Homo sapien
gggactgtaggccagcacttttcaa

SEQ ID NO: 3793135 - DNA, 25 bp, Homo sapien
gaggaggtgtgcctcatgcccctct

SEQ ID NO: 3793136 - DNA, 25 bp, Homo sapien
tctgtgcggtcaacaggcaactctg

SEQ ID NO: 3793137 - DNA, 25 bp, Homo sapien
cctagacgtgttgggctctattgca

SEQ ID NO: 3793138 - DNA, 25 bp, Homo sapien
aagcactcgggctttgctggtgacc

SEQ ID NO: 3793139 - DNA, 25 bp, Homo sapien
gaaatgggtttctggatgtgcccac

SEQ ID NO: 3793140 - DNA, 25 bp, Homo sapien
cacctggtgttccaactcttgttgg

SEQ ID NO: 3793141 - DNA, 25 bp, Homo sapien
agccacactggaggccggtggacgt

SEQ ID NO: 3793142 - DNA, 25 bp, Homo sapien
gaaggagatgccccctctgcgtctc

SEQ ID NO: 3793143 - DNA, 25 bp, Homo sapien
agggaggaaggagatgccccctctg

SEQ ID NO: 3793144 - DNA, 25 bp, Homo sapien
gggaggaaggagatgccccctctgc

SEQ ID NO: 3793145 - DNA, 25 bp, Homo sapien
gaggaaggagatgccccctctgcgt

SEQ ID NO: 3793146 - DNA, 25 bp, Homo sapien
tcaccacaggcggtaaatgtgccag

SEQ ID NO: 3793147 - DNA, 25 bp, Homo sapien
caagaatgcaattcaggcagcccat

SEQ ID NO: 3793148 - DNA, 25 bp, Homo sapien
gagaccaaattcactcaaccccgtg

SEQ ID NO: 3793149 - DNA, 25 bp, Homo sapien
tgggtgcagcaagacctcaccacag

SEQ ID NO: 3793150 - DNA, 25 bp, Homo sapien
tgctggagaagctggcttttcccgg

SEQ ID NO: 3793151 - DNA, 25 bp, Homo sapien
gagaagctggcttttcccggtacag

SEQ ID NO: 3793152 - DNA, 25 bp, Homo sapien
gctgtccccttctgaaaggccctga

SEQ ID NO: 3793153 - DNA, 25 bp, Homo sapien
tggagaagctggcttttcccggtac

SEQ ID NO: 3793154 - DNA, 25 bp, Homo sapien
ctcccagttcgtgatccagctgtgt

SEQ ID NO: 3793155 - DNA, 25 bp, Homo sapien
gagcttcatgtgttgcttcctccca

SEQ ID NO: 3793156 - DNA, 25 bp, Homo sapien
agagcttcatgtgttgcttcctccc

SEQ ID NO: 3793157 - DNA, 25 bp, Homo sapien
tagtggaaatgcaggaacaacaagg

SEQ ID NO: 3793158 - DNA, 25 bp, Homo sapien
tgactgagctctaacagggtgggca

SEQ ID NO: 3793159 - DNA, 25 bp, Homo sapien
gaatgcccctgctagtggaaatgca

SEQ ID NO: 3793160 - DNA, 25 bp, Homo sapien
gtccatggcaagtcagcccgcccct

SEQ ID NO: 3793161 - DNA, 25 bp, Homo sapien
ggaaataatagatgcctgtttaaaa

SEQ ID NO: 3793162 - DNA, 25 bp, Homo sapien
gaaataatagatgcctgtttaaaaa

SEQ ID NO: 3793163 - DNA, 25 bp, Homo sapien
aatttaggtgcccaaaatagcaagt

SEQ ID NO: 3793164 - DNA, 25 bp, Homo sapien
aaatagcaagtatgcaggaagccag

SEQ ID NO: 3793165 - DNA, 25 bp, Homo sapien
tgggtaggcatgtgtgtgtcgtgtg

SEQ ID NO: 3793166 - DNA, 25 bp, Homo sapien
tgtgtcgtgtgttaatttaggtgcc

SEQ ID NO: 3793167 - DNA, 25 bp, Homo sapien
ttgctggtgatcaacaagtgaggcc

SEQ ID NO: 3793168 - DNA, 25 bp, Homo sapien
ggccgctgctccattctacacagga

SEQ ID NO: 3793169 - DNA, 25 bp, Homo sapien
aaaggccttgagaatctatgtgtgc

SEQ ID NO: 3793170 - DNA, 25 bp, Homo sapien
gaaagcaaattctcgttactcctct

SEQ ID NO: 3793171 - DNA, 25 bp, Homo sapien
ttacaaaagcatcccgtgaagacgg

SEQ ID NO: 3793172 - DNA, 25 bp, Homo sapien
ggggagacaaacaggtgcccaggtc

SEQ ID NO: 3793173 - DNA, 25 bp, Homo sapien
cagcagttacaaaagcatcccgtga

SEQ ID NO: 3793174 - DNA, 25 bp, Homo sapien
gcagttacaaaagcatcccgtgaag

SEQ ID NO: 3793175 - DNA, 25 bp, Homo sapien
caaggtggtgatgatttctctgctc

SEQ ID NO: 3793176 - DNA, 25 bp, Homo sapien
aaggtggtgatgatttctctgctct

SEQ ID NO: 3793177 - DNA, 25 bp, Homo sapien
catctgtagccctgatcttggcggc

SEQ ID NO: 3793178 - DNA, 25 bp, Homo sapien
cggccagtgaccacggccaagcagg

SEQ ID NO: 3793179 - DNA, 25 bp, Homo sapien
cttgatgagaagagacccctgccca

SEQ ID NO: 3793180 - DNA, 25 bp, Homo sapien
cctggtacaaggcttgatgagaaga

SEQ ID NO: 3793181 - DNA, 25 bp, Homo sapien
tttgacttgcaatgaaaatgcccct

SEQ ID NO: 3793182 - DNA, 25 bp, Homo sapien
tggccttgtgccctacaggagggac

SEQ ID NO: 3793183 - DNA, 25 bp, Homo sapien
aatgcccctcatcattgggagtggg

SEQ ID NO: 3793184 - DNA, 25 bp, Homo sapien
ttgtgccctacaggagggacctcct

SEQ ID NO: 3793185 - DNA, 25 bp, Homo sapien
gggcagagcccggttctggcggcac

SEQ ID NO: 3793186 - DNA, 25 bp, Homo sapien
tgcgagggcagcgtatgggggcaga

SEQ ID NO: 3793187 - DNA, 25 bp, Homo sapien
agagcccggttctggcggcacaggc

SEQ ID NO: 3793188 - DNA, 25 bp, Homo sapien
tatgggggcagagcccggttctggc

SEQ ID NO: 3793189 - DNA, 25 bp, Homo sapien
tgaggttactggcattaaaaaggtg

SEQ ID NO: 3793190 - DNA, 25 bp, Homo sapien
ctggccccttagtgtctggaatgtg

SEQ ID NO: 3793191 - DNA, 25 bp, Homo sapien
cacatccacggtgggtgagtggcca

SEQ ID NO: 3793192 - DNA, 25 bp, Homo sapien
ccttggtgggtttagtcatctcgga

SEQ ID NO: 3793193 - DNA, 25 bp, Homo sapien
tcttttttggtagggccaccactca

SEQ ID NO: 3793194 - DNA, 25 bp, Homo sapien
aatggagtggtaccgagtgctctcg

SEQ ID NO: 3793195 - DNA, 25 bp, Homo sapien
ggcttcagcaagacgtcccacttga

SEQ ID NO: 3793196 - DNA, 25 bp, Homo sapien
tgtgagttcctagagatcgtgcttt

SEQ ID NO: 3793197 - DNA, 25 bp, Homo sapien
tacacctgccccgaatgtggcaaag

SEQ ID NO: 3793198 - DNA, 25 bp, Homo sapien
gatctctgagcgcacattacctgtg

SEQ ID NO: 3793199 - DNA, 25 bp, Homo sapien
gttcattccctgtgcaaaaggcaga

SEQ ID NO: 3793200 - DNA, 25 bp, Homo sapien
caagtggttacgtggaatcctcaga

SEQ ID NO: 3793201 - DNA, 25 bp, Homo sapien
cctgcaccgtgattgaggaaccctg

SEQ ID NO: 3793202 - DNA, 25 bp, Homo sapien
tggttgagggcgtcagcttggaggt

SEQ ID NO: 3793203 - DNA, 25 bp, Homo sapien
gggattattgtattattaggctggg

SEQ ID NO: 3793204 - DNA, 25 bp, Homo sapien
tcctgctgcagagaagcctccaggt

SEQ ID NO: 3793205 - DNA, 25 bp, Homo sapien
ttagaagggtaacagctcctgctcc

SEQ ID NO: 3793206 - DNA, 25 bp, Homo sapien
tcttcatgtttttgacgctgcaact

SEQ ID NO: 3793207 - DNA, 25 bp, Homo sapien
tttgctaaagcaatctcttcatgtt

SEQ ID NO: 3793208 - DNA, 25 bp, Homo sapien
ggatatcccgctagccagctgtggg

SEQ ID NO: 3793209 - DNA, 25 bp, Homo sapien
acatggcgccaatcgtggacacgga

SEQ ID NO: 3793210 - DNA, 25 bp, Homo sapien
taaacaagttaacatctttgggctc

SEQ ID NO: 3793211 - DNA, 25 bp, Homo sapien
cagggcttgattattaaacaagtta

SEQ ID NO: 3793212 - DNA, 25 bp, Homo sapien
cacagggcttgattattaaacaagt

SEQ ID NO: 3793213 - DNA, 25 bp, Homo sapien
ttcacagggcttgattattaaacaa

SEQ ID NO: 3793214 - DNA, 25 bp, Homo sapien
cagtgagctgtcattgtgcctctgc

SEQ ID NO: 3793215 - DNA, 25 bp, Homo sapien
ccaacttgggtgacaaagtgagacc

SEQ ID NO: 3793216 - DNA, 25 bp, Homo sapien
ctgtcattgtgcctctgcactccaa

SEQ ID NO: 3793217 - DNA, 25 bp, Homo sapien
ctccaacttgggtgacaaagtgaga

SEQ ID NO: 3793218 - DNA, 25 bp, Homo sapien
gagttgtccttggaatcctcaacga

SEQ ID NO: 3793219 - DNA, 25 bp, Homo sapien
taggacaggtgtgcctgcatcatag

SEQ ID NO: 3793220 - DNA, 25 bp, Homo sapien
gattggttccagcacctccgtgggt

SEQ ID NO: 3793221 - DNA, 25 bp, Homo sapien
ccacgacccttgagcagctaggaca

SEQ ID NO: 3793222 - DNA, 25 bp, Homo sapien
tcttcactcctgagacttcttacct

SEQ ID NO: 3793223 - DNA, 25 bp, Homo sapien
cccagggaggaagacgccggcctgt

SEQ ID NO: 3793224 - DNA, 25 bp, Homo sapien
cagctgggaacacctgtgtgcttgg

SEQ ID NO: 3793225 - DNA, 25 bp, Homo sapien
gccactgctgacttcgtgaatgaaa

SEQ ID NO: 3793226 - DNA, 25 bp, Homo sapien
agaagcctccaattcccccaaccag

SEQ ID NO: 3793227 - DNA, 25 bp, Homo sapien
ctccaattcccccaaccaggcaggt

SEQ ID NO: 3793228 - DNA, 25 bp, Homo sapien
ctcctagaagcctccaattccccca

SEQ ID NO: 3793229 - DNA, 25 bp, Homo sapien
attcccccaaccaggcaggtcctgg

SEQ ID NO: 3793230 - DNA, 25 bp, Homo sapien
tccagctcctctgtggacacagcca

SEQ ID NO: 3793231 - DNA, 25 bp, Homo sapien
ccagctcctctgtggacacagccat

SEQ ID NO: 3793232 - DNA, 25 bp, Homo sapien
ctccagctcctctgtggacacagcc

SEQ ID NO: 3793233 - DNA, 25 bp, Homo sapien
gaaaacaatgaaggcaacagtgtcc

SEQ ID NO: 3793234 - DNA, 25 bp, Homo sapien
gaaggcaacagtgtcccatgtggac

SEQ ID NO: 3793235 - DNA, 25 bp, Homo sapien
caatgaaggcaacagtgtcccatgt

SEQ ID NO: 3793236 - DNA, 25 bp, Homo sapien
ggaaaaactggtggctcttcagtct

SEQ ID NO: 3793237 - DNA, 25 bp, Homo sapien
gcagcagtgggcgacgaccagcagc

SEQ ID NO: 3793238 - DNA, 25 bp, Homo sapien
cagcagcagtgggcgacgaccagca

SEQ ID NO: 3793239 - DNA, 25 bp, Homo sapien
agcagcagtgggcgacgaccagcag

SEQ ID NO: 3793240 - DNA, 25 bp, Homo sapien
cagggccaagttatccactcccttg

SEQ ID NO: 3793241 - DNA, 25 bp, Homo sapien
caagttatccactcccttgggtctt

SEQ ID NO: 3793242 - DNA, 25 bp, Homo sapien
ttgttactgccaccgggcaggagac

SEQ ID NO: 3793243 - DNA, 25 bp, Homo sapien
agacagaaggctttgttactgccac

SEQ ID NO: 3793244 - DNA, 25 bp, Homo sapien
ccagctaggtgactgaggatgacct

SEQ ID NO: 3793245 - DNA, 25 bp, Homo sapien
tggcacagtcgtgctgactgaaggc

SEQ ID NO: 3793246 - DNA, 25 bp, Homo sapien
gacctggcacagtcgtgctgactga

SEQ ID NO: 3793247 - DNA, 25 bp, Homo sapien
gatgacctggcacagtcgtgctgac

SEQ ID NO: 3793248 - DNA, 25 bp, Homo sapien
ccctgcaaggcctgacgggtctggt

SEQ ID NO: 3793249 - DNA, 25 bp, Homo sapien
tgccgtccgacctgctggtcaacgt

SEQ ID NO: 3793250 - DNA, 25 bp, Homo sapien
ccctgcagactccatgagtgactgc

SEQ ID NO: 3793251 - DNA, 25 bp, Homo sapien
tggcttccgtcctgtgcccctaaaa

SEQ ID NO: 3793252 - DNA, 25 bp, Homo sapien
caaagcctgttctagtcctggcgga

SEQ ID NO: 3793253 - DNA, 25 bp, Homo sapien
gatgcctgtcgggtttttagcacag

SEQ ID NO: 3793254 - DNA, 25 bp, Homo sapien
ttggcccctttcagagattagaaac

SEQ ID NO: 3793255 - DNA, 25 bp, Homo sapien
actgggttagaggattgcagaagac

SEQ ID NO: 3793256 - DNA, 25 bp, Homo sapien
aactgactggccctccgaggtgggt

SEQ ID NO: 3793257 - DNA, 25 bp, Homo sapien
tcatggtcttcggtgcttcccgggc

SEQ ID NO: 3793258 - DNA, 25 bp, Homo sapien
ggtctgggacatcctagaggcccta

SEQ ID NO: 3793259 - DNA, 25 bp, Homo sapien
taggctcagctcttgatacggaaac

SEQ ID NO: 3793260 - DNA, 25 bp, Homo sapien
cttgtagcaaatacgtaagaagggt

SEQ ID NO: 3793261 - DNA, 25 bp, Homo sapien
taccaactagaagtacttgtagcaa

SEQ ID NO: 3793262 - DNA, 25 bp, Homo sapien
tagatctaagaataggctcacacct

SEQ ID NO: 3793263 - DNA, 25 bp, Homo sapien
gaggtggcacctgcctactatagtc

SEQ ID NO: 3793264 - DNA, 25 bp, Homo sapien
aggttgcgatgcagccgacctgtgc

SEQ ID NO: 3793265 - DNA, 25 bp, Homo sapien
tttacaaccgatggcttggcagtga

SEQ ID NO: 3793266 - DNA, 25 bp, Homo sapien
ttgtctaaaccggactgctggcgtt

SEQ ID NO: 3793267 - DNA, 25 bp, Homo sapien
ttggcagtgaccagtgcacgcttgg

SEQ ID NO: 3793268 - DNA, 25 bp, Homo sapien
acctgcgagatctggccggtgccat

SEQ ID NO: 3793269 - DNA, 25 bp, Homo sapien
ggccacgtcgggcaccggctttgat

SEQ ID NO: 3793270 - DNA, 25 bp, Homo sapien
gctgcctttttatgcgctccaggtc

SEQ ID NO: 3793271 - DNA, 25 bp, Homo sapien
acttggtgtggtgagtccgagcggc

SEQ ID NO: 3793272 - DNA, 25 bp, Homo sapien
ttgctgttcccggcggcccgtgcgt

SEQ ID NO: 3793273 - DNA, 25 bp, Homo sapien
gtggttgggtggtaagatggcggct

SEQ ID NO: 3793274 - DNA, 25 bp, Homo sapien
ggcgccggggcgacttgctgttccc

SEQ ID NO: 3793275 - DNA, 25 bp, Homo sapien
gcggcccgtgcgtcggcggtggttg

SEQ ID NO: 3793276 - DNA, 25 bp, Homo sapien
cgaagaaatgccaactcgacgtccg

SEQ ID NO: 3793277 - DNA, 25 bp, Homo sapien
gggcgcttcgttgtcacgagccgaa

SEQ ID NO: 3793278 - DNA, 25 bp, Homo sapien
aggagcgctccaaagaacacgggcg

SEQ ID NO: 3793279 - DNA, 25 bp, Homo sapien
acgtgcccctcggtcgaccaatgat

SEQ ID NO: 3793280 - DNA, 25 bp, Homo sapien
caaaagtgcaaaactagggcaaggc

SEQ ID NO: 3793281 - DNA, 25 bp, Homo sapien
tctgctgaagtttgggccgacgctg

SEQ ID NO: 3793282 - DNA, 25 bp, Homo sapien
gcaaggctaacgagagagcccggac

SEQ ID NO: 3793283 - DNA, 25 bp, Homo sapien
taaagtgtccaaactacgcccggca

SEQ ID NO: 3793284 - DNA, 25 bp, Homo sapien
agtagagtactgggtttgaccgtgt

SEQ ID NO: 3793285 - DNA, 25 bp, Homo sapien
ccaggatagtaaagaaccagtgact

SEQ ID NO: 3793286 - DNA, 25 bp, Homo sapien
cagcagtttcctatcattgggagcc

SEQ ID NO: 3793287 - DNA, 25 bp, Homo sapien
gaccttaaagaacccatgctgacag

SEQ ID NO: 3793288 - DNA, 25 bp, Homo sapien
gaagggccaggtcaaacgaagatga

SEQ ID NO: 3793289 - DNA, 25 bp, Homo sapien
aagtcttagcgggtgtcactgcatg

SEQ ID NO: 3793290 - DNA, 25 bp, Homo sapien
ggctaccaacaagtcttagcgggtg

SEQ ID NO: 3793291 - DNA, 25 bp, Homo sapien
caacaagtcttagcgggtgtcactg

SEQ ID NO: 3793292 - DNA, 25 bp, Homo sapien
gtcttagcgggtgtcactgcatggc

SEQ ID NO: 3793293 - DNA, 25 bp, Homo sapien
caaaaacgcaggattcagggaacct

SEQ ID NO: 3793294 - DNA, 25 bp, Homo sapien
aaaacgcaggattcagggaacctgg

SEQ ID NO: 3793295 - DNA, 25 bp, Homo sapien
tcaaaaacgcaggattcagggaacc

SEQ ID NO: 3793296 - DNA, 25 bp, Homo sapien
ttcaaaaacgcaggattcagggaac

SEQ ID NO: 3793297 - DNA, 25 bp, Homo sapien
agtgtaatccgaacagctgctgcag

SEQ ID NO: 3793298 - DNA, 25 bp, Homo sapien
ctggttcaaagagggtgagtgtaat

SEQ ID NO: 3793299 - DNA, 25 bp, Homo sapien
tagaagaactctgggcagcgtttgt

SEQ ID NO: 3793300 - DNA, 25 bp, Homo sapien
cttccctcggatattcttcaccagc

SEQ ID NO: 3793301 - DNA, 25 bp, Homo sapien
ttatctccaggctgaaggcctttta

SEQ ID NO: 3793302 - DNA, 25 bp, Homo sapien
tatctccaggctgaaggccttttac

SEQ ID NO: 3793303 - DNA, 25 bp, Homo sapien
cttatctccaggctgaaggcctttt

SEQ ID NO: 3793304 - DNA, 25 bp, Homo sapien
gcagagtagacccacgacgatttag

SEQ ID NO: 3793305 - DNA, 25 bp, Homo sapien
gcaacaggctgacccttggtacaga

SEQ ID NO: 3793306 - DNA, 25 bp, Homo sapien
gacgatttaggagttctgaacccga

SEQ ID NO: 3793307 - DNA, 25 bp, Homo sapien
gacctgctgatttggtttgaaccca

SEQ ID NO: 3793308 - DNA, 25 bp, Homo sapien
gcaagggcctctactttatgccttt

SEQ ID NO: 3793309 - DNA, 25 bp, Homo sapien
caagggcctctactttatgcctttc

SEQ ID NO: 3793310 - DNA, 25 bp, Homo sapien
ggcaagggcctctactttatgcctt

SEQ ID NO: 3793311 - DNA, 25 bp, Homo sapien
agggcctctactttatgcctttcct

SEQ ID NO: 3793312 - DNA, 25 bp, Homo sapien
cctcagagttatcgatgaaggagtc

SEQ ID NO: 3793313 - DNA, 25 bp, Homo sapien
caagtcctgtattcggtcttttcta

SEQ ID NO: 3793314 - DNA, 25 bp, Homo sapien
gaaggagtcggattcatcataacca

SEQ ID NO: 3793315 - DNA, 25 bp, Homo sapien
taaccataccccatatcgatcaagt

SEQ ID NO: 3793316 - DNA, 25 bp, Homo sapien
tgtaaaatcctccatacttcgtagt

SEQ ID NO: 3793317 - DNA, 25 bp, Homo sapien
tgcagggttcccgagttaatgtaaa

SEQ ID NO: 3793318 - DNA, 25 bp, Homo sapien
tctgatgcttgtctaaactgcaggg

SEQ ID NO: 3793319 - DNA, 25 bp, Homo sapien
tcaaagaagcaggaacaagctcatc

SEQ ID NO: 3793320 - DNA, 25 bp, Homo sapien
tcaccaccttccttcaacttccgct

SEQ ID NO: 3793321 - DNA, 25 bp, Homo sapien
tctccttgtcataagtgtcatcttt

SEQ ID NO: 3793322 - DNA, 25 bp, Homo sapien
cttgtcataagtgtcatcttttttc

SEQ ID NO: 3793323 - DNA, 25 bp, Homo sapien
tcttctccttgtcataagtgtcatc

SEQ ID NO: 3793324 - DNA, 25 bp, Homo sapien
caagtcgttgtcagaagtagagcca

SEQ ID NO: 3793325 - DNA, 25 bp, Homo sapien
aaatccgtcagcgagtccatggcag

SEQ ID NO: 3793326 - DNA, 25 bp, Homo sapien
tcatccatatctcggaagggacttc

SEQ ID NO: 3793327 - DNA, 25 bp, Homo sapien
tgatgggaccgcaacaggcttatgc

SEQ ID NO: 3793328 - DNA, 25 bp, Homo sapien
gtttctctgggcaagcttcacgcag

SEQ ID NO: 3793329 - DNA, 25 bp, Homo sapien
gcaatctgcccaaactgcttccagg

SEQ ID NO: 3793330 - DNA, 25 bp, Homo sapien
caacagcaatctgcccaaactgctt

SEQ ID NO: 3793331 - DNA, 25 bp, Homo sapien
aagcttcacgcagtgcagaaccaac

SEQ ID NO: 3793332 - DNA, 25 bp, Homo sapien
agctgacaccttaactgccaactca

SEQ ID NO: 3793333 - DNA, 25 bp, Homo sapien
tggaaaaagctgacaccttaactgc

SEQ ID NO: 3793334 - DNA, 25 bp, Homo sapien
aaaagctgacaccttaactgccaac

SEQ ID NO: 3793335 - DNA, 25 bp, Homo sapien
gaaaaagctgacaccttaactgcca

SEQ ID NO: 3793336 - DNA, 25 bp, Homo sapien
tacaaccaatgatccatgcctagtt

SEQ ID NO: 3793337 - DNA, 25 bp, Homo sapien
cactagagctgcatcacaagtcctg

SEQ ID NO: 3793338 - DNA, 25 bp, Homo sapien
gcaagagctgctagatcctaaaggt

SEQ ID NO: 3793339 - DNA, 25 bp, Homo sapien
cctacagctgtagattatgactgcc

SEQ ID NO: 3793340 - DNA, 25 bp, Homo sapien
gcaggctcaaaaacaccaagttcag

SEQ ID NO: 3793341 - DNA, 25 bp, Homo sapien
gagatactccaaaccccaacatggt

SEQ ID NO: 3793342 - DNA, 25 bp, Homo sapien
tgagagcaaatataggacagcaggc

SEQ ID NO: 3793343 - DNA, 25 bp, Homo sapien
tagaacacaacctatggcacgagtg

SEQ ID NO: 3793344 - DNA, 25 bp, Homo sapien
atctgggttatttgtccagcccaag

SEQ ID NO: 3793345 - DNA, 25 bp, Homo sapien
ggctgagtagctgtcaaactacctc

SEQ ID NO: 3793346 - DNA, 25 bp, Homo sapien
tcaaacctgagctttgtcagcacct

SEQ ID NO: 3793347 - DNA, 25 bp, Homo sapien
caataacccaaaggagcatcaaacc

SEQ ID NO: 3793348 - DNA, 25 bp, Homo sapien
tctccctgcacttcttgtgatgagg

SEQ ID NO: 3793349 - DNA, 25 bp, Homo sapien
ctctccctgcacttcttgtgatgag

SEQ ID NO: 3793350 - DNA, 25 bp, Homo sapien
ctccctgcacttcttgtgatgaggg

SEQ ID NO: 3793351 - DNA, 25 bp, Homo sapien
tccctgcacttcttgtgatgagggg

SEQ ID NO: 3793352 - DNA, 25 bp, Homo sapien
tgcatagacaatatctctgagggtc

SEQ ID NO: 3793353 - DNA, 25 bp, Homo sapien
tgtaaaccttttgaattgcatagac

SEQ ID NO: 3793354 - DNA, 25 bp, Homo sapien
agctttctatgtaatctttacgcaa

SEQ ID NO: 3793355 - DNA, 25 bp, Homo sapien
tttctgtttagatagccacttgtac

SEQ ID NO: 3793356 - DNA, 25 bp, Homo sapien
ggccccttccaaccactctaactgc

SEQ ID NO: 3793357 - DNA, 25 bp, Homo sapien
ctctggggccccttccaaccactct

SEQ ID NO: 3793358 - DNA, 25 bp, Homo sapien
tctggggccccttccaaccactcta

SEQ ID NO: 3793359 - DNA, 25 bp, Homo sapien
tgcatattggaattccctgggcagc

SEQ ID NO: 3793360 - DNA, 25 bp, Homo sapien
ggagtcatcgctccataaagagcac

SEQ ID NO: 3793361 - DNA, 25 bp, Homo sapien
taccacgagctctctattagccaga

SEQ ID NO: 3793362 - DNA, 25 bp, Homo sapien
gccatcacaatgcacttagccagag

SEQ ID NO: 3793363 - DNA, 25 bp, Homo sapien
taataggattccattaatatcctgg

SEQ ID NO: 3793364 - DNA, 25 bp, Homo sapien
tctaataggattccattaatatcct

SEQ ID NO: 3793365 - DNA, 25 bp, Homo sapien
ctaataggattccattaatatcctg

SEQ ID NO: 3793366 - DNA, 25 bp, Homo sapien
agggacgccaagcaacacccaaggc

SEQ ID NO: 3793367 - DNA, 25 bp, Homo sapien
aacagccagggacgccaagcaacac

SEQ ID NO: 3793368 - DNA, 25 bp, Homo sapien
agcggaacagccagggacgccaagc

SEQ ID NO: 3793369 - DNA, 25 bp, Homo sapien
aggagtgccagcgagcggaacagcc

SEQ ID NO: 3793370 - DNA, 25 bp, Homo sapien
acaaaacacagtcaccaccggctgc

SEQ ID NO: 3793371 - DNA, 25 bp, Homo sapien
caaaacacagtcaccaccggctgca

SEQ ID NO: 3793372 - DNA, 25 bp, Homo sapien
tttccgagcacgcttgagcagggca

SEQ ID NO: 3793373 - DNA, 25 bp, Homo sapien
ctgcagggcaggaatgacgcaagat

SEQ ID NO: 3793374 - DNA, 25 bp, Homo sapien
ccagagcggacctgactgctcagct

SEQ ID NO: 3793375 - DNA, 25 bp, Homo sapien
agataggcatacaccccagagcgga

SEQ ID NO: 3793376 - DNA, 25 bp, Homo sapien
gtgtgtgcctggcattcgtcctggt

SEQ ID NO: 3793377 - DNA, 25 bp, Homo sapien
tgtgtgcctggcattcgtcctggta

SEQ ID NO: 3793378 - DNA, 25 bp, Homo sapien
tgcgtgtgtgcctggcattcgtcct

SEQ ID NO: 3793379 - DNA, 25 bp, Homo sapien
gtgcctggcattcgtcctggtactt

SEQ ID NO: 3793380 - DNA, 25 bp, Homo sapien
acttcttccgaggtcccattatcct

SEQ ID NO: 3793381 - DNA, 25 bp, Homo sapien
ttccattggaacttcttccgaggtc

SEQ ID NO: 3793382 - DNA, 25 bp, Homo sapien
ttcctcatccgaacaaatccggtcc

SEQ ID NO: 3793383 - DNA, 25 bp, Homo sapien
cattggaacttcttccgaggtccca

SEQ ID NO: 3793384 - DNA, 25 bp, Homo sapien
aggtcctggctctccagtttgatct

SEQ ID NO: 3793385 - DNA, 25 bp, Homo sapien
tgacttccgcatccagaaagccctt

SEQ ID NO: 3793386 - DNA, 25 bp, Homo sapien
gcctgcatccagcctttgggccaga

SEQ ID NO: 3793387 - DNA, 25 bp, Homo sapien
cctttgggccagaggggcttgactt

SEQ ID NO: 3793388 - DNA, 25 bp, Homo sapien
aggattgaagtcaggtgcccatggc

SEQ ID NO: 3793389 - DNA, 25 bp, Homo sapien
ggattgaagtcaggtgcccatggcc

SEQ ID NO: 3793390 - DNA, 25 bp, Homo sapien
cttgattttagaaggggccataact

SEQ ID NO: 3793391 - DNA, 25 bp, Homo sapien
ttcaccttgattttagaaggggcca

SEQ ID NO: 3793392 - DNA, 25 bp, Homo sapien
agaaggggccataactttcttcttg

SEQ ID NO: 3793393 - DNA, 25 bp, Homo sapien
caccttgattttagaaggggccata

SEQ ID NO: 3793394 - DNA, 25 bp, Homo sapien
agtgccggcatgaaagactttgacc

SEQ ID NO: 3793395 - DNA, 25 bp, Homo sapien
ctaactgcaggagggaacgatgaca

SEQ ID NO: 3793396 - DNA, 25 bp, Homo sapien
gactgatgtacttctggcaggccct

SEQ ID NO: 3793397 - DNA, 25 bp, Homo sapien
gtttttctgctgctgagtgccggca

SEQ ID NO: 3793398 - DNA, 25 bp, Homo sapien
ggaatctccgtttggaccgcctgga

SEQ ID NO: 3793399 - DNA, 25 bp, Homo sapien
gacaaggaggtagacgatgtcacac

SEQ ID NO: 3793400 - DNA, 25 bp, Homo sapien
tttagggacggcgaggtcagcaact

SEQ ID NO: 3793401 - DNA, 25 bp, Homo sapien
tcacactactaactgcagagggctt

SEQ ID NO: 3793402 - DNA, 25 bp, Homo sapien
ggcttcctgtcaccagaaaagtgaa

SEQ ID NO: 3793403 - DNA, 25 bp, Homo sapien
cagggcaggctgctatgacagatac

SEQ ID NO: 3793404 - DNA, 25 bp, Homo sapien
cagaagaagctttaggccatcctgg

SEQ ID NO: 3793405 - DNA, 25 bp, Homo sapien
cctccgaagaggcatggtgcttggt

SEQ ID NO: 3793406 - DNA, 25 bp, Homo sapien
gaatcactcttagaaggtcctgcta

SEQ ID NO: 3793407 - DNA, 25 bp, Homo sapien
gaacacctccacatgactcaactga

SEQ ID NO: 3793408 - DNA, 25 bp, Homo sapien
ggtcctgctattcctggtccatgaa

SEQ ID NO: 3793409 - DNA, 25 bp, Homo sapien
cctgctgtgattacacacaagcgag

SEQ ID NO: 3793410 - DNA, 25 bp, Homo sapien
tgtgacgatggcatccttggagacc

SEQ ID NO: 3793411 - DNA, 25 bp, Homo sapien
gatttgtagggtgaagccatcaaag

SEQ ID NO: 3793412 - DNA, 25 bp, Homo sapien
tataattcccaaggagttcgagctc

SEQ ID NO: 3793413 - DNA, 25 bp, Homo sapien
ctttggcagaggagtcagcgctgaa

SEQ ID NO: 3793414 - DNA, 25 bp, Homo sapien
gagaaaagaacaaaacacacacatt

SEQ ID NO: 3793415 - DNA, 25 bp, Homo sapien
ggagaaaagaacaaaacacacacat

SEQ ID NO: 3793416 - DNA, 25 bp, Homo sapien
gggagaaaagaacaaaacacacaca

SEQ ID NO: 3793417 - DNA, 25 bp, Homo sapien
ctggagtgcaagccagccagaagac

SEQ ID NO: 3793418 - DNA, 25 bp, Homo sapien
ctggcagactctgcgggatatgggt

SEQ ID NO: 3793419 - DNA, 25 bp, Homo sapien
tgcgggatatgggtgggcaccgcag

SEQ ID NO: 3793420 - DNA, 25 bp, Homo sapien
gactctgcgggatatgggtgggcac

SEQ ID NO: 3793421 - DNA, 25 bp, Homo sapien
gcagactctgcgggatatgggtggg

SEQ ID NO: 3793422 - DNA, 25 bp, Homo sapien
gagggttaggaactcctccaccgca

SEQ ID NO: 3793423 - DNA, 25 bp, Homo sapien
aagtgcgtgtcaccctgagtactga

SEQ ID NO: 3793424 - DNA, 25 bp, Homo sapien
gaaaccccaagagtagaagtgcgtg

SEQ ID NO: 3793425 - DNA, 25 bp, Homo sapien
cagcgtcaaggcaaagacaccaaga

SEQ ID NO: 3793426 - DNA, 25 bp, Homo sapien
gggttacctcggctggcttccatac

SEQ ID NO: 3793427 - DNA, 25 bp, Homo sapien
cacctggcaccagttcgccagggtt

SEQ ID NO: 3793428 - DNA, 25 bp, Homo sapien
ttatccaagtagcaccctggtcatg

SEQ ID NO: 3793429 - DNA, 25 bp, Homo sapien
ggctggcttccatacgagcggctct

SEQ ID NO: 3793430 - DNA, 25 bp, Homo sapien
catctaaggaagtgagagaagctca

SEQ ID NO: 3793431 - DNA, 25 bp, Homo sapien
gcagcctgactttggaaagacccct

SEQ ID NO: 3793432 - DNA, 25 bp, Homo sapien
cattcctgagagtaagcaaaggcag

SEQ ID NO: 3793433 - DNA, 25 bp, Homo sapien
tctagtctgtagagaagtcactgca

SEQ ID NO: 3793434 - DNA, 25 bp, Homo sapien
tacaattgccatcctgaggcgaggc

SEQ ID NO: 3793435 - DNA, 25 bp, Homo sapien
tacgtcatctcaggctacaattgcc

SEQ ID NO: 3793436 - DNA, 25 bp, Homo sapien
gtgcaacttgggctacgtcatctca

SEQ ID NO: 3793437 - DNA, 25 bp, Homo sapien
gaggcctgacgatcacacagaactc

SEQ ID NO: 3793438 - DNA, 25 bp, Homo sapien
ttccgtggtacagcaggccctttcc

SEQ ID NO: 3793439 - DNA, 25 bp, Homo sapien
caagtggcaagccttgcctctgaag

SEQ ID NO: 3793440 - DNA, 25 bp, Homo sapien
ccaagtggcaagccttgcctctgaa

SEQ ID NO: 3793441 - DNA, 25 bp, Homo sapien
gtggcaagccttgcctctgaagcgg

SEQ ID NO: 3793442 - DNA, 25 bp, Homo sapien
aagtggcaagccttgcctctgaagc

SEQ ID NO: 3793443 - DNA, 25 bp, Homo sapien
agaaagggcgcagtgagtgtacatc

SEQ ID NO: 3793444 - DNA, 25 bp, Homo sapien
agtgagtgtacatcctgggagacct

SEQ ID NO: 3793445 - DNA, 25 bp, Homo sapien
cagcagaaagggcgcagtgagtgta

SEQ ID NO: 3793446 - DNA, 25 bp, Homo sapien
gcagaaagggcgcagtgagtgtaca

SEQ ID NO: 3793447 - DNA, 25 bp, Homo sapien
taacaaccgtctagcgacagagctg

SEQ ID NO: 3793448 - DNA, 25 bp, Homo sapien
cacatcagaagtgccgagaagcgct

SEQ ID NO: 3793449 - DNA, 25 bp, Homo sapien
tcatgttccgaggagaaactggccc

SEQ ID NO: 3793450 - DNA, 25 bp, Homo sapien
ggatcaggcagattcacccacaggt

SEQ ID NO: 3793451 - DNA, 25 bp, Homo sapien
taacaccaacatagtcgctgcacaa

SEQ ID NO: 3793452 - DNA, 25 bp, Homo sapien
agagactttcgctgcgccagggaaa

SEQ ID NO: 3793453 - DNA, 25 bp, Homo sapien
tcacgcccggtaagtgctcagagac

SEQ ID NO: 3793454 - DNA, 25 bp, Homo sapien
tctcacacctaagaaacggtcacgc

SEQ ID NO: 3793455 - DNA, 25 bp, Homo sapien
tggacgttaattgtcagccaccaga

SEQ ID NO: 3793456 - DNA, 25 bp, Homo sapien
tattcaccacgccaatatctgggtc

SEQ ID NO: 3793457 - DNA, 25 bp, Homo sapien
tagtttcagtgctttacaagtctcg

SEQ ID NO: 3793458 - DNA, 25 bp, Homo sapien
ggtgaacagaaaccacaagtgtcca

SEQ ID NO: 3793459 - DNA, 25 bp, Homo sapien
cccaggcggatgaggtcttgcagct

SEQ ID NO: 3793460 - DNA, 25 bp, Homo sapien
ggccatggccgagggcaagatcacc

SEQ ID NO: 3793461 - DNA, 25 bp, Homo sapien
tacgtggtcaaggaggtcctgcgca

SEQ ID NO: 3793462 - DNA, 25 bp, Homo sapien
gtcctgcgcatcgagcctgacaggg

SEQ ID NO: 3793463 - DNA, 25 bp, Homo sapien
tacagaacctgctagatgagatagc

SEQ ID NO: 3793464 - DNA, 25 bp, Homo sapien
agtacgctggaaaggactggtgtcc

SEQ ID NO: 3793465 - DNA, 25 bp, Homo sapien
taccagcaagctgtaaaggtgagcc

SEQ ID NO: 3793466 - DNA, 25 bp, Homo sapien
tacaatagcaaaactagtacgctgg

SEQ ID NO: 3793467 - DNA, 25 bp, Homo sapien
cttgctgtccgcatctaaggagctg

SEQ ID NO: 3793468 - DNA, 25 bp, Homo sapien
tgagacttcctacgaaagaggaggg

SEQ ID NO: 3793469 - DNA, 25 bp, Homo sapien
cctactgtgtatgctccctcagaag

SEQ ID NO: 3793470 - DNA, 25 bp, Homo sapien
gacaattttaggtagtgagacttcc

SEQ ID NO: 3793471 - DNA, 25 bp, Homo sapien
aacagctgctaatggtagcatttca

SEQ ID NO: 3793472 - DNA, 25 bp, Homo sapien
cacagtgtttgatgctagctgggca

SEQ ID NO: 3793473 - DNA, 25 bp, Homo sapien
tgacaacagcaacccccagttggtg

SEQ ID NO: 3793474 - DNA, 25 bp, Homo sapien
cagcccatgacctggttcagagcga

SEQ ID NO: 3793475 - DNA, 25 bp, Homo sapien
gggcatgagttcaggccgcagctct

SEQ ID NO: 3793476 - DNA, 25 bp, Homo sapien
caggcctcaagtgagagttgtcaca

SEQ ID NO: 3793477 - DNA, 25 bp, Homo sapien
tagagccggacagatgaggtctcca

SEQ ID NO: 3793478 - DNA, 25 bp, Homo sapien
tgtgcactgcacaattccataggca

SEQ ID NO: 3793479 - DNA, 25 bp, Homo sapien
tatggttacatgagcgtcggactga

SEQ ID NO: 3793480 - DNA, 25 bp, Homo sapien
gctggcactcagacccaaccagagg

SEQ ID NO: 3793481 - DNA, 25 bp, Homo sapien
agctggcactcagacccaaccagag

SEQ ID NO: 3793482 - DNA, 25 bp, Homo sapien
ccagaggcccgtccagtccctgcac

SEQ ID NO: 3793483 - DNA, 25 bp, Homo sapien
gaggcccgtccagtccctgcactgt

SEQ ID NO: 3793484 - DNA, 25 bp, Homo sapien
gaaactggcggcgtctctgagccgc

SEQ ID NO: 3793485 - DNA, 25 bp, Homo sapien
tctgagcggaggttgggcggcttcg

SEQ ID NO: 3793486 - DNA, 25 bp, Homo sapien
tctgggttctgagcggaggttgggc

SEQ ID NO: 3793487 - DNA, 25 bp, Homo sapien
ctcttcgaagctcggtttcgcaggg

SEQ ID NO: 3793488 - DNA, 25 bp, Homo sapien
gaggcgagggatgggtgtccggagg

SEQ ID NO: 3793489 - DNA, 25 bp, Homo sapien
ctgcacttcccggcacctgccaccc

SEQ ID NO: 3793490 - DNA, 25 bp, Homo sapien
cgcgccagagccgcgcccggaggcc

SEQ ID NO: 3793491 - DNA, 25 bp, Homo sapien
cgctgcacttcccggcacctgccac

SEQ ID NO: 3793492 - DNA, 25 bp, Homo sapien
tggaggaccgggcactcaaggcggg

SEQ ID NO: 3793493 - DNA, 25 bp, Homo sapien
cgcctctgagaccgcgcaagtgttc

SEQ ID NO: 3793494 - DNA, 25 bp, Homo sapien
aagctccgtccagggggcgccctga

SEQ ID NO: 3793495 - DNA, 25 bp, Homo sapien
gtcgctgcgggcgacccaggaagct

SEQ ID NO: 3793496 - DNA, 25 bp, Homo sapien
gagttccgcggtagcgcagaaccag

SEQ ID NO: 3793497 - DNA, 25 bp, Homo sapien
ccgcggtagcgcagaaccaggtgaa

SEQ ID NO: 3793498 - DNA, 25 bp, Homo sapien
aaagcaccaggagcgccgagttccg

SEQ ID NO: 3793499 - DNA, 25 bp, Homo sapien
gcccagctgggtgtccgccaaagca

SEQ ID NO: 3793500 - DNA, 25 bp, Homo sapien
ttagtacaaggtcagcaacactgct

SEQ ID NO: 3793501 - DNA, 25 bp, Homo sapien
tcccaggatgcacacttagtacaag

SEQ ID NO: 3793502 - DNA, 25 bp, Homo sapien
gctgcagtgaccatcctcaaggcat

SEQ ID NO: 3793503 - DNA, 25 bp, Homo sapien
caaggcatgctgagcccggagtaag

SEQ ID NO: 3793504 - DNA, 25 bp, Homo sapien
gtcgctgagggtggcctggttgcca

SEQ ID NO: 3793505 - DNA, 25 bp, Homo sapien
ggaacacaggtttcagggtcgctga

SEQ ID NO: 3793506 - DNA, 25 bp, Homo sapien
gaacacaggtttcagggtcgctgag

SEQ ID NO: 3793507 - DNA, 25 bp, Homo sapien
gcctggttgccagggaacaaatggc

SEQ ID NO: 3793508 - DNA, 25 bp, Homo sapien
gttcacaggcgaataccccaaacac

SEQ ID NO: 3793509 - DNA, 25 bp, Homo sapien
tggttcacaggcgaataccccaaac

SEQ ID NO: 3793510 - DNA, 25 bp, Homo sapien
aactggttcacaggcgaatacccca

SEQ ID NO: 3793511 - DNA, 25 bp, Homo sapien
tcaaactggttcacaggcgaatacc

SEQ ID NO: 3793512 - DNA, 25 bp, Homo sapien
ctgtgccgactgcagactttgtctc

SEQ ID NO: 3793513 - DNA, 25 bp, Homo sapien
ctgacggtgactctgtgccgactgc

SEQ ID NO: 3793514 - DNA, 25 bp, Homo sapien
tctgtgccgactgcagactttgtct

SEQ ID NO: 3793515 - DNA, 25 bp, Homo sapien
ggagcgaaacctgccgggccgagag

SEQ ID NO: 3793516 - DNA, 25 bp, Homo sapien
gcgggagcgaaacctgccgggccga

SEQ ID NO: 3793517 - DNA, 25 bp, Homo sapien
aaacctgccgggccgagagagctcc

SEQ ID NO: 3793518 - DNA, 25 bp, Homo sapien
cgaaacctgccgggccgagagagct

SEQ ID NO: 3793519 - DNA, 25 bp, Homo sapien
tcgcggatctctagcctggtgtgtc

SEQ ID NO: 3793520 - DNA, 25 bp, Homo sapien
ggcccgatcgcggatctctagcctg

SEQ ID NO: 3793521 - DNA, 25 bp, Homo sapien
ggtgtgtcccgccttgaacaccctg

SEQ ID NO: 3793522 - DNA, 25 bp, Homo sapien
agcctggtgtgtcccgccttgaaca

SEQ ID NO: 3793523 - DNA, 25 bp, Homo sapien
gagcaccaatggaggtcaccaggca

SEQ ID NO: 3793524 - DNA, 25 bp, Homo sapien
gctggagcaccaatggaggtcacca

SEQ ID NO: 3793525 - DNA, 25 bp, Homo sapien
gttcacgctggagcaccaatggagg

SEQ ID NO: 3793526 - DNA, 25 bp, Homo sapien
cacgctggagcaccaatggaggtca

SEQ ID NO: 3793527 - DNA, 25 bp, Homo sapien
cgccatgaccagctcaaacgggtac

SEQ ID NO: 3793528 - DNA, 25 bp, Homo sapien
cggacaggagactggtatctttgca

SEQ ID NO: 3793529 - DNA, 25 bp, Homo sapien
tcaaacgggtacttgtagactcgga

SEQ ID NO: 3793530 - DNA, 25 bp, Homo sapien
tgtagactcggacaggagactggta

SEQ ID NO: 3793531 - DNA, 25 bp, Homo sapien
gaagctaggagcattttgattctga

SEQ ID NO: 3793532 - DNA, 25 bp, Homo sapien
gaaaatagctgagttcatctgaaac

SEQ ID NO: 3793533 - DNA, 25 bp, Homo sapien
cttttctggtcactcggatgcagtg

SEQ ID NO: 3793534 - DNA, 25 bp, Homo sapien
gacccaatctgagggcaagtgttta

SEQ ID NO: 3793535 - DNA, 25 bp, Homo sapien
ctcagaatgactggcctctccggca

SEQ ID NO: 3793536 - DNA, 25 bp, Homo sapien
actgggagaacgacagcccgtgcca

SEQ ID NO: 3793537 - DNA, 25 bp, Homo sapien
tggcctctccggcactgggagaacg

SEQ ID NO: 3793538 - DNA, 25 bp, Homo sapien
ctctccggcactgggagaacgacag

SEQ ID NO: 3793539 - DNA, 25 bp, Homo sapien
agaatgcagaaagaatatccaagct

SEQ ID NO: 3793540 - DNA, 25 bp, Homo sapien
tgcagaaagaatatccaagctgcac

SEQ ID NO: 3793541 - DNA, 25 bp, Homo sapien
aagaatatccaagctgcaccaacat

SEQ ID NO: 3793542 - DNA, 25 bp, Homo sapien
gaaagaatatccaagctgcaccaac

SEQ ID NO: 3793543 - DNA, 25 bp, Homo sapien
gggaaaatgacaggagcaagaaaag

SEQ ID NO: 3793544 - DNA, 25 bp, Homo sapien
cagggacaatcaatgcctcatctcc

SEQ ID NO: 3793545 - DNA, 25 bp, Homo sapien
gaaaatgacaggagcaagaaaagca

SEQ ID NO: 3793546 - DNA, 25 bp, Homo sapien
ccccgggagaactgccttgccttct

SEQ ID NO: 3793547 - DNA, 25 bp, Homo sapien
ccaccagggccaggaggacagagct

SEQ ID NO: 3793548 - DNA, 25 bp, Homo sapien
cccaggctgggcaaggccagcctgc

SEQ ID NO: 3793549 - DNA, 25 bp, Homo sapien
gccagcctgcctgtcctccaccagg

SEQ ID NO: 3793550 - DNA, 25 bp, Homo sapien
aggaggacagagctgcctcctgcca

SEQ ID NO: 3793551 - DNA, 25 bp, Homo sapien
tatctgctgtgtcacttatcagacg

SEQ ID NO: 3793552 - DNA, 25 bp, Homo sapien
attttgccgtcattaccaacaatcg

SEQ ID NO: 3793553 - DNA, 25 bp, Homo sapien
caacaatcgttccaccagctagcac

SEQ ID NO: 3793554 - DNA, 25 bp, Homo sapien
ctccttatctgctgtgtcacttatc

SEQ ID NO: 3793555 - DNA, 25 bp, Homo sapien
cgcgcaagacctcgctgcccaggaa

SEQ ID NO: 3793556 - DNA, 25 bp, Homo sapien
cacgtggggaaacgcttctcgtagg

SEQ ID NO: 3793557 - DNA, 25 bp, Homo sapien
gcgggactcgcgcaagacctcgctg

SEQ ID NO: 3793558 - DNA, 25 bp, Homo sapien
ggcgtccacgcgcagccggcagctc

SEQ ID NO: 3793559 - DNA, 25 bp, Homo sapien
tgcgcttcgatgaggagcgtcctct

SEQ ID NO: 3793560 - DNA, 25 bp, Homo sapien
agaccacgtgctcaacacctgcgat

SEQ ID NO: 3793561 - DNA, 25 bp, Homo sapien
tgtttgtctgcacgaagaccacgtg

SEQ ID NO: 3793562 - DNA, 25 bp, Homo sapien
gtagctgcagtgctcgttcaccacc

SEQ ID NO: 3793563 - DNA, 25 bp, Homo sapien
cctcttgacgttggcggtgtactgc

SEQ ID NO: 3793564 - DNA, 25 bp, Homo sapien
gcagactgctcgaagcaagtccagt

SEQ ID NO: 3793565 - DNA, 25 bp, Homo sapien
gccaaagaaagaccgaatgtccagt

SEQ ID NO: 3793566 - DNA, 25 bp, Homo sapien
ctgcttcatggcgatcttctccaag

SEQ ID NO: 3793567 - DNA, 25 bp, Homo sapien
gcgtccagcgcggaatgtgcgaggt

SEQ ID NO: 3793568 - DNA, 25 bp, Homo sapien
cagcgcggaatgtgcgaggtaccct

SEQ ID NO: 3793569 - DNA, 25 bp, Homo sapien
tgcgaggtaccctgggagatgagct

SEQ ID NO: 3793570 - DNA, 25 bp, Homo sapien
ggcaggcgtccagcgcggaatgtgc

SEQ ID NO: 3793571 - DNA, 25 bp, Homo sapien
gtccagcctggttgcgggcatcctc

SEQ ID NO: 3793572 - DNA, 25 bp, Homo sapien
agagcgggccccagggtgctacggg

SEQ ID NO: 3793573 - DNA, 25 bp, Homo sapien
catactgaccgcctccagagcgggc

SEQ ID NO: 3793574 - DNA, 25 bp, Homo sapien
cctcggtccagcctggttgcgggca

SEQ ID NO: 3793575 - DNA, 25 bp, Homo sapien
caggcacctctcaatgtagtccgca

SEQ ID NO: 3793576 - DNA, 25 bp, Homo sapien
gcagctctcctgcatgggcgtgagg

SEQ ID NO: 3793577 - DNA, 25 bp, Homo sapien
cagtgccgaagctggatcaggcagc

SEQ ID NO: 3793578 - DNA, 25 bp, Homo sapien
acctctcaatgtagtccgcatccag

SEQ ID NO: 3793579 - DNA, 25 bp, Homo sapien
cttgcctttgtgggtctcctgtaac

SEQ ID NO: 3793580 - DNA, 25 bp, Homo sapien
caaggactggcgcagcatttcccgg

SEQ ID NO: 3793581 - DNA, 25 bp, Homo sapien
gaggagatccacctggtgctgcttg

SEQ ID NO: 3793582 - DNA, 25 bp, Homo sapien
tgctgcttgcgccagctcaaggact

SEQ ID NO: 3793583 - DNA, 25 bp, Homo sapien
gcaggaaccgaaggatgtgctcatc

SEQ ID NO: 3793584 - DNA, 25 bp, Homo sapien
tccttaggaaagctaggcgcaattc

SEQ ID NO: 3793585 - DNA, 25 bp, Homo sapien
caggagccgcgtcattcaacttcag

SEQ ID NO: 3793586 - DNA, 25 bp, Homo sapien
cagacagcatgcgtgatgggcgact

SEQ ID NO: 3793587 - DNA, 25 bp, Homo sapien
caattctgcactacacgaagaggca

SEQ ID NO: 3793588 - DNA, 25 bp, Homo sapien
gcctttggtgtccatctggcccagg

SEQ ID NO: 3793589 - DNA, 25 bp, Homo sapien
catcaagcctttggtgtccatctgg

SEQ ID NO: 3793590 - DNA, 25 bp, Homo sapien
ctggcccaggcggaggatgtagagg

SEQ ID NO: 3793591 - DNA, 25 bp, Homo sapien
cacggccttcatcaagcctttggtg

SEQ ID NO: 3793592 - DNA, 25 bp, Homo sapien
tgtccttcctcgttgacggagagaa

SEQ ID NO: 3793593 - DNA, 25 bp, Homo sapien
gtccttcctcgttgacggagagaac

SEQ ID NO: 3793594 - DNA, 25 bp, Homo sapien
tctgtccttcctcgttgacggagag

SEQ ID NO: 3793595 - DNA, 25 bp, Homo sapien
ttctgtccttcctcgttgacggaga

SEQ ID NO: 3793596 - DNA, 25 bp, Homo sapien
ggcccagctgccttgtgctcccctc

SEQ ID NO: 3793597 - DNA, 25 bp, Homo sapien
gcccagctgccttgtgctcccctca

SEQ ID NO: 3793598 - DNA, 25 bp, Homo sapien
cccagctgccttgtgctcccctcac

SEQ ID NO: 3793599 - DNA, 25 bp, Homo sapien
tctgggtaattgtcctcaaccacct

SEQ ID NO: 3793600 - DNA, 25 bp, Homo sapien
aggtgccgcatgttgagtccctcca

SEQ ID NO: 3793601 - DNA, 25 bp, Homo sapien
gatgagcagccgacccagggtctct

SEQ ID NO: 3793602 - DNA, 25 bp, Homo sapien
gggctcgcacgatgagcagccgacc

SEQ ID NO: 3793603 - DNA, 25 bp, Homo sapien
cctggtagttgctgccactgtagat

SEQ ID NO: 3793604 - DNA, 25 bp, Homo sapien
cagggatcacttctctatccagata

SEQ ID NO: 3793605 - DNA, 25 bp, Homo sapien
aggaacttccgcctggtgttctcat

SEQ ID NO: 3793606 - DNA, 25 bp, Homo sapien
tatccagatagtccacaaggcctcc

SEQ ID NO: 3793607 - DNA, 25 bp, Homo sapien
gcaggtcagagataaagggcagcag

SEQ ID NO: 3793608 - DNA, 25 bp, Homo sapien
cagggccagttgaggcctggctggc

SEQ ID NO: 3793609 - DNA, 25 bp, Homo sapien
tgcaggtcagagataaagggcagca

SEQ ID NO: 3793610 - DNA, 25 bp, Homo sapien
caggtcagggccagttgaggcctgg

SEQ ID NO: 3793611 - DNA, 25 bp, Homo sapien
gaccagccctccttcggggacatta

SEQ ID NO: 3793612 - DNA, 25 bp, Homo sapien
ggctgaatggtaggtctcactccac

SEQ ID NO: 3793613 - DNA, 25 bp, Homo sapien
ctccgcggagcacgctggctgaatg

SEQ ID NO: 3793614 - DNA, 25 bp, Homo sapien
tgaatggtaggtctcactccactgc

SEQ ID NO: 3793615 - DNA, 25 bp, Homo sapien
gcaggatgtcaaagtcccaggtgat

SEQ ID NO: 3793616 - DNA, 25 bp, Homo sapien
tcccggcagacaaggggagcctcca

SEQ ID NO: 3793617 - DNA, 25 bp, Homo sapien
gggagcctccacacggctgtaatcc

SEQ ID NO: 3793618 - DNA, 25 bp, Homo sapien
gcctttgtcgatcagctgcccgctg

SEQ ID NO: 3793619 - DNA, 25 bp, Homo sapien
gtgagatcgacagcaactgccagtg

SEQ ID NO: 3793620 - DNA, 25 bp, Homo sapien
cgggaacttcggtgagatcgacagc

SEQ ID NO: 3793621 - DNA, 25 bp, Homo sapien
ggagtcagagagtgacattccacct

SEQ ID NO: 3793622 - DNA, 25 bp, Homo sapien
gtgcatgtgtcatttcgggagtcag

SEQ ID NO: 3793623 - DNA, 25 bp, Homo sapien
catcaccaggcctggaaattggggc

SEQ ID NO: 3793624 - DNA, 25 bp, Homo sapien
aggacaggtcaaggaggctgagcct

SEQ ID NO: 3793625 - DNA, 25 bp, Homo sapien
ctgcgccctccagaggacaggtcaa

SEQ ID NO: 3793626 - DNA, 25 bp, Homo sapien
ggctgagccttcatgggcttctcat

SEQ ID NO: 3793627 - DNA, 25 bp, Homo sapien
aacacatcagccctgccctgaggcc

SEQ ID NO: 3793628 - DNA, 25 bp, Homo sapien
ctgaaacacatcagccctgccctga

SEQ ID NO: 3793629 - DNA, 25 bp, Homo sapien
gaaacacatcagccctgccctgagg

SEQ ID NO: 3793630 - DNA, 25 bp, Homo sapien
tgaaacacatcagccctgccctgag

SEQ ID NO: 3793631 - DNA, 25 bp, Homo sapien
gtagacgccgggccaccgggtcaca

SEQ ID NO: 3793632 - DNA, 25 bp, Homo sapien
tagacgccgggccaccgggtcacat

SEQ ID NO: 3793633 - DNA, 25 bp, Homo sapien
agcaggtagacgccgggccaccggg

SEQ ID NO: 3793634 - DNA, 25 bp, Homo sapien
agacgccgggccaccgggtcacatg

SEQ ID NO: 3793635 - DNA, 25 bp, Homo sapien
agagaagtttgcacttgggcccggg

SEQ ID NO: 3793636 - DNA, 25 bp, Homo sapien
gacatcgtccacacccgggaggctg

SEQ ID NO: 3793637 - DNA, 25 bp, Homo sapien
cagaggcgagcacctcacagtagta

SEQ ID NO: 3793638 - DNA, 25 bp, Homo sapien
tgtgcagagccgtcaggacatcgtc

SEQ ID NO: 3793639 - DNA, 25 bp, Homo sapien
gagaccagggagctgctatgagact

SEQ ID NO: 3793640 - DNA, 25 bp, Homo sapien
tgcaggattccaggctggacatgga

SEQ ID NO: 3793641 - DNA, 25 bp, Homo sapien
ggaggacgaggtggcggcgctgagc

SEQ ID NO: 3793642 - DNA, 25 bp, Homo sapien
gctatgagactggccggaggaggag

SEQ ID NO: 3793643 - DNA, 25 bp, Homo sapien
aatcagggatggtcaggcttaggcc

SEQ ID NO: 3793644 - DNA, 25 bp, Homo sapien
cagagtcatatctgccccagggcaa

SEQ ID NO: 3793645 - DNA, 25 bp, Homo sapien
ggaatgtcaatcacgggaccctagt

SEQ ID NO: 3793646 - DNA, 25 bp, Homo sapien
taagcatgtgactcgagctgggcca

SEQ ID NO: 3793647 - DNA, 25 bp, Homo sapien
aaaagagcgcaggtaattcagtccg

SEQ ID NO: 3793648 - DNA, 25 bp, Homo sapien
gacttgagtcacgtgaggcgagccc

SEQ ID NO: 3793649 - DNA, 25 bp, Homo sapien
ttcagtccgagctgaaagcggccac

SEQ ID NO: 3793650 - DNA, 25 bp, Homo sapien
gtccaatatggcgacctccacgggt

SEQ ID NO: 3793651 - DNA, 25 bp, Homo sapien
gctcttaacttgtcaggcctcgagg

SEQ ID NO: 3793652 - DNA, 25 bp, Homo sapien
catcttgagagaagtcagccgcaca

SEQ ID NO: 3793653 - DNA, 25 bp, Homo sapien
gatgacagcctgcacgcattggact

SEQ ID NO: 3793654 - DNA, 25 bp, Homo sapien
tgctgcctcaagtgatgacgtccca

SEQ ID NO: 3793655 - DNA, 25 bp, Homo sapien
tgaattcaagtcctagctgtctgtg

SEQ ID NO: 3793656 - DNA, 25 bp, Homo sapien
ttgagcagtcaccaacttctctggg

SEQ ID NO: 3793657 - DNA, 25 bp, Homo sapien
gaaaaaatagttcaggtcatgagcc

SEQ ID NO: 3793658 - DNA, 25 bp, Homo sapien
gaaatggtgcccgtaacatactaag

SEQ ID NO: 3793659 - DNA, 25 bp, Homo sapien
gaagatgaagaattatctaaagcta

SEQ ID NO: 3793660 - DNA, 25 bp, Homo sapien
taaaaatctctcttgagaagttcaa

SEQ ID NO: 3793661 - DNA, 25 bp, Homo sapien
gctattcaatatcagcagcattttt

SEQ ID NO: 3793662 - DNA, 25 bp, Homo sapien
ctatgattgcgttactgcacccagc

SEQ ID NO: 3793663 - DNA, 25 bp, Homo sapien
catcagtagatgacaagtttaggcc

SEQ ID NO: 3793664 - DNA, 25 bp, Homo sapien
ttttaacaggcacctccagtggttc

SEQ ID NO: 3793665 - DNA, 25 bp, Homo sapien
cagatgtaggattcccttgagcact

SEQ ID NO: 3793666 - DNA, 25 bp, Homo sapien
ttgagcacttcttgtaaggccagtc

SEQ ID NO: 3793667 - DNA, 25 bp, Homo sapien
cttggctggcccgcagcagtcacgt

SEQ ID NO: 3793668 - DNA, 25 bp, Homo sapien
ttggctggcccgcagcagtcacgtg

SEQ ID NO: 3793669 - DNA, 25 bp, Homo sapien
ccaggagggtcaccgagaagccgtg

SEQ ID NO: 3793670 - DNA, 25 bp, Homo sapien
caccgctactacatgccgggccgcc

SEQ ID NO: 3793671 - DNA, 25 bp, Homo sapien
gagaagccgtgcatggccaacgaca

SEQ ID NO: 3793672 - DNA, 25 bp, Homo sapien
tggccaacgacagcgcgtggtactg

SEQ ID NO: 3793673 - DNA, 25 bp, Homo sapien
gactctgaagttctgtcaaccccac

SEQ ID NO: 3793674 - DNA, 25 bp, Homo sapien
gcaagactctgaagttctgtcaacc

SEQ ID NO: 3793675 - DNA, 25 bp, Homo sapien
ctgcaagactctgaagttctgtcaa

SEQ ID NO: 3793676 - DNA, 25 bp, Homo sapien
gaagttctgtcaaccccacaatctg

SEQ ID NO: 3793677 - DNA, 25 bp, Homo sapien
caagtacatagcctgaagtacaact

SEQ ID NO: 3793678 - DNA, 25 bp, Homo sapien
ctttgactccgtactggaaaactcg

SEQ ID NO: 3793679 - DNA, 25 bp, Homo sapien
gagaaagatataggcacctggctcc

SEQ ID NO: 3793680 - DNA, 25 bp, Homo sapien
tcaacttccacagcaagtacatagc

SEQ ID NO: 3793681 - DNA, 25 bp, Homo sapien
gacccatgatggagtagccatagtt

SEQ ID NO: 3793682 - DNA, 25 bp, Homo sapien
agcccacgaaccagcagacagcaat

SEQ ID NO: 3793683 - DNA, 25 bp, Homo sapien
gacgagcttgcttccacaaaggcag

SEQ ID NO: 3793684 - DNA, 25 bp, Homo sapien
tgtgccagtcaatgacgagcttgct

SEQ ID NO: 3793685 - DNA, 25 bp, Homo sapien
atgtgccagttatccgccaggtctt

SEQ ID NO: 3793686 - DNA, 25 bp, Homo sapien
gacaggcgcccaaagaacttctcgt

SEQ ID NO: 3793687 - DNA, 25 bp, Homo sapien
taacacacaggttcaggtgggacag

SEQ ID NO: 3793688 - DNA, 25 bp, Homo sapien
caggtcttctcgcatagcattggta

SEQ ID NO: 3793689 - DNA, 25 bp, Homo sapien
cggagagtgcatgctgcccagcttc

SEQ ID NO: 3793690 - DNA, 25 bp, Homo sapien
tgaacggagagtgcatgctgcccag

SEQ ID NO: 3793691 - DNA, 25 bp, Homo sapien
aacggagagtgcatgctgcccagct

SEQ ID NO: 3793692 - DNA, 25 bp, Homo sapien
tgcgggcttgtcgtagacggtcaca

SEQ ID NO: 3793693 - DNA, 25 bp, Homo sapien
ccgtgactgggtcctcaggttctga

SEQ ID NO: 3793694 - DNA, 25 bp, Homo sapien
ctccgtgactgggtcctcaggttct

SEQ ID NO: 3793695 - DNA, 25 bp, Homo sapien
cgtgactgggtcctcaggttctgag

SEQ ID NO: 3793696 - DNA, 25 bp, Homo sapien
tccgtgactgggtcctcaggttctg

SEQ ID NO: 3793697 - DNA, 25 bp, Homo sapien
cgctcacggagacgcgtcaccagcc

SEQ ID NO: 3793698 - DNA, 25 bp, Homo sapien
gctggccgctcacggagacgcgtca

SEQ ID NO: 3793699 - DNA, 25 bp, Homo sapien
agggctggccgctcacggagacgcg

SEQ ID NO: 3793700 - DNA, 25 bp, Homo sapien
ggccgctcacggagacgcgtcacca

SEQ ID NO: 3793701 - DNA, 25 bp, Homo sapien
gccagcaggatggagaagtcttcgt

SEQ ID NO: 3793702 - DNA, 25 bp, Homo sapien
agcaggatggagaagtcttcgtcct

SEQ ID NO: 3793703 - DNA, 25 bp, Homo sapien
tttctaaagctgccagcaggatgga

SEQ ID NO: 3793704 - DNA, 25 bp, Homo sapien
ttctaaagctgccagcaggatggag

SEQ ID NO: 3793705 - DNA, 25 bp, Homo sapien
agaaggaaggttgtgtccatcaaga

SEQ ID NO: 3793706 - DNA, 25 bp, Homo sapien
ctgttatcacacagacgagagaagg

SEQ ID NO: 3793707 - DNA, 25 bp, Homo sapien
gaaggttgtgtccatcaagagtcag

SEQ ID NO: 3793708 - DNA, 25 bp, Homo sapien
ttgtgtccatcaagagtcagttgtt

SEQ ID NO: 3793709 - DNA, 25 bp, Homo sapien
cagacactgccatggacccatctct

SEQ ID NO: 3793710 - DNA, 25 bp, Homo sapien
aagagcagacactgccatggaccca

SEQ ID NO: 3793711 - DNA, 25 bp, Homo sapien
gacactgccatggacccatctctgt

SEQ ID NO: 3793712 - DNA, 25 bp, Homo sapien
agcagacactgccatggacccatct

SEQ ID NO: 3793713 - DNA, 25 bp, Homo sapien
aggcggctataatactccctcagag

SEQ ID NO: 3793714 - DNA, 25 bp, Homo sapien
tggatgaggcggctataatactccc

SEQ ID NO: 3793715 - DNA, 25 bp, Homo sapien
tgaggcggctataatactccctcag

SEQ ID NO: 3793716 - DNA, 25 bp, Homo sapien
gatgaggcggctataatactccctc

SEQ ID NO: 3793717 - DNA, 25 bp, Homo sapien
aggccactggaggacgtgtgcagac

SEQ ID NO: 3793718 - DNA, 25 bp, Homo sapien
agcacacacaggcaaacagcacccg

SEQ ID NO: 3793719 - DNA, 25 bp, Homo sapien
tgtgcagacagacacccaggtccgc

SEQ ID NO: 3793720 - DNA, 25 bp, Homo sapien
gaggacgtgtgcagacagacaccca

SEQ ID NO: 3793721 - DNA, 25 bp, Homo sapien
tcaaaatggccacacccatttgagg

SEQ ID NO: 3793722 - DNA, 25 bp, Homo sapien
ctgcagagagaaccaagggagcctg

SEQ ID NO: 3793723 - DNA, 25 bp, Homo sapien
cagagagaaccaagggagcctgaga

SEQ ID NO: 3793724 - DNA, 25 bp, Homo sapien
agagaaccaagggagcctgagagct

SEQ ID NO: 3793725 - DNA, 25 bp, Homo sapien
agaaccaagggagcctgagagctgc

SEQ ID NO: 3793726 - DNA, 25 bp, Homo sapien
aagaccaggccattttcttcatgtt

SEQ ID NO: 3793727 - DNA, 25 bp, Homo sapien
tctgagtcctcaaagaccaggccat

SEQ ID NO: 3793728 - DNA, 25 bp, Homo sapien
cctcaaagaccaggccattttcttc

SEQ ID NO: 3793729 - DNA, 25 bp, Homo sapien
caaagaccaggccattttcttcatg

SEQ ID NO: 3793730 - DNA, 25 bp, Homo sapien
tctcatcccatcggagctgctgcga

SEQ ID NO: 3793731 - DNA, 25 bp, Homo sapien
ccagctctcatcccatcggagctgc

SEQ ID NO: 3793732 - DNA, 25 bp, Homo sapien
agctctcatcccatcggagctgctg

SEQ ID NO: 3793733 - DNA, 25 bp, Homo sapien
tcatcccatcggagctgctgcgact

SEQ ID NO: 3793734 - DNA, 25 bp, Homo sapien
cataaccaaagggagcacagtctgc

SEQ ID NO: 3793735 - DNA, 25 bp, Homo sapien
ttatgtgtccataaccaaagggagc

SEQ ID NO: 3793736 - DNA, 25 bp, Homo sapien
atgtgtccataaccaaagggagcac

SEQ ID NO: 3793737 - DNA, 25 bp, Homo sapien
taaccaaagggagcacagtctgcac

SEQ ID NO: 3793738 - DNA, 25 bp, Homo sapien
tcctggggttttagcctctggccca

SEQ ID NO: 3793739 - DNA, 25 bp, Homo sapien
gactccaagaagaagctgcgggaag

SEQ ID NO: 3793740 - DNA, 25 bp, Homo sapien
ggcagtaccactgctgtcatttcag

SEQ ID NO: 3793741 - DNA, 25 bp, Homo sapien
ggtgctgctcgaaagggtttgccct

SEQ ID NO: 3793742 - DNA, 25 bp, Homo sapien
acagaacagtaatacgctagcaggg

SEQ ID NO: 3793743 - DNA, 25 bp, Homo sapien
ggcatggggcgtgaagaacagaaga

SEQ ID NO: 3793744 - DNA, 25 bp, Homo sapien
agtcacagaacagtaatacgctagc

SEQ ID NO: 3793745 - DNA, 25 bp, Homo sapien
ctggagaccaaacgcaggatgagga

SEQ ID NO: 3793746 - DNA, 25 bp, Homo sapien
aatgttaggaacacggcagaaaggg

SEQ ID NO: 3793747 - DNA, 25 bp, Homo sapien
atgttaggaacacggcagaaagggg

SEQ ID NO: 3793748 - DNA, 25 bp, Homo sapien
gggttgactattcagatctctgctt

SEQ ID NO: 3793749 - DNA, 25 bp, Homo sapien
aagagtgggttgactattcagatct

SEQ ID NO: 3793750 - DNA, 25 bp, Homo sapien
gtgggttgactattcagatctctgc

SEQ ID NO: 3793751 - DNA, 25 bp, Homo sapien
gagtgggttgactattcagatctct

SEQ ID NO: 3793752 - DNA, 25 bp, Homo sapien
aaacaaataataaaagaggctgagg

SEQ ID NO: 3793753 - DNA, 25 bp, Homo sapien
tgaggccatgcgttcaggaccccat

SEQ ID NO: 3793754 - DNA, 25 bp, Homo sapien
acaaataataaaagaggctgaggca

SEQ ID NO: 3793755 - DNA, 25 bp, Homo sapien
acttgaggccatgcgttcaggaccc

SEQ ID NO: 3793756 - DNA, 25 bp, Homo sapien
agaatatacatatagcagtcttgtc

SEQ ID NO: 3793757 - DNA, 25 bp, Homo sapien
cttgcggcccaacgcaaatctgtaa

SEQ ID NO: 3793758 - DNA, 25 bp, Homo sapien
acacattcatgtctgtactacttca

SEQ ID NO: 3793759 - DNA, 25 bp, Homo sapien
ttttcacataagtatacctataggg

SEQ ID NO: 3793760 - DNA, 25 bp, Homo sapien
ccctctagataggccaagaaccaga

SEQ ID NO: 3793761 - DNA, 25 bp, Homo sapien
ggaacaccagtgagtctggagattt

SEQ ID NO: 3793762 - DNA, 25 bp, Homo sapien
tttttaaggaacaccagtgagtctg

SEQ ID NO: 3793763 - DNA, 25 bp, Homo sapien
taaggaacaccagtgagtctggaga

SEQ ID NO: 3793764 - DNA, 25 bp, Homo sapien
catggtttattcagccatgtggtgg

SEQ ID NO: 3793765 - DNA, 25 bp, Homo sapien
tcctgtcatggtttattcagccatg

SEQ ID NO: 3793766 - DNA, 25 bp, Homo sapien
tgtcatggtttattcagccatgtgg

SEQ ID NO: 3793767 - DNA, 25 bp, Homo sapien
ggtcctgtcatggtttattcagcca

SEQ ID NO: 3793768 - DNA, 25 bp, Homo sapien
gaggaactgcgagagtgcctacgtt

SEQ ID NO: 3793769 - DNA, 25 bp, Homo sapien
cggaggaactgcgagagtgcctacg

SEQ ID NO: 3793770 - DNA, 25 bp, Homo sapien
ggaggaactgcgagagtgcctacgt

SEQ ID NO: 3793771 - DNA, 25 bp, Homo sapien
tcaacacgatcgatgactgaggtat

SEQ ID NO: 3793772 - DNA, 25 bp, Homo sapien
caacacgatcgatgactgaggtatt

SEQ ID NO: 3793773 - DNA, 25 bp, Homo sapien
ttcaacacgatcgatgactgaggta

SEQ ID NO: 3793774 - DNA, 25 bp, Homo sapien
tttccttcaatgacagtaatgctgc

SEQ ID NO: 3793775 - DNA, 25 bp, Homo sapien
gatttgaactcactttgggttcagc

SEQ ID NO: 3793776 - DNA, 25 bp, Homo sapien
ggatttgaactcactttgggttcag

SEQ ID NO: 3793777 - DNA, 25 bp, Homo sapien
agttgaccatttcatgcaccttcag

SEQ ID NO: 3793778 - DNA, 25 bp, Homo sapien
gttgaccatttcatgcaccttcaga

SEQ ID NO: 3793779 - DNA, 25 bp, Homo sapien
aagttgaccatttcatgcaccttca

SEQ ID NO: 3793780 - DNA, 25 bp, Homo sapien
aaagttgaccatttcatgcaccttc

SEQ ID NO: 3793781 - DNA, 25 bp, Homo sapien
ctgcaatcacagcagacatctcaga

SEQ ID NO: 3793782 - DNA, 25 bp, Homo sapien
atcacaagacaattgaggatagtac

SEQ ID NO: 3793783 - DNA, 25 bp, Homo sapien
agacatctcagaacacgctctctgt

SEQ ID NO: 3793784 - DNA, 25 bp, Homo sapien
tctcctgccttctagattgtaaata

SEQ ID NO: 3793785 - DNA, 25 bp, Homo sapien
gccttcgtggaatcctggtcctggg

SEQ ID NO: 3793786 - DNA, 25 bp, Homo sapien
gggctgccttcgtggaatcctggtc

SEQ ID NO: 3793787 - DNA, 25 bp, Homo sapien
gaaaagggctgccttcgtggaatcc

SEQ ID NO: 3793788 - DNA, 25 bp, Homo sapien
aaacggctgccttcaggttctattt

SEQ ID NO: 3793789 - DNA, 25 bp, Homo sapien
aggatgctttcactgcttcatttcc

SEQ ID NO: 3793790 - DNA, 25 bp, Homo sapien
gggaggatgctttcactgcttcatt

SEQ ID NO: 3793791 - DNA, 25 bp, Homo sapien
ggaggatgctttcactgcttcattt

SEQ ID NO: 3793792 - DNA, 25 bp, Homo sapien
ttgggaggatgctttcactgcttca

SEQ ID NO: 3793793 - DNA, 25 bp, Homo sapien
gctgcctagacaggattccaagagt

SEQ ID NO: 3793794 - DNA, 25 bp, Homo sapien
ccaaagaccttatcagattccaggg

SEQ ID NO: 3793795 - DNA, 25 bp, Homo sapien
catctgggctgcaaaaccatgcaca

SEQ ID NO: 3793796 - DNA, 25 bp, Homo sapien
tcaagccaacctctgggtgactcca

SEQ ID NO: 3793797 - DNA, 25 bp, Homo sapien
gaatgagatagttattcccaagccc

SEQ ID NO: 3793798 - DNA, 25 bp, Homo sapien
gattctcccatagttactgcaccag

SEQ ID NO: 3793799 - DNA, 25 bp, Homo sapien
taccatgactaagggacaacgtaag

SEQ ID NO: 3793800 - DNA, 25 bp, Homo sapien
caggatggactacgttatgctgcag

SEQ ID NO: 3793801 - DNA, 25 bp, Homo sapien
tagtgtgcaattctcaaagagccaa

SEQ ID NO: 3793802 - DNA, 25 bp, Homo sapien
caaggactcaaagtggtctccagac

SEQ ID NO: 3793803 - DNA, 25 bp, Homo sapien
gccttggacattcccaattctggta

SEQ ID NO: 3793804 - DNA, 25 bp, Homo sapien
gagatgtgtacgcatgacccctaaa

SEQ ID NO: 3793805 - DNA, 25 bp, Homo sapien
cacctgtgggctgcgctcatccgtg

SEQ ID NO: 3793806 - DNA, 25 bp, Homo sapien
tgtgggctgcgctcatccgtgatca

SEQ ID NO: 3793807 - DNA, 25 bp, Homo sapien
cctgtgggctgcgctcatccgtgat

SEQ ID NO: 3793808 - DNA, 25 bp, Homo sapien
gtgggctgcgctcatccgtgatcat

SEQ ID NO: 3793809 - DNA, 25 bp, Homo sapien
tggtgggtctcaagctggcatagca

SEQ ID NO: 3793810 - DNA, 25 bp, Homo sapien
gcaccaggtgattccgacttacagc

SEQ ID NO: 3793811 - DNA, 25 bp, Homo sapien
ttccgacttacagctggtgggtctc

SEQ ID NO: 3793812 - DNA, 25 bp, Homo sapien
agctggtgggtctcaagctggcata

SEQ ID NO: 3793813 - DNA, 25 bp, Homo sapien
gtggatgtacaaatagttatggacc

SEQ ID NO: 3793814 - DNA, 25 bp, Homo sapien
cagagtataggcgtggatgtacaaa

SEQ ID NO: 3793815 - DNA, 25 bp, Homo sapien
tacaaatagttatggaccaggttgt

SEQ ID NO: 3793816 - DNA, 25 bp, Homo sapien
gatgtacaaatagttatggaccagg

SEQ ID NO: 3793817 - DNA, 25 bp, Homo sapien
tacagatgtagacgtacagatatac

SEQ ID NO: 3793818 - DNA, 25 bp, Homo sapien
cagatgtagacgtacagatatactt

SEQ ID NO: 3793819 - DNA, 25 bp, Homo sapien
atacagatgtagacgtacagatata

SEQ ID NO: 3793820 - DNA, 25 bp, Homo sapien
agatgtagacgtacagatatacttt

SEQ ID NO: 3793821 - DNA, 25 bp, Homo sapien
gtaaagcatcccgtgtgccttccgc

SEQ ID NO: 3793822 - DNA, 25 bp, Homo sapien
cagaccccgggctatgtccagcagc

SEQ ID NO: 3793823 - DNA, 25 bp, Homo sapien
gggcactctcgacgcagcttgccta

SEQ ID NO: 3793824 - DNA, 25 bp, Homo sapien
agggcactctcgacgcagcttgcct

SEQ ID NO: 3793825 - DNA, 25 bp, Homo sapien
ctgagatgaacttgttgtagttctc

SEQ ID NO: 3793826 - DNA, 25 bp, Homo sapien
gagatgaacttgttgtagttctcat

SEQ ID NO: 3793827 - DNA, 25 bp, Homo sapien
tagaccagggtctgcatatcgctgt

SEQ ID NO: 3793828 - DNA, 25 bp, Homo sapien
ggctgagatgaacttgttgtagttc

SEQ ID NO: 3793829 - DNA, 25 bp, Homo sapien
tcttcaggtaacagatgcacccaac

SEQ ID NO: 3793830 - DNA, 25 bp, Homo sapien
agtccatcgtagtgtctcaaacccc

SEQ ID NO: 3793831 - DNA, 25 bp, Homo sapien
caaccccactcttagctgtagaagg

SEQ ID NO: 3793832 - DNA, 25 bp, Homo sapien
tagctgtagaaggactcaagttgag

SEQ ID NO: 3793833 - DNA, 25 bp, Homo sapien
tttggtacatagatcttcccaggtc

SEQ ID NO: 3793834 - DNA, 25 bp, Homo sapien
gagaggctcccatggtgatttgaag

SEQ ID NO: 3793835 - DNA, 25 bp, Homo sapien
tatttaaggtttgtggagaggctcc

SEQ ID NO: 3793836 - DNA, 25 bp, Homo sapien
acttcctcattgaccatgctgcctg

SEQ ID NO: 3793837 - DNA, 25 bp, Homo sapien
gagagactgccaggtaagcaaccct

SEQ ID NO: 3793838 - DNA, 25 bp, Homo sapien
cacggtaatgggctgttgctcacca

SEQ ID NO: 3793839 - DNA, 25 bp, Homo sapien
tattcgcccaaatagaagaaggttg

SEQ ID NO: 3793840 - DNA, 25 bp, Homo sapien
tcatacatctggcatcaagaaacag

SEQ ID NO: 3793841 - DNA, 25 bp, Homo sapien
aagttctggctgacaatgcatgagg

SEQ ID NO: 3793842 - DNA, 25 bp, Homo sapien
caatgagcaaaccaaaagttctggc

SEQ ID NO: 3793843 - DNA, 25 bp, Homo sapien
tcccaggggatcttgatgggttgca

SEQ ID NO: 3793844 - DNA, 25 bp, Homo sapien
cgagggccaccaagtcagtgatgct

SEQ ID NO: 3793845 - DNA, 25 bp, Homo sapien
gaagcttctatgacagataccggga

SEQ ID NO: 3793846 - DNA, 25 bp, Homo sapien
tagtgatgacaaggttgtgcccaag

SEQ ID NO: 3793847 - DNA, 25 bp, Homo sapien
tatctgattgatttgggcgccaagc

SEQ ID NO: 3793848 - DNA, 25 bp, Homo sapien
aacacagcttatgtgggtcccaggc

SEQ ID NO: 3793849 - DNA, 25 bp, Homo sapien
cagcttcgaaccaacttagtgagca

SEQ ID NO: 3793850 - DNA, 25 bp, Homo sapien
tcagcttcgaaccaacttagtgagc

SEQ ID NO: 3793851 - DNA, 25 bp, Homo sapien
agcttcgaaccaacttagtgagcag

SEQ ID NO: 3793852 - DNA, 25 bp, Homo sapien
gaagaggaaggacccggcgcgagcg

SEQ ID NO: 3793853 - DNA, 25 bp, Homo sapien
acccggcgcgagcggcctctcggcg

SEQ ID NO: 3793854 - DNA, 25 bp, Homo sapien
ctgcacttggggaagaggaaggacc

SEQ ID NO: 3793855 - DNA, 25 bp, Homo sapien
cccggcgcgagcggcctctcggcgg

SEQ ID NO: 3793856 - DNA, 25 bp, Homo sapien
cggcgcgtccttcccgtcctcgcag

SEQ ID NO: 3793857 - DNA, 25 bp, Homo sapien
tcccgtcctcgcagtcctcgggctg

SEQ ID NO: 3793858 - DNA, 25 bp, Homo sapien
cctgcccggccgcggcgcgtccttc

SEQ ID NO: 3793859 - DNA, 25 bp, Homo sapien
tccttcccgtcctcgcagtcctcgg

SEQ ID NO: 3793860 - DNA, 25 bp, Homo sapien
gcccggtcactcaggggcccacgtg

SEQ ID NO: 3793861 - DNA, 25 bp, Homo sapien
ggtcactcaggggcccacgtgtgca

SEQ ID NO: 3793862 - DNA, 25 bp, Homo sapien
cactcaggggcccacgtgtgcagga

SEQ ID NO: 3793863 - DNA, 25 bp, Homo sapien
gtgtgcaggacaccgggagctcaca

SEQ ID NO: 3793864 - DNA, 25 bp, Homo sapien
tcccacacagcatccgggagcaacc

SEQ ID NO: 3793865 - DNA, 25 bp, Homo sapien
tgaggatgtcaccaggagcaagcct

SEQ ID NO: 3793866 - DNA, 25 bp, Homo sapien
aggagcaagcctcccacacagcatc

SEQ ID NO: 3793867 - DNA, 25 bp, Homo sapien
acagcatccgggagcaaccccaaga

SEQ ID NO: 3793868 - DNA, 25 bp, Homo sapien
tgagttcggtgtccaggtgacccaa

SEQ ID NO: 3793869 - DNA, 25 bp, Homo sapien
gagttcggtgtccaggtgacccaag

SEQ ID NO: 3793870 - DNA, 25 bp, Homo sapien
ctgagttcggtgtccaggtgaccca

SEQ ID NO: 3793871 - DNA, 25 bp, Homo sapien
gttcggtgtccaggtgacccaagct

SEQ ID NO: 3793872 - DNA, 25 bp, Homo sapien
tccttcaggtcatgaaattcacatt

SEQ ID NO: 3793873 - DNA, 25 bp, Homo sapien
cctcaaagaaatcgctgctgattct

SEQ ID NO: 3793874 - DNA, 25 bp, Homo sapien
aagaaatcgctgctgattctcacac

SEQ ID NO: 3793875 - DNA, 25 bp, Homo sapien
ctcctcaaagaaatcgctgctgatt

SEQ ID NO: 3793876 - DNA, 25 bp, Homo sapien
caaagaaatcgctgctgattctcac

SEQ ID NO: 3793877 - DNA, 25 bp, Homo sapien
cttgccaccgtatttggagagagat

SEQ ID NO: 3793878 - DNA, 25 bp, Homo sapien
ttgccaccgtatttggagagagatg

SEQ ID NO: 3793879 - DNA, 25 bp, Homo sapien
tagctcttgccaccgtatttggaga

SEQ ID NO: 3793880 - DNA, 25 bp, Homo sapien
gatagctcttgccaccgtatttgga

SEQ ID NO: 3793881 - DNA, 25 bp, Homo sapien
ggcacttgttcttaacaaccgccat

SEQ ID NO: 3793882 - DNA, 25 bp, Homo sapien
ttcataaggcacttgttcttaacaa

SEQ ID NO: 3793883 - DNA, 25 bp, Homo sapien
tagaaaatggatcaagtattttctt

SEQ ID NO: 3793884 - DNA, 25 bp, Homo sapien
agaaaatggatcaagtattttcttc

SEQ ID NO: 3793885 - DNA, 25 bp, Homo sapien
cctcgggtcctggtgaccaagtctt

SEQ ID NO: 3793886 - DNA, 25 bp, Homo sapien
tgggttcctcgggtcctggtgacca

SEQ ID NO: 3793887 - DNA, 25 bp, Homo sapien
ttcctcgggtcctggtgaccaagtc

SEQ ID NO: 3793888 - DNA, 25 bp, Homo sapien
tcgggtcctggtgaccaagtctttc

SEQ ID NO: 3793889 - DNA, 25 bp, Homo sapien
atttggcagactgttggtgctgagc

SEQ ID NO: 3793890 - DNA, 25 bp, Homo sapien
tcttctggatttggcagactgttgg

SEQ ID NO: 3793891 - DNA, 25 bp, Homo sapien
cttcacatcaacatgagtttcaatc

SEQ ID NO: 3793892 - DNA, 25 bp, Homo sapien
agtcttcacatcaacatgagtttca

SEQ ID NO: 3793893 - DNA, 25 bp, Homo sapien
tccgatgttatctggtatcaattta

SEQ ID NO: 3793894 - DNA, 25 bp, Homo sapien
tttccgatgttatctggtatcaatt

SEQ ID NO: 3793895 - DNA, 25 bp, Homo sapien
ccgatgttatctggtatcaatttat

SEQ ID NO: 3793896 - DNA, 25 bp, Homo sapien
ttccgatgttatctggtatcaattt

SEQ ID NO: 3793897 - DNA, 25 bp, Homo sapien
agccattaattcttgctgtaagtgt

SEQ ID NO: 3793898 - DNA, 25 bp, Homo sapien
taattcttgctgtaagtgttgtatg

SEQ ID NO: 3793899 - DNA, 25 bp, Homo sapien
ggccacatttcacgtcagtggggta

SEQ ID NO: 3793900 - DNA, 25 bp, Homo sapien
tcagtggggtatcggtagaggcagc

SEQ ID NO: 3793901 - DNA, 25 bp, Homo sapien
ccggaagtgatgctggaaccttctt

SEQ ID NO: 3793902 - DNA, 25 bp, Homo sapien
cttgagaggccggaagtgatgctgg

SEQ ID NO: 3793903 - DNA, 25 bp, Homo sapien
tcttgagaggccggaagtgatgctg

SEQ ID NO: 3793904 - DNA, 25 bp, Homo sapien
aggccggaagtgatgctggaacctt

SEQ ID NO: 3793905 - DNA, 25 bp, Homo sapien
ctggatattgtcacatgaggacttg

SEQ ID NO: 3793906 - DNA, 25 bp, Homo sapien
gaggacttgacaggcggattgtggc

SEQ ID NO: 3793907 - DNA, 25 bp, Homo sapien
gtcacatgaggacttgacaggcgga

SEQ ID NO: 3793908 - DNA, 25 bp, Homo sapien
cttgacaggcggattgtggcagcct

SEQ ID NO: 3793909 - DNA, 25 bp, Homo sapien
atgacagtgtgggaagctgtctcct

SEQ ID NO: 3793910 - DNA, 25 bp, Homo sapien
tctcctgctgttctagcaaagaatc

SEQ ID NO: 3793911 - DNA, 25 bp, Homo sapien
ctgtctcctgctgttctagcaaaga

SEQ ID NO: 3793912 - DNA, 25 bp, Homo sapien
tgacagtgtgggaagctgtctcctg

SEQ ID NO: 3793913 - DNA, 25 bp, Homo sapien
cagccaagttgtgaagaatcaaact

SEQ ID NO: 3793914 - DNA, 25 bp, Homo sapien
caggcagtcttcatgaatgttttca

SEQ ID NO: 3793915 - DNA, 25 bp, Homo sapien
tgttttcagccaagttgtgaagaat

SEQ ID NO: 3793916 - DNA, 25 bp, Homo sapien
ggcagtcttcatgaatgttttcagc

SEQ ID NO: 3793917 - DNA, 25 bp, Homo sapien
cctgatgatagcagagaacatggag

SEQ ID NO: 3793918 - DNA, 25 bp, Homo sapien
gaaacttgttctgatccagctgtga

SEQ ID NO: 3793919 - DNA, 25 bp, Homo sapien
tgatgtgatgctttgtcttacggtc

SEQ ID NO: 3793920 - DNA, 25 bp, Homo sapien
acatggaggaggctgaaacttgttc

SEQ ID NO: 3793921 - DNA, 25 bp, Homo sapien
cacatacatccgaaagctgttagtt

SEQ ID NO: 3793922 - DNA, 25 bp, Homo sapien
ggctcccacatacatccgaaagctg

SEQ ID NO: 3793923 - DNA, 25 bp, Homo sapien
agctgttagtttgaggctctgctag

SEQ ID NO: 3793924 - DNA, 25 bp, Homo sapien
tcccacatacatccgaaagctgtta

SEQ ID NO: 3793925 - DNA, 25 bp, Homo sapien
attggctgagcttgaatcggatggc

SEQ ID NO: 3793926 - DNA, 25 bp, Homo sapien
gggcttaaatggtccactggcagct

SEQ ID NO: 3793927 - DNA, 25 bp, Homo sapien
gatggccacttttgggccaatcagc

SEQ ID NO: 3793928 - DNA, 25 bp, Homo sapien
ggtgggcttaaatggtccactggca

SEQ ID NO: 3793929 - DNA, 25 bp, Homo sapien
tttctcagttgactgctcggcaacc

SEQ ID NO: 3793930 - DNA, 25 bp, Homo sapien
gcaagaatacaacttggcacaaagt

SEQ ID NO: 3793931 - DNA, 25 bp, Homo sapien
cacaaagtggaggagccttgcaggt

SEQ ID NO: 3793932 - DNA, 25 bp, Homo sapien
acttggcacaaagtggaggagcctt

SEQ ID NO: 3793933 - DNA, 25 bp, Homo sapien
ggcctgagcaagaatacaacttggc

SEQ ID NO: 3793934 - DNA, 25 bp, Homo sapien
agagaaggcggacagagataaatga

SEQ ID NO: 3793935 - DNA, 25 bp, Homo sapien
agaaggcggacagagataaatgacc

SEQ ID NO: 3793936 - DNA, 25 bp, Homo sapien
ggagagaaggcggacagagataaat

SEQ ID NO: 3793937 - DNA, 25 bp, Homo sapien
gaaggcggacagagataaatgacca

SEQ ID NO: 3793938 - DNA, 25 bp, Homo sapien
ttgagttcacacccgaaaagacagt

SEQ ID NO: 3793939 - DNA, 25 bp, Homo sapien
gccttgagttcacacccgaaaagac

SEQ ID NO: 3793940 - DNA, 25 bp, Homo sapien
cttgagttcacacccgaaaagacag

SEQ ID NO: 3793941 - DNA, 25 bp, Homo sapien
gagttcacacccgaaaagacagttc

SEQ ID NO: 3793942 - DNA, 25 bp, Homo sapien
ctgcttccacaatgtacgattcatc

SEQ ID NO: 3793943 - DNA, 25 bp, Homo sapien
cacaatgtacgattcatccttcaca

SEQ ID NO: 3793944 - DNA, 25 bp, Homo sapien
tccacaatgtacgattcatccttca

SEQ ID NO: 3793945 - DNA, 25 bp, Homo sapien
gcttccacaatgtacgattcatcct

SEQ ID NO: 3793946 - DNA, 25 bp, Homo sapien
ttcaaccgtaagagcactggtggta

SEQ ID NO: 3793947 - DNA, 25 bp, Homo sapien
gtggtatgatttcaaagccccaagg

SEQ ID NO: 3793948 - DNA, 25 bp, Homo sapien
caaccgtaagagcactggtggtatg

SEQ ID NO: 3793949 - DNA, 25 bp, Homo sapien
caagggaaaccattgctgtacagac

SEQ ID NO: 3793950 - DNA, 25 bp, Homo sapien
tgctgtccattagcatgcactcgcc

SEQ ID NO: 3793951 - DNA, 25 bp, Homo sapien
attagcatgcactcgccctgaacca

SEQ ID NO: 3793952 - DNA, 25 bp, Homo sapien
tccacaggtacaaagtgctgtccat

SEQ ID NO: 3793953 - DNA, 25 bp, Homo sapien
gagtttcatatctttgtcttcgtct

SEQ ID NO: 3793954 - DNA, 25 bp, Homo sapien
tacttttttctgtggaaccatgcta

SEQ ID NO: 3793955 - DNA, 25 bp, Homo sapien
acttttttctgtggaaccatgctac

SEQ ID NO: 3793956 - DNA, 25 bp, Homo sapien
cggcagcaagttttacttttttctg

SEQ ID NO: 3793957 - DNA, 25 bp, Homo sapien
tttacttttttctgtggaaccatgc

SEQ ID NO: 3793958 - DNA, 25 bp, Homo sapien
cttttcattttgatttgacttgtgt

SEQ ID NO: 3793959 - DNA, 25 bp, Homo sapien
tcattttgatttgacttgtgtgcat

SEQ ID NO: 3793960 - DNA, 25 bp, Homo sapien
tttcattttgatttgacttgtgtgc

SEQ ID NO: 3793961 - DNA, 25 bp, Homo sapien
ttgtgtgcatttttggctggagtat

SEQ ID NO: 3793962 - DNA, 25 bp, Homo sapien
tatatttgcttgcatttctgctcta

SEQ ID NO: 3793963 - DNA, 25 bp, Homo sapien
catttctgctctaacatcttctaca

SEQ ID NO: 3793964 - DNA, 25 bp, Homo sapien
cctctctgggaaaagaatcaccttt

SEQ ID NO: 3793965 - DNA, 25 bp, Homo sapien
taattgatgaactttgcttcctctc

SEQ ID NO: 3793966 - DNA, 25 bp, Homo sapien
agaagcaagtttgcccagcatagca

SEQ ID NO: 3793967 - DNA, 25 bp, Homo sapien
agaggaggcagctcgaccgctgctc

SEQ ID NO: 3793968 - DNA, 25 bp, Homo sapien
gctcgaccgctgctcaggagcgtgt

SEQ ID NO: 3793969 - DNA, 25 bp, Homo sapien
cagaagcaagtttgcccagcatagc

SEQ ID NO: 3793970 - DNA, 25 bp, Homo sapien
ttgtctgttacaagtctgttgtgct

SEQ ID NO: 3793971 - DNA, 25 bp, Homo sapien
caagtctgttgtgctttcaatgcca

SEQ ID NO: 3793972 - DNA, 25 bp, Homo sapien
cagctgacccaccattgggttctgc

SEQ ID NO: 3793973 - DNA, 25 bp, Homo sapien
ctgacccaccattgggttctgcaga

SEQ ID NO: 3793974 - DNA, 25 bp, Homo sapien
caccagggaggacgtcaaacagctg

SEQ ID NO: 3793975 - DNA, 25 bp, Homo sapien
gggaggacgtcaaacagctgaatgt

SEQ ID NO: 3793976 - DNA, 25 bp, Homo sapien
tggcaccagggaggacgtcaaacag

SEQ ID NO: 3793977 - DNA, 25 bp, Homo sapien
cagggaggacgtcaaacagctgaat

SEQ ID NO: 3793978 - DNA, 25 bp, Homo sapien
ggaagtcaccaaacatagaacatag

SEQ ID NO: 3793979 - DNA, 25 bp, Homo sapien
tgtgaatcaagacccaaagaaggtc

SEQ ID NO: 3793980 - DNA, 25 bp, Homo sapien
tgtgcattcctaacaagtaagtggc

SEQ ID NO: 3793981 - DNA, 25 bp, Homo sapien
ccacgtagcatttgggtgatgtgtc

SEQ ID NO: 3793982 - DNA, 25 bp, Homo sapien
caagatgattctatgagccactcaa

SEQ ID NO: 3793983 - DNA, 25 bp, Homo sapien
tcaaaatgctccctgttggatggcg

SEQ ID NO: 3793984 - DNA, 25 bp, Homo sapien
tatgtgcaggtgaaaaccggtgaca

SEQ ID NO: 3793985 - DNA, 25 bp, Homo sapien
caaaggtacaatcgtcaatggaagg

SEQ ID NO: 3793986 - DNA, 25 bp, Homo sapien
ggcagtcccgtgcagctcaatacct

SEQ ID NO: 3793987 - DNA, 25 bp, Homo sapien
tgtgacctggccacgtgcaaaggcc

SEQ ID NO: 3793988 - DNA, 25 bp, Homo sapien
cacacaggatcccagtttggggtaa

SEQ ID NO: 3793989 - DNA, 25 bp, Homo sapien
ggtaacgtgtccagtctttggggca

SEQ ID NO: 3793990 - DNA, 25 bp, Homo sapien
cacttcttggtcagtattgtgtcca

SEQ ID NO: 3793991 - DNA, 25 bp, Homo sapien
tggtcagtattgtgtccatgctgcc

SEQ ID NO: 3793992 - DNA, 25 bp, Homo sapien
cttggtcagtattgtgtccatgctg

SEQ ID NO: 3793993 - DNA, 25 bp, Homo sapien
tcacttcttggtcagtattgtgtcc

SEQ ID NO: 3793994 - DNA, 25 bp, Homo sapien
agtctctgagctcagaatcaagagg

SEQ ID NO: 3793995 - DNA, 25 bp, Homo sapien
ctcagtgtaagcagtctctgagctc

SEQ ID NO: 3793996 - DNA, 25 bp, Homo sapien
tcagtgtaagcagtctctgagctca

SEQ ID NO: 3793997 - DNA, 25 bp, Homo sapien
gagctcagaatcaagaggacttgct

SEQ ID NO: 3793998 - DNA, 25 bp, Homo sapien
ctgtctccccatccagagactcatc

SEQ ID NO: 3793999 - DNA, 25 bp, Homo sapien
ctccccatccagagactcatcattg

SEQ ID NO: 3794000 - DNA, 25 bp, Homo sapien
gtctccccatccagagactcatcat

SEQ ID NO: 3794001 - DNA, 25 bp, Homo sapien
tccccatccagagactcatcattga

SEQ ID NO: 3794002 - DNA, 25 bp, Homo sapien
tgggaagagtcctttacaaccatca

SEQ ID NO: 3794003 - DNA, 25 bp, Homo sapien
gggaagagtcctttacaaccatcag

SEQ ID NO: 3794004 - DNA, 25 bp, Homo sapien
ggaagagtcctttacaaccatcagc

SEQ ID NO: 3794005 - DNA, 25 bp, Homo sapien
gcagcaccgtggacagagaccagat

SEQ ID NO: 3794006 - DNA, 25 bp, Homo sapien
cgcagcaccgtggacagagaccaga

SEQ ID NO: 3794007 - DNA, 25 bp, Homo sapien
cagcaccgtggacagagaccagatg

SEQ ID NO: 3794008 - DNA, 25 bp, Homo sapien
agcaccgtggacagagaccagatgc

SEQ ID NO: 3794009 - DNA, 25 bp, Homo sapien
ccctcaaccaggctgtatggcaggc

SEQ ID NO: 3794010 - DNA, 25 bp, Homo sapien
gaccctcaaccaggctgtatggcag

SEQ ID NO: 3794011 - DNA, 25 bp, Homo sapien
ctgaccctcaaccaggctgtatggc

SEQ ID NO: 3794012 - DNA, 25 bp, Homo sapien
ctcaaccaggctgtatggcaggcac

SEQ ID NO: 3794013 - DNA, 25 bp, Homo sapien
aatgatgaaatataggcaagcaccc

SEQ ID NO: 3794014 - DNA, 25 bp, Homo sapien
atgaaatataggcaagcaccctcat

SEQ ID NO: 3794015 - DNA, 25 bp, Homo sapien
tgatgaaatataggcaagcaccctc

SEQ ID NO: 3794016 - DNA, 25 bp, Homo sapien
atgatgaaatataggcaagcaccct

SEQ ID NO: 3794017 - DNA, 25 bp, Homo sapien
tactcaaactcttctacccataact

SEQ ID NO: 3794018 - DNA, 25 bp, Homo sapien
aactcttctacccataactggcagc

SEQ ID NO: 3794019 - DNA, 25 bp, Homo sapien
tctacccataactggcagccaacag

SEQ ID NO: 3794020 - DNA, 25 bp, Homo sapien
tcaaactcttctacccataactggc

SEQ ID NO: 3794021 - DNA, 25 bp, Homo sapien
gaaagcagagtggttcagggtgacc

SEQ ID NO: 3794022 - DNA, 25 bp, Homo sapien
ggtcctgcagaaagcagagtggttc

SEQ ID NO: 3794023 - DNA, 25 bp, Homo sapien
tgcagaaagcagagtggttcagggt

SEQ ID NO: 3794024 - DNA, 25 bp, Homo sapien
caggtcctgcagaaagcagagtggt

SEQ ID NO: 3794025 - DNA, 25 bp, Homo sapien
ggatcctctctgttagtttcataga

SEQ ID NO: 3794026 - DNA, 25 bp, Homo sapien
cctctctgttagtttcatagagcat

SEQ ID NO: 3794027 - DNA, 25 bp, Homo sapien
gatcctctctgttagtttcatagag

SEQ ID NO: 3794028 - DNA, 25 bp, Homo sapien
ctggatcctctctgttagtttcata

SEQ ID NO: 3794029 - DNA, 25 bp, Homo sapien
aggtactgcttattaggaattttat

SEQ ID NO: 3794030 - DNA, 25 bp, Homo sapien
tgaggtactgcttattaggaatttt

SEQ ID NO: 3794031 - DNA, 25 bp, Homo sapien
cacaaggtactgggaatggaataaa

SEQ ID NO: 3794032 - DNA, 25 bp, Homo sapien
ctacacaaggtactgggaatggaat

SEQ ID NO: 3794033 - DNA, 25 bp, Homo sapien
gggccggagcctgaggtccaacctc

SEQ ID NO: 3794034 - DNA, 25 bp, Homo sapien
gggggcttccagaacagggacacta

SEQ ID NO: 3794035 - DNA, 25 bp, Homo sapien
cagggggcttccagaacagggacac

SEQ ID NO: 3794036 - DNA, 25 bp, Homo sapien
ggcttccagaacagggacactaggg

SEQ ID NO: 3794037 - DNA, 25 bp, Homo sapien
tacttcccacgggtacaactctctg

SEQ ID NO: 3794038 - DNA, 25 bp, Homo sapien
ataccagaggtcctcttggatcttc

SEQ ID NO: 3794039 - DNA, 25 bp, Homo sapien
gggacagtggtgaaattacttccca

SEQ ID NO: 3794040 - DNA, 25 bp, Homo sapien
tacaactctctgtccgtaataccag

SEQ ID NO: 3794041 - DNA, 25 bp, Homo sapien
tttactaaaggacgacaaagtatat

SEQ ID NO: 3794042 - DNA, 25 bp, Homo sapien
atatactttgtcgtcctttagtaaa

SEQ ID NO: 3794043 - DNA, 25 bp, Homo sapien
tagttgcatgtaagctcctcccaaa

SEQ ID NO: 3794044 - DNA, 25 bp, Homo sapien
cacagtgcctgatgtagttgcatgt

SEQ ID NO: 3794045 - DNA, 25 bp, Homo sapien
tgtagttgcatgtaagctcctccca

SEQ ID NO: 3794046 - DNA, 25 bp, Homo sapien
gttgcatgtaagctcctcccaaaaa

SEQ ID NO: 3794047 - DNA, 25 bp, Homo sapien
gcttctcctcattcacagggagtac

SEQ ID NO: 3794048 - DNA, 25 bp, Homo sapien
ttctcctcattcacagggagtacca

SEQ ID NO: 3794049 - DNA, 25 bp, Homo sapien
ccgcttctcctcattcacagggagt

SEQ ID NO: 3794050 - DNA, 25 bp, Homo sapien
tctcctcattcacagggagtaccat

SEQ ID NO: 3794051 - DNA, 25 bp, Homo sapien
atcagctctcctggcacccgctctt

SEQ ID NO: 3794052 - DNA, 25 bp, Homo sapien
tcttggccttaacgtccacgcctgg

SEQ ID NO: 3794053 - DNA, 25 bp, Homo sapien
tcccctgtgtatgcgcccatcttgg

SEQ ID NO: 3794054 - DNA, 25 bp, Homo sapien
gctcttgccgctccaatccactgtc

SEQ ID NO: 3794055 - DNA, 25 bp, Homo sapien
ctaagccctgtcaactttgcctcca

SEQ ID NO: 3794056 - DNA, 25 bp, Homo sapien
agccctgtcaactttgcctccaaga

SEQ ID NO: 3794057 - DNA, 25 bp, Homo sapien
ctgtcaactttgcctccaagagtac

SEQ ID NO: 3794058 - DNA, 25 bp, Homo sapien
gccctgtcaactttgcctccaagag

SEQ ID NO: 3794059 - DNA, 25 bp, Homo sapien
acactgaggacaggcacgatggctc

SEQ ID NO: 3794060 - DNA, 25 bp, Homo sapien
catttaaaaggacactgaggacagg

SEQ ID NO: 3794061 - DNA, 25 bp, Homo sapien
aaggacactgaggacaggcacgatg

SEQ ID NO: 3794062 - DNA, 25 bp, Homo sapien
ttaaaaggacactgaggacaggcac

SEQ ID NO: 3794063 - DNA, 25 bp, Homo sapien
gctgttcttggcaccggggaggagg

SEQ ID NO: 3794064 - DNA, 25 bp, Homo sapien
gaggagggttgaattttcagacttg

SEQ ID NO: 3794065 - DNA, 25 bp, Homo sapien
gagggttgaattttcagacttgtag

SEQ ID NO: 3794066 - DNA, 25 bp, Homo sapien
gggttgaattttcagacttgtagtc

SEQ ID NO: 3794067 - DNA, 25 bp, Homo sapien
cagaggctgggaatacggcccaagt

SEQ ID NO: 3794068 - DNA, 25 bp, Homo sapien
cgcagagggaccaatttgcagcctt

SEQ ID NO: 3794069 - DNA, 25 bp, Homo sapien
caaacccagttaattctccagcaag

SEQ ID NO: 3794070 - DNA, 25 bp, Homo sapien
accattcccggtgattgatgacgga

SEQ ID NO: 3794071 - DNA, 25 bp, Homo sapien
gctttgtgaaaccaatgatctgggc

SEQ ID NO: 3794072 - DNA, 25 bp, Homo sapien
tgcatttcagaagggaccactcgga

SEQ ID NO: 3794073 - DNA, 25 bp, Homo sapien
tacaactattacagggcttgcagcc

SEQ ID NO: 3794074 - DNA, 25 bp, Homo sapien
tcaggaaagccagctaccttcagag

SEQ ID NO: 3794075 - DNA, 25 bp, Homo sapien
ggaagttcccttgcctcacgaggca

SEQ ID NO: 3794076 - DNA, 25 bp, Homo sapien
gaaccccgtgagacactctgacaat

SEQ ID NO: 3794077 - DNA, 25 bp, Homo sapien
tacatagcgagtgtacagcagctgc

SEQ ID NO: 3794078 - DNA, 25 bp, Homo sapien
tttcaacaagtagcgactgagagtc

SEQ ID NO: 3794079 - DNA, 25 bp, Homo sapien
ccatgtagggtgtaggtaaagatgc

SEQ ID NO: 3794080 - DNA, 25 bp, Homo sapien
taccatgtagggtgtaggtaaagat

SEQ ID NO: 3794081 - DNA, 25 bp, Homo sapien
ctgtaccatgtagggtgtaggtaaa

SEQ ID NO: 3794082 - DNA, 25 bp, Homo sapien
catgtagggtgtaggtaaagatgca

SEQ ID NO: 3794083 - DNA, 25 bp, Homo sapien
gactggtgtcctcctaagatgagaa

SEQ ID NO: 3794084 - DNA, 25 bp, Homo sapien
tgtgactgctatcaaggacagggtc

SEQ ID NO: 3794085 - DNA, 25 bp, Homo sapien
cagtgaggttattagagtgagtccc

SEQ ID NO: 3794086 - DNA, 25 bp, Homo sapien
tagggtccactacgggctgaactgt

SEQ ID NO: 3794087 - DNA, 25 bp, Homo sapien
ccagtagttaaatggtccatgaagc

SEQ ID NO: 3794088 - DNA, 25 bp, Homo sapien
cagtggctttgggtccatgaggacc

SEQ ID NO: 3794089 - DNA, 25 bp, Homo sapien
gctttgggtccatgaggaccacagg

SEQ ID NO: 3794090 - DNA, 25 bp, Homo sapien
agtagttaaatggtccatgaagccc

SEQ ID NO: 3794091 - DNA, 25 bp, Homo sapien
tgatttgcttctttctcagcggcat

SEQ ID NO: 3794092 - DNA, 25 bp, Homo sapien
gctgatttgcttctttctcagcggc

SEQ ID NO: 3794093 - DNA, 25 bp, Homo sapien
aggctgatttgcttctttctcagcg

SEQ ID NO: 3794094 - DNA, 25 bp, Homo sapien
tttaggctgatttgcttctttctca

SEQ ID NO: 3794095 - DNA, 25 bp, Homo sapien
gaattaaggattttgatctcgcatg

SEQ ID NO: 3794096 - DNA, 25 bp, Homo sapien
catgtatttcgggtaattcgcacag

SEQ ID NO: 3794097 - DNA, 25 bp, Homo sapien
gttcaacaatgttaccaagcctccc

SEQ ID NO: 3794098 - DNA, 25 bp, Homo sapien
caagcctccctcttttaagacgtat

SEQ ID NO: 3794099 - DNA, 25 bp, Homo sapien
cgcagtctgcacgttttgttgtaaa

SEQ ID NO: 3794100 - DNA, 25 bp, Homo sapien
tgacatcgtaaaacagcgggccctt

SEQ ID NO: 3794101 - DNA, 25 bp, Homo sapien
gaaaattactagcttcgaagagtcc

SEQ ID NO: 3794102 - DNA, 25 bp, Homo sapien
aagagtcctctgtgtacgacgcagt

SEQ ID NO: 3794103 - DNA, 25 bp, Homo sapien
acagttgggtccttgctagggtctg

SEQ ID NO: 3794104 - DNA, 25 bp, Homo sapien
gtccttaaagaatgaggtgcaccca

SEQ ID NO: 3794105 - DNA, 25 bp, Homo sapien
cagcatagcagaaatgaagactagg

SEQ ID NO: 3794106 - DNA, 25 bp, Homo sapien
ccagccttcaaaggttcagcatagc

SEQ ID NO: 3794107 - DNA, 25 bp, Homo sapien
gcacttcattacagtaggcggtgat

SEQ ID NO: 3794108 - DNA, 25 bp, Homo sapien
taggcggtgatgtatttgcaatatc

SEQ ID NO: 3794109 - DNA, 25 bp, Homo sapien
agcatttatttggatgcacttcatt

SEQ ID NO: 3794110 - DNA, 25 bp, Homo sapien
tatcgtttgatagcttcaacggctc

SEQ ID NO: 3794111 - DNA, 25 bp, Homo sapien
cagttccagttcctgctgatcttgc

SEQ ID NO: 3794112 - DNA, 25 bp, Homo sapien
gatcttgctgaagccagtaacaccc

SEQ ID NO: 3794113 - DNA, 25 bp, Homo sapien
gaagccagtaacacccttgcttctt

SEQ ID NO: 3794114 - DNA, 25 bp, Homo sapien
gctgatcttgctgaagccagtaaca

SEQ ID NO: 3794115 - DNA, 25 bp, Homo sapien
aaatttcaaggcaggaattagcaga

SEQ ID NO: 3794116 - DNA, 25 bp, Homo sapien
gatgctgaattgaactattatctcc

SEQ ID NO: 3794117 - DNA, 25 bp, Homo sapien
ccaactccactgatgatttacaaat

SEQ ID NO: 3794118 - DNA, 25 bp, Homo sapien
tgaagaaggtacgttccctcttggc

SEQ ID NO: 3794119 - DNA, 25 bp, Homo sapien
caggaagagtggctccacgggtcca

SEQ ID NO: 3794120 - DNA, 25 bp, Homo sapien
tatgtctccaggacgccaggttcat

SEQ ID NO: 3794121 - DNA, 25 bp, Homo sapien
aaacagatgtcctggtatgtctcca

SEQ ID NO: 3794122 - DNA, 25 bp, Homo sapien
tcatttcgacactgctcaaaaggga

SEQ ID NO: 3794123 - DNA, 25 bp, Homo sapien
tgcggctaagtttgcgaacacatcc

SEQ ID NO: 3794124 - DNA, 25 bp, Homo sapien
tatttatagagtgccttctgcggct

SEQ ID NO: 3794125 - DNA, 25 bp, Homo sapien
gaattgccgggtcaaagcacaaacg

SEQ ID NO: 3794126 - DNA, 25 bp, Homo sapien
taccagcctggtatgagactgtctg

SEQ ID NO: 3794127 - DNA, 25 bp, Homo sapien
gagggcctcatttagaatgtgtcaa

SEQ ID NO: 3794128 - DNA, 25 bp, Homo sapien
cacctgctaagtatatttgtctggg

SEQ ID NO: 3794129 - DNA, 25 bp, Homo sapien
aagagccgtcaattccccacatatc

SEQ ID NO: 3794130 - DNA, 25 bp, Homo sapien
gagctgccctgcacaacaaggaggg

SEQ ID NO: 3794131 - DNA, 25 bp, Homo sapien
gcgtgagcccggtggttgcattttt

SEQ ID NO: 3794132 - DNA, 25 bp, Homo sapien
ccctttgcagctcttatcacagtaa

SEQ ID NO: 3794133 - DNA, 25 bp, Homo sapien
tagattaagatgtcactcactcaga

SEQ ID NO: 3794134 - DNA, 25 bp, Homo sapien
gctctcccacacatggatgggtaga

SEQ ID NO: 3794135 - DNA, 25 bp, Homo sapien
ctggcttcctacttagccagttctg

SEQ ID NO: 3794136 - DNA, 25 bp, Homo sapien
gttctctcctaagccctcagctatg

SEQ ID NO: 3794137 - DNA, 25 bp, Homo sapien
ccagttctctcctaagccctcagct

SEQ ID NO: 3794138 - DNA, 25 bp, Homo sapien
ggcttcctacttagccagttctgct

SEQ ID NO: 3794139 - DNA, 25 bp, Homo sapien
gtcctgtactgtaccatagaaatct

SEQ ID NO: 3794140 - DNA, 25 bp, Homo sapien
cattgtcctgtactgtaccatagaa

SEQ ID NO: 3794141 - DNA, 25 bp, Homo sapien
ctgtggacaccctgaaattgaatgg

SEQ ID NO: 3794142 - DNA, 25 bp, Homo sapien
ttgcattgtcctgtactgtaccata

SEQ ID NO: 3794143 - DNA, 25 bp, Homo sapien
caggccgccacccatacctcaggag

SEQ ID NO: 3794144 - DNA, 25 bp, Homo sapien
gccacccatacctcaggagctgttg

SEQ ID NO: 3794145 - DNA, 25 bp, Homo sapien
caggtgtacatgtggaaagaggcag

SEQ ID NO: 3794146 - DNA, 25 bp, Homo sapien
ccgccacccatacctcaggagctgt

SEQ ID NO: 3794147 - DNA, 25 bp, Homo sapien
tcagcaactactgggtggcatccct

SEQ ID NO: 3794148 - DNA, 25 bp, Homo sapien
cacatgctcgctgcattcaaggata

SEQ ID NO: 3794149 - DNA, 25 bp, Homo sapien
cactggctgcaatgatttaacgacc

SEQ ID NO: 3794150 - DNA, 25 bp, Homo sapien
ttaacgaccaccagacagccatcag

SEQ ID NO: 3794151 - DNA, 25 bp, Homo sapien
atctgcatctggtgaatcaggacca

SEQ ID NO: 3794152 - DNA, 25 bp, Homo sapien
gtgaatcaggaccagataatgccaa

SEQ ID NO: 3794153 - DNA, 25 bp, Homo sapien
ccagataatgccaataggacactta

SEQ ID NO: 3794154 - DNA, 25 bp, Homo sapien
cagataatgccaataggacacttag

SEQ ID NO: 3794155 - DNA, 25 bp, Homo sapien
tttgcagttcagagcacttcaggtt

SEQ ID NO: 3794156 - DNA, 25 bp, Homo sapien
tctgatggccaggtatgttgtttgc

SEQ ID NO: 3794157 - DNA, 25 bp, Homo sapien
gcacttcaggttaatgtagcgctta

SEQ ID NO: 3794158 - DNA, 25 bp, Homo sapien
ccaggtatgttgtttgcagttcaga

SEQ ID NO: 3794159 - DNA, 25 bp, Homo sapien
gcagaagaagcctgaatgccatcag

SEQ ID NO: 3794160 - DNA, 25 bp, Homo sapien
cctgaatgccatcagcacagggaga

SEQ ID NO: 3794161 - DNA, 25 bp, Homo sapien
tctgggcgaggatggcagcccacca

SEQ ID NO: 3794162 - DNA, 25 bp, Homo sapien
tgaggatggggcgtggtgtgcctct

SEQ ID NO: 3794163 - DNA, 25 bp, Homo sapien
ctgttccctctaacaagtctaaact

SEQ ID NO: 3794164 - DNA, 25 bp, Homo sapien
tctaaacttgatttcagcggttcca

SEQ ID NO: 3794165 - DNA, 25 bp, Homo sapien
cactaggaaaatcatcgccattctc

SEQ ID NO: 3794166 - DNA, 25 bp, Homo sapien
gcagttaacatgtttgaggcgcctt

SEQ ID NO: 3794167 - DNA, 25 bp, Homo sapien
gcccagtgacccctgagcatttcat

SEQ ID NO: 3794168 - DNA, 25 bp, Homo sapien
ctctgtgtaaaactttaatctcacg

SEQ ID NO: 3794169 - DNA, 25 bp, Homo sapien
tgtcctctcaagtccaactctgtgt

SEQ ID NO: 3794170 - DNA, 25 bp, Homo sapien
taatctcacgtacagtataagacgc

SEQ ID NO: 3794171 - DNA, 25 bp, Homo sapien
agagaatggccgtcactctcaggcc

SEQ ID NO: 3794172 - DNA, 25 bp, Homo sapien
tggctttggcaccaactctcccaca

SEQ ID NO: 3794173 - DNA, 25 bp, Homo sapien
ctcccaaggcatcagatgaggagct

SEQ ID NO: 3794174 - DNA, 25 bp, Homo sapien
tcactcccaaggcatcagatgagga

SEQ ID NO: 3794175 - DNA, 25 bp, Homo sapien
acactcactcccaaggcatcagatg

SEQ ID NO: 3794176 - DNA, 25 bp, Homo sapien
ctttgcctgtagcctgacttgccga

SEQ ID NO: 3794177 - DNA, 25 bp, Homo sapien
ttgcctgtagcctgacttgccgaaa

SEQ ID NO: 3794178 - DNA, 25 bp, Homo sapien
tttgcctgtagcctgacttgccgaa

SEQ ID NO: 3794179 - DNA, 25 bp, Homo sapien
tgcctgtagcctgacttgccgaaac

SEQ ID NO: 3794180 - DNA, 25 bp, Homo sapien
tggaaccatgcagggccaattaatg

SEQ ID NO: 3794181 - DNA, 25 bp, Homo sapien
cagtagcaacttaggaacaaaatgg

SEQ ID NO: 3794182 - DNA, 25 bp, Homo sapien
catgtggacatggaaattgggccat

SEQ ID NO: 3794183 - DNA, 25 bp, Homo sapien
tatgtgtgtgctgaacttgcattcc

SEQ ID NO: 3794184 - DNA, 25 bp, Homo sapien
tactaatcatgacacaggggagcag

SEQ ID NO: 3794185 - DNA, 25 bp, Homo sapien
tgcatactaatcatgacacagggga

SEQ ID NO: 3794186 - DNA, 25 bp, Homo sapien
ttttcgggaagctccagacgcacat

SEQ ID NO: 3794187 - DNA, 25 bp, Homo sapien
cagggaacatgctggccttttcggg

SEQ ID NO: 3794188 - DNA, 25 bp, Homo sapien
gtggctggtgttttgccagatgcct

SEQ ID NO: 3794189 - DNA, 25 bp, Homo sapien
tggctggtgttttgccagatgccta

SEQ ID NO: 3794190 - DNA, 25 bp, Homo sapien
gggcaggcagagaggtggtgaggag

SEQ ID NO: 3794191 - DNA, 25 bp, Homo sapien
agaggtggtgaggagccatcatcaa

SEQ ID NO: 3794192 - DNA, 25 bp, Homo sapien
gtggtgaggagccatcatcaaccat

SEQ ID NO: 3794193 - DNA, 25 bp, Homo sapien
aggtggtgaggagccatcatcaacc

SEQ ID NO: 3794194 - DNA, 25 bp, Homo sapien
agggatcgtagggacacatagctcc

SEQ ID NO: 3794195 - DNA, 25 bp, Homo sapien
cagggatcgtagggacacatagctc

SEQ ID NO: 3794196 - DNA, 25 bp, Homo sapien
aactggaagctttcatgccaatcat

SEQ ID NO: 3794197 - DNA, 25 bp, Homo sapien
ccagtttcagttaaaccattgtcca

SEQ ID NO: 3794198 - DNA, 25 bp, Homo sapien
tcccagtttcagttaaaccattgtc

SEQ ID NO: 3794199 - DNA, 25 bp, Homo sapien
ggaagctttcatgccaatcatttct

SEQ ID NO: 3794200 - DNA, 25 bp, Homo sapien
tcactggttcaaccttgaggacatg

SEQ ID NO: 3794201 - DNA, 25 bp, Homo sapien
caaccttgaggacatggcttgttcc

SEQ ID NO: 3794202 - DNA, 25 bp, Homo sapien
gacaggatggtacttgtggatttga

SEQ ID NO: 3794203 - DNA, 25 bp, Homo sapien
tggcttgttccgtatctctttcagt

SEQ ID NO: 3794204 - DNA, 25 bp, Homo sapien
cactcaattcgtagatatgtatgca

SEQ ID NO: 3794205 - DNA, 25 bp, Homo sapien
aaactcatcactcaattcgtagata

SEQ ID NO: 3794206 - DNA, 25 bp, Homo sapien
cattgggcacttggccctttgctag

SEQ ID NO: 3794207 - DNA, 25 bp, Homo sapien
ctgtgggcaagttgatctgttcatg

SEQ ID NO: 3794208 - DNA, 25 bp, Homo sapien
gactctaaaattcatggcgggcaat

SEQ ID NO: 3794209 - DNA, 25 bp, Homo sapien
ctacacagaagttgccctattcagg

SEQ ID NO: 3794210 - DNA, 25 bp, Homo sapien
ggcgggcaatctatcttaatgagct

SEQ ID NO: 3794211 - DNA, 25 bp, Homo sapien
catgctcttctggtaggactctaaa

SEQ ID NO: 3794212 - DNA, 25 bp, Homo sapien
ccgcaatggacgctgaaggggtcta

SEQ ID NO: 3794213 - DNA, 25 bp, Homo sapien
cagatgtcttacagccagaagcccc

SEQ ID NO: 3794214 - DNA, 25 bp, Homo sapien
gattgtcctcctagcagatgtctta

SEQ ID NO: 3794215 - DNA, 25 bp, Homo sapien
gggtctagggattgtcctcctagca

SEQ ID NO: 3794216 - DNA, 25 bp, Homo sapien
gcggcggcggacacgcgacccggta

SEQ ID NO: 3794217 - DNA, 25 bp, Homo sapien
aaaataatctggtgcgcgagggagc

SEQ ID NO: 3794218 - DNA, 25 bp, Homo sapien
gctgcttggagaaccacttcagggc

SEQ ID NO: 3794219 - DNA, 25 bp, Homo sapien
tctgcctgggcaagaagctcggagt

SEQ ID NO: 3794220 - DNA, 25 bp, Homo sapien
cagacggccagcaagagcgcttgta

SEQ ID NO: 3794221 - DNA, 25 bp, Homo sapien
gacggctgaatggaagatgccctga

SEQ ID NO: 3794222 - DNA, 25 bp, Homo sapien
cagtgctactgtgatcgaatggagg

SEQ ID NO: 3794223 - DNA, 25 bp, Homo sapien
tgagtgtcccttggctgagacggct

SEQ ID NO: 3794224 - DNA, 25 bp, Homo sapien
tgttatgctacagatgcccacggca

SEQ ID NO: 3794225 - DNA, 25 bp, Homo sapien
cccgctatgcacacagtttggtctg

SEQ ID NO: 3794226 - DNA, 25 bp, Homo sapien
agtggaaactttctgcgggattcag

SEQ ID NO: 3794227 - DNA, 25 bp, Homo sapien
caactgcaattcatctaaggatcca

SEQ ID NO: 3794228 - DNA, 25 bp, Homo sapien
tgacattgacacctcttgtcctgct

SEQ ID NO: 3794229 - DNA, 25 bp, Homo sapien
cagtgtactgcctttatttggatcc

SEQ ID NO: 3794230 - DNA, 25 bp, Homo sapien
aatcaatcataggaagtgtaccact

SEQ ID NO: 3794231 - DNA, 25 bp, Homo sapien
tatcaatcaatcacagtgtactgcc

SEQ ID NO: 3794232 - DNA, 25 bp, Homo sapien
tcctaaaggaggaagctatgcaaat

SEQ ID NO: 3794233 - DNA, 25 bp, Homo sapien
agggccagacactcactaattgtgt

SEQ ID NO: 3794234 - DNA, 25 bp, Homo sapien
cactcactaattgtgttagccactc

SEQ ID NO: 3794235 - DNA, 25 bp, Homo sapien
cagacactcactaattgtgttagcc

SEQ ID NO: 3794236 - DNA, 25 bp, Homo sapien
ccctctgtccaatacaatccattct

SEQ ID NO: 3794237 - DNA, 25 bp, Homo sapien
ggagtatcttcattgatttggtcag

SEQ ID NO: 3794238 - DNA, 25 bp, Homo sapien
tttggtcagcgaccacgccagtctc

SEQ ID NO: 3794239 - DNA, 25 bp, Homo sapien
tcattgatttggtcagcgaccacgc

SEQ ID NO: 3794240 - DNA, 25 bp, Homo sapien
tatcttcattgatttggtcagcgac

SEQ ID NO: 3794241 - DNA, 25 bp, Homo sapien
tgtgttctccgggaaatttcagcca

SEQ ID NO: 3794242 - DNA, 25 bp, Homo sapien
gtcaccagggcattcacgaacacaa

SEQ ID NO: 3794243 - DNA, 25 bp, Homo sapien
tccgggaaatttcagccatacgtga

SEQ ID NO: 3794244 - DNA, 25 bp, Homo sapien
gactcttgtcaccagggcattcacg

SEQ ID NO: 3794245 - DNA, 25 bp, Homo sapien
cttttgttttgatcttccttcagag

SEQ ID NO: 3794246 - DNA, 25 bp, Homo sapien
cagagccaccttcatttccaaaaga

SEQ ID NO: 3794247 - DNA, 25 bp, Homo sapien
gagccaccttcatttccaaaagaca

SEQ ID NO: 3794248 - DNA, 25 bp, Homo sapien
ttgttttgatcttccttcagagcca

SEQ ID NO: 3794249 - DNA, 25 bp, Homo sapien
cataacagatgatccacacgagatc

SEQ ID NO: 3794250 - DNA, 25 bp, Homo sapien
tccacacgagatcaacattgcttat

SEQ ID NO: 3794251 - DNA, 25 bp, Homo sapien
tgatccacacgagatcaacattgct

SEQ ID NO: 3794252 - DNA, 25 bp, Homo sapien
cagatgatccacacgagatcaacat

SEQ ID NO: 3794253 - DNA, 25 bp, Homo sapien
ggccacgagccaaggcatgcaggag

SEQ ID NO: 3794254 - DNA, 25 bp, Homo sapien
aagaaggggccacgagccaaggcat

SEQ ID NO: 3794255 - DNA, 25 bp, Homo sapien
tggaagaaggggccacgagccaagg

SEQ ID NO: 3794256 - DNA, 25 bp, Homo sapien
gggccacgagccaaggcatgcagga

SEQ ID NO: 3794257 - DNA, 25 bp, Homo sapien
taacatgttgaacacgaagcacgtg

SEQ ID NO: 3794258 - DNA, 25 bp, Homo sapien
tccttcctttaagctggacttgcag

SEQ ID NO: 3794259 - DNA, 25 bp, Homo sapien
gaagcacgtgaagatgtctagtcca

SEQ ID NO: 3794260 - DNA, 25 bp, Homo sapien
agcatggcactactgatacaaaaac

SEQ ID NO: 3794261 - DNA, 25 bp, Homo sapien
tcccttggctgtgaaaacccagaaa

SEQ ID NO: 3794262 - DNA, 25 bp, Homo sapien
ttcccttggctgtgaaaacccagaa

SEQ ID NO: 3794263 - DNA, 25 bp, Homo sapien
ctttcccttggctgtgaaaacccag

SEQ ID NO: 3794264 - DNA, 25 bp, Homo sapien
tttcccttggctgtgaaaacccaga

SEQ ID NO: 3794265 - DNA, 25 bp, Homo sapien
gtctggacatctgtacccgtagtaa

SEQ ID NO: 3794266 - DNA, 25 bp, Homo sapien
tctcagagtcccctgaggaacttgt

SEQ ID NO: 3794267 - DNA, 25 bp, Homo sapien
ccgtagtaagggtctcagatgatga

SEQ ID NO: 3794268 - DNA, 25 bp, Homo sapien
aattttccgggatgggtgtgtctca

SEQ ID NO: 3794269 - DNA, 25 bp, Homo sapien
tgtcaagcaacaatagcagggtatg

SEQ ID NO: 3794270 - DNA, 25 bp, Homo sapien
aaatggagaagtgctcagccatctc

SEQ ID NO: 3794271 - DNA, 25 bp, Homo sapien
taatattgtctatacctggagccaa

SEQ ID NO: 3794272 - DNA, 25 bp, Homo sapien
gcccaattaagtgcctgagttctca

SEQ ID NO: 3794273 - DNA, 25 bp, Homo sapien
gaggagacccatgtctttccaatat

SEQ ID NO: 3794274 - DNA, 25 bp, Homo sapien
cagaagctaaacctgaaacacggca

SEQ ID NO: 3794275 - DNA, 25 bp, Homo sapien
gaaaataagtcagtagaggagaccc

SEQ ID NO: 3794276 - DNA, 25 bp, Homo sapien
caaaagccacgattcagaaaacgcc

SEQ ID NO: 3794277 - DNA, 25 bp, Homo sapien
caggcaatcgtgactgcaaatgtat

SEQ ID NO: 3794278 - DNA, 25 bp, Homo sapien
ggcaatcgtgactgcaaatgtattt

SEQ ID NO: 3794279 - DNA, 25 bp, Homo sapien
gcaatcgtgactgcaaatgtatttt

SEQ ID NO: 3794280 - DNA, 25 bp, Homo sapien
ccaggcaatcgtgactgcaaatgta

SEQ ID NO: 3794281 - DNA, 25 bp, Homo sapien
cttagtcttgcccttcactgtgagg

SEQ ID NO: 3794282 - DNA, 25 bp, Homo sapien
gagagcatgacttcacggcttcaat

SEQ ID NO: 3794283 - DNA, 25 bp, Homo sapien
ggcttcaatatcaacaaatgcggag

SEQ ID NO: 3794284 - DNA, 25 bp, Homo sapien
ggctgccacagtaccatcaacaagt

SEQ ID NO: 3794285 - DNA, 25 bp, Homo sapien
caggtaggatcaaggatttcaagca

SEQ ID NO: 3794286 - DNA, 25 bp, Homo sapien
agcttgtatcacacccactggggca

SEQ ID NO: 3794287 - DNA, 25 bp, Homo sapien
cacattaagtctgtgtctcaaagca

SEQ ID NO: 3794288 - DNA, 25 bp, Homo sapien
gggcaccttgtaaagaatacagact

SEQ ID NO: 3794289 - DNA, 25 bp, Homo sapien
gaatggaaatgctgcatcataaggc

SEQ ID NO: 3794290 - DNA, 25 bp, Homo sapien
cactggtatacaagtatctgtgcaa

SEQ ID NO: 3794291 - DNA, 25 bp, Homo sapien
ttattcctcacatttcagcccctgg

SEQ ID NO: 3794292 - DNA, 25 bp, Homo sapien
cacaatgttatacaaccatcgctgc

SEQ ID NO: 3794293 - DNA, 25 bp, Homo sapien
ccatgtacccaaagcagacaaacaa

SEQ ID NO: 3794294 - DNA, 25 bp, Homo sapien
gaaggcctagccatgtacccaaagc

SEQ ID NO: 3794295 - DNA, 25 bp, Homo sapien
ggcctagccatgtacccaaagcaga

SEQ ID NO: 3794296 - DNA, 25 bp, Homo sapien
gagcattcccaacacctattctatt

SEQ ID NO: 3794297 - DNA, 25 bp, Homo sapien
gcactccaggcatatggcattcaca

SEQ ID NO: 3794298 - DNA, 25 bp, Homo sapien
tggattcagaacctacaatgaggct

SEQ ID NO: 3794299 - DNA, 25 bp, Homo sapien
taatccttgaccaatgagaagtgca

SEQ ID NO: 3794300 - DNA, 25 bp, Homo sapien
catctgctttgggtacacgattccc

SEQ ID NO: 3794301 - DNA, 25 bp, Homo sapien
tgctgttgctgccgaaagtgtcccc

SEQ ID NO: 3794302 - DNA, 25 bp, Homo sapien
attgctgttgctgccgaaagtgtcc

SEQ ID NO: 3794303 - DNA, 25 bp, Homo sapien
gctgttgctgccgaaagtgtccccc

SEQ ID NO: 3794304 - DNA, 25 bp, Homo sapien
tgttgctgccgaaagtgtcccccat

SEQ ID NO: 3794305 - DNA, 25 bp, Homo sapien
ggtatctacatgctgtggtaactgc

SEQ ID NO: 3794306 - DNA, 25 bp, Homo sapien
ctgtggtaaccgtatctgtggtatc

SEQ ID NO: 3794307 - DNA, 25 bp, Homo sapien
aactgcatcatgcattcgcatgatt

SEQ ID NO: 3794308 - DNA, 25 bp, Homo sapien
gcatcatgcattcgcatgattctat

SEQ ID NO: 3794309 - DNA, 25 bp, Homo sapien
ggaattcaagctgcttcatgtcaca

SEQ ID NO: 3794310 - DNA, 25 bp, Homo sapien
ctcaggaattcaagctgcttcatgt

SEQ ID NO: 3794311 - DNA, 25 bp, Homo sapien
gctcaggaattcaagctgcttcatg

SEQ ID NO: 3794312 - DNA, 25 bp, Homo sapien
agaagttagatcagcatctggcaca

SEQ ID NO: 3794313 - DNA, 25 bp, Homo sapien
aacaaaaatgctgtgaaagataaat

SEQ ID NO: 3794314 - DNA, 25 bp, Homo sapien
gttaagaagttagatcagcatctgg

SEQ ID NO: 3794315 - DNA, 25 bp, Homo sapien
gaattcaataaatggcagatatctt

SEQ ID NO: 3794316 - DNA, 25 bp, Homo sapien
tcattttgtgagcattgggatcacc

SEQ ID NO: 3794317 - DNA, 25 bp, Homo sapien
acagcaagtctatagaaacattttc

SEQ ID NO: 3794318 - DNA, 25 bp, Homo sapien
acattttcctccacaaacaaggaca

SEQ ID NO: 3794319 - DNA, 25 bp, Homo sapien
tagcaaagggaagaacagcaagtct

SEQ ID NO: 3794320 - DNA, 25 bp, Homo sapien
caatgctattccgatcttgtgcaaa

SEQ ID NO: 3794321 - DNA, 25 bp, Homo sapien
tagaagccacttatagctccaaagc

SEQ ID NO: 3794322 - DNA, 25 bp, Homo sapien
tcttgtgcaaattagaagccactta

SEQ ID NO: 3794323 - DNA, 25 bp, Homo sapien
tcttcaatgctattccgatcttgtg

SEQ ID NO: 3794324 - DNA, 25 bp, Homo sapien
cctgggagagtatagagctggatta

SEQ ID NO: 3794325 - DNA, 25 bp, Homo sapien
ctcagtcaggtgaaaaatcagtcaa

SEQ ID NO: 3794326 - DNA, 25 bp, Homo sapien
tcaggtgaaaaatcagtcaaaatac

SEQ ID NO: 3794327 - DNA, 25 bp, Homo sapien
tatagagctggattagtgcaaattc

SEQ ID NO: 3794328 - DNA, 25 bp, Homo sapien
ctaaagtgcaggtaagagaatcgac

SEQ ID NO: 3794329 - DNA, 25 bp, Homo sapien
tgttcagtgcacataatcaggactt

SEQ ID NO: 3794330 - DNA, 25 bp, Homo sapien
gaatcagttactgctcaataagcct

SEQ ID NO: 3794331 - DNA, 25 bp, Homo sapien
gagttggcaaaccactttcatgaag

SEQ ID NO: 3794332 - DNA, 25 bp, Homo sapien
gagctctaggctgctaacatcacat

SEQ ID NO: 3794333 - DNA, 25 bp, Homo sapien
cataatttcctatgaccaaaagcca

SEQ ID NO: 3794334 - DNA, 25 bp, Homo sapien
aacatcacataatttcctatgacca

SEQ ID NO: 3794335 - DNA, 25 bp, Homo sapien
cagcctcagctgtgagctctaggct

SEQ ID NO: 3794336 - DNA, 25 bp, Homo sapien
ctggagaacagcaggaacatctaag

SEQ ID NO: 3794337 - DNA, 25 bp, Homo sapien
gacctgacgttctagtaggatcttg

SEQ ID NO: 3794338 - DNA, 25 bp, Homo sapien
tgacgttctagtaggatcttgtaga

SEQ ID NO: 3794339 - DNA, 25 bp, Homo sapien
cctgacgttctagtaggatcttgta

SEQ ID NO: 3794340 - DNA, 25 bp, Homo sapien
tcagacctgacgttctagtaggatc

SEQ ID NO: 3794341 - DNA, 25 bp, Homo sapien
caatcgcttatgctcaaacaggatt

SEQ ID NO: 3794342 - DNA, 25 bp, Homo sapien
atcgcttatgctcaaacaggattcc

SEQ ID NO: 3794343 - DNA, 25 bp, Homo sapien
aatcgcttatgctcaaacaggattc

SEQ ID NO: 3794344 - DNA, 25 bp, Homo sapien
gattatgagcattattcttaagcaa

SEQ ID NO: 3794345 - DNA, 25 bp, Homo sapien
gcaacgtatatcagggttgatgtga

SEQ ID NO: 3794346 - DNA, 25 bp, Homo sapien
ttgatgtgagcctgttcttgaaaga

SEQ ID NO: 3794347 - DNA, 25 bp, Homo sapien
tattcttaagcaacgtatatcaggg

SEQ ID NO: 3794348 - DNA, 25 bp, Homo sapien
tctactgtaggacatgaagttgagg

SEQ ID NO: 3794349 - DNA, 25 bp, Homo sapien
gacaccaagggtttgctcacaggga

SEQ ID NO: 3794350 - DNA, 25 bp, Homo sapien
tttttggttgacagccaaggaagat

SEQ ID NO: 3794351 - DNA, 25 bp, Homo sapien
aagatgggaagtgatggttctgctc

SEQ ID NO: 3794352 - DNA, 25 bp, Homo sapien
gcagctgtctaggaggttttccata

SEQ ID NO: 3794353 - DNA, 25 bp, Homo sapien
cttgccgccagggtctgttagagtg

SEQ ID NO: 3794354 - DNA, 25 bp, Homo sapien
tgccggttgtaaatcagcccagtgt

SEQ ID NO: 3794355 - DNA, 25 bp, Homo sapien
ggtctgttagagtgtcaaggcagcc

SEQ ID NO: 3794356 - DNA, 25 bp, Homo sapien
gagtccctatttaataaacagtgct

SEQ ID NO: 3794357 - DNA, 25 bp, Homo sapien
aggagtccctatttaataaacagtg

SEQ ID NO: 3794358 - DNA, 25 bp, Homo sapien
ttaccattcaagacatagacatggg

SEQ ID NO: 3794359 - DNA, 25 bp, Homo sapien
gtccctatttaataaacagtgctgg

SEQ ID NO: 3794360 - DNA, 25 bp, Homo sapien
ccgcttcaatgagtggtcatgggca

SEQ ID NO: 3794361 - DNA, 25 bp, Homo sapien
tagacaggcttacttcacattgctg

SEQ ID NO: 3794362 - DNA, 25 bp, Homo sapien
taactatcaaaaagcacggcttcag

SEQ ID NO: 3794363 - DNA, 25 bp, Homo sapien
tgccttgaaaacttgaacaccgctt

SEQ ID NO: 3794364 - DNA, 25 bp, Homo sapien
ggtacactggctcctattatggaag

SEQ ID NO: 3794365 - DNA, 25 bp, Homo sapien
tcagaacacaaagggatggatgtcc

SEQ ID NO: 3794366 - DNA, 25 bp, Homo sapien
gactggagcttatgacaatgtggcc

SEQ ID NO: 3794367 - DNA, 25 bp, Homo sapien
tctgtagagtaattcagccttgcct

SEQ ID NO: 3794368 - DNA, 25 bp, Homo sapien
ggtcaaattttaatgctgaccttag

SEQ ID NO: 3794369 - DNA, 25 bp, Homo sapien
ttaatgctgaccttagcagtttggg

SEQ ID NO: 3794370 - DNA, 25 bp, Homo sapien
ggtaatagcccatttaaagctttca

SEQ ID NO: 3794371 - DNA, 25 bp, Homo sapien
gctgaccttagcagtttgggataaa

SEQ ID NO: 3794372 - DNA, 25 bp, Homo sapien
tgctagcagggaaatgagtttcccc

SEQ ID NO: 3794373 - DNA, 25 bp, Homo sapien
tagcagggaaatgagtttccccata

SEQ ID NO: 3794374 - DNA, 25 bp, Homo sapien
cagggaaatgagtttccccataaag

SEQ ID NO: 3794375 - DNA, 25 bp, Homo sapien
acctgctagcagggaaatgagtttc

SEQ ID NO: 3794376 - DNA, 25 bp, Homo sapien
cgggagttctcctccattcgacctg

SEQ ID NO: 3794377 - DNA, 25 bp, Homo sapien
ggagttctcctccattcgacctgct

SEQ ID NO: 3794378 - DNA, 25 bp, Homo sapien
cacgggagttctcctccattcgacc

SEQ ID NO: 3794379 - DNA, 25 bp, Homo sapien
ttctcctccattcgacctgctccat

SEQ ID NO: 3794380 - DNA, 25 bp, Homo sapien
ttagggtgatgggagcagaggtcat

SEQ ID NO: 3794381 - DNA, 25 bp, Homo sapien
caagacagttagggtctgagcactg

SEQ ID NO: 3794382 - DNA, 25 bp, Homo sapien
cgatgattagggtgatgggagcaga

SEQ ID NO: 3794383 - DNA, 25 bp, Homo sapien
gcactgtcctggaaggcgatgatta

SEQ ID NO: 3794384 - DNA, 25 bp, Homo sapien
tggtttaggtacaggtgtgaactga

SEQ ID NO: 3794385 - DNA, 25 bp, Homo sapien
atcattgggatttggtttaggtaca

SEQ ID NO: 3794386 - DNA, 25 bp, Homo sapien
ggtacaggtgtgaactgattgaaaa

SEQ ID NO: 3794387 - DNA, 25 bp, Homo sapien
gatttggtttaggtacaggtgtgaa

SEQ ID NO: 3794388 - DNA, 25 bp, Homo sapien
ttttcttgactcctacagtaagtat

SEQ ID NO: 3794389 - DNA, 25 bp, Homo sapien
tttcatttttcttgactcctacagt

SEQ ID NO: 3794390 - DNA, 25 bp, Homo sapien
catttttcttgactcctacagtaag

SEQ ID NO: 3794391 - DNA, 25 bp, Homo sapien
tcatttttcttgactcctacagtaa

SEQ ID NO: 3794392 - DNA, 25 bp, Homo sapien
actcttcccaagttatcgacactgc

SEQ ID NO: 3794393 - DNA, 25 bp, Homo sapien
tgaactcttcccaagttatcgacac

SEQ ID NO: 3794394 - DNA, 25 bp, Homo sapien
gttatcgacactgcatttctcactg

SEQ ID NO: 3794395 - DNA, 25 bp, Homo sapien
tcccaagttatcgacactgcatttc

SEQ ID NO: 3794396 - DNA, 25 bp, Homo sapien
ggtcgaatagcctgcttttcgcata

SEQ ID NO: 3794397 - DNA, 25 bp, Homo sapien
gcttttcgcataaatcagggatgca

SEQ ID NO: 3794398 - DNA, 25 bp, Homo sapien
atttctgcatccaatgcataccaaa

SEQ ID NO: 3794399 - DNA, 25 bp, Homo sapien
gcataccaaacgtgacaccaatgca

SEQ ID NO: 3794400 - DNA, 25 bp, Homo sapien
tctgcagtgcctaactgtaaatgaa

SEQ ID NO: 3794401 - DNA, 25 bp, Homo sapien
cgcttccctgtcagcaataattgtg

SEQ ID NO: 3794402 - DNA, 25 bp, Homo sapien
ggccgcgccggatcttttaatttgc

SEQ ID NO: 3794403 - DNA, 25 bp, Homo sapien
gcgccggatcttttaatttgcactg

SEQ ID NO: 3794404 - DNA, 25 bp, Homo sapien
ccatcaggcgtaggcatttcacaca

SEQ ID NO: 3794405 - DNA, 25 bp, Homo sapien
cagtgaggacagcatggaatatcct

SEQ ID NO: 3794406 - DNA, 25 bp, Homo sapien
gagcggattctccaacatcatctcc

SEQ ID NO: 3794407 - DNA, 25 bp, Homo sapien
ctttgacttcaggagcggattctcc

SEQ ID NO: 3794408 - DNA, 25 bp, Homo sapien
ccctctttcctgtcacttcctccat

SEQ ID NO: 3794409 - DNA, 25 bp, Homo sapien
cccctctttcctgtcacttcctcca

SEQ ID NO: 3794410 - DNA, 25 bp, Homo sapien
aatgctgagtccgatcaaggaagct

SEQ ID NO: 3794411 - DNA, 25 bp, Homo sapien
tccgatcaaggaagctgtaagttcc

SEQ ID NO: 3794412 - DNA, 25 bp, Homo sapien
gaagctgtaagttccacttgcatga

SEQ ID NO: 3794413 - DNA, 25 bp, Homo sapien
ccacttgcatgagttctttgaccag

SEQ ID NO: 3794414 - DNA, 25 bp, Homo sapien
cagtaaatgctgtggatatcatgag

SEQ ID NO: 3794415 - DNA, 25 bp, Homo sapien
aacaagtactcatggtctaccaaca

SEQ ID NO: 3794416 - DNA, 25 bp, Homo sapien
tctaccaacacgacagtaaatgctg

SEQ ID NO: 3794417 - DNA, 25 bp, Homo sapien
tcgaccatcattatatccaacaagt

SEQ ID NO: 3794418 - DNA, 25 bp, Homo sapien
ggagacgaaacaaccctgagaggag

SEQ ID NO: 3794419 - DNA, 25 bp, Homo sapien
gagacgaaacaaccctgagaggaga

SEQ ID NO: 3794420 - DNA, 25 bp, Homo sapien
ctgggagacgaaacaaccctgagag

SEQ ID NO: 3794421 - DNA, 25 bp, Homo sapien
tgggagacgaaacaaccctgagagg

SEQ ID NO: 3794422 - DNA, 25 bp, Homo sapien
taaatgggcaatgattctgcacaga

SEQ ID NO: 3794423 - DNA, 25 bp, Homo sapien
caggtaggtcatggccacggacgtt

SEQ ID NO: 3794424 - DNA, 25 bp, Homo sapien
tgtccctgtgaagcgtaaatggtca

SEQ ID NO: 3794425 - DNA, 25 bp, Homo sapien
cacggacgtttctgttattaatgca

SEQ ID NO: 3794426 - DNA, 25 bp, Homo sapien
gggttgtgaaggcagtcgtgtgtcc

SEQ ID NO: 3794427 - DNA, 25 bp, Homo sapien
tgtgaaggcagtcgtgtgtcctcct

SEQ ID NO: 3794428 - DNA, 25 bp, Homo sapien
tgaaggcagtcgtgtgtcctcctgc

SEQ ID NO: 3794429 - DNA, 25 bp, Homo sapien
gtgtgattatgctctcgggccatct

SEQ ID NO: 3794430 - DNA, 25 bp, Homo sapien
tcaaattactcaccccatattcgct

SEQ ID NO: 3794431 - DNA, 25 bp, Homo sapien
tcaccccatattcgctgctaagaag

SEQ ID NO: 3794432 - DNA, 25 bp, Homo sapien
catattcgctgctaagaagccatcc

SEQ ID NO: 3794433 - DNA, 25 bp, Homo sapien
tgatggcggtgattcaaattactca

SEQ ID NO: 3794434 - DNA, 25 bp, Homo sapien
catagacgagcttgtgagtggcata

SEQ ID NO: 3794435 - DNA, 25 bp, Homo sapien
aaggttcctatctccaaatttggag

SEQ ID NO: 3794436 - DNA, 25 bp, Homo sapien
gataaagcattcctctcacaccaaa

SEQ ID NO: 3794437 - DNA, 25 bp, Homo sapien
tacgcaccgaagagatttatcaaat

SEQ ID NO: 3794438 - DNA, 25 bp, Homo sapien
caggggatggtgattcttaaggatg

SEQ ID NO: 3794439 - DNA, 25 bp, Homo sapien
tcaggggatggtgattcttaaggat

SEQ ID NO: 3794440 - DNA, 25 bp, Homo sapien
ccatggcatcccctgtagaagacac

SEQ ID NO: 3794441 - DNA, 25 bp, Homo sapien
tcccctgtagaagacacgagttcta

SEQ ID NO: 3794442 - DNA, 25 bp, Homo sapien
ctccttggacctctgaattcttgga

SEQ ID NO: 3794443 - DNA, 25 bp, Homo sapien
aagacacgagttctaaaccaacttg

SEQ ID NO: 3794444 - DNA, 25 bp, Homo sapien
aatgaatgacttcgcatggtaaccc

SEQ ID NO: 3794445 - DNA, 25 bp, Homo sapien
tgccctttgtatcaaacacgcagga

SEQ ID NO: 3794446 - DNA, 25 bp, Homo sapien
tggtaacccaaagcaaggacaggat

SEQ ID NO: 3794447 - DNA, 25 bp, Homo sapien
taaatagatgggcaaggcagcgtcg

SEQ ID NO: 3794448 - DNA, 25 bp, Homo sapien
tgtactgtaccatgattgcctggaa

SEQ ID NO: 3794449 - DNA, 25 bp, Homo sapien
gatgcatgttgtgtttgcgagcatg

SEQ ID NO: 3794450 - DNA, 25 bp, Homo sapien
atgaaccactctcccgctttaaatc

SEQ ID NO: 3794451 - DNA, 25 bp, Homo sapien
tgcgagcatgaaggaaattatataa

SEQ ID NO: 3794452 - DNA, 25 bp, Homo sapien
actttgtggccgaaataaccaagtg

SEQ ID NO: 3794453 - DNA, 25 bp, Homo sapien
ttgtggccgaaataaccaagtgaca

SEQ ID NO: 3794454 - DNA, 25 bp, Homo sapien
ttatggaaaccagtgtagcaaagac

SEQ ID NO: 3794455 - DNA, 25 bp, Homo sapien
ggaaaccagtgtagcaaagactttg

SEQ ID NO: 3794456 - DNA, 25 bp, Homo sapien
agtgtgttgtacaatagcgtgcaaa

SEQ ID NO: 3794457 - DNA, 25 bp, Homo sapien
gcagctgagtgccattggaagcaaa

SEQ ID NO: 3794458 - DNA, 25 bp, Homo sapien
caatagcgtgcaaagcagccagata

SEQ ID NO: 3794459 - DNA, 25 bp, Homo sapien
cagccagatatttgcctgtagcagc

SEQ ID NO: 3794460 - DNA, 25 bp, Homo sapien
gtgatgtttggctataacggcaaaa

SEQ ID NO: 3794461 - DNA, 25 bp, Homo sapien
cgaccttccttcctcgaattcgagg

SEQ ID NO: 3794462 - DNA, 25 bp, Homo sapien
caatgaagttgcactgccagtgtga

SEQ ID NO: 3794463 - DNA, 25 bp, Homo sapien
aattcgagggtgaaggtcaatgaag

SEQ ID NO: 3794464 - DNA, 25 bp, Homo sapien
tacaatagaaaacatgtaggcattg

SEQ ID NO: 3794465 - DNA, 25 bp, Homo sapien
ggcattggctcccatcctatgaaag

SEQ ID NO: 3794466 - DNA, 25 bp, Homo sapien
cacaattttagctttacctgatttc

SEQ ID NO: 3794467 - DNA, 25 bp, Homo sapien
ttagctttacctgatttcaaatgca

SEQ ID NO: 3794468 - DNA, 25 bp, Homo sapien
actgacattggattgtcctaaacta

SEQ ID NO: 3794469 - DNA, 25 bp, Homo sapien
tgacattggattgtcctaaactact

SEQ ID NO: 3794470 - DNA, 25 bp, Homo sapien
tctacctgccatactgacattggat

SEQ ID NO: 3794471 - DNA, 25 bp, Homo sapien
acttctacctgccatactgacattg

SEQ ID NO: 3794472 - DNA, 25 bp, Homo sapien
tcgttcttatagctgaatgggaaaa

SEQ ID NO: 3794473 - DNA, 25 bp, Homo sapien
gccagtggcaataacagtctcttcg

SEQ ID NO: 3794474 - DNA, 25 bp, Homo sapien
gaaaatgttacttggtcgccttgca

SEQ ID NO: 3794475 - DNA, 25 bp, Homo sapien
cacaagagcagttggccaggatata

SEQ ID NO: 3794476 - DNA, 25 bp, Homo sapien
tcaatgcagcaatagctcagtgtct

SEQ ID NO: 3794477 - DNA, 25 bp, Homo sapien
taaagttggacctggcgaggtctca

SEQ ID NO: 3794478 - DNA, 25 bp, Homo sapien
tgccagttgctaacaggaatcccac

SEQ ID NO: 3794479 - DNA, 25 bp, Homo sapien
cagaaaataccctcttgcagttggt

SEQ ID NO: 3794480 - DNA, 25 bp, Homo sapien
tgggccctaaaccaaggactgctgg

SEQ ID NO: 3794481 - DNA, 25 bp, Homo sapien
tctaggaagctaacacaggagtcat

SEQ ID NO: 3794482 - DNA, 25 bp, Homo sapien
aatgcatggcgctgctaataccccg

SEQ ID NO: 3794483 - DNA, 25 bp, Homo sapien
tgacacatctcgaagctgagggccg

SEQ ID NO: 3794484 - DNA, 25 bp, Homo sapien
ttttaaaggacgatgaagcaccagg

SEQ ID NO: 3794485 - DNA, 25 bp, Homo sapien
gctgaggcgaggacaaacatctgct

SEQ ID NO: 3794486 - DNA, 25 bp, Homo sapien
tgttgggcccagatgcatgaaaccc

SEQ ID NO: 3794487 - DNA, 25 bp, Homo sapien
aaagtgacgggctacaattgcaacc

SEQ ID NO: 3794488 - DNA, 25 bp, Homo sapien
gatataagcctctatcagcgctgat

SEQ ID NO: 3794489 - DNA, 25 bp, Homo sapien
tgacccaagaagatagttgacatcc

SEQ ID NO: 3794490 - DNA, 25 bp, Homo sapien
ttcctgcaaggtcatcaagcccgtt

SEQ ID NO: 3794491 - DNA, 25 bp, Homo sapien
gacatccaataggtaaaggcaagac

SEQ ID NO: 3794492 - DNA, 25 bp, Homo sapien
gataatgcgatgaagtccacttgct

SEQ ID NO: 3794493 - DNA, 25 bp, Homo sapien
caggtgaatgcatgataatgcgatg

SEQ ID NO: 3794494 - DNA, 25 bp, Homo sapien
agcagatgcggtagccccaggcata

SEQ ID NO: 3794495 - DNA, 25 bp, Homo sapien
acttgctggaatcccgagggacaca

SEQ ID NO: 3794496 - DNA, 25 bp, Homo sapien
atgatgattggattcaaatcacatt

SEQ ID NO: 3794497 - DNA, 25 bp, Homo sapien
tgatgattggattcaaatcacattt

SEQ ID NO: 3794498 - DNA, 25 bp, Homo sapien
tcttcccatgatgacaccatgctga

SEQ ID NO: 3794499 - DNA, 25 bp, Homo sapien
gcatcttcccatgatgacaccatgc

SEQ ID NO: 3794500 - DNA, 25 bp, Homo sapien
agcatcttcccatgatgacaccatg

SEQ ID NO: 3794501 - DNA, 25 bp, Homo sapien
atcttcccatgatgacaccatgctg

SEQ ID NO: 3794502 - DNA, 25 bp, Homo sapien
caacaatttaggacattcaccccag

SEQ ID NO: 3794503 - DNA, 25 bp, Homo sapien
tggtccaggagacaaacaattacct

SEQ ID NO: 3794504 - DNA, 25 bp, Homo sapien
cagtaaaaggctacgttgggccacg

SEQ ID NO: 3794505 - DNA, 25 bp, Homo sapien
tatttaaggtactctatggtccagg

SEQ ID NO: 3794506 - DNA, 25 bp, Homo sapien
tctgagcactccccaaggattagat

SEQ ID NO: 3794507 - DNA, 25 bp, Homo sapien
ctgagcactccccaaggattagatg

SEQ ID NO: 3794508 - DNA, 25 bp, Homo sapien
tgagcactccccaaggattagatgt

SEQ ID NO: 3794509 - DNA, 25 bp, Homo sapien
gagcactccccaaggattagatgtt

SEQ ID NO: 3794510 - DNA, 25 bp, Homo sapien
tctgggttcagtataacttgtttga

SEQ ID NO: 3794511 - DNA, 25 bp, Homo sapien
ttgtttgaaggcttggcctgtgtct

SEQ ID NO: 3794512 - DNA, 25 bp, Homo sapien
gcttggcctgtgtctcttatttgat

SEQ ID NO: 3794513 - DNA, 25 bp, Homo sapien
gcagtaaggagcctgagggaaccct

SEQ ID NO: 3794514 - DNA, 25 bp, Homo sapien
tagatttatttccagacccggccac

SEQ ID NO: 3794515 - DNA, 25 bp, Homo sapien
tctacaaagtggttaaaggacacac

SEQ ID NO: 3794516 - DNA, 25 bp, Homo sapien
tatgtgcccttagtcctagaagtca

SEQ ID NO: 3794517 - DNA, 25 bp, Homo sapien
ggaaatataagtgcctccctcatga

SEQ ID NO: 3794518 - DNA, 25 bp, Homo sapien
ccacgtcctctggggcatgtctctc

SEQ ID NO: 3794519 - DNA, 25 bp, Homo sapien
acgtcctctggggcatgtctctcca

SEQ ID NO: 3794520 - DNA, 25 bp, Homo sapien
cctccactgtgtcttgctcttggtc

SEQ ID NO: 3794521 - DNA, 25 bp, Homo sapien
tcctccactgtgtcttgctcttggt

SEQ ID NO: 3794522 - DNA, 25 bp, Homo sapien
ctgttgaccatactctccttcctgt

SEQ ID NO: 3794523 - DNA, 25 bp, Homo sapien
gagaattcaacaccattgggcacaa

SEQ ID NO: 3794524 - DNA, 25 bp, Homo sapien
gaagaaatactctggacggctttta

SEQ ID NO: 3794525 - DNA, 25 bp, Homo sapien
tcaacaatgtgggaaccgtttccta

SEQ ID NO: 3794526 - DNA, 25 bp, Homo sapien
caaatgaggccatgctcagcgttca

SEQ ID NO: 3794527 - DNA, 25 bp, Homo sapien
cagccatttttaattcgggtagctc

SEQ ID NO: 3794528 - DNA, 25 bp, Homo sapien
caacagccatttttaattcgggtag

SEQ ID NO: 3794529 - DNA, 25 bp, Homo sapien
ttaattcgggtagctcttgcattcc

SEQ ID NO: 3794530 - DNA, 25 bp, Homo sapien
tttttaattcgggtagctcttgcat

SEQ ID NO: 3794531 - DNA, 25 bp, Homo sapien
tgagtaacttcacattcagagggac

SEQ ID NO: 3794532 - DNA, 25 bp, Homo sapien
tgggaggaaacgatcgcctattaat

SEQ ID NO: 3794533 - DNA, 25 bp, Homo sapien
gcaagtcaaaaatagacatctcgga

SEQ ID NO: 3794534 - DNA, 25 bp, Homo sapien
ctaaaatagtgtctgtgcaaaagat

SEQ ID NO: 3794535 - DNA, 25 bp, Homo sapien
gcaaggggccatcggcatgctcaag

SEQ ID NO: 3794536 - DNA, 25 bp, Homo sapien
agtgcataggttttcacaacagagt

SEQ ID NO: 3794537 - DNA, 25 bp, Homo sapien
gatccagctgcccttgagtgcatag

SEQ ID NO: 3794538 - DNA, 25 bp, Homo sapien
cataggttttcacaacagagttgtc

SEQ ID NO: 3794539 - DNA, 25 bp, Homo sapien
gacgtaaaacatgggctatatcctg

SEQ ID NO: 3794540 - DNA, 25 bp, Homo sapien
ttccccagacttgggatgagacaga

SEQ ID NO: 3794541 - DNA, 25 bp, Homo sapien
tctcttcaagggctaaagctgtgag

SEQ ID NO: 3794542 - DNA, 25 bp, Homo sapien
cctgagtcagagataagcatccaat

SEQ ID NO: 3794543 - DNA, 25 bp, Homo sapien
caatgaccctttctatcacccggca

SEQ ID NO: 3794544 - DNA, 25 bp, Homo sapien
atgaccctttctatcacccggcagc

SEQ ID NO: 3794545 - DNA, 25 bp, Homo sapien
aatgaccctttctatcacccggcag

SEQ ID NO: 3794546 - DNA, 25 bp, Homo sapien
tctttttcgcatagtgcacgtggcc

SEQ ID NO: 3794547 - DNA, 25 bp, Homo sapien
catctggtgctcaatcaacgaagga

SEQ ID NO: 3794548 - DNA, 25 bp, Homo sapien
gatagggtaggcttcaactggagac

SEQ ID NO: 3794549 - DNA, 25 bp, Homo sapien
gattccaccggctatcaaagcagtg

SEQ ID NO: 3794550 - DNA, 25 bp, Homo sapien
tacttggaggagtggctaaaggcca

SEQ ID NO: 3794551 - DNA, 25 bp, Homo sapien
tccagaaagagttacacaagaggca

SEQ ID NO: 3794552 - DNA, 25 bp, Homo sapien
taaaggccaactggaattcatgcac

SEQ ID NO: 3794553 - DNA, 25 bp, Homo sapien
tttgaccacatcaagttgggtaggg

SEQ ID NO: 3794554 - DNA, 25 bp, Homo sapien
atgaatgcccattgcattccagaac

SEQ ID NO: 3794555 - DNA, 25 bp, Homo sapien
gaatgcccattgcattccagaactc

SEQ ID NO: 3794556 - DNA, 25 bp, Homo sapien
ccattgcattccagaactcttttag

SEQ ID NO: 3794557 - DNA, 25 bp, Homo sapien
attgcattccagaactcttttaggc

SEQ ID NO: 3794558 - DNA, 25 bp, Homo sapien
tttgtttcgttcaaggattaattga

SEQ ID NO: 3794559 - DNA, 25 bp, Homo sapien
tcaaggattaattgagcacttgctg

SEQ ID NO: 3794560 - DNA, 25 bp, Homo sapien
tttcgttcaaggattaattgagcac

SEQ ID NO: 3794561 - DNA, 25 bp, Homo sapien
tcgttcaaggattaattgagcactt

SEQ ID NO: 3794562 - DNA, 25 bp, Homo sapien
cttcgataagatgctagggttgtca

SEQ ID NO: 3794563 - DNA, 25 bp, Homo sapien
cgataagatgctagggttgtcagca

SEQ ID NO: 3794564 - DNA, 25 bp, Homo sapien
taagatgctagggttgtcagcatcc

SEQ ID NO: 3794565 - DNA, 25 bp, Homo sapien
agatgctagggttgtcagcatccat

SEQ ID NO: 3794566 - DNA, 25 bp, Homo sapien
ccaatgtttttgcaaactcttgcag

SEQ ID NO: 3794567 - DNA, 25 bp, Homo sapien
tcgccaaatgagacgcccaatgttt

SEQ ID NO: 3794568 - DNA, 25 bp, Homo sapien
cgcgccaaaacgctcgccaaatgag

SEQ ID NO: 3794569 - DNA, 25 bp, Homo sapien
gagacgcccaatgtttttgcaaact

SEQ ID NO: 3794570 - DNA, 25 bp, Homo sapien
tagcaatgtaaatgactccagtcat

SEQ ID NO: 3794571 - DNA, 25 bp, Homo sapien
ctagcaatgtaaatgactccagtca

SEQ ID NO: 3794572 - DNA, 25 bp, Homo sapien
aagtccgaggcaacagcaaacggca

SEQ ID NO: 3794573 - DNA, 25 bp, Homo sapien
cgggagaagtccgaggcaacagcaa

SEQ ID NO: 3794574 - DNA, 25 bp, Homo sapien
gaaaacacagcacgggagaagtccg

SEQ ID NO: 3794575 - DNA, 25 bp, Homo sapien
acacagcacgggagaagtccgaggc

SEQ ID NO: 3794576 - DNA, 25 bp, Homo sapien
tcggctgcaaagtgcctcctgtttc

SEQ ID NO: 3794577 - DNA, 25 bp, Homo sapien
tgtcggctgcaaagtgcctcctgtt

SEQ ID NO: 3794578 - DNA, 25 bp, Homo sapien
gctgcaaagtgcctcctgtttcctc

SEQ ID NO: 3794579 - DNA, 25 bp, Homo sapien
cggctgcaaagtgcctcctgtttcc

SEQ ID NO: 3794580 - DNA, 25 bp, Homo sapien
ctgaagggcatctcccacgactgca

SEQ ID NO: 3794581 - DNA, 25 bp, Homo sapien
gggcatctcccacgactgcaattag

SEQ ID NO: 3794582 - DNA, 25 bp, Homo sapien
cgactgcaattagctgccaagattt

SEQ ID NO: 3794583 - DNA, 25 bp, Homo sapien
tcccacgactgcaattagctgccaa

SEQ ID NO: 3794584 - DNA, 25 bp, Homo sapien
gccaccgtgtctgcgctaacgttgg

SEQ ID NO: 3794585 - DNA, 25 bp, Homo sapien
ccattcacgcgctgcaaacgcagcc

SEQ ID NO: 3794586 - DNA, 25 bp, Homo sapien
tcatccttccatctccggtttgggt

SEQ ID NO: 3794587 - DNA, 25 bp, Homo sapien
ggccaagtcccctattctaatcagc

SEQ ID NO: 3794588 - DNA, 25 bp, Homo sapien
gagccctgagcacagtctccgaggt

SEQ ID NO: 3794589 - DNA, 25 bp, Homo sapien
cagtctccgaggtccccggagctgg

SEQ ID NO: 3794590 - DNA, 25 bp, Homo sapien
ggcgagccctgagcacagtctccga

SEQ ID NO: 3794591 - DNA, 25 bp, Homo sapien
acggggcacccagggcgagccctga

SEQ ID NO: 3794592 - DNA, 25 bp, Homo sapien
tctggatattctggtatgtatttaa

SEQ ID NO: 3794593 - DNA, 25 bp, Homo sapien
tctggtatgtatttaattgcgtact

SEQ ID NO: 3794594 - DNA, 25 bp, Homo sapien
taattgcgtacttgcaagatctttt

SEQ ID NO: 3794595 - DNA, 25 bp, Homo sapien
tcattgacgctctctacttctgtct

SEQ ID NO: 3794596 - DNA, 25 bp, Homo sapien
ccaaaaagcaaaattatcagtggtg

SEQ ID NO: 3794597 - DNA, 25 bp, Homo sapien
ctgggctgccatttcactgaaggaa

SEQ ID NO: 3794598 - DNA, 25 bp, Homo sapien
gctgccatttcactgaaggaacaaa

SEQ ID NO: 3794599 - DNA, 25 bp, Homo sapien
tcactgaaggaacaaaaaagaacca

SEQ ID NO: 3794600 - DNA, 25 bp, Homo sapien
ctctggaggcatacgcaggctttca

SEQ ID NO: 3794601 - DNA, 25 bp, Homo sapien
aatcatttggtagggagcctctgga

SEQ ID NO: 3794602 - DNA, 25 bp, Homo sapien
ctttcttagtgagggagcttagcca

SEQ ID NO: 3794603 - DNA, 25 bp, Homo sapien
ccaactgtgtttgtgggagggatac

SEQ ID NO: 3794604 - DNA, 25 bp, Homo sapien
gccccaaacacagatgtattcggat

SEQ ID NO: 3794605 - DNA, 25 bp, Homo sapien
cagatgtattcggatcaggatgcaa

SEQ ID NO: 3794606 - DNA, 25 bp, Homo sapien
taattgacgaccctccagttttgcc

SEQ ID NO: 3794607 - DNA, 25 bp, Homo sapien
caaacacagatgtattcggatcagg

SEQ ID NO: 3794608 - DNA, 25 bp, Homo sapien
ttatagcagcaccaaccaacaaagt

SEQ ID NO: 3794609 - DNA, 25 bp, Homo sapien
aattctgcagtggttctctgagtgc

SEQ ID NO: 3794610 - DNA, 25 bp, Homo sapien
tcagctcacgctcttgctcaggaga

SEQ ID NO: 3794611 - DNA, 25 bp, Homo sapien
ctatagttcaggatgtttgcaagca

SEQ ID NO: 3794612 - DNA, 25 bp, Homo sapien
tagcctcagacctaatagacaagta

SEQ ID NO: 3794613 - DNA, 25 bp, Homo sapien
gccctcttagggtatttcattaaga

SEQ ID NO: 3794614 - DNA, 25 bp, Homo sapien
gtgcctggccctcttagggtatttc

SEQ ID NO: 3794615 - DNA, 25 bp, Homo sapien
aaagcatctagcctcagacctaata

SEQ ID NO: 3794616 - DNA, 25 bp, Homo sapien
taagaggaatgcaagcacactgttg

SEQ ID NO: 3794617 - DNA, 25 bp, Homo sapien
gctatgactctttgccgcttcttcc

SEQ ID NO: 3794618 - DNA, 25 bp, Homo sapien
tgagagctatgactctttgccgctt

SEQ ID NO: 3794619 - DNA, 25 bp, Homo sapien
tgagcttgagagctatgactctttg

SEQ ID NO: 3794620 - DNA, 25 bp, Homo sapien
catgctaagtgaagtacctgcaaat

SEQ ID NO: 3794621 - DNA, 25 bp, Homo sapien
gctaagtgaagtacctgcaaatacc

SEQ ID NO: 3794622 - DNA, 25 bp, Homo sapien
tccatgctaagtgaagtacctgcaa

SEQ ID NO: 3794623 - DNA, 25 bp, Homo sapien
tgctaagtgaagtacctgcaaatac

SEQ ID NO: 3794624 - DNA, 25 bp, Homo sapien
aattggcttggatgtgattactgcc

SEQ ID NO: 3794625 - DNA, 25 bp, Homo sapien
ctattgatcaaaattggcttggatg

SEQ ID NO: 3794626 - DNA, 25 bp, Homo sapien
attactgccaaacgatagtgtggcc

SEQ ID NO: 3794627 - DNA, 25 bp, Homo sapien
ggatgtgattactgccaaacgatag

SEQ ID NO: 3794628 - DNA, 25 bp, Homo sapien
gcaaagtgctgccaataccgtcatt

SEQ ID NO: 3794629 - DNA, 25 bp, Homo sapien
ctaggccagagtgatacatactcat

SEQ ID NO: 3794630 - DNA, 25 bp, Homo sapien
taccgtcattaaatcattcaccaga

SEQ ID NO: 3794631 - DNA, 25 bp, Homo sapien
caacttgtggattcctccaaggcca

SEQ ID NO: 3794632 - DNA, 25 bp, Homo sapien
aggaagttggcggatactgcaaaat

SEQ ID NO: 3794633 - DNA, 25 bp, Homo sapien
gctataacttttcctgagtaggaag

SEQ ID NO: 3794634 - DNA, 25 bp, Homo sapien
aattctgccatctgctataactttt

SEQ ID NO: 3794635 - DNA, 25 bp, Homo sapien
gaagttggcggatactgcaaaatca

SEQ ID NO: 3794636 - DNA, 25 bp, Homo sapien
attatcaacggcaagagcctctgac

SEQ ID NO: 3794637 - DNA, 25 bp, Homo sapien
ttatcaacggcaagagcctctgaca

SEQ ID NO: 3794638 - DNA, 25 bp, Homo sapien
tatcaacggcaagagcctctgacaa

SEQ ID NO: 3794639 - DNA, 25 bp, Homo sapien
actgcctccccacggtgctcagaga

SEQ ID NO: 3794640 - DNA, 25 bp, Homo sapien
acggcagccagcgacattcaggctc

SEQ ID NO: 3794641 - DNA, 25 bp, Homo sapien
agagcctgctgtgaacggcagccag

SEQ ID NO: 3794642 - DNA, 25 bp, Homo sapien
tggaaaacaggacagctgccggagt

SEQ ID NO: 3794643 - DNA, 25 bp, Homo sapien
cagtggctagttcagtcatggcagg

SEQ ID NO: 3794644 - DNA, 25 bp, Homo sapien
tgctagatgctattacagacaccct

SEQ ID NO: 3794645 - DNA, 25 bp, Homo sapien
cactgggcagaattcggtcacatgt

SEQ ID NO: 3794646 - DNA, 25 bp, Homo sapien
cagtcattcagcgacccaggtagaa

SEQ ID NO: 3794647 - DNA, 25 bp, Homo sapien
gagcttctctgtagagtgtcccaga

SEQ ID NO: 3794648 - DNA, 25 bp, Homo sapien
ccactgggaatgatgagccaataca

SEQ ID NO: 3794649 - DNA, 25 bp, Homo sapien
gccaatacatgcagaagagcttctc

SEQ ID NO: 3794650 - DNA, 25 bp, Homo sapien
gcacaacttggtgttccccgactga

SEQ ID NO: 3794651 - DNA, 25 bp, Homo sapien
tgggttcatgcttcacagggatcat

SEQ ID NO: 3794652 - DNA, 25 bp, Homo sapien
gggatcatcgaaaaagcaaagacac

SEQ ID NO: 3794653 - DNA, 25 bp, Homo sapien
gcttcacctcagctagaccatcaga

SEQ ID NO: 3794654 - DNA, 25 bp, Homo sapien
caggagataaattctaaagtggcca

SEQ ID NO: 3794655 - DNA, 25 bp, Homo sapien
tgactccacatgcagtgtcagggcc

SEQ ID NO: 3794656 - DNA, 25 bp, Homo sapien
taacctttcattgaggaggcccaga

SEQ ID NO: 3794657 - DNA, 25 bp, Homo sapien
tcagggcctttgaggtccaagggca

SEQ ID NO: 3794658 - DNA, 25 bp, Homo sapien
gacctcttggatctacgatgtcatc

SEQ ID NO: 3794659 - DNA, 25 bp, Homo sapien
tttctcaactaccaaactggagtga

SEQ ID NO: 3794660 - DNA, 25 bp, Homo sapien
tctcaactaccaaactggagtgatg

SEQ ID NO: 3794661 - DNA, 25 bp, Homo sapien
gctttctcaactaccaaactggagt

SEQ ID NO: 3794662 - DNA, 25 bp, Homo sapien
cagctttctcaactaccaaactgga

SEQ ID NO: 3794663 - DNA, 25 bp, Homo sapien
acagcgttcgtctctggccagagca

SEQ ID NO: 3794664 - DNA, 25 bp, Homo sapien
cagagcagttatcagctgaagcaaa

SEQ ID NO: 3794665 - DNA, 25 bp, Homo sapien
ggttcttttcagaatgccagaagtc

SEQ ID NO: 3794666 - DNA, 25 bp, Homo sapien
gaagtcctctatgaacacgagtgtg

SEQ ID NO: 3794667 - DNA, 25 bp, Homo sapien
cagaagaacttccatcacaattaca

SEQ ID NO: 3794668 - DNA, 25 bp, Homo sapien
aattgccaaatacagaagaacttcc

SEQ ID NO: 3794669 - DNA, 25 bp, Homo sapien
ttttccctaggcctgtaattgccaa

SEQ ID NO: 3794670 - DNA, 25 bp, Homo sapien
tccctaggcctgtaattgccaaata

SEQ ID NO: 3794671 - DNA, 25 bp, Homo sapien
tgtgaagtgggcacaatcgctgcaa

SEQ ID NO: 3794672 - DNA, 25 bp, Homo sapien
agcacaggggtgcacgtcagctgca

SEQ ID NO: 3794673 - DNA, 25 bp, Homo sapien
gggtgcacgtcagctgcatctgtga

SEQ ID NO: 3794674 - DNA, 25 bp, Homo sapien
gccctgctaagatccccacgcagca

SEQ ID NO: 3794675 - DNA, 25 bp, Homo sapien
ggactgtttcttggtctataagcca

SEQ ID NO: 3794676 - DNA, 25 bp, Homo sapien
atgtaagtagttctggacatctgac

SEQ ID NO: 3794677 - DNA, 25 bp, Homo sapien
ccactgatgtgaggatgtaagtagt

SEQ ID NO: 3794678 - DNA, 25 bp, Homo sapien
tctataagccactgatgtgaggatg

SEQ ID NO: 3794679 - DNA, 25 bp, Homo sapien
tgtttaccaaacctgttatcacttc

SEQ ID NO: 3794680 - DNA, 25 bp, Homo sapien
aagtctttggtcctgcatggataag

SEQ ID NO: 3794681 - DNA, 25 bp, Homo sapien
tccccatccagatttgactgttcct

SEQ ID NO: 3794682 - DNA, 25 bp, Homo sapien
tgttcgcccaattatctgtttacca

SEQ ID NO: 3794683 - DNA, 25 bp, Homo sapien
gggtcttggccttaatcctaagatg

SEQ ID NO: 3794684 - DNA, 25 bp, Homo sapien
ttgggtcttggccttaatcctaaga

SEQ ID NO: 3794685 - DNA, 25 bp, Homo sapien
ggtcttggccttaatcctaagatgg

SEQ ID NO: 3794686 - DNA, 25 bp, Homo sapien
tcttggccttaatcctaagatgggg

SEQ ID NO: 3794687 - DNA, 25 bp, Homo sapien
ggtttctggtgctgttctgatgttc

SEQ ID NO: 3794688 - DNA, 25 bp, Homo sapien
ctggggtttctggtgctgttctgat

SEQ ID NO: 3794689 - DNA, 25 bp, Homo sapien
ggggtttctggtgctgttctgatgt

SEQ ID NO: 3794690 - DNA, 25 bp, Homo sapien
tttctggtgctgttctgatgttcat

SEQ ID NO: 3794691 - DNA, 25 bp, Homo sapien
gaggtgaataattttcgctcagctt

SEQ ID NO: 3794692 - DNA, 25 bp, Homo sapien
ttcgctcagcttttaagaagaatac

SEQ ID NO: 3794693 - DNA, 25 bp, Homo sapien
agaatacttctcgagatgtcagctg

SEQ ID NO: 3794694 - DNA, 25 bp, Homo sapien
ccacattagatgtaaatcgcacttg

SEQ ID NO: 3794695 - DNA, 25 bp, Homo sapien
cagcagatgggagcaaataactttg

SEQ ID NO: 3794696 - DNA, 25 bp, Homo sapien
tgcaatatcacaaatggccagcaga

SEQ ID NO: 3794697 - DNA, 25 bp, Homo sapien
gagtatccaattcatcaggtccgta

SEQ ID NO: 3794698 - DNA, 25 bp, Homo sapien
tttgcaaaaaataccgaaagcacca

SEQ ID NO: 3794699 - DNA, 25 bp, Homo sapien
tattcatgcccacaatgcaaggatg

SEQ ID NO: 3794700 - DNA, 25 bp, Homo sapien
tggagagaaacaccggacaacgaag

SEQ ID NO: 3794701 - DNA, 25 bp, Homo sapien
gaagctcccgagacctcagaggatt

SEQ ID NO: 3794702 - DNA, 25 bp, Homo sapien
taaagattcccgagaaaatgtggag

SEQ ID NO: 3794703 - DNA, 25 bp, Homo sapien
tattgttcggatcacgctgcctaga

SEQ ID NO: 3794704 - DNA, 25 bp, Homo sapien
tctgcacaaggaggccgagtttgct

SEQ ID NO: 3794705 - DNA, 25 bp, Homo sapien
aatcaatttcccgacagaaggcagc

SEQ ID NO: 3794706 - DNA, 25 bp, Homo sapien
tgtagccgggaaaccctgaacagcg

SEQ ID NO: 3794707 - DNA, 25 bp, Homo sapien
tccacgcaggtattgcagtctgctt

SEQ ID NO: 3794708 - DNA, 25 bp, Homo sapien
gcaggtattgcagtctgctttgata

SEQ ID NO: 3794709 - DNA, 25 bp, Homo sapien
gtcttctatttccacgcaggtattg

SEQ ID NO: 3794710 - DNA, 25 bp, Homo sapien
tatttccacgcaggtattgcagtct

SEQ ID NO: 3794711 - DNA, 25 bp, Homo sapien
aacccatcagtgtggcagaggcacc

SEQ ID NO: 3794712 - DNA, 25 bp, Homo sapien
accatatcaccaagcagagagggag

SEQ ID NO: 3794713 - DNA, 25 bp, Homo sapien
tgagcaactgtcatcactccagtgg

SEQ ID NO: 3794714 - DNA, 25 bp, Homo sapien
gaacctgacggcaatcactctggct

SEQ ID NO: 3794715 - DNA, 25 bp, Homo sapien
aaatctgcattagctccacaacgtt

SEQ ID NO: 3794716 - DNA, 25 bp, Homo sapien
aatctgcattagctccacaacgttc

SEQ ID NO: 3794717 - DNA, 25 bp, Homo sapien
tctgcattagctccacaacgttcac

SEQ ID NO: 3794718 - DNA, 25 bp, Homo sapien
atctgcattagctccacaacgttca

SEQ ID NO: 3794719 - DNA, 25 bp, Homo sapien
agcttcccgaatagcatggctagga

SEQ ID NO: 3794720 - DNA, 25 bp, Homo sapien
atacattttgtacttgtggtagaga

SEQ ID NO: 3794721 - DNA, 25 bp, Homo sapien
gcccgatctacctcagtgcttttca

SEQ ID NO: 3794722 - DNA, 25 bp, Homo sapien
tgaaggtgtatgagaccaatagccc

SEQ ID NO: 3794723 - DNA, 25 bp, Homo sapien
ccaaagccagcttcaagggtgactg

SEQ ID NO: 3794724 - DNA, 25 bp, Homo sapien
actctctgggttaccactgtgtcca

SEQ ID NO: 3794725 - DNA, 25 bp, Homo sapien
cagctgaaccatgcaaaagtgctgg

SEQ ID NO: 3794726 - DNA, 25 bp, Homo sapien
aaacataaatcacatttggataggg

SEQ ID NO: 3794727 - DNA, 25 bp, Homo sapien
tgatcaacacgaagaaaatttcagc

SEQ ID NO: 3794728 - DNA, 25 bp, Homo sapien
aaatttcagctgaaccatgcaaaag

SEQ ID NO: 3794729 - DNA, 25 bp, Homo sapien
tctccaatggactctaagcgttatg

SEQ ID NO: 3794730 - DNA, 25 bp, Homo sapien
tatggtggtggattataagaaatga

SEQ ID NO: 3794731 - DNA, 25 bp, Homo sapien
tattggatgtatatttctccaatgg

SEQ ID NO: 3794732 - DNA, 25 bp, Homo sapien
cttccccaccacaatatttgtatgg

SEQ ID NO: 3794733 - DNA, 25 bp, Homo sapien
tccttgcctttgtccatagcctctt

SEQ ID NO: 3794734 - DNA, 25 bp, Homo sapien
gagtaggaatatgcgacttatctcc

SEQ ID NO: 3794735 - DNA, 25 bp, Homo sapien
ctgtccttgcctttgtccatagcct

SEQ ID NO: 3794736 - DNA, 25 bp, Homo sapien
cttatctccatgacagatgatacat

SEQ ID NO: 3794737 - DNA, 25 bp, Homo sapien
gcacttcctccaacaagtgtttgct

SEQ ID NO: 3794738 - DNA, 25 bp, Homo sapien
tcaggatcctcccaatatggcactt

SEQ ID NO: 3794739 - DNA, 25 bp, Homo sapien
actgtcttggctatcattctctgtc

SEQ ID NO: 3794740 - DNA, 25 bp, Homo sapien
tctggaggtgtgcagatccattcca

SEQ ID NO: 3794741 - DNA, 25 bp, Homo sapien
gaccacactgttatgaaacagcaga

SEQ ID NO: 3794742 - DNA, 25 bp, Homo sapien
tatgcgcagctccatacgaaattgc

SEQ ID NO: 3794743 - DNA, 25 bp, Homo sapien
tatgtggtagtccttctatgacccc

SEQ ID NO: 3794744 - DNA, 25 bp, Homo sapien
tcaaccatcctgtcttgcctgtcag

SEQ ID NO: 3794745 - DNA, 25 bp, Homo sapien
tctggttaaatgaccattgtggagg

SEQ ID NO: 3794746 - DNA, 25 bp, Homo sapien
ggattgacactcaaaatagctcact

SEQ ID NO: 3794747 - DNA, 25 bp, Homo sapien
tccacattacagacgtgagaactga

SEQ ID NO: 3794748 - DNA, 25 bp, Homo sapien
tttgtctttagagtatcccggctga

SEQ ID NO: 3794749 - DNA, 25 bp, Homo sapien
cagtagatatgagcaaagagttctc

SEQ ID NO: 3794750 - DNA, 25 bp, Homo sapien
tccagtagatatgagcaaagagttc

SEQ ID NO: 3794751 - DNA, 25 bp, Homo sapien
gtatccttctgagataacttcaaga

SEQ ID NO: 3794752 - DNA, 25 bp, Homo sapien
gttctcagtcaggagtaagggtgta

SEQ ID NO: 3794753 - DNA, 25 bp, Homo sapien
gcttgtcaacccctatgaggcctga

SEQ ID NO: 3794754 - DNA, 25 bp, Homo sapien
ctgggaaatcgacgcctgagagctc

SEQ ID NO: 3794755 - DNA, 25 bp, Homo sapien
cagcaactgcggtacaagcacaagg

SEQ ID NO: 3794756 - DNA, 25 bp, Homo sapien
gaaaagctctctcgacatctggcgg

SEQ ID NO: 3794757 - DNA, 25 bp, Homo sapien
aactgagaaatgttcccaagatgta

SEQ ID NO: 3794758 - DNA, 25 bp, Homo sapien
acttaaacgacacaaccacgtagtg

SEQ ID NO: 3794759 - DNA, 25 bp, Homo sapien
tcatggatggaagaacaccaatttc

SEQ ID NO: 3794760 - DNA, 25 bp, Homo sapien
gtgttcacccctttagcaactgaga

SEQ ID NO: 3794761 - DNA, 25 bp, Homo sapien
gcattgagtctctccccgtaggaag

SEQ ID NO: 3794762 - DNA, 25 bp, Homo sapien
caaacagaacatgaatgacggacat

SEQ ID NO: 3794763 - DNA, 25 bp, Homo sapien
aagaagtctgtgcattgagtctctc

SEQ ID NO: 3794764 - DNA, 25 bp, Homo sapien
tctctccccgtaggaagacggagaa

SEQ ID NO: 3794765 - DNA, 25 bp, Homo sapien
gcagaactttttgggaaggaataga

SEQ ID NO: 3794766 - DNA, 25 bp, Homo sapien
tatgaacggcttggttccgtccctg

SEQ ID NO: 3794767 - DNA, 25 bp, Homo sapien
taatgagtgatttaccacgaggtct

SEQ ID NO: 3794768 - DNA, 25 bp, Homo sapien
cacggctggccgataatttggatat

SEQ ID NO: 3794769 - DNA, 25 bp, Homo sapien
tagtgcctggcagtatagactccct

SEQ ID NO: 3794770 - DNA, 25 bp, Homo sapien
tgtagaataccgaggcagctgcaat

SEQ ID NO: 3794771 - DNA, 25 bp, Homo sapien
caacttcaaagagctcgaggaggag

SEQ ID NO: 3794772 - DNA, 25 bp, Homo sapien
gctacagttcttgggaaggttctcc

SEQ ID NO: 3794773 - DNA, 25 bp, Homo sapien
tttggaaccatagagcaatggctgg

SEQ ID NO: 3794774 - DNA, 25 bp, Homo sapien
gaaacatttgccatgaaggcactgc

SEQ ID NO: 3794775 - DNA, 25 bp, Homo sapien
tagatgaatgccaacccatttgttc

SEQ ID NO: 3794776 - DNA, 25 bp, Homo sapien
aaggcactgccaagaaactctagga

SEQ ID NO: 3794777 - DNA, 25 bp, Homo sapien
catccatcatgccatggatcgctct

SEQ ID NO: 3794778 - DNA, 25 bp, Homo sapien
catggatcgctctagacttcttccc

SEQ ID NO: 3794779 - DNA, 25 bp, Homo sapien
cttgtaacctcccactcaaacagtg

SEQ ID NO: 3794780 - DNA, 25 bp, Homo sapien
catgccatggatcgctctagacttc

SEQ ID NO: 3794781 - DNA, 25 bp, Homo sapien
gaaactgagatctgggtagtaggca

SEQ ID NO: 3794782 - DNA, 25 bp, Homo sapien
gcttccaggacctctaaactgacgg

SEQ ID NO: 3794783 - DNA, 25 bp, Homo sapien
taacccagggatgtatgtatgtctg

SEQ ID NO: 3794784 - DNA, 25 bp, Homo sapien
gatctatgtgtacagtaacccaggg

SEQ ID NO: 3794785 - DNA, 25 bp, Homo sapien
cagggcagacaaatgaacaccttcc

SEQ ID NO: 3794786 - DNA, 25 bp, Homo sapien
ttccccacagccagtcgaagggacg

SEQ ID NO: 3794787 - DNA, 25 bp, Homo sapien
gaagggacgcctgagttgagctaat

SEQ ID NO: 3794788 - DNA, 25 bp, Homo sapien
gggagtaagaatgtgcacccagcca

SEQ ID NO: 3794789 - DNA, 25 bp, Homo sapien
gtcttctgcacagttagatgcttaa

SEQ ID NO: 3794790 - DNA, 25 bp, Homo sapien
cacagaataacaagtgatgcatgct

SEQ ID NO: 3794791 - DNA, 25 bp, Homo sapien
taaaataattgcatccgctcgtgtg

SEQ ID NO: 3794792 - DNA, 25 bp, Homo sapien
ctgcagcagtaattcagtgggttta

SEQ ID NO: 3794793 - DNA, 25 bp, Homo sapien
tgcctccaagatacttgccgcagta

SEQ ID NO: 3794794 - DNA, 25 bp, Homo sapien
tgccgcagtatctcctgggctgagc

SEQ ID NO: 3794795 - DNA, 25 bp, Homo sapien
gtgtaccagccagcgttctgatctg

SEQ ID NO: 3794796 - DNA, 25 bp, Homo sapien
tacaataaacccttcagcaccactg

SEQ ID NO: 3794797 - DNA, 25 bp, Homo sapien
gaactcctgacttgcctagaagcag

SEQ ID NO: 3794798 - DNA, 25 bp, Homo sapien
caatgtacccatctggccgctgaga

SEQ ID NO: 3794799 - DNA, 25 bp, Homo sapien
acaaatattcactctaccccacggg

SEQ ID NO: 3794800 - DNA, 25 bp, Homo sapien
caaagcctgggtagctctcagatcc

SEQ ID NO: 3794801 - DNA, 25 bp, Homo sapien
agtaagctaagatcttgagtacgta

SEQ ID NO: 3794802 - DNA, 25 bp, Homo sapien
tccagaagtctaggggagcctcatc

SEQ ID NO: 3794803 - DNA, 25 bp, Homo sapien
tgagtacgtagctggaagactctcc

SEQ ID NO: 3794804 - DNA, 25 bp, Homo sapien
taagatcttgagtacgtagctggaa

SEQ ID NO: 3794805 - DNA, 25 bp, Homo sapien
tctgcaggttgagggattgtcagaa

SEQ ID NO: 3794806 - DNA, 25 bp, Homo sapien
gaattgcaggatagtgagtctcacc

SEQ ID NO: 3794807 - DNA, 25 bp, Homo sapien
ctatggaattgcgacttttgaaggc

SEQ ID NO: 3794808 - DNA, 25 bp, Homo sapien
gatagtgagtctcacctcttctttc

SEQ ID NO: 3794809 - DNA, 25 bp, Homo sapien
cattatctcttctcggagtcgggca

SEQ ID NO: 3794810 - DNA, 25 bp, Homo sapien
gatacttcagcatttaccaggagaa

SEQ ID NO: 3794811 - DNA, 25 bp, Homo sapien
gagtcgggcatcctgtacaagtttt

SEQ ID NO: 3794812 - DNA, 25 bp, Homo sapien
cctgggccattctcgtttctaagca

SEQ ID NO: 3794813 - DNA, 25 bp, Homo sapien
ggactttccaacaagccgtatttgc

SEQ ID NO: 3794814 - DNA, 25 bp, Homo sapien
gcctcatgcaaggtaaactgttcac

SEQ ID NO: 3794815 - DNA, 25 bp, Homo sapien
gcaatcaaacccagatcttggcctg

SEQ ID NO: 3794816 - DNA, 25 bp, Homo sapien
tgttccatcagcctagagcacgctt

SEQ ID NO: 3794817 - DNA, 25 bp, Homo sapien
caagggctagtaccacgggctgcat

SEQ ID NO: 3794818 - DNA, 25 bp, Homo sapien
acacacagacaaacgcaccctacat

SEQ ID NO: 3794819 - DNA, 25 bp, Homo sapien
catgagaaccatgtgcgtgtgcaca

SEQ ID NO: 3794820 - DNA, 25 bp, Homo sapien
ctctgaggagctaattacaggttca

SEQ ID NO: 3794821 - DNA, 25 bp, Homo sapien
ttcagttgaaaacgggaggaccatg

SEQ ID NO: 3794822 - DNA, 25 bp, Homo sapien
gacaagggatgtttgaccgaagctc

SEQ ID NO: 3794823 - DNA, 25 bp, Homo sapien
gatgacattaggcactaatttgacg

SEQ ID NO: 3794824 - DNA, 25 bp, Homo sapien
cactaatttgacgaaagacaaggga

SEQ ID NO: 3794825 - DNA, 25 bp, Homo sapien
gtttgaccgaagctcccaaattcac

SEQ ID NO: 3794826 - DNA, 25 bp, Homo sapien
ttccattcagagactgactgtggtt

SEQ ID NO: 3794827 - DNA, 25 bp, Homo sapien
ataagacacatggatttccattcag

SEQ ID NO: 3794828 - DNA, 25 bp, Homo sapien
ctgactgtggttcacgcatttgttc

SEQ ID NO: 3794829 - DNA, 25 bp, Homo sapien
agagactgactgtggttcacgcatt

SEQ ID NO: 3794830 - DNA, 25 bp, Homo sapien
tgaacacaatccctggttagccatt

SEQ ID NO: 3794831 - DNA, 25 bp, Homo sapien
ttggaaagaagcactcacagccgtg

SEQ ID NO: 3794832 - DNA, 25 bp, Homo sapien
gtgcaccagccaagcgaggatcgtg

SEQ ID NO: 3794833 - DNA, 25 bp, Homo sapien
gaatcgatatgcctgtgaacacaat

SEQ ID NO: 3794834 - DNA, 25 bp, Homo sapien
gaaaagtaagagcaggctaaaccca

SEQ ID NO: 3794835 - DNA, 25 bp, Homo sapien
aagagcaggctaaacccaaaactag

SEQ ID NO: 3794836 - DNA, 25 bp, Homo sapien
aaaagagagaatgtccaaatatatg

SEQ ID NO: 3794837 - DNA, 25 bp, Homo sapien
aagagagaatgtccaaatatatgaa

SEQ ID NO: 3794838 - DNA, 25 bp, Homo sapien
cagcatactgaaacctatgggatac

SEQ ID NO: 3794839 - DNA, 25 bp, Homo sapien
tattggacataaaaatcccgggaca

SEQ ID NO: 3794840 - DNA, 25 bp, Homo sapien
gtgcgctacagaacaaattgatcaa

SEQ ID NO: 3794841 - DNA, 25 bp, Homo sapien
tgttaggccgaaacacaagtctcag

SEQ ID NO: 3794842 - DNA, 25 bp, Homo sapien
gagtgtaaacggacttcattctcca

SEQ ID NO: 3794843 - DNA, 25 bp, Homo sapien
caataataacaatgagtgtaaacgg

SEQ ID NO: 3794844 - DNA, 25 bp, Homo sapien
ccagaaaattgcttatatagaaagg

SEQ ID NO: 3794845 - DNA, 25 bp, Homo sapien
taaatggcggtagtaagtcctcacc

SEQ ID NO: 3794846 - DNA, 25 bp, Homo sapien
gaaaaatgatgcatgaagcccaaag

SEQ ID NO: 3794847 - DNA, 25 bp, Homo sapien
cccaaaggtacaagaagaataatgc

SEQ ID NO: 3794848 - DNA, 25 bp, Homo sapien
tctgggacaacagggactctcctca

SEQ ID NO: 3794849 - DNA, 25 bp, Homo sapien
agaagaataatgctgtctgggacaa

SEQ ID NO: 3794850 - DNA, 25 bp, Homo sapien
aataggcaatttcgcgacatccatg

SEQ ID NO: 3794851 - DNA, 25 bp, Homo sapien
gcaggagaaccatcttcagactggg

SEQ ID NO: 3794852 - DNA, 25 bp, Homo sapien
catgtcccattgtgcggcggaaaga

SEQ ID NO: 3794853 - DNA, 25 bp, Homo sapien
taatagcttccctgtttaataggca

SEQ ID NO: 3794854 - DNA, 25 bp, Homo sapien
gaaagcagtgcctgcatcaaataaa

SEQ ID NO: 3794855 - DNA, 25 bp, Homo sapien
aagcagtgcctgcatcaaataaaaa

SEQ ID NO: 3794856 - DNA, 25 bp, Homo sapien
agcagtgcctgcatcaaataaaaat

SEQ ID NO: 3794857 - DNA, 25 bp, Homo sapien
gcagtgcctgcatcaaataaaaatc

SEQ ID NO: 3794858 - DNA, 25 bp, Homo sapien
taaacataggcgactcagactgatc

SEQ ID NO: 3794859 - DNA, 25 bp, Homo sapien
taacaatatccatcaaaggcacggc

SEQ ID NO: 3794860 - DNA, 25 bp, Homo sapien
ctcagactgatccttgctaacaaat

SEQ ID NO: 3794861 - DNA, 25 bp, Homo sapien
atttggacagattccttagtaaaca

SEQ ID NO: 3794862 - DNA, 25 bp, Homo sapien
caccggactggtgaattacacttgg

SEQ ID NO: 3794863 - DNA, 25 bp, Homo sapien
gacaagcgggtaggctcatcttggt

SEQ ID NO: 3794864 - DNA, 25 bp, Homo sapien
tacacttggtacgacagcactcttc

SEQ ID NO: 3794865 - DNA, 25 bp, Homo sapien
ttcataacttccagaaaggcaccgg

SEQ ID NO: 3794866 - DNA, 25 bp, Homo sapien
atgcgccaccaaatccagttaaatt

SEQ ID NO: 3794867 - DNA, 25 bp, Homo sapien
acgcatgcgccaccaaatccagtta

SEQ ID NO: 3794868 - DNA, 25 bp, Homo sapien
tgcgccaccaaatccagttaaattt

SEQ ID NO: 3794869 - DNA, 25 bp, Homo sapien
tagtaatgaaagacgcacacacagg

SEQ ID NO: 3794870 - DNA, 25 bp, Homo sapien
tgtcacaggaccaacagcaggatcc

SEQ ID NO: 3794871 - DNA, 25 bp, Homo sapien
caggtgaatccagctacacaagcac

SEQ ID NO: 3794872 - DNA, 25 bp, Homo sapien
gatccctgtggcaggaagccatatg

SEQ ID NO: 3794873 - DNA, 25 bp, Homo sapien
taggttacactggaatcagagggct

SEQ ID NO: 3794874 - DNA, 25 bp, Homo sapien
taccagtgtcgtaatcaacaagttc

SEQ ID NO: 3794875 - DNA, 25 bp, Homo sapien
tctgtaaggtatgcttgaggaaagc

SEQ ID NO: 3794876 - DNA, 25 bp, Homo sapien
ttacaggcatacacgccaacaggcc

SEQ ID NO: 3794877 - DNA, 25 bp, Homo sapien
cagaatggctgagagtcaacaggca

SEQ ID NO: 3794878 - DNA, 25 bp, Homo sapien
gacttggcacacgagctcccgtttt

SEQ ID NO: 3794879 - DNA, 25 bp, Homo sapien
ccccagtagctgcagaaaaatcaca

SEQ ID NO: 3794880 - DNA, 25 bp, Homo sapien
tcatccatccccaaacagtagaggc

SEQ ID NO: 3794881 - DNA, 25 bp, Homo sapien
acggcgaagagctcactgtgcacgg

SEQ ID NO: 3794882 - DNA, 25 bp, Homo sapien
tgtgcacggcaagacatgttttatc

SEQ ID NO: 3794883 - DNA, 25 bp, Homo sapien
tctgccataacttagattgtgatgg

SEQ ID NO: 3794884 - DNA, 25 bp, Homo sapien
aataaaatgcaagcacggcgaagag

SEQ ID NO: 3794885 - DNA, 25 bp, Homo sapien
catagcgtgtaaaagtgaattagca

SEQ ID NO: 3794886 - DNA, 25 bp, Homo sapien
aaagtgaattagcatggggttgtct

SEQ ID NO: 3794887 - DNA, 25 bp, Homo sapien
gcgtgtaaaagtgaattagcatggg

SEQ ID NO: 3794888 - DNA, 25 bp, Homo sapien
tagcatggggttgtctaacctcata

SEQ ID NO: 3794889 - DNA, 25 bp, Homo sapien
tactcgcgcttgtcccataggttct

SEQ ID NO: 3794890 - DNA, 25 bp, Homo sapien
gagagtcagaccatactcgcgcttg

SEQ ID NO: 3794891 - DNA, 25 bp, Homo sapien
ttaacctggttggagagtcagacca

SEQ ID NO: 3794892 - DNA, 25 bp, Homo sapien
ctattgctctcaaaaggcttaacct

SEQ ID NO: 3794893 - DNA, 25 bp, Homo sapien
gaagctggcccctgaaggatcagaa

SEQ ID NO: 3794894 - DNA, 25 bp, Homo sapien
taatgctgggtcagataaggcacac

SEQ ID NO: 3794895 - DNA, 25 bp, Homo sapien
tgggcaaacaaccatgggacggaga

SEQ ID NO: 3794896 - DNA, 25 bp, Homo sapien
ggatactctgagactggccctctga

SEQ ID NO: 3794897 - DNA, 25 bp, Homo sapien
cacctaggacctcgtgatatgctca

SEQ ID NO: 3794898 - DNA, 25 bp, Homo sapien
ccatgcccggtttttcaggatctga

SEQ ID NO: 3794899 - DNA, 25 bp, Homo sapien
ggactcaagagagcaccatgcctaa

SEQ ID NO: 3794900 - DNA, 25 bp, Homo sapien
gtttctcacttctacgggcaaggga

SEQ ID NO: 3794901 - DNA, 25 bp, Homo sapien
gaacactctgtaaccacataatgag

SEQ ID NO: 3794902 - DNA, 25 bp, Homo sapien
ctctaatttagaacactctgtaacc

SEQ ID NO: 3794903 - DNA, 25 bp, Homo sapien
ccactaccaataatccatttctcta

SEQ ID NO: 3794904 - DNA, 25 bp, Homo sapien
tctgtaaccacataatgagtaacac

SEQ ID NO: 3794905 - DNA, 25 bp, Homo sapien
ttactggaaaaggcctgcttttcag

SEQ ID NO: 3794906 - DNA, 25 bp, Homo sapien
tactggaaaaggcctgcttttcagc

SEQ ID NO: 3794907 - DNA, 25 bp, Homo sapien
actggaaaaggcctgcttttcagca

SEQ ID NO: 3794908 - DNA, 25 bp, Homo sapien
tggaaaaggcctgcttttcagcaat

SEQ ID NO: 3794909 - DNA, 25 bp, Homo sapien
tatttgacgtctgtagatgctcaac

SEQ ID NO: 3794910 - DNA, 25 bp, Homo sapien
caaaggtcttcgtgcgtttccacat

SEQ ID NO: 3794911 - DNA, 25 bp, Homo sapien
ttgtagctccaatctcgcattgcag

SEQ ID NO: 3794912 - DNA, 25 bp, Homo sapien
cctcccctgtctggtatgttacaca

SEQ ID NO: 3794913 - DNA, 25 bp, Homo sapien
gcacctcacctggaaagcagtttcc

SEQ ID NO: 3794914 - DNA, 25 bp, Homo sapien
atgcacctcacctggaaagcagttt

SEQ ID NO: 3794915 - DNA, 25 bp, Homo sapien
tgcacctcacctggaaagcagtttc

SEQ ID NO: 3794916 - DNA, 25 bp, Homo sapien
acacactccacagtctgtatcacag

SEQ ID NO: 3794917 - DNA, 25 bp, Homo sapien
agttctgtttgcagaccccctgcca

SEQ ID NO: 3794918 - DNA, 25 bp, Homo sapien
ttatcgagtttgtcttacacactcc

SEQ ID NO: 3794919 - DNA, 25 bp, Homo sapien
gctcttgttaatgttaacgacattt

SEQ ID NO: 3794920 - DNA, 25 bp, Homo sapien
ggagctttgaatctttagccataca

SEQ ID NO: 3794921 - DNA, 25 bp, Homo sapien
gaagattagtgagtcaccaccctcc

SEQ ID NO: 3794922 - DNA, 25 bp, Homo sapien
tgagccacgttttgtctctacccat

SEQ ID NO: 3794923 - DNA, 25 bp, Homo sapien
taaaaatggcgtccaggaacagatc

SEQ ID NO: 3794924 - DNA, 25 bp, Homo sapien
caaattcccatgtcatcgttgtgca

SEQ ID NO: 3794925 - DNA, 25 bp, Homo sapien
atgaaacgcttcacaaattcccatg

SEQ ID NO: 3794926 - DNA, 25 bp, Homo sapien
gaaacgcttcacaaattcccatgtc

SEQ ID NO: 3794927 - DNA, 25 bp, Homo sapien
ttcacaaattcccatgtcatcgttg

SEQ ID NO: 3794928 - DNA, 25 bp, Homo sapien
ttcttaaaagagtgggctgaaacac

SEQ ID NO: 3794929 - DNA, 25 bp, Homo sapien
gctgaaacactactacacgtgtggt

SEQ ID NO: 3794930 - DNA, 25 bp, Homo sapien
caataaatataaacagggcagagag

SEQ ID NO: 3794931 - DNA, 25 bp, Homo sapien
ttgggctgcccttcagaaaactggc

SEQ ID NO: 3794932 - DNA, 25 bp, Homo sapien
gagggccagggaataaacatacagc

SEQ ID NO: 3794933 - DNA, 25 bp, Homo sapien
gtttcctaggcaggaccggctcagt

SEQ ID NO: 3794934 - DNA, 25 bp, Homo sapien
taaagcaaagcgttccatcgaagac

SEQ ID NO: 3794935 - DNA, 25 bp, Homo sapien
tggcacctaacaaagctcaccttgg

SEQ ID NO: 3794936 - DNA, 25 bp, Homo sapien
attcttctggatataagcttagata

SEQ ID NO: 3794937 - DNA, 25 bp, Homo sapien
caaaggtataaagaccagcatgaaa

SEQ ID NO: 3794938 - DNA, 25 bp, Homo sapien
taaagaccagcatgaaatggaggca

SEQ ID NO: 3794939 - DNA, 25 bp, Homo sapien
tagatataccagtcaactgaaaagg

SEQ ID NO: 3794940 - DNA, 25 bp, Homo sapien
catcagtaaaccagggagagaggcc

SEQ ID NO: 3794941 - DNA, 25 bp, Homo sapien
ctgtccgggtgaagagatgttctgc

SEQ ID NO: 3794942 - DNA, 25 bp, Homo sapien
agtgaggacacaccccgaagatcgt

SEQ ID NO: 3794943 - DNA, 25 bp, Homo sapien
aaggagctacctacgctgaggatga

SEQ ID NO: 3794944 - DNA, 25 bp, Homo sapien
caagccttctttgtttttgtatttg

SEQ ID NO: 3794945 - DNA, 25 bp, Homo sapien
tgtatttgtggcttggtttcgccac

SEQ ID NO: 3794946 - DNA, 25 bp, Homo sapien
ttttgtatttgtggcttggtttcgc

SEQ ID NO: 3794947 - DNA, 25 bp, Homo sapien
tcagtcgcagaccttcaagccttct

SEQ ID NO: 3794948 - DNA, 25 bp, Homo sapien
ctatggctagacttgggcacctgca

SEQ ID NO: 3794949 - DNA, 25 bp, Homo sapien
tcaaactgggtgctcaagtcaggtg

SEQ ID NO: 3794950 - DNA, 25 bp, Homo sapien
ttgatagaaaaaaggcaacttgccc

SEQ ID NO: 3794951 - DNA, 25 bp, Homo sapien
gacctgatattggagaactgcccta

SEQ ID NO: 3794952 - DNA, 25 bp, Homo sapien
cacagatgaaaaggcccaggctttc

SEQ ID NO: 3794953 - DNA, 25 bp, Homo sapien
gcctgtcccctgagcttagcaaaga

SEQ ID NO: 3794954 - DNA, 25 bp, Homo sapien
aatcgagcgagtatttcacagatga

SEQ ID NO: 3794955 - DNA, 25 bp, Homo sapien
ggctttccaatccatcgtagtctga

SEQ ID NO: 3794956 - DNA, 25 bp, Homo sapien
cacccagaggtgaatctcggacttc

SEQ ID NO: 3794957 - DNA, 25 bp, Homo sapien
cagaggtgaatctcggacttcctca

SEQ ID NO: 3794958 - DNA, 25 bp, Homo sapien
atccaaggtttacagagctgattct

SEQ ID NO: 3794959 - DNA, 25 bp, Homo sapien
cctgcacccagaggtgaatctcgga

SEQ ID NO: 3794960 - DNA, 25 bp, Homo sapien
accctttgtgatatcagcttttgca

SEQ ID NO: 3794961 - DNA, 25 bp, Homo sapien
tttgtgatatcagcttttgcaaatc

SEQ ID NO: 3794962 - DNA, 25 bp, Homo sapien
ctcatcagagacaccctttgtgata

SEQ ID NO: 3794963 - DNA, 25 bp, Homo sapien
tcagagacaccctttgtgatatcag

SEQ ID NO: 3794964 - DNA, 25 bp, Homo sapien
cagtactcttaaccaatgcattagg

SEQ ID NO: 3794965 - DNA, 25 bp, Homo sapien
cacctctcggatgggaactgtatta

SEQ ID NO: 3794966 - DNA, 25 bp, Homo sapien
tctcctgtaagtgctcttgacacct

SEQ ID NO: 3794967 - DNA, 25 bp, Homo sapien
tgaataagttcacacgcagtactct

SEQ ID NO: 3794968 - DNA, 25 bp, Homo sapien
tcatgcccggctgttgtgttcaggg

SEQ ID NO: 3794969 - DNA, 25 bp, Homo sapien
ctccactgccgtatgccatggggcc

SEQ ID NO: 3794970 - DNA, 25 bp, Homo sapien
tccactgccgtatgccatggggccc

SEQ ID NO: 3794971 - DNA, 25 bp, Homo sapien
gcatcatgcccggctgttgtgttca

SEQ ID NO: 3794972 - DNA, 25 bp, Homo sapien
tttgacaagatcttgtcctgtggcc

SEQ ID NO: 3794973 - DNA, 25 bp, Homo sapien
tctctttgacaagatcttgtcctgt

SEQ ID NO: 3794974 - DNA, 25 bp, Homo sapien
ccatctctttgacaagatcttgtcc

SEQ ID NO: 3794975 - DNA, 25 bp, Homo sapien
ctttgacaagatcttgtcctgtggc

SEQ ID NO: 3794976 - DNA, 25 bp, Homo sapien
cttataagctgaagtaagcgcttcc

SEQ ID NO: 3794977 - DNA, 25 bp, Homo sapien
ataagctgaagtaagcgcttccttt

SEQ ID NO: 3794978 - DNA, 25 bp, Homo sapien
ttataagctgaagtaagcgcttcct

SEQ ID NO: 3794979 - DNA, 25 bp, Homo sapien
tataagctgaagtaagcgcttcctt

SEQ ID NO: 3794980 - DNA, 25 bp, Homo sapien
gaaaggaagagacagctacacccgt

SEQ ID NO: 3794981 - DNA, 25 bp, Homo sapien
cagaaactctgtgggtaggatctaa

SEQ ID NO: 3794982 - DNA, 25 bp, Homo sapien
gaatgggtgaaactctggcaaagac

SEQ ID NO: 3794983 - DNA, 25 bp, Homo sapien
gtagttttcatagcaccagcttctg

SEQ ID NO: 3794984 - DNA, 25 bp, Homo sapien
cagacggtagaattccaatatgcta

SEQ ID NO: 3794985 - DNA, 25 bp, Homo sapien
tttccctataattctaggatattct

SEQ ID NO: 3794986 - DNA, 25 bp, Homo sapien
atatgctatacatcagcttctccat

SEQ ID NO: 3794987 - DNA, 25 bp, Homo sapien
tgacaagtgcccagacggtagaatt

SEQ ID NO: 3794988 - DNA, 25 bp, Homo sapien
gcctcagcgcctataatgatactaa

SEQ ID NO: 3794989 - DNA, 25 bp, Homo sapien
tgatactaatgccttcacaatgcca

SEQ ID NO: 3794990 - DNA, 25 bp, Homo sapien
gatactaatgccttcacaatgccac

SEQ ID NO: 3794991 - DNA, 25 bp, Homo sapien
caacaaatccagactactgagagtg

SEQ ID NO: 3794992 - DNA, 25 bp, Homo sapien
tcttccctctgcagtgtgatgacac

SEQ ID NO: 3794993 - DNA, 25 bp, Homo sapien
tggatactgggaacattaaggatgt

SEQ ID NO: 3794994 - DNA, 25 bp, Homo sapien
tgagctcatggttctcagagggaag

SEQ ID NO: 3794995 - DNA, 25 bp, Homo sapien
ttaagccggtcagggtggtggatac

SEQ ID NO: 3794996 - DNA, 25 bp, Homo sapien
tcaacatacggttatcaggaggata

SEQ ID NO: 3794997 - DNA, 25 bp, Homo sapien
tgccctcatgggaatcaaaagcagg

SEQ ID NO: 3794998 - DNA, 25 bp, Homo sapien
caaaacatcccctaggagagtgaca

SEQ ID NO: 3794999 - DNA, 25 bp, Homo sapien
gagagtgacagctattgccctcatg

SEQ ID NO: 3795000 - DNA, 25 bp, Homo sapien
gaactcaacattgaatgcactgtct

SEQ ID NO: 3795001 - DNA, 25 bp, Homo sapien
gggctcctccattcgtatctaagtg

SEQ ID NO: 3795002 - DNA, 25 bp, Homo sapien
gttaacatccaacagggtccagagg

SEQ ID NO: 3795003 - DNA, 25 bp, Homo sapien
agccccgtgtgagaaccatcgtggt

SEQ ID NO: 3795004 - DNA, 25 bp, Homo sapien
aggattccccgggacgcccatggct

SEQ ID NO: 3795005 - DNA, 25 bp, Homo sapien
ttgctgtcagatatggctgctccag

SEQ ID NO: 3795006 - DNA, 25 bp, Homo sapien
tggctgctccagtttgaatccctgc

SEQ ID NO: 3795007 - DNA, 25 bp, Homo sapien
ccatctcctctcagtacctaggatt

SEQ ID NO: 3795008 - DNA, 25 bp, Homo sapien
aagtcacccgacctgagaggtacag

SEQ ID NO: 3795009 - DNA, 25 bp, Homo sapien
gttcagaggcacagtaagtcacccg

SEQ ID NO: 3795010 - DNA, 25 bp, Homo sapien
cagcacaaagttgaggcctcggaat

SEQ ID NO: 3795011 - DNA, 25 bp, Homo sapien
aaaggtggcatagtgccctctggca

SEQ ID NO: 3795012 - DNA, 25 bp, Homo sapien
ccttagctgctctctttcacaattc

SEQ ID NO: 3795013 - DNA, 25 bp, Homo sapien
ttagctgctctctttcacaattcat

SEQ ID NO: 3795014 - DNA, 25 bp, Homo sapien
cttagctgctctctttcacaattca

SEQ ID NO: 3795015 - DNA, 25 bp, Homo sapien
tatctagctctgacctagttctgac

SEQ ID NO: 3795016 - DNA, 25 bp, Homo sapien
ggagacaaaggcacatatttctctt

SEQ ID NO: 3795017 - DNA, 25 bp, Homo sapien
tctgacctagttctgaccatcgtcc

SEQ ID NO: 3795018 - DNA, 25 bp, Homo sapien
tctctttatctagctctgacctagt

SEQ ID NO: 3795019 - DNA, 25 bp, Homo sapien
tacgttgagttcaggcagctttccc

SEQ ID NO: 3795020 - DNA, 25 bp, Homo sapien
tatttactcagctagcaatggctcc

SEQ ID NO: 3795021 - DNA, 25 bp, Homo sapien
tagtgtgcgtaacaaccgagcgatg

SEQ ID NO: 3795022 - DNA, 25 bp, Homo sapien
cctataccggtggaaagcgatgcaa

SEQ ID NO: 3795023 - DNA, 25 bp, Homo sapien
gaaactccagcaatttctactacat

SEQ ID NO: 3795024 - DNA, 25 bp, Homo sapien
cacgtggctgctcatttccagttgt

SEQ ID NO: 3795025 - DNA, 25 bp, Homo sapien
ctttaggagaaactccagcaatttc

SEQ ID NO: 3795026 - DNA, 25 bp, Homo sapien
ttctactacattatcccaaactcca

SEQ ID NO: 3795027 - DNA, 25 bp, Homo sapien
tatagtccatttgaccagcacagtg

SEQ ID NO: 3795028 - DNA, 25 bp, Homo sapien
caaacagaagtctccttacttcacc

SEQ ID NO: 3795029 - DNA, 25 bp, Homo sapien
aaacagaagtctccttacttcacca

SEQ ID NO: 3795030 - DNA, 25 bp, Homo sapien
tatcttaggtgctagaagaggtggt

SEQ ID NO: 3795031 - DNA, 25 bp, Homo sapien
ctaattttactacaaagggcacgtg

SEQ ID NO: 3795032 - DNA, 25 bp, Homo sapien
taaactggcatgatgatccaagaca

SEQ ID NO: 3795033 - DNA, 25 bp, Homo sapien
taagagtttaaccagtgttccagca

SEQ ID NO: 3795034 - DNA, 25 bp, Homo sapien
ggaatgtcttcggataataaatgga

SEQ ID NO: 3795035 - DNA, 25 bp, Homo sapien
cctggaatgtcttcggataataaat

SEQ ID NO: 3795036 - DNA, 25 bp, Homo sapien
tgtcttcggataataaatggaagac

SEQ ID NO: 3795037 - DNA, 25 bp, Homo sapien
tcacctggaatgtcttcggataata

SEQ ID NO: 3795038 - DNA, 25 bp, Homo sapien
aacggcacccttgtctctggatgga

SEQ ID NO: 3795039 - DNA, 25 bp, Homo sapien
tgcttcaatcctcgtaaacacctgg

SEQ ID NO: 3795040 - DNA, 25 bp, Homo sapien
gaacctgtacttgtcttctgcggca

SEQ ID NO: 3795041 - DNA, 25 bp, Homo sapien
tacaaggcttggtgaaaggagcacc

SEQ ID NO: 3795042 - DNA, 25 bp, Homo sapien
gacatctacaaaagtgaatgcttga

SEQ ID NO: 3795043 - DNA, 25 bp, Homo sapien
tcacatataggctaagggaatccaa

SEQ ID NO: 3795044 - DNA, 25 bp, Homo sapien
taaagacaattctaaggctctcagt

SEQ ID NO: 3795045 - DNA, 25 bp, Homo sapien
tttaaatcctgcgaagacatctaca

SEQ ID NO: 3795046 - DNA, 25 bp, Homo sapien
tgatccatatccaagccgcaaacct

SEQ ID NO: 3795047 - DNA, 25 bp, Homo sapien
gcaagattagcgagaaatgttcact

SEQ ID NO: 3795048 - DNA, 25 bp, Homo sapien
aataaactatcacatgctggtgtgc

SEQ ID NO: 3795049 - DNA, 25 bp, Homo sapien
caatgtcagacccaatcaatcgatc

SEQ ID NO: 3795050 - DNA, 25 bp, Homo sapien
taaataaaggaggactatctgcgcc

SEQ ID NO: 3795051 - DNA, 25 bp, Homo sapien
tatctgcgcctatatggatgtctct

SEQ ID NO: 3795052 - DNA, 25 bp, Homo sapien
gatccctgggttgtgcaaaattcta

SEQ ID NO: 3795053 - DNA, 25 bp, Homo sapien
catcatcatttgcagcttccaactg

SEQ ID NO: 3795054 - DNA, 25 bp, Homo sapien
caggtgaattataactcctcctccc

SEQ ID NO: 3795055 - DNA, 25 bp, Homo sapien
ccctgtaagataatcaggcttgttt

SEQ ID NO: 3795056 - DNA, 25 bp, Homo sapien
cacacagagattcttagtgattagt

SEQ ID NO: 3795057 - DNA, 25 bp, Homo sapien
tcctcctccctgtaagataatcagg

SEQ ID NO: 3795058 - DNA, 25 bp, Homo sapien
caactgatcaatttatacaagtgga

SEQ ID NO: 3795059 - DNA, 25 bp, Homo sapien
gtatctgtccttcaagggttaagcc

SEQ ID NO: 3795060 - DNA, 25 bp, Homo sapien
caataattcagggtgacaagtcagc

SEQ ID NO: 3795061 - DNA, 25 bp, Homo sapien
caagtggatgttagccctggaatta

SEQ ID NO: 3795062 - DNA, 25 bp, Homo sapien
ggacaacgagttagcaagacagaga

SEQ ID NO: 3795063 - DNA, 25 bp, Homo sapien
caagccaagcaacacacagtgtgta

SEQ ID NO: 3795064 - DNA, 25 bp, Homo sapien
tagcaggactcttcatgagcgtaga

SEQ ID NO: 3795065 - DNA, 25 bp, Homo sapien
tggtttgctctaagacaagccaagc

SEQ ID NO: 3795066 - DNA, 25 bp, Homo sapien
gagctatgtactttgtcccaagaca

SEQ ID NO: 3795067 - DNA, 25 bp, Homo sapien
ttttccatgagtgaccggaggccac

SEQ ID NO: 3795068 - DNA, 25 bp, Homo sapien
catccaaagcctagcaacgttgctg

SEQ ID NO: 3795069 - DNA, 25 bp, Homo sapien
ggactctcagtccacagcaactatg

SEQ ID NO: 3795070 - DNA, 25 bp, Homo sapien
cagtaaacagaataatctaatggta

SEQ ID NO: 3795071 - DNA, 25 bp, Homo sapien
ttccaccaagtcacatgaattgcat

SEQ ID NO: 3795072 - DNA, 25 bp, Homo sapien
gcattttctaactcccgcagccctg

SEQ ID NO: 3795073 - DNA, 25 bp, Homo sapien
tagcttcactggcattccaccaagt

SEQ ID NO: 3795074 - DNA, 25 bp, Homo sapien
gaattgatcttgtgaaccccacagg

SEQ ID NO: 3795075 - DNA, 25 bp, Homo sapien
ggaattgatcttgtgaaccccacag

SEQ ID NO: 3795076 - DNA, 25 bp, Homo sapien
tgatcttgtgaaccccacagggacc

SEQ ID NO: 3795077 - DNA, 25 bp, Homo sapien
attgatcttgtgaaccccacaggga

SEQ ID NO: 3795078 - DNA, 25 bp, Homo sapien
cagcgcgtgcccaaagacaaggcca

SEQ ID NO: 3795079 - DNA, 25 bp, Homo sapien
gatgtttctgaagcaagcgtcttcg

SEQ ID NO: 3795080 - DNA, 25 bp, Homo sapien
tttgctgcacgaactgtgcccagcg

SEQ ID NO: 3795081 - DNA, 25 bp, Homo sapien
tgtattcaaaacatagtagaggcca

SEQ ID NO: 3795082 - DNA, 25 bp, Homo sapien
ggatctccggtccttgcctccaaga

SEQ ID NO: 3795083 - DNA, 25 bp, Homo sapien
ggaagccattaatctaagtgaatta

SEQ ID NO: 3795084 - DNA, 25 bp, Homo sapien
attaacctagatacccatcaatggc

SEQ ID NO: 3795085 - DNA, 25 bp, Homo sapien
ttgtctcttctagggagggaaaatg

SEQ ID NO: 3795086 - DNA, 25 bp, Homo sapien
cattgtctcttctagggagggaaaa

SEQ ID NO: 3795087 - DNA, 25 bp, Homo sapien
tgtctcttctagggagggaaaatgg

SEQ ID NO: 3795088 - DNA, 25 bp, Homo sapien
tccattgtctcttctagggagggaa

SEQ ID NO: 3795089 - DNA, 25 bp, Homo sapien
cctcatggtacttttccccctcatg

SEQ ID NO: 3795090 - DNA, 25 bp, Homo sapien
gcatcttcctcatggtacttttccc

SEQ ID NO: 3795091 - DNA, 25 bp, Homo sapien
tatcaagaacaaaaacatctgatag

SEQ ID NO: 3795092 - DNA, 25 bp, Homo sapien
catggtacttttccccctcatgata

SEQ ID NO: 3795093 - DNA, 25 bp, Homo sapien
caggagagctccttgtaaatttcct

SEQ ID NO: 3795094 - DNA, 25 bp, Homo sapien
tatcctgtgccaatgagaatacgat

SEQ ID NO: 3795095 - DNA, 25 bp, Homo sapien
agtagcataatcaagtataataggg

SEQ ID NO: 3795096 - DNA, 25 bp, Homo sapien
cactcaatagcatggaagtggctga

SEQ ID NO: 3795097 - DNA, 25 bp, Homo sapien
gaagaaaacaatgccatctggcctc

SEQ ID NO: 3795098 - DNA, 25 bp, Homo sapien
tataaaatgtagttcatgctgcacg

SEQ ID NO: 3795099 - DNA, 25 bp, Homo sapien
tacacactaggcagtcaaagtccag

SEQ ID NO: 3795100 - DNA, 25 bp, Homo sapien
tgcaacttgcctgaaacctgccaaa

SEQ ID NO: 3795101 - DNA, 25 bp, Homo sapien
cccttcctcaccagactgctcaggg

SEQ ID NO: 3795102 - DNA, 25 bp, Homo sapien
tgctcaggggtgtcgaaggagggcc

SEQ ID NO: 3795103 - DNA, 25 bp, Homo sapien
accagactgctcaggggtgtcgaag

SEQ ID NO: 3795104 - DNA, 25 bp, Homo sapien
gggtgtcgaaggagggccagtccat

SEQ ID NO: 3795105 - DNA, 25 bp, Homo sapien
gacatgccggttagagtcatcctag

SEQ ID NO: 3795106 - DNA, 25 bp, Homo sapien
aaatgagagcaaggctactggtggc

SEQ ID NO: 3795107 - DNA, 25 bp, Homo sapien
tcatcctagtgcatcggctgacagc

SEQ ID NO: 3795108 - DNA, 25 bp, Homo sapien
tgccgcatgggttggagcagcactc

SEQ ID NO: 3795109 - DNA, 25 bp, Homo sapien
gggcaagggatctcctggatttaag

SEQ ID NO: 3795110 - DNA, 25 bp, Homo sapien
attcattcaaccaaggtgtatggaa

SEQ ID NO: 3795111 - DNA, 25 bp, Homo sapien
ctctgtcaccaccttaataagctac

SEQ ID NO: 3795112 - DNA, 25 bp, Homo sapien
caaccaaggtgtatggaaacttcac

SEQ ID NO: 3795113 - DNA, 25 bp, Homo sapien
ttggatttgctgataaaaggctggg

SEQ ID NO: 3795114 - DNA, 25 bp, Homo sapien
acaatttctcaggaggtagtgctaa

SEQ ID NO: 3795115 - DNA, 25 bp, Homo sapien
gctgggcatttacatgaaagaagtg

SEQ ID NO: 3795116 - DNA, 25 bp, Homo sapien
cactgccatggtgggaataacaatg

SEQ ID NO: 3795117 - DNA, 25 bp, Homo sapien
taaattgacaagcacgatacacttg

SEQ ID NO: 3795118 - DNA, 25 bp, Homo sapien
ggggaatatgttttcgtgattcacc

SEQ ID NO: 3795119 - DNA, 25 bp, Homo sapien
caagcacgatacacttgtcattggg

SEQ ID NO: 3795120 - DNA, 25 bp, Homo sapien
cctcactaccctctgtaaattgaca

SEQ ID NO: 3795121 - DNA, 25 bp, Homo sapien
gaaacatcatggctgagattctgtg

SEQ ID NO: 3795122 - DNA, 25 bp, Homo sapien
aaaaccatggcgtccaatggccctc

SEQ ID NO: 3795123 - DNA, 25 bp, Homo sapien
cacaaaccgtgaaaatgctccaggg

SEQ ID NO: 3795124 - DNA, 25 bp, Homo sapien
taattctgtggtcataagtgactga

SEQ ID NO: 3795125 - DNA, 25 bp, Homo sapien
gtcttacttttgacaattacaaggc

SEQ ID NO: 3795126 - DNA, 25 bp, Homo sapien
ttttcttgatgtcctttccaactcc

SEQ ID NO: 3795127 - DNA, 25 bp, Homo sapien
tctttggttccttcgtagcatgccc

SEQ ID NO: 3795128 - DNA, 25 bp, Homo sapien
tataccagctcttgcggtcttactt

SEQ ID NO: 3795129 - DNA, 25 bp, Homo sapien
gacataaaggcgatcaagatgtaca

SEQ ID NO: 3795130 - DNA, 25 bp, Homo sapien
tcaagatgtacaatggtgaacagat

SEQ ID NO: 3795131 - DNA, 25 bp, Homo sapien
ttgggcctattgcagacataaaggc

SEQ ID NO: 3795132 - DNA, 25 bp, Homo sapien
gatgtacaatggtgaacagattctt

SEQ ID NO: 3795133 - DNA, 25 bp, Homo sapien
tcctctgaagaatagtcaatccttg

SEQ ID NO: 3795134 - DNA, 25 bp, Homo sapien
catgtgcgtctatgcagataagctc

SEQ ID NO: 3795135 - DNA, 25 bp, Homo sapien
gataagctcaacgtaactgttacca

SEQ ID NO: 3795136 - DNA, 25 bp, Homo sapien
agtcaatccttgttcatcatgtgcg

SEQ ID NO: 3795137 - DNA, 25 bp, Homo sapien
ggtgtgcaccttcgaaatggagtct

SEQ ID NO: 3795138 - DNA, 25 bp, Homo sapien
taaagacaacggctatgaaggaggc

SEQ ID NO: 3795139 - DNA, 25 bp, Homo sapien
ctgaaagatggctatggtgtgcacc

SEQ ID NO: 3795140 - DNA, 25 bp, Homo sapien
tgtacttagtttcaacagcctggag

SEQ ID NO: 3795141 - DNA, 25 bp, Homo sapien
ttcaaccacgacatgaagcaatagc

SEQ ID NO: 3795142 - DNA, 25 bp, Homo sapien
catgaagcaatagctgctcagagcc

SEQ ID NO: 3795143 - DNA, 25 bp, Homo sapien
tcagtcgcttcctgcttcaaccacg

SEQ ID NO: 3795144 - DNA, 25 bp, Homo sapien
gcttcctgcttcaaccacgacatga

SEQ ID NO: 3795145 - DNA, 25 bp, Homo sapien
catgactaccttttaacttagcttc

SEQ ID NO: 3795146 - DNA, 25 bp, Homo sapien
actcacaggtttttaggctctctcc

SEQ ID NO: 3795147 - DNA, 25 bp, Homo sapien
gaaaaacatcactccagaaacagaa

SEQ ID NO: 3795148 - DNA, 25 bp, Homo sapien
aagctctgggattcccaagatcagg

SEQ ID NO: 3795149 - DNA, 25 bp, Homo sapien
cataaagggatactgggtagacagc

SEQ ID NO: 3795150 - DNA, 25 bp, Homo sapien
catctacaaggacagtcgagtttcc

SEQ ID NO: 3795151 - DNA, 25 bp, Homo sapien
gatacttaacgatgcacatgcgtgc

SEQ ID NO: 3795152 - DNA, 25 bp, Homo sapien
gaggcccaatttgtagcccagaaca

SEQ ID NO: 3795153 - DNA, 25 bp, Homo sapien
agcgctagggtcaacgcggctacag

SEQ ID NO: 3795154 - DNA, 25 bp, Homo sapien
gcggctacaggcaagcgaatacttt

SEQ ID NO: 3795155 - DNA, 25 bp, Homo sapien
agtcatcaagcgctagggtcaacgc

SEQ ID NO: 3795156 - DNA, 25 bp, Homo sapien
ggtcaacgcggctacaggcaagcga

SEQ ID NO: 3795157 - DNA, 25 bp, Homo sapien
taatgtcaggcaatggttctcaact

SEQ ID NO: 3795158 - DNA, 25 bp, Homo sapien
ggcttggatccatgcaacgtgattt

SEQ ID NO: 3795159 - DNA, 25 bp, Homo sapien
tgatcactgagtcccgtattcctaa

SEQ ID NO: 3795160 - DNA, 25 bp, Homo sapien
tcagggtctggataacctatgtccc

SEQ ID NO: 3795161 - DNA, 25 bp, Homo sapien
taaaatgggacaatatcagggctgt

SEQ ID NO: 3795162 - DNA, 25 bp, Homo sapien
tattgctgggcaggactttttcaac

SEQ ID NO: 3795163 - DNA, 25 bp, Homo sapien
aaattaattctgagctctgcggtgc

SEQ ID NO: 3795164 - DNA, 25 bp, Homo sapien
aggcacacggtaagctcccatcata

SEQ ID NO: 3795165 - DNA, 25 bp, Homo sapien
tatttgctgtgtcttacagtcctta

SEQ ID NO: 3795166 - DNA, 25 bp, Homo sapien
tgctgtgtcttacagtccttaactt

SEQ ID NO: 3795167 - DNA, 25 bp, Homo sapien
ttattcagctcgatcttgcagctca

SEQ ID NO: 3795168 - DNA, 25 bp, Homo sapien
actttggcacaatatgccaaaagaa

SEQ ID NO: 3795169 - DNA, 25 bp, Homo sapien
gctgctgacagctaaatgagaatcg

SEQ ID NO: 3795170 - DNA, 25 bp, Homo sapien
ggacctatgcagactcccctagagg

SEQ ID NO: 3795171 - DNA, 25 bp, Homo sapien
tcacctcagttgctagtctcccagg

SEQ ID NO: 3795172 - DNA, 25 bp, Homo sapien
tgaagccctttctagcactgactgt

SEQ ID NO: 3795173 - DNA, 25 bp, Homo sapien
ggcgacgggccaaatgacccaaatg

SEQ ID NO: 3795174 - DNA, 25 bp, Homo sapien
ggccaaatgacccaaatgcccgctg

SEQ ID NO: 3795175 - DNA, 25 bp, Homo sapien
tgcaggcagggcgacgggccaaatg

SEQ ID NO: 3795176 - DNA, 25 bp, Homo sapien
ccaaatgcccgctggaaggacccat

SEQ ID NO: 3795177 - DNA, 25 bp, Homo sapien
attccagggtgcctaggccaggtgc

SEQ ID NO: 3795178 - DNA, 25 bp, Homo sapien
cagctgccgtgatgaggtaggagtt

SEQ ID NO: 3795179 - DNA, 25 bp, Homo sapien
cgtgatgaggtaggagtttcctgtg

SEQ ID NO: 3795180 - DNA, 25 bp, Homo sapien
cacacatgcagctgccgtgatgagg

SEQ ID NO: 3795181 - DNA, 25 bp, Homo sapien
ctgaatgtgaaacccttgagaggac

SEQ ID NO: 3795182 - DNA, 25 bp, Homo sapien
agtgcttcatcatgcctgatgggtc

SEQ ID NO: 3795183 - DNA, 25 bp, Homo sapien
tgatgggtcagccctttcctgaatg

SEQ ID NO: 3795184 - DNA, 25 bp, Homo sapien
ctgaatctgtcaagcagtgcttcat

SEQ ID NO: 3795185 - DNA, 25 bp, Homo sapien
caagatatgttgacaaacccaggca

SEQ ID NO: 3795186 - DNA, 25 bp, Homo sapien
gaaggtgaactaaatcctgcgtgct

SEQ ID NO: 3795187 - DNA, 25 bp, Homo sapien
tgcgtgcttccagtgaacctagtct

SEQ ID NO: 3795188 - DNA, 25 bp, Homo sapien
ggactgtctgccttatcactgactg

SEQ ID NO: 3795189 - DNA, 25 bp, Homo sapien
tgaatttgacaactatgggcacctc

SEQ ID NO: 3795190 - DNA, 25 bp, Homo sapien
tctgtgcagcctttagagcagtgcc

SEQ ID NO: 3795191 - DNA, 25 bp, Homo sapien
tctagtgaaagaacggcttgcctct

SEQ ID NO: 3795192 - DNA, 25 bp, Homo sapien
tgcatggacgcttggcttgagaaag

SEQ ID NO: 3795193 - DNA, 25 bp, Homo sapien
cataaggtctgaatctgcccgatgg

SEQ ID NO: 3795194 - DNA, 25 bp, Homo sapien
aggtctgaatctgcccgatggtatc

SEQ ID NO: 3795195 - DNA, 25 bp, Homo sapien
gaatctgcccgatggtatcttcctt

SEQ ID NO: 3795196 - DNA, 25 bp, Homo sapien
tttccataaggtctgaatctgcccg

SEQ ID NO: 3795197 - DNA, 25 bp, Homo sapien
gaagtgacctaagccctctgaaaca

SEQ ID NO: 3795198 - DNA, 25 bp, Homo sapien
tctgtccttatgtgcggagctctcc

SEQ ID NO: 3795199 - DNA, 25 bp, Homo sapien
gatgtcactcaagcttgtccctgga

SEQ ID NO: 3795200 - DNA, 25 bp, Homo sapien
tgtcacaggacctaatggcagaggc

SEQ ID NO: 3795201 - DNA, 25 bp, Homo sapien
tccttaatcaggaatagggcatcca

SEQ ID NO: 3795202 - DNA, 25 bp, Homo sapien
ctatattaaggagcccagaggaaca

SEQ ID NO: 3795203 - DNA, 25 bp, Homo sapien
tcatatgcattcaagggccaccctg

SEQ ID NO: 3795204 - DNA, 25 bp, Homo sapien
tgagaaagagccatatcaaggccac

SEQ ID NO: 3795205 - DNA, 25 bp, Homo sapien
ttctcactgacctgcaggacggaac

SEQ ID NO: 3795206 - DNA, 25 bp, Homo sapien
agctcgcaaggcacaactcactttg

SEQ ID NO: 3795207 - DNA, 25 bp, Homo sapien
gaaaactaattatcccacggctcta

SEQ ID NO: 3795208 - DNA, 25 bp, Homo sapien
cactttgcaggctaatcaaaatgct

SEQ ID NO: 3795209 - DNA, 25 bp, Homo sapien
gacacatgcccacgttggggagcgc

SEQ ID NO: 3795210 - DNA, 25 bp, Homo sapien
gtggcccccgtcagaggatgctgca

SEQ ID NO: 3795211 - DNA, 25 bp, Homo sapien
cacacgaaagctggggacacatgcc

SEQ ID NO: 3795212 - DNA, 25 bp, Homo sapien
ttggggagcgccacgcaggtggccc

SEQ ID NO: 3795213 - DNA, 25 bp, Homo sapien
ttcagcttcaagaagattcaccatc

SEQ ID NO: 3795214 - DNA, 25 bp, Homo sapien
taagttcagcttcaagaagattcac

SEQ ID NO: 3795215 - DNA, 25 bp, Homo sapien
ttggaacgtggaagattaagtattg

SEQ ID NO: 3795216 - DNA, 25 bp, Homo sapien
ttcaagaagattcaccatcaaagaa

SEQ ID NO: 3795217 - DNA, 25 bp, Homo sapien
tctctgctgagatcaacaatgcctc

SEQ ID NO: 3795218 - DNA, 25 bp, Homo sapien
taagcgcttcctgacctgattctcc

SEQ ID NO: 3795219 - DNA, 25 bp, Homo sapien
gactgactggctgaatgagcaaatc

SEQ ID NO: 3795220 - DNA, 25 bp, Homo sapien
aatgcctcaggaaccgacctctgac

SEQ ID NO: 3795221 - DNA, 25 bp, Homo sapien
gagactgcccacaccatatcatgac

SEQ ID NO: 3795222 - DNA, 25 bp, Homo sapien
gacagaactaagtgcaccatcacct

SEQ ID NO: 3795223 - DNA, 25 bp, Homo sapien
cactgagagctacctatgtttccaa

SEQ ID NO: 3795224 - DNA, 25 bp, Homo sapien
gcagattggctcaaataaggaagta

SEQ ID NO: 3795225 - DNA, 25 bp, Homo sapien
ctctgccacccgaattcaagctagt

SEQ ID NO: 3795226 - DNA, 25 bp, Homo sapien
tctgccacccgaattcaagctagtc

SEQ ID NO: 3795227 - DNA, 25 bp, Homo sapien
cacccgaattcaagctagtcttctg

SEQ ID NO: 3795228 - DNA, 25 bp, Homo sapien
tgccacccgaattcaagctagtctt

SEQ ID NO: 3795229 - DNA, 25 bp, Homo sapien
aactacaaagctgggagccaaatcc

SEQ ID NO: 3795230 - DNA, 25 bp, Homo sapien
ttcccagacgacgaagagacacagc

SEQ ID NO: 3795231 - DNA, 25 bp, Homo sapien
gaaaatccgcatcagcaactcttaa

SEQ ID NO: 3795232 - DNA, 25 bp, Homo sapien
tgtcaggagccaagcactcatcaac

SEQ ID NO: 3795233 - DNA, 25 bp, Homo sapien
tcataggcacgccataaggatgcag

SEQ ID NO: 3795234 - DNA, 25 bp, Homo sapien
ggagaactccttgagacgccagcat

SEQ ID NO: 3795235 - DNA, 25 bp, Homo sapien
gaaggtaaggagctgccggtacaat

SEQ ID NO: 3795236 - DNA, 25 bp, Homo sapien
cggtacaatcataggcacgccataa

SEQ ID NO: 3795237 - DNA, 25 bp, Homo sapien
ctataacaggaacttatgagaactt

SEQ ID NO: 3795238 - DNA, 25 bp, Homo sapien
agcatcaatcagcatagagtgaagg

SEQ ID NO: 3795239 - DNA, 25 bp, Homo sapien
gcatcaatcagcatagagtgaaggc

SEQ ID NO: 3795240 - DNA, 25 bp, Homo sapien
acaggaacttatgagaactttcaaa

SEQ ID NO: 3795241 - DNA, 25 bp, Homo sapien
cagttgtggcgttggtacaatgagc

SEQ ID NO: 3795242 - DNA, 25 bp, Homo sapien
tcccttctgcagtcgatgtgaccat

SEQ ID NO: 3795243 - DNA, 25 bp, Homo sapien
aacactgctggcaatcagttgtggc

SEQ ID NO: 3795244 - DNA, 25 bp, Homo sapien
tgagctgattgtcaaatcggattgc

SEQ ID NO: 3795245 - DNA, 25 bp, Homo sapien
gacttcgaagcgactcagagctaca

SEQ ID NO: 3795246 - DNA, 25 bp, Homo sapien
caaagcccttgtactgttggtcaat

SEQ ID NO: 3795247 - DNA, 25 bp, Homo sapien
gatgcagatgttctggagtcccatg

SEQ ID NO: 3795248 - DNA, 25 bp, Homo sapien
cctggacactgatccatagcagctt

SEQ ID NO: 3795249 - DNA, 25 bp, Homo sapien
gctggaaacaacatcggatttacaa

SEQ ID NO: 3795250 - DNA, 25 bp, Homo sapien
ccagggtgctcaacgatctggcaat

SEQ ID NO: 3795251 - DNA, 25 bp, Homo sapien
tacaaatgtcctggcaataagagaa

SEQ ID NO: 3795252 - DNA, 25 bp, Homo sapien
ggctaagtgacattctctgacacag

SEQ ID NO: 3795253 - DNA, 25 bp, Homo sapien
gcagtatttcatgattcactgacac

SEQ ID NO: 3795254 - DNA, 25 bp, Homo sapien
gtatttcatgattcactgacaccat

SEQ ID NO: 3795255 - DNA, 25 bp, Homo sapien
cggcagtatttcatgattcactgac

SEQ ID NO: 3795256 - DNA, 25 bp, Homo sapien
agtatttcatgattcactgacacca

SEQ ID NO: 3795257 - DNA, 25 bp, Homo sapien
caatccacgctgagttgtgaaaaac

SEQ ID NO: 3795258 - DNA, 25 bp, Homo sapien
atccacgctgagttgtgaaaaacct

SEQ ID NO: 3795259 - DNA, 25 bp, Homo sapien
ccccaatccacgctgagttgtgaaa

SEQ ID NO: 3795260 - DNA, 25 bp, Homo sapien
cccaatccacgctgagttgtgaaaa

SEQ ID NO: 3795261 - DNA, 25 bp, Homo sapien
ggagatgggcttcatttcccgtctt

SEQ ID NO: 3795262 - DNA, 25 bp, Homo sapien
cccgtcttccgttactagcatcatt

SEQ ID NO: 3795263 - DNA, 25 bp, Homo sapien
taatggccgctgatactgattagct

SEQ ID NO: 3795264 - DNA, 25 bp, Homo sapien
gctttagtaagatccaagatttgga

SEQ ID NO: 3795265 - DNA, 25 bp, Homo sapien
tgctaagagccaggtagattccttg

SEQ ID NO: 3795266 - DNA, 25 bp, Homo sapien
taagaaggacattccgctattcccc

SEQ ID NO: 3795267 - DNA, 25 bp, Homo sapien
ggatacagttacaccatatcttgga

SEQ ID NO: 3795268 - DNA, 25 bp, Homo sapien
tacatattggcttaaggctagagtc

SEQ ID NO: 3795269 - DNA, 25 bp, Homo sapien
gaaggtccttttgtgccctgcaaga

SEQ ID NO: 3795270 - DNA, 25 bp, Homo sapien
tgcagtgtgcccaagagtgtccgtg

SEQ ID NO: 3795271 - DNA, 25 bp, Homo sapien
gaagtgcctgggaaataaaagccta

SEQ ID NO: 3795272 - DNA, 25 bp, Homo sapien
tagatatctaagcttgcagtccacc

SEQ ID NO: 3795273 - DNA, 25 bp, Homo sapien
taacaagccgtgcaggaatgctgat

SEQ ID NO: 3795274 - DNA, 25 bp, Homo sapien
ggtcacacgatgttccccaccttgt

SEQ ID NO: 3795275 - DNA, 25 bp, Homo sapien
tgtatgataaccaaggacctgtccc

SEQ ID NO: 3795276 - DNA, 25 bp, Homo sapien
gaatgctgatgcaccctcatgtatg

SEQ ID NO: 3795277 - DNA, 25 bp, Homo sapien
gcagctttgcctactccggccttaa

SEQ ID NO: 3795278 - DNA, 25 bp, Homo sapien
gattatctttgccacgtcgagcagt

SEQ ID NO: 3795279 - DNA, 25 bp, Homo sapien
tggaaatggtactctgcagcttggc

SEQ ID NO: 3795280 - DNA, 25 bp, Homo sapien
gctgagtttccgttcccatgttgat

SEQ ID NO: 3795281 - DNA, 25 bp, Homo sapien
atctggtgggtgacgatcgacgtct

SEQ ID NO: 3795282 - DNA, 25 bp, Homo sapien
ctgaggccatggtttctattagcaa

SEQ ID NO: 3795283 - DNA, 25 bp, Homo sapien
tctcgttccggttgacaagacggac

SEQ ID NO: 3795284 - DNA, 25 bp, Homo sapien
tagcaaccaggtctttctcgttccg

SEQ ID NO: 3795285 - DNA, 25 bp, Homo sapien
taagagtgttctcgtgcaactgaag

SEQ ID NO: 3795286 - DNA, 25 bp, Homo sapien
taattaaagtgtttgatggtgtttc

SEQ ID NO: 3795287 - DNA, 25 bp, Homo sapien
tcgtgcaactgaagggtaaggtttg

SEQ ID NO: 3795288 - DNA, 25 bp, Homo sapien
tttatccttggtaagagtgttctcg

SEQ ID NO: 3795289 - DNA, 25 bp, Homo sapien
gatgctgggcccgtcgcatgccatc

SEQ ID NO: 3795290 - DNA, 25 bp, Homo sapien
actgctgatgctgggcccgtcgcat

SEQ ID NO: 3795291 - DNA, 25 bp, Homo sapien
ctcactgctgatgctgggcccgtcg

SEQ ID NO: 3795292 - DNA, 25 bp, Homo sapien
cattctcctaccctctcactgctga

SEQ ID NO: 3795293 - DNA, 25 bp, Homo sapien
ttagtatccaattgctttgtagcca

SEQ ID NO: 3795294 - DNA, 25 bp, Homo sapien
caacaattatagcagagcttctgct

SEQ ID NO: 3795295 - DNA, 25 bp, Homo sapien
tggtcatggaataagaatctttctc

SEQ ID NO: 3795296 - DNA, 25 bp, Homo sapien
tacccagatggtacaaatcgttgct

SEQ ID NO: 3795297 - DNA, 25 bp, Homo sapien
ccaaaggtggccattaaatcagaaa

SEQ ID NO: 3795298 - DNA, 25 bp, Homo sapien
tactgacaatatccttattcatctg

SEQ ID NO: 3795299 - DNA, 25 bp, Homo sapien
tattcatctgatagcccaaaggtgg

SEQ ID NO: 3795300 - DNA, 25 bp, Homo sapien
cagaggatatccatgctagttagat

SEQ ID NO: 3795301 - DNA, 25 bp, Homo sapien
aaatgccaagtggactcggagagcc

SEQ ID NO: 3795302 - DNA, 25 bp, Homo sapien
cacttgctgttaagtataagctgat

SEQ ID NO: 3795303 - DNA, 25 bp, Homo sapien
taatcttgaggtatgggctcttgcc

SEQ ID NO: 3795304 - DNA, 25 bp, Homo sapien
aacaaaatagatgtcagttaggcac

SEQ ID NO: 3795305 - DNA, 25 bp, Homo sapien
gggcatacatttctgttgacacaac

SEQ ID NO: 3795306 - DNA, 25 bp, Homo sapien
gaagttgcaaacacaccaagtggta

SEQ ID NO: 3795307 - DNA, 25 bp, Homo sapien
cactttcagctctatggggcataca

SEQ ID NO: 3795308 - DNA, 25 bp, Homo sapien
gtggtagcacagaagaaggatcaga

SEQ ID NO: 3795309 - DNA, 25 bp, Homo sapien
tgcaccatcctgcttcctttctcct

SEQ ID NO: 3795310 - DNA, 25 bp, Homo sapien
ccatcctgcttcctttctcctccat

SEQ ID NO: 3795311 - DNA, 25 bp, Homo sapien
ctgctgcaccatcctgcttcctttc

SEQ ID NO: 3795312 - DNA, 25 bp, Homo sapien
caccatcctgcttcctttctcctcc

SEQ ID NO: 3795313 - DNA, 25 bp, Homo sapien
catgagttgtgcaattctggcaaac

SEQ ID NO: 3795314 - DNA, 25 bp, Homo sapien
ggactgagtccatggtagccaagga

SEQ ID NO: 3795315 - DNA, 25 bp, Homo sapien
cagagcaccatgctctagggactga

SEQ ID NO: 3795316 - DNA, 25 bp, Homo sapien
aggagcctgcagttagcatccagga

SEQ ID NO: 3795317 - DNA, 25 bp, Homo sapien
caggacgatcgtgccccgcgtactt

SEQ ID NO: 3795318 - DNA, 25 bp, Homo sapien
tcccagatcccaggacgatcgtgcc

SEQ ID NO: 3795319 - DNA, 25 bp, Homo sapien
atcgtgccccgcgtactttctaggg

SEQ ID NO: 3795320 - DNA, 25 bp, Homo sapien
ccgcgtactttctaggggtcaccat

SEQ ID NO: 3795321 - DNA, 25 bp, Homo sapien
tcaggggcagcggctgcttcctgat

SEQ ID NO: 3795322 - DNA, 25 bp, Homo sapien
ggggcagcggctgcttcctgattac

SEQ ID NO: 3795323 - DNA, 25 bp, Homo sapien
gggcagcggctgcttcctgattacc

SEQ ID NO: 3795324 - DNA, 25 bp, Homo sapien
tgtgtcaggggcagcggctgcttcc

SEQ ID NO: 3795325 - DNA, 25 bp, Homo sapien
tttaatgtgtgctcgggaaccgtgg

SEQ ID NO: 3795326 - DNA, 25 bp, Homo sapien
tggtctggcctgtgtactctggcgc

SEQ ID NO: 3795327 - DNA, 25 bp, Homo sapien
caaactgggccgaagcgtaaggctg

SEQ ID NO: 3795328 - DNA, 25 bp, Homo sapien
tgccagagacggtctgagcgctcgt

SEQ ID NO: 3795329 - DNA, 25 bp, Homo sapien
cacaggtggtgactggagcctgaac

SEQ ID NO: 3795330 - DNA, 25 bp, Homo sapien
tgaagataacaccacacaagccagg

SEQ ID NO: 3795331 - DNA, 25 bp, Homo sapien
cacgagagggcttatatgggatgaa

SEQ ID NO: 3795332 - DNA, 25 bp, Homo sapien
aatggagattgattcccacgagagg

SEQ ID NO: 3795333 - DNA, 25 bp, Homo sapien
tcaagcttctttgtacaaaaggttc

SEQ ID NO: 3795334 - DNA, 25 bp, Homo sapien
tctttgtacaaaaggttcaccatgc

SEQ ID NO: 3795335 - DNA, 25 bp, Homo sapien
gcttctttgtacaaaaggttcacca

SEQ ID NO: 3795336 - DNA, 25 bp, Homo sapien
ttgtacaaaaggttcaccatgctac

SEQ ID NO: 3795337 - DNA, 25 bp, Homo sapien
ttaaattcgttccacaggaaattca

SEQ ID NO: 3795338 - DNA, 25 bp, Homo sapien
agattaagtcagaagttgtaaattc

SEQ ID NO: 3795339 - DNA, 25 bp, Homo sapien
gtcagaagttgtaaattcagtatct

SEQ ID NO: 3795340 - DNA, 25 bp, Homo sapien
gattaagtcagaagttgtaaattca

SEQ ID NO: 3795341 - DNA, 25 bp, Homo sapien
taagtcagaagttgtaaattcagta

SEQ ID NO: 3795342 - DNA, 25 bp, Homo sapien
cactggagtgctggtaactgatcaa

SEQ ID NO: 3795343 - DNA, 25 bp, Homo sapien
agaaaagccctcatctgtagcattg

SEQ ID NO: 3795344 - DNA, 25 bp, Homo sapien
tcgacaatcacaggccattaagagc

SEQ ID NO: 3795345 - DNA, 25 bp, Homo sapien
tactctcaccctggaggtaacaagc

SEQ ID NO: 3795346 - DNA, 25 bp, Homo sapien
aactcttccttctgagggaatgcac

SEQ ID NO: 3795347 - DNA, 25 bp, Homo sapien
ttaagcctcactaagagttctttgt

SEQ ID NO: 3795348 - DNA, 25 bp, Homo sapien
gggaatgcaccttgtgcaattttgc

SEQ ID NO: 3795349 - DNA, 25 bp, Homo sapien
tatgtattctgagtaattagagtga

SEQ ID NO: 3795350 - DNA, 25 bp, Homo sapien
taatcagtggtcagcgtggccagaa

SEQ ID NO: 3795351 - DNA, 25 bp, Homo sapien
tggactcttggaccttcaaccacag

SEQ ID NO: 3795352 - DNA, 25 bp, Homo sapien
tccgtgagggtgtttccgaagaaga

SEQ ID NO: 3795353 - DNA, 25 bp, Homo sapien
gcagacccacgtacaatctgagtgg

SEQ ID NO: 3795354 - DNA, 25 bp, Homo sapien
tgtttctcctgaaatatctgacttg

SEQ ID NO: 3795355 - DNA, 25 bp, Homo sapien
tctcctgaaatatctgacttgctta

SEQ ID NO: 3795356 - DNA, 25 bp, Homo sapien
tttctcctgaaatatctgacttgct

SEQ ID NO: 3795357 - DNA, 25 bp, Homo sapien
cttgtttctcctgaaatatctgact

SEQ ID NO: 3795358 - DNA, 25 bp, Homo sapien
gctgttttggacgacaccagcaagg

SEQ ID NO: 3795359 - DNA, 25 bp, Homo sapien
agataaaaagcaggtacacagctct

SEQ ID NO: 3795360 - DNA, 25 bp, Homo sapien
tataaatccccagataaaaagcagg

SEQ ID NO: 3795361 - DNA, 25 bp, Homo sapien
gcaaggctccacttttataaatccc

SEQ ID NO: 3795362 - DNA, 25 bp, Homo sapien
tgggcatagagtgtttcttgcctgt

SEQ ID NO: 3795363 - DNA, 25 bp, Homo sapien
atcagtgggatgaggtgcaacctct

SEQ ID NO: 3795364 - DNA, 25 bp, Homo sapien
taggatcagtgggatgaggtgcaac

SEQ ID NO: 3795365 - DNA, 25 bp, Homo sapien
tcttgcctgttggctccaaactctc

SEQ ID NO: 3795366 - DNA, 25 bp, Homo sapien
cacggccaggtgacacagatttaag

SEQ ID NO: 3795367 - DNA, 25 bp, Homo sapien
cgaatgaattcaatgctctgctcca

SEQ ID NO: 3795368 - DNA, 25 bp, Homo sapien
tggctgggctgattccacggccagg

SEQ ID NO: 3795369 - DNA, 25 bp, Homo sapien
tccctgcaactcgaatgaattcaat

SEQ ID NO: 3795370 - DNA, 25 bp, Homo sapien
gatcacttagtgcttccacaaagac

SEQ ID NO: 3795371 - DNA, 25 bp, Homo sapien
gggctccctctgctataatcgttcc

SEQ ID NO: 3795372 - DNA, 25 bp, Homo sapien
tgagcaacccgagactaatcctggt

SEQ ID NO: 3795373 - DNA, 25 bp, Homo sapien
gattttgatatcgaccaatccaggg

SEQ ID NO: 3795374 - DNA, 25 bp, Homo sapien
tgtgatagtcgaagagcaacactgt

SEQ ID NO: 3795375 - DNA, 25 bp, Homo sapien
cagaatttgcgttttctccgctgag

SEQ ID NO: 3795376 - DNA, 25 bp, Homo sapien
caatgtcgccgccttcatgtgatag

SEQ ID NO: 3795377 - DNA, 25 bp, Homo sapien
gaagaagtgtacaatcaatgtcgcc

SEQ ID NO: 3795378 - DNA, 25 bp, Homo sapien
catgcagccgcttgggctgagactt

SEQ ID NO: 3795379 - DNA, 25 bp, Homo sapien
gggatattggagacatgcagccgct

SEQ ID NO: 3795380 - DNA, 25 bp, Homo sapien
ccatccgtcggtgctgcgtcatctg

SEQ ID NO: 3795381 - DNA, 25 bp, Homo sapien
aaacatttgtctgaggtccggatcc

SEQ ID NO: 3795382 - DNA, 25 bp, Homo sapien
tgctgggaagaaaggtgatacttac

SEQ ID NO: 3795383 - DNA, 25 bp, Homo sapien
gggaggtctctggaacccccagagc

SEQ ID NO: 3795384 - DNA, 25 bp, Homo sapien
tggaacccccagagcgggcactgct

SEQ ID NO: 3795385 - DNA, 25 bp, Homo sapien
gcactgctgggaagaaaggtgatac

SEQ ID NO: 3795386 - DNA, 25 bp, Homo sapien
tatgcagaagtagttgttctctgct

SEQ ID NO: 3795387 - DNA, 25 bp, Homo sapien
catggacttagaaactggtagctca

SEQ ID NO: 3795388 - DNA, 25 bp, Homo sapien
tgtttgctaaaatcagctttatgca

SEQ ID NO: 3795389 - DNA, 25 bp, Homo sapien
gatttcagaagaacgtagacttcag

SEQ ID NO: 3795390 - DNA, 25 bp, Homo sapien
tgtagcctgcagtaactttcacgat

SEQ ID NO: 3795391 - DNA, 25 bp, Homo sapien
gaaagagtgtcaggacggtcattaa

SEQ ID NO: 3795392 - DNA, 25 bp, Homo sapien
ttcacgataactgagtgacaccatg

SEQ ID NO: 3795393 - DNA, 25 bp, Homo sapien
gggatcacattgaaagccaacatca

SEQ ID NO: 3795394 - DNA, 25 bp, Homo sapien
aagattgtgcgtgaaggccaaagaa

SEQ ID NO: 3795395 - DNA, 25 bp, Homo sapien
tggatacagcataaaacgtaaaagt

SEQ ID NO: 3795396 - DNA, 25 bp, Homo sapien
taaaggttagttcaaagattgtgcg

SEQ ID NO: 3795397 - DNA, 25 bp, Homo sapien
actgtgagggatgttcaatggatac

SEQ ID NO: 3795398 - DNA, 25 bp, Homo sapien
agagcattacgcgtgcttctgtgtg

SEQ ID NO: 3795399 - DNA, 25 bp, Homo sapien
tggagagcattacgcgtgcttctgt

SEQ ID NO: 3795400 - DNA, 25 bp, Homo sapien
gagtggagagcattacgcgtgcttc

SEQ ID NO: 3795401 - DNA, 25 bp, Homo sapien
cccttgagtggagagcattacgcgt

SEQ ID NO: 3795402 - DNA, 25 bp, Homo sapien
taatttcaacatctaagattttacc

SEQ ID NO: 3795403 - DNA, 25 bp, Homo sapien
caacatctaagattttaccaaattg

SEQ ID NO: 3795404 - DNA, 25 bp, Homo sapien
ctttgagcctcgctcattaaaaata

SEQ ID NO: 3795405 - DNA, 25 bp, Homo sapien
tttgagcctcgctcattaaaaataa

SEQ ID NO: 3795406 - DNA, 25 bp, Homo sapien
ctgttttgaaacagaacctctcctg

SEQ ID NO: 3795407 - DNA, 25 bp, Homo sapien
gcagtacctaaacagtcagctccaa

SEQ ID NO: 3795408 - DNA, 25 bp, Homo sapien
tggaaatgctcctctaaataaggcc

SEQ ID NO: 3795409 - DNA, 25 bp, Homo sapien
tgcaagacaagctctttcagagggc

SEQ ID NO: 3795410 - DNA, 25 bp, Homo sapien
caccgagagaggctattttggatgt

SEQ ID NO: 3795411 - DNA, 25 bp, Homo sapien
aataaattacaggatcattcgcccc

SEQ ID NO: 3795412 - DNA, 25 bp, Homo sapien
tacgtagggagtagctatatctgca

SEQ ID NO: 3795413 - DNA, 25 bp, Homo sapien
tacttgttctgagataaggactcac

SEQ ID NO: 3795414 - DNA, 25 bp, Homo sapien
cgcacacggccagatatcttaagta

SEQ ID NO: 3795415 - DNA, 25 bp, Homo sapien
attatactccagaaccttgctctca

SEQ ID NO: 3795416 - DNA, 25 bp, Homo sapien
tgtccaacattatactccagaacct

SEQ ID NO: 3795417 - DNA, 25 bp, Homo sapien
caacattatactccagaaccttgct

SEQ ID NO: 3795418 - DNA, 25 bp, Homo sapien
ctcctgtccaacattatactccaga

SEQ ID NO: 3795419 - DNA, 25 bp, Homo sapien
gattttgactcagttacttggagct

SEQ ID NO: 3795420 - DNA, 25 bp, Homo sapien
acttggagcttacatgtagaggtac

SEQ ID NO: 3795421 - DNA, 25 bp, Homo sapien
caggcttcttggcaacgttctcttc

SEQ ID NO: 3795422 - DNA, 25 bp, Homo sapien
taacttcctagcaaccatagccatg

SEQ ID NO: 3795423 - DNA, 25 bp, Homo sapien
tttgctccataacagaagggtcttg

SEQ ID NO: 3795424 - DNA, 25 bp, Homo sapien
tagccgcatatcagaaggaacttgg

SEQ ID NO: 3795425 - DNA, 25 bp, Homo sapien
tattgggtatgcaaatacactcgcc

SEQ ID NO: 3795426 - DNA, 25 bp, Homo sapien
taatctttcccatagtgaggctctg

SEQ ID NO: 3795427 - DNA, 25 bp, Homo sapien
tggatgtattcaagtgagggtagat

SEQ ID NO: 3795428 - DNA, 25 bp, Homo sapien
caatgggctggctaacggaactttt

SEQ ID NO: 3795429 - DNA, 25 bp, Homo sapien
ggaataggctcatcagccacagaag

SEQ ID NO: 3795430 - DNA, 25 bp, Homo sapien
gaacttttcaacagtcggaataggc

SEQ ID NO: 3795431 - DNA, 25 bp, Homo sapien
tcaaataatccttgttggctccaag

SEQ ID NO: 3795432 - DNA, 25 bp, Homo sapien
ggtgataactcccagtcctacatta

SEQ ID NO: 3795433 - DNA, 25 bp, Homo sapien
actgtaaactgggtgaaatcatgca

SEQ ID NO: 3795434 - DNA, 25 bp, Homo sapien
ggctccaagttgagttgggacagta

SEQ ID NO: 3795435 - DNA, 25 bp, Homo sapien
atatacaccaacctttcgaacaatt

SEQ ID NO: 3795436 - DNA, 25 bp, Homo sapien
agtacagaaaatacgacacattatt

SEQ ID NO: 3795437 - DNA, 25 bp, Homo sapien
gaaatatacaccaacctttcgaaca

SEQ ID NO: 3795438 - DNA, 25 bp, Homo sapien
tatttgtacatcttgttcagaaata

SEQ ID NO: 3795439 - DNA, 25 bp, Homo sapien
tcaaaatccgtattttgtcttcact

SEQ ID NO: 3795440 - DNA, 25 bp, Homo sapien
caaaatccgtattttgtcttcactg

SEQ ID NO: 3795441 - DNA, 25 bp, Homo sapien
tagctgtaacccctgaagtattcaa

SEQ ID NO: 3795442 - DNA, 25 bp, Homo sapien
gcctacagagtcatgccgtgtggtt

SEQ ID NO: 3795443 - DNA, 25 bp, Homo sapien
tactgagatgtgcaataattaagcg

SEQ ID NO: 3795444 - DNA, 25 bp, Homo sapien
gaccacttggtaatgttctctcgct

SEQ ID NO: 3795445 - DNA, 25 bp, Homo sapien
tcgccctgtccgcatcggcactatt

SEQ ID NO: 3795446 - DNA, 25 bp, Homo sapien
gccctgtccgcatcggcactatttt

SEQ ID NO: 3795447 - DNA, 25 bp, Homo sapien
cgcatcggcactattttcgaaagtt

SEQ ID NO: 3795448 - DNA, 25 bp, Homo sapien
tgtccgcatcggcactattttcgaa

SEQ ID NO: 3795449 - DNA, 25 bp, Homo sapien
tacaagacgccaatgatgcatctgg

SEQ ID NO: 3795450 - DNA, 25 bp, Homo sapien
tattctttggaacctactgcaccca

SEQ ID NO: 3795451 - DNA, 25 bp, Homo sapien
caacgaatgagcgtgaagcagacat

SEQ ID NO: 3795452 - DNA, 25 bp, Homo sapien
gccatccacctttcagcggtataag

SEQ ID NO: 3795453 - DNA, 25 bp, Homo sapien
gatcccagtgggacaaatagcagac

SEQ ID NO: 3795454 - DNA, 25 bp, Homo sapien
cctgtggctatgttgcgggagatcc

SEQ ID NO: 3795455 - DNA, 25 bp, Homo sapien
cactttgttatcaaaagaatacaga

SEQ ID NO: 3795456 - DNA, 25 bp, Homo sapien
caggaaatcctgtttggttattcac

SEQ ID NO: 3795457 - DNA, 25 bp, Homo sapien
ctcccaattcaattagttgcatgca

SEQ ID NO: 3795458 - DNA, 25 bp, Homo sapien
taagcacatattctagggccagctc

SEQ ID NO: 3795459 - DNA, 25 bp, Homo sapien
tattctagggccagctcccaattca

SEQ ID NO: 3795460 - DNA, 25 bp, Homo sapien
aaactcaagtaagcacatattctag

SEQ ID NO: 3795461 - DNA, 25 bp, Homo sapien
catttgtataagggttgacggtctt

SEQ ID NO: 3795462 - DNA, 25 bp, Homo sapien
gaataaattacgtgactgcacgtcc

SEQ ID NO: 3795463 - DNA, 25 bp, Homo sapien
caacgagcagatggtattgaaaagc

SEQ ID NO: 3795464 - DNA, 25 bp, Homo sapien
tctcaactagcccaaaataacactg

SEQ ID NO: 3795465 - DNA, 25 bp, Homo sapien
cacgtccaggaatgattagtaatca

SEQ ID NO: 3795466 - DNA, 25 bp, Homo sapien
tgcacccacaactggattcaatttc

SEQ ID NO: 3795467 - DNA, 25 bp, Homo sapien
ctgcatagaattcgggactgtagac

SEQ ID NO: 3795468 - DNA, 25 bp, Homo sapien
agaattcgggactgtagactgcacc

SEQ ID NO: 3795469 - DNA, 25 bp, Homo sapien
actgtagactgcacccacaactgga

SEQ ID NO: 3795470 - DNA, 25 bp, Homo sapien
aagactgagaagacttcgtgcaaag

SEQ ID NO: 3795471 - DNA, 25 bp, Homo sapien
tgagaagacttcgtgcaaagagaaa

SEQ ID NO: 3795472 - DNA, 25 bp, Homo sapien
cttcgtgcaaagagaaactctgtac

SEQ ID NO: 3795473 - DNA, 25 bp, Homo sapien
gaagacttcgtgcaaagagaaactc

SEQ ID NO: 3795474 - DNA, 25 bp, Homo sapien
tgtttatcaatggtgatacttggtc

SEQ ID NO: 3795475 - DNA, 25 bp, Homo sapien
gtttatcaatggtgatacttggtcc

SEQ ID NO: 3795476 - DNA, 25 bp, Homo sapien
tttatcaatggtgatacttggtcct

SEQ ID NO: 3795477 - DNA, 25 bp, Homo sapien
ctgtttatcaatggtgatacttggt

SEQ ID NO: 3795478 - DNA, 25 bp, Homo sapien
gggcaggcacaagcctagaagggat

SEQ ID NO: 3795479 - DNA, 25 bp, Homo sapien
cacaagcctagaagggatgtttccc

SEQ ID NO: 3795480 - DNA, 25 bp, Homo sapien
caggcacaagcctagaagggatgtt

SEQ ID NO: 3795481 - DNA, 25 bp, Homo sapien
ggcacaagcctagaagggatgtttc

SEQ ID NO: 3795482 - DNA, 25 bp, Homo sapien
catcggaaccctttctgctgagcag

SEQ ID NO: 3795483 - DNA, 25 bp, Homo sapien
agtgccgggatcatcggcatcccca

SEQ ID NO: 3795484 - DNA, 25 bp, Homo sapien
cacaacctggcaagatgtcccacag

SEQ ID NO: 3795485 - DNA, 25 bp, Homo sapien
agtagtctccatacggcatgcaggg

SEQ ID NO: 3795486 - DNA, 25 bp, Homo sapien
catggtctttttcgatctggtttcc

SEQ ID NO: 3795487 - DNA, 25 bp, Homo sapien
tggtctttttcgatctggtttccca

SEQ ID NO: 3795488 - DNA, 25 bp, Homo sapien
ccatggtctttttcgatctggtttc

SEQ ID NO: 3795489 - DNA, 25 bp, Homo sapien
tcccatggtctttttcgatctggtt

SEQ ID NO: 3795490 - DNA, 25 bp, Homo sapien
caaggtggaattttacagcggcaaa

SEQ ID NO: 3795491 - DNA, 25 bp, Homo sapien
cctcctgatttaaagcgaagggcac

SEQ ID NO: 3795492 - DNA, 25 bp, Homo sapien
cagcggcaaataatggtggaatcct

SEQ ID NO: 3795493 - DNA, 25 bp, Homo sapien
gaatcttcggcttctgtattcccgc

SEQ ID NO: 3795494 - DNA, 25 bp, Homo sapien
tccgaatcagttcttcagaggaaga

SEQ ID NO: 3795495 - DNA, 25 bp, Homo sapien
agaacagaagtaaggcggagaaaga

SEQ ID NO: 3795496 - DNA, 25 bp, Homo sapien
tcagtctttccgaatcagttcttca

SEQ ID NO: 3795497 - DNA, 25 bp, Homo sapien
gaacagaagtaaggcggagaaagaa

SEQ ID NO: 3795498 - DNA, 25 bp, Homo sapien
aagtatatacaagtgaactgggggc

SEQ ID NO: 3795499 - DNA, 25 bp, Homo sapien
aagatccctcctggttggcctggca

SEQ ID NO: 3795500 - DNA, 25 bp, Homo sapien
ggcactgtacatggaagatccctcc

SEQ ID NO: 3795501 - DNA, 25 bp, Homo sapien
ttggcctggcacaacaggaccgtgc

SEQ ID NO: 3795502 - DNA, 25 bp, Homo sapien
gcatcctctagtgactccttatctg

SEQ ID NO: 3795503 - DNA, 25 bp, Homo sapien
agcatcctctagtgactccttatct

SEQ ID NO: 3795504 - DNA, 25 bp, Homo sapien
catcctctagtgactccttatctgt

SEQ ID NO: 3795505 - DNA, 25 bp, Homo sapien
catattccattgaactgcagctgct

SEQ ID NO: 3795506 - DNA, 25 bp, Homo sapien
gaaacgcaatgtcctataaatctct

SEQ ID NO: 3795507 - DNA, 25 bp, Homo sapien
gcttggtttaatctcaacactgaca

SEQ ID NO: 3795508 - DNA, 25 bp, Homo sapien
gttgctgcagtctattacaacatgc

SEQ ID NO: 3795509 - DNA, 25 bp, Homo sapien
aaggtgttgtacacggtgcgaccgc

SEQ ID NO: 3795510 - DNA, 25 bp, Homo sapien
ccgcggccctgaaggtgttgtacac

SEQ ID NO: 3795511 - DNA, 25 bp, Homo sapien
gttgtacacggtgcgaccgcggcct

SEQ ID NO: 3795512 - DNA, 25 bp, Homo sapien
aggtgcgcccctcggtaggcggccg

SEQ ID NO: 3795513 - DNA, 25 bp, Homo sapien
taaccagatgtttgcaatcatcaga

SEQ ID NO: 3795514 - DNA, 25 bp, Homo sapien
tgttctccagcattcagtctcaaag

SEQ ID NO: 3795515 - DNA, 25 bp, Homo sapien
gacatgtagaatgcttaaaggcacc

SEQ ID NO: 3795516 - DNA, 25 bp, Homo sapien
gtccaacctccttaataaccagatg

SEQ ID NO: 3795517 - DNA, 25 bp, Homo sapien
ataaatgtctgcaccataaaatcca

SEQ ID NO: 3795518 - DNA, 25 bp, Homo sapien
ccataaaatccatcctggtaaacaa

SEQ ID NO: 3795519 - DNA, 25 bp, Homo sapien
caccataaaatccatcctggtaaac

SEQ ID NO: 3795520 - DNA, 25 bp, Homo sapien
ataaaatccatcctggtaaacaaca

SEQ ID NO: 3795521 - DNA, 25 bp, Homo sapien
tgatgcttcccgagctgcaccgctg

SEQ ID NO: 3795522 - DNA, 25 bp, Homo sapien
ctgatgcttcccgagctgcaccgct

SEQ ID NO: 3795523 - DNA, 25 bp, Homo sapien
cctgatgcttcccgagctgcaccgc

SEQ ID NO: 3795524 - DNA, 25 bp, Homo sapien
aggaaggtctaccagattccagaga

SEQ ID NO: 3795525 - DNA, 25 bp, Homo sapien
tatacacacggatgcacaccagcag

SEQ ID NO: 3795526 - DNA, 25 bp, Homo sapien
tgtccagtatacacacggatgcaca

SEQ ID NO: 3795527 - DNA, 25 bp, Homo sapien
cctgctgtccagtatacacacggat

SEQ ID NO: 3795528 - DNA, 25 bp, Homo sapien
tctgtggtgcagaacatatttatat

SEQ ID NO: 3795529 - DNA, 25 bp, Homo sapien
tttcttaaacttatggtcatcaaag

SEQ ID NO: 3795530 - DNA, 25 bp, Homo sapien
tcttaaacttatggtcatcaaagac

SEQ ID NO: 3795531 - DNA, 25 bp, Homo sapien
gttctgtatattctgtggtgcagaa

SEQ ID NO: 3795532 - DNA, 25 bp, Homo sapien
aaaccactttgtgttataacttgtg

SEQ ID NO: 3795533 - DNA, 25 bp, Homo sapien
gggatcaaaccactttgtgttataa

SEQ ID NO: 3795534 - DNA, 25 bp, Homo sapien
gagatggggatcaaaccactttgtg

SEQ ID NO: 3795535 - DNA, 25 bp, Homo sapien
tggagatggggatcaaaccactttg

SEQ ID NO: 3795536 - DNA, 25 bp, Homo sapien
tgggcatcgacaaacatttttagtt

SEQ ID NO: 3795537 - DNA, 25 bp, Homo sapien
ttcaccaagccttgggactggccca

SEQ ID NO: 3795538 - DNA, 25 bp, Homo sapien
gactggcccaccaagctgaaagggg

SEQ ID NO: 3795539 - DNA, 25 bp, Homo sapien
gggcactgggcatcgacaaacattt

SEQ ID NO: 3795540 - DNA, 25 bp, Homo sapien
atacacaggctcttgatacactact

SEQ ID NO: 3795541 - DNA, 25 bp, Homo sapien
gccatacacaggctcttgatacact

SEQ ID NO: 3795542 - DNA, 25 bp, Homo sapien
ccatacacaggctcttgatacacta

SEQ ID NO: 3795543 - DNA, 25 bp, Homo sapien
catacacaggctcttgatacactac

SEQ ID NO: 3795544 - DNA, 25 bp, Homo sapien
tgagaaggtatacaacagcagaatc

SEQ ID NO: 3795545 - DNA, 25 bp, Homo sapien
gcaactcaggacaaagtagtgtgtg

SEQ ID NO: 3795546 - DNA, 25 bp, Homo sapien
gagaagacacatccaaaacatcctg

SEQ ID NO: 3795547 - DNA, 25 bp, Homo sapien
caagatgtaggtacacgggtctcaa

SEQ ID NO: 3795548 - DNA, 25 bp, Homo sapien
gggtaggctgggcgtagcggtatgc

SEQ ID NO: 3795549 - DNA, 25 bp, Homo sapien
ctgtcactgtaggcagcggcagtgg

SEQ ID NO: 3795550 - DNA, 25 bp, Homo sapien
caggggtaggctgggcgtagcggta

SEQ ID NO: 3795551 - DNA, 25 bp, Homo sapien
taggctgggcgtagcggtatgcagc

SEQ ID NO: 3795552 - DNA, 25 bp, Homo sapien
cagagcagatcaggaggaaatagaa

SEQ ID NO: 3795553 - DNA, 25 bp, Homo sapien
tacagagcagatcaggaggaaatag

SEQ ID NO: 3795554 - DNA, 25 bp, Homo sapien
acagagcagatcaggaggaaataga

SEQ ID NO: 3795555 - DNA, 25 bp, Homo sapien
cagagccatctccatacatcagtga

SEQ ID NO: 3795556 - DNA, 25 bp, Homo sapien
gagccatctccatacatcagtgaca

SEQ ID NO: 3795557 - DNA, 25 bp, Homo sapien
ccttcctcactatttcagagccatc

SEQ ID NO: 3795558 - DNA, 25 bp, Homo sapien
gccatctccatacatcagtgacagt

SEQ ID NO: 3795559 - DNA, 25 bp, Homo sapien
cattttcttttaacgtgtgtgtgtc

SEQ ID NO: 3795560 - DNA, 25 bp, Homo sapien
gttacagccatattacttctcagta

SEQ ID NO: 3795561 - DNA, 25 bp, Homo sapien
gagcttgacatgcataaacccaatt

SEQ ID NO: 3795562 - DNA, 25 bp, Homo sapien
ggtgactctactatcaaaagctgag

SEQ ID NO: 3795563 - DNA, 25 bp, Homo sapien
gaggtgttacaagaaatttcatctg

SEQ ID NO: 3795564 - DNA, 25 bp, Homo sapien
gaaatttcatctgctgcaacgaaga

SEQ ID NO: 3795565 - DNA, 25 bp, Homo sapien
tgctgcaacgaagacgaactgattt

SEQ ID NO: 3795566 - DNA, 25 bp, Homo sapien
tcatctgctgcaacgaagacgaact

SEQ ID NO: 3795567 - DNA, 25 bp, Homo sapien
gtccccagatttgctaagggaatgc

SEQ ID NO: 3795568 - DNA, 25 bp, Homo sapien
cccacatggttgtgtcccatactca

SEQ ID NO: 3795569 - DNA, 25 bp, Homo sapien
ccccagatttgctaagggaatgcat

SEQ ID NO: 3795570 - DNA, 25 bp, Homo sapien
catactcatcaggaactgagatgaa

SEQ ID NO: 3795571 - DNA, 25 bp, Homo sapien
tacccctgaacttgcttctaattgg

SEQ ID NO: 3795572 - DNA, 25 bp, Homo sapien
tctaattggtaacttgggtagcaac

SEQ ID NO: 3795573 - DNA, 25 bp, Homo sapien
gaaaggcgctggtgacacctccttg

SEQ ID NO: 3795574 - DNA, 25 bp, Homo sapien
taaagttttaatgtagctggcagca

SEQ ID NO: 3795575 - DNA, 25 bp, Homo sapien
aagcatgctctttagagagccatgg

SEQ ID NO: 3795576 - DNA, 25 bp, Homo sapien
cagggcaccaactgtggttcagtgg

SEQ ID NO: 3795577 - DNA, 25 bp, Homo sapien
gtacagcatagcaacagggcaccaa

SEQ ID NO: 3795578 - DNA, 25 bp, Homo sapien
tggtctagctaaagggatgttctct

SEQ ID NO: 3795579 - DNA, 25 bp, Homo sapien
tccctaccccttcatgttgtatagc

SEQ ID NO: 3795580 - DNA, 25 bp, Homo sapien
gttgtatagcaactctaataatctt

SEQ ID NO: 3795581 - DNA, 25 bp, Homo sapien
actccacctgatcatttacctttca

SEQ ID NO: 3795582 - DNA, 25 bp, Homo sapien
tttcaccctcctggaacgagaactc

SEQ ID NO: 3795583 - DNA, 25 bp, Homo sapien
gaccacctcacaccatggagtctga

SEQ ID NO: 3795584 - DNA, 25 bp, Homo sapien
gtgaagaaagcgtgatgatggacct

SEQ ID NO: 3795585 - DNA, 25 bp, Homo sapien
taagtgataccaatccaatacatgt

SEQ ID NO: 3795586 - DNA, 25 bp, Homo sapien
ttctcatggttggtagataagtgat

SEQ ID NO: 3795587 - DNA, 25 bp, Homo sapien
tatcaaccttcagctcgtctctcat

SEQ ID NO: 3795588 - DNA, 25 bp, Homo sapien
tggtttgtctgtattatcaaccttc

SEQ ID NO: 3795589 - DNA, 25 bp, Homo sapien
ctgtattatcaaccttcagctcgtc

SEQ ID NO: 3795590 - DNA, 25 bp, Homo sapien
gtttgtctgtattatcaaccttcag

SEQ ID NO: 3795591 - DNA, 25 bp, Homo sapien
ggatcgacatcgttttttgattctt

SEQ ID NO: 3795592 - DNA, 25 bp, Homo sapien
tgggatcgacatcgttttttgattc

SEQ ID NO: 3795593 - DNA, 25 bp, Homo sapien
gggatcgacatcgttttttgattct

SEQ ID NO: 3795594 - DNA, 25 bp, Homo sapien
ctcaggttggttcaaaactccaggg

SEQ ID NO: 3795595 - DNA, 25 bp, Homo sapien
tcaaggtcgcataactagacagggc

SEQ ID NO: 3795596 - DNA, 25 bp, Homo sapien
tgatacttgaatctcttagggcaac

SEQ ID NO: 3795597 - DNA, 25 bp, Homo sapien
gcccatacttgtttgccctgccaga

SEQ ID NO: 3795598 - DNA, 25 bp, Homo sapien
caccaacgccgtaggtgggggctgg

SEQ ID NO: 3795599 - DNA, 25 bp, Homo sapien
gtaggggtcggcagcataaactcgt

SEQ ID NO: 3795600 - DNA, 25 bp, Homo sapien
gggctggagcaagtgcgtggtggta

SEQ ID NO: 3795601 - DNA, 25 bp, Homo sapien
gtcggcagcataaactcgtccgtaa

SEQ ID NO: 3795602 - DNA, 25 bp, Homo sapien
tcaattaacgggaagtgagaggacg

SEQ ID NO: 3795603 - DNA, 25 bp, Homo sapien
tagctgctgttagcacaagagacaa

SEQ ID NO: 3795604 - DNA, 25 bp, Homo sapien
caagagacaaattcaattaacggga

SEQ ID NO: 3795605 - DNA, 25 bp, Homo sapien
ttagctgctgttagcacaagagaca

SEQ ID NO: 3795606 - DNA, 25 bp, Homo sapien
ttcagtgaactgtccggccatggtt

SEQ ID NO: 3795607 - DNA, 25 bp, Homo sapien
tcaaaaccaaccgaaatggaggcac

SEQ ID NO: 3795608 - DNA, 25 bp, Homo sapien
gaactaaagatagggccattcctga

SEQ ID NO: 3795609 - DNA, 25 bp, Homo sapien
ggttttaatggctacaaggtggcac

SEQ ID NO: 3795610 - DNA, 25 bp, Homo sapien
agtcttggcatcagtcaaaggtgca

SEQ ID NO: 3795611 - DNA, 25 bp, Homo sapien
atcatcagcatggctcctagtcttg

SEQ ID NO: 3795612 - DNA, 25 bp, Homo sapien
tggcatcagtcaaaggtgcaaaagc

SEQ ID NO: 3795613 - DNA, 25 bp, Homo sapien
gcaatgaagaaagaacgagacccac

SEQ ID NO: 3795614 - DNA, 25 bp, Homo sapien
ttagtatggagcaaaacggttgtat

SEQ ID NO: 3795615 - DNA, 25 bp, Homo sapien
ttgtatccccctcggtatatactag

SEQ ID NO: 3795616 - DNA, 25 bp, Homo sapien
gtatggagcaaaacggttgtatccc

SEQ ID NO: 3795617 - DNA, 25 bp, Homo sapien
tatggagcaaaacggttgtatcccc

SEQ ID NO: 3795618 - DNA, 25 bp, Homo sapien
tctggccctgcatccgagaaaggtg

SEQ ID NO: 3795619 - DNA, 25 bp, Homo sapien
tatggcagcaaaactactcagggac

SEQ ID NO: 3795620 - DNA, 25 bp, Homo sapien
taacttactgaagtgcgggccacag

SEQ ID NO: 3795621 - DNA, 25 bp, Homo sapien
taagaagctgaatactgccgggtgg

SEQ ID NO: 3795622 - DNA, 25 bp, Homo sapien
tttgaaatctgaggcggcaattggg

SEQ ID NO: 3795623 - DNA, 25 bp, Homo sapien
tggagtgcctagacaaaagattctg

SEQ ID NO: 3795624 - DNA, 25 bp, Homo sapien
aagattctgcaacatcggttggcac

SEQ ID NO: 3795625 - DNA, 25 bp, Homo sapien
gcttttggctgataagtagctcccc

SEQ ID NO: 3795626 - DNA, 25 bp, Homo sapien
tggactttccagatgtgagcatgag

SEQ ID NO: 3795627 - DNA, 25 bp, Homo sapien
catgctgatgagctgccaatttgca

SEQ ID NO: 3795628 - DNA, 25 bp, Homo sapien
ctttataagatttgctggagtctgc

SEQ ID NO: 3795629 - DNA, 25 bp, Homo sapien
gcatgagggcttcgttttctggcct

SEQ ID NO: 3795630 - DNA, 25 bp, Homo sapien
ggcagaggaaagagttagcaaaatc

SEQ ID NO: 3795631 - DNA, 25 bp, Homo sapien
ttagcaaaatcaagagctgatcctc

SEQ ID NO: 3795632 - DNA, 25 bp, Homo sapien
ggaaagagttagcaaaatcaagagc

SEQ ID NO: 3795633 - DNA, 25 bp, Homo sapien
aagagttagcaaaatcaagagctga

SEQ ID NO: 3795634 - DNA, 25 bp, Homo sapien
ccagtgcaaacggatacacacaagg

SEQ ID NO: 3795635 - DNA, 25 bp, Homo sapien
tgcaaacggatacacacaaggaact

SEQ ID NO: 3795636 - DNA, 25 bp, Homo sapien
tggggacagcgaattcccattgtgg

SEQ ID NO: 3795637 - DNA, 25 bp, Homo sapien
agtttggggacagcgaattcccatt

SEQ ID NO: 3795638 - DNA, 25 bp, Homo sapien
caaagacaccattgacctgatgaga

SEQ ID NO: 3795639 - DNA, 25 bp, Homo sapien
aactgttccaggagtcaaatggtac

SEQ ID NO: 3795640 - DNA, 25 bp, Homo sapien
cattgacctgatgagaactgttcca

SEQ ID NO: 3795641 - DNA, 25 bp, Homo sapien
gtacctaaaggacgtgtgctgctct

SEQ ID NO: 3795642 - DNA, 25 bp, Homo sapien
aaagctgtctaaagcactgtcagga

SEQ ID NO: 3795643 - DNA, 25 bp, Homo sapien
tgtcaggacagttatcaggatgggt

SEQ ID NO: 3795644 - DNA, 25 bp, Homo sapien
actacgcaaatatcttggagaggcc

SEQ ID NO: 3795645 - DNA, 25 bp, Homo sapien
gagaggccttgtagacatgaccgta

SEQ ID NO: 3795646 - DNA, 25 bp, Homo sapien
gccggcacactaagatctgctttgt

SEQ ID NO: 3795647 - DNA, 25 bp, Homo sapien
gatctgctttgtcttccgttttggt

SEQ ID NO: 3795648 - DNA, 25 bp, Homo sapien
tctaaatggcctccttgaaaccatc

SEQ ID NO: 3795649 - DNA, 25 bp, Homo sapien
gctcatgtttcccattaagccggca

SEQ ID NO: 3795650 - DNA, 25 bp, Homo sapien
caaatgaactagaaggaacactcac

SEQ ID NO: 3795651 - DNA, 25 bp, Homo sapien
gcaaatgaactagaaggaacactca

SEQ ID NO: 3795652 - DNA, 25 bp, Homo sapien
ctaattgtactctgattttaatgtt

SEQ ID NO: 3795653 - DNA, 25 bp, Homo sapien
tttaatgttactacccatttccata

SEQ ID NO: 3795654 - DNA, 25 bp, Homo sapien
tttctctggatctttacggcactgt

SEQ ID NO: 3795655 - DNA, 25 bp, Homo sapien
ggatctttacggcactgtttcatac

SEQ ID NO: 3795656 - DNA, 25 bp, Homo sapien
tctgccaagggtagtggaggcccct

SEQ ID NO: 3795657 - DNA, 25 bp, Homo sapien
gccaagggtagtggaggcccctgca

SEQ ID NO: 3795658 - DNA, 25 bp, Homo sapien
ctgccaagggtagtggaggcccctg

SEQ ID NO: 3795659 - DNA, 25 bp, Homo sapien
tgtctgccaagggtagtggaggccc

SEQ ID NO: 3795660 - DNA, 25 bp, Homo sapien
cagggcattgaagggtttacttagt

SEQ ID NO: 3795661 - DNA, 25 bp, Homo sapien
ttgcccagggcattgaagggtttac

SEQ ID NO: 3795662 - DNA, 25 bp, Homo sapien
tgcccagggcattgaagggtttact

SEQ ID NO: 3795663 - DNA, 25 bp, Homo sapien
ccagggcattgaagggtttacttag

SEQ ID NO: 3795664 - DNA, 25 bp, Homo sapien
gtgttcagtggaggtgttcgtttta

SEQ ID NO: 3795665 - DNA, 25 bp, Homo sapien
taaatgactcgttatccctgtgaat

SEQ ID NO: 3795666 - DNA, 25 bp, Homo sapien
gcttgaatccccaaacacttgtgtg

SEQ ID NO: 3795667 - DNA, 25 bp, Homo sapien
gcctacaggctctaaatcagttgca

SEQ ID NO: 3795668 - DNA, 25 bp, Homo sapien
tgtagtggacaaacattagacacct

SEQ ID NO: 3795669 - DNA, 25 bp, Homo sapien
tcagaacccctgagtggatggccta

SEQ ID NO: 3795670 - DNA, 25 bp, Homo sapien
tgaaaagttcatccagccacgcgat

SEQ ID NO: 3795671 - DNA, 25 bp, Homo sapien
gaaaatgaatatcggccaaggtggc

SEQ ID NO: 3795672 - DNA, 25 bp, Homo sapien
caatatgttcgcaatgtggcctaag

SEQ ID NO: 3795673 - DNA, 25 bp, Homo sapien
cccagtgtcctggtacaaattgcca

SEQ ID NO: 3795674 - DNA, 25 bp, Homo sapien
gttcccagtgtcctggtacaaattg

SEQ ID NO: 3795675 - DNA, 25 bp, Homo sapien
ttgccagcagcacacggggaggtag

SEQ ID NO: 3795676 - DNA, 25 bp, Homo sapien
gccagcagcacacggggaggtagag

SEQ ID NO: 3795677 - DNA, 25 bp, Homo sapien
tatattaagtcgatagcctgctgaa

SEQ ID NO: 3795678 - DNA, 25 bp, Homo sapien
ccgaggttcggtgcattttttcaat

SEQ ID NO: 3795679 - DNA, 25 bp, Homo sapien
aaagtgctgattccatcaaaccacc

SEQ ID NO: 3795680 - DNA, 25 bp, Homo sapien
tagttgctgtcgatgtctctgaaag

SEQ ID NO: 3795681 - DNA, 25 bp, Homo sapien
ccgtaattaaataatcgggtgtctg

SEQ ID NO: 3795682 - DNA, 25 bp, Homo sapien
gctgaagctagaaaaccgtaattaa

SEQ ID NO: 3795683 - DNA, 25 bp, Homo sapien
taaataatcgggtgtctggcaggcc

SEQ ID NO: 3795684 - DNA, 25 bp, Homo sapien
taagggcgaagtgctgaagctagaa

SEQ ID NO: 3795685 - DNA, 25 bp, Homo sapien
ttaggtagtatgtcggctctccaaa

SEQ ID NO: 3795686 - DNA, 25 bp, Homo sapien
ccaggcagttaggtagtatgtcggc

SEQ ID NO: 3795687 - DNA, 25 bp, Homo sapien
aatccaaggccaggcagttaggtag

SEQ ID NO: 3795688 - DNA, 25 bp, Homo sapien
tgggtttttgaagtcaaagtactga

SEQ ID NO: 3795689 - DNA, 25 bp, Homo sapien
cccctgatctgagtcatggcaccaa

SEQ ID NO: 3795690 - DNA, 25 bp, Homo sapien
ggaggtcccctgatctgagtcatgg

SEQ ID NO: 3795691 - DNA, 25 bp, Homo sapien
ggtcccctgatctgagtcatggcac

SEQ ID NO: 3795692 - DNA, 25 bp, Homo sapien
gggaggtcccctgatctgagtcatg

SEQ ID NO: 3795693 - DNA, 25 bp, Homo sapien
cacaagacagtgtcatcagttaagg

SEQ ID NO: 3795694 - DNA, 25 bp, Homo sapien
atttcacaagacagtgtcatcagtt

SEQ ID NO: 3795695 - DNA, 25 bp, Homo sapien
aggaaccggccagctggatgtgtac

SEQ ID NO: 3795696 - DNA, 25 bp, Homo sapien
gttgttctctggcaggcagagtggg

SEQ ID NO: 3795697 - DNA, 25 bp, Homo sapien
ctggaagagtagacatcagtgacat

SEQ ID NO: 3795698 - DNA, 25 bp, Homo sapien
ttactggaagagtagacatcagtga

SEQ ID NO: 3795699 - DNA, 25 bp, Homo sapien
tcttactggaagagtagacatcagt

SEQ ID NO: 3795700 - DNA, 25 bp, Homo sapien
tcctcttactggaagagtagacatc

SEQ ID NO: 3795701 - DNA, 25 bp, Homo sapien
tggtcaatggaaaggctcagtggaa

SEQ ID NO: 3795702 - DNA, 25 bp, Homo sapien
aacccttctggtcaatggaaaggct

SEQ ID NO: 3795703 - DNA, 25 bp, Homo sapien
tttgcgtaacattccagaacatttc

SEQ ID NO: 3795704 - DNA, 25 bp, Homo sapien
ttggaaggtctttgcgtaacattcc

SEQ ID NO: 3795705 - DNA, 25 bp, Homo sapien
ccttaggactggtattgatccttag

SEQ ID NO: 3795706 - DNA, 25 bp, Homo sapien
ccttccttaggactggtattgatcc

SEQ ID NO: 3795707 - DNA, 25 bp, Homo sapien
attgatccttagagttagcaagtcc

SEQ ID NO: 3795708 - DNA, 25 bp, Homo sapien
ttagcaagtccacttcatgaacttg

SEQ ID NO: 3795709 - DNA, 25 bp, Homo sapien
tacttgccttcacgagatctgcatt

SEQ ID NO: 3795710 - DNA, 25 bp, Homo sapien
gcatttttggcaagaggatgtgatg

SEQ ID NO: 3795711 - DNA, 25 bp, Homo sapien
tcggacacaaatgaccatacttgcc

SEQ ID NO: 3795712 - DNA, 25 bp, Homo sapien
cctcctccaaatgtcggacacaaat

SEQ ID NO: 3795713 - DNA, 25 bp, Homo sapien
gactctcttatcacaaagcacagac

SEQ ID NO: 3795714 - DNA, 25 bp, Homo sapien
tctctgaagtattgtccaaagccca

SEQ ID NO: 3795715 - DNA, 25 bp, Homo sapien
aagaaatgatttcgggcagcttctg

SEQ ID NO: 3795716 - DNA, 25 bp, Homo sapien
gctgacttgctcctaaattcctctc

SEQ ID NO: 3795717 - DNA, 25 bp, Homo sapien
taaaccaagctagccagcgttcctt

SEQ ID NO: 3795718 - DNA, 25 bp, Homo sapien
tctaccatctcagttgtgggcacat

SEQ ID NO: 3795719 - DNA, 25 bp, Homo sapien
cccctgtgataatgatgtagccgtc

SEQ ID NO: 3795720 - DNA, 25 bp, Homo sapien
aatcaaggtgtctgcctctaccatc

SEQ ID NO: 3795721 - DNA, 25 bp, Homo sapien
tgttctgctctgcatccgttcattt

SEQ ID NO: 3795722 - DNA, 25 bp, Homo sapien
ttgttctgctctgcatccgttcatt

SEQ ID NO: 3795723 - DNA, 25 bp, Homo sapien
ctgctctgcatccgttcattttgtg

SEQ ID NO: 3795724 - DNA, 25 bp, Homo sapien
ttctgctctgcatccgttcattttg

SEQ ID NO: 3795725 - DNA, 25 bp, Homo sapien
gtctgttccacggtctctcctggtc

SEQ ID NO: 3795726 - DNA, 25 bp, Homo sapien
ctggcttcagtctgttccacggtct

SEQ ID NO: 3795727 - DNA, 25 bp, Homo sapien
ggcttcagtctgttccacggtctct

SEQ ID NO: 3795728 - DNA, 25 bp, Homo sapien
ttcagtctgttccacggtctctcct

SEQ ID NO: 3795729 - DNA, 25 bp, Homo sapien
cctattggctgaagtatagaaggtt

SEQ ID NO: 3795730 - DNA, 25 bp, Homo sapien
ctgaagtatagaaggttgaagaatc

SEQ ID NO: 3795731 - DNA, 25 bp, Homo sapien
ttctcctattggctgaagtatagaa

SEQ ID NO: 3795732 - DNA, 25 bp, Homo sapien
tggctgaagtatagaaggttgaaga

SEQ ID NO: 3795733 - DNA, 25 bp, Homo sapien
tagcggccgcgcttgcgtagaaagt

SEQ ID NO: 3795734 - DNA, 25 bp, Homo sapien
caccagggagcgttaaactgcaggc

SEQ ID NO: 3795735 - DNA, 25 bp, Homo sapien
tagggcatctgtagctagcggccgc

SEQ ID NO: 3795736 - DNA, 25 bp, Homo sapien
taactctgtagaacccaccagggag

SEQ ID NO: 3795737 - DNA, 25 bp, Homo sapien
ttacaagaacagctcaaactcagac

SEQ ID NO: 3795738 - DNA, 25 bp, Homo sapien
tcattgttgctaccacactaggcca

SEQ ID NO: 3795739 - DNA, 25 bp, Homo sapien
ttcattgttgctaccacactaggcc

SEQ ID NO: 3795740 - DNA, 25 bp, Homo sapien
tctcagagttcattgttgctaccac

SEQ ID NO: 3795741 - DNA, 25 bp, Homo sapien
tcagggcaaaatgacttctgcccat

SEQ ID NO: 3795742 - DNA, 25 bp, Homo sapien
ttcagggcaaaatgacttctgccca

SEQ ID NO: 3795743 - DNA, 25 bp, Homo sapien
tttcagggcaaaatgacttctgccc

SEQ ID NO: 3795744 - DNA, 25 bp, Homo sapien
ccagatgggtccaccttggtaaagc

SEQ ID NO: 3795745 - DNA, 25 bp, Homo sapien
ttatcttgtgccaggggatctgtag

SEQ ID NO: 3795746 - DNA, 25 bp, Homo sapien
tctgtagtccacctgtgaagcagct

SEQ ID NO: 3795747 - DNA, 25 bp, Homo sapien
ccttggtaaagcatgatgttatctt

SEQ ID NO: 3795748 - DNA, 25 bp, Homo sapien
gagcagggatcttgtttcgtgattt

SEQ ID NO: 3795749 - DNA, 25 bp, Homo sapien
tggaaccccagtcataggcatcatc

SEQ ID NO: 3795750 - DNA, 25 bp, Homo sapien
tcttgtttcgtgattttacaagtac

SEQ ID NO: 3795751 - DNA, 25 bp, Homo sapien
gaaccccagtcataggcatcatctt

SEQ ID NO: 3795752 - DNA, 25 bp, Homo sapien
tcctaatgactccttcacaagccaa

SEQ ID NO: 3795753 - DNA, 25 bp, Homo sapien
cacaagccaaccctcagtcacatca

SEQ ID NO: 3795754 - DNA, 25 bp, Homo sapien
ttaggcagaatttcctaatgactcc

SEQ ID NO: 3795755 - DNA, 25 bp, Homo sapien
tcagtcacatcagaatttgctgtca

SEQ ID NO: 3795756 - DNA, 25 bp, Homo sapien
agaaatcactctttgctgcagggac

SEQ ID NO: 3795757 - DNA, 25 bp, Homo sapien
ggagaccaggatgctttgacaaaaa

SEQ ID NO: 3795758 - DNA, 25 bp, Homo sapien
tctgagtgccccagattgggagacc

SEQ ID NO: 3795759 - DNA, 25 bp, Homo sapien
taggcctcagccatgtgtgcaaaag

SEQ ID NO: 3795760 - DNA, 25 bp, Homo sapien
ggcatggctgctatgctcatactct

SEQ ID NO: 3795761 - DNA, 25 bp, Homo sapien
catggctgctatgctcatactcttt

SEQ ID NO: 3795762 - DNA, 25 bp, Homo sapien
cctggcatggctgctatgctcatac

SEQ ID NO: 3795763 - DNA, 25 bp, Homo sapien
tggcatggctgctatgctcatactc

SEQ ID NO: 3795764 - DNA, 25 bp, Homo sapien
tgcaaaccccaatcctggaacagga

SEQ ID NO: 3795765 - DNA, 25 bp, Homo sapien
aaatcagaaggtcccattgcaaacc

SEQ ID NO: 3795766 - DNA, 25 bp, Homo sapien
gaagcattccataggggagaaatca

SEQ ID NO: 3795767 - DNA, 25 bp, Homo sapien
gaaggtcccattgcaaaccccaatc

SEQ ID NO: 3795768 - DNA, 25 bp, Homo sapien
aacgccttgtcctctgtaccaattg

SEQ ID NO: 3795769 - DNA, 25 bp, Homo sapien
ctcccaaacgccttgtcctctgtac

SEQ ID NO: 3795770 - DNA, 25 bp, Homo sapien
ccaaacgccttgtcctctgtaccaa

SEQ ID NO: 3795771 - DNA, 25 bp, Homo sapien
aataaaacagccgtggagttgtgtc

SEQ ID NO: 3795772 - DNA, 25 bp, Homo sapien
gagagaccacgactaacatttactg

SEQ ID NO: 3795773 - DNA, 25 bp, Homo sapien
gactggtatacaacttctgtgtgga

SEQ ID NO: 3795774 - DNA, 25 bp, Homo sapien
cccagtgctgttagagccatggaaa

SEQ ID NO: 3795775 - DNA, 25 bp, Homo sapien
gatgcactgatatttgctcaccctg

SEQ ID NO: 3795776 - DNA, 25 bp, Homo sapien
aaagaaacagcattaaccgcaaatc

SEQ ID NO: 3795777 - DNA, 25 bp, Homo sapien
gacattgtcaataaacactggaatc

SEQ ID NO: 3795778 - DNA, 25 bp, Homo sapien
gaagtgcttactggaagggtgatac

SEQ ID NO: 3795779 - DNA, 25 bp, Homo sapien
cagcattaaccgcaaatccagtgac

SEQ ID NO: 3795780 - DNA, 25 bp, Homo sapien
tcaaagacatacacctggttctcgg

SEQ ID NO: 3795781 - DNA, 25 bp, Homo sapien
gacatacacctggttctcggttgaa

SEQ ID NO: 3795782 - DNA, 25 bp, Homo sapien
tacacctggttctcggttgaagagg

SEQ ID NO: 3795783 - DNA, 25 bp, Homo sapien
cttcgtaatcaaagacatacacctg

SEQ ID NO: 3795784 - DNA, 25 bp, Homo sapien
tttctctttgcttccatcttcttgt

SEQ ID NO: 3795785 - DNA, 25 bp, Homo sapien
tctctttgcttccatcttcttgttc

SEQ ID NO: 3795786 - DNA, 25 bp, Homo sapien
tcatttctctttgcttccatcttct

SEQ ID NO: 3795787 - DNA, 25 bp, Homo sapien
tctttgcttccatcttcttgttcat

SEQ ID NO: 3795788 - DNA, 25 bp, Homo sapien
tgtttctgtactccggatgttcctt

SEQ ID NO: 3795789 - DNA, 25 bp, Homo sapien
gtttctgtactccggatgttccttg

SEQ ID NO: 3795790 - DNA, 25 bp, Homo sapien
cctcgtagctttcaatgtgtatatt

SEQ ID NO: 3795791 - DNA, 25 bp, Homo sapien
taaaattgccaaagcccttccgctc

SEQ ID NO: 3795792 - DNA, 25 bp, Homo sapien
gatgccaggttcctcgtagctttca

SEQ ID NO: 3795793 - DNA, 25 bp, Homo sapien
cattccaaagtaggatgccaggttc

SEQ ID NO: 3795794 - DNA, 25 bp, Homo sapien
gccgagtgcttgtcatccgatgatg

SEQ ID NO: 3795795 - DNA, 25 bp, Homo sapien
cagaggccgagtgcttgtcatccga

SEQ ID NO: 3795796 - DNA, 25 bp, Homo sapien
gaaacagaggccgagtgcttgtcat

SEQ ID NO: 3795797 - DNA, 25 bp, Homo sapien
gcttgtcatccgatgatggtcttgg

SEQ ID NO: 3795798 - DNA, 25 bp, Homo sapien
gaaaccagctgcgtttctgcacacg

SEQ ID NO: 3795799 - DNA, 25 bp, Homo sapien
gaagcaactcgcagcttgtcattat

SEQ ID NO: 3795800 - DNA, 25 bp, Homo sapien
agagaggaagcaactcgcagcttgt

SEQ ID NO: 3795801 - DNA, 25 bp, Homo sapien
aaccagctgcgtttctgcacacgtg

SEQ ID NO: 3795802 - DNA, 25 bp, Homo sapien
gatagagatatttaccaaccagttc

SEQ ID NO: 3795803 - DNA, 25 bp, Homo sapien
gagagaaaactaggatgtctacctg

SEQ ID NO: 3795804 - DNA, 25 bp, Homo sapien
catctgcagatataggagagaaaac

SEQ ID NO: 3795805 - DNA, 25 bp, Homo sapien
ccttccaagcaacaaaattaggtgg

SEQ ID NO: 3795806 - DNA, 25 bp, Homo sapien
gccctgagccagaagggccctagag

SEQ ID NO: 3795807 - DNA, 25 bp, Homo sapien
cctagaggctacctggcagccaggt

SEQ ID NO: 3795808 - DNA, 25 bp, Homo sapien
ctttgacttgaagcttcctgtttcc

SEQ ID NO: 3795809 - DNA, 25 bp, Homo sapien
gcagccaggtgacattcttaccaac

SEQ ID NO: 3795810 - DNA, 25 bp, Homo sapien
ctgatggtcagattggttgagagaa

SEQ ID NO: 3795811 - DNA, 25 bp, Homo sapien
tcaccaggtacaagacggtagcctg

SEQ ID NO: 3795812 - DNA, 25 bp, Homo sapien
cagactgtttagttgtggtcggaca

SEQ ID NO: 3795813 - DNA, 25 bp, Homo sapien
gagaaaaccttgaggcacagactgt

SEQ ID NO: 3795814 - DNA, 25 bp, Homo sapien
ggaggataaatgtgatgccctggat

SEQ ID NO: 3795815 - DNA, 25 bp, Homo sapien
aggataaatgtgatgccctggattt

SEQ ID NO: 3795816 - DNA, 25 bp, Homo sapien
atggaggataaatgtgatgccctgg

SEQ ID NO: 3795817 - DNA, 25 bp, Homo sapien
gaggataaatgtgatgccctggatt

SEQ ID NO: 3795818 - DNA, 25 bp, Homo sapien
tcacaggcttcctccgggtttccat

SEQ ID NO: 3795819 - DNA, 25 bp, Homo sapien
gaatgtaggtgtgacgctgccaaag

SEQ ID NO: 3795820 - DNA, 25 bp, Homo sapien
tgccaaaggaccagacggtgttctt

SEQ ID NO: 3795821 - DNA, 25 bp, Homo sapien
gggaacatatggaactaggcgttct

SEQ ID NO: 3795822 - DNA, 25 bp, Homo sapien
tattgtcaattaacgtattgaactg

SEQ ID NO: 3795823 - DNA, 25 bp, Homo sapien
aaattattggcttccgcttctgagc

SEQ ID NO: 3795824 - DNA, 25 bp, Homo sapien
actgtataggcagcataaccctgtg

SEQ ID NO: 3795825 - DNA, 25 bp, Homo sapien
ttagaggcaagcaggatttattgtc

SEQ ID NO: 3795826 - DNA, 25 bp, Homo sapien
ctcagggaaactagcaagggcacca

SEQ ID NO: 3795827 - DNA, 25 bp, Homo sapien
aagatggcagccaagtggtccagaa

SEQ ID NO: 3795828 - DNA, 25 bp, Homo sapien
cagaatgtgggtggtaattttccag

SEQ ID NO: 3795829 - DNA, 25 bp, Homo sapien
gcttcaaccttgaccccagccaact

SEQ ID NO: 3795830 - DNA, 25 bp, Homo sapien
caacagtgatagagagcttcagctg

SEQ ID NO: 3795831 - DNA, 25 bp, Homo sapien
aatgcggagccattcgtcactgtgg

SEQ ID NO: 3795832 - DNA, 25 bp, Homo sapien
cagccatccaaatgcggagccattc

SEQ ID NO: 3795833 - DNA, 25 bp, Homo sapien
cgtcactgtggttgattccataaaa

SEQ ID NO: 3795834 - DNA, 25 bp, Homo sapien
tgctgaactggtgaccttcccagcc

SEQ ID NO: 3795835 - DNA, 25 bp, Homo sapien
tcaattgctatttcaatgctgagga

SEQ ID NO: 3795836 - DNA, 25 bp, Homo sapien
tcccagccccgttcagttgctggtg

SEQ ID NO: 3795837 - DNA, 25 bp, Homo sapien
ggagagctggctctttcaattgcta

SEQ ID NO: 3795838 - DNA, 25 bp, Homo sapien
agagagcagatgcagtcccctccat

SEQ ID NO: 3795839 - DNA, 25 bp, Homo sapien
aaagtggagagagcagatgcagtcc

SEQ ID NO: 3795840 - DNA, 25 bp, Homo sapien
ggaagaaagtggagagagcagatgc

SEQ ID NO: 3795841 - DNA, 25 bp, Homo sapien
agtggagagagcagatgcagtcccc

SEQ ID NO: 3795842 - DNA, 25 bp, Homo sapien
gcagcttccggtcatggaattctta

SEQ ID NO: 3795843 - DNA, 25 bp, Homo sapien
aagtgagctttctgtgaggccttgc

SEQ ID NO: 3795844 - DNA, 25 bp, Homo sapien
tgtgattggtgacagacttttgcat

SEQ ID NO: 3795845 - DNA, 25 bp, Homo sapien
gaaatgtgagtggaatgtattgtcc

SEQ ID NO: 3795846 - DNA, 25 bp, Homo sapien
cttcaaagagttcactatttatctc

SEQ ID NO: 3795847 - DNA, 25 bp, Homo sapien
ttatctcattttcatgtgagcatct

SEQ ID NO: 3795848 - DNA, 25 bp, Homo sapien
gagcatctgcagggaacaacttcac

SEQ ID NO: 3795849 - DNA, 25 bp, Homo sapien
gtgagcatctgcagggaacaacttc

SEQ ID NO: 3795850 - DNA, 25 bp, Homo sapien
ctgtatcatccagcaacttctgttt

SEQ ID NO: 3795851 - DNA, 25 bp, Homo sapien
gcggtgcctcggagctctggttttc

SEQ ID NO: 3795852 - DNA, 25 bp, Homo sapien
tcctctgaggtcacccttaaaggct

SEQ ID NO: 3795853 - DNA, 25 bp, Homo sapien
tgccttgtcgaggaaatcttgccag

SEQ ID NO: 3795854 - DNA, 25 bp, Homo sapien
tgatcagcagagctaatccatctgg

SEQ ID NO: 3795855 - DNA, 25 bp, Homo sapien
tccatgatcggttgatcagcagagc

SEQ ID NO: 3795856 - DNA, 25 bp, Homo sapien
gagctaatccatctggtggttgaca

SEQ ID NO: 3795857 - DNA, 25 bp, Homo sapien
gatcggttgatcagcagagctaatc

SEQ ID NO: 3795858 - DNA, 25 bp, Homo sapien
gaggttcaggtgcaaagaattagca

SEQ ID NO: 3795859 - DNA, 25 bp, Homo sapien
tgccccagccttctgtgtgcagttc

SEQ ID NO: 3795860 - DNA, 25 bp, Homo sapien
tcagtgagctgcaccatgtactcac

SEQ ID NO: 3795861 - DNA, 25 bp, Homo sapien
ccttcagtgagctgcaccatgtact

SEQ ID NO: 3795862 - DNA, 25 bp, Homo sapien
ttgccttcagtgagctgcaccatgt

SEQ ID NO: 3795863 - DNA, 25 bp, Homo sapien
ccccttgccttcagtgagctgcacc

SEQ ID NO: 3795864 - DNA, 25 bp, Homo sapien
tagctacagaacaagcctctccttg

SEQ ID NO: 3795865 - DNA, 25 bp, Homo sapien
aaacttttccatagctacagaacaa

SEQ ID NO: 3795866 - DNA, 25 bp, Homo sapien
agaacaagcctctccttgtaactgg

SEQ ID NO: 3795867 - DNA, 25 bp, Homo sapien
tttttagtgggatcaggagttggtc

SEQ ID NO: 3795868 - DNA, 25 bp, Homo sapien
cactgttgcgggaaattatgcttcg

SEQ ID NO: 3795869 - DNA, 25 bp, Homo sapien
tatgcttcgagccatgtatcttctt

SEQ ID NO: 3795870 - DNA, 25 bp, Homo sapien
tgttctcggtgattgcaatgtgtca

SEQ ID NO: 3795871 - DNA, 25 bp, Homo sapien
gaaacactcccaattaccgtggctg

SEQ ID NO: 3795872 - DNA, 25 bp, Homo sapien
cgaaggaaccccgtgtcccatggca

SEQ ID NO: 3795873 - DNA, 25 bp, Homo sapien
tgtcccatggcaagcgatgaacagg

SEQ ID NO: 3795874 - DNA, 25 bp, Homo sapien
cccgtgtcccatggcaagcgatgaa

SEQ ID NO: 3795875 - DNA, 25 bp, Homo sapien
catggcaagcgatgaacaggaggaa

SEQ ID NO: 3795876 - DNA, 25 bp, Homo sapien
taatttcaacgtcagcaggatccac

SEQ ID NO: 3795877 - DNA, 25 bp, Homo sapien
tgtgggccttacatgttcggtttaa

SEQ ID NO: 3795878 - DNA, 25 bp, Homo sapien
ttctttcaaattggcagcgggagcc

SEQ ID NO: 3795879 - DNA, 25 bp, Homo sapien
aggatccacactggcagtctccaac

SEQ ID NO: 3795880 - DNA, 25 bp, Homo sapien
tggaagtccaatagccttcatcttc

SEQ ID NO: 3795881 - DNA, 25 bp, Homo sapien
ttggaagtccaatagccttcatctt

SEQ ID NO: 3795882 - DNA, 25 bp, Homo sapien
tcatctgcagaatttgtaaaaattc

SEQ ID NO: 3795883 - DNA, 25 bp, Homo sapien
tctgcagaatttgtaaaaattcctt

SEQ ID NO: 3795884 - DNA, 25 bp, Homo sapien
tgcagaatttgtaaaaattccttct

SEQ ID NO: 3795885 - DNA, 25 bp, Homo sapien
cagaatttgtaaaaattccttctgg

SEQ ID NO: 3795886 - DNA, 25 bp, Homo sapien
agccccttacacaagttccgcctgt

SEQ ID NO: 3795887 - DNA, 25 bp, Homo sapien
ttacacaagttccgcctgttccata

SEQ ID NO: 3795888 - DNA, 25 bp, Homo sapien
cgcctgttccatatttggtggccat

SEQ ID NO: 3795889 - DNA, 25 bp, Homo sapien
ccgcctgttccatatttggtggcca

SEQ ID NO: 3795890 - DNA, 25 bp, Homo sapien
cgtgagcctagccacttttggcagg

SEQ ID NO: 3795891 - DNA, 25 bp, Homo sapien
catgaaatgggttatttaatgtacc

SEQ ID NO: 3795892 - DNA, 25 bp, Homo sapien
taatgtacctgtgggctgtttgcaa

SEQ ID NO: 3795893 - DNA, 25 bp, Homo sapien
ccagatgtccatcatgaaatgggtt

SEQ ID NO: 3795894 - DNA, 25 bp, Homo sapien
catctccatccgattaagtgtttct

SEQ ID NO: 3795895 - DNA, 25 bp, Homo sapien
tctccatccgattaagtgtttctct

SEQ ID NO: 3795896 - DNA, 25 bp, Homo sapien
atctccatccgattaagtgtttctc

SEQ ID NO: 3795897 - DNA, 25 bp, Homo sapien
agaagatgagatattttaccaagaa

SEQ ID NO: 3795898 - DNA, 25 bp, Homo sapien
ctggagttttcaggaagaagatgag

SEQ ID NO: 3795899 - DNA, 25 bp, Homo sapien
tattttaccaagaatgtctgttgaa

SEQ ID NO: 3795900 - DNA, 25 bp, Homo sapien
tgtctgttgaaaatactctttgcct

SEQ ID NO: 3795901 - DNA, 25 bp, Homo sapien
tcttggagcagcgactattatatgc

SEQ ID NO: 3795902 - DNA, 25 bp, Homo sapien
tcatgagttgagagtgggctgtgcg

SEQ ID NO: 3795903 - DNA, 25 bp, Homo sapien
gactattatatgctctggtgggctc

SEQ ID NO: 3795904 - DNA, 25 bp, Homo sapien
gcgtgcatcctagaatctcagcctt

SEQ ID NO: 3795905 - DNA, 25 bp, Homo sapien
tcctctcattagcaggttctgctcc

SEQ ID NO: 3795906 - DNA, 25 bp, Homo sapien
tctgttcctctcattagcaggttct

SEQ ID NO: 3795907 - DNA, 25 bp, Homo sapien
tgttcctctcattagcaggttctgc

SEQ ID NO: 3795908 - DNA, 25 bp, Homo sapien
tttctgttcctctcattagcaggtt

SEQ ID NO: 3795909 - DNA, 25 bp, Homo sapien
ggtgcagtgcattgggaattggaga

SEQ ID NO: 3795910 - DNA, 25 bp, Homo sapien
gtgcagtgcattgggaattggagaa

SEQ ID NO: 3795911 - DNA, 25 bp, Homo sapien
agaagacagtgtttccgttgtcaat

SEQ ID NO: 3795912 - DNA, 25 bp, Homo sapien
ctacttgctgatagcacctgcatcg

SEQ ID NO: 3795913 - DNA, 25 bp, Homo sapien
gcttcacttcagactcactgtttgt

SEQ ID NO: 3795914 - DNA, 25 bp, Homo sapien
atctggaagcttcacgctgggtggg

SEQ ID NO: 3795915 - DNA, 25 bp, Homo sapien
ctgatagcacctgcatcgcgtggcc

SEQ ID NO: 3795916 - DNA, 25 bp, Homo sapien
ccatcaatgtttgaatagaaagaca

SEQ ID NO: 3795917 - DNA, 25 bp, Homo sapien
gaagtactgatgtacgttacaatgt

SEQ ID NO: 3795918 - DNA, 25 bp, Homo sapien
tagcatcattctacttatgggaaac

SEQ ID NO: 3795919 - DNA, 25 bp, Homo sapien
cacacacactagatagatgatagct

SEQ ID NO: 3795920 - DNA, 25 bp, Homo sapien
tgtatcgattttctacaagttctaa

SEQ ID NO: 3795921 - DNA, 25 bp, Homo sapien
ctacaagttctaatattggagataa

SEQ ID NO: 3795922 - DNA, 25 bp, Homo sapien
cggagactgttaaaactcctcataa

SEQ ID NO: 3795923 - DNA, 25 bp, Homo sapien
cagaacggagactgttaaaactcct

SEQ ID NO: 3795924 - DNA, 25 bp, Homo sapien
agatccaggttgtcactgtttgtag

SEQ ID NO: 3795925 - DNA, 25 bp, Homo sapien
gagatccaggttgtcactgtttgta

SEQ ID NO: 3795926 - DNA, 25 bp, Homo sapien
gcgagatccaggttgtcactgtttg

SEQ ID NO: 3795927 - DNA, 25 bp, Homo sapien
cgagatccaggttgtcactgtttgt

SEQ ID NO: 3795928 - DNA, 25 bp, Homo sapien
ttcttattgaatgccgactcccatt

SEQ ID NO: 3795929 - DNA, 25 bp, Homo sapien
tttcttattgaatgccgactcccat

SEQ ID NO: 3795930 - DNA, 25 bp, Homo sapien
gcacgtgctcatcaataaggcacag

SEQ ID NO: 3795931 - DNA, 25 bp, Homo sapien
tgctcatcaataaggcacaggcaga

SEQ ID NO: 3795932 - DNA, 25 bp, Homo sapien
acaggcacgtgctcatcaataaggc

SEQ ID NO: 3795933 - DNA, 25 bp, Homo sapien
acagctggacaatgccagacacagg

SEQ ID NO: 3795934 - DNA, 25 bp, Homo sapien
taccaaggagatttctaggacgagc

SEQ ID NO: 3795935 - DNA, 25 bp, Homo sapien
cctcaagcctgaatctaccaaggag

SEQ ID NO: 3795936 - DNA, 25 bp, Homo sapien
ttctcgcgtcctcctcaagcctgaa

SEQ ID NO: 3795937 - DNA, 25 bp, Homo sapien
aggacgagcttggaactgtgcctgc

SEQ ID NO: 3795938 - DNA, 25 bp, Homo sapien
acttgacatccgagtcacattctcc

SEQ ID NO: 3795939 - DNA, 25 bp, Homo sapien
accttggattgcatgctcaccattc

SEQ ID NO: 3795940 - DNA, 25 bp, Homo sapien
ttgacatccgagtcacattctccac

SEQ ID NO: 3795941 - DNA, 25 bp, Homo sapien
ggattgcatgctcaccattcttgaa

SEQ ID NO: 3795942 - DNA, 25 bp, Homo sapien
aaaacttgacgtgtgtcctcttcca

SEQ ID NO: 3795943 - DNA, 25 bp, Homo sapien
aggaaaacttgacgtgtgtcctctt

SEQ ID NO: 3795944 - DNA, 25 bp, Homo sapien
agaaggaaaacttgacgtgtgtcct

SEQ ID NO: 3795945 - DNA, 25 bp, Homo sapien
aggacactttaactgacagaaggaa

SEQ ID NO: 3795946 - DNA, 25 bp, Homo sapien
cagtggtttctgacagtaatgggac

SEQ ID NO: 3795947 - DNA, 25 bp, Homo sapien
gtttctgacagtaatgggacctgat

SEQ ID NO: 3795948 - DNA, 25 bp, Homo sapien
tggtttctgacagtaatgggacctg

SEQ ID NO: 3795949 - DNA, 25 bp, Homo sapien
ttctgacagtaatgggacctgatgg

SEQ ID NO: 3795950 - DNA, 25 bp, Homo sapien
gtgcccagcatgtaacaactgcaaa

SEQ ID NO: 3795951 - DNA, 25 bp, Homo sapien
cagcatgtaacaactgcaaacatgt

SEQ ID NO: 3795952 - DNA, 25 bp, Homo sapien
cccagcatgtaacaactgcaaacat

SEQ ID NO: 3795953 - DNA, 25 bp, Homo sapien
tgcccagcatgtaacaactgcaaac

SEQ ID NO: 3795954 - DNA, 25 bp, Homo sapien
tccccagtgaaacaatggacactgg

SEQ ID NO: 3795955 - DNA, 25 bp, Homo sapien
ccagtgaaacaatggacactggagt

SEQ ID NO: 3795956 - DNA, 25 bp, Homo sapien
ccccagtgaaacaatggacactgga

SEQ ID NO: 3795957 - DNA, 25 bp, Homo sapien
cccagtgaaacaatggacactggag

SEQ ID NO: 3795958 - DNA, 25 bp, Homo sapien
gctatgtctcctgagctgtggctta

SEQ ID NO: 3795959 - DNA, 25 bp, Homo sapien
ctatgtctcctgagctgtggcttac

SEQ ID NO: 3795960 - DNA, 25 bp, Homo sapien
tgctatgtctcctgagctgtggctt

SEQ ID NO: 3795961 - DNA, 25 bp, Homo sapien
ctgctatgtctcctgagctgtggct

SEQ ID NO: 3795962 - DNA, 25 bp, Homo sapien
gcaaactgcccacttagcactgaga

SEQ ID NO: 3795963 - DNA, 25 bp, Homo sapien
ctgagcaaactgcccacttagcact

SEQ ID NO: 3795964 - DNA, 25 bp, Homo sapien
agcaaactgcccacttagcactgag

SEQ ID NO: 3795965 - DNA, 25 bp, Homo sapien
gagcaaactgcccacttagcactga

SEQ ID NO: 3795966 - DNA, 25 bp, Homo sapien
ggcactactgcggccaattcctcat

SEQ ID NO: 3795967 - DNA, 25 bp, Homo sapien
gccaattcctcatacagggaagcaa

SEQ ID NO: 3795968 - DNA, 25 bp, Homo sapien
taaaggcactactgcggccaattcc

SEQ ID NO: 3795969 - DNA, 25 bp, Homo sapien
aagccagtaatctctgttaaaggca

SEQ ID NO: 3795970 - DNA, 25 bp, Homo sapien
tctttcccggacatccatgctatgg

SEQ ID NO: 3795971 - DNA, 25 bp, Homo sapien
cctgcctgggataagaagctattgc

SEQ ID NO: 3795972 - DNA, 25 bp, Homo sapien
cagcgtctggtaaaggtctaaatca

SEQ ID NO: 3795973 - DNA, 25 bp, Homo sapien
gaaccaatcagctgggatggcccct

SEQ ID NO: 3795974 - DNA, 25 bp, Homo sapien
gctgctacttctgtccttgtcaaac

SEQ ID NO: 3795975 - DNA, 25 bp, Homo sapien
gatggaccactcttccggacaacaa

SEQ ID NO: 3795976 - DNA, 25 bp, Homo sapien
gactccttcggtagaaagatcctag

SEQ ID NO: 3795977 - DNA, 25 bp, Homo sapien
tttcccatgggactccttcggtaga

SEQ ID NO: 3795978 - DNA, 25 bp, Homo sapien
cctttagggagaatagtgcctgcct

SEQ ID NO: 3795979 - DNA, 25 bp, Homo sapien
ttctcttattgatagtgcaggtctc

SEQ ID NO: 3795980 - DNA, 25 bp, Homo sapien
ggtttcagagtctaggaaattggca

SEQ ID NO: 3795981 - DNA, 25 bp, Homo sapien
gacgcttaggtgcagaggtttcaga

SEQ ID NO: 3795982 - DNA, 25 bp, Homo sapien
caaccttcagcactatgtagattta

SEQ ID NO: 3795983 - DNA, 25 bp, Homo sapien
gtgcaaccttcagcactatgtagat

SEQ ID NO: 3795984 - DNA, 25 bp, Homo sapien
cattgttagaatgtactataatatg

SEQ ID NO: 3795985 - DNA, 25 bp, Homo sapien
tcttcagttgacaattgatttcaaa

SEQ ID NO: 3795986 - DNA, 25 bp, Homo sapien
cagtacaaagagttgccatcaatgc

SEQ ID NO: 3795987 - DNA, 25 bp, Homo sapien
cggagacacaacgaaaccaacgttg

SEQ ID NO: 3795988 - DNA, 25 bp, Homo sapien
cagtttatggtcaaaacggagacac

SEQ ID NO: 3795989 - DNA, 25 bp, Homo sapien
ccatcaatgcttcactcagttttct

SEQ ID NO: 3795990 - DNA, 25 bp, Homo sapien
gtctctttcgcaaacaagtaggaac

SEQ ID NO: 3795991 - DNA, 25 bp, Homo sapien
aactgtctctttcgcaaacaagtag

SEQ ID NO: 3795992 - DNA, 25 bp, Homo sapien
gaaaactgtctctttcgcaaacaag

SEQ ID NO: 3795993 - DNA, 25 bp, Homo sapien
ctgtctctttcgcaaacaagtagga

SEQ ID NO: 3795994 - DNA, 25 bp, Homo sapien
gccaacaaacaggtcattgctgctt

SEQ ID NO: 3795995 - DNA, 25 bp, Homo sapien
cattgctgcttgcaccagccctgtg

SEQ ID NO: 3795996 - DNA, 25 bp, Homo sapien
gtgacttgaactgcaatgaataaac

SEQ ID NO: 3795997 - DNA, 25 bp, Homo sapien
agtgtgcagtggcattgccaacaaa

SEQ ID NO: 3795998 - DNA, 25 bp, Homo sapien
aagccattggagacaggtggtcttt

SEQ ID NO: 3795999 - DNA, 25 bp, Homo sapien
catagaaagccattggagacaggtg

SEQ ID NO: 3796000 - DNA, 25 bp, Homo sapien
ccattggagacaggtggtctttgat

SEQ ID NO: 3796001 - DNA, 25 bp, Homo sapien
gaaagccattggagacaggtggtct

SEQ ID NO: 3796002 - DNA, 25 bp, Homo sapien
gctggcaaattggagacacccttaa

SEQ ID NO: 3796003 - DNA, 25 bp, Homo sapien
tgcacaacggctccaacagaagagt

SEQ ID NO: 3796004 - DNA, 25 bp, Homo sapien
gctctcatgatcctggctggcaaat

SEQ ID NO: 3796005 - DNA, 25 bp, Homo sapien
tttgagaagcctccacaatgcccag

SEQ ID NO: 3796006 - DNA, 25 bp, Homo sapien
tatgacttcgatcggtctgcacgaa

SEQ ID NO: 3796007 - DNA, 25 bp, Homo sapien
gactttaagagacagcacagctgct

SEQ ID NO: 3796008 - DNA, 25 bp, Homo sapien
tacagtctcatagtgctccaggcat

SEQ ID NO: 3796009 - DNA, 25 bp, Homo sapien
gttcatagccatgtctacagggagg

SEQ ID NO: 3796010 - DNA, 25 bp, Homo sapien
taagtgcacccctcccaaaagctgt

SEQ ID NO: 3796011 - DNA, 25 bp, Homo sapien
cagatgatcaaagacaacaggagaa

SEQ ID NO: 3796012 - DNA, 25 bp, Homo sapien
actgtattcaaggaagggcaatgcc

SEQ ID NO: 3796013 - DNA, 25 bp, Homo sapien
tggagatgacattaagtgcacccct

SEQ ID NO: 3796014 - DNA, 25 bp, Homo sapien
gaggaagaaataagtcacgattatg

SEQ ID NO: 3796015 - DNA, 25 bp, Homo sapien
aataagtcacgattatggtcatcag

SEQ ID NO: 3796016 - DNA, 25 bp, Homo sapien
tgtgccaaattctgtagtagaccac

SEQ ID NO: 3796017 - DNA, 25 bp, Homo sapien
tggtcatcagacacccgggtaggaa

SEQ ID NO: 3796018 - DNA, 25 bp, Homo sapien
gatgcactgttcatatcttggaagt

SEQ ID NO: 3796019 - DNA, 25 bp, Homo sapien
gaggcacaataagatccctgctaga

SEQ ID NO: 3796020 - DNA, 25 bp, Homo sapien
agttccaatctgagtgaccctctga

SEQ ID NO: 3796021 - DNA, 25 bp, Homo sapien
ggatattgccgtatattgaggcaca

SEQ ID NO: 3796022 - DNA, 25 bp, Homo sapien
gtcacaatagcaacctcttcatggg

SEQ ID NO: 3796023 - DNA, 25 bp, Homo sapien
tcttcatggggcactacatggagac

SEQ ID NO: 3796024 - DNA, 25 bp, Homo sapien
tggggcactacatggagacttcttc

SEQ ID NO: 3796025 - DNA, 25 bp, Homo sapien
gaaccatctgtcacaatagcaacct

SEQ ID NO: 3796026 - DNA, 25 bp, Homo sapien
gctgtttaatacatcttgacaacat

SEQ ID NO: 3796027 - DNA, 25 bp, Homo sapien
ttgctgtttaatacatcttgacaac

SEQ ID NO: 3796028 - DNA, 25 bp, Homo sapien
ctgtttaatacatcttgacaacatc

SEQ ID NO: 3796029 - DNA, 25 bp, Homo sapien
tgctgtttaatacatcttgacaaca

SEQ ID NO: 3796030 - DNA, 25 bp, Homo sapien
ttagattttggccacggcccagaaa

SEQ ID NO: 3796031 - DNA, 25 bp, Homo sapien
gcccatttcaaggaacgtgttatag

SEQ ID NO: 3796032 - DNA, 25 bp, Homo sapien
tagattttggccacggcccagaaag

SEQ ID NO: 3796033 - DNA, 25 bp, Homo sapien
gaacgtgttatagccacagagggat

SEQ ID NO: 3796034 - DNA, 25 bp, Homo sapien
gaatccagagatcccacggatgtgg

SEQ ID NO: 3796035 - DNA, 25 bp, Homo sapien
gagccagtccgatgtgattttccac

SEQ ID NO: 3796036 - DNA, 25 bp, Homo sapien
acggatgtggtccatactgtcagcc

SEQ ID NO: 3796037 - DNA, 25 bp, Homo sapien
tgcagggaactataggagatgacac

SEQ ID NO: 3796038 - DNA, 25 bp, Homo sapien
gttcatcttgtatccccagagccat

SEQ ID NO: 3796039 - DNA, 25 bp, Homo sapien
ggtgtgggtcttctcgtttaatcag

SEQ ID NO: 3796040 - DNA, 25 bp, Homo sapien
tcatttgtcgaatacacttaggtgt

SEQ ID NO: 3796041 - DNA, 25 bp, Homo sapien
cttctcgtttaatcagaactttgga

SEQ ID NO: 3796042 - DNA, 25 bp, Homo sapien
cgaatacacttaggtgtgggtcttc

SEQ ID NO: 3796043 - DNA, 25 bp, Homo sapien
attcctgtgatctgatacatgtcat

SEQ ID NO: 3796044 - DNA, 25 bp, Homo sapien
tctttcagccaaatggactttgcct

SEQ ID NO: 3796045 - DNA, 25 bp, Homo sapien
ttcatttacttcatgacactggtca

SEQ ID NO: 3796046 - DNA, 25 bp, Homo sapien
gaccaataaaatcttttatgcttct

SEQ ID NO: 3796047 - DNA, 25 bp, Homo sapien
ccgtagtaataaccagtgtcatgac

SEQ ID NO: 3796048 - DNA, 25 bp, Homo sapien
ttcaaatcctttcgactgcagaggg

SEQ ID NO: 3796049 - DNA, 25 bp, Homo sapien
cactgtcttgtgctgcaatggagac

SEQ ID NO: 3796050 - DNA, 25 bp, Homo sapien
tgttcatatctctgaagaccgtagt

SEQ ID NO: 3796051 - DNA, 25 bp, Homo sapien
cctgctacagatggctttgtaggct

SEQ ID NO: 3796052 - DNA, 25 bp, Homo sapien
caggagtgcactgctcaaccgtaag

SEQ ID NO: 3796053 - DNA, 25 bp, Homo sapien
cgctgcaaaacgagagtgacctaca

SEQ ID NO: 3796054 - DNA, 25 bp, Homo sapien
caaaacgagagtgacctacatttgc

SEQ ID NO: 3796055 - DNA, 25 bp, Homo sapien
tctctcctccacaatgtaatctaca

SEQ ID NO: 3796056 - DNA, 25 bp, Homo sapien
tctcctccacaatgtaatctacagc

SEQ ID NO: 3796057 - DNA, 25 bp, Homo sapien
ccacaatgtaatctacagcagacat

SEQ ID NO: 3796058 - DNA, 25 bp, Homo sapien
tcctccacaatgtaatctacagcag

SEQ ID NO: 3796059 - DNA, 25 bp, Homo sapien
ggcctctttgttgcgttttctcctc

SEQ ID NO: 3796060 - DNA, 25 bp, Homo sapien
gtctctagtatctgaacatctgttc

SEQ ID NO: 3796061 - DNA, 25 bp, Homo sapien
tgttcctgttgcttcattgcctttg

SEQ ID NO: 3796062 - DNA, 25 bp, Homo sapien
ttttctcctcgttcccatcccagcc

SEQ ID NO: 3796063 - DNA, 25 bp, Homo sapien
taagaccccctggatttagtgctca

SEQ ID NO: 3796064 - DNA, 25 bp, Homo sapien
aagaccccctggatttagtgctcac

SEQ ID NO: 3796065 - DNA, 25 bp, Homo sapien
agatgaactgtctttgcattgagta

SEQ ID NO: 3796066 - DNA, 25 bp, Homo sapien
tgaattcccaggaggtgaatctcca

SEQ ID NO: 3796067 - DNA, 25 bp, Homo sapien
gaattcccaggaggtgaatctccat

SEQ ID NO: 3796068 - DNA, 25 bp, Homo sapien
ctgaattcccaggaggtgaatctcc

SEQ ID NO: 3796069 - DNA, 25 bp, Homo sapien
ttctatttctgtgcgtgtatctgtc

SEQ ID NO: 3796070 - DNA, 25 bp, Homo sapien
tcctcgtccgctagtatatttggct

SEQ ID NO: 3796071 - DNA, 25 bp, Homo sapien
atttggctgttcataccctctccag

SEQ ID NO: 3796072 - DNA, 25 bp, Homo sapien
cttcatgatgtctcccgattctatt

SEQ ID NO: 3796073 - DNA, 25 bp, Homo sapien
ctagaagaacttaaaaatcaaattg

SEQ ID NO: 3796074 - DNA, 25 bp, Homo sapien
tagaagaacttaaaaatcaaattga

SEQ ID NO: 3796075 - DNA, 25 bp, Homo sapien
gctattaacctgagcagatttccga

SEQ ID NO: 3796076 - DNA, 25 bp, Homo sapien
atatccttacataacccacagtcac

SEQ ID NO: 3796077 - DNA, 25 bp, Homo sapien
ggatgggatcacaatgctattaacc

SEQ ID NO: 3796078 - DNA, 25 bp, Homo sapien
ccacagtcactcctgcgtttggatg

SEQ ID NO: 3796079 - DNA, 25 bp, Homo sapien
tctttcctgcttgctagtaatgcat

SEQ ID NO: 3796080 - DNA, 25 bp, Homo sapien
taatgcatctgtgcggtcagttaaa

SEQ ID NO: 3796081 - DNA, 25 bp, Homo sapien
agtaatgcatctgtgcggtcagtta

SEQ ID NO: 3796082 - DNA, 25 bp, Homo sapien
tcctgcttgctagtaatgcatctgt

SEQ ID NO: 3796083 - DNA, 25 bp, Homo sapien
tatccggtgatttctcgcctgcaaa

SEQ ID NO: 3796084 - DNA, 25 bp, Homo sapien
aatgcctgcatgaggccattcccag

SEQ ID NO: 3796085 - DNA, 25 bp, Homo sapien
gggagactccaagcctttctagtga

SEQ ID NO: 3796086 - DNA, 25 bp, Homo sapien
ggacctcccagtttcagatacccta

SEQ ID NO: 3796087 - DNA, 25 bp, Homo sapien
caggccagctttgtgagagtaggca

SEQ ID NO: 3796088 - DNA, 25 bp, Homo sapien
taggacaggccagctttgtgagagt

SEQ ID NO: 3796089 - DNA, 25 bp, Homo sapien
ttggacgtaggacaggccagctttg

SEQ ID NO: 3796090 - DNA, 25 bp, Homo sapien
cgtaggacaggccagctttgtgaga

SEQ ID NO: 3796091 - DNA, 25 bp, Homo sapien
tcaaacagacccattattaaaagct

SEQ ID NO: 3796092 - DNA, 25 bp, Homo sapien
caaatggccgggaagttgaagaact

SEQ ID NO: 3796093 - DNA, 25 bp, Homo sapien
tcttccactgctggggtaactcatg

SEQ ID NO: 3796094 - DNA, 25 bp, Homo sapien
taaaactgtcaaacagacccattat

SEQ ID NO: 3796095 - DNA, 25 bp, Homo sapien
ctttcggtggtggaattaaggtgct

SEQ ID NO: 3796096 - DNA, 25 bp, Homo sapien
cgtctcaggctgatggattgcccaa

SEQ ID NO: 3796097 - DNA, 25 bp, Homo sapien
tagttacggatgtggttcatcaggc

SEQ ID NO: 3796098 - DNA, 25 bp, Homo sapien
aaaaagctcacagtccgtctcaggc

SEQ ID NO: 3796099 - DNA, 25 bp, Homo sapien
caatagtagacaaacatggaaagag

SEQ ID NO: 3796100 - DNA, 25 bp, Homo sapien
tcactgactggtgagattatcagca

SEQ ID NO: 3796101 - DNA, 25 bp, Homo sapien
agagagggtgttccttcctctctgt

SEQ ID NO: 3796102 - DNA, 25 bp, Homo sapien
tctctgttgtcgcagctggtggatg

SEQ ID NO: 3796103 - DNA, 25 bp, Homo sapien
tgtgcctccataactccttagcttg

SEQ ID NO: 3796104 - DNA, 25 bp, Homo sapien
gaagacagcactgtttgcaagtcgg

SEQ ID NO: 3796105 - DNA, 25 bp, Homo sapien
ctggaaacacactgacgaggaagac

SEQ ID NO: 3796106 - DNA, 25 bp, Homo sapien
gatcaggctgccgtttgacaattga

SEQ ID NO: 3796107 - DNA, 25 bp, Homo sapien
atgtccacatcggagagggacaaag

SEQ ID NO: 3796108 - DNA, 25 bp, Homo sapien
ggttatgtccacatcggagagggac

SEQ ID NO: 3796109 - DNA, 25 bp, Homo sapien
ctggttatgtccacatcggagaggg

SEQ ID NO: 3796110 - DNA, 25 bp, Homo sapien
ttatgtccacatcggagagggacaa

SEQ ID NO: 3796111 - DNA, 25 bp, Homo sapien
ccagggcccacagaagcactttatc

SEQ ID NO: 3796112 - DNA, 25 bp, Homo sapien
cagaagcactttatcaggcctagaa

SEQ ID NO: 3796113 - DNA, 25 bp, Homo sapien
gaatccatttgccaatcaccacctc

SEQ ID NO: 3796114 - DNA, 25 bp, Homo sapien
cctagaatgtcattgacatgaatcc

SEQ ID NO: 3796115 - DNA, 25 bp, Homo sapien
cctttttgccggcagcattgctctc

SEQ ID NO: 3796116 - DNA, 25 bp, Homo sapien
tcttttacagtcataaacgtctatg

SEQ ID NO: 3796117 - DNA, 25 bp, Homo sapien
ccggcagcattgctctcgggcacag

SEQ ID NO: 3796118 - DNA, 25 bp, Homo sapien
ggttcagttgacgttgctgcttgat

SEQ ID NO: 3796119 - DNA, 25 bp, Homo sapien
tgtctctcgtcttatttattagcac

SEQ ID NO: 3796120 - DNA, 25 bp, Homo sapien
tcacaattgaaaataccgatgccat

SEQ ID NO: 3796121 - DNA, 25 bp, Homo sapien
tacgaccactaatcacaattgaaaa

SEQ ID NO: 3796122 - DNA, 25 bp, Homo sapien
atttattagcacattacgaccacta

SEQ ID NO: 3796123 - DNA, 25 bp, Homo sapien
agacgtcctaccgagaccctttgat

SEQ ID NO: 3796124 - DNA, 25 bp, Homo sapien
cgtcctaccgagaccctttgatgtc

SEQ ID NO: 3796125 - DNA, 25 bp, Homo sapien
gacgtcctaccgagaccctttgatg

SEQ ID NO: 3796126 - DNA, 25 bp, Homo sapien
cctaccgagaccctttgatgtctgg

SEQ ID NO: 3796127 - DNA, 25 bp, Homo sapien
tggaacaggtattggggtgcgaagt

SEQ ID NO: 3796128 - DNA, 25 bp, Homo sapien
ctatggaacaggtattggggtgcga

SEQ ID NO: 3796129 - DNA, 25 bp, Homo sapien
acaggtattggggtgcgaagttgga

SEQ ID NO: 3796130 - DNA, 25 bp, Homo sapien
tattggggtgcgaagttggagaaga

SEQ ID NO: 3796131 - DNA, 25 bp, Homo sapien
ttctgtgcgagatgacaggccctgc

SEQ ID NO: 3796132 - DNA, 25 bp, Homo sapien
gccgaaaaacaggtgacagcaagat

SEQ ID NO: 3796133 - DNA, 25 bp, Homo sapien
tgacttccagcacgcagcagtaaaa

SEQ ID NO: 3796134 - DNA, 25 bp, Homo sapien
gagatccatcgtctggctgtcactg

SEQ ID NO: 3796135 - DNA, 25 bp, Homo sapien
tgacttgtgaggcagtcctccaaag

SEQ ID NO: 3796136 - DNA, 25 bp, Homo sapien
gagtttccaaagtgacttgtgaggc

SEQ ID NO: 3796137 - DNA, 25 bp, Homo sapien
gtcctccaaagttgtgtgacttcca

SEQ ID NO: 3796138 - DNA, 25 bp, Homo sapien
caggtgagtttccaaagtgacttgt

SEQ ID NO: 3796139 - DNA, 25 bp, Homo sapien
gatgatacttatcattcattgcata

SEQ ID NO: 3796140 - DNA, 25 bp, Homo sapien
tcattgcataaagtgcgaacaaaat

SEQ ID NO: 3796141 - DNA, 25 bp, Homo sapien
cattcattgcataaagtgcgaacaa

SEQ ID NO: 3796142 - DNA, 25 bp, Homo sapien
cataaagtgcgaacaaaatggttag

SEQ ID NO: 3796143 - DNA, 25 bp, Homo sapien
cacgatgttcaagaagaagagattt

SEQ ID NO: 3796144 - DNA, 25 bp, Homo sapien
cgatgttcaagaagaagagatttga

SEQ ID NO: 3796145 - DNA, 25 bp, Homo sapien
gatgttcaagaagaagagatttgac

SEQ ID NO: 3796146 - DNA, 25 bp, Homo sapien
acgatgttcaagaagaagagatttg

SEQ ID NO: 3796147 - DNA, 25 bp, Homo sapien
tttcctcaccatacagttctataga

SEQ ID NO: 3796148 - DNA, 25 bp, Homo sapien
tcaccatacagttctatagagatgt

SEQ ID NO: 3796149 - DNA, 25 bp, Homo sapien
tcttcactgctaaggttctttccat

SEQ ID NO: 3796150 - DNA, 25 bp, Homo sapien
tcctcaccatacagttctatagaga

SEQ ID NO: 3796151 - DNA, 25 bp, Homo sapien
tgtagatgtatcctcaaagtcaaag

SEQ ID NO: 3796152 - DNA, 25 bp, Homo sapien
tctgttcgaagcaaacgtctccttt

SEQ ID NO: 3796153 - DNA, 25 bp, Homo sapien
aggtttcatctgttcgaagcaaacg

SEQ ID NO: 3796154 - DNA, 25 bp, Homo sapien
aaacgtctcctttgtctgagcagag

SEQ ID NO: 3796155 - DNA, 25 bp, Homo sapien
tcttgtgtgacagtctccctgtgga

SEQ ID NO: 3796156 - DNA, 25 bp, Homo sapien
aagcgatatgaccagatgaagggac

SEQ ID NO: 3796157 - DNA, 25 bp, Homo sapien
ggtaagactcgttctgggttcgatg

SEQ ID NO: 3796158 - DNA, 25 bp, Homo sapien
ccaaggaagatgtcagggtaagact

SEQ ID NO: 3796159 - DNA, 25 bp, Homo sapien
ttaacatgcagatacaacttctggg

SEQ ID NO: 3796160 - DNA, 25 bp, Homo sapien
gatccatggagcataacttagctgc

SEQ ID NO: 3796161 - DNA, 25 bp, Homo sapien
tagtgctaaaatggaccctgaatcc

SEQ ID NO: 3796162 - DNA, 25 bp, Homo sapien
caggatggaagttataaggtggcac

SEQ ID NO: 3796163 - DNA, 25 bp, Homo sapien
tggcgtcaatgctgatgtagagtgt

SEQ ID NO: 3796164 - DNA, 25 bp, Homo sapien
caggcatctcggacattctattccc

SEQ ID NO: 3796165 - DNA, 25 bp, Homo sapien
tcagggccccatggcgtcaatgctg

SEQ ID NO: 3796166 - DNA, 25 bp, Homo sapien
gtgtatatcacagcaggcatctcgg

SEQ ID NO: 3796167 - DNA, 25 bp, Homo sapien
gagactgacgagcttttattcttgg

SEQ ID NO: 3796168 - DNA, 25 bp, Homo sapien
tcttgggttacctgggagattgttc

SEQ ID NO: 3796169 - DNA, 25 bp, Homo sapien
tgcaagcgagtgtgtctcagagtga

SEQ ID NO: 3796170 - DNA, 25 bp, Homo sapien
tgtaggcacctctttcttctggcag

SEQ ID NO: 3796171 - DNA, 25 bp, Homo sapien
ttaacaagtgagtccatctgctccc

SEQ ID NO: 3796172 - DNA, 25 bp, Homo sapien
aacaagtgagtccatctgctcccag

SEQ ID NO: 3796173 - DNA, 25 bp, Homo sapien
gttaacaagtgagtccatctgctcc

SEQ ID NO: 3796174 - DNA, 25 bp, Homo sapien
taacaagtgagtccatctgctccca

SEQ ID NO: 3796175 - DNA, 25 bp, Homo sapien
ccacccaaggtccaaggctgatgac

SEQ ID NO: 3796176 - DNA, 25 bp, Homo sapien
cacccacccaaggtccaaggctgat

SEQ ID NO: 3796177 - DNA, 25 bp, Homo sapien
acccacccaaggtccaaggctgatg

SEQ ID NO: 3796178 - DNA, 25 bp, Homo sapien
tacacccacccaaggtccaaggctg

SEQ ID NO: 3796179 - DNA, 25 bp, Homo sapien
ccaggtctaggggacttgttcctgt

SEQ ID NO: 3796180 - DNA, 25 bp, Homo sapien
cccaggtctaggggacttgttcctg

SEQ ID NO: 3796181 - DNA, 25 bp, Homo sapien
caggtctaggggacttgttcctgtt

SEQ ID NO: 3796182 - DNA, 25 bp, Homo sapien
taaagtagtttaatgtttcagcaaa

SEQ ID NO: 3796183 - DNA, 25 bp, Homo sapien
ttaatgtttcagcaaaaccataatg

SEQ ID NO: 3796184 - DNA, 25 bp, Homo sapien
tagtttaatgtttcagcaaaaccat

SEQ ID NO: 3796185 - DNA, 25 bp, Homo sapien
tttaaagtagtttaatgtttcagca

SEQ ID NO: 3796186 - DNA, 25 bp, Homo sapien
gaggatatattgacgctccacagtc

SEQ ID NO: 3796187 - DNA, 25 bp, Homo sapien
cgtgaccgtcgtgcttcctttgaat

SEQ ID NO: 3796188 - DNA, 25 bp, Homo sapien
gaatcaacatattggtggtctaacc

SEQ ID NO: 3796189 - DNA, 25 bp, Homo sapien
cagtcacagcgtggcatgatggccc

SEQ ID NO: 3796190 - DNA, 25 bp, Homo sapien
ctgggggtatagcacgagtcttcac

SEQ ID NO: 3796191 - DNA, 25 bp, Homo sapien
gggggtatagcacgagtcttcacca

SEQ ID NO: 3796192 - DNA, 25 bp, Homo sapien
gggtatagcacgagtcttcaccaac

SEQ ID NO: 3796193 - DNA, 25 bp, Homo sapien
cctgggggtatagcacgagtcttca

SEQ ID NO: 3796194 - DNA, 25 bp, Homo sapien
caagatgcactggtcttcagagtgc

SEQ ID NO: 3796195 - DNA, 25 bp, Homo sapien
caatgacgtctgcactggcatctca

SEQ ID NO: 3796196 - DNA, 25 bp, Homo sapien
cattagcttggccaatctattcctt

SEQ ID NO: 3796197 - DNA, 25 bp, Homo sapien
ctgaacccattagcttggccaatct

SEQ ID NO: 3796198 - DNA, 25 bp, Homo sapien
caatttctgagatggcaaaatcagc

SEQ ID NO: 3796199 - DNA, 25 bp, Homo sapien
cggacaagacaatttcatcaagcaa

SEQ ID NO: 3796200 - DNA, 25 bp, Homo sapien
tcaatttctgagatggcaaaatcag

SEQ ID NO: 3796201 - DNA, 25 bp, Homo sapien
ttaacggacaagacaatttcatcaa

SEQ ID NO: 3796202 - DNA, 25 bp, Homo sapien
aaatctgacaaataacatatcgctg

SEQ ID NO: 3796203 - DNA, 25 bp, Homo sapien
gacaaataacatatcgctgtttgtc

SEQ ID NO: 3796204 - DNA, 25 bp, Homo sapien
tcaagcaaaatctgacaaataacat

SEQ ID NO: 3796205 - DNA, 25 bp, Homo sapien
caagcaaaatctgacaaataacata

SEQ ID NO: 3796206 - DNA, 25 bp, Homo sapien
tgtgctcagctgtcatgaaatagac

SEQ ID NO: 3796207 - DNA, 25 bp, Homo sapien
taatcctagccttgagtggaaagct

SEQ ID NO: 3796208 - DNA, 25 bp, Homo sapien
tctaaagccctcttctgagagtgcc

SEQ ID NO: 3796209 - DNA, 25 bp, Homo sapien
gacaagatctagagtctgccaggga

SEQ ID NO: 3796210 - DNA, 25 bp, Homo sapien
tctcacagcagtttcaaacgtggcc

SEQ ID NO: 3796211 - DNA, 25 bp, Homo sapien
aaagcagtacttgatttcccagctg

SEQ ID NO: 3796212 - DNA, 25 bp, Homo sapien
aaaccaacatggcttcccttgtgat

SEQ ID NO: 3796213 - DNA, 25 bp, Homo sapien
aagttatgtgttgtggttttaggca

SEQ ID NO: 3796214 - DNA, 25 bp, Homo sapien
taagcgagtcctccggtcgcctttg

SEQ ID NO: 3796215 - DNA, 25 bp, Homo sapien
gcctttgaagaattacatttgcaca

SEQ ID NO: 3796216 - DNA, 25 bp, Homo sapien
tctgcagttttgtccggcacatcct

SEQ ID NO: 3796217 - DNA, 25 bp, Homo sapien
ttgcacagattaattgtctgcagtt

SEQ ID NO: 3796218 - DNA, 25 bp, Homo sapien
gcaggaccaggccatatgagcctgg

SEQ ID NO: 3796219 - DNA, 25 bp, Homo sapien
caaatccccgcggactaagcttggg

SEQ ID NO: 3796220 - DNA, 25 bp, Homo sapien
gtgcttatgtccgtgtgtgtccgtg

SEQ ID NO: 3796221 - DNA, 25 bp, Homo sapien
agcagcccgcgagctcagcctgaga

SEQ ID NO: 3796222 - DNA, 25 bp, Homo sapien
ccaggcgtttaatcgaatgtggaca

SEQ ID NO: 3796223 - DNA, 25 bp, Homo sapien
cagcttgcagcacgactgggaaact

SEQ ID NO: 3796224 - DNA, 25 bp, Homo sapien
catcaaggcagcttgcagcacgact

SEQ ID NO: 3796225 - DNA, 25 bp, Homo sapien
gcgtttaatcgaatgtggacatcaa

SEQ ID NO: 3796226 - DNA, 25 bp, Homo sapien
tcttccccaagtgcattcagagatg

SEQ ID NO: 3796227 - DNA, 25 bp, Homo sapien
tgttccaaagccacaatcctgggaa

SEQ ID NO: 3796228 - DNA, 25 bp, Homo sapien
cgatgggagcatttctaagtagaac

SEQ ID NO: 3796229 - DNA, 25 bp, Homo sapien
gattttatagctctctcctgggtgg

SEQ ID NO: 3796230 - DNA, 25 bp, Homo sapien
catttttgcgtctaaaatatctctg

SEQ ID NO: 3796231 - DNA, 25 bp, Homo sapien
tttgcgtctaaaatatctctgcact

SEQ ID NO: 3796232 - DNA, 25 bp, Homo sapien
gcaaagcatttttgcgtctaaaata

SEQ ID NO: 3796233 - DNA, 25 bp, Homo sapien
tagcaaagcatttttgcgtctaaaa

SEQ ID NO: 3796234 - DNA, 25 bp, Homo sapien
tgacctcacaagcatcatggaagac

SEQ ID NO: 3796235 - DNA, 25 bp, Homo sapien
tgcgtaagagcattgaccgctcggg

SEQ ID NO: 3796236 - DNA, 25 bp, Homo sapien
ctgcgtaagagcattgaccgctcgg

SEQ ID NO: 3796237 - DNA, 25 bp, Homo sapien
ggcttcctgacctcacaagcatcat

SEQ ID NO: 3796238 - DNA, 25 bp, Homo sapien
ttccagaagtctcaaagtcacactg

SEQ ID NO: 3796239 - DNA, 25 bp, Homo sapien
tcacactgacaaggttaggaaataa

SEQ ID NO: 3796240 - DNA, 25 bp, Homo sapien
gcataacagggctgcatagctctga

SEQ ID NO: 3796241 - DNA, 25 bp, Homo sapien
cttgtagtaagtggatcctgggacc

SEQ ID NO: 3796242 - DNA, 25 bp, Homo sapien
cagtgaatttctagcatagcctttg

SEQ ID NO: 3796243 - DNA, 25 bp, Homo sapien
tctgtcagtgaatttctagcatagc

SEQ ID NO: 3796244 - DNA, 25 bp, Homo sapien
gtgaatttctagcatagcctttgta

SEQ ID NO: 3796245 - DNA, 25 bp, Homo sapien
tgtcagtgaatttctagcatagcct

SEQ ID NO: 3796246 - DNA, 25 bp, Homo sapien
tgtgtgcagacagagcaacgctgct

SEQ ID NO: 3796247 - DNA, 25 bp, Homo sapien
gcaaaaagggcagcttgtacgaaaa

SEQ ID NO: 3796248 - DNA, 25 bp, Homo sapien
tctcatctgggaaaatgtgtgcaga

SEQ ID NO: 3796249 - DNA, 25 bp, Homo sapien
ggcaaaaagggcagcttgtacgaaa

SEQ ID NO: 3796250 - DNA, 25 bp, Homo sapien
ttgtagaatcccagcagaccgcaat

SEQ ID NO: 3796251 - DNA, 25 bp, Homo sapien
ctgaagacatctggaacacaactgg

SEQ ID NO: 3796252 - DNA, 25 bp, Homo sapien
gatgagctgaagaagtcaccctgtt

SEQ ID NO: 3796253 - DNA, 25 bp, Homo sapien
gactttagtgatccattagacctgg

SEQ ID NO: 3796254 - DNA, 25 bp, Homo sapien
ttaggcggccgccataacaggcggt

SEQ ID NO: 3796255 - DNA, 25 bp, Homo sapien
ctgtgggacttaggcggccgccata

SEQ ID NO: 3796256 - DNA, 25 bp, Homo sapien
ctctgtgggacttaggcggccgcca

SEQ ID NO: 3796257 - DNA, 25 bp, Homo sapien
gccgccataacaggcggtctgcgca

SEQ ID NO: 3796258 - DNA, 25 bp, Homo sapien
gatcccagtacactgctggagttcc

SEQ ID NO: 3796259 - DNA, 25 bp, Homo sapien
catgactcaggctgtcctaatgatc

SEQ ID NO: 3796260 - DNA, 25 bp, Homo sapien
ggtcatcatgactcaggctgtccta

SEQ ID NO: 3796261 - DNA, 25 bp, Homo sapien
gctggagttcctacatttaagtggt

SEQ ID NO: 3796262 - DNA, 25 bp, Homo sapien
tccaagctggtagcgagtagctttg

SEQ ID NO: 3796263 - DNA, 25 bp, Homo sapien
tgcagacaggtccaagctggtagcg

SEQ ID NO: 3796264 - DNA, 25 bp, Homo sapien
gcccaggctccaccttagtcctagg

SEQ ID NO: 3796265 - DNA, 25 bp, Homo sapien
ccagaggagatactgcagacaggtc

SEQ ID NO: 3796266 - DNA, 25 bp, Homo sapien
ggctgccgcaggagccagctgtacc

SEQ ID NO: 3796267 - DNA, 25 bp, Homo sapien
ctgccgcaggagccagctgtaccat

SEQ ID NO: 3796268 - DNA, 25 bp, Homo sapien
gctgccgcaggagccagctgtacca

SEQ ID NO: 3796269 - DNA, 25 bp, Homo sapien
tgtcgctcctaaaggtgacctcgtc

SEQ ID NO: 3796270 - DNA, 25 bp, Homo sapien
cgctgttcagccgtaccatgagatg

SEQ ID NO: 3796271 - DNA, 25 bp, Homo sapien
gaggtggacatctgacagcacagtg

SEQ ID NO: 3796272 - DNA, 25 bp, Homo sapien
agcacagtgtcgctcctaaaggtga

SEQ ID NO: 3796273 - DNA, 25 bp, Homo sapien
acccttggctcctgaatctgtccaa

SEQ ID NO: 3796274 - DNA, 25 bp, Homo sapien
gaggctcctttgtgtgaacatctct

SEQ ID NO: 3796275 - DNA, 25 bp, Homo sapien
ttggctccatagaagcttgaattgg

SEQ ID NO: 3796276 - DNA, 25 bp, Homo sapien
catagaagcttgaattgggacagga

SEQ ID NO: 3796277 - DNA, 25 bp, Homo sapien
gagaaaccctcattaccatggccac

SEQ ID NO: 3796278 - DNA, 25 bp, Homo sapien
agaaaccctcattaccatggccact

SEQ ID NO: 3796279 - DNA, 25 bp, Homo sapien
gggagaaaccctcattaccatggcc

SEQ ID NO: 3796280 - DNA, 25 bp, Homo sapien
ggagaaaccctcattaccatggcca

SEQ ID NO: 3796281 - DNA, 25 bp, Homo sapien
cttcttcctgtgctagaatcatggg

SEQ ID NO: 3796282 - DNA, 25 bp, Homo sapien
gaggcggctcgtggtcttctcacca

SEQ ID NO: 3796283 - DNA, 25 bp, Homo sapien
tgcgggctgccttgtgcttcctctc

SEQ ID NO: 3796284 - DNA, 25 bp, Homo sapien
tgggatgtaccttgtctctcagagg

SEQ ID NO: 3796285 - DNA, 25 bp, Homo sapien
ctgggcctgcagagtccacgctcag

SEQ ID NO: 3796286 - DNA, 25 bp, Homo sapien
gctcagatcatactgagccctgagc

SEQ ID NO: 3796287 - DNA, 25 bp, Homo sapien
ctggttctcataacctgtgctgcct

SEQ ID NO: 3796288 - DNA, 25 bp, Homo sapien
gagtccacgctcagatcatactgag

SEQ ID NO: 3796289 - DNA, 25 bp, Homo sapien
aaatgggttgatttacgggtcagag

SEQ ID NO: 3796290 - DNA, 25 bp, Homo sapien
gttgtgaggcgaatgacgtctgctt

SEQ ID NO: 3796291 - DNA, 25 bp, Homo sapien
gacgtctgcttaccatcaactctgc

SEQ ID NO: 3796292 - DNA, 25 bp, Homo sapien
ctggcgctcactgggcatgtttcaa

SEQ ID NO: 3796293 - DNA, 25 bp, Homo sapien
gaggcttacatttacggaacactga

SEQ ID NO: 3796294 - DNA, 25 bp, Homo sapien
gaaggcacgggactcagaatctgac

SEQ ID NO: 3796295 - DNA, 25 bp, Homo sapien
ggaacactgaatccgtgccaggcat

SEQ ID NO: 3796296 - DNA, 25 bp, Homo sapien
gacttgcccgattctccagcaggaa

SEQ ID NO: 3796297 - DNA, 25 bp, Homo sapien
catgtatattacagagaaagacact

SEQ ID NO: 3796298 - DNA, 25 bp, Homo sapien
cactgagattctacctgattggctc

SEQ ID NO: 3796299 - DNA, 25 bp, Homo sapien
tcaaaatcacccaatgacagcttcg

SEQ ID NO: 3796300 - DNA, 25 bp, Homo sapien
gaaagacactgactaaggttcagca

SEQ ID NO: 3796301 - DNA, 25 bp, Homo sapien
cttttgagcaccactcagaggatgg

SEQ ID NO: 3796302 - DNA, 25 bp, Homo sapien
taactgggtatctctgccctacagc

SEQ ID NO: 3796303 - DNA, 25 bp, Homo sapien
ctgtgctactggttaggaggcgact

SEQ ID NO: 3796304 - DNA, 25 bp, Homo sapien
ctcagaggatgggagctttttggaa

SEQ ID NO: 3796305 - DNA, 25 bp, Homo sapien
ccagcacggtcagatgggcgtcaga

SEQ ID NO: 3796306 - DNA, 25 bp, Homo sapien
aggacagtgtggcaaccgccagcac

SEQ ID NO: 3796307 - DNA, 25 bp, Homo sapien
cagatgggcgtcagaggttggaatg

SEQ ID NO: 3796308 - DNA, 25 bp, Homo sapien
cagaaaaccacaagacaggacagtg

SEQ ID NO: 3796309 - DNA, 25 bp, Homo sapien
gatgggacagaaaccaagagaaatg

SEQ ID NO: 3796310 - DNA, 25 bp, Homo sapien
ggacagaaaccaagagaaatgccca

SEQ ID NO: 3796311 - DNA, 25 bp, Homo sapien
ctggatgggacagaaaccaagagaa

SEQ ID NO: 3796312 - DNA, 25 bp, Homo sapien
gggacagaaaccaagagaaatgccc

SEQ ID NO: 3796313 - DNA, 25 bp, Homo sapien
tgcttgccaacatcctccaggggcg

SEQ ID NO: 3796314 - DNA, 25 bp, Homo sapien
gcttgccaacatcctccaggggcgt

SEQ ID NO: 3796315 - DNA, 25 bp, Homo sapien
cttgccaacatcctccaggggcgtg

SEQ ID NO: 3796316 - DNA, 25 bp, Homo sapien
acaggaagcggacaagacctaccca

SEQ ID NO: 3796317 - DNA, 25 bp, Homo sapien
agggccacaggaagcggacaagacc

SEQ ID NO: 3796318 - DNA, 25 bp, Homo sapien
agaggacaaggagcgacaagcagcg

SEQ ID NO: 3796319 - DNA, 25 bp, Homo sapien
aaggagcgacaagcagcgtgaggct

SEQ ID NO: 3796320 - DNA, 25 bp, Homo sapien
gagctccagcgctgtacatcctcgg

SEQ ID NO: 3796321 - DNA, 25 bp, Homo sapien
cggaacaggatgtagtctgccagga

SEQ ID NO: 3796322 - DNA, 25 bp, Homo sapien
ccagcgctgtacatcctcggaagag

SEQ ID NO: 3796323 - DNA, 25 bp, Homo sapien
cctcggaagaggtcctgtcggaaca

SEQ ID NO: 3796324 - DNA, 25 bp, Homo sapien
ctgtacaataaacggtccgtgccat

SEQ ID NO: 3796325 - DNA, 25 bp, Homo sapien
tgagggcagtgcctagtcagctcca

SEQ ID NO: 3796326 - DNA, 25 bp, Homo sapien
gcagggcctcctacatctagaaatg

SEQ ID NO: 3796327 - DNA, 25 bp, Homo sapien
ggcaaggcttctatacccaggaaaa

SEQ ID NO: 3796328 - DNA, 25 bp, Homo sapien
ccttatagccactgggtgacgctgc

SEQ ID NO: 3796329 - DNA, 25 bp, Homo sapien
tgtcaagaagcagccaatagcgtgg

SEQ ID NO: 3796330 - DNA, 25 bp, Homo sapien
gcaccagggacgaagcaaagctctt

SEQ ID NO: 3796331 - DNA, 25 bp, Homo sapien
tatagtctgctattaggcaccaggg

SEQ ID NO: 3796332 - DNA, 25 bp, Homo sapien
tttggacaacagagataggaaccct

SEQ ID NO: 3796333 - DNA, 25 bp, Homo sapien
gcatccctcggccagcttgtgggag

SEQ ID NO: 3796334 - DNA, 25 bp, Homo sapien
cctcggccagcttgtgggagctctg

SEQ ID NO: 3796335 - DNA, 25 bp, Homo sapien
tggtgccctgagtgcgttctcccca

SEQ ID NO: 3796336 - DNA, 25 bp, Homo sapien
attccaccacgtgacaagcacactg

SEQ ID NO: 3796337 - DNA, 25 bp, Homo sapien
ctggccagggtcagcagtttttaaa

SEQ ID NO: 3796338 - DNA, 25 bp, Homo sapien
cgcctggccagggtcagcagttttt

SEQ ID NO: 3796339 - DNA, 25 bp, Homo sapien
cacgcctggccagggtcagcagttt

SEQ ID NO: 3796340 - DNA, 25 bp, Homo sapien
cctggccagggtcagcagtttttaa

SEQ ID NO: 3796341 - DNA, 25 bp, Homo sapien
catggacaagagatctgcaccgaca

SEQ ID NO: 3796342 - DNA, 25 bp, Homo sapien
ctgttgagggcaatgtttcgctggc

SEQ ID NO: 3796343 - DNA, 25 bp, Homo sapien
agggcaatgtttcgctggcacatgg

SEQ ID NO: 3796344 - DNA, 25 bp, Homo sapien
gcacatggacaagagatctgcaccg

SEQ ID NO: 3796345 - DNA, 25 bp, Homo sapien
caagtgaagtggactggcttgcatc

SEQ ID NO: 3796346 - DNA, 25 bp, Homo sapien
gaggcctgggaattcaaggagctca

SEQ ID NO: 3796347 - DNA, 25 bp, Homo sapien
tgctctgaagctctgtgatgcccag

SEQ ID NO: 3796348 - DNA, 25 bp, Homo sapien
tcatgaggacatcttggacgggtca

SEQ ID NO: 3796349 - DNA, 25 bp, Homo sapien
cttcagccagtccagttctttgacc

SEQ ID NO: 3796350 - DNA, 25 bp, Homo sapien
tgtgcagaggtcgtccttcagccag

SEQ ID NO: 3796351 - DNA, 25 bp, Homo sapien
agaggtcgtccttcagccagtccag

SEQ ID NO: 3796352 - DNA, 25 bp, Homo sapien
cagttctttgaccctaactatacca

SEQ ID NO: 3796353 - DNA, 25 bp, Homo sapien
tgcagcaggcgctcagagaatgaca

SEQ ID NO: 3796354 - DNA, 25 bp, Homo sapien
gaagctgccatgcgccgatgggact

SEQ ID NO: 3796355 - DNA, 25 bp, Homo sapien
tcatcggccaatggagagaagctgc

SEQ ID NO: 3796356 - DNA, 25 bp, Homo sapien
gaaaatgaacgtgaggtgcccagca

SEQ ID NO: 3796357 - DNA, 25 bp, Homo sapien
tatcatgctaccacacagggaaacc

SEQ ID NO: 3796358 - DNA, 25 bp, Homo sapien
gattatcatgctaccacacagggaa

SEQ ID NO: 3796359 - DNA, 25 bp, Homo sapien
agggattatcatgctaccacacagg

SEQ ID NO: 3796360 - DNA, 25 bp, Homo sapien
aattcagggattatcatgctaccac

SEQ ID NO: 3796361 - DNA, 25 bp, Homo sapien
tcacaggactattgggagggccgaa

SEQ ID NO: 3796362 - DNA, 25 bp, Homo sapien
ggtctatgcccctaccctgctgtgt

SEQ ID NO: 3796363 - DNA, 25 bp, Homo sapien
ggtgaccagtactcaaggaacgact

SEQ ID NO: 3796364 - DNA, 25 bp, Homo sapien
agggcctacggtgcgcaaagtgcta

SEQ ID NO: 3796365 - DNA, 25 bp, Homo sapien
agcagcgggcggatttcagcctcac

SEQ ID NO: 3796366 - DNA, 25 bp, Homo sapien
tgagtgtctgctctagccagtgagc

SEQ ID NO: 3796367 - DNA, 25 bp, Homo sapien
gaagaggtgccttttctgctgagtg

SEQ ID NO: 3796368 - DNA, 25 bp, Homo sapien
tgtggcccagtgcaggacatgatct

SEQ ID NO: 3796369 - DNA, 25 bp, Homo sapien
cttcggctgcaaacaggatggtggt

SEQ ID NO: 3796370 - DNA, 25 bp, Homo sapien
gatggtggtgtgatcgtacaagtca

SEQ ID NO: 3796371 - DNA, 25 bp, Homo sapien
gatcgtacaagtcagaaatttcctc

SEQ ID NO: 3796372 - DNA, 25 bp, Homo sapien
ttcctcttgtgaccaactgaagggg

SEQ ID NO: 3796373 - DNA, 25 bp, Homo sapien
tcagtcaagtcgtcgtcgtaaaaca

SEQ ID NO: 3796374 - DNA, 25 bp, Homo sapien
gcgttttaaacacagcatcagtcaa

SEQ ID NO: 3796375 - DNA, 25 bp, Homo sapien
gcgagtcgggagagcgttttaaaca

SEQ ID NO: 3796376 - DNA, 25 bp, Homo sapien
tcttctccaccgacagtatggctgt

SEQ ID NO: 3796377 - DNA, 25 bp, Homo sapien
gccaagcgttgaggttccagtacag

SEQ ID NO: 3796378 - DNA, 25 bp, Homo sapien
tcatcagtcaagtgggacagcagcg

SEQ ID NO: 3796379 - DNA, 25 bp, Homo sapien
tgagagttccgctgacactcgggac

SEQ ID NO: 3796380 - DNA, 25 bp, Homo sapien
taacgtacacaaaggatgagcacag

SEQ ID NO: 3796381 - DNA, 25 bp, Homo sapien
catcatcaatgggaagggttttgct

SEQ ID NO: 3796382 - DNA, 25 bp, Homo sapien
gccagtcggacgcacaaactgccat

SEQ ID NO: 3796383 - DNA, 25 bp, Homo sapien
cactgatctcatatcccctggacgg

SEQ ID NO: 3796384 - DNA, 25 bp, Homo sapien
ttgctttcctatccctcactgatct

SEQ ID NO: 3796385 - DNA, 25 bp, Homo sapien
gacgtccaagtgtctcaatgtgaag

SEQ ID NO: 3796386 - DNA, 25 bp, Homo sapien
gagcggaagtgatcgtaggcttcac

SEQ ID NO: 3796387 - DNA, 25 bp, Homo sapien
ttgctggaggcgctcgtaaaccagg

SEQ ID NO: 3796388 - DNA, 25 bp, Homo sapien
gggctccaccacgaagcgcagcttg

SEQ ID NO: 3796389 - DNA, 25 bp, Homo sapien
tactcttaatgctgcccagaagtgg

SEQ ID NO: 3796390 - DNA, 25 bp, Homo sapien
gaaaagccagttcagtccgagaggg

SEQ ID NO: 3796391 - DNA, 25 bp, Homo sapien
tggagtcacccgcttcacagtaaag

SEQ ID NO: 3796392 - DNA, 25 bp, Homo sapien
taaaagacaaggttcgcctgtaggc

SEQ ID NO: 3796393 - DNA, 25 bp, Homo sapien
gctgttctattttactgtggcagag

SEQ ID NO: 3796394 - DNA, 25 bp, Homo sapien
tctgaagtgcacatacaagagcatc

SEQ ID NO: 3796395 - DNA, 25 bp, Homo sapien
taaggaaagtgattcaccaaggaga

SEQ ID NO: 3796396 - DNA, 25 bp, Homo sapien
tagttagacaacacgtcagccacgg

SEQ ID NO: 3796397 - DNA, 25 bp, Homo sapien
tggttctgcgatgatcttccagagc

SEQ ID NO: 3796398 - DNA, 25 bp, Homo sapien
tgttactggttctgcgatgatcttc

SEQ ID NO: 3796399 - DNA, 25 bp, Homo sapien
tactggttctgcgatgatcttccag

SEQ ID NO: 3796400 - DNA, 25 bp, Homo sapien
ggttctgcgatgatcttccagagct

SEQ ID NO: 3796401 - DNA, 25 bp, Homo sapien
tactgtgcacacaaatcacccaggg

SEQ ID NO: 3796402 - DNA, 25 bp, Homo sapien
aaaaaattgagtccactggcctggg

SEQ ID NO: 3796403 - DNA, 25 bp, Homo sapien
taatgtgggtatcacaaggctgcgg

SEQ ID NO: 3796404 - DNA, 25 bp, Homo sapien
taaaagcagtttgccctaatgcggc

SEQ ID NO: 3796405 - DNA, 25 bp, Homo sapien
taaccagggatgacatgttgcaact

SEQ ID NO: 3796406 - DNA, 25 bp, Homo sapien
ctagaattccttcgcttaggcgatg

SEQ ID NO: 3796407 - DNA, 25 bp, Homo sapien
tgcaacttcactcctcacagtgtgg

SEQ ID NO: 3796408 - DNA, 25 bp, Homo sapien
tgttaaactgcagcatcaggccaca

SEQ ID NO: 3796409 - DNA, 25 bp, Homo sapien
caagccagggtatttgaggtattca

SEQ ID NO: 3796410 - DNA, 25 bp, Homo sapien
cagagaggctaggtcatttgtccaa

SEQ ID NO: 3796411 - DNA, 25 bp, Homo sapien
tagtctgctaccaaacattagaagg

SEQ ID NO: 3796412 - DNA, 25 bp, Homo sapien
tcattgctgttacacagcagaggca

SEQ ID NO: 3796413 - DNA, 25 bp, Homo sapien
acagcatcatcatcccgttgggaag

SEQ ID NO: 3796414 - DNA, 25 bp, Homo sapien
cagtcactcacatagggccaaggta

SEQ ID NO: 3796415 - DNA, 25 bp, Homo sapien
aagtgggtttgaactggcagtcacc

SEQ ID NO: 3796416 - DNA, 25 bp, Homo sapien
tgagggtttcacagcaagcaagggc

SEQ ID NO: 3796417 - DNA, 25 bp, Homo sapien
ttcaagatccacttcaaccaggcat

SEQ ID NO: 3796418 - DNA, 25 bp, Homo sapien
tatttccgctgcctttaatcactga

SEQ ID NO: 3796419 - DNA, 25 bp, Homo sapien
acagagatcggtgctgtccccaaga

SEQ ID NO: 3796420 - DNA, 25 bp, Homo sapien
cactgaatgccagataggcctgaca

SEQ ID NO: 3796421 - DNA, 25 bp, Homo sapien
ttaatcctgttatcaccagagtggg

SEQ ID NO: 3796422 - DNA, 25 bp, Homo sapien
gcctagtggctgtgctggagcttaa

SEQ ID NO: 3796423 - DNA, 25 bp, Homo sapien
tataaaaggacgagtttgacccatg

SEQ ID NO: 3796424 - DNA, 25 bp, Homo sapien
tctttactgttctaccatgtggcgc

SEQ ID NO: 3796425 - DNA, 25 bp, Homo sapien
actgtagacccacacgttggcatgg

SEQ ID NO: 3796426 - DNA, 25 bp, Homo sapien
tgtatagcaggttagttagggtccc

SEQ ID NO: 3796427 - DNA, 25 bp, Homo sapien
gctgccaggactgatgattaccttg

SEQ ID NO: 3796428 - DNA, 25 bp, Homo sapien
tcctttctggcacgtctggccctgg

SEQ ID NO: 3796429 - DNA, 25 bp, Homo sapien
ttggggctagctgggtactggcggc

SEQ ID NO: 3796430 - DNA, 25 bp, Homo sapien
atctgaattcgggtttggggctagc

SEQ ID NO: 3796431 - DNA, 25 bp, Homo sapien
gggctagctgggtactggcggctct

SEQ ID NO: 3796432 - DNA, 25 bp, Homo sapien
tagctgggtactggcggctctcaga

SEQ ID NO: 3796433 - DNA, 25 bp, Homo sapien
cgatccgccgggttccgacttgcgg

SEQ ID NO: 3796434 - DNA, 25 bp, Homo sapien
agcgctgggtgtctgctcgacttcc

SEQ ID NO: 3796435 - DNA, 25 bp, Homo sapien
acttgcgggatgcgcgccccgagtt

SEQ ID NO: 3796436 - DNA, 25 bp, Homo sapien
ccgtctccgatctgcgggatccgat

SEQ ID NO: 3796437 - DNA, 25 bp, Homo sapien
ctctggttggaagaatagcgttctg

SEQ ID NO: 3796438 - DNA, 25 bp, Homo sapien
catggaaatagagttgggagcattc

SEQ ID NO: 3796439 - DNA, 25 bp, Homo sapien
tctggccgccggtgattctactaaa

SEQ ID NO: 3796440 - DNA, 25 bp, Homo sapien
taaatcataattctggtgggcaggg

SEQ ID NO: 3796441 - DNA, 25 bp, Homo sapien
gctgatatccaagataatagatgtt

SEQ ID NO: 3796442 - DNA, 25 bp, Homo sapien
acagagtgctggcaagttgctgata

SEQ ID NO: 3796443 - DNA, 25 bp, Homo sapien
tgctggcagtgaagattacgggacc

SEQ ID NO: 3796444 - DNA, 25 bp, Homo sapien
tagatgttagcacctaaatgggaga

SEQ ID NO: 3796445 - DNA, 25 bp, Homo sapien
gacatttcaagagataacgtcaggc

SEQ ID NO: 3796446 - DNA, 25 bp, Homo sapien
caaatggccagtaatgcctgaaaga

SEQ ID NO: 3796447 - DNA, 25 bp, Homo sapien
cccacgggtaaagcgaggccagtgt

SEQ ID NO: 3796448 - DNA, 25 bp, Homo sapien
aacgtcaggcaaaggtacaaatggc

SEQ ID NO: 3796449 - DNA, 25 bp, Homo sapien
cacctgactggtatagtacagtacg

SEQ ID NO: 3796450 - DNA, 25 bp, Homo sapien
tatagtacagtacggcccagaactc

SEQ ID NO: 3796451 - DNA, 25 bp, Homo sapien
gactggtatagtacagtacggccca

SEQ ID NO: 3796452 - DNA, 25 bp, Homo sapien
tggtatagtacagtacggcccagaa

SEQ ID NO: 3796453 - DNA, 25 bp, Homo sapien
cactgtgtggtccttgttttggggc

SEQ ID NO: 3796454 - DNA, 25 bp, Homo sapien
cttcggcactctcctcactgtgtgg

SEQ ID NO: 3796455 - DNA, 25 bp, Homo sapien
tcggcactctcctcactgtgtggtc

SEQ ID NO: 3796456 - DNA, 25 bp, Homo sapien
cttgttttggggcctgtttccgcat

SEQ ID NO: 3796457 - DNA, 25 bp, Homo sapien
aaactctgctgtgatcattaggtgc

SEQ ID NO: 3796458 - DNA, 25 bp, Homo sapien
tgcaggggtagttcatttcccaaac

SEQ ID NO: 3796459 - DNA, 25 bp, Homo sapien
tcatttgcaggggtagttcatttcc

SEQ ID NO: 3796460 - DNA, 25 bp, Homo sapien
gatcattaggtgcaaagacattatt

SEQ ID NO: 3796461 - DNA, 25 bp, Homo sapien
tgatgaaaaccttcttaattactcc

SEQ ID NO: 3796462 - DNA, 25 bp, Homo sapien
gatgaaaaccttcttaattactcca

SEQ ID NO: 3796463 - DNA, 25 bp, Homo sapien
tactccacttggtgcagaaagaacc

SEQ ID NO: 3796464 - DNA, 25 bp, Homo sapien
ttaattactccacttggtgcagaaa

SEQ ID NO: 3796465 - DNA, 25 bp, Homo sapien
caatgtgatgtattaactgcaggca

SEQ ID NO: 3796466 - DNA, 25 bp, Homo sapien
ggttcccagagagggtactcatagt

SEQ ID NO: 3796467 - DNA, 25 bp, Homo sapien
ggaaatgtggcaggttatctgctcc

SEQ ID NO: 3796468 - DNA, 25 bp, Homo sapien
ggtgcaagttctgtaatagcccctc

SEQ ID NO: 3796469 - DNA, 25 bp, Homo sapien
gctcaactgcctccttcttagccat

SEQ ID NO: 3796470 - DNA, 25 bp, Homo sapien
tgctcaactgcctccttcttagcca

SEQ ID NO: 3796471 - DNA, 25 bp, Homo sapien
ctgctcaactgcctccttcttagcc

SEQ ID NO: 3796472 - DNA, 25 bp, Homo sapien
gaagaaatgtcactccctcaaagga

SEQ ID NO: 3796473 - DNA, 25 bp, Homo sapien
cattaggtgtggagtcaatctgctc

SEQ ID NO: 3796474 - DNA, 25 bp, Homo sapien
gcaccgaggctctaccaagaaatgt

SEQ ID NO: 3796475 - DNA, 25 bp, Homo sapien
tagccccagagatggactgcacatg

SEQ ID NO: 3796476 - DNA, 25 bp, Homo sapien
tctgctttctccacactgaattttt

SEQ ID NO: 3796477 - DNA, 25 bp, Homo sapien
gctttctccacactgaatttttatc

SEQ ID NO: 3796478 - DNA, 25 bp, Homo sapien
tctccacactgaatttttatcatga

SEQ ID NO: 3796479 - DNA, 25 bp, Homo sapien
ttctccacactgaatttttatcatg

SEQ ID NO: 3796480 - DNA, 25 bp, Homo sapien
aaaggatgcactcagctggtacccg

SEQ ID NO: 3796481 - DNA, 25 bp, Homo sapien
tcagttaccatgacgacggcaaggg

SEQ ID NO: 3796482 - DNA, 25 bp, Homo sapien
cagctggctgggttcatcctaagag

SEQ ID NO: 3796483 - DNA, 25 bp, Homo sapien
taagcccagcttggtttaagccaga

SEQ ID NO: 3796484 - DNA, 25 bp, Homo sapien
gacatctactcttggcgtgagccgc

SEQ ID NO: 3796485 - DNA, 25 bp, Homo sapien
ccacaagatgtgaagagagcggctg

SEQ ID NO: 3796486 - DNA, 25 bp, Homo sapien
gccgccctggctgtcaactgagatt

SEQ ID NO: 3796487 - DNA, 25 bp, Homo sapien
gcaaactctatctgaaatgcccagt

SEQ ID NO: 3796488 - DNA, 25 bp, Homo sapien
ggttgcctcttggggcataggctgc

SEQ ID NO: 3796489 - DNA, 25 bp, Homo sapien
gttgcctcttggggcataggctgct

SEQ ID NO: 3796490 - DNA, 25 bp, Homo sapien
ttgcctcttggggcataggctgctt

SEQ ID NO: 3796491 - DNA, 25 bp, Homo sapien
tatcgcgtgtgatcgggtctgttcc

SEQ ID NO: 3796492 - DNA, 25 bp, Homo sapien
gacattggcgttttaggaatcccag

SEQ ID NO: 3796493 - DNA, 25 bp, Homo sapien
ggacatgcaaagcacagaggacccc

SEQ ID NO: 3796494 - DNA, 25 bp, Homo sapien
gcagctcacgggcaaatgtggagaa

SEQ ID NO: 3796495 - DNA, 25 bp, Homo sapien
gacccatgctgaagtagctacccgg

SEQ ID NO: 3796496 - DNA, 25 bp, Homo sapien
aacactttgttggtggctggagtca

SEQ ID NO: 3796497 - DNA, 25 bp, Homo sapien
tggatttctgatcctacaagggagg

SEQ ID NO: 3796498 - DNA, 25 bp, Homo sapien
gaggaaacgcacttcccgttcagag

SEQ ID NO: 3796499 - DNA, 25 bp, Homo sapien
cacatcgttgctagcaggcaggtag

SEQ ID NO: 3796500 - DNA, 25 bp, Homo sapien
tctgcccacctcaatcaggaatcca

SEQ ID NO: 3796501 - DNA, 25 bp, Homo sapien
aggcaggtagttacccagcctgtga

SEQ ID NO: 3796502 - DNA, 25 bp, Homo sapien
gaatccagggagaacgaacacatcg

SEQ ID NO: 3796503 - DNA, 25 bp, Homo sapien
gctaaagactattggcacatgcggt

SEQ ID NO: 3796504 - DNA, 25 bp, Homo sapien
gcggtggtcctgctaccagcctcaa

SEQ ID NO: 3796505 - DNA, 25 bp, Homo sapien
caggctggacttgaagttagtaaag

SEQ ID NO: 3796506 - DNA, 25 bp, Homo sapien
tcttctatggcctgatgagctgcta

SEQ ID NO: 3796507 - DNA, 25 bp, Homo sapien
aaagtgctggcagacgctgaggaca

SEQ ID NO: 3796508 - DNA, 25 bp, Homo sapien
atcggctagaaatggaccccccaga

SEQ ID NO: 3796509 - DNA, 25 bp, Homo sapien
gaccccccagatctctctagaaaag

SEQ ID NO: 3796510 - DNA, 25 bp, Homo sapien
tcctatcagccgttgggaccaagac

SEQ ID NO: 3796511 - DNA, 25 bp, Homo sapien
ctttctactccgctgcttcccaggt

SEQ ID NO: 3796512 - DNA, 25 bp, Homo sapien
tcccaggtcctgtgaacacgaactc

SEQ ID NO: 3796513 - DNA, 25 bp, Homo sapien
ggtcctgtgaacacgaactctttgc

SEQ ID NO: 3796514 - DNA, 25 bp, Homo sapien
tgtgaacacgaactctttgcatgca

SEQ ID NO: 3796515 - DNA, 25 bp, Homo sapien
gacttcatgatcctcaaatccctgg

SEQ ID NO: 3796516 - DNA, 25 bp, Homo sapien
ctggaactggaggtcaaacatccca

SEQ ID NO: 3796517 - DNA, 25 bp, Homo sapien
cataaagagtggacggtgggccctg

SEQ ID NO: 3796518 - DNA, 25 bp, Homo sapien
tgcatatgaccacaggacttcatga

SEQ ID NO: 3796519 - DNA, 25 bp, Homo sapien
gtcattgtatccctgagagttgcag

SEQ ID NO: 3796520 - DNA, 25 bp, Homo sapien
agagtctgccatttcacattgttgg

SEQ ID NO: 3796521 - DNA, 25 bp, Homo sapien
tagacaactaccacggcttccagtg

SEQ ID NO: 3796522 - DNA, 25 bp, Homo sapien
gtctgccatttcacattgttggagc

SEQ ID NO: 3796523 - DNA, 25 bp, Homo sapien
cagacttaggcccatgaagaccact

SEQ ID NO: 3796524 - DNA, 25 bp, Homo sapien
caaatgcttgggttttatactgaac

SEQ ID NO: 3796525 - DNA, 25 bp, Homo sapien
cactgggagaccgaggacttcttga

SEQ ID NO: 3796526 - DNA, 25 bp, Homo sapien
ctttatatattaggccaggcaaggt

SEQ ID NO: 3796527 - DNA, 25 bp, Homo sapien
gggacagggacaccctttgcgtgct

SEQ ID NO: 3796528 - DNA, 25 bp, Homo sapien
agggacagggacaccctttgcgtgc

SEQ ID NO: 3796529 - DNA, 25 bp, Homo sapien
gacagggacaccctttgcgtgctgc

SEQ ID NO: 3796530 - DNA, 25 bp, Homo sapien
cagggacaccctttgcgtgctgcca

SEQ ID NO: 3796531 - DNA, 25 bp, Homo sapien
aggcgctgggcgagcaacatggagg

SEQ ID NO: 3796532 - DNA, 25 bp, Homo sapien
caggcgctgggcgagcaacatggag

SEQ ID NO: 3796533 - DNA, 25 bp, Homo sapien
gctgggcgagcaacatggaggccat

SEQ ID NO: 3796534 - DNA, 25 bp, Homo sapien
gcgctgggcgagcaacatggaggcc

SEQ ID NO: 3796535 - DNA, 25 bp, Homo sapien
tagttagcattggagccggacagag

SEQ ID NO: 3796536 - DNA, 25 bp, Homo sapien
ttcaacatgcagaccaaggacacgg

SEQ ID NO: 3796537 - DNA, 25 bp, Homo sapien
tgttccttagcagcgatcccagatg

SEQ ID NO: 3796538 - DNA, 25 bp, Homo sapien
cacggctagcagtttgtcttcagaa

SEQ ID NO: 3796539 - DNA, 25 bp, Homo sapien
gaatgcagtggtgcgatctcagctc

SEQ ID NO: 3796540 - DNA, 25 bp, Homo sapien
cggaatgcagtggtgcgatctcagc

SEQ ID NO: 3796541 - DNA, 25 bp, Homo sapien
atgcagtggtgcgatctcagctcat

SEQ ID NO: 3796542 - DNA, 25 bp, Homo sapien
cgcccaagccggaatgcagtggtgc

SEQ ID NO: 3796543 - DNA, 25 bp, Homo sapien
taatcaaattcaacgtcgactttgg

SEQ ID NO: 3796544 - DNA, 25 bp, Homo sapien
aattcaacgtcgactttggctgcag

SEQ ID NO: 3796545 - DNA, 25 bp, Homo sapien
taggccctgggacttccgtcttcat

SEQ ID NO: 3796546 - DNA, 25 bp, Homo sapien
gtcttcatcagaggcccatcataat

SEQ ID NO: 3796547 - DNA, 25 bp, Homo sapien
gaattatattcagctgtttcattaa

SEQ ID NO: 3796548 - DNA, 25 bp, Homo sapien
aattatattcagctgtttcattaac

SEQ ID NO: 3796549 - DNA, 25 bp, Homo sapien
ctgaattatattcagctgtttcatt

SEQ ID NO: 3796550 - DNA, 25 bp, Homo sapien
ttatattcagctgtttcattaactc

SEQ ID NO: 3796551 - DNA, 25 bp, Homo sapien
catcatgtaagtaactaatgggtca

SEQ ID NO: 3796552 - DNA, 25 bp, Homo sapien
aaagcaaccagacctaagaaacatc

SEQ ID NO: 3796553 - DNA, 25 bp, Homo sapien
ggctagaccatacgctaggccataa

SEQ ID NO: 3796554 - DNA, 25 bp, Homo sapien
catctatagaacactctgcccaaca

SEQ ID NO: 3796555 - DNA, 25 bp, Homo sapien
taaagatccagcattcggttgccgt

SEQ ID NO: 3796556 - DNA, 25 bp, Homo sapien
taattgcctcggctctcttcgtaat

SEQ ID NO: 3796557 - DNA, 25 bp, Homo sapien
cttcgtaattgcagaaaaaatgcac

SEQ ID NO: 3796558 - DNA, 25 bp, Homo sapien
ggttgccgtccacatcaaccaggta

SEQ ID NO: 3796559 - DNA, 25 bp, Homo sapien
ccttgggtgaagtgtcaggcaacac

SEQ ID NO: 3796560 - DNA, 25 bp, Homo sapien
gccacatcctaatacctggatagcc

SEQ ID NO: 3796561 - DNA, 25 bp, Homo sapien
aggcaacactctgggatgtgcctgc

SEQ ID NO: 3796562 - DNA, 25 bp, Homo sapien
catcctaatacctggatagccacga

SEQ ID NO: 3796563 - DNA, 25 bp, Homo sapien
cactccagcctgggtgacagtgaga

SEQ ID NO: 3796564 - DNA, 25 bp, Homo sapien
gaggttgcattgagttgagatcacg

SEQ ID NO: 3796565 - DNA, 25 bp, Homo sapien
gaagaatctcttgaacacaagaggc

SEQ ID NO: 3796566 - DNA, 25 bp, Homo sapien
gcattgagttgagatcacgccactg

SEQ ID NO: 3796567 - DNA, 25 bp, Homo sapien
ctgttggatgagtttcagcagggcg

SEQ ID NO: 3796568 - DNA, 25 bp, Homo sapien
gttggatgagtttcagcagggcggg

SEQ ID NO: 3796569 - DNA, 25 bp, Homo sapien
ggctgttggatgagtttcagcaggg

SEQ ID NO: 3796570 - DNA, 25 bp, Homo sapien
gaggctgttggatgagtttcagcag

SEQ ID NO: 3796571 - DNA, 25 bp, Homo sapien
gtacatggccagcagttctactcca

SEQ ID NO: 3796572 - DNA, 25 bp, Homo sapien
cagtgataccccgtgttggcgagga

SEQ ID NO: 3796573 - DNA, 25 bp, Homo sapien
ctgaccaggattgggtctttgttcc

SEQ ID NO: 3796574 - DNA, 25 bp, Homo sapien
ggtgcgatcgatttggagaactgtc

SEQ ID NO: 3796575 - DNA, 25 bp, Homo sapien
ggatggcaggtgtcttacttggtca

SEQ ID NO: 3796576 - DNA, 25 bp, Homo sapien
tgccaaactggagactcttcactag

SEQ ID NO: 3796577 - DNA, 25 bp, Homo sapien
gatgcaggagttcagtctcaaagga

SEQ ID NO: 3796578 - DNA, 25 bp, Homo sapien
caggcttagggtacagcatgaagat

SEQ ID NO: 3796579 - DNA, 25 bp, Homo sapien
gactgccggagcttctccacaaagt

SEQ ID NO: 3796580 - DNA, 25 bp, Homo sapien
gagagcaaggactgccggagcttct

SEQ ID NO: 3796581 - DNA, 25 bp, Homo sapien
gggcgggtctgttgacaaacatgct

SEQ ID NO: 3796582 - DNA, 25 bp, Homo sapien
tccacaaagttctccggaggcagga

SEQ ID NO: 3796583 - DNA, 25 bp, Homo sapien
aatgggattgcttctccagaactca

SEQ ID NO: 3796584 - DNA, 25 bp, Homo sapien
atgggattgcttctccagaactcac

SEQ ID NO: 3796585 - DNA, 25 bp, Homo sapien
aggagccgcaggccatggtgatgag

SEQ ID NO: 3796586 - DNA, 25 bp, Homo sapien
gtctttaaggcgttttcattggagc

SEQ ID NO: 3796587 - DNA, 25 bp, Homo sapien
gatgagctgggacatccctttggga

SEQ ID NO: 3796588 - DNA, 25 bp, Homo sapien
ccacatgaagatggtctttaaggcg

SEQ ID NO: 3796589 - DNA, 25 bp, Homo sapien
ctggttaatcatgcacgtctccagc

SEQ ID NO: 3796590 - DNA, 25 bp, Homo sapien
tggttaatcatgcacgtctccagct

SEQ ID NO: 3796591 - DNA, 25 bp, Homo sapien
ggttaatcatgcacgtctccagctc

SEQ ID NO: 3796592 - DNA, 25 bp, Homo sapien
catggaacgcgcccatgaaggagag

SEQ ID NO: 3796593 - DNA, 25 bp, Homo sapien
tcctcccatggaacgcgcccatgaa

SEQ ID NO: 3796594 - DNA, 25 bp, Homo sapien
ccatggtcctcccatggaacgcgcc

SEQ ID NO: 3796595 - DNA, 25 bp, Homo sapien
gaggatgctgtagtcggggcagcca

SEQ ID NO: 3796596 - DNA, 25 bp, Homo sapien
ttgggagcgcaatggtccctcctta

SEQ ID NO: 3796597 - DNA, 25 bp, Homo sapien
tgggagcgcaatggtccctccttac

SEQ ID NO: 3796598 - DNA, 25 bp, Homo sapien
cttgggagcgcaatggtccctcctt

SEQ ID NO: 3796599 - DNA, 25 bp, Homo sapien
cagaaaagcagacgcttggcttggg

SEQ ID NO: 3796600 - DNA, 25 bp, Homo sapien
aacagaaaagcagacgcttggcttg

SEQ ID NO: 3796601 - DNA, 25 bp, Homo sapien
acagaaaagcagacgcttggcttgg

SEQ ID NO: 3796602 - DNA, 25 bp, Homo sapien
agcagacgcttggcttggggaagca

SEQ ID NO: 3796603 - DNA, 25 bp, Homo sapien
tcttccagagggtatttcagccgtg

SEQ ID NO: 3796604 - DNA, 25 bp, Homo sapien
tgcgatgggccagtcaaaggaaggg

SEQ ID NO: 3796605 - DNA, 25 bp, Homo sapien
gggatgtcgatcttgtgaatggctt

SEQ ID NO: 3796606 - DNA, 25 bp, Homo sapien
ttagagtgcgtggtcgctaagcaac

SEQ ID NO: 3796607 - DNA, 25 bp, Homo sapien
tccgatatttcacaatcagatcctc

SEQ ID NO: 3796608 - DNA, 25 bp, Homo sapien
tgtctctcagcttccgaaagaagtc

SEQ ID NO: 3796609 - DNA, 25 bp, Homo sapien
tgtctccaccctcggactggatggg

SEQ ID NO: 3796610 - DNA, 25 bp, Homo sapien
catcggatgcgtggttgtctccacc

SEQ ID NO: 3796611 - DNA, 25 bp, Homo sapien
ggtctggacctcgtccaccaagaag

SEQ ID NO: 3796612 - DNA, 25 bp, Homo sapien
ttgctgaaggtcatcacgtctgctg

SEQ ID NO: 3796613 - DNA, 25 bp, Homo sapien
tgctcatgggcccagaacttgcccg

SEQ ID NO: 3796614 - DNA, 25 bp, Homo sapien
attaggcctgaactcctccttgtgg

SEQ ID NO: 3796615 - DNA, 25 bp, Homo sapien
gcagggccttcccggcatgggctgc

SEQ ID NO: 3796616 - DNA, 25 bp, Homo sapien
ggccttcccggcatgggctgcatta

SEQ ID NO: 3796617 - DNA, 25 bp, Homo sapien
agggccttcccggcatgggctgcat

SEQ ID NO: 3796618 - DNA, 25 bp, Homo sapien
gagcagggccttcccggcatgggct

SEQ ID NO: 3796619 - DNA, 25 bp, Homo sapien
aaactggtttcacaatgtaggccag

SEQ ID NO: 3796620 - DNA, 25 bp, Homo sapien
gaaactggtttcacaatgtaggcca

SEQ ID NO: 3796621 - DNA, 25 bp, Homo sapien
agtagaaactggtttcacaatgtag

SEQ ID NO: 3796622 - DNA, 25 bp, Homo sapien
tagaaactggtttcacaatgtaggc

SEQ ID NO: 3796623 - DNA, 25 bp, Homo sapien
taaaatgagcttattccgtatggaa

SEQ ID NO: 3796624 - DNA, 25 bp, Homo sapien
cgtatggaatcatcgggagtatcga

SEQ ID NO: 3796625 - DNA, 25 bp, Homo sapien
tatcgaaggagcaaaaggtgcctcg

SEQ ID NO: 3796626 - DNA, 25 bp, Homo sapien
agcaaaaggtgcctcgtcctctcac

SEQ ID NO: 3796627 - DNA, 25 bp, Homo sapien
tcagcagccactcctgaccccttac

SEQ ID NO: 3796628 - DNA, 25 bp, Homo sapien
tacagcaggagatactggatgctca

SEQ ID NO: 3796629 - DNA, 25 bp, Homo sapien
gctacagcaggagatactggatgct

SEQ ID NO: 3796630 - DNA, 25 bp, Homo sapien
gcaggagatactggatgctcatgaa

SEQ ID NO: 3796631 - DNA, 25 bp, Homo sapien
cagcgaacgcttgttgagtaaataa

SEQ ID NO: 3796632 - DNA, 25 bp, Homo sapien
tgctacactgcatgcttcctgaagg

SEQ ID NO: 3796633 - DNA, 25 bp, Homo sapien
ggtaaaatgctacttcctcaaggga

SEQ ID NO: 3796634 - DNA, 25 bp, Homo sapien
caatccctgtttgtcaagacttagg

SEQ ID NO: 3796635 - DNA, 25 bp, Homo sapien
ctgaagaccagcgtgggacggaaac

SEQ ID NO: 3796636 - DNA, 25 bp, Homo sapien
tgagcgtggtgatccctgaagacca

SEQ ID NO: 3796637 - DNA, 25 bp, Homo sapien
gacggaaacgaatggatttgtcacc

SEQ ID NO: 3796638 - DNA, 25 bp, Homo sapien
ttgaagtctgctaagatgtcactga

SEQ ID NO: 3796639 - DNA, 25 bp, Homo sapien
tgcagggaggaaaatcaacaccagc

SEQ ID NO: 3796640 - DNA, 25 bp, Homo sapien
taagaatcacgggtaaggccacctg

SEQ ID NO: 3796641 - DNA, 25 bp, Homo sapien
gcacttgagatggactggcacccag

SEQ ID NO: 3796642 - DNA, 25 bp, Homo sapien
aacatgatgcgatggctctgctgcc

SEQ ID NO: 3796643 - DNA, 25 bp, Homo sapien
tccagcagagatgctacagcctcag

SEQ ID NO: 3796644 - DNA, 25 bp, Homo sapien
cagaagaaatccagtccagcaatga

SEQ ID NO: 3796645 - DNA, 25 bp, Homo sapien
tgctctggtggaacagccaagctgt

SEQ ID NO: 3796646 - DNA, 25 bp, Homo sapien
tcaggaggatcaagtacaaggaaac

SEQ ID NO: 3796647 - DNA, 25 bp, Homo sapien
gcattcgaggtcaaatcagttccca

SEQ ID NO: 3796648 - DNA, 25 bp, Homo sapien
cagaactcctgattaagaacgacgg

SEQ ID NO: 3796649 - DNA, 25 bp, Homo sapien
aaatagtcaaccaaggcaccgggag

SEQ ID NO: 3796650 - DNA, 25 bp, Homo sapien
gaacgacggattagcactgactgca

SEQ ID NO: 3796651 - DNA, 25 bp, Homo sapien
ggtgaactctggctcattctgcaaa

SEQ ID NO: 3796652 - DNA, 25 bp, Homo sapien
tgtgatgccatgaactgatacgcct

SEQ ID NO: 3796653 - DNA, 25 bp, Homo sapien
ttccccagtgaaagatgtgatgcca

SEQ ID NO: 3796654 - DNA, 25 bp, Homo sapien
ttattgaaccttgggatgctgcctg

SEQ ID NO: 3796655 - DNA, 25 bp, Homo sapien
tgatgacacttgctggacggttact

SEQ ID NO: 3796656 - DNA, 25 bp, Homo sapien
gagagaacgaaatattggagcccct

SEQ ID NO: 3796657 - DNA, 25 bp, Homo sapien
tatgccctgagtcaacaagaacttg

SEQ ID NO: 3796658 - DNA, 25 bp, Homo sapien
tgtcggccacggaagcacttcttca

SEQ ID NO: 3796659 - DNA, 25 bp, Homo sapien
gccacccaatcattgcataaccatg

SEQ ID NO: 3796660 - DNA, 25 bp, Homo sapien
tatggcatccgccacccaatcattg

SEQ ID NO: 3796661 - DNA, 25 bp, Homo sapien
ttgtcatagggccagatgtctatgg

SEQ ID NO: 3796662 - DNA, 25 bp, Homo sapien
tgtttaatgcgctccccaaagcaga

SEQ ID NO: 3796663 - DNA, 25 bp, Homo sapien
catatccagcggcagaagggtctgt

SEQ ID NO: 3796664 - DNA, 25 bp, Homo sapien
gagaaaggcttcgagcagtcagcag

SEQ ID NO: 3796665 - DNA, 25 bp, Homo sapien
ggtaggcacgaaaccccagttgaga

SEQ ID NO: 3796666 - DNA, 25 bp, Homo sapien
tgagatttgttcaccacccagaggt

SEQ ID NO: 3796667 - DNA, 25 bp, Homo sapien
tcagtcagataatggccagaagttt

SEQ ID NO: 3796668 - DNA, 25 bp, Homo sapien
gaataaattcacaaggcaagagctg

SEQ ID NO: 3796669 - DNA, 25 bp, Homo sapien
tcctggagcaggttattgagtctct

SEQ ID NO: 3796670 - DNA, 25 bp, Homo sapien
caaggtcacccatagagtccattgg

SEQ ID NO: 3796671 - DNA, 25 bp, Homo sapien
cagcagttcacccatctcgaaggag

SEQ ID NO: 3796672 - DNA, 25 bp, Homo sapien
ttggcacagactgccctgacagtgg

SEQ ID NO: 3796673 - DNA, 25 bp, Homo sapien
gaaactaccaaacgcagagactgag

SEQ ID NO: 3796674 - DNA, 25 bp, Homo sapien
tcctgtcacgactgaagttggcaca

SEQ ID NO: 3796675 - DNA, 25 bp, Homo sapien
taccttgcaggattggcagaagcct

SEQ ID NO: 3796676 - DNA, 25 bp, Homo sapien
gctttgcagatgttcaccgtgtgat

SEQ ID NO: 3796677 - DNA, 25 bp, Homo sapien
cattgtccagcccagagtttgtcct

SEQ ID NO: 3796678 - DNA, 25 bp, Homo sapien
ttttgaattaatgacggccgcacct

SEQ ID NO: 3796679 - DNA, 25 bp, Homo sapien
tacattcgagcatgcgctcttaggg

SEQ ID NO: 3796680 - DNA, 25 bp, Homo sapien
agtagcggcagccacgattcctgga

SEQ ID NO: 3796681 - DNA, 25 bp, Homo sapien
tagccgcaccttacaagacacgttg

SEQ ID NO: 3796682 - DNA, 25 bp, Homo sapien
agacacgttggcacgaggaactcgg

SEQ ID NO: 3796683 - DNA, 25 bp, Homo sapien
gggcggtgagggtcccatccacgtc

SEQ ID NO: 3796684 - DNA, 25 bp, Homo sapien
ggtgagggtcccatccacgtcgaag

SEQ ID NO: 3796685 - DNA, 25 bp, Homo sapien
gcggtgagggtcccatccacgtcga

SEQ ID NO: 3796686 - DNA, 25 bp, Homo sapien
tgccgcggggcggtgagggtcccat

SEQ ID NO: 3796687 - DNA, 25 bp, Homo sapien
ctaccctgggtggtcgatagcccca

SEQ ID NO: 3796688 - DNA, 25 bp, Homo sapien
aacagcacgggctccgcgtcggctg

SEQ ID NO: 3796689 - DNA, 25 bp, Homo sapien
ccagaatagggttcagcgccgtgag

SEQ ID NO: 3796690 - DNA, 25 bp, Homo sapien
gatagccccaactgggaacagcacg

SEQ ID NO: 3796691 - DNA, 25 bp, Homo sapien
taccactccgattttgatcttctgc

SEQ ID NO: 3796692 - DNA, 25 bp, Homo sapien
gatcttctgcctcaatttttgtagg

SEQ ID NO: 3796693 - DNA, 25 bp, Homo sapien
ctaccactccgattttgatcttctg

SEQ ID NO: 3796694 - DNA, 25 bp, Homo sapien
tttttgtaggaagtcatccatttct

SEQ ID NO: 3796695 - DNA, 25 bp, Homo sapien
ttgtatgctaccaagccattttctg

SEQ ID NO: 3796696 - DNA, 25 bp, Homo sapien
tttctggaaacacataatcgtattt

SEQ ID NO: 3796697 - DNA, 25 bp, Homo sapien
aacacataatcgtatttttcaacca

SEQ ID NO: 3796698 - DNA, 25 bp, Homo sapien
ctgtctacacaagagtttcccatct

SEQ ID NO: 3796699 - DNA, 25 bp, Homo sapien
aatgtagctcagacagtagttgatt

SEQ ID NO: 3796700 - DNA, 25 bp, Homo sapien
gcaatgtagctcagacagtagttga

SEQ ID NO: 3796701 - DNA, 25 bp, Homo sapien
atgtagctcagacagtagttgatta

SEQ ID NO: 3796702 - DNA, 25 bp, Homo sapien
caatgtagctcagacagtagttgat

SEQ ID NO: 3796703 - DNA, 25 bp, Homo sapien
taagcaatcagttccgccctaaaga

SEQ ID NO: 3796704 - DNA, 25 bp, Homo sapien
gaggcgctcaggttatgaatcctaa

SEQ ID NO: 3796705 - DNA, 25 bp, Homo sapien
caaatgtggatcaaggtgggtctca

SEQ ID NO: 3796706 - DNA, 25 bp, Homo sapien
gaatcctaatagtgtgaagcagcct

SEQ ID NO: 3796707 - DNA, 25 bp, Homo sapien
aagcagaggctagtgtggtcaatgt

SEQ ID NO: 3796708 - DNA, 25 bp, Homo sapien
ttgggcaacatagataaacagccta

SEQ ID NO: 3796709 - DNA, 25 bp, Homo sapien
aaggaatgtaattgcatcaatcatg

SEQ ID NO: 3796710 - DNA, 25 bp, Homo sapien
agccatgaactactgtgactattaa

SEQ ID NO: 3796711 - DNA, 25 bp, Homo sapien
tgaaagggtgacagagtttctccaa

SEQ ID NO: 3796712 - DNA, 25 bp, Homo sapien
atgaaagggtgacagagtttctcca

SEQ ID NO: 3796713 - DNA, 25 bp, Homo sapien
ggaatgaaagggtgacagagtttct

SEQ ID NO: 3796714 - DNA, 25 bp, Homo sapien
aatgaaagggtgacagagtttctcc

SEQ ID NO: 3796715 - DNA, 25 bp, Homo sapien
tccaataggggacacgtttaacatc

SEQ ID NO: 3796716 - DNA, 25 bp, Homo sapien
tctttccgtagatctgctacaaact

SEQ ID NO: 3796717 - DNA, 25 bp, Homo sapien
cgtagatctgctacaaacttttgtc

SEQ ID NO: 3796718 - DNA, 25 bp, Homo sapien
tccagcaaactctttccgtagatct

SEQ ID NO: 3796719 - DNA, 25 bp, Homo sapien
aaactctttccgtagatctgctaca

SEQ ID NO: 3796720 - DNA, 25 bp, Homo sapien
cacatgtcgcagacagtatctcttg

SEQ ID NO: 3796721 - DNA, 25 bp, Homo sapien
gacagtatctcttgtcccatccatc

SEQ ID NO: 3796722 - DNA, 25 bp, Homo sapien
ggtcttataaccgtcattttccaca

SEQ ID NO: 3796723 - DNA, 25 bp, Homo sapien
atggtcttataaccgtcattttcca

SEQ ID NO: 3796724 - DNA, 25 bp, Homo sapien
cccaaagctgggtggtgatgagcct

SEQ ID NO: 3796725 - DNA, 25 bp, Homo sapien
tgagcggccgagttgattggatcac

SEQ ID NO: 3796726 - DNA, 25 bp, Homo sapien
tgatggcagcaacgcctctctgacc

SEQ ID NO: 3796727 - DNA, 25 bp, Homo sapien
tagatttggccctgaactcgagatt

SEQ ID NO: 3796728 - DNA, 25 bp, Homo sapien
gctaggtgcaggatggcgagaaagc

SEQ ID NO: 3796729 - DNA, 25 bp, Homo sapien
ctgctaggtgcaggatggcgagaaa

SEQ ID NO: 3796730 - DNA, 25 bp, Homo sapien
atggcgagaaagcctgacacgggcc

SEQ ID NO: 3796731 - DNA, 25 bp, Homo sapien
gcgagaaagcctgacacgggcctgc

SEQ ID NO: 3796732 - DNA, 25 bp, Homo sapien
tctttaatccatgggtagatggcca

SEQ ID NO: 3796733 - DNA, 25 bp, Homo sapien
agtttcaggtcctgtgtttaagtct

SEQ ID NO: 3796734 - DNA, 25 bp, Homo sapien
aggacgaagtcaggatctcagagag

SEQ ID NO: 3796735 - DNA, 25 bp, Homo sapien
gaggtatctgtacccccgtgttcac

SEQ ID NO: 3796736 - DNA, 25 bp, Homo sapien
tctgcaaagtcccaactgaggcttc

SEQ ID NO: 3796737 - DNA, 25 bp, Homo sapien
aaggactgaggaagcttccgggcat

SEQ ID NO: 3796738 - DNA, 25 bp, Homo sapien
cgggcatcccttagatcctaggtgt

SEQ ID NO: 3796739 - DNA, 25 bp, Homo sapien
tctgattatccaagaactgcattcc

SEQ ID NO: 3796740 - DNA, 25 bp, Homo sapien
taagacctaggtggcaattctctct

SEQ ID NO: 3796741 - DNA, 25 bp, Homo sapien
gattacagggattactcagatcctt

SEQ ID NO: 3796742 - DNA, 25 bp, Homo sapien
cccacagtaacctctgtaaatttca

SEQ ID NO: 3796743 - DNA, 25 bp, Homo sapien
tcctgcactttgctttgatcaccta

SEQ ID NO: 3796744 - DNA, 25 bp, Homo sapien
caactctgtgtgtgagcaagctggc

SEQ ID NO: 3796745 - DNA, 25 bp, Homo sapien
taaaagcatactgatgcagggccag

SEQ ID NO: 3796746 - DNA, 25 bp, Homo sapien
gaggtagccatgactcctagctagg

SEQ ID NO: 3796747 - DNA, 25 bp, Homo sapien
taatagggttttatgccagatgcgg

SEQ ID NO: 3796748 - DNA, 25 bp, Homo sapien
tcacatgacgttagtaatctttggt

SEQ ID NO: 3796749 - DNA, 25 bp, Homo sapien
gagggacacataggacaagtcagac

SEQ ID NO: 3796750 - DNA, 25 bp, Homo sapien
gactgattattcacgaaagagggac

SEQ ID NO: 3796751 - DNA, 25 bp, Homo sapien
caagtcagacagtccaagcatggca

SEQ ID NO: 3796752 - DNA, 25 bp, Homo sapien
gaaggctccacagaccctgttttgg

SEQ ID NO: 3796753 - DNA, 25 bp, Homo sapien
tctgaatgcccacatgagaggacct

SEQ ID NO: 3796754 - DNA, 25 bp, Homo sapien
gaaaaaagttgaggctataaagatg

SEQ ID NO: 3796755 - DNA, 25 bp, Homo sapien
cacttttgagggcatcaggaattac

SEQ ID NO: 3796756 - DNA, 25 bp, Homo sapien
ctgaggatgaaacagaaggcatagt

SEQ ID NO: 3796757 - DNA, 25 bp, Homo sapien
gatgaaacagaaggcatagtgttgg

SEQ ID NO: 3796758 - DNA, 25 bp, Homo sapien
gaggatgaaacagaaggcatagtgt

SEQ ID NO: 3796759 - DNA, 25 bp, Homo sapien
aaacagaaggcatagtgttggccat

SEQ ID NO: 3796760 - DNA, 25 bp, Homo sapien
ccagggctcagtgaaatccgcgcat

SEQ ID NO: 3796761 - DNA, 25 bp, Homo sapien
tgacaggcaccaaagagaggccagg

SEQ ID NO: 3796762 - DNA, 25 bp, Homo sapien
gctcagtgaaatccgcgcattaata

SEQ ID NO: 3796763 - DNA, 25 bp, Homo sapien
tgaaatccgcgcattaatatttaaa

SEQ ID NO: 3796764 - DNA, 25 bp, Homo sapien
gcatctgcatcacaaacacaacctg

SEQ ID NO: 3796765 - DNA, 25 bp, Homo sapien
ggctgtgtcgagcttgcataccaga

SEQ ID NO: 3796766 - DNA, 25 bp, Homo sapien
gcttctttctttgtgactctcagag

SEQ ID NO: 3796767 - DNA, 25 bp, Homo sapien
cgctttcagagagccgcacggctcg

SEQ ID NO: 3796768 - DNA, 25 bp, Homo sapien
tcttgggcgccttgttgagcaaagg

SEQ ID NO: 3796769 - DNA, 25 bp, Homo sapien
ttagcagctggggatacggcgcaaa

SEQ ID NO: 3796770 - DNA, 25 bp, Homo sapien
gagggtgagggaaccctggcatctg

SEQ ID NO: 3796771 - DNA, 25 bp, Homo sapien
ctggggagaccagtcatcaacagac

SEQ ID NO: 3796772 - DNA, 25 bp, Homo sapien
cagcccatgtaagctcctgtataga

SEQ ID NO: 3796773 - DNA, 25 bp, Homo sapien
tgctacaaggtacagcccatgtaag

SEQ ID NO: 3796774 - DNA, 25 bp, Homo sapien
tcttcaggaaaggtagaatggacta

SEQ ID NO: 3796775 - DNA, 25 bp, Homo sapien
tgtaagctcctgtatagacgctcct

SEQ ID NO: 3796776 - DNA, 25 bp, Homo sapien
gcttccctgagtattcctgaactac

SEQ ID NO: 3796777 - DNA, 25 bp, Homo sapien
gtgcgggaccccatgaaaatcagac

SEQ ID NO: 3796778 - DNA, 25 bp, Homo sapien
ttaggccgagacactttaaattatc

SEQ ID NO: 3796779 - DNA, 25 bp, Homo sapien
gaactacagctacatctcattgccg

SEQ ID NO: 3796780 - DNA, 25 bp, Homo sapien
ccccaagcgtcgctgagtctttcta

SEQ ID NO: 3796781 - DNA, 25 bp, Homo sapien
ccaagcgtcgctgagtctttctaat

SEQ ID NO: 3796782 - DNA, 25 bp, Homo sapien
ttctacagacccatctgacctctcc

SEQ ID NO: 3796783 - DNA, 25 bp, Homo sapien
tccttttctacagacccatctgacc

SEQ ID NO: 3796784 - DNA, 25 bp, Homo sapien
agacacattttatctgtggactcaa

SEQ ID NO: 3796785 - DNA, 25 bp, Homo sapien
gagacacattttatctgtggactca

SEQ ID NO: 3796786 - DNA, 25 bp, Homo sapien
ttcaccgcctatcccaaaacccata

SEQ ID NO: 3796787 - DNA, 25 bp, Homo sapien
taatccaccaccctttgccgactct

SEQ ID NO: 3796788 - DNA, 25 bp, Homo sapien
tttgaaattctccccactcttgagg

SEQ ID NO: 3796789 - DNA, 25 bp, Homo sapien
tgaaattctccccactcttgaggat

SEQ ID NO: 3796790 - DNA, 25 bp, Homo sapien
agggctgccagggatattcctgtga

SEQ ID NO: 3796791 - DNA, 25 bp, Homo sapien
aacaagtcacaagggagcgtcagga

SEQ ID NO: 3796792 - DNA, 25 bp, Homo sapien
ttgaaacgtggccaatgcaatggag

SEQ ID NO: 3796793 - DNA, 25 bp, Homo sapien
gtacctacgcttttctaacaagtca

SEQ ID NO: 3796794 - DNA, 25 bp, Homo sapien
taggagaacagcagttcacagatcc

SEQ ID NO: 3796795 - DNA, 25 bp, Homo sapien
gcgctgtcacggagtagcccatggt

SEQ ID NO: 3796796 - DNA, 25 bp, Homo sapien
cctgcgcgtgtcctcaggcgctgtc

SEQ ID NO: 3796797 - DNA, 25 bp, Homo sapien
ttaggagaacagcagttcacagatc

SEQ ID NO: 3796798 - DNA, 25 bp, Homo sapien
cctgagaaactagaggcgaacgcct

SEQ ID NO: 3796799 - DNA, 25 bp, Homo sapien
gtaaacttcgtcctgggctgggtca

SEQ ID NO: 3796800 - DNA, 25 bp, Homo sapien
tgttctagctgagacccgggatcct

SEQ ID NO: 3796801 - DNA, 25 bp, Homo sapien
acatgcaggcgggagcttcgttcca

SEQ ID NO: 3796802 - DNA, 25 bp, Homo sapien
acaaggaaagatgccgctggatggc

SEQ ID NO: 3796803 - DNA, 25 bp, Homo sapien
ctttggaaggtcattacagtatcat

SEQ ID NO: 3796804 - DNA, 25 bp, Homo sapien
tatcattcgacaaggaaagatgccg

SEQ ID NO: 3796805 - DNA, 25 bp, Homo sapien
ttacagtatcattcgacaaggaaag

SEQ ID NO: 3796806 - DNA, 25 bp, Homo sapien
tttgagtaagactcggttgtctcgc

SEQ ID NO: 3796807 - DNA, 25 bp, Homo sapien
tgacgcaatacgttaaggaaacttg

SEQ ID NO: 3796808 - DNA, 25 bp, Homo sapien
ggagtctgtgcatcaggaacagcaa

SEQ ID NO: 3796809 - DNA, 25 bp, Homo sapien
gaaacttgtaaagaatggcagatcc

SEQ ID NO: 3796810 - DNA, 25 bp, Homo sapien
caggacatgttgtgcatgcgtcgtt

SEQ ID NO: 3796811 - DNA, 25 bp, Homo sapien
gttatcactttacatcccaccacag

SEQ ID NO: 3796812 - DNA, 25 bp, Homo sapien
cccttggagtaagccccaggaagct

SEQ ID NO: 3796813 - DNA, 25 bp, Homo sapien
gcatgcgtcgtttagctgttatcac

SEQ ID NO: 3796814 - DNA, 25 bp, Homo sapien
cacgtatgcctggatgtgtccggac

SEQ ID NO: 3796815 - DNA, 25 bp, Homo sapien
cctgtcgttcaggttggaggagcct

SEQ ID NO: 3796816 - DNA, 25 bp, Homo sapien
gaccttcccggacagatcatgagca

SEQ ID NO: 3796817 - DNA, 25 bp, Homo sapien
tctccctcgggatcaggttcaagct

SEQ ID NO: 3796818 - DNA, 25 bp, Homo sapien
cagagatggacacttttcttgtcag

SEQ ID NO: 3796819 - DNA, 25 bp, Homo sapien
aaggctttgctctggccggtgtctc

SEQ ID NO: 3796820 - DNA, 25 bp, Homo sapien
catcaaacctgtttagggagagcct

SEQ ID NO: 3796821 - DNA, 25 bp, Homo sapien
cgctgtgctctgttgggaaggcttt

SEQ ID NO: 3796822 - DNA, 25 bp, Homo sapien
tggcagaatcctttgtcagcggctc

SEQ ID NO: 3796823 - DNA, 25 bp, Homo sapien
caagggcccatctgctggtacagtc

SEQ ID NO: 3796824 - DNA, 25 bp, Homo sapien
ggtaggtactcctcaactctgatga

SEQ ID NO: 3796825 - DNA, 25 bp, Homo sapien
aaggcagttcccaccacagttaggt

SEQ ID NO: 3796826 - DNA, 25 bp, Homo sapien
ccagagccggctctgtttgcacttt

SEQ ID NO: 3796827 - DNA, 25 bp, Homo sapien
cagggttctggcaattccgcctcag

SEQ ID NO: 3796828 - DNA, 25 bp, Homo sapien
tgctgccgacattgcaaactttttg

SEQ ID NO: 3796829 - DNA, 25 bp, Homo sapien
aactaaagctttcacccagagccgg

SEQ ID NO: 3796830 - DNA, 25 bp, Homo sapien
actttgtcccgatccatccagaaaa

SEQ ID NO: 3796831 - DNA, 25 bp, Homo sapien
agtaggtagcttgcatcctgacagc

SEQ ID NO: 3796832 - DNA, 25 bp, Homo sapien
tgtcccgatccatccagaaaagagt

SEQ ID NO: 3796833 - DNA, 25 bp, Homo sapien
cagaaaagagtaggtagcttgcatc

SEQ ID NO: 3796834 - DNA, 25 bp, Homo sapien
gatgacattcttccacacgagacgg

SEQ ID NO: 3796835 - DNA, 25 bp, Homo sapien
gcaccaagcatgagacctggtctgg

SEQ ID NO: 3796836 - DNA, 25 bp, Homo sapien
gcaccccttgtcctgtgcttgtggg

SEQ ID NO: 3796837 - DNA, 25 bp, Homo sapien
tcctaggagatggtggaagcacccc

SEQ ID NO: 3796838 - DNA, 25 bp, Homo sapien
gctggcccttgcatttagcatctga

SEQ ID NO: 3796839 - DNA, 25 bp, Homo sapien
cagtctcatgtgagagggtgactca

SEQ ID NO: 3796840 - DNA, 25 bp, Homo sapien
gggtgactcatgtcccctagaaagt

SEQ ID NO: 3796841 - DNA, 25 bp, Homo sapien
agctccctcgtgaccagatcaaaga

SEQ ID NO: 3796842 - DNA, 25 bp, Homo sapien
gaatgagctttgtgtgcccaggagc

SEQ ID NO: 3796843 - DNA, 25 bp, Homo sapien
tgcaaatgcttctgccggtccaagg

SEQ ID NO: 3796844 - DNA, 25 bp, Homo sapien
ttcattactccagctgatggcggcc

SEQ ID NO: 3796845 - DNA, 25 bp, Homo sapien
tctctgtcaggacggtgcgggcttc

SEQ ID NO: 3796846 - DNA, 25 bp, Homo sapien
agtggctgagtttggatctaggtgg

SEQ ID NO: 3796847 - DNA, 25 bp, Homo sapien
ctggaggcggacactgcgtgagggt

SEQ ID NO: 3796848 - DNA, 25 bp, Homo sapien
gggtccgtggagtggctgagtttgg

SEQ ID NO: 3796849 - DNA, 25 bp, Homo sapien
gaggcggacactgcgtgagggtcag

SEQ ID NO: 3796850 - DNA, 25 bp, Homo sapien
tttcataacagcgtggtgacccggg

SEQ ID NO: 3796851 - DNA, 25 bp, Homo sapien
tcagggatccaaacgtggcgcttga

SEQ ID NO: 3796852 - DNA, 25 bp, Homo sapien
tgtggaaattcactgggcctgatgg

SEQ ID NO: 3796853 - DNA, 25 bp, Homo sapien
tgagctctctgcgacgtgttccaca

SEQ ID NO: 3796854 - DNA, 25 bp, Homo sapien
tagggagctcttctcggggacccca

SEQ ID NO: 3796855 - DNA, 25 bp, Homo sapien
cagaacggattgcagggtagggagc

SEQ ID NO: 3796856 - DNA, 25 bp, Homo sapien
agctccgcgctctcagtcggagcga

SEQ ID NO: 3796857 - DNA, 25 bp, Homo sapien
cgctctcagtcggagcgaagcggct

SEQ ID NO: 3796858 - DNA, 25 bp, Homo sapien
ggcgcagggacacagttcccccact

SEQ ID NO: 3796859 - DNA, 25 bp, Homo sapien
ggaaggaactgcacgggcgcaggga

SEQ ID NO: 3796860 - DNA, 25 bp, Homo sapien
ggcgaggggaaggaactgcacgggc

SEQ ID NO: 3796861 - DNA, 25 bp, Homo sapien
ggcgcgcgtggcgaggggaaggaac

SEQ ID NO: 3796862 - DNA, 25 bp, Homo sapien
gactagttggtttcgctgctgggcc

SEQ ID NO: 3796863 - DNA, 25 bp, Homo sapien
aaccgccgggctttttccacagcag

SEQ ID NO: 3796864 - DNA, 25 bp, Homo sapien
tccagggctcgtggtttgaggaacc

SEQ ID NO: 3796865 - DNA, 25 bp, Homo sapien
tttatttctcttgggcgcgcagaca

SEQ ID NO: 3796866 - DNA, 25 bp, Homo sapien
gggcttccatgagtccgcctcaatt

SEQ ID NO: 3796867 - DNA, 25 bp, Homo sapien
gaccccaggcgtgatgtctgaactg

SEQ ID NO: 3796868 - DNA, 25 bp, Homo sapien
ggtgaatggatgagggagctgatgg

SEQ ID NO: 3796869 - DNA, 25 bp, Homo sapien
ccctcttcaggttctgtgccccaaa

SEQ ID NO: 3796870 - DNA, 25 bp, Homo sapien
cagtagaacagccattgtgatgtgt

SEQ ID NO: 3796871 - DNA, 25 bp, Homo sapien
gctccagtagaacagccattgtgat

SEQ ID NO: 3796872 - DNA, 25 bp, Homo sapien
gggcctggctccagtagaacagcca

SEQ ID NO: 3796873 - DNA, 25 bp, Homo sapien
tggctccagtagaacagccattgtg

SEQ ID NO: 3796874 - DNA, 25 bp, Homo sapien
caacttgggggccttcaaagtacat

SEQ ID NO: 3796875 - DNA, 25 bp, Homo sapien
acttgggggccttcaaagtacatct

SEQ ID NO: 3796876 - DNA, 25 bp, Homo sapien
aggacccctgtggcttctcaattcc

SEQ ID NO: 3796877 - DNA, 25 bp, Homo sapien
attcccatgggctgtcggtgctcac

SEQ ID NO: 3796878 - DNA, 25 bp, Homo sapien
tgggaagcgggaagcaggtgggacc

SEQ ID NO: 3796879 - DNA, 25 bp, Homo sapien
ctgtgggagtgggaagcgggaagca

SEQ ID NO: 3796880 - DNA, 25 bp, Homo sapien
ccaccacggacatgccggcatacag

SEQ ID NO: 3796881 - DNA, 25 bp, Homo sapien
ctgcaccggcatggacgtccccacc

SEQ ID NO: 3796882 - DNA, 25 bp, Homo sapien
gtccccaccacggacatgccggcat

SEQ ID NO: 3796883 - DNA, 25 bp, Homo sapien
accggcatggacgtccccaccacgg

SEQ ID NO: 3796884 - DNA, 25 bp, Homo sapien
caaaggtcgtcaccgtgatgatgcg

SEQ ID NO: 3796885 - DNA, 25 bp, Homo sapien
ccgggacaaaggtcgtcaccgtgat

SEQ ID NO: 3796886 - DNA, 25 bp, Homo sapien
ccaggtgagggcacccgggacaaag

SEQ ID NO: 3796887 - DNA, 25 bp, Homo sapien
gtcgtcaccgtgatgatgcggtttc

SEQ ID NO: 3796888 - DNA, 25 bp, Homo sapien
aggctgggcgtgagcggggccacct

SEQ ID NO: 3796889 - DNA, 25 bp, Homo sapien
acctctcactgtacgctggacgcac

SEQ ID NO: 3796890 - DNA, 25 bp, Homo sapien
tggtagtagaagagctcgcgctgac

SEQ ID NO: 3796891 - DNA, 25 bp, Homo sapien
tccttatgcagaatgccaggaagca

SEQ ID NO: 3796892 - DNA, 25 bp, Homo sapien
gctgacacacgggacacgagtgctt

SEQ ID NO: 3796893 - DNA, 25 bp, Homo sapien
gacacgagtgcttcacgtccattag

SEQ ID NO: 3796894 - DNA, 25 bp, Homo sapien
cagtggtgggccgcccctctgacag

SEQ ID NO: 3796895 - DNA, 25 bp, Homo sapien
tcagccctccatgcggggtaggatg

SEQ ID NO: 3796896 - DNA, 25 bp, Homo sapien
cagtttcaaatgagggttcagcaac

SEQ ID NO: 3796897 - DNA, 25 bp, Homo sapien
gcaacttgccaagctcatctgccag

SEQ ID NO: 3796898 - DNA, 25 bp, Homo sapien
cagtgtgtaccttggagtgacttcc

SEQ ID NO: 3796899 - DNA, 25 bp, Homo sapien
gctatcgtgggcgtggtccttgcac

SEQ ID NO: 3796900 - DNA, 25 bp, Homo sapien
tgacctgatgtgtcacgaggccctt

SEQ ID NO: 3796901 - DNA, 25 bp, Homo sapien
tgtgacccgtgtgatagaaagcagg

SEQ ID NO: 3796902 - DNA, 25 bp, Homo sapien
gccttttagcaagagggcatgctca

SEQ ID NO: 3796903 - DNA, 25 bp, Homo sapien
catgtacaatttgccactgggagga

SEQ ID NO: 3796904 - DNA, 25 bp, Homo sapien
tctcaacagttcatacgagcaggtg

SEQ ID NO: 3796905 - DNA, 25 bp, Homo sapien
tctgtgggagcagtgtacaccaact

SEQ ID NO: 3796906 - DNA, 25 bp, Homo sapien
tccaagctggtgtgttcaaggcgag

SEQ ID NO: 3796907 - DNA, 25 bp, Homo sapien
tgtgggtggccccttaacagcctag

SEQ ID NO: 3796908 - DNA, 25 bp, Homo sapien
tgcaaggcaactgtcagcgcaatgg

SEQ ID NO: 3796909 - DNA, 25 bp, Homo sapien
ctagaactttggtgcacgtgccctc

SEQ ID NO: 3796910 - DNA, 25 bp, Homo sapien
tcctttgtaacctgtgagatcttca

SEQ ID NO: 3796911 - DNA, 25 bp, Homo sapien
tgtggaaccaggagcaatagcattc

SEQ ID NO: 3796912 - DNA, 25 bp, Homo sapien
aatttgaaagactttgagccacagc

SEQ ID NO: 3796913 - DNA, 25 bp, Homo sapien
tacgagttcttaacaggtccttaca

SEQ ID NO: 3796914 - DNA, 25 bp, Homo sapien
gggacagttgagaacaatgatgcaa

SEQ ID NO: 3796915 - DNA, 25 bp, Homo sapien
gaagaatgtaaaaaggccgtggagc

SEQ ID NO: 3796916 - DNA, 25 bp, Homo sapien
acaagcatgggtgtgtccgggacct

SEQ ID NO: 3796917 - DNA, 25 bp, Homo sapien
tcttcctttgtggtagcagaccttt

SEQ ID NO: 3796918 - DNA, 25 bp, Homo sapien
gacataaatagcctcacctttgtag

SEQ ID NO: 3796919 - DNA, 25 bp, Homo sapien
acctttgtagaattgagctccctga

SEQ ID NO: 3796920 - DNA, 25 bp, Homo sapien
tacaagtatagagggaaaattcgag

SEQ ID NO: 3796921 - DNA, 25 bp, Homo sapien
tgcctctggtcttgtatctggacca

SEQ ID NO: 3796922 - DNA, 25 bp, Homo sapien
tgcccatctttgtttaggatcagac

SEQ ID NO: 3796923 - DNA, 25 bp, Homo sapien
tcgagtggtaagtttcaagcaatac

SEQ ID NO: 3796924 - DNA, 25 bp, Homo sapien
aaagactggctttgttggctgtccc

SEQ ID NO: 3796925 - DNA, 25 bp, Homo sapien
ggatcagacttaggctacaaaaagg

SEQ ID NO: 3796926 - DNA, 25 bp, Homo sapien
acaagaacctgtactgctttcagat

SEQ ID NO: 3796927 - DNA, 25 bp, Homo sapien
cactttgttgtagaattttgcttga

SEQ ID NO: 3796928 - DNA, 25 bp, Homo sapien
tccccagcagtaaatctatctttga

SEQ ID NO: 3796929 - DNA, 25 bp, Homo sapien
gcttgagaaagaattcaccgcttaa

SEQ ID NO: 3796930 - DNA, 25 bp, Homo sapien
tccactgacaccttgagggtgatga

SEQ ID NO: 3796931 - DNA, 25 bp, Homo sapien
gagggtgatgatttgatgttttaag

SEQ ID NO: 3796932 - DNA, 25 bp, Homo sapien
cactttcccggatctttacataatt

SEQ ID NO: 3796933 - DNA, 25 bp, Homo sapien
ttacataattatacaggaattgtcc

SEQ ID NO: 3796934 - DNA, 25 bp, Homo sapien
gtgtccagtgcaccagggaaagccg

SEQ ID NO: 3796935 - DNA, 25 bp, Homo sapien
gaaagccgactgtgtaggcaaccgt

SEQ ID NO: 3796936 - DNA, 25 bp, Homo sapien
gaatcagattgcttgctggttcgga

SEQ ID NO: 3796937 - DNA, 25 bp, Homo sapien
taaacgtctgagtggtaatacctgt

SEQ ID NO: 3796938 - DNA, 25 bp, Homo sapien
caccccttatgtactcggtggccaa

SEQ ID NO: 3796939 - DNA, 25 bp, Homo sapien
cagtggccctttgccatttcacagc

SEQ ID NO: 3796940 - DNA, 25 bp, Homo sapien
aatcaccttggtggctgcttggaca

SEQ ID NO: 3796941 - DNA, 25 bp, Homo sapien
ctgggctggaatcaccttggtggct

SEQ ID NO: 3796942 - DNA, 25 bp, Homo sapien
ttctggttcttggataacagtgttg

SEQ ID NO: 3796943 - DNA, 25 bp, Homo sapien
gttctggttcttggataacagtgtt

SEQ ID NO: 3796944 - DNA, 25 bp, Homo sapien
tgttctggttcttggataacagtgt

SEQ ID NO: 3796945 - DNA, 25 bp, Homo sapien
tctggttcttggataacagtgttga

SEQ ID NO: 3796946 - DNA, 25 bp, Homo sapien
ctctggccggcaggcttcttgcact

SEQ ID NO: 3796947 - DNA, 25 bp, Homo sapien
ctggccggcaggcttcttgcactct

SEQ ID NO: 3796948 - DNA, 25 bp, Homo sapien
tggccggcaggcttcttgcactctg

SEQ ID NO: 3796949 - DNA, 25 bp, Homo sapien
gccggcaggcttcttgcactctgtg

SEQ ID NO: 3796950 - DNA, 25 bp, Homo sapien
cttccctctgcctccggtggcgccg

SEQ ID NO: 3796951 - DNA, 25 bp, Homo sapien
gccgcatggggcacgtgtcttccct

SEQ ID NO: 3796952 - DNA, 25 bp, Homo sapien
cgcagggggcacgtgtcttccctct

SEQ ID NO: 3796953 - DNA, 25 bp, Homo sapien
gcacggggcacgtgtcttccctctg

SEQ ID NO: 3796954 - DNA, 25 bp, Homo sapien
gccgcatggggcacgtgtcttccct

SEQ ID NO: 3796955 - DNA, 25 bp, Homo sapien
cgcagggggcacgtgtcttccctct

SEQ ID NO: 3796956 - DNA, 25 bp, Homo sapien
gcagggggcacgtgtcttccctctg

SEQ ID NO: 3796957 - DNA, 25 bp, Homo sapien
cagggggcacgtgtcttccctctgc

SEQ ID NO: 3796958 - DNA, 25 bp, Homo sapien
gaaagagcccatgttatctgccagg

SEQ ID NO: 3796959 - DNA, 25 bp, Homo sapien
tagttgcagaaatgcccgtgtgtcc

SEQ ID NO: 3796960 - DNA, 25 bp, Homo sapien
atgtttgaaacctgggagcgagcgc

SEQ ID NO: 3796961 - DNA, 25 bp, Homo sapien
cccttgacgggtggagacactgttg

SEQ ID NO: 3796962 - DNA, 25 bp, Homo sapien
tgacccgggcgctgttggtttccga

SEQ ID NO: 3796963 - DNA, 25 bp, Homo sapien
ggtgtgcgcttgcaaccgtgcgaaa

SEQ ID NO: 3796964 - DNA, 25 bp, Homo sapien
aactcggttttctgccgatgtggca

SEQ ID NO: 3796965 - DNA, 25 bp, Homo sapien
ttcgaaaatacctgcaaggaacgca

SEQ ID NO: 3796966 - DNA, 25 bp, Homo sapien
cgtccggttggatctggtgtggctg

SEQ ID NO: 3796967 - DNA, 25 bp, Homo sapien
tctaacagcactgcctagcgtcggg

SEQ ID NO: 3796968 - DNA, 25 bp, Homo sapien
tcgcccgcacctgctccggtgcgct

SEQ ID NO: 3796969 - DNA, 25 bp, Homo sapien
atcactttctaacagcactgcctag

SEQ ID NO: 3796970 - DNA, 25 bp, Homo sapien
tgagttgtaaattcgagcgctcagg

SEQ ID NO: 3796971 - DNA, 25 bp, Homo sapien
gtgcattgtcccgacctcgcgtccg

SEQ ID NO: 3796972 - DNA, 25 bp, Homo sapien
tccgcggcacaaagcgccctgagtt

SEQ ID NO: 3796973 - DNA, 25 bp, Homo sapien
gcggagggacggaggtgttttctca

SEQ ID NO: 3796974 - DNA, 25 bp, Homo sapien
aatcttctggccttgttagggtgaa

SEQ ID NO: 3796975 - DNA, 25 bp, Homo sapien
gaagacaggtaccacaatcttctgg

SEQ ID NO: 3796976 - DNA, 25 bp, Homo sapien
gaaaagttgagaccctaatcatcag

SEQ ID NO: 3796977 - DNA, 25 bp, Homo sapien
tcaatgactgaatgagacaggacag

SEQ ID NO: 3796978 - DNA, 25 bp, Homo sapien
tgagcatccactgtaagcttggtgc

SEQ ID NO: 3796979 - DNA, 25 bp, Homo sapien
ggcaaatcggcaaatcttcactgag

SEQ ID NO: 3796980 - DNA, 25 bp, Homo sapien
ctgaggatagagctgtagacaagac

SEQ ID NO: 3796981 - DNA, 25 bp, Homo sapien
gctcctagcaggcagtaaacagttg

SEQ ID NO: 3796982 - DNA, 25 bp, Homo sapien
aatggactttatagccaatgcaggc

SEQ ID NO: 3796983 - DNA, 25 bp, Homo sapien
agcaggcattactcagcggattcac

SEQ ID NO: 3796984 - DNA, 25 bp, Homo sapien
tttagtgggcctccaagggcactgg

SEQ ID NO: 3796985 - DNA, 25 bp, Homo sapien
gctgtggtgccctagaaatgaactc

SEQ ID NO: 3796986 - DNA, 25 bp, Homo sapien
atgtcctttggaggcatcttggcat

SEQ ID NO: 3796987 - DNA, 25 bp, Homo sapien
tgtcctttggaggcatcttggcatt

SEQ ID NO: 3796988 - DNA, 25 bp, Homo sapien
aattggcagtgatcaaaaatggtgc

SEQ ID NO: 3796989 - DNA, 25 bp, Homo sapien
attggcagtgatcaaaaatggtgcc

SEQ ID NO: 3796990 - DNA, 25 bp, Homo sapien
taacgccgttgatcaccttagagaa

SEQ ID NO: 3796991 - DNA, 25 bp, Homo sapien
cttcatggacatagataacgccgtt

SEQ ID NO: 3796992 - DNA, 25 bp, Homo sapien
cctctggagggttttaggcatgaca

SEQ ID NO: 3796993 - DNA, 25 bp, Homo sapien
gacatttccaaatccgtgtttggcc

SEQ ID NO: 3796994 - DNA, 25 bp, Homo sapien
tggtgaataccgcagaggtaggagg

SEQ ID NO: 3796995 - DNA, 25 bp, Homo sapien
ggtgaataccgcagaggtaggagga

SEQ ID NO: 3796996 - DNA, 25 bp, Homo sapien
tcctcccacctaagcctcctgtagt

SEQ ID NO: 3796997 - DNA, 25 bp, Homo sapien
ctctccggggtgtttggcaagtctc

SEQ ID NO: 3796998 - DNA, 25 bp, Homo sapien
ctccggggtgtttggcaagtctctc

SEQ ID NO: 3796999 - DNA, 25 bp, Homo sapien
tccggggtgtttggcaagtctctcc

SEQ ID NO: 3797000 - DNA, 25 bp, Homo sapien
tctccggggtgtttggcaagtctct

SEQ ID NO: 3797001 - DNA, 25 bp, Homo sapien
catgcaggcgtttggtcttaagaaa

SEQ ID NO: 3797002 - DNA, 25 bp, Homo sapien
taaccatgttcagaccaatcagagc

SEQ ID NO: 3797003 - DNA, 25 bp, Homo sapien
tggtgataattcaggccacatgcct

SEQ ID NO: 3797004 - DNA, 25 bp, Homo sapien
tatccagtgagcaatagacagtcct

SEQ ID NO: 3797005 - DNA, 25 bp, Homo sapien
catgcattggtgagtcgcaggcagc

SEQ ID NO: 3797006 - DNA, 25 bp, Homo sapien
ccagagatgtagttcccaggggccc

SEQ ID NO: 3797007 - DNA, 25 bp, Homo sapien
gagtcgcaggcagcttggattcagt

SEQ ID NO: 3797008 - DNA, 25 bp, Homo sapien
gaggggacaactccagagagccagc

SEQ ID NO: 3797009 - DNA, 25 bp, Homo sapien
ggagcccacgcagcaccacatctgg

SEQ ID NO: 3797010 - DNA, 25 bp, Homo sapien
tctgccccagtcctcttaaatcttg

SEQ ID NO: 3797011 - DNA, 25 bp, Homo sapien
tcctcttaaatcttgggtctggagc

SEQ ID NO: 3797012 - DNA, 25 bp, Homo sapien
aaagtacaaaaatggatctgcccca

SEQ ID NO: 3797013 - DNA, 25 bp, Homo sapien
cgacagggttgctgagcttcatgca

SEQ ID NO: 3797014 - DNA, 25 bp, Homo sapien
ggcctccccgacagggttgctgagc

SEQ ID NO: 3797015 - DNA, 25 bp, Homo sapien
gcctgacaggctagagtcctctgga

SEQ ID NO: 3797016 - DNA, 25 bp, Homo sapien
ctctggaggctccacaggatgctgg

SEQ ID NO: 3797017 - DNA, 25 bp, Homo sapien
tgagccagccgcacgttctggagtg

SEQ ID NO: 3797018 - DNA, 25 bp, Homo sapien
gccttgatcccactggcccgttgaa

SEQ ID NO: 3797019 - DNA, 25 bp, Homo sapien
gtgcgatggcagtccccaggagtcc

SEQ ID NO: 3797020 - DNA, 25 bp, Homo sapien
gctttgctccccgtcagttctgcat

SEQ ID NO: 3797021 - DNA, 25 bp, Homo sapien
taaggccggacacatgtaattgata

SEQ ID NO: 3797022 - DNA, 25 bp, Homo sapien
tcagcgccagcatgctttagaaaga

SEQ ID NO: 3797023 - DNA, 25 bp, Homo sapien
tgataaagatcacggacccctgtgg

SEQ ID NO: 3797024 - DNA, 25 bp, Homo sapien
cgtgtgagggagtcatccgttcttc

SEQ ID NO: 3797025 - DNA, 25 bp, Homo sapien
gaagtctcatgtccaggatgcctcc

SEQ ID NO: 3797026 - DNA, 25 bp, Homo sapien
aagtctcatgtccaggatgcctccg

SEQ ID NO: 3797027 - DNA, 25 bp, Homo sapien
agtctcatgtccaggatgcctccgg

SEQ ID NO: 3797028 - DNA, 25 bp, Homo sapien
ctttctccagctgcacaatgatcat

SEQ ID NO: 3797029 - DNA, 25 bp, Homo sapien
cacgtgatgacatgtggtgactcag

SEQ ID NO: 3797030 - DNA, 25 bp, Homo sapien
agggatccaggcagcttctatcttg

SEQ ID NO: 3797031 - DNA, 25 bp, Homo sapien
gccttccacgtgatgacatgtggtg

SEQ ID NO: 3797032 - DNA, 25 bp, Homo sapien
gatccaggcagcttctatcttgtgg

SEQ ID NO: 3797033 - DNA, 25 bp, Homo sapien
gccatagggcgcacagagggagact

SEQ ID NO: 3797034 - DNA, 25 bp, Homo sapien
tgggccatagggcgcacagagggag

SEQ ID NO: 3797035 - DNA, 25 bp, Homo sapien
ggccatagggcgcacagagggagac

SEQ ID NO: 3797036 - DNA, 25 bp, Homo sapien
gcagcctgggccatagggcgcacag

SEQ ID NO: 3797037 - DNA, 25 bp, Homo sapien
agtcagcggagattgcaccgttgca

SEQ ID NO: 3797038 - DNA, 25 bp, Homo sapien
cagtcagcggagattgcaccgttgc

SEQ ID NO: 3797039 - DNA, 25 bp, Homo sapien
caaggtattcctctatttcgaaggc

SEQ ID NO: 3797040 - DNA, 25 bp, Homo sapien
ggtattcctctatttcgaaggctgg

SEQ ID NO: 3797041 - DNA, 25 bp, Homo sapien
gagacaaggtattcctctatttcga

SEQ ID NO: 3797042 - DNA, 25 bp, Homo sapien
ttcctctatttcgaaggctggagtg

SEQ ID NO: 3797043 - DNA, 25 bp, Homo sapien
tgcctgacgtaaccaattggctggg

SEQ ID NO: 3797044 - DNA, 25 bp, Homo sapien
caagggcccctattagtcggatccg

SEQ ID NO: 3797045 - DNA, 25 bp, Homo sapien
tgattggttcttcggcctgtctgcc

SEQ ID NO: 3797046 - DNA, 25 bp, Homo sapien
ctgacagtggttgcgtccgagccaa

SEQ ID NO: 3797047 - DNA, 25 bp, Homo sapien
agaaccagtgctcgggcccgtgctc

SEQ ID NO: 3797048 - DNA, 25 bp, Homo sapien
ctcgggcccgtgctcctggatctcg

SEQ ID NO: 3797049 - DNA, 25 bp, Homo sapien
ttggagaaccagtgctcgggcccgt

SEQ ID NO: 3797050 - DNA, 25 bp, Homo sapien
cccacttggagaaccagtgctcggg

SEQ ID NO: 3797051 - DNA, 25 bp, Homo sapien
cagctgctcgtcctgttcggcctcg

SEQ ID NO: 3797052 - DNA, 25 bp, Homo sapien
agctgctcgtcctgttcggcctcgg

SEQ ID NO: 3797053 - DNA, 25 bp, Homo sapien
gtagagctgggccacggcggtggcc

SEQ ID NO: 3797054 - DNA, 25 bp, Homo sapien
tgggccacggcggtggccgagttct

SEQ ID NO: 3797055 - DNA, 25 bp, Homo sapien
ttgtagagattggtgacggcggtgg

SEQ ID NO: 3797056 - DNA, 25 bp, Homo sapien
gacggcggtggctgcgttttggaag

SEQ ID NO: 3797057 - DNA, 25 bp, Homo sapien
aaggggacccagagagaaagtcctg

SEQ ID NO: 3797058 - DNA, 25 bp, Homo sapien
gcggtggctgcgttttggaagggga

SEQ ID NO: 3797059 - DNA, 25 bp, Homo sapien
tttttcctacaagatgctgcggcca

SEQ ID NO: 3797060 - DNA, 25 bp, Homo sapien
gtcaagcagcaccttcatagcccgt

SEQ ID NO: 3797061 - DNA, 25 bp, Homo sapien
aaatcaaagctaaccactgaggcac

SEQ ID NO: 3797062 - DNA, 25 bp, Homo sapien
cccgtttcaacctatatatggccta

SEQ ID NO: 3797063 - DNA, 25 bp, Homo sapien
catttctattaggcaagggatgtgt

SEQ ID NO: 3797064 - DNA, 25 bp, Homo sapien
tttctattaggcaagggatgtgttt

SEQ ID NO: 3797065 - DNA, 25 bp, Homo sapien
tctattaggcaagggatgtgttttc

SEQ ID NO: 3797066 - DNA, 25 bp, Homo sapien
ctattaggcaagggatgtgttttca

SEQ ID NO: 3797067 - DNA, 25 bp, Homo sapien
gaatgtaacaatctaagtcacagcc

SEQ ID NO: 3797068 - DNA, 25 bp, Homo sapien
ctggcactccaaccagtaaagaaaa

SEQ ID NO: 3797069 - DNA, 25 bp, Homo sapien
tgttcccaatcgtattccctaagga

SEQ ID NO: 3797070 - DNA, 25 bp, Homo sapien
tggcatccaaaaataagcacacctc

SEQ ID NO: 3797071 - DNA, 25 bp, Homo sapien
taaatttgcactagccagtccacca

SEQ ID NO: 3797072 - DNA, 25 bp, Homo sapien
tgagaagccatctctcaattgcaga

SEQ ID NO: 3797073 - DNA, 25 bp, Homo sapien
tccaaagttcattgacagagttccc

SEQ ID NO: 3797074 - DNA, 25 bp, Homo sapien
gagcaggtatcgcaagtttgtaaca

SEQ ID NO: 3797075 - DNA, 25 bp, Homo sapien
tgcatcacatcattcaacagatgtc

SEQ ID NO: 3797076 - DNA, 25 bp, Homo sapien
catgtatcatgaccattagagcccg

SEQ ID NO: 3797077 - DNA, 25 bp, Homo sapien
tagagcccgtattcccttctaaaga

SEQ ID NO: 3797078 - DNA, 25 bp, Homo sapien
caatttaaccaaagtgaataccatg

SEQ ID NO: 3797079 - DNA, 25 bp, Homo sapien
tattgcgtcgctgatagccaatctg

SEQ ID NO: 3797080 - DNA, 25 bp, Homo sapien
caaaacttcgttgatgggtatccac

SEQ ID NO: 3797081 - DNA, 25 bp, Homo sapien
catgcagagctatggcttcccggaa

SEQ ID NO: 3797082 - DNA, 25 bp, Homo sapien
tcccggaagggttgcaaatcagtct

SEQ ID NO: 3797083 - DNA, 25 bp, Homo sapien
gcagaaggtcaagtcttacatccat

SEQ ID NO: 3797084 - DNA, 25 bp, Homo sapien
taggttagctgacagaaatcgccca

SEQ ID NO: 3797085 - DNA, 25 bp, Homo sapien
cagcaaaccaagtaagaaaggtgtc

SEQ ID NO: 3797086 - DNA, 25 bp, Homo sapien
ggtcccaggtcccatgagaactaac

SEQ ID NO: 3797087 - DNA, 25 bp, Homo sapien
ctggggagatagagatccacctgcc

SEQ ID NO: 3797088 - DNA, 25 bp, Homo sapien
tctggcctggggagatagagatcca

SEQ ID NO: 3797089 - DNA, 25 bp, Homo sapien
gtcctgcctcttaaagtgcaaggga

SEQ ID NO: 3797090 - DNA, 25 bp, Homo sapien
gctggtcctgcctcttaaagtgcaa

SEQ ID NO: 3797091 - DNA, 25 bp, Homo sapien
ccttaagagaagcatggaatgaccc

SEQ ID NO: 3797092 - DNA, 25 bp, Homo sapien
aaagaactacggtttgccagagaga

SEQ ID NO: 3797093 - DNA, 25 bp, Homo sapien
tacatttcccgggtttctccagcaa

SEQ ID NO: 3797094 - DNA, 25 bp, Homo sapien
tagatgacctgtactatggcccaaa

SEQ ID NO: 3797095 - DNA, 25 bp, Homo sapien
gatgttctcacaaaccagtacagca

SEQ ID NO: 3797096 - DNA, 25 bp, Homo sapien
gataaaaactatttgaggccagcac

SEQ ID NO: 3797097 - DNA, 25 bp, Homo sapien
catgtccttgtgcttgccaaacgca

SEQ ID NO: 3797098 - DNA, 25 bp, Homo sapien
tacagatgactaggtcccataggac

SEQ ID NO: 3797099 - DNA, 25 bp, Homo sapien
gaaggtctaaacgagaggtccagat

SEQ ID NO: 3797100 - DNA, 25 bp, Homo sapien
gacagtgggacatgccatctggcag

SEQ ID NO: 3797101 - DNA, 25 bp, Homo sapien
caatttggagatgtacaccggagga

SEQ ID NO: 3797102 - DNA, 25 bp, Homo sapien
ggaaacgtaatctagggcagtgaca

SEQ ID NO: 3797103 - DNA, 25 bp, Homo sapien
acaaggtccctgctatgtgtcccga

SEQ ID NO: 3797104 - DNA, 25 bp, Homo sapien
caatcaacactaaggagctgctgct

SEQ ID NO: 3797105 - DNA, 25 bp, Homo sapien
gaagtctgacttggcatcgggctcc

SEQ ID NO: 3797106 - DNA, 25 bp, Homo sapien
ttctcaaggcgatggacatggtgcc

SEQ ID NO: 3797107 - DNA, 25 bp, Homo sapien
caggcacatagttagaggtcacaca

SEQ ID NO: 3797108 - DNA, 25 bp, Homo sapien
tgagaagacaccgttgatccaccag

SEQ ID NO: 3797109 - DNA, 25 bp, Homo sapien
aaccaagttgtacgtcctgagggca

SEQ ID NO: 3797110 - DNA, 25 bp, Homo sapien
gagaaagaacaaatgccagcccagt

SEQ ID NO: 3797111 - DNA, 25 bp, Homo sapien
ctgtaacatattacaaggtgcccat

SEQ ID NO: 3797112 - DNA, 25 bp, Homo sapien
tcctagtgtctcagcctgtaacata

SEQ ID NO: 3797113 - DNA, 25 bp, Homo sapien
ttctaccgcaagactaaacttgagg

SEQ ID NO: 3797114 - DNA, 25 bp, Homo sapien
aaactcaattatccccattgttggc

SEQ ID NO: 3797115 - DNA, 25 bp, Homo sapien
ttgcaaagaaccgagactgcactcc

SEQ ID NO: 3797116 - DNA, 25 bp, Homo sapien
taaaaacctaccgtcactggcagtg

SEQ ID NO: 3797117 - DNA, 25 bp, Homo sapien
cagaatatacccagcactcatggat

SEQ ID NO: 3797118 - DNA, 25 bp, Homo sapien
aggccgggcagatctcttcaggtca

SEQ ID NO: 3797119 - DNA, 25 bp, Homo sapien
tgttcaaatcgacatcatggagtcc

SEQ ID NO: 3797120 - DNA, 25 bp, Homo sapien
cacactgggctgaggtacgctttct

SEQ ID NO: 3797121 - DNA, 25 bp, Homo sapien
tctgtaatgacatcgccacactggg

SEQ ID NO: 3797122 - DNA, 25 bp, Homo sapien
gaacgcacgcttatactagccattg

SEQ ID NO: 3797123 - DNA, 25 bp, Homo sapien
taccataaggaaagtaccccgcatg

SEQ ID NO: 3797124 - DNA, 25 bp, Homo sapien
ccccgcatgggaagtagtgtttgtc

SEQ ID NO: 3797125 - DNA, 25 bp, Homo sapien
gaataggagttctggccacttgtga

SEQ ID NO: 3797126 - DNA, 25 bp, Homo sapien
tatccaacgtggaaagaggagcaag

SEQ ID NO: 3797127 - DNA, 25 bp, Homo sapien
catgccaagttagggcgacaggagc

SEQ ID NO: 3797128 - DNA, 25 bp, Homo sapien
tactccagttgggtaaaccacattg

SEQ ID NO: 3797129 - DNA, 25 bp, Homo sapien
tctggcttaagacgaagagagcttc

SEQ ID NO: 3797130 - DNA, 25 bp, Homo sapien
tcagaacgctgcagtctaaggatga

SEQ ID NO: 3797131 - DNA, 25 bp, Homo sapien
caaatattccaaagggaggctagaa

SEQ ID NO: 3797132 - DNA, 25 bp, Homo sapien
tgacttgctacgtcacaggctactg

SEQ ID NO: 3797133 - DNA, 25 bp, Homo sapien
gggcctgctcgtctctcaaatgctg

SEQ ID NO: 3797134 - DNA, 25 bp, Homo sapien
gcctgcagatcccattataggaagt

SEQ ID NO: 3797135 - DNA, 25 bp, Homo sapien
tacgatgtaagggaacaggcgctct

SEQ ID NO: 3797136 - DNA, 25 bp, Homo sapien
aaagtcttccttcatacgagcaggt

SEQ ID NO: 3797137 - DNA, 25 bp, Homo sapien
tgcagaaggtactttggcaagaccc

SEQ ID NO: 3797138 - DNA, 25 bp, Homo sapien
taaatacccaacactggctacgatg

SEQ ID NO: 3797139 - DNA, 25 bp, Homo sapien
ttttgagataccatgtcctacccag

SEQ ID NO: 3797140 - DNA, 25 bp, Homo sapien
ttttttgagataccatgtcctaccc

SEQ ID NO: 3797141 - DNA, 25 bp, Homo sapien
gtttttttgagataccatgtcctac

SEQ ID NO: 3797142 - DNA, 25 bp, Homo sapien
ttgagataccatgtcctacccagac

SEQ ID NO: 3797143 - DNA, 25 bp, Homo sapien
aggcacacgccactgggcccaacta

SEQ ID NO: 3797144 - DNA, 25 bp, Homo sapien
gcacacgccactgggcccaactaat

SEQ ID NO: 3797145 - DNA, 25 bp, Homo sapien
cagtgccgtgatctccgctcccagc

SEQ ID NO: 3797146 - DNA, 25 bp, Homo sapien
gtgccgtgatctccgctcccagcaa

SEQ ID NO: 3797147 - DNA, 25 bp, Homo sapien
gacgtcggatgcaggtccaaggacc

SEQ ID NO: 3797148 - DNA, 25 bp, Homo sapien
ggacgtcggatgcaggtccaaggac

SEQ ID NO: 3797149 - DNA, 25 bp, Homo sapien
cttggacgtcggatgcaggtccaag

SEQ ID NO: 3797150 - DNA, 25 bp, Homo sapien
tggacgtcggatgcaggtccaagga

SEQ ID NO: 3797151 - DNA, 25 bp, Homo sapien
ggcagtcttgccacatcagtcaaat

SEQ ID NO: 3797152 - DNA, 25 bp, Homo sapien
aaacctctgtactcaaggccgggcg

SEQ ID NO: 3797153 - DNA, 25 bp, Homo sapien
gacattatgcgcatcctgacgggag

SEQ ID NO: 3797154 - DNA, 25 bp, Homo sapien
caaattgcaccgctgagtaatcaaa

SEQ ID NO: 3797155 - DNA, 25 bp, Homo sapien
tgagctgctccgatgccgctttccc

SEQ ID NO: 3797156 - DNA, 25 bp, Homo sapien
tgcagcattactgccctctacaggc

SEQ ID NO: 3797157 - DNA, 25 bp, Homo sapien
ctgccttgctcatgcccacggaggg

SEQ ID NO: 3797158 - DNA, 25 bp, Homo sapien
gcctggagccccgacatgggagttc

SEQ ID NO: 3797159 - DNA, 25 bp, Homo sapien
gacaggctcctgattcatgaaagac

SEQ ID NO: 3797160 - DNA, 25 bp, Homo sapien
aactggactgggtatggtagcccat

SEQ ID NO: 3797161 - DNA, 25 bp, Homo sapien
taatgtttatctctagacaggctcc

SEQ ID NO: 3797162 - DNA, 25 bp, Homo sapien
tgtgccttgctcgaatgaatgatct

SEQ ID NO: 3797163 - DNA, 25 bp, Homo sapien
aatgtgtggacacttcgtcggtgga

SEQ ID NO: 3797164 - DNA, 25 bp, Homo sapien
gggcagagctaaaactccaaacttc

SEQ ID NO: 3797165 - DNA, 25 bp, Homo sapien
taaatgcctggctgttccgatactc

SEQ ID NO: 3797166 - DNA, 25 bp, Homo sapien
tgactggcgcttctgctgatatccc

SEQ ID NO: 3797167 - DNA, 25 bp, Homo sapien
cttcctctgcaaaaacgaacaggga

SEQ ID NO: 3797168 - DNA, 25 bp, Homo sapien
aagacactcggaggtcatctgggcc

SEQ ID NO: 3797169 - DNA, 25 bp, Homo sapien
caaaaacgaacagggatttaagcag

SEQ ID NO: 3797170 - DNA, 25 bp, Homo sapien
gcagcaaagacactcggaggtcatc

SEQ ID NO: 3797171 - DNA, 25 bp, Homo sapien
tcttcctctgatgttgatgcagccc

SEQ ID NO: 3797172 - DNA, 25 bp, Homo sapien
ctctgatgttgatgcagccctctgg

SEQ ID NO: 3797173 - DNA, 25 bp, Homo sapien
tcctctgatgttgatgcagccctct

SEQ ID NO: 3797174 - DNA, 25 bp, Homo sapien
ttcctctgatgttgatgcagccctc

SEQ ID NO: 3797175 - DNA, 25 bp, Homo sapien
tctctccctcctgtcatttgcaaag

SEQ ID NO: 3797176 - DNA, 25 bp, Homo sapien
agtaattaagtaccggctcttggag

SEQ ID NO: 3797177 - DNA, 25 bp, Homo sapien
ctccctcctgtcatttgcaaagtca

SEQ ID NO: 3797178 - DNA, 25 bp, Homo sapien
taccggctcttggaggtagcttctg

SEQ ID NO: 3797179 - DNA, 25 bp, Homo sapien
aaccaagaaagtatgtccacttctt

SEQ ID NO: 3797180 - DNA, 25 bp, Homo sapien
caaccaagaaagtatgtccacttct

SEQ ID NO: 3797181 - DNA, 25 bp, Homo sapien
tcaaccaagaaagtatgtccacttc

SEQ ID NO: 3797182 - DNA, 25 bp, Homo sapien
ccaagaaagtatgtccacttcttac

SEQ ID NO: 3797183 - DNA, 25 bp, Homo sapien
tcactgccaatagccttttaatttc

SEQ ID NO: 3797184 - DNA, 25 bp, Homo sapien
ccaatagccttttaatttccacaga

SEQ ID NO: 3797185 - DNA, 25 bp, Homo sapien
tgccaatagccttttaatttccaca

SEQ ID NO: 3797186 - DNA, 25 bp, Homo sapien
actgccaatagccttttaatttcca

SEQ ID NO: 3797187 - DNA, 25 bp, Homo sapien
cctaagggatgtaaaccatccaacg

SEQ ID NO: 3797188 - DNA, 25 bp, Homo sapien
gcttagcgttagcatttatttcctc

SEQ ID NO: 3797189 - DNA, 25 bp, Homo sapien
gggtttccatttatagtagtgacaa

SEQ ID NO: 3797190 - DNA, 25 bp, Homo sapien
gatttttatgcttagcgttagcatt

SEQ ID NO: 3797191 - DNA, 25 bp, Homo sapien
caagtggaatggaataccattgtct

SEQ ID NO: 3797192 - DNA, 25 bp, Homo sapien
tctcatcacacagtcaaacggtcac

SEQ ID NO: 3797193 - DNA, 25 bp, Homo sapien
tacagagcccttgcctctggctaag

SEQ ID NO: 3797194 - DNA, 25 bp, Homo sapien
tccccagcaaatgtacccaagtgga

SEQ ID NO: 3797195 - DNA, 25 bp, Homo sapien
gacctggctgatcacaagaacttgc

SEQ ID NO: 3797196 - DNA, 25 bp, Homo sapien
aggacctggctgatcacaagaactt

SEQ ID NO: 3797197 - DNA, 25 bp, Homo sapien
tcaggacctggctgatcacaagaac

SEQ ID NO: 3797198 - DNA, 25 bp, Homo sapien
cctggctgatcacaagaacttgctg

SEQ ID NO: 3797199 - DNA, 25 bp, Homo sapien
cagtgcttgtttctgctccccctgc

SEQ ID NO: 3797200 - DNA, 25 bp, Homo sapien
tccccagtgcttgtttctgctcccc

SEQ ID NO: 3797201 - DNA, 25 bp, Homo sapien
cccagtgcttgtttctgctccccct

SEQ ID NO: 3797202 - DNA, 25 bp, Homo sapien
ctgtccccagtgcttgtttctgctc

SEQ ID NO: 3797203 - DNA, 25 bp, Homo sapien
catgcagttgacacagtccagagtc

SEQ ID NO: 3797204 - DNA, 25 bp, Homo sapien
agcccatgcagttgacacagtccag

SEQ ID NO: 3797205 - DNA, 25 bp, Homo sapien
tgcagttgacacagtccagagtctg

SEQ ID NO: 3797206 - DNA, 25 bp, Homo sapien
cccatgcagttgacacagtccagag

SEQ ID NO: 3797207 - DNA, 25 bp, Homo sapien
cacagagttattcagcccagaagga

SEQ ID NO: 3797208 - DNA, 25 bp, Homo sapien
gttcccaagggagtaaagcacacag

SEQ ID NO: 3797209 - DNA, 25 bp, Homo sapien
tgaaatcggtgaggctgatccacag

SEQ ID NO: 3797210 - DNA, 25 bp, Homo sapien
tataagggcattccgcaagttcggg

SEQ ID NO: 3797211 - DNA, 25 bp, Homo sapien
cataaacacctgtattgcaaggact

SEQ ID NO: 3797212 - DNA, 25 bp, Homo sapien
aacacctgtattgcaaggactttct

SEQ ID NO: 3797213 - DNA, 25 bp, Homo sapien
taaacacctgtattgcaaggacttt

SEQ ID NO: 3797214 - DNA, 25 bp, Homo sapien
tcataaacacctgtattgcaaggac

SEQ ID NO: 3797215 - DNA, 25 bp, Homo sapien
tccaggctagtggtcttgcagaagg

SEQ ID NO: 3797216 - DNA, 25 bp, Homo sapien
aatctagaataatcctactgctttg

SEQ ID NO: 3797217 - DNA, 25 bp, Homo sapien
cagaaggatcctaccttttgaaagg

SEQ ID NO: 3797218 - DNA, 25 bp, Homo sapien
tatccagaaaccaatcaagggttag

SEQ ID NO: 3797219 - DNA, 25 bp, Homo sapien
cttcagcctaacattggcttctccc

SEQ ID NO: 3797220 - DNA, 25 bp, Homo sapien
ccttcagcctaacattggcttctcc

SEQ ID NO: 3797221 - DNA, 25 bp, Homo sapien
tggggttgaccaatgtggcagcctc

SEQ ID NO: 3797222 - DNA, 25 bp, Homo sapien
atggcgcccctggaggacggcttca

SEQ ID NO: 3797223 - DNA, 25 bp, Homo sapien
tgcctctggggttgaccaatgtggc

SEQ ID NO: 3797224 - DNA, 25 bp, Homo sapien
gaaaagcaggtgaagttgcctctgg

SEQ ID NO: 3797225 - DNA, 25 bp, Homo sapien
ggctgcattctgttaacaccagtct

SEQ ID NO: 3797226 - DNA, 25 bp, Homo sapien
taacaccagtctgggcggtggctgt

SEQ ID NO: 3797227 - DNA, 25 bp, Homo sapien
tctccttctgtgccactttcatcat

SEQ ID NO: 3797228 - DNA, 25 bp, Homo sapien
tgcggaagtcgaagcgtctaaaccc

SEQ ID NO: 3797229 - DNA, 25 bp, Homo sapien
agggacagggttccatcaggaagct

SEQ ID NO: 3797230 - DNA, 25 bp, Homo sapien
gggacacatctgttacttttgaaat

SEQ ID NO: 3797231 - DNA, 25 bp, Homo sapien
agggacacatctgttacttttgaaa

SEQ ID NO: 3797232 - DNA, 25 bp, Homo sapien
tgggacctgatgatagatccccaag

SEQ ID NO: 3797233 - DNA, 25 bp, Homo sapien
gacctgatgatagatccccaagaaa

SEQ ID NO: 3797234 - DNA, 25 bp, Homo sapien
cctgatgatagatccccaagaaact

SEQ ID NO: 3797235 - DNA, 25 bp, Homo sapien
tcttgggacctgatgatagatcccc

SEQ ID NO: 3797236 - DNA, 25 bp, Homo sapien
gaggagtaactctagcttgtcgcgg

SEQ ID NO: 3797237 - DNA, 25 bp, Homo sapien
cgtgatttcgaatcctccattgcat

SEQ ID NO: 3797238 - DNA, 25 bp, Homo sapien
cacctggtggcttggaggagtaact

SEQ ID NO: 3797239 - DNA, 25 bp, Homo sapien
tgtcgcggcacgtgatttcgaatcc

SEQ ID NO: 3797240 - DNA, 25 bp, Homo sapien
acttggcttcgttgccgccttggca

SEQ ID NO: 3797241 - DNA, 25 bp, Homo sapien
tggcttcgttgccgccttggcacac

SEQ ID NO: 3797242 - DNA, 25 bp, Homo sapien
cttggcttcgttgccgccttggcac

SEQ ID NO: 3797243 - DNA, 25 bp, Homo sapien
ttggcttcgttgccgccttggcaca

SEQ ID NO: 3797244 - DNA, 25 bp, Homo sapien
aatttctcaaggaattctgatgggc

SEQ ID NO: 3797245 - DNA, 25 bp, Homo sapien
caaggaattctgatgggcaaccagg

SEQ ID NO: 3797246 - DNA, 25 bp, Homo sapien
tttttagatactcacttctgggcct

SEQ ID NO: 3797247 - DNA, 25 bp, Homo sapien
tgggcctcgattgattcagtgggtc

SEQ ID NO: 3797248 - DNA, 25 bp, Homo sapien
agaccctgaccatatcctcttcgca

SEQ ID NO: 3797249 - DNA, 25 bp, Homo sapien
ttacagggcatgagacttaagatcc

SEQ ID NO: 3797250 - DNA, 25 bp, Homo sapien
tcaccagcctcatttttgggctcca

SEQ ID NO: 3797251 - DNA, 25 bp, Homo sapien
taagatccataagtatgccttccat

SEQ ID NO: 3797252 - DNA, 25 bp, Homo sapien
ccaggattttcagggtttatggcac

SEQ ID NO: 3797253 - DNA, 25 bp, Homo sapien
ttaagtgggacaagaagtcgtgtga

SEQ ID NO: 3797254 - DNA, 25 bp, Homo sapien
tggccacgggtcaacaatccacttg

SEQ ID NO: 3797255 - DNA, 25 bp, Homo sapien
cagggtttatggcactgagttggcc

SEQ ID NO: 3797256 - DNA, 25 bp, Homo sapien
gaatggagcctgctgacggctggca

SEQ ID NO: 3797257 - DNA, 25 bp, Homo sapien
ccttggtgcaagcatcactggtctt

SEQ ID NO: 3797258 - DNA, 25 bp, Homo sapien
gctactggccttggtgcaagcatca

SEQ ID NO: 3797259 - DNA, 25 bp, Homo sapien
tcaaaggctactggccttggtgcaa

SEQ ID NO: 3797260 - DNA, 25 bp, Homo sapien
gccataaccataggatgtgttgctg

SEQ ID NO: 3797261 - DNA, 25 bp, Homo sapien
ctagccataaccataggatgtgttg

SEQ ID NO: 3797262 - DNA, 25 bp, Homo sapien
cataaccataggatgtgttgctgga

SEQ ID NO: 3797263 - DNA, 25 bp, Homo sapien
ctggaaataggtgtgatttcactct

SEQ ID NO: 3797264 - DNA, 25 bp, Homo sapien
aaaatactattcatgcttagcacaa

SEQ ID NO: 3797265 - DNA, 25 bp, Homo sapien
catgtatcattctatcagatattta

SEQ ID NO: 3797266 - DNA, 25 bp, Homo sapien
gaaatattgatagttattagacctg

SEQ ID NO: 3797267 - DNA, 25 bp, Homo sapien
taatgcactattaaggaagtacatg

SEQ ID NO: 3797268 - DNA, 25 bp, Homo sapien
tcagtgagggtttttcagcacagct

SEQ ID NO: 3797269 - DNA, 25 bp, Homo sapien
tccccactggactaagctttcaaag

SEQ ID NO: 3797270 - DNA, 25 bp, Homo sapien
taaaggtcgaatgcacaatccaggt

SEQ ID NO: 3797271 - DNA, 25 bp, Homo sapien
ttaacaagcgcaccgaaaggaatcc

SEQ ID NO: 3797272 - DNA, 25 bp, Homo sapien
aaatgtcacggctcactatgcctgg

SEQ ID NO: 3797273 - DNA, 25 bp, Homo sapien
gggagtctatcccacacatttgtgc

SEQ ID NO: 3797274 - DNA, 25 bp, Homo sapien
tccttaggatagaagggacgtcaca

SEQ ID NO: 3797275 - DNA, 25 bp, Homo sapien
gttgagtccacagacacagcgggag

SEQ ID NO: 3797276 - DNA, 25 bp, Homo sapien
caaggtgctctgacatttcagcagc

SEQ ID NO: 3797277 - DNA, 25 bp, Homo sapien
tgctctgacatttcagcagccactc

SEQ ID NO: 3797278 - DNA, 25 bp, Homo sapien
aggtgctctgacatttcagcagcca

SEQ ID NO: 3797279 - DNA, 25 bp, Homo sapien
acaaggtgctctgacatttcagcag

SEQ ID NO: 3797280 - DNA, 25 bp, Homo sapien
gccaaatggctttgttgaaacctct

SEQ ID NO: 3797281 - DNA, 25 bp, Homo sapien
tcagcacctctgagattagaggctt

SEQ ID NO: 3797282 - DNA, 25 bp, Homo sapien
tcaaatgccaaatggctttgttgaa

SEQ ID NO: 3797283 - DNA, 25 bp, Homo sapien
gcacctctgagattagaggcttttc

SEQ ID NO: 3797284 - DNA, 25 bp, Homo sapien
gaatgactggcattatatggagccc

SEQ ID NO: 3797285 - DNA, 25 bp, Homo sapien
cgctgaatagttaggtctgctaggc

SEQ ID NO: 3797286 - DNA, 25 bp, Homo sapien
atctgaagcaggcaagggtagcgct

SEQ ID NO: 3797287 - DNA, 25 bp, Homo sapien
gctcccgggcttgcaggtgaatgac

SEQ ID NO: 3797288 - DNA, 25 bp, Homo sapien
tccactttgcctcttaaattctttc

SEQ ID NO: 3797289 - DNA, 25 bp, Homo sapien
cttttctcatgatcttctcgttcct

SEQ ID NO: 3797290 - DNA, 25 bp, Homo sapien
cgttcctttatcacatccactttgc

SEQ ID NO: 3797291 - DNA, 25 bp, Homo sapien
atgatcttctcgttcctttatcaca

SEQ ID NO: 3797292 - DNA, 25 bp, Homo sapien
taagcacctactatgctctaggcat

SEQ ID NO: 3797293 - DNA, 25 bp, Homo sapien
gtctgtgctaggagggaccttcccc

SEQ ID NO: 3797294 - DNA, 25 bp, Homo sapien
ggaccatggatgcaatctgcccact

SEQ ID NO: 3797295 - DNA, 25 bp, Homo sapien
cttcaggtagctacaaatgagggca

SEQ ID NO: 3797296 - DNA, 25 bp, Homo sapien
ggagctctgagctttgaacccggtt

SEQ ID NO: 3797297 - DNA, 25 bp, Homo sapien
gctctgagctttgaacccggtttta

SEQ ID NO: 3797298 - DNA, 25 bp, Homo sapien
ctgattccaatccaatgctctttct

SEQ ID NO: 3797299 - DNA, 25 bp, Homo sapien
tgattccaatccaatgctctttctc

SEQ ID NO: 3797300 - DNA, 25 bp, Homo sapien
ttatgtcagggcatgtccagagggt

SEQ ID NO: 3797301 - DNA, 25 bp, Homo sapien
tccattccagtaatgtggacagagc

SEQ ID NO: 3797302 - DNA, 25 bp, Homo sapien
gggcctatactcatcctaacagaaa

SEQ ID NO: 3797303 - DNA, 25 bp, Homo sapien
cagaaaagagctcctaagagaagtg

SEQ ID NO: 3797304 - DNA, 25 bp, Homo sapien
ttcccatgtgaacagcgcttgtgtt

SEQ ID NO: 3797305 - DNA, 25 bp, Homo sapien
cgacacactgactgtctcacatgct

SEQ ID NO: 3797306 - DNA, 25 bp, Homo sapien
tcaatttgattgtcttgcccacgac

SEQ ID NO: 3797307 - DNA, 25 bp, Homo sapien
gcgcttgtgtttagctgggccatat

SEQ ID NO: 3797308 - DNA, 25 bp, Homo sapien
tcagctcaatctgctctccttccat

SEQ ID NO: 3797309 - DNA, 25 bp, Homo sapien
catcagctcaatctgctctccttcc

SEQ ID NO: 3797310 - DNA, 25 bp, Homo sapien
atcagctcaatctgctctccttcca

SEQ ID NO: 3797311 - DNA, 25 bp, Homo sapien
gaagtcttcattgactggcgcagtg

SEQ ID NO: 3797312 - DNA, 25 bp, Homo sapien
ttcttaacggcaaagatcaagtcct

SEQ ID NO: 3797313 - DNA, 25 bp, Homo sapien
gacttccatgtaacaagagtctata

SEQ ID NO: 3797314 - DNA, 25 bp, Homo sapien
gtgacttggccaactcctcaatctg

SEQ ID NO: 3797315 - DNA, 25 bp, Homo sapien
gacagagtgtcctttatcctggagc

SEQ ID NO: 3797316 - DNA, 25 bp, Homo sapien
ggtcagacaccgagccgcaggctct

SEQ ID NO: 3797317 - DNA, 25 bp, Homo sapien
tttctatttcttgcaagatgtagga

SEQ ID NO: 3797318 - DNA, 25 bp, Homo sapien
caggctggctttaacattctgggtc

SEQ ID NO: 3797319 - DNA, 25 bp, Homo sapien
cccggtgcttggcagcctgcaaaga

SEQ ID NO: 3797320 - DNA, 25 bp, Homo sapien
cctgcaaagatgacgaagctgctca

SEQ ID NO: 3797321 - DNA, 25 bp, Homo sapien
aacacaatgtgttcaggcaagtcca

SEQ ID NO: 3797322 - DNA, 25 bp, Homo sapien
cagaaggtcagcaagcccggtgctt

SEQ ID NO: 3797323 - DNA, 25 bp, Homo sapien
tactggagaatactcaggaagcctc

SEQ ID NO: 3797324 - DNA, 25 bp, Homo sapien
gatgactaaagtattcgcgtcctaa

SEQ ID NO: 3797325 - DNA, 25 bp, Homo sapien
tttcagggtcatatccacacatgga

SEQ ID NO: 3797326 - DNA, 25 bp, Homo sapien
catggaagcctttgcattcatcgaa

SEQ ID NO: 3797327 - DNA, 25 bp, Homo sapien
caaactgttatctttaactagtcaa

SEQ ID NO: 3797328 - DNA, 25 bp, Homo sapien
gcagtcctgagtgtttcaagctctc

SEQ ID NO: 3797329 - DNA, 25 bp, Homo sapien
aaggcagtcctgagtgtttcaagct

SEQ ID NO: 3797330 - DNA, 25 bp, Homo sapien
cacaaactgttatctttaactagtc

SEQ ID NO: 3797331 - DNA, 25 bp, Homo sapien
tcttgttctagccaaaaatcacagt

SEQ ID NO: 3797332 - DNA, 25 bp, Homo sapien
gccaaaaatcacagttgagagtcct

SEQ ID NO: 3797333 - DNA, 25 bp, Homo sapien
tctagccaaaaatcacagttgagag

SEQ ID NO: 3797334 - DNA, 25 bp, Homo sapien
aaaatcacagttgagagtcctggaa

SEQ ID NO: 3797335 - DNA, 25 bp, Homo sapien
tacttatacaccatgggacactatg

SEQ ID NO: 3797336 - DNA, 25 bp, Homo sapien
gaatagcgagcaggtctttgctcat

SEQ ID NO: 3797337 - DNA, 25 bp, Homo sapien
tgcagaatagcgagcaggtctttgc

SEQ ID NO: 3797338 - DNA, 25 bp, Homo sapien
cagaatagcgagcaggtctttgctc

SEQ ID NO: 3797339 - DNA, 25 bp, Homo sapien
ctgcagaatagcgagcaggtctttg

SEQ ID NO: 3797340 - DNA, 25 bp, Homo sapien
taggctttgttcttgcgaacaggag

SEQ ID NO: 3797341 - DNA, 25 bp, Homo sapien
ctaggctttgttcttgcgaacagga

SEQ ID NO: 3797342 - DNA, 25 bp, Homo sapien
ggctttgttcttgcgaacaggagtg

SEQ ID NO: 3797343 - DNA, 25 bp, Homo sapien
ctttgttcttgcgaacaggagtgtt

SEQ ID NO: 3797344 - DNA, 25 bp, Homo sapien
gtgtgttcaggtgttcggggtggta

SEQ ID NO: 3797345 - DNA, 25 bp, Homo sapien
caggtgttcggggtggtagggcagt

SEQ ID NO: 3797346 - DNA, 25 bp, Homo sapien
ttcaggtgttcggggtggtagggca

SEQ ID NO: 3797347 - DNA, 25 bp, Homo sapien
tgtgttcaggtgttcggggtggtag

SEQ ID NO: 3797348 - DNA, 25 bp, Homo sapien
tcgatggtggttattggagcatcat

SEQ ID NO: 3797349 - DNA, 25 bp, Homo sapien
aaccagatgcaaaccatatgactgc

SEQ ID NO: 3797350 - DNA, 25 bp, Homo sapien
tattggagcatcattctctgatacc

SEQ ID NO: 3797351 - DNA, 25 bp, Homo sapien
agaaccagatgcaaaccatatgact

SEQ ID NO: 3797352 - DNA, 25 bp, Homo sapien
tagttctgtgatagctttgctcttc

SEQ ID NO: 3797353 - DNA, 25 bp, Homo sapien
ctgtgatagctttgctcttccagag

SEQ ID NO: 3797354 - DNA, 25 bp, Homo sapien
gcttagttctgtgatagctttgctc

SEQ ID NO: 3797355 - DNA, 25 bp, Homo sapien
gttctgtgatagctttgctcttcca

SEQ ID NO: 3797356 - DNA, 25 bp, Homo sapien
catactagtattggtaagcacgtcc

SEQ ID NO: 3797357 - DNA, 25 bp, Homo sapien
tatgctagcattgactggcatgccc

SEQ ID NO: 3797358 - DNA, 25 bp, Homo sapien
cattgatcggcaggcttatactagc

SEQ ID NO: 3797359 - DNA, 25 bp, Homo sapien
gctcatactagcgttcatcagcagg

SEQ ID NO: 3797360 - DNA, 25 bp, Homo sapien
tgttaaagcccttgacttcagcatg

SEQ ID NO: 3797361 - DNA, 25 bp, Homo sapien
cttgacttcagcatgtgttctcttt

SEQ ID NO: 3797362 - DNA, 25 bp, Homo sapien
taaagcccttgacttcagcatgtgt

SEQ ID NO: 3797363 - DNA, 25 bp, Homo sapien
gttattgttaaagcccttgacttca

SEQ ID NO: 3797364 - DNA, 25 bp, Homo sapien
gacaattattgttacggcagagctt

SEQ ID NO: 3797365 - DNA, 25 bp, Homo sapien
acaattattgttacggcagagcttc

SEQ ID NO: 3797366 - DNA, 25 bp, Homo sapien
aggacaattattgttacggcagagc

SEQ ID NO: 3797367 - DNA, 25 bp, Homo sapien
agaggacaattattgttacggcaga

SEQ ID NO: 3797368 - DNA, 25 bp, Homo sapien
gaaaaagttgtcatctccctgctcc

SEQ ID NO: 3797369 - DNA, 25 bp, Homo sapien
ctccctgctccttcacaagctgcat

SEQ ID NO: 3797370 - DNA, 25 bp, Homo sapien
tctccctgctccttcacaagctgca

SEQ ID NO: 3797371 - DNA, 25 bp, Homo sapien
tcatctccctgctccttcacaagct

SEQ ID NO: 3797372 - DNA, 25 bp, Homo sapien
tccattttcatggctccccaacatc

SEQ ID NO: 3797373 - DNA, 25 bp, Homo sapien
cattttcatggctccccaacatcct

SEQ ID NO: 3797374 - DNA, 25 bp, Homo sapien
attttcatggctccccaacatcctc

SEQ ID NO: 3797375 - DNA, 25 bp, Homo sapien
ttttcatggctccccaacatcctca

SEQ ID NO: 3797376 - DNA, 25 bp, Homo sapien
caatttgatttgagcgggcttgtga

SEQ ID NO: 3797377 - DNA, 25 bp, Homo sapien
gtgaagacatgatggatggctggct

SEQ ID NO: 3797378 - DNA, 25 bp, Homo sapien
cccagccttgcactgtaattgatgg

SEQ ID NO: 3797379 - DNA, 25 bp, Homo sapien
ggctgcagggtccagacaatttgat

SEQ ID NO: 3797380 - DNA, 25 bp, Homo sapien
tagtacacaggatttcacgatgttg

SEQ ID NO: 3797381 - DNA, 25 bp, Homo sapien
cattgattttttaagtggacatttt

SEQ ID NO: 3797382 - DNA, 25 bp, Homo sapien
ctggcctacattgattttttaagtg

SEQ ID NO: 3797383 - DNA, 25 bp, Homo sapien
accacacctgagtaacttttgcatt

SEQ ID NO: 3797384 - DNA, 25 bp, Homo sapien
gaggcctcgggcttatagagacaaa

SEQ ID NO: 3797385 - DNA, 25 bp, Homo sapien
tgcctgcggcatcctctgggtacag

SEQ ID NO: 3797386 - DNA, 25 bp, Homo sapien
caaacattgggcttaggtctatgcc

SEQ ID NO: 3797387 - DNA, 25 bp, Homo sapien
tgttcatcgcctctaattatctgag

SEQ ID NO: 3797388 - DNA, 25 bp, Homo sapien
gctttgctgcggtgtaaactttctg

SEQ ID NO: 3797389 - DNA, 25 bp, Homo sapien
tttcaattccaataccccaagttgc

SEQ ID NO: 3797390 - DNA, 25 bp, Homo sapien
ttgtgtgttgctagaggcgagaaga

SEQ ID NO: 3797391 - DNA, 25 bp, Homo sapien
gttgctggagcccagctttgatcat

SEQ ID NO: 3797392 - DNA, 25 bp, Homo sapien
caggtagccctttcctattggtcca

SEQ ID NO: 3797393 - DNA, 25 bp, Homo sapien
gatagagactccatattgaacacac

SEQ ID NO: 3797394 - DNA, 25 bp, Homo sapien
tccagccccgtggtgaagtgcagga

SEQ ID NO: 3797395 - DNA, 25 bp, Homo sapien
tgcatagcatgcgaagaactgatta

SEQ ID NO: 3797396 - DNA, 25 bp, Homo sapien
gccacgcgagggttcggcattccta

SEQ ID NO: 3797397 - DNA, 25 bp, Homo sapien
ctgcagaggaatcgtgcacatgatt

SEQ ID NO: 3797398 - DNA, 25 bp, Homo sapien
aaggaagtcacttaagaacaggcca

SEQ ID NO: 3797399 - DNA, 25 bp, Homo sapien
catgattagagtttcaaggaagtca

SEQ ID NO: 3797400 - DNA, 25 bp, Homo sapien
aagctcagggaagccggcctctgtg

SEQ ID NO: 3797401 - DNA, 25 bp, Homo sapien
ttaagctccggttttctgaggtctg

SEQ ID NO: 3797402 - DNA, 25 bp, Homo sapien
tgaggtctgcttgcaaacacatagc

SEQ ID NO: 3797403 - DNA, 25 bp, Homo sapien
agaggaaaactagaactgacaagca

SEQ ID NO: 3797404 - DNA, 25 bp, Homo sapien
tagtgtaaatgctctaacatgccaa

SEQ ID NO: 3797405 - DNA, 25 bp, Homo sapien
gaaaaaagacctatatggtggcaat

SEQ ID NO: 3797406 - DNA, 25 bp, Homo sapien
aaatgtcacgatcttatatgctgtc

SEQ ID NO: 3797407 - DNA, 25 bp, Homo sapien
gattttacaacagcttcaacagttg

SEQ ID NO: 3797408 - DNA, 25 bp, Homo sapien
taagagcgccacttattagcatgca

SEQ ID NO: 3797409 - DNA, 25 bp, Homo sapien
gaaagtggctcatcccaaatagtct

SEQ ID NO: 3797410 - DNA, 25 bp, Homo sapien
tacaaaggttgtcaagggctgaggc

SEQ ID NO: 3797411 - DNA, 25 bp, Homo sapien
tttatgatcatagaagcagggcttg

SEQ ID NO: 3797412 - DNA, 25 bp, Homo sapien
tgggcacttcccatgtggcaagtta

SEQ ID NO: 3797413 - DNA, 25 bp, Homo sapien
ttccttcagaattagggccctgcat

SEQ ID NO: 3797414 - DNA, 25 bp, Homo sapien
cttgctcctgggcacttcccatgtg

SEQ ID NO: 3797415 - DNA, 25 bp, Homo sapien
ccatgtggcaagttacactttttcc

SEQ ID NO: 3797416 - DNA, 25 bp, Homo sapien
agtcattgtgcccaatctggccaca

SEQ ID NO: 3797417 - DNA, 25 bp, Homo sapien
ggataagtagctcctagcctccaag

SEQ ID NO: 3797418 - DNA, 25 bp, Homo sapien
taactacatgactggatatgtggct

SEQ ID NO: 3797419 - DNA, 25 bp, Homo sapien
tatgaatgcatgaaggttgggtgaa

SEQ ID NO: 3797420 - DNA, 25 bp, Homo sapien
tttatcaagttccaagtgcctactg

SEQ ID NO: 3797421 - DNA, 25 bp, Homo sapien
tctgatacaccagggtatgaatgta

SEQ ID NO: 3797422 - DNA, 25 bp, Homo sapien
tttgacatttgaagaacccttctga

SEQ ID NO: 3797423 - DNA, 25 bp, Homo sapien
tgcctactgctgtggctgacagaaa

SEQ ID NO: 3797424 - DNA, 25 bp, Homo sapien
tagtattagctagaagtgcctgccc

SEQ ID NO: 3797425 - DNA, 25 bp, Homo sapien
tgcctgcccagaagggtcttagaaa

SEQ ID NO: 3797426 - DNA, 25 bp, Homo sapien
tgtgcccagcagtactttcagtata

SEQ ID NO: 3797427 - DNA, 25 bp, Homo sapien
tctgaagacaatgccgatatggact

SEQ ID NO: 3797428 - DNA, 25 bp, Homo sapien
ggtgacatgcaccaacagccgtatg

SEQ ID NO: 3797429 - DNA, 25 bp, Homo sapien
cagtggccattgtagtttatcccga

SEQ ID NO: 3797430 - DNA, 25 bp, Homo sapien
tttatcccgaagacgcctatgtacg

SEQ ID NO: 3797431 - DNA, 25 bp, Homo sapien
tacaatgccatctgtctgccgaagg

SEQ ID NO: 3797432 - DNA, 25 bp, Homo sapien
catagtgagaagacccatttttgtg

SEQ ID NO: 3797433 - DNA, 25 bp, Homo sapien
gatgtttcttatatcagactgccct

SEQ ID NO: 3797434 - DNA, 25 bp, Homo sapien
tggtttgaggcaacaccgaaaggaa

SEQ ID NO: 3797435 - DNA, 25 bp, Homo sapien
ttacaggcttacaaacctggcttgg

SEQ ID NO: 3797436 - DNA, 25 bp, Homo sapien
gacagtcctggtgccttaagtggga

SEQ ID NO: 3797437 - DNA, 25 bp, Homo sapien
caccggttatggaattgcccttcag

SEQ ID NO: 3797438 - DNA, 25 bp, Homo sapien
gatgaaggctgcaagctggtgacca

SEQ ID NO: 3797439 - DNA, 25 bp, Homo sapien
cttggaagaggcagatcgacctggc

SEQ ID NO: 3797440 - DNA, 25 bp, Homo sapien
cagccctcatggtgtgaagccaagg

SEQ ID NO: 3797441 - DNA, 25 bp, Homo sapien
gcacagccactaagatgcctggcag

SEQ ID NO: 3797442 - DNA, 25 bp, Homo sapien
tgtcatgtagccagcatagcatggc

SEQ ID NO: 3797443 - DNA, 25 bp, Homo sapien
ggagaaggtaatggcacccgcacag

SEQ ID NO: 3797444 - DNA, 25 bp, Homo sapien
gaagccttcaaacttacgtagtcaa

SEQ ID NO: 3797445 - DNA, 25 bp, Homo sapien
gatgtcgtcactactaacagtatga

SEQ ID NO: 3797446 - DNA, 25 bp, Homo sapien
gttgacttatggaaagtaccctgca

SEQ ID NO: 3797447 - DNA, 25 bp, Homo sapien
gagagtccctgtctttcagtcctcc

SEQ ID NO: 3797448 - DNA, 25 bp, Homo sapien
ccattccactaccctgtttttcttg

SEQ ID NO: 3797449 - DNA, 25 bp, Homo sapien
tccactaccctgtttttcttggcat

SEQ ID NO: 3797450 - DNA, 25 bp, Homo sapien
cattccactaccctgtttttcttgg

SEQ ID NO: 3797451 - DNA, 25 bp, Homo sapien
ttccactaccctgtttttcttggca

SEQ ID NO: 3797452 - DNA, 25 bp, Homo sapien
cacggtgtggtgcatcccctcactg

SEQ ID NO: 3797453 - DNA, 25 bp, Homo sapien
ctggtgccaggccacggtgtggtgc

SEQ ID NO: 3797454 - DNA, 25 bp, Homo sapien
tcgcccagctctggacgcaatccat

SEQ ID NO: 3797455 - DNA, 25 bp, Homo sapien
tgccaggccacggtgtggtgcatcc

SEQ ID NO: 3797456 - DNA, 25 bp, Homo sapien
catcaggggctacgttctgaaaatg

SEQ ID NO: 3797457 - DNA, 25 bp, Homo sapien
tcaggggctacgttctgaaaatggt

SEQ ID NO: 3797458 - DNA, 25 bp, Homo sapien
caggggctacgttctgaaaatggtg

SEQ ID NO: 3797459 - DNA, 25 bp, Homo sapien
tttcatcaggggctacgttctgaaa

SEQ ID NO: 3797460 - DNA, 25 bp, Homo sapien
gttcctggtgcctcaaatcctggca

SEQ ID NO: 3797461 - DNA, 25 bp, Homo sapien
tgcctgcaggtgtgaatgagccccc

SEQ ID NO: 3797462 - DNA, 25 bp, Homo sapien
ttcctggtgcctcaaatcctggcat

SEQ ID NO: 3797463 - DNA, 25 bp, Homo sapien
aggtgtgaatgagcccccgtccagg

SEQ ID NO: 3797464 - DNA, 25 bp, Homo sapien
tgacgagtgatggaactttggatct

SEQ ID NO: 3797465 - DNA, 25 bp, Homo sapien
gagatgaggaggtgatagagctttg

SEQ ID NO: 3797466 - DNA, 25 bp, Homo sapien
gacagatgagtaagtgacgagtgat

SEQ ID NO: 3797467 - DNA, 25 bp, Homo sapien
aggtgatagagctttggtctggaca

SEQ ID NO: 3797468 - DNA, 25 bp, Homo sapien
ttactcccatgcagtatgttctgac

SEQ ID NO: 3797469 - DNA, 25 bp, Homo sapien
caggcatgacatacctgtgatatac

SEQ ID NO: 3797470 - DNA, 25 bp, Homo sapien
gggactgacaggcatgacatacctg

SEQ ID NO: 3797471 - DNA, 25 bp, Homo sapien
ctggataagacgatggggactgaca

SEQ ID NO: 3797472 - DNA, 25 bp, Homo sapien
tgttgtgttttcttgggagccctct

SEQ ID NO: 3797473 - DNA, 25 bp, Homo sapien
ttcctgctgtgcatcaagacaccac

SEQ ID NO: 3797474 - DNA, 25 bp, Homo sapien
ttgcaatcaacccacgtggcccctt

SEQ ID NO: 3797475 - DNA, 25 bp, Homo sapien
tgggagccctctccaaatttgcaat

SEQ ID NO: 3797476 - DNA, 25 bp, Homo sapien
cagtcattgcatgttgagaaccact

SEQ ID NO: 3797477 - DNA, 25 bp, Homo sapien
taaatgcatctccaggcatagcgaa

SEQ ID NO: 3797478 - DNA, 25 bp, Homo sapien
gcatagcgaaatatcccctggtgga

SEQ ID NO: 3797479 - DNA, 25 bp, Homo sapien
ttcagtaggtctaagatggcgtgcg

SEQ ID NO: 3797480 - DNA, 25 bp, Homo sapien
tggtttcacgcaatgcaatgtggta

SEQ ID NO: 3797481 - DNA, 25 bp, Homo sapien
cgtgcctgagtctgaaagaatagct

SEQ ID NO: 3797482 - DNA, 25 bp, Homo sapien
ggagtgtcagcagtggtttcacgca

SEQ ID NO: 3797483 - DNA, 25 bp, Homo sapien
gaactcaattttcatgcgtgcctga

SEQ ID NO: 3797484 - DNA, 25 bp, Homo sapien
gctgcccctttaatgctggtcgcac

SEQ ID NO: 3797485 - DNA, 25 bp, Homo sapien
cctttaatgctggtcgcacatgctt

SEQ ID NO: 3797486 - DNA, 25 bp, Homo sapien
gcccctttaatgctggtcgcacatg

SEQ ID NO: 3797487 - DNA, 25 bp, Homo sapien
ccctttaatgctggtcgcacatgct

SEQ ID NO: 3797488 - DNA, 25 bp, Homo sapien
atttcatgcagcatcagcatacgca

SEQ ID NO: 3797489 - DNA, 25 bp, Homo sapien
atgcagcatcagcatacgcacaagg

SEQ ID NO: 3797490 - DNA, 25 bp, Homo sapien
ctcttgtgacgaacgatgaagaagc

SEQ ID NO: 3797491 - DNA, 25 bp, Homo sapien
ttgtgacgaacgatgaagaagcagg

SEQ ID NO: 3797492 - DNA, 25 bp, Homo sapien
gtgtcatctgacaaggcatcatggg

SEQ ID NO: 3797493 - DNA, 25 bp, Homo sapien
gaggcggaactctctggtagcccaa

SEQ ID NO: 3797494 - DNA, 25 bp, Homo sapien
gaccgaccaggtcagcatgttgcat

SEQ ID NO: 3797495 - DNA, 25 bp, Homo sapien
aattacttctgctaaccgaggcgga

SEQ ID NO: 3797496 - DNA, 25 bp, Homo sapien
agtagcaaccgagggcagagcacag

SEQ ID NO: 3797497 - DNA, 25 bp, Homo sapien
ctcgaggttgcctcgcagggcagta

SEQ ID NO: 3797498 - DNA, 25 bp, Homo sapien
aggagattcccagcctcgaggttgc

SEQ ID NO: 3797499 - DNA, 25 bp, Homo sapien
tgtgccctttgtttcactgcagctg

SEQ ID NO: 3797500 - DNA, 25 bp, Homo sapien
ttgggggtcatattgttacatcttt

SEQ ID NO: 3797501 - DNA, 25 bp, Homo sapien
cttgggggtcatattgttacatctt

SEQ ID NO: 3797502 - DNA, 25 bp, Homo sapien
actgatcagatggttcgccatgctg

SEQ ID NO: 3797503 - DNA, 25 bp, Homo sapien
gcaaggccccgcgaagcgacaaaca

SEQ ID NO: 3797504 - DNA, 25 bp, Homo sapien
gaagttaggtctacctcatcagcta

SEQ ID NO: 3797505 - DNA, 25 bp, Homo sapien
gctatgaaatctatgaaccatggga

SEQ ID NO: 3797506 - DNA, 25 bp, Homo sapien
aggatgcaagagaagccatgccgga

SEQ ID NO: 3797507 - DNA, 25 bp, Homo sapien
tgatgtctcgggaggagatgatgcc

SEQ ID NO: 3797508 - DNA, 25 bp, Homo sapien
gaccttatgcacctcgttggcctgg

SEQ ID NO: 3797509 - DNA, 25 bp, Homo sapien
aacttgctccccatggtgcccatct

SEQ ID NO: 3797510 - DNA, 25 bp, Homo sapien
catcagcttgatccttggcgtcatc

SEQ ID NO: 3797511 - DNA, 25 bp, Homo sapien
tttcaatgtcatgcctgctggagcc

SEQ ID NO: 3797512 - DNA, 25 bp, Homo sapien
tgcctgtttcaatgtcatgcctgct

SEQ ID NO: 3797513 - DNA, 25 bp, Homo sapien
cctgtttcaatgtcatgcctgctgg

SEQ ID NO: 3797514 - DNA, 25 bp, Homo sapien
tctcatttgcctgtttcaatgtcat

SEQ ID NO: 3797515 - DNA, 25 bp, Homo sapien
tatgacgttgatgcctacccaggtg

SEQ ID NO: 3797516 - DNA, 25 bp, Homo sapien
ccaagactatgacgttgatgcctac

SEQ ID NO: 3797517 - DNA, 25 bp, Homo sapien
gtgtgggagacgatggccactagct

SEQ ID NO: 3797518 - DNA, 25 bp, Homo sapien
ctagctcatggcgatcattgaccac

SEQ ID NO: 3797519 - DNA, 25 bp, Homo sapien
ctgtcaccacattcctcccaatcac

SEQ ID NO: 3797520 - DNA, 25 bp, Homo sapien
gatagagctgcagcccataactaca

SEQ ID NO: 3797521 - DNA, 25 bp, Homo sapien
cagatagagctgcagcccataacta

SEQ ID NO: 3797522 - DNA, 25 bp, Homo sapien
tgcagatagagctgcagcccataac

SEQ ID NO: 3797523 - DNA, 25 bp, Homo sapien
cataactacatgcagtccatccaca

SEQ ID NO: 3797524 - DNA, 25 bp, Homo sapien
atgccacatcggctatgatggacac

SEQ ID NO: 3797525 - DNA, 25 bp, Homo sapien
ctggatgccacatcggctatgatgg

SEQ ID NO: 3797526 - DNA, 25 bp, Homo sapien
tggatgccacatcggctatgatgga

SEQ ID NO: 3797527 - DNA, 25 bp, Homo sapien
ggtctggatgccacatcggctatga

SEQ ID NO: 3797528 - DNA, 25 bp, Homo sapien
catcatcactgtggaggctccaagg

SEQ ID NO: 3797529 - DNA, 25 bp, Homo sapien
atcactgtggaggctccaagggcca

SEQ ID NO: 3797530 - DNA, 25 bp, Homo sapien
ccagggccttgaccacgtgccccac

SEQ ID NO: 3797531 - DNA, 25 bp, Homo sapien
gggccagggccttgaccacgtgccc

SEQ ID NO: 3797532 - DNA, 25 bp, Homo sapien
ctgagaagaagtactcgccgctggg

SEQ ID NO: 3797533 - DNA, 25 bp, Homo sapien
tgagaagaagtactcgccgctgggc

SEQ ID NO: 3797534 - DNA, 25 bp, Homo sapien
gccatgctggttactcgctatgagg

SEQ ID NO: 3797535 - DNA, 25 bp, Homo sapien
catggagccatgctggttactcgct

SEQ ID NO: 3797536 - DNA, 25 bp, Homo sapien
gagccatgctggttactcgctatga

SEQ ID NO: 3797537 - DNA, 25 bp, Homo sapien
atgctggttactcgctatgaggtag

SEQ ID NO: 3797538 - DNA, 25 bp, Homo sapien
ctgcttctggtaagcgtgcaggcca

SEQ ID NO: 3797539 - DNA, 25 bp, Homo sapien
tgcttctggtaagcgtgcaggccat

SEQ ID NO: 3797540 - DNA, 25 bp, Homo sapien
gcttctggtaagcgtgcaggccatg

SEQ ID NO: 3797541 - DNA, 25 bp, Homo sapien
ctggaccacctggaaaaacctcttg

SEQ ID NO: 3797542 - DNA, 25 bp, Homo sapien
tgcccctgcttcttcgacaataaat

SEQ ID NO: 3797543 - DNA, 25 bp, Homo sapien
tgcttcttcgacaataaatgcaaaa

SEQ ID NO: 3797544 - DNA, 25 bp, Homo sapien
cgtactggtgttgtgtcaccagggt

SEQ ID NO: 3797545 - DNA, 25 bp, Homo sapien
aaaatcccgtactggtgttgtgtca

SEQ ID NO: 3797546 - DNA, 25 bp, Homo sapien
aaacccctgtaactgatatcccatg

SEQ ID NO: 3797547 - DNA, 25 bp, Homo sapien
actgcatccggactgcctaactgaa

SEQ ID NO: 3797548 - DNA, 25 bp, Homo sapien
agagaaactttgacccaggagggat

SEQ ID NO: 3797549 - DNA, 25 bp, Homo sapien
gattatgggtgcacagcaccgtgcc

SEQ ID NO: 3797550 - DNA, 25 bp, Homo sapien
atcttcttgtgggttcgtgctcttt

SEQ ID NO: 3797551 - DNA, 25 bp, Homo sapien
cttgtgggttcgtgctcttttgtac

SEQ ID NO: 3797552 - DNA, 25 bp, Homo sapien
tttgtaccctggaatggtaggacat

SEQ ID NO: 3797553 - DNA, 25 bp, Homo sapien
cgtgctcttttgtaccctggaatgg

SEQ ID NO: 3797554 - DNA, 25 bp, Homo sapien
tgtctccttctcaggacgaaggaca

SEQ ID NO: 3797555 - DNA, 25 bp, Homo sapien
tccttctcaggacgaaggacaagag

SEQ ID NO: 3797556 - DNA, 25 bp, Homo sapien
ctgtgtctccttctcaggacgaagg

SEQ ID NO: 3797557 - DNA, 25 bp, Homo sapien
tctccttctcaggacgaaggacaag

SEQ ID NO: 3797558 - DNA, 25 bp, Homo sapien
ccacttttgcatcagaagatttggg

SEQ ID NO: 3797559 - DNA, 25 bp, Homo sapien
tggcatgagtccattccacttttgc

SEQ ID NO: 3797560 - DNA, 25 bp, Homo sapien
gatcaggcagcccagcattatggca

SEQ ID NO: 3797561 - DNA, 25 bp, Homo sapien
gctgacctcatgcatagcaagagag

SEQ ID NO: 3797562 - DNA, 25 bp, Homo sapien
ttccactgcccaactcttggttcgt

SEQ ID NO: 3797563 - DNA, 25 bp, Homo sapien
tgcccaactcttggttcgtctccat

SEQ ID NO: 3797564 - DNA, 25 bp, Homo sapien
tggtgttttccattcttccactgcc

SEQ ID NO: 3797565 - DNA, 25 bp, Homo sapien
cactgcccaactcttggttcgtctc

SEQ ID NO: 3797566 - DNA, 25 bp, Homo sapien
gcctctgcgaaattcttcccaagca

SEQ ID NO: 3797567 - DNA, 25 bp, Homo sapien
tctgcgaaattcttcccaagcaaag

SEQ ID NO: 3797568 - DNA, 25 bp, Homo sapien
gtgcctctgcgaaattcttcccaag

SEQ ID NO: 3797569 - DNA, 25 bp, Homo sapien
tgcgaaattcttcccaagcaaagtt

SEQ ID NO: 3797570 - DNA, 25 bp, Homo sapien
catatcgtcttgctagtctgctgtc

SEQ ID NO: 3797571 - DNA, 25 bp, Homo sapien
tgaaatccatatcgtcttgctagtc

SEQ ID NO: 3797572 - DNA, 25 bp, Homo sapien
catttgaaatccatatcgtcttgct

SEQ ID NO: 3797573 - DNA, 25 bp, Homo sapien
aatccatatcgtcttgctagtctgc

SEQ ID NO: 3797574 - DNA, 25 bp, Homo sapien
tgaatgtctcctgctctatcttgtc

SEQ ID NO: 3797575 - DNA, 25 bp, Homo sapien
gctgaatgtctcctgctctatcttg

SEQ ID NO: 3797576 - DNA, 25 bp, Homo sapien
tgtctcctgctctatcttgtctctt

SEQ ID NO: 3797577 - DNA, 25 bp, Homo sapien
ctcctgctctatcttgtctcttcaa

SEQ ID NO: 3797578 - DNA, 25 bp, Homo sapien
gtcttgagtggtcttgaaagcttcc

SEQ ID NO: 3797579 - DNA, 25 bp, Homo sapien
tgccagtcttgagtggtcttgaaag

SEQ ID NO: 3797580 - DNA, 25 bp, Homo sapien
cagtcttgagtggtcttgaaagctt

SEQ ID NO: 3797581 - DNA, 25 bp, Homo sapien
aggctgccagtcttgagtggtcttg

SEQ ID NO: 3797582 - DNA, 25 bp, Homo sapien
gggtttgcagcggtgtttatcttct

SEQ ID NO: 3797583 - DNA, 25 bp, Homo sapien
tttgcagcggtgtttatcttctttc

SEQ ID NO: 3797584 - DNA, 25 bp, Homo sapien
ctgacaatcgtttgggccctgaaga

SEQ ID NO: 3797585 - DNA, 25 bp, Homo sapien
gggttgctgacaatcgtttgggccc

SEQ ID NO: 3797586 - DNA, 25 bp, Homo sapien
agtgggcagataattaccagccatc

SEQ ID NO: 3797587 - DNA, 25 bp, Homo sapien
gactgatttcataggtgtttgccaa

SEQ ID NO: 3797588 - DNA, 25 bp, Homo sapien
ctagtgggcagataattaccagcca

SEQ ID NO: 3797589 - DNA, 25 bp, Homo sapien
gctgactgatttcataggtgtttgc

SEQ ID NO: 3797590 - DNA, 25 bp, Homo sapien
aagaagaatgaaagggtccattggt

SEQ ID NO: 3797591 - DNA, 25 bp, Homo sapien
tcgatactcctgattgttgttggga

SEQ ID NO: 3797592 - DNA, 25 bp, Homo sapien
gttgttgggactttcagagttggtc

SEQ ID NO: 3797593 - DNA, 25 bp, Homo sapien
gttggtcttggagacattggccact

SEQ ID NO: 3797594 - DNA, 25 bp, Homo sapien
cgagatgctcgtgcgcgcagcgcgc

SEQ ID NO: 3797595 - DNA, 25 bp, Homo sapien
aggcggccgagatgctcgtgcgcgc

SEQ ID NO: 3797596 - DNA, 25 bp, Homo sapien
gctgaggcggccgagatgctcgtgc

SEQ ID NO: 3797597 - DNA, 25 bp, Homo sapien
ggccgagatgctcgtgcgcgcagcg

SEQ ID NO: 3797598 - DNA, 25 bp, Homo sapien
ccgccccgttagagccctgctgcag

SEQ ID NO: 3797599 - DNA, 25 bp, Homo sapien
ctccggctgggatagccgccccccg

SEQ ID NO: 3797600 - DNA, 25 bp, Homo sapien
gcgatgcggacagcgcgggacagcc

SEQ ID NO: 3797601 - DNA, 25 bp, Homo sapien
ccccgtgggggcgatgcggacagcg

SEQ ID NO: 3797602 - DNA, 25 bp, Homo sapien
ttgccagtgctgtgaaccagggtgt

SEQ ID NO: 3797603 - DNA, 25 bp, Homo sapien
ccgggaacccggctttgccagtgct

SEQ ID NO: 3797604 - DNA, 25 bp, Homo sapien
tcggaggcgaccgcagcagaaagac

SEQ ID NO: 3797605 - DNA, 25 bp, Homo sapien
ccagggtgtccaggcgctcaccgga

SEQ ID NO: 3797606 - DNA, 25 bp, Homo sapien
tcctggccttatttgccgccgtgcg

SEQ ID NO: 3797607 - DNA, 25 bp, Homo sapien
gccgtgcgctctcggaacgggtggc

SEQ ID NO: 3797608 - DNA, 25 bp, Homo sapien
gactgcggggtctgtctcgacccac

SEQ ID NO: 3797609 - DNA, 25 bp, Homo sapien
gagagcgtggttccaacaccacgga

SEQ ID NO: 3797610 - DNA, 25 bp, Homo sapien
tagcaagtgcagaggcatcatcaga

SEQ ID NO: 3797611 - DNA, 25 bp, Homo sapien
taaaataactgtccgtgcttggccc

SEQ ID NO: 3797612 - DNA, 25 bp, Homo sapien
tcctgatggagtagatctagagtgg

SEQ ID NO: 3797613 - DNA, 25 bp, Homo sapien
cagaatcccctatggatctaaaata

SEQ ID NO: 3797614 - DNA, 25 bp, Homo sapien
tttcacccgagatcaaagcttcact

SEQ ID NO: 3797615 - DNA, 25 bp, Homo sapien
tgattgaggcaagcttaaacacagg

SEQ ID NO: 3797616 - DNA, 25 bp, Homo sapien
aagcttcacttttagctgcttcctg

SEQ ID NO: 3797617 - DNA, 25 bp, Homo sapien
taaacacaggaattgctaatctgac

SEQ ID NO: 3797618 - DNA, 25 bp, Homo sapien
tgctaattccttgggtatccttcca

SEQ ID NO: 3797619 - DNA, 25 bp, Homo sapien
ctaattccttgggtatccttccaga

SEQ ID NO: 3797620 - DNA, 25 bp, Homo sapien
aattccttgggtatccttccagaga

SEQ ID NO: 3797621 - DNA, 25 bp, Homo sapien
gattgctaattccttgggtatcctt

SEQ ID NO: 3797622 - DNA, 25 bp, Homo sapien
cagtcacctgtgttccctcgctggc

SEQ ID NO: 3797623 - DNA, 25 bp, Homo sapien
cacctgtgttccctcgctggcggca

SEQ ID NO: 3797624 - DNA, 25 bp, Homo sapien
agtcacctgtgttccctcgctggcg

SEQ ID NO: 3797625 - DNA, 25 bp, Homo sapien
gtcacctgtgttccctcgctggcgg

SEQ ID NO: 3797626 - DNA, 25 bp, Homo sapien
aacttgtagaggtggatcaagtcag

SEQ ID NO: 3797627 - DNA, 25 bp, Homo sapien
ttgtagaggtggatcaagtcaggca

SEQ ID NO: 3797628 - DNA, 25 bp, Homo sapien
gatctctttcaacttgtagaggtgg

SEQ ID NO: 3797629 - DNA, 25 bp, Homo sapien
gctggatctctttcaacttgtagag

SEQ ID NO: 3797630 - DNA, 25 bp, Homo sapien
cactatgcagcgcattttagcatga

SEQ ID NO: 3797631 - DNA, 25 bp, Homo sapien
gaccatcagactcttccactatgca

SEQ ID NO: 3797632 - DNA, 25 bp, Homo sapien
ccaacagggaccacttcagggtgag

SEQ ID NO: 3797633 - DNA, 25 bp, Homo sapien
tccaaccagtatcaagaccatcaga

SEQ ID NO: 3797634 - DNA, 25 bp, Homo sapien
ggcccttgcttcctggtgggcaggt

SEQ ID NO: 3797635 - DNA, 25 bp, Homo sapien
cccttgcttcctggtgggcaggttc

SEQ ID NO: 3797636 - DNA, 25 bp, Homo sapien
tcccactatggtcaagcctcttcat

SEQ ID NO: 3797637 - DNA, 25 bp, Homo sapien
gcccttgcttcctggtgggcaggtt

SEQ ID NO: 3797638 - DNA, 25 bp, Homo sapien
gagcttgtcttgtgagggaaccact

SEQ ID NO: 3797639 - DNA, 25 bp, Homo sapien
cttgtcttgtgagggaaccactgtc

SEQ ID NO: 3797640 - DNA, 25 bp, Homo sapien
ctgagcttgtcttgtgagggaacca

SEQ ID NO: 3797641 - DNA, 25 bp, Homo sapien
tgtgtgtactggaaactcaaccctg

SEQ ID NO: 3797642 - DNA, 25 bp, Homo sapien
cacttctccaggatcagagcatcag

SEQ ID NO: 3797643 - DNA, 25 bp, Homo sapien
tccaggatcagagcatcagtggcaa

SEQ ID NO: 3797644 - DNA, 25 bp, Homo sapien
tctccaggatcagagcatcagtggc

SEQ ID NO: 3797645 - DNA, 25 bp, Homo sapien
cttctccaggatcagagcatcagtg

SEQ ID NO: 3797646 - DNA, 25 bp, Homo sapien
gggcccaggtctctccagaactgct

SEQ ID NO: 3797647 - DNA, 25 bp, Homo sapien
cagaaagtcaaaatgcaggggccca

SEQ ID NO: 3797648 - DNA, 25 bp, Homo sapien
caggggcagaaagtcaaaatgcagg

SEQ ID NO: 3797649 - DNA, 25 bp, Homo sapien
ggcccaggtctctccagaactgctt

SEQ ID NO: 3797650 - DNA, 25 bp, Homo sapien
tcatggcggcacagttctgcatgtg

SEQ ID NO: 3797651 - DNA, 25 bp, Homo sapien
atggcggcacagttctgcatgtggg

SEQ ID NO: 3797652 - DNA, 25 bp, Homo sapien
ggcggcacagttctgcatgtggggg

SEQ ID NO: 3797653 - DNA, 25 bp, Homo sapien
catggcggcacagttctgcatgtgg

SEQ ID NO: 3797654 - DNA, 25 bp, Homo sapien
tataaatacccggcacttataatta

SEQ ID NO: 3797655 - DNA, 25 bp, Homo sapien
aatacccggcacttataattagcct

SEQ ID NO: 3797656 - DNA, 25 bp, Homo sapien
ataaatacccggcacttataattag

SEQ ID NO: 3797657 - DNA, 25 bp, Homo sapien
taaatacccggcacttataattagc

SEQ ID NO: 3797658 - DNA, 25 bp, Homo sapien
taacttcggcattgctgaggaggct

SEQ ID NO: 3797659 - DNA, 25 bp, Homo sapien
tgaggaggctacctgggattcccct

SEQ ID NO: 3797660 - DNA, 25 bp, Homo sapien
caggtgcaaggctacatctggcagg

SEQ ID NO: 3797661 - DNA, 25 bp, Homo sapien
gctgctaagctgaaaataacttcgg

SEQ ID NO: 3797662 - DNA, 25 bp, Homo sapien
tagtttgttggaccagagatgctct

SEQ ID NO: 3797663 - DNA, 25 bp, Homo sapien
ctagtttgttggaccagagatgctc

SEQ ID NO: 3797664 - DNA, 25 bp, Homo sapien
tcaagaggacagttcctaaccgtgt

SEQ ID NO: 3797665 - DNA, 25 bp, Homo sapien
aagatgagaggtttcacatcacacc

SEQ ID NO: 3797666 - DNA, 25 bp, Homo sapien
tgcatgctgttcaccacctcactga

SEQ ID NO: 3797667 - DNA, 25 bp, Homo sapien
tcacatcacaccacacatgtcgtgg

SEQ ID NO: 3797668 - DNA, 25 bp, Homo sapien
ttgaccatggggtagagcctcttcc

SEQ ID NO: 3797669 - DNA, 25 bp, Homo sapien
tcttccctcaattgagaaggagtgg

SEQ ID NO: 3797670 - DNA, 25 bp, Homo sapien
agcctttggtgtagcagagacccgg

SEQ ID NO: 3797671 - DNA, 25 bp, Homo sapien
gagagcctttggtgtagcagagacc

SEQ ID NO: 3797672 - DNA, 25 bp, Homo sapien
tcctcgtttcctgccggtcagtgga

SEQ ID NO: 3797673 - DNA, 25 bp, Homo sapien
ggctaccgcctgcactcctcgtttc

SEQ ID NO: 3797674 - DNA, 25 bp, Homo sapien
gtcagtggagtctttgccgaccagc

SEQ ID NO: 3797675 - DNA, 25 bp, Homo sapien
cctgccggtcagtggagtctttgcc

SEQ ID NO: 3797676 - DNA, 25 bp, Homo sapien
tctacacgtttgtctgagtggctct

SEQ ID NO: 3797677 - DNA, 25 bp, Homo sapien
taaagatgccaaacaggtctacacg

SEQ ID NO: 3797678 - DNA, 25 bp, Homo sapien
gagtggctctggtgttctttcagac

SEQ ID NO: 3797679 - DNA, 25 bp, Homo sapien
ccatttgggcccaggatgagtaatt

SEQ ID NO: 3797680 - DNA, 25 bp, Homo sapien
tgcacagggcaagagctccataaat

SEQ ID NO: 3797681 - DNA, 25 bp, Homo sapien
ctgcacagggcaagagctccataaa

SEQ ID NO: 3797682 - DNA, 25 bp, Homo sapien
acagggcaagagctccataaatgct

SEQ ID NO: 3797683 - DNA, 25 bp, Homo sapien
gcacagggcaagagctccataaatg

SEQ ID NO: 3797684 - DNA, 25 bp, Homo sapien
ttcagggtccgcctgctccccttca

SEQ ID NO: 3797685 - DNA, 25 bp, Homo sapien
tccttcagggtccgcctgctcccct

SEQ ID NO: 3797686 - DNA, 25 bp, Homo sapien
gggtccgcctgctccccttcaaggc

SEQ ID NO: 3797687 - DNA, 25 bp, Homo sapien
gctccccttcaaggccagcaacgtt

SEQ ID NO: 3797688 - DNA, 25 bp, Homo sapien
actctcacctccacagtttgggacg

SEQ ID NO: 3797689 - DNA, 25 bp, Homo sapien
acctccacagtttgggacgagtgcc

SEQ ID NO: 3797690 - DNA, 25 bp, Homo sapien
atcgacacatgtccagcactactct

SEQ ID NO: 3797691 - DNA, 25 bp, Homo sapien
caaatatcgagatgaacgttctggc

SEQ ID NO: 3797692 - DNA, 25 bp, Homo sapien
aagtggcatattttagggtagcatg

SEQ ID NO: 3797693 - DNA, 25 bp, Homo sapien
gaagagtagaattgttcctgggaag

SEQ ID NO: 3797694 - DNA, 25 bp, Homo sapien
gctcttcacttggaatacaggcaaa

SEQ ID NO: 3797695 - DNA, 25 bp, Homo sapien
gggatttatgacaattgagtttctt

SEQ ID NO: 3797696 - DNA, 25 bp, Homo sapien
tttgatggcgcgaaacctgtagagc

SEQ ID NO: 3797697 - DNA, 25 bp, Homo sapien
tagagcaggcaagcgagcttacaga

SEQ ID NO: 3797698 - DNA, 25 bp, Homo sapien
ttttattaggtgagcaccagcccag

SEQ ID NO: 3797699 - DNA, 25 bp, Homo sapien
ttgagtgagtcagcctagtacagga

SEQ ID NO: 3797700 - DNA, 25 bp, Homo sapien
acaattttagttcactgcgacctct

SEQ ID NO: 3797701 - DNA, 25 bp, Homo sapien
acaaggtctcactcgatcacccacg

SEQ ID NO: 3797702 - DNA, 25 bp, Homo sapien
gtggcacaattttagttcactgcga

SEQ ID NO: 3797703 - DNA, 25 bp, Homo sapien
ggcagtagttatccttatattcctt

SEQ ID NO: 3797704 - DNA, 25 bp, Homo sapien
cacctaggacgtggaatctttcggt

SEQ ID NO: 3797705 - DNA, 25 bp, Homo sapien
tggagcagtgactggccaacgagct

SEQ ID NO: 3797706 - DNA, 25 bp, Homo sapien
gactcttcgactcatatcggctgga

SEQ ID NO: 3797707 - DNA, 25 bp, Homo sapien
tggaaggccctattgagacctctgg

SEQ ID NO: 3797708 - DNA, 25 bp, Homo sapien
gagcgtcctgcactacaaacatggg

SEQ ID NO: 3797709 - DNA, 25 bp, Homo sapien
gaaacacagggttatgccaggcatg

SEQ ID NO: 3797710 - DNA, 25 bp, Homo sapien
gatactttgcaaggagacactgtgg

SEQ ID NO: 3797711 - DNA, 25 bp, Homo sapien
tatactgctctaggctgactctggg

SEQ ID NO: 3797712 - DNA, 25 bp, Homo sapien
ccccagctgattatggaccaatggc

SEQ ID NO: 3797713 - DNA, 25 bp, Homo sapien
aatggcagcgcgaatatgcggcagc

SEQ ID NO: 3797714 - DNA, 25 bp, Homo sapien
gctgaagtaggtctccctacgccca

SEQ ID NO: 3797715 - DNA, 25 bp, Homo sapien
ttaacaatgctggtccggccaggac

SEQ ID NO: 3797716 - DNA, 25 bp, Homo sapien
agagaggcgaccgacgctcctagag

SEQ ID NO: 3797717 - DNA, 25 bp, Homo sapien
gccccgcggacgcttttcagtcagg

SEQ ID NO: 3797718 - DNA, 25 bp, Homo sapien
gtcagggcagcttcgccgcaaacgt

SEQ ID NO: 3797719 - DNA, 25 bp, Homo sapien
ctgcgaaaacggtggagacgcgccc

SEQ ID NO: 3797720 - DNA, 25 bp, Homo sapien
gaggccgcacaccactcccgcttca

SEQ ID NO: 3797721 - DNA, 25 bp, Homo sapien
taaccccagtgccgcccggacctga

SEQ ID NO: 3797722 - DNA, 25 bp, Homo sapien
cctccgcagtccctaaccccagtgc

SEQ ID NO: 3797723 - DNA, 25 bp, Homo sapien
aacacgcaccacttccctccgcagt

SEQ ID NO: 3797724 - DNA, 25 bp, Homo sapien
tctgaaagcattccggacaagagcg

SEQ ID NO: 3797725 - DNA, 25 bp, Homo sapien
ccattgtgtcgtaaaggaaggaaca

SEQ ID NO: 3797726 - DNA, 25 bp, Homo sapien
tcagaggtacgggatttcagcattt

SEQ ID NO: 3797727 - DNA, 25 bp, Homo sapien
tccttacaccggcaagctcagaggt

SEQ ID NO: 3797728 - DNA, 25 bp, Homo sapien
gctgaattcagtgttattagtcctt

SEQ ID NO: 3797729 - DNA, 25 bp, Homo sapien
agttatgtcgcaggtcatttactgg

SEQ ID NO: 3797730 - DNA, 25 bp, Homo sapien
tgttattagtccttcattcagatgc

SEQ ID NO: 3797731 - DNA, 25 bp, Homo sapien
gttttgcaaatagttatgtcgcagg

SEQ ID NO: 3797732 - DNA, 25 bp, Homo sapien
taagatcggagtcaacacttctaca

SEQ ID NO: 3797733 - DNA, 25 bp, Homo sapien
aaatttgattaagatcggagtcaac

SEQ ID NO: 3797734 - DNA, 25 bp, Homo sapien
caaacgtattgcagaataaacgagc

SEQ ID NO: 3797735 - DNA, 25 bp, Homo sapien
aacacttctacaaacgtattgcaga

SEQ ID NO: 3797736 - DNA, 25 bp, Homo sapien
cagggatcatgcaatagtttcgtac

SEQ ID NO: 3797737 - DNA, 25 bp, Homo sapien
tttccaataaggcactggctcatgt

SEQ ID NO: 3797738 - DNA, 25 bp, Homo sapien
tgtgcacactcactataagagagct

SEQ ID NO: 3797739 - DNA, 25 bp, Homo sapien
tcaagataccaagtagcaaggaaac

SEQ ID NO: 3797740 - DNA, 25 bp, Homo sapien
tgaccatgaagtaatgccaagtgtg

SEQ ID NO: 3797741 - DNA, 25 bp, Homo sapien
caggtggcagttaatctcataatga

SEQ ID NO: 3797742 - DNA, 25 bp, Homo sapien
aacagttattatgaagcgacagggc

SEQ ID NO: 3797743 - DNA, 25 bp, Homo sapien
cagcactcccgaatatctaatggca

SEQ ID NO: 3797744 - DNA, 25 bp, Homo sapien
agccctactttagttgagcccacaa

SEQ ID NO: 3797745 - DNA, 25 bp, Homo sapien
ctaatttctcacttaaagctgtaaa

SEQ ID NO: 3797746 - DNA, 25 bp, Homo sapien
tctcacttaaagctgtaaattttcc

SEQ ID NO: 3797747 - DNA, 25 bp, Homo sapien
tgagcccacaagttttgaaaaactc

SEQ ID NO: 3797748 - DNA, 25 bp, Homo sapien
aattgtttttcatagcgatggggtc

SEQ ID NO: 3797749 - DNA, 25 bp, Homo sapien
tgagctacaatgccctaccctcctt

SEQ ID NO: 3797750 - DNA, 25 bp, Homo sapien
tactggcgcatgctactgcacccag

SEQ ID NO: 3797751 - DNA, 25 bp, Homo sapien
ccttctgctttctttgcgtttgctt

SEQ ID NO: 3797752 - DNA, 25 bp, Homo sapien
ccacagcgcctggtctttttaaaat

SEQ ID NO: 3797753 - DNA, 25 bp, Homo sapien
ggagtgcaatgcaagatctccgctc

SEQ ID NO: 3797754 - DNA, 25 bp, Homo sapien
tgagtagctgggagccacagcgcct

SEQ ID NO: 3797755 - DNA, 25 bp, Homo sapien
tgcaatgcaagatctccgctcaccg

SEQ ID NO: 3797756 - DNA, 25 bp, Homo sapien
cagaagtaatgtcccctcattcatt

SEQ ID NO: 3797757 - DNA, 25 bp, Homo sapien
gaagggacactggatcttatcaatg

SEQ ID NO: 3797758 - DNA, 25 bp, Homo sapien
tcttcagtcagttctggcagttttg

SEQ ID NO: 3797759 - DNA, 25 bp, Homo sapien
ccttttttgtgctcagtttagctga

SEQ ID NO: 3797760 - DNA, 25 bp, Homo sapien
gggcaatacaaggaaatcttgtcac

SEQ ID NO: 3797761 - DNA, 25 bp, Homo sapien
tgggcaatacaaggaaatcttgtca

SEQ ID NO: 3797762 - DNA, 25 bp, Homo sapien
ctgggcaatacaaggaaatcttgtc

SEQ ID NO: 3797763 - DNA, 25 bp, Homo sapien
gaagaaactaggcagtatctcacac

SEQ ID NO: 3797764 - DNA, 25 bp, Homo sapien
tgtatgtggtaccacagaagagtcc

SEQ ID NO: 3797765 - DNA, 25 bp, Homo sapien
aagctggagggatcatactagacaa

SEQ ID NO: 3797766 - DNA, 25 bp, Homo sapien
cagtacagtattgggataaaaacag

SEQ ID NO: 3797767 - DNA, 25 bp, Homo sapien
tcatagtagccacaaaggatgcttc

SEQ ID NO: 3797768 - DNA, 25 bp, Homo sapien
tcagcagtgaagcaattagggcaca

SEQ ID NO: 3797769 - DNA, 25 bp, Homo sapien
tattggcctacaaagttgctcatag

SEQ ID NO: 3797770 - DNA, 25 bp, Homo sapien
ttgtatgtgcctaggaatggatcca

SEQ ID NO: 3797771 - DNA, 25 bp, Homo sapien
gggacagatcaagaagctgtcacag

SEQ ID NO: 3797772 - DNA, 25 bp, Homo sapien
cagatcaagaagctgtcacagacgg

SEQ ID NO: 3797773 - DNA, 25 bp, Homo sapien
gaagctgtcacagacggcggaagaa

SEQ ID NO: 3797774 - DNA, 25 bp, Homo sapien
gatcaagaagctgtcacagacggcg

SEQ ID NO: 3797775 - DNA, 25 bp, Homo sapien
gccagatttgattttagccaatcta

SEQ ID NO: 3797776 - DNA, 25 bp, Homo sapien
tttaccagtttgcatccatacagtc

SEQ ID NO: 3797777 - DNA, 25 bp, Homo sapien
tgttgatgttctgacacaacaatgc

SEQ ID NO: 3797778 - DNA, 25 bp, Homo sapien
agtcaatacgtaagagttaccactg

SEQ ID NO: 3797779 - DNA, 25 bp, Homo sapien
tggagtgcagcatggctcatggcag

SEQ ID NO: 3797780 - DNA, 25 bp, Homo sapien
gacactgccgtgatctgtgattgca

SEQ ID NO: 3797781 - DNA, 25 bp, Homo sapien
gcccaggaattagacactgccgtga

SEQ ID NO: 3797782 - DNA, 25 bp, Homo sapien
gaattagacactgccgtgatctgtg

SEQ ID NO: 3797783 - DNA, 25 bp, Homo sapien
ccaggaattagacactgccgtgatc

SEQ ID NO: 3797784 - DNA, 25 bp, Homo sapien
gttttcagcgcttcaacattccttg

SEQ ID NO: 3797785 - DNA, 25 bp, Homo sapien
gcttccggcaacttaggggcattgt

SEQ ID NO: 3797786 - DNA, 25 bp, Homo sapien
cgtttacttctatctggacttgcca

SEQ ID NO: 3797787 - DNA, 25 bp, Homo sapien
tattcagcatctctacttgcttccg

SEQ ID NO: 3797788 - DNA, 25 bp, Homo sapien
ttcagtcgtcctagttatgacacta

SEQ ID NO: 3797789 - DNA, 25 bp, Homo sapien
ttggttatttcagtcgtcctagtta

SEQ ID NO: 3797790 - DNA, 25 bp, Homo sapien
cagaagggctacatttggttatttc

SEQ ID NO: 3797791 - DNA, 25 bp, Homo sapien
tttcagaagggctacatttggttat

SEQ ID NO: 3797792 - DNA, 25 bp, Homo sapien
tcaatacactgggtggacagcaact

SEQ ID NO: 3797793 - DNA, 25 bp, Homo sapien
cctcatgctcaaaaagggatcttgt

SEQ ID NO: 3797794 - DNA, 25 bp, Homo sapien
tggtcagttttcttgtcacccacgg

SEQ ID NO: 3797795 - DNA, 25 bp, Homo sapien
gcaactggactttagactacaagcc

SEQ ID NO: 3797796 - DNA, 25 bp, Homo sapien
tttgctctgaagttttcatgcgttt

SEQ ID NO: 3797797 - DNA, 25 bp, Homo sapien
catgcgtttaacattttcctcgttt

SEQ ID NO: 3797798 - DNA, 25 bp, Homo sapien
aacatcctcttcttttgataatggc

SEQ ID NO: 3797799 - DNA, 25 bp, Homo sapien
tcctcgttttctgaaaacatcctct

SEQ ID NO: 3797800 - DNA, 25 bp, Homo sapien
aggaatgctgtttgcctttccaaac

SEQ ID NO: 3797801 - DNA, 25 bp, Homo sapien
ttccaggaatgctgtttgcctttcc

SEQ ID NO: 3797802 - DNA, 25 bp, Homo sapien
ccaggaatgctgtttgcctttccaa

SEQ ID NO: 3797803 - DNA, 25 bp, Homo sapien
atgctgtttgcctttccaaacttac

SEQ ID NO: 3797804 - DNA, 25 bp, Homo sapien
ctgtcttcccaatgcgttggttcaa

SEQ ID NO: 3797805 - DNA, 25 bp, Homo sapien
tccttcatgcttatttctgcactct

SEQ ID NO: 3797806 - DNA, 25 bp, Homo sapien
agtttatcagctattccttcatgct

SEQ ID NO: 3797807 - DNA, 25 bp, Homo sapien
gatctcctgctgaatcaaatgtctg

SEQ ID NO: 3797808 - DNA, 25 bp, Homo sapien
ccattactggataacatgtttggtt

SEQ ID NO: 3797809 - DNA, 25 bp, Homo sapien
cttagaggctccattactggataac

SEQ ID NO: 3797810 - DNA, 25 bp, Homo sapien
ctggataacatgtttggtttcaaac

SEQ ID NO: 3797811 - DNA, 25 bp, Homo sapien
gaggctccattactggataacatgt

SEQ ID NO: 3797812 - DNA, 25 bp, Homo sapien
cagacagcgagctaaagcatggtgg

SEQ ID NO: 3797813 - DNA, 25 bp, Homo sapien
aagcacaacgggtcaaggaattctc

SEQ ID NO: 3797814 - DNA, 25 bp, Homo sapien
aaattatttcggattgctggcaaga

SEQ ID NO: 3797815 - DNA, 25 bp, Homo sapien
gctgagtatacaagtattcactata

SEQ ID NO: 3797816 - DNA, 25 bp, Homo sapien
cccagcctaggacaagtgaatttta

SEQ ID NO: 3797817 - DNA, 25 bp, Homo sapien
gcccagcctaggacaagtgaatttt

SEQ ID NO: 3797818 - DNA, 25 bp, Homo sapien
caagtgaattttactgataacttta

SEQ ID NO: 3797819 - DNA, 25 bp, Homo sapien
ccagcctaggacaagtgaattttac

SEQ ID NO: 3797820 - DNA, 25 bp, Homo sapien
tcacactgtcactgggctggagtac

SEQ ID NO: 3797821 - DNA, 25 bp, Homo sapien
gagtctcacactgtcactgggctgg

SEQ ID NO: 3797822 - DNA, 25 bp, Homo sapien
ctcacactgtcactgggctggagta

SEQ ID NO: 3797823 - DNA, 25 bp, Homo sapien
gatggagtctcacactgtcactggg

SEQ ID NO: 3797824 - DNA, 25 bp, Homo sapien
ctattaaataggtgagaaaaaagca

SEQ ID NO: 3797825 - DNA, 25 bp, Homo sapien
agcagttgaagggaattttaccaat

SEQ ID NO: 3797826 - DNA, 25 bp, Homo sapien
gtgagaaaaaagcagttgaagggaa

SEQ ID NO: 3797827 - DNA, 25 bp, Homo sapien
tgaagggaattttaccaattgtatc

SEQ ID NO: 3797828 - DNA, 25 bp, Homo sapien
tggactattaactgactcaagattc

SEQ ID NO: 3797829 - DNA, 25 bp, Homo sapien
gaaggctcataattcacagaagact

SEQ ID NO: 3797830 - DNA, 25 bp, Homo sapien
tatccaaaatcatagcctctgaatt

SEQ ID NO: 3797831 - DNA, 25 bp, Homo sapien
cagaagacttttcaattggactatt

SEQ ID NO: 3797832 - DNA, 25 bp, Homo sapien
tatgcatttttgcagaaacacctac

SEQ ID NO: 3797833 - DNA, 25 bp, Homo sapien
aaatttatgcatttttgcagaaaca

SEQ ID NO: 3797834 - DNA, 25 bp, Homo sapien
tttatgcatttttgcagaaacacct

SEQ ID NO: 3797835 - DNA, 25 bp, Homo sapien
tatagatttagataaatttatgcat

SEQ ID NO: 3797836 - DNA, 25 bp, Homo sapien
tgtaatatcctaacgtctgatggca

SEQ ID NO: 3797837 - DNA, 25 bp, Homo sapien
ggtctatttgtccagcgcatgccaa

SEQ ID NO: 3797838 - DNA, 25 bp, Homo sapien
cattcttgcattagctaaggcatcc

SEQ ID NO: 3797839 - DNA, 25 bp, Homo sapien
tacatacatgggtttccggactctc

SEQ ID NO: 3797840 - DNA, 25 bp, Homo sapien
tatagacacggacaacagtggcact

SEQ ID NO: 3797841 - DNA, 25 bp, Homo sapien
taaaatgtacaacgcttggatggca

SEQ ID NO: 3797842 - DNA, 25 bp, Homo sapien
gatggagccccacacttgagcaatt

SEQ ID NO: 3797843 - DNA, 25 bp, Homo sapien
gcaggatgcctcaccatgtagagct

SEQ ID NO: 3797844 - DNA, 25 bp, Homo sapien
tggtctaacgggaattccactagat

SEQ ID NO: 3797845 - DNA, 25 bp, Homo sapien
tattcaactaactgctaccaatgaa

SEQ ID NO: 3797846 - DNA, 25 bp, Homo sapien
tgtctgtatataaagctgttaatgc

SEQ ID NO: 3797847 - DNA, 25 bp, Homo sapien
ttgtaaaatggcaaacttatggtct

SEQ ID NO: 3797848 - DNA, 25 bp, Homo sapien
tgtggaccctacctgttacttctga

SEQ ID NO: 3797849 - DNA, 25 bp, Homo sapien
ggcaatagctcttttaggtcgtctg

SEQ ID NO: 3797850 - DNA, 25 bp, Homo sapien
cagtctctgggactaattgagcccc

SEQ ID NO: 3797851 - DNA, 25 bp, Homo sapien
taaagcaataaccatctgtggaccc

SEQ ID NO: 3797852 - DNA, 25 bp, Homo sapien
ctgttggatttgatgtaattggagt

SEQ ID NO: 3797853 - DNA, 25 bp, Homo sapien
caaattaggactttccacagaaatc

SEQ ID NO: 3797854 - DNA, 25 bp, Homo sapien
taattggagttgtcaaattaggact

SEQ ID NO: 3797855 - DNA, 25 bp, Homo sapien
cacagaaatcaacataacatcatca

SEQ ID NO: 3797856 - DNA, 25 bp, Homo sapien
gcattgggagaattgctagaatttc

SEQ ID NO: 3797857 - DNA, 25 bp, Homo sapien
ctagaatttcctgatgtaatttttc

SEQ ID NO: 3797858 - DNA, 25 bp, Homo sapien
ggagaattgctagaatttcctgatg

SEQ ID NO: 3797859 - DNA, 25 bp, Homo sapien
gaattgctagaatttcctgatgtaa

SEQ ID NO: 3797860 - DNA, 25 bp, Homo sapien
agttggataggccttcttttgtcaa

SEQ ID NO: 3797861 - DNA, 25 bp, Homo sapien
gataggccttcttttgtcaaatcaa

SEQ ID NO: 3797862 - DNA, 25 bp, Homo sapien
tattgcagttggataggccttcttt

SEQ ID NO: 3797863 - DNA, 25 bp, Homo sapien
ctgtattgcagttggataggccttc

SEQ ID NO: 3797864 - DNA, 25 bp, Homo sapien
ttgtcactgtgacggcagttacatg

SEQ ID NO: 3797865 - DNA, 25 bp, Homo sapien
cccagtgcattatgagttgttaccc

SEQ ID NO: 3797866 - DNA, 25 bp, Homo sapien
agttacatgaatctgcacatgagct

SEQ ID NO: 3797867 - DNA, 25 bp, Homo sapien
gatataaacataggcacactcacat

SEQ ID NO: 3797868 - DNA, 25 bp, Homo sapien
gaaaaaagtatgtaccacaggaaga

SEQ ID NO: 3797869 - DNA, 25 bp, Homo sapien
tctctgtgcgtcctcttagctgcta

SEQ ID NO: 3797870 - DNA, 25 bp, Homo sapien
taaatctgtgaaagacgacagacac

SEQ ID NO: 3797871 - DNA, 25 bp, Homo sapien
caatgagaccttataactgatcccc

SEQ ID NO: 3797872 - DNA, 25 bp, Homo sapien
aaaaaactgttgctctaggcattac

SEQ ID NO: 3797873 - DNA, 25 bp, Homo sapien
gttgctctaggcattaccatatata

SEQ ID NO: 3797874 - DNA, 25 bp, Homo sapien
tgttgctctaggcattaccatatat

SEQ ID NO: 3797875 - DNA, 25 bp, Homo sapien
aagaaaaaactgttgctctaggcat

SEQ ID NO: 3797876 - DNA, 25 bp, Homo sapien
gctcctctggaaggaattaggcata

SEQ ID NO: 3797877 - DNA, 25 bp, Homo sapien
tagacattgtgtaactggcaactag

SEQ ID NO: 3797878 - DNA, 25 bp, Homo sapien
gcaaattttctcgttaggccaacaa

SEQ ID NO: 3797879 - DNA, 25 bp, Homo sapien
aactagataggtttacacatgggac

SEQ ID NO: 3797880 - DNA, 25 bp, Homo sapien
agtttgaagcagctttcgaatgtga

SEQ ID NO: 3797881 - DNA, 25 bp, Homo sapien
tgaagcagctttcgaatgtgactcc

SEQ ID NO: 3797882 - DNA, 25 bp, Homo sapien
gcagctttcgaatgtgactccaggg

SEQ ID NO: 3797883 - DNA, 25 bp, Homo sapien
tgagtttgaagcagctttcgaatgt

SEQ ID NO: 3797884 - DNA, 25 bp, Homo sapien
cttcaagagtaacatagctacttcc

SEQ ID NO: 3797885 - DNA, 25 bp, Homo sapien
taaataagtagattaacaacagcac

SEQ ID NO: 3797886 - DNA, 25 bp, Homo sapien
aagagtaacatagctacttcccact

SEQ ID NO: 3797887 - DNA, 25 bp, Homo sapien
taagtagattaacaacagcacacta

SEQ ID NO: 3797888 - DNA, 25 bp, Homo sapien
gcaggtgctcaaaggactcaggaac

SEQ ID NO: 3797889 - DNA, 25 bp, Homo sapien
aggtggcaggtgctcaaaggactca

SEQ ID NO: 3797890 - DNA, 25 bp, Homo sapien
tggcaggtgctcaaaggactcagga

SEQ ID NO: 3797891 - DNA, 25 bp, Homo sapien
ggtggcaggtgctcaaaggactcag

SEQ ID NO: 3797892 - DNA, 25 bp, Homo sapien
tactaattcaggtagtggtgctggt

SEQ ID NO: 3797893 - DNA, 25 bp, Homo sapien
tgaaaacccgtttcactttgagctc

SEQ ID NO: 3797894 - DNA, 25 bp, Homo sapien
actgagataaagtacaggccatggg

SEQ ID NO: 3797895 - DNA, 25 bp, Homo sapien
gcacacttgggattgattttggtta

SEQ ID NO: 3797896 - DNA, 25 bp, Homo sapien
cattgggccccgttcagagtttctt

SEQ ID NO: 3797897 - DNA, 25 bp, Homo sapien
tgcacctcagcaacatgggccaatg

SEQ ID NO: 3797898 - DNA, 25 bp, Homo sapien
gaggtgggcacaagacacatctgag

SEQ ID NO: 3797899 - DNA, 25 bp, Homo sapien
catgtaccagaaaagaatgcccctc

SEQ ID NO: 3797900 - DNA, 25 bp, Homo sapien
acaggggccatgctaatcttctctg

SEQ ID NO: 3797901 - DNA, 25 bp, Homo sapien
gtatatgtgctgccaaagcaagccc

SEQ ID NO: 3797902 - DNA, 25 bp, Homo sapien
tcacgaatttgtgtattattcttgc

SEQ ID NO: 3797903 - DNA, 25 bp, Homo sapien
tatcattccaattttggtatatgtg

SEQ ID NO: 3797904 - DNA, 25 bp, Homo sapien
gagccaaggctgatggtaaagagaa

SEQ ID NO: 3797905 - DNA, 25 bp, Homo sapien
tgctgagatgggtagagagaaatcc

SEQ ID NO: 3797906 - DNA, 25 bp, Homo sapien
gagttcttgcacttctctaaggaaa

SEQ ID NO: 3797907 - DNA, 25 bp, Homo sapien
cattgataggttctgcattgagttc

SEQ ID NO: 3797908 - DNA, 25 bp, Homo sapien
tgcagtcagcacgtggagcagctgc

SEQ ID NO: 3797909 - DNA, 25 bp, Homo sapien
tgtgcagtcagcacgtggagcagct

SEQ ID NO: 3797910 - DNA, 25 bp, Homo sapien
agcaggcggtggctgatcttgtcat

SEQ ID NO: 3797911 - DNA, 25 bp, Homo sapien
tgatcttgtcatcgggagacgagag

SEQ ID NO: 3797912 - DNA, 25 bp, Homo sapien
ccactcactgtgtccggcataaagt

SEQ ID NO: 3797913 - DNA, 25 bp, Homo sapien
tggagaagaacgctcctaaaatgta

SEQ ID NO: 3797914 - DNA, 25 bp, Homo sapien
tgtatgtatccgttcattcatccat

SEQ ID NO: 3797915 - DNA, 25 bp, Homo sapien
aaataaatatttcgtagtcatggag

SEQ ID NO: 3797916 - DNA, 25 bp, Homo sapien
tctggtagtcacgatggaaacaaac

SEQ ID NO: 3797917 - DNA, 25 bp, Homo sapien
tgttgaatgcggtctgaaatgatcc

SEQ ID NO: 3797918 - DNA, 25 bp, Homo sapien
tagatagaatcagccctcacttggt

SEQ ID NO: 3797919 - DNA, 25 bp, Homo sapien
ggattttcccggctggttgccactg

SEQ ID NO: 3797920 - DNA, 25 bp, Homo sapien
ctcagaggacccatccaccattcat

SEQ ID NO: 3797921 - DNA, 25 bp, Homo sapien
tcagggtgtggggtacagcctcctt

SEQ ID NO: 3797922 - DNA, 25 bp, Homo sapien
ttcagggtgtggggtacagcctcct

SEQ ID NO: 3797923 - DNA, 25 bp, Homo sapien
cagggtgtggggtacagcctccttc

SEQ ID NO: 3797924 - DNA, 25 bp, Homo sapien
tctctccagttctgatgcccggagg

SEQ ID NO: 3797925 - DNA, 25 bp, Homo sapien
tccagttctgatgcccggaggtttc

SEQ ID NO: 3797926 - DNA, 25 bp, Homo sapien
actctctccagttctgatgcccgga

SEQ ID NO: 3797927 - DNA, 25 bp, Homo sapien
tctccagttctgatgcccggaggtt

SEQ ID NO: 3797928 - DNA, 25 bp, Homo sapien
tggtgacacacacgccccacctctt

SEQ ID NO: 3797929 - DNA, 25 bp, Homo sapien
gaactgacttcgtggttggagacca

SEQ ID NO: 3797930 - DNA, 25 bp, Homo sapien
gtgaaaatggtgacacacacgcccc

SEQ ID NO: 3797931 - DNA, 25 bp, Homo sapien
gaagtggagaactgacttcgtggtt

SEQ ID NO: 3797932 - DNA, 25 bp, Homo sapien
catgctctgtgtactcagcgaacac

SEQ ID NO: 3797933 - DNA, 25 bp, Homo sapien
tgtactcagcgaacacactgatgga

SEQ ID NO: 3797934 - DNA, 25 bp, Homo sapien
tgcaaagagcctcgcatgctctgtg

SEQ ID NO: 3797935 - DNA, 25 bp, Homo sapien
cctgcaaagagcctcgcatgctctg

SEQ ID NO: 3797936 - DNA, 25 bp, Homo sapien
cagcccccggaattggtgacagtaa

SEQ ID NO: 3797937 - DNA, 25 bp, Homo sapien
tgacagtaacgggagggccgaggtg

SEQ ID NO: 3797938 - DNA, 25 bp, Homo sapien
cctccacttactggaccgggagcag

SEQ ID NO: 3797939 - DNA, 25 bp, Homo sapien
cgggatcgtgtacgcccgggcagca

SEQ ID NO: 3797940 - DNA, 25 bp, Homo sapien
cgggtgagttgtgggcgcacccagg

SEQ ID NO: 3797941 - DNA, 25 bp, Homo sapien
cgccagcgccgggtgagttgtgggc

SEQ ID NO: 3797942 - DNA, 25 bp, Homo sapien
agcgccgggtgagttgtgggcgcac

SEQ ID NO: 3797943 - DNA, 25 bp, Homo sapien
cccagccagtccgtcgatccagctg

SEQ ID NO: 3797944 - DNA, 25 bp, Homo sapien
acaccagaagcaggaatacaagcag

SEQ ID NO: 3797945 - DNA, 25 bp, Homo sapien
gaatacaagcaggtatgacgcaggt

SEQ ID NO: 3797946 - DNA, 25 bp, Homo sapien
ttatcgaaacaccagaagcaggaat

SEQ ID NO: 3797947 - DNA, 25 bp, Homo sapien
gacgcaggtttctgtctcccatctt

SEQ ID NO: 3797948 - DNA, 25 bp, Homo sapien
tactgttcattcttattgcatttgc

SEQ ID NO: 3797949 - DNA, 25 bp, Homo sapien
tgtactgttcattcttattgcattt

SEQ ID NO: 3797950 - DNA, 25 bp, Homo sapien
gttcattcttattgcatttgcagga

SEQ ID NO: 3797951 - DNA, 25 bp, Homo sapien
ttatgacagcagtttgtaggtgttt

SEQ ID NO: 3797952 - DNA, 25 bp, Homo sapien
tcatgtgatggctttaggagacacg

SEQ ID NO: 3797953 - DNA, 25 bp, Homo sapien
tagtcaaacctttgtcataagtcaa

SEQ ID NO: 3797954 - DNA, 25 bp, Homo sapien
cgaaacagcctaaaacagcatggtt

SEQ ID NO: 3797955 - DNA, 25 bp, Homo sapien
cctttggtgcttagtcaaacctttg

SEQ ID NO: 3797956 - DNA, 25 bp, Homo sapien
gtttacacacttaggctggttattc

SEQ ID NO: 3797957 - DNA, 25 bp, Homo sapien
gtgccttggtggcaaaatccgacac

SEQ ID NO: 3797958 - DNA, 25 bp, Homo sapien
gaccatgcatattccagcagtttac

SEQ ID NO: 3797959 - DNA, 25 bp, Homo sapien
caatgccaagttgaccatgcatatt

SEQ ID NO: 3797960 - DNA, 25 bp, Homo sapien
agcgggggacaaggaattccttcag

SEQ ID NO: 3797961 - DNA, 25 bp, Homo sapien
acccacatgggtgaaatgaagctgc

SEQ ID NO: 3797962 - DNA, 25 bp, Homo sapien
tgctgaaggtgggagcgggggacaa

SEQ ID NO: 3797963 - DNA, 25 bp, Homo sapien
gccacacccacatgggtgaaatgaa

SEQ ID NO: 3797964 - DNA, 25 bp, Homo sapien
tctctgaaaggcacggagtgcgcac

SEQ ID NO: 3797965 - DNA, 25 bp, Homo sapien
aggaatccttcagcggatcccagga

SEQ ID NO: 3797966 - DNA, 25 bp, Homo sapien
ccaggaatccttcagcggatcccag

SEQ ID NO: 3797967 - DNA, 25 bp, Homo sapien
cacggagtgcgcacagcctggctga

SEQ ID NO: 3797968 - DNA, 25 bp, Homo sapien
atgtcatgagcacgcattcctcctg

SEQ ID NO: 3797969 - DNA, 25 bp, Homo sapien
atgagcacgcattcctcctggactg

SEQ ID NO: 3797970 - DNA, 25 bp, Homo sapien
gtcatgagcacgcattcctcctgga

SEQ ID NO: 3797971 - DNA, 25 bp, Homo sapien
tcatgtcatgagcacgcattcctcc

SEQ ID NO: 3797972 - DNA, 25 bp, Homo sapien
ggttctgtgaacatcgcctctgctc

SEQ ID NO: 3797973 - DNA, 25 bp, Homo sapien
gagcccctctccgtctgtatttgtt

SEQ ID NO: 3797974 - DNA, 25 bp, Homo sapien
gaagtattcctttcaccacggtatg

SEQ ID NO: 3797975 - DNA, 25 bp, Homo sapien
cacggtatgtcctggatttcaaaca

SEQ ID NO: 3797976 - DNA, 25 bp, Homo sapien
catggtctccggttggcaatgaaaa

SEQ ID NO: 3797977 - DNA, 25 bp, Homo sapien
tagatagagctgatgaacattgtga

SEQ ID NO: 3797978 - DNA, 25 bp, Homo sapien
cactgtgaatactcctgaatgcttt

SEQ ID NO: 3797979 - DNA, 25 bp, Homo sapien
gcaactgcccaagggtacatggtct

SEQ ID NO: 3797980 - DNA, 25 bp, Homo sapien
aggctggtctttgaactcctgagat

SEQ ID NO: 3797981 - DNA, 25 bp, Homo sapien
gctggtctttgaactcctgagatca

SEQ ID NO: 3797982 - DNA, 25 bp, Homo sapien
tggtctttgaactcctgagatcaag

SEQ ID NO: 3797983 - DNA, 25 bp, Homo sapien
ggtctttgaactcctgagatcaagt

SEQ ID NO: 3797984 - DNA, 25 bp, Homo sapien
ttaccatattcgtgtgccacctgga

SEQ ID NO: 3797985 - DNA, 25 bp, Homo sapien
ccatattcgtgtgccacctggacca

SEQ ID NO: 3797986 - DNA, 25 bp, Homo sapien
ttttaccatattcgtgtgccacctg

SEQ ID NO: 3797987 - DNA, 25 bp, Homo sapien
caattttaccatattcgtgtgccac

SEQ ID NO: 3797988 - DNA, 25 bp, Homo sapien
gagttcctggtttgttgatgttgtt

SEQ ID NO: 3797989 - DNA, 25 bp, Homo sapien
cacagttggaaatgattgagttcct

SEQ ID NO: 3797990 - DNA, 25 bp, Homo sapien
ttcctcttggcccttcacacagttg

SEQ ID NO: 3797991 - DNA, 25 bp, Homo sapien
cctcttggcccttcacacagttgga

SEQ ID NO: 3797992 - DNA, 25 bp, Homo sapien
tctagaaggtccgtcgtgtgtctcc

SEQ ID NO: 3797993 - DNA, 25 bp, Homo sapien
tattctcattcgaggcaggaaggca

SEQ ID NO: 3797994 - DNA, 25 bp, Homo sapien
tcaacttggtgccagaagggaccca

SEQ ID NO: 3797995 - DNA, 25 bp, Homo sapien
tgtgttctcctgttcccaaggaggt

SEQ ID NO: 3797996 - DNA, 25 bp, Homo sapien
cacttcaccgtcaacacccaaaact

SEQ ID NO: 3797997 - DNA, 25 bp, Homo sapien
aaattctaattaaactcttccatgt

SEQ ID NO: 3797998 - DNA, 25 bp, Homo sapien
tcaggcaaaaagcattcccacttca

SEQ ID NO: 3797999 - DNA, 25 bp, Homo sapien
tgaaattctaattaaactcttccat

SEQ ID NO: 3798000 - DNA, 25 bp, Homo sapien
cgtcattgcacttcatctataagaa

SEQ ID NO: 3798001 - DNA, 25 bp, Homo sapien
aatgatgaccaatggtatgaaaaac

SEQ ID NO: 3798002 - DNA, 25 bp, Homo sapien
gaaaaaccgtcattgcacttcatct

SEQ ID NO: 3798003 - DNA, 25 bp, Homo sapien
ctacatggactataatgatgaccaa

SEQ ID NO: 3798004 - DNA, 25 bp, Homo sapien
cttcatcactatggtttcattctcc

SEQ ID NO: 3798005 - DNA, 25 bp, Homo sapien
catcactatggtttcattctcctga

SEQ ID NO: 3798006 - DNA, 25 bp, Homo sapien
atcactatggtttcattctcctgat

SEQ ID NO: 3798007 - DNA, 25 bp, Homo sapien
tcatcactatggtttcattctcctg

SEQ ID NO: 3798008 - DNA, 25 bp, Homo sapien
gggagcaggatcaggaatcctgctc

SEQ ID NO: 3798009 - DNA, 25 bp, Homo sapien
gagcgtccaaagtgtgggaggccca

SEQ ID NO: 3798010 - DNA, 25 bp, Homo sapien
ggaatcctgctcctagggacagtga

SEQ ID NO: 3798011 - DNA, 25 bp, Homo sapien
tagggacagtgaggtctctgcctct

SEQ ID NO: 3798012 - DNA, 25 bp, Homo sapien
cacagtctggtcgggagaagaggac

SEQ ID NO: 3798013 - DNA, 25 bp, Homo sapien
acagtctggtcgggagaagaggacc

SEQ ID NO: 3798014 - DNA, 25 bp, Homo sapien
cagtctggtcgggagaagaggacca

SEQ ID NO: 3798015 - DNA, 25 bp, Homo sapien
gtacatttccgccttgtgggcacaa

SEQ ID NO: 3798016 - DNA, 25 bp, Homo sapien
gaccgcgcgaaataagtctcggaaa

SEQ ID NO: 3798017 - DNA, 25 bp, Homo sapien
tgggcacaatctgattctccgaccg

SEQ ID NO: 3798018 - DNA, 25 bp, Homo sapien
tcgtggtcaccggaacccgctgtcg

SEQ ID NO: 3798019 - DNA, 25 bp, Homo sapien
cgctggttggggcatccctgacatg

SEQ ID NO: 3798020 - DNA, 25 bp, Homo sapien
ctggttggggcatccctgacatgaa

SEQ ID NO: 3798021 - DNA, 25 bp, Homo sapien
agccgctggttggggcatccctgac

SEQ ID NO: 3798022 - DNA, 25 bp, Homo sapien
tggttggggcatccctgacatgaag

SEQ ID NO: 3798023 - DNA, 25 bp, Homo sapien
tcatcctctgctaggccatgggcaa

SEQ ID NO: 3798024 - DNA, 25 bp, Homo sapien
atgtgcttttcccaacaccgccttt

SEQ ID NO: 3798025 - DNA, 25 bp, Homo sapien
cgcctttcccagacaataccaagat

SEQ ID NO: 3798026 - DNA, 25 bp, Homo sapien
gcaaggtgggcgctgaatgtgcttt

SEQ ID NO: 3798027 - DNA, 25 bp, Homo sapien
tgcaagtggtgagatgaaagcccat

SEQ ID NO: 3798028 - DNA, 25 bp, Homo sapien
cactaggccagtacagatttgaccc

SEQ ID NO: 3798029 - DNA, 25 bp, Homo sapien
caaagtctagacaggcatgcagcaa

SEQ ID NO: 3798030 - DNA, 25 bp, Homo sapien
aatggcaagagatcgctgactcaca

SEQ ID NO: 3798031 - DNA, 25 bp, Homo sapien
gaatcgatggcccacatatatcgat

SEQ ID NO: 3798032 - DNA, 25 bp, Homo sapien
gatggcccacatatatcgatgtcta

SEQ ID NO: 3798033 - DNA, 25 bp, Homo sapien
atcttgggaatcgatggcccacata

SEQ ID NO: 3798034 - DNA, 25 bp, Homo sapien
cacatatatcgatgtctagaagagc

SEQ ID NO: 3798035 - DNA, 25 bp, Homo sapien
accagcctgagccactctggtgaac

SEQ ID NO: 3798036 - DNA, 25 bp, Homo sapien
ctatggacttcagggccaaatctgg

SEQ ID NO: 3798037 - DNA, 25 bp, Homo sapien
tgtgctacaacagcaaggaatgtag

SEQ ID NO: 3798038 - DNA, 25 bp, Homo sapien
cctctgtgcctcgaaaagtacccta

SEQ ID NO: 3798039 - DNA, 25 bp, Homo sapien
catgctgaaaatctttaccgtccca

SEQ ID NO: 3798040 - DNA, 25 bp, Homo sapien
catgggctgcagtgacggcaatgac

SEQ ID NO: 3798041 - DNA, 25 bp, Homo sapien
tttactcaaaaccacacagtgaggc

SEQ ID NO: 3798042 - DNA, 25 bp, Homo sapien
ttttcaggacaaaactaccatgtga

SEQ ID NO: 3798043 - DNA, 25 bp, Homo sapien
ggtgagggcaagacacgctttactc

SEQ ID NO: 3798044 - DNA, 25 bp, Homo sapien
ttgggtcccctccagataacagcat

SEQ ID NO: 3798045 - DNA, 25 bp, Homo sapien
aggaagcccactgacatcaccccca

SEQ ID NO: 3798046 - DNA, 25 bp, Homo sapien
taacagcatcatcaggactgctgag

SEQ ID NO: 3798047 - DNA, 25 bp, Homo sapien
atcacccccaggttgtcttccacgt

SEQ ID NO: 3798048 - DNA, 25 bp, Homo sapien
aataatatactgtgaagtccagcag

SEQ ID NO: 3798049 - DNA, 25 bp, Homo sapien
tattagctcttttcaaccagtgaag

SEQ ID NO: 3798050 - DNA, 25 bp, Homo sapien
agaggcactggatggttaaaaataa

SEQ ID NO: 3798051 - DNA, 25 bp, Homo sapien
caacgctcgtggaagaatgtgagag

SEQ ID NO: 3798052 - DNA, 25 bp, Homo sapien
gcttgccctgataacactttcacat

SEQ ID NO: 3798053 - DNA, 25 bp, Homo sapien
atagtgctgaggctaaagcttgccc

SEQ ID NO: 3798054 - DNA, 25 bp, Homo sapien
gtctcagtaccagatcaacctcctg

SEQ ID NO: 3798055 - DNA, 25 bp, Homo sapien
ttcacattattaccttaagtctcag

SEQ ID NO: 3798056 - DNA, 25 bp, Homo sapien
taaaggccagggacactgtttaaca

SEQ ID NO: 3798057 - DNA, 25 bp, Homo sapien
aactgggagtgaattgcaatgtctg

SEQ ID NO: 3798058 - DNA, 25 bp, Homo sapien
cacaaatagagtagggggtgctact

SEQ ID NO: 3798059 - DNA, 25 bp, Homo sapien
tgctgtaagtcagtggctctcaact

SEQ ID NO: 3798060 - DNA, 25 bp, Homo sapien
aatccacaggggatgcttacttttc

SEQ ID NO: 3798061 - DNA, 25 bp, Homo sapien
gaatccacaggggatgcttactttt

SEQ ID NO: 3798062 - DNA, 25 bp, Homo sapien
atccacaggggatgcttacttttcc

SEQ ID NO: 3798063 - DNA, 25 bp, Homo sapien
ggaatccacaggggatgcttacttt

SEQ ID NO: 3798064 - DNA, 25 bp, Homo sapien
taccggacgaccgagaggtgttcat

SEQ ID NO: 3798065 - DNA, 25 bp, Homo sapien
aggtgttcatccgacgtcccaggtg

SEQ ID NO: 3798066 - DNA, 25 bp, Homo sapien
tgatcactgctccatcgatgtgtgc

SEQ ID NO: 3798067 - DNA, 25 bp, Homo sapien
tctcggaggaactgcttgatcatgc

SEQ ID NO: 3798068 - DNA, 25 bp, Homo sapien
gctcgcagctttgggcctgttcttt

SEQ ID NO: 3798069 - DNA, 25 bp, Homo sapien
gtgagcccgaaaggctcgcagcttt

SEQ ID NO: 3798070 - DNA, 25 bp, Homo sapien
gaaaggctcgcagctttgggcctgt

SEQ ID NO: 3798071 - DNA, 25 bp, Homo sapien
gcctgtttggctcttgacactgagg

SEQ ID NO: 3798072 - DNA, 25 bp, Homo sapien
tccggacatcctggagtgacacctc

SEQ ID NO: 3798073 - DNA, 25 bp, Homo sapien
tccaccaccccgatgatgggcagct

SEQ ID NO: 3798074 - DNA, 25 bp, Homo sapien
ttcaccttgcggcagaagttgattt

SEQ ID NO: 3798075 - DNA, 25 bp, Homo sapien
gcagcttcaccttgcggcagaagtt

SEQ ID NO: 3798076 - DNA, 25 bp, Homo sapien
tcatccatgagagcaagatcttgct

SEQ ID NO: 3798077 - DNA, 25 bp, Homo sapien
gagcaagatcttgctcgcctggcag

SEQ ID NO: 3798078 - DNA, 25 bp, Homo sapien
gagagcaagatcttgctcgcctggc

SEQ ID NO: 3798079 - DNA, 25 bp, Homo sapien
gcaagatcttgctcgcctggcagcc

SEQ ID NO: 3798080 - DNA, 25 bp, Homo sapien
gcactctgccgaggagagggacctc

SEQ ID NO: 3798081 - DNA, 25 bp, Homo sapien
ggttgtgggagggaatatctgagat

SEQ ID NO: 3798082 - DNA, 25 bp, Homo sapien
tatgagcggatccaggggcactctg

SEQ ID NO: 3798083 - DNA, 25 bp, Homo sapien
aagtcctggcacatgagctccgcgc

SEQ ID NO: 3798084 - DNA, 25 bp, Homo sapien
ctttgagttgggatgctcccgtggc

SEQ ID NO: 3798085 - DNA, 25 bp, Homo sapien
tttgagttgggatgctcccgtggcc

SEQ ID NO: 3798086 - DNA, 25 bp, Homo sapien
gatgctccagtgggctgagacgctc

SEQ ID NO: 3798087 - DNA, 25 bp, Homo sapien
ttgagttgggatgctcccgtggcct

SEQ ID NO: 3798088 - DNA, 25 bp, Homo sapien
ccaccaccacgtttgtgttgaggca

SEQ ID NO: 3798089 - DNA, 25 bp, Homo sapien
cgtttgtgttgaggcaatgccactc

SEQ ID NO: 3798090 - DNA, 25 bp, Homo sapien
cacgtttgtgttgaggcaatgccac

SEQ ID NO: 3798091 - DNA, 25 bp, Homo sapien
ccaccacgtttgtgttgaggcaatg

SEQ ID NO: 3798092 - DNA, 25 bp, Homo sapien
tcaacttcactactgtgtcgccctg

SEQ ID NO: 3798093 - DNA, 25 bp, Homo sapien
acttcactactgtgtcgccctgtgg

SEQ ID NO: 3798094 - DNA, 25 bp, Homo sapien
atttcctcaacttcactactgtgtc

SEQ ID NO: 3798095 - DNA, 25 bp, Homo sapien
tcactactgtgtcgccctgtgggac

SEQ ID NO: 3798096 - DNA, 25 bp, Homo sapien
tctttccgtgctggtgacaatggga

SEQ ID NO: 3798097 - DNA, 25 bp, Homo sapien
gaaacaaacggaagacaattcagtc

SEQ ID NO: 3798098 - DNA, 25 bp, Homo sapien
gggaagatcttgagcccgcttcact

SEQ ID NO: 3798099 - DNA, 25 bp, Homo sapien
ccgcttcactcgtaatgaagaacaa

SEQ ID NO: 3798100 - DNA, 25 bp, Homo sapien
acttctgtaggctaacgtggctggg

SEQ ID NO: 3798101 - DNA, 25 bp, Homo sapien
ggggcgtcaatgaaaaaagactggc

SEQ ID NO: 3798102 - DNA, 25 bp, Homo sapien
gaattatacttctgtaggctaacgt

SEQ ID NO: 3798103 - DNA, 25 bp, Homo sapien
gaatctggggcgtcaatgaaaaaag

SEQ ID NO: 3798104 - DNA, 25 bp, Homo sapien
ttcacaatactcacacattgagaga

SEQ ID NO: 3798105 - DNA, 25 bp, Homo sapien
gccataaatttcaccctcaccatgt

SEQ ID NO: 3798106 - DNA, 25 bp, Homo sapien
ggcatctgcatttagtactcatgga

SEQ ID NO: 3798107 - DNA, 25 bp, Homo sapien
tgggatgtatttcctaagccataaa

SEQ ID NO: 3798108 - DNA, 25 bp, Homo sapien
tcttcttttgactgatggagattac

SEQ ID NO: 3798109 - DNA, 25 bp, Homo sapien
tcttttgactgatggagattacaaa

SEQ ID NO: 3798110 - DNA, 25 bp, Homo sapien
ttcttttgactgatggagattacaa

SEQ ID NO: 3798111 - DNA, 25 bp, Homo sapien
catctggtccttttgctgtgaccca

SEQ ID NO: 3798112 - DNA, 25 bp, Homo sapien
caatgattaaagtgtctctgagaaa

SEQ ID NO: 3798113 - DNA, 25 bp, Homo sapien
tctgagaaagtggcttcggaccaca

SEQ ID NO: 3798114 - DNA, 25 bp, Homo sapien
tgcccagtgagtgcctcgctcggta

SEQ ID NO: 3798115 - DNA, 25 bp, Homo sapien
tacaatcgactaagcttccgacaca

SEQ ID NO: 3798116 - DNA, 25 bp, Homo sapien
acgggagtttctacaatcgactaag

SEQ ID NO: 3798117 - DNA, 25 bp, Homo sapien
cacgatcccacaacccatttgtttt

SEQ ID NO: 3798118 - DNA, 25 bp, Homo sapien
ctaagcttccgacacagcagaatcc

SEQ ID NO: 3798119 - DNA, 25 bp, Homo sapien
aaagttggtttgcatgacactggac

SEQ ID NO: 3798120 - DNA, 25 bp, Homo sapien
cagtgattttagaacgaagcccagc

SEQ ID NO: 3798121 - DNA, 25 bp, Homo sapien
tactacacagggaatttacacagac

SEQ ID NO: 3798122 - DNA, 25 bp, Homo sapien
agagcaagcacctcatggcaaagag

SEQ ID NO: 3798123 - DNA, 25 bp, Homo sapien
gggctggagattcaccagcattagg

SEQ ID NO: 3798124 - DNA, 25 bp, Homo sapien
cgcgtgtaaggacagaaaaccatgg

SEQ ID NO: 3798125 - DNA, 25 bp, Homo sapien
aggatcgccccactcgcgtgtaagg

SEQ ID NO: 3798126 - DNA, 25 bp, Homo sapien
ttcaccagcattaggtgagaaatgg

SEQ ID NO: 3798127 - DNA, 25 bp, Homo sapien
agggaattcttaactgaggtctaca

SEQ ID NO: 3798128 - DNA, 25 bp, Homo sapien
ctcctgatcttgagtgatcctagtg

SEQ ID NO: 3798129 - DNA, 25 bp, Homo sapien
ctctgaaaactattatctaagtttc

SEQ ID NO: 3798130 - DNA, 25 bp, Homo sapien
gatcttgagtgatcctagtgccttg

SEQ ID NO: 3798131 - DNA, 25 bp, Homo sapien
gagacctcatcgctataaacaaatt

SEQ ID NO: 3798132 - DNA, 25 bp, Homo sapien
catcgctataaacaaattcgaaaag

SEQ ID NO: 3798133 - DNA, 25 bp, Homo sapien
aaattcgaaaagttagcagacatgg

SEQ ID NO: 3798134 - DNA, 25 bp, Homo sapien
caaattcgaaaagttagcagacatg

SEQ ID NO: 3798135 - DNA, 25 bp, Homo sapien
aatatatgtccgtggccaggtacag

SEQ ID NO: 3798136 - DNA, 25 bp, Homo sapien
tatatgtccgtggccaggtacagtg

SEQ ID NO: 3798137 - DNA, 25 bp, Homo sapien
atatatgtccgtggccaggtacagt

SEQ ID NO: 3798138 - DNA, 25 bp, Homo sapien
aaatatatgtccgtggccaggtaca

SEQ ID NO: 3798139 - DNA, 25 bp, Homo sapien
agcccttggagtcagggcagctgcc

SEQ ID NO: 3798140 - DNA, 25 bp, Homo sapien
ggccagtgcctggaatctccgctca

SEQ ID NO: 3798141 - DNA, 25 bp, Homo sapien
agcatgcagcatccaaaacatgaag

SEQ ID NO: 3798142 - DNA, 25 bp, Homo sapien
acatgaagtgaaaaccaggacgagg

SEQ ID NO: 3798143 - DNA, 25 bp, Homo sapien
ctgagtcaggatggcctggaagttg

SEQ ID NO: 3798144 - DNA, 25 bp, Homo sapien
tgagtcaggatggcctggaagttgt

SEQ ID NO: 3798145 - DNA, 25 bp, Homo sapien
tcaggatggcctggaagttgttcat

SEQ ID NO: 3798146 - DNA, 25 bp, Homo sapien
agtcaggatggcctggaagttgttc

SEQ ID NO: 3798147 - DNA, 25 bp, Homo sapien
tagggtcaaagagatcttcctggcc

SEQ ID NO: 3798148 - DNA, 25 bp, Homo sapien
agagtgcagtggtattccctggaga

SEQ ID NO: 3798149 - DNA, 25 bp, Homo sapien
catggtcactgtggccggggcccct

SEQ ID NO: 3798150 - DNA, 25 bp, Homo sapien
ctggccagagcctcactatcaggct

SEQ ID NO: 3798151 - DNA, 25 bp, Homo sapien
actgtcgcaggtcaagcctggcagc

SEQ ID NO: 3798152 - DNA, 25 bp, Homo sapien
tgcccactgtcgcaggtcaagcctg

SEQ ID NO: 3798153 - DNA, 25 bp, Homo sapien
tgtcgcaggtcaagcctggcagccc

SEQ ID NO: 3798154 - DNA, 25 bp, Homo sapien
ccactgtcgcaggtcaagcctggca

SEQ ID NO: 3798155 - DNA, 25 bp, Homo sapien
ggccctgtgctaggtatttgggaca

SEQ ID NO: 3798156 - DNA, 25 bp, Homo sapien
aaacaacacacacgtaatacaaaag

SEQ ID NO: 3798157 - DNA, 25 bp, Homo sapien
catagatccatgtccatgtggagtt

SEQ ID NO: 3798158 - DNA, 25 bp, Homo sapien
cattggtaaagtaggaataatggca

SEQ ID NO: 3798159 - DNA, 25 bp, Homo sapien
cagaaagttgcacagaaagtctgtt

SEQ ID NO: 3798160 - DNA, 25 bp, Homo sapien
ctgttgggggaaccttcaacagtct

SEQ ID NO: 3798161 - DNA, 25 bp, Homo sapien
caatggaaccgcactggtgccagct

SEQ ID NO: 3798162 - DNA, 25 bp, Homo sapien
aaagttgcacagaaagtctgttggg

SEQ ID NO: 3798163 - DNA, 25 bp, Homo sapien
catcactaaccagtcaccagttggg

SEQ ID NO: 3798164 - DNA, 25 bp, Homo sapien
tcatcactaaccagtcaccagttgg

SEQ ID NO: 3798165 - DNA, 25 bp, Homo sapien
tcactaaccagtcaccagttgggag

SEQ ID NO: 3798166 - DNA, 25 bp, Homo sapien
ctcatcactaaccagtcaccagttg

SEQ ID NO: 3798167 - DNA, 25 bp, Homo sapien
ccccaaggatgccttcggatgccca

SEQ ID NO: 3798168 - DNA, 25 bp, Homo sapien
ttccccaaggatgccttcggatgcc

SEQ ID NO: 3798169 - DNA, 25 bp, Homo sapien
cccaaggatgccttcggatgcccag

SEQ ID NO: 3798170 - DNA, 25 bp, Homo sapien
ccaaggatgccttcggatgcccagc

SEQ ID NO: 3798171 - DNA, 25 bp, Homo sapien
tctgacaggtaggacccagcagggc

SEQ ID NO: 3798172 - DNA, 25 bp, Homo sapien
tgacaggtaggacccagcagggcgt

SEQ ID NO: 3798173 - DNA, 25 bp, Homo sapien
ctgacaggtaggacccagcagggcg

SEQ ID NO: 3798174 - DNA, 25 bp, Homo sapien
tctgtggcagctcgtccgctggtca

SEQ ID NO: 3798175 - DNA, 25 bp, Homo sapien
gggccgcggcaagtctgtggcagct

SEQ ID NO: 3798176 - DNA, 25 bp, Homo sapien
gcggcaagtctgtggcagctcgtcc

SEQ ID NO: 3798177 - DNA, 25 bp, Homo sapien
aagtctgtggcagctcgtccgctgg

SEQ ID NO: 3798178 - DNA, 25 bp, Homo sapien
ggcttttgccacctctcctgtgcca

SEQ ID NO: 3798179 - DNA, 25 bp, Homo sapien
gcttttgccacctctcctgtgccac

SEQ ID NO: 3798180 - DNA, 25 bp, Homo sapien
ctaggcttttgccacctctcctgtg

SEQ ID NO: 3798181 - DNA, 25 bp, Homo sapien
taggcttttgccacctctcctgtgc

SEQ ID NO: 3798182 - DNA, 25 bp, Homo sapien
tataggcggtgtctagagtagccca

SEQ ID NO: 3798183 - DNA, 25 bp, Homo sapien
tacacatggcacgacatggatgaac

SEQ ID NO: 3798184 - DNA, 25 bp, Homo sapien
gatatttgtccacccatgtacctag

SEQ ID NO: 3798185 - DNA, 25 bp, Homo sapien
caggaagttggagttaccacgagct

SEQ ID NO: 3798186 - DNA, 25 bp, Homo sapien
aggctgtctggtgatggcttgattt

SEQ ID NO: 3798187 - DNA, 25 bp, Homo sapien
caggctgtctggtgatggcttgatt

SEQ ID NO: 3798188 - DNA, 25 bp, Homo sapien
catcgctgttaagaagctccaggta

SEQ ID NO: 3798189 - DNA, 25 bp, Homo sapien
atctggtcatagaagtggtagaggc

SEQ ID NO: 3798190 - DNA, 25 bp, Homo sapien
gccaggtccatctggtcatagaagt

SEQ ID NO: 3798191 - DNA, 25 bp, Homo sapien
gggtcagcatcgctgttaagaagct

SEQ ID NO: 3798192 - DNA, 25 bp, Homo sapien
gaatttcccctgattgccgtctcta

SEQ ID NO: 3798193 - DNA, 25 bp, Homo sapien
gcagggaccagaatttcccctgatt

SEQ ID NO: 3798194 - DNA, 25 bp, Homo sapien
tgccgtctctacagcaagctgaggg

SEQ ID NO: 3798195 - DNA, 25 bp, Homo sapien
ataccggaagagaccagagggagga

SEQ ID NO: 3798196 - DNA, 25 bp, Homo sapien
gaaatttctggaaagagggctggtg

SEQ ID NO: 3798197 - DNA, 25 bp, Homo sapien
cccttggatgaagaaggaaatttct

SEQ ID NO: 3798198 - DNA, 25 bp, Homo sapien
ggcagggctgggagatcatccccat

SEQ ID NO: 3798199 - DNA, 25 bp, Homo sapien
gaggaaaagtcccttggatgaagaa

SEQ ID NO: 3798200 - DNA, 25 bp, Homo sapien
ccatgtcacacaacagcctgctgaa

SEQ ID NO: 3798201 - DNA, 25 bp, Homo sapien
actggtcgcagttgatggtgtctgt

SEQ ID NO: 3798202 - DNA, 25 bp, Homo sapien
tgaactggtcgcagttgatggtgtc

SEQ ID NO: 3798203 - DNA, 25 bp, Homo sapien
gcctgctgaactggtcgcagttgat

SEQ ID NO: 3798204 - DNA, 25 bp, Homo sapien
aattggccacatttggatcaagcac

SEQ ID NO: 3798205 - DNA, 25 bp, Homo sapien
caaaaaatggactaacgcactgcct

SEQ ID NO: 3798206 - DNA, 25 bp, Homo sapien
tatttgcttagacagctttcgctgc

SEQ ID NO: 3798207 - DNA, 25 bp, Homo sapien
taatgactgcctccagttgtgagga

SEQ ID NO: 3798208 - DNA, 25 bp, Homo sapien
gagtcctggaagacatactggtcca

SEQ ID NO: 3798209 - DNA, 25 bp, Homo sapien
agtcctggaagacatactggtccag

SEQ ID NO: 3798210 - DNA, 25 bp, Homo sapien
atgaaagcccaaggtgagtctctat

SEQ ID NO: 3798211 - DNA, 25 bp, Homo sapien
cccaaggtgagtctctattgtaccc

SEQ ID NO: 3798212 - DNA, 25 bp, Homo sapien
gagaccaactcacacaatcaatgaa

SEQ ID NO: 3798213 - DNA, 25 bp, Homo sapien
tcacacaatcaatgaaagcccaagg

SEQ ID NO: 3798214 - DNA, 25 bp, Homo sapien
tactctcaccgatcacttcatctgg

SEQ ID NO: 3798215 - DNA, 25 bp, Homo sapien
actctcaccgatcacttcatctggt

SEQ ID NO: 3798216 - DNA, 25 bp, Homo sapien
catactctcaccgatcacttcatct

SEQ ID NO: 3798217 - DNA, 25 bp, Homo sapien
tctcaccgatcacttcatctggtcc

SEQ ID NO: 3798218 - DNA, 25 bp, Homo sapien
tacaggagctcgctttatttctgac

SEQ ID NO: 3798219 - DNA, 25 bp, Homo sapien
agctgctgaagataggaccgtgtcc

SEQ ID NO: 3798220 - DNA, 25 bp, Homo sapien
tcaataatatggaacgtgacctccc

SEQ ID NO: 3798221 - DNA, 25 bp, Homo sapien
taggagcaaaactgagggactacag

SEQ ID NO: 3798222 - DNA, 25 bp, Homo sapien
gcttttgaaccgcttcctagctgtg

SEQ ID NO: 3798223 - DNA, 25 bp, Homo sapien
taacttcaaggctgggtagtggtct

SEQ ID NO: 3798224 - DNA, 25 bp, Homo sapien
gggctcaggactctagcaggctata

SEQ ID NO: 3798225 - DNA, 25 bp, Homo sapien
aaccataccaggcagtgtagcagca

SEQ ID NO: 3798226 - DNA, 25 bp, Homo sapien
agtgcttcaggtctgccggaagctc

SEQ ID NO: 3798227 - DNA, 25 bp, Homo sapien
gtgcttcaggtctgccggaagctcc

SEQ ID NO: 3798228 - DNA, 25 bp, Homo sapien
tgcttcaggtctgccggaagctcct

SEQ ID NO: 3798229 - DNA, 25 bp, Homo sapien
gcagctgtgttgatcagcaactgct

SEQ ID NO: 3798230 - DNA, 25 bp, Homo sapien
ggcatggatgtctctcctgacagag

SEQ ID NO: 3798231 - DNA, 25 bp, Homo sapien
gagagctatgctgagcaggacccta

SEQ ID NO: 3798232 - DNA, 25 bp, Homo sapien
ggaaatgcttgtcatcttctcagcc

SEQ ID NO: 3798233 - DNA, 25 bp, Homo sapien
ggtctcactaggagactgccagtca

SEQ ID NO: 3798234 - DNA, 25 bp, Homo sapien
gtggagcagtcgctcactggtctca

SEQ ID NO: 3798235 - DNA, 25 bp, Homo sapien
agtcgctcactggtctcactaggag

SEQ ID NO: 3798236 - DNA, 25 bp, Homo sapien
gggcagggtggagcagtcgctcact

SEQ ID NO: 3798237 - DNA, 25 bp, Homo sapien
gatgaatatactggagacccctgtt

SEQ ID NO: 3798238 - DNA, 25 bp, Homo sapien
tagatgaatatactggagacccctg

SEQ ID NO: 3798239 - DNA, 25 bp, Homo sapien
tggtagatgaatatactggagaccc

SEQ ID NO: 3798240 - DNA, 25 bp, Homo sapien
catggtagatgaatatactggagac

SEQ ID NO: 3798241 - DNA, 25 bp, Homo sapien
cagaaatgcacttgggtcaccccta

SEQ ID NO: 3798242 - DNA, 25 bp, Homo sapien
ataaccaggtattgattccagaaat

SEQ ID NO: 3798243 - DNA, 25 bp, Homo sapien
gcacttgggtcacccctactccaaa

SEQ ID NO: 3798244 - DNA, 25 bp, Homo sapien
aaatgcacttgggtcacccctactc

SEQ ID NO: 3798245 - DNA, 25 bp, Homo sapien
ggaggccgtggacagtgaatccact

SEQ ID NO: 3798246 - DNA, 25 bp, Homo sapien
gatgttgggaggccgtggacagtga

SEQ ID NO: 3798247 - DNA, 25 bp, Homo sapien
ctggagatgttgggaggccgtggac

SEQ ID NO: 3798248 - DNA, 25 bp, Homo sapien
agatgttgggaggccgtggacagtg

SEQ ID NO: 3798249 - DNA, 25 bp, Homo sapien
catgtttgctcgggaggtcagggca

SEQ ID NO: 3798250 - DNA, 25 bp, Homo sapien
gctgatggagcgaaggggctggtgg

SEQ ID NO: 3798251 - DNA, 25 bp, Homo sapien
tgtcatgtttgctcgggaggtcagg

SEQ ID NO: 3798252 - DNA, 25 bp, Homo sapien
agtggctgatggagcgaaggggctg

SEQ ID NO: 3798253 - DNA, 25 bp, Homo sapien
cattgggtgggggacgtcttgtgct

SEQ ID NO: 3798254 - DNA, 25 bp, Homo sapien
ggccattttggaagcttgttggaga

SEQ ID NO: 3798255 - DNA, 25 bp, Homo sapien
acctctccagctgccgggcattggg

SEQ ID NO: 3798256 - DNA, 25 bp, Homo sapien
tgttggagacctctccagctgccgg

SEQ ID NO: 3798257 - DNA, 25 bp, Homo sapien
tgggggtatgtgagaggcagggcca

SEQ ID NO: 3798258 - DNA, 25 bp, Homo sapien
ggccagccaccacaaggccagcact

SEQ ID NO: 3798259 - DNA, 25 bp, Homo sapien
aaggccaggggcgtgtcagggtggg

SEQ ID NO: 3798260 - DNA, 25 bp, Homo sapien
ggccagggccagccaccacaaggcc

SEQ ID NO: 3798261 - DNA, 25 bp, Homo sapien
ggtactttgatgtctgcggcccagc

SEQ ID NO: 3798262 - DNA, 25 bp, Homo sapien
caatgctaggtactgcgggagctcc

SEQ ID NO: 3798263 - DNA, 25 bp, Homo sapien
ttcttctggaaaaggccggccagca

SEQ ID NO: 3798264 - DNA, 25 bp, Homo sapien
tctaggatgagcagaacgcggtcag

SEQ ID NO: 3798265 - DNA, 25 bp, Homo sapien
gcttggcaccaagaccgcagttaat

SEQ ID NO: 3798266 - DNA, 25 bp, Homo sapien
tcctctggcgattaagctgaaatgc

SEQ ID NO: 3798267 - DNA, 25 bp, Homo sapien
tcttagcataagaaaacggtggcgt

SEQ ID NO: 3798268 - DNA, 25 bp, Homo sapien
gaaatatggaagcaatcctctggcg

SEQ ID NO: 3798269 - DNA, 25 bp, Homo sapien
tttctttccttagctcaacctctac

SEQ ID NO: 3798270 - DNA, 25 bp, Homo sapien
gcagctccatgaagggtcctcctac

SEQ ID NO: 3798271 - DNA, 25 bp, Homo sapien
actttctttccttagctcaacctct

SEQ ID NO: 3798272 - DNA, 25 bp, Homo sapien
tactttctttccttagctcaacctc

SEQ ID NO: 3798273 - DNA, 25 bp, Homo sapien
gggagggcctcagacccaggcacgg

SEQ ID NO: 3798274 - DNA, 25 bp, Homo sapien
agacccaggcacggtgaccaggcta

SEQ ID NO: 3798275 - DNA, 25 bp, Homo sapien
tggagggagggcctcagacccaggc

SEQ ID NO: 3798276 - DNA, 25 bp, Homo sapien
cccaggcacggtgaccaggctagac

SEQ ID NO: 3798277 - DNA, 25 bp, Homo sapien
agcgccaccgtgtcgctcaaggcag

SEQ ID NO: 3798278 - DNA, 25 bp, Homo sapien
gaaaggctcgatggtgaacttctcc

SEQ ID NO: 3798279 - DNA, 25 bp, Homo sapien
tgcctgaagtagcttggtctcccca

SEQ ID NO: 3798280 - DNA, 25 bp, Homo sapien
gaagtagcttggtctccccatgctg

SEQ ID NO: 3798281 - DNA, 25 bp, Homo sapien
cccagctgtgtcttccgaggaactt

SEQ ID NO: 3798282 - DNA, 25 bp, Homo sapien
ttaggtcccgaacagcagggagctc

SEQ ID NO: 3798283 - DNA, 25 bp, Homo sapien
tgtgtcttccgaggaacttctcgtc

SEQ ID NO: 3798284 - DNA, 25 bp, Homo sapien
taggtcccgaacagcagggagctcc

SEQ ID NO: 3798285 - DNA, 25 bp, Homo sapien
ggccgtgaggatccgcaccagtttg

SEQ ID NO: 3798286 - DNA, 25 bp, Homo sapien
cagggaggaaaaggccgtgaggatc

SEQ ID NO: 3798287 - DNA, 25 bp, Homo sapien
aaaggccgtgaggatccgcaccagt

SEQ ID NO: 3798288 - DNA, 25 bp, Homo sapien
aggaaaaggccgtgaggatccgcac

SEQ ID NO: 3798289 - DNA, 25 bp, Homo sapien
cccgatcttgttctcactcagcgca

SEQ ID NO: 3798290 - DNA, 25 bp, Homo sapien
gagggtttccaaggacttcagctgg

SEQ ID NO: 3798291 - DNA, 25 bp, Homo sapien
agctgcgagacaccctcgtccccga

SEQ ID NO: 3798292 - DNA, 25 bp, Homo sapien
agacaccctcgtccccgatcttgtt

SEQ ID NO: 3798293 - DNA, 25 bp, Homo sapien
aagcggaggtgaggagattccttga

SEQ ID NO: 3798294 - DNA, 25 bp, Homo sapien
tatgatcatagcactatattctagc

SEQ ID NO: 3798295 - DNA, 25 bp, Homo sapien
atgatcatagcactatattctagcc

SEQ ID NO: 3798296 - DNA, 25 bp, Homo sapien
gggaagcggaggtgaggagattcct

SEQ ID NO: 3798297 - DNA, 25 bp, Homo sapien
cctgagcagggatgcagcgagcgaa

SEQ ID NO: 3798298 - DNA, 25 bp, Homo sapien
agcgagcgaaggcagggcctcggcg

SEQ ID NO: 3798299 - DNA, 25 bp, Homo sapien
gcctcggcgagtttgtaggcaccca

SEQ ID NO: 3798300 - DNA, 25 bp, Homo sapien
caggtcagtgatgttgttctgggac

SEQ ID NO: 3798301 - DNA, 25 bp, Homo sapien
acaaggccggcaaaagctgacgtac

SEQ ID NO: 3798302 - DNA, 25 bp, Homo sapien
tgtaagtgacaaggccggcaaaagc

SEQ ID NO: 3798303 - DNA, 25 bp, Homo sapien
caaaagctgacgtacgtggttagcc

SEQ ID NO: 3798304 - DNA, 25 bp, Homo sapien
gacgtacgtggttagccttccagaa

SEQ ID NO: 3798305 - DNA, 25 bp, Homo sapien
tcggctcccacgtcgcagatgcagt

SEQ ID NO: 3798306 - DNA, 25 bp, Homo sapien
gtcgcagatgcagttattgtacaag

SEQ ID NO: 3798307 - DNA, 25 bp, Homo sapien
tccatcacccggagggacaccatgt

SEQ ID NO: 3798308 - DNA, 25 bp, Homo sapien
tccggaagcacacgagccaagctct

SEQ ID NO: 3798309 - DNA, 25 bp, Homo sapien
aggacacctccgaaggctggcagcg

SEQ ID NO: 3798310 - DNA, 25 bp, Homo sapien
tctccacatgaggacacctccgaag

SEQ ID NO: 3798311 - DNA, 25 bp, Homo sapien
gccccggcagccgtgaacttgttgt

SEQ ID NO: 3798312 - DNA, 25 bp, Homo sapien
ccccggcagccgtgaacttgttgta

SEQ ID NO: 3798313 - DNA, 25 bp, Homo sapien
cttccacccagcctagaacgttggg

SEQ ID NO: 3798314 - DNA, 25 bp, Homo sapien
gagaagcctaggaggcccgagattc

SEQ ID NO: 3798315 - DNA, 25 bp, Homo sapien
gattcctttatggttctgcagctga

SEQ ID NO: 3798316 - DNA, 25 bp, Homo sapien
gacttttcccctggcaagataccga

SEQ ID NO: 3798317 - DNA, 25 bp, Homo sapien
ctgatccgtgaatcctgttgttgca

SEQ ID NO: 3798318 - DNA, 25 bp, Homo sapien
atctcaggctgatccgtgaatcctg

SEQ ID NO: 3798319 - DNA, 25 bp, Homo sapien
gttcctggacactgaatgggatggt

SEQ ID NO: 3798320 - DNA, 25 bp, Homo sapien
gaatgggatggtgggcgtccacatc

SEQ ID NO: 3798321 - DNA, 25 bp, Homo sapien
aaaggaagctcttccaagcactgag

SEQ ID NO: 3798322 - DNA, 25 bp, Homo sapien
gaccaagctcgcaaagcctggagga

SEQ ID NO: 3798323 - DNA, 25 bp, Homo sapien
gatgtggatggccaactttcctgtc

SEQ ID NO: 3798324 - DNA, 25 bp, Homo sapien
gatgtctctgatgacgcatgcgtcc

SEQ ID NO: 3798325 - DNA, 25 bp, Homo sapien
aagatgtggttcattccgcagccgg

SEQ ID NO: 3798326 - DNA, 25 bp, Homo sapien
tagataaccagagcagtgggtaccc

SEQ ID NO: 3798327 - DNA, 25 bp, Homo sapien
ggtatgaactcaaaccctggacctg

SEQ ID NO: 3798328 - DNA, 25 bp, Homo sapien
tccagcgtggttagtgtcctcagag

SEQ ID NO: 3798329 - DNA, 25 bp, Homo sapien
gggcttctgagcagactatgcccga

SEQ ID NO: 3798330 - DNA, 25 bp, Homo sapien
gactatgcccgagtgaaaagcaaca

SEQ ID NO: 3798331 - DNA, 25 bp, Homo sapien
gtaagctaagatgtcttgaattggg

SEQ ID NO: 3798332 - DNA, 25 bp, Homo sapien
gtgaaaagcaacagtcgtgccggca

SEQ ID NO: 3798333 - DNA, 25 bp, Homo sapien
cgcagccgggtctggattcctcaga

SEQ ID NO: 3798334 - DNA, 25 bp, Homo sapien
gagctatttacaagctgaacctgga

SEQ ID NO: 3798335 - DNA, 25 bp, Homo sapien
tggcagcacctgataccctttgcag

SEQ ID NO: 3798336 - DNA, 25 bp, Homo sapien
cctttgcagccagttcgaggcagga

SEQ ID NO: 3798337 - DNA, 25 bp, Homo sapien
cttagtgctcactcctgtaggcgca

SEQ ID NO: 3798338 - DNA, 25 bp, Homo sapien
ggtcagaccaaaaacctggcacatg

SEQ ID NO: 3798339 - DNA, 25 bp, Homo sapien
cacatggcacagtggatgatcagag

SEQ ID NO: 3798340 - DNA, 25 bp, Homo sapien
tcgttagtgttaataactgcaggct

SEQ ID NO: 3798341 - DNA, 25 bp, Homo sapien
taaagaaggtgctgtggttatgccc

SEQ ID NO: 3798342 - DNA, 25 bp, Homo sapien
tgtacaaagcgagatgtttcccgcc

SEQ ID NO: 3798343 - DNA, 25 bp, Homo sapien
tgtcctaggacaagagcagactgca

SEQ ID NO: 3798344 - DNA, 25 bp, Homo sapien
taaataaacagtagtggccgggtgc

SEQ ID NO: 3798345 - DNA, 25 bp, Homo sapien
tgctaaaatataagactcaccaggg

SEQ ID NO: 3798346 - DNA, 25 bp, Homo sapien
tggcagccctgtccaaagagttttt

SEQ ID NO: 3798347 - DNA, 25 bp, Homo sapien
cctttgtgcagtgtacagactggcc

SEQ ID NO: 3798348 - DNA, 25 bp, Homo sapien
caggaacatcttattcatgactgtg

SEQ ID NO: 3798349 - DNA, 25 bp, Homo sapien
gagacagttggagcaccacttgccc

SEQ ID NO: 3798350 - DNA, 25 bp, Homo sapien
gccccagggaaaaaggtgagcgtca

SEQ ID NO: 3798351 - DNA, 25 bp, Homo sapien
gattgacccctttctacaggcgagg

SEQ ID NO: 3798352 - DNA, 25 bp, Homo sapien
gacatttgtatgcagagagaggcct

SEQ ID NO: 3798353 - DNA, 25 bp, Homo sapien
ggggtgggtatcccctgtgtcaggc

SEQ ID NO: 3798354 - DNA, 25 bp, Homo sapien
tgggggtgggtatcccctgtgtcag

SEQ ID NO: 3798355 - DNA, 25 bp, Homo sapien
caggcacatggtagaccttcattaa

SEQ ID NO: 3798356 - DNA, 25 bp, Homo sapien
aagataggggggaagggcttggcat

SEQ ID NO: 3798357 - DNA, 25 bp, Homo sapien
tcaaaagcttcgtgccaacagagag

SEQ ID NO: 3798358 - DNA, 25 bp, Homo sapien
tgcgatggatgtttacaggaaccca

SEQ ID NO: 3798359 - DNA, 25 bp, Homo sapien
tcggagaggacacttcaaactgcgg

SEQ ID NO: 3798360 - DNA, 25 bp, Homo sapien
tctgcctgcagtgtcaaatcgatgg

SEQ ID NO: 3798361 - DNA, 25 bp, Homo sapien
tcagcgtctgctaagagctcaggaa

SEQ ID NO: 3798362 - DNA, 25 bp, Homo sapien
cagcctctgctaaggtctcatggca

SEQ ID NO: 3798363 - DNA, 25 bp, Homo sapien
catctgtgcggctgaatctgagtaa

SEQ ID NO: 3798364 - DNA, 25 bp, Homo sapien
gtttccatcgttattaccaagccag

SEQ ID NO: 3798365 - DNA, 25 bp, Homo sapien
gtcttgacctcatttcgccatgttg

SEQ ID NO: 3798366 - DNA, 25 bp, Homo sapien
caggctagtcttgacctcatttcgc

SEQ ID NO: 3798367 - DNA, 25 bp, Homo sapien
gctagtcttgacctcatttcgccat

SEQ ID NO: 3798368 - DNA, 25 bp, Homo sapien
tagtcttgacctcatttcgccatgt

SEQ ID NO: 3798369 - DNA, 25 bp, Homo sapien
tgccattgcaagacacaggagcgaa

SEQ ID NO: 3798370 - DNA, 25 bp, Homo sapien
ggatgatggtcctacttggccctac

SEQ ID NO: 3798371 - DNA, 25 bp, Homo sapien
tctcagagaaaagggacgaacctgc

SEQ ID NO: 3798372 - DNA, 25 bp, Homo sapien
gattttcatttagcgtttgccaagg

SEQ ID NO: 3798373 - DNA, 25 bp, Homo sapien
tttggcagccaacgtgcaaatccga

SEQ ID NO: 3798374 - DNA, 25 bp, Homo sapien
gcacgtggtagaccaggcatcttca

SEQ ID NO: 3798375 - DNA, 25 bp, Homo sapien
tagcattgccttctgtgtatgacaa

SEQ ID NO: 3798376 - DNA, 25 bp, Homo sapien
actgctttgggtgttatatggtgac

SEQ ID NO: 3798377 - DNA, 25 bp, Homo sapien
gccagctaaagtcacagggccttgg

SEQ ID NO: 3798378 - DNA, 25 bp, Homo sapien
caactgtcgggtgataaacataaga

SEQ ID NO: 3798379 - DNA, 25 bp, Homo sapien
gggccttggcctgtattctttgtta

SEQ ID NO: 3798380 - DNA, 25 bp, Homo sapien
gaaaatcatcatcgcttggcatgga

SEQ ID NO: 3798381 - DNA, 25 bp, Homo sapien
catattaagcagagtacaaggctgg

SEQ ID NO: 3798382 - DNA, 25 bp, Homo sapien
tagcgaggtgttgtggtacacgccc

SEQ ID NO: 3798383 - DNA, 25 bp, Homo sapien
catcttatcgagaggcacatgccat

SEQ ID NO: 3798384 - DNA, 25 bp, Homo sapien
taatctcgagccttcttcagtctgg

SEQ ID NO: 3798385 - DNA, 25 bp, Homo sapien
acagtagggttgtcaaaatcagcaa

SEQ ID NO: 3798386 - DNA, 25 bp, Homo sapien
ccacagtagggttgtcaaaatcagc

SEQ ID NO: 3798387 - DNA, 25 bp, Homo sapien
ccttagaacaaggacaaatttgcat

SEQ ID NO: 3798388 - DNA, 25 bp, Homo sapien
aatattgatacactatacaatccta

SEQ ID NO: 3798389 - DNA, 25 bp, Homo sapien
tcatagtcggatacaatggaaagcg

SEQ ID NO: 3798390 - DNA, 25 bp, Homo sapien
agaaccctggatagccggctctgtg

SEQ ID NO: 3798391 - DNA, 25 bp, Homo sapien
ggagagtcttcacgtcccagcagtt

SEQ ID NO: 3798392 - DNA, 25 bp, Homo sapien
ggaaagcgtgttatacccatgccct

SEQ ID NO: 3798393 - DNA, 25 bp, Homo sapien
gccagttttgtaggctcccttcaca

SEQ ID NO: 3798394 - DNA, 25 bp, Homo sapien
gaaggcaccacagggtcattgcact

SEQ ID NO: 3798395 - DNA, 25 bp, Homo sapien
ctcttaggtcctcgggagaaggcac

SEQ ID NO: 3798396 - DNA, 25 bp, Homo sapien
gctattttggagtcaggtttcaggg

SEQ ID NO: 3798397 - DNA, 25 bp, Homo sapien
cgggcctttacgatgctgactcgga

SEQ ID NO: 3798398 - DNA, 25 bp, Homo sapien
gagtagggtctcgactgctgttccc

SEQ ID NO: 3798399 - DNA, 25 bp, Homo sapien
caaatccatttgaggcagagctgtc

SEQ ID NO: 3798400 - DNA, 25 bp, Homo sapien
tggagtacatcgtcctcaacgtggg

SEQ ID NO: 3798401 - DNA, 25 bp, Homo sapien
ctcgccgcccgggcggtcgagagat

SEQ ID NO: 3798402 - DNA, 25 bp, Homo sapien
ccgcccgggcggtcgagagatcctt

SEQ ID NO: 3798403 - DNA, 25 bp, Homo sapien
cccgggcggtcgagagatccttggg

SEQ ID NO: 3798404 - DNA, 25 bp, Homo sapien
gccgcccgggcggtcgagagatcct

SEQ ID NO: 3798405 - DNA, 25 bp, Homo sapien
gggaccggccctagacactgagccg

SEQ ID NO: 3798406 - DNA, 25 bp, Homo sapien
cctagacactgagccgcggtgggat

SEQ ID NO: 3798407 - DNA, 25 bp, Homo sapien
cggccctagacactgagccgcggtg

SEQ ID NO: 3798408 - DNA, 25 bp, Homo sapien
tgccgggaccggccctagacactga

SEQ ID NO: 3798409 - DNA, 25 bp, Homo sapien
agggcagacccgaaccaggaaagca

SEQ ID NO: 3798410 - DNA, 25 bp, Homo sapien
ggaaagcaactcagacgctagggcc

SEQ ID NO: 3798411 - DNA, 25 bp, Homo sapien
tcgatttgagatctgagggcagacc

SEQ ID NO: 3798412 - DNA, 25 bp, Homo sapien
tattcgatacgcagagcgaattcga

SEQ ID NO: 3798413 - DNA, 25 bp, Homo sapien
aactctaggatgcaggttccgtagt

SEQ ID NO: 3798414 - DNA, 25 bp, Homo sapien
accatgaaaattggcgctttgggaa

SEQ ID NO: 3798415 - DNA, 25 bp, Homo sapien
gaaacggagtcccaaagaggcatgc

SEQ ID NO: 3798416 - DNA, 25 bp, Homo sapien
catgcagcaaggtgcagcggtagcc

SEQ ID NO: 3798417 - DNA, 25 bp, Homo sapien
tgaactacctcggaatctctttatt

SEQ ID NO: 3798418 - DNA, 25 bp, Homo sapien
gaactacctcggaatctctttattc

SEQ ID NO: 3798419 - DNA, 25 bp, Homo sapien
atctgaactacctcggaatctcttt

SEQ ID NO: 3798420 - DNA, 25 bp, Homo sapien
tctgaactacctcggaatctcttta

SEQ ID NO: 3798421 - DNA, 25 bp, Homo sapien
tggaggaaccgcgagccgccttcct

SEQ ID NO: 3798422 - DNA, 25 bp, Homo sapien
cgcggcggtagcacaagcggaggat

SEQ ID NO: 3798423 - DNA, 25 bp, Homo sapien
cagcactgacattcagccggaaccg

SEQ ID NO: 3798424 - DNA, 25 bp, Homo sapien
acaagcggaggatgcggcggcggag

SEQ ID NO: 3798425 - DNA, 25 bp, Homo sapien
ggccccgacccgtctctcgtctcac

SEQ ID NO: 3798426 - DNA, 25 bp, Homo sapien
gcggccccgacccgtctctcgtctc

SEQ ID NO: 3798427 - DNA, 25 bp, Homo sapien
cggccccgacccgtctctcgtctca

SEQ ID NO: 3798428 - DNA, 25 bp, Homo sapien
caaggagtggatgttgcgggaagtc

SEQ ID NO: 3798429 - DNA, 25 bp, Homo sapien
tggatgttgcgggaagtcttgccat

SEQ ID NO: 3798430 - DNA, 25 bp, Homo sapien
ttgcgggaagtcttgccatggcccc

SEQ ID NO: 3798431 - DNA, 25 bp, Homo sapien
cccagctccgcgagcggccaaacat

SEQ ID NO: 3798432 - DNA, 25 bp, Homo sapien
aagaactggcattttcgggatagag

SEQ ID NO: 3798433 - DNA, 25 bp, Homo sapien
cacagaagaagttagagaagacagc

SEQ ID NO: 3798434 - DNA, 25 bp, Homo sapien
gggaagaactggcattttcgggata

SEQ ID NO: 3798435 - DNA, 25 bp, Homo sapien
aataatgtgttaactgtgtgggaca

SEQ ID NO: 3798436 - DNA, 25 bp, Homo sapien
tgttagctaactctccaccgacaga

SEQ ID NO: 3798437 - DNA, 25 bp, Homo sapien
caccaaggatgacagacgtaaacaa

SEQ ID NO: 3798438 - DNA, 25 bp, Homo sapien
gaaactgtaaccaacacactcgagg

SEQ ID NO: 3798439 - DNA, 25 bp, Homo sapien
aaggctctaactcccatttgtctgg

SEQ ID NO: 3798440 - DNA, 25 bp, Homo sapien
agtgatggaacggatggtctccact

SEQ ID NO: 3798441 - DNA, 25 bp, Homo sapien
tgtcattttgatctccccagatcag

SEQ ID NO: 3798442 - DNA, 25 bp, Homo sapien
tttgatctccccagatcaggatctc

SEQ ID NO: 3798443 - DNA, 25 bp, Homo sapien
atggaacggatggtctccactagca

SEQ ID NO: 3798444 - DNA, 25 bp, Homo sapien
taacggcccgacttttgccgcaaga

SEQ ID NO: 3798445 - DNA, 25 bp, Homo sapien
agcagctgaacgcacacgtaacggc

SEQ ID NO: 3798446 - DNA, 25 bp, Homo sapien
tgaggtctcgtgactgatgttctca

SEQ ID NO: 3798447 - DNA, 25 bp, Homo sapien
tttgccgcaagatgttcaagaagaa

SEQ ID NO: 3798448 - DNA, 25 bp, Homo sapien
cagatgaaaggccatgcacagcaag

SEQ ID NO: 3798449 - DNA, 25 bp, Homo sapien
gagacaccagctagcactctctcaa

SEQ ID NO: 3798450 - DNA, 25 bp, Homo sapien
gactggcgtccccatagaaggagga

SEQ ID NO: 3798451 - DNA, 25 bp, Homo sapien
caacctcgacttccttgacaaacaa

SEQ ID NO: 3798452 - DNA, 25 bp, Homo sapien
tactgcatgatctcaattacaggga

SEQ ID NO: 3798453 - DNA, 25 bp, Homo sapien
caagaaaagccacgcatactgcatg

SEQ ID NO: 3798454 - DNA, 25 bp, Homo sapien
ccaagttctgtaaacgtgcaatgat

SEQ ID NO: 3798455 - DNA, 25 bp, Homo sapien
caaagggtacgacgcacgatgagta

SEQ ID NO: 3798456 - DNA, 25 bp, Homo sapien
cctggagtctaacatgggtatcgtg

SEQ ID NO: 3798457 - DNA, 25 bp, Homo sapien
gatgtgcaactgtgagtctctcagc

SEQ ID NO: 3798458 - DNA, 25 bp, Homo sapien
tgtaccctggagctggaacagcgac

SEQ ID NO: 3798459 - DNA, 25 bp, Homo sapien
cataggacagttggaggtgcctcta

SEQ ID NO: 3798460 - DNA, 25 bp, Homo sapien
aagtcaaatttatgaacgatgatag

SEQ ID NO: 3798461 - DNA, 25 bp, Homo sapien
gaacgatatataataggccataatc

SEQ ID NO: 3798462 - DNA, 25 bp, Homo sapien
gaatttacgtagttatttgagagca

SEQ ID NO: 3798463 - DNA, 25 bp, Homo sapien
cgaaagtgttttcaggaacgatata

SEQ ID NO: 3798464 - DNA, 25 bp, Homo sapien
ttcagggtggttgaaaaacttgatg

SEQ ID NO: 3798465 - DNA, 25 bp, Homo sapien
cagggtggttgaaaaacttgatggc

SEQ ID NO: 3798466 - DNA, 25 bp, Homo sapien
gttcttacagcaattctaaccatgc

SEQ ID NO: 3798467 - DNA, 25 bp, Homo sapien
ttatagacattcaaagttatggttc

SEQ ID NO: 3798468 - DNA, 25 bp, Homo sapien
ctgggaaggtgagagagctgctcag

SEQ ID NO: 3798469 - DNA, 25 bp, Homo sapien
tgagagagctgctcagagggagaga

SEQ ID NO: 3798470 - DNA, 25 bp, Homo sapien
agagagctgctcagagggagagaga

SEQ ID NO: 3798471 - DNA, 25 bp, Homo sapien
ggtgagagagctgctcagagggaga

SEQ ID NO: 3798472 - DNA, 25 bp, Homo sapien
gaacacaggaatcgtcattgaagga

SEQ ID NO: 3798473 - DNA, 25 bp, Homo sapien
cacaggaatcgtcattgaaggaaaa

SEQ ID NO: 3798474 - DNA, 25 bp, Homo sapien
aggaacacaggaatcgtcattgaag

SEQ ID NO: 3798475 - DNA, 25 bp, Homo sapien
caggaatcgtcattgaaggaaaagc

SEQ ID NO: 3798476 - DNA, 25 bp, Homo sapien
tcctcatcagtctgcacgcagtcat

SEQ ID NO: 3798477 - DNA, 25 bp, Homo sapien
tatctcggatgtagtgcagcatggc

SEQ ID NO: 3798478 - DNA, 25 bp, Homo sapien
cacgcagtcatcgagttcgatcaca

SEQ ID NO: 3798479 - DNA, 25 bp, Homo sapien
tcgatcacatggctcccaatgaacc

SEQ ID NO: 3798480 - DNA, 25 bp, Homo sapien
tcattgagatagtgcaggtggtcta

SEQ ID NO: 3798481 - DNA, 25 bp, Homo sapien
ggaactcacagttgatgatcaggat

SEQ ID NO: 3798482 - DNA, 25 bp, Homo sapien
ttctccagtgagtacacgtagaggg

SEQ ID NO: 3798483 - DNA, 25 bp, Homo sapien
tcagtgagcacatcgttgaggaact

SEQ ID NO: 3798484 - DNA, 25 bp, Homo sapien
aagataaagagacaccggcaggcta

SEQ ID NO: 3798485 - DNA, 25 bp, Homo sapien
aagagacaccggcaggctaattttc

SEQ ID NO: 3798486 - DNA, 25 bp, Homo sapien
gacaccggcaggctaattttcggcc

SEQ ID NO: 3798487 - DNA, 25 bp, Homo sapien
gcaggctaattttcggccgttctcc

SEQ ID NO: 3798488 - DNA, 25 bp, Homo sapien
tctctgttaggacatacgagaaccc

SEQ ID NO: 3798489 - DNA, 25 bp, Homo sapien
tgtggcacctccctataaaaaattg

SEQ ID NO: 3798490 - DNA, 25 bp, Homo sapien
tgagttaacccacgtccaaggcttg

SEQ ID NO: 3798491 - DNA, 25 bp, Homo sapien
gataaaaggtacaggcagaatggcc

SEQ ID NO: 3798492 - DNA, 25 bp, Homo sapien
tcaccagcggtgcatgatgtataat

SEQ ID NO: 3798493 - DNA, 25 bp, Homo sapien
gacttcagctaacgagttcaccagc

SEQ ID NO: 3798494 - DNA, 25 bp, Homo sapien
cgtacatctcagacagatcaccatt

SEQ ID NO: 3798495 - DNA, 25 bp, Homo sapien
gaatatcctgttcagtcttagcgta

SEQ ID NO: 3798496 - DNA, 25 bp, Homo sapien
ataaggagcttagagtgggtaagac

SEQ ID NO: 3798497 - DNA, 25 bp, Homo sapien
ccataaggagcttagagtgggtaag

SEQ ID NO: 3798498 - DNA, 25 bp, Homo sapien
gccataaggagcttagagtgggtaa

SEQ ID NO: 3798499 - DNA, 25 bp, Homo sapien
tgccataaggagcttagagtgggta

SEQ ID NO: 3798500 - DNA, 25 bp, Homo sapien
gagatgagcatttgtgcagcccaga

SEQ ID NO: 3798501 - DNA, 25 bp, Homo sapien
ctgggctccgcataagtgagatgag

SEQ ID NO: 3798502 - DNA, 25 bp, Homo sapien
ccactctaagctccttatggcaggg

SEQ ID NO: 3798503 - DNA, 25 bp, Homo sapien
gctccttatggcagggatctcacct

SEQ ID NO: 3798504 - DNA, 25 bp, Homo sapien
ttcccaaacctgaacgatagtcatc

SEQ ID NO: 3798505 - DNA, 25 bp, Homo sapien
acttcacactgagagaaaggtagta

SEQ ID NO: 3798506 - DNA, 25 bp, Homo sapien
gactattatcaaacaagtcacagaa

SEQ ID NO: 3798507 - DNA, 25 bp, Homo sapien
gtcatcagattacaaccaacttcaa

SEQ ID NO: 3798508 - DNA, 25 bp, Homo sapien
gaagcctattagcattttcaggaag

SEQ ID NO: 3798509 - DNA, 25 bp, Homo sapien
tgtgcgcgccttggaaccagcactg

SEQ ID NO: 3798510 - DNA, 25 bp, Homo sapien
ttcaggaagaagaatgtgcgcgcct

SEQ ID NO: 3798511 - DNA, 25 bp, Homo sapien
attcacaatcaaccttctcccagaa

SEQ ID NO: 3798512 - DNA, 25 bp, Homo sapien
gaggctggcccactcatgaaaacta

SEQ ID NO: 3798513 - DNA, 25 bp, Homo sapien
gggtatatatctccagggcctagaa

SEQ ID NO: 3798514 - DNA, 25 bp, Homo sapien
tcacaaatatccgaagaggctggcc

SEQ ID NO: 3798515 - DNA, 25 bp, Homo sapien
ggcttcaggtaactcaaaatcaggt

SEQ ID NO: 3798516 - DNA, 25 bp, Homo sapien
tatgtgtttgattcccgtaccgaga

SEQ ID NO: 3798517 - DNA, 25 bp, Homo sapien
tataagcaacccagcaagtggtcag

SEQ ID NO: 3798518 - DNA, 25 bp, Homo sapien
tcagaactctctagggaaactccca

SEQ ID NO: 3798519 - DNA, 25 bp, Homo sapien
tcaacgttgactgcaggaaccatgc

SEQ ID NO: 3798520 - DNA, 25 bp, Homo sapien
gcagccgcgtgctcagcacttgacg

SEQ ID NO: 3798521 - DNA, 25 bp, Homo sapien
gcctcttgcagccgcgtgctcagca

SEQ ID NO: 3798522 - DNA, 25 bp, Homo sapien
ttgcagccgcgtgctcagcacttga

SEQ ID NO: 3798523 - DNA, 25 bp, Homo sapien
cttgcagccgcgtgctcagcacttg

SEQ ID NO: 3798524 - DNA, 25 bp, Homo sapien
aagaatgcacagctgcaacatcagt

SEQ ID NO: 3798525 - DNA, 25 bp, Homo sapien
acatcagtgaggcgatttgacggca

SEQ ID NO: 3798526 - DNA, 25 bp, Homo sapien
caacatcagtgaggcgatttgacgg

SEQ ID NO: 3798527 - DNA, 25 bp, Homo sapien
aacatcagtgaggcgatttgacggc

SEQ ID NO: 3798528 - DNA, 25 bp, Homo sapien
aacagctctgctaagcgatttgaga

SEQ ID NO: 3798529 - DNA, 25 bp, Homo sapien
tggtacccttggacccaaggtgctc

SEQ ID NO: 3798530 - DNA, 25 bp, Homo sapien
cagtggtggtacccttggacccaag

SEQ ID NO: 3798531 - DNA, 25 bp, Homo sapien
tacccttggacccaaggtgctcggc

SEQ ID NO: 3798532 - DNA, 25 bp, Homo sapien
cttggacccaaggtgctcggccagc

SEQ ID NO: 3798533 - DNA, 25 bp, Homo sapien
tctgaagcccctaggagaagggccc

SEQ ID NO: 3798534 - DNA, 25 bp, Homo sapien
gaatgaatgtttgtaccaggctgta

SEQ ID NO: 3798535 - DNA, 25 bp, Homo sapien
ctttctcaggagctaaacgtagcag

SEQ ID NO: 3798536 - DNA, 25 bp, Homo sapien
cacagttagcatgcagaggctggta

SEQ ID NO: 3798537 - DNA, 25 bp, Homo sapien
tcttgggcatcctcggtgggccctt

SEQ ID NO: 3798538 - DNA, 25 bp, Homo sapien
ctcaagggaccgctcgagtgtctcg

SEQ ID NO: 3798539 - DNA, 25 bp, Homo sapien
tgtctcggtgggtttaatgaagcac

SEQ ID NO: 3798540 - DNA, 25 bp, Homo sapien
gatgccttttgaaccaccctctgta

SEQ ID NO: 3798541 - DNA, 25 bp, Homo sapien
gacacaagcaatagggcagttccat

SEQ ID NO: 3798542 - DNA, 25 bp, Homo sapien
gagtgcacctcattctaaacagaca

SEQ ID NO: 3798543 - DNA, 25 bp, Homo sapien
tcttcccgcagtgcacaggatgcaa

SEQ ID NO: 3798544 - DNA, 25 bp, Homo sapien
ttttagcatctcaacgagagggagg

SEQ ID NO: 3798545 - DNA, 25 bp, Homo sapien
tggactgggaagctcacgcagtcct

SEQ ID NO: 3798546 - DNA, 25 bp, Homo sapien
ctgggaagctcacgcagtccttgct

SEQ ID NO: 3798547 - DNA, 25 bp, Homo sapien
gggaagctcacgcagtccttgctga

SEQ ID NO: 3798548 - DNA, 25 bp, Homo sapien
gaagctcacgcagtccttgctgaca

SEQ ID NO: 3798549 - DNA, 25 bp, Homo sapien
tgtccatctgtcgataagtccgtgg

SEQ ID NO: 3798550 - DNA, 25 bp, Homo sapien
tccatctgtcgataagtccgtggat

SEQ ID NO: 3798551 - DNA, 25 bp, Homo sapien
atgtccatctgtcgataagtccgtg

SEQ ID NO: 3798552 - DNA, 25 bp, Homo sapien
catgtccatctgtcgataagtccgt

SEQ ID NO: 3798553 - DNA, 25 bp, Homo sapien
tgttgtccaactagtgcctatgtgg

SEQ ID NO: 3798554 - DNA, 25 bp, Homo sapien
ataatttaacaactcgcccgggctg

SEQ ID NO: 3798555 - DNA, 25 bp, Homo sapien
gcacccagccgaatgtacttaacac

SEQ ID NO: 3798556 - DNA, 25 bp, Homo sapien
cctctctaaatgacagctctggcca

SEQ ID NO: 3798557 - DNA, 25 bp, Homo sapien
catctctatattctgcagtggtaga

SEQ ID NO: 3798558 - DNA, 25 bp, Homo sapien
aaggctctccctgtaccatctaaaa

SEQ ID NO: 3798559 - DNA, 25 bp, Homo sapien
aggcattagtctctgccccaggcta

SEQ ID NO: 3798560 - DNA, 25 bp, Homo sapien
gaaactgaagtaccaaggcattagt

SEQ ID NO: 3798561 - DNA, 25 bp, Homo sapien
tttaatgctagaagtattttgggcc

SEQ ID NO: 3798562 - DNA, 25 bp, Homo sapien
tacataatttcccttaaggtcacag

SEQ ID NO: 3798563 - DNA, 25 bp, Homo sapien
gtatgccacatgaacttaactcctg

SEQ ID NO: 3798564 - DNA, 25 bp, Homo sapien
tatgttttcgtgaccagaagtatgc

SEQ ID NO: 3798565 - DNA, 25 bp, Homo sapien
ccactgtctaatccagtgtctggca

SEQ ID NO: 3798566 - DNA, 25 bp, Homo sapien
cagcgggcccgagtggcaatgattc

SEQ ID NO: 3798567 - DNA, 25 bp, Homo sapien
cacgagatgttttggcagcgggccc

SEQ ID NO: 3798568 - DNA, 25 bp, Homo sapien
gataaatgagcgactggtctagccc

SEQ ID NO: 3798569 - DNA, 25 bp, Homo sapien
cattaggttctgaaacgtcttcgcg

SEQ ID NO: 3798570 - DNA, 25 bp, Homo sapien
tggtcaggcattcttgagagtccct

SEQ ID NO: 3798571 - DNA, 25 bp, Homo sapien
tccttgcttgtgatgacctggacat

SEQ ID NO: 3798572 - DNA, 25 bp, Homo sapien
gtcagtaaacacaggccacacttag

SEQ ID NO: 3798573 - DNA, 25 bp, Homo sapien
ggaaggctctcacaccaggtctctc

SEQ ID NO: 3798574 - DNA, 25 bp, Homo sapien
ctggaaggctctcacaccaggtctc

SEQ ID NO: 3798575 - DNA, 25 bp, Homo sapien
ctctcacaccaggtctctcctagcc

SEQ ID NO: 3798576 - DNA, 25 bp, Homo sapien
gctctcacaccaggtctctcctagc

SEQ ID NO: 3798577 - DNA, 25 bp, Homo sapien
cttgggctcagacaccgcctctgcc

SEQ ID NO: 3798578 - DNA, 25 bp, Homo sapien
tgggctcagacaccgcctctgccat

SEQ ID NO: 3798579 - DNA, 25 bp, Homo sapien
ttgggctcagacaccgcctctgcca

SEQ ID NO: 3798580 - DNA, 25 bp, Homo sapien
agccctagatttatacacatgctca

SEQ ID NO: 3798581 - DNA, 25 bp, Homo sapien
cacatgctcatgttggagaataaat

SEQ ID NO: 3798582 - DNA, 25 bp, Homo sapien
ctgggatgagtccagacagcttttc

SEQ ID NO: 3798583 - DNA, 25 bp, Homo sapien
atgtccgacagcagcgacctgaaca

SEQ ID NO: 3798584 - DNA, 25 bp, Homo sapien
tcctcgtccgtggtgttctgctcct

SEQ ID NO: 3798585 - DNA, 25 bp, Homo sapien
gcttttctcctcgtccgtggtgttc

SEQ ID NO: 3798586 - DNA, 25 bp, Homo sapien
gcgcttttctcctcgtccgtggtgt

SEQ ID NO: 3798587 - DNA, 25 bp, Homo sapien
ttctcctcgtccgtggtgttctgct

SEQ ID NO: 3798588 - DNA, 25 bp, Homo sapien
cccaggtttaagaagatgtagctac

SEQ ID NO: 3798589 - DNA, 25 bp, Homo sapien
catacgctgggagtagccttccctc

SEQ ID NO: 3798590 - DNA, 25 bp, Homo sapien
aaaaatggctcccttgcacatctga

SEQ ID NO: 3798591 - DNA, 25 bp, Homo sapien
gaagtgaatgcctcgcaggctgaca

SEQ ID NO: 3798592 - DNA, 25 bp, Homo sapien
cgcaatgaagactgaaaagcattta

SEQ ID NO: 3798593 - DNA, 25 bp, Homo sapien
tcaggcactgtggacggtgccaatg

SEQ ID NO: 3798594 - DNA, 25 bp, Homo sapien
attgtgaggattcaagcgcaatgaa

SEQ ID NO: 3798595 - DNA, 25 bp, Homo sapien
cactgtggacggtgccaatgcatgg

SEQ ID NO: 3798596 - DNA, 25 bp, Homo sapien
aagctcccgtgtcagctggtagaca

SEQ ID NO: 3798597 - DNA, 25 bp, Homo sapien
cagggaatcaattatacaaactccc

SEQ ID NO: 3798598 - DNA, 25 bp, Homo sapien
tccagacacagggaatcaattatac

SEQ ID NO: 3798599 - DNA, 25 bp, Homo sapien
cacaccaaagctcccgtgtcagctg

SEQ ID NO: 3798600 - DNA, 25 bp, Homo sapien
cgaacagggcatggtaatcatcatc

SEQ ID NO: 3798601 - DNA, 25 bp, Homo sapien
aggaggcagagcacgaacagggcat

SEQ ID NO: 3798602 - DNA, 25 bp, Homo sapien
tttattatgagacatggcatagagg

SEQ ID NO: 3798603 - DNA, 25 bp, Homo sapien
tccagcgcgtggtacaccatatcca

SEQ ID NO: 3798604 - DNA, 25 bp, Homo sapien
tcctgtggcttcagttggtagaaaa

SEQ ID NO: 3798605 - DNA, 25 bp, Homo sapien
cctccatattgcctgagtaaccaat

SEQ ID NO: 3798606 - DNA, 25 bp, Homo sapien
gtggcttcagttggtagaaaaacac

SEQ ID NO: 3798607 - DNA, 25 bp, Homo sapien
gagtaaccaattcctgtggcttcag

SEQ ID NO: 3798608 - DNA, 25 bp, Homo sapien
tttttctttgctcttcctccgccat

SEQ ID NO: 3798609 - DNA, 25 bp, Homo sapien
gatttttctttgctcttcctccgcc

SEQ ID NO: 3798610 - DNA, 25 bp, Homo sapien
ggatttttctttgctcttcctccgc

SEQ ID NO: 3798611 - DNA, 25 bp, Homo sapien
atttttctttgctcttcctccgcca

SEQ ID NO: 3798612 - DNA, 25 bp, Homo sapien
caggtttctgctgccagtaatcatg

SEQ ID NO: 3798613 - DNA, 25 bp, Homo sapien
ggtttctgctgccagtaatcatgta

SEQ ID NO: 3798614 - DNA, 25 bp, Homo sapien
agatgcaccttgtcaggtttctgct

SEQ ID NO: 3798615 - DNA, 25 bp, Homo sapien
gtcaggtttctgctgccagtaatca

SEQ ID NO: 3798616 - DNA, 25 bp, Homo sapien
tttttggtagcatgatgggccactg

SEQ ID NO: 3798617 - DNA, 25 bp, Homo sapien
aagggcgcaagaaccatgagatctc

SEQ ID NO: 3798618 - DNA, 25 bp, Homo sapien
ccgatagccaagtgtgcccatctcc

SEQ ID NO: 3798619 - DNA, 25 bp, Homo sapien
ttggtagcatgatgggccactgaga

SEQ ID NO: 3798620 - DNA, 25 bp, Homo sapien
ctagttcagctggcggatgagctga

SEQ ID NO: 3798621 - DNA, 25 bp, Homo sapien
gcggatgagctgattgatgcgttca

SEQ ID NO: 3798622 - DNA, 25 bp, Homo sapien
ggcggatgagctgattgatgcgttc

SEQ ID NO: 3798623 - DNA, 25 bp, Homo sapien
gctggcggatgagctgattgatgcg

SEQ ID NO: 3798624 - DNA, 25 bp, Homo sapien
cccaaaagtctcgaaacacaatatt

SEQ ID NO: 3798625 - DNA, 25 bp, Homo sapien
gaaaagactcttcactaacaaagac

SEQ ID NO: 3798626 - DNA, 25 bp, Homo sapien
cgggctaaggattcgaaaagactct

SEQ ID NO: 3798627 - DNA, 25 bp, Homo sapien
ggattcgaaaagactcttcactaac

SEQ ID NO: 3798628 - DNA, 25 bp, Homo sapien
ggagagaagctagccccaaatggtg

SEQ ID NO: 3798629 - DNA, 25 bp, Homo sapien
ggtggcattctcctagacacaggga

SEQ ID NO: 3798630 - DNA, 25 bp, Homo sapien
tgttggtgccataacttatcgcaga

SEQ ID NO: 3798631 - DNA, 25 bp, Homo sapien
tatcgcagagctctccataaactga

SEQ ID NO: 3798632 - DNA, 25 bp, Homo sapien
tgatgagtctttcagctagcgggtg

SEQ ID NO: 3798633 - DNA, 25 bp, Homo sapien
gctgggcagcgttgttcatgatcct

SEQ ID NO: 3798634 - DNA, 25 bp, Homo sapien
gctggattcgctctaatttttcagg

SEQ ID NO: 3798635 - DNA, 25 bp, Homo sapien
gttgtaggtggtcttctcggccgca

SEQ ID NO: 3798636 - DNA, 25 bp, Homo sapien
ggtctgcttcctacaactgcgtggc

SEQ ID NO: 3798637 - DNA, 25 bp, Homo sapien
tccacgttgaggctagcaggtcaca

SEQ ID NO: 3798638 - DNA, 25 bp, Homo sapien
ttatctcgtcaacccagaaggtggc

SEQ ID NO: 3798639 - DNA, 25 bp, Homo sapien
caaacataatacaagccccagggat

SEQ ID NO: 3798640 - DNA, 25 bp, Homo sapien
ccagcactcatcaggacttgctgct

SEQ ID NO: 3798641 - DNA, 25 bp, Homo sapien
gacttgctgcttcagaagcaggcag

SEQ ID NO: 3798642 - DNA, 25 bp, Homo sapien
catgatgcagccagcactcatcagg

SEQ ID NO: 3798643 - DNA, 25 bp, Homo sapien
tcagctccagcgtcgccagccggat

SEQ ID NO: 3798644 - DNA, 25 bp, Homo sapien
aatgtcgtacaaggtgaacactttc

SEQ ID NO: 3798645 - DNA, 25 bp, Homo sapien
cgtacaaggtgaacactttcttctc

SEQ ID NO: 3798646 - DNA, 25 bp, Homo sapien
cttataaaaatgtcgtacaaggtga

SEQ ID NO: 3798647 - DNA, 25 bp, Homo sapien
taaaaatgtcgtacaaggtgaacac

SEQ ID NO: 3798648 - DNA, 25 bp, Homo sapien
catgctgctgtccatctgtgctctg

SEQ ID NO: 3798649 - DNA, 25 bp, Homo sapien
ctgctgtccatctgtgctctgccaa

SEQ ID NO: 3798650 - DNA, 25 bp, Homo sapien
gctgtccatctgtgctctgccaatt

SEQ ID NO: 3798651 - DNA, 25 bp, Homo sapien
tgtccatctgtgctctgccaattac

SEQ ID NO: 3798652 - DNA, 25 bp, Homo sapien
aaaataactgaagacatataacgtt

SEQ ID NO: 3798653 - DNA, 25 bp, Homo sapien
gtttatctgcatagaaccagacacc

SEQ ID NO: 3798654 - DNA, 25 bp, Homo sapien
cacacttctgtttctacaatacaca

SEQ ID NO: 3798655 - DNA, 25 bp, Homo sapien
catagaaccagacaccacacttctg

SEQ ID NO: 3798656 - DNA, 25 bp, Homo sapien
cttcaaacatgtccaaaaaaatgtc

SEQ ID NO: 3798657 - DNA, 25 bp, Homo sapien
aacatgtccaaaaaaatgtcttctc

SEQ ID NO: 3798658 - DNA, 25 bp, Homo sapien
tgtcatgctcctatactcatcttca

SEQ ID NO: 3798659 - DNA, 25 bp, Homo sapien
catgctcctatactcatcttcaaac

SEQ ID NO: 3798660 - DNA, 25 bp, Homo sapien
tgggctgtcctcctctagaagcgtg

SEQ ID NO: 3798661 - DNA, 25 bp, Homo sapien
tatggagtacctagccaagggcagg

SEQ ID NO: 3798662 - DNA, 25 bp, Homo sapien
tgagacacatgagaatccccacgtg

SEQ ID NO: 3798663 - DNA, 25 bp, Homo sapien
gataacagagacaaacgcgcaaagc

SEQ ID NO: 3798664 - DNA, 25 bp, Homo sapien
gccaaggagccacttggtgcatgct

SEQ ID NO: 3798665 - DNA, 25 bp, Homo sapien
ttccactcagaagctgcattcctga

SEQ ID NO: 3798666 - DNA, 25 bp, Homo sapien
tatagctgcagaaaacatactgaga

SEQ ID NO: 3798667 - DNA, 25 bp, Homo sapien
tgagacacccggtgaatgggccaga

SEQ ID NO: 3798668 - DNA, 25 bp, Homo sapien
ttatccctgtgggtgcaagcccgtc

SEQ ID NO: 3798669 - DNA, 25 bp, Homo sapien
gattccgctgcaagctgtgacctaa

SEQ ID NO: 3798670 - DNA, 25 bp, Homo sapien
tccgtttaacgagagctgattccgc

SEQ ID NO: 3798671 - DNA, 25 bp, Homo sapien
aaatggatccaaggtcgctcagctg

SEQ ID NO: 3798672 - DNA, 25 bp, Homo sapien
gcagcaggatggaggcgtccatcat

SEQ ID NO: 3798673 - DNA, 25 bp, Homo sapien
gcgtccatcatgagatattccacgt

SEQ ID NO: 3798674 - DNA, 25 bp, Homo sapien
aatgcccgtcagtggcgtgcctgtt

SEQ ID NO: 3798675 - DNA, 25 bp, Homo sapien
acggcagccgcttcacgaagtcaat

SEQ ID NO: 3798676 - DNA, 25 bp, Homo sapien
cagggaggaaggttcagactcctcg

SEQ ID NO: 3798677 - DNA, 25 bp, Homo sapien
cagactcctcgtgtctgaggtgcaa

SEQ ID NO: 3798678 - DNA, 25 bp, Homo sapien
ccaggcttccgaggtagaaccacca

SEQ ID NO: 3798679 - DNA, 25 bp, Homo sapien
aaatgacaggtcattcctgttttgc

SEQ ID NO: 3798680 - DNA, 25 bp, Homo sapien
ctgccacccacaaacagaatcgtgt

SEQ ID NO: 3798681 - DNA, 25 bp, Homo sapien
tgccacccacaaacagaatcgtgtg

SEQ ID NO: 3798682 - DNA, 25 bp, Homo sapien
aaccagtcctccagtgaaagctgat

SEQ ID NO: 3798683 - DNA, 25 bp, Homo sapien
cagcatcatgaagcaacacatacac

SEQ ID NO: 3798684 - DNA, 25 bp, Homo sapien
aagctgatgccaggacgtccagtgc

SEQ ID NO: 3798685 - DNA, 25 bp, Homo sapien
gggtgagcacgtcagcatcatgaag

SEQ ID NO: 3798686 - DNA, 25 bp, Homo sapien
tgaaaaacttcttgtgctacgacga

SEQ ID NO: 3798687 - DNA, 25 bp, Homo sapien
tactggaagcaacgaaaatgtctac

SEQ ID NO: 3798688 - DNA, 25 bp, Homo sapien
cagacaaagataggaggagcacaaa

SEQ ID NO: 3798689 - DNA, 25 bp, Homo sapien
taaaacctcgtgcaaatatgggtgt

SEQ ID NO: 3798690 - DNA, 25 bp, Homo sapien
cctgactgagggtgcagtgccccat

SEQ ID NO: 3798691 - DNA, 25 bp, Homo sapien
agatgccccacacccagaaatgaca

SEQ ID NO: 3798692 - DNA, 25 bp, Homo sapien
agtgagatgccccacacccagaaat

SEQ ID NO: 3798693 - DNA, 25 bp, Homo sapien
gccccacacccagaaatgacaccat

SEQ ID NO: 3798694 - DNA, 25 bp, Homo sapien
ttcagtgagatgccccacacccaga

SEQ ID NO: 3798695 - DNA, 25 bp, Homo sapien
agagaagagtgagattgcagagtca

SEQ ID NO: 3798696 - DNA, 25 bp, Homo sapien
gagaagagtgagattgcagagtcat

SEQ ID NO: 3798697 - DNA, 25 bp, Homo sapien
cagagaagagtgagattgcagagtc

SEQ ID NO: 3798698 - DNA, 25 bp, Homo sapien
ctggaccaacagttcagagagcaga

SEQ ID NO: 3798699 - DNA, 25 bp, Homo sapien
tcagatccaggacatcatcagtctt

SEQ ID NO: 3798700 - DNA, 25 bp, Homo sapien
gcagtgacagggaacgcagcatgaa

SEQ ID NO: 3798701 - DNA, 25 bp, Homo sapien
gagtcagcggcaactgtgtctcagg

SEQ ID NO: 3798702 - DNA, 25 bp, Homo sapien
gcagcatgaagaacacccggatggc

SEQ ID NO: 3798703 - DNA, 25 bp, Homo sapien
gcttctggggaatatcctttacgct

SEQ ID NO: 3798704 - DNA, 25 bp, Homo sapien
ccggagctcggctgtcacacccagc

SEQ ID NO: 3798705 - DNA, 25 bp, Homo sapien
atatcctttacgctgttgtttctta

SEQ ID NO: 3798706 - DNA, 25 bp, Homo sapien
ctggggaatatcctttacgctgttg

SEQ ID NO: 3798707 - DNA, 25 bp, Homo sapien
gaggctctgaggtcaatcccaagga

SEQ ID NO: 3798708 - DNA, 25 bp, Homo sapien
tcaaatgtcaacaagacccgggcgg

SEQ ID NO: 3798709 - DNA, 25 bp, Homo sapien
tgagtgagtctcacagcctagacgg

SEQ ID NO: 3798710 - DNA, 25 bp, Homo sapien
tatgttcaagcctgggagagcactc

SEQ ID NO: 3798711 - DNA, 25 bp, Homo sapien
ccatgtcaatcagattggtctccaa

SEQ ID NO: 3798712 - DNA, 25 bp, Homo sapien
gacttcaggcaatccgctcgcctca

SEQ ID NO: 3798713 - DNA, 25 bp, Homo sapien
cctcagtctccggtgtaactgggat

SEQ ID NO: 3798714 - DNA, 25 bp, Homo sapien
aaaaggtctctccatgttgcctcgg

SEQ ID NO: 3798715 - DNA, 25 bp, Homo sapien
ctggggctgagggtaaaccacagat

SEQ ID NO: 3798716 - DNA, 25 bp, Homo sapien
gctggggctgagggtaaaccacaga

SEQ ID NO: 3798717 - DNA, 25 bp, Homo sapien
ctcagagcctttgtctgggctctcc

SEQ ID NO: 3798718 - DNA, 25 bp, Homo sapien
atcaacatcactccgctgcctgagg

SEQ ID NO: 3798719 - DNA, 25 bp, Homo sapien
cctgaggacatctggtatggaagaa

SEQ ID NO: 3798720 - DNA, 25 bp, Homo sapien
ggacatctggtatggaagaactcca

SEQ ID NO: 3798721 - DNA, 25 bp, Homo sapien
tctggtatggaagaactccagctgg

SEQ ID NO: 3798722 - DNA, 25 bp, Homo sapien
cggggagttgcggagaaatgtaata

SEQ ID NO: 3798723 - DNA, 25 bp, Homo sapien
taggtaagcggggagttgcggagaa

SEQ ID NO: 3798724 - DNA, 25 bp, Homo sapien
aatgtaataggaaagtggtccactg

SEQ ID NO: 3798725 - DNA, 25 bp, Homo sapien
taataggaaagtggtccactgtgaa

SEQ ID NO: 3798726 - DNA, 25 bp, Homo sapien
gggcagaatcactgaagtgtccagc

SEQ ID NO: 3798727 - DNA, 25 bp, Homo sapien
ccggcctgtacactggaagcctgtt

SEQ ID NO: 3798728 - DNA, 25 bp, Homo sapien
cttccaacccttgagtccgggcaga

SEQ ID NO: 3798729 - DNA, 25 bp, Homo sapien
atgctcccggcctgtacactggaag

SEQ ID NO: 3798730 - DNA, 25 bp, Homo sapien
gtggcttgggtcactgtcctctcac

SEQ ID NO: 3798731 - DNA, 25 bp, Homo sapien
cgtggcttgggtcactgtcctctca

SEQ ID NO: 3798732 - DNA, 25 bp, Homo sapien
cctttgagcccctggagccttcatc

SEQ ID NO: 3798733 - DNA, 25 bp, Homo sapien
cagtttcccctttgagcccctggag

SEQ ID NO: 3798734 - DNA, 25 bp, Homo sapien
tttgagcccctggagccttcatctt

SEQ ID NO: 3798735 - DNA, 25 bp, Homo sapien
cccctttgagcccctggagccttca

SEQ ID NO: 3798736 - DNA, 25 bp, Homo sapien
cctctggaacccctgactcatgtta

SEQ ID NO: 3798737 - DNA, 25 bp, Homo sapien
ctctggaacccctgactcatgttac

SEQ ID NO: 3798738 - DNA, 25 bp, Homo sapien
gcctctggaacccctgactcatgtt

SEQ ID NO: 3798739 - DNA, 25 bp, Homo sapien
aagcctctggaacccctgactcatg

SEQ ID NO: 3798740 - DNA, 25 bp, Homo sapien
ctctgttcctggagtggtcattccc

SEQ ID NO: 3798741 - DNA, 25 bp, Homo sapien
tgtcttactcaactgtccagagcac

SEQ ID NO: 3798742 - DNA, 25 bp, Homo sapien
tcaggactgatcaaggtgaaaatgg

SEQ ID NO: 3798743 - DNA, 25 bp, Homo sapien
tgtggcaaaccctcagctatgctga

SEQ ID NO: 3798744 - DNA, 25 bp, Homo sapien
gcaagtaggtatgatcaatgggcat

SEQ ID NO: 3798745 - DNA, 25 bp, Homo sapien
agcaagtaggtatgatcaatgggca

SEQ ID NO: 3798746 - DNA, 25 bp, Homo sapien
gagcaagtaggtatgatcaatgggc

SEQ ID NO: 3798747 - DNA, 25 bp, Homo sapien
tatattactaacactgctagagaag

SEQ ID NO: 3798748 - DNA, 25 bp, Homo sapien
ggatctatattactaacactgctag

SEQ ID NO: 3798749 - DNA, 25 bp, Homo sapien
ctctgggatctatattactaacact

SEQ ID NO: 3798750 - DNA, 25 bp, Homo sapien
tattactaacactgctagagaaggc

SEQ ID NO: 3798751 - DNA, 25 bp, Homo sapien
ctggaattccaagagcagggcccac

SEQ ID NO: 3798752 - DNA, 25 bp, Homo sapien
tggaattccaagagcagggcccaca

SEQ ID NO: 3798753 - DNA, 25 bp, Homo sapien
cctggaattccaagagcagggccca

SEQ ID NO: 3798754 - DNA, 25 bp, Homo sapien
gaacacatataataagcccaagtta

SEQ ID NO: 3798755 - DNA, 25 bp, Homo sapien
tcgaacacatataataagcccaagt

SEQ ID NO: 3798756 - DNA, 25 bp, Homo sapien
cacatataataagcccaagttaaaa

SEQ ID NO: 3798757 - DNA, 25 bp, Homo sapien
tttcgaacacatataataagcccaa

SEQ ID NO: 3798758 - DNA, 25 bp, Homo sapien
catgccgccatccttggtgatcact

SEQ ID NO: 3798759 - DNA, 25 bp, Homo sapien
ggtgatcactgtacatgcaatcaag

SEQ ID NO: 3798760 - DNA, 25 bp, Homo sapien
aggaatcgctggaccatgccgccat

SEQ ID NO: 3798761 - DNA, 25 bp, Homo sapien
tctggtaaatatccacagccaggaa

SEQ ID NO: 3798762 - DNA, 25 bp, Homo sapien
tgatgttcagggcacggctgtcgtc

SEQ ID NO: 3798763 - DNA, 25 bp, Homo sapien
gctggacgcaggcttgtggatggtg

SEQ ID NO: 3798764 - DNA, 25 bp, Homo sapien
ccaggcgctgcttggcgatgatgca

SEQ ID NO: 3798765 - DNA, 25 bp, Homo sapien
tgcgccttgcctggatgcggccttt

SEQ ID NO: 3798766 - DNA, 25 bp, Homo sapien
accccaggacttcagtggtgggctg

SEQ ID NO: 3798767 - DNA, 25 bp, Homo sapien
gtggaggagccgagtccaaacccca

SEQ ID NO: 3798768 - DNA, 25 bp, Homo sapien
gtgggctggattgggaggtccagga

SEQ ID NO: 3798769 - DNA, 25 bp, Homo sapien
agtccaaaccccaggacttcagtgg

SEQ ID NO: 3798770 - DNA, 25 bp, Homo sapien
accgatgcaaacacggagcgctgca

SEQ ID NO: 3798771 - DNA, 25 bp, Homo sapien
ctggcaccttgtccaccgatgcaaa

SEQ ID NO: 3798772 - DNA, 25 bp, Homo sapien
gcgcccctggtcgtagaagcggaaa

SEQ ID NO: 3798773 - DNA, 25 bp, Homo sapien
ctgcactgtggggtcgctgctgccc

SEQ ID NO: 3798774 - DNA, 25 bp, Homo sapien
accttgaacgcccaccatgatgaac

SEQ ID NO: 3798775 - DNA, 25 bp, Homo sapien
gagagaaagaccttgaacgcccacc

SEQ ID NO: 3798776 - DNA, 25 bp, Homo sapien
caccatgatgaacgagctgtggcgc

SEQ ID NO: 3798777 - DNA, 25 bp, Homo sapien
ccatgatgaacgagctgtggcgcag

SEQ ID NO: 3798778 - DNA, 25 bp, Homo sapien
ctgtgtttaatcttgcgctgtgctt

SEQ ID NO: 3798779 - DNA, 25 bp, Homo sapien
taatcttgcgctgtgctttgacaaa

SEQ ID NO: 3798780 - DNA, 25 bp, Homo sapien
ttaatcttgcgctgtgctttgacaa

SEQ ID NO: 3798781 - DNA, 25 bp, Homo sapien
gctgtgtttaatcttgcgctgtgct

SEQ ID NO: 3798782 - DNA, 25 bp, Homo sapien
tctgagaagttcttccacataccca

SEQ ID NO: 3798783 - DNA, 25 bp, Homo sapien
catatggaaggagtggacagctgac

SEQ ID NO: 3798784 - DNA, 25 bp, Homo sapien
ctgtgggcagcacggccttcttttg

SEQ ID NO: 3798785 - DNA, 25 bp, Homo sapien
gacaaatcagcaatggactttccat

SEQ ID NO: 3798786 - DNA, 25 bp, Homo sapien
gcacagaaggttcccacgcaggcaa

SEQ ID NO: 3798787 - DNA, 25 bp, Homo sapien
aagactatgaccaggcacacaaagg

SEQ ID NO: 3798788 - DNA, 25 bp, Homo sapien
gggagaaagactatgaccaggcaca

SEQ ID NO: 3798789 - DNA, 25 bp, Homo sapien
ggataaacggaaccaggctaggctg

SEQ ID NO: 3798790 - DNA, 25 bp, Homo sapien
cctgggcccgcagataaaatcggaa

SEQ ID NO: 3798791 - DNA, 25 bp, Homo sapien
gaagcaaggactccatgcgctgtgc

SEQ ID NO: 3798792 - DNA, 25 bp, Homo sapien
gctctatgacaattacctgggcccg

SEQ ID NO: 3798793 - DNA, 25 bp, Homo sapien
catgtcacagtatcagaggccaacc

SEQ ID NO: 3798794 - DNA, 25 bp, Homo sapien
cagagaagtccctgtcccggagtta

SEQ ID NO: 3798795 - DNA, 25 bp, Homo sapien
caattaaaaacaagctgccgtgcag

SEQ ID NO: 3798796 - DNA, 25 bp, Homo sapien
tgcaagggccaggagatgtcaacct

SEQ ID NO: 3798797 - DNA, 25 bp, Homo sapien
tgaaatgggacgcacttggccctgg

SEQ ID NO: 3798798 - DNA, 25 bp, Homo sapien
agcaactacttcataggcatccatg

SEQ ID NO: 3798799 - DNA, 25 bp, Homo sapien
tcactgagcaactacttcataggca

SEQ ID NO: 3798800 - DNA, 25 bp, Homo sapien
ctgagcaactacttcataggcatcc

SEQ ID NO: 3798801 - DNA, 25 bp, Homo sapien
aactacttcataggcatccatgagc

SEQ ID NO: 3798802 - DNA, 25 bp, Homo sapien
taattgacagcagaaggactactgc

SEQ ID NO: 3798803 - DNA, 25 bp, Homo sapien
tatgtcacaagagcctaatgaggtg

SEQ ID NO: 3798804 - DNA, 25 bp, Homo sapien
tgcctgctctattacaccccggtgt

SEQ ID NO: 3798805 - DNA, 25 bp, Homo sapien
gaaagagcaactctgtgccactgca

SEQ ID NO: 3798806 - DNA, 25 bp, Homo sapien
ttcacggagtggaaaccagggagcc

SEQ ID NO: 3798807 - DNA, 25 bp, Homo sapien
gggcactgaggaatgacactagctt

SEQ ID NO: 3798808 - DNA, 25 bp, Homo sapien
gaatgacactagcttcccagagctg

SEQ ID NO: 3798809 - DNA, 25 bp, Homo sapien
gaggaatgacactagcttcccagag

SEQ ID NO: 3798810 - DNA, 25 bp, Homo sapien
ctctgaatatgcttcagaacggagg

SEQ ID NO: 3798811 - DNA, 25 bp, Homo sapien
ctgaatatgcttcagaacggagggc

SEQ ID NO: 3798812 - DNA, 25 bp, Homo sapien
tgaatatgcttcagaacggagggca

SEQ ID NO: 3798813 - DNA, 25 bp, Homo sapien
gaatatgcttcagaacggagggcat

SEQ ID NO: 3798814 - DNA, 25 bp, Homo sapien
cacgatggagtagaatacagcaaga

SEQ ID NO: 3798815 - DNA, 25 bp, Homo sapien
tctctgatgacttctgtactcttgg

SEQ ID NO: 3798816 - DNA, 25 bp, Homo sapien
tgtactcttggttcacacgatggag

SEQ ID NO: 3798817 - DNA, 25 bp, Homo sapien
cagcaagaatatgtggggttcccaa

SEQ ID NO: 3798818 - DNA, 25 bp, Homo sapien
caaaccttgttccaggggattgtct

SEQ ID NO: 3798819 - DNA, 25 bp, Homo sapien
ggacttttatcaacttacatacaga

SEQ ID NO: 3798820 - DNA, 25 bp, Homo sapien
catacagaattaagggctaggaatt

SEQ ID NO: 3798821 - DNA, 25 bp, Homo sapien
gattgtctttgagctagtcagagag

SEQ ID NO: 3798822 - DNA, 25 bp, Homo sapien
ggtgcttcgtgttgggtcagcacaa

SEQ ID NO: 3798823 - DNA, 25 bp, Homo sapien
caagctgctcaagtccggcagcttg

SEQ ID NO: 3798824 - DNA, 25 bp, Homo sapien
ccggcagcttgagcaagcctttcag

SEQ ID NO: 3798825 - DNA, 25 bp, Homo sapien
cctttcaggtgcttcgtgttgggtc

SEQ ID NO: 3798826 - DNA, 25 bp, Homo sapien
tgtgagtgagctgtcctctgcacgg

SEQ ID NO: 3798827 - DNA, 25 bp, Homo sapien
tctgggtgacttgccctgttgaggc

SEQ ID NO: 3798828 - DNA, 25 bp, Homo sapien
ctggcggcatgaaccctctgggtga

SEQ ID NO: 3798829 - DNA, 25 bp, Homo sapien
ttgaggcccccaccacttcaggtat

SEQ ID NO: 3798830 - DNA, 25 bp, Homo sapien
tgtcccaagctgctacacgatgtgc

SEQ ID NO: 3798831 - DNA, 25 bp, Homo sapien
tcactgaccatgctagccaagggca

SEQ ID NO: 3798832 - DNA, 25 bp, Homo sapien
gatctgtcataaccaggcacgctgt

SEQ ID NO: 3798833 - DNA, 25 bp, Homo sapien
ggcagcgccgttctcaggagcagat

SEQ ID NO: 3798834 - DNA, 25 bp, Homo sapien
ggacggagaatgaacacagctgtct

SEQ ID NO: 3798835 - DNA, 25 bp, Homo sapien
agttggctgtcccacagaagttgtg

SEQ ID NO: 3798836 - DNA, 25 bp, Homo sapien
tggctgtcccacagaagttgtggag

SEQ ID NO: 3798837 - DNA, 25 bp, Homo sapien
ctagttggctgtcccacagaagttg

SEQ ID NO: 3798838 - DNA, 25 bp, Homo sapien
ggcataccatctagcagcaccagga

SEQ ID NO: 3798839 - DNA, 25 bp, Homo sapien
ggtcagaccacaatcaacagagatt

SEQ ID NO: 3798840 - DNA, 25 bp, Homo sapien
agttggacgtggttgccggcatacc

SEQ ID NO: 3798841 - DNA, 25 bp, Homo sapien
gagtctggattgcatcaaggtttcc

SEQ ID NO: 3798842 - DNA, 25 bp, Homo sapien
ttctcttttgtggctcttctgggcc

SEQ ID NO: 3798843 - DNA, 25 bp, Homo sapien
tacacagaactgctggagcttctct

SEQ ID NO: 3798844 - DNA, 25 bp, Homo sapien
ctacacagaactgctggagcttctc

SEQ ID NO: 3798845 - DNA, 25 bp, Homo sapien
gggcctgagctgaagcgcacatcac

SEQ ID NO: 3798846 - DNA, 25 bp, Homo sapien
aacagctgaccggttccatccattc

SEQ ID NO: 3798847 - DNA, 25 bp, Homo sapien
tgcagtaatagcaaaacagctgacc

SEQ ID NO: 3798848 - DNA, 25 bp, Homo sapien
aaaaattaatacaacgggtctgcag

SEQ ID NO: 3798849 - DNA, 25 bp, Homo sapien
tcttctgggttgataggattgtgat

SEQ ID NO: 3798850 - DNA, 25 bp, Homo sapien
cagctctggcacatgtatgaaatgc

SEQ ID NO: 3798851 - DNA, 25 bp, Homo sapien
taaaaggccatgtagggcacacata

SEQ ID NO: 3798852 - DNA, 25 bp, Homo sapien
tggttttgccatcatacgagttagg

SEQ ID NO: 3798853 - DNA, 25 bp, Homo sapien
ggtattacgttacactgtcagctgg

SEQ ID NO: 3798854 - DNA, 25 bp, Homo sapien
gtcaatgtcctggaccagcagctga

SEQ ID NO: 3798855 - DNA, 25 bp, Homo sapien
cagatgtcaatgtcctggaccagca

SEQ ID NO: 3798856 - DNA, 25 bp, Homo sapien
tgagcaaacacagagcttgggcccc

SEQ ID NO: 3798857 - DNA, 25 bp, Homo sapien
gatgtcaatgtcctggaccagcagc

SEQ ID NO: 3798858 - DNA, 25 bp, Homo sapien
ggaagcgtctcagcctttcaatgac

SEQ ID NO: 3798859 - DNA, 25 bp, Homo sapien
gaacgcagatgattagtgccccaaa

SEQ ID NO: 3798860 - DNA, 25 bp, Homo sapien
cctggcgcccgaacgcagatgatta

SEQ ID NO: 3798861 - DNA, 25 bp, Homo sapien
agccccacggttttagagccatgaa

SEQ ID NO: 3798862 - DNA, 25 bp, Homo sapien
tgggctgcctctctactgcggcagt

SEQ ID NO: 3798863 - DNA, 25 bp, Homo sapien
caacagtctgtcagccaaggcacta

SEQ ID NO: 3798864 - DNA, 25 bp, Homo sapien
caaggcactagcaagcttgggagcg

SEQ ID NO: 3798865 - DNA, 25 bp, Homo sapien
tagcaagcttgggagcggccatctg

SEQ ID NO: 3798866 - DNA, 25 bp, Homo sapien
tttgctgtcgggtgaaggtctgcct

SEQ ID NO: 3798867 - DNA, 25 bp, Homo sapien
tgtcctaattgtgcccttagaaatg

SEQ ID NO: 3798868 - DNA, 25 bp, Homo sapien
tctctgtgtcctaattgtgccctta

SEQ ID NO: 3798869 - DNA, 25 bp, Homo sapien
taatgccccttttgctaccggcagg

SEQ ID NO: 3798870 - DNA, 25 bp, Homo sapien
catgtccaacatacaaaaatagctg

SEQ ID NO: 3798871 - DNA, 25 bp, Homo sapien
gcttttcaacggataacatgtccaa

SEQ ID NO: 3798872 - DNA, 25 bp, Homo sapien
aaaatagctgggaacttgcagagtc

SEQ ID NO: 3798873 - DNA, 25 bp, Homo sapien
ttatccatggataaatcctctcaga

SEQ ID NO: 3798874 - DNA, 25 bp, Homo sapien
aacagtggggggaaactatgcccat

SEQ ID NO: 3798875 - DNA, 25 bp, Homo sapien
gatcaagtcatagattggcagtaaa

SEQ ID NO: 3798876 - DNA, 25 bp, Homo sapien
ccatttgcagggtctagctgagcag

SEQ ID NO: 3798877 - DNA, 25 bp, Homo sapien
ctgagaccagaaagccacagtgact

SEQ ID NO: 3798878 - DNA, 25 bp, Homo sapien
catctgcagtgggacatgtagggta

SEQ ID NO: 3798879 - DNA, 25 bp, Homo sapien
cggagggtggcgactgtgaggacag

SEQ ID NO: 3798880 - DNA, 25 bp, Homo sapien
gctgtgctggtttatgcactgggcc

SEQ ID NO: 3798881 - DNA, 25 bp, Homo sapien
tggaggacgagctggtgcctccaga

SEQ ID NO: 3798882 - DNA, 25 bp, Homo sapien
tccagagtcgcagtggctggtgctc

SEQ ID NO: 3798883 - DNA, 25 bp, Homo sapien
tggaccgcaccacatttaaggacaa

SEQ ID NO: 3798884 - DNA, 25 bp, Homo sapien
tgcagatcacctgagcggcatcatc

SEQ ID NO: 3798885 - DNA, 25 bp, Homo sapien
tagactgcaaacaatccccttggga

SEQ ID NO: 3798886 - DNA, 25 bp, Homo sapien
tccttgtgacacctaagactgtgga

SEQ ID NO: 3798887 - DNA, 25 bp, Homo sapien
gttgaaggatggcaagatacgactt

SEQ ID NO: 3798888 - DNA, 25 bp, Homo sapien
tggcaagatacgacttcatcacatc

SEQ ID NO: 3798889 - DNA, 25 bp, Homo sapien
ccgggttccctctgtgccatgtctg

SEQ ID NO: 3798890 - DNA, 25 bp, Homo sapien
tctgaagtggaataagttgaaggat

SEQ ID NO: 3798891 - DNA, 25 bp, Homo sapien
ggcaaggaagctttcatccccagtg

SEQ ID NO: 3798892 - DNA, 25 bp, Homo sapien
ggtgcatgaacacacaaccctgcat

SEQ ID NO: 3798893 - DNA, 25 bp, Homo sapien
gttggctgtacgtccttaaaaatga

SEQ ID NO: 3798894 - DNA, 25 bp, Homo sapien
tccccagtgcaacggtaaatatgtg

SEQ ID NO: 3798895 - DNA, 25 bp, Homo sapien
tgggttcatccgcaacatctggtct

SEQ ID NO: 3798896 - DNA, 25 bp, Homo sapien
tagacatggcccaggagtcaggaca

SEQ ID NO: 3798897 - DNA, 25 bp, Homo sapien
cctaactgggcagcgacttggtgac

SEQ ID NO: 3798898 - DNA, 25 bp, Homo sapien
tgttcactcgtgcaacttaaccggg

SEQ ID NO: 3798899 - DNA, 25 bp, Homo sapien
aacacagcgacagatcatagaaagc

SEQ ID NO: 3798900 - DNA, 25 bp, Homo sapien
aaacacagcgacagatcatagaaag

SEQ ID NO: 3798901 - DNA, 25 bp, Homo sapien
ggctgaacactcgtcggcgtccttt

SEQ ID NO: 3798902 - DNA, 25 bp, Homo sapien
gactgtcggcctccgacaggctgaa

SEQ ID NO: 3798903 - DNA, 25 bp, Homo sapien
tggcagctgccgttcggagcactaa

SEQ ID NO: 3798904 - DNA, 25 bp, Homo sapien
actaaacccagtggccgccatgact

SEQ ID NO: 3798905 - DNA, 25 bp, Homo sapien
tctagaggaaaccactgcatgaggc

SEQ ID NO: 3798906 - DNA, 25 bp, Homo sapien
taacaatagcatgcgcacagaactg

SEQ ID NO: 3798907 - DNA, 25 bp, Homo sapien
tcttggcttccggtcaaaacaggac

SEQ ID NO: 3798908 - DNA, 25 bp, Homo sapien
taccatctggagacaaagtagccaa

SEQ ID NO: 3798909 - DNA, 25 bp, Homo sapien
gcgtgtcagccgtgtcctcgcagag

SEQ ID NO: 3798910 - DNA, 25 bp, Homo sapien
gcgctcctggccacgttcttgctgg

SEQ ID NO: 3798911 - DNA, 25 bp, Homo sapien
ggacaagggtcagcgattcgacgct

SEQ ID NO: 3798912 - DNA, 25 bp, Homo sapien
gcttccgtttcgttgacgattacca

SEQ ID NO: 3798913 - DNA, 25 bp, Homo sapien
tagaggaatctagcgcgtctggcag

SEQ ID NO: 3798914 - DNA, 25 bp, Homo sapien
cgagctggccgagtagaaaggaaca

SEQ ID NO: 3798915 - DNA, 25 bp, Homo sapien
ggtggcaaaagatctcagcgcggct

SEQ ID NO: 3798916 - DNA, 25 bp, Homo sapien
gacaggtaccttgcacgtccagaaa

SEQ ID NO: 3798917 - DNA, 25 bp, Homo sapien
cagaggcatcgaggttttctaaccc

SEQ ID NO: 3798918 - DNA, 25 bp, Homo sapien
tgttcagtacccacgaagcatgagt

SEQ ID NO: 3798919 - DNA, 25 bp, Homo sapien
cataaggaactcgtacagtgtaggc

SEQ ID NO: 3798920 - DNA, 25 bp, Homo sapien
gcaggtacttccctagagcggtccc

SEQ ID NO: 3798921 - DNA, 25 bp, Homo sapien
gctggtctctaagtggggcaggtag

SEQ ID NO: 3798922 - DNA, 25 bp, Homo sapien
acatccagccaggcggttttttttg

SEQ ID NO: 3798923 - DNA, 25 bp, Homo sapien
tccagtgtagctttgaaggcctctg

SEQ ID NO: 3798924 - DNA, 25 bp, Homo sapien
cagtgtagctttgaaggcctctggg

SEQ ID NO: 3798925 - DNA, 25 bp, Homo sapien
attgccattggtccctcggccaagc

SEQ ID NO: 3798926 - DNA, 25 bp, Homo sapien
tgtttgaatgtcctcgtgacacgac

SEQ ID NO: 3798927 - DNA, 25 bp, Homo sapien
agggctgtttgaatgtcctcgtgac

SEQ ID NO: 3798928 - DNA, 25 bp, Homo sapien
tcctcgtgacacgacagctgactac

SEQ ID NO: 3798929 - DNA, 25 bp, Homo sapien
gaatgtcctcgtgacacgacagctg

SEQ ID NO: 3798930 - DNA, 25 bp, Homo sapien
cagctgtttggccttgggcaagtta

SEQ ID NO: 3798931 - DNA, 25 bp, Homo sapien
tgggcaagttaacaaacctctctgt

SEQ ID NO: 3798932 - DNA, 25 bp, Homo sapien
ctgtttggccttgggcaagttaaca

SEQ ID NO: 3798933 - DNA, 25 bp, Homo sapien
cctctctgtgcctcatggtcttcat

SEQ ID NO: 3798934 - DNA, 25 bp, Homo sapien
tggtatggaccctgtccttctccat

SEQ ID NO: 3798935 - DNA, 25 bp, Homo sapien
tggtggtatggaccctgtccttctc

SEQ ID NO: 3798936 - DNA, 25 bp, Homo sapien
gtggtatggaccctgtccttctcca

SEQ ID NO: 3798937 - DNA, 25 bp, Homo sapien
ctggtggtatggaccctgtccttct

SEQ ID NO: 3798938 - DNA, 25 bp, Homo sapien
ctggatgtccgacatgaaggctcca

SEQ ID NO: 3798939 - DNA, 25 bp, Homo sapien
agggctcagcttggatgtcccagcc

SEQ ID NO: 3798940 - DNA, 25 bp, Homo sapien
ggctcagcttggatgtcccagcctg

SEQ ID NO: 3798941 - DNA, 25 bp, Homo sapien
gctcagcttggatgtcccagcctgg

SEQ ID NO: 3798942 - DNA, 25 bp, Homo sapien
cactccatccggtggtggccagaca

SEQ ID NO: 3798943 - DNA, 25 bp, Homo sapien
caagtgtgaggcaagtgacatgtcc

SEQ ID NO: 3798944 - DNA, 25 bp, Homo sapien
ggtatgcaaaactcccaggaaggca

SEQ ID NO: 3798945 - DNA, 25 bp, Homo sapien
gggcctccaggattcttagtgacaa

SEQ ID NO: 3798946 - DNA, 25 bp, Homo sapien
ggtaggtcacccaagccttcaatgg

SEQ ID NO: 3798947 - DNA, 25 bp, Homo sapien
atgaccccacaggacggtttcagga

SEQ ID NO: 3798948 - DNA, 25 bp, Homo sapien
actctgtgtcccaagttttcatccc

SEQ ID NO: 3798949 - DNA, 25 bp, Homo sapien
ttctgcgcccgagggatgaggttca

SEQ ID NO: 3798950 - DNA, 25 bp, Homo sapien
ttcaggatattcttctgcgcccgag

SEQ ID NO: 3798951 - DNA, 25 bp, Homo sapien
gcacctgggcaaagactgtcctgga

SEQ ID NO: 3798952 - DNA, 25 bp, Homo sapien
agggcacctgggcaaagactgtcct

SEQ ID NO: 3798953 - DNA, 25 bp, Homo sapien
gcaaagactgtcctggagggtcgta

SEQ ID NO: 3798954 - DNA, 25 bp, Homo sapien
aaagactgtcctggagggtcgtaga

SEQ ID NO: 3798955 - DNA, 25 bp, Homo sapien
cctctgggcagtgcgtgaattcctg

SEQ ID NO: 3798956 - DNA, 25 bp, Homo sapien
gatggcgcctgactagaaaatgtag

SEQ ID NO: 3798957 - DNA, 25 bp, Homo sapien
tgtcctcaaggaaactgcaccctga

SEQ ID NO: 3798958 - DNA, 25 bp, Homo sapien
gcatgtgattggttaagggatcccc

SEQ ID NO: 3798959 - DNA, 25 bp, Homo sapien
actgcatgacctcggcaagtcgctt

SEQ ID NO: 3798960 - DNA, 25 bp, Homo sapien
catgacctcggcaagtcgcttctgc

SEQ ID NO: 3798961 - DNA, 25 bp, Homo sapien
tccatgtcactgcatgacctcggca

SEQ ID NO: 3798962 - DNA, 25 bp, Homo sapien
gtcactgcatgacctcggcaagtcg

SEQ ID NO: 3798963 - DNA, 25 bp, Homo sapien
tgggctgcttcggacatgccactca

SEQ ID NO: 3798964 - DNA, 25 bp, Homo sapien
atctctgtgaggaactcggcccgct

SEQ ID NO: 3798965 - DNA, 25 bp, Homo sapien
ggaactgcctcctgcaaccggcggg

SEQ ID NO: 3798966 - DNA, 25 bp, Homo sapien
taccaagaacctcgaggcgagagga

SEQ ID NO: 3798967 - DNA, 25 bp, Homo sapien
caggatgtgcacagggactcttttt

SEQ ID NO: 3798968 - DNA, 25 bp, Homo sapien
gtttcattcccctatcacattgcca

SEQ ID NO: 3798969 - DNA, 25 bp, Homo sapien
gaaagtcggctattgcccagcgtgg

SEQ ID NO: 3798970 - DNA, 25 bp, Homo sapien
catgcaccgctttggttaattgaaa

SEQ ID NO: 3798971 - DNA, 25 bp, Homo sapien
cctctggcatctggcccaggatcag

SEQ ID NO: 3798972 - DNA, 25 bp, Homo sapien
catctggcccaggatcaggccttac

SEQ ID NO: 3798973 - DNA, 25 bp, Homo sapien
tgccatcagacaacacatgaggctt

SEQ ID NO: 3798974 - DNA, 25 bp, Homo sapien
ccagggctctcccagtacgatgttg

SEQ ID NO: 3798975 - DNA, 25 bp, Homo sapien
tggggaccaacgtcaggcagggcca

SEQ ID NO: 3798976 - DNA, 25 bp, Homo sapien
tgagcccgctcgcacccggcagccg

SEQ ID NO: 3798977 - DNA, 25 bp, Homo sapien
cttgatggggaccaacgtcaggcag

SEQ ID NO: 3798978 - DNA, 25 bp, Homo sapien
gagcccgctcgcacccggcagccgc

SEQ ID NO: 3798979 - DNA, 25 bp, Homo sapien
gataacgcttgttgaaacctctttc

SEQ ID NO: 3798980 - DNA, 25 bp, Homo sapien
cacagccggtcttcggggaagtcgc

SEQ ID NO: 3798981 - DNA, 25 bp, Homo sapien
tcagactgagatagacgcggccgcg

SEQ ID NO: 3798982 - DNA, 25 bp, Homo sapien
aagtcgccgagttggagttccagga

SEQ ID NO: 3798983 - DNA, 25 bp, Homo sapien
agatacaggcagtgccccgatcccc

SEQ ID NO: 3798984 - DNA, 25 bp, Homo sapien
tgagatacaggcagtgccccgatcc

SEQ ID NO: 3798985 - DNA, 25 bp, Homo sapien
gtgagatacaggcagtgccccgatc

SEQ ID NO: 3798986 - DNA, 25 bp, Homo sapien
atacaggcagtgccccgatccccat

SEQ ID NO: 3798987 - DNA, 25 bp, Homo sapien
gggttctacgtggagaagccaacta

SEQ ID NO: 3798988 - DNA, 25 bp, Homo sapien
cgtggagaagccaactactgcttga

SEQ ID NO: 3798989 - DNA, 25 bp, Homo sapien
agccaactactgcttgaggtcggca

SEQ ID NO: 3798990 - DNA, 25 bp, Homo sapien
tctacgtggagaagccaactactgc

SEQ ID NO: 3798991 - DNA, 25 bp, Homo sapien
gagattcccaacgaacacgcgttca

SEQ ID NO: 3798992 - DNA, 25 bp, Homo sapien
ttgagattcccaacgaacacgcgtt

SEQ ID NO: 3798993 - DNA, 25 bp, Homo sapien
gttgagattcccaacgaacacgcgt

SEQ ID NO: 3798994 - DNA, 25 bp, Homo sapien
gattcccaacgaacacgcgttcatg

SEQ ID NO: 3798995 - DNA, 25 bp, Homo sapien
acagcgcagcccacaattttgccat

SEQ ID NO: 3798996 - DNA, 25 bp, Homo sapien
aacagcgcagcccacaattttgcca

SEQ ID NO: 3798997 - DNA, 25 bp, Homo sapien
cttaagaacagcgcagcccacaatt

SEQ ID NO: 3798998 - DNA, 25 bp, Homo sapien
aagaacagcgcagcccacaattttg

SEQ ID NO: 3798999 - DNA, 25 bp, Homo sapien
ggccagcgattattctgccatctgc

SEQ ID NO: 3799000 - DNA, 25 bp, Homo sapien
tgacccgtacgtctccactgctgat

SEQ ID NO: 3799001 - DNA, 25 bp, Homo sapien
tctgtttctgacccgtacgtctcca

SEQ ID NO: 3799002 - DNA, 25 bp, Homo sapien
gtttctgacccgtacgtctccactg

SEQ ID NO: 3799003 - DNA, 25 bp, Homo sapien
tctgacccgtacgtctccactgctg

SEQ ID NO: 3799004 - DNA, 25 bp, Homo sapien
taatcccgttgaaagtcatagtcca

SEQ ID NO: 3799005 - DNA, 25 bp, Homo sapien
cataatcccgttgaaagtcatagtc

SEQ ID NO: 3799006 - DNA, 25 bp, Homo sapien
tatcataatcccgttgaaagtcata

SEQ ID NO: 3799007 - DNA, 25 bp, Homo sapien
atcccgttgaaagtcatagtccaag

SEQ ID NO: 3799008 - DNA, 25 bp, Homo sapien
tacacgtgctgggtaactgtacatc

SEQ ID NO: 3799009 - DNA, 25 bp, Homo sapien
gaggaggtacacgtgctgggtaact

SEQ ID NO: 3799010 - DNA, 25 bp, Homo sapien
gaggaggaggaggtacacgtgctgg

SEQ ID NO: 3799011 - DNA, 25 bp, Homo sapien
gaggtacacgtgctgggtaactgta

SEQ ID NO: 3799012 - DNA, 25 bp, Homo sapien
gggtcaactcctgcttaatggcctg

SEQ ID NO: 3799013 - DNA, 25 bp, Homo sapien
gatacacgctgatgtttcaagggca

SEQ ID NO: 3799014 - DNA, 25 bp, Homo sapien
gtgtttcctgatacacgctgatgtt

SEQ ID NO: 3799015 - DNA, 25 bp, Homo sapien
cctgatacacgctgatgtttcaagg

SEQ ID NO: 3799016 - DNA, 25 bp, Homo sapien
tcatctctactgcttgtttgctctg

SEQ ID NO: 3799017 - DNA, 25 bp, Homo sapien
ctctactgcttgtttgctctgtttc

SEQ ID NO: 3799018 - DNA, 25 bp, Homo sapien
cattcttcatctctactgcttgttt

SEQ ID NO: 3799019 - DNA, 25 bp, Homo sapien
tttccgggtcttccaggagagaatc

SEQ ID NO: 3799020 - DNA, 25 bp, Homo sapien
tctatcttcacatgagtctcacgtg

SEQ ID NO: 3799021 - DNA, 25 bp, Homo sapien
accaccttcagactctatcttcaca

SEQ ID NO: 3799022 - DNA, 25 bp, Homo sapien
tctgcaccaccttcagactctatct

SEQ ID NO: 3799023 - DNA, 25 bp, Homo sapien
atgagtctcacgtgagctgctgctc

SEQ ID NO: 3799024 - DNA, 25 bp, Homo sapien
gtgctgtctctgtcatcctctcctt

SEQ ID NO: 3799025 - DNA, 25 bp, Homo sapien
ttaagagtcatcttcaccattggtg

SEQ ID NO: 3799026 - DNA, 25 bp, Homo sapien
gtcatcttcaccattggtgctgtct

SEQ ID NO: 3799027 - DNA, 25 bp, Homo sapien
aagagtcatcttcaccattggtgct

SEQ ID NO: 3799028 - DNA, 25 bp, Homo sapien
aggagagggtctggtgaaacatttg

SEQ ID NO: 3799029 - DNA, 25 bp, Homo sapien
ctagaggagagggtctggtgaaaca

SEQ ID NO: 3799030 - DNA, 25 bp, Homo sapien
gaaacatttgatcttagacaagcac

SEQ ID NO: 3799031 - DNA, 25 bp, Homo sapien
tagaggagagggtctggtgaaacat

SEQ ID NO: 3799032 - DNA, 25 bp, Homo sapien
tcttgctaataacagcggtgactgc

SEQ ID NO: 3799033 - DNA, 25 bp, Homo sapien
ggttgcttcttgctaataacagcgg

SEQ ID NO: 3799034 - DNA, 25 bp, Homo sapien
ctcaggttgcttcttgctaataaca

SEQ ID NO: 3799035 - DNA, 25 bp, Homo sapien
taataacagcggtgactgccagctc

SEQ ID NO: 3799036 - DNA, 25 bp, Homo sapien
tcaggagtgctgtctaccagccggg

SEQ ID NO: 3799037 - DNA, 25 bp, Homo sapien
tcgaggcagacaaatgaagtcgggt

SEQ ID NO: 3799038 - DNA, 25 bp, Homo sapien
tccctcgtcccgtgcatcaggagtg

SEQ ID NO: 3799039 - DNA, 25 bp, Homo sapien
atgaagtcgggtcggcttttgtcca

SEQ ID NO: 3799040 - DNA, 25 bp, Homo sapien
agcatccgcgtgcactttcaggccg

SEQ ID NO: 3799041 - DNA, 25 bp, Homo sapien
gaactgctttttcgcccttagcgtg

SEQ ID NO: 3799042 - DNA, 25 bp, Homo sapien
ccttagcgtgaagatggcctcggga

SEQ ID NO: 3799043 - DNA, 25 bp, Homo sapien
cgactgcctcttcgagctgctggag

SEQ ID NO: 3799044 - DNA, 25 bp, Homo sapien
tgcacctgcaagcatccaagagagg

SEQ ID NO: 3799045 - DNA, 25 bp, Homo sapien
cagtggcatgacatggaaggtcctc

SEQ ID NO: 3799046 - DNA, 25 bp, Homo sapien
gagcaagtcatgtcccctgtctgca

SEQ ID NO: 3799047 - DNA, 25 bp, Homo sapien
ggttcattgagataatgcacctgca

SEQ ID NO: 3799048 - DNA, 25 bp, Homo sapien
tgagctgtatcaagggagcagggtg

SEQ ID NO: 3799049 - DNA, 25 bp, Homo sapien
gggttgtaccaatctccgcaggaag

SEQ ID NO: 3799050 - DNA, 25 bp, Homo sapien
catgtccccgtgagggaatgagcct

SEQ ID NO: 3799051 - DNA, 25 bp, Homo sapien
gcttggacattattcttggtgtgag

SEQ ID NO: 3799052 - DNA, 25 bp, Homo sapien
gacccagagagtcttcacggcttgg

SEQ ID NO: 3799053 - DNA, 25 bp, Homo sapien
tatgactggctctgccgtgatcggc

SEQ ID NO: 3799054 - DNA, 25 bp, Homo sapien
tccggaggccttagcagagaatcct

SEQ ID NO: 3799055 - DNA, 25 bp, Homo sapien
taatcgccgagaatcccttagtgac

SEQ ID NO: 3799056 - DNA, 25 bp, Homo sapien
caggctaaatgtcacactcagatac

SEQ ID NO: 3799057 - DNA, 25 bp, Homo sapien
gatgcttgagcccaaagtctcgaaa

SEQ ID NO: 3799058 - DNA, 25 bp, Homo sapien
ggtggcaatgctatcctttgagatg

SEQ ID NO: 3799059 - DNA, 25 bp, Homo sapien
gagatgtctgaattctggaccctcc

SEQ ID NO: 3799060 - DNA, 25 bp, Homo sapien
gaccatcgtgcttgggagccacaaa

SEQ ID NO: 3799061 - DNA, 25 bp, Homo sapien
ctcgtgaacaccagaccatcgtgct

SEQ ID NO: 3799062 - DNA, 25 bp, Homo sapien
tcagacgggtaacatgccaaccttg

SEQ ID NO: 3799063 - DNA, 25 bp, Homo sapien
ggtgcatcttacacaccctcgtgaa

SEQ ID NO: 3799064 - DNA, 25 bp, Homo sapien
aggcaaatagaagcgcaaggcccct

SEQ ID NO: 3799065 - DNA, 25 bp, Homo sapien
tgtaacaaggcaaatagaagcgcaa

SEQ ID NO: 3799066 - DNA, 25 bp, Homo sapien
tcatccaggcatctacgatgaatct

SEQ ID NO: 3799067 - DNA, 25 bp, Homo sapien
tacgatgaatctcactcaggtaccc

SEQ ID NO: 3799068 - DNA, 25 bp, Homo sapien
ggtgaagcacctggacatcatgttc

SEQ ID NO: 3799069 - DNA, 25 bp, Homo sapien
ctggaaaggctgacgtgcaggatca

SEQ ID NO: 3799070 - DNA, 25 bp, Homo sapien
gatttgtggaccttactgcatacca

SEQ ID NO: 3799071 - DNA, 25 bp, Homo sapien
tgggtggtcaccacacgagtgtgta

SEQ ID NO: 3799072 - DNA, 25 bp, Homo sapien
gccttggacagggcataagatgtct

SEQ ID NO: 3799073 - DNA, 25 bp, Homo sapien
ttggacagggcataagatgtctggc

SEQ ID NO: 3799074 - DNA, 25 bp, Homo sapien
gatgtctggcgcctccagtgcccag

SEQ ID NO: 3799075 - DNA, 25 bp, Homo sapien
aagatgtctggcgcctccagtgccc

SEQ ID NO: 3799076 - DNA, 25 bp, Homo sapien
gagtaaaatgaggagttggatctgt

SEQ ID NO: 3799077 - DNA, 25 bp, Homo sapien
aagagtaaaatgaggagttggatct

SEQ ID NO: 3799078 - DNA, 25 bp, Homo sapien
agagtaaaatgaggagttggatctg

SEQ ID NO: 3799079 - DNA, 25 bp, Homo sapien
acttagctccatggcccttcaggga

SEQ ID NO: 3799080 - DNA, 25 bp, Homo sapien
cacggtcagacatccagagagcaaa

SEQ ID NO: 3799081 - DNA, 25 bp, Homo sapien
gcaaggcagtgtgaagattcctacc

SEQ ID NO: 3799082 - DNA, 25 bp, Homo sapien
tctttagaggccaggaaaccaaggc

SEQ ID NO: 3799083 - DNA, 25 bp, Homo sapien
ttatgccgagactgaagagcgagcc

SEQ ID NO: 3799084 - DNA, 25 bp, Homo sapien
gacagaacggatctgggaccagcag

SEQ ID NO: 3799085 - DNA, 25 bp, Homo sapien
tgtttcataacctctcgggcttcat

SEQ ID NO: 3799086 - DNA, 25 bp, Homo sapien
gataagaaattctcctccggacaga

SEQ ID NO: 3799087 - DNA, 25 bp, Homo sapien
gccaaagtttcgtttctgggaagca

SEQ ID NO: 3799088 - DNA, 25 bp, Homo sapien
catttgaggacggtgctgtttcccg

SEQ ID NO: 3799089 - DNA, 25 bp, Homo sapien
gaggtgcacaaacacggcagattcg

SEQ ID NO: 3799090 - DNA, 25 bp, Homo sapien
taatggctgcgaagcacacaggtgc

SEQ ID NO: 3799091 - DNA, 25 bp, Homo sapien
cttcatgccgcagatgccagggatg

SEQ ID NO: 3799092 - DNA, 25 bp, Homo sapien
tgccgcagatgccagggatggtggg

SEQ ID NO: 3799093 - DNA, 25 bp, Homo sapien
gtggcttcatgccgcagatgccagg

SEQ ID NO: 3799094 - DNA, 25 bp, Homo sapien
tcatgccgcagatgccagggatggt

SEQ ID NO: 3799095 - DNA, 25 bp, Homo sapien
ccgcggggccgcctgagaacgagtc

SEQ ID NO: 3799096 - DNA, 25 bp, Homo sapien
cctgagaacgagtccgcagccgccg

SEQ ID NO: 3799097 - DNA, 25 bp, Homo sapien
agtggcggcgacctcggaagccgca

SEQ ID NO: 3799098 - DNA, 25 bp, Homo sapien
gtggcggcgacctcggaagccgcac

SEQ ID NO: 3799099 - DNA, 25 bp, Homo sapien
cttgagtggcggcgacctcggaagc

SEQ ID NO: 3799100 - DNA, 25 bp, Homo sapien
tgagtggcggcgacctcggaagccg

SEQ ID NO: 3799101 - DNA, 25 bp, Homo sapien
gccgccctccgcgtcgcgccgcagc

SEQ ID NO: 3799102 - DNA, 25 bp, Homo sapien
ccgcccgtgacagccgccacgcgcc

SEQ ID NO: 3799103 - DNA, 25 bp, Homo sapien
cgggccgccctccgcgtcgcgccgc

SEQ ID NO: 3799104 - DNA, 25 bp, Homo sapien
gccgcccgtgacagccgccacgcgc

SEQ ID NO: 3799105 - DNA, 25 bp, Homo sapien
tgggactagacagggccgcccgcgc

SEQ ID NO: 3799106 - DNA, 25 bp, Homo sapien
tccccgctcgggtccctcagccgag

SEQ ID NO: 3799107 - DNA, 25 bp, Homo sapien
ctgggactagacagggccgcccgcg

SEQ ID NO: 3799108 - DNA, 25 bp, Homo sapien
gctcgggtccctcagccgagcctcg

SEQ ID NO: 3799109 - DNA, 25 bp, Homo sapien
tggatgggattatcagaaaggtctg

SEQ ID NO: 3799110 - DNA, 25 bp, Homo sapien
catggatgggattatcagaaaggtc

SEQ ID NO: 3799111 - DNA, 25 bp, Homo sapien
atggatgggattatcagaaaggtct

SEQ ID NO: 3799112 - DNA, 25 bp, Homo sapien
ctaaggaatattcctgtgtaaatct

SEQ ID NO: 3799113 - DNA, 25 bp, Homo sapien
ggaatattcctgtgtaaatcttcta

SEQ ID NO: 3799114 - DNA, 25 bp, Homo sapien
aaggaatattcctgtgtaaatcttc

SEQ ID NO: 3799115 - DNA, 25 bp, Homo sapien
gaatattcctgtgtaaatcttctac

SEQ ID NO: 3799116 - DNA, 25 bp, Homo sapien
tttaatcaccatgggcaacgaccgt

SEQ ID NO: 3799117 - DNA, 25 bp, Homo sapien
tcaggcatgggtactaagcagacag

SEQ ID NO: 3799118 - DNA, 25 bp, Homo sapien
cattgtaaaacagggacgcagcagt

SEQ ID NO: 3799119 - DNA, 25 bp, Homo sapien
tggtcaaccaaagcaaggctctctg

SEQ ID NO: 3799120 - DNA, 25 bp, Homo sapien
gcaggatacggtacaggtggttttc

SEQ ID NO: 3799121 - DNA, 25 bp, Homo sapien
acaaatggggcaggatacggtacag

SEQ ID NO: 3799122 - DNA, 25 bp, Homo sapien
gatacggtacaggtggttttcggca

SEQ ID NO: 3799123 - DNA, 25 bp, Homo sapien
cggtacaggtggttttcggcagctt

SEQ ID NO: 3799124 - DNA, 25 bp, Homo sapien
tcacaggatgtggaattcggtgctg

SEQ ID NO: 3799125 - DNA, 25 bp, Homo sapien
gtggaattcggtgctgacaggccct

SEQ ID NO: 3799126 - DNA, 25 bp, Homo sapien
caggatgtggaattcggtgctgaca

SEQ ID NO: 3799127 - DNA, 25 bp, Homo sapien
atgtggaattcggtgctgacaggcc

SEQ ID NO: 3799128 - DNA, 25 bp, Homo sapien
aagcgtgtagcttggcatcttccca

SEQ ID NO: 3799129 - DNA, 25 bp, Homo sapien
gaggaaagcgtgtagcttggcatct

SEQ ID NO: 3799130 - DNA, 25 bp, Homo sapien
taaaatgagcagtacccgctggagg

SEQ ID NO: 3799131 - DNA, 25 bp, Homo sapien
tacccgctggaggaaagcgtgtagc

SEQ ID NO: 3799132 - DNA, 25 bp, Homo sapien
ccagcatggaatgccgggaaactca

SEQ ID NO: 3799133 - DNA, 25 bp, Homo sapien
gggaaactcagaaccgcacgtgctg

SEQ ID NO: 3799134 - DNA, 25 bp, Homo sapien
tccttgaagggaagtgatggcccca

SEQ ID NO: 3799135 - DNA, 25 bp, Homo sapien
tgctgcaaacgcacggaagcagggc

SEQ ID NO: 3799136 - DNA, 25 bp, Homo sapien
gcatttgagccaggcttttttactt

SEQ ID NO: 3799137 - DNA, 25 bp, Homo sapien
agcatagaccctgtggcatttgagc

SEQ ID NO: 3799138 - DNA, 25 bp, Homo sapien
agcacagtatttttgtagcaggtct

SEQ ID NO: 3799139 - DNA, 25 bp, Homo sapien
gactcctttccttgttagggctgaa

SEQ ID NO: 3799140 - DNA, 25 bp, Homo sapien
catgagaaggcagggaacggcacca

SEQ ID NO: 3799141 - DNA, 25 bp, Homo sapien
aacggcaccagcgtgcgcagcgtga

SEQ ID NO: 3799142 - DNA, 25 bp, Homo sapien
gaccagcatgagaaggcagggaacg

SEQ ID NO: 3799143 - DNA, 25 bp, Homo sapien
gcgtgcgcagcgtgacctgtgtcct

SEQ ID NO: 3799144 - DNA, 25 bp, Homo sapien
agaaggttgaaaacttctatccact

SEQ ID NO: 3799145 - DNA, 25 bp, Homo sapien
tgtgtctgccctccatcctgcgaag

SEQ ID NO: 3799146 - DNA, 25 bp, Homo sapien
gatgtgtgacttcaaaaagtataca

SEQ ID NO: 3799147 - DNA, 25 bp, Homo sapien
tggacggaacttagtcgtttgaagc

SEQ ID NO: 3799148 - DNA, 25 bp, Homo sapien
tcctctctaggacgtaggctccacg

SEQ ID NO: 3799149 - DNA, 25 bp, Homo sapien
gcactgcgtgtctcatgctcagtca

SEQ ID NO: 3799150 - DNA, 25 bp, Homo sapien
tgctcagtcatcttccacgcagcag

SEQ ID NO: 3799151 - DNA, 25 bp, Homo sapien
tctcgtgtctggtgttcctgtgcct

SEQ ID NO: 3799152 - DNA, 25 bp, Homo sapien
taggtttcttctggacgtttgcaca

SEQ ID NO: 3799153 - DNA, 25 bp, Homo sapien
gggatccaggattcagcgaaacatc

SEQ ID NO: 3799154 - DNA, 25 bp, Homo sapien
tcagtctttaggtctcagttcaggg

SEQ ID NO: 3799155 - DNA, 25 bp, Homo sapien
tgttaatcctcacagctacgccatg

SEQ ID NO: 3799156 - DNA, 25 bp, Homo sapien
gggtcgattatagagctgagccaca

SEQ ID NO: 3799157 - DNA, 25 bp, Homo sapien
taacgcagggagaaggtttcagacc

SEQ ID NO: 3799158 - DNA, 25 bp, Homo sapien
gccttagcagctagggtacctgtga

SEQ ID NO: 3799159 - DNA, 25 bp, Homo sapien
cacaggtgaagtggctggtgcatct

SEQ ID NO: 3799160 - DNA, 25 bp, Homo sapien
ggagccacctttgcaggtcattcga

SEQ ID NO: 3799161 - DNA, 25 bp, Homo sapien
tggtcagctttgatacgcaggagca

SEQ ID NO: 3799162 - DNA, 25 bp, Homo sapien
cagatctagggctgcacgtgtgtcc

SEQ ID NO: 3799163 - DNA, 25 bp, Homo sapien
tgagctgagaatcccatctttggag

SEQ ID NO: 3799164 - DNA, 25 bp, Homo sapien
tgctaacgagtcagatttgaacatg

SEQ ID NO: 3799165 - DNA, 25 bp, Homo sapien
tgaggctattggaacccaataggcg

SEQ ID NO: 3799166 - DNA, 25 bp, Homo sapien
gggtggatttgctaacgagtcagat

SEQ ID NO: 3799167 - DNA, 25 bp, Homo sapien
cagatttgaacatgaggctattgga

SEQ ID NO: 3799168 - DNA, 25 bp, Homo sapien
tatccacaaggtcgtaaatgcatgc

SEQ ID NO: 3799169 - DNA, 25 bp, Homo sapien
aaatagggctggatcttatcactgc

SEQ ID NO: 3799170 - DNA, 25 bp, Homo sapien
gacaaagctgggctcgaccttcaag

SEQ ID NO: 3799171 - DNA, 25 bp, Homo sapien
taggactcaagcagcaagccaggat

SEQ ID NO: 3799172 - DNA, 25 bp, Homo sapien
tccctcctaaggcttcagggagaat

SEQ ID NO: 3799173 - DNA, 25 bp, Homo sapien
gcttctagtaggtccaggtgtcctt

SEQ ID NO: 3799174 - DNA, 25 bp, Homo sapien
cctccagcttctagtaggtccaggt

SEQ ID NO: 3799175 - DNA, 25 bp, Homo sapien
cagggagaatcattttttgcctcct

SEQ ID NO: 3799176 - DNA, 25 bp, Homo sapien
taagcgtatccgtccccagaaattg

SEQ ID NO: 3799177 - DNA, 25 bp, Homo sapien
cagctgtgtacagggcaatatcctc

SEQ ID NO: 3799178 - DNA, 25 bp, Homo sapien
gatattgaatagcatccctggcccc

SEQ ID NO: 3799179 - DNA, 25 bp, Homo sapien
catgtagggacaagcttcacagctg

SEQ ID NO: 3799180 - DNA, 25 bp, Homo sapien
tcaggctgatctagaatgcctgggc

SEQ ID NO: 3799181 - DNA, 25 bp, Homo sapien
attacaggcgcccaatatcacacct

SEQ ID NO: 3799182 - DNA, 25 bp, Homo sapien
agtcacggctcacttgaactcctgg

SEQ ID NO: 3799183 - DNA, 25 bp, Homo sapien
gctcaggctgatctagaatgcctgg

SEQ ID NO: 3799184 - DNA, 25 bp, Homo sapien
tccacacctgttggctggaactgtt

SEQ ID NO: 3799185 - DNA, 25 bp, Homo sapien
tggctggaactgttgacgttgtgac

SEQ ID NO: 3799186 - DNA, 25 bp, Homo sapien
ttctccacacctgttggctggaact

SEQ ID NO: 3799187 - DNA, 25 bp, Homo sapien
gctggaactgttgacgttgtgacat

SEQ ID NO: 3799188 - DNA, 25 bp, Homo sapien
tctcttcactctgagtaacagttgg

SEQ ID NO: 3799189 - DNA, 25 bp, Homo sapien
cagttgggtgttcagttgaccaggc

SEQ ID NO: 3799190 - DNA, 25 bp, Homo sapien
ttgaccaggccgtagtccacgccat

SEQ ID NO: 3799191 - DNA, 25 bp, Homo sapien
cactctgagtaacagttgggtgttc

SEQ ID NO: 3799192 - DNA, 25 bp, Homo sapien
agggcttcgtgcagaccctgcgtac

SEQ ID NO: 3799193 - DNA, 25 bp, Homo sapien
aaccacaagggcttcgtgcagaccc

SEQ ID NO: 3799194 - DNA, 25 bp, Homo sapien
gctgtggtcagcttgatgcgtttga

SEQ ID NO: 3799195 - DNA, 25 bp, Homo sapien
tcagcttgatgcgtttgaggttgag

SEQ ID NO: 3799196 - DNA, 25 bp, Homo sapien
tcatgcatgaggactcggggtgttg

SEQ ID NO: 3799197 - DNA, 25 bp, Homo sapien
catgcatgaggactcggggtgttgt

SEQ ID NO: 3799198 - DNA, 25 bp, Homo sapien
gaccgttaagtttcttatgtatgcc

SEQ ID NO: 3799199 - DNA, 25 bp, Homo sapien
gtgaccagtgtttgtcacaccccat

SEQ ID NO: 3799200 - DNA, 25 bp, Homo sapien
agcaagggtgtaaaagtgaccagtg

SEQ ID NO: 3799201 - DNA, 25 bp, Homo sapien
catcccctagtccacctggttccct

SEQ ID NO: 3799202 - DNA, 25 bp, Homo sapien
caggaatgatagacaggttaaattc

SEQ ID NO: 3799203 - DNA, 25 bp, Homo sapien
gaatgatagacaggttaaattccat

SEQ ID NO: 3799204 - DNA, 25 bp, Homo sapien
cattttcaggaatgatagacaggtt

SEQ ID NO: 3799205 - DNA, 25 bp, Homo sapien
ttttcaggaatgatagacaggttaa

SEQ ID NO: 3799206 - DNA, 25 bp, Homo sapien
ggtgactggtggcagaagtggatct

SEQ ID NO: 3799207 - DNA, 25 bp, Homo sapien
caggtcactgtggataggtggtcag

SEQ ID NO: 3799208 - DNA, 25 bp, Homo sapien
ccctccctgccaagctaggcaaata

SEQ ID NO: 3799209 - DNA, 25 bp, Homo sapien
ccaccgccggtgctgggtaggtgct

SEQ ID NO: 3799210 - DNA, 25 bp, Homo sapien
ctgcgaaagagaccagagggaactt

SEQ ID NO: 3799211 - DNA, 25 bp, Homo sapien
gagggaactttcaaagccacgtcat

SEQ ID NO: 3799212 - DNA, 25 bp, Homo sapien
tcaaagccacgtcatcattgtcacc

SEQ ID NO: 3799213 - DNA, 25 bp, Homo sapien
gtcctgtggccgctgcgaaagagac

SEQ ID NO: 3799214 - DNA, 25 bp, Homo sapien
tctgcagggaacatgatagtgagta

SEQ ID NO: 3799215 - DNA, 25 bp, Homo sapien
attaagagcttaagggaagtccagc

SEQ ID NO: 3799216 - DNA, 25 bp, Homo sapien
tgttctcgacacagctctgcaggga

SEQ ID NO: 3799217 - DNA, 25 bp, Homo sapien
cctgtgatgcaaggctgaggccagc

SEQ ID NO: 3799218 - DNA, 25 bp, Homo sapien
catattccacagtttagagcaggca

SEQ ID NO: 3799219 - DNA, 25 bp, Homo sapien
tgggtttaggtggttcagaacaata

SEQ ID NO: 3799220 - DNA, 25 bp, Homo sapien
cccttcagtgaatgtagctccaact

SEQ ID NO: 3799221 - DNA, 25 bp, Homo sapien
cagtatccttcacgacaccttgtat

SEQ ID NO: 3799222 - DNA, 25 bp, Homo sapien
ctttctcctgctgatcgtgctcgtc

SEQ ID NO: 3799223 - DNA, 25 bp, Homo sapien
cttccgtcagcattgctcccttgtt

SEQ ID NO: 3799224 - DNA, 25 bp, Homo sapien
tctgtctgtccttccgtcagcattg

SEQ ID NO: 3799225 - DNA, 25 bp, Homo sapien
tgatcgtgctcgtctggagcctgcg

SEQ ID NO: 3799226 - DNA, 25 bp, Homo sapien
cctcagcttcgtaggctcaagcaat

SEQ ID NO: 3799227 - DNA, 25 bp, Homo sapien
atgagcccccgtgcccggcttattt

SEQ ID NO: 3799228 - DNA, 25 bp, Homo sapien
gagctcatgcaatccgcccaactca

SEQ ID NO: 3799229 - DNA, 25 bp, Homo sapien
ctcaggctggttacaagctcctgtc

SEQ ID NO: 3799230 - DNA, 25 bp, Homo sapien
gccgccgcgcactcgggacgcagga

SEQ ID NO: 3799231 - DNA, 25 bp, Homo sapien
ggccgccgcgcactcgggacgcagg

SEQ ID NO: 3799232 - DNA, 25 bp, Homo sapien
tgaaggtgtgccttcgggaagccca

SEQ ID NO: 3799233 - DNA, 25 bp, Homo sapien
gctgaaggtgtgccttcgggaagcc

SEQ ID NO: 3799234 - DNA, 25 bp, Homo sapien
ctgaaggtgtgccttcgggaagccc

SEQ ID NO: 3799235 - DNA, 25 bp, Homo sapien
gaacactgcgacagcgacagctgca

SEQ ID NO: 3799236 - DNA, 25 bp, Homo sapien
gtaccaggcaggtgagtcaccctcg

SEQ ID NO: 3799237 - DNA, 25 bp, Homo sapien
ttgaaaccccgagtgctgctgtacc

SEQ ID NO: 3799238 - DNA, 25 bp, Homo sapien
tgcagcaaaggatgccagagggcca

SEQ ID NO: 3799239 - DNA, 25 bp, Homo sapien
aaaagcatgctggccggcgttcgaa

SEQ ID NO: 3799240 - DNA, 25 bp, Homo sapien
ccggcgttcgaaggcgtctgctcac

SEQ ID NO: 3799241 - DNA, 25 bp, Homo sapien
atgctggccggcgttcgaaggcgtc

SEQ ID NO: 3799242 - DNA, 25 bp, Homo sapien
tggccggcgttcgaaggcgtctgct

SEQ ID NO: 3799243 - DNA, 25 bp, Homo sapien
tggccactcagtgaggctggaactc

SEQ ID NO: 3799244 - DNA, 25 bp, Homo sapien
ctggaactcaggctggacacgggag

SEQ ID NO: 3799245 - DNA, 25 bp, Homo sapien
tttgggggtggccactcagtgaggc

SEQ ID NO: 3799246 - DNA, 25 bp, Homo sapien
ggaactcaggctggacacgggagtc

SEQ ID NO: 3799247 - DNA, 25 bp, Homo sapien
tgctgggggcttcctcggctggcag

SEQ ID NO: 3799248 - DNA, 25 bp, Homo sapien
gctgggggcttcctcggctggcagc

SEQ ID NO: 3799249 - DNA, 25 bp, Homo sapien
ttccgggccgttgggagtcatcagc

SEQ ID NO: 3799250 - DNA, 25 bp, Homo sapien
tttctctccacgcacggtcccttgg

SEQ ID NO: 3799251 - DNA, 25 bp, Homo sapien
tgaggatgacgatgactgtgaccac

SEQ ID NO: 3799252 - DNA, 25 bp, Homo sapien
ccagggccgcgatggcaatgaggat

SEQ ID NO: 3799253 - DNA, 25 bp, Homo sapien
taccagtcccgtgtgcgctagatga

SEQ ID NO: 3799254 - DNA, 25 bp, Homo sapien
gcagatggacacacatgagagaccc

SEQ ID NO: 3799255 - DNA, 25 bp, Homo sapien
tttacaagcctatgaccctccaggg

SEQ ID NO: 3799256 - DNA, 25 bp, Homo sapien
gatgggcaggcacgagtcacatttg

SEQ ID NO: 3799257 - DNA, 25 bp, Homo sapien
caaggctgacaatcgagcgctggtc

SEQ ID NO: 3799258 - DNA, 25 bp, Homo sapien
tagtggctcagtgtcaagagttccc

SEQ ID NO: 3799259 - DNA, 25 bp, Homo sapien
catcagtagccagaggtgttgcctc

SEQ ID NO: 3799260 - DNA, 25 bp, Homo sapien
tacagtagcacagtccgtttgaaga

SEQ ID NO: 3799261 - DNA, 25 bp, Homo sapien
aagattttctcagtggtctagaaaa

SEQ ID NO: 3799262 - DNA, 25 bp, Homo sapien
ataaagattttctcagtggtctaga

SEQ ID NO: 3799263 - DNA, 25 bp, Homo sapien
gtaaataaagattttctcagtggtc

SEQ ID NO: 3799264 - DNA, 25 bp, Homo sapien
tgtaaataaagattttctcagtggt

SEQ ID NO: 3799265 - DNA, 25 bp, Homo sapien
ctgaaagcctggcggcccagagaga

SEQ ID NO: 3799266 - DNA, 25 bp, Homo sapien
acctgccaatgtcagcgccacactg

SEQ ID NO: 3799267 - DNA, 25 bp, Homo sapien
cccagagagaggtccaccccaagca

SEQ ID NO: 3799268 - DNA, 25 bp, Homo sapien
aatgtcagcgccacactggtgtctg

SEQ ID NO: 3799269 - DNA, 25 bp, Homo sapien
cctccagcgagcacaagtgcaggtg

SEQ ID NO: 3799270 - DNA, 25 bp, Homo sapien
gaatgtggctaactctcctaccaag

SEQ ID NO: 3799271 - DNA, 25 bp, Homo sapien
ttcagagcgaggcagtcttacagcg

SEQ ID NO: 3799272 - DNA, 25 bp, Homo sapien
gaggttcattttgcatcactcagac

SEQ ID NO: 3799273 - DNA, 25 bp, Homo sapien
aacagcagagaatctgtggagccct

SEQ ID NO: 3799274 - DNA, 25 bp, Homo sapien
tatgaacatatggaggacgcagaga

SEQ ID NO: 3799275 - DNA, 25 bp, Homo sapien
tatctcttacccgagcttgaatgtg

SEQ ID NO: 3799276 - DNA, 25 bp, Homo sapien
cataaaagggttgtagtgtcaggat

SEQ ID NO: 3799277 - DNA, 25 bp, Homo sapien
tgaattccattcagtaatgctcaag

SEQ ID NO: 3799278 - DNA, 25 bp, Homo sapien
gggtcagtgttcctacaagcatgta

SEQ ID NO: 3799279 - DNA, 25 bp, Homo sapien
tctctgaaatgtttagcctagctgt

SEQ ID NO: 3799280 - DNA, 25 bp, Homo sapien
cattgttggtttagagacttaactc

SEQ ID NO: 3799281 - DNA, 25 bp, Homo sapien
ggattctttctacctcaaggagcag

SEQ ID NO: 3799282 - DNA, 25 bp, Homo sapien
aatgtgaggttgatgccccaagctc

SEQ ID NO: 3799283 - DNA, 25 bp, Homo sapien
ggagcagaccttttatcatgtggca

SEQ ID NO: 3799284 - DNA, 25 bp, Homo sapien
gactagcacaaacttcacaggcctg

SEQ ID NO: 3799285 - DNA, 25 bp, Homo sapien
tatttagcatgtgctaataaagcaa

SEQ ID NO: 3799286 - DNA, 25 bp, Homo sapien
acgatcttgggatctcagctcgcgg

SEQ ID NO: 3799287 - DNA, 25 bp, Homo sapien
cctggcctgtagtttaactgatgtt

SEQ ID NO: 3799288 - DNA, 25 bp, Homo sapien
ggaaagaatgtacctttttctgcag

SEQ ID NO: 3799289 - DNA, 25 bp, Homo sapien
taagcatttttcttgacccgatatt

SEQ ID NO: 3799290 - DNA, 25 bp, Homo sapien
agcatttttcttgacccgatattcc

SEQ ID NO: 3799291 - DNA, 25 bp, Homo sapien
gcatttttcttgacccgatattcca

SEQ ID NO: 3799292 - DNA, 25 bp, Homo sapien
catttttcttgacccgatattccat

SEQ ID NO: 3799293 - DNA, 25 bp, Homo sapien
tatgttgttgtatgctctctctcag

SEQ ID NO: 3799294 - DNA, 25 bp, Homo sapien
cagcttgtcacttgtgtcagatcca

SEQ ID NO: 3799295 - DNA, 25 bp, Homo sapien
ggctcagttctccacctgtcagggc

SEQ ID NO: 3799296 - DNA, 25 bp, Homo sapien
taagtgaaaggtcatattctcccaa

SEQ ID NO: 3799297 - DNA, 25 bp, Homo sapien
caatattcaggcagggtatggtcta

SEQ ID NO: 3799298 - DNA, 25 bp, Homo sapien
ttgaaacttcagtatctacccaggg

SEQ ID NO: 3799299 - DNA, 25 bp, Homo sapien
catgttaagaaatttgactgggccc

SEQ ID NO: 3799300 - DNA, 25 bp, Homo sapien
gatgccatggctcttaagcagcaga

SEQ ID NO: 3799301 - DNA, 25 bp, Homo sapien
gcagccttagtgcttgtgcccaaag

SEQ ID NO: 3799302 - DNA, 25 bp, Homo sapien
gacaacacgcagtgctagctgccgc

SEQ ID NO: 3799303 - DNA, 25 bp, Homo sapien
taaataggtgacttgctccgttgga

SEQ ID NO: 3799304 - DNA, 25 bp, Homo sapien
tagaaagtggtctcctcgacaacac

SEQ ID NO: 3799305 - DNA, 25 bp, Homo sapien
ggtgtagtgatccacaaccttgcga

SEQ ID NO: 3799306 - DNA, 25 bp, Homo sapien
gagtcacgcattgtgtcccaggcag

SEQ ID NO: 3799307 - DNA, 25 bp, Homo sapien
tatcgtcccgctttagtgccgaggg

SEQ ID NO: 3799308 - DNA, 25 bp, Homo sapien
gcgagagttccagaccccttttaga

SEQ ID NO: 3799309 - DNA, 25 bp, Homo sapien
gtaatgtcggaatgcggaggccgcg

SEQ ID NO: 3799310 - DNA, 25 bp, Homo sapien
ctggccacagcgtcctcggcgggcc

SEQ ID NO: 3799311 - DNA, 25 bp, Homo sapien
cgggctcagactgcctcagctcgag

SEQ ID NO: 3799312 - DNA, 25 bp, Homo sapien
tccgtcgcgggctgcgtggcgcctt

SEQ ID NO: 3799313 - DNA, 25 bp, Homo sapien
gtataaagccggcgactgggagcat

SEQ ID NO: 3799314 - DNA, 25 bp, Homo sapien
tgcgggattggggagcaacgggccg

SEQ ID NO: 3799315 - DNA, 25 bp, Homo sapien
tggagcgtccgggttagcgggtgcg

SEQ ID NO: 3799316 - DNA, 25 bp, Homo sapien
cggcggcggtataaagccggcgact

SEQ ID NO: 3799317 - DNA, 25 bp, Homo sapien
cgggccttatcccaagggagcagct

SEQ ID NO: 3799318 - DNA, 25 bp, Homo sapien
gactacagcggtgtcaaggttccaa

SEQ ID NO: 3799319 - DNA, 25 bp, Homo sapien
gggaaggcttccgtgcatttacgta

SEQ ID NO: 3799320 - DNA, 25 bp, Homo sapien
acggcgcctgcgcagactccgtgag

SEQ ID NO: 3799321 - DNA, 25 bp, Homo sapien
tgggcgtagtcgcacacatctgtgt

SEQ ID NO: 3799322 - DNA, 25 bp, Homo sapien
caaaatggtcggtgtacatgaactc

SEQ ID NO: 3799323 - DNA, 25 bp, Homo sapien
gagatttgcacgtgggtcacatagc

SEQ ID NO: 3799324 - DNA, 25 bp, Homo sapien
cattaaatgtctggccaattgagca

SEQ ID NO: 3799325 - DNA, 25 bp, Homo sapien
cctgtactgttggtattgtgttagt

SEQ ID NO: 3799326 - DNA, 25 bp, Homo sapien
tacttatctgtatgtaggttgctaa

SEQ ID NO: 3799327 - DNA, 25 bp, Homo sapien
tgtatgtaggttgctaaaaaggatt

SEQ ID NO: 3799328 - DNA, 25 bp, Homo sapien
ggaattaaggataatgtgcattgag

SEQ ID NO: 3799329 - DNA, 25 bp, Homo sapien
gaggcttaaagacaatgggcttcaa

SEQ ID NO: 3799330 - DNA, 25 bp, Homo sapien
cagaagggccccagtcaagttattc

SEQ ID NO: 3799331 - DNA, 25 bp, Homo sapien
ccagtactgactttatgcagaagat

SEQ ID NO: 3799332 - DNA, 25 bp, Homo sapien
gggtcactgacattggtccaaggga

SEQ ID NO: 3799333 - DNA, 25 bp, Homo sapien
ggctggaaagcagtggcgaaatctt

SEQ ID NO: 3799334 - DNA, 25 bp, Homo sapien
tcactgcaacctctgcctcttgggt

SEQ ID NO: 3799335 - DNA, 25 bp, Homo sapien
tggaaagcagtggcgaaatcttggc

SEQ ID NO: 3799336 - DNA, 25 bp, Homo sapien
tcacacctggcaaattttttttgta

SEQ ID NO: 3799337 - DNA, 25 bp, Homo sapien
attttacaagaagccgtgcccgcag

SEQ ID NO: 3799338 - DNA, 25 bp, Homo sapien
cgaacacggttgcatggctgtcacc

SEQ ID NO: 3799339 - DNA, 25 bp, Homo sapien
gggcacctggccgtaaaatgcagat

SEQ ID NO: 3799340 - DNA, 25 bp, Homo sapien
tgagggctcgtcaagctaagcaggc

SEQ ID NO: 3799341 - DNA, 25 bp, Homo sapien
tactgtagctagagtccccacttcc

SEQ ID NO: 3799342 - DNA, 25 bp, Homo sapien
ccagggattcctgctcacagagaaa

SEQ ID NO: 3799343 - DNA, 25 bp, Homo sapien
agacccctggaagagctactgtagc

SEQ ID NO: 3799344 - DNA, 25 bp, Homo sapien
tgccggcacccagaccttagatttg

SEQ ID NO: 3799345 - DNA, 25 bp, Homo sapien
gggtgtcaccagtatccagagacct

SEQ ID NO: 3799346 - DNA, 25 bp, Homo sapien
tctggcaacaggactagacgaggtc

SEQ ID NO: 3799347 - DNA, 25 bp, Homo sapien
cttagccggtgtggtactagtccca

SEQ ID NO: 3799348 - DNA, 25 bp, Homo sapien
gatgagcagcctctggtcacgagaa

SEQ ID NO: 3799349 - DNA, 25 bp, Homo sapien
acaggtgcccgcctgtaagccaggc

SEQ ID NO: 3799350 - DNA, 25 bp, Homo sapien
catgcccgacgctaagtacatttta

SEQ ID NO: 3799351 - DNA, 25 bp, Homo sapien
tgtgtggttactgaactgaggactt

SEQ ID NO: 3799352 - DNA, 25 bp, Homo sapien
ggccagggtgtaatatcggctcact

SEQ ID NO: 3799353 - DNA, 25 bp, Homo sapien
tgtgtaggacaaacccacatatgta

SEQ ID NO: 3799354 - DNA, 25 bp, Homo sapien
catatgtaatcgtgccagtctgttc

SEQ ID NO: 3799355 - DNA, 25 bp, Homo sapien
tcagtcttgttgaacatgacacagg

SEQ ID NO: 3799356 - DNA, 25 bp, Homo sapien
tgtgattctttgctccgtagttcag

SEQ ID NO: 3799357 - DNA, 25 bp, Homo sapien
tgagagtcggctacggaatttagga

SEQ ID NO: 3799358 - DNA, 25 bp, Homo sapien
cctaccggaggcaagaacatgattt

SEQ ID NO: 3799359 - DNA, 25 bp, Homo sapien
tggtctaagcttatgagtcactgga

SEQ ID NO: 3799360 - DNA, 25 bp, Homo sapien
ctaaattgaatcctacctaccggag

SEQ ID NO: 3799361 - DNA, 25 bp, Homo sapien
tgttcctgggtataatctgtttcta

SEQ ID NO: 3799362 - DNA, 25 bp, Homo sapien
gacatatgttcctgggtataatctg

SEQ ID NO: 3799363 - DNA, 25 bp, Homo sapien
tctctgtggttgttcagcactttag

SEQ ID NO: 3799364 - DNA, 25 bp, Homo sapien
taaaacctccataagtaatcctgac

SEQ ID NO: 3799365 - DNA, 25 bp, Homo sapien
ttccccgggccatgaaactacagtc

SEQ ID NO: 3799366 - DNA, 25 bp, Homo sapien
gggaaacgaagcctcattagttgag

SEQ ID NO: 3799367 - DNA, 25 bp, Homo sapien
tgtttcatagaagcaagccactaag

SEQ ID NO: 3799368 - DNA, 25 bp, Homo sapien
tgtgtccttggcctacaagtatggt

SEQ ID NO: 3799369 - DNA, 25 bp, Homo sapien
taaatggtatggcttgctacacacc

SEQ ID NO: 3799370 - DNA, 25 bp, Homo sapien
catcacgagtatttgggacacaggc

SEQ ID NO: 3799371 - DNA, 25 bp, Homo sapien
cacctatgctatgtgatacagccta

SEQ ID NO: 3799372 - DNA, 25 bp, Homo sapien
ccttagacatgcgtctttggatgac

SEQ ID NO: 3799373 - DNA, 25 bp, Homo sapien
gacatcaccaattgactatgtggcg

SEQ ID NO: 3799374 - DNA, 25 bp, Homo sapien
tagttggccatgtgttaccactgat

SEQ ID NO: 3799375 - DNA, 25 bp, Homo sapien
gagacctgggtactcgaatgttgaa

SEQ ID NO: 3799376 - DNA, 25 bp, Homo sapien
caccctgtcttgtggtgctgacaat

SEQ ID NO: 3799377 - DNA, 25 bp, Homo sapien
tagctacctactgtgcctgacttgg

SEQ ID NO: 3799378 - DNA, 25 bp, Homo sapien
gggtatctctcaggccaggacttag

SEQ ID NO: 3799379 - DNA, 25 bp, Homo sapien
ggagcgcttgcactcttcaggtgac

SEQ ID NO: 3799380 - DNA, 25 bp, Homo sapien
tgcctgtgtgaggattaagccctta

SEQ ID NO: 3799381 - DNA, 25 bp, Homo sapien
gatgatccttgctggttaaagctaa

SEQ ID NO: 3799382 - DNA, 25 bp, Homo sapien
aaataaagcatgtttgagacctggc

SEQ ID NO: 3799383 - DNA, 25 bp, Homo sapien
gcatgcctctagtatgaaaaccgta

SEQ ID NO: 3799384 - DNA, 25 bp, Homo sapien
gaaaaccgtatcagttgcaagtgcc

SEQ ID NO: 3799385 - DNA, 25 bp, Homo sapien
caatttgtcttttatagacactcca

SEQ ID NO: 3799386 - DNA, 25 bp, Homo sapien
tgttcataatcaccccttattccca

SEQ ID NO: 3799387 - DNA, 25 bp, Homo sapien
gaaattgacctgttttaagtatgta

SEQ ID NO: 3799388 - DNA, 25 bp, Homo sapien
ccccaggcaaccatttttcaatttg

SEQ ID NO: 3799389 - DNA, 25 bp, Homo sapien
tttgtctgtagagttgtcccaaaaa

SEQ ID NO: 3799390 - DNA, 25 bp, Homo sapien
tgtctgtagagttgtcccaaaaatt

SEQ ID NO: 3799391 - DNA, 25 bp, Homo sapien
ctgtagagttgtcccaaaaattatg

SEQ ID NO: 3799392 - DNA, 25 bp, Homo sapien
gtctgtagagttgtcccaaaaatta

SEQ ID NO: 3799393 - DNA, 25 bp, Homo sapien
aatatttatgtggagatggtctcac

SEQ ID NO: 3799394 - DNA, 25 bp, Homo sapien
ttttaatatttatgtggagatggtc

SEQ ID NO: 3799395 - DNA, 25 bp, Homo sapien
cactatagatgtctacgtggagaac

SEQ ID NO: 3799396 - DNA, 25 bp, Homo sapien
gcaaatgcttaggtgcactgcacta

SEQ ID NO: 3799397 - DNA, 25 bp, Homo sapien
taagacttacttgcctagacaacat

SEQ ID NO: 3799398 - DNA, 25 bp, Homo sapien
gctgtaagttttggtggcgtcacac

SEQ ID NO: 3799399 - DNA, 25 bp, Homo sapien
cctctcaggtagatggtatatcatt

SEQ ID NO: 3799400 - DNA, 25 bp, Homo sapien
cacatttgttgaatacgccaggagt

SEQ ID NO: 3799401 - DNA, 25 bp, Homo sapien
taggattgagttggagtagttacat

SEQ ID NO: 3799402 - DNA, 25 bp, Homo sapien
tgcctggctgatactcaatacatat

SEQ ID NO: 3799403 - DNA, 25 bp, Homo sapien
aaagctgttacagttagtgatacac

SEQ ID NO: 3799404 - DNA, 25 bp, Homo sapien
actaagtggtcaggtgtaagtactg

SEQ ID NO: 3799405 - DNA, 25 bp, Homo sapien
taaatctaatagttggtgccaggaa

SEQ ID NO: 3799406 - DNA, 25 bp, Homo sapien
tgaggagccatctgtattgtaaatc

SEQ ID NO: 3799407 - DNA, 25 bp, Homo sapien
tcatgcaatgtgagacacttctgtg

SEQ ID NO: 3799408 - DNA, 25 bp, Homo sapien
tgtggctggtgactatcatgtcaca

SEQ ID NO: 3799409 - DNA, 25 bp, Homo sapien
tctgtgacagatccgaagttgtatt

SEQ ID NO: 3799410 - DNA, 25 bp, Homo sapien
tccatcactacagaaacttggacag

SEQ ID NO: 3799411 - DNA, 25 bp, Homo sapien
ccgcacccggctgtttctgttattt

SEQ ID NO: 3799412 - DNA, 25 bp, Homo sapien
tgagggtatctgaaatggttttggt

SEQ ID NO: 3799413 - DNA, 25 bp, Homo sapien
tagctgggatgacaggtgcgcaccg

SEQ ID NO: 3799414 - DNA, 25 bp, Homo sapien
ctgggatgacaggtgcgcaccgcca

SEQ ID NO: 3799415 - DNA, 25 bp, Homo sapien
agctgggatgacaggtgcgcaccgc

SEQ ID NO: 3799416 - DNA, 25 bp, Homo sapien
gggatgacaggtgcgcaccgccatg

SEQ ID NO: 3799417 - DNA, 25 bp, Homo sapien
cttccggttgcgccctgtccctgaa

SEQ ID NO: 3799418 - DNA, 25 bp, Homo sapien
accgcagcggggtagcgcgggcgct

SEQ ID NO: 3799419 - DNA, 25 bp, Homo sapien
gcctcctcgcgttgcctgccgggag

SEQ ID NO: 3799420 - DNA, 25 bp, Homo sapien
tgtccctgaacttcgactcccgtcg

SEQ ID NO: 3799421 - DNA, 25 bp, Homo sapien
aatctgcaccggctttgaaatgaag

SEQ ID NO: 3799422 - DNA, 25 bp, Homo sapien
tacaagaattttcgggagctgagtg

SEQ ID NO: 3799423 - DNA, 25 bp, Homo sapien
aataaggtacggagactgtgaggca

SEQ ID NO: 3799424 - DNA, 25 bp, Homo sapien
tcctatgggctaaaatactctcggt

SEQ ID NO: 3799425 - DNA, 25 bp, Homo sapien
cacgtaatggtgcataaggaagcta

SEQ ID NO: 3799426 - DNA, 25 bp, Homo sapien
catgaagggcctaaatgcgaactct

SEQ ID NO: 3799427 - DNA, 25 bp, Homo sapien
taggtaagccggatacaccatggaa

SEQ ID NO: 3799428 - DNA, 25 bp, Homo sapien
tatgactagtcaaacaaacggtgag

SEQ ID NO: 3799429 - DNA, 25 bp, Homo sapien
tacaccctctcgtaaaattggattc

SEQ ID NO: 3799430 - DNA, 25 bp, Homo sapien
cgctctgattgacgcactgccagga

SEQ ID NO: 3799431 - DNA, 25 bp, Homo sapien
tgattgacgcactgccaggagtagc

SEQ ID NO: 3799432 - DNA, 25 bp, Homo sapien
tctgattgacgcactgccaggagta

SEQ ID NO: 3799433 - DNA, 25 bp, Homo sapien
aggacgctctgattgacgcactgcc

SEQ ID NO: 3799434 - DNA, 25 bp, Homo sapien
ctgccaggtcaggacatggatacat

SEQ ID NO: 3799435 - DNA, 25 bp, Homo sapien
gccaggtcaggacatggatacattt

SEQ ID NO: 3799436 - DNA, 25 bp, Homo sapien
tgccaggtcaggacatggatacatt

SEQ ID NO: 3799437 - DNA, 25 bp, Homo sapien
ccaggtcaggacatggatacatttt

SEQ ID NO: 3799438 - DNA, 25 bp, Homo sapien
tacaatgtttagacccagtaaatgc

SEQ ID NO: 3799439 - DNA, 25 bp, Homo sapien
caccctcttgggaaacgcccattgg

SEQ ID NO: 3799440 - DNA, 25 bp, Homo sapien
catgtgagttcagaaactgaacccc

SEQ ID NO: 3799441 - DNA, 25 bp, Homo sapien
ggtcagaagacatatcgtgagagag

SEQ ID NO: 3799442 - DNA, 25 bp, Homo sapien
tcaattctcccttcggttgtgagaa

SEQ ID NO: 3799443 - DNA, 25 bp, Homo sapien
tgtcaattctcccttcggttgtgag

SEQ ID NO: 3799444 - DNA, 25 bp, Homo sapien
caattctcccttcggttgtgagaat

SEQ ID NO: 3799445 - DNA, 25 bp, Homo sapien
ggtgtcaattctcccttcggttgtg

SEQ ID NO: 3799446 - DNA, 25 bp, Homo sapien
agggtggatggtttgccgttgtcac

SEQ ID NO: 3799447 - DNA, 25 bp, Homo sapien
taaagtcagtcaacaccagggtgga

SEQ ID NO: 3799448 - DNA, 25 bp, Homo sapien
cgtttcctttttctgccctcaatct

SEQ ID NO: 3799449 - DNA, 25 bp, Homo sapien
ccctcaatctctgtgaactgaacct

SEQ ID NO: 3799450 - DNA, 25 bp, Homo sapien
caagtggtgtgagggcaacacagca

SEQ ID NO: 3799451 - DNA, 25 bp, Homo sapien
aatcaagtggtgtgagggcaacaca

SEQ ID NO: 3799452 - DNA, 25 bp, Homo sapien
accatgaatcaagtggtgtgagggc

SEQ ID NO: 3799453 - DNA, 25 bp, Homo sapien
tgaatcaagtggtgtgagggcaaca

SEQ ID NO: 3799454 - DNA, 25 bp, Homo sapien
ttgaattcaatgcttgggtcacctc

SEQ ID NO: 3799455 - DNA, 25 bp, Homo sapien
cagtctttcatgttttggtcatatt

SEQ ID NO: 3799456 - DNA, 25 bp, Homo sapien
cctagtagcatgttatcttgctgca

SEQ ID NO: 3799457 - DNA, 25 bp, Homo sapien
tagcaatgaattgaggcctagtagc

SEQ ID NO: 3799458 - DNA, 25 bp, Homo sapien
cagcctggaaggacaagtaatatct

SEQ ID NO: 3799459 - DNA, 25 bp, Homo sapien
caagagcagctagaatgttgagaac

SEQ ID NO: 3799460 - DNA, 25 bp, Homo sapien
tgttgagaacaatgaacttcgcctg

SEQ ID NO: 3799461 - DNA, 25 bp, Homo sapien
gcggcagctaaggatttgaatacca

SEQ ID NO: 3799462 - DNA, 25 bp, Homo sapien
caataacgctgacatgttagaggag

SEQ ID NO: 3799463 - DNA, 25 bp, Homo sapien
tatgcaagcatgcaacaaactgtca

SEQ ID NO: 3799464 - DNA, 25 bp, Homo sapien
gaggaggagtattagaagaacatcg

SEQ ID NO: 3799465 - DNA, 25 bp, Homo sapien
tcgaagttgacaaggtatgcaagca

SEQ ID NO: 3799466 - DNA, 25 bp, Homo sapien
tccagagaatcgcattcgttccttt

SEQ ID NO: 3799467 - DNA, 25 bp, Homo sapien
gcaaaaacattagcacgaaaactgc

SEQ ID NO: 3799468 - DNA, 25 bp, Homo sapien
tagcacgaaaactgccaaagaaatt

SEQ ID NO: 3799469 - DNA, 25 bp, Homo sapien
cgttcctttcactgaattggtcaca

SEQ ID NO: 3799470 - DNA, 25 bp, Homo sapien
ctcttttccaggtcaatgttagcca

SEQ ID NO: 3799471 - DNA, 25 bp, Homo sapien
tcttttccaggtcaatgttagccat

SEQ ID NO: 3799472 - DNA, 25 bp, Homo sapien
ctgctcttttccaggtcaatgttag

SEQ ID NO: 3799473 - DNA, 25 bp, Homo sapien
gctcttttccaggtcaatgttagcc

SEQ ID NO: 3799474 - DNA, 25 bp, Homo sapien
accgtgtactcgaggcctctcggaa

SEQ ID NO: 3799475 - DNA, 25 bp, Homo sapien
gaccttcggtttgctcttgatgcag

SEQ ID NO: 3799476 - DNA, 25 bp, Homo sapien
ggaaagcaatggtcagagtcgacct

SEQ ID NO: 3799477 - DNA, 25 bp, Homo sapien
gaatggttgcgccttcctccatagc

SEQ ID NO: 3799478 - DNA, 25 bp, Homo sapien
tggcaggctcttgcaatagtcattc

SEQ ID NO: 3799479 - DNA, 25 bp, Homo sapien
gaaattgatttctctatctccgtag

SEQ ID NO: 3799480 - DNA, 25 bp, Homo sapien
tatctccgtagcactcaaagcagct

SEQ ID NO: 3799481 - DNA, 25 bp, Homo sapien
caatagtcattcgttttcgtggtga

SEQ ID NO: 3799482 - DNA, 25 bp, Homo sapien
taaagtggcactgctcgagtcgaaa

SEQ ID NO: 3799483 - DNA, 25 bp, Homo sapien
tatctaacataaagagtttccacag

SEQ ID NO: 3799484 - DNA, 25 bp, Homo sapien
tttccacagttagaggacaaaaagc

SEQ ID NO: 3799485 - DNA, 25 bp, Homo sapien
gacaaaaagctgtatcggcaactga

SEQ ID NO: 3799486 - DNA, 25 bp, Homo sapien
caccattgtggaccttaagaagctg

SEQ ID NO: 3799487 - DNA, 25 bp, Homo sapien
gaagctgattacagcccagactagg

SEQ ID NO: 3799488 - DNA, 25 bp, Homo sapien
tcagtaagtcaagcgtttagaggtc

SEQ ID NO: 3799489 - DNA, 25 bp, Homo sapien
catgttcaaggtgatgagcatcagc

SEQ ID NO: 3799490 - DNA, 25 bp, Homo sapien
ctccccgggccggtgcctgcgccgc

SEQ ID NO: 3799491 - DNA, 25 bp, Homo sapien
tgcctctccccgggccggtgcctgc

SEQ ID NO: 3799492 - DNA, 25 bp, Homo sapien
ccgccgctgccgcttctgcggctgc

SEQ ID NO: 3799493 - DNA, 25 bp, Homo sapien
ctctccccgggccggtgcctgcgcc

SEQ ID NO: 3799494 - DNA, 25 bp, Homo sapien
ctgggcacgggacaagaagggaagg

SEQ ID NO: 3799495 - DNA, 25 bp, Homo sapien
caccccctcgatggtgagaggaaga

SEQ ID NO: 3799496 - DNA, 25 bp, Homo sapien
tgggaagaagaaggacgaagtgacg

SEQ ID NO: 3799497 - DNA, 25 bp, Homo sapien
aggacgaagtgacggtccccagatg

SEQ ID NO: 3799498 - DNA, 25 bp, Homo sapien
aacaccaccccctcgatggtgagag

SEQ ID NO: 3799499 - DNA, 25 bp, Homo sapien
cttcagaaaacattgaggacgagct

SEQ ID NO: 3799500 - DNA, 25 bp, Homo sapien
agaaaacattgaggacgagctgccc

SEQ ID NO: 3799501 - DNA, 25 bp, Homo sapien
tcagaaaacattgaggacgagctgc

SEQ ID NO: 3799502 - DNA, 25 bp, Homo sapien
aacattgaggacgagctgcccacac

SEQ ID NO: 3799503 - DNA, 25 bp, Homo sapien
gaagacaacggccaggacggctgga

SEQ ID NO: 3799504 - DNA, 25 bp, Homo sapien
aggcacatcacttgtttaaacaacc

SEQ ID NO: 3799505 - DNA, 25 bp, Homo sapien
tgcctgagtggaagacaacggccag

SEQ ID NO: 3799506 - DNA, 25 bp, Homo sapien
aaaaggcacatcacttgtttaaaca

SEQ ID NO: 3799507 - DNA, 25 bp, Homo sapien
cagccccctcattattaggactgtc

SEQ ID NO: 3799508 - DNA, 25 bp, Homo sapien
cctcattattaggactgtccatttc

SEQ ID NO: 3799509 - DNA, 25 bp, Homo sapien
cccctcattattaggactgtccatt

SEQ ID NO: 3799510 - DNA, 25 bp, Homo sapien
gccccctcattattaggactgtcca

SEQ ID NO: 3799511 - DNA, 25 bp, Homo sapien
ccaaaggtggattatctcccaggaa

SEQ ID NO: 3799512 - DNA, 25 bp, Homo sapien
cgaatcagaaaccatacttaggctt

SEQ ID NO: 3799513 - DNA, 25 bp, Homo sapien
ggtattactaacattcacgaatcag

SEQ ID NO: 3799514 - DNA, 25 bp, Homo sapien
agccagctcataacatctttactga

SEQ ID NO: 3799515 - DNA, 25 bp, Homo sapien
tccttgaaagataaactgatcaatt

SEQ ID NO: 3799516 - DNA, 25 bp, Homo sapien
actgatcaatttctattggcttatc

SEQ ID NO: 3799517 - DNA, 25 bp, Homo sapien
aatttctattggcttatcaatttca

SEQ ID NO: 3799518 - DNA, 25 bp, Homo sapien
tctccttgaaagataaactgatcaa

SEQ ID NO: 3799519 - DNA, 25 bp, Homo sapien
ctgcctcaattacaatgtttccaaa

SEQ ID NO: 3799520 - DNA, 25 bp, Homo sapien
ctttggctttagatgtaacgatttt

SEQ ID NO: 3799521 - DNA, 25 bp, Homo sapien
caaaatatatcgttggacttcccct

SEQ ID NO: 3799522 - DNA, 25 bp, Homo sapien
gccactttattttatcgtgtaccag

SEQ ID NO: 3799523 - DNA, 25 bp, Homo sapien
gctgcctgtgggtgaagccaacaga

SEQ ID NO: 3799524 - DNA, 25 bp, Homo sapien
caatttagtaggatggactcccagc

SEQ ID NO: 3799525 - DNA, 25 bp, Homo sapien
caaaatcacagtgatgggttgcagg

SEQ ID NO: 3799526 - DNA, 25 bp, Homo sapien
tagacttatggtccagacctggcca

SEQ ID NO: 3799527 - DNA, 25 bp, Homo sapien
gggctcccggacagcaaaaagtcag

SEQ ID NO: 3799528 - DNA, 25 bp, Homo sapien
gagtgggcaagtttccctcctcgga

SEQ ID NO: 3799529 - DNA, 25 bp, Homo sapien
gtgccaggtctctgaagggctcccg

SEQ ID NO: 3799530 - DNA, 25 bp, Homo sapien
aggaaaagagtcctcactccccttg

SEQ ID NO: 3799531 - DNA, 25 bp, Homo sapien
cactatacattcattacttgcttta

SEQ ID NO: 3799532 - DNA, 25 bp, Homo sapien
gagaaacgcactatacattcattac

SEQ ID NO: 3799533 - DNA, 25 bp, Homo sapien
cctgagaaacgcactatacattcat

SEQ ID NO: 3799534 - DNA, 25 bp, Homo sapien
aaacgcactatacattcattacttg

SEQ ID NO: 3799535 - DNA, 25 bp, Homo sapien
caaaaactacccgagattgtgcagg

SEQ ID NO: 3799536 - DNA, 25 bp, Homo sapien
tctactgattattctggatgagatg

SEQ ID NO: 3799537 - DNA, 25 bp, Homo sapien
ctacccgagattgtgcaggtctcaa

SEQ ID NO: 3799538 - DNA, 25 bp, Homo sapien
ccttactctgcaaagcctcttttca

SEQ ID NO: 3799539 - DNA, 25 bp, Homo sapien
ccagcagaaattgtcttttgtcatt

SEQ ID NO: 3799540 - DNA, 25 bp, Homo sapien
tccagcagaaattgtcttttgtcat

SEQ ID NO: 3799541 - DNA, 25 bp, Homo sapien
ctgcacagaaaaagaagctgctgag

SEQ ID NO: 3799542 - DNA, 25 bp, Homo sapien
cacagaaaaagaagctgctgagatc

SEQ ID NO: 3799543 - DNA, 25 bp, Homo sapien
tgcacagaaaaagaagctgctgaga

SEQ ID NO: 3799544 - DNA, 25 bp, Homo sapien
cagaaaaagaagctgctgagatcag

SEQ ID NO: 3799545 - DNA, 25 bp, Homo sapien
tgctgtcggaatccgaggcaatctc

SEQ ID NO: 3799546 - DNA, 25 bp, Homo sapien
ctgctgtcggaatccgaggcaatct

SEQ ID NO: 3799547 - DNA, 25 bp, Homo sapien
gtcggaatccgaggcaatctccttt

SEQ ID NO: 3799548 - DNA, 25 bp, Homo sapien
ctgtcggaatccgaggcaatctcct

SEQ ID NO: 3799549 - DNA, 25 bp, Homo sapien
ttccaggaaggtctacatgctttct

SEQ ID NO: 3799550 - DNA, 25 bp, Homo sapien
acgtggctctattccaggaaggtct

SEQ ID NO: 3799551 - DNA, 25 bp, Homo sapien
cacgtggctctattccaggaaggtc

SEQ ID NO: 3799552 - DNA, 25 bp, Homo sapien
caggtgatctgtgctcctcggcctt

SEQ ID NO: 3799553 - DNA, 25 bp, Homo sapien
tcaggtgatctgtgctcctcggcct

SEQ ID NO: 3799554 - DNA, 25 bp, Homo sapien
aggtgatctgtgctcctcggccttc

SEQ ID NO: 3799555 - DNA, 25 bp, Homo sapien
ctcgcaagctgatccaatgtagttt

SEQ ID NO: 3799556 - DNA, 25 bp, Homo sapien
cctcgcaagctgatccaatgtagtt

SEQ ID NO: 3799557 - DNA, 25 bp, Homo sapien
aagctgatccaatgtagtttcctcc

SEQ ID NO: 3799558 - DNA, 25 bp, Homo sapien
cgcaagctgatccaatgtagtttcc

SEQ ID NO: 3799559 - DNA, 25 bp, Homo sapien
tgtgagtgccaatcctcgactcctc

SEQ ID NO: 3799560 - DNA, 25 bp, Homo sapien
cctgcttgatcgctgccgctgtgag

SEQ ID NO: 3799561 - DNA, 25 bp, Homo sapien
gttttgctggcaaagcccgctgcct

SEQ ID NO: 3799562 - DNA, 25 bp, Homo sapien
ctgtttcggttttgctggcaaagcc

SEQ ID NO: 3799563 - DNA, 25 bp, Homo sapien
tcacctccctccgaccttgaatcta

SEQ ID NO: 3799564 - DNA, 25 bp, Homo sapien
cagtcacctccctccgaccttgaat

SEQ ID NO: 3799565 - DNA, 25 bp, Homo sapien
ctccctccgaccttgaatctacatg

SEQ ID NO: 3799566 - DNA, 25 bp, Homo sapien
ccctccgaccttgaatctacatgaa

SEQ ID NO: 3799567 - DNA, 25 bp, Homo sapien
gcagctcgtgcttgttgaggacctc

SEQ ID NO: 3799568 - DNA, 25 bp, Homo sapien
ccagggagtgttcgttgagggcaca

SEQ ID NO: 3799569 - DNA, 25 bp, Homo sapien
cacgtctgaggcgatgtggcgcagg

SEQ ID NO: 3799570 - DNA, 25 bp, Homo sapien
gaggacctccttcacgtagtaccag

SEQ ID NO: 3799571 - DNA, 25 bp, Homo sapien
tgttgacgatctgggcgttgctgat

SEQ ID NO: 3799572 - DNA, 25 bp, Homo sapien
cagtgaaatttcactgttgacgatc

SEQ ID NO: 3799573 - DNA, 25 bp, Homo sapien
cactgttgacgatctgggcgttgct

SEQ ID NO: 3799574 - DNA, 25 bp, Homo sapien
aatttcactgttgacgatctgggcg

SEQ ID NO: 3799575 - DNA, 25 bp, Homo sapien
ggtgaccacagcagtagataaagca

SEQ ID NO: 3799576 - DNA, 25 bp, Homo sapien
gaggtgaccacagcagtagataaag

SEQ ID NO: 3799577 - DNA, 25 bp, Homo sapien
accacagcagtagataaagcagaag

SEQ ID NO: 3799578 - DNA, 25 bp, Homo sapien
gataaagcagaagaggagacctgaa

SEQ ID NO: 3799579 - DNA, 25 bp, Homo sapien
gccatggtaggaagcatactggacc

SEQ ID NO: 3799580 - DNA, 25 bp, Homo sapien
ccatggtaggaagcatactggacct

SEQ ID NO: 3799581 - DNA, 25 bp, Homo sapien
gggcagtcataccagcaacaagaga

SEQ ID NO: 3799582 - DNA, 25 bp, Homo sapien
tgatgggcagtcataccagcaacaa

SEQ ID NO: 3799583 - DNA, 25 bp, Homo sapien
tgggcagtcataccagcaacaagag

SEQ ID NO: 3799584 - DNA, 25 bp, Homo sapien
cttgctgatgggcagtcataccagc

SEQ ID NO: 3799585 - DNA, 25 bp, Homo sapien
tctgcccgttcaaatccttgttgtc

SEQ ID NO: 3799586 - DNA, 25 bp, Homo sapien
gttaatcgcaaagagtatggagttc

SEQ ID NO: 3799587 - DNA, 25 bp, Homo sapien
atgttaatcgcaaagagtatggagt

SEQ ID NO: 3799588 - DNA, 25 bp, Homo sapien
tgttaatcgcaaagagtatggagtt

SEQ ID NO: 3799589 - DNA, 25 bp, Homo sapien
tcagcaaggaggtcacgttctgcgt

SEQ ID NO: 3799590 - DNA, 25 bp, Homo sapien
caaggaggtcacgttctgcgttgac

SEQ ID NO: 3799591 - DNA, 25 bp, Homo sapien
actccttcagcaaggaggtcacgtt

SEQ ID NO: 3799592 - DNA, 25 bp, Homo sapien
ggaggtcacgttctgcgttgactcc

SEQ ID NO: 3799593 - DNA, 25 bp, Homo sapien
tcctgatgagtttccatacacgtca

SEQ ID NO: 3799594 - DNA, 25 bp, Homo sapien
tcacatcaagcttctggtacccaaa

SEQ ID NO: 3799595 - DNA, 25 bp, Homo sapien
caaaggcggacatgatattgacaga

SEQ ID NO: 3799596 - DNA, 25 bp, Homo sapien
catcttcatcatcgatgcttttcac

SEQ ID NO: 3799597 - DNA, 25 bp, Homo sapien
tattaagtgccctcaaatgtactcc

SEQ ID NO: 3799598 - DNA, 25 bp, Homo sapien
catcagactgtgaaaccctgtgaac

SEQ ID NO: 3799599 - DNA, 25 bp, Homo sapien
gataccctgggcaaatataaagctt

SEQ ID NO: 3799600 - DNA, 25 bp, Homo sapien
caggtgcaggcaagttacggctatt

SEQ ID NO: 3799601 - DNA, 25 bp, Homo sapien
catcccatcactccgctgtgtcttc

SEQ ID NO: 3799602 - DNA, 25 bp, Homo sapien
agggcccaggccaagtgaaggtcac

SEQ ID NO: 3799603 - DNA, 25 bp, Homo sapien
ggaagggtcagtcaagatccctctt

SEQ ID NO: 3799604 - DNA, 25 bp, Homo sapien
cagtcaagatccctcttaatgccgg

SEQ ID NO: 3799605 - DNA, 25 bp, Homo sapien
attgtgcagcaccttcagcggagcc

SEQ ID NO: 3799606 - DNA, 25 bp, Homo sapien
aagaggatgtcggagtcattgtgca

SEQ ID NO: 3799607 - DNA, 25 bp, Homo sapien
tgtaggagcccacgccactgacagg

SEQ ID NO: 3799608 - DNA, 25 bp, Homo sapien
gctgggctgtaggagcccacgccac

SEQ ID NO: 3799609 - DNA, 25 bp, Homo sapien
gagagtgcattcgacatcagctgga

SEQ ID NO: 3799610 - DNA, 25 bp, Homo sapien
gctcgggtcccatcagcagtgagaa

SEQ ID NO: 3799611 - DNA, 25 bp, Homo sapien
caggaaatctgcaaggactctagag

SEQ ID NO: 3799612 - DNA, 25 bp, Homo sapien
cagcatcgttactgcagagaaggga

SEQ ID NO: 3799613 - DNA, 25 bp, Homo sapien
attctcaagaagttcaagtccactt

SEQ ID NO: 3799614 - DNA, 25 bp, Homo sapien
tctcaagaagttcaagtccacttcc

SEQ ID NO: 3799615 - DNA, 25 bp, Homo sapien
caagaagttcaagtccacttcccct

SEQ ID NO: 3799616 - DNA, 25 bp, Homo sapien
tccaaattctcaagaagttcaagtc

SEQ ID NO: 3799617 - DNA, 25 bp, Homo sapien
ccaggatctgggagaacgtggtcct

SEQ ID NO: 3799618 - DNA, 25 bp, Homo sapien
atctgggagaacgtggtcctctggt

SEQ ID NO: 3799619 - DNA, 25 bp, Homo sapien
aggatctgggagaacgtggtcctct

SEQ ID NO: 3799620 - DNA, 25 bp, Homo sapien
tgggagaacgtggtcctctggtcct

SEQ ID NO: 3799621 - DNA, 25 bp, Homo sapien
ggctgctcagaggacttccgtggcc

SEQ ID NO: 3799622 - DNA, 25 bp, Homo sapien
taattgtcatggactctggcactga

SEQ ID NO: 3799623 - DNA, 25 bp, Homo sapien
tgtcatggactctggcactgaggca

SEQ ID NO: 3799624 - DNA, 25 bp, Homo sapien
ggcagaaggtaacaggctgctcaga

SEQ ID NO: 3799625 - DNA, 25 bp, Homo sapien
tcaagccaccagtgagataccagga

SEQ ID NO: 3799626 - DNA, 25 bp, Homo sapien
catgggacaaatgctggctcaagcc

SEQ ID NO: 3799627 - DNA, 25 bp, Homo sapien
gaagtctacggcaaggctgctccat

SEQ ID NO: 3799628 - DNA, 25 bp, Homo sapien
gataccaggagcacccgtcagttta

SEQ ID NO: 3799629 - DNA, 25 bp, Homo sapien
tcaacgtttttgtaccaagagccca

SEQ ID NO: 3799630 - DNA, 25 bp, Homo sapien
catacaaaaagtgcggccagccgtt

SEQ ID NO: 3799631 - DNA, 25 bp, Homo sapien
aatcaaagaatgctgggtgcctccc

SEQ ID NO: 3799632 - DNA, 25 bp, Homo sapien
tgaatgctggcccaagacacgagtg

SEQ ID NO: 3799633 - DNA, 25 bp, Homo sapien
ctgcctctgcatcccgagtagccga

SEQ ID NO: 3799634 - DNA, 25 bp, Homo sapien
cctctgcatcccgagtagccgagat

SEQ ID NO: 3799635 - DNA, 25 bp, Homo sapien
ggtgccagccaccacaccatgctaa

SEQ ID NO: 3799636 - DNA, 25 bp, Homo sapien
tctgcatcccgagtagccgagatta

SEQ ID NO: 3799637 - DNA, 25 bp, Homo sapien
cttttgtattttctgaagtaccaga

SEQ ID NO: 3799638 - DNA, 25 bp, Homo sapien
ggcttttgtattttctgaagtacca

SEQ ID NO: 3799639 - DNA, 25 bp, Homo sapien
cataacaggcttttgtattttctga

SEQ ID NO: 3799640 - DNA, 25 bp, Homo sapien
tttcataacaggcttttgtattttc

SEQ ID NO: 3799641 - DNA, 25 bp, Homo sapien
cactgaaaggggtaccgcgctggac

SEQ ID NO: 3799642 - DNA, 25 bp, Homo sapien
actgaaaggggtaccgcgctggaca

SEQ ID NO: 3799643 - DNA, 25 bp, Homo sapien
ctgaaaggggtaccgcgctggacat

SEQ ID NO: 3799644 - DNA, 25 bp, Homo sapien
tgaaaggggtaccgcgctggacatg

SEQ ID NO: 3799645 - DNA, 25 bp, Homo sapien
gctgtactgcataacctaaaacttc

SEQ ID NO: 3799646 - DNA, 25 bp, Homo sapien
gcggttgttcagtgccacagataac

SEQ ID NO: 3799647 - DNA, 25 bp, Homo sapien
ccagggtctatatgagtgaccagca

SEQ ID NO: 3799648 - DNA, 25 bp, Homo sapien
gaactcgttcccatgggtggatcga

SEQ ID NO: 3799649 - DNA, 25 bp, Homo sapien
ggaccacacaccgcactgctgggcc

SEQ ID NO: 3799650 - DNA, 25 bp, Homo sapien
caggaccacacaccgcactgctggg

SEQ ID NO: 3799651 - DNA, 25 bp, Homo sapien
aggaccacacaccgcactgctgggc

SEQ ID NO: 3799652 - DNA, 25 bp, Homo sapien
gcaggaccacacaccgcactgctgg

SEQ ID NO: 3799653 - DNA, 25 bp, Homo sapien
ggtgccgtgacaccttctggtgcac

SEQ ID NO: 3799654 - DNA, 25 bp, Homo sapien
ggttctcccatggtcaagtccagcc

SEQ ID NO: 3799655 - DNA, 25 bp, Homo sapien
cacctgctgacttggttctcccatg

SEQ ID NO: 3799656 - DNA, 25 bp, Homo sapien
ctccaggtgccgtgacaccttctgg

SEQ ID NO: 3799657 - DNA, 25 bp, Homo sapien
gtgagcaggattccacccatgcctt

SEQ ID NO: 3799658 - DNA, 25 bp, Homo sapien
aatggcgagtcccttgtgagcagga

SEQ ID NO: 3799659 - DNA, 25 bp, Homo sapien
gggctgctgtcgtcttcggcattca

SEQ ID NO: 3799660 - DNA, 25 bp, Homo sapien
cacgcatgcagcctagtacattgcc

SEQ ID NO: 3799661 - DNA, 25 bp, Homo sapien
cacagataggatgggattcccagcc

SEQ ID NO: 3799662 - DNA, 25 bp, Homo sapien
agataggatgggattcccagccaag

SEQ ID NO: 3799663 - DNA, 25 bp, Homo sapien
acagataggatgggattcccagcca

SEQ ID NO: 3799664 - DNA, 25 bp, Homo sapien
cagataggatgggattcccagccaa

SEQ ID NO: 3799665 - DNA, 25 bp, Homo sapien
cacgtattgactaagcctgtttcca

SEQ ID NO: 3799666 - DNA, 25 bp, Homo sapien
gttgaagcacgtattgactaagcct

SEQ ID NO: 3799667 - DNA, 25 bp, Homo sapien
ctcgttgaagcacgtattgactaag

SEQ ID NO: 3799668 - DNA, 25 bp, Homo sapien
acgtattgactaagcctgtttccac

SEQ ID NO: 3799669 - DNA, 25 bp, Homo sapien
tccacggttcgtccgcgttgaagca

SEQ ID NO: 3799670 - DNA, 25 bp, Homo sapien
tgtttccacggttcgtccgcgttga

SEQ ID NO: 3799671 - DNA, 25 bp, Homo sapien
ctgtttccacggttcgtccgcgttg

SEQ ID NO: 3799672 - DNA, 25 bp, Homo sapien
ttccacggttcgtccgcgttgaagc

SEQ ID NO: 3799673 - DNA, 25 bp, Homo sapien
cgtcctcgttgaagcacgtattgac

SEQ ID NO: 3799674 - DNA, 25 bp, Homo sapien
tccatggttcgtcctcgttgaagca

SEQ ID NO: 3799675 - DNA, 25 bp, Homo sapien
tccgcattgaagcacgtattgacca

SEQ ID NO: 3799676 - DNA, 25 bp, Homo sapien
ccgcattgaagcacgtattgaccac

SEQ ID NO: 3799677 - DNA, 25 bp, Homo sapien
tccatggttcgtccgcactgaagca

SEQ ID NO: 3799678 - DNA, 25 bp, Homo sapien
gaagcacgtattgaccacgcctgtt

SEQ ID NO: 3799679 - DNA, 25 bp, Homo sapien
ggttcgtccgcactgaagcacgtat

SEQ ID NO: 3799680 - DNA, 25 bp, Homo sapien
ttgaagcacgtattgaccacgcctg

SEQ ID NO: 3799681 - DNA, 25 bp, Homo sapien
tgtttccacggttcgtccgcattga

SEQ ID NO: 3799682 - DNA, 25 bp, Homo sapien
cacgcctgtttccacggttcgtccg

SEQ ID NO: 3799683 - DNA, 25 bp, Homo sapien
cgtccgcattgaagcacgtattgac

SEQ ID NO: 3799684 - DNA, 25 bp, Homo sapien
cggttcgtccgcattgaagcacgta

SEQ ID NO: 3799685 - DNA, 25 bp, Homo sapien
cagaacactaaccagcaggttcaca

SEQ ID NO: 3799686 - DNA, 25 bp, Homo sapien
gagctggacagaaacgtcaaccacg

SEQ ID NO: 3799687 - DNA, 25 bp, Homo sapien
cccgttgagctttttccattatgca

SEQ ID NO: 3799688 - DNA, 25 bp, Homo sapien
cagctgtaatttcttgccccagtga

SEQ ID NO: 3799689 - DNA, 25 bp, Homo sapien
gtgccaatcagttggggccgctggc

SEQ ID NO: 3799690 - DNA, 25 bp, Homo sapien
cactgtgccaatcagttggggccgc

SEQ ID NO: 3799691 - DNA, 25 bp, Homo sapien
actgtgccaatcagttggggccgct

SEQ ID NO: 3799692 - DNA, 25 bp, Homo sapien
ctgtgccaatcagttggggccgctg

SEQ ID NO: 3799693 - DNA, 25 bp, Homo sapien
gccacagtggcctggcgcagttcac

SEQ ID NO: 3799694 - DNA, 25 bp, Homo sapien
ggccacagtggcctggcgcagttca

SEQ ID NO: 3799695 - DNA, 25 bp, Homo sapien
ctcctccagctcatccttcctgttc

SEQ ID NO: 3799696 - DNA, 25 bp, Homo sapien
tccagctcatccttcctgttcatca

SEQ ID NO: 3799697 - DNA, 25 bp, Homo sapien
cctccagctcatccttcctgttcat

SEQ ID NO: 3799698 - DNA, 25 bp, Homo sapien
ccagctcatccttcctgttcatcat

SEQ ID NO: 3799699 - DNA, 25 bp, Homo sapien
gtgtccacctcttgccggagcgcgg

SEQ ID NO: 3799700 - DNA, 25 bp, Homo sapien
tgctccatctcaccgtcgagcaggt

SEQ ID NO: 3799701 - DNA, 25 bp, Homo sapien
gagcgcggctgagtgctccatctca

SEQ ID NO: 3799702 - DNA, 25 bp, Homo sapien
caccgtcgagcaggtttcgcagtga

SEQ ID NO: 3799703 - DNA, 25 bp, Homo sapien
gagactatcaggaactgttgatttc

SEQ ID NO: 3799704 - DNA, 25 bp, Homo sapien
ccaggagctcaaatgagactatcag

SEQ ID NO: 3799705 - DNA, 25 bp, Homo sapien
cacatggttctcacgtggggttaga

SEQ ID NO: 3799706 - DNA, 25 bp, Homo sapien
caaatgagactatcaggaactgttg

SEQ ID NO: 3799707 - DNA, 25 bp, Homo sapien
aagccagcagtgaccgtgacgcatc

SEQ ID NO: 3799708 - DNA, 25 bp, Homo sapien
cgcatcaacagggtgctttatgcca

SEQ ID NO: 3799709 - DNA, 25 bp, Homo sapien
tgcttccctaggtaagggtcggaca

SEQ ID NO: 3799710 - DNA, 25 bp, Homo sapien
gccaagaccagaatcactgtgctgt

SEQ ID NO: 3799711 - DNA, 25 bp, Homo sapien
aataaacaatatcggccagaagcgg

SEQ ID NO: 3799712 - DNA, 25 bp, Homo sapien
agcttcacacggaacagtaaatgtt

SEQ ID NO: 3799713 - DNA, 25 bp, Homo sapien
tctctgattgactaagcttcacacg

SEQ ID NO: 3799714 - DNA, 25 bp, Homo sapien
acaaataaacaatatcggccagaag

SEQ ID NO: 3799715 - DNA, 25 bp, Homo sapien
gcgtcatcataggtcagaaggcagt

SEQ ID NO: 3799716 - DNA, 25 bp, Homo sapien
gaggagcttccagcgagcagagatc

SEQ ID NO: 3799717 - DNA, 25 bp, Homo sapien
cagtgggcgcacgttgaaagctcag

SEQ ID NO: 3799718 - DNA, 25 bp, Homo sapien
gcagtaacggaaaaaggagcccagc

SEQ ID NO: 3799719 - DNA, 25 bp, Homo sapien
tccggaggcaaagagggaaagtcaa

SEQ ID NO: 3799720 - DNA, 25 bp, Homo sapien
aattgccaccttgtgaaccgtaccg

SEQ ID NO: 3799721 - DNA, 25 bp, Homo sapien
taagacccaggcttcatgttcagtg

SEQ ID NO: 3799722 - DNA, 25 bp, Homo sapien
tttggcaccagtacgaattcagcga

SEQ ID NO: 3799723 - DNA, 25 bp, Homo sapien
ggaaagagcctcagaaacaccgtgt

SEQ ID NO: 3799724 - DNA, 25 bp, Homo sapien
gaaagcaacgcgttccaggttacag

SEQ ID NO: 3799725 - DNA, 25 bp, Homo sapien
caaaaggaccttgctcactggcaac

SEQ ID NO: 3799726 - DNA, 25 bp, Homo sapien
gctaagatagggcagggtttccaaa

SEQ ID NO: 3799727 - DNA, 25 bp, Homo sapien
gccaagagatccagagtgggtacca

SEQ ID NO: 3799728 - DNA, 25 bp, Homo sapien
ctgtacacaagaccggccaagagat

SEQ ID NO: 3799729 - DNA, 25 bp, Homo sapien
gaagatgtcatgaccctctgtacag

SEQ ID NO: 3799730 - DNA, 25 bp, Homo sapien
gtgggtaccaacatggaaggctctg

SEQ ID NO: 3799731 - DNA, 25 bp, Homo sapien
tggttgtagactctccaggaggatg

SEQ ID NO: 3799732 - DNA, 25 bp, Homo sapien
aacccatggtggttgtagactctcc

SEQ ID NO: 3799733 - DNA, 25 bp, Homo sapien
cagctgcatctacccctttcatttt

SEQ ID NO: 3799734 - DNA, 25 bp, Homo sapien
acttagtgaacccatggtggttgta

SEQ ID NO: 3799735 - DNA, 25 bp, Homo sapien
ccccagcgagctcctgccccatatc

SEQ ID NO: 3799736 - DNA, 25 bp, Homo sapien
agacaaacagggaaaccttcctgca

SEQ ID NO: 3799737 - DNA, 25 bp, Homo sapien
caaacagggaaaccttcctgcacac

SEQ ID NO: 3799738 - DNA, 25 bp, Homo sapien
tcagttttgaagacaaacagggaaa

SEQ ID NO: 3799739 - DNA, 25 bp, Homo sapien
gacaaacagggaaaccttcctgcac

SEQ ID NO: 3799740 - DNA, 25 bp, Homo sapien
ggtccaagatatccgaagttgaagc

SEQ ID NO: 3799741 - DNA, 25 bp, Homo sapien
cttcagcaaaagctttagggagaaa

SEQ ID NO: 3799742 - DNA, 25 bp, Homo sapien
cagcaaaagctttagggagaaacgc

SEQ ID NO: 3799743 - DNA, 25 bp, Homo sapien
gggagaaacgcctggtccaagatat

SEQ ID NO: 3799744 - DNA, 25 bp, Homo sapien
gtgtgggttttgatcagctgtagca

SEQ ID NO: 3799745 - DNA, 25 bp, Homo sapien
gtgggttttgatcagctgtagcatg

SEQ ID NO: 3799746 - DNA, 25 bp, Homo sapien
gttttgatcagctgtagcatgtcag

SEQ ID NO: 3799747 - DNA, 25 bp, Homo sapien
tcgggtgtgggttttgatcagctgt

SEQ ID NO: 3799748 - DNA, 25 bp, Homo sapien
agaaggagccgaccgtgctgagatc

SEQ ID NO: 3799749 - DNA, 25 bp, Homo sapien
acaagcctggtgtttcagtcaaagc

SEQ ID NO: 3799750 - DNA, 25 bp, Homo sapien
tgttcaagaagggagccatcacgtg

SEQ ID NO: 3799751 - DNA, 25 bp, Homo sapien
tgagagggtaaacagacgaggcccc

SEQ ID NO: 3799752 - DNA, 25 bp, Homo sapien
gggtaggcggacataattcactcca

SEQ ID NO: 3799753 - DNA, 25 bp, Homo sapien
aagagtgacccacttctggccaggg

SEQ ID NO: 3799754 - DNA, 25 bp, Homo sapien
aatctccctttagaagccacctaag

SEQ ID NO: 3799755 - DNA, 25 bp, Homo sapien
tgcaacctagtaatagatcagtaaa

SEQ ID NO: 3799756 - DNA, 25 bp, Homo sapien
tcatttgctgccagccgtcgggccg

SEQ ID NO: 3799757 - DNA, 25 bp, Homo sapien
tcaggtctcctctcatttgctgcca

SEQ ID NO: 3799758 - DNA, 25 bp, Homo sapien
cagtgtttggcggtcaggtctcctc

SEQ ID NO: 3799759 - DNA, 25 bp, Homo sapien
ggcggtcaggtctcctctcatttgc

SEQ ID NO: 3799760 - DNA, 25 bp, Homo sapien
gaactcgacgttcatctccaaagct

SEQ ID NO: 3799761 - DNA, 25 bp, Homo sapien
tgagaactcgacgttcatctccaaa

SEQ ID NO: 3799762 - DNA, 25 bp, Homo sapien
gagaactcgacgttcatctccaaag

SEQ ID NO: 3799763 - DNA, 25 bp, Homo sapien
ctgagaactcgacgttcatctccaa

SEQ ID NO: 3799764 - DNA, 25 bp, Homo sapien
tcagttggactttgagcacctcgtt

SEQ ID NO: 3799765 - DNA, 25 bp, Homo sapien
cttcagctgtttgaccttctctttt

SEQ ID NO: 3799766 - DNA, 25 bp, Homo sapien
tacatatttcttcagttggactttg

SEQ ID NO: 3799767 - DNA, 25 bp, Homo sapien
ttggactttgagcacctcgttctct

SEQ ID NO: 3799768 - DNA, 25 bp, Homo sapien
acttcagagctgtcacctccaatgc

SEQ ID NO: 3799769 - DNA, 25 bp, Homo sapien
aacttcagagctgtcacctccaatg

SEQ ID NO: 3799770 - DNA, 25 bp, Homo sapien
tgaacaggactacgctatggtggcc

SEQ ID NO: 3799771 - DNA, 25 bp, Homo sapien
tgtacagtgcaaggtggaacaccgg

SEQ ID NO: 3799772 - DNA, 25 bp, Homo sapien
tagagcacgtgtcatggatcaagca

SEQ ID NO: 3799773 - DNA, 25 bp, Homo sapien
catgatattgttgcagcccctggat

SEQ ID NO: 3799774 - DNA, 25 bp, Homo sapien
cacaggacagttgccatgaagcagt

SEQ ID NO: 3799775 - DNA, 25 bp, Homo sapien
taaaataggcagcaatagacctggg

SEQ ID NO: 3799776 - DNA, 25 bp, Homo sapien
gaagcagttagcacagggtctagca

SEQ ID NO: 3799777 - DNA, 25 bp, Homo sapien
gctattattactgggtgctcagcaa

SEQ ID NO: 3799778 - DNA, 25 bp, Homo sapien
gaggaattctgggtacagcacgtac

SEQ ID NO: 3799779 - DNA, 25 bp, Homo sapien
ccccaggtgggtagatatagagtat

SEQ ID NO: 3799780 - DNA, 25 bp, Homo sapien
taattaagtgcacccaactagggca

SEQ ID NO: 3799781 - DNA, 25 bp, Homo sapien
gcatcataggactcaaggtccacct

SEQ ID NO: 3799782 - DNA, 25 bp, Homo sapien
aagccacgatgagctccgcaggctg

SEQ ID NO: 3799783 - DNA, 25 bp, Homo sapien
gaaacaatttaaggcaagccacgat

SEQ ID NO: 3799784 - DNA, 25 bp, Homo sapien
gaggacccctgcactctgctaatag

SEQ ID NO: 3799785 - DNA, 25 bp, Homo sapien
tctggcccaggatgtatgcctgctt

SEQ ID NO: 3799786 - DNA, 25 bp, Homo sapien
ctgtgagactgagagtcagtttccc

SEQ ID NO: 3799787 - DNA, 25 bp, Homo sapien
ttctataagaatgacccagccagcc

SEQ ID NO: 3799788 - DNA, 25 bp, Homo sapien
tgcaccaaccttcaagttccaggaa

SEQ ID NO: 3799789 - DNA, 25 bp, Homo sapien
cattcctgagaagttactgtgagac

SEQ ID NO: 3799790 - DNA, 25 bp, Homo sapien
ggctacatacgacccagcaaagagg

SEQ ID NO: 3799791 - DNA, 25 bp, Homo sapien
cactggtgctagagacgtgggctcc

SEQ ID NO: 3799792 - DNA, 25 bp, Homo sapien
tcaaggagttcacggtccagtaggc

SEQ ID NO: 3799793 - DNA, 25 bp, Homo sapien
tcctggcaacaaacaatgaacgcaa

SEQ ID NO: 3799794 - DNA, 25 bp, Homo sapien
tgtcaactacatgcacgaatcggtg

SEQ ID NO: 3799795 - DNA, 25 bp, Homo sapien
cagtatctggcatacgccctagagt

SEQ ID NO: 3799796 - DNA, 25 bp, Homo sapien
tggagcacatgaagcctaacccagt

SEQ ID NO: 3799797 - DNA, 25 bp, Homo sapien
tcagactttggtcacctggagcaca

SEQ ID NO: 3799798 - DNA, 25 bp, Homo sapien
cagagctgccaacacaagtgtgttt

SEQ ID NO: 3799799 - DNA, 25 bp, Homo sapien
gccactcctgcaggaaaaatccttg

SEQ ID NO: 3799800 - DNA, 25 bp, Homo sapien
ggaaacagatgccactcctgcagga

SEQ ID NO: 3799801 - DNA, 25 bp, Homo sapien
gctgccaacacaagtgtgtttccag

SEQ ID NO: 3799802 - DNA, 25 bp, Homo sapien
taatccagagactagtcccaactgt

SEQ ID NO: 3799803 - DNA, 25 bp, Homo sapien
ttatggagtgcttcccacacaccag

SEQ ID NO: 3799804 - DNA, 25 bp, Homo sapien
gcctcaattacagactccaacggaa

SEQ ID NO: 3799805 - DNA, 25 bp, Homo sapien
tgataggtccaaacacgtaacctgc

SEQ ID NO: 3799806 - DNA, 25 bp, Homo sapien
tgtgctggtcacatataaagcctga

SEQ ID NO: 3799807 - DNA, 25 bp, Homo sapien
tctaagaataccaccaattggccct

SEQ ID NO: 3799808 - DNA, 25 bp, Homo sapien
gacctaagcagaccctatgcagctg

SEQ ID NO: 3799809 - DNA, 25 bp, Homo sapien
gtgggcccgggtcattgttctaaga

SEQ ID NO: 3799810 - DNA, 25 bp, Homo sapien
tgcccagagcccctccaatggcggc

SEQ ID NO: 3799811 - DNA, 25 bp, Homo sapien
ttagacagctggaagagccagctgc

SEQ ID NO: 3799812 - DNA, 25 bp, Homo sapien
gagtggaatttgttaagctggtgct

SEQ ID NO: 3799813 - DNA, 25 bp, Homo sapien
aaaaaagatggcttgcgatgaagga

SEQ ID NO: 3799814 - DNA, 25 bp, Homo sapien
agctggtgctaaagtgggtctgatg

SEQ ID NO: 3799815 - DNA, 25 bp, Homo sapien
gtgctaaagtgggtctgatgagcaa

SEQ ID NO: 3799816 - DNA, 25 bp, Homo sapien
ccagcagaactagggcttgctcagg

SEQ ID NO: 3799817 - DNA, 25 bp, Homo sapien
tatttgctcgaaagaactctgggcc

SEQ ID NO: 3799818 - DNA, 25 bp, Homo sapien
gctaaatatataacgcatccacggg

SEQ ID NO: 3799819 - DNA, 25 bp, Homo sapien
caaagggacagggtatcatggatca

SEQ ID NO: 3799820 - DNA, 25 bp, Homo sapien
gcctggccgacgtgagaatttttta

SEQ ID NO: 3799821 - DNA, 25 bp, Homo sapien
gagggaggttccagtgccctgccat

SEQ ID NO: 3799822 - DNA, 25 bp, Homo sapien
atgagggaggttccagtgccctgcc

SEQ ID NO: 3799823 - DNA, 25 bp, Homo sapien
caggatgagggaggttccagtgccc

SEQ ID NO: 3799824 - DNA, 25 bp, Homo sapien
ggatgagggaggttccagtgccctg

SEQ ID NO: 3799825 - DNA, 25 bp, Homo sapien
gaggcgctgctctttccggacagcc

SEQ ID NO: 3799826 - DNA, 25 bp, Homo sapien
agccctggtcaacagctgagcacac

SEQ ID NO: 3799827 - DNA, 25 bp, Homo sapien
cttccagaggcgctgctctttccgg

SEQ ID NO: 3799828 - DNA, 25 bp, Homo sapien
ccctggtcaacagctgagcacacat

SEQ ID NO: 3799829 - DNA, 25 bp, Homo sapien
tctccctgatggcataattatagaa

SEQ ID NO: 3799830 - DNA, 25 bp, Homo sapien
gcataattatagaagttccactcca

SEQ ID NO: 3799831 - DNA, 25 bp, Homo sapien
tatagaagttccactccaaatggga

SEQ ID NO: 3799832 - DNA, 25 bp, Homo sapien
tctccttatattcaaatagacaggg

SEQ ID NO: 3799833 - DNA, 25 bp, Homo sapien
gccctctgcaaggaggtcctgctca

SEQ ID NO: 3799834 - DNA, 25 bp, Homo sapien
caaggaggtcctgctcatcacaatt

SEQ ID NO: 3799835 - DNA, 25 bp, Homo sapien
ccgtgactccaaatgatctcttcat

SEQ ID NO: 3799836 - DNA, 25 bp, Homo sapien
caaatgatctcttcatcttgcccag

SEQ ID NO: 3799837 - DNA, 25 bp, Homo sapien
atcttttatatttgccaagttcctt

SEQ ID NO: 3799838 - DNA, 25 bp, Homo sapien
caataaaacgagtgacaaggccagg

SEQ ID NO: 3799839 - DNA, 25 bp, Homo sapien
cacacacacttactaactacttcaa

SEQ ID NO: 3799840 - DNA, 25 bp, Homo sapien
tacttcaacaatgggacattttcac

SEQ ID NO: 3799841 - DNA, 25 bp, Homo sapien
gtacaataaaacgagtgacaaggcc

SEQ ID NO: 3799842 - DNA, 25 bp, Homo sapien
ccatcaacactccaaagatttggca

SEQ ID NO: 3799843 - DNA, 25 bp, Homo sapien
gtaacttctccatcaacactccaaa

SEQ ID NO: 3799844 - DNA, 25 bp, Homo sapien
ctccatcaacactccaaagatttgg

SEQ ID NO: 3799845 - DNA, 25 bp, Homo sapien
ctgtaacttctccatcaacactcca

SEQ ID NO: 3799846 - DNA, 25 bp, Homo sapien
tcagcaatttctcccggcttctgtt

SEQ ID NO: 3799847 - DNA, 25 bp, Homo sapien
ttctttcgtaggagcttgcgagttc

SEQ ID NO: 3799848 - DNA, 25 bp, Homo sapien
tcttcagcaatttctcccggcttct

SEQ ID NO: 3799849 - DNA, 25 bp, Homo sapien
tcgatgagctttctttcgtaggagc

SEQ ID NO: 3799850 - DNA, 25 bp, Homo sapien
tcagaaacaaagacacacagactcc

SEQ ID NO: 3799851 - DNA, 25 bp, Homo sapien
aagacacacagactccaccggcctt

SEQ ID NO: 3799852 - DNA, 25 bp, Homo sapien
gacacacagactccaccggccttac

SEQ ID NO: 3799853 - DNA, 25 bp, Homo sapien
caaagacacacagactccaccggcc

SEQ ID NO: 3799854 - DNA, 25 bp, Homo sapien
gagttgcttggtcgttttgctcacg

SEQ ID NO: 3799855 - DNA, 25 bp, Homo sapien
gaggagttgcttggtcgttttgctc

SEQ ID NO: 3799856 - DNA, 25 bp, Homo sapien
ttgcttggtcgttttgctcacgtgt

SEQ ID NO: 3799857 - DNA, 25 bp, Homo sapien
ggagttgcttggtcgttttgctcac

SEQ ID NO: 3799858 - DNA, 25 bp, Homo sapien
caaaggtgcatgtgatattctctgt

SEQ ID NO: 3799859 - DNA, 25 bp, Homo sapien
tcacatttaacagcacaaaggtgca

SEQ ID NO: 3799860 - DNA, 25 bp, Homo sapien
tatcataagtgccaaaaagttccaa

SEQ ID NO: 3799861 - DNA, 25 bp, Homo sapien
tctgaaaaatagttcacctcatcca

SEQ ID NO: 3799862 - DNA, 25 bp, Homo sapien
caggtgatgggtacatagaggctca

SEQ ID NO: 3799863 - DNA, 25 bp, Homo sapien
catagaggctcattacacttttatt

SEQ ID NO: 3799864 - DNA, 25 bp, Homo sapien
ctaacagctacagccaggtgatggg

SEQ ID NO: 3799865 - DNA, 25 bp, Homo sapien
tgaagcaagactggccaagaggtac

SEQ ID NO: 3799866 - DNA, 25 bp, Homo sapien
caggaaatgggaaacgaggtatcca

SEQ ID NO: 3799867 - DNA, 25 bp, Homo sapien
ttaaatcatacaagcatcaaccagg

SEQ ID NO: 3799868 - DNA, 25 bp, Homo sapien
aaggatgaacacaggtaaatgggac

SEQ ID NO: 3799869 - DNA, 25 bp, Homo sapien
tcatgaaggatgaacacaggtaaat

SEQ ID NO: 3799870 - DNA, 25 bp, Homo sapien
catcaaccaggtaccagaggtcatg

SEQ ID NO: 3799871 - DNA, 25 bp, Homo sapien
tgaagaaggtgataaacatcagccc

SEQ ID NO: 3799872 - DNA, 25 bp, Homo sapien
cacagtaacactaggaggtaggaac

SEQ ID NO: 3799873 - DNA, 25 bp, Homo sapien
ctgcacaggcttgttcaagattctg

SEQ ID NO: 3799874 - DNA, 25 bp, Homo sapien
aaagaaaggtataatctgcacaggc

SEQ ID NO: 3799875 - DNA, 25 bp, Homo sapien
gataaataaaagaatcaaagccttg

SEQ ID NO: 3799876 - DNA, 25 bp, Homo sapien
actggtaataccatcaggcacatag

SEQ ID NO: 3799877 - DNA, 25 bp, Homo sapien
cacgccacatgtgaaagcaactcta

SEQ ID NO: 3799878 - DNA, 25 bp, Homo sapien
tgttgtcactatacccacatcgtca

SEQ ID NO: 3799879 - DNA, 25 bp, Homo sapien
gaggactgtcccagacttgagatga

SEQ ID NO: 3799880 - DNA, 25 bp, Homo sapien
aaacaccggttccaggatgcactga

SEQ ID NO: 3799881 - DNA, 25 bp, Homo sapien
tctggcagtcgctgtgaagagaacc

SEQ ID NO: 3799882 - DNA, 25 bp, Homo sapien
tcggagcttttatacccaggacata

SEQ ID NO: 3799883 - DNA, 25 bp, Homo sapien
tgccccgaagcaagagcaccacaga

SEQ ID NO: 3799884 - DNA, 25 bp, Homo sapien
agcactcagtgtgccccgaagcaag

SEQ ID NO: 3799885 - DNA, 25 bp, Homo sapien
tcagtgtgccccgaagcaagagcac

SEQ ID NO: 3799886 - DNA, 25 bp, Homo sapien
agtgtgccccgaagcaagagcacca

SEQ ID NO: 3799887 - DNA, 25 bp, Homo sapien
gaataactatttccaaactccagta

SEQ ID NO: 3799888 - DNA, 25 bp, Homo sapien
tcgaataactatttccaaactccag

SEQ ID NO: 3799889 - DNA, 25 bp, Homo sapien
tgttcctcgaataactatttccaaa

SEQ ID NO: 3799890 - DNA, 25 bp, Homo sapien
tcctcgaataactatttccaaactc

SEQ ID NO: 3799891 - DNA, 25 bp, Homo sapien
aagctgtcaaaaccctggtgctctt

SEQ ID NO: 3799892 - DNA, 25 bp, Homo sapien
cataagctgtcaaaaccctggtgct

SEQ ID NO: 3799893 - DNA, 25 bp, Homo sapien
taagctgtcaaaaccctggtgctct

SEQ ID NO: 3799894 - DNA, 25 bp, Homo sapien
gctgtcaaaaccctggtgctcttcc

SEQ ID NO: 3799895 - DNA, 25 bp, Homo sapien
cacagtactgctaataatgcctttg

SEQ ID NO: 3799896 - DNA, 25 bp, Homo sapien
tgtgaatccattcaccacgcagcaa

SEQ ID NO: 3799897 - DNA, 25 bp, Homo sapien
tccacacagaaatcacataaacccc

SEQ ID NO: 3799898 - DNA, 25 bp, Homo sapien
ccccacgagcttcctctgggctgtg

SEQ ID NO: 3799899 - DNA, 25 bp, Homo sapien
aaggttgagtcgatcgtctttgggc

SEQ ID NO: 3799900 - DNA, 25 bp, Homo sapien
tttggataagaaaaggttgagtcga

SEQ ID NO: 3799901 - DNA, 25 bp, Homo sapien
gaaaaggttgagtcgatcgtctttg

SEQ ID NO: 3799902 - DNA, 25 bp, Homo sapien
taagaaaaggttgagtcgatcgtct

SEQ ID NO: 3799903 - DNA, 25 bp, Homo sapien
gacatctaacaaggaactgacacca

SEQ ID NO: 3799904 - DNA, 25 bp, Homo sapien
cctggctatgcgctgtggtcctgcc

SEQ ID NO: 3799905 - DNA, 25 bp, Homo sapien
tgcaacccatttgggccagctgtaa

SEQ ID NO: 3799906 - DNA, 25 bp, Homo sapien
tgtcaaggtcagacatctaacaagg

SEQ ID NO: 3799907 - DNA, 25 bp, Homo sapien
aacacaagcacggaaaggtgaggct

SEQ ID NO: 3799908 - DNA, 25 bp, Homo sapien
aaaggtgaggcttagaggcagacat

SEQ ID NO: 3799909 - DNA, 25 bp, Homo sapien
tggaacacaagcacggaaaggtgag

SEQ ID NO: 3799910 - DNA, 25 bp, Homo sapien
caagcacggaaaggtgaggcttaga

SEQ ID NO: 3799911 - DNA, 25 bp, Homo sapien
tgtgcaggcgctcgttgaactcaat

SEQ ID NO: 3799912 - DNA, 25 bp, Homo sapien
tgaactcaatcagctcgccatgcat

SEQ ID NO: 3799913 - DNA, 25 bp, Homo sapien
tctgggacacgagggcttccttggc

SEQ ID NO: 3799914 - DNA, 25 bp, Homo sapien
cggagatcgatgagctcctgcctca

SEQ ID NO: 3799915 - DNA, 25 bp, Homo sapien
ctgaggaagcgttgagctgatatgc

SEQ ID NO: 3799916 - DNA, 25 bp, Homo sapien
gcgagggaacactaggaacaaaggc

SEQ ID NO: 3799917 - DNA, 25 bp, Homo sapien
cttcagggaggattcctgaggaagc

SEQ ID NO: 3799918 - DNA, 25 bp, Homo sapien
tgttccaggcgagggaacactagga

SEQ ID NO: 3799919 - DNA, 25 bp, Homo sapien
tccaggccccatggaaaggaagagg

SEQ ID NO: 3799920 - DNA, 25 bp, Homo sapien
gaaaactgagctggaaacggccttc

SEQ ID NO: 3799921 - DNA, 25 bp, Homo sapien
agatgacgaccaaagcaggcctgag

SEQ ID NO: 3799922 - DNA, 25 bp, Homo sapien
gctgagattcccataaatagatgcc

SEQ ID NO: 3799923 - DNA, 25 bp, Homo sapien
ggattaagggcacatgctaccacgc

SEQ ID NO: 3799924 - DNA, 25 bp, Homo sapien
tggcctcaaagaaagattttttcaa

SEQ ID NO: 3799925 - DNA, 25 bp, Homo sapien
tttcaaataagaagaaatcgttcaa

SEQ ID NO: 3799926 - DNA, 25 bp, Homo sapien
gtgcctggcctcaaagaaagatttt

SEQ ID NO: 3799927 - DNA, 25 bp, Homo sapien
ggaagccactctccccgaacagaaa

SEQ ID NO: 3799928 - DNA, 25 bp, Homo sapien
ggctggcataggcaatgacaccctg

SEQ ID NO: 3799929 - DNA, 25 bp, Homo sapien
caccctggacaggagaaacgaaagg

SEQ ID NO: 3799930 - DNA, 25 bp, Homo sapien
gcaagctttgctctaacaggacagt

SEQ ID NO: 3799931 - DNA, 25 bp, Homo sapien
aactcactattgacagcgccactag

SEQ ID NO: 3799932 - DNA, 25 bp, Homo sapien
gaggaagtcgacatatattcatgac

SEQ ID NO: 3799933 - DNA, 25 bp, Homo sapien
tgagtgtagctcaacggaattaatt

SEQ ID NO: 3799934 - DNA, 25 bp, Homo sapien
taagattagacaaagtgagcggtcc

SEQ ID NO: 3799935 - DNA, 25 bp, Homo sapien
tgcaggtaggagtgtaaatgacact

SEQ ID NO: 3799936 - DNA, 25 bp, Homo sapien
ggtaggagtgtaaatgacactccca

SEQ ID NO: 3799937 - DNA, 25 bp, Homo sapien
agaacttcattatctcatggagaag

SEQ ID NO: 3799938 - DNA, 25 bp, Homo sapien
ttcattatctcatggagaagccaca

SEQ ID NO: 3799939 - DNA, 25 bp, Homo sapien
tgctactacatgcacagctcatgga

SEQ ID NO: 3799940 - DNA, 25 bp, Homo sapien
tgccttagtcttgtcatctctaaaa

SEQ ID NO: 3799941 - DNA, 25 bp, Homo sapien
ttatctgtgccttagtcttgtcatc

SEQ ID NO: 3799942 - DNA, 25 bp, Homo sapien
cagctcatggaataggatttggtat

SEQ ID NO: 3799943 - DNA, 25 bp, Homo sapien
gaactaagattcacgcattcagcca

SEQ ID NO: 3799944 - DNA, 25 bp, Homo sapien
tcagggcatcggtagtcaggatgct

SEQ ID NO: 3799945 - DNA, 25 bp, Homo sapien
caaataaacccacagtcccttggtg

SEQ ID NO: 3799946 - DNA, 25 bp, Homo sapien
tgctaaggtgaaaagcgggaactaa

SEQ ID NO: 3799947 - DNA, 25 bp, Homo sapien
ccctcaattagagccctgacctgtt

SEQ ID NO: 3799948 - DNA, 25 bp, Homo sapien
acagtgatcaaacccaagcagcagc

SEQ ID NO: 3799949 - DNA, 25 bp, Homo sapien
gacttaggaagccaatcaccaaaac

SEQ ID NO: 3799950 - DNA, 25 bp, Homo sapien
cgggatcgatgacttaggaagccaa

SEQ ID NO: 3799951 - DNA, 25 bp, Homo sapien
tcctcatggcgctcggcaaatacct

SEQ ID NO: 3799952 - DNA, 25 bp, Homo sapien
cctcatggcgctcggcaaatacctc

SEQ ID NO: 3799953 - DNA, 25 bp, Homo sapien
ggtcctcatggcgctcggcaaatac

SEQ ID NO: 3799954 - DNA, 25 bp, Homo sapien
gtcctcatggcgctcggcaaatacc

SEQ ID NO: 3799955 - DNA, 25 bp, Homo sapien
gtgtgacacggccataaaccaaggg

SEQ ID NO: 3799956 - DNA, 25 bp, Homo sapien
taatagcagctgtagtaggtcgaac

SEQ ID NO: 3799957 - DNA, 25 bp, Homo sapien
tgctggcaccgtgattgccgactct

SEQ ID NO: 3799958 - DNA, 25 bp, Homo sapien
tcgaacggtgtcctccaaaaagata

SEQ ID NO: 3799959 - DNA, 25 bp, Homo sapien
aaatgataatcccttctcccgtgtc

SEQ ID NO: 3799960 - DNA, 25 bp, Homo sapien
tcaaagccaacaaggctcaggtgtc

SEQ ID NO: 3799961 - DNA, 25 bp, Homo sapien
ctgcaggcaacatcccttccgggtt

SEQ ID NO: 3799962 - DNA, 25 bp, Homo sapien
tccacaagtccccagacgtgggtct

SEQ ID NO: 3799963 - DNA, 25 bp, Homo sapien
cagggacacagtccgggtgagggcc

SEQ ID NO: 3799964 - DNA, 25 bp, Homo sapien
tttccaacaataaattctttctgta

SEQ ID NO: 3799965 - DNA, 25 bp, Homo sapien
ttccaacaataaattctttctgtat

SEQ ID NO: 3799966 - DNA, 25 bp, Homo sapien
gctgcacatcccgttggtcccagag

SEQ ID NO: 3799967 - DNA, 25 bp, Homo sapien
aggaggctgcacatcccgttggtcc

SEQ ID NO: 3799968 - DNA, 25 bp, Homo sapien
gaggctgcacatcccgttggtccca

SEQ ID NO: 3799969 - DNA, 25 bp, Homo sapien
cacatcccgttggtcccagagaatg

SEQ ID NO: 3799970 - DNA, 25 bp, Homo sapien
tgcatattgagctgggttcgcagac

SEQ ID NO: 3799971 - DNA, 25 bp, Homo sapien
ggagtctccgtgtgcagccagtcta

SEQ ID NO: 3799972 - DNA, 25 bp, Homo sapien
agaccagaactctgcagtgacgggg

SEQ ID NO: 3799973 - DNA, 25 bp, Homo sapien
gggacaaggccatgcatattgagct

SEQ ID NO: 3799974 - DNA, 25 bp, Homo sapien
ttggtcttggatccaggagttcaga

SEQ ID NO: 3799975 - DNA, 25 bp, Homo sapien
ccaggagttcagaaatggatctgga

SEQ ID NO: 3799976 - DNA, 25 bp, Homo sapien
cttggtcttggatccaggagttcag

SEQ ID NO: 3799977 - DNA, 25 bp, Homo sapien
tggtcttggatccaggagttcagaa

SEQ ID NO: 3799978 - DNA, 25 bp, Homo sapien
cacattgcgaattgcctcctcctag

SEQ ID NO: 3799979 - DNA, 25 bp, Homo sapien
taagaagagtgcctgaatcaccagg

SEQ ID NO: 3799980 - DNA, 25 bp, Homo sapien
cagggctctcggcaagtgtgacctt

SEQ ID NO: 3799981 - DNA, 25 bp, Homo sapien
tgtgagcagggcaagtggctccacc

SEQ ID NO: 3799982 - DNA, 25 bp, Homo sapien
cctaggtgtggctctctcttatttc

SEQ ID NO: 3799983 - DNA, 25 bp, Homo sapien
tgttcaggaaagattcatctcacat

SEQ ID NO: 3799984 - DNA, 25 bp, Homo sapien
tcttattaacagtgagcaggcatag

SEQ ID NO: 3799985 - DNA, 25 bp, Homo sapien
acgcccgacctaggtgtggctctct

SEQ ID NO: 3799986 - DNA, 25 bp, Homo sapien
tctccacttctgagacgccaacgat

SEQ ID NO: 3799987 - DNA, 25 bp, Homo sapien
ccaagtagaccagtagactgcagcc

SEQ ID NO: 3799988 - DNA, 25 bp, Homo sapien
gagacgccaacgattctcctcattg

SEQ ID NO: 3799989 - DNA, 25 bp, Homo sapien
tcattgctctcccaaggctcgagtg

SEQ ID NO: 3799990 - DNA, 25 bp, Homo sapien
tgccaagaggctgtgcgtgcacaca

SEQ ID NO: 3799991 - DNA, 25 bp, Homo sapien
gatgtttcaaggctcattggccaga

SEQ ID NO: 3799992 - DNA, 25 bp, Homo sapien
tgcagagcatacaatccaccaggag

SEQ ID NO: 3799993 - DNA, 25 bp, Homo sapien
ttggtgaaacactcagacctactgc

SEQ ID NO: 3799994 - DNA, 25 bp, Homo sapien
ctacattccattgagtagtcagact

SEQ ID NO: 3799995 - DNA, 25 bp, Homo sapien
gcactacattccattgagtagtcag

SEQ ID NO: 3799996 - DNA, 25 bp, Homo sapien
cacagatttgcactacattccattg

SEQ ID NO: 3799997 - DNA, 25 bp, Homo sapien
gatttgcactacattccattgagta

SEQ ID NO: 3799998 - DNA, 25 bp, Homo sapien
cacaaatgcacactagttatgcata

SEQ ID NO: 3799999 - DNA, 25 bp, Homo sapien
gaagctccaataggatcctgcaaga

SEQ ID NO: 3800000 - DNA, 25 bp, Homo sapien
ggctgactgctccattccacaaatg

SEQ ID NO: 3800001 - DNA, 25 bp, Homo sapien
gactcagctgcgtggccgagaataa

SEQ ID NO: 3800002 - DNA, 25 bp, Homo sapien
tcaacaaaggtaaagggagaggcca

SEQ ID NO: 3800003 - DNA, 25 bp, Homo sapien
catgtgctgaacaattactatgtgc

SEQ ID NO: 3800004 - DNA, 25 bp, Homo sapien
cagactctgagccaagtacataagc

SEQ ID NO: 3800005 - DNA, 25 bp, Homo sapien
agtcacttggcttccgtaaaccttg

SEQ ID NO: 3800006 - DNA, 25 bp, Homo sapien
tcctgaggggtgtgcaagcatgaca

SEQ ID NO: 3800007 - DNA, 25 bp, Homo sapien
atttcatgggcaaggacaagagaga

SEQ ID NO: 3800008 - DNA, 25 bp, Homo sapien
gtgtgcttccgatttcatgggcaag

SEQ ID NO: 3800009 - DNA, 25 bp, Homo sapien
ggcagaggtgtgcttccgatttcat

SEQ ID NO: 3800010 - DNA, 25 bp, Homo sapien
catcccctgtttgtctgaagtctgg

SEQ ID NO: 3800011 - DNA, 25 bp, Homo sapien
catccctgggatgcagatttctctt

SEQ ID NO: 3800012 - DNA, 25 bp, Homo sapien
gaatcttggagaacacatccctggg

SEQ ID NO: 3800013 - DNA, 25 bp, Homo sapien
tctctttagtttaccctcaatatgg

SEQ ID NO: 3800014 - DNA, 25 bp, Homo sapien
tctggcagacactgtagggctgctc

SEQ ID NO: 3800015 - DNA, 25 bp, Homo sapien
ggacgccagtatcttctctggcaga

SEQ ID NO: 3800016 - DNA, 25 bp, Homo sapien
cctcttttcatccatgtggaggacg

SEQ ID NO: 3800017 - DNA, 25 bp, Homo sapien
gggctgctcttggccactcctcttt

SEQ ID NO: 3800018 - DNA, 25 bp, Homo sapien
cgacaaactctggtcttcggacgtt

SEQ ID NO: 3800019 - DNA, 25 bp, Homo sapien
atttcaaaatccgacaaactctggt

SEQ ID NO: 3800020 - DNA, 25 bp, Homo sapien
ctggtcttcggacgtttgactcaaa

SEQ ID NO: 3800021 - DNA, 25 bp, Homo sapien
ggacgtttgactcaaatctccaggc

SEQ ID NO: 3800022 - DNA, 25 bp, Homo sapien
cactgaggggatccagacgttgatc

SEQ ID NO: 3800023 - DNA, 25 bp, Homo sapien
agacgttgatcagcgcccggtttga

SEQ ID NO: 3800024 - DNA, 25 bp, Homo sapien
atttgctgctttgccccggagaaac

SEQ ID NO: 3800025 - DNA, 25 bp, Homo sapien
ctttgccccggagaaacactgaggg

SEQ ID NO: 3800026 - DNA, 25 bp, Homo sapien
tgtccacctgaaaaccaggcactca

SEQ ID NO: 3800027 - DNA, 25 bp, Homo sapien
aggcaaaaagcaccacagcatgaca

SEQ ID NO: 3800028 - DNA, 25 bp, Homo sapien
cacccagctgtgatgtccacctgaa

SEQ ID NO: 3800029 - DNA, 25 bp, Homo sapien
tgacaaatgggcgtttttccaccca

SEQ ID NO: 3800030 - DNA, 25 bp, Homo sapien
tcttcaacaccccactctttgggga

SEQ ID NO: 3800031 - DNA, 25 bp, Homo sapien
accagggattccgctttcaagttca

SEQ ID NO: 3800032 - DNA, 25 bp, Homo sapien
agggattccgctttcaagttcagtg

SEQ ID NO: 3800033 - DNA, 25 bp, Homo sapien
aagttcagtgtcctttcttcaacac

SEQ ID NO: 3800034 - DNA, 25 bp, Homo sapien
ttccctctctgcatagctacacagg

SEQ ID NO: 3800035 - DNA, 25 bp, Homo sapien
agcaagcataaagacagagctgtgg

SEQ ID NO: 3800036 - DNA, 25 bp, Homo sapien
cctctctgcatagctacacaggaag

SEQ ID NO: 3800037 - DNA, 25 bp, Homo sapien
gagctgtgggtaaaagagaacttga

SEQ ID NO: 3800038 - DNA, 25 bp, Homo sapien
tctgtgttcccatcttgctgtcaaa

SEQ ID NO: 3800039 - DNA, 25 bp, Homo sapien
tcatctgtgttcccatcttgctgtc

SEQ ID NO: 3800040 - DNA, 25 bp, Homo sapien
ttatctcatctgtgttcccatcttg

SEQ ID NO: 3800041 - DNA, 25 bp, Homo sapien
tatctcatctgtgttcccatcttgc

SEQ ID NO: 3800042 - DNA, 25 bp, Homo sapien
tggaattacgtgtgcagccagggct

SEQ ID NO: 3800043 - DNA, 25 bp, Homo sapien
taagatctgtgctccggtgactaag

SEQ ID NO: 3800044 - DNA, 25 bp, Homo sapien
caaactgaatcagcgtgcaatggaa

SEQ ID NO: 3800045 - DNA, 25 bp, Homo sapien
gattaatgcaatcacctgggtgtgt

SEQ ID NO: 3800046 - DNA, 25 bp, Homo sapien
ggctgcacggcctacaaagacataa

SEQ ID NO: 3800047 - DNA, 25 bp, Homo sapien
gagtccaggtggtagcagctacact

SEQ ID NO: 3800048 - DNA, 25 bp, Homo sapien
tccaagacgtcctaataagccagag

SEQ ID NO: 3800049 - DNA, 25 bp, Homo sapien
tagcctatggctgccttgactctgt

SEQ ID NO: 3800050 - DNA, 25 bp, Homo sapien
tacggcccacagactaagaatgatt

SEQ ID NO: 3800051 - DNA, 25 bp, Homo sapien
taggcccggcaggatttaggcagat

SEQ ID NO: 3800052 - DNA, 25 bp, Homo sapien
tgggcccctctagtagcacacaggt

SEQ ID NO: 3800053 - DNA, 25 bp, Homo sapien
tgatgtctcagtgccgcaatgccat

SEQ ID NO: 3800054 - DNA, 25 bp, Homo sapien
cattgtcaaatgtacagctgttgtc

SEQ ID NO: 3800055 - DNA, 25 bp, Homo sapien
tacagctgttgtctgcccctgtcac

SEQ ID NO: 3800056 - DNA, 25 bp, Homo sapien
taggaaagttcactggagttgcaag

SEQ ID NO: 3800057 - DNA, 25 bp, Homo sapien
caccatctgtgaccaaagacaggga

SEQ ID NO: 3800058 - DNA, 25 bp, Homo sapien
tggcagtcacagatgcaagctacct

SEQ ID NO: 3800059 - DNA, 25 bp, Homo sapien
agacctgtgatctcatgtcggagca

SEQ ID NO: 3800060 - DNA, 25 bp, Homo sapien
agaggtgacagttcctgtcccacag

SEQ ID NO: 3800061 - DNA, 25 bp, Homo sapien
ccaacttgaacaggatagatagacc

SEQ ID NO: 3800062 - DNA, 25 bp, Homo sapien
ggacctgacacatcgtcatacgtca

SEQ ID NO: 3800063 - DNA, 25 bp, Homo sapien
gcagggatgtctaagccaggccgta

SEQ ID NO: 3800064 - DNA, 25 bp, Homo sapien
tacacatccacgtggacctgacaca

SEQ ID NO: 3800065 - DNA, 25 bp, Homo sapien
ccaaggctctgtgggtacacatcca

SEQ ID NO: 3800066 - DNA, 25 bp, Homo sapien
attccattcatcgtcttttatccgg

SEQ ID NO: 3800067 - DNA, 25 bp, Homo sapien
tataccggcgataaatattccattc

SEQ ID NO: 3800068 - DNA, 25 bp, Homo sapien
ctcctgaactctgtataccggcgat

SEQ ID NO: 3800069 - DNA, 25 bp, Homo sapien
catcgtcttttatccggatgtagac

SEQ ID NO: 3800070 - DNA, 25 bp, Homo sapien
ttgggtgggaagttgtaggccctca

SEQ ID NO: 3800071 - DNA, 25 bp, Homo sapien
tgggtgggaagttgtaggccctcac

SEQ ID NO: 3800072 - DNA, 25 bp, Homo sapien
tgacaagtgggcttcccagcacggg

SEQ ID NO: 3800073 - DNA, 25 bp, Homo sapien
acaagtgggcttcccagcacgggat

SEQ ID NO: 3800074 - DNA, 25 bp, Homo sapien
gtgacaagtgggcttcccagcacgg

SEQ ID NO: 3800075 - DNA, 25 bp, Homo sapien
aagtgggcttcccagcacgggatgg

SEQ ID NO: 3800076 - DNA, 25 bp, Homo sapien
gtaatctcaccactttgggaggcca

SEQ ID NO: 3800077 - DNA, 25 bp, Homo sapien
aaagaaaagtaaatggccaggtgca

SEQ ID NO: 3800078 - DNA, 25 bp, Homo sapien
gtggctcacacctgtaatctcacca

SEQ ID NO: 3800079 - DNA, 25 bp, Homo sapien
ggcatgatggcaggtgctgtctcca

SEQ ID NO: 3800080 - DNA, 25 bp, Homo sapien
tctccaaaagcctgcttggcctcat

SEQ ID NO: 3800081 - DNA, 25 bp, Homo sapien
tagaaagccacctttccggtctcca

SEQ ID NO: 3800082 - DNA, 25 bp, Homo sapien
ctccaaaagcctgcttggcctcatg

SEQ ID NO: 3800083 - DNA, 25 bp, Homo sapien
tcagaccattagaaagccacctttc

SEQ ID NO: 3800084 - DNA, 25 bp, Homo sapien
tagggagttaatgtgaatgtccatc

SEQ ID NO: 3800085 - DNA, 25 bp, Homo sapien
cggctgactgattctgcccgtccag

SEQ ID NO: 3800086 - DNA, 25 bp, Homo sapien
cagatatcagccttgacgctgccaa

SEQ ID NO: 3800087 - DNA, 25 bp, Homo sapien
ggatcctctacagccgaccttcttg

SEQ ID NO: 3800088 - DNA, 25 bp, Homo sapien
gaggtcaaataacgtgcccgaggcc

SEQ ID NO: 3800089 - DNA, 25 bp, Homo sapien
cacacagatagtacagccttaagga

SEQ ID NO: 3800090 - DNA, 25 bp, Homo sapien
taaacacaatactagaagtggcatg

SEQ ID NO: 3800091 - DNA, 25 bp, Homo sapien
gactctcagtgcttattacagcctc

SEQ ID NO: 3800092 - DNA, 25 bp, Homo sapien
ccactgcacaggttcagggtcctgg

SEQ ID NO: 3800093 - DNA, 25 bp, Homo sapien
actgcacaggttcagggtcctggca

SEQ ID NO: 3800094 - DNA, 25 bp, Homo sapien
tgcacaggttcagggtcctggcatc

SEQ ID NO: 3800095 - DNA, 25 bp, Homo sapien
gcacaggttcagggtcctggcatcg

SEQ ID NO: 3800096 - DNA, 25 bp, Homo sapien
tgacgttagtggttgctctcctgga

SEQ ID NO: 3800097 - DNA, 25 bp, Homo sapien
ttttcggcgggaccatccatgtcgg

SEQ ID NO: 3800098 - DNA, 25 bp, Homo sapien
tgacgaactttacggctgaaacctg

SEQ ID NO: 3800099 - DNA, 25 bp, Homo sapien
caaagttcccggtgtgtctggcaag

SEQ ID NO: 3800100 - DNA, 25 bp, Homo sapien
tatgaacgaccatgaatgacagtgt

SEQ ID NO: 3800101 - DNA, 25 bp, Homo sapien
ctatgaacgaccatgaatgacagtg

SEQ ID NO: 3800102 - DNA, 25 bp, Homo sapien
atgaacgaccatgaatgacagtgtc

SEQ ID NO: 3800103 - DNA, 25 bp, Homo sapien
agccccagaaatactttggccaacg

SEQ ID NO: 3800104 - DNA, 25 bp, Homo sapien
caaaagcagatagaatacgggttaa

SEQ ID NO: 3800105 - DNA, 25 bp, Homo sapien
caactactcaaaagggtaagagcca

SEQ ID NO: 3800106 - DNA, 25 bp, Homo sapien
atatacaaggaaactcacagcccca

SEQ ID NO: 3800107 - DNA, 25 bp, Homo sapien
gaatcgagtgcatgcctgaacctgt

SEQ ID NO: 3800108 - DNA, 25 bp, Homo sapien
catcaagaatcgagtgcatgcctga

SEQ ID NO: 3800109 - DNA, 25 bp, Homo sapien
caagaatcgagtgcatgcctgaacc

SEQ ID NO: 3800110 - DNA, 25 bp, Homo sapien
ctggacatcaagaatcgagtgcatg

SEQ ID NO: 3800111 - DNA, 25 bp, Homo sapien
ttcacttgggcttcacccaaggcca

SEQ ID NO: 3800112 - DNA, 25 bp, Homo sapien
ctgttcacttgggcttcacccaagg

SEQ ID NO: 3800113 - DNA, 25 bp, Homo sapien
gggcttcacccaaggccacactcat

SEQ ID NO: 3800114 - DNA, 25 bp, Homo sapien
tgggcttcacccaaggccacactca

SEQ ID NO: 3800115 - DNA, 25 bp, Homo sapien
tcagggcctttctgccaagaactct

SEQ ID NO: 3800116 - DNA, 25 bp, Homo sapien
gcctttctgccaagaactcttaaga

SEQ ID NO: 3800117 - DNA, 25 bp, Homo sapien
ttaggatcttggttgcagccaggtg

SEQ ID NO: 3800118 - DNA, 25 bp, Homo sapien
agatgccttaggatcttggttgcag

SEQ ID NO: 3800119 - DNA, 25 bp, Homo sapien
ggccaagcacctatctacagaaaca

SEQ ID NO: 3800120 - DNA, 25 bp, Homo sapien
gatgcgtgaccttgccgattctctg

SEQ ID NO: 3800121 - DNA, 25 bp, Homo sapien
cagaaacaatccagacacgctggga

SEQ ID NO: 3800122 - DNA, 25 bp, Homo sapien
tgtgctactgagaggtgacaccggt

SEQ ID NO: 3800123 - DNA, 25 bp, Homo sapien
aagtgctggttgtataggcctaagc

SEQ ID NO: 3800124 - DNA, 25 bp, Homo sapien
catctgttgagatgtccctgactct

SEQ ID NO: 3800125 - DNA, 25 bp, Homo sapien
aaaactaccatattttggagcaatc

SEQ ID NO: 3800126 - DNA, 25 bp, Homo sapien
ggagcaatctatcaatatttggtca

SEQ ID NO: 3800127 - DNA, 25 bp, Homo sapien
agtcagctggaaaagacatgcaaag

SEQ ID NO: 3800128 - DNA, 25 bp, Homo sapien
aaacagtgtgacaaagccacaacac

SEQ ID NO: 3800129 - DNA, 25 bp, Homo sapien
cacgcctgatgaagggctacacaag

SEQ ID NO: 3800130 - DNA, 25 bp, Homo sapien
catgcaaagcgatcattacaaaaca

SEQ ID NO: 3800131 - DNA, 25 bp, Homo sapien
tgaagattcagaggaggcaatgcag

SEQ ID NO: 3800132 - DNA, 25 bp, Homo sapien
aagattcagaggaggcaatgcagga

SEQ ID NO: 3800133 - DNA, 25 bp, Homo sapien
attcagaggaggcaatgcaggaagc

SEQ ID NO: 3800134 - DNA, 25 bp, Homo sapien
agattcagaggaggcaatgcaggaa

SEQ ID NO: 3800135 - DNA, 25 bp, Homo sapien
aacgatggaatgctgtgaacaagac

SEQ ID NO: 3800136 - DNA, 25 bp, Homo sapien
tgtgtctttgcaacgcatgtcccgc

SEQ ID NO: 3800137 - DNA, 25 bp, Homo sapien
cagctacgtgacagacagaggtgat

SEQ ID NO: 3800138 - DNA, 25 bp, Homo sapien
tgaacaagacaacgaggctcctgga

SEQ ID NO: 3800139 - DNA, 25 bp, Homo sapien
gaaatgaccctatagaacaggcgat

SEQ ID NO: 3800140 - DNA, 25 bp, Homo sapien
tgaccctatagaacaggcgatcacc

SEQ ID NO: 3800141 - DNA, 25 bp, Homo sapien
tcagaaatgaccctatagaacaggc

SEQ ID NO: 3800142 - DNA, 25 bp, Homo sapien
tatagaacaggcgatcacccatcag

SEQ ID NO: 3800143 - DNA, 25 bp, Homo sapien
gactttgttcatgacgctgcgcagg

SEQ ID NO: 3800144 - DNA, 25 bp, Homo sapien
gctgctttctccgttcctccacaaa

SEQ ID NO: 3800145 - DNA, 25 bp, Homo sapien
gctggcagcgaactcggggaccatc

SEQ ID NO: 3800146 - DNA, 25 bp, Homo sapien
catcagctggatgagggtctccttc

SEQ ID NO: 3800147 - DNA, 25 bp, Homo sapien
cctgggtcccatggcgatcagggca

SEQ ID NO: 3800148 - DNA, 25 bp, Homo sapien
ccatgtccgtgggagcagtacttac

SEQ ID NO: 3800149 - DNA, 25 bp, Homo sapien
gatcagggcatcacggagagccgct

SEQ ID NO: 3800150 - DNA, 25 bp, Homo sapien
catccctttagaagctccaaagcgc

SEQ ID NO: 3800151 - DNA, 25 bp, Homo sapien
ggttcattacccaagcttgagaaac

SEQ ID NO: 3800152 - DNA, 25 bp, Homo sapien
ccttgatcgaaatgtgtgaaagtac

SEQ ID NO: 3800153 - DNA, 25 bp, Homo sapien
ttcagttttggagcacccgtgggct

SEQ ID NO: 3800154 - DNA, 25 bp, Homo sapien
tcaatactggtaggagtctgggaga

SEQ ID NO: 3800155 - DNA, 25 bp, Homo sapien
tcctcacgtgaactatcgcggccat

SEQ ID NO: 3800156 - DNA, 25 bp, Homo sapien
gaactcctcacgtgaactatcgcgg

SEQ ID NO: 3800157 - DNA, 25 bp, Homo sapien
cacgtgaactatcgcggccatttcc

SEQ ID NO: 3800158 - DNA, 25 bp, Homo sapien
atgagaactcctcacgtgaactatc

SEQ ID NO: 3800159 - DNA, 25 bp, Homo sapien
gcactttttacaattcggcacgcga

SEQ ID NO: 3800160 - DNA, 25 bp, Homo sapien
ggctgagattcatgtcacaccgaca

SEQ ID NO: 3800161 - DNA, 25 bp, Homo sapien
tgactccgcgagaggctaattcccc

SEQ ID NO: 3800162 - DNA, 25 bp, Homo sapien
tcaccagggaattcagtcgatgcgt

SEQ ID NO: 3800163 - DNA, 25 bp, Homo sapien
gattcgtcagcacgggtaaggcttg

SEQ ID NO: 3800164 - DNA, 25 bp, Homo sapien
tggagaaaggacacgatcacatgga

SEQ ID NO: 3800165 - DNA, 25 bp, Homo sapien
tgtggctgatccatcattaccccaa

SEQ ID NO: 3800166 - DNA, 25 bp, Homo sapien
gaaacaatccgtacattccgacctg

SEQ ID NO: 3800167 - DNA, 25 bp, Homo sapien
gccactggactccagtttggccgac

SEQ ID NO: 3800168 - DNA, 25 bp, Homo sapien
ctggactccagtttggccgacagag

SEQ ID NO: 3800169 - DNA, 25 bp, Homo sapien
actggactccagtttggccgacaga

SEQ ID NO: 3800170 - DNA, 25 bp, Homo sapien
cactggactccagtttggccgacag

SEQ ID NO: 3800171 - DNA, 25 bp, Homo sapien
cagttcccaaaccagaatgggacca

SEQ ID NO: 3800172 - DNA, 25 bp, Homo sapien
tctcagttcccaaaccagaatggga

SEQ ID NO: 3800173 - DNA, 25 bp, Homo sapien
aaacacaagcaatttctacccactg

SEQ ID NO: 3800174 - DNA, 25 bp, Homo sapien
accattcctgaagctgatcagtggc

SEQ ID NO: 3800175 - DNA, 25 bp, Homo sapien
tattgatgatttctgcagttacaca

SEQ ID NO: 3800176 - DNA, 25 bp, Homo sapien
aaagacttgacagtgagtgcaaggg

SEQ ID NO: 3800177 - DNA, 25 bp, Homo sapien
ccacactagaacttcatcactttcc

SEQ ID NO: 3800178 - DNA, 25 bp, Homo sapien
gggtgggtgctgtttacttcctcat

SEQ ID NO: 3800179 - DNA, 25 bp, Homo sapien
cagtcctggcgtgctcttcggaaag

SEQ ID NO: 3800180 - DNA, 25 bp, Homo sapien
cccagagaatggcaatgccgctgct

SEQ ID NO: 3800181 - DNA, 25 bp, Homo sapien
tgcaacattttgagggcaccctagc

SEQ ID NO: 3800182 - DNA, 25 bp, Homo sapien
gagtggcttccccttcgatccagat

SEQ ID NO: 3800183 - DNA, 25 bp, Homo sapien
gaagtttcagatgctccaatgttta

SEQ ID NO: 3800184 - DNA, 25 bp, Homo sapien
tctttctgtcatgcaccaagttgcc

SEQ ID NO: 3800185 - DNA, 25 bp, Homo sapien
cacaaggctgctatgtagttgagct

SEQ ID NO: 3800186 - DNA, 25 bp, Homo sapien
tcccttcgagaagctccatagtagg

SEQ ID NO: 3800187 - DNA, 25 bp, Homo sapien
tccatctactcaaacgtttctccat

SEQ ID NO: 3800188 - DNA, 25 bp, Homo sapien
aaacgtttctccataagtcgtctgc

SEQ ID NO: 3800189 - DNA, 25 bp, Homo sapien
ccataagtcgtctgctggcaaaggc

SEQ ID NO: 3800190 - DNA, 25 bp, Homo sapien
tactcaaacgtttctccataagtcg

SEQ ID NO: 3800191 - DNA, 25 bp, Homo sapien
acagccaaaccatgtgtcatcttga

SEQ ID NO: 3800192 - DNA, 25 bp, Homo sapien
gatcaatctggcatttatgttccac

SEQ ID NO: 3800193 - DNA, 25 bp, Homo sapien
ggaagatttatccactcttcttggt

SEQ ID NO: 3800194 - DNA, 25 bp, Homo sapien
ggaagagtttcctagctcacatcga

SEQ ID NO: 3800195 - DNA, 25 bp, Homo sapien
gagcccattctgttcggtagccagg

SEQ ID NO: 3800196 - DNA, 25 bp, Homo sapien
ggtatccctgaacccctaagagcag

SEQ ID NO: 3800197 - DNA, 25 bp, Homo sapien
tatgcagatcccagacaggaacgcg

SEQ ID NO: 3800198 - DNA, 25 bp, Homo sapien
ccatcccatgggacagcttagtggt

SEQ ID NO: 3800199 - DNA, 25 bp, Homo sapien
cactacatgcggtatggaaggtatt

SEQ ID NO: 3800200 - DNA, 25 bp, Homo sapien
catgtgagtgtacatcagcctcagt

SEQ ID NO: 3800201 - DNA, 25 bp, Homo sapien
gactaaacatactaggctccaggga

SEQ ID NO: 3800202 - DNA, 25 bp, Homo sapien
caaacttcctataaagggtgagact

SEQ ID NO: 3800203 - DNA, 25 bp, Homo sapien
tggaatgtaatgacacaatgtcagc

SEQ ID NO: 3800204 - DNA, 25 bp, Homo sapien
actggaatgtaatgacacaatgtca

SEQ ID NO: 3800205 - DNA, 25 bp, Homo sapien
aatgtaatgacacaatgtcagctca

SEQ ID NO: 3800206 - DNA, 25 bp, Homo sapien
agactggaatgtaatgacacaatgt

SEQ ID NO: 3800207 - DNA, 25 bp, Homo sapien
ttagagggctggatccctgcaaccc

SEQ ID NO: 3800208 - DNA, 25 bp, Homo sapien
tctgggtctggcgagccggtcaata

SEQ ID NO: 3800209 - DNA, 25 bp, Homo sapien
gagctgcctttgaagcttagagggc

SEQ ID NO: 3800210 - DNA, 25 bp, Homo sapien
cctgcaacccagctaggactgatct

SEQ ID NO: 3800211 - DNA, 25 bp, Homo sapien
aggagacagcccataagtccccagg

SEQ ID NO: 3800212 - DNA, 25 bp, Homo sapien
agacagcccataagtccccagggca

SEQ ID NO: 3800213 - DNA, 25 bp, Homo sapien
gagacagcccataagtccccagggc

SEQ ID NO: 3800214 - DNA, 25 bp, Homo sapien
ctaggagacagcccataagtcccca

SEQ ID NO: 3800215 - DNA, 25 bp, Homo sapien
agtgacatccctgagcccagagttg

SEQ ID NO: 3800216 - DNA, 25 bp, Homo sapien
gatgaggacgtgtggcgacctttcc

SEQ ID NO: 3800217 - DNA, 25 bp, Homo sapien
gctctgttgttagcgtgcgtcttct

SEQ ID NO: 3800218 - DNA, 25 bp, Homo sapien
gccactttcagggtatgagcctcaa

SEQ ID NO: 3800219 - DNA, 25 bp, Homo sapien
gcaaaggacataccgcaaggaacaa

SEQ ID NO: 3800220 - DNA, 25 bp, Homo sapien
gactttccgagctgtggatccagaa

SEQ ID NO: 3800221 - DNA, 25 bp, Homo sapien
tcaacgtggcgataaaagacaggct

SEQ ID NO: 3800222 - DNA, 25 bp, Homo sapien
ataatggccactcctcgacggtgac

SEQ ID NO: 3800223 - DNA, 25 bp, Homo sapien
taatagccctattccttgagccttt

SEQ ID NO: 3800224 - DNA, 25 bp, Homo sapien
tagtggtgggagacaactcaatttt

SEQ ID NO: 3800225 - DNA, 25 bp, Homo sapien
tcaatttttcacatgcggggaggag

SEQ ID NO: 3800226 - DNA, 25 bp, Homo sapien
tacagacatggaggcctaagccacc

SEQ ID NO: 3800227 - DNA, 25 bp, Homo sapien
tattgtaggtcttcggctgcctgct

SEQ ID NO: 3800228 - DNA, 25 bp, Homo sapien
cgtctaggtattgtaggtcttcggc

SEQ ID NO: 3800229 - DNA, 25 bp, Homo sapien
ctttcttgaacaagatcagcgtcta

SEQ ID NO: 3800230 - DNA, 25 bp, Homo sapien
caagatcagcgtctaggtattgtag

SEQ ID NO: 3800231 - DNA, 25 bp, Homo sapien
tctgttaatgctgggactaggtctg

SEQ ID NO: 3800232 - DNA, 25 bp, Homo sapien
tgttagctgccgacttcagcgttgt

SEQ ID NO: 3800233 - DNA, 25 bp, Homo sapien
tcagcgttgtgtaccaccgagactt

SEQ ID NO: 3800234 - DNA, 25 bp, Homo sapien
gacaacaccatttcttagctggctg

SEQ ID NO: 3800235 - DNA, 25 bp, Homo sapien
aagaaacatttgaccttgaacaaag

SEQ ID NO: 3800236 - DNA, 25 bp, Homo sapien
gaccttgaacaaagccggagctgct

SEQ ID NO: 3800237 - DNA, 25 bp, Homo sapien
tctgaatcatctctgagcccaacca

SEQ ID NO: 3800238 - DNA, 25 bp, Homo sapien
aaccagcctggcgtgtgctgtgctt

SEQ ID NO: 3800239 - DNA, 25 bp, Homo sapien
gatccctcgtttcaagtttgacacc

SEQ ID NO: 3800240 - DNA, 25 bp, Homo sapien
cctgtaagtcaagttgttgctttgc

SEQ ID NO: 3800241 - DNA, 25 bp, Homo sapien
ccctgataagctaacaaaatgaaga

SEQ ID NO: 3800242 - DNA, 25 bp, Homo sapien
gacatggccactgtgcgagtgagat

SEQ ID NO: 3800243 - DNA, 25 bp, Homo sapien
tcctgcgtccgcagcacctctgtgc

SEQ ID NO: 3800244 - DNA, 25 bp, Homo sapien
aacctaacaggatccatgtccactc

SEQ ID NO: 3800245 - DNA, 25 bp, Homo sapien
caaaaacctaacaggatccatgtcc

SEQ ID NO: 3800246 - DNA, 25 bp, Homo sapien
aacaggatccatgtccactcctgcg

SEQ ID NO: 3800247 - DNA, 25 bp, Homo sapien
caaaggtacgcttctaagtccaagg

SEQ ID NO: 3800248 - DNA, 25 bp, Homo sapien
tgaagcaacgcgaacacacagcgtg

SEQ ID NO: 3800249 - DNA, 25 bp, Homo sapien
tagcaaaacacaggagacggacttc

SEQ ID NO: 3800250 - DNA, 25 bp, Homo sapien
tagctcatggtaccaccgttccggt

SEQ ID NO: 3800251 - DNA, 25 bp, Homo sapien
ttcacaggctctccgggcggggtga

SEQ ID NO: 3800252 - DNA, 25 bp, Homo sapien
ttggggaagcgggaagctgctttgg

SEQ ID NO: 3800253 - DNA, 25 bp, Homo sapien
tctggggctccacgttgcgggtctc

SEQ ID NO: 3800254 - DNA, 25 bp, Homo sapien
gctttgggccggctgttcacaggct

SEQ ID NO: 3800255 - DNA, 25 bp, Homo sapien
tgtaactgttgggaatcgtgtgctc

SEQ ID NO: 3800256 - DNA, 25 bp, Homo sapien
aatcgtgtgctctcaggatcaccag

SEQ ID NO: 3800257 - DNA, 25 bp, Homo sapien
accaggtggacgtggttgtcacgct

SEQ ID NO: 3800258 - DNA, 25 bp, Homo sapien
gatcaccaggtggacgtggttgtca

SEQ ID NO: 3800259 - DNA, 25 bp, Homo sapien
ttgccaaagccacaggaatatccct

SEQ ID NO: 3800260 - DNA, 25 bp, Homo sapien
agtcattctagtccccacgtgggaa

SEQ ID NO: 3800261 - DNA, 25 bp, Homo sapien
tctcgggtcacggtatcatgcggct

SEQ ID NO: 3800262 - DNA, 25 bp, Homo sapien
gccatccctaggttaggccaggtaa

SEQ ID NO: 3800263 - DNA, 25 bp, Homo sapien
tctcatgactgtagggccaatgcta

SEQ ID NO: 3800264 - DNA, 25 bp, Homo sapien
caatgctactttggacacgctggat

SEQ ID NO: 3800265 - DNA, 25 bp, Homo sapien
caacttcatagtcatggagcctggt

SEQ ID NO: 3800266 - DNA, 25 bp, Homo sapien
tctgagagccacctgacatgggagg

SEQ ID NO: 3800267 - DNA, 25 bp, Homo sapien
ccagagatgtcctcgagcctaggag

SEQ ID NO: 3800268 - DNA, 25 bp, Homo sapien
cacactcgcaaactgactgcagggt

SEQ ID NO: 3800269 - DNA, 25 bp, Homo sapien
cagataaaccatgtgtattgcagca

SEQ ID NO: 3800270 - DNA, 25 bp, Homo sapien
tgagctgatgtgcactctggccttg

SEQ ID NO: 3800271 - DNA, 25 bp, Homo sapien
caggcagttgacacatttccagggt

SEQ ID NO: 3800272 - DNA, 25 bp, Homo sapien
agttgctgtcatgtgcgggccacca

SEQ ID NO: 3800273 - DNA, 25 bp, Homo sapien
gcaaagggtggtcccaggaatccaa

SEQ ID NO: 3800274 - DNA, 25 bp, Homo sapien
gaatgtccaaggtgcttcctcgtgg

SEQ ID NO: 3800275 - DNA, 25 bp, Homo sapien
gctggaatttcacactgattgcagg

SEQ ID NO: 3800276 - DNA, 25 bp, Homo sapien
gagcatactgctaagtgggaatcaa

SEQ ID NO: 3800277 - DNA, 25 bp, Homo sapien
actctaaaatgccttgccagcaacg

SEQ ID NO: 3800278 - DNA, 25 bp, Homo sapien
ccagcaacgtgattggagcatactg

SEQ ID NO: 3800279 - DNA, 25 bp, Homo sapien
gggatgcctcctaaccagtctgatg

SEQ ID NO: 3800280 - DNA, 25 bp, Homo sapien
cctttagggctgaaacctgggcatg

SEQ ID NO: 3800281 - DNA, 25 bp, Homo sapien
caagtctgccgtgattccgagcgaa

SEQ ID NO: 3800282 - DNA, 25 bp, Homo sapien
tgctgtccatcaaccaggcaggctg

SEQ ID NO: 3800283 - DNA, 25 bp, Homo sapien
tatacagtgctacaactgcagaatt

SEQ ID NO: 3800284 - DNA, 25 bp, Homo sapien
gatcaagattgtgtattagaaaaac

SEQ ID NO: 3800285 - DNA, 25 bp, Homo sapien
agcacggacgccaatctaaaaacag

SEQ ID NO: 3800286 - DNA, 25 bp, Homo sapien
actgcagaattagcacggacgccaa

SEQ ID NO: 3800287 - DNA, 25 bp, Homo sapien
caacaaccatgggatgaactgcggg

SEQ ID NO: 3800288 - DNA, 25 bp, Homo sapien
taggatgggaaaacacttacgcacc

SEQ ID NO: 3800289 - DNA, 25 bp, Homo sapien
tgagtaagcgttctacctgacggct

SEQ ID NO: 3800290 - DNA, 25 bp, Homo sapien
gaatgagtggtggttccccttgccg

SEQ ID NO: 3800291 - DNA, 25 bp, Homo sapien
ttgtgtcattgtaaagaggttgatc

SEQ ID NO: 3800292 - DNA, 25 bp, Homo sapien
tgtcattgtaaagaggttgatctca

SEQ ID NO: 3800293 - DNA, 25 bp, Homo sapien
gtaaagaggttgatctcaaccaggt

SEQ ID NO: 3800294 - DNA, 25 bp, Homo sapien
cattgtaaagaggttgatctcaacc

SEQ ID NO: 3800295 - DNA, 25 bp, Homo sapien
ggcattagcgcaggctttgaggcca

SEQ ID NO: 3800296 - DNA, 25 bp, Homo sapien
cagaatcctcagctatagatggtgg

SEQ ID NO: 3800297 - DNA, 25 bp, Homo sapien
ggcaagtttctatgacagcccccca

SEQ ID NO: 3800298 - DNA, 25 bp, Homo sapien
gcatgtcggaaagaatcctcagaat

SEQ ID NO: 3800299 - DNA, 25 bp, Homo sapien
ggtaactcccatctattctgtgtga

SEQ ID NO: 3800300 - DNA, 25 bp, Homo sapien
acatcagaagtcacgtggtccagcc

SEQ ID NO: 3800301 - DNA, 25 bp, Homo sapien
ttaatcgacctcctcatggctggca

SEQ ID NO: 3800302 - DNA, 25 bp, Homo sapien
aagttgacctcttgccataagctgc

SEQ ID NO: 3800303 - DNA, 25 bp, Homo sapien
ggctcccgggttgtgccccaggcat

SEQ ID NO: 3800304 - DNA, 25 bp, Homo sapien
tgccccaggcatcttgccatggacc

SEQ ID NO: 3800305 - DNA, 25 bp, Homo sapien
ccaggcatcttgccatggaccagga

SEQ ID NO: 3800306 - DNA, 25 bp, Homo sapien
catcttgccatggaccaggattggg

SEQ ID NO: 3800307 - DNA, 25 bp, Homo sapien
gtaaagagcaagaacacggagtaat

SEQ ID NO: 3800308 - DNA, 25 bp, Homo sapien
agagcaagaacacggagtaatactg

SEQ ID NO: 3800309 - DNA, 25 bp, Homo sapien
gcaagaacacggagtaatactgctc

SEQ ID NO: 3800310 - DNA, 25 bp, Homo sapien
ctgtaaagagcaagaacacggagta

SEQ ID NO: 3800311 - DNA, 25 bp, Homo sapien
cttactgtttcccagaactcctggt

SEQ ID NO: 3800312 - DNA, 25 bp, Homo sapien
tgcagggggactgacaaattccaaa

SEQ ID NO: 3800313 - DNA, 25 bp, Homo sapien
ctgcagggggactgacaaattccaa

SEQ ID NO: 3800314 - DNA, 25 bp, Homo sapien
cagggttgtcaacctctggtgactg

SEQ ID NO: 3800315 - DNA, 25 bp, Homo sapien
tgatgtttgcgaggcagaaggtggc

SEQ ID NO: 3800316 - DNA, 25 bp, Homo sapien
tcaacctctggtgactgggttttac

SEQ ID NO: 3800317 - DNA, 25 bp, Homo sapien
tgggttttaccatactcagtgcctc

SEQ ID NO: 3800318 - DNA, 25 bp, Homo sapien
ggtttttagtgtcactctgggagac

SEQ ID NO: 3800319 - DNA, 25 bp, Homo sapien
agctgggtgggtttttagtgtcact

SEQ ID NO: 3800320 - DNA, 25 bp, Homo sapien
ttagtgtcactctgggagactagga

SEQ ID NO: 3800321 - DNA, 25 bp, Homo sapien
gtgggtttttagtgtcactctggga

SEQ ID NO: 3800322 - DNA, 25 bp, Homo sapien
gagaggagcctaacagcaagtaatc

SEQ ID NO: 3800323 - DNA, 25 bp, Homo sapien
gccagcctgtcggaaatctcgtgga

SEQ ID NO: 3800324 - DNA, 25 bp, Homo sapien
tgtaacagctgagggcatagggtct

SEQ ID NO: 3800325 - DNA, 25 bp, Homo sapien
tcctggttcagggtttgtagccacc

SEQ ID NO: 3800326 - DNA, 25 bp, Homo sapien
ccttgagaggttgccaaatagaggg

SEQ ID NO: 3800327 - DNA, 25 bp, Homo sapien
ggagacacggaagtacagcagcgtt

SEQ ID NO: 3800328 - DNA, 25 bp, Homo sapien
cggaagtacagcagcgtttgtgatc

SEQ ID NO: 3800329 - DNA, 25 bp, Homo sapien
gttgccaaatagagggagacacgga

SEQ ID NO: 3800330 - DNA, 25 bp, Homo sapien
ccctgtgatgagttgaacagggtga

SEQ ID NO: 3800331 - DNA, 25 bp, Homo sapien
tccataggcacaagtgtttaggtaa

SEQ ID NO: 3800332 - DNA, 25 bp, Homo sapien
ctccctgtgatgagttgaacagggt

SEQ ID NO: 3800333 - DNA, 25 bp, Homo sapien
gcacaagtgtttaggtaagcgtcac

SEQ ID NO: 3800334 - DNA, 25 bp, Homo sapien
gctggttgagaagaatcgtacaaac

SEQ ID NO: 3800335 - DNA, 25 bp, Homo sapien
gtacaaactccatctaatgccgagg

SEQ ID NO: 3800336 - DNA, 25 bp, Homo sapien
tctaatgccgaggttgctgcgatgg

SEQ ID NO: 3800337 - DNA, 25 bp, Homo sapien
attgtacttcgggagctggttgaga

SEQ ID NO: 3800338 - DNA, 25 bp, Homo sapien
caattcggtactctttgatggaaac

SEQ ID NO: 3800339 - DNA, 25 bp, Homo sapien
agttacatacttcacacagcgcagc

SEQ ID NO: 3800340 - DNA, 25 bp, Homo sapien
gggaagttctcgtgatatgcatgta

SEQ ID NO: 3800341 - DNA, 25 bp, Homo sapien
ttccagaaatactccggctactggg

SEQ ID NO: 3800342 - DNA, 25 bp, Homo sapien
tctcttcctacatgggagccctggg

SEQ ID NO: 3800343 - DNA, 25 bp, Homo sapien
tgcatggatgttgcaggagcctccc

SEQ ID NO: 3800344 - DNA, 25 bp, Homo sapien
tcataatccttggaacctacgggta

SEQ ID NO: 3800345 - DNA, 25 bp, Homo sapien
tccctctacgtggaaggcagccatg

SEQ ID NO: 3800346 - DNA, 25 bp, Homo sapien
gacagatctcattttttcagatcta

SEQ ID NO: 3800347 - DNA, 25 bp, Homo sapien
taaagaacagagacagatctcattt

SEQ ID NO: 3800348 - DNA, 25 bp, Homo sapien
cattttttcagatctaacaggtacc

SEQ ID NO: 3800349 - DNA, 25 bp, Homo sapien
gaacagagacagatctcattttttc

SEQ ID NO: 3800350 - DNA, 25 bp, Homo sapien
ctgataatgcataaccttgtctgaa

SEQ ID NO: 3800351 - DNA, 25 bp, Homo sapien
gagagcacacgtgcatgattgcagc

SEQ ID NO: 3800352 - DNA, 25 bp, Homo sapien
aaaagagacgatgtgcccaaggaga

SEQ ID NO: 3800353 - DNA, 25 bp, Homo sapien
ctttggccctgagcacgatgctttt

SEQ ID NO: 3800354 - DNA, 25 bp, Homo sapien
tacgtgctggatgaacattggttcg

SEQ ID NO: 3800355 - DNA, 25 bp, Homo sapien
tggcttttacacttcctagggagac

SEQ ID NO: 3800356 - DNA, 25 bp, Homo sapien
gccaaagttgaacacacctgtctgt

SEQ ID NO: 3800357 - DNA, 25 bp, Homo sapien
taacacatccatcaatacgtgctgg

SEQ ID NO: 3800358 - DNA, 25 bp, Homo sapien
tttgggaaactctggaaagagctgc

SEQ ID NO: 3800359 - DNA, 25 bp, Homo sapien
aaatcgcagggaatgttgatcagac

SEQ ID NO: 3800360 - DNA, 25 bp, Homo sapien
caggacggttgagtctggaaatcgc

SEQ ID NO: 3800361 - DNA, 25 bp, Homo sapien
acagcacggtgatatcagggtttgg

SEQ ID NO: 3800362 - DNA, 25 bp, Homo sapien
aggagacccgagagtctgtccaggc

SEQ ID NO: 3800363 - DNA, 25 bp, Homo sapien
aaaacatctagtatggccttagcat

SEQ ID NO: 3800364 - DNA, 25 bp, Homo sapien
cagcgagtcttgaggaaaacatcta

SEQ ID NO: 3800365 - DNA, 25 bp, Homo sapien
ggtcatcattcatcccaggagaccc

SEQ ID NO: 3800366 - DNA, 25 bp, Homo sapien
ggcaatgacttaactcggaggcaac

SEQ ID NO: 3800367 - DNA, 25 bp, Homo sapien
taactcggaggcaactgcagagact

SEQ ID NO: 3800368 - DNA, 25 bp, Homo sapien
ctgcaggcaatgacttaactcggag

SEQ ID NO: 3800369 - DNA, 25 bp, Homo sapien
aactgcagagactgctgtatcaggg

SEQ ID NO: 3800370 - DNA, 25 bp, Homo sapien
cagggtgggcgtacagaaagcacga

SEQ ID NO: 3800371 - DNA, 25 bp, Homo sapien
gagacagggtgggcgtacagaaagc

SEQ ID NO: 3800372 - DNA, 25 bp, Homo sapien
ggtgggcgtacagaaagcacgacac

SEQ ID NO: 3800373 - DNA, 25 bp, Homo sapien
gacagggtgggcgtacagaaagcac

SEQ ID NO: 3800374 - DNA, 25 bp, Homo sapien
cctggtcacagtgcagcagggacga

SEQ ID NO: 3800375 - DNA, 25 bp, Homo sapien
gaagctggatggtcctggtcacagt

SEQ ID NO: 3800376 - DNA, 25 bp, Homo sapien
tgagaaaagcttggtgtggcaggat

SEQ ID NO: 3800377 - DNA, 25 bp, Homo sapien
gcagggacgaacagaagccagtgac

SEQ ID NO: 3800378 - DNA, 25 bp, Homo sapien
ggtgggaccagggagtgttaagcac

SEQ ID NO: 3800379 - DNA, 25 bp, Homo sapien
gtgggaccagggagtgttaagcacc

SEQ ID NO: 3800380 - DNA, 25 bp, Homo sapien
tggaagtagacacaccaagacgtgg

SEQ ID NO: 3800381 - DNA, 25 bp, Homo sapien
ccatgaaaatgtagggtcccaggtc

SEQ ID NO: 3800382 - DNA, 25 bp, Homo sapien
gataaagcattggtccctgtacgaa

SEQ ID NO: 3800383 - DNA, 25 bp, Homo sapien
cgaatgtctgcctcatggttggaag

SEQ ID NO: 3800384 - DNA, 25 bp, Homo sapien
gagtaggctcctgaactgccagtca

SEQ ID NO: 3800385 - DNA, 25 bp, Homo sapien
cgtgacccggtcatggagtaggctc

SEQ ID NO: 3800386 - DNA, 25 bp, Homo sapien
tgtagattgtattaaccagcccctt

SEQ ID NO: 3800387 - DNA, 25 bp, Homo sapien
gattatccacggcttcggtagtacg

SEQ ID NO: 3800388 - DNA, 25 bp, Homo sapien
ggtgaagccgacacaggtggtggag

SEQ ID NO: 3800389 - DNA, 25 bp, Homo sapien
gggtgaagccgacacaggtggtgga

SEQ ID NO: 3800390 - DNA, 25 bp, Homo sapien
tgggtgaagccgacacaggtggtgg

SEQ ID NO: 3800391 - DNA, 25 bp, Homo sapien
ctgggtgaagccgacacaggtggtg

SEQ ID NO: 3800392 - DNA, 25 bp, Homo sapien
ccacagccccaagagtaggttcctt

SEQ ID NO: 3800393 - DNA, 25 bp, Homo sapien
tttctccggtgacccagccctggag

SEQ ID NO: 3800394 - DNA, 25 bp, Homo sapien
ggaagtcagagaggtaaatagtccc

SEQ ID NO: 3800395 - DNA, 25 bp, Homo sapien
gctgtgtgcatttctccggtgaccc

SEQ ID NO: 3800396 - DNA, 25 bp, Homo sapien
gaataacctaagtgaagcaatacgg

SEQ ID NO: 3800397 - DNA, 25 bp, Homo sapien
tcaaggaggatatctcaaggaaaca

SEQ ID NO: 3800398 - DNA, 25 bp, Homo sapien
taatcgacaagtaatatgcagggag

SEQ ID NO: 3800399 - DNA, 25 bp, Homo sapien
taaagcaagcatgtatgaaaggacc

SEQ ID NO: 3800400 - DNA, 25 bp, Homo sapien
gaaagagtgtgttaactgtcaccag

SEQ ID NO: 3800401 - DNA, 25 bp, Homo sapien
gctagctacattgtctgcactttga

SEQ ID NO: 3800402 - DNA, 25 bp, Homo sapien
tgatgacaggcattacatgaggccc

SEQ ID NO: 3800403 - DNA, 25 bp, Homo sapien
aggcccctggatccctatgtcaaat

SEQ ID NO: 3800404 - DNA, 25 bp, Homo sapien
tctgagtcaaggatcgtcattttct

SEQ ID NO: 3800405 - DNA, 25 bp, Homo sapien
cagatgcacaaaaggaggcaatgat

SEQ ID NO: 3800406 - DNA, 25 bp, Homo sapien
agatggtatgtgtctgagtcaagga

SEQ ID NO: 3800407 - DNA, 25 bp, Homo sapien
cctgtgctctgaagacagattgacg

SEQ ID NO: 3800408 - DNA, 25 bp, Homo sapien
gagtaccagctctattccttcaggg

SEQ ID NO: 3800409 - DNA, 25 bp, Homo sapien
gaccctcctgtttgaagattacctg

SEQ ID NO: 3800410 - DNA, 25 bp, Homo sapien
ttagtgcatacatgagagtaccagc

SEQ ID NO: 3800411 - DNA, 25 bp, Homo sapien
caaccagattgtctttccttggagg

SEQ ID NO: 3800412 - DNA, 25 bp, Homo sapien
tccctctttcgatgagctcattggg

SEQ ID NO: 3800413 - DNA, 25 bp, Homo sapien
gctttattgccttcaactgcaatga

SEQ ID NO: 3800414 - DNA, 25 bp, Homo sapien
gccttcaactgcaatgaacttatct

SEQ ID NO: 3800415 - DNA, 25 bp, Homo sapien
agtgcccgtgaacaacgtccctctt

SEQ ID NO: 3800416 - DNA, 25 bp, Homo sapien
agtaactgtccgcagctctagctgc

SEQ ID NO: 3800417 - DNA, 25 bp, Homo sapien
tgcagcagtaactgtccgcagctct

SEQ ID NO: 3800418 - DNA, 25 bp, Homo sapien
agcagtaactgtccgcagctctagc

SEQ ID NO: 3800419 - DNA, 25 bp, Homo sapien
taactgtccgcagctctagctgctc

SEQ ID NO: 3800420 - DNA, 25 bp, Homo sapien
ttcagggggcagaagcttgtccaaa

SEQ ID NO: 3800421 - DNA, 25 bp, Homo sapien
cagatggttccagggggaggatttt

SEQ ID NO: 3800422 - DNA, 25 bp, Homo sapien
gttcagggggcagaagcttgtccaa

SEQ ID NO: 3800423 - DNA, 25 bp, Homo sapien
tgtccaaagagcagatggttccagg

SEQ ID NO: 3800424 - DNA, 25 bp, Homo sapien
cagctctgcaaagcctagaccagac

SEQ ID NO: 3800425 - DNA, 25 bp, Homo sapien
tctgcaaagcctagaccagaccctg

SEQ ID NO: 3800426 - DNA, 25 bp, Homo sapien
agcctagaccagaccctgattgcac

SEQ ID NO: 3800427 - DNA, 25 bp, Homo sapien
gaggcccagggatttcctcccagct

SEQ ID NO: 3800428 - DNA, 25 bp, Homo sapien
tcctgtcttggaaaacgtttctcag

SEQ ID NO: 3800429 - DNA, 25 bp, Homo sapien
gaaagaacggatgtagatggcccaa

SEQ ID NO: 3800430 - DNA, 25 bp, Homo sapien
ggcaacacactgagtacggtattca

SEQ ID NO: 3800431 - DNA, 25 bp, Homo sapien
gtgaaaggttgcaccagctcagcca

SEQ ID NO: 3800432 - DNA, 25 bp, Homo sapien
tattttgacaaggagccaagtaggc

SEQ ID NO: 3800433 - DNA, 25 bp, Homo sapien
cctttaaaatggagcgaatgatcct

SEQ ID NO: 3800434 - DNA, 25 bp, Homo sapien
tttccagcggaacgaacagctgtct

SEQ ID NO: 3800435 - DNA, 25 bp, Homo sapien
ggtcacgattcccaaaacgctaggc

SEQ ID NO: 3800436 - DNA, 25 bp, Homo sapien
ggaagccacttctctgataacagca

SEQ ID NO: 3800437 - DNA, 25 bp, Homo sapien
aagaacagagattgattttttacag

SEQ ID NO: 3800438 - DNA, 25 bp, Homo sapien
ttaaaggtccatctcccaacgctgt

SEQ ID NO: 3800439 - DNA, 25 bp, Homo sapien
ataacgcatggctattctttacggg

SEQ ID NO: 3800440 - DNA, 25 bp, Homo sapien
ggtgtgggcttggtttataagcagt

SEQ ID NO: 3800441 - DNA, 25 bp, Homo sapien
ctcacatacaggtgcactcttgttg

SEQ ID NO: 3800442 - DNA, 25 bp, Homo sapien
catacaggtgcactcttgttgcaca

SEQ ID NO: 3800443 - DNA, 25 bp, Homo sapien
cttggtttataagcagtccattcat

SEQ ID NO: 3800444 - DNA, 25 bp, Homo sapien
aatcttcataagagtctgtttctga

SEQ ID NO: 3800445 - DNA, 25 bp, Homo sapien
tctgtgagagccttatttgccgatg

SEQ ID NO: 3800446 - DNA, 25 bp, Homo sapien
tctcaggagctaatgtgggcatgta

SEQ ID NO: 3800447 - DNA, 25 bp, Homo sapien
ttccttcggctttgtgaaatcctgc

SEQ ID NO: 3800448 - DNA, 25 bp, Homo sapien
cgtccctggatatcacattgtgcat

SEQ ID NO: 3800449 - DNA, 25 bp, Homo sapien
tcgtggatctgacaccccagaatct

SEQ ID NO: 3800450 - DNA, 25 bp, Homo sapien
tgaatctgcatgtaattgtcctgga

SEQ ID NO: 3800451 - DNA, 25 bp, Homo sapien
gggacttggcagtagtgaatctgca

SEQ ID NO: 3800452 - DNA, 25 bp, Homo sapien
caccccgaatgagtaaaaggctcca

SEQ ID NO: 3800453 - DNA, 25 bp, Homo sapien
cgctgccaccccgaatgagtaaaag

SEQ ID NO: 3800454 - DNA, 25 bp, Homo sapien
ggctgctgcttatattgagctggga

SEQ ID NO: 3800455 - DNA, 25 bp, Homo sapien
ttatattgagctgggaagtccactc

SEQ ID NO: 3800456 - DNA, 25 bp, Homo sapien
aggccgccaccactgtgaacacagg

SEQ ID NO: 3800457 - DNA, 25 bp, Homo sapien
ggaggtgtctgtgaccccttccttg

SEQ ID NO: 3800458 - DNA, 25 bp, Homo sapien
tcttcttgtctgccatccaggccgc

SEQ ID NO: 3800459 - DNA, 25 bp, Homo sapien
ttagcactgagcatgcctcttcttg

SEQ ID NO: 3800460 - DNA, 25 bp, Homo sapien
tcagtgggacccccagagtctgtga

SEQ ID NO: 3800461 - DNA, 25 bp, Homo sapien
cagagtctgtgagttcggggacgtc

SEQ ID NO: 3800462 - DNA, 25 bp, Homo sapien
ccccagagtctgtgagttcggggac

SEQ ID NO: 3800463 - DNA, 25 bp, Homo sapien
gacccccagagtctgtgagttcggg

SEQ ID NO: 3800464 - DNA, 25 bp, Homo sapien
tgacaacacgattctgattccacat

SEQ ID NO: 3800465 - DNA, 25 bp, Homo sapien
agtactccagacgtcgttttctgca

SEQ ID NO: 3800466 - DNA, 25 bp, Homo sapien
gacgtcgttttctgcagtctgcatt

SEQ ID NO: 3800467 - DNA, 25 bp, Homo sapien
ctgcattgccaacaagatgacaaca

SEQ ID NO: 3800468 - DNA, 25 bp, Homo sapien
tccctgtgttcctcgaggcttgcac

SEQ ID NO: 3800469 - DNA, 25 bp, Homo sapien
tcctgattcatggtgtcctgtgttc

SEQ ID NO: 3800470 - DNA, 25 bp, Homo sapien
agtcctgattcatggtgtcctgtgt

SEQ ID NO: 3800471 - DNA, 25 bp, Homo sapien
cgaggcttgcacttggattgtgatt

SEQ ID NO: 3800472 - DNA, 25 bp, Homo sapien
cagctccagtgtcccttttcttctc

SEQ ID NO: 3800473 - DNA, 25 bp, Homo sapien
ggcagccactctggcgacctcagag

SEQ ID NO: 3800474 - DNA, 25 bp, Homo sapien
ctggcagccactctggcgacctcag

SEQ ID NO: 3800475 - DNA, 25 bp, Homo sapien
gagcccttttgctgcgcagctccag

SEQ ID NO: 3800476 - DNA, 25 bp, Homo sapien
tagaagtaagatgtggaaagttgtt

SEQ ID NO: 3800477 - DNA, 25 bp, Homo sapien
ggaaagttgttgacatcatttaaca

SEQ ID NO: 3800478 - DNA, 25 bp, Homo sapien
gattctagtttgtgaagataaacgt

SEQ ID NO: 3800479 - DNA, 25 bp, Homo sapien
aattttagaagtaagatgtggaaag

SEQ ID NO: 3800480 - DNA, 25 bp, Homo sapien
ggtacaaacaggatccatgtggaat

SEQ ID NO: 3800481 - DNA, 25 bp, Homo sapien
catgtggaatatcgatgcccaggat

SEQ ID NO: 3800482 - DNA, 25 bp, Homo sapien
ttccccggtgtgaatacaagaggta

SEQ ID NO: 3800483 - DNA, 25 bp, Homo sapien
tacaagaggtacaaacaggatccat

SEQ ID NO: 3800484 - DNA, 25 bp, Homo sapien
agcaggggatgcctagttacagtcc

SEQ ID NO: 3800485 - DNA, 25 bp, Homo sapien
caggggatgcctagttacagtccag

SEQ ID NO: 3800486 - DNA, 25 bp, Homo sapien
gcaggggatgcctagttacagtcca

SEQ ID NO: 3800487 - DNA, 25 bp, Homo sapien
aggggatgcctagttacagtccagg

SEQ ID NO: 3800488 - DNA, 25 bp, Homo sapien
actatgtctccatcagggcaaagcc

SEQ ID NO: 3800489 - DNA, 25 bp, Homo sapien
tacaaaatgatctgtcactatgtct

SEQ ID NO: 3800490 - DNA, 25 bp, Homo sapien
ctacgtagtacaaaatgatctgtca

SEQ ID NO: 3800491 - DNA, 25 bp, Homo sapien
ctatgtctccatcagggcaaagcca

SEQ ID NO: 3800492 - DNA, 25 bp, Homo sapien
cttgggatctgaatgctcttgtgtt

SEQ ID NO: 3800493 - DNA, 25 bp, Homo sapien
gagcaaccatggagccaaaatgact

SEQ ID NO: 3800494 - DNA, 25 bp, Homo sapien
atgctcttgtgttctgctcccacct

SEQ ID NO: 3800495 - DNA, 25 bp, Homo sapien
gaatgctgtcgctcatagcagacca

SEQ ID NO: 3800496 - DNA, 25 bp, Homo sapien
gatgcttgaggtcgtgatgatgctc

SEQ ID NO: 3800497 - DNA, 25 bp, Homo sapien
ccagtgtgtttgcatagatgcttga

SEQ ID NO: 3800498 - DNA, 25 bp, Homo sapien
tttgcatagatgcttgaggtcgtga

SEQ ID NO: 3800499 - DNA, 25 bp, Homo sapien
gtccagtgtgtttgcatagatgctt

SEQ ID NO: 3800500 - DNA, 25 bp, Homo sapien
ctcagattttccagcaggtcgcgtg

SEQ ID NO: 3800501 - DNA, 25 bp, Homo sapien
tatgagcccggtgaaatcatccagg

SEQ ID NO: 3800502 - DNA, 25 bp, Homo sapien
cagtaacctgggagcaatcagccaa

SEQ ID NO: 3800503 - DNA, 25 bp, Homo sapien
taaaaagggagttctatgcgtgcaa

SEQ ID NO: 3800504 - DNA, 25 bp, Homo sapien
tcagtagagtgcgtctaagaatggg

SEQ ID NO: 3800505 - DNA, 25 bp, Homo sapien
cagtagagtgcgtctaagaatggga

SEQ ID NO: 3800506 - DNA, 25 bp, Homo sapien
tgatatttgaattttggggaccatt

SEQ ID NO: 3800507 - DNA, 25 bp, Homo sapien
ttaactttcgcacatccattgccca

SEQ ID NO: 3800508 - DNA, 25 bp, Homo sapien
catccattgcccagtaactgcattt

SEQ ID NO: 3800509 - DNA, 25 bp, Homo sapien
tcgcacatccattgcccagtaactg

SEQ ID NO: 3800510 - DNA, 25 bp, Homo sapien
tgaacccaggcggtggagaatccag

SEQ ID NO: 3800511 - DNA, 25 bp, Homo sapien
acccaggcggtggagaatccagtga

SEQ ID NO: 3800512 - DNA, 25 bp, Homo sapien
ttgaacccaggcggtggagaatcca

SEQ ID NO: 3800513 - DNA, 25 bp, Homo sapien
ggcggtggagaatccagtgagccaa

SEQ ID NO: 3800514 - DNA, 25 bp, Homo sapien
gccatcattgtctttgtgtacagcc

SEQ ID NO: 3800515 - DNA, 25 bp, Homo sapien
gtggataacttgagggaagcccaga

SEQ ID NO: 3800516 - DNA, 25 bp, Homo sapien
gatgtcagtattgaggtggataact

SEQ ID NO: 3800517 - DNA, 25 bp, Homo sapien
tatcaagacgttccatttgaaggaa

SEQ ID NO: 3800518 - DNA, 25 bp, Homo sapien
gatgatggtggcaaaattagcaaga

SEQ ID NO: 3800519 - DNA, 25 bp, Homo sapien
agggatgatggtggcaaaattagca

SEQ ID NO: 3800520 - DNA, 25 bp, Homo sapien
ggatgatggtggcaaaattagcaag

SEQ ID NO: 3800521 - DNA, 25 bp, Homo sapien
ctagggatgatggtggcaaaattag

SEQ ID NO: 3800522 - DNA, 25 bp, Homo sapien
ctggcccaagagtagttggtgatgg

SEQ ID NO: 3800523 - DNA, 25 bp, Homo sapien
gatgttgtagacgtggaatgatgca

SEQ ID NO: 3800524 - DNA, 25 bp, Homo sapien
caggatgacacatgatcttaagatc

SEQ ID NO: 3800525 - DNA, 25 bp, Homo sapien
ggctgtctacatgcacaggatgaca

SEQ ID NO: 3800526 - DNA, 25 bp, Homo sapien
cccggggtcctgactctattagcat

SEQ ID NO: 3800527 - DNA, 25 bp, Homo sapien
ttgcactcattgacaattccccggg

SEQ ID NO: 3800528 - DNA, 25 bp, Homo sapien
tccattgcactcattgacaattccc

SEQ ID NO: 3800529 - DNA, 25 bp, Homo sapien
tgctgcttccattgcactcattgac

SEQ ID NO: 3800530 - DNA, 25 bp, Homo sapien
tgaggtcattcacgcagggtttccc

SEQ ID NO: 3800531 - DNA, 25 bp, Homo sapien
catgtggaccatgggcagagcaagt

SEQ ID NO: 3800532 - DNA, 25 bp, Homo sapien
gagcaagtgtgagagtcctaggaca

SEQ ID NO: 3800533 - DNA, 25 bp, Homo sapien
gagtatgagttaactgggccacgaa

SEQ ID NO: 3800534 - DNA, 25 bp, Homo sapien
aagtgaaggccagaaactcgctcgc

SEQ ID NO: 3800535 - DNA, 25 bp, Homo sapien
tgttctgtgtgaagtcgcgcggctt

SEQ ID NO: 3800536 - DNA, 25 bp, Homo sapien
ttcaggtgtgcgctccgccagtcgg

SEQ ID NO: 3800537 - DNA, 25 bp, Homo sapien
cacccacgcagtgttctaagtgaag

SEQ ID NO: 3800538 - DNA, 25 bp, Homo sapien
tgctctaataatctgtgtcaagaac

SEQ ID NO: 3800539 - DNA, 25 bp, Homo sapien
ctctaataatctgtgtcaagaactg

SEQ ID NO: 3800540 - DNA, 25 bp, Homo sapien
gctctaataatctgtgtcaagaact

SEQ ID NO: 3800541 - DNA, 25 bp, Homo sapien
tctaataatctgtgtcaagaactgc

SEQ ID NO: 3800542 - DNA, 25 bp, Homo sapien
gagaactcatggaatcggtccccag

SEQ ID NO: 3800543 - DNA, 25 bp, Homo sapien
tgtgcactgaagctcacaccgcaga

SEQ ID NO: 3800544 - DNA, 25 bp, Homo sapien
gctgcaaagcggtgatgtcacccaa

SEQ ID NO: 3800545 - DNA, 25 bp, Homo sapien
ccagggctcagacgaggcagtagct

SEQ ID NO: 3800546 - DNA, 25 bp, Homo sapien
tggcggcactcagcgtttgaagaca

SEQ ID NO: 3800547 - DNA, 25 bp, Homo sapien
cggctggcggcactcagcgtttgaa

SEQ ID NO: 3800548 - DNA, 25 bp, Homo sapien
gagtcagcggctggcggcactcagc

SEQ ID NO: 3800549 - DNA, 25 bp, Homo sapien
cagcggctggcggcactcagcgttt

SEQ ID NO: 3800550 - DNA, 25 bp, Homo sapien
ccaaatcttgttttccgcataaact

SEQ ID NO: 3800551 - DNA, 25 bp, Homo sapien
caaatcttgttttccgcataaactc

SEQ ID NO: 3800552 - DNA, 25 bp, Homo sapien
gttttccgcataaactcccatccat

SEQ ID NO: 3800553 - DNA, 25 bp, Homo sapien
tcttgttttccgcataaactcccat

SEQ ID NO: 3800554 - DNA, 25 bp, Homo sapien
ggcaataccaaagggcttagagtcc

SEQ ID NO: 3800555 - DNA, 25 bp, Homo sapien
ttggcaataccaaagggcttagagt

SEQ ID NO: 3800556 - DNA, 25 bp, Homo sapien
ccaaagggcttagagtccccgctat

SEQ ID NO: 3800557 - DNA, 25 bp, Homo sapien
agggcttagagtccccgctatactc

SEQ ID NO: 3800558 - DNA, 25 bp, Homo sapien
ttccagacatagttcttttaacaag

SEQ ID NO: 3800559 - DNA, 25 bp, Homo sapien
ccactgtttccatgggcccaagtta

SEQ ID NO: 3800560 - DNA, 25 bp, Homo sapien
ctgtttccatgggcccaagttacct

SEQ ID NO: 3800561 - DNA, 25 bp, Homo sapien
catgccactgtttccatgggcccaa

SEQ ID NO: 3800562 - DNA, 25 bp, Homo sapien
tctgtttcatctagggcataaacac

SEQ ID NO: 3800563 - DNA, 25 bp, Homo sapien
ggaagattgcatcagaatttggcat

SEQ ID NO: 3800564 - DNA, 25 bp, Homo sapien
tgacttttcattagtttattgaggg

SEQ ID NO: 3800565 - DNA, 25 bp, Homo sapien
gattgcatcagaatttggcatgaac

SEQ ID NO: 3800566 - DNA, 25 bp, Homo sapien
cagattctgtgtccaatcgccttag

SEQ ID NO: 3800567 - DNA, 25 bp, Homo sapien
tagccaggacaggggcaaaataggg

SEQ ID NO: 3800568 - DNA, 25 bp, Homo sapien
gccaggacaggggcaaaatagggag

SEQ ID NO: 3800569 - DNA, 25 bp, Homo sapien
caggacaggggcaaaatagggagat

SEQ ID NO: 3800570 - DNA, 25 bp, Homo sapien
cttagccaggacaggggcaaaatag

SEQ ID NO: 3800571 - DNA, 25 bp, Homo sapien
ctggcctccaaatgtgcatagggac

SEQ ID NO: 3800572 - DNA, 25 bp, Homo sapien
aattcaaggttacaacagaggacca

SEQ ID NO: 3800573 - DNA, 25 bp, Homo sapien
ggtcagcagacccaacaggacttgg

SEQ ID NO: 3800574 - DNA, 25 bp, Homo sapien
gatagtcatggtgtcttcagaggcc

SEQ ID NO: 3800575 - DNA, 25 bp, Homo sapien
cacaggagggaacaccgcggcgccg

SEQ ID NO: 3800576 - DNA, 25 bp, Homo sapien
cgctcccggatctggcgcagcgcaa

SEQ ID NO: 3800577 - DNA, 25 bp, Homo sapien
cccgcagcgttttctgcgctccaca

SEQ ID NO: 3800578 - DNA, 25 bp, Homo sapien
cgcctctgcgctcccggatctggcg

SEQ ID NO: 3800579 - DNA, 25 bp, Homo sapien
tcaccagctcgccaagtgcgctgaa

SEQ ID NO: 3800580 - DNA, 25 bp, Homo sapien
gaatcgggctggcagcgcctagcct

SEQ ID NO: 3800581 - DNA, 25 bp, Homo sapien
ctctgcggccgcctctcgaggcgcg

SEQ ID NO: 3800582 - DNA, 25 bp, Homo sapien
ccaagtgcgctgaagagagcgaagc

SEQ ID NO: 3800583 - DNA, 25 bp, Homo sapien
tagccccggcagaagtccggcgtgg

SEQ ID NO: 3800584 - DNA, 25 bp, Homo sapien
aggaagcaaccgaggagcagccgaa

SEQ ID NO: 3800585 - DNA, 25 bp, Homo sapien
gcccagttgcgccagctgcccgtgt

SEQ ID NO: 3800586 - DNA, 25 bp, Homo sapien
cacacgcgggcgcacagctcggtga

SEQ ID NO: 3800587 - DNA, 25 bp, Homo sapien
tcttaaacgtgcagcagaaccggaa

SEQ ID NO: 3800588 - DNA, 25 bp, Homo sapien
caagtcccgcagcagaagatgaagt

SEQ ID NO: 3800589 - DNA, 25 bp, Homo sapien
tgaagtcgcccgagctgcagttgaa

SEQ ID NO: 3800590 - DNA, 25 bp, Homo sapien
ccagcttggtgaagatgcccacgag

SEQ ID NO: 3800591 - DNA, 25 bp, Homo sapien
agaagaaagtagctgcaacccgctc

SEQ ID NO: 3800592 - DNA, 25 bp, Homo sapien
aagtagctgcaacccgctcagctgt

SEQ ID NO: 3800593 - DNA, 25 bp, Homo sapien
agctgcaacccgctcagctgtgttc

SEQ ID NO: 3800594 - DNA, 25 bp, Homo sapien
aagaaagtagctgcaacccgctcag

SEQ ID NO: 3800595 - DNA, 25 bp, Homo sapien
cagagtacgactgtgtctcgaagga

SEQ ID NO: 3800596 - DNA, 25 bp, Homo sapien
ggaagcaactaagcctggtcaggga

SEQ ID NO: 3800597 - DNA, 25 bp, Homo sapien
cagtgcaacagctccaagatgggaa

SEQ ID NO: 3800598 - DNA, 25 bp, Homo sapien
caattgtggtccctgtgtgtcttac

SEQ ID NO: 3800599 - DNA, 25 bp, Homo sapien
gattgcccttctaatgtgagtgagc

SEQ ID NO: 3800600 - DNA, 25 bp, Homo sapien
gaatttggcgtttgtttgcggcaca

SEQ ID NO: 3800601 - DNA, 25 bp, Homo sapien
tccgagtgacaagaccctaagcgta

SEQ ID NO: 3800602 - DNA, 25 bp, Homo sapien
agagagaattctcctgcctgtcggc

SEQ ID NO: 3800603 - DNA, 25 bp, Homo sapien
ctttttcacttgtaaacaggctctt

SEQ ID NO: 3800604 - DNA, 25 bp, Homo sapien
aggctcttcatgctgagcttcaggg

SEQ ID NO: 3800605 - DNA, 25 bp, Homo sapien
gagcttcaggggatcgctgaatcct

SEQ ID NO: 3800606 - DNA, 25 bp, Homo sapien
taaacaggctcttcatgctgagctt

SEQ ID NO: 3800607 - DNA, 25 bp, Homo sapien
tccttgcaacctccgtgcaataagc

SEQ ID NO: 3800608 - DNA, 25 bp, Homo sapien
gaggagatgcaatcctgaacgtctt

SEQ ID NO: 3800609 - DNA, 25 bp, Homo sapien
tgaaatcaaagtttgggctccttgc

SEQ ID NO: 3800610 - DNA, 25 bp, Homo sapien
gtgcaataagcagggtctgaaactc

SEQ ID NO: 3800611 - DNA, 25 bp, Homo sapien
ccatgcactatataaggccctgaag

SEQ ID NO: 3800612 - DNA, 25 bp, Homo sapien
gccatgcactatataaggccctgaa

SEQ ID NO: 3800613 - DNA, 25 bp, Homo sapien
ccctgaagatacagcagtgcccaag

SEQ ID NO: 3800614 - DNA, 25 bp, Homo sapien
gacaacgatgtttaggtctctctcc

SEQ ID NO: 3800615 - DNA, 25 bp, Homo sapien
tccatgtgatcagtgttgcagtggc

SEQ ID NO: 3800616 - DNA, 25 bp, Homo sapien
catgttctcataatgctggacgtgg

SEQ ID NO: 3800617 - DNA, 25 bp, Homo sapien
tgtgatcagtgttgcagtggccctg

SEQ ID NO: 3800618 - DNA, 25 bp, Homo sapien
catgggactggaaatggttcatgca

SEQ ID NO: 3800619 - DNA, 25 bp, Homo sapien
caccccatgggactggaaatggttc

SEQ ID NO: 3800620 - DNA, 25 bp, Homo sapien
gtcaccccatgggactggaaatggt

SEQ ID NO: 3800621 - DNA, 25 bp, Homo sapien
ccccatgggactggaaatggttcat

SEQ ID NO: 3800622 - DNA, 25 bp, Homo sapien
catggccgacctggcattcttattt

SEQ ID NO: 3800623 - DNA, 25 bp, Homo sapien
tgaaatttcggtcctcccatggccg

SEQ ID NO: 3800624 - DNA, 25 bp, Homo sapien
tttccaaccaaaagcagtgtggtcc

SEQ ID NO: 3800625 - DNA, 25 bp, Homo sapien
tcttctccctgtatgcaatttgtac

SEQ ID NO: 3800626 - DNA, 25 bp, Homo sapien
cgtcatcccaagaacccaacgaagc

SEQ ID NO: 3800627 - DNA, 25 bp, Homo sapien
ccgtcatcccaagaacccaacgaag

SEQ ID NO: 3800628 - DNA, 25 bp, Homo sapien
aaatgctagaatcacactctggaga

SEQ ID NO: 3800629 - DNA, 25 bp, Homo sapien
tcacactctggagaagctcgtggga

SEQ ID NO: 3800630 - DNA, 25 bp, Homo sapien
cactctggagaagctcgtgggaagt

SEQ ID NO: 3800631 - DNA, 25 bp, Homo sapien
taaatgctagaatcacactctggag

SEQ ID NO: 3800632 - DNA, 25 bp, Homo sapien
ccctctcagtgcaagctcatttgta

SEQ ID NO: 3800633 - DNA, 25 bp, Homo sapien
catttgtaccaacttctgaaggttc

SEQ ID NO: 3800634 - DNA, 25 bp, Homo sapien
tgcaagtgtcagtgttccaggaact

SEQ ID NO: 3800635 - DNA, 25 bp, Homo sapien
ttttagccacaactgactctcagcc

SEQ ID NO: 3800636 - DNA, 25 bp, Homo sapien
ggtcagtgaaatacagtccatgggc

SEQ ID NO: 3800637 - DNA, 25 bp, Homo sapien
gtgcaccctgcaaagttgacaatat

SEQ ID NO: 3800638 - DNA, 25 bp, Homo sapien
tgcccaagggaaacgtaacgagagc

SEQ ID NO: 3800639 - DNA, 25 bp, Homo sapien
ccaatatgagtactggctgctaaca

SEQ ID NO: 3800640 - DNA, 25 bp, Homo sapien
tcttcaaatgccatattgacatgca

SEQ ID NO: 3800641 - DNA, 25 bp, Homo sapien
tcaaatgccatattgacatgcatat

SEQ ID NO: 3800642 - DNA, 25 bp, Homo sapien
ctgcagaataccaagtagcatcttc

SEQ ID NO: 3800643 - DNA, 25 bp, Homo sapien
taccaagtagcatcttcaaatgcca

SEQ ID NO: 3800644 - DNA, 25 bp, Homo sapien
ccttccagggtagaccagttgcaca

SEQ ID NO: 3800645 - DNA, 25 bp, Homo sapien
cttccagggtagaccagttgcacag

SEQ ID NO: 3800646 - DNA, 25 bp, Homo sapien
tagtgactgtggaacaacagatgaa

SEQ ID NO: 3800647 - DNA, 25 bp, Homo sapien
aaagcctattgcaaatataagacag

SEQ ID NO: 3800648 - DNA, 25 bp, Homo sapien
cagagtactgccatttactagatac

SEQ ID NO: 3800649 - DNA, 25 bp, Homo sapien
tcccagctgacctcatgtagtgact

SEQ ID NO: 3800650 - DNA, 25 bp, Homo sapien
gatctttcctactgaagctaaccag

SEQ ID NO: 3800651 - DNA, 25 bp, Homo sapien
gattccatcagaggtttctacagag

SEQ ID NO: 3800652 - DNA, 25 bp, Homo sapien
tggataccccagaggaagcacctag

SEQ ID NO: 3800653 - DNA, 25 bp, Homo sapien
caaagtcatagccttccctagcttt

SEQ ID NO: 3800654 - DNA, 25 bp, Homo sapien
tggttatctctctccgccctggttt

SEQ ID NO: 3800655 - DNA, 25 bp, Homo sapien
tgacccctatagagggaagcccgtg

SEQ ID NO: 3800656 - DNA, 25 bp, Homo sapien
tctgagctctgttttttctcgagtc

SEQ ID NO: 3800657 - DNA, 25 bp, Homo sapien
gcccgtgtctcaagtctgagctctg

SEQ ID NO: 3800658 - DNA, 25 bp, Homo sapien
aggcccgaggttctggccacttggt

SEQ ID NO: 3800659 - DNA, 25 bp, Homo sapien
caggcccgaggttctggccacttgg

SEQ ID NO: 3800660 - DNA, 25 bp, Homo sapien
gcccgaggttctggccacttggttc

SEQ ID NO: 3800661 - DNA, 25 bp, Homo sapien
cccgaggttctggccacttggttct

SEQ ID NO: 3800662 - DNA, 25 bp, Homo sapien
gttgggtagcaacagacaccccaca

SEQ ID NO: 3800663 - DNA, 25 bp, Homo sapien
atatttgcaaggttcacacatacag

SEQ ID NO: 3800664 - DNA, 25 bp, Homo sapien
gaactttccataaacagaaccacac

SEQ ID NO: 3800665 - DNA, 25 bp, Homo sapien
tttccaggaaagtttgcagatgacc

SEQ ID NO: 3800666 - DNA, 25 bp, Homo sapien
cacccctacaacaatgatgatggca

SEQ ID NO: 3800667 - DNA, 25 bp, Homo sapien
tacgatatgtcgttcctacagcccc

SEQ ID NO: 3800668 - DNA, 25 bp, Homo sapien
gtcataaaattaatctggtacgata

SEQ ID NO: 3800669 - DNA, 25 bp, Homo sapien
ctttgatgaattgcaccaaagatcc

SEQ ID NO: 3800670 - DNA, 25 bp, Homo sapien
taaactactggagtggctgcgtgct

SEQ ID NO: 3800671 - DNA, 25 bp, Homo sapien
gcagaggacctgtggtaaactactg

SEQ ID NO: 3800672 - DNA, 25 bp, Homo sapien
ccagtaaggctgtgaaaggataaac

SEQ ID NO: 3800673 - DNA, 25 bp, Homo sapien
catgatgctgagctggctagactgc

SEQ ID NO: 3800674 - DNA, 25 bp, Homo sapien
ctggaaatgtcacagtgcctgttgt

SEQ ID NO: 3800675 - DNA, 25 bp, Homo sapien
agaggcactgggaatttgatctgga

SEQ ID NO: 3800676 - DNA, 25 bp, Homo sapien
atgtcacagtgcctgttgtggtcca

SEQ ID NO: 3800677 - DNA, 25 bp, Homo sapien
gaggcactgggaatttgatctggaa

SEQ ID NO: 3800678 - DNA, 25 bp, Homo sapien
gcagaggacaacacaggatttaggt

SEQ ID NO: 3800679 - DNA, 25 bp, Homo sapien
ggccaagggtcagcactctgagcta

SEQ ID NO: 3800680 - DNA, 25 bp, Homo sapien
ggatttaggtaagagtgaatggtct

SEQ ID NO: 3800681 - DNA, 25 bp, Homo sapien
gaaagccaagtccagaacgttctct

SEQ ID NO: 3800682 - DNA, 25 bp, Homo sapien
caggccatgaaactctaggtagtta

SEQ ID NO: 3800683 - DNA, 25 bp, Homo sapien
ggctataccccaaaagacccagata

SEQ ID NO: 3800684 - DNA, 25 bp, Homo sapien
taaatgttgactctgatcaaggagg

SEQ ID NO: 3800685 - DNA, 25 bp, Homo sapien
ttcccgcagccaaagtctctgagct

SEQ ID NO: 3800686 - DNA, 25 bp, Homo sapien
ttgagattcagccatgttttgtgtg

SEQ ID NO: 3800687 - DNA, 25 bp, Homo sapien
tcattctcccattgatagacattgg

SEQ ID NO: 3800688 - DNA, 25 bp, Homo sapien
tattgccgagaattattccattgtg

SEQ ID NO: 3800689 - DNA, 25 bp, Homo sapien
gagcttctatgaatattagtgcaga

SEQ ID NO: 3800690 - DNA, 25 bp, Homo sapien
tccagatggtcttattgggaatttt

SEQ ID NO: 3800691 - DNA, 25 bp, Homo sapien
ccagatggtcttattgggaattttc

SEQ ID NO: 3800692 - DNA, 25 bp, Homo sapien
ttccagatggtcttattgggaattt

SEQ ID NO: 3800693 - DNA, 25 bp, Homo sapien
tttccagatggtcttattgggaatt

SEQ ID NO: 3800694 - DNA, 25 bp, Homo sapien
aagggcattacatgctcagcagccc

SEQ ID NO: 3800695 - DNA, 25 bp, Homo sapien
tatgctttctggatcgggggcgccc

SEQ ID NO: 3800696 - DNA, 25 bp, Homo sapien
ctgctagcgggcctatagcaccgag

SEQ ID NO: 3800697 - DNA, 25 bp, Homo sapien
agcaccgaggcccattcctttagct

SEQ ID NO: 3800698 - DNA, 25 bp, Homo sapien
tcccttacattgggcttggagtgga

SEQ ID NO: 3800699 - DNA, 25 bp, Homo sapien
ctctcctcgaaagatgacacttttc

SEQ ID NO: 3800700 - DNA, 25 bp, Homo sapien
acattgggcttggagtggaagacta

SEQ ID NO: 3800701 - DNA, 25 bp, Homo sapien
ccttacattgggcttggagtggaag

SEQ ID NO: 3800702 - DNA, 25 bp, Homo sapien
tagagaatttcatcccagtctgctc

SEQ ID NO: 3800703 - DNA, 25 bp, Homo sapien
agaacagaggaaaccggcaccttgg

SEQ ID NO: 3800704 - DNA, 25 bp, Homo sapien
gaatactggttacctcgcctgtcaa

SEQ ID NO: 3800705 - DNA, 25 bp, Homo sapien
tgggatttagtggagccacctgcac

SEQ ID NO: 3800706 - DNA, 25 bp, Homo sapien
ctagtaggtcttgcctgtagccgta

SEQ ID NO: 3800707 - DNA, 25 bp, Homo sapien
caagccctgcttttccggtatacca

SEQ ID NO: 3800708 - DNA, 25 bp, Homo sapien
ctatgtttaacgaggattggcttcc

SEQ ID NO: 3800709 - DNA, 25 bp, Homo sapien
gagacaggagcattgggaccacaag

SEQ ID NO: 3800710 - DNA, 25 bp, Homo sapien
ctactctgcgaaaactgcaggtaca

SEQ ID NO: 3800711 - DNA, 25 bp, Homo sapien
gcagtccttgatctactctgcgaaa

SEQ ID NO: 3800712 - DNA, 25 bp, Homo sapien
tactctgcgaaaactgcaggtacaa

SEQ ID NO: 3800713 - DNA, 25 bp, Homo sapien
tgcagtccttgatctactctgcgaa

SEQ ID NO: 3800714 - DNA, 25 bp, Homo sapien
aaatcagtaactctactctgccaag

SEQ ID NO: 3800715 - DNA, 25 bp, Homo sapien
aaaatcagtaactctactctgccaa

SEQ ID NO: 3800716 - DNA, 25 bp, Homo sapien
gccaaattagtcaggggcaaaagga

SEQ ID NO: 3800717 - DNA, 25 bp, Homo sapien
atcagtaactctactctgccaagcc

SEQ ID NO: 3800718 - DNA, 25 bp, Homo sapien
gattcagaaaacctgtgaaagccat

SEQ ID NO: 3800719 - DNA, 25 bp, Homo sapien
gggattcagaaaacctgtgaaagcc

SEQ ID NO: 3800720 - DNA, 25 bp, Homo sapien
ttgttgggattcagaaaacctgtga

SEQ ID NO: 3800721 - DNA, 25 bp, Homo sapien
ttgggattcagaaaacctgtgaaag

SEQ ID NO: 3800722 - DNA, 25 bp, Homo sapien
gagaagcggagttctctcattcaca

SEQ ID NO: 3800723 - DNA, 25 bp, Homo sapien
cagagaagcggagttctctcattca

SEQ ID NO: 3800724 - DNA, 25 bp, Homo sapien
agaagcggagttctctcattcacat

SEQ ID NO: 3800725 - DNA, 25 bp, Homo sapien
tgcagagaagcggagttctctcatt

SEQ ID NO: 3800726 - DNA, 25 bp, Homo sapien
ccaggggcagggaatcatttagtcc

SEQ ID NO: 3800727 - DNA, 25 bp, Homo sapien
ctggaaccaggggcagggaatcatt

SEQ ID NO: 3800728 - DNA, 25 bp, Homo sapien
gcagggaatcatttagtccccgggc

SEQ ID NO: 3800729 - DNA, 25 bp, Homo sapien
cagggaatcatttagtccccgggca

SEQ ID NO: 3800730 - DNA, 25 bp, Homo sapien
cactgaagccttccaaagcgactga

SEQ ID NO: 3800731 - DNA, 25 bp, Homo sapien
tccactaggagactgatgggcactg

SEQ ID NO: 3800732 - DNA, 25 bp, Homo sapien
ctttgacactttgaggacactggtg

SEQ ID NO: 3800733 - DNA, 25 bp, Homo sapien
tgcattgggtactggctttatttcc

SEQ ID NO: 3800734 - DNA, 25 bp, Homo sapien
gacaacttggattcaaaagaccctc

SEQ ID NO: 3800735 - DNA, 25 bp, Homo sapien
cgtactcaggatcccttggcttcgg

SEQ ID NO: 3800736 - DNA, 25 bp, Homo sapien
gcaggaggtgcaccaggacaacttg

SEQ ID NO: 3800737 - DNA, 25 bp, Homo sapien
ttcaaggcatgatgacgtactcagg

SEQ ID NO: 3800738 - DNA, 25 bp, Homo sapien
tgtgtatcagccctccttatccaag

SEQ ID NO: 3800739 - DNA, 25 bp, Homo sapien
ccaacttggaatcaaaaatagttga

SEQ ID NO: 3800740 - DNA, 25 bp, Homo sapien
aaaatagttgagaaggggccaggcg

SEQ ID NO: 3800741 - DNA, 25 bp, Homo sapien
cttatccaagggttcaaccaacttg

SEQ ID NO: 3800742 - DNA, 25 bp, Homo sapien
tccttaaggaggaatctttggacat

SEQ ID NO: 3800743 - DNA, 25 bp, Homo sapien
agcctgcagttgctccttaaggagg

SEQ ID NO: 3800744 - DNA, 25 bp, Homo sapien
caatttcatctgactcaactctgag

SEQ ID NO: 3800745 - DNA, 25 bp, Homo sapien
tctgactcaactctgagttccgttc

SEQ ID NO: 3800746 - DNA, 25 bp, Homo sapien
aaacacctgtgtccctggctttctt

SEQ ID NO: 3800747 - DNA, 25 bp, Homo sapien
ttcttgtggctctgcaaacacctgt

SEQ ID NO: 3800748 - DNA, 25 bp, Homo sapien
ctgagattcttgtggctctgcaaac

SEQ ID NO: 3800749 - DNA, 25 bp, Homo sapien
caaacacctgtgtccctggctttct

SEQ ID NO: 3800750 - DNA, 25 bp, Homo sapien
tggcccccttagacaaccgtatgag

SEQ ID NO: 3800751 - DNA, 25 bp, Homo sapien
ctggcccccttagacaaccgtatga

SEQ ID NO: 3800752 - DNA, 25 bp, Homo sapien
ccccttagacaaccgtatgagggca

SEQ ID NO: 3800753 - DNA, 25 bp, Homo sapien
ttagacaaccgtatgagggcattag

SEQ ID NO: 3800754 - DNA, 25 bp, Homo sapien
caggaatgggaggcttggcagaatg

SEQ ID NO: 3800755 - DNA, 25 bp, Homo sapien
ctgtggcaggaatgggaggcttggc

SEQ ID NO: 3800756 - DNA, 25 bp, Homo sapien
gcaggaatgggaggcttggcagaat

SEQ ID NO: 3800757 - DNA, 25 bp, Homo sapien
tggcaggaatgggaggcttggcaga

SEQ ID NO: 3800758 - DNA, 25 bp, Homo sapien
cagacagccacagacgtctttgtgt

SEQ ID NO: 3800759 - DNA, 25 bp, Homo sapien
ttccagcatgacattcctcttttcg

SEQ ID NO: 3800760 - DNA, 25 bp, Homo sapien
ttttcagcacggaaacatcgcagct

SEQ ID NO: 3800761 - DNA, 25 bp, Homo sapien
tcctcttttcgtctcttgcatgaaa

SEQ ID NO: 3800762 - DNA, 25 bp, Homo sapien
tcagatgactgtttccgagtctcca

SEQ ID NO: 3800763 - DNA, 25 bp, Homo sapien
tctccagcaacctttgagtcttgct

SEQ ID NO: 3800764 - DNA, 25 bp, Homo sapien
acaccatcagatgactgtttccgag

SEQ ID NO: 3800765 - DNA, 25 bp, Homo sapien
gaaatagatgcaagcagtcattgag

SEQ ID NO: 3800766 - DNA, 25 bp, Homo sapien
tactgaattgcttgaggttacctgg

SEQ ID NO: 3800767 - DNA, 25 bp, Homo sapien
cacctgggcataagatagaaaggcc

SEQ ID NO: 3800768 - DNA, 25 bp, Homo sapien
agatggcctctcacctatccaggaa

SEQ ID NO: 3800769 - DNA, 25 bp, Homo sapien
aaatgggtttccacgaatgtctgcc

SEQ ID NO: 3800770 - DNA, 25 bp, Homo sapien
caaagagacagcagatactctgtga

SEQ ID NO: 3800771 - DNA, 25 bp, Homo sapien
aagagacagcagatactctgtgact

SEQ ID NO: 3800772 - DNA, 25 bp, Homo sapien
aaagagacagcagatactctgtgac

SEQ ID NO: 3800773 - DNA, 25 bp, Homo sapien
gcctctcaggcaagacaattttccc

SEQ ID NO: 3800774 - DNA, 25 bp, Homo sapien
tttctgtccgattagtgccaagtcc

SEQ ID NO: 3800775 - DNA, 25 bp, Homo sapien
tattggacgcaataatgagcctctc

SEQ ID NO: 3800776 - DNA, 25 bp, Homo sapien
ctccatgggtgccaagaacacagcc

SEQ ID NO: 3800777 - DNA, 25 bp, Homo sapien
cgtaagatccatcgaacagtcctct

SEQ ID NO: 3800778 - DNA, 25 bp, Homo sapien
gatccatcgaacagtcctctagggc

SEQ ID NO: 3800779 - DNA, 25 bp, Homo sapien
taaacgtaagatccatcgaacagtc

SEQ ID NO: 3800780 - DNA, 25 bp, Homo sapien
cttgagctaaacgtaagatccatcg

SEQ ID NO: 3800781 - DNA, 25 bp, Homo sapien
cagtgcatgtttacagcttaagagt

SEQ ID NO: 3800782 - DNA, 25 bp, Homo sapien
ttttggaggacagccagagaaactc

SEQ ID NO: 3800783 - DNA, 25 bp, Homo sapien
gaaactctgcaggagctgacctgtc

SEQ ID NO: 3800784 - DNA, 25 bp, Homo sapien
cagcttaagagtgcatcttttggag

SEQ ID NO: 3800785 - DNA, 25 bp, Homo sapien
gttcttattggtcaactcctacttg

SEQ ID NO: 3800786 - DNA, 25 bp, Homo sapien
ctccccacaacctctacaacaggcc

SEQ ID NO: 3800787 - DNA, 25 bp, Homo sapien
ggtcaactcctacttgtaagtgaga

SEQ ID NO: 3800788 - DNA, 25 bp, Homo sapien
tattggtcaactcctacttgtaagt

SEQ ID NO: 3800789 - DNA, 25 bp, Homo sapien
tccatcccgcaatgcttcagggtgt

SEQ ID NO: 3800790 - DNA, 25 bp, Homo sapien
tgaggataggagttgcatcagctac

SEQ ID NO: 3800791 - DNA, 25 bp, Homo sapien
agcaaaggtaaaggtgggtaccatg

SEQ ID NO: 3800792 - DNA, 25 bp, Homo sapien
tcctaatagatgctccaagcccaag

SEQ ID NO: 3800793 - DNA, 25 bp, Homo sapien
ctggccacagaagcgtacaataaat

SEQ ID NO: 3800794 - DNA, 25 bp, Homo sapien
gaagcgtacaataaattagctctga

SEQ ID NO: 3800795 - DNA, 25 bp, Homo sapien
agctggccacagaagcgtacaataa

SEQ ID NO: 3800796 - DNA, 25 bp, Homo sapien
ccacagaagcgtacaataaattagc

SEQ ID NO: 3800797 - DNA, 25 bp, Homo sapien
tggtggacatacttcacggagcgtg

SEQ ID NO: 3800798 - DNA, 25 bp, Homo sapien
tgggtgtgtcatggaaactgcgcat

SEQ ID NO: 3800799 - DNA, 25 bp, Homo sapien
taaagagtgtgtgaacccaaggcat

SEQ ID NO: 3800800 - DNA, 25 bp, Homo sapien
tgatccctgggaaataagtatggtc

SEQ ID NO: 3800801 - DNA, 25 bp, Homo sapien
aggcagtgcttgagaaccctctctg

SEQ ID NO: 3800802 - DNA, 25 bp, Homo sapien
tgtggaaatcccacattggagttcc

SEQ ID NO: 3800803 - DNA, 25 bp, Homo sapien
gagaaccctctctgttgtggaaatc

SEQ ID NO: 3800804 - DNA, 25 bp, Homo sapien
ctgttgtggaaatcccacattggag

SEQ ID NO: 3800805 - DNA, 25 bp, Homo sapien
ctccggagggccacatttctctgct

SEQ ID NO: 3800806 - DNA, 25 bp, Homo sapien
gagaagactggcaaacatcctggaa

SEQ ID NO: 3800807 - DNA, 25 bp, Homo sapien
catcctggaacatcaggtttgatac

SEQ ID NO: 3800808 - DNA, 25 bp, Homo sapien
cttgccggagcttgtactgggatga

SEQ ID NO: 3800809 - DNA, 25 bp, Homo sapien
gagcagaagtgtaatcaaaatgagc

SEQ ID NO: 3800810 - DNA, 25 bp, Homo sapien
gagcgatcatcaagtgcaatatttt

SEQ ID NO: 3800811 - DNA, 25 bp, Homo sapien
agagatgctgcgttcccaaacattg

SEQ ID NO: 3800812 - DNA, 25 bp, Homo sapien
agatgctgcgttcccaaacattgca

SEQ ID NO: 3800813 - DNA, 25 bp, Homo sapien
tcttctctcacatctcgagaacagc

SEQ ID NO: 3800814 - DNA, 25 bp, Homo sapien
gggatctggagataaatcagcatca

SEQ ID NO: 3800815 - DNA, 25 bp, Homo sapien
tcctcctgagaaccaaacagtactg

SEQ ID NO: 3800816 - DNA, 25 bp, Homo sapien
tcagcatcatggacaaaggcagtct

SEQ ID NO: 3800817 - DNA, 25 bp, Homo sapien
ttgctcatggtctgaggaatctgca

SEQ ID NO: 3800818 - DNA, 25 bp, Homo sapien
agagaggaaagacattacaaagtac

SEQ ID NO: 3800819 - DNA, 25 bp, Homo sapien
gcacgtgatactgtgtctaacctgc

SEQ ID NO: 3800820 - DNA, 25 bp, Homo sapien
cgtgatactgtgtctaacctgctga

SEQ ID NO: 3800821 - DNA, 25 bp, Homo sapien
gatactgtgtctaacctgctgactg

SEQ ID NO: 3800822 - DNA, 25 bp, Homo sapien
cagcacgtgatactgtgtctaacct

SEQ ID NO: 3800823 - DNA, 25 bp, Homo sapien
gggcacaccgtagacaaaacagaca

SEQ ID NO: 3800824 - DNA, 25 bp, Homo sapien
tagaaggaacgatggaagccaaagc

SEQ ID NO: 3800825 - DNA, 25 bp, Homo sapien
ttttggccatgctaagaagcacacg

SEQ ID NO: 3800826 - DNA, 25 bp, Homo sapien
agaagtggctaggaaaagtctctcc

SEQ ID NO: 3800827 - DNA, 25 bp, Homo sapien
ccactatcgcatcccatgattcttc

SEQ ID NO: 3800828 - DNA, 25 bp, Homo sapien
taccttcccactatcgcatcccatg

SEQ ID NO: 3800829 - DNA, 25 bp, Homo sapien
gcccacaaccaccttgtgaagatca

SEQ ID NO: 3800830 - DNA, 25 bp, Homo sapien
tgtgaagatcaccagtaccttccca

SEQ ID NO: 3800831 - DNA, 25 bp, Homo sapien
gctgggaggggtgaagatcccatga

SEQ ID NO: 3800832 - DNA, 25 bp, Homo sapien
cttccaatggagctgggaggggtga

SEQ ID NO: 3800833 - DNA, 25 bp, Homo sapien
aatggagctgggaggggtgaagatc

SEQ ID NO: 3800834 - DNA, 25 bp, Homo sapien
tgggaggggtgaagatcccatgaca

SEQ ID NO: 3800835 - DNA, 25 bp, Homo sapien
gacttctggtctaggctgttcataa

SEQ ID NO: 3800836 - DNA, 25 bp, Homo sapien
taaagactatactacaaagacggca

SEQ ID NO: 3800837 - DNA, 25 bp, Homo sapien
gaagcttctgccaccgcaaatggtg

SEQ ID NO: 3800838 - DNA, 25 bp, Homo sapien
caataacatgaaaagggaacgcatc

SEQ ID NO: 3800839 - DNA, 25 bp, Homo sapien
aagattttgagcttccaaacttcgt

SEQ ID NO: 3800840 - DNA, 25 bp, Homo sapien
gcttccaaacttcgtattgctatgg

SEQ ID NO: 3800841 - DNA, 25 bp, Homo sapien
gcatttgctgagctaggttttgttt

SEQ ID NO: 3800842 - DNA, 25 bp, Homo sapien
tattgctatggatgagcatttgctg

SEQ ID NO: 3800843 - DNA, 25 bp, Homo sapien
ccggcactagcagagacctgggagt

SEQ ID NO: 3800844 - DNA, 25 bp, Homo sapien
tgagggctgtaaatgaggctcatct

SEQ ID NO: 3800845 - DNA, 25 bp, Homo sapien
ctcatctgtcagtcgtgggcgggca

SEQ ID NO: 3800846 - DNA, 25 bp, Homo sapien
tctcggagctagatgactctgccaa

SEQ ID NO: 3800847 - DNA, 25 bp, Homo sapien
aaaaatgcagattggagataagccc

SEQ ID NO: 3800848 - DNA, 25 bp, Homo sapien
gagatctaggttataatctgcaaat

SEQ ID NO: 3800849 - DNA, 25 bp, Homo sapien
caaatcctgcccttgccaagttgag

SEQ ID NO: 3800850 - DNA, 25 bp, Homo sapien
aatagggtgagtgaaaaaatgcagc

SEQ ID NO: 3800851 - DNA, 25 bp, Homo sapien
tggcaacccagttgctttgtgagtt

SEQ ID NO: 3800852 - DNA, 25 bp, Homo sapien
ctggcaacccagttgctttgtgagt

SEQ ID NO: 3800853 - DNA, 25 bp, Homo sapien
ggcaacccagttgctttgtgagttt

SEQ ID NO: 3800854 - DNA, 25 bp, Homo sapien
taagtagacacaaccataatacccc

SEQ ID NO: 3800855 - DNA, 25 bp, Homo sapien
aagcgatccctctcaaaagaagtga

SEQ ID NO: 3800856 - DNA, 25 bp, Homo sapien
aaagaagtgacaccatccagaaggt

SEQ ID NO: 3800857 - DNA, 25 bp, Homo sapien
gacatttgtgactaggttttctaaa

SEQ ID NO: 3800858 - DNA, 25 bp, Homo sapien
tcccctgggcatgtcaggccagcca

SEQ ID NO: 3800859 - DNA, 25 bp, Homo sapien
ttcccctgggcatgtcaggccagcc

SEQ ID NO: 3800860 - DNA, 25 bp, Homo sapien
cttcccctgggcatgtcaggccagc

SEQ ID NO: 3800861 - DNA, 25 bp, Homo sapien
tttggccaacgtctggagagacgca

SEQ ID NO: 3800862 - DNA, 25 bp, Homo sapien
taccacgatagctttttggccgaga

SEQ ID NO: 3800863 - DNA, 25 bp, Homo sapien
gagacgcatgtatccttctaccacg

SEQ ID NO: 3800864 - DNA, 25 bp, Homo sapien
gaatgtcgccaaacataagtgccaa

SEQ ID NO: 3800865 - DNA, 25 bp, Homo sapien
ctttagggacgcaagtcgcaaaaca

SEQ ID NO: 3800866 - DNA, 25 bp, Homo sapien
acagcagagggttcacagatacatg

SEQ ID NO: 3800867 - DNA, 25 bp, Homo sapien
gacgcaagtcgcaaaacagcagagg

SEQ ID NO: 3800868 - DNA, 25 bp, Homo sapien
catgggacacaattgagttcatagt

SEQ ID NO: 3800869 - DNA, 25 bp, Homo sapien
taaggaggcgtacttgttgagctct

SEQ ID NO: 3800870 - DNA, 25 bp, Homo sapien
agaggtgggcactgcgttgttcatc

SEQ ID NO: 3800871 - DNA, 25 bp, Homo sapien
gatctggcccaggttcgggtacgaa

SEQ ID NO: 3800872 - DNA, 25 bp, Homo sapien
cactgcgttgttcatctgggtggca

SEQ ID NO: 3800873 - DNA, 25 bp, Homo sapien
ctatgtcaagattccctgaggatca

SEQ ID NO: 3800874 - DNA, 25 bp, Homo sapien
tatttatcatctaactgcgaggctc

SEQ ID NO: 3800875 - DNA, 25 bp, Homo sapien
tataagcactggctaagcacctagg

SEQ ID NO: 3800876 - DNA, 25 bp, Homo sapien
gaagtgggccaccaaatagcatatg

SEQ ID NO: 3800877 - DNA, 25 bp, Homo sapien
tcatgggacataacgagggttgagc

SEQ ID NO: 3800878 - DNA, 25 bp, Homo sapien
tgccatattggccaagccggtcttc

SEQ ID NO: 3800879 - DNA, 25 bp, Homo sapien
tcttcaactcctggcctgttgattt

SEQ ID NO: 3800880 - DNA, 25 bp, Homo sapien
cggtcttcaactcctggcctgttga

SEQ ID NO: 3800881 - DNA, 25 bp, Homo sapien
ttgccatattggccaagccggtctt

SEQ ID NO: 3800882 - DNA, 25 bp, Homo sapien
ttaagtgtcgatactgcccagtcac

SEQ ID NO: 3800883 - DNA, 25 bp, Homo sapien
tttggtgacttaagtgtcgatactg

SEQ ID NO: 3800884 - DNA, 25 bp, Homo sapien
gtgacttaagtgtcgatactgccca

SEQ ID NO: 3800885 - DNA, 25 bp, Homo sapien
tcgatactgcccagtcaccatcaga

SEQ ID NO: 3800886 - DNA, 25 bp, Homo sapien
gacatgagacatacaggcatttgga

SEQ ID NO: 3800887 - DNA, 25 bp, Homo sapien
tatttgaggatgaggcacatggagc

SEQ ID NO: 3800888 - DNA, 25 bp, Homo sapien
gatggaactgcatccactcactgcc

SEQ ID NO: 3800889 - DNA, 25 bp, Homo sapien
tcatgagaccatatctgggctgcct

SEQ ID NO: 3800890 - DNA, 25 bp, Homo sapien
tctacttcagtaaccaaactggcct

SEQ ID NO: 3800891 - DNA, 25 bp, Homo sapien
cccctttgaacattgttctacttca

SEQ ID NO: 3800892 - DNA, 25 bp, Homo sapien
ccctttgaacattgttctacttcag

SEQ ID NO: 3800893 - DNA, 25 bp, Homo sapien
acttcagtaaccaaactggcctcct

SEQ ID NO: 3800894 - DNA, 25 bp, Homo sapien
tccacccaccatgtttgttgagtgc

SEQ ID NO: 3800895 - DNA, 25 bp, Homo sapien
tgcctagtttactccatgaaagggc

SEQ ID NO: 3800896 - DNA, 25 bp, Homo sapien
gcaggcattcatccaaaccaagctg

SEQ ID NO: 3800897 - DNA, 25 bp, Homo sapien
tgttgagtgcctagtttactccatg

SEQ ID NO: 3800898 - DNA, 25 bp, Homo sapien
catcttgttggtgcgggacttctgt

SEQ ID NO: 3800899 - DNA, 25 bp, Homo sapien
tccattctgcttggcaggaccgtgc

SEQ ID NO: 3800900 - DNA, 25 bp, Homo sapien
tgcccttgttgctgtaagcctgccg

SEQ ID NO: 3800901 - DNA, 25 bp, Homo sapien
ggtgcagaggtaagttccccttggc

SEQ ID NO: 3800902 - DNA, 25 bp, Homo sapien
gttgagtgtggtctccagggtgctc

SEQ ID NO: 3800903 - DNA, 25 bp, Homo sapien
cagttgagtgtggtctccagggtgc

SEQ ID NO: 3800904 - DNA, 25 bp, Homo sapien
tcagttgagtgtggtctccagggtg

SEQ ID NO: 3800905 - DNA, 25 bp, Homo sapien
ttgagtgtggtctccagggtgctcc

SEQ ID NO: 3800906 - DNA, 25 bp, Homo sapien
tagaaacagacagcacgtggcaagt

SEQ ID NO: 3800907 - DNA, 25 bp, Homo sapien
tgacctaggaaaagcgcgactctgt

SEQ ID NO: 3800908 - DNA, 25 bp, Homo sapien
catcattgtcggtgggttcagggtc

SEQ ID NO: 3800909 - DNA, 25 bp, Homo sapien
tattgctgaatgtccacgcttcggt

SEQ ID NO: 3800910 - DNA, 25 bp, Homo sapien
gggatgtcagggacatacagtttat

SEQ ID NO: 3800911 - DNA, 25 bp, Homo sapien
ggatgtcagggacatacagtttata

SEQ ID NO: 3800912 - DNA, 25 bp, Homo sapien
ggcaaaacccagaaatcagaggctt

SEQ ID NO: 3800913 - DNA, 25 bp, Homo sapien
tcagaggcttctggatcctcatctg

SEQ ID NO: 3800914 - DNA, 25 bp, Homo sapien
gaacacaggttgcacttgggaaaca

SEQ ID NO: 3800915 - DNA, 25 bp, Homo sapien
cttgggtacccctgacattgtagca

SEQ ID NO: 3800916 - DNA, 25 bp, Homo sapien
aaggcaccacccacgcttatgacat

SEQ ID NO: 3800917 - DNA, 25 bp, Homo sapien
aacagtaacacattgaaggcaccac

SEQ ID NO: 3800918 - DNA, 25 bp, Homo sapien
gaccatttatagcttctgacaccag

SEQ ID NO: 3800919 - DNA, 25 bp, Homo sapien
tgttggtgtcctcgtatctgctggg

SEQ ID NO: 3800920 - DNA, 25 bp, Homo sapien
ggcccagagggatcaactgcattgt

SEQ ID NO: 3800921 - DNA, 25 bp, Homo sapien
tgctgggaccccaaggactatggat

SEQ ID NO: 3800922 - DNA, 25 bp, Homo sapien
atctctgaccccagctttgtacagc

SEQ ID NO: 3800923 - DNA, 25 bp, Homo sapien
catggtacctttttatacatggaga

SEQ ID NO: 3800924 - DNA, 25 bp, Homo sapien
catggagatctcctattatgcgttc

SEQ ID NO: 3800925 - DNA, 25 bp, Homo sapien
cctattatgcgttctttgaaagatc

SEQ ID NO: 3800926 - DNA, 25 bp, Homo sapien
aagtgtgttgcaggtacatagctca

SEQ ID NO: 3800927 - DNA, 25 bp, Homo sapien
acatagctcattaacgtcaaggaaa

SEQ ID NO: 3800928 - DNA, 25 bp, Homo sapien
gctggaatttaatcatcgctgcttg

SEQ ID NO: 3800929 - DNA, 25 bp, Homo sapien
tgtgaaggtgatatacagagatgcc

SEQ ID NO: 3800930 - DNA, 25 bp, Homo sapien
ttatttaatacctgatgatatcatt

SEQ ID NO: 3800931 - DNA, 25 bp, Homo sapien
catcttattagtacaaagagaaagt

SEQ ID NO: 3800932 - DNA, 25 bp, Homo sapien
cattgggtgctggtatttttaacaa

SEQ ID NO: 3800933 - DNA, 25 bp, Homo sapien
ttcattgggtgctggtatttttaac

SEQ ID NO: 3800934 - DNA, 25 bp, Homo sapien
cagatagttccataggttgtcccgt

SEQ ID NO: 3800935 - DNA, 25 bp, Homo sapien
tgtcccgtctttccatattgtgagg

SEQ ID NO: 3800936 - DNA, 25 bp, Homo sapien
ccttgtcttggtacatggaagtcac

SEQ ID NO: 3800937 - DNA, 25 bp, Homo sapien
ggtctcactaccctagctatagcgt

SEQ ID NO: 3800938 - DNA, 25 bp, Homo sapien
tgcaggcgttagaggtcgacaaacc

SEQ ID NO: 3800939 - DNA, 25 bp, Homo sapien
agctgaccctagaacaatgcaggcg

SEQ ID NO: 3800940 - DNA, 25 bp, Homo sapien
gaaaagggaatccataggcattcac

SEQ ID NO: 3800941 - DNA, 25 bp, Homo sapien
aattcacacataagtggacccctgc

SEQ ID NO: 3800942 - DNA, 25 bp, Homo sapien
catggcagaaggtgaaaggcacatc

SEQ ID NO: 3800943 - DNA, 25 bp, Homo sapien
taatcatggcagaaggtgaaaggca

SEQ ID NO: 3800944 - DNA, 25 bp, Homo sapien
tccacgtggctcgggaggcctcata

SEQ ID NO: 3800945 - DNA, 25 bp, Homo sapien
atcatggcagaaggtgaaaggcaca

SEQ ID NO: 3800946 - DNA, 25 bp, Homo sapien
gctggaccaggactaatgtctctga

SEQ ID NO: 3800947 - DNA, 25 bp, Homo sapien
ctggaccaggactaatgtctctgag

SEQ ID NO: 3800948 - DNA, 25 bp, Homo sapien
agctggaccaggactaatgtctctg

SEQ ID NO: 3800949 - DNA, 25 bp, Homo sapien
cattttcattactatttttttggct

SEQ ID NO: 3800950 - DNA, 25 bp, Homo sapien
tttctagtcttcaaagaaaccttga

SEQ ID NO: 3800951 - DNA, 25 bp, Homo sapien
tctagtcttcaaagaaaccttgaag

SEQ ID NO: 3800952 - DNA, 25 bp, Homo sapien
atttctagtcttcaaagaaaccttg

SEQ ID NO: 3800953 - DNA, 25 bp, Homo sapien
tacggagaagtgtaatgttccccat

SEQ ID NO: 3800954 - DNA, 25 bp, Homo sapien
aacactacggagaagtgtaatgttc

SEQ ID NO: 3800955 - DNA, 25 bp, Homo sapien
ccattaacactacggagaagtgtaa

SEQ ID NO: 3800956 - DNA, 25 bp, Homo sapien
aagaccattaacactacggagaagt

SEQ ID NO: 3800957 - DNA, 25 bp, Homo sapien
gagaccctgaattaactgctacatc

SEQ ID NO: 3800958 - DNA, 25 bp, Homo sapien
ccctgaattaactgctacatctgtt

SEQ ID NO: 3800959 - DNA, 25 bp, Homo sapien
ctgagaccctgaattaactgctaca

SEQ ID NO: 3800960 - DNA, 25 bp, Homo sapien
catttgatcacagcttgttgaggac

SEQ ID NO: 3800961 - DNA, 25 bp, Homo sapien
tgctccatgtaagcccttatcagag

SEQ ID NO: 3800962 - DNA, 25 bp, Homo sapien
attctgttggagtccggtgagcaag

SEQ ID NO: 3800963 - DNA, 25 bp, Homo sapien
tccaccaagtaaacagttggattct

SEQ ID NO: 3800964 - DNA, 25 bp, Homo sapien
cagggcattgctccatgtaagccct

SEQ ID NO: 3800965 - DNA, 25 bp, Homo sapien
tcctggatcaaataaccatggcccc

SEQ ID NO: 3800966 - DNA, 25 bp, Homo sapien
aatcattagcgctctgggccacact

SEQ ID NO: 3800967 - DNA, 25 bp, Homo sapien
tgatagtgagtgacaggtctcctgg

SEQ ID NO: 3800968 - DNA, 25 bp, Homo sapien
ggaatttgtgcttgacgaaaggaca

SEQ ID NO: 3800969 - DNA, 25 bp, Homo sapien
cgggccaatgtcaggcagtgcctac

SEQ ID NO: 3800970 - DNA, 25 bp, Homo sapien
tgaaggacgggccaatgtcaggcag

SEQ ID NO: 3800971 - DNA, 25 bp, Homo sapien
acctgataccctgggccgatgccag

SEQ ID NO: 3800972 - DNA, 25 bp, Homo sapien
gcaggagaactggccagagtttcat

SEQ ID NO: 3800973 - DNA, 25 bp, Homo sapien
ttcgagcctgatatgcaaaccaagg

SEQ ID NO: 3800974 - DNA, 25 bp, Homo sapien
gcctttcgagcctgatatgcaaacc

SEQ ID NO: 3800975 - DNA, 25 bp, Homo sapien
gatatgcaaaccaaggctcgtctcc

SEQ ID NO: 3800976 - DNA, 25 bp, Homo sapien
cccagctggcctttcgagcctgata

SEQ ID NO: 3800977 - DNA, 25 bp, Homo sapien
ctgaaaatcagaattaagaccagga

SEQ ID NO: 3800978 - DNA, 25 bp, Homo sapien
ttccctataggagtttgatcatcag

SEQ ID NO: 3800979 - DNA, 25 bp, Homo sapien
tataggagtttgatcatcagttcct

SEQ ID NO: 3800980 - DNA, 25 bp, Homo sapien
aggctctataaagtccacatcctct

SEQ ID NO: 3800981 - DNA, 25 bp, Homo sapien
cctataggagtttgatcatcagttc

SEQ ID NO: 3800982 - DNA, 25 bp, Homo sapien
acttcccctgagaatcctcaacggg

SEQ ID NO: 3800983 - DNA, 25 bp, Homo sapien
tgtacatggtgtgaagcatcatctc

SEQ ID NO: 3800984 - DNA, 25 bp, Homo sapien
gaggtagggctgttgtgatctccat

SEQ ID NO: 3800985 - DNA, 25 bp, Homo sapien
tgcattttgtgacacgactttagga

SEQ ID NO: 3800986 - DNA, 25 bp, Homo sapien
caaaaattagccagtgccttgtggc

SEQ ID NO: 3800987 - DNA, 25 bp, Homo sapien
aaattagccagtgccttgtggcatg

SEQ ID NO: 3800988 - DNA, 25 bp, Homo sapien
ctgtagtcccagctactcgggaggc

SEQ ID NO: 3800989 - DNA, 25 bp, Homo sapien
ttagccagtgccttgtggcatgagc

SEQ ID NO: 3800990 - DNA, 25 bp, Homo sapien
caagccagagtaaaggtggtgcctc

SEQ ID NO: 3800991 - DNA, 25 bp, Homo sapien
ataatacttgaaagctgtattaggc

SEQ ID NO: 3800992 - DNA, 25 bp, Homo sapien
agccaagccagagtaaaggtggtgc

SEQ ID NO: 3800993 - DNA, 25 bp, Homo sapien
agccagagtaaaggtggtgcctctt

SEQ ID NO: 3800994 - DNA, 25 bp, Homo sapien
catccctcagctctgtttcttctgt

SEQ ID NO: 3800995 - DNA, 25 bp, Homo sapien
tccctcagctctgtttcttctgtgc

SEQ ID NO: 3800996 - DNA, 25 bp, Homo sapien
ctgtttcttctgtgctggtgacacg

SEQ ID NO: 3800997 - DNA, 25 bp, Homo sapien
ctctgtttcttctgtgctggtgaca

SEQ ID NO: 3800998 - DNA, 25 bp, Homo sapien
ccagggggccactagtgcaagtctt

SEQ ID NO: 3800999 - DNA, 25 bp, Homo sapien
tggtgtaactctcaaccgaggcggc

SEQ ID NO: 3801000 - DNA, 25 bp, Homo sapien
tccaacggcctcagaaccaaagaag

SEQ ID NO: 3801001 - DNA, 25 bp, Homo sapien
taaatctcacagtaggcaatctgca

SEQ ID NO: 3801002 - DNA, 25 bp, Homo sapien
agatcccaagcgtggctttcagagg

SEQ ID NO: 3801003 - DNA, 25 bp, Homo sapien
gatcccaagcgtggctttcagagga

SEQ ID NO: 3801004 - DNA, 25 bp, Homo sapien
aagatcccaagcgtggctttcagag

SEQ ID NO: 3801005 - DNA, 25 bp, Homo sapien
tgaagatcccaagcgtggctttcag

SEQ ID NO: 3801006 - DNA, 25 bp, Homo sapien
caacatgaggctcacaggatcacct

SEQ ID NO: 3801007 - DNA, 25 bp, Homo sapien
cccccaacatgaggctcacaggatc

SEQ ID NO: 3801008 - DNA, 25 bp, Homo sapien
ccaacatgaggctcacaggatcacc

SEQ ID NO: 3801009 - DNA, 25 bp, Homo sapien
cccaacatgaggctcacaggatcac

SEQ ID NO: 3801010 - DNA, 25 bp, Homo sapien
cctcatcactcccatcttacggatg

SEQ ID NO: 3801011 - DNA, 25 bp, Homo sapien
cagcctcatcactcccatcttacgg

SEQ ID NO: 3801012 - DNA, 25 bp, Homo sapien
acgcccagcctcatcactcccatct

SEQ ID NO: 3801013 - DNA, 25 bp, Homo sapien
catcactcccatcttacggatgagc

SEQ ID NO: 3801014 - DNA, 25 bp, Homo sapien
tgagcaacagcacatgaatgccgcc

SEQ ID NO: 3801015 - DNA, 25 bp, Homo sapien
gaatactcagcttgctccataaagg

SEQ ID NO: 3801016 - DNA, 25 bp, Homo sapien
cagctcatccttgagtacacggctg

SEQ ID NO: 3801017 - DNA, 25 bp, Homo sapien
tccataaagggatcagcccatagct

SEQ ID NO: 3801018 - DNA, 25 bp, Homo sapien
accatggcccacatcctctggacat

SEQ ID NO: 3801019 - DNA, 25 bp, Homo sapien
atcttctcaccatggcccacatcct

SEQ ID NO: 3801020 - DNA, 25 bp, Homo sapien
atggcccacatcctctggacatcct

SEQ ID NO: 3801021 - DNA, 25 bp, Homo sapien
tatcttctcaccatggcccacatcc

SEQ ID NO: 3801022 - DNA, 25 bp, Homo sapien
acttgtcagcccctgatgaattcct

SEQ ID NO: 3801023 - DNA, 25 bp, Homo sapien
tgtcagcccctgatgaattcctcct

SEQ ID NO: 3801024 - DNA, 25 bp, Homo sapien
gccacttgtcagcccctgatgaatt

SEQ ID NO: 3801025 - DNA, 25 bp, Homo sapien
ctcctccagtgcctagaagcagcca

SEQ ID NO: 3801026 - DNA, 25 bp, Homo sapien
tttaaaaaaatatagttggcagcta

SEQ ID NO: 3801027 - DNA, 25 bp, Homo sapien
aaaaaaatatagttggcagctaatg

SEQ ID NO: 3801028 - DNA, 25 bp, Homo sapien
atttaaaaaaatatagttggcagct

SEQ ID NO: 3801029 - DNA, 25 bp, Homo sapien
taaaaaaatatagttggcagctaat

SEQ ID NO: 3801030 - DNA, 25 bp, Homo sapien
caggattcaggcactattgttaggc

SEQ ID NO: 3801031 - DNA, 25 bp, Homo sapien
gagatagccgaaaatgacaaatgcc

SEQ ID NO: 3801032 - DNA, 25 bp, Homo sapien
tgcccaccgcggaggaattcgaaat

SEQ ID NO: 3801033 - DNA, 25 bp, Homo sapien
agggagtggctcctcaaaagaaaag

SEQ ID NO: 3801034 - DNA, 25 bp, Homo sapien
ggtgtaataaattgtgcaacagctt

SEQ ID NO: 3801035 - DNA, 25 bp, Homo sapien
tcattttggtgtaataaattgtgca

SEQ ID NO: 3801036 - DNA, 25 bp, Homo sapien
tagttcctatcctgaatttttcgaa

SEQ ID NO: 3801037 - DNA, 25 bp, Homo sapien
aaccatatcaggagagcttgaaatc

SEQ ID NO: 3801038 - DNA, 25 bp, Homo sapien
ggtggcctctattcccatgtagttc

SEQ ID NO: 3801039 - DNA, 25 bp, Homo sapien
tggagtggagaaaccatatcaggag

SEQ ID NO: 3801040 - DNA, 25 bp, Homo sapien
gctggcaacacgttgttcctcacct

SEQ ID NO: 3801041 - DNA, 25 bp, Homo sapien
agctggcaacacgttgttcctcacc

SEQ ID NO: 3801042 - DNA, 25 bp, Homo sapien
acagataccagcaaaccgggaccat

SEQ ID NO: 3801043 - DNA, 25 bp, Homo sapien
aaaccgggaccatcagacactcggg

SEQ ID NO: 3801044 - DNA, 25 bp, Homo sapien
ggttcccatcagtgggcagaatttg

SEQ ID NO: 3801045 - DNA, 25 bp, Homo sapien
tcccatcagtgggcagaatttgttc

SEQ ID NO: 3801046 - DNA, 25 bp, Homo sapien
gttcccatcagtgggcagaatttgt

SEQ ID NO: 3801047 - DNA, 25 bp, Homo sapien
tggttcccatcagtgggcagaattt

SEQ ID NO: 3801048 - DNA, 25 bp, Homo sapien
tccaaattcttatggcgagcacagg

SEQ ID NO: 3801049 - DNA, 25 bp, Homo sapien
gcaacaggcattcttgatacccaag

SEQ ID NO: 3801050 - DNA, 25 bp, Homo sapien
caagtctgcacggttcctgaagttc

SEQ ID NO: 3801051 - DNA, 25 bp, Homo sapien
gagcactgtatagtccaagtctgca

SEQ ID NO: 3801052 - DNA, 25 bp, Homo sapien
cctctgatcgagacaacattgtggg

SEQ ID NO: 3801053 - DNA, 25 bp, Homo sapien
caatgtgatccaacaactggttgtc

SEQ ID NO: 3801054 - DNA, 25 bp, Homo sapien
ggcagcaactgtcttcctgatttga

SEQ ID NO: 3801055 - DNA, 25 bp, Homo sapien
actggttgtccgcataaactagaag

SEQ ID NO: 3801056 - DNA, 25 bp, Homo sapien
ctggcctgagggatgaagattttca

SEQ ID NO: 3801057 - DNA, 25 bp, Homo sapien
gatgaagattttcagccaactgcat

SEQ ID NO: 3801058 - DNA, 25 bp, Homo sapien
gcctgagggatgaagattttcagcc

SEQ ID NO: 3801059 - DNA, 25 bp, Homo sapien
ggatgaagattttcagccaactgca

SEQ ID NO: 3801060 - DNA, 25 bp, Homo sapien
ccatctaggcttgcaggatcaggca

SEQ ID NO: 3801061 - DNA, 25 bp, Homo sapien
aactacagtatcagagttactctgg

SEQ ID NO: 3801062 - DNA, 25 bp, Homo sapien
caagtacttgaccttgggcagcccc

SEQ ID NO: 3801063 - DNA, 25 bp, Homo sapien
cctacagaatgactgataggaagca

SEQ ID NO: 3801064 - DNA, 25 bp, Homo sapien
ccaaactctccgcagaagcctttga

SEQ ID NO: 3801065 - DNA, 25 bp, Homo sapien
tgccaaactctccgcagaagccttt

SEQ ID NO: 3801066 - DNA, 25 bp, Homo sapien
aaactctccgcagaagcctttgaac

SEQ ID NO: 3801067 - DNA, 25 bp, Homo sapien
ctctccgcagaagcctttgaactgt

SEQ ID NO: 3801068 - DNA, 25 bp, Homo sapien
gtctattgctatcaaccttcagtgc

SEQ ID NO: 3801069 - DNA, 25 bp, Homo sapien
tctattgctatcaaccttcagtgcc

SEQ ID NO: 3801070 - DNA, 25 bp, Homo sapien
ggtctattgctatcaaccttcagtg

SEQ ID NO: 3801071 - DNA, 25 bp, Homo sapien
attatttcatcacctaagcattaag

SEQ ID NO: 3801072 - DNA, 25 bp, Homo sapien
atttcatcacctaagcattaagcct

SEQ ID NO: 3801073 - DNA, 25 bp, Homo sapien
tcacctaagcattaagcctagtacc

SEQ ID NO: 3801074 - DNA, 25 bp, Homo sapien
catcacctaagcattaagcctagta

SEQ ID NO: 3801075 - DNA, 25 bp, Homo sapien
tacagcatcataaagtttgcttcca

SEQ ID NO: 3801076 - DNA, 25 bp, Homo sapien
cagcatcataaagtttgcttccatt

SEQ ID NO: 3801077 - DNA, 25 bp, Homo sapien
cgttacagcatcataaagtttgctt

SEQ ID NO: 3801078 - DNA, 25 bp, Homo sapien
catcataaagtttgcttccatttgc

SEQ ID NO: 3801079 - DNA, 25 bp, Homo sapien
ttccccttccctccgctttatctga

SEQ ID NO: 3801080 - DNA, 25 bp, Homo sapien
ttcagtaatgcttgaccctgctccc

SEQ ID NO: 3801081 - DNA, 25 bp, Homo sapien
cagtaatgcttgaccctgctcccat

SEQ ID NO: 3801082 - DNA, 25 bp, Homo sapien
tccctccgctttatctgagactgaa

SEQ ID NO: 3801083 - DNA, 25 bp, Homo sapien
tctttgatccaaatctcttagctgg

SEQ ID NO: 3801084 - DNA, 25 bp, Homo sapien
gattctaagtctgggtatctctttc

SEQ ID NO: 3801085 - DNA, 25 bp, Homo sapien
tcttagctggattctaagtctgggt

SEQ ID NO: 3801086 - DNA, 25 bp, Homo sapien
aaatctcttagctggattctaagtc

SEQ ID NO: 3801087 - DNA, 25 bp, Homo sapien
tgcctcttctgctttttctccatac

SEQ ID NO: 3801088 - DNA, 25 bp, Homo sapien
ttattctgcctcttctgctttttct

SEQ ID NO: 3801089 - DNA, 25 bp, Homo sapien
ctgcctcttctgctttttctccata

SEQ ID NO: 3801090 - DNA, 25 bp, Homo sapien
ttctgcctcttctgctttttctcca

SEQ ID NO: 3801091 - DNA, 25 bp, Homo sapien
gacctaaccgtagtattctgcatca

SEQ ID NO: 3801092 - DNA, 25 bp, Homo sapien
gtgatgactctggaaggcaagtcca

SEQ ID NO: 3801093 - DNA, 25 bp, Homo sapien
ggcaggatttgccacaagacctaac

SEQ ID NO: 3801094 - DNA, 25 bp, Homo sapien
cattacaaatccagaccagctgtag

SEQ ID NO: 3801095 - DNA, 25 bp, Homo sapien
ccacaaccatgagggcgctgccaaa

SEQ ID NO: 3801096 - DNA, 25 bp, Homo sapien
attctttgcctgctgattagcccat

SEQ ID NO: 3801097 - DNA, 25 bp, Homo sapien
tgctgattagcccatttgctcgata

SEQ ID NO: 3801098 - DNA, 25 bp, Homo sapien
agcccatttgctcgatatttcctga

SEQ ID NO: 3801099 - DNA, 25 bp, Homo sapien
tttgcctgctgattagcccatttgc

SEQ ID NO: 3801100 - DNA, 25 bp, Homo sapien
attttgtagacttgtggcctaaggg

SEQ ID NO: 3801101 - DNA, 25 bp, Homo sapien
ccagggagccaacggcagggattca

SEQ ID NO: 3801102 - DNA, 25 bp, Homo sapien
tgcaattccagggagccaacggcag

SEQ ID NO: 3801103 - DNA, 25 bp, Homo sapien
aattttgtagacttgtggcctaagg

SEQ ID NO: 3801104 - DNA, 25 bp, Homo sapien
ttttgaggagtgctacatgccaata

SEQ ID NO: 3801105 - DNA, 25 bp, Homo sapien
aaaaccactgggtgttgagatcggg

SEQ ID NO: 3801106 - DNA, 25 bp, Homo sapien
ggagtgctacatgccaatattctgt

SEQ ID NO: 3801107 - DNA, 25 bp, Homo sapien
ttctatatcaattctgtcaaaacca

SEQ ID NO: 3801108 - DNA, 25 bp, Homo sapien
aattcatggctaggtccacagtacc

SEQ ID NO: 3801109 - DNA, 25 bp, Homo sapien
aactccatggatagaaagtaccttg

SEQ ID NO: 3801110 - DNA, 25 bp, Homo sapien
atgttacaggtctccctcaccaggc

SEQ ID NO: 3801111 - DNA, 25 bp, Homo sapien
gataaatatatcaatccctgcatct

SEQ ID NO: 3801112 - DNA, 25 bp, Homo sapien
actgttggtccaattttcacacaca

SEQ ID NO: 3801113 - DNA, 25 bp, Homo sapien
catgggatgcatgacgtcatttctg

SEQ ID NO: 3801114 - DNA, 25 bp, Homo sapien
ccagtgaacctgacaattgtattgc

SEQ ID NO: 3801115 - DNA, 25 bp, Homo sapien
acacatgggaatccctgacaaaggg

SEQ ID NO: 3801116 - DNA, 25 bp, Homo sapien
gtctttacactactagcattgaggg

SEQ ID NO: 3801117 - DNA, 25 bp, Homo sapien
gcaaagtttactccaactgcaatgt

SEQ ID NO: 3801118 - DNA, 25 bp, Homo sapien
caatgtatgtagttgaccatgtcac

SEQ ID NO: 3801119 - DNA, 25 bp, Homo sapien
ctgtctgtcaacttgtctgctagga

SEQ ID NO: 3801120 - DNA, 25 bp, Homo sapien
gcactttgaatgtgactaatgggat

SEQ ID NO: 3801121 - DNA, 25 bp, Homo sapien
gatgatttccataatcttgtcacct

SEQ ID NO: 3801122 - DNA, 25 bp, Homo sapien
taggcaaagatctctggtgatggtg

SEQ ID NO: 3801123 - DNA, 25 bp, Homo sapien
tggtgatgatttccataatcttgtc

SEQ ID NO: 3801124 - DNA, 25 bp, Homo sapien
aatttgctccaaattggactgagtg

SEQ ID NO: 3801125 - DNA, 25 bp, Homo sapien
tcagccacttgttaatccagatgaa

SEQ ID NO: 3801126 - DNA, 25 bp, Homo sapien
ggactgagtgatatgattagcccac

SEQ ID NO: 3801127 - DNA, 25 bp, Homo sapien
ccacatcagccacttgttaatccag

SEQ ID NO: 3801128 - DNA, 25 bp, Homo sapien
aacgagcacaatcttgcttggctgc

SEQ ID NO: 3801129 - DNA, 25 bp, Homo sapien
gttcagacacagacatgcccgacct

SEQ ID NO: 3801130 - DNA, 25 bp, Homo sapien
cagacatgcccgacctgaatcaggg

SEQ ID NO: 3801131 - DNA, 25 bp, Homo sapien
tggcagtctctgtacaactgtctcc

SEQ ID NO: 3801132 - DNA, 25 bp, Homo sapien
ggagagcacagagcgcaattcacca

SEQ ID NO: 3801133 - DNA, 25 bp, Homo sapien
gctgctcagcaacccggcaataagg

SEQ ID NO: 3801134 - DNA, 25 bp, Homo sapien
agacatatcacaggtcctgactggg

SEQ ID NO: 3801135 - DNA, 25 bp, Homo sapien
ggtcagcgtcagagggatatacagc

SEQ ID NO: 3801136 - DNA, 25 bp, Homo sapien
actactgtttatggcccctggagag

SEQ ID NO: 3801137 - DNA, 25 bp, Homo sapien
ggagccactactgtttatggcccct

SEQ ID NO: 3801138 - DNA, 25 bp, Homo sapien
cactactgtttatggcccctggaga

SEQ ID NO: 3801139 - DNA, 25 bp, Homo sapien
gccactactgtttatggcccctgga

SEQ ID NO: 3801140 - DNA, 25 bp, Homo sapien
tcttttgaggactctcccttttcaa

SEQ ID NO: 3801141 - DNA, 25 bp, Homo sapien
cgagcattatctgtgggctctgcag

SEQ ID NO: 3801142 - DNA, 25 bp, Homo sapien
tctgtgcatgaacacttgagcatca

SEQ ID NO: 3801143 - DNA, 25 bp, Homo sapien
gccctggtgtcacggactctgtgca

SEQ ID NO: 3801144 - DNA, 25 bp, Homo sapien
ttgagcatcactggtggaaacagca

SEQ ID NO: 3801145 - DNA, 25 bp, Homo sapien
ttggcgtggttctctcctcggatgc

SEQ ID NO: 3801146 - DNA, 25 bp, Homo sapien
cttggcgtggttctctcctcggatg

SEQ ID NO: 3801147 - DNA, 25 bp, Homo sapien
gcccacggcttgtttctcacttaga

SEQ ID NO: 3801148 - DNA, 25 bp, Homo sapien
gacagctatcaacggaacatggaga

SEQ ID NO: 3801149 - DNA, 25 bp, Homo sapien
tactctattccagggcttgtgcaag

SEQ ID NO: 3801150 - DNA, 25 bp, Homo sapien
tagtccatcacctggcacgtagggc

SEQ ID NO: 3801151 - DNA, 25 bp, Homo sapien
tagtcagtgactgaggacaaccatc

SEQ ID NO: 3801152 - DNA, 25 bp, Homo sapien
tatcattagcgtggatgtgcactcc

SEQ ID NO: 3801153 - DNA, 25 bp, Homo sapien
tcttcccctcaatgtggagaaaagt

SEQ ID NO: 3801154 - DNA, 25 bp, Homo sapien
tacccaagctaggttaatcagacaa

SEQ ID NO: 3801155 - DNA, 25 bp, Homo sapien
gttttaggtgcatccaacagtctgg

SEQ ID NO: 3801156 - DNA, 25 bp, Homo sapien
tggcaggtttccaaccatagaatcc

SEQ ID NO: 3801157 - DNA, 25 bp, Homo sapien
ttggtttccctatcgagctttcagt

SEQ ID NO: 3801158 - DNA, 25 bp, Homo sapien
attaataagaaaccaagccacggag

SEQ ID NO: 3801159 - DNA, 25 bp, Homo sapien
ctctctggatgggagccagactgaa

SEQ ID NO: 3801160 - DNA, 25 bp, Homo sapien
agggagcactcagaagcaaccagaa

SEQ ID NO: 3801161 - DNA, 25 bp, Homo sapien
gccactgtctctctggatgggagcc

SEQ ID NO: 3801162 - DNA, 25 bp, Homo sapien
ccagggagcactcagaagcaaccag

SEQ ID NO: 3801163 - DNA, 25 bp, Homo sapien
ttgttttctccttataccaatacat

SEQ ID NO: 3801164 - DNA, 25 bp, Homo sapien
tgaactttgttttctccttatacca

SEQ ID NO: 3801165 - DNA, 25 bp, Homo sapien
tttgttttctccttataccaataca

SEQ ID NO: 3801166 - DNA, 25 bp, Homo sapien
ctctggtggagtgtatgggagatca

SEQ ID NO: 3801167 - DNA, 25 bp, Homo sapien
ctcccttagcgtggggcttccacat

SEQ ID NO: 3801168 - DNA, 25 bp, Homo sapien
tagcgtggggcttccacatgcgcag

SEQ ID NO: 3801169 - DNA, 25 bp, Homo sapien
cacatgcgcagtgctttctgtatcc

SEQ ID NO: 3801170 - DNA, 25 bp, Homo sapien
caacagagatagtggaaatcagcac

SEQ ID NO: 3801171 - DNA, 25 bp, Homo sapien
tcaaatgttcaatcccagcagtagg

SEQ ID NO: 3801172 - DNA, 25 bp, Homo sapien
acacctggagctgggattgtcaggc

SEQ ID NO: 3801173 - DNA, 25 bp, Homo sapien
tgttgggtcctttgacgccagcggc

SEQ ID NO: 3801174 - DNA, 25 bp, Homo sapien
ggaggcggtcaaggatgcttttttc

SEQ ID NO: 3801175 - DNA, 25 bp, Homo sapien
gctaccacatgagaagtcagagact

SEQ ID NO: 3801176 - DNA, 25 bp, Homo sapien
gaggagcggcaccaggattgattct

SEQ ID NO: 3801177 - DNA, 25 bp, Homo sapien
tactagtagcgttgccaatgggtga

SEQ ID NO: 3801178 - DNA, 25 bp, Homo sapien
tctatctgtgctgaagatttagctt

SEQ ID NO: 3801179 - DNA, 25 bp, Homo sapien
gctctatctgtgctgaagatttagc

SEQ ID NO: 3801180 - DNA, 25 bp, Homo sapien
tagctctatctgtgctgaagattta

SEQ ID NO: 3801181 - DNA, 25 bp, Homo sapien
tatctgtgctgaagatttagctttc

SEQ ID NO: 3801182 - DNA, 25 bp, Homo sapien
ttgaccagccttccaccgaatacac

SEQ ID NO: 3801183 - DNA, 25 bp, Homo sapien
aaggtggttggtatacagctcgctt

SEQ ID NO: 3801184 - DNA, 25 bp, Homo sapien
cacatattgtacaactccaagtggg

SEQ ID NO: 3801185 - DNA, 25 bp, Homo sapien
tctcgggggacgactttgagttctg

SEQ ID NO: 3801186 - DNA, 25 bp, Homo sapien
gtggactgctggaactgactttcac

SEQ ID NO: 3801187 - DNA, 25 bp, Homo sapien
catgatggtaatgggggtggactgc

SEQ ID NO: 3801188 - DNA, 25 bp, Homo sapien
ctgacaccatgatggtaatgggggt

SEQ ID NO: 3801189 - DNA, 25 bp, Homo sapien
atgggggtggactgctggaactgac

SEQ ID NO: 3801190 - DNA, 25 bp, Homo sapien
aaggccaaccatcttcagctgggca

SEQ ID NO: 3801191 - DNA, 25 bp, Homo sapien
tggaccctcgggtatatctccggct

SEQ ID NO: 3801192 - DNA, 25 bp, Homo sapien
tttcagtgaccagttcagagcaagg

SEQ ID NO: 3801193 - DNA, 25 bp, Homo sapien
gagcaaggccaaccatcttcagctg

SEQ ID NO: 3801194 - DNA, 25 bp, Homo sapien
gagagatttgggagccttcttagaa

SEQ ID NO: 3801195 - DNA, 25 bp, Homo sapien
aaaacgtggaatctgagctttgtct

SEQ ID NO: 3801196 - DNA, 25 bp, Homo sapien
gctttgtcttgaactaagcgtgaca

SEQ ID NO: 3801197 - DNA, 25 bp, Homo sapien
gaactaagcgtgacatgtgcatttg

SEQ ID NO: 3801198 - DNA, 25 bp, Homo sapien
gaatggctgactgctcctcactcag

SEQ ID NO: 3801199 - DNA, 25 bp, Homo sapien
tggtgggaatggctgactgctcctc

SEQ ID NO: 3801200 - DNA, 25 bp, Homo sapien
tgggaatggctgactgctcctcact

SEQ ID NO: 3801201 - DNA, 25 bp, Homo sapien
ggtgggaatggctgactgctcctca

SEQ ID NO: 3801202 - DNA, 25 bp, Homo sapien
gcaggtaggtgctactggccgtggc

SEQ ID NO: 3801203 - DNA, 25 bp, Homo sapien
cattggaatggattccaggaggtac

SEQ ID NO: 3801204 - DNA, 25 bp, Homo sapien
caggaggtaccaatggccaattttc

SEQ ID NO: 3801205 - DNA, 25 bp, Homo sapien
tactggccgtggcatatggcattgg

SEQ ID NO: 3801206 - DNA, 25 bp, Homo sapien
attcaggagtacaagtgcaggtttg

SEQ ID NO: 3801207 - DNA, 25 bp, Homo sapien
aattcaggagtacaagtgcaggttt

SEQ ID NO: 3801208 - DNA, 25 bp, Homo sapien
taaattcaggagtacaagtgcaggt

SEQ ID NO: 3801209 - DNA, 25 bp, Homo sapien
aaattcaggagtacaagtgcaggtt

SEQ ID NO: 3801210 - DNA, 25 bp, Homo sapien
tactaaaactaacacgtaggatctc

SEQ ID NO: 3801211 - DNA, 25 bp, Homo sapien
tatggctttactatgcacatgtata

SEQ ID NO: 3801212 - DNA, 25 bp, Homo sapien
gatctcatgtcctataagagttcac

SEQ ID NO: 3801213 - DNA, 25 bp, Homo sapien
cactttaaatagttgaaatagtcta

SEQ ID NO: 3801214 - DNA, 25 bp, Homo sapien
tcagctgatctgactgctagctttc

SEQ ID NO: 3801215 - DNA, 25 bp, Homo sapien
cagctgatctgactgctagctttct

SEQ ID NO: 3801216 - DNA, 25 bp, Homo sapien
gctgatctgactgctagctttcttc

SEQ ID NO: 3801217 - DNA, 25 bp, Homo sapien
ctgatctgactgctagctttcttct

SEQ ID NO: 3801218 - DNA, 25 bp, Homo sapien
gcaattccccgggagccttggcatt

SEQ ID NO: 3801219 - DNA, 25 bp, Homo sapien
cccgggagccttggcattctgtgag

SEQ ID NO: 3801220 - DNA, 25 bp, Homo sapien
ttccccgggagccttggcattctgt

SEQ ID NO: 3801221 - DNA, 25 bp, Homo sapien
cagactgcaattccccgggagcctt

SEQ ID NO: 3801222 - DNA, 25 bp, Homo sapien
cagtagggacagctttgacctttag

SEQ ID NO: 3801223 - DNA, 25 bp, Homo sapien
tccaggtcccacaaagagcactatg

SEQ ID NO: 3801224 - DNA, 25 bp, Homo sapien
aaacggatgcttaagtaaacttctg

SEQ ID NO: 3801225 - DNA, 25 bp, Homo sapien
gagcactatgggttctgatcgctga

SEQ ID NO: 3801226 - DNA, 25 bp, Homo sapien
aactagaggagtgttccgatgaagc

SEQ ID NO: 3801227 - DNA, 25 bp, Homo sapien
gctgtgtacacaaaactagaggagt

SEQ ID NO: 3801228 - DNA, 25 bp, Homo sapien
tctttaggagctgtgtacacaaaac

SEQ ID NO: 3801229 - DNA, 25 bp, Homo sapien
ggagtgttccgatgaagctggactt

SEQ ID NO: 3801230 - DNA, 25 bp, Homo sapien
ctatggtataatcattacaaacaga

SEQ ID NO: 3801231 - DNA, 25 bp, Homo sapien
tcaacgggagtgttttaccattgcc

SEQ ID NO: 3801232 - DNA, 25 bp, Homo sapien
tagatataagagtggaaagctttgg

SEQ ID NO: 3801233 - DNA, 25 bp, Homo sapien
gtgggtattctttctctcactatgt

SEQ ID NO: 3801234 - DNA, 25 bp, Homo sapien
gaaagctttggtggtaggctctaaa

SEQ ID NO: 3801235 - DNA, 25 bp, Homo sapien
cagccagacagactcaccatgggag

SEQ ID NO: 3801236 - DNA, 25 bp, Homo sapien
catttctcacccaattggagctcac

SEQ ID NO: 3801237 - DNA, 25 bp, Homo sapien
tgcgtgccctgaagaagtcctatgg

SEQ ID NO: 3801238 - DNA, 25 bp, Homo sapien
aattcagaggccgttcatcacctga

SEQ ID NO: 3801239 - DNA, 25 bp, Homo sapien
tttccccagcttcagtggatcttca

SEQ ID NO: 3801240 - DNA, 25 bp, Homo sapien
ttcctttccccagcttcagtggatc

SEQ ID NO: 3801241 - DNA, 25 bp, Homo sapien
cctttccccagcttcagtggatctt

SEQ ID NO: 3801242 - DNA, 25 bp, Homo sapien
ttttcctttccccagcttcagtgga

SEQ ID NO: 3801243 - DNA, 25 bp, Homo sapien
gaagtccaccctcataggtcgtggg

SEQ ID NO: 3801244 - DNA, 25 bp, Homo sapien
accctgagtattccttctggcagtg

SEQ ID NO: 3801245 - DNA, 25 bp, Homo sapien
cctctgcaaaccctgagtattcctt

SEQ ID NO: 3801246 - DNA, 25 bp, Homo sapien
gacagcagggagtttgactgcttca

SEQ ID NO: 3801247 - DNA, 25 bp, Homo sapien
gactgactgttgaagacctaggctg

SEQ ID NO: 3801248 - DNA, 25 bp, Homo sapien
tcagatcaagggaacgaaacagtgg

SEQ ID NO: 3801249 - DNA, 25 bp, Homo sapien
taatacctactgcatagggctggtg

SEQ ID NO: 3801250 - DNA, 25 bp, Homo sapien
tactgacgcaagattggccactgag

SEQ ID NO: 3801251 - DNA, 25 bp, Homo sapien
ccgtgaagtcattctgcaggctcat

SEQ ID NO: 3801252 - DNA, 25 bp, Homo sapien
ctatctgagcatagacggattcgga

SEQ ID NO: 3801253 - DNA, 25 bp, Homo sapien
acggattcggatgcaactggcttcc

SEQ ID NO: 3801254 - DNA, 25 bp, Homo sapien
gcagctgatataagacatccgtgaa

SEQ ID NO: 3801255 - DNA, 25 bp, Homo sapien
tagtgctgtccaccggtgctctgat

SEQ ID NO: 3801256 - DNA, 25 bp, Homo sapien
cacttgttggtaggaggagtaacca

SEQ ID NO: 3801257 - DNA, 25 bp, Homo sapien
gaagtccccacgatgtgcctagtgc

SEQ ID NO: 3801258 - DNA, 25 bp, Homo sapien
tattttactgaacaacacttgttgg

SEQ ID NO: 3801259 - DNA, 25 bp, Homo sapien
ttatctttgaaacgcagagcatccc

SEQ ID NO: 3801260 - DNA, 25 bp, Homo sapien
gagcatccctcccagttttgagtga

SEQ ID NO: 3801261 - DNA, 25 bp, Homo sapien
ttttgagtgactcattctgccacag

SEQ ID NO: 3801262 - DNA, 25 bp, Homo sapien
tattgccgctgacaaagggtgtgtt

SEQ ID NO: 3801263 - DNA, 25 bp, Homo sapien
tcagaaatgtcagctttagcatcca

SEQ ID NO: 3801264 - DNA, 25 bp, Homo sapien
aagaagacccactcaagctccaaaa

SEQ ID NO: 3801265 - DNA, 25 bp, Homo sapien
gcatccatccctacatgtccatcac

SEQ ID NO: 3801266 - DNA, 25 bp, Homo sapien
acaatctaatttgagggactccaag

SEQ ID NO: 3801267 - DNA, 25 bp, Homo sapien
tacaggatgtagttgtgtgagacac

SEQ ID NO: 3801268 - DNA, 25 bp, Homo sapien
tgagtgccgaatgcagagtcctccc

SEQ ID NO: 3801269 - DNA, 25 bp, Homo sapien
tccaatacttacacgggtcccagga

SEQ ID NO: 3801270 - DNA, 25 bp, Homo sapien
gtccatgaattcgttttgagtgccg

SEQ ID NO: 3801271 - DNA, 25 bp, Homo sapien
aggacagacacgatttgagtttttc

SEQ ID NO: 3801272 - DNA, 25 bp, Homo sapien
gcaggtgtctgagcctctcaggaca

SEQ ID NO: 3801273 - DNA, 25 bp, Homo sapien
ggacagacacgatttgagtttttcc

SEQ ID NO: 3801274 - DNA, 25 bp, Homo sapien
caggacagacacgatttgagttttt

SEQ ID NO: 3801275 - DNA, 25 bp, Homo sapien
ggtgtgaggtccagcagaaaagcta

SEQ ID NO: 3801276 - DNA, 25 bp, Homo sapien
ggctgctagggtgagcgctgcagtt

SEQ ID NO: 3801277 - DNA, 25 bp, Homo sapien
catttctttctctattgggtgtgag

SEQ ID NO: 3801278 - DNA, 25 bp, Homo sapien
ttaacgtgcataggagaaccctgtg

SEQ ID NO: 3801279 - DNA, 25 bp, Homo sapien
taggtgaactgaggcttgctccagc

SEQ ID NO: 3801280 - DNA, 25 bp, Homo sapien
caccgtagaaaaatgcggctggtct

SEQ ID NO: 3801281 - DNA, 25 bp, Homo sapien
cagctgttaccaaggtgtgcaccag

SEQ ID NO: 3801282 - DNA, 25 bp, Homo sapien
gctgctgccactaccgagcgttgag

SEQ ID NO: 3801283 - DNA, 25 bp, Homo sapien
acaaggtggcactccgatgcctgca

SEQ ID NO: 3801284 - DNA, 25 bp, Homo sapien
tgcctgcattggaaactgggtcggc

SEQ ID NO: 3801285 - DNA, 25 bp, Homo sapien
cctgcattggaaactgggtcggctg

SEQ ID NO: 3801286 - DNA, 25 bp, Homo sapien
gtggcactccgatgcctgcattgga

SEQ ID NO: 3801287 - DNA, 25 bp, Homo sapien
tttactggtggactgatagtgttat

SEQ ID NO: 3801288 - DNA, 25 bp, Homo sapien
tggtccatagcccatgatttactgg

SEQ ID NO: 3801289 - DNA, 25 bp, Homo sapien
tgatttactggtggactgatagtgt

SEQ ID NO: 3801290 - DNA, 25 bp, Homo sapien
tcagggcattcctatggtccatagc

SEQ ID NO: 3801291 - DNA, 25 bp, Homo sapien
cagcctttcttcacttaaccctggg

SEQ ID NO: 3801292 - DNA, 25 bp, Homo sapien
ctggtggcttggaacagcttttgtt

SEQ ID NO: 3801293 - DNA, 25 bp, Homo sapien
tctgccactggttcagcggtcctca

SEQ ID NO: 3801294 - DNA, 25 bp, Homo sapien
tgatgatttccagtgctggtctaac

SEQ ID NO: 3801295 - DNA, 25 bp, Homo sapien
tgtagcttgcagatatcaggctcca

SEQ ID NO: 3801296 - DNA, 25 bp, Homo sapien
agatatcaggctccattcacgtctc

SEQ ID NO: 3801297 - DNA, 25 bp, Homo sapien
cccctgtcggtgtagcttgcagata

SEQ ID NO: 3801298 - DNA, 25 bp, Homo sapien
ctggcgccccctgtcggtgtagctt

SEQ ID NO: 3801299 - DNA, 25 bp, Homo sapien
actcaaccgaagagagccgagtccg

SEQ ID NO: 3801300 - DNA, 25 bp, Homo sapien
tagtggagagtaggccgaactcaac

SEQ ID NO: 3801301 - DNA, 25 bp, Homo sapien
aacgtagccgaggagagctgagact

SEQ ID NO: 3801302 - DNA, 25 bp, Homo sapien
aggacggcagccagccgaacgtagc

SEQ ID NO: 3801303 - DNA, 25 bp, Homo sapien
gtcgcagccgaacgcagccgaagga

SEQ ID NO: 3801304 - DNA, 25 bp, Homo sapien
cgggtcgcagccgaacgcagccgaa

SEQ ID NO: 3801305 - DNA, 25 bp, Homo sapien
cttccgggtcgcagccgaacgcagc

SEQ ID NO: 3801306 - DNA, 25 bp, Homo sapien
ttccgggtcgcagccgaacgcagcc

SEQ ID NO: 3801307 - DNA, 25 bp, Homo sapien
gcaatccgtcgagccggctgccctg

SEQ ID NO: 3801308 - DNA, 25 bp, Homo sapien
ggcaatccgtcgagccggctgccct

SEQ ID NO: 3801309 - DNA, 25 bp, Homo sapien
caatccgtcgagccggctgccctga

SEQ ID NO: 3801310 - DNA, 25 bp, Homo sapien
tcggccggctgcgtgttgagcacca

SEQ ID NO: 3801311 - DNA, 25 bp, Homo sapien
aaagtggtagaggagccggtccgcg

SEQ ID NO: 3801312 - DNA, 25 bp, Homo sapien
ccgtcagtgtcgagcagttccagca

SEQ ID NO: 3801313 - DNA, 25 bp, Homo sapien
ggcgcacactactagcccgtcagtg

SEQ ID NO: 3801314 - DNA, 25 bp, Homo sapien
gatcatcagacttgtccgaccaagc

SEQ ID NO: 3801315 - DNA, 25 bp, Homo sapien
tatggccctcttaacacagccttgg

SEQ ID NO: 3801316 - DNA, 25 bp, Homo sapien
tctcccggccacctgatatatctag

SEQ ID NO: 3801317 - DNA, 25 bp, Homo sapien
cagggaattgcatccttctcgggac

SEQ ID NO: 3801318 - DNA, 25 bp, Homo sapien
tcctacttgtcgcaaatataacacc

SEQ ID NO: 3801319 - DNA, 25 bp, Homo sapien
gatttcatttgttacacggcgaggg

SEQ ID NO: 3801320 - DNA, 25 bp, Homo sapien
tctatcagtcaagaagtcaaccaca

SEQ ID NO: 3801321 - DNA, 25 bp, Homo sapien
tgtgtaaacttcatagcgactgttg

SEQ ID NO: 3801322 - DNA, 25 bp, Homo sapien
ccacgacccctaccaaaggtgatgt

SEQ ID NO: 3801323 - DNA, 25 bp, Homo sapien
cgacccctaccaaaggtgatgtagg

SEQ ID NO: 3801324 - DNA, 25 bp, Homo sapien
taccaaaggtgatgtagggagctga

SEQ ID NO: 3801325 - DNA, 25 bp, Homo sapien
ccctaccaaaggtgatgtagggagc

SEQ ID NO: 3801326 - DNA, 25 bp, Homo sapien
gagaacaggaacatcgtaacaccaa

SEQ ID NO: 3801327 - DNA, 25 bp, Homo sapien
gggaggccgaaggttccaaatcatg

SEQ ID NO: 3801328 - DNA, 25 bp, Homo sapien
aatgttgcgctccaaaaagttgtct

SEQ ID NO: 3801329 - DNA, 25 bp, Homo sapien
tcatccagcaagcaagtgggaggcc

SEQ ID NO: 3801330 - DNA, 25 bp, Homo sapien
gggcaacatctacattacctatgag

SEQ ID NO: 3801331 - DNA, 25 bp, Homo sapien
tgtacatgattataacacctcagca

SEQ ID NO: 3801332 - DNA, 25 bp, Homo sapien
tcagaagatagtcaattcagaggta

SEQ ID NO: 3801333 - DNA, 25 bp, Homo sapien
tatgaaatgagactactgacccaga

SEQ ID NO: 3801334 - DNA, 25 bp, Homo sapien
cacgtttgtttttctggcgaaagag

SEQ ID NO: 3801335 - DNA, 25 bp, Homo sapien
tattctgtgggctctatacaccaag

SEQ ID NO: 3801336 - DNA, 25 bp, Homo sapien
gaaagaggcgcaagatgaatgcttc

SEQ ID NO: 3801337 - DNA, 25 bp, Homo sapien
accagtatcaaaggcaacagcattg

SEQ ID NO: 3801338 - DNA, 25 bp, Homo sapien
cttggccacagatacagtttcctca

SEQ ID NO: 3801339 - DNA, 25 bp, Homo sapien
ttggccacagatacagtttcctcac

SEQ ID NO: 3801340 - DNA, 25 bp, Homo sapien
ggtaatgttagccaataaatctgct

SEQ ID NO: 3801341 - DNA, 25 bp, Homo sapien
actgcacccggtgtacaactactct

SEQ ID NO: 3801342 - DNA, 25 bp, Homo sapien
taaatctgctgtacacctaaagctg

SEQ ID NO: 3801343 - DNA, 25 bp, Homo sapien
caaaatacatggtagcataggttgc

SEQ ID NO: 3801344 - DNA, 25 bp, Homo sapien
cacttcaagcgatgggttatggcat

SEQ ID NO: 3801345 - DNA, 25 bp, Homo sapien
tagttcctttagacatgcatttaaa

SEQ ID NO: 3801346 - DNA, 25 bp, Homo sapien
ctgtatagcaagcatggtaggtgtc

SEQ ID NO: 3801347 - DNA, 25 bp, Homo sapien
gataaatcttccacttcaagcgatg

SEQ ID NO: 3801348 - DNA, 25 bp, Homo sapien
taacagcaaattcctattaacaaca

SEQ ID NO: 3801349 - DNA, 25 bp, Homo sapien
gagtgatgcttatatgccaatccac

SEQ ID NO: 3801350 - DNA, 25 bp, Homo sapien
tcacttactataactgcaaaagtca

SEQ ID NO: 3801351 - DNA, 25 bp, Homo sapien
cagcaaattcctattaacaacattg

SEQ ID NO: 3801352 - DNA, 25 bp, Homo sapien
aactcttctacctgtagacatccaa

SEQ ID NO: 3801353 - DNA, 25 bp, Homo sapien
gtaaaactcttctacctgtagacat

SEQ ID NO: 3801354 - DNA, 25 bp, Homo sapien
cctgtagacatccaagtgttgtcat

SEQ ID NO: 3801355 - DNA, 25 bp, Homo sapien
tctacctgtagacatccaagtgttg

SEQ ID NO: 3801356 - DNA, 25 bp, Homo sapien
aacaatggactaagtttgattatta

SEQ ID NO: 3801357 - DNA, 25 bp, Homo sapien
aattaacaatggactaagtttgatt

SEQ ID NO: 3801358 - DNA, 25 bp, Homo sapien
ttaacaatggactaagtttgattat

SEQ ID NO: 3801359 - DNA, 25 bp, Homo sapien
taaattaacaatggactaagtttga

SEQ ID NO: 3801360 - DNA, 25 bp, Homo sapien
tagtcttggctccaagctggtgcca

SEQ ID NO: 3801361 - DNA, 25 bp, Homo sapien
tgtgacacaatcatactgagagaga

SEQ ID NO: 3801362 - DNA, 25 bp, Homo sapien
gagagatactgcagcaaagttcgta

SEQ ID NO: 3801363 - DNA, 25 bp, Homo sapien
cctgaactaaggatttagtcttggc

SEQ ID NO: 3801364 - DNA, 25 bp, Homo sapien
ccaagatattttcagggctatgtga

SEQ ID NO: 3801365 - DNA, 25 bp, Homo sapien
tccagtgatggcgtaaaagcaagtt

SEQ ID NO: 3801366 - DNA, 25 bp, Homo sapien
catgacctacatacgtaactggctg

SEQ ID NO: 3801367 - DNA, 25 bp, Homo sapien
gtcgctgttcagctggaccagtggt

SEQ ID NO: 3801368 - DNA, 25 bp, Homo sapien
ttataaacatcgaggtgctggagtc

SEQ ID NO: 3801369 - DNA, 25 bp, Homo sapien
gcatttataaacatcgaggtgctgg

SEQ ID NO: 3801370 - DNA, 25 bp, Homo sapien
ccttgctcgagcatttataaacatc

SEQ ID NO: 3801371 - DNA, 25 bp, Homo sapien
gctcgagcatttataaacatcgagg

SEQ ID NO: 3801372 - DNA, 25 bp, Homo sapien
actcattttggcatctggaagatga

SEQ ID NO: 3801373 - DNA, 25 bp, Homo sapien
tttactcattttggcatctggaaga

SEQ ID NO: 3801374 - DNA, 25 bp, Homo sapien
ttttggcatctggaagatgataaac

SEQ ID NO: 3801375 - DNA, 25 bp, Homo sapien
cattttggcatctggaagatgataa

SEQ ID NO: 3801376 - DNA, 25 bp, Homo sapien
ggaacacacttttcacatggccaaa

SEQ ID NO: 3801377 - DNA, 25 bp, Homo sapien
tgggcaatagactgcaagacttgcc

SEQ ID NO: 3801378 - DNA, 25 bp, Homo sapien
tacatttatcttcaaggaacacact

SEQ ID NO: 3801379 - DNA, 25 bp, Homo sapien
gacttgccatgctgtatacttcgac

SEQ ID NO: 3801380 - DNA, 25 bp, Homo sapien
attcaaatattccatcctgacttta

SEQ ID NO: 3801381 - DNA, 25 bp, Homo sapien
ctcattctagtatatttatgttgct

SEQ ID NO: 3801382 - DNA, 25 bp, Homo sapien
tctagtatatttatgttgcttaaaa

SEQ ID NO: 3801383 - DNA, 25 bp, Homo sapien
taaaaaggatattcaaatattccat

SEQ ID NO: 3801384 - DNA, 25 bp, Homo sapien
tgtgataatatttacccataaagtc

SEQ ID NO: 3801385 - DNA, 25 bp, Homo sapien
catatgcccatttatttaagctttc

SEQ ID NO: 3801386 - DNA, 25 bp, Homo sapien
cagataacacgagcatcagtacata

SEQ ID NO: 3801387 - DNA, 25 bp, Homo sapien
taatgttagatggaatctgctttcc

SEQ ID NO: 3801388 - DNA, 25 bp, Homo sapien
tgggttgctttctaggaccagttcc

SEQ ID NO: 3801389 - DNA, 25 bp, Homo sapien
agagcttcactctccttattttctg

SEQ ID NO: 3801390 - DNA, 25 bp, Homo sapien
ctgcctcaatttcttttaatacttc

SEQ ID NO: 3801391 - DNA, 25 bp, Homo sapien
ttaatacttcagtcagtgcctccca

SEQ ID NO: 3801392 - DNA, 25 bp, Homo sapien
ggaacatgttcggtcatcacttgca

SEQ ID NO: 3801393 - DNA, 25 bp, Homo sapien
gggtcgctgcaacccagaagcggat

SEQ ID NO: 3801394 - DNA, 25 bp, Homo sapien
gggctactgcttatttctcgacgat

SEQ ID NO: 3801395 - DNA, 25 bp, Homo sapien
gaaggcctccgctccaagagtgata

SEQ ID NO: 3801396 - DNA, 25 bp, Homo sapien
agaaccacgtatcttggctccactt

SEQ ID NO: 3801397 - DNA, 25 bp, Homo sapien
aaaggttagctctgcgtcataaaga

SEQ ID NO: 3801398 - DNA, 25 bp, Homo sapien
gcgtcataaagaaccacgtatcttg

SEQ ID NO: 3801399 - DNA, 25 bp, Homo sapien
tagctctgcgtcataaagaaccacg

SEQ ID NO: 3801400 - DNA, 25 bp, Homo sapien
gccctgtaaatttcaagctgccgaa

SEQ ID NO: 3801401 - DNA, 25 bp, Homo sapien
cgccctgtaaatttcaagctgccga

SEQ ID NO: 3801402 - DNA, 25 bp, Homo sapien
tcgccctgtaaatttcaagctgccg

SEQ ID NO: 3801403 - DNA, 25 bp, Homo sapien
ccctgtaaatttcaagctgccgaac

SEQ ID NO: 3801404 - DNA, 25 bp, Homo sapien
ctgggttaaatcctaaagaactgtg

SEQ ID NO: 3801405 - DNA, 25 bp, Homo sapien
tgggttaaatcctaaagaactgtgc

SEQ ID NO: 3801406 - DNA, 25 bp, Homo sapien
gggttaaatcctaaagaactgtgca

SEQ ID NO: 3801407 - DNA, 25 bp, Homo sapien
taaacataagcagcatcgtaacgga

SEQ ID NO: 3801408 - DNA, 25 bp, Homo sapien
gtaacgagaacaagagcagtcccct

SEQ ID NO: 3801409 - DNA, 25 bp, Homo sapien
aataaaggagagaacgcacagcagc

SEQ ID NO: 3801410 - DNA, 25 bp, Homo sapien
tcagatacagtaccccatacgatgc

SEQ ID NO: 3801411 - DNA, 25 bp, Homo sapien
tgatcaacagcacggtacaaaaaat

SEQ ID NO: 3801412 - DNA, 25 bp, Homo sapien
aataccacactattctgttctcagg

SEQ ID NO: 3801413 - DNA, 25 bp, Homo sapien
taattggaaagccagaacactatct

SEQ ID NO: 3801414 - DNA, 25 bp, Homo sapien
tggctccgtttttggttcagactga

SEQ ID NO: 3801415 - DNA, 25 bp, Homo sapien
catgggcatggaagacgtatggatt

SEQ ID NO: 3801416 - DNA, 25 bp, Homo sapien
aataatttgatctactttctcttag

SEQ ID NO: 3801417 - DNA, 25 bp, Homo sapien
tacatcaggcatctcaaagaataat

SEQ ID NO: 3801418 - DNA, 25 bp, Homo sapien
taacagaatacagcggtcacacatt

SEQ ID NO: 3801419 - DNA, 25 bp, Homo sapien
tgagatagcgttgttcctcagttga

SEQ ID NO: 3801420 - DNA, 25 bp, Homo sapien
agcagtgagatagcgttgttcctca

SEQ ID NO: 3801421 - DNA, 25 bp, Homo sapien
tccgcaaagcagtgagatagcgttg

SEQ ID NO: 3801422 - DNA, 25 bp, Homo sapien
cttttctttccgcaaagcagtgaga

SEQ ID NO: 3801423 - DNA, 25 bp, Homo sapien
caaggtggctcatatcttatacggt

SEQ ID NO: 3801424 - DNA, 25 bp, Homo sapien
tatggagtgttcctgcgtggtgctc

SEQ ID NO: 3801425 - DNA, 25 bp, Homo sapien
gcgtggtgctctaggtactttggat

SEQ ID NO: 3801426 - DNA, 25 bp, Homo sapien
tcgtgatcacgcaagaattcctgtc

SEQ ID NO: 3801427 - DNA, 25 bp, Homo sapien
tcttactaggtctaagtttgtttca

SEQ ID NO: 3801428 - DNA, 25 bp, Homo sapien
ccgagtgtcagtggaaacatctgca

SEQ ID NO: 3801429 - DNA, 25 bp, Homo sapien
cggctttccgagtgtcagtggaaac

SEQ ID NO: 3801430 - DNA, 25 bp, Homo sapien
gctgtgcctcttactaggtctaagt

SEQ ID NO: 3801431 - DNA, 25 bp, Homo sapien
ggtcaaactcaatcagaagcacggg

SEQ ID NO: 3801432 - DNA, 25 bp, Homo sapien
ttaacgtggtgcatcaaggagcggc

SEQ ID NO: 3801433 - DNA, 25 bp, Homo sapien
tgtaatggccagtgctgtcgccgca

SEQ ID NO: 3801434 - DNA, 25 bp, Homo sapien
ggttcaatgtcaatgccccgacgat

SEQ ID NO: 3801435 - DNA, 25 bp, Homo sapien
ggaactttacctgatcctgacaaac

SEQ ID NO: 3801436 - DNA, 25 bp, Homo sapien
gcaaggagccgctgaaaagtacagg

SEQ ID NO: 3801437 - DNA, 25 bp, Homo sapien
tggtccaccgtacaatcattaagag

SEQ ID NO: 3801438 - DNA, 25 bp, Homo sapien
tgctaagcccggcatagacggtgca

SEQ ID NO: 3801439 - DNA, 25 bp, Homo sapien
taagagctgagaaacgaggaagtct

SEQ ID NO: 3801440 - DNA, 25 bp, Homo sapien
ttggagagccacaggacatgggtat

SEQ ID NO: 3801441 - DNA, 25 bp, Homo sapien
caaacatcagttcaagcgtccagca

SEQ ID NO: 3801442 - DNA, 25 bp, Homo sapien
cggctcactgccaattaggttgtat

SEQ ID NO: 3801443 - DNA, 25 bp, Homo sapien
gacatattgtctaccgagcttcagg

SEQ ID NO: 3801444 - DNA, 25 bp, Homo sapien
cagcatagcggtttaggctaccaaa

SEQ ID NO: 3801445 - DNA, 25 bp, Homo sapien
tagaaaccacatactgcaagcagaa

SEQ ID NO: 3801446 - DNA, 25 bp, Homo sapien
aaatacatacgagacagtgcacctg

SEQ ID NO: 3801447 - DNA, 25 bp, Homo sapien
agtcttagaaagtaggttatcaaat

SEQ ID NO: 3801448 - DNA, 25 bp, Homo sapien
tcttagaaagtaggttatcaaatga

SEQ ID NO: 3801449 - DNA, 25 bp, Homo sapien
tttcctccttaaggagacatgatac

SEQ ID NO: 3801450 - DNA, 25 bp, Homo sapien
tcctccttaaggagacatgatacag

SEQ ID NO: 3801451 - DNA, 25 bp, Homo sapien
ttgtgggtcactcccttgaaattcc

SEQ ID NO: 3801452 - DNA, 25 bp, Homo sapien
ggctgctggatgactcagtttcttc

SEQ ID NO: 3801453 - DNA, 25 bp, Homo sapien
caactcctgatgttgtgggtcactc

SEQ ID NO: 3801454 - DNA, 25 bp, Homo sapien
tatcttgccacctcctaagtgtagg

SEQ ID NO: 3801455 - DNA, 25 bp, Homo sapien
acacaggatgaccagcgctgtcttc

SEQ ID NO: 3801456 - DNA, 25 bp, Homo sapien
aggatgaccagcgctgtcttcattg

SEQ ID NO: 3801457 - DNA, 25 bp, Homo sapien
acaggatgaccagcgctgtcttcat

SEQ ID NO: 3801458 - DNA, 25 bp, Homo sapien
gatgaccagcgctgtcttcattgtt

SEQ ID NO: 3801459 - DNA, 25 bp, Homo sapien
attggcgagtgagagttgctgaaca

SEQ ID NO: 3801460 - DNA, 25 bp, Homo sapien
gagagttgctgaacatcgactttca

SEQ ID NO: 3801461 - DNA, 25 bp, Homo sapien
catcgactttcagtttccagatgac

SEQ ID NO: 3801462 - DNA, 25 bp, Homo sapien
caagttgtaggattggcgagtgaga

SEQ ID NO: 3801463 - DNA, 25 bp, Homo sapien
acagctgaggacatgggttctttgc

SEQ ID NO: 3801464 - DNA, 25 bp, Homo sapien
tcgaaaccggcgaacagcctgaaga

SEQ ID NO: 3801465 - DNA, 25 bp, Homo sapien
tgcttttcaagacgactgaactttc

SEQ ID NO: 3801466 - DNA, 25 bp, Homo sapien
tcatctgttcgacttgggctatctt

SEQ ID NO: 3801467 - DNA, 25 bp, Homo sapien
cacaaaagcttctccaggtcagctc

SEQ ID NO: 3801468 - DNA, 25 bp, Homo sapien
tcacaaaagcttctccaggtcagct

SEQ ID NO: 3801469 - DNA, 25 bp, Homo sapien
ggtcagctctcaggaaaacattaca

SEQ ID NO: 3801470 - DNA, 25 bp, Homo sapien
gctctcaggaaaacattacaaagat

SEQ ID NO: 3801471 - DNA, 25 bp, Homo sapien
cctcttggggtaccaagccagcatg

SEQ ID NO: 3801472 - DNA, 25 bp, Homo sapien
ccaagccagcatggagttagctgct

SEQ ID NO: 3801473 - DNA, 25 bp, Homo sapien
gggtaccaagccagcatggagttag

SEQ ID NO: 3801474 - DNA, 25 bp, Homo sapien
gccagcatggagttagctgctgcca

SEQ ID NO: 3801475 - DNA, 25 bp, Homo sapien
aaattggtgacttgtacggtgtacg

SEQ ID NO: 3801476 - DNA, 25 bp, Homo sapien
ggaacacttcctttctatagagaca

SEQ ID NO: 3801477 - DNA, 25 bp, Homo sapien
tgaaggaagtcagattcaaaggtcc

SEQ ID NO: 3801478 - DNA, 25 bp, Homo sapien
tatggaacgtctagaataggaacac

SEQ ID NO: 3801479 - DNA, 25 bp, Homo sapien
aggtcgttgcctgccctgtagtttg

SEQ ID NO: 3801480 - DNA, 25 bp, Homo sapien
gtttgcacctgcgttgagtaaacag

SEQ ID NO: 3801481 - DNA, 25 bp, Homo sapien
tgcgttgagtaaacagtacgttctc

SEQ ID NO: 3801482 - DNA, 25 bp, Homo sapien
gtaaacagtacgttctcgctgccac

SEQ ID NO: 3801483 - DNA, 25 bp, Homo sapien
ttccaggaaacaatgaccacagcca

SEQ ID NO: 3801484 - DNA, 25 bp, Homo sapien
gccagtccagggaactgtgctcttt

SEQ ID NO: 3801485 - DNA, 25 bp, Homo sapien
agccagtccagggaactgtgctctt

SEQ ID NO: 3801486 - DNA, 25 bp, Homo sapien
ccggccgggtgcgcgtgcgcatgcg

SEQ ID NO: 3801487 - DNA, 25 bp, Homo sapien
gccgggtgcgcgtgcgcatgcgcat

SEQ ID NO: 3801488 - DNA, 25 bp, Homo sapien
ctggccggccgggtgcgcgtgcgca

SEQ ID NO: 3801489 - DNA, 25 bp, Homo sapien
ggccggccgggtgcgcgtgcgcatg

SEQ ID NO: 3801490 - DNA, 25 bp, Homo sapien
ttaggaacgagacaaaagccctgga

SEQ ID NO: 3801491 - DNA, 25 bp, Homo sapien
aaacaatggttcttgaccacttggg

SEQ ID NO: 3801492 - DNA, 25 bp, Homo sapien
ctctgaagcctggtcgggaccccag

SEQ ID NO: 3801493 - DNA, 25 bp, Homo sapien
gaaacccatataccaagctgcatcc

SEQ ID NO: 3801494 - DNA, 25 bp, Homo sapien
tgtcttccagcacaagagtatgtcc

SEQ ID NO: 3801495 - DNA, 25 bp, Homo sapien
tgtgaatggtacagcaacatctgtc

SEQ ID NO: 3801496 - DNA, 25 bp, Homo sapien
tactcattagaagctggcacaagca

SEQ ID NO: 3801497 - DNA, 25 bp, Homo sapien
gcacaagcaccccagtatatactgt

SEQ ID NO: 3801498 - DNA, 25 bp, Homo sapien
taaggtataccacggaactagcttc

SEQ ID NO: 3801499 - DNA, 25 bp, Homo sapien
tacacaggtctccagctaaggtata

SEQ ID NO: 3801500 - DNA, 25 bp, Homo sapien
taacaactataattcactgagatcc

SEQ ID NO: 3801501 - DNA, 25 bp, Homo sapien
caatttaaggacgtcccatttgaga

SEQ ID NO: 3801502 - DNA, 25 bp, Homo sapien
tggaccaagggcactaagcgatgag

SEQ ID NO: 3801503 - DNA, 25 bp, Homo sapien
gagggaatggcaacctcagcccatg

SEQ ID NO: 3801504 - DNA, 25 bp, Homo sapien
agcccatgttggcaacaaaggtggg

SEQ ID NO: 3801505 - DNA, 25 bp, Homo sapien
cattcttacaggcactattgctcct

SEQ ID NO: 3801506 - DNA, 25 bp, Homo sapien
tctctttcttagcacctttattgtg

SEQ ID NO: 3801507 - DNA, 25 bp, Homo sapien
attctctttcttagcacctttattg

SEQ ID NO: 3801508 - DNA, 25 bp, Homo sapien
ctttcttagcacctttattgtgaac

SEQ ID NO: 3801509 - DNA, 25 bp, Homo sapien
tctttcttagcacctttattgtgaa

SEQ ID NO: 3801510 - DNA, 25 bp, Homo sapien
agaatatttaattattttcctgtct

SEQ ID NO: 3801511 - DNA, 25 bp, Homo sapien
tctccctgttagacctcaagaaagc

SEQ ID NO: 3801512 - DNA, 25 bp, Homo sapien
tctaggttctatgaacttaaccact

SEQ ID NO: 3801513 - DNA, 25 bp, Homo sapien
cacattcctggcatctaccttaaga

SEQ ID NO: 3801514 - DNA, 25 bp, Homo sapien
tatgaacttaaccactcctaaaaca

SEQ ID NO: 3801515 - DNA, 25 bp, Homo sapien
tgttcgtatctcaccaaaagtagct

SEQ ID NO: 3801516 - DNA, 25 bp, Homo sapien
aatgtgtataatctctgacccagca

SEQ ID NO: 3801517 - DNA, 25 bp, Homo sapien
taaaagatggaacattaggcagcca

SEQ ID NO: 3801518 - DNA, 25 bp, Homo sapien
tccaattcccgcagagatgtacaaa

SEQ ID NO: 3801519 - DNA, 25 bp, Homo sapien
ctgggattataaccatgccttgcta

SEQ ID NO: 3801520 - DNA, 25 bp, Homo sapien
tgggattataaccatgccttgctaa

SEQ ID NO: 3801521 - DNA, 25 bp, Homo sapien
caaaatacctaaatatagtaccttg

SEQ ID NO: 3801522 - DNA, 25 bp, Homo sapien
gatttaaattggagaggaactcaaa

SEQ ID NO: 3801523 - DNA, 25 bp, Homo sapien
aatacacacaaaccctctgccctca

SEQ ID NO: 3801524 - DNA, 25 bp, Homo sapien
gtttcttccctacaattgaccacca

SEQ ID NO: 3801525 - DNA, 25 bp, Homo sapien
acacacacttcgggatgatggtggt

SEQ ID NO: 3801526 - DNA, 25 bp, Homo sapien
aaacacacacttcgggatgatggtg

SEQ ID NO: 3801527 - DNA, 25 bp, Homo sapien
cacacacttcgggatgatggtggtt

SEQ ID NO: 3801528 - DNA, 25 bp, Homo sapien
aacacacacttcgggatgatggtgg

SEQ ID NO: 3801529 - DNA, 25 bp, Homo sapien
tgtgaggcgcacagcagagctatga

SEQ ID NO: 3801530 - DNA, 25 bp, Homo sapien
tctggcaacataacacggctataca

SEQ ID NO: 3801531 - DNA, 25 bp, Homo sapien
cccgcctctggtgtaagacaaagat

SEQ ID NO: 3801532 - DNA, 25 bp, Homo sapien
tagcccaggcataatacaggttagc

SEQ ID NO: 3801533 - DNA, 25 bp, Homo sapien
gcctcttaaacacggcctattgaag

SEQ ID NO: 3801534 - DNA, 25 bp, Homo sapien
agtgtaagacgcctcttaaacacgg

SEQ ID NO: 3801535 - DNA, 25 bp, Homo sapien
gggagtgtaagacgcctcttaaaca

SEQ ID NO: 3801536 - DNA, 25 bp, Homo sapien
taagacgcctcttaaacacggccta

SEQ ID NO: 3801537 - DNA, 25 bp, Homo sapien
ctcggtgtctatcgcccctgtgtga

SEQ ID NO: 3801538 - DNA, 25 bp, Homo sapien
cttggagcaagatgggctaaaggtc

SEQ ID NO: 3801539 - DNA, 25 bp, Homo sapien
tctgaggacttggagcaagatgggc

SEQ ID NO: 3801540 - DNA, 25 bp, Homo sapien
gctaaaggtcccacttcatcctcgg

SEQ ID NO: 3801541 - DNA, 25 bp, Homo sapien
tagtcatcactgagatagctttgcc

SEQ ID NO: 3801542 - DNA, 25 bp, Homo sapien
caaagatcccattgcacatgctgaa

SEQ ID NO: 3801543 - DNA, 25 bp, Homo sapien
tgcaacacaccggagatggagaaag

SEQ ID NO: 3801544 - DNA, 25 bp, Homo sapien
aaaaccatccagtacctctacaggg

SEQ ID NO: 3801545 - DNA, 25 bp, Homo sapien
gagtgtgggactcatcagaactgtg

SEQ ID NO: 3801546 - DNA, 25 bp, Homo sapien
tttttaatgtgcatgcttagagtgt

SEQ ID NO: 3801547 - DNA, 25 bp, Homo sapien
tctggaatatctctgtgagcgatga

SEQ ID NO: 3801548 - DNA, 25 bp, Homo sapien
ctgtggaaggtatagtaattccaga

SEQ ID NO: 3801549 - DNA, 25 bp, Homo sapien
ggtcaagggctgtgcctagcaacaa

SEQ ID NO: 3801550 - DNA, 25 bp, Homo sapien
ggaggactggaaaacactcaggacc

SEQ ID NO: 3801551 - DNA, 25 bp, Homo sapien
gaaggtttcacagcacctaagctaa

SEQ ID NO: 3801552 - DNA, 25 bp, Homo sapien
tctgacagccaaataaggatgcctt

SEQ ID NO: 3801553 - DNA, 25 bp, Homo sapien
taaaggtagattatgcatgtgtttc

SEQ ID NO: 3801554 - DNA, 25 bp, Homo sapien
atgaagctcaatcccctgtatatgc

SEQ ID NO: 3801555 - DNA, 25 bp, Homo sapien
cattaaggcctcacttgttaggaaa

SEQ ID NO: 3801556 - DNA, 25 bp, Homo sapien
atgcaaatcgtgagaaagatggatc

SEQ ID NO: 3801557 - DNA, 25 bp, Homo sapien
atgttgtttctacccactttgtctt

SEQ ID NO: 3801558 - DNA, 25 bp, Homo sapien
ccctcagagtgtaggcacaggcaaa

SEQ ID NO: 3801559 - DNA, 25 bp, Homo sapien
ttgcacacgacctcaggaaggaaca

SEQ ID NO: 3801560 - DNA, 25 bp, Homo sapien
tgctctgcctgtcagcttaccggtc

SEQ ID NO: 3801561 - DNA, 25 bp, Homo sapien
tacaaaagtctaaatcagctggcct

SEQ ID NO: 3801562 - DNA, 25 bp, Homo sapien
ttattgaggcctaaaacacactgac

SEQ ID NO: 3801563 - DNA, 25 bp, Homo sapien
gttccatggctaggcaaagttcacc

SEQ ID NO: 3801564 - DNA, 25 bp, Homo sapien
tttctatagtgtgaggcaagcagct

SEQ ID NO: 3801565 - DNA, 25 bp, Homo sapien
atcagaatgtttattgatgtccttg

SEQ ID NO: 3801566 - DNA, 25 bp, Homo sapien
tccagatcctaaatatgttaacagc

SEQ ID NO: 3801567 - DNA, 25 bp, Homo sapien
tgttaacagcaaagccaacgacaag

SEQ ID NO: 3801568 - DNA, 25 bp, Homo sapien
gagaattacatgaaacactccagat

SEQ ID NO: 3801569 - DNA, 25 bp, Homo sapien
ttctcagtgtaagtactctaactcc

SEQ ID NO: 3801570 - DNA, 25 bp, Homo sapien
tttctcagtgtaagtactctaactc

SEQ ID NO: 3801571 - DNA, 25 bp, Homo sapien
tctcagtgtaagtactctaactcct

SEQ ID NO: 3801572 - DNA, 25 bp, Homo sapien
tcgctccaaacacactgcatgggtg

SEQ ID NO: 3801573 - DNA, 25 bp, Homo sapien
ggtgcttatttacactgtgaatcaa

SEQ ID NO: 3801574 - DNA, 25 bp, Homo sapien
tgaaagagaatacctcacccttaag

SEQ ID NO: 3801575 - DNA, 25 bp, Homo sapien
gcatgggtgtgctctgcaatgcact

SEQ ID NO: 3801576 - DNA, 25 bp, Homo sapien
tcccgcaggagatcaaactcactgc

SEQ ID NO: 3801577 - DNA, 25 bp, Homo sapien
cgcaggagatcaaactcactgccag

SEQ ID NO: 3801578 - DNA, 25 bp, Homo sapien
ctactcccgcaggagatcaaactca

SEQ ID NO: 3801579 - DNA, 25 bp, Homo sapien
actcccgcaggagatcaaactcact

SEQ ID NO: 3801580 - DNA, 25 bp, Homo sapien
caagaggtccttgtgactgagttac

SEQ ID NO: 3801581 - DNA, 25 bp, Homo sapien
cagacataagtaaacggagccccac

SEQ ID NO: 3801582 - DNA, 25 bp, Homo sapien
caaaggtatttcaacaagaggacac

SEQ ID NO: 3801583 - DNA, 25 bp, Homo sapien
taggtatggtagagaacaggtgtcc

SEQ ID NO: 3801584 - DNA, 25 bp, Homo sapien
ccatgctcacagactgagtcagcag

SEQ ID NO: 3801585 - DNA, 25 bp, Homo sapien
agaggagactgaagtcctgactccc

SEQ ID NO: 3801586 - DNA, 25 bp, Homo sapien
cagcagaggagactgaagtcctgac

SEQ ID NO: 3801587 - DNA, 25 bp, Homo sapien
tcctgactcccaaaagactacactt

SEQ ID NO: 3801588 - DNA, 25 bp, Homo sapien
tttagtgcaacagagcacgctcctg

SEQ ID NO: 3801589 - DNA, 25 bp, Homo sapien
gaatcgcaaatctgcagagtgctga

SEQ ID NO: 3801590 - DNA, 25 bp, Homo sapien
tccttcctataatacgtggcagtgg

SEQ ID NO: 3801591 - DNA, 25 bp, Homo sapien
tcaaggcttctgtcaaagagggtct

SEQ ID NO: 3801592 - DNA, 25 bp, Homo sapien
cagagaatgctaggattgtgggaac

SEQ ID NO: 3801593 - DNA, 25 bp, Homo sapien
gaactggcagtaccaacaagagatg

SEQ ID NO: 3801594 - DNA, 25 bp, Homo sapien
gagcaaaagttactgggacgaccaa

SEQ ID NO: 3801595 - DNA, 25 bp, Homo sapien
taaatcagtcctcgatgacagaggg

SEQ ID NO: 3801596 - DNA, 25 bp, Homo sapien
aaaactttatacctcattagctagc

SEQ ID NO: 3801597 - DNA, 25 bp, Homo sapien
ccaggtagctttagaaccaacaata

SEQ ID NO: 3801598 - DNA, 25 bp, Homo sapien
gctaagttgcccttgctatcttgaa

SEQ ID NO: 3801599 - DNA, 25 bp, Homo sapien
tctaggcaagttcaacaaggtagat

SEQ ID NO: 3801600 - DNA, 25 bp, Homo sapien
gacacccagggtagaattatactta

SEQ ID NO: 3801601 - DNA, 25 bp, Homo sapien
ttatactggcgtgtagaagtccttc

SEQ ID NO: 3801602 - DNA, 25 bp, Homo sapien
tacctcttcttactggacgagttga

SEQ ID NO: 3801603 - DNA, 25 bp, Homo sapien
tataccagtttatgtacccaccaac

SEQ ID NO: 3801604 - DNA, 25 bp, Homo sapien
ggaaactgtttctaggagccaagac

SEQ ID NO: 3801605 - DNA, 25 bp, Homo sapien
actgcagacaagagtggcatgccta

SEQ ID NO: 3801606 - DNA, 25 bp, Homo sapien
ggacatcacaggacacacagtctgc

SEQ ID NO: 3801607 - DNA, 25 bp, Homo sapien
cacagaggagcatcagactagaaag

SEQ ID NO: 3801608 - DNA, 25 bp, Homo sapien
tcaaaccccttgactcatgcaagct

SEQ ID NO: 3801609 - DNA, 25 bp, Homo sapien
ggtaactcaaactgtctcttcatag

SEQ ID NO: 3801610 - DNA, 25 bp, Homo sapien
ccatgcatggcttacaatttcttta

SEQ ID NO: 3801611 - DNA, 25 bp, Homo sapien
aatgaatacggaagccacagaccag

SEQ ID NO: 3801612 - DNA, 25 bp, Homo sapien
ccagattgtggttgcaagggaacct

SEQ ID NO: 3801613 - DNA, 25 bp, Homo sapien
cccagattgtggttgcaagggaacc

SEQ ID NO: 3801614 - DNA, 25 bp, Homo sapien
cacccagattgtggttgcaagggaa

SEQ ID NO: 3801615 - DNA, 25 bp, Homo sapien
tcacccagattgtggttgcaaggga

SEQ ID NO: 3801616 - DNA, 25 bp, Homo sapien
ctctgtctcccacgttcaagagagt

SEQ ID NO: 3801617 - DNA, 25 bp, Homo sapien
tctcccacgttcaagagagtcttct

SEQ ID NO: 3801618 - DNA, 25 bp, Homo sapien
tctgtctcccacgttcaagagagtc

SEQ ID NO: 3801619 - DNA, 25 bp, Homo sapien
tgtctcccacgttcaagagagtctt

SEQ ID NO: 3801620 - DNA, 25 bp, Homo sapien
tagatgcacaactacaccagccact

SEQ ID NO: 3801621 - DNA, 25 bp, Homo sapien
tatctcttaagaaacctctgcatgc

SEQ ID NO: 3801622 - DNA, 25 bp, Homo sapien
gcccaactgtttttaggtcacaatc

SEQ ID NO: 3801623 - DNA, 25 bp, Homo sapien
gaaaacacattattctgctgtaggt

SEQ ID NO: 3801624 - DNA, 25 bp, Homo sapien
gcagccattaccctttagttcccag

SEQ ID NO: 3801625 - DNA, 25 bp, Homo sapien
agtgcggtgcgcagaacactctggt

SEQ ID NO: 3801626 - DNA, 25 bp, Homo sapien
cttaatttgcagaagagcgaagtgc

SEQ ID NO: 3801627 - DNA, 25 bp, Homo sapien
tcactggccaattatgtctttaagc

SEQ ID NO: 3801628 - DNA, 25 bp, Homo sapien
tggttgctcccctcaaggcattcct

SEQ ID NO: 3801629 - DNA, 25 bp, Homo sapien
gctgcttcttggagctatcgatcat

SEQ ID NO: 3801630 - DNA, 25 bp, Homo sapien
taatggttcaaaatccccagcagtt

SEQ ID NO: 3801631 - DNA, 25 bp, Homo sapien
cttccttgagacttttctggttgct

SEQ ID NO: 3801632 - DNA, 25 bp, Homo sapien
ggtaacagacagacacgctcagctg

SEQ ID NO: 3801633 - DNA, 25 bp, Homo sapien
caaaatgaggactggctgtacaagt

SEQ ID NO: 3801634 - DNA, 25 bp, Homo sapien
tagtaacagctacccagaacagcat

SEQ ID NO: 3801635 - DNA, 25 bp, Homo sapien
gaaatggcctctccgaaaagacaga

SEQ ID NO: 3801636 - DNA, 25 bp, Homo sapien
gcactacttagaccaattaactcta

SEQ ID NO: 3801637 - DNA, 25 bp, Homo sapien
tacttagaccaattaactctacatt

SEQ ID NO: 3801638 - DNA, 25 bp, Homo sapien
tcaaagcactacttagaccaattaa

SEQ ID NO: 3801639 - DNA, 25 bp, Homo sapien
ttagaccaattaactctacatttac

SEQ ID NO: 3801640 - DNA, 25 bp, Homo sapien
tcattagctgatgggatcaagtgcc

SEQ ID NO: 3801641 - DNA, 25 bp, Homo sapien
gctaatagcaaagacagtgcagctc

SEQ ID NO: 3801642 - DNA, 25 bp, Homo sapien
agcaaagcactgagtagcgttgtcc

SEQ ID NO: 3801643 - DNA, 25 bp, Homo sapien
tacactagcataaggtgaaatgcca

SEQ ID NO: 3801644 - DNA, 25 bp, Homo sapien
tcacactgcacgctagatatctata

SEQ ID NO: 3801645 - DNA, 25 bp, Homo sapien
gatgatggtaggaacgaagacaaaa

SEQ ID NO: 3801646 - DNA, 25 bp, Homo sapien
caacaccgtttcacttcattgcggg

SEQ ID NO: 3801647 - DNA, 25 bp, Homo sapien
tctatgggcaagtgattatcatggg

SEQ ID NO: 3801648 - DNA, 25 bp, Homo sapien
aacatggcggccctacgccagcctt

SEQ ID NO: 3801649 - DNA, 25 bp, Homo sapien
gccttacttccgggagccacgtcag

SEQ ID NO: 3801650 - DNA, 25 bp, Homo sapien
cctacgccagccttacttccgggag

SEQ ID NO: 3801651 - DNA, 25 bp, Homo sapien
cttacttccgggagccacgtcagcg

SEQ ID NO: 3801652 - DNA, 25 bp, Homo sapien
cttttcttggtctattagtcgtctc

SEQ ID NO: 3801653 - DNA, 25 bp, Homo sapien
agaataagtggaaaaacgatgctac

SEQ ID NO: 3801654 - DNA, 25 bp, Homo sapien
ctcctcttccgcatcaaacagtgaa

SEQ ID NO: 3801655 - DNA, 25 bp, Homo sapien
gtggaaaaacgatgctactggatgt

SEQ ID NO: 3801656 - DNA, 25 bp, Homo sapien
gaagacagacgatgattgcactgac

SEQ ID NO: 3801657 - DNA, 25 bp, Homo sapien
ctgagcaattcacagagaagacaga

SEQ ID NO: 3801658 - DNA, 25 bp, Homo sapien
ttcacagagaagacagacgatgatt

SEQ ID NO: 3801659 - DNA, 25 bp, Homo sapien
caggtaataaagctgctgctgagca

SEQ ID NO: 3801660 - DNA, 25 bp, Homo sapien
taggccaaccattagtctacctgtg

SEQ ID NO: 3801661 - DNA, 25 bp, Homo sapien
aggccaaccattagtctacctgtga

SEQ ID NO: 3801662 - DNA, 25 bp, Homo sapien
gaagcgtgcactgaaggcaagtatc

SEQ ID NO: 3801663 - DNA, 25 bp, Homo sapien
agcgtgcactgaaggcaagtatcac

SEQ ID NO: 3801664 - DNA, 25 bp, Homo sapien
aggagaagcgtgcactgaaggcaag

SEQ ID NO: 3801665 - DNA, 25 bp, Homo sapien
gagaagcgtgcactgaaggcaagta

SEQ ID NO: 3801666 - DNA, 25 bp, Homo sapien
aggttggcaccttgtagcaccacac

SEQ ID NO: 3801667 - DNA, 25 bp, Homo sapien
atcatctccagtgttttgtcttaaa

SEQ ID NO: 3801668 - DNA, 25 bp, Homo sapien
tctgatcatctccagtgttttgtct

SEQ ID NO: 3801669 - DNA, 25 bp, Homo sapien
aaatataaagtagccatgctggtta

SEQ ID NO: 3801670 - DNA, 25 bp, Homo sapien
tccaaaatataaagtagccatgctg

SEQ ID NO: 3801671 - DNA, 25 bp, Homo sapien
ggaatgtgcatacctacaccacaga

SEQ ID NO: 3801672 - DNA, 25 bp, Homo sapien
tgcaacatggactaagctctaaaag

SEQ ID NO: 3801673 - DNA, 25 bp, Homo sapien
tacatggccgtgtgcatacctatgg

SEQ ID NO: 3801674 - DNA, 25 bp, Homo sapien
gccaacactcctcgttgcaacatgg

SEQ ID NO: 3801675 - DNA, 25 bp, Homo sapien
tccacttatattaactgggccttaa

SEQ ID NO: 3801676 - DNA, 25 bp, Homo sapien
taatctgctgattaagacttcaaca

SEQ ID NO: 3801677 - DNA, 25 bp, Homo sapien
atataaagttttgcaccttcaaagc

SEQ ID NO: 3801678 - DNA, 25 bp, Homo sapien
tacagttacatagattgctttaaga

SEQ ID NO: 3801679 - DNA, 25 bp, Homo sapien
tttttcaaacagatgtcagggtagt

SEQ ID NO: 3801680 - DNA, 25 bp, Homo sapien
tgagcaagccgaggcaaagcatggc

SEQ ID NO: 3801681 - DNA, 25 bp, Homo sapien
tatctgtgagttagagagaagctcc

SEQ ID NO: 3801682 - DNA, 25 bp, Homo sapien
gaaggcctgatcctgtaaaaacaag

SEQ ID NO: 3801683 - DNA, 25 bp, Homo sapien
gttctctcgtcctcctttgttgcag

SEQ ID NO: 3801684 - DNA, 25 bp, Homo sapien
tgccctggtccactagttgttctct

SEQ ID NO: 3801685 - DNA, 25 bp, Homo sapien
tagttgttctctcgtcctcctttgt

SEQ ID NO: 3801686 - DNA, 25 bp, Homo sapien
ggtccactagttgttctctcgtcct

SEQ ID NO: 3801687 - DNA, 25 bp, Homo sapien
aagacttgaccaatcagctcttaca

SEQ ID NO: 3801688 - DNA, 25 bp, Homo sapien
gcaagacttgaccaatcagctctta

SEQ ID NO: 3801689 - DNA, 25 bp, Homo sapien
cttgaccaatcagctcttacagcat

SEQ ID NO: 3801690 - DNA, 25 bp, Homo sapien
gacttgaccaatcagctcttacagc

SEQ ID NO: 3801691 - DNA, 25 bp, Homo sapien
tgttcatggaatgccgctgggctct

SEQ ID NO: 3801692 - DNA, 25 bp, Homo sapien
catggaatgccgctgggctcttcaa

SEQ ID NO: 3801693 - DNA, 25 bp, Homo sapien
tatctgttcatggaatgccgctggg

SEQ ID NO: 3801694 - DNA, 25 bp, Homo sapien
tggaatgccgctgggctcttcaaag

SEQ ID NO: 3801695 - DNA, 25 bp, Homo sapien
gactccgaatcttgtgtttcaaaaa

SEQ ID NO: 3801696 - DNA, 25 bp, Homo sapien
tcagaacgatctggtcgactccgaa

SEQ ID NO: 3801697 - DNA, 25 bp, Homo sapien
aagttcagaacgatctggtcgactc

SEQ ID NO: 3801698 - DNA, 25 bp, Homo sapien
gatctggtcgactccgaatcttgtg

SEQ ID NO: 3801699 - DNA, 25 bp, Homo sapien
ccaaagtagagaaagggacatacct

SEQ ID NO: 3801700 - DNA, 25 bp, Homo sapien
agggacatacctctcacctcctgcc

SEQ ID NO: 3801701 - DNA, 25 bp, Homo sapien
aagggacatacctctcacctcctgc

SEQ ID NO: 3801702 - DNA, 25 bp, Homo sapien
tctgctagtcgagctcttttcaact

SEQ ID NO: 3801703 - DNA, 25 bp, Homo sapien
tgtttttctctaccagctccatagg

SEQ ID NO: 3801704 - DNA, 25 bp, Homo sapien
catctgagtagcctgcagggatggc

SEQ ID NO: 3801705 - DNA, 25 bp, Homo sapien
ttcagatcatctgctagtcgagctc

SEQ ID NO: 3801706 - DNA, 25 bp, Homo sapien
caaatagtaaatttttagagtcttg

SEQ ID NO: 3801707 - DNA, 25 bp, Homo sapien
cttatgttggctttggaataccaag

SEQ ID NO: 3801708 - DNA, 25 bp, Homo sapien
gacttatgttggctttggaatacca

SEQ ID NO: 3801709 - DNA, 25 bp, Homo sapien
acttatgttggctttggaataccaa

SEQ ID NO: 3801710 - DNA, 25 bp, Homo sapien
tgacttatgttggctttggaatacc

SEQ ID NO: 3801711 - DNA, 25 bp, Homo sapien
ctgcgctggagtgtttgtagtcaca

SEQ ID NO: 3801712 - DNA, 25 bp, Homo sapien
caaatgagaaatcgccctgagtgtg

SEQ ID NO: 3801713 - DNA, 25 bp, Homo sapien
gagatggcgattcactaacttttgg

SEQ ID NO: 3801714 - DNA, 25 bp, Homo sapien
gctggtccggagacaaagcgtcact

SEQ ID NO: 3801715 - DNA, 25 bp, Homo sapien
tgatcactgatgttcaaggtgtcgc

SEQ ID NO: 3801716 - DNA, 25 bp, Homo sapien
gccacctctccctatttctagtgtt

SEQ ID NO: 3801717 - DNA, 25 bp, Homo sapien
ctgatgttcaaggtgtcgctatgtt

SEQ ID NO: 3801718 - DNA, 25 bp, Homo sapien
cctctccctatttctagtgttctta

SEQ ID NO: 3801719 - DNA, 25 bp, Homo sapien
acctctgctcccttgtctcaggtga

SEQ ID NO: 3801720 - DNA, 25 bp, Homo sapien
caacctctgctcccttgtctcaggt

SEQ ID NO: 3801721 - DNA, 25 bp, Homo sapien
aacctctgctcccttgtctcaggtg

SEQ ID NO: 3801722 - DNA, 25 bp, Homo sapien
cctctgctcccttgtctcaggtgat

SEQ ID NO: 3801723 - DNA, 25 bp, Homo sapien
tgtgagaactgactactacaaatgc

SEQ ID NO: 3801724 - DNA, 25 bp, Homo sapien
tacattgatcgcttgatggtgtcct

SEQ ID NO: 3801725 - DNA, 25 bp, Homo sapien
cacactgtagtaggtgtagtaggcc

SEQ ID NO: 3801726 - DNA, 25 bp, Homo sapien
tataatgtgcgttcctgcgggtgtc

SEQ ID NO: 3801727 - DNA, 25 bp, Homo sapien
tatgcctgttcacagattctacgga

SEQ ID NO: 3801728 - DNA, 25 bp, Homo sapien
ctgacatcattcacaaactacgttg

SEQ ID NO: 3801729 - DNA, 25 bp, Homo sapien
tacgttgttatatactgtgtggcca

SEQ ID NO: 3801730 - DNA, 25 bp, Homo sapien
catatggctttgagttactatctgg

SEQ ID NO: 3801731 - DNA, 25 bp, Homo sapien
tgacccgaatgcatcccattaggcc

SEQ ID NO: 3801732 - DNA, 25 bp, Homo sapien
caaattttgacatgaggtttgaagg

SEQ ID NO: 3801733 - DNA, 25 bp, Homo sapien
agcaaatccttataagatatatgat

SEQ ID NO: 3801734 - DNA, 25 bp, Homo sapien
aagctctcacgggaactaatgcagt

SEQ ID NO: 3801735 - DNA, 25 bp, Homo sapien
tagtgaggatctgcacgtatccctg

SEQ ID NO: 3801736 - DNA, 25 bp, Homo sapien
tacaggttacaggtctcacgagggc

SEQ ID NO: 3801737 - DNA, 25 bp, Homo sapien
aatctagtggacgttcagtgggtac

SEQ ID NO: 3801738 - DNA, 25 bp, Homo sapien
gaagtcagagcaaacctctcagctg

SEQ ID NO: 3801739 - DNA, 25 bp, Homo sapien
agtgactgaagatagtgtgatgaat

SEQ ID NO: 3801740 - DNA, 25 bp, Homo sapien
ctggcaagctattttaccagtccag

SEQ ID NO: 3801741 - DNA, 25 bp, Homo sapien
cagcccccagtgactgaagatagtg

SEQ ID NO: 3801742 - DNA, 25 bp, Homo sapien
gcaagctattttaccagtccagccc

SEQ ID NO: 3801743 - DNA, 25 bp, Homo sapien
atatattttggtaagactgatctgt

SEQ ID NO: 3801744 - DNA, 25 bp, Homo sapien
cataaatgtgctttacaccctctgt

SEQ ID NO: 3801745 - DNA, 25 bp, Homo sapien
tctccaaatctgactagaactctca

SEQ ID NO: 3801746 - DNA, 25 bp, Homo sapien
taccgacaacattatctctccatag

SEQ ID NO: 3801747 - DNA, 25 bp, Homo sapien
ggcagcatccttcccgaatgcccat

SEQ ID NO: 3801748 - DNA, 25 bp, Homo sapien
cctccggcagcatccttcccgaatg

SEQ ID NO: 3801749 - DNA, 25 bp, Homo sapien
cggcagcatccttcccgaatgccca

SEQ ID NO: 3801750 - DNA, 25 bp, Homo sapien
tccggcagcatccttcccgaatgcc

SEQ ID NO: 3801751 - DNA, 25 bp, Homo sapien
tatacaggtcatgctgaccctggct

SEQ ID NO: 3801752 - DNA, 25 bp, Homo sapien
gatccaaacacgaccttcaggcttc

SEQ ID NO: 3801753 - DNA, 25 bp, Homo sapien
aagtccctttgctatacaggtcatg

SEQ ID NO: 3801754 - DNA, 25 bp, Homo sapien
ctgtgcctggtcaatacatggtatt

SEQ ID NO: 3801755 - DNA, 25 bp, Homo sapien
tttcaagaattcaggaactgttggg

SEQ ID NO: 3801756 - DNA, 25 bp, Homo sapien
ccgtgggggaggctgatctgcagtt

SEQ ID NO: 3801757 - DNA, 25 bp, Homo sapien
gttttcaagaattcaggaactgttg

SEQ ID NO: 3801758 - DNA, 25 bp, Homo sapien
ggagttttcaagaattcaggaactg

SEQ ID NO: 3801759 - DNA, 25 bp, Homo sapien
ggtttgggatctttgcactttttgc

SEQ ID NO: 3801760 - DNA, 25 bp, Homo sapien
attcttctcacccttctgatctggt

SEQ ID NO: 3801761 - DNA, 25 bp, Homo sapien
gtccatctgcggctcattcttctca

SEQ ID NO: 3801762 - DNA, 25 bp, Homo sapien
atgtattggtggtactttaacttct

SEQ ID NO: 3801763 - DNA, 25 bp, Homo sapien
ccgcgttgaggatagcatgggcccc

SEQ ID NO: 3801764 - DNA, 25 bp, Homo sapien
cccgcgttgaggatagcatgggccc

SEQ ID NO: 3801765 - DNA, 25 bp, Homo sapien
gcgttgaggatagcatgggccccgc

SEQ ID NO: 3801766 - DNA, 25 bp, Homo sapien
cgttgaggatagcatgggccccgcc

SEQ ID NO: 3801767 - DNA, 25 bp, Homo sapien
ttttggtaacttatagttcctcata

SEQ ID NO: 3801768 - DNA, 25 bp, Homo sapien
caacattcaacttttggtaacttat

SEQ ID NO: 3801769 - DNA, 25 bp, Homo sapien
aatcattactgagcacaaataaatg

SEQ ID NO: 3801770 - DNA, 25 bp, Homo sapien
cattcaacttttggtaacttatagt

SEQ ID NO: 3801771 - DNA, 25 bp, Homo sapien
tctggatgaataattgtgaaaaggc

SEQ ID NO: 3801772 - DNA, 25 bp, Homo sapien
tggaatggaatgcaggccactctca

SEQ ID NO: 3801773 - DNA, 25 bp, Homo sapien
cagagcatctagtactattttggtg

SEQ ID NO: 3801774 - DNA, 25 bp, Homo sapien
ttcagaacctattttggaggacaga

SEQ ID NO: 3801775 - DNA, 25 bp, Homo sapien
aaattaatcagattctttgtttagg

SEQ ID NO: 3801776 - DNA, 25 bp, Homo sapien
ggaaaggcccttctcgagccttcta

SEQ ID NO: 3801777 - DNA, 25 bp, Homo sapien
ctcgagccttctatatacaaagatc

SEQ ID NO: 3801778 - DNA, 25 bp, Homo sapien
caatgaagaggcactacttactcta

SEQ ID NO: 3801779 - DNA, 25 bp, Homo sapien
tctccgcagttgttcgtcaccaagg

SEQ ID NO: 3801780 - DNA, 25 bp, Homo sapien
tgttgagtaaggtcttctgcccagc

SEQ ID NO: 3801781 - DNA, 25 bp, Homo sapien
tatattttggcctcactgcgtcagc

SEQ ID NO: 3801782 - DNA, 25 bp, Homo sapien
caagtccccttagacattggctgta

SEQ ID NO: 3801783 - DNA, 25 bp, Homo sapien
aattgtcagaattcactcccttccg

SEQ ID NO: 3801784 - DNA, 25 bp, Homo sapien
ttgtcagaattcactcccttccgtc

SEQ ID NO: 3801785 - DNA, 25 bp, Homo sapien
aaattgtcagaattcactcccttcc

SEQ ID NO: 3801786 - DNA, 25 bp, Homo sapien
tcagaattcactcccttccgtcccc

SEQ ID NO: 3801787 - DNA, 25 bp, Homo sapien
tttcccagaaaaagcatattgggaa

SEQ ID NO: 3801788 - DNA, 25 bp, Homo sapien
tcccagaaaaagcatattgggaatg

SEQ ID NO: 3801789 - DNA, 25 bp, Homo sapien
ccagaaaaagcatattgggaatgta

SEQ ID NO: 3801790 - DNA, 25 bp, Homo sapien
tgtttcccagaaaaagcatattggg

SEQ ID NO: 3801791 - DNA, 25 bp, Homo sapien
ggtgtgttaggtgtggcattgttca

SEQ ID NO: 3801792 - DNA, 25 bp, Homo sapien
ctggctttctcacaggagtagatgt

SEQ ID NO: 3801793 - DNA, 25 bp, Homo sapien
ttctcacaggagtagatgtattctg

SEQ ID NO: 3801794 - DNA, 25 bp, Homo sapien
aagctgaattcccactgttactatt

SEQ ID NO: 3801795 - DNA, 25 bp, Homo sapien
taaaactgcgagacgacactctgct

SEQ ID NO: 3801796 - DNA, 25 bp, Homo sapien
tctggccacctgtagagacgggctg

SEQ ID NO: 3801797 - DNA, 25 bp, Homo sapien
cataatctcggtgaaagtgtctgcc

SEQ ID NO: 3801798 - DNA, 25 bp, Homo sapien
tgtagtgttgtaaccggcaaggcca

SEQ ID NO: 3801799 - DNA, 25 bp, Homo sapien
ttgcactgaggtgacactcgagccc

SEQ ID NO: 3801800 - DNA, 25 bp, Homo sapien
gtctgcgtggtcagtaaagcctggg

SEQ ID NO: 3801801 - DNA, 25 bp, Homo sapien
acactcgagccctggatggacactg

SEQ ID NO: 3801802 - DNA, 25 bp, Homo sapien
tggatggacactgggagcagcagct

SEQ ID NO: 3801803 - DNA, 25 bp, Homo sapien
tgccttgccagaaagtgctcagcgg

SEQ ID NO: 3801804 - DNA, 25 bp, Homo sapien
tgaagccggccatttaaagtactag

SEQ ID NO: 3801805 - DNA, 25 bp, Homo sapien
taacagcaaggcaactcgtgagacc

SEQ ID NO: 3801806 - DNA, 25 bp, Homo sapien
gctcagcggcagactatgatcacaa

SEQ ID NO: 3801807 - DNA, 25 bp, Homo sapien
cagcagttgctatctgaggctgagt

SEQ ID NO: 3801808 - DNA, 25 bp, Homo sapien
ctgaggtacagttggggccaagcct

SEQ ID NO: 3801809 - DNA, 25 bp, Homo sapien
cagttggtatttgtgcagcagttgc

SEQ ID NO: 3801810 - DNA, 25 bp, Homo sapien
tgcagcagttgctatctgaggctga

SEQ ID NO: 3801811 - DNA, 25 bp, Homo sapien
gacttgttgaggctgactgagcaca

SEQ ID NO: 3801812 - DNA, 25 bp, Homo sapien
catgctgcgggaacgtgtcttgtgt

SEQ ID NO: 3801813 - DNA, 25 bp, Homo sapien
ctgagcacatgctgcgggaacgtgt

SEQ ID NO: 3801814 - DNA, 25 bp, Homo sapien
ctttctgacttgttgaggctgactg

SEQ ID NO: 3801815 - DNA, 25 bp, Homo sapien
tatttgatgatgctgagtttgtgaa

SEQ ID NO: 3801816 - DNA, 25 bp, Homo sapien
tgtatttgatgatgctgagtttgtg

SEQ ID NO: 3801817 - DNA, 25 bp, Homo sapien
gtatttgatgatgctgagtttgtga

SEQ ID NO: 3801818 - DNA, 25 bp, Homo sapien
ctgtatttgatgatgctgagtttgt

SEQ ID NO: 3801819 - DNA, 25 bp, Homo sapien
ggccttattgataaagggctgctgg

SEQ ID NO: 3801820 - DNA, 25 bp, Homo sapien
attgaagaacactgttggaggcctt

SEQ ID NO: 3801821 - DNA, 25 bp, Homo sapien
tgcagggatggaagcggagcatttc

SEQ ID NO: 3801822 - DNA, 25 bp, Homo sapien
gaacactgttggaggccttattgat

SEQ ID NO: 3801823 - DNA, 25 bp, Homo sapien
atcttttgtcttggcgactggactc

SEQ ID NO: 3801824 - DNA, 25 bp, Homo sapien
tgtgctgcgtgtctgcttgatggcc

SEQ ID NO: 3801825 - DNA, 25 bp, Homo sapien
ggcgactggactcccaaatagagag

SEQ ID NO: 3801826 - DNA, 25 bp, Homo sapien
ccaaatagagagtgctggacgacaa

SEQ ID NO: 3801827 - DNA, 25 bp, Homo sapien
tgccgtggataataaacagtaccgc

SEQ ID NO: 3801828 - DNA, 25 bp, Homo sapien
tccacctttagcacccatggagcgg

SEQ ID NO: 3801829 - DNA, 25 bp, Homo sapien
caagttaccccatggaacacgggag

SEQ ID NO: 3801830 - DNA, 25 bp, Homo sapien
gacaagtactctcatgactgggcac

SEQ ID NO: 3801831 - DNA, 25 bp, Homo sapien
aaagctatcttgaatcttttaaatt

SEQ ID NO: 3801832 - DNA, 25 bp, Homo sapien
acaggcgtgagatgccatgccaggc

SEQ ID NO: 3801833 - DNA, 25 bp, Homo sapien
gatactcctactttagcttcccaag

SEQ ID NO: 3801834 - DNA, 25 bp, Homo sapien
ctcccacttcgcctcccaaggtgtt

SEQ ID NO: 3801835 - DNA, 25 bp, Homo sapien
gacttagtctctggagtcacacacc

SEQ ID NO: 3801836 - DNA, 25 bp, Homo sapien
tgttagaagtgagtcgctaaatcca

SEQ ID NO: 3801837 - DNA, 25 bp, Homo sapien
aaaactgcatacagttgagtctggc

SEQ ID NO: 3801838 - DNA, 25 bp, Homo sapien
gagtcgctaaatccaacccagagag

SEQ ID NO: 3801839 - DNA, 25 bp, Homo sapien
cactcttaatgaggatatcaaagag

SEQ ID NO: 3801840 - DNA, 25 bp, Homo sapien
tcttaatgaggatatcaaagaggtc

SEQ ID NO: 3801841 - DNA, 25 bp, Homo sapien
ctccactcttaatgaggatatcaaa

SEQ ID NO: 3801842 - DNA, 25 bp, Homo sapien
cttaatgaggatatcaaagaggtca

SEQ ID NO: 3801843 - DNA, 25 bp, Homo sapien
ggctgagggtaaagttccatccaag

SEQ ID NO: 3801844 - DNA, 25 bp, Homo sapien
tggccgggacaccactgtattcact

SEQ ID NO: 3801845 - DNA, 25 bp, Homo sapien
aggtcctcgatcagagagaagggct

SEQ ID NO: 3801846 - DNA, 25 bp, Homo sapien
ggctgtcactggtctcattttggaa

SEQ ID NO: 3801847 - DNA, 25 bp, Homo sapien
gggtgagtgtgaatggtccagcata

SEQ ID NO: 3801848 - DNA, 25 bp, Homo sapien
agcaaactgggtctcggaagtctcc

SEQ ID NO: 3801849 - DNA, 25 bp, Homo sapien
aactgggtctcggaagtctccatgg

SEQ ID NO: 3801850 - DNA, 25 bp, Homo sapien
ctcggaagtctccatgggtgagtgt

SEQ ID NO: 3801851 - DNA, 25 bp, Homo sapien
ttgggcatggtaatgtccaaccact

SEQ ID NO: 3801852 - DNA, 25 bp, Homo sapien
tccatgttgtccaagtttgagtctg

SEQ ID NO: 3801853 - DNA, 25 bp, Homo sapien
taggtcctgtgggtctagaaagtca

SEQ ID NO: 3801854 - DNA, 25 bp, Homo sapien
tcagcagagaacatgctcggcgcgg

SEQ ID NO: 3801855 - DNA, 25 bp, Homo sapien
tgacaaaataggtagtgcgcccctg

SEQ ID NO: 3801856 - DNA, 25 bp, Homo sapien
taaaggcaatagatgaatggacccc

SEQ ID NO: 3801857 - DNA, 25 bp, Homo sapien
caacctggaacatgtagtggagatc

SEQ ID NO: 3801858 - DNA, 25 bp, Homo sapien
tccaaataacgggtcaggctgcctc

SEQ ID NO: 3801859 - DNA, 25 bp, Homo sapien
attcaagttcagctcgtacctgtga

SEQ ID NO: 3801860 - DNA, 25 bp, Homo sapien
caagttcagctcgtacctgtgagtt

SEQ ID NO: 3801861 - DNA, 25 bp, Homo sapien
tcaagttcagctcgtacctgtgagt

SEQ ID NO: 3801862 - DNA, 25 bp, Homo sapien
agttcagctcgtacctgtgagtttc

SEQ ID NO: 3801863 - DNA, 25 bp, Homo sapien
catcattcacggatttccccgtgga

SEQ ID NO: 3801864 - DNA, 25 bp, Homo sapien
ttggatgcttctgacaagtctgttg

SEQ ID NO: 3801865 - DNA, 25 bp, Homo sapien
ggcaagcaggaggacgctgcagagt

SEQ ID NO: 3801866 - DNA, 25 bp, Homo sapien
tgttgtacgtccaatggcaagcagg

SEQ ID NO: 3801867 - DNA, 25 bp, Homo sapien
agtattttgctatattggctataga

SEQ ID NO: 3801868 - DNA, 25 bp, Homo sapien
tcagatgttccccaatctagttttt

SEQ ID NO: 3801869 - DNA, 25 bp, Homo sapien
tctatatacatcagaaatatcgttc

SEQ ID NO: 3801870 - DNA, 25 bp, Homo sapien
aaatcaactagttaacaattagtat

SEQ ID NO: 3801871 - DNA, 25 bp, Homo sapien
aggttagccaagtgaagcagtgaaa

SEQ ID NO: 3801872 - DNA, 25 bp, Homo sapien
tcaattggttgtaaattgcactcag

SEQ ID NO: 3801873 - DNA, 25 bp, Homo sapien
tgaagcagtgaaaatggagaagaac

SEQ ID NO: 3801874 - DNA, 25 bp, Homo sapien
tgtgatcaattggttgtaaattgca

SEQ ID NO: 3801875 - DNA, 25 bp, Homo sapien
gccttaccacttggccaccgcgcct

SEQ ID NO: 3801876 - DNA, 25 bp, Homo sapien
tacgagaccgacgccttaccacttg

SEQ ID NO: 3801877 - DNA, 25 bp, Homo sapien
agaccgacgccttaccacttggcca

SEQ ID NO: 3801878 - DNA, 25 bp, Homo sapien
gatcttcggtttacgagaccgacgc

SEQ ID NO: 3801879 - DNA, 25 bp, Homo sapien
tagctgtgtgtagggagccgatcgc

SEQ ID NO: 3801880 - DNA, 25 bp, Homo sapien
gcggaccttactcgccgaggctgga

SEQ ID NO: 3801881 - DNA, 25 bp, Homo sapien
gccaaatttgcggaccttactcgcc

SEQ ID NO: 3801882 - DNA, 25 bp, Homo sapien
aatttgcggaccttactcgccgagg

SEQ ID NO: 3801883 - DNA, 25 bp, Homo sapien
aaagatattggcctacctgcccaag

SEQ ID NO: 3801884 - DNA, 25 bp, Homo sapien
tcacagagaaggagtgctggtctac

SEQ ID NO: 3801885 - DNA, 25 bp, Homo sapien
tagtttccgatactgcagcacgtgc

SEQ ID NO: 3801886 - DNA, 25 bp, Homo sapien
aacatgatcagcttcgcccgtttca

SEQ ID NO: 3801887 - DNA, 25 bp, Homo sapien
catggtcattttgcgtgctgggatc

SEQ ID NO: 3801888 - DNA, 25 bp, Homo sapien
cgttaaagtggctagtctgaggctc

SEQ ID NO: 3801889 - DNA, 25 bp, Homo sapien
tgctgggatccctaaacgtctctct

SEQ ID NO: 3801890 - DNA, 25 bp, Homo sapien
taaagctaggatcctcacaggaacc

SEQ ID NO: 3801891 - DNA, 25 bp, Homo sapien
ttttgagaattgctacaggttttgc

SEQ ID NO: 3801892 - DNA, 25 bp, Homo sapien
tttgcgtgttttgagaattgctaca

SEQ ID NO: 3801893 - DNA, 25 bp, Homo sapien
tgcatttagcaaggcctaagtttgg

SEQ ID NO: 3801894 - DNA, 25 bp, Homo sapien
atgaagggcttgttatttgcgtgtt

SEQ ID NO: 3801895 - DNA, 25 bp, Homo sapien
ccagacgagatccaagtgatgggcg

SEQ ID NO: 3801896 - DNA, 25 bp, Homo sapien
cagccttaaatcctccaccgtggag

SEQ ID NO: 3801897 - DNA, 25 bp, Homo sapien
ccgtggagaagaagggtacttccag

SEQ ID NO: 3801898 - DNA, 25 bp, Homo sapien
gcctcgattggagcccagccttaaa

SEQ ID NO: 3801899 - DNA, 25 bp, Homo sapien
cggaaggtgccaggcgggaagaagg

SEQ ID NO: 3801900 - DNA, 25 bp, Homo sapien
gtgccaggcgggaagaaggggagca

SEQ ID NO: 3801901 - DNA, 25 bp, Homo sapien
cgatccctgccttggctggcggaag

SEQ ID NO: 3801902 - DNA, 25 bp, Homo sapien
ctggcggaaggtgccaggcgggaag

SEQ ID NO: 3801903 - DNA, 25 bp, Homo sapien
cacgcgcctcgctggaattgtggac

SEQ ID NO: 3801904 - DNA, 25 bp, Homo sapien
gaaacagtcagtgttccggcctcgt

SEQ ID NO: 3801905 - DNA, 25 bp, Homo sapien
ttaatgaagtttctcacacagaggc

SEQ ID NO: 3801906 - DNA, 25 bp, Homo sapien
ctccgggtggcgatttagcaaagca

SEQ ID NO: 3801907 - DNA, 25 bp, Homo sapien
gtcccacgggtttggctgactcagg

SEQ ID NO: 3801908 - DNA, 25 bp, Homo sapien
ggctgggtgcaacttcctggagcag

SEQ ID NO: 3801909 - DNA, 25 bp, Homo sapien
tactggggccaaatgggagtcccac

SEQ ID NO: 3801910 - DNA, 25 bp, Homo sapien
agggctgggtgcaacttcctggagc

SEQ ID NO: 3801911 - DNA, 25 bp, Homo sapien
tattctccgggtgaacctagggcta

SEQ ID NO: 3801912 - DNA, 25 bp, Homo sapien
ttctacccttgccatgtgacagccg

SEQ ID NO: 3801913 - DNA, 25 bp, Homo sapien
taaatacggcatggcctacaggtgc

SEQ ID NO: 3801914 - DNA, 25 bp, Homo sapien
aacgccattctaagatacgatcgag

SEQ ID NO: 3801915 - DNA, 25 bp, Homo sapien
taaccggttttgagcacaagaaggc

SEQ ID NO: 3801916 - DNA, 25 bp, Homo sapien
tccgagctgatgtctttctggccca

SEQ ID NO: 3801917 - DNA, 25 bp, Homo sapien
tgcggtaacgaaccagctggcagga

SEQ ID NO: 3801918 - DNA, 25 bp, Homo sapien
tagcaaccagtgtctgcgcatggcg

SEQ ID NO: 3801919 - DNA, 25 bp, Homo sapien
tggctcaatctccgttccctgcaag

SEQ ID NO: 3801920 - DNA, 25 bp, Homo sapien
ctcaatctccgttccctgcaagctc

SEQ ID NO: 3801921 - DNA, 25 bp, Homo sapien
agtggctcaatctccgttccctgca

SEQ ID NO: 3801922 - DNA, 25 bp, Homo sapien
ccgcacccggctggattatttcttt

SEQ ID NO: 3801923 - DNA, 25 bp, Homo sapien
tccataatacatagtggtggggttt

SEQ ID NO: 3801924 - DNA, 25 bp, Homo sapien
ctggatgatgaatactggatgcttg

SEQ ID NO: 3801925 - DNA, 25 bp, Homo sapien
tgttacataccacatactactttca

SEQ ID NO: 3801926 - DNA, 25 bp, Homo sapien
ctgactgtagtcccatcctcttggg

SEQ ID NO: 3801927 - DNA, 25 bp, Homo sapien
cagggaagacccaactatcctcgga

SEQ ID NO: 3801928 - DNA, 25 bp, Homo sapien
ccatcggaggcatggaacgtgtgca

SEQ ID NO: 3801929 - DNA, 25 bp, Homo sapien
gtgacacaagcccatgctgttgctg

SEQ ID NO: 3801930 - DNA, 25 bp, Homo sapien
tcaggagaaggctagccgtcatagc

SEQ ID NO: 3801931 - DNA, 25 bp, Homo sapien
ctgtcttgattacgatacagctcat

SEQ ID NO: 3801932 - DNA, 25 bp, Homo sapien
tgtctgaggccactggtagtgccaa

SEQ ID NO: 3801933 - DNA, 25 bp, Homo sapien
gccttattgtctgaggccactggta

SEQ ID NO: 3801934 - DNA, 25 bp, Homo sapien
cttattggccttattgtctgaggcc

SEQ ID NO: 3801935 - DNA, 25 bp, Homo sapien
cactggtagtgccaagtctacctct

SEQ ID NO: 3801936 - DNA, 25 bp, Homo sapien
gagcatctattaggtgacagacaca

SEQ ID NO: 3801937 - DNA, 25 bp, Homo sapien
ctattaggtgacagacacagttcta

SEQ ID NO: 3801938 - DNA, 25 bp, Homo sapien
gtgctgaggatatagtcagcagaga

SEQ ID NO: 3801939 - DNA, 25 bp, Homo sapien
tgctgaggatatagtcagcagagaa

SEQ ID NO: 3801940 - DNA, 25 bp, Homo sapien
cctgctaggacaacagagttgggag

SEQ ID NO: 3801941 - DNA, 25 bp, Homo sapien
gataacctgcagtaggctaaatggc

SEQ ID NO: 3801942 - DNA, 25 bp, Homo sapien
ccacactctgagctgtagtaataat

SEQ ID NO: 3801943 - DNA, 25 bp, Homo sapien
taataataccgcaatgatactctct

SEQ ID NO: 3801944 - DNA, 25 bp, Homo sapien
gacccaggcccacatagaaaatcca

SEQ ID NO: 3801945 - DNA, 25 bp, Homo sapien
taaataccgacttgcacaacgcttc

SEQ ID NO: 3801946 - DNA, 25 bp, Homo sapien
aaacccacactaacaagagctctta

SEQ ID NO: 3801947 - DNA, 25 bp, Homo sapien
tacagggacaacctcagaagccatg

SEQ ID NO: 3801948 - DNA, 25 bp, Homo sapien
tagaaacttggcacgggaggtgtca

SEQ ID NO: 3801949 - DNA, 25 bp, Homo sapien
tcttctctcgagtggtttataatct

SEQ ID NO: 3801950 - DNA, 25 bp, Homo sapien
actctcggcggcttttccattctca

SEQ ID NO: 3801951 - DNA, 25 bp, Homo sapien
ccctagaaacttggcacgggaggtg

SEQ ID NO: 3801952 - DNA, 25 bp, Homo sapien
acaccttttagcagcccagttctgg

SEQ ID NO: 3801953 - DNA, 25 bp, Homo sapien
cccagttctgggcatgtagagagag

SEQ ID NO: 3801954 - DNA, 25 bp, Homo sapien
aaaaagacaccttttagcagcccag

SEQ ID NO: 3801955 - DNA, 25 bp, Homo sapien
cagcccagttctgggcatgtagaga

SEQ ID NO: 3801956 - DNA, 25 bp, Homo sapien
cttggagcggttccaagttgtttgg

SEQ ID NO: 3801957 - DNA, 25 bp, Homo sapien
aatcccctctcttggagcggttcca

SEQ ID NO: 3801958 - DNA, 25 bp, Homo sapien
tggccttgacgtgttccacgtttca

SEQ ID NO: 3801959 - DNA, 25 bp, Homo sapien
tttggttttatacacgctcagccct

SEQ ID NO: 3801960 - DNA, 25 bp, Homo sapien
cagcaggaggttatcagttacaagg

SEQ ID NO: 3801961 - DNA, 25 bp, Homo sapien
taaaaattcagagccgttccagaga

SEQ ID NO: 3801962 - DNA, 25 bp, Homo sapien
gaagcaccctaccacagaggctaaa

SEQ ID NO: 3801963 - DNA, 25 bp, Homo sapien
tatttcattacagatccagccgcag

SEQ ID NO: 3801964 - DNA, 25 bp, Homo sapien
gtattgtcaactcatagatttggac

SEQ ID NO: 3801965 - DNA, 25 bp, Homo sapien
ctgtctttggtagtggacatatgtc

SEQ ID NO: 3801966 - DNA, 25 bp, Homo sapien
tagatattacaacatggtggcatac

SEQ ID NO: 3801967 - DNA, 25 bp, Homo sapien
ggttttccaatatcctcccatggtg

SEQ ID NO: 3801968 - DNA, 25 bp, Homo sapien
taaagttcgaatgttgccatcggtt

SEQ ID NO: 3801969 - DNA, 25 bp, Homo sapien
tctttagctagttaaaatcaggatc

SEQ ID NO: 3801970 - DNA, 25 bp, Homo sapien
gccatcggttgggattgcttttgta

SEQ ID NO: 3801971 - DNA, 25 bp, Homo sapien
tatctctcctaacctgtaggttctc

SEQ ID NO: 3801972 - DNA, 25 bp, Homo sapien
cacataggaacggagcgtgtggtac

SEQ ID NO: 3801973 - DNA, 25 bp, Homo sapien
tcagcagtcaagtctcagccaacct

SEQ ID NO: 3801974 - DNA, 25 bp, Homo sapien
tctggttatctcataaagcgtttct

SEQ ID NO: 3801975 - DNA, 25 bp, Homo sapien
cgtgtggtacaataagcctggcttc

SEQ ID NO: 3801976 - DNA, 25 bp, Homo sapien
caagcattgtcatagggactgcata

SEQ ID NO: 3801977 - DNA, 25 bp, Homo sapien
tctacaggtgcatctaaggctcaag

SEQ ID NO: 3801978 - DNA, 25 bp, Homo sapien
aagtggaaccaacagtgcagcagct

SEQ ID NO: 3801979 - DNA, 25 bp, Homo sapien
tctggaggtagatcaccaaatggcc

SEQ ID NO: 3801980 - DNA, 25 bp, Homo sapien
gagacagggttatattatgggaggc

SEQ ID NO: 3801981 - DNA, 25 bp, Homo sapien
gttatattatgggaggcccacctcg

SEQ ID NO: 3801982 - DNA, 25 bp, Homo sapien
agagacagggttatattatgggagg

SEQ ID NO: 3801983 - DNA, 25 bp, Homo sapien
ggttatattatgggaggcccacctc

SEQ ID NO: 3801984 - DNA, 25 bp, Homo sapien
tattacatgggagtttttgcccgaa

SEQ ID NO: 3801985 - DNA, 25 bp, Homo sapien
tatttttagcacgattacgcaccgc

SEQ ID NO: 3801986 - DNA, 25 bp, Homo sapien
tcacaacaccatagggccctgattt

SEQ ID NO: 3801987 - DNA, 25 bp, Homo sapien
gattcgaatggaaatttggctgcct

SEQ ID NO: 3801988 - DNA, 25 bp, Homo sapien
gcctccgtggaagccgctggaagcc

SEQ ID NO: 3801989 - DNA, 25 bp, Homo sapien
tgaagataaaatgcgtggagatggc

SEQ ID NO: 3801990 - DNA, 25 bp, Homo sapien
gatggcaaatcctcagggatctggg

SEQ ID NO: 3801991 - DNA, 25 bp, Homo sapien
gttacagccgcaggcaagctctgct

SEQ ID NO: 3801992 - DNA, 25 bp, Homo sapien
ccgtgagcgctgagatttgtagaca

SEQ ID NO: 3801993 - DNA, 25 bp, Homo sapien
ggtcttggttgcgtatcactgtgcc

SEQ ID NO: 3801994 - DNA, 25 bp, Homo sapien
tgggcttactgccacccaggaggag

SEQ ID NO: 3801995 - DNA, 25 bp, Homo sapien
gatgagcccaccatgtggaattcag

SEQ ID NO: 3801996 - DNA, 25 bp, Homo sapien
tgtggtggtgttctggaatcttctg

SEQ ID NO: 3801997 - DNA, 25 bp, Homo sapien
gagagagttgagacacttacgtaag

SEQ ID NO: 3801998 - DNA, 25 bp, Homo sapien
ttttaacggccacacagactgagag

SEQ ID NO: 3801999 - DNA, 25 bp, Homo sapien
cgtaaggtgggagccctgcaaatga

SEQ ID NO: 3802000 - DNA, 25 bp, Homo sapien
ctgtttctgcctctatgcagagctc

SEQ ID NO: 3802001 - DNA, 25 bp, Homo sapien
tttctgcctctatgcagagctcttt

SEQ ID NO: 3802002 - DNA, 25 bp, Homo sapien
ctctatgcagagctctttgccactc

SEQ ID NO: 3802003 - DNA, 25 bp, Homo sapien
gcctctatgcagagctctttgccac

SEQ ID NO: 3802004 - DNA, 25 bp, Homo sapien
attaaaaattacctgtatcagctgg

SEQ ID NO: 3802005 - DNA, 25 bp, Homo sapien
tttaatcgagtgagagtgtgaagtg

SEQ ID NO: 3802006 - DNA, 25 bp, Homo sapien
gaagtgtcaactctacagactttga

SEQ ID NO: 3802007 - DNA, 25 bp, Homo sapien
tagatgaaggtctgctttaatcgag

SEQ ID NO: 3802008 - DNA, 25 bp, Homo sapien
cacctgcagctagtggtttctgaaa

SEQ ID NO: 3802009 - DNA, 25 bp, Homo sapien
gtaaatacccatcaagagcccagcg

SEQ ID NO: 3802010 - DNA, 25 bp, Homo sapien
ccttgaaaattgagtagctctccga

SEQ ID NO: 3802011 - DNA, 25 bp, Homo sapien
aaagaatgctgacgtcccttctggc

SEQ ID NO: 3802012 - DNA, 25 bp, Homo sapien
acctcaggcaagctgtttagtttct

SEQ ID NO: 3802013 - DNA, 25 bp, Homo sapien
gctgtttagtttctccgatgctcag

SEQ ID NO: 3802014 - DNA, 25 bp, Homo sapien
tcaggcaagctgtttagtttctccg

SEQ ID NO: 3802015 - DNA, 25 bp, Homo sapien
ggcaagctgtttagtttctccgatg

SEQ ID NO: 3802016 - DNA, 25 bp, Homo sapien
caaagtttcacagatatatacgtgt

SEQ ID NO: 3802017 - DNA, 25 bp, Homo sapien
gatatatacgtgtttttctaggctc

SEQ ID NO: 3802018 - DNA, 25 bp, Homo sapien
cagatatatacgtgtttttctaggc

SEQ ID NO: 3802019 - DNA, 25 bp, Homo sapien
tatatacgtgtttttctaggctctt

SEQ ID NO: 3802020 - DNA, 25 bp, Homo sapien
cagaaagatactcacttatatttcc

SEQ ID NO: 3802021 - DNA, 25 bp, Homo sapien
cggcatggtgtgactaagaatccaa

SEQ ID NO: 3802022 - DNA, 25 bp, Homo sapien
atttttcggcatggtgtgactaaga

SEQ ID NO: 3802023 - DNA, 25 bp, Homo sapien
ggtgtgactaagaatccaatttctt

SEQ ID NO: 3802024 - DNA, 25 bp, Homo sapien
gatttgcctttgtctgtggccgagc

SEQ ID NO: 3802025 - DNA, 25 bp, Homo sapien
tgcggtgaccgtgcttctcatgcct

SEQ ID NO: 3802026 - DNA, 25 bp, Homo sapien
gccaacgcagtaggtatagaatcat

SEQ ID NO: 3802027 - DNA, 25 bp, Homo sapien
gagcatctctgcatatgtccactgg

SEQ ID NO: 3802028 - DNA, 25 bp, Homo sapien
tgatctcccggaatctttgtcagga

SEQ ID NO: 3802029 - DNA, 25 bp, Homo sapien
tcaggaggaggagatctgaccacaa

SEQ ID NO: 3802030 - DNA, 25 bp, Homo sapien
ccttaggattcactattacggtcat

SEQ ID NO: 3802031 - DNA, 25 bp, Homo sapien
acaaggccctcctgactgaactcct

SEQ ID NO: 3802032 - DNA, 25 bp, Homo sapien
ctcttccatcctaacaagccaccgc

SEQ ID NO: 3802033 - DNA, 25 bp, Homo sapien
tcttccatcctaacaagccaccgcc

SEQ ID NO: 3802034 - DNA, 25 bp, Homo sapien
ccatcctaacaagccaccgcccttt

SEQ ID NO: 3802035 - DNA, 25 bp, Homo sapien
ttccatcctaacaagccaccgccct

SEQ ID NO: 3802036 - DNA, 25 bp, Homo sapien
aatccacaagtgtaggcaggcttgg

SEQ ID NO: 3802037 - DNA, 25 bp, Homo sapien
gcaaatttattcattggacatgctt

SEQ ID NO: 3802038 - DNA, 25 bp, Homo sapien
gaggtattagatgtagcactttaga

SEQ ID NO: 3802039 - DNA, 25 bp, Homo sapien
gcaaaggcagtagaagcaaatttat

SEQ ID NO: 3802040 - DNA, 25 bp, Homo sapien
gacatagggcacagggtactatctg

SEQ ID NO: 3802041 - DNA, 25 bp, Homo sapien
tatctgtgagctcactggaaaaatg

SEQ ID NO: 3802042 - DNA, 25 bp, Homo sapien
ttggtaaaggcctctaactgctgcc

SEQ ID NO: 3802043 - DNA, 25 bp, Homo sapien
tgccctaagctgacatagggcacag

SEQ ID NO: 3802044 - DNA, 25 bp, Homo sapien
tcacatgcaagccatcgtcttcctc

SEQ ID NO: 3802045 - DNA, 25 bp, Homo sapien
catgcaagccatcgtcttcctctga

SEQ ID NO: 3802046 - DNA, 25 bp, Homo sapien
gcaagccatcgtcttcctctgatgt

SEQ ID NO: 3802047 - DNA, 25 bp, Homo sapien
tgcaagccatcgtcttcctctgatg

SEQ ID NO: 3802048 - DNA, 25 bp, Homo sapien
ccagcttagtggtgatgttgccaag

SEQ ID NO: 3802049 - DNA, 25 bp, Homo sapien
caaacaagctgtttaccataagcca

SEQ ID NO: 3802050 - DNA, 25 bp, Homo sapien
cagtgggtgacgtcacctgagttat

SEQ ID NO: 3802051 - DNA, 25 bp, Homo sapien
taagtctaacaaacagctgacacgg

SEQ ID NO: 3802052 - DNA, 25 bp, Homo sapien
cattatcttccttttctactaaaag

SEQ ID NO: 3802053 - DNA, 25 bp, Homo sapien
ttctactaaaagaaattcagtgcca

SEQ ID NO: 3802054 - DNA, 25 bp, Homo sapien
cttttctactaaaagaaattcagtg

SEQ ID NO: 3802055 - DNA, 25 bp, Homo sapien
gaaattcagtgccaaagatgtattc

SEQ ID NO: 3802056 - DNA, 25 bp, Homo sapien
gatggcatactggtttgccttcaca

SEQ ID NO: 3802057 - DNA, 25 bp, Homo sapien
gaatcttgatgatctaaaccgccgt

SEQ ID NO: 3802058 - DNA, 25 bp, Homo sapien
cgccgtgatggaccaagggtatgat

SEQ ID NO: 3802059 - DNA, 25 bp, Homo sapien
cacactttggctgttcttcgagagc

SEQ ID NO: 3802060 - DNA, 25 bp, Homo sapien
aattcatgtttggacaggaaggtgt

SEQ ID NO: 3802061 - DNA, 25 bp, Homo sapien
ttcatgtttggacaggaaggtgtac

SEQ ID NO: 3802062 - DNA, 25 bp, Homo sapien
ctaggagtaaagatctttttcataa

SEQ ID NO: 3802063 - DNA, 25 bp, Homo sapien
taggagtaaagatctttttcataat

SEQ ID NO: 3802064 - DNA, 25 bp, Homo sapien
ggtgaagtgacacttttataggagt

SEQ ID NO: 3802065 - DNA, 25 bp, Homo sapien
gcgaagatgtctgctgagtgctgct

SEQ ID NO: 3802066 - DNA, 25 bp, Homo sapien
cacttttataggagtcagggcgaag

SEQ ID NO: 3802067 - DNA, 25 bp, Homo sapien
ttataggagtcagggcgaagatgtc

SEQ ID NO: 3802068 - DNA, 25 bp, Homo sapien
tgtggggaagcctttagagtccgga

SEQ ID NO: 3802069 - DNA, 25 bp, Homo sapien
tttccaacgccaagtaaaacattga

SEQ ID NO: 3802070 - DNA, 25 bp, Homo sapien
cattcggattcgacagcgtacctct

SEQ ID NO: 3802071 - DNA, 25 bp, Homo sapien
tattcatgctaagtaatgtggacag

SEQ ID NO: 3802072 - DNA, 25 bp, Homo sapien
cgccaagtaaaacattgaaatgctt

SEQ ID NO: 3802073 - DNA, 25 bp, Homo sapien
cctataggaggaagccccatttgga

SEQ ID NO: 3802074 - DNA, 25 bp, Homo sapien
tggacctcacactcaagatccttct

SEQ ID NO: 3802075 - DNA, 25 bp, Homo sapien
cccatttggacctcacactcaagat

SEQ ID NO: 3802076 - DNA, 25 bp, Homo sapien
ctgtagggatggtatcacctatagg

SEQ ID NO: 3802077 - DNA, 25 bp, Homo sapien
tgtgctcaccctccggtcataagtt

SEQ ID NO: 3802078 - DNA, 25 bp, Homo sapien
gagtgaactggctcaaactggcagg

SEQ ID NO: 3802079 - DNA, 25 bp, Homo sapien
tcagtgtcttgtggtgcaggcaggt

SEQ ID NO: 3802080 - DNA, 25 bp, Homo sapien
gacaaccagtgcatcagtggctact

SEQ ID NO: 3802081 - DNA, 25 bp, Homo sapien
gaattgggacatctgtccattcaga

SEQ ID NO: 3802082 - DNA, 25 bp, Homo sapien
tctaatattgctaatactgtgcagg

SEQ ID NO: 3802083 - DNA, 25 bp, Homo sapien
tgtgcaggactattattgaaaagaa

SEQ ID NO: 3802084 - DNA, 25 bp, Homo sapien
gacagtaaatgtgtaggcttatttt

SEQ ID NO: 3802085 - DNA, 25 bp, Homo sapien
aaccaattggcatagccgtgttgca

SEQ ID NO: 3802086 - DNA, 25 bp, Homo sapien
ttggctgtatttggcctatggacca

SEQ ID NO: 3802087 - DNA, 25 bp, Homo sapien
ggaccatagtatgccactggactaa

SEQ ID NO: 3802088 - DNA, 25 bp, Homo sapien
cactgtagccccgaaatgccataga

SEQ ID NO: 3802089 - DNA, 25 bp, Homo sapien
tagtcacgatagtcaggactcccag

SEQ ID NO: 3802090 - DNA, 25 bp, Homo sapien
tgaaccagcagagcaatacagtttg

SEQ ID NO: 3802091 - DNA, 25 bp, Homo sapien
aacagccagattggaatgtgcctcc

SEQ ID NO: 3802092 - DNA, 25 bp, Homo sapien
tgtcaggccctttctttacggcagt

SEQ ID NO: 3802093 - DNA, 25 bp, Homo sapien
ggactacaaacatgtgctaacacgc

SEQ ID NO: 3802094 - DNA, 25 bp, Homo sapien
caaacatgtgctaacacgcccagct

SEQ ID NO: 3802095 - DNA, 25 bp, Homo sapien
gactacaaacatgtgctaacacgcc

SEQ ID NO: 3802096 - DNA, 25 bp, Homo sapien
tacaaacatgtgctaacacgcccag

SEQ ID NO: 3802097 - DNA, 25 bp, Homo sapien
ccggccccgtgaccatagaggagag

SEQ ID NO: 3802098 - DNA, 25 bp, Homo sapien
aagagggagaggcttcgctaccgga

SEQ ID NO: 3802099 - DNA, 25 bp, Homo sapien
cgctaccggaagtaacaagacagag

SEQ ID NO: 3802100 - DNA, 25 bp, Homo sapien
caaccgggccattattctcagcaca

SEQ ID NO: 3802101 - DNA, 25 bp, Homo sapien
gcgactatcagaagcctcatcaatt

SEQ ID NO: 3802102 - DNA, 25 bp, Homo sapien
cccgaaaggacgcaggcgaggccca

SEQ ID NO: 3802103 - DNA, 25 bp, Homo sapien
gacaattagaccgtaaactcagcgt

SEQ ID NO: 3802104 - DNA, 25 bp, Homo sapien
aagggatagcgcagttggccaagct

SEQ ID NO: 3802105 - DNA, 25 bp, Homo sapien
catggatcactgtgggcttgaactt

SEQ ID NO: 3802106 - DNA, 25 bp, Homo sapien
ttgtccatgatggtctcgagttcct

SEQ ID NO: 3802107 - DNA, 25 bp, Homo sapien
tccatgggcctctggttaggctaaa

SEQ ID NO: 3802108 - DNA, 25 bp, Homo sapien
tctcagcaagaaggttcagtgtaag

SEQ ID NO: 3802109 - DNA, 25 bp, Homo sapien
taggaacacaggtcccatggctggg

SEQ ID NO: 3802110 - DNA, 25 bp, Homo sapien
gaattcgagtcaagtgcctagtaca

SEQ ID NO: 3802111 - DNA, 25 bp, Homo sapien
aaagactgaaaattgctctccgccg

SEQ ID NO: 3802112 - DNA, 25 bp, Homo sapien
taaccatagtgggagttttgcagca

SEQ ID NO: 3802113 - DNA, 25 bp, Homo sapien
aatttcagacgtagaaaactgctgc

SEQ ID NO: 3802114 - DNA, 25 bp, Homo sapien
tcagacgtagaaaactgctgcaaaa

SEQ ID NO: 3802115 - DNA, 25 bp, Homo sapien
aaaatttcagacgtagaaaactgct

SEQ ID NO: 3802116 - DNA, 25 bp, Homo sapien
tttcagacgtagaaaactgctgcaa

SEQ ID NO: 3802117 - DNA, 25 bp, Homo sapien
acatagcttttctgaggttcctcca

SEQ ID NO: 3802118 - DNA, 25 bp, Homo sapien
ttcacatagcttttctgaggttcct

SEQ ID NO: 3802119 - DNA, 25 bp, Homo sapien
tgttcacatagcttttctgaggttc

SEQ ID NO: 3802120 - DNA, 25 bp, Homo sapien
tgtgttcacatagcttttctgaggt

SEQ ID NO: 3802121 - DNA, 25 bp, Homo sapien
aattcactaacagaaatctgagggc

SEQ ID NO: 3802122 - DNA, 25 bp, Homo sapien
caggatgtcgtagcagcagtggcaa

SEQ ID NO: 3802123 - DNA, 25 bp, Homo sapien
taacagaaatctgagggccggtgct

SEQ ID NO: 3802124 - DNA, 25 bp, Homo sapien
gccggtgcttttgagaggttcatct

SEQ ID NO: 3802125 - DNA, 25 bp, Homo sapien
ctgaggagaatactgactttgggga

SEQ ID NO: 3802126 - DNA, 25 bp, Homo sapien
gaggagaatactgactttggggaaa

SEQ ID NO: 3802127 - DNA, 25 bp, Homo sapien
ttctctgcattctggacattctgtt

SEQ ID NO: 3802128 - DNA, 25 bp, Homo sapien
tgcattctggacattctgttttctt

SEQ ID NO: 3802129 - DNA, 25 bp, Homo sapien
tgcccaggatgcttctaaattcctg

SEQ ID NO: 3802130 - DNA, 25 bp, Homo sapien
ctatagagataaggactcaccgtgt

SEQ ID NO: 3802131 - DNA, 25 bp, Homo sapien
ggtgtcaagcaatgttcctacctca

SEQ ID NO: 3802132 - DNA, 25 bp, Homo sapien
taaaactttctatagagataaggac

SEQ ID NO: 3802133 - DNA, 25 bp, Homo sapien
gacagttgtttgactaaatatcatg

SEQ ID NO: 3802134 - DNA, 25 bp, Homo sapien
taggagaactgacaagaaatgtatt

SEQ ID NO: 3802135 - DNA, 25 bp, Homo sapien
taatatatagctaccctaggagaac

SEQ ID NO: 3802136 - DNA, 25 bp, Homo sapien
ccaaaaaagccctgatagtcaacat

SEQ ID NO: 3802137 - DNA, 25 bp, Homo sapien
tctcagtctaatggcatcaggaaat

SEQ ID NO: 3802138 - DNA, 25 bp, Homo sapien
catctgctgattcgctcggcctgtg

SEQ ID NO: 3802139 - DNA, 25 bp, Homo sapien
gtgagcacaccggaaaagaatcccc

SEQ ID NO: 3802140 - DNA, 25 bp, Homo sapien
tgttaggagctaaaggaatctgatc

SEQ ID NO: 3802141 - DNA, 25 bp, Homo sapien
tccagtgatagacgagcaggaccac

SEQ ID NO: 3802142 - DNA, 25 bp, Homo sapien
cagaggacaacttcttccgccgtcc

SEQ ID NO: 3802143 - DNA, 25 bp, Homo sapien
catttactcgttcagataaaaacct

SEQ ID NO: 3802144 - DNA, 25 bp, Homo sapien
ggaccaggaggtcgtgttcagattc

SEQ ID NO: 3802145 - DNA, 25 bp, Homo sapien
aaccatggattgtgcacttcaaacg

SEQ ID NO: 3802146 - DNA, 25 bp, Homo sapien
gattacaaggtgtgcactaccaagc

SEQ ID NO: 3802147 - DNA, 25 bp, Homo sapien
gcgcctggcctggattatatctcaa

SEQ ID NO: 3802148 - DNA, 25 bp, Homo sapien
aaatgtccacggtgtgtcagaagac

SEQ ID NO: 3802149 - DNA, 25 bp, Homo sapien
tatagggcgtcttggaaaattcttc

SEQ ID NO: 3802150 - DNA, 25 bp, Homo sapien
tagctccatgaggatggctctcctg

SEQ ID NO: 3802151 - DNA, 25 bp, Homo sapien
taatgctttgacacgttctagctcc

SEQ ID NO: 3802152 - DNA, 25 bp, Homo sapien
tggctgctgttttctatggtatagg

SEQ ID NO: 3802153 - DNA, 25 bp, Homo sapien
ggaaggtgtcggtgtagtcaaacag

SEQ ID NO: 3802154 - DNA, 25 bp, Homo sapien
tcttgagggcgtatagcaggaacag

SEQ ID NO: 3802155 - DNA, 25 bp, Homo sapien
cagaagcttggtgacgatgtcctcc

SEQ ID NO: 3802156 - DNA, 25 bp, Homo sapien
ggtacaggtagagcagactcagcct

SEQ ID NO: 3802157 - DNA, 25 bp, Homo sapien
tgagaaaccgtgatgtccagtaatg

SEQ ID NO: 3802158 - DNA, 25 bp, Homo sapien
gaaggagtatttgaccaggaactct

SEQ ID NO: 3802159 - DNA, 25 bp, Homo sapien
tgcttccacgtaggctccttaagat

SEQ ID NO: 3802160 - DNA, 25 bp, Homo sapien
tccagaactgagagtaacatagcat

SEQ ID NO: 3802161 - DNA, 25 bp, Homo sapien
tgagaaataaaagaggatctttctc

SEQ ID NO: 3802162 - DNA, 25 bp, Homo sapien
agaggatctttctctcacttggtat

SEQ ID NO: 3802163 - DNA, 25 bp, Homo sapien
ggtggatggaggatttatttcaagt

SEQ ID NO: 3802164 - DNA, 25 bp, Homo sapien
catcccctgttgtgacaaccattaa

SEQ ID NO: 3802165 - DNA, 25 bp, Homo sapien
ggataggtttgcacaggcctgccta

SEQ ID NO: 3802166 - DNA, 25 bp, Homo sapien
tagatcccgaccctaagcaattgtt

SEQ ID NO: 3802167 - DNA, 25 bp, Homo sapien
tcttgtgtaagagcacgtacatcac

SEQ ID NO: 3802168 - DNA, 25 bp, Homo sapien
tacatcacgtaaatcctgccctttg

SEQ ID NO: 3802169 - DNA, 25 bp, Homo sapien
caagggtggcagtgttacttctgcc

SEQ ID NO: 3802170 - DNA, 25 bp, Homo sapien
gggagattgttaggttctcagaacc

SEQ ID NO: 3802171 - DNA, 25 bp, Homo sapien
tcttctggaaatagcttctaagttt

SEQ ID NO: 3802172 - DNA, 25 bp, Homo sapien
tcataaggctgcgagtcagaatgtc

SEQ ID NO: 3802173 - DNA, 25 bp, Homo sapien
gggcccagtaaaacaaacagttgca

SEQ ID NO: 3802174 - DNA, 25 bp, Homo sapien
caaacagttgcaaacaaactgaggg

SEQ ID NO: 3802175 - DNA, 25 bp, Homo sapien
gtttccagccgccggagttccttga

SEQ ID NO: 3802176 - DNA, 25 bp, Homo sapien
catggccacaaaaagcccctgcgtt

SEQ ID NO: 3802177 - DNA, 25 bp, Homo sapien
tccctgtgcggatgtcagtccttgc

SEQ ID NO: 3802178 - DNA, 25 bp, Homo sapien
gcagcaccttgttttactgagggta

SEQ ID NO: 3802179 - DNA, 25 bp, Homo sapien
cgtcagcgggacttgaagagtctca

SEQ ID NO: 3802180 - DNA, 25 bp, Homo sapien
gcatcaaagctcagacgtcagcggg

SEQ ID NO: 3802181 - DNA, 25 bp, Homo sapien
ttgccagccgttggggactgagcct

SEQ ID NO: 3802182 - DNA, 25 bp, Homo sapien
cctgagtcttgccagccgttgggga

SEQ ID NO: 3802183 - DNA, 25 bp, Homo sapien
tgtggcacccttctgatgtcaccca

SEQ ID NO: 3802184 - DNA, 25 bp, Homo sapien
gaggggactgatgtggcacccttct

SEQ ID NO: 3802185 - DNA, 25 bp, Homo sapien
ggttcaggcgatttccaattccaag

SEQ ID NO: 3802186 - DNA, 25 bp, Homo sapien
taaatctaatgggaactgcccgaca

SEQ ID NO: 3802187 - DNA, 25 bp, Homo sapien
tcaggctctgagatccggatcctct

SEQ ID NO: 3802188 - DNA, 25 bp, Homo sapien
taaacttgacttagaggacaggcca

SEQ ID NO: 3802189 - DNA, 25 bp, Homo sapien
gcttggtgtaattatacctgctgta

SEQ ID NO: 3802190 - DNA, 25 bp, Homo sapien
tcatgccatatttataactatagcg

SEQ ID NO: 3802191 - DNA, 25 bp, Homo sapien
catcaggataggacaataaagatta

SEQ ID NO: 3802192 - DNA, 25 bp, Homo sapien
ttatacatcaggataggacaataaa

SEQ ID NO: 3802193 - DNA, 25 bp, Homo sapien
gatacaaagggttaatgaatggttc

SEQ ID NO: 3802194 - DNA, 25 bp, Homo sapien
aattttcactcaaagatacaaaggg

SEQ ID NO: 3802195 - DNA, 25 bp, Homo sapien
catggagtcacaagataatattttg

SEQ ID NO: 3802196 - DNA, 25 bp, Homo sapien
tcttcgaacttccagatgcaacttt

SEQ ID NO: 3802197 - DNA, 25 bp, Homo sapien
aaaatgtagttcaaggccgggtgct

SEQ ID NO: 3802198 - DNA, 25 bp, Homo sapien
gagcccatgtggtttgcagttaaag

SEQ ID NO: 3802199 - DNA, 25 bp, Homo sapien
tgtgaacgaacacctaccgtgtgcc

SEQ ID NO: 3802200 - DNA, 25 bp, Homo sapien
cagttaaaggccaaaagtcctgcac

SEQ ID NO: 3802201 - DNA, 25 bp, Homo sapien
ccaatgtgtccgttataccactctg

SEQ ID NO: 3802202 - DNA, 25 bp, Homo sapien
gcctttgtgtaccccccatagctta

SEQ ID NO: 3802203 - DNA, 25 bp, Homo sapien
tgcctttgtgtaccccccatagctt

SEQ ID NO: 3802204 - DNA, 25 bp, Homo sapien
aatgtgtccgttataccactctgta

SEQ ID NO: 3802205 - DNA, 25 bp, Homo sapien
aggtactcgcatgggcatgtcactg

SEQ ID NO: 3802206 - DNA, 25 bp, Homo sapien
ctcaggtactcgcatgggcatgtca

SEQ ID NO: 3802207 - DNA, 25 bp, Homo sapien
tcctcaggtactcgcatgggcatgt

SEQ ID NO: 3802208 - DNA, 25 bp, Homo sapien
cttcctcaggtactcgcatgggcat

SEQ ID NO: 3802209 - DNA, 25 bp, Homo sapien
cattcatatcctaagcaacaaaaca

SEQ ID NO: 3802210 - DNA, 25 bp, Homo sapien
agcctccgctcagccattcatatcc

SEQ ID NO: 3802211 - DNA, 25 bp, Homo sapien
tcagccattcatatcctaagcaaca

SEQ ID NO: 3802212 - DNA, 25 bp, Homo sapien
tccgctcagccattcatatcctaag

SEQ ID NO: 3802213 - DNA, 25 bp, Homo sapien
atttataacttctcagaaacacagt

SEQ ID NO: 3802214 - DNA, 25 bp, Homo sapien
agagggagatggcaaatttataact

SEQ ID NO: 3802215 - DNA, 25 bp, Homo sapien
acacagtaatgataagtaaccaagg

SEQ ID NO: 3802216 - DNA, 25 bp, Homo sapien
cacagtaatgataagtaaccaagga

SEQ ID NO: 3802217 - DNA, 25 bp, Homo sapien
ctctacagaaagttagtatactcac

SEQ ID NO: 3802218 - DNA, 25 bp, Homo sapien
cctctacagaaagttagtatactca

SEQ ID NO: 3802219 - DNA, 25 bp, Homo sapien
gtatacctctacagaaagttagtat

SEQ ID NO: 3802220 - DNA, 25 bp, Homo sapien
tacctctacagaaagttagtatact

SEQ ID NO: 3802221 - DNA, 25 bp, Homo sapien
tgtccattttgagacgggaagatag

SEQ ID NO: 3802222 - DNA, 25 bp, Homo sapien
tccattttgagacgggaagatagtc

SEQ ID NO: 3802223 - DNA, 25 bp, Homo sapien
ccatcatgtccattttgagacggga

SEQ ID NO: 3802224 - DNA, 25 bp, Homo sapien
tttgagacgggaagatagtcttcag

SEQ ID NO: 3802225 - DNA, 25 bp, Homo sapien
gacctcagcccttggtgagagtgag

SEQ ID NO: 3802226 - DNA, 25 bp, Homo sapien
ggacctcagcccttggtgagagtga

SEQ ID NO: 3802227 - DNA, 25 bp, Homo sapien
tttgttgtcaccttcatcttacaga

SEQ ID NO: 3802228 - DNA, 25 bp, Homo sapien
cagattttagctcgaactttggttt

SEQ ID NO: 3802229 - DNA, 25 bp, Homo sapien
ttggtttccacctgtctccataaag

SEQ ID NO: 3802230 - DNA, 25 bp, Homo sapien
cttacagattttagctcgaactttg

SEQ ID NO: 3802231 - DNA, 25 bp, Homo sapien
tctccgtgctcacgttctttcatgc

SEQ ID NO: 3802232 - DNA, 25 bp, Homo sapien
tttctccgtgctcacgttctttcat

SEQ ID NO: 3802233 - DNA, 25 bp, Homo sapien
tccttttctccgtgctcacgttctt

SEQ ID NO: 3802234 - DNA, 25 bp, Homo sapien
cctctccttttctccgtgctcacgt

SEQ ID NO: 3802235 - DNA, 25 bp, Homo sapien
ttcatcagataaagcaccactttca

SEQ ID NO: 3802236 - DNA, 25 bp, Homo sapien
tgattttaaataatctgccatgttt

SEQ ID NO: 3802237 - DNA, 25 bp, Homo sapien
gataaagcaccactttcaggatgat

SEQ ID NO: 3802238 - DNA, 25 bp, Homo sapien
tatggattacaatcactttcatcag

SEQ ID NO: 3802239 - DNA, 25 bp, Homo sapien
tgcatctgtagtagtcctctgcccg

SEQ ID NO: 3802240 - DNA, 25 bp, Homo sapien
tttgcatctgtagtagtcctctgcc

SEQ ID NO: 3802241 - DNA, 25 bp, Homo sapien
cgcttgcgcacgttgaaacatttcc

SEQ ID NO: 3802242 - DNA, 25 bp, Homo sapien
cgccgcaacgcttgcgcacgttgaa

SEQ ID NO: 3802243 - DNA, 25 bp, Homo sapien
aatgttgagagagtctaagggccgt

SEQ ID NO: 3802244 - DNA, 25 bp, Homo sapien
ctgcatcagcactgaactatcctgc

SEQ ID NO: 3802245 - DNA, 25 bp, Homo sapien
agagagtctaagggccgtggcatca

SEQ ID NO: 3802246 - DNA, 25 bp, Homo sapien
cagcactgaactatcctgcaactgc

SEQ ID NO: 3802247 - DNA, 25 bp, Homo sapien
gaggctttcttgcagaaggggtgat

SEQ ID NO: 3802248 - DNA, 25 bp, Homo sapien
caaagaggctttcttgcagaagggg

SEQ ID NO: 3802249 - DNA, 25 bp, Homo sapien
aagaggctttcttgcagaaggggtg

SEQ ID NO: 3802250 - DNA, 25 bp, Homo sapien
ccggttgcaaagaggctttcttgca

SEQ ID NO: 3802251 - DNA, 25 bp, Homo sapien
atgtatccatgtcctgacctggcag

SEQ ID NO: 3802252 - DNA, 25 bp, Homo sapien
aatgtatccatgtcctgacctggca

SEQ ID NO: 3802253 - DNA, 25 bp, Homo sapien
aaaatgtatccatgtcctgacctgg

SEQ ID NO: 3802254 - DNA, 25 bp, Homo sapien
aaatgtatccatgtcctgacctggc

SEQ ID NO: 3802255 - DNA, 25 bp, Homo sapien
atgttttccaggccttttatgttct

SEQ ID NO: 3802256 - DNA, 25 bp, Homo sapien
tgttttccaggccttttatgttctg

SEQ ID NO: 3802257 - DNA, 25 bp, Homo sapien
agacacacttgggaggtgtcttgag

SEQ ID NO: 3802258 - DNA, 25 bp, Homo sapien
aggggatagagcagacactccgcag

SEQ ID NO: 3802259 - DNA, 25 bp, Homo sapien
gatagagcagacactccgcaggtgt

SEQ ID NO: 3802260 - DNA, 25 bp, Homo sapien
ggagtgagcagacacacttgggagg

SEQ ID NO: 3802261 - DNA, 25 bp, Homo sapien
atattatttatttattcttccttag

SEQ ID NO: 3802262 - DNA, 25 bp, Homo sapien
aggtactcgcatgggcatgtcactg

SEQ ID NO: 3802263 - DNA, 25 bp, Homo sapien
ctcaggtactcgcatgggcatgtca

SEQ ID NO: 3802264 - DNA, 25 bp, Homo sapien
tcctcaggtactcgcatgggcatgt

SEQ ID NO: 3802265 - DNA, 25 bp, Homo sapien
cttcctcaggtactcgcatgggcat

SEQ ID NO: 3802266 - DNA, 25 bp, Homo sapien
tccgctcagccattcatatcctaag

SEQ ID NO: 3802267 - DNA, 25 bp, Homo sapien
cattcatatcctaagcaacaaaaca

SEQ ID NO: 3802268 - DNA, 25 bp, Homo sapien
agcctccgctcagccattcatatcc

SEQ ID NO: 3802269 - DNA, 25 bp, Homo sapien
tcagccattcatatcctaagcaaca

SEQ ID NO: 3802270 - DNA, 25 bp, Homo sapien
atttataacttctcagaaacacagt

SEQ ID NO: 3802271 - DNA, 25 bp, Homo sapien
acacagtaatgataagtaaccaagg

SEQ ID NO: 3802272 - DNA, 25 bp, Homo sapien
cacagtaatgataagtaaccaagga

SEQ ID NO: 3802273 - DNA, 25 bp, Homo sapien
agagggagatggcaaatttataact

SEQ ID NO: 3802274 - DNA, 25 bp, Homo sapien
cctctacagaaagttagtatactca

SEQ ID NO: 3802275 - DNA, 25 bp, Homo sapien
ctctacagaaagttagtatactcac

SEQ ID NO: 3802276 - DNA, 25 bp, Homo sapien
tacctctacagaaagttagtatact

SEQ ID NO: 3802277 - DNA, 25 bp, Homo sapien
gtatacctctacagaaagttagtat

SEQ ID NO: 3802278 - DNA, 25 bp, Homo sapien
tgtccattttgagacgggaagatag

SEQ ID NO: 3802279 - DNA, 25 bp, Homo sapien
tccattttgagacgggaagatagtc

SEQ ID NO: 3802280 - DNA, 25 bp, Homo sapien
ccatcatgtccattttgagacggga

SEQ ID NO: 3802281 - DNA, 25 bp, Homo sapien
tttgagacgggaagatagtcttcag

SEQ ID NO: 3802282 - DNA, 25 bp, Homo sapien
ggacctcagcccttggtgagagtga

SEQ ID NO: 3802283 - DNA, 25 bp, Homo sapien
gacctcagcccttggtgagagtgag

SEQ ID NO: 3802284 - DNA, 25 bp, Homo sapien
cagattttagctcgaactttggttt

SEQ ID NO: 3802285 - DNA, 25 bp, Homo sapien
tttgttgtcaccttcatcttacaga

SEQ ID NO: 3802286 - DNA, 25 bp, Homo sapien
ttggtttccacctgtctccataaag

SEQ ID NO: 3802287 - DNA, 25 bp, Homo sapien
cttacagattttagctcgaactttg

SEQ ID NO: 3802288 - DNA, 25 bp, Homo sapien
tctccgtgctcacgttctttcatgc

SEQ ID NO: 3802289 - DNA, 25 bp, Homo sapien
tttctccgtgctcacgttctttcat

SEQ ID NO: 3802290 - DNA, 25 bp, Homo sapien
tccttttctccgtgctcacgttctt

SEQ ID NO: 3802291 - DNA, 25 bp, Homo sapien
cctctccttttctccgtgctcacgt

SEQ ID NO: 3802292 - DNA, 25 bp, Homo sapien
ttcatcagataaagcaccactttca

SEQ ID NO: 3802293 - DNA, 25 bp, Homo sapien
gataaagcaccactttcaggatgat

SEQ ID NO: 3802294 - DNA, 25 bp, Homo sapien
tgattttaaataatctgccatgttt

SEQ ID NO: 3802295 - DNA, 25 bp, Homo sapien
tatggattacaatcactttcatcag

SEQ ID NO: 3802296 - DNA, 25 bp, Homo sapien
cgccgcaacgcttgcgcacgttgaa

SEQ ID NO: 3802297 - DNA, 25 bp, Homo sapien
cgcttgcgcacgttgaaacatttcc

SEQ ID NO: 3802298 - DNA, 25 bp, Homo sapien
tgcatctgtagtagtcctctgcccg

SEQ ID NO: 3802299 - DNA, 25 bp, Homo sapien
tttgcatctgtagtagtcctctgcc

SEQ ID NO: 3802300 - DNA, 25 bp, Homo sapien
aatgttgagagagtctaagggccgt

SEQ ID NO: 3802301 - DNA, 25 bp, Homo sapien
cagcactgaactatcctgcaactgc

SEQ ID NO: 3802302 - DNA, 25 bp, Homo sapien
agagagtctaagggccgtggcatca

SEQ ID NO: 3802303 - DNA, 25 bp, Homo sapien
ctgcatcagcactgaactatcctgc

SEQ ID NO: 3802304 - DNA, 25 bp, Homo sapien
gaggctttcttgcagaaggggtgat

SEQ ID NO: 3802305 - DNA, 25 bp, Homo sapien
caaagaggctttcttgcagaagggg

SEQ ID NO: 3802306 - DNA, 25 bp, Homo sapien
ccggttgcaaagaggctttcttgca

SEQ ID NO: 3802307 - DNA, 25 bp, Homo sapien
aagaggctttcttgcagaaggggtg

SEQ ID NO: 3802308 - DNA, 25 bp, Homo sapien
aatgtatccatgtcctgacctggca

SEQ ID NO: 3802309 - DNA, 25 bp, Homo sapien
aaatgtatccatgtcctgacctggc

SEQ ID NO: 3802310 - DNA, 25 bp, Homo sapien
aaaatgtatccatgtcctgacctgg

SEQ ID NO: 3802311 - DNA, 25 bp, Homo sapien
atgtatccatgtcctgacctggcag

SEQ ID NO: 3802312 - DNA, 25 bp, Homo sapien
atgttttccaggccttttatgttct

SEQ ID NO: 3802313 - DNA, 25 bp, Homo sapien
tgttttccaggccttttatgttctg

SEQ ID NO: 3802314 - DNA, 25 bp, Homo sapien
agacacacttgggaggtgtcttgag

SEQ ID NO: 3802315 - DNA, 25 bp, Homo sapien
ttccttagtttcttgagattatcat

SEQ ID NO: 3802316 - DNA, 25 bp, Homo sapien
gatagagcagacactccgcaggtgt

SEQ ID NO: 3802317 - DNA, 25 bp, Homo sapien
ggagtgagcagacacacttgggagg

SEQ ID NO: 3802318 - DNA, 25 bp, Homo sapien
gcccctgttgcaataaccactgctt

SEQ ID NO: 3802319 - DNA, 25 bp, Homo sapien
agatgacttccgtgcccctgttgca

SEQ ID NO: 3802320 - DNA, 25 bp, Homo sapien
cgtgcccctgttgcaataaccactg

SEQ ID NO: 3802321 - DNA, 25 bp, Homo sapien
cctggcatagccagatgacttccgt

SEQ ID NO: 3802322 - DNA, 25 bp, Homo sapien
cctgaactcccatcgcctatgtgaa

SEQ ID NO: 3802323 - DNA, 25 bp, Homo sapien
tcgcctatgtgaaatatggttgctt

SEQ ID NO: 3802324 - DNA, 25 bp, Homo sapien
aattgtgggttgtgttggtccctga

SEQ ID NO: 3802325 - DNA, 25 bp, Homo sapien
ttacgtgtgcaccggcgtgggatcc

SEQ ID NO: 3802326 - DNA, 25 bp, Homo sapien
ccagatgtggacaatgagaccgtgt

SEQ ID NO: 3802327 - DNA, 25 bp, Homo sapien
cagaagcttgccagctccagccagt

SEQ ID NO: 3802328 - DNA, 25 bp, Homo sapien
tcagaagcttgccagctccagccag

SEQ ID NO: 3802329 - DNA, 25 bp, Homo sapien
aaatccagatgtggacaatgagacc

SEQ ID NO: 3802330 - DNA, 25 bp, Homo sapien
ctcttagcaaaggactccagggagt

SEQ ID NO: 3802331 - DNA, 25 bp, Homo sapien
ttccattgctcttagcaaaggactc

SEQ ID NO: 3802332 - DNA, 25 bp, Homo sapien
tgctcttagcaaaggactccaggga

SEQ ID NO: 3802333 - DNA, 25 bp, Homo sapien
tttttccattgctcttagcaaagga

SEQ ID NO: 3802334 - DNA, 25 bp, Homo sapien
ccagctccccgagcgcctctcttcc

SEQ ID NO: 3802335 - DNA, 25 bp, Homo sapien
ggagtgattcttgttgcagggggaa

SEQ ID NO: 3802336 - DNA, 25 bp, Homo sapien
tggagtgattcttgttgcaggggga

SEQ ID NO: 3802337 - DNA, 25 bp, Homo sapien
gagtgattcttgttgcagggggaag

SEQ ID NO: 3802338 - DNA, 25 bp, Homo sapien
gaggtgcctgtgacgcggtctccat

SEQ ID NO: 3802339 - DNA, 25 bp, Homo sapien
gcacacctttcagttctctcatcag

SEQ ID NO: 3802340 - DNA, 25 bp, Homo sapien
ccttgttactaacgtgtgcacacct

SEQ ID NO: 3802341 - DNA, 25 bp, Homo sapien
gattggacgcttaggcggtcaccag

SEQ ID NO: 3802342 - DNA, 25 bp, Homo sapien
ccgcccctcacactgcacgccgcag

SEQ ID NO: 3802343 - DNA, 25 bp, Homo sapien
cccctcacactgcacgccgcaggct

SEQ ID NO: 3802344 - DNA, 25 bp, Homo sapien
cctcacactgcacgccgcaggctcc

SEQ ID NO: 3802345 - DNA, 25 bp, Homo sapien
tcacactgcacgccgcaggctcctt

SEQ ID NO: 3802346 - DNA, 25 bp, Homo sapien
accaccgcggcggtgaccaccgcgg

SEQ ID NO: 3802347 - DNA, 25 bp, Homo sapien
gcaccaccgcggcggtgaccaccgc

SEQ ID NO: 3802348 - DNA, 25 bp, Homo sapien
caccaccgcggcggtgaccaccgcg

SEQ ID NO: 3802349 - DNA, 25 bp, Homo sapien
gagtagttgatctccacgtccgact

SEQ ID NO: 3802350 - DNA, 25 bp, Homo sapien
gtccgacttgacgaagccaccgcag

SEQ ID NO: 3802351 - DNA, 25 bp, Homo sapien
gcagcccaccacgatgtcctccgag

SEQ ID NO: 3802352 - DNA, 25 bp, Homo sapien
gatgtcctccgagccgtgcgccggc

SEQ ID NO: 3802353 - DNA, 25 bp, Homo sapien
caaagtcccatgcttggtgtacagc

SEQ ID NO: 3802354 - DNA, 25 bp, Homo sapien
cagtctgtctggtatttcaaagtcc

SEQ ID NO: 3802355 - DNA, 25 bp, Homo sapien
gcacagtctgtctggtatttcaaag

SEQ ID NO: 3802356 - DNA, 25 bp, Homo sapien
gtaaccattattaggggcacagtct

SEQ ID NO: 3802357 - DNA, 25 bp, Homo sapien
ccctaggggaggctcaatcttcaga

SEQ ID NO: 3802358 - DNA, 25 bp, Homo sapien
taggggaggctcaatcttcagaatg

SEQ ID NO: 3802359 - DNA, 25 bp, Homo sapien
tccaccctaggggaggctcaatctt

SEQ ID NO: 3802360 - DNA, 25 bp, Homo sapien
aactccaccctaggggaggctcaat

SEQ ID NO: 3802361 - DNA, 25 bp, Homo sapien
catccacatggagctccacggtcgt

SEQ ID NO: 3802362 - DNA, 25 bp, Homo sapien
cacatggagctccacggtcgtcggc

SEQ ID NO: 3802363 - DNA, 25 bp, Homo sapien
acatggagctccacggtcgtcggct

SEQ ID NO: 3802364 - DNA, 25 bp, Homo sapien
tccacatggagctccacggtcgtcg

SEQ ID NO: 3802365 - DNA, 25 bp, Homo sapien
gggcacacacccattaggactctaa

SEQ ID NO: 3802366 - DNA, 25 bp, Homo sapien
ggactctaaattcacaccaccgtgg

SEQ ID NO: 3802367 - DNA, 25 bp, Homo sapien
tccccgtcaccgcaaaggtagagga

SEQ ID NO: 3802368 - DNA, 25 bp, Homo sapien
cctgagaatctgaatcgcgggagct

SEQ ID NO: 3802369 - DNA, 25 bp, Homo sapien
gtgtaactgtggactggatctttgc

SEQ ID NO: 3802370 - DNA, 25 bp, Homo sapien
atctttgcttcggtcccagtgtttc

SEQ ID NO: 3802371 - DNA, 25 bp, Homo sapien
tttccgccaggctgtgtaactgtgg

SEQ ID NO: 3802372 - DNA, 25 bp, Homo sapien
agagacacctgaactcccgcaggac

SEQ ID NO: 3802373 - DNA, 25 bp, Homo sapien
atctcaaggatttctggcataaaac

SEQ ID NO: 3802374 - DNA, 25 bp, Homo sapien
gtttgacagaggtgacaggcatgaa

SEQ ID NO: 3802375 - DNA, 25 bp, Homo sapien
gtctcccttaatctcaaggatttct

SEQ ID NO: 3802376 - DNA, 25 bp, Homo sapien
cccttaatctcaaggatttctggca

SEQ ID NO: 3802377 - DNA, 25 bp, Homo sapien
tgagttgcgaggatttcataatctc

SEQ ID NO: 3802378 - DNA, 25 bp, Homo sapien
acgcccaggttggatgagttgcgag

SEQ ID NO: 3802379 - DNA, 25 bp, Homo sapien
cccaggttggatgagttgcgaggat

SEQ ID NO: 3802380 - DNA, 25 bp, Homo sapien
gttggatgagttgcgaggatttcat

SEQ ID NO: 3802381 - DNA, 25 bp, Homo sapien
gactggccgcattggcattggagtt

SEQ ID NO: 3802382 - DNA, 25 bp, Homo sapien
atcacttcggacagagccagacaca

SEQ ID NO: 3802383 - DNA, 25 bp, Homo sapien
gagttggttacacgcactgtggtgc

SEQ ID NO: 3802384 - DNA, 25 bp, Homo sapien
cagcaactatgaggggactggccgc

SEQ ID NO: 3802385 - DNA, 25 bp, Homo sapien
caggcactggtgagacattgcagcc

SEQ ID NO: 3802386 - DNA, 25 bp, Homo sapien
aggcactggtgagacattgcagccc

SEQ ID NO: 3802387 - DNA, 25 bp, Homo sapien
cactggtgagacattgcagcccagg

SEQ ID NO: 3802388 - DNA, 25 bp, Homo sapien
ggcactggtgagacattgcagccca

SEQ ID NO: 3802389 - DNA, 25 bp, Homo sapien
tctctggagaccgtgtagcacaaat

SEQ ID NO: 3802390 - DNA, 25 bp, Homo sapien
aaatacaccagactctcgtcttggg

SEQ ID NO: 3802391 - DNA, 25 bp, Homo sapien
cagtgtagcccccacttggcaagga

SEQ ID NO: 3802392 - DNA, 25 bp, Homo sapien
gaatagaaagagaacgagccatctt

SEQ ID NO: 3802393 - DNA, 25 bp, Homo sapien
taatcctctcccctcgatagaacgg

SEQ ID NO: 3802394 - DNA, 25 bp, Homo sapien
gtgaagtcaagtctggaaggcgcca

SEQ ID NO: 3802395 - DNA, 25 bp, Homo sapien
ggcgccacatcaaaggtaatcctct

SEQ ID NO: 3802396 - DNA, 25 bp, Homo sapien
tgtcatgctccactgtgaagtcaag

SEQ ID NO: 3802397 - DNA, 25 bp, Homo sapien
tcacctggtttacggccatggcatc

SEQ ID NO: 3802398 - DNA, 25 bp, Homo sapien
aaactctcctcaatgcagctgccag

SEQ ID NO: 3802399 - DNA, 25 bp, Homo sapien
taactctaacattgggtggtccact

SEQ ID NO: 3802400 - DNA, 25 bp, Homo sapien
gagttataggcaaagtggcccacca

SEQ ID NO: 3802401 - DNA, 25 bp, Homo sapien
catctccttcgggtccgttcaagac

SEQ ID NO: 3802402 - DNA, 25 bp, Homo sapien
ttcaagaccctcccggtgacggaga

SEQ ID NO: 3802403 - DNA, 25 bp, Homo sapien
agaatcccatgacgtggaacacggg

SEQ ID NO: 3802404 - DNA, 25 bp, Homo sapien
ttctggaacaccatctccttcgggt

SEQ ID NO: 3802405 - DNA, 25 bp, Homo sapien
caaggcggaatgagccatcagcttt

SEQ ID NO: 3802406 - DNA, 25 bp, Homo sapien
tgatggtgaccgtttcaaagtagag

SEQ ID NO: 3802407 - DNA, 25 bp, Homo sapien
tgtggttatgttctcaaggcggaat

SEQ ID NO: 3802408 - DNA, 25 bp, Homo sapien
gtagaggtgctctttctgagcatgg

SEQ ID NO: 3802409 - DNA, 25 bp, Homo sapien
tccatgagcatctgtctccacggtg

SEQ ID NO: 3802410 - DNA, 25 bp, Homo sapien
aacaaaatgatccatgagcatctgt

SEQ ID NO: 3802411 - DNA, 25 bp, Homo sapien
tctccacggtgaccaaagacttgtc

SEQ ID NO: 3802412 - DNA, 25 bp, Homo sapien
aagacttgtccttgtcttgagatga

SEQ ID NO: 3802413 - DNA, 25 bp, Homo sapien
tttttgagcggccattagtagagtt

SEQ ID NO: 3802414 - DNA, 25 bp, Homo sapien
ggccatttttgagcggccattagta

SEQ ID NO: 3802415 - DNA, 25 bp, Homo sapien
gagcggccattagtagagttcattt

SEQ ID NO: 3802416 - DNA, 25 bp, Homo sapien
tatggccatttttgagcggccatta

SEQ ID NO: 3802417 - DNA, 25 bp, Homo sapien
tctggggtttcaacgtcagccctgc

SEQ ID NO: 3802418 - DNA, 25 bp, Homo sapien
gaaatgtctggggtttcaacgtcag

SEQ ID NO: 3802419 - DNA, 25 bp, Homo sapien
tgtctggggtttcaacgtcagccct

SEQ ID NO: 3802420 - DNA, 25 bp, Homo sapien
aaactgatgccaagaactgtacaaa

SEQ ID NO: 3802421 - DNA, 25 bp, Homo sapien
catggcgttgaccttgccggagagc

SEQ ID NO: 3802422 - DNA, 25 bp, Homo sapien
gggactgtagagtcaccagcaagtc

SEQ ID NO: 3802423 - DNA, 25 bp, Homo sapien
gctcagggactgtagagtcaccagc

SEQ ID NO: 3802424 - DNA, 25 bp, Homo sapien
agcacgttgtcaaaggtgaaagtca

SEQ ID NO: 3802425 - DNA, 25 bp, Homo sapien
tccaggctcttgttcttccagcacc

SEQ ID NO: 3802426 - DNA, 25 bp, Homo sapien
tgtagcccgtctgcctgaactcaac

SEQ ID NO: 3802427 - DNA, 25 bp, Homo sapien
ccgtctgcctgaactcaactgcaga

SEQ ID NO: 3802428 - DNA, 25 bp, Homo sapien
agggaacatctcagcatgtagcccg

SEQ ID NO: 3802429 - DNA, 25 bp, Homo sapien
gactcctttggagaggttataaatc

SEQ ID NO: 3802430 - DNA, 25 bp, Homo sapien
caggcttggacaggcagaatcggtt

SEQ ID NO: 3802431 - DNA, 25 bp, Homo sapien
gttataaatccccacattctcacgc

SEQ ID NO: 3802432 - DNA, 25 bp, Homo sapien
ggcagaatcggttgactcctttgga

SEQ ID NO: 3802433 - DNA, 25 bp, Homo sapien
tgaacacacagaaattgaaagcttg

SEQ ID NO: 3802434 - DNA, 25 bp, Homo sapien
aaaaacaagagcaggttgaacacac

SEQ ID NO: 3802435 - DNA, 25 bp, Homo sapien
catggcacatcaatccttccaaact

SEQ ID NO: 3802436 - DNA, 25 bp, Homo sapien
tttctaattcatggcacatcaatcc

SEQ ID NO: 3802437 - DNA, 25 bp, Homo sapien
aacaaatgttggcgaaggaggtgaa

SEQ ID NO: 3802438 - DNA, 25 bp, Homo sapien
caaatgttggcgaaggaggtgaaga

SEQ ID NO: 3802439 - DNA, 25 bp, Homo sapien
aaatgttggcgaaggaggtgaagaa

SEQ ID NO: 3802440 - DNA, 25 bp, Homo sapien
atgttggcgaaggaggtgaagaaac

SEQ ID NO: 3802441 - DNA, 25 bp, Homo sapien
ctggcagccacgcactgccacactt

SEQ ID NO: 3802442 - DNA, 25 bp, Homo sapien
tgctggcagccacgcactgccacac

SEQ ID NO: 3802443 - DNA, 25 bp, Homo sapien
ggcagccacgcactgccacacttct

SEQ ID NO: 3802444 - DNA, 25 bp, Homo sapien
atgctggcagccacgcactgccaca

SEQ ID NO: 3802445 - DNA, 25 bp, Homo sapien
tcattgcactcaacaagccccagag

SEQ ID NO: 3802446 - DNA, 25 bp, Homo sapien
gaaattagctaaaaccaccctgctg

SEQ ID NO: 3802447 - DNA, 25 bp, Homo sapien
taaggatccaagagataaccacagc

SEQ ID NO: 3802448 - DNA, 25 bp, Homo sapien
caaacatatcaattgtggcacatgc

SEQ ID NO: 3802449 - DNA, 25 bp, Homo sapien
ccgacatctgaaatcgagtggcagc

SEQ ID NO: 3802450 - DNA, 25 bp, Homo sapien
ctgaaatcgagtggcagctctttgc

SEQ ID NO: 3802451 - DNA, 25 bp, Homo sapien
ttttcagagaatggcatctattaca

SEQ ID NO: 3802452 - DNA, 25 bp, Homo sapien
gagcaattccgacatctgaaatcga

SEQ ID NO: 3802453 - DNA, 25 bp, Homo sapien
aacgcttgctcaaaccggtggcagg

SEQ ID NO: 3802454 - DNA, 25 bp, Homo sapien
tgtagaacgcttgctcaaaccggtg

SEQ ID NO: 3802455 - DNA, 25 bp, Homo sapien
gtgtcataggtgtagaacgcttgct

SEQ ID NO: 3802456 - DNA, 25 bp, Homo sapien
gagcgaggggtcactttgtacacac

SEQ ID NO: 3802457 - DNA, 25 bp, Homo sapien
tagtcacagtgacatccatcatttt

SEQ ID NO: 3802458 - DNA, 25 bp, Homo sapien
cattttgtcggtggtgatagttcca

SEQ ID NO: 3802459 - DNA, 25 bp, Homo sapien
tagttccaaggacatggtggcgaat

SEQ ID NO: 3802460 - DNA, 25 bp, Homo sapien
ggctgtcaatgtcaagatactaggt

SEQ ID NO: 3802461 - DNA, 25 bp, Homo sapien
caaggcgggttcactgtcgatggaa

SEQ ID NO: 3802462 - DNA, 25 bp, Homo sapien
agtaagagaaatcatacgagaaggg

SEQ ID NO: 3802463 - DNA, 25 bp, Homo sapien
gaaggggccttgtaactcatctacc

SEQ ID NO: 3802464 - DNA, 25 bp, Homo sapien
cagacttcagagggcctaagaccaa

SEQ ID NO: 3802465 - DNA, 25 bp, Homo sapien
attaatatacttcagtttggcgggt

SEQ ID NO: 3802466 - DNA, 25 bp, Homo sapien
taatatacttcagtttggcgggtcc

SEQ ID NO: 3802467 - DNA, 25 bp, Homo sapien
aatatacttcagtttggcgggtcct

SEQ ID NO: 3802468 - DNA, 25 bp, Homo sapien
ttaatatacttcagtttggcgggtc

SEQ ID NO: 3802469 - DNA, 25 bp, Homo sapien
agatgacggtgtaacagtgattttc

SEQ ID NO: 3802470 - DNA, 25 bp, Homo sapien
ctccactgacaacggcttccattga

SEQ ID NO: 3802471 - DNA, 25 bp, Homo sapien
cactgacaacggcttccattgaagg

SEQ ID NO: 3802472 - DNA, 25 bp, Homo sapien
aaagagcagctctttagatgacggt

SEQ ID NO: 3802473 - DNA, 25 bp, Homo sapien
aactcggggtggatctggccttcta

SEQ ID NO: 3802474 - DNA, 25 bp, Homo sapien
tgatgacaatctcgactccttccaa

SEQ ID NO: 3802475 - DNA, 25 bp, Homo sapien
ctgtgatcagcggtgaacttgcccc

SEQ ID NO: 3802476 - DNA, 25 bp, Homo sapien
ctttgtcatcagtaaagactgtgat

SEQ ID NO: 3802477 - DNA, 25 bp, Homo sapien
tctgtgaggtcaccgtgtactccag

SEQ ID NO: 3802478 - DNA, 25 bp, Homo sapien
agggcataggccttgaagtctccga

SEQ ID NO: 3802479 - DNA, 25 bp, Homo sapien
tgaagtctccgatggttccttccac

SEQ ID NO: 3802480 - DNA, 25 bp, Homo sapien
gcagtcagaacatagccctccttct

SEQ ID NO: 3802481 - DNA, 25 bp, Homo sapien
gagggccacagatgtgctattttaa

SEQ ID NO: 3802482 - DNA, 25 bp, Homo sapien
gaaaagcagatcatcagctcagcgg

SEQ ID NO: 3802483 - DNA, 25 bp, Homo sapien
ggtgtattcctaggtcaagactacc

SEQ ID NO: 3802484 - DNA, 25 bp, Homo sapien
agactaccacactgtaccctttttg

SEQ ID NO: 3802485 - DNA, 25 bp, Homo sapien
cagcacctactcttgtggtacacaa

SEQ ID NO: 3802486 - DNA, 25 bp, Homo sapien
tctgccagccaatagaaatctgcct

SEQ ID NO: 3802487 - DNA, 25 bp, Homo sapien
gcctgtttcttaactactgcatagc

SEQ ID NO: 3802488 - DNA, 25 bp, Homo sapien
catattattgttcacagactggcaa

SEQ ID NO: 3802489 - DNA, 25 bp, Homo sapien
ctcagggataagaggactcccggga

SEQ ID NO: 3802490 - DNA, 25 bp, Homo sapien
ccgttgtcctgggtcaagaggttgg

SEQ ID NO: 3802491 - DNA, 25 bp, Homo sapien
gagaatgtcagaatgccgttgtcct

SEQ ID NO: 3802492 - DNA, 25 bp, Homo sapien
gtttgagaatgtcagaatgccgttg

SEQ ID NO: 3802493 - DNA, 25 bp, Homo sapien
caagtgggtgatcagaaaacaagaa

SEQ ID NO: 3802494 - DNA, 25 bp, Homo sapien
gttgtcaagcaacacgtaagtctcg

SEQ ID NO: 3802495 - DNA, 25 bp, Homo sapien
cataagcatgattccgtggcaaaac

SEQ ID NO: 3802496 - DNA, 25 bp, Homo sapien
gatgcctaagagagcagccgttgtg

SEQ ID NO: 3802497 - DNA, 25 bp, Homo sapien
ggatggctcaaaccggaactccttc

SEQ ID NO: 3802498 - DNA, 25 bp, Homo sapien
gtttgaagtaatactggccagggct

SEQ ID NO: 3802499 - DNA, 25 bp, Homo sapien
cggttcggtaccccgtgatggtgat

SEQ ID NO: 3802500 - DNA, 25 bp, Homo sapien
aactccttcatcatgggtttgaagt

SEQ ID NO: 3802501 - DNA, 25 bp, Homo sapien
catggcaaccccttgttcgggctct

SEQ ID NO: 3802502 - DNA, 25 bp, Homo sapien
gaacttgccctcttcgtctgtcacg

SEQ ID NO: 3802503 - DNA, 25 bp, Homo sapien
gtcttctccgtaaatgctgcagtcg

SEQ ID NO: 3802504 - DNA, 25 bp, Homo sapien
tcgggctctccgtttaaggaagaca

SEQ ID NO: 3802505 - DNA, 25 bp, Homo sapien
tctgccttgagctgaacgtggtaca

SEQ ID NO: 3802506 - DNA, 25 bp, Homo sapien
ggagcgcccgctcaatgtggtcgtt

SEQ ID NO: 3802507 - DNA, 25 bp, Homo sapien
tcaatgtggtcgttgccttctgcct

SEQ ID NO: 3802508 - DNA, 25 bp, Homo sapien
caatcaccctatggtgggggagcgc

SEQ ID NO: 3802509 - DNA, 25 bp, Homo sapien
tgatgtttacatcatcgatgtcatt

SEQ ID NO: 3802510 - DNA, 25 bp, Homo sapien
tttacatcatcgatgtcattattcc

SEQ ID NO: 3802511 - DNA, 25 bp, Homo sapien
ctatgatgtttacatcatcgatgtc

SEQ ID NO: 3802512 - DNA, 25 bp, Homo sapien
gatgtttacatcatcgatgtcatta

SEQ ID NO: 3802513 - DNA, 25 bp, Homo sapien
gtaggaaggtattcagaggaagtga

SEQ ID NO: 3802514 - DNA, 25 bp, Homo sapien
acagtgcacctgccgcaagagaatg

SEQ ID NO: 3802515 - DNA, 25 bp, Homo sapien
cacactggcacctttctacataaca

SEQ ID NO: 3802516 - DNA, 25 bp, Homo sapien
cactggcacctttctacataacaca

SEQ ID NO: 3802517 - DNA, 25 bp, Homo sapien
ctgccgcaagagaatgccaggacca

SEQ ID NO: 3802518 - DNA, 25 bp, Homo sapien
tggattggattgtcgaggttttcgc

SEQ ID NO: 3802519 - DNA, 25 bp, Homo sapien
aactgtctggattggattgtcgagg

SEQ ID NO: 3802520 - DNA, 25 bp, Homo sapien
agggaaactgtctggattggattgt

SEQ ID NO: 3802521 - DNA, 25 bp, Homo sapien
gattgtcgaggttttcgcttttgta

SEQ ID NO: 3802522 - DNA, 25 bp, Homo sapien
ggtacgtgatacaactgaggatcca

SEQ ID NO: 3802523 - DNA, 25 bp, Homo sapien
acagcatccctggaacggcaccagg

SEQ ID NO: 3802524 - DNA, 25 bp, Homo sapien
ggctgacttcaaagggacgatgctt

SEQ ID NO: 3802525 - DNA, 25 bp, Homo sapien
gaggctcgtaagctggcaaatccta

SEQ ID NO: 3802526 - DNA, 25 bp, Homo sapien
tatggtagcccactgcggtgaaaga

SEQ ID NO: 3802527 - DNA, 25 bp, Homo sapien
cggtgaaagaaacttgaggcaagat

SEQ ID NO: 3802528 - DNA, 25 bp, Homo sapien
caagatgtagtcatactgggatctg

SEQ ID NO: 3802529 - DNA, 25 bp, Homo sapien
tgatgtgtttatggtagcccactgc

SEQ ID NO: 3802530 - DNA, 25 bp, Homo sapien
ccctgtggagtcatttgcgtgctcc

SEQ ID NO: 3802531 - DNA, 25 bp, Homo sapien
aggtggttgtcctgcatccctgtgg

SEQ ID NO: 3802532 - DNA, 25 bp, Homo sapien
ttgcgtgctcctgggtcctccctat

SEQ ID NO: 3802533 - DNA, 25 bp, Homo sapien
ggtggttgtcctgcatccctgtgga

SEQ ID NO: 3802534 - DNA, 25 bp, Homo sapien
aaagggtactcattcactgctggcg

SEQ ID NO: 3802535 - DNA, 25 bp, Homo sapien
gacacacggtatatccacacagagg

SEQ ID NO: 3802536 - DNA, 25 bp, Homo sapien
cccatggatgggaagtggccgtatc

SEQ ID NO: 3802537 - DNA, 25 bp, Homo sapien
gcccaaatggcctaagacacacggt

SEQ ID NO: 3802538 - DNA, 25 bp, Homo sapien
tgcagctatcaacggccttcacaga

SEQ ID NO: 3802539 - DNA, 25 bp, Homo sapien
tgcagccccaagcaaaggtaagtgg

SEQ ID NO: 3802540 - DNA, 25 bp, Homo sapien
tgaatcactcttcacagaagcccgg

SEQ ID NO: 3802541 - DNA, 25 bp, Homo sapien
cctgagcccggatgagttgtctgct

SEQ ID NO: 3802542 - DNA, 25 bp, Homo sapien
tgcagctatcagagagtcttggtgg

SEQ ID NO: 3802543 - DNA, 25 bp, Homo sapien
tcagtttgttgagtcccagcaacat

SEQ ID NO: 3802544 - DNA, 25 bp, Homo sapien
gacaaagagattccaatgacaaggc

SEQ ID NO: 3802545 - DNA, 25 bp, Homo sapien
tctgcccaaagcttcactatttgct

SEQ ID NO: 3802546 - DNA, 25 bp, Homo sapien
aaccagcagcgtcaatggcagggca

SEQ ID NO: 3802547 - DNA, 25 bp, Homo sapien
tcatggttgtaaccggccagcagaa

SEQ ID NO: 3802548 - DNA, 25 bp, Homo sapien
ccttgtgcgatgtcctgttcaggca

SEQ ID NO: 3802549 - DNA, 25 bp, Homo sapien
caatgtaggatccttgtgcgatgtc

SEQ ID NO: 3802550 - DNA, 25 bp, Homo sapien
ccggcttgtcaactgcagcagcaaa

SEQ ID NO: 3802551 - DNA, 25 bp, Homo sapien
cctgtagccggcttgtcaactgcag

SEQ ID NO: 3802552 - DNA, 25 bp, Homo sapien
ctgtagccggcttgtcaactgcagc

SEQ ID NO: 3802553 - DNA, 25 bp, Homo sapien
cacaggctgaagttagctgacgcat

SEQ ID NO: 3802554 - DNA, 25 bp, Homo sapien
caggatgccacagtgacaagggaca

SEQ ID NO: 3802555 - DNA, 25 bp, Homo sapien
gagggtccattcattgcattgcacg

SEQ ID NO: 3802556 - DNA, 25 bp, Homo sapien
caggatctcagatgcaaagggaagt

SEQ ID NO: 3802557 - DNA, 25 bp, Homo sapien
gaatttcagtaagcatgtgaggtgg

SEQ ID NO: 3802558 - DNA, 25 bp, Homo sapien
cttgcctcctttgccgacctgtaaa

SEQ ID NO: 3802559 - DNA, 25 bp, Homo sapien
tgccacatggatcactctagccttg

SEQ ID NO: 3802560 - DNA, 25 bp, Homo sapien
catgtgttcatactgatgcctgcca

SEQ ID NO: 3802561 - DNA, 25 bp, Homo sapien
ataaataatctggaattcttctgcc

SEQ ID NO: 3802562 - DNA, 25 bp, Homo sapien
aaataaataatctggaattcttctg

SEQ ID NO: 3802563 - DNA, 25 bp, Homo sapien
aataaataatctggaattcttctgc

SEQ ID NO: 3802564 - DNA, 25 bp, Homo sapien
tagccaaaattagccaaactggctc

SEQ ID NO: 3802565 - DNA, 25 bp, Homo sapien
attagccaaaattagccaaactggc

SEQ ID NO: 3802566 - DNA, 25 bp, Homo sapien
ttagccaaactggctcacacttgta

SEQ ID NO: 3802567 - DNA, 25 bp, Homo sapien
aaattagccaaaattagccaaactg

SEQ ID NO: 3802568 - DNA, 25 bp, Homo sapien
gttagggcagcgcgcgcatggcccc

SEQ ID NO: 3802569 - DNA, 25 bp, Homo sapien
cgttagggcagcgcgcgcatggccc

SEQ ID NO: 3802570 - DNA, 25 bp, Homo sapien
gcgcgcatggccccgccgtccccag

SEQ ID NO: 3802571 - DNA, 25 bp, Homo sapien
gcgcatggccccgccgtccccaggc

SEQ ID NO: 3802572 - DNA, 25 bp, Homo sapien
cgccgggcgctaggccgcagaggca

SEQ ID NO: 3802573 - DNA, 25 bp, Homo sapien
ggcaggggggctcgcaaggcccgca

SEQ ID NO: 3802574 - DNA, 25 bp, Homo sapien
ggcggcgccgggcgctaggccgcag

SEQ ID NO: 3802575 - DNA, 25 bp, Homo sapien
ggcgccgggcgctaggccgcagagg

SEQ ID NO: 3802576 - DNA, 25 bp, Homo sapien
agcgctgtggcgtccgcggggatgc

SEQ ID NO: 3802577 - DNA, 25 bp, Homo sapien
gatgcgcagcgcgggaccgagcgtc

SEQ ID NO: 3802578 - DNA, 25 bp, Homo sapien
gcgtccgcggggatgcgcagcgcgg

SEQ ID NO: 3802579 - DNA, 25 bp, Homo sapien
gggaccgagcgtccgcagcccgcgg

SEQ ID NO: 3802580 - DNA, 25 bp, Homo sapien
cagaagccccggctgtcctccacct

SEQ ID NO: 3802581 - DNA, 25 bp, Homo sapien
tgtccctgctgagcttcagcagcca

SEQ ID NO: 3802582 - DNA, 25 bp, Homo sapien
gtccctgctgagcttcagcagccag

SEQ ID NO: 3802583 - DNA, 25 bp, Homo sapien
tggaactggacacagctgtccctgc

SEQ ID NO: 3802584 - DNA, 25 bp, Homo sapien
gcgggcaccagtccaggctactcgg

SEQ ID NO: 3802585 - DNA, 25 bp, Homo sapien
gtggcgggcaccagtccaggctact

SEQ ID NO: 3802586 - DNA, 25 bp, Homo sapien
gggcaccagtccaggctactcggga

SEQ ID NO: 3802587 - DNA, 25 bp, Homo sapien
tggcgggcaccagtccaggctactc

SEQ ID NO: 3802588 - DNA, 25 bp, Homo sapien
tctcctgttctgaacccaacagggt

SEQ ID NO: 3802589 - DNA, 25 bp, Homo sapien
tcccactgtgggaccacaaccaggt

SEQ ID NO: 3802590 - DNA, 25 bp, Homo sapien
agaagcaggctcactaccaggctac

SEQ ID NO: 3802591 - DNA, 25 bp, Homo sapien
tctgaacccaacagggtggtcccac

SEQ ID NO: 3802592 - DNA, 25 bp, Homo sapien
agggccagagcccttagtaggccag

SEQ ID NO: 3802593 - DNA, 25 bp, Homo sapien
gccagagcccttagtaggccagagg

SEQ ID NO: 3802594 - DNA, 25 bp, Homo sapien
gagcccttagtaggccagaggccat

SEQ ID NO: 3802595 - DNA, 25 bp, Homo sapien
tgaggagtgagtggccgtgggtcag

SEQ ID NO: 3802596 - DNA, 25 bp, Homo sapien
aggttcgccaggagcccaacgtcca

SEQ ID NO: 3802597 - DNA, 25 bp, Homo sapien
ctgccagcgccgagaggttcgccag

SEQ ID NO: 3802598 - DNA, 25 bp, Homo sapien
agctctgccagcgccgagaggttcg

SEQ ID NO: 3802599 - DNA, 25 bp, Homo sapien
ggttcgccaggagcccaacgtccag

SEQ ID NO: 3802600 - DNA, 25 bp, Homo sapien
tattccttcttctaacgtagaaatc

SEQ ID NO: 3802601 - DNA, 25 bp, Homo sapien
tccttcttctaacgtagaaatcttg

SEQ ID NO: 3802602 - DNA, 25 bp, Homo sapien
aacgtagaaatcttgttgttgctta

SEQ ID NO: 3802603 - DNA, 25 bp, Homo sapien
tcttctaacgtagaaatcttgttgt

SEQ ID NO: 3802604 - DNA, 25 bp, Homo sapien
ctcgggctgcaccacccgcacctgc

SEQ ID NO: 3802605 - DNA, 25 bp, Homo sapien
gctcctccgcccatcgcggcagcca

SEQ ID NO: 3802606 - DNA, 25 bp, Homo sapien
atcgcggcagccacgccaggccaca

SEQ ID NO: 3802607 - DNA, 25 bp, Homo sapien
tgcaccacccgcacctgctgctcct

SEQ ID NO: 3802608 - DNA, 25 bp, Homo sapien
ggcagccactggaccccgggttctg

SEQ ID NO: 3802609 - DNA, 25 bp, Homo sapien
agcagaaggcgctgcaggcctctgg

SEQ ID NO: 3802610 - DNA, 25 bp, Homo sapien
gtcagggaggcaggcgacatactcc

SEQ ID NO: 3802611 - DNA, 25 bp, Homo sapien
cttcgtgggcagctgaaaaggacac

SEQ ID NO: 3802612 - DNA, 25 bp, Homo sapien
acactgctgccacggtgcctgagct

SEQ ID NO: 3802613 - DNA, 25 bp, Homo sapien
ggacaggcaggcgaaggaggcactg

SEQ ID NO: 3802614 - DNA, 25 bp, Homo sapien
ccggagcagagggacaggcaggcga

SEQ ID NO: 3802615 - DNA, 25 bp, Homo sapien
ggcaggcgaaggaggcactggaggg

SEQ ID NO: 3802616 - DNA, 25 bp, Homo sapien
acaggcaggcgaaggaggcactgga

SEQ ID NO: 3802617 - DNA, 25 bp, Homo sapien
agggaagacgtgctggaggagggtg

SEQ ID NO: 3802618 - DNA, 25 bp, Homo sapien
gaggcagggaagacgtgctggagga

SEQ ID NO: 3802619 - DNA, 25 bp, Homo sapien
ggggaggcagggaagacgtgctgga

SEQ ID NO: 3802620 - DNA, 25 bp, Homo sapien
cagggaagacgtgctggaggagggt

SEQ ID NO: 3802621 - DNA, 25 bp, Homo sapien
gatgctgaggtcgaggctctcgtca

SEQ ID NO: 3802622 - DNA, 25 bp, Homo sapien
caggcagcacatagcgatgcgaggc

SEQ ID NO: 3802623 - DNA, 25 bp, Homo sapien
aaccaccgcggttctggatgctgag

SEQ ID NO: 3802624 - DNA, 25 bp, Homo sapien
agcacggccgtcacgtgatagcgcc

SEQ ID NO: 3802625 - DNA, 25 bp, Homo sapien
gcgggactgtccaccattgccaggg

SEQ ID NO: 3802626 - DNA, 25 bp, Homo sapien
tccaccaccaggcggtagcagtgcc

SEQ ID NO: 3802627 - DNA, 25 bp, Homo sapien
tctccgtgtccgaggggcagagcgg

SEQ ID NO: 3802628 - DNA, 25 bp, Homo sapien
aggaagcgctgcacggcgggactgt

SEQ ID NO: 3802629 - DNA, 25 bp, Homo sapien
agagatctcccaacctatggcccct

SEQ ID NO: 3802630 - DNA, 25 bp, Homo sapien
tcagagatctcccaacctatggccc

SEQ ID NO: 3802631 - DNA, 25 bp, Homo sapien
agatctcccaacctatggcccctcg

SEQ ID NO: 3802632 - DNA, 25 bp, Homo sapien
atctcccaacctatggcccctcggg

SEQ ID NO: 3802633 - DNA, 25 bp, Homo sapien
tgcacagtcgagaagccgatccaca

SEQ ID NO: 3802634 - DNA, 25 bp, Homo sapien
ctgcacagtcgagaagccgatccac

SEQ ID NO: 3802635 - DNA, 25 bp, Homo sapien
ccggtgggcccgagccggacgcagt

SEQ ID NO: 3802636 - DNA, 25 bp, Homo sapien
gcagctcgcagacgtagctgtgcgg

SEQ ID NO: 3802637 - DNA, 25 bp, Homo sapien
cggtgggcccgagccggacgcagtg

SEQ ID NO: 3802638 - DNA, 25 bp, Homo sapien
acgtagctgtgcggcgctgagcaca

SEQ ID NO: 3802639 - DNA, 25 bp, Homo sapien
tcaggcccctgcctggccccccgca

SEQ ID NO: 3802640 - DNA, 25 bp, Homo sapien
cacagccagcgtctcaggcccctgc

SEQ ID NO: 3802641 - DNA, 25 bp, Homo sapien
ggcccctgcctggccccccgcacac

SEQ ID NO: 3802642 - DNA, 25 bp, Homo sapien
ctcaggcccctgcctggccccccgc

SEQ ID NO: 3802643 - DNA, 25 bp, Homo sapien
caccaggacgaacagactggggacc

SEQ ID NO: 3802644 - DNA, 25 bp, Homo sapien
gacaccaggacgaacagactgggga

SEQ ID NO: 3802645 - DNA, 25 bp, Homo sapien
ccaggacaccaggacgaacagactg

SEQ ID NO: 3802646 - DNA, 25 bp, Homo sapien
ccaggacgaacagactggggaccga

SEQ ID NO: 3802647 - DNA, 25 bp, Homo sapien
tcccacgaggaggttctcggcatcc

SEQ ID NO: 3802648 - DNA, 25 bp, Homo sapien
gggcgctcccacgaggaggttctcg

SEQ ID NO: 3802649 - DNA, 25 bp, Homo sapien
gctcccacgaggaggttctcggcat

SEQ ID NO: 3802650 - DNA, 25 bp, Homo sapien
cacgaggaggttctcggcatcctgc

SEQ ID NO: 3802651 - DNA, 25 bp, Homo sapien
gggccgcctcagctccacagacccc

SEQ ID NO: 3802652 - DNA, 25 bp, Homo sapien
agggggccgcctcagctccacagac

SEQ ID NO: 3802653 - DNA, 25 bp, Homo sapien
gccgcctcagctccacagaccccat

SEQ ID NO: 3802654 - DNA, 25 bp, Homo sapien
gcagggggccgcctcagctccacag

SEQ ID NO: 3802655 - DNA, 25 bp, Homo sapien
agacgcaggcccgggaataccatga

SEQ ID NO: 3802656 - DNA, 25 bp, Homo sapien
aaggcttcacggctcagacgcaggc

SEQ ID NO: 3802657 - DNA, 25 bp, Homo sapien
tgggtcccaaattcggccgtggtga

SEQ ID NO: 3802658 - DNA, 25 bp, Homo sapien
ggcgggccgccggagctcctgggtc

SEQ ID NO: 3802659 - DNA, 25 bp, Homo sapien
cgtccagcggcaagcagatgttggc

SEQ ID NO: 3802660 - DNA, 25 bp, Homo sapien
tggccctgacgtgcagccattggcg

SEQ ID NO: 3802661 - DNA, 25 bp, Homo sapien
ggaactctctccatagcgcataggg

SEQ ID NO: 3802662 - DNA, 25 bp, Homo sapien
caagcagatgttggctccagggcac

SEQ ID NO: 3802663 - DNA, 25 bp, Homo sapien
gcacgacggatgagggtggacacgc

SEQ ID NO: 3802664 - DNA, 25 bp, Homo sapien
ggacacgcagggctccccgcttcgt

SEQ ID NO: 3802665 - DNA, 25 bp, Homo sapien
agggctccccgcttcgtcagccaca

SEQ ID NO: 3802666 - DNA, 25 bp, Homo sapien
cccacagtgctcgtgacaaggacag

SEQ ID NO: 3802667 - DNA, 25 bp, Homo sapien
gcgtcgtgctgcaagccaacgaggt

SEQ ID NO: 3802668 - DNA, 25 bp, Homo sapien
tgttccgtggctgcaagcagccgca

SEQ ID NO: 3802669 - DNA, 25 bp, Homo sapien
caacgaggtcaccagggagcatgag

SEQ ID NO: 3802670 - DNA, 25 bp, Homo sapien
cagtgctaccactgagaacagggta

SEQ ID NO: 3802671 - DNA, 25 bp, Homo sapien
ggtggtggagcctcggccatactca

SEQ ID NO: 3802672 - DNA, 25 bp, Homo sapien
ggctggtggtggagcctcggccata

SEQ ID NO: 3802673 - DNA, 25 bp, Homo sapien
ctggtggtggagcctcggccatact

SEQ ID NO: 3802674 - DNA, 25 bp, Homo sapien
tggtggtggagcctcggccatactc

SEQ ID NO: 3802675 - DNA, 25 bp, Homo sapien
tgtcagagccgtgactttccaggaa

SEQ ID NO: 3802676 - DNA, 25 bp, Homo sapien
gaccgccgcgctctgataaatgaca

SEQ ID NO: 3802677 - DNA, 25 bp, Homo sapien
tctggaaggtcagggactgcttgtc

SEQ ID NO: 3802678 - DNA, 25 bp, Homo sapien
gactgcttgtcgttgatggtccacc

SEQ ID NO: 3802679 - DNA, 25 bp, Homo sapien
cattgaagaccacgttctggaaggt

SEQ ID NO: 3802680 - DNA, 25 bp, Homo sapien
tggcagcgtcctcgggcagcatgaa

SEQ ID NO: 3802681 - DNA, 25 bp, Homo sapien
ccatggcagcgtcctcgggcagcat

SEQ ID NO: 3802682 - DNA, 25 bp, Homo sapien
agcgtcctcgggcagcatgaagcag

SEQ ID NO: 3802683 - DNA, 25 bp, Homo sapien
gcgtcctcgggcagcatgaagcaga

SEQ ID NO: 3802684 - DNA, 25 bp, Homo sapien
ttgtagttcacggtgacgttgctca

SEQ ID NO: 3802685 - DNA, 25 bp, Homo sapien
cacggtgacgttgctcacgtggttg

SEQ ID NO: 3802686 - DNA, 25 bp, Homo sapien
ttgctcacgtggttggaggccgtca

SEQ ID NO: 3802687 - DNA, 25 bp, Homo sapien
tagttcacggtgacgttgctcacgt

SEQ ID NO: 3802688 - DNA, 25 bp, Homo sapien
gacattgtgctccaccagcacctgg

SEQ ID NO: 3802689 - DNA, 25 bp, Homo sapien
acattgtgctccaccagcacctggg

SEQ ID NO: 3802690 - DNA, 25 bp, Homo sapien
tgacattgtgctccaccagcacctg

SEQ ID NO: 3802691 - DNA, 25 bp, Homo sapien
ggttctcgaaggcattagatgccag

SEQ ID NO: 3802692 - DNA, 25 bp, Homo sapien
ttctcgaaggcattagatgccagca

SEQ ID NO: 3802693 - DNA, 25 bp, Homo sapien
gttctcgaaggcattagatgccagc

SEQ ID NO: 3802694 - DNA, 25 bp, Homo sapien
cagtcagggaggcgcacacactcac

SEQ ID NO: 3802695 - DNA, 25 bp, Homo sapien
aggccccagtcagggaggcgcacac

SEQ ID NO: 3802696 - DNA, 25 bp, Homo sapien
cccagtcagggaggcgcacacactc

SEQ ID NO: 3802697 - DNA, 25 bp, Homo sapien
gccccagtcagggaggcgcacacac

SEQ ID NO: 3802698 - DNA, 25 bp, Homo sapien
actccaaggacacaatgggcacccg

SEQ ID NO: 3802699 - DNA, 25 bp, Homo sapien
tgggcacccggccactgcggatcag

SEQ ID NO: 3802700 - DNA, 25 bp, Homo sapien
acacacactccaaggacacaatggg

SEQ ID NO: 3802701 - DNA, 25 bp, Homo sapien
ggacacaatgggcacccggccactg

SEQ ID NO: 3802702 - DNA, 25 bp, Homo sapien
gagccgctgctgcaattgaggcagc

SEQ ID NO: 3802703 - DNA, 25 bp, Homo sapien
tgcggctcacttcgtacacggcctg

SEQ ID NO: 3802704 - DNA, 25 bp, Homo sapien
ggctcacttcgtacacggcctgtgc

SEQ ID NO: 3802705 - DNA, 25 bp, Homo sapien
gctgcggctcacttcgtacacggcc

SEQ ID NO: 3802706 - DNA, 25 bp, Homo sapien
gtcttgttgctgaacgtacgtgcag

SEQ ID NO: 3802707 - DNA, 25 bp, Homo sapien
tgttgctgaacgtacgtgcagccca

SEQ ID NO: 3802708 - DNA, 25 bp, Homo sapien
tgctgaacgtacgtgcagcccaccg

SEQ ID NO: 3802709 - DNA, 25 bp, Homo sapien
tcttgttgctgaacgtacgtgcagc

SEQ ID NO: 3802710 - DNA, 25 bp, Homo sapien
tggatgtggtggtctcatccagcac

SEQ ID NO: 3802711 - DNA, 25 bp, Homo sapien
ccagcaccgtcagcgtgaaggtgta

SEQ ID NO: 3802712 - DNA, 25 bp, Homo sapien
gcaccgtcagcgtgaaggtgtatcc

SEQ ID NO: 3802713 - DNA, 25 bp, Homo sapien
ggcccagcaccgtcagcgtgaaggt

SEQ ID NO: 3802714 - DNA, 25 bp, Homo sapien
agagcggcccagcaccgtcagcgtg

SEQ ID NO: 3802715 - DNA, 25 bp, Homo sapien
aagaggcggcaagagccccccagcg

SEQ ID NO: 3802716 - DNA, 25 bp, Homo sapien
caccttggtggtgagagcgtgcaca

SEQ ID NO: 3802717 - DNA, 25 bp, Homo sapien
cagggggatggaggcgcagccctcc

SEQ ID NO: 3802718 - DNA, 25 bp, Homo sapien
catgcattcgaagtgcaccttggtg

SEQ ID NO: 3802719 - DNA, 25 bp, Homo sapien
gcagcagggcgtacaccagcggggc

SEQ ID NO: 3802720 - DNA, 25 bp, Homo sapien
gcgtacaccagcggggcgccagcat

SEQ ID NO: 3802721 - DNA, 25 bp, Homo sapien
agggcgtacaccagcggggcgccag

SEQ ID NO: 3802722 - DNA, 25 bp, Homo sapien
cagcggggcgccagcatcctccgcg

SEQ ID NO: 3802723 - DNA, 25 bp, Homo sapien
gcccacctcgaagtgtggcctgaaa

SEQ ID NO: 3802724 - DNA, 25 bp, Homo sapien
ctgttgagggcgaccacagcggctc

SEQ ID NO: 3802725 - DNA, 25 bp, Homo sapien
ttgagggcgaccacagcggctccca

SEQ ID NO: 3802726 - DNA, 25 bp, Homo sapien
gagaggctgcccttgtagacacaga

SEQ ID NO: 3802727 - DNA, 25 bp, Homo sapien
agtactcgatgacgtgctggggatc

SEQ ID NO: 3802728 - DNA, 25 bp, Homo sapien
acactagcggtgagcccgtgcagcc

SEQ ID NO: 3802729 - DNA, 25 bp, Homo sapien
cggtgagcccgtgcagccagactgt

SEQ ID NO: 3802730 - DNA, 25 bp, Homo sapien
gggagcacactagcggtgagcccgt

SEQ ID NO: 3802731 - DNA, 25 bp, Homo sapien
cggaacgtcggggtgctgcttcagg

SEQ ID NO: 3802732 - DNA, 25 bp, Homo sapien
tgctgggagcggaacgtcggggtgc

SEQ ID NO: 3802733 - DNA, 25 bp, Homo sapien
actgggatttatctctggggcccgg

SEQ ID NO: 3802734 - DNA, 25 bp, Homo sapien
agggtcactgggatttatctctggg

SEQ ID NO: 3802735 - DNA, 25 bp, Homo sapien
ctgtttcttcatgggcaaaacaggg

SEQ ID NO: 3802736 - DNA, 25 bp, Homo sapien
tcgtgcttgggctctgccgccacgt

SEQ ID NO: 3802737 - DNA, 25 bp, Homo sapien
tccgtgatgttcttgcgtatctggg

SEQ ID NO: 3802738 - DNA, 25 bp, Homo sapien
cagcgatctgctggatgtcatccac

SEQ ID NO: 3802739 - DNA, 25 bp, Homo sapien
gatgttcttgcgtatctgggctcgg

SEQ ID NO: 3802740 - DNA, 25 bp, Homo sapien
tcaggcacgagcggcatacgagctc

SEQ ID NO: 3802741 - DNA, 25 bp, Homo sapien
ctccgatggcggtgggcgtcacggt

SEQ ID NO: 3802742 - DNA, 25 bp, Homo sapien
tgttgaggatgctgtctccgatggc

SEQ ID NO: 3802743 - DNA, 25 bp, Homo sapien
tcacggtgcccgcggtggtctctgc

SEQ ID NO: 3802744 - DNA, 25 bp, Homo sapien
gggctcctcgttgagcacgcgggag

SEQ ID NO: 3802745 - DNA, 25 bp, Homo sapien
gctcctcgttgagcacgcgggagcg

SEQ ID NO: 3802746 - DNA, 25 bp, Homo sapien
gttgtaggcctgggacgccaccatc

SEQ ID NO: 3802747 - DNA, 25 bp, Homo sapien
ctcctcgttgagcacgcgggagcgc

SEQ ID NO: 3802748 - DNA, 25 bp, Homo sapien
gctccgcgggtccgagcgcttgccc

SEQ ID NO: 3802749 - DNA, 25 bp, Homo sapien
taggggatggagaagtggcagccag

SEQ ID NO: 3802750 - DNA, 25 bp, Homo sapien
ggatggagaagtggcagccaggccc

SEQ ID NO: 3802751 - DNA, 25 bp, Homo sapien
gatggagaagtggcagccaggccct

SEQ ID NO: 3802752 - DNA, 25 bp, Homo sapien
ggggatggagaagtggcagccaggc

SEQ ID NO: 3802753 - DNA, 25 bp, Homo sapien
cggtgtagttgctgatatagccaaa

SEQ ID NO: 3802754 - DNA, 25 bp, Homo sapien
tgagctgcaccacgtcactgaggtt

SEQ ID NO: 3802755 - DNA, 25 bp, Homo sapien
tggagacggtgtagttgctgatata

SEQ ID NO: 3802756 - DNA, 25 bp, Homo sapien
ggaaagggattggagtccaccagaa

SEQ ID NO: 3802757 - DNA, 25 bp, Homo sapien
cagccgctcgatggggatctgggcg

SEQ ID NO: 3802758 - DNA, 25 bp, Homo sapien
tcgatggggatctgggcgccggcct

SEQ ID NO: 3802759 - DNA, 25 bp, Homo sapien
tgaggccagccgctcgatggggatc

SEQ ID NO: 3802760 - DNA, 25 bp, Homo sapien
cgctcgatggggatctgggcgccgg

SEQ ID NO: 3802761 - DNA, 25 bp, Homo sapien
cagcccagtccgagttgttgggcac

SEQ ID NO: 3802762 - DNA, 25 bp, Homo sapien
gccccgggcagcccagtccgagttg

SEQ ID NO: 3802763 - DNA, 25 bp, Homo sapien
cccgggcagcccagtccgagttgtt

SEQ ID NO: 3802764 - DNA, 25 bp, Homo sapien
gcagcccagtccgagttgttgggca

SEQ ID NO: 3802765 - DNA, 25 bp, Homo sapien
cgtccagcagcgtatagttgagctg

SEQ ID NO: 3802766 - DNA, 25 bp, Homo sapien
cagcagcgtatagttgagctgcaga

SEQ ID NO: 3802767 - DNA, 25 bp, Homo sapien
ggtgaccacagcaccgacggaggcc

SEQ ID NO: 3802768 - DNA, 25 bp, Homo sapien
accacagcaccgacggaggcctggg

SEQ ID NO: 3802769 - DNA, 25 bp, Homo sapien
aggccagggggccgcgtgtgcccca

SEQ ID NO: 3802770 - DNA, 25 bp, Homo sapien
ccaagaacaaggccagggggccgcg

SEQ ID NO: 3802771 - DNA, 25 bp, Homo sapien
agaacaaggccagggggccgcgtgt

SEQ ID NO: 3802772 - DNA, 25 bp, Homo sapien
ggccagggggccgcgtgtgccccaa

SEQ ID NO: 3802773 - DNA, 25 bp, Homo sapien
ttcaccagagacacccatggaagcc

SEQ ID NO: 3802774 - DNA, 25 bp, Homo sapien
gaaagcaaatttcaccagagacacc

SEQ ID NO: 3802775 - DNA, 25 bp, Homo sapien
gaaaggccataggagcctctgcacc

SEQ ID NO: 3802776 - DNA, 25 bp, Homo sapien
tgaaaggccataggagcctctgcac

SEQ ID NO: 3802777 - DNA, 25 bp, Homo sapien
cctgagcccaccctctgccatgggc

SEQ ID NO: 3802778 - DNA, 25 bp, Homo sapien
ccctcctgagcccaccctctgccat

SEQ ID NO: 3802779 - DNA, 25 bp, Homo sapien
ccacgatggccctcctgagcccacc

SEQ ID NO: 3802780 - DNA, 25 bp, Homo sapien
ctcctgagcccaccctctgccatgg

SEQ ID NO: 3802781 - DNA, 25 bp, Homo sapien
gcagaacgcgcaggtcacacgcctg

SEQ ID NO: 3802782 - DNA, 25 bp, Homo sapien
ggtcacacgcctgccgggaagctca

SEQ ID NO: 3802783 - DNA, 25 bp, Homo sapien
ctggggcagaacgcgcaggtcacac

SEQ ID NO: 3802784 - DNA, 25 bp, Homo sapien
acgcctgccgggaagctcaaccacc

SEQ ID NO: 3802785 - DNA, 25 bp, Homo sapien
ctgggcggatcctcctgctagccga

SEQ ID NO: 3802786 - DNA, 25 bp, Homo sapien
tctgggcggatcctcctgctagccg

SEQ ID NO: 3802787 - DNA, 25 bp, Homo sapien
aagtactggcacagggacgtgtaca

SEQ ID NO: 3802788 - DNA, 25 bp, Homo sapien
tgaggtggcgggtgaggcagacggc

SEQ ID NO: 3802789 - DNA, 25 bp, Homo sapien
gtcctcctcgctgaagtactggcac

SEQ ID NO: 3802790 - DNA, 25 bp, Homo sapien
ggcagacggcctggcggggcgaggt

SEQ ID NO: 3802791 - DNA, 25 bp, Homo sapien
caggccctcctcgactctgcagagg

SEQ ID NO: 3802792 - DNA, 25 bp, Homo sapien
ggccctcctcgactctgcagaggct

SEQ ID NO: 3802793 - DNA, 25 bp, Homo sapien
aggccctcctcgactctgcagaggc

SEQ ID NO: 3802794 - DNA, 25 bp, Homo sapien
ccaggccctcctcgactctgcagag

SEQ ID NO: 3802795 - DNA, 25 bp, Homo sapien
gcacacagcacatgtcagcatgacg

SEQ ID NO: 3802796 - DNA, 25 bp, Homo sapien
tgtcttgacgaggatctcgtacttg

SEQ ID NO: 3802797 - DNA, 25 bp, Homo sapien
tgacgatgtagtttacatccgctgt

SEQ ID NO: 3802798 - DNA, 25 bp, Homo sapien
acgaggatctcgtacttgaagcggc

SEQ ID NO: 3802799 - DNA, 25 bp, Homo sapien
tccgcctgagagacgagctatgcag

SEQ ID NO: 3802800 - DNA, 25 bp, Homo sapien
aaaaatgggaacacggccaggtgtg

SEQ ID NO: 3802801 - DNA, 25 bp, Homo sapien
tactgtgcagaacgtgggctgccca

SEQ ID NO: 3802802 - DNA, 25 bp, Homo sapien
tcccacagtggtagcgatgctcatg

SEQ ID NO: 3802803 - DNA, 25 bp, Homo sapien
catgatgcccacgtgggccgtggta

SEQ ID NO: 3802804 - DNA, 25 bp, Homo sapien
tgtcgtgccacactcggatcttcca

SEQ ID NO: 3802805 - DNA, 25 bp, Homo sapien
tgttgcggtggaaggctctgtcgcc

SEQ ID NO: 3802806 - DNA, 25 bp, Homo sapien
gctgtccaccccatacagcatgatg

SEQ ID NO: 3802807 - DNA, 25 bp, Homo sapien
aaagccagtcattgaccaggaagaa

SEQ ID NO: 3802808 - DNA, 25 bp, Homo sapien
aagccagtcattgaccaggaagaag

SEQ ID NO: 3802809 - DNA, 25 bp, Homo sapien
tctccaccgaaagccagtcattgac

SEQ ID NO: 3802810 - DNA, 25 bp, Homo sapien
caccgaaagccagtcattgaccagg

SEQ ID NO: 3802811 - DNA, 25 bp, Homo sapien
ccacggagtgggaacacggaacgag

SEQ ID NO: 3802812 - DNA, 25 bp, Homo sapien
tgcccaacctcccacggagtgggaa

SEQ ID NO: 3802813 - DNA, 25 bp, Homo sapien
cacggagtgggaacacggaacgagg

SEQ ID NO: 3802814 - DNA, 25 bp, Homo sapien
cagatgaggagaacgcagcaggtgg

SEQ ID NO: 3802815 - DNA, 25 bp, Homo sapien
aacagccccgtaccacacggcgttg

SEQ ID NO: 3802816 - DNA, 25 bp, Homo sapien
accacacggcgttggcgcccaggaa

SEQ ID NO: 3802817 - DNA, 25 bp, Homo sapien
gcggccggtcccatatggagagcca

SEQ ID NO: 3802818 - DNA, 25 bp, Homo sapien
ctgtgtggaggagaggaggccacac

SEQ ID NO: 3802819 - DNA, 25 bp, Homo sapien
tggaggagaggaggccacacaggtg

SEQ ID NO: 3802820 - DNA, 25 bp, Homo sapien
aggagaggaggccacacaggtgagg

SEQ ID NO: 3802821 - DNA, 25 bp, Homo sapien
gtggaggagaggaggccacacaggt

SEQ ID NO: 3802822 - DNA, 25 bp, Homo sapien
tggccaggtagacgggatagacaac

SEQ ID NO: 3802823 - DNA, 25 bp, Homo sapien
cagcgactgtgtcgacgctcagcgg

SEQ ID NO: 3802824 - DNA, 25 bp, Homo sapien
tggacaccaggccaacagcgactgt

SEQ ID NO: 3802825 - DNA, 25 bp, Homo sapien
gggatagacaaccacgctggacacc

SEQ ID NO: 3802826 - DNA, 25 bp, Homo sapien
tcaagtgtgttgacccttcccgagc

SEQ ID NO: 3802827 - DNA, 25 bp, Homo sapien
tcttctgagttatctggcgtgctgc

SEQ ID NO: 3802828 - DNA, 25 bp, Homo sapien
cgtctgcttagcgaagtgccctcgt

SEQ ID NO: 3802829 - DNA, 25 bp, Homo sapien
tgcagcactggaaagtggcggccct

SEQ ID NO: 3802830 - DNA, 25 bp, Homo sapien
gtccaggcagctgtcgacgtccagc

SEQ ID NO: 3802831 - DNA, 25 bp, Homo sapien
ctcagcgtggaggcctcagaacgtg

SEQ ID NO: 3802832 - DNA, 25 bp, Homo sapien
ctcagaacgtgaggaaggagctgtc

SEQ ID NO: 3802833 - DNA, 25 bp, Homo sapien
ggagctgtccagcacggatgagtcc

SEQ ID NO: 3802834 - DNA, 25 bp, Homo sapien
gtccaagctgcgccaaggcggcagg

SEQ ID NO: 3802835 - DNA, 25 bp, Homo sapien
tccaagctgcgccaaggcggcagga

SEQ ID NO: 3802836 - DNA, 25 bp, Homo sapien
agtccaagctgcgccaaggcggcag

SEQ ID NO: 3802837 - DNA, 25 bp, Homo sapien
gagtccaagctgcgccaaggcggca

SEQ ID NO: 3802838 - DNA, 25 bp, Homo sapien
gaaacaagtcactcttcatctgtcc

SEQ ID NO: 3802839 - DNA, 25 bp, Homo sapien
catccagaaacaagtcactcttcat

SEQ ID NO: 3802840 - DNA, 25 bp, Homo sapien
aagtcactcttcatctgtccagcaa

SEQ ID NO: 3802841 - DNA, 25 bp, Homo sapien
aacaagtcactcttcatctgtccag

SEQ ID NO: 3802842 - DNA, 25 bp, Homo sapien
tccagtcacgcacggacaccctggg

SEQ ID NO: 3802843 - DNA, 25 bp, Homo sapien
ccccgtccagtcacgcacggacacc

SEQ ID NO: 3802844 - DNA, 25 bp, Homo sapien
aggtggcgcgggtcagcaaggtacc

SEQ ID NO: 3802845 - DNA, 25 bp, Homo sapien
agcacaccagactgcaggtggcgcg

SEQ ID NO: 3802846 - DNA, 25 bp, Homo sapien
tatgctgcagccatgttccagccct

SEQ ID NO: 3802847 - DNA, 25 bp, Homo sapien
catgttccagccctagatttggctg

SEQ ID NO: 3802848 - DNA, 25 bp, Homo sapien
ttaacaaaactatggaattcaattc

SEQ ID NO: 3802849 - DNA, 25 bp, Homo sapien
tggaaagccaatgcctttaccataa

SEQ ID NO: 3802850 - DNA, 25 bp, Homo sapien
acatccatgtagccatccgtccatc

SEQ ID NO: 3802851 - DNA, 25 bp, Homo sapien
aggtcccgatagtaaaccatctcca

SEQ ID NO: 3802852 - DNA, 25 bp, Homo sapien
gaaggtcccgatagtaaaccatctc

SEQ ID NO: 3802853 - DNA, 25 bp, Homo sapien
tcagccattcatatcctaagcaaca

SEQ ID NO: 3802854 - DNA, 25 bp, Homo sapien
agcctccgctcagccattcatatcc

SEQ ID NO: 3802855 - DNA, 25 bp, Homo sapien
cattcatatcctaagcaacaaaaca

SEQ ID NO: 3802856 - DNA, 25 bp, Homo sapien
tccgctcagccattcatatcctaag

SEQ ID NO: 3802857 - DNA, 25 bp, Homo sapien
ataaaaaacaaatgatggcaggatg

SEQ ID NO: 3802858 - DNA, 25 bp, Homo sapien
taaaaaacaaatgatggcaggatgg

SEQ ID NO: 3802859 - DNA, 25 bp, Homo sapien
aaaaaacaaatgatggcaggatggc

SEQ ID NO: 3802860 - DNA, 25 bp, Homo sapien
tgatttctggtcctccccaaccagc

SEQ ID NO: 3802861 - DNA, 25 bp, Homo sapien
gagctcccagggttcctcaaggtca

SEQ ID NO: 3802862 - DNA, 25 bp, Homo sapien
ctgggcgctccttccttcctgagct

SEQ ID NO: 3802863 - DNA, 25 bp, Homo sapien
gcttctgggcgctccttccttcctg

SEQ ID NO: 3802864 - DNA, 25 bp, Homo sapien
gctgataaatcccagcaggagccaa

SEQ ID NO: 3802865 - DNA, 25 bp, Homo sapien
aggagccaaaagagcagccaccgca

SEQ ID NO: 3802866 - DNA, 25 bp, Homo sapien
gataaatcccagcaggagccaaaag

SEQ ID NO: 3802867 - DNA, 25 bp, Homo sapien
aaaagaggagccaaaagagcagcca

SEQ ID NO: 3802868 - DNA, 25 bp, Homo sapien
tcaagacatggagactatcctggcg

SEQ ID NO: 3802869 - DNA, 25 bp, Homo sapien
cttaaggttatatattttggccagg

SEQ ID NO: 3802870 - DNA, 25 bp, Homo sapien
catggagactatcctggcgaacacg

SEQ ID NO: 3802871 - DNA, 25 bp, Homo sapien
acttaaggttatatattttggccag

SEQ ID NO: 3802872 - DNA, 25 bp, Homo sapien
tgcaaatgtggggtgttgtctttct

SEQ ID NO: 3802873 - DNA, 25 bp, Homo sapien
cattgcaaatgtggggtgttgtctt

SEQ ID NO: 3802874 - DNA, 25 bp, Homo sapien
gcattgcaaatgtggggtgttgtct

SEQ ID NO: 3802875 - DNA, 25 bp, Homo sapien
aggcattgcaaatgtggggtgttgt

SEQ ID NO: 3802876 - DNA, 25 bp, Homo sapien
tccctcagatatcaccgtgggattc

SEQ ID NO: 3802877 - DNA, 25 bp, Homo sapien
taaccacatccctcagatatcaccg

SEQ ID NO: 3802878 - DNA, 25 bp, Homo sapien
cacatccctcagatatcaccgtggg

SEQ ID NO: 3802879 - DNA, 25 bp, Homo sapien
cagatatcaccgtgggattccactg

SEQ ID NO: 3802880 - DNA, 25 bp, Homo sapien
agagggagatggcaaatttataact

SEQ ID NO: 3802881 - DNA, 25 bp, Homo sapien
atttataacttctcagaaacacagt

SEQ ID NO: 3802882 - DNA, 25 bp, Homo sapien
acacagtaatgataagtaaccaagg

SEQ ID NO: 3802883 - DNA, 25 bp, Homo sapien
cacagtaatgataagtaaccaagga

SEQ ID NO: 3802884 - DNA, 25 bp, Homo sapien
ctctacagaaagttagtatactcac

SEQ ID NO: 3802885 - DNA, 25 bp, Homo sapien
cctctacagaaagttagtatactca

SEQ ID NO: 3802886 - DNA, 25 bp, Homo sapien
tacctctacagaaagttagtatact

SEQ ID NO: 3802887 - DNA, 25 bp, Homo sapien
gtatacctctacagaaagttagtat

SEQ ID NO: 3802888 - DNA, 25 bp, Homo sapien
gacgggaagatagtcttcaggaaag

SEQ ID NO: 3802889 - DNA, 25 bp, Homo sapien
cgggaagatagtcttcaggaaagac

SEQ ID NO: 3802890 - DNA, 25 bp, Homo sapien
ggaagatagtcttcaggaaagacac

SEQ ID NO: 3802891 - DNA, 25 bp, Homo sapien
tttgagacgggaagatagtcttcag

SEQ ID NO: 3802892 - DNA, 25 bp, Homo sapien
tacggcggttggacctcctggctct

SEQ ID NO: 3802893 - DNA, 25 bp, Homo sapien
tggctctctgctgtacatccgtgga

SEQ ID NO: 3802894 - DNA, 25 bp, Homo sapien
tctacggcggttggacctcctggct

SEQ ID NO: 3802895 - DNA, 25 bp, Homo sapien
ctgtctacggcggttggacctcctg

SEQ ID NO: 3802896 - DNA, 25 bp, Homo sapien
ggacctcagcccttggtgagagtga

SEQ ID NO: 3802897 - DNA, 25 bp, Homo sapien
gacctcagcccttggtgagagtgag

SEQ ID NO: 3802898 - DNA, 25 bp, Homo sapien
tagctcgaactttggtttccacctg

SEQ ID NO: 3802899 - DNA, 25 bp, Homo sapien
cttttgttgtcaccttcatcttacg

SEQ ID NO: 3802900 - DNA, 25 bp, Homo sapien
cacctgtctccataaagtaaagatg

SEQ ID NO: 3802901 - DNA, 25 bp, Homo sapien
agtaaagatgtcttccaggacaatt

SEQ ID NO: 3802902 - DNA, 25 bp, Homo sapien
tatacagcttaaactaatgaagcag

SEQ ID NO: 3802903 - DNA, 25 bp, Homo sapien
gacaagctcaattttgaacccactg

SEQ ID NO: 3802904 - DNA, 25 bp, Homo sapien
aaggaaaaccaatgccagtactagc

SEQ ID NO: 3802905 - DNA, 25 bp, Homo sapien
gcagaaaggacaagctcaattttga

SEQ ID NO: 3802906 - DNA, 25 bp, Homo sapien
tctccgtgctcacgttctttcatgc

SEQ ID NO: 3802907 - DNA, 25 bp, Homo sapien
tccttttctccgtgctcacgttctt

SEQ ID NO: 3802908 - DNA, 25 bp, Homo sapien
cctctccttttctccgtgctcacgt

SEQ ID NO: 3802909 - DNA, 25 bp, Homo sapien
tttctccgtgctcacgttctttcat

SEQ ID NO: 3802910 - DNA, 25 bp, Homo sapien
ttcatcagataaagcaccactttca

SEQ ID NO: 3802911 - DNA, 25 bp, Homo sapien
tgattttaaataatctgccatgttt

SEQ ID NO: 3802912 - DNA, 25 bp, Homo sapien
gataaagcaccactttcaggatgat

SEQ ID NO: 3802913 - DNA, 25 bp, Homo sapien
tatggattacaatcactttcatcag

SEQ ID NO: 3802914 - DNA, 25 bp, Homo sapien
cgccgcaacgcttgcgcacgttgaa

SEQ ID NO: 3802915 - DNA, 25 bp, Homo sapien
tgcatctgtagtagtcctctgcccg

SEQ ID NO: 3802916 - DNA, 25 bp, Homo sapien
tttgcatctgtagtagtcctctgcc

SEQ ID NO: 3802917 - DNA, 25 bp, Homo sapien
cgcttgcgcacgttgaaacatttcc

SEQ ID NO: 3802918 - DNA, 25 bp, Homo sapien
ctgcatcagcactgaactatcctgc

SEQ ID NO: 3802919 - DNA, 25 bp, Homo sapien
aatgttgagagagtctaagggccgt

SEQ ID NO: 3802920 - DNA, 25 bp, Homo sapien
cagcactgaactatcctgcaactgc

SEQ ID NO: 3802921 - DNA, 25 bp, Homo sapien
agagagtctaagggccgtggcatca

SEQ ID NO: 3802922 - DNA, 25 bp, Homo sapien
gaggctttcttgcagaaggggtgat

SEQ ID NO: 3802923 - DNA, 25 bp, Homo sapien
ccggttgcaaagaggctttcttgca

SEQ ID NO: 3802924 - DNA, 25 bp, Homo sapien
caaagaggctttcttgcagaagggg

SEQ ID NO: 3802925 - DNA, 25 bp, Homo sapien
aagaggctttcttgcagaaggggtg

SEQ ID NO: 3802926 - DNA, 25 bp, Homo sapien
atttggaattgtccctgtgggtaat

SEQ ID NO: 3802927 - DNA, 25 bp, Homo sapien
ttgtccctgtgggtaataagttaca

SEQ ID NO: 3802928 - DNA, 25 bp, Homo sapien
ggtaataagttacattcactcttca

SEQ ID NO: 3802929 - DNA, 25 bp, Homo sapien
cctgtgggtaataagttacattcac

SEQ ID NO: 3802930 - DNA, 25 bp, Homo sapien
ttcactcccaggtaataccaaattg

SEQ ID NO: 3802931 - DNA, 25 bp, Homo sapien
ctcccaggtaataccaaattgtaag

SEQ ID NO: 3802932 - DNA, 25 bp, Homo sapien
tcactcccaggtaataccaaattgt

SEQ ID NO: 3802933 - DNA, 25 bp, Homo sapien
cactcccaggtaataccaaattgta

SEQ ID NO: 3802934 - DNA, 25 bp, Homo sapien
tctgttgctggtgatagatttttgc

SEQ ID NO: 3802935 - DNA, 25 bp, Homo sapien
atatcacccttccactgagtactgc

SEQ ID NO: 3802936 - DNA, 25 bp, Homo sapien
tggacaaaattaccgccaccaacac

SEQ ID NO: 3802937 - DNA, 25 bp, Homo sapien
tgctggtgatagatttttgcacctt

SEQ ID NO: 3802938 - DNA, 25 bp, Homo sapien
aggggatagagcagacactccgcag

SEQ ID NO: 3802939 - DNA, 25 bp, Homo sapien
gggatagagcagacactccgcaggt

SEQ ID NO: 3802940 - DNA, 25 bp, Homo sapien
atagagcagacactccgcaggtgtc

SEQ ID NO: 3802941 - DNA, 25 bp, Homo sapien
gatagagcagacactccgcaggtgt

SEQ ID NO: 3802942 - DNA, 25 bp, Homo sapien
gcccctgttgcaataaccactgctt

SEQ ID NO: 3802943 - DNA, 25 bp, Homo sapien
agatgacttccgtgcccctgttgca

SEQ ID NO: 3802944 - DNA, 25 bp, Homo sapien
cgtgcccctgttgcaataaccactg

SEQ ID NO: 3802945 - DNA, 25 bp, Homo sapien
cctggcatagccagatgacttccgt

SEQ ID NO: 3802946 - DNA, 25 bp, Homo sapien
ccgccggcatccctcgagaatggaa

SEQ ID NO: 3802947 - DNA, 25 bp, Homo sapien
tggaacaggccattcgccaaggagg

SEQ ID NO: 3802948 - DNA, 25 bp, Homo sapien
cattcgccaaggaggcggtgagcga

SEQ ID NO: 3802949 - DNA, 25 bp, Homo sapien
gagaatggaacaggccattcgccaa

SEQ ID NO: 3802950 - DNA, 25 bp, Homo sapien
ccgcgggctgccgaacctgatggtt

SEQ ID NO: 3802951 - DNA, 25 bp, Homo sapien
gcgccgcgggctgccgaacctgatg

SEQ ID NO: 3802952 - DNA, 25 bp, Homo sapien
aacctgatggttgagaggcggcggg

SEQ ID NO: 3802953 - DNA, 25 bp, Homo sapien
ctgccgaacctgatggttgagaggc

SEQ ID NO: 3802954 - DNA, 25 bp, Homo sapien
cggccggcggggcggagaagaggag

SEQ ID NO: 3802955 - DNA, 25 bp, Homo sapien
gcgcccgcggccggcggggcggaga

SEQ ID NO: 3802956 - DNA, 25 bp, Homo sapien
ccgcggccggcggggcggagaagag

SEQ ID NO: 3802957 - DNA, 25 bp, Homo sapien
ctgacgtcccccgcgcccgcggccg

SEQ ID NO: 3802958 - DNA, 25 bp, Homo sapien
ggctgaggcggccggtggtggcctg

SEQ ID NO: 3802959 - DNA, 25 bp, Homo sapien
gcggccggtggtggcctggcggtcc

SEQ ID NO: 3802960 - DNA, 25 bp, Homo sapien
tggcctggcggtcccgggctctact

SEQ ID NO: 3802961 - DNA, 25 bp, Homo sapien
tggcggtcccgggctctacttcctc

SEQ ID NO: 3802962 - DNA, 25 bp, Homo sapien
actgggaaacagttgcctcggaagc

SEQ ID NO: 3802963 - DNA, 25 bp, Homo sapien
aaacagttgcctcggaagcgggagc

SEQ ID NO: 3802964 - DNA, 25 bp, Homo sapien
ggcagctcgcgactgggaaacagtt

SEQ ID NO: 3802965 - DNA, 25 bp, Homo sapien
ggtcacaatggcagctcgcgactgg

SEQ ID NO: 3802966 - DNA, 25 bp, Homo sapien
tccgaaagggccagccgagctcagg

SEQ ID NO: 3802967 - DNA, 25 bp, Homo sapien
ggccactcgcggaacctcggcaggg

SEQ ID NO: 3802968 - DNA, 25 bp, Homo sapien
tttccgggagcatctggggccgcca

SEQ ID NO: 3802969 - DNA, 25 bp, Homo sapien
aataactgcggcttctttccgggag

SEQ ID NO: 3802970 - DNA, 25 bp, Homo sapien
cgggtatgcactggattggacaagc

SEQ ID NO: 3802971 - DNA, 25 bp, Homo sapien
aaatgtagccgtcttaaaacacgag

SEQ ID NO: 3802972 - DNA, 25 bp, Homo sapien
tcttaaaacacgagcattgctcctg

SEQ ID NO: 3802973 - DNA, 25 bp, Homo sapien
acatgcatgaaaaaccgggtatgca

SEQ ID NO: 3802974 - DNA, 25 bp, Homo sapien
cttcttaggaaattgataacaccac

SEQ ID NO: 3802975 - DNA, 25 bp, Homo sapien
ctggtgttataaacatgatcttgac

SEQ ID NO: 3802976 - DNA, 25 bp, Homo sapien
aaattgataacaccactttgcatcg

SEQ ID NO: 3802977 - DNA, 25 bp, Homo sapien
gcatcgttttgtactcaactgctgg

SEQ ID NO: 3802978 - DNA, 25 bp, Homo sapien
aatataaatctaagtcccggccagg

SEQ ID NO: 3802979 - DNA, 25 bp, Homo sapien
tacaactgctcacatagctcttgag

SEQ ID NO: 3802980 - DNA, 25 bp, Homo sapien
gagggtgagcatcaaataacattgt

SEQ ID NO: 3802981 - DNA, 25 bp, Homo sapien
tctaaggccctgtattacttcaggg

SEQ ID NO: 3802982 - DNA, 25 bp, Homo sapien
ccttatgccttggacatacagtggg

SEQ ID NO: 3802983 - DNA, 25 bp, Homo sapien
caaatcgtgacgagaaaatggctct

SEQ ID NO: 3802984 - DNA, 25 bp, Homo sapien
gggacatcactgatctcagatacaa

SEQ ID NO: 3802985 - DNA, 25 bp, Homo sapien
cacaggtctgcacgtttacataaca

SEQ ID NO: 3802986 - DNA, 25 bp, Homo sapien
catacccggccaagagaaggctttt

SEQ ID NO: 3802987 - DNA, 25 bp, Homo sapien
aaaaatcactacctaccttcggctg

SEQ ID NO: 3802988 - DNA, 25 bp, Homo sapien
gaccttggagttatgagatgctagt

SEQ ID NO: 3802989 - DNA, 25 bp, Homo sapien
aaccagctgctcatattagaagacc

SEQ ID NO: 3802990 - DNA, 25 bp, Homo sapien
gcctgggcgacagggtgagagtccg

SEQ ID NO: 3802991 - DNA, 25 bp, Homo sapien
cctgggcgacagggtgagagtccgt

SEQ ID NO: 3802992 - DNA, 25 bp, Homo sapien
agtaagctatgattgtgtcactgcg

SEQ ID NO: 3802993 - DNA, 25 bp, Homo sapien
gcgctccagcctggaacagagtaaa

SEQ ID NO: 3802994 - DNA, 25 bp, Homo sapien
aagctatgattgtgtcactgcgctc

SEQ ID NO: 3802995 - DNA, 25 bp, Homo sapien
ctccagcctggaacagagtaaaacc

SEQ ID NO: 3802996 - DNA, 25 bp, Homo sapien
tccagcatcttcactgcctccttca

SEQ ID NO: 3802997 - DNA, 25 bp, Homo sapien
ctccagcatcttcactgcctccttc

SEQ ID NO: 3802998 - DNA, 25 bp, Homo sapien
ctgcctccttcaagttttttcccat

SEQ ID NO: 3802999 - DNA, 25 bp, Homo sapien
cttcactgcctccttcaagtttttt

SEQ ID NO: 3803000 - DNA, 25 bp, Homo sapien
ggaatatctccggatatgagcttct

SEQ ID NO: 3803001 - DNA, 25 bp, Homo sapien
gagtgggcctggaatatctccggat

SEQ ID NO: 3803002 - DNA, 25 bp, Homo sapien
tatctccggatatgagcttctttcc

SEQ ID NO: 3803003 - DNA, 25 bp, Homo sapien
gggcctggaatatctccggatatga

SEQ ID NO: 3803004 - DNA, 25 bp, Homo sapien
catgtatcacttttgactcatgagg

SEQ ID NO: 3803005 - DNA, 25 bp, Homo sapien
tgtgacccactgtacttagcatcta

SEQ ID NO: 3803006 - DNA, 25 bp, Homo sapien
ccacggtgcctagctccatgtatca

SEQ ID NO: 3803007 - DNA, 25 bp, Homo sapien
caaaattagagagtgtctctatcac

SEQ ID NO: 3803008 - DNA, 25 bp, Homo sapien
tgaactaactggaggatgctcacca

SEQ ID NO: 3803009 - DNA, 25 bp, Homo sapien
gaactaactggaggatgctcaccat

SEQ ID NO: 3803010 - DNA, 25 bp, Homo sapien
ctgaactaactggaggatgctcacc

SEQ ID NO: 3803011 - DNA, 25 bp, Homo sapien
acttgaaaagagaagctgccaggtt

SEQ ID NO: 3803012 - DNA, 25 bp, Homo sapien
tgaaaagagaagctgccaggttcat

SEQ ID NO: 3803013 - DNA, 25 bp, Homo sapien
aaaagagaagctgccaggttcatta

SEQ ID NO: 3803014 - DNA, 25 bp, Homo sapien
cttgaaaagagaagctgccaggttc

SEQ ID NO: 3803015 - DNA, 25 bp, Homo sapien
tttgtccagagttgaaatataagct

SEQ ID NO: 3803016 - DNA, 25 bp, Homo sapien
ctttgtccagagttgaaatataagc

SEQ ID NO: 3803017 - DNA, 25 bp, Homo sapien
gattacaaaggtattggcccaggcc

SEQ ID NO: 3803018 - DNA, 25 bp, Homo sapien
gcagcagcactaagatatatgacag

SEQ ID NO: 3803019 - DNA, 25 bp, Homo sapien
tcctcttcgtggaaataagcacacc

SEQ ID NO: 3803020 - DNA, 25 bp, Homo sapien
gaagccatccactacgaagtcttca

SEQ ID NO: 3803021 - DNA, 25 bp, Homo sapien
aaatagccacctgataccacattac

SEQ ID NO: 3803022 - DNA, 25 bp, Homo sapien
tgttacagggtacacggcacaagca

SEQ ID NO: 3803023 - DNA, 25 bp, Homo sapien
gtgttacagggtacacggcacaagc

SEQ ID NO: 3803024 - DNA, 25 bp, Homo sapien
agtgttacagggtacacggcacaag

SEQ ID NO: 3803025 - DNA, 25 bp, Homo sapien
ttacagggtacacggcacaagcagg

SEQ ID NO: 3803026 - DNA, 25 bp, Homo sapien
gcaacaggggcagtcttcctcgctc

SEQ ID NO: 3803027 - DNA, 25 bp, Homo sapien
tgcgacaagcaacaggggcagtctt

SEQ ID NO: 3803028 - DNA, 25 bp, Homo sapien
gtcttcctcgctctatatcatcttt

SEQ ID NO: 3803029 - DNA, 25 bp, Homo sapien
tgcatttgcgacaagcaacaggggc

SEQ ID NO: 3803030 - DNA, 25 bp, Homo sapien
ggcaattgatctcgcagtctcagcc

SEQ ID NO: 3803031 - DNA, 25 bp, Homo sapien
atgtctcatggtgatcttaatttgc

SEQ ID NO: 3803032 - DNA, 25 bp, Homo sapien
taatttctccattctaacagacatg

SEQ ID NO: 3803033 - DNA, 25 bp, Homo sapien
cagacatgtagtaatgtctcatggt

SEQ ID NO: 3803034 - DNA, 25 bp, Homo sapien
catgagctctcatgctcggcctatt

SEQ ID NO: 3803035 - DNA, 25 bp, Homo sapien
gatttacatgcaacaaaactcactc

SEQ ID NO: 3803036 - DNA, 25 bp, Homo sapien
tatagagcatgtaaccatcaacaca

SEQ ID NO: 3803037 - DNA, 25 bp, Homo sapien
catgtaagtatacggtccaatgagt

SEQ ID NO: 3803038 - DNA, 25 bp, Homo sapien
taaatttccagttagcagtaagcca

SEQ ID NO: 3803039 - DNA, 25 bp, Homo sapien
tgttagtgcctggatcgcatgcaga

SEQ ID NO: 3803040 - DNA, 25 bp, Homo sapien
tgtaaggtctatgccaggaaaaggg

SEQ ID NO: 3803041 - DNA, 25 bp, Homo sapien
caagatcaaatgtcaatgcatgggc

SEQ ID NO: 3803042 - DNA, 25 bp, Homo sapien
cacatgaagccatatgccatactgc

SEQ ID NO: 3803043 - DNA, 25 bp, Homo sapien
aagccatatgccatactgctcacag

SEQ ID NO: 3803044 - DNA, 25 bp, Homo sapien
cctccacatgaagccatatgccata

SEQ ID NO: 3803045 - DNA, 25 bp, Homo sapien
ctcccaatcttgtctgtgtgtccta

SEQ ID NO: 3803046 - DNA, 25 bp, Homo sapien
aaatgtgtctcaggaactatccccg

SEQ ID NO: 3803047 - DNA, 25 bp, Homo sapien
caacagaaggtgtgctttatacata

SEQ ID NO: 3803048 - DNA, 25 bp, Homo sapien
tatcagaggattacttctccctggc

SEQ ID NO: 3803049 - DNA, 25 bp, Homo sapien
gagcaaagaacctcaactatcagag

SEQ ID NO: 3803050 - DNA, 25 bp, Homo sapien
agcactgatgaggagacataaccca

SEQ ID NO: 3803051 - DNA, 25 bp, Homo sapien
acataacccagagccaatgttgcca

SEQ ID NO: 3803052 - DNA, 25 bp, Homo sapien
cagagccaatgttgccagattcaca

SEQ ID NO: 3803053 - DNA, 25 bp, Homo sapien
cactgatgaggagacataacccaga

SEQ ID NO: 3803054 - DNA, 25 bp, Homo sapien
tcgtgtttatacagtgtcaccgcag

SEQ ID NO: 3803055 - DNA, 25 bp, Homo sapien
ccagccacgggccaggagtcatcgt

SEQ ID NO: 3803056 - DNA, 25 bp, Homo sapien
gccacgggccaggagtcatcgtcat

SEQ ID NO: 3803057 - DNA, 25 bp, Homo sapien
gtttatacagtgtcaccgcaggaac

SEQ ID NO: 3803058 - DNA, 25 bp, Homo sapien
catcaagtcccaagtattgtaaaga

SEQ ID NO: 3803059 - DNA, 25 bp, Homo sapien
ttgtaaagataaccacagaggcagg

SEQ ID NO: 3803060 - DNA, 25 bp, Homo sapien
gcacggagtttgtctgtgggcttat

SEQ ID NO: 3803061 - DNA, 25 bp, Homo sapien
cagttgacaggcatgcttgatcctc

SEQ ID NO: 3803062 - DNA, 25 bp, Homo sapien
cctaatcgcaaatgagttgaggcct

SEQ ID NO: 3803063 - DNA, 25 bp, Homo sapien
gaaacctaatcgcaaatgagttgag

SEQ ID NO: 3803064 - DNA, 25 bp, Homo sapien
aatcgcaaatgagttgaggcctttg

SEQ ID NO: 3803065 - DNA, 25 bp, Homo sapien
ctaaatgctatgatctgaatattta

SEQ ID NO: 3803066 - DNA, 25 bp, Homo sapien
tagagcactacgcaaatacttttcg

SEQ ID NO: 3803067 - DNA, 25 bp, Homo sapien
gcccagagcatacttaaaactgttg

SEQ ID NO: 3803068 - DNA, 25 bp, Homo sapien
catatgatgaacgaagggactactg

SEQ ID NO: 3803069 - DNA, 25 bp, Homo sapien
tgttgaactatcctaacatatgatg

SEQ ID NO: 3803070 - DNA, 25 bp, Homo sapien
ttagatggacgtgggacatgaagaa

SEQ ID NO: 3803071 - DNA, 25 bp, Homo sapien
caactgtaaatattcaccaatcctt

SEQ ID NO: 3803072 - DNA, 25 bp, Homo sapien
attagatggacgtgggacatgaaga

SEQ ID NO: 3803073 - DNA, 25 bp, Homo sapien
atattcaccaatccttcaagttaca

SEQ ID NO: 3803074 - DNA, 25 bp, Homo sapien
tcaaactttcctgcaaccgttgact

SEQ ID NO: 3803075 - DNA, 25 bp, Homo sapien
gatgtaattcactttcttcaaactt

SEQ ID NO: 3803076 - DNA, 25 bp, Homo sapien
tcttcaaactttcctgcaaccgttg

SEQ ID NO: 3803077 - DNA, 25 bp, Homo sapien
caagattttgatgtaattcactttc

SEQ ID NO: 3803078 - DNA, 25 bp, Homo sapien
tgtggagaaaatcattctaaagttc

SEQ ID NO: 3803079 - DNA, 25 bp, Homo sapien
cattcaaagttgctgaggttcaaaa

SEQ ID NO: 3803080 - DNA, 25 bp, Homo sapien
tactggagctgccacaattccactg

SEQ ID NO: 3803081 - DNA, 25 bp, Homo sapien
ttctaaagttctaaaatcattcaaa

SEQ ID NO: 3803082 - DNA, 25 bp, Homo sapien
cttgggcagctgaagtcaatggtgt

SEQ ID NO: 3803083 - DNA, 25 bp, Homo sapien
gcataccttgcagaattgtcaaaga

SEQ ID NO: 3803084 - DNA, 25 bp, Homo sapien
aaaactgatggcagaaggttgcaga

SEQ ID NO: 3803085 - DNA, 25 bp, Homo sapien
ttatgcctagggaacaatctgttgg

SEQ ID NO: 3803086 - DNA, 25 bp, Homo sapien
tggtagggccgcaacaggaaatgct

SEQ ID NO: 3803087 - DNA, 25 bp, Homo sapien
ttggaaagacaagaagcagtggccc

SEQ ID NO: 3803088 - DNA, 25 bp, Homo sapien
cagtgcggagagagcccatgctttc

SEQ ID NO: 3803089 - DNA, 25 bp, Homo sapien
ttattaaagacaggccgaagacgac

SEQ ID NO: 3803090 - DNA, 25 bp, Homo sapien
gaaaaatctgaacaccaccactggg

SEQ ID NO: 3803091 - DNA, 25 bp, Homo sapien
ctggtaattcctggaaaaatctgaa

SEQ ID NO: 3803092 - DNA, 25 bp, Homo sapien
ctgagcctggtaattcctggaaaaa

SEQ ID NO: 3803093 - DNA, 25 bp, Homo sapien
ccaccactggggagctgagctcatc

SEQ ID NO: 3803094 - DNA, 25 bp, Homo sapien
gtttaatcaccgcaaactatcagca

SEQ ID NO: 3803095 - DNA, 25 bp, Homo sapien
taacacagatatgaaaataaccctc

SEQ ID NO: 3803096 - DNA, 25 bp, Homo sapien
gcaaattgctaaggcgtttcggact

SEQ ID NO: 3803097 - DNA, 25 bp, Homo sapien
ttgaaatggtatcaaattcaaagcc

SEQ ID NO: 3803098 - DNA, 25 bp, Homo sapien
tgggcactgggacggctttaaacac

SEQ ID NO: 3803099 - DNA, 25 bp, Homo sapien
tgttgggcactgggacggctttaaa

SEQ ID NO: 3803100 - DNA, 25 bp, Homo sapien
ttgggcactgggacggctttaaaca

SEQ ID NO: 3803101 - DNA, 25 bp, Homo sapien
atgttgggcactgggacggctttaa

SEQ ID NO: 3803102 - DNA, 25 bp, Homo sapien
ttcagcgcgtcacacgagtgcctct

SEQ ID NO: 3803103 - DNA, 25 bp, Homo sapien
cagcgattcagcgcgtcacacgagt

SEQ ID NO: 3803104 - DNA, 25 bp, Homo sapien
gattcagcgcgtcacacgagtgcct

SEQ ID NO: 3803105 - DNA, 25 bp, Homo sapien
cacgagtgcctctcccggccgactc

SEQ ID NO: 3803106 - DNA, 25 bp, Homo sapien
aaaggggggtgactgccattctcac

SEQ ID NO: 3803107 - DNA, 25 bp, Homo sapien
gaaaggggggtgactgccattctca

SEQ ID NO: 3803108 - DNA, 25 bp, Homo sapien
tgaaaggaaaggggggtgactgcca

SEQ ID NO: 3803109 - DNA, 25 bp, Homo sapien
aggaaaggggggtgactgccattct

SEQ ID NO: 3803110 - DNA, 25 bp, Homo sapien
caggtcggatggtgatggacgggga

SEQ ID NO: 3803111 - DNA, 25 bp, Homo sapien
aggtcggatggtgatggacggggac

SEQ ID NO: 3803112 - DNA, 25 bp, Homo sapien
gcaggtcggatggtgatggacgggg

SEQ ID NO: 3803113 - DNA, 25 bp, Homo sapien
ggacttatctgccaaccctgctagg

SEQ ID NO: 3803114 - DNA, 25 bp, Homo sapien
tgagccccagcatggatgtaccagg

SEQ ID NO: 3803115 - DNA, 25 bp, Homo sapien
caaaacgctatcaaagtgcaggcct

SEQ ID NO: 3803116 - DNA, 25 bp, Homo sapien
tattactaagcgacacccactgctg

SEQ ID NO: 3803117 - DNA, 25 bp, Homo sapien
tcaaagggctgaaccgcaaacacgt

SEQ ID NO: 3803118 - DNA, 25 bp, Homo sapien
gggctgaaccgcaaacacgtgccct

SEQ ID NO: 3803119 - DNA, 25 bp, Homo sapien
ctgctgcggtcatcaaagggctgaa

SEQ ID NO: 3803120 - DNA, 25 bp, Homo sapien
gtcatcaaagggctgaaccgcaaac

SEQ ID NO: 3803121 - DNA, 25 bp, Homo sapien
gaatggagtatcataagggcaagct

SEQ ID NO: 3803122 - DNA, 25 bp, Homo sapien
catgggaatgctaatctacctaaat

SEQ ID NO: 3803123 - DNA, 25 bp, Homo sapien
gctgctaataactctaggagaatgg

SEQ ID NO: 3803124 - DNA, 25 bp, Homo sapien
catgcccggccaattcaggtgactt

SEQ ID NO: 3803125 - DNA, 25 bp, Homo sapien
tgtggccaggcaatccttatagtgg

SEQ ID NO: 3803126 - DNA, 25 bp, Homo sapien
cataggttcagcacaaaaaggcaac

SEQ ID NO: 3803127 - DNA, 25 bp, Homo sapien
gattctgtacattcctatgactgag

SEQ ID NO: 3803128 - DNA, 25 bp, Homo sapien
gagactaagtatctagagctgtggc

SEQ ID NO: 3803129 - DNA, 25 bp, Homo sapien
gcagtttgctttctatgcaggctac

SEQ ID NO: 3803130 - DNA, 25 bp, Homo sapien
aactggagcgtacagcacagcactg

SEQ ID NO: 3803131 - DNA, 25 bp, Homo sapien
tgcaggctacgagctgatccacatc

SEQ ID NO: 3803132 - DNA, 25 bp, Homo sapien
ttgaactcttcacgcaactggagcg

SEQ ID NO: 3803133 - DNA, 25 bp, Homo sapien
gagagtcggcacctacagacagaac

SEQ ID NO: 3803134 - DNA, 25 bp, Homo sapien
gtaaatgcccagaaaaccgagttgc

SEQ ID NO: 3803135 - DNA, 25 bp, Homo sapien
gaaaagtctccaacatcaagcggca

SEQ ID NO: 3803136 - DNA, 25 bp, Homo sapien
caaaagagctactgcgagtgtctcc

SEQ ID NO: 3803137 - DNA, 25 bp, Homo sapien
ggatgttttccccttcgggatctga

SEQ ID NO: 3803138 - DNA, 25 bp, Homo sapien
gctcttatcatcattagcatgttca

SEQ ID NO: 3803139 - DNA, 25 bp, Homo sapien
taaaggttaggtcagattccagttc

SEQ ID NO: 3803140 - DNA, 25 bp, Homo sapien
tttccccttcgggatctgatttcaa

SEQ ID NO: 3803141 - DNA, 25 bp, Homo sapien
tcgccatgccgacataaaggcagct

SEQ ID NO: 3803142 - DNA, 25 bp, Homo sapien
tgtggccgcaatggtctccacgagc

SEQ ID NO: 3803143 - DNA, 25 bp, Homo sapien
gagctcagcagcatcgacgttgtcg

SEQ ID NO: 3803144 - DNA, 25 bp, Homo sapien
gctcttcatgctcttatactcaggg

SEQ ID NO: 3803145 - DNA, 25 bp, Homo sapien
gcccctgctgtttggtgggacaaaa

SEQ ID NO: 3803146 - DNA, 25 bp, Homo sapien
tttgagagacaacgaacagacatcc

SEQ ID NO: 3803147 - DNA, 25 bp, Homo sapien
ggcagggttactacacagcgtggct

SEQ ID NO: 3803148 - DNA, 25 bp, Homo sapien
gggcatgggctgtgtcaaacctact

SEQ ID NO: 3803149 - DNA, 25 bp, Homo sapien
gtgatttttagggaagtaatcatct

SEQ ID NO: 3803150 - DNA, 25 bp, Homo sapien
ttatcagccttgtatcctggtcctc

SEQ ID NO: 3803151 - DNA, 25 bp, Homo sapien
gggaagtaatcatctgtttggagga

SEQ ID NO: 3803152 - DNA, 25 bp, Homo sapien
tggaggataccttatcagccttgta

SEQ ID NO: 3803153 - DNA, 25 bp, Homo sapien
cagataacatgctcatagaggccta

SEQ ID NO: 3803154 - DNA, 25 bp, Homo sapien
tgaaatcctgcattgaaaagccggc

SEQ ID NO: 3803155 - DNA, 25 bp, Homo sapien
acacagcactgagggaatttttcaa

SEQ ID NO: 3803156 - DNA, 25 bp, Homo sapien
cattacttgtttaaggttctcacct

SEQ ID NO: 3803157 - DNA, 25 bp, Homo sapien
ctttccgaaccacttctgtcatgtt

SEQ ID NO: 3803158 - DNA, 25 bp, Homo sapien
aatgcctttccgaaccacttctgtc

SEQ ID NO: 3803159 - DNA, 25 bp, Homo sapien
ctgaatgcctttccgaaccacttct

SEQ ID NO: 3803160 - DNA, 25 bp, Homo sapien
gcctttccgaaccacttctgtcatg

SEQ ID NO: 3803161 - DNA, 25 bp, Homo sapien
agaaaaccaattcagcacggagccc

SEQ ID NO: 3803162 - DNA, 25 bp, Homo sapien
gagcccactacagggatctgccgca

SEQ ID NO: 3803163 - DNA, 25 bp, Homo sapien
agcacggagcccactacagggatct

SEQ ID NO: 3803164 - DNA, 25 bp, Homo sapien
attcagcacggagcccactacaggg

SEQ ID NO: 3803165 - DNA, 25 bp, Homo sapien
ctgctgtcaagttaaaagttcttcc

SEQ ID NO: 3803166 - DNA, 25 bp, Homo sapien
tgctgtcaagttaaaagttcttccc

SEQ ID NO: 3803167 - DNA, 25 bp, Homo sapien
tgaaggaaggggctcgagtgtagga

SEQ ID NO: 3803168 - DNA, 25 bp, Homo sapien
gaaggaaggggctcgagtgtaggaa

SEQ ID NO: 3803169 - DNA, 25 bp, Homo sapien
aggaaggggctcgagtgtaggaaat

SEQ ID NO: 3803170 - DNA, 25 bp, Homo sapien
atgaaggaaggggctcgagtgtagg

SEQ ID NO: 3803171 - DNA, 25 bp, Homo sapien
gctttcatgacaatggagtcatcgt

SEQ ID NO: 3803172 - DNA, 25 bp, Homo sapien
taaggcttggcagattagaaatcag

SEQ ID NO: 3803173 - DNA, 25 bp, Homo sapien
tactgtagccacaagaagtgggtgc

SEQ ID NO: 3803174 - DNA, 25 bp, Homo sapien
agcagtatggcgtaagcacacccag

SEQ ID NO: 3803175 - DNA, 25 bp, Homo sapien
tgcccttgaagacaccacctgccct

SEQ ID NO: 3803176 - DNA, 25 bp, Homo sapien
aatgtgccgtgagctagagaaagcc

SEQ ID NO: 3803177 - DNA, 25 bp, Homo sapien
gccactgagcctgccacagactggt

SEQ ID NO: 3803178 - DNA, 25 bp, Homo sapien
ttgctccccaataacctccttccag

SEQ ID NO: 3803179 - DNA, 25 bp, Homo sapien
ggaagcctctgcttggtgcgactgc

SEQ ID NO: 3803180 - DNA, 25 bp, Homo sapien
cctgcaccttgtgctttgtagacat

SEQ ID NO: 3803181 - DNA, 25 bp, Homo sapien
gacatatatgggttctgtggactcc

SEQ ID NO: 3803182 - DNA, 25 bp, Homo sapien
tgcgactgcccgagggcgttggagg

SEQ ID NO: 3803183 - DNA, 25 bp, Homo sapien
ctgaactcggtgcagaggcgtcact

SEQ ID NO: 3803184 - DNA, 25 bp, Homo sapien
tgaatcccacggctaccaagatggt

SEQ ID NO: 3803185 - DNA, 25 bp, Homo sapien
caaacgcaagtaacagtcaacaggg

SEQ ID NO: 3803186 - DNA, 25 bp, Homo sapien
agagaaatagacctctggagttcaa

SEQ ID NO: 3803187 - DNA, 25 bp, Homo sapien
gtcttcaatgtgactgactgagctg

SEQ ID NO: 3803188 - DNA, 25 bp, Homo sapien
tctgaacctcgcagggaccttttaa

SEQ ID NO: 3803189 - DNA, 25 bp, Homo sapien
cactcaaagcatctgaacctcgcag

SEQ ID NO: 3803190 - DNA, 25 bp, Homo sapien
ggataggcgctccaccttttctaag

SEQ ID NO: 3803191 - DNA, 25 bp, Homo sapien
ctggcctcgagggtgatctgctccg

SEQ ID NO: 3803192 - DNA, 25 bp, Homo sapien
tctggtcggtgtgctgagggctggg

SEQ ID NO: 3803193 - DNA, 25 bp, Homo sapien
tttctggaaggcctcggtctggtcg

SEQ ID NO: 3803194 - DNA, 25 bp, Homo sapien
tgggtgtccctcagtgctgctggcc

SEQ ID NO: 3803195 - DNA, 25 bp, Homo sapien
tcatcttaagctctccggtccttct

SEQ ID NO: 3803196 - DNA, 25 bp, Homo sapien
atcttaagctctccggtccttctac

SEQ ID NO: 3803197 - DNA, 25 bp, Homo sapien
catcttaagctctccggtccttcta

SEQ ID NO: 3803198 - DNA, 25 bp, Homo sapien
catgaagttagacaagctgactccc

SEQ ID NO: 3803199 - DNA, 25 bp, Homo sapien
gctactggtagacacttgaaattcg

SEQ ID NO: 3803200 - DNA, 25 bp, Homo sapien
tatttgtgccaaaatcccagtgaag

SEQ ID NO: 3803201 - DNA, 25 bp, Homo sapien
gcaaacgtggttctacatgtacatg

SEQ ID NO: 3803202 - DNA, 25 bp, Homo sapien
agtctcgcctctgtgaagtgttgca

SEQ ID NO: 3803203 - DNA, 25 bp, Homo sapien
gatgctcttatttacaatcccacaa

SEQ ID NO: 3803204 - DNA, 25 bp, Homo sapien
gcaacttgatcgtactaaagaccga

SEQ ID NO: 3803205 - DNA, 25 bp, Homo sapien
ccttcaagtctagcagtcccactgt

SEQ ID NO: 3803206 - DNA, 25 bp, Homo sapien
gccacagctcaagtagacacagtcc

SEQ ID NO: 3803207 - DNA, 25 bp, Homo sapien
tttacaaacggtatataatgggaga

SEQ ID NO: 3803208 - DNA, 25 bp, Homo sapien
atgagcacagtctgtacttgtgtgc

SEQ ID NO: 3803209 - DNA, 25 bp, Homo sapien
tcagatactaaacagaaatgagcac

SEQ ID NO: 3803210 - DNA, 25 bp, Homo sapien
actgacttaagcagggtgcccggct

SEQ ID NO: 3803211 - DNA, 25 bp, Homo sapien
ctgtttctgagttgggcccaggcga

SEQ ID NO: 3803212 - DNA, 25 bp, Homo sapien
aagcttcagtgggagacaggtcaaa

SEQ ID NO: 3803213 - DNA, 25 bp, Homo sapien
taaccaggtgggtgctacgtagcac

SEQ ID NO: 3803214 - DNA, 25 bp, Homo sapien
tttcaggtctcccaaaagcttgact

SEQ ID NO: 3803215 - DNA, 25 bp, Homo sapien
tatacttcattgcaccaaataggga

SEQ ID NO: 3803216 - DNA, 25 bp, Homo sapien
gaagactgtttaatcatctgcacca

SEQ ID NO: 3803217 - DNA, 25 bp, Homo sapien
gactgctggattaagaaggcacagg

SEQ ID NO: 3803218 - DNA, 25 bp, Homo sapien
tcttggcctgacagaccattggtgg

SEQ ID NO: 3803219 - DNA, 25 bp, Homo sapien
gatctggatcctacatctgttgggt

SEQ ID NO: 3803220 - DNA, 25 bp, Homo sapien
tacctctcactggtctatcggcagc

SEQ ID NO: 3803221 - DNA, 25 bp, Homo sapien
tatcggcagctatttcaggtacgtg

SEQ ID NO: 3803222 - DNA, 25 bp, Homo sapien
gagtttacaggctgggtaagtctta

SEQ ID NO: 3803223 - DNA, 25 bp, Homo sapien
cacatgtggatttctggttgcacca

SEQ ID NO: 3803224 - DNA, 25 bp, Homo sapien
tataggaccgtactcctggacacca

SEQ ID NO: 3803225 - DNA, 25 bp, Homo sapien
tgacaagcaaatactagaggtgaga

SEQ ID NO: 3803226 - DNA, 25 bp, Homo sapien
cattgttctgaatgaccgtggctgc

SEQ ID NO: 3803227 - DNA, 25 bp, Homo sapien
tatgatgagagaggtgaaggaaacc

SEQ ID NO: 3803228 - DNA, 25 bp, Homo sapien
ccaaaggatggtaggttaggaagca

SEQ ID NO: 3803229 - DNA, 25 bp, Homo sapien
gaagcagtgaattgggcgttatccc

SEQ ID NO: 3803230 - DNA, 25 bp, Homo sapien
tagcctataggccaagaatggtctt

SEQ ID NO: 3803231 - DNA, 25 bp, Homo sapien
cacagctaggtgattggctaagaca

SEQ ID NO: 3803232 - DNA, 25 bp, Homo sapien
gccggaccctgcttatgtatagcct

SEQ ID NO: 3803233 - DNA, 25 bp, Homo sapien
gctaagacacaggtcaacaagccac

SEQ ID NO: 3803234 - DNA, 25 bp, Homo sapien
tcggctcgcgtcttccccttgaggg

SEQ ID NO: 3803235 - DNA, 25 bp, Homo sapien
gagcccacccgcctttggaggtgag

SEQ ID NO: 3803236 - DNA, 25 bp, Homo sapien
gctgttggcacatccggagccccgg

SEQ ID NO: 3803237 - DNA, 25 bp, Homo sapien
cacagacttgaaacttggcgctgtt

SEQ ID NO: 3803238 - DNA, 25 bp, Homo sapien
tgacatggttaatctggaacttacg

SEQ ID NO: 3803239 - DNA, 25 bp, Homo sapien
ccagggctttgtatgcacttgtata

SEQ ID NO: 3803240 - DNA, 25 bp, Homo sapien
aacactgctagagtcattttgaagc

SEQ ID NO: 3803241 - DNA, 25 bp, Homo sapien
cagaagacctcgctttaaaacaaat

SEQ ID NO: 3803242 - DNA, 25 bp, Homo sapien
ccgacatggtctgggacacagagtt

SEQ ID NO: 3803243 - DNA, 25 bp, Homo sapien
cttaggacttgactgatgagctttc

SEQ ID NO: 3803244 - DNA, 25 bp, Homo sapien
tataggcagcagactgttttacggg

SEQ ID NO: 3803245 - DNA, 25 bp, Homo sapien
gagaccaataaaagcccatagggaa

SEQ ID NO: 3803246 - DNA, 25 bp, Homo sapien
tgtggcacttccaggttcgactgaa

SEQ ID NO: 3803247 - DNA, 25 bp, Homo sapien
gctcctttgacacgcatttccgaag

SEQ ID NO: 3803248 - DNA, 25 bp, Homo sapien
cattgaactagagcgagtgcctgcc

SEQ ID NO: 3803249 - DNA, 25 bp, Homo sapien
tccttcaagtagtgtgggctcccca

SEQ ID NO: 3803250 - DNA, 25 bp, Homo sapien
ggaagacatgagtgctgaagagcta

SEQ ID NO: 3803251 - DNA, 25 bp, Homo sapien
tgctgaagagctacaggagttcaag

SEQ ID NO: 3803252 - DNA, 25 bp, Homo sapien
gctacaggagttcaagaaacccatg

SEQ ID NO: 3803253 - DNA, 25 bp, Homo sapien
tcctatttatcaggtgtgggaagac

SEQ ID NO: 3803254 - DNA, 25 bp, Homo sapien
taacacttgagtgtacccggccaca

SEQ ID NO: 3803255 - DNA, 25 bp, Homo sapien
tcctccgtgaagatctgggtcagtc

SEQ ID NO: 3803256 - DNA, 25 bp, Homo sapien
tcgagctcgtttccgtgaggataac

SEQ ID NO: 3803257 - DNA, 25 bp, Homo sapien
cgatttgactgagggaggctttgac

SEQ ID NO: 3803258 - DNA, 25 bp, Homo sapien
aagacccccagggaggcacagcatc

SEQ ID NO: 3803259 - DNA, 25 bp, Homo sapien
cccagggaggcacagcatcctctta

SEQ ID NO: 3803260 - DNA, 25 bp, Homo sapien
ctgaagacccccagggaggcacagc

SEQ ID NO: 3803261 - DNA, 25 bp, Homo sapien
ccagggaggcacagcatcctcttat

SEQ ID NO: 3803262 - DNA, 25 bp, Homo sapien
ctgcggatgtcacatgggcaggaca

SEQ ID NO: 3803263 - DNA, 25 bp, Homo sapien
tgattgacgcactgccaggagtagc

SEQ ID NO: 3803264 - DNA, 25 bp, Homo sapien
cgctctgattgacgcactgccagga

SEQ ID NO: 3803265 - DNA, 25 bp, Homo sapien
aggacgctctgattgacgcactgcc

SEQ ID NO: 3803266 - DNA, 25 bp, Homo sapien
tctgattgacgcactgccaggagta

SEQ ID NO: 3803267 - DNA, 25 bp, Homo sapien
aagtgtgtctgctcactccccttcc

SEQ ID NO: 3803268 - DNA, 25 bp, Homo sapien
tccaccctcagtggatgataatctg

SEQ ID NO: 3803269 - DNA, 25 bp, Homo sapien
tccccttccaccctcagtggatgat

SEQ ID NO: 3803270 - DNA, 25 bp, Homo sapien
caagtgtgtctgctcactccccttc

SEQ ID NO: 3803271 - DNA, 25 bp, Homo sapien
ctcccgagtgtgtctgctcactccc

SEQ ID NO: 3803272 - DNA, 25 bp, Homo sapien
cccgagtgtgtctgctcactcccct

SEQ ID NO: 3803273 - DNA, 25 bp, Homo sapien
tcactccccttccaccctcagctcc

SEQ ID NO: 3803274 - DNA, 25 bp, Homo sapien
caccctcagctccaccctcagcgga

SEQ ID NO: 3803275 - DNA, 25 bp, Homo sapien
ctcagcggatgataatctcaagaca

SEQ ID NO: 3803276 - DNA, 25 bp, Homo sapien
cctcagcggatgataatctcaagac

SEQ ID NO: 3803277 - DNA, 25 bp, Homo sapien
gggtgatatgacactgatactgcta

SEQ ID NO: 3803278 - DNA, 25 bp, Homo sapien
gtgatatgacactgatactgctatt

SEQ ID NO: 3803279 - DNA, 25 bp, Homo sapien
aagggtgatatgacactgatactgc

SEQ ID NO: 3803280 - DNA, 25 bp, Homo sapien
gatatgacactgatactgctatttt

SEQ ID NO: 3803281 - DNA, 25 bp, Homo sapien
catgtggagacaacagtgtgtccca

SEQ ID NO: 3803282 - DNA, 25 bp, Homo sapien
ctaagctggttcttgtgtggcctct

SEQ ID NO: 3803283 - DNA, 25 bp, Homo sapien
agctgccgagtcctatgattacacg

SEQ ID NO: 3803284 - DNA, 25 bp, Homo sapien
ttaaatgatgctcagctaagctggt

SEQ ID NO: 3803285 - DNA, 25 bp, Homo sapien
gcctctgtaccttcaaaagctgccg

SEQ ID NO: 3803286 - DNA, 25 bp, Homo sapien
aagcatcacagtcccatccctgttg

SEQ ID NO: 3803287 - DNA, 25 bp, Homo sapien
taagtgtcagaggttccgtatttgt

SEQ ID NO: 3803288 - DNA, 25 bp, Homo sapien
cccatccctgttggtaaccgtgttg

SEQ ID NO: 3803289 - DNA, 25 bp, Homo sapien
aaggctgcctacaagcatcacagtc

SEQ ID NO: 3803290 - DNA, 25 bp, Homo sapien
gctcctgaccccattgccagctaga

SEQ ID NO: 3803291 - DNA, 25 bp, Homo sapien
tgtgaagtagcaaaacggctcctga

SEQ ID NO: 3803292 - DNA, 25 bp, Homo sapien
gaagtagcaaaacggctcctgaccc

SEQ ID NO: 3803293 - DNA, 25 bp, Homo sapien
cttaatatttaccagtgaccaaaag

SEQ ID NO: 3803294 - DNA, 25 bp, Homo sapien
gggatctttgaatcagccttcagat

SEQ ID NO: 3803295 - DNA, 25 bp, Homo sapien
cagagggaatcccacacgggctggt

SEQ ID NO: 3803296 - DNA, 25 bp, Homo sapien
ttggttcatttgtgggaaggttgca

SEQ ID NO: 3803297 - DNA, 25 bp, Homo sapien
tggctcaagacaactttgcttcttt

SEQ ID NO: 3803298 - DNA, 25 bp, Homo sapien
gaatcccacggtgatatctgaggga

SEQ ID NO: 3803299 - DNA, 25 bp, Homo sapien
gctttataccaagaaagacaacacc

SEQ ID NO: 3803300 - DNA, 25 bp, Homo sapien
ttttttgtagcagtggaatcccacg

SEQ ID NO: 3803301 - DNA, 25 bp, Homo sapien
agtgcactgtcaggcacctgtactc

SEQ ID NO: 3803302 - DNA, 25 bp, Homo sapien
tgagtgcactgtcaggcacctgtac

SEQ ID NO: 3803303 - DNA, 25 bp, Homo sapien
gctgagtgcactgtcaggcacctgt

SEQ ID NO: 3803304 - DNA, 25 bp, Homo sapien
gaggcaggcagatcgcctgtcagga

SEQ ID NO: 3803305 - DNA, 25 bp, Homo sapien
tggctcaagacaactttgcttcttt

SEQ ID NO: 3803306 - DNA, 25 bp, Homo sapien
gctttataccaagaaagacaacacc

SEQ ID NO: 3803307 - DNA, 25 bp, Homo sapien
gaatcccacggtgatatctgaggga

SEQ ID NO: 3803308 - DNA, 25 bp, Homo sapien
ttttttgtagcagtggaatcccacg

SEQ ID NO: 3803309 - DNA, 25 bp, Homo sapien
tctatttatggtaaaggcattggct

SEQ ID NO: 3803310 - DNA, 25 bp, Homo sapien
atttatggtaaaggcattggctttc

SEQ ID NO: 3803311 - DNA, 25 bp, Homo sapien
accttatgtcatagtaaatggtaaa

SEQ ID NO: 3803312 - DNA, 25 bp, Homo sapien
tcctgtttacaataaccttatgtca

SEQ ID NO: 3803313 - DNA, 25 bp, Homo sapien
gtgtgtgacacatcccctggtacct

SEQ ID NO: 3803314 - DNA, 25 bp, Homo sapien
caacacaaccgaaatctagggcttc

SEQ ID NO: 3803315 - DNA, 25 bp, Homo sapien
gctcagtgacccgtccattgtgggt

SEQ ID NO: 3803316 - DNA, 25 bp, Homo sapien
cattgtgggtagcaatctgcggcac

SEQ ID NO: 3803317 - DNA, 25 bp, Homo sapien
aggctgagcccgctgagcgtcgaca

SEQ ID NO: 3803318 - DNA, 25 bp, Homo sapien
tggtgtccagcgtggttgtctatcc

SEQ ID NO: 3803319 - DNA, 25 bp, Homo sapien
gtggttgtctatcccgtctacctgg

SEQ ID NO: 3803320 - DNA, 25 bp, Homo sapien
gcgtcgacacagtcgctgttggcct

SEQ ID NO: 3803321 - DNA, 25 bp, Homo sapien
catgtttgcatgtcacaagttacag

SEQ ID NO: 3803322 - DNA, 25 bp, Homo sapien
actggttgtggcgtgactgaggcgt

SEQ ID NO: 3803323 - DNA, 25 bp, Homo sapien
gaggtcctgctgtttattggacaaa

SEQ ID NO: 3803324 - DNA, 25 bp, Homo sapien
tggactgaggcgtgtgcagccatgt

SEQ ID NO: 3803325 - DNA, 25 bp, Homo sapien
gcaggcatgtgactggtgctgcggc

SEQ ID NO: 3803326 - DNA, 25 bp, Homo sapien
gaccaccacatccacgggcagcgca

SEQ ID NO: 3803327 - DNA, 25 bp, Homo sapien
tggtgctggatgagaccaccacatc

SEQ ID NO: 3803328 - DNA, 25 bp, Homo sapien
ccacgggcagcgcaggcatgtgact

SEQ ID NO: 3803329 - DNA, 25 bp, Homo sapien
acaggagatgggggcccctcgagtc

SEQ ID NO: 3803330 - DNA, 25 bp, Homo sapien
ggagatgggggcccctcgagtctgt

SEQ ID NO: 3803331 - DNA, 25 bp, Homo sapien
ctgttgggttcagaacaggagatgg

SEQ ID NO: 3803332 - DNA, 25 bp, Homo sapien
tgttgggttcagaacaggagatggg

SEQ ID NO: 3803333 - DNA, 25 bp, Homo sapien
tacctggttgtggtcccacagtggg

SEQ ID NO: 3803334 - DNA, 25 bp, Homo sapien
gtagcctggtagtgagcctgcttct

SEQ ID NO: 3803335 - DNA, 25 bp, Homo sapien
gtgctccctggtagcctggtagtga

SEQ ID NO: 3803336 - DNA, 25 bp, Homo sapien
tgcttctcacacagtcatacctggt

SEQ ID NO: 3803337 - DNA, 25 bp, Homo sapien
ccacggtgctgtgttaccggcgtgt

SEQ ID NO: 3803338 - DNA, 25 bp, Homo sapien
cgtctcagctcccacggtgctgtgt

SEQ ID NO: 3803339 - DNA, 25 bp, Homo sapien
tccttccgtctcagctcccacggtg

SEQ ID NO: 3803340 - DNA, 25 bp, Homo sapien
tgttaccggcgtgtgccccagtgcc

SEQ ID NO: 3803341 - DNA, 25 bp, Homo sapien
tattttgcgtagaagttgtgtattt

SEQ ID NO: 3803342 - DNA, 25 bp, Homo sapien
tgtgtattttagatggagttaggtc

SEQ ID NO: 3803343 - DNA, 25 bp, Homo sapien
gtattttagatggagttaggtcggc

SEQ ID NO: 3803344 - DNA, 25 bp, Homo sapien
tagaagttgtgtattttagatggag

SEQ ID NO: 3803345 - DNA, 25 bp, Homo sapien
tcctgtacgcgattgccggcagggg

SEQ ID NO: 3803346 - DNA, 25 bp, Homo sapien
ctgtacgcgattgccggcaggggtg

SEQ ID NO: 3803347 - DNA, 25 bp, Homo sapien
cctgtacgcgattgccggcaggggt

SEQ ID NO: 3803348 - DNA, 25 bp, Homo sapien
cccgcactcgggcgttcagaacgtg

SEQ ID NO: 3803349 - DNA, 25 bp, Homo sapien
tcccgcactcgggcgttcagaacgt

SEQ ID NO: 3803350 - DNA, 25 bp, Homo sapien
ccgcactcgggcgttcagaacgtgc

SEQ ID NO: 3803351 - DNA, 25 bp, Homo sapien
ctcccgcactcgggcgttcagaacg

SEQ ID NO: 3803352 - DNA, 25 bp, Homo sapien
tccaggactgggcacatcgagggac

SEQ ID NO: 3803353 - DNA, 25 bp, Homo sapien
gctgtctcgcaaatgctggggtcca

SEQ ID NO: 3803354 - DNA, 25 bp, Homo sapien
cacatcgagggacttggtaggtgct

SEQ ID NO: 3803355 - DNA, 25 bp, Homo sapien
gcttggttcactgatgtaaaatata

SEQ ID NO: 3803356 - DNA, 25 bp, Homo sapien
ctaggtgtagatgtcatcagctcag

SEQ ID NO: 3803357 - DNA, 25 bp, Homo sapien
taggtgtagatgtcatcagctcagg

SEQ ID NO: 3803358 - DNA, 25 bp, Homo sapien
gaacaccactgtgcttggaccagct

SEQ ID NO: 3803359 - DNA, 25 bp, Homo sapien
aatgaagaattctacctggctgtga

SEQ ID NO: 3803360 - DNA, 25 bp, Homo sapien
gcaaagcagtggaactggagaaaga

SEQ ID NO: 3803361 - DNA, 25 bp, Homo sapien
caattcgttgtgaacaccactgtgc

SEQ ID NO: 3803362 - DNA, 25 bp, Homo sapien
taatagtttgaattaagagccaaat

SEQ ID NO: 3803363 - DNA, 25 bp, Homo sapien
cacactgcaattagttgatgtcttt

SEQ ID NO: 3803364 - DNA, 25 bp, Homo sapien
agagccaaataaggtccacacactg

SEQ ID NO: 3803365 - DNA, 25 bp, Homo sapien
aataaggtccacacactgcaattag

SEQ ID NO: 3803366 - DNA, 25 bp, Homo sapien
cttgggttaatgatgctgccgagag

SEQ ID NO: 3803367 - DNA, 25 bp, Homo sapien
ctgcaaaacgtgctgctctgcgtgg

SEQ ID NO: 3803368 - DNA, 25 bp, Homo sapien
gatggcgtactgcaaaacgtgctgc

SEQ ID NO: 3803369 - DNA, 25 bp, Homo sapien
tttggaaaagatggcgtactgcaaa

SEQ ID NO: 3803370 - DNA, 25 bp, Homo sapien
gcctctccacttgtggctccctggc

SEQ ID NO: 3803371 - DNA, 25 bp, Homo sapien
tgatgctgtagctgagggctcctct

SEQ ID NO: 3803372 - DNA, 25 bp, Homo sapien
ccagcacctgatggtgtccatgaga

SEQ ID NO: 3803373 - DNA, 25 bp, Homo sapien
tctgccaggccggtcactggggact

SEQ ID NO: 3803374 - DNA, 25 bp, Homo sapien
cccacccgttgtttgtgatgctgta

SEQ ID NO: 3803375 - DNA, 25 bp, Homo sapien
cgggggctgtgcagacgccagcggg

SEQ ID NO: 3803376 - DNA, 25 bp, Homo sapien
gggctgtgcagacgccagcgggggc

SEQ ID NO: 3803377 - DNA, 25 bp, Homo sapien
ggggctgtgcagacgccagcggggg

SEQ ID NO: 3803378 - DNA, 25 bp, Homo sapien
gctgtgcagacgccagcgggggcgg

SEQ ID NO: 3803379 - DNA, 25 bp, Homo sapien
aaataaggaacgcctggagccgcgg

SEQ ID NO: 3803380 - DNA, 25 bp, Homo sapien
ctaaataaggaacgcctggagccgc

SEQ ID NO: 3803381 - DNA, 25 bp, Homo sapien
tggagccgcggttggcacggcccgg

SEQ ID NO: 3803382 - DNA, 25 bp, Homo sapien
gcctggagccgcggttggcacggcc

SEQ ID NO: 3803383 - DNA, 25 bp, Homo sapien
cacagcgctgtgagtagcgggccca

SEQ ID NO: 3803384 - DNA, 25 bp, Homo sapien
cggacgctcggtcccgcgctgcgca

SEQ ID NO: 3803385 - DNA, 25 bp, Homo sapien
tgccgcgtcaactgctcgggccgcg

SEQ ID NO: 3803386 - DNA, 25 bp, Homo sapien
cgggcccagcggcacccgggagagg

SEQ ID NO: 3803387 - DNA, 25 bp, Homo sapien
gcgcgcgctgccctaacgatgccgc

SEQ ID NO: 3803388 - DNA, 25 bp, Homo sapien
gccatgcgcgcgctgccctaacgat

SEQ ID NO: 3803389 - DNA, 25 bp, Homo sapien
tgccctaacgatgccgcccgccgcg

SEQ ID NO: 3803390 - DNA, 25 bp, Homo sapien
ggacggcggggccatgcgcgcgctg

SEQ ID NO: 3803391 - DNA, 25 bp, Homo sapien
caatcacggctcagcgcagccactg

SEQ ID NO: 3803392 - DNA, 25 bp, Homo sapien
ccagtttggctaattttggctaatt

SEQ ID NO: 3803393 - DNA, 25 bp, Homo sapien
tgtgagccagtttggctaattttgg

SEQ ID NO: 3803394 - DNA, 25 bp, Homo sapien
gggctcacacgctcctccggcctca

SEQ ID NO: 3803395 - DNA, 25 bp, Homo sapien
agcactcctcaaaatgctccatgtg

SEQ ID NO: 3803396 - DNA, 25 bp, Homo sapien
gcactcctcaaaatgctccatgtgg

SEQ ID NO: 3803397 - DNA, 25 bp, Homo sapien
cagcactcctcaaaatgctccatgt

SEQ ID NO: 3803398 - DNA, 25 bp, Homo sapien
acagaggctcacagatcattaatcc

SEQ ID NO: 3803399 - DNA, 25 bp, Homo sapien
aatgacacgcattcagggctgaaca

SEQ ID NO: 3803400 - DNA, 25 bp, Homo sapien
caaactccatggaatgctcgcactc

SEQ ID NO: 3803401 - DNA, 25 bp, Homo sapien
ctaaaaatgacacgcattcagggct

SEQ ID NO: 3803402 - DNA, 25 bp, Homo sapien
ccgagacttcttttgaccaggattc

SEQ ID NO: 3803403 - DNA, 25 bp, Homo sapien
tcttgttaagttttcttgccaggct

SEQ ID NO: 3803404 - DNA, 25 bp, Homo sapien
cctttgtcattaaatgaccgagact

SEQ ID NO: 3803405 - DNA, 25 bp, Homo sapien
taaatgaccgagacttcttttgacc

SEQ ID NO: 3803406 - DNA, 25 bp, Homo sapien
agttcggtctgcagaaagacctttc

SEQ ID NO: 3803407 - DNA, 25 bp, Homo sapien
ttcagttcggtctgcagaaagacct

SEQ ID NO: 3803408 - DNA, 25 bp, Homo sapien
cagttcagttcggtctgcagaaaga

SEQ ID NO: 3803409 - DNA, 25 bp, Homo sapien
cggtctgcagaaagacctttctatg

SEQ ID NO: 3803410 - DNA, 25 bp, Homo sapien
aaggtccatctctattgctatttgt

SEQ ID NO: 3803411 - DNA, 25 bp, Homo sapien
taaggtccatctctattgctatttg

SEQ ID NO: 3803412 - DNA, 25 bp, Homo sapien
gtaaggtccatctctattgctattt

SEQ ID NO: 3803413 - DNA, 25 bp, Homo sapien
tgtaaggtccatctctattgctatt

SEQ ID NO: 3803414 - DNA, 25 bp, Homo sapien
gttttctgttgtagatgataccacc

SEQ ID NO: 3803415 - DNA, 25 bp, Homo sapien
tctgttgtagatgataccaccttgg

SEQ ID NO: 3803416 - DNA, 25 bp, Homo sapien
tcagttttctgttgtagatgatacc

SEQ ID NO: 3803417 - DNA, 25 bp, Homo sapien
tgtagatgataccaccttgggccac

SEQ ID NO: 3803418 - DNA, 25 bp, Homo sapien
caaggctcatgtaatgggcagctcc

SEQ ID NO: 3803419 - DNA, 25 bp, Homo sapien
gcagttgaggaaatacagtcgttac

SEQ ID NO: 3803420 - DNA, 25 bp, Homo sapien
ttctcacaggttgatgtccaagcca

SEQ ID NO: 3803421 - DNA, 25 bp, Homo sapien
tacaggagcttatgctgagtcttct

SEQ ID NO: 3803422 - DNA, 25 bp, Homo sapien
ggtctaccagcactcctgttcattg

SEQ ID NO: 3803423 - DNA, 25 bp, Homo sapien
aacgtttcaccttgccctggctttg

SEQ ID NO: 3803424 - DNA, 25 bp, Homo sapien
ggccctttaagccattaagcagtcg

SEQ ID NO: 3803425 - DNA, 25 bp, Homo sapien
taagcagtcgcaaagaagcaggtct

SEQ ID NO: 3803426 - DNA, 25 bp, Homo sapien
tgctggaggatttagaggagacacc

SEQ ID NO: 3803427 - DNA, 25 bp, Homo sapien
aataagaccgccttgaagactgctg

SEQ ID NO: 3803428 - DNA, 25 bp, Homo sapien
gaagagtgaaagtaataagaccgcc

SEQ ID NO: 3803429 - DNA, 25 bp, Homo sapien
actgctggaggatttagaggagaca

SEQ ID NO: 3803430 - DNA, 25 bp, Homo sapien
aaggcttcttcaggcatccaggggt

SEQ ID NO: 3803431 - DNA, 25 bp, Homo sapien
tgcgttatttaacttgaatttagaa

SEQ ID NO: 3803432 - DNA, 25 bp, Homo sapien
cgttatttaacttgaatttagaatg

SEQ ID NO: 3803433 - DNA, 25 bp, Homo sapien
ctgcgttatttaacttgaatttaga

SEQ ID NO: 3803434 - DNA, 25 bp, Homo sapien
ttagtggctccttggatagcctctc

SEQ ID NO: 3803435 - DNA, 25 bp, Homo sapien
agtggctccttggatagcctctcat

SEQ ID NO: 3803436 - DNA, 25 bp, Homo sapien
tagtggctccttggatagcctctca

SEQ ID NO: 3803437 - DNA, 25 bp, Homo sapien
tggctccttggatagcctctcatct

SEQ ID NO: 3803438 - DNA, 25 bp, Homo sapien
gagagtcgaattagaatggttgcca

SEQ ID NO: 3803439 - DNA, 25 bp, Homo sapien
tttggcacggtaactatggttaaca

SEQ ID NO: 3803440 - DNA, 25 bp, Homo sapien
tctgggcatctcatatttggcacgg

SEQ ID NO: 3803441 - DNA, 25 bp, Homo sapien
gttgctcaaagggtacagactttcg

SEQ ID NO: 3803442 - DNA, 25 bp, Homo sapien
tttcgtggtagttgaagttcaagtg

SEQ ID NO: 3803443 - DNA, 25 bp, Homo sapien
gtggtagttgaagttcaagtggaaa

SEQ ID NO: 3803444 - DNA, 25 bp, Homo sapien
cgtggtagttgaagttcaagtggaa

SEQ ID NO: 3803445 - DNA, 25 bp, Homo sapien
tcgtggtagttgaagttcaagtgga

SEQ ID NO: 3803446 - DNA, 25 bp, Homo sapien
cctactgtcagaggcttggaataaa

SEQ ID NO: 3803447 - DNA, 25 bp, Homo sapien
actcctactgtcagaggcttggaat

SEQ ID NO: 3803448 - DNA, 25 bp, Homo sapien
cattctgtgattctgccaagtcctc

SEQ ID NO: 3803449 - DNA, 25 bp, Homo sapien
acattctgtgattctgccaagtcct

SEQ ID NO: 3803450 - DNA, 25 bp, Homo sapien
gacatcgaggctggttctacctgga

SEQ ID NO: 3803451 - DNA, 25 bp, Homo sapien
ggtcctgggctccagaagacatcga

SEQ ID NO: 3803452 - DNA, 25 bp, Homo sapien
ggagcttgaacagtggcactctgag

SEQ ID NO: 3803453 - DNA, 25 bp, Homo sapien
gatgttgcatccgtaggtatcaaag

SEQ ID NO: 3803454 - DNA, 25 bp, Homo sapien
tagaagtccaatcttgtgtgagagg

SEQ ID NO: 3803455 - DNA, 25 bp, Homo sapien
tgaaatagaagtccaatcttgtgtg

SEQ ID NO: 3803456 - DNA, 25 bp, Homo sapien
ggctggcctccgtttgcagagcttg

SEQ ID NO: 3803457 - DNA, 25 bp, Homo sapien
ccgggctggcctccgtttgcagagc

SEQ ID NO: 3803458 - DNA, 25 bp, Homo sapien
ctccagccgaagacgtgtgtccact

SEQ ID NO: 3803459 - DNA, 25 bp, Homo sapien
aatgacagcccagggtattccaggc

SEQ ID NO: 3803460 - DNA, 25 bp, Homo sapien
ccttgcaacagaaatggaatcgttt

SEQ ID NO: 3803461 - DNA, 25 bp, Homo sapien
agcagatgctccagccgaagacgtg

SEQ ID NO: 3803462 - DNA, 25 bp, Homo sapien
taatcataggtggcattataattct

SEQ ID NO: 3803463 - DNA, 25 bp, Homo sapien
ttaatcataggtggcattataattc

SEQ ID NO: 3803464 - DNA, 25 bp, Homo sapien
tgaacgcctgctcttccttcagtcc

SEQ ID NO: 3803465 - DNA, 25 bp, Homo sapien
agtccccagttctctgcattcccca

SEQ ID NO: 3803466 - DNA, 25 bp, Homo sapien
tccttcagtccccagttctctgcat

SEQ ID NO: 3803467 - DNA, 25 bp, Homo sapien
tcttccttcagtccccagttctctg

SEQ ID NO: 3803468 - DNA, 25 bp, Homo sapien
ttcccacaatcagcttgcctgaccc

SEQ ID NO: 3803469 - DNA, 25 bp, Homo sapien
tcccacaatcagcttgcctgacccc

SEQ ID NO: 3803470 - DNA, 25 bp, Homo sapien
atgttgggtgcaaatgaatagggct

SEQ ID NO: 3803471 - DNA, 25 bp, Homo sapien
gatgatgttgggtgcaaatgaatag

SEQ ID NO: 3803472 - DNA, 25 bp, Homo sapien
tgggtgcaaatgaatagggcttcag

SEQ ID NO: 3803473 - DNA, 25 bp, Homo sapien
tgatgatgttgggtgcaaatgaata

SEQ ID NO: 3803474 - DNA, 25 bp, Homo sapien
ttgccaatccactgtgacaggagtc

SEQ ID NO: 3803475 - DNA, 25 bp, Homo sapien
tttgccaatccactgtgacaggagt

SEQ ID NO: 3803476 - DNA, 25 bp, Homo sapien
tgttctttgccaatccactgtgaca

SEQ ID NO: 3803477 - DNA, 25 bp, Homo sapien
ttctttgccaatccactgtgacagg

SEQ ID NO: 3803478 - DNA, 25 bp, Homo sapien
tcggcagagtgttggaccacgagaa

SEQ ID NO: 3803479 - DNA, 25 bp, Homo sapien
tgttggaccacgagaaggcagatgt

SEQ ID NO: 3803480 - DNA, 25 bp, Homo sapien
ggattaactgagtcggcagagtgtt

SEQ ID NO: 3803481 - DNA, 25 bp, Homo sapien
cagcctgaagtttggaagtgatctt

SEQ ID NO: 3803482 - DNA, 25 bp, Homo sapien
ctgacatccagaaaactattgccca

SEQ ID NO: 3803483 - DNA, 25 bp, Homo sapien
cttgtgccagagtcccactgacatc

SEQ ID NO: 3803484 - DNA, 25 bp, Homo sapien
cccactgacatccagaaaactattg

SEQ ID NO: 3803485 - DNA, 25 bp, Homo sapien
ttgtgccagagtcccactgacatcc

SEQ ID NO: 3803486 - DNA, 25 bp, Homo sapien
cattgcaaagaatttcctgttgcgc

SEQ ID NO: 3803487 - DNA, 25 bp, Homo sapien
aggacattgcaaagaatttcctgtt

SEQ ID NO: 3803488 - DNA, 25 bp, Homo sapien
cacaaggacattgcaaagaatttcc

SEQ ID NO: 3803489 - DNA, 25 bp, Homo sapien
gcaaagaatttcctgttgcgctcac

SEQ ID NO: 3803490 - DNA, 25 bp, Homo sapien
tgaaggtgtgacttgtgattccagc

SEQ ID NO: 3803491 - DNA, 25 bp, Homo sapien
ccagggcccagagtcaataagggag

SEQ ID NO: 3803492 - DNA, 25 bp, Homo sapien
gtgattccagccaatgtcctgttgg

SEQ ID NO: 3803493 - DNA, 25 bp, Homo sapien
tgactcctctggtttactgaaggtg

SEQ ID NO: 3803494 - DNA, 25 bp, Homo sapien
cagatgaactcaaatgggctggcag

SEQ ID NO: 3803495 - DNA, 25 bp, Homo sapien
agatgaactcaaatgggctggcaga

SEQ ID NO: 3803496 - DNA, 25 bp, Homo sapien
gttccagaaggcctgttagagacat

SEQ ID NO: 3803497 - DNA, 25 bp, Homo sapien
acagtgggtgcatccaagccaccag

SEQ ID NO: 3803498 - DNA, 25 bp, Homo sapien
tcccctggttccagaaggcctgtta

SEQ ID NO: 3803499 - DNA, 25 bp, Homo sapien
ctcacagtgggtgcatccaagccac

SEQ ID NO: 3803500 - DNA, 25 bp, Homo sapien
ttctcggagctaaggtctccctgct

SEQ ID NO: 3803501 - DNA, 25 bp, Homo sapien
agttgcttctcggagctaaggtctc

SEQ ID NO: 3803502 - DNA, 25 bp, Homo sapien
tcggagctaaggtctccctgctcct

SEQ ID NO: 3803503 - DNA, 25 bp, Homo sapien
gcttctcggagctaaggtctccctg

SEQ ID NO: 3803504 - DNA, 25 bp, Homo sapien
tgattgacgcactgccaggagtagc

SEQ ID NO: 3803505 - DNA, 25 bp, Homo sapien
aggacgctctgattgacgcactgcc

SEQ ID NO: 3803506 - DNA, 25 bp, Homo sapien
cgctctgattgacgcactgccagga

SEQ ID NO: 3803507 - DNA, 25 bp, Homo sapien
tctgattgacgcactgccaggagta

SEQ ID NO: 3803508 - DNA, 25 bp, Homo sapien
ctcagcggatgataatctcaagaca

SEQ ID NO: 3803509 - DNA, 25 bp, Homo sapien
cctcagcggatgataatctcaagac

SEQ ID NO: 3803510 - DNA, 25 bp, Homo sapien
tgacactgacactgctattttgaaa

SEQ ID NO: 3803511 - DNA, 25 bp, Homo sapien
ttatgacactgacactgctattttg

SEQ ID NO: 3803512 - DNA, 25 bp, Homo sapien
tatgacactgacactgctattttga

SEQ ID NO: 3803513 - DNA, 25 bp, Homo sapien
gacactgacactgctattttgaaac

SEQ ID NO: 3803514 - DNA, 25 bp, Homo sapien
ctgccaggtcaggacatggatacat

SEQ ID NO: 3803515 - DNA, 25 bp, Homo sapien
tgccaggtcaggacatggatacatt

SEQ ID NO: 3803516 - DNA, 25 bp, Homo sapien
gccaggtcaggacatggatacattt

SEQ ID NO: 3803517 - DNA, 25 bp, Homo sapien
ccaggtcaggacatggatacatttt

SEQ ID NO: 3803518 - DNA, 25 bp, Homo sapien
agggtggatggtttgccgttgtcac

SEQ ID NO: 3803519 - DNA, 25 bp, Homo sapien
cgtttcctttttctgccctcaatct

SEQ ID NO: 3803520 - DNA, 25 bp, Homo sapien
taaagtcagtcaacaccagggtgga

SEQ ID NO: 3803521 - DNA, 25 bp, Homo sapien
ccctcaatctctgtgaactgaacct

SEQ ID NO: 3803522 - DNA, 25 bp, Homo sapien
caagtggtgtgagggcaacacagca

SEQ ID NO: 3803523 - DNA, 25 bp, Homo sapien
accatgaatcaagtggtgtgagggc

SEQ ID NO: 3803524 - DNA, 25 bp, Homo sapien
aatcaagtggtgtgagggcaacaca

SEQ ID NO: 3803525 - DNA, 25 bp, Homo sapien
tgaatcaagtggtgtgagggcaaca

SEQ ID NO: 3803526 - DNA, 25 bp, Homo sapien
ttctcatcggagatcagaagcttca

SEQ ID NO: 3803527 - DNA, 25 bp, Homo sapien
tgcacttatgtcaactcaagagtag

SEQ ID NO: 3803528 - DNA, 25 bp, Homo sapien
tattctgtttggtgtcccccattgt

SEQ ID NO: 3803529 - DNA, 25 bp, Homo sapien
aatcatgggttttatattctgtttg

SEQ ID NO: 3803530 - DNA, 25 bp, Homo sapien
gaagagatgggagtctacttctggg

SEQ ID NO: 3803531 - DNA, 25 bp, Homo sapien
gagatgggagtctacttctggggga

SEQ ID NO: 3803532 - DNA, 25 bp, Homo sapien
gatgggagtctacttctgggggatg

SEQ ID NO: 3803533 - DNA, 25 bp, Homo sapien
cagaagagatgggagtctacttctg

SEQ ID NO: 3803534 - DNA, 25 bp, Homo sapien
tggctcaagacaactttgcttcttt

SEQ ID NO: 3803535 - DNA, 25 bp, Homo sapien
gctttataccaagaaagacaacacc

SEQ ID NO: 3803536 - DNA, 25 bp, Homo sapien
gaatcccacggtgatatctgaggga

SEQ ID NO: 3803537 - DNA, 25 bp, Homo sapien
ttttttgtagcagtggaatcccacg

SEQ ID NO: 3803538 - DNA, 25 bp, Homo sapien
gttcctgtcccatgaccagggccag

SEQ ID NO: 3803539 - DNA, 25 bp, Homo sapien
ctaataggttggcactcatcatgag

SEQ ID NO: 3803540 - DNA, 25 bp, Homo sapien
aaatggtgaagctctctattgtcct

SEQ ID NO: 3803541 - DNA, 25 bp, Homo sapien
gaagctctctattgtcctgacccca

SEQ ID NO: 3803542 - DNA, 25 bp, Homo sapien
gcgtcttcctgcaccgggtccgggc

SEQ ID NO: 3803543 - DNA, 25 bp, Homo sapien
tgcagccgctgttgcagcgcgtccc

SEQ ID NO: 3803544 - DNA, 25 bp, Homo sapien
ccggccgagacgagcgagccgtaaa

SEQ ID NO: 3803545 - DNA, 25 bp, Homo sapien
cgagccgtaaagcagcacgttggtg

SEQ ID NO: 3803546 - DNA, 25 bp, Homo sapien
acgagcgagccgtaaagcagcacgt

SEQ ID NO: 3803547 - DNA, 25 bp, Homo sapien
tttcaggtccaaaaatatgtcatcc

SEQ ID NO: 3803548 - DNA, 25 bp, Homo sapien
ttctgtttcaggtccaaaaatatgt

SEQ ID NO: 3803549 - DNA, 25 bp, Homo sapien
gtttcaggtccaaaaatatgtcatc

SEQ ID NO: 3803550 - DNA, 25 bp, Homo sapien
ctgtttcaggtccaaaaatatgtca

SEQ ID NO: 3803551 - DNA, 25 bp, Homo sapien
tccttctctatcaatacctttgtga

SEQ ID NO: 3803552 - DNA, 25 bp, Homo sapien
cttctctatcaatacctttgtgatg

SEQ ID NO: 3803553 - DNA, 25 bp, Homo sapien
tctctatcaatacctttgtgatgtt

SEQ ID NO: 3803554 - DNA, 25 bp, Homo sapien
ccttctctatcaatacctttgtgat

SEQ ID NO: 3803555 - DNA, 25 bp, Homo sapien
cagggcaggtgcaagtacaagatga

SEQ ID NO: 3803556 - DNA, 25 bp, Homo sapien
gaacacgctgtcatgccagaaagga

SEQ ID NO: 3803557 - DNA, 25 bp, Homo sapien
agaagatgggtgatgcacaggacac

SEQ ID NO: 3803558 - DNA, 25 bp, Homo sapien
caggatgcctcaaagaattggctga

SEQ ID NO: 3803559 - DNA, 25 bp, Homo sapien
caaagggccagtacatcagtccact

SEQ ID NO: 3803560 - DNA, 25 bp, Homo sapien
ctgtacaaagggccagtacatcagt

SEQ ID NO: 3803561 - DNA, 25 bp, Homo sapien
tacaaagggccagtacatcagtcca

SEQ ID NO: 3803562 - DNA, 25 bp, Homo sapien
gtacaaagggccagtacatcagtcc

SEQ ID NO: 3803563 - DNA, 25 bp, Homo sapien
ttctccattgaacaggaacaaggct

SEQ ID NO: 3803564 - DNA, 25 bp, Homo sapien
gactccagcgtaagctgttctccat

SEQ ID NO: 3803565 - DNA, 25 bp, Homo sapien
aaccacagactccagcgtaagctgt

SEQ ID NO: 3803566 - DNA, 25 bp, Homo sapien
aagctgttctccattgaacaggaac

SEQ ID NO: 3803567 - DNA, 25 bp, Homo sapien
catttcttcgggtacccttctgtgg

SEQ ID NO: 3803568 - DNA, 25 bp, Homo sapien
tcttcgggtacccttctgtggcact

SEQ ID NO: 3803569 - DNA, 25 bp, Homo sapien
tttcttcgggtacccttctgtggca

SEQ ID NO: 3803570 - DNA, 25 bp, Homo sapien
tcatttcttcgggtacccttctgtg

SEQ ID NO: 3803571 - DNA, 25 bp, Homo sapien
tgcccaaaagtgttcaggagataac

SEQ ID NO: 3803572 - DNA, 25 bp, Homo sapien
gagactgtctcacgtgtccgtgtga

SEQ ID NO: 3803573 - DNA, 25 bp, Homo sapien
gaagtaatatttcagactagaacag

SEQ ID NO: 3803574 - DNA, 25 bp, Homo sapien
tgtggtccctttaagagagtccttg

SEQ ID NO: 3803575 - DNA, 25 bp, Homo sapien
ttcagggcttcacaacttgaaatct

SEQ ID NO: 3803576 - DNA, 25 bp, Homo sapien
gataaattaacagttcagggcttca

SEQ ID NO: 3803577 - DNA, 25 bp, Homo sapien
taggtatatagtcttaaattaagct

SEQ ID NO: 3803578 - DNA, 25 bp, Homo sapien
aacagttcagggcttcacaacttga

SEQ ID NO: 3803579 - DNA, 25 bp, Homo sapien
ctttttatatttatcggctcactac

SEQ ID NO: 3803580 - DNA, 25 bp, Homo sapien
tttttatatttatcggctcactaca

SEQ ID NO: 3803581 - DNA, 25 bp, Homo sapien
gagttagaaattgcagttccaggcc

SEQ ID NO: 3803582 - DNA, 25 bp, Homo sapien
tgtatgagttagaaattgcagttcc

SEQ ID NO: 3803583 - DNA, 25 bp, Homo sapien
gttagaaattgcagttccaggccgg

SEQ ID NO: 3803584 - DNA, 25 bp, Homo sapien
tatagcaatgatgtatgagttagaa

SEQ ID NO: 3803585 - DNA, 25 bp, Homo sapien
aaatgtagccaaatgcaacatcaaa

SEQ ID NO: 3803586 - DNA, 25 bp, Homo sapien
gccaaatgcaacatcaaaatcttca

SEQ ID NO: 3803587 - DNA, 25 bp, Homo sapien
tgtagccaaatgcaacatcaaaatc

SEQ ID NO: 3803588 - DNA, 25 bp, Homo sapien
tagccaaatgcaacatcaaaatctt

SEQ ID NO: 3803589 - DNA, 25 bp, Homo sapien
cacttcatacttttgtccatgtctg

SEQ ID NO: 3803590 - DNA, 25 bp, Homo sapien
tgtccatgtctggtgccctggaata

SEQ ID NO: 3803591 - DNA, 25 bp, Homo sapien
tacttttgtccatgtctggtgccct

SEQ ID NO: 3803592 - DNA, 25 bp, Homo sapien
tccatgtctggtgccctggaatatc

SEQ ID NO: 3803593 - DNA, 25 bp, Homo sapien
tgggtagggtatctgagaaaaatcc

SEQ ID NO: 3803594 - DNA, 25 bp, Homo sapien
agagcacatgctatttgagaatggg

SEQ ID NO: 3803595 - DNA, 25 bp, Homo sapien
ggcatgaagcttttaccataggagc

SEQ ID NO: 3803596 - DNA, 25 bp, Homo sapien
aaatccctgggttgcatgcgtattc

SEQ ID NO: 3803597 - DNA, 25 bp, Homo sapien
gtacccagaaggggcagggatgcac

SEQ ID NO: 3803598 - DNA, 25 bp, Homo sapien
ggtacccagaaggggcagggatgca

SEQ ID NO: 3803599 - DNA, 25 bp, Homo sapien
gggtacccagaaggggcagggatgc

SEQ ID NO: 3803600 - DNA, 25 bp, Homo sapien
cgggtacccagaaggggcagggatg

SEQ ID NO: 3803601 - DNA, 25 bp, Homo sapien
ccgggcgcccgtgacgctgctccct

SEQ ID NO: 3803602 - DNA, 25 bp, Homo sapien
ccagccagcagcgttttaacgggcc

SEQ ID NO: 3803603 - DNA, 25 bp, Homo sapien
ggccgggcgcccgtgacgctgctcc

SEQ ID NO: 3803604 - DNA, 25 bp, Homo sapien
agccagcagcgttttaacgggccgg

SEQ ID NO: 3803605 - DNA, 25 bp, Homo sapien
tgatccccgtggccaggtcgacggg

SEQ ID NO: 3803606 - DNA, 25 bp, Homo sapien
tctccctttactccattcccgttgc

SEQ ID NO: 3803607 - DNA, 25 bp, Homo sapien
ctccctttactccattcccgttgcg

SEQ ID NO: 3803608 - DNA, 25 bp, Homo sapien
agtctctccgttttccaagccgtct

SEQ ID NO: 3803609 - DNA, 25 bp, Homo sapien
gcttctcggcttccagatgggtgga

SEQ ID NO: 3803610 - DNA, 25 bp, Homo sapien
gccccatagcgcctcagaggcttct

SEQ ID NO: 3803611 - DNA, 25 bp, Homo sapien
gatgggtggacaaagattgctttaa

SEQ ID NO: 3803612 - DNA, 25 bp, Homo sapien
ttgatacagcaaaatgtcacctcct

SEQ ID NO: 3803613 - DNA, 25 bp, Homo sapien
cacctccttagagaagcgcttcctg

SEQ ID NO: 3803614 - DNA, 25 bp, Homo sapien
tagaggcatgcgaacttgtagttcc

SEQ ID NO: 3803615 - DNA, 25 bp, Homo sapien
tagcacaaggcctttacgtttactg

SEQ ID NO: 3803616 - DNA, 25 bp, Homo sapien
gggtcaggacccatctagctctgtt

SEQ ID NO: 3803617 - DNA, 25 bp, Homo sapien
ggagacgcccacaacaagtgaatag

SEQ ID NO: 3803618 - DNA, 25 bp, Homo sapien
cacagtaggacggaattcttaaggg

SEQ ID NO: 3803619 - DNA, 25 bp, Homo sapien
gaagttaggccaattgtccaagatc

SEQ ID NO: 3803620 - DNA, 25 bp, Homo sapien
gaagtgcaccgtctgggtcctatga

SEQ ID NO: 3803621 - DNA, 25 bp, Homo sapien
tgtcagcggactcatacagtatgta

SEQ ID NO: 3803622 - DNA, 25 bp, Homo sapien
ctcagcatgatgattttgtgatcca

SEQ ID NO: 3803623 - DNA, 25 bp, Homo sapien
tgtgatccatttacatagtgtgtct

SEQ ID NO: 3803624 - DNA, 25 bp, Homo sapien
taagcatctatatcaatggcagctt

SEQ ID NO: 3803625 - DNA, 25 bp, Homo sapien
tctatatcaatggcagcttcaacta

SEQ ID NO: 3803626 - DNA, 25 bp, Homo sapien
ttaagcatctatatcaatggcagct

SEQ ID NO: 3803627 - DNA, 25 bp, Homo sapien
atatcaatggcagcttcaactaatc

SEQ ID NO: 3803628 - DNA, 25 bp, Homo sapien
gaagctcatgcacgcctccagaaat

SEQ ID NO: 3803629 - DNA, 25 bp, Homo sapien
aactcctccaatgcagcgaagctca

SEQ ID NO: 3803630 - DNA, 25 bp, Homo sapien
aatgcagcgaagctcatgcacgcct

SEQ ID NO: 3803631 - DNA, 25 bp, Homo sapien
tccagaaatctccacgctcatcgtc

SEQ ID NO: 3803632 - DNA, 25 bp, Homo sapien
gggcaatgcagcagcatgacaagct

SEQ ID NO: 3803633 - DNA, 25 bp, Homo sapien
tcatcgatatgatggaacgtggaac

SEQ ID NO: 3803634 - DNA, 25 bp, Homo sapien
cttgggcaatgcagcagcatgacaa

SEQ ID NO: 3803635 - DNA, 25 bp, Homo sapien
gatatgatggaacgtggaacctcac

SEQ ID NO: 3803636 - DNA, 25 bp, Homo sapien
ttttatagatcaattgttttattcc

SEQ ID NO: 3803637 - DNA, 25 bp, Homo sapien
ttatagatcaattgttttattccac

SEQ ID NO: 3803638 - DNA, 25 bp, Homo sapien
tttatagatcaattgttttattcca

SEQ ID NO: 3803639 - DNA, 25 bp, Homo sapien
ccaagattggacaagtggcacaagt

SEQ ID NO: 3803640 - DNA, 25 bp, Homo sapien
tggtgttggcagagcccggcagagc

SEQ ID NO: 3803641 - DNA, 25 bp, Homo sapien
agagccggagtctccatcccaatca

SEQ ID NO: 3803642 - DNA, 25 bp, Homo sapien
ggcacaagtcatggccagccaggcc

SEQ ID NO: 3803643 - DNA, 25 bp, Homo sapien
tattttgctctaaagttctaccata

SEQ ID NO: 3803644 - DNA, 25 bp, Homo sapien
ctaaagttctaccatagtttagcca

SEQ ID NO: 3803645 - DNA, 25 bp, Homo sapien
gaacatgctctacatattctgtgac

SEQ ID NO: 3803646 - DNA, 25 bp, Homo sapien
tgatgatacaattagatcttctgca

SEQ ID NO: 3803647 - DNA, 25 bp, Homo sapien
cacaggtgcccttggattgtcgagt

SEQ ID NO: 3803648 - DNA, 25 bp, Homo sapien
aaagcttgaagcatcagtacctgac

SEQ ID NO: 3803649 - DNA, 25 bp, Homo sapien
taaacatgggagaatcctacacggc

SEQ ID NO: 3803650 - DNA, 25 bp, Homo sapien
aactgaaggtagcatgagtcatggc

SEQ ID NO: 3803651 - DNA, 25 bp, Homo sapien
gaatggccaggagatttgctaagtg

SEQ ID NO: 3803652 - DNA, 25 bp, Homo sapien
gacttgaatgagtggtgataaaccc

SEQ ID NO: 3803653 - DNA, 25 bp, Homo sapien
tagtttatacttgggatggtgctcg

SEQ ID NO: 3803654 - DNA, 25 bp, Homo sapien
tctcagcgctggtaataattaggac

SEQ ID NO: 3803655 - DNA, 25 bp, Homo sapien
ttgggttgagttttctgttgcacaa

SEQ ID NO: 3803656 - DNA, 25 bp, Homo sapien
gcacccaggatcacacctggacaag

SEQ ID NO: 3803657 - DNA, 25 bp, Homo sapien
gccagggcgtctctgggcacacgca

SEQ ID NO: 3803658 - DNA, 25 bp, Homo sapien
tctaaagtagcagtccgaggctggg

SEQ ID NO: 3803659 - DNA, 25 bp, Homo sapien
gcacagaattggctgaatgaccagg

SEQ ID NO: 3803660 - DNA, 25 bp, Homo sapien
cccttggatgcagtgaggattgaat

SEQ ID NO: 3803661 - DNA, 25 bp, Homo sapien
taatagctagttgtgtggctggtaa

SEQ ID NO: 3803662 - DNA, 25 bp, Homo sapien
gataataatagagggtacccttgga

SEQ ID NO: 3803663 - DNA, 25 bp, Homo sapien
taaagtgggtctattaatccttagc

SEQ ID NO: 3803664 - DNA, 25 bp, Homo sapien
tgtccagggcctcagaaatcaaaca

SEQ ID NO: 3803665 - DNA, 25 bp, Homo sapien
taataatgctgcgacatcttcccgc

SEQ ID NO: 3803666 - DNA, 25 bp, Homo sapien
tcttcccgcaagaggcggtcagtgt

SEQ ID NO: 3803667 - DNA, 25 bp, Homo sapien
tctgaacaacctgaatgatgagctg

SEQ ID NO: 3803668 - DNA, 25 bp, Homo sapien
gactccttatctggagctggaaggt

SEQ ID NO: 3803669 - DNA, 25 bp, Homo sapien
ctccttatctggagctggaaggtct

SEQ ID NO: 3803670 - DNA, 25 bp, Homo sapien
cccgactccttatctggagctggaa

SEQ ID NO: 3803671 - DNA, 25 bp, Homo sapien
cgactccttatctggagctggaagg

SEQ ID NO: 3803672 - DNA, 25 bp, Homo sapien
attgattgtgtgataaggggcagct

SEQ ID NO: 3803673 - DNA, 25 bp, Homo sapien
ctgggattttcctgtaccctcatcc

SEQ ID NO: 3803674 - DNA, 25 bp, Homo sapien
tgggattttcctgtaccctcatccc

SEQ ID NO: 3803675 - DNA, 25 bp, Homo sapien
tatattgattgtgtgataaggggca

SEQ ID NO: 3803676 - DNA, 25 bp, Homo sapien
cacatcctggctatgattgttattc

SEQ ID NO: 3803677 - DNA, 25 bp, Homo sapien
ggaaactgacaggcttcacatcctg

SEQ ID NO: 3803678 - DNA, 25 bp, Homo sapien
tccagtggcacctcaagcacatttt

SEQ ID NO: 3803679 - DNA, 25 bp, Homo sapien
agaatttgcggctgaggaaactgac

SEQ ID NO: 3803680 - DNA, 25 bp, Homo sapien
gccgtcccatacatcccgtctctgt

SEQ ID NO: 3803681 - DNA, 25 bp, Homo sapien
ctttctttgcactccgccgtcccat

SEQ ID NO: 3803682 - DNA, 25 bp, Homo sapien
ccatacatcccgtctctgtgaggtc

SEQ ID NO: 3803683 - DNA, 25 bp, Homo sapien
tacatcccgtctctgtgaggtcgcc

SEQ ID NO: 3803684 - DNA, 25 bp, Homo sapien
tatgcattgagaacctgcttcgtgg

SEQ ID NO: 3803685 - DNA, 25 bp, Homo sapien
tatcactaattgtgcgacctgggca

SEQ ID NO: 3803686 - DNA, 25 bp, Homo sapien
tcattggcttaagacagacgtcgct

SEQ ID NO: 3803687 - DNA, 25 bp, Homo sapien
gactaataactcctgcctcatgaag

SEQ ID NO: 3803688 - DNA, 25 bp, Homo sapien
gcaccagcaggtttaatcactgatc

SEQ ID NO: 3803689 - DNA, 25 bp, Homo sapien
tgagcacccgggcagccctggtatg

SEQ ID NO: 3803690 - DNA, 25 bp, Homo sapien
tacaagcttggagggttaaactgct

SEQ ID NO: 3803691 - DNA, 25 bp, Homo sapien
gatgagggctggtgatctaaaaact

SEQ ID NO: 3803692 - DNA, 25 bp, Homo sapien
caagcgcagccccatgcttgatgtt

SEQ ID NO: 3803693 - DNA, 25 bp, Homo sapien
gaatctcatctcatttagtctgcac

SEQ ID NO: 3803694 - DNA, 25 bp, Homo sapien
tagagttgttctggacactgatcac

SEQ ID NO: 3803695 - DNA, 25 bp, Homo sapien
tagtctgcacaataccttaggccag

SEQ ID NO: 3803696 - DNA, 25 bp, Homo sapien
catacaccttgaggacagacttcag

SEQ ID NO: 3803697 - DNA, 25 bp, Homo sapien
gctctgcgaccatcatacaccttga

SEQ ID NO: 3803698 - DNA, 25 bp, Homo sapien
atacaccttgaggacagacttcagc

SEQ ID NO: 3803699 - DNA, 25 bp, Homo sapien
ccttgctctgcgaccatcatacacc

SEQ ID NO: 3803700 - DNA, 25 bp, Homo sapien
aggaccccaaggctgcaccatggga

SEQ ID NO: 3803701 - DNA, 25 bp, Homo sapien
ggctgcaccatgggacagaccctga

SEQ ID NO: 3803702 - DNA, 25 bp, Homo sapien
tgcaccatgggacagaccctgacat

SEQ ID NO: 3803703 - DNA, 25 bp, Homo sapien
caggaccccaaggctgcaccatggg

SEQ ID NO: 3803704 - DNA, 25 bp, Homo sapien
ctctggcatcatggttgtctccgcc

SEQ ID NO: 3803705 - DNA, 25 bp, Homo sapien
gcatcatggttgtctccgccatgga

SEQ ID NO: 3803706 - DNA, 25 bp, Homo sapien
gttgtctccgccatggagatgatgt

SEQ ID NO: 3803707 - DNA, 25 bp, Homo sapien
tcatggttgtctccgccatggagat

SEQ ID NO: 3803708 - DNA, 25 bp, Homo sapien
gaaatctccctcctcttcttcctca

SEQ ID NO: 3803709 - DNA, 25 bp, Homo sapien
tgggagtagggaaatctccctcctc

SEQ ID NO: 3803710 - DNA, 25 bp, Homo sapien
ggaaatctccctcctcttcttcctc

SEQ ID NO: 3803711 - DNA, 25 bp, Homo sapien
cattccctgggagtagggaaatctc

SEQ ID NO: 3803712 - DNA, 25 bp, Homo sapien
ctggatgcatggctatttaacagat

SEQ ID NO: 3803713 - DNA, 25 bp, Homo sapien
gaaggtaagatatttgtgcaagatt

SEQ ID NO: 3803714 - DNA, 25 bp, Homo sapien
tcatgaccaccctgcgagatactgg

SEQ ID NO: 3803715 - DNA, 25 bp, Homo sapien
gtggtagcaggcactggactgagca

SEQ ID NO: 3803716 - DNA, 25 bp, Homo sapien
taggatagggcattgttttattctg

SEQ ID NO: 3803717 - DNA, 25 bp, Homo sapien
ggatggaggtacaggactcaaggaa

SEQ ID NO: 3803718 - DNA, 25 bp, Homo sapien
gtgaagcatctgagtttcatattca

SEQ ID NO: 3803719 - DNA, 25 bp, Homo sapien
gaagcccctggaaatgtacagacat

SEQ ID NO: 3803720 - DNA, 25 bp, Homo sapien
tgctgtgaagagatcaatgacaccc

SEQ ID NO: 3803721 - DNA, 25 bp, Homo sapien
gtctgctgtgaagagatcaatgaca

SEQ ID NO: 3803722 - DNA, 25 bp, Homo sapien
gacaccctttttgtgatcctcattg

SEQ ID NO: 3803723 - DNA, 25 bp, Homo sapien
gatcctcattgtattgctcctcaaa

SEQ ID NO: 3803724 - DNA, 25 bp, Homo sapien
atggtgagccaggagacgattgtca

SEQ ID NO: 3803725 - DNA, 25 bp, Homo sapien
tggtgagccaggagacgattgtcac

SEQ ID NO: 3803726 - DNA, 25 bp, Homo sapien
agtcctctggggctggagggacagt

SEQ ID NO: 3803727 - DNA, 25 bp, Homo sapien
cctctggggctggagggacagttac

SEQ ID NO: 3803728 - DNA, 25 bp, Homo sapien
ctagtcctctggggctggagggaca

SEQ ID NO: 3803729 - DNA, 25 bp, Homo sapien
tcctctggggctggagggacagtta

SEQ ID NO: 3803730 - DNA, 25 bp, Homo sapien
tcaaggtctttgcagggctgtggct

SEQ ID NO: 3803731 - DNA, 25 bp, Homo sapien
agttctcctagttatggccatatgg

SEQ ID NO: 3803732 - DNA, 25 bp, Homo sapien
tgttaaccaggaatgtcaaatgtgg

SEQ ID NO: 3803733 - DNA, 25 bp, Homo sapien
actgccttatggcacagggtggtga

SEQ ID NO: 3803734 - DNA, 25 bp, Homo sapien
tatggataccacgatgccctttact

SEQ ID NO: 3803735 - DNA, 25 bp, Homo sapien
ggacacaccactgtagtcacctaat

SEQ ID NO: 3803736 - DNA, 25 bp, Homo sapien
gacacaccactgtagtcacctaatt

SEQ ID NO: 3803737 - DNA, 25 bp, Homo sapien
gggacacaccactgtagtcacctaa

SEQ ID NO: 3803738 - DNA, 25 bp, Homo sapien
acacaccactgtagtcacctaattt

SEQ ID NO: 3803739 - DNA, 25 bp, Homo sapien
gactctcaatgaccaggctatgcct

SEQ ID NO: 3803740 - DNA, 25 bp, Homo sapien
tctatttcagccagcgaagaggtga

SEQ ID NO: 3803741 - DNA, 25 bp, Homo sapien
tataagcagctgatggacactaggg

SEQ ID NO: 3803742 - DNA, 25 bp, Homo sapien
tgttggcctggtgcaagatggacac

SEQ ID NO: 3803743 - DNA, 25 bp, Homo sapien
ttcctaaatgctgcctaaaatcatc

SEQ ID NO: 3803744 - DNA, 25 bp, Homo sapien
ttaattaatgttttcctaaatgctg

SEQ ID NO: 3803745 - DNA, 25 bp, Homo sapien
tagtaaaggctgggtttccaccatg

SEQ ID NO: 3803746 - DNA, 25 bp, Homo sapien
catgcctggccgaaaaaaaattctt

SEQ ID NO: 3803747 - DNA, 25 bp, Homo sapien
ttgatgcagtggcagccaagtaagc

SEQ ID NO: 3803748 - DNA, 25 bp, Homo sapien
gcagtggcagccaagtaagcgagcc

SEQ ID NO: 3803749 - DNA, 25 bp, Homo sapien
gtggcagccaagtaagcgagccaca

SEQ ID NO: 3803750 - DNA, 25 bp, Homo sapien
ggtttgatgcagtggcagccaagta

SEQ ID NO: 3803751 - DNA, 25 bp, Homo sapien
tggcaattccccaggtatcagcagc

SEQ ID NO: 3803752 - DNA, 25 bp, Homo sapien
ctggcaattccccaggtatcagcag

SEQ ID NO: 3803753 - DNA, 25 bp, Homo sapien
tgatgatgacaatgattttggctac

SEQ ID NO: 3803754 - DNA, 25 bp, Homo sapien
atgatgacaatgattttggctacca

SEQ ID NO: 3803755 - DNA, 25 bp, Homo sapien
tgatgacaatgattttggctaccat

SEQ ID NO: 3803756 - DNA, 25 bp, Homo sapien
gatgatgacaatgattttggctacc

SEQ ID NO: 3803757 - DNA, 25 bp, Homo sapien
tgtcaacttcctcaagcgcagttta

SEQ ID NO: 3803758 - DNA, 25 bp, Homo sapien
ccaagggctttctagactgccttag

SEQ ID NO: 3803759 - DNA, 25 bp, Homo sapien
taacaactactaatactgctctttt

SEQ ID NO: 3803760 - DNA, 25 bp, Homo sapien
tcctcaagcgcagtttattcttctc

SEQ ID NO: 3803761 - DNA, 25 bp, Homo sapien
ctgggtaaggataagtgttgataag

SEQ ID NO: 3803762 - DNA, 25 bp, Homo sapien
ggataagtgttgataagtgtccagg

SEQ ID NO: 3803763 - DNA, 25 bp, Homo sapien
aaggataagtgttgataagtgtcca

SEQ ID NO: 3803764 - DNA, 25 bp, Homo sapien
gtaaggataagtgttgataagtgtc

SEQ ID NO: 3803765 - DNA, 25 bp, Homo sapien
tggttccaagatgataaacatgtgc

SEQ ID NO: 3803766 - DNA, 25 bp, Homo sapien
ggattcatgagcttaaacgctatcc

SEQ ID NO: 3803767 - DNA, 25 bp, Homo sapien
gctttcgtaggattcatgagcttaa

SEQ ID NO: 3803768 - DNA, 25 bp, Homo sapien
tgtgcattggttcagctttcgtagg

SEQ ID NO: 3803769 - DNA, 25 bp, Homo sapien
attttggtagagaggggatttcact

SEQ ID NO: 3803770 - DNA, 25 bp, Homo sapien
tgtattttggtagagaggggatttc

SEQ ID NO: 3803771 - DNA, 25 bp, Homo sapien
tgcccagcaaatttttgtattttgg

SEQ ID NO: 3803772 - DNA, 25 bp, Homo sapien
gagataacaggcacttgccaccatg

SEQ ID NO: 3803773 - DNA, 25 bp, Homo sapien
gaggctgcaggtatcttaagacagg

SEQ ID NO: 3803774 - DNA, 25 bp, Homo sapien
ggctgcaggtatcttaagacaggtg

SEQ ID NO: 3803775 - DNA, 25 bp, Homo sapien
aaataagttacagaggctgcaggta

SEQ ID NO: 3803776 - DNA, 25 bp, Homo sapien
agaggctgcaggtatcttaagacag

SEQ ID NO: 3803777 - DNA, 25 bp, Homo sapien
ccatcagggttaggtgtccattcac

SEQ ID NO: 3803778 - DNA, 25 bp, Homo sapien
caaagctctgcactggtaagtggcc

SEQ ID NO: 3803779 - DNA, 25 bp, Homo sapien
gtaagtggccttccagattcagccc

SEQ ID NO: 3803780 - DNA, 25 bp, Homo sapien
tccatgagttgcagcgggcatgact

SEQ ID NO: 3803781 - DNA, 25 bp, Homo sapien
gggattattatgcacatcaagcatt

SEQ ID NO: 3803782 - DNA, 25 bp, Homo sapien
ccgcacctagccgtcatgttttaaa

SEQ ID NO: 3803783 - DNA, 25 bp, Homo sapien
taatggcagtactatttgctgggat

SEQ ID NO: 3803784 - DNA, 25 bp, Homo sapien
gcacctagccgtcatgttttaaata

SEQ ID NO: 3803785 - DNA, 25 bp, Homo sapien
gcaaactgaagattgaggctacatg

SEQ ID NO: 3803786 - DNA, 25 bp, Homo sapien
gaagattgaggctacatgtaaggaa

SEQ ID NO: 3803787 - DNA, 25 bp, Homo sapien
aactgaagattgaggctacatgtaa

SEQ ID NO: 3803788 - DNA, 25 bp, Homo sapien
aaagcaaactgaagattgaggctac

SEQ ID NO: 3803789 - DNA, 25 bp, Homo sapien
catcagcagagcattacgccctgag

SEQ ID NO: 3803790 - DNA, 25 bp, Homo sapien
agaagctattaaaggtgggttatct

SEQ ID NO: 3803791 - DNA, 25 bp, Homo sapien
ttatcttttgaagaggccatacatg

SEQ ID NO: 3803792 - DNA, 25 bp, Homo sapien
gagcatcacccggttaacacaaaga

SEQ ID NO: 3803793 - DNA, 25 bp, Homo sapien
ctgggatggcgaccaagttctgcag

SEQ ID NO: 3803794 - DNA, 25 bp, Homo sapien
gctctgggcacgtgacatgtctgct

SEQ ID NO: 3803795 - DNA, 25 bp, Homo sapien
tctgggcacgtgacatgtctgctcc

SEQ ID NO: 3803796 - DNA, 25 bp, Homo sapien
tgggcacgtgacatgtctgctccct

SEQ ID NO: 3803797 - DNA, 25 bp, Homo sapien
tgctctgggcacgtgacatgtctgc

SEQ ID NO: 3803798 - DNA, 25 bp, Homo sapien
tcaacaaggagacagatgagcattt

SEQ ID NO: 3803799 - DNA, 25 bp, Homo sapien
caaggagacagatgagcattttggg

SEQ ID NO: 3803800 - DNA, 25 bp, Homo sapien
ctggaaagaagacatcaacaaggag

SEQ ID NO: 3803801 - DNA, 25 bp, Homo sapien
gaagacatcaacaaggagacagatg

SEQ ID NO: 3803802 - DNA, 25 bp, Homo sapien
aaccgctcgacctccgcatcgtcca

SEQ ID NO: 3803803 - DNA, 25 bp, Homo sapien
ttaaccgctcgacctccgcatcgtc

SEQ ID NO: 3803804 - DNA, 25 bp, Homo sapien
cttaaccgctcgacctccgcatcgt

SEQ ID NO: 3803805 - DNA, 25 bp, Homo sapien
cttctggattagctcatcctctctc

SEQ ID NO: 3803806 - DNA, 25 bp, Homo sapien
ctgtgaaagtagatgggtaaaagaa

SEQ ID NO: 3803807 - DNA, 25 bp, Homo sapien
tgtgaaagtagatgggtaaaagaaa

SEQ ID NO: 3803808 - DNA, 25 bp, Homo sapien
gagatttggttactttgtctagagg

SEQ ID NO: 3803809 - DNA, 25 bp, Homo sapien
gctggagatttggttactttgtcta

SEQ ID NO: 3803810 - DNA, 25 bp, Homo sapien
tggagatttggttactttgtctaga

SEQ ID NO: 3803811 - DNA, 25 bp, Homo sapien
tggctggagatttggttactttgtc

SEQ ID NO: 3803812 - DNA, 25 bp, Homo sapien
ccaggtacgtagtttgcagagttca

SEQ ID NO: 3803813 - DNA, 25 bp, Homo sapien
tgtagggccccatgttccaaacgta

SEQ ID NO: 3803814 - DNA, 25 bp, Homo sapien
ttgcaattagggaggaacaactacc

SEQ ID NO: 3803815 - DNA, 25 bp, Homo sapien
catggcacccttctaggcatgaggc

SEQ ID NO: 3803816 - DNA, 25 bp, Homo sapien
ctttaatatcctaatggacactggg

SEQ ID NO: 3803817 - DNA, 25 bp, Homo sapien
tataaaaccctctttgctctgagga

SEQ ID NO: 3803818 - DNA, 25 bp, Homo sapien
tatcctaatggacactgggactctc

SEQ ID NO: 3803819 - DNA, 25 bp, Homo sapien
tctcaaacttatttcatataaaacc

SEQ ID NO: 3803820 - DNA, 25 bp, Homo sapien
ccatgggatccagaagaatccctac

SEQ ID NO: 3803821 - DNA, 25 bp, Homo sapien
ggctcatcttcaagggggttgcttt

SEQ ID NO: 3803822 - DNA, 25 bp, Homo sapien
atactgtataccatgggatccagaa

SEQ ID NO: 3803823 - DNA, 25 bp, Homo sapien
tataccatgggatccagaagaatcc

SEQ ID NO: 3803824 - DNA, 25 bp, Homo sapien
tgccagccccgtcttggccaccgtg

SEQ ID NO: 3803825 - DNA, 25 bp, Homo sapien
gcaacaatccttgatcagtgccagc

SEQ ID NO: 3803826 - DNA, 25 bp, Homo sapien
ggccaccgtgggcttgctaggtggg

SEQ ID NO: 3803827 - DNA, 25 bp, Homo sapien
acatgatgttgcactgggtggcccc

SEQ ID NO: 3803828 - DNA, 25 bp, Homo sapien
ccagttcattcacacggtgggttag

SEQ ID NO: 3803829 - DNA, 25 bp, Homo sapien
gtgcccatgtgcctagctctgagag

SEQ ID NO: 3803830 - DNA, 25 bp, Homo sapien
accatgcgacggtgagagactccct

SEQ ID NO: 3803831 - DNA, 25 bp, Homo sapien
cgatctttacagatgggccctctgg

SEQ ID NO: 3803832 - DNA, 25 bp, Homo sapien
gagagcacaatggacgctgtcctga

SEQ ID NO: 3803833 - DNA, 25 bp, Homo sapien
ctgagagcacaatggacgctgtcct

SEQ ID NO: 3803834 - DNA, 25 bp, Homo sapien
acaatggacgctgtcctgatgtgaa

SEQ ID NO: 3803835 - DNA, 25 bp, Homo sapien
gcacaatggacgctgtcctgatgtg

SEQ ID NO: 3803836 - DNA, 25 bp, Homo sapien
taacatatgccacccaatgacggga

SEQ ID NO: 3803837 - DNA, 25 bp, Homo sapien
gagaagtcacacaggctgtaccggg

SEQ ID NO: 3803838 - DNA, 25 bp, Homo sapien
ggtgactgcacatcagcatcttgag

SEQ ID NO: 3803839 - DNA, 25 bp, Homo sapien
taactacttaggctggtcacgacac

SEQ ID NO: 3803840 - DNA, 25 bp, Homo sapien
tacaaagagcttttaatgatgtgga

SEQ ID NO: 3803841 - DNA, 25 bp, Homo sapien
tgatgtcaacgatgaaaaaatgcac

SEQ ID NO: 3803842 - DNA, 25 bp, Homo sapien
tcagagtggtctctagttggaggaa

SEQ ID NO: 3803843 - DNA, 25 bp, Homo sapien
taaaacgtcgaaacatcagagtggt

SEQ ID NO: 3803844 - DNA, 25 bp, Homo sapien
gcacccagccaatttacaaatattt

SEQ ID NO: 3803845 - DNA, 25 bp, Homo sapien
cgcacccagccaatttacaaatatt

SEQ ID NO: 3803846 - DNA, 25 bp, Homo sapien
ccaccgcacccagccaatttacaaa

SEQ ID NO: 3803847 - DNA, 25 bp, Homo sapien
accgcacccagccaatttacaaata

SEQ ID NO: 3803848 - DNA, 25 bp, Homo sapien
agcaccgcagacaggttgatttcag

SEQ ID NO: 3803849 - DNA, 25 bp, Homo sapien
gagcaccgcagacaggttgatttca

SEQ ID NO: 3803850 - DNA, 25 bp, Homo sapien
gagacggttccactgttttaagtca

SEQ ID NO: 3803851 - DNA, 25 bp, Homo sapien
tgcaaggtttcccagcttggaaggt

SEQ ID NO: 3803852 - DNA, 25 bp, Homo sapien
taggtgtgcaggaccccacagtctg

SEQ ID NO: 3803853 - DNA, 25 bp, Homo sapien
taacaggatctgactcatcaggctg

SEQ ID NO: 3803854 - DNA, 25 bp, Homo sapien
ctggtaatctggaagcgtctgtgac

SEQ ID NO: 3803855 - DNA, 25 bp, Homo sapien
gaccgtgggcagtggatttactgcc

SEQ ID NO: 3803856 - DNA, 25 bp, Homo sapien
tgactctgtcactaacaacccctgg

SEQ ID NO: 3803857 - DNA, 25 bp, Homo sapien
caggatctgactcactgtttcaagt

SEQ ID NO: 3803858 - DNA, 25 bp, Homo sapien
gtttattctgcctccgcttgcaacc

SEQ ID NO: 3803859 - DNA, 25 bp, Homo sapien
gctgctaaagacctttccaaacatt

SEQ ID NO: 3803860 - DNA, 25 bp, Homo sapien
taaaaggacccagaagagacttgag

SEQ ID NO: 3803861 - DNA, 25 bp, Homo sapien
aacatttcacgatggcaaatttgtg

SEQ ID NO: 3803862 - DNA, 25 bp, Homo sapien
caagttcagcaatgttaaaagctgc

SEQ ID NO: 3803863 - DNA, 25 bp, Homo sapien
tgtgtctgagtaccattcactggag

SEQ ID NO: 3803864 - DNA, 25 bp, Homo sapien
cataatgtactccacaatggccagt

SEQ ID NO: 3803865 - DNA, 25 bp, Homo sapien
taaggctgagtttgcacgcttggac

SEQ ID NO: 3803866 - DNA, 25 bp, Homo sapien
gaaggcatttcctctacagacatag

SEQ ID NO: 3803867 - DNA, 25 bp, Homo sapien
agatgtacacgtcacccatggtggg

SEQ ID NO: 3803868 - DNA, 25 bp, Homo sapien
tcaggcaagggcgatttggcagctc

SEQ ID NO: 3803869 - DNA, 25 bp, Homo sapien
tcccagactttgtgaaggttcagct

SEQ ID NO: 3803870 - DNA, 25 bp, Homo sapien
gagcgccctcaagagccttctggtg

SEQ ID NO: 3803871 - DNA, 25 bp, Homo sapien
caagcaggcaactagtcagggcggt

SEQ ID NO: 3803872 - DNA, 25 bp, Homo sapien
tcaggctgtaactctagaaaggtgt

SEQ ID NO: 3803873 - DNA, 25 bp, Homo sapien
tggttaatgggagagtcaagacccc

SEQ ID NO: 3803874 - DNA, 25 bp, Homo sapien
tggagcccaggtttgcatttgaaaa

SEQ ID NO: 3803875 - DNA, 25 bp, Homo sapien
gggagcccgtaatcacacagtgtcc

SEQ ID NO: 3803876 - DNA, 25 bp, Homo sapien
tgcctgtgacgttcttgggagcccg

SEQ ID NO: 3803877 - DNA, 25 bp, Homo sapien
taattctcattaggacgtttgcgtg

SEQ ID NO: 3803878 - DNA, 25 bp, Homo sapien
ccccagggttcggtcatgaggtgca

SEQ ID NO: 3803879 - DNA, 25 bp, Homo sapien
cattgttatgcaaccgatcttctga

SEQ ID NO: 3803880 - DNA, 25 bp, Homo sapien
ctcctgtccagtagtggtcagcaca

SEQ ID NO: 3803881 - DNA, 25 bp, Homo sapien
tattctgtaaacacccgtgatttgt

SEQ ID NO: 3803882 - DNA, 25 bp, Homo sapien
tacccattcagtaacgctgacttgt

SEQ ID NO: 3803883 - DNA, 25 bp, Homo sapien
gacccgatcccttgagaacaccaag

SEQ ID NO: 3803884 - DNA, 25 bp, Homo sapien
gttgaagtcagaactgcacaggtcc

SEQ ID NO: 3803885 - DNA, 25 bp, Homo sapien
gcacaggtccagttacgggtagaaa

SEQ ID NO: 3803886 - DNA, 25 bp, Homo sapien
ttttcgtgtctgcagtttccgcggg

SEQ ID NO: 3803887 - DNA, 25 bp, Homo sapien
caggtgaagcgctttactcaggatt

SEQ ID NO: 3803888 - DNA, 25 bp, Homo sapien
ctagtaacgagagggtgagccagca

SEQ ID NO: 3803889 - DNA, 25 bp, Homo sapien
gagtcatgctctgaggctagtaacg

SEQ ID NO: 3803890 - DNA, 25 bp, Homo sapien
aatgggctccaaacgtctgctgacc

SEQ ID NO: 3803891 - DNA, 25 bp, Homo sapien
gaagcgctgcagtcgacaaatgtgt

SEQ ID NO: 3803892 - DNA, 25 bp, Homo sapien
cactttcttacgtcctggtcagcag

SEQ ID NO: 3803893 - DNA, 25 bp, Homo sapien
tggaaacctgtgtgtgccagagcac

SEQ ID NO: 3803894 - DNA, 25 bp, Homo sapien
gttctgggcggacatagcgtttagt

SEQ ID NO: 3803895 - DNA, 25 bp, Homo sapien
ttgagtctccccaacatatttgctc

SEQ ID NO: 3803896 - DNA, 25 bp, Homo sapien
ggaacttagtgacctgagacacagg

SEQ ID NO: 3803897 - DNA, 25 bp, Homo sapien
tcagtgggtgtcaatagagttgtct

SEQ ID NO: 3803898 - DNA, 25 bp, Homo sapien
gcaattttgaatatagtccagcctt

SEQ ID NO: 3803899 - DNA, 25 bp, Homo sapien
ctctggccggtcagcaactgctgtt

SEQ ID NO: 3803900 - DNA, 25 bp, Homo sapien
tgttgtgcaaagaatccgtgagaag

SEQ ID NO: 3803901 - DNA, 25 bp, Homo sapien
gatattgaaaactgctccgttccct

SEQ ID NO: 3803902 - DNA, 25 bp, Homo sapien
ccattggagttttttgggatattga

SEQ ID NO: 3803903 - DNA, 25 bp, Homo sapien
tgggccgaggctatacacagaagct

SEQ ID NO: 3803904 - DNA, 25 bp, Homo sapien
ggtatactccctagaagtgcttaga

SEQ ID NO: 3803905 - DNA, 25 bp, Homo sapien
ttggcgaccagtctaggcaaagctg

SEQ ID NO: 3803906 - DNA, 25 bp, Homo sapien
gagaccacgttgttattggcgacca

SEQ ID NO: 3803907 - DNA, 25 bp, Homo sapien
tgaaatgatgtatctgacacctcct

SEQ ID NO: 3803908 - DNA, 25 bp, Homo sapien
aatactcaacctgcacctcttgctg

SEQ ID NO: 3803909 - DNA, 25 bp, Homo sapien
gccagcaagaaatagcataatcgat

SEQ ID NO: 3803910 - DNA, 25 bp, Homo sapien
taatcgatgcggctaaagtctggcc

SEQ ID NO: 3803911 - DNA, 25 bp, Homo sapien
tgtatttttgccaactgggtcgcaa

SEQ ID NO: 3803912 - DNA, 25 bp, Homo sapien
ggttcctttcgactccacaacgtga

SEQ ID NO: 3803913 - DNA, 25 bp, Homo sapien
tgctcgcccaacctgtcactggaaa

SEQ ID NO: 3803914 - DNA, 25 bp, Homo sapien
taaagtaggaccatcacgtgacgag

SEQ ID NO: 3803915 - DNA, 25 bp, Homo sapien
gggaggtggcggttgcagtgagccg

SEQ ID NO: 3803916 - DNA, 25 bp, Homo sapien
cactctagcctaggcgacagggcaa

SEQ ID NO: 3803917 - DNA, 25 bp, Homo sapien
aggcaggagaatcacgggaaaccgg

SEQ ID NO: 3803918 - DNA, 25 bp, Homo sapien
tagcctaggcgacagggcaagactc

SEQ ID NO: 3803919 - DNA, 25 bp, Homo sapien
cgccccggagcctgcggtcggcgcc

SEQ ID NO: 3803920 - DNA, 25 bp, Homo sapien
cccgccccggagcctgcggtcggcg

SEQ ID NO: 3803921 - DNA, 25 bp, Homo sapien
ccccggagcctgcggtcggcgcctc

SEQ ID NO: 3803922 - DNA, 25 bp, Homo sapien
gccccggagcctgcggtcggcgcct

SEQ ID NO: 3803923 - DNA, 25 bp, Homo sapien
ccgagcaggggcggcgaggccaacg

SEQ ID NO: 3803924 - DNA, 25 bp, Homo sapien
agcaggggcggcgaggccaacgcgg

SEQ ID NO: 3803925 - DNA, 25 bp, Homo sapien
caggggcggcgaggccaacgcggcg

SEQ ID NO: 3803926 - DNA, 25 bp, Homo sapien
gagcaggggcggcgaggccaacgcg

SEQ ID NO: 3803927 - DNA, 25 bp, Homo sapien
gctgcggaataagcattttcgtcct

SEQ ID NO: 3803928 - DNA, 25 bp, Homo sapien
aagctgcggaataagcattttcgtc

SEQ ID NO: 3803929 - DNA, 25 bp, Homo sapien
tcaagctgcggaataagcattttcg

SEQ ID NO: 3803930 - DNA, 25 bp, Homo sapien
gcggaataagcattttcgtccttta

SEQ ID NO: 3803931 - DNA, 25 bp, Homo sapien
ggcccctgagacttcagcggcacag

SEQ ID NO: 3803932 - DNA, 25 bp, Homo sapien
tgttatccaacatgggataaaatat

SEQ ID NO: 3803933 - DNA, 25 bp, Homo sapien
acaggcccctgagacttcagcggca

SEQ ID NO: 3803934 - DNA, 25 bp, Homo sapien
ataaactgttatccaacatgggata

SEQ ID NO: 3803935 - DNA, 25 bp, Homo sapien
aataatgatagagtcgggtgcagtg

SEQ ID NO: 3803936 - DNA, 25 bp, Homo sapien
aagattctgcctctacataaaaaat

SEQ ID NO: 3803937 - DNA, 25 bp, Homo sapien
taataataatgatagagtcgggtgc

SEQ ID NO: 3803938 - DNA, 25 bp, Homo sapien
ataataatgatagagtcgggtgcag

SEQ ID NO: 3803939 - DNA, 25 bp, Homo sapien
tacttaggcaggcaaggacccatgt

SEQ ID NO: 3803940 - DNA, 25 bp, Homo sapien
gacccatgttcaaagatgcacacca

SEQ ID NO: 3803941 - DNA, 25 bp, Homo sapien
tgcattttgcaggagtgacatcact

SEQ ID NO: 3803942 - DNA, 25 bp, Homo sapien
ccagcactgctagtcaggagcaata

SEQ ID NO: 3803943 - DNA, 25 bp, Homo sapien
aaaattatccaggcctggcagcggg

SEQ ID NO: 3803944 - DNA, 25 bp, Homo sapien
aattatccaggcctggcagcgggtg

SEQ ID NO: 3803945 - DNA, 25 bp, Homo sapien
aaaaattatccaggcctggcagcgg

SEQ ID NO: 3803946 - DNA, 25 bp, Homo sapien
ttatccaggcctggcagcgggtgcc

SEQ ID NO: 3803947 - DNA, 25 bp, Homo sapien
gatcactctccttgtggcatggtgt

SEQ ID NO: 3803948 - DNA, 25 bp, Homo sapien
gggaagagatcactctccttgtggc

SEQ ID NO: 3803949 - DNA, 25 bp, Homo sapien
gaagagatcactctccttgtggcat

SEQ ID NO: 3803950 - DNA, 25 bp, Homo sapien
agagatcactctccttgtggcatgg

SEQ ID NO: 3803951 - DNA, 25 bp, Homo sapien
ccagatctttccaatagttagcttc

SEQ ID NO: 3803952 - DNA, 25 bp, Homo sapien
tcctcctcggagctgaaagtctttc

SEQ ID NO: 3803953 - DNA, 25 bp, Homo sapien
ctgaaagtctttccggagtcctcca

SEQ ID NO: 3803954 - DNA, 25 bp, Homo sapien
ctctgtttgtaggtcatcgccagat

SEQ ID NO: 3803955 - DNA, 25 bp, Homo sapien
gtttccagctccatgcgaaggcggt

SEQ ID NO: 3803956 - DNA, 25 bp, Homo sapien
tcatattctcggcttccctcctgga

SEQ ID NO: 3803957 - DNA, 25 bp, Homo sapien
gaattctcggagttcctcttgcgta

SEQ ID NO: 3803958 - DNA, 25 bp, Homo sapien
ggtttcaatttgttgcagctgcgtc

SEQ ID NO: 3803959 - DNA, 25 bp, Homo sapien
ggcgattgagagatctcctcggaac

SEQ ID NO: 3803960 - DNA, 25 bp, Homo sapien
tccaggaggacgcagcgagtgggct

SEQ ID NO: 3803961 - DNA, 25 bp, Homo sapien
caccgactgcactggcgattgagag

SEQ ID NO: 3803962 - DNA, 25 bp, Homo sapien
gactgcactggcgattgagagatct

SEQ ID NO: 3803963 - DNA, 25 bp, Homo sapien
aatgattccctgttgccagctgcag

SEQ ID NO: 3803964 - DNA, 25 bp, Homo sapien
ttaccaaagaaacagtccagcgcac

SEQ ID NO: 3803965 - DNA, 25 bp, Homo sapien
ccagtagcaaatgactgggccaaga

SEQ ID NO: 3803966 - DNA, 25 bp, Homo sapien
tacatacttattctgtgctggcctc

SEQ ID NO: 3803967 - DNA, 25 bp, Homo sapien
actgtttcaattatgtcctaagtgc

SEQ ID NO: 3803968 - DNA, 25 bp, Homo sapien
aaaacccaaaatcaccagcctggca

SEQ ID NO: 3803969 - DNA, 25 bp, Homo sapien
cagagtgagaccacgacacttaaaa

SEQ ID NO: 3803970 - DNA, 25 bp, Homo sapien
ggttcccacaatcttcagacaaatc

SEQ ID NO: 3803971 - DNA, 25 bp, Homo sapien
tctgccggtagccttcagagtgctg

SEQ ID NO: 3803972 - DNA, 25 bp, Homo sapien
tccaaggctgagatctgccggtagc

SEQ ID NO: 3803973 - DNA, 25 bp, Homo sapien
tctgcgcgaggtcatcctccaaggc

SEQ ID NO: 3803974 - DNA, 25 bp, Homo sapien
ttctgcaattggtctttaatggctt

SEQ ID NO: 3803975 - DNA, 25 bp, Homo sapien
ttagtataacagcaaaatattgcaa

SEQ ID NO: 3803976 - DNA, 25 bp, Homo sapien
agtataacagcaaaatattgcaata

SEQ ID NO: 3803977 - DNA, 25 bp, Homo sapien
tagtataacagcaaaatattgcaat

SEQ ID NO: 3803978 - DNA, 25 bp, Homo sapien
ctcctgcctcagtctgtcaagtaac

SEQ ID NO: 3803979 - DNA, 25 bp, Homo sapien
tcctgcctcagtctgtcaagtaact

SEQ ID NO: 3803980 - DNA, 25 bp, Homo sapien
ttctcctgcctcagtctgtcaagta

SEQ ID NO: 3803981 - DNA, 25 bp, Homo sapien
tctcctgcctcagtctgtcaagtaa

SEQ ID NO: 3803982 - DNA, 25 bp, Homo sapien
ttgtaggtgttggacaccatgcctg

SEQ ID NO: 3803983 - DNA, 25 bp, Homo sapien
attgtaggtgttggacaccatgcct

SEQ ID NO: 3803984 - DNA, 25 bp, Homo sapien
aatttccctgcaacctcgacaccct

SEQ ID NO: 3803985 - DNA, 25 bp, Homo sapien
tgaatttccctgcaacctcgacacc

SEQ ID NO: 3803986 - DNA, 25 bp, Homo sapien
ccctcacagggtctttagaagtagt

SEQ ID NO: 3803987 - DNA, 25 bp, Homo sapien
gatggagtcatacaagtacctaccc

SEQ ID NO: 3803988 - DNA, 25 bp, Homo sapien
cactgagtatcattgcggaacttga

SEQ ID NO: 3803989 - DNA, 25 bp, Homo sapien
tgctaactgtatcccacagtggtca

SEQ ID NO: 3803990 - DNA, 25 bp, Homo sapien
gaagttcaaaatgcccagtaccagc

SEQ ID NO: 3803991 - DNA, 25 bp, Homo sapien
cataagatgcacttaagcaggtgga

SEQ ID NO: 3803992 - DNA, 25 bp, Homo sapien
cactgccaagtgctgtaagaaaaca

SEQ ID NO: 3803993 - DNA, 25 bp, Homo sapien
gcaggtggaagagatcatatttaac

SEQ ID NO: 3803994 - DNA, 25 bp, Homo sapien
cctggcaagcttgggcaaatggcaa

SEQ ID NO: 3803995 - DNA, 25 bp, Homo sapien
catgggctctttacctgcagaatgg

SEQ ID NO: 3803996 - DNA, 25 bp, Homo sapien
aacttcctagatgccacagagtggg

SEQ ID NO: 3803997 - DNA, 25 bp, Homo sapien
gcaataagccaaagccctatcagga

SEQ ID NO: 3803998 - DNA, 25 bp, Homo sapien
gatggcctgattcaagcgctgctca

SEQ ID NO: 3803999 - DNA, 25 bp, Homo sapien
tctttcgatggcctgattcaagcgc

SEQ ID NO: 3804000 - DNA, 25 bp, Homo sapien
tgattcaagcgctgctcaaagtctt

SEQ ID NO: 3804001 - DNA, 25 bp, Homo sapien
ttccaggaaggcatttctttcgatg

SEQ ID NO: 3804002 - DNA, 25 bp, Homo sapien
tgcacggccagttcctgccgcaaat

SEQ ID NO: 3804003 - DNA, 25 bp, Homo sapien
gcaatgggcgtggacggcacggagc

SEQ ID NO: 3804004 - DNA, 25 bp, Homo sapien
ggtcctcggtgagcaatgggcgtgg

SEQ ID NO: 3804005 - DNA, 25 bp, Homo sapien
ctcccaggtgtgtttaaacttgagc

SEQ ID NO: 3804006 - DNA, 25 bp, Homo sapien
taggtctcccacaatgttgagggct

SEQ ID NO: 3804007 - DNA, 25 bp, Homo sapien
cagtaggtctcccacaatgttgagg

SEQ ID NO: 3804008 - DNA, 25 bp, Homo sapien
ttccgcagtaggtctcccacaatgt

SEQ ID NO: 3804009 - DNA, 25 bp, Homo sapien
aatgttgagggctgatatccgggcc

SEQ ID NO: 3804010 - DNA, 25 bp, Homo sapien
gattcccagggatgctaaaggagca

SEQ ID NO: 3804011 - DNA, 25 bp, Homo sapien
taactcccacaggaagctctaatga

SEQ ID NO: 3804012 - DNA, 25 bp, Homo sapien
catacatagggttcagagcagggct

SEQ ID NO: 3804013 - DNA, 25 bp, Homo sapien
caaacgccaggaaagtgtggtctta

SEQ ID NO: 3804014 - DNA, 25 bp, Homo sapien
ttctttgccctaggctttcaagatt

SEQ ID NO: 3804015 - DNA, 25 bp, Homo sapien
aggatccctccctgtaattaacata

SEQ ID NO: 3804016 - DNA, 25 bp, Homo sapien
aaattctttgccctaggctttcaag

SEQ ID NO: 3804017 - DNA, 25 bp, Homo sapien
gatccctccctgtaattaacataaa

SEQ ID NO: 3804018 - DNA, 25 bp, Homo sapien
cgtacacgaggttccggcaggaagc

SEQ ID NO: 3804019 - DNA, 25 bp, Homo sapien
cttatcacccaaaggcacgctggtg

SEQ ID NO: 3804020 - DNA, 25 bp, Homo sapien
cacctgttcggtttggggactgatc

SEQ ID NO: 3804021 - DNA, 25 bp, Homo sapien
caggaagcgagtttggactccagtg

SEQ ID NO: 3804022 - DNA, 25 bp, Homo sapien
ccccgccagcgagaggtttattaga

SEQ ID NO: 3804023 - DNA, 25 bp, Homo sapien
ctccccgccagcgagaggtttatta

SEQ ID NO: 3804024 - DNA, 25 bp, Homo sapien
ccgccagcgagaggtttattagaag

SEQ ID NO: 3804025 - DNA, 25 bp, Homo sapien
ccagcgagaggtttattagaaggta

SEQ ID NO: 3804026 - DNA, 25 bp, Homo sapien
tgataaaaatgaccttcttggccag

SEQ ID NO: 3804027 - DNA, 25 bp, Homo sapien
cagtgtaaccgtgagtagcagctgt

SEQ ID NO: 3804028 - DNA, 25 bp, Homo sapien
cattctcacagtgtaaccgtgagta

SEQ ID NO: 3804029 - DNA, 25 bp, Homo sapien
gtagcccacacctgtcgtcgcagca

SEQ ID NO: 3804030 - DNA, 25 bp, Homo sapien
ctgacataacagctgtgacaaactg

SEQ ID NO: 3804031 - DNA, 25 bp, Homo sapien
ctgtgacaaactggctagcaccggg

SEQ ID NO: 3804032 - DNA, 25 bp, Homo sapien
atcaagagtcaggagcagggtctca

SEQ ID NO: 3804033 - DNA, 25 bp, Homo sapien
taacagctgtgacaaactggctagc

SEQ ID NO: 3804034 - DNA, 25 bp, Homo sapien
cagcggcgatgaagacatgtgtgaa

SEQ ID NO: 3804035 - DNA, 25 bp, Homo sapien
gtggttttcctaaagcaacatcttg

SEQ ID NO: 3804036 - DNA, 25 bp, Homo sapien
acatcttgactaccccctgggctga

SEQ ID NO: 3804037 - DNA, 25 bp, Homo sapien
tgtgaaggcggcttcccaaattcca

SEQ ID NO: 3804038 - DNA, 25 bp, Homo sapien
caggacctccgcttgggttagtgca

SEQ ID NO: 3804039 - DNA, 25 bp, Homo sapien
gcttgggccgcaaagctaactaact

SEQ ID NO: 3804040 - DNA, 25 bp, Homo sapien
ggtagcctcatcaccgacaacttag

SEQ ID NO: 3804041 - DNA, 25 bp, Homo sapien
aatgcacacggtggcaggtaaggat

SEQ ID NO: 3804042 - DNA, 25 bp, Homo sapien
tgaaaactcgaacgcacctctagga

SEQ ID NO: 3804043 - DNA, 25 bp, Homo sapien
caccatggtgcgttggaaatcccac

SEQ ID NO: 3804044 - DNA, 25 bp, Homo sapien
gagaagctccatcccacatttacgg

SEQ ID NO: 3804045 - DNA, 25 bp, Homo sapien
taacaaaatgaaggccgtgaagctg

SEQ ID NO: 3804046 - DNA, 25 bp, Homo sapien
gcctctttgaccagaagcccaacaa

SEQ ID NO: 3804047 - DNA, 25 bp, Homo sapien
ccttgaatgacgcacaaacacatcc

SEQ ID NO: 3804048 - DNA, 25 bp, Homo sapien
tcaccactctgtgggaaaacattaa

SEQ ID NO: 3804049 - DNA, 25 bp, Homo sapien
cacatcccggatacatttctaaaaa

SEQ ID NO: 3804050 - DNA, 25 bp, Homo sapien
tctgttcaacacaaacgatgccgta

SEQ ID NO: 3804051 - DNA, 25 bp, Homo sapien
caccaactccatgggatcagacaga

SEQ ID NO: 3804052 - DNA, 25 bp, Homo sapien
gagtaagggccataaaaacaagctg

SEQ ID NO: 3804053 - DNA, 25 bp, Homo sapien
tgtactcccaacctcttggaaggct

SEQ ID NO: 3804054 - DNA, 25 bp, Homo sapien
agaggctaagacaggtggatcgttt

SEQ ID NO: 3804055 - DNA, 25 bp, Homo sapien
actgaggctcaaggactgctggaac

SEQ ID NO: 3804056 - DNA, 25 bp, Homo sapien
ctgggcaacaatatcaagacctcat

SEQ ID NO: 3804057 - DNA, 25 bp, Homo sapien
ggagctaaaatccacctcagaggcc

SEQ ID NO: 3804058 - DNA, 25 bp, Homo sapien
gtcacctctgggtcttgtgttgtag

SEQ ID NO: 3804059 - DNA, 25 bp, Homo sapien
tgttgtagttgttagccgaggagaa

SEQ ID NO: 3804060 - DNA, 25 bp, Homo sapien
caaatacgcggatgagagggacaga

SEQ ID NO: 3804061 - DNA, 25 bp, Homo sapien
cccggatatgcctagaagtcacctc

SEQ ID NO: 3804062 - DNA, 25 bp, Homo sapien
agctctgcagagtatgacgcgtggc

SEQ ID NO: 3804063 - DNA, 25 bp, Homo sapien
cttgtcttgggcgaccatggagcat

SEQ ID NO: 3804064 - DNA, 25 bp, Homo sapien
catggagcattaacgctaccaggtc

SEQ ID NO: 3804065 - DNA, 25 bp, Homo sapien
ttttctgggtaccagcaccatgagg

SEQ ID NO: 3804066 - DNA, 25 bp, Homo sapien
gagctggacgacctggttgttgatt

SEQ ID NO: 3804067 - DNA, 25 bp, Homo sapien
tgatttggacaaccagcggcaactc

SEQ ID NO: 3804068 - DNA, 25 bp, Homo sapien
acaaccagcggcaactcgtgtccaa

SEQ ID NO: 3804069 - DNA, 25 bp, Homo sapien
gttgttgatttggacaaccagcggc

SEQ ID NO: 3804070 - DNA, 25 bp, Homo sapien
gaaggcggccgcttatgataaactg

SEQ ID NO: 3804071 - DNA, 25 bp, Homo sapien
tcacagggatgcttaacgaggccga

SEQ ID NO: 3804072 - DNA, 25 bp, Homo sapien
tcaacgtgtctacgaagctgcgcca

SEQ ID NO: 3804073 - DNA, 25 bp, Homo sapien
tcaaagggacttatgcagagacact

SEQ ID NO: 3804074 - DNA, 25 bp, Homo sapien
cagtgtgcggagaccgcaccattgt

SEQ ID NO: 3804075 - DNA, 25 bp, Homo sapien
tgcagtgtgcggagaccgcaccatt

SEQ ID NO: 3804076 - DNA, 25 bp, Homo sapien
cctgggctaaaagggcaaaactctg

SEQ ID NO: 3804077 - DNA, 25 bp, Homo sapien
gtgcggagaccgcaccattgtactc

SEQ ID NO: 3804078 - DNA, 25 bp, Homo sapien
cgggcggagctcaatgacaaagtcc

SEQ ID NO: 3804079 - DNA, 25 bp, Homo sapien
gcggagctcaatgacaaagtccaca

SEQ ID NO: 3804080 - DNA, 25 bp, Homo sapien
cataagaagaagaagctggaggcgc

SEQ ID NO: 3804081 - DNA, 25 bp, Homo sapien
caggagctgcagtccaagtgcagcg

SEQ ID NO: 3804082 - DNA, 25 bp, Homo sapien
taccgcttgtgggattccagattgc

SEQ ID NO: 3804083 - DNA, 25 bp, Homo sapien
gaaaatagaatccaaaatatcagct

SEQ ID NO: 3804084 - DNA, 25 bp, Homo sapien
gacatgtcagcaggttggataccgc

SEQ ID NO: 3804085 - DNA, 25 bp, Homo sapien
caacccatgagctttaggaaaatag

SEQ ID NO: 3804086 - DNA, 25 bp, Homo sapien
tatgctccacattttgcagctgagg

SEQ ID NO: 3804087 - DNA, 25 bp, Homo sapien
tcattacagatgtcctaggcaggtg

SEQ ID NO: 3804088 - DNA, 25 bp, Homo sapien
ggtcctggaagagctctcattcttt

SEQ ID NO: 3804089 - DNA, 25 bp, Homo sapien
tgttaggtgaatgacccaaggtcac

SEQ ID NO: 3804090 - DNA, 25 bp, Homo sapien
aaggtgctgttcatcgggagataat

SEQ ID NO: 3804091 - DNA, 25 bp, Homo sapien
tattatgacaatataaggtgctgtt

SEQ ID NO: 3804092 - DNA, 25 bp, Homo sapien
tcgggagataatggtccagaccgtg

SEQ ID NO: 3804093 - DNA, 25 bp, Homo sapien
cagaccgtgactatgatggttactg

SEQ ID NO: 3804094 - DNA, 25 bp, Homo sapien
atattggatcctttacccatgggtt

SEQ ID NO: 3804095 - DNA, 25 bp, Homo sapien
gatcctttacccatgggtttgaaga

SEQ ID NO: 3804096 - DNA, 25 bp, Homo sapien
gtagaaacatggatattggatcctt

SEQ ID NO: 3804097 - DNA, 25 bp, Homo sapien
ttgcaatacctcatgtagtagaaac

SEQ ID NO: 3804098 - DNA, 25 bp, Homo sapien
aatgcattggtttctggaactgaga

SEQ ID NO: 3804099 - DNA, 25 bp, Homo sapien
cagggtctgatctcccgccatcgtt

SEQ ID NO: 3804100 - DNA, 25 bp, Homo sapien
gatcattgagggtataagagacaga

SEQ ID NO: 3804101 - DNA, 25 bp, Homo sapien
gacatgtagctggatcccgtaggca

SEQ ID NO: 3804102 - DNA, 25 bp, Homo sapien
gaaactgaaagctgaataaatgtaa

SEQ ID NO: 3804103 - DNA, 25 bp, Homo sapien
cgtctaaaatggatgacaggctggg

SEQ ID NO: 3804104 - DNA, 25 bp, Homo sapien
aggcctgagttgtattttgtctagc

SEQ ID NO: 3804105 - DNA, 25 bp, Homo sapien
tttgtctagcatgtaatccatccag

SEQ ID NO: 3804106 - DNA, 25 bp, Homo sapien
tctgagctgagcttatggagaggct

SEQ ID NO: 3804107 - DNA, 25 bp, Homo sapien
tgtagctatgcacgggtcacttgac

SEQ ID NO: 3804108 - DNA, 25 bp, Homo sapien
cagatggcttcctagctatgtagct

SEQ ID NO: 3804109 - DNA, 25 bp, Homo sapien
ttaagtgtggtaacagagaggtgca

SEQ ID NO: 3804110 - DNA, 25 bp, Homo sapien
tgcggtgcgcacctgttccgtgcac

SEQ ID NO: 3804111 - DNA, 25 bp, Homo sapien
ctgttccgtgcgcccttgtgcggtg

SEQ ID NO: 3804112 - DNA, 25 bp, Homo sapien
gttccgtgcacccttgtcccgagcg

SEQ ID NO: 3804113 - DNA, 25 bp, Homo sapien
ccgagcgccccagctccttgcgctc

SEQ ID NO: 3804114 - DNA, 25 bp, Homo sapien
tcaagtacagaacccaggaggggtc

SEQ ID NO: 3804115 - DNA, 25 bp, Homo sapien
cagaacccaggaggggtctgcccaa

SEQ ID NO: 3804116 - DNA, 25 bp, Homo sapien
gtctgcccaactttaaccctctctc

SEQ ID NO: 3804117 - DNA, 25 bp, Homo sapien
tgcccaactttaaccctctctccaa

SEQ ID NO: 3804118 - DNA, 25 bp, Homo sapien
aattgtcacgtgtagtccatagcgc

SEQ ID NO: 3804119 - DNA, 25 bp, Homo sapien
gcattgtttaatctccgtgtggccc

SEQ ID NO: 3804120 - DNA, 25 bp, Homo sapien
tgtttgggctccgaaactcttacca

SEQ ID NO: 3804121 - DNA, 25 bp, Homo sapien
cctgattggcaaaagttcgatggta

SEQ ID NO: 3804122 - DNA, 25 bp, Homo sapien
tacattgttatggtgcacgttatcc

SEQ ID NO: 3804123 - DNA, 25 bp, Homo sapien
tacttgttgatacgtgtagatctcg

SEQ ID NO: 3804124 - DNA, 25 bp, Homo sapien
agccccttcgggactcatttctgtg

SEQ ID NO: 3804125 - DNA, 25 bp, Homo sapien
ttccagagtattattacaatcatcc

SEQ ID NO: 3804126 - DNA, 25 bp, Homo sapien
cattgatttcccagtagtgtacagc

SEQ ID NO: 3804127 - DNA, 25 bp, Homo sapien
taagtatgtacagccaaatcccatg

SEQ ID NO: 3804128 - DNA, 25 bp, Homo sapien
cagatcactacaagggatggtgcca

SEQ ID NO: 3804129 - DNA, 25 bp, Homo sapien
tgtctttaaaacaacgaggccagtg

SEQ ID NO: 3804130 - DNA, 25 bp, Homo sapien
aaatggcgactgtggcagagttgaa

SEQ ID NO: 3804131 - DNA, 25 bp, Homo sapien
gctggtgagtgcgagcagggaggcc

SEQ ID NO: 3804132 - DNA, 25 bp, Homo sapien
gccctggcggccgttgaaaaatggc

SEQ ID NO: 3804133 - DNA, 25 bp, Homo sapien
cacatgggaagcgtcgggccttcat

SEQ ID NO: 3804134 - DNA, 25 bp, Homo sapien
actcaaccgcagagctcataaactg

SEQ ID NO: 3804135 - DNA, 25 bp, Homo sapien
cttccgagagcgctcgctgattggt

SEQ ID NO: 3804136 - DNA, 25 bp, Homo sapien
cgagagctgtgcgcctattggctac

SEQ ID NO: 3804137 - DNA, 25 bp, Homo sapien
gagtctctggtcgacattcactacc

SEQ ID NO: 3804138 - DNA, 25 bp, Homo sapien
tctcttcagcgatggaggactctgt

SEQ ID NO: 3804139 - DNA, 25 bp, Homo sapien
taccacctgggaactcgatagaaat

SEQ ID NO: 3804140 - DNA, 25 bp, Homo sapien
taaggaaataatgcgctaaggcgtc

SEQ ID NO: 3804141 - DNA, 25 bp, Homo sapien
ggatctcaccggcattacaactgga

SEQ ID NO: 3804142 - DNA, 25 bp, Homo sapien
gtactcatggggatctactaataaa

SEQ ID NO: 3804143 - DNA, 25 bp, Homo sapien
cactgaaaatgtactcatggggatc

SEQ ID NO: 3804144 - DNA, 25 bp, Homo sapien
tgaaaatgtactcatggggatctac

SEQ ID NO: 3804145 - DNA, 25 bp, Homo sapien
aaatgtactcatggggatctactaa

SEQ ID NO: 3804146 - DNA, 25 bp, Homo sapien
acaaggccctactatgatgctcagg

SEQ ID NO: 3804147 - DNA, 25 bp, Homo sapien
tgacatttaaacagacctggagacc

SEQ ID NO: 3804148 - DNA, 25 bp, Homo sapien
gagagggctggaacttgatacccca

SEQ ID NO: 3804149 - DNA, 25 bp, Homo sapien
agtgaggcggtcctacagaattgtc

SEQ ID NO: 3804150 - DNA, 25 bp, Homo sapien
ccatatattacaagtggccagcctg

SEQ ID NO: 3804151 - DNA, 25 bp, Homo sapien
taaacctgccaaactgaccaggcat

SEQ ID NO: 3804152 - DNA, 25 bp, Homo sapien
tctaatttggttaagatgaccatat

SEQ ID NO: 3804153 - DNA, 25 bp, Homo sapien
gtgtcttgaacccacaggtggaggt

SEQ ID NO: 3804154 - DNA, 25 bp, Homo sapien
gatcgggcccggttgctggcgcggg

SEQ ID NO: 3804155 - DNA, 25 bp, Homo sapien
cggcgggtgatcgggcccggttgct

SEQ ID NO: 3804156 - DNA, 25 bp, Homo sapien
ggcgggtgatcgggcccggctgctg

SEQ ID NO: 3804157 - DNA, 25 bp, Homo sapien
cggcgggtgatcgggcccggctgct

SEQ ID NO: 3804158 - DNA, 25 bp, Homo sapien
atcggcgctgcagaagccccggagc

SEQ ID NO: 3804159 - DNA, 25 bp, Homo sapien
gggtcggagccatcggcgctgcaga

SEQ ID NO: 3804160 - DNA, 25 bp, Homo sapien
cagagcgggtcggagccatcggcgc

SEQ ID NO: 3804161 - DNA, 25 bp, Homo sapien
tcggagccatcggcgctgcagaagc

SEQ ID NO: 3804162 - DNA, 25 bp, Homo sapien
acatgaccttggtcacaacaggagc

SEQ ID NO: 3804163 - DNA, 25 bp, Homo sapien
aggcacgggtgcctcactgcctttt

SEQ ID NO: 3804164 - DNA, 25 bp, Homo sapien
gccaggcacgggtgcctcactgcct

SEQ ID NO: 3804165 - DNA, 25 bp, Homo sapien
gaccttggtcacaacaggagccagg

SEQ ID NO: 3804166 - DNA, 25 bp, Homo sapien
aagtcttgcctcgaatttccccagg

SEQ ID NO: 3804167 - DNA, 25 bp, Homo sapien
ttgcctcgaatttccccaggaccta

SEQ ID NO: 3804168 - DNA, 25 bp, Homo sapien
gtcttgcctcgaatttccccaggac

SEQ ID NO: 3804169 - DNA, 25 bp, Homo sapien
caagtcttgcctcgaatttccccag

SEQ ID NO: 3804170 - DNA, 25 bp, Homo sapien
ctagggctgtagcagccatttaggg

SEQ ID NO: 3804171 - DNA, 25 bp, Homo sapien
agggctgtagcagccatttaggggc

SEQ ID NO: 3804172 - DNA, 25 bp, Homo sapien
tagggctgtagcagccatttagggg

SEQ ID NO: 3804173 - DNA, 25 bp, Homo sapien
caaaatgctgctcgggctgtgccat

SEQ ID NO: 3804174 - DNA, 25 bp, Homo sapien
caaacccgtgaaagccccttgatgg

SEQ ID NO: 3804175 - DNA, 25 bp, Homo sapien
aaaatgattccataggccgggccca

SEQ ID NO: 3804176 - DNA, 25 bp, Homo sapien
aaaagccttaggagattccatgtgg

SEQ ID NO: 3804177 - DNA, 25 bp, Homo sapien
attgaatgacttggaccaaaacgct

SEQ ID NO: 3804178 - DNA, 25 bp, Homo sapien
cttattgaatgacttggaccaaaac

SEQ ID NO: 3804179 - DNA, 25 bp, Homo sapien
cagaagagtatagcaagatgtaaga

SEQ ID NO: 3804180 - DNA, 25 bp, Homo sapien
cacaagatctgattttgctcaacac

SEQ ID NO: 3804181 - DNA, 25 bp, Homo sapien
tgtggtcatagctgactgcagtctc

SEQ ID NO: 3804182 - DNA, 25 bp, Homo sapien
tggtgtggtcatagctgactgcagt

SEQ ID NO: 3804183 - DNA, 25 bp, Homo sapien
gcctcatgagtagctgggatacagg

SEQ ID NO: 3804184 - DNA, 25 bp, Homo sapien
cagtctcaacctcctggacttaagc

SEQ ID NO: 3804185 - DNA, 25 bp, Homo sapien
tccggctttgcttaatggctcataa

SEQ ID NO: 3804186 - DNA, 25 bp, Homo sapien
cggctttgcttaatggctcataagc

SEQ ID NO: 3804187 - DNA, 25 bp, Homo sapien
caatccggctttgcttaatggctca

SEQ ID NO: 3804188 - DNA, 25 bp, Homo sapien
aatccggctttgcttaatggctcat

SEQ ID NO: 3804189 - DNA, 25 bp, Homo sapien
tcagtgcccaaatgtcagcagcaag

SEQ ID NO: 3804190 - DNA, 25 bp, Homo sapien
gaaggcccgtcctatgaagctgaca

SEQ ID NO: 3804191 - DNA, 25 bp, Homo sapien
tgtgcccagtcctaagaatcctgtc

SEQ ID NO: 3804192 - DNA, 25 bp, Homo sapien
accatgaggcctctcgtggaaggcc

SEQ ID NO: 3804193 - DNA, 25 bp, Homo sapien
ttttggtcatacaagatgagtcagt

SEQ ID NO: 3804194 - DNA, 25 bp, Homo sapien
gaggtgttggtcaaagcgtataaag

SEQ ID NO: 3804195 - DNA, 25 bp, Homo sapien
cagtcctacggtctactgtacagaa

SEQ ID NO: 3804196 - DNA, 25 bp, Homo sapien
gaatagtgtctatagctcacaatac

SEQ ID NO: 3804197 - DNA, 25 bp, Homo sapien
gatccctcgcgcacacggttcacag

SEQ ID NO: 3804198 - DNA, 25 bp, Homo sapien
aaagaagcacacagcctggatccct

SEQ ID NO: 3804199 - DNA, 25 bp, Homo sapien
caaaagaagcacacagcctggatcc

SEQ ID NO: 3804200 - DNA, 25 bp, Homo sapien
agatggtcccatctcagctgtgatg

SEQ ID NO: 3804201 - DNA, 25 bp, Homo sapien
atctggatggcacaggttctgcaca

SEQ ID NO: 3804202 - DNA, 25 bp, Homo sapien
cttgtgaactgaggactttctaatc

SEQ ID NO: 3804203 - DNA, 25 bp, Homo sapien
tgtgaactgaggactttctaatcat

SEQ ID NO: 3804204 - DNA, 25 bp, Homo sapien
ttgtgaactgaggactttctaatca

SEQ ID NO: 3804205 - DNA, 25 bp, Homo sapien
cgaacacaaacacaggcgaggggtc

SEQ ID NO: 3804206 - DNA, 25 bp, Homo sapien
aacacaaacacaggcgaggggtcag

SEQ ID NO: 3804207 - DNA, 25 bp, Homo sapien
acaaacacaggcgaggggtcagcag

SEQ ID NO: 3804208 - DNA, 25 bp, Homo sapien
ctgcgaacacaaacacaggcgaggg

SEQ ID NO: 3804209 - DNA, 25 bp, Homo sapien
tctgaaagcacttggtgaagtcggg

SEQ ID NO: 3804210 - DNA, 25 bp, Homo sapien
tgtcatctgaatgtagcctcggtca

SEQ ID NO: 3804211 - DNA, 25 bp, Homo sapien
cctcggtcatgtcgggagagataga

SEQ ID NO: 3804212 - DNA, 25 bp, Homo sapien
ggcacccacacgaggaccgtgttct

SEQ ID NO: 3804213 - DNA, 25 bp, Homo sapien
gagttgggctgaccagaaacactgg

SEQ ID NO: 3804214 - DNA, 25 bp, Homo sapien
gggccaggaatatgccccgacttct

SEQ ID NO: 3804215 - DNA, 25 bp, Homo sapien
cagacgatccacagcaaaaatccca

SEQ ID NO: 3804216 - DNA, 25 bp, Homo sapien
aagaggtctgcccagcagacgatcc

SEQ ID NO: 3804217 - DNA, 25 bp, Homo sapien
taaggctgtcataattttggatctc

SEQ ID NO: 3804218 - DNA, 25 bp, Homo sapien
taccagccagaaagtgagcatgatc

SEQ ID NO: 3804219 - DNA, 25 bp, Homo sapien
gaaagtgagcatgatccctgaagac

SEQ ID NO: 3804220 - DNA, 25 bp, Homo sapien
tcaggatggctagggcacacactag

SEQ ID NO: 3804221 - DNA, 25 bp, Homo sapien
ggaaaagtagacgtagaaagtgatg

SEQ ID NO: 3804222 - DNA, 25 bp, Homo sapien
tagaaagtgatgtcacgaaacaggt

SEQ ID NO: 3804223 - DNA, 25 bp, Homo sapien
tttccgagaacaggggtgagcgatc

SEQ ID NO: 3804224 - DNA, 25 bp, Homo sapien
caagacgagctgaatgagtaagagg

SEQ ID NO: 3804225 - DNA, 25 bp, Homo sapien
ttgacaaacagggacactcggctgc

SEQ ID NO: 3804226 - DNA, 25 bp, Homo sapien
gcaccagccagggatccaaaatggg

SEQ ID NO: 3804227 - DNA, 25 bp, Homo sapien
aatagcccaacatttgacaaacagg

SEQ ID NO: 3804228 - DNA, 25 bp, Homo sapien
caaaaaagaatagcccaacatttga

SEQ ID NO: 3804229 - DNA, 25 bp, Homo sapien
aagagtcagggtgtcccagccccac

SEQ ID NO: 3804230 - DNA, 25 bp, Homo sapien
tcttggaagaccagcagtgacacag

SEQ ID NO: 3804231 - DNA, 25 bp, Homo sapien
caacagtgtagccttttagccgcca

SEQ ID NO: 3804232 - DNA, 25 bp, Homo sapien
ccaagtcagatctgtgagtcaccct

SEQ ID NO: 3804233 - DNA, 25 bp, Homo sapien
tcctgccacatagcggggattacat

SEQ ID NO: 3804234 - DNA, 25 bp, Homo sapien
ctcatcctgccacatagcggggatt

SEQ ID NO: 3804235 - DNA, 25 bp, Homo sapien
ccacatagcggggattacatggtgc

SEQ ID NO: 3804236 - DNA, 25 bp, Homo sapien
acatagcggggattacatggtgcac

SEQ ID NO: 3804237 - DNA, 25 bp, Homo sapien
cagaaggtgatcctcgacaggaagg

SEQ ID NO: 3804238 - DNA, 25 bp, Homo sapien
gatccaccagaaggtgatcctcgac

SEQ ID NO: 3804239 - DNA, 25 bp, Homo sapien
tccaccagaaggtgatcctcgacag

SEQ ID NO: 3804240 - DNA, 25 bp, Homo sapien
caccagaaggtgatcctcgacagga

SEQ ID NO: 3804241 - DNA, 25 bp, Homo sapien
ggtgtctctgagaccacatggccag

SEQ ID NO: 3804242 - DNA, 25 bp, Homo sapien
gttcacggaactgccggacagagtt

SEQ ID NO: 3804243 - DNA, 25 bp, Homo sapien
ttcaagttcacggaactgccggaca

SEQ ID NO: 3804244 - DNA, 25 bp, Homo sapien
catggccagcacaggcagattcaag

SEQ ID NO: 3804245 - DNA, 25 bp, Homo sapien
tccttgtttaaggaccagaggtcac

SEQ ID NO: 3804246 - DNA, 25 bp, Homo sapien
gacttgttccgacgtgtcctccttg

SEQ ID NO: 3804247 - DNA, 25 bp, Homo sapien
tagtcttggcgcattccttcttcca

SEQ ID NO: 3804248 - DNA, 25 bp, Homo sapien
ccagttctttaccaaaacaggcacg

SEQ ID NO: 3804249 - DNA, 25 bp, Homo sapien
ggaactctctttcggctgggcagga

SEQ ID NO: 3804250 - DNA, 25 bp, Homo sapien
tctgcggcccggaaaacatcatcag

SEQ ID NO: 3804251 - DNA, 25 bp, Homo sapien
gggacttgacgatcaaagcctccac

SEQ ID NO: 3804252 - DNA, 25 bp, Homo sapien
gaggagtacacaaccttcaccggct

SEQ ID NO: 3804253 - DNA, 25 bp, Homo sapien
tcatgccactgacgaagcagatgtg

SEQ ID NO: 3804254 - DNA, 25 bp, Homo sapien
cagcagcacggtgtagaagtagccc

SEQ ID NO: 3804255 - DNA, 25 bp, Homo sapien
tactggtgcagcacgagggtctgca

SEQ ID NO: 3804256 - DNA, 25 bp, Homo sapien
ccaatgacagcggtcttgatcctca

SEQ ID NO: 3804257 - DNA, 25 bp, Homo sapien
catgttaatgtacgtggccaagtcc

SEQ ID NO: 3804258 - DNA, 25 bp, Homo sapien
cccgaccgtggaggattttctggct

SEQ ID NO: 3804259 - DNA, 25 bp, Homo sapien
catgaggttgacaatctccccgacc

SEQ ID NO: 3804260 - DNA, 25 bp, Homo sapien
gaacctctgagcgtccacagacatg

SEQ ID NO: 3804261 - DNA, 25 bp, Homo sapien
gcaattgagagaattttgaccacca

SEQ ID NO: 3804262 - DNA, 25 bp, Homo sapien
tctggttagcgtttgggaggattca

SEQ ID NO: 3804263 - DNA, 25 bp, Homo sapien
gccacttaggctactttaagacaga

SEQ ID NO: 3804264 - DNA, 25 bp, Homo sapien
tgaccaccataattagggactaatg

SEQ ID NO: 3804265 - DNA, 25 bp, Homo sapien
cgtggcaaagatccagaggtagcaa

SEQ ID NO: 3804266 - DNA, 25 bp, Homo sapien
aatggaagtagtgtttgttacagcc

SEQ ID NO: 3804267 - DNA, 25 bp, Homo sapien
tctaattgagaagggagggtaaatc

SEQ ID NO: 3804268 - DNA, 25 bp, Homo sapien
ggtagcaaagcacaaggcatgtgtt

SEQ ID NO: 3804269 - DNA, 25 bp, Homo sapien
cagtggctatttgcatcagtgatcc

SEQ ID NO: 3804270 - DNA, 25 bp, Homo sapien
gatgctgctgaccaagttcagggca

SEQ ID NO: 3804271 - DNA, 25 bp, Homo sapien
actacaggtaagcattaggtcttgc

SEQ ID NO: 3804272 - DNA, 25 bp, Homo sapien
cagaagaaaacagggcccgtaacag

SEQ ID NO: 3804273 - DNA, 25 bp, Homo sapien
atgaggaccatcaccgccactccag

SEQ ID NO: 3804274 - DNA, 25 bp, Homo sapien
tcacagcattgacgggcaccatgag

SEQ ID NO: 3804275 - DNA, 25 bp, Homo sapien
atcacagcattgacgggcaccatga

SEQ ID NO: 3804276 - DNA, 25 bp, Homo sapien
caccatgaggaccatcaccgccact

SEQ ID NO: 3804277 - DNA, 25 bp, Homo sapien
tacacataataaacaagaccgtggg

SEQ ID NO: 3804278 - DNA, 25 bp, Homo sapien
ttggctgcccaatataatgacctgg

SEQ ID NO: 3804279 - DNA, 25 bp, Homo sapien
gaactggactaaaatcctcatggag

SEQ ID NO: 3804280 - DNA, 25 bp, Homo sapien
tcagcatttgttaaggctccccaag

SEQ ID NO: 3804281 - DNA, 25 bp, Homo sapien
cccaggattttgtgtatcccagcaa

SEQ ID NO: 3804282 - DNA, 25 bp, Homo sapien
tgaaatgggttgagtcgggccactc

SEQ ID NO: 3804283 - DNA, 25 bp, Homo sapien
tataagctacatgatctggaggcca

SEQ ID NO: 3804284 - DNA, 25 bp, Homo sapien
tctgtactggctagcactggttcca

SEQ ID NO: 3804285 - DNA, 25 bp, Homo sapien
gagaatttcgttcatcagcttgatc

SEQ ID NO: 3804286 - DNA, 25 bp, Homo sapien
gctttagcactttgatcccattgag

SEQ ID NO: 3804287 - DNA, 25 bp, Homo sapien
cagcttgatccgattgtctttgctc

SEQ ID NO: 3804288 - DNA, 25 bp, Homo sapien
ccaggtgaaggtgcccacggctgac

SEQ ID NO: 3804289 - DNA, 25 bp, Homo sapien
ttggcaaccctgagacgcacagtct

SEQ ID NO: 3804290 - DNA, 25 bp, Homo sapien
gaagcacaggctttaacaggttccc

SEQ ID NO: 3804291 - DNA, 25 bp, Homo sapien
taggacagagcccagatcatggtgc

SEQ ID NO: 3804292 - DNA, 25 bp, Homo sapien
tgagccaagtaccaatcgatgccgg

SEQ ID NO: 3804293 - DNA, 25 bp, Homo sapien
ctgctgtgccccgagtgagagtcat

SEQ ID NO: 3804294 - DNA, 25 bp, Homo sapien
gctgtgccccgagtgagagtcatca

SEQ ID NO: 3804295 - DNA, 25 bp, Homo sapien
tgtgccccgagtgagagtcatcatc

SEQ ID NO: 3804296 - DNA, 25 bp, Homo sapien
gctgactgctgtgccccgagtgaga

SEQ ID NO: 3804297 - DNA, 25 bp, Homo sapien
ccaaagacacgaaggctgtctgggc

SEQ ID NO: 3804298 - DNA, 25 bp, Homo sapien
aaccggaggatgttgaacaaggcca

SEQ ID NO: 3804299 - DNA, 25 bp, Homo sapien
tcacgtagacggcaaatgtgcacaa

SEQ ID NO: 3804300 - DNA, 25 bp, Homo sapien
ggcatccaggatgttgttctcgtca

SEQ ID NO: 3804301 - DNA, 25 bp, Homo sapien
tgaccagacgaaagcatggcagcct

SEQ ID NO: 3804302 - DNA, 25 bp, Homo sapien
tcaaagcgtgggtggtcaagaccta

SEQ ID NO: 3804303 - DNA, 25 bp, Homo sapien
caagtgcgagttctctgtcaagaag

SEQ ID NO: 3804304 - DNA, 25 bp, Homo sapien
tcaagtcagacaagagctacgtttt

SEQ ID NO: 3804305 - DNA, 25 bp, Homo sapien
tgtaccatcatgcccggccgtaagg

SEQ ID NO: 3804306 - DNA, 25 bp, Homo sapien
taccatcatgcccggccgtaaggtt

SEQ ID NO: 3804307 - DNA, 25 bp, Homo sapien
catcatgcccggccgtaaggttggg

SEQ ID NO: 3804308 - DNA, 25 bp, Homo sapien
ccatcatgcccggccgtaaggttgg

SEQ ID NO: 3804309 - DNA, 25 bp, Homo sapien
tccagtagtgcccaagtgtgacaaa

SEQ ID NO: 3804310 - DNA, 25 bp, Homo sapien
ttgacaaagcctgctatcagccttg

SEQ ID NO: 3804311 - DNA, 25 bp, Homo sapien
tcaaaagggatgttcgcaatgctcg

SEQ ID NO: 3804312 - DNA, 25 bp, Homo sapien
ccttacacagtcaatggcaggaatt

SEQ ID NO: 3804313 - DNA, 25 bp, Homo sapien
ggagagaaagatcctcaggcgtttg

SEQ ID NO: 3804314 - DNA, 25 bp, Homo sapien
ccgtcgctcgatgctgtcaggttcc

SEQ ID NO: 3804315 - DNA, 25 bp, Homo sapien
tcaggcgtttgagggagacactcgc

SEQ ID NO: 3804316 - DNA, 25 bp, Homo sapien
ctttgacaggccgtcgctcgatgct

SEQ ID NO: 3804317 - DNA, 25 bp, Homo sapien
tagcagagaaatttgaccccagagt

SEQ ID NO: 3804318 - DNA, 25 bp, Homo sapien
cctcaaatttcagcctgtggttagc

SEQ ID NO: 3804319 - DNA, 25 bp, Homo sapien
gatggaatcattgccttatgatgtg

SEQ ID NO: 3804320 - DNA, 25 bp, Homo sapien
tgtggttagcagagaaatttgaccc

SEQ ID NO: 3804321 - DNA, 25 bp, Homo sapien
aggctgagctgtgcgactccacatg

SEQ ID NO: 3804322 - DNA, 25 bp, Homo sapien
ttcaaccccagacgcttggcacgaa

SEQ ID NO: 3804323 - DNA, 25 bp, Homo sapien
tctctgcttgaatggttcaacccca

SEQ ID NO: 3804324 - DNA, 25 bp, Homo sapien
acatgcacagaacactctctttctc

SEQ ID NO: 3804325 - DNA, 25 bp, Homo sapien
tgtggcattcctcacggtgatgctg

SEQ ID NO: 3804326 - DNA, 25 bp, Homo sapien
gcccaggtgaatgtggcattcctca

SEQ ID NO: 3804327 - DNA, 25 bp, Homo sapien
ggtgaatgtggcattcctcacggtg

SEQ ID NO: 3804328 - DNA, 25 bp, Homo sapien
tcctcacggtgatgctgttcgtgcc

SEQ ID NO: 3804329 - DNA, 25 bp, Homo sapien
tgctgtaacttacaatcccagggaa

SEQ ID NO: 3804330 - DNA, 25 bp, Homo sapien
ggagcacggtgggaattcgaatcca

SEQ ID NO: 3804331 - DNA, 25 bp, Homo sapien
ccagggaaccctctgtgctaggcat

SEQ ID NO: 3804332 - DNA, 25 bp, Homo sapien
cttctcacgacagcctaagcaggtg

SEQ ID NO: 3804333 - DNA, 25 bp, Homo sapien
tgagagcagggacgactttccgcag

SEQ ID NO: 3804334 - DNA, 25 bp, Homo sapien
agcagggacgactttccgcagccca

SEQ ID NO: 3804335 - DNA, 25 bp, Homo sapien
caccaaagcaccttcggggatggag

SEQ ID NO: 3804336 - DNA, 25 bp, Homo sapien
gctgagagcagggacgactttccgc

SEQ ID NO: 3804337 - DNA, 25 bp, Homo sapien
cacaggcctgtatcacggacctgta

SEQ ID NO: 3804338 - DNA, 25 bp, Homo sapien
gacctgtaatatggttcctccagct

SEQ ID NO: 3804339 - DNA, 25 bp, Homo sapien
tctctgtccgatccccactgggcag

SEQ ID NO: 3804340 - DNA, 25 bp, Homo sapien
ggagagaatcattctgaatccaggc

SEQ ID NO: 3804341 - DNA, 25 bp, Homo sapien
ccactgctgagaggggatcatcgaa

SEQ ID NO: 3804342 - DNA, 25 bp, Homo sapien
ggggatcatcgaagaggtaaatgtc

SEQ ID NO: 3804343 - DNA, 25 bp, Homo sapien
aagaggtaaatgtcagcgttggagt

SEQ ID NO: 3804344 - DNA, 25 bp, Homo sapien
atgtcagcgttggagtacacggccc

SEQ ID NO: 3804345 - DNA, 25 bp, Homo sapien
gatgacgtccacctgcggcaagtag

SEQ ID NO: 3804346 - DNA, 25 bp, Homo sapien
gtccacctgcggcaagtagctcatg

SEQ ID NO: 3804347 - DNA, 25 bp, Homo sapien
tgctgtgcgtgaccaagatccgcgt

SEQ ID NO: 3804348 - DNA, 25 bp, Homo sapien
caagtagctcatgctgtgcgtgacc

SEQ ID NO: 3804349 - DNA, 25 bp, Homo sapien
tgctggcataggtacgcaggaactc

SEQ ID NO: 3804350 - DNA, 25 bp, Homo sapien
tctcagagatcttgccgccactcat

SEQ ID NO: 3804351 - DNA, 25 bp, Homo sapien
aggaactcagcgaaggcgccgtctc

SEQ ID NO: 3804352 - DNA, 25 bp, Homo sapien
aaggcgccgtctcgagccagcagct

SEQ ID NO: 3804353 - DNA, 25 bp, Homo sapien
caggtccaaggtcatgttccaggaa

SEQ ID NO: 3804354 - DNA, 25 bp, Homo sapien
ttttgccataaggaccctgaaactc

SEQ ID NO: 3804355 - DNA, 25 bp, Homo sapien
gaaactcatcaggtccaaggtcatg

SEQ ID NO: 3804356 - DNA, 25 bp, Homo sapien
tcatgttccaggaaggcgctagacc

SEQ ID NO: 3804357 - DNA, 25 bp, Homo sapien
aggtttcgccatgctactgaggatg

SEQ ID NO: 3804358 - DNA, 25 bp, Homo sapien
caagtgctgggaaccaccacgtctg

SEQ ID NO: 3804359 - DNA, 25 bp, Homo sapien
gcttaactccgtgcttcacctcaca

SEQ ID NO: 3804360 - DNA, 25 bp, Homo sapien
gctgaactgctttatgagggaggaa

SEQ ID NO: 3804361 - DNA, 25 bp, Homo sapien
tctgaggacagccagaaggaatgtg

SEQ ID NO: 3804362 - DNA, 25 bp, Homo sapien
ggaaggacaggtgaaaaagatgcca

SEQ ID NO: 3804363 - DNA, 25 bp, Homo sapien
ggaggtgcttatggcccactgttaa

SEQ ID NO: 3804364 - DNA, 25 bp, Homo sapien
gggtctgtctgatgaactctctcgg

SEQ ID NO: 3804365 - DNA, 25 bp, Homo sapien
gcaataagtgccacaaagtaatcaa

SEQ ID NO: 3804366 - DNA, 25 bp, Homo sapien
ccagggtggagaatgctataaagta

SEQ ID NO: 3804367 - DNA, 25 bp, Homo sapien
cacacgaaacttgtaattcagtgac

SEQ ID NO: 3804368 - DNA, 25 bp, Homo sapien
agtagatccataatttactccaggc

SEQ ID NO: 3804369 - DNA, 25 bp, Homo sapien
ttccctgcactgtccgtcaccagca

SEQ ID NO: 3804370 - DNA, 25 bp, Homo sapien
cctgcactgtccgtcaccagcatgc

SEQ ID NO: 3804371 - DNA, 25 bp, Homo sapien
tgcactgtccgtcaccagcatgcca

SEQ ID NO: 3804372 - DNA, 25 bp, Homo sapien
gcactgtccgtcaccagcatgccat

SEQ ID NO: 3804373 - DNA, 25 bp, Homo sapien
caaagacccacaccatgtagggagc

SEQ ID NO: 3804374 - DNA, 25 bp, Homo sapien
cctggcaaaaagagtgccacattcc

SEQ ID NO: 3804375 - DNA, 25 bp, Homo sapien
gcctgtgtgagttgtgccacctggc

SEQ ID NO: 3804376 - DNA, 25 bp, Homo sapien
agcccgagtgtcagaagcgtggaca

SEQ ID NO: 3804377 - DNA, 25 bp, Homo sapien
ggtgtcaaccgtacagatgccttgg

SEQ ID NO: 3804378 - DNA, 25 bp, Homo sapien
gatgccttgggcagggtcggagggc

SEQ ID NO: 3804379 - DNA, 25 bp, Homo sapien
taagagacggagtgtttccacatgc

SEQ ID NO: 3804380 - DNA, 25 bp, Homo sapien
ggactgctattgtgggtctgaacca

SEQ ID NO: 3804381 - DNA, 25 bp, Homo sapien
ctgtctgcgccttgtcagcctccat

SEQ ID NO: 3804382 - DNA, 25 bp, Homo sapien
tgcggtgctgttgtggtgcctgctg

SEQ ID NO: 3804383 - DNA, 25 bp, Homo sapien
tctgcagttctgcggtgctgttgtg

SEQ ID NO: 3804384 - DNA, 25 bp, Homo sapien
tgtccccactataggaggaggagct

SEQ ID NO: 3804385 - DNA, 25 bp, Homo sapien
tcaggaacctctttctcatgagtag

SEQ ID NO: 3804386 - DNA, 25 bp, Homo sapien
tgtcatgcggccaagttgcctgctg

SEQ ID NO: 3804387 - DNA, 25 bp, Homo sapien
ggtaacaggtgaaagataacaggtc

SEQ ID NO: 3804388 - DNA, 25 bp, Homo sapien
gaccctacggtctagctgaaaggta

SEQ ID NO: 3804389 - DNA, 25 bp, Homo sapien
cagccggactttcgtgtgctcctga

SEQ ID NO: 3804390 - DNA, 25 bp, Homo sapien
gccagcgcggacacatggttacaca

SEQ ID NO: 3804391 - DNA, 25 bp, Homo sapien
agggctccatagacgctcagccgga

SEQ ID NO: 3804392 - DNA, 25 bp, Homo sapien
tgtagtcccagtacacggaaagctt

SEQ ID NO: 3804393 - DNA, 25 bp, Homo sapien
cagcaggataacgatgcaggcacca

SEQ ID NO: 3804394 - DNA, 25 bp, Homo sapien
ccaatgacgttgaacagggagccca

SEQ ID NO: 3804395 - DNA, 25 bp, Homo sapien
gaacatcttgatgacctccgggatc

SEQ ID NO: 3804396 - DNA, 25 bp, Homo sapien
catggagtagccaaacacggcgatc

SEQ ID NO: 3804397 - DNA, 25 bp, Homo sapien
atctcaacccttaaaaagacgatgt

SEQ ID NO: 3804398 - DNA, 25 bp, Homo sapien
tatacacttaggaatgagactgcct

SEQ ID NO: 3804399 - DNA, 25 bp, Homo sapien
tgcatttcatctcggtgataacgac

SEQ ID NO: 3804400 - DNA, 25 bp, Homo sapien
taaatgtaaatttagccaaaagcca

SEQ ID NO: 3804401 - DNA, 25 bp, Homo sapien
ctcgaaggctcgaatgacgctgacc

SEQ ID NO: 3804402 - DNA, 25 bp, Homo sapien
actcgaggcgcttcagctgccggga

SEQ ID NO: 3804403 - DNA, 25 bp, Homo sapien
agcggctgaccgactcgaggcgctt

SEQ ID NO: 3804404 - DNA, 25 bp, Homo sapien
ccagcaaggtctcgttgaaatggga

SEQ ID NO: 3804405 - DNA, 25 bp, Homo sapien
ttatacccagctcaaggtgcgagga

SEQ ID NO: 3804406 - DNA, 25 bp, Homo sapien
gacagttaacgggaagcacttgcag

SEQ ID NO: 3804407 - DNA, 25 bp, Homo sapien
aaagagacaaggtgctaaggcggcc

SEQ ID NO: 3804408 - DNA, 25 bp, Homo sapien
taatgattcatctgtcctccgcgct

SEQ ID NO: 3804409 - DNA, 25 bp, Homo sapien
gctaatggttatgggacacctctgg

SEQ ID NO: 3804410 - DNA, 25 bp, Homo sapien
gattagagtgtgtaagacgggctaa

SEQ ID NO: 3804411 - DNA, 25 bp, Homo sapien
gtctataaggatgcaaatgggtgag

SEQ ID NO: 3804412 - DNA, 25 bp, Homo sapien
ctgcctcttttggattgatgctatt

SEQ ID NO: 3804413 - DNA, 25 bp, Homo sapien
ggtatcatgtaccatcagaactatt

SEQ ID NO: 3804414 - DNA, 25 bp, Homo sapien
caatgtgcctggtcatcttatttgt

SEQ ID NO: 3804415 - DNA, 25 bp, Homo sapien
ggtgtcaaccaatgtgcctggtcat

SEQ ID NO: 3804416 - DNA, 25 bp, Homo sapien
taaagctaggtttagtatggtatca

SEQ ID NO: 3804417 - DNA, 25 bp, Homo sapien
ggcagcaaacagaacgatgcagttg

SEQ ID NO: 3804418 - DNA, 25 bp, Homo sapien
tgagaggcccaccaagccagcactg

SEQ ID NO: 3804419 - DNA, 25 bp, Homo sapien
gcctggagatcaccgcaaacagggc

SEQ ID NO: 3804420 - DNA, 25 bp, Homo sapien
agaacgatgcagttgcccacacact

SEQ ID NO: 3804421 - DNA, 25 bp, Homo sapien
tccacggccacgatgttggtttcca

SEQ ID NO: 3804422 - DNA, 25 bp, Homo sapien
ttcagatgacatccgaaccagccag

SEQ ID NO: 3804423 - DNA, 25 bp, Homo sapien
tcagtctctgaatactccttgagcc

SEQ ID NO: 3804424 - DNA, 25 bp, Homo sapien
ccagccagttcaagtacgtggtgac

SEQ ID NO: 3804425 - DNA, 25 bp, Homo sapien
ggtgaggtatccagctcagaggcag

SEQ ID NO: 3804426 - DNA, 25 bp, Homo sapien
gcagaggtgcacaggatagggtcca

SEQ ID NO: 3804427 - DNA, 25 bp, Homo sapien
tggggtaaagctacaccaaagacca

SEQ ID NO: 3804428 - DNA, 25 bp, Homo sapien
accaaagaccaagaggtccagccag

SEQ ID NO: 3804429 - DNA, 25 bp, Homo sapien
gcatcctgtggatctctggtcgata

SEQ ID NO: 3804430 - DNA, 25 bp, Homo sapien
tggtcgatacagagcaccctctcag

SEQ ID NO: 3804431 - DNA, 25 bp, Homo sapien
aagggagagagtaaggaatttccag

SEQ ID NO: 3804432 - DNA, 25 bp, Homo sapien
tctggtaaagctgtgactcccctga

SEQ ID NO: 3804433 - DNA, 25 bp, Homo sapien
aggtcctctcggtagcgcaggcagt

SEQ ID NO: 3804434 - DNA, 25 bp, Homo sapien
ttgatgtgcctgagaacgaagtcca

SEQ ID NO: 3804435 - DNA, 25 bp, Homo sapien
cgcaggcagtagttccggaattcca

SEQ ID NO: 3804436 - DNA, 25 bp, Homo sapien
tctcccccattgatcgtgacattga

SEQ ID NO: 3804437 - DNA, 25 bp, Homo sapien
gagacgctgcagctaggttcacctg

SEQ ID NO: 3804438 - DNA, 25 bp, Homo sapien
tgcaagctgtatgcgctctgaacag

SEQ ID NO: 3804439 - DNA, 25 bp, Homo sapien
tgaacagcttttactgccacagtcc

SEQ ID NO: 3804440 - DNA, 25 bp, Homo sapien
atggcaccctgtgcccgactgggaa

SEQ ID NO: 3804441 - DNA, 25 bp, Homo sapien
gatgatctctccttcggcagactcg

SEQ ID NO: 3804442 - DNA, 25 bp, Homo sapien
gatccgaaataagcccagggtcagg

SEQ ID NO: 3804443 - DNA, 25 bp, Homo sapien
tcgtgcaggccgatcttggcgatgt

SEQ ID NO: 3804444 - DNA, 25 bp, Homo sapien
tgatgccatcgatgatgatctctcc

SEQ ID NO: 3804445 - DNA, 25 bp, Homo sapien
gaagagagtggacggcatgtgacac

SEQ ID NO: 3804446 - DNA, 25 bp, Homo sapien
agagagaagagagtggacggcatgt

SEQ ID NO: 3804447 - DNA, 25 bp, Homo sapien
agagaagagagtggacggcatgtga

SEQ ID NO: 3804448 - DNA, 25 bp, Homo sapien
gagaagagagtggacggcatgtgac

SEQ ID NO: 3804449 - DNA, 25 bp, Homo sapien
tcaggaagggctgacacgaagtcct

SEQ ID NO: 3804450 - DNA, 25 bp, Homo sapien
tccgagtactggctgaatgggtcca

SEQ ID NO: 3804451 - DNA, 25 bp, Homo sapien
ttcatggtctagcttgtcaggaagg

SEQ ID NO: 3804452 - DNA, 25 bp, Homo sapien
agctccagggacgtccagacttctt

SEQ ID NO: 3804453 - DNA, 25 bp, Homo sapien
gctaggcacacaagctggcgctgcc

SEQ ID NO: 3804454 - DNA, 25 bp, Homo sapien
cctcgaactgtgtccggatggtgga

SEQ ID NO: 3804455 - DNA, 25 bp, Homo sapien
cacaaggatcttcgtcttcctcagc

SEQ ID NO: 3804456 - DNA, 25 bp, Homo sapien
gactggatgaggtcgtccgtttcca

SEQ ID NO: 3804457 - DNA, 25 bp, Homo sapien
gtatttttaatggtgacagggtctc

SEQ ID NO: 3804458 - DNA, 25 bp, Homo sapien
ttaatggtgacagggtctcaccgtg

SEQ ID NO: 3804459 - DNA, 25 bp, Homo sapien
cacctggcctgcttctgatttttta

SEQ ID NO: 3804460 - DNA, 25 bp, Homo sapien
cgcacctggcctgcttctgattttt

SEQ ID NO: 3804461 - DNA, 25 bp, Homo sapien
ttctcctttgtccaagacgatcacc

SEQ ID NO: 3804462 - DNA, 25 bp, Homo sapien
caagccggcgtctttggccatgctg

SEQ ID NO: 3804463 - DNA, 25 bp, Homo sapien
tgctgtagaaaagacctctctgctg

SEQ ID NO: 3804464 - DNA, 25 bp, Homo sapien
gggcgccgtactcctggatttctcc

SEQ ID NO: 3804465 - DNA, 25 bp, Homo sapien
tacagttccaggtccaggttagccg

SEQ ID NO: 3804466 - DNA, 25 bp, Homo sapien
gatgctctctgggtttgaagtcggc

SEQ ID NO: 3804467 - DNA, 25 bp, Homo sapien
tctggcccaaaacgagaactggtag

SEQ ID NO: 3804468 - DNA, 25 bp, Homo sapien
tggtaagaggaccatccagggccct

SEQ ID NO: 3804469 - DNA, 25 bp, Homo sapien
gagagattcgtgtacttggtacccc

SEQ ID NO: 3804470 - DNA, 25 bp, Homo sapien
aactctaggataaagcatcacagcc

SEQ ID NO: 3804471 - DNA, 25 bp, Homo sapien
cacaccagggtgaggatacggaata

SEQ ID NO: 3804472 - DNA, 25 bp, Homo sapien
caatgtgcggccaggactgagaact

SEQ ID NO: 3804473 - DNA, 25 bp, Homo sapien
tttatgtgccatgtcgtcacgattc

SEQ ID NO: 3804474 - DNA, 25 bp, Homo sapien
tatggacccaccactagccttgaga

SEQ ID NO: 3804475 - DNA, 25 bp, Homo sapien
ggatccattaggagcacagactctg

SEQ ID NO: 3804476 - DNA, 25 bp, Homo sapien
tcacgattcagcgaggacggatcca

SEQ ID NO: 3804477 - DNA, 25 bp, Homo sapien
acagtggctcatgcctgtaatccca

SEQ ID NO: 3804478 - DNA, 25 bp, Homo sapien
caagtgtggactgggcacagtggct

SEQ ID NO: 3804479 - DNA, 25 bp, Homo sapien
agtggctcatgcctgtaatcccagc

SEQ ID NO: 3804480 - DNA, 25 bp, Homo sapien
tggctcatgcctgtaatcccagcac

SEQ ID NO: 3804481 - DNA, 25 bp, Homo sapien
gccaacattgtggagcagctgcctc

SEQ ID NO: 3804482 - DNA, 25 bp, Homo sapien
gctctgccagggcttagccaacatt

SEQ ID NO: 3804483 - DNA, 25 bp, Homo sapien
gctcaaaaccttctactagttccag

SEQ ID NO: 3804484 - DNA, 25 bp, Homo sapien
agcatgaatgacactgcatgtcatt

SEQ ID NO: 3804485 - DNA, 25 bp, Homo sapien
ctcttagcaaaggactccagggagt

SEQ ID NO: 3804486 - DNA, 25 bp, Homo sapien
ttccattgctcttagcaaaggactc

SEQ ID NO: 3804487 - DNA, 25 bp, Homo sapien
tgctcttagcaaaggactccaggga

SEQ ID NO: 3804488 - DNA, 25 bp, Homo sapien
tttttccattgctcttagcaaagga

SEQ ID NO: 3804489 - DNA, 25 bp, Homo sapien
gaggtgcctgtgacgcggtctccat

SEQ ID NO: 3804490 - DNA, 25 bp, Homo sapien
gcacacctttcagttctctcatcag

SEQ ID NO: 3804491 - DNA, 25 bp, Homo sapien
gattggacgcttaggcggtcaccag

SEQ ID NO: 3804492 - DNA, 25 bp, Homo sapien
ccttgttactaacgtgtgcacacct

SEQ ID NO: 3804493 - DNA, 25 bp, Homo sapien
ccgcccctcacactgcacgccgcag

SEQ ID NO: 3804494 - DNA, 25 bp, Homo sapien
cccctcacactgcacgccgcaggct

SEQ ID NO: 3804495 - DNA, 25 bp, Homo sapien
tcacactgcacgccgcaggctcctt

SEQ ID NO: 3804496 - DNA, 25 bp, Homo sapien
cctcacactgcacgccgcaggctcc

SEQ ID NO: 3804497 - DNA, 25 bp, Homo sapien
gcaccaccgcggcggtgaccaccgc

SEQ ID NO: 3804498 - DNA, 25 bp, Homo sapien
accaccgcggcggtgaccaccgcgg

SEQ ID NO: 3804499 - DNA, 25 bp, Homo sapien
caccaccgcggcggtgaccaccgcg

SEQ ID NO: 3804500 - DNA, 25 bp, Homo sapien
gagtagttgatctccacgtccgact

SEQ ID NO: 3804501 - DNA, 25 bp, Homo sapien
gcagcccaccacgatgtcctccgag

SEQ ID NO: 3804502 - DNA, 25 bp, Homo sapien
gtccgacttgacgaagccaccgcag

SEQ ID NO: 3804503 - DNA, 25 bp, Homo sapien
gatgtcctccgagccgtgcgccggc

SEQ ID NO: 3804504 - DNA, 25 bp, Homo sapien
gaatggcggcagttgcataggaaca

SEQ ID NO: 3804505 - DNA, 25 bp, Homo sapien
tcaagatggccagtatgaaatgtct

SEQ ID NO: 3804506 - DNA, 25 bp, Homo sapien
gaatgagtgtcccacaccatctgga

SEQ ID NO: 3804507 - DNA, 25 bp, Homo sapien
cgatgtaaaaacactcaggatggga

SEQ ID NO: 3804508 - DNA, 25 bp, Homo sapien
caaagtcccatgcttggtgtacagc

SEQ ID NO: 3804509 - DNA, 25 bp, Homo sapien
cagtctgtctggtatttcaaagtcc

SEQ ID NO: 3804510 - DNA, 25 bp, Homo sapien
gcacagtctgtctggtatttcaaag

SEQ ID NO: 3804511 - DNA, 25 bp, Homo sapien
gtaaccattattaggggcacagtct

SEQ ID NO: 3804512 - DNA, 25 bp, Homo sapien
ccctaggggaggctcaatcttcaga

SEQ ID NO: 3804513 - DNA, 25 bp, Homo sapien
taggggaggctcaatcttcagaatg

SEQ ID NO: 3804514 - DNA, 25 bp, Homo sapien
aactccaccctaggggaggctcaat

SEQ ID NO: 3804515 - DNA, 25 bp, Homo sapien
tccaccctaggggaggctcaatctt

SEQ ID NO: 3804516 - DNA, 25 bp, Homo sapien
ttatatttatgcatcagaattctca

SEQ ID NO: 3804517 - DNA, 25 bp, Homo sapien
agaattctcaacagcaaagagaatg

SEQ ID NO: 3804518 - DNA, 25 bp, Homo sapien
agagaatgaactaaagctacaaatg

SEQ ID NO: 3804519 - DNA, 25 bp, Homo sapien
catccacatggagctccacggtcgt

SEQ ID NO: 3804520 - DNA, 25 bp, Homo sapien
acatggagctccacggtcgtcggct

SEQ ID NO: 3804521 - DNA, 25 bp, Homo sapien
cacatggagctccacggtcgtcggc

SEQ ID NO: 3804522 - DNA, 25 bp, Homo sapien
tccacatggagctccacggtcgtcg

SEQ ID NO: 3804523 - DNA, 25 bp, Homo sapien
gtgtaactgtggactggatctttgc

SEQ ID NO: 3804524 - DNA, 25 bp, Homo sapien
atctttgcttcggtcccagtgtttc

SEQ ID NO: 3804525 - DNA, 25 bp, Homo sapien
tttccgccaggctgtgtaactgtgg

SEQ ID NO: 3804526 - DNA, 25 bp, Homo sapien
agagacacctgaactcccgcaggac

SEQ ID NO: 3804527 - DNA, 25 bp, Homo sapien
gtctcccttaatctcaaggatttct

SEQ ID NO: 3804528 - DNA, 25 bp, Homo sapien
gtttgacagaggtgacaggcatgaa

SEQ ID NO: 3804529 - DNA, 25 bp, Homo sapien
atctcaaggatttctggcataaaac

SEQ ID NO: 3804530 - DNA, 25 bp, Homo sapien
cccttaatctcaaggatttctggca

SEQ ID NO: 3804531 - DNA, 25 bp, Homo sapien
tgagttgcgaggatttcataatctc

SEQ ID NO: 3804532 - DNA, 25 bp, Homo sapien
acgcccaggttggatgagttgcgag

SEQ ID NO: 3804533 - DNA, 25 bp, Homo sapien
cccaggttggatgagttgcgaggat

SEQ ID NO: 3804534 - DNA, 25 bp, Homo sapien
gttggatgagttgcgaggatttcat

SEQ ID NO: 3804535 - DNA, 25 bp, Homo sapien
atcacttcggacagagccagacaca

SEQ ID NO: 3804536 - DNA, 25 bp, Homo sapien
gagttggttacacgcactgtggtgc

SEQ ID NO: 3804537 - DNA, 25 bp, Homo sapien
gactggccgcattggcattggagtt

SEQ ID NO: 3804538 - DNA, 25 bp, Homo sapien
cagcaactatgaggggactggccgc

SEQ ID NO: 3804539 - DNA, 25 bp, Homo sapien
caggcactggtgagacattgcagcc

SEQ ID NO: 3804540 - DNA, 25 bp, Homo sapien
aggcactggtgagacattgcagccc

SEQ ID NO: 3804541 - DNA, 25 bp, Homo sapien
ggcactggtgagacattgcagccca

SEQ ID NO: 3804542 - DNA, 25 bp, Homo sapien
cactggtgagacattgcagcccagg

SEQ ID NO: 3804543 - DNA, 25 bp, Homo sapien
tctctggagaccgtgtagcacaaat

SEQ ID NO: 3804544 - DNA, 25 bp, Homo sapien
aaatacaccagactctcgtcttggg

SEQ ID NO: 3804545 - DNA, 25 bp, Homo sapien
cagtgtagcccccacttggcaagga

SEQ ID NO: 3804546 - DNA, 25 bp, Homo sapien
gaatagaaagagaacgagccatctt

SEQ ID NO: 3804547 - DNA, 25 bp, Homo sapien
acagaacggaaatctgcttcactca

SEQ ID NO: 3804548 - DNA, 25 bp, Homo sapien
cccagacataaacagaacggaaatc

SEQ ID NO: 3804549 - DNA, 25 bp, Homo sapien
ttttactgtgtcatgagagtcccag

SEQ ID NO: 3804550 - DNA, 25 bp, Homo sapien
cctttaacacccaaacagcattggc

SEQ ID NO: 3804551 - DNA, 25 bp, Homo sapien
catgttcagagaactgcaggccaac

SEQ ID NO: 3804552 - DNA, 25 bp, Homo sapien
cagcatgttcagagaactgcaggcc

SEQ ID NO: 3804553 - DNA, 25 bp, Homo sapien
gcttaacagcatgttcagagaactg

SEQ ID NO: 3804554 - DNA, 25 bp, Homo sapien
tgcttaacagcatgttcagagaact

SEQ ID NO: 3804555 - DNA, 25 bp, Homo sapien
taatcctctcccctcgatagaacgg

SEQ ID NO: 3804556 - DNA, 25 bp, Homo sapien
ggcgccacatcaaaggtaatcctct

SEQ ID NO: 3804557 - DNA, 25 bp, Homo sapien
ctggaaggcgccacatcaaaggtaa

SEQ ID NO: 3804558 - DNA, 25 bp, Homo sapien
tcctctcccctcgatagaacggaat

SEQ ID NO: 3804559 - DNA, 25 bp, Homo sapien
ctgtcatgctccactgtgaagtcaa

SEQ ID NO: 3804560 - DNA, 25 bp, Homo sapien
gtcatgctccactgtgaagtcaagt

SEQ ID NO: 3804561 - DNA, 25 bp, Homo sapien
tgtcatgctccactgtgaagtcaag

SEQ ID NO: 3804562 - DNA, 25 bp, Homo sapien
atctgggaatagctgtctctgctca

SEQ ID NO: 3804563 - DNA, 25 bp, Homo sapien
tgtacagcagaacggtcaaacactc

SEQ ID NO: 3804564 - DNA, 25 bp, Homo sapien
tcagggaacttacagggccccattc

SEQ ID NO: 3804565 - DNA, 25 bp, Homo sapien
aatgcagagtctgcaccccactgtg

SEQ ID NO: 3804566 - DNA, 25 bp, Homo sapien
ttcaagaccctcccggtgacggaga

SEQ ID NO: 3804567 - DNA, 25 bp, Homo sapien
agaatcccatgacgtggaacacggg

SEQ ID NO: 3804568 - DNA, 25 bp, Homo sapien
ttctggaacaccatctccttcgggt

SEQ ID NO: 3804569 - DNA, 25 bp, Homo sapien
catctccttcgggtccgttcaagac

SEQ ID NO: 3804570 - DNA, 25 bp, Homo sapien
tgatggtgaccgtttcaaagtagag

SEQ ID NO: 3804571 - DNA, 25 bp, Homo sapien
caaggcggaatgagccatcagcttt

SEQ ID NO: 3804572 - DNA, 25 bp, Homo sapien
tgtggttatgttctcaaggcggaat

SEQ ID NO: 3804573 - DNA, 25 bp, Homo sapien
gtagaggtgctctttctgagcatgg

SEQ ID NO: 3804574 - DNA, 25 bp, Homo sapien
tccatgagcatctgtctccacggtg

SEQ ID NO: 3804575 - DNA, 25 bp, Homo sapien
aacaaaatgatccatgagcatctgt

SEQ ID NO: 3804576 - DNA, 25 bp, Homo sapien
tctccacggtgaccaaagacttgtc

SEQ ID NO: 3804577 - DNA, 25 bp, Homo sapien
aagacttgtccttgtcttgagatga

SEQ ID NO: 3804578 - DNA, 25 bp, Homo sapien
tttttgagcggccattagtagagtt

SEQ ID NO: 3804579 - DNA, 25 bp, Homo sapien
tatggccatttttgagcggccatta

SEQ ID NO: 3804580 - DNA, 25 bp, Homo sapien
ggccatttttgagcggccattagta

SEQ ID NO: 3804581 - DNA, 25 bp, Homo sapien
gagcggccattagtagagttcattt

SEQ ID NO: 3804582 - DNA, 25 bp, Homo sapien
gaaatgtctggggtttcaacgtcag

SEQ ID NO: 3804583 - DNA, 25 bp, Homo sapien
tctggggtttcaacgtcagccctgc

SEQ ID NO: 3804584 - DNA, 25 bp, Homo sapien
tgtctggggtttcaacgtcagccct

SEQ ID NO: 3804585 - DNA, 25 bp, Homo sapien
aaactgatgccaagaactgtacaaa

SEQ ID NO: 3804586 - DNA, 25 bp, Homo sapien
gggactgtagagtcaccagcaagtc

SEQ ID NO: 3804587 - DNA, 25 bp, Homo sapien
gctcagggactgtagagtcaccagc

SEQ ID NO: 3804588 - DNA, 25 bp, Homo sapien
agcacgttgtcaaaggtgaaagtca

SEQ ID NO: 3804589 - DNA, 25 bp, Homo sapien
catggcgttgaccttgccggagagc

SEQ ID NO: 3804590 - DNA, 25 bp, Homo sapien
tccaggctcttgttcttccagcacc

SEQ ID NO: 3804591 - DNA, 25 bp, Homo sapien
agggaacatctcagcatgtagcccg

SEQ ID NO: 3804592 - DNA, 25 bp, Homo sapien
tgtagcccgtctgcctgaactcaac

SEQ ID NO: 3804593 - DNA, 25 bp, Homo sapien
ccgtctgcctgaactcaactgcaga

SEQ ID NO: 3804594 - DNA, 25 bp, Homo sapien
tctcacgcccatttccatcctgata

SEQ ID NO: 3804595 - DNA, 25 bp, Homo sapien
gactcctttggagaggttataaatc

SEQ ID NO: 3804596 - DNA, 25 bp, Homo sapien
caggcttggacaggcagaatcggtt

SEQ ID NO: 3804597 - DNA, 25 bp, Homo sapien
gttataaatccccacattctcacgc

SEQ ID NO: 3804598 - DNA, 25 bp, Homo sapien
aacaaatgttggcgaaggaggtgaa

SEQ ID NO: 3804599 - DNA, 25 bp, Homo sapien
caaatgttggcgaaggaggtgaaga

SEQ ID NO: 3804600 - DNA, 25 bp, Homo sapien
aaatgttggcgaaggaggtgaagaa

SEQ ID NO: 3804601 - DNA, 25 bp, Homo sapien
atgttggcgaaggaggtgaagaaac

SEQ ID NO: 3804602 - DNA, 25 bp, Homo sapien
ctggcagccacgcactgccacactt

SEQ ID NO: 3804603 - DNA, 25 bp, Homo sapien
ggcagccacgcactgccacacttct

SEQ ID NO: 3804604 - DNA, 25 bp, Homo sapien
atgctggcagccacgcactgccaca

SEQ ID NO: 3804605 - DNA, 25 bp, Homo sapien
tgctggcagccacgcactgccacac

SEQ ID NO: 3804606 - DNA, 25 bp, Homo sapien
ccgacatctgaaatcgagtggcagc

SEQ ID NO: 3804607 - DNA, 25 bp, Homo sapien
ctgaaatcgagtggcagctctttgc

SEQ ID NO: 3804608 - DNA, 25 bp, Homo sapien
ttttcagagaatggcatctattaca

SEQ ID NO: 3804609 - DNA, 25 bp, Homo sapien
gagcaattccgacatctgaaatcga

SEQ ID NO: 3804610 - DNA, 25 bp, Homo sapien
gagcgaggggtcactttgtacacac

SEQ ID NO: 3804611 - DNA, 25 bp, Homo sapien
tgtagaacgcttgctcaaaccggtg

SEQ ID NO: 3804612 - DNA, 25 bp, Homo sapien
gtgtcataggtgtagaacgcttgct

SEQ ID NO: 3804613 - DNA, 25 bp, Homo sapien
aacgcttgctcaaaccggtggcagg

SEQ ID NO: 3804614 - DNA, 25 bp, Homo sapien
tagtcacagtgacatccatcatttt

SEQ ID NO: 3804615 - DNA, 25 bp, Homo sapien
cattttgtcggtggtgatagttcca

SEQ ID NO: 3804616 - DNA, 25 bp, Homo sapien
tagttccaaggacatggtggcgaat

SEQ ID NO: 3804617 - DNA, 25 bp, Homo sapien
ggctgtcaatgtcaagatactaggt

SEQ ID NO: 3804618 - DNA, 25 bp, Homo sapien
caaggcgggttcactgtcgatggaa

SEQ ID NO: 3804619 - DNA, 25 bp, Homo sapien
cagagggcctaagaccaaggcgggt

SEQ ID NO: 3804620 - DNA, 25 bp, Homo sapien
cagacttcagagggcctaagaccaa

SEQ ID NO: 3804621 - DNA, 25 bp, Homo sapien
ctgcgggcctcgatctcagccagct

SEQ ID NO: 3804622 - DNA, 25 bp, Homo sapien
acgagaaggggccttgtaactcatc

SEQ ID NO: 3804623 - DNA, 25 bp, Homo sapien
agtaagagaaatcatacgagaaggg

SEQ ID NO: 3804624 - DNA, 25 bp, Homo sapien
gaaggggccttgtaactcatctacc

SEQ ID NO: 3804625 - DNA, 25 bp, Homo sapien
ggggccttgtaactcatctaccatc

SEQ ID NO: 3804626 - DNA, 25 bp, Homo sapien
attaatatacttcagtttggcgggt

SEQ ID NO: 3804627 - DNA, 25 bp, Homo sapien
taatatacttcagtttggcgggtcc

SEQ ID NO: 3804628 - DNA, 25 bp, Homo sapien
aatatacttcagtttggcgggtcct

SEQ ID NO: 3804629 - DNA, 25 bp, Homo sapien
ttaatatacttcagtttggcgggtc

SEQ ID NO: 3804630 - DNA, 25 bp, Homo sapien
agatgacggtgtaacagtgattttc

SEQ ID NO: 3804631 - DNA, 25 bp, Homo sapien
ctccactgacaacggcttccattga

SEQ ID NO: 3804632 - DNA, 25 bp, Homo sapien
cactgacaacggcttccattgaagg

SEQ ID NO: 3804633 - DNA, 25 bp, Homo sapien
aaagagcagctctttagatgacggt

SEQ ID NO: 3804634 - DNA, 25 bp, Homo sapien
ctgtgatcagcggtgaacttgcccc

SEQ ID NO: 3804635 - DNA, 25 bp, Homo sapien
aactcggggtggatctggccttcta

SEQ ID NO: 3804636 - DNA, 25 bp, Homo sapien
ctttgtcatcagtaaagactgtgat

SEQ ID NO: 3804637 - DNA, 25 bp, Homo sapien
tgatgacaatctcgactccttccaa

SEQ ID NO: 3804638 - DNA, 25 bp, Homo sapien
tctgtgaggtcaccgtgtactccag

SEQ ID NO: 3804639 - DNA, 25 bp, Homo sapien
agggcataggccttgaagtctccga

SEQ ID NO: 3804640 - DNA, 25 bp, Homo sapien
tgaagtctccgatggttccttccac

SEQ ID NO: 3804641 - DNA, 25 bp, Homo sapien
gcagtcagaacatagccctccttct

SEQ ID NO: 3804642 - DNA, 25 bp, Homo sapien
gaaaataacagttccacaagtcaag

SEQ ID NO: 3804643 - DNA, 25 bp, Homo sapien
gtgagaccagagcaaggttaaactc

SEQ ID NO: 3804644 - DNA, 25 bp, Homo sapien
aagtcaagaggtcattttttcaagg

SEQ ID NO: 3804645 - DNA, 25 bp, Homo sapien
ttattgttactcaaaggaggacagg

SEQ ID NO: 3804646 - DNA, 25 bp, Homo sapien
ccgttgtcctgggtcaagaggttgg

SEQ ID NO: 3804647 - DNA, 25 bp, Homo sapien
gagaatgtcagaatgccgttgtcct

SEQ ID NO: 3804648 - DNA, 25 bp, Homo sapien
gtttgagaatgtcagaatgccgttg

SEQ ID NO: 3804649 - DNA, 25 bp, Homo sapien
ctcagggataagaggactcccggga

SEQ ID NO: 3804650 - DNA, 25 bp, Homo sapien
caacacataagtctcgcatgctgca

SEQ ID NO: 3804651 - DNA, 25 bp, Homo sapien
gacaagcgggtgatcagaaaacaag

SEQ ID NO: 3804652 - DNA, 25 bp, Homo sapien
tctgtggcaaaacgagaagacgcct

SEQ ID NO: 3804653 - DNA, 25 bp, Homo sapien
gacgcctaagagagcagccgttgtg

SEQ ID NO: 3804654 - DNA, 25 bp, Homo sapien
agtaaccctctctctataatcacca

SEQ ID NO: 3804655 - DNA, 25 bp, Homo sapien
tcacgatggaccagaattacaccag

SEQ ID NO: 3804656 - DNA, 25 bp, Homo sapien
tctaggcatggcttaaaagtgaggg

SEQ ID NO: 3804657 - DNA, 25 bp, Homo sapien
tccctggcagccaaaaatagtaacc

SEQ ID NO: 3804658 - DNA, 25 bp, Homo sapien
cggttcggtaccccgtgatggtgat

SEQ ID NO: 3804659 - DNA, 25 bp, Homo sapien
ggatggctcaaaccggaactccttc

SEQ ID NO: 3804660 - DNA, 25 bp, Homo sapien
gtttgaagtaatactggccagggct

SEQ ID NO: 3804661 - DNA, 25 bp, Homo sapien
aactccttcatcatgggtttgaagt

SEQ ID NO: 3804662 - DNA, 25 bp, Homo sapien
gatgtaattcaggtttgaaactctt

SEQ ID NO: 3804663 - DNA, 25 bp, Homo sapien
aactggaagtactggttgtctccca

SEQ ID NO: 3804664 - DNA, 25 bp, Homo sapien
tatctatctatctacagctgggagc

SEQ ID NO: 3804665 - DNA, 25 bp, Homo sapien
ctgtgccttgccagacactcatgtg

SEQ ID NO: 3804666 - DNA, 25 bp, Homo sapien
gtcttctccgtaaatgctgcagtcg

SEQ ID NO: 3804667 - DNA, 25 bp, Homo sapien
catggcaaccccttgttcgggctct

SEQ ID NO: 3804668 - DNA, 25 bp, Homo sapien
gaacttgccctcttcgtctgtcacg

SEQ ID NO: 3804669 - DNA, 25 bp, Homo sapien
tcgggctctccgtttaaggaagaca

SEQ ID NO: 3804670 - DNA, 25 bp, Homo sapien
tctgccttgagctgaacgtggtaca

SEQ ID NO: 3804671 - DNA, 25 bp, Homo sapien
aatgtggtcgttgccttctgccttg

SEQ ID NO: 3804672 - DNA, 25 bp, Homo sapien
gccttctgccttgagctgaacgtgg

SEQ ID NO: 3804673 - DNA, 25 bp, Homo sapien
ggagcgcccgctcaatgtggtcgtt

SEQ ID NO: 3804674 - DNA, 25 bp, Homo sapien
caaattgattaatctgccggaaaac

SEQ ID NO: 3804675 - DNA, 25 bp, Homo sapien
gtaggaaggtattcagaggaagtga

SEQ ID NO: 3804676 - DNA, 25 bp, Homo sapien
tttacatcatcgatgtcattattcc

SEQ ID NO: 3804677 - DNA, 25 bp, Homo sapien
aaaactatgatgtttacatcatcga

SEQ ID NO: 3804678 - DNA, 25 bp, Homo sapien
tggattggattgtcgaggttttcgc

SEQ ID NO: 3804679 - DNA, 25 bp, Homo sapien
aactgtctggattggattgtcgagg

SEQ ID NO: 3804680 - DNA, 25 bp, Homo sapien
agggaaactgtctggattggattgt

SEQ ID NO: 3804681 - DNA, 25 bp, Homo sapien
gattgtcgaggttttcgcttttgta

SEQ ID NO: 3804682 - DNA, 25 bp, Homo sapien
tatgttcaaagtgcaagagtcgatc

SEQ ID NO: 3804683 - DNA, 25 bp, Homo sapien
gagagaacgttcaaagcagcaagag

SEQ ID NO: 3804684 - DNA, 25 bp, Homo sapien
agagtcgatcatgcccaacagtagg

SEQ ID NO: 3804685 - DNA, 25 bp, Homo sapien
ggacttcttagcaggaaagcatggg

SEQ ID NO: 3804686 - DNA, 25 bp, Homo sapien
tcagcgggctattccatcagtggcg

SEQ ID NO: 3804687 - DNA, 25 bp, Homo sapien
taaaacctaacgtatggctgtgatg

SEQ ID NO: 3804688 - DNA, 25 bp, Homo sapien
tgcagcctttttatgagtacccaac

SEQ ID NO: 3804689 - DNA, 25 bp, Homo sapien
tatgagccaattctgatgagggagg

SEQ ID NO: 3804690 - DNA, 25 bp, Homo sapien
caagatgtagtcatactgggatctg

SEQ ID NO: 3804691 - DNA, 25 bp, Homo sapien
cggtgaaagaaacttgaggcaagat

SEQ ID NO: 3804692 - DNA, 25 bp, Homo sapien
tatggtagcccactgcggtgaaaga

SEQ ID NO: 3804693 - DNA, 25 bp, Homo sapien
tgatgtgtttatggtagcccactgc

SEQ ID NO: 3804694 - DNA, 25 bp, Homo sapien
tcatggctcatcgaggcctcaacct

SEQ ID NO: 3804695 - DNA, 25 bp, Homo sapien
catgatcatggctcatcgaggcctc

SEQ ID NO: 3804696 - DNA, 25 bp, Homo sapien
caccaaacccagcccatggattttt

SEQ ID NO: 3804697 - DNA, 25 bp, Homo sapien
gccaccaaacccagcccatggattt

SEQ ID NO: 3804698 - DNA, 25 bp, Homo sapien
cattcctgagccaccgatctaaaca

SEQ ID NO: 3804699 - DNA, 25 bp, Homo sapien
agaaagtgacccaatgccaggagcc

SEQ ID NO: 3804700 - DNA, 25 bp, Homo sapien
ggtttgcgtggccatgtaccatgtg

SEQ ID NO: 3804701 - DNA, 25 bp, Homo sapien
gggaatcgcaggcatcagtgctcag

SEQ ID NO: 3804702 - DNA, 25 bp, Homo sapien
gaatatcctacatgtagtgccagga

SEQ ID NO: 3804703 - DNA, 25 bp, Homo sapien
tgtcaagaggacaccctttttagga

SEQ ID NO: 3804704 - DNA, 25 bp, Homo sapien
taatgccccgtaagagtggcctgag

SEQ ID NO: 3804705 - DNA, 25 bp, Homo sapien
gattaagtcagggattaatgccccg

SEQ ID NO: 3804706 - DNA, 25 bp, Homo sapien
tccttctatccaaaggaaggaacca

SEQ ID NO: 3804707 - DNA, 25 bp, Homo sapien
tgcaaacaccgagagccccatcact

SEQ ID NO: 3804708 - DNA, 25 bp, Homo sapien
aaagtggccacttgaggacacccag

SEQ ID NO: 3804709 - DNA, 25 bp, Homo sapien
tcaccaaggccacaagcttgtccat

SEQ ID NO: 3804710 - DNA, 25 bp, Homo sapien
ccttgtgcgatgtcctgttcaggca

SEQ ID NO: 3804711 - DNA, 25 bp, Homo sapien
tcatggttgtaaccggccagcagaa

SEQ ID NO: 3804712 - DNA, 25 bp, Homo sapien
caatgtaggatccttgtgcgatgtc

SEQ ID NO: 3804713 - DNA, 25 bp, Homo sapien
aaccagcagcgtcaatggcagggca

SEQ ID NO: 3804714 - DNA, 25 bp, Homo sapien
ggcctcttactaatgagtccccagg

SEQ ID NO: 3804715 - DNA, 25 bp, Homo sapien
gccacgtgctaatgggtgggtttca

SEQ ID NO: 3804716 - DNA, 25 bp, Homo sapien
ggcctctctccgggcctaatatgtc

SEQ ID NO: 3804717 - DNA, 25 bp, Homo sapien
ttcagttcaaacgaggcaggcctct

SEQ ID NO: 3804718 - DNA, 25 bp, Homo sapien
ccggcttgtcaactgcagcagcaaa

SEQ ID NO: 3804719 - DNA, 25 bp, Homo sapien
cctgtagccggcttgtcaactgcag

SEQ ID NO: 3804720 - DNA, 25 bp, Homo sapien
ctgtagccggcttgtcaactgcagc

SEQ ID NO: 3804721 - DNA, 25 bp, Homo sapien
ccaagtgagactgcaactgtcccct

SEQ ID NO: 3804722 - DNA, 25 bp, Homo sapien
tgtcccaagtgagactgcaactgtc

SEQ ID NO: 3804723 - DNA, 25 bp, Homo sapien
tcccaagtgagactgcaactgtccc

SEQ ID NO: 3804724 - DNA, 25 bp, Homo sapien
caagtgagactgcaactgtcccctt

SEQ ID NO: 3804725 - DNA, 25 bp, Homo sapien
ggctgaagttagctgacgcatgctt

SEQ ID NO: 3804726 - DNA, 25 bp, Homo sapien
caggatgccacagtgacaagggaca

SEQ ID NO: 3804727 - DNA, 25 bp, Homo sapien
gagggtccattcattgcattgcacg

SEQ ID NO: 3804728 - DNA, 25 bp, Homo sapien
gatcaagaatgacattctcacacca

SEQ ID NO: 3804729 - DNA, 25 bp, Homo sapien
ccagcaggatctcagatgcaaaggg

SEQ ID NO: 3804730 - DNA, 25 bp, Homo sapien
taccccgccatggaaccaaacacca

SEQ ID NO: 3804731 - DNA, 25 bp, Homo sapien
cagatgaatccctagggtaccccgc

SEQ ID NO: 3804732 - DNA, 25 bp, Homo sapien
gatctcagatgcaaagggaagtgaa

SEQ ID NO: 3804733 - DNA, 25 bp, Homo sapien
tgaatgggccattttattgattttt

SEQ ID NO: 3804734 - DNA, 25 bp, Homo sapien
gaatgggccattttattgattttta

SEQ ID NO: 3804735 - DNA, 25 bp, Homo sapien
ggatgtgtcccctccttcaatatca

SEQ ID NO: 3804736 - DNA, 25 bp, Homo sapien
ggtgccaacaccaagctagctgata

SEQ ID NO: 3804737 - DNA, 25 bp, Homo sapien
tattcattcctctgtgcgtgcgttc

SEQ ID NO: 3804738 - DNA, 25 bp, Homo sapien
tgctcacgcatcacatccagaaagt

SEQ ID NO: 3804739 - DNA, 25 bp, Homo sapien
gaggcacgatgatcccttgaccctg

SEQ ID NO: 3804740 - DNA, 25 bp, Homo sapien
aggcacgatgatcccttgaccctgg

SEQ ID NO: 3804741 - DNA, 25 bp, Homo sapien
taattcacagtgaggagttctccac

SEQ ID NO: 3804742 - DNA, 25 bp, Homo sapien
gaaacaggatgaaaacgcagcagct

SEQ ID NO: 3804743 - DNA, 25 bp, Homo sapien
tctcttgcaagactagacagggagg

SEQ ID NO: 3804744 - DNA, 25 bp, Homo sapien
gcactagcccagtctaagtcttgaa

SEQ ID NO: 3804745 - DNA, 25 bp, Homo sapien
cttgcctcctttgccgacctgtaaa

SEQ ID NO: 3804746 - DNA, 25 bp, Homo sapien
gaatttcagtaagcatgtgaggtgg

SEQ ID NO: 3804747 - DNA, 25 bp, Homo sapien
tgccacatggatcactctagccttg

SEQ ID NO: 3804748 - DNA, 25 bp, Homo sapien
catgtgttcatactgatgcctgcca

SEQ ID NO: 3804749 - DNA, 25 bp, Homo sapien
agcgctgtggcgtccgcggggatgc

SEQ ID NO: 3804750 - DNA, 25 bp, Homo sapien
cgcggcccgagcagttgacgcggca

SEQ ID NO: 3804751 - DNA, 25 bp, Homo sapien
cgttagggcagcgcgcgcatggccc

SEQ ID NO: 3804752 - DNA, 25 bp, Homo sapien
tgcgcagcgcgggaccgagcgtccg

SEQ ID NO: 3804753 - DNA, 25 bp, Homo sapien
cagaagccccggctgtcctccacct

SEQ ID NO: 3804754 - DNA, 25 bp, Homo sapien
tggaactggacacagctgtccctgc

SEQ ID NO: 3804755 - DNA, 25 bp, Homo sapien
tgtccctgctgagcttcagcagcca

SEQ ID NO: 3804756 - DNA, 25 bp, Homo sapien
gtccctgctgagcttcagcagccag

SEQ ID NO: 3804757 - DNA, 25 bp, Homo sapien
agttccactgctttgcttgaccagc

SEQ ID NO: 3804758 - DNA, 25 bp, Homo sapien
tatacatttttgtctgggcgcgctg

SEQ ID NO: 3804759 - DNA, 25 bp, Homo sapien
cacagccaggtagaattcttcattc

SEQ ID NO: 3804760 - DNA, 25 bp, Homo sapien
gctttgcttgaccagccttaaagac

SEQ ID NO: 3804761 - DNA, 25 bp, Homo sapien
tgggcccatcccacacatttccagc

SEQ ID NO: 3804762 - DNA, 25 bp, Homo sapien
ctgggcccatcccacacatttccag

SEQ ID NO: 3804763 - DNA, 25 bp, Homo sapien
ggcccatcccacacatttccagcat

SEQ ID NO: 3804764 - DNA, 25 bp, Homo sapien
ccctgggcccatcccacacatttcc

SEQ ID NO: 3804765 - DNA, 25 bp, Homo sapien
gagcccttagtaggccagaggccat

SEQ ID NO: 3804766 - DNA, 25 bp, Homo sapien
agggccagagcccttagtaggccag

SEQ ID NO: 3804767 - DNA, 25 bp, Homo sapien
cagagcccttagtaggccagaggcc

SEQ ID NO: 3804768 - DNA, 25 bp, Homo sapien
gccagagcccttagtaggccagagg

SEQ ID NO: 3804769 - DNA, 25 bp, Homo sapien
aggttcgccaggagcccaacgtcca

SEQ ID NO: 3804770 - DNA, 25 bp, Homo sapien
ggttcgccaggagcccaacgtccag

SEQ ID NO: 3804771 - DNA, 25 bp, Homo sapien
tattccttcttctaacgtagaaatc

SEQ ID NO: 3804772 - DNA, 25 bp, Homo sapien
tccttcttctaacgtagaaatcttg

SEQ ID NO: 3804773 - DNA, 25 bp, Homo sapien
aacgtagaaatcttgttgttgctta

SEQ ID NO: 3804774 - DNA, 25 bp, Homo sapien
tcttctaacgtagaaatcttgttgt

SEQ ID NO: 3804775 - DNA, 25 bp, Homo sapien
ctcgggctgcaccacccgcacctgc

SEQ ID NO: 3804776 - DNA, 25 bp, Homo sapien
gctcctccgcccatcgcggcagcca

SEQ ID NO: 3804777 - DNA, 25 bp, Homo sapien
atcgcggcagccacgccaggccaca

SEQ ID NO: 3804778 - DNA, 25 bp, Homo sapien
tgcaccacccgcacctgctgctcct

SEQ ID NO: 3804779 - DNA, 25 bp, Homo sapien
agcagaaggcgctgcaggcctctgg

SEQ ID NO: 3804780 - DNA, 25 bp, Homo sapien
gtcagggaggcaggcgacatactcc

SEQ ID NO: 3804781 - DNA, 25 bp, Homo sapien
cttcgtgggcagctgaaaaggacac

SEQ ID NO: 3804782 - DNA, 25 bp, Homo sapien
acactgctgccacggtgcctgagct

SEQ ID NO: 3804783 - DNA, 25 bp, Homo sapien
ggacaggcaggcgaaggaggcactg

SEQ ID NO: 3804784 - DNA, 25 bp, Homo sapien
ccggagcagagggacaggcaggcga

SEQ ID NO: 3804785 - DNA, 25 bp, Homo sapien
ggcaggcgaaggaggcactggaggg

SEQ ID NO: 3804786 - DNA, 25 bp, Homo sapien
acaggcaggcgaaggaggcactgga

SEQ ID NO: 3804787 - DNA, 25 bp, Homo sapien
agggaagacgtgctggaggagggtg

SEQ ID NO: 3804788 - DNA, 25 bp, Homo sapien
gaggcagggaagacgtgctggagga

SEQ ID NO: 3804789 - DNA, 25 bp, Homo sapien
cagggaagacgtgctggaggagggt

SEQ ID NO: 3804790 - DNA, 25 bp, Homo sapien
ggggaggcagggaagacgtgctgga

SEQ ID NO: 3804791 - DNA, 25 bp, Homo sapien
gatgctgaggtcgaggctctcgtca

SEQ ID NO: 3804792 - DNA, 25 bp, Homo sapien
tctcgtcactctgcaccgaggacgg

SEQ ID NO: 3804793 - DNA, 25 bp, Homo sapien
cccaggcagcacatagcgatgcgag

SEQ ID NO: 3804794 - DNA, 25 bp, Homo sapien
agcacggccgtcacgtgatagcgcc

SEQ ID NO: 3804795 - DNA, 25 bp, Homo sapien
gcgggactgtccaccattgccaggg

SEQ ID NO: 3804796 - DNA, 25 bp, Homo sapien
tccaccaccaggcggtagcagtgcc

SEQ ID NO: 3804797 - DNA, 25 bp, Homo sapien
tctccgtgtccgaggggcagagcgg

SEQ ID NO: 3804798 - DNA, 25 bp, Homo sapien
aggaagcgctgcacggcgggactgt

SEQ ID NO: 3804799 - DNA, 25 bp, Homo sapien
agagatctcccaacctatggcccct

SEQ ID NO: 3804800 - DNA, 25 bp, Homo sapien
tcagagatctcccaacctatggccc

SEQ ID NO: 3804801 - DNA, 25 bp, Homo sapien
agatctcccaacctatggcccctcg

SEQ ID NO: 3804802 - DNA, 25 bp, Homo sapien
gatctcccaacctatggcccctcgg

SEQ ID NO: 3804803 - DNA, 25 bp, Homo sapien
tgcacagtcgagaagccgatccaca

SEQ ID NO: 3804804 - DNA, 25 bp, Homo sapien
ctgcacagtcgagaagccgatccac

SEQ ID NO: 3804805 - DNA, 25 bp, Homo sapien
gcagctcgcagacgtagctgtgcgg

SEQ ID NO: 3804806 - DNA, 25 bp, Homo sapien
tcaggcccctgcctggcccctcgca

SEQ ID NO: 3804807 - DNA, 25 bp, Homo sapien
ggcccctgcctggcccctcgcacac

SEQ ID NO: 3804808 - DNA, 25 bp, Homo sapien
ctcaggcccctgcctggcccctcgc

SEQ ID NO: 3804809 - DNA, 25 bp, Homo sapien
cacagccagcgtctcaggcccctgc

SEQ ID NO: 3804810 - DNA, 25 bp, Homo sapien
caccaggacgaacagactggggacc

SEQ ID NO: 3804811 - DNA, 25 bp, Homo sapien
gacaccaggacgaacagactgggga

SEQ ID NO: 3804812 - DNA, 25 bp, Homo sapien
ccaggacaccaggacgaacagactg

SEQ ID NO: 3804813 - DNA, 25 bp, Homo sapien
ccaggacgaacagactggggaccga

SEQ ID NO: 3804814 - DNA, 25 bp, Homo sapien
tcccacgaggaggttctcggcatcc

SEQ ID NO: 3804815 - DNA, 25 bp, Homo sapien
gctcccacgaggaggttctcggcat

SEQ ID NO: 3804816 - DNA, 25 bp, Homo sapien
gggcgctcccacgaggaggttctcg

SEQ ID NO: 3804817 - DNA, 25 bp, Homo sapien
cacgaggaggttctcggcatcctgc

SEQ ID NO: 3804818 - DNA, 25 bp, Homo sapien
ctgagaggccgtcctgccgtgccag

SEQ ID NO: 3804819 - DNA, 25 bp, Homo sapien
ggccgtcctgccgtgccagaggcat

SEQ ID NO: 3804820 - DNA, 25 bp, Homo sapien
tgagaggccgtcctgccgtgccaga

SEQ ID NO: 3804821 - DNA, 25 bp, Homo sapien
tcctgccgtgccagaggcatcaggg

SEQ ID NO: 3804822 - DNA, 25 bp, Homo sapien
gccgcctcagctccacagaccccat

SEQ ID NO: 3804823 - DNA, 25 bp, Homo sapien
gggccgcctcagctccacagacccc

SEQ ID NO: 3804824 - DNA, 25 bp, Homo sapien
agggggccgcctcagctccacagac

SEQ ID NO: 3804825 - DNA, 25 bp, Homo sapien
gcagggggccgcctcagctccacag

SEQ ID NO: 3804826 - DNA, 25 bp, Homo sapien
aaggcttcacggctcagacgcaggc

SEQ ID NO: 3804827 - DNA, 25 bp, Homo sapien
agacgcaggcccgggaataccatga

SEQ ID NO: 3804828 - DNA, 25 bp, Homo sapien
tgggtcccaaattcggccgtggtga

SEQ ID NO: 3804829 - DNA, 25 bp, Homo sapien
ggcgggccgccggagctcctgggtc

SEQ ID NO: 3804830 - DNA, 25 bp, Homo sapien
aggctcgctgccgttctccggggtc

SEQ ID NO: 3804831 - DNA, 25 bp, Homo sapien
ctgttgtccggggacctgctctcag

SEQ ID NO: 3804832 - DNA, 25 bp, Homo sapien
tctcaggctcgctgccgttctccgg

SEQ ID NO: 3804833 - DNA, 25 bp, Homo sapien
ttgtccggggacctgctctcaggct

SEQ ID NO: 3804834 - DNA, 25 bp, Homo sapien
ggaactctctccatagcgcataggg

SEQ ID NO: 3804835 - DNA, 25 bp, Homo sapien
cgtccagcggcaagcagatgttggc

SEQ ID NO: 3804836 - DNA, 25 bp, Homo sapien
acgtgcagccattggcgcaggcctg

SEQ ID NO: 3804837 - DNA, 25 bp, Homo sapien
caagcagatgttggctccagggcac

SEQ ID NO: 3804838 - DNA, 25 bp, Homo sapien
gcacgacggatgagggtggacacgc

SEQ ID NO: 3804839 - DNA, 25 bp, Homo sapien
ggacacgcagggctccccgcttcgt

SEQ ID NO: 3804840 - DNA, 25 bp, Homo sapien
agggctccccgcttcgtcagccaca

SEQ ID NO: 3804841 - DNA, 25 bp, Homo sapien
cccacagtgctcgtgacaaggacag

SEQ ID NO: 3804842 - DNA, 25 bp, Homo sapien
gcgtcgtgctgcaagccaacgaggt

SEQ ID NO: 3804843 - DNA, 25 bp, Homo sapien
tgttccgtggctgcaagcagccgca

SEQ ID NO: 3804844 - DNA, 25 bp, Homo sapien
cagtgctaccactgagaacagggta

SEQ ID NO: 3804845 - DNA, 25 bp, Homo sapien
caacgaggtcaccagggagcatgag

SEQ ID NO: 3804846 - DNA, 25 bp, Homo sapien
ggctggtggtggagcctcggccata

SEQ ID NO: 3804847 - DNA, 25 bp, Homo sapien
ggtggtggagcctcggccatactca

SEQ ID NO: 3804848 - DNA, 25 bp, Homo sapien
ctggtggtggagcctcggccatact

SEQ ID NO: 3804849 - DNA, 25 bp, Homo sapien
tggtggtggagcctcggccatactc

SEQ ID NO: 3804850 - DNA, 25 bp, Homo sapien
tgtcagagccgtgactttccaggaa

SEQ ID NO: 3804851 - DNA, 25 bp, Homo sapien
tctgtaaagcaaacctagtaccagc

SEQ ID NO: 3804852 - DNA, 25 bp, Homo sapien
tgtggaggactctgcccttagcctg

SEQ ID NO: 3804853 - DNA, 25 bp, Homo sapien
tagtaccagctacaaagagtccacc

SEQ ID NO: 3804854 - DNA, 25 bp, Homo sapien
cacacctcccgtcgggctggagagt

SEQ ID NO: 3804855 - DNA, 25 bp, Homo sapien
gaccgccgcgctctgataaatgaca

SEQ ID NO: 3804856 - DNA, 25 bp, Homo sapien
tctggaaggtcagggactgcttgtc

SEQ ID NO: 3804857 - DNA, 25 bp, Homo sapien
gactgcttgtcgttgatggtccacc

SEQ ID NO: 3804858 - DNA, 25 bp, Homo sapien
cattgaagaccacgttctggaaggt

SEQ ID NO: 3804859 - DNA, 25 bp, Homo sapien
agagcagaaggcagaggtgaaggtg

SEQ ID NO: 3804860 - DNA, 25 bp, Homo sapien
agaaggcagaggtgaaggtggagcc

SEQ ID NO: 3804861 - DNA, 25 bp, Homo sapien
ggcagaggtgaaggtggagcccgcc

SEQ ID NO: 3804862 - DNA, 25 bp, Homo sapien
cagaggtgaaggtggagcccgcccc

SEQ ID NO: 3804863 - DNA, 25 bp, Homo sapien
ttgtagttcacggtgacgttgctca

SEQ ID NO: 3804864 - DNA, 25 bp, Homo sapien
cacggtgacgttgctcacgtggttg

SEQ ID NO: 3804865 - DNA, 25 bp, Homo sapien
ttgctcacgtggttggaggccgtca

SEQ ID NO: 3804866 - DNA, 25 bp, Homo sapien
tagttcacggtgacgttgctcacgt

SEQ ID NO: 3804867 - DNA, 25 bp, Homo sapien
tgacattgtgctccaccagcacctg

SEQ ID NO: 3804868 - DNA, 25 bp, Homo sapien
gacattgtgctccaccagcacctgg

SEQ ID NO: 3804869 - DNA, 25 bp, Homo sapien
acattgtgctccaccagcacctggg

SEQ ID NO: 3804870 - DNA, 25 bp, Homo sapien
ggttctcgaaggcattagatgccag

SEQ ID NO: 3804871 - DNA, 25 bp, Homo sapien
gttctcgaaggcattagatgccagc

SEQ ID NO: 3804872 - DNA, 25 bp, Homo sapien
ttctcgaaggcattagatgccagca

SEQ ID NO: 3804873 - DNA, 25 bp, Homo sapien
agggaggcgcacacgctcacagagg

SEQ ID NO: 3804874 - DNA, 25 bp, Homo sapien
tcagggaggcgcacacgctcacaga

SEQ ID NO: 3804875 - DNA, 25 bp, Homo sapien
aggcgcacacgctcacagagggcag

SEQ ID NO: 3804876 - DNA, 25 bp, Homo sapien
aggccccagtcagggaggcgcacac

SEQ ID NO: 3804877 - DNA, 25 bp, Homo sapien
acctgggcggcggaagggcatacac

SEQ ID NO: 3804878 - DNA, 25 bp, Homo sapien
ccaggatactcatccggtttgccac

SEQ ID NO: 3804879 - DNA, 25 bp, Homo sapien
ttccaacctgggcggcggaagggca

SEQ ID NO: 3804880 - DNA, 25 bp, Homo sapien
gatactcatccggtttgccaccttc

SEQ ID NO: 3804881 - DNA, 25 bp, Homo sapien
ttacctccaacacaggtctatttgg

SEQ ID NO: 3804882 - DNA, 25 bp, Homo sapien
gttacctccaacacaggtctatttg

SEQ ID NO: 3804883 - DNA, 25 bp, Homo sapien
tggggttacctccaacacaggtcta

SEQ ID NO: 3804884 - DNA, 25 bp, Homo sapien
gagccgctgctgcaattgaggcagc

SEQ ID NO: 3804885 - DNA, 25 bp, Homo sapien
tgcggctcacttcgtacacggcctg

SEQ ID NO: 3804886 - DNA, 25 bp, Homo sapien
cgtacacggcctgtgccttgcagga

SEQ ID NO: 3804887 - DNA, 25 bp, Homo sapien
tcacttcgtacacggcctgtgcctt

SEQ ID NO: 3804888 - DNA, 25 bp, Homo sapien
gtcttgttgctgaacgtacgtgcag

SEQ ID NO: 3804889 - DNA, 25 bp, Homo sapien
tgctgaacgtacgtgcagcccaccg

SEQ ID NO: 3804890 - DNA, 25 bp, Homo sapien
tcttgttgctgaacgtacgtgcagc

SEQ ID NO: 3804891 - DNA, 25 bp, Homo sapien
tgttgctgaacgtacgtgcagccca

SEQ ID NO: 3804892 - DNA, 25 bp, Homo sapien
tggatgtggtggtctcatccagcac

SEQ ID NO: 3804893 - DNA, 25 bp, Homo sapien
agagcggcccagcaccgtcagcgtg

SEQ ID NO: 3804894 - DNA, 25 bp, Homo sapien
ccagcaccgtcagcgtgaaggtgta

SEQ ID NO: 3804895 - DNA, 25 bp, Homo sapien
ggcccagcaccgtcagcgtgaaggt

SEQ ID NO: 3804896 - DNA, 25 bp, Homo sapien
gcaccgtcagcgtgaaggtgtatcc

SEQ ID NO: 3804897 - DNA, 25 bp, Homo sapien
tgcaccttggtggtgagagcgtgca

SEQ ID NO: 3804898 - DNA, 25 bp, Homo sapien
agtgcaccttggtggtgagagcgtg

SEQ ID NO: 3804899 - DNA, 25 bp, Homo sapien
agagcgtgcacagcgcccagtggga

SEQ ID NO: 3804900 - DNA, 25 bp, Homo sapien
ccatgcattcgaagtgcaccttggt

SEQ ID NO: 3804901 - DNA, 25 bp, Homo sapien
acaccagcggggcgccagcatcctc

SEQ ID NO: 3804902 - DNA, 25 bp, Homo sapien
cagcggggcgccagcatcctccgcg

SEQ ID NO: 3804903 - DNA, 25 bp, Homo sapien
accagcggggcgccagcatcctccg

SEQ ID NO: 3804904 - DNA, 25 bp, Homo sapien
tacaccagcggggcgccagcatcct

SEQ ID NO: 3804905 - DNA, 25 bp, Homo sapien
aggcccacctcgaagtgtggcctga

SEQ ID NO: 3804906 - DNA, 25 bp, Homo sapien
ctgttgagggcgaccacagcggctc

SEQ ID NO: 3804907 - DNA, 25 bp, Homo sapien
ttgagggcgaccacagcggctccca

SEQ ID NO: 3804908 - DNA, 25 bp, Homo sapien
cccacctcgaagtgtggcctgaaac

SEQ ID NO: 3804909 - DNA, 25 bp, Homo sapien
gagcacactagcggtgagcccgtgc

SEQ ID NO: 3804910 - DNA, 25 bp, Homo sapien
gggagcacactagcggtgagcccgt

SEQ ID NO: 3804911 - DNA, 25 bp, Homo sapien
cacactagcggtgagcccgtgcagc

SEQ ID NO: 3804912 - DNA, 25 bp, Homo sapien
agcacactagcggtgagcccgtgca

SEQ ID NO: 3804913 - DNA, 25 bp, Homo sapien
ctgtttcttcatgggcaaaacaggg

SEQ ID NO: 3804914 - DNA, 25 bp, Homo sapien
tcgtgcttgggctctgccgccacgt

SEQ ID NO: 3804915 - DNA, 25 bp, Homo sapien
cagcgatctgctggatgtcatccac

SEQ ID NO: 3804916 - DNA, 25 bp, Homo sapien
tccgtgatgttcttgcgtatctggg

SEQ ID NO: 3804917 - DNA, 25 bp, Homo sapien
gatgttcttgcgtatctgggctcgg

SEQ ID NO: 3804918 - DNA, 25 bp, Homo sapien
tgttgaggatgctgtctccgatggc

SEQ ID NO: 3804919 - DNA, 25 bp, Homo sapien
tcaggcacgagcggcatacgagctc

SEQ ID NO: 3804920 - DNA, 25 bp, Homo sapien
ctccgatggcggtgggcgtcacggt

SEQ ID NO: 3804921 - DNA, 25 bp, Homo sapien
tcacggtgcccgcggtggtctctgc

SEQ ID NO: 3804922 - DNA, 25 bp, Homo sapien
gttgtaggcctgggacgccaccatc

SEQ ID NO: 3804923 - DNA, 25 bp, Homo sapien
ctcctcgttgagcacgcgggagcgc

SEQ ID NO: 3804924 - DNA, 25 bp, Homo sapien
ggctcctcgttgagcacgcgggagc

SEQ ID NO: 3804925 - DNA, 25 bp, Homo sapien
gctcctcgttgagcacgcgggagcg

SEQ ID NO: 3804926 - DNA, 25 bp, Homo sapien
gggctcctcgttgagcacgcgggag

SEQ ID NO: 3804927 - DNA, 25 bp, Homo sapien
gctccgcgggtccgagcgcttgccc

SEQ ID NO: 3804928 - DNA, 25 bp, Homo sapien
taggggatggagaagtggcagccag

SEQ ID NO: 3804929 - DNA, 25 bp, Homo sapien
ggatggagaagtggcagccaggccc

SEQ ID NO: 3804930 - DNA, 25 bp, Homo sapien
gatggagaagtggcagccaggccct

SEQ ID NO: 3804931 - DNA, 25 bp, Homo sapien
ggggatggagaagtggcagccaggc

SEQ ID NO: 3804932 - DNA, 25 bp, Homo sapien
gaggttggccggggccctgctgaaa

SEQ ID NO: 3804933 - DNA, 25 bp, Homo sapien
tgaggttggccggggccctgctgaa

SEQ ID NO: 3804934 - DNA, 25 bp, Homo sapien
ggttggccggggccctgctgaaagc

SEQ ID NO: 3804935 - DNA, 25 bp, Homo sapien
ctgaggttggccggggccctgctga

SEQ ID NO: 3804936 - DNA, 25 bp, Homo sapien
gaaagggattggagtccaccagaaa

SEQ ID NO: 3804937 - DNA, 25 bp, Homo sapien
ggtgtagttgctgatatagccaaag

SEQ ID NO: 3804938 - DNA, 25 bp, Homo sapien
aagggattggagtccaccagaaaga

SEQ ID NO: 3804939 - DNA, 25 bp, Homo sapien
tggagacggtgtagttgctgatata

SEQ ID NO: 3804940 - DNA, 25 bp, Homo sapien
tgaggccagccgctcgatggggatc

SEQ ID NO: 3804941 - DNA, 25 bp, Homo sapien
cagccgctcgatggggatctgggcg

SEQ ID NO: 3804942 - DNA, 25 bp, Homo sapien
tcgatggggatctgggcgccggcct

SEQ ID NO: 3804943 - DNA, 25 bp, Homo sapien
cgctcgatggggatctgggcgccgg

SEQ ID NO: 3804944 - DNA, 25 bp, Homo sapien
gccccgggcagcccagtccgagttg

SEQ ID NO: 3804945 - DNA, 25 bp, Homo sapien
cccgggcagcccagtccgagttgtt

SEQ ID NO: 3804946 - DNA, 25 bp, Homo sapien
gcagcccagtccgagttgttgggca

SEQ ID NO: 3804947 - DNA, 25 bp, Homo sapien
cagcccagtccgagttgttgggcac

SEQ ID NO: 3804948 - DNA, 25 bp, Homo sapien
cgtccagcagcgtatagttgagctg

SEQ ID NO: 3804949 - DNA, 25 bp, Homo sapien
cagcagcgtatagttgagctgcaga

SEQ ID NO: 3804950 - DNA, 25 bp, Homo sapien
accacagcaccgacggaggcctggg

SEQ ID NO: 3804951 - DNA, 25 bp, Homo sapien
ggtgaccacagcaccgacggaggcc

SEQ ID NO: 3804952 - DNA, 25 bp, Homo sapien
aggccagggggccgcgtgtgcccca

SEQ ID NO: 3804953 - DNA, 25 bp, Homo sapien
ggccagggggccgcgtgtgccccaa

SEQ ID NO: 3804954 - DNA, 25 bp, Homo sapien
agaacaaggccagggggccgcgtgt

SEQ ID NO: 3804955 - DNA, 25 bp, Homo sapien
ccaagaacaaggccagggggccgcg

SEQ ID NO: 3804956 - DNA, 25 bp, Homo sapien
ttcaccagagacacccatggaagcc

SEQ ID NO: 3804957 - DNA, 25 bp, Homo sapien
atttcaccagagacacccatggaag

SEQ ID NO: 3804958 - DNA, 25 bp, Homo sapien
aaatttcaccagagacacccatgga

SEQ ID NO: 3804959 - DNA, 25 bp, Homo sapien
agcaaatttcaccagagacacccat

SEQ ID NO: 3804960 - DNA, 25 bp, Homo sapien
gaaaggccataggagcctctgcacc

SEQ ID NO: 3804961 - DNA, 25 bp, Homo sapien
tgaaaggccataggagcctctgcac

SEQ ID NO: 3804962 - DNA, 25 bp, Homo sapien
cctgagcccaccctctgccatgggc

SEQ ID NO: 3804963 - DNA, 25 bp, Homo sapien
ccctcctgagcccaccctctgccat

SEQ ID NO: 3804964 - DNA, 25 bp, Homo sapien
ccacgatggccctcctgagcccacc

SEQ ID NO: 3804965 - DNA, 25 bp, Homo sapien
ctcctgagcccaccctctgccatgg

SEQ ID NO: 3804966 - DNA, 25 bp, Homo sapien
acgcctgccgggaagctcaaccacc

SEQ ID NO: 3804967 - DNA, 25 bp, Homo sapien
ggtcacacgcctgccgggaagctca

SEQ ID NO: 3804968 - DNA, 25 bp, Homo sapien
gcagaacgcgcaggtcacacgcctg

SEQ ID NO: 3804969 - DNA, 25 bp, Homo sapien
ctggggcagaacgcgcaggtcacac

SEQ ID NO: 3804970 - DNA, 25 bp, Homo sapien
ctgggcggatcctcctgctagccga

SEQ ID NO: 3804971 - DNA, 25 bp, Homo sapien
tctgggcggatcctcctgctagccg

SEQ ID NO: 3804972 - DNA, 25 bp, Homo sapien
aagtactggcacagggacgtgtaca

SEQ ID NO: 3804973 - DNA, 25 bp, Homo sapien
gtgaggtggcgggtgaggcagacgg

SEQ ID NO: 3804974 - DNA, 25 bp, Homo sapien
ggcagacggcctggcggggcgaggt

SEQ ID NO: 3804975 - DNA, 25 bp, Homo sapien
tcctcctcgctgaagtactggcaca

SEQ ID NO: 3804976 - DNA, 25 bp, Homo sapien
caggccctcctcgactctgcagagg

SEQ ID NO: 3804977 - DNA, 25 bp, Homo sapien
ggccctcctcgactctgcagaggct

SEQ ID NO: 3804978 - DNA, 25 bp, Homo sapien
ccaggccctcctcgactctgcagag

SEQ ID NO: 3804979 - DNA, 25 bp, Homo sapien
aggccctcctcgactctgcagaggc

SEQ ID NO: 3804980 - DNA, 25 bp, Homo sapien
gcacacagcacatgtcagcatgacg

SEQ ID NO: 3804981 - DNA, 25 bp, Homo sapien
tgtcttgacgaggatctcgtacttg

SEQ ID NO: 3804982 - DNA, 25 bp, Homo sapien
tgacgatgtagtttacatccgctgt

SEQ ID NO: 3804983 - DNA, 25 bp, Homo sapien
acgaggatctcgtacttgaagcggc

SEQ ID NO: 3804984 - DNA, 25 bp, Homo sapien
catgatgcccacgtgggccgtggta

SEQ ID NO: 3804985 - DNA, 25 bp, Homo sapien
gctgtccaccccatacagcatgatg

SEQ ID NO: 3804986 - DNA, 25 bp, Homo sapien
tgtcgtgccacactcggatcttcca

SEQ ID NO: 3804987 - DNA, 25 bp, Homo sapien
tgttgcggtggaaggctctgtcgcc

SEQ ID NO: 3804988 - DNA, 25 bp, Homo sapien
aagccagtcattgaccaggaagaag

SEQ ID NO: 3804989 - DNA, 25 bp, Homo sapien
aaagccagtcattgaccaggaagaa

SEQ ID NO: 3804990 - DNA, 25 bp, Homo sapien
tctccaccgaaagccagtcattgac

SEQ ID NO: 3804991 - DNA, 25 bp, Homo sapien
caccgaaagccagtcattgaccagg

SEQ ID NO: 3804992 - DNA, 25 bp, Homo sapien
cagatgaggagaacgcagcaggtgg

SEQ ID NO: 3804993 - DNA, 25 bp, Homo sapien
agccaccagcaggcgccggaagcgc

SEQ ID NO: 3804994 - DNA, 25 bp, Homo sapien
aacagccccgtaccacacggcgttg

SEQ ID NO: 3804995 - DNA, 25 bp, Homo sapien
accacacggcgttggcgcccaggaa

SEQ ID NO: 3804996 - DNA, 25 bp, Homo sapien
aggagaggaggccacacaggtgagg

SEQ ID NO: 3804997 - DNA, 25 bp, Homo sapien
tggaggagaggaggccacacaggtg

SEQ ID NO: 3804998 - DNA, 25 bp, Homo sapien
gtggaggagaggaggccacacaggt

SEQ ID NO: 3804999 - DNA, 25 bp, Homo sapien
ctgtgtggaggagaggaggccacac

SEQ ID NO: 3805000 - DNA, 25 bp, Homo sapien
cagcgactgtgtcgacgctcagcgg

SEQ ID NO: 3805001 - DNA, 25 bp, Homo sapien
tggacaccaggccaacagcgactgt

SEQ ID NO: 3805002 - DNA, 25 bp, Homo sapien
gggatagacaaccacgctggacacc

SEQ ID NO: 3805003 - DNA, 25 bp, Homo sapien
tggccaggtagacgggatagacaac

SEQ ID NO: 3805004 - DNA, 25 bp, Homo sapien
tcttctgagttatctggcgtgctgc

SEQ ID NO: 3805005 - DNA, 25 bp, Homo sapien
cgtctgcttagcgaagtgccctcgt

SEQ ID NO: 3805006 - DNA, 25 bp, Homo sapien
tgcagcactggaaagtggcggccct

SEQ ID NO: 3805007 - DNA, 25 bp, Homo sapien
tcaagtgtgttgacccttcccgagc

SEQ ID NO: 3805008 - DNA, 25 bp, Homo sapien
gtccaggcagctgtcgacgtccagc

SEQ ID NO: 3805009 - DNA, 25 bp, Homo sapien
gagctgtccagcacggatgagtcca

SEQ ID NO: 3805010 - DNA, 25 bp, Homo sapien
aaggagctgtccagcacggatgagt

SEQ ID NO: 3805011 - DNA, 25 bp, Homo sapien
gagtccaggcagctgtcgacgtcca

SEQ ID NO: 3805012 - DNA, 25 bp, Homo sapien
gtccaagctgcgccaaggcggcagg

SEQ ID NO: 3805013 - DNA, 25 bp, Homo sapien
tccaagctgcgccaaggcggcagga

SEQ ID NO: 3805014 - DNA, 25 bp, Homo sapien
agtccaagctgcgccaaggcggcag

SEQ ID NO: 3805015 - DNA, 25 bp, Homo sapien
gagtccaagctgcgccaaggcggca

SEQ ID NO: 3805016 - DNA, 25 bp, Homo sapien
aagtcactcttcatctgtccagcaa

SEQ ID NO: 3805017 - DNA, 25 bp, Homo sapien
gaaacaagtcactcttcatctgtcc

SEQ ID NO: 3805018 - DNA, 25 bp, Homo sapien
tccagaaacaagtcactcttcatct

SEQ ID NO: 3805019 - DNA, 25 bp, Homo sapien
catccagaaacaagtcactcttcat

SEQ ID NO: 3805020 - DNA, 25 bp, Homo sapien
caggtggcgcgggtcagcaaggtac

SEQ ID NO: 3805021 - DNA, 25 bp, Homo sapien
tccagtcacgcacggacaccctggg

SEQ ID NO: 3805022 - DNA, 25 bp, Homo sapien
ccccgtccagtcacgcacggacacc

SEQ ID NO: 3805023 - DNA, 25 bp, Homo sapien
ggcgcgggtcagcaaggtaccaggg

SEQ ID NO: 3805024 - DNA, 25 bp, Homo sapien
gcgttccctcgctggagggccagca

SEQ ID NO: 3805025 - DNA, 25 bp, Homo sapien
ggccaactgggcgttccctcgctgg

SEQ ID NO: 3805026 - DNA, 25 bp, Homo sapien
agcaggtccggccaactgggcgttc

SEQ ID NO: 3805027 - DNA, 25 bp, Homo sapien
caactgggcgttccctcgctggagg

SEQ ID NO: 3805028 - DNA, 25 bp, Homo sapien
aagaagaagccctagatttcggttg

SEQ ID NO: 3805029 - DNA, 25 bp, Homo sapien
gggtcgtgccgcagattgctaccca

SEQ ID NO: 3805030 - DNA, 25 bp, Homo sapien
tgtaaaaggagagacccagtaagtg

SEQ ID NO: 3805031 - DNA, 25 bp, Homo sapien
tagatttcggttgtgttggttgtaa

SEQ ID NO: 3805032 - DNA, 25 bp, Homo sapien
acatccatgtagccatccgtccatc

SEQ ID NO: 3805033 - DNA, 25 bp, Homo sapien
aggtcccgatagtaaaccatctcca

SEQ ID NO: 3805034 - DNA, 25 bp, Homo sapien
gaaggtcccgatagtaaaccatctc

SEQ ID NO: 3805035 - DNA, 25 bp, Homo sapien
agcctccgctcagccattcatatcc

SEQ ID NO: 3805036 - DNA, 25 bp, Homo sapien
tcagccattcatatcctaagcaaca

SEQ ID NO: 3805037 - DNA, 25 bp, Homo sapien
cattcatatcctaagcaacaaaaca

SEQ ID NO: 3805038 - DNA, 25 bp, Homo sapien
tccgctcagccattcatatcctaag

SEQ ID NO: 3805039 - DNA, 25 bp, Homo sapien
ataaaaaacaaatgatggcaggatg

SEQ ID NO: 3805040 - DNA, 25 bp, Homo sapien
taaaaaacaaatgatggcaggatgg

SEQ ID NO: 3805041 - DNA, 25 bp, Homo sapien
aaaaaacaaatgatggcaggatggc

SEQ ID NO: 3805042 - DNA, 25 bp, Homo sapien
tgatttctggtcctccccaaccagc

SEQ ID NO: 3805043 - DNA, 25 bp, Homo sapien
gagctcccagggttcctcaaggtca

SEQ ID NO: 3805044 - DNA, 25 bp, Homo sapien
tctgggtgctccttccttcctgagc

SEQ ID NO: 3805045 - DNA, 25 bp, Homo sapien
agctccctgtccctgcttctgggtg

SEQ ID NO: 3805046 - DNA, 25 bp, Homo sapien
cacccatctactcacacaggtggac

SEQ ID NO: 3805047 - DNA, 25 bp, Homo sapien
cccatctactcacacaggtggactg

SEQ ID NO: 3805048 - DNA, 25 bp, Homo sapien
acagcacccatctactcacacaggt

SEQ ID NO: 3805049 - DNA, 25 bp, Homo sapien
ccatctactcacacaggtggactga

SEQ ID NO: 3805050 - DNA, 25 bp, Homo sapien
tcaagacatggagactatcctggcg

SEQ ID NO: 3805051 - DNA, 25 bp, Homo sapien
cttaaggttatatattttggccagg

SEQ ID NO: 3805052 - DNA, 25 bp, Homo sapien
acttaaggttatatattttggccag

SEQ ID NO: 3805053 - DNA, 25 bp, Homo sapien
catggagactatcctggcgaacacg

SEQ ID NO: 3805054 - DNA, 25 bp, Homo sapien
cagatatcaccgtgggattccactg

SEQ ID NO: 3805055 - DNA, 25 bp, Homo sapien
tccctcagatatcaccgtgggattc

SEQ ID NO: 3805056 - DNA, 25 bp, Homo sapien
taaccacatccctcagatatcaccg

SEQ ID NO: 3805057 - DNA, 25 bp, Homo sapien
cacatccctcagatatcaccgtggg

SEQ ID NO: 3805058 - DNA, 25 bp, Homo sapien
atttataacttctcagaaacacagt

SEQ ID NO: 3805059 - DNA, 25 bp, Homo sapien
agagggagatggcaaatttataact

SEQ ID NO: 3805060 - DNA, 25 bp, Homo sapien
cacagtaatgataagtaaccaagga

SEQ ID NO: 3805061 - DNA, 25 bp, Homo sapien
acacagtaatgataagtaaccaagg

SEQ ID NO: 3805062 - DNA, 25 bp, Homo sapien
cctctacagaaagttagtatactca

SEQ ID NO: 3805063 - DNA, 25 bp, Homo sapien
ctctacagaaagttagtatactcac

SEQ ID NO: 3805064 - DNA, 25 bp, Homo sapien
gtatacctctacagaaagttagtat

SEQ ID NO: 3805065 - DNA, 25 bp, Homo sapien
tacctctacagaaagttagtatact

SEQ ID NO: 3805066 - DNA, 25 bp, Homo sapien
tctgttcaggactaagtggcataga

SEQ ID NO: 3805067 - DNA, 25 bp, Homo sapien
catcatgagacgcagtgcagttctg

SEQ ID NO: 3805068 - DNA, 25 bp, Homo sapien
accttccggcagtttgtcacctcgt

SEQ ID NO: 3805069 - DNA, 25 bp, Homo sapien
cattgattctcttggagggcagttc

SEQ ID NO: 3805070 - DNA, 25 bp, Homo sapien
tccattttgagacgggaagatagtc

SEQ ID NO: 3805071 - DNA, 25 bp, Homo sapien
ccatcatgtccattttgagacggga

SEQ ID NO: 3805072 - DNA, 25 bp, Homo sapien
tttgagacgggaagatagtcttcag

SEQ ID NO: 3805073 - DNA, 25 bp, Homo sapien
tcatgtccattttgagacgggaaga

SEQ ID NO: 3805074 - DNA, 25 bp, Homo sapien
tagctcgaactttggtttccacctg

SEQ ID NO: 3805075 - DNA, 25 bp, Homo sapien
cttttgttgtcaccttcatcttacg

SEQ ID NO: 3805076 - DNA, 25 bp, Homo sapien
cacctgtctccataaagtaaagatg

SEQ ID NO: 3805077 - DNA, 25 bp, Homo sapien
agtaaagatgtcttccaggacaatt

SEQ ID NO: 3805078 - DNA, 25 bp, Homo sapien
atagaggtggacaggaaataccctg

SEQ ID NO: 3805079 - DNA, 25 bp, Homo sapien
actggctctggttgagacccagaag

SEQ ID NO: 3805080 - DNA, 25 bp, Homo sapien
gctctggttgagacccagaagagtc

SEQ ID NO: 3805081 - DNA, 25 bp, Homo sapien
catcagaatagaggtggacaggaaa

SEQ ID NO: 3805082 - DNA, 25 bp, Homo sapien
aattagaaatgatcggaatggctcc

SEQ ID NO: 3805083 - DNA, 25 bp, Homo sapien
tgatcggaatggctcctaagtcagg

SEQ ID NO: 3805084 - DNA, 25 bp, Homo sapien
tctattgaattagaaatgatcggaa

SEQ ID NO: 3805085 - DNA, 25 bp, Homo sapien
aaatgatcggaatggctcctaagtc

SEQ ID NO: 3805086 - DNA, 25 bp, Homo sapien
tctccgtgctcacgttctttcatgc

SEQ ID NO: 3805087 - DNA, 25 bp, Homo sapien
tttctccgtgctcacgttctttcat

SEQ ID NO: 3805088 - DNA, 25 bp, Homo sapien
tccttttctccgtgctcacgttctt

SEQ ID NO: 3805089 - DNA, 25 bp, Homo sapien
cctctccttttctccgtgctcacgt

SEQ ID NO: 3805090 - DNA, 25 bp, Homo sapien
tctgagatgatagtttccttcccca

SEQ ID NO: 3805091 - DNA, 25 bp, Homo sapien
aaactgttgctatattgattcctcc

SEQ ID NO: 3805092 - DNA, 25 bp, Homo sapien
agtatatccctaattcatccttcat

SEQ ID NO: 3805093 - DNA, 25 bp, Homo sapien
gcttactgcctgctgacttctgaga

SEQ ID NO: 3805094 - DNA, 25 bp, Homo sapien
ttcatcagataaagcaccactttca

SEQ ID NO: 3805095 - DNA, 25 bp, Homo sapien
tgattttaaataatctgccatgttt

SEQ ID NO: 3805096 - DNA, 25 bp, Homo sapien
gataaagcaccactttcaggatgat

SEQ ID NO: 3805097 - DNA, 25 bp, Homo sapien
tatggattacaatcactttcatcag

SEQ ID NO: 3805098 - DNA, 25 bp, Homo sapien
cgccgcaacgcttgcgcacgttgaa

SEQ ID NO: 3805099 - DNA, 25 bp, Homo sapien
tgcatctgtagtagtcctctgcccg

SEQ ID NO: 3805100 - DNA, 25 bp, Homo sapien
tttgcatctgtagtagtcctctgcc

SEQ ID NO: 3805101 - DNA, 25 bp, Homo sapien
cgcttgcgcacgttgaaacatttcc

SEQ ID NO: 3805102 - DNA, 25 bp, Homo sapien
agagagtctaagggccgtggcatca

SEQ ID NO: 3805103 - DNA, 25 bp, Homo sapien
ctgcatcagcactgaactatcctgc

SEQ ID NO: 3805104 - DNA, 25 bp, Homo sapien
cagcactgaactatcctgcaactgc

SEQ ID NO: 3805105 - DNA, 25 bp, Homo sapien
aatgttgagagagtctaagggccgt

SEQ ID NO: 3805106 - DNA, 25 bp, Homo sapien
caaagaggctttcttgcagaagggg

SEQ ID NO: 3805107 - DNA, 25 bp, Homo sapien
ccggttgcaaagaggctttcttgca

SEQ ID NO: 3805108 - DNA, 25 bp, Homo sapien
aagaggctttcttgcagaaggggtg

SEQ ID NO: 3805109 - DNA, 25 bp, Homo sapien
gaggctttcttgcagaaggggtgat

SEQ ID NO: 3805110 - DNA, 25 bp, Homo sapien
atttggaattgtccctgtgggtaat

SEQ ID NO: 3805111 - DNA, 25 bp, Homo sapien
ttgtccctgtgggtaataagttaca

SEQ ID NO: 3805112 - DNA, 25 bp, Homo sapien
ggtaataagttacattcactcttca

SEQ ID NO: 3805113 - DNA, 25 bp, Homo sapien
cctgtgggtaataagttacattcac

SEQ ID NO: 3805114 - DNA, 25 bp, Homo sapien
ttcactcccaggtaataccaaattg

SEQ ID NO: 3805115 - DNA, 25 bp, Homo sapien
tcactcccaggtaataccaaattgt

SEQ ID NO: 3805116 - DNA, 25 bp, Homo sapien
ctcccaggtaataccaaattgtaag

SEQ ID NO: 3805117 - DNA, 25 bp, Homo sapien
cactcccaggtaataccaaattgta

SEQ ID NO: 3805118 - DNA, 25 bp, Homo sapien
atgttttccaggccttttatgttct

SEQ ID NO: 3805119 - DNA, 25 bp, Homo sapien
tgttttccaggccttttatgttctg

SEQ ID NO: 3805120 - DNA, 25 bp, Homo sapien
acccttccactgagtactgccgaca

SEQ ID NO: 3805121 - DNA, 25 bp, Homo sapien
tcacccttccactgagtactgccga

SEQ ID NO: 3805122 - DNA, 25 bp, Homo sapien
cccttccactgagtactgccgacag

SEQ ID NO: 3805123 - DNA, 25 bp, Homo sapien
cacccttccactgagtactgccgac

SEQ ID NO: 3805124 - DNA, 25 bp, Homo sapien
tgttgctggtgatagatttttgcac

SEQ ID NO: 3805125 - DNA, 25 bp, Homo sapien
ttctgttgctggtgatagatttttg

SEQ ID NO: 3805126 - DNA, 25 bp, Homo sapien
tctgttgctggtgatagatttttgc

SEQ ID NO: 3805127 - DNA, 25 bp, Homo sapien
tgctggtgatagatttttgcacctt

SEQ ID NO: 3805128 - DNA, 25 bp, Homo sapien
atggacaaaattaccgccaccaaca

SEQ ID NO: 3805129 - DNA, 25 bp, Homo sapien
tggacaaaattaccgccaccaacac

SEQ ID NO: 3805130 - DNA, 25 bp, Homo sapien
atcctgaagaatgacgatgctccac

SEQ ID NO: 3805131 - DNA, 25 bp, Homo sapien
ctgaagaatgacgatgctccactgc

SEQ ID NO: 3805132 - DNA, 25 bp, Homo sapien
aagaatgacgatgctccactgccgc

SEQ ID NO: 3805133 - DNA, 25 bp, Homo sapien
aatgacgatgctccactgccgccat

SEQ ID NO: 3805134 - DNA, 25 bp, Homo sapien
gaggctcagggagttatcaattata

SEQ ID NO: 3805135 - DNA, 25 bp, Homo sapien
attatagaatgttgttgagttggag

SEQ ID NO: 3805136 - DNA, 25 bp, Homo sapien
cagggagttatcaattatagaatgt

SEQ ID NO: 3805137 - DNA, 25 bp, Homo sapien
tcggaaggtgtcttgaggctcaggg

SEQ ID NO: 3805138 - DNA, 25 bp, Homo sapien
gattatcatccgctgagggtagagc

SEQ ID NO: 3805139 - DNA, 25 bp, Homo sapien
atcatccgctgagggtagagctgag

SEQ ID NO: 3805140 - DNA, 25 bp, Homo sapien
cactcggcaggtgtcttgagattat

SEQ ID NO: 3805141 - DNA, 25 bp, Homo sapien
aggggatagagcaggcactcggcag

SEQ ID NO: 3805142 - DNA, 25 bp, Homo sapien
tgagcagacacactcaggaggtgtc

SEQ ID NO: 3805143 - DNA, 25 bp, Homo sapien
gacacactcaggaggtgtcttgaga

SEQ ID NO: 3805144 - DNA, 25 bp, Homo sapien
gattatcatccgctgagggtggagc

SEQ ID NO: 3805145 - DNA, 25 bp, Homo sapien
gaaggggagtgagcagacacactca

SEQ ID NO: 3805146 - DNA, 25 bp, Homo sapien
tcccactgtgggaccacaaccaggt

SEQ ID NO: 3805147 - DNA, 25 bp, Homo sapien
agaagcaggctcactaccaggctac

SEQ ID NO: 3805148 - DNA, 25 bp, Homo sapien
tctcctgttctgaacccaacagggt

SEQ ID NO: 3805149 - DNA, 25 bp, Homo sapien
tctgaacccaacagggtggtcccac

SEQ ID NO: 3805150 - DNA, 25 bp, Homo sapien
ggcccatcccacacatttccagcat

SEQ ID NO: 3805151 - DNA, 25 bp, Homo sapien
ctgggcccatcccacacatttccag

SEQ ID NO: 3805152 - DNA, 25 bp, Homo sapien
tgggcccatcccacacatttccagc

SEQ ID NO: 3805153 - DNA, 25 bp, Homo sapien
ccctgggcccatcccacacatttcc

SEQ ID NO: 3805154 - DNA, 25 bp, Homo sapien
gccagagcccttagtaggccagagg

SEQ ID NO: 3805155 - DNA, 25 bp, Homo sapien
gagcccttagtaggccagaggccat

SEQ ID NO: 3805156 - DNA, 25 bp, Homo sapien
cagagcccttagtaggccagaggcc

SEQ ID NO: 3805157 - DNA, 25 bp, Homo sapien
agggccagagcccttagtaggccag

SEQ ID NO: 3805158 - DNA, 25 bp, Homo sapien
ggttcgccaggagcccaacgtccag

SEQ ID NO: 3805159 - DNA, 25 bp, Homo sapien
aggttcgccaggagcccaacgtcca

SEQ ID NO: 3805160 - DNA, 25 bp, Homo sapien
tattccttcttctaacgtagaaatc

SEQ ID NO: 3805161 - DNA, 25 bp, Homo sapien
tccttcttctaacgtagaaatcttg

SEQ ID NO: 3805162 - DNA, 25 bp, Homo sapien
aacgtagaaatcttgttgttgctta

SEQ ID NO: 3805163 - DNA, 25 bp, Homo sapien
tcttctaacgtagaaatcttgttgt

SEQ ID NO: 3805164 - DNA, 25 bp, Homo sapien
ctcgggctgcaccacccgcacctgc

SEQ ID NO: 3805165 - DNA, 25 bp, Homo sapien
atcgcggcagccacgccaggccaca

SEQ ID NO: 3805166 - DNA, 25 bp, Homo sapien
gctcctccgcccatcgcggcagcca

SEQ ID NO: 3805167 - DNA, 25 bp, Homo sapien
tgcaccacccgcacctgctgctcct

SEQ ID NO: 3805168 - DNA, 25 bp, Homo sapien
agcagaaggcgctgcaggcctctgg

SEQ ID NO: 3805169 - DNA, 25 bp, Homo sapien
gtcagggaggcaggcgacatactcc

SEQ ID NO: 3805170 - DNA, 25 bp, Homo sapien
cttcgtgggcagctgaaaaggacac

SEQ ID NO: 3805171 - DNA, 25 bp, Homo sapien
acactgctgccacggtgcctgagct

SEQ ID NO: 3805172 - DNA, 25 bp, Homo sapien
acaggcaggcgaaggaggcactgga

SEQ ID NO: 3805173 - DNA, 25 bp, Homo sapien
ggacaggcaggcgaaggaggcactg

SEQ ID NO: 3805174 - DNA, 25 bp, Homo sapien
ccggagcagagggacaggcaggcga

SEQ ID NO: 3805175 - DNA, 25 bp, Homo sapien
ggcaggcgaaggaggcactggaggg

SEQ ID NO: 3805176 - DNA, 25 bp, Homo sapien
gaggcagggaagacgtgctggagga

SEQ ID NO: 3805177 - DNA, 25 bp, Homo sapien
ggggaggcagggaagacgtgctgga

SEQ ID NO: 3805178 - DNA, 25 bp, Homo sapien
cagggaagacgtgctggaggagggt

SEQ ID NO: 3805179 - DNA, 25 bp, Homo sapien
agggaagacgtgctggaggagggtg

SEQ ID NO: 3805180 - DNA, 25 bp, Homo sapien
gatgctgaggtcgaggctctcgtca

SEQ ID NO: 3805181 - DNA, 25 bp, Homo sapien
tctcgtcactctgcaccgaggacgg

SEQ ID NO: 3805182 - DNA, 25 bp, Homo sapien
cccaggcagcacatagcgatgcgag

SEQ ID NO: 3805183 - DNA, 25 bp, Homo sapien
agcacggccgtcacgtgatagcgcc

SEQ ID NO: 3805184 - DNA, 25 bp, Homo sapien
caggctctgccccatctggatggcc

SEQ ID NO: 3805185 - DNA, 25 bp, Homo sapien
tccaccaccaggcggtagcagtgcc

SEQ ID NO: 3805186 - DNA, 25 bp, Homo sapien
aggaagcgctgcacggcgggactgt

SEQ ID NO: 3805187 - DNA, 25 bp, Homo sapien
gcgggactgtccaccattgccaggg

SEQ ID NO: 3805188 - DNA, 25 bp, Homo sapien
tctccgtgtccgaggggcagagcgg

SEQ ID NO: 3805189 - DNA, 25 bp, Homo sapien
ctgcacagtcgagaagccgatccac

SEQ ID NO: 3805190 - DNA, 25 bp, Homo sapien
tgcacagtcgagaagccgatccaca

SEQ ID NO: 3805191 - DNA, 25 bp, Homo sapien
tcccacgaggaggttctcggcatcc

SEQ ID NO: 3805192 - DNA, 25 bp, Homo sapien
gggcgctcccacgaggaggttctcg

SEQ ID NO: 3805193 - DNA, 25 bp, Homo sapien
gctcccacgaggaggttctcggcat

SEQ ID NO: 3805194 - DNA, 25 bp, Homo sapien
cacgaggaggttctcggcatcctgc

SEQ ID NO: 3805195 - DNA, 25 bp, Homo sapien
gggccgcctcagctccacagacccc

SEQ ID NO: 3805196 - DNA, 25 bp, Homo sapien
gccgcctcagctccacagaccccat

SEQ ID NO: 3805197 - DNA, 25 bp, Homo sapien
agggggccgcctcagctccacagac

SEQ ID NO: 3805198 - DNA, 25 bp, Homo sapien
gcagggggccgcctcagctccacag

SEQ ID NO: 3805199 - DNA, 25 bp, Homo sapien
aaggcttcacggctcagacgcaggc

SEQ ID NO: 3805200 - DNA, 25 bp, Homo sapien
ggcgggccgccggagctcctgggtc

SEQ ID NO: 3805201 - DNA, 25 bp, Homo sapien
tgggtcccaaattcggccgtggtga

SEQ ID NO: 3805202 - DNA, 25 bp, Homo sapien
agacgcaggcccgggaataccatga

SEQ ID NO: 3805203 - DNA, 25 bp, Homo sapien
tgttgtccggggacctgctctcagg

SEQ ID NO: 3805204 - DNA, 25 bp, Homo sapien
ggaactctctccatagcgcataggg

SEQ ID NO: 3805205 - DNA, 25 bp, Homo sapien
acgtgcagccattggcgcaggcctg

SEQ ID NO: 3805206 - DNA, 25 bp, Homo sapien
caagcagatgttggctccagggcac

SEQ ID NO: 3805207 - DNA, 25 bp, Homo sapien
ggacacgcagggctccccgcttcgt

SEQ ID NO: 3805208 - DNA, 25 bp, Homo sapien
agggctccccgcttcgtcagccaca

SEQ ID NO: 3805209 - DNA, 25 bp, Homo sapien
gcacgacggatgagggtggacacgc

SEQ ID NO: 3805210 - DNA, 25 bp, Homo sapien
cccacagtgctcgtgacaaggacag

SEQ ID NO: 3805211 - DNA, 25 bp, Homo sapien
gcgtcgtgctgcaagccaacgaggt

SEQ ID NO: 3805212 - DNA, 25 bp, Homo sapien
tgttccgtggctgcaagcagccgca

SEQ ID NO: 3805213 - DNA, 25 bp, Homo sapien
caacgaggtcaccagggagcatgag

SEQ ID NO: 3805214 - DNA, 25 bp, Homo sapien
cagtgctaccactgagaacagggta

SEQ ID NO: 3805215 - DNA, 25 bp, Homo sapien
ggtggtggagcctcggccatactca

SEQ ID NO: 3805216 - DNA, 25 bp, Homo sapien
ggctggtggtggagcctcggccata

SEQ ID NO: 3805217 - DNA, 25 bp, Homo sapien
ctggtggtggagcctcggccatact

SEQ ID NO: 3805218 - DNA, 25 bp, Homo sapien
tggtggtggagcctcggccatactc

SEQ ID NO: 3805219 - DNA, 25 bp, Homo sapien
aagaccatgtccgagccggcctcca

SEQ ID NO: 3805220 - DNA, 25 bp, Homo sapien
tctggaaggtcagggactgcttgtc

SEQ ID NO: 3805221 - DNA, 25 bp, Homo sapien
attgaagaccacgttctggaaggtc

SEQ ID NO: 3805222 - DNA, 25 bp, Homo sapien
gactgcttgtcgttgatggtccacc

SEQ ID NO: 3805223 - DNA, 25 bp, Homo sapien
gagagcttgaagaccgccgcgctct

SEQ ID NO: 3805224 - DNA, 25 bp, Homo sapien
ttgtagttcacggtgacgttgctca

SEQ ID NO: 3805225 - DNA, 25 bp, Homo sapien
cacggtgacgttgctcacgtggttg

SEQ ID NO: 3805226 - DNA, 25 bp, Homo sapien
ttgctcacgtggttggaggccgtca

SEQ ID NO: 3805227 - DNA, 25 bp, Homo sapien
tagttcacggtgacgttgctcacgt

SEQ ID NO: 3805228 - DNA, 25 bp, Homo sapien
gacattgtgctccaccagcacctgg

SEQ ID NO: 3805229 - DNA, 25 bp, Homo sapien
acattgtgctccaccagcacctggg

SEQ ID NO: 3805230 - DNA, 25 bp, Homo sapien
tgacattgtgctccaccagcacctg

SEQ ID NO: 3805231 - DNA, 25 bp, Homo sapien
ggttctcgaaggcattagatgccag

SEQ ID NO: 3805232 - DNA, 25 bp, Homo sapien
gttctcgaaggcattagatgccagc

SEQ ID NO: 3805233 - DNA, 25 bp, Homo sapien
ttctcgaaggcattagatgccagca

SEQ ID NO: 3805234 - DNA, 25 bp, Homo sapien
aagaacacccccaggcgagggcagc

SEQ ID NO: 3805235 - DNA, 25 bp, Homo sapien
caccaggacgccgtcactcacaccc

SEQ ID NO: 3805236 - DNA, 25 bp, Homo sapien
gccaccaggacgccgtcactcacac

SEQ ID NO: 3805237 - DNA, 25 bp, Homo sapien
taaagaacacccccaggcgagggca

SEQ ID NO: 3805238 - DNA, 25 bp, Homo sapien
tcaggacaggggagccgtccccgaa

SEQ ID NO: 3805239 - DNA, 25 bp, Homo sapien
tgggtcaggacaggggagccgtccc

SEQ ID NO: 3805240 - DNA, 25 bp, Homo sapien
gtcaggacaggggagccgtccccga

SEQ ID NO: 3805241 - DNA, 25 bp, Homo sapien
cgtgttgttgacctccaggcgcacg

SEQ ID NO: 3805242 - DNA, 25 bp, Homo sapien
gtgttgttgacctccaggcgcacgt

SEQ ID NO: 3805243 - DNA, 25 bp, Homo sapien
gtagatgaacgtcacctcagggccc

SEQ ID NO: 3805244 - DNA, 25 bp, Homo sapien
tgactgtcacaagataggagcctgg

SEQ ID NO: 3805245 - DNA, 25 bp, Homo sapien
cacgtgatgttgtcgcccgtctgca

SEQ ID NO: 3805246 - DNA, 25 bp, Homo sapien
gaagttgtgtgtcaccgtcgggcac

SEQ ID NO: 3805247 - DNA, 25 bp, Homo sapien
agctccagcccaagggagccattga

SEQ ID NO: 3805248 - DNA, 25 bp, Homo sapien
tgcagctccagcccaagggagccat

SEQ ID NO: 3805249 - DNA, 25 bp, Homo sapien
gctccagcccaagggagccattgac

SEQ ID NO: 3805250 - DNA, 25 bp, Homo sapien
gcagctccagcccaagggagccatt

SEQ ID NO: 3805251 - DNA, 25 bp, Homo sapien
ctggcggggcgcccacggcccacag

SEQ ID NO: 3805252 - DNA, 25 bp, Homo sapien
gctgttgtaagcgtgggtgacctcc

SEQ ID NO: 3805253 - DNA, 25 bp, Homo sapien
cgtgggtgacctccggaccctcgag

SEQ ID NO: 3805254 - DNA, 25 bp, Homo sapien
ttgtaagcgtgggtgacctccggac

SEQ ID NO: 3805255 - DNA, 25 bp, Homo sapien
ctgtgctgttgtaagcgtgggtgac

SEQ ID NO: 3805256 - DNA, 25 bp, Homo sapien
ttcaccgtcacattgagccaggcct

SEQ ID NO: 3805257 - DNA, 25 bp, Homo sapien
ttgagccaggcctcgctgcggctca

SEQ ID NO: 3805258 - DNA, 25 bp, Homo sapien
gccggccaccctaacggtgaagtca

SEQ ID NO: 3805259 - DNA, 25 bp, Homo sapien
cagccggccaccctaacggtgaagt

SEQ ID NO: 3805260 - DNA, 25 bp, Homo sapien
cgtgcagctggcattgacgatgagc

SEQ ID NO: 3805261 - DNA, 25 bp, Homo sapien
gcagctggcattgacgatgagcccc

SEQ ID NO: 3805262 - DNA, 25 bp, Homo sapien
ccaccgtgcagctggcattgacgat

SEQ ID NO: 3805263 - DNA, 25 bp, Homo sapien
caccgtgcagctggcattgacgatg

SEQ ID NO: 3805264 - DNA, 25 bp, Homo sapien
gagcacccaggaatagcgcacatca

SEQ ID NO: 3805265 - DNA, 25 bp, Homo sapien
ccagagatgggcgtgcagcggtcac

SEQ ID NO: 3805266 - DNA, 25 bp, Homo sapien
ccccagagatgggcgtgcagcggtc

SEQ ID NO: 3805267 - DNA, 25 bp, Homo sapien
cccagagatgggcgtgcagcggtca

SEQ ID NO: 3805268 - DNA, 25 bp, Homo sapien
ggagcggaaggtgtaaagagatggc

SEQ ID NO: 3805269 - DNA, 25 bp, Homo sapien
agcggaaggtgtaaagagatggcag

SEQ ID NO: 3805270 - DNA, 25 bp, Homo sapien
cggaaggtgtaaagagatggcagga

SEQ ID NO: 3805271 - DNA, 25 bp, Homo sapien
ggaaggtgtaaagagatggcaggac

SEQ ID NO: 3805272 - DNA, 25 bp, Homo sapien
tgacgatgatattgaaggtgcccac

SEQ ID NO: 3805273 - DNA, 25 bp, Homo sapien
gtgacgatgatattgaaggtgccca

SEQ ID NO: 3805274 - DNA, 25 bp, Homo sapien
gacccagctgactgcgttggaggca

SEQ ID NO: 3805275 - DNA, 25 bp, Homo sapien
agcatccgggaagaccatggtgaca

SEQ ID NO: 3805276 - DNA, 25 bp, Homo sapien
catggtgacatgagggccacgcttg

SEQ ID NO: 3805277 - DNA, 25 bp, Homo sapien
cacgcgggctgtgaagttcctctca

SEQ ID NO: 3805278 - DNA, 25 bp, Homo sapien
ctgcccagggcgttgaaggcacgca

SEQ ID NO: 3805279 - DNA, 25 bp, Homo sapien
tgcccagggcgttgaaggcacgcac

SEQ ID NO: 3805280 - DNA, 25 bp, Homo sapien
cgtaggcatccaggcagttgcgctg

SEQ ID NO: 3805281 - DNA, 25 bp, Homo sapien
gcgcaggtcaacgtaggcatccagg

SEQ ID NO: 3805282 - DNA, 25 bp, Homo sapien
gcatccaggcagttgcgctgtgatc

SEQ ID NO: 3805283 - DNA, 25 bp, Homo sapien
cgcgcaggtcaacgtaggcatccag

SEQ ID NO: 3805284 - DNA, 25 bp, Homo sapien
gcccaaagttcagcgcacacccgcc

SEQ ID NO: 3805285 - DNA, 25 bp, Homo sapien
gggcccaaagttcagcgcacacccg

SEQ ID NO: 3805286 - DNA, 25 bp, Homo sapien
aagttcagcgcacacccgccagcct

SEQ ID NO: 3805287 - DNA, 25 bp, Homo sapien
caaagttcagcgcacacccgccagc

SEQ ID NO: 3805288 - DNA, 25 bp, Homo sapien
actccaaggacacaatgggcacccg

SEQ ID NO: 3805289 - DNA, 25 bp, Homo sapien
tgggcacccggccactgcggatcag

SEQ ID NO: 3805290 - DNA, 25 bp, Homo sapien
acacacactccaaggacacaatggg

SEQ ID NO: 3805291 - DNA, 25 bp, Homo sapien
ggacacaatgggcacccggccactg

SEQ ID NO: 3805292 - DNA, 25 bp, Homo sapien
gagccgctgctgcaattgaggcagc

SEQ ID NO: 3805293 - DNA, 25 bp, Homo sapien
ggctcacttcgtacacggcctgtgc

SEQ ID NO: 3805294 - DNA, 25 bp, Homo sapien
gctgcggctcacttcgtacacggcc

SEQ ID NO: 3805295 - DNA, 25 bp, Homo sapien
tgcggctcacttcgtacacggcctg

SEQ ID NO: 3805296 - DNA, 25 bp, Homo sapien
tgttgctgaacgtacgtgcagccca

SEQ ID NO: 3805297 - DNA, 25 bp, Homo sapien
gtcttgttgctgaacgtacgtgcag

SEQ ID NO: 3805298 - DNA, 25 bp, Homo sapien
tgctgaacgtacgtgcagcccaccg

SEQ ID NO: 3805299 - DNA, 25 bp, Homo sapien
tcttgttgctgaacgtacgtgcagc

SEQ ID NO: 3805300 - DNA, 25 bp, Homo sapien
tggatgtggtggtctcatccagcac

SEQ ID NO: 3805301 - DNA, 25 bp, Homo sapien
ccagcaccgtcagcgtgaaggtgta

SEQ ID NO: 3805302 - DNA, 25 bp, Homo sapien
agagcggcccagcaccgtcagcgtg

SEQ ID NO: 3805303 - DNA, 25 bp, Homo sapien
ggcccagcaccgtcagcgtgaaggt

SEQ ID NO: 3805304 - DNA, 25 bp, Homo sapien
gcaccgtcagcgtgaaggtgtatcc

SEQ ID NO: 3805305 - DNA, 25 bp, Homo sapien
cagggggatggaggcgcagccctcc

SEQ ID NO: 3805306 - DNA, 25 bp, Homo sapien
ccgtgcatttgaagtgcaccttggt

SEQ ID NO: 3805307 - DNA, 25 bp, Homo sapien
agggcgtgcacagcgcccagtggga

SEQ ID NO: 3805308 - DNA, 25 bp, Homo sapien
tgcaccttggtggtgagggcgtgca

SEQ ID NO: 3805309 - DNA, 25 bp, Homo sapien
acaccagcggggcgccagcatcctc

SEQ ID NO: 3805310 - DNA, 25 bp, Homo sapien
accagcggggcgccagcatcctccg

SEQ ID NO: 3805311 - DNA, 25 bp, Homo sapien
tacaccagcggggcgccagcatcct

SEQ ID NO: 3805312 - DNA, 25 bp, Homo sapien
cagcggggcgccagcatcctccgcg

SEQ ID NO: 3805313 - DNA, 25 bp, Homo sapien
aggcccacctcgaagtgtggcctga

SEQ ID NO: 3805314 - DNA, 25 bp, Homo sapien
ctgttgagggcgaccacagcggctc

SEQ ID NO: 3805315 - DNA, 25 bp, Homo sapien
ttgagggcgaccacagcggctccca

SEQ ID NO: 3805316 - DNA, 25 bp, Homo sapien
cccacctcgaagtgtggcctgaaac

SEQ ID NO: 3805317 - DNA, 25 bp, Homo sapien
cgagtactcgatgacgtgctgggga

SEQ ID NO: 3805318 - DNA, 25 bp, Homo sapien
ctggggatcggcctgccgcagcagc

SEQ ID NO: 3805319 - DNA, 25 bp, Homo sapien
tcgatgacgtgctggggatcggcct

SEQ ID NO: 3805320 - DNA, 25 bp, Homo sapien
tggggatcggcctgccgcagcagcc

SEQ ID NO: 3805321 - DNA, 25 bp, Homo sapien
tcgtgcttgggctctgccgccacgt

SEQ ID NO: 3805322 - DNA, 25 bp, Homo sapien
tccgtgatgttcttgcgtatctggg

SEQ ID NO: 3805323 - DNA, 25 bp, Homo sapien
cagcgatctgctggatgtcatccac

SEQ ID NO: 3805324 - DNA, 25 bp, Homo sapien
gatgttcttgcgtatctgggctcgg

SEQ ID NO: 3805325 - DNA, 25 bp, Homo sapien
gagctggccaggtggatgaggtctc

SEQ ID NO: 3805326 - DNA, 25 bp, Homo sapien
tctgagctggccaggtggatgaggt

SEQ ID NO: 3805327 - DNA, 25 bp, Homo sapien
ctgcggtgcccgcacgtctgagctg

SEQ ID NO: 3805328 - DNA, 25 bp, Homo sapien
gtctgagctggccaggtggatgagg

SEQ ID NO: 3805329 - DNA, 25 bp, Homo sapien
ctgggacgccaccatccgcaatggt

SEQ ID NO: 3805330 - DNA, 25 bp, Homo sapien
cgcaatggtgactcggctcccagct

SEQ ID NO: 3805331 - DNA, 25 bp, Homo sapien
atccgcaatggtgactcggctccca

SEQ ID NO: 3805332 - DNA, 25 bp, Homo sapien
gggacgccaccatccgcaatggtga

SEQ ID NO: 3805333 - DNA, 25 bp, Homo sapien
gggctcctcgttgagcacgcgggag

SEQ ID NO: 3805334 - DNA, 25 bp, Homo sapien
ctcctcgttgagcacgcgggagcgc

SEQ ID NO: 3805335 - DNA, 25 bp, Homo sapien
ggctcctcgttgagcacgcgggagc

SEQ ID NO: 3805336 - DNA, 25 bp, Homo sapien
gctcctcgttgagcacgcgggagcg

SEQ ID NO: 3805337 - DNA, 25 bp, Homo sapien
gctccgcgggtccgagcgcttgccc

SEQ ID NO: 3805338 - DNA, 25 bp, Homo sapien
atggagaggtggcagccaggccctg

SEQ ID NO: 3805339 - DNA, 25 bp, Homo sapien
gtggcagccaggccctggggcgccg

SEQ ID NO: 3805340 - DNA, 25 bp, Homo sapien
gcagccaggccctggggcgccgcca

SEQ ID NO: 3805341 - DNA, 25 bp, Homo sapien
tggagaggtggcagccaggccctgg

SEQ ID NO: 3805342 - DNA, 25 bp, Homo sapien
gaaagggattggagtccaccagaaa

SEQ ID NO: 3805343 - DNA, 25 bp, Homo sapien
cgtccagcagcgtatagttgagctg

SEQ ID NO: 3805344 - DNA, 25 bp, Homo sapien
gacggtgtagttgctgatatagcca

SEQ ID NO: 3805345 - DNA, 25 bp, Homo sapien
cagcccagtccgagttgttgggcac

SEQ ID NO: 3805346 - DNA, 25 bp, Homo sapien
ttcaccagagacacccatggaagcc

SEQ ID NO: 3805347 - DNA, 25 bp, Homo sapien
ggcctgaaaggccataggagcctct

SEQ ID NO: 3805348 - DNA, 25 bp, Homo sapien
agcaaatttcaccagagacacccat

SEQ ID NO: 3805349 - DNA, 25 bp, Homo sapien
gaaaggccataggagcctctgcacc

SEQ ID NO: 3805350 - DNA, 25 bp, Homo sapien
tctgggcggatcctcctgctagccg

SEQ ID NO: 3805351 - DNA, 25 bp, Homo sapien
ctgggcggatcctcctgctagccga

SEQ ID NO: 3805352 - DNA, 25 bp, Homo sapien
aagtactggcacagggacgtgtaca

SEQ ID NO: 3805353 - DNA, 25 bp, Homo sapien
gtgaggtggcgggtgaggcagacgg

SEQ ID NO: 3805354 - DNA, 25 bp, Homo sapien
ggcagacggcctggcggggcgaggt

SEQ ID NO: 3805355 - DNA, 25 bp, Homo sapien
tcctcctcgctgaagtactggcaca

SEQ ID NO: 3805356 - DNA, 25 bp, Homo sapien
caggccctcctcgactctgcagagg

SEQ ID NO: 3805357 - DNA, 25 bp, Homo sapien
ccaggccctcctcgactctgcagag

SEQ ID NO: 3805358 - DNA, 25 bp, Homo sapien
aggccctcctcgactctgcagaggc

SEQ ID NO: 3805359 - DNA, 25 bp, Homo sapien
ggccctcctcgactctgcagaggct

SEQ ID NO: 3805360 - DNA, 25 bp, Homo sapien
gcacacagcacatgtcagcatgacg

SEQ ID NO: 3805361 - DNA, 25 bp, Homo sapien
tgtcttgacgaggatctcgtacttg

SEQ ID NO: 3805362 - DNA, 25 bp, Homo sapien
tgacgatgtagtttacatccgctgt

SEQ ID NO: 3805363 - DNA, 25 bp, Homo sapien
acgaggatctcgtacttgaagcggc

SEQ ID NO: 3805364 - DNA, 25 bp, Homo sapien
gctgtccaccccatacagcatgatg

SEQ ID NO: 3805365 - DNA, 25 bp, Homo sapien
tgttgcggtggaaggctctgtcgcc

SEQ ID NO: 3805366 - DNA, 25 bp, Homo sapien
catgatgcccacgtgggccgtggta

SEQ ID NO: 3805367 - DNA, 25 bp, Homo sapien
tgtcgtgccacactcggatcttcca

SEQ ID NO: 3805368 - DNA, 25 bp, Homo sapien
aagccagtcattgaccaggaagaag

SEQ ID NO: 3805369 - DNA, 25 bp, Homo sapien
tctccaccgaaagccagtcattgac

SEQ ID NO: 3805370 - DNA, 25 bp, Homo sapien
aaagccagtcattgaccaggaagaa

SEQ ID NO: 3805371 - DNA, 25 bp, Homo sapien
caccgaaagccagtcattgaccagg

SEQ ID NO: 3805372 - DNA, 25 bp, Homo sapien
cagatgaggagaacgcagcaggtgg

SEQ ID NO: 3805373 - DNA, 25 bp, Homo sapien
agccaccagcaggcgccggaagcgc

SEQ ID NO: 3805374 - DNA, 25 bp, Homo sapien
aacagccccgtaccacacggcgttg

SEQ ID NO: 3805375 - DNA, 25 bp, Homo sapien
accacacggcgttggcgcccaggaa

SEQ ID NO: 3805376 - DNA, 25 bp, Homo sapien
ctgtgtggaggagaggaggccacac

SEQ ID NO: 3805377 - DNA, 25 bp, Homo sapien
tggaggagaggaggccacacaggtg

SEQ ID NO: 3805378 - DNA, 25 bp, Homo sapien
aggagaggaggccacacaggtgagg

SEQ ID NO: 3805379 - DNA, 25 bp, Homo sapien
gtggaggagaggaggccacacaggt

SEQ ID NO: 3805380 - DNA, 25 bp, Homo sapien
cagcgactgtgtcgacgctcagcgg

SEQ ID NO: 3805381 - DNA, 25 bp, Homo sapien
tggacaccaggccaacagcgactgt

SEQ ID NO: 3805382 - DNA, 25 bp, Homo sapien
gggatagacaaccacgctggacacc

SEQ ID NO: 3805383 - DNA, 25 bp, Homo sapien
tggccaggtagacgggatagacaac

SEQ ID NO: 3805384 - DNA, 25 bp, Homo sapien
tcaagtgtgttgacccttcccgagc

SEQ ID NO: 3805385 - DNA, 25 bp, Homo sapien
ggtcagtctagctaaggctgctcaa

SEQ ID NO: 3805386 - DNA, 25 bp, Homo sapien
tcttctgagttatctggcgtgctgc

SEQ ID NO: 3805387 - DNA, 25 bp, Homo sapien
cgtctgcttagcgaagtgccctcgt

SEQ ID NO: 3805388 - DNA, 25 bp, Homo sapien
aagggactaactcggcctcttcact

SEQ ID NO: 3805389 - DNA, 25 bp, Homo sapien
tctaagggactaactcggcctcttc

SEQ ID NO: 3805390 - DNA, 25 bp, Homo sapien
ctaagggactaactcggcctcttca

SEQ ID NO: 3805391 - DNA, 25 bp, Homo sapien
taagggactaactcggcctcttcac

SEQ ID NO: 3805392 - DNA, 25 bp, Homo sapien
gagtcttgctccattgcccaggatg

SEQ ID NO: 3805393 - DNA, 25 bp, Homo sapien
ggagtcttgctccattgcccaggat

SEQ ID NO: 3805394 - DNA, 25 bp, Homo sapien
tggagtcttgctccattgcccagga

SEQ ID NO: 3805395 - DNA, 25 bp, Homo sapien
tcttgaggaccccacgtgtgcattc

SEQ ID NO: 3805396 - DNA, 25 bp, Homo sapien
tagtttgcatgtaacctcttgagga

SEQ ID NO: 3805397 - DNA, 25 bp, Homo sapien
taacttaaatacgagcagccacatg

SEQ ID NO: 3805398 - DNA, 25 bp, Homo sapien
ggcttatgcgccttctctgtgtgct

SEQ ID NO: 3805399 - DNA, 25 bp, Homo sapien
ggacgacggcagtggtcagcgggcg

SEQ ID NO: 3805400 - DNA, 25 bp, Homo sapien
acgacggcagtggtcagcgggcggc

SEQ ID NO: 3805401 - DNA, 25 bp, Homo sapien
caggacgacggcagtggtcagcggg

SEQ ID NO: 3805402 - DNA, 25 bp, Homo sapien
cgacggcagtggtcagcgggcggca

SEQ ID NO: 3805403 - DNA, 25 bp, Homo sapien
ctactgcccggcaggtgtggggctc

SEQ ID NO: 3805404 - DNA, 25 bp, Homo sapien
gcaggtgtggggctcaggctcccag

SEQ ID NO: 3805405 - DNA, 25 bp, Homo sapien
gtgtggggctcaggctcccagccac

SEQ ID NO: 3805406 - DNA, 25 bp, Homo sapien
aggtgtggggctcaggctcccagcc

SEQ ID NO: 3805407 - DNA, 25 bp, Homo sapien
gagtccaggcagctgtcgatgtcca

SEQ ID NO: 3805408 - DNA, 25 bp, Homo sapien
gtccaggcagctgtcgatgtccagc

SEQ ID NO: 3805409 - DNA, 25 bp, Homo sapien
gagctgtccagcacggacgagtcca

SEQ ID NO: 3805410 - DNA, 25 bp, Homo sapien
aggagctgtccagcacggacgagtc

SEQ ID NO: 3805411 - DNA, 25 bp, Homo sapien
gtccaagctgcgccaaggcggcagg

SEQ ID NO: 3805412 - DNA, 25 bp, Homo sapien
tccaagctgcgccaaggcggcagga

SEQ ID NO: 3805413 - DNA, 25 bp, Homo sapien
agtccaagctgcgccaaggcggcag

SEQ ID NO: 3805414 - DNA, 25 bp, Homo sapien
gagtccaagctgcgccaaggcggca

SEQ ID NO: 3805415 - DNA, 25 bp, Homo sapien
catccagaaacaagtcactcttcac

SEQ ID NO: 3805416 - DNA, 25 bp, Homo sapien
tcttagaatcatccagaaacaagtc

SEQ ID NO: 3805417 - DNA, 25 bp, Homo sapien
tagaatcatccagaaacaagtcact

SEQ ID NO: 3805418 - DNA, 25 bp, Homo sapien
atcatccagaaacaagtcactcttc

SEQ ID NO: 3805419 - DNA, 25 bp, Homo sapien
gcgttccctcgctggagggccagca

SEQ ID NO: 3805420 - DNA, 25 bp, Homo sapien
ggccaactgggcgttccctcgctgg

SEQ ID NO: 3805421 - DNA, 25 bp, Homo sapien
agcaggtccggccaactgggcgttc

SEQ ID NO: 3805422 - DNA, 25 bp, Homo sapien
caactgggcgttccctcgctggagg

SEQ ID NO: 3805423 - DNA, 25 bp, Homo sapien
acatccatgtagccatccgtccatc

SEQ ID NO: 3805424 - DNA, 25 bp, Homo sapien
aggtcccgatagtaaaccatctcca

SEQ ID NO: 3805425 - DNA, 25 bp, Homo sapien
gaaggtcccgatagtaaaccatctc

SEQ ID NO: 3805426 - DNA, 25 bp, Homo sapien
tgacttctggtcctccccaaccagc

SEQ ID NO: 3805427 - DNA, 25 bp, Homo sapien
gagctcccagggttcctcaaggtca

SEQ ID NO: 3805428 - DNA, 25 bp, Homo sapien
tctgggcgctccttccttcctgagc

SEQ ID NO: 3805429 - DNA, 25 bp, Homo sapien
cctgtccctgcttctgggcgctcct

SEQ ID NO: 3805430 - DNA, 25 bp, Homo sapien
tgcaaatgtggggtgttgtctttct

SEQ ID NO: 3805431 - DNA, 25 bp, Homo sapien
gcattgcaaatgtggggtgttgtct

SEQ ID NO: 3805432 - DNA, 25 bp, Homo sapien
aggcattgcaaatgtggggtgttgt

SEQ ID NO: 3805433 - DNA, 25 bp, Homo sapien
cattgcaaatgtggggtgttgtctt

SEQ ID NO: 3805434 - DNA, 25 bp, Homo sapien
cagatatcaccgtgggattccactg

SEQ ID NO: 3805435 - DNA, 25 bp, Homo sapien
tccctcagatatcaccgtgggattc

SEQ ID NO: 3805436 - DNA, 25 bp, Homo sapien
taaccacatccctcagatatcaccg

SEQ ID NO: 3805437 - DNA, 25 bp, Homo sapien
cacatccctcagatatcaccgtggg

SEQ ID NO: 3805438 - DNA, 25 bp, Homo sapien
agagggagatggcaaatttataact

SEQ ID NO: 3805439 - DNA, 25 bp, Homo sapien
atttataacttctcagaaacacagt

SEQ ID NO: 3805440 - DNA, 25 bp, Homo sapien
acacagtaatgataagtaaccaagg

SEQ ID NO: 3805441 - DNA, 25 bp, Homo sapien
cacagtaatgataagtaaccaagga

SEQ ID NO: 3805442 - DNA, 25 bp, Homo sapien
ctctacagaaagttagtatactcac

SEQ ID NO: 3805443 - DNA, 25 bp, Homo sapien
gtatacctctacagaaagttagtat

SEQ ID NO: 3805444 - DNA, 25 bp, Homo sapien
tacctctacagaaagttagtatact

SEQ ID NO: 3805445 - DNA, 25 bp, Homo sapien
cctctacagaaagttagtatactca

SEQ ID NO: 3805446 - DNA, 25 bp, Homo sapien
tccatcatgtccattttgagatggg

SEQ ID NO: 3805447 - DNA, 25 bp, Homo sapien
atcatgtccattttgagatgggaag

SEQ ID NO: 3805448 - DNA, 25 bp, Homo sapien
catcatgtccattttgagatgggaa

SEQ ID NO: 3805449 - DNA, 25 bp, Homo sapien
ggatccatcatgtccattttgagat

SEQ ID NO: 3805450 - DNA, 25 bp, Homo sapien
agtaaagatgtcttccaggacaatt

SEQ ID NO: 3805451 - DNA, 25 bp, Homo sapien
cttttgttgtcaccttcatcttacg

SEQ ID NO: 3805452 - DNA, 25 bp, Homo sapien
tagctcgaactttggtttccacctg

SEQ ID NO: 3805453 - DNA, 25 bp, Homo sapien
cacctgtctccataaagtaaagatg

SEQ ID NO: 3805454 - DNA, 25 bp, Homo sapien
tctgtgctcacgttctttcatgctt

SEQ ID NO: 3805455 - DNA, 25 bp, Homo sapien
ctcttctctgtgctcacgttctttc

SEQ ID NO: 3805456 - DNA, 25 bp, Homo sapien
tgtgctcacgttctttcatgcttag

SEQ ID NO: 3805457 - DNA, 25 bp, Homo sapien
cttctctgtgctcacgttctttcat

SEQ ID NO: 3805458 - DNA, 25 bp, Homo sapien
gataaagcaccactttcaggatgat

SEQ ID NO: 3805459 - DNA, 25 bp, Homo sapien
ttcatcagataaagcaccactttca

SEQ ID NO: 3805460 - DNA, 25 bp, Homo sapien
tgattttaaataatctgccatgttt

SEQ ID NO: 3805461 - DNA, 25 bp, Homo sapien
tatggattacaatcactttcatcag

SEQ ID NO: 3805462 - DNA, 25 bp, Homo sapien
cgccgcaacgcttgcgcacgttgaa

SEQ ID NO: 3805463 - DNA, 25 bp, Homo sapien
tgcatctgtagtagtcctctgcccg

SEQ ID NO: 3805464 - DNA, 25 bp, Homo sapien
tttgcatctgtagtagtcctctgcc

SEQ ID NO: 3805465 - DNA, 25 bp, Homo sapien
cgcttgcgcacgttgaaacatttcc

SEQ ID NO: 3805466 - DNA, 25 bp, Homo sapien
aatgttgagagagtctaagggccgt

SEQ ID NO: 3805467 - DNA, 25 bp, Homo sapien
cagcactgaactatcctgcaactgc

SEQ ID NO: 3805468 - DNA, 25 bp, Homo sapien
ctgcatcagcactgaactatcctgc

SEQ ID NO: 3805469 - DNA, 25 bp, Homo sapien
agagagtctaagggccgtggcatca

SEQ ID NO: 3805470 - DNA, 25 bp, Homo sapien
gaggctttcttgcagaaggggtgat

SEQ ID NO: 3805471 - DNA, 25 bp, Homo sapien
ccggttgcaaagaggctttcttgca

SEQ ID NO: 3805472 - DNA, 25 bp, Homo sapien
caaagaggctttcttgcagaagggg

SEQ ID NO: 3805473 - DNA, 25 bp, Homo sapien
aagaggctttcttgcagaaggggtg

SEQ ID NO: 3805474 - DNA, 25 bp, Homo sapien
atttggaattgtccctgtgggtaat

SEQ ID NO: 3805475 - DNA, 25 bp, Homo sapien
ttgtccctgtgggtaataagttaca

SEQ ID NO: 3805476 - DNA, 25 bp, Homo sapien
ggtaataagttacattcactcttca

SEQ ID NO: 3805477 - DNA, 25 bp, Homo sapien
cctgtgggtaataagttacattcac

SEQ ID NO: 3805478 - DNA, 25 bp, Homo sapien
ttcactcccaggtaataccaaattg

SEQ ID NO: 3805479 - DNA, 25 bp, Homo sapien
ctcccaggtaataccaaattgtaag

SEQ ID NO: 3805480 - DNA, 25 bp, Homo sapien
tcactcccaggtaataccaaattgt

SEQ ID NO: 3805481 - DNA, 25 bp, Homo sapien
cactcccaggtaataccaaattgta

SEQ ID NO: 3805482 - DNA, 25 bp, Homo sapien
atgttttccaggccttttatgttct

SEQ ID NO: 3805483 - DNA, 25 bp, Homo sapien
tgttttccaggccttttatgttctg

SEQ ID NO: 3805484 - DNA, 25 bp, Homo sapien
atatcacccttccactgagtactgc

SEQ ID NO: 3805485 - DNA, 25 bp, Homo sapien
ttctgttgctggtgatagatttttg

SEQ ID NO: 3805486 - DNA, 25 bp, Homo sapien
tgctggtgatagatttttgcacctt

SEQ ID NO: 3805487 - DNA, 25 bp, Homo sapien
tgttgctggtgatagatttttgcac

SEQ ID NO: 3805488 - DNA, 25 bp, Homo sapien
atggacaaaattaccgccaccaaca

SEQ ID NO: 3805489 - DNA, 25 bp, Homo sapien
tggacaaaattaccgccaccaacac

SEQ ID NO: 3805490 - DNA, 25 bp, Homo sapien
gggatagagcacacactcggaaggt

SEQ ID NO: 3805491 - DNA, 25 bp, Homo sapien
aggggatagagcacacactcggaag

SEQ ID NO: 3805492 - DNA, 25 bp, Homo sapien
aaggggatagagcacacactcggaa

SEQ ID NO: 3805493 - DNA, 25 bp, Homo sapien
gatagagcacacactcggaaggtgt

SEQ ID NO: 3805494 - DNA, 25 bp, Homo sapien
gattatcatccgctgagggtagagc

SEQ ID NO: 3805495 - DNA, 25 bp, Homo sapien
atcatccgctgagggtagagctgag

SEQ ID NO: 3805496 - DNA, 25 bp, Homo sapien
cactcggcaggtgtcttgagattat

SEQ ID NO: 3805497 - DNA, 25 bp, Homo sapien
aggggatagagcaggcactcggcag

SEQ ID NO: 3805498 - DNA, 25 bp, Homo sapien
gacacactcaggaggtgtcttgaga

SEQ ID NO: 3805499 - DNA, 25 bp, Homo sapien
tgagcagacacactcaggaggtgtc

SEQ ID NO: 3805500 - DNA, 25 bp, Homo sapien
gattatcatccgctgagggtggagc

SEQ ID NO: 3805501 - DNA, 25 bp, Homo sapien
gaaggggagtgagcagacacactca

SEQ ID NO: 3805502 - DNA, 25 bp, Homo sapien
gcccctgttgcaataaccactgctt

SEQ ID NO: 3805503 - DNA, 25 bp, Homo sapien
cgtgcccctgttgcaataaccactg

SEQ ID NO: 3805504 - DNA, 25 bp, Homo sapien
agatgacttccgtgcccctgttgca

SEQ ID NO: 3805505 - DNA, 25 bp, Homo sapien
cctggcatagccagatgacttccgt

SEQ ID NO: 3805506 - DNA, 25 bp, Homo sapien
tctgaatttgccgaacagaaatgcg

SEQ ID NO: 3805507 - DNA, 25 bp, Homo sapien
aacatacagtgtatacaccagcacc

SEQ ID NO: 3805508 - DNA, 25 bp, Homo sapien
gaaatgcgatcaggtgcctactaag

SEQ ID NO: 3805509 - DNA, 25 bp, Homo sapien
tttgccgaacagaaatgcgatcagg

SEQ ID NO: 3805510 - DNA, 25 bp, Homo sapien
cataagtcgttcagatgatgctttg

SEQ ID NO: 3805511 - DNA, 25 bp, Homo sapien
tcgggagaaagaccataagtcgttc

SEQ ID NO: 3805512 - DNA, 25 bp, Homo sapien
gaaagaccataagtcgttcagatga

SEQ ID NO: 3805513 - DNA, 25 bp, Homo sapien
aacactcgggagaaagaccataagt

SEQ ID NO: 3805514 - DNA, 25 bp, Homo sapien
aaggtttagtgtcatccatatccca

SEQ ID NO: 3805515 - DNA, 25 bp, Homo sapien
gtttagtgtcatccatatcccattg

SEQ ID NO: 3805516 - DNA, 25 bp, Homo sapien
tcaaaggtttagtgtcatccatatc

SEQ ID NO: 3805517 - DNA, 25 bp, Homo sapien
tagtgtcatccatatcccattgtct

SEQ ID NO: 3805518 - DNA, 25 bp, Homo sapien
tgttttccaaggctgggccttcagc

SEQ ID NO: 3805519 - DNA, 25 bp, Homo sapien
gttttccaaggctgggccttcagca

SEQ ID NO: 3805520 - DNA, 25 bp, Homo sapien
gtgttttccaaggctgggccttcag

SEQ ID NO: 3805521 - DNA, 25 bp, Homo sapien
tcatgattgaggatctaccctgcag

SEQ ID NO: 3805522 - DNA, 25 bp, Homo sapien
taccctgcagactgtatggagttat

SEQ ID NO: 3805523 - DNA, 25 bp, Homo sapien
cttttcatacatcatgattgaggat

SEQ ID NO: 3805524 - DNA, 25 bp, Homo sapien
gatctaccctgcagactgtatggag

SEQ ID NO: 3805525 - DNA, 25 bp, Homo sapien
gctcaggtagtcactgtttcctttt

SEQ ID NO: 3805526 - DNA, 25 bp, Homo sapien
ggaatcgtcatccagctaagggctc

SEQ ID NO: 3805527 - DNA, 25 bp, Homo sapien
agcccgaactgattctggagctctg

SEQ ID NO: 3805528 - DNA, 25 bp, Homo sapien
gttctgagatcatgcatctcccacc

SEQ ID NO: 3805529 - DNA, 25 bp, Homo sapien
ttgcagccttcctacttgggctaat

SEQ ID NO: 3805530 - DNA, 25 bp, Homo sapien
gaggtctcaagagctgttctgctcc

SEQ ID NO: 3805531 - DNA, 25 bp, Homo sapien
ctcccttctacgtgtacatcattaa

SEQ ID NO: 3805532 - DNA, 25 bp, Homo sapien
tccctcagtcatgctaaggtcctca

SEQ ID NO: 3805533 - DNA, 25 bp, Homo sapien
atgatctccaaagctttctgtcttc

SEQ ID NO: 3805534 - DNA, 25 bp, Homo sapien
cagccctactcctataagtcatgat

SEQ ID NO: 3805535 - DNA, 25 bp, Homo sapien
agggcattgtccagaaactcccctg

SEQ ID NO: 3805536 - DNA, 25 bp, Homo sapien
cagagctccagaatcagttcgggct

SEQ ID NO: 3805537 - DNA, 25 bp, Homo sapien
attagcccaagtaggaaggctgcaa

SEQ ID NO: 3805538 - DNA, 25 bp, Homo sapien
tgaggaccttagcatgactgaggga

SEQ ID NO: 3805539 - DNA, 25 bp, Homo sapien
gagcccttagctggatgacgattcc

SEQ ID NO: 3805540 - DNA, 25 bp, Homo sapien
ggagcagaacagctcttgagacctc

SEQ ID NO: 3805541 - DNA, 25 bp, Homo sapien
aaaaggaaacagtgactacctgagc

SEQ ID NO: 3805542 - DNA, 25 bp, Homo sapien
ttaatgatgtacacgtagaagggag

SEQ ID NO: 3805543 - DNA, 25 bp, Homo sapien
caggggagtttctggacaatgccct

SEQ ID NO: 3805544 - DNA, 25 bp, Homo sapien
atcatgacttataggagtagggctg

SEQ ID NO: 3805545 - DNA, 25 bp, Homo sapien
gaagacagaaagctttggagatcat

SEQ ID NO: 3805546 - DNA, 25 bp, Homo sapien
ggtgggagatgcatgatctcagaac

SEQ ID NO: 3805547 - DNA, 25 bp, Homo sapien
tgctggatccagagcgaggagacca

SEQ ID NO: 3805548 - DNA, 25 bp, Homo sapien
cttgctcagagtggacacacgtctt

SEQ ID NO: 3805549 - DNA, 25 bp, Homo sapien
ggagaccatcccctcgaaacgattc

SEQ ID NO: 3805550 - DNA, 25 bp, Homo sapien
acacgtcttcggctggagcatctgc

SEQ ID NO: 3805551 - DNA, 25 bp, Homo sapien
ccacgttgacaggaagagtcaatgt

SEQ ID NO: 3805552 - DNA, 25 bp, Homo sapien
ctaaatgccccaggcggcattagag

SEQ ID NO: 3805553 - DNA, 25 bp, Homo sapien
agccttccacgttgacaggaagagt

SEQ ID NO: 3805554 - DNA, 25 bp, Homo sapien
tgccccaggcggcattagagccttc

SEQ ID NO: 3805555 - DNA, 25 bp, Homo sapien
aagatttccatggaaggtgcttgca

SEQ ID NO: 3805556 - DNA, 25 bp, Homo sapien
acccctggtctaaacggcgctagca

SEQ ID NO: 3805557 - DNA, 25 bp, Homo sapien
taaacggcgctagcaggacttatca

SEQ ID NO: 3805558 - DNA, 25 bp, Homo sapien
catggaaggtgcttgcaaagggaaa

SEQ ID NO: 3805559 - DNA, 25 bp, Homo sapien
tgccttcagactatgggttcctgga

SEQ ID NO: 3805560 - DNA, 25 bp, Homo sapien
cttgccttcagactatgggttcctg

SEQ ID NO: 3805561 - DNA, 25 bp, Homo sapien
tggaggacaggtgcacttctcagcc

SEQ ID NO: 3805562 - DNA, 25 bp, Homo sapien
ggacaggtgcacttctcagccatct

SEQ ID NO: 3805563 - DNA, 25 bp, Homo sapien
ggagacgcaaagttctgcacttaag

SEQ ID NO: 3805564 - DNA, 25 bp, Homo sapien
ggcaatgggagacgcaaagttctgc

SEQ ID NO: 3805565 - DNA, 25 bp, Homo sapien
ggtttcctgcaggcaatgggagacg

SEQ ID NO: 3805566 - DNA, 25 bp, Homo sapien
gacgcaaagttctgcacttaagctc

SEQ ID NO: 3805567 - DNA, 25 bp, Homo sapien
ctggctccgtgttcaacagtgccat

SEQ ID NO: 3805568 - DNA, 25 bp, Homo sapien
agcactggctccgtgttcaacagtg

SEQ ID NO: 3805569 - DNA, 25 bp, Homo sapien
cactggctccgtgttcaacagtgcc

SEQ ID NO: 3805570 - DNA, 25 bp, Homo sapien
gcagcactggctccgtgttcaacag

SEQ ID NO: 3805571 - DNA, 25 bp, Homo sapien
tcaatctccgtgcacactctcagaa

SEQ ID NO: 3805572 - DNA, 25 bp, Homo sapien
aatctccgtgcacactctcagaaac

SEQ ID NO: 3805573 - DNA, 25 bp, Homo sapien
caatctccgtgcacactctcagaaa

SEQ ID NO: 3805574 - DNA, 25 bp, Homo sapien
gaacaattcttaaggcagggcgtgg

SEQ ID NO: 3805575 - DNA, 25 bp, Homo sapien
tggcacaccacctagctagccaagg

SEQ ID NO: 3805576 - DNA, 25 bp, Homo sapien
tagccaagggcaaagcagagactag

SEQ ID NO: 3805577 - DNA, 25 bp, Homo sapien
cttcaatgggcacctgcaagtggca

SEQ ID NO: 3805578 - DNA, 25 bp, Homo sapien
gctagggaccagagacacgatggtt

SEQ ID NO: 3805579 - DNA, 25 bp, Homo sapien
gatcctagggcttacaatgctggca

SEQ ID NO: 3805580 - DNA, 25 bp, Homo sapien
tgtgactgtcatgtgccaagtgcgc

SEQ ID NO: 3805581 - DNA, 25 bp, Homo sapien
catgtaagcgactgaggcatcccta

SEQ ID NO: 3805582 - DNA, 25 bp, Homo sapien
tctttggcaacaacggattagactg

SEQ ID NO: 3805583 - DNA, 25 bp, Homo sapien
aatggcctctaagtgcggacacgtg

SEQ ID NO: 3805584 - DNA, 25 bp, Homo sapien
tggccaggagctcaaagtgaacttc

SEQ ID NO: 3805585 - DNA, 25 bp, Homo sapien
gattcagagtttaggtctcccagag

SEQ ID NO: 3805586 - DNA, 25 bp, Homo sapien
ttccaagactgatttttgggtccac

SEQ ID NO: 3805587 - DNA, 25 bp, Homo sapien
caagactgatttttgggtccacgga

SEQ ID NO: 3805588 - DNA, 25 bp, Homo sapien
tgatttttgggtccacggaattctg

SEQ ID NO: 3805589 - DNA, 25 bp, Homo sapien
agactgatttttgggtccacggaat

SEQ ID NO: 3805590 - DNA, 25 bp, Homo sapien
gagtgagccacacagcaccccacct

SEQ ID NO: 3805591 - DNA, 25 bp, Homo sapien
caggagtgagccacacagcacccca

SEQ ID NO: 3805592 - DNA, 25 bp, Homo sapien
gagccacacagcaccccacctaatt

SEQ ID NO: 3805593 - DNA, 25 bp, Homo sapien
agccacacagcaccccacctaattt

SEQ ID NO: 3805594 - DNA, 25 bp, Homo sapien
gctagggcagctaaggtcgcacatt

SEQ ID NO: 3805595 - DNA, 25 bp, Homo sapien
gcaacacggcgaaacatagtctcaa

SEQ ID NO: 3805596 - DNA, 25 bp, Homo sapien
gcctgttggatgtaagcagcagtaa

SEQ ID NO: 3805597 - DNA, 25 bp, Homo sapien
ttagaatcacctgtgcgcactccca

SEQ ID NO: 3805598 - DNA, 25 bp, Homo sapien
tcttctgagaaacttagatcacagg

SEQ ID NO: 3805599 - DNA, 25 bp, Homo sapien
tctgagaaacttagatcacaggaca

SEQ ID NO: 3805600 - DNA, 25 bp, Homo sapien
ttctgagaaacttagatcacaggac

SEQ ID NO: 3805601 - DNA, 25 bp, Homo sapien
ctgagaaacttagatcacaggacat

SEQ ID NO: 3805602 - DNA, 25 bp, Homo sapien
tttgacaataatggccttttctctc

SEQ ID NO: 3805603 - DNA, 25 bp, Homo sapien
taggacaggtgccttcttttgacaa

SEQ ID NO: 3805604 - DNA, 25 bp, Homo sapien
gacaggtgccttcttttgacaataa

SEQ ID NO: 3805605 - DNA, 25 bp, Homo sapien
ctctcctcagcagggtgactgaact

SEQ ID NO: 3805606 - DNA, 25 bp, Homo sapien
taatgcaggaagcttcagataccag

SEQ ID NO: 3805607 - DNA, 25 bp, Homo sapien
gacctatgctggtaagaaagcagga

SEQ ID NO: 3805608 - DNA, 25 bp, Homo sapien
aagtagataagctgacataatgcag

SEQ ID NO: 3805609 - DNA, 25 bp, Homo sapien
ttagtagcgcagtgacctatgctgg

SEQ ID NO: 3805610 - DNA, 25 bp, Homo sapien
agggccacagcatgcagggccttga

SEQ ID NO: 3805611 - DNA, 25 bp, Homo sapien
gggccttgagagcacctaagagcag

SEQ ID NO: 3805612 - DNA, 25 bp, Homo sapien
agcatgcagggccttgagagcacct

SEQ ID NO: 3805613 - DNA, 25 bp, Homo sapien
gaaagaggagaatgtccaagatgac

SEQ ID NO: 3805614 - DNA, 25 bp, Homo sapien
cggttaatacctggggcactcagca

SEQ ID NO: 3805615 - DNA, 25 bp, Homo sapien
gattctagagccttagctgtccagg

SEQ ID NO: 3805616 - DNA, 25 bp, Homo sapien
gtgataacttcaggccggttaatac

SEQ ID NO: 3805617 - DNA, 25 bp, Homo sapien
ccaggtgataacttcaggccggtta

SEQ ID NO: 3805618 - DNA, 25 bp, Homo sapien
catctttataaatctgcaggagctg

SEQ ID NO: 3805619 - DNA, 25 bp, Homo sapien
gtaaatatttcttgccgaccagccg

SEQ ID NO: 3805620 - DNA, 25 bp, Homo sapien
ctccaggcatctccatggcatcttt

SEQ ID NO: 3805621 - DNA, 25 bp, Homo sapien
ttcttgccgaccagccgctgaaatc

SEQ ID NO: 3805622 - DNA, 25 bp, Homo sapien
cactaacttaccatcggaaagaacg

SEQ ID NO: 3805623 - DNA, 25 bp, Homo sapien
aaggacaagcccactgttaccacct

SEQ ID NO: 3805624 - DNA, 25 bp, Homo sapien
gaaacagactgaaccaaggacaagc

SEQ ID NO: 3805625 - DNA, 25 bp, Homo sapien
gtgggtaactgactgggcctaagaa

SEQ ID NO: 3805626 - DNA, 25 bp, Homo sapien
ctccataagagctctgtagaccttg

SEQ ID NO: 3805627 - DNA, 25 bp, Homo sapien
caccaatctcttctagaagtgcctt

SEQ ID NO: 3805628 - DNA, 25 bp, Homo sapien
tgttttcatcaccaatctcttctag

SEQ ID NO: 3805629 - DNA, 25 bp, Homo sapien
gagctctgtagaccttgctgttttc

SEQ ID NO: 3805630 - DNA, 25 bp, Homo sapien
ttgggagtttgcactgaagttacag

SEQ ID NO: 3805631 - DNA, 25 bp, Homo sapien
gaaatatggctgactagtgccaaca

SEQ ID NO: 3805632 - DNA, 25 bp, Homo sapien
agctgctgaggatcagtaaagaaaa

SEQ ID NO: 3805633 - DNA, 25 bp, Homo sapien
tacaggccattttgaagaaatatgg

SEQ ID NO: 3805634 - DNA, 25 bp, Homo sapien
tattctaactaataagtgagagcca

SEQ ID NO: 3805635 - DNA, 25 bp, Homo sapien
gcacctggccttaatatcgcatatt

SEQ ID NO: 3805636 - DNA, 25 bp, Homo sapien
tgagagccagacattgagtacacgt

SEQ ID NO: 3805637 - DNA, 25 bp, Homo sapien
tacacgtgaacataaagaaacgaac

SEQ ID NO: 3805638 - DNA, 25 bp, Homo sapien
tgaactacttggtccttgaatgcag

SEQ ID NO: 3805639 - DNA, 25 bp, Homo sapien
gaactacttggtccttgaatgcagt

SEQ ID NO: 3805640 - DNA, 25 bp, Homo sapien
ctgaactacttggtccttgaatgca

SEQ ID NO: 3805641 - DNA, 25 bp, Homo sapien
caaccccatgctgatgtatttgatc

SEQ ID NO: 3805642 - DNA, 25 bp, Homo sapien
ccccatgctgatgtatttgatcaca

SEQ ID NO: 3805643 - DNA, 25 bp, Homo sapien
cttgttcaaccccatgctgatgtat

SEQ ID NO: 3805644 - DNA, 25 bp, Homo sapien
tgctcttgttcaaccccatgctgat

SEQ ID NO: 3805645 - DNA, 25 bp, Homo sapien
gatgcagtctggttcacttggctgg

SEQ ID NO: 3805646 - DNA, 25 bp, Homo sapien
tcccgcaaacaagcatccctatttt

SEQ ID NO: 3805647 - DNA, 25 bp, Homo sapien
ctgggaacataatctaatatcatcc

SEQ ID NO: 3805648 - DNA, 25 bp, Homo sapien
gcagtctggttcacttggctgggtt

SEQ ID NO: 3805649 - DNA, 25 bp, Homo sapien
tgatttttgaaccataaatacggca

SEQ ID NO: 3805650 - DNA, 25 bp, Homo sapien
gatttttgaaccataaatacggcat

SEQ ID NO: 3805651 - DNA, 25 bp, Homo sapien
atttttgaaccataaatacggcatg

SEQ ID NO: 3805652 - DNA, 25 bp, Homo sapien
gatgtgcaaacttcacttgctgcca

SEQ ID NO: 3805653 - DNA, 25 bp, Homo sapien
tggttttgaccacttcatcacaatc

SEQ ID NO: 3805654 - DNA, 25 bp, Homo sapien
cataaaacgtctgggccacagaaat

SEQ ID NO: 3805655 - DNA, 25 bp, Homo sapien
gcaaagccagtatcataaaacgtct

SEQ ID NO: 3805656 - DNA, 25 bp, Homo sapien
aagtcactttgcctacggaggcgaa

SEQ ID NO: 3805657 - DNA, 25 bp, Homo sapien
tcagggagagataaacgcactctag

SEQ ID NO: 3805658 - DNA, 25 bp, Homo sapien
cactctaggcttggtgttgcagaag

SEQ ID NO: 3805659 - DNA, 25 bp, Homo sapien
gatgagcctcctggctgtttttcag

SEQ ID NO: 3805660 - DNA, 25 bp, Homo sapien
gtcaaaatgcaagggctaattacac

SEQ ID NO: 3805661 - DNA, 25 bp, Homo sapien
gggctaattacacttgaagaacaat

SEQ ID NO: 3805662 - DNA, 25 bp, Homo sapien
cgaagtattggagtctcatttactg

SEQ ID NO: 3805663 - DNA, 25 bp, Homo sapien
ttatcgaagtattggagtctcattt

SEQ ID NO: 3805664 - DNA, 25 bp, Homo sapien
cactggatagaaaaaacgggttgct

SEQ ID NO: 3805665 - DNA, 25 bp, Homo sapien
tcacactcactggatagaaaaaacg

SEQ ID NO: 3805666 - DNA, 25 bp, Homo sapien
aaaaaacgggttgctgatacagcca

SEQ ID NO: 3805667 - DNA, 25 bp, Homo sapien
ggttgctgatacagccaatgagctg

SEQ ID NO: 3805668 - DNA, 25 bp, Homo sapien
ctccaagctccaatgctgatggatc

SEQ ID NO: 3805669 - DNA, 25 bp, Homo sapien
gatggatccaggctttttaaggacc

SEQ ID NO: 3805670 - DNA, 25 bp, Homo sapien
caagctccaatgctgatggatccag

SEQ ID NO: 3805671 - DNA, 25 bp, Homo sapien
ccaatgctgatggatccaggctttt

SEQ ID NO: 3805672 - DNA, 25 bp, Homo sapien
caactccacaatactgcccacagcc

SEQ ID NO: 3805673 - DNA, 25 bp, Homo sapien
aactccacaatactgcccacagcca

SEQ ID NO: 3805674 - DNA, 25 bp, Homo sapien
atactgcccacagccagccagatcc

SEQ ID NO: 3805675 - DNA, 25 bp, Homo sapien
ctgcccacagccagccagatcctgt

SEQ ID NO: 3805676 - DNA, 25 bp, Homo sapien
cacaggtgattagaactgggctgtc

SEQ ID NO: 3805677 - DNA, 25 bp, Homo sapien
tgaacacagatctcagggataccag

SEQ ID NO: 3805678 - DNA, 25 bp, Homo sapien
catgtggtcaaacttctggctagaa

SEQ ID NO: 3805679 - DNA, 25 bp, Homo sapien
accagggtggttggatacagtgcca

SEQ ID NO: 3805680 - DNA, 25 bp, Homo sapien
gaatacctacagcacatatctggcg

SEQ ID NO: 3805681 - DNA, 25 bp, Homo sapien
caggttaggttaagcctccagcata

SEQ ID NO: 3805682 - DNA, 25 bp, Homo sapien
ggcaactgtctgataaccctgcaaa

SEQ ID NO: 3805683 - DNA, 25 bp, Homo sapien
ggtgggccggcttcagaattcatgc

SEQ ID NO: 3805684 - DNA, 25 bp, Homo sapien
ggtgtctgcgtttaagagcatgcat

SEQ ID NO: 3805685 - DNA, 25 bp, Homo sapien
atgggtgtctgcgtttaagagcatg

SEQ ID NO: 3805686 - DNA, 25 bp, Homo sapien
agatgggtgtctgcgtttaagagca

SEQ ID NO: 3805687 - DNA, 25 bp, Homo sapien
cagatgggtgtctgcgtttaagagc

SEQ ID NO: 3805688 - DNA, 25 bp, Homo sapien
gctttgacgatttacgtagcagctg

SEQ ID NO: 3805689 - DNA, 25 bp, Homo sapien
gaggcactctcatggctatattcac

SEQ ID NO: 3805690 - DNA, 25 bp, Homo sapien
tttatcagtacctcataatggctcc

SEQ ID NO: 3805691 - DNA, 25 bp, Homo sapien
gctccttgctgaggcactctcatgg

SEQ ID NO: 3805692 - DNA, 25 bp, Homo sapien
agaagaggtcacaaggtcgcgtcat

SEQ ID NO: 3805693 - DNA, 25 bp, Homo sapien
tagaagaggtcacaaggtcgcgtca

SEQ ID NO: 3805694 - DNA, 25 bp, Homo sapien
ggtagaagaggtcacaaggtcgcgt

SEQ ID NO: 3805695 - DNA, 25 bp, Homo sapien
tctggtagaagaggtcacaaggtcg

SEQ ID NO: 3805696 - DNA, 25 bp, Homo sapien
gcttgacatttgaaggcacagcctg

SEQ ID NO: 3805697 - DNA, 25 bp, Homo sapien
tctgagcgacactggacatggtagc

SEQ ID NO: 3805698 - DNA, 25 bp, Homo sapien
ccacaaagccttggtatgcaaaaac

SEQ ID NO: 3805699 - DNA, 25 bp, Homo sapien
gcacagcctgtaacatagactaggt

SEQ ID NO: 3805700 - DNA, 25 bp, Homo sapien
ctgtaacaccaacggccccagcaca

SEQ ID NO: 3805701 - DNA, 25 bp, Homo sapien
cgtccctggaacaaagcagtactgc

SEQ ID NO: 3805702 - DNA, 25 bp, Homo sapien
agcagtactgctgcgatggctgctg

SEQ ID NO: 3805703 - DNA, 25 bp, Homo sapien
gctgctgcaacatcaacgtccctgg

SEQ ID NO: 3805704 - DNA, 25 bp, Homo sapien
tgctgcaacgtcaacgaccctagca

SEQ ID NO: 3805705 - DNA, 25 bp, Homo sapien
ctggtggatggctgctgcaacgtca

SEQ ID NO: 3805706 - DNA, 25 bp, Homo sapien
gaaggatttgctggtggatggctgc

SEQ ID NO: 3805707 - DNA, 25 bp, Homo sapien
acgtcaacgaccctagcacaaagca

SEQ ID NO: 3805708 - DNA, 25 bp, Homo sapien
gataaaaacagtacctgccggacac

SEQ ID NO: 3805709 - DNA, 25 bp, Homo sapien
gataatggaatgaatcccagcccca

SEQ ID NO: 3805710 - DNA, 25 bp, Homo sapien
cctgctagaggtgcgaccttgggca

SEQ ID NO: 3805711 - DNA, 25 bp, Homo sapien
tctgtttctagtgcagtgtgtggcc

SEQ ID NO: 3805712 - DNA, 25 bp, Homo sapien
catgacttccacgttcttttgacca

SEQ ID NO: 3805713 - DNA, 25 bp, Homo sapien
gacttccacgttcttttgaccatat

SEQ ID NO: 3805714 - DNA, 25 bp, Homo sapien
tctcatgacttccacgttcttttga

SEQ ID NO: 3805715 - DNA, 25 bp, Homo sapien
ctgctctcatgacttccacgttctt

SEQ ID NO: 3805716 - DNA, 25 bp, Homo sapien
tctgtggccacataaaatgtcgcag

SEQ ID NO: 3805717 - DNA, 25 bp, Homo sapien
tgtgacatcgggtacagctctgtgg

SEQ ID NO: 3805718 - DNA, 25 bp, Homo sapien
cagaccttggaatttctcactgagc

SEQ ID NO: 3805719 - DNA, 25 bp, Homo sapien
gcaaaccttgcatttcctagggaaa

SEQ ID NO: 3805720 - DNA, 25 bp, Homo sapien
ccagaatgtaaaaacggtagggcat

SEQ ID NO: 3805721 - DNA, 25 bp, Homo sapien
aattcctgttcctctgacaccctga

SEQ ID NO: 3805722 - DNA, 25 bp, Homo sapien
ctccactggaattcctgttcctctg

SEQ ID NO: 3805723 - DNA, 25 bp, Homo sapien
tggaattcctgttcctctgacaccc

SEQ ID NO: 3805724 - DNA, 25 bp, Homo sapien
cactggaattcctgttcctctgaca

SEQ ID NO: 3805725 - DNA, 25 bp, Homo sapien
ccttgttggatttcacactattcat

SEQ ID NO: 3805726 - DNA, 25 bp, Homo sapien
aaggtctgaattattatcctgtaat

SEQ ID NO: 3805727 - DNA, 25 bp, Homo sapien
cactggtagcgtcttaattcaatta

SEQ ID NO: 3805728 - DNA, 25 bp, Homo sapien
ctgtaattcacccactggtagcgtc

SEQ ID NO: 3805729 - DNA, 25 bp, Homo sapien
acaggccagcccctattaaacagaa

SEQ ID NO: 3805730 - DNA, 25 bp, Homo sapien
ccggcaacagtcaaggtcactgaca

SEQ ID NO: 3805731 - DNA, 25 bp, Homo sapien
gcagacataacttcaaaagccggaa

SEQ ID NO: 3805732 - DNA, 25 bp, Homo sapien
gacttgtctgacacgggcccatttg

SEQ ID NO: 3805733 - DNA, 25 bp, Homo sapien
ccagatgtggttttcggcagacata

SEQ ID NO: 3805734 - DNA, 25 bp, Homo sapien
gaggtcatgtaacccctgccagttc

SEQ ID NO: 3805735 - DNA, 25 bp, Homo sapien
accgtaactaatgctcctctctcct

SEQ ID NO: 3805736 - DNA, 25 bp, Homo sapien
gcaagatcatcagccgtcgaagcac

SEQ ID NO: 3805737 - DNA, 25 bp, Homo sapien
tcgaagcaccgcctctactgagttc

SEQ ID NO: 3805738 - DNA, 25 bp, Homo sapien
gctggatggcagttcggagaaatcc

SEQ ID NO: 3805739 - DNA, 25 bp, Homo sapien
tataataggagatagctacttgatc

SEQ ID NO: 3805740 - DNA, 25 bp, Homo sapien
tcttatacctacttctctaatatac

SEQ ID NO: 3805741 - DNA, 25 bp, Homo sapien
cttctctaatatacattttactttg

SEQ ID NO: 3805742 - DNA, 25 bp, Homo sapien
aagtcctagcccaaccaattaggca

SEQ ID NO: 3805743 - DNA, 25 bp, Homo sapien
aagaaaggaatacaaggcacccaag

SEQ ID NO: 3805744 - DNA, 25 bp, Homo sapien
tacaaaatcaatagtgtgtttatac

SEQ ID NO: 3805745 - DNA, 25 bp, Homo sapien
cagataacataatcttatgaagtcc

SEQ ID NO: 3805746 - DNA, 25 bp, Homo sapien
caagcaacgcgtaggctagcatttc

SEQ ID NO: 3805747 - DNA, 25 bp, Homo sapien
cgcgtaggctagcatttctccccag

SEQ ID NO: 3805748 - DNA, 25 bp, Homo sapien
gcaacgcgtaggctagcatttctcc

SEQ ID NO: 3805749 - DNA, 25 bp, Homo sapien
aacgcgtaggctagcatttctcccc

SEQ ID NO: 3805750 - DNA, 25 bp, Homo sapien
ttcggaaaggctggctttaatccaa

SEQ ID NO: 3805751 - DNA, 25 bp, Homo sapien
cggaaaggctggctttaatccaaat

SEQ ID NO: 3805752 - DNA, 25 bp, Homo sapien
cttcggaaaggctggctttaatcca

SEQ ID NO: 3805753 - DNA, 25 bp, Homo sapien
aatgcatcatgaccagtccaatctt

SEQ ID NO: 3805754 - DNA, 25 bp, Homo sapien
ccaagcatgagcctgcattccttca

SEQ ID NO: 3805755 - DNA, 25 bp, Homo sapien
cggtaagccttggagatgttttttg

SEQ ID NO: 3805756 - DNA, 25 bp, Homo sapien
tgttgtaaccacttcttcggtaagc

SEQ ID NO: 3805757 - DNA, 25 bp, Homo sapien
ccttcaggttagtgaagatttccct

SEQ ID NO: 3805758 - DNA, 25 bp, Homo sapien
tcaaatggcacacgctgaaatatgt

SEQ ID NO: 3805759 - DNA, 25 bp, Homo sapien
tgggtatttgttttagaggcctcac

SEQ ID NO: 3805760 - DNA, 25 bp, Homo sapien
tcagaaatgactgcattacctgccc

SEQ ID NO: 3805761 - DNA, 25 bp, Homo sapien
gaggcctcactctaagttattaccg

SEQ ID NO: 3805762 - DNA, 25 bp, Homo sapien
ttgtaccactcctttgcccgcctgg

SEQ ID NO: 3805763 - DNA, 25 bp, Homo sapien
tgtaccactcctttgcccgcctggg

SEQ ID NO: 3805764 - DNA, 25 bp, Homo sapien
cttgtaccactcctttgcccgcctg

SEQ ID NO: 3805765 - DNA, 25 bp, Homo sapien
agagtgcttggccccaagatgggca

SEQ ID NO: 3805766 - DNA, 25 bp, Homo sapien
gagtgcttggccccaagatgggcac

SEQ ID NO: 3805767 - DNA, 25 bp, Homo sapien
taaccacattgactcattaacccaa

SEQ ID NO: 3805768 - DNA, 25 bp, Homo sapien
acttacttcagggatgttctaacca

SEQ ID NO: 3805769 - DNA, 25 bp, Homo sapien
gatgttctaaccacattgactcatt

SEQ ID NO: 3805770 - DNA, 25 bp, Homo sapien
gtatcaacaatagccagtgtttatt

SEQ ID NO: 3805771 - DNA, 25 bp, Homo sapien
tgcaagtgccagtacaagcacatcg

SEQ ID NO: 3805772 - DNA, 25 bp, Homo sapien
aactggaatcgcaagctgggctgca

SEQ ID NO: 3805773 - DNA, 25 bp, Homo sapien
catggtggacaacaacctgcgcatc

SEQ ID NO: 3805774 - DNA, 25 bp, Homo sapien
caatgacttcaagccgcaggacttc

SEQ ID NO: 3805775 - DNA, 25 bp, Homo sapien
agaaccggtgttaattgcttacact

SEQ ID NO: 3805776 - DNA, 25 bp, Homo sapien
cggtgttaattgcttacactggaac

SEQ ID NO: 3805777 - DNA, 25 bp, Homo sapien
acactggaacatatttgctgttgga

SEQ ID NO: 3805778 - DNA, 25 bp, Homo sapien
tgttaattgcttacactggaacata

SEQ ID NO: 3805779 - DNA, 25 bp, Homo sapien
gcaccattaggtgcatgaaacgcta

SEQ ID NO: 3805780 - DNA, 25 bp, Homo sapien
cgctatcaaggaatttaactgtaat

SEQ ID NO: 3805781 - DNA, 25 bp, Homo sapien
ctccccttgtttattgccgtgaaca

SEQ ID NO: 3805782 - DNA, 25 bp, Homo sapien
tgaacacaggaactgcaccattagg

SEQ ID NO: 3805783 - DNA, 25 bp, Homo sapien
gcagttccaactgggccctttggca

SEQ ID NO: 3805784 - DNA, 25 bp, Homo sapien
ggaacagcttggctaagtgggtggg

SEQ ID NO: 3805785 - DNA, 25 bp, Homo sapien
ggcggcccttgcagttccaactggg

SEQ ID NO: 3805786 - DNA, 25 bp, Homo sapien
tttcccaaggcggcccttgcagttc

SEQ ID NO: 3805787 - DNA, 25 bp, Homo sapien
gatctgatgtgttctagtactccct

SEQ ID NO: 3805788 - DNA, 25 bp, Homo sapien
tgtaggtgctttaacccattgcctt

SEQ ID NO: 3805789 - DNA, 25 bp, Homo sapien
gaccttctgagaaaggccaccctgt

SEQ ID NO: 3805790 - DNA, 25 bp, Homo sapien
tgaaatcgggagctgatgtgatgct

SEQ ID NO: 3805791 - DNA, 25 bp, Homo sapien
tctggggacgttcagaagatgtgca

SEQ ID NO: 3805792 - DNA, 25 bp, Homo sapien
gacatctggggacgttcagaagatg

SEQ ID NO: 3805793 - DNA, 25 bp, Homo sapien
catctggggacgttcagaagatgtg

SEQ ID NO: 3805794 - DNA, 25 bp, Homo sapien
gggacgttcagaagatgtgcaggat

SEQ ID NO: 3805795 - DNA, 25 bp, Homo sapien
agtggtccacacttggttgcaaggg

SEQ ID NO: 3805796 - DNA, 25 bp, Homo sapien
ttgatgtgcagacgaattgcttggg

SEQ ID NO: 3805797 - DNA, 25 bp, Homo sapien
tgagattctgcacatctaacacgtt

SEQ ID NO: 3805798 - DNA, 25 bp, Homo sapien
gctgttaatgtgcagaccctgattc

SEQ ID NO: 3805799 - DNA, 25 bp, Homo sapien
tttattatttaaatgatgatgcctg

SEQ ID NO: 3805800 - DNA, 25 bp, Homo sapien
tattatttaaatgatgatgcctgta

SEQ ID NO: 3805801 - DNA, 25 bp, Homo sapien
gttttattatttaaatgatgatgcc

SEQ ID NO: 3805802 - DNA, 25 bp, Homo sapien
tgttttattatttaaatgatgatgc

SEQ ID NO: 3805803 - DNA, 25 bp, Homo sapien
ggccttccaatcgacattggatgtc

SEQ ID NO: 3805804 - DNA, 25 bp, Homo sapien
ccaatcgacattggatgtcctgcag

SEQ ID NO: 3805805 - DNA, 25 bp, Homo sapien
cttccaatcgacattggatgtcctg

SEQ ID NO: 3805806 - DNA, 25 bp, Homo sapien
tccaatcgacattggatgtcctgca

SEQ ID NO: 3805807 - DNA, 25 bp, Homo sapien
aagcagcccggcttcagtatcaagg

SEQ ID NO: 3805808 - DNA, 25 bp, Homo sapien
agaacttctcggagatgcgtcctga

SEQ ID NO: 3805809 - DNA, 25 bp, Homo sapien
ctgcggcaatgaagaagaacttctc

SEQ ID NO: 3805810 - DNA, 25 bp, Homo sapien
agtatcaaggtgcagctgccggctt

SEQ ID NO: 3805811 - DNA, 25 bp, Homo sapien
cctggatctcttcatccatccccat

SEQ ID NO: 3805812 - DNA, 25 bp, Homo sapien
catctttagagcaaatagacagctg

SEQ ID NO: 3805813 - DNA, 25 bp, Homo sapien
gcattgtagtacagttgttcgtggc

SEQ ID NO: 3805814 - DNA, 25 bp, Homo sapien
gcaaatagacagctgtcagcacccc

SEQ ID NO: 3805815 - DNA, 25 bp, Homo sapien
ccccgccattcaaaagggcattgta

SEQ ID NO: 3805816 - DNA, 25 bp, Homo sapien
tctcagggtagaacataaacatggc

SEQ ID NO: 3805817 - DNA, 25 bp, Homo sapien
ggcagaagacaattgcgggatttta

SEQ ID NO: 3805818 - DNA, 25 bp, Homo sapien
ccccttgagttgagaggtacttgtc

SEQ ID NO: 3805819 - DNA, 25 bp, Homo sapien
ggtacttgtcacatgtctcagggta

SEQ ID NO: 3805820 - DNA, 25 bp, Homo sapien
gtgaggtcctcagcaccgtatttga

SEQ ID NO: 3805821 - DNA, 25 bp, Homo sapien
ggtcctcagcaccgtatttgacctt

SEQ ID NO: 3805822 - DNA, 25 bp, Homo sapien
gaggtcctcagcaccgtatttgacc

SEQ ID NO: 3805823 - DNA, 25 bp, Homo sapien
tgaggtcctcagcaccgtatttgac

SEQ ID NO: 3805824 - DNA, 25 bp, Homo sapien
ggtaaagagcttcggcagtcctttg

SEQ ID NO: 3805825 - DNA, 25 bp, Homo sapien
gggagggtaaagagcttcggcagtc

SEQ ID NO: 3805826 - DNA, 25 bp, Homo sapien
catacagagggagggtaaagagctt

SEQ ID NO: 3805827 - DNA, 25 bp, Homo sapien
gagggtaaagagcttcggcagtcct

SEQ ID NO: 3805828 - DNA, 25 bp, Homo sapien
ttttctctcactagtgtagtggttt

SEQ ID NO: 3805829 - DNA, 25 bp, Homo sapien
tgttagctttggtttgtcaagtttc

SEQ ID NO: 3805830 - DNA, 25 bp, Homo sapien
cactagtgtagtggttttcttgttt

SEQ ID NO: 3805831 - DNA, 25 bp, Homo sapien
tattctgttagctttggtttgtcaa

SEQ ID NO: 3805832 - DNA, 25 bp, Homo sapien
gacgttgcattttgctaaagcacaa

SEQ ID NO: 3805833 - DNA, 25 bp, Homo sapien
caaacatcatctttgcatgcgggaa

SEQ ID NO: 3805834 - DNA, 25 bp, Homo sapien
aggattgcatgacgttgcattttgc

SEQ ID NO: 3805835 - DNA, 25 bp, Homo sapien
cgggaaacaggcctttagctggttg

SEQ ID NO: 3805836 - DNA, 25 bp, Homo sapien
aaattcatggaaccaggttctgaat

SEQ ID NO: 3805837 - DNA, 25 bp, Homo sapien
ccaggttctgaattccagtagtgct

SEQ ID NO: 3805838 - DNA, 25 bp, Homo sapien
agtgcttcggatctgcataactgac

SEQ ID NO: 3805839 - DNA, 25 bp, Homo sapien
ccagtagtgcttcggatctgcataa

SEQ ID NO: 3805840 - DNA, 25 bp, Homo sapien
atggaatttaagacgaggaaaatgc

SEQ ID NO: 3805841 - DNA, 25 bp, Homo sapien
aggaaaatgcagacttgcctgtgaa

SEQ ID NO: 3805842 - DNA, 25 bp, Homo sapien
cgcgatggaatttaagacgaggaaa

SEQ ID NO: 3805843 - DNA, 25 bp, Homo sapien
tgcagacttgcctgtgaaatccaag

SEQ ID NO: 3805844 - DNA, 25 bp, Homo sapien
ggggttgagtggatgtagagagaga

SEQ ID NO: 3805845 - DNA, 25 bp, Homo sapien
gggggttgagtggatgtagagagag

SEQ ID NO: 3805846 - DNA, 25 bp, Homo sapien
cgatgcgggtctttgatatgtatgg

SEQ ID NO: 3805847 - DNA, 25 bp, Homo sapien
gagtgaaacgatgcgggtctttgat

SEQ ID NO: 3805848 - DNA, 25 bp, Homo sapien
ggtggtctggaatccagtaaacagc

SEQ ID NO: 3805849 - DNA, 25 bp, Homo sapien
tgaggtctggatcaacctgttctgc

SEQ ID NO: 3805850 - DNA, 25 bp, Homo sapien
caagaggagttcgtggcacaatccc

SEQ ID NO: 3805851 - DNA, 25 bp, Homo sapien
gttcgtggcacaatcccggaggcct

SEQ ID NO: 3805852 - DNA, 25 bp, Homo sapien
ctatgcctgagtcgctgttgatgca

SEQ ID NO: 3805853 - DNA, 25 bp, Homo sapien
cactgggtgccgtgaagcaagagga

SEQ ID NO: 3805854 - DNA, 25 bp, Homo sapien
gaagccctgacttgcagtgatgaat

SEQ ID NO: 3805855 - DNA, 25 bp, Homo sapien
caggactctctgcttaacggccaga

SEQ ID NO: 3805856 - DNA, 25 bp, Homo sapien
taaatccctggtgtcagcttcccgg

SEQ ID NO: 3805857 - DNA, 25 bp, Homo sapien
tggtgactgccagcgaatcaggtga

SEQ ID NO: 3805858 - DNA, 25 bp, Homo sapien
gcccactaagctcgtaccaggtctg

SEQ ID NO: 3805859 - DNA, 25 bp, Homo sapien
atgttgcatgctctcgcccactaag

SEQ ID NO: 3805860 - DNA, 25 bp, Homo sapien
gttgcatgctctcgcccactaagct

SEQ ID NO: 3805861 - DNA, 25 bp, Homo sapien
taagctcgtaccaggtctgactcat

SEQ ID NO: 3805862 - DNA, 25 bp, Homo sapien
cctcgggccaactctgttgtcgtgg

SEQ ID NO: 3805863 - DNA, 25 bp, Homo sapien
gctgccccgaacagaaggagagctg

SEQ ID NO: 3805864 - DNA, 25 bp, Homo sapien
ccaactctgttgtcgtgggtgatga

SEQ ID NO: 3805865 - DNA, 25 bp, Homo sapien
ctttgcacgtttttggctcctcggg

SEQ ID NO: 3805866 - DNA, 25 bp, Homo sapien
acatacatcgtagggacaccagtgg

SEQ ID NO: 3805867 - DNA, 25 bp, Homo sapien
cagtacaggctctgacgcaagcaaa

SEQ ID NO: 3805868 - DNA, 25 bp, Homo sapien
cattgtaggatatggagcgccatcc

SEQ ID NO: 3805869 - DNA, 25 bp, Homo sapien
cctagggcaacgctggctgtgatcc

SEQ ID NO: 3805870 - DNA, 25 bp, Homo sapien
caagtcaacagttgccgagccagga

SEQ ID NO: 3805871 - DNA, 25 bp, Homo sapien
gagccaggaccgtatgtcagacacc

SEQ ID NO: 3805872 - DNA, 25 bp, Homo sapien
gtttccagtgcccaagacattgagg

SEQ ID NO: 3805873 - DNA, 25 bp, Homo sapien
cataagcgagttcttgattcagctc

SEQ ID NO: 3805874 - DNA, 25 bp, Homo sapien
gtacagcatcaactcctacctgctc

SEQ ID NO: 3805875 - DNA, 25 bp, Homo sapien
ctgggattggttgtacagcatcaac

SEQ ID NO: 3805876 - DNA, 25 bp, Homo sapien
tacagcatcaactcctacctgctca

SEQ ID NO: 3805877 - DNA, 25 bp, Homo sapien
tgtacagcatcaactcctacctgct

SEQ ID NO: 3805878 - DNA, 25 bp, Homo sapien
tcatcggatcatgtctctctgctcc

SEQ ID NO: 3805879 - DNA, 25 bp, Homo sapien
tacagccgcaactttattggatagg

SEQ ID NO: 3805880 - DNA, 25 bp, Homo sapien
gatgttcggattaagaacagatctc

SEQ ID NO: 3805881 - DNA, 25 bp, Homo sapien
ttctcttttggttcggctcagggcc

SEQ ID NO: 3805882 - DNA, 25 bp, Homo sapien
cccctgttgagtttgtttctgctaa

SEQ ID NO: 3805883 - DNA, 25 bp, Homo sapien
gaggagcctcgaggatggccttgag

SEQ ID NO: 3805884 - DNA, 25 bp, Homo sapien
ggccttgagcatctcagcctccgtt

SEQ ID NO: 3805885 - DNA, 25 bp, Homo sapien
ctttgtggggaggagcctcgaggat

SEQ ID NO: 3805886 - DNA, 25 bp, Homo sapien
ttgagcatctcagcctccgttgcca

SEQ ID NO: 3805887 - DNA, 25 bp, Homo sapien
gaaaagggacaggatctgagactct

SEQ ID NO: 3805888 - DNA, 25 bp, Homo sapien
gggctgctcagctcgctgtgtccca

SEQ ID NO: 3805889 - DNA, 25 bp, Homo sapien
aggatctgagactcttttggtttca

SEQ ID NO: 3805890 - DNA, 25 bp, Homo sapien
ggtttcatcaggggctgctcagctc

SEQ ID NO: 3805891 - DNA, 25 bp, Homo sapien
ctcatcctcagctgtagcaggaatt

SEQ ID NO: 3805892 - DNA, 25 bp, Homo sapien
aacaaaggatccagtgctctgagtt

SEQ ID NO: 3805893 - DNA, 25 bp, Homo sapien
tcagctgtagcaggaattgtgttgg

SEQ ID NO: 3805894 - DNA, 25 bp, Homo sapien
tcctcagctgtagcaggaattgtgt

SEQ ID NO: 3805895 - DNA, 25 bp, Homo sapien
ctccagaactgagccggccttgtgt

SEQ ID NO: 3805896 - DNA, 25 bp, Homo sapien
ctccggcctcgtggcttggctgctg

SEQ ID NO: 3805897 - DNA, 25 bp, Homo sapien
ggctgctgcgagcacggatgcttta

SEQ ID NO: 3805898 - DNA, 25 bp, Homo sapien
gcacggatgctttataaagtgactt

SEQ ID NO: 3805899 - DNA, 25 bp, Homo sapien
gttgatatgaggttctggacactcg

SEQ ID NO: 3805900 - DNA, 25 bp, Homo sapien
agttgatatgaggttctggacactc

SEQ ID NO: 3805901 - DNA, 25 bp, Homo sapien
aagttgatatgaggttctggacact

SEQ ID NO: 3805902 - DNA, 25 bp, Homo sapien
ccccaggagctgtgcggagcgtttt

SEQ ID NO: 3805903 - DNA, 25 bp, Homo sapien
ggctcagagaaggagttgtaggtat

SEQ ID NO: 3805904 - DNA, 25 bp, Homo sapien
aggagctgtgcggagcgtttttggg

SEQ ID NO: 3805905 - DNA, 25 bp, Homo sapien
gggctcagagaaggagttgtaggta

SEQ ID NO: 3805906 - DNA, 25 bp, Homo sapien
catggcctttcatggggagctcgca

SEQ ID NO: 3805907 - DNA, 25 bp, Homo sapien
cagtctgctgagctagggagtttat

SEQ ID NO: 3805908 - DNA, 25 bp, Homo sapien
agctcgcagtctgctgagctaggga

SEQ ID NO: 3805909 - DNA, 25 bp, Homo sapien
tctccactaatgaggtcgtggcaag

SEQ ID NO: 3805910 - DNA, 25 bp, Homo sapien
ttgacattgacatgccagcaggagc

SEQ ID NO: 3805911 - DNA, 25 bp, Homo sapien
aaagccagagtctgccgatgtgcgt

SEQ ID NO: 3805912 - DNA, 25 bp, Homo sapien
taaaggctgttgacattgacatgcc

SEQ ID NO: 3805913 - DNA, 25 bp, Homo sapien
cgtggcagcctcctagctgcacagg

SEQ ID NO: 3805914 - DNA, 25 bp, Homo sapien
ttcaccacggtgcagatgcttgccc

SEQ ID NO: 3805915 - DNA, 25 bp, Homo sapien
gaggcagccgctgagaattccgtaa

SEQ ID NO: 3805916 - DNA, 25 bp, Homo sapien
tcaaagagatgtttcaccacggtgc

SEQ ID NO: 3805917 - DNA, 25 bp, Homo sapien
gaattccgtaaatctgtcctgctct

SEQ ID NO: 3805918 - DNA, 25 bp, Homo sapien
attaggttcgtctcacagatgcctg

SEQ ID NO: 3805919 - DNA, 25 bp, Homo sapien
aagttaggggagagcgctattaaca

SEQ ID NO: 3805920 - DNA, 25 bp, Homo sapien
tctgcgattaggttcgtctcacaga

SEQ ID NO: 3805921 - DNA, 25 bp, Homo sapien
caaaccaaagttaggggagagcgct

SEQ ID NO: 3805922 - DNA, 25 bp, Homo sapien
tatctcttaccttcacaattaccat

SEQ ID NO: 3805923 - DNA, 25 bp, Homo sapien
gctatctcttaccttcacaattacc

SEQ ID NO: 3805924 - DNA, 25 bp, Homo sapien
ctatctcttaccttcacaattacca

SEQ ID NO: 3805925 - DNA, 25 bp, Homo sapien
gtgaagtacaagagtagtggtcatt

SEQ ID NO: 3805926 - DNA, 25 bp, Homo sapien
cagtgtcccatacaataggcttttt

SEQ ID NO: 3805927 - DNA, 25 bp, Homo sapien
acatcagtgtcccatacaataggct

SEQ ID NO: 3805928 - DNA, 25 bp, Homo sapien
gaagtacaagagtagtggtcattca

SEQ ID NO: 3805929 - DNA, 25 bp, Homo sapien
tccaggctgagtgggagtccccaga

SEQ ID NO: 3805930 - DNA, 25 bp, Homo sapien
gagttccttgtaatgcagacgatgg

SEQ ID NO: 3805931 - DNA, 25 bp, Homo sapien
ctgttccccgctgagggttggttga

SEQ ID NO: 3805932 - DNA, 25 bp, Homo sapien
cagactttcaccagttcagagcaaa

SEQ ID NO: 3805933 - DNA, 25 bp, Homo sapien
aagctggctactgtcgtcagagcct

SEQ ID NO: 3805934 - DNA, 25 bp, Homo sapien
catgcccgtggaattgctgagatcc

SEQ ID NO: 3805935 - DNA, 25 bp, Homo sapien
ttctccatgcccgtggaattgctga

SEQ ID NO: 3805936 - DNA, 25 bp, Homo sapien
gggctgcagatttggccccagccct

SEQ ID NO: 3805937 - DNA, 25 bp, Homo sapien
gcaggatcctgcgtcagtttctgaa

SEQ ID NO: 3805938 - DNA, 25 bp, Homo sapien
tgaatgccagtcacttcccatttgc

SEQ ID NO: 3805939 - DNA, 25 bp, Homo sapien
tcagtgtgcgttgtcagcattgttt

SEQ ID NO: 3805940 - DNA, 25 bp, Homo sapien
tagaaatgcaggatcctgcgtcagt

SEQ ID NO: 3805941 - DNA, 25 bp, Homo sapien
cagacgccgcagaaaatagcctggc

SEQ ID NO: 3805942 - DNA, 25 bp, Homo sapien
catcatctttatgcgcagacgccgc

SEQ ID NO: 3805943 - DNA, 25 bp, Homo sapien
cctggccggattctgatggtagcac

SEQ ID NO: 3805944 - DNA, 25 bp, Homo sapien
gatttccatgcgaggagtcgctggt

SEQ ID NO: 3805945 - DNA, 25 bp, Homo sapien
ctttgtgagagtccagcgcaggttt

SEQ ID NO: 3805946 - DNA, 25 bp, Homo sapien
tccagcgcaggttttgctgtaggtt

SEQ ID NO: 3805947 - DNA, 25 bp, Homo sapien
tcctttgtgagagtccagcgcaggt

SEQ ID NO: 3805948 - DNA, 25 bp, Homo sapien
ggttttgctgtaggttgaaggccat

SEQ ID NO: 3805949 - DNA, 25 bp, Homo sapien
gaggtagcacctgacacgtaatatt

SEQ ID NO: 3805950 - DNA, 25 bp, Homo sapien
cacgtaatattttgataagttgctg

SEQ ID NO: 3805951 - DNA, 25 bp, Homo sapien
tccatagtcttgcagcagagaggta

SEQ ID NO: 3805952 - DNA, 25 bp, Homo sapien
ttacagcgataattacaagcacgga

SEQ ID NO: 3805953 - DNA, 25 bp, Homo sapien
acgctggtcgtgtggaatttcagca

SEQ ID NO: 3805954 - DNA, 25 bp, Homo sapien
gtggaatttcagcagcctcgactcc

SEQ ID NO: 3805955 - DNA, 25 bp, Homo sapien
tggaatttcagcagcctcgactccg

SEQ ID NO: 3805956 - DNA, 25 bp, Homo sapien
ctgcagacgctggtcgtgtggaatt

SEQ ID NO: 3805957 - DNA, 25 bp, Homo sapien
gagcttattctggtgatgaaggaga

SEQ ID NO: 3805958 - DNA, 25 bp, Homo sapien
tggaagtataagttatccgaagagc

SEQ ID NO: 3805959 - DNA, 25 bp, Homo sapien
tagcatttttatccagtgctggctg

SEQ ID NO: 3805960 - DNA, 25 bp, Homo sapien
cttaattggtaggacatagccgact

SEQ ID NO: 3805961 - DNA, 25 bp, Homo sapien
ggagcagacgtgcacttctttctgt

SEQ ID NO: 3805962 - DNA, 25 bp, Homo sapien
ccctgtcttttctacaagagtggag

SEQ ID NO: 3805963 - DNA, 25 bp, Homo sapien
gagggtgtcatacgtggcatcagca

SEQ ID NO: 3805964 - DNA, 25 bp, Homo sapien
tggagggcatcagtcccttggactt

SEQ ID NO: 3805965 - DNA, 25 bp, Homo sapien
ggagtgcctctgcccagccaagacc

SEQ ID NO: 3805966 - DNA, 25 bp, Homo sapien
tgggaggtgaggagaccctccgcct

SEQ ID NO: 3805967 - DNA, 25 bp, Homo sapien
agtgcctctgcccagccaagacccc

SEQ ID NO: 3805968 - DNA, 25 bp, Homo sapien
tgcctctgcccagccaagaccccgt

SEQ ID NO: 3805969 - DNA, 25 bp, Homo sapien
tgacagcctgggtcgatggtcctac

SEQ ID NO: 3805970 - DNA, 25 bp, Homo sapien
tggggagatactgcagccataggca

SEQ ID NO: 3805971 - DNA, 25 bp, Homo sapien
cctgggtcgatggtcctacgatgat

SEQ ID NO: 3805972 - DNA, 25 bp, Homo sapien
cagtccatggatgtgacagcctggg

SEQ ID NO: 3805973 - DNA, 25 bp, Homo sapien
tttcacaattacaggctcacgtctg

SEQ ID NO: 3805974 - DNA, 25 bp, Homo sapien
caattacaggctcacgtctgctgga

SEQ ID NO: 3805975 - DNA, 25 bp, Homo sapien
cacaattacaggctcacgtctgctg

SEQ ID NO: 3805976 - DNA, 25 bp, Homo sapien
ttacaggctcacgtctgctggagtc

SEQ ID NO: 3805977 - DNA, 25 bp, Homo sapien
aattcatcccactgtggcttctcat

SEQ ID NO: 3805978 - DNA, 25 bp, Homo sapien
atcctccaaattcatcccactgtgg

SEQ ID NO: 3805979 - DNA, 25 bp, Homo sapien
caaattcatcccactgtggcttctc

SEQ ID NO: 3805980 - DNA, 25 bp, Homo sapien
ttatcctccaaattcatcccactgt

SEQ ID NO: 3805981 - DNA, 25 bp, Homo sapien
tggcagttgacctgcaacaaggctg

SEQ ID NO: 3805982 - DNA, 25 bp, Homo sapien
ctggcagttgacctgcaacaaggct

SEQ ID NO: 3805983 - DNA, 25 bp, Homo sapien
tctaggggcaccaccattgaattgc

SEQ ID NO: 3805984 - DNA, 25 bp, Homo sapien
catctgtttaattaacaaccggact

SEQ ID NO: 3805985 - DNA, 25 bp, Homo sapien
cctctcctgagggttgtttacaatc

SEQ ID NO: 3805986 - DNA, 25 bp, Homo sapien
ttgctcaggccaataggaaacattt

SEQ ID NO: 3805987 - DNA, 25 bp, Homo sapien
tcttgcagtcactattgtcttcagc

SEQ ID NO: 3805988 - DNA, 25 bp, Homo sapien
cagctgtgatgtacatgagatgatt

SEQ ID NO: 3805989 - DNA, 25 bp, Homo sapien
tcaataggcaagtgagtgactttgg

SEQ ID NO: 3805990 - DNA, 25 bp, Homo sapien
ctagtcaataggcaagtgagtgact

SEQ ID NO: 3805991 - DNA, 25 bp, Homo sapien
cattgctaccacattctgcaagatc

SEQ ID NO: 3805992 - DNA, 25 bp, Homo sapien
tgctaccacattctgcaagatcttc

SEQ ID NO: 3805993 - DNA, 25 bp, Homo sapien
ccacattctgcaagatcttccaggg

SEQ ID NO: 3805994 - DNA, 25 bp, Homo sapien
taccacattctgcaagatcttccag

SEQ ID NO: 3805995 - DNA, 25 bp, Homo sapien
ctgcataggcagcatcaaagagcag

SEQ ID NO: 3805996 - DNA, 25 bp, Homo sapien
gcatcaaagagcaggtaaaggtggc

SEQ ID NO: 3805997 - DNA, 25 bp, Homo sapien
gcagcatcaaagagcaggtaaaggt

SEQ ID NO: 3805998 - DNA, 25 bp, Homo sapien
cataggcagcatcaaagagcaggta

SEQ ID NO: 3805999 - DNA, 25 bp, Homo sapien
gagaagccctggtctaagctgctag

SEQ ID NO: 3806000 - DNA, 25 bp, Homo sapien
tactggcatccggtgactaaaggcc

SEQ ID NO: 3806001 - DNA, 25 bp, Homo sapien
gacttggaaatgaactaggcaggca

SEQ ID NO: 3806002 - DNA, 25 bp, Homo sapien
taccctgtgctaggccatgtctatg

SEQ ID NO: 3806003 - DNA, 25 bp, Homo sapien
tttcctttctcatgctggtgttcca

SEQ ID NO: 3806004 - DNA, 25 bp, Homo sapien
cacatggccagtatctgcctttcct

SEQ ID NO: 3806005 - DNA, 25 bp, Homo sapien
ttccatctgcatgaagcctgggctc

SEQ ID NO: 3806006 - DNA, 25 bp, Homo sapien
gtccacatggccagtatctgccttt

SEQ ID NO: 3806007 - DNA, 25 bp, Homo sapien
aaattggattggcatagagcaagcg

SEQ ID NO: 3806008 - DNA, 25 bp, Homo sapien
gttgacaagtggaaattggattggc

SEQ ID NO: 3806009 - DNA, 25 bp, Homo sapien
gtttgagagagacattagactgggc

SEQ ID NO: 3806010 - DNA, 25 bp, Homo sapien
caagcgtggatgtcccagaagtttg

SEQ ID NO: 3806011 - DNA, 25 bp, Homo sapien
agaagcagggggggcataattctca

SEQ ID NO: 3806012 - DNA, 25 bp, Homo sapien
tgagaagcagggggggcataattct

SEQ ID NO: 3806013 - DNA, 25 bp, Homo sapien
gaagcagggggggcataattctcac

SEQ ID NO: 3806014 - DNA, 25 bp, Homo sapien
ctgcaagaagggcaccaacaaatca

SEQ ID NO: 3806015 - DNA, 25 bp, Homo sapien
tgcaagaagggcaccaacaaatcac

SEQ ID NO: 3806016 - DNA, 25 bp, Homo sapien
gcaagaagggcaccaacaaatcaca

SEQ ID NO: 3806017 - DNA, 25 bp, Homo sapien
cataggaagaagcaggatttttctg

SEQ ID NO: 3806018 - DNA, 25 bp, Homo sapien
gtcataggaagaagcaggatttttc

SEQ ID NO: 3806019 - DNA, 25 bp, Homo sapien
taggaagaagcaggatttttctgct

SEQ ID NO: 3806020 - DNA, 25 bp, Homo sapien
ctgtcataggaagaagcaggatttt

SEQ ID NO: 3806021 - DNA, 25 bp, Homo sapien
gctaattcttgttgatgactcacta

SEQ ID NO: 3806022 - DNA, 25 bp, Homo sapien
tttggatgcagtgcactaacagaga

SEQ ID NO: 3806023 - DNA, 25 bp, Homo sapien
tagattagcttcttggcttgcatgg

SEQ ID NO: 3806024 - DNA, 25 bp, Homo sapien
cttttcctctgttgatagctgctaa

SEQ ID NO: 3806025 - DNA, 25 bp, Homo sapien
gatttgaaatagcacactgggtatg

SEQ ID NO: 3806026 - DNA, 25 bp, Homo sapien
ggatttgaaatagcacactgggtat

SEQ ID NO: 3806027 - DNA, 25 bp, Homo sapien
gcacactgggtatgggtgcatcttc

SEQ ID NO: 3806028 - DNA, 25 bp, Homo sapien
ctgggtatgggtgcatcttcctcat

SEQ ID NO: 3806029 - DNA, 25 bp, Homo sapien
cttgcacatagaatgctgttgcctg

SEQ ID NO: 3806030 - DNA, 25 bp, Homo sapien
gctggaagccattgtttgttctgat

SEQ ID NO: 3806031 - DNA, 25 bp, Homo sapien
cagccattcaccgaagattttccgg

SEQ ID NO: 3806032 - DNA, 25 bp, Homo sapien
gattttccggtatcttgcacataga

SEQ ID NO: 3806033 - DNA, 25 bp, Homo sapien
gtggaatagccaaaccagatttttc

SEQ ID NO: 3806034 - DNA, 25 bp, Homo sapien
tactgagtccctgtggagtggaata

SEQ ID NO: 3806035 - DNA, 25 bp, Homo sapien
ttgacagtaggttcatactgagtcc

SEQ ID NO: 3806036 - DNA, 25 bp, Homo sapien
cagtcttgttagtggaagcttctcc

SEQ ID NO: 3806037 - DNA, 25 bp, Homo sapien
ctacagtatgtctagtgagacattt

SEQ ID NO: 3806038 - DNA, 25 bp, Homo sapien
tacagtatgtctagtgagacattta

SEQ ID NO: 3806039 - DNA, 25 bp, Homo sapien
acagtatgtctagtgagacatttac

SEQ ID NO: 3806040 - DNA, 25 bp, Homo sapien
ggagatgcctccttcatgcaccagg

SEQ ID NO: 3806041 - DNA, 25 bp, Homo sapien
tgctgtccactttgtatgtctccct

SEQ ID NO: 3806042 - DNA, 25 bp, Homo sapien
tgaaacaacgagaagcagctgcact

SEQ ID NO: 3806043 - DNA, 25 bp, Homo sapien
taatgttccaagagctaagggccag

SEQ ID NO: 3806044 - DNA, 25 bp, Homo sapien
ccccgtttgtgtcggaacgactgca

SEQ ID NO: 3806045 - DNA, 25 bp, Homo sapien
tgccagtggtatcacctatgccatg

SEQ ID NO: 3806046 - DNA, 25 bp, Homo sapien
tatgccatgcaaacctgcctttacg

SEQ ID NO: 3806047 - DNA, 25 bp, Homo sapien
cggaacgactgcagaggaacacgat

SEQ ID NO: 3806048 - DNA, 25 bp, Homo sapien
cttggcggtaatcagggaggcccgg

SEQ ID NO: 3806049 - DNA, 25 bp, Homo sapien
ctagaccagggtccatgggcaagac

SEQ ID NO: 3806050 - DNA, 25 bp, Homo sapien
atgggcaagacccaaggaccggaag

SEQ ID NO: 3806051 - DNA, 25 bp, Homo sapien
tacgatttcgaagcgctagaccagg

SEQ ID NO: 3806052 - DNA, 25 bp, Homo sapien
gacacggatcccaattgtctacgat

SEQ ID NO: 3806053 - DNA, 25 bp, Homo sapien
ttcttcccagttgctaaagggcgcg

SEQ ID NO: 3806054 - DNA, 25 bp, Homo sapien
gccgtttctcctagttgcctcctga

SEQ ID NO: 3806055 - DNA, 25 bp, Homo sapien
ttcccagttgctaaagggcgcgccc

SEQ ID NO: 3806056 - DNA, 25 bp, Homo sapien
cccagagaggcgcttcgccgtttct

SEQ ID NO: 3806057 - DNA, 25 bp, Homo sapien
tgtcggaatcgggctgagcatcttt

SEQ ID NO: 3806058 - DNA, 25 bp, Homo sapien
ctgctctgtcggaatcgggctgagc

SEQ ID NO: 3806059 - DNA, 25 bp, Homo sapien
ctctgtcggaatcgggctgagcatc

SEQ ID NO: 3806060 - DNA, 25 bp, Homo sapien
gctctgtcggaatcgggctgagcat

SEQ ID NO: 3806061 - DNA, 25 bp, Homo sapien
cacggcggtgtgagaacttccatct

SEQ ID NO: 3806062 - DNA, 25 bp, Homo sapien
tcacggcggtgtgagaacttccatc

SEQ ID NO: 3806063 - DNA, 25 bp, Homo sapien
tctgaagctgcatgagaataagtga

SEQ ID NO: 3806064 - DNA, 25 bp, Homo sapien
ttctgaagctgcatgagaataagtg

SEQ ID NO: 3806065 - DNA, 25 bp, Homo sapien
ggagagggtcccgttccagctgatc

SEQ ID NO: 3806066 - DNA, 25 bp, Homo sapien
agagggtcccgttccagctgatcat

SEQ ID NO: 3806067 - DNA, 25 bp, Homo sapien
tctggagagggtcccgttccagctg

SEQ ID NO: 3806068 - DNA, 25 bp, Homo sapien
agggtcccgttccagctgatcattt

SEQ ID NO: 3806069 - DNA, 25 bp, Homo sapien
tcactggcacgagctctgatttggc

SEQ ID NO: 3806070 - DNA, 25 bp, Homo sapien
gatttggcccaatcaattttgcatt

SEQ ID NO: 3806071 - DNA, 25 bp, Homo sapien
tatttctgtatgcagccagccttca

SEQ ID NO: 3806072 - DNA, 25 bp, Homo sapien
gaagcgagttgatcaagttcaaaga

SEQ ID NO: 3806073 - DNA, 25 bp, Homo sapien
gaattatgtccaattggtttcggtc

SEQ ID NO: 3806074 - DNA, 25 bp, Homo sapien
gccatcagtttaatccgtaaagaat

SEQ ID NO: 3806075 - DNA, 25 bp, Homo sapien
tcttaggtctaattgcagccatcag

SEQ ID NO: 3806076 - DNA, 25 bp, Homo sapien
ggtttcggtctgtctgcatttataa

SEQ ID NO: 3806077 - DNA, 25 bp, Homo sapien
gaagcagttgtgaattcagacgctg

SEQ ID NO: 3806078 - DNA, 25 bp, Homo sapien
cctggaagcagttgtgaattcagac

SEQ ID NO: 3806079 - DNA, 25 bp, Homo sapien
tgttttctagtaaagaaacaactga

SEQ ID NO: 3806080 - DNA, 25 bp, Homo sapien
gttgtgaattcagacgctgccctgc

SEQ ID NO: 3806081 - DNA, 25 bp, Homo sapien
ccttgagcattggcatatccaaacc

SEQ ID NO: 3806082 - DNA, 25 bp, Homo sapien
atccaaaccttgatgtccccagaag

SEQ ID NO: 3806083 - DNA, 25 bp, Homo sapien
tgagcattggcatatccaaaccttg

SEQ ID NO: 3806084 - DNA, 25 bp, Homo sapien
tatccaaaccttgatgtccccagaa

SEQ ID NO: 3806085 - DNA, 25 bp, Homo sapien
tttcttccccaaatgagtgactgtc

SEQ ID NO: 3806086 - DNA, 25 bp, Homo sapien
tttttcttccccaaatgagtgactg

SEQ ID NO: 3806087 - DNA, 25 bp, Homo sapien
ctttttcttccccaaatgagtgact

SEQ ID NO: 3806088 - DNA, 25 bp, Homo sapien
ttttcttccccaaatgagtgactgt

SEQ ID NO: 3806089 - DNA, 25 bp, Homo sapien
ccataaccatactgataatgaatga

SEQ ID NO: 3806090 - DNA, 25 bp, Homo sapien
cataaccatactgataatgaatgac

SEQ ID NO: 3806091 - DNA, 25 bp, Homo sapien
acatctactcccatgaagttgatca

SEQ ID NO: 3806092 - DNA, 25 bp, Homo sapien
tgggcaagtacatctactcccatga

SEQ ID NO: 3806093 - DNA, 25 bp, Homo sapien
gcatgctgggcaagtacatctactc

SEQ ID NO: 3806094 - DNA, 25 bp, Homo sapien
agtacatctactcccatgaagttga

SEQ ID NO: 3806095 - DNA, 25 bp, Homo sapien
aggactaaggctttgagctcgtagt

SEQ ID NO: 3806096 - DNA, 25 bp, Homo sapien
ccaggactaaggctttgagctcgta

SEQ ID NO: 3806097 - DNA, 25 bp, Homo sapien
caggactaaggctttgagctcgtag

SEQ ID NO: 3806098 - DNA, 25 bp, Homo sapien
ttccaggactaaggctttgagctcg

SEQ ID NO: 3806099 - DNA, 25 bp, Homo sapien
tggagaagaggtagctcctctggac

SEQ ID NO: 3806100 - DNA, 25 bp, Homo sapien
aactcttttggactggagaagaggt

SEQ ID NO: 3806101 - DNA, 25 bp, Homo sapien
gaactggactccgaagtcagggaac

SEQ ID NO: 3806102 - DNA, 25 bp, Homo sapien
tcctctggacccataggcccaggga

SEQ ID NO: 3806103 - DNA, 25 bp, Homo sapien
tagcagagctaatgcagtcataggc

SEQ ID NO: 3806104 - DNA, 25 bp, Homo sapien
taatgtagcagagctaatgcagtca

SEQ ID NO: 3806105 - DNA, 25 bp, Homo sapien
tgtagcagagctaatgcagtcatag

SEQ ID NO: 3806106 - DNA, 25 bp, Homo sapien
gcagagctaatgcagtcataggcag

SEQ ID NO: 3806107 - DNA, 25 bp, Homo sapien
tggtctttgtgaagccataaccttg

SEQ ID NO: 3806108 - DNA, 25 bp, Homo sapien
ccactgagttccacattccaagaaa

SEQ ID NO: 3806109 - DNA, 25 bp, Homo sapien
ggtggtctttgtgaagccataacct

SEQ ID NO: 3806110 - DNA, 25 bp, Homo sapien
gtggtctttgtgaagccataacctt

SEQ ID NO: 3806111 - DNA, 25 bp, Homo sapien
gactcctcgtaccagcagctttgtg

SEQ ID NO: 3806112 - DNA, 25 bp, Homo sapien
ccctgggcccgatctttgtgtaaat

SEQ ID NO: 3806113 - DNA, 25 bp, Homo sapien
tgaggaagcggcacatgatttgtct

SEQ ID NO: 3806114 - DNA, 25 bp, Homo sapien
tgtgtagcctgcgttgcaaccctgg

SEQ ID NO: 3806115 - DNA, 25 bp, Homo sapien
tctgcaacaggactaagtgaatttt

SEQ ID NO: 3806116 - DNA, 25 bp, Homo sapien
agatcatagtcatagtctgcaacag

SEQ ID NO: 3806117 - DNA, 25 bp, Homo sapien
ctggcaaagtcgttctgaggcatcc

SEQ ID NO: 3806118 - DNA, 25 bp, Homo sapien
tgaattttgtgtagtcctggcaaag

SEQ ID NO: 3806119 - DNA, 25 bp, Homo sapien
tgttgcatagcaactgtttcggtgc

SEQ ID NO: 3806120 - DNA, 25 bp, Homo sapien
gctcgctgctccgttttgttgcata

SEQ ID NO: 3806121 - DNA, 25 bp, Homo sapien
ggtgcttcgagttgcaaatgtccat

SEQ ID NO: 3806122 - DNA, 25 bp, Homo sapien
actgtttcggtgcttcgagttgcaa

SEQ ID NO: 3806123 - DNA, 25 bp, Homo sapien
cctcgccattcgaatttcagttctg

SEQ ID NO: 3806124 - DNA, 25 bp, Homo sapien
gccattcgaatttcagttctgtaca

SEQ ID NO: 3806125 - DNA, 25 bp, Homo sapien
ccattcgaatttcagttctgtacat

SEQ ID NO: 3806126 - DNA, 25 bp, Homo sapien
tcgccattcgaatttcagttctgta

SEQ ID NO: 3806127 - DNA, 25 bp, Homo sapien
catagaagttgccagcttttcttgc

SEQ ID NO: 3806128 - DNA, 25 bp, Homo sapien
agaagttgccagcttttcttgccat

SEQ ID NO: 3806129 - DNA, 25 bp, Homo sapien
ttctgcaggtacatagaagttgcca

SEQ ID NO: 3806130 - DNA, 25 bp, Homo sapien
aaacgccaatttgggttctgcaggt

SEQ ID NO: 3806131 - DNA, 25 bp, Homo sapien
tttgggctcacgccattgatacctc

SEQ ID NO: 3806132 - DNA, 25 bp, Homo sapien
cattgatacctctgattctgaagac

SEQ ID NO: 3806133 - DNA, 25 bp, Homo sapien
tgggctcacgccattgatacctctg

SEQ ID NO: 3806134 - DNA, 25 bp, Homo sapien
ctcacgccattgatacctctgattc

SEQ ID NO: 3806135 - DNA, 25 bp, Homo sapien
gaagactcgacgaaggcaaagaagc

SEQ ID NO: 3806136 - DNA, 25 bp, Homo sapien
aagactcgacgaaggcaaagaagct

SEQ ID NO: 3806137 - DNA, 25 bp, Homo sapien
cagcttagaaaaataatcatggtag

SEQ ID NO: 3806138 - DNA, 25 bp, Homo sapien
ttagaaaaataatcatggtagacac

SEQ ID NO: 3806139 - DNA, 25 bp, Homo sapien
accaaccagcttagaaaaataatca

SEQ ID NO: 3806140 - DNA, 25 bp, Homo sapien
gcttagaaaaataatcatggtagac

SEQ ID NO: 3806141 - DNA, 25 bp, Homo sapien
tttcctgggtcaactctgcaacttt

SEQ ID NO: 3806142 - DNA, 25 bp, Homo sapien
gaaggtgacacctcttaggacaagc

SEQ ID NO: 3806143 - DNA, 25 bp, Homo sapien
aaggtgacacctcttaggacaagcc

SEQ ID NO: 3806144 - DNA, 25 bp, Homo sapien
ttcctgggtcaactctgcaactttt

SEQ ID NO: 3806145 - DNA, 25 bp, Homo sapien
aagggtctgttcctatggccatcca

SEQ ID NO: 3806146 - DNA, 25 bp, Homo sapien
ggagtgggggtgtcttctgaagaaa

SEQ ID NO: 3806147 - DNA, 25 bp, Homo sapien
gaagaaagggtctgttcctatggcc

SEQ ID NO: 3806148 - DNA, 25 bp, Homo sapien
gaaagggtctgttcctatggccatc

SEQ ID NO: 3806149 - DNA, 25 bp, Homo sapien
gaacagagtcttgctgagagggaaa

SEQ ID NO: 3806150 - DNA, 25 bp, Homo sapien
gagagggaaatataatcagacctga

SEQ ID NO: 3806151 - DNA, 25 bp, Homo sapien
aaaagtttgtttatagttgatcagg

SEQ ID NO: 3806152 - DNA, 25 bp, Homo sapien
aaagtttgtttatagttgatcaggg

SEQ ID NO: 3806153 - DNA, 25 bp, Homo sapien
gtttggtgctgatccccggcacagt

SEQ ID NO: 3806154 - DNA, 25 bp, Homo sapien
tctggattgcagattccagcggtgg

SEQ ID NO: 3806155 - DNA, 25 bp, Homo sapien
tcacggggagcgtttgacaaagaaa

SEQ ID NO: 3806156 - DNA, 25 bp, Homo sapien
gccggccttgcgtttggtgctgatc

SEQ ID NO: 3806157 - DNA, 25 bp, Homo sapien
gattcctgggcagaacggtcttcca

SEQ ID NO: 3806158 - DNA, 25 bp, Homo sapien
gactagaatattagcctttcctccc

SEQ ID NO: 3806159 - DNA, 25 bp, Homo sapien
aatttattagagtaccgactggatg

SEQ ID NO: 3806160 - DNA, 25 bp, Homo sapien
tccccaatgggccaaagcattggag

SEQ ID NO: 3806161 - DNA, 25 bp, Homo sapien
tgtgtggctgtctgccaaagacgcc

SEQ ID NO: 3806162 - DNA, 25 bp, Homo sapien
gtggctgtctgccaaagacgcccag

SEQ ID NO: 3806163 - DNA, 25 bp, Homo sapien
agggagaaccatatctgtgtggctg

SEQ ID NO: 3806164 - DNA, 25 bp, Homo sapien
cattaatgagatggagggagaacca

SEQ ID NO: 3806165 - DNA, 25 bp, Homo sapien
gtagcgttggcccaatggcttagca

SEQ ID NO: 3806166 - DNA, 25 bp, Homo sapien
ggcccaatggcttagcacatgttcg

SEQ ID NO: 3806167 - DNA, 25 bp, Homo sapien
caatggcttagcacatgttcgtggg

SEQ ID NO: 3806168 - DNA, 25 bp, Homo sapien
ctcttgtgggaggatagggtgctgt

SEQ ID NO: 3806169 - DNA, 25 bp, Homo sapien
tcataggtcctggtagatctgctcc

SEQ ID NO: 3806170 - DNA, 25 bp, Homo sapien
gatctattaatggttcctcttgcac

SEQ ID NO: 3806171 - DNA, 25 bp, Homo sapien
tcctgggccagacgttgatctatta

SEQ ID NO: 3806172 - DNA, 25 bp, Homo sapien
ttgctgaacggtttcccagcatctg

SEQ ID NO: 3806173 - DNA, 25 bp, Homo sapien
aaacagtatatcatgatgattgctc

SEQ ID NO: 3806174 - DNA, 25 bp, Homo sapien
aacagtatatcatgatgattgctca

SEQ ID NO: 3806175 - DNA, 25 bp, Homo sapien
acagtatatcatgatgattgctcat

SEQ ID NO: 3806176 - DNA, 25 bp, Homo sapien
tgcttccaggtcagatgtggtcctg

SEQ ID NO: 3806177 - DNA, 25 bp, Homo sapien
tgtcttgccaagtgctccagtccct

SEQ ID NO: 3806178 - DNA, 25 bp, Homo sapien
agacaccctcacggtcaggatccat

SEQ ID NO: 3806179 - DNA, 25 bp, Homo sapien
tcctgagatgttggatctgctatga

SEQ ID NO: 3806180 - DNA, 25 bp, Homo sapien
ggttcagaaccctcatgtccacgta

SEQ ID NO: 3806181 - DNA, 25 bp, Homo sapien
atgtccacgtacacggccacgaatg

SEQ ID NO: 3806182 - DNA, 25 bp, Homo sapien
gtacacggccacgaatgcaaacctt

SEQ ID NO: 3806183 - DNA, 25 bp, Homo sapien
ctaaggttcagaaccctcatgtcca

SEQ ID NO: 3806184 - DNA, 25 bp, Homo sapien
cgttgaatgggatgggccttcgaga

SEQ ID NO: 3806185 - DNA, 25 bp, Homo sapien
aggagacagagagacgttgaatggg

SEQ ID NO: 3806186 - DNA, 25 bp, Homo sapien
cattgaggtttttgaattattggct

SEQ ID NO: 3806187 - DNA, 25 bp, Homo sapien
tccacattgaggtttttgaattatt

SEQ ID NO: 3806188 - DNA, 25 bp, Homo sapien
agtgcctctattgtttattatgtca

SEQ ID NO: 3806189 - DNA, 25 bp, Homo sapien
ctatgctgtgctgtactttgtaagt

SEQ ID NO: 3806190 - DNA, 25 bp, Homo sapien
taactcctgtttgctctatgctgtg

SEQ ID NO: 3806191 - DNA, 25 bp, Homo sapien
gtgctgtactttgtaagtgcctcta

SEQ ID NO: 3806192 - DNA, 25 bp, Homo sapien
ggtgtttgattcatgtggaaaaggt

SEQ ID NO: 3806193 - DNA, 25 bp, Homo sapien
tataatctctggtgtttgattcatg

SEQ ID NO: 3806194 - DNA, 25 bp, Homo sapien
ggaaaaggtcacaaagaatgcataa

SEQ ID NO: 3806195 - DNA, 25 bp, Homo sapien
ttgattcatgtggaaaaggtcacaa

SEQ ID NO: 3806196 - DNA, 25 bp, Homo sapien
actattagaagtctggtccttgggc

SEQ ID NO: 3806197 - DNA, 25 bp, Homo sapien
tatctttggaagtgacagtcgttgc

SEQ ID NO: 3806198 - DNA, 25 bp, Homo sapien
ggtctgtacatccagcaacttgttg

SEQ ID NO: 3806199 - DNA, 25 bp, Homo sapien
caacttgttgaagtagtaggtgcct

SEQ ID NO: 3806200 - DNA, 25 bp, Homo sapien
tgcttgcacgtagcacttattgcac

SEQ ID NO: 3806201 - DNA, 25 bp, Homo sapien
cttggtggtcagttcaccccgtggc

SEQ ID NO: 3806202 - DNA, 25 bp, Homo sapien
cacttattgcacttggtggtcagtt

SEQ ID NO: 3806203 - DNA, 25 bp, Homo sapien
gtgtatgcatgcttgcacgtagcac

SEQ ID NO: 3806204 - DNA, 25 bp, Homo sapien
ctgtctttataaccaccttgacgtt

SEQ ID NO: 3806205 - DNA, 25 bp, Homo sapien
tctgtctttataaccaccttgacgt

SEQ ID NO: 3806206 - DNA, 25 bp, Homo sapien
gaggtctgtacccccatgggctggc

SEQ ID NO: 3806207 - DNA, 25 bp, Homo sapien
tctgtacccccatgggctggcttcc

SEQ ID NO: 3806208 - DNA, 25 bp, Homo sapien
gccaggtatttgctgattgtccggc

SEQ ID NO: 3806209 - DNA, 25 bp, Homo sapien
ggattaattgccaggtatttgctga

SEQ ID NO: 3806210 - DNA, 25 bp, Homo sapien
caggtatttgctgattgtccggctt

SEQ ID NO: 3806211 - DNA, 25 bp, Homo sapien
cttggattaattgccaggtatttgc

SEQ ID NO: 3806212 - DNA, 25 bp, Homo sapien
ccaactcccgactggcttcactggc

SEQ ID NO: 3806213 - DNA, 25 bp, Homo sapien
ctggccagtatcttgactccagtgt

SEQ ID NO: 3806214 - DNA, 25 bp, Homo sapien
ttcctcatcacggtcattgcctccc

SEQ ID NO: 3806215 - DNA, 25 bp, Homo sapien
gtctcctctgctagagggctcgctc

SEQ ID NO: 3806216 - DNA, 25 bp, Homo sapien
tgttgagttgtgtaaataagcagtc

SEQ ID NO: 3806217 - DNA, 25 bp, Homo sapien
ttgagttgtgtaaataagcagtcat

SEQ ID NO: 3806218 - DNA, 25 bp, Homo sapien
gttgagttgtgtaaataagcagtca

SEQ ID NO: 3806219 - DNA, 25 bp, Homo sapien
cttgttgagttgtgtaaataagcag

SEQ ID NO: 3806220 - DNA, 25 bp, Homo sapien
gaaacttgacgaggaacatgaccat

SEQ ID NO: 3806221 - DNA, 25 bp, Homo sapien
tgatctctccagtagccaactggaa

SEQ ID NO: 3806222 - DNA, 25 bp, Homo sapien
ctttgactgatctctccagtagcca

SEQ ID NO: 3806223 - DNA, 25 bp, Homo sapien
cagtagccaactggaaacttgacga

SEQ ID NO: 3806224 - DNA, 25 bp, Homo sapien
tcagggagtaatataggatgtcgtt

SEQ ID NO: 3806225 - DNA, 25 bp, Homo sapien
tgtcagggagtaatataggatgtcg

SEQ ID NO: 3806226 - DNA, 25 bp, Homo sapien
ccctgtcagggagtaatataggatg

SEQ ID NO: 3806227 - DNA, 25 bp, Homo sapien
ctgtcagggagtaatataggatgtc

SEQ ID NO: 3806228 - DNA, 25 bp, Homo sapien
gatgcataatgtttcctgtgaactg

SEQ ID NO: 3806229 - DNA, 25 bp, Homo sapien
gaatcatggatgcataatgtttcct

SEQ ID NO: 3806230 - DNA, 25 bp, Homo sapien
cataatgtttcctgtgaactgtagg

SEQ ID NO: 3806231 - DNA, 25 bp, Homo sapien
ctagggactggaatcatggatgcat

SEQ ID NO: 3806232 - DNA, 25 bp, Homo sapien
aatgacacgcattcagggctgaaca

SEQ ID NO: 3806233 - DNA, 25 bp, Homo sapien
acagaggctcacagatcattaatcc

SEQ ID NO: 3806234 - DNA, 25 bp, Homo sapien
caaactccatggaatgctcgcactc

SEQ ID NO: 3806235 - DNA, 25 bp, Homo sapien
ggctgaactctaaaaatgacacgca

SEQ ID NO: 3806236 - DNA, 25 bp, Homo sapien
tgcatcatagagctgaggacagtaa

SEQ ID NO: 3806237 - DNA, 25 bp, Homo sapien
tgacatatctgtagtcaaggtaaag

SEQ ID NO: 3806238 - DNA, 25 bp, Homo sapien
aaagacctttctatggtggcggaca

SEQ ID NO: 3806239 - DNA, 25 bp, Homo sapien
tagggaatcttgcagggcagagaca

SEQ ID NO: 3806240 - DNA, 25 bp, Homo sapien
tcaccacctagatgaacatatagaa

SEQ ID NO: 3806241 - DNA, 25 bp, Homo sapien
gagcacagaccttatgtggactgca

SEQ ID NO: 3806242 - DNA, 25 bp, Homo sapien
gtatagatcttgtgtaatcaccacc

SEQ ID NO: 3806243 - DNA, 25 bp, Homo sapien
attcctaattactctgcatgcttgc

SEQ ID NO: 3806244 - DNA, 25 bp, Homo sapien
gttttctgttgtagatgataccacc

SEQ ID NO: 3806245 - DNA, 25 bp, Homo sapien
tctgttgtagatgataccaccttgg

SEQ ID NO: 3806246 - DNA, 25 bp, Homo sapien
tgtagatgataccaccttgggccac

SEQ ID NO: 3806247 - DNA, 25 bp, Homo sapien
tcagttttctgttgtagatgatacc

SEQ ID NO: 3806248 - DNA, 25 bp, Homo sapien
caaggctcatgtaatgggcagctcc

SEQ ID NO: 3806249 - DNA, 25 bp, Homo sapien
tacaggagcttatgctgagtcttct

SEQ ID NO: 3806250 - DNA, 25 bp, Homo sapien
gcagttgaggaaatacagtcgttac

SEQ ID NO: 3806251 - DNA, 25 bp, Homo sapien
ttctcacaggttgatgtccaagcca

SEQ ID NO: 3806252 - DNA, 25 bp, Homo sapien
taagcagtcgcaaagaagcaggtct

SEQ ID NO: 3806253 - DNA, 25 bp, Homo sapien
ggtctaccagcactcctgttcattg

SEQ ID NO: 3806254 - DNA, 25 bp, Homo sapien
ggccctttaagccattaagcagtcg

SEQ ID NO: 3806255 - DNA, 25 bp, Homo sapien
aacgtttcaccttgccctggctttg

SEQ ID NO: 3806256 - DNA, 25 bp, Homo sapien
gaatgattcgatggctaaaaccatg

SEQ ID NO: 3806257 - DNA, 25 bp, Homo sapien
gagggaatgattcgatggctaaaac

SEQ ID NO: 3806258 - DNA, 25 bp, Homo sapien
tattgagggaatgattcgatggcta

SEQ ID NO: 3806259 - DNA, 25 bp, Homo sapien
ttattgagggaatgattcgatggct

SEQ ID NO: 3806260 - DNA, 25 bp, Homo sapien
tgctggaggatttagaggagacacc

SEQ ID NO: 3806261 - DNA, 25 bp, Homo sapien
aataagaccgccttgaagactgctg

SEQ ID NO: 3806262 - DNA, 25 bp, Homo sapien
actgctggaggatttagaggagaca

SEQ ID NO: 3806263 - DNA, 25 bp, Homo sapien
gaagagtgaaagtaataagaccgcc

SEQ ID NO: 3806264 - DNA, 25 bp, Homo sapien
aatgcaggtgggtacatcacagaga

SEQ ID NO: 3806265 - DNA, 25 bp, Homo sapien
tgaacgaatgtgtgccaagcagact

SEQ ID NO: 3806266 - DNA, 25 bp, Homo sapien
tgttgaccagagaccactttgaggg

SEQ ID NO: 3806267 - DNA, 25 bp, Homo sapien
ttttcaggtagctcaacagactgga

SEQ ID NO: 3806268 - DNA, 25 bp, Homo sapien
aaggcttcttcaggcatccaggggt

SEQ ID NO: 3806269 - DNA, 25 bp, Homo sapien
ggtaatggtgagctactgaagcctc

SEQ ID NO: 3806270 - DNA, 25 bp, Homo sapien
ctgtagaggtaatggtgagctactg

SEQ ID NO: 3806271 - DNA, 25 bp, Homo sapien
gtagaggtaatggtgagctactgaa

SEQ ID NO: 3806272 - DNA, 25 bp, Homo sapien
agaggtaatggtgagctactgaagc

SEQ ID NO: 3806273 - DNA, 25 bp, Homo sapien
cgttatttaacttgaatttagaatg

SEQ ID NO: 3806274 - DNA, 25 bp, Homo sapien
tgcgttatttaacttgaatttagaa

SEQ ID NO: 3806275 - DNA, 25 bp, Homo sapien
ctgcgttatttaacttgaatttaga

SEQ ID NO: 3806276 - DNA, 25 bp, Homo sapien
agtggctccttggatagcctctcat

SEQ ID NO: 3806277 - DNA, 25 bp, Homo sapien
tagtggctccttggatagcctctca

SEQ ID NO: 3806278 - DNA, 25 bp, Homo sapien
tggctccttggatagcctctcatct

SEQ ID NO: 3806279 - DNA, 25 bp, Homo sapien
ttagtggctccttggatagcctctc

SEQ ID NO: 3806280 - DNA, 25 bp, Homo sapien
gcatgtagtcttacagcacaaatac

SEQ ID NO: 3806281 - DNA, 25 bp, Homo sapien
cacaaatacttgtctttgtggaaag

SEQ ID NO: 3806282 - DNA, 25 bp, Homo sapien
tttgcagatgggtcaaagcatgtag

SEQ ID NO: 3806283 - DNA, 25 bp, Homo sapien
gggtcaaagcatgtagtcttacagc

SEQ ID NO: 3806284 - DNA, 25 bp, Homo sapien
ctttcctcagcctgtctcatgacct

SEQ ID NO: 3806285 - DNA, 25 bp, Homo sapien
tcagcctgtctcatgacctctaagg

SEQ ID NO: 3806286 - DNA, 25 bp, Homo sapien
ggacagattccatggatgctggcct

SEQ ID NO: 3806287 - DNA, 25 bp, Homo sapien
ctaatgggacagattccatggatgc

SEQ ID NO: 3806288 - DNA, 25 bp, Homo sapien
tctggatctgtcccctttttgttgt

SEQ ID NO: 3806289 - DNA, 25 bp, Homo sapien
ctggatctgtcccctttttgttgtc

SEQ ID NO: 3806290 - DNA, 25 bp, Homo sapien
aatgtgagggtttgagcacatcctc

SEQ ID NO: 3806291 - DNA, 25 bp, Homo sapien
cggtgcccgggatcttttagtctag

SEQ ID NO: 3806292 - DNA, 25 bp, Homo sapien
gccatcatggtcaataatgtgaggg

SEQ ID NO: 3806293 - DNA, 25 bp, Homo sapien
gctttggccctttgatctcccggtg

SEQ ID NO: 3806294 - DNA, 25 bp, Homo sapien
gaatcaaattcctgactatctggtg

SEQ ID NO: 3806295 - DNA, 25 bp, Homo sapien
cagtgcatgtgccaatttttgggtt

SEQ ID NO: 3806296 - DNA, 25 bp, Homo sapien
tatctggtgcttcagagttatccag

SEQ ID NO: 3806297 - DNA, 25 bp, Homo sapien
gcaaggttttgcatctgtagaggaa

SEQ ID NO: 3806298 - DNA, 25 bp, Homo sapien
gaaatctgattagctagttcactgg

SEQ ID NO: 3806299 - DNA, 25 bp, Homo sapien
aattatccaaggaaatctgattagc

SEQ ID NO: 3806300 - DNA, 25 bp, Homo sapien
caaggaaatctgattagctagttca

SEQ ID NO: 3806301 - DNA, 25 bp, Homo sapien
tctgattagctagttcactgggttc

SEQ ID NO: 3806302 - DNA, 25 bp, Homo sapien
taatcttcagtatctatgagtgctg

SEQ ID NO: 3806303 - DNA, 25 bp, Homo sapien
gatcaaaccctcatttaggcgttca

SEQ ID NO: 3806304 - DNA, 25 bp, Homo sapien
tgctgggtgatttgcggaaactgca

SEQ ID NO: 3806305 - DNA, 25 bp, Homo sapien
gctttgtcaatatcagcttggcctc

SEQ ID NO: 3806306 - DNA, 25 bp, Homo sapien
gagatgctttcgaggggtgagtttt

SEQ ID NO: 3806307 - DNA, 25 bp, Homo sapien
ctggatgttgcatccgtaggtatca

SEQ ID NO: 3806308 - DNA, 25 bp, Homo sapien
caaagtaggagatgctttcgagggg

SEQ ID NO: 3806309 - DNA, 25 bp, Homo sapien
gatgttgcatccgtaggtatcaaag

SEQ ID NO: 3806310 - DNA, 25 bp, Homo sapien
tgggctccagaagacatcgaggctg

SEQ ID NO: 3806311 - DNA, 25 bp, Homo sapien
ggtcctgggctccagaagacatcga

SEQ ID NO: 3806312 - DNA, 25 bp, Homo sapien
cagaagacatcgaggctggttctac

SEQ ID NO: 3806313 - DNA, 25 bp, Homo sapien
ggagcttgaacagtggcactctgag

SEQ ID NO: 3806314 - DNA, 25 bp, Homo sapien
ttcaccgaatgctatctgtgagttt

SEQ ID NO: 3806315 - DNA, 25 bp, Homo sapien
tgttgtcagatgtgaaggcttcatt

SEQ ID NO: 3806316 - DNA, 25 bp, Homo sapien
ctttttcaccgaatgctatctgtga

SEQ ID NO: 3806317 - DNA, 25 bp, Homo sapien
ctaatgttaacagtgttgtcagatg

SEQ ID NO: 3806318 - DNA, 25 bp, Homo sapien
tgataggtgtgatagaggccagccc

SEQ ID NO: 3806319 - DNA, 25 bp, Homo sapien
tatcttagcctaccaacagtgcctg

SEQ ID NO: 3806320 - DNA, 25 bp, Homo sapien
gaaacacaagcatgggataactctg

SEQ ID NO: 3806321 - DNA, 25 bp, Homo sapien
ggtcacgcaatctcaagaaagcagg

SEQ ID NO: 3806322 - DNA, 25 bp, Homo sapien
ggaacagctgcgacgttgtgcaact

SEQ ID NO: 3806323 - DNA, 25 bp, Homo sapien
caaagcaagggctcaacgaaagcat

SEQ ID NO: 3806324 - DNA, 25 bp, Homo sapien
tactggcagttttggatccatagca

SEQ ID NO: 3806325 - DNA, 25 bp, Homo sapien
ttactgataatgtgcctgtcactgg

SEQ ID NO: 3806326 - DNA, 25 bp, Homo sapien
tggcatcagcaactgttctttgatc

SEQ ID NO: 3806327 - DNA, 25 bp, Homo sapien
ctagtctgagatgtctggttcgcct

SEQ ID NO: 3806328 - DNA, 25 bp, Homo sapien
ccttgtttccccagcggtgggctca

SEQ ID NO: 3806329 - DNA, 25 bp, Homo sapien
ttgatcccatgactctgattttgag

SEQ ID NO: 3806330 - DNA, 25 bp, Homo sapien
aaagatctaccttgaggaaaaacat

SEQ ID NO: 3806331 - DNA, 25 bp, Homo sapien
caaagatctaccttgaggaaaaaca

SEQ ID NO: 3806332 - DNA, 25 bp, Homo sapien
aatgacagcccagggtattccaggc

SEQ ID NO: 3806333 - DNA, 25 bp, Homo sapien
ctccagccgaagacgtgtgtccact

SEQ ID NO: 3806334 - DNA, 25 bp, Homo sapien
ccttgcaacagaaatggaatcgttt

SEQ ID NO: 3806335 - DNA, 25 bp, Homo sapien
agcagatgctccagccgaagacgtg

SEQ ID NO: 3806336 - DNA, 25 bp, Homo sapien
tcctcctctgggcaatgagtctagg

SEQ ID NO: 3806337 - DNA, 25 bp, Homo sapien
tttattaactatgtacagacatcta

SEQ ID NO: 3806338 - DNA, 25 bp, Homo sapien
ctatgtacagacatctattctagga

SEQ ID NO: 3806339 - DNA, 25 bp, Homo sapien
atctattctaggaaacctgggaggg

SEQ ID NO: 3806340 - DNA, 25 bp, Homo sapien
tattctaggaaacctgggagggaga

SEQ ID NO: 3806341 - DNA, 25 bp, Homo sapien
tgaacgcctgctcttccttcagtcc

SEQ ID NO: 3806342 - DNA, 25 bp, Homo sapien
tgcattccccagcactgggaacaga

SEQ ID NO: 3806343 - DNA, 25 bp, Homo sapien
agtccccagttctctgcattcccca

SEQ ID NO: 3806344 - DNA, 25 bp, Homo sapien
tcttccttcagtccccagttctctg

SEQ ID NO: 3806345 - DNA, 25 bp, Homo sapien
ttcccacaatcagcttgcctgaccc

SEQ ID NO: 3806346 - DNA, 25 bp, Homo sapien
tcccacaatcagcttgcctgacccc

SEQ ID NO: 3806347 - DNA, 25 bp, Homo sapien
atgttgggtgcaaatgaatagggct

SEQ ID NO: 3806348 - DNA, 25 bp, Homo sapien
tgggtgcaaatgaatagggcttcag

SEQ ID NO: 3806349 - DNA, 25 bp, Homo sapien
tgatgatgttgggtgcaaatgaata

SEQ ID NO: 3806350 - DNA, 25 bp, Homo sapien
gatgatgttgggtgcaaatgaatag

SEQ ID NO: 3806351 - DNA, 25 bp, Homo sapien
tcggcagagtgttggaccacgagaa

SEQ ID NO: 3806352 - DNA, 25 bp, Homo sapien
ggattaactgagtcggcagagtgtt

SEQ ID NO: 3806353 - DNA, 25 bp, Homo sapien
tgttggaccacgagaaggcagatgt

SEQ ID NO: 3806354 - DNA, 25 bp, Homo sapien
cagcctgaagtttggaagtgatctt

SEQ ID NO: 3806355 - DNA, 25 bp, Homo sapien
ctgacatccagaaaactattgccca

SEQ ID NO: 3806356 - DNA, 25 bp, Homo sapien
cttgtgccagagtcccactgacatc

SEQ ID NO: 3806357 - DNA, 25 bp, Homo sapien
cccactgacatccagaaaactattg

SEQ ID NO: 3806358 - DNA, 25 bp, Homo sapien
ttgtgccagagtcccactgacatcc

SEQ ID NO: 3806359 - DNA, 25 bp, Homo sapien
aggacattgcaaagaatttcctgtt

SEQ ID NO: 3806360 - DNA, 25 bp, Homo sapien
cacaaggacattgcaaagaatttcc

SEQ ID NO: 3806361 - DNA, 25 bp, Homo sapien
gcaaagaatttcctgttgcgctcac

SEQ ID NO: 3806362 - DNA, 25 bp, Homo sapien
cattgcaaagaatttcctgttgcgc

SEQ ID NO: 3806363 - DNA, 25 bp, Homo sapien
tgaaggtgtgacttgtgattccagc

SEQ ID NO: 3806364 - DNA, 25 bp, Homo sapien
gtgattccagccaatgtcctgttgg

SEQ ID NO: 3806365 - DNA, 25 bp, Homo sapien
ccagggcccagagtcaataagggag

SEQ ID NO: 3806366 - DNA, 25 bp, Homo sapien
tgactcctctggtttactgaaggtg

SEQ ID NO: 3806367 - DNA, 25 bp, Homo sapien
agatgaactcaaatgggctggcaga

SEQ ID NO: 3806368 - DNA, 25 bp, Homo sapien
cagatgaactcaaatgggctggcag

SEQ ID NO: 3806369 - DNA, 25 bp, Homo sapien
acagtgggtgcatccaagccaccag

SEQ ID NO: 3806370 - DNA, 25 bp, Homo sapien
tcccctggttccagaaggcctgtta

SEQ ID NO: 3806371 - DNA, 25 bp, Homo sapien
gttccagaaggcctgttagagacat

SEQ ID NO: 3806372 - DNA, 25 bp, Homo sapien
ctcacagtgggtgcatccaagccac

SEQ ID NO: 3806373 - DNA, 25 bp, Homo sapien
tcggagctaaggtctccctgctcct

SEQ ID NO: 3806374 - DNA, 25 bp, Homo sapien
ttctcggagctaaggtctccctgct

SEQ ID NO: 3806375 - DNA, 25 bp, Homo sapien
agttgcttctcggagctaaggtctc

SEQ ID NO: 3806376 - DNA, 25 bp, Homo sapien
gcttctcggagctaaggtctccctg

SEQ ID NO: 3806377 - DNA, 25 bp, Homo sapien
aggctagagtgcatgattttgggtc

SEQ ID NO: 3806378 - DNA, 25 bp, Homo sapien
taaacaaatctctactaaccccatc

SEQ ID NO: 3806379 - DNA, 25 bp, Homo sapien
gcaaaagcgagaccccaggctagag

SEQ ID NO: 3806380 - DNA, 25 bp, Homo sapien
cacgagaatcatttgcatcttggag

SEQ ID NO: 3806381 - DNA, 25 bp, Homo sapien
tgattgacgcactgccaggagtagc

SEQ ID NO: 3806382 - DNA, 25 bp, Homo sapien
aggacgctctgattgacgcactgcc

SEQ ID NO: 3806383 - DNA, 25 bp, Homo sapien
tctgattgacgcactgccaggagta

SEQ ID NO: 3806384 - DNA, 25 bp, Homo sapien
cgctctgattgacgcactgccagga

SEQ ID NO: 3806385 - DNA, 25 bp, Homo sapien
ctcagcggatgataatctcaagaca

SEQ ID NO: 3806386 - DNA, 25 bp, Homo sapien
cctcagcggatgataatctcaagac

SEQ ID NO: 3806387 - DNA, 25 bp, Homo sapien
ctcagcggatgataatctcaagaca

SEQ ID NO: 3806388 - DNA, 25 bp, Homo sapien
cctcagcggatgataatctcaagac

SEQ ID NO: 3806389 - DNA, 25 bp, Homo sapien
ctcagcggatgataatctcaagaca

SEQ ID NO: 3806390 - DNA, 25 bp, Homo sapien
cctcagcggatgataatctcaagac

SEQ ID NO: 3806391 - DNA, 25 bp, Homo sapien
gcggtaattttgtccatcaaatgaa

SEQ ID NO: 3806392 - DNA, 25 bp, Homo sapien
gtgttggtggcggtaattttgtcca

SEQ ID NO: 3806393 - DNA, 25 bp, Homo sapien
gaaggtgcagactgtgttggtggcg

SEQ ID NO: 3806394 - DNA, 25 bp, Homo sapien
gaaaggtgcaaaaatctatcaccag

SEQ ID NO: 3806395 - DNA, 25 bp, Homo sapien
ttactctgttatgactctgtcttcc

SEQ ID NO: 3806396 - DNA, 25 bp, Homo sapien
aagggtgatattatgacactgacac

SEQ ID NO: 3806397 - DNA, 25 bp, Homo sapien
ggatagacatagacactcctgtgtc

SEQ ID NO: 3806398 - DNA, 25 bp, Homo sapien
tactgtctcttactgtctattgacc

SEQ ID NO: 3806399 - DNA, 25 bp, Homo sapien
tcttgaggtaagattgttctgtcag

SEQ ID NO: 3806400 - DNA, 25 bp, Homo sapien
gcctaactgacttcttgaggtaaga

SEQ ID NO: 3806401 - DNA, 25 bp, Homo sapien
agccatgcctaactgacttcttgag

SEQ ID NO: 3806402 - DNA, 25 bp, Homo sapien
gtaagattgttctgtcagaaaaccc

SEQ ID NO: 3806403 - DNA, 25 bp, Homo sapien
ctaagctggttcttgtgtggcctct

SEQ ID NO: 3806404 - DNA, 25 bp, Homo sapien
gcctctgtaccttcaaaagctgccg

SEQ ID NO: 3806405 - DNA, 25 bp, Homo sapien
agctgccgagtcctatgattacacg

SEQ ID NO: 3806406 - DNA, 25 bp, Homo sapien
ttaaatgatgctcagctaagctggt

SEQ ID NO: 3806407 - DNA, 25 bp, Homo sapien
ctgccaggtcaggacatggatacat

SEQ ID NO: 3806408 - DNA, 25 bp, Homo sapien
tgccaggtcaggacatggatacatt

SEQ ID NO: 3806409 - DNA, 25 bp, Homo sapien
gccaggtcaggacatggatacattt

SEQ ID NO: 3806410 - DNA, 25 bp, Homo sapien
ccaggtcaggacatggatacatttt

SEQ ID NO: 3806411 - DNA, 25 bp, Homo sapien
ttttctgccctcaatctctgtgaat

SEQ ID NO: 3806412 - DNA, 25 bp, Homo sapien
tctctgtgaattgaaccttgttaaa

SEQ ID NO: 3806413 - DNA, 25 bp, Homo sapien
tgaattgaaccttgttaaagtcagt

SEQ ID NO: 3806414 - DNA, 25 bp, Homo sapien
tctgccctcaatctctgtgaattga

SEQ ID NO: 3806415 - DNA, 25 bp, Homo sapien
gaatcccacggtgatatctgaggga

SEQ ID NO: 3806416 - DNA, 25 bp, Homo sapien
tggctcaagacaactttgcttcttt

SEQ ID NO: 3806417 - DNA, 25 bp, Homo sapien
gctttataccaagaaagacaacacc

SEQ ID NO: 3806418 - DNA, 25 bp, Homo sapien
ttttttgtagcagtggaatcccacg

SEQ ID NO: 3806419 - DNA, 25 bp, Homo sapien
gaccaccacatccacgggcagcgca

SEQ ID NO: 3806420 - DNA, 25 bp, Homo sapien
gcaggcatgtgactggtgctgcggc

SEQ ID NO: 3806421 - DNA, 25 bp, Homo sapien
tggtgctggatgagaccaccacatc

SEQ ID NO: 3806422 - DNA, 25 bp, Homo sapien
ccacgggcagcgcaggcatgtgact

SEQ ID NO: 3806423 - DNA, 25 bp, Homo sapien
ccacggtgctgtgttaccggcgtgt

SEQ ID NO: 3806424 - DNA, 25 bp, Homo sapien
tccttccgtctcagctcccacggtg

SEQ ID NO: 3806425 - DNA, 25 bp, Homo sapien
tgttaccggcgtgtgccccagtgcc

SEQ ID NO: 3806426 - DNA, 25 bp, Homo sapien
cgtctcagctcccacggtgctgtgt

SEQ ID NO: 3806427 - DNA, 25 bp, Homo sapien
tagtatgtcgtctaagttgctagtg

SEQ ID NO: 3806428 - DNA, 25 bp, Homo sapien
ggcctttagtatgtcgtctaagttg

SEQ ID NO: 3806429 - DNA, 25 bp, Homo sapien
tatgtcgtctaagttgctagtgctt

SEQ ID NO: 3806430 - DNA, 25 bp, Homo sapien
tgtgtgtcaggagggtatttttggc

SEQ ID NO: 3806431 - DNA, 25 bp, Homo sapien
tgaaaatccccgtcttgggtaatga

SEQ ID NO: 3806432 - DNA, 25 bp, Homo sapien
ggagctactgtacacctggccttat

SEQ ID NO: 3806433 - DNA, 25 bp, Homo sapien
ggctacaccctctcgtaaaattgga

SEQ ID NO: 3806434 - DNA, 25 bp, Homo sapien
ggtaatgattccattggccccacca

SEQ ID NO: 3806435 - DNA, 25 bp, Homo sapien
cgctctgattgacgcactgccagga

SEQ ID NO: 3806436 - DNA, 25 bp, Homo sapien
tgattgacgcactgccaggagtagc

SEQ ID NO: 3806437 - DNA, 25 bp, Homo sapien
aggacgctctgattgacgcactgcc

SEQ ID NO: 3806438 - DNA, 25 bp, Homo sapien
tctgattgacgcactgccaggagta

SEQ ID NO: 3806439 - DNA, 25 bp, Homo sapien
ctcagcggatgataatctcaagaca

SEQ ID NO: 3806440 - DNA, 25 bp, Homo sapien
cctcagcggatgataatctcaagac

SEQ ID NO: 3806441 - DNA, 25 bp, Homo sapien
ctcagcggatgataatctcaagaca

SEQ ID NO: 3806442 - DNA, 25 bp, Homo sapien
cctcagcggatgataatctcaagac

SEQ ID NO: 3806443 - DNA, 25 bp, Homo sapien
ctcagcggatgataatctcaagaca

SEQ ID NO: 3806444 - DNA, 25 bp, Homo sapien
cctcagcggatgataatctcaagac

SEQ ID NO: 3806445 - DNA, 25 bp, Homo sapien
gaggatagacatagacactcctgtg

SEQ ID NO: 3806446 - DNA, 25 bp, Homo sapien
aagggtgatattatgacactgacac

SEQ ID NO: 3806447 - DNA, 25 bp, Homo sapien
gaaaggtgcaaaaatctatcaccag

SEQ ID NO: 3806448 - DNA, 25 bp, Homo sapien
tggtggcggtaattttgtccatcaa

SEQ ID NO: 3806449 - DNA, 25 bp, Homo sapien
ctaagctggttcttgtgtggcctct

SEQ ID NO: 3806450 - DNA, 25 bp, Homo sapien
agctgccgagtcctatgattacacg

SEQ ID NO: 3806451 - DNA, 25 bp, Homo sapien
ttaaatgatgctcagctaagctggt

SEQ ID NO: 3806452 - DNA, 25 bp, Homo sapien
gcctctgtaccttcaaaagctgccg

SEQ ID NO: 3806453 - DNA, 25 bp, Homo sapien
tttctaattcaatagatgcgcccag

SEQ ID NO: 3806454 - DNA, 25 bp, Homo sapien
tagatgcgcccagcattcagattgc

SEQ ID NO: 3806455 - DNA, 25 bp, Homo sapien
cctgacttaggagccattccgatca

SEQ ID NO: 3806456 - DNA, 25 bp, Homo sapien
ggagccattccgatcatttctaatt

SEQ ID NO: 3806457 - DNA, 25 bp, Homo sapien
tcccagtttgaagcaattctgcctt

SEQ ID NO: 3806458 - DNA, 25 bp, Homo sapien
gtgtgtgccaccacattcggccaat

SEQ ID NO: 3806459 - DNA, 25 bp, Homo sapien
aaacgattcttatccctcagcctct

SEQ ID NO: 3806460 - DNA, 25 bp, Homo sapien
tggcttcccgagtagcttggattac

SEQ ID NO: 3806461 - DNA, 25 bp, Homo sapien
gtccagactggtctcgaacttctga

SEQ ID NO: 3806462 - DNA, 25 bp, Homo sapien
tccagactggtctcgaacttctgac

SEQ ID NO: 3806463 - DNA, 25 bp, Homo sapien
tctcagctcactgccttttgggttc

SEQ ID NO: 3806464 - DNA, 25 bp, Homo sapien
tttgggttcaagcaattctcctgcc

SEQ ID NO: 3806465 - DNA, 25 bp, Homo sapien
tggctcaagacaactttgcttcttt

SEQ ID NO: 3806466 - DNA, 25 bp, Homo sapien
gctttataccaagaaagacaacacc

SEQ ID NO: 3806467 - DNA, 25 bp, Homo sapien
gaatcccacggtgatatctgaggga

SEQ ID NO: 3806468 - DNA, 25 bp, Homo sapien
ttttttgtagcagtggaatcccacg

SEQ ID NO: 3806469 - DNA, 25 bp, Homo sapien
cagccaagatctacactattatgtc

SEQ ID NO: 3806470 - DNA, 25 bp, Homo sapien
gcccagccaagatctacactattat

SEQ ID NO: 3806471 - DNA, 25 bp, Homo sapien
gccaagatctacactattatgtcac

SEQ ID NO: 3806472 - DNA, 25 bp, Homo sapien
agatctacactattatgtcacccca

SEQ ID NO: 3806473 - DNA, 25 bp, Homo sapien
gggtgtgcgggctgcgtgtccttgc

SEQ ID NO: 3806474 - DNA, 25 bp, Homo sapien
tctgtggctccatgtggtcacacca

SEQ ID NO: 3806475 - DNA, 25 bp, Homo sapien
gctgcgtgtccttgctgggtgtctg

SEQ ID NO: 3806476 - DNA, 25 bp, Homo sapien
tgggagcaggtttgctcggaagccc

SEQ ID NO: 3806477 - DNA, 25 bp, Homo sapien
caccccttaggaatgcacacgtggg

SEQ ID NO: 3806478 - DNA, 25 bp, Homo sapien
cattcatacggaaacgggaggccgc

SEQ ID NO: 3806479 - DNA, 25 bp, Homo sapien
gttacatgcaaactaaccccagcag

SEQ ID NO: 3806480 - DNA, 25 bp, Homo sapien
ggctcagagccttcacgatagaatt

SEQ ID NO: 3806481 - DNA, 25 bp, Homo sapien
gaccaccacatccacgggcagcgca

SEQ ID NO: 3806482 - DNA, 25 bp, Homo sapien
gcaggcatgtgactggtgctgcggc

SEQ ID NO: 3806483 - DNA, 25 bp, Homo sapien
tggtgctggatgagaccaccacatc

SEQ ID NO: 3806484 - DNA, 25 bp, Homo sapien
ccacgggcagcgcaggcatgtgact

SEQ ID NO: 3806485 - DNA, 25 bp, Homo sapien
agtgcctggccgtcttggaggtctt

SEQ ID NO: 3806486 - DNA, 25 bp, Homo sapien
agtgggaccaccctgttgggttcag

SEQ ID NO: 3806487 - DNA, 25 bp, Homo sapien
ccgtcttggaggtcttgtttctctg

SEQ ID NO: 3806488 - DNA, 25 bp, Homo sapien
ccctgttgggttcagaacaggagat

SEQ ID NO: 3806489 - DNA, 25 bp, Homo sapien
tgtgtattttagatggagttaggtc

SEQ ID NO: 3806490 - DNA, 25 bp, Homo sapien
tattttgcgtagaagttgtgtattt

SEQ ID NO: 3806491 - DNA, 25 bp, Homo sapien
tagaagttgtgtattttagatggag

SEQ ID NO: 3806492 - DNA, 25 bp, Homo sapien
gtattttagatggagttaggtcggc

SEQ ID NO: 3806493 - DNA, 25 bp, Homo sapien
aatgaagaattctacctggctgtga

SEQ ID NO: 3806494 - DNA, 25 bp, Homo sapien
gaacaccactgtgcttggaccagct

SEQ ID NO: 3806495 - DNA, 25 bp, Homo sapien
gcaaagcagtggaactggagaaaga

SEQ ID NO: 3806496 - DNA, 25 bp, Homo sapien
caattcgttgtgaacaccactgtgc

SEQ ID NO: 3806497 - DNA, 25 bp, Homo sapien
cgagtacctggtagctgggtttaca

SEQ ID NO: 3806498 - DNA, 25 bp, Homo sapien
cttgctcttgtctccaggccgcagt

SEQ ID NO: 3806499 - DNA, 25 bp, Homo sapien
ctcccgagtacctggtagctgggtt

SEQ ID NO: 3806500 - DNA, 25 bp, Homo sapien
gctcttgtctccaggccgcagtgca

SEQ ID NO: 3806501 - DNA, 25 bp, Homo sapien
agctgtccgggagagaagggcgctg

SEQ ID NO: 3806502 - DNA, 25 bp, Homo sapien
cctgccttgtgttgtcctcttaggc

SEQ ID NO: 3806503 - DNA, 25 bp, Homo sapien
acagaattgcatcagacctacccca

SEQ ID NO: 3806504 - DNA, 25 bp, Homo sapien
cctgagctggcaagattccgaatgc

SEQ ID NO: 3806505 - DNA, 25 bp, Homo sapien
cacagcgctgtgagtagcgggccca

SEQ ID NO: 3806506 - DNA, 25 bp, Homo sapien
gccatgcgcgcgctgccctaacgat

SEQ ID NO: 3806507 - DNA, 25 bp, Homo sapien
tgccgcgtcaactgctcgggccgcg

SEQ ID NO: 3806508 - DNA, 25 bp, Homo sapien
cgggcccagcggcacccgggagagg

SEQ ID NO: 3806509 - DNA, 25 bp, Homo sapien
tggagcacatgtggtaggatttttt

SEQ ID NO: 3806510 - DNA, 25 bp, Homo sapien
taatcatctggatttctgctcaggc

SEQ ID NO: 3806511 - DNA, 25 bp, Homo sapien
gctcaggctcctagagtctctgcca

SEQ ID NO: 3806512 - DNA, 25 bp, Homo sapien
aaggccaccttggagacagagcttg

SEQ ID NO: 3806513 - DNA, 25 bp, Homo sapien
tccctacctcaggtgattcatcaac

SEQ ID NO: 3806514 - DNA, 25 bp, Homo sapien
tcccggtttcaagcgatttcctgcc

SEQ ID NO: 3806515 - DNA, 25 bp, Homo sapien
actccctacctcaggtgattcatca

SEQ ID NO: 3806516 - DNA, 25 bp, Homo sapien
ctacctcaggtgattcatcaacctt

SEQ ID NO: 3806517 - DNA, 25 bp, Homo sapien
gcaatgaatggaccctcctgtcact

SEQ ID NO: 3806518 - DNA, 25 bp, Homo sapien
gtcaaagaagtatttaagctgtgct

SEQ ID NO: 3806519 - DNA, 25 bp, Homo sapien
gaagtatttaagctgtgctgtggtg

SEQ ID NO: 3806520 - DNA, 25 bp, Homo sapien
gaatggaccctcctgtcactctgct

SEQ ID NO: 3806521 - DNA, 25 bp, Homo sapien
cagtctcacttgggacaggccacag

SEQ ID NO: 3806522 - DNA, 25 bp, Homo sapien
ataaaagccaaaagcatgcgtcagc

SEQ ID NO: 3806523 - DNA, 25 bp, Homo sapien
gggcccgcaccccatgtcccttgtc

SEQ ID NO: 3806524 - DNA, 25 bp, Homo sapien
ggaaggggacagttgcagtctcact

SEQ ID NO: 3806525 - DNA, 25 bp, Homo sapien
tagagacctggttagaaagtgctgg

SEQ ID NO: 3806526 - DNA, 25 bp, Homo sapien
gagtttttctcatgacccacgagga

SEQ ID NO: 3806527 - DNA, 25 bp, Homo sapien
ccttgttactcacagtagagacctg

SEQ ID NO: 3806528 - DNA, 25 bp, Homo sapien
tcaccagctcacgtggagcagtgct

SEQ ID NO: 3806529 - DNA, 25 bp, Homo sapien
taggatttgccagcttacgagcctc

SEQ ID NO: 3806530 - DNA, 25 bp, Homo sapien
tcccttagaagtcagccccgttgtg

SEQ ID NO: 3806531 - DNA, 25 bp, Homo sapien
tgacagccttatcagaagccacagt

SEQ ID NO: 3806532 - DNA, 25 bp, Homo sapien
cgccactgatggaatagcccgctga

SEQ ID NO: 3806533 - DNA, 25 bp, Homo sapien
ctggcagctggtcggtgctcagcac

SEQ ID NO: 3806534 - DNA, 25 bp, Homo sapien
gatcccgaccttgccagtggtagaa

SEQ ID NO: 3806535 - DNA, 25 bp, Homo sapien
tgatcccgaccttgccagtggtaga

SEQ ID NO: 3806536 - DNA, 25 bp, Homo sapien
aagagcgtgacttctagcaggcagg

SEQ ID NO: 3806537 - DNA, 25 bp, Homo sapien
tatgtggttcgcgtttggaagcaga

SEQ ID NO: 3806538 - DNA, 25 bp, Homo sapien
taaagtgttccctcctgatctgtgg

SEQ ID NO: 3806539 - DNA, 25 bp, Homo sapien
cactctggcttcgttaagttgtggg

SEQ ID NO: 3806540 - DNA, 25 bp, Homo sapien
acaatgtaagatcctctgtgcccat

SEQ ID NO: 3806541 - DNA, 25 bp, Homo sapien
tgtgcccattgacagttaatccctg

SEQ ID NO: 3806542 - DNA, 25 bp, Homo sapien
gaatttgcatatcgtaaaactcacc

SEQ ID NO: 3806543 - DNA, 25 bp, Homo sapien
tatcaagttgcacaaccacggccag

SEQ ID NO: 3806544 - DNA, 25 bp, Homo sapien
tgctcggccgcgatcctgccggaga

SEQ ID NO: 3806545 - DNA, 25 bp, Homo sapien
aagtctctgggcagactgctcggcc

SEQ ID NO: 3806546 - DNA, 25 bp, Homo sapien
ctgtctgtcgctaagtctctgggca

SEQ ID NO: 3806547 - DNA, 25 bp, Homo sapien
ctcggccgcgatcctgccggagaag

SEQ ID NO: 3806548 - DNA, 25 bp, Homo sapien
cccctgccccgcgcagggctcagca

SEQ ID NO: 3806549 - DNA, 25 bp, Homo sapien
ccgcgcagggctcagcaggcgcggc

SEQ ID NO: 3806550 - DNA, 25 bp, Homo sapien
ccctgccccgcgcagggctcagcag

SEQ ID NO: 3806551 - DNA, 25 bp, Homo sapien
cgcagggctcagcaggcgcggccat

SEQ ID NO: 3806552 - DNA, 25 bp, Homo sapien
gcggcaggttcaggctctgtctggt

SEQ ID NO: 3806553 - DNA, 25 bp, Homo sapien
cggcaggttcaggctctgtctggtt

SEQ ID NO: 3806554 - DNA, 25 bp, Homo sapien
catcttggctttgaagagtggggaa

SEQ ID NO: 3806555 - DNA, 25 bp, Homo sapien
atcttggctttgaagagtggggaac

SEQ ID NO: 3806556 - DNA, 25 bp, Homo sapien
cgcatgcgtggattttcggaattac

SEQ ID NO: 3806557 - DNA, 25 bp, Homo sapien
tttaaaaggttcatcctaatgtggc

SEQ ID NO: 3806558 - DNA, 25 bp, Homo sapien
ttctacaccccgataggaggagtct

SEQ ID NO: 3806559 - DNA, 25 bp, Homo sapien
tggtagctataaactgtccaggaac

SEQ ID NO: 3806560 - DNA, 25 bp, Homo sapien
gccccatgtccaactgggagctggt

SEQ ID NO: 3806561 - DNA, 25 bp, Homo sapien
gggcaataagagaggtcacagcaaa

SEQ ID NO: 3806562 - DNA, 25 bp, Homo sapien
taggcggccccatgtccaactggga

SEQ ID NO: 3806563 - DNA, 25 bp, Homo sapien
gtcacagcaaactggtaggcggccc

SEQ ID NO: 3806564 - DNA, 25 bp, Homo sapien
gacagccacgctggaggtacacagg

SEQ ID NO: 3806565 - DNA, 25 bp, Homo sapien
gggcctcaggcgttccctgttggat

SEQ ID NO: 3806566 - DNA, 25 bp, Homo sapien
ggtgagccacacagtaggatgaatg

SEQ ID NO: 3806567 - DNA, 25 bp, Homo sapien
tttccaaagagcgacagccacgctg

SEQ ID NO: 3806568 - DNA, 25 bp, Homo sapien
ggtgtgaatcaggaacactgcgaag

SEQ ID NO: 3806569 - DNA, 25 bp, Homo sapien
tgtgaatcaggaacactgcgaagct

SEQ ID NO: 3806570 - DNA, 25 bp, Homo sapien
gtgtgaatcaggaacactgcgaagc

SEQ ID NO: 3806571 - DNA, 25 bp, Homo sapien
aaaatgggacggctggaattcatca

SEQ ID NO: 3806572 - DNA, 25 bp, Homo sapien
gcctgagatgaactcgggctctgca

SEQ ID NO: 3806573 - DNA, 25 bp, Homo sapien
tccaatgacaatatggcccatcttc

SEQ ID NO: 3806574 - DNA, 25 bp, Homo sapien
tttgtggccctgaggccgtcattcc

SEQ ID NO: 3806575 - DNA, 25 bp, Homo sapien
gagtcttttggctaccatggcaggg

SEQ ID NO: 3806576 - DNA, 25 bp, Homo sapien
tacttgagagctggaaccatcggga

SEQ ID NO: 3806577 - DNA, 25 bp, Homo sapien
agaactgaccctactccgaggctgg

SEQ ID NO: 3806578 - DNA, 25 bp, Homo sapien
gatctggtgatggtacctggtccca

SEQ ID NO: 3806579 - DNA, 25 bp, Homo sapien
aggtggcggacagggtcgctctgga

SEQ ID NO: 3806580 - DNA, 25 bp, Homo sapien
gggttgatccgccaggcaggacagc

SEQ ID NO: 3806581 - DNA, 25 bp, Homo sapien
agaaggggggttgatccgccaggca

SEQ ID NO: 3806582 - DNA, 25 bp, Homo sapien
gtggcggacagggtcgctctggaag

SEQ ID NO: 3806583 - DNA, 25 bp, Homo sapien
ggctgccccagtctctggacagggg

SEQ ID NO: 3806584 - DNA, 25 bp, Homo sapien
ctgccccagtctctggacaggggtt

SEQ ID NO: 3806585 - DNA, 25 bp, Homo sapien
gctgccccagtctctggacaggggt

SEQ ID NO: 3806586 - DNA, 25 bp, Homo sapien
cagaacgtggctttggaggggaagg

SEQ ID NO: 3806587 - DNA, 25 bp, Homo sapien
ccaagcgaccagaggtcttttggtc

SEQ ID NO: 3806588 - DNA, 25 bp, Homo sapien
tctcccaagcgaccagaggtctttt

SEQ ID NO: 3806589 - DNA, 25 bp, Homo sapien
aggagttttctctcccaagcgacca

SEQ ID NO: 3806590 - DNA, 25 bp, Homo sapien
ttttctctcccaagcgaccagaggt

SEQ ID NO: 3806591 - DNA, 25 bp, Homo sapien
ccccgggctgcactgcggttcctca

SEQ ID NO: 3806592 - DNA, 25 bp, Homo sapien
cccgggctgcactgcggttcctcat

SEQ ID NO: 3806593 - DNA, 25 bp, Homo sapien
ttccttttaaatgctattgccttgt

SEQ ID NO: 3806594 - DNA, 25 bp, Homo sapien
ttttaaatgctattgccttgttgtg

SEQ ID NO: 3806595 - DNA, 25 bp, Homo sapien
ccttttaaatgctattgccttgttg

SEQ ID NO: 3806596 - DNA, 25 bp, Homo sapien
tttaaatgctattgccttgttgtgc

SEQ ID NO: 3806597 - DNA, 25 bp, Homo sapien
gccttcagcagtgggcgccactggc

SEQ ID NO: 3806598 - DNA, 25 bp, Homo sapien
tcccttcttgccgtaggaagggctc

SEQ ID NO: 3806599 - DNA, 25 bp, Homo sapien
gtagaatggaacacctgccagatgg

SEQ ID NO: 3806600 - DNA, 25 bp, Homo sapien
ggacagtgaacctgaagacatcact

SEQ ID NO: 3806601 - DNA, 25 bp, Homo sapien
tggaggcttgggatcaccaataaac

SEQ ID NO: 3806602 - DNA, 25 bp, Homo sapien
tgctcaaacagcgtttgcaggcagg

SEQ ID NO: 3806603 - DNA, 25 bp, Homo sapien
ggcttgggatcaccaataaactcca

SEQ ID NO: 3806604 - DNA, 25 bp, Homo sapien
agaggaacatcagcacggcgaggag

SEQ ID NO: 3806605 - DNA, 25 bp, Homo sapien
tttctgtacaccaggccagtgatgg

SEQ ID NO: 3806606 - DNA, 25 bp, Homo sapien
ctgccttaaccctggggtcacagtg

SEQ ID NO: 3806607 - DNA, 25 bp, Homo sapien
cagcctcacatctgccttaaccctg

SEQ ID NO: 3806608 - DNA, 25 bp, Homo sapien
ggggtcacagtggacctcttccagc

SEQ ID NO: 3806609 - DNA, 25 bp, Homo sapien
taaccctggggtcacagtggacctc

SEQ ID NO: 3806610 - DNA, 25 bp, Homo sapien
catctgagattagttaacttctgaa

SEQ ID NO: 3806611 - DNA, 25 bp, Homo sapien
taatgctgcgtgatcaatcagggtg

SEQ ID NO: 3806612 - DNA, 25 bp, Homo sapien
taactgttgtaatggcatttctgag

SEQ ID NO: 3806613 - DNA, 25 bp, Homo sapien
aaaaacttggcttggcgttcttgag

SEQ ID NO: 3806614 - DNA, 25 bp, Homo sapien
tgtgtgggcacaatcacgcttgcat

SEQ ID NO: 3806615 - DNA, 25 bp, Homo sapien
tcactttaatgagcgtgctggcgga

SEQ ID NO: 3806616 - DNA, 25 bp, Homo sapien
tcacatgcatgggtatatcagtagg

SEQ ID NO: 3806617 - DNA, 25 bp, Homo sapien
cagttgaacacaggaagtacttggc

SEQ ID NO: 3806618 - DNA, 25 bp, Homo sapien
cactgggttctcacttttcagggtt

SEQ ID NO: 3806619 - DNA, 25 bp, Homo sapien
tctcatgtaaagtaaggtagtccag

SEQ ID NO: 3806620 - DNA, 25 bp, Homo sapien
tgaaataatgcatgaggccgggtgc

SEQ ID NO: 3806621 - DNA, 25 bp, Homo sapien
gattgacctgtcagtaccaggccag

SEQ ID NO: 3806622 - DNA, 25 bp, Homo sapien
acattagcctcctatcttttgcggg

SEQ ID NO: 3806623 - DNA, 25 bp, Homo sapien
tcttatgctccccatagctggaggt

SEQ ID NO: 3806624 - DNA, 25 bp, Homo sapien
ttgctctcttatgctccccatagct

SEQ ID NO: 3806625 - DNA, 25 bp, Homo sapien
tatgctccccatagctggaggtcgg

SEQ ID NO: 3806626 - DNA, 25 bp, Homo sapien
tccccatagctggaggtcggtggca

SEQ ID NO: 3806627 - DNA, 25 bp, Homo sapien
tgattgctgtggagcctactaggat

SEQ ID NO: 3806628 - DNA, 25 bp, Homo sapien
gggcagccgatgcactttcctgatt

SEQ ID NO: 3806629 - DNA, 25 bp, Homo sapien
gccgatgcactttcctgattgctgt

SEQ ID NO: 3806630 - DNA, 25 bp, Homo sapien
tcctgattgctgtggagcctactag

SEQ ID NO: 3806631 - DNA, 25 bp, Homo sapien
tggattgggttcatagctctctgac

SEQ ID NO: 3806632 - DNA, 25 bp, Homo sapien
cagagagactatgtggcttgcttca

SEQ ID NO: 3806633 - DNA, 25 bp, Homo sapien
gtcttgatcgaagagttgagggcca

SEQ ID NO: 3806634 - DNA, 25 bp, Homo sapien
cattttgtgccgttcattcagggtc

SEQ ID NO: 3806635 - DNA, 25 bp, Homo sapien
gctggctctacccactgtattcggg

SEQ ID NO: 3806636 - DNA, 25 bp, Homo sapien
tgatgatgatgccatctctccggct

SEQ ID NO: 3806637 - DNA, 25 bp, Homo sapien
ggccatggaagcgttctacacaaga

SEQ ID NO: 3806638 - DNA, 25 bp, Homo sapien
gctacactgcgagcacagatcacag

SEQ ID NO: 3806639 - DNA, 25 bp, Homo sapien
cctgtggtctgagcatgggcgttag

SEQ ID NO: 3806640 - DNA, 25 bp, Homo sapien
cagcctgtggtctgagcatgggcgt

SEQ ID NO: 3806641 - DNA, 25 bp, Homo sapien
tggtctgagcatgggcgttagagcc

SEQ ID NO: 3806642 - DNA, 25 bp, Homo sapien
tgagcatgggcgttagagcccagtc

SEQ ID NO: 3806643 - DNA, 25 bp, Homo sapien
acaggatggcaccaggttttcacga

SEQ ID NO: 3806644 - DNA, 25 bp, Homo sapien
accaggttttcacgatatggagaga

SEQ ID NO: 3806645 - DNA, 25 bp, Homo sapien
gcaccaggttttcacgatatggaga

SEQ ID NO: 3806646 - DNA, 25 bp, Homo sapien
gatggcaccaggttttcacgatatg

SEQ ID NO: 3806647 - DNA, 25 bp, Homo sapien
gtgcagtggcatgagttcaagcgat

SEQ ID NO: 3806648 - DNA, 25 bp, Homo sapien
ggactaccagcacacatcaccacgc

SEQ ID NO: 3806649 - DNA, 25 bp, Homo sapien
cgattcttatgctccagccttctga

SEQ ID NO: 3806650 - DNA, 25 bp, Homo sapien
aagcgattcttatgctccagccttc

SEQ ID NO: 3806651 - DNA, 25 bp, Homo sapien
tgttccaagagaatctggtgccact

SEQ ID NO: 3806652 - DNA, 25 bp, Homo sapien
caatgggcactgttgatcactgagg

SEQ ID NO: 3806653 - DNA, 25 bp, Homo sapien
gaatgttacagaacggccctagaga

SEQ ID NO: 3806654 - DNA, 25 bp, Homo sapien
cctctgtaagatatgggaagtcgct

SEQ ID NO: 3806655 - DNA, 25 bp, Homo sapien
cgatgttttccttccggtagctggc

SEQ ID NO: 3806656 - DNA, 25 bp, Homo sapien
caggtaaaagctgcatcgtgccggg

SEQ ID NO: 3806657 - DNA, 25 bp, Homo sapien
gaaaatgttgccgatgatactctgc

SEQ ID NO: 3806658 - DNA, 25 bp, Homo sapien
caacttggatcttctgggccgcaga

SEQ ID NO: 3806659 - DNA, 25 bp, Homo sapien
acttctgagggccaaaaaatgtgac

SEQ ID NO: 3806660 - DNA, 25 bp, Homo sapien
ttgacatgggagatagtgactacac

SEQ ID NO: 3806661 - DNA, 25 bp, Homo sapien
tgtgaacagtggtgcccattgtagc

SEQ ID NO: 3806662 - DNA, 25 bp, Homo sapien
tgactgacgggaacaattcttaaac

SEQ ID NO: 3806663 - DNA, 25 bp, Homo sapien
tcactctaagactggcaaaaggaca

SEQ ID NO: 3806664 - DNA, 25 bp, Homo sapien
catgtaggcttctcccttgtgcaaa

SEQ ID NO: 3806665 - DNA, 25 bp, Homo sapien
tcctttttgtagtggtgaaccttgc

SEQ ID NO: 3806666 - DNA, 25 bp, Homo sapien
tctgacttcgtgaatatagagacca

SEQ ID NO: 3806667 - DNA, 25 bp, Homo sapien
ttcagactcgccaagtaaggcttcg

SEQ ID NO: 3806668 - DNA, 25 bp, Homo sapien
taaggcttcgtgcatagtgtcttca

SEQ ID NO: 3806669 - DNA, 25 bp, Homo sapien
gcgcgttcttagcagttggcttcat

SEQ ID NO: 3806670 - DNA, 25 bp, Homo sapien
cttcatgtcgcgtatagttgagcgc

SEQ ID NO: 3806671 - DNA, 25 bp, Homo sapien
attaatgcagcacccattgccccgg

SEQ ID NO: 3806672 - DNA, 25 bp, Homo sapien
gaaccgtttctgctgtactatctgg

SEQ ID NO: 3806673 - DNA, 25 bp, Homo sapien
gaaaaacgaatgattcatctgcttt

SEQ ID NO: 3806674 - DNA, 25 bp, Homo sapien
ccaagagggagataaacaaacttct

SEQ ID NO: 3806675 - DNA, 25 bp, Homo sapien
gtatcataggcggacacatttttat

SEQ ID NO: 3806676 - DNA, 25 bp, Homo sapien
tgagatggtatcataggcggacaca

SEQ ID NO: 3806677 - DNA, 25 bp, Homo sapien
ggtatcataggcggacacattttta

SEQ ID NO: 3806678 - DNA, 25 bp, Homo sapien
gatggtatcataggcggacacattt

SEQ ID NO: 3806679 - DNA, 25 bp, Homo sapien
tgtcttggcgtttgtctggaatttg

SEQ ID NO: 3806680 - DNA, 25 bp, Homo sapien
caggactactggaaacagctttaga

SEQ ID NO: 3806681 - DNA, 25 bp, Homo sapien
gctgaacagacaatgggatgtcttg

SEQ ID NO: 3806682 - DNA, 25 bp, Homo sapien
gggtcacaggactactggaaacagc

SEQ ID NO: 3806683 - DNA, 25 bp, Homo sapien
gcggagggagataatcgcagcacca

SEQ ID NO: 3806684 - DNA, 25 bp, Homo sapien
catccccgagacgatggcggaggga

SEQ ID NO: 3806685 - DNA, 25 bp, Homo sapien
cgaggcctccagacgtccgtgggct

SEQ ID NO: 3806686 - DNA, 25 bp, Homo sapien
cttgtagagactgcatccccgagac

SEQ ID NO: 3806687 - DNA, 25 bp, Homo sapien
tgagcttcggttggcccggcttcct

SEQ ID NO: 3806688 - DNA, 25 bp, Homo sapien
ttgaggcgtaagctcggtctgtcca

SEQ ID NO: 3806689 - DNA, 25 bp, Homo sapien
tctgtccaatgaggagcgagcgtcg

SEQ ID NO: 3806690 - DNA, 25 bp, Homo sapien
ggccgacccatataagcagcctgcg

SEQ ID NO: 3806691 - DNA, 25 bp, Homo sapien
caactggctgtatcctgcctttaca

SEQ ID NO: 3806692 - DNA, 25 bp, Homo sapien
tattgaacagtcagcttcccttgca

SEQ ID NO: 3806693 - DNA, 25 bp, Homo sapien
aaatagcgtctctgtcaactggctg

SEQ ID NO: 3806694 - DNA, 25 bp, Homo sapien
cccaagcttaagtgcataggtgcaa

SEQ ID NO: 3806695 - DNA, 25 bp, Homo sapien
tgtaatgcctcctgatggatataat

SEQ ID NO: 3806696 - DNA, 25 bp, Homo sapien
tagtaacaatgtataaatagtggct

SEQ ID NO: 3806697 - DNA, 25 bp, Homo sapien
gaactgaatcttccttgtcttagta

SEQ ID NO: 3806698 - DNA, 25 bp, Homo sapien
gtacaaaaggttgtaatgcctcctg

SEQ ID NO: 3806699 - DNA, 25 bp, Homo sapien
tagacttgatgtgcaatcttcggtc

SEQ ID NO: 3806700 - DNA, 25 bp, Homo sapien
cactgtatcatgaaaccctaagggt

SEQ ID NO: 3806701 - DNA, 25 bp, Homo sapien
tatgaaagcacctacaattagcctg

SEQ ID NO: 3806702 - DNA, 25 bp, Homo sapien
ttttttaaaaatgccgagcagggca

SEQ ID NO: 3806703 - DNA, 25 bp, Homo sapien
tacttggcattttaggacatgtaca

SEQ ID NO: 3806704 - DNA, 25 bp, Homo sapien
tttagcattgcatttcagtactgac

SEQ ID NO: 3806705 - DNA, 25 bp, Homo sapien
gtactgactgtgtaagctaaattgc

SEQ ID NO: 3806706 - DNA, 25 bp, Homo sapien
tgaaacagtgaaaatgagatccacc

SEQ ID NO: 3806707 - DNA, 25 bp, Homo sapien
gttaacaacttctgataacatggaa

SEQ ID NO: 3806708 - DNA, 25 bp, Homo sapien
cactcccttttgcttatagtgtgca

SEQ ID NO: 3806709 - DNA, 25 bp, Homo sapien
tgattctatcatgtacagtttccag

SEQ ID NO: 3806710 - DNA, 25 bp, Homo sapien
caaggattgtttaaaggtctgatga

SEQ ID NO: 3806711 - DNA, 25 bp, Homo sapien
tgtataggacctagacttgaactct

SEQ ID NO: 3806712 - DNA, 25 bp, Homo sapien
gtcaaaaaccatgagagattttctg

SEQ ID NO: 3806713 - DNA, 25 bp, Homo sapien
catatctttataactgtcttagctc

SEQ ID NO: 3806714 - DNA, 25 bp, Homo sapien
aacgttctggtaggttaatggattg

SEQ ID NO: 3806715 - DNA, 25 bp, Homo sapien
actaggtccgccagctttagaatgg

SEQ ID NO: 3806716 - DNA, 25 bp, Homo sapien
cctattgtggttgacatgaaatacc

SEQ ID NO: 3806717 - DNA, 25 bp, Homo sapien
gcgatcttggcctcctaggcaacct

SEQ ID NO: 3806718 - DNA, 25 bp, Homo sapien
taatagtgcgaacatacctgacaat

SEQ ID NO: 3806719 - DNA, 25 bp, Homo sapien
cagtaagaagtatttccggagatca

SEQ ID NO: 3806720 - DNA, 25 bp, Homo sapien
tatttccggagatcattggtcactg

SEQ ID NO: 3806721 - DNA, 25 bp, Homo sapien
ccaggtgcttatgcttacaatctga

SEQ ID NO: 3806722 - DNA, 25 bp, Homo sapien
ggagatcattggtcactgaatttac

SEQ ID NO: 3806723 - DNA, 25 bp, Homo sapien
ttgagacagagttttactttgtcgc

SEQ ID NO: 3806724 - DNA, 25 bp, Homo sapien
ggaatacaggtacatgccactatgc

SEQ ID NO: 3806725 - DNA, 25 bp, Homo sapien
ctcagctcacttgtaacctccacct

SEQ ID NO: 3806726 - DNA, 25 bp, Homo sapien
gacagagttttactttgtcgcccag

SEQ ID NO: 3806727 - DNA, 25 bp, Homo sapien
cggcgcttggccatgtcgtgtcggg

SEQ ID NO: 3806728 - DNA, 25 bp, Homo sapien
aatgactggcaacccaggtgggtga

SEQ ID NO: 3806729 - DNA, 25 bp, Homo sapien
ggaaggtaatgagccgcagagcccc

SEQ ID NO: 3806730 - DNA, 25 bp, Homo sapien
ggttcgggcggcgactcgcgcttct

SEQ ID NO: 3806731 - DNA, 25 bp, Homo sapien
gtcgcctccccttcatccgcctctc

SEQ ID NO: 3806732 - DNA, 25 bp, Homo sapien
cccttcatccgcctctctctcaccg

SEQ ID NO: 3806733 - DNA, 25 bp, Homo sapien
ccgcctctctctcaccgcgccgctc

SEQ ID NO: 3806734 - DNA, 25 bp, Homo sapien
gcctctctctcaccgcgccgctccc

SEQ ID NO: 3806735 - DNA, 25 bp, Homo sapien
agaaggcgggcaagcctcagggtga

SEQ ID NO: 3806736 - DNA, 25 bp, Homo sapien
tctttcaccagcagaaggcgggcaa

SEQ ID NO: 3806737 - DNA, 25 bp, Homo sapien
ctcgatgggcacatttcaggtggag

SEQ ID NO: 3806738 - DNA, 25 bp, Homo sapien
ggactcgatgggcacatttcaggtg

SEQ ID NO: 3806739 - DNA, 25 bp, Homo sapien
ctgaggtgatgtaatactcagccat

SEQ ID NO: 3806740 - DNA, 25 bp, Homo sapien
tatggtagaactcagccagaagaca

SEQ ID NO: 3806741 - DNA, 25 bp, Homo sapien
tggcacgctccatgcaggtcactct

SEQ ID NO: 3806742 - DNA, 25 bp, Homo sapien
cacgtggcggtgtttcctatggtag

SEQ ID NO: 3806743 - DNA, 25 bp, Homo sapien
acacaggacaagggattcagctggc

SEQ ID NO: 3806744 - DNA, 25 bp, Homo sapien
gatcagtgtctttatagtcagagaa

SEQ ID NO: 3806745 - DNA, 25 bp, Homo sapien
tctaaaagttaagccaacagaagga

SEQ ID NO: 3806746 - DNA, 25 bp, Homo sapien
cagagaacttgtcatatagtctaaa

SEQ ID NO: 3806747 - DNA, 25 bp, Homo sapien
tgtagtctactgacctcttttatag

SEQ ID NO: 3806748 - DNA, 25 bp, Homo sapien
gggattacaggtgcccaccaccaca

SEQ ID NO: 3806749 - DNA, 25 bp, Homo sapien
tgattctcctgcctcctgaatagct

SEQ ID NO: 3806750 - DNA, 25 bp, Homo sapien
tcatccacccaccttggcctcccaa

SEQ ID NO: 3806751 - DNA, 25 bp, Homo sapien
accaccacacctggctaatttttgt

SEQ ID NO: 3806752 - DNA, 25 bp, Homo sapien
tgtccgcatttcaaccagtcgcaac

SEQ ID NO: 3806753 - DNA, 25 bp, Homo sapien
gactttgggatttacgagaagcaga

SEQ ID NO: 3806754 - DNA, 25 bp, Homo sapien
caaagtcttaaatcctgtccgcatt

SEQ ID NO: 3806755 - DNA, 25 bp, Homo sapien
gacaactgtgttgagtgatgtgact

SEQ ID NO: 3806756 - DNA, 25 bp, Homo sapien
caggatgtccccgggtctttctgtt

SEQ ID NO: 3806757 - DNA, 25 bp, Homo sapien
gcaggatgtccccgggtctttctgt

SEQ ID NO: 3806758 - DNA, 25 bp, Homo sapien
gatgcaggatgtccccgggtctttc

SEQ ID NO: 3806759 - DNA, 25 bp, Homo sapien
agagatgcaggatgtccccgggtct

SEQ ID NO: 3806760 - DNA, 25 bp, Homo sapien
gattccaggttccggcgctgacatc

SEQ ID NO: 3806761 - DNA, 25 bp, Homo sapien
tccaggttccggcgctgacatcaca

SEQ ID NO: 3806762 - DNA, 25 bp, Homo sapien
tcctcagaggctgccgaggaccctc

SEQ ID NO: 3806763 - DNA, 25 bp, Homo sapien
ctcagaggctgccgaggaccctctc

SEQ ID NO: 3806764 - DNA, 25 bp, Homo sapien
ggctggagcgcactgccgctggact

SEQ ID NO: 3806765 - DNA, 25 bp, Homo sapien
gcctctctgacatgacatttgagta

SEQ ID NO: 3806766 - DNA, 25 bp, Homo sapien
ggtgcattgcctcagatagaccgcc

SEQ ID NO: 3806767 - DNA, 25 bp, Homo sapien
ggtaactaactggtcagaggaagtg

SEQ ID NO: 3806768 - DNA, 25 bp, Homo sapien
aagaggctgctctatggccgggtac

SEQ ID NO: 3806769 - DNA, 25 bp, Homo sapien
actgagggcccttggactaaatcca

SEQ ID NO: 3806770 - DNA, 25 bp, Homo sapien
ccactgagggcccttggactaaatc

SEQ ID NO: 3806771 - DNA, 25 bp, Homo sapien
aaaagccactgagggcccttggact

SEQ ID NO: 3806772 - DNA, 25 bp, Homo sapien
agccactgagggcccttggactaaa

SEQ ID NO: 3806773 - DNA, 25 bp, Homo sapien
acgcgcatgaaacacacgactgcac

SEQ ID NO: 3806774 - DNA, 25 bp, Homo sapien
gaaacacacgactgcacttcaggct

SEQ ID NO: 3806775 - DNA, 25 bp, Homo sapien
gagcaggccactcttccttctctat

SEQ ID NO: 3806776 - DNA, 25 bp, Homo sapien
tgagcaggccactcttccttctcta

SEQ ID NO: 3806777 - DNA, 25 bp, Homo sapien
ggtcatttcaccacttagagccttg

SEQ ID NO: 3806778 - DNA, 25 bp, Homo sapien
taagatcatctcattacagttattg

SEQ ID NO: 3806779 - DNA, 25 bp, Homo sapien
tgctgttgggatggccactgtagtc

SEQ ID NO: 3806780 - DNA, 25 bp, Homo sapien
gtcagacattctactgaattggtcc

SEQ ID NO: 3806781 - DNA, 25 bp, Homo sapien
caactggagtctagagagaggttct

SEQ ID NO: 3806782 - DNA, 25 bp, Homo sapien
gcaactggagtctagagagaggttc

SEQ ID NO: 3806783 - DNA, 25 bp, Homo sapien
aagcaactggagtctagagagaggt

SEQ ID NO: 3806784 - DNA, 25 bp, Homo sapien
gagaagcaactggagtctagagaga

SEQ ID NO: 3806785 - DNA, 25 bp, Homo sapien
tacgtgcaatggaccggtagcttgg

SEQ ID NO: 3806786 - DNA, 25 bp, Homo sapien
tccgctttgcttgtcccgggaatgg

SEQ ID NO: 3806787 - DNA, 25 bp, Homo sapien
gaatggacagtcgttctcctacgtg

SEQ ID NO: 3806788 - DNA, 25 bp, Homo sapien
cataatttcgaagagaatggctgct

SEQ ID NO: 3806789 - DNA, 25 bp, Homo sapien
ttttaattatatgagctcttcagga

SEQ ID NO: 3806790 - DNA, 25 bp, Homo sapien
atttcacgcacaaaacatacctctg

SEQ ID NO: 3806791 - DNA, 25 bp, Homo sapien
tatgagctcttcaggaaatgcattt

SEQ ID NO: 3806792 - DNA, 25 bp, Homo sapien
ttgtcaaagaggcttagcttaccct

SEQ ID NO: 3806793 - DNA, 25 bp, Homo sapien
aatttgtgtgtcattcttgctcaga

SEQ ID NO: 3806794 - DNA, 25 bp, Homo sapien
tgtgtgtcattcttgctcagaggcc

SEQ ID NO: 3806795 - DNA, 25 bp, Homo sapien
tttgtgtgtcattcttgctcagagg

SEQ ID NO: 3806796 - DNA, 25 bp, Homo sapien
gtgtgtcattcttgctcagaggcca

SEQ ID NO: 3806797 - DNA, 25 bp, Homo sapien
agacttgctgctataccgcttccac

SEQ ID NO: 3806798 - DNA, 25 bp, Homo sapien
ttctatgctgcggatgtcctcccgc

SEQ ID NO: 3806799 - DNA, 25 bp, Homo sapien
ccactggtcccattcggagagatac

SEQ ID NO: 3806800 - DNA, 25 bp, Homo sapien
tccaggtgggtcgtcatctctcgag

SEQ ID NO: 3806801 - DNA, 25 bp, Homo sapien
ccaggaatctcaagaaggagaaata

SEQ ID NO: 3806802 - DNA, 25 bp, Homo sapien
gaaatatcaccaaattcagcaacac

SEQ ID NO: 3806803 - DNA, 25 bp, Homo sapien
caaaaccagcataaagatgatcaga

SEQ ID NO: 3806804 - DNA, 25 bp, Homo sapien
cagcaacaccaggaatctcaagaag

SEQ ID NO: 3806805 - DNA, 25 bp, Homo sapien
tgctgttggtgatcttgtatttcgt

SEQ ID NO: 3806806 - DNA, 25 bp, Homo sapien
ggtgatcttgtatttcgtgagtaag

SEQ ID NO: 3806807 - DNA, 25 bp, Homo sapien
tggtgatcttgtatttcgtgagtaa

SEQ ID NO: 3806808 - DNA, 25 bp, Homo sapien
tgttggtgatcttgtatttcgtgag

SEQ ID NO: 3806809 - DNA, 25 bp, Homo sapien
taaaagtaaatgagtccagaactgc

SEQ ID NO: 3806810 - DNA, 25 bp, Homo sapien
agtaaatgagtccagaactgcttac

SEQ ID NO: 3806811 - DNA, 25 bp, Homo sapien
actgtaaaagtaaatgagtccagaa

SEQ ID NO: 3806812 - DNA, 25 bp, Homo sapien
gtgccagaaagcaagtctatgatat

SEQ ID NO: 3806813 - DNA, 25 bp, Homo sapien
ctccactctgctagggtcataggaa

SEQ ID NO: 3806814 - DNA, 25 bp, Homo sapien
tccactctgctagggtcataggaat

SEQ ID NO: 3806815 - DNA, 25 bp, Homo sapien
cctctccactctgctagggtcatag

SEQ ID NO: 3806816 - DNA, 25 bp, Homo sapien
tctccactctgctagggtcatagga

SEQ ID NO: 3806817 - DNA, 25 bp, Homo sapien
ttgtgccaggcacactagagacacc

SEQ ID NO: 3806818 - DNA, 25 bp, Homo sapien
gtgccaggcacactagagacacctc

SEQ ID NO: 3806819 - DNA, 25 bp, Homo sapien
gcacactagagacacctccacagga

SEQ ID NO: 3806820 - DNA, 25 bp, Homo sapien
aggcacactagagacacctccacag

SEQ ID NO: 3806821 - DNA, 25 bp, Homo sapien
tctcaatttgcatgagccatatttc

SEQ ID NO: 3806822 - DNA, 25 bp, Homo sapien
cacaggtctagagggtagggtggtt

SEQ ID NO: 3806823 - DNA, 25 bp, Homo sapien
caagtgcccagtagctgtatgtgat

SEQ ID NO: 3806824 - DNA, 25 bp, Homo sapien
gatgagcggctacaatattggacag

SEQ ID NO: 3806825 - DNA, 25 bp, Homo sapien
gatctggtatcatgaagccttcccc

SEQ ID NO: 3806826 - DNA, 25 bp, Homo sapien
tttcacacattaacgccctcagaga

SEQ ID NO: 3806827 - DNA, 25 bp, Homo sapien
caactcactgaggactgccctggtg

SEQ ID NO: 3806828 - DNA, 25 bp, Homo sapien
taacatctagccttctcatggcatg

SEQ ID NO: 3806829 - DNA, 25 bp, Homo sapien
tgtaagatatcgtccctaatggtgc

SEQ ID NO: 3806830 - DNA, 25 bp, Homo sapien
caacagtgagcggaaaagtggacat

SEQ ID NO: 3806831 - DNA, 25 bp, Homo sapien
accatcacatgaaaggcccacaggg

SEQ ID NO: 3806832 - DNA, 25 bp, Homo sapien
tatgacctcagttgctctcaagacg

SEQ ID NO: 3806833 - DNA, 25 bp, Homo sapien
ttgtactgactaaaaactccaaatg

SEQ ID NO: 3806834 - DNA, 25 bp, Homo sapien
gtactgactaaaaactccaaatgta

SEQ ID NO: 3806835 - DNA, 25 bp, Homo sapien
tattttgtactgactaaaaactcca

SEQ ID NO: 3806836 - DNA, 25 bp, Homo sapien
tgtactgactaaaaactccaaatgt

SEQ ID NO: 3806837 - DNA, 25 bp, Homo sapien
cctgggagtcggcattcctgaagct

SEQ ID NO: 3806838 - DNA, 25 bp, Homo sapien
gctgggcgagatagcaactcttcct

SEQ ID NO: 3806839 - DNA, 25 bp, Homo sapien
tccctggagatgctgtccttggaca

SEQ ID NO: 3806840 - DNA, 25 bp, Homo sapien
tgaagctcaggactctcatccgtga

SEQ ID NO: 3806841 - DNA, 25 bp, Homo sapien
ggctggttctgtcccgctctccgga

SEQ ID NO: 3806842 - DNA, 25 bp, Homo sapien
ctcagcaggctggttctgtcccgct

SEQ ID NO: 3806843 - DNA, 25 bp, Homo sapien
tgcagccctggcttgcaaggactca

SEQ ID NO: 3806844 - DNA, 25 bp, Homo sapien
acctcaatgcccaggatccttgcag

SEQ ID NO: 3806845 - DNA, 25 bp, Homo sapien
tgtcaaacttccgagggaccgcttc

SEQ ID NO: 3806846 - DNA, 25 bp, Homo sapien
cctaggttcagctggataggacgcg

SEQ ID NO: 3806847 - DNA, 25 bp, Homo sapien
ttctcgtcacaggaaatgggctacc

SEQ ID NO: 3806848 - DNA, 25 bp, Homo sapien
cctcggttcttgttagacagggaca

SEQ ID NO: 3806849 - DNA, 25 bp, Homo sapien
tccgggctgtttccgcggaagccca

SEQ ID NO: 3806850 - DNA, 25 bp, Homo sapien
ggcacccacatcctcggctgtggct

SEQ ID NO: 3806851 - DNA, 25 bp, Homo sapien
ggctcaaccctcatttccgggctgt

SEQ ID NO: 3806852 - DNA, 25 bp, Homo sapien
ctcggctgtggctcaaccctcattt

SEQ ID NO: 3806853 - DNA, 25 bp, Homo sapien
agtgagcacggttctcctgctgcgg

SEQ ID NO: 3806854 - DNA, 25 bp, Homo sapien
tcctgctgcggctccgcctcactct

SEQ ID NO: 3806855 - DNA, 25 bp, Homo sapien
tgagcacggttctcctgctgcggct

SEQ ID NO: 3806856 - DNA, 25 bp, Homo sapien
ctgcagtgagcacggttctcctgct

SEQ ID NO: 3806857 - DNA, 25 bp, Homo sapien
taactgactgatcaaatcccaggga

SEQ ID NO: 3806858 - DNA, 25 bp, Homo sapien
actttctaactgactgatcaaatcc

SEQ ID NO: 3806859 - DNA, 25 bp, Homo sapien
tgactgatcaaatcccagggacgac

SEQ ID NO: 3806860 - DNA, 25 bp, Homo sapien
tcaaatcccagggacgacggctgac

SEQ ID NO: 3806861 - DNA, 25 bp, Homo sapien
tgacttcggcctgcttttggcgtcg

SEQ ID NO: 3806862 - DNA, 25 bp, Homo sapien
cgtggacatccacgcagggctgact

SEQ ID NO: 3806863 - DNA, 25 bp, Homo sapien
tttactgttgcaagggcccgtgggc

SEQ ID NO: 3806864 - DNA, 25 bp, Homo sapien
cggtgcctggtccacggacaaggaa

SEQ ID NO: 3806865 - DNA, 25 bp, Homo sapien
tccaggtcggtggaagacatgctca

SEQ ID NO: 3806866 - DNA, 25 bp, Homo sapien
ttggactcaatgctgcacgactcgg

SEQ ID NO: 3806867 - DNA, 25 bp, Homo sapien
tgtgatcaccggtagggaatgctgt

SEQ ID NO: 3806868 - DNA, 25 bp, Homo sapien
tttgctgatctctgtaccggtgccc

SEQ ID NO: 3806869 - DNA, 25 bp, Homo sapien
tgtcgtaaccgtggatcatcaaagg

SEQ ID NO: 3806870 - DNA, 25 bp, Homo sapien
tgaacgaagccgtcataggcagtga

SEQ ID NO: 3806871 - DNA, 25 bp, Homo sapien
tctcggtcggagactgctgttgact

SEQ ID NO: 3806872 - DNA, 25 bp, Homo sapien
catgagccggctcttgagcagtgac

SEQ ID NO: 3806873 - DNA, 25 bp, Homo sapien
cctagactgctggtgcgagctgtaa

SEQ ID NO: 3806874 - DNA, 25 bp, Homo sapien
ggaggttccaatccagggtctgaca

SEQ ID NO: 3806875 - DNA, 25 bp, Homo sapien
tctaggcagtgagcgagacttccct

SEQ ID NO: 3806876 - DNA, 25 bp, Homo sapien
tgggaatttccgtgcaactcaggct

SEQ ID NO: 3806877 - DNA, 25 bp, Homo sapien
gacaggcaggctgtgggcttgggcc

SEQ ID NO: 3806878 - DNA, 25 bp, Homo sapien
gtggacaggcaggctgtgggcttgg

SEQ ID NO: 3806879 - DNA, 25 bp, Homo sapien
caggcaggctgtgggcttgggccat

SEQ ID NO: 3806880 - DNA, 25 bp, Homo sapien
tggacaggcaggctgtgggcttggg

SEQ ID NO: 3806881 - DNA, 25 bp, Homo sapien
tcttgccgtcctcttctccggtagg

SEQ ID NO: 3806882 - DNA, 25 bp, Homo sapien
tccaggttttcgtgctccctcggct

SEQ ID NO: 3806883 - DNA, 25 bp, Homo sapien
tcctcttctccggtaggcttggtcg

SEQ ID NO: 3806884 - DNA, 25 bp, Homo sapien
cggtaggcttggtcgttaccagtcg

SEQ ID NO: 3806885 - DNA, 25 bp, Homo sapien
taaaatgtgtactgctgcatagggt

SEQ ID NO: 3806886 - DNA, 25 bp, Homo sapien
ggctctgacaggtgcaagcggactc

SEQ ID NO: 3806887 - DNA, 25 bp, Homo sapien
tagcaagaatggctcttctagtagc

SEQ ID NO: 3806888 - DNA, 25 bp, Homo sapien
tagtagcttcgctataggacgccca

SEQ ID NO: 3806889 - DNA, 25 bp, Homo sapien
ggttcttcagaagccaagatgaggg

SEQ ID NO: 3806890 - DNA, 25 bp, Homo sapien
tccaccggctgtctgaaactcaatt

SEQ ID NO: 3806891 - DNA, 25 bp, Homo sapien
cagcagtgggttctgaagctaagcc

SEQ ID NO: 3806892 - DNA, 25 bp, Homo sapien
gagcaagggcggagtctaagtctct

SEQ ID NO: 3806893 - DNA, 25 bp, Homo sapien
aagtttcaactaagagatgcgggca

SEQ ID NO: 3806894 - DNA, 25 bp, Homo sapien
catttcctatgaatggtccgtgaat

SEQ ID NO: 3806895 - DNA, 25 bp, Homo sapien
catgaatccttacaacgacccctcc

SEQ ID NO: 3806896 - DNA, 25 bp, Homo sapien
tttctaatgaggccagccagttttt

SEQ ID NO: 3806897 - DNA, 25 bp, Homo sapien
ccgtgaatctctccatgaatcctta

SEQ ID NO: 3806898 - DNA, 25 bp, Homo sapien
tcccaaagcactttgtttctgatgg

SEQ ID NO: 3806899 - DNA, 25 bp, Homo sapien
gggaaaaacaattctccttcatgcc

SEQ ID NO: 3806900 - DNA, 25 bp, Homo sapien
tgatggggaaaaacaattctccttc

SEQ ID NO: 3806901 - DNA, 25 bp, Homo sapien
ttctgatggggaaaaacaattctcc

SEQ ID NO: 3806902 - DNA, 25 bp, Homo sapien
caattttcagttctctattgggcac

SEQ ID NO: 3806903 - DNA, 25 bp, Homo sapien
ccctccaattttcagttctctattg

SEQ ID NO: 3806904 - DNA, 25 bp, Homo sapien
tccaattttcagttctctattgggc

SEQ ID NO: 3806905 - DNA, 25 bp, Homo sapien
ctccaattttcagttctctattggg

SEQ ID NO: 3806906 - DNA, 25 bp, Homo sapien
caagaggccagatctgtcgagaact

SEQ ID NO: 3806907 - DNA, 25 bp, Homo sapien
tcaggaacctgttaccacacaaggg

SEQ ID NO: 3806908 - DNA, 25 bp, Homo sapien
gattatgccgtagtcctcaggaacc

SEQ ID NO: 3806909 - DNA, 25 bp, Homo sapien
gaatcggccaatctcaacaacatgg

SEQ ID NO: 3806910 - DNA, 25 bp, Homo sapien
tggctccatcagtgctaactcctct

SEQ ID NO: 3806911 - DNA, 25 bp, Homo sapien
gtgagttctgaagcacaaggtgaaa

SEQ ID NO: 3806912 - DNA, 25 bp, Homo sapien
cattgtgattttcccccctgagcct

SEQ ID NO: 3806913 - DNA, 25 bp, Homo sapien
gacagtagtcgacagaagtgtgagt

SEQ ID NO: 3806914 - DNA, 25 bp, Homo sapien
tctgacttggcaacttaaacctgct

SEQ ID NO: 3806915 - DNA, 25 bp, Homo sapien
aagcatctgacttggcaacttaaac

SEQ ID NO: 3806916 - DNA, 25 bp, Homo sapien
tgacttggcaacttaaacctgcttt

SEQ ID NO: 3806917 - DNA, 25 bp, Homo sapien
catctgacttggcaacttaaacctg

SEQ ID NO: 3806918 - DNA, 25 bp, Homo sapien
cctctcggtgtgctgcggcggcttt

SEQ ID NO: 3806919 - DNA, 25 bp, Homo sapien
tgcggcggctttcggagtcactcac

SEQ ID NO: 3806920 - DNA, 25 bp, Homo sapien
tcggtgtgctgcggcggctttcgga

SEQ ID NO: 3806921 - DNA, 25 bp, Homo sapien
ctgcggcggctttcggagtcactca

SEQ ID NO: 3806922 - DNA, 25 bp, Homo sapien
ccttggggttatcctcgcgtgatgc

SEQ ID NO: 3806923 - DNA, 25 bp, Homo sapien
gagatcaggaggtcttctacactgt

SEQ ID NO: 3806924 - DNA, 25 bp, Homo sapien
cgtcttacgatgtgcgagggccgca

SEQ ID NO: 3806925 - DNA, 25 bp, Homo sapien
gacagcttgtatccatgagagatca

SEQ ID NO: 3806926 - DNA, 25 bp, Homo sapien
aaccactggaaccatggtggtggca

SEQ ID NO: 3806927 - DNA, 25 bp, Homo sapien
gctcaaccactggaaccatggtggt

SEQ ID NO: 3806928 - DNA, 25 bp, Homo sapien
cctgggcttcagcaaagctcaacca

SEQ ID NO: 3806929 - DNA, 25 bp, Homo sapien
ggcttcagcaaagctcaaccactgg

SEQ ID NO: 3806930 - DNA, 25 bp, Homo sapien
aaagtttttgcatctctcagccaag

SEQ ID NO: 3806931 - DNA, 25 bp, Homo sapien
ccggcctccttatgaaacttttatg

SEQ ID NO: 3806932 - DNA, 25 bp, Homo sapien
cccaaatcctgctatagtacctgaa

SEQ ID NO: 3806933 - DNA, 25 bp, Homo sapien
cagccaaggatgtccacacccaaat

SEQ ID NO: 3806934 - DNA, 25 bp, Homo sapien
ccaaataatccatacacataaataa

SEQ ID NO: 3806935 - DNA, 25 bp, Homo sapien
caaataatccatacacataaataag

SEQ ID NO: 3806936 - DNA, 25 bp, Homo sapien
gttgggatgagtgtctgtttctcca

SEQ ID NO: 3806937 - DNA, 25 bp, Homo sapien
cgctgttgggatgagtgtctgtttc

SEQ ID NO: 3806938 - DNA, 25 bp, Homo sapien
ctcccgcttcgctgttgggatgagt

SEQ ID NO: 3806939 - DNA, 25 bp, Homo sapien
cgcttcgctgttgggatgagtgtct

SEQ ID NO: 3806940 - DNA, 25 bp, Homo sapien
ctagccctcaatctctgggttatct

SEQ ID NO: 3806941 - DNA, 25 bp, Homo sapien
cagcgcagaccgcgcagagaccgga

SEQ ID NO: 3806942 - DNA, 25 bp, Homo sapien
gcagaccgcgcagagaccggagcgg

SEQ ID NO: 3806943 - DNA, 25 bp, Homo sapien
gcgcagagaccggagcgggagcggg

SEQ ID NO: 3806944 - DNA, 25 bp, Homo sapien
taatccccagcgcagaccgcgcaga

SEQ ID NO: 3806945 - DNA, 25 bp, Homo sapien
tcggggacccagcgcggcggctgtc

SEQ ID NO: 3806946 - DNA, 25 bp, Homo sapien
ggggacccagcgcggcggctgtcag

SEQ ID NO: 3806947 - DNA, 25 bp, Homo sapien
gggcagtccagacggccggggcagc

SEQ ID NO: 3806948 - DNA, 25 bp, Homo sapien
ccgggcagtccagacggccggggca

SEQ ID NO: 3806949 - DNA, 25 bp, Homo sapien
cagtgatattacttcttgtcaaaaa

SEQ ID NO: 3806950 - DNA, 25 bp, Homo sapien
gtcacagttattaacagcagtgata

SEQ ID NO: 3806951 - DNA, 25 bp, Homo sapien
aacagcagtgatattacttcttgtc

SEQ ID NO: 3806952 - DNA, 25 bp, Homo sapien
gatattacttcttgtcaaaaaagca

SEQ ID NO: 3806953 - DNA, 25 bp, Homo sapien
tcttcaatgacttatagaattcctg

SEQ ID NO: 3806954 - DNA, 25 bp, Homo sapien
tcctcaatttgccaactcaatgaaa

SEQ ID NO: 3806955 - DNA, 25 bp, Homo sapien
tttcttcaatgacttatagaattcc

SEQ ID NO: 3806956 - DNA, 25 bp, Homo sapien
aataactttgtcctggggtggagca

SEQ ID NO: 3806957 - DNA, 25 bp, Homo sapien
tgggtttctaggtcaaccccatgga

SEQ ID NO: 3806958 - DNA, 25 bp, Homo sapien
cactgattcaatgctaggagctaag

SEQ ID NO: 3806959 - DNA, 25 bp, Homo sapien
cagagtagggttgcagtaaatcaga

SEQ ID NO: 3806960 - DNA, 25 bp, Homo sapien
gattaggatgtgtttccccacagaa

SEQ ID NO: 3806961 - DNA, 25 bp, Homo sapien
tactgttggcttagaagatttgacg

SEQ ID NO: 3806962 - DNA, 25 bp, Homo sapien
tagatgtttactgttggcttagaag

SEQ ID NO: 3806963 - DNA, 25 bp, Homo sapien
gaagatttgacgctaactgaaacaa

SEQ ID NO: 3806964 - DNA, 25 bp, Homo sapien
acaaaacctacaatgctggggacca

SEQ ID NO: 3806965 - DNA, 25 bp, Homo sapien
gtagaaagacattccaagcttcccc

SEQ ID NO: 3806966 - DNA, 25 bp, Homo sapien
aaagagctgctgtttactagtggta

SEQ ID NO: 3806967 - DNA, 25 bp, Homo sapien
tggctgtcagggatcccgctggtac

SEQ ID NO: 3806968 - DNA, 25 bp, Homo sapien
tttactagtggtagaaagacattcc

SEQ ID NO: 3806969 - DNA, 25 bp, Homo sapien
ctctgaagtggaaatggtcgcttcg

SEQ ID NO: 3806970 - DNA, 25 bp, Homo sapien
gccaaagcattagctgaggactggg

SEQ ID NO: 3806971 - DNA, 25 bp, Homo sapien
tgtggaaatccagagtggggaatct

SEQ ID NO: 3806972 - DNA, 25 bp, Homo sapien
ggtcgcttcggctcacattgtggaa

SEQ ID NO: 3806973 - DNA, 25 bp, Homo sapien
tagtcccagctcctcaagaggccaa

SEQ ID NO: 3806974 - DNA, 25 bp, Homo sapien
cgcttgagcccgggaagtcaaggtt

SEQ ID NO: 3806975 - DNA, 25 bp, Homo sapien
gcaggaggatcgcttgagcccggga

SEQ ID NO: 3806976 - DNA, 25 bp, Homo sapien
gcagtgaactgtgattgcaccaatg

SEQ ID NO: 3806977 - DNA, 25 bp, Homo sapien
cgaggctctatccttgcgtgggtac

SEQ ID NO: 3806978 - DNA, 25 bp, Homo sapien
ggcaacttccttgtaaaagaatgaa

SEQ ID NO: 3806979 - DNA, 25 bp, Homo sapien
tgcgtgggtacccacggcaacttcc

SEQ ID NO: 3806980 - DNA, 25 bp, Homo sapien
atccctcgaggctctatccttgcgt

SEQ ID NO: 3806981 - DNA, 25 bp, Homo sapien
ggctcggagaagagcatctgtcttc

SEQ ID NO: 3806982 - DNA, 25 bp, Homo sapien
ttctcgccctgctcagtctggctgc

SEQ ID NO: 3806983 - DNA, 25 bp, Homo sapien
tttggcagtcacttgcaaactactg

SEQ ID NO: 3806984 - DNA, 25 bp, Homo sapien
tccagcaattgaataacacctcttc

SEQ ID NO: 3806985 - DNA, 25 bp, Homo sapien
cacaggtgcacacgctggtcgtcat

SEQ ID NO: 3806986 - DNA, 25 bp, Homo sapien
cacgctggtcgtcatcttcatggcc

SEQ ID NO: 3806987 - DNA, 25 bp, Homo sapien
ggtcgtcatcttcatggccaaataa

SEQ ID NO: 3806988 - DNA, 25 bp, Homo sapien
ggtgcacacgctggtcgtcatcttc

SEQ ID NO: 3806989 - DNA, 25 bp, Homo sapien
cggagcacaagcccagcgttttatg

SEQ ID NO: 3806990 - DNA, 25 bp, Homo sapien
acggagcacaagcccagcgttttat

SEQ ID NO: 3806991 - DNA, 25 bp, Homo sapien
cacggagcacaagcccagcgtttta

SEQ ID NO: 3806992 - DNA, 25 bp, Homo sapien
cacacgatgagtcgcttagagtctt

SEQ ID NO: 3806993 - DNA, 25 bp, Homo sapien
aggcagcccacacgatgagtcgctt

SEQ ID NO: 3806994 - DNA, 25 bp, Homo sapien
gagtcgcttagagtcttccacaaag

SEQ ID NO: 3806995 - DNA, 25 bp, Homo sapien
gatgagtcgcttagagtcttccaca

SEQ ID NO: 3806996 - DNA, 25 bp, Homo sapien
tgtgggcaggatgaataacagcacc

SEQ ID NO: 3806997 - DNA, 25 bp, Homo sapien
gctttgactatctttgaacaacccc

SEQ ID NO: 3806998 - DNA, 25 bp, Homo sapien
cagccagcacgttggatgcttggca

SEQ ID NO: 3806999 - DNA, 25 bp, Homo sapien
ggagctttaacgttcccagctttga

SEQ ID NO: 3807000 - DNA, 25 bp, Homo sapien
tatctgtctccctgatctcgctgag

SEQ ID NO: 3807001 - DNA, 25 bp, Homo sapien
tgatctcgctgagatgtggagtcat

SEQ ID NO: 3807002 - DNA, 25 bp, Homo sapien
tctccctgatctcgctgagatgtgg

SEQ ID NO: 3807003 - DNA, 25 bp, Homo sapien
tcccgaatatctgtctccctgatct

SEQ ID NO: 3807004 - DNA, 25 bp, Homo sapien
accgccccaggtgctggggacagag

SEQ ID NO: 3807005 - DNA, 25 bp, Homo sapien
ctgccccaccgccccaggtgctggg

SEQ ID NO: 3807006 - DNA, 25 bp, Homo sapien
ccccaggtgctggggacagaggcat

SEQ ID NO: 3807007 - DNA, 25 bp, Homo sapien
cgccccaggtgctggggacagaggc

SEQ ID NO: 3807008 - DNA, 25 bp, Homo sapien
tcagaggtcgtggagcgtaagtcct

SEQ ID NO: 3807009 - DNA, 25 bp, Homo sapien
tggttggaactagcctgaaggcaga

SEQ ID NO: 3807010 - DNA, 25 bp, Homo sapien
aatgcagttcaatgggagagtggta

SEQ ID NO: 3807011 - DNA, 25 bp, Homo sapien
caaaagaattgaactctagtttgaa

SEQ ID NO: 3807012 - DNA, 25 bp, Homo sapien
gctcgtggacataaacataggaaca

SEQ ID NO: 3807013 - DNA, 25 bp, Homo sapien
tctgttattcacatgttacctgtga

SEQ ID NO: 3807014 - DNA, 25 bp, Homo sapien
taacaaacctgtgcatatgtagccc

SEQ ID NO: 3807015 - DNA, 25 bp, Homo sapien
gagggcaagggttgaacagctacct

SEQ ID NO: 3807016 - DNA, 25 bp, Homo sapien
ctgtccacttctcaaccaagcaggg

SEQ ID NO: 3807017 - DNA, 25 bp, Homo sapien
ctacgattggcggagcggaattggc

SEQ ID NO: 3807018 - DNA, 25 bp, Homo sapien
caagcagggagactacgattggcgg

SEQ ID NO: 3807019 - DNA, 25 bp, Homo sapien
tctgtctgtgtgcattgaggccatt

SEQ ID NO: 3807020 - DNA, 25 bp, Homo sapien
tagactccccgctgatgtatagacc

SEQ ID NO: 3807021 - DNA, 25 bp, Homo sapien
tgtgcagctgatgtatggacccgct

SEQ ID NO: 3807022 - DNA, 25 bp, Homo sapien
gacccgctgatgtatggacctgctg

SEQ ID NO: 3807023 - DNA, 25 bp, Homo sapien
cgaccagatgatgtatagactcccc

SEQ ID NO: 3807024 - DNA, 25 bp, Homo sapien
ggctcactgatgcatggaccagatg

SEQ ID NO: 3807025 - DNA, 25 bp, Homo sapien
accagatgatgtatggactccctga

SEQ ID NO: 3807026 - DNA, 25 bp, Homo sapien
gactccctgatatatgagccagctg

SEQ ID NO: 3807027 - DNA, 25 bp, Homo sapien
gaccagctggtgtatggaccggcta

SEQ ID NO: 3807028 - DNA, 25 bp, Homo sapien
tgatgtttggaccagctgtggctct

SEQ ID NO: 3807029 - DNA, 25 bp, Homo sapien
ttgagtgcctgacagcccttcggga

SEQ ID NO: 3807030 - DNA, 25 bp, Homo sapien
gatgtatggacccctgatgtatggg

SEQ ID NO: 3807031 - DNA, 25 bp, Homo sapien
tatggactggttgatgtatggaccc

SEQ ID NO: 3807032 - DNA, 25 bp, Homo sapien
tctaaaatcctcctccgatagcagc

SEQ ID NO: 3807033 - DNA, 25 bp, Homo sapien
gctctgctgagaatttcctaaatct

SEQ ID NO: 3807034 - DNA, 25 bp, Homo sapien
tcttcatgagcgtctaaagaattga

SEQ ID NO: 3807035 - DNA, 25 bp, Homo sapien
tttcaaaagcccctcggatgctctg

SEQ ID NO: 3807036 - DNA, 25 bp, Homo sapien
ttcgcagcaaacagttcaccaagtc

SEQ ID NO: 3807037 - DNA, 25 bp, Homo sapien
tcctcttgaactttcgcagcaaaca

SEQ ID NO: 3807038 - DNA, 25 bp, Homo sapien
tagcctatattatcctcttgaactt

SEQ ID NO: 3807039 - DNA, 25 bp, Homo sapien
gaactttcgcagcaaacagttcacc

SEQ ID NO: 3807040 - DNA, 25 bp, Homo sapien
cagtcacatctattatgccactctg

SEQ ID NO: 3807041 - DNA, 25 bp, Homo sapien
tgcaacagtcacatctattatgcca

SEQ ID NO: 3807042 - DNA, 25 bp, Homo sapien
gtcacatctattatgccactctgcc

SEQ ID NO: 3807043 - DNA, 25 bp, Homo sapien
aacagtcacatctattatgccactc

SEQ ID NO: 3807044 - DNA, 25 bp, Homo sapien
ctgtttcacatgcaccaaatccaaa

SEQ ID NO: 3807045 - DNA, 25 bp, Homo sapien
aagcttgggtcaccgagccactcaa

SEQ ID NO: 3807046 - DNA, 25 bp, Homo sapien
caaatccaaagttcccaagagcaag

SEQ ID NO: 3807047 - DNA, 25 bp, Homo sapien
cttccctgtttcacatgcaccaaat

SEQ ID NO: 3807048 - DNA, 25 bp, Homo sapien
gcataagaacttttgcgagcaccca

SEQ ID NO: 3807049 - DNA, 25 bp, Homo sapien
catgaagggtaattgtggtcccact

SEQ ID NO: 3807050 - DNA, 25 bp, Homo sapien
aaatcctggcatgtgcaatgtggca

SEQ ID NO: 3807051 - DNA, 25 bp, Homo sapien
tatgtagttgcaatcaaatcctggc

SEQ ID NO: 3807052 - DNA, 25 bp, Homo sapien
gagcttgagtcttatcctgagggaa

SEQ ID NO: 3807053 - DNA, 25 bp, Homo sapien
tgggcaggtgggctttgggtatcag

SEQ ID NO: 3807054 - DNA, 25 bp, Homo sapien
taaaaagctgccgtccgtgggcagg

SEQ ID NO: 3807055 - DNA, 25 bp, Homo sapien
gtcagggtgccttgatttaaaaagc

SEQ ID NO: 3807056 - DNA, 25 bp, Homo sapien
gagtttcctgctaacgtgacccttg

SEQ ID NO: 3807057 - DNA, 25 bp, Homo sapien
taacgtgacccttgagtctttggag

SEQ ID NO: 3807058 - DNA, 25 bp, Homo sapien
tgagtctttggaggtccgggccaac

SEQ ID NO: 3807059 - DNA, 25 bp, Homo sapien
ccgggccaactgacaaaacaatttg

SEQ ID NO: 3807060 - DNA, 25 bp, Homo sapien
caaatcagaggcgtcgtagcctggc

SEQ ID NO: 3807061 - DNA, 25 bp, Homo sapien
agcctggcgtctcctcgcatgtcga

SEQ ID NO: 3807062 - DNA, 25 bp, Homo sapien
gagggccgctttcaccatctgcttt

SEQ ID NO: 3807063 - DNA, 25 bp, Homo sapien
tgtaagactcaggacacgggaatga

SEQ ID NO: 3807064 - DNA, 25 bp, Homo sapien
tctaaggccattttctcagaagagt

SEQ ID NO: 3807065 - DNA, 25 bp, Homo sapien
caaatagccgtaataaagctaagct

SEQ ID NO: 3807066 - DNA, 25 bp, Homo sapien
tgggtcccttgatccaaatagccgt

SEQ ID NO: 3807067 - DNA, 25 bp, Homo sapien
taagctgcctcggatttctaaggcc

SEQ ID NO: 3807068 - DNA, 25 bp, Homo sapien
tgtaaattctccagcgccatcagaa

SEQ ID NO: 3807069 - DNA, 25 bp, Homo sapien
attctccagcgccatcagaagcagc

SEQ ID NO: 3807070 - DNA, 25 bp, Homo sapien
ctgcattcttaaggctttgccttcc

SEQ ID NO: 3807071 - DNA, 25 bp, Homo sapien
aaattctccagcgccatcagaagca

SEQ ID NO: 3807072 - DNA, 25 bp, Homo sapien
gatgtctgagctggcagcacaaccc

SEQ ID NO: 3807073 - DNA, 25 bp, Homo sapien
cctggatgtctgagctggcagcaca

SEQ ID NO: 3807074 - DNA, 25 bp, Homo sapien
ggcagcacaacccagtggatattcc

SEQ ID NO: 3807075 - DNA, 25 bp, Homo sapien
gcagcacaacccagtggatattcca

SEQ ID NO: 3807076 - DNA, 25 bp, Homo sapien
ggctgtacaactgcaaaggggatat

SEQ ID NO: 3807077 - DNA, 25 bp, Homo sapien
tacaactgcaaaggggatatggtcc

SEQ ID NO: 3807078 - DNA, 25 bp, Homo sapien
tgcaaaggggatatggtccagctcc

SEQ ID NO: 3807079 - DNA, 25 bp, Homo sapien
aactgcaaaggggatatggtccagc

SEQ ID NO: 3807080 - DNA, 25 bp, Homo sapien
cagcacgtgaggatggtggcagcga

SEQ ID NO: 3807081 - DNA, 25 bp, Homo sapien
agccattggagagagattgactatg

SEQ ID NO: 3807082 - DNA, 25 bp, Homo sapien
cctgagcacatttgtagaaggcagt

SEQ ID NO: 3807083 - DNA, 25 bp, Homo sapien
gtgacagcccagctcggagaggttt

SEQ ID NO: 3807084 - DNA, 25 bp, Homo sapien
gtttaccatgatcttctttcccaaa

SEQ ID NO: 3807085 - DNA, 25 bp, Homo sapien
atgtatgtgccctcttcttttccca

SEQ ID NO: 3807086 - DNA, 25 bp, Homo sapien
ggaaggatttaatgtatgtgccctc

SEQ ID NO: 3807087 - DNA, 25 bp, Homo sapien
cccaaatggaaggatttaatgtatg

SEQ ID NO: 3807088 - DNA, 25 bp, Homo sapien
ggctgaagtttgtgcctctcagcta

SEQ ID NO: 3807089 - DNA, 25 bp, Homo sapien
tgagaatcctgagcaataacgttgg

SEQ ID NO: 3807090 - DNA, 25 bp, Homo sapien
tcaataatgaggagctacatcctgg

SEQ ID NO: 3807091 - DNA, 25 bp, Homo sapien
cctggcattattagctgcagaggct

SEQ ID NO: 3807092 - DNA, 25 bp, Homo sapien
cctggcttgcggagatgagcacttc

SEQ ID NO: 3807093 - DNA, 25 bp, Homo sapien
tgttactcgtctaactgaagcctct

SEQ ID NO: 3807094 - DNA, 25 bp, Homo sapien
gacttcctgcatcctattctccggg

SEQ ID NO: 3807095 - DNA, 25 bp, Homo sapien
aagaaagggcctcatgacttcctgc

SEQ ID NO: 3807096 - DNA, 25 bp, Homo sapien
tacaaaagcaatgggcgctcttccc

SEQ ID NO: 3807097 - DNA, 25 bp, Homo sapien
ccaaagcttgcagcgtgagagggtc

SEQ ID NO: 3807098 - DNA, 25 bp, Homo sapien
gcacaaacaggacgagaaggcagca

SEQ ID NO: 3807099 - DNA, 25 bp, Homo sapien
gagagatcacatgtcagttgcacaa

SEQ ID NO: 3807100 - DNA, 25 bp, Homo sapien
cttctttgaatgaggaggtgtataa

SEQ ID NO: 3807101 - DNA, 25 bp, Homo sapien
ctctgtaagttgcttggaatccttc

SEQ ID NO: 3807102 - DNA, 25 bp, Homo sapien
cacactggttgagcatgaaacagga

SEQ ID NO: 3807103 - DNA, 25 bp, Homo sapien
aggtgtataagggatgggaaacaca

SEQ ID NO: 3807104 - DNA, 25 bp, Homo sapien
actggacatctcctgatgcgtcctt

SEQ ID NO: 3807105 - DNA, 25 bp, Homo sapien
tagtcactggacatctcctgatgcg

SEQ ID NO: 3807106 - DNA, 25 bp, Homo sapien
tggacatctcctgatgcgtccttcc

SEQ ID NO: 3807107 - DNA, 25 bp, Homo sapien
gacatctcctgatgcgtccttccaa

SEQ ID NO: 3807108 - DNA, 25 bp, Homo sapien
caagaaatagaaacacgactgggag

SEQ ID NO: 3807109 - DNA, 25 bp, Homo sapien
gactgggagtcagctgtcccctgaa

SEQ ID NO: 3807110 - DNA, 25 bp, Homo sapien
cctgaagcacggtagtgaggaagga

SEQ ID NO: 3807111 - DNA, 25 bp, Homo sapien
gggaattgctcgaaaacaacaagca

SEQ ID NO: 3807112 - DNA, 25 bp, Homo sapien
tcctctgatattggcagcaactccc

SEQ ID NO: 3807113 - DNA, 25 bp, Homo sapien
cgttgcctccgggacctcttgttgg

SEQ ID NO: 3807114 - DNA, 25 bp, Homo sapien
ctcagggagtgcaagccaaggcgtt

SEQ ID NO: 3807115 - DNA, 25 bp, Homo sapien
gggacctcttgttggtgctggccca

SEQ ID NO: 3807116 - DNA, 25 bp, Homo sapien
tgtgggcctgaaggattactcccat

SEQ ID NO: 3807117 - DNA, 25 bp, Homo sapien
tgattccaacacagactcaagactt

SEQ ID NO: 3807118 - DNA, 25 bp, Homo sapien
ttctgtccaagacgaccaggttgct

SEQ ID NO: 3807119 - DNA, 25 bp, Homo sapien
aaggattactcccatcttcctgaaa

SEQ ID NO: 3807120 - DNA, 25 bp, Homo sapien
tagtctggtaacaccctggctgcat

SEQ ID NO: 3807121 - DNA, 25 bp, Homo sapien
ttagtctggtaacaccctggctgca

SEQ ID NO: 3807122 - DNA, 25 bp, Homo sapien
gcatctttcagccagtatccaacac

SEQ ID NO: 3807123 - DNA, 25 bp, Homo sapien
ctgcatctttcagccagtatccaac

SEQ ID NO: 3807124 - DNA, 25 bp, Homo sapien
tacccaaggctaccacattgcacag

SEQ ID NO: 3807125 - DNA, 25 bp, Homo sapien
agctccagcaagagctgtgctctct

SEQ ID NO: 3807126 - DNA, 25 bp, Homo sapien
tggtggcaccacatcgagtctctgt

SEQ ID NO: 3807127 - DNA, 25 bp, Homo sapien
tgtacagtatgtcctgagctgtgcc

SEQ ID NO: 3807128 - DNA, 25 bp, Homo sapien
gaattctgtgcctaacttaaggtca

SEQ ID NO: 3807129 - DNA, 25 bp, Homo sapien
tgatttctttgctatcctcttacag

SEQ ID NO: 3807130 - DNA, 25 bp, Homo sapien
gataagagttacttctgagctttct

SEQ ID NO: 3807131 - DNA, 25 bp, Homo sapien
gagtcctctaccttctaattcaaaa

SEQ ID NO: 3807132 - DNA, 25 bp, Homo sapien
taaaagaatcaagtagcagttagtg

SEQ ID NO: 3807133 - DNA, 25 bp, Homo sapien
ggctgacgccgtaatcccaagattt

SEQ ID NO: 3807134 - DNA, 25 bp, Homo sapien
tgtgtactgatgtggaatgatctcc

SEQ ID NO: 3807135 - DNA, 25 bp, Homo sapien
gacaaaagggatgtcgatgagacaa

SEQ ID NO: 3807136 - DNA, 25 bp, Homo sapien
cctgtcatcttgtgcaggtctatac

SEQ ID NO: 3807137 - DNA, 25 bp, Homo sapien
ttgcctgtcatcttgtgcaggtcta

SEQ ID NO: 3807138 - DNA, 25 bp, Homo sapien
gtcatcttgtgcaggtctatactaa

SEQ ID NO: 3807139 - DNA, 25 bp, Homo sapien
tcttgtgcaggtctatactaatctt

SEQ ID NO: 3807140 - DNA, 25 bp, Homo sapien
caaagcttaattgaacaggcaccag

SEQ ID NO: 3807141 - DNA, 25 bp, Homo sapien
gatgtccagtaatggcagactaggt

SEQ ID NO: 3807142 - DNA, 25 bp, Homo sapien
gcagaacatttgcagtgcccagctt

SEQ ID NO: 3807143 - DNA, 25 bp, Homo sapien
tcattagcggtgaactaggcattca

SEQ ID NO: 3807144 - DNA, 25 bp, Homo sapien
gctgcttgaaagcatccgactgcta

SEQ ID NO: 3807145 - DNA, 25 bp, Homo sapien
tacccgctagggacatctgctgatg

SEQ ID NO: 3807146 - DNA, 25 bp, Homo sapien
gacttaagcaagtgagcctagcatt

SEQ ID NO: 3807147 - DNA, 25 bp, Homo sapien
cccaccacagtgcaagttaatgatg

SEQ ID NO: 3807148 - DNA, 25 bp, Homo sapien
agcttcagaaacgtaagacttccgt

SEQ ID NO: 3807149 - DNA, 25 bp, Homo sapien
tagtgacacggagcatgatgcaggc

SEQ ID NO: 3807150 - DNA, 25 bp, Homo sapien
atcgtgatatccacaagacaatggg

SEQ ID NO: 3807151 - DNA, 25 bp, Homo sapien
cggatgtgtgccaagttcattacgc

SEQ ID NO: 3807152 - DNA, 25 bp, Homo sapien
tagctccaggaattatactagtggg

SEQ ID NO: 3807153 - DNA, 25 bp, Homo sapien
tactagtgggctatagctgaaatcg

SEQ ID NO: 3807154 - DNA, 25 bp, Homo sapien
aatcgttttgatctgggtagtctcc

SEQ ID NO: 3807155 - DNA, 25 bp, Homo sapien
taaaaggtctttgcagccaggcgtg

SEQ ID NO: 3807156 - DNA, 25 bp, Homo sapien
ggtgtcaaatgtgcaatccaatagc

SEQ ID NO: 3807157 - DNA, 25 bp, Homo sapien
taaagacatcgcctgtacagaacac

SEQ ID NO: 3807158 - DNA, 25 bp, Homo sapien
agtaacatttacttcgcgccaggaa

SEQ ID NO: 3807159 - DNA, 25 bp, Homo sapien
tacataccacaaacaccgaaaggca

SEQ ID NO: 3807160 - DNA, 25 bp, Homo sapien
tgtacgtggatggtcctggaaccaa

SEQ ID NO: 3807161 - DNA, 25 bp, Homo sapien
tgaaggagttcagtgtgtgcagatc

SEQ ID NO: 3807162 - DNA, 25 bp, Homo sapien
aggtggaattctcccatgcacgggc

SEQ ID NO: 3807163 - DNA, 25 bp, Homo sapien
aatacagtactttcacaggatgcaa

SEQ ID NO: 3807164 - DNA, 25 bp, Homo sapien
cacagaccatttgataggctaagcc

SEQ ID NO: 3807165 - DNA, 25 bp, Homo sapien
tcccagaacttcagaccaggttaag

SEQ ID NO: 3807166 - DNA, 25 bp, Homo sapien
tcgagagcactaccaaattttgaag

SEQ ID NO: 3807167 - DNA, 25 bp, Homo sapien
gctaagcccagttctttacacaatg

SEQ ID NO: 3807168 - DNA, 25 bp, Homo sapien
tgagtactaattgttctcttcccac

SEQ ID NO: 3807169 - DNA, 25 bp, Homo sapien
catgtctgagtactaattgttctct

SEQ ID NO: 3807170 - DNA, 25 bp, Homo sapien
tcatgtctgagtactaattgttctc

SEQ ID NO: 3807171 - DNA, 25 bp, Homo sapien
gtctgagtactaattgttctcttcc

SEQ ID NO: 3807172 - DNA, 25 bp, Homo sapien
gagcagatggtagcaatagggatac

SEQ ID NO: 3807173 - DNA, 25 bp, Homo sapien
ccccagggccgattacttgatatgg

SEQ ID NO: 3807174 - DNA, 25 bp, Homo sapien
aaagattctagcaagtttttgactg

SEQ ID NO: 3807175 - DNA, 25 bp, Homo sapien
tggaaggtcgatctgtatcttcctg

SEQ ID NO: 3807176 - DNA, 25 bp, Homo sapien
ccaggcactttctcgggccaaatct

SEQ ID NO: 3807177 - DNA, 25 bp, Homo sapien
actttctcgggccaaatctacaaat

SEQ ID NO: 3807178 - DNA, 25 bp, Homo sapien
gttgagagaagtttcaaatggattc

SEQ ID NO: 3807179 - DNA, 25 bp, Homo sapien
tgcttatgttgagagaagtttcaaa

SEQ ID NO: 3807180 - DNA, 25 bp, Homo sapien
atttttatcgaaagcaaaattgcca

SEQ ID NO: 3807181 - DNA, 25 bp, Homo sapien
tttttatcgaaagcaaaattgccaa

SEQ ID NO: 3807182 - DNA, 25 bp, Homo sapien
gaatttttatcgaaagcaaaattgc

SEQ ID NO: 3807183 - DNA, 25 bp, Homo sapien
caagtcacgaacaaatgtgcagttg

SEQ ID NO: 3807184 - DNA, 25 bp, Homo sapien
tactcaagtcacgaacaaatgtgca

SEQ ID NO: 3807185 - DNA, 25 bp, Homo sapien
tctactcaagtcacgaacaaatgtg

SEQ ID NO: 3807186 - DNA, 25 bp, Homo sapien
attctactcaagtcacgaacaaatg

SEQ ID NO: 3807187 - DNA, 25 bp, Homo sapien
tgatcaattagttgtaaacacaaat

SEQ ID NO: 3807188 - DNA, 25 bp, Homo sapien
agtggagaaggaacacagaaatttg

SEQ ID NO: 3807189 - DNA, 25 bp, Homo sapien
aggaacacagaaatttgtaactggt

SEQ ID NO: 3807190 - DNA, 25 bp, Homo sapien
ttgtgatcaattagttgtaaacaca

SEQ ID NO: 3807191 - DNA, 25 bp, Homo sapien
ttttaaggaatctagtgttggaaga

SEQ ID NO: 3807192 - DNA, 25 bp, Homo sapien
ttaaggaatctagtgttggaagaat

SEQ ID NO: 3807193 - DNA, 25 bp, Homo sapien
aggaatctagtgttggaagaatagg

SEQ ID NO: 3807194 - DNA, 25 bp, Homo sapien
taaggaatctagtgttggaagaata

SEQ ID NO: 3807195 - DNA, 25 bp, Homo sapien
aggagttcggaacttgtcaaggcaa

SEQ ID NO: 3807196 - DNA, 25 bp, Homo sapien
caaggctctcactcttgagtctagg

SEQ ID NO: 3807197 - DNA, 25 bp, Homo sapien
tgttagtgaatgtgctcgagcccag

SEQ ID NO: 3807198 - DNA, 25 bp, Homo sapien
catgcaccaggaatactacttgtta

SEQ ID NO: 3807199 - DNA, 25 bp, Homo sapien
aaaataataaatgtaagcggtcata

SEQ ID NO: 3807200 - DNA, 25 bp, Homo sapien
ttaaaataataaatgtaagcggtca

SEQ ID NO: 3807201 - DNA, 25 bp, Homo sapien
taaaataataaatgtaagcggtcat

SEQ ID NO: 3807202 - DNA, 25 bp, Homo sapien
aaataataaatgtaagcggtcatac

SEQ ID NO: 3807203 - DNA, 25 bp, Homo sapien
aaatcacactgaaatccggaggcct

SEQ ID NO: 3807204 - DNA, 25 bp, Homo sapien
gttcgtagtcaaatcacactgaaat

SEQ ID NO: 3807205 - DNA, 25 bp, Homo sapien
tagtcaaatcacactgaaatccgga

SEQ ID NO: 3807206 - DNA, 25 bp, Homo sapien
tcaaatcacactgaaatccggaggc

SEQ ID NO: 3807207 - DNA, 25 bp, Homo sapien
gggccaaagtggtcaaggcactctc

SEQ ID NO: 3807208 - DNA, 25 bp, Homo sapien
agcggacaccgggcatttaatattt

SEQ ID NO: 3807209 - DNA, 25 bp, Homo sapien
gagcggacaccgggcatttaatatt

SEQ ID NO: 3807210 - DNA, 25 bp, Homo sapien
gccaaagtggtcaaggcactctcct

SEQ ID NO: 3807211 - DNA, 25 bp, Homo sapien
tcaaggcatgacacaaggaataaga

SEQ ID NO: 3807212 - DNA, 25 bp, Homo sapien
gtagttacaataatctaagtgagag

SEQ ID NO: 3807213 - DNA, 25 bp, Homo sapien
aggtaactccaacaaagactgaagg

SEQ ID NO: 3807214 - DNA, 25 bp, Homo sapien
tataagggactgtgaaactatgaat

SEQ ID NO: 3807215 - DNA, 25 bp, Homo sapien
ttcaaaaccagcctgaccaaggagg

SEQ ID NO: 3807216 - DNA, 25 bp, Homo sapien
tgtaatcccagctactcaggaggct

SEQ ID NO: 3807217 - DNA, 25 bp, Homo sapien
gaggcaggagaaatcacttgaaccc

SEQ ID NO: 3807218 - DNA, 25 bp, Homo sapien
aatcagctgggcatggtagcaggcg

SEQ ID NO: 3807219 - DNA, 25 bp, Homo sapien
tatgcagtctggaaaatacgcggcg

SEQ ID NO: 3807220 - DNA, 25 bp, Homo sapien
tcaagagagtgttcagctgatcgtc

SEQ ID NO: 3807221 - DNA, 25 bp, Homo sapien
cggcggccatgtcttcaataagaga

SEQ ID NO: 3807222 - DNA, 25 bp, Homo sapien
gaacaggtgagatatcggagcttag

SEQ ID NO: 3807223 - DNA, 25 bp, Homo sapien
gagcatgacgacattcttagaaagc

SEQ ID NO: 3807224 - DNA, 25 bp, Homo sapien
tcactacgttaagacattaggaggg

SEQ ID NO: 3807225 - DNA, 25 bp, Homo sapien
tgtaaatacaccttgactaagtagg

SEQ ID NO: 3807226 - DNA, 25 bp, Homo sapien
tgacttgacatgaggaaatctacag

SEQ ID NO: 3807227 - DNA, 25 bp, Homo sapien
acaggaatctttattgttcataaaa

SEQ ID NO: 3807228 - DNA, 25 bp, Homo sapien
tacaggaatctttattgttcataaa

SEQ ID NO: 3807229 - DNA, 25 bp, Homo sapien
tacgcgtgaccgttcagaagtctgg

SEQ ID NO: 3807230 - DNA, 25 bp, Homo sapien
gaacgtggcaactgattacttgacc

SEQ ID NO: 3807231 - DNA, 25 bp, Homo sapien
catggccgtgcttggagtatgagtc

SEQ ID NO: 3807232 - DNA, 25 bp, Homo sapien
gaaacgtgatctgaatggaattgca

SEQ ID NO: 3807233 - DNA, 25 bp, Homo sapien
gattattaataggtccaaattggga

SEQ ID NO: 3807234 - DNA, 25 bp, Homo sapien
gctgtgcctgttctcgtctttcatt

SEQ ID NO: 3807235 - DNA, 25 bp, Homo sapien
taaaacagtccgctgtgcctgttct

SEQ ID NO: 3807236 - DNA, 25 bp, Homo sapien
ctctgggcaatgtattaaaacagtc

SEQ ID NO: 3807237 - DNA, 25 bp, Homo sapien
ctccttttgggaatcttgtcttcaa

SEQ ID NO: 3807238 - DNA, 25 bp, Homo sapien
ctcagagaatctccttttgggaatc

SEQ ID NO: 3807239 - DNA, 25 bp, Homo sapien
cttttgggaatcttgtcttcaaagc

SEQ ID NO: 3807240 - DNA, 25 bp, Homo sapien
tctccttttgggaatcttgtcttca

SEQ ID NO: 3807241 - DNA, 25 bp, Homo sapien
aatcggaagccgcaagcatgtgaac

SEQ ID NO: 3807242 - DNA, 25 bp, Homo sapien
agagcccaagattataaggccacca

SEQ ID NO: 3807243 - DNA, 25 bp, Homo sapien
atcggaagccgcaagcatgtgaacg

SEQ ID NO: 3807244 - DNA, 25 bp, Homo sapien
tgtagaagagcccaagattataagg

SEQ ID NO: 3807245 - DNA, 25 bp, Homo sapien
acaactccattactgtacacaggag

SEQ ID NO: 3807246 - DNA, 25 bp, Homo sapien
caggagtcgccccaaacaaacatca

SEQ ID NO: 3807247 - DNA, 25 bp, Homo sapien
gaagtctaaacaactccattactgt

SEQ ID NO: 3807248 - DNA, 25 bp, Homo sapien
ttactgtacacaggagtcgccccaa

SEQ ID NO: 3807249 - DNA, 25 bp, Homo sapien
ccctgggttcccctacagagatcag

SEQ ID NO: 3807250 - DNA, 25 bp, Homo sapien
tgggttcccctacagagatcagagg

SEQ ID NO: 3807251 - DNA, 25 bp, Homo sapien
gcgaccctgggttcccctacagaga

SEQ ID NO: 3807252 - DNA, 25 bp, Homo sapien
cgaccctgggttcccctacagagat

SEQ ID NO: 3807253 - DNA, 25 bp, Homo sapien
aaagggtccacagccgtttccacag

SEQ ID NO: 3807254 - DNA, 25 bp, Homo sapien
caggccacgtgtttccccgtgatcc

SEQ ID NO: 3807255 - DNA, 25 bp, Homo sapien
cacaggccacgtgtttccccgtgat

SEQ ID NO: 3807256 - DNA, 25 bp, Homo sapien
acaggccacgtgtttccccgtgatc

SEQ ID NO: 3807257 - DNA, 25 bp, Homo sapien
gaaggctgctcgtctctcctaaggt

SEQ ID NO: 3807258 - DNA, 25 bp, Homo sapien
gataggccgctggactcgagttctt

SEQ ID NO: 3807259 - DNA, 25 bp, Homo sapien
cagttcctgggcaactcaaaagcct

SEQ ID NO: 3807260 - DNA, 25 bp, Homo sapien
cacaggttcaaacgggtcaagagcc

SEQ ID NO: 3807261 - DNA, 25 bp, Homo sapien
aaaaaaacagcactagcgcgaagct

SEQ ID NO: 3807262 - DNA, 25 bp, Homo sapien
aaaaaaaacagcactagcgcgaagc

SEQ ID NO: 3807263 - DNA, 25 bp, Homo sapien
tcccaacctttttgcccactctcag

SEQ ID NO: 3807264 - DNA, 25 bp, Homo sapien
atggcggtgtgatgagatgctgtgc

SEQ ID NO: 3807265 - DNA, 25 bp, Homo sapien
atcagcacaaacaccgtcagcatgg

SEQ ID NO: 3807266 - DNA, 25 bp, Homo sapien
caaacaccgtcagcatggtcatggg

SEQ ID NO: 3807267 - DNA, 25 bp, Homo sapien
ctgggaacttggaaggggttgtgtg

SEQ ID NO: 3807268 - DNA, 25 bp, Homo sapien
ctatcagagagggcagagagctcgt

SEQ ID NO: 3807269 - DNA, 25 bp, Homo sapien
tggtttatggtgtaggggctgggaa

SEQ ID NO: 3807270 - DNA, 25 bp, Homo sapien
gcagagagctcgtggtttatggtgt

SEQ ID NO: 3807271 - DNA, 25 bp, Homo sapien
tgtcatgcagtctgagtcatgctgg

SEQ ID NO: 3807272 - DNA, 25 bp, Homo sapien
tcatgcagtctgagtcatgctggca

SEQ ID NO: 3807273 - DNA, 25 bp, Homo sapien
atgcagtctgagtcatgctggcagg

SEQ ID NO: 3807274 - DNA, 25 bp, Homo sapien
tggcagggcagggcatccagctccc

SEQ ID NO: 3807275 - DNA, 25 bp, Homo sapien
agaagggcctcaggtgcaccctcca

SEQ ID NO: 3807276 - DNA, 25 bp, Homo sapien
gctgttgtgtggggctccccaaggt

SEQ ID NO: 3807277 - DNA, 25 bp, Homo sapien
ctccccaaggtgagaggcagccctg

SEQ ID NO: 3807278 - DNA, 25 bp, Homo sapien
caagcagtgttctttctctattagg

SEQ ID NO: 3807279 - DNA, 25 bp, Homo sapien
aactgccagccaatcgatcgggtca

SEQ ID NO: 3807280 - DNA, 25 bp, Homo sapien
cagccaatcgatcgggtcaggaaaa

SEQ ID NO: 3807281 - DNA, 25 bp, Homo sapien
tcgatcgggtcaggaaaatccatcc

SEQ ID NO: 3807282 - DNA, 25 bp, Homo sapien
caatcgatcgggtcaggaaaatcca

SEQ ID NO: 3807283 - DNA, 25 bp, Homo sapien
actgttgctgaaaacttgtgccacc

SEQ ID NO: 3807284 - DNA, 25 bp, Homo sapien
tgtgactgttgctgaaaacttgtgc

SEQ ID NO: 3807285 - DNA, 25 bp, Homo sapien
gtagtggagagctgacatatccagc

SEQ ID NO: 3807286 - DNA, 25 bp, Homo sapien
ctgacatatccagctgtgactgttg

SEQ ID NO: 3807287 - DNA, 25 bp, Homo sapien
acagtctaccagttctgctgtccct

SEQ ID NO: 3807288 - DNA, 25 bp, Homo sapien
tgtggcctgacagtctaccagttct

SEQ ID NO: 3807289 - DNA, 25 bp, Homo sapien
gctgagaatcaaacccatttctgga

SEQ ID NO: 3807290 - DNA, 25 bp, Homo sapien
aaggccacaccctttgcaagggaca

SEQ ID NO: 3807291 - DNA, 25 bp, Homo sapien
ccactagagggcaggaccatgaact

SEQ ID NO: 3807292 - DNA, 25 bp, Homo sapien
caaggggacggagaacggaagatgc

SEQ ID NO: 3807293 - DNA, 25 bp, Homo sapien
gagggcaggaccatgaactcagcct

SEQ ID NO: 3807294 - DNA, 25 bp, Homo sapien
agacagaacagaccaccaggtgcag

SEQ ID NO: 3807295 - DNA, 25 bp, Homo sapien
tgtgtaggagattaaccccataact

SEQ ID NO: 3807296 - DNA, 25 bp, Homo sapien
tcttttttaatttcttgaccagctc

SEQ ID NO: 3807297 - DNA, 25 bp, Homo sapien
tgaagtaaatgaattgtgtaggaga

SEQ ID NO: 3807298 - DNA, 25 bp, Homo sapien
aattgtgtaggagattaaccccata

SEQ ID NO: 3807299 - DNA, 25 bp, Homo sapien
gggtcccgcatcacaggaagaagct

SEQ ID NO: 3807300 - DNA, 25 bp, Homo sapien
ggggtcccgcatcacaggaagaagc

SEQ ID NO: 3807301 - DNA, 25 bp, Homo sapien
ggtcccgcatcacaggaagaagctg

SEQ ID NO: 3807302 - DNA, 25 bp, Homo sapien
caggctgtcggctcacctcacaaaa

SEQ ID NO: 3807303 - DNA, 25 bp, Homo sapien
tgcccctcgttgtgatcgcctgcaa

SEQ ID NO: 3807304 - DNA, 25 bp, Homo sapien
cctcgttgtgatcgcctgcaagccg

SEQ ID NO: 3807305 - DNA, 25 bp, Homo sapien
gccatgcccctcgttgtgatcgcct

SEQ ID NO: 3807306 - DNA, 25 bp, Homo sapien
gttgtgatcgcctgcaagccgcaac

SEQ ID NO: 3807307 - DNA, 25 bp, Homo sapien
cagctgccacgctggtgccagtgcc

SEQ ID NO: 3807308 - DNA, 25 bp, Homo sapien
tcagctgccacgctggtgccagtgc

SEQ ID NO: 3807309 - DNA, 25 bp, Homo sapien
agctgccacgctggtgccagtgccc

SEQ ID NO: 3807310 - DNA, 25 bp, Homo sapien
acccccacagaggtgctgcaatgcc

SEQ ID NO: 3807311 - DNA, 25 bp, Homo sapien
ccacagaggtgctgcaatgccccat

SEQ ID NO: 3807312 - DNA, 25 bp, Homo sapien
cccacagaggtgctgcaatgcccca

SEQ ID NO: 3807313 - DNA, 25 bp, Homo sapien
cccacccccacagaggtgctgcaat

SEQ ID NO: 3807314 - DNA, 25 bp, Homo sapien
tgccctctggccctcgtatgttgtg

SEQ ID NO: 3807315 - DNA, 25 bp, Homo sapien
cctctggccctcgtatgttgtgatt

SEQ ID NO: 3807316 - DNA, 25 bp, Homo sapien
cctcctggtgccgcgtctttggcgc

SEQ ID NO: 3807317 - DNA, 25 bp, Homo sapien
ctggccctcgtatgttgtgatttac

SEQ ID NO: 3807318 - DNA, 25 bp, Homo sapien
gtggatggatcgaagctctagtttc

SEQ ID NO: 3807319 - DNA, 25 bp, Homo sapien
ccttcaggaggtccataaagccact

SEQ ID NO: 3807320 - DNA, 25 bp, Homo sapien
ctccttcaggaggtccataaagcca

SEQ ID NO: 3807321 - DNA, 25 bp, Homo sapien
cctgagaggtggatggatcgaagct

SEQ ID NO: 3807322 - DNA, 25 bp, Homo sapien
atcttgagagcgacctgccctgccc

SEQ ID NO: 3807323 - DNA, 25 bp, Homo sapien
catcttgagagcgacctgccctgcc

SEQ ID NO: 3807324 - DNA, 25 bp, Homo sapien
ggtcacatcttgagagcgacctgcc

SEQ ID NO: 3807325 - DNA, 25 bp, Homo sapien
gggtcacatcttgagagcgacctgc

SEQ ID NO: 3807326 - DNA, 25 bp, Homo sapien
aacttctccatggatccctgcaggg

SEQ ID NO: 3807327 - DNA, 25 bp, Homo sapien
acttctccatggatccctgcagggc

SEQ ID NO: 3807328 - DNA, 25 bp, Homo sapien
gcaacttctccatggatccctgcag

SEQ ID NO: 3807329 - DNA, 25 bp, Homo sapien
ctgcaacttctccatggatccctgc

SEQ ID NO: 3807330 - DNA, 25 bp, Homo sapien
ccaaggccacccgggtgagtcaggc

SEQ ID NO: 3807331 - DNA, 25 bp, Homo sapien
tgggccaaggccacccgggtgagtc

SEQ ID NO: 3807332 - DNA, 25 bp, Homo sapien
ccacccgggtgagtcaggcgctggc

SEQ ID NO: 3807333 - DNA, 25 bp, Homo sapien
aggccacccgggtgagtcaggcgct

SEQ ID NO: 3807334 - DNA, 25 bp, Homo sapien
gcactggctccagcggagttgaaaa

SEQ ID NO: 3807335 - DNA, 25 bp, Homo sapien
cactggctccagcggagttgaaaaa

SEQ ID NO: 3807336 - DNA, 25 bp, Homo sapien
ggctccagcggagttgaaaaacgcc

SEQ ID NO: 3807337 - DNA, 25 bp, Homo sapien
ctggctccagcggagttgaaaaacg

SEQ ID NO: 3807338 - DNA, 25 bp, Homo sapien
ctggaaggagtgagcgtccacagaa

SEQ ID NO: 3807339 - DNA, 25 bp, Homo sapien
tggaaggagtgagcgtccacagaaa

SEQ ID NO: 3807340 - DNA, 25 bp, Homo sapien
ggtggcaaagcgggggcagagtgag

SEQ ID NO: 3807341 - DNA, 25 bp, Homo sapien
tggcaaagcgggggcagagtgagtc

SEQ ID NO: 3807342 - DNA, 25 bp, Homo sapien
ggcaaagcgggggcagagtgagtca

SEQ ID NO: 3807343 - DNA, 25 bp, Homo sapien
gcaaagcgggggcagagtgagtcac

SEQ ID NO: 3807344 - DNA, 25 bp, Homo sapien
ctcttccacgttgtccagatgttct

SEQ ID NO: 3807345 - DNA, 25 bp, Homo sapien
tcttccacgttgtccagatgttctc

SEQ ID NO: 3807346 - DNA, 25 bp, Homo sapien
cccactaccagtcggtgcaggagtt

SEQ ID NO: 3807347 - DNA, 25 bp, Homo sapien
acagtcccactaccagtcggtgcag

SEQ ID NO: 3807348 - DNA, 25 bp, Homo sapien
taggcaacctgttggccccctagcc

SEQ ID NO: 3807349 - DNA, 25 bp, Homo sapien
ctaccagtcggtgcaggagttctga

SEQ ID NO: 3807350 - DNA, 25 bp, Homo sapien
tcctcctctgagagatctcctgtac

SEQ ID NO: 3807351 - DNA, 25 bp, Homo sapien
ctcctcctcctctgagagatctcct

SEQ ID NO: 3807352 - DNA, 25 bp, Homo sapien
ctcctcctctgagagatctcctgta

SEQ ID NO: 3807353 - DNA, 25 bp, Homo sapien
ccctttccttctggggctctctcct

SEQ ID NO: 3807354 - DNA, 25 bp, Homo sapien
aactgggcctgtagctgctggttct

SEQ ID NO: 3807355 - DNA, 25 bp, Homo sapien
cttgcctagggagtgccatgaggct

SEQ ID NO: 3807356 - DNA, 25 bp, Homo sapien
gaggctcaactgggcctgtagctgc

SEQ ID NO: 3807357 - DNA, 25 bp, Homo sapien
ttgcctagggagtgccatgaggctc

SEQ ID NO: 3807358 - DNA, 25 bp, Homo sapien
gcaacttttggtgggccatctctgc

SEQ ID NO: 3807359 - DNA, 25 bp, Homo sapien
tcaaggccccgtcctcagcaattcc

SEQ ID NO: 3807360 - DNA, 25 bp, Homo sapien
tcctcagcaattccctcccctgggt

SEQ ID NO: 3807361 - DNA, 25 bp, Homo sapien
aggccccgtcctcagcaattccctc

SEQ ID NO: 3807362 - DNA, 25 bp, Homo sapien
gcagtaactgcctgtgctgcgcctc

SEQ ID NO: 3807363 - DNA, 25 bp, Homo sapien
ctgcagcagtaactgcctgtgctgc

SEQ ID NO: 3807364 - DNA, 25 bp, Homo sapien
gcagcagtaactgcctgtgctgcgc

SEQ ID NO: 3807365 - DNA, 25 bp, Homo sapien
gtaactgcctgtgctgcgcctcctt

SEQ ID NO: 3807366 - DNA, 25 bp, Homo sapien
tgagcctcttggctcttcagcttca

SEQ ID NO: 3807367 - DNA, 25 bp, Homo sapien
tgcaggtgacccagggactggtgtc

SEQ ID NO: 3807368 - DNA, 25 bp, Homo sapien
caggtgacccagggactggtgtccc

SEQ ID NO: 3807369 - DNA, 25 bp, Homo sapien
tgctgctgcagactctgagcctctt

SEQ ID NO: 3807370 - DNA, 25 bp, Homo sapien
ctcccagcccttcttggatgggcag

SEQ ID NO: 3807371 - DNA, 25 bp, Homo sapien
ccagcccttcttggatgggcagagg

SEQ ID NO: 3807372 - DNA, 25 bp, Homo sapien
agcccttcttggatgggcagaggtt

SEQ ID NO: 3807373 - DNA, 25 bp, Homo sapien
cccttcttggatgggcagaggttac

SEQ ID NO: 3807374 - DNA, 25 bp, Homo sapien
aactgtagtgcactcttattctcgt

SEQ ID NO: 3807375 - DNA, 25 bp, Homo sapien
caactgtagtgcactcttattctcg

SEQ ID NO: 3807376 - DNA, 25 bp, Homo sapien
gtagtgcactcttattctcgttgtt

SEQ ID NO: 3807377 - DNA, 25 bp, Homo sapien
ctgtagtgcactcttattctcgttg

SEQ ID NO: 3807378 - DNA, 25 bp, Homo sapien
tagtcgagctcatggttctgagaga

SEQ ID NO: 3807379 - DNA, 25 bp, Homo sapien
agggcctgcatgcacgtctctgcct

SEQ ID NO: 3807380 - DNA, 25 bp, Homo sapien
ccagccagctgctagtcgagctcat

SEQ ID NO: 3807381 - DNA, 25 bp, Homo sapien
tggtggtgtggttccgcagggcctg

SEQ ID NO: 3807382 - DNA, 25 bp, Homo sapien
tcctgctccttcctcgggtgctcgg

SEQ ID NO: 3807383 - DNA, 25 bp, Homo sapien
tgagcttggagctgtcctgccagac

SEQ ID NO: 3807384 - DNA, 25 bp, Homo sapien
tcctcgggtgctcggcctcagcttg

SEQ ID NO: 3807385 - DNA, 25 bp, Homo sapien
ccttcctcgggtgctcggcctcagc

SEQ ID NO: 3807386 - DNA, 25 bp, Homo sapien
aacgattcctcgctctcggatggta

SEQ ID NO: 3807387 - DNA, 25 bp, Homo sapien
tcctcgctctcggatggtagccaat

SEQ ID NO: 3807388 - DNA, 25 bp, Homo sapien
tcggatggtagccaatcttccaagc

SEQ ID NO: 3807389 - DNA, 25 bp, Homo sapien
tgctaacgattcctcgctctcggat

SEQ ID NO: 3807390 - DNA, 25 bp, Homo sapien
tagtttttgagttcggccaagctcc

SEQ ID NO: 3807391 - DNA, 25 bp, Homo sapien
ccatctagtttttgagttcggccaa

SEQ ID NO: 3807392 - DNA, 25 bp, Homo sapien
tctagtttttgagttcggccaagct

SEQ ID NO: 3807393 - DNA, 25 bp, Homo sapien
agtttttgagttcggccaagctcct

SEQ ID NO: 3807394 - DNA, 25 bp, Homo sapien
ttcttctcctccttccatgtgcaaa

SEQ ID NO: 3807395 - DNA, 25 bp, Homo sapien
tgcttcttctcctccttccatgtgc

SEQ ID NO: 3807396 - DNA, 25 bp, Homo sapien
tcttctcctccttccatgtgcaaac

SEQ ID NO: 3807397 - DNA, 25 bp, Homo sapien
ccgatgcctgtcatgcttcttctcc

SEQ ID NO: 3807398 - DNA, 25 bp, Homo sapien
ctgcccaaagcacgggggacagggc

SEQ ID NO: 3807399 - DNA, 25 bp, Homo sapien
tgacattttccataccctctgctgc

SEQ ID NO: 3807400 - DNA, 25 bp, Homo sapien
gacattttccataccctctgctgcc

SEQ ID NO: 3807401 - DNA, 25 bp, Homo sapien
ctgacattttccataccctctgctg

SEQ ID NO: 3807402 - DNA, 25 bp, Homo sapien
ctctgacattttccataccctctgc

SEQ ID NO: 3807403 - DNA, 25 bp, Homo sapien
ggactgcttcacagcggctcgagga

SEQ ID NO: 3807404 - DNA, 25 bp, Homo sapien
gagcctttatggactgccataactg

SEQ ID NO: 3807405 - DNA, 25 bp, Homo sapien
ctgtgcccgagcctttatggactgc

SEQ ID NO: 3807406 - DNA, 25 bp, Homo sapien
aggactgcttcacagcggctcgagg

SEQ ID NO: 3807407 - DNA, 25 bp, Homo sapien
gggagcctgggccgttccacacagt

SEQ ID NO: 3807408 - DNA, 25 bp, Homo sapien
tggggagcctgggccgttccacaca

SEQ ID NO: 3807409 - DNA, 25 bp, Homo sapien
ggagcctgggccgttccacacagtg

SEQ ID NO: 3807410 - DNA, 25 bp, Homo sapien
gagcctgggccgttccacacagtgc

SEQ ID NO: 3807411 - DNA, 25 bp, Homo sapien
gcaatgactcggtgttttcattgag

SEQ ID NO: 3807412 - DNA, 25 bp, Homo sapien
gactcttagcaatgactcggtgttt

SEQ ID NO: 3807413 - DNA, 25 bp, Homo sapien
gagttgattgattgttgtggagctc

SEQ ID NO: 3807414 - DNA, 25 bp, Homo sapien
cccactggactcttagcaatgactc

SEQ ID NO: 3807415 - DNA, 25 bp, Homo sapien
gaggaggaattggaggaggattgcg

SEQ ID NO: 3807416 - DNA, 25 bp, Homo sapien
aggaattggaggaggattgcgggga

SEQ ID NO: 3807417 - DNA, 25 bp, Homo sapien
ggaggaattggaggaggattgcggg

SEQ ID NO: 3807418 - DNA, 25 bp, Homo sapien
gaattggaggaggattgcggggaga

SEQ ID NO: 3807419 - DNA, 25 bp, Homo sapien
ctggcagaggggcactcagcccctg

SEQ ID NO: 3807420 - DNA, 25 bp, Homo sapien
gccacagaccccctaatctactgga

SEQ ID NO: 3807421 - DNA, 25 bp, Homo sapien
tcaaaaacagttatggctatggaga

SEQ ID NO: 3807422 - DNA, 25 bp, Homo sapien
ggagagagaacgagactcttcaaaa

SEQ ID NO: 3807423 - DNA, 25 bp, Homo sapien
cagctgcaggattcccctaggcctg

SEQ ID NO: 3807424 - DNA, 25 bp, Homo sapien
cagacctgaccaacttgggttaaca

SEQ ID NO: 3807425 - DNA, 25 bp, Homo sapien
cctgaccaacttgggttaacaggtg

SEQ ID NO: 3807426 - DNA, 25 bp, Homo sapien
tgtctcttctgagccggcaaggtga

SEQ ID NO: 3807427 - DNA, 25 bp, Homo sapien
cctggacagacctgaccaacttggg

SEQ ID NO: 3807428 - DNA, 25 bp, Homo sapien
agttagatacggaggaaatgccaaa

SEQ ID NO: 3807429 - DNA, 25 bp, Homo sapien
cccaggcaagttagatacggaggaa

SEQ ID NO: 3807430 - DNA, 25 bp, Homo sapien
gcaagttagatacggaggaaatgcc

SEQ ID NO: 3807431 - DNA, 25 bp, Homo sapien
ccaagggtgctctgtcagtccccct

SEQ ID NO: 3807432 - DNA, 25 bp, Homo sapien
tccatttgtccaatgggagagcgct

SEQ ID NO: 3807433 - DNA, 25 bp, Homo sapien
ggaatggttaaggttggacaccagc

SEQ ID NO: 3807434 - DNA, 25 bp, Homo sapien
ttggaatggttaaggttggacacca

SEQ ID NO: 3807435 - DNA, 25 bp, Homo sapien
ccattggaatggttaaggttggaca

SEQ ID NO: 3807436 - DNA, 25 bp, Homo sapien
accagcaccttcagaatgtcctgaa

SEQ ID NO: 3807437 - DNA, 25 bp, Homo sapien
ccgagcaatctggtggcaagttagt

SEQ ID NO: 3807438 - DNA, 25 bp, Homo sapien
tcttctcttaattctagtgcctggg

SEQ ID NO: 3807439 - DNA, 25 bp, Homo sapien
gacttctaaagggagagcctgatga

SEQ ID NO: 3807440 - DNA, 25 bp, Homo sapien
gatttttctgtggtcaccgagcaat

SEQ ID NO: 3807441 - DNA, 25 bp, Homo sapien
aaagtacctccagtcacatgccagg

SEQ ID NO: 3807442 - DNA, 25 bp, Homo sapien
gcagcgttggggtcacatcagtgaa

SEQ ID NO: 3807443 - DNA, 25 bp, Homo sapien
gtgaaatcccagcaatgactgcaaa

SEQ ID NO: 3807444 - DNA, 25 bp, Homo sapien
tttcttccaacatcgtggggtggag

SEQ ID NO: 3807445 - DNA, 25 bp, Homo sapien
ctggaacatgcatagagctctccat

SEQ ID NO: 3807446 - DNA, 25 bp, Homo sapien
caggtcgtcggcaagaaacagtgca

SEQ ID NO: 3807447 - DNA, 25 bp, Homo sapien
tagattgacattttcacactgtgcc

SEQ ID NO: 3807448 - DNA, 25 bp, Homo sapien
gattggtattggtgacaaagggaat

SEQ ID NO: 3807449 - DNA, 25 bp, Homo sapien
cgtctcccccacgaagacactccat

SEQ ID NO: 3807450 - DNA, 25 bp, Homo sapien
cgaggtagggcgaggcagaggtggt

SEQ ID NO: 3807451 - DNA, 25 bp, Homo sapien
ctgagcgcgcctgcggatcagtcca

SEQ ID NO: 3807452 - DNA, 25 bp, Homo sapien
gtggtgcacaccgttcagctgggca

SEQ ID NO: 3807453 - DNA, 25 bp, Homo sapien
tccacaccgtttgaaatcgacacat

SEQ ID NO: 3807454 - DNA, 25 bp, Homo sapien
gacagccaaaaagatctgggcatgc

SEQ ID NO: 3807455 - DNA, 25 bp, Homo sapien
ggccaggtcccatttgagcttcccc

SEQ ID NO: 3807456 - DNA, 25 bp, Homo sapien
caaggcctgtcggtcggtgcagaat

SEQ ID NO: 3807457 - DNA, 25 bp, Homo sapien
gcacagacagccaaaaagatctggg

SEQ ID NO: 3807458 - DNA, 25 bp, Homo sapien
tggagaccgcaaccaagagctgcaa

SEQ ID NO: 3807459 - DNA, 25 bp, Homo sapien
cccagtcttacgcagcttggaggcc

SEQ ID NO: 3807460 - DNA, 25 bp, Homo sapien
gaaagacttcctccttacagcactg

SEQ ID NO: 3807461 - DNA, 25 bp, Homo sapien
cattttctcaatggtcatgggccca

SEQ ID NO: 3807462 - DNA, 25 bp, Homo sapien
cgcatgtgcggcttgctctcccttt

SEQ ID NO: 3807463 - DNA, 25 bp, Homo sapien
catgtgcggcttgctctccctttgc

SEQ ID NO: 3807464 - DNA, 25 bp, Homo sapien
gcatgtgcggcttgctctccctttg

SEQ ID NO: 3807465 - DNA, 25 bp, Homo sapien
tggaagtaggcgcagtgcacgcagc

SEQ ID NO: 3807466 - DNA, 25 bp, Homo sapien
ctggaagtaggcgcagtgcacgcag

SEQ ID NO: 3807467 - DNA, 25 bp, Homo sapien
tactccaaggggagcaagctctgca

SEQ ID NO: 3807468 - DNA, 25 bp, Homo sapien
ctactccaaggggagcaagctctgc

SEQ ID NO: 3807469 - DNA, 25 bp, Homo sapien
ccaaggggagcaagctctgcaggac

SEQ ID NO: 3807470 - DNA, 25 bp, Homo sapien
ctccaaggggagcaagctctgcagg

SEQ ID NO: 3807471 - DNA, 25 bp, Homo sapien
gagccttcgcagcatagcagctcca

SEQ ID NO: 3807472 - DNA, 25 bp, Homo sapien
gtctgcgggtcctcgagccttcgca

SEQ ID NO: 3807473 - DNA, 25 bp, Homo sapien
ggtcctcgagccttcgcagcatagc

SEQ ID NO: 3807474 - DNA, 25 bp, Homo sapien
tggcgtctgcgggtcctcgagcctt

SEQ ID NO: 3807475 - DNA, 25 bp, Homo sapien
ggcgggagtgcaagctagcgcccat

SEQ ID NO: 3807476 - DNA, 25 bp, Homo sapien
gggcgggagtgcaagctagcgccca

SEQ ID NO: 3807477 - DNA, 25 bp, Homo sapien
gcagggcgggagtgcaagctagcgc

SEQ ID NO: 3807478 - DNA, 25 bp, Homo sapien
cagggcgggagtgcaagctagcgcc

SEQ ID NO: 3807479 - DNA, 25 bp, Homo sapien
taatgtgggctgtacctccaatacc

SEQ ID NO: 3807480 - DNA, 25 bp, Homo sapien
caacttggtgtcaactgagggctgc

SEQ ID NO: 3807481 - DNA, 25 bp, Homo sapien
gacagcagcccatgagtaatgtggg

SEQ ID NO: 3807482 - DNA, 25 bp, Homo sapien
tccaatacctatagcaatccctggg

SEQ ID NO: 3807483 - DNA, 25 bp, Homo sapien
gaggaggcagcacgtctctttgtgt

SEQ ID NO: 3807484 - DNA, 25 bp, Homo sapien
gaggcagcacgtctctttgtgttcc

SEQ ID NO: 3807485 - DNA, 25 bp, Homo sapien
agcacgtctctttgtgttcctgcaa

SEQ ID NO: 3807486 - DNA, 25 bp, Homo sapien
ggcagcacgtctctttgtgttcctg

SEQ ID NO: 3807487 - DNA, 25 bp, Homo sapien
cttttcagtggtatccaaggtaact

SEQ ID NO: 3807488 - DNA, 25 bp, Homo sapien
tctaaggatgcatgcattttctgca

SEQ ID NO: 3807489 - DNA, 25 bp, Homo sapien
tccgttggatacttcattctttggg

SEQ ID NO: 3807490 - DNA, 25 bp, Homo sapien
tctttgggccgatgtgccttttcag

SEQ ID NO: 3807491 - DNA, 25 bp, Homo sapien
gctgaagtacaatgacacgatctca

SEQ ID NO: 3807492 - DNA, 25 bp, Homo sapien
caggctgaagtacaatgacacgatc

SEQ ID NO: 3807493 - DNA, 25 bp, Homo sapien
cccaggctgaagtacaatgacacga

SEQ ID NO: 3807494 - DNA, 25 bp, Homo sapien
ggctgaagtacaatgacacgatctc

SEQ ID NO: 3807495 - DNA, 25 bp, Homo sapien
catacatacagggagtccacagact

SEQ ID NO: 3807496 - DNA, 25 bp, Homo sapien
agccagggcgacagatccagaacct

SEQ ID NO: 3807497 - DNA, 25 bp, Homo sapien
caacagatgaacctgctctggatta

SEQ ID NO: 3807498 - DNA, 25 bp, Homo sapien
taatttaccccaacagatgaacctg

SEQ ID NO: 3807499 - DNA, 25 bp, Homo sapien
taacccgcttgagccagtgccaaat

SEQ ID NO: 3807500 - DNA, 25 bp, Homo sapien
ttccagcgaaaaggccaaaagtgta

SEQ ID NO: 3807501 - DNA, 25 bp, Homo sapien
tcagaggtaacaacctgtgctaacc

SEQ ID NO: 3807502 - DNA, 25 bp, Homo sapien
taacttcggcttcagctgagactgg

SEQ ID NO: 3807503 - DNA, 25 bp, Homo sapien
ggagagtggcgcttttctctagaac

SEQ ID NO: 3807504 - DNA, 25 bp, Homo sapien
gaatgcctggttcctagtgggtgct

SEQ ID NO: 3807505 - DNA, 25 bp, Homo sapien
tagaactctcttccggttacacctg

SEQ ID NO: 3807506 - DNA, 25 bp, Homo sapien
gaatgtcccgcagagtggatttcgg

SEQ ID NO: 3807507 - DNA, 25 bp, Homo sapien
agggcggtctgagcgtgcgggcgac

SEQ ID NO: 3807508 - DNA, 25 bp, Homo sapien
ggctggcgtccgctgcgccgcccct

SEQ ID NO: 3807509 - DNA, 25 bp, Homo sapien
ggcaggctcagacgccgtgagtcag

SEQ ID NO: 3807510 - DNA, 25 bp, Homo sapien
cagagcagggcggtctgagcgtgcg

SEQ ID NO: 3807511 - DNA, 25 bp, Homo sapien
tctccggcgtgtctttcgggtcgcg

SEQ ID NO: 3807512 - DNA, 25 bp, Homo sapien
tgggagcgccaaggccgcaggtaat

SEQ ID NO: 3807513 - DNA, 25 bp, Homo sapien
gcaccttgcgcaagggtctcacggg

SEQ ID NO: 3807514 - DNA, 25 bp, Homo sapien
tgccccggggattcccatgcagaaa

SEQ ID NO: 3807515 - DNA, 25 bp, Homo sapien
ccagctctctgcgacggattgaggt

SEQ ID NO: 3807516 - DNA, 25 bp, Homo sapien
gtgtaatccacttccagctgacgcc

SEQ ID NO: 3807517 - DNA, 25 bp, Homo sapien
tgtgcaggacgtctggcatacggcc

SEQ ID NO: 3807518 - DNA, 25 bp, Homo sapien
catacggcccatgaggactttgtcg

SEQ ID NO: 3807519 - DNA, 25 bp, Homo sapien
gttttgaagcagagtgtcggtcctt

SEQ ID NO: 3807520 - DNA, 25 bp, Homo sapien
ccttccatacgcctgaaacgcataa

SEQ ID NO: 3807521 - DNA, 25 bp, Homo sapien
gagtgtcggtccttccttccatacg

SEQ ID NO: 3807522 - DNA, 25 bp, Homo sapien
atacgcctgaaacgcataatccggg

SEQ ID NO: 3807523 - DNA, 25 bp, Homo sapien
tgaactttctctagatgggcacaga

SEQ ID NO: 3807524 - DNA, 25 bp, Homo sapien
gatgggcacagatcatgaataactc

SEQ ID NO: 3807525 - DNA, 25 bp, Homo sapien
tctctagatgggcacagatcatgaa

SEQ ID NO: 3807526 - DNA, 25 bp, Homo sapien
ctttctctagatgggcacagatcat

SEQ ID NO: 3807527 - DNA, 25 bp, Homo sapien
tcagctttcctactgcagcttcatt

SEQ ID NO: 3807528 - DNA, 25 bp, Homo sapien
gtttgaatttggcttagatgggctg

SEQ ID NO: 3807529 - DNA, 25 bp, Homo sapien
tgaatttggcttagatgggctggca

SEQ ID NO: 3807530 - DNA, 25 bp, Homo sapien
gcttcatttaatgcagagtggtgtt

SEQ ID NO: 3807531 - DNA, 25 bp, Homo sapien
agtcgactaagtactttaccttcag

SEQ ID NO: 3807532 - DNA, 25 bp, Homo sapien
tttggtctggctctatcaagctcta

SEQ ID NO: 3807533 - DNA, 25 bp, Homo sapien
ggatagttggagaactcgggttcaa

SEQ ID NO: 3807534 - DNA, 25 bp, Homo sapien
caagctctatttaatagtcgactaa

SEQ ID NO: 3807535 - DNA, 25 bp, Homo sapien
tttgatcggggctttgatcagttcc

SEQ ID NO: 3807536 - DNA, 25 bp, Homo sapien
taaacactaccatgaacgctgggca

SEQ ID NO: 3807537 - DNA, 25 bp, Homo sapien
ctttggtaaacactaccatgaacgc

SEQ ID NO: 3807538 - DNA, 25 bp, Homo sapien
taccatgaacgctgggcacagtagt

SEQ ID NO: 3807539 - DNA, 25 bp, Homo sapien
gagggcgacacagagtgggtcatgg

SEQ ID NO: 3807540 - DNA, 25 bp, Homo sapien
gaggaggctagtgtcacagagggcg

SEQ ID NO: 3807541 - DNA, 25 bp, Homo sapien
gagacagaaccagactgggcagaat

SEQ ID NO: 3807542 - DNA, 25 bp, Homo sapien
ggagacagaaccagactgggcagaa

SEQ ID NO: 3807543 - DNA, 25 bp, Homo sapien
taggaagaatgcaagactcccaagc

SEQ ID NO: 3807544 - DNA, 25 bp, Homo sapien
aagaatgcaagactcccaagcccct

SEQ ID NO: 3807545 - DNA, 25 bp, Homo sapien
aggcattgtagggaaaagcattctc

SEQ ID NO: 3807546 - DNA, 25 bp, Homo sapien
actgtgtaggtgactgtatgctcca

SEQ ID NO: 3807547 - DNA, 25 bp, Homo sapien
agtggtccgggacttggctggctct

SEQ ID NO: 3807548 - DNA, 25 bp, Homo sapien
tgtctgtaagtttggtccagggcaa

SEQ ID NO: 3807549 - DNA, 25 bp, Homo sapien
gcttccagatgcctagagggtgact

SEQ ID NO: 3807550 - DNA, 25 bp, Homo sapien
catatagatcagttagaagcagctt

SEQ ID NO: 3807551 - DNA, 25 bp, Homo sapien
ctttgcagctttttgcaaggctcag

SEQ ID NO: 3807552 - DNA, 25 bp, Homo sapien
acaagagtcgttctgggagaggacc

SEQ ID NO: 3807553 - DNA, 25 bp, Homo sapien
cagcttactgagtactggcaggaac

SEQ ID NO: 3807554 - DNA, 25 bp, Homo sapien
ggtgggtccatgcaaagccggataa

SEQ ID NO: 3807555 - DNA, 25 bp, Homo sapien
aaatagctgcaagaccagcttactg

SEQ ID NO: 3807556 - DNA, 25 bp, Homo sapien
tttcttgctgctgcctcgtttcagt

SEQ ID NO: 3807557 - DNA, 25 bp, Homo sapien
tcttgctgctgcctcgtttcagtca

SEQ ID NO: 3807558 - DNA, 25 bp, Homo sapien
ttgctgctgcctcgtttcagtcatg

SEQ ID NO: 3807559 - DNA, 25 bp, Homo sapien
gctgctgcctcgtttcagtcatgat

SEQ ID NO: 3807560 - DNA, 25 bp, Homo sapien
ttctgttgagacagttctctttggc

SEQ ID NO: 3807561 - DNA, 25 bp, Homo sapien
tttggctccacaactcttccataca

SEQ ID NO: 3807562 - DNA, 25 bp, Homo sapien
gttgagacagttctctttggctcca

SEQ ID NO: 3807563 - DNA, 25 bp, Homo sapien
tgttgagacagttctctttggctcc

SEQ ID NO: 3807564 - DNA, 25 bp, Homo sapien
acagtggcatatgtgataaacccaa

SEQ ID NO: 3807565 - DNA, 25 bp, Homo sapien
tccacagtggcatatgtgataaacc

SEQ ID NO: 3807566 - DNA, 25 bp, Homo sapien
cacagtggcatatgtgataaaccca

SEQ ID NO: 3807567 - DNA, 25 bp, Homo sapien
cctccacagtggcatatgtgataaa

SEQ ID NO: 3807568 - DNA, 25 bp, Homo sapien
ctcctcaggcttttgtcagttgttt

SEQ ID NO: 3807569 - DNA, 25 bp, Homo sapien
tggaatgcttggtgtttgcatctca

SEQ ID NO: 3807570 - DNA, 25 bp, Homo sapien
tgcttggtgtttgcatctcacagtt

SEQ ID NO: 3807571 - DNA, 25 bp, Homo sapien
gaatgcttggtgtttgcatctcaca

SEQ ID NO: 3807572 - DNA, 25 bp, Homo sapien
tgtggtcagcccatgacgagagcct

SEQ ID NO: 3807573 - DNA, 25 bp, Homo sapien
cacgttccgtgaaatctgtgagtgc

SEQ ID NO: 3807574 - DNA, 25 bp, Homo sapien
aactcgggcaaagcacgcatgctgc

SEQ ID NO: 3807575 - DNA, 25 bp, Homo sapien
tgagtgctgcccgagtcgagctacc

SEQ ID NO: 3807576 - DNA, 25 bp, Homo sapien
cctcgccacttatttcgtggtcatt

SEQ ID NO: 3807577 - DNA, 25 bp, Homo sapien
gctgtggttttaccctcgccactta

SEQ ID NO: 3807578 - DNA, 25 bp, Homo sapien
taccctcgccacttatttcgtggtc

SEQ ID NO: 3807579 - DNA, 25 bp, Homo sapien
cgccacttatttcgtggtcattcat

SEQ ID NO: 3807580 - DNA, 25 bp, Homo sapien
cagaggttccatgacttatgattcc

SEQ ID NO: 3807581 - DNA, 25 bp, Homo sapien
taaaatgagtatattctttgccttg

SEQ ID NO: 3807582 - DNA, 25 bp, Homo sapien
catctctttgtggtagctttttgca

SEQ ID NO: 3807583 - DNA, 25 bp, Homo sapien
tctttgccttgttcactcacattct

SEQ ID NO: 3807584 - DNA, 25 bp, Homo sapien
gaattgcatgacttccaggatccag

SEQ ID NO: 3807585 - DNA, 25 bp, Homo sapien
ctgagatgggatcacgtgaagacga

SEQ ID NO: 3807586 - DNA, 25 bp, Homo sapien
acgagcagggaacgtcaacaaggga

SEQ ID NO: 3807587 - DNA, 25 bp, Homo sapien
aaacctctaagttgactgagatctg

SEQ ID NO: 3807588 - DNA, 25 bp, Homo sapien
taactgcaatttgccttccatgtct

SEQ ID NO: 3807589 - DNA, 25 bp, Homo sapien
gtagagaaagctggttaaattcatc

SEQ ID NO: 3807590 - DNA, 25 bp, Homo sapien
ctcacagtcgctggcttcatgcggt

SEQ ID NO: 3807591 - DNA, 25 bp, Homo sapien
aattcatctaactgcaatttgcctt

SEQ ID NO: 3807592 - DNA, 25 bp, Homo sapien
gacaaagtctcacttcctgatcagc

SEQ ID NO: 3807593 - DNA, 25 bp, Homo sapien
gatatctttcatgcactcctttgaa

SEQ ID NO: 3807594 - DNA, 25 bp, Homo sapien
gctcaccagcacgatggaacacatt

SEQ ID NO: 3807595 - DNA, 25 bp, Homo sapien
tctgcatttgtgaggctgtgatatc

SEQ ID NO: 3807596 - DNA, 25 bp, Homo sapien
tccctagccaacctgttggtcctcg

SEQ ID NO: 3807597 - DNA, 25 bp, Homo sapien
catccctccctagccaacctgttgg

SEQ ID NO: 3807598 - DNA, 25 bp, Homo sapien
attcatccctccctagccaacctgt

SEQ ID NO: 3807599 - DNA, 25 bp, Homo sapien
caacctgttggtcctcggctccagg

SEQ ID NO: 3807600 - DNA, 25 bp, Homo sapien
gcttgccaatctcgcccctctcccc

SEQ ID NO: 3807601 - DNA, 25 bp, Homo sapien
ctccccgctgcttctgactctgcat

SEQ ID NO: 3807602 - DNA, 25 bp, Homo sapien
ctctccccgctgcttctgactctgc

SEQ ID NO: 3807603 - DNA, 25 bp, Homo sapien
ccctctccccgctgcttctgactct

SEQ ID NO: 3807604 - DNA, 25 bp, Homo sapien
gaaggcctagagaactgagcgtgcc

SEQ ID NO: 3807605 - DNA, 25 bp, Homo sapien
gagtttttgggagcgccagcactgc

SEQ ID NO: 3807606 - DNA, 25 bp, Homo sapien
tggaggagactcgtgtaccaagaca

SEQ ID NO: 3807607 - DNA, 25 bp, Homo sapien
tctaatatgacagttggaagcctgg

SEQ ID NO: 3807608 - DNA, 25 bp, Homo sapien
catctcccaacctgaaaggcttatc

SEQ ID NO: 3807609 - DNA, 25 bp, Homo sapien
tgagagcaaacgcaacaggagagac

SEQ ID NO: 3807610 - DNA, 25 bp, Homo sapien
aggcttatcgcagagcctagatgac

SEQ ID NO: 3807611 - DNA, 25 bp, Homo sapien
agatgactggtttgatttttgctcg

SEQ ID NO: 3807612 - DNA, 25 bp, Homo sapien
tctggagcgggcttctttctggcct

SEQ ID NO: 3807613 - DNA, 25 bp, Homo sapien
cttcaaagctcgagtcatcctgttt

SEQ ID NO: 3807614 - DNA, 25 bp, Homo sapien
cctgagcccgcgtggcttggcttca

SEQ ID NO: 3807615 - DNA, 25 bp, Homo sapien
tcgagtcatcctgtttccgtctgcc

SEQ ID NO: 3807616 - DNA, 25 bp, Homo sapien
agcctcagccgatgacagcagcctg

SEQ ID NO: 3807617 - DNA, 25 bp, Homo sapien
gtcagaagtgcagcctcagccgatg

SEQ ID NO: 3807618 - DNA, 25 bp, Homo sapien
tgcaggggtcagaagtgcagcctca

SEQ ID NO: 3807619 - DNA, 25 bp, Homo sapien
gcctcagccgatgacagcagcctgg

SEQ ID NO: 3807620 - DNA, 25 bp, Homo sapien
aaatgtagtttatcttgtcgaagtg

SEQ ID NO: 3807621 - DNA, 25 bp, Homo sapien
gtctgcaggtcctgttagaaatcac

SEQ ID NO: 3807622 - DNA, 25 bp, Homo sapien
tgtcgaagtgtctgcaggtcctgtt

SEQ ID NO: 3807623 - DNA, 25 bp, Homo sapien
tatcttgtcgaagtgtctgcaggtc

SEQ ID NO: 3807624 - DNA, 25 bp, Homo sapien
tctgttactggaggatcagtttaaa

SEQ ID NO: 3807625 - DNA, 25 bp, Homo sapien
tactggaggatcagtttaaacagag

SEQ ID NO: 3807626 - DNA, 25 bp, Homo sapien
ctctttctgttactggaggatcagt

SEQ ID NO: 3807627 - DNA, 25 bp, Homo sapien
ctttctgttactggaggatcagttt

SEQ ID NO: 3807628 - DNA, 25 bp, Homo sapien
caagcagtcggacccttcaagacag

SEQ ID NO: 3807629 - DNA, 25 bp, Homo sapien
tagcaatgtccgtcctcaagcagtc

SEQ ID NO: 3807630 - DNA, 25 bp, Homo sapien
tcaagacagaagcactgtagaggaa

SEQ ID NO: 3807631 - DNA, 25 bp, Homo sapien
tgagccctgggggatagcaatgtcc

SEQ ID NO: 3807632 - DNA, 25 bp, Homo sapien
ccttccattttggagacacagagaa

SEQ ID NO: 3807633 - DNA, 25 bp, Homo sapien
ctttctggctttcttgataaagcct

SEQ ID NO: 3807634 - DNA, 25 bp, Homo sapien
gagacacagagaaaatctttctggc

SEQ ID NO: 3807635 - DNA, 25 bp, Homo sapien
gctttcttgataaagcctctacttt

SEQ ID NO: 3807636 - DNA, 25 bp, Homo sapien
aaggaagtggctatatggaacgcag

SEQ ID NO: 3807637 - DNA, 25 bp, Homo sapien
atatggaacgcaggtgaagggctca

SEQ ID NO: 3807638 - DNA, 25 bp, Homo sapien
agtggctatatggaacgcaggtgaa

SEQ ID NO: 3807639 - DNA, 25 bp, Homo sapien
ctatatggaacgcaggtgaagggct

SEQ ID NO: 3807640 - DNA, 25 bp, Homo sapien
aaaatgaaaatctacttccaaatat

SEQ ID NO: 3807641 - DNA, 25 bp, Homo sapien
tggtaaccaacagataatgtggcca

SEQ ID NO: 3807642 - DNA, 25 bp, Homo sapien
ctggtaaccaacagataatgtggcc

SEQ ID NO: 3807643 - DNA, 25 bp, Homo sapien
ggtaaccaacagataatgtggccat

SEQ ID NO: 3807644 - DNA, 25 bp, Homo sapien
tttggagtcagttttccaatcaggg

SEQ ID NO: 3807645 - DNA, 25 bp, Homo sapien
gaattttgaagcacttatttttgga

SEQ ID NO: 3807646 - DNA, 25 bp, Homo sapien
gaagcacttatttttggagtcagtt

SEQ ID NO: 3807647 - DNA, 25 bp, Homo sapien
gttttccaatcaggggtatccaatc

SEQ ID NO: 3807648 - DNA, 25 bp, Homo sapien
gtgtctaggcttgtgggtatgcata

SEQ ID NO: 3807649 - DNA, 25 bp, Homo sapien
tgcatacatcgatggtccttctggg

SEQ ID NO: 3807650 - DNA, 25 bp, Homo sapien
aacttggaaaatgccgaatgcaaaa

SEQ ID NO: 3807651 - DNA, 25 bp, Homo sapien
caaaccatgaatctcagttgccttg

SEQ ID NO: 3807652 - DNA, 25 bp, Homo sapien
atttcgaatggccacaggaaccagg

SEQ ID NO: 3807653 - DNA, 25 bp, Homo sapien
gagtcttattttcgaatgagtctta

SEQ ID NO: 3807654 - DNA, 25 bp, Homo sapien
gatgagggagtcttattttcgaatg

SEQ ID NO: 3807655 - DNA, 25 bp, Homo sapien
tcgaatgagtcttatttcgaatggc

SEQ ID NO: 3807656 - DNA, 25 bp, Homo sapien
ctcagggctagagcattttggaggc

SEQ ID NO: 3807657 - DNA, 25 bp, Homo sapien
tttgtttccctcagggctagagcat

SEQ ID NO: 3807658 - DNA, 25 bp, Homo sapien
tttccctcagggctagagcattttg

SEQ ID NO: 3807659 - DNA, 25 bp, Homo sapien
ctacaatgaagaagggacgtttgtt

SEQ ID NO: 3807660 - DNA, 25 bp, Homo sapien
caggcatttggacattcactgcaaa

SEQ ID NO: 3807661 - DNA, 25 bp, Homo sapien
agatgacacaggcatttggacattc

SEQ ID NO: 3807662 - DNA, 25 bp, Homo sapien
atattgggaggaaacgggacaagat

SEQ ID NO: 3807663 - DNA, 25 bp, Homo sapien
gcaaagcatcctgggtccagttcca

SEQ ID NO: 3807664 - DNA, 25 bp, Homo sapien
ttttccagtcggacaggtctctccc

SEQ ID NO: 3807665 - DNA, 25 bp, Homo sapien
aggtctctcccctcacagtgtttct

SEQ ID NO: 3807666 - DNA, 25 bp, Homo sapien
tcttttttccagtcggacaggtctc

SEQ ID NO: 3807667 - DNA, 25 bp, Homo sapien
cagtcttttttccagtcggacaggt

SEQ ID NO: 3807668 - DNA, 25 bp, Homo sapien
aggctcaatgctggggacgctttct

SEQ ID NO: 3807669 - DNA, 25 bp, Homo sapien
tgagtcgccatgacacagacctgct

SEQ ID NO: 3807670 - DNA, 25 bp, Homo sapien
gggacgctttctgctgagtcgccat

SEQ ID NO: 3807671 - DNA, 25 bp, Homo sapien
tttctgctgagtcgccatgacacag

SEQ ID NO: 3807672 - DNA, 25 bp, Homo sapien
ttggaccactctgcggaggtgagtt

SEQ ID NO: 3807673 - DNA, 25 bp, Homo sapien
tccttccattggttggaccactctg

SEQ ID NO: 3807674 - DNA, 25 bp, Homo sapien
cattggttggaccactctgcggagg

SEQ ID NO: 3807675 - DNA, 25 bp, Homo sapien
accactctgcggaggtgagtttgtc

SEQ ID NO: 3807676 - DNA, 25 bp, Homo sapien
aacaattttcttggcacagataatc

SEQ ID NO: 3807677 - DNA, 25 bp, Homo sapien
acagataatcgcatctgtgaggtca

SEQ ID NO: 3807678 - DNA, 25 bp, Homo sapien
ttttcttggcacagataatcgcatc

SEQ ID NO: 3807679 - DNA, 25 bp, Homo sapien
tcttggcacagataatcgcatctgt

SEQ ID NO: 3807680 - DNA, 25 bp, Homo sapien
tgtggtgttgtagccgctctcataa

SEQ ID NO: 3807681 - DNA, 25 bp, Homo sapien
tcatccaggaccgtctgggctgtgg

SEQ ID NO: 3807682 - DNA, 25 bp, Homo sapien
tccttcagctttccgcgtctgcacc

SEQ ID NO: 3807683 - DNA, 25 bp, Homo sapien
caccacgcgaagctgttgatctgga

SEQ ID NO: 3807684 - DNA, 25 bp, Homo sapien
aaggaggtgccatcttttgctctaa

SEQ ID NO: 3807685 - DNA, 25 bp, Homo sapien
ttggtctaagggcaagtttcctcat

SEQ ID NO: 3807686 - DNA, 25 bp, Homo sapien
gaagccccagtaattgtccaggcca

SEQ ID NO: 3807687 - DNA, 25 bp, Homo sapien
cgagtgtagattttggactcggcgc

SEQ ID NO: 3807688 - DNA, 25 bp, Homo sapien
ggccagccctcgagaatatttttgc

SEQ ID NO: 3807689 - DNA, 25 bp, Homo sapien
ttttgccagtttgcaacgagtgtag

SEQ ID NO: 3807690 - DNA, 25 bp, Homo sapien
atgagggtcagaatgcccgcagcct

SEQ ID NO: 3807691 - DNA, 25 bp, Homo sapien
tgagggtcagaatgcccgcagcctt

SEQ ID NO: 3807692 - DNA, 25 bp, Homo sapien
gagggtcagaatgcccgcagccttc

SEQ ID NO: 3807693 - DNA, 25 bp, Homo sapien
cctcaaagcctgccggagacagaac

SEQ ID NO: 3807694 - DNA, 25 bp, Homo sapien
acttctcagttgagtctgcggaaga

SEQ ID NO: 3807695 - DNA, 25 bp, Homo sapien
gagtctgcggaagaaacactgctcc

SEQ ID NO: 3807696 - DNA, 25 bp, Homo sapien
tccacttagtcggtgacaggcagct

SEQ ID NO: 3807697 - DNA, 25 bp, Homo sapien
gaaaaggcagattcctggtgcctgc

SEQ ID NO: 3807698 - DNA, 25 bp, Homo sapien
tcaaacatagacttggtcagctcag

SEQ ID NO: 3807699 - DNA, 25 bp, Homo sapien
gaaacacgaagcaaatcaaacatag

SEQ ID NO: 3807700 - DNA, 25 bp, Homo sapien
tcagctcagtgacgatgatggcagc

SEQ ID NO: 3807701 - DNA, 25 bp, Homo sapien
agctgcaaagcggagaccacgcaga

SEQ ID NO: 3807702 - DNA, 25 bp, Homo sapien
gctttcccgatgcaataatatgacc

SEQ ID NO: 3807703 - DNA, 25 bp, Homo sapien
tattttgtgtcatgacctccccaag

SEQ ID NO: 3807704 - DNA, 25 bp, Homo sapien
cctgcactgtgagcacgggatctgc

SEQ ID NO: 3807705 - DNA, 25 bp, Homo sapien
caattaatacaacccatggaagcca

SEQ ID NO: 3807706 - DNA, 25 bp, Homo sapien
cgagaaaataagtgcctgtgaagcc

SEQ ID NO: 3807707 - DNA, 25 bp, Homo sapien
cactatttgtaatgtgtttcgagaa

SEQ ID NO: 3807708 - DNA, 25 bp, Homo sapien
gagtgtccggtgatgactcgtaaag

SEQ ID NO: 3807709 - DNA, 25 bp, Homo sapien
tcacatgggtgctggcactatttgt

SEQ ID NO: 3807710 - DNA, 25 bp, Homo sapien
aggcaggtgtcctaggctcttccag

SEQ ID NO: 3807711 - DNA, 25 bp, Homo sapien
ttacacagtatgcacagcggcttcc

SEQ ID NO: 3807712 - DNA, 25 bp, Homo sapien
ccttaagtcgagtacatttctgcca

SEQ ID NO: 3807713 - DNA, 25 bp, Homo sapien
ggtagaggttattcaactgtcccac

SEQ ID NO: 3807714 - DNA, 25 bp, Homo sapien
gcttgctctggccacatcaaagacc

SEQ ID NO: 3807715 - DNA, 25 bp, Homo sapien
ttgctctggccacatcaaagaccat

SEQ ID NO: 3807716 - DNA, 25 bp, Homo sapien
gaggaactgcagttccctgtttcca

SEQ ID NO: 3807717 - DNA, 25 bp, Homo sapien
cttttcttccttcgaggcagcagca

SEQ ID NO: 3807718 - DNA, 25 bp, Homo sapien
cacaccggtggagtgttcttcctgg

SEQ ID NO: 3807719 - DNA, 25 bp, Homo sapien
tcaagcggaacaacgtgacacggat

SEQ ID NO: 3807720 - DNA, 25 bp, Homo sapien
caatgggtgttcagacctgccagag

SEQ ID NO: 3807721 - DNA, 25 bp, Homo sapien
taatagaacagcagactggcctcca

SEQ ID NO: 3807722 - DNA, 25 bp, Homo sapien
tataggaagactccagggccgatgt

SEQ ID NO: 3807723 - DNA, 25 bp, Homo sapien
ggtggtgctaacagtcccttgagtg

SEQ ID NO: 3807724 - DNA, 25 bp, Homo sapien
tgcagggcaggaatgccactgacct

SEQ ID NO: 3807725 - DNA, 25 bp, Homo sapien
actgctaagcagtcacgtgcagggc

SEQ ID NO: 3807726 - DNA, 25 bp, Homo sapien
tgtctgcagtgagatgtgtgctcca

SEQ ID NO: 3807727 - DNA, 25 bp, Homo sapien
gacagtgatgagtgtcagagaatgg

SEQ ID NO: 3807728 - DNA, 25 bp, Homo sapien
acagtgatgagtgtcagagaatgga

SEQ ID NO: 3807729 - DNA, 25 bp, Homo sapien
aaacactgcccttcagacccacctt

SEQ ID NO: 3807730 - DNA, 25 bp, Homo sapien
ggttccacagcccacaccaagggca

SEQ ID NO: 3807731 - DNA, 25 bp, Homo sapien
ctctgaacagtggacacaacctccg

SEQ ID NO: 3807732 - DNA, 25 bp, Homo sapien
agtggacacaacctccggttccaca

SEQ ID NO: 3807733 - DNA, 25 bp, Homo sapien
tttgggctgccctaggccttctgcc

SEQ ID NO: 3807734 - DNA, 25 bp, Homo sapien
tgggctgccctaggccttctgcctg

SEQ ID NO: 3807735 - DNA, 25 bp, Homo sapien
ggctgccctaggccttctgcctggg

SEQ ID NO: 3807736 - DNA, 25 bp, Homo sapien
ctttgggctgccctaggccttctgc

SEQ ID NO: 3807737 - DNA, 25 bp, Homo sapien
ctttggacagagtctgtggaaggta

SEQ ID NO: 3807738 - DNA, 25 bp, Homo sapien
aggtaagaccctctacagggacagg

SEQ ID NO: 3807739 - DNA, 25 bp, Homo sapien
cagaactttctgaccagccaacggc

SEQ ID NO: 3807740 - DNA, 25 bp, Homo sapien
tctgaccagccaacggctttggaca

SEQ ID NO: 3807741 - DNA, 25 bp, Homo sapien
gcaggcaagcatgctggccagaagc

SEQ ID NO: 3807742 - DNA, 25 bp, Homo sapien
aaatcgctgctaggattcccatggg

SEQ ID NO: 3807743 - DNA, 25 bp, Homo sapien
gctgaatttggctgcaaatcgctgc

SEQ ID NO: 3807744 - DNA, 25 bp, Homo sapien
gctactgctgaatttggctgcaaat

SEQ ID NO: 3807745 - DNA, 25 bp, Homo sapien
ggctgcaaatcgctgctaggattcc

SEQ ID NO: 3807746 - DNA, 25 bp, Homo sapien
gattcccagtctggtgccaaagcaa

SEQ ID NO: 3807747 - DNA, 25 bp, Homo sapien
cacacacacttggatgggcatggct

SEQ ID NO: 3807748 - DNA, 25 bp, Homo sapien
cagtctggactatggccagcacaca

SEQ ID NO: 3807749 - DNA, 25 bp, Homo sapien
tatgaaggtacagggaacaaggcag

SEQ ID NO: 3807750 - DNA, 25 bp, Homo sapien
tttaagcacaagacccattctaggc

SEQ ID NO: 3807751 - DNA, 25 bp, Homo sapien
tctaggcaacagaggcccagttagg

SEQ ID NO: 3807752 - DNA, 25 bp, Homo sapien
tgccgtggcttctttccggatagac

SEQ ID NO: 3807753 - DNA, 25 bp, Homo sapien
tccttgatgaggacgacctctacca

SEQ ID NO: 3807754 - DNA, 25 bp, Homo sapien
aatccatcttcagactgcatcgccg

SEQ ID NO: 3807755 - DNA, 25 bp, Homo sapien
ttttaaatgcaatagtacacgttca

SEQ ID NO: 3807756 - DNA, 25 bp, Homo sapien
gtctcataacagaatgtacttttac

SEQ ID NO: 3807757 - DNA, 25 bp, Homo sapien
cttttacaagcagcctgtacaagtg

SEQ ID NO: 3807758 - DNA, 25 bp, Homo sapien
gatgcaggaaaatgccggtgactca

SEQ ID NO: 3807759 - DNA, 25 bp, Homo sapien
tccatcagagcgaagggtgcgtctg

SEQ ID NO: 3807760 - DNA, 25 bp, Homo sapien
gaccagacacggcatttggatgcag

SEQ ID NO: 3807761 - DNA, 25 bp, Homo sapien
tgctgcctccctaacactgactcag

SEQ ID NO: 3807762 - DNA, 25 bp, Homo sapien
tacctgcagccgtgtgctaagcctg

SEQ ID NO: 3807763 - DNA, 25 bp, Homo sapien
acatttgggtgtcgatgctgtggcc

SEQ ID NO: 3807764 - DNA, 25 bp, Homo sapien
cgggccccggtgtctgatttatcga

SEQ ID NO: 3807765 - DNA, 25 bp, Homo sapien
gatgtcaagttcacgggctttacct

SEQ ID NO: 3807766 - DNA, 25 bp, Homo sapien
ggaagattctgagccataatcggcc

SEQ ID NO: 3807767 - DNA, 25 bp, Homo sapien
gggcagcatccaacgtctgacaggc

SEQ ID NO: 3807768 - DNA, 25 bp, Homo sapien
taatcggcctcacatcacaaggact

SEQ ID NO: 3807769 - DNA, 25 bp, Homo sapien
aaggccatcccactagggcagcatc

SEQ ID NO: 3807770 - DNA, 25 bp, Homo sapien
tatcttcctctacgatgatgaggca

SEQ ID NO: 3807771 - DNA, 25 bp, Homo sapien
taacttcacgtttgaaccctgagtg

SEQ ID NO: 3807772 - DNA, 25 bp, Homo sapien
ccctgagtgtttcctaagccattta

SEQ ID NO: 3807773 - DNA, 25 bp, Homo sapien
ggactcatctgccacgtagtcaaag

SEQ ID NO: 3807774 - DNA, 25 bp, Homo sapien
aaatactcctttgaacacataatcc

SEQ ID NO: 3807775 - DNA, 25 bp, Homo sapien
aatccagctgagtcatgtaccaccc

SEQ ID NO: 3807776 - DNA, 25 bp, Homo sapien
cacataatccagctgagtcatgtac

SEQ ID NO: 3807777 - DNA, 25 bp, Homo sapien
tcctttgaacacataatccagctga

SEQ ID NO: 3807778 - DNA, 25 bp, Homo sapien
aacccctcaagggacatcacaatgg

SEQ ID NO: 3807779 - DNA, 25 bp, Homo sapien
atgggtgtcctcaatggagggcatt

SEQ ID NO: 3807780 - DNA, 25 bp, Homo sapien
ggtgtcctcaatggagggcatttgt

SEQ ID NO: 3807781 - DNA, 25 bp, Homo sapien
gggacatcacaatgggtgtcctcaa

SEQ ID NO: 3807782 - DNA, 25 bp, Homo sapien
gtatgcatacatcttatttctccag

SEQ ID NO: 3807783 - DNA, 25 bp, Homo sapien
tatgcatacatcttatttctccagc

SEQ ID NO: 3807784 - DNA, 25 bp, Homo sapien
catacatcttatttctccagctgga

SEQ ID NO: 3807785 - DNA, 25 bp, Homo sapien
tgcatacatcttatttctccagctg

SEQ ID NO: 3807786 - DNA, 25 bp, Homo sapien
caaacagagccaaccgctggccaag

SEQ ID NO: 3807787 - DNA, 25 bp, Homo sapien
ctttgtgtctctggggtctcgctag

SEQ ID NO: 3807788 - DNA, 25 bp, Homo sapien
tctcgctagtgacaggggccttgct

SEQ ID NO: 3807789 - DNA, 25 bp, Homo sapien
gaggcacagcaaagcagtatctggc

SEQ ID NO: 3807790 - DNA, 25 bp, Homo sapien
ccatcttcagaggatcactgtcctg

SEQ ID NO: 3807791 - DNA, 25 bp, Homo sapien
gaggatcactgtcctgccagaaatt

SEQ ID NO: 3807792 - DNA, 25 bp, Homo sapien
cagaggatcactgtcctgccagaaa

SEQ ID NO: 3807793 - DNA, 25 bp, Homo sapien
tcttcagaggatcactgtcctgcca

SEQ ID NO: 3807794 - DNA, 25 bp, Homo sapien
ctggaaactttgatcaaactcagca

SEQ ID NO: 3807795 - DNA, 25 bp, Homo sapien
agcctgcaggttccctgcagagtcc

SEQ ID NO: 3807796 - DNA, 25 bp, Homo sapien
catcagatggcccagggatcacaaa

SEQ ID NO: 3807797 - DNA, 25 bp, Homo sapien
aaagcagccggcgatggcaacgatt

SEQ ID NO: 3807798 - DNA, 25 bp, Homo sapien
tttgctaggagaggcagcacagcgg

SEQ ID NO: 3807799 - DNA, 25 bp, Homo sapien
ttttgctaggagaggcagcacagcg

SEQ ID NO: 3807800 - DNA, 25 bp, Homo sapien
ttgctaggagaggcagcacagcggc

SEQ ID NO: 3807801 - DNA, 25 bp, Homo sapien
tagaaaaacagactactgccatcgg

SEQ ID NO: 3807802 - DNA, 25 bp, Homo sapien
tgccatcgggaacaatgaagtttta

SEQ ID NO: 3807803 - DNA, 25 bp, Homo sapien
aagttttattgccatgcttgtcaat

SEQ ID NO: 3807804 - DNA, 25 bp, Homo sapien
caatggcttggagtttacaagttaa

SEQ ID NO: 3807805 - DNA, 25 bp, Homo sapien
cttagatcgccaggttaacccatga

SEQ ID NO: 3807806 - DNA, 25 bp, Homo sapien
ttggactggaattgaagggtcccgc

SEQ ID NO: 3807807 - DNA, 25 bp, Homo sapien
agccaagctgagatcggaacttgga

SEQ ID NO: 3807808 - DNA, 25 bp, Homo sapien
gaaatgggtgctgaaggtcctctca

SEQ ID NO: 3807809 - DNA, 25 bp, Homo sapien
atctccatgtcccacgtcggcacaa

SEQ ID NO: 3807810 - DNA, 25 bp, Homo sapien
cacgtcggcacaagtcattccaggg

SEQ ID NO: 3807811 - DNA, 25 bp, Homo sapien
cagaacagttgcatgttggggcttc

SEQ ID NO: 3807812 - DNA, 25 bp, Homo sapien
gctgagcccatggcctgcattgtca

SEQ ID NO: 3807813 - DNA, 25 bp, Homo sapien
ctggggtggttggcatggagcagag

SEQ ID NO: 3807814 - DNA, 25 bp, Homo sapien
ggttggcatggagcagagtgtggcc

SEQ ID NO: 3807815 - DNA, 25 bp, Homo sapien
gggtggttggcatggagcagagtgt

SEQ ID NO: 3807816 - DNA, 25 bp, Homo sapien
gtggttggcatggagcagagtgtgg

SEQ ID NO: 3807817 - DNA, 25 bp, Homo sapien
ttcgaggacagaggtcccctatgct

SEQ ID NO: 3807818 - DNA, 25 bp, Homo sapien
acagaggtcccctatgctcagccag

SEQ ID NO: 3807819 - DNA, 25 bp, Homo sapien
ggaggcactgggaattcgaggacag

SEQ ID NO: 3807820 - DNA, 25 bp, Homo sapien
cactgggaattcgaggacagaggtc

SEQ ID NO: 3807821 - DNA, 25 bp, Homo sapien
caactttgtctgttcagatacaacc

SEQ ID NO: 3807822 - DNA, 25 bp, Homo sapien
tacaacctctatggggccttgggcc

SEQ ID NO: 3807823 - DNA, 25 bp, Homo sapien
gggacagcaactttgtctgttcaga

SEQ ID NO: 3807824 - DNA, 25 bp, Homo sapien
tctgttcagatacaacctctatggg

SEQ ID NO: 3807825 - DNA, 25 bp, Homo sapien
cctggaagttcgctgtaagaatgaa

SEQ ID NO: 3807826 - DNA, 25 bp, Homo sapien
gcctggtgcagctcttttctgcaaa

SEQ ID NO: 3807827 - DNA, 25 bp, Homo sapien
cctgaacgagtgaagtttggcaaag

SEQ ID NO: 3807828 - DNA, 25 bp, Homo sapien
agcccccacggaaggcctgatttct

SEQ ID NO: 3807829 - DNA, 25 bp, Homo sapien
caggtgatctatctgattctgtctc

SEQ ID NO: 3807830 - DNA, 25 bp, Homo sapien
ctcaggtgatctatctgattctgtc

SEQ ID NO: 3807831 - DNA, 25 bp, Homo sapien
acctcaggtgatctatctgattctg

SEQ ID NO: 3807832 - DNA, 25 bp, Homo sapien
aggtgatctatctgattctgtctcc

SEQ ID NO: 3807833 - DNA, 25 bp, Homo sapien
ttggtccccaccaggactataagct

SEQ ID NO: 3807834 - DNA, 25 bp, Homo sapien
ccaagtctggtctcaaaaagtcctg

SEQ ID NO: 3807835 - DNA, 25 bp, Homo sapien
tgtccagatcccttgtccttcttgg

SEQ ID NO: 3807836 - DNA, 25 bp, Homo sapien
ttcttctgggagttctccaagtctg

SEQ ID NO: 3807837 - DNA, 25 bp, Homo sapien
aacacttcacatgggtgtcgtttgg

SEQ ID NO: 3807838 - DNA, 25 bp, Homo sapien
acacttcacatgggtgtcgtttggc

SEQ ID NO: 3807839 - DNA, 25 bp, Homo sapien
actcagcacactgaacacttcacat

SEQ ID NO: 3807840 - DNA, 25 bp, Homo sapien
ggcttgctttcatcagtggaggtgt

SEQ ID NO: 3807841 - DNA, 25 bp, Homo sapien
tgcagccaagcggaaggcttgcttt

SEQ ID NO: 3807842 - DNA, 25 bp, Homo sapien
tcaagatcaaggaaacggaagtgca

SEQ ID NO: 3807843 - DNA, 25 bp, Homo sapien
gcgactacttggtctccggtaaaca

SEQ ID NO: 3807844 - DNA, 25 bp, Homo sapien
agcctgtgcaaggtcagcagaggag

SEQ ID NO: 3807845 - DNA, 25 bp, Homo sapien
agttagcctgtgcaaggtcagcaga

SEQ ID NO: 3807846 - DNA, 25 bp, Homo sapien
ttagcctgtgcaaggtcagcagagg

SEQ ID NO: 3807847 - DNA, 25 bp, Homo sapien
tagttagcctgtgcaaggtcagcag

SEQ ID NO: 3807848 - DNA, 25 bp, Homo sapien
ttactctctgcctcgtcccaaacac

SEQ ID NO: 3807849 - DNA, 25 bp, Homo sapien
actctctgcctcgtcccaaacacac

SEQ ID NO: 3807850 - DNA, 25 bp, Homo sapien
tcttggctttactctctgcctcgtc

SEQ ID NO: 3807851 - DNA, 25 bp, Homo sapien
agtcttggctttactctctgcctcg

SEQ ID NO: 3807852 - DNA, 25 bp, Homo sapien
agcttcctgccactggcccgtgtag

SEQ ID NO: 3807853 - DNA, 25 bp, Homo sapien
catgactacagctactggcctggag

SEQ ID NO: 3807854 - DNA, 25 bp, Homo sapien
tgtagcccttggtcaacaggccatg

SEQ ID NO: 3807855 - DNA, 25 bp, Homo sapien
gagccagtgctgtcgacaggaggaa

SEQ ID NO: 3807856 - DNA, 25 bp, Homo sapien
gcaaggctattccagagtggcccca

SEQ ID NO: 3807857 - DNA, 25 bp, Homo sapien
cactctgggtaactcatgggcacac

SEQ ID NO: 3807858 - DNA, 25 bp, Homo sapien
cagttctgttcgagggcagtcagcc

SEQ ID NO: 3807859 - DNA, 25 bp, Homo sapien
tgggctccccaaatcttgccgcgtg

SEQ ID NO: 3807860 - DNA, 25 bp, Homo sapien
gtcccaaacaggctatcccagtcgt

SEQ ID NO: 3807861 - DNA, 25 bp, Homo sapien
ggagctgtacgaacctgcacacagt

SEQ ID NO: 3807862 - DNA, 25 bp, Homo sapien
gctcagggcgcacgatgaaaaggct

SEQ ID NO: 3807863 - DNA, 25 bp, Homo sapien
tccgattctgaagcttgaagcctgg

SEQ ID NO: 3807864 - DNA, 25 bp, Homo sapien
gagacctgcaaagccgtaaggaacg

SEQ ID NO: 3807865 - DNA, 25 bp, Homo sapien
gaatcccagagacctgcaaagccgt

SEQ ID NO: 3807866 - DNA, 25 bp, Homo sapien
agtccccagcttggaatcccagaga

SEQ ID NO: 3807867 - DNA, 25 bp, Homo sapien
cgtaaggaacggctccattttgcat

SEQ ID NO: 3807868 - DNA, 25 bp, Homo sapien
gatgggcccattcttcatttggaga

SEQ ID NO: 3807869 - DNA, 25 bp, Homo sapien
gagattagataaggctgtgagcccc

SEQ ID NO: 3807870 - DNA, 25 bp, Homo sapien
tcataggatatgtcagatgggccca

SEQ ID NO: 3807871 - DNA, 25 bp, Homo sapien
tcggtgaagagtcccctaagctttg

SEQ ID NO: 3807872 - DNA, 25 bp, Homo sapien
tgtgttcagtgctaccagtgacttg

SEQ ID NO: 3807873 - DNA, 25 bp, Homo sapien
tcctctgtgcattggtggctttgtg

SEQ ID NO: 3807874 - DNA, 25 bp, Homo sapien
gagataaggcgaccccagtcaagat

SEQ ID NO: 3807875 - DNA, 25 bp, Homo sapien
ctttctgggagtgttacgagtgacg

SEQ ID NO: 3807876 - DNA, 25 bp, Homo sapien
tcactctgaacacccatcgcccctt

SEQ ID NO: 3807877 - DNA, 25 bp, Homo sapien
agccagagaatggtgtccccctcac

SEQ ID NO: 3807878 - DNA, 25 bp, Homo sapien
ccaagggtggcattgacaacagggt

SEQ ID NO: 3807879 - DNA, 25 bp, Homo sapien
acccatcgccccttctgaatccctc

SEQ ID NO: 3807880 - DNA, 25 bp, Homo sapien
cccccacagctcgtgtcatcagcat

SEQ ID NO: 3807881 - DNA, 25 bp, Homo sapien
gcccccacagctcgtgtcatcagca

SEQ ID NO: 3807882 - DNA, 25 bp, Homo sapien
gagcccccacagctcgtgtcatcag

SEQ ID NO: 3807883 - DNA, 25 bp, Homo sapien
ccagagcccccacagctcgtgtcat

SEQ ID NO: 3807884 - DNA, 25 bp, Homo sapien
cccatttgaagactctgatggtagt

SEQ ID NO: 3807885 - DNA, 25 bp, Homo sapien
tctggaatgtgtcccatttgaagac

SEQ ID NO: 3807886 - DNA, 25 bp, Homo sapien
aatgcaactctggaatgtgtcccat

SEQ ID NO: 3807887 - DNA, 25 bp, Homo sapien
tcccatttgaagactctgatggtag

SEQ ID NO: 3807888 - DNA, 25 bp, Homo sapien
gaaatactcagcaaaaatgaagcaa

SEQ ID NO: 3807889 - DNA, 25 bp, Homo sapien
tgagaaggcagaaatactcagcaaa

SEQ ID NO: 3807890 - DNA, 25 bp, Homo sapien
ttgtaattgttaaatcaccagtgac

SEQ ID NO: 3807891 - DNA, 25 bp, Homo sapien
tacaaaacgctctaggtgagcagat

SEQ ID NO: 3807892 - DNA, 25 bp, Homo sapien
tcacaatcggcaactgtcgctgggc

SEQ ID NO: 3807893 - DNA, 25 bp, Homo sapien
catacagctgttatctggcaagcag

SEQ ID NO: 3807894 - DNA, 25 bp, Homo sapien
tcttcgaaacggcttggagaactgg

SEQ ID NO: 3807895 - DNA, 25 bp, Homo sapien
ggagcatcacagttcacggctggta

SEQ ID NO: 3807896 - DNA, 25 bp, Homo sapien
tattttaattgtcttctagaagaat

SEQ ID NO: 3807897 - DNA, 25 bp, Homo sapien
ttattttaattgtcttctagaagaa

SEQ ID NO: 3807898 - DNA, 25 bp, Homo sapien
aagacattttcacaacgatgttgat

SEQ ID NO: 3807899 - DNA, 25 bp, Homo sapien
tttaattgtcttctagaagaattgt

SEQ ID NO: 3807900 - DNA, 25 bp, Homo sapien
tgacagctaaatgaaaagcggagtt

SEQ ID NO: 3807901 - DNA, 25 bp, Homo sapien
ggtttgggccaagtgacagctaaat

SEQ ID NO: 3807902 - DNA, 25 bp, Homo sapien
ctttgactggtttgggccaagtgac

SEQ ID NO: 3807903 - DNA, 25 bp, Homo sapien
atgaaaagcggagttttctcttcag

SEQ ID NO: 3807904 - DNA, 25 bp, Homo sapien
tcaacttagtgcaaggtatccagcc

SEQ ID NO: 3807905 - DNA, 25 bp, Homo sapien
gataactggctagcctcatgccgaa

SEQ ID NO: 3807906 - DNA, 25 bp, Homo sapien
caccacaattgagggattaggacag

SEQ ID NO: 3807907 - DNA, 25 bp, Homo sapien
tcatcttcctgggactattaggcag

SEQ ID NO: 3807908 - DNA, 25 bp, Homo sapien
acacttgagtaagcattggagtttc

SEQ ID NO: 3807909 - DNA, 25 bp, Homo sapien
cctgtaatgatactagacgaaaata

SEQ ID NO: 3807910 - DNA, 25 bp, Homo sapien
gaacctgtaatgatactagacgaaa

SEQ ID NO: 3807911 - DNA, 25 bp, Homo sapien
gagtttctaagcatattaccaaatg

SEQ ID NO: 3807912 - DNA, 25 bp, Homo sapien
catatgaggaacagcttaacagagg

SEQ ID NO: 3807913 - DNA, 25 bp, Homo sapien
ctaaggaatacaggccccaaagtga

SEQ ID NO: 3807914 - DNA, 25 bp, Homo sapien
caaccgcaggaatgaggtgctgcat

SEQ ID NO: 3807915 - DNA, 25 bp, Homo sapien
tgctgcatgggctgagacctaagga

SEQ ID NO: 3807916 - DNA, 25 bp, Homo sapien
aataagactgcatatagttagaaaa

SEQ ID NO: 3807917 - DNA, 25 bp, Homo sapien
cagcctatattctgctaaatttcaa

SEQ ID NO: 3807918 - DNA, 25 bp, Homo sapien
catctaacttgatactatggttgag

SEQ ID NO: 3807919 - DNA, 25 bp, Homo sapien
gacatttgtcaatctatataagcag

SEQ ID NO: 3807920 - DNA, 25 bp, Homo sapien
cataaagcacgaagctctgaaggaa

SEQ ID NO: 3807921 - DNA, 25 bp, Homo sapien
tgatctttgtgactaagcaccacca

SEQ ID NO: 3807922 - DNA, 25 bp, Homo sapien
agagctctctccttaaccccaggct

SEQ ID NO: 3807923 - DNA, 25 bp, Homo sapien
tcacaccaatcctgttgtttgatct

SEQ ID NO: 3807924 - DNA, 25 bp, Homo sapien
aagttcgatcactccctggttggag

SEQ ID NO: 3807925 - DNA, 25 bp, Homo sapien
agcttcactggaaagttcgatcact

SEQ ID NO: 3807926 - DNA, 25 bp, Homo sapien
gaaagttcgatcactccctggttgg

SEQ ID NO: 3807927 - DNA, 25 bp, Homo sapien
actggaaagttcgatcactccctgg

SEQ ID NO: 3807928 - DNA, 25 bp, Homo sapien
aagggtcctcacagttatgctggtg

SEQ ID NO: 3807929 - DNA, 25 bp, Homo sapien
gaagggtcctcacagttatgctggt

SEQ ID NO: 3807930 - DNA, 25 bp, Homo sapien
ggaagggtcctcacagttatgctgg

SEQ ID NO: 3807931 - DNA, 25 bp, Homo sapien
cagttaaagcctgaatgggaccaca

SEQ ID NO: 3807932 - DNA, 25 bp, Homo sapien
cccttggcttgttggttcctgactg

SEQ ID NO: 3807933 - DNA, 25 bp, Homo sapien
catgagcatttccacgccattctga

SEQ ID NO: 3807934 - DNA, 25 bp, Homo sapien
catgcatgtgattcctcggaggagg

SEQ ID NO: 3807935 - DNA, 25 bp, Homo sapien
tctgacaacgaccacatttgatttg

SEQ ID NO: 3807936 - DNA, 25 bp, Homo sapien
acttcgtctgcctggtttagaagga

SEQ ID NO: 3807937 - DNA, 25 bp, Homo sapien
gactgagcagtaatctgacaacgac

SEQ ID NO: 3807938 - DNA, 25 bp, Homo sapien
attttatttccgcaaaagactgagc

SEQ ID NO: 3807939 - DNA, 25 bp, Homo sapien
caaatccgacaactgtaagggcgtc

SEQ ID NO: 3807940 - DNA, 25 bp, Homo sapien
tttcagatggccaaaatagactcgg

SEQ ID NO: 3807941 - DNA, 25 bp, Homo sapien
caggacgtacataggacttgcgaca

SEQ ID NO: 3807942 - DNA, 25 bp, Homo sapien
tcagacggttctcaccatgatgaag

SEQ ID NO: 3807943 - DNA, 25 bp, Homo sapien
tggtgggtggacaaaaggcactttc

SEQ ID NO: 3807944 - DNA, 25 bp, Homo sapien
gactgtagtgtagttggagaagcca

SEQ ID NO: 3807945 - DNA, 25 bp, Homo sapien
ggagggtatcttatcacagtcggcc

SEQ ID NO: 3807946 - DNA, 25 bp, Homo sapien
ggcactctgctgtgacacttgtgga

SEQ ID NO: 3807947 - DNA, 25 bp, Homo sapien
gatcaactgaactgcattgccaaga

SEQ ID NO: 3807948 - DNA, 25 bp, Homo sapien
gatggtacttcctcaaatggactgg

SEQ ID NO: 3807949 - DNA, 25 bp, Homo sapien
tcagactgccatgggtgttggtcac

SEQ ID NO: 3807950 - DNA, 25 bp, Homo sapien
ggtggtctcaagtccccatggtcac

SEQ ID NO: 3807951 - DNA, 25 bp, Homo sapien
tctggacgttaggactttgggcaca

SEQ ID NO: 3807952 - DNA, 25 bp, Homo sapien
cacaatttttggtgcaatggtccta

SEQ ID NO: 3807953 - DNA, 25 bp, Homo sapien
cgtgatggtgaatgacatggcagca

SEQ ID NO: 3807954 - DNA, 25 bp, Homo sapien
tgcaaacctttcctactctgtattg

SEQ ID NO: 3807955 - DNA, 25 bp, Homo sapien
gcagacaatctagtgaaacagacaa

SEQ ID NO: 3807956 - DNA, 25 bp, Homo sapien
ggtaggggactgaacactatctgtt

SEQ ID NO: 3807957 - DNA, 25 bp, Homo sapien
taggtagcagacaatctagtgaaac

SEQ ID NO: 3807958 - DNA, 25 bp, Homo sapien
caaggtaggtagcagacaatctagt

SEQ ID NO: 3807959 - DNA, 25 bp, Homo sapien
ggcccagacgactggtatgatgtct

SEQ ID NO: 3807960 - DNA, 25 bp, Homo sapien
gactggtatgatgtctgccaaactg

SEQ ID NO: 3807961 - DNA, 25 bp, Homo sapien
acagaggcccagacgactggtatga

SEQ ID NO: 3807962 - DNA, 25 bp, Homo sapien
tgatgtctgccaaactgagtccgtg

SEQ ID NO: 3807963 - DNA, 25 bp, Homo sapien
cagaaaggctgttggatatttggag

SEQ ID NO: 3807964 - DNA, 25 bp, Homo sapien
tccagaaaggctgttggatatttgg

SEQ ID NO: 3807965 - DNA, 25 bp, Homo sapien
tggatatttggagaatgtgcaacgt

SEQ ID NO: 3807966 - DNA, 25 bp, Homo sapien
gagaatgtgcaacgtgtgtcctcct

SEQ ID NO: 3807967 - DNA, 25 bp, Homo sapien
gtttgggcaaagttccattattcca

SEQ ID NO: 3807968 - DNA, 25 bp, Homo sapien
caacctcttctggtcgctggtttgg

SEQ ID NO: 3807969 - DNA, 25 bp, Homo sapien
tccattggcagaaccaaagcctgct

SEQ ID NO: 3807970 - DNA, 25 bp, Homo sapien
gaataaagttgttcaacctcttctg

SEQ ID NO: 3807971 - DNA, 25 bp, Homo sapien
tttgccgagtcagctgtttctcaat

SEQ ID NO: 3807972 - DNA, 25 bp, Homo sapien
catttgccgagtcagctgtttctca

SEQ ID NO: 3807973 - DNA, 25 bp, Homo sapien
tctgacatttgccgagtcagctgtt

SEQ ID NO: 3807974 - DNA, 25 bp, Homo sapien
gctgtttctcaatggggctggtgaa

SEQ ID NO: 3807975 - DNA, 25 bp, Homo sapien
taaaatggctgacagacatatgctg

SEQ ID NO: 3807976 - DNA, 25 bp, Homo sapien
cagccgtaaagctgacctggctact

SEQ ID NO: 3807977 - DNA, 25 bp, Homo sapien
gactgttgttctgaggacaagcact

SEQ ID NO: 3807978 - DNA, 25 bp, Homo sapien
gacaagcactcaattcagccgtaaa

SEQ ID NO: 3807979 - DNA, 25 bp, Homo sapien
gatgcaagcatctgctatattgcaa

SEQ ID NO: 3807980 - DNA, 25 bp, Homo sapien
gtgtcccacagtgaaatgtctccaa

SEQ ID NO: 3807981 - DNA, 25 bp, Homo sapien
gggctggatacattatttgaacaga

SEQ ID NO: 3807982 - DNA, 25 bp, Homo sapien
caatctggaagtgttgtgtcccaca

SEQ ID NO: 3807983 - DNA, 25 bp, Homo sapien
agagaggtaggcatcagaacaaaac

SEQ ID NO: 3807984 - DNA, 25 bp, Homo sapien
tttacttgagctctgggtagggcca

SEQ ID NO: 3807985 - DNA, 25 bp, Homo sapien
tccggtcaatggaagtatccaagct

SEQ ID NO: 3807986 - DNA, 25 bp, Homo sapien
caagcttatgtgatagcccagagag

SEQ ID NO: 3807987 - DNA, 25 bp, Homo sapien
cagctttcctgatacttgttccatt

SEQ ID NO: 3807988 - DNA, 25 bp, Homo sapien
cacctagtcattctcgatttttcaa

SEQ ID NO: 3807989 - DNA, 25 bp, Homo sapien
ttttagagcctgaaaggaacaccta

SEQ ID NO: 3807990 - DNA, 25 bp, Homo sapien
aaaggaacacctagtcattctcgat

SEQ ID NO: 3807991 - DNA, 25 bp, Homo sapien
tgttagtgccagttaactgccagtg

SEQ ID NO: 3807992 - DNA, 25 bp, Homo sapien
cgctatagcctataaaggagacagg

SEQ ID NO: 3807993 - DNA, 25 bp, Homo sapien
tatcctctaagtgtatgtctacaga

SEQ ID NO: 3807994 - DNA, 25 bp, Homo sapien
ggctgggctctcaaggcgctatagc

SEQ ID NO: 3807995 - DNA, 25 bp, Homo sapien
ttttggtggtactgatacagaattc

SEQ ID NO: 3807996 - DNA, 25 bp, Homo sapien
tcttttggtggtactgatacagaat

SEQ ID NO: 3807997 - DNA, 25 bp, Homo sapien
catcttttggtggtactgatacaga

SEQ ID NO: 3807998 - DNA, 25 bp, Homo sapien
tcatcttttggtggtactgatacag

SEQ ID NO: 3807999 - DNA, 25 bp, Homo sapien
tgatgtactggacttgaatagtatc

SEQ ID NO: 3808000 - DNA, 25 bp, Homo sapien
gtactggacttgaatagtatctttc

SEQ ID NO: 3808001 - DNA, 25 bp, Homo sapien
gatgtactggacttgaatagtatct

SEQ ID NO: 3808002 - DNA, 25 bp, Homo sapien
tatgatgtactggacttgaatagta

SEQ ID NO: 3808003 - DNA, 25 bp, Homo sapien
cacacaagatcttattttcagccta

SEQ ID NO: 3808004 - DNA, 25 bp, Homo sapien
ttaggctgtgcctcttgattttaaa

SEQ ID NO: 3808005 - DNA, 25 bp, Homo sapien
gcctagaaccagtcagtgaagccat

SEQ ID NO: 3808006 - DNA, 25 bp, Homo sapien
tgacaggccgtcttccagttttgat

SEQ ID NO: 3808007 - DNA, 25 bp, Homo sapien
tgtggcaaattttaacaaacaggcc

SEQ ID NO: 3808008 - DNA, 25 bp, Homo sapien
gcattcaggccagtgaagttaccaa

SEQ ID NO: 3808009 - DNA, 25 bp, Homo sapien
tctagaaagactcacgtttgtggca

SEQ ID NO: 3808010 - DNA, 25 bp, Homo sapien
aatgcaatacagtgactatgctgcc

SEQ ID NO: 3808011 - DNA, 25 bp, Homo sapien
cagcacctgggaagtattaatgtgt

SEQ ID NO: 3808012 - DNA, 25 bp, Homo sapien
gcacctgggaagtattaatgtgtgt

SEQ ID NO: 3808013 - DNA, 25 bp, Homo sapien
gggaagtattaatgtgtgtgtcctc

SEQ ID NO: 3808014 - DNA, 25 bp, Homo sapien
cctgggaagtattaatgtgtgtgtc

SEQ ID NO: 3808015 - DNA, 25 bp, Homo sapien
tcacatgacagatgatctctacagc

SEQ ID NO: 3808016 - DNA, 25 bp, Homo sapien
cacatgacagatgatctctacagca

SEQ ID NO: 3808017 - DNA, 25 bp, Homo sapien
gcatgaagtttgtggttaattccat

SEQ ID NO: 3808018 - DNA, 25 bp, Homo sapien
taagatgtgcgtactttcttcaaca

SEQ ID NO: 3808019 - DNA, 25 bp, Homo sapien
gataagatgtgcgtactttcttcaa

SEQ ID NO: 3808020 - DNA, 25 bp, Homo sapien
cttttactgttcttgcatgaagttt

SEQ ID NO: 3808021 - DNA, 25 bp, Homo sapien
gaatgtggcaatgacagaacatctg

SEQ ID NO: 3808022 - DNA, 25 bp, Homo sapien
aagaatgtggcaatgacagaacatc

SEQ ID NO: 3808023 - DNA, 25 bp, Homo sapien
agaatgtggcaatgacagaacatct

SEQ ID NO: 3808024 - DNA, 25 bp, Homo sapien
tatagccatagatggacaaggaggc

SEQ ID NO: 3808025 - DNA, 25 bp, Homo sapien
caaggaggcaaagatacagtagaaa

SEQ ID NO: 3808026 - DNA, 25 bp, Homo sapien
ccatagatggacaaggaggcaaaga

SEQ ID NO: 3808027 - DNA, 25 bp, Homo sapien
aaaatgcgaacacttcaaaacctga

SEQ ID NO: 3808028 - DNA, 25 bp, Homo sapien
ggcacttcctgtgataaatgaagca

SEQ ID NO: 3808029 - DNA, 25 bp, Homo sapien
aaggctttggaattgcaattgtgta

SEQ ID NO: 3808030 - DNA, 25 bp, Homo sapien
aagatattgcagaactctggcactt

SEQ ID NO: 3808031 - DNA, 25 bp, Homo sapien
caattgtgtatatttaggtacttca

SEQ ID NO: 3808032 - DNA, 25 bp, Homo sapien
ctatgggttttcctgaactactaat

SEQ ID NO: 3808033 - DNA, 25 bp, Homo sapien
tcacattgtccactttactgtggct

SEQ ID NO: 3808034 - DNA, 25 bp, Homo sapien
ttattttccgtatcttcactatctg

SEQ ID NO: 3808035 - DNA, 25 bp, Homo sapien
ttcttccttctatgggttttcctga

SEQ ID NO: 3808036 - DNA, 25 bp, Homo sapien
tttcaaggtttataccactacaatc

SEQ ID NO: 3808037 - DNA, 25 bp, Homo sapien
ggtttataccactacaatcctcttc

SEQ ID NO: 3808038 - DNA, 25 bp, Homo sapien
caaggtttataccactacaatcctc

SEQ ID NO: 3808039 - DNA, 25 bp, Homo sapien
gtttataccactacaatcctcttcc

SEQ ID NO: 3808040 - DNA, 25 bp, Homo sapien
agtacctagtactatagacgcacgc

SEQ ID NO: 3808041 - DNA, 25 bp, Homo sapien
aaccaacccaagcatacagtactat

SEQ ID NO: 3808042 - DNA, 25 bp, Homo sapien
ttcgagatccaaccaacccaagcat

SEQ ID NO: 3808043 - DNA, 25 bp, Homo sapien
ctctggagtacctagtactatagac

SEQ ID NO: 3808044 - DNA, 25 bp, Homo sapien
actaacatcattggcccgcatgtac

SEQ ID NO: 3808045 - DNA, 25 bp, Homo sapien
catcattggcccgcatgtactctct

SEQ ID NO: 3808046 - DNA, 25 bp, Homo sapien
atcattggcccgcatgtactctctc

SEQ ID NO: 3808047 - DNA, 25 bp, Homo sapien
taacatcattggcccgcatgtactc

SEQ ID NO: 3808048 - DNA, 25 bp, Homo sapien
tttctcttgtactccttccaatgtt

SEQ ID NO: 3808049 - DNA, 25 bp, Homo sapien
tctaatttccatgacctcactgttt

SEQ ID NO: 3808050 - DNA, 25 bp, Homo sapien
ctcatgtctaatttccatgacctca

SEQ ID NO: 3808051 - DNA, 25 bp, Homo sapien
ttctcttgtactccttccaatgttg

SEQ ID NO: 3808052 - DNA, 25 bp, Homo sapien
gggactcagccttgttgcaaatcaa

SEQ ID NO: 3808053 - DNA, 25 bp, Homo sapien
gatggccatacaagagtctccggta

SEQ ID NO: 3808054 - DNA, 25 bp, Homo sapien
tcctaggattataagagctgactgc

SEQ ID NO: 3808055 - DNA, 25 bp, Homo sapien
gaaatgtgcacaggcaagcactgac

SEQ ID NO: 3808056 - DNA, 25 bp, Homo sapien
gcaagaattcaagcacgacgtgggt

SEQ ID NO: 3808057 - DNA, 25 bp, Homo sapien
ggagttcagctggtcctttcacaga

SEQ ID NO: 3808058 - DNA, 25 bp, Homo sapien
gaagctaatccaaagagaggcgacg

SEQ ID NO: 3808059 - DNA, 25 bp, Homo sapien
gaacaaacccctcatctcgtggagt

SEQ ID NO: 3808060 - DNA, 25 bp, Homo sapien
ctttaacacttcagtactggatggg

SEQ ID NO: 3808061 - DNA, 25 bp, Homo sapien
ctaactttaacacttcagtactgga

SEQ ID NO: 3808062 - DNA, 25 bp, Homo sapien
taacacttcagtactggatgggaaa

SEQ ID NO: 3808063 - DNA, 25 bp, Homo sapien
acttcagtactggatgggaaatggc

SEQ ID NO: 3808064 - DNA, 25 bp, Homo sapien
gagaaagcatatgaatggaaaaaat

SEQ ID NO: 3808065 - DNA, 25 bp, Homo sapien
gacccaatggcaagaccatctattg

SEQ ID NO: 3808066 - DNA, 25 bp, Homo sapien
ggaattcagacccaatggcaagacc

SEQ ID NO: 3808067 - DNA, 25 bp, Homo sapien
catttgtgtgtaagggagtaaagtt

SEQ ID NO: 3808068 - DNA, 25 bp, Homo sapien
ggctcctccgcagctggagatctca

SEQ ID NO: 3808069 - DNA, 25 bp, Homo sapien
cttagatacctttagagacccgtgg

SEQ ID NO: 3808070 - DNA, 25 bp, Homo sapien
gttacttggaaaagcagatgtgacc

SEQ ID NO: 3808071 - DNA, 25 bp, Homo sapien
tgtgaccatacagatcttagatacc

SEQ ID NO: 3808072 - DNA, 25 bp, Homo sapien
ccgtggttgggatctgaagaaaaca

SEQ ID NO: 3808073 - DNA, 25 bp, Homo sapien
cacaaaccagtgagtatgagagcta

SEQ ID NO: 3808074 - DNA, 25 bp, Homo sapien
acaaaccagtgagtatgagagctat

SEQ ID NO: 3808075 - DNA, 25 bp, Homo sapien
tccacaaaccagtgagtatgagagc

SEQ ID NO: 3808076 - DNA, 25 bp, Homo sapien
tttccacaaaccagtgagtatgaga

SEQ ID NO: 3808077 - DNA, 25 bp, Homo sapien
ggtgagggcatgggttagggtaaca

SEQ ID NO: 3808078 - DNA, 25 bp, Homo sapien
tgagggcatgggttagggtaacaaa

SEQ ID NO: 3808079 - DNA, 25 bp, Homo sapien
ggaatggaatttcatgggtcacttg

SEQ ID NO: 3808080 - DNA, 25 bp, Homo sapien
gtgagggcatgggttagggtaacaa

SEQ ID NO: 3808081 - DNA, 25 bp, Homo sapien
gagttcctattgcagcgtctttatg

SEQ ID NO: 3808082 - DNA, 25 bp, Homo sapien
cacaggcataggcttttcaaaccat

SEQ ID NO: 3808083 - DNA, 25 bp, Homo sapien
caaaatggacatcatcacaggcata

SEQ ID NO: 3808084 - DNA, 25 bp, Homo sapien
tcatactggtatgaccaagggcaca

SEQ ID NO: 3808085 - DNA, 25 bp, Homo sapien
tgagcaagaatcatcctcatatctc

SEQ ID NO: 3808086 - DNA, 25 bp, Homo sapien
taccacttcattcctaaaagttgag

SEQ ID NO: 3808087 - DNA, 25 bp, Homo sapien
gtttagcaagcagacacccgactct

SEQ ID NO: 3808088 - DNA, 25 bp, Homo sapien
catatctccagctttctggtttagc

SEQ ID NO: 3808089 - DNA, 25 bp, Homo sapien
aaaagtgtaacagaactggcagtta

SEQ ID NO: 3808090 - DNA, 25 bp, Homo sapien
gtgtaacagaactggcagttacagt

SEQ ID NO: 3808091 - DNA, 25 bp, Homo sapien
agtgtaacagaactggcagttacag

SEQ ID NO: 3808092 - DNA, 25 bp, Homo sapien
aaagtgtaacagaactggcagttac

SEQ ID NO: 3808093 - DNA, 25 bp, Homo sapien
aaagcccactgtccagtcttttctg

SEQ ID NO: 3808094 - DNA, 25 bp, Homo sapien
cagagaagaaaagcgaccaaagccc

SEQ ID NO: 3808095 - DNA, 25 bp, Homo sapien
tccgggcagaacaaagtctttcttc

SEQ ID NO: 3808096 - DNA, 25 bp, Homo sapien
agaatccgggcagaacaaagtcttt

SEQ ID NO: 3808097 - DNA, 25 bp, Homo sapien
gtcataagatataccgtaaatcctt

SEQ ID NO: 3808098 - DNA, 25 bp, Homo sapien
atcccaaggctcctgtagagtcata

SEQ ID NO: 3808099 - DNA, 25 bp, Homo sapien
ctatatcccaaggctcctgtagagt

SEQ ID NO: 3808100 - DNA, 25 bp, Homo sapien
tatatcccaaggctcctgtagagtc

SEQ ID NO: 3808101 - DNA, 25 bp, Homo sapien
aatgaggagcaaggtactagaactt

SEQ ID NO: 3808102 - DNA, 25 bp, Homo sapien
gagattacttaagtgctcatgacca

SEQ ID NO: 3808103 - DNA, 25 bp, Homo sapien
atgaccagaatgttgatagaaatat

SEQ ID NO: 3808104 - DNA, 25 bp, Homo sapien
tagaacttggaataaaggccacact

SEQ ID NO: 3808105 - DNA, 25 bp, Homo sapien
ctttgtgtagattaaccaagataac

SEQ ID NO: 3808106 - DNA, 25 bp, Homo sapien
aaatgaactgtcttcataagctttg

SEQ ID NO: 3808107 - DNA, 25 bp, Homo sapien
tatataaagtacctaacagagagtg

SEQ ID NO: 3808108 - DNA, 25 bp, Homo sapien
cagagagtgcctagtatataggaag

SEQ ID NO: 3808109 - DNA, 25 bp, Homo sapien
ctttaaccagaaaagcctgatgatt

SEQ ID NO: 3808110 - DNA, 25 bp, Homo sapien
gaaaagcctgatgattcagagacca

SEQ ID NO: 3808111 - DNA, 25 bp, Homo sapien
cctgatgattcagagaccaacccat

SEQ ID NO: 3808112 - DNA, 25 bp, Homo sapien
aaccagaaaagcctgatgattcaga

SEQ ID NO: 3808113 - DNA, 25 bp, Homo sapien
ggattttatacgacaactggcaacg

SEQ ID NO: 3808114 - DNA, 25 bp, Homo sapien
gacacacaacaaacgcttcgaaagc

SEQ ID NO: 3808115 - DNA, 25 bp, Homo sapien
taaatgggtgcctcaggacctgaag

SEQ ID NO: 3808116 - DNA, 25 bp, Homo sapien
taaatacagacagcacttagggcat

SEQ ID NO: 3808117 - DNA, 25 bp, Homo sapien
cactgcaatatgagccctgctaggt

SEQ ID NO: 3808118 - DNA, 25 bp, Homo sapien
gactcacatctcatccaggctaggg

SEQ ID NO: 3808119 - DNA, 25 bp, Homo sapien
cctgctaggttggaggctgtcttct

SEQ ID NO: 3808120 - DNA, 25 bp, Homo sapien
gggaccaatgcgaatctcctaataa

SEQ ID NO: 3808121 - DNA, 25 bp, Homo sapien
tgacaacagttcgatcacccaacag

SEQ ID NO: 3808122 - DNA, 25 bp, Homo sapien
taattgccaagagtaccgtgctaac

SEQ ID NO: 3808123 - DNA, 25 bp, Homo sapien
gctccagtgtggtatagaatcagat

SEQ ID NO: 3808124 - DNA, 25 bp, Homo sapien
gggatccccattctatcaagtttag

SEQ ID NO: 3808125 - DNA, 25 bp, Homo sapien
gctgcaggaatcctcgtaaacttac

SEQ ID NO: 3808126 - DNA, 25 bp, Homo sapien
tcggcgactccccaaggaactgacg

SEQ ID NO: 3808127 - DNA, 25 bp, Homo sapien
gacacctgtcccttcgccacaatcg

SEQ ID NO: 3808128 - DNA, 25 bp, Homo sapien
tgtcccttcgccacaatcggcgact

SEQ ID NO: 3808129 - DNA, 25 bp, Homo sapien
cacgggcccagcagtcggggaggtc

SEQ ID NO: 3808130 - DNA, 25 bp, Homo sapien
cgtcacagcggggtgacgtcacggg

SEQ ID NO: 3808131 - DNA, 25 bp, Homo sapien
tacagcgtgcgcgtcacagcggggt

SEQ ID NO: 3808132 - DNA, 25 bp, Homo sapien
gaggtcaagccacggggcgcgggcc

SEQ ID NO: 3808133 - DNA, 25 bp, Homo sapien
cctctgcgcccgcatgcctgtgggc

SEQ ID NO: 3808134 - DNA, 25 bp, Homo sapien
catgcctgtgggcttcgccgaccgg

SEQ ID NO: 3808135 - DNA, 25 bp, Homo sapien
tctgcgcccgcatgcctgtgggctt

SEQ ID NO: 3808136 - DNA, 25 bp, Homo sapien
caggcgcagacggcctctgcgcccg

SEQ ID NO: 3808137 - DNA, 25 bp, Homo sapien
ggctcgacgcggctcccgctagact

SEQ ID NO: 3808138 - DNA, 25 bp, Homo sapien
gccatttgctctccatcaggtgctg

SEQ ID NO: 3808139 - DNA, 25 bp, Homo sapien
tccatcaggtgctggcgggtcctca

SEQ ID NO: 3808140 - DNA, 25 bp, Homo sapien
gggtcctcagccctgaaaagacagc

SEQ ID NO: 3808141 - DNA, 25 bp, Homo sapien
tgagacttcaggtctgtgaatggac

SEQ ID NO: 3808142 - DNA, 25 bp, Homo sapien
tgaatggactacatgggcctgtggg

SEQ ID NO: 3808143 - DNA, 25 bp, Homo sapien
taagaagtatgtgtgcccaggagag

SEQ ID NO: 3808144 - DNA, 25 bp, Homo sapien
aatcctgaggccagatctgactcag

SEQ ID NO: 3808145 - DNA, 25 bp, Homo sapien
tgtggaactgagacatttgctaaag

SEQ ID NO: 3808146 - DNA, 25 bp, Homo sapien
taaagtttctccattagttgatttc

SEQ ID NO: 3808147 - DNA, 25 bp, Homo sapien
gttgtggaactgagacatttgctaa

SEQ ID NO: 3808148 - DNA, 25 bp, Homo sapien
tctccattagttgatttcacctttg

SEQ ID NO: 3808149 - DNA, 25 bp, Homo sapien
ccaggaaatccatgttcactaagtt

SEQ ID NO: 3808150 - DNA, 25 bp, Homo sapien
ggaaatccatgttcactaagtttgg

SEQ ID NO: 3808151 - DNA, 25 bp, Homo sapien
aatccatgttcactaagtttggaga

SEQ ID NO: 3808152 - DNA, 25 bp, Homo sapien
catgttcactaagtttggagatggg

SEQ ID NO: 3808153 - DNA, 25 bp, Homo sapien
agccagcagctggtcttggctgttc

SEQ ID NO: 3808154 - DNA, 25 bp, Homo sapien
ctgggtggttaggtgtgctgtttcc

SEQ ID NO: 3808155 - DNA, 25 bp, Homo sapien
aaatgagatgtcagaactaatctct

SEQ ID NO: 3808156 - DNA, 25 bp, Homo sapien
cacaggatctgggtggttaggtgtg

SEQ ID NO: 3808157 - DNA, 25 bp, Homo sapien
ttgctcgaagttcatgatatcctac

SEQ ID NO: 3808158 - DNA, 25 bp, Homo sapien
tatcctacttctaagaggaccctgt

SEQ ID NO: 3808159 - DNA, 25 bp, Homo sapien
ttttctttgctcgaagttcatgata

SEQ ID NO: 3808160 - DNA, 25 bp, Homo sapien
tcatgatatcctacttctaagagga

SEQ ID NO: 3808161 - DNA, 25 bp, Homo sapien
tcttcagaaacttcacgcagacatc

SEQ ID NO: 3808162 - DNA, 25 bp, Homo sapien
cttgaagtttgagattgaattgagc

SEQ ID NO: 3808163 - DNA, 25 bp, Homo sapien
attgagcaggcctgaaacttaaacc

SEQ ID NO: 3808164 - DNA, 25 bp, Homo sapien
tctctaggcctccatacctcagtgg

SEQ ID NO: 3808165 - DNA, 25 bp, Homo sapien
cagtagttaatcctacggatttagg

SEQ ID NO: 3808166 - DNA, 25 bp, Homo sapien
ggccatcattccaagacctggactc

SEQ ID NO: 3808167 - DNA, 25 bp, Homo sapien
tctgctcttattgagggctgagccc

SEQ ID NO: 3808168 - DNA, 25 bp, Homo sapien
caactgatggatcccagcttgcagt

SEQ ID NO: 3808169 - DNA, 25 bp, Homo sapien
ctggactatgaatttgctgagggtc

SEQ ID NO: 3808170 - DNA, 25 bp, Homo sapien
gaaacactggactatgaatttgctg

SEQ ID NO: 3808171 - DNA, 25 bp, Homo sapien
tcagaggaggtgatgaaatcatgat

SEQ ID NO: 3808172 - DNA, 25 bp, Homo sapien
ggaggtgatgaaatcatgattagat

SEQ ID NO: 3808173 - DNA, 25 bp, Homo sapien
gaacagtccaccatgctgcttgctc

SEQ ID NO: 3808174 - DNA, 25 bp, Homo sapien
tggcaggcgaacagtccaccatgct

SEQ ID NO: 3808175 - DNA, 25 bp, Homo sapien
tgcttgctccaacaggcatgccagg

SEQ ID NO: 3808176 - DNA, 25 bp, Homo sapien
gatgtaaaagaagctggcaggcgaa

SEQ ID NO: 3808177 - DNA, 25 bp, Homo sapien
atctgcataatgggatgatgatctc

SEQ ID NO: 3808178 - DNA, 25 bp, Homo sapien
gcataatgggatgatgatctctgca

SEQ ID NO: 3808179 - DNA, 25 bp, Homo sapien
tgcataatgggatgatgatctctgc

SEQ ID NO: 3808180 - DNA, 25 bp, Homo sapien
tctgcataatgggatgatgatctct

SEQ ID NO: 3808181 - DNA, 25 bp, Homo sapien
tattctcgggttggtacaggtaaga

SEQ ID NO: 3808182 - DNA, 25 bp, Homo sapien
tttcccagctggtaagagacccagc

SEQ ID NO: 3808183 - DNA, 25 bp, Homo sapien
ccatcagagtgattgctgacatctg

SEQ ID NO: 3808184 - DNA, 25 bp, Homo sapien
ctgacatctggaatgttgttgttct

SEQ ID NO: 3808185 - DNA, 25 bp, Homo sapien
tcttaaagtaagtttcatgcctttc

SEQ ID NO: 3808186 - DNA, 25 bp, Homo sapien
cagtggtatggggatctcttgtgaa

SEQ ID NO: 3808187 - DNA, 25 bp, Homo sapien
tgggaaaatgctgccaacaggctta

SEQ ID NO: 3808188 - DNA, 25 bp, Homo sapien
ttgaaaactccctgggaaaatgctg

SEQ ID NO: 3808189 - DNA, 25 bp, Homo sapien
tgtttgatgtcaccgttctgcccct

SEQ ID NO: 3808190 - DNA, 25 bp, Homo sapien
tctgagattgtttcccgctacaccc

SEQ ID NO: 3808191 - DNA, 25 bp, Homo sapien
ctagttgcagggtttcagttttggg

SEQ ID NO: 3808192 - DNA, 25 bp, Homo sapien
catcaggtccttttgctagttgcag

SEQ ID NO: 3808193 - DNA, 25 bp, Homo sapien
ggtatgtggactatttggctccccg

SEQ ID NO: 3808194 - DNA, 25 bp, Homo sapien
ctctccgctgcggtatgtggactat

SEQ ID NO: 3808195 - DNA, 25 bp, Homo sapien
gagttcaaatgagtccccgtggacg

SEQ ID NO: 3808196 - DNA, 25 bp, Homo sapien
ggctccccgataagcacgagttcaa

SEQ ID NO: 3808197 - DNA, 25 bp, Homo sapien
caaatgtaggttccatagagatatt

SEQ ID NO: 3808198 - DNA, 25 bp, Homo sapien
cagggttgatccatctgtaaatgca

SEQ ID NO: 3808199 - DNA, 25 bp, Homo sapien
ttagggagctatcttctgatctcat

SEQ ID NO: 3808200 - DNA, 25 bp, Homo sapien
tccagggttgatccatctgtaaatg

SEQ ID NO: 3808201 - DNA, 25 bp, Homo sapien
gatggtgcaagtaatttaagataac

SEQ ID NO: 3808202 - DNA, 25 bp, Homo sapien
ggagttagatggtgcaagtaattta

SEQ ID NO: 3808203 - DNA, 25 bp, Homo sapien
ctttgtatagggagttagatggtgc

SEQ ID NO: 3808204 - DNA, 25 bp, Homo sapien
tatagggagttagatggtgcaagta

SEQ ID NO: 3808205 - DNA, 25 bp, Homo sapien
ttcttgctgattcagctttggaacc

SEQ ID NO: 3808206 - DNA, 25 bp, Homo sapien
cattttgtcccagaattggcttttc

SEQ ID NO: 3808207 - DNA, 25 bp, Homo sapien
gaactgattctgaggatagaagcaa

SEQ ID NO: 3808208 - DNA, 25 bp, Homo sapien
aaagaactgattctgaggatagaag

SEQ ID NO: 3808209 - DNA, 25 bp, Homo sapien
gggttgctttctgggaagatcctgc

SEQ ID NO: 3808210 - DNA, 25 bp, Homo sapien
attctgaggatagaagcaaagaggg

SEQ ID NO: 3808211 - DNA, 25 bp, Homo sapien
ctggggccactgatgagtattgagc

SEQ ID NO: 3808212 - DNA, 25 bp, Homo sapien
tgggatgtggccacatcagagctgg

SEQ ID NO: 3808213 - DNA, 25 bp, Homo sapien
atgaaaacatcatcttgggatgtgg

SEQ ID NO: 3808214 - DNA, 25 bp, Homo sapien
tgcagccactctggggccactgatg

SEQ ID NO: 3808215 - DNA, 25 bp, Homo sapien
tttcaggttcaggtccgtctagctc

SEQ ID NO: 3808216 - DNA, 25 bp, Homo sapien
caccaagagaacaggtaatggcagg

SEQ ID NO: 3808217 - DNA, 25 bp, Homo sapien
caccaagagtttctggggccctgaa

SEQ ID NO: 3808218 - DNA, 25 bp, Homo sapien
ggtccgtctagctcctgaaataatt

SEQ ID NO: 3808219 - DNA, 25 bp, Homo sapien
gccagctagtaacctgcagcgacag

SEQ ID NO: 3808220 - DNA, 25 bp, Homo sapien
tgctctgagccagctagtaacctgc

SEQ ID NO: 3808221 - DNA, 25 bp, Homo sapien
tgagccagctagtaacctgcagcga

SEQ ID NO: 3808222 - DNA, 25 bp, Homo sapien
cccagtcattgacaggggttctgct

SEQ ID NO: 3808223 - DNA, 25 bp, Homo sapien
tgcgtggccagctaaccaccttctg

SEQ ID NO: 3808224 - DNA, 25 bp, Homo sapien
tctgatcatatttgtggctctgtcg

SEQ ID NO: 3808225 - DNA, 25 bp, Homo sapien
gctctgtcggtgtcagccaaattat

SEQ ID NO: 3808226 - DNA, 25 bp, Homo sapien
cggtgtcagccaaattatgatgact

SEQ ID NO: 3808227 - DNA, 25 bp, Homo sapien
atgttgcctgaaccatgcttttcaa

SEQ ID NO: 3808228 - DNA, 25 bp, Homo sapien
ccacagactgatatattcttatgat

SEQ ID NO: 3808229 - DNA, 25 bp, Homo sapien
tcaaacatcgtgagctgagaagtca

SEQ ID NO: 3808230 - DNA, 25 bp, Homo sapien
tgtgcgtgaactttctgggctgaac

SEQ ID NO: 3808231 - DNA, 25 bp, Homo sapien
aaaagtccacgcactatttcattca

SEQ ID NO: 3808232 - DNA, 25 bp, Homo sapien
tgtagaatggggtctcacccatgtt

SEQ ID NO: 3808233 - DNA, 25 bp, Homo sapien
tggaaaagtccacgcactatttcat

SEQ ID NO: 3808234 - DNA, 25 bp, Homo sapien
tttttctggaaaagtccacgcacta

SEQ ID NO: 3808235 - DNA, 25 bp, Homo sapien
tgagtgaggactaatttcccagaga

SEQ ID NO: 3808236 - DNA, 25 bp, Homo sapien
caccagaacggttggaaggaattct

SEQ ID NO: 3808237 - DNA, 25 bp, Homo sapien
tacttctgggtggtatcaccagaac

SEQ ID NO: 3808238 - DNA, 25 bp, Homo sapien
acaaagatggctgcccttttttact

SEQ ID NO: 3808239 - DNA, 25 bp, Homo sapien
tcactcctgggttgggcaaaatgca

SEQ ID NO: 3808240 - DNA, 25 bp, Homo sapien
gttgggcaaaatgcatgggcccccg

SEQ ID NO: 3808241 - DNA, 25 bp, Homo sapien
ggcccccgacggcttagagaagctc

SEQ ID NO: 3808242 - DNA, 25 bp, Homo sapien
tgggcaaaatgcatgggcccccgac

SEQ ID NO: 3808243 - DNA, 25 bp, Homo sapien
tatgatctagcagtggaagcgcaac

SEQ ID NO: 3808244 - DNA, 25 bp, Homo sapien
ttttgatgtcaactgcccaggcagg

SEQ ID NO: 3808245 - DNA, 25 bp, Homo sapien
cagatgcaacgtgttttcagggagc

SEQ ID NO: 3808246 - DNA, 25 bp, Homo sapien
gcaggcaaggcacgacgaattttga

SEQ ID NO: 3808247 - DNA, 25 bp, Homo sapien
tgtccttgttttgctcgcgaggcct

SEQ ID NO: 3808248 - DNA, 25 bp, Homo sapien
cagacagaaatcgttgaggcgctga

SEQ ID NO: 3808249 - DNA, 25 bp, Homo sapien
tgggtggcctgctgttcagacagaa

SEQ ID NO: 3808250 - DNA, 25 bp, Homo sapien
taaggggagcagatgtccttgtttt

SEQ ID NO: 3808251 - DNA, 25 bp, Homo sapien
cgggggtgccggcagcttgagagaa

SEQ ID NO: 3808252 - DNA, 25 bp, Homo sapien
gtcaatctccgcgtgcagatggcca

SEQ ID NO: 3808253 - DNA, 25 bp, Homo sapien
tcgccgctcccctgcattggaaatg

SEQ ID NO: 3808254 - DNA, 25 bp, Homo sapien
actgctgtcaatctccgcgtgcaga

SEQ ID NO: 3808255 - DNA, 25 bp, Homo sapien
gatcatctgccgtctgaatccagcc

SEQ ID NO: 3808256 - DNA, 25 bp, Homo sapien
ccttgatcatctgccgtctgaatcc

SEQ ID NO: 3808257 - DNA, 25 bp, Homo sapien
ttgatcatctgccgtctgaatccag

SEQ ID NO: 3808258 - DNA, 25 bp, Homo sapien
tcccttgatcatctgccgtctgaat

SEQ ID NO: 3808259 - DNA, 25 bp, Homo sapien
tccaatgagagagacaaatgccatc

SEQ ID NO: 3808260 - DNA, 25 bp, Homo sapien
tagatttgatatcagggatggcctg

SEQ ID NO: 3808261 - DNA, 25 bp, Homo sapien
tgtccaggtaaaacagggtgctgag

SEQ ID NO: 3808262 - DNA, 25 bp, Homo sapien
catggaggcccactttagatttgat

SEQ ID NO: 3808263 - DNA, 25 bp, Homo sapien
agtccctgtccggatccattcggct

SEQ ID NO: 3808264 - DNA, 25 bp, Homo sapien
ttgctctccatgagagctgcgccct

SEQ ID NO: 3808265 - DNA, 25 bp, Homo sapien
tccagcttgctctccatgagagctg

SEQ ID NO: 3808266 - DNA, 25 bp, Homo sapien
tccggatccattcggcttggccctg

SEQ ID NO: 3808267 - DNA, 25 bp, Homo sapien
cacacctgcagtatacggatgaata

SEQ ID NO: 3808268 - DNA, 25 bp, Homo sapien
tggcacacctgcagtatacggatga

SEQ ID NO: 3808269 - DNA, 25 bp, Homo sapien
tgcagtatacggatgaataagacat

SEQ ID NO: 3808270 - DNA, 25 bp, Homo sapien
cacctgcagtatacggatgaataag

SEQ ID NO: 3808271 - DNA, 25 bp, Homo sapien
tggagacagtaacagccaggcatcg

SEQ ID NO: 3808272 - DNA, 25 bp, Homo sapien
tgagataataaagcgtatggtgaca

SEQ ID NO: 3808273 - DNA, 25 bp, Homo sapien
ccaggcatcggtctttttgagataa

SEQ ID NO: 3808274 - DNA, 25 bp, Homo sapien
gtgacatttgacctaggtcttgaag

SEQ ID NO: 3808275 - DNA, 25 bp, Homo sapien
cacagggtcgtgagagacttcccat

SEQ ID NO: 3808276 - DNA, 25 bp, Homo sapien
cgccaagccacagggtcgtgagaga

SEQ ID NO: 3808277 - DNA, 25 bp, Homo sapien
aagttcaggcctcttccccgccaag

SEQ ID NO: 3808278 - DNA, 25 bp, Homo sapien
gaaaagccagctgtatcaagttcag

SEQ ID NO: 3808279 - DNA, 25 bp, Homo sapien
tgatgcatgacgcagaagatcaggg

SEQ ID NO: 3808280 - DNA, 25 bp, Homo sapien
tactggagaaccatgatgcatgacg

SEQ ID NO: 3808281 - DNA, 25 bp, Homo sapien
agtcacactggttgtgaagagtagg

SEQ ID NO: 3808282 - DNA, 25 bp, Homo sapien
gagtaggagctactggagaaccatg

SEQ ID NO: 3808283 - DNA, 25 bp, Homo sapien
gcagggccgaacttgggttgccatc

SEQ ID NO: 3808284 - DNA, 25 bp, Homo sapien
tattgccaacgatgtgtgcccaggg

SEQ ID NO: 3808285 - DNA, 25 bp, Homo sapien
cctgaaatccttgaacgggaaactg

SEQ ID NO: 3808286 - DNA, 25 bp, Homo sapien
gctccttcgccagtttgctgcctga

SEQ ID NO: 3808287 - DNA, 25 bp, Homo sapien
ctgatataagaactctatgccaatg

SEQ ID NO: 3808288 - DNA, 25 bp, Homo sapien
aactctatgccaatgtgatgggaga

SEQ ID NO: 3808289 - DNA, 25 bp, Homo sapien
gatataagaactctatgccaatgtg

SEQ ID NO: 3808290 - DNA, 25 bp, Homo sapien
taagaactctatgccaatgtgatgg

SEQ ID NO: 3808291 - DNA, 25 bp, Homo sapien
tataactgttagattattcaaccct

SEQ ID NO: 3808292 - DNA, 25 bp, Homo sapien
tccttcagatccgtcaatatttact

SEQ ID NO: 3808293 - DNA, 25 bp, Homo sapien
tagtctagagcattattcagtcagc

SEQ ID NO: 3808294 - DNA, 25 bp, Homo sapien
gaaaatgaggcagtgaattctccta

SEQ ID NO: 3808295 - DNA, 25 bp, Homo sapien
tatctttgcaatcctctggtaaacc

SEQ ID NO: 3808296 - DNA, 25 bp, Homo sapien
gagccatggatagtgttgctttgca

SEQ ID NO: 3808297 - DNA, 25 bp, Homo sapien
taaagtcgtgtgagtctcaggccag

SEQ ID NO: 3808298 - DNA, 25 bp, Homo sapien
gttaccaacaaacattgagccatgg

SEQ ID NO: 3808299 - DNA, 25 bp, Homo sapien
tcacatgtcgaaagtaattggtccc

SEQ ID NO: 3808300 - DNA, 25 bp, Homo sapien
aagattcagggagcatggttttcat

SEQ ID NO: 3808301 - DNA, 25 bp, Homo sapien
gagtctccgaacgatggtgcaccta

SEQ ID NO: 3808302 - DNA, 25 bp, Homo sapien
tcacatagatagctggaagattcag

SEQ ID NO: 3808303 - DNA, 25 bp, Homo sapien
gcccaggtatgtaaggacgtcagga

SEQ ID NO: 3808304 - DNA, 25 bp, Homo sapien
catatgcgggatacatcatggtgca

SEQ ID NO: 3808305 - DNA, 25 bp, Homo sapien
gatggctaaatacctccttggctgg

SEQ ID NO: 3808306 - DNA, 25 bp, Homo sapien
tgtctgagccatggagttaaggccc

SEQ ID NO: 3808307 - DNA, 25 bp, Homo sapien
tggtgtaattcagccctccgatgag

SEQ ID NO: 3808308 - DNA, 25 bp, Homo sapien
ggaatatagctcagaaaaaactgct

SEQ ID NO: 3808309 - DNA, 25 bp, Homo sapien
ttctgcatgtctacattgccaaggg

SEQ ID NO: 3808310 - DNA, 25 bp, Homo sapien
gatgagtcgtgcacaggattttccc

SEQ ID NO: 3808311 - DNA, 25 bp, Homo sapien
agcttccaattatggcagaaggtga

SEQ ID NO: 3808312 - DNA, 25 bp, Homo sapien
agaaggtgaagggggagcaggtaca

SEQ ID NO: 3808313 - DNA, 25 bp, Homo sapien
ggtgaagggggagcaggtacatcac

SEQ ID NO: 3808314 - DNA, 25 bp, Homo sapien
aagcttccaattatggcagaaggtg

SEQ ID NO: 3808315 - DNA, 25 bp, Homo sapien
caaaaggcgctaggaatagcaggcg

SEQ ID NO: 3808316 - DNA, 25 bp, Homo sapien
gaagcaggtgtctatactgccctct

SEQ ID NO: 3808317 - DNA, 25 bp, Homo sapien
tctgtttggtcctgcagtatagcac

SEQ ID NO: 3808318 - DNA, 25 bp, Homo sapien
cagcagcactatcagcgaagcaggt

SEQ ID NO: 3808319 - DNA, 25 bp, Homo sapien
tgctgttcctaatcacacctgaggt

SEQ ID NO: 3808320 - DNA, 25 bp, Homo sapien
gatcacggagttcagggagacaact

SEQ ID NO: 3808321 - DNA, 25 bp, Homo sapien
tgaggttgttccacgccatttcccg

SEQ ID NO: 3808322 - DNA, 25 bp, Homo sapien
taaaatgcatgaactgcagggtgcc

SEQ ID NO: 3808323 - DNA, 25 bp, Homo sapien
cactgtcctggaaaccgactatagt

SEQ ID NO: 3808324 - DNA, 25 bp, Homo sapien
gcagcgaaggttgcagaggtcacac

SEQ ID NO: 3808325 - DNA, 25 bp, Homo sapien
gtatcaagctggttgaccccggcag

SEQ ID NO: 3808326 - DNA, 25 bp, Homo sapien
tcactccctggcacttcgtatcaag

SEQ ID NO: 3808327 - DNA, 25 bp, Homo sapien
tgttttttgattgtctaactctctg

SEQ ID NO: 3808328 - DNA, 25 bp, Homo sapien
ggcatatattgctcatagaattctc

SEQ ID NO: 3808329 - DNA, 25 bp, Homo sapien
accagtgaagccatcaagtcaagga

SEQ ID NO: 3808330 - DNA, 25 bp, Homo sapien
tctctgtgatacagtcttggtaagt

SEQ ID NO: 3808331 - DNA, 25 bp, Homo sapien
ggaaaaatgcctgccaagaatgctg

SEQ ID NO: 3808332 - DNA, 25 bp, Homo sapien
cctccaaagggcatgcagcaattct

SEQ ID NO: 3808333 - DNA, 25 bp, Homo sapien
agaaatacagggttcctctgtggcc

SEQ ID NO: 3808334 - DNA, 25 bp, Homo sapien
cagcaattctgtggttggacaagga

SEQ ID NO: 3808335 - DNA, 25 bp, Homo sapien
gtttcctcgtgctcctcaagaccga

SEQ ID NO: 3808336 - DNA, 25 bp, Homo sapien
aagaccgaggtctcaggcaatcgtg

SEQ ID NO: 3808337 - DNA, 25 bp, Homo sapien
ggcaatcgtgttcctgctacactgg

SEQ ID NO: 3808338 - DNA, 25 bp, Homo sapien
ataattgtatggtcacgtaaccaca

SEQ ID NO: 3808339 - DNA, 25 bp, Homo sapien
tgtgtggctgctcatggctagccta

SEQ ID NO: 3808340 - DNA, 25 bp, Homo sapien
tcatgccgtctcacaaatatgattt

SEQ ID NO: 3808341 - DNA, 25 bp, Homo sapien
catggctagcctacttctactttga

SEQ ID NO: 3808342 - DNA, 25 bp, Homo sapien
caacagaatttcatgccgtctcaca

SEQ ID NO: 3808343 - DNA, 25 bp, Homo sapien
tataaactatacatgggaaaacaga

SEQ ID NO: 3808344 - DNA, 25 bp, Homo sapien
tatataactggcttaggaaatgaca

SEQ ID NO: 3808345 - DNA, 25 bp, Homo sapien
gagaaacatagcagtcaagtgaaaa

SEQ ID NO: 3808346 - DNA, 25 bp, Homo sapien
tacctgtatcaggaaaatgtatgtg

SEQ ID NO: 3808347 - DNA, 25 bp, Homo sapien
cagagttctgagtccataccacctt

SEQ ID NO: 3808348 - DNA, 25 bp, Homo sapien
tgggcatgtatttgtctcctcagac

SEQ ID NO: 3808349 - DNA, 25 bp, Homo sapien
taccaccttcatgcactgcagtagg

SEQ ID NO: 3808350 - DNA, 25 bp, Homo sapien
gggataactgttttgactctaggta

SEQ ID NO: 3808351 - DNA, 25 bp, Homo sapien
aagcttagcagggaggtacaggcca

SEQ ID NO: 3808352 - DNA, 25 bp, Homo sapien
ggtacttgtccacagtttggcccaa

SEQ ID NO: 3808353 - DNA, 25 bp, Homo sapien
tgacctgattcggtaggcgactgaa

SEQ ID NO: 3808354 - DNA, 25 bp, Homo sapien
tattggctacgtactccactaggtg

SEQ ID NO: 3808355 - DNA, 25 bp, Homo sapien
gatcccacggttctacgcgaggaag

SEQ ID NO: 3808356 - DNA, 25 bp, Homo sapien
ccttaaggtcctgcacggcgatgac

SEQ ID NO: 3808357 - DNA, 25 bp, Homo sapien
gctctactaaggaggctgctggcaa

SEQ ID NO: 3808358 - DNA, 25 bp, Homo sapien
gcgatgaccgctcatttaggaagga

SEQ ID NO: 3808359 - DNA, 25 bp, Homo sapien
gctgcgcgggtcaggtagcctctct

SEQ ID NO: 3808360 - DNA, 25 bp, Homo sapien
gggagtccagaccgcgatccctttc

SEQ ID NO: 3808361 - DNA, 25 bp, Homo sapien
cgtgggactgatggtagccctgcct

SEQ ID NO: 3808362 - DNA, 25 bp, Homo sapien
gcacagggtacagggagaatcagcc

SEQ ID NO: 3808363 - DNA, 25 bp, Homo sapien
ctttccaactccgacagcccgtcgc

SEQ ID NO: 3808364 - DNA, 25 bp, Homo sapien
ctccgacagcccgtcgcctttctga

SEQ ID NO: 3808365 - DNA, 25 bp, Homo sapien
tcgcctttctgaccgcgtccctacg

SEQ ID NO: 3808366 - DNA, 25 bp, Homo sapien
agcccgtcgcctttctgaccgcgtc

SEQ ID NO: 3808367 - DNA, 25 bp, Homo sapien
ttccctcgcccctcaattcaaattc

SEQ ID NO: 3808368 - DNA, 25 bp, Homo sapien
agtgcccacggttgccgcaaaccgc

SEQ ID NO: 3808369 - DNA, 25 bp, Homo sapien
ggttccggccgtagagcgagagcct

SEQ ID NO: 3808370 - DNA, 25 bp, Homo sapien
gcaaaccgcccggtccctagcaaca

SEQ ID NO: 3808371 - DNA, 25 bp, Homo sapien
cacttttctggtcccgggtggagcg

SEQ ID NO: 3808372 - DNA, 25 bp, Homo sapien
gcgctgaccgtgcaaagtggcttcc

SEQ ID NO: 3808373 - DNA, 25 bp, Homo sapien
ccgggagccgcggaacaaacttgtg

SEQ ID NO: 3808374 - DNA, 25 bp, Homo sapien
gccgggacgcactggccacttttct

SEQ ID NO: 3808375 - DNA, 25 bp, Homo sapien
tctgcgccgggatgggccggtgtgc

SEQ ID NO: 3808376 - DNA, 25 bp, Homo sapien
gaagttgttacctgggccggacgca

SEQ ID NO: 3808377 - DNA, 25 bp, Homo sapien
cctcccggggcagacgaggtctctg

SEQ ID NO: 3808378 - DNA, 25 bp, Homo sapien
gcgcctcgcgcttttctctttcggt

SEQ ID NO: 3808379 - DNA, 25 bp, Homo sapien
tctgctgattgttattgtctggaca

SEQ ID NO: 3808380 - DNA, 25 bp, Homo sapien
gcacagtcgccttttccagtttgga

SEQ ID NO: 3808381 - DNA, 25 bp, Homo sapien
ccagtttggagagacgttgtaagtt

SEQ ID NO: 3808382 - DNA, 25 bp, Homo sapien
tctcgtgcagcagcgaaatgtctgc

SEQ ID NO: 3808383 - DNA, 25 bp, Homo sapien
ttgtataataatgggcggcaacggc

SEQ ID NO: 3808384 - DNA, 25 bp, Homo sapien
attacacgtacatttcggaccgagg

SEQ ID NO: 3808385 - DNA, 25 bp, Homo sapien
cccaggctatataaggaattacacg

SEQ ID NO: 3808386 - DNA, 25 bp, Homo sapien
tgtttgtataataatgggcggcaac

SEQ ID NO: 3808387 - DNA, 25 bp, Homo sapien
gggcaataaatgcgtctataatggg

SEQ ID NO: 3808388 - DNA, 25 bp, Homo sapien
aataaatgcgtctataatgggaccg

SEQ ID NO: 3808389 - DNA, 25 bp, Homo sapien
agaggggcaataaatgcgtctataa

SEQ ID NO: 3808390 - DNA, 25 bp, Homo sapien
caataaatgcgtctataatgggacc

SEQ ID NO: 3808391 - DNA, 25 bp, Homo sapien
tcttgttgctgacgacatgtgtgtg

SEQ ID NO: 3808392 - DNA, 25 bp, Homo sapien
atttaaaatgttgatcgccagagaa

SEQ ID NO: 3808393 - DNA, 25 bp, Homo sapien
ttttcttgttgctgacgacatgtgt

SEQ ID NO: 3808394 - DNA, 25 bp, Homo sapien
tgttgctgacgacatgtgtgtgaca

SEQ ID NO: 3808395 - DNA, 25 bp, Homo sapien
gtgcagctgctgtaaacatgtttac

SEQ ID NO: 3808396 - DNA, 25 bp, Homo sapien
aaccacccagcgtctgtgcagctgc

SEQ ID NO: 3808397 - DNA, 25 bp, Homo sapien
gtgagtctgaaccacccagcgtctg

SEQ ID NO: 3808398 - DNA, 25 bp, Homo sapien
gagtctgaaccacccagcgtctgtg

SEQ ID NO: 3808399 - DNA, 25 bp, Homo sapien
tatgaatattacactcgtaaggcat

SEQ ID NO: 3808400 - DNA, 25 bp, Homo sapien
tgagatcctgtgatatgaatattac

SEQ ID NO: 3808401 - DNA, 25 bp, Homo sapien
gggggaaaagcgatcctgaaagata

SEQ ID NO: 3808402 - DNA, 25 bp, Homo sapien
tcttgatcgctgcagcaaatggcaa

SEQ ID NO: 3808403 - DNA, 25 bp, Homo sapien
agaggttcttgatcgctgcagcaaa

SEQ ID NO: 3808404 - DNA, 25 bp, Homo sapien
aaagagaggttcttgatcgctgcag

SEQ ID NO: 3808405 - DNA, 25 bp, Homo sapien
tgcgtctgtttagcacaaaacgtct

SEQ ID NO: 3808406 - DNA, 25 bp, Homo sapien
tctgtttagcacaaaacgtcttgtc

SEQ ID NO: 3808407 - DNA, 25 bp, Homo sapien
gaaaaacagatttgcgtctgtttag

SEQ ID NO: 3808408 - DNA, 25 bp, Homo sapien
gatttgcgtctgtttagcacaaaac

SEQ ID NO: 3808409 - DNA, 25 bp, Homo sapien
tagattttctgaacctgggctcagg

SEQ ID NO: 3808410 - DNA, 25 bp, Homo sapien
catgtagtgaaatccttcaaggagt

SEQ ID NO: 3808411 - DNA, 25 bp, Homo sapien
tacttgaaaaggctgtcaaaatcac

SEQ ID NO: 3808412 - DNA, 25 bp, Homo sapien
gaaaactgacacagataagctgaaa

SEQ ID NO: 3808413 - DNA, 25 bp, Homo sapien
tattgtatgcaaggtaatgagaccc

SEQ ID NO: 3808414 - DNA, 25 bp, Homo sapien
cgcctggcccgaagtgttaaattct

SEQ ID NO: 3808415 - DNA, 25 bp, Homo sapien
gagagatgtagtaccttgccctaag

SEQ ID NO: 3808416 - DNA, 25 bp, Homo sapien
taattccatttatctgggcctatgt

SEQ ID NO: 3808417 - DNA, 25 bp, Homo sapien
catattgtgggactcaagtcacgtt

SEQ ID NO: 3808418 - DNA, 25 bp, Homo sapien
tgtgggttatcctagtaaaatatcc

SEQ ID NO: 3808419 - DNA, 25 bp, Homo sapien
taaaactgtagggtgagcggaagaa

SEQ ID NO: 3808420 - DNA, 25 bp, Homo sapien
tatgtgcaaaggcataacacacatg

SEQ ID NO: 3808421 - DNA, 25 bp, Homo sapien
ctagaccttactcttacggtacagt

SEQ ID NO: 3808422 - DNA, 25 bp, Homo sapien
tctggatatagaatctttcgtagtg

SEQ ID NO: 3808423 - DNA, 25 bp, Homo sapien
ggtacagttgctctggaaatctctt

SEQ ID NO: 3808424 - DNA, 25 bp, Homo sapien
tactcttacggtacagttgctctgg

SEQ ID NO: 3808425 - DNA, 25 bp, Homo sapien
ggctcttgtcgcttcccagacaggg

SEQ ID NO: 3808426 - DNA, 25 bp, Homo sapien
aggctcttgtcgcttcccagacagg

SEQ ID NO: 3808427 - DNA, 25 bp, Homo sapien
cagatggtgcggtggccgggcacag

SEQ ID NO: 3808428 - DNA, 25 bp, Homo sapien
agatggtgcggtggccgggcacagg

SEQ ID NO: 3808429 - DNA, 25 bp, Homo sapien
cattatggagttgtgaggagacagc

SEQ ID NO: 3808430 - DNA, 25 bp, Homo sapien
gtccaaacattatggagttgtgagg

SEQ ID NO: 3808431 - DNA, 25 bp, Homo sapien
caaacattatggagttgtgaggaga

SEQ ID NO: 3808432 - DNA, 25 bp, Homo sapien
aacattatggagttgtgaggagaca

SEQ ID NO: 3808433 - DNA, 25 bp, Homo sapien
caggaacaaaatacgcttagcgagt

SEQ ID NO: 3808434 - DNA, 25 bp, Homo sapien
gaacaaaatacgcttagcgagttgc

SEQ ID NO: 3808435 - DNA, 25 bp, Homo sapien
ctgcggcagaaccaggaacaaaata

SEQ ID NO: 3808436 - DNA, 25 bp, Homo sapien
aaaatacgcttagcgagttgcccat

SEQ ID NO: 3808437 - DNA, 25 bp, Homo sapien
agctctcactgtctaccatctcctt

SEQ ID NO: 3808438 - DNA, 25 bp, Homo sapien
tttatagctctcactgtctaccatc

SEQ ID NO: 3808439 - DNA, 25 bp, Homo sapien
tatagctctcactgtctaccatctc

SEQ ID NO: 3808440 - DNA, 25 bp, Homo sapien
tttttatagctctcactgtctacca

SEQ ID NO: 3808441 - DNA, 25 bp, Homo sapien
tactgtctgcttgacataggaaagc

SEQ ID NO: 3808442 - DNA, 25 bp, Homo sapien
ggcaattggccgaaaactcccatct

SEQ ID NO: 3808443 - DNA, 25 bp, Homo sapien
tcaactggcaattggccgaaaactc

SEQ ID NO: 3808444 - DNA, 25 bp, Homo sapien
gtcattttgtgatttggctactgtc

SEQ ID NO: 3808445 - DNA, 25 bp, Homo sapien
gtaacgtgctttggaatgtacatga

SEQ ID NO: 3808446 - DNA, 25 bp, Homo sapien
cttccagaaagagtgtcttgaagaa

SEQ ID NO: 3808447 - DNA, 25 bp, Homo sapien
aatatattccttcctgggtaacgtg

SEQ ID NO: 3808448 - DNA, 25 bp, Homo sapien
agagtgtcttgaagaaatatattcc

SEQ ID NO: 3808449 - DNA, 25 bp, Homo sapien
tttggttctgtttagttggctttga

SEQ ID NO: 3808450 - DNA, 25 bp, Homo sapien
agattctgttgaatcccctaaaatt

SEQ ID NO: 3808451 - DNA, 25 bp, Homo sapien
gagattctgttgaatcccctaaaat

SEQ ID NO: 3808452 - DNA, 25 bp, Homo sapien
gattctgttgaatcccctaaaatta

SEQ ID NO: 3808453 - DNA, 25 bp, Homo sapien
ttgacctggcaacggtgtttaacac

SEQ ID NO: 3808454 - DNA, 25 bp, Homo sapien
tgttttagaagacaccacttaaggc

SEQ ID NO: 3808455 - DNA, 25 bp, Homo sapien
tagtgacttcatatagtaccatggc

SEQ ID NO: 3808456 - DNA, 25 bp, Homo sapien
taatgactgccatgctgccaatcag

SEQ ID NO: 3808457 - DNA, 25 bp, Homo sapien
tgttgacttaacttcagtccattct

SEQ ID NO: 3808458 - DNA, 25 bp, Homo sapien
aatataagccatattatgtcactct

SEQ ID NO: 3808459 - DNA, 25 bp, Homo sapien
aaagcctcctgtaattggtcttcct

SEQ ID NO: 3808460 - DNA, 25 bp, Homo sapien
ctgtattgatgcaaaaagcctcctg

SEQ ID NO: 3808461 - DNA, 25 bp, Homo sapien
gtctgaaaagcgcaatattcgggtg

SEQ ID NO: 3808462 - DNA, 25 bp, Homo sapien
ctgaaaagcgcaatattcgggtggg

SEQ ID NO: 3808463 - DNA, 25 bp, Homo sapien
tcatggtgcgccattttttaagcca

SEQ ID NO: 3808464 - DNA, 25 bp, Homo sapien
atatagtctcatggtgcgccatttt

SEQ ID NO: 3808465 - DNA, 25 bp, Homo sapien
gaagtgtggctgtgaacctaaaaat

SEQ ID NO: 3808466 - DNA, 25 bp, Homo sapien
gttttggatagagctattgtatgcc

SEQ ID NO: 3808467 - DNA, 25 bp, Homo sapien
cagtgtttaccacaacagtgtttat

SEQ ID NO: 3808468 - DNA, 25 bp, Homo sapien
tgtatgcctcattgtccagactttt

SEQ ID NO: 3808469 - DNA, 25 bp, Homo sapien
ggcaatggcgtggaacactctagat

SEQ ID NO: 3808470 - DNA, 25 bp, Homo sapien
tgttaaaaagatagaccctcctgca

SEQ ID NO: 3808471 - DNA, 25 bp, Homo sapien
gcttacataagaacgtgctgcccaa

SEQ ID NO: 3808472 - DNA, 25 bp, Homo sapien
cctgcagggttatttggcttacata

SEQ ID NO: 3808473 - DNA, 25 bp, Homo sapien
agaatttctctacagaaacgaaagg

SEQ ID NO: 3808474 - DNA, 25 bp, Homo sapien
ggacatgctattgttatttggctca

SEQ ID NO: 3808475 - DNA, 25 bp, Homo sapien
gaaacactgggacatttcatccttc

SEQ ID NO: 3808476 - DNA, 25 bp, Homo sapien
tgactctgtcagagaaactgaaaca

SEQ ID NO: 3808477 - DNA, 25 bp, Homo sapien
tttgagtatctggtatgagcgtgca

SEQ ID NO: 3808478 - DNA, 25 bp, Homo sapien
ggcactatgacttcatggtgtagac

SEQ ID NO: 3808479 - DNA, 25 bp, Homo sapien
tctgggcaaaatagtatggacttgt

SEQ ID NO: 3808480 - DNA, 25 bp, Homo sapien
gcgtgcatggcagatctttaaataa

SEQ ID NO: 3808481 - DNA, 25 bp, Homo sapien
gctgtgtccccttggcttcccttag

SEQ ID NO: 3808482 - DNA, 25 bp, Homo sapien
aaggagtagtaattcctctgtggct

SEQ ID NO: 3808483 - DNA, 25 bp, Homo sapien
tgtccccttggcttcccttagcatt

SEQ ID NO: 3808484 - DNA, 25 bp, Homo sapien
tgtggctgaagctgtaggtgttcca

SEQ ID NO: 3808485 - DNA, 25 bp, Homo sapien
gaaggtccctttccaatttgctcca

SEQ ID NO: 3808486 - DNA, 25 bp, Homo sapien
tattcccacgggaagaactcgttgc

SEQ ID NO: 3808487 - DNA, 25 bp, Homo sapien
cattcgggagtttcttattcccacg

SEQ ID NO: 3808488 - DNA, 25 bp, Homo sapien
ttgccatggcgatgtgcgcctccca

SEQ ID NO: 3808489 - DNA, 25 bp, Homo sapien
ctggaagcgaaatccttgcctgggc

SEQ ID NO: 3808490 - DNA, 25 bp, Homo sapien
ggttcacctagccctctgggataag

SEQ ID NO: 3808491 - DNA, 25 bp, Homo sapien
gttcacctagccctctgggataagg

SEQ ID NO: 3808492 - DNA, 25 bp, Homo sapien
ggggttcacctagccctctgggata

SEQ ID NO: 3808493 - DNA, 25 bp, Homo sapien
gggttcacctagccctctgggataa

SEQ ID NO: 3808494 - DNA, 25 bp, Homo sapien
gaagctttaacctcgcctgctccat

SEQ ID NO: 3808495 - DNA, 25 bp, Homo sapien
tctctagttcgggagcgttggatga

SEQ ID NO: 3808496 - DNA, 25 bp, Homo sapien
cctcaagccagatgccgtctctagt

SEQ ID NO: 3808497 - DNA, 25 bp, Homo sapien
ttcttaaagtgtctggaacgaagct

SEQ ID NO: 3808498 - DNA, 25 bp, Homo sapien
gactgtccacggacagctgtcctct

SEQ ID NO: 3808499 - DNA, 25 bp, Homo sapien
gcagagtcagtccatccaataggca

SEQ ID NO: 3808500 - DNA, 25 bp, Homo sapien
acagctgtcctctcgcccaggagag

SEQ ID NO: 3808501 - DNA, 25 bp, Homo sapien
ccaataggcaggagcccaaaagact

SEQ ID NO: 3808502 - DNA, 25 bp, Homo sapien
gctgaagtgtgtggtcagaaattgc

SEQ ID NO: 3808503 - DNA, 25 bp, Homo sapien
aaagctgaagtgtgtggtcagaaat

SEQ ID NO: 3808504 - DNA, 25 bp, Homo sapien
gaagtgtgtggtcagaaattgcatg

SEQ ID NO: 3808505 - DNA, 25 bp, Homo sapien
gaaaagctgaagtgtgtggtcagaa

SEQ ID NO: 3808506 - DNA, 25 bp, Homo sapien
ttcctcgatcgcttcagacctggca

SEQ ID NO: 3808507 - DNA, 25 bp, Homo sapien
caaagttgacatcccgaaaggccat

SEQ ID NO: 3808508 - DNA, 25 bp, Homo sapien
caccctgggtgtatcggatggcctc

SEQ ID NO: 3808509 - DNA, 25 bp, Homo sapien
gaaagccagggttactccttccagc

SEQ ID NO: 3808510 - DNA, 25 bp, Homo sapien
ttcctgaggggtcatctcccttggg

SEQ ID NO: 3808511 - DNA, 25 bp, Homo sapien
ctgaggggtcatctcccttgggcat

SEQ ID NO: 3808512 - DNA, 25 bp, Homo sapien
cctgaggggtcatctcccttgggca

SEQ ID NO: 3808513 - DNA, 25 bp, Homo sapien
tcttcctgaggggtcatctcccttg

SEQ ID NO: 3808514 - DNA, 25 bp, Homo sapien
ctggcgacccttgttccatcacttc

SEQ ID NO: 3808515 - DNA, 25 bp, Homo sapien
tggcgacccttgttccatcacttcc

SEQ ID NO: 3808516 - DNA, 25 bp, Homo sapien
cagttggaccttgcatatcttgatg

SEQ ID NO: 3808517 - DNA, 25 bp, Homo sapien
cataatcatatcagtgttaaggacc

SEQ ID NO: 3808518 - DNA, 25 bp, Homo sapien
caatgactacctcaagttctctggg

SEQ ID NO: 3808519 - DNA, 25 bp, Homo sapien
tttagtagcacataaagctgggact

SEQ ID NO: 3808520 - DNA, 25 bp, Homo sapien
catcttgatgaatgggcactgcaca

SEQ ID NO: 3808521 - DNA, 25 bp, Homo sapien
gaaacagtaatcacattgagcaccg

SEQ ID NO: 3808522 - DNA, 25 bp, Homo sapien
catggcccgaatgaaggtggattgc

SEQ ID NO: 3808523 - DNA, 25 bp, Homo sapien
gagccccagggattcactaagaaac

SEQ ID NO: 3808524 - DNA, 25 bp, Homo sapien
cacaccagctccaagaggcccctct

SEQ ID NO: 3808525 - DNA, 25 bp, Homo sapien
accagctccaagaggcccctctctg

SEQ ID NO: 3808526 - DNA, 25 bp, Homo sapien
ttggacacaactgcttgggaggccc

SEQ ID NO: 3808527 - DNA, 25 bp, Homo sapien
tggacacaactgcttgggaggcccc

SEQ ID NO: 3808528 - DNA, 25 bp, Homo sapien
actatgaactttgtgtccatcctgg

SEQ ID NO: 3808529 - DNA, 25 bp, Homo sapien
tgccatctattggcacctgtgtctg

SEQ ID NO: 3808530 - DNA, 25 bp, Homo sapien
ctccctcactatgaactttgtgtcc

SEQ ID NO: 3808531 - DNA, 25 bp, Homo sapien
tgaactttgtgtccatcctggcccc

SEQ ID NO: 3808532 - DNA, 25 bp, Homo sapien
tctccatgaggtgctcgagggtcat

SEQ ID NO: 3808533 - DNA, 25 bp, Homo sapien
ctctctccatgaggtgctcgagggt

SEQ ID NO: 3808534 - DNA, 25 bp, Homo sapien
ggaggccgccatgtgcccatgcttg

SEQ ID NO: 3808535 - DNA, 25 bp, Homo sapien
aaggacaccaaggaggaggccgcca

SEQ ID NO: 3808536 - DNA, 25 bp, Homo sapien
atctgagtcaggctgtgctaacagc

SEQ ID NO: 3808537 - DNA, 25 bp, Homo sapien
cacaagccagaaccatgatccctct

SEQ ID NO: 3808538 - DNA, 25 bp, Homo sapien
taacagctccgttttggagccaagc

SEQ ID NO: 3808539 - DNA, 25 bp, Homo sapien
cctctggaaaaggtcgactccacag

SEQ ID NO: 3808540 - DNA, 25 bp, Homo sapien
aagctagctgcagaacgcaaggcct

SEQ ID NO: 3808541 - DNA, 25 bp, Homo sapien
gaagctagctgcagaacgcaaggcc

SEQ ID NO: 3808542 - DNA, 25 bp, Homo sapien
cattatctaatgagtcaggagggaa

SEQ ID NO: 3808543 - DNA, 25 bp, Homo sapien
ccattatctaatgagtcaggaggga

SEQ ID NO: 3808544 - DNA, 25 bp, Homo sapien
tgcagtcatccacttcttcgttcta

SEQ ID NO: 3808545 - DNA, 25 bp, Homo sapien
agtcatccacttcttcgttctacct

SEQ ID NO: 3808546 - DNA, 25 bp, Homo sapien
gcagtcatccacttcttcgttctac

SEQ ID NO: 3808547 - DNA, 25 bp, Homo sapien
tttgcagtcatccacttcttcgttc

SEQ ID NO: 3808548 - DNA, 25 bp, Homo sapien
ccctaacagggtcctgactgtagca

SEQ ID NO: 3808549 - DNA, 25 bp, Homo sapien
cctgactgtagcagagaagacctac

SEQ ID NO: 3808550 - DNA, 25 bp, Homo sapien
cactccttccctaacagggtcctga

SEQ ID NO: 3808551 - DNA, 25 bp, Homo sapien
tccttccctaacagggtcctgactg

SEQ ID NO: 3808552 - DNA, 25 bp, Homo sapien
caatccaatttgggcctggttttca

SEQ ID NO: 3808553 - DNA, 25 bp, Homo sapien
tccaatttgggcctggttttcagca

SEQ ID NO: 3808554 - DNA, 25 bp, Homo sapien
ctttacaatccaatttgggcctggt

SEQ ID NO: 3808555 - DNA, 25 bp, Homo sapien
ccaatttgggcctggttttcagcat

SEQ ID NO: 3808556 - DNA, 25 bp, Homo sapien
tctggaaagacggagcagcgtaagt

SEQ ID NO: 3808557 - DNA, 25 bp, Homo sapien
ggccattgagtgcaggtttttctcc

SEQ ID NO: 3808558 - DNA, 25 bp, Homo sapien
cggagcagcgtaagttgcaaggcca

SEQ ID NO: 3808559 - DNA, 25 bp, Homo sapien
catttcatgtttagccaagcaccct

SEQ ID NO: 3808560 - DNA, 25 bp, Homo sapien
cagactcagatgttttgtctatttc

SEQ ID NO: 3808561 - DNA, 25 bp, Homo sapien
gctgggtaggaatacactcttcgta

SEQ ID NO: 3808562 - DNA, 25 bp, Homo sapien
caagccctaagacccttttccgcag

SEQ ID NO: 3808563 - DNA, 25 bp, Homo sapien
gccacactgtatgggcagactcaga

SEQ ID NO: 3808564 - DNA, 25 bp, Homo sapien
tattctctggatattctgttcatga

SEQ ID NO: 3808565 - DNA, 25 bp, Homo sapien
tctggtgagtcagaatccggcggtc

SEQ ID NO: 3808566 - DNA, 25 bp, Homo sapien
gaacatattgtgtagacaactcctg

SEQ ID NO: 3808567 - DNA, 25 bp, Homo sapien
gacaactcctgttggtagaggcttt

SEQ ID NO: 3808568 - DNA, 25 bp, Homo sapien
ccgccattttcaggatctatcaagg

SEQ ID NO: 3808569 - DNA, 25 bp, Homo sapien
caggatctatcaaggctcctgaggg

SEQ ID NO: 3808570 - DNA, 25 bp, Homo sapien
acggccgccattttcaggatctatc

SEQ ID NO: 3808571 - DNA, 25 bp, Homo sapien
cattttcaggatctatcaaggctcc

SEQ ID NO: 3808572 - DNA, 25 bp, Homo sapien
aagtccttgggtcacagccttcctc

SEQ ID NO: 3808573 - DNA, 25 bp, Homo sapien
gccagagaggctggatagaagtcct

SEQ ID NO: 3808574 - DNA, 25 bp, Homo sapien
ctgcaaagattggggaaagtgtggg

SEQ ID NO: 3808575 - DNA, 25 bp, Homo sapien
ggatagaagtccttgggtcacagcc

SEQ ID NO: 3808576 - DNA, 25 bp, Homo sapien
gcatcaggtaagttgcagcttgtga

SEQ ID NO: 3808577 - DNA, 25 bp, Homo sapien
tgcttgtggaagtggcatcaggtaa

SEQ ID NO: 3808578 - DNA, 25 bp, Homo sapien
acaagagctaaagtttgcttgtgga

SEQ ID NO: 3808579 - DNA, 25 bp, Homo sapien
tattatgaagtactggaaggaggat

SEQ ID NO: 3808580 - DNA, 25 bp, Homo sapien
ctccacaagtctccctgaatgggag

SEQ ID NO: 3808581 - DNA, 25 bp, Homo sapien
gaaatggtttgtcccggctgggtga

SEQ ID NO: 3808582 - DNA, 25 bp, Homo sapien
caggcctttggtatcttccactgga

SEQ ID NO: 3808583 - DNA, 25 bp, Homo sapien
ggaaagatgcgatgaaatggtttgt

SEQ ID NO: 3808584 - DNA, 25 bp, Homo sapien
catcttcaaagggaactcggcacca

SEQ ID NO: 3808585 - DNA, 25 bp, Homo sapien
gatactgatctgacggacacagcca

SEQ ID NO: 3808586 - DNA, 25 bp, Homo sapien
caaggactgtgaaatcccagcaggc

SEQ ID NO: 3808587 - DNA, 25 bp, Homo sapien
aattgaaggtatacaccctgaccgg

SEQ ID NO: 3808588 - DNA, 25 bp, Homo sapien
gagatttatggagatcaagggcttc

SEQ ID NO: 3808589 - DNA, 25 bp, Homo sapien
ttggtggaaattgccggccccagag

SEQ ID NO: 3808590 - DNA, 25 bp, Homo sapien
tggtggaaattgccggccccagagc

SEQ ID NO: 3808591 - DNA, 25 bp, Homo sapien
ggagatttatggagatcaagggctt

SEQ ID NO: 3808592 - DNA, 25 bp, Homo sapien
tggatggcaaacctattgatgttcc

SEQ ID NO: 3808593 - DNA, 25 bp, Homo sapien
ctgtgcagggttctctcaccaccag

SEQ ID NO: 3808594 - DNA, 25 bp, Homo sapien
gaatatcagtgacatcccagaagga

SEQ ID NO: 3808595 - DNA, 25 bp, Homo sapien
ggcaaacctattgatgttcctaaaa

SEQ ID NO: 3808596 - DNA, 25 bp, Homo sapien
tccttaacaaattcttccagggcta

SEQ ID NO: 3808597 - DNA, 25 bp, Homo sapien
cagggctagagccaatgttttgcta

SEQ ID NO: 3808598 - DNA, 25 bp, Homo sapien
aacaaattcttccagggctagagcc

SEQ ID NO: 3808599 - DNA, 25 bp, Homo sapien
tgttttgctagcatcagcacctcca

SEQ ID NO: 3808600 - DNA, 25 bp, Homo sapien
tgaaggatttgagtgatcttctcgc

SEQ ID NO: 3808601 - DNA, 25 bp, Homo sapien
tgcattcttcactgagcatgctggt

SEQ ID NO: 3808602 - DNA, 25 bp, Homo sapien
ttgtagcagccaaatgagaaacaag

SEQ ID NO: 3808603 - DNA, 25 bp, Homo sapien
gaatactagcggctttctcttccac

SEQ ID NO: 3808604 - DNA, 25 bp, Homo sapien
aaaactctcccactggtctttggag

SEQ ID NO: 3808605 - DNA, 25 bp, Homo sapien
tgcatgaaaactctcccactggtct

SEQ ID NO: 3808606 - DNA, 25 bp, Homo sapien
ctctcccactggtctttggagggtg

SEQ ID NO: 3808607 - DNA, 25 bp, Homo sapien
aactctcccactggtctttggaggg

SEQ ID NO: 3808608 - DNA, 25 bp, Homo sapien
agctcttgccctccaaatgaagcca

SEQ ID NO: 3808609 - DNA, 25 bp, Homo sapien
caaatgaagccaagaaagaccctgt

SEQ ID NO: 3808610 - DNA, 25 bp, Homo sapien
caagtgcagacgcaggtattgtatt

SEQ ID NO: 3808611 - DNA, 25 bp, Homo sapien
gaaatggctagccaaggttcctgaa

SEQ ID NO: 3808612 - DNA, 25 bp, Homo sapien
ctctgcgcagccagaggacatcctg

SEQ ID NO: 3808613 - DNA, 25 bp, Homo sapien
gctctgcgcagccagaggacatcct

SEQ ID NO: 3808614 - DNA, 25 bp, Homo sapien
caagatcaacctgtgggcaggttgg

SEQ ID NO: 3808615 - DNA, 25 bp, Homo sapien
ctgtgcaagcgcatccctgatgtct

SEQ ID NO: 3808616 - DNA, 25 bp, Homo sapien
tttcccctgtgcaagcgcatccctg

SEQ ID NO: 3808617 - DNA, 25 bp, Homo sapien
gcctttcccctgtgcaagcgcatcc

SEQ ID NO: 3808618 - DNA, 25 bp, Homo sapien
tttgtagggaccaaattcagcccat

SEQ ID NO: 3808619 - DNA, 25 bp, Homo sapien
aggtgtgttcaagaaatcctgagct

SEQ ID NO: 3808620 - DNA, 25 bp, Homo sapien
gtgtgttcaagaaatcctgagcttg

SEQ ID NO: 3808621 - DNA, 25 bp, Homo sapien
ggtgtgttcaagaaatcctgagctt

SEQ ID NO: 3808622 - DNA, 25 bp, Homo sapien
agccatgacgtgctcatcttctgca

SEQ ID NO: 3808623 - DNA, 25 bp, Homo sapien
ctggtgccagggaccagtacatttg

SEQ ID NO: 3808624 - DNA, 25 bp, Homo sapien
attcccaccatccaaaaactgacag

SEQ ID NO: 3808625 - DNA, 25 bp, Homo sapien
caggagggagccatgacgtgctcat

SEQ ID NO: 3808626 - DNA, 25 bp, Homo sapien
ggcccaccatcgaggtcatgcctgt

SEQ ID NO: 3808627 - DNA, 25 bp, Homo sapien
accatcgaggtcatgcctgtcactc

SEQ ID NO: 3808628 - DNA, 25 bp, Homo sapien
ggcccctggcccaccatcgaggtca

SEQ ID NO: 3808629 - DNA, 25 bp, Homo sapien
ccctggcccaccatcgaggtcatgc

SEQ ID NO: 3808630 - DNA, 25 bp, Homo sapien
aacacgcaggcccagaaaccttgaa

SEQ ID NO: 3808631 - DNA, 25 bp, Homo sapien
cttctttgtcaaggcagactaaggg

SEQ ID NO: 3808632 - DNA, 25 bp, Homo sapien
ggtgacctaatttccaacacgcagg

SEQ ID NO: 3808633 - DNA, 25 bp, Homo sapien
caggcccagaaaccttgaaactgac

SEQ ID NO: 3808634 - DNA, 25 bp, Homo sapien
agctcgagcctccttgtaagcctct

SEQ ID NO: 3808635 - DNA, 25 bp, Homo sapien
agctgtgaaaatcccctggctcgta

SEQ ID NO: 3808636 - DNA, 25 bp, Homo sapien
gtagtcctatgtcgtccacatgatg

SEQ ID NO: 3808637 - DNA, 25 bp, Homo sapien
aaatcccctggctcgtagtcctatg

SEQ ID NO: 3808638 - DNA, 25 bp, Homo sapien
ctgatccccaagggcgggccatgca

SEQ ID NO: 3808639 - DNA, 25 bp, Homo sapien
gctgatccccaagggcgggccatgc

SEQ ID NO: 3808640 - DNA, 25 bp, Homo sapien
tgatccccaagggcgggccatgcat

SEQ ID NO: 3808641 - DNA, 25 bp, Homo sapien
tgctgatccccaagggcgggccatg

SEQ ID NO: 3808642 - DNA, 25 bp, Homo sapien
ctactgttctttccagggctgggaa

SEQ ID NO: 3808643 - DNA, 25 bp, Homo sapien
gctgggaaaggagaacaggactgca

SEQ ID NO: 3808644 - DNA, 25 bp, Homo sapien
gggaaaggagaacaggactgcacac

SEQ ID NO: 3808645 - DNA, 25 bp, Homo sapien
tactgttctttccagggctgggaaa

SEQ ID NO: 3808646 - DNA, 25 bp, Homo sapien
ccccacactgtggctcgctggtttg

SEQ ID NO: 3808647 - DNA, 25 bp, Homo sapien
cagacctcaccttaaccttggtggg

SEQ ID NO: 3808648 - DNA, 25 bp, Homo sapien
gcacagacctcaccttaaccttggt

SEQ ID NO: 3808649 - DNA, 25 bp, Homo sapien
cccacactgtggctcgctggtttgg

SEQ ID NO: 3808650 - DNA, 25 bp, Homo sapien
ccatgatatcttgggttcctgttat

SEQ ID NO: 3808651 - DNA, 25 bp, Homo sapien
ccaaagcattcctggatatcattca

SEQ ID NO: 3808652 - DNA, 25 bp, Homo sapien
cctgcctctacccatgatatcttgg

SEQ ID NO: 3808653 - DNA, 25 bp, Homo sapien
gttaaggtgttgtgggcatccctgc

SEQ ID NO: 3808654 - DNA, 25 bp, Homo sapien
ggagggcgccattgacgtaataact

SEQ ID NO: 3808655 - DNA, 25 bp, Homo sapien
cgtaataacttgaaacgcccatgaa

SEQ ID NO: 3808656 - DNA, 25 bp, Homo sapien
gggtccaagactggtgcccaagtcc

SEQ ID NO: 3808657 - DNA, 25 bp, Homo sapien
gtcctgactgagcaagcccaagcag

SEQ ID NO: 3808658 - DNA, 25 bp, Homo sapien
taatagtgcatcctcaagttcaaaa

SEQ ID NO: 3808659 - DNA, 25 bp, Homo sapien
gtcatatggttcaactctattatca

SEQ ID NO: 3808660 - DNA, 25 bp, Homo sapien
tccactcttcagataatagtgcatc

SEQ ID NO: 3808661 - DNA, 25 bp, Homo sapien
ttcccagaaggattgagagtcatat

SEQ ID NO: 3808662 - DNA, 25 bp, Homo sapien
gatacttgatagtcaggcactggca

SEQ ID NO: 3808663 - DNA, 25 bp, Homo sapien
taatgggtcgttttgcttaacatcc

SEQ ID NO: 3808664 - DNA, 25 bp, Homo sapien
cagggagcccatactaatatcaaga

SEQ ID NO: 3808665 - DNA, 25 bp, Homo sapien
tacaatgtagcaactcaaaccctga

SEQ ID NO: 3808666 - DNA, 25 bp, Homo sapien
tcctgtgagcgtccccagtgcgtga

SEQ ID NO: 3808667 - DNA, 25 bp, Homo sapien
catctctggcatctcgttgtgttcc

SEQ ID NO: 3808668 - DNA, 25 bp, Homo sapien
tgtgttcctggacctacatgaaggc

SEQ ID NO: 3808669 - DNA, 25 bp, Homo sapien
cagcttccaggacgtctactattag

SEQ ID NO: 3808670 - DNA, 25 bp, Homo sapien
caccagcgcagcctccttaatctca

SEQ ID NO: 3808671 - DNA, 25 bp, Homo sapien
cagcgcagcctccttaatctcacct

SEQ ID NO: 3808672 - DNA, 25 bp, Homo sapien
gcagcctccttaatctcaccttcca

SEQ ID NO: 3808673 - DNA, 25 bp, Homo sapien
atctcaccttccacaaccctcctgc

SEQ ID NO: 3808674 - DNA, 25 bp, Homo sapien
ccagtctaattagcagcgggggagt

SEQ ID NO: 3808675 - DNA, 25 bp, Homo sapien
taattagcagcgggggagtgtatac

SEQ ID NO: 3808676 - DNA, 25 bp, Homo sapien
agccagtctaattagcagcggggga

SEQ ID NO: 3808677 - DNA, 25 bp, Homo sapien
tagcagcgggggagtgtataccaac

SEQ ID NO: 3808678 - DNA, 25 bp, Homo sapien
tccaaacgggtccattttctgctgg

SEQ ID NO: 3808679 - DNA, 25 bp, Homo sapien
ttttctgctgggtgcgattggtagt

SEQ ID NO: 3808680 - DNA, 25 bp, Homo sapien
tggtagttggtctgtatgatgacag

SEQ ID NO: 3808681 - DNA, 25 bp, Homo sapien
tcattgaattccaaacgggtccatt

SEQ ID NO: 3808682 - DNA, 25 bp, Homo sapien
atcttgggaaatgtgtgtcaccctg

SEQ ID NO: 3808683 - DNA, 25 bp, Homo sapien
gaagggcgaagtccgtgaatgatct

SEQ ID NO: 3808684 - DNA, 25 bp, Homo sapien
tgacctttagagacgactgcatcct

SEQ ID NO: 3808685 - DNA, 25 bp, Homo sapien
tgagaacaaggcatcgaagggcgaa

SEQ ID NO: 3808686 - DNA, 25 bp, Homo sapien
gggctggaccgtaatccccagtgga

SEQ ID NO: 3808687 - DNA, 25 bp, Homo sapien
gccgccgcagtacgcggcgctggga

SEQ ID NO: 3808688 - DNA, 25 bp, Homo sapien
tcaaacaaggccgccgcagtacgcg

SEQ ID NO: 3808689 - DNA, 25 bp, Homo sapien
gcttcgggcttgaatagggtcctcc

SEQ ID NO: 3808690 - DNA, 25 bp, Homo sapien
cccctaggcctctgtagtgtgacca

SEQ ID NO: 3808691 - DNA, 25 bp, Homo sapien
ccaggagaacggattctcctcgggc

SEQ ID NO: 3808692 - DNA, 25 bp, Homo sapien
cctcgggcgatctccatccaggtcc

SEQ ID NO: 3808693 - DNA, 25 bp, Homo sapien
gaaacggcgtttctgctccacggga

SEQ ID NO: 3808694 - DNA, 25 bp, Homo sapien
taatcgtatatgcttaagggagtac

SEQ ID NO: 3808695 - DNA, 25 bp, Homo sapien
ctaatcgtatatgcttaagggagta

SEQ ID NO: 3808696 - DNA, 25 bp, Homo sapien
agcagcctcggcagggcagaacagg

SEQ ID NO: 3808697 - DNA, 25 bp, Homo sapien
ggcagaacaggccctcggcaggttc

SEQ ID NO: 3808698 - DNA, 25 bp, Homo sapien
agaacaggccctcggcaggttcttc

SEQ ID NO: 3808699 - DNA, 25 bp, Homo sapien
cacgagagcgcgagcagcctcggca

SEQ ID NO: 3808700 - DNA, 25 bp, Homo sapien
tctctgagcctgcaggctttatacc

SEQ ID NO: 3808701 - DNA, 25 bp, Homo sapien
ctctgagcctgcaggctttatacca

SEQ ID NO: 3808702 - DNA, 25 bp, Homo sapien
gagggactgagaaaatgagaacaaa

SEQ ID NO: 3808703 - DNA, 25 bp, Homo sapien
tgagaaaatgagaacaaagggccac

SEQ ID NO: 3808704 - DNA, 25 bp, Homo sapien
tcagagggactgagaaaatgagaac

SEQ ID NO: 3808705 - DNA, 25 bp, Homo sapien
ctgagaaaatgagaacaaagggcca

SEQ ID NO: 3808706 - DNA, 25 bp, Homo sapien
cacatgggctaagagaaggagacct

SEQ ID NO: 3808707 - DNA, 25 bp, Homo sapien
ttttgctgcgagtccctgctgcttg

SEQ ID NO: 3808708 - DNA, 25 bp, Homo sapien
tgttctcacgcaaggtttccagccg

SEQ ID NO: 3808709 - DNA, 25 bp, Homo sapien
gaagccccactctgctatcttagca

SEQ ID NO: 3808710 - DNA, 25 bp, Homo sapien
tgcgtgacaatagtcagcatcccac

SEQ ID NO: 3808711 - DNA, 25 bp, Homo sapien
ctgcgtgacaatagtcagcatccca

SEQ ID NO: 3808712 - DNA, 25 bp, Homo sapien
gagtccccagggagctcctccttac

SEQ ID NO: 3808713 - DNA, 25 bp, Homo sapien
ccctcaacaactcaggatcatgccc

SEQ ID NO: 3808714 - DNA, 25 bp, Homo sapien
caactcaggatcatgccctgagtcc

SEQ ID NO: 3808715 - DNA, 25 bp, Homo sapien
aggatcatgccctgagtccccaggg

SEQ ID NO: 3808716 - DNA, 25 bp, Homo sapien
ctgatgcacagacgaccgccctgat

SEQ ID NO: 3808717 - DNA, 25 bp, Homo sapien
ggtggacatccacagtctgtggtca

SEQ ID NO: 3808718 - DNA, 25 bp, Homo sapien
catagactgctgttggtggacatcc

SEQ ID NO: 3808719 - DNA, 25 bp, Homo sapien
ggaaaggtctgatgcacagacgacc

SEQ ID NO: 3808720 - DNA, 25 bp, Homo sapien
cttgcgcccgccaagacatgtctgg

SEQ ID NO: 3808721 - DNA, 25 bp, Homo sapien
ggcggtactcagcaattcatgttga

SEQ ID NO: 3808722 - DNA, 25 bp, Homo sapien
caggccattgcagggccatgtcgtg

SEQ ID NO: 3808723 - DNA, 25 bp, Homo sapien
tgtcgtggactcttgtcccaaggcc

SEQ ID NO: 3808724 - DNA, 25 bp, Homo sapien
aggtcgatggcattgagatttggaa

SEQ ID NO: 3808725 - DNA, 25 bp, Homo sapien
gaccacgtctgagcaaatgagatcc

SEQ ID NO: 3808726 - DNA, 25 bp, Homo sapien
tcttctccaagatttggtaggagat

SEQ ID NO: 3808727 - DNA, 25 bp, Homo sapien
tttttgtattgcatcccacagccca

SEQ ID NO: 3808728 - DNA, 25 bp, Homo sapien
ggaaactgaacactctggacacagg

SEQ ID NO: 3808729 - DNA, 25 bp, Homo sapien
tagcacagcttctgtgagtagccac

SEQ ID NO: 3808730 - DNA, 25 bp, Homo sapien
cactcaactgattgtctaagacaca

SEQ ID NO: 3808731 - DNA, 25 bp, Homo sapien
cagtttcccttatgacagaaaaggt

SEQ ID NO: 3808732 - DNA, 25 bp, Homo sapien
ttaaaatcacagacagggtagaatg

SEQ ID NO: 3808733 - DNA, 25 bp, Homo sapien
gaaatcctgctactacatagatgaa

SEQ ID NO: 3808734 - DNA, 25 bp, Homo sapien
tcccagtagctcaaacatggaagca

SEQ ID NO: 3808735 - DNA, 25 bp, Homo sapien
gtcacaaaaaggcatatgctgcatg

SEQ ID NO: 3808736 - DNA, 25 bp, Homo sapien
ttaggaagacctctacagcatcatt

SEQ ID NO: 3808737 - DNA, 25 bp, Homo sapien
gttctgtttaggaagacctctacag

SEQ ID NO: 3808738 - DNA, 25 bp, Homo sapien
tctgtttaggaagacctctacagca

SEQ ID NO: 3808739 - DNA, 25 bp, Homo sapien
tgtttaggaagacctctacagcatc

SEQ ID NO: 3808740 - DNA, 25 bp, Homo sapien
tttcaatgacattatgaaggaagac

SEQ ID NO: 3808741 - DNA, 25 bp, Homo sapien
cttctaattggaatgtgacaatgta

SEQ ID NO: 3808742 - DNA, 25 bp, Homo sapien
tcttttctaaatctgcaactacctt

SEQ ID NO: 3808743 - DNA, 25 bp, Homo sapien
aatctgcaactacctttttcaatga

SEQ ID NO: 3808744 - DNA, 25 bp, Homo sapien
aaaatcctggtcacaaatcactcgc

SEQ ID NO: 3808745 - DNA, 25 bp, Homo sapien
cacaaaggatgaaaacgcaagacat

SEQ ID NO: 3808746 - DNA, 25 bp, Homo sapien
tcccaaggaaggcaatctgtaaatt

SEQ ID NO: 3808747 - DNA, 25 bp, Homo sapien
taaaaatgaggtataacagtatgcc

SEQ ID NO: 3808748 - DNA, 25 bp, Homo sapien
caaaaggttcctcttgtagtgcatg

SEQ ID NO: 3808749 - DNA, 25 bp, Homo sapien
aagtaatattagtgtgctgcccaaa

SEQ ID NO: 3808750 - DNA, 25 bp, Homo sapien
caacaaagcagcaaatatgagggcc

SEQ ID NO: 3808751 - DNA, 25 bp, Homo sapien
tatagcaagacagccctaaaatgcc

SEQ ID NO: 3808752 - DNA, 25 bp, Homo sapien
gataggtcattcgatttttctctcc

SEQ ID NO: 3808753 - DNA, 25 bp, Homo sapien
caattgctatactctgataggtcat

SEQ ID NO: 3808754 - DNA, 25 bp, Homo sapien
gagtgggaccaaaaacaattgctat

SEQ ID NO: 3808755 - DNA, 25 bp, Homo sapien
tcaacgtccgaagatggaactcagt

SEQ ID NO: 3808756 - DNA, 25 bp, Homo sapien
catagcaaatcatttacccatgaca

SEQ ID NO: 3808757 - DNA, 25 bp, Homo sapien
tgacagactgatactaaaaggagtt

SEQ ID NO: 3808758 - DNA, 25 bp, Homo sapien
ccttgtgctataccacatcccatga

SEQ ID NO: 3808759 - DNA, 25 bp, Homo sapien
gttacaaagacagcaagtagcatag

SEQ ID NO: 3808760 - DNA, 25 bp, Homo sapien
gcaactgtctgattaggtccttaac

SEQ ID NO: 3808761 - DNA, 25 bp, Homo sapien
ggtccttaacagcagcgactcgctg

SEQ ID NO: 3808762 - DNA, 25 bp, Homo sapien
tctgagatgtcggaaaagaatctgc

SEQ ID NO: 3808763 - DNA, 25 bp, Homo sapien
gaatctgcattgtgtcttggtttgg

SEQ ID NO: 3808764 - DNA, 25 bp, Homo sapien
gaaaaaactgagtagaattacatac

SEQ ID NO: 3808765 - DNA, 25 bp, Homo sapien
aattgggtggcttaatctgtgcaaa

SEQ ID NO: 3808766 - DNA, 25 bp, Homo sapien
tcacagtttggaagctgatatttgg

SEQ ID NO: 3808767 - DNA, 25 bp, Homo sapien
gcaaattcttatgaaactgaaagca

SEQ ID NO: 3808768 - DNA, 25 bp, Homo sapien
gaatatcttcccatttactgtcatt

SEQ ID NO: 3808769 - DNA, 25 bp, Homo sapien
catttactgtcattcaagtccaatt

SEQ ID NO: 3808770 - DNA, 25 bp, Homo sapien
acattttgagggctccagtaatgac

SEQ ID NO: 3808771 - DNA, 25 bp, Homo sapien
cagtaatgacatgaatatcttccca

SEQ ID NO: 3808772 - DNA, 25 bp, Homo sapien
caaaaagttatgagtgatgcatctg

SEQ ID NO: 3808773 - DNA, 25 bp, Homo sapien
ttaagccagttcaaaaagttatgag

SEQ ID NO: 3808774 - DNA, 25 bp, Homo sapien
gtgatgcatctgaataacaacagta

SEQ ID NO: 3808775 - DNA, 25 bp, Homo sapien
gcatctgaataacaacagtaaatat

SEQ ID NO: 3808776 - DNA, 25 bp, Homo sapien
tggatcactgcgaggttgccactta

SEQ ID NO: 3808777 - DNA, 25 bp, Homo sapien
acttactctgtatatcccatcaata

SEQ ID NO: 3808778 - DNA, 25 bp, Homo sapien
catgattgactgcaaaccttagttt

SEQ ID NO: 3808779 - DNA, 25 bp, Homo sapien
aaccttagtttctggatcactgcga

SEQ ID NO: 3808780 - DNA, 25 bp, Homo sapien
gaagtcagcaggtaaaatcagccca

SEQ ID NO: 3808781 - DNA, 25 bp, Homo sapien
tatagactgtgaatcagctcaagga

SEQ ID NO: 3808782 - DNA, 25 bp, Homo sapien
cagcagatgcctggagagatcttaa

SEQ ID NO: 3808783 - DNA, 25 bp, Homo sapien
taagccccgaaatttcaggtattca

SEQ ID NO: 3808784 - DNA, 25 bp, Homo sapien
tagcgagattggatccaaatacctg

SEQ ID NO: 3808785 - DNA, 25 bp, Homo sapien
gcgagattggatccaaatacctgat

SEQ ID NO: 3808786 - DNA, 25 bp, Homo sapien
ctctctgacacagattagcgagatt

SEQ ID NO: 3808787 - DNA, 25 bp, Homo sapien
cacagattagcgagattggatccaa

SEQ ID NO: 3808788 - DNA, 25 bp, Homo sapien
ggaccatgtagttcctgaacaccaa

SEQ ID NO: 3808789 - DNA, 25 bp, Homo sapien
tatttatgacgtaggccaacattca

SEQ ID NO: 3808790 - DNA, 25 bp, Homo sapien
caggtattcatagcacctaggcttg

SEQ ID NO: 3808791 - DNA, 25 bp, Homo sapien
aataagcatatgtccgtccatcacg

SEQ ID NO: 3808792 - DNA, 25 bp, Homo sapien
ctttttcacgaacagcttgcaaagt

SEQ ID NO: 3808793 - DNA, 25 bp, Homo sapien
gcaaagtggggcgtcgtgtaagaaa

SEQ ID NO: 3808794 - DNA, 25 bp, Homo sapien
taacctttttcacgaacagcttgca

SEQ ID NO: 3808795 - DNA, 25 bp, Homo sapien
atataacctttttcacgaacagctt

SEQ ID NO: 3808796 - DNA, 25 bp, Homo sapien
gaaagagcgctgacacactgagact

SEQ ID NO: 3808797 - DNA, 25 bp, Homo sapien
gagactgcacttggttaactgcaca

SEQ ID NO: 3808798 - DNA, 25 bp, Homo sapien
catactatgaggctgaaaaacgaca

SEQ ID NO: 3808799 - DNA, 25 bp, Homo sapien
gaagttcagcttcctagaggcctca

SEQ ID NO: 3808800 - DNA, 25 bp, Homo sapien
ggtgaatccggtatctcctcttcaa

SEQ ID NO: 3808801 - DNA, 25 bp, Homo sapien
aatccggtatctcctcttcaattcc

SEQ ID NO: 3808802 - DNA, 25 bp, Homo sapien
ttcctggtgaatccggtatctcctc

SEQ ID NO: 3808803 - DNA, 25 bp, Homo sapien
tttctattcctggtgaatccggtat

SEQ ID NO: 3808804 - DNA, 25 bp, Homo sapien
tattactatagttggaatggcataa

SEQ ID NO: 3808805 - DNA, 25 bp, Homo sapien
tagtattactatagttggaatggca

SEQ ID NO: 3808806 - DNA, 25 bp, Homo sapien
tctagtattactatagttggaatgg

SEQ ID NO: 3808807 - DNA, 25 bp, Homo sapien
cacatattacacttctagtattact

SEQ ID NO: 3808808 - DNA, 25 bp, Homo sapien
tagagctacattctctgacaacagt

SEQ ID NO: 3808809 - DNA, 25 bp, Homo sapien
taagacttctacacatggacctgac

SEQ ID NO: 3808810 - DNA, 25 bp, Homo sapien
gactcatacttcagattcacggttg

SEQ ID NO: 3808811 - DNA, 25 bp, Homo sapien
caacggaaagaaatcctagagcggc

SEQ ID NO: 3808812 - DNA, 25 bp, Homo sapien
taaggtcgcttgtacagattaaaga

SEQ ID NO: 3808813 - DNA, 25 bp, Homo sapien
gctctatctggcacaaagtgtccac

SEQ ID NO: 3808814 - DNA, 25 bp, Homo sapien
aagtgtccacaggtacgtgagtctg

SEQ ID NO: 3808815 - DNA, 25 bp, Homo sapien
gactgagttctcaaagctaaaaacc

SEQ ID NO: 3808816 - DNA, 25 bp, Homo sapien
ttattgattgtactactaagaactt

SEQ ID NO: 3808817 - DNA, 25 bp, Homo sapien
gttctgttccttgacgagttttcag

SEQ ID NO: 3808818 - DNA, 25 bp, Homo sapien
tgattattgattgtactactaagaa

SEQ ID NO: 3808819 - DNA, 25 bp, Homo sapien
attgattgtactactaagaacttta

SEQ ID NO: 3808820 - DNA, 25 bp, Homo sapien
tgacacatttgtggaaagcactcct

SEQ ID NO: 3808821 - DNA, 25 bp, Homo sapien
cacttttctagtgttggtcaagcca

SEQ ID NO: 3808822 - DNA, 25 bp, Homo sapien
caaagagcaggcataaatgtcacac

SEQ ID NO: 3808823 - DNA, 25 bp, Homo sapien
caggcttttgatattctagggtgca

SEQ ID NO: 3808824 - DNA, 25 bp, Homo sapien
aatactagccatgaggtcacttgag

SEQ ID NO: 3808825 - DNA, 25 bp, Homo sapien
gaagcctcatgaatagtcctaagtg

SEQ ID NO: 3808826 - DNA, 25 bp, Homo sapien
tgaggtggtctcttatgcagcaata

SEQ ID NO: 3808827 - DNA, 25 bp, Homo sapien
cttgcggacaaggaggcctagccaa

SEQ ID NO: 3808828 - DNA, 25 bp, Homo sapien
gaagccatctcaattgttgccccct

SEQ ID NO: 3808829 - DNA, 25 bp, Homo sapien
ggatttatcctttgaagccatctca

SEQ ID NO: 3808830 - DNA, 25 bp, Homo sapien
caattgttgcccccttgaggtccac

SEQ ID NO: 3808831 - DNA, 25 bp, Homo sapien
gtgaactctggtttggactgattac

SEQ ID NO: 3808832 - DNA, 25 bp, Homo sapien
aaccctgcaacaccgcccaagaaga

SEQ ID NO: 3808833 - DNA, 25 bp, Homo sapien
aaaagtaaagatgaaccctgcaaca

SEQ ID NO: 3808834 - DNA, 25 bp, Homo sapien
cgcccaagaagacaaccagttcttt

SEQ ID NO: 3808835 - DNA, 25 bp, Homo sapien
ccaacttgtgctacttccttgagtt

SEQ ID NO: 3808836 - DNA, 25 bp, Homo sapien
aattctttatacagactgtgttaca

SEQ ID NO: 3808837 - DNA, 25 bp, Homo sapien
gtaggtactaggtgcattacaggca

SEQ ID NO: 3808838 - DNA, 25 bp, Homo sapien
gccttcccctaattgggctggagta

SEQ ID NO: 3808839 - DNA, 25 bp, Homo sapien
tacaggcatacaatgaattgtacac

SEQ ID NO: 3808840 - DNA, 25 bp, Homo sapien
ttaataatccatatttctcttgatc

SEQ ID NO: 3808841 - DNA, 25 bp, Homo sapien
tgttacatttaataatccatatttc

SEQ ID NO: 3808842 - DNA, 25 bp, Homo sapien
cattttcagcaatttttgttacatt

SEQ ID NO: 3808843 - DNA, 25 bp, Homo sapien
catttaataatccatatttctcttg

SEQ ID NO: 3808844 - DNA, 25 bp, Homo sapien
tatgcatcactcaaagaaaaggtcc

SEQ ID NO: 3808845 - DNA, 25 bp, Homo sapien
tagggaactcagcaattggaaaggc

SEQ ID NO: 3808846 - DNA, 25 bp, Homo sapien
gatagacagcctaagcctaaggatg

SEQ ID NO: 3808847 - DNA, 25 bp, Homo sapien
gatgggcactgattacttaagctag

SEQ ID NO: 3808848 - DNA, 25 bp, Homo sapien
tcaggaaagcagggttttgaggcag

SEQ ID NO: 3808849 - DNA, 25 bp, Homo sapien
tttcaggaaagcagggttttgaggc

SEQ ID NO: 3808850 - DNA, 25 bp, Homo sapien
ttcaggaaagcagggttttgaggca

SEQ ID NO: 3808851 - DNA, 25 bp, Homo sapien
caatacaatggtgctatgtctccac

SEQ ID NO: 3808852 - DNA, 25 bp, Homo sapien
ttatcattagtgtccaatacaatgg

SEQ ID NO: 3808853 - DNA, 25 bp, Homo sapien
attggttcttgcagccgcctgtcca

SEQ ID NO: 3808854 - DNA, 25 bp, Homo sapien
tgtctccactttgttaatactattg

SEQ ID NO: 3808855 - DNA, 25 bp, Homo sapien
ccaagatcatgatggtatgctacac

SEQ ID NO: 3808856 - DNA, 25 bp, Homo sapien
acttaattaccatagcaggaactct

SEQ ID NO: 3808857 - DNA, 25 bp, Homo sapien
gaaatgcattggacttgtagattaa

SEQ ID NO: 3808858 - DNA, 25 bp, Homo sapien
tctgagttttatacatgtgccctta

SEQ ID NO: 3808859 - DNA, 25 bp, Homo sapien
tcaacgctggtcacaatcagtaccc

SEQ ID NO: 3808860 - DNA, 25 bp, Homo sapien
gcttaagagtgcagaatgtaacctg

SEQ ID NO: 3808861 - DNA, 25 bp, Homo sapien
tattcctgatattaggccgtcctgg

SEQ ID NO: 3808862 - DNA, 25 bp, Homo sapien
cacaaaactgaggattcaacgctgg

SEQ ID NO: 3808863 - DNA, 25 bp, Homo sapien
tgtctaccttgatcatcaacatgct

SEQ ID NO: 3808864 - DNA, 25 bp, Homo sapien
attcccattctgaccgagatccgtc

SEQ ID NO: 3808865 - DNA, 25 bp, Homo sapien
ccgtctgcactgtagtaatattgtc

SEQ ID NO: 3808866 - DNA, 25 bp, Homo sapien
gtaatattgtctaccttgatcatca

SEQ ID NO: 3808867 - DNA, 25 bp, Homo sapien
tcaggctggtatcgaaatcctgacc

SEQ ID NO: 3808868 - DNA, 25 bp, Homo sapien
aggttcaagcagttcaagcaattct

SEQ ID NO: 3808869 - DNA, 25 bp, Homo sapien
gtcaggctggtatcgaaatcctgac

SEQ ID NO: 3808870 - DNA, 25 bp, Homo sapien
aattctcccgcatcagcctcccgag

SEQ ID NO: 3808871 - DNA, 25 bp, Homo sapien
agtcactggtatataaggtatgccc

SEQ ID NO: 3808872 - DNA, 25 bp, Homo sapien
ggtatgcccacgttcatccaactct

SEQ ID NO: 3808873 - DNA, 25 bp, Homo sapien
aggagaaccacactgactatctgac

SEQ ID NO: 3808874 - DNA, 25 bp, Homo sapien
tgaccaaccccttggaggagaacca

SEQ ID NO: 3808875 - DNA, 25 bp, Homo sapien
aagaagtgctgtagtagttttcttc

SEQ ID NO: 3808876 - DNA, 25 bp, Homo sapien
gtaagaagtgctgtagtagttttct

SEQ ID NO: 3808877 - DNA, 25 bp, Homo sapien
tgtaagaagtgctgtagtagttttc

SEQ ID NO: 3808878 - DNA, 25 bp, Homo sapien
ctgtagtagttttcttccgatgaaa

SEQ ID NO: 3808879 - DNA, 25 bp, Homo sapien
gaatctggccttccttgatttggag

SEQ ID NO: 3808880 - DNA, 25 bp, Homo sapien
ttatagtaatagcaacgccctgagc

SEQ ID NO: 3808881 - DNA, 25 bp, Homo sapien
cgagtccaacgaggaggtttccaag

SEQ ID NO: 3808882 - DNA, 25 bp, Homo sapien
cattaatctgaattgccgggctccc

SEQ ID NO: 3808883 - DNA, 25 bp, Homo sapien
ctcttaaagtccctagttcaagttg

SEQ ID NO: 3808884 - DNA, 25 bp, Homo sapien
aatgtaatggtgctcttaaagtccc

SEQ ID NO: 3808885 - DNA, 25 bp, Homo sapien
gtccctagttcaagttgggtattca

SEQ ID NO: 3808886 - DNA, 25 bp, Homo sapien
tccctagttcaagttgggtattcaa

SEQ ID NO: 3808887 - DNA, 25 bp, Homo sapien
ttatccccttgcctaaatttgcttc

SEQ ID NO: 3808888 - DNA, 25 bp, Homo sapien
cccttgcctaaatttgcttcaaatt

SEQ ID NO: 3808889 - DNA, 25 bp, Homo sapien
tccccttgcctaaatttgcttcaaa

SEQ ID NO: 3808890 - DNA, 25 bp, Homo sapien
taattatccccttgcctaaatttgc

SEQ ID NO: 3808891 - DNA, 25 bp, Homo sapien
cactgtacactggtcacttgaggaa

SEQ ID NO: 3808892 - DNA, 25 bp, Homo sapien
gaatggctctcttacccactgtaca

SEQ ID NO: 3808893 - DNA, 25 bp, Homo sapien
cactgagttacgcttatcttccaaa

SEQ ID NO: 3808894 - DNA, 25 bp, Homo sapien
caatggccttatagatatgtcggac

SEQ ID NO: 3808895 - DNA, 25 bp, Homo sapien
aactgcagacatacgaaatcggtat

SEQ ID NO: 3808896 - DNA, 25 bp, Homo sapien
ggtattcccttcactatacaatagg

SEQ ID NO: 3808897 - DNA, 25 bp, Homo sapien
aagttcaccccttgccaaactgcag

SEQ ID NO: 3808898 - DNA, 25 bp, Homo sapien
gacacaatctttggcattaaggact

SEQ ID NO: 3808899 - DNA, 25 bp, Homo sapien
gagtgcagtggcatgatctcaactc

SEQ ID NO: 3808900 - DNA, 25 bp, Homo sapien
gacaggatctcgctctgtcatgcat

SEQ ID NO: 3808901 - DNA, 25 bp, Homo sapien
caggatctcgctctgtcatgcatgc

SEQ ID NO: 3808902 - DNA, 25 bp, Homo sapien
ggatctcgctctgtcatgcatgctg

SEQ ID NO: 3808903 - DNA, 25 bp, Homo sapien
cctgctagattggggacgttctccc

SEQ ID NO: 3808904 - DNA, 25 bp, Homo sapien
cgttctcccggataatattctgcag

SEQ ID NO: 3808905 - DNA, 25 bp, Homo sapien
tgatcctccatcactgatacctctt

SEQ ID NO: 3808906 - DNA, 25 bp, Homo sapien
ttggatactaaagcttgtgcattcg

SEQ ID NO: 3808907 - DNA, 25 bp, Homo sapien
agaggcaataattaacagcttacaa

SEQ ID NO: 3808908 - DNA, 25 bp, Homo sapien
caatatccctgacgaacatcaatgg

SEQ ID NO: 3808909 - DNA, 25 bp, Homo sapien
tatccctgacgaacatcaatggaaa

SEQ ID NO: 3808910 - DNA, 25 bp, Homo sapien
tagaggcaataattaacagcttaca

SEQ ID NO: 3808911 - DNA, 25 bp, Homo sapien
tgggctggcacataaaacgctttgg

SEQ ID NO: 3808912 - DNA, 25 bp, Homo sapien
gatgacgatggctttccgaaacttg

SEQ ID NO: 3808913 - DNA, 25 bp, Homo sapien
catgagagctttgcgcgtgacctcc

SEQ ID NO: 3808914 - DNA, 25 bp, Homo sapien
tgacctccttcacatactgggctgg

SEQ ID NO: 3808915 - DNA, 25 bp, Homo sapien
ctggaataatcttcccacttctgtc

SEQ ID NO: 3808916 - DNA, 25 bp, Homo sapien
taatcttcccacttctgtcagccat

SEQ ID NO: 3808917 - DNA, 25 bp, Homo sapien
gaataatcttcccacttctgtcagc

SEQ ID NO: 3808918 - DNA, 25 bp, Homo sapien
aataatcttcccacttctgtcagcc

SEQ ID NO: 3808919 - DNA, 25 bp, Homo sapien
ctctcaaaaaggatgttataccaca

SEQ ID NO: 3808920 - DNA, 25 bp, Homo sapien
ttataccacattatggctttatggc

SEQ ID NO: 3808921 - DNA, 25 bp, Homo sapien
aaaggatgttataccacattatggc

SEQ ID NO: 3808922 - DNA, 25 bp, Homo sapien
tcacctctcaaaaaggatgttatac

SEQ ID NO: 3808923 - DNA, 25 bp, Homo sapien
agatctacaccagtatcacatttaa

SEQ ID NO: 3808924 - DNA, 25 bp, Homo sapien
aggagatctacaccagtatcacatt

SEQ ID NO: 3808925 - DNA, 25 bp, Homo sapien
cttagaacaaggagatctacaccag

SEQ ID NO: 3808926 - DNA, 25 bp, Homo sapien
ttagaacaaggagatctacaccagt

SEQ ID NO: 3808927 - DNA, 25 bp, Homo sapien
tctgttctgagtatgggccaaaaat

SEQ ID NO: 3808928 - DNA, 25 bp, Homo sapien
gcgctcaaagaggtggaaaaccacg

SEQ ID NO: 3808929 - DNA, 25 bp, Homo sapien
ggtgacaagcaaccttatggaaaga

SEQ ID NO: 3808930 - DNA, 25 bp, Homo sapien
taagggtctttctaagaagcgctca

SEQ ID NO: 3808931 - DNA, 25 bp, Homo sapien
tcttggtatagcacgggggttgtaa

SEQ ID NO: 3808932 - DNA, 25 bp, Homo sapien
cttcttggtatagcacgggggttgt

SEQ ID NO: 3808933 - DNA, 25 bp, Homo sapien
ttcttggtatagcacgggggttgta

SEQ ID NO: 3808934 - DNA, 25 bp, Homo sapien
gaaggcaatcctgccattcgcaaca

SEQ ID NO: 3808935 - DNA, 25 bp, Homo sapien
taaaatggtggtaacgagaggctaa

SEQ ID NO: 3808936 - DNA, 25 bp, Homo sapien
tgaacccagtggacgttacgttgaa

SEQ ID NO: 3808937 - DNA, 25 bp, Homo sapien
tacacacaacaggatactacttagc

SEQ ID NO: 3808938 - DNA, 25 bp, Homo sapien
gcagtctcaaaaacgcccatacaag

SEQ ID NO: 3808939 - DNA, 25 bp, Homo sapien
tgctacaccccgatgctgctcttag

SEQ ID NO: 3808940 - DNA, 25 bp, Homo sapien
cgctgtccaagcacaatactcctgg

SEQ ID NO: 3808941 - DNA, 25 bp, Homo sapien
tgctcaatcaaatacaacgctgtcc

SEQ ID NO: 3808942 - DNA, 25 bp, Homo sapien
gatagcaacgcgtaaaggacagccg

SEQ ID NO: 3808943 - DNA, 25 bp, Homo sapien
ggactttgaggagattccgcccaga

SEQ ID NO: 3808944 - DNA, 25 bp, Homo sapien
aagacaaccagctcccctgagatgg

SEQ ID NO: 3808945 - DNA, 25 bp, Homo sapien
cggtttaaggtcaacagtcctcgag

SEQ ID NO: 3808946 - DNA, 25 bp, Homo sapien
agcaggcggctcccttcttagtccg

SEQ ID NO: 3808947 - DNA, 25 bp, Homo sapien
cgcggctgcgggtcgacgacgcgag

SEQ ID NO: 3808948 - DNA, 25 bp, Homo sapien
tcgacgacgcgagcccgaagagcgt

SEQ ID NO: 3808949 - DNA, 25 bp, Homo sapien
gcgagcccgaagagcgttcacacgg

SEQ ID NO: 3808950 - DNA, 25 bp, Homo sapien
cgcggccggcccgtccccgcaggct

SEQ ID NO: 3808951 - DNA, 25 bp, Homo sapien
gcctctgagggagggtaagttacag

SEQ ID NO: 3808952 - DNA, 25 bp, Homo sapien
tgagggagggtaagttacagggcac

SEQ ID NO: 3808953 - DNA, 25 bp, Homo sapien
tctgagggagggtaagttacagggc

SEQ ID NO: 3808954 - DNA, 25 bp, Homo sapien
gtacgtggcaggacccgctgtgcac

SEQ ID NO: 3808955 - DNA, 25 bp, Homo sapien
agggcagaaccagtccgtcagcatt

SEQ ID NO: 3808956 - DNA, 25 bp, Homo sapien
cgtcagcatttagccttccacgggc

SEQ ID NO: 3808957 - DNA, 25 bp, Homo sapien
gtgcacactcgggactgaggagacc

SEQ ID NO: 3808958 - DNA, 25 bp, Homo sapien
ttgtttccatgggttacacagatgc

SEQ ID NO: 3808959 - DNA, 25 bp, Homo sapien
ccattttgtaatatcaactgcttct

SEQ ID NO: 3808960 - DNA, 25 bp, Homo sapien
tgtttccatgggttacacagatgcc

SEQ ID NO: 3808961 - DNA, 25 bp, Homo sapien
ttttgtaatatcaactgcttcttgt

SEQ ID NO: 3808962 - DNA, 25 bp, Homo sapien
tgttgttagctccaagggtgccaga

SEQ ID NO: 3808963 - DNA, 25 bp, Homo sapien
tcatcagcagttcttccggttccct

SEQ ID NO: 3808964 - DNA, 25 bp, Homo sapien
tttgctcttaaatgatgtgacccct

SEQ ID NO: 3808965 - DNA, 25 bp, Homo sapien
tacaggcatgtagccttgcaggcat

SEQ ID NO: 3808966 - DNA, 25 bp, Homo sapien
cagcccttttaatgctcacaccctg

SEQ ID NO: 3808967 - DNA, 25 bp, Homo sapien
cacagcccttttaatgctcacaccc

SEQ ID NO: 3808968 - DNA, 25 bp, Homo sapien
acagcccttttaatgctcacaccct

SEQ ID NO: 3808969 - DNA, 25 bp, Homo sapien
tgcagtgccaacaattttagaggcc

SEQ ID NO: 3808970 - DNA, 25 bp, Homo sapien
gaaaaacagggttgactaccagatg

SEQ ID NO: 3808971 - DNA, 25 bp, Homo sapien
tatatacactacacaaaaatcgtgc

SEQ ID NO: 3808972 - DNA, 25 bp, Homo sapien
ggaagtatacaacgatttcagctgc

SEQ ID NO: 3808973 - DNA, 25 bp, Homo sapien
tagctcgcctcctcaattactttgc

SEQ ID NO: 3808974 - DNA, 25 bp, Homo sapien
cagcttcggaaatcttgtagctcgc

SEQ ID NO: 3808975 - DNA, 25 bp, Homo sapien
ctgactctcatggagacgatactct

SEQ ID NO: 3808976 - DNA, 25 bp, Homo sapien
tccaaatgtgagtctgacccaagat

SEQ ID NO: 3808977 - DNA, 25 bp, Homo sapien
ttccatttcagacctgagccaattc

SEQ ID NO: 3808978 - DNA, 25 bp, Homo sapien
ccatttcagacctgagccaattcac

SEQ ID NO: 3808979 - DNA, 25 bp, Homo sapien
tccatttcagacctgagccaattca

SEQ ID NO: 3808980 - DNA, 25 bp, Homo sapien
ctcttccatttcagacctgagccaa

SEQ ID NO: 3808981 - DNA, 25 bp, Homo sapien
atcagccagtctgtcatccgccagt

SEQ ID NO: 3808982 - DNA, 25 bp, Homo sapien
ctagggaagaggaatttaaccaatg

SEQ ID NO: 3808983 - DNA, 25 bp, Homo sapien
tgtcatccgccagtctgtcatccat

SEQ ID NO: 3808984 - DNA, 25 bp, Homo sapien
tttaaccaatggttgacatcagcca

SEQ ID NO: 3808985 - DNA, 25 bp, Homo sapien
aacgttaacaagtgttcttatcctg

SEQ ID NO: 3808986 - DNA, 25 bp, Homo sapien
taaagttattcttcagctagacctg

SEQ ID NO: 3808987 - DNA, 25 bp, Homo sapien
ccacttgaatttaggaacagtcttt

SEQ ID NO: 3808988 - DNA, 25 bp, Homo sapien
gacctgaatgatcattgaggaagta

SEQ ID NO: 3808989 - DNA, 25 bp, Homo sapien
tcagtcactattctgtcaagacaga

SEQ ID NO: 3808990 - DNA, 25 bp, Homo sapien
taaatataatgacatatcagtcact

SEQ ID NO: 3808991 - DNA, 25 bp, Homo sapien
taatatctgcggtccaaaaggctgc

SEQ ID NO: 3808992 - DNA, 25 bp, Homo sapien
aaaggctgcaagacattaggaaaca

SEQ ID NO: 3808993 - DNA, 25 bp, Homo sapien
cctcatgtcaaatggagttaagcac

SEQ ID NO: 3808994 - DNA, 25 bp, Homo sapien
acgcatttacaacatgcaagttaac

SEQ ID NO: 3808995 - DNA, 25 bp, Homo sapien
cacaaactgagagttacgcacagta

SEQ ID NO: 3808996 - DNA, 25 bp, Homo sapien
ggtagactcagactctcttctgtca

SEQ ID NO: 3808997 - DNA, 25 bp, Homo sapien
catttacgaatgttgccaaaggagg

SEQ ID NO: 3808998 - DNA, 25 bp, Homo sapien
tatattagctagcaggctcaccaga

SEQ ID NO: 3808999 - DNA, 25 bp, Homo sapien
caaaattatcggctatggccaagaa

SEQ ID NO: 3809000 - DNA, 25 bp, Homo sapien
aagtgctgtgtttaatgacctacca

SEQ ID NO: 3809001 - DNA, 25 bp, Homo sapien
taaggtacagttagcttggcacagt

SEQ ID NO: 3809002 - DNA, 25 bp, Homo sapien
tattcaaaataactcggcaacaggc

SEQ ID NO: 3809003 - DNA, 25 bp, Homo sapien
gaatgactgcttgataccatgtcct

SEQ ID NO: 3809004 - DNA, 25 bp, Homo sapien
tataattctacaatcccaagggagt

SEQ ID NO: 3809005 - DNA, 25 bp, Homo sapien
gataactgggcctactcagtaagtc

SEQ ID NO: 3809006 - DNA, 25 bp, Homo sapien
ataaaactgctatgagtccaaaggg

SEQ ID NO: 3809007 - DNA, 25 bp, Homo sapien
gggagaacaaggtgactacacataa

SEQ ID NO: 3809008 - DNA, 25 bp, Homo sapien
gaaaaccagctattgtatgtctact

SEQ ID NO: 3809009 - DNA, 25 bp, Homo sapien
acctcctccacgaattgcacttggg

SEQ ID NO: 3809010 - DNA, 25 bp, Homo sapien
tggctgttctgaacaaatgcacctc

SEQ ID NO: 3809011 - DNA, 25 bp, Homo sapien
tggctggctgttctgaacaaatgca

SEQ ID NO: 3809012 - DNA, 25 bp, Homo sapien
aattgcacttgggtgagttggagaa

SEQ ID NO: 3809013 - DNA, 25 bp, Homo sapien
tggatgttgcccgggacgaataggt

SEQ ID NO: 3809014 - DNA, 25 bp, Homo sapien
ctggatgttgcccgggacgaatagg

SEQ ID NO: 3809015 - DNA, 25 bp, Homo sapien
gctgatagcgtttgcgatcacgaga

SEQ ID NO: 3809016 - DNA, 25 bp, Homo sapien
cttaggaagttcacagcggagatct

SEQ ID NO: 3809017 - DNA, 25 bp, Homo sapien
tgcgatctacttcttgctgatagcg

SEQ ID NO: 3809018 - DNA, 25 bp, Homo sapien
tctcagctgtagctcgaagtcgctt

SEQ ID NO: 3809019 - DNA, 25 bp, Homo sapien
gcctccggtgtcatcagaatcaatc

SEQ ID NO: 3809020 - DNA, 25 bp, Homo sapien
tgtgcactttagtgagctgttcaag

SEQ ID NO: 3809021 - DNA, 25 bp, Homo sapien
cactttagtgagctgttcaagatta

SEQ ID NO: 3809022 - DNA, 25 bp, Homo sapien
ttgcttctgagcagcgctgcctccg

SEQ ID NO: 3809023 - DNA, 25 bp, Homo sapien
gagtttgcgcaggttgtgtaaagtc

SEQ ID NO: 3809024 - DNA, 25 bp, Homo sapien
ccaggtcctgaacaaagagtttgcg

SEQ ID NO: 3809025 - DNA, 25 bp, Homo sapien
gaacaaagagtttgcgcaggttgtg

SEQ ID NO: 3809026 - DNA, 25 bp, Homo sapien
ggtcctgaacaaagagtttgcgcag

SEQ ID NO: 3809027 - DNA, 25 bp, Homo sapien
gcttgttctcgtctatcttgcataa

SEQ ID NO: 3809028 - DNA, 25 bp, Homo sapien
ccaaacccttcaagtcttgtcttgc

SEQ ID NO: 3809029 - DNA, 25 bp, Homo sapien
tcaagtcttgtcttgcttgttctcg

SEQ ID NO: 3809030 - DNA, 25 bp, Homo sapien
gtcttgcttgttctcgtctatcttg

SEQ ID NO: 3809031 - DNA, 25 bp, Homo sapien
aacaatttacctgtgctgtctttca

SEQ ID NO: 3809032 - DNA, 25 bp, Homo sapien
cagctgcaagttagcagaatcttca

SEQ ID NO: 3809033 - DNA, 25 bp, Homo sapien
ggcatgtacaatcagccctgtctaa

SEQ ID NO: 3809034 - DNA, 25 bp, Homo sapien
agtttctgtcccaaacactgctcac

SEQ ID NO: 3809035 - DNA, 25 bp, Homo sapien
gttcctgctctaacatcattttctg

SEQ ID NO: 3809036 - DNA, 25 bp, Homo sapien
catgttctactcttagacgttcctg

SEQ ID NO: 3809037 - DNA, 25 bp, Homo sapien
tactcttagacgttcctgctctaac

SEQ ID NO: 3809038 - DNA, 25 bp, Homo sapien
tctactcttagacgttcctgctcta

SEQ ID NO: 3809039 - DNA, 25 bp, Homo sapien
gagtttctctatggctctggatctg

SEQ ID NO: 3809040 - DNA, 25 bp, Homo sapien
ttgatgagtttctctatggctctgg

SEQ ID NO: 3809041 - DNA, 25 bp, Homo sapien
tgagtttctctatggctctggatct

SEQ ID NO: 3809042 - DNA, 25 bp, Homo sapien
gatgagtttctctatggctctggat

SEQ ID NO: 3809043 - DNA, 25 bp, Homo sapien
agtgctccttttccatttcatggac

SEQ ID NO: 3809044 - DNA, 25 bp, Homo sapien
cttatttaagtgctccttttccatt

SEQ ID NO: 3809045 - DNA, 25 bp, Homo sapien
tccttttccatttcatggactttct

SEQ ID NO: 3809046 - DNA, 25 bp, Homo sapien
ttaagtgctccttttccatttcatg

SEQ ID NO: 3809047 - DNA, 25 bp, Homo sapien
taagcctttaaggttcctcatataa

SEQ ID NO: 3809048 - DNA, 25 bp, Homo sapien
ataagcctttaaggttcctcatata

SEQ ID NO: 3809049 - DNA, 25 bp, Homo sapien
caagttacatccattgtgttggtat

SEQ ID NO: 3809050 - DNA, 25 bp, Homo sapien
gactagtatacaagttacatccatt

SEQ ID NO: 3809051 - DNA, 25 bp, Homo sapien
tatacaagttacatccattgtgttg

SEQ ID NO: 3809052 - DNA, 25 bp, Homo sapien
tgacatgtagactagtatacaagtt

SEQ ID NO: 3809053 - DNA, 25 bp, Homo sapien
gagataactcctaagtcccctatgt

SEQ ID NO: 3809054 - DNA, 25 bp, Homo sapien
tgtttaccattcgaaatcagccata

SEQ ID NO: 3809055 - DNA, 25 bp, Homo sapien
tatatatgttttgacaggcacagtg

SEQ ID NO: 3809056 - DNA, 25 bp, Homo sapien
cacaccccgcttcgtaactgtggga

SEQ ID NO: 3809057 - DNA, 25 bp, Homo sapien
ttcactgagggcatcgacagattcc

SEQ ID NO: 3809058 - DNA, 25 bp, Homo sapien
tgaaggtattcagtcaatgacttga

SEQ ID NO: 3809059 - DNA, 25 bp, Homo sapien
tgtgctcgaagctggactagttctt

SEQ ID NO: 3809060 - DNA, 25 bp, Homo sapien
tcttttgttccacattttgaaggta

SEQ ID NO: 3809061 - DNA, 25 bp, Homo sapien
cataacttgcaaactaaggcactga

SEQ ID NO: 3809062 - DNA, 25 bp, Homo sapien
ctgatagtggtgaatggccccattc

SEQ ID NO: 3809063 - DNA, 25 bp, Homo sapien
taacaagttaccaccagtcacatca

SEQ ID NO: 3809064 - DNA, 25 bp, Homo sapien
caaatttactgcagctagactagga

SEQ ID NO: 3809065 - DNA, 25 bp, Homo sapien
catctatcatgccagttccctcagg

SEQ ID NO: 3809066 - DNA, 25 bp, Homo sapien
ttgagagatacgaagctgacatgct

SEQ ID NO: 3809067 - DNA, 25 bp, Homo sapien
agctgacatgctgctaactcctttt

SEQ ID NO: 3809068 - DNA, 25 bp, Homo sapien
tctaactgcttgcaacgtttcacca

SEQ ID NO: 3809069 - DNA, 25 bp, Homo sapien
aaaatctagtagtcatggaacctgg

SEQ ID NO: 3809070 - DNA, 25 bp, Homo sapien
tacttcaccataaacagaatagggc

SEQ ID NO: 3809071 - DNA, 25 bp, Homo sapien
tctctctggtgttctgcgatatgaa

SEQ ID NO: 3809072 - DNA, 25 bp, Homo sapien
gaatagggccgaaatgttcagactg

SEQ ID NO: 3809073 - DNA, 25 bp, Homo sapien
tcagctgctcgttttttctggtggt

SEQ ID NO: 3809074 - DNA, 25 bp, Homo sapien
ttctgaagctcagcatctatactcg

SEQ ID NO: 3809075 - DNA, 25 bp, Homo sapien
ctgcaaggtcttttagtaaagatgc

SEQ ID NO: 3809076 - DNA, 25 bp, Homo sapien
taaagatgccatcatctcagctgct

SEQ ID NO: 3809077 - DNA, 25 bp, Homo sapien
tatccaggagctagtgttaaagtaa

SEQ ID NO: 3809078 - DNA, 25 bp, Homo sapien
tatgatacaggcaattatccaggag

SEQ ID NO: 3809079 - DNA, 25 bp, Homo sapien
tccgaagtgctcgaaaatctgggac

SEQ ID NO: 3809080 - DNA, 25 bp, Homo sapien
gaacagatacaaggtgagcatcccc

SEQ ID NO: 3809081 - DNA, 25 bp, Homo sapien
cccgagtccttgaaaattgatgtta

SEQ ID NO: 3809082 - DNA, 25 bp, Homo sapien
ttaaaattaggagtagcaaacatcc

SEQ ID NO: 3809083 - DNA, 25 bp, Homo sapien
tttattgggcaactagcagctttaa

SEQ ID NO: 3809084 - DNA, 25 bp, Homo sapien
gttatcgatatttgacttacataga

SEQ ID NO: 3809085 - DNA, 25 bp, Homo sapien
tcatattccttagttttgtcttcaa

SEQ ID NO: 3809086 - DNA, 25 bp, Homo sapien
cagcaagttcttctagggcctgtaa

SEQ ID NO: 3809087 - DNA, 25 bp, Homo sapien
ttctgattcaattcatcactaagca

SEQ ID NO: 3809088 - DNA, 25 bp, Homo sapien
attttctgcttgaaggcgattcagc

SEQ ID NO: 3809089 - DNA, 25 bp, Homo sapien
gtttctctaccagttgactttgctg

SEQ ID NO: 3809090 - DNA, 25 bp, Homo sapien
tcctcctgatccaacatttgcgtct

SEQ ID NO: 3809091 - DNA, 25 bp, Homo sapien
aacatttgcgtcttcagtttctcta

SEQ ID NO: 3809092 - DNA, 25 bp, Homo sapien
gttgactttgctggttaatttcttc

SEQ ID NO: 3809093 - DNA, 25 bp, Homo sapien
ggctttctctttgtcaaactgttca

SEQ ID NO: 3809094 - DNA, 25 bp, Homo sapien
tgttcatcaataggcaccgtctccc

SEQ ID NO: 3809095 - DNA, 25 bp, Homo sapien
tataactccaattgcggttgctggt

SEQ ID NO: 3809096 - DNA, 25 bp, Homo sapien
ggttgctggtttatcattggtaaga

SEQ ID NO: 3809097 - DNA, 25 bp, Homo sapien
cattacgccatctgttgagctcatt

SEQ ID NO: 3809098 - DNA, 25 bp, Homo sapien
tgagctcattttcaagccactgaat

SEQ ID NO: 3809099 - DNA, 25 bp, Homo sapien
tgcagttaactccacattgacacaa

SEQ ID NO: 3809100 - DNA, 25 bp, Homo sapien
gccactgaatagtgttccgcaggat

SEQ ID NO: 3809101 - DNA, 25 bp, Homo sapien
gcttaacagaggattatgtttgcca

SEQ ID NO: 3809102 - DNA, 25 bp, Homo sapien
tatgcttgtccagtaatctcttaga

SEQ ID NO: 3809103 - DNA, 25 bp, Homo sapien
tcatgcatgtctacaggcttaacag

SEQ ID NO: 3809104 - DNA, 25 bp, Homo sapien
tactaaaagccgcaacatatgacgt

SEQ ID NO: 3809105 - DNA, 25 bp, Homo sapien
tacagttgccacctaatgaatcttg

SEQ ID NO: 3809106 - DNA, 25 bp, Homo sapien
cagactcattgtatgatgatggaga

SEQ ID NO: 3809107 - DNA, 25 bp, Homo sapien
ttactatctcgatatggaacatatg

SEQ ID NO: 3809108 - DNA, 25 bp, Homo sapien
gatggagagcagcaaattacaatag

SEQ ID NO: 3809109 - DNA, 25 bp, Homo sapien
gttgatgtttttagcttcatccagc

SEQ ID NO: 3809110 - DNA, 25 bp, Homo sapien
catttccaagagcagaaagtgactt

SEQ ID NO: 3809111 - DNA, 25 bp, Homo sapien
taccctcagccaaagcagaaataac

SEQ ID NO: 3809112 - DNA, 25 bp, Homo sapien
gcaccttcagctccagttttactaa

SEQ ID NO: 3809113 - DNA, 25 bp, Homo sapien
cagcttttgttccgtttgtgtgttc

SEQ ID NO: 3809114 - DNA, 25 bp, Homo sapien
tatactgtgactcctagagctatgt

SEQ ID NO: 3809115 - DNA, 25 bp, Homo sapien
atcaaccagataaagttttccactc

SEQ ID NO: 3809116 - DNA, 25 bp, Homo sapien
ttcactaccagctaaatcaaccaga

SEQ ID NO: 3809117 - DNA, 25 bp, Homo sapien
catctggactacatacaaaacgctc

SEQ ID NO: 3809118 - DNA, 25 bp, Homo sapien
tttccttcatctatggtatccataa

SEQ ID NO: 3809119 - DNA, 25 bp, Homo sapien
gactacatacaaaacgctctgtgca

SEQ ID NO: 3809120 - DNA, 25 bp, Homo sapien
tgtaactgctacatgtctgttggat

SEQ ID NO: 3809121 - DNA, 25 bp, Homo sapien
ttgtcttcatgaactgaaaggttgg

SEQ ID NO: 3809122 - DNA, 25 bp, Homo sapien
tcttcatgaactgaaaggttggtct

SEQ ID NO: 3809123 - DNA, 25 bp, Homo sapien
tgaactgaaaggttggtctttgaaa

SEQ ID NO: 3809124 - DNA, 25 bp, Homo sapien
agggaactcggtttttgtcttcatg

SEQ ID NO: 3809125 - DNA, 25 bp, Homo sapien
taacaggtcccttatcttatccaaa

SEQ ID NO: 3809126 - DNA, 25 bp, Homo sapien
aacaggtcccttatcttatccaaat

SEQ ID NO: 3809127 - DNA, 25 bp, Homo sapien
ctaacaggtcccttatcttatccaa

SEQ ID NO: 3809128 - DNA, 25 bp, Homo sapien
taattcccatgccttctggatcatg

SEQ ID NO: 3809129 - DNA, 25 bp, Homo sapien
ttcttggaataattcccatgccttc

SEQ ID NO: 3809130 - DNA, 25 bp, Homo sapien
aatatcttgcactattcttggaata

SEQ ID NO: 3809131 - DNA, 25 bp, Homo sapien
tggaataattcccatgccttctgga

SEQ ID NO: 3809132 - DNA, 25 bp, Homo sapien
gttccattatatccttcaagtacat

SEQ ID NO: 3809133 - DNA, 25 bp, Homo sapien
tgttccattatatccttcaagtaca

SEQ ID NO: 3809134 - DNA, 25 bp, Homo sapien
cttcccagaggatgtttgtccatat

SEQ ID NO: 3809135 - DNA, 25 bp, Homo sapien
ttgttccattatatccttcaagtac

SEQ ID NO: 3809136 - DNA, 25 bp, Homo sapien
tctttactacctcggaagtcaactc

SEQ ID NO: 3809137 - DNA, 25 bp, Homo sapien
taactgcattgcttccataatctca

SEQ ID NO: 3809138 - DNA, 25 bp, Homo sapien
ggaagtcaactccatgacaacacct

SEQ ID NO: 3809139 - DNA, 25 bp, Homo sapien
tccatgacaacacctttaccttttc

SEQ ID NO: 3809140 - DNA, 25 bp, Homo sapien
cctgggaatatctaacagaaatgca

SEQ ID NO: 3809141 - DNA, 25 bp, Homo sapien
gataaacaatgagcactctctcagc

SEQ ID NO: 3809142 - DNA, 25 bp, Homo sapien
tgttaaattcctcaagggataggta

SEQ ID NO: 3809143 - DNA, 25 bp, Homo sapien
tctacagtaactggaagtaactcca

SEQ ID NO: 3809144 - DNA, 25 bp, Homo sapien
gacaactcagcaggttgaatatatt

SEQ ID NO: 3809145 - DNA, 25 bp, Homo sapien
agacaactcagcaggttgaatatat

SEQ ID NO: 3809146 - DNA, 25 bp, Homo sapien
tctttgcacagtcattatacacttg

SEQ ID NO: 3809147 - DNA, 25 bp, Homo sapien
cacagtcattatacacttgctcttg

SEQ ID NO: 3809148 - DNA, 25 bp, Homo sapien
ggaacacccgatcaaatgcataagg

SEQ ID NO: 3809149 - DNA, 25 bp, Homo sapien
ctcttgagatgtgcttgactggaac

SEQ ID NO: 3809150 - DNA, 25 bp, Homo sapien
taaaggctgtacagcatacacagaa

SEQ ID NO: 3809151 - DNA, 25 bp, Homo sapien
tgctttgcggtaacaagttctctaa

SEQ ID NO: 3809152 - DNA, 25 bp, Homo sapien
aaatcactgattacatgagtagcag

SEQ ID NO: 3809153 - DNA, 25 bp, Homo sapien
gaaagatttgcctgccatggtgtca

SEQ ID NO: 3809154 - DNA, 25 bp, Homo sapien
tgtcgccgcggttcacttcagactc

SEQ ID NO: 3809155 - DNA, 25 bp, Homo sapien
cactttgatgttgcactcggccagg

SEQ ID NO: 3809156 - DNA, 25 bp, Homo sapien
gatcacgaccgtgtcttctccctga

SEQ ID NO: 3809157 - DNA, 25 bp, Homo sapien
tgagaggtctgaagcgacacatcac

SEQ ID NO: 3809158 - DNA, 25 bp, Homo sapien
ctcgcagccggggccggcggccggg

SEQ ID NO: 3809159 - DNA, 25 bp, Homo sapien
tcgcagccggggccggcggccggga

SEQ ID NO: 3809160 - DNA, 25 bp, Homo sapien
tctcgcagccggggccggcggccgg

SEQ ID NO: 3809161 - DNA, 25 bp, Homo sapien
gctcacttccgatccatcatggcag

SEQ ID NO: 3809162 - DNA, 25 bp, Homo sapien
ccctttacggtctgggcggactgcg

SEQ ID NO: 3809163 - DNA, 25 bp, Homo sapien
gccggcagccgttaaccctaatgct

SEQ ID NO: 3809164 - DNA, 25 bp, Homo sapien
gccgctcagtcttgcagggaacgcg

SEQ ID NO: 3809165 - DNA, 25 bp, Homo sapien
ttaattgcagaaaaagtcagcactc

SEQ ID NO: 3809166 - DNA, 25 bp, Homo sapien
gcactctccctctcaaaaactaatt

SEQ ID NO: 3809167 - DNA, 25 bp, Homo sapien
gcagaaaaagtcagcactctccctc

SEQ ID NO: 3809168 - DNA, 25 bp, Homo sapien
ttgcagaaaaagtcagcactctccc

SEQ ID NO: 3809169 - DNA, 25 bp, Homo sapien
ttctttccaacttcgtccaatacca

SEQ ID NO: 3809170 - DNA, 25 bp, Homo sapien
tttccaacttcgtccaataccaatg

SEQ ID NO: 3809171 - DNA, 25 bp, Homo sapien
ttcgtccaataccaatggccaccat

SEQ ID NO: 3809172 - DNA, 25 bp, Homo sapien
caacttcgtccaataccaatggcca

SEQ ID NO: 3809173 - DNA, 25 bp, Homo sapien
cctggaaactggtctttttcactgt

SEQ ID NO: 3809174 - DNA, 25 bp, Homo sapien
tggaaactggtctttttcactgtcc

SEQ ID NO: 3809175 - DNA, 25 bp, Homo sapien
ctcctggaaactggtctttttcact

SEQ ID NO: 3809176 - DNA, 25 bp, Homo sapien
attcttaactcctggaaactggtct

SEQ ID NO: 3809177 - DNA, 25 bp, Homo sapien
ctctgctgcgaaacttccgaatcat

SEQ ID NO: 3809178 - DNA, 25 bp, Homo sapien
gagacctgagcctcggcagaagact

SEQ ID NO: 3809179 - DNA, 25 bp, Homo sapien
ctctccctgcgggttacacagggga

SEQ ID NO: 3809180 - DNA, 25 bp, Homo sapien
cagaagactctgctgcgaaacttcc

SEQ ID NO: 3809181 - DNA, 25 bp, Homo sapien
cccaagtttaggactattgctattg

SEQ ID NO: 3809182 - DNA, 25 bp, Homo sapien
gcttgccagaatcttgccagtcacc

SEQ ID NO: 3809183 - DNA, 25 bp, Homo sapien
tgccagaatcttgccagtcaccttc

SEQ ID NO: 3809184 - DNA, 25 bp, Homo sapien
tgactgacccaagtttaggactatt

SEQ ID NO: 3809185 - DNA, 25 bp, Homo sapien
gcttccttgcatagaaaagtttaga

SEQ ID NO: 3809186 - DNA, 25 bp, Homo sapien
tgcttccttgcatagaaaagtttag

SEQ ID NO: 3809187 - DNA, 25 bp, Homo sapien
ttgcttccttgcatagaaaagttta

SEQ ID NO: 3809188 - DNA, 25 bp, Homo sapien
tattaatcatgccatgttattttta

SEQ ID NO: 3809189 - DNA, 25 bp, Homo sapien
aatcatgccatgttatttttaatta

SEQ ID NO: 3809190 - DNA, 25 bp, Homo sapien
tttaattatgtacaaagatctaaca

SEQ ID NO: 3809191 - DNA, 25 bp, Homo sapien
gatctaacatgtcacccagggacaa

SEQ ID NO: 3809192 - DNA, 25 bp, Homo sapien
gtcaccatacatagcttaccagcgt

SEQ ID NO: 3809193 - DNA, 25 bp, Homo sapien
tctttcacacgaaccacgtcgaatg

SEQ ID NO: 3809194 - DNA, 25 bp, Homo sapien
cgaaccacgtcgaatgatccagggt

SEQ ID NO: 3809195 - DNA, 25 bp, Homo sapien
tagcttaccagcgtcaaacttgatg

SEQ ID NO: 3809196 - DNA, 25 bp, Homo sapien
taataagatgtacatcaaagcaact

SEQ ID NO: 3809197 - DNA, 25 bp, Homo sapien
gatcaaggtagtggatggtgtgagc

SEQ ID NO: 3809198 - DNA, 25 bp, Homo sapien
ccacttcaggtgtaataagatgtac

SEQ ID NO: 3809199 - DNA, 25 bp, Homo sapien
tggccacttcaggtgtaataagatg

SEQ ID NO: 3809200 - DNA, 25 bp, Homo sapien
agatcagacagaaattctctctcat

SEQ ID NO: 3809201 - DNA, 25 bp, Homo sapien
cttggtgtcatagatcagacagaaa

SEQ ID NO: 3809202 - DNA, 25 bp, Homo sapien
gtcatagatcagacagaaattctct

SEQ ID NO: 3809203 - DNA, 25 bp, Homo sapien
catagatcagacagaaattctctct

SEQ ID NO: 3809204 - DNA, 25 bp, Homo sapien
actgctgcatgtaaatcttcttcct

SEQ ID NO: 3809205 - DNA, 25 bp, Homo sapien
atcagttcagaccttgccattgatc

SEQ ID NO: 3809206 - DNA, 25 bp, Homo sapien
gctgcatgtaaatcttcttcctcac

SEQ ID NO: 3809207 - DNA, 25 bp, Homo sapien
ttcttcctcacctgtcaggtcatac

SEQ ID NO: 3809208 - DNA, 25 bp, Homo sapien
tctcgcaacttgtggggaccactgg

SEQ ID NO: 3809209 - DNA, 25 bp, Homo sapien
gaccactggatggacaaggagcaaa

SEQ ID NO: 3809210 - DNA, 25 bp, Homo sapien
ctcgcaacttgtggggaccactgga

SEQ ID NO: 3809211 - DNA, 25 bp, Homo sapien
cactctcgcaacttgtggggaccac

SEQ ID NO: 3809212 - DNA, 25 bp, Homo sapien
tgataaacctcagtcccattatgtc

SEQ ID NO: 3809213 - DNA, 25 bp, Homo sapien
aaaaccctgtatgatccagatgcca

SEQ ID NO: 3809214 - DNA, 25 bp, Homo sapien
ggaaggctgcccagaatccatgtgt

SEQ ID NO: 3809215 - DNA, 25 bp, Homo sapien
cctctcagcctttcagtagggaagg

SEQ ID NO: 3809216 - DNA, 25 bp, Homo sapien
cttaatttcagatcatcggtgctta

SEQ ID NO: 3809217 - DNA, 25 bp, Homo sapien
gcttcacggtacttagtagctcttt

SEQ ID NO: 3809218 - DNA, 25 bp, Homo sapien
caataactaacaagagcttcacggt

SEQ ID NO: 3809219 - DNA, 25 bp, Homo sapien
gcaagtcctgtttgataactgggaa

SEQ ID NO: 3809220 - DNA, 25 bp, Homo sapien
gaaaaccgctcacactatggccttg

SEQ ID NO: 3809221 - DNA, 25 bp, Homo sapien
gccttgagcattgatgtcatcagca

SEQ ID NO: 3809222 - DNA, 25 bp, Homo sapien
tggagaaaaccgctcacactatggc

SEQ ID NO: 3809223 - DNA, 25 bp, Homo sapien
ggccttgagcattgatgtcatcagc

SEQ ID NO: 3809224 - DNA, 25 bp, Homo sapien
actgtgggatctgcgtgcagaagca

SEQ ID NO: 3809225 - DNA, 25 bp, Homo sapien
ctgtgggatctgcgtgcagaagcat

SEQ ID NO: 3809226 - DNA, 25 bp, Homo sapien
gactgtgggatctgcgtgcagaagc

SEQ ID NO: 3809227 - DNA, 25 bp, Homo sapien
ggactgtgggatctgcgtgcagaag

SEQ ID NO: 3809228 - DNA, 25 bp, Homo sapien
gtgactcgcagctgcctgtcgggct

SEQ ID NO: 3809229 - DNA, 25 bp, Homo sapien
gggaaacttcatctccgcagacaca

SEQ ID NO: 3809230 - DNA, 25 bp, Homo sapien
cagacacagcaactgcccgacagcc

SEQ ID NO: 3809231 - DNA, 25 bp, Homo sapien
gggagatgccagcgggaaacttcat

SEQ ID NO: 3809232 - DNA, 25 bp, Homo sapien
tcattcttgctacttactaatgcaa

SEQ ID NO: 3809233 - DNA, 25 bp, Homo sapien
caccacacctctgaggctgtggaca

SEQ ID NO: 3809234 - DNA, 25 bp, Homo sapien
ggacccaactcagaactgagctgtc

SEQ ID NO: 3809235 - DNA, 25 bp, Homo sapien
taatgcaatactgggctgaacggcc

SEQ ID NO: 3809236 - DNA, 25 bp, Homo sapien
tggggtggaagggtgttctcctgaa

SEQ ID NO: 3809237 - DNA, 25 bp, Homo sapien
gtggaagggtgttctcctgaactac

SEQ ID NO: 3809238 - DNA, 25 bp, Homo sapien
aggaaaacatggaactgcagcaaga

SEQ ID NO: 3809239 - DNA, 25 bp, Homo sapien
agcaaatggggtggaagggtgttct

SEQ ID NO: 3809240 - DNA, 25 bp, Homo sapien
agtcttggcagtgcagatgaaaaac

SEQ ID NO: 3809241 - DNA, 25 bp, Homo sapien
atgccttctttcactttgccaaaga

SEQ ID NO: 3809242 - DNA, 25 bp, Homo sapien
gcgctccatggcctccataatattc

SEQ ID NO: 3809243 - DNA, 25 bp, Homo sapien
ggcgtgtgaagtcacgaccctgata

SEQ ID NO: 3809244 - DNA, 25 bp, Homo sapien
agggctcgccgtcgatggcaatgtc

SEQ ID NO: 3809245 - DNA, 25 bp, Homo sapien
ctcgccgtcgatggcaatgtcgaag

SEQ ID NO: 3809246 - DNA, 25 bp, Homo sapien
gccgtcgatggcaatgtcgaagaac

SEQ ID NO: 3809247 - DNA, 25 bp, Homo sapien
ggctcgccgtcgatggcaatgtcga

SEQ ID NO: 3809248 - DNA, 25 bp, Homo sapien
ggtgcctgatatgtgagtcctagaa

SEQ ID NO: 3809249 - DNA, 25 bp, Homo sapien
aagaaggtgcctgatatgtgagtcc

SEQ ID NO: 3809250 - DNA, 25 bp, Homo sapien
gaaggtgcctgatatgtgagtccta

SEQ ID NO: 3809251 - DNA, 25 bp, Homo sapien
aaggtgcctgatatgtgagtcctag

SEQ ID NO: 3809252 - DNA, 25 bp, Homo sapien
ctctctcttttaatgaagcttccat

SEQ ID NO: 3809253 - DNA, 25 bp, Homo sapien
tctgtattgctctctctcttttaat

SEQ ID NO: 3809254 - DNA, 25 bp, Homo sapien
tgctctctctcttttaatgaagctt

SEQ ID NO: 3809255 - DNA, 25 bp, Homo sapien
tctctctcttttaatgaagcttcca

SEQ ID NO: 3809256 - DNA, 25 bp, Homo sapien
gccagtgcctgagagagccttgcat

SEQ ID NO: 3809257 - DNA, 25 bp, Homo sapien
cactgtctctttgaacttccttggc

SEQ ID NO: 3809258 - DNA, 25 bp, Homo sapien
cagttccacattgcaactgccagtg

SEQ ID NO: 3809259 - DNA, 25 bp, Homo sapien
gaggcaggttaggtgccacttctct

SEQ ID NO: 3809260 - DNA, 25 bp, Homo sapien
aagggaggaactgttgccttttgca

SEQ ID NO: 3809261 - DNA, 25 bp, Homo sapien
caattgtgagggtttgataccttac

SEQ ID NO: 3809262 - DNA, 25 bp, Homo sapien
tgagggtttgataccttacaggaag

SEQ ID NO: 3809263 - DNA, 25 bp, Homo sapien
cttttcaattgtgagggtttgatac

SEQ ID NO: 3809264 - DNA, 25 bp, Homo sapien
gatgtgcgtctccaacattttacaa

SEQ ID NO: 3809265 - DNA, 25 bp, Homo sapien
tgtttgatgtgcgtctccaacattt

SEQ ID NO: 3809266 - DNA, 25 bp, Homo sapien
ttgatgtgcgtctccaacattttac

SEQ ID NO: 3809267 - DNA, 25 bp, Homo sapien
atgtgcgtctccaacattttacaag

SEQ ID NO: 3809268 - DNA, 25 bp, Homo sapien
ctctgaagttttcacgtctcactgg

SEQ ID NO: 3809269 - DNA, 25 bp, Homo sapien
ttttcacgtctcactggtaaccagg

SEQ ID NO: 3809270 - DNA, 25 bp, Homo sapien
caggaggacccgagaggtccactgt

SEQ ID NO: 3809271 - DNA, 25 bp, Homo sapien
tctcactggtaaccaggactcagcc

SEQ ID NO: 3809272 - DNA, 25 bp, Homo sapien
aaaacatcattgcagcatcttgact

SEQ ID NO: 3809273 - DNA, 25 bp, Homo sapien
taatcttctcatgaagaatccacaa

SEQ ID NO: 3809274 - DNA, 25 bp, Homo sapien
cttcggctttttgcccacacaaaca

SEQ ID NO: 3809275 - DNA, 25 bp, Homo sapien
ctttttgcccacacaaacattggcc

SEQ ID NO: 3809276 - DNA, 25 bp, Homo sapien
gccttccaggtatgaaggacatcaa

SEQ ID NO: 3809277 - DNA, 25 bp, Homo sapien
gtactgttgccttccaggtatgaag

SEQ ID NO: 3809278 - DNA, 25 bp, Homo sapien
tactgttgccttccaggtatgaagg

SEQ ID NO: 3809279 - DNA, 25 bp, Homo sapien
caggtatgaaggacatcaatcatca

SEQ ID NO: 3809280 - DNA, 25 bp, Homo sapien
cacatgttgttagaaagcactggaa

SEQ ID NO: 3809281 - DNA, 25 bp, Homo sapien
aaatctccgggaatactcactcaag

SEQ ID NO: 3809282 - DNA, 25 bp, Homo sapien
cagagtttgctagaaatgcggaacc

SEQ ID NO: 3809283 - DNA, 25 bp, Homo sapien
taaatccggaagcttatgacagcaa

SEQ ID NO: 3809284 - DNA, 25 bp, Homo sapien
ttaggtctttctgccccaggcatct

SEQ ID NO: 3809285 - DNA, 25 bp, Homo sapien
tttaggtctttctgccccaggcatc

SEQ ID NO: 3809286 - DNA, 25 bp, Homo sapien
ggagcaccagtctgtgatctgcaag

SEQ ID NO: 3809287 - DNA, 25 bp, Homo sapien
tctgcaagctgttccagcaaacact

SEQ ID NO: 3809288 - DNA, 25 bp, Homo sapien
tgaagacctccactggccagctgag

SEQ ID NO: 3809289 - DNA, 25 bp, Homo sapien
gaaagcacatatggggggctatcct

SEQ ID NO: 3809290 - DNA, 25 bp, Homo sapien
gcctggataaaggtaaccagaagct

SEQ ID NO: 3809291 - DNA, 25 bp, Homo sapien
ccccagtgacccgtagggcctggat

SEQ ID NO: 3809292 - DNA, 25 bp, Homo sapien
gaccatccactcacattcaggtttg

SEQ ID NO: 3809293 - DNA, 25 bp, Homo sapien
tgctacaatagctcacaaaactcaa

SEQ ID NO: 3809294 - DNA, 25 bp, Homo sapien
tgactaactgtaactgggtataaat

SEQ ID NO: 3809295 - DNA, 25 bp, Homo sapien
tccagacactagtcacaagtcccag

SEQ ID NO: 3809296 - DNA, 25 bp, Homo sapien
gacaaagcactagtagtagtctgtt

SEQ ID NO: 3809297 - DNA, 25 bp, Homo sapien
gactgggcattcagacttcggtact

SEQ ID NO: 3809298 - DNA, 25 bp, Homo sapien
aaccttaaggataatgtatgccatt

SEQ ID NO: 3809299 - DNA, 25 bp, Homo sapien
gataatgtatgccattggactgggc

SEQ ID NO: 3809300 - DNA, 25 bp, Homo sapien
tccaaaggaaggcacccgatatttg

SEQ ID NO: 3809301 - DNA, 25 bp, Homo sapien
gcacccgatatttgtggttctggcc

SEQ ID NO: 3809302 - DNA, 25 bp, Homo sapien
cagaagagaggtcaaatatttccaa

SEQ ID NO: 3809303 - DNA, 25 bp, Homo sapien
gaaggcacccgatatttgtggttct

SEQ ID NO: 3809304 - DNA, 25 bp, Homo sapien
aaatgggactactgggctgttcgca

SEQ ID NO: 3809305 - DNA, 25 bp, Homo sapien
tacaaaataccaaggagtccacagc

SEQ ID NO: 3809306 - DNA, 25 bp, Homo sapien
cgcagagcagcaacataatattagt

SEQ ID NO: 3809307 - DNA, 25 bp, Homo sapien
gataaaacagcaggttccgcaccat

SEQ ID NO: 3809308 - DNA, 25 bp, Homo sapien
acatatatacaagggtattacaaat

SEQ ID NO: 3809309 - DNA, 25 bp, Homo sapien
tatgcagtactgtacagataattgc

SEQ ID NO: 3809310 - DNA, 25 bp, Homo sapien
catttctgtattcaagtaacatata

SEQ ID NO: 3809311 - DNA, 25 bp, Homo sapien
tatacaagggtattacaaatatgca

SEQ ID NO: 3809312 - DNA, 25 bp, Homo sapien
aaaattgaagcatgagagatgagca

SEQ ID NO: 3809313 - DNA, 25 bp, Homo sapien
agatgagcattgctgtcaagtcccc

SEQ ID NO: 3809314 - DNA, 25 bp, Homo sapien
gaaacgcatgtgctgctttccatca

SEQ ID NO: 3809315 - DNA, 25 bp, Homo sapien
tagcacctaatcaagtccccaggct

SEQ ID NO: 3809316 - DNA, 25 bp, Homo sapien
tccatcgctactgtgttgtctgcta

SEQ ID NO: 3809317 - DNA, 25 bp, Homo sapien
catcgctactgtgttgtctgctatg

SEQ ID NO: 3809318 - DNA, 25 bp, Homo sapien
ccatcgctactgtgttgtctgctat

SEQ ID NO: 3809319 - DNA, 25 bp, Homo sapien
ctccatcgctactgtgttgtctgct

SEQ ID NO: 3809320 - DNA, 25 bp, Homo sapien
tatcagaaatcaggctaatgttgac

SEQ ID NO: 3809321 - DNA, 25 bp, Homo sapien
tagtagtactcaagcaacctagatg

SEQ ID NO: 3809322 - DNA, 25 bp, Homo sapien
gctagcaagtagaggaatacgaatc

SEQ ID NO: 3809323 - DNA, 25 bp, Homo sapien
gactctttgggaacaagctagcaag

SEQ ID NO: 3809324 - DNA, 25 bp, Homo sapien
ttgcccgaagactaacacagattgg

SEQ ID NO: 3809325 - DNA, 25 bp, Homo sapien
tacaggccacagttcattgctacaa

SEQ ID NO: 3809326 - DNA, 25 bp, Homo sapien
gaagagtcccagaattccctgtgca

SEQ ID NO: 3809327 - DNA, 25 bp, Homo sapien
gctgagacagtctaccagtctggca

SEQ ID NO: 3809328 - DNA, 25 bp, Homo sapien
tgtagtactactgaggtgtaagccc

SEQ ID NO: 3809329 - DNA, 25 bp, Homo sapien
tgtaacaaagctgaacctgccgttg

SEQ ID NO: 3809330 - DNA, 25 bp, Homo sapien
tacttgatgactcagtgcactgtgg

SEQ ID NO: 3809331 - DNA, 25 bp, Homo sapien
cctgagttgttgcagaattggcagc

SEQ ID NO: 3809332 - DNA, 25 bp, Homo sapien
aagcaccacatcatccttcatcttg

SEQ ID NO: 3809333 - DNA, 25 bp, Homo sapien
caaactgtgcactagcagaatccaa

SEQ ID NO: 3809334 - DNA, 25 bp, Homo sapien
atcttgaatcccatcagttgttctg

SEQ ID NO: 3809335 - DNA, 25 bp, Homo sapien
tcaccccgattccaagcaccacatc

SEQ ID NO: 3809336 - DNA, 25 bp, Homo sapien
cctgtatattcaggcgaaagccact

SEQ ID NO: 3809337 - DNA, 25 bp, Homo sapien
tatattcaggcgaaagccacttttc

SEQ ID NO: 3809338 - DNA, 25 bp, Homo sapien
ttctaaaccctgtatattcaggcga

SEQ ID NO: 3809339 - DNA, 25 bp, Homo sapien
caggcgaaagccacttttctgctgg

SEQ ID NO: 3809340 - DNA, 25 bp, Homo sapien
gttgctggtattgttcggctgtaaa

SEQ ID NO: 3809341 - DNA, 25 bp, Homo sapien
ggaggaattactatttgcttgctgt

SEQ ID NO: 3809342 - DNA, 25 bp, Homo sapien
tgttggtggaggaattactatttgc

SEQ ID NO: 3809343 - DNA, 25 bp, Homo sapien
ttgctgttgctgaatttgtgcaagc

SEQ ID NO: 3809344 - DNA, 25 bp, Homo sapien
tctgacaaaggatcatgatcctgct

SEQ ID NO: 3809345 - DNA, 25 bp, Homo sapien
aaatgcccagctgtcatgtatgtct

SEQ ID NO: 3809346 - DNA, 25 bp, Homo sapien
tgacacttgttctacacagtgtaga

SEQ ID NO: 3809347 - DNA, 25 bp, Homo sapien
tcctgctaaagatcacttccaaatg

SEQ ID NO: 3809348 - DNA, 25 bp, Homo sapien
cagaaatggctatactataactcgc

SEQ ID NO: 3809349 - DNA, 25 bp, Homo sapien
actcataaacaacttgggcatctct

SEQ ID NO: 3809350 - DNA, 25 bp, Homo sapien
tatttggcttaagtagcaggaaagc

SEQ ID NO: 3809351 - DNA, 25 bp, Homo sapien
caggaaagcttatcagctgacttgt

SEQ ID NO: 3809352 - DNA, 25 bp, Homo sapien
cctggagttggattaagtgaaatgc

SEQ ID NO: 3809353 - DNA, 25 bp, Homo sapien
gaaatgcacttatgatatggctgca

SEQ ID NO: 3809354 - DNA, 25 bp, Homo sapien
tacagtagtctgtaggtatctatcc

SEQ ID NO: 3809355 - DNA, 25 bp, Homo sapien
tgaacagtgttaccctacagtagtc

SEQ ID NO: 3809356 - DNA, 25 bp, Homo sapien
tgcctggctctataaatttcttaat

SEQ ID NO: 3809357 - DNA, 25 bp, Homo sapien
tgtttggactgtttatgttaatgga

SEQ ID NO: 3809358 - DNA, 25 bp, Homo sapien
gcctggctctataaatttcttaata

SEQ ID NO: 3809359 - DNA, 25 bp, Homo sapien
tgtatgtttggactgtttatgttaa

SEQ ID NO: 3809360 - DNA, 25 bp, Homo sapien
cacttgctggtctctatgttaaagc

SEQ ID NO: 3809361 - DNA, 25 bp, Homo sapien
caaatgggaaatggttggacctgac

SEQ ID NO: 3809362 - DNA, 25 bp, Homo sapien
cagaccacatagtcgaacaaatggg

SEQ ID NO: 3809363 - DNA, 25 bp, Homo sapien
gataaatcttgtggttcacggacta

SEQ ID NO: 3809364 - DNA, 25 bp, Homo sapien
caaagtgtgctgaaccactgctact

SEQ ID NO: 3809365 - DNA, 25 bp, Homo sapien
tgtgctgaaccactgctacttttac

SEQ ID NO: 3809366 - DNA, 25 bp, Homo sapien
aagtgtgctgaaccactgctacttt

SEQ ID NO: 3809367 - DNA, 25 bp, Homo sapien
gtgtgctgaaccactgctactttta

SEQ ID NO: 3809368 - DNA, 25 bp, Homo sapien
gtcccaggttgtgctgttcctgttc

SEQ ID NO: 3809369 - DNA, 25 bp, Homo sapien
tactgcatgtctgggtcccaggttg

SEQ ID NO: 3809370 - DNA, 25 bp, Homo sapien
ttcctgttcggtttatactcctata

SEQ ID NO: 3809371 - DNA, 25 bp, Homo sapien
aggtactgcatgtctgggtcccagg

SEQ ID NO: 3809372 - DNA, 25 bp, Homo sapien
cactgtcatgtagggatggtgtccg

SEQ ID NO: 3809373 - DNA, 25 bp, Homo sapien
tggcaaactgattgactggagaatg

SEQ ID NO: 3809374 - DNA, 25 bp, Homo sapien
ccagatggtgaaacacactgtcata

SEQ ID NO: 3809375 - DNA, 25 bp, Homo sapien
ggtgtccgaggcctaaaatgccgcc

SEQ ID NO: 3809376 - DNA, 25 bp, Homo sapien
taggactagtccaaggccagttgcc

SEQ ID NO: 3809377 - DNA, 25 bp, Homo sapien
ccagttgccagtttggtctaagtga

SEQ ID NO: 3809378 - DNA, 25 bp, Homo sapien
gcagtatctatatcgcacatcccct

SEQ ID NO: 3809379 - DNA, 25 bp, Homo sapien
cgtgcaaatccaatacacctttggg

SEQ ID NO: 3809380 - DNA, 25 bp, Homo sapien
gcatagtactgacagcctgctttcc

SEQ ID NO: 3809381 - DNA, 25 bp, Homo sapien
ctcagcttccgaagagccagacaaa

SEQ ID NO: 3809382 - DNA, 25 bp, Homo sapien
cttcctcagcttccgaagagccaga

SEQ ID NO: 3809383 - DNA, 25 bp, Homo sapien
tgctttcctacggaaagcaaaagga

SEQ ID NO: 3809384 - DNA, 25 bp, Homo sapien
cgtttcggtcggataagatcggctt

SEQ ID NO: 3809385 - DNA, 25 bp, Homo sapien
tagcattgaagactggcagtgcagc

SEQ ID NO: 3809386 - DNA, 25 bp, Homo sapien
tagcagcggcagacgatggtaagac

SEQ ID NO: 3809387 - DNA, 25 bp, Homo sapien
cagtgcagcaggactcgtctgttgg

SEQ ID NO: 3809388 - DNA, 25 bp, Homo sapien
ttgaactccttcacatccattgctt

SEQ ID NO: 3809389 - DNA, 25 bp, Homo sapien
gatggcataagtaggtttcattggc

SEQ ID NO: 3809390 - DNA, 25 bp, Homo sapien
tcctggtgtttaaattgactgctat

SEQ ID NO: 3809391 - DNA, 25 bp, Homo sapien
tgtgccataacctcagacatgatct

SEQ ID NO: 3809392 - DNA, 25 bp, Homo sapien
gaagcagtactatcaattaactcaa

SEQ ID NO: 3809393 - DNA, 25 bp, Homo sapien
gtgaatccagtcacttttaaagaaa

SEQ ID NO: 3809394 - DNA, 25 bp, Homo sapien
cctacatgcaactcaaggaccaaaa

SEQ ID NO: 3809395 - DNA, 25 bp, Homo sapien
tgttaatggcactatacttcctcta

SEQ ID NO: 3809396 - DNA, 25 bp, Homo sapien
ccagtgttaagtgcaatagctctct

SEQ ID NO: 3809397 - DNA, 25 bp, Homo sapien
gcattttttcgtaagaggcttcatc

SEQ ID NO: 3809398 - DNA, 25 bp, Homo sapien
tagtaacagctcgacttagatctcg

SEQ ID NO: 3809399 - DNA, 25 bp, Homo sapien
tcgtcgcagcttaagcattttttcg

SEQ ID NO: 3809400 - DNA, 25 bp, Homo sapien
gaagttgcttgtttaatgttagtaa

SEQ ID NO: 3809401 - DNA, 25 bp, Homo sapien
aagttgcttgtttaatgttagtaag

SEQ ID NO: 3809402 - DNA, 25 bp, Homo sapien
tgctggaaccatctcgcttctcttg

SEQ ID NO: 3809403 - DNA, 25 bp, Homo sapien
cataaggatcatttgtgctggaacc

SEQ ID NO: 3809404 - DNA, 25 bp, Homo sapien
tactgatggaataagagatggccct

SEQ ID NO: 3809405 - DNA, 25 bp, Homo sapien
cgccttctaaaagccacataaggat

SEQ ID NO: 3809406 - DNA, 25 bp, Homo sapien
cagaatccaaatcataatcaggctg

SEQ ID NO: 3809407 - DNA, 25 bp, Homo sapien
ttctaggcggtcaatcatctcctca

SEQ ID NO: 3809408 - DNA, 25 bp, Homo sapien
tgcctttttctaggcggtcaatcat

SEQ ID NO: 3809409 - DNA, 25 bp, Homo sapien
tcaggctgttcagcatccaaactaa

SEQ ID NO: 3809410 - DNA, 25 bp, Homo sapien
agaaggaaccatatgcaatcattta

SEQ ID NO: 3809411 - DNA, 25 bp, Homo sapien
gccatgtgcggctaactgaatttat

SEQ ID NO: 3809412 - DNA, 25 bp, Homo sapien
gatagggaccaactagcaatgttct

SEQ ID NO: 3809413 - DNA, 25 bp, Homo sapien
ccagaaagccaaattgatagggacc

SEQ ID NO: 3809414 - DNA, 25 bp, Homo sapien
tcacagtacctgcaatcatgggccc

SEQ ID NO: 3809415 - DNA, 25 bp, Homo sapien
tctgatcatcaataagtaagccatc

SEQ ID NO: 3809416 - DNA, 25 bp, Homo sapien
gtaccttttgactttactgaccaca

SEQ ID NO: 3809417 - DNA, 25 bp, Homo sapien
tggtttctcaatgtgcttgcaagga

SEQ ID NO: 3809418 - DNA, 25 bp, Homo sapien
taaatgtaacaaaacgtgactgcac

SEQ ID NO: 3809419 - DNA, 25 bp, Homo sapien
tgggaccggtataaccatattatcc

SEQ ID NO: 3809420 - DNA, 25 bp, Homo sapien
catagtaagcaatattactttctgc

SEQ ID NO: 3809421 - DNA, 25 bp, Homo sapien
ttggcatcttaaattccccaggata

SEQ ID NO: 3809422 - DNA, 25 bp, Homo sapien
tccccaggatatatagactcatagt

SEQ ID NO: 3809423 - DNA, 25 bp, Homo sapien
aaatagcccgctgaagatgatgttc

SEQ ID NO: 3809424 - DNA, 25 bp, Homo sapien
gctgaaatagcccgctgaagatgat

SEQ ID NO: 3809425 - DNA, 25 bp, Homo sapien
gaaatagcccgctgaagatgatgtt

SEQ ID NO: 3809426 - DNA, 25 bp, Homo sapien
gtgctgaaatagcccgctgaagatg

SEQ ID NO: 3809427 - DNA, 25 bp, Homo sapien
aagaacaatgtagcctcatactgca

SEQ ID NO: 3809428 - DNA, 25 bp, Homo sapien
tattatctagtatggtaatttccca

SEQ ID NO: 3809429 - DNA, 25 bp, Homo sapien
aaaacatgacccctaaggagttctg

SEQ ID NO: 3809430 - DNA, 25 bp, Homo sapien
tagtatggtaatttcccactcatac

SEQ ID NO: 3809431 - DNA, 25 bp, Homo sapien
tactgagtgctaaccattatgtgcc

SEQ ID NO: 3809432 - DNA, 25 bp, Homo sapien
tgagactatcgctttatcagtggag

SEQ ID NO: 3809433 - DNA, 25 bp, Homo sapien
gacatgctctacatgacactgcaga

SEQ ID NO: 3809434 - DNA, 25 bp, Homo sapien
aaaggaggatacagccattccgaac

SEQ ID NO: 3809435 - DNA, 25 bp, Homo sapien
gcataaactctcaaatcagcctgat

SEQ ID NO: 3809436 - DNA, 25 bp, Homo sapien
tatttacgataattaggttcagctg

SEQ ID NO: 3809437 - DNA, 25 bp, Homo sapien
gaattggaatcagatgaaccatagc

SEQ ID NO: 3809438 - DNA, 25 bp, Homo sapien
gggaatagctatgtttgaagaccac

SEQ ID NO: 3809439 - DNA, 25 bp, Homo sapien
ttgtcaaaagatgaaaaggatcaac

SEQ ID NO: 3809440 - DNA, 25 bp, Homo sapien
cattgtcaaaagatgaaaaggatca

SEQ ID NO: 3809441 - DNA, 25 bp, Homo sapien
attgtcaaaagatgaaaaggatcaa

SEQ ID NO: 3809442 - DNA, 25 bp, Homo sapien
gaatgctacaaccagtccacctaag

SEQ ID NO: 3809443 - DNA, 25 bp, Homo sapien
cagtggcagagactaaagaatgctc

SEQ ID NO: 3809444 - DNA, 25 bp, Homo sapien
gccttacatgtatcgcagttcgcag

SEQ ID NO: 3809445 - DNA, 25 bp, Homo sapien
gactgtagggccagcgaatcttaaa

SEQ ID NO: 3809446 - DNA, 25 bp, Homo sapien
gagctactacatacacttggcttat

SEQ ID NO: 3809447 - DNA, 25 bp, Homo sapien
aacaaatggccatgctactctaaag

SEQ ID NO: 3809448 - DNA, 25 bp, Homo sapien
aaaagtaacatttcactgtcacagc

SEQ ID NO: 3809449 - DNA, 25 bp, Homo sapien
gctgaaagtcagtgcccaactagac

SEQ ID NO: 3809450 - DNA, 25 bp, Homo sapien
taaaaattcttacagtaccaagaga

SEQ ID NO: 3809451 - DNA, 25 bp, Homo sapien
acaaatccacgcgactcctggactt

SEQ ID NO: 3809452 - DNA, 25 bp, Homo sapien
ttccaaaaacaacattacagagcat

SEQ ID NO: 3809453 - DNA, 25 bp, Homo sapien
cctggacttccttgaactgtcaata

SEQ ID NO: 3809454 - DNA, 25 bp, Homo sapien
tggatacaaacgtcccagaaagagg

SEQ ID NO: 3809455 - DNA, 25 bp, Homo sapien
caaggtaaagccacagcgatggtaa

SEQ ID NO: 3809456 - DNA, 25 bp, Homo sapien
catagagcagcaggcgacatgacat

SEQ ID NO: 3809457 - DNA, 25 bp, Homo sapien
caagttatactgtcaaggatctggg

SEQ ID NO: 3809458 - DNA, 25 bp, Homo sapien
cccgggtacaagtggccagggtcag

SEQ ID NO: 3809459 - DNA, 25 bp, Homo sapien
agcttcgtcacgtgacccctttgtg

SEQ ID NO: 3809460 - DNA, 25 bp, Homo sapien
ggcccaacccaagaactaagacaca

SEQ ID NO: 3809461 - DNA, 25 bp, Homo sapien
cacggagaggcctgtaggcgggtcc

SEQ ID NO: 3809462 - DNA, 25 bp, Homo sapien
gcagagggagcgggcctgacggtgg

SEQ ID NO: 3809463 - DNA, 25 bp, Homo sapien
gatggcggccattttgtgtgggttt

SEQ ID NO: 3809464 - DNA, 25 bp, Homo sapien
gcgaagagaagatggcggccatttt

SEQ ID NO: 3809465 - DNA, 25 bp, Homo sapien
cgggcctgacggtgggtcggacagg

SEQ ID NO: 3809466 - DNA, 25 bp, Homo sapien
tgcggcacggccctgtttatcgagg

SEQ ID NO: 3809467 - DNA, 25 bp, Homo sapien
ggcagatcctcacagcggaaaaccg

SEQ ID NO: 3809468 - DNA, 25 bp, Homo sapien
tattcgtgcaggtcgggcagatcct

SEQ ID NO: 3809469 - DNA, 25 bp, Homo sapien
gcgcccgaaacgacagtttactcat

SEQ ID NO: 3809470 - DNA, 25 bp, Homo sapien
gaaacggccccggccagcgggatca

SEQ ID NO: 3809471 - DNA, 25 bp, Homo sapien
gtccccactcgccaaccgctgccgg

SEQ ID NO: 3809472 - DNA, 25 bp, Homo sapien
gccagcgggatcatggagaaccggg

SEQ ID NO: 3809473 - DNA, 25 bp, Homo sapien
tccccactcgccaaccgctgccggg

SEQ ID NO: 3809474 - DNA, 25 bp, Homo sapien
gctcgctctcttcaatacgccatgg

SEQ ID NO: 3809475 - DNA, 25 bp, Homo sapien
ggtgggaggctgtgccgctccgctc

SEQ ID NO: 3809476 - DNA, 25 bp, Homo sapien
ccgggcactaacaccagccgggagg

SEQ ID NO: 3809477 - DNA, 25 bp, Homo sapien
gcagagcccgccgtccgggcactaa

SEQ ID NO: 3809478 - DNA, 25 bp, Homo sapien
cccacactgcatcgcgcagcggcgc

SEQ ID NO: 3809479 - DNA, 25 bp, Homo sapien
ttccccacactgcatcgcgcagcgg

SEQ ID NO: 3809480 - DNA, 25 bp, Homo sapien
cattccccacactgcatcgcgcagc

SEQ ID NO: 3809481 - DNA, 25 bp, Homo sapien
acactgcatcgcgcagcggcgcggg

SEQ ID NO: 3809482 - DNA, 25 bp, Homo sapien
tattatatgcctgctaagagacacc

SEQ ID NO: 3809483 - DNA, 25 bp, Homo sapien
gagagtctaaaatcaccctccgtgg

SEQ ID NO: 3809484 - DNA, 25 bp, Homo sapien
tgtggatttccaactctcaggtcct

SEQ ID NO: 3809485 - DNA, 25 bp, Homo sapien
gctggagtcccaagcctcttttata

SEQ ID NO: 3809486 - DNA, 25 bp, Homo sapien
aaatgtgtaatgtgtaactggccac

SEQ ID NO: 3809487 - DNA, 25 bp, Homo sapien
tatttacagccaatccctagtgccc

SEQ ID NO: 3809488 - DNA, 25 bp, Homo sapien
gccttattctgagctgcacattgag

SEQ ID NO: 3809489 - DNA, 25 bp, Homo sapien
gattctcataggacctcaagcctta

SEQ ID NO: 3809490 - DNA, 25 bp, Homo sapien
cattgtgccaattgcttaggtaagc

SEQ ID NO: 3809491 - DNA, 25 bp, Homo sapien
tttgcttttataacacgaggaagga

SEQ ID NO: 3809492 - DNA, 25 bp, Homo sapien
tagtgggtggtagacaaagactgtc

SEQ ID NO: 3809493 - DNA, 25 bp, Homo sapien
gccttacacttttgagtagatagac

SEQ ID NO: 3809494 - DNA, 25 bp, Homo sapien
actgggaccgcaagcttgagctacc

SEQ ID NO: 3809495 - DNA, 25 bp, Homo sapien
aagtactgggaccgcaagcttgagc

SEQ ID NO: 3809496 - DNA, 25 bp, Homo sapien
gtactgggaccgcaagcttgagcta

SEQ ID NO: 3809497 - DNA, 25 bp, Homo sapien
tactgggaccgcaagcttgagctac

SEQ ID NO: 3809498 - DNA, 25 bp, Homo sapien
aacccatgctaggttaccttaactg

SEQ ID NO: 3809499 - DNA, 25 bp, Homo sapien
cctgagtcagagaggttatggccta

SEQ ID NO: 3809500 - DNA, 25 bp, Homo sapien
tctgccttaagtgtgctcaaatgtg

SEQ ID NO: 3809501 - DNA, 25 bp, Homo sapien
catgccctagggaacgtaacttcaa

SEQ ID NO: 3809502 - DNA, 25 bp, Homo sapien
tatttatcaagctcgtccaacctgc

SEQ ID NO: 3809503 - DNA, 25 bp, Homo sapien
caaaagcattgtactataagccagg

SEQ ID NO: 3809504 - DNA, 25 bp, Homo sapien
gaaaatgttgctcttgccgttagtg

SEQ ID NO: 3809505 - DNA, 25 bp, Homo sapien
taatcataagaatagtctgccatca

SEQ ID NO: 3809506 - DNA, 25 bp, Homo sapien
tataaacacaagcaggcacaccctg

SEQ ID NO: 3809507 - DNA, 25 bp, Homo sapien
taaactctccagcataaccagaggg

SEQ ID NO: 3809508 - DNA, 25 bp, Homo sapien
tcaaagtgggtaaacacgctaaata

SEQ ID NO: 3809509 - DNA, 25 bp, Homo sapien
tagatagagtatagagacacaaaaa

SEQ ID NO: 3809510 - DNA, 25 bp, Homo sapien
tgagcatttacgtatttcaaagtgg

SEQ ID NO: 3809511 - DNA, 25 bp, Homo sapien
gccaacattactggcacaaaacaag

SEQ ID NO: 3809512 - DNA, 25 bp, Homo sapien
ggtagaacgtgcagagatcaaagct

SEQ ID NO: 3809513 - DNA, 25 bp, Homo sapien
ttagccggtggctctttcaaagact

SEQ ID NO: 3809514 - DNA, 25 bp, Homo sapien
cctctgtagttcacagtaattaaag

SEQ ID NO: 3809515 - DNA, 25 bp, Homo sapien
tactttcttccatgatcggtggccg

SEQ ID NO: 3809516 - DNA, 25 bp, Homo sapien
taagctcgctatgaagtgacactgc

SEQ ID NO: 3809517 - DNA, 25 bp, Homo sapien
caactttgcgatggcaagcaggcga

SEQ ID NO: 3809518 - DNA, 25 bp, Homo sapien
gatcctctgcatgcaaacctggcca

SEQ ID NO: 3809519 - DNA, 25 bp, Homo sapien
gctacctttaccatgtacacgatca

SEQ ID NO: 3809520 - DNA, 25 bp, Homo sapien
ggcagccatccgtttgctaccttta

SEQ ID NO: 3809521 - DNA, 25 bp, Homo sapien
gacgtgaccacccttgatttttgac

SEQ ID NO: 3809522 - DNA, 25 bp, Homo sapien
tgtacacgatcacctcttgacgtga

SEQ ID NO: 3809523 - DNA, 25 bp, Homo sapien
ccaattttagtatttctgttgccaa

SEQ ID NO: 3809524 - DNA, 25 bp, Homo sapien
attttagtatttctgttgccaaagt

SEQ ID NO: 3809525 - DNA, 25 bp, Homo sapien
tttagtatttctgttgccaaagtga

SEQ ID NO: 3809526 - DNA, 25 bp, Homo sapien
ttagtatttctgttgccaaagtgag

SEQ ID NO: 3809527 - DNA, 25 bp, Homo sapien
cctaaatgggtatatcactgtgaca

SEQ ID NO: 3809528 - DNA, 25 bp, Homo sapien
taatcacaatagaagagctctgtag

SEQ ID NO: 3809529 - DNA, 25 bp, Homo sapien
tgtgacactggcagtaatgtcctca

SEQ ID NO: 3809530 - DNA, 25 bp, Homo sapien
taggactctgagaatattattgaac

SEQ ID NO: 3809531 - DNA, 25 bp, Homo sapien
agatctgggcttggttaaccaggcc

SEQ ID NO: 3809532 - DNA, 25 bp, Homo sapien
tatttagacctggatggagtttacc

SEQ ID NO: 3809533 - DNA, 25 bp, Homo sapien
tgaccactgggcaaggattcagcac

SEQ ID NO: 3809534 - DNA, 25 bp, Homo sapien
cgaatatgtttaagtccagcaggct

SEQ ID NO: 3809535 - DNA, 25 bp, Homo sapien
tccagttcaggtgaatgggacagct

SEQ ID NO: 3809536 - DNA, 25 bp, Homo sapien
cacagagtgactcaggttccttcgg

SEQ ID NO: 3809537 - DNA, 25 bp, Homo sapien
tgtatggctccaccatctctatggc

SEQ ID NO: 3809538 - DNA, 25 bp, Homo sapien
taatagtccaaggtgtccagttcag

SEQ ID NO: 3809539 - DNA, 25 bp, Homo sapien
cttgtatatctcaccagagctcttg

SEQ ID NO: 3809540 - DNA, 25 bp, Homo sapien
ttcagaatggtacgtgagcaatggc

SEQ ID NO: 3809541 - DNA, 25 bp, Homo sapien
tgcatgagcccctaacggaaaagtc

SEQ ID NO: 3809542 - DNA, 25 bp, Homo sapien
tatactggaaagctattgttggctg

SEQ ID NO: 3809543 - DNA, 25 bp, Homo sapien
ggccttttggtgcaagaggacttgc

SEQ ID NO: 3809544 - DNA, 25 bp, Homo sapien
tcagcttcaaacatgccttcctcag

SEQ ID NO: 3809545 - DNA, 25 bp, Homo sapien
tgacctgttacgttatagcgatggc

SEQ ID NO: 3809546 - DNA, 25 bp, Homo sapien
ttgatttaaagcgagaggcacacga

SEQ ID NO: 3809547 - DNA, 25 bp, Homo sapien
gaatggcaacagcaatggcaacctc

SEQ ID NO: 3809548 - DNA, 25 bp, Homo sapien
gaagcaatgtctagtattcaggccc

SEQ ID NO: 3809549 - DNA, 25 bp, Homo sapien
tgcctgtagatagtcccatagctgt

SEQ ID NO: 3809550 - DNA, 25 bp, Homo sapien
gattcctgagacagagaacctgcca

SEQ ID NO: 3809551 - DNA, 25 bp, Homo sapien
gttctcaaaggtcctaccaggcctg

SEQ ID NO: 3809552 - DNA, 25 bp, Homo sapien
caaatgcctggatgaatctgcgctc

SEQ ID NO: 3809553 - DNA, 25 bp, Homo sapien
taagatcacgaagctggtgtacact

SEQ ID NO: 3809554 - DNA, 25 bp, Homo sapien
tgtacacttccgtgcgagcttagag

SEQ ID NO: 3809555 - DNA, 25 bp, Homo sapien
aaaggagttctacatacccattagg

SEQ ID NO: 3809556 - DNA, 25 bp, Homo sapien
aatggtactgctatgttgagaaaca

SEQ ID NO: 3809557 - DNA, 25 bp, Homo sapien
cgtaactgccagaatagctactgaa

SEQ ID NO: 3809558 - DNA, 25 bp, Homo sapien
tatagaagtttcgttcgtaactgcc

SEQ ID NO: 3809559 - DNA, 25 bp, Homo sapien
tatgttccaaattctgggaacatac

SEQ ID NO: 3809560 - DNA, 25 bp, Homo sapien
cctaagtgtatgaacattttgagac

SEQ ID NO: 3809561 - DNA, 25 bp, Homo sapien
cgccatgcccggcatgtttgacttt

SEQ ID NO: 3809562 - DNA, 25 bp, Homo sapien
tacaatggtaaatttagataatact

SEQ ID NO: 3809563 - DNA, 25 bp, Homo sapien
tgtttgtggtagtttcttattatct

SEQ ID NO: 3809564 - DNA, 25 bp, Homo sapien
ttgtttgtggtagtttcttattatc

SEQ ID NO: 3809565 - DNA, 25 bp, Homo sapien
taatatcatatagtgaaaacagatg

SEQ ID NO: 3809566 - DNA, 25 bp, Homo sapien
tcagcctacagatagcatacttcat

SEQ ID NO: 3809567 - DNA, 25 bp, Homo sapien
tcccatctaaagttaatgagaatgt

SEQ ID NO: 3809568 - DNA, 25 bp, Homo sapien
tacagtcatcatgccaaaattcatc

SEQ ID NO: 3809569 - DNA, 25 bp, Homo sapien
acctctgtccagcttgccagccttt

SEQ ID NO: 3809570 - DNA, 25 bp, Homo sapien
gactctgttcatatatactctgatt

SEQ ID NO: 3809571 - DNA, 25 bp, Homo sapien
gttatttccttgactctgttcatat

SEQ ID NO: 3809572 - DNA, 25 bp, Homo sapien
ctctgtccagcttgccagccttttt

SEQ ID NO: 3809573 - DNA, 25 bp, Homo sapien
acagcaccaatggaattctcaaacg

SEQ ID NO: 3809574 - DNA, 25 bp, Homo sapien
ccaatggaattctcaaacgctgaca

SEQ ID NO: 3809575 - DNA, 25 bp, Homo sapien
ggaattctcaaacgctgacaaatac

SEQ ID NO: 3809576 - DNA, 25 bp, Homo sapien
tcaaacgctgacaaatactcgtgaa

SEQ ID NO: 3809577 - DNA, 25 bp, Homo sapien
tatggctgactcacggccttcgact

SEQ ID NO: 3809578 - DNA, 25 bp, Homo sapien
ctgactcacggccttcgactccagc

SEQ ID NO: 3809579 - DNA, 25 bp, Homo sapien
cgttatggctgactcacggccttcg

SEQ ID NO: 3809580 - DNA, 25 bp, Homo sapien
atggctgactcacggccttcgactc

SEQ ID NO: 3809581 - DNA, 25 bp, Homo sapien
aaagcggtcgggcaacgatgacgac

SEQ ID NO: 3809582 - DNA, 25 bp, Homo sapien
gtcgggcaacgatgacgacaatgac

SEQ ID NO: 3809583 - DNA, 25 bp, Homo sapien
cccggaaagcggtcgggcaacgatg

SEQ ID NO: 3809584 - DNA, 25 bp, Homo sapien
gcggtcgggcaacgatgacgacaat

SEQ ID NO: 3809585 - DNA, 25 bp, Homo sapien
ggtctggacaggaaagcagtcctgt

SEQ ID NO: 3809586 - DNA, 25 bp, Homo sapien
caggaaagcagtcctgttaagaatt

SEQ ID NO: 3809587 - DNA, 25 bp, Homo sapien
gaatcatgtggtctggacaggaaag

SEQ ID NO: 3809588 - DNA, 25 bp, Homo sapien
tgtggtctggacaggaaagcagtcc

SEQ ID NO: 3809589 - DNA, 25 bp, Homo sapien
cctttctacattgagagttttactc

SEQ ID NO: 3809590 - DNA, 25 bp, Homo sapien
aaatatctgaataacctttctacat

SEQ ID NO: 3809591 - DNA, 25 bp, Homo sapien
attaaatatctgaataacctttcta

SEQ ID NO: 3809592 - DNA, 25 bp, Homo sapien
acctttctacattgagagttttact

SEQ ID NO: 3809593 - DNA, 25 bp, Homo sapien
aaagcccccataaattagagtggct

SEQ ID NO: 3809594 - DNA, 25 bp, Homo sapien
aaattagagtggctagacacattca

SEQ ID NO: 3809595 - DNA, 25 bp, Homo sapien
ccccataaattagagtggctagaca

SEQ ID NO: 3809596 - DNA, 25 bp, Homo sapien
tagagtggctagacacattcaagtc

SEQ ID NO: 3809597 - DNA, 25 bp, Homo sapien
tccaatacaggaacacccagtttca

SEQ ID NO: 3809598 - DNA, 25 bp, Homo sapien
acacccagtttcataaagcaaggcc

SEQ ID NO: 3809599 - DNA, 25 bp, Homo sapien
tgcatccaatacaggaacacccagt

SEQ ID NO: 3809600 - DNA, 25 bp, Homo sapien
gaacacccagtttcataaagcaagg

SEQ ID NO: 3809601 - DNA, 25 bp, Homo sapien
taaaaactatcatgtctccccataa

SEQ ID NO: 3809602 - DNA, 25 bp, Homo sapien
gcaatgaagtgagaccctcattgcc

SEQ ID NO: 3809603 - DNA, 25 bp, Homo sapien
tacttctagatctatactggtgtct

SEQ ID NO: 3809604 - DNA, 25 bp, Homo sapien
catctgctattaatgtaaatctacc

SEQ ID NO: 3809605 - DNA, 25 bp, Homo sapien
caaattcagtctaatatttttgtct

SEQ ID NO: 3809606 - DNA, 25 bp, Homo sapien
tcaaattcagtctaatatttttgtc

SEQ ID NO: 3809607 - DNA, 25 bp, Homo sapien
gctgccaccttggtaacagaatcaa

SEQ ID NO: 3809608 - DNA, 25 bp, Homo sapien
catgagtatttgattagtggtgcca

SEQ ID NO: 3809609 - DNA, 25 bp, Homo sapien
tctctatgatggctaaaccagtgtc

SEQ ID NO: 3809610 - DNA, 25 bp, Homo sapien
taacagcacttatgcccagggcaca

SEQ ID NO: 3809611 - DNA, 25 bp, Homo sapien
gagttaggccattctaataactgtg

SEQ ID NO: 3809612 - DNA, 25 bp, Homo sapien
catgcccaatgtcacctaggaatct

SEQ ID NO: 3809613 - DNA, 25 bp, Homo sapien
ttgcatatggatgacttgttactcc

SEQ ID NO: 3809614 - DNA, 25 bp, Homo sapien
tattaccgtagcagaaaatactgtt

SEQ ID NO: 3809615 - DNA, 25 bp, Homo sapien
ctgggaaaggtacatgcccactgct

SEQ ID NO: 3809616 - DNA, 25 bp, Homo sapien
gagagcaagcaagcccattgattca

SEQ ID NO: 3809617 - DNA, 25 bp, Homo sapien
gacctaggtaaaagagagctctatg

SEQ ID NO: 3809618 - DNA, 25 bp, Homo sapien
gcccactgctgtgatgctgcaggga

SEQ ID NO: 3809619 - DNA, 25 bp, Homo sapien
tgagcgactcctacacattgggaaa

SEQ ID NO: 3809620 - DNA, 25 bp, Homo sapien
gagactgatgtcagcaacatggtgg

SEQ ID NO: 3809621 - DNA, 25 bp, Homo sapien
acatggatcaattctctctgagagc

SEQ ID NO: 3809622 - DNA, 25 bp, Homo sapien
gccagaaagtggttgagcgactcct

SEQ ID NO: 3809623 - DNA, 25 bp, Homo sapien
acacctttcaccacaactgtgagaa

SEQ ID NO: 3809624 - DNA, 25 bp, Homo sapien
catcttaggagggtccagaggacac

SEQ ID NO: 3809625 - DNA, 25 bp, Homo sapien
tgtgagaaatgtgaagacagcccca

SEQ ID NO: 3809626 - DNA, 25 bp, Homo sapien
agacagccccagcattctcaaacag

SEQ ID NO: 3809627 - DNA, 25 bp, Homo sapien
agagaaagaaataaagcgtattcac

SEQ ID NO: 3809628 - DNA, 25 bp, Homo sapien
agaaataaagcgtattcacttagga

SEQ ID NO: 3809629 - DNA, 25 bp, Homo sapien
aggaaaagaggaagtcaaattgtct

SEQ ID NO: 3809630 - DNA, 25 bp, Homo sapien
taggaaaagaggaagtcaaattgtc

SEQ ID NO: 3809631 - DNA, 25 bp, Homo sapien
gaggagacccagttaatagattcaa

SEQ ID NO: 3809632 - DNA, 25 bp, Homo sapien
catggcaattatgactcctcagcac

SEQ ID NO: 3809633 - DNA, 25 bp, Homo sapien
cctgtagctactggcagaggagacc

SEQ ID NO: 3809634 - DNA, 25 bp, Homo sapien
tgactcatatgtggctcttgggctc

SEQ ID NO: 3809635 - DNA, 25 bp, Homo sapien
tattaaagaccattgcaatagaaga

SEQ ID NO: 3809636 - DNA, 25 bp, Homo sapien
gagggagattcaactccaagtacag

SEQ ID NO: 3809637 - DNA, 25 bp, Homo sapien
ccattgcaatagaagagggagattc

SEQ ID NO: 3809638 - DNA, 25 bp, Homo sapien
ggagattcaactccaagtacagcaa

SEQ ID NO: 3809639 - DNA, 25 bp, Homo sapien
catatttacagaccattgacttgag

SEQ ID NO: 3809640 - DNA, 25 bp, Homo sapien
tagatttggaggcaccgcccattga

SEQ ID NO: 3809641 - DNA, 25 bp, Homo sapien
gacttgagaaatacagttcgatgac

SEQ ID NO: 3809642 - DNA, 25 bp, Homo sapien
tcaaggacccctcagatggagtcag

SEQ ID NO: 3809643 - DNA, 25 bp, Homo sapien
ggaggggaaaagaacagtgctgctc

SEQ ID NO: 3809644 - DNA, 25 bp, Homo sapien
cctccagcgttgttagcatctctac

SEQ ID NO: 3809645 - DNA, 25 bp, Homo sapien
gggcctccagcgttgttagcatctc

SEQ ID NO: 3809646 - DNA, 25 bp, Homo sapien
tgacggggtggctctcatggcctct

SEQ ID NO: 3809647 - DNA, 25 bp, Homo sapien
tggaaaagctccttgtgacggggtg

SEQ ID NO: 3809648 - DNA, 25 bp, Homo sapien
ctccatcagcatctcgttggtgcta

SEQ ID NO: 3809649 - DNA, 25 bp, Homo sapien
ggtgctattcaccttcttgtaggca

SEQ ID NO: 3809650 - DNA, 25 bp, Homo sapien
cagttcttgaacgagggtggtaaat

SEQ ID NO: 3809651 - DNA, 25 bp, Homo sapien
ttctttcagttcttgaacgagggtg

SEQ ID NO: 3809652 - DNA, 25 bp, Homo sapien
tttcttgccaatgagctgggatttc

SEQ ID NO: 3809653 - DNA, 25 bp, Homo sapien
aaagactttttctgtaccctgacat

SEQ ID NO: 3809654 - DNA, 25 bp, Homo sapien
tcttttaaagatgcctcagtctcta

SEQ ID NO: 3809655 - DNA, 25 bp, Homo sapien
ttcacctgtgaatgcagtgtttctg

SEQ ID NO: 3809656 - DNA, 25 bp, Homo sapien
taagcccatgaagtgtggacacacc

SEQ ID NO: 3809657 - DNA, 25 bp, Homo sapien
actgtcttcccatcgaggctgtgga

SEQ ID NO: 3809658 - DNA, 25 bp, Homo sapien
tacacagagttggttcctaacagac

SEQ ID NO: 3809659 - DNA, 25 bp, Homo sapien
ggaaagtgacttgaggactcgcgtc

SEQ ID NO: 3809660 - DNA, 25 bp, Homo sapien
caactgtatgatcagctagagggag

SEQ ID NO: 3809661 - DNA, 25 bp, Homo sapien
gaccatgaaatgaggcaaactgatc

SEQ ID NO: 3809662 - DNA, 25 bp, Homo sapien
tccacagactttggatcagtgggtg

SEQ ID NO: 3809663 - DNA, 25 bp, Homo sapien
tcaacttcgtaacagagagatcaca

SEQ ID NO: 3809664 - DNA, 25 bp, Homo sapien
ggaaatcttgactcccctggagcct

SEQ ID NO: 3809665 - DNA, 25 bp, Homo sapien
gggtgtcccacttgacctctgaggg

SEQ ID NO: 3809666 - DNA, 25 bp, Homo sapien
gcgggaagcgggcactctctagtat

SEQ ID NO: 3809667 - DNA, 25 bp, Homo sapien
cctgctggaccaagtagtgccctgt

SEQ ID NO: 3809668 - DNA, 25 bp, Homo sapien
ttgcccctaggaactgaatgtctca

SEQ ID NO: 3809669 - DNA, 25 bp, Homo sapien
tacatttgttcaactctgagacagc

SEQ ID NO: 3809670 - DNA, 25 bp, Homo sapien
tgttatgtgaccatctctgtaggga

SEQ ID NO: 3809671 - DNA, 25 bp, Homo sapien
ccttgttgttctttactctgctgag

SEQ ID NO: 3809672 - DNA, 25 bp, Homo sapien
caaaatgttagccactcgtgtatct

SEQ ID NO: 3809673 - DNA, 25 bp, Homo sapien
attctttctgtagggaacttacctg

SEQ ID NO: 3809674 - DNA, 25 bp, Homo sapien
gaaattagtaactgctctgcccatt

SEQ ID NO: 3809675 - DNA, 25 bp, Homo sapien
cattcacttgtcaatggactcttgg

SEQ ID NO: 3809676 - DNA, 25 bp, Homo sapien
tgagagttaggggtccagcttcact

SEQ ID NO: 3809677 - DNA, 25 bp, Homo sapien
ttaaaggtcatgaagtacactccta

SEQ ID NO: 3809678 - DNA, 25 bp, Homo sapien
tatgtttagatatgtcactgatcca

SEQ ID NO: 3809679 - DNA, 25 bp, Homo sapien
aaagtctgatggtttgagttcttat

SEQ ID NO: 3809680 - DNA, 25 bp, Homo sapien
taaatatgctatacgcaggcaatgg

SEQ ID NO: 3809681 - DNA, 25 bp, Homo sapien
tctcaaagtgatccataagtaacgt

SEQ ID NO: 3809682 - DNA, 25 bp, Homo sapien
caaacacaaaggactatggtaggct

SEQ ID NO: 3809683 - DNA, 25 bp, Homo sapien
gaatagtgtttcctctctcaaagtg

SEQ ID NO: 3809684 - DNA, 25 bp, Homo sapien
caagatgaaacagggtgacagagag

SEQ ID NO: 3809685 - DNA, 25 bp, Homo sapien
caactattgattatgcctaaggcac

SEQ ID NO: 3809686 - DNA, 25 bp, Homo sapien
gctttttggaaagtgtctcactgga

SEQ ID NO: 3809687 - DNA, 25 bp, Homo sapien
caagttctatgtggcttcagtcaaa

SEQ ID NO: 3809688 - DNA, 25 bp, Homo sapien
taaaatacatcagagtcaagacatc

SEQ ID NO: 3809689 - DNA, 25 bp, Homo sapien
catggcaatattgccctaaagctac

SEQ ID NO: 3809690 - DNA, 25 bp, Homo sapien
cacatgagtaaaaccatggcaatat

SEQ ID NO: 3809691 - DNA, 25 bp, Homo sapien
tgagtaaaaccatggcaatattgcc

SEQ ID NO: 3809692 - DNA, 25 bp, Homo sapien
aacctgcacatgagtaaaaccatgg

SEQ ID NO: 3809693 - DNA, 25 bp, Homo sapien
ttttccctcatacttcggattgacc

SEQ ID NO: 3809694 - DNA, 25 bp, Homo sapien
tccctcatacttcggattgaccaca

SEQ ID NO: 3809695 - DNA, 25 bp, Homo sapien
tcattttccctcatacttcggattg

SEQ ID NO: 3809696 - DNA, 25 bp, Homo sapien
tcatacttcggattgaccacagttg

SEQ ID NO: 3809697 - DNA, 25 bp, Homo sapien
tacggcactcttataaataggattt

SEQ ID NO: 3809698 - DNA, 25 bp, Homo sapien
ttacggcactcttataaataggatt

SEQ ID NO: 3809699 - DNA, 25 bp, Homo sapien
taatgatgccccgttatctggtgct

SEQ ID NO: 3809700 - DNA, 25 bp, Homo sapien
ggaatcctcggctttcactgctggg

SEQ ID NO: 3809701 - DNA, 25 bp, Homo sapien
tttatcgtgaacagaaggcgcctgc

SEQ ID NO: 3809702 - DNA, 25 bp, Homo sapien
ggcgcctgctaatcaaaacgggaat

SEQ ID NO: 3809703 - DNA, 25 bp, Homo sapien
tgccctcaaggaaggtatagtttgg

SEQ ID NO: 3809704 - DNA, 25 bp, Homo sapien
tggatctgccttttggtggcacaat

SEQ ID NO: 3809705 - DNA, 25 bp, Homo sapien
tgaagtcaagcctagcaagcaggcc

SEQ ID NO: 3809706 - DNA, 25 bp, Homo sapien
cactatagaaccaactgcaggtgat

SEQ ID NO: 3809707 - DNA, 25 bp, Homo sapien
gctgggtcctgcaagacaccaaata

SEQ ID NO: 3809708 - DNA, 25 bp, Homo sapien
gcagctcatgtgataccaatcagaa

SEQ ID NO: 3809709 - DNA, 25 bp, Homo sapien
gaggccttgctatgaagtctgaaac

SEQ ID NO: 3809710 - DNA, 25 bp, Homo sapien
tggacaaactcaggatccctcagag

SEQ ID NO: 3809711 - DNA, 25 bp, Homo sapien
gccctatatagatgagtccaaagtg

SEQ ID NO: 3809712 - DNA, 25 bp, Homo sapien
cttcaaatatgttgggaaaataaat

SEQ ID NO: 3809713 - DNA, 25 bp, Homo sapien
aaaaaagccctatatagatgagtcc

SEQ ID NO: 3809714 - DNA, 25 bp, Homo sapien
aaaaatctgtcttgtcgtatacaca

SEQ ID NO: 3809715 - DNA, 25 bp, Homo sapien
tatgtaccaacctgcccatatgtga

SEQ ID NO: 3809716 - DNA, 25 bp, Homo sapien
tctgtagccatcaaattgcctggac

SEQ ID NO: 3809717 - DNA, 25 bp, Homo sapien
gcctggacttcaataatgcatagag

SEQ ID NO: 3809718 - DNA, 25 bp, Homo sapien
tgaaaatttcacctcagtaggacag

SEQ ID NO: 3809719 - DNA, 25 bp, Homo sapien
ttgctggaatctggaagtcagaggt

SEQ ID NO: 3809720 - DNA, 25 bp, Homo sapien
tggaatctggaagtcagaggttgca

SEQ ID NO: 3809721 - DNA, 25 bp, Homo sapien
agaattgctggaatctggaagtcag

SEQ ID NO: 3809722 - DNA, 25 bp, Homo sapien
aattgctggaatctggaagtcagag

SEQ ID NO: 3809723 - DNA, 25 bp, Homo sapien
tactgactccctgtgacagttgaga

SEQ ID NO: 3809724 - DNA, 25 bp, Homo sapien
gacctgaggtctaactgattgcaaa

SEQ ID NO: 3809725 - DNA, 25 bp, Homo sapien
tgaggattagagctgacaggctgat

SEQ ID NO: 3809726 - DNA, 25 bp, Homo sapien
ggctgatttcatatactggagtgca

SEQ ID NO: 3809727 - DNA, 25 bp, Homo sapien
ccgtagtttggattcttgaaattat

SEQ ID NO: 3809728 - DNA, 25 bp, Homo sapien
aataggactcttgtaaatcggattt

SEQ ID NO: 3809729 - DNA, 25 bp, Homo sapien
attaataggactcttgtaaatcgga

SEQ ID NO: 3809730 - DNA, 25 bp, Homo sapien
tccgtagtttggattcttgaaatta

SEQ ID NO: 3809731 - DNA, 25 bp, Homo sapien
ccgacgagctgcgagttggacaagc

SEQ ID NO: 3809732 - DNA, 25 bp, Homo sapien
cacaatcaagatcatcccaaggaag

SEQ ID NO: 3809733 - DNA, 25 bp, Homo sapien
tattctgggctgcatgtcctggccg

SEQ ID NO: 3809734 - DNA, 25 bp, Homo sapien
cataacctttcggtcacttagggct

SEQ ID NO: 3809735 - DNA, 25 bp, Homo sapien
gccactttgctttttggatgttttg

SEQ ID NO: 3809736 - DNA, 25 bp, Homo sapien
ttataagccactttgctttttggat

SEQ ID NO: 3809737 - DNA, 25 bp, Homo sapien
tgctttttggatgttttgtaactta

SEQ ID NO: 3809738 - DNA, 25 bp, Homo sapien
aagccactttgctttttggatgttt

SEQ ID NO: 3809739 - DNA, 25 bp, Homo sapien
caaccacaccagctacaattggaat

SEQ ID NO: 3809740 - DNA, 25 bp, Homo sapien
aaagcttccatatcagcagtaatgc

SEQ ID NO: 3809741 - DNA, 25 bp, Homo sapien
tcatgaattatcattaaaagcttcc

SEQ ID NO: 3809742 - DNA, 25 bp, Homo sapien
tagcaaactcccttctgtcatgaat

SEQ ID NO: 3809743 - DNA, 25 bp, Homo sapien
tgaaatgataaggagacacaggctg

SEQ ID NO: 3809744 - DNA, 25 bp, Homo sapien
gctaacactcagatacatggaacag

SEQ ID NO: 3809745 - DNA, 25 bp, Homo sapien
caaatgcccctagaacaagtggaca

SEQ ID NO: 3809746 - DNA, 25 bp, Homo sapien
tacagatctaaatgtgaaaccccag

SEQ ID NO: 3809747 - DNA, 25 bp, Homo sapien
tagaaccaacagtcgtcaacatcct

SEQ ID NO: 3809748 - DNA, 25 bp, Homo sapien
gttaaaataggaacattcctgtgtg

SEQ ID NO: 3809749 - DNA, 25 bp, Homo sapien
cactgaatacgtaaaatagaaccaa

SEQ ID NO: 3809750 - DNA, 25 bp, Homo sapien
cacaacatgaaccatgacctcgttg

SEQ ID NO: 3809751 - DNA, 25 bp, Homo sapien
tctgtacacttacagacaccacact

SEQ ID NO: 3809752 - DNA, 25 bp, Homo sapien
acatctcacacgtttgcccttgaaa

SEQ ID NO: 3809753 - DNA, 25 bp, Homo sapien
gaaacttcggatctgtacacttaca

SEQ ID NO: 3809754 - DNA, 25 bp, Homo sapien
gcagatctgtccgttgctggcttca

SEQ ID NO: 3809755 - DNA, 25 bp, Homo sapien
tttcctgcagtaagcatccatgtct

SEQ ID NO: 3809756 - DNA, 25 bp, Homo sapien
gtccgcagacgcactctccattgtt

SEQ ID NO: 3809757 - DNA, 25 bp, Homo sapien
taagccattggatctatcacagttg

SEQ ID NO: 3809758 - DNA, 25 bp, Homo sapien
tatcacactcgcagaatttgccaga

SEQ ID NO: 3809759 - DNA, 25 bp, Homo sapien
tttcagggatgccttcgctttggca

SEQ ID NO: 3809760 - DNA, 25 bp, Homo sapien
catgacacttgggactttcagggat

SEQ ID NO: 3809761 - DNA, 25 bp, Homo sapien
ctccgtaaagcccagaggcctaatt

SEQ ID NO: 3809762 - DNA, 25 bp, Homo sapien
tctacttcctccgtaaagcccagag

SEQ ID NO: 3809763 - DNA, 25 bp, Homo sapien
cccgttcttgcagtaagatttgtaa

SEQ ID NO: 3809764 - DNA, 25 bp, Homo sapien
tccattcaccccgttcttgcagtaa

SEQ ID NO: 3809765 - DNA, 25 bp, Homo sapien
ccttctgacaatttgccgttttcca

SEQ ID NO: 3809766 - DNA, 25 bp, Homo sapien
taacttattgttacgccttctgaca

SEQ ID NO: 3809767 - DNA, 25 bp, Homo sapien
gctgacttagggatcaagtttttca

SEQ ID NO: 3809768 - DNA, 25 bp, Homo sapien
tgtatgcatcaatgatcaactgaat

SEQ ID NO: 3809769 - DNA, 25 bp, Homo sapien
gaatttgcagataatgttcctactg

SEQ ID NO: 3809770 - DNA, 25 bp, Homo sapien
gaattacattgctagaatttgcaga

SEQ ID NO: 3809771 - DNA, 25 bp, Homo sapien
aattcttcagtaactgcaaaaattg

SEQ ID NO: 3809772 - DNA, 25 bp, Homo sapien
cttcagtaactgcaaaaattgtctg

SEQ ID NO: 3809773 - DNA, 25 bp, Homo sapien
ttcttcagtaactgcaaaaattgtc

SEQ ID NO: 3809774 - DNA, 25 bp, Homo sapien
tcttcagtaactgcaaaaattgtct

SEQ ID NO: 3809775 - DNA, 25 bp, Homo sapien
cattcactatgtaaggaaccaggca

SEQ ID NO: 3809776 - DNA, 25 bp, Homo sapien
ttcactatgtaaggaaccaggcact

SEQ ID NO: 3809777 - DNA, 25 bp, Homo sapien
cactatgtaaggaaccaggcactta

SEQ ID NO: 3809778 - DNA, 25 bp, Homo sapien
acattcactatgtaaggaaccaggc

SEQ ID NO: 3809779 - DNA, 25 bp, Homo sapien
acattgtccatcatttggtaaaaca

SEQ ID NO: 3809780 - DNA, 25 bp, Homo sapien
tgtccatcatttggtaaaacaatgc

SEQ ID NO: 3809781 - DNA, 25 bp, Homo sapien
taatggctcattgtgtacatattat

SEQ ID NO: 3809782 - DNA, 25 bp, Homo sapien
aatggctcattgtgtacatattatt

SEQ ID NO: 3809783 - DNA, 25 bp, Homo sapien
acaccagcagccgtgtaacattcct

SEQ ID NO: 3809784 - DNA, 25 bp, Homo sapien
tggaaaacaccagcagccgtgtaac

SEQ ID NO: 3809785 - DNA, 25 bp, Homo sapien
aaaacaccagcagccgtgtaacatt

SEQ ID NO: 3809786 - DNA, 25 bp, Homo sapien
ggaaaacaccagcagccgtgtaaca

SEQ ID NO: 3809787 - DNA, 25 bp, Homo sapien
acaatatcccctgataggaaatgaa

SEQ ID NO: 3809788 - DNA, 25 bp, Homo sapien
tatcccctgataggaaatgaatgcg

SEQ ID NO: 3809789 - DNA, 25 bp, Homo sapien
cctgataggaaatgaatgcgcttac

SEQ ID NO: 3809790 - DNA, 25 bp, Homo sapien
tcccctgataggaaatgaatgcgct

SEQ ID NO: 3809791 - DNA, 25 bp, Homo sapien
actgcaacttgcatgatggcatcga

SEQ ID NO: 3809792 - DNA, 25 bp, Homo sapien
tgcaacttgcatgatggcatcgaaa

SEQ ID NO: 3809793 - DNA, 25 bp, Homo sapien
caaactgcaacttgcatgatggcat

SEQ ID NO: 3809794 - DNA, 25 bp, Homo sapien
ccacaaactgcaacttgcatgatgg

SEQ ID NO: 3809795 - DNA, 25 bp, Homo sapien
tatgcgctgttttccaacaagttca

SEQ ID NO: 3809796 - DNA, 25 bp, Homo sapien
caagggttcctgagcttagctggtg

SEQ ID NO: 3809797 - DNA, 25 bp, Homo sapien
gctaatgtaaggcatcacagtcttt

SEQ ID NO: 3809798 - DNA, 25 bp, Homo sapien
cagttctgttcacttgtgcaagggt

SEQ ID NO: 3809799 - DNA, 25 bp, Homo sapien
cagatctgttccaagactttttaca

SEQ ID NO: 3809800 - DNA, 25 bp, Homo sapien
tccaaatcgtctttcattgagtaag

SEQ ID NO: 3809801 - DNA, 25 bp, Homo sapien
tctgaagtccgaagtaatcctcctc

SEQ ID NO: 3809802 - DNA, 25 bp, Homo sapien
gaggtcaatgggatagtcttcagct

SEQ ID NO: 3809803 - DNA, 25 bp, Homo sapien
tcccctgggtctgcgggctgaaggc

SEQ ID NO: 3809804 - DNA, 25 bp, Homo sapien
tgaaggcgatggtggagctttgcta

SEQ ID NO: 3809805 - DNA, 25 bp, Homo sapien
aaggcgatggtggagctttgctaga

SEQ ID NO: 3809806 - DNA, 25 bp, Homo sapien
gggtctgcgggctgaaggcgatggt

SEQ ID NO: 3809807 - DNA, 25 bp, Homo sapien
tcatcacatcgtgcagaagtaggca

SEQ ID NO: 3809808 - DNA, 25 bp, Homo sapien
ggattttctatgtcatctggagggc

SEQ ID NO: 3809809 - DNA, 25 bp, Homo sapien
gctgttcctttgctacggttggtta

SEQ ID NO: 3809810 - DNA, 25 bp, Homo sapien
ttaatcgcaaaaccaactgctgtgg

SEQ ID NO: 3809811 - DNA, 25 bp, Homo sapien
aatttggccctgcttgtatacattc

SEQ ID NO: 3809812 - DNA, 25 bp, Homo sapien
cacccacaatttggccctgcttgta

SEQ ID NO: 3809813 - DNA, 25 bp, Homo sapien
cctgcttgtatacattctccacatg

SEQ ID NO: 3809814 - DNA, 25 bp, Homo sapien
tgtgcaccacccacaatttggccct

SEQ ID NO: 3809815 - DNA, 25 bp, Homo sapien
attttatgtgaagtgtcagagagaa

SEQ ID NO: 3809816 - DNA, 25 bp, Homo sapien
atgccttctacatggtaagcgctaa

SEQ ID NO: 3809817 - DNA, 25 bp, Homo sapien
gactgtctccaacgtatcttttctg

SEQ ID NO: 3809818 - DNA, 25 bp, Homo sapien
gctaatacagactgtctccaacgta

SEQ ID NO: 3809819 - DNA, 25 bp, Homo sapien
gtaagcgctaatacagactgtctcc

SEQ ID NO: 3809820 - DNA, 25 bp, Homo sapien
cacagcaaactgaactgatcagtcc

SEQ ID NO: 3809821 - DNA, 25 bp, Homo sapien
tgaactgatcagtccaatccagaaa

SEQ ID NO: 3809822 - DNA, 25 bp, Homo sapien
aactgaactgatcagtccaatccag

SEQ ID NO: 3809823 - DNA, 25 bp, Homo sapien
cagcaaactgaactgatcagtccaa

SEQ ID NO: 3809824 - DNA, 25 bp, Homo sapien
aattagccaggcatcgtcgtgggtg

SEQ ID NO: 3809825 - DNA, 25 bp, Homo sapien
caggcatcgtcgtgggtgcctgtag

SEQ ID NO: 3809826 - DNA, 25 bp, Homo sapien
aggagaactgcttgaacctgggagg

SEQ ID NO: 3809827 - DNA, 25 bp, Homo sapien
tcccagctactccggaggctgaggc

SEQ ID NO: 3809828 - DNA, 25 bp, Homo sapien
taagcgtaacgtgaaaagtcattca

SEQ ID NO: 3809829 - DNA, 25 bp, Homo sapien
tacattccaggatgctattcccctg

SEQ ID NO: 3809830 - DNA, 25 bp, Homo sapien
gaatatttcttttacagacctccat

SEQ ID NO: 3809831 - DNA, 25 bp, Homo sapien
taagttgtgctctgagcacccgaga

SEQ ID NO: 3809832 - DNA, 25 bp, Homo sapien
cttctgaaacccttgtgcctccgga

SEQ ID NO: 3809833 - DNA, 25 bp, Homo sapien
ccttctataaaccttgacaaggcaa

SEQ ID NO: 3809834 - DNA, 25 bp, Homo sapien
cggaagcaggcgaaacaaggcttca

SEQ ID NO: 3809835 - DNA, 25 bp, Homo sapien
gaagagctccaaacccggaagcagg

SEQ ID NO: 3809836 - DNA, 25 bp, Homo sapien
ctctctgcattcattcgttcatcac

SEQ ID NO: 3809837 - DNA, 25 bp, Homo sapien
tctgcattcattcgttcatcactca

SEQ ID NO: 3809838 - DNA, 25 bp, Homo sapien
ttactctctgcattcattcgttcat

SEQ ID NO: 3809839 - DNA, 25 bp, Homo sapien
cttactctctgcattcattcgttca

SEQ ID NO: 3809840 - DNA, 25 bp, Homo sapien
cagacatcacaacagggaggtgaga

SEQ ID NO: 3809841 - DNA, 25 bp, Homo sapien
tgcccaaatctctgagaatacctcc

SEQ ID NO: 3809842 - DNA, 25 bp, Homo sapien
cagggcaggtgcaagaggaaaggtg

SEQ ID NO: 3809843 - DNA, 25 bp, Homo sapien
agaatacctcccatggtccctcaga

SEQ ID NO: 3809844 - DNA, 25 bp, Homo sapien
tatagctgttcatacactgacatcc

SEQ ID NO: 3809845 - DNA, 25 bp, Homo sapien
aactgactggatccactttagggaa

SEQ ID NO: 3809846 - DNA, 25 bp, Homo sapien
tacaaatgctctgaacactaatatc

SEQ ID NO: 3809847 - DNA, 25 bp, Homo sapien
aacaatcagattcctgacaaatgtg

SEQ ID NO: 3809848 - DNA, 25 bp, Homo sapien
tcaaaccagcctagtatgctgttcc

SEQ ID NO: 3809849 - DNA, 25 bp, Homo sapien
ttctttccactctctatgcctgcgg

SEQ ID NO: 3809850 - DNA, 25 bp, Homo sapien
tctatgcctgcggacttttttgcct

SEQ ID NO: 3809851 - DNA, 25 bp, Homo sapien
ctagtatgctgttccttctttccac

SEQ ID NO: 3809852 - DNA, 25 bp, Homo sapien
gatgtggaaaccaacgctctggaag

SEQ ID NO: 3809853 - DNA, 25 bp, Homo sapien
tatcctccaactcctcgaacgagag

SEQ ID NO: 3809854 - DNA, 25 bp, Homo sapien
gagaagcctttagtacatcaaactg

SEQ ID NO: 3809855 - DNA, 25 bp, Homo sapien
gaagtacagtactctgacaaaggtc

SEQ ID NO: 3809856 - DNA, 25 bp, Homo sapien
tccggcagccccgacgtgacagcgc

SEQ ID NO: 3809857 - DNA, 25 bp, Homo sapien
cagcccggcgggagaccgcaggtgt

SEQ ID NO: 3809858 - DNA, 25 bp, Homo sapien
ccaggccggcgaccctcacgttcgg

SEQ ID NO: 3809859 - DNA, 25 bp, Homo sapien
ctcacgttcggaacgcggctgggct

SEQ ID NO: 3809860 - DNA, 25 bp, Homo sapien
cacgcccggcacaaaggtcccggcg

SEQ ID NO: 3809861 - DNA, 25 bp, Homo sapien
cggcggctttaagtgctgccgcgca

SEQ ID NO: 3809862 - DNA, 25 bp, Homo sapien
gctttaagtgctgccgcgcacagga

SEQ ID NO: 3809863 - DNA, 25 bp, Homo sapien
ccggccggcggctttaagtgctgcc

SEQ ID NO: 3809864 - DNA, 25 bp, Homo sapien
gctcgggcctgctgttccgcgactc

SEQ ID NO: 3809865 - DNA, 25 bp, Homo sapien
ctgctgttccgcgactcccgctggg

SEQ ID NO: 3809866 - DNA, 25 bp, Homo sapien
tgttccgcgactcccgctgggcctc

SEQ ID NO: 3809867 - DNA, 25 bp, Homo sapien
gggcctgctgttccgcgactcccgc

SEQ ID NO: 3809868 - DNA, 25 bp, Homo sapien
gaaaatggcacaacagcctgacctg

SEQ ID NO: 3809869 - DNA, 25 bp, Homo sapien
tcacagcagagtattgccagaggaa

SEQ ID NO: 3809870 - DNA, 25 bp, Homo sapien
tctaggtaactaacagtggctggac

SEQ ID NO: 3809871 - DNA, 25 bp, Homo sapien
tgtatcagtgtatccaccaggcggt

SEQ ID NO: 3809872 - DNA, 25 bp, Homo sapien
gaaggaggagcaaaggcacatatta

SEQ ID NO: 3809873 - DNA, 25 bp, Homo sapien
tggcggcaggcaaaaggcacgtctt

SEQ ID NO: 3809874 - DNA, 25 bp, Homo sapien
cggcaggcaaaaggcacgtcttacg

SEQ ID NO: 3809875 - DNA, 25 bp, Homo sapien
agcaaaggcacatattacatggcgg

SEQ ID NO: 3809876 - DNA, 25 bp, Homo sapien
gagtttcactctcgccactgaggct

SEQ ID NO: 3809877 - DNA, 25 bp, Homo sapien
agagtttcactctcgccactgaggc

SEQ ID NO: 3809878 - DNA, 25 bp, Homo sapien
cactgtgccggctacttttattttt

SEQ ID NO: 3809879 - DNA, 25 bp, Homo sapien
gtaagccactgtgccggctactttt

SEQ ID NO: 3809880 - DNA, 25 bp, Homo sapien
cagagactttgtggtactgtggcca

SEQ ID NO: 3809881 - DNA, 25 bp, Homo sapien
gcatcttccaagagcgattttcccg

SEQ ID NO: 3809882 - DNA, 25 bp, Homo sapien
cacggtcgtttttctgctactaagg

SEQ ID NO: 3809883 - DNA, 25 bp, Homo sapien
ctactaagggtgaaagtcgattatt

SEQ ID NO: 3809884 - DNA, 25 bp, Homo sapien
taacgagttgtcagtgaatgaccgg

SEQ ID NO: 3809885 - DNA, 25 bp, Homo sapien
tgaatgaccggagtcgggaagaatt

SEQ ID NO: 3809886 - DNA, 25 bp, Homo sapien
ttaaaaaccactgccatgcgaaagg

SEQ ID NO: 3809887 - DNA, 25 bp, Homo sapien
tgccatgcgaaagggtgttttaacg

SEQ ID NO: 3809888 - DNA, 25 bp, Homo sapien
ttagatgtctacttgcttgaggcag

SEQ ID NO: 3809889 - DNA, 25 bp, Homo sapien
cagataagcggatgctggcactgga

SEQ ID NO: 3809890 - DNA, 25 bp, Homo sapien
gaaagaggcaaccaggtttgcagac

SEQ ID NO: 3809891 - DNA, 25 bp, Homo sapien
gaagccgggatccaacttgcagata

SEQ ID NO: 3809892 - DNA, 25 bp, Homo sapien
tctctgtctaggaagaggctacagg

SEQ ID NO: 3809893 - DNA, 25 bp, Homo sapien
tctttcgctgagtacaagaggtcca

SEQ ID NO: 3809894 - DNA, 25 bp, Homo sapien
tcctcggaaaatggaaggagcctcc

SEQ ID NO: 3809895 - DNA, 25 bp, Homo sapien
tacgagaatgagcaatggacctaag

SEQ ID NO: 3809896 - DNA, 25 bp, Homo sapien
tgccttttcaagcttggcgatgcga

SEQ ID NO: 3809897 - DNA, 25 bp, Homo sapien
tcaagcttggcgatgcgagccacag

SEQ ID NO: 3809898 - DNA, 25 bp, Homo sapien
ttcaagcttggcgatgcgagccaca

SEQ ID NO: 3809899 - DNA, 25 bp, Homo sapien
cttttcaagcttggcgatgcgagcc

SEQ ID NO: 3809900 - DNA, 25 bp, Homo sapien
cagcttagctaaaccgcctttatct

SEQ ID NO: 3809901 - DNA, 25 bp, Homo sapien
caccagcttagctaaaccgccttta

SEQ ID NO: 3809902 - DNA, 25 bp, Homo sapien
tagctaaaccgcctttatcttccaa

SEQ ID NO: 3809903 - DNA, 25 bp, Homo sapien
aaccgcctttatcttccaagtgcac

SEQ ID NO: 3809904 - DNA, 25 bp, Homo sapien
ccttctttcctttcggcatcttgaa

SEQ ID NO: 3809905 - DNA, 25 bp, Homo sapien
tggccttctttcctttcggcatctt

SEQ ID NO: 3809906 - DNA, 25 bp, Homo sapien
cttcatgccagcaggggccggaacc

SEQ ID NO: 3809907 - DNA, 25 bp, Homo sapien
ttcatgccagcaggggccggaacca

SEQ ID NO: 3809908 - DNA, 25 bp, Homo sapien
tgtgtaaggcatagtacttggtact

SEQ ID NO: 3809909 - DNA, 25 bp, Homo sapien
ttatgtgtaaggcatagtacttggt

SEQ ID NO: 3809910 - DNA, 25 bp, Homo sapien
agtccatctggagttgggggggtgc

SEQ ID NO: 3809911 - DNA, 25 bp, Homo sapien
tacttggtactatggggttgatgag

SEQ ID NO: 3809912 - DNA, 25 bp, Homo sapien
cacagttctcgttccttcactgcag

SEQ ID NO: 3809913 - DNA, 25 bp, Homo sapien
tctaatgtcacccagttctcattta

SEQ ID NO: 3809914 - DNA, 25 bp, Homo sapien
tatctctaatgtcacccagttctca

SEQ ID NO: 3809915 - DNA, 25 bp, Homo sapien
aaatccacagttctcgttccttcac

SEQ ID NO: 3809916 - DNA, 25 bp, Homo sapien
gccagaatccccttgacaccagaga

SEQ ID NO: 3809917 - DNA, 25 bp, Homo sapien
gcgagggcagttgtttgggccagcc

SEQ ID NO: 3809918 - DNA, 25 bp, Homo sapien
agccagtcctgttcttcctgttgca

SEQ ID NO: 3809919 - DNA, 25 bp, Homo sapien
ccaggcctcctgtcctgaggtggaa

SEQ ID NO: 3809920 - DNA, 25 bp, Homo sapien
aagtcgtgctttgcaagggaactga

SEQ ID NO: 3809921 - DNA, 25 bp, Homo sapien
gagtgcacaagagaagataaaagtc

SEQ ID NO: 3809922 - DNA, 25 bp, Homo sapien
gaagataaaagtcgtgctttgcaag

SEQ ID NO: 3809923 - DNA, 25 bp, Homo sapien
cacaagagaagataaaagtcgtgct

SEQ ID NO: 3809924 - DNA, 25 bp, Homo sapien
aagtgcctatgattccctccgtgaa

SEQ ID NO: 3809925 - DNA, 25 bp, Homo sapien
gaagttcggtgctgccaacgatcac

SEQ ID NO: 3809926 - DNA, 25 bp, Homo sapien
aacgatcacgattctcatgaactca

SEQ ID NO: 3809927 - DNA, 25 bp, Homo sapien
gacaccactgggagaaatttcttcc

SEQ ID NO: 3809928 - DNA, 25 bp, Homo sapien
tggtcttggaccatctcttcctctg

SEQ ID NO: 3809929 - DNA, 25 bp, Homo sapien
ggccagttagagatcatagaacact

SEQ ID NO: 3809930 - DNA, 25 bp, Homo sapien
gaacactgtcccatcttatgccatt

SEQ ID NO: 3809931 - DNA, 25 bp, Homo sapien
ttctttggccagttagagatcatag

SEQ ID NO: 3809932 - DNA, 25 bp, Homo sapien
aacttgagctttgatttgccagcca

SEQ ID NO: 3809933 - DNA, 25 bp, Homo sapien
ctaccattgtaggtgctgagaggga

SEQ ID NO: 3809934 - DNA, 25 bp, Homo sapien
tcattcaaggttacagctataccct

SEQ ID NO: 3809935 - DNA, 25 bp, Homo sapien
ttcagagacatcaccaaaacttgcc

SEQ ID NO: 3809936 - DNA, 25 bp, Homo sapien
cttccttagtctctacatcaaatcc

SEQ ID NO: 3809937 - DNA, 25 bp, Homo sapien
tcttccttagtctctacatcaaatc

SEQ ID NO: 3809938 - DNA, 25 bp, Homo sapien
ttcttccttagtctctacatcaaat

SEQ ID NO: 3809939 - DNA, 25 bp, Homo sapien
tcttctgttaatggagatggtctct

SEQ ID NO: 3809940 - DNA, 25 bp, Homo sapien
gatggtctctatctacatggatgta

SEQ ID NO: 3809941 - DNA, 25 bp, Homo sapien
catctgggcagatccttttcatagt

SEQ ID NO: 3809942 - DNA, 25 bp, Homo sapien
tccaatctcccagggtgtggtagca

SEQ ID NO: 3809943 - DNA, 25 bp, Homo sapien
gaaagctgccccaatctgcacatgg

SEQ ID NO: 3809944 - DNA, 25 bp, Homo sapien
cactcgctgcatggacagaagctgc

SEQ ID NO: 3809945 - DNA, 25 bp, Homo sapien
gaaagagtatcactggttcccttgg

SEQ ID NO: 3809946 - DNA, 25 bp, Homo sapien
tgcaataatgtagcccactcgctgc

SEQ ID NO: 3809947 - DNA, 25 bp, Homo sapien
gctccatctggcactccatttgcta

SEQ ID NO: 3809948 - DNA, 25 bp, Homo sapien
cagctttctaatgtacgcgcagcac

SEQ ID NO: 3809949 - DNA, 25 bp, Homo sapien
gatgtcaaacgccaggaaatgtggc

SEQ ID NO: 3809950 - DNA, 25 bp, Homo sapien
tgctaaatgtcccattgatgtcaaa

SEQ ID NO: 3809951 - DNA, 25 bp, Homo sapien
ctccttccacactctggctgcagtc

SEQ ID NO: 3809952 - DNA, 25 bp, Homo sapien
tctacgctggagagttttcagaacg

SEQ ID NO: 3809953 - DNA, 25 bp, Homo sapien
tcagggttcctgaattctacgctgg

SEQ ID NO: 3809954 - DNA, 25 bp, Homo sapien
gaggttaactagatgacttgagccc

SEQ ID NO: 3809955 - DNA, 25 bp, Homo sapien
caaaacacggcttctggtcaaagtt

SEQ ID NO: 3809956 - DNA, 25 bp, Homo sapien
tatttccaaaagctgtgtccctgcc

SEQ ID NO: 3809957 - DNA, 25 bp, Homo sapien
ttcctttcatgtttaatagcctctg

SEQ ID NO: 3809958 - DNA, 25 bp, Homo sapien
cctgctcatttctatgaaaggagaa

SEQ ID NO: 3809959 - DNA, 25 bp, Homo sapien
gtgattttccaagccattccctctg

SEQ ID NO: 3809960 - DNA, 25 bp, Homo sapien
tcaacgtgatctaccccaagaagtc

SEQ ID NO: 3809961 - DNA, 25 bp, Homo sapien
gaaatggccaggacatcaacgtgat

SEQ ID NO: 3809962 - DNA, 25 bp, Homo sapien
gaagtccacttgatgatgctccagc

SEQ ID NO: 3809963 - DNA, 25 bp, Homo sapien
gatcccctctggagtgaagcgcaga

SEQ ID NO: 3809964 - DNA, 25 bp, Homo sapien
gcttatctaaatataccagacacaa

SEQ ID NO: 3809965 - DNA, 25 bp, Homo sapien
tatattttgattaacacccttgtaa

SEQ ID NO: 3809966 - DNA, 25 bp, Homo sapien
aagcagggacttaagcagatattgt

SEQ ID NO: 3809967 - DNA, 25 bp, Homo sapien
cccatgtttatagctacattataca

SEQ ID NO: 3809968 - DNA, 25 bp, Homo sapien
cctagtacgaaaagcctagcttagt

SEQ ID NO: 3809969 - DNA, 25 bp, Homo sapien
tacagtgcagttcagcccaagtggc

SEQ ID NO: 3809970 - DNA, 25 bp, Homo sapien
cattgggaagcaggaacattatgga

SEQ ID NO: 3809971 - DNA, 25 bp, Homo sapien
tctctaactagggaaaagagtgaac

SEQ ID NO: 3809972 - DNA, 25 bp, Homo sapien
tctttgcctatgcacgacgcgggca

SEQ ID NO: 3809973 - DNA, 25 bp, Homo sapien
cacttgagaggacatagactagcca

SEQ ID NO: 3809974 - DNA, 25 bp, Homo sapien
tgtcagcagtatacccagtggccag

SEQ ID NO: 3809975 - DNA, 25 bp, Homo sapien
tatggagttcacaagcacgaggttt

SEQ ID NO: 3809976 - DNA, 25 bp, Homo sapien
tactctgtgtattcagtttgtcttt

SEQ ID NO: 3809977 - DNA, 25 bp, Homo sapien
aagtactctgtgtattcagtttgtc

SEQ ID NO: 3809978 - DNA, 25 bp, Homo sapien
tcatgcctccgaataagtactctgt

SEQ ID NO: 3809979 - DNA, 25 bp, Homo sapien
aataagtactctgtgtattcagttt

SEQ ID NO: 3809980 - DNA, 25 bp, Homo sapien
acagtacagcacgaccccacagaca

SEQ ID NO: 3809981 - DNA, 25 bp, Homo sapien
ttcaccttcgtatcctggcgtgctc

SEQ ID NO: 3809982 - DNA, 25 bp, Homo sapien
taaggtcttcaacacattgcctggc

SEQ ID NO: 3809983 - DNA, 25 bp, Homo sapien
tctgacatcccattatgccaacagg

SEQ ID NO: 3809984 - DNA, 25 bp, Homo sapien
tatttgtctctatgaagtccacggc

SEQ ID NO: 3809985 - DNA, 25 bp, Homo sapien
catttctaagggcaacagatgctga

SEQ ID NO: 3809986 - DNA, 25 bp, Homo sapien
ttacctggtactagaaacgggatga

SEQ ID NO: 3809987 - DNA, 25 bp, Homo sapien
cacggctggccatagagtaggatcc

SEQ ID NO: 3809988 - DNA, 25 bp, Homo sapien
ggttctttttatccaggtctgctgg

SEQ ID NO: 3809989 - DNA, 25 bp, Homo sapien
tctgggttctttttatccaggtctg

SEQ ID NO: 3809990 - DNA, 25 bp, Homo sapien
tgggttctttttatccaggtctgct

SEQ ID NO: 3809991 - DNA, 25 bp, Homo sapien
ttctttttatccaggtctgctggtt

SEQ ID NO: 3809992 - DNA, 25 bp, Homo sapien
ctgacaagtcaaacaaaattgaaag

SEQ ID NO: 3809993 - DNA, 25 bp, Homo sapien
tcttgtgaaatgtggttattaatac

SEQ ID NO: 3809994 - DNA, 25 bp, Homo sapien
cacagcaatcccaccaaggtttcct

SEQ ID NO: 3809995 - DNA, 25 bp, Homo sapien
tgtggttattaatactaatgtcatc

SEQ ID NO: 3809996 - DNA, 25 bp, Homo sapien
tttccgatttcgccctcgaaaatca

SEQ ID NO: 3809997 - DNA, 25 bp, Homo sapien
tctggtagcgcagtttgaccctgag

SEQ ID NO: 3809998 - DNA, 25 bp, Homo sapien
gtgccgacgtgggacccagacatgt

SEQ ID NO: 3809999 - DNA, 25 bp, Homo sapien
gacttgtggagcaagacacgccctt

SEQ ID NO: 3810000 - DNA, 25 bp, Homo sapien
ccagacatgtgataccagaaggtca

SEQ ID NO: 3810001 - DNA, 25 bp, Homo sapien
cacttgctgaactgcgaggactttc

SEQ ID NO: 3810002 - DNA, 25 bp, Homo sapien
ttaagatcacactgcggcacccatg

SEQ ID NO: 3810003 - DNA, 25 bp, Homo sapien
gagcagcaggacttctgattaatga

SEQ ID NO: 3810004 - DNA, 25 bp, Homo sapien
gccattttggcaacttagacacttg

SEQ ID NO: 3810005 - DNA, 25 bp, Homo sapien
ctttccgcttgcctgtgtcaacagt

SEQ ID NO: 3810006 - DNA, 25 bp, Homo sapien
tccgcttgcctgtgtcaacagtgtc

SEQ ID NO: 3810007 - DNA, 25 bp, Homo sapien
ttgcctgtgtcaacagtgtccaggt

SEQ ID NO: 3810008 - DNA, 25 bp, Homo sapien
tggatgtggacgtgttcatgggcag

SEQ ID NO: 3810009 - DNA, 25 bp, Homo sapien
gcagctctagcagtaggtttgatac

SEQ ID NO: 3810010 - DNA, 25 bp, Homo sapien
tcttcaaaccaacgggtggaatcat

SEQ ID NO: 3810011 - DNA, 25 bp, Homo sapien
ggatgaatgtccctctcgctctctg

SEQ ID NO: 3810012 - DNA, 25 bp, Homo sapien
tggttgcttatgtgagagcccgccc

SEQ ID NO: 3810013 - DNA, 25 bp, Homo sapien
gacgtaggtagagggatgctctccc

SEQ ID NO: 3810014 - DNA, 25 bp, Homo sapien
tattgaggctagtcagagaatgggt

SEQ ID NO: 3810015 - DNA, 25 bp, Homo sapien
ctgtgatgaatccaccacgatggga

SEQ ID NO: 3810016 - DNA, 25 bp, Homo sapien
aaaaaatacacccatcgtgcctctg

SEQ ID NO: 3810017 - DNA, 25 bp, Homo sapien
aaatggaaggaatccaatttcatca

SEQ ID NO: 3810018 - DNA, 25 bp, Homo sapien
cattaggcaaggaggtagttcccaa

SEQ ID NO: 3810019 - DNA, 25 bp, Homo sapien
taaacacccgatccacaaacttctg

SEQ ID NO: 3810020 - DNA, 25 bp, Homo sapien
tgctctactcagtgaaaatggaagg

SEQ ID NO: 3810021 - DNA, 25 bp, Homo sapien
acactctgcctctatctaactgctt

SEQ ID NO: 3810022 - DNA, 25 bp, Homo sapien
gcacactctgcctctatctaactgc

SEQ ID NO: 3810023 - DNA, 25 bp, Homo sapien
cacactctgcctctatctaactgct

SEQ ID NO: 3810024 - DNA, 25 bp, Homo sapien
cagaaggtcttgtgagagccccagc

SEQ ID NO: 3810025 - DNA, 25 bp, Homo sapien
gctgcacgtgattgtcatgttccca

SEQ ID NO: 3810026 - DNA, 25 bp, Homo sapien
gagccccagccaaattcacagttaa

SEQ ID NO: 3810027 - DNA, 25 bp, Homo sapien
gaatgggtcccgtcttgctggtcaa

SEQ ID NO: 3810028 - DNA, 25 bp, Homo sapien
tgccttgtgtgtgccctacaaggtg

SEQ ID NO: 3810029 - DNA, 25 bp, Homo sapien
gaaaagacagcgtgaatgaattcac

SEQ ID NO: 3810030 - DNA, 25 bp, Homo sapien
gaattcacgggaatgacttgccttg

SEQ ID NO: 3810031 - DNA, 25 bp, Homo sapien
cctcaatgtaaggtcatctaaatcc

SEQ ID NO: 3810032 - DNA, 25 bp, Homo sapien
caaatggagcagtttggattctccc

SEQ ID NO: 3810033 - DNA, 25 bp, Homo sapien
cacagctgtagtgtcatcggagaga

SEQ ID NO: 3810034 - DNA, 25 bp, Homo sapien
tcccaatgataatgtgacctcccaa

SEQ ID NO: 3810035 - DNA, 25 bp, Homo sapien
tcccaaagggtagacagagccagtt

SEQ ID NO: 3810036 - DNA, 25 bp, Homo sapien
tcgcttcagagaatgacagtctgcc

SEQ ID NO: 3810037 - DNA, 25 bp, Homo sapien
ccataaaatgtaggaacttggatat

SEQ ID NO: 3810038 - DNA, 25 bp, Homo sapien
aaatgtttcaggcacttctcgcttc

SEQ ID NO: 3810039 - DNA, 25 bp, Homo sapien
ggctcttcatattctgatgatacca

SEQ ID NO: 3810040 - DNA, 25 bp, Homo sapien
cttgtcttgatcatgtaacttgtgg

SEQ ID NO: 3810041 - DNA, 25 bp, Homo sapien
cctgtacatttaaccaggtgaaccg

SEQ ID NO: 3810042 - DNA, 25 bp, Homo sapien
ccaggtgaaccgctctaagtttttg

SEQ ID NO: 3810043 - DNA, 25 bp, Homo sapien
catgtaacttgtggcaatttggtta

SEQ ID NO: 3810044 - DNA, 25 bp, Homo sapien
gagtgagaggttcaatgtggaaact

SEQ ID NO: 3810045 - DNA, 25 bp, Homo sapien
tgagaggttcaatgtggaaacttcc

SEQ ID NO: 3810046 - DNA, 25 bp, Homo sapien
gagggttatggagtgagaggttcaa

SEQ ID NO: 3810047 - DNA, 25 bp, Homo sapien
gaggttcaatgtggaaacttccagc

SEQ ID NO: 3810048 - DNA, 25 bp, Homo sapien
ctctgagttgagtctataatagcaa

SEQ ID NO: 3810049 - DNA, 25 bp, Homo sapien
tgagaatcagcaagatgaaatagta

SEQ ID NO: 3810050 - DNA, 25 bp, Homo sapien
tgtgatgatgcttgaagaatctgga

SEQ ID NO: 3810051 - DNA, 25 bp, Homo sapien
ttgaggtctcattgactgctgcttg

SEQ ID NO: 3810052 - DNA, 25 bp, Homo sapien
gattgtatggtgctgtctatgaccg

SEQ ID NO: 3810053 - DNA, 25 bp, Homo sapien
ctgattgtatggtgctgtctatgac

SEQ ID NO: 3810054 - DNA, 25 bp, Homo sapien
tatggtgctgtctatgaccgtgggc

SEQ ID NO: 3810055 - DNA, 25 bp, Homo sapien
ggtgctgtctatgaccgtgggcttt

SEQ ID NO: 3810056 - DNA, 25 bp, Homo sapien
ggtacacttagtggaatggctaaat

SEQ ID NO: 3810057 - DNA, 25 bp, Homo sapien
tgatgttttggtacacttagtggaa

SEQ ID NO: 3810058 - DNA, 25 bp, Homo sapien
taaattaacaaatggaagttgtata

SEQ ID NO: 3810059 - DNA, 25 bp, Homo sapien
gttttggtacacttagtggaatggc

SEQ ID NO: 3810060 - DNA, 25 bp, Homo sapien
gacgcatggcacacaattgcaacag

SEQ ID NO: 3810061 - DNA, 25 bp, Homo sapien
gaaattgggacttcactccacgggc

SEQ ID NO: 3810062 - DNA, 25 bp, Homo sapien
tcactgattcccagacgacgcatgg

SEQ ID NO: 3810063 - DNA, 25 bp, Homo sapien
aagccaccttctcggtgacttgggt

SEQ ID NO: 3810064 - DNA, 25 bp, Homo sapien
tcatagtcccaaggaattggaagac

SEQ ID NO: 3810065 - DNA, 25 bp, Homo sapien
cctgccctgtatgtggtttggagaa

SEQ ID NO: 3810066 - DNA, 25 bp, Homo sapien
ggcctactgcatctcactggtcagg

SEQ ID NO: 3810067 - DNA, 25 bp, Homo sapien
tgtgaacttccaattagtgcaggcc

SEQ ID NO: 3810068 - DNA, 25 bp, Homo sapien
gcccaaccataagaatcaccagaat

SEQ ID NO: 3810069 - DNA, 25 bp, Homo sapien
taaacttgcccaaccataagaatca

SEQ ID NO: 3810070 - DNA, 25 bp, Homo sapien
tcccactgttcatcattatacttct

SEQ ID NO: 3810071 - DNA, 25 bp, Homo sapien
tgttcttaaacttgcccaaccataa

SEQ ID NO: 3810072 - DNA, 25 bp, Homo sapien
tgagtcttttaacccactgagtttg

SEQ ID NO: 3810073 - DNA, 25 bp, Homo sapien
aggtgagtcttttaacccactgagt

SEQ ID NO: 3810074 - DNA, 25 bp, Homo sapien
ttcaggtgagtcttttaacccactg

SEQ ID NO: 3810075 - DNA, 25 bp, Homo sapien
caggtgagtcttttaacccactgag

SEQ ID NO: 3810076 - DNA, 25 bp, Homo sapien
cctgttatgtccagatacagtattg

SEQ ID NO: 3810077 - DNA, 25 bp, Homo sapien
tccttatgtctatccacgatgcaga

SEQ ID NO: 3810078 - DNA, 25 bp, Homo sapien
tgaaccaattcagggtaagggaatg

SEQ ID NO: 3810079 - DNA, 25 bp, Homo sapien
ccacgatgcagattatggttggaag

SEQ ID NO: 3810080 - DNA, 25 bp, Homo sapien
tagatacaagtaggtcaccccagga

SEQ ID NO: 3810081 - DNA, 25 bp, Homo sapien
tgacgatctttatttgggacaggcc

SEQ ID NO: 3810082 - DNA, 25 bp, Homo sapien
caaatatgctggatgagtggtcaca

SEQ ID NO: 3810083 - DNA, 25 bp, Homo sapien
aattccacggttgggtacacacagc

SEQ ID NO: 3810084 - DNA, 25 bp, Homo sapien
tattccatcttagagtgcagagccc

SEQ ID NO: 3810085 - DNA, 25 bp, Homo sapien
cacaagagggcaattgaaagggcac

SEQ ID NO: 3810086 - DNA, 25 bp, Homo sapien
aaattaattatgtgggctctccgag

SEQ ID NO: 3810087 - DNA, 25 bp, Homo sapien
ggtgaaaaccctagtgccttggcca

SEQ ID NO: 3810088 - DNA, 25 bp, Homo sapien
gaaatgaagatgcacgtgttctggc

SEQ ID NO: 3810089 - DNA, 25 bp, Homo sapien
cacaggcgttagctggtcccaacta

SEQ ID NO: 3810090 - DNA, 25 bp, Homo sapien
caaggcagcttctattcctgggcag

SEQ ID NO: 3810091 - DNA, 25 bp, Homo sapien
tctgccatgcggagttacaagcaca

SEQ ID NO: 3810092 - DNA, 25 bp, Homo sapien
tcatccaccaagttcccgttgggag

SEQ ID NO: 3810093 - DNA, 25 bp, Homo sapien
tggcagttggcctggtcgtcatcac

SEQ ID NO: 3810094 - DNA, 25 bp, Homo sapien
cattcatccaccaagttcccgttgg

SEQ ID NO: 3810095 - DNA, 25 bp, Homo sapien
gcctggtcgtcatcacattcatcca

SEQ ID NO: 3810096 - DNA, 25 bp, Homo sapien
ggttcagagtcttgcagcctccagc

SEQ ID NO: 3810097 - DNA, 25 bp, Homo sapien
gcaagcgtgctttcaaaactgccac

SEQ ID NO: 3810098 - DNA, 25 bp, Homo sapien
tgcagagacaactgtatgggagatg

SEQ ID NO: 3810099 - DNA, 25 bp, Homo sapien
tagtcttgcgaaggcaatctagtcc

SEQ ID NO: 3810100 - DNA, 25 bp, Homo sapien
caggctgtcttttcaattctccatt

SEQ ID NO: 3810101 - DNA, 25 bp, Homo sapien
tgtcttttcaattctccattcactc

SEQ ID NO: 3810102 - DNA, 25 bp, Homo sapien
cttttcaattctccattcactccac

SEQ ID NO: 3810103 - DNA, 25 bp, Homo sapien
aggctgtcttttcaattctccattc

SEQ ID NO: 3810104 - DNA, 25 bp, Homo sapien
tcagcatcgccttccagaatccagg

SEQ ID NO: 3810105 - DNA, 25 bp, Homo sapien
aatcagcatcgccttccagaatcca

SEQ ID NO: 3810106 - DNA, 25 bp, Homo sapien
ctaaatcagcatcgccttccagaat

SEQ ID NO: 3810107 - DNA, 25 bp, Homo sapien
tcctaaatcagcatcgccttccaga

SEQ ID NO: 3810108 - DNA, 25 bp, Homo sapien
aacgcatctgcagtgagtggagtct

SEQ ID NO: 3810109 - DNA, 25 bp, Homo sapien
tccagatgaccacatttctccgtga

SEQ ID NO: 3810110 - DNA, 25 bp, Homo sapien
gtgagtggagtctgcccatctcttc

SEQ ID NO: 3810111 - DNA, 25 bp, Homo sapien
catttctccgtgaattgaacgaacg

SEQ ID NO: 3810112 - DNA, 25 bp, Homo sapien
gataatttaggggtttgggacatga

SEQ ID NO: 3810113 - DNA, 25 bp, Homo sapien
caatctcatataatccgaggagagt

SEQ ID NO: 3810114 - DNA, 25 bp, Homo sapien
ggcaccgagataaggggcctcccaa

SEQ ID NO: 3810115 - DNA, 25 bp, Homo sapien
gacaaaagtaggactgtgaaggtgc

SEQ ID NO: 3810116 - DNA, 25 bp, Homo sapien
gaggagagtcatgcaaacaacccaa

SEQ ID NO: 3810117 - DNA, 25 bp, Homo sapien
ggtagatcctgatgaatcgcgtgga

SEQ ID NO: 3810118 - DNA, 25 bp, Homo sapien
ttctgagccccagtccgccatgagt

SEQ ID NO: 3810119 - DNA, 25 bp, Homo sapien
agtccgcagctcaggtgtatcatag

SEQ ID NO: 3810120 - DNA, 25 bp, Homo sapien
catagttgttgttgccctcaaaaga

SEQ ID NO: 3810121 - DNA, 25 bp, Homo sapien
aagaaaattgtctcatcataaggaa

SEQ ID NO: 3810122 - DNA, 25 bp, Homo sapien
aaatggtccattttagagcagcctt

SEQ ID NO: 3810123 - DNA, 25 bp, Homo sapien
cattgcatgatgtttgatagagtaa

SEQ ID NO: 3810124 - DNA, 25 bp, Homo sapien
taatctatgattcctaacacacctt

SEQ ID NO: 3810125 - DNA, 25 bp, Homo sapien
tagacctggtagatcagatggagtg

SEQ ID NO: 3810126 - DNA, 25 bp, Homo sapien
taatatgtgcttgttcggtggtgga

SEQ ID NO: 3810127 - DNA, 25 bp, Homo sapien
tgtgtcaagacatcataaaccagcc

SEQ ID NO: 3810128 - DNA, 25 bp, Homo sapien
taggttgcaacagaatcagcaggtt

SEQ ID NO: 3810129 - DNA, 25 bp, Homo sapien
ttcacaagaggagtaggtcctggcc

SEQ ID NO: 3810130 - DNA, 25 bp, Homo sapien
gagggcagacccaaacgactgagtg

SEQ ID NO: 3810131 - DNA, 25 bp, Homo sapien
gacacaatgctataacactgatggc

SEQ ID NO: 3810132 - DNA, 25 bp, Homo sapien
ccttggagccttcacatctggaggg

SEQ ID NO: 3810133 - DNA, 25 bp, Homo sapien
cttcctcgggagaatgccagaggcc

SEQ ID NO: 3810134 - DNA, 25 bp, Homo sapien
attgaagtcaaggacataagggatg

SEQ ID NO: 3810135 - DNA, 25 bp, Homo sapien
ttcctcgggagaatgccagaggccc

SEQ ID NO: 3810136 - DNA, 25 bp, Homo sapien
gaagtcaaggacataagggatgacc

SEQ ID NO: 3810137 - DNA, 25 bp, Homo sapien
cgttgttgctgtacccgatcttgaa

SEQ ID NO: 3810138 - DNA, 25 bp, Homo sapien
taccaggcggatgttttcaggcatc

SEQ ID NO: 3810139 - DNA, 25 bp, Homo sapien
tatttggagccactcattgatgtag

SEQ ID NO: 3810140 - DNA, 25 bp, Homo sapien
tcatcttccagtccgagccgttgtt

SEQ ID NO: 3810141 - DNA, 25 bp, Homo sapien
caggctgggatctggaaaccaagaa

SEQ ID NO: 3810142 - DNA, 25 bp, Homo sapien
ccaagaatatactcagtcgggatta

SEQ ID NO: 3810143 - DNA, 25 bp, Homo sapien
ccacagtatttgctccaggctggga

SEQ ID NO: 3810144 - DNA, 25 bp, Homo sapien
tctttgaggacacgaactaagtcat

SEQ ID NO: 3810145 - DNA, 25 bp, Homo sapien
agtgcagtggccagtggcacaatct

SEQ ID NO: 3810146 - DNA, 25 bp, Homo sapien
catgccaccacacctgggtaatttt

SEQ ID NO: 3810147 - DNA, 25 bp, Homo sapien
atgccaccacacctgggtaattttt

SEQ ID NO: 3810148 - DNA, 25 bp, Homo sapien
gagtgcagtggccagtggcacaatc

SEQ ID NO: 3810149 - DNA, 25 bp, Homo sapien
gttatcttgcaaccgtatacttcaa

SEQ ID NO: 3810150 - DNA, 25 bp, Homo sapien
tttcccaagttgcaggcttgattcg

SEQ ID NO: 3810151 - DNA, 25 bp, Homo sapien
gggaatactgcaaccacaacatctg

SEQ ID NO: 3810152 - DNA, 25 bp, Homo sapien
cggacaaatcgagttatcagtggtt

SEQ ID NO: 3810153 - DNA, 25 bp, Homo sapien
gaggacagtgtttatcccacgcaga

SEQ ID NO: 3810154 - DNA, 25 bp, Homo sapien
tggttccacgcgttcttacaagaag

SEQ ID NO: 3810155 - DNA, 25 bp, Homo sapien
tcctccaggactagacaatggcctt

SEQ ID NO: 3810156 - DNA, 25 bp, Homo sapien
taggaaggttcttgtaccccagaca

SEQ ID NO: 3810157 - DNA, 25 bp, Homo sapien
gtgacaaagcgcagaaggcccaagt

SEQ ID NO: 3810158 - DNA, 25 bp, Homo sapien
taacgtcgatcttgtaagtcttgac

SEQ ID NO: 3810159 - DNA, 25 bp, Homo sapien
tcttccccgttggagctaacgtcga

SEQ ID NO: 3810160 - DNA, 25 bp, Homo sapien
gaaatggcgccctgtgtcccgacag

SEQ ID NO: 3810161 - DNA, 25 bp, Homo sapien
gatccctggtgcaaaagagaaaact

SEQ ID NO: 3810162 - DNA, 25 bp, Homo sapien
tgttgcaaccaggattgcttgatcc

SEQ ID NO: 3810163 - DNA, 25 bp, Homo sapien
ttgcttgatccctggtgcaaaagag

SEQ ID NO: 3810164 - DNA, 25 bp, Homo sapien
gcttgatccctggtgcaaaagagaa

SEQ ID NO: 3810165 - DNA, 25 bp, Homo sapien
aatgccttaggggaattctcaacaa

SEQ ID NO: 3810166 - DNA, 25 bp, Homo sapien
tgcaaccctcactgctaagaccagg

SEQ ID NO: 3810167 - DNA, 25 bp, Homo sapien
tccagcacttagtgtgcaaccctca

SEQ ID NO: 3810168 - DNA, 25 bp, Homo sapien
agttctttccacgagtcctttctct

SEQ ID NO: 3810169 - DNA, 25 bp, Homo sapien
aacagttttcctcaccacttctagg

SEQ ID NO: 3810170 - DNA, 25 bp, Homo sapien
ccacggcactgggttctaccatgct

SEQ ID NO: 3810171 - DNA, 25 bp, Homo sapien
tgaaggggcgatgtttgcagttcct

SEQ ID NO: 3810172 - DNA, 25 bp, Homo sapien
ttcctgggtggcgaactcccacctc

SEQ ID NO: 3810173 - DNA, 25 bp, Homo sapien
taagatatctacaggaaccatccac

SEQ ID NO: 3810174 - DNA, 25 bp, Homo sapien
gttgtaagatatctacaggaaccat

SEQ ID NO: 3810175 - DNA, 25 bp, Homo sapien
tgtaagatatctacaggaaccatcc

SEQ ID NO: 3810176 - DNA, 25 bp, Homo sapien
aagatatctacaggaaccatccaca

SEQ ID NO: 3810177 - DNA, 25 bp, Homo sapien
tactgcccattgagctagcattggc

SEQ ID NO: 3810178 - DNA, 25 bp, Homo sapien
tagcattggcaagggagcgtttacc

SEQ ID NO: 3810179 - DNA, 25 bp, Homo sapien
taatgtcataacgtggaaagcctca

SEQ ID NO: 3810180 - DNA, 25 bp, Homo sapien
cagcttttaacactcccaaggcagg

SEQ ID NO: 3810181 - DNA, 25 bp, Homo sapien
tctgcttggagcctagcaactgata

SEQ ID NO: 3810182 - DNA, 25 bp, Homo sapien
tattacctctgcttggagcctagca

SEQ ID NO: 3810183 - DNA, 25 bp, Homo sapien
ggagcctagcaactgataaactatg

SEQ ID NO: 3810184 - DNA, 25 bp, Homo sapien
ctgagcaattattacctctgcttgg

SEQ ID NO: 3810185 - DNA, 25 bp, Homo sapien
aagtgtcagcctagtgataagtggg

SEQ ID NO: 3810186 - DNA, 25 bp, Homo sapien
tatccagataaaagcatttcgtcca

SEQ ID NO: 3810187 - DNA, 25 bp, Homo sapien
caagcctatgtggaggtaatgatgt

SEQ ID NO: 3810188 - DNA, 25 bp, Homo sapien
ggatctggaagcacacaagcctatg

SEQ ID NO: 3810189 - DNA, 25 bp, Homo sapien
tgtgaaatttcttgcacctgtagcc

SEQ ID NO: 3810190 - DNA, 25 bp, Homo sapien
gagtgtttcccactggaaatgtgta

SEQ ID NO: 3810191 - DNA, 25 bp, Homo sapien
tttccagatcctcaaacttaaggct

SEQ ID NO: 3810192 - DNA, 25 bp, Homo sapien
cctcaaacttaaggctctgtgaaat

SEQ ID NO: 3810193 - DNA, 25 bp, Homo sapien
tgggatgttggtgaagtgtatggat

SEQ ID NO: 3810194 - DNA, 25 bp, Homo sapien
tgttggtgaagtgtatggatgggaa

SEQ ID NO: 3810195 - DNA, 25 bp, Homo sapien
gtgaagtgtatggatgggaaacctt

SEQ ID NO: 3810196 - DNA, 25 bp, Homo sapien
tggatgggatgttggtgaagtgtat

SEQ ID NO: 3810197 - DNA, 25 bp, Homo sapien
ccaggattagttatgtttctccgaa

SEQ ID NO: 3810198 - DNA, 25 bp, Homo sapien
ccgagggtggcaaacctgactgtgt

SEQ ID NO: 3810199 - DNA, 25 bp, Homo sapien
tctgtggcccattaggcctgatgcc

SEQ ID NO: 3810200 - DNA, 25 bp, Homo sapien
gacagcctcgtctgtggcccattag

SEQ ID NO: 3810201 - DNA, 25 bp, Homo sapien
agaggcaagtggcaatgcacgcgct

SEQ ID NO: 3810202 - DNA, 25 bp, Homo sapien
acatccagaggcaagtggcaatgca

SEQ ID NO: 3810203 - DNA, 25 bp, Homo sapien
agtggcaatgcacgcgctggccacg

SEQ ID NO: 3810204 - DNA, 25 bp, Homo sapien
gcaagtggcaatgcacgcgctggcc

SEQ ID NO: 3810205 - DNA, 25 bp, Homo sapien
agcttaatggcctgggttctaatga

SEQ ID NO: 3810206 - DNA, 25 bp, Homo sapien
tctaatgatgtgcttgaagaggaag

SEQ ID NO: 3810207 - DNA, 25 bp, Homo sapien
aagaggaagattttgatcgcaccac

SEQ ID NO: 3810208 - DNA, 25 bp, Homo sapien
agaaactcagtttcaatgagcttaa

SEQ ID NO: 3810209 - DNA, 25 bp, Homo sapien
tgatagaccttgtttccaagcctgg

SEQ ID NO: 3810210 - DNA, 25 bp, Homo sapien
ggatgattatacctccttcccagga

SEQ ID NO: 3810211 - DNA, 25 bp, Homo sapien
tcaagtacttaggacagatcgggcc

SEQ ID NO: 3810212 - DNA, 25 bp, Homo sapien
caacgtgattcagcagggaggtgat

SEQ ID NO: 3810213 - DNA, 25 bp, Homo sapien
tttgcccacagtttaacccacagat

SEQ ID NO: 3810214 - DNA, 25 bp, Homo sapien
tatctagcaataaacgtaagacagg

SEQ ID NO: 3810215 - DNA, 25 bp, Homo sapien
gtcattttatatctagcaataaacg

SEQ ID NO: 3810216 - DNA, 25 bp, Homo sapien
ggatctgactattctcctgaaaagg

SEQ ID NO: 3810217 - DNA, 25 bp, Homo sapien
ctttgggtgggaatacccagatatc

SEQ ID NO: 3810218 - DNA, 25 bp, Homo sapien
cattaggagtggtgccggcgatgag

SEQ ID NO: 3810219 - DNA, 25 bp, Homo sapien
aagtgggcattaggagtggtgccgg

SEQ ID NO: 3810220 - DNA, 25 bp, Homo sapien
ccagatatcaaggttgggcaagtgg

SEQ ID NO: 3810221 - DNA, 25 bp, Homo sapien
aaatggggtcagcggtggggatgtg

SEQ ID NO: 3810222 - DNA, 25 bp, Homo sapien
gaaaatggggtcagcggtggggatg

SEQ ID NO: 3810223 - DNA, 25 bp, Homo sapien
ctggaaaatggggtcagcggtgggg

SEQ ID NO: 3810224 - DNA, 25 bp, Homo sapien
tggaaaatggggtcagcggtgggga

SEQ ID NO: 3810225 - DNA, 25 bp, Homo sapien
gaagggaatgccagaacaaagcgag

SEQ ID NO: 3810226 - DNA, 25 bp, Homo sapien
aagcagaggtagcatcactaatgaa

SEQ ID NO: 3810227 - DNA, 25 bp, Homo sapien
ggaatgccagaacaaagcgaggaaa

SEQ ID NO: 3810228 - DNA, 25 bp, Homo sapien
acaaagcgaggaaagcagaggtagc

SEQ ID NO: 3810229 - DNA, 25 bp, Homo sapien
gataaatgcgttttcagggatgtca

SEQ ID NO: 3810230 - DNA, 25 bp, Homo sapien
tgatggccgtgaacctatcttctct

SEQ ID NO: 3810231 - DNA, 25 bp, Homo sapien
taggaagcccattaacagacagtgt

SEQ ID NO: 3810232 - DNA, 25 bp, Homo sapien
tgatggccgtgaacctatcttctca

SEQ ID NO: 3810233 - DNA, 25 bp, Homo sapien
tatccactctcggtaggaatcctct

SEQ ID NO: 3810234 - DNA, 25 bp, Homo sapien
gagcgctctgcagaccagttggtgc

SEQ ID NO: 3810235 - DNA, 25 bp, Homo sapien
ttggtgctatactgggaagaagctg

SEQ ID NO: 3810236 - DNA, 25 bp, Homo sapien
cattctcagggtagttcaggcggga

SEQ ID NO: 3810237 - DNA, 25 bp, Homo sapien
tctttagtgcttcatgtggccgcag

SEQ ID NO: 3810238 - DNA, 25 bp, Homo sapien
tgactgctctgtcggtgaactactt

SEQ ID NO: 3810239 - DNA, 25 bp, Homo sapien
taacattgagtatttaccacagggc

SEQ ID NO: 3810240 - DNA, 25 bp, Homo sapien
aatttcagaggctcccaagcaggct

SEQ ID NO: 3810241 - DNA, 25 bp, Homo sapien
tgtccacagtaacgcccaatgtgag

SEQ ID NO: 3810242 - DNA, 25 bp, Homo sapien
gagaaaccttcttttgctatcgcgc

SEQ ID NO: 3810243 - DNA, 25 bp, Homo sapien
taaaaaaccatggagagaatgcccg

SEQ ID NO: 3810244 - DNA, 25 bp, Homo sapien
gctatcgcgctgtcggtgtaaaaaa

SEQ ID NO: 3810245 - DNA, 25 bp, Homo sapien
gccactgtttcgtggattgcacaga

SEQ ID NO: 3810246 - DNA, 25 bp, Homo sapien
actgtttcgtggattgcacagatcc

SEQ ID NO: 3810247 - DNA, 25 bp, Homo sapien
cggagccactgtttcgtggattgca

SEQ ID NO: 3810248 - DNA, 25 bp, Homo sapien
cgtggattgcacagatccttggccg

SEQ ID NO: 3810249 - DNA, 25 bp, Homo sapien
caaaataggccatctatatttttct

SEQ ID NO: 3810250 - DNA, 25 bp, Homo sapien
aagggctgggactctaggctcatgc

SEQ ID NO: 3810251 - DNA, 25 bp, Homo sapien
acactttttggtgtagaatatctgg

SEQ ID NO: 3810252 - DNA, 25 bp, Homo sapien
tcatctctcgatgttgcccaagatg

SEQ ID NO: 3810253 - DNA, 25 bp, Homo sapien
tagccggtcgtagcgacagaacatc

SEQ ID NO: 3810254 - DNA, 25 bp, Homo sapien
aatccatcccagatttctagccggt

SEQ ID NO: 3810255 - DNA, 25 bp, Homo sapien
tcaaattccaggataatctctgaca

SEQ ID NO: 3810256 - DNA, 25 bp, Homo sapien
ccctggaggatttgagtcaggctcc

SEQ ID NO: 3810257 - DNA, 25 bp, Homo sapien
ccactaggtgttgtgtagttctggg

SEQ ID NO: 3810258 - DNA, 25 bp, Homo sapien
gaatccgggggactttatcactcca

SEQ ID NO: 3810259 - DNA, 25 bp, Homo sapien
gggactttatcactccactaggtgt

SEQ ID NO: 3810260 - DNA, 25 bp, Homo sapien
gtgtagttctgggaacattcaggac

SEQ ID NO: 3810261 - DNA, 25 bp, Homo sapien
tgacatcctaaccttccccgaagta

SEQ ID NO: 3810262 - DNA, 25 bp, Homo sapien
tatcagacacagtatagtacgccat

SEQ ID NO: 3810263 - DNA, 25 bp, Homo sapien
ttccccgaagtatcagacacagtat

SEQ ID NO: 3810264 - DNA, 25 bp, Homo sapien
tgatatcaatgctgacatcctaacc

SEQ ID NO: 3810265 - DNA, 25 bp, Homo sapien
ggctggtggcccaaagtttcagcat

SEQ ID NO: 3810266 - DNA, 25 bp, Homo sapien
gagaaatctctttaggcgattggaa

SEQ ID NO: 3810267 - DNA, 25 bp, Homo sapien
ggcgattggaaataaatgtagggct

SEQ ID NO: 3810268 - DNA, 25 bp, Homo sapien
tgcactgagacccataggaaacagc

SEQ ID NO: 3810269 - DNA, 25 bp, Homo sapien
attttctccatcgaagacttccacg

SEQ ID NO: 3810270 - DNA, 25 bp, Homo sapien
tgcaccatgtgtttcgtagtcagag

SEQ ID NO: 3810271 - DNA, 25 bp, Homo sapien
gaaatggccctgaagacacaacagg

SEQ ID NO: 3810272 - DNA, 25 bp, Homo sapien
tttcataacgtatggaaaatcctgc

SEQ ID NO: 3810273 - DNA, 25 bp, Homo sapien
gtgagcgaccctctaaacatatggc

SEQ ID NO: 3810274 - DNA, 25 bp, Homo sapien
tgatttctgtgagcgaccctctaaa

SEQ ID NO: 3810275 - DNA, 25 bp, Homo sapien
cttctttgaaaatagtctctcagta

SEQ ID NO: 3810276 - DNA, 25 bp, Homo sapien
gaaaatagtctctcagtagccacat

SEQ ID NO: 3810277 - DNA, 25 bp, Homo sapien
tcaggagacaactgcaacgatgcta

SEQ ID NO: 3810278 - DNA, 25 bp, Homo sapien
gcccgggacgcatgacttatgttta

SEQ ID NO: 3810279 - DNA, 25 bp, Homo sapien
taccaagtcacctaggagcaagaga

SEQ ID NO: 3810280 - DNA, 25 bp, Homo sapien
taaaagtggacagcttaaggctctc

SEQ ID NO: 3810281 - DNA, 25 bp, Homo sapien
tagcctttataatcaatgggatgta

SEQ ID NO: 3810282 - DNA, 25 bp, Homo sapien
agcctttataatcaatgggatgtag

SEQ ID NO: 3810283 - DNA, 25 bp, Homo sapien
ctctgttactgttgccagtgtggca

SEQ ID NO: 3810284 - DNA, 25 bp, Homo sapien
aatttcgatcccgaagccggctgca

SEQ ID NO: 3810285 - DNA, 25 bp, Homo sapien
aacacggcattgctcgggatgtcga

SEQ ID NO: 3810286 - DNA, 25 bp, Homo sapien
gagaatgaaggcacctgtttggctc

SEQ ID NO: 3810287 - DNA, 25 bp, Homo sapien
gatgagagctgggaattacgtctga

SEQ ID NO: 3810288 - DNA, 25 bp, Homo sapien
gagctgggaattacgtctgaggaat

SEQ ID NO: 3810289 - DNA, 25 bp, Homo sapien
ccgctggatgagagctgggaattac

SEQ ID NO: 3810290 - DNA, 25 bp, Homo sapien
tgggaattacgtctgaggaatttaa

SEQ ID NO: 3810291 - DNA, 25 bp, Homo sapien
tccgccaggtggttgttttcatgag

SEQ ID NO: 3810292 - DNA, 25 bp, Homo sapien
cagtaatcacaggttaggtttccca

SEQ ID NO: 3810293 - DNA, 25 bp, Homo sapien
ggctttagaatccacgctcctcaag

SEQ ID NO: 3810294 - DNA, 25 bp, Homo sapien
tcaacgttagggtgtaatccgccag

SEQ ID NO: 3810295 - DNA, 25 bp, Homo sapien
tatgatataatcagtgcatgtgtga

SEQ ID NO: 3810296 - DNA, 25 bp, Homo sapien
gacagacacagacagccgtcttggt

SEQ ID NO: 3810297 - DNA, 25 bp, Homo sapien
tgtctggtgagtcccactgaatggg

SEQ ID NO: 3810298 - DNA, 25 bp, Homo sapien
gctcggggacctcatgactactgga

SEQ ID NO: 3810299 - DNA, 25 bp, Homo sapien
tggatgtacttaagctaaaccctct

SEQ ID NO: 3810300 - DNA, 25 bp, Homo sapien
gtattactacatgggaggactcaag

SEQ ID NO: 3810301 - DNA, 25 bp, Homo sapien
tctcctggactgcttggacacaagc

SEQ ID NO: 3810302 - DNA, 25 bp, Homo sapien
gaagaacgtggtgctaaggagacca

SEQ ID NO: 3810303 - DNA, 25 bp, Homo sapien
caggtacgagagtttatagtcccag

SEQ ID NO: 3810304 - DNA, 25 bp, Homo sapien
tcatgggtgatggttagtcaaggcc

SEQ ID NO: 3810305 - DNA, 25 bp, Homo sapien
caaagtacagtagagctcacaaagc

SEQ ID NO: 3810306 - DNA, 25 bp, Homo sapien
gataggtaatcaggtcaggtacgag

SEQ ID NO: 3810307 - DNA, 25 bp, Homo sapien
ttatcacagtcatgcagagagaagg

SEQ ID NO: 3810308 - DNA, 25 bp, Homo sapien
cacagtcatgcagagagaaggttga

SEQ ID NO: 3810309 - DNA, 25 bp, Homo sapien
ttgatccaaaaggcggctcctccat

SEQ ID NO: 3810310 - DNA, 25 bp, Homo sapien
gctcctccattaagaaggatcacca

SEQ ID NO: 3810311 - DNA, 25 bp, Homo sapien
attttgttcaacagacccttccagt

SEQ ID NO: 3810312 - DNA, 25 bp, Homo sapien
gccaccgcacctgaacttgaagaag

SEQ ID NO: 3810313 - DNA, 25 bp, Homo sapien
taaccgcaaccaagaaatatgaatc

SEQ ID NO: 3810314 - DNA, 25 bp, Homo sapien
tccttgaagtacaaactgctaagat

SEQ ID NO: 3810315 - DNA, 25 bp, Homo sapien
taatgtggacatctcatcagcacag

SEQ ID NO: 3810316 - DNA, 25 bp, Homo sapien
tcgttaggcaagctgttggtcccct

SEQ ID NO: 3810317 - DNA, 25 bp, Homo sapien
aaggaggtcaccattatcgatgctg

SEQ ID NO: 3810318 - DNA, 25 bp, Homo sapien
gttccaaggaggtcaccattatcga

SEQ ID NO: 3810319 - DNA, 25 bp, Homo sapien
tctgcggaggccagcattttagaca

SEQ ID NO: 3810320 - DNA, 25 bp, Homo sapien
taggcaccaagcatcaaaaggtttg

SEQ ID NO: 3810321 - DNA, 25 bp, Homo sapien
tcaaattgttcctcgaagagcggca

SEQ ID NO: 3810322 - DNA, 25 bp, Homo sapien
tttgtacggaaggtcagtatctgcg

SEQ ID NO: 3810323 - DNA, 25 bp, Homo sapien
aagattaattccagtcgccagatga

SEQ ID NO: 3810324 - DNA, 25 bp, Homo sapien
tcagaaaagattgcaataacccgtc

SEQ ID NO: 3810325 - DNA, 25 bp, Homo sapien
gatgaccgaccctggttaatccaaa

SEQ ID NO: 3810326 - DNA, 25 bp, Homo sapien
gattcacaaacgagataccagagtc

SEQ ID NO: 3810327 - DNA, 25 bp, Homo sapien
tcagcctggaagacgatgggcccat

SEQ ID NO: 3810328 - DNA, 25 bp, Homo sapien
tcatgaattttcagcctggaagacg

SEQ ID NO: 3810329 - DNA, 25 bp, Homo sapien
ttttcagcctggaagacgatgggcc

SEQ ID NO: 3810330 - DNA, 25 bp, Homo sapien
cctggaagacgatgggcccatttaa

SEQ ID NO: 3810331 - DNA, 25 bp, Homo sapien
catatagagtgcctgaattcccaag

SEQ ID NO: 3810332 - DNA, 25 bp, Homo sapien
aagaaccccagtagcatccgttatg

SEQ ID NO: 3810333 - DNA, 25 bp, Homo sapien
gaagacaagaactccgcaaatctcc

SEQ ID NO: 3810334 - DNA, 25 bp, Homo sapien
cagtagcatccgttatgaagacaag

SEQ ID NO: 3810335 - DNA, 25 bp, Homo sapien
gcccttcaatctgttgtactcccca

SEQ ID NO: 3810336 - DNA, 25 bp, Homo sapien
caatctgttgtactccccagaattg

SEQ ID NO: 3810337 - DNA, 25 bp, Homo sapien
ttcaatctgttgtactccccagaat

SEQ ID NO: 3810338 - DNA, 25 bp, Homo sapien
atctgttgtactccccagaattgcc

SEQ ID NO: 3810339 - DNA, 25 bp, Homo sapien
tgacaaccatcccaggatttcagat

SEQ ID NO: 3810340 - DNA, 25 bp, Homo sapien
tttcagatcaagatgtctgaggcag

SEQ ID NO: 3810341 - DNA, 25 bp, Homo sapien
aggatttcagatcaagatgtctgag

SEQ ID NO: 3810342 - DNA, 25 bp, Homo sapien
ccatcccaggatttcagatcaagat

SEQ ID NO: 3810343 - DNA, 25 bp, Homo sapien
aaatcggctggttttagtggcacgc

SEQ ID NO: 3810344 - DNA, 25 bp, Homo sapien
gagatcctcgctgccttgatagaag

SEQ ID NO: 3810345 - DNA, 25 bp, Homo sapien
gaaagccactcgaaaaagttcacac

SEQ ID NO: 3810346 - DNA, 25 bp, Homo sapien
tctgatgacgatgcttgcttgagaa

SEQ ID NO: 3810347 - DNA, 25 bp, Homo sapien
tcacaatgtctagcatcttcacagt

SEQ ID NO: 3810348 - DNA, 25 bp, Homo sapien
gacaccctgtgtacatttaggccta

SEQ ID NO: 3810349 - DNA, 25 bp, Homo sapien
taaccttggtgtcaaagtgtttcca

SEQ ID NO: 3810350 - DNA, 25 bp, Homo sapien
ccaatcaccaacgagctttcaaggg

SEQ ID NO: 3810351 - DNA, 25 bp, Homo sapien
ggctcctccttgatcaaaagatggc

SEQ ID NO: 3810352 - DNA, 25 bp, Homo sapien
cattactaggtatctatggcagagg

SEQ ID NO: 3810353 - DNA, 25 bp, Homo sapien
ggctattggataagaacttccccta

SEQ ID NO: 3810354 - DNA, 25 bp, Homo sapien
tatgatatgcagtttccatcctggt

SEQ ID NO: 3810355 - DNA, 25 bp, Homo sapien
caaacaccagatcgtgattatgcat

SEQ ID NO: 3810356 - DNA, 25 bp, Homo sapien
acaccagatcgtgattatgcattac

SEQ ID NO: 3810357 - DNA, 25 bp, Homo sapien
aaacaccagatcgtgattatgcatt

SEQ ID NO: 3810358 - DNA, 25 bp, Homo sapien
cccaaacaccagatcgtgattatgc

SEQ ID NO: 3810359 - DNA, 25 bp, Homo sapien
tagggaaagcaatatggctgaagac

SEQ ID NO: 3810360 - DNA, 25 bp, Homo sapien
gtaagaagtagggaaagcaatatgg

SEQ ID NO: 3810361 - DNA, 25 bp, Homo sapien
tgaggggatcgttgtctcgggaatc

SEQ ID NO: 3810362 - DNA, 25 bp, Homo sapien
gcaatatggctgaagacaagtgtgt

SEQ ID NO: 3810363 - DNA, 25 bp, Homo sapien
gggaaccaagttctcactgtggacc

SEQ ID NO: 3810364 - DNA, 25 bp, Homo sapien
tacccatcaactagagaggtcagat

SEQ ID NO: 3810365 - DNA, 25 bp, Homo sapien
cgttagctgccaaacagtacatggg

SEQ ID NO: 3810366 - DNA, 25 bp, Homo sapien
aaaagtctatgataacgggaacaca

SEQ ID NO: 3810367 - DNA, 25 bp, Homo sapien
tgtagcaagacactgttgtaactgg

SEQ ID NO: 3810368 - DNA, 25 bp, Homo sapien
cagctttctgtagcaagacactgtt

SEQ ID NO: 3810369 - DNA, 25 bp, Homo sapien
taactggtacctctctcataacgcc

SEQ ID NO: 3810370 - DNA, 25 bp, Homo sapien
cactgttgtaactggtacctctctc

SEQ ID NO: 3810371 - DNA, 25 bp, Homo sapien
tatttactcttagtgttactagtac

SEQ ID NO: 3810372 - DNA, 25 bp, Homo sapien
tagtaccactgttctttcggaccca

SEQ ID NO: 3810373 - DNA, 25 bp, Homo sapien
ctttatttactcttagtgttactag

SEQ ID NO: 3810374 - DNA, 25 bp, Homo sapien
ctgttctttcggacccaaagatgga

SEQ ID NO: 3810375 - DNA, 25 bp, Homo sapien
agagcatgatctaggtcccaggtgg

SEQ ID NO: 3810376 - DNA, 25 bp, Homo sapien
ggctgcagatgaagataatgaggtt

SEQ ID NO: 3810377 - DNA, 25 bp, Homo sapien
ttttatatgcgtcttgtttagagca

SEQ ID NO: 3810378 - DNA, 25 bp, Homo sapien
ccagatgttttttatatgcgtcttg

SEQ ID NO: 3810379 - DNA, 25 bp, Homo sapien
aatccgtagcccttaactgtgctgc

SEQ ID NO: 3810380 - DNA, 25 bp, Homo sapien
tgctttctgaaaggttgtcatccag

SEQ ID NO: 3810381 - DNA, 25 bp, Homo sapien
gggagtggctgtcttaagtgctttc

SEQ ID NO: 3810382 - DNA, 25 bp, Homo sapien
tcaggtgcctctgattaagctagag

SEQ ID NO: 3810383 - DNA, 25 bp, Homo sapien
gtgctggaaggcaaaatagagtgct

SEQ ID NO: 3810384 - DNA, 25 bp, Homo sapien
tctcgctgtgatgtcccggctagag

SEQ ID NO: 3810385 - DNA, 25 bp, Homo sapien
tatcagaccaagtcagccttagctc

SEQ ID NO: 3810386 - DNA, 25 bp, Homo sapien
acagttagaatgaggactctacgga

SEQ ID NO: 3810387 - DNA, 25 bp, Homo sapien
cataaattctaactaccatatcaat

SEQ ID NO: 3810388 - DNA, 25 bp, Homo sapien
tctaactaccatatcaatgacattc

SEQ ID NO: 3810389 - DNA, 25 bp, Homo sapien
atgagattcaagatgtctgccttac

SEQ ID NO: 3810390 - DNA, 25 bp, Homo sapien
gagattcaagatgtctgccttacca

SEQ ID NO: 3810391 - DNA, 25 bp, Homo sapien
aattatgctttgacacttcacaagt

SEQ ID NO: 3810392 - DNA, 25 bp, Homo sapien
ggtcagagcattctctagaatcctc

SEQ ID NO: 3810393 - DNA, 25 bp, Homo sapien
ccttcttcggtcagagcattctcta

SEQ ID NO: 3810394 - DNA, 25 bp, Homo sapien
ctcaacaccttcttcggtcagagca

SEQ ID NO: 3810395 - DNA, 25 bp, Homo sapien
taacgaagtatccacctttgacagc

SEQ ID NO: 3810396 - DNA, 25 bp, Homo sapien
ccagaattaactcatgaactgggtc

SEQ ID NO: 3810397 - DNA, 25 bp, Homo sapien
ttcctaacgaagtatccacctttga

SEQ ID NO: 3810398 - DNA, 25 bp, Homo sapien
ttaactcatgaactgggtcagtctt

SEQ ID NO: 3810399 - DNA, 25 bp, Homo sapien
caggttgtcgagcacttcctacagg

SEQ ID NO: 3810400 - DNA, 25 bp, Homo sapien
tatctgagtggactgctacgtgcaa

SEQ ID NO: 3810401 - DNA, 25 bp, Homo sapien
tgctgtggtgccctgttcaaaaaca

SEQ ID NO: 3810402 - DNA, 25 bp, Homo sapien
taatatttaggtccagcggtagcag

SEQ ID NO: 3810403 - DNA, 25 bp, Homo sapien
taagaatgaggataaccaggagatg

SEQ ID NO: 3810404 - DNA, 25 bp, Homo sapien
tgggtccggagcctgaatcagccat

SEQ ID NO: 3810405 - DNA, 25 bp, Homo sapien
cataattctctggtatgggtccgga

SEQ ID NO: 3810406 - DNA, 25 bp, Homo sapien
tgtcctccaaatcgaagtgagggtt

SEQ ID NO: 3810407 - DNA, 25 bp, Homo sapien
caattgctgacgacttactgtaaag

SEQ ID NO: 3810408 - DNA, 25 bp, Homo sapien
gtatgaggccctccacttgcggtct

SEQ ID NO: 3810409 - DNA, 25 bp, Homo sapien
ttacatggtactgtttagaccccag

SEQ ID NO: 3810410 - DNA, 25 bp, Homo sapien
tacagtgtgaagtcaaacatgccta

SEQ ID NO: 3810411 - DNA, 25 bp, Homo sapien
cacaaaccgatatctctggccgtca

SEQ ID NO: 3810412 - DNA, 25 bp, Homo sapien
tccagacagattacggaaggtgtac

SEQ ID NO: 3810413 - DNA, 25 bp, Homo sapien
ccaaggatcaacgtcaggagggagc

SEQ ID NO: 3810414 - DNA, 25 bp, Homo sapien
gataattggcatgctgatctgggaa

SEQ ID NO: 3810415 - DNA, 25 bp, Homo sapien
cgagcacggcgcagaggagcggcag

SEQ ID NO: 3810416 - DNA, 25 bp, Homo sapien
gaggacgagggcgagcacggcgcag

SEQ ID NO: 3810417 - DNA, 25 bp, Homo sapien
gcgagcacggcgcagaggagcggca

SEQ ID NO: 3810418 - DNA, 25 bp, Homo sapien
cgagggcgagcacggcgcagaggag

SEQ ID NO: 3810419 - DNA, 25 bp, Homo sapien
tgcctggatccgagaggaacgcttc

SEQ ID NO: 3810420 - DNA, 25 bp, Homo sapien
gcttgtttctggacccgttggagcc

SEQ ID NO: 3810421 - DNA, 25 bp, Homo sapien
aatctaagcgatccgaagagcccca

SEQ ID NO: 3810422 - DNA, 25 bp, Homo sapien
tgtacaatcctcagcccgtcttgga

SEQ ID NO: 3810423 - DNA, 25 bp, Homo sapien
agaggagtttcaccaactgcacccc

SEQ ID NO: 3810424 - DNA, 25 bp, Homo sapien
gaaggaggggaacgagcaatgaaaa

SEQ ID NO: 3810425 - DNA, 25 bp, Homo sapien
aggggaacgagcaatgaaaagatga

SEQ ID NO: 3810426 - DNA, 25 bp, Homo sapien
gacagaggagtttcaccaactgcac

SEQ ID NO: 3810427 - DNA, 25 bp, Homo sapien
ctgtaattgcctgacaggagactgg

SEQ ID NO: 3810428 - DNA, 25 bp, Homo sapien
taattgcctgacaggagactgggag

SEQ ID NO: 3810429 - DNA, 25 bp, Homo sapien
tccgagtgctctccccgtccgtctg

SEQ ID NO: 3810430 - DNA, 25 bp, Homo sapien
gaggaacaactttccctccgagtgc

SEQ ID NO: 3810431 - DNA, 25 bp, Homo sapien
ggaggtaggaatgctggcaaggaga

SEQ ID NO: 3810432 - DNA, 25 bp, Homo sapien
ggcacaaatagctggccaaagggag

SEQ ID NO: 3810433 - DNA, 25 bp, Homo sapien
ctggcacaaatagctggccaaaggg

SEQ ID NO: 3810434 - DNA, 25 bp, Homo sapien
aaagggaggtaggaatgctggcaag

SEQ ID NO: 3810435 - DNA, 25 bp, Homo sapien
accatatcctgtgatcatactgcag

SEQ ID NO: 3810436 - DNA, 25 bp, Homo sapien
caagtgtaaacaggcagtctgtaga

SEQ ID NO: 3810437 - DNA, 25 bp, Homo sapien
tgtgacagtgcaattcagacatctt

SEQ ID NO: 3810438 - DNA, 25 bp, Homo sapien
cacagttgtatatgtcattctgcaa

SEQ ID NO: 3810439 - DNA, 25 bp, Homo sapien
cccatgctgtcaggtagctgtccaa

SEQ ID NO: 3810440 - DNA, 25 bp, Homo sapien
tccaactcgcatgttgttgctgtgt

SEQ ID NO: 3810441 - DNA, 25 bp, Homo sapien
tacaaagccggtaggttgcgtgcca

SEQ ID NO: 3810442 - DNA, 25 bp, Homo sapien
cagcccttggcttcagttaaccaca

SEQ ID NO: 3810443 - DNA, 25 bp, Homo sapien
ttctttgcaagatctaccaagagat

SEQ ID NO: 3810444 - DNA, 25 bp, Homo sapien
gactctgcagaacattctttgcaag

SEQ ID NO: 3810445 - DNA, 25 bp, Homo sapien
tcaagactctgcagaacattctttg

SEQ ID NO: 3810446 - DNA, 25 bp, Homo sapien
ttgcaagatctaccaagagatctag

SEQ ID NO: 3810447 - DNA, 25 bp, Homo sapien
gagagtgttccagtacagggcacag

SEQ ID NO: 3810448 - DNA, 25 bp, Homo sapien
aaaggcgaaaggagagtgttccagt

SEQ ID NO: 3810449 - DNA, 25 bp, Homo sapien
agcagatggcaatgacacagttgag

SEQ ID NO: 3810450 - DNA, 25 bp, Homo sapien
cagaggcaaaggtctggcagcagat

SEQ ID NO: 3810451 - DNA, 25 bp, Homo sapien
agaggaagattgagcaagtgtgggc

SEQ ID NO: 3810452 - DNA, 25 bp, Homo sapien
caggtgccccgaagaggcagctgga

SEQ ID NO: 3810453 - DNA, 25 bp, Homo sapien
gaaaattattgcaccaggaagggtg

SEQ ID NO: 3810454 - DNA, 25 bp, Homo sapien
cagagctccaaatgaccatgagaag

SEQ ID NO: 3810455 - DNA, 25 bp, Homo sapien
cctccaaagtccagatatgatattg

SEQ ID NO: 3810456 - DNA, 25 bp, Homo sapien
aggtgcttgggctgaacctggatgg

SEQ ID NO: 3810457 - DNA, 25 bp, Homo sapien
ttagaagtgaatggttctggatgga

SEQ ID NO: 3810458 - DNA, 25 bp, Homo sapien
atggatgagaaatatcattccctcc

SEQ ID NO: 3810459 - DNA, 25 bp, Homo sapien
ctgtggacatggcaaacgagagctt

SEQ ID NO: 3810460 - DNA, 25 bp, Homo sapien
gtggacatggcaaacgagagctttg

SEQ ID NO: 3810461 - DNA, 25 bp, Homo sapien
tcctgtggacatggcaaacgagagc

SEQ ID NO: 3810462 - DNA, 25 bp, Homo sapien
ggtcctgtggacatggcaaacgaga

SEQ ID NO: 3810463 - DNA, 25 bp, Homo sapien
atgaaagaagacggcatccaggcac

SEQ ID NO: 3810464 - DNA, 25 bp, Homo sapien
ttgggtactttccaagaagtgatta

SEQ ID NO: 3810465 - DNA, 25 bp, Homo sapien
ctttccaagaagtgattacttatca

SEQ ID NO: 3810466 - DNA, 25 bp, Homo sapien
aaagaagacggcatccaggcacctt

SEQ ID NO: 3810467 - DNA, 25 bp, Homo sapien
cacagcaagaatattcctgttccct

SEQ ID NO: 3810468 - DNA, 25 bp, Homo sapien
tttccaggaccgtggccaatggcag

SEQ ID NO: 3810469 - DNA, 25 bp, Homo sapien
gacaccaggtcattaaacccagtca

SEQ ID NO: 3810470 - DNA, 25 bp, Homo sapien
ctgttcccttaacgcatttccagga

SEQ ID NO: 3810471 - DNA, 25 bp, Homo sapien
ttccatatcgaaaaaactcagatca

SEQ ID NO: 3810472 - DNA, 25 bp, Homo sapien
aactcagatcaaaatgccaatttcc

SEQ ID NO: 3810473 - DNA, 25 bp, Homo sapien
gagttcctctcaattccatatcgaa

SEQ ID NO: 3810474 - DNA, 25 bp, Homo sapien
ctgagttcctctcaattccatatcg

SEQ ID NO: 3810475 - DNA, 25 bp, Homo sapien
gttatctgcaccagacaagctctcc

SEQ ID NO: 3810476 - DNA, 25 bp, Homo sapien
tctggagttatctgcaccagacaag

SEQ ID NO: 3810477 - DNA, 25 bp, Homo sapien
cccacagctgaggaatccaattgcc

SEQ ID NO: 3810478 - DNA, 25 bp, Homo sapien
aggaatccaattgccccagcttcag

SEQ ID NO: 3810479 - DNA, 25 bp, Homo sapien
caggacaggcactggttttaccatc

SEQ ID NO: 3810480 - DNA, 25 bp, Homo sapien
ggatcagggtagtatccaagactcc

SEQ ID NO: 3810481 - DNA, 25 bp, Homo sapien
gtacagagcaccatgactcccagtg

SEQ ID NO: 3810482 - DNA, 25 bp, Homo sapien
ggagcccacaaggatcagggtagta

SEQ ID NO: 3810483 - DNA, 25 bp, Homo sapien
tgcatcagcacgagcatagggccat

SEQ ID NO: 3810484 - DNA, 25 bp, Homo sapien
tggcaatgaccaatatcacaagaac

SEQ ID NO: 3810485 - DNA, 25 bp, Homo sapien
caagaacagagcccttctcagacag

SEQ ID NO: 3810486 - DNA, 25 bp, Homo sapien
ctttctagagctttccctggcaatg

SEQ ID NO: 3810487 - DNA, 25 bp, Homo sapien
atttctggactgatgagcaattttg

SEQ ID NO: 3810488 - DNA, 25 bp, Homo sapien
agcactaatcctgcaatttctccat

SEQ ID NO: 3810489 - DNA, 25 bp, Homo sapien
gatttctggactgatgagcaatttt

SEQ ID NO: 3810490 - DNA, 25 bp, Homo sapien
tcacagcactaatcctgcaatttct

SEQ ID NO: 3810491 - DNA, 25 bp, Homo sapien
tgaaaacttgcatgccagttgccca

SEQ ID NO: 3810492 - DNA, 25 bp, Homo sapien
taaatgggcattccacactgaaaac

SEQ ID NO: 3810493 - DNA, 25 bp, Homo sapien
tgacacaaaattgatccctagtgcg

SEQ ID NO: 3810494 - DNA, 25 bp, Homo sapien
ccctagtgcgatattcagtggattt

SEQ ID NO: 3810495 - DNA, 25 bp, Homo sapien
caagaaagtagggttacatgcccca

SEQ ID NO: 3810496 - DNA, 25 bp, Homo sapien
tctgtccaagtgatgtcaaggatcc

SEQ ID NO: 3810497 - DNA, 25 bp, Homo sapien
tttgcccgggctgcaaagtagtgct

SEQ ID NO: 3810498 - DNA, 25 bp, Homo sapien
ctactgctacattttgggcttcggg

SEQ ID NO: 3810499 - DNA, 25 bp, Homo sapien
ggaattgtgaatgccgggactctgc

SEQ ID NO: 3810500 - DNA, 25 bp, Homo sapien
tcaaggttgcccagtgggaattgtg

SEQ ID NO: 3810501 - DNA, 25 bp, Homo sapien
tgcatttcacagttagtggatctgg

SEQ ID NO: 3810502 - DNA, 25 bp, Homo sapien
tgccgggactctgcatttcacagtt

SEQ ID NO: 3810503 - DNA, 25 bp, Homo sapien
gttcactaaacaagacttcagctgg

SEQ ID NO: 3810504 - DNA, 25 bp, Homo sapien
tcactaaacaagacttcagctggga

SEQ ID NO: 3810505 - DNA, 25 bp, Homo sapien
cactgtcaacatgcgataagaaatc

SEQ ID NO: 3810506 - DNA, 25 bp, Homo sapien
gtcaacatgcgataagaaatctaaa

SEQ ID NO: 3810507 - DNA, 25 bp, Homo sapien
ttttatggcattgctgtctggaagg

SEQ ID NO: 3810508 - DNA, 25 bp, Homo sapien
ttttttatggcattgctgtctggaa

SEQ ID NO: 3810509 - DNA, 25 bp, Homo sapien
gtgtcttattaatattgttcaccat

SEQ ID NO: 3810510 - DNA, 25 bp, Homo sapien
attaatattgttcaccatcatccag

SEQ ID NO: 3810511 - DNA, 25 bp, Homo sapien
cttgtgagtgcagtggtccatatta

SEQ ID NO: 3810512 - DNA, 25 bp, Homo sapien
ccattaatgtaaggagttgcagtct

SEQ ID NO: 3810513 - DNA, 25 bp, Homo sapien
tttttacactttcgttcagtgccaa

SEQ ID NO: 3810514 - DNA, 25 bp, Homo sapien
cactttcgttcagtgccaagattcc

SEQ ID NO: 3810515 - DNA, 25 bp, Homo sapien
caagcgaaagggatgaagggttgga

SEQ ID NO: 3810516 - DNA, 25 bp, Homo sapien
tcaagcgaaagggatgaagggttgg

SEQ ID NO: 3810517 - DNA, 25 bp, Homo sapien
tacatctctgagatagcccacaggt

SEQ ID NO: 3810518 - DNA, 25 bp, Homo sapien
tgtgcttccctgatgcaaacatgga

SEQ ID NO: 3810519 - DNA, 25 bp, Homo sapien
ggagagttatcagcacagacacgag

SEQ ID NO: 3810520 - DNA, 25 bp, Homo sapien
ggacagcctgcgtgatttaagatgg

SEQ ID NO: 3810521 - DNA, 25 bp, Homo sapien
gagcctttgaggagttctccgagtt

SEQ ID NO: 3810522 - DNA, 25 bp, Homo sapien
ggagcctttgaggagttctccgagt

SEQ ID NO: 3810523 - DNA, 25 bp, Homo sapien
cctttgaggagttctccgagttctt

SEQ ID NO: 3810524 - DNA, 25 bp, Homo sapien
cttggggagcctttgaggagttctc

SEQ ID NO: 3810525 - DNA, 25 bp, Homo sapien
cccaggctactcaaatgctgcagta

SEQ ID NO: 3810526 - DNA, 25 bp, Homo sapien
ctactcaaatgctgcagtagggcag

SEQ ID NO: 3810527 - DNA, 25 bp, Homo sapien
caccaggcggtcaggacgcagtgca

SEQ ID NO: 3810528 - DNA, 25 bp, Homo sapien
gaacaccaggcggtcaggacgcagt

SEQ ID NO: 3810529 - DNA, 25 bp, Homo sapien
cctgctaacaagttcatgaagtcct

SEQ ID NO: 3810530 - DNA, 25 bp, Homo sapien
tgacgcctggttatggttccttgaa

SEQ ID NO: 3810531 - DNA, 25 bp, Homo sapien
ccttgccgtggtgcctgtcacacat

SEQ ID NO: 3810532 - DNA, 25 bp, Homo sapien
tcatgaagtcctgtcactgacgcct

SEQ ID NO: 3810533 - DNA, 25 bp, Homo sapien
tactgaacagcaaacaccccattgg

SEQ ID NO: 3810534 - DNA, 25 bp, Homo sapien
gataggacacttggtccctcaagag

SEQ ID NO: 3810535 - DNA, 25 bp, Homo sapien
aaatgtgtatccctgtctctgaagc

SEQ ID NO: 3810536 - DNA, 25 bp, Homo sapien
gccatgccagggaagctagtgctct

SEQ ID NO: 3810537 - DNA, 25 bp, Homo sapien
gaagttctaaacacatggtcacccg

SEQ ID NO: 3810538 - DNA, 25 bp, Homo sapien
tacctgctcgtgcaactgacatgtg

SEQ ID NO: 3810539 - DNA, 25 bp, Homo sapien
gattcccaaggcatgtcactctctg

SEQ ID NO: 3810540 - DNA, 25 bp, Homo sapien
taagtgttccaatgctatcagggcc

SEQ ID NO: 3810541 - DNA, 25 bp, Homo sapien
tcatttggagataagtcaaaagact

SEQ ID NO: 3810542 - DNA, 25 bp, Homo sapien
ccaaataggttctattcttctaggg

SEQ ID NO: 3810543 - DNA, 25 bp, Homo sapien
ttgtgcatgatgtcctggggaaacg

SEQ ID NO: 3810544 - DNA, 25 bp, Homo sapien
catttgaagccccttttgtgcatga

SEQ ID NO: 3810545 - DNA, 25 bp, Homo sapien
ctttatcacaggagaattttcaggt

SEQ ID NO: 3810546 - DNA, 25 bp, Homo sapien
tcaagctttcccttaacgtggtcca

SEQ ID NO: 3810547 - DNA, 25 bp, Homo sapien
taacgtggtccacactcgaggatgc

SEQ ID NO: 3810548 - DNA, 25 bp, Homo sapien
gatgctggctgggtctttatcacag

SEQ ID NO: 3810549 - DNA, 25 bp, Homo sapien
gaccgagcatagtcactgaagcctc

SEQ ID NO: 3810550 - DNA, 25 bp, Homo sapien
aaagtgtaacatattcagccctgag

SEQ ID NO: 3810551 - DNA, 25 bp, Homo sapien
tcagcatttgcacatgaccgagcat

SEQ ID NO: 3810552 - DNA, 25 bp, Homo sapien
gctcttgccgtcacacatttctgag

SEQ ID NO: 3810553 - DNA, 25 bp, Homo sapien
tgccaggtcggtaataaaacataaa

SEQ ID NO: 3810554 - DNA, 25 bp, Homo sapien
gaccaaagcgggtctattagaagca

SEQ ID NO: 3810555 - DNA, 25 bp, Homo sapien
agcaagttttgccatgattgccgaa

SEQ ID NO: 3810556 - DNA, 25 bp, Homo sapien
gttttgccatgattgccgaaccctc

SEQ ID NO: 3810557 - DNA, 25 bp, Homo sapien
tgtgagcgctttcagaatagcaaat

SEQ ID NO: 3810558 - DNA, 25 bp, Homo sapien
tttcccctctatttgtgagcgcttt

SEQ ID NO: 3810559 - DNA, 25 bp, Homo sapien
gggggcacagaataaatgtccttat

SEQ ID NO: 3810560 - DNA, 25 bp, Homo sapien
cctctatttgtgagcgctttcagaa

SEQ ID NO: 3810561 - DNA, 25 bp, Homo sapien
gccaactgcctgaactctcttttca

SEQ ID NO: 3810562 - DNA, 25 bp, Homo sapien
ccaactgcctgaactctcttttcat

SEQ ID NO: 3810563 - DNA, 25 bp, Homo sapien
agccaactgcctgaactctcttttc

SEQ ID NO: 3810564 - DNA, 25 bp, Homo sapien
cacatttatattgaggatcatttac

SEQ ID NO: 3810565 - DNA, 25 bp, Homo sapien
attcagcacatttatattgaggatc

SEQ ID NO: 3810566 - DNA, 25 bp, Homo sapien
cagcacatttatattgaggatcatt

SEQ ID NO: 3810567 - DNA, 25 bp, Homo sapien
tcagcacatttatattgaggatcat

SEQ ID NO: 3810568 - DNA, 25 bp, Homo sapien
tctgaatggcatcccctgtctggaa

SEQ ID NO: 3810569 - DNA, 25 bp, Homo sapien
ccctgtctggaattcaaatttatcc

SEQ ID NO: 3810570 - DNA, 25 bp, Homo sapien
gcatcccctgtctggaattcaaatt

SEQ ID NO: 3810571 - DNA, 25 bp, Homo sapien
aatggcatcccctgtctggaattca

SEQ ID NO: 3810572 - DNA, 25 bp, Homo sapien
taaccgttcacctgaccaagaggaa

SEQ ID NO: 3810573 - DNA, 25 bp, Homo sapien
aggtgtgtgctggtaaccgttcacc

SEQ ID NO: 3810574 - DNA, 25 bp, Homo sapien
ctctgtcgagataatgggctggttt

SEQ ID NO: 3810575 - DNA, 25 bp, Homo sapien
gctggtaaccgttcacctgaccaag

SEQ ID NO: 3810576 - DNA, 25 bp, Homo sapien
tcttttgaaggattagtggaggaag

SEQ ID NO: 3810577 - DNA, 25 bp, Homo sapien
ctcttttgaaggattagtggaggaa

SEQ ID NO: 3810578 - DNA, 25 bp, Homo sapien
cttttgaaggattagtggaggaagt

SEQ ID NO: 3810579 - DNA, 25 bp, Homo sapien
catgtcagcggctctctaaggaggt

SEQ ID NO: 3810580 - DNA, 25 bp, Homo sapien
tgtgtgcatgtcagcggctctctaa

SEQ ID NO: 3810581 - DNA, 25 bp, Homo sapien
ttgcaaccttaatgagaagagaagg

SEQ ID NO: 3810582 - DNA, 25 bp, Homo sapien
aagccaaacgctgtgtgcatgtcag

SEQ ID NO: 3810583 - DNA, 25 bp, Homo sapien
tcaaggctgccgaatgacttgaaag

SEQ ID NO: 3810584 - DNA, 25 bp, Homo sapien
cgaatgacttgaaagtcctctgcaa

SEQ ID NO: 3810585 - DNA, 25 bp, Homo sapien
tgccgaatgacttgaaagtcctctg

SEQ ID NO: 3810586 - DNA, 25 bp, Homo sapien
ggctgccgaatgacttgaaagtcct

SEQ ID NO: 3810587 - DNA, 25 bp, Homo sapien
aaagaactaagcattgatgattttc

SEQ ID NO: 3810588 - DNA, 25 bp, Homo sapien
tactgacctcaggaaacattatctg

SEQ ID NO: 3810589 - DNA, 25 bp, Homo sapien
gtgtcccctcgagcctcctaatgtt

SEQ ID NO: 3810590 - DNA, 25 bp, Homo sapien
ttcttcatggtgtcccctcgagcct

SEQ ID NO: 3810591 - DNA, 25 bp, Homo sapien
ccaggtaacagccaatactgacctc

SEQ ID NO: 3810592 - DNA, 25 bp, Homo sapien
aagtgtatgcttcctttaacatgac

SEQ ID NO: 3810593 - DNA, 25 bp, Homo sapien
ctgatctggacattgactaagatcc

SEQ ID NO: 3810594 - DNA, 25 bp, Homo sapien
ttcctgttgtcctcaaagtgtatgc

SEQ ID NO: 3810595 - DNA, 25 bp, Homo sapien
ttgactaagatcctgtagtagtttc

SEQ ID NO: 3810596 - DNA, 25 bp, Homo sapien
ccaggttttcacacttccttatgca

SEQ ID NO: 3810597 - DNA, 25 bp, Homo sapien
cacttccttatgcatcgaatatttc

SEQ ID NO: 3810598 - DNA, 25 bp, Homo sapien
tgttttggagttgacactgtgctgt

SEQ ID NO: 3810599 - DNA, 25 bp, Homo sapien
cctgctgaggcttggtctggtgcat

SEQ ID NO: 3810600 - DNA, 25 bp, Homo sapien
ggtgcccaccataggcccacatctc

SEQ ID NO: 3810601 - DNA, 25 bp, Homo sapien
caccataggcccacatctctctcct

SEQ ID NO: 3810602 - DNA, 25 bp, Homo sapien
ccctcttctcacatacaggtgccca

SEQ ID NO: 3810603 - DNA, 25 bp, Homo sapien
tcctttcattctcaaagcccagcgt

SEQ ID NO: 3810604 - DNA, 25 bp, Homo sapien
tcctcattgtcttcggggaaaccgc

SEQ ID NO: 3810605 - DNA, 25 bp, Homo sapien
cctcattgtcttcggggaaaccgca

SEQ ID NO: 3810606 - DNA, 25 bp, Homo sapien
cctgtccggggagccttggcatctg

SEQ ID NO: 3810607 - DNA, 25 bp, Homo sapien
gtccggggagccttggcatctgatc

SEQ ID NO: 3810608 - DNA, 25 bp, Homo sapien
gggttatagaccctttctccattgc

SEQ ID NO: 3810609 - DNA, 25 bp, Homo sapien
tgcctgcctcccgtgtcaattcctt

SEQ ID NO: 3810610 - DNA, 25 bp, Homo sapien
cgattgcaaggaagggttatagacc

SEQ ID NO: 3810611 - DNA, 25 bp, Homo sapien
ccaaagacccccgattgcaaggaag

SEQ ID NO: 3810612 - DNA, 25 bp, Homo sapien
tttccttgttactgaatgctccttt

SEQ ID NO: 3810613 - DNA, 25 bp, Homo sapien
acaactggccttattatttgtagaa

SEQ ID NO: 3810614 - DNA, 25 bp, Homo sapien
gtaatttgggatgcatcttgtgatc

SEQ ID NO: 3810615 - DNA, 25 bp, Homo sapien
gtaacactcagtgaagcaacaactt

SEQ ID NO: 3810616 - DNA, 25 bp, Homo sapien
ttgtgatcacagaaaacaagttcct

SEQ ID NO: 3810617 - DNA, 25 bp, Homo sapien
atccccaagcttcgaatagaaatct

SEQ ID NO: 3810618 - DNA, 25 bp, Homo sapien
caaacaatcacagatccccaagctt

SEQ ID NO: 3810619 - DNA, 25 bp, Homo sapien
gatccccaagcttcgaatagaaatc

SEQ ID NO: 3810620 - DNA, 25 bp, Homo sapien
tggaattcgcgtcagaacaggctct

SEQ ID NO: 3810621 - DNA, 25 bp, Homo sapien
aaaatattggccgatcatgtaagga

SEQ ID NO: 3810622 - DNA, 25 bp, Homo sapien
ttgaatcgaatcaaactctgctgga

SEQ ID NO: 3810623 - DNA, 25 bp, Homo sapien
ggaggaataccctgaaaatattggc

SEQ ID NO: 3810624 - DNA, 25 bp, Homo sapien
caggaaccattgttcagaaatccac

SEQ ID NO: 3810625 - DNA, 25 bp, Homo sapien
tgtattttgcccaggaaccattgtt

SEQ ID NO: 3810626 - DNA, 25 bp, Homo sapien
gtattttgcccaggaaccattgttc

SEQ ID NO: 3810627 - DNA, 25 bp, Homo sapien
gcccaggaaccattgttcagaaatc

SEQ ID NO: 3810628 - DNA, 25 bp, Homo sapien
tctgtgtcccttcatcaaggttttc

SEQ ID NO: 3810629 - DNA, 25 bp, Homo sapien
aggttttcatcagctatagggttgg

SEQ ID NO: 3810630 - DNA, 25 bp, Homo sapien
ttcatcagctatagggttgggctgg

SEQ ID NO: 3810631 - DNA, 25 bp, Homo sapien
catctgtgtcccttcatcaaggttt

SEQ ID NO: 3810632 - DNA, 25 bp, Homo sapien
actgccacaggcgacttgtctgaaa

SEQ ID NO: 3810633 - DNA, 25 bp, Homo sapien
ctaacgagctgctaatattggagta

SEQ ID NO: 3810634 - DNA, 25 bp, Homo sapien
ctaatattggagtagcagccttgtc

SEQ ID NO: 3810635 - DNA, 25 bp, Homo sapien
caggcgacttgtctgaaacaaagct

SEQ ID NO: 3810636 - DNA, 25 bp, Homo sapien
gatcttgcaactccaaccacatcta

SEQ ID NO: 3810637 - DNA, 25 bp, Homo sapien
cagatcttgcaactccaaccacatc

SEQ ID NO: 3810638 - DNA, 25 bp, Homo sapien
cctccagatcttgcaactccaacca

SEQ ID NO: 3810639 - DNA, 25 bp, Homo sapien
tccagatcttgcaactccaaccaca

SEQ ID NO: 3810640 - DNA, 25 bp, Homo sapien
gagcctgctgttacttctatgacat

SEQ ID NO: 3810641 - DNA, 25 bp, Homo sapien
gatgcccactgtccctaagatgctg

SEQ ID NO: 3810642 - DNA, 25 bp, Homo sapien
gttactgccacaactgcgatgccca

SEQ ID NO: 3810643 - DNA, 25 bp, Homo sapien
ttcattacgccggaagagcctgctg

SEQ ID NO: 3810644 - DNA, 25 bp, Homo sapien
gcttctcccgcctttatgttgcagc

SEQ ID NO: 3810645 - DNA, 25 bp, Homo sapien
ctgatgctccctctgtagttttcca

SEQ ID NO: 3810646 - DNA, 25 bp, Homo sapien
cttctcccgcctttatgttgcagct

SEQ ID NO: 3810647 - DNA, 25 bp, Homo sapien
ggctgatgctccctctgtagttttc

SEQ ID NO: 3810648 - DNA, 25 bp, Homo sapien
ggttccctgatagttctcttctttc

SEQ ID NO: 3810649 - DNA, 25 bp, Homo sapien
tgtttctgatattatctctgttatc

SEQ ID NO: 3810650 - DNA, 25 bp, Homo sapien
aaatgtactatgaagcacatttgca

SEQ ID NO: 3810651 - DNA, 25 bp, Homo sapien
tgtgattttccatcaactgaatact

SEQ ID NO: 3810652 - DNA, 25 bp, Homo sapien
tgaggacaatcctgaagcccttcct

SEQ ID NO: 3810653 - DNA, 25 bp, Homo sapien
gacactttctaattgcccagaaggg

SEQ ID NO: 3810654 - DNA, 25 bp, Homo sapien
tgaaggcacgtctctcgctgcagag

SEQ ID NO: 3810655 - DNA, 25 bp, Homo sapien
ctgaagacaaggaggcgctgacatc

SEQ ID NO: 3810656 - DNA, 25 bp, Homo sapien
cactggagcttccagacaacctgga

SEQ ID NO: 3810657 - DNA, 25 bp, Homo sapien
gaaggggcgctgacttcattcccac

SEQ ID NO: 3810658 - DNA, 25 bp, Homo sapien
cacactggagcttccagacaacctg

SEQ ID NO: 3810659 - DNA, 25 bp, Homo sapien
gagcttccagacaacctggaagtgt

SEQ ID NO: 3810660 - DNA, 25 bp, Homo sapien
gattctttatgtcgtggagtgtctg

SEQ ID NO: 3810661 - DNA, 25 bp, Homo sapien
ctatcagtactatcttggattcttt

SEQ ID NO: 3810662 - DNA, 25 bp, Homo sapien
tcttggattctttatgtcgtggagt

SEQ ID NO: 3810663 - DNA, 25 bp, Homo sapien
tctttatgtcgtggagtgtctgcca

SEQ ID NO: 3810664 - DNA, 25 bp, Homo sapien
tggcagcatgagacccactctagat

SEQ ID NO: 3810665 - DNA, 25 bp, Homo sapien
ggcagcatgagacccactctagatg

SEQ ID NO: 3810666 - DNA, 25 bp, Homo sapien
gtggcagcatgagacccactctaga

SEQ ID NO: 3810667 - DNA, 25 bp, Homo sapien
agtggcagcatgagacccactctag

SEQ ID NO: 3810668 - DNA, 25 bp, Homo sapien
ccatgaagtacggaaatcagacgca

SEQ ID NO: 3810669 - DNA, 25 bp, Homo sapien
tgaagaagggatccatgaagtacgg

SEQ ID NO: 3810670 - DNA, 25 bp, Homo sapien
caggttgagaatcaaaccactcatg

SEQ ID NO: 3810671 - DNA, 25 bp, Homo sapien
ctgaggcagcgcttccactagcggg

SEQ ID NO: 3810672 - DNA, 25 bp, Homo sapien
tgccgtcttattgcagcagtgaaat

SEQ ID NO: 3810673 - DNA, 25 bp, Homo sapien
tcctgctcgaaagtgcaggctatgg

SEQ ID NO: 3810674 - DNA, 25 bp, Homo sapien
aattttatctctcctgctcgaaagt

SEQ ID NO: 3810675 - DNA, 25 bp, Homo sapien
ttagtttcgagcatattgtctgccg

SEQ ID NO: 3810676 - DNA, 25 bp, Homo sapien
ggcaaccagcttcagacagcacctc

SEQ ID NO: 3810677 - DNA, 25 bp, Homo sapien
gggcagagtggcgaggcggcagccc

SEQ ID NO: 3810678 - DNA, 25 bp, Homo sapien
gggtgggcagagtggcgaggcggca

SEQ ID NO: 3810679 - DNA, 25 bp, Homo sapien
gcagagtggcgaggcggcagccctg

SEQ ID NO: 3810680 - DNA, 25 bp, Homo sapien
gttctgacgatttccactggtagcc

SEQ ID NO: 3810681 - DNA, 25 bp, Homo sapien
gaggcccggcatccaaagacctcat

SEQ ID NO: 3810682 - DNA, 25 bp, Homo sapien
tatgccatatgccacaacagccatc

SEQ ID NO: 3810683 - DNA, 25 bp, Homo sapien
ttgagctagtctgatgaggacaggc

SEQ ID NO: 3810684 - DNA, 25 bp, Homo sapien
tctcttgaagaatttccgggcaagg

SEQ ID NO: 3810685 - DNA, 25 bp, Homo sapien
gacagcatagatttcgataacgaaa

SEQ ID NO: 3810686 - DNA, 25 bp, Homo sapien
cagtgaggcatcttgcaaagacagc

SEQ ID NO: 3810687 - DNA, 25 bp, Homo sapien
gatcaaattgtagccctaaacccca

SEQ ID NO: 3810688 - DNA, 25 bp, Homo sapien
gcatcttcatttccagtccagtgac

SEQ ID NO: 3810689 - DNA, 25 bp, Homo sapien
ttcatttccagtccagtgacttcct

SEQ ID NO: 3810690 - DNA, 25 bp, Homo sapien
ccagtccagtgacttcctgaaggca

SEQ ID NO: 3810691 - DNA, 25 bp, Homo sapien
tttccagtccagtgacttcctgaag

SEQ ID NO: 3810692 - DNA, 25 bp, Homo sapien
gtgggatgctgaaggctccctgacc

SEQ ID NO: 3810693 - DNA, 25 bp, Homo sapien
gctgaaggctccctgaccagaggga

SEQ ID NO: 3810694 - DNA, 25 bp, Homo sapien
tgaaggctccctgaccagagggagg

SEQ ID NO: 3810695 - DNA, 25 bp, Homo sapien
atgctgaaggctccctgaccagagg

SEQ ID NO: 3810696 - DNA, 25 bp, Homo sapien
gcagcgtggttggatactgaccaac

SEQ ID NO: 3810697 - DNA, 25 bp, Homo sapien
ggcacactatcccaccaaaagtaca

SEQ ID NO: 3810698 - DNA, 25 bp, Homo sapien
tctttttggagtaggaagggcacac

SEQ ID NO: 3810699 - DNA, 25 bp, Homo sapien
aggtaccacaaataggcagcgtggt

SEQ ID NO: 3810700 - DNA, 25 bp, Homo sapien
cactgtggggtatctcggttgctat

SEQ ID NO: 3810701 - DNA, 25 bp, Homo sapien
ctcggttgctatctgctattgctga

SEQ ID NO: 3810702 - DNA, 25 bp, Homo sapien
cttcgggttgaacgttagcatggtt

SEQ ID NO: 3810703 - DNA, 25 bp, Homo sapien
tgaacgttagcatggttttgaggtt

SEQ ID NO: 3810704 - DNA, 25 bp, Homo sapien
gacacagctgtgacggaaagcgagc

SEQ ID NO: 3810705 - DNA, 25 bp, Homo sapien
cctgagttcagtgggtagaacggct

SEQ ID NO: 3810706 - DNA, 25 bp, Homo sapien
agtggctgttagaggcaggtccagg

SEQ ID NO: 3810707 - DNA, 25 bp, Homo sapien
ggacaccaagactcgggcagatgca

SEQ ID NO: 3810708 - DNA, 25 bp, Homo sapien
cattttctacgtgttttctcttctc

SEQ ID NO: 3810709 - DNA, 25 bp, Homo sapien
ataaattccttgagtgcggtagaca

SEQ ID NO: 3810710 - DNA, 25 bp, Homo sapien
tatcctgtgataactggaataacgt

SEQ ID NO: 3810711 - DNA, 25 bp, Homo sapien
tgcggtagacatgtcacattcatca

SEQ ID NO: 3810712 - DNA, 25 bp, Homo sapien
caaacagttcgagctgatggttccc

SEQ ID NO: 3810713 - DNA, 25 bp, Homo sapien
taataaattaacaagctagcacggg

SEQ ID NO: 3810714 - DNA, 25 bp, Homo sapien
caggtaacaacgcacacagaggtaa

SEQ ID NO: 3810715 - DNA, 25 bp, Homo sapien
ccctatttgtctgtggcgagttcca

SEQ ID NO: 3810716 - DNA, 25 bp, Homo sapien
tttggagaactgatgtggtatcagc

SEQ ID NO: 3810717 - DNA, 25 bp, Homo sapien
gagaactgatgtggtatcagctggc

SEQ ID NO: 3810718 - DNA, 25 bp, Homo sapien
ggtatcagctggctcgactacagcc

SEQ ID NO: 3810719 - DNA, 25 bp, Homo sapien
gactacagcctctactggaggccca

SEQ ID NO: 3810720 - DNA, 25 bp, Homo sapien
caagattgagcagttgggcaaccaa

SEQ ID NO: 3810721 - DNA, 25 bp, Homo sapien
ccaaagtggtggaatgacccaagta

SEQ ID NO: 3810722 - DNA, 25 bp, Homo sapien
aacagacgtttagggatgagcggcc

SEQ ID NO: 3810723 - DNA, 25 bp, Homo sapien
tagaaaattgggactcagtgggtcc

SEQ ID NO: 3810724 - DNA, 25 bp, Homo sapien
tcttccacggcatagctctgaatct

SEQ ID NO: 3810725 - DNA, 25 bp, Homo sapien
ccagatcctctttgatgggtgagat

SEQ ID NO: 3810726 - DNA, 25 bp, Homo sapien
atcctctttgatgggtgagatgagc

SEQ ID NO: 3810727 - DNA, 25 bp, Homo sapien
tctgacaaggtcttccacggcatag

SEQ ID NO: 3810728 - DNA, 25 bp, Homo sapien
ggagaagaagacttaagccacacgc

SEQ ID NO: 3810729 - DNA, 25 bp, Homo sapien
cagcccatctcggtgtcaggacgag

SEQ ID NO: 3810730 - DNA, 25 bp, Homo sapien
ggttacaggaaccatgacttccaag

SEQ ID NO: 3810731 - DNA, 25 bp, Homo sapien
gcttctgggttcagccttagtgcca

SEQ ID NO: 3810732 - DNA, 25 bp, Homo sapien
taacatcaagcgagggaacacagga

SEQ ID NO: 3810733 - DNA, 25 bp, Homo sapien
tgagctatgtcaggccccaaagaca

SEQ ID NO: 3810734 - DNA, 25 bp, Homo sapien
ttgatttgagggtcagagcaacctg

SEQ ID NO: 3810735 - DNA, 25 bp, Homo sapien
gagcaacctgaacttctgaccctga

SEQ ID NO: 3810736 - DNA, 25 bp, Homo sapien
cagtggctgagctatcacgtaggcc

SEQ ID NO: 3810737 - DNA, 25 bp, Homo sapien
gctacagtggtacctgccagcagaa

SEQ ID NO: 3810738 - DNA, 25 bp, Homo sapien
cacaagggcacttttgctggagcag

SEQ ID NO: 3810739 - DNA, 25 bp, Homo sapien
tggaaatgcatctaaaggaaggccc

SEQ ID NO: 3810740 - DNA, 25 bp, Homo sapien
tacaagtaactgaggagaggtctgg

SEQ ID NO: 3810741 - DNA, 25 bp, Homo sapien
gttacaagtaactgaggagaggtct

SEQ ID NO: 3810742 - DNA, 25 bp, Homo sapien
acaagtaactgaggagaggtctggt

SEQ ID NO: 3810743 - DNA, 25 bp, Homo sapien
agtaactgaggagaggtctggtgtg

SEQ ID NO: 3810744 - DNA, 25 bp, Homo sapien
gcagggagctgatgtacttgttcac

SEQ ID NO: 3810745 - DNA, 25 bp, Homo sapien
agctgctggagtagggactcccgcc

SEQ ID NO: 3810746 - DNA, 25 bp, Homo sapien
tctctctggaccctgtccatccgga

SEQ ID NO: 3810747 - DNA, 25 bp, Homo sapien
catccggatcctgcatcagatgcca

SEQ ID NO: 3810748 - DNA, 25 bp, Homo sapien
tgctggagtagggactcccgccagc

SEQ ID NO: 3810749 - DNA, 25 bp, Homo sapien
tggaggtaaaataagccctggatgg

SEQ ID NO: 3810750 - DNA, 25 bp, Homo sapien
ccctggatggaacctattgctgcca

SEQ ID NO: 3810751 - DNA, 25 bp, Homo sapien
cactaggagctcattgtggatggat

SEQ ID NO: 3810752 - DNA, 25 bp, Homo sapien
tccataatgaactctgggcaggtgg

SEQ ID NO: 3810753 - DNA, 25 bp, Homo sapien
tgatttgaaccatgttttggtcctg

SEQ ID NO: 3810754 - DNA, 25 bp, Homo sapien
caccagagtcggattgcctttgtcc

SEQ ID NO: 3810755 - DNA, 25 bp, Homo sapien
accccaccagagtcggattgccttt

SEQ ID NO: 3810756 - DNA, 25 bp, Homo sapien
gtgatttgaaccatgttttggtcct

SEQ ID NO: 3810757 - DNA, 25 bp, Homo sapien
gctgcctgtaaagtcaaatctagat

SEQ ID NO: 3810758 - DNA, 25 bp, Homo sapien
tgcctgtaaagtcaaatctagattc

SEQ ID NO: 3810759 - DNA, 25 bp, Homo sapien
cgctgcctgtaaagtcaaatctaga

SEQ ID NO: 3810760 - DNA, 25 bp, Homo sapien
cctgtaaagtcaaatctagattcac

SEQ ID NO: 3810761 - DNA, 25 bp, Homo sapien
ggcagcccacctttgtgcatataaa

SEQ ID NO: 3810762 - DNA, 25 bp, Homo sapien
tacacgagtaaattggagtttttgc

SEQ ID NO: 3810763 - DNA, 25 bp, Homo sapien
cacgagtaaattggagtttttgcac

SEQ ID NO: 3810764 - DNA, 25 bp, Homo sapien
tataaattgggtaattacacgagta

SEQ ID NO: 3810765 - DNA, 25 bp, Homo sapien
gctggctgacacacaaataataatg

SEQ ID NO: 3810766 - DNA, 25 bp, Homo sapien
tgtcgcagctgcaccaagtcaaagc

SEQ ID NO: 3810767 - DNA, 25 bp, Homo sapien
taataatgcatgcaatttgtcgcag

SEQ ID NO: 3810768 - DNA, 25 bp, Homo sapien
ccccgtgtgagatgggcattcgctg

SEQ ID NO: 3810769 - DNA, 25 bp, Homo sapien
ggccttcactgcctcatgtttcaga

SEQ ID NO: 3810770 - DNA, 25 bp, Homo sapien
ttggctgtccttggcggccttcact

SEQ ID NO: 3810771 - DNA, 25 bp, Homo sapien
ctgcctcatgtttcagagaagagtc

SEQ ID NO: 3810772 - DNA, 25 bp, Homo sapien
gagaagagtctgaagcagaagtcca

SEQ ID NO: 3810773 - DNA, 25 bp, Homo sapien
aagagagatattggatcattccaga

SEQ ID NO: 3810774 - DNA, 25 bp, Homo sapien
ctgtgccttggcaaaggtaaattca

SEQ ID NO: 3810775 - DNA, 25 bp, Homo sapien
ggagagaagtttcactgtctcctgt

SEQ ID NO: 3810776 - DNA, 25 bp, Homo sapien
tgctggcaacctgaagttggagaga

SEQ ID NO: 3810777 - DNA, 25 bp, Homo sapien
ctacaaaggagtgttccacatcatt

SEQ ID NO: 3810778 - DNA, 25 bp, Homo sapien
atattcagtaggcaggaattagaat

SEQ ID NO: 3810779 - DNA, 25 bp, Homo sapien
tattcagtaggcaggaattagaatt

SEQ ID NO: 3810780 - DNA, 25 bp, Homo sapien
aatcataagcgaagatgagtaaatc

SEQ ID NO: 3810781 - DNA, 25 bp, Homo sapien
ctgggcaacccaatccaggttttgg

SEQ ID NO: 3810782 - DNA, 25 bp, Homo sapien
accagaatcataagcgaagatgagt

SEQ ID NO: 3810783 - DNA, 25 bp, Homo sapien
agaatcataagcgaagatgagtaaa

SEQ ID NO: 3810784 - DNA, 25 bp, Homo sapien
aatgttgtcaacagtcttttgacgg

SEQ ID NO: 3810785 - DNA, 25 bp, Homo sapien
caaatacttgactggtttggttgca

SEQ ID NO: 3810786 - DNA, 25 bp, Homo sapien
ctggtgcaggtaagaatgaaatgtt

SEQ ID NO: 3810787 - DNA, 25 bp, Homo sapien
cttttgacggaattgacagaaggca

SEQ ID NO: 3810788 - DNA, 25 bp, Homo sapien
tctgatgagtatttctcattgttcc

SEQ ID NO: 3810789 - DNA, 25 bp, Homo sapien
tccccccagcattgaggcccctctt

SEQ ID NO: 3810790 - DNA, 25 bp, Homo sapien
ccccagcattgaggcccctcttccc

SEQ ID NO: 3810791 - DNA, 25 bp, Homo sapien
ctgatgagtatttctcattgttcca

SEQ ID NO: 3810792 - DNA, 25 bp, Homo sapien
tttccccatctaagttcctcgccat

SEQ ID NO: 3810793 - DNA, 25 bp, Homo sapien
ccggcttgtcgctagtatccaggaa

SEQ ID NO: 3810794 - DNA, 25 bp, Homo sapien
tccactgttgctgggcgctggtaag

SEQ ID NO: 3810795 - DNA, 25 bp, Homo sapien
cattttaactcaatgtaaaaggcag

SEQ ID NO: 3810796 - DNA, 25 bp, Homo sapien
gattgtcgctgaatttttgaagcag

SEQ ID NO: 3810797 - DNA, 25 bp, Homo sapien
cttttgacatcagatctgggttgtg

SEQ ID NO: 3810798 - DNA, 25 bp, Homo sapien
gacatcagatctgggttgtggacct

SEQ ID NO: 3810799 - DNA, 25 bp, Homo sapien
ccatatcggcaaaatgttttgcaaa

SEQ ID NO: 3810800 - DNA, 25 bp, Homo sapien
actcctgctggtttccatatcggca

SEQ ID NO: 3810801 - DNA, 25 bp, Homo sapien
tattcattctccgtcccgcaatctg

SEQ ID NO: 3810802 - DNA, 25 bp, Homo sapien
cagcagttattcattctccgtcccg

SEQ ID NO: 3810803 - DNA, 25 bp, Homo sapien
cgtcccgcaatctgccttggtggaa

SEQ ID NO: 3810804 - DNA, 25 bp, Homo sapien
gagaacagcagttattcattctccg

SEQ ID NO: 3810805 - DNA, 25 bp, Homo sapien
ctaaataacggagcttttcactcca

SEQ ID NO: 3810806 - DNA, 25 bp, Homo sapien
taaataacggagcttttcactccat

SEQ ID NO: 3810807 - DNA, 25 bp, Homo sapien
ataacggagcttttcactccatgtc

SEQ ID NO: 3810808 - DNA, 25 bp, Homo sapien
aaataacggagcttttcactccatg

SEQ ID NO: 3810809 - DNA, 25 bp, Homo sapien
tgtcatgtctctgctacgagaaggt

SEQ ID NO: 3810810 - DNA, 25 bp, Homo sapien
ctagtgtcatgtctctgctacgaga

SEQ ID NO: 3810811 - DNA, 25 bp, Homo sapien
tgtctctgctacgagaaggtaggtt

SEQ ID NO: 3810812 - DNA, 25 bp, Homo sapien
aaggtaggtttgtagccatgacctc

SEQ ID NO: 3810813 - DNA, 25 bp, Homo sapien
gatactcaccccaaagtgagcattg

SEQ ID NO: 3810814 - DNA, 25 bp, Homo sapien
tggccatctgtaacggatactcacc

SEQ ID NO: 3810815 - DNA, 25 bp, Homo sapien
ctgatgatgatgaaaaggcatggcc

SEQ ID NO: 3810816 - DNA, 25 bp, Homo sapien
cctgagaagggccactttatcgcta

SEQ ID NO: 3810817 - DNA, 25 bp, Homo sapien
ctctcttctgaatatgggccaacaa

SEQ ID NO: 3810818 - DNA, 25 bp, Homo sapien
cacctgcattcccacatcgtgctgg

SEQ ID NO: 3810819 - DNA, 25 bp, Homo sapien
ccacatcgtgctggctctcctggtg

SEQ ID NO: 3810820 - DNA, 25 bp, Homo sapien
aatatgggccaacaagcatcttgaa

SEQ ID NO: 3810821 - DNA, 25 bp, Homo sapien
ccgagggccacattaggaaaatttg

SEQ ID NO: 3810822 - DNA, 25 bp, Homo sapien
gacagaatcatctctaccgagggcc

SEQ ID NO: 3810823 - DNA, 25 bp, Homo sapien
tgaggagaatgtgaccgtcccatgg

SEQ ID NO: 3810824 - DNA, 25 bp, Homo sapien
tggcatcatctgtcaggcctcttag

SEQ ID NO: 3810825 - DNA, 25 bp, Homo sapien
tgactgcgtctctggcattctacac

SEQ ID NO: 3810826 - DNA, 25 bp, Homo sapien
aattttttcatccaccttgtagtca

SEQ ID NO: 3810827 - DNA, 25 bp, Homo sapien
cttctctctccatttgactgcgtct

SEQ ID NO: 3810828 - DNA, 25 bp, Homo sapien
catccaccttgtagtcatttattga

SEQ ID NO: 3810829 - DNA, 25 bp, Homo sapien
gacagatggcattcctcgaaggatt

SEQ ID NO: 3810830 - DNA, 25 bp, Homo sapien
accagagcatgactcggctgttcag

SEQ ID NO: 3810831 - DNA, 25 bp, Homo sapien
gactcggctgttcaggtctacctgt

SEQ ID NO: 3810832 - DNA, 25 bp, Homo sapien
ggtgtttctaccactgtgagacaga

SEQ ID NO: 3810833 - DNA, 25 bp, Homo sapien
ctctctttcctgtctttctgtatca

SEQ ID NO: 3810834 - DNA, 25 bp, Homo sapien
tctctttcctgtctttctgtatcac

SEQ ID NO: 3810835 - DNA, 25 bp, Homo sapien
tctctctttcctgtctttctgtatc

SEQ ID NO: 3810836 - DNA, 25 bp, Homo sapien
cttctctctttcctgtctttctgta

SEQ ID NO: 3810837 - DNA, 25 bp, Homo sapien
ttttttgtatttgccctccttgata

SEQ ID NO: 3810838 - DNA, 25 bp, Homo sapien
tctttatggttgaaggtgtcaggat

SEQ ID NO: 3810839 - DNA, 25 bp, Homo sapien
gaaaaagagaaactgcgtctttatg

SEQ ID NO: 3810840 - DNA, 25 bp, Homo sapien
tgtatttgccctccttgataccaaa

SEQ ID NO: 3810841 - DNA, 25 bp, Homo sapien
ccaacctggcgtgtttgtgaagtgc

SEQ ID NO: 3810842 - DNA, 25 bp, Homo sapien
ctcgcagccctcttcgtcgtggggt

SEQ ID NO: 3810843 - DNA, 25 bp, Homo sapien
aggccacgtcttatctgacccctcg

SEQ ID NO: 3810844 - DNA, 25 bp, Homo sapien
ctgtttgctaaaccatcaggccacg

SEQ ID NO: 3810845 - DNA, 25 bp, Homo sapien
ctgtgtgcagccatggtacattgac

SEQ ID NO: 3810846 - DNA, 25 bp, Homo sapien
gccatggtacattgactgtcaattg

SEQ ID NO: 3810847 - DNA, 25 bp, Homo sapien
ggtacattgactgtcaattgcaacc

SEQ ID NO: 3810848 - DNA, 25 bp, Homo sapien
tgtgcagccatggtacattgactgt

SEQ ID NO: 3810849 - DNA, 25 bp, Homo sapien
atagaatatggtccacttttgcttg

SEQ ID NO: 3810850 - DNA, 25 bp, Homo sapien
tatagaatatggtccacttttgctt

SEQ ID NO: 3810851 - DNA, 25 bp, Homo sapien
tgcgttgtggactggcaccccagtg

SEQ ID NO: 3810852 - DNA, 25 bp, Homo sapien
tgatgaggaagcctacaggtgcgtt

SEQ ID NO: 3810853 - DNA, 25 bp, Homo sapien
aaaatataaccttaatgcacagagg

SEQ ID NO: 3810854 - DNA, 25 bp, Homo sapien
ctccacctttgcctgatgaggaagc

SEQ ID NO: 3810855 - DNA, 25 bp, Homo sapien
agccaaggcacctcatgaagctgcg

SEQ ID NO: 3810856 - DNA, 25 bp, Homo sapien
tggtgtgattacctgggcagagcca

SEQ ID NO: 3810857 - DNA, 25 bp, Homo sapien
ccagttaatttttaggaggatgcta

SEQ ID NO: 3810858 - DNA, 25 bp, Homo sapien
aaggatgatataccacctgagtggc

SEQ ID NO: 3810859 - DNA, 25 bp, Homo sapien
acttcaaaagaagttagaacctgct

SEQ ID NO: 3810860 - DNA, 25 bp, Homo sapien
tcctgtaaatgcctggacctttcct

SEQ ID NO: 3810861 - DNA, 25 bp, Homo sapien
gtatcgcctccttgccccttggcct

SEQ ID NO: 3810862 - DNA, 25 bp, Homo sapien
ctggacctttcctgaacttcaaaag

SEQ ID NO: 3810863 - DNA, 25 bp, Homo sapien
tccatgccaagaaaacagatggtct

SEQ ID NO: 3810864 - DNA, 25 bp, Homo sapien
tcaaggataactactccatgccaag

SEQ ID NO: 3810865 - DNA, 25 bp, Homo sapien
gagaactcaaggataactactccat

SEQ ID NO: 3810866 - DNA, 25 bp, Homo sapien
actccatgccaagaaaacagatggt

SEQ ID NO: 3810867 - DNA, 25 bp, Homo sapien
tttgcagattcggtccttagtgtga

SEQ ID NO: 3810868 - DNA, 25 bp, Homo sapien
acgtgaaagccacaggacctagcaa

SEQ ID NO: 3810869 - DNA, 25 bp, Homo sapien
gacatatagagtgcacagggaaaca

SEQ ID NO: 3810870 - DNA, 25 bp, Homo sapien
gaagttgttcctaggccatagtcac

SEQ ID NO: 3810871 - DNA, 25 bp, Homo sapien
gatgaacagcccaagttgagctcaa

SEQ ID NO: 3810872 - DNA, 25 bp, Homo sapien
aaagctctacgacccccatagggag

SEQ ID NO: 3810873 - DNA, 25 bp, Homo sapien
cagcccaagttgagctcaatctgca

SEQ ID NO: 3810874 - DNA, 25 bp, Homo sapien
ggagagcaggtgggtagccctgctg

SEQ ID NO: 3810875 - DNA, 25 bp, Homo sapien
catgctcctttggttttctctcgac

SEQ ID NO: 3810876 - DNA, 25 bp, Homo sapien
gacccaaacaccagagttctctgat

SEQ ID NO: 3810877 - DNA, 25 bp, Homo sapien
tcaagcagtacactctgcattctcc

SEQ ID NO: 3810878 - DNA, 25 bp, Homo sapien
tgtgaaacatcacccttgcactgac

SEQ ID NO: 3810879 - DNA, 25 bp, Homo sapien
tggccacttgacaatccctctgaaa

SEQ ID NO: 3810880 - DNA, 25 bp, Homo sapien
tagcagagtacagcgccaatatgaa

SEQ ID NO: 3810881 - DNA, 25 bp, Homo sapien
tgaagatgtccgaaagccacgggac

SEQ ID NO: 3810882 - DNA, 25 bp, Homo sapien
ttctcaggctcggacatcaggtcgc

SEQ ID NO: 3810883 - DNA, 25 bp, Homo sapien
tccaaagcccagttggctaaggtgg

SEQ ID NO: 3810884 - DNA, 25 bp, Homo sapien
ttccaaagcccagttggctaaggtg

SEQ ID NO: 3810885 - DNA, 25 bp, Homo sapien
caaagcccagttggctaaggtgggg

SEQ ID NO: 3810886 - DNA, 25 bp, Homo sapien
attttccctcgctgtaaacatcggt

SEQ ID NO: 3810887 - DNA, 25 bp, Homo sapien
cgctgtaaacatcggtgtattcatt

SEQ ID NO: 3810888 - DNA, 25 bp, Homo sapien
ccctcgctgtaaacatcggtgtatt

SEQ ID NO: 3810889 - DNA, 25 bp, Homo sapien
aaaagctggcttgcattttccctcg

SEQ ID NO: 3810890 - DNA, 25 bp, Homo sapien
tttttaaggagggcggctgttgcca

SEQ ID NO: 3810891 - DNA, 25 bp, Homo sapien
ttttgttgagaattccgccctgcat

SEQ ID NO: 3810892 - DNA, 25 bp, Homo sapien
ggagggcggctgttgccagggcaac

SEQ ID NO: 3810893 - DNA, 25 bp, Homo sapien
gagggcggctgttgccagggcaacc

SEQ ID NO: 3810894 - DNA, 25 bp, Homo sapien
aaactcctgtattaactcgagtcat

SEQ ID NO: 3810895 - DNA, 25 bp, Homo sapien
agaggttctttttccatgattcctg

SEQ ID NO: 3810896 - DNA, 25 bp, Homo sapien
aaaactcctgtattaactcgagtca

SEQ ID NO: 3810897 - DNA, 25 bp, Homo sapien
caatggttacagaatcgtcccacag

SEQ ID NO: 3810898 - DNA, 25 bp, Homo sapien
tcacaaatgagtccttgcctttccc

SEQ ID NO: 3810899 - DNA, 25 bp, Homo sapien
gcctttcccattcgaatttcattaa

SEQ ID NO: 3810900 - DNA, 25 bp, Homo sapien
ccttcaagatcaatggttacagaat

SEQ ID NO: 3810901 - DNA, 25 bp, Homo sapien
gacatttacatgtacacctgcacca

SEQ ID NO: 3810902 - DNA, 25 bp, Homo sapien
gaagttgcagccaggccgacattta

SEQ ID NO: 3810903 - DNA, 25 bp, Homo sapien
tctgggtgtcgagcatgcatgttca

SEQ ID NO: 3810904 - DNA, 25 bp, Homo sapien
gacatggtgacttcctaagggactc

SEQ ID NO: 3810905 - DNA, 25 bp, Homo sapien
cgtgtcttccattttgcgagggaga

SEQ ID NO: 3810906 - DNA, 25 bp, Homo sapien
acagctgctcccggcgtgtttgtgt

SEQ ID NO: 3810907 - DNA, 25 bp, Homo sapien
tccattttgcgagggagacactggc

SEQ ID NO: 3810908 - DNA, 25 bp, Homo sapien
gctgctcccggcgtgtttgtgtgta

SEQ ID NO: 3810909 - DNA, 25 bp, Homo sapien
tgccacaaatgcagcttgcgtcccg

SEQ ID NO: 3810910 - DNA, 25 bp, Homo sapien
gcagccgtgtgtcacagatggagat

SEQ ID NO: 3810911 - DNA, 25 bp, Homo sapien
agcttgcgtcccgaagatgcagccg

SEQ ID NO: 3810912 - DNA, 25 bp, Homo sapien
cgtcccgaagatgcagccgtgtgtc

SEQ ID NO: 3810913 - DNA, 25 bp, Homo sapien
tgcttggccccaaagtccaagtttc

SEQ ID NO: 3810914 - DNA, 25 bp, Homo sapien
agtggaaagtagcttatctttgtct

SEQ ID NO: 3810915 - DNA, 25 bp, Homo sapien
tctttgtctatttcaaagttggtgc

SEQ ID NO: 3810916 - DNA, 25 bp, Homo sapien
caaagttggtgctaattgtaattgt

SEQ ID NO: 3810917 - DNA, 25 bp, Homo sapien
tagtgggttgctacctgatgaagct

SEQ ID NO: 3810918 - DNA, 25 bp, Homo sapien
actgattagtgggttgctacctgat

SEQ ID NO: 3810919 - DNA, 25 bp, Homo sapien
cccacacatcactgattagtgggtt

SEQ ID NO: 3810920 - DNA, 25 bp, Homo sapien
cacatcactgattagtgggttgcta

SEQ ID NO: 3810921 - DNA, 25 bp, Homo sapien
accccgaaagataatcccagttgtg

SEQ ID NO: 3810922 - DNA, 25 bp, Homo sapien
taatcccagttgtgaggaagtgggc

SEQ ID NO: 3810923 - DNA, 25 bp, Homo sapien
ggtgaagctcttcattgcattgcca

SEQ ID NO: 3810924 - DNA, 25 bp, Homo sapien
gatggctcctctcttgacatcccag

SEQ ID NO: 3810925 - DNA, 25 bp, Homo sapien
tttcagggctttgctaacactgccc

SEQ ID NO: 3810926 - DNA, 25 bp, Homo sapien
cttcaacaaccagggcaatttccac

SEQ ID NO: 3810927 - DNA, 25 bp, Homo sapien
cttgtgtgaggcctttcagggcttt

SEQ ID NO: 3810928 - DNA, 25 bp, Homo sapien
tgtctctccttcaacaaccagggca

SEQ ID NO: 3810929 - DNA, 25 bp, Homo sapien
cacatcgggcatccctaggctcagt

SEQ ID NO: 3810930 - DNA, 25 bp, Homo sapien
tgacatcaagacttttgccaggcct

SEQ ID NO: 3810931 - DNA, 25 bp, Homo sapien
tgccaggcctttccacaacaatact

SEQ ID NO: 3810932 - DNA, 25 bp, Homo sapien
ccacaacaatacttcacctggagaa

SEQ ID NO: 3810933 - DNA, 25 bp, Homo sapien
tcctccaccggaagcagggacgatg

SEQ ID NO: 3810934 - DNA, 25 bp, Homo sapien
ccttcaaaatggacactcagagacc

SEQ ID NO: 3810935 - DNA, 25 bp, Homo sapien
tgtgctggctggaatcaagtgccca

SEQ ID NO: 3810936 - DNA, 25 bp, Homo sapien
cgggccttctaagagcggagctgct

SEQ ID NO: 3810937 - DNA, 25 bp, Homo sapien
ccgtggcttcttgggtggcagatgg

SEQ ID NO: 3810938 - DNA, 25 bp, Homo sapien
ggggctgagcgtcttcaacataaaa

SEQ ID NO: 3810939 - DNA, 25 bp, Homo sapien
tgggggctgagcgtcttcaacataa

SEQ ID NO: 3810940 - DNA, 25 bp, Homo sapien
gcagtggaggccgtggcttcttggg

SEQ ID NO: 3810941 - DNA, 25 bp, Homo sapien
taaaaatcctggtagcagtggggct

SEQ ID NO: 3810942 - DNA, 25 bp, Homo sapien
aaatggaatgtaatgtgtgtctcta

SEQ ID NO: 3810943 - DNA, 25 bp, Homo sapien
tggaatgtaatgtgtgtctctaaaa

SEQ ID NO: 3810944 - DNA, 25 bp, Homo sapien
aatgtaatgtgtgtctctaaaaatc

SEQ ID NO: 3810945 - DNA, 25 bp, Homo sapien
agaactacttaggagcgcggcatcg

SEQ ID NO: 3810946 - DNA, 25 bp, Homo sapien
gaaagagccactgtcatccaaggtc

SEQ ID NO: 3810947 - DNA, 25 bp, Homo sapien
taatactgacgcgagagtgagcttc

SEQ ID NO: 3810948 - DNA, 25 bp, Homo sapien
catcgggattcacaggcactttagc

SEQ ID NO: 3810949 - DNA, 25 bp, Homo sapien
tgtgaagtaccagaaagccccaatt

SEQ ID NO: 3810950 - DNA, 25 bp, Homo sapien
caagccgcggacaactcatgagtag

SEQ ID NO: 3810951 - DNA, 25 bp, Homo sapien
gagaggcgcagagcatatgaacacc

SEQ ID NO: 3810952 - DNA, 25 bp, Homo sapien
tgtaataggatgaccgactctcccg

SEQ ID NO: 3810953 - DNA, 25 bp, Homo sapien
aaatgtcttttattgcgcgacatga

SEQ ID NO: 3810954 - DNA, 25 bp, Homo sapien
cttttattgcgcgacatgaagcatc

SEQ ID NO: 3810955 - DNA, 25 bp, Homo sapien
gcgcgacatgaagcatccgttattt

SEQ ID NO: 3810956 - DNA, 25 bp, Homo sapien
catgaagcatccgttatttgcgtgc

SEQ ID NO: 3810957 - DNA, 25 bp, Homo sapien
gggcctccctttctcaggagtctga

SEQ ID NO: 3810958 - DNA, 25 bp, Homo sapien
ggcctccctttctcaggagtctgaa

SEQ ID NO: 3810959 - DNA, 25 bp, Homo sapien
gcctccctttctcaggagtctgaag

SEQ ID NO: 3810960 - DNA, 25 bp, Homo sapien
aagggcctccctttctcaggagtct

SEQ ID NO: 3810961 - DNA, 25 bp, Homo sapien
tttcttatacgagtcatagttgctg

SEQ ID NO: 3810962 - DNA, 25 bp, Homo sapien
cagcatgaccctggcgttgaagcca

SEQ ID NO: 3810963 - DNA, 25 bp, Homo sapien
cctggagccttggtagctggagtac

SEQ ID NO: 3810964 - DNA, 25 bp, Homo sapien
tcctgggagaccgagctggcatttt

SEQ ID NO: 3810965 - DNA, 25 bp, Homo sapien
aggatgggatggaatatgcattttc

SEQ ID NO: 3810966 - DNA, 25 bp, Homo sapien
gatgggatggaatatgcattttcac

SEQ ID NO: 3810967 - DNA, 25 bp, Homo sapien
gggatggaatatgcattttcacttt

SEQ ID NO: 3810968 - DNA, 25 bp, Homo sapien
caaaggttagtgtgagggtaggaag

SEQ ID NO: 3810969 - DNA, 25 bp, Homo sapien
gatacctgctcatccagattggacg

SEQ ID NO: 3810970 - DNA, 25 bp, Homo sapien
cctgctcatccagattggacggaga

SEQ ID NO: 3810971 - DNA, 25 bp, Homo sapien
catccagattggacggagagtccgg

SEQ ID NO: 3810972 - DNA, 25 bp, Homo sapien
tctccgggatacctgctcatccaga

SEQ ID NO: 3810973 - DNA, 25 bp, Homo sapien
tctcttttaacggaagactgcacca

SEQ ID NO: 3810974 - DNA, 25 bp, Homo sapien
atgtctgtctcttttaacggaagac

SEQ ID NO: 3810975 - DNA, 25 bp, Homo sapien
ctctggctatgacgatgactggatg

SEQ ID NO: 3810976 - DNA, 25 bp, Homo sapien
tgagcattccatagcatgtctgtct

SEQ ID NO: 3810977 - DNA, 25 bp, Homo sapien
gcaggagagccaatactaagaagcc

SEQ ID NO: 3810978 - DNA, 25 bp, Homo sapien
gccagtacacgagtcgcttcacttt

SEQ ID NO: 3810979 - DNA, 25 bp, Homo sapien
aatactggcatctcctgcaatgggc

SEQ ID NO: 3810980 - DNA, 25 bp, Homo sapien
gatactgtcttgtccacacaggaag

SEQ ID NO: 3810981 - DNA, 25 bp, Homo sapien
ctaaggaacagtagccacgggacat

SEQ ID NO: 3810982 - DNA, 25 bp, Homo sapien
cacgggacatttattggttcctctg

SEQ ID NO: 3810983 - DNA, 25 bp, Homo sapien
tctgttgctaccaggggcaagctgg

SEQ ID NO: 3810984 - DNA, 25 bp, Homo sapien
cctctgttgctaccaggggcaagct

SEQ ID NO: 3810985 - DNA, 25 bp, Homo sapien
ctgctgggagctctcgcgctcctcc

SEQ ID NO: 3810986 - DNA, 25 bp, Homo sapien
cagagagctgtactggcgctgggcc

SEQ ID NO: 3810987 - DNA, 25 bp, Homo sapien
agtgtcgcccgctctgcgtcgccgg

SEQ ID NO: 3810988 - DNA, 25 bp, Homo sapien
cctccacggacaccgagtgtcgccc

SEQ ID NO: 3810989 - DNA, 25 bp, Homo sapien
caagaaaaacacttcgctgagcgag

SEQ ID NO: 3810990 - DNA, 25 bp, Homo sapien
gccttcagcaagaaaaacacttcgc

SEQ ID NO: 3810991 - DNA, 25 bp, Homo sapien
aaatgtgtattcagagacccgcttc

SEQ ID NO: 3810992 - DNA, 25 bp, Homo sapien
tcacaacaccgttcaaataacacat

SEQ ID NO: 3810993 - DNA, 25 bp, Homo sapien
gcttatgcaaacaattgttcatcaa

SEQ ID NO: 3810994 - DNA, 25 bp, Homo sapien
tgcttatgcaaacaattgttcatca

SEQ ID NO: 3810995 - DNA, 25 bp, Homo sapien
ctgcttatgcaaacaattgttcatc

SEQ ID NO: 3810996 - DNA, 25 bp, Homo sapien
aaaccctctaacaggtcacatattt

SEQ ID NO: 3810997 - DNA, 25 bp, Homo sapien
aaccctctaacaggtcacatatttc

SEQ ID NO: 3810998 - DNA, 25 bp, Homo sapien
accctctaacaggtcacatatttca

SEQ ID NO: 3810999 - DNA, 25 bp, Homo sapien
ttagacctcaacatcgtctgaacta

SEQ ID NO: 3811000 - DNA, 25 bp, Homo sapien
tagacctcaacatcgtctgaactat

SEQ ID NO: 3811001 - DNA, 25 bp, Homo sapien
atcgtctgaactatcgcctctactt

SEQ ID NO: 3811002 - DNA, 25 bp, Homo sapien
gaactatcgcctctacttccaagat

SEQ ID NO: 3811003 - DNA, 25 bp, Homo sapien
taggtcaaattaccatgctgcctgg

SEQ ID NO: 3811004 - DNA, 25 bp, Homo sapien
gaagtgctgtcatctctagggtgag

SEQ ID NO: 3811005 - DNA, 25 bp, Homo sapien
cagtatccttggtaggactccagca

SEQ ID NO: 3811006 - DNA, 25 bp, Homo sapien
cttgagaacccctagatcctgagcc

SEQ ID NO: 3811007 - DNA, 25 bp, Homo sapien
tttgctgcagggaagttgtaggacc

SEQ ID NO: 3811008 - DNA, 25 bp, Homo sapien
gtcatagcttagtggcctttgctgc

SEQ ID NO: 3811009 - DNA, 25 bp, Homo sapien
tcatagagcattgaggtcatagctt

SEQ ID NO: 3811010 - DNA, 25 bp, Homo sapien
ttgtaggaccattcaccgtgctgaa

SEQ ID NO: 3811011 - DNA, 25 bp, Homo sapien
aaattcttgcctcagacgctgtatc

SEQ ID NO: 3811012 - DNA, 25 bp, Homo sapien
gctttgcttgctgaaattcttgcct

SEQ ID NO: 3811013 - DNA, 25 bp, Homo sapien
tgtatccgatcatgattgctaggag

SEQ ID NO: 3811014 - DNA, 25 bp, Homo sapien
tataggtccgccgacgatcttctac

SEQ ID NO: 3811015 - DNA, 25 bp, Homo sapien
tcatcatagccattcaacatgtaca

SEQ ID NO: 3811016 - DNA, 25 bp, Homo sapien
cagaatcggcatgtgtatgggcttt

SEQ ID NO: 3811017 - DNA, 25 bp, Homo sapien
gcttttctctcttaggtttgtgcct

SEQ ID NO: 3811018 - DNA, 25 bp, Homo sapien
tgtacatatcttgtatgtcacttcc

SEQ ID NO: 3811019 - DNA, 25 bp, Homo sapien
ctgacacccatgatttgttgtccat

SEQ ID NO: 3811020 - DNA, 25 bp, Homo sapien
tctgacacccatgatttgttgtcca

SEQ ID NO: 3811021 - DNA, 25 bp, Homo sapien
ttctgacacccatgatttgttgtcc

SEQ ID NO: 3811022 - DNA, 25 bp, Homo sapien
attctgacacccatgatttgttgtc

SEQ ID NO: 3811023 - DNA, 25 bp, Homo sapien
tatttaattccagactcaaattgct

SEQ ID NO: 3811024 - DNA, 25 bp, Homo sapien
tcaaattgcttaatatgtggataaa

SEQ ID NO: 3811025 - DNA, 25 bp, Homo sapien
ccagactcaaattgcttaatatgtg

SEQ ID NO: 3811026 - DNA, 25 bp, Homo sapien
ttaattccagactcaaattgcttaa

SEQ ID NO: 3811027 - DNA, 25 bp, Homo sapien
caaggctcagtaaggaagggggcag

SEQ ID NO: 3811028 - DNA, 25 bp, Homo sapien
aggctcagtaaggaagggggcagtg

SEQ ID NO: 3811029 - DNA, 25 bp, Homo sapien
gctcagtaaggaagggggcagtgcc

SEQ ID NO: 3811030 - DNA, 25 bp, Homo sapien
tcaaggctcagtaaggaagggggca

SEQ ID NO: 3811031 - DNA, 25 bp, Homo sapien
gcatgaaatagataagtggcatcat

SEQ ID NO: 3811032 - DNA, 25 bp, Homo sapien
tccaataaaaggagaccccacaatc

SEQ ID NO: 3811033 - DNA, 25 bp, Homo sapien
gcaacattgtttccaagtcctaggg

SEQ ID NO: 3811034 - DNA, 25 bp, Homo sapien
ctgtggtctcagtgcaacattgtct

SEQ ID NO: 3811035 - DNA, 25 bp, Homo sapien
tatggcaacaatggatcacacaggc

SEQ ID NO: 3811036 - DNA, 25 bp, Homo sapien
gagttggctccatgatatggcaaca

SEQ ID NO: 3811037 - DNA, 25 bp, Homo sapien
cattagggaaaaggtcgtgagacca

SEQ ID NO: 3811038 - DNA, 25 bp, Homo sapien
gattgcaagtaccacaagacggctt

SEQ ID NO: 3811039 - DNA, 25 bp, Homo sapien
ccagtctgtacttggattgtttgct

SEQ ID NO: 3811040 - DNA, 25 bp, Homo sapien
ggcatagaacagtatccagtctgta

SEQ ID NO: 3811041 - DNA, 25 bp, Homo sapien
tcatttcccagataattgatagaac

SEQ ID NO: 3811042 - DNA, 25 bp, Homo sapien
catgcagacaactggccgtacatag

SEQ ID NO: 3811043 - DNA, 25 bp, Homo sapien
cgttgattgatactagactctcctt

SEQ ID NO: 3811044 - DNA, 25 bp, Homo sapien
tcacttcagccaactgcatgtaaga

SEQ ID NO: 3811045 - DNA, 25 bp, Homo sapien
tagaagaccaccctaacatttcatt

SEQ ID NO: 3811046 - DNA, 25 bp, Homo sapien
ctttgtggcccctgttagaagacca

SEQ ID NO: 3811047 - DNA, 25 bp, Homo sapien
taacagcttaatagagtgagtggcc

SEQ ID NO: 3811048 - DNA, 25 bp, Homo sapien
acaaatgtcctcgtgccccaagagg

SEQ ID NO: 3811049 - DNA, 25 bp, Homo sapien
aatttggccttaagctcccactgca

SEQ ID NO: 3811050 - DNA, 25 bp, Homo sapien
cattttgcaaggtgccactgggaga

SEQ ID NO: 3811051 - DNA, 25 bp, Homo sapien
tcaaccatcgttgcacgggtctgcc

SEQ ID NO: 3811052 - DNA, 25 bp, Homo sapien
gtcactgtgaacatcaaccatcgtt

SEQ ID NO: 3811053 - DNA, 25 bp, Homo sapien
ttgcacgggtctgccggcatgtgca

SEQ ID NO: 3811054 - DNA, 25 bp, Homo sapien
tgtgtgatgggttactgtgatagac

SEQ ID NO: 3811055 - DNA, 25 bp, Homo sapien
tctgaatctctgtgcgggtatcggc

SEQ ID NO: 3811056 - DNA, 25 bp, Homo sapien
caacatggcttcctggttgactgtg

SEQ ID NO: 3811057 - DNA, 25 bp, Homo sapien
aaaaccccgaagtcttgcaacatgg

SEQ ID NO: 3811058 - DNA, 25 bp, Homo sapien
tgcgggtatcggctgtgtcttcctc

SEQ ID NO: 3811059 - DNA, 25 bp, Homo sapien
ggaaggatagccctccagtggaaca

SEQ ID NO: 3811060 - DNA, 25 bp, Homo sapien
tccaaatacccgtggataaactgcc

SEQ ID NO: 3811061 - DNA, 25 bp, Homo sapien
tggaggtatctataactagcaaggg

SEQ ID NO: 3811062 - DNA, 25 bp, Homo sapien
cacagaggccctaagtggaggtatc

SEQ ID NO: 3811063 - DNA, 25 bp, Homo sapien
agctccagcaaggacgggcctcatt

SEQ ID NO: 3811064 - DNA, 25 bp, Homo sapien
agcaaggacgggcctcattagcatc

SEQ ID NO: 3811065 - DNA, 25 bp, Homo sapien
ctccagcaaggacgggcctcattag

SEQ ID NO: 3811066 - DNA, 25 bp, Homo sapien
ccagcaaggacgggcctcattagca

SEQ ID NO: 3811067 - DNA, 25 bp, Homo sapien
caaaagagatcagaacctaccatga

SEQ ID NO: 3811068 - DNA, 25 bp, Homo sapien
gagtgatgacattctgctcacccca

SEQ ID NO: 3811069 - DNA, 25 bp, Homo sapien
aaagttcactgcatcccttggtggg

SEQ ID NO: 3811070 - DNA, 25 bp, Homo sapien
gctgcttcagttgcacagaggagta

SEQ ID NO: 3811071 - DNA, 25 bp, Homo sapien
tcacaggaccctgagtaggcagcca

SEQ ID NO: 3811072 - DNA, 25 bp, Homo sapien
gttttagctccaagacatctaagtc

SEQ ID NO: 3811073 - DNA, 25 bp, Homo sapien
tttatatgcaacacagacacggcat

SEQ ID NO: 3811074 - DNA, 25 bp, Homo sapien
gaggcttcatttctgaactagagca

SEQ ID NO: 3811075 - DNA, 25 bp, Homo sapien
tttctatctgcccttttggttcttg

SEQ ID NO: 3811076 - DNA, 25 bp, Homo sapien
ttgtgtctgagacagaaacagcacc

SEQ ID NO: 3811077 - DNA, 25 bp, Homo sapien
cccagccctgcttgtttttctatct

SEQ ID NO: 3811078 - DNA, 25 bp, Homo sapien
ttttggttcttgtgtctgagacaga

SEQ ID NO: 3811079 - DNA, 25 bp, Homo sapien
tgggcctggcagaataagcctgtcc

SEQ ID NO: 3811080 - DNA, 25 bp, Homo sapien
taaaacagatgtgccacattgggcc

SEQ ID NO: 3811081 - DNA, 25 bp, Homo sapien
gattttgtaccttcctatctcaaga

SEQ ID NO: 3811082 - DNA, 25 bp, Homo sapien
gttattattcatagtccctgaaggg

SEQ ID NO: 3811083 - DNA, 25 bp, Homo sapien
tctcaatgaatgtagctgttcctgc

SEQ ID NO: 3811084 - DNA, 25 bp, Homo sapien
gtcgacacaggcatctcaatgaatg

SEQ ID NO: 3811085 - DNA, 25 bp, Homo sapien
gcagacgccagggctataagagcag

SEQ ID NO: 3811086 - DNA, 25 bp, Homo sapien
gctgcagtggtcgacacaggcatct

SEQ ID NO: 3811087 - DNA, 25 bp, Homo sapien
gttaacaccaacttttgtgacacta

SEQ ID NO: 3811088 - DNA, 25 bp, Homo sapien
caccaacttttgtgacactaacatt

SEQ ID NO: 3811089 - DNA, 25 bp, Homo sapien
ccagtcagattttagcagtgggggg

SEQ ID NO: 3811090 - DNA, 25 bp, Homo sapien
taacaccaacttttgtgacactaac

SEQ ID NO: 3811091 - DNA, 25 bp, Homo sapien
gatgcaatggcaagcagagggactt

SEQ ID NO: 3811092 - DNA, 25 bp, Homo sapien
ttttgaaagaagaatgccaggctct

SEQ ID NO: 3811093 - DNA, 25 bp, Homo sapien
tcctgtatgagtgcggtaaggtgtc

SEQ ID NO: 3811094 - DNA, 25 bp, Homo sapien
gtcaaatccacaaaccttaatcctg

SEQ ID NO: 3811095 - DNA, 25 bp, Homo sapien
gctgcgcatctgatggctgctgcca

SEQ ID NO: 3811096 - DNA, 25 bp, Homo sapien
aaagccacatatcttaggattttga

SEQ ID NO: 3811097 - DNA, 25 bp, Homo sapien
acagcgtatgctccggatacagtcc

SEQ ID NO: 3811098 - DNA, 25 bp, Homo sapien
tgtagttggcggcaggcagaccacc

SEQ ID NO: 3811099 - DNA, 25 bp, Homo sapien
tcagaaaagggtctcacttagggaa

SEQ ID NO: 3811100 - DNA, 25 bp, Homo sapien
catgtcagaacttgaagccctgtta

SEQ ID NO: 3811101 - DNA, 25 bp, Homo sapien
ggttgtcaacacctctctaagcagg

SEQ ID NO: 3811102 - DNA, 25 bp, Homo sapien
gaatactctgctaggctatgagggc

SEQ ID NO: 3811103 - DNA, 25 bp, Homo sapien
actcctagcttcgagtgatactcct

SEQ ID NO: 3811104 - DNA, 25 bp, Homo sapien
aaaacacgaatgaccagggagccct

SEQ ID NO: 3811105 - DNA, 25 bp, Homo sapien
ggcaatggcattctataaaacacga

SEQ ID NO: 3811106 - DNA, 25 bp, Homo sapien
gaaatgagatacaaaccgctgagtt

SEQ ID NO: 3811107 - DNA, 25 bp, Homo sapien
gattctacataccagctaaaggctc

SEQ ID NO: 3811108 - DNA, 25 bp, Homo sapien
tcttaggtccgctagaaacagtgga

SEQ ID NO: 3811109 - DNA, 25 bp, Homo sapien
ctgtgtcagaatggagtgcccttgc

SEQ ID NO: 3811110 - DNA, 25 bp, Homo sapien
ggcgtgtagccagatatcctcatgt

SEQ ID NO: 3811111 - DNA, 25 bp, Homo sapien
tcaacacaggagattcccaagggct

SEQ ID NO: 3811112 - DNA, 25 bp, Homo sapien
caaggaactccatgaatctgacagt

SEQ ID NO: 3811113 - DNA, 25 bp, Homo sapien
tatatggctccctatgacatccgga

SEQ ID NO: 3811114 - DNA, 25 bp, Homo sapien
aaaaatactagtccatggcggattc

SEQ ID NO: 3811115 - DNA, 25 bp, Homo sapien
gcctcggtaggttcatctgccacat

SEQ ID NO: 3811116 - DNA, 25 bp, Homo sapien
agctagttccacttaaacaatacaa

SEQ ID NO: 3811117 - DNA, 25 bp, Homo sapien
ggctcaacaaggctctcctggttgt

SEQ ID NO: 3811118 - DNA, 25 bp, Homo sapien
gcatttcatagcctaacagattcag

SEQ ID NO: 3811119 - DNA, 25 bp, Homo sapien
taattaaggctataaatgtgctcac

SEQ ID NO: 3811120 - DNA, 25 bp, Homo sapien
ttaatctaacaccatcctgaggctg

SEQ ID NO: 3811121 - DNA, 25 bp, Homo sapien
cccactgagtgctgagaggataagc

SEQ ID NO: 3811122 - DNA, 25 bp, Homo sapien
gaactggtgaattactaagctctga

SEQ ID NO: 3811123 - DNA, 25 bp, Homo sapien
tgtggagaacagctctaggcacggt

SEQ ID NO: 3811124 - DNA, 25 bp, Homo sapien
gccaataacgcgccattgcattcta

SEQ ID NO: 3811125 - DNA, 25 bp, Homo sapien
ccaataacgcgccattgcattctag

SEQ ID NO: 3811126 - DNA, 25 bp, Homo sapien
attggtgtttgtgggcctggtatgg

SEQ ID NO: 3811127 - DNA, 25 bp, Homo sapien
aattggtgtttgtgggcctggtatg

SEQ ID NO: 3811128 - DNA, 25 bp, Homo sapien
tcagattttgtttatcatttccaag

SEQ ID NO: 3811129 - DNA, 25 bp, Homo sapien
gatgtaggaaactgtgaacctgttg

SEQ ID NO: 3811130 - DNA, 25 bp, Homo sapien
caacagtgttcagcaaggataacgc

SEQ ID NO: 3811131 - DNA, 25 bp, Homo sapien
tagtgaacgatcagaaaaccacctg

SEQ ID NO: 3811132 - DNA, 25 bp, Homo sapien
tgctctcatgcccttgctgtaaagg

SEQ ID NO: 3811133 - DNA, 25 bp, Homo sapien
tgtcaagtaggtgcgcaacagatac

SEQ ID NO: 3811134 - DNA, 25 bp, Homo sapien
gcaaagcctacaggccctagcaata

SEQ ID NO: 3811135 - DNA, 25 bp, Homo sapien
caacagatactgtccttgactcaca

SEQ ID NO: 3811136 - DNA, 25 bp, Homo sapien
gactaatggaactctcccagatgca

SEQ ID NO: 3811137 - DNA, 25 bp, Homo sapien
ccaagtactgaagcttttgtccgaa

SEQ ID NO: 3811138 - DNA, 25 bp, Homo sapien
ggacactctgcagctttggtcatga

SEQ ID NO: 3811139 - DNA, 25 bp, Homo sapien
gaatcctctggcctcatgaacttgg

SEQ ID NO: 3811140 - DNA, 25 bp, Homo sapien
tttgtgcacatcagggaatcctctg

SEQ ID NO: 3811141 - DNA, 25 bp, Homo sapien
gctggcctctctcggagacaatcag

SEQ ID NO: 3811142 - DNA, 25 bp, Homo sapien
ctggcaaggttaccacagccggagc

SEQ ID NO: 3811143 - DNA, 25 bp, Homo sapien
tggcctctctcggagacaatcagga

SEQ ID NO: 3811144 - DNA, 25 bp, Homo sapien
aggctggcctctctcggagacaatc

SEQ ID NO: 3811145 - DNA, 25 bp, Homo sapien
gaagtgcagtctcaggctaagatca

SEQ ID NO: 3811146 - DNA, 25 bp, Homo sapien
gtgcagtctcaggctaagatcagtt

SEQ ID NO: 3811147 - DNA, 25 bp, Homo sapien
gtctcaggctaagatcagtttcttg

SEQ ID NO: 3811148 - DNA, 25 bp, Homo sapien
aagtgcagtctcaggctaagatcag

SEQ ID NO: 3811149 - DNA, 25 bp, Homo sapien
taatgacaacagaagcgggctgaac

SEQ ID NO: 3811150 - DNA, 25 bp, Homo sapien
gctgaacttcgtgcacacatgatgc

SEQ ID NO: 3811151 - DNA, 25 bp, Homo sapien
tcactgtctccggttaatgacaaca

SEQ ID NO: 3811152 - DNA, 25 bp, Homo sapien
tgcacacatgatgcccctgtgggag

SEQ ID NO: 3811153 - DNA, 25 bp, Homo sapien
gaattccgcggcttcttgacttggg

SEQ ID NO: 3811154 - DNA, 25 bp, Homo sapien
ttgacttgggcatacaaagcatcca

SEQ ID NO: 3811155 - DNA, 25 bp, Homo sapien
tctagcgttgagagccatggaacct

SEQ ID NO: 3811156 - DNA, 25 bp, Homo sapien
tcagcatagtcacgctctcgagctt

SEQ ID NO: 3811157 - DNA, 25 bp, Homo sapien
gctgaaaaggatcctaccaactgag

SEQ ID NO: 3811158 - DNA, 25 bp, Homo sapien
caaagcaggtattactgagaacagc

SEQ ID NO: 3811159 - DNA, 25 bp, Homo sapien
ttctaaaggattcacgaggtcaaag

SEQ ID NO: 3811160 - DNA, 25 bp, Homo sapien
agttcaagtaattacccaaagcagg

SEQ ID NO: 3811161 - DNA, 25 bp, Homo sapien
atcaatatttgggttgatacaggaa

SEQ ID NO: 3811162 - DNA, 25 bp, Homo sapien
gaggtttaatcaagtaactgaagtc

SEQ ID NO: 3811163 - DNA, 25 bp, Homo sapien
tctctctttacaatatattcaccca

SEQ ID NO: 3811164 - DNA, 25 bp, Homo sapien
ttaaaatccactttgatgtcacaaa

SEQ ID NO: 3811165 - DNA, 25 bp, Homo sapien
tgctcctgcttcattcgtatcctct

SEQ ID NO: 3811166 - DNA, 25 bp, Homo sapien
gtcatcttttcgatgtttgccaaac

SEQ ID NO: 3811167 - DNA, 25 bp, Homo sapien
tcttctgatgtaaaggattcctgta

SEQ ID NO: 3811168 - DNA, 25 bp, Homo sapien
ctcctcttctgatgtaaaggattcc

SEQ ID NO: 3811169 - DNA, 25 bp, Homo sapien
aattctaacttgtcaatatatacaa

SEQ ID NO: 3811170 - DNA, 25 bp, Homo sapien
ttctaacttgtcaatatatacaaaa

SEQ ID NO: 3811171 - DNA, 25 bp, Homo sapien
aaaaattctaacttgtcaatatata

SEQ ID NO: 3811172 - DNA, 25 bp, Homo sapien
aaattctaacttgtcaatatataca

SEQ ID NO: 3811173 - DNA, 25 bp, Homo sapien
gtcatttatgagaggccacctgcct

SEQ ID NO: 3811174 - DNA, 25 bp, Homo sapien
tcgcaaaccgagaggatttccacca

SEQ ID NO: 3811175 - DNA, 25 bp, Homo sapien
ggctacccactatctttaggagcag

SEQ ID NO: 3811176 - DNA, 25 bp, Homo sapien
tatatgtctctgtccctacggctac

SEQ ID NO: 3811177 - DNA, 25 bp, Homo sapien
tagagtttaggttcttagccactac

SEQ ID NO: 3811178 - DNA, 25 bp, Homo sapien
ttagagtttaggttcttagccacta

SEQ ID NO: 3811179 - DNA, 25 bp, Homo sapien
ttaggttcttagccactaccctatg

SEQ ID NO: 3811180 - DNA, 25 bp, Homo sapien
taaaatcgtcctcgtttgtgttctg

SEQ ID NO: 3811181 - DNA, 25 bp, Homo sapien
aatcgtcctcgtttgtgttctggag

SEQ ID NO: 3811182 - DNA, 25 bp, Homo sapien
tcgtcctcgtttgtgttctggagca

SEQ ID NO: 3811183 - DNA, 25 bp, Homo sapien
aaaatcgtcctcgtttgtgttctgg

SEQ ID NO: 3811184 - DNA, 25 bp, Homo sapien
tgccatgtcgcatagcaatcttggc

SEQ ID NO: 3811185 - DNA, 25 bp, Homo sapien
tcccacataggttttaggggtggca

SEQ ID NO: 3811186 - DNA, 25 bp, Homo sapien
tgtcgcatagcaatcttggctccca

SEQ ID NO: 3811187 - DNA, 25 bp, Homo sapien
aatagcaatgccatgtcgcatagca

SEQ ID NO: 3811188 - DNA, 25 bp, Homo sapien
gatacagcaggggaaaaatgggtta

SEQ ID NO: 3811189 - DNA, 25 bp, Homo sapien
agggatacagcaggggaaaaatggg

SEQ ID NO: 3811190 - DNA, 25 bp, Homo sapien
ctgccagggatacagcaggggaaaa

SEQ ID NO: 3811191 - DNA, 25 bp, Homo sapien
cagcaggggaaaaatgggttaacat

SEQ ID NO: 3811192 - DNA, 25 bp, Homo sapien
taaggaccattggagatccacctgc

SEQ ID NO: 3811193 - DNA, 25 bp, Homo sapien
ttttcacacgggaagaacctgctgg

SEQ ID NO: 3811194 - DNA, 25 bp, Homo sapien
tctgtgattcgaacacttggccggg

SEQ ID NO: 3811195 - DNA, 25 bp, Homo sapien
cacgtggtctcagcaaaccttggga

SEQ ID NO: 3811196 - DNA, 25 bp, Homo sapien
aaacaacaactgtgcaatatgtgct

SEQ ID NO: 3811197 - DNA, 25 bp, Homo sapien
caacaactgtgcaatatgtgctgtt

SEQ ID NO: 3811198 - DNA, 25 bp, Homo sapien
caactgtgcaatatgtgctgttcaa

SEQ ID NO: 3811199 - DNA, 25 bp, Homo sapien
gttcaagacatgttttgaatcgctt

SEQ ID NO: 3811200 - DNA, 25 bp, Homo sapien
tcttctcgggcttcagtttggcaag

SEQ ID NO: 3811201 - DNA, 25 bp, Homo sapien
tctcttctcgggcttcagtttggca

SEQ ID NO: 3811202 - DNA, 25 bp, Homo sapien
cttctcgggcttcagtttggcaagg

SEQ ID NO: 3811203 - DNA, 25 bp, Homo sapien
tcatctcttctcgggcttcagtttg

SEQ ID NO: 3811204 - DNA, 25 bp, Homo sapien
tacagacacacagttagtacaggtg

SEQ ID NO: 3811205 - DNA, 25 bp, Homo sapien
taaatgagagacacggtacagacac

SEQ ID NO: 3811206 - DNA, 25 bp, Homo sapien
ggttctcagctatcacatatggaca

SEQ ID NO: 3811207 - DNA, 25 bp, Homo sapien
ctgatttcagccaaacaaggttaca

SEQ ID NO: 3811208 - DNA, 25 bp, Homo sapien
taagtactaaattaatgaacgcagc

SEQ ID NO: 3811209 - DNA, 25 bp, Homo sapien
taatgaaatctttacagaccgaagt

SEQ ID NO: 3811210 - DNA, 25 bp, Homo sapien
taaatgctaccactaacttgagctc

SEQ ID NO: 3811211 - DNA, 25 bp, Homo sapien
cttttatgggagagtttcagtgcaa

SEQ ID NO: 3811212 - DNA, 25 bp, Homo sapien
tgtatgtttaaggagattctggttt

SEQ ID NO: 3811213 - DNA, 25 bp, Homo sapien
cctgtatgtttaaggagattctggt

SEQ ID NO: 3811214 - DNA, 25 bp, Homo sapien
tttaaggagattctggtttgggatg

SEQ ID NO: 3811215 - DNA, 25 bp, Homo sapien
ttaaggagattctggtttgggatgg

SEQ ID NO: 3811216 - DNA, 25 bp, Homo sapien
tttctatcagtcttatcacctttct

SEQ ID NO: 3811217 - DNA, 25 bp, Homo sapien
tcactggctgtggatacagactctc

SEQ ID NO: 3811218 - DNA, 25 bp, Homo sapien
tccttttttctatcagtcttatcac

SEQ ID NO: 3811219 - DNA, 25 bp, Homo sapien
gagtgggaaggctgatcactggctg

SEQ ID NO: 3811220 - DNA, 25 bp, Homo sapien
ctaagctcctcaaatgaagactgtg

SEQ ID NO: 3811221 - DNA, 25 bp, Homo sapien
ttctctaagctcctcaaatgaagac

SEQ ID NO: 3811222 - DNA, 25 bp, Homo sapien
aagctcctcaaatgaagactgtggg

SEQ ID NO: 3811223 - DNA, 25 bp, Homo sapien
ccattctctaagctcctcaaatgaa

SEQ ID NO: 3811224 - DNA, 25 bp, Homo sapien
agacaatagaagatgttggacatgc

SEQ ID NO: 3811225 - DNA, 25 bp, Homo sapien
tagaagatgttggacatgcagccag

SEQ ID NO: 3811226 - DNA, 25 bp, Homo sapien
tggaccatcgggacaagaaagaacc

SEQ ID NO: 3811227 - DNA, 25 bp, Homo sapien
gctgtaactgagttggaccatcggg

SEQ ID NO: 3811228 - DNA, 25 bp, Homo sapien
tcatcctgcaagaatgggctgcata

SEQ ID NO: 3811229 - DNA, 25 bp, Homo sapien
tcctgcaagaatgggctgcatatat

SEQ ID NO: 3811230 - DNA, 25 bp, Homo sapien
catcctgcaagaatgggctgcatat

SEQ ID NO: 3811231 - DNA, 25 bp, Homo sapien
atcctgcaagaatgggctgcatata

SEQ ID NO: 3811232 - DNA, 25 bp, Homo sapien
tcacagccgggaggaagaggtgggc

SEQ ID NO: 3811233 - DNA, 25 bp, Homo sapien
ggacaccaggaggctgcaactgggt

SEQ ID NO: 3811234 - DNA, 25 bp, Homo sapien
agaggacaccaggaggctgcaactg

SEQ ID NO: 3811235 - DNA, 25 bp, Homo sapien
ggagaggacaccaggaggctgcaac

SEQ ID NO: 3811236 - DNA, 25 bp, Homo sapien
acaccaggaggctgcaactgggtct

SEQ ID NO: 3811237 - DNA, 25 bp, Homo sapien
aaaggcccagttgtgaggaatctga

SEQ ID NO: 3811238 - DNA, 25 bp, Homo sapien
aatctgatcatagtgacaaaactgc

SEQ ID NO: 3811239 - DNA, 25 bp, Homo sapien
gaatctgatcatagtgacaaaactg

SEQ ID NO: 3811240 - DNA, 25 bp, Homo sapien
aggcccagttgtgaggaatctgatc

SEQ ID NO: 3811241 - DNA, 25 bp, Homo sapien
tggacgatggaaaggaatatcccca

SEQ ID NO: 3811242 - DNA, 25 bp, Homo sapien
gcctctgattatccgcggccgtgga

SEQ ID NO: 3811243 - DNA, 25 bp, Homo sapien
aagtcacctcggcaactgcggtctg

SEQ ID NO: 3811244 - DNA, 25 bp, Homo sapien
gagcttgacttcttcagacccaggg

SEQ ID NO: 3811245 - DNA, 25 bp, Homo sapien
gcacatcaatgtgcattgtcaagtc

SEQ ID NO: 3811246 - DNA, 25 bp, Homo sapien
acagttagggcaacctggcagcagg

SEQ ID NO: 3811247 - DNA, 25 bp, Homo sapien
cactgcataaggagtaagaccacgg

SEQ ID NO: 3811248 - DNA, 25 bp, Homo sapien
agtctcttccttgctaaactgcaga

SEQ ID NO: 3811249 - DNA, 25 bp, Homo sapien
cactacaatttttgacaactgcatt

SEQ ID NO: 3811250 - DNA, 25 bp, Homo sapien
agcactacaatttttgacaactgca

SEQ ID NO: 3811251 - DNA, 25 bp, Homo sapien
gcactacaatttttgacaactgcat

SEQ ID NO: 3811252 - DNA, 25 bp, Homo sapien
ctataattgtgataagctatgtggg

SEQ ID NO: 3811253 - DNA, 25 bp, Homo sapien
ggcaacagtctaactgtccattctt

SEQ ID NO: 3811254 - DNA, 25 bp, Homo sapien
catcgtttctatggcaacagtctaa

SEQ ID NO: 3811255 - DNA, 25 bp, Homo sapien
tatgtgggccatcgtttctatggca

SEQ ID NO: 3811256 - DNA, 25 bp, Homo sapien
cactgtattgagtttagtctcgtca

SEQ ID NO: 3811257 - DNA, 25 bp, Homo sapien
atccactgtattgagtttagtctcg

SEQ ID NO: 3811258 - DNA, 25 bp, Homo sapien
ccactgtattgagtttagtctcgtc

SEQ ID NO: 3811259 - DNA, 25 bp, Homo sapien
tcatccactgtattgagtttagtct

SEQ ID NO: 3811260 - DNA, 25 bp, Homo sapien
gacgatcctcagctaatatttcatg

SEQ ID NO: 3811261 - DNA, 25 bp, Homo sapien
tagcatatcataattagccaaggca

SEQ ID NO: 3811262 - DNA, 25 bp, Homo sapien
tctccatgcaatatgccagtcattt

SEQ ID NO: 3811263 - DNA, 25 bp, Homo sapien
taatagttagcccagttagttccca

SEQ ID NO: 3811264 - DNA, 25 bp, Homo sapien
taacgaaatccaattgactggcatc

SEQ ID NO: 3811265 - DNA, 25 bp, Homo sapien
aaatccatgctttttgattttcgtg

SEQ ID NO: 3811266 - DNA, 25 bp, Homo sapien
tcgtgttttaacgaaatccaattga

SEQ ID NO: 3811267 - DNA, 25 bp, Homo sapien
ttttaacgaaatccaattgactggc

SEQ ID NO: 3811268 - DNA, 25 bp, Homo sapien
agaactggatcaacatctggactca

SEQ ID NO: 3811269 - DNA, 25 bp, Homo sapien
aagaactggatcaacatctggactc

SEQ ID NO: 3811270 - DNA, 25 bp, Homo sapien
gcaagaactggatcaacatctggac

SEQ ID NO: 3811271 - DNA, 25 bp, Homo sapien
caagaactggatcaacatctggact

SEQ ID NO: 3811272 - DNA, 25 bp, Homo sapien
gccttggcccaagtaccagcatctg

SEQ ID NO: 3811273 - DNA, 25 bp, Homo sapien
cagtcggctgaatcactgattgcag

SEQ ID NO: 3811274 - DNA, 25 bp, Homo sapien
caaaccccacatcatcatgggagct

SEQ ID NO: 3811275 - DNA, 25 bp, Homo sapien
ggaagcactggcaacctgtcatctt

SEQ ID NO: 3811276 - DNA, 25 bp, Homo sapien
tgatactagaggaaaactgtgccag

SEQ ID NO: 3811277 - DNA, 25 bp, Homo sapien
aaggtaacaccacacatgatactag

SEQ ID NO: 3811278 - DNA, 25 bp, Homo sapien
tgagaaatagttaaagtcccaggct

SEQ ID NO: 3811279 - DNA, 25 bp, Homo sapien
cttttacgaaatggatgtgctggtt

SEQ ID NO: 3811280 - DNA, 25 bp, Homo sapien
ttaaaagcctttcgccagggatgtg

SEQ ID NO: 3811281 - DNA, 25 bp, Homo sapien
tgtctgaccccaacaaaagctaagg

SEQ ID NO: 3811282 - DNA, 25 bp, Homo sapien
gaagatctcagcattccccagagag

SEQ ID NO: 3811283 - DNA, 25 bp, Homo sapien
gaagaatcctatgtaggcagcccca

SEQ ID NO: 3811284 - DNA, 25 bp, Homo sapien
tacaaaggagtgattccaaacatat

SEQ ID NO: 3811285 - DNA, 25 bp, Homo sapien
acagtctgaggaatatctatgcgcc

SEQ ID NO: 3811286 - DNA, 25 bp, Homo sapien
gcgcctagatactgtgcaaatcaat

SEQ ID NO: 3811287 - DNA, 25 bp, Homo sapien
gtctacaaaggagtgattccaaaca

SEQ ID NO: 3811288 - DNA, 25 bp, Homo sapien
tttttgccccatacctctcctaatg

SEQ ID NO: 3811289 - DNA, 25 bp, Homo sapien
tacggccaaagatactagaataagg

SEQ ID NO: 3811290 - DNA, 25 bp, Homo sapien
tctgaagcatcagggattggaggca

SEQ ID NO: 3811291 - DNA, 25 bp, Homo sapien
gaactgggagagaagttactgccct

SEQ ID NO: 3811292 - DNA, 25 bp, Homo sapien
tgaagctgtagctaacaaaatcggg

SEQ ID NO: 3811293 - DNA, 25 bp, Homo sapien
gtacaaagcctttcacctgacaggt

SEQ ID NO: 3811294 - DNA, 25 bp, Homo sapien
tgacaggtgttcaacccaacaggtg

SEQ ID NO: 3811295 - DNA, 25 bp, Homo sapien
cacaaatatctagggacacatgcac

SEQ ID NO: 3811296 - DNA, 25 bp, Homo sapien
gaaagctggcttgtctaagttccac

SEQ ID NO: 3811297 - DNA, 25 bp, Homo sapien
tctcagtaaaccaatgaaagcatca

SEQ ID NO: 3811298 - DNA, 25 bp, Homo sapien
ctctcagtaaaccaatgaaagcatc

SEQ ID NO: 3811299 - DNA, 25 bp, Homo sapien
tttctgctgggcgattcatcaagcc

SEQ ID NO: 3811300 - DNA, 25 bp, Homo sapien
tatcatccaacgctgtttcaatggg

SEQ ID NO: 3811301 - DNA, 25 bp, Homo sapien
cctcaatcccactgtagagggaatg

SEQ ID NO: 3811302 - DNA, 25 bp, Homo sapien
ccattatcctactgagggcagcatt

SEQ ID NO: 3811303 - DNA, 25 bp, Homo sapien
gctggatcattcctcgtttattgcc

SEQ ID NO: 3811304 - DNA, 25 bp, Homo sapien
tccttgcaacaataagctggatcat

SEQ ID NO: 3811305 - DNA, 25 bp, Homo sapien
tcctcgtttattgccttcagtagac

SEQ ID NO: 3811306 - DNA, 25 bp, Homo sapien
tcattgcacttgcttattctccttg

SEQ ID NO: 3811307 - DNA, 25 bp, Homo sapien
gggattctccatttactgctatcag

SEQ ID NO: 3811308 - DNA, 25 bp, Homo sapien
gttgatcattcacccgaagccttcc

SEQ ID NO: 3811309 - DNA, 25 bp, Homo sapien
tccatttactgctatcagttgatca

SEQ ID NO: 3811310 - DNA, 25 bp, Homo sapien
ttggtttgtcttgcccaacagggat

SEQ ID NO: 3811311 - DNA, 25 bp, Homo sapien
cattaagtgggacttcaaatgtcag

SEQ ID NO: 3811312 - DNA, 25 bp, Homo sapien
tgcagatcctgaatcattaagtggg

SEQ ID NO: 3811313 - DNA, 25 bp, Homo sapien
ccctggtgccatcaggtgtaagaac

SEQ ID NO: 3811314 - DNA, 25 bp, Homo sapien
ttgaccggttacctttgacactgac

SEQ ID NO: 3811315 - DNA, 25 bp, Homo sapien
cgtttcttttggaatctgcatctgg

SEQ ID NO: 3811316 - DNA, 25 bp, Homo sapien
tcttttggaatctgcatctggcttg

SEQ ID NO: 3811317 - DNA, 25 bp, Homo sapien
tctgcatctggcttggctctgcatt

SEQ ID NO: 3811318 - DNA, 25 bp, Homo sapien
tttcttttggaatctgcatctggct

SEQ ID NO: 3811319 - DNA, 25 bp, Homo sapien
gtggaaggcgtcttcctggcgaaag

SEQ ID NO: 3811320 - DNA, 25 bp, Homo sapien
ggatttgcccactaaatctactcca

SEQ ID NO: 3811321 - DNA, 25 bp, Homo sapien
cagcgaaacaacttcctcttgggat

SEQ ID NO: 3811322 - DNA, 25 bp, Homo sapien
agaccagaaggctcacagttccttc

SEQ ID NO: 3811323 - DNA, 25 bp, Homo sapien
ggagctgagccacctattgttacat

SEQ ID NO: 3811324 - DNA, 25 bp, Homo sapien
gagctgagccacctattgttacatc

SEQ ID NO: 3811325 - DNA, 25 bp, Homo sapien
cttaagtcggccatcctgaatggcc

SEQ ID NO: 3811326 - DNA, 25 bp, Homo sapien
tcctgccttaagtcggccatcctga

SEQ ID NO: 3811327 - DNA, 25 bp, Homo sapien
ggaggcaaactgcaagaacatgctc

SEQ ID NO: 3811328 - DNA, 25 bp, Homo sapien
cagagatccactgtatacaggaagg

SEQ ID NO: 3811329 - DNA, 25 bp, Homo sapien
tcagctaaaatggatcaggaacagt

SEQ ID NO: 3811330 - DNA, 25 bp, Homo sapien
taaagtcaagtccaatagtttgcac

SEQ ID NO: 3811331 - DNA, 25 bp, Homo sapien
ggctgtcagggctaaaacggcttga

SEQ ID NO: 3811332 - DNA, 25 bp, Homo sapien
tacgcatggcttggcgaaacatatg

SEQ ID NO: 3811333 - DNA, 25 bp, Homo sapien
tctatctgctcaggcgggtggttca

SEQ ID NO: 3811334 - DNA, 25 bp, Homo sapien
tgttgtcaatatactggctgtcagg

SEQ ID NO: 3811335 - DNA, 25 bp, Homo sapien
tgcaatcattctcacgaaaaagatt

SEQ ID NO: 3811336 - DNA, 25 bp, Homo sapien
tcaaatcttctatttcgaaggtcgc

SEQ ID NO: 3811337 - DNA, 25 bp, Homo sapien
cgaaggtcgccatcattaatcctga

SEQ ID NO: 3811338 - DNA, 25 bp, Homo sapien
tctatttcgaaggtcgccatcatta

SEQ ID NO: 3811339 - DNA, 25 bp, Homo sapien
ataagatcctacaggttctgctgac

SEQ ID NO: 3811340 - DNA, 25 bp, Homo sapien
catctttcctttccagcgaaacaaa

SEQ ID NO: 3811341 - DNA, 25 bp, Homo sapien
aagtcatcattaggacagaatttat

SEQ ID NO: 3811342 - DNA, 25 bp, Homo sapien
tgctgactcccccattgagtggcag

SEQ ID NO: 3811343 - DNA, 25 bp, Homo sapien
agctagaattctatgcactactgca

SEQ ID NO: 3811344 - DNA, 25 bp, Homo sapien
tgcacaggggcctagcgccctccag

SEQ ID NO: 3811345 - DNA, 25 bp, Homo sapien
gaattctatgcactactgcacaggg

SEQ ID NO: 3811346 - DNA, 25 bp, Homo sapien
tactgcacaggggcctagcgccctc

SEQ ID NO: 3811347 - DNA, 25 bp, Homo sapien
taaatggatgagtatggtatgtctc

SEQ ID NO: 3811348 - DNA, 25 bp, Homo sapien
gaggggagagtgaagctcagattct

SEQ ID NO: 3811349 - DNA, 25 bp, Homo sapien
gatgtttgactactagtcttgtaga

SEQ ID NO: 3811350 - DNA, 25 bp, Homo sapien
caagaccatccaaagatgtttgact

SEQ ID NO: 3811351 - DNA, 25 bp, Homo sapien
ctgaaaggcactacgtggattccca

SEQ ID NO: 3811352 - DNA, 25 bp, Homo sapien
ttggggacttctacgagctttacca

SEQ ID NO: 3811353 - DNA, 25 bp, Homo sapien
cagaggccctccatcgttggggact

SEQ ID NO: 3811354 - DNA, 25 bp, Homo sapien
ctgccgcctcgagcactgaaaggca

SEQ ID NO: 3811355 - DNA, 25 bp, Homo sapien
aatgatgaatgagggagcatgaacg

SEQ ID NO: 3811356 - DNA, 25 bp, Homo sapien
agacaatgatgaatgagggagcatg

SEQ ID NO: 3811357 - DNA, 25 bp, Homo sapien
ctgtgagacaatgatgaatgaggga

SEQ ID NO: 3811358 - DNA, 25 bp, Homo sapien
tgagacaatgatgaatgagggagca

SEQ ID NO: 3811359 - DNA, 25 bp, Homo sapien
tccaaacccgtgtcagcatgtccaa

SEQ ID NO: 3811360 - DNA, 25 bp, Homo sapien
aacacgactgttatcctcttctgtc

SEQ ID NO: 3811361 - DNA, 25 bp, Homo sapien
ccaacaggttcaacacgactgttat

SEQ ID NO: 3811362 - DNA, 25 bp, Homo sapien
tccagagaaaagttgggtatatgct

SEQ ID NO: 3811363 - DNA, 25 bp, Homo sapien
cacaggtctctatcaccacgctgag

SEQ ID NO: 3811364 - DNA, 25 bp, Homo sapien
tggacattaagtaggaaacccactc

SEQ ID NO: 3811365 - DNA, 25 bp, Homo sapien
caggcttaggtctgtcccttggaca

SEQ ID NO: 3811366 - DNA, 25 bp, Homo sapien
ccacgctgagtttcgcaggcttagg

SEQ ID NO: 3811367 - DNA, 25 bp, Homo sapien
cagtgttaaaaatgtaggagacctt

SEQ ID NO: 3811368 - DNA, 25 bp, Homo sapien
aatgtaggagaccttcaataagtta

SEQ ID NO: 3811369 - DNA, 25 bp, Homo sapien
ctcagtgttaaaaatgtaggagacc

SEQ ID NO: 3811370 - DNA, 25 bp, Homo sapien
aaaatgtaggagaccttcaataagt

SEQ ID NO: 3811371 - DNA, 25 bp, Homo sapien
tcccacggctagtgtgatcagcggt

SEQ ID NO: 3811372 - DNA, 25 bp, Homo sapien
gatcagcggtgatacagcagacacc

SEQ ID NO: 3811373 - DNA, 25 bp, Homo sapien
cggctagtgtgatcagcggtgatac

SEQ ID NO: 3811374 - DNA, 25 bp, Homo sapien
aggtggctttcccacggctagtgtg

SEQ ID NO: 3811375 - DNA, 25 bp, Homo sapien
gaaaaccatcagctcctaacagact

SEQ ID NO: 3811376 - DNA, 25 bp, Homo sapien
gaatagcagttgcacagctcatgga

SEQ ID NO: 3811377 - DNA, 25 bp, Homo sapien
aatgtttgaacactgaagacgggaa

SEQ ID NO: 3811378 - DNA, 25 bp, Homo sapien
catggctcatatatctacagaagtc

SEQ ID NO: 3811379 - DNA, 25 bp, Homo sapien
ttgagggagttgttgaggtataacc

SEQ ID NO: 3811380 - DNA, 25 bp, Homo sapien
gagttgttgaggtataaccaataaa

SEQ ID NO: 3811381 - DNA, 25 bp, Homo sapien
tgaggtataaccaataaacctaatg

SEQ ID NO: 3811382 - DNA, 25 bp, Homo sapien
tgttgaggtataaccaataaaccta

SEQ ID NO: 3811383 - DNA, 25 bp, Homo sapien
gccaaacatctgtgcctctgtagca

SEQ ID NO: 3811384 - DNA, 25 bp, Homo sapien
tctaaagccctgaaccttcagaatg

SEQ ID NO: 3811385 - DNA, 25 bp, Homo sapien
gcctctgtagcattacaaactctaa

SEQ ID NO: 3811386 - DNA, 25 bp, Homo sapien
gcaaatattcataactgctcacaat

SEQ ID NO: 3811387 - DNA, 25 bp, Homo sapien
cacttgcccaccattgggtgactgg

SEQ ID NO: 3811388 - DNA, 25 bp, Homo sapien
cagttactagtatcccgcgggaggc

SEQ ID NO: 3811389 - DNA, 25 bp, Homo sapien
tgactggcactcagagacgagcgag

SEQ ID NO: 3811390 - DNA, 25 bp, Homo sapien
gacgagcgagcattgtctctctgaa

SEQ ID NO: 3811391 - DNA, 25 bp, Homo sapien
cacacacacaaaacgcaggcttaat

SEQ ID NO: 3811392 - DNA, 25 bp, Homo sapien
cctaatgttgtagaactgaggccaa

SEQ ID NO: 3811393 - DNA, 25 bp, Homo sapien
tcctaagccagtatccagcacataa

SEQ ID NO: 3811394 - DNA, 25 bp, Homo sapien
taatcagcactggtacatgtataca

SEQ ID NO: 3811395 - DNA, 25 bp, Homo sapien
tgaagatgccctggaatccaatggt

SEQ ID NO: 3811396 - DNA, 25 bp, Homo sapien
aagacacgacactcatcacggacac

SEQ ID NO: 3811397 - DNA, 25 bp, Homo sapien
gcagcaaacaagcagaggtggttac

SEQ ID NO: 3811398 - DNA, 25 bp, Homo sapien
tccaatggtttacccaagacacgac

SEQ ID NO: 3811399 - DNA, 25 bp, Homo sapien
tactgcgtcgaacatgaagaggcat

SEQ ID NO: 3811400 - DNA, 25 bp, Homo sapien
tgtcgcaggttttaggactcccagc

SEQ ID NO: 3811401 - DNA, 25 bp, Homo sapien
aattagagctgggtcactactgcgt

SEQ ID NO: 3811402 - DNA, 25 bp, Homo sapien
gaagccagctgttgttgaccagcgt

SEQ ID NO: 3811403 - DNA, 25 bp, Homo sapien
agctccctgaacatgcaccacagta

SEQ ID NO: 3811404 - DNA, 25 bp, Homo sapien
gccactgccggtgccctgtagcctg

SEQ ID NO: 3811405 - DNA, 25 bp, Homo sapien
tgtagcctgtccacacagacagctc

SEQ ID NO: 3811406 - DNA, 25 bp, Homo sapien
tgaacatgcaccacagtagacaact

SEQ ID NO: 3811407 - DNA, 25 bp, Homo sapien
ttcgtggctgccagatcgtgtcatt

SEQ ID NO: 3811408 - DNA, 25 bp, Homo sapien
gcaggccacctcttgtggaaagcct

SEQ ID NO: 3811409 - DNA, 25 bp, Homo sapien
ccagatcgtgtcattgtgtttgcca

SEQ ID NO: 3811410 - DNA, 25 bp, Homo sapien
tgtggaaagcctctgaccactcctc

SEQ ID NO: 3811411 - DNA, 25 bp, Homo sapien
attacagatgttggaaggccccaga

SEQ ID NO: 3811412 - DNA, 25 bp, Homo sapien
tttaatccagcaaaggacaccgaga

SEQ ID NO: 3811413 - DNA, 25 bp, Homo sapien
tctcttttctaaggtcggccgggca

SEQ ID NO: 3811414 - DNA, 25 bp, Homo sapien
catgcagtgctgactcccttatgag

SEQ ID NO: 3811415 - DNA, 25 bp, Homo sapien
aggccgtcgtccgcctggaagccca

SEQ ID NO: 3811416 - DNA, 25 bp, Homo sapien
ggccgtcgtccgcctggaagcccag

SEQ ID NO: 3811417 - DNA, 25 bp, Homo sapien
ctggtcatccctgtacagctgctga

SEQ ID NO: 3811418 - DNA, 25 bp, Homo sapien
aaacaccatgctagacaccctggca

SEQ ID NO: 3811419 - DNA, 25 bp, Homo sapien
gaggaacacgctatctctgtggcca

SEQ ID NO: 3811420 - DNA, 25 bp, Homo sapien
tggtgaagctacactctcccagcgt

SEQ ID NO: 3811421 - DNA, 25 bp, Homo sapien
aaaaatgtgacctgtctgcgtgtgg

SEQ ID NO: 3811422 - DNA, 25 bp, Homo sapien
ctggctcctaccattgcatgagaga

SEQ ID NO: 3811423 - DNA, 25 bp, Homo sapien
tttcaggaatttctgagagttgatg

SEQ ID NO: 3811424 - DNA, 25 bp, Homo sapien
aatgcccaaaaatggaagcacatgc

SEQ ID NO: 3811425 - DNA, 25 bp, Homo sapien
actggtaacaggattgataaggtct

SEQ ID NO: 3811426 - DNA, 25 bp, Homo sapien
ggtctgcaaagctggagccaattcc

SEQ ID NO: 3811427 - DNA, 25 bp, Homo sapien
gaccaagctcatgctcagacattcc

SEQ ID NO: 3811428 - DNA, 25 bp, Homo sapien
tccacactaggaaaaacctcttcaa

SEQ ID NO: 3811429 - DNA, 25 bp, Homo sapien
tgcagcagtctagaatactttgaca

SEQ ID NO: 3811430 - DNA, 25 bp, Homo sapien
tacgatgatagactattgctctgga

SEQ ID NO: 3811431 - DNA, 25 bp, Homo sapien
tcagcaagcatataccaggtgagga

SEQ ID NO: 3811432 - DNA, 25 bp, Homo sapien
tgttttctaatcaagggtatctcca

SEQ ID NO: 3811433 - DNA, 25 bp, Homo sapien
cctttaaaatgtagcccagagagag

SEQ ID NO: 3811434 - DNA, 25 bp, Homo sapien
ttaaaatgtagcccagagagagact

SEQ ID NO: 3811435 - DNA, 25 bp, Homo sapien
aaaatgtagcccagagagagactac

SEQ ID NO: 3811436 - DNA, 25 bp, Homo sapien
tttcctttaaaatgtagcccagaga

SEQ ID NO: 3811437 - DNA, 25 bp, Homo sapien
tccatggaaaagttagaggtgagaa

SEQ ID NO: 3811438 - DNA, 25 bp, Homo sapien
gagaatctcagaggcacacttatca

SEQ ID NO: 3811439 - DNA, 25 bp, Homo sapien
cttgtgggcagctttctcttagtca

SEQ ID NO: 3811440 - DNA, 25 bp, Homo sapien
tggcttgtgggcagctttctcttag

SEQ ID NO: 3811441 - DNA, 25 bp, Homo sapien
cttgctggcttgtgggcagctttct

SEQ ID NO: 3811442 - DNA, 25 bp, Homo sapien
ttgctggcttgtgggcagctttctc

SEQ ID NO: 3811443 - DNA, 25 bp, Homo sapien
ctgggagcatgcaaagaccttccga

SEQ ID NO: 3811444 - DNA, 25 bp, Homo sapien
tcccatgtcaagctcttcgtgttca

SEQ ID NO: 3811445 - DNA, 25 bp, Homo sapien
cttccgagagatacattttaaggta

SEQ ID NO: 3811446 - DNA, 25 bp, Homo sapien
caagctcttcgtgttcaatatgcat

SEQ ID NO: 3811447 - DNA, 25 bp, Homo sapien
ggatgaataacaaaagttggtattc

SEQ ID NO: 3811448 - DNA, 25 bp, Homo sapien
catggatgaataacaaaagttggta

SEQ ID NO: 3811449 - DNA, 25 bp, Homo sapien
tggatgaataacaaaagttggtatt

SEQ ID NO: 3811450 - DNA, 25 bp, Homo sapien
tcatggatgaataacaaaagttggt

SEQ ID NO: 3811451 - DNA, 25 bp, Homo sapien
acctccgtgatgtggatcctgctca

SEQ ID NO: 3811452 - DNA, 25 bp, Homo sapien
aagctcactaccaaatatctctggg

SEQ ID NO: 3811453 - DNA, 25 bp, Homo sapien
cacttgttgcttggtaaggctgaaa

SEQ ID NO: 3811454 - DNA, 25 bp, Homo sapien
tctgggtacccgtggaactggcact

SEQ ID NO: 3811455 - DNA, 25 bp, Homo sapien
gctggatatagtaaaccagggcttg

SEQ ID NO: 3811456 - DNA, 25 bp, Homo sapien
gatatagtaaaccagggcttggttc

SEQ ID NO: 3811457 - DNA, 25 bp, Homo sapien
gctagctggatatagtaaaccaggg

SEQ ID NO: 3811458 - DNA, 25 bp, Homo sapien
tggatatagtaaaccagggcttggt

SEQ ID NO: 3811459 - DNA, 25 bp, Homo sapien
taggtaaagtattgtggtgctccca

SEQ ID NO: 3811460 - DNA, 25 bp, Homo sapien
aaattttgactacagggtcctgcct

SEQ ID NO: 3811461 - DNA, 25 bp, Homo sapien
gacatcacaggaggtgttacatctt

SEQ ID NO: 3811462 - DNA, 25 bp, Homo sapien
gtattctaacatccagccataatga

SEQ ID NO: 3811463 - DNA, 25 bp, Homo sapien
tacttagatgctatcaaaatcctca

SEQ ID NO: 3811464 - DNA, 25 bp, Homo sapien
gggcatatggcactatataatatca

SEQ ID NO: 3811465 - DNA, 25 bp, Homo sapien
gaaataactaggtcattctagctct

SEQ ID NO: 3811466 - DNA, 25 bp, Homo sapien
cataagtagtgtccacattcaagga

SEQ ID NO: 3811467 - DNA, 25 bp, Homo sapien
tagtacctgtattgagttcgtgcac

SEQ ID NO: 3811468 - DNA, 25 bp, Homo sapien
tcatttacactggagcacctcttgc

SEQ ID NO: 3811469 - DNA, 25 bp, Homo sapien
accttacctgatctttgcaacctga

SEQ ID NO: 3811470 - DNA, 25 bp, Homo sapien
actaaccactactacaagccacagg

SEQ ID NO: 3811471 - DNA, 25 bp, Homo sapien
tcgcaaacagtagaaatcttgatcc

SEQ ID NO: 3811472 - DNA, 25 bp, Homo sapien
gttcccatgagaaatcctctgaaag

SEQ ID NO: 3811473 - DNA, 25 bp, Homo sapien
caacaggtaactcagagctcgacag

SEQ ID NO: 3811474 - DNA, 25 bp, Homo sapien
ttgtagccgatattttcgcaaacag

SEQ ID NO: 3811475 - DNA, 25 bp, Homo sapien
gatgaggcatactctcccactgtct

SEQ ID NO: 3811476 - DNA, 25 bp, Homo sapien
gtaaagtcaccatgtctgtctttag

SEQ ID NO: 3811477 - DNA, 25 bp, Homo sapien
gatgacagcacaagcatctaaaccc

SEQ ID NO: 3811478 - DNA, 25 bp, Homo sapien
gcatctaaacccttcaaaatttcca

SEQ ID NO: 3811479 - DNA, 25 bp, Homo sapien
ttaatcaccaagagccttgctggac

SEQ ID NO: 3811480 - DNA, 25 bp, Homo sapien
taatcaccaagagccttgctggacc

SEQ ID NO: 3811481 - DNA, 25 bp, Homo sapien
caagagccttgctggaccttctcac

SEQ ID NO: 3811482 - DNA, 25 bp, Homo sapien
caccaagagccttgctggaccttct

SEQ ID NO: 3811483 - DNA, 25 bp, Homo sapien
ggtccactggttgattctttcacaa

SEQ ID NO: 3811484 - DNA, 25 bp, Homo sapien
aaacatccggagcacatgaatgtgc

SEQ ID NO: 3811485 - DNA, 25 bp, Homo sapien
gctccatgaggtgaatcacggtcca

SEQ ID NO: 3811486 - DNA, 25 bp, Homo sapien
aggaggacaccgtccttgcacgtca

SEQ ID NO: 3811487 - DNA, 25 bp, Homo sapien
gagagatctctacttgtggctagaa

SEQ ID NO: 3811488 - DNA, 25 bp, Homo sapien
tatccaagctctggtggtaccctcc

SEQ ID NO: 3811489 - DNA, 25 bp, Homo sapien
cattctctgggaaataccatcaccc

SEQ ID NO: 3811490 - DNA, 25 bp, Homo sapien
gaccctttgatctaagtggaaccaa

SEQ ID NO: 3811491 - DNA, 25 bp, Homo sapien
caagattctcgaagtgaatgcccac

SEQ ID NO: 3811492 - DNA, 25 bp, Homo sapien
tgactcccaggacagcgatataatt

SEQ ID NO: 3811493 - DNA, 25 bp, Homo sapien
tggtaaatctttggcttccgaggaa

SEQ ID NO: 3811494 - DNA, 25 bp, Homo sapien
tgagatcgttcacattatatagggc

SEQ ID NO: 3811495 - DNA, 25 bp, Homo sapien
tgccacataggaaacaaataacagg

SEQ ID NO: 3811496 - DNA, 25 bp, Homo sapien
tgagccaaccattcctaaaaggagg

SEQ ID NO: 3811497 - DNA, 25 bp, Homo sapien
gcctgaacagctgaccaaaaatgga

SEQ ID NO: 3811498 - DNA, 25 bp, Homo sapien
tagctgttagtatagtgcaccactc

SEQ ID NO: 3811499 - DNA, 25 bp, Homo sapien
gggtgaacatacagcacagattgat

SEQ ID NO: 3811500 - DNA, 25 bp, Homo sapien
taagtgtttctaagcaaccttgctc

SEQ ID NO: 3811501 - DNA, 25 bp, Homo sapien
tgataattcccgttgagagtgtggc

SEQ ID NO: 3811502 - DNA, 25 bp, Homo sapien
taacgtcatcagcagtaaaactcaa

SEQ ID NO: 3811503 - DNA, 25 bp, Homo sapien
actgcaggctgatggagctctgaat

SEQ ID NO: 3811504 - DNA, 25 bp, Homo sapien
caggctgatggagctctgaatacta

SEQ ID NO: 3811505 - DNA, 25 bp, Homo sapien
acaagggaaagggtttgaactgcag

SEQ ID NO: 3811506 - DNA, 25 bp, Homo sapien
tgaactgcaggctgatggagctctg

SEQ ID NO: 3811507 - DNA, 25 bp, Homo sapien
tatgtgacacagactaagcagtgcc

SEQ ID NO: 3811508 - DNA, 25 bp, Homo sapien
ttctctaggcaattactggttccag

SEQ ID NO: 3811509 - DNA, 25 bp, Homo sapien
tgtgttaagctaggcagtcatgtgc

SEQ ID NO: 3811510 - DNA, 25 bp, Homo sapien
aaatgatgagctggcattttgccca

SEQ ID NO: 3811511 - DNA, 25 bp, Homo sapien
ttgcagtaagctgttttcgcatgag

SEQ ID NO: 3811512 - DNA, 25 bp, Homo sapien
cttgcagtaagctgttttcgcatga

SEQ ID NO: 3811513 - DNA, 25 bp, Homo sapien
taagaagttaaagacaagaatgcta

SEQ ID NO: 3811514 - DNA, 25 bp, Homo sapien
atgctaattgtacctcacaaaagca

SEQ ID NO: 3811515 - DNA, 25 bp, Homo sapien
aagaagttaaagacaagaatgctaa

SEQ ID NO: 3811516 - DNA, 25 bp, Homo sapien
aatggctcggatatggtgtcatcaa

SEQ ID NO: 3811517 - DNA, 25 bp, Homo sapien
gcttatagtcttgaaggcttctgcc

SEQ ID NO: 3811518 - DNA, 25 bp, Homo sapien
ggttattccagacctgagaatcaga

SEQ ID NO: 3811519 - DNA, 25 bp, Homo sapien
gatagtaccatctctgtgcacagaa

SEQ ID NO: 3811520 - DNA, 25 bp, Homo sapien
gacaatttggatttcaactcaagat

SEQ ID NO: 3811521 - DNA, 25 bp, Homo sapien
caccagagagaattagtgcagagca

SEQ ID NO: 3811522 - DNA, 25 bp, Homo sapien
caccacaggtgctaatccaattcca

SEQ ID NO: 3811523 - DNA, 25 bp, Homo sapien
aattccacacggctagggaggactc

SEQ ID NO: 3811524 - DNA, 25 bp, Homo sapien
gtggcagagatttgcactcacaatt

SEQ ID NO: 3811525 - DNA, 25 bp, Homo sapien
cttaaataactctcaagagggactg

SEQ ID NO: 3811526 - DNA, 25 bp, Homo sapien
taagaaattgctcccagctgtagac

SEQ ID NO: 3811527 - DNA, 25 bp, Homo sapien
ctaggctcctatcagaatggtcaag

SEQ ID NO: 3811528 - DNA, 25 bp, Homo sapien
tcaccaataagttttgctggcatca

SEQ ID NO: 3811529 - DNA, 25 bp, Homo sapien
agtatcacaataacagctcgctgca

SEQ ID NO: 3811530 - DNA, 25 bp, Homo sapien
ggctggagtaggagtatcacaataa

SEQ ID NO: 3811531 - DNA, 25 bp, Homo sapien
cctaattttctgtgcatagggaaga

SEQ ID NO: 3811532 - DNA, 25 bp, Homo sapien
cacaccttgaccctggctgattgtc

SEQ ID NO: 3811533 - DNA, 25 bp, Homo sapien
tccagaagcaggagggcgaactgca

SEQ ID NO: 3811534 - DNA, 25 bp, Homo sapien
gttgcccgcagaataaaagtgagcc

SEQ ID NO: 3811535 - DNA, 25 bp, Homo sapien
caagggatctctgaagttgcccgca

SEQ ID NO: 3811536 - DNA, 25 bp, Homo sapien
tctaaatacttggtagggctaccat

SEQ ID NO: 3811537 - DNA, 25 bp, Homo sapien
ccatgtgtccaccagaatatctgta

SEQ ID NO: 3811538 - DNA, 25 bp, Homo sapien
gacatgttcagagcaggaccttaag

SEQ ID NO: 3811539 - DNA, 25 bp, Homo sapien
gactgacccagatacaggcactaag

SEQ ID NO: 3811540 - DNA, 25 bp, Homo sapien
tacagagccagttggttaaggagcg

SEQ ID NO: 3811541 - DNA, 25 bp, Homo sapien
gactgtgtggatactgaaacctgct

SEQ ID NO: 3811542 - DNA, 25 bp, Homo sapien
tagaagtataccacactcctgagat

SEQ ID NO: 3811543 - DNA, 25 bp, Homo sapien
ttaaggagcgtaagaagagatcgag

SEQ ID NO: 3811544 - DNA, 25 bp, Homo sapien
gcctgtgaaataattgagcaattgt

SEQ ID NO: 3811545 - DNA, 25 bp, Homo sapien
gtgaaataattgagcaattgtggac

SEQ ID NO: 3811546 - DNA, 25 bp, Homo sapien
aataattgagcaattgtggactgga

SEQ ID NO: 3811547 - DNA, 25 bp, Homo sapien
ttgcctgtgaaataattgagcaatt

SEQ ID NO: 3811548 - DNA, 25 bp, Homo sapien
cagttcctctgaaatttgggcttcc

SEQ ID NO: 3811549 - DNA, 25 bp, Homo sapien
tagaggaccgtcaaaactatgacct

SEQ ID NO: 3811550 - DNA, 25 bp, Homo sapien
tttctaaactataaccacagggctg

SEQ ID NO: 3811551 - DNA, 25 bp, Homo sapien
gacctcccaatatcagaagatgtgc

SEQ ID NO: 3811552 - DNA, 25 bp, Homo sapien
ggtgactcctcaacactaaggtaat

SEQ ID NO: 3811553 - DNA, 25 bp, Homo sapien
cacctcgtgattcttagaaattagc

SEQ ID NO: 3811554 - DNA, 25 bp, Homo sapien
ggtcaaccacaatatgatcccagtc

SEQ ID NO: 3811555 - DNA, 25 bp, Homo sapien
tttgtcctcagagcacacctcgtga

SEQ ID NO: 3811556 - DNA, 25 bp, Homo sapien
tagctgaaattacaggcatgcacca

SEQ ID NO: 3811557 - DNA, 25 bp, Homo sapien
gattacagatgtgagccatcatgcc

SEQ ID NO: 3811558 - DNA, 25 bp, Homo sapien
aattcttgtgcctcaccttcccaag

SEQ ID NO: 3811559 - DNA, 25 bp, Homo sapien
accaccacgcctggctaaattttgt

SEQ ID NO: 3811560 - DNA, 25 bp, Homo sapien
taagaaaggtgacctctcacggagc

SEQ ID NO: 3811561 - DNA, 25 bp, Homo sapien
acagatccttggtgcactcagcggc

SEQ ID NO: 3811562 - DNA, 25 bp, Homo sapien
tataagctgggcttcgacagtcgaa

SEQ ID NO: 3811563 - DNA, 25 bp, Homo sapien
ggaatggaaggtacactagcagccc

SEQ ID NO: 3811564 - DNA, 25 bp, Homo sapien
ctccaaggctgtgctaggaggagca

SEQ ID NO: 3811565 - DNA, 25 bp, Homo sapien
caagtcatcataattagcagaagtg

SEQ ID NO: 3811566 - DNA, 25 bp, Homo sapien
caacctcctggagtaactggggact

SEQ ID NO: 3811567 - DNA, 25 bp, Homo sapien
ctgcacctggcatcttatcctccaa

SEQ ID NO: 3811568 - DNA, 25 bp, Homo sapien
ctaatttcataacacaaaggctggt

SEQ ID NO: 3811569 - DNA, 25 bp, Homo sapien
gtttttggcttgaaataatcaggca

SEQ ID NO: 3811570 - DNA, 25 bp, Homo sapien
tatgcacatgccactatatctggtt

SEQ ID NO: 3811571 - DNA, 25 bp, Homo sapien
cctgcccaggtaactgatgcctaca

SEQ ID NO: 3811572 - DNA, 25 bp, Homo sapien
ccgttggcttaacagagctccagtg

SEQ ID NO: 3811573 - DNA, 25 bp, Homo sapien
tttctaatgcatggttggagtgtct

SEQ ID NO: 3811574 - DNA, 25 bp, Homo sapien
tcatcaaagcatctgtaacactcca

SEQ ID NO: 3811575 - DNA, 25 bp, Homo sapien
tggagtgtctttacttcccgttggc

SEQ ID NO: 3811576 - DNA, 25 bp, Homo sapien
tggcagaacagtacgtatagcggga

SEQ ID NO: 3811577 - DNA, 25 bp, Homo sapien
cctgggaatagatccaaggcggctt

SEQ ID NO: 3811578 - DNA, 25 bp, Homo sapien
tttgctgagaccctaaacttggtgc

SEQ ID NO: 3811579 - DNA, 25 bp, Homo sapien
tatagcgggaaaccatttgtgcgtg

SEQ ID NO: 3811580 - DNA, 25 bp, Homo sapien
ctgtacacctgcagacaaaccctcc

SEQ ID NO: 3811581 - DNA, 25 bp, Homo sapien
caatccacggagacccaccctgttt

SEQ ID NO: 3811582 - DNA, 25 bp, Homo sapien
ctcttcaacggtttttcatcccttg

SEQ ID NO: 3811583 - DNA, 25 bp, Homo sapien
gcctgaaggatagatttacgcattt

SEQ ID NO: 3811584 - DNA, 25 bp, Homo sapien
cagacactctctggcgttaattcac

SEQ ID NO: 3811585 - DNA, 25 bp, Homo sapien
tctggcgttaattcactgggtgccc

SEQ ID NO: 3811586 - DNA, 25 bp, Homo sapien
cacaaaggccgctggcgagaggctt

SEQ ID NO: 3811587 - DNA, 25 bp, Homo sapien
cccagacagttaccgcacaggtgct

SEQ ID NO: 3811588 - DNA, 25 bp, Homo sapien
caaggagacccttgcaggctggtgt

SEQ ID NO: 3811589 - DNA, 25 bp, Homo sapien
ccagtgggcactgccggtacagcag

SEQ ID NO: 3811590 - DNA, 25 bp, Homo sapien
ggctggtgtgcaatcacgctgcccc

SEQ ID NO: 3811591 - DNA, 25 bp, Homo sapien
ctgccaactgaaaagaaagccaagg

SEQ ID NO: 3811592 - DNA, 25 bp, Homo sapien
gaatcagcacctctgcatcaggccg

SEQ ID NO: 3811593 - DNA, 25 bp, Homo sapien
aagggcagagcaaatggggaatcag

SEQ ID NO: 3811594 - DNA, 25 bp, Homo sapien
ggcagagcaaatggggaatcagcac

SEQ ID NO: 3811595 - DNA, 25 bp, Homo sapien
atcaggccggcagtttggaaagcac

SEQ ID NO: 3811596 - DNA, 25 bp, Homo sapien
cagaaaggcacagtcctacctgggc

SEQ ID NO: 3811597 - DNA, 25 bp, Homo sapien
ggcacagtcctacctgggctaacgt

SEQ ID NO: 3811598 - DNA, 25 bp, Homo sapien
tggggcttggcctatctttgcttct

SEQ ID NO: 3811599 - DNA, 25 bp, Homo sapien
ggactggggcttggcctatctttgc

SEQ ID NO: 3811600 - DNA, 25 bp, Homo sapien
gcccctcgccctgtaagcacggccc

SEQ ID NO: 3811601 - DNA, 25 bp, Homo sapien
cctcgccctgtaagcacggcccctg

SEQ ID NO: 3811602 - DNA, 25 bp, Homo sapien
ccctcgccctgtaagcacggcccct

SEQ ID NO: 3811603 - DNA, 25 bp, Homo sapien
ctcgccctgtaagcacggcccctgt

SEQ ID NO: 3811604 - DNA, 25 bp, Homo sapien
cctgggtacatgggatccccgccca

SEQ ID NO: 3811605 - DNA, 25 bp, Homo sapien
ggatccccgcccacccaaggctcat

SEQ ID NO: 3811606 - DNA, 25 bp, Homo sapien
ctgggtacatgggatccccgcccac

SEQ ID NO: 3811607 - DNA, 25 bp, Homo sapien
agagcacaccgcacacagtagtatg

SEQ ID NO: 3811608 - DNA, 25 bp, Homo sapien
cattacttagatgggagcgtttccc

SEQ ID NO: 3811609 - DNA, 25 bp, Homo sapien
cataagctggagtctaagcccatga

SEQ ID NO: 3811610 - DNA, 25 bp, Homo sapien
taattgcttttcgtgtgcgtgagac

SEQ ID NO: 3811611 - DNA, 25 bp, Homo sapien
tccagaagaccctgagatagcctca

SEQ ID NO: 3811612 - DNA, 25 bp, Homo sapien
tacgttgcttcacattaagacagag

SEQ ID NO: 3811613 - DNA, 25 bp, Homo sapien
taagacagaggtgcattaacagaaa

SEQ ID NO: 3811614 - DNA, 25 bp, Homo sapien
ttacttggagatgtgattacagggc

SEQ ID NO: 3811615 - DNA, 25 bp, Homo sapien
gtaaacattattccactactggctc

SEQ ID NO: 3811616 - DNA, 25 bp, Homo sapien
actactgtaaacattattccactac

SEQ ID NO: 3811617 - DNA, 25 bp, Homo sapien
tggctcctgggaaagaatttgcaaa

SEQ ID NO: 3811618 - DNA, 25 bp, Homo sapien
ttattccactactggctcctgggaa

SEQ ID NO: 3811619 - DNA, 25 bp, Homo sapien
ctgaaatgcacagcaaaaccgggca

SEQ ID NO: 3811620 - DNA, 25 bp, Homo sapien
gcagccctcatcacacggatgctga

SEQ ID NO: 3811621 - DNA, 25 bp, Homo sapien
caaaaccgggcaaatagccatgcat

SEQ ID NO: 3811622 - DNA, 25 bp, Homo sapien
gaataaagtgtatctgtcatccgct

SEQ ID NO: 3811623 - DNA, 25 bp, Homo sapien
tgaatgcacaccaacgcatgtgtga

SEQ ID NO: 3811624 - DNA, 25 bp, Homo sapien
cagcaaccactaggcatccttttgg

SEQ ID NO: 3811625 - DNA, 25 bp, Homo sapien
tcagtaccaaataggatagcaattc

SEQ ID NO: 3811626 - DNA, 25 bp, Homo sapien
gaatggacaattctcagggttagaa

SEQ ID NO: 3811627 - DNA, 25 bp, Homo sapien
cttgaaagccccactggaaagaagg

SEQ ID NO: 3811628 - DNA, 25 bp, Homo sapien
tgaaagccccactggaaagaaggtc

SEQ ID NO: 3811629 - DNA, 25 bp, Homo sapien
ccccactggaaagaaggtcctgcag

SEQ ID NO: 3811630 - DNA, 25 bp, Homo sapien
aagccccactggaaagaaggtcctg

SEQ ID NO: 3811631 - DNA, 25 bp, Homo sapien
tgtatcattctgatggacttctaca

SEQ ID NO: 3811632 - DNA, 25 bp, Homo sapien
gattgtatcattctgatggacttct

SEQ ID NO: 3811633 - DNA, 25 bp, Homo sapien
tatcattctgatggacttctacatc

SEQ ID NO: 3811634 - DNA, 25 bp, Homo sapien
tcagattgtatcattctgatggact

SEQ ID NO: 3811635 - DNA, 25 bp, Homo sapien
gagattccttataacttccatagtc

SEQ ID NO: 3811636 - DNA, 25 bp, Homo sapien
tccttataacttccatagtccttaa

SEQ ID NO: 3811637 - DNA, 25 bp, Homo sapien
gattccttataacttccatagtcct

SEQ ID NO: 3811638 - DNA, 25 bp, Homo sapien
tgagattccttataacttccatagt

SEQ ID NO: 3811639 - DNA, 25 bp, Homo sapien
tacagaggcccacccattccctagt

SEQ ID NO: 3811640 - DNA, 25 bp, Homo sapien
attacagaggcccacccattcccta

SEQ ID NO: 3811641 - DNA, 25 bp, Homo sapien
cagaggcccacccattccctagttt

SEQ ID NO: 3811642 - DNA, 25 bp, Homo sapien
gtattacagaggcccacccattccc

SEQ ID NO: 3811643 - DNA, 25 bp, Homo sapien
ggcctccaccaacttcacacacaca

SEQ ID NO: 3811644 - DNA, 25 bp, Homo sapien
ttaggctaatctggtgttcagcaca

SEQ ID NO: 3811645 - DNA, 25 bp, Homo sapien
acatgggcctccaccaacttcacac

SEQ ID NO: 3811646 - DNA, 25 bp, Homo sapien
agcacatgggcctccaccaacttca

SEQ ID NO: 3811647 - DNA, 25 bp, Homo sapien
acttgtctaaggctctggcggctcc

SEQ ID NO: 3811648 - DNA, 25 bp, Homo sapien
gctctggcggctccgcgaatctcat

SEQ ID NO: 3811649 - DNA, 25 bp, Homo sapien
ccgcgaatctcatgtgctgggccat

SEQ ID NO: 3811650 - DNA, 25 bp, Homo sapien
aaagcagtgttaacaaccatcacac

SEQ ID NO: 3811651 - DNA, 25 bp, Homo sapien
ccacaggtaacgagtgatgccccat

SEQ ID NO: 3811652 - DNA, 25 bp, Homo sapien
gccacaggtaacgagtgatgcccca

SEQ ID NO: 3811653 - DNA, 25 bp, Homo sapien
cttgaacgcacccaagcctccgcct

SEQ ID NO: 3811654 - DNA, 25 bp, Homo sapien
ttgaacgcacccaagcctccgcctc

SEQ ID NO: 3811655 - DNA, 25 bp, Homo sapien
aacgcacccaagcctccgcctccat

SEQ ID NO: 3811656 - DNA, 25 bp, Homo sapien
tgaacgcacccaagcctccgcctcc

SEQ ID NO: 3811657 - DNA, 25 bp, Homo sapien
tacaaactagctccaaaaatatcaa

SEQ ID NO: 3811658 - DNA, 25 bp, Homo sapien
tatatattgattgtatagcctaaac

SEQ ID NO: 3811659 - DNA, 25 bp, Homo sapien
ttacagtcatatatccagtagcttc

SEQ ID NO: 3811660 - DNA, 25 bp, Homo sapien
cattttatgtgcagggtaatcttta

SEQ ID NO: 3811661 - DNA, 25 bp, Homo sapien
tctgaagtggctctcttgaggttca

SEQ ID NO: 3811662 - DNA, 25 bp, Homo sapien
tgaagtggctctcttgaggttcaat

SEQ ID NO: 3811663 - DNA, 25 bp, Homo sapien
ctgaagtggctctcttgaggttcaa

SEQ ID NO: 3811664 - DNA, 25 bp, Homo sapien
ctctttgcaggtttccccttcgctc

SEQ ID NO: 3811665 - DNA, 25 bp, Homo sapien
tttgcaggtttccccttcgctctgt

SEQ ID NO: 3811666 - DNA, 25 bp, Homo sapien
agaaaaagagtaatacctctttgca

SEQ ID NO: 3811667 - DNA, 25 bp, Homo sapien
cagaaaaagagtaatacctctttgc

SEQ ID NO: 3811668 - DNA, 25 bp, Homo sapien
tggaaacgatggacactggcgactc

SEQ ID NO: 3811669 - DNA, 25 bp, Homo sapien
taacaaaatgcctgatagtggacgg

SEQ ID NO: 3811670 - DNA, 25 bp, Homo sapien
tgggaccttattcttgccgagcaca

SEQ ID NO: 3811671 - DNA, 25 bp, Homo sapien
tatagcacacattcagacgcaagga

SEQ ID NO: 3811672 - DNA, 25 bp, Homo sapien
cagagtaaaccggtggcttaaacat

SEQ ID NO: 3811673 - DNA, 25 bp, Homo sapien
gcaaaaaacagtacgctggtcacca

SEQ ID NO: 3811674 - DNA, 25 bp, Homo sapien
ggtcaccatgtaacaccctaggcag

SEQ ID NO: 3811675 - DNA, 25 bp, Homo sapien
gagagggaggccacttagctttgat

SEQ ID NO: 3811676 - DNA, 25 bp, Homo sapien
tcctggccctacacgattctcatgc

SEQ ID NO: 3811677 - DNA, 25 bp, Homo sapien
ctggccctacacgattctcatgcct

SEQ ID NO: 3811678 - DNA, 25 bp, Homo sapien
cgcctcctggccctacacgattctc

SEQ ID NO: 3811679 - DNA, 25 bp, Homo sapien
cctcctggccctacacgattctcat

SEQ ID NO: 3811680 - DNA, 25 bp, Homo sapien
tattaccataagaggcaccaaaaca

SEQ ID NO: 3811681 - DNA, 25 bp, Homo sapien
tgtaagttagagactatacccaggg

SEQ ID NO: 3811682 - DNA, 25 bp, Homo sapien
caacatcagtatgtaagttagagac

SEQ ID NO: 3811683 - DNA, 25 bp, Homo sapien
gcatgttcctaacctgaaaattctg

SEQ ID NO: 3811684 - DNA, 25 bp, Homo sapien
gaagtgcttgatattacatctctga

SEQ ID NO: 3811685 - DNA, 25 bp, Homo sapien
tcaccttcagcaccaaagatagtaa

SEQ ID NO: 3811686 - DNA, 25 bp, Homo sapien
catccaagaacgacaaaggaagtgc

SEQ ID NO: 3811687 - DNA, 25 bp, Homo sapien
caagaaacagatagtgcaaggcatc

SEQ ID NO: 3811688 - DNA, 25 bp, Homo sapien
tacgccccttacaatcagtctcagg

SEQ ID NO: 3811689 - DNA, 25 bp, Homo sapien
aacagtctcgttaggttgcccaggc

SEQ ID NO: 3811690 - DNA, 25 bp, Homo sapien
tgtagaaacagtctcgttaggttgc

SEQ ID NO: 3811691 - DNA, 25 bp, Homo sapien
tgcccaagcttgagtagagcagcgt

SEQ ID NO: 3811692 - DNA, 25 bp, Homo sapien
ccatgacaggtgcaacagtgaatct

SEQ ID NO: 3811693 - DNA, 25 bp, Homo sapien
aatgtattcctgacccacaggagcc

SEQ ID NO: 3811694 - DNA, 25 bp, Homo sapien
aagatatgcaccaactctcagccag

SEQ ID NO: 3811695 - DNA, 25 bp, Homo sapien
ccaggcatgatgctaactgtcagga

SEQ ID NO: 3811696 - DNA, 25 bp, Homo sapien
tgcattcagaacaggttccccagga

SEQ ID NO: 3811697 - DNA, 25 bp, Homo sapien
aatgcattcagaacaggttccccag

SEQ ID NO: 3811698 - DNA, 25 bp, Homo sapien
atgcattcagaacaggttccccagg

SEQ ID NO: 3811699 - DNA, 25 bp, Homo sapien
gcattcagaacaggttccccaggac

SEQ ID NO: 3811700 - DNA, 25 bp, Homo sapien
tccatgttccaagcgatgcacctgt

SEQ ID NO: 3811701 - DNA, 25 bp, Homo sapien
tttatcgtctgctacatcacaaaga

SEQ ID NO: 3811702 - DNA, 25 bp, Homo sapien
cacaaagaatgtcatcaaggtctag

SEQ ID NO: 3811703 - DNA, 25 bp, Homo sapien
gatgcacctgtatccagtagtttgg

SEQ ID NO: 3811704 - DNA, 25 bp, Homo sapien
tgagtccccaaagaatgaagtccca

SEQ ID NO: 3811705 - DNA, 25 bp, Homo sapien
tgtcccctggccacttagaatagcc

SEQ ID NO: 3811706 - DNA, 25 bp, Homo sapien
catctccagatgtgttgagtcccca

SEQ ID NO: 3811707 - DNA, 25 bp, Homo sapien
tgaataagaaagaggtgtcccctgg

SEQ ID NO: 3811708 - DNA, 25 bp, Homo sapien
ggagagccctgaacatcagtctact

SEQ ID NO: 3811709 - DNA, 25 bp, Homo sapien
cagcagcagtctgcaggagagccct

SEQ ID NO: 3811710 - DNA, 25 bp, Homo sapien
cagtctactggatgctgtagcccaa

SEQ ID NO: 3811711 - DNA, 25 bp, Homo sapien
tgacaacaacgtaactgcggagcaa

SEQ ID NO: 3811712 - DNA, 25 bp, Homo sapien
tattagactctaggcatttcgaggc

SEQ ID NO: 3811713 - DNA, 25 bp, Homo sapien
ggccttttcagcacccgatatctga

SEQ ID NO: 3811714 - DNA, 25 bp, Homo sapien
caacattcaacatgtcaacccggag

SEQ ID NO: 3811715 - DNA, 25 bp, Homo sapien
ccggagacaatacaagatccttgca

SEQ ID NO: 3811716 - DNA, 25 bp, Homo sapien
accactgtctgtgttcataaagaaa

SEQ ID NO: 3811717 - DNA, 25 bp, Homo sapien
aaaatagatcacttgaatccgcacc

SEQ ID NO: 3811718 - DNA, 25 bp, Homo sapien
cttgaatccgcaccactgtctgtgt

SEQ ID NO: 3811719 - DNA, 25 bp, Homo sapien
ttttcatcagcagacaaagctataa

SEQ ID NO: 3811720 - DNA, 25 bp, Homo sapien
taacaacagtcagaagccaaaagct

SEQ ID NO: 3811721 - DNA, 25 bp, Homo sapien
tattgacctggtcccaagaatacgg

SEQ ID NO: 3811722 - DNA, 25 bp, Homo sapien
gagccgattttaccacagaggtgaa

SEQ ID NO: 3811723 - DNA, 25 bp, Homo sapien
cagctgaagtggtgcggttacctcc

SEQ ID NO: 3811724 - DNA, 25 bp, Homo sapien
taggcaccaacctagcagcagaatc

SEQ ID NO: 3811725 - DNA, 25 bp, Homo sapien
tcagaactgccattgagaatgccca

SEQ ID NO: 3811726 - DNA, 25 bp, Homo sapien
cagacactggcacctagtttggact

SEQ ID NO: 3811727 - DNA, 25 bp, Homo sapien
gagactctggactgcctcatacagg

SEQ ID NO: 3811728 - DNA, 25 bp, Homo sapien
ctccgtgcaagttcatggagaaggg

SEQ ID NO: 3811729 - DNA, 25 bp, Homo sapien
gcgactccgtgcaagttcatggaga

SEQ ID NO: 3811730 - DNA, 25 bp, Homo sapien
cagcgactccgtgcaagttcatgga

SEQ ID NO: 3811731 - DNA, 25 bp, Homo sapien
gccagcgactccgtgcaagttcatg

SEQ ID NO: 3811732 - DNA, 25 bp, Homo sapien
aagaggcagtcccattgcagctggc

SEQ ID NO: 3811733 - DNA, 25 bp, Homo sapien
cagtgaattcaaggagacaaggatg

SEQ ID NO: 3811734 - DNA, 25 bp, Homo sapien
tgcaggagagggctccgacagccct

SEQ ID NO: 3811735 - DNA, 25 bp, Homo sapien
agacagcagtgaattcaaggagaca

SEQ ID NO: 3811736 - DNA, 25 bp, Homo sapien
aagagaatgccctgctgtcagcaca

SEQ ID NO: 3811737 - DNA, 25 bp, Homo sapien
gaagaaagggaatatctaattctca

SEQ ID NO: 3811738 - DNA, 25 bp, Homo sapien
cacagaacaaagagaatgccctgct

SEQ ID NO: 3811739 - DNA, 25 bp, Homo sapien
aatatctaattctcatttaggtggg

SEQ ID NO: 3811740 - DNA, 25 bp, Homo sapien
atcctgggatcctattgtccctcat

SEQ ID NO: 3811741 - DNA, 25 bp, Homo sapien
gatgatcctgggatcctattgtccc

SEQ ID NO: 3811742 - DNA, 25 bp, Homo sapien
ggagcagatgatcctgggatcctat

SEQ ID NO: 3811743 - DNA, 25 bp, Homo sapien
gcttctgtggagcagatgatcctgg

SEQ ID NO: 3811744 - DNA, 25 bp, Homo sapien
tccctctggccaaatggctctccat

SEQ ID NO: 3811745 - DNA, 25 bp, Homo sapien
atctccctctggccaaatggctctc

SEQ ID NO: 3811746 - DNA, 25 bp, Homo sapien
ccatctccctctggccaaatggctc

SEQ ID NO: 3811747 - DNA, 25 bp, Homo sapien
cgcccatctccctctggccaaatgg

SEQ ID NO: 3811748 - DNA, 25 bp, Homo sapien
ggcttctctgaacaaattggacagg

SEQ ID NO: 3811749 - DNA, 25 bp, Homo sapien
tataagcagggacctacatccttga

SEQ ID NO: 3811750 - DNA, 25 bp, Homo sapien
tcaatgaggcaaaggatgactgaca

SEQ ID NO: 3811751 - DNA, 25 bp, Homo sapien
tcagactgcgttggattacagacaa

SEQ ID NO: 3811752 - DNA, 25 bp, Homo sapien
aaaattcagagtaaacgatgcccca

SEQ ID NO: 3811753 - DNA, 25 bp, Homo sapien
taaaccagcttccttattggcagac

SEQ ID NO: 3811754 - DNA, 25 bp, Homo sapien
ggtccccagttaacctcatcagtga

SEQ ID NO: 3811755 - DNA, 25 bp, Homo sapien
gctataattatctacatgggccact

SEQ ID NO: 3811756 - DNA, 25 bp, Homo sapien
cagtgaagatgagccatagacatga

SEQ ID NO: 3811757 - DNA, 25 bp, Homo sapien
gaagaaacactagccatttgtgctg

SEQ ID NO: 3811758 - DNA, 25 bp, Homo sapien
gacatgacttctagggttcccacat

SEQ ID NO: 3811759 - DNA, 25 bp, Homo sapien
cttgatgtattggagactgggagtc

SEQ ID NO: 3811760 - DNA, 25 bp, Homo sapien
cttttctgagacagctcttatagat

SEQ ID NO: 3811761 - DNA, 25 bp, Homo sapien
ttttctgagacagctcttatagata

SEQ ID NO: 3811762 - DNA, 25 bp, Homo sapien
aagttggctctgaaccaccttttct

SEQ ID NO: 3811763 - DNA, 25 bp, Homo sapien
ttggctctgaaccaccttttctgag

SEQ ID NO: 3811764 - DNA, 25 bp, Homo sapien
tctaagcaagatgtccaaaaaccca

SEQ ID NO: 3811765 - DNA, 25 bp, Homo sapien
catactatttgtgtcccaggtaaca

SEQ ID NO: 3811766 - DNA, 25 bp, Homo sapien
tttacgaagttaggattaggtctca

SEQ ID NO: 3811767 - DNA, 25 bp, Homo sapien
taagggtgaaagctcaaatctaagc

SEQ ID NO: 3811768 - DNA, 25 bp, Homo sapien
tggcagacctccacggatactgagc

SEQ ID NO: 3811769 - DNA, 25 bp, Homo sapien
cagggcttctaggatgctggcagac

SEQ ID NO: 3811770 - DNA, 25 bp, Homo sapien
tacggcgaccaccagggctaggtct

SEQ ID NO: 3811771 - DNA, 25 bp, Homo sapien
tgccccaagtcatgctttgcagctg

SEQ ID NO: 3811772 - DNA, 25 bp, Homo sapien
ctggcacatagtggcacgttcctgt

SEQ ID NO: 3811773 - DNA, 25 bp, Homo sapien
cctggcacatagtggcacgttcctg

SEQ ID NO: 3811774 - DNA, 25 bp, Homo sapien
gaagggattgctgtttctatggttg

SEQ ID NO: 3811775 - DNA, 25 bp, Homo sapien
agcattggaagggattgctgtttct

SEQ ID NO: 3811776 - DNA, 25 bp, Homo sapien
ttcctgcagcattggaagggattgc

SEQ ID NO: 3811777 - DNA, 25 bp, Homo sapien
agggattgctgtttctatggttgaa

SEQ ID NO: 3811778 - DNA, 25 bp, Homo sapien
ggtgctcaaccagccttagggcaca

SEQ ID NO: 3811779 - DNA, 25 bp, Homo sapien
cactgggcgctggagcaaaatttta

SEQ ID NO: 3811780 - DNA, 25 bp, Homo sapien
ctgaagttctaagacagcagaggca

SEQ ID NO: 3811781 - DNA, 25 bp, Homo sapien
gggcacatcaaacaacctccagtga

SEQ ID NO: 3811782 - DNA, 25 bp, Homo sapien
cctggccaaggttttaaatcttatg

SEQ ID NO: 3811783 - DNA, 25 bp, Homo sapien
tcagggtgtcaaaccttaagattta

SEQ ID NO: 3811784 - DNA, 25 bp, Homo sapien
ttttaagacatgtttgtcagggtgt

SEQ ID NO: 3811785 - DNA, 25 bp, Homo sapien
tacttaatccaagggacaataggta

SEQ ID NO: 3811786 - DNA, 25 bp, Homo sapien
ccatccaggtggctagcgaattcct

SEQ ID NO: 3811787 - DNA, 25 bp, Homo sapien
tacaggtataagtaacgtcgcccca

SEQ ID NO: 3811788 - DNA, 25 bp, Homo sapien
ggactgaaggaacacaaccaccatg

SEQ ID NO: 3811789 - DNA, 25 bp, Homo sapien
gacaggctcatgcaagggtcttaca

SEQ ID NO: 3811790 - DNA, 25 bp, Homo sapien
gagccatgaagaattgtgccgcagc

SEQ ID NO: 3811791 - DNA, 25 bp, Homo sapien
cataatgaagtgctatacgacctct

SEQ ID NO: 3811792 - DNA, 25 bp, Homo sapien
tcccatgcaggccaggtatacactg

SEQ ID NO: 3811793 - DNA, 25 bp, Homo sapien
tgcgagacatgggaagacaccgata

SEQ ID NO: 3811794 - DNA, 25 bp, Homo sapien
gagcagaccgtttgaatcatgggaa

SEQ ID NO: 3811795 - DNA, 25 bp, Homo sapien
tccagtatgcttgctcaaaccagtg

SEQ ID NO: 3811796 - DNA, 25 bp, Homo sapien
tatacagacaattcagtggcaggag

SEQ ID NO: 3811797 - DNA, 25 bp, Homo sapien
gctcttttgtagattattctgggtg

SEQ ID NO: 3811798 - DNA, 25 bp, Homo sapien
tgctggcagccgcaaaaccaaggct

SEQ ID NO: 3811799 - DNA, 25 bp, Homo sapien
ccaggaagccggctcgaagccaaca

SEQ ID NO: 3811800 - DNA, 25 bp, Homo sapien
ctgcgtccctctcgatgctccacca

SEQ ID NO: 3811801 - DNA, 25 bp, Homo sapien
agcgtcatcaccaagcccgggacca

SEQ ID NO: 3811802 - DNA, 25 bp, Homo sapien
ggatgcatcacgtgctcgcctcgtg

SEQ ID NO: 3811803 - DNA, 25 bp, Homo sapien
gacgtgcgcccacgtgctctttgcg

SEQ ID NO: 3811804 - DNA, 25 bp, Homo sapien
gcttgctcagatatgcgccctgttc

SEQ ID NO: 3811805 - DNA, 25 bp, Homo sapien
gtgacatgcgcccaggtgctcgctt

SEQ ID NO: 3811806 - DNA, 25 bp, Homo sapien
aatctacttttgcatctccctgggt

SEQ ID NO: 3811807 - DNA, 25 bp, Homo sapien
aaaggcaccatctggacaatgcctg

SEQ ID NO: 3811808 - DNA, 25 bp, Homo sapien
ctgggttgtgggtggagaatccgca

SEQ ID NO: 3811809 - DNA, 25 bp, Homo sapien
aatccgcaaaggcaccatctggaca

SEQ ID NO: 3811810 - DNA, 25 bp, Homo sapien
tggagggcagtaggactccagggca

SEQ ID NO: 3811811 - DNA, 25 bp, Homo sapien
gaggtagtcctcttgaatacaaagc

SEQ ID NO: 3811812 - DNA, 25 bp, Homo sapien
catcctgtaggaaactaaaacttgg

SEQ ID NO: 3811813 - DNA, 25 bp, Homo sapien
gagtcaaaataggagtgctgtgcca

SEQ ID NO: 3811814 - DNA, 25 bp, Homo sapien
aatacattcctatctcccgtgctgc

SEQ ID NO: 3811815 - DNA, 25 bp, Homo sapien
gccaagatcaacttgatttgtctag

SEQ ID NO: 3811816 - DNA, 25 bp, Homo sapien
agccattctcactactcagactccc

SEQ ID NO: 3811817 - DNA, 25 bp, Homo sapien
cattctcactactcagactcccaag

SEQ ID NO: 3811818 - DNA, 25 bp, Homo sapien
acttggccaagatcaacttgatttg

SEQ ID NO: 3811819 - DNA, 25 bp, Homo sapien
ctccttcttctgcaggtgctgctgt

SEQ ID NO: 3811820 - DNA, 25 bp, Homo sapien
ggtcgcaagcgcagaagaacagatg

SEQ ID NO: 3811821 - DNA, 25 bp, Homo sapien
taacgcggttcccaatgtctagcac

SEQ ID NO: 3811822 - DNA, 25 bp, Homo sapien
tgagaacggtccatgtaacgcggtt

SEQ ID NO: 3811823 - DNA, 25 bp, Homo sapien
gaatcacgcgtgtcaggtcgcaagc

SEQ ID NO: 3811824 - DNA, 25 bp, Homo sapien
aggtccgtgaccaaggccctgcact

SEQ ID NO: 3811825 - DNA, 25 bp, Homo sapien
acctcttctccccatgtcatcacca

SEQ ID NO: 3811826 - DNA, 25 bp, Homo sapien
atcgttaataaggaccaggtccgtg

SEQ ID NO: 3811827 - DNA, 25 bp, Homo sapien
taaggaccaggtccgtgaccaaggc

SEQ ID NO: 3811828 - DNA, 25 bp, Homo sapien
gatggccttccggtagcgggtcacc

SEQ ID NO: 3811829 - DNA, 25 bp, Homo sapien
ttccggtagcgggtcaccgcctgct

SEQ ID NO: 3811830 - DNA, 25 bp, Homo sapien
cacccgggtccgtccgaagcacacg

SEQ ID NO: 3811831 - DNA, 25 bp, Homo sapien
tgaaaactttcatgtggccgtcccc

SEQ ID NO: 3811832 - DNA, 25 bp, Homo sapien
tccggccacctgttcggcgtcgcgg

SEQ ID NO: 3811833 - DNA, 25 bp, Homo sapien
ctcgcctcgcctcgcttcgcccggg

SEQ ID NO: 3811834 - DNA, 25 bp, Homo sapien
ggctgtgtggcgctggcgctcgctc

SEQ ID NO: 3811835 - DNA, 25 bp, Homo sapien
gggccgctcagctcgcatgcccggc

SEQ ID NO: 3811836 - DNA, 25 bp, Homo sapien
gacggcgcagagaaatctcacgcgg

SEQ ID NO: 3811837 - DNA, 25 bp, Homo sapien
taacgcgaatccgtgaacagtctat

SEQ ID NO: 3811838 - DNA, 25 bp, Homo sapien
aaggctgcgactccgcgatgagtga

SEQ ID NO: 3811839 - DNA, 25 bp, Homo sapien
atgtgccggcgcttaacgcagacgc

SEQ ID NO: 3811840 - DNA, 25 bp, Homo sapien
cctcgcccggctcataaaaagttct

SEQ ID NO: 3811841 - DNA, 25 bp, Homo sapien
cttaattcatgggttgaataaatta

SEQ ID NO: 3811842 - DNA, 25 bp, Homo sapien
cacctcgcccggctcataaaaagtt

SEQ ID NO: 3811843 - DNA, 25 bp, Homo sapien
aaagttcttaattcatgggttgaat

SEQ ID NO: 3811844 - DNA, 25 bp, Homo sapien
tgtgattcacagtgtacacccttta

SEQ ID NO: 3811845 - DNA, 25 bp, Homo sapien
ttggctgaggttcatatttgccgtc

SEQ ID NO: 3811846 - DNA, 25 bp, Homo sapien
ttgccgtcttcctttgaaactgtga

SEQ ID NO: 3811847 - DNA, 25 bp, Homo sapien
agcttcacaaattgcttggctgagg

SEQ ID NO: 3811848 - DNA, 25 bp, Homo sapien
ctgagggcctcttgctgtcaggcat

SEQ ID NO: 3811849 - DNA, 25 bp, Homo sapien
ggagtcagccagtagtttacagatg

SEQ ID NO: 3811850 - DNA, 25 bp, Homo sapien
gagtcagccagtagtttacagatga

SEQ ID NO: 3811851 - DNA, 25 bp, Homo sapien
tcagccagtagtttacagatgagcc

SEQ ID NO: 3811852 - DNA, 25 bp, Homo sapien
gtcagccagtagtttacagatgagc

SEQ ID NO: 3811853 - DNA, 25 bp, Homo sapien
caagaacaggggacagtgtgtgagc

SEQ ID NO: 3811854 - DNA, 25 bp, Homo sapien
agaacaggggacagtgtgtgagcca

SEQ ID NO: 3811855 - DNA, 25 bp, Homo sapien
aagaacaggggacagtgtgtgagcc

SEQ ID NO: 3811856 - DNA, 25 bp, Homo sapien
ggttctaaaacactgcgtctaccat

SEQ ID NO: 3811857 - DNA, 25 bp, Homo sapien
ctgtctccatttgaaaggttctaaa

SEQ ID NO: 3811858 - DNA, 25 bp, Homo sapien
ttgaaaggttctaaaacactgcgtc

SEQ ID NO: 3811859 - DNA, 25 bp, Homo sapien
aaacactgcgtctaccataaagctc

SEQ ID NO: 3811860 - DNA, 25 bp, Homo sapien
gagccaagactcagaacccggatgc

SEQ ID NO: 3811861 - DNA, 25 bp, Homo sapien
tcctgggttgagtgaagtgcctgga

SEQ ID NO: 3811862 - DNA, 25 bp, Homo sapien
gagtcctgggttgagtgaagtgcct

SEQ ID NO: 3811863 - DNA, 25 bp, Homo sapien
ctggaagtgagaaatagcagctata

SEQ ID NO: 3811864 - DNA, 25 bp, Homo sapien
gctgctttattcccctgaaactcat

SEQ ID NO: 3811865 - DNA, 25 bp, Homo sapien
agctgctttattcccctgaaactca

SEQ ID NO: 3811866 - DNA, 25 bp, Homo sapien
tgcacagaagcgggttctttctcca

SEQ ID NO: 3811867 - DNA, 25 bp, Homo sapien
ggagccgcagaagcgtattaacctc

SEQ ID NO: 3811868 - DNA, 25 bp, Homo sapien
attaacctcgcgaccccatgacttg

SEQ ID NO: 3811869 - DNA, 25 bp, Homo sapien
tgggcgaccgccttcatccttaata

SEQ ID NO: 3811870 - DNA, 25 bp, Homo sapien
aaacagctgaatcggggccgccatc

SEQ ID NO: 3811871 - DNA, 25 bp, Homo sapien
agcttagctcagggagccctctcct

SEQ ID NO: 3811872 - DNA, 25 bp, Homo sapien
ctctgagacagtgacccccggaggc

SEQ ID NO: 3811873 - DNA, 25 bp, Homo sapien
aaaccaccctgtagggtgcactggg

SEQ ID NO: 3811874 - DNA, 25 bp, Homo sapien
ccaaaagaggcatcttcccctgcct

SEQ ID NO: 3811875 - DNA, 25 bp, Homo sapien
ggattataggctgagatgccacact

SEQ ID NO: 3811876 - DNA, 25 bp, Homo sapien
gtcttgcggtcaccctggctgtagt

SEQ ID NO: 3811877 - DNA, 25 bp, Homo sapien
gggatcccctgagccttcccgagta

SEQ ID NO: 3811878 - DNA, 25 bp, Homo sapien
tgtgatgtatgtaggcatgcctgca

SEQ ID NO: 3811879 - DNA, 25 bp, Homo sapien
cacaaaggcttcactgtacatacgt

SEQ ID NO: 3811880 - DNA, 25 bp, Homo sapien
tacatacgttgatcaataggagtgg

SEQ ID NO: 3811881 - DNA, 25 bp, Homo sapien
gctcttcaagagtggtcagctaaca

SEQ ID NO: 3811882 - DNA, 25 bp, Homo sapien
gattatgcaaccgaagaaagacaac

SEQ ID NO: 3811883 - DNA, 25 bp, Homo sapien
tatgtggcacccagtacaatgtaca

SEQ ID NO: 3811884 - DNA, 25 bp, Homo sapien
tattttgtggtcaacctgatactcc

SEQ ID NO: 3811885 - DNA, 25 bp, Homo sapien
ttgaatgaaaagctctctctgtgcc

SEQ ID NO: 3811886 - DNA, 25 bp, Homo sapien
ttttttatttgacaagcagcagtat

SEQ ID NO: 3811887 - DNA, 25 bp, Homo sapien
tttttttttatttgacaagcagcag

SEQ ID NO: 3811888 - DNA, 25 bp, Homo sapien
ttttttttttatttgacaagcagca

SEQ ID NO: 3811889 - DNA, 25 bp, Homo sapien
tttttttatttgacaagcagcagta

SEQ ID NO: 3811890 - DNA, 25 bp, Homo sapien
caactgcaaacgtgaaggggagaaa

SEQ ID NO: 3811891 - DNA, 25 bp, Homo sapien
gtagatacaattattaggttatctg

SEQ ID NO: 3811892 - DNA, 25 bp, Homo sapien
agcatggtacccaaccgaatttcca

SEQ ID NO: 3811893 - DNA, 25 bp, Homo sapien
aatgtcataatgacatgagcttgaa

SEQ ID NO: 3811894 - DNA, 25 bp, Homo sapien
ccaaatggtgatggcaatgatcttc

SEQ ID NO: 3811895 - DNA, 25 bp, Homo sapien
caggggctgccaaatgaccaaatta

SEQ ID NO: 3811896 - DNA, 25 bp, Homo sapien
cacaggaacacaccaaatggtgatg

SEQ ID NO: 3811897 - DNA, 25 bp, Homo sapien
ccaaattatggaggcacagtcctgc

SEQ ID NO: 3811898 - DNA, 25 bp, Homo sapien
aaacctagctcttgactggctaatc

SEQ ID NO: 3811899 - DNA, 25 bp, Homo sapien
catgctgatactgggattaaaccta

SEQ ID NO: 3811900 - DNA, 25 bp, Homo sapien
gcctggctgcgttctatgtattgtt

SEQ ID NO: 3811901 - DNA, 25 bp, Homo sapien
ctgtattcatctgccgacgcctggc

SEQ ID NO: 3811902 - DNA, 25 bp, Homo sapien
tttccggtcctcatcaactgcactt

SEQ ID NO: 3811903 - DNA, 25 bp, Homo sapien
cttttcgtgctttcatgatacgaac

SEQ ID NO: 3811904 - DNA, 25 bp, Homo sapien
tgatacgaactatagcagcttggag

SEQ ID NO: 3811905 - DNA, 25 bp, Homo sapien
tgaataagggcattgtgccgaagca

SEQ ID NO: 3811906 - DNA, 25 bp, Homo sapien
tcaggcttcaaagggaagagctgtg

SEQ ID NO: 3811907 - DNA, 25 bp, Homo sapien
tgattacagaatctttcatgacgct

SEQ ID NO: 3811908 - DNA, 25 bp, Homo sapien
ggtatgcaccacaatattgagcaaa

SEQ ID NO: 3811909 - DNA, 25 bp, Homo sapien
caaatgcatactggatcaggcttca

SEQ ID NO: 3811910 - DNA, 25 bp, Homo sapien
cacattctaatggtttaagagcaaa

SEQ ID NO: 3811911 - DNA, 25 bp, Homo sapien
ctcaatgtgggaattttcggagaga

SEQ ID NO: 3811912 - DNA, 25 bp, Homo sapien
cccattattaattttgctgtgcaaa

SEQ ID NO: 3811913 - DNA, 25 bp, Homo sapien
tgtaaacacttgtaaagtccaatgc

SEQ ID NO: 3811914 - DNA, 25 bp, Homo sapien
ttctgcattgatgtagtaattttaa

SEQ ID NO: 3811915 - DNA, 25 bp, Homo sapien
tctgcattgatgtagtaattttaaa

SEQ ID NO: 3811916 - DNA, 25 bp, Homo sapien
acgaagattctgcatcaatatcttc

SEQ ID NO: 3811917 - DNA, 25 bp, Homo sapien
aaaacgaagattctgcatcaatatc

SEQ ID NO: 3811918 - DNA, 25 bp, Homo sapien
aagagtttgctgcaagcaattctgc

SEQ ID NO: 3811919 - DNA, 25 bp, Homo sapien
aatgaccaagcaaaaaagcctccac

SEQ ID NO: 3811920 - DNA, 25 bp, Homo sapien
aataagagtttgctgcaagcaattc

SEQ ID NO: 3811921 - DNA, 25 bp, Homo sapien
ctttaaataagagtttgctgcaagc

SEQ ID NO: 3811922 - DNA, 25 bp, Homo sapien
tgctaagattctgatgccagataaa

SEQ ID NO: 3811923 - DNA, 25 bp, Homo sapien
aagaaatccctattttggccaggca

SEQ ID NO: 3811924 - DNA, 25 bp, Homo sapien
ctgggcagcaaaaatagcatgtttt

SEQ ID NO: 3811925 - DNA, 25 bp, Homo sapien
tactagcctaaaattagaaaccata

SEQ ID NO: 3811926 - DNA, 25 bp, Homo sapien
aaggcaagaagaactgccatttggt

SEQ ID NO: 3811927 - DNA, 25 bp, Homo sapien
ctgaatcatggttaatcattttcac

SEQ ID NO: 3811928 - DNA, 25 bp, Homo sapien
tcacatcaagtaatgatttgattgt

SEQ ID NO: 3811929 - DNA, 25 bp, Homo sapien
ttcactgttgttaaaggcaagaaga

SEQ ID NO: 3811930 - DNA, 25 bp, Homo sapien
catatggtttgcccaaatagttcat

SEQ ID NO: 3811931 - DNA, 25 bp, Homo sapien
tacatatggtttgcccaaatagttc

SEQ ID NO: 3811932 - DNA, 25 bp, Homo sapien
gctacatatggtttgcccaaatagt

SEQ ID NO: 3811933 - DNA, 25 bp, Homo sapien
ggctacatatggtttgcccaaatag

SEQ ID NO: 3811934 - DNA, 25 bp, Homo sapien
ttttgaggccctgtctaagctgtaa

SEQ ID NO: 3811935 - DNA, 25 bp, Homo sapien
gagagacaaacaggcagacccattc

SEQ ID NO: 3811936 - DNA, 25 bp, Homo sapien
tcaagtgctgtcgatagctgggctc

SEQ ID NO: 3811937 - DNA, 25 bp, Homo sapien
cagtaacttcctagaggcaaacagg

SEQ ID NO: 3811938 - DNA, 25 bp, Homo sapien
tccttccactgaaatgttggctata

SEQ ID NO: 3811939 - DNA, 25 bp, Homo sapien
actgaaatgttggctataaaataat

SEQ ID NO: 3811940 - DNA, 25 bp, Homo sapien
ttccactgaaatgttggctataaaa

SEQ ID NO: 3811941 - DNA, 25 bp, Homo sapien
tgtaaccatgtaagtttccttccac

SEQ ID NO: 3811942 - DNA, 25 bp, Homo sapien
ccctctaatggtgcagcatcctcct

SEQ ID NO: 3811943 - DNA, 25 bp, Homo sapien
ttccctctaatggtgcagcatcctc

SEQ ID NO: 3811944 - DNA, 25 bp, Homo sapien
ttttccctctaatggtgcagcatcc

SEQ ID NO: 3811945 - DNA, 25 bp, Homo sapien
attttccctctaatggtgcagcatc

SEQ ID NO: 3811946 - DNA, 25 bp, Homo sapien
tagatacttctaatattattcaggt

SEQ ID NO: 3811947 - DNA, 25 bp, Homo sapien
ttagatacttctaatattattcagg

SEQ ID NO: 3811948 - DNA, 25 bp, Homo sapien
tactagcagttacttcacatatatt

SEQ ID NO: 3811949 - DNA, 25 bp, Homo sapien
tagcagttacttcacatatatttac

SEQ ID NO: 3811950 - DNA, 25 bp, Homo sapien
ctagcagttacttcacatatattta

SEQ ID NO: 3811951 - DNA, 25 bp, Homo sapien
tctactagcagttacttcacatata

SEQ ID NO: 3811952 - DNA, 25 bp, Homo sapien
agcctgagtaagaggccacgcacca

SEQ ID NO: 3811953 - DNA, 25 bp, Homo sapien
tgaaggagcctgagtaagaggccac

SEQ ID NO: 3811954 - DNA, 25 bp, Homo sapien
aattgcaaacgtagatgaaggagcc

SEQ ID NO: 3811955 - DNA, 25 bp, Homo sapien
gggaattgcaaacgtagatgaagga

SEQ ID NO: 3811956 - DNA, 25 bp, Homo sapien
tggtaaactcataaccacaggcttg

SEQ ID NO: 3811957 - DNA, 25 bp, Homo sapien
gaacttattgttgagatcagcgctg

SEQ ID NO: 3811958 - DNA, 25 bp, Homo sapien
tcccaaatctattactgtgtcttgg

SEQ ID NO: 3811959 - DNA, 25 bp, Homo sapien
catccgatgtagcttgctggtaaac

SEQ ID NO: 3811960 - DNA, 25 bp, Homo sapien
cccatgaattaaacgttttgccagc

SEQ ID NO: 3811961 - DNA, 25 bp, Homo sapien
cagagtccatagacatggataaccc

SEQ ID NO: 3811962 - DNA, 25 bp, Homo sapien
ggcttcttcagagtccatagacatg

SEQ ID NO: 3811963 - DNA, 25 bp, Homo sapien
acccatgaattaaacgttttgccag

SEQ ID NO: 3811964 - DNA, 25 bp, Homo sapien
tatttgaacactgtgatgaagctcg

SEQ ID NO: 3811965 - DNA, 25 bp, Homo sapien
tctgtcatccctttcgctgacttct

SEQ ID NO: 3811966 - DNA, 25 bp, Homo sapien
atgaagctcgtgagcctgtcttcca

SEQ ID NO: 3811967 - DNA, 25 bp, Homo sapien
tcttcagtaagttgtcacagtactt

SEQ ID NO: 3811968 - DNA, 25 bp, Homo sapien
tgtaatttacaactgacgtaagggc

SEQ ID NO: 3811969 - DNA, 25 bp, Homo sapien
ggttctctgtaatttacaactgacg

SEQ ID NO: 3811970 - DNA, 25 bp, Homo sapien
gacttaggttctctgtaatttacaa

SEQ ID NO: 3811971 - DNA, 25 bp, Homo sapien
tttgcaaacagacttaggttctctg

SEQ ID NO: 3811972 - DNA, 25 bp, Homo sapien
aaacagtgttgataagctgaacaaa

SEQ ID NO: 3811973 - DNA, 25 bp, Homo sapien
tccaaaactgactccacaaatagtg

SEQ ID NO: 3811974 - DNA, 25 bp, Homo sapien
aaatgctgatcaccattcaaaacag

SEQ ID NO: 3811975 - DNA, 25 bp, Homo sapien
tccaacgcactcataaaatgctgat

SEQ ID NO: 3811976 - DNA, 25 bp, Homo sapien
cggagtaagacgtacatatttgcca

SEQ ID NO: 3811977 - DNA, 25 bp, Homo sapien
tggttgctcgaaggccctcatcatg

SEQ ID NO: 3811978 - DNA, 25 bp, Homo sapien
tcctgaatcatatgaggtaaaccag

SEQ ID NO: 3811979 - DNA, 25 bp, Homo sapien
ccagtggacacagcacggagtaaga

SEQ ID NO: 3811980 - DNA, 25 bp, Homo sapien
tgctaccattcgttgttgacattca

SEQ ID NO: 3811981 - DNA, 25 bp, Homo sapien
tctcttgtcgaattatattatgaca

SEQ ID NO: 3811982 - DNA, 25 bp, Homo sapien
aacttggatgtaggtattttcgaca

SEQ ID NO: 3811983 - DNA, 25 bp, Homo sapien
gaatcaccttagtatatgaacttgg

SEQ ID NO: 3811984 - DNA, 25 bp, Homo sapien
ataaatttgaagcttcttgtttgta

SEQ ID NO: 3811985 - DNA, 25 bp, Homo sapien
atatactgtgagcagtttgattctt

SEQ ID NO: 3811986 - DNA, 25 bp, Homo sapien
gtttcagtcagaaagggagactcaa

SEQ ID NO: 3811987 - DNA, 25 bp, Homo sapien
gtttgattcttgtaataaatttgaa

SEQ ID NO: 3811988 - DNA, 25 bp, Homo sapien
caaaggagttaataaccccatggat

SEQ ID NO: 3811989 - DNA, 25 bp, Homo sapien
ttcttatactgttcaacatgaacaa

SEQ ID NO: 3811990 - DNA, 25 bp, Homo sapien
tcaacatgaacaaaggagttaataa

SEQ ID NO: 3811991 - DNA, 25 bp, Homo sapien
tcttatactgttcaacatgaacaaa

SEQ ID NO: 3811992 - DNA, 25 bp, Homo sapien
cagcattcggataaggatggcctga

SEQ ID NO: 3811993 - DNA, 25 bp, Homo sapien
tttgatttctcggagcagcattcgg

SEQ ID NO: 3811994 - DNA, 25 bp, Homo sapien
atttcctccacatatccaatgctag

SEQ ID NO: 3811995 - DNA, 25 bp, Homo sapien
agtggttcaaccatcaatttcctcc

SEQ ID NO: 3811996 - DNA, 25 bp, Homo sapien
tgaaggtccgcttctgttaatttat

SEQ ID NO: 3811997 - DNA, 25 bp, Homo sapien
tacaccaccatagccatactgaagg

SEQ ID NO: 3811998 - DNA, 25 bp, Homo sapien
caccatagccatactgaaggtccgc

SEQ ID NO: 3811999 - DNA, 25 bp, Homo sapien
tagccatactgaaggtccgcttctg

SEQ ID NO: 3812000 - DNA, 25 bp, Homo sapien
acctatgatacataacaagtacttg

SEQ ID NO: 3812001 - DNA, 25 bp, Homo sapien
catatagtctgcacccttgctgtat

SEQ ID NO: 3812002 - DNA, 25 bp, Homo sapien
ttgctgtattcttcccagtacctat

SEQ ID NO: 3812003 - DNA, 25 bp, Homo sapien
tatataagcagtccatatagtctgc

SEQ ID NO: 3812004 - DNA, 25 bp, Homo sapien
ggccacacataaagcatagatatct

SEQ ID NO: 3812005 - DNA, 25 bp, Homo sapien
aaatcttagtttctgtataaagtct

SEQ ID NO: 3812006 - DNA, 25 bp, Homo sapien
gcaaatgccgaacatgattttccaa

SEQ ID NO: 3812007 - DNA, 25 bp, Homo sapien
ccaaggggttcaggataggccacac

SEQ ID NO: 3812008 - DNA, 25 bp, Homo sapien
ggtaacagctcatttgtccacagga

SEQ ID NO: 3812009 - DNA, 25 bp, Homo sapien
tggtggttatactccagactgttcc

SEQ ID NO: 3812010 - DNA, 25 bp, Homo sapien
caactactgtgacaaggcattttgg

SEQ ID NO: 3812011 - DNA, 25 bp, Homo sapien
taggtgtttcatatgctgcctccaa

SEQ ID NO: 3812012 - DNA, 25 bp, Homo sapien
gttcttccataacattgaacatgtt

SEQ ID NO: 3812013 - DNA, 25 bp, Homo sapien
cttccataacattgaacatgttctc

SEQ ID NO: 3812014 - DNA, 25 bp, Homo sapien
gatcaagctgccattaaaaggatac

SEQ ID NO: 3812015 - DNA, 25 bp, Homo sapien
caattttagaacattgatcaagctg

SEQ ID NO: 3812016 - DNA, 25 bp, Homo sapien
gagaaacggtcattccatgttgctc

SEQ ID NO: 3812017 - DNA, 25 bp, Homo sapien
tctactactcttggtttcaaagaca

SEQ ID NO: 3812018 - DNA, 25 bp, Homo sapien
ccatgttgctctttcgacgtattcc

SEQ ID NO: 3812019 - DNA, 25 bp, Homo sapien
tccaacatgaccacggcttttattg

SEQ ID NO: 3812020 - DNA, 25 bp, Homo sapien
gtttccttctacagacagcattcag

SEQ ID NO: 3812021 - DNA, 25 bp, Homo sapien
gtttgttgtttccttctacagacag

SEQ ID NO: 3812022 - DNA, 25 bp, Homo sapien
tctgtacataaagtacaaagtttgt

SEQ ID NO: 3812023 - DNA, 25 bp, Homo sapien
taagccaaaaagttgaccatgttac

SEQ ID NO: 3812024 - DNA, 25 bp, Homo sapien
ccctaagggttgagacaagaagtct

SEQ ID NO: 3812025 - DNA, 25 bp, Homo sapien
caagaagtctagcatgcacgtagga

SEQ ID NO: 3812026 - DNA, 25 bp, Homo sapien
aaagcgtgtgaggatcttatttcac

SEQ ID NO: 3812027 - DNA, 25 bp, Homo sapien
gatactcctccccaaagctatcaat

SEQ ID NO: 3812028 - DNA, 25 bp, Homo sapien
gcggccaagatcgggttggggaggc

SEQ ID NO: 3812029 - DNA, 25 bp, Homo sapien
gagaggcggccaagatcgggttggg

SEQ ID NO: 3812030 - DNA, 25 bp, Homo sapien
gaggcggccaagatcgggttgggga

SEQ ID NO: 3812031 - DNA, 25 bp, Homo sapien
ggagaggcggccaagatcgggttgg

SEQ ID NO: 3812032 - DNA, 25 bp, Homo sapien
ctgccattactgtgcgccgaggccg

SEQ ID NO: 3812033 - DNA, 25 bp, Homo sapien
gcagcccgaaggagtgaaagacgaa

SEQ ID NO: 3812034 - DNA, 25 bp, Homo sapien
tcacagcgctgccattactgtgcgc

SEQ ID NO: 3812035 - DNA, 25 bp, Homo sapien
gcggctgtcagctcgcgttcccctg

SEQ ID NO: 3812036 - DNA, 25 bp, Homo sapien
tctgcctccggctttgcccaacaca

SEQ ID NO: 3812037 - DNA, 25 bp, Homo sapien
aaagacagcaaagtccaaggccgcc

SEQ ID NO: 3812038 - DNA, 25 bp, Homo sapien
tcacgggatccgtaaaacaatcgtc

SEQ ID NO: 3812039 - DNA, 25 bp, Homo sapien
gacgggccgatcacgggatccgtaa

SEQ ID NO: 3812040 - DNA, 25 bp, Homo sapien
acaggccgcgttacggcaagcgcag

SEQ ID NO: 3812041 - DNA, 25 bp, Homo sapien
ccgccacccggaaagcaatggtaca

SEQ ID NO: 3812042 - DNA, 25 bp, Homo sapien
cgttacggcaagcgcagggagccaa

SEQ ID NO: 3812043 - DNA, 25 bp, Homo sapien
aaagcaatggtacaggccgcgttac

SEQ ID NO: 3812044 - DNA, 25 bp, Homo sapien
tgcgaaaggccacggaaattaatat

SEQ ID NO: 3812045 - DNA, 25 bp, Homo sapien
taatattccaagtgattccttgctg

SEQ ID NO: 3812046 - DNA, 25 bp, Homo sapien
tccaagtgattccttgctgggcttg

SEQ ID NO: 3812047 - DNA, 25 bp, Homo sapien
cttcgtgtgattgcgaaaggccacg

SEQ ID NO: 3812048 - DNA, 25 bp, Homo sapien
tattctgtgggtgatagtggtacca

SEQ ID NO: 3812049 - DNA, 25 bp, Homo sapien
tctcctagacaattctggttgaaag

SEQ ID NO: 3812050 - DNA, 25 bp, Homo sapien
aaagctcagaactcatatcatattc

SEQ ID NO: 3812051 - DNA, 25 bp, Homo sapien
gaacaggttatatctttgcctctcc

SEQ ID NO: 3812052 - DNA, 25 bp, Homo sapien
ctagcttagtcaacgtggtgaaagc

SEQ ID NO: 3812053 - DNA, 25 bp, Homo sapien
actagcttagtcaacgtggtgaaag

SEQ ID NO: 3812054 - DNA, 25 bp, Homo sapien
gttccattctccccaataagctgtc

SEQ ID NO: 3812055 - DNA, 25 bp, Homo sapien
agccatgcgtggccatcaccgcaat

SEQ ID NO: 3812056 - DNA, 25 bp, Homo sapien
cattctccccaataagctgtcctgt

SEQ ID NO: 3812057 - DNA, 25 bp, Homo sapien
gcgtggccatcaccgcaatcaggat

SEQ ID NO: 3812058 - DNA, 25 bp, Homo sapien
ttttctttccatgtcgccatgggtt

SEQ ID NO: 3812059 - DNA, 25 bp, Homo sapien
ccatgtcgccatgggttttcgtcca

SEQ ID NO: 3812060 - DNA, 25 bp, Homo sapien
tttccatgtcgccatgggttttcgt

SEQ ID NO: 3812061 - DNA, 25 bp, Homo sapien
tcgccatgggttttcgtccatgtcc

SEQ ID NO: 3812062 - DNA, 25 bp, Homo sapien
agccttggaacaatcaggaatggag

SEQ ID NO: 3812063 - DNA, 25 bp, Homo sapien
atcaggaatggagagtgcctctatc

SEQ ID NO: 3812064 - DNA, 25 bp, Homo sapien
tggttttgaaagcagagtggttatg

SEQ ID NO: 3812065 - DNA, 25 bp, Homo sapien
gttttgaaagcagagtggttatgat

SEQ ID NO: 3812066 - DNA, 25 bp, Homo sapien
ctggttttgaaagcagagtggttat

SEQ ID NO: 3812067 - DNA, 25 bp, Homo sapien
ggttttgaaagcagagtggttatga

SEQ ID NO: 3812068 - DNA, 25 bp, Homo sapien
caaaaacgagcagaaagtacacagt

SEQ ID NO: 3812069 - DNA, 25 bp, Homo sapien
aaaaaatcctgtgcactccccttgg

SEQ ID NO: 3812070 - DNA, 25 bp, Homo sapien
tctaatcttccggttcatgagtgaa

SEQ ID NO: 3812071 - DNA, 25 bp, Homo sapien
cagaacaattttaggtgcacagcaa

SEQ ID NO: 3812072 - DNA, 25 bp, Homo sapien
tatctaacattggatggagtctctc

SEQ ID NO: 3812073 - DNA, 25 bp, Homo sapien
cacatagcagccgaacaaataacat

SEQ ID NO: 3812074 - DNA, 25 bp, Homo sapien
gaggtaaggctcagtttcagcttca

SEQ ID NO: 3812075 - DNA, 25 bp, Homo sapien
gaattctaaaggtccaactctctat

SEQ ID NO: 3812076 - DNA, 25 bp, Homo sapien
cagaacatggcaaaaaaacgtttgg

SEQ ID NO: 3812077 - DNA, 25 bp, Homo sapien
tcagaacatggcaaaaaaacgtttg

SEQ ID NO: 3812078 - DNA, 25 bp, Homo sapien
cagagggagacctttctcaataaat

SEQ ID NO: 3812079 - DNA, 25 bp, Homo sapien
tgacagagggagacctttctcaata

SEQ ID NO: 3812080 - DNA, 25 bp, Homo sapien
aaataacataaaatataaattgtca

SEQ ID NO: 3812081 - DNA, 25 bp, Homo sapien
taacataaaatataaattgtcatac

SEQ ID NO: 3812082 - DNA, 25 bp, Homo sapien
tagtctctgttataaaaaggttaca

SEQ ID NO: 3812083 - DNA, 25 bp, Homo sapien
agtctctgttataaaaaggttacat

SEQ ID NO: 3812084 - DNA, 25 bp, Homo sapien
tctagtctctgttataaaaaggtta

SEQ ID NO: 3812085 - DNA, 25 bp, Homo sapien
tgggctcatgcgtgtgaaatctcag

SEQ ID NO: 3812086 - DNA, 25 bp, Homo sapien
gaatgtgctgaaaaatggctgggct

SEQ ID NO: 3812087 - DNA, 25 bp, Homo sapien
tgtcaatttatgaagaccaagaact

SEQ ID NO: 3812088 - DNA, 25 bp, Homo sapien
cctgggccatagagtaagagatcct

SEQ ID NO: 3812089 - DNA, 25 bp, Homo sapien
tagcttggggttggcggcgttagga

SEQ ID NO: 3812090 - DNA, 25 bp, Homo sapien
cttagcttggggttggcggcgttag

SEQ ID NO: 3812091 - DNA, 25 bp, Homo sapien
tgacaacagccgttactctggctga

SEQ ID NO: 3812092 - DNA, 25 bp, Homo sapien
accctgaagacctgacaacagccgt

SEQ ID NO: 3812093 - DNA, 25 bp, Homo sapien
agccgttactctggctgacaagtca

SEQ ID NO: 3812094 - DNA, 25 bp, Homo sapien
tgaagacctgacaacagccgttact

SEQ ID NO: 3812095 - DNA, 25 bp, Homo sapien
tccatttcattgttggattgtggcg

SEQ ID NO: 3812096 - DNA, 25 bp, Homo sapien
cggttcggtcggctgcagcgctact

SEQ ID NO: 3812097 - DNA, 25 bp, Homo sapien
tcattgttggattgtggcgcttcac

SEQ ID NO: 3812098 - DNA, 25 bp, Homo sapien
tgtggcgcttcactcctgctggcgg

SEQ ID NO: 3812099 - DNA, 25 bp, Homo sapien
acgcccgcttcgtgcgctcagctgc

SEQ ID NO: 3812100 - DNA, 25 bp, Homo sapien
cgcctgcctcctcgcgaacttggga

SEQ ID NO: 3812101 - DNA, 25 bp, Homo sapien
ctgcctcctcgcgaacttgggacga

SEQ ID NO: 3812102 - DNA, 25 bp, Homo sapien
tcgcgaacttgggacgagttggaaa

SEQ ID NO: 3812103 - DNA, 25 bp, Homo sapien
tccagaagtaaggacctcggatttg

SEQ ID NO: 3812104 - DNA, 25 bp, Homo sapien
taaggacctcggatttgagtgcccc

SEQ ID NO: 3812105 - DNA, 25 bp, Homo sapien
aggaatccagaagtaaggacctcgg

SEQ ID NO: 3812106 - DNA, 25 bp, Homo sapien
aagtaaggacctcggatttgagtgc

SEQ ID NO: 3812107 - DNA, 25 bp, Homo sapien
gtttagacgaaagcggacgcagccc

SEQ ID NO: 3812108 - DNA, 25 bp, Homo sapien
cgcagtttagacgaaagcggacgca

SEQ ID NO: 3812109 - DNA, 25 bp, Homo sapien
agacgaaagcggacgcagcccgttt

SEQ ID NO: 3812110 - DNA, 25 bp, Homo sapien
gagcgcagtttagacgaaagcggac

SEQ ID NO: 3812111 - DNA, 25 bp, Homo sapien
ggcagagccgcgaccgctctcggaa

SEQ ID NO: 3812112 - DNA, 25 bp, Homo sapien
cctgagtcttgcctttttagggcca

SEQ ID NO: 3812113 - DNA, 25 bp, Homo sapien
agctgagtcattcggtcccgggcgc

SEQ ID NO: 3812114 - DNA, 25 bp, Homo sapien
cggaaggcgcattttcccttctgcc

SEQ ID NO: 3812115 - DNA, 25 bp, Homo sapien
gtaaggtttccagagcctgttgaat

SEQ ID NO: 3812116 - DNA, 25 bp, Homo sapien
ctggtaaggtttccagagcctgttg

SEQ ID NO: 3812117 - DNA, 25 bp, Homo sapien
ggtaaggtttccagagcctgttgaa

SEQ ID NO: 3812118 - DNA, 25 bp, Homo sapien
tggtaaggtttccagagcctgttga

SEQ ID NO: 3812119 - DNA, 25 bp, Homo sapien
gaattggtgatggatatggaatcat

SEQ ID NO: 3812120 - DNA, 25 bp, Homo sapien
tttcccagtgaattggtgatggata

SEQ ID NO: 3812121 - DNA, 25 bp, Homo sapien
tcccagtgaattggtgatggatatg

SEQ ID NO: 3812122 - DNA, 25 bp, Homo sapien
cagtgaattggtgatggatatggaa

SEQ ID NO: 3812123 - DNA, 25 bp, Homo sapien
cattctgactgattatatatagaca

SEQ ID NO: 3812124 - DNA, 25 bp, Homo sapien
ggctcaacgcctcatggtatcctga

SEQ ID NO: 3812125 - DNA, 25 bp, Homo sapien
acacgattctagctttggagcctga

SEQ ID NO: 3812126 - DNA, 25 bp, Homo sapien
tccctaaggctcaacgcctcatggt

SEQ ID NO: 3812127 - DNA, 25 bp, Homo sapien
ttcaatatacgactcatatgaccac

SEQ ID NO: 3812128 - DNA, 25 bp, Homo sapien
tcaatatacgactcatatgaccaca

SEQ ID NO: 3812129 - DNA, 25 bp, Homo sapien
ccttcaatatacgactcatatgacc

SEQ ID NO: 3812130 - DNA, 25 bp, Homo sapien
caatatacgactcatatgaccacat

SEQ ID NO: 3812131 - DNA, 25 bp, Homo sapien
tagcaggttttactggctctggaga

SEQ ID NO: 3812132 - DNA, 25 bp, Homo sapien
tcagatggagtcgtcctgacctcag

SEQ ID NO: 3812133 - DNA, 25 bp, Homo sapien
gagaaaggccaaattcagagtagca

SEQ ID NO: 3812134 - DNA, 25 bp, Homo sapien
cagccaggttgttgttcaaggtata

SEQ ID NO: 3812135 - DNA, 25 bp, Homo sapien
tctcccaagttacatgttgtgtggc

SEQ ID NO: 3812136 - DNA, 25 bp, Homo sapien
cctatgttgtaagggtgatgtccaa

SEQ ID NO: 3812137 - DNA, 25 bp, Homo sapien
gctgtgaagtaggtgataagtcgaa

SEQ ID NO: 3812138 - DNA, 25 bp, Homo sapien
tgttaaactatttcatcagcaggag

SEQ ID NO: 3812139 - DNA, 25 bp, Homo sapien
taaagggtgtcttctacataggagt

SEQ ID NO: 3812140 - DNA, 25 bp, Homo sapien
taagggaagtggttgccatccctcc

SEQ ID NO: 3812141 - DNA, 25 bp, Homo sapien
tgatagtgtctgtttcagtgcaggc

SEQ ID NO: 3812142 - DNA, 25 bp, Homo sapien
gggtgatctacctcaaaggcagtta

SEQ ID NO: 3812143 - DNA, 25 bp, Homo sapien
ttccaggctttggggaagcatatgg

SEQ ID NO: 3812144 - DNA, 25 bp, Homo sapien
ctagggttgaggatcttccaggctt

SEQ ID NO: 3812145 - DNA, 25 bp, Homo sapien
caggctttggggaagcatatggcca

SEQ ID NO: 3812146 - DNA, 25 bp, Homo sapien
tagggttgaggatcttccaggcttt

SEQ ID NO: 3812147 - DNA, 25 bp, Homo sapien
gcttctggaagagtggcttgtagac

SEQ ID NO: 3812148 - DNA, 25 bp, Homo sapien
ctggaagagtggcttgtagacactg

SEQ ID NO: 3812149 - DNA, 25 bp, Homo sapien
tgggcttctggaagagtggcttgta

SEQ ID NO: 3812150 - DNA, 25 bp, Homo sapien
tggcttgtagacactggggacgtct

SEQ ID NO: 3812151 - DNA, 25 bp, Homo sapien
catgaaatgtatccctgaagccaag

SEQ ID NO: 3812152 - DNA, 25 bp, Homo sapien
tgtacaagaagtgaggaacagcttg

SEQ ID NO: 3812153 - DNA, 25 bp, Homo sapien
ccagacctgcatgggaactcttatt

SEQ ID NO: 3812154 - DNA, 25 bp, Homo sapien
gacagcagtgctttcagccttacag

SEQ ID NO: 3812155 - DNA, 25 bp, Homo sapien
tgcaggggggaacgttgcacatctc

SEQ ID NO: 3812156 - DNA, 25 bp, Homo sapien
ctgcagtaggggaagctttgcaggg

SEQ ID NO: 3812157 - DNA, 25 bp, Homo sapien
gcgtgggatccggagctccccgcac

SEQ ID NO: 3812158 - DNA, 25 bp, Homo sapien
tgcgcgtgggatccacagcgctccc

SEQ ID NO: 3812159 - DNA, 25 bp, Homo sapien
cactgcgtgtgtctttctttgaacc

SEQ ID NO: 3812160 - DNA, 25 bp, Homo sapien
gcgtgtgggatccacagcgctcctc

SEQ ID NO: 3812161 - DNA, 25 bp, Homo sapien
gactgctgggtatagaaattcctgc

SEQ ID NO: 3812162 - DNA, 25 bp, Homo sapien
tgtgcgtgtgggatcgagttctcac

SEQ ID NO: 3812163 - DNA, 25 bp, Homo sapien
ttctctgtcctgtgtaactaggtac

SEQ ID NO: 3812164 - DNA, 25 bp, Homo sapien
tctgtcctgtgtaactaggtacttc

SEQ ID NO: 3812165 - DNA, 25 bp, Homo sapien
tctctgtcctgtgtaactaggtact

SEQ ID NO: 3812166 - DNA, 25 bp, Homo sapien
tgtcctgtgtaactaggtacttcat

SEQ ID NO: 3812167 - DNA, 25 bp, Homo sapien
tatgtacatggtttcattcatcctt

SEQ ID NO: 3812168 - DNA, 25 bp, Homo sapien
taaaatagatttgatgtcatgaagg

SEQ ID NO: 3812169 - DNA, 25 bp, Homo sapien
agctggattttattggagtttagac

SEQ ID NO: 3812170 - DNA, 25 bp, Homo sapien
gaattgatgtaacccagctggattt

SEQ ID NO: 3812171 - DNA, 25 bp, Homo sapien
tgcaggtctaaagggcctggtccca

SEQ ID NO: 3812172 - DNA, 25 bp, Homo sapien
tctgcaggtctaaagggcctggtcc

SEQ ID NO: 3812173 - DNA, 25 bp, Homo sapien
gaaaggaatcggcatttcccattct

SEQ ID NO: 3812174 - DNA, 25 bp, Homo sapien
tcatccccagggaccagttgggaaa

SEQ ID NO: 3812175 - DNA, 25 bp, Homo sapien
tccttgtgccaagggaccttgcagc

SEQ ID NO: 3812176 - DNA, 25 bp, Homo sapien
ggcactcaatctccttgtgccaagg

SEQ ID NO: 3812177 - DNA, 25 bp, Homo sapien
tcaatctccttgtgccaagggacct

SEQ ID NO: 3812178 - DNA, 25 bp, Homo sapien
tgccaagggaccttgcagcaggaag

SEQ ID NO: 3812179 - DNA, 25 bp, Homo sapien
ctctaggacatagccggaagttcat

SEQ ID NO: 3812180 - DNA, 25 bp, Homo sapien
gataaatgactctaggacatagccg

SEQ ID NO: 3812181 - DNA, 25 bp, Homo sapien
tcctgacatcctcggagataaatga

SEQ ID NO: 3812182 - DNA, 25 bp, Homo sapien
ctgtagccagtgtcttgatgacatt

SEQ ID NO: 3812183 - DNA, 25 bp, Homo sapien
aaagccatggactcaggtgccggag

SEQ ID NO: 3812184 - DNA, 25 bp, Homo sapien
gaaggccgcgatttctgttcttatg

SEQ ID NO: 3812185 - DNA, 25 bp, Homo sapien
tatctccacagacgccaaaaactgg

SEQ ID NO: 3812186 - DNA, 25 bp, Homo sapien
cggagagtgggaaagtattacagac

SEQ ID NO: 3812187 - DNA, 25 bp, Homo sapien
gccaccaggttgagagccgcctggc

SEQ ID NO: 3812188 - DNA, 25 bp, Homo sapien
caggaagatcatactgaggccacca

SEQ ID NO: 3812189 - DNA, 25 bp, Homo sapien
ggaagatcatactgaggccaccagg

SEQ ID NO: 3812190 - DNA, 25 bp, Homo sapien
aggccaccaggttgagagccgcctg

SEQ ID NO: 3812191 - DNA, 25 bp, Homo sapien
gtgcagtgaacctgtcccctccggt

SEQ ID NO: 3812192 - DNA, 25 bp, Homo sapien
tcacaacatcaagagctgaactggg

SEQ ID NO: 3812193 - DNA, 25 bp, Homo sapien
cagccaggaaatcgtgcagtgaacc

SEQ ID NO: 3812194 - DNA, 25 bp, Homo sapien
gctcttctaggttcacagccaggaa

SEQ ID NO: 3812195 - DNA, 25 bp, Homo sapien
ctaatcttctcgtatcattcccatt

SEQ ID NO: 3812196 - DNA, 25 bp, Homo sapien
gaccgtgcagccagcgttgagagct

SEQ ID NO: 3812197 - DNA, 25 bp, Homo sapien
agaggcccacgccaagcgcctgaag

SEQ ID NO: 3812198 - DNA, 25 bp, Homo sapien
aagcgcctgaaggtgccgctcccgg

SEQ ID NO: 3812199 - DNA, 25 bp, Homo sapien
gctcccggccggctttgaatgagga

SEQ ID NO: 3812200 - DNA, 25 bp, Homo sapien
cacgggttgccttatatgtgaagtt

SEQ ID NO: 3812201 - DNA, 25 bp, Homo sapien
cacaggcgtcctgtcactgaagcag

SEQ ID NO: 3812202 - DNA, 25 bp, Homo sapien
agcagggcacgggttgccttatatg

SEQ ID NO: 3812203 - DNA, 25 bp, Homo sapien
atgcacacaggcgtcctgtcactga

SEQ ID NO: 3812204 - DNA, 25 bp, Homo sapien
gaaagaataccagcttgggctacat

SEQ ID NO: 3812205 - DNA, 25 bp, Homo sapien
taacgccataccttaagcaaagggc

SEQ ID NO: 3812206 - DNA, 25 bp, Homo sapien
cagatatgtgagagcaaggcctgcc

SEQ ID NO: 3812207 - DNA, 25 bp, Homo sapien
caagtctggcatggaaagggcagcc

SEQ ID NO: 3812208 - DNA, 25 bp, Homo sapien
ttttcactgtcaacaaagtcccgtg

SEQ ID NO: 3812209 - DNA, 25 bp, Homo sapien
taactgtcacttccccgagtttgcg

SEQ ID NO: 3812210 - DNA, 25 bp, Homo sapien
caggattgaggcacgggagcctcca

SEQ ID NO: 3812211 - DNA, 25 bp, Homo sapien
ggtctctttgcgcatgtaactgtca

SEQ ID NO: 3812212 - DNA, 25 bp, Homo sapien
tggaacacaggcaaaacatatcaca

SEQ ID NO: 3812213 - DNA, 25 bp, Homo sapien
gaacacaggcaaaacatatcacacc

SEQ ID NO: 3812214 - DNA, 25 bp, Homo sapien
aacacaggcaaaacatatcacacca

SEQ ID NO: 3812215 - DNA, 25 bp, Homo sapien
ggaacacaggcaaaacatatcacac

SEQ ID NO: 3812216 - DNA, 25 bp, Homo sapien
tactaagctaccatagtacctggta

SEQ ID NO: 3812217 - DNA, 25 bp, Homo sapien
aggtactaagctaccatagtacctg

SEQ ID NO: 3812218 - DNA, 25 bp, Homo sapien
gctaccatagtacctggtagttatc

SEQ ID NO: 3812219 - DNA, 25 bp, Homo sapien
catagtacctggtagttatcttttc

SEQ ID NO: 3812220 - DNA, 25 bp, Homo sapien
gcctgcctagcagtgtactagagta

SEQ ID NO: 3812221 - DNA, 25 bp, Homo sapien
tgtttaacctgagcatatgccccag

SEQ ID NO: 3812222 - DNA, 25 bp, Homo sapien
tgtgaatactttggccatactctgc

SEQ ID NO: 3812223 - DNA, 25 bp, Homo sapien
tcagaagctagagatacagagcagg

SEQ ID NO: 3812224 - DNA, 25 bp, Homo sapien
cttctccttgatggcagagctgggc

SEQ ID NO: 3812225 - DNA, 25 bp, Homo sapien
ggccatgtgttcaccactgcagtgt

SEQ ID NO: 3812226 - DNA, 25 bp, Homo sapien
atgtgttcaccactgcagtgtgcat

SEQ ID NO: 3812227 - DNA, 25 bp, Homo sapien
agctgggccatgtgttcaccactgc

SEQ ID NO: 3812228 - DNA, 25 bp, Homo sapien
tatggctctgtctctacccatatcc

SEQ ID NO: 3812229 - DNA, 25 bp, Homo sapien
tccatatggctctgtctctacccat

SEQ ID NO: 3812230 - DNA, 25 bp, Homo sapien
tggctctgtctctacccatatccat

SEQ ID NO: 3812231 - DNA, 25 bp, Homo sapien
catatggctctgtctctacccatat

SEQ ID NO: 3812232 - DNA, 25 bp, Homo sapien
ggaagtctaagctacaactgcatga

SEQ ID NO: 3812233 - DNA, 25 bp, Homo sapien
catttcataaatcctggccagctgt

SEQ ID NO: 3812234 - DNA, 25 bp, Homo sapien
tccagggtccttgcatgaccaagca

SEQ ID NO: 3812235 - DNA, 25 bp, Homo sapien
ttatgccaggtttgagttaggacca

SEQ ID NO: 3812236 - DNA, 25 bp, Homo sapien
tgtcttcaaatatcgcagtcaatgg

SEQ ID NO: 3812237 - DNA, 25 bp, Homo sapien
tggaggaagctattgcttaattggg

SEQ ID NO: 3812238 - DNA, 25 bp, Homo sapien
tgagcaccgtttggaggaagctatt

SEQ ID NO: 3812239 - DNA, 25 bp, Homo sapien
cagtcaatggataggtgagcaccgt

SEQ ID NO: 3812240 - DNA, 25 bp, Homo sapien
gaaaccttacacacaagagtctata

SEQ ID NO: 3812241 - DNA, 25 bp, Homo sapien
gaaatgaaccactcattcatgcaac

SEQ ID NO: 3812242 - DNA, 25 bp, Homo sapien
tgcctgggaccagggacgagtacca

SEQ ID NO: 3812243 - DNA, 25 bp, Homo sapien
taatagacaaaactggacaaagcct

SEQ ID NO: 3812244 - DNA, 25 bp, Homo sapien
gatgccttttagtctaagagctagg

SEQ ID NO: 3812245 - DNA, 25 bp, Homo sapien
aatagaagctaacacgttcagtgcc

SEQ ID NO: 3812246 - DNA, 25 bp, Homo sapien
catcttggcttaagtggcagcatag

SEQ ID NO: 3812247 - DNA, 25 bp, Homo sapien
gctgagtttccaggctgcacttttc

SEQ ID NO: 3812248 - DNA, 25 bp, Homo sapien
tgttttcctctaagtgctccaggcc

SEQ ID NO: 3812249 - DNA, 25 bp, Homo sapien
catgttttcctctaagtgctccagg

SEQ ID NO: 3812250 - DNA, 25 bp, Homo sapien
ttcctctaagtgctccaggccctcc

SEQ ID NO: 3812251 - DNA, 25 bp, Homo sapien
ttttcctctaagtgctccaggccct

SEQ ID NO: 3812252 - DNA, 25 bp, Homo sapien
tgtggactgcctactaccaaggaca

SEQ ID NO: 3812253 - DNA, 25 bp, Homo sapien
caggaggagcatcagtagcacaaca

SEQ ID NO: 3812254 - DNA, 25 bp, Homo sapien
tcaggtcctgggctaacttggctca

SEQ ID NO: 3812255 - DNA, 25 bp, Homo sapien
taaatgctcgagtaaccgtcatgag

SEQ ID NO: 3812256 - DNA, 25 bp, Homo sapien
tagtcctaagtggttagctcccagc

SEQ ID NO: 3812257 - DNA, 25 bp, Homo sapien
tatagtgcatggcagctagcaggct

SEQ ID NO: 3812258 - DNA, 25 bp, Homo sapien
ttttgattcccgagtgacacagtgt

SEQ ID NO: 3812259 - DNA, 25 bp, Homo sapien
ttggagatcctgtggctagatacac

SEQ ID NO: 3812260 - DNA, 25 bp, Homo sapien
tggactgttgttgtctacccaccct

SEQ ID NO: 3812261 - DNA, 25 bp, Homo sapien
tataaagccgttcacacgatgtcca

SEQ ID NO: 3812262 - DNA, 25 bp, Homo sapien
gatgtccacacattgctgatgctag

SEQ ID NO: 3812263 - DNA, 25 bp, Homo sapien
gcaggaaaatctacacagcctcaat

SEQ ID NO: 3812264 - DNA, 25 bp, Homo sapien
ggaggagtccagacgggaggattcc

SEQ ID NO: 3812265 - DNA, 25 bp, Homo sapien
ccgtgttacaaagggagatcccatc

SEQ ID NO: 3812266 - DNA, 25 bp, Homo sapien
ataccagcccgggttacgaagcgag

SEQ ID NO: 3812267 - DNA, 25 bp, Homo sapien
tgcccgtaatcccatgggaggagtc

SEQ ID NO: 3812268 - DNA, 25 bp, Homo sapien
tgtgcacgcgtttgtcctataaaag

SEQ ID NO: 3812269 - DNA, 25 bp, Homo sapien
tcgtccttaatggagcggccagagc

SEQ ID NO: 3812270 - DNA, 25 bp, Homo sapien
tgaatgcagcccgaagccaagttgt

SEQ ID NO: 3812271 - DNA, 25 bp, Homo sapien
gattagtcaaatagcttctcccgag

SEQ ID NO: 3812272 - DNA, 25 bp, Homo sapien
cgtcctaccaacagtgtaaaaatgt

SEQ ID NO: 3812273 - DNA, 25 bp, Homo sapien
acgtcctaccaacagtgtaaaaatg

SEQ ID NO: 3812274 - DNA, 25 bp, Homo sapien
ctagtttacgtcctaccaacagtgt

SEQ ID NO: 3812275 - DNA, 25 bp, Homo sapien
tgaactagtttacgtcctaccaaca

SEQ ID NO: 3812276 - DNA, 25 bp, Homo sapien
cagctttgcaaagggctgcgttgtt

SEQ ID NO: 3812277 - DNA, 25 bp, Homo sapien
cattaggttctaagatggtgttcct

SEQ ID NO: 3812278 - DNA, 25 bp, Homo sapien
tgactccttagaactaacattaggt

SEQ ID NO: 3812279 - DNA, 25 bp, Homo sapien
gctgcgttgttccttttgactcctt

SEQ ID NO: 3812280 - DNA, 25 bp, Homo sapien
ggccaccgttctgacaatgggtggt

SEQ ID NO: 3812281 - DNA, 25 bp, Homo sapien
attggccaccgttctgacaatgggt

SEQ ID NO: 3812282 - DNA, 25 bp, Homo sapien
cattggccaccgttctgacaatggg

SEQ ID NO: 3812283 - DNA, 25 bp, Homo sapien
ttggccaccgttctgacaatgggtg

SEQ ID NO: 3812284 - DNA, 25 bp, Homo sapien
aactgacttccgcaaaacagacggg

SEQ ID NO: 3812285 - DNA, 25 bp, Homo sapien
aactaagtctcatgaggaactggac

SEQ ID NO: 3812286 - DNA, 25 bp, Homo sapien
gacagtctgtaggaactgaggcagc

SEQ ID NO: 3812287 - DNA, 25 bp, Homo sapien
gatgctgcccacgacaaacatggat

SEQ ID NO: 3812288 - DNA, 25 bp, Homo sapien
cagggattcccaagcatagtagagc

SEQ ID NO: 3812289 - DNA, 25 bp, Homo sapien
acaggaacctgctgcgtgcggtggc

SEQ ID NO: 3812290 - DNA, 25 bp, Homo sapien
gtttagtgaatggttgggacagcaa

SEQ ID NO: 3812291 - DNA, 25 bp, Homo sapien
gcatagtagagctaaaatgaattaa

SEQ ID NO: 3812292 - DNA, 25 bp, Homo sapien
gatgctgttgtgtgaatcaggctgt

SEQ ID NO: 3812293 - DNA, 25 bp, Homo sapien
gtttgagaatcctggttcaggctct

SEQ ID NO: 3812294 - DNA, 25 bp, Homo sapien
tcccctctgtgggtcgacagatgct

SEQ ID NO: 3812295 - DNA, 25 bp, Homo sapien
tgcctcctctttatatctgacatgt

SEQ ID NO: 3812296 - DNA, 25 bp, Homo sapien
ccagtttagtatggtattaggtgaa

SEQ ID NO: 3812297 - DNA, 25 bp, Homo sapien
agtttagaaacttatattatggcta

SEQ ID NO: 3812298 - DNA, 25 bp, Homo sapien
tccatttaatctttgtatgcttaga

SEQ ID NO: 3812299 - DNA, 25 bp, Homo sapien
gatgggttttgagattgtcacttct

SEQ ID NO: 3812300 - DNA, 25 bp, Homo sapien
tgaaagcattcccaggttggactgt

SEQ ID NO: 3812301 - DNA, 25 bp, Homo sapien
ctgggtgactccctccggcattgac

SEQ ID NO: 3812302 - DNA, 25 bp, Homo sapien
ttcgtggtgtttttggagtgctctc

SEQ ID NO: 3812303 - DNA, 25 bp, Homo sapien
gactgttcgcatccacatttcgtgg

SEQ ID NO: 3812304 - DNA, 25 bp, Homo sapien
actatttggcttcagaagttgttca

SEQ ID NO: 3812305 - DNA, 25 bp, Homo sapien
cactatttggcttcagaagttgttc

SEQ ID NO: 3812306 - DNA, 25 bp, Homo sapien
tgaggcttgaggtcccacttgtgac

SEQ ID NO: 3812307 - DNA, 25 bp, Homo sapien
tggaagtagtccagggccaaacatt

SEQ ID NO: 3812308 - DNA, 25 bp, Homo sapien
tattcaggccgaaatgaccttgcag

SEQ ID NO: 3812309 - DNA, 25 bp, Homo sapien
tttacatcgtggagatctgtcctgc

SEQ ID NO: 3812310 - DNA, 25 bp, Homo sapien
cttcccttgtatgtgaggttctcca

SEQ ID NO: 3812311 - DNA, 25 bp, Homo sapien
ttcccttgtatgtgaggttctccat

SEQ ID NO: 3812312 - DNA, 25 bp, Homo sapien
aaccaagtctggctgtttgtgacag

SEQ ID NO: 3812313 - DNA, 25 bp, Homo sapien
ccaagtctggctgtttgtgacaggt

SEQ ID NO: 3812314 - DNA, 25 bp, Homo sapien
caagtctggctgtttgtgacaggtg

SEQ ID NO: 3812315 - DNA, 25 bp, Homo sapien
cccaaccaagtctggctgtttgtga

SEQ ID NO: 3812316 - DNA, 25 bp, Homo sapien
gagttggtggcgtaaacaacacaca

SEQ ID NO: 3812317 - DNA, 25 bp, Homo sapien
tgggctcatctctctaccttgaagc

SEQ ID NO: 3812318 - DNA, 25 bp, Homo sapien
gactcagtgggcagaaatcaggctt

SEQ ID NO: 3812319 - DNA, 25 bp, Homo sapien
gatccttgtgattatgttgggtcca

SEQ ID NO: 3812320 - DNA, 25 bp, Homo sapien
tgacgaagtgatgtgtttcagctga

SEQ ID NO: 3812321 - DNA, 25 bp, Homo sapien
cctcctggtgacgaagtgatgtgtt

SEQ ID NO: 3812322 - DNA, 25 bp, Homo sapien
gtttcagctgatttagaatgttggc

SEQ ID NO: 3812323 - DNA, 25 bp, Homo sapien
agtgatgtgtttcagctgatttaga

SEQ ID NO: 3812324 - DNA, 25 bp, Homo sapien
gatcctcgagggcttggatctggaa

SEQ ID NO: 3812325 - DNA, 25 bp, Homo sapien
cagtcttagatcctcgagggcttgg

SEQ ID NO: 3812326 - DNA, 25 bp, Homo sapien
tcttagatcctcgagggcttggatc

SEQ ID NO: 3812327 - DNA, 25 bp, Homo sapien
tcctcgagggcttggatctggaagt

SEQ ID NO: 3812328 - DNA, 25 bp, Homo sapien
tcgtatcgtgtcagagtctctggaa

SEQ ID NO: 3812329 - DNA, 25 bp, Homo sapien
ttaacctttgtgctagagaaaaggc

SEQ ID NO: 3812330 - DNA, 25 bp, Homo sapien
agggatttcccggtaaagcatggca

SEQ ID NO: 3812331 - DNA, 25 bp, Homo sapien
gtaaagcatggcagcttttctcatc

SEQ ID NO: 3812332 - DNA, 25 bp, Homo sapien
gcatcttcttcctgagtgaactcac

SEQ ID NO: 3812333 - DNA, 25 bp, Homo sapien
ttaagcatcttcttcctgagtgaac

SEQ ID NO: 3812334 - DNA, 25 bp, Homo sapien
taagcatcttcttcctgagtgaact

SEQ ID NO: 3812335 - DNA, 25 bp, Homo sapien
agcatcttcttcctgagtgaactca

SEQ ID NO: 3812336 - DNA, 25 bp, Homo sapien
ttaaagtcacagatctttggtggat

SEQ ID NO: 3812337 - DNA, 25 bp, Homo sapien
atttaaagtcacagatctttggtgg

SEQ ID NO: 3812338 - DNA, 25 bp, Homo sapien
gatccacgtaagaatatttaaagtc

SEQ ID NO: 3812339 - DNA, 25 bp, Homo sapien
caagatccacgtaagaatatttaaa

SEQ ID NO: 3812340 - DNA, 25 bp, Homo sapien
tcctgcagctcgttttgcctccctt

SEQ ID NO: 3812341 - DNA, 25 bp, Homo sapien
ttccaccctgttgtagggacacctg

SEQ ID NO: 3812342 - DNA, 25 bp, Homo sapien
tgtagggacacctgccttgctcaca

SEQ ID NO: 3812343 - DNA, 25 bp, Homo sapien
ctggtgttgacctgaagccctcctg

SEQ ID NO: 3812344 - DNA, 25 bp, Homo sapien
tccaagagacgtggagctgtggcta

SEQ ID NO: 3812345 - DNA, 25 bp, Homo sapien
tggacccgttcttcactctccagtg

SEQ ID NO: 3812346 - DNA, 25 bp, Homo sapien
gcaacttatgtttcccctcctgtaa

SEQ ID NO: 3812347 - DNA, 25 bp, Homo sapien
cctcctgtaacgactgctgggaaac

SEQ ID NO: 3812348 - DNA, 25 bp, Homo sapien
cttggtgaccacaccatattctcct

SEQ ID NO: 3812349 - DNA, 25 bp, Homo sapien
cctgtttaggtgaccccagtggctg

SEQ ID NO: 3812350 - DNA, 25 bp, Homo sapien
caggagaaagtgtttcatcacgggc

SEQ ID NO: 3812351 - DNA, 25 bp, Homo sapien
gagaaagtgtttcatcacgggccct

SEQ ID NO: 3812352 - DNA, 25 bp, Homo sapien
catctctgaggctgggtttagggct

SEQ ID NO: 3812353 - DNA, 25 bp, Homo sapien
tagggctgggcctctccagtggctc

SEQ ID NO: 3812354 - DNA, 25 bp, Homo sapien
tttagggctgggcctctccagtggc

SEQ ID NO: 3812355 - DNA, 25 bp, Homo sapien
cttcagctgtcctgggtgcatctct

SEQ ID NO: 3812356 - DNA, 25 bp, Homo sapien
gctggcccagtgtgcgggtgttgtg

SEQ ID NO: 3812357 - DNA, 25 bp, Homo sapien
tgcggaggttttacagcatccccag

SEQ ID NO: 3812358 - DNA, 25 bp, Homo sapien
gctttgggtctgtctcagtgtgcat

SEQ ID NO: 3812359 - DNA, 25 bp, Homo sapien
catagggcccccgagagaggctttg

SEQ ID NO: 3812360 - DNA, 25 bp, Homo sapien
tctctgttgcgtgttctcggcatct

SEQ ID NO: 3812361 - DNA, 25 bp, Homo sapien
tgctctccccgtgaggctcccaagg

SEQ ID NO: 3812362 - DNA, 25 bp, Homo sapien
gctggaggtgcttgagttgctgggt

SEQ ID NO: 3812363 - DNA, 25 bp, Homo sapien
tcttcgtgctctccccgtgaggctc

SEQ ID NO: 3812364 - DNA, 25 bp, Homo sapien
cctgcagcgtgggagcagtcgctgg

SEQ ID NO: 3812365 - DNA, 25 bp, Homo sapien
aggaagccagtgggggtcccgtctg

SEQ ID NO: 3812366 - DNA, 25 bp, Homo sapien
gcctagggccccgactgtgggcaga

SEQ ID NO: 3812367 - DNA, 25 bp, Homo sapien
gattgtgatcctctcagaggactga

SEQ ID NO: 3812368 - DNA, 25 bp, Homo sapien
cattctctgcagtgagtatggggac

SEQ ID NO: 3812369 - DNA, 25 bp, Homo sapien
catggtgaggtcgtagctccctgct

SEQ ID NO: 3812370 - DNA, 25 bp, Homo sapien
ggcttgactgcccaggatgcttatc

SEQ ID NO: 3812371 - DNA, 25 bp, Homo sapien
ttgacggtaagacaactaagggcac

SEQ ID NO: 3812372 - DNA, 25 bp, Homo sapien
tggatgttcctgttgagcatggtga

SEQ ID NO: 3812373 - DNA, 25 bp, Homo sapien
acctgggtgccggcaggctgagtca

SEQ ID NO: 3812374 - DNA, 25 bp, Homo sapien
tgccggcaggctgagtcagaaaaga

SEQ ID NO: 3812375 - DNA, 25 bp, Homo sapien
tgggtgccggcaggctgagtcagaa

SEQ ID NO: 3812376 - DNA, 25 bp, Homo sapien
ggtgccggcaggctgagtcagaaaa

SEQ ID NO: 3812377 - DNA, 25 bp, Homo sapien
tgtggcagcgtgttcctgtggtctc

SEQ ID NO: 3812378 - DNA, 25 bp, Homo sapien
ccagcctagctgttgaggatttaat

SEQ ID NO: 3812379 - DNA, 25 bp, Homo sapien
tggcagcgtgttcctgtggtctcag

SEQ ID NO: 3812380 - DNA, 25 bp, Homo sapien
aggggggacatccagcctagctgtt

SEQ ID NO: 3812381 - DNA, 25 bp, Homo sapien
ggaatatcgggagttgaggaagaaa

SEQ ID NO: 3812382 - DNA, 25 bp, Homo sapien
gggaaggtgatgtactgtgtggagg

SEQ ID NO: 3812383 - DNA, 25 bp, Homo sapien
gagagagtggccgtcactaactgca

SEQ ID NO: 3812384 - DNA, 25 bp, Homo sapien
ggaggagagcgttcagcaggagaga

SEQ ID NO: 3812385 - DNA, 25 bp, Homo sapien
tacagcttttctgtcgaggaggtat

SEQ ID NO: 3812386 - DNA, 25 bp, Homo sapien
ggccctggctgattgcaaggatgac

SEQ ID NO: 3812387 - DNA, 25 bp, Homo sapien
ttcttatgctccattgtggccctgg

SEQ ID NO: 3812388 - DNA, 25 bp, Homo sapien
gtcgaggaggtatttagaatcagtc

SEQ ID NO: 3812389 - DNA, 25 bp, Homo sapien
agaaatctggatcatggtgcatcct

SEQ ID NO: 3812390 - DNA, 25 bp, Homo sapien
ggtcctatgtctgtgcttgcctgat

SEQ ID NO: 3812391 - DNA, 25 bp, Homo sapien
cagataaaatagtggaagaatcatc

SEQ ID NO: 3812392 - DNA, 25 bp, Homo sapien
gtggccctaaaagcagcgagcccta

SEQ ID NO: 3812393 - DNA, 25 bp, Homo sapien
acctaagctgaatgtgaacggagac

SEQ ID NO: 3812394 - DNA, 25 bp, Homo sapien
catggccaagtgtaaatttgcgtac

SEQ ID NO: 3812395 - DNA, 25 bp, Homo sapien
cctaaatggcaatgagtctgaattc

SEQ ID NO: 3812396 - DNA, 25 bp, Homo sapien
tgattcagaatcataccctgcagca

SEQ ID NO: 3812397 - DNA, 25 bp, Homo sapien
tggataggcctgtttgaagtcaggc

SEQ ID NO: 3812398 - DNA, 25 bp, Homo sapien
taggcctgtttgaagtcaggctgtg

SEQ ID NO: 3812399 - DNA, 25 bp, Homo sapien
cagcccagtggataggcctgtttga

SEQ ID NO: 3812400 - DNA, 25 bp, Homo sapien
cagtggataggcctgtttgaagtca

SEQ ID NO: 3812401 - DNA, 25 bp, Homo sapien
gctgaggacggccacacgggttgga

SEQ ID NO: 3812402 - DNA, 25 bp, Homo sapien
acacgggttggacaggccgcttctg

SEQ ID NO: 3812403 - DNA, 25 bp, Homo sapien
gacgaggttcaaaggacctggctga

SEQ ID NO: 3812404 - DNA, 25 bp, Homo sapien
tatgccagtgccggctctgctttgg

SEQ ID NO: 3812405 - DNA, 25 bp, Homo sapien
aagtccctgacgctgttgccaagaa

SEQ ID NO: 3812406 - DNA, 25 bp, Homo sapien
gttctttagaaagtccctgacgctg

SEQ ID NO: 3812407 - DNA, 25 bp, Homo sapien
gccaagaacctgtttgtgttaggga

SEQ ID NO: 3812408 - DNA, 25 bp, Homo sapien
cctgtttgtgttagggaaatgccta

SEQ ID NO: 3812409 - DNA, 25 bp, Homo sapien
acttgtgctgtgagcatgtatagtc

SEQ ID NO: 3812410 - DNA, 25 bp, Homo sapien
ccatgaagattccacttgtgctgtg

SEQ ID NO: 3812411 - DNA, 25 bp, Homo sapien
catgaagattccacttgtgctgtga

SEQ ID NO: 3812412 - DNA, 25 bp, Homo sapien
cctgaagattattgcattggtattg

SEQ ID NO: 3812413 - DNA, 25 bp, Homo sapien
gatcaggagccttggataggcctga

SEQ ID NO: 3812414 - DNA, 25 bp, Homo sapien
gcattggtattgtattagattaaaa

SEQ ID NO: 3812415 - DNA, 25 bp, Homo sapien
aaattggctctcgtaaactggtact

SEQ ID NO: 3812416 - DNA, 25 bp, Homo sapien
caattctcttctaggagggcagtct

SEQ ID NO: 3812417 - DNA, 25 bp, Homo sapien
aactctgaccccaattctcttctag

SEQ ID NO: 3812418 - DNA, 25 bp, Homo sapien
tgaccccaattctcttctaggaggg

SEQ ID NO: 3812419 - DNA, 25 bp, Homo sapien
tcatccagtgcccttagtgaccaac

SEQ ID NO: 3812420 - DNA, 25 bp, Homo sapien
aacttcgttttcattgactgaactg

SEQ ID NO: 3812421 - DNA, 25 bp, Homo sapien
ggaaatgaatgctgtatttttaact

SEQ ID NO: 3812422 - DNA, 25 bp, Homo sapien
ctgtctgatctgtccgtcaaatgct

SEQ ID NO: 3812423 - DNA, 25 bp, Homo sapien
ttgatacgtgttcttcctgcagaat

SEQ ID NO: 3812424 - DNA, 25 bp, Homo sapien
gtctggaaaagactggcccattgcc

SEQ ID NO: 3812425 - DNA, 25 bp, Homo sapien
cagatgtggacgttcattgtggctt

SEQ ID NO: 3812426 - DNA, 25 bp, Homo sapien
gcccatattgctaatgtgatgcaga

SEQ ID NO: 3812427 - DNA, 25 bp, Homo sapien
agcatgaaggcggatgaggcccata

SEQ ID NO: 3812428 - DNA, 25 bp, Homo sapien
tcataggcccgtgtggcccatctgc

SEQ ID NO: 3812429 - DNA, 25 bp, Homo sapien
gtcatatcgggctgtctcataggcc

SEQ ID NO: 3812430 - DNA, 25 bp, Homo sapien
cccatctgcgtggaggactggttct

SEQ ID NO: 3812431 - DNA, 25 bp, Homo sapien
agtgtggcctagtgggtcatatcgg

SEQ ID NO: 3812432 - DNA, 25 bp, Homo sapien
cagagcttcgtggaaggacactgga

SEQ ID NO: 3812433 - DNA, 25 bp, Homo sapien
tctggggttgtggatctctgacttg

SEQ ID NO: 3812434 - DNA, 25 bp, Homo sapien
tgtggatctctgacttgtggcagag

SEQ ID NO: 3812435 - DNA, 25 bp, Homo sapien
tctctgacttgtggcagagcttcgt

SEQ ID NO: 3812436 - DNA, 25 bp, Homo sapien
tctgtcccactctgtagaaaatgaa

SEQ ID NO: 3812437 - DNA, 25 bp, Homo sapien
gtcccactctgtagaaaatgaagta

SEQ ID NO: 3812438 - DNA, 25 bp, Homo sapien
gcacctctgtcccactctgtagaaa

SEQ ID NO: 3812439 - DNA, 25 bp, Homo sapien
ctctgtagaaaatgaagtagaggtt

SEQ ID NO: 3812440 - DNA, 25 bp, Homo sapien
tgatgtgttgcactacattatgatg

SEQ ID NO: 3812441 - DNA, 25 bp, Homo sapien
gctccatcataagctcaagggacta

SEQ ID NO: 3812442 - DNA, 25 bp, Homo sapien
actgtgtctggctataactgtttga

SEQ ID NO: 3812443 - DNA, 25 bp, Homo sapien
tataactgtttgactggcagcacag

SEQ ID NO: 3812444 - DNA, 25 bp, Homo sapien
ccagcggctcgcattttaattgtga

SEQ ID NO: 3812445 - DNA, 25 bp, Homo sapien
tcgttttcagctatcagaaaggcca

SEQ ID NO: 3812446 - DNA, 25 bp, Homo sapien
gaaaggccacttgttctggtgctcc

SEQ ID NO: 3812447 - DNA, 25 bp, Homo sapien
gagaccgccttcactgtgggaacca

SEQ ID NO: 3812448 - DNA, 25 bp, Homo sapien
catagaagccgtttcagcttctgtt

SEQ ID NO: 3812449 - DNA, 25 bp, Homo sapien
agaagccgtttcagcttctgttgtc

SEQ ID NO: 3812450 - DNA, 25 bp, Homo sapien
agcatagaagccgtttcagcttctg

SEQ ID NO: 3812451 - DNA, 25 bp, Homo sapien
agcagcatagaagccgtttcagctt

SEQ ID NO: 3812452 - DNA, 25 bp, Homo sapien
cagtccgatggcttccttcgggttt

SEQ ID NO: 3812453 - DNA, 25 bp, Homo sapien
gtgtcagtccgatggcttccttcgg

SEQ ID NO: 3812454 - DNA, 25 bp, Homo sapien
cgatggcttccttcgggttttgtga

SEQ ID NO: 3812455 - DNA, 25 bp, Homo sapien
gatggcttccttcgggttttgtgaa

SEQ ID NO: 3812456 - DNA, 25 bp, Homo sapien
tggaggcgggtatgctctctggcag

SEQ ID NO: 3812457 - DNA, 25 bp, Homo sapien
aggtggtgcatgcatagcatcctta

SEQ ID NO: 3812458 - DNA, 25 bp, Homo sapien
ggcttcgcctgccctttgcctttaa

SEQ ID NO: 3812459 - DNA, 25 bp, Homo sapien
catccttagtaagcctggaggcggg

SEQ ID NO: 3812460 - DNA, 25 bp, Homo sapien
ccactgtaacttctcagaagggtga

SEQ ID NO: 3812461 - DNA, 25 bp, Homo sapien
gccagggtaagaggaaggccagtga

SEQ ID NO: 3812462 - DNA, 25 bp, Homo sapien
ctgccagggtaagaggaaggccagt

SEQ ID NO: 3812463 - DNA, 25 bp, Homo sapien
cccactgtaacttctcagaagggtg

SEQ ID NO: 3812464 - DNA, 25 bp, Homo sapien
tccatacaataaccattgaagggct

SEQ ID NO: 3812465 - DNA, 25 bp, Homo sapien
tacaataaccattgaagggcttcat

SEQ ID NO: 3812466 - DNA, 25 bp, Homo sapien
cattccatacaataaccattgaagg

SEQ ID NO: 3812467 - DNA, 25 bp, Homo sapien
ttccattccatacaataaccattga

SEQ ID NO: 3812468 - DNA, 25 bp, Homo sapien
aagttgtgttcaccattcaccagtg

SEQ ID NO: 3812469 - DNA, 25 bp, Homo sapien
tggagagatacttcctgtcttcttg

SEQ ID NO: 3812470 - DNA, 25 bp, Homo sapien
tgttcaccattcaccagtgttatgg

SEQ ID NO: 3812471 - DNA, 25 bp, Homo sapien
gtcttcttgctcccattgcatctct

SEQ ID NO: 3812472 - DNA, 25 bp, Homo sapien
tcagtcccgtcgcagcctggtgctg

SEQ ID NO: 3812473 - DNA, 25 bp, Homo sapien
tgtggtcatattgtccacaggtctc

SEQ ID NO: 3812474 - DNA, 25 bp, Homo sapien
cacaggtctctctcgtgtgtacacc

SEQ ID NO: 3812475 - DNA, 25 bp, Homo sapien
tcgtgtgtacacctgcccgtccttt

SEQ ID NO: 3812476 - DNA, 25 bp, Homo sapien
caagcccgtcctgaattgtgtgcac

SEQ ID NO: 3812477 - DNA, 25 bp, Homo sapien
gcccatgcgtttttatcacaggtct

SEQ ID NO: 3812478 - DNA, 25 bp, Homo sapien
gcctgcccatgcgtttttatcacag

SEQ ID NO: 3812479 - DNA, 25 bp, Homo sapien
acatgtgagggtgtgagccaagccc

SEQ ID NO: 3812480 - DNA, 25 bp, Homo sapien
gggaatacatacttggagggagtac

SEQ ID NO: 3812481 - DNA, 25 bp, Homo sapien
tacttggagggagtactttatacca

SEQ ID NO: 3812482 - DNA, 25 bp, Homo sapien
agctaactgatcttccagtcccttg

SEQ ID NO: 3812483 - DNA, 25 bp, Homo sapien
tttataccaggactaacaagtacag

SEQ ID NO: 3812484 - DNA, 25 bp, Homo sapien
tatgggcccttggtctactgaatga

SEQ ID NO: 3812485 - DNA, 25 bp, Homo sapien
tgagtccagcctgcatacgtaaatg

SEQ ID NO: 3812486 - DNA, 25 bp, Homo sapien
ttattcatggcaaagtatgggccct

SEQ ID NO: 3812487 - DNA, 25 bp, Homo sapien
tcacctgagggtgatcaaggacaag

SEQ ID NO: 3812488 - DNA, 25 bp, Homo sapien
tacccacagcctgcacaagttgtgt

SEQ ID NO: 3812489 - DNA, 25 bp, Homo sapien
tggtgcccctgtcaggagggctctt

SEQ ID NO: 3812490 - DNA, 25 bp, Homo sapien
ggctctttccattgagcgcctctgc

SEQ ID NO: 3812491 - DNA, 25 bp, Homo sapien
tccaggtcagaaacactagccgtcc

SEQ ID NO: 3812492 - DNA, 25 bp, Homo sapien
ccctttcccacgtggatgatgacca

SEQ ID NO: 3812493 - DNA, 25 bp, Homo sapien
cacagctcccaactgacaactttta

SEQ ID NO: 3812494 - DNA, 25 bp, Homo sapien
gacaacttttactccttgggctcat

SEQ ID NO: 3812495 - DNA, 25 bp, Homo sapien
ttcccacgtggatgatgaccacagc

SEQ ID NO: 3812496 - DNA, 25 bp, Homo sapien
acacttgcaaagacatacacggaga

SEQ ID NO: 3812497 - DNA, 25 bp, Homo sapien
tgcggagagactgccctggaggccc

SEQ ID NO: 3812498 - DNA, 25 bp, Homo sapien
cagttagcaacccacttgcggagag

SEQ ID NO: 3812499 - DNA, 25 bp, Homo sapien
acttgcaaagacatacacggagatc

SEQ ID NO: 3812500 - DNA, 25 bp, Homo sapien
cttggtgctggtttaaaagccaaga

SEQ ID NO: 3812501 - DNA, 25 bp, Homo sapien
actggaaggtaaacttggtgctggt

SEQ ID NO: 3812502 - DNA, 25 bp, Homo sapien
aattgtggatcactgttactgtgac

SEQ ID NO: 3812503 - DNA, 25 bp, Homo sapien
gccaagatgagcaattgtggatcac

SEQ ID NO: 3812504 - DNA, 25 bp, Homo sapien
ctcttgaggaggagcggagaggcac

SEQ ID NO: 3812505 - DNA, 25 bp, Homo sapien
gagacataatcctgctgcttggctt

SEQ ID NO: 3812506 - DNA, 25 bp, Homo sapien
ggagagtgtgagacataatcctgct

SEQ ID NO: 3812507 - DNA, 25 bp, Homo sapien
cagagaacaagtggtcattccgcct

SEQ ID NO: 3812508 - DNA, 25 bp, Homo sapien
cataggagtagcctgtggatctttc

SEQ ID NO: 3812509 - DNA, 25 bp, Homo sapien
ttggtgagctcccataggagtagcc

SEQ ID NO: 3812510 - DNA, 25 bp, Homo sapien
catcatcagaaccatactgtggaat

SEQ ID NO: 3812511 - DNA, 25 bp, Homo sapien
tgatccctcagcctgggttgagtgg

SEQ ID NO: 3812512 - DNA, 25 bp, Homo sapien
cgagctttgcttgggggtctaacgc

SEQ ID NO: 3812513 - DNA, 25 bp, Homo sapien
tcgctgctccccgagctttgcttgg

SEQ ID NO: 3812514 - DNA, 25 bp, Homo sapien
ctaggcagcagtctgcggtccactg

SEQ ID NO: 3812515 - DNA, 25 bp, Homo sapien
agcagtctgcggtccactgcacctt

SEQ ID NO: 3812516 - DNA, 25 bp, Homo sapien
ggaggttttcacaccaggtcagtgc

SEQ ID NO: 3812517 - DNA, 25 bp, Homo sapien
gaggttttcacaccaggtcagtgca

SEQ ID NO: 3812518 - DNA, 25 bp, Homo sapien
gtggttaccacaaccccagtggctg

SEQ ID NO: 3812519 - DNA, 25 bp, Homo sapien
aggagggtgggtactcaaaagccat

SEQ ID NO: 3812520 - DNA, 25 bp, Homo sapien
acaggtccatttgtgcgtgctgggc

SEQ ID NO: 3812521 - DNA, 25 bp, Homo sapien
ggtgggtactcaaaagccatgagta

SEQ ID NO: 3812522 - DNA, 25 bp, Homo sapien
gggtactcaaaagccatgagtagtt

SEQ ID NO: 3812523 - DNA, 25 bp, Homo sapien
cattgacttgtgatgtaacaggtac

SEQ ID NO: 3812524 - DNA, 25 bp, Homo sapien
gtgagtcccaggcacacagcgagcc

SEQ ID NO: 3812525 - DNA, 25 bp, Homo sapien
caggtactttgggatcctcactggg

SEQ ID NO: 3812526 - DNA, 25 bp, Homo sapien
ccttagaagattgctctcctgaagc

SEQ ID NO: 3812527 - DNA, 25 bp, Homo sapien
gccagtctggaaatcgtacatgctc

SEQ ID NO: 3812528 - DNA, 25 bp, Homo sapien
ccagtgtaagcatgtgttccagaga

SEQ ID NO: 3812529 - DNA, 25 bp, Homo sapien
cagagatgttttctgccgcctggta

SEQ ID NO: 3812530 - DNA, 25 bp, Homo sapien
ttttctgccgcctggtagacagcca

SEQ ID NO: 3812531 - DNA, 25 bp, Homo sapien
cttacgtggcttatgtttttggctg

SEQ ID NO: 3812532 - DNA, 25 bp, Homo sapien
cctagagtgtaggttctcatttgct

SEQ ID NO: 3812533 - DNA, 25 bp, Homo sapien
gagtgtaggttctcatttgctcagc

SEQ ID NO: 3812534 - DNA, 25 bp, Homo sapien
tgtaggttctcatttgctcagctgg

SEQ ID NO: 3812535 - DNA, 25 bp, Homo sapien
tttgctcagctggattgagtttctt

SEQ ID NO: 3812536 - DNA, 25 bp, Homo sapien
ttcgaaataagagcaggtcctggac

SEQ ID NO: 3812537 - DNA, 25 bp, Homo sapien
tctgtgcccagatttcgaaataaga

SEQ ID NO: 3812538 - DNA, 25 bp, Homo sapien
gcccagatttcgaaataagagcagg

SEQ ID NO: 3812539 - DNA, 25 bp, Homo sapien
cctgcagcacaggaggtgtgccttg

SEQ ID NO: 3812540 - DNA, 25 bp, Homo sapien
ggtgatgttcctgctacagtgcact

SEQ ID NO: 3812541 - DNA, 25 bp, Homo sapien
tgtcctggccgtttgtgttcatgac

SEQ ID NO: 3812542 - DNA, 25 bp, Homo sapien
gatgttcctgctacagtgcactttg

SEQ ID NO: 3812543 - DNA, 25 bp, Homo sapien
gtcctggccgtttgtgttcatgacg

SEQ ID NO: 3812544 - DNA, 25 bp, Homo sapien
cctacacgcggtctcctctcttctt

SEQ ID NO: 3812545 - DNA, 25 bp, Homo sapien
aggggtcctacacgcggtctcctct

SEQ ID NO: 3812546 - DNA, 25 bp, Homo sapien
tggagggcggatgtatagaggaagg

SEQ ID NO: 3812547 - DNA, 25 bp, Homo sapien
gttggagggcggatgtatagaggaa

SEQ ID NO: 3812548 - DNA, 25 bp, Homo sapien
gatgttcaaacatttggctggagtc

SEQ ID NO: 3812549 - DNA, 25 bp, Homo sapien
tagagtctgcgtgttcttctgatgc

SEQ ID NO: 3812550 - DNA, 25 bp, Homo sapien
tgtttgtgggtccagtagagtctgc

SEQ ID NO: 3812551 - DNA, 25 bp, Homo sapien
aacacatagttgttttccatgaggc

SEQ ID NO: 3812552 - DNA, 25 bp, Homo sapien
ggcatgtgcctggaactaccgagta

SEQ ID NO: 3812553 - DNA, 25 bp, Homo sapien
gaaagaggttctgctgccgtaaagg

SEQ ID NO: 3812554 - DNA, 25 bp, Homo sapien
tgtagtgctgaaccaaaagtatccc

SEQ ID NO: 3812555 - DNA, 25 bp, Homo sapien
tagtttgtacccaccatggcgcaga

SEQ ID NO: 3812556 - DNA, 25 bp, Homo sapien
tcttctcagcagtgatcaacctcaa

SEQ ID NO: 3812557 - DNA, 25 bp, Homo sapien
tctcagcagtgatcaacctcaaaat

SEQ ID NO: 3812558 - DNA, 25 bp, Homo sapien
cagcagtgatcaacctcaaaatgag

SEQ ID NO: 3812559 - DNA, 25 bp, Homo sapien
cactcttctcagcagtgatcaacct

SEQ ID NO: 3812560 - DNA, 25 bp, Homo sapien
ggacttggcctggcaactgtatctg

SEQ ID NO: 3812561 - DNA, 25 bp, Homo sapien
gctgctgtctctgtgcactgtggca

SEQ ID NO: 3812562 - DNA, 25 bp, Homo sapien
ttggcctggcaactgtatctgtcct

SEQ ID NO: 3812563 - DNA, 25 bp, Homo sapien
gacttggcctggcaactgtatctgt

SEQ ID NO: 3812564 - DNA, 25 bp, Homo sapien
gtcctctcctaaagaagggtggcca

SEQ ID NO: 3812565 - DNA, 25 bp, Homo sapien
cctctcctaaagaagggtggccatg

SEQ ID NO: 3812566 - DNA, 25 bp, Homo sapien
gaggggaagtcggttgtgttctcca

SEQ ID NO: 3812567 - DNA, 25 bp, Homo sapien
tctcctaaagaagggtggccatggg

SEQ ID NO: 3812568 - DNA, 25 bp, Homo sapien
tcccaagtacagctgaatgctcagc

SEQ ID NO: 3812569 - DNA, 25 bp, Homo sapien
tctagttggccattcctggacctgg

SEQ ID NO: 3812570 - DNA, 25 bp, Homo sapien
tgggtacccagttttccgctgctgt

SEQ ID NO: 3812571 - DNA, 25 bp, Homo sapien
aatgctcagcgtggcctctagttgg

SEQ ID NO: 3812572 - DNA, 25 bp, Homo sapien
gggtgtgtgaatccactgccaagtg

SEQ ID NO: 3812573 - DNA, 25 bp, Homo sapien
ggtgtgtgaatccactgccaagtgc

SEQ ID NO: 3812574 - DNA, 25 bp, Homo sapien
tcaatgacatgaagacgtctttccc

SEQ ID NO: 3812575 - DNA, 25 bp, Homo sapien
tctgcctgtacatgaaacttgtcag

SEQ ID NO: 3812576 - DNA, 25 bp, Homo sapien
ttgagttgacggacaaccgggtgcc

SEQ ID NO: 3812577 - DNA, 25 bp, Homo sapien
tacggaaacgtactggcaatcaggc

SEQ ID NO: 3812578 - DNA, 25 bp, Homo sapien
aaccaattgccacccacggaggatg

SEQ ID NO: 3812579 - DNA, 25 bp, Homo sapien
aggcaaaccaattgccacccacgga

SEQ ID NO: 3812580 - DNA, 25 bp, Homo sapien
gcccgaagactagattgctccagct

SEQ ID NO: 3812581 - DNA, 25 bp, Homo sapien
gggcccaggcccgaagactagattg

SEQ ID NO: 3812582 - DNA, 25 bp, Homo sapien
tgtagcaacctgtcgtgctgcccaa

SEQ ID NO: 3812583 - DNA, 25 bp, Homo sapien
taaaaatagttgatgtagcaacctg

SEQ ID NO: 3812584 - DNA, 25 bp, Homo sapien
tcgtgctgcccaaggtgcgtaacct

SEQ ID NO: 3812585 - DNA, 25 bp, Homo sapien
gtaacctcatgcttgtttggaaaga

SEQ ID NO: 3812586 - DNA, 25 bp, Homo sapien
gtcagacacctctacttgacggagg

SEQ ID NO: 3812587 - DNA, 25 bp, Homo sapien
tcatgcccatcgctctggacttggc

SEQ ID NO: 3812588 - DNA, 25 bp, Homo sapien
tccattgtcgatcgggtagaaccca

SEQ ID NO: 3812589 - DNA, 25 bp, Homo sapien
cgactgtgtcacctccaatggagac

SEQ ID NO: 3812590 - DNA, 25 bp, Homo sapien
ctttgtttgtcctgcattgcacaca

SEQ ID NO: 3812591 - DNA, 25 bp, Homo sapien
gctttgtttgtcctgcattgcacac

SEQ ID NO: 3812592 - DNA, 25 bp, Homo sapien
tttgtttgtcctgcattgcacacag

SEQ ID NO: 3812593 - DNA, 25 bp, Homo sapien
tagggcattgcatgtgctgcttcct

SEQ ID NO: 3812594 - DNA, 25 bp, Homo sapien
gaaacagccctaacccggatactgc

SEQ ID NO: 3812595 - DNA, 25 bp, Homo sapien
aggcttggccccgtagtatccctag

SEQ ID NO: 3812596 - DNA, 25 bp, Homo sapien
gtagtatccctagtgccaagcacca

SEQ ID NO: 3812597 - DNA, 25 bp, Homo sapien
tgaaaggaattcttgcccgaaacca

SEQ ID NO: 3812598 - DNA, 25 bp, Homo sapien
tgaaagtgctgtactctgagagaac

SEQ ID NO: 3812599 - DNA, 25 bp, Homo sapien
tcctgagaaatggtagaaatgccct

SEQ ID NO: 3812600 - DNA, 25 bp, Homo sapien
gaagctcatgcatatcctgtccttg

SEQ ID NO: 3812601 - DNA, 25 bp, Homo sapien
gagcttggtaattgcattgctggtt

SEQ ID NO: 3812602 - DNA, 25 bp, Homo sapien
caaatgaactacctgatgctgtgag

SEQ ID NO: 3812603 - DNA, 25 bp, Homo sapien
ggaaagctctggttcgtcctcacga

SEQ ID NO: 3812604 - DNA, 25 bp, Homo sapien
tcagcagctcgaattggcagttaca

SEQ ID NO: 3812605 - DNA, 25 bp, Homo sapien
tgtttcgaaacagttggccggtgcc

SEQ ID NO: 3812606 - DNA, 25 bp, Homo sapien
tcaagctctggcttgacacgtgcag

SEQ ID NO: 3812607 - DNA, 25 bp, Homo sapien
aagctctggcttgacacgtgcagct

SEQ ID NO: 3812608 - DNA, 25 bp, Homo sapien
gctctggcttgacacgtgcagctgg

SEQ ID NO: 3812609 - DNA, 25 bp, Homo sapien
ctctggcttgacacgtgcagctggc

SEQ ID NO: 3812610 - DNA, 25 bp, Homo sapien
tagggacaaaacagatagctttctc

SEQ ID NO: 3812611 - DNA, 25 bp, Homo sapien
tattttggctgtgctgtgggataaa

SEQ ID NO: 3812612 - DNA, 25 bp, Homo sapien
tctccctgcattcgaaatgcatgct

SEQ ID NO: 3812613 - DNA, 25 bp, Homo sapien
tgggataaatgtttcctagggacaa

SEQ ID NO: 3812614 - DNA, 25 bp, Homo sapien
ttcgaggtactcaggcccatcctcg

SEQ ID NO: 3812615 - DNA, 25 bp, Homo sapien
tcagcttcgaggtactcaggcccat

SEQ ID NO: 3812616 - DNA, 25 bp, Homo sapien
tatttcagcttcgaggtactcaggc

SEQ ID NO: 3812617 - DNA, 25 bp, Homo sapien
ctgctctatttcagcttcgaggtac

SEQ ID NO: 3812618 - DNA, 25 bp, Homo sapien
ttttgtaatcataagaggattcgca

SEQ ID NO: 3812619 - DNA, 25 bp, Homo sapien
cttctgattttgtaatcataagagg

SEQ ID NO: 3812620 - DNA, 25 bp, Homo sapien
taatcataagaggattcgcaagctg

SEQ ID NO: 3812621 - DNA, 25 bp, Homo sapien
gaggattcgcaagctgagaatgcat

SEQ ID NO: 3812622 - DNA, 25 bp, Homo sapien
tggtccctttatcggattcccagca

SEQ ID NO: 3812623 - DNA, 25 bp, Homo sapien
tctctcttcctatcaagtgtgtaga

SEQ ID NO: 3812624 - DNA, 25 bp, Homo sapien
gattcccagcatgcacagaatctgc

SEQ ID NO: 3812625 - DNA, 25 bp, Homo sapien
tgtagaagtttgcatgcacttggtc

SEQ ID NO: 3812626 - DNA, 25 bp, Homo sapien
aaatgagggcctgtgtggacttcac

SEQ ID NO: 3812627 - DNA, 25 bp, Homo sapien
tgtcagctcattacccactgttgag

SEQ ID NO: 3812628 - DNA, 25 bp, Homo sapien
agcgagagacaaagaagggagccca

SEQ ID NO: 3812629 - DNA, 25 bp, Homo sapien
caaatgccttgggaagaaggccggc

SEQ ID NO: 3812630 - DNA, 25 bp, Homo sapien
accaatattgcttcgcttctttttt

SEQ ID NO: 3812631 - DNA, 25 bp, Homo sapien
tcccaagaggcaagcctttccacag

SEQ ID NO: 3812632 - DNA, 25 bp, Homo sapien
gaggcaagcctttccacagtgctcc

SEQ ID NO: 3812633 - DNA, 25 bp, Homo sapien
gaaggatgggcgttcacatttcctg

SEQ ID NO: 3812634 - DNA, 25 bp, Homo sapien
gccaccaccaaactgtgagagaact

SEQ ID NO: 3812635 - DNA, 25 bp, Homo sapien
ggacatcccctggactcagagttga

SEQ ID NO: 3812636 - DNA, 25 bp, Homo sapien
tactgacggacatcccctggactca

SEQ ID NO: 3812637 - DNA, 25 bp, Homo sapien
catcccctggactcagagttgacct

SEQ ID NO: 3812638 - DNA, 25 bp, Homo sapien
gacggacatcccctggactcagagt

SEQ ID NO: 3812639 - DNA, 25 bp, Homo sapien
tcaacacgtgggttagatgtaggcc

SEQ ID NO: 3812640 - DNA, 25 bp, Homo sapien
tagtcaatagaatttaggcaccggc

SEQ ID NO: 3812641 - DNA, 25 bp, Homo sapien
gatcggccaagaaagtagcgtccac

SEQ ID NO: 3812642 - DNA, 25 bp, Homo sapien
gtttaatccattgaagagcgcctgc

SEQ ID NO: 3812643 - DNA, 25 bp, Homo sapien
aatctcgggttctggaaacgccgca

SEQ ID NO: 3812644 - DNA, 25 bp, Homo sapien
cgtgcaatcccatcaggtggcggtc

SEQ ID NO: 3812645 - DNA, 25 bp, Homo sapien
ggagctccccgcacatcaatggagg

SEQ ID NO: 3812646 - DNA, 25 bp, Homo sapien
caacagaaattaacgcgtggcggga

SEQ ID NO: 3812647 - DNA, 25 bp, Homo sapien
gccacgtcaggccagtgctgacgtc

SEQ ID NO: 3812648 - DNA, 25 bp, Homo sapien
ctttggataagacacggagctcgcc

SEQ ID NO: 3812649 - DNA, 25 bp, Homo sapien
aagacacggagctcgccgtgcccga

SEQ ID NO: 3812650 - DNA, 25 bp, Homo sapien
gaccgccacgtcaggccagtgctga

SEQ ID NO: 3812651 - DNA, 25 bp, Homo sapien
gggagcgccaggactccagcgtctt

SEQ ID NO: 3812652 - DNA, 25 bp, Homo sapien
agcagcgggtgcacagggagcgcca

SEQ ID NO: 3812653 - DNA, 25 bp, Homo sapien
ttgccggaccagacccacacgcccg

SEQ ID NO: 3812654 - DNA, 25 bp, Homo sapien
cacagggagcgccaggactccagcg

SEQ ID NO: 3812655 - DNA, 25 bp, Homo sapien
ccagcaccgcgatggacttgacgct

SEQ ID NO: 3812656 - DNA, 25 bp, Homo sapien
aacatggtgccgatgaagaggtaga

SEQ ID NO: 3812657 - DNA, 25 bp, Homo sapien
tgttgcttgatgaccgagcggatgc

SEQ ID NO: 3812658 - DNA, 25 bp, Homo sapien
tacttgagcatgaagacggcgtagt

SEQ ID NO: 3812659 - DNA, 25 bp, Homo sapien
ccgcgcccggcgcgccaccgctgca

SEQ ID NO: 3812660 - DNA, 25 bp, Homo sapien
cccggcgcgccaccgctgcacgcca

SEQ ID NO: 3812661 - DNA, 25 bp, Homo sapien
gcgcccggcgcgccaccgctgcacg

SEQ ID NO: 3812662 - DNA, 25 bp, Homo sapien
gcccggcgcgccaccgctgcacgcc

SEQ ID NO: 3812663 - DNA, 25 bp, Homo sapien
ttctcgtggcccgccaccaggcgca

SEQ ID NO: 3812664 - DNA, 25 bp, Homo sapien
ccaccaggcgcactaggtagcccac

SEQ ID NO: 3812665 - DNA, 25 bp, Homo sapien
cttctcgtggcccgccaccaggcgc

SEQ ID NO: 3812666 - DNA, 25 bp, Homo sapien
cgccaccaggcgcactaggtagccc

SEQ ID NO: 3812667 - DNA, 25 bp, Homo sapien
ccatgtcgataaggaaggtggagac

SEQ ID NO: 3812668 - DNA, 25 bp, Homo sapien
ggtggacacgaagcagagcaccgac

SEQ ID NO: 3812669 - DNA, 25 bp, Homo sapien
gctccgggtacttgaagcgctccat

SEQ ID NO: 3812670 - DNA, 25 bp, Homo sapien
cgagaggaagataatgggccgctcc

SEQ ID NO: 3812671 - DNA, 25 bp, Homo sapien
tgaaaaaggggttgtggcagggcag

SEQ ID NO: 3812672 - DNA, 25 bp, Homo sapien
agcgcgcagttagcgatctggcctg

SEQ ID NO: 3812673 - DNA, 25 bp, Homo sapien
gttgtggcagggcagcgcgcagtta

SEQ ID NO: 3812674 - DNA, 25 bp, Homo sapien
cagggcagcgcgcagttagcgatct

SEQ ID NO: 3812675 - DNA, 25 bp, Homo sapien
tgtagagcgggtggcgctcgctgga

SEQ ID NO: 3812676 - DNA, 25 bp, Homo sapien
cgcggttgtagagcgggtggcgctc

SEQ ID NO: 3812677 - DNA, 25 bp, Homo sapien
gcgggtggcgctcgctggacacgct

SEQ ID NO: 3812678 - DNA, 25 bp, Homo sapien
cttgacgcggttgtagagcgggtgg

SEQ ID NO: 3812679 - DNA, 25 bp, Homo sapien
tggccgctgcccgaaggcggctgct

SEQ ID NO: 3812680 - DNA, 25 bp, Homo sapien
ctgggcgcggcggtggttaggtcgg

SEQ ID NO: 3812681 - DNA, 25 bp, Homo sapien
gtcggtgcggttgtagtccatgcac

SEQ ID NO: 3812682 - DNA, 25 bp, Homo sapien
tggttaggtcggtgcggttgtagtc

SEQ ID NO: 3812683 - DNA, 25 bp, Homo sapien
agcgtgtcagggttgccttgctcgg

SEQ ID NO: 3812684 - DNA, 25 bp, Homo sapien
ccggtcgcagcgcatgcggtcgggc

SEQ ID NO: 3812685 - DNA, 25 bp, Homo sapien
ttgccttgctcgggcagccggtcgc

SEQ ID NO: 3812686 - DNA, 25 bp, Homo sapien
ggcagccggtcgcagcgcatgcggt

SEQ ID NO: 3812687 - DNA, 25 bp, Homo sapien
cgcagccggccttggcgcgctcgca

SEQ ID NO: 3812688 - DNA, 25 bp, Homo sapien
catgagcggcgcgcagccggccttg

SEQ ID NO: 3812689 - DNA, 25 bp, Homo sapien
gagcggcgcgcagccggccttggcg

SEQ ID NO: 3812690 - DNA, 25 bp, Homo sapien
tggcgcatgagcggcgcgcagccgg

SEQ ID NO: 3812691 - DNA, 25 bp, Homo sapien
ggtgtagttgtagccgatgccctta

SEQ ID NO: 3812692 - DNA, 25 bp, Homo sapien
tagtcctctaggcagatgggcgtgt

SEQ ID NO: 3812693 - DNA, 25 bp, Homo sapien
tacacagcggcacggtgatctcttg

SEQ ID NO: 3812694 - DNA, 25 bp, Homo sapien
gaagaacttgagatcgggcgagcac

SEQ ID NO: 3812695 - DNA, 25 bp, Homo sapien
tgccgataatctaaccccttctagg

SEQ ID NO: 3812696 - DNA, 25 bp, Homo sapien
agtcgggcgaggtgcacacagtctc

SEQ ID NO: 3812697 - DNA, 25 bp, Homo sapien
acagtccgtaggtccgctctgctgg

SEQ ID NO: 3812698 - DNA, 25 bp, Homo sapien
ggtctcccttatgcttcgcccggga

SEQ ID NO: 3812699 - DNA, 25 bp, Homo sapien
tttccagagggcgagtctccagaac

SEQ ID NO: 3812700 - DNA, 25 bp, Homo sapien
tccagaacgcatcagctgcaggtaa

SEQ ID NO: 3812701 - DNA, 25 bp, Homo sapien
ggtaattgccagaggttccagtgct

SEQ ID NO: 3812702 - DNA, 25 bp, Homo sapien
gaaattcactatctctgcggttggc

SEQ ID NO: 3812703 - DNA, 25 bp, Homo sapien
ggcaggcccatgctcactttacatg

SEQ ID NO: 3812704 - DNA, 25 bp, Homo sapien
tgctgctttggaatacggcgaccgc

SEQ ID NO: 3812705 - DNA, 25 bp, Homo sapien
catgaaactcaattgaagtgctgct

SEQ ID NO: 3812706 - DNA, 25 bp, Homo sapien
gcacatggatggagataacaggccc

SEQ ID NO: 3812707 - DNA, 25 bp, Homo sapien
tcagagggttgagtaaataacagct

SEQ ID NO: 3812708 - DNA, 25 bp, Homo sapien
gaacctcagagggttgagtaaataa

SEQ ID NO: 3812709 - DNA, 25 bp, Homo sapien
ccagaacctcagagggttgagtaaa

SEQ ID NO: 3812710 - DNA, 25 bp, Homo sapien
ggttgagtaaataacagcttccaag

SEQ ID NO: 3812711 - DNA, 25 bp, Homo sapien
gacacactcttaactggatggcttc

SEQ ID NO: 3812712 - DNA, 25 bp, Homo sapien
ccagtaaggaattgagcaatttgcc

SEQ ID NO: 3812713 - DNA, 25 bp, Homo sapien
caaggtagctctcagtgggtaatgc

SEQ ID NO: 3812714 - DNA, 25 bp, Homo sapien
gatggtcctcatatctgggaagagc

SEQ ID NO: 3812715 - DNA, 25 bp, Homo sapien
cctgatccagtaccaatcgagccct

SEQ ID NO: 3812716 - DNA, 25 bp, Homo sapien
tgatccagtaccaatcgagccctgt

SEQ ID NO: 3812717 - DNA, 25 bp, Homo sapien
gatccagtaccaatcgagccctgtc

SEQ ID NO: 3812718 - DNA, 25 bp, Homo sapien
tttcctgatccagtaccaatcgagc

SEQ ID NO: 3812719 - DNA, 25 bp, Homo sapien
tgccgaaaagaactacgcgagcttg

SEQ ID NO: 3812720 - DNA, 25 bp, Homo sapien
aatcacggtaccgtcttcctccagg

SEQ ID NO: 3812721 - DNA, 25 bp, Homo sapien
tctggtaaaagtcccgtgcatgtgg

SEQ ID NO: 3812722 - DNA, 25 bp, Homo sapien
gtctgcttctctataatcacggtac

SEQ ID NO: 3812723 - DNA, 25 bp, Homo sapien
ggttcttgtacttctagagctccag

SEQ ID NO: 3812724 - DNA, 25 bp, Homo sapien
tctcctctgttctgattgtccagcg

SEQ ID NO: 3812725 - DNA, 25 bp, Homo sapien
tttcaaaagactctcccatcccata

SEQ ID NO: 3812726 - DNA, 25 bp, Homo sapien
ttgtccagcgaacccatacattggg

SEQ ID NO: 3812727 - DNA, 25 bp, Homo sapien
gaactggaaatcgtggttccaccgc

SEQ ID NO: 3812728 - DNA, 25 bp, Homo sapien
tggggaactggaaatcgtggttcca

SEQ ID NO: 3812729 - DNA, 25 bp, Homo sapien
gctttccggggagccatgcacacag

SEQ ID NO: 3812730 - DNA, 25 bp, Homo sapien
tcccatctttctttcaggtgcaaac

SEQ ID NO: 3812731 - DNA, 25 bp, Homo sapien
taagcccatgattggagttgaagcc

SEQ ID NO: 3812732 - DNA, 25 bp, Homo sapien
taggatttgtaagcccatgattgga

SEQ ID NO: 3812733 - DNA, 25 bp, Homo sapien
catgattggagttgaagccttccag

SEQ ID NO: 3812734 - DNA, 25 bp, Homo sapien
gggctttaggatttgtaagcccatg

SEQ ID NO: 3812735 - DNA, 25 bp, Homo sapien
gggaaggaaaactgatctatctctg

SEQ ID NO: 3812736 - DNA, 25 bp, Homo sapien
tctatctctgcaggcctacttttca

SEQ ID NO: 3812737 - DNA, 25 bp, Homo sapien
agggaaggaaaactgatctatctct

SEQ ID NO: 3812738 - DNA, 25 bp, Homo sapien
atctatctctgcaggcctacttttc

SEQ ID NO: 3812739 - DNA, 25 bp, Homo sapien
ggctggccttattcttgaggtgtga

SEQ ID NO: 3812740 - DNA, 25 bp, Homo sapien
ccttggcgtctttggggcaccactc

SEQ ID NO: 3812741 - DNA, 25 bp, Homo sapien
tttcctccagcaaattgtctgctcc

SEQ ID NO: 3812742 - DNA, 25 bp, Homo sapien
tgaggtgtgatgtcgggtctcgccc

SEQ ID NO: 3812743 - DNA, 25 bp, Homo sapien
cccggagacttcttccttcgctgaa

SEQ ID NO: 3812744 - DNA, 25 bp, Homo sapien
acctggtcccacagcgtgtgccttc

SEQ ID NO: 3812745 - DNA, 25 bp, Homo sapien
tggaattattgattcccatgccatt

SEQ ID NO: 3812746 - DNA, 25 bp, Homo sapien
gcctgagttcctccgaaagcttttc

SEQ ID NO: 3812747 - DNA, 25 bp, Homo sapien
cgaggctggctgataactcctgcca

SEQ ID NO: 3812748 - DNA, 25 bp, Homo sapien
ggatgtccaattcttcagcttttct

SEQ ID NO: 3812749 - DNA, 25 bp, Homo sapien
tgagtggacttcaggatgtccaatt

SEQ ID NO: 3812750 - DNA, 25 bp, Homo sapien
caggcccaagcagtacaaggaaatc

SEQ ID NO: 3812751 - DNA, 25 bp, Homo sapien
cagacgctgatgagatagacggatc

SEQ ID NO: 3812752 - DNA, 25 bp, Homo sapien
tctgtccctcgccagttaccacagg

SEQ ID NO: 3812753 - DNA, 25 bp, Homo sapien
cgccagttaccacagggcagacgct

SEQ ID NO: 3812754 - DNA, 25 bp, Homo sapien
gacgctgatgagatagacggatcat

SEQ ID NO: 3812755 - DNA, 25 bp, Homo sapien
gcattgaaaagagtgtttcctggct

SEQ ID NO: 3812756 - DNA, 25 bp, Homo sapien
gataattccacgtccccacattgat

SEQ ID NO: 3812757 - DNA, 25 bp, Homo sapien
actgcattgaaaagagtgtttcctg

SEQ ID NO: 3812758 - DNA, 25 bp, Homo sapien
tgaggataattccacgtccccacat

SEQ ID NO: 3812759 - DNA, 25 bp, Homo sapien
gaaacacatacggtcctcaaggaag

SEQ ID NO: 3812760 - DNA, 25 bp, Homo sapien
gaataggcccttaaaacatggtcca

SEQ ID NO: 3812761 - DNA, 25 bp, Homo sapien
gaaatgaccccgtacaagagttgcg

SEQ ID NO: 3812762 - DNA, 25 bp, Homo sapien
tgttcatgactattggacctgggca

SEQ ID NO: 3812763 - DNA, 25 bp, Homo sapien
aaaggacattttccgtatctgcaaa

SEQ ID NO: 3812764 - DNA, 25 bp, Homo sapien
ataaaaggacattttccgtatctgc

SEQ ID NO: 3812765 - DNA, 25 bp, Homo sapien
gacattttccgtatctgcaaagact

SEQ ID NO: 3812766 - DNA, 25 bp, Homo sapien
tctgcaaagacttcctgaaggtttt

SEQ ID NO: 3812767 - DNA, 25 bp, Homo sapien
gctgtgcgcttcttatctcctgagg

SEQ ID NO: 3812768 - DNA, 25 bp, Homo sapien
gattccgtcctgaagctttggccca

SEQ ID NO: 3812769 - DNA, 25 bp, Homo sapien
gctgtttgttcctggtaaatgtccc

SEQ ID NO: 3812770 - DNA, 25 bp, Homo sapien
tttggcccaatcaggagcccgagct

SEQ ID NO: 3812771 - DNA, 25 bp, Homo sapien
ctgcagcaagatcagggaagcaaac

SEQ ID NO: 3812772 - DNA, 25 bp, Homo sapien
tgcaaatgagacatgtaccgtgtaa

SEQ ID NO: 3812773 - DNA, 25 bp, Homo sapien
gagacatgtaccgtgtaaaatggaa

SEQ ID NO: 3812774 - DNA, 25 bp, Homo sapien
caaatgagacatgtaccgtgtaaaa

SEQ ID NO: 3812775 - DNA, 25 bp, Homo sapien
ctttgcaaatgagacatgtaccgtg

SEQ ID NO: 3812776 - DNA, 25 bp, Homo sapien
agagaacactggctctctgagcaca

SEQ ID NO: 3812777 - DNA, 25 bp, Homo sapien
cactggtcacagagaacactggctc

SEQ ID NO: 3812778 - DNA, 25 bp, Homo sapien
agcactggtcacagagaacactggc

SEQ ID NO: 3812779 - DNA, 25 bp, Homo sapien
tggctctctgagcacaggtttttcc

SEQ ID NO: 3812780 - DNA, 25 bp, Homo sapien
tctatagcgggagtcaggcgatacg

SEQ ID NO: 3812781 - DNA, 25 bp, Homo sapien
tacgggagggatgtgagaaagcctc

SEQ ID NO: 3812782 - DNA, 25 bp, Homo sapien
gaaacagaccagggattgggcttgt

SEQ ID NO: 3812783 - DNA, 25 bp, Homo sapien
tggcctggaaaggtttgcctgggta

SEQ ID NO: 3812784 - DNA, 25 bp, Homo sapien
aaaataatcctccaacgtgtttgtg

SEQ ID NO: 3812785 - DNA, 25 bp, Homo sapien
aataatcctccaacgtgtttgtggc

SEQ ID NO: 3812786 - DNA, 25 bp, Homo sapien
agcttgctgcggaagtaaaatttca

SEQ ID NO: 3812787 - DNA, 25 bp, Homo sapien
gcttgctgcggaagtaaaatttcaa

SEQ ID NO: 3812788 - DNA, 25 bp, Homo sapien
tctgggcctgtgtgacaatgtttgc

SEQ ID NO: 3812789 - DNA, 25 bp, Homo sapien
aagtcgctgcgtgtgtgccattgaa

SEQ ID NO: 3812790 - DNA, 25 bp, Homo sapien
ttgcacttccccgagtctctctgga

SEQ ID NO: 3812791 - DNA, 25 bp, Homo sapien
ccattgaaacgcagagaagttgcta

SEQ ID NO: 3812792 - DNA, 25 bp, Homo sapien
agtatgtcagctgtcaaaggttctg

SEQ ID NO: 3812793 - DNA, 25 bp, Homo sapien
gtatgtcagctgtcaaaggttctgg

SEQ ID NO: 3812794 - DNA, 25 bp, Homo sapien
gcctgatgaggagggcggctgtgtt

SEQ ID NO: 3812795 - DNA, 25 bp, Homo sapien
gcccaagaccgtctggacaaaattg

SEQ ID NO: 3812796 - DNA, 25 bp, Homo sapien
gaccgtctggacaaaattgccatgg

SEQ ID NO: 3812797 - DNA, 25 bp, Homo sapien
cttcagcccaagaccgtctggacaa

SEQ ID NO: 3812798 - DNA, 25 bp, Homo sapien
ccatgggcctgcttcaggagaccgg

SEQ ID NO: 3812799 - DNA, 25 bp, Homo sapien
accatgggcctgcttcaggagaccg

SEQ ID NO: 3812800 - DNA, 25 bp, Homo sapien
catgggcctgcttcaggagaccggg

SEQ ID NO: 3812801 - DNA, 25 bp, Homo sapien
gaccatgggcctgcttcaggagacc

SEQ ID NO: 3812802 - DNA, 25 bp, Homo sapien
gagaaatcaggcctggaagaagtat

SEQ ID NO: 3812803 - DNA, 25 bp, Homo sapien
ctgagaaatcaggcctggaagaagt

SEQ ID NO: 3812804 - DNA, 25 bp, Homo sapien
tgagaaatcaggcctggaagaagta

SEQ ID NO: 3812805 - DNA, 25 bp, Homo sapien
tctgagaaatcaggcctggaagaag

SEQ ID NO: 3812806 - DNA, 25 bp, Homo sapien
tcctcttcaatacgcatggatgctg

SEQ ID NO: 3812807 - DNA, 25 bp, Homo sapien
tcttcaatacgcatggatgctggga

SEQ ID NO: 3812808 - DNA, 25 bp, Homo sapien
aatacgcatggatgctgggaaaagg

SEQ ID NO: 3812809 - DNA, 25 bp, Homo sapien
tttcctcttcaatacgcatggatgc

SEQ ID NO: 3812810 - DNA, 25 bp, Homo sapien
ccctggttgttacggcagtgcctca

SEQ ID NO: 3812811 - DNA, 25 bp, Homo sapien
attggatgtggcgacagcgactgta

SEQ ID NO: 3812812 - DNA, 25 bp, Homo sapien
catgccgtgctcatggtacatggct

SEQ ID NO: 3812813 - DNA, 25 bp, Homo sapien
gcttgtcaagccgaaatggaaatac

SEQ ID NO: 3812814 - DNA, 25 bp, Homo sapien
ggtggtcataacctaggcccaggca

SEQ ID NO: 3812815 - DNA, 25 bp, Homo sapien
cagggaggtgagaagtcgcctttac

SEQ ID NO: 3812816 - DNA, 25 bp, Homo sapien
taatgactggtactgtgtagccgct

SEQ ID NO: 3812817 - DNA, 25 bp, Homo sapien
taatttaaacggagcagctagggct

SEQ ID NO: 3812818 - DNA, 25 bp, Homo sapien
cacaagacggctttctcctttgact

SEQ ID NO: 3812819 - DNA, 25 bp, Homo sapien
tcctttgactccttcggatgtgctc

SEQ ID NO: 3812820 - DNA, 25 bp, Homo sapien
ggcgggggtttccatgccacaagac

SEQ ID NO: 3812821 - DNA, 25 bp, Homo sapien
tgactccttcggatgtgctccctgt

SEQ ID NO: 3812822 - DNA, 25 bp, Homo sapien
ggtattatcatttactggtgggtgg

SEQ ID NO: 3812823 - DNA, 25 bp, Homo sapien
ccttatccttgcaactgcaaaagtc

SEQ ID NO: 3812824 - DNA, 25 bp, Homo sapien
catctgccttgtatgggtattatca

SEQ ID NO: 3812825 - DNA, 25 bp, Homo sapien
gaaggaggatttgtgtggaataaca

SEQ ID NO: 3812826 - DNA, 25 bp, Homo sapien
cttgaagcgaaagccgtcacatggc

SEQ ID NO: 3812827 - DNA, 25 bp, Homo sapien
cagattcgggagtaaacttgaagcg

SEQ ID NO: 3812828 - DNA, 25 bp, Homo sapien
gagtaaacttgaagcgaaagccgtc

SEQ ID NO: 3812829 - DNA, 25 bp, Homo sapien
cctccctcactttagcagattcggg

SEQ ID NO: 3812830 - DNA, 25 bp, Homo sapien
tggtcttgcgacctctctgcatgcc

SEQ ID NO: 3812831 - DNA, 25 bp, Homo sapien
actctgcttggtgctattgattcct

SEQ ID NO: 3812832 - DNA, 25 bp, Homo sapien
cttgtcggctccacggtttcccttg

SEQ ID NO: 3812833 - DNA, 25 bp, Homo sapien
tgcctgctgccccgtggtcttgcga

SEQ ID NO: 3812834 - DNA, 25 bp, Homo sapien
ataaggccactaaatgctgttcagg

SEQ ID NO: 3812835 - DNA, 25 bp, Homo sapien
agatgcatgtagatgaagctattga

SEQ ID NO: 3812836 - DNA, 25 bp, Homo sapien
ttgcagatgcatgtagatgaagcta

SEQ ID NO: 3812837 - DNA, 25 bp, Homo sapien
gagtagagcatgaaataaggccact

SEQ ID NO: 3812838 - DNA, 25 bp, Homo sapien
ctgtttgatgaaggccagttttggt

SEQ ID NO: 3812839 - DNA, 25 bp, Homo sapien
tttggagctttggaaatggagcaca

SEQ ID NO: 3812840 - DNA, 25 bp, Homo sapien
ttatattggctaggattttgctgga

SEQ ID NO: 3812841 - DNA, 25 bp, Homo sapien
tgcaggcaagtggagatacaggtac

SEQ ID NO: 3812842 - DNA, 25 bp, Homo sapien
tccccaggaatttattttctgcacc

SEQ ID NO: 3812843 - DNA, 25 bp, Homo sapien
cccaggaatttattttctgcaccat

SEQ ID NO: 3812844 - DNA, 25 bp, Homo sapien
ccccaggaatttattttctgcacca

SEQ ID NO: 3812845 - DNA, 25 bp, Homo sapien
tttccccaggaatttattttctgca

SEQ ID NO: 3812846 - DNA, 25 bp, Homo sapien
cactgagaagccttggactttgacg

SEQ ID NO: 3812847 - DNA, 25 bp, Homo sapien
gaagcaatttgtaatcctgattctg

SEQ ID NO: 3812848 - DNA, 25 bp, Homo sapien
ggccagaagcaatttgtaatcctga

SEQ ID NO: 3812849 - DNA, 25 bp, Homo sapien
gggcagccttcactgagaagccttg

SEQ ID NO: 3812850 - DNA, 25 bp, Homo sapien
gaatttcctcagtgtacagaatatc

SEQ ID NO: 3812851 - DNA, 25 bp, Homo sapien
gaatggaatttcctcagtgtacaga

SEQ ID NO: 3812852 - DNA, 25 bp, Homo sapien
ttcctcagtgtacagaatatcagaa

SEQ ID NO: 3812853 - DNA, 25 bp, Homo sapien
cttgaatggaatttcctcagtgtac

SEQ ID NO: 3812854 - DNA, 25 bp, Homo sapien
gacttgactgacttggtatggttga

SEQ ID NO: 3812855 - DNA, 25 bp, Homo sapien
agatttcatggggagggttctctca

SEQ ID NO: 3812856 - DNA, 25 bp, Homo sapien
ttctctcagaagacgaacagcccca

SEQ ID NO: 3812857 - DNA, 25 bp, Homo sapien
agccccacagctttcgacttgactg

SEQ ID NO: 3812858 - DNA, 25 bp, Homo sapien
agagagactgctgtaaacaggtttg

SEQ ID NO: 3812859 - DNA, 25 bp, Homo sapien
tcattccgtagaaacgatttgtgct

SEQ ID NO: 3812860 - DNA, 25 bp, Homo sapien
cattctcagcactaaggatgcaaat

SEQ ID NO: 3812861 - DNA, 25 bp, Homo sapien
tgcaaatgctcttggttgtagcctc

SEQ ID NO: 3812862 - DNA, 25 bp, Homo sapien
cactaaggatgcaaatgctcttggt

SEQ ID NO: 3812863 - DNA, 25 bp, Homo sapien
tggctgagcaccgtcaacattctca

SEQ ID NO: 3812864 - DNA, 25 bp, Homo sapien
ctagaggaaagttgatcttggatag

SEQ ID NO: 3812865 - DNA, 25 bp, Homo sapien
tagaggaaagttgatcttggatagg

SEQ ID NO: 3812866 - DNA, 25 bp, Homo sapien
gaggaaagttgatcttggatagggg

SEQ ID NO: 3812867 - DNA, 25 bp, Homo sapien
agaggaaagttgatcttggataggg

SEQ ID NO: 3812868 - DNA, 25 bp, Homo sapien
gaaggaagtctcatcaaaagaagtc

SEQ ID NO: 3812869 - DNA, 25 bp, Homo sapien
tgaaggaagtctcatcaaaagaagt

SEQ ID NO: 3812870 - DNA, 25 bp, Homo sapien
tatgaaggaagtctcatcaaaagaa

SEQ ID NO: 3812871 - DNA, 25 bp, Homo sapien
aaggaagtctcatcaaaagaagtca

SEQ ID NO: 3812872 - DNA, 25 bp, Homo sapien
gggtatgaaagtgtggtacacaata

SEQ ID NO: 3812873 - DNA, 25 bp, Homo sapien
acacaatacaggctggtaaagaatc

SEQ ID NO: 3812874 - DNA, 25 bp, Homo sapien
ggtatgaaagtgtggtacacaatac

SEQ ID NO: 3812875 - DNA, 25 bp, Homo sapien
atacaggctggtaaagaatccccac

SEQ ID NO: 3812876 - DNA, 25 bp, Homo sapien
cagactctagttgtactagaacacc

SEQ ID NO: 3812877 - DNA, 25 bp, Homo sapien
aatacaccagcatcagactctagtt

SEQ ID NO: 3812878 - DNA, 25 bp, Homo sapien
ttgtactagaacaccattctgaatc

SEQ ID NO: 3812879 - DNA, 25 bp, Homo sapien
cagcatcagactctagttgtactag

SEQ ID NO: 3812880 - DNA, 25 bp, Homo sapien
gggctttcccataacaagatgttca

SEQ ID NO: 3812881 - DNA, 25 bp, Homo sapien
tattgtgccacgtctgctggaggaa

SEQ ID NO: 3812882 - DNA, 25 bp, Homo sapien
ttggcggctacacctcttgggcttt

SEQ ID NO: 3812883 - DNA, 25 bp, Homo sapien
ctggaggaagattggcggctacacc

SEQ ID NO: 3812884 - DNA, 25 bp, Homo sapien
ctggaggctatcccggagagccaac

SEQ ID NO: 3812885 - DNA, 25 bp, Homo sapien
tggaggctatcccggagagccaact

SEQ ID NO: 3812886 - DNA, 25 bp, Homo sapien
tctggaggctatcccggagagccaa

SEQ ID NO: 3812887 - DNA, 25 bp, Homo sapien
ctctggaggctatcccggagagcca

SEQ ID NO: 3812888 - DNA, 25 bp, Homo sapien
cataagcatttgcagaccgtaaggc

SEQ ID NO: 3812889 - DNA, 25 bp, Homo sapien
catgttgtgcaacccctgtggctct

SEQ ID NO: 3812890 - DNA, 25 bp, Homo sapien
gactgtcttcccactctagcagagg

SEQ ID NO: 3812891 - DNA, 25 bp, Homo sapien
caaaggtacttgaggctggatctga

SEQ ID NO: 3812892 - DNA, 25 bp, Homo sapien
tgcagtggtctaacttcagtgtgcg

SEQ ID NO: 3812893 - DNA, 25 bp, Homo sapien
tcagtgtgcgtgagacatcttctcc

SEQ ID NO: 3812894 - DNA, 25 bp, Homo sapien
taatagtctccctccgataagcagc

SEQ ID NO: 3812895 - DNA, 25 bp, Homo sapien
tcagaaagctgcacaacaaagccgt

SEQ ID NO: 3812896 - DNA, 25 bp, Homo sapien
tcagcttggcaggaacattatgttt

SEQ ID NO: 3812897 - DNA, 25 bp, Homo sapien
aaatcagcttggcaggaacattatg

SEQ ID NO: 3812898 - DNA, 25 bp, Homo sapien
cagcttggcaggaacattatgtttc

SEQ ID NO: 3812899 - DNA, 25 bp, Homo sapien
gcttggcaggaacattatgtttcta

SEQ ID NO: 3812900 - DNA, 25 bp, Homo sapien
atgagcaggctgacggagtgacaca

SEQ ID NO: 3812901 - DNA, 25 bp, Homo sapien
cttcctgagcgggaaagtatgtgca

SEQ ID NO: 3812902 - DNA, 25 bp, Homo sapien
caaaatagactgtatcctgcgaggg

SEQ ID NO: 3812903 - DNA, 25 bp, Homo sapien
cctgcgagggatttgaatggagaca

SEQ ID NO: 3812904 - DNA, 25 bp, Homo sapien
agcactggctgcgtataaagcacag

SEQ ID NO: 3812905 - DNA, 25 bp, Homo sapien
tgagcactggctgcgtataaagcac

SEQ ID NO: 3812906 - DNA, 25 bp, Homo sapien
ctggctgcgtataaagcacagttat

SEQ ID NO: 3812907 - DNA, 25 bp, Homo sapien
gctgcgtataaagcacagttataag

SEQ ID NO: 3812908 - DNA, 25 bp, Homo sapien
ttttgcatgaagctgctgtactcct

SEQ ID NO: 3812909 - DNA, 25 bp, Homo sapien
gttttgcatgaagctgctgtactcc

SEQ ID NO: 3812910 - DNA, 25 bp, Homo sapien
gcgttttcgcctccgccagatttca

SEQ ID NO: 3812911 - DNA, 25 bp, Homo sapien
tacaagtcccgctgtcggtctgaag

SEQ ID NO: 3812912 - DNA, 25 bp, Homo sapien
gaactgtcacggacactcaaatgaa

SEQ ID NO: 3812913 - DNA, 25 bp, Homo sapien
gtcggtctgaagctcgccgcagctg

SEQ ID NO: 3812914 - DNA, 25 bp, Homo sapien
tgagctgattccgagaaccacactg

SEQ ID NO: 3812915 - DNA, 25 bp, Homo sapien
cacactgtagatccagagctgtcat

SEQ ID NO: 3812916 - DNA, 25 bp, Homo sapien
tcacagcatgtgaagtttaaagcag

SEQ ID NO: 3812917 - DNA, 25 bp, Homo sapien
tagacactggtgatgtcaggcagca

SEQ ID NO: 3812918 - DNA, 25 bp, Homo sapien
aggggctggcgctcagtgtgatatt

SEQ ID NO: 3812919 - DNA, 25 bp, Homo sapien
ggggctggcgctcagtgtgatattg

SEQ ID NO: 3812920 - DNA, 25 bp, Homo sapien
gggctggcgctcagtgtgatattgg

SEQ ID NO: 3812921 - DNA, 25 bp, Homo sapien
caggggctggcgctcagtgtgatat

SEQ ID NO: 3812922 - DNA, 25 bp, Homo sapien
ggtatatagcctaggttctcttaaa

SEQ ID NO: 3812923 - DNA, 25 bp, Homo sapien
tagtaggtatatagcctaggttctc

SEQ ID NO: 3812924 - DNA, 25 bp, Homo sapien
gcctaggttctcttaaacagagttc

SEQ ID NO: 3812925 - DNA, 25 bp, Homo sapien
cttaaacagagttcttctgaaacat

SEQ ID NO: 3812926 - DNA, 25 bp, Homo sapien
gggatggacgcttaaacacatcagc

SEQ ID NO: 3812927 - DNA, 25 bp, Homo sapien
cagctgacacagacgaactggggat

SEQ ID NO: 3812928 - DNA, 25 bp, Homo sapien
tgtttggcataaagggcatcctggt

SEQ ID NO: 3812929 - DNA, 25 bp, Homo sapien
tctgcagatgcagtgcgatactccc

SEQ ID NO: 3812930 - DNA, 25 bp, Homo sapien
actgagagaaatccaatacaatacc

SEQ ID NO: 3812931 - DNA, 25 bp, Homo sapien
tcataatcatggctgcaatcgatca

SEQ ID NO: 3812932 - DNA, 25 bp, Homo sapien
catgggcttttggttcgcaatgtaa

SEQ ID NO: 3812933 - DNA, 25 bp, Homo sapien
caatgtaaggaactgagagaaatcc

SEQ ID NO: 3812934 - DNA, 25 bp, Homo sapien
tatgaaaaccatgtgagatctttag

SEQ ID NO: 3812935 - DNA, 25 bp, Homo sapien
ctggaagatagtctagttttttgga

SEQ ID NO: 3812936 - DNA, 25 bp, Homo sapien
ttaaattctggaagatagtctagtt

SEQ ID NO: 3812937 - DNA, 25 bp, Homo sapien
accatgtgagatctttaggcagcaa

SEQ ID NO: 3812938 - DNA, 25 bp, Homo sapien
gaagctcgcacacatctggttgttt

SEQ ID NO: 3812939 - DNA, 25 bp, Homo sapien
taatttatcagggacaatctgtctc

SEQ ID NO: 3812940 - DNA, 25 bp, Homo sapien
cgcaacacaatgaggacagggacca

SEQ ID NO: 3812941 - DNA, 25 bp, Homo sapien
gctttgatattcttgctggcgcaac

SEQ ID NO: 3812942 - DNA, 25 bp, Homo sapien
taatgccagccttacacctagtttt

SEQ ID NO: 3812943 - DNA, 25 bp, Homo sapien
ccacattggtgagcgtcatggttaa

SEQ ID NO: 3812944 - DNA, 25 bp, Homo sapien
cattaggaatggaactgtcgcagca

SEQ ID NO: 3812945 - DNA, 25 bp, Homo sapien
gtcgcagcacgagggaatggctatt

SEQ ID NO: 3812946 - DNA, 25 bp, Homo sapien
aaataatgctggaatcactctcccc

SEQ ID NO: 3812947 - DNA, 25 bp, Homo sapien
gtcatgtttggagccaaagttctcc

SEQ ID NO: 3812948 - DNA, 25 bp, Homo sapien
acagctccacttcgtacaacactgt

SEQ ID NO: 3812949 - DNA, 25 bp, Homo sapien
tgcagctgaattgagccaagcgtta

SEQ ID NO: 3812950 - DNA, 25 bp, Homo sapien
caatgcagatcaggacaagcttctc

SEQ ID NO: 3812951 - DNA, 25 bp, Homo sapien
tgccccaacctctgtggtttgggag

SEQ ID NO: 3812952 - DNA, 25 bp, Homo sapien
cctctgtggtttgggagctaccgtg

SEQ ID NO: 3812953 - DNA, 25 bp, Homo sapien
ttctcaagccgcagggtttgtgccc

SEQ ID NO: 3812954 - DNA, 25 bp, Homo sapien
tgagattcagctgcacactgcggca

SEQ ID NO: 3812955 - DNA, 25 bp, Homo sapien
gatgctttgaggctacttgccaagg

SEQ ID NO: 3812956 - DNA, 25 bp, Homo sapien
taatgggatatctgagcacaacact

SEQ ID NO: 3812957 - DNA, 25 bp, Homo sapien
gcacaacactcaggaccgtcaggat

SEQ ID NO: 3812958 - DNA, 25 bp, Homo sapien
tggcttacctctggtgagagtggcc

SEQ ID NO: 3812959 - DNA, 25 bp, Homo sapien
ttatgtcccacggagccagctggac

SEQ ID NO: 3812960 - DNA, 25 bp, Homo sapien
gctggacgtgctcctaactggctta

SEQ ID NO: 3812961 - DNA, 25 bp, Homo sapien
cagctctcagggttcaaattgtcca

SEQ ID NO: 3812962 - DNA, 25 bp, Homo sapien
tctcttcttgtgcataaggggggct

SEQ ID NO: 3812963 - DNA, 25 bp, Homo sapien
gggggctgacacctatggacttcat

SEQ ID NO: 3812964 - DNA, 25 bp, Homo sapien
ggggggctgacacctatggacttca

SEQ ID NO: 3812965 - DNA, 25 bp, Homo sapien
ttataggaagacagcaatagcatct

SEQ ID NO: 3812966 - DNA, 25 bp, Homo sapien
gcaatagcatcttgtaaatatattt

SEQ ID NO: 3812967 - DNA, 25 bp, Homo sapien
tataggaagacagcaatagcatctt

SEQ ID NO: 3812968 - DNA, 25 bp, Homo sapien
acagcaatagcatcttgtaaatata

SEQ ID NO: 3812969 - DNA, 25 bp, Homo sapien
gagctgtcacattaccataacctga

SEQ ID NO: 3812970 - DNA, 25 bp, Homo sapien
aatgatgatgggagagttttacgta

SEQ ID NO: 3812971 - DNA, 25 bp, Homo sapien
gagttttacgtagagaggatatgac

SEQ ID NO: 3812972 - DNA, 25 bp, Homo sapien
tttagattccccagaaggcaattgt

SEQ ID NO: 3812973 - DNA, 25 bp, Homo sapien
cattattggttctagaattagtcca

SEQ ID NO: 3812974 - DNA, 25 bp, Homo sapien
taagctctccattattggttctaga

SEQ ID NO: 3812975 - DNA, 25 bp, Homo sapien
tccaagttaagctctccattattgg

SEQ ID NO: 3812976 - DNA, 25 bp, Homo sapien
tctccattattggttctagaattag

SEQ ID NO: 3812977 - DNA, 25 bp, Homo sapien
ctctcatgctttttgcctacccaga

SEQ ID NO: 3812978 - DNA, 25 bp, Homo sapien
aattcctctcatgctttttgcctac

SEQ ID NO: 3812979 - DNA, 25 bp, Homo sapien
gaacctccaattcctctcatgcttt

SEQ ID NO: 3812980 - DNA, 25 bp, Homo sapien
ttctgaacctccaattcctctcatg

SEQ ID NO: 3812981 - DNA, 25 bp, Homo sapien
agtgggcagctggccatggtcccct

SEQ ID NO: 3812982 - DNA, 25 bp, Homo sapien
tattccaaggcattaggcagtgggc

SEQ ID NO: 3812983 - DNA, 25 bp, Homo sapien
tccaaggcattaggcagtgggcagc

SEQ ID NO: 3812984 - DNA, 25 bp, Homo sapien
ctattccaaggcattaggcagtggg

SEQ ID NO: 3812985 - DNA, 25 bp, Homo sapien
tgctgctccttccacagagagggtg

SEQ ID NO: 3812986 - DNA, 25 bp, Homo sapien
ctcctgtgtccgggactgctgctcc

SEQ ID NO: 3812987 - DNA, 25 bp, Homo sapien
tcctgtgtccgggactgctgctcct

SEQ ID NO: 3812988 - DNA, 25 bp, Homo sapien
ctccttccacagagagggtgcacat

SEQ ID NO: 3812989 - DNA, 25 bp, Homo sapien
cagacagggccgagtccttttgagc

SEQ ID NO: 3812990 - DNA, 25 bp, Homo sapien
gcagacagggccgagtccttttgag

SEQ ID NO: 3812991 - DNA, 25 bp, Homo sapien
ttggtgccctttacatgatatggga

SEQ ID NO: 3812992 - DNA, 25 bp, Homo sapien
gagcattaatttcgggtcccaaagc

SEQ ID NO: 3812993 - DNA, 25 bp, Homo sapien
gagaaccgagatcttgatagctttc

SEQ ID NO: 3812994 - DNA, 25 bp, Homo sapien
aggatgagatggagaaccgagatct

SEQ ID NO: 3812995 - DNA, 25 bp, Homo sapien
cagcccggtgcctagtcatagcgtg

SEQ ID NO: 3812996 - DNA, 25 bp, Homo sapien
tataaccttggcgtagagttgaccc

SEQ ID NO: 3812997 - DNA, 25 bp, Homo sapien
ggtgcctagtcatagcgtgtaatgc

SEQ ID NO: 3812998 - DNA, 25 bp, Homo sapien
gtagagttgacccagcccggtgcct

SEQ ID NO: 3812999 - DNA, 25 bp, Homo sapien
tcacattacagggaaagaggccgaa

SEQ ID NO: 3813000 - DNA, 25 bp, Homo sapien
cacattacagggaaagaggccgaag

SEQ ID NO: 3813001 - DNA, 25 bp, Homo sapien
tatcagactgtctcacattacaggg

SEQ ID NO: 3813002 - DNA, 25 bp, Homo sapien
tgcagatgtatcagactgtctcaca

SEQ ID NO: 3813003 - DNA, 25 bp, Homo sapien
tccccactctgttctaggaaaatct

SEQ ID NO: 3813004 - DNA, 25 bp, Homo sapien
cccactctgttctaggaaaatcttt

SEQ ID NO: 3813005 - DNA, 25 bp, Homo sapien
ccactctgttctaggaaaatctttg

SEQ ID NO: 3813006 - DNA, 25 bp, Homo sapien
cactctgttctaggaaaatctttgt

SEQ ID NO: 3813007 - DNA, 25 bp, Homo sapien
ttatttagaatctgtggagaggctg

SEQ ID NO: 3813008 - DNA, 25 bp, Homo sapien
ctatggagtcatgattatttagaat

SEQ ID NO: 3813009 - DNA, 25 bp, Homo sapien
ttagaatctgtggagaggctgtgca

SEQ ID NO: 3813010 - DNA, 25 bp, Homo sapien
aatctgtggagaggctgtgcagttc

SEQ ID NO: 3813011 - DNA, 25 bp, Homo sapien
tcagcccttccttctcctccttgcc

SEQ ID NO: 3813012 - DNA, 25 bp, Homo sapien
ttagcctctcagcccttccttctcc

SEQ ID NO: 3813013 - DNA, 25 bp, Homo sapien
cccttccttctcctccttgccacac

SEQ ID NO: 3813014 - DNA, 25 bp, Homo sapien
agcccttccttctcctccttgccac

SEQ ID NO: 3813015 - DNA, 25 bp, Homo sapien
cagccagtgtagaccatggtactca

SEQ ID NO: 3813016 - DNA, 25 bp, Homo sapien
ccccgtcccagccagtgtagaccat

SEQ ID NO: 3813017 - DNA, 25 bp, Homo sapien
cgtcccagccagtgtagaccatggt

SEQ ID NO: 3813018 - DNA, 25 bp, Homo sapien
agccagtgtagaccatggtactcac

SEQ ID NO: 3813019 - DNA, 25 bp, Homo sapien
ctcttccgggtccacttctgatgaa

SEQ ID NO: 3813020 - DNA, 25 bp, Homo sapien
ttccgggtccacttctgatgaattt

SEQ ID NO: 3813021 - DNA, 25 bp, Homo sapien
cttccgggtccacttctgatgaatt

SEQ ID NO: 3813022 - DNA, 25 bp, Homo sapien
tcttccgggtccacttctgatgaat

SEQ ID NO: 3813023 - DNA, 25 bp, Homo sapien
gagcttccgcttccgataaatttgg

SEQ ID NO: 3813024 - DNA, 25 bp, Homo sapien
taactttgctccaattggtttcttg

SEQ ID NO: 3813025 - DNA, 25 bp, Homo sapien
cctgggagcttccgcttccgataaa

SEQ ID NO: 3813026 - DNA, 25 bp, Homo sapien
actttgctccaattggtttcttgtc

SEQ ID NO: 3813027 - DNA, 25 bp, Homo sapien
tgaggccacggcaactactttctgc

SEQ ID NO: 3813028 - DNA, 25 bp, Homo sapien
actttctgccaaataagtcagccgg

SEQ ID NO: 3813029 - DNA, 25 bp, Homo sapien
tgtcccagaaggcacatgtcaggtc

SEQ ID NO: 3813030 - DNA, 25 bp, Homo sapien
gagtccaacttctcgctggttcatg

SEQ ID NO: 3813031 - DNA, 25 bp, Homo sapien
tagtgtccacaaaacccactggaag

SEQ ID NO: 3813032 - DNA, 25 bp, Homo sapien
cttcttcatgggtaggactgcctag

SEQ ID NO: 3813033 - DNA, 25 bp, Homo sapien
tatgtagtgattctgcaactgggaa

SEQ ID NO: 3813034 - DNA, 25 bp, Homo sapien
ccaatccaattcatgaggtctagta

SEQ ID NO: 3813035 - DNA, 25 bp, Homo sapien
tcctaccacaggtctttacatcagt

SEQ ID NO: 3813036 - DNA, 25 bp, Homo sapien
gtgtttctcctaccacaggtcttta

SEQ ID NO: 3813037 - DNA, 25 bp, Homo sapien
gctgtgtttctcctaccacaggtct

SEQ ID NO: 3813038 - DNA, 25 bp, Homo sapien
accacaggtctttacatcagtatgg

SEQ ID NO: 3813039 - DNA, 25 bp, Homo sapien
ccagtcatgtaagcccagtctggac

SEQ ID NO: 3813040 - DNA, 25 bp, Homo sapien
tgccagtcatgtaagcccagtctgg

SEQ ID NO: 3813041 - DNA, 25 bp, Homo sapien
agcccagtctggacatgtatggatc

SEQ ID NO: 3813042 - DNA, 25 bp, Homo sapien
ctggacatgtatggatccttaatga

SEQ ID NO: 3813043 - DNA, 25 bp, Homo sapien
gatgggacaaatccgtgatctgcat

SEQ ID NO: 3813044 - DNA, 25 bp, Homo sapien
ggagctagatgggacaaatccgtga

SEQ ID NO: 3813045 - DNA, 25 bp, Homo sapien
tccaaggagctagatgggacaaatc

SEQ ID NO: 3813046 - DNA, 25 bp, Homo sapien
tagtccaaggagctagatgggacaa

SEQ ID NO: 3813047 - DNA, 25 bp, Homo sapien
tagcttgccgacaaccataacagaa

SEQ ID NO: 3813048 - DNA, 25 bp, Homo sapien
gcttgccgacaaccataacagaaaa

SEQ ID NO: 3813049 - DNA, 25 bp, Homo sapien
ttgccgacaaccataacagaaaaac

SEQ ID NO: 3813050 - DNA, 25 bp, Homo sapien
tcatagcttgccgacaaccataaca

SEQ ID NO: 3813051 - DNA, 25 bp, Homo sapien
tcagtactcaactgattcttgtttc

SEQ ID NO: 3813052 - DNA, 25 bp, Homo sapien
tctactgcaacatctagtgtagtac

SEQ ID NO: 3813053 - DNA, 25 bp, Homo sapien
ttctctactgcaacatctagtgtag

SEQ ID NO: 3813054 - DNA, 25 bp, Homo sapien
agtactcaactgattcttgtttctc

SEQ ID NO: 3813055 - DNA, 25 bp, Homo sapien
acatcaaaattctggcgcagctttg

SEQ ID NO: 3813056 - DNA, 25 bp, Homo sapien
cgcagctttggcaactcagtttgca

SEQ ID NO: 3813057 - DNA, 25 bp, Homo sapien
actcagtttgcaaaggattattaag

SEQ ID NO: 3813058 - DNA, 25 bp, Homo sapien
ctcctgcaggcatatatcttttatt

SEQ ID NO: 3813059 - DNA, 25 bp, Homo sapien
tgggaactgccacccgtggatgtca

SEQ ID NO: 3813060 - DNA, 25 bp, Homo sapien
gcgccgtgggcgagaggcagctgct

SEQ ID NO: 3813061 - DNA, 25 bp, Homo sapien
cacccgtggatgtcaccgtggagga

SEQ ID NO: 3813062 - DNA, 25 bp, Homo sapien
gctgcactcaggaccacacactgag

SEQ ID NO: 3813063 - DNA, 25 bp, Homo sapien
ggtaacactcggctgggaagttcat

SEQ ID NO: 3813064 - DNA, 25 bp, Homo sapien
cacaacagtgcttcctagggatgca

SEQ ID NO: 3813065 - DNA, 25 bp, Homo sapien
atgtccccggaagacacaggccttt

SEQ ID NO: 3813066 - DNA, 25 bp, Homo sapien
tggaggccccagttgcaatattggg

SEQ ID NO: 3813067 - DNA, 25 bp, Homo sapien
cactcaagttgcatgaccgaaaaaa

SEQ ID NO: 3813068 - DNA, 25 bp, Homo sapien
gatagttgaatgtaataaggatgta

SEQ ID NO: 3813069 - DNA, 25 bp, Homo sapien
ccaaacacactcaagttgcatgacc

SEQ ID NO: 3813070 - DNA, 25 bp, Homo sapien
gagagagagagatagttgaatgtaa

SEQ ID NO: 3813071 - DNA, 25 bp, Homo sapien
catagaagagaccagacactggctt

SEQ ID NO: 3813072 - DNA, 25 bp, Homo sapien
ccacaccagacatagaagagaccag

SEQ ID NO: 3813073 - DNA, 25 bp, Homo sapien
ccagacatagaagagaccagacact

SEQ ID NO: 3813074 - DNA, 25 bp, Homo sapien
gaaagaacaagtcacaacaacaccc

SEQ ID NO: 3813075 - DNA, 25 bp, Homo sapien
agctcctgccaaagggaactcccta

SEQ ID NO: 3813076 - DNA, 25 bp, Homo sapien
gattcgaagaggcatgctccgctgc

SEQ ID NO: 3813077 - DNA, 25 bp, Homo sapien
aagagtatcctgcatttcgaaggga

SEQ ID NO: 3813078 - DNA, 25 bp, Homo sapien
tcagtgggttcctagctttggagca

SEQ ID NO: 3813079 - DNA, 25 bp, Homo sapien
agagttagggtgctgagcaacagag

SEQ ID NO: 3813080 - DNA, 25 bp, Homo sapien
agttagggtgctgagcaacagagcc

SEQ ID NO: 3813081 - DNA, 25 bp, Homo sapien
cagagccaaatacggtgacagggtg

SEQ ID NO: 3813082 - DNA, 25 bp, Homo sapien
caacagagccaaatacggtgacagg

SEQ ID NO: 3813083 - DNA, 25 bp, Homo sapien
atcctgggtaaatgtaatgggtaca

SEQ ID NO: 3813084 - DNA, 25 bp, Homo sapien
ttccttacccatgttctgagagacg

SEQ ID NO: 3813085 - DNA, 25 bp, Homo sapien
atatttcctttactgcgaggctgtg

SEQ ID NO: 3813086 - DNA, 25 bp, Homo sapien
gtgatggttggcagatgtgctgtcc

SEQ ID NO: 3813087 - DNA, 25 bp, Homo sapien
tacatggcttcatcttttgcagtgt

SEQ ID NO: 3813088 - DNA, 25 bp, Homo sapien
cacatggcatcatggtccacagcta

SEQ ID NO: 3813089 - DNA, 25 bp, Homo sapien
gaaaagcattctatagacctgctcc

SEQ ID NO: 3813090 - DNA, 25 bp, Homo sapien
tgaggaacccaagctgccttaacag

SEQ ID NO: 3813091 - DNA, 25 bp, Homo sapien
catggtccacagctatagagtctaa

SEQ ID NO: 3813092 - DNA, 25 bp, Homo sapien
gcagctgttcaaagagagcccctac

SEQ ID NO: 3813093 - DNA, 25 bp, Homo sapien
aaacagcatgtgagggctacttgtt

SEQ ID NO: 3813094 - DNA, 25 bp, Homo sapien
cctggagtatagcagttcttatgct

SEQ ID NO: 3813095 - DNA, 25 bp, Homo sapien
accaaaatagagaaagctctgtcca

SEQ ID NO: 3813096 - DNA, 25 bp, Homo sapien
ccttcctcccacatgggtccaggga

SEQ ID NO: 3813097 - DNA, 25 bp, Homo sapien
gtcaccaaggagcttttcgcggagg

SEQ ID NO: 3813098 - DNA, 25 bp, Homo sapien
caccaaggagcttttcgcggagggt

SEQ ID NO: 3813099 - DNA, 25 bp, Homo sapien
atccttcctcccacatgggtccagg

SEQ ID NO: 3813100 - DNA, 25 bp, Homo sapien
aataggtaagggcatatgactgaca

SEQ ID NO: 3813101 - DNA, 25 bp, Homo sapien
tctggtggtgatgaacaccctctcc

SEQ ID NO: 3813102 - DNA, 25 bp, Homo sapien
ccagtaagttttgtacattcagaag

SEQ ID NO: 3813103 - DNA, 25 bp, Homo sapien
ttcttacaaaacaggtctggtggtg

SEQ ID NO: 3813104 - DNA, 25 bp, Homo sapien
agttttagtgatgcaagggatcgct

SEQ ID NO: 3813105 - DNA, 25 bp, Homo sapien
ctgagttttagtgatgcaagggatc

SEQ ID NO: 3813106 - DNA, 25 bp, Homo sapien
gagttttagtgatgcaagggatcgc

SEQ ID NO: 3813107 - DNA, 25 bp, Homo sapien
cctgagttttagtgatgcaagggat

SEQ ID NO: 3813108 - DNA, 25 bp, Homo sapien
aagcaagggtactcaatacagcttc

SEQ ID NO: 3813109 - DNA, 25 bp, Homo sapien
tggtctgggaatccctgcagaaaga

SEQ ID NO: 3813110 - DNA, 25 bp, Homo sapien
gcaagggtactcaatacagcttcct

SEQ ID NO: 3813111 - DNA, 25 bp, Homo sapien
aagggtactcaatacagcttccttt

SEQ ID NO: 3813112 - DNA, 25 bp, Homo sapien
agaattgtgtacagccgtggtctcc

SEQ ID NO: 3813113 - DNA, 25 bp, Homo sapien
gcttttaatggtctggaaatcactc

SEQ ID NO: 3813114 - DNA, 25 bp, Homo sapien
catttgcaagtatgcttacagctcc

SEQ ID NO: 3813115 - DNA, 25 bp, Homo sapien
tgattgctcggttctgtccaaccac

SEQ ID NO: 3813116 - DNA, 25 bp, Homo sapien
cagctgtatatgttttcgggaggag

SEQ ID NO: 3813117 - DNA, 25 bp, Homo sapien
gctgtatatgttttcgggaggaggc

SEQ ID NO: 3813118 - DNA, 25 bp, Homo sapien
gcagctgtatatgttttcgggagga

SEQ ID NO: 3813119 - DNA, 25 bp, Homo sapien
aggacaagattattgcagctgtata

SEQ ID NO: 3813120 - DNA, 25 bp, Homo sapien
caagctgttttaaatcgtgtctgga

SEQ ID NO: 3813121 - DNA, 25 bp, Homo sapien
gttttaaatcgtgtctggaatgagg

SEQ ID NO: 3813122 - DNA, 25 bp, Homo sapien
tcaactatatcctctgtatctacag

SEQ ID NO: 3813123 - DNA, 25 bp, Homo sapien
tatgggtatatcatcgcaagctgtt

SEQ ID NO: 3813124 - DNA, 25 bp, Homo sapien
tgacagccctgctggtataaccctg

SEQ ID NO: 3813125 - DNA, 25 bp, Homo sapien
cattccatttagatgcgtattgcag

SEQ ID NO: 3813126 - DNA, 25 bp, Homo sapien
accctgtcctatgggagctgctgct

SEQ ID NO: 3813127 - DNA, 25 bp, Homo sapien
cgtattgcagttctgttgtgagtgt

SEQ ID NO: 3813128 - DNA, 25 bp, Homo sapien
ccgattggatagagtcagacttttc

SEQ ID NO: 3813129 - DNA, 25 bp, Homo sapien
cagtaagccttcttacatgaagaga

SEQ ID NO: 3813130 - DNA, 25 bp, Homo sapien
gatgataaacgtttacagtaagcct

SEQ ID NO: 3813131 - DNA, 25 bp, Homo sapien
tattttgcaggaatcatggaccagg

SEQ ID NO: 3813132 - DNA, 25 bp, Homo sapien
catgtaacataagccagttgacagg

SEQ ID NO: 3813133 - DNA, 25 bp, Homo sapien
taacataagccagttgacaggaatc

SEQ ID NO: 3813134 - DNA, 25 bp, Homo sapien
tgtaacataagccagttgacaggaa

SEQ ID NO: 3813135 - DNA, 25 bp, Homo sapien
acataagccagttgacaggaatctg

SEQ ID NO: 3813136 - DNA, 25 bp, Homo sapien
gggtcttcttgcttttgggagatgc

SEQ ID NO: 3813137 - DNA, 25 bp, Homo sapien
tccttctccataatctgaaacccat

SEQ ID NO: 3813138 - DNA, 25 bp, Homo sapien
cattgttgttcaaaggtgggtcttc

SEQ ID NO: 3813139 - DNA, 25 bp, Homo sapien
gtcttcttgcttttgggagatgcac

SEQ ID NO: 3813140 - DNA, 25 bp, Homo sapien
tgaatgccgctgaggcccagttcac

SEQ ID NO: 3813141 - DNA, 25 bp, Homo sapien
ctgtgatctgaatgccgctgaggcc

SEQ ID NO: 3813142 - DNA, 25 bp, Homo sapien
atctgaatgccgctgaggcccagtt

SEQ ID NO: 3813143 - DNA, 25 bp, Homo sapien
tgtgatctgaatgccgctgaggccc

SEQ ID NO: 3813144 - DNA, 25 bp, Homo sapien
tcacacactgggcaaggcaattccc

SEQ ID NO: 3813145 - DNA, 25 bp, Homo sapien
ggcaaggcaattcccaatggctaag

SEQ ID NO: 3813146 - DNA, 25 bp, Homo sapien
ggcaattcccaatggctaagggcaa

SEQ ID NO: 3813147 - DNA, 25 bp, Homo sapien
gggcaatttccttgtgagagaagca

SEQ ID NO: 3813148 - DNA, 25 bp, Homo sapien
ctcagaaggctgtttgatcctatca

SEQ ID NO: 3813149 - DNA, 25 bp, Homo sapien
ttgatcctatcacaagccttgccat

SEQ ID NO: 3813150 - DNA, 25 bp, Homo sapien
cagagagggctacctgacaggttcc

SEQ ID NO: 3813151 - DNA, 25 bp, Homo sapien
cagcagagagggctacctgacaggt

SEQ ID NO: 3813152 - DNA, 25 bp, Homo sapien
gactctttacacctttgtagatcca

SEQ ID NO: 3813153 - DNA, 25 bp, Homo sapien
cctggactctttacacctttgtaga

SEQ ID NO: 3813154 - DNA, 25 bp, Homo sapien
tggactctttacacctttgtagatc

SEQ ID NO: 3813155 - DNA, 25 bp, Homo sapien
ctttgcttcacacctgacttcctcc

SEQ ID NO: 3813156 - DNA, 25 bp, Homo sapien
tcaccatgatttgcatgccaaaggg

SEQ ID NO: 3813157 - DNA, 25 bp, Homo sapien
aggctggctctgcaataccgctggc

SEQ ID NO: 3813158 - DNA, 25 bp, Homo sapien
gctggcactgtccgcaggctctgtg

SEQ ID NO: 3813159 - DNA, 25 bp, Homo sapien
caccatgatttgcatgccaaaggga

SEQ ID NO: 3813160 - DNA, 25 bp, Homo sapien
gactccatctaaggcaccatccaag

SEQ ID NO: 3813161 - DNA, 25 bp, Homo sapien
ggaatgagggactccatctaaggca

SEQ ID NO: 3813162 - DNA, 25 bp, Homo sapien
caccatccaagtcattagaggtcat

SEQ ID NO: 3813163 - DNA, 25 bp, Homo sapien
taaggcaccatccaagtcattagag

SEQ ID NO: 3813164 - DNA, 25 bp, Homo sapien
tcaggcattagtatatgaagtgttt

SEQ ID NO: 3813165 - DNA, 25 bp, Homo sapien
gcattagtatatgaagtgtttgtgc

SEQ ID NO: 3813166 - DNA, 25 bp, Homo sapien
ctgtaagtgctagcctgtcaataat

SEQ ID NO: 3813167 - DNA, 25 bp, Homo sapien
tacctgtaagtgctagcctgtcaat

SEQ ID NO: 3813168 - DNA, 25 bp, Homo sapien
tctctattaatgggtggaagcggat

SEQ ID NO: 3813169 - DNA, 25 bp, Homo sapien
tctgccacaactctagtgctagagt

SEQ ID NO: 3813170 - DNA, 25 bp, Homo sapien
ttctgccacaactctagtgctagag

SEQ ID NO: 3813171 - DNA, 25 bp, Homo sapien
taatgggtggaagcggataagcagg

SEQ ID NO: 3813172 - DNA, 25 bp, Homo sapien
tcctaagaccaatgggtcgctctta

SEQ ID NO: 3813173 - DNA, 25 bp, Homo sapien
accaatgggtcgctcttatacttta

SEQ ID NO: 3813174 - DNA, 25 bp, Homo sapien
taagaccaatgggtcgctcttatac

SEQ ID NO: 3813175 - DNA, 25 bp, Homo sapien
atgggtcgctcttatactttaaaag

SEQ ID NO: 3813176 - DNA, 25 bp, Homo sapien
aagccatgttgttaggcatgggggc

SEQ ID NO: 3813177 - DNA, 25 bp, Homo sapien
tgagttagcagttcttgcatagttt

SEQ ID NO: 3813178 - DNA, 25 bp, Homo sapien
gttagcagttcttgcatagtttctc

SEQ ID NO: 3813179 - DNA, 25 bp, Homo sapien
gccatgttgttaggcatgggggcat

SEQ ID NO: 3813180 - DNA, 25 bp, Homo sapien
gatccacaatctaatattttgacta

SEQ ID NO: 3813181 - DNA, 25 bp, Homo sapien
tccacaatctaatattttgactaaa

SEQ ID NO: 3813182 - DNA, 25 bp, Homo sapien
gttacagacttctattatcagatcc

SEQ ID NO: 3813183 - DNA, 25 bp, Homo sapien
agtaaataagaagttacagacttct

SEQ ID NO: 3813184 - DNA, 25 bp, Homo sapien
tcctccatttggcttcttagtcaac

SEQ ID NO: 3813185 - DNA, 25 bp, Homo sapien
tcttagtcaacccttgtcgacttcc

SEQ ID NO: 3813186 - DNA, 25 bp, Homo sapien
tggcttcttagtcaacccttgtcga

SEQ ID NO: 3813187 - DNA, 25 bp, Homo sapien
tcaacccttgtcgacttccctgtaa

SEQ ID NO: 3813188 - DNA, 25 bp, Homo sapien
ttttctttctctggatgcagctcag

SEQ ID NO: 3813189 - DNA, 25 bp, Homo sapien
gttacacagggagcaatgccctctg

SEQ ID NO: 3813190 - DNA, 25 bp, Homo sapien
ccatagttaatgaggatgtttggaa

SEQ ID NO: 3813191 - DNA, 25 bp, Homo sapien
ttcttcaagtccatagttaatgagg

SEQ ID NO: 3813192 - DNA, 25 bp, Homo sapien
aaatccagtagaataaaccactgcc

SEQ ID NO: 3813193 - DNA, 25 bp, Homo sapien
caaatccagtagaataaaccactgc

SEQ ID NO: 3813194 - DNA, 25 bp, Homo sapien
atccagtagaataaaccactgccat

SEQ ID NO: 3813195 - DNA, 25 bp, Homo sapien
ccaaatccagtagaataaaccactg

SEQ ID NO: 3813196 - DNA, 25 bp, Homo sapien
ggctagctccttgaactgaatcctg

SEQ ID NO: 3813197 - DNA, 25 bp, Homo sapien
catctgagtgcatccacttggagga

SEQ ID NO: 3813198 - DNA, 25 bp, Homo sapien
gagaccagcgcctctcatctgagtg

SEQ ID NO: 3813199 - DNA, 25 bp, Homo sapien
cctagggcccctacatggatttact

SEQ ID NO: 3813200 - DNA, 25 bp, Homo sapien
gaaggtggtccataggataaggaac

SEQ ID NO: 3813201 - DNA, 25 bp, Homo sapien
aaaagcaagggtgattggatgaagg

SEQ ID NO: 3813202 - DNA, 25 bp, Homo sapien
ggccataggatgaaggaaggtggtc

SEQ ID NO: 3813203 - DNA, 25 bp, Homo sapien
aggtggtccataggataaggaacag

SEQ ID NO: 3813204 - DNA, 25 bp, Homo sapien
catgaaggcactcatatggaacacc

SEQ ID NO: 3813205 - DNA, 25 bp, Homo sapien
tgatgtacacaatgtctctggtggg

SEQ ID NO: 3813206 - DNA, 25 bp, Homo sapien
taactgccggctctattaaattggc

SEQ ID NO: 3813207 - DNA, 25 bp, Homo sapien
atggaacaccatctctaactgccgg

SEQ ID NO: 3813208 - DNA, 25 bp, Homo sapien
gcactcgcccccttggtatccacac

SEQ ID NO: 3813209 - DNA, 25 bp, Homo sapien
ctctctgactcgacagcagcactcg

SEQ ID NO: 3813210 - DNA, 25 bp, Homo sapien
agcactcgcccccttggtatccaca

SEQ ID NO: 3813211 - DNA, 25 bp, Homo sapien
tctgactcgacagcagcactcgccc

SEQ ID NO: 3813212 - DNA, 25 bp, Homo sapien
tccctgaaggcctctgcacctaaag

SEQ ID NO: 3813213 - DNA, 25 bp, Homo sapien
atggctgactgttccaggggtctca

SEQ ID NO: 3813214 - DNA, 25 bp, Homo sapien
gaaggcctctgcacctaaagcagcc

SEQ ID NO: 3813215 - DNA, 25 bp, Homo sapien
tgttctccctgaaggcctctgcacc

SEQ ID NO: 3813216 - DNA, 25 bp, Homo sapien
ggcagtaaggttagtaattctatag

SEQ ID NO: 3813217 - DNA, 25 bp, Homo sapien
aataactgtacagtgcctagacatt

SEQ ID NO: 3813218 - DNA, 25 bp, Homo sapien
ataactgtacagtgcctagacattc

SEQ ID NO: 3813219 - DNA, 25 bp, Homo sapien
attctacaaggggcagtaaggttag

SEQ ID NO: 3813220 - DNA, 25 bp, Homo sapien
tgagatcacctaaacactggaaaag

SEQ ID NO: 3813221 - DNA, 25 bp, Homo sapien
taccagattgaatgactacctattg

SEQ ID NO: 3813222 - DNA, 25 bp, Homo sapien
taaaccaacaaataatttggctgta

SEQ ID NO: 3813223 - DNA, 25 bp, Homo sapien
aaagcaatcatggtaattttatgca

SEQ ID NO: 3813224 - DNA, 25 bp, Homo sapien
cacaacacacacccagtcataaagc

SEQ ID NO: 3813225 - DNA, 25 bp, Homo sapien
acacacaacacacacccagtcataa

SEQ ID NO: 3813226 - DNA, 25 bp, Homo sapien
cacacaacacacacccagtcataaa

SEQ ID NO: 3813227 - DNA, 25 bp, Homo sapien
acacaacacacacccagtcataaag

SEQ ID NO: 3813228 - DNA, 25 bp, Homo sapien
tcctatgtaaagataatcggccctt

SEQ ID NO: 3813229 - DNA, 25 bp, Homo sapien
gaatagctttttgtcaccttgccat

SEQ ID NO: 3813230 - DNA, 25 bp, Homo sapien
ccttgccattcttgaagacagtatg

SEQ ID NO: 3813231 - DNA, 25 bp, Homo sapien
agtgtaacaaaattccctgctggcg

SEQ ID NO: 3813232 - DNA, 25 bp, Homo sapien
tccaccagaaccgaaggcaatattt

SEQ ID NO: 3813233 - DNA, 25 bp, Homo sapien
ataaggtggcagcaacttgtaaccc

SEQ ID NO: 3813234 - DNA, 25 bp, Homo sapien
gctgaccacagatacaggcactgat

SEQ ID NO: 3813235 - DNA, 25 bp, Homo sapien
tttaacacagtgtcaagagggtttc

SEQ ID NO: 3813236 - DNA, 25 bp, Homo sapien
aatcatgtaacttgtattccagacc

SEQ ID NO: 3813237 - DNA, 25 bp, Homo sapien
atcatgtaacttgtattccagacca

SEQ ID NO: 3813238 - DNA, 25 bp, Homo sapien
aaatcatgtaacttgtattccagac

SEQ ID NO: 3813239 - DNA, 25 bp, Homo sapien
tcatgtaacttgtattccagaccat

SEQ ID NO: 3813240 - DNA, 25 bp, Homo sapien
ctgtcttcttttcacggcattcaaa

SEQ ID NO: 3813241 - DNA, 25 bp, Homo sapien
gtaagccagtaacactctggatctg

SEQ ID NO: 3813242 - DNA, 25 bp, Homo sapien
tctgtgttttccaccgtgaagagaa

SEQ ID NO: 3813243 - DNA, 25 bp, Homo sapien
cttattaagaatgtactgcaaccca

SEQ ID NO: 3813244 - DNA, 25 bp, Homo sapien
ctgcccagccaggggcgtgcgcgcc

SEQ ID NO: 3813245 - DNA, 25 bp, Homo sapien
cccagccaggggcgtgcgcgccggg

SEQ ID NO: 3813246 - DNA, 25 bp, Homo sapien
tgcccagccaggggcgtgcgcgccg

SEQ ID NO: 3813247 - DNA, 25 bp, Homo sapien
gcccagccaggggcgtgcgcgccgg

SEQ ID NO: 3813248 - DNA, 25 bp, Homo sapien
caagaggccgcgcttcagggaaggg

SEQ ID NO: 3813249 - DNA, 25 bp, Homo sapien
gaggccgcgcttcagggaagggcat

SEQ ID NO: 3813250 - DNA, 25 bp, Homo sapien
agctccaggccaagaggccgcgctt

SEQ ID NO: 3813251 - DNA, 25 bp, Homo sapien
ccagctccaggccaagaggccgcgc

SEQ ID NO: 3813252 - DNA, 25 bp, Homo sapien
tattttcttttggttgtgccagcat

SEQ ID NO: 3813253 - DNA, 25 bp, Homo sapien
gctattttcttttggttgtgccagc

SEQ ID NO: 3813254 - DNA, 25 bp, Homo sapien
gccgccatgaaaactgctattttct

SEQ ID NO: 3813255 - DNA, 25 bp, Homo sapien
ctgctattttcttttggttgtgcca

SEQ ID NO: 3813256 - DNA, 25 bp, Homo sapien
ctggctaccgattctactggtgttg

SEQ ID NO: 3813257 - DNA, 25 bp, Homo sapien
gctaccgattctactggtgttgctc

SEQ ID NO: 3813258 - DNA, 25 bp, Homo sapien
tggctaccgattctactggtgttgc

SEQ ID NO: 3813259 - DNA, 25 bp, Homo sapien
taccgattctactggtgttgctctc

SEQ ID NO: 3813260 - DNA, 25 bp, Homo sapien
tttctgtgggataaaatgggcacca

SEQ ID NO: 3813261 - DNA, 25 bp, Homo sapien
tgggcaccagaaatccgaccaaagc

SEQ ID NO: 3813262 - DNA, 25 bp, Homo sapien
gcagccagcaataaacacagcatca

SEQ ID NO: 3813263 - DNA, 25 bp, Homo sapien
cagcatcaattacgccaccagaaga

SEQ ID NO: 3813264 - DNA, 25 bp, Homo sapien
agcagcaccatgacatcgttgatcg

SEQ ID NO: 3813265 - DNA, 25 bp, Homo sapien
tcggaggagggtgttttgtactgca

SEQ ID NO: 3813266 - DNA, 25 bp, Homo sapien
ccatgacatcgttgatcggaggagg

SEQ ID NO: 3813267 - DNA, 25 bp, Homo sapien
ttttgtactgcacagggatcctggc

SEQ ID NO: 3813268 - DNA, 25 bp, Homo sapien
cttggtgtgggtggtacttcactgc

SEQ ID NO: 3813269 - DNA, 25 bp, Homo sapien
gaaaagccctcctatattctgaagg

SEQ ID NO: 3813270 - DNA, 25 bp, Homo sapien
tggtgtgggtggtacttcactgcct

SEQ ID NO: 3813271 - DNA, 25 bp, Homo sapien
aaagccctcctatattctgaaggag

SEQ ID NO: 3813272 - DNA, 25 bp, Homo sapien
tcactgacacaatacgccacagaat

SEQ ID NO: 3813273 - DNA, 25 bp, Homo sapien
tattgtatggatcattggcatggcc

SEQ ID NO: 3813274 - DNA, 25 bp, Homo sapien
cctcctgtggagctattgtggtcca

SEQ ID NO: 3813275 - DNA, 25 bp, Homo sapien
ctattgtggtccaccttgtggaagg

SEQ ID NO: 3813276 - DNA, 25 bp, Homo sapien
cctcccacagtgattgtccagtgtc

SEQ ID NO: 3813277 - DNA, 25 bp, Homo sapien
atttgatctttactttaaactcatc

SEQ ID NO: 3813278 - DNA, 25 bp, Homo sapien
tttgatctttactttaaactcatct

SEQ ID NO: 3813279 - DNA, 25 bp, Homo sapien
ctcccacagtgattgtccagtgtca

SEQ ID NO: 3813280 - DNA, 25 bp, Homo sapien
caagtatccagctggttgcctcgtt

SEQ ID NO: 3813281 - DNA, 25 bp, Homo sapien
gcctcctttgtaggaagccctcagt

SEQ ID NO: 3813282 - DNA, 25 bp, Homo sapien
cagtcagtaaagtgtcattggaagt

SEQ ID NO: 3813283 - DNA, 25 bp, Homo sapien
gccctcagtgatagaatgagttcca

SEQ ID NO: 3813284 - DNA, 25 bp, Homo sapien
gaaattatgagggaattttctgtca

SEQ ID NO: 3813285 - DNA, 25 bp, Homo sapien
ttgaaagtcgaagccagaaattatg

SEQ ID NO: 3813286 - DNA, 25 bp, Homo sapien
gtaattttcagtcctgtaagttgaa

SEQ ID NO: 3813287 - DNA, 25 bp, Homo sapien
agcaaagattgccagtaattttcag

SEQ ID NO: 3813288 - DNA, 25 bp, Homo sapien
cggcaaagcatggactcaagcaaaa

SEQ ID NO: 3813289 - DNA, 25 bp, Homo sapien
catgccactggaactaaatattgtc

SEQ ID NO: 3813290 - DNA, 25 bp, Homo sapien
tactgagacatctatcatgccactg

SEQ ID NO: 3813291 - DNA, 25 bp, Homo sapien
cagttgcagagagcatcacttcagc

SEQ ID NO: 3813292 - DNA, 25 bp, Homo sapien
gaccgtgaacaattgagattgagat

SEQ ID NO: 3813293 - DNA, 25 bp, Homo sapien
aaagagtttaatctataactgaccg

SEQ ID NO: 3813294 - DNA, 25 bp, Homo sapien
aactgaccgtgaacaattgagattg

SEQ ID NO: 3813295 - DNA, 25 bp, Homo sapien
ataacttgctacctctggaccagtc

SEQ ID NO: 3813296 - DNA, 25 bp, Homo sapien
gagcaacagagcgaactttcacttg

SEQ ID NO: 3813297 - DNA, 25 bp, Homo sapien
gcaacagagcgaactttcacttggc

SEQ ID NO: 3813298 - DNA, 25 bp, Homo sapien
cagagcgaactttcacttggctgcc

SEQ ID NO: 3813299 - DNA, 25 bp, Homo sapien
ccagagcaacagagcgaactttcac

SEQ ID NO: 3813300 - DNA, 25 bp, Homo sapien
gtaagctggctattgactgtatatt

SEQ ID NO: 3813301 - DNA, 25 bp, Homo sapien
aagtaagctggctattgactgtata

SEQ ID NO: 3813302 - DNA, 25 bp, Homo sapien
gaagtaagctggctattgactgtat

SEQ ID NO: 3813303 - DNA, 25 bp, Homo sapien
agctggctattgactgtatatttta

SEQ ID NO: 3813304 - DNA, 25 bp, Homo sapien
cacttcaggttggatgtaataacca

SEQ ID NO: 3813305 - DNA, 25 bp, Homo sapien
ccatgaaattagcattgtcagcatg

SEQ ID NO: 3813306 - DNA, 25 bp, Homo sapien
atgcacttcaggttggatgtaataa

SEQ ID NO: 3813307 - DNA, 25 bp, Homo sapien
ggttggatgtaataaccatgcttca

SEQ ID NO: 3813308 - DNA, 25 bp, Homo sapien
ctttgtgtaggaaagtttactctgc

SEQ ID NO: 3813309 - DNA, 25 bp, Homo sapien
tgttcttcaacatcagaattagtcc

SEQ ID NO: 3813310 - DNA, 25 bp, Homo sapien
ttactctgccagaaataatcttttt

SEQ ID NO: 3813311 - DNA, 25 bp, Homo sapien
tctgccttttccacgtgaaaatctt

SEQ ID NO: 3813312 - DNA, 25 bp, Homo sapien
tgggacagtgcatcttctaatgaag

SEQ ID NO: 3813313 - DNA, 25 bp, Homo sapien
tctaatgaagtcaggacgatggtgg

SEQ ID NO: 3813314 - DNA, 25 bp, Homo sapien
gaaagtgggctgataaagagccaga

SEQ ID NO: 3813315 - DNA, 25 bp, Homo sapien
gggccggactgaatactgagaacca

SEQ ID NO: 3813316 - DNA, 25 bp, Homo sapien
acccttgggtccacaatcctcaaca

SEQ ID NO: 3813317 - DNA, 25 bp, Homo sapien
cccttgggtccacaatcctcaacat

SEQ ID NO: 3813318 - DNA, 25 bp, Homo sapien
cctcttcatattggtcctcaaccat

SEQ ID NO: 3813319 - DNA, 25 bp, Homo sapien
tgtcctcttcatattggtcctcaac

SEQ ID NO: 3813320 - DNA, 25 bp, Homo sapien
aatatctaccctcttctgccagccc

SEQ ID NO: 3813321 - DNA, 25 bp, Homo sapien
ttgtcctcttcatattggtcctcaa

SEQ ID NO: 3813322 - DNA, 25 bp, Homo sapien
acatggcaggactgtcaaggaattc

SEQ ID NO: 3813323 - DNA, 25 bp, Homo sapien
cacatggcaggactgtcaaggaatt

SEQ ID NO: 3813324 - DNA, 25 bp, Homo sapien
tcacatggcaggactgtcaaggaat

SEQ ID NO: 3813325 - DNA, 25 bp, Homo sapien
catggcaggactgtcaaggaattca

SEQ ID NO: 3813326 - DNA, 25 bp, Homo sapien
gtaaccaccagacgatgagacttat

SEQ ID NO: 3813327 - DNA, 25 bp, Homo sapien
atcccagagtaaccaccagacgatg

SEQ ID NO: 3813328 - DNA, 25 bp, Homo sapien
gagtaaccaccagacgatgagactt

SEQ ID NO: 3813329 - DNA, 25 bp, Homo sapien
ccagagtaaccaccagacgatgaga

SEQ ID NO: 3813330 - DNA, 25 bp, Homo sapien
tgaaggaacgagctctacactctgt

SEQ ID NO: 3813331 - DNA, 25 bp, Homo sapien
tctgctcgcctattcctgactgggt

SEQ ID NO: 3813332 - DNA, 25 bp, Homo sapien
tcctgactgggtgaaggaacgagct

SEQ ID NO: 3813333 - DNA, 25 bp, Homo sapien
caaacccacagtctgctcgcctatt

SEQ ID NO: 3813334 - DNA, 25 bp, Homo sapien
tctctggatccactgcggtgctgtc

SEQ ID NO: 3813335 - DNA, 25 bp, Homo sapien
cggtgctgtcctgaagcacttgaag

SEQ ID NO: 3813336 - DNA, 25 bp, Homo sapien
tgcggtgctgtcctgaagcacttga

SEQ ID NO: 3813337 - DNA, 25 bp, Homo sapien
tctggatccactgcggtgctgtcct

SEQ ID NO: 3813338 - DNA, 25 bp, Homo sapien
gagttgcaaaatgtagttccttcac

SEQ ID NO: 3813339 - DNA, 25 bp, Homo sapien
gttgcaaaatgtagttccttcacca

SEQ ID NO: 3813340 - DNA, 25 bp, Homo sapien
ctgagttgcaaaatgtagttccttc

SEQ ID NO: 3813341 - DNA, 25 bp, Homo sapien
ttgcaaaatgtagttccttcaccat

SEQ ID NO: 3813342 - DNA, 25 bp, Homo sapien
ctgccagagatgtagagaaacataa

SEQ ID NO: 3813343 - DNA, 25 bp, Homo sapien
agagaaacataacaattaagaacat

SEQ ID NO: 3813344 - DNA, 25 bp, Homo sapien
tgtagagaaacataacaattaagaa

SEQ ID NO: 3813345 - DNA, 25 bp, Homo sapien
tgccagagatgtagagaaacataac

SEQ ID NO: 3813346 - DNA, 25 bp, Homo sapien
ggcagaagagattgcagatttggtt

SEQ ID NO: 3813347 - DNA, 25 bp, Homo sapien
gcagaagagattgcagatttggttg

SEQ ID NO: 3813348 - DNA, 25 bp, Homo sapien
cacctgttatgaacgacatcttaag

SEQ ID NO: 3813349 - DNA, 25 bp, Homo sapien
taagctctagatctgctgagggcaa

SEQ ID NO: 3813350 - DNA, 25 bp, Homo sapien
cagatcttatacctgtagagggaaa

SEQ ID NO: 3813351 - DNA, 25 bp, Homo sapien
ttccaagaatgctttggccaggtca

SEQ ID NO: 3813352 - DNA, 25 bp, Homo sapien
aaacatagtgcaaaccctccaagac

SEQ ID NO: 3813353 - DNA, 25 bp, Homo sapien
cctccaagacattaagatggttctc

SEQ ID NO: 3813354 - DNA, 25 bp, Homo sapien
gatggttctcagtcaacagataaga

SEQ ID NO: 3813355 - DNA, 25 bp, Homo sapien
tcttggatccaccatagaaatatga

SEQ ID NO: 3813356 - DNA, 25 bp, Homo sapien
ctgtgaagctggcaaatgcagccat

SEQ ID NO: 3813357 - DNA, 25 bp, Homo sapien
ttgaatctggaagactcaactgtga

SEQ ID NO: 3813358 - DNA, 25 bp, Homo sapien
atctggaagactcaactgtgaagct

SEQ ID NO: 3813359 - DNA, 25 bp, Homo sapien
ttttttgaatctggaagactcaact

SEQ ID NO: 3813360 - DNA, 25 bp, Homo sapien
ctaaagatatttccaaagaattcct

SEQ ID NO: 3813361 - DNA, 25 bp, Homo sapien
tatttccaaagaattccttcaatgt

SEQ ID NO: 3813362 - DNA, 25 bp, Homo sapien
gatatttccaaagaattccttcaat

SEQ ID NO: 3813363 - DNA, 25 bp, Homo sapien
aagatatttccaaagaattccttca

SEQ ID NO: 3813364 - DNA, 25 bp, Homo sapien
tcaaatgaagtagattaatcctgct

SEQ ID NO: 3813365 - DNA, 25 bp, Homo sapien
gaagtagattaatcctgctcacaat

SEQ ID NO: 3813366 - DNA, 25 bp, Homo sapien
aatgaagtagattaatcctgctcac

SEQ ID NO: 3813367 - DNA, 25 bp, Homo sapien
agtagattaatcctgctcacaatca

SEQ ID NO: 3813368 - DNA, 25 bp, Homo sapien
catgcttttgcatatcactttctga

SEQ ID NO: 3813369 - DNA, 25 bp, Homo sapien
acatgcttttgcatatcactttctg

SEQ ID NO: 3813370 - DNA, 25 bp, Homo sapien
cacatgcttttgcatatcactttct

SEQ ID NO: 3813371 - DNA, 25 bp, Homo sapien
gtcagtgcttctcaagagtttccca

SEQ ID NO: 3813372 - DNA, 25 bp, Homo sapien
gacttgaactctttcagttacagga

SEQ ID NO: 3813373 - DNA, 25 bp, Homo sapien
taataaaccattgtttgcctgaagg

SEQ ID NO: 3813374 - DNA, 25 bp, Homo sapien
taatcccacacttaaaaagagcctg

SEQ ID NO: 3813375 - DNA, 25 bp, Homo sapien
gatccactgccagtttgaaagctcc

SEQ ID NO: 3813376 - DNA, 25 bp, Homo sapien
agatccactgccagtttgaaagctc

SEQ ID NO: 3813377 - DNA, 25 bp, Homo sapien
gatcccacagaatacactttccaga

SEQ ID NO: 3813378 - DNA, 25 bp, Homo sapien
gcaacgtgagaaacatagttgcact

SEQ ID NO: 3813379 - DNA, 25 bp, Homo sapien
gtgagtgccagaccccagattgatg

SEQ ID NO: 3813380 - DNA, 25 bp, Homo sapien
tgcctctgctcgctgcatgaggcga

SEQ ID NO: 3813381 - DNA, 25 bp, Homo sapien
tctaaaagggggctatgtcctccag

SEQ ID NO: 3813382 - DNA, 25 bp, Homo sapien
gtctcttccaccgtcaaccatgcag

SEQ ID NO: 3813383 - DNA, 25 bp, Homo sapien
tgattacaattggatgagggccagt

SEQ ID NO: 3813384 - DNA, 25 bp, Homo sapien
tggacacagtggaaacaccacagat

SEQ ID NO: 3813385 - DNA, 25 bp, Homo sapien
gggggattgtgcacgcagcgctcat

SEQ ID NO: 3813386 - DNA, 25 bp, Homo sapien
gcagggggattgtgcacgcagcgct

SEQ ID NO: 3813387 - DNA, 25 bp, Homo sapien
gacagggatgcagggggattgtgca

SEQ ID NO: 3813388 - DNA, 25 bp, Homo sapien
gggatgcagggggattgtgcacgca

SEQ ID NO: 3813389 - DNA, 25 bp, Homo sapien
ttaggatggtatctcagggtcgcac

SEQ ID NO: 3813390 - DNA, 25 bp, Homo sapien
gccatactcgaagtggccctcacag

SEQ ID NO: 3813391 - DNA, 25 bp, Homo sapien
atactcgaagtggccctcacagcct

SEQ ID NO: 3813392 - DNA, 25 bp, Homo sapien
ctgggccatactcgaagtggccctc

SEQ ID NO: 3813393 - DNA, 25 bp, Homo sapien
ggccatactcgaagtggccctcaca

SEQ ID NO: 3813394 - DNA, 25 bp, Homo sapien
aagggcaaatggcagcactcttgtg

SEQ ID NO: 3813395 - DNA, 25 bp, Homo sapien
tagacatctgggctcgctttagagt

SEQ ID NO: 3813396 - DNA, 25 bp, Homo sapien
tcatagacatctgggctcgctttag

SEQ ID NO: 3813397 - DNA, 25 bp, Homo sapien
catgtcatagacatctgggctcgct

SEQ ID NO: 3813398 - DNA, 25 bp, Homo sapien
tagtcacatgtcatagacatctggg

SEQ ID NO: 3813399 - DNA, 25 bp, Homo sapien
gagttgatcgtcttttccattaggg

SEQ ID NO: 3813400 - DNA, 25 bp, Homo sapien
ttctgacaggatcccataacacacc

SEQ ID NO: 3813401 - DNA, 25 bp, Homo sapien
aagtcattgttctgacaggatccca

SEQ ID NO: 3813402 - DNA, 25 bp, Homo sapien
gggtttctgccagttcattggactt

SEQ ID NO: 3813403 - DNA, 25 bp, Homo sapien
gagttcttgtctcaaacgggagcac

SEQ ID NO: 3813404 - DNA, 25 bp, Homo sapien
tgcatctggtaccaggacaccaagt

SEQ ID NO: 3813405 - DNA, 25 bp, Homo sapien
ggagttaaatgagcccagaaacgag

SEQ ID NO: 3813406 - DNA, 25 bp, Homo sapien
tctatgagtagctttaaccatgcag

SEQ ID NO: 3813407 - DNA, 25 bp, Homo sapien
ccagtgggtggatggcaagtgcagt

SEQ ID NO: 3813408 - DNA, 25 bp, Homo sapien
ttgcaaaagaagattcctggcccaa

SEQ ID NO: 3813409 - DNA, 25 bp, Homo sapien
gaaggatgtatcttcgaggaaatcc

SEQ ID NO: 3813410 - DNA, 25 bp, Homo sapien
tggcccacacagtcagatcctcgtg

SEQ ID NO: 3813411 - DNA, 25 bp, Homo sapien
tctctaataaactctgacgtgaatc

SEQ ID NO: 3813412 - DNA, 25 bp, Homo sapien
taaactctgacgtgaatcaaatact

SEQ ID NO: 3813413 - DNA, 25 bp, Homo sapien
gaaacatggcagtggtctctaataa

SEQ ID NO: 3813414 - DNA, 25 bp, Homo sapien
cgtgaatcaaatacttgagttggaa

SEQ ID NO: 3813415 - DNA, 25 bp, Homo sapien
cctttgcacttttccccatattttg

SEQ ID NO: 3813416 - DNA, 25 bp, Homo sapien
ttccccatattttggctaaatgcac

SEQ ID NO: 3813417 - DNA, 25 bp, Homo sapien
gcacttttccccatattttggctaa

SEQ ID NO: 3813418 - DNA, 25 bp, Homo sapien
tttccccatattttggctaaatgca

SEQ ID NO: 3813419 - DNA, 25 bp, Homo sapien
gagcctccgtcaaagcaatcatatt

SEQ ID NO: 3813420 - DNA, 25 bp, Homo sapien
aaatctaccaggctaaggccctggc

SEQ ID NO: 3813421 - DNA, 25 bp, Homo sapien
aaatacacaagatgagagcacagag

SEQ ID NO: 3813422 - DNA, 25 bp, Homo sapien
ttaagctgtgctgtgtatgatgcct

SEQ ID NO: 3813423 - DNA, 25 bp, Homo sapien
tacaaggaaagcatctgctggtgag

SEQ ID NO: 3813424 - DNA, 25 bp, Homo sapien
caaggaaagcatctgctggtgagaa

SEQ ID NO: 3813425 - DNA, 25 bp, Homo sapien
acaaggaaagcatctgctggtgaga

SEQ ID NO: 3813426 - DNA, 25 bp, Homo sapien
tggctgtaccttcacgcattcgggc

SEQ ID NO: 3813427 - DNA, 25 bp, Homo sapien
agcgaggcttcacgccagtgtggct

SEQ ID NO: 3813428 - DNA, 25 bp, Homo sapien
gccagtgtggcttcatctcatgcat

SEQ ID NO: 3813429 - DNA, 25 bp, Homo sapien
gactgcctcactcaaacagggcagc

SEQ ID NO: 3813430 - DNA, 25 bp, Homo sapien
cagagagggaacaggtacgggtcgg

SEQ ID NO: 3813431 - DNA, 25 bp, Homo sapien
ccccagccaccgctagagcggtgag

SEQ ID NO: 3813432 - DNA, 25 bp, Homo sapien
caccgctagagcggtgagggcacac

SEQ ID NO: 3813433 - DNA, 25 bp, Homo sapien
agagggaacaggtacgggtcggcag

SEQ ID NO: 3813434 - DNA, 25 bp, Homo sapien
ggcaattatgcaaaatgacaagtga

SEQ ID NO: 3813435 - DNA, 25 bp, Homo sapien
tcctgctgcaggcaattatgcaaaa

SEQ ID NO: 3813436 - DNA, 25 bp, Homo sapien
agcccagcgaagagatgttcctgct

SEQ ID NO: 3813437 - DNA, 25 bp, Homo sapien
tgacaagtgattgctttccttttca

SEQ ID NO: 3813438 - DNA, 25 bp, Homo sapien
tcagggccttcgtagatgaaaaagc

SEQ ID NO: 3813439 - DNA, 25 bp, Homo sapien
ctagttcgttctcttcgtgctgaga

SEQ ID NO: 3813440 - DNA, 25 bp, Homo sapien
agttcgttctcttcgtgctgagata

SEQ ID NO: 3813441 - DNA, 25 bp, Homo sapien
tcgttctcttcgtgctgagatagct

SEQ ID NO: 3813442 - DNA, 25 bp, Homo sapien
ttcgttctcttcgtgctgagatagc

SEQ ID NO: 3813443 - DNA, 25 bp, Homo sapien
ttcctctagaggacttgcggagtgg

SEQ ID NO: 3813444 - DNA, 25 bp, Homo sapien
cttcctctagaggacttgcggagtg

SEQ ID NO: 3813445 - DNA, 25 bp, Homo sapien
tcctctagaggacttgcggagtggg

SEQ ID NO: 3813446 - DNA, 25 bp, Homo sapien
tctccaggtcacaatgcttatcgta

SEQ ID NO: 3813447 - DNA, 25 bp, Homo sapien
tagaacgtggcctggtccacgaaga

SEQ ID NO: 3813448 - DNA, 25 bp, Homo sapien
tggcctggtccacgaagactaccac

SEQ ID NO: 3813449 - DNA, 25 bp, Homo sapien
caatgcttatcgtagaacgtggcct

SEQ ID NO: 3813450 - DNA, 25 bp, Homo sapien
gaaatatagtgggttgctgttttaa

SEQ ID NO: 3813451 - DNA, 25 bp, Homo sapien
gatacatatcctaaggtcagaaagt

SEQ ID NO: 3813452 - DNA, 25 bp, Homo sapien
gctgttttaaataaggtggacaaga

SEQ ID NO: 3813453 - DNA, 25 bp, Homo sapien
ataaaatcctcaagtgaatcccaag

SEQ ID NO: 3813454 - DNA, 25 bp, Homo sapien
cagggatctgtccactatcaggtgt

SEQ ID NO: 3813455 - DNA, 25 bp, Homo sapien
tccacagaaagaagaccctggtcct

SEQ ID NO: 3813456 - DNA, 25 bp, Homo sapien
tctgggcccttggttctccctccag

SEQ ID NO: 3813457 - DNA, 25 bp, Homo sapien
gagccccaggacgtgacagggatct

SEQ ID NO: 3813458 - DNA, 25 bp, Homo sapien
tgccattcctggtgttagctaccca

SEQ ID NO: 3813459 - DNA, 25 bp, Homo sapien
cattgccattcctggtgttagctac

SEQ ID NO: 3813460 - DNA, 25 bp, Homo sapien
tgcattgccattcctggtgttagct

SEQ ID NO: 3813461 - DNA, 25 bp, Homo sapien
cattcctggtgttagctacccacat

SEQ ID NO: 3813462 - DNA, 25 bp, Homo sapien
tcaggcaccttgcaggacaactgca

SEQ ID NO: 3813463 - DNA, 25 bp, Homo sapien
gaaatagcttttggggcaatggtac

SEQ ID NO: 3813464 - DNA, 25 bp, Homo sapien
attcgaataggttattaggtgtgga

SEQ ID NO: 3813465 - DNA, 25 bp, Homo sapien
tgaaagccctgttatgaagttccat

SEQ ID NO: 3813466 - DNA, 25 bp, Homo sapien
gtacatttgaaagccctgttatgaa

SEQ ID NO: 3813467 - DNA, 25 bp, Homo sapien
caacaaaactgactggttgagagtc

SEQ ID NO: 3813468 - DNA, 25 bp, Homo sapien
caaactacatgagaatttttcaact

SEQ ID NO: 3813469 - DNA, 25 bp, Homo sapien
aaacatcccacttattactgaagtg

SEQ ID NO: 3813470 - DNA, 25 bp, Homo sapien
tatgggtactcttatctaactctcc

SEQ ID NO: 3813471 - DNA, 25 bp, Homo sapien
cagtagttgaatcatccgctaaaag

SEQ ID NO: 3813472 - DNA, 25 bp, Homo sapien
tattgtggtctcgaggaggaacagt

SEQ ID NO: 3813473 - DNA, 25 bp, Homo sapien
ggagttaatattgtggtctcgagga

SEQ ID NO: 3813474 - DNA, 25 bp, Homo sapien
gctaaaagtaagcagagtaactcca

SEQ ID NO: 3813475 - DNA, 25 bp, Homo sapien
ccttcaaaactctcatcgggtaaca

SEQ ID NO: 3813476 - DNA, 25 bp, Homo sapien
ttccttcaaaactctcatcgggtaa

SEQ ID NO: 3813477 - DNA, 25 bp, Homo sapien
tccttcaaaactctcatcgggtaac

SEQ ID NO: 3813478 - DNA, 25 bp, Homo sapien
cttcaaaactctcatcgggtaacat

SEQ ID NO: 3813479 - DNA, 25 bp, Homo sapien
tagatcagaggttcccatcagaatc

SEQ ID NO: 3813480 - DNA, 25 bp, Homo sapien
tcttgtgattctcgggtattgtgta

SEQ ID NO: 3813481 - DNA, 25 bp, Homo sapien
aatgttatcatgaatatatctgtga

SEQ ID NO: 3813482 - DNA, 25 bp, Homo sapien
tatctaccaatagaatatacaggct

SEQ ID NO: 3813483 - DNA, 25 bp, Homo sapien
cattgcactcagatcgggccattgc

SEQ ID NO: 3813484 - DNA, 25 bp, Homo sapien
taaacaagaggttgacgtgcaataa

SEQ ID NO: 3813485 - DNA, 25 bp, Homo sapien
gaggttgacgtgcaataagcgttca

SEQ ID NO: 3813486 - DNA, 25 bp, Homo sapien
gaagtaaacaagaggttgacgtgca

SEQ ID NO: 3813487 - DNA, 25 bp, Homo sapien
gacgtgcaataagcgttcaaaaacc

SEQ ID NO: 3813488 - DNA, 25 bp, Homo sapien
caatgcattgatgactgttaattcc

SEQ ID NO: 3813489 - DNA, 25 bp, Homo sapien
tgactgttaattccatgctcctcaa

SEQ ID NO: 3813490 - DNA, 25 bp, Homo sapien
ggtcctctgctgattgatataaatc

SEQ ID NO: 3813491 - DNA, 25 bp, Homo sapien
aggtcctctgctgattgatataaat

SEQ ID NO: 3813492 - DNA, 25 bp, Homo sapien
tgaccccgaaacacagaagatagag

SEQ ID NO: 3813493 - DNA, 25 bp, Homo sapien
tgcacattgcgttcagtaattgttg

SEQ ID NO: 3813494 - DNA, 25 bp, Homo sapien
gaagatagagattgcacattgcgtt

SEQ ID NO: 3813495 - DNA, 25 bp, Homo sapien
gtggctcctgttagacaattgaccc

SEQ ID NO: 3813496 - DNA, 25 bp, Homo sapien
aaagtacagtattgagaagtaggga

SEQ ID NO: 3813497 - DNA, 25 bp, Homo sapien
tctagcatgagcaaaatccaaggtc

SEQ ID NO: 3813498 - DNA, 25 bp, Homo sapien
aaaatccaaggtcctggctggactc

SEQ ID NO: 3813499 - DNA, 25 bp, Homo sapien
gaagtacagcttgaacaaatccacc

SEQ ID NO: 3813500 - DNA, 25 bp, Homo sapien
caagcaccaccctgggcatttctag

SEQ ID NO: 3813501 - DNA, 25 bp, Homo sapien
aaggagcaggcaaatccaagtcctt

SEQ ID NO: 3813502 - DNA, 25 bp, Homo sapien
agcatgacaataggaggcagaagga

SEQ ID NO: 3813503 - DNA, 25 bp, Homo sapien
cagaaggagcaggcaaatccaagtc

SEQ ID NO: 3813504 - DNA, 25 bp, Homo sapien
gaaggagcaggcaaatccaagtcct

SEQ ID NO: 3813505 - DNA, 25 bp, Homo sapien
gaggcttgggtcaatcgtgcttccc

SEQ ID NO: 3813506 - DNA, 25 bp, Homo sapien
tgggtcaatcgtgcttcccttccct

SEQ ID NO: 3813507 - DNA, 25 bp, Homo sapien
tcccttccctttcataggtcctcta

SEQ ID NO: 3813508 - DNA, 25 bp, Homo sapien
taggtcctctatgagatattgtcat

SEQ ID NO: 3813509 - DNA, 25 bp, Homo sapien
aggatgtcttttgggacagtgttca

SEQ ID NO: 3813510 - DNA, 25 bp, Homo sapien
tgacagtcaaggatgtcttttggga

SEQ ID NO: 3813511 - DNA, 25 bp, Homo sapien
tcaaggatgtcttttgggacagtgt

SEQ ID NO: 3813512 - DNA, 25 bp, Homo sapien
cagtcaaggatgtcttttgggacag

SEQ ID NO: 3813513 - DNA, 25 bp, Homo sapien
ttctacctgagcagagtgacaaggg

SEQ ID NO: 3813514 - DNA, 25 bp, Homo sapien
attctacctgagcagagtgacaagg

SEQ ID NO: 3813515 - DNA, 25 bp, Homo sapien
taaatccacaaattacattatccat

SEQ ID NO: 3813516 - DNA, 25 bp, Homo sapien
cataaatccacaaattacattatcc

SEQ ID NO: 3813517 - DNA, 25 bp, Homo sapien
ctggttggcaagagttaaacataaa

SEQ ID NO: 3813518 - DNA, 25 bp, Homo sapien
aacataaatccacaaattacattat

SEQ ID NO: 3813519 - DNA, 25 bp, Homo sapien
tctgtttttggctccacaagagctg

SEQ ID NO: 3813520 - DNA, 25 bp, Homo sapien
ctgtttttggctccacaagagctgt

SEQ ID NO: 3813521 - DNA, 25 bp, Homo sapien
catccatcaggcctagcaggtactg

SEQ ID NO: 3813522 - DNA, 25 bp, Homo sapien
atccatcaggcctagcaggtactgc

SEQ ID NO: 3813523 - DNA, 25 bp, Homo sapien
tcatccatcaggcctagcaggtact

SEQ ID NO: 3813524 - DNA, 25 bp, Homo sapien
tccatcaggcctagcaggtactgct

SEQ ID NO: 3813525 - DNA, 25 bp, Homo sapien
atttggggtccaaaccgctggtgag

SEQ ID NO: 3813526 - DNA, 25 bp, Homo sapien
aattgagttgggtgatagtgtttct

SEQ ID NO: 3813527 - DNA, 25 bp, Homo sapien
cagaagaattgagttgggtgatagt

SEQ ID NO: 3813528 - DNA, 25 bp, Homo sapien
gtcagaagaattgagttgggtgata

SEQ ID NO: 3813529 - DNA, 25 bp, Homo sapien
ttacccctaaggagcaacaactgct

SEQ ID NO: 3813530 - DNA, 25 bp, Homo sapien
gaagcagcattatcgagagcatgca

SEQ ID NO: 3813531 - DNA, 25 bp, Homo sapien
tcaaatactcaatggtgcgtaggct

SEQ ID NO: 3813532 - DNA, 25 bp, Homo sapien
tacagagcacatcaccagcgttcaa

SEQ ID NO: 3813533 - DNA, 25 bp, Homo sapien
ccctttggtcatgatatatattagc

SEQ ID NO: 3813534 - DNA, 25 bp, Homo sapien
taaattaggatatggttctgcatct

SEQ ID NO: 3813535 - DNA, 25 bp, Homo sapien
tttatgcgatgtttgtgtctggttt

SEQ ID NO: 3813536 - DNA, 25 bp, Homo sapien
caagagatattagtttgtggtgcct

SEQ ID NO: 3813537 - DNA, 25 bp, Homo sapien
aagtcatatcagagtaaggagggcc

SEQ ID NO: 3813538 - DNA, 25 bp, Homo sapien
cctgaagtccaaatcctgtttacct

SEQ ID NO: 3813539 - DNA, 25 bp, Homo sapien
tcaggaaccaccaaactacatagct

SEQ ID NO: 3813540 - DNA, 25 bp, Homo sapien
taagactctggagtgcacttcattt

SEQ ID NO: 3813541 - DNA, 25 bp, Homo sapien
ggaaccagttatttgcagcatgaag

SEQ ID NO: 3813542 - DNA, 25 bp, Homo sapien
tcactgtccgtgaatgcgtctgtgc

SEQ ID NO: 3813543 - DNA, 25 bp, Homo sapien
catactgaaggactgtgggcaccag

SEQ ID NO: 3813544 - DNA, 25 bp, Homo sapien
tgtgctaacatactgaaggactgag

SEQ ID NO: 3813545 - DNA, 25 bp, Homo sapien
cttgacactgtgttcaggctcattt

SEQ ID NO: 3813546 - DNA, 25 bp, Homo sapien
caagatcaacaaaaattgattcctg

SEQ ID NO: 3813547 - DNA, 25 bp, Homo sapien
acaaaaattgattcctgagcctcct

SEQ ID NO: 3813548 - DNA, 25 bp, Homo sapien
aggctcattttggatgtatctttca

SEQ ID NO: 3813549 - DNA, 25 bp, Homo sapien
aacttgtcactgtctaaggccatca

SEQ ID NO: 3813550 - DNA, 25 bp, Homo sapien
cttgtcactgtctaaggccatcaaa

SEQ ID NO: 3813551 - DNA, 25 bp, Homo sapien
tgcaaaatctggaactctaagcaac

SEQ ID NO: 3813552 - DNA, 25 bp, Homo sapien
ggaactctaagcaacttgtcactgt

SEQ ID NO: 3813553 - DNA, 25 bp, Homo sapien
ccttggagatctgtgggaagacagc

SEQ ID NO: 3813554 - DNA, 25 bp, Homo sapien
ttccttggagatctgtgggaagaca

SEQ ID NO: 3813555 - DNA, 25 bp, Homo sapien
tactttccttggagatctgtgggaa

SEQ ID NO: 3813556 - DNA, 25 bp, Homo sapien
agacaaggaaggtatactttccttg

SEQ ID NO: 3813557 - DNA, 25 bp, Homo sapien
cagggtgggtcgactttactgtcac

SEQ ID NO: 3813558 - DNA, 25 bp, Homo sapien
aagaaggccgcaatgtgctggtgac

SEQ ID NO: 3813559 - DNA, 25 bp, Homo sapien
gcttggatgatgaacctggtgcaca

SEQ ID NO: 3813560 - DNA, 25 bp, Homo sapien
cagcagagacaacttccagagcagc

SEQ ID NO: 3813561 - DNA, 25 bp, Homo sapien
ggtggacagtagatctgacaaatag

SEQ ID NO: 3813562 - DNA, 25 bp, Homo sapien
catgggctttggtggacagtagatc

SEQ ID NO: 3813563 - DNA, 25 bp, Homo sapien
ctgacaaatagtgccatttctcatc

SEQ ID NO: 3813564 - DNA, 25 bp, Homo sapien
cagtagatctgacaaatagtgccat

SEQ ID NO: 3813565 - DNA, 25 bp, Homo sapien
gcagtagagaactttgagcacttgg

SEQ ID NO: 3813566 - DNA, 25 bp, Homo sapien
gataggcagtagagaactttgagca

SEQ ID NO: 3813567 - DNA, 25 bp, Homo sapien
tggacactcgttctgaaggtgtttc

SEQ ID NO: 3813568 - DNA, 25 bp, Homo sapien
taaaaagacaggatggacactcgtt

SEQ ID NO: 3813569 - DNA, 25 bp, Homo sapien
gtagtacaaagggtttggagtctga

SEQ ID NO: 3813570 - DNA, 25 bp, Homo sapien
gagtccgtaggcctggacacatttt

SEQ ID NO: 3813571 - DNA, 25 bp, Homo sapien
gtacaaagggtttggagtctgaaga

SEQ ID NO: 3813572 - DNA, 25 bp, Homo sapien
agtccgtaggcctggacacattttg

SEQ ID NO: 3813573 - DNA, 25 bp, Homo sapien
gtagtcataatcagcagacaagtgg

SEQ ID NO: 3813574 - DNA, 25 bp, Homo sapien
caagtggcagacaggttacaggtca

SEQ ID NO: 3813575 - DNA, 25 bp, Homo sapien
tacagtcggagtattcagggctcct

SEQ ID NO: 3813576 - DNA, 25 bp, Homo sapien
gaccttggaaagctattggatcaga

SEQ ID NO: 3813577 - DNA, 25 bp, Homo sapien
ttaagaagaggagttcaactctgat

SEQ ID NO: 3813578 - DNA, 25 bp, Homo sapien
ggagttcaactctgattacaaagtt

SEQ ID NO: 3813579 - DNA, 25 bp, Homo sapien
gaagaggagttcaactctgattaca

SEQ ID NO: 3813580 - DNA, 25 bp, Homo sapien
agttcaactctgattacaaagtttt

SEQ ID NO: 3813581 - DNA, 25 bp, Homo sapien
ctaggagtctatcttggacaaccag

SEQ ID NO: 3813582 - DNA, 25 bp, Homo sapien
gtctatcttggacaaccagctatca

SEQ ID NO: 3813583 - DNA, 25 bp, Homo sapien
gagtctatcttggacaaccagctat

SEQ ID NO: 3813584 - DNA, 25 bp, Homo sapien
aggagtctatcttggacaaccagct

SEQ ID NO: 3813585 - DNA, 25 bp, Homo sapien
tcccactatcttgccacataggtga

SEQ ID NO: 3813586 - DNA, 25 bp, Homo sapien
cagaaggcataagggcttgtctttg

SEQ ID NO: 3813587 - DNA, 25 bp, Homo sapien
ggttaatacattatgcagaaggcat

SEQ ID NO: 3813588 - DNA, 25 bp, Homo sapien
tgcttttcagtgcttgatacagttc

SEQ ID NO: 3813589 - DNA, 25 bp, Homo sapien
gtgctgacaacaccaccccttcctt

SEQ ID NO: 3813590 - DNA, 25 bp, Homo sapien
ccttaatattttttgggattctatg

SEQ ID NO: 3813591 - DNA, 25 bp, Homo sapien
caggttggacattatatcccttgaa

SEQ ID NO: 3813592 - DNA, 25 bp, Homo sapien
catgtggactctgcacaggttggac

SEQ ID NO: 3813593 - DNA, 25 bp, Homo sapien
ccagggcacactgaagtaaggcaga

SEQ ID NO: 3813594 - DNA, 25 bp, Homo sapien
taccttggccatagcgggatcattc

SEQ ID NO: 3813595 - DNA, 25 bp, Homo sapien
tgggacctgcgctcatccagggctt

SEQ ID NO: 3813596 - DNA, 25 bp, Homo sapien
tctgccaactctctatcagcgaagg

SEQ ID NO: 3813597 - DNA, 25 bp, Homo sapien
gcagggccccgatgtcaccggctga

SEQ ID NO: 3813598 - DNA, 25 bp, Homo sapien
cgatgtcaccggctgacgtcaccag

SEQ ID NO: 3813599 - DNA, 25 bp, Homo sapien
ctgcagggccccgatgtcaccggct

SEQ ID NO: 3813600 - DNA, 25 bp, Homo sapien
gggccccgatgtcaccggctgacgt

SEQ ID NO: 3813601 - DNA, 25 bp, Homo sapien
tcagctggcgtcaataggagcttca

SEQ ID NO: 3813602 - DNA, 25 bp, Homo sapien
gagcttcagatcacaagtgaccagg

SEQ ID NO: 3813603 - DNA, 25 bp, Homo sapien
aggagaatatgtgcccctgaaggac

SEQ ID NO: 3813604 - DNA, 25 bp, Homo sapien
gatgctgggttttccgcaattccac

SEQ ID NO: 3813605 - DNA, 25 bp, Homo sapien
cactgaggtaatcaccaggagcccc

SEQ ID NO: 3813606 - DNA, 25 bp, Homo sapien
atcaactcttaaatgatcctcaata

SEQ ID NO: 3813607 - DNA, 25 bp, Homo sapien
caatcaactcttaaatgatcctcaa

SEQ ID NO: 3813608 - DNA, 25 bp, Homo sapien
tcaatcaactcttaaatgatcctca

SEQ ID NO: 3813609 - DNA, 25 bp, Homo sapien
tgtacccatctgttgctctatccac

SEQ ID NO: 3813610 - DNA, 25 bp, Homo sapien
atgcaccactggcaggctccgctcc

SEQ ID NO: 3813611 - DNA, 25 bp, Homo sapien
cactggcaggctccgctcctgcttt

SEQ ID NO: 3813612 - DNA, 25 bp, Homo sapien
ggcgtcactcttggggctcccgtct

SEQ ID NO: 3813613 - DNA, 25 bp, Homo sapien
ggccagggatgggactcatctgtgc

SEQ ID NO: 3813614 - DNA, 25 bp, Homo sapien
ccagggatgggactcatctgtgcat

SEQ ID NO: 3813615 - DNA, 25 bp, Homo sapien
ccagacaaggagtccgtgggccagg

SEQ ID NO: 3813616 - DNA, 25 bp, Homo sapien
caaggagtccgtgggccagggatgg

SEQ ID NO: 3813617 - DNA, 25 bp, Homo sapien
tgttcctgttcttcccgcagcgtca

SEQ ID NO: 3813618 - DNA, 25 bp, Homo sapien
ttcctgttcttcccgcagcgtcacc

SEQ ID NO: 3813619 - DNA, 25 bp, Homo sapien
gttcctgttcttcccgcagcgtcac

SEQ ID NO: 3813620 - DNA, 25 bp, Homo sapien
cagcaggccagggagttccgatttc

SEQ ID NO: 3813621 - DNA, 25 bp, Homo sapien
tccgatttccctggctcccgctggc

SEQ ID NO: 3813622 - DNA, 25 bp, Homo sapien
caggaagaggccaccagtcaggcac

SEQ ID NO: 3813623 - DNA, 25 bp, Homo sapien
caggccagggagttccgatttccct

SEQ ID NO: 3813624 - DNA, 25 bp, Homo sapien
caagcaccgctttcagcaaggttct

SEQ ID NO: 3813625 - DNA, 25 bp, Homo sapien
tcaagcaccgctttcagcaaggttc

SEQ ID NO: 3813626 - DNA, 25 bp, Homo sapien
caatcaagggacaatgaggtactga

SEQ ID NO: 3813627 - DNA, 25 bp, Homo sapien
ctgtcacaatcaagggacaatgagg

SEQ ID NO: 3813628 - DNA, 25 bp, Homo sapien
cacaatcaagggacaatgaggtact

SEQ ID NO: 3813629 - DNA, 25 bp, Homo sapien
tcacaatcaagggacaatgaggtac

SEQ ID NO: 3813630 - DNA, 25 bp, Homo sapien
caggactgagcatgggagtcagccc

SEQ ID NO: 3813631 - DNA, 25 bp, Homo sapien
tgcagccaatcatcaggactgagca

SEQ ID NO: 3813632 - DNA, 25 bp, Homo sapien
agctgtcatgcctggaacccctgat

SEQ ID NO: 3813633 - DNA, 25 bp, Homo sapien
tgtcatgcctggaacccctgatctt

SEQ ID NO: 3813634 - DNA, 25 bp, Homo sapien
ggttaccaagcaagcactggctccc

SEQ ID NO: 3813635 - DNA, 25 bp, Homo sapien
cgtgctgtgcccctggacctttggg

SEQ ID NO: 3813636 - DNA, 25 bp, Homo sapien
tgggccccatggggttaccaagcaa

SEQ ID NO: 3813637 - DNA, 25 bp, Homo sapien
gcaagcactggctcccagccttgtg

SEQ ID NO: 3813638 - DNA, 25 bp, Homo sapien
gcccttgctagactgctcgggtttc

SEQ ID NO: 3813639 - DNA, 25 bp, Homo sapien
aagcccttgctagactgctcgggtt

SEQ ID NO: 3813640 - DNA, 25 bp, Homo sapien
gcccttggcaactgcacctttcttt

SEQ ID NO: 3813641 - DNA, 25 bp, Homo sapien
caagcccttgctagactgctcgggt

SEQ ID NO: 3813642 - DNA, 25 bp, Homo sapien
accctgcacaggcagaactccctgc

SEQ ID NO: 3813643 - DNA, 25 bp, Homo sapien
cctgcacaggcagaactccctgctg

SEQ ID NO: 3813644 - DNA, 25 bp, Homo sapien
ctgagtgggaccctgcacaggcaga

SEQ ID NO: 3813645 - DNA, 25 bp, Homo sapien
tgcacaggcagaactccctgctgac

SEQ ID NO: 3813646 - DNA, 25 bp, Homo sapien
tgctgtggctgaggtccgggtacct

SEQ ID NO: 3813647 - DNA, 25 bp, Homo sapien
catccttgtgtagggcttggctggc

SEQ ID NO: 3813648 - DNA, 25 bp, Homo sapien
tctagagcctctaagctgagcattg

SEQ ID NO: 3813649 - DNA, 25 bp, Homo sapien
gtccgggtacctggtgtcatccttg

SEQ ID NO: 3813650 - DNA, 25 bp, Homo sapien
tctatcccatctctggggtagatga

SEQ ID NO: 3813651 - DNA, 25 bp, Homo sapien
gatgatgaacgcttggtgcctccac

SEQ ID NO: 3813652 - DNA, 25 bp, Homo sapien
gctggcccaatggagccctggagca

SEQ ID NO: 3813653 - DNA, 25 bp, Homo sapien
ggtagatgatgaacgcttggtgcct

SEQ ID NO: 3813654 - DNA, 25 bp, Homo sapien
catacataacgtgtgacctgctggt

SEQ ID NO: 3813655 - DNA, 25 bp, Homo sapien
cagagtagggttcacttcacttcca

SEQ ID NO: 3813656 - DNA, 25 bp, Homo sapien
ctgactccactagtagcatgtactt

SEQ ID NO: 3813657 - DNA, 25 bp, Homo sapien
ctgctggtgccagagtagggttcac

SEQ ID NO: 3813658 - DNA, 25 bp, Homo sapien
cagagactgaccaagtagtgaggtc

SEQ ID NO: 3813659 - DNA, 25 bp, Homo sapien
catgactaagggctactgatgcaga

SEQ ID NO: 3813660 - DNA, 25 bp, Homo sapien
actgaccaagtagtgaggtctctgg

SEQ ID NO: 3813661 - DNA, 25 bp, Homo sapien
cagagtcagaagtggtccaaccctg

SEQ ID NO: 3813662 - DNA, 25 bp, Homo sapien
agagtcacggaggtccctacgtgag

SEQ ID NO: 3813663 - DNA, 25 bp, Homo sapien
cttgagaagaacaggacacagcctg

SEQ ID NO: 3813664 - DNA, 25 bp, Homo sapien
acggaggtccctacgtgagtccagc

SEQ ID NO: 3813665 - DNA, 25 bp, Homo sapien
aggtccctacgtgagtccagcctgc

SEQ ID NO: 3813666 - DNA, 25 bp, Homo sapien
tgaaggctgcaccttggctcggcct

SEQ ID NO: 3813667 - DNA, 25 bp, Homo sapien
ccttggctcggcctccaccgtgggc

SEQ ID NO: 3813668 - DNA, 25 bp, Homo sapien
caccaccggcccttccatgaaggct

SEQ ID NO: 3813669 - DNA, 25 bp, Homo sapien
accaccggcccttccatgaaggctg

SEQ ID NO: 3813670 - DNA, 25 bp, Homo sapien
gaaggaagccagttcaggcgagtcc

SEQ ID NO: 3813671 - DNA, 25 bp, Homo sapien
cgagtcctccgcaccgtgaacccat

SEQ ID NO: 3813672 - DNA, 25 bp, Homo sapien
ggaagccagttcaggcgagtcctcc

SEQ ID NO: 3813673 - DNA, 25 bp, Homo sapien
atgaaggaagccagttcaggcgagt

SEQ ID NO: 3813674 - DNA, 25 bp, Homo sapien
gattgcacaggagacccgcggtctc

SEQ ID NO: 3813675 - DNA, 25 bp, Homo sapien
gcacccctagacatgtcccttctgt

SEQ ID NO: 3813676 - DNA, 25 bp, Homo sapien
gtcagcatttgctggattgcacagg

SEQ ID NO: 3813677 - DNA, 25 bp, Homo sapien
caggtagggtgtgcccccagcaccc

SEQ ID NO: 3813678 - DNA, 25 bp, Homo sapien
ggagagatactgaggggctccccac

SEQ ID NO: 3813679 - DNA, 25 bp, Homo sapien
ggatgagatgagaaggatgcggaga

SEQ ID NO: 3813680 - DNA, 25 bp, Homo sapien
gaaggatgcggagagatactgaggg

SEQ ID NO: 3813681 - DNA, 25 bp, Homo sapien
agcaccctgctgagcccccctttct

SEQ ID NO: 3813682 - DNA, 25 bp, Homo sapien
ggagggagcccatccttctgaagat

SEQ ID NO: 3813683 - DNA, 25 bp, Homo sapien
catccttctgaagatatcatcaggg

SEQ ID NO: 3813684 - DNA, 25 bp, Homo sapien
gccttcaccttgattgtgcttgaga

SEQ ID NO: 3813685 - DNA, 25 bp, Homo sapien
cttcaccttgattgtgcttgagaca

SEQ ID NO: 3813686 - DNA, 25 bp, Homo sapien
ttgtgttgcaggaaccgcctgggac

SEQ ID NO: 3813687 - DNA, 25 bp, Homo sapien
tggagcactggagatgaacaacgtt

SEQ ID NO: 3813688 - DNA, 25 bp, Homo sapien
gaacaacgtttctgcaggaatcctg

SEQ ID NO: 3813689 - DNA, 25 bp, Homo sapien
tgacctgttctgctcgttctggagc

SEQ ID NO: 3813690 - DNA, 25 bp, Homo sapien
cccaggccccagttcctgaccaact

SEQ ID NO: 3813691 - DNA, 25 bp, Homo sapien
ccaggccccagttcctgaccaactt

SEQ ID NO: 3813692 - DNA, 25 bp, Homo sapien
acaaggtgaggctctaatgctacca

SEQ ID NO: 3813693 - DNA, 25 bp, Homo sapien
gcatgacaaggtgaggctctaatgc

SEQ ID NO: 3813694 - DNA, 25 bp, Homo sapien
aaggtgaggctctaatgctaccact

SEQ ID NO: 3813695 - DNA, 25 bp, Homo sapien
ggtgaggctctaatgctaccactcc

SEQ ID NO: 3813696 - DNA, 25 bp, Homo sapien
tattggcgtcagtgctagtggtggc

SEQ ID NO: 3813697 - DNA, 25 bp, Homo sapien
gctggtgcattgagggtaacagcag

SEQ ID NO: 3813698 - DNA, 25 bp, Homo sapien
cagcaacagcaagtctgggggctgg

SEQ ID NO: 3813699 - DNA, 25 bp, Homo sapien
ggaataggagcactgtggggcctgg

SEQ ID NO: 3813700 - DNA, 25 bp, Homo sapien
tggtgaaggtgcagtcacggcaaga

SEQ ID NO: 3813701 - DNA, 25 bp, Homo sapien
gtgcagtcacggcaagaagccctcc

SEQ ID NO: 3813702 - DNA, 25 bp, Homo sapien
gattggggaggaagttgcaggtgct

SEQ ID NO: 3813703 - DNA, 25 bp, Homo sapien
ttgcaggtgctgtactgtgggcctt

SEQ ID NO: 3813704 - DNA, 25 bp, Homo sapien
cacaggatccttgtagcttgccaag

SEQ ID NO: 3813705 - DNA, 25 bp, Homo sapien
gcatagacgtgaataagacatcctt

SEQ ID NO: 3813706 - DNA, 25 bp, Homo sapien
gcttgccaaggcataaagcccactt

SEQ ID NO: 3813707 - DNA, 25 bp, Homo sapien
cccaggtagctggttgtgcacagga

SEQ ID NO: 3813708 - DNA, 25 bp, Homo sapien
catcagcgggactttccttccgaga

SEQ ID NO: 3813709 - DNA, 25 bp, Homo sapien
caactgtgacctcggagcaaggttg

SEQ ID NO: 3813710 - DNA, 25 bp, Homo sapien
acagtcccttcacttcatcagcggg

SEQ ID NO: 3813711 - DNA, 25 bp, Homo sapien
aaacaactgtgacctcggagcaagg

SEQ ID NO: 3813712 - DNA, 25 bp, Homo sapien
gagctgaatatctgctagattcctt

SEQ ID NO: 3813713 - DNA, 25 bp, Homo sapien
agttaggtccgataatgacaatgct

SEQ ID NO: 3813714 - DNA, 25 bp, Homo sapien
cccaagttaggtccgataatgacaa

SEQ ID NO: 3813715 - DNA, 25 bp, Homo sapien
tgtgtcccaagttaggtccgataat

SEQ ID NO: 3813716 - DNA, 25 bp, Homo sapien
aaagatacaaccacaggattgataa

SEQ ID NO: 3813717 - DNA, 25 bp, Homo sapien
taacaggagtcaggtgtgattagca

SEQ ID NO: 3813718 - DNA, 25 bp, Homo sapien
ccacaggattgataacaggagtcag

SEQ ID NO: 3813719 - DNA, 25 bp, Homo sapien
tcaggtgtgattagcagagcagtca

SEQ ID NO: 3813720 - DNA, 25 bp, Homo sapien
aaggcaaggattatccgtcttattt

SEQ ID NO: 3813721 - DNA, 25 bp, Homo sapien
caggaaggcaaggattatccgtctt

SEQ ID NO: 3813722 - DNA, 25 bp, Homo sapien
aggaaggcaaggattatccgtctta

SEQ ID NO: 3813723 - DNA, 25 bp, Homo sapien
ggaaggcaaggattatccgtcttat

SEQ ID NO: 3813724 - DNA, 25 bp, Homo sapien
tcttaaggatataagcagaggcctg

SEQ ID NO: 3813725 - DNA, 25 bp, Homo sapien
gcatagacctgttccctgggacaca

SEQ ID NO: 3813726 - DNA, 25 bp, Homo sapien
taatcacactttcttaggttgggag

SEQ ID NO: 3813727 - DNA, 25 bp, Homo sapien
gcctgaaaaccctatggccatggag

SEQ ID NO: 3813728 - DNA, 25 bp, Homo sapien
tgttagtggtgtttgctagaagcaa

SEQ ID NO: 3813729 - DNA, 25 bp, Homo sapien
gaagagtggcccatacacacagggc

SEQ ID NO: 3813730 - DNA, 25 bp, Homo sapien
aagcaatctgctgccctggaaacct

SEQ ID NO: 3813731 - DNA, 25 bp, Homo sapien
gcagcagcaagtgatgtttcacctg

SEQ ID NO: 3813732 - DNA, 25 bp, Homo sapien
caggtggaccccttctatagaaatt

SEQ ID NO: 3813733 - DNA, 25 bp, Homo sapien
tactgtagaattggatataacgccc

SEQ ID NO: 3813734 - DNA, 25 bp, Homo sapien
tcttccctaggacagatgttgaccg

SEQ ID NO: 3813735 - DNA, 25 bp, Homo sapien
cacagaatcaaaggttccatgggag

SEQ ID NO: 3813736 - DNA, 25 bp, Homo sapien
gtgagcagcatcagtgtcatgaggt

SEQ ID NO: 3813737 - DNA, 25 bp, Homo sapien
tttgtgagcagcatcagtgtcatga

SEQ ID NO: 3813738 - DNA, 25 bp, Homo sapien
tgtgagcagcatcagtgtcatgagg

SEQ ID NO: 3813739 - DNA, 25 bp, Homo sapien
ctttgtgagcagcatcagtgtcatg

SEQ ID NO: 3813740 - DNA, 25 bp, Homo sapien
caagtgagcctactgccttggcgtg

SEQ ID NO: 3813741 - DNA, 25 bp, Homo sapien
gaggacactcctgaacactccatca

SEQ ID NO: 3813742 - DNA, 25 bp, Homo sapien
tctgctcaagctaaagaccaaggaa

SEQ ID NO: 3813743 - DNA, 25 bp, Homo sapien
ggcgtgacttcctgaacatgcaaag

SEQ ID NO: 3813744 - DNA, 25 bp, Homo sapien
ttcatggggtctttgctcactggtc

SEQ ID NO: 3813745 - DNA, 25 bp, Homo sapien
ttcttcatggggtctttgctcactg

SEQ ID NO: 3813746 - DNA, 25 bp, Homo sapien
cttcatggggtctttgctcactggt

SEQ ID NO: 3813747 - DNA, 25 bp, Homo sapien
ccttcttcatggggtctttgctcac

SEQ ID NO: 3813748 - DNA, 25 bp, Homo sapien
gatctgggtccacgttgggtgcccc

SEQ ID NO: 3813749 - DNA, 25 bp, Homo sapien
ggatctgggtccacgttgggtgccc

SEQ ID NO: 3813750 - DNA, 25 bp, Homo sapien
atctgggtccacgttgggtgcccct

SEQ ID NO: 3813751 - DNA, 25 bp, Homo sapien
ctggatctgggtccacgttgggtgc

SEQ ID NO: 3813752 - DNA, 25 bp, Homo sapien
cagaaggcagcagaacagtgacact

SEQ ID NO: 3813753 - DNA, 25 bp, Homo sapien
cccacaggatatgcgttgtccttac

SEQ ID NO: 3813754 - DNA, 25 bp, Homo sapien
tgtaaaagctatccttcccacagga

SEQ ID NO: 3813755 - DNA, 25 bp, Homo sapien
aagaagcaggagttgcctctattgc

SEQ ID NO: 3813756 - DNA, 25 bp, Homo sapien
gtccttacttatcccaatgcagaaa

SEQ ID NO: 3813757 - DNA, 25 bp, Homo sapien
ctgctgtggaagaaccgctaggcag

SEQ ID NO: 3813758 - DNA, 25 bp, Homo sapien
gaccccaagccagttggtaatgttg

SEQ ID NO: 3813759 - DNA, 25 bp, Homo sapien
agctgaccccaagccagttggtaat

SEQ ID NO: 3813760 - DNA, 25 bp, Homo sapien
ctgaccccaagccagttggtaatgt

SEQ ID NO: 3813761 - DNA, 25 bp, Homo sapien
aattccttgagctgtttagggaatg

SEQ ID NO: 3813762 - DNA, 25 bp, Homo sapien
gaattatgtggcgatttggggatta

SEQ ID NO: 3813763 - DNA, 25 bp, Homo sapien
gtttgagctctaatgatataaattc

SEQ ID NO: 3813764 - DNA, 25 bp, Homo sapien
tatgtggcgatttggggattattcc

SEQ ID NO: 3813765 - DNA, 25 bp, Homo sapien
caggaagaagttgaatctctgaata

SEQ ID NO: 3813766 - DNA, 25 bp, Homo sapien
ggaagaagttgaatctctgaataga

SEQ ID NO: 3813767 - DNA, 25 bp, Homo sapien
ccaggaagaagttgaatctctgaat

SEQ ID NO: 3813768 - DNA, 25 bp, Homo sapien
aagaagttgaatctctgaatagacc

SEQ ID NO: 3813769 - DNA, 25 bp, Homo sapien
gaatttatttgtcatgctcctagtg

SEQ ID NO: 3813770 - DNA, 25 bp, Homo sapien
acaggaatttatttgtcatgctcct

SEQ ID NO: 3813771 - DNA, 25 bp, Homo sapien
ggaatttatttgtcatgctcctagt

SEQ ID NO: 3813772 - DNA, 25 bp, Homo sapien
atttatttgtcatgctcctagtgtc

SEQ ID NO: 3813773 - DNA, 25 bp, Homo sapien
ggatcacagcccatgctaatggtct

SEQ ID NO: 3813774 - DNA, 25 bp, Homo sapien
caaattttacattcgaccagcccct

SEQ ID NO: 3813775 - DNA, 25 bp, Homo sapien
gcattaacgtctgcctagctcccag

SEQ ID NO: 3813776 - DNA, 25 bp, Homo sapien
ggaattatgcctcaagactgcagca

SEQ ID NO: 3813777 - DNA, 25 bp, Homo sapien
ctttggcacagagtatcagagataa

SEQ ID NO: 3813778 - DNA, 25 bp, Homo sapien
gagatctggcctgctacggaccttt

SEQ ID NO: 3813779 - DNA, 25 bp, Homo sapien
gtacagttacgggagaagaacacag

SEQ ID NO: 3813780 - DNA, 25 bp, Homo sapien
actggttacacactcgtctatggga

SEQ ID NO: 3813781 - DNA, 25 bp, Homo sapien
gagccatgatgagtgagaattcaca

SEQ ID NO: 3813782 - DNA, 25 bp, Homo sapien
tctttcagaactaatccgggactaa

SEQ ID NO: 3813783 - DNA, 25 bp, Homo sapien
ttgaggagacagcaagagccatgat

SEQ ID NO: 3813784 - DNA, 25 bp, Homo sapien
tgtcacctgccatgttcactcctgt

SEQ ID NO: 3813785 - DNA, 25 bp, Homo sapien
gaagcaatcttcaaggtgggattcc

SEQ ID NO: 3813786 - DNA, 25 bp, Homo sapien
gaagaattacttcaggctgtgcaaa

SEQ ID NO: 3813787 - DNA, 25 bp, Homo sapien
caacgttcaggttagagaagcaatc

SEQ ID NO: 3813788 - DNA, 25 bp, Homo sapien
ggattcctgttcctagggcgccttc

SEQ ID NO: 3813789 - DNA, 25 bp, Homo sapien
ctcgggctgaatccgctcccggagt

SEQ ID NO: 3813790 - DNA, 25 bp, Homo sapien
tagagctgaaggttccggggcgtct

SEQ ID NO: 3813791 - DNA, 25 bp, Homo sapien
tcccggagtggtgtatagagctgaa

SEQ ID NO: 3813792 - DNA, 25 bp, Homo sapien
cctgcttgtcacactcgggctgaat

SEQ ID NO: 3813793 - DNA, 25 bp, Homo sapien
ccattcgggacacgtgaactgcggg

SEQ ID NO: 3813794 - DNA, 25 bp, Homo sapien
tgttcgggaccattcgggacacgtg

SEQ ID NO: 3813795 - DNA, 25 bp, Homo sapien
cactgcaggagattgcaaaaggcgc

SEQ ID NO: 3813796 - DNA, 25 bp, Homo sapien
aaaaggcgcagagcacagttgttgg

SEQ ID NO: 3813797 - DNA, 25 bp, Homo sapien
atctgttgatgccaacgatattcat

SEQ ID NO: 3813798 - DNA, 25 bp, Homo sapien
agctggacccaacatctgttgatgc

SEQ ID NO: 3813799 - DNA, 25 bp, Homo sapien
ggctcaggtcccatcagctggaccc

SEQ ID NO: 3813800 - DNA, 25 bp, Homo sapien
gacccaacatctgttgatgccaacg

SEQ ID NO: 3813801 - DNA, 25 bp, Homo sapien
tccatgggagcccacgtgagtgaca

SEQ ID NO: 3813802 - DNA, 25 bp, Homo sapien
gagcccacgtgagtgacagaggtaa

SEQ ID NO: 3813803 - DNA, 25 bp, Homo sapien
catgggagcccacgtgagtgacaga

SEQ ID NO: 3813804 - DNA, 25 bp, Homo sapien
cccacgtgagtgacagaggtaagca

SEQ ID NO: 3813805 - DNA, 25 bp, Homo sapien
gatgtggttcgataccaatggccaa

SEQ ID NO: 3813806 - DNA, 25 bp, Homo sapien
gccaataccatctaattaggccaaa

SEQ ID NO: 3813807 - DNA, 25 bp, Homo sapien
taaggcaaagtggtgtggagaattc

SEQ ID NO: 3813808 - DNA, 25 bp, Homo sapien
taattcctgtgatgcaacatatgca

SEQ ID NO: 3813809 - DNA, 25 bp, Homo sapien
tgatttgtgagtgtaggttttccca

SEQ ID NO: 3813810 - DNA, 25 bp, Homo sapien
gacattttccgctatgtgtgctatc

SEQ ID NO: 3813811 - DNA, 25 bp, Homo sapien
acattcacagagcttttgccctata

SEQ ID NO: 3813812 - DNA, 25 bp, Homo sapien
cacagagtttgtcttctagcaaaag

SEQ ID NO: 3813813 - DNA, 25 bp, Homo sapien
tgaggcatgaattaccactgaaagt

SEQ ID NO: 3813814 - DNA, 25 bp, Homo sapien
ctgtgaggcatgaattaccactgaa

SEQ ID NO: 3813815 - DNA, 25 bp, Homo sapien
gaggcatgaattaccactgaaagtt

SEQ ID NO: 3813816 - DNA, 25 bp, Homo sapien
gcatgaattaccactgaaagttttc

SEQ ID NO: 3813817 - DNA, 25 bp, Homo sapien
ttgacttgtggttaaagattgtccc

SEQ ID NO: 3813818 - DNA, 25 bp, Homo sapien
tgacttgtggttaaagattgtccca

SEQ ID NO: 3813819 - DNA, 25 bp, Homo sapien
atgttcagtgagtgttgacttgtgg

SEQ ID NO: 3813820 - DNA, 25 bp, Homo sapien
gttcagtgagtgttgacttgtggtt

SEQ ID NO: 3813821 - DNA, 25 bp, Homo sapien
ataaggtttctcccatgtgtgttct

SEQ ID NO: 3813822 - DNA, 25 bp, Homo sapien
tcataaggtttctcccatgtgtgtt

SEQ ID NO: 3813823 - DNA, 25 bp, Homo sapien
cataaggtttctcccatgtgtgttc

SEQ ID NO: 3813824 - DNA, 25 bp, Homo sapien
ctgatgtctagtgagatgtacctta

SEQ ID NO: 3813825 - DNA, 25 bp, Homo sapien
actcagtgttgatgtcacacaggaa

SEQ ID NO: 3813826 - DNA, 25 bp, Homo sapien
tcacactcagcacattcagagggct

SEQ ID NO: 3813827 - DNA, 25 bp, Homo sapien
gagatgtaccttactataaaaggct

SEQ ID NO: 3813828 - DNA, 25 bp, Homo sapien
tgagttctctgataatgggtaaagt

SEQ ID NO: 3813829 - DNA, 25 bp, Homo sapien
ctcataaagtttctctactgtgtca

SEQ ID NO: 3813830 - DNA, 25 bp, Homo sapien
gaaggttctgccacactgactactt

SEQ ID NO: 3813831 - DNA, 25 bp, Homo sapien
tgtaaggcatttctacactcagtaa

SEQ ID NO: 3813832 - DNA, 25 bp, Homo sapien
tagtgtggccccaaaatttgaagct

SEQ ID NO: 3813833 - DNA, 25 bp, Homo sapien
gttctctcatatatcctgacaactg

SEQ ID NO: 3813834 - DNA, 25 bp, Homo sapien
acatgagatctcttttggctgccag

SEQ ID NO: 3813835 - DNA, 25 bp, Homo sapien
tattcattaaatccttagtgtggcc

SEQ ID NO: 3813836 - DNA, 25 bp, Homo sapien
atcctctaccctcaaacagtcccca

SEQ ID NO: 3813837 - DNA, 25 bp, Homo sapien
taggtaagttgcatgtcatgaagat

SEQ ID NO: 3813838 - DNA, 25 bp, Homo sapien
tcctctaccctcaaacagtccccag

SEQ ID NO: 3813839 - DNA, 25 bp, Homo sapien
ggtaagttgcatgtcatgaagattt

SEQ ID NO: 3813840 - DNA, 25 bp, Homo sapien
tcacagaagttagattggcaagaag

SEQ ID NO: 3813841 - DNA, 25 bp, Homo sapien
aaaactgtccacttgaacctcaatg

SEQ ID NO: 3813842 - DNA, 25 bp, Homo sapien
tgcagctcagcttcgataatctggg

SEQ ID NO: 3813843 - DNA, 25 bp, Homo sapien
gagctatgttaagggcatgcagacc

SEQ ID NO: 3813844 - DNA, 25 bp, Homo sapien
tgttactcatggagaatggaagaga

SEQ ID NO: 3813845 - DNA, 25 bp, Homo sapien
aagtgggaataaacaactcgcctgg

SEQ ID NO: 3813846 - DNA, 25 bp, Homo sapien
actcgcctgggatctgttcgtttct

SEQ ID NO: 3813847 - DNA, 25 bp, Homo sapien
caaagtccattgtaaaacaaagtgg

SEQ ID NO: 3813848 - DNA, 25 bp, Homo sapien
tgagatcctgtgcaacctggctgcc

SEQ ID NO: 3813849 - DNA, 25 bp, Homo sapien
cctggctgccatgaagcttgcagac

SEQ ID NO: 3813850 - DNA, 25 bp, Homo sapien
gctgccatgaagcttgcagactcac

SEQ ID NO: 3813851 - DNA, 25 bp, Homo sapien
agaatgagatcctgtgcaacctggc

SEQ ID NO: 3813852 - DNA, 25 bp, Homo sapien
aaccctaagaacaggagagacgctg

SEQ ID NO: 3813853 - DNA, 25 bp, Homo sapien
accctaagaacaggagagacgctgt

SEQ ID NO: 3813854 - DNA, 25 bp, Homo sapien
ttaaccctaagaacaggagagacgc

SEQ ID NO: 3813855 - DNA, 25 bp, Homo sapien
taaccctaagaacaggagagacgct

SEQ ID NO: 3813856 - DNA, 25 bp, Homo sapien
gctgactctgacaggtcaccaaaag

SEQ ID NO: 3813857 - DNA, 25 bp, Homo sapien
cagccttcctaatgatagtacttgt

SEQ ID NO: 3813858 - DNA, 25 bp, Homo sapien
tttccagaaaacagacgcaggtgct

SEQ ID NO: 3813859 - DNA, 25 bp, Homo sapien
tagtacttgtcccttcagttcgaaa

SEQ ID NO: 3813860 - DNA, 25 bp, Homo sapien
taagtaggagaactacaagtgcgca

SEQ ID NO: 3813861 - DNA, 25 bp, Homo sapien
tgcaaagacagtgagtagacaggaa

SEQ ID NO: 3813862 - DNA, 25 bp, Homo sapien
tccagtctcggcctcttaagtagga

SEQ ID NO: 3813863 - DNA, 25 bp, Homo sapien
gtaccacagtggtatgattcacagc

SEQ ID NO: 3813864 - DNA, 25 bp, Homo sapien
aggcgatgccttccccagactgtgt

SEQ ID NO: 3813865 - DNA, 25 bp, Homo sapien
cgatgccttccccagactgtgtcct

SEQ ID NO: 3813866 - DNA, 25 bp, Homo sapien
ggcgatgccttccccagactgtgtc

SEQ ID NO: 3813867 - DNA, 25 bp, Homo sapien
ctaggcgatgccttccccagactgt

SEQ ID NO: 3813868 - DNA, 25 bp, Homo sapien
tggacagtctgccatggtttctgca

SEQ ID NO: 3813869 - DNA, 25 bp, Homo sapien
ctgtacaggagtgccaagaatgtct

SEQ ID NO: 3813870 - DNA, 25 bp, Homo sapien
tgaaaggtctcagatcagaagtgtg

SEQ ID NO: 3813871 - DNA, 25 bp, Homo sapien
gacatcaccaagtgttatttaactg

SEQ ID NO: 3813872 - DNA, 25 bp, Homo sapien
tgtcttcagtgaacaggcagttcca

SEQ ID NO: 3813873 - DNA, 25 bp, Homo sapien
accttcagataacacactttccctg

SEQ ID NO: 3813874 - DNA, 25 bp, Homo sapien
cttcagataacacactttccctgag

SEQ ID NO: 3813875 - DNA, 25 bp, Homo sapien
gaccttcagataacacactttccct

SEQ ID NO: 3813876 - DNA, 25 bp, Homo sapien
ccttcagataacacactttccctga

SEQ ID NO: 3813877 - DNA, 25 bp, Homo sapien
aatcctggaaacacacgggccaagt

SEQ ID NO: 3813878 - DNA, 25 bp, Homo sapien
tggcttagaaacttcaatcatactg

SEQ ID NO: 3813879 - DNA, 25 bp, Homo sapien
aagaaacatcaagaatcctggaaac

SEQ ID NO: 3813880 - DNA, 25 bp, Homo sapien
caatcatactgcctgaccctggagc

SEQ ID NO: 3813881 - DNA, 25 bp, Homo sapien
cagctgctggttacatgatcttggg

SEQ ID NO: 3813882 - DNA, 25 bp, Homo sapien
gctgctggttacatgatcttgggta

SEQ ID NO: 3813883 - DNA, 25 bp, Homo sapien
ctgcagctgctggttacatgatctt

SEQ ID NO: 3813884 - DNA, 25 bp, Homo sapien
gcagctgctggttacatgatcttgg

SEQ ID NO: 3813885 - DNA, 25 bp, Homo sapien
tcttgttataacatcaaacttcagt

SEQ ID NO: 3813886 - DNA, 25 bp, Homo sapien
cccggctcaagcgatatttcagagt

SEQ ID NO: 3813887 - DNA, 25 bp, Homo sapien
taattactgagtagaaaacatagtt

SEQ ID NO: 3813888 - DNA, 25 bp, Homo sapien
cagagtgcagtctactacattaact

SEQ ID NO: 3813889 - DNA, 25 bp, Homo sapien
tctattgagacttaatttgtgacct

SEQ ID NO: 3813890 - DNA, 25 bp, Homo sapien
ggtaagcacctatagctataaatat

SEQ ID NO: 3813891 - DNA, 25 bp, Homo sapien
tcatactgttgtggtcgtagaatat

SEQ ID NO: 3813892 - DNA, 25 bp, Homo sapien
aatatcccctttagcacaacttttg

SEQ ID NO: 3813893 - DNA, 25 bp, Homo sapien
catggtaccattagctgtcaagaga

SEQ ID NO: 3813894 - DNA, 25 bp, Homo sapien
taacagacgtgaagaggtagtattc

SEQ ID NO: 3813895 - DNA, 25 bp, Homo sapien
tattgtggtgagctgaagtatccgc

SEQ ID NO: 3813896 - DNA, 25 bp, Homo sapien
tattggacccatatgaagtaccact

SEQ ID NO: 3813897 - DNA, 25 bp, Homo sapien
tgtgcccggccttctagtctgtatt

SEQ ID NO: 3813898 - DNA, 25 bp, Homo sapien
cacagtacatggaaccagtttttct

SEQ ID NO: 3813899 - DNA, 25 bp, Homo sapien
gtccacaatcttcatctgaagcatt

SEQ ID NO: 3813900 - DNA, 25 bp, Homo sapien
ttgcatcaggaacccccgtgagtct

SEQ ID NO: 3813901 - DNA, 25 bp, Homo sapien
ttaaattgcaataagtgccagcacc

SEQ ID NO: 3813902 - DNA, 25 bp, Homo sapien
ccacaaaactctggtgttaaattgc

SEQ ID NO: 3813903 - DNA, 25 bp, Homo sapien
ttctcaaccacaaaactctggtgtt

SEQ ID NO: 3813904 - DNA, 25 bp, Homo sapien
aattgcaataagtgccagcaccttg

SEQ ID NO: 3813905 - DNA, 25 bp, Homo sapien
atttgtgccgtttcagatagaagtt

SEQ ID NO: 3813906 - DNA, 25 bp, Homo sapien
gtgccgtttcagatagaagtttaga

SEQ ID NO: 3813907 - DNA, 25 bp, Homo sapien
tgtgccgtttcagatagaagtttag

SEQ ID NO: 3813908 - DNA, 25 bp, Homo sapien
gtattctgctaatgttaacgtttta

SEQ ID NO: 3813909 - DNA, 25 bp, Homo sapien
tcttccctctgtgaatttatccttt

SEQ ID NO: 3813910 - DNA, 25 bp, Homo sapien
ccattgttcagtaaacgaggcccca

SEQ ID NO: 3813911 - DNA, 25 bp, Homo sapien
agcggccccatctcaagcggtcttg

SEQ ID NO: 3813912 - DNA, 25 bp, Homo sapien
ggacagtagtaaagcggccccatct

SEQ ID NO: 3813913 - DNA, 25 bp, Homo sapien
cgaggccccatgtcggacagtagta

SEQ ID NO: 3813914 - DNA, 25 bp, Homo sapien
gccgaggttttgttagcattgctga

SEQ ID NO: 3813915 - DNA, 25 bp, Homo sapien
agccgaggttttgttagcattgctg

SEQ ID NO: 3813916 - DNA, 25 bp, Homo sapien
ccgaggttttgttagcattgctgac

SEQ ID NO: 3813917 - DNA, 25 bp, Homo sapien
aagccgaggttttgttagcattgct

SEQ ID NO: 3813918 - DNA, 25 bp, Homo sapien
ctaaaccacagaggggctgttctac

SEQ ID NO: 3813919 - DNA, 25 bp, Homo sapien
taagggattggataaggaatgttgc

SEQ ID NO: 3813920 - DNA, 25 bp, Homo sapien
gtaagggattggataaggaatgttg

SEQ ID NO: 3813921 - DNA, 25 bp, Homo sapien
catgtggttcggcttttcttttcca

SEQ ID NO: 3813922 - DNA, 25 bp, Homo sapien
gccgtcgtgggtccaggctatgcaa

SEQ ID NO: 3813923 - DNA, 25 bp, Homo sapien
ctgccgtcgtgggtccaggctatgc

SEQ ID NO: 3813924 - DNA, 25 bp, Homo sapien
gtcgtgggtccaggctatgcaattc

SEQ ID NO: 3813925 - DNA, 25 bp, Homo sapien
ccgtcgtgggtccaggctatgcaat

SEQ ID NO: 3813926 - DNA, 25 bp, Homo sapien
atcctgggcaacaggcagcccatgg

SEQ ID NO: 3813927 - DNA, 25 bp, Homo sapien
aaatacctagaattaatgtgcggtc

SEQ ID NO: 3813928 - DNA, 25 bp, Homo sapien
tttgtcttccgtgggccacaatgga

SEQ ID NO: 3813929 - DNA, 25 bp, Homo sapien
cggtctatgtgaaggaaactataaa

SEQ ID NO: 3813930 - DNA, 25 bp, Homo sapien
agctccacctctccggttcacacca

SEQ ID NO: 3813931 - DNA, 25 bp, Homo sapien
cctgacctcgtgatctgcctgcctt

SEQ ID NO: 3813932 - DNA, 25 bp, Homo sapien
gacctcgtgatctgcctgccttggc

SEQ ID NO: 3813933 - DNA, 25 bp, Homo sapien
ccacctctccggttcacaccattct

SEQ ID NO: 3813934 - DNA, 25 bp, Homo sapien
tgttaaagtatatctcccagaaatg

SEQ ID NO: 3813935 - DNA, 25 bp, Homo sapien
gatgagcacctcaattaaagtgagc

SEQ ID NO: 3813936 - DNA, 25 bp, Homo sapien
taaagtgagcctagtgatataagcc

SEQ ID NO: 3813937 - DNA, 25 bp, Homo sapien
gatttgtaagagcacatgaaccaag

SEQ ID NO: 3813938 - DNA, 25 bp, Homo sapien
gaaatccatacagacctcctggagt

SEQ ID NO: 3813939 - DNA, 25 bp, Homo sapien
tattatccagagagtagactctgag

SEQ ID NO: 3813940 - DNA, 25 bp, Homo sapien
tgaaaataaactcacccctattatc

SEQ ID NO: 3813941 - DNA, 25 bp, Homo sapien
cacccagccgtcacatttccaaact

SEQ ID NO: 3813942 - DNA, 25 bp, Homo sapien
tttgaagacgacaacttggttgccc

SEQ ID NO: 3813943 - DNA, 25 bp, Homo sapien
atttgaagacgacaacttggttgcc

SEQ ID NO: 3813944 - DNA, 25 bp, Homo sapien
aatttgaagacgacaacttggttgc

SEQ ID NO: 3813945 - DNA, 25 bp, Homo sapien
tggtaaaactatcatgacacacaga

SEQ ID NO: 3813946 - DNA, 25 bp, Homo sapien
gctacctaaaagtgagccattgata

SEQ ID NO: 3813947 - DNA, 25 bp, Homo sapien
taagtagtcgtaaaaatgatcaggt

SEQ ID NO: 3813948 - DNA, 25 bp, Homo sapien
caagtgtagaaaggtatatgctcaa

SEQ ID NO: 3813949 - DNA, 25 bp, Homo sapien
agaatagggcaagcctttactaggg

SEQ ID NO: 3813950 - DNA, 25 bp, Homo sapien
agggatgttatcagagatccacaag

SEQ ID NO: 3813951 - DNA, 25 bp, Homo sapien
tctgaggtcttgagcttcctttagg

SEQ ID NO: 3813952 - DNA, 25 bp, Homo sapien
gagttgaagaaattctgaactcttc

SEQ ID NO: 3813953 - DNA, 25 bp, Homo sapien
cggtaaggcccacttttgtagagag

SEQ ID NO: 3813954 - DNA, 25 bp, Homo sapien
caaagtatctgagacctttctcttc

SEQ ID NO: 3813955 - DNA, 25 bp, Homo sapien
aaagtatctgagacctttctcttca

SEQ ID NO: 3813956 - DNA, 25 bp, Homo sapien
aagtatctgagacctttctcttcat

SEQ ID NO: 3813957 - DNA, 25 bp, Homo sapien
ggacaactggctatttatttggaag

SEQ ID NO: 3813958 - DNA, 25 bp, Homo sapien
gagctgcttaccttacaccacatac

SEQ ID NO: 3813959 - DNA, 25 bp, Homo sapien
gggacaactggctatttatttggaa

SEQ ID NO: 3813960 - DNA, 25 bp, Homo sapien
aatacagagctgcttaccttacacc

SEQ ID NO: 3813961 - DNA, 25 bp, Homo sapien
caaagggagtttacttatgctaaca

SEQ ID NO: 3813962 - DNA, 25 bp, Homo sapien
catacctgtgtagttccaaagggag

SEQ ID NO: 3813963 - DNA, 25 bp, Homo sapien
gttgaaggagagacatacctgtgta

SEQ ID NO: 3813964 - DNA, 25 bp, Homo sapien
cttatgctaacaggaaagcagaaca

SEQ ID NO: 3813965 - DNA, 25 bp, Homo sapien
gagccttctacataggaatttacag

SEQ ID NO: 3813966 - DNA, 25 bp, Homo sapien
tctacataggaatttacagaaatga

SEQ ID NO: 3813967 - DNA, 25 bp, Homo sapien
ctaacactgagccttctacatagga

SEQ ID NO: 3813968 - DNA, 25 bp, Homo sapien
taactttatttctaacactgagcct

SEQ ID NO: 3813969 - DNA, 25 bp, Homo sapien
agttctggtagtaatgatgtctctt

SEQ ID NO: 3813970 - DNA, 25 bp, Homo sapien
ccagcagatgtatctggttggtttc

SEQ ID NO: 3813971 - DNA, 25 bp, Homo sapien
tgtctcttacaaggtggcccctcct

SEQ ID NO: 3813972 - DNA, 25 bp, Homo sapien
agacaccagcaatttggcaccacag

SEQ ID NO: 3813973 - DNA, 25 bp, Homo sapien
ttacataccgccactttttgaggag

SEQ ID NO: 3813974 - DNA, 25 bp, Homo sapien
gtagctcggcaacgtcacctctgag

SEQ ID NO: 3813975 - DNA, 25 bp, Homo sapien
gacgtggttcagctgtaaatggcca

SEQ ID NO: 3813976 - DNA, 25 bp, Homo sapien
tagtgttacatagaccgtgcccaaa

SEQ ID NO: 3813977 - DNA, 25 bp, Homo sapien
tcaattaagggtacgtatcttctcc

SEQ ID NO: 3813978 - DNA, 25 bp, Homo sapien
tccttatgatcatgttgagttccaa

SEQ ID NO: 3813979 - DNA, 25 bp, Homo sapien
tatgaggttatactagcacatcact

SEQ ID NO: 3813980 - DNA, 25 bp, Homo sapien
tcacataaggtctacaaacatcggg

SEQ ID NO: 3813981 - DNA, 25 bp, Homo sapien
gatgaatagaattcccctcagtaca

SEQ ID NO: 3813982 - DNA, 25 bp, Homo sapien
aaattttggtatcacgtctggaata

SEQ ID NO: 3813983 - DNA, 25 bp, Homo sapien
tattttcaccatattacttagatga

SEQ ID NO: 3813984 - DNA, 25 bp, Homo sapien
cacgtctggaatataacactaaaca

SEQ ID NO: 3813985 - DNA, 25 bp, Homo sapien
tcacaagtgtatgaaggcttctaac

SEQ ID NO: 3813986 - DNA, 25 bp, Homo sapien
tttcacaagtgtatgaaggcttcta

SEQ ID NO: 3813987 - DNA, 25 bp, Homo sapien
ttcacaagtgtatgaaggcttctaa

SEQ ID NO: 3813988 - DNA, 25 bp, Homo sapien
gatgttgaaagagctttcacccttg

SEQ ID NO: 3813989 - DNA, 25 bp, Homo sapien
aaagagctttcacccttgtgtgaat

SEQ ID NO: 3813990 - DNA, 25 bp, Homo sapien
ctgtgtgagctctccgaagctgggt

SEQ ID NO: 3813991 - DNA, 25 bp, Homo sapien
ctccgaagctgggtaagatgtgact

SEQ ID NO: 3813992 - DNA, 25 bp, Homo sapien
ttccccccatgtgtactatttgatg

SEQ ID NO: 3813993 - DNA, 25 bp, Homo sapien
ccccccatgtgtactatttgatgtt

SEQ ID NO: 3813994 - DNA, 25 bp, Homo sapien
actttccccccatgtgtactatttg

SEQ ID NO: 3813995 - DNA, 25 bp, Homo sapien
cccatgtgtactatttgatgtttta

SEQ ID NO: 3813996 - DNA, 25 bp, Homo sapien
gattgtcctttgtaagagctctctg

SEQ ID NO: 3813997 - DNA, 25 bp, Homo sapien
gcagaaggacttcccgcaaatactg

SEQ ID NO: 3813998 - DNA, 25 bp, Homo sapien
ctccctgatggataatgaaagctga

SEQ ID NO: 3813999 - DNA, 25 bp, Homo sapien
gcatccatacggctccatttccaaa

SEQ ID NO: 3814000 - DNA, 25 bp, Homo sapien
gagatcctggtgataattaatggca

SEQ ID NO: 3814001 - DNA, 25 bp, Homo sapien
aaaatgctgcctcatcatggaagcc

SEQ ID NO: 3814002 - DNA, 25 bp, Homo sapien
caaaacttggctgactgagatcctg

SEQ ID NO: 3814003 - DNA, 25 bp, Homo sapien
ccaatagggattttctcatgcctaa

SEQ ID NO: 3814004 - DNA, 25 bp, Homo sapien
gctcccaaaaatggtcatcttcatt

SEQ ID NO: 3814005 - DNA, 25 bp, Homo sapien
aatagaagctcccaaaaatggtcat

SEQ ID NO: 3814006 - DNA, 25 bp, Homo sapien
gaagctcccaaaaatggtcatcttc

SEQ ID NO: 3814007 - DNA, 25 bp, Homo sapien
tggaatagaagctcccaaaaatggt

SEQ ID NO: 3814008 - DNA, 25 bp, Homo sapien
tttttctaatatccagggctcttct

SEQ ID NO: 3814009 - DNA, 25 bp, Homo sapien
tctccttgctcgatcttaaagatca

SEQ ID NO: 3814010 - DNA, 25 bp, Homo sapien
ggtggcactggcttgggaatccttt

SEQ ID NO: 3814011 - DNA, 25 bp, Homo sapien
ctcttctccttgctcgatcttaaag

SEQ ID NO: 3814012 - DNA, 25 bp, Homo sapien
caggactagagctaaatagcttggt

SEQ ID NO: 3814013 - DNA, 25 bp, Homo sapien
aaataccacaggactagagctaaat

SEQ ID NO: 3814014 - DNA, 25 bp, Homo sapien
taccacaggactagagctaaatagc

SEQ ID NO: 3814015 - DNA, 25 bp, Homo sapien
tggtttcaggggctctgaatacatc

SEQ ID NO: 3814016 - DNA, 25 bp, Homo sapien
tactgagacaagattgctataattt

SEQ ID NO: 3814017 - DNA, 25 bp, Homo sapien
ctactgagacaagattgctataatt

SEQ ID NO: 3814018 - DNA, 25 bp, Homo sapien
actgagacaagattgctataatttt

SEQ ID NO: 3814019 - DNA, 25 bp, Homo sapien
actctttttacatgaaatggtcaga

SEQ ID NO: 3814020 - DNA, 25 bp, Homo sapien
atactctttttacatgaaatggtca

SEQ ID NO: 3814021 - DNA, 25 bp, Homo sapien
ctctttttacatgaaatggtcagaa

SEQ ID NO: 3814022 - DNA, 25 bp, Homo sapien
tactctttttacatgaaatggtcag

SEQ ID NO: 3814023 - DNA, 25 bp, Homo sapien
taagcaagacggctgaaaaatcctc

SEQ ID NO: 3814024 - DNA, 25 bp, Homo sapien
caaataacctatagatcaaagagga

SEQ ID NO: 3814025 - DNA, 25 bp, Homo sapien
taacgaacttaatgcaatagctatc

SEQ ID NO: 3814026 - DNA, 25 bp, Homo sapien
tatgggatgcagagacagtagttca

SEQ ID NO: 3814027 - DNA, 25 bp, Homo sapien
tgcaatgaacggagagcacaccact

SEQ ID NO: 3814028 - DNA, 25 bp, Homo sapien
caatgaacggagagcacaccactgc

SEQ ID NO: 3814029 - DNA, 25 bp, Homo sapien
gaagttcagggggccggatgcagtg

SEQ ID NO: 3814030 - DNA, 25 bp, Homo sapien
taaagaagttcagggggccggatgc

SEQ ID NO: 3814031 - DNA, 25 bp, Homo sapien
tccgctcttagtggaggaaggagag

SEQ ID NO: 3814032 - DNA, 25 bp, Homo sapien
tttccgctcttagtggaggaaggag

SEQ ID NO: 3814033 - DNA, 25 bp, Homo sapien
ttccgctcttagtggaggaaggaga

SEQ ID NO: 3814034 - DNA, 25 bp, Homo sapien
gccttcgccggccttgcagttcgga

SEQ ID NO: 3814035 - DNA, 25 bp, Homo sapien
ccttgcagttcggagattcacctgc

SEQ ID NO: 3814036 - DNA, 25 bp, Homo sapien
gccggccttgcagttcggagattca

SEQ ID NO: 3814037 - DNA, 25 bp, Homo sapien
caggagagccttcgccggccttgca

SEQ ID NO: 3814038 - DNA, 25 bp, Homo sapien
acaggtccacacacaagatacttac

SEQ ID NO: 3814039 - DNA, 25 bp, Homo sapien
ctatacaggtccacacacaagatac

SEQ ID NO: 3814040 - DNA, 25 bp, Homo sapien
tatacaggtccacacacaagatact

SEQ ID NO: 3814041 - DNA, 25 bp, Homo sapien
tacaggtccacacacaagatactta

SEQ ID NO: 3814042 - DNA, 25 bp, Homo sapien
gctccgatatatgctgagctcagac

SEQ ID NO: 3814043 - DNA, 25 bp, Homo sapien
ggctccgatatatgctgagctcaga

SEQ ID NO: 3814044 - DNA, 25 bp, Homo sapien
ctccgatatatgctgagctcagaca

SEQ ID NO: 3814045 - DNA, 25 bp, Homo sapien
tccgatatatgctgagctcagacat

SEQ ID NO: 3814046 - DNA, 25 bp, Homo sapien
cttattgatttattaccaatttagg

SEQ ID NO: 3814047 - DNA, 25 bp, Homo sapien
aatatttcttattgatttattacca

SEQ ID NO: 3814048 - DNA, 25 bp, Homo sapien
tcactgagtgaatgtaaatatttct

SEQ ID NO: 3814049 - DNA, 25 bp, Homo sapien
gacacttttcactgagtgaatgtaa

SEQ ID NO: 3814050 - DNA, 25 bp, Homo sapien
gtttaacaagttaacagtaatctga

SEQ ID NO: 3814051 - DNA, 25 bp, Homo sapien
caagttaacagtaatctgaaggaaa

SEQ ID NO: 3814052 - DNA, 25 bp, Homo sapien
catgaaaagatgagtttaacaagtt

SEQ ID NO: 3814053 - DNA, 25 bp, Homo sapien
tgaaaagatgagtttaacaagttaa

SEQ ID NO: 3814054 - DNA, 25 bp, Homo sapien
tcaggatactgtgccatgattacac

SEQ ID NO: 3814055 - DNA, 25 bp, Homo sapien
taattcatttgtcgcggacctggcg

SEQ ID NO: 3814056 - DNA, 25 bp, Homo sapien
cacagactccgacggcttcaggata

SEQ ID NO: 3814057 - DNA, 25 bp, Homo sapien
cacataatacataagcgaacgcgaa

SEQ ID NO: 3814058 - DNA, 25 bp, Homo sapien
tcgccgcctccggaggcgagggatt

SEQ ID NO: 3814059 - DNA, 25 bp, Homo sapien
ccagggaaggactcgcctggagcgg

SEQ ID NO: 3814060 - DNA, 25 bp, Homo sapien
cggaggcgagggattgtttcccaca

SEQ ID NO: 3814061 - DNA, 25 bp, Homo sapien
gcgagggattgtttcccacaaggga

SEQ ID NO: 3814062 - DNA, 25 bp, Homo sapien
cttagcgttctggaaatcaggagtc

SEQ ID NO: 3814063 - DNA, 25 bp, Homo sapien
caaggaatcttttcaacctcgtggt

SEQ ID NO: 3814064 - DNA, 25 bp, Homo sapien
ctaaaatcaaggtggtggcgggact

SEQ ID NO: 3814065 - DNA, 25 bp, Homo sapien
caaagcacgtgatgacttcagtcag

SEQ ID NO: 3814066 - DNA, 25 bp, Homo sapien
gtctggcttcttcactagcttaatg

SEQ ID NO: 3814067 - DNA, 25 bp, Homo sapien
tcacacaatatgtgggactttatgt

SEQ ID NO: 3814068 - DNA, 25 bp, Homo sapien
taatgctgctagtaacattggatcc

SEQ ID NO: 3814069 - DNA, 25 bp, Homo sapien
cagctgatgaatgtttggattggtc

SEQ ID NO: 3814070 - DNA, 25 bp, Homo sapien
taccaatggtatcttatgggataga

SEQ ID NO: 3814071 - DNA, 25 bp, Homo sapien
gaaaactggccattgatttgggaga

SEQ ID NO: 3814072 - DNA, 25 bp, Homo sapien
gaagtaagacgctggcaggtttaga

SEQ ID NO: 3814073 - DNA, 25 bp, Homo sapien
gggcagtatcaatgaacaattcgac

SEQ ID NO: 3814074 - DNA, 25 bp, Homo sapien
caaaaatgggtagtgggccagatct

SEQ ID NO: 3814075 - DNA, 25 bp, Homo sapien
tagtgtagtcaggatctgcccctaa

SEQ ID NO: 3814076 - DNA, 25 bp, Homo sapien
tttggatgtctacagctggctgccc

SEQ ID NO: 3814077 - DNA, 25 bp, Homo sapien
gatcttaggctcaagggcatgtggt

SEQ ID NO: 3814078 - DNA, 25 bp, Homo sapien
gacttctggtagaagcatttcctac

SEQ ID NO: 3814079 - DNA, 25 bp, Homo sapien
taccatgaggtatgccttcacatag

SEQ ID NO: 3814080 - DNA, 25 bp, Homo sapien
gatttgccctttgagtgagtatgct

SEQ ID NO: 3814081 - DNA, 25 bp, Homo sapien
taatctgaggactgaattcacagca

SEQ ID NO: 3814082 - DNA, 25 bp, Homo sapien
gcatttgcattctattcacagggtc

SEQ ID NO: 3814083 - DNA, 25 bp, Homo sapien
gtacctctgaggaccgatttctaga

SEQ ID NO: 3814084 - DNA, 25 bp, Homo sapien
cactgtgagcattctctgacctgca

SEQ ID NO: 3814085 - DNA, 25 bp, Homo sapien
tcaatctcccgatcctgcacaaggt

SEQ ID NO: 3814086 - DNA, 25 bp, Homo sapien
tctatcttaaacattaattcttgaa

SEQ ID NO: 3814087 - DNA, 25 bp, Homo sapien
aaatcttctatcttaaacattaatt

SEQ ID NO: 3814088 - DNA, 25 bp, Homo sapien
aatcttctatcttaaacattaattc

SEQ ID NO: 3814089 - DNA, 25 bp, Homo sapien
cttaaacattaattcttgaacttgc

SEQ ID NO: 3814090 - DNA, 25 bp, Homo sapien
gcttctagatcatgaatgctccata

SEQ ID NO: 3814091 - DNA, 25 bp, Homo sapien
ggtatcttgcttctagatcatgaat

SEQ ID NO: 3814092 - DNA, 25 bp, Homo sapien
cttgcttctagatcatgaatgctcc

SEQ ID NO: 3814093 - DNA, 25 bp, Homo sapien
tagatcatgaatgctccataggtct

SEQ ID NO: 3814094 - DNA, 25 bp, Homo sapien
aaatatctagcgagcaactaatatg

SEQ ID NO: 3814095 - DNA, 25 bp, Homo sapien
agcgagcaactaatatgtactaggc

SEQ ID NO: 3814096 - DNA, 25 bp, Homo sapien
ttcatgaacatgagtctcactgttg

SEQ ID NO: 3814097 - DNA, 25 bp, Homo sapien
tgtactaggcattgttcctgatact

SEQ ID NO: 3814098 - DNA, 25 bp, Homo sapien
tgggatataatttcttctaactcac

SEQ ID NO: 3814099 - DNA, 25 bp, Homo sapien
gcatttggcttattcacatggtaac

SEQ ID NO: 3814100 - DNA, 25 bp, Homo sapien
gccccgatgtggaaattctacttct

SEQ ID NO: 3814101 - DNA, 25 bp, Homo sapien
acttgaagactgcatttggcttatt

SEQ ID NO: 3814102 - DNA, 25 bp, Homo sapien
tgtggaaattctacttctaatatcc

SEQ ID NO: 3814103 - DNA, 25 bp, Homo sapien
ctgagacaaggtgactatagttttc

SEQ ID NO: 3814104 - DNA, 25 bp, Homo sapien
gacaaggtgactatagttttccagc

SEQ ID NO: 3814105 - DNA, 25 bp, Homo sapien
ccactgagacaaggtgactatagtt

SEQ ID NO: 3814106 - DNA, 25 bp, Homo sapien
caaggtgactatagttttccagcat

SEQ ID NO: 3814107 - DNA, 25 bp, Homo sapien
caggggtcagtaacttccattcttc

SEQ ID NO: 3814108 - DNA, 25 bp, Homo sapien
catccttatacagagtcctctgagc

SEQ ID NO: 3814109 - DNA, 25 bp, Homo sapien
taacatcctttaatgtcacgggtcc

SEQ ID NO: 3814110 - DNA, 25 bp, Homo sapien
cacatccttatacagagtcctctga

SEQ ID NO: 3814111 - DNA, 25 bp, Homo sapien
cttacagatgaatttgcataacagc

SEQ ID NO: 3814112 - DNA, 25 bp, Homo sapien
tacacgaaatatctagactaggtag

SEQ ID NO: 3814113 - DNA, 25 bp, Homo sapien
gactaggtagatccatagagataga

SEQ ID NO: 3814114 - DNA, 25 bp, Homo sapien
aaaggtcacctaatgtatgatctca

SEQ ID NO: 3814115 - DNA, 25 bp, Homo sapien
ttctgctgctcttgggaaaggctga

SEQ ID NO: 3814116 - DNA, 25 bp, Homo sapien
tttctgctgctcttgggaaaggctg

SEQ ID NO: 3814117 - DNA, 25 bp, Homo sapien
tgctgctcttgggaaaggctgaaaa

SEQ ID NO: 3814118 - DNA, 25 bp, Homo sapien
tctgctgctcttgggaaaggctgaa

SEQ ID NO: 3814119 - DNA, 25 bp, Homo sapien
gagcagaaatcataagggaccttag

SEQ ID NO: 3814120 - DNA, 25 bp, Homo sapien
gaaatcataagggaccttagctggc

SEQ ID NO: 3814121 - DNA, 25 bp, Homo sapien
aagggaccttagctggcagccccag

SEQ ID NO: 3814122 - DNA, 25 bp, Homo sapien
aagccagagcagaaatcataaggga

SEQ ID NO: 3814123 - DNA, 25 bp, Homo sapien
cattagaaagcatagtaaggaccat

SEQ ID NO: 3814124 - DNA, 25 bp, Homo sapien
tgacccattagaaagcatagtaagg

SEQ ID NO: 3814125 - DNA, 25 bp, Homo sapien
cctttgacccattagaaagcatagt

SEQ ID NO: 3814126 - DNA, 25 bp, Homo sapien
aatgtccctttgacccattagaaag

SEQ ID NO: 3814127 - DNA, 25 bp, Homo sapien
gcagggtctcggcctctgctcccgg

SEQ ID NO: 3814128 - DNA, 25 bp, Homo sapien
cagggtctcggcctctgctcccggc

SEQ ID NO: 3814129 - DNA, 25 bp, Homo sapien
tgcagggtctcggcctctgctcccg

SEQ ID NO: 3814130 - DNA, 25 bp, Homo sapien
gtagctgctgtgctaatcttggtat

SEQ ID NO: 3814131 - DNA, 25 bp, Homo sapien
tagctgctgtgctaatcttggtatt

SEQ ID NO: 3814132 - DNA, 25 bp, Homo sapien
tgtagctgctgtgctaatcttggta

SEQ ID NO: 3814133 - DNA, 25 bp, Homo sapien
gctaatcctatggtcaccaaaagga

SEQ ID NO: 3814134 - DNA, 25 bp, Homo sapien
ctctagctagcttaagaacaaacag

SEQ ID NO: 3814135 - DNA, 25 bp, Homo sapien
cagaagacaaatattgctaatacca

SEQ ID NO: 3814136 - DNA, 25 bp, Homo sapien
caactctgtccataaatttgataac

SEQ ID NO: 3814137 - DNA, 25 bp, Homo sapien
ctcaataggcatatgtatctattaa

SEQ ID NO: 3814138 - DNA, 25 bp, Homo sapien
cctcaataggcatatgtatctatta

SEQ ID NO: 3814139 - DNA, 25 bp, Homo sapien
tattgagccagtgaaaggaccagtg

SEQ ID NO: 3814140 - DNA, 25 bp, Homo sapien
ggcagtgaaagtactctctagggta

SEQ ID NO: 3814141 - DNA, 25 bp, Homo sapien
ttgggagaggcaaaactattgagcc

SEQ ID NO: 3814142 - DNA, 25 bp, Homo sapien
tacagcaggattgcaggatacagtc

SEQ ID NO: 3814143 - DNA, 25 bp, Homo sapien
gaaccaccagttgctggcaggtttg

SEQ ID NO: 3814144 - DNA, 25 bp, Homo sapien
caaaggcttcttggacagaaccacc

SEQ ID NO: 3814145 - DNA, 25 bp, Homo sapien
gctggcaggtttgcacttggcctgt

SEQ ID NO: 3814146 - DNA, 25 bp, Homo sapien
gggaggtgagtgtcgcatctcttcc

SEQ ID NO: 3814147 - DNA, 25 bp, Homo sapien
tgtatcccttcatgacttgacttgg

SEQ ID NO: 3814148 - DNA, 25 bp, Homo sapien
tgctcacccattggctgtatccctt

SEQ ID NO: 3814149 - DNA, 25 bp, Homo sapien
atgacttgacttgggctcagcctgt

SEQ ID NO: 3814150 - DNA, 25 bp, Homo sapien
tgttgtgcacaggacaagagtgctc

SEQ ID NO: 3814151 - DNA, 25 bp, Homo sapien
cagactacccaggatgtgacgattg

SEQ ID NO: 3814152 - DNA, 25 bp, Homo sapien
gactacccaggatgtgacgattgca

SEQ ID NO: 3814153 - DNA, 25 bp, Homo sapien
aaaatgctttggctccttaggattc

SEQ ID NO: 3814154 - DNA, 25 bp, Homo sapien
gattcagcaaaggtatccactgcct

SEQ ID NO: 3814155 - DNA, 25 bp, Homo sapien
tgaggcttctcgtgtccttggagct

SEQ ID NO: 3814156 - DNA, 25 bp, Homo sapien
ggctgaggcttctcgtgtccttgga

SEQ ID NO: 3814157 - DNA, 25 bp, Homo sapien
gctgaggcttctcgtgtccttggag

SEQ ID NO: 3814158 - DNA, 25 bp, Homo sapien
gggctgaggcttctcgtgtccttgg

SEQ ID NO: 3814159 - DNA, 25 bp, Homo sapien
tgcagtgctgtgagatacaccacag

SEQ ID NO: 3814160 - DNA, 25 bp, Homo sapien
ttgcagtgctgtgagatacaccaca

SEQ ID NO: 3814161 - DNA, 25 bp, Homo sapien
acacaccaagggtcttccctgacca

SEQ ID NO: 3814162 - DNA, 25 bp, Homo sapien
cacaccaagggtcttccctgaccat

SEQ ID NO: 3814163 - DNA, 25 bp, Homo sapien
cacacaccaagggtcttccctgacc

SEQ ID NO: 3814164 - DNA, 25 bp, Homo sapien
agctcctcgaatctgtggatctgac

SEQ ID NO: 3814165 - DNA, 25 bp, Homo sapien
caatgtagaagtcaacctctgaggc

SEQ ID NO: 3814166 - DNA, 25 bp, Homo sapien
tcaatgtagaagtcaacctctgagg

SEQ ID NO: 3814167 - DNA, 25 bp, Homo sapien
ctgaaattcatcatccagggttgtg

SEQ ID NO: 3814168 - DNA, 25 bp, Homo sapien
aaattcatcatccagggttgtgatg

SEQ ID NO: 3814169 - DNA, 25 bp, Homo sapien
gggttgtgatgctgctggtccacac

SEQ ID NO: 3814170 - DNA, 25 bp, Homo sapien
agggttgtgatgctgctggtccaca

SEQ ID NO: 3814171 - DNA, 25 bp, Homo sapien
cttcaatttgtgtttgaagacagga

SEQ ID NO: 3814172 - DNA, 25 bp, Homo sapien
cctgctctgtgaggtccaggaagcc

SEQ ID NO: 3814173 - DNA, 25 bp, Homo sapien
gggtgcacattatcgtagttgggca

SEQ ID NO: 3814174 - DNA, 25 bp, Homo sapien
cagaaaacaccttcggctgctgcag

SEQ ID NO: 3814175 - DNA, 25 bp, Homo sapien
ctacaggcgacaggaacttggggca

SEQ ID NO: 3814176 - DNA, 25 bp, Homo sapien
gtatttatcccaccgctggaggtga

SEQ ID NO: 3814177 - DNA, 25 bp, Homo sapien
ttatcccaccgctggaggtgaatgc

SEQ ID NO: 3814178 - DNA, 25 bp, Homo sapien
tgttgctgtatttatcccaccgctg

SEQ ID NO: 3814179 - DNA, 25 bp, Homo sapien
tgctgtatttatcccaccgctggag

SEQ ID NO: 3814180 - DNA, 25 bp, Homo sapien
cataatagtatgtggtgacctggca

SEQ ID NO: 3814181 - DNA, 25 bp, Homo sapien
ggtagtgacacatcatcaaatatgc

SEQ ID NO: 3814182 - DNA, 25 bp, Homo sapien
ctggtagtgacacatcatcaaatat

SEQ ID NO: 3814183 - DNA, 25 bp, Homo sapien
aacccaacataatagtatgtggtga

SEQ ID NO: 3814184 - DNA, 25 bp, Homo sapien
tctgtgaccactgaggatgcgggag

SEQ ID NO: 3814185 - DNA, 25 bp, Homo sapien
ctctgtgaccactgaggatgcggga

SEQ ID NO: 3814186 - DNA, 25 bp, Homo sapien
ctgtgaccactgaggatgcgggagt

SEQ ID NO: 3814187 - DNA, 25 bp, Homo sapien
cagctgccttcaggttccggaggct

SEQ ID NO: 3814188 - DNA, 25 bp, Homo sapien
taaaagttcaagcagctgccttcag

SEQ ID NO: 3814189 - DNA, 25 bp, Homo sapien
ctaaaagttcaagcagctgccttca

SEQ ID NO: 3814190 - DNA, 25 bp, Homo sapien
tcaagcagctgccttcaggttccgg

SEQ ID NO: 3814191 - DNA, 25 bp, Homo sapien
ctggggtcccgggcttctgattgaa

SEQ ID NO: 3814192 - DNA, 25 bp, Homo sapien
tctgctttctggagttttgctgcat

SEQ ID NO: 3814193 - DNA, 25 bp, Homo sapien
tgcatttgcagtgatgaggttctcc

SEQ ID NO: 3814194 - DNA, 25 bp, Homo sapien
gattgaaactccacttgcatctgca

SEQ ID NO: 3814195 - DNA, 25 bp, Homo sapien
gctgcactggccatgacaatgaggg

SEQ ID NO: 3814196 - DNA, 25 bp, Homo sapien
ctgcactggccatgacaatgagggc

SEQ ID NO: 3814197 - DNA, 25 bp, Homo sapien
tgcactggccatgacaatgagggcc

SEQ ID NO: 3814198 - DNA, 25 bp, Homo sapien
gcaagtgaagctctccacactggcg

SEQ ID NO: 3814199 - DNA, 25 bp, Homo sapien
cgtctggagaaattccactcgtgaa

SEQ ID NO: 3814200 - DNA, 25 bp, Homo sapien
gggccacaggaaccgacctcgtctg

SEQ ID NO: 3814201 - DNA, 25 bp, Homo sapien
aagtgtaggtggtgctgcggcagcg

SEQ ID NO: 3814202 - DNA, 25 bp, Homo sapien
gccaaatcatcagggggatgtaatt

SEQ ID NO: 3814203 - DNA, 25 bp, Homo sapien
cagggggatgtaattcatgagaaag

SEQ ID NO: 3814204 - DNA, 25 bp, Homo sapien
aatcatcagggggatgtaattcatg

SEQ ID NO: 3814205 - DNA, 25 bp, Homo sapien
tgttgaggacggccaaatcatcagg

SEQ ID NO: 3814206 - DNA, 25 bp, Homo sapien
tgaatgaggattcgaaccaaagggc

SEQ ID NO: 3814207 - DNA, 25 bp, Homo sapien
ccagtgggcattttcagagggtcca

SEQ ID NO: 3814208 - DNA, 25 bp, Homo sapien
tgtgtccccattagcaccagtgggc

SEQ ID NO: 3814209 - DNA, 25 bp, Homo sapien
gagggtccagctcatggctcaagtg

SEQ ID NO: 3814210 - DNA, 25 bp, Homo sapien
tagagatctagagcacgggtgggag

SEQ ID NO: 3814211 - DNA, 25 bp, Homo sapien
gagcagaggctcgatttgtgtcctt

SEQ ID NO: 3814212 - DNA, 25 bp, Homo sapien
aggagcagaggctcgatttgtgtcc

SEQ ID NO: 3814213 - DNA, 25 bp, Homo sapien
cagaggctcgatttgtgtcctttcc

SEQ ID NO: 3814214 - DNA, 25 bp, Homo sapien
ggagcagacagcaccgcttcttggg

SEQ ID NO: 3814215 - DNA, 25 bp, Homo sapien
ggcatcatgcggagggaagagctta

SEQ ID NO: 3814216 - DNA, 25 bp, Homo sapien
gagggcaaggccgaaggagcagaca

SEQ ID NO: 3814217 - DNA, 25 bp, Homo sapien
tgcccattcagatgtgggggcagaa

SEQ ID NO: 3814218 - DNA, 25 bp, Homo sapien
actatgtctcctttgtagactgacc

SEQ ID NO: 3814219 - DNA, 25 bp, Homo sapien
tcagtatagccaccctggcattctt

SEQ ID NO: 3814220 - DNA, 25 bp, Homo sapien
cattttggctagttgagataccttg

SEQ ID NO: 3814221 - DNA, 25 bp, Homo sapien
atcattttaccatacatgcatgggt

SEQ ID NO: 3814222 - DNA, 25 bp, Homo sapien
gccctggaaacaaggtcatactaga

SEQ ID NO: 3814223 - DNA, 25 bp, Homo sapien
acatgccatcagtaaaagccctgga

SEQ ID NO: 3814224 - DNA, 25 bp, Homo sapien
ccagagtggaggagttagacttgcc

SEQ ID NO: 3814225 - DNA, 25 bp, Homo sapien
caactgcaaacaatacctgagtgga

SEQ ID NO: 3814226 - DNA, 25 bp, Homo sapien
aagaaaatactctggctggtctcag

SEQ ID NO: 3814227 - DNA, 25 bp, Homo sapien
gattcctagtcagagattgggagaa

SEQ ID NO: 3814228 - DNA, 25 bp, Homo sapien
cctcagtaacagtaagcacaccaac

SEQ ID NO: 3814229 - DNA, 25 bp, Homo sapien
ggacctaaacacaatgacacctcag

SEQ ID NO: 3814230 - DNA, 25 bp, Homo sapien
tgcacaagtgttctgacttcaccac

SEQ ID NO: 3814231 - DNA, 25 bp, Homo sapien
tatcctgtcagacatatggttggca

SEQ ID NO: 3814232 - DNA, 25 bp, Homo sapien
tagcatacacatcttactaagtaga

SEQ ID NO: 3814233 - DNA, 25 bp, Homo sapien
gatagtattcttcgatgcaaaaaag

SEQ ID NO: 3814234 - DNA, 25 bp, Homo sapien
cagagtgtggccagtttgtctgatg

SEQ ID NO: 3814235 - DNA, 25 bp, Homo sapien
tgatgggaggaatcacatgcactgt

SEQ ID NO: 3814236 - DNA, 25 bp, Homo sapien
cctggcaatagtaagtgaggtcagc

SEQ ID NO: 3814237 - DNA, 25 bp, Homo sapien
gacatgcagttcactgtccgcagag

SEQ ID NO: 3814238 - DNA, 25 bp, Homo sapien
caaggttcctgtctgcatgagtgta

SEQ ID NO: 3814239 - DNA, 25 bp, Homo sapien
cttcttgtctgcctggggcgttgcg

SEQ ID NO: 3814240 - DNA, 25 bp, Homo sapien
ggcgttgcgctcagcaccttcagcc

SEQ ID NO: 3814241 - DNA, 25 bp, Homo sapien
gtgtaatcaccatcgagtgtcaaca

SEQ ID NO: 3814242 - DNA, 25 bp, Homo sapien
catggaccacggggaaagtggccat

SEQ ID NO: 3814243 - DNA, 25 bp, Homo sapien
ttagatgtatcaagaagtgtagact

SEQ ID NO: 3814244 - DNA, 25 bp, Homo sapien
aacgtatcacctatttttgtcctcg

SEQ ID NO: 3814245 - DNA, 25 bp, Homo sapien
tacatatgaatcatcgcttcttccc

SEQ ID NO: 3814246 - DNA, 25 bp, Homo sapien
tacccattgcttcctatgataatga

SEQ ID NO: 3814247 - DNA, 25 bp, Homo sapien
ggcctccatgtacaccgcagaggct

SEQ ID NO: 3814248 - DNA, 25 bp, Homo sapien
tggggacatgatagcaggagtgcct

SEQ ID NO: 3814249 - DNA, 25 bp, Homo sapien
gggcctccatgtacaccgcagaggc

SEQ ID NO: 3814250 - DNA, 25 bp, Homo sapien
agcagctggggacatgatagcagga

SEQ ID NO: 3814251 - DNA, 25 bp, Homo sapien
gatttccagggtacagcaagaacaa

SEQ ID NO: 3814252 - DNA, 25 bp, Homo sapien
atttccagggtacagcaagaacaac

SEQ ID NO: 3814253 - DNA, 25 bp, Homo sapien
cttttctgctactttccagtgtggc

SEQ ID NO: 3814254 - DNA, 25 bp, Homo sapien
gcttgcaagctaactgaccccttgt

SEQ ID NO: 3814255 - DNA, 25 bp, Homo sapien
gtgacccactgccaaagcatcagca

SEQ ID NO: 3814256 - DNA, 25 bp, Homo sapien
catccgggttgtatgtagcttgcaa

SEQ ID NO: 3814257 - DNA, 25 bp, Homo sapien
tgtgggatatccacagccttggcct

SEQ ID NO: 3814258 - DNA, 25 bp, Homo sapien
gtgggatatccacagccttggcctc

SEQ ID NO: 3814259 - DNA, 25 bp, Homo sapien
tgtgtgggatatccacagccttggc

SEQ ID NO: 3814260 - DNA, 25 bp, Homo sapien
catgtgtgggatatccacagccttg

SEQ ID NO: 3814261 - DNA, 25 bp, Homo sapien
cttttctggattattctcatttgaa

SEQ ID NO: 3814262 - DNA, 25 bp, Homo sapien
ccaacagagggtactccaggtggat

SEQ ID NO: 3814263 - DNA, 25 bp, Homo sapien
tactccaggtggatgcaacgtttct

SEQ ID NO: 3814264 - DNA, 25 bp, Homo sapien
attctgccaacagagggtactccag

SEQ ID NO: 3814265 - DNA, 25 bp, Homo sapien
caacgtttctggagttcctcaatca

SEQ ID NO: 3814266 - DNA, 25 bp, Homo sapien
tttgtgcctggctaacagacctcca

SEQ ID NO: 3814267 - DNA, 25 bp, Homo sapien
cttttgtgcctggctaacagacctc

SEQ ID NO: 3814268 - DNA, 25 bp, Homo sapien
cccggggagtgagccttttgtgcct

SEQ ID NO: 3814269 - DNA, 25 bp, Homo sapien
ttcccggggagtgagccttttgtgc

SEQ ID NO: 3814270 - DNA, 25 bp, Homo sapien
aggttctggtagtgcccactggcag

SEQ ID NO: 3814271 - DNA, 25 bp, Homo sapien
tggtagtgcccactggcagcatttg

SEQ ID NO: 3814272 - DNA, 25 bp, Homo sapien
tctggtagtgcccactggcagcatt

SEQ ID NO: 3814273 - DNA, 25 bp, Homo sapien
agtgcccactggcagcatttggcag

SEQ ID NO: 3814274 - DNA, 25 bp, Homo sapien
tcctggtcaggctgacaggctctca

SEQ ID NO: 3814275 - DNA, 25 bp, Homo sapien
tcactgatcccccattgaaagggct

SEQ ID NO: 3814276 - DNA, 25 bp, Homo sapien
ggtcaggctgacaggctctcaaccc

SEQ ID NO: 3814277 - DNA, 25 bp, Homo sapien
cattgaaagggctggcatcctggtc

SEQ ID NO: 3814278 - DNA, 25 bp, Homo sapien
tatagtgtttgttttctctgttaaa

SEQ ID NO: 3814279 - DNA, 25 bp, Homo sapien
ttatagtgtttgttttctctgttaa

SEQ ID NO: 3814280 - DNA, 25 bp, Homo sapien
cttatagtgtttgttttctctgtta

SEQ ID NO: 3814281 - DNA, 25 bp, Homo sapien
tgtttgttttctctgttaaaagcca

SEQ ID NO: 3814282 - DNA, 25 bp, Homo sapien
tagcatcttgtagaattgctgctgc

SEQ ID NO: 3814283 - DNA, 25 bp, Homo sapien
tgctgctgacttatgccccagctgt

SEQ ID NO: 3814284 - DNA, 25 bp, Homo sapien
gctgctgacttatgccccagctgtg

SEQ ID NO: 3814285 - DNA, 25 bp, Homo sapien
taagtcttgatagcatcttgtagaa

SEQ ID NO: 3814286 - DNA, 25 bp, Homo sapien
acacagtcttactctcactcatcta

SEQ ID NO: 3814287 - DNA, 25 bp, Homo sapien
cacagtcttactctcactcatctac

SEQ ID NO: 3814288 - DNA, 25 bp, Homo sapien
cacacacacagtcttactctcactc

SEQ ID NO: 3814289 - DNA, 25 bp, Homo sapien
acacacagtcttactctcactcatc

SEQ ID NO: 3814290 - DNA, 25 bp, Homo sapien
ggttgacacacccattgagaagcag

SEQ ID NO: 3814291 - DNA, 25 bp, Homo sapien
ttggttgacacacccattgagaagc

SEQ ID NO: 3814292 - DNA, 25 bp, Homo sapien
gttattggttgacacacccattgag

SEQ ID NO: 3814293 - DNA, 25 bp, Homo sapien
tattggttgacacacccattgagaa

SEQ ID NO: 3814294 - DNA, 25 bp, Homo sapien
ccatttgtcctgaaatttatgacca

SEQ ID NO: 3814295 - DNA, 25 bp, Homo sapien
gcacttcagctttggaaaagatccg

SEQ ID NO: 3814296 - DNA, 25 bp, Homo sapien
aaatatttgatcttaggacactatc

SEQ ID NO: 3814297 - DNA, 25 bp, Homo sapien
tagcaaagttatctggtaagattgt

SEQ ID NO: 3814298 - DNA, 25 bp, Homo sapien
gaagtccgcagcctggtggagtcct

SEQ ID NO: 3814299 - DNA, 25 bp, Homo sapien
agtccgcagcctggtggagtcctct

SEQ ID NO: 3814300 - DNA, 25 bp, Homo sapien
ctgtcctaaggaagtccgcagcctg

SEQ ID NO: 3814301 - DNA, 25 bp, Homo sapien
tcctaaggaagtccgcagcctggtg

SEQ ID NO: 3814302 - DNA, 25 bp, Homo sapien
aatctcagtgcagtgaggttttgaa

SEQ ID NO: 3814303 - DNA, 25 bp, Homo sapien
cacctggaataagtgattgtggaag

SEQ ID NO: 3814304 - DNA, 25 bp, Homo sapien
tctgtccgttctgcgtggggtcctc

SEQ ID NO: 3814305 - DNA, 25 bp, Homo sapien
ttagggagcatgtggcaagttctca

SEQ ID NO: 3814306 - DNA, 25 bp, Homo sapien
gagcaaaggaacgacaccaggctgt

SEQ ID NO: 3814307 - DNA, 25 bp, Homo sapien
ccagacactgctgaaaggcagtacc

SEQ ID NO: 3814308 - DNA, 25 bp, Homo sapien
taccaagataatgttgtctgtcccc

SEQ ID NO: 3814309 - DNA, 25 bp, Homo sapien
caaaggaacgacaccaggctgtgga

SEQ ID NO: 3814310 - DNA, 25 bp, Homo sapien
taaatcctctaatgagatggagcct

SEQ ID NO: 3814311 - DNA, 25 bp, Homo sapien
gttatgatgaatggacaggcagcct

SEQ ID NO: 3814312 - DNA, 25 bp, Homo sapien
cagggatggctatgtttatgcccac

SEQ ID NO: 3814313 - DNA, 25 bp, Homo sapien
cccgtgattggcatgatgagcatat

SEQ ID NO: 3814314 - DNA, 25 bp, Homo sapien
aagctctgattgatccattgggaca

SEQ ID NO: 3814315 - DNA, 25 bp, Homo sapien
aaatgagtactgtcaatcaaggtgc

SEQ ID NO: 3814316 - DNA, 25 bp, Homo sapien
tgaagagatgaagcagccgctatct

SEQ ID NO: 3814317 - DNA, 25 bp, Homo sapien
gacatctgtgaagagatgaagcagc

SEQ ID NO: 3814318 - DNA, 25 bp, Homo sapien
ctgggttattgatgccatgctatgc

SEQ ID NO: 3814319 - DNA, 25 bp, Homo sapien
gccttatgctgggttattgatgcca

SEQ ID NO: 3814320 - DNA, 25 bp, Homo sapien
ttgatgccatgctatgcttttccct

SEQ ID NO: 3814321 - DNA, 25 bp, Homo sapien
cctgaggccttatgctgggttattg

SEQ ID NO: 3814322 - DNA, 25 bp, Homo sapien
tgtctgaaaggttgccatcgttaag

SEQ ID NO: 3814323 - DNA, 25 bp, Homo sapien
aagctgctttgtattgggtctgctc

SEQ ID NO: 3814324 - DNA, 25 bp, Homo sapien
gaaggacagtcctcatggttatcat

SEQ ID NO: 3814325 - DNA, 25 bp, Homo sapien
gggtctgctctggtaatggcccaga

SEQ ID NO: 3814326 - DNA, 25 bp, Homo sapien
tcctgatgtgtgatcagttggtgct

SEQ ID NO: 3814327 - DNA, 25 bp, Homo sapien
tcatggagactaatttataagtaca

SEQ ID NO: 3814328 - DNA, 25 bp, Homo sapien
tggccagtaccacattttcaatctc

SEQ ID NO: 3814329 - DNA, 25 bp, Homo sapien
gccagtaccacattttcagtctcaa

SEQ ID NO: 3814330 - DNA, 25 bp, Homo sapien
tgcactagtctatgctgccctaggg

SEQ ID NO: 3814331 - DNA, 25 bp, Homo sapien
gccctagggctatctggaataatta

SEQ ID NO: 3814332 - DNA, 25 bp, Homo sapien
agaactaccttgtttccttggacag

SEQ ID NO: 3814333 - DNA, 25 bp, Homo sapien
caaatattgaggcacttaagagaca

SEQ ID NO: 3814334 - DNA, 25 bp, Homo sapien
tctgagcttgctgtggctaatttat

SEQ ID NO: 3814335 - DNA, 25 bp, Homo sapien
gaattctcaaatgtttactgtagct

SEQ ID NO: 3814336 - DNA, 25 bp, Homo sapien
tccacgatgactccacagattctgt

SEQ ID NO: 3814337 - DNA, 25 bp, Homo sapien
caattccttattgagaggacagagc

SEQ ID NO: 3814338 - DNA, 25 bp, Homo sapien
taacatttcgcattggtatgatgca

SEQ ID NO: 3814339 - DNA, 25 bp, Homo sapien
taggatcccattcaagatactacat

SEQ ID NO: 3814340 - DNA, 25 bp, Homo sapien
tggaagctttcctagtagatttttc

SEQ ID NO: 3814341 - DNA, 25 bp, Homo sapien
agagactttctgtatgccctacacc

SEQ ID NO: 3814342 - DNA, 25 bp, Homo sapien
ctggggtacatggatttctactgag

SEQ ID NO: 3814343 - DNA, 25 bp, Homo sapien
ggaacattgcataccttctgtacat

SEQ ID NO: 3814344 - DNA, 25 bp, Homo sapien
tgacactctggaacattgcatacct

SEQ ID NO: 3814345 - DNA, 25 bp, Homo sapien
gctgacaatgacactctggaacatt

SEQ ID NO: 3814346 - DNA, 25 bp, Homo sapien
tggcaagttccacacaagatagaca

SEQ ID NO: 3814347 - DNA, 25 bp, Homo sapien
cactgggtggattagctaatgccta

SEQ ID NO: 3814348 - DNA, 25 bp, Homo sapien
ccaaagtggaaggatagcttaaggc

SEQ ID NO: 3814349 - DNA, 25 bp, Homo sapien
cataacgagatgctgtctttaccaa

SEQ ID NO: 3814350 - DNA, 25 bp, Homo sapien
tcattgggttagtattttcttctcc

SEQ ID NO: 3814351 - DNA, 25 bp, Homo sapien
gtttctttcctgagtataatcagtt

SEQ ID NO: 3814352 - DNA, 25 bp, Homo sapien
tccgcactttttagttccatcttta

SEQ ID NO: 3814353 - DNA, 25 bp, Homo sapien
gggtacattgctataattaaaagca

SEQ ID NO: 3814354 - DNA, 25 bp, Homo sapien
aggtttatttgaattaaggtatcat

SEQ ID NO: 3814355 - DNA, 25 bp, Homo sapien
gtttatttgaattaaggtatcatga

SEQ ID NO: 3814356 - DNA, 25 bp, Homo sapien
tatttgaattaaggtatcatgaaat

SEQ ID NO: 3814357 - DNA, 25 bp, Homo sapien
tttgaattaaggtatcatgaaatgg

SEQ ID NO: 3814358 - DNA, 25 bp, Homo sapien
tttgcagtaccaagtcagagtttat

SEQ ID NO: 3814359 - DNA, 25 bp, Homo sapien
aataatccatgtttcttgtctgcca

SEQ ID NO: 3814360 - DNA, 25 bp, Homo sapien
taatggaactccacgcaataatcca

SEQ ID NO: 3814361 - DNA, 25 bp, Homo sapien
gaatgagtcttattcctactaatgg

SEQ ID NO: 3814362 - DNA, 25 bp, Homo sapien
cacattagttatgagccaggccgga

SEQ ID NO: 3814363 - DNA, 25 bp, Homo sapien
caaggacttagttccggcacatgat

SEQ ID NO: 3814364 - DNA, 25 bp, Homo sapien
tagctgaagtctgcaccaccgaatg

SEQ ID NO: 3814365 - DNA, 25 bp, Homo sapien
tagggttatcatgaccaggcgatgc

SEQ ID NO: 3814366 - DNA, 25 bp, Homo sapien
tgagtgtcaaacctccaagattagg

SEQ ID NO: 3814367 - DNA, 25 bp, Homo sapien
gctggccttgctccaatgccttcaa

SEQ ID NO: 3814368 - DNA, 25 bp, Homo sapien
cactttcttacgtgacacctctgag

SEQ ID NO: 3814369 - DNA, 25 bp, Homo sapien
ggaactttcacattgagcctttggg

SEQ ID NO: 3814370 - DNA, 25 bp, Homo sapien
acttaggagaatatgtgcagtttgc

SEQ ID NO: 3814371 - DNA, 25 bp, Homo sapien
gatctgtacaagaacaattcattgc

SEQ ID NO: 3814372 - DNA, 25 bp, Homo sapien
tattaatgtttcactaccctctggt

SEQ ID NO: 3814373 - DNA, 25 bp, Homo sapien
tgtgaaggctaggatgtacaagatc

SEQ ID NO: 3814374 - DNA, 25 bp, Homo sapien
ctcaacaaaaggcaatgccaggtag

SEQ ID NO: 3814375 - DNA, 25 bp, Homo sapien
aaaggcaatgccaggtagttacaaa

SEQ ID NO: 3814376 - DNA, 25 bp, Homo sapien
acaaaaggcaatgccaggtagttac

SEQ ID NO: 3814377 - DNA, 25 bp, Homo sapien
aggcaatgccaggtagttacaaaca

SEQ ID NO: 3814378 - DNA, 25 bp, Homo sapien
tacccaatcctgcctgaaggtggga

SEQ ID NO: 3814379 - DNA, 25 bp, Homo sapien
aatataattgatagcaggctgccag

SEQ ID NO: 3814380 - DNA, 25 bp, Homo sapien
ctatcaatataattgatagcaggct

SEQ ID NO: 3814381 - DNA, 25 bp, Homo sapien
caatataattgatagcaggctgcca

SEQ ID NO: 3814382 - DNA, 25 bp, Homo sapien
ttactatcaatataattgatagcag

SEQ ID NO: 3814383 - DNA, 25 bp, Homo sapien
ggggtatcaactattgtaagcagca

SEQ ID NO: 3814384 - DNA, 25 bp, Homo sapien
taagcagcaactgaacaccaccttc

SEQ ID NO: 3814385 - DNA, 25 bp, Homo sapien
aaatcctggggtatcaactattgta

SEQ ID NO: 3814386 - DNA, 25 bp, Homo sapien
tgattaaaactttggattgttccat

SEQ ID NO: 3814387 - DNA, 25 bp, Homo sapien
gcttttacaagtatcctcatgggat

SEQ ID NO: 3814388 - DNA, 25 bp, Homo sapien
tcagcgacatatggaagagatccag

SEQ ID NO: 3814389 - DNA, 25 bp, Homo sapien
tgcttttacaagtatcctcatggga

SEQ ID NO: 3814390 - DNA, 25 bp, Homo sapien
aagaagtcagcgacatatggaagag

SEQ ID NO: 3814391 - DNA, 25 bp, Homo sapien
tgaaggtattcataatagataccca

SEQ ID NO: 3814392 - DNA, 25 bp, Homo sapien
aatctcaagccctatgaaggttact

SEQ ID NO: 3814393 - DNA, 25 bp, Homo sapien
tcataatagatacccaaattaagaa

SEQ ID NO: 3814394 - DNA, 25 bp, Homo sapien
tcaagccctatgaaggttactaaaa

SEQ ID NO: 3814395 - DNA, 25 bp, Homo sapien
attaatgtcaactttcccagtccag

SEQ ID NO: 3814396 - DNA, 25 bp, Homo sapien
ctgtacaggttttttaattctctga

SEQ ID NO: 3814397 - DNA, 25 bp, Homo sapien
aattctctgagaaggacctggatac

SEQ ID NO: 3814398 - DNA, 25 bp, Homo sapien
gtcaactttcccagtccagattcgt

SEQ ID NO: 3814399 - DNA, 25 bp, Homo sapien
tgagcagcgccagatagccggggac

SEQ ID NO: 3814400 - DNA, 25 bp, Homo sapien
cagcgccagatagccggggacgctc

SEQ ID NO: 3814401 - DNA, 25 bp, Homo sapien
cgctcccggggatccacgggccctg

SEQ ID NO: 3814402 - DNA, 25 bp, Homo sapien
ccaggatgagcagcgccagatagcc

SEQ ID NO: 3814403 - DNA, 25 bp, Homo sapien
ggctgcagctggtgctggccattga

SEQ ID NO: 3814404 - DNA, 25 bp, Homo sapien
caagtgaggcgagtgggcggccggg

SEQ ID NO: 3814405 - DNA, 25 bp, Homo sapien
tcaagtgaggcgagtgggcggccgg

SEQ ID NO: 3814406 - DNA, 25 bp, Homo sapien
tgcagctggtgctggccattgagga

SEQ ID NO: 3814407 - DNA, 25 bp, Homo sapien
ggttggcgcgcagcgcctgctagcg

SEQ ID NO: 3814408 - DNA, 25 bp, Homo sapien
gcgcgacagtgcgatcggttgcacc

SEQ ID NO: 3814409 - DNA, 25 bp, Homo sapien
gcgatcggttgcaccttctgcgaca

SEQ ID NO: 3814410 - DNA, 25 bp, Homo sapien
agtgcgatcggttgcaccttctgcg

SEQ ID NO: 3814411 - DNA, 25 bp, Homo sapien
gggcaaggctgttgcacttctctga

SEQ ID NO: 3814412 - DNA, 25 bp, Homo sapien
ggcattgggcaaggctgttgcactt

SEQ ID NO: 3814413 - DNA, 25 bp, Homo sapien
tgttgcacttctctgatcccatttc

SEQ ID NO: 3814414 - DNA, 25 bp, Homo sapien
acagtgacaaaagaacactctgggc

SEQ ID NO: 3814415 - DNA, 25 bp, Homo sapien
cacttgctgcaagggccagttctcc

SEQ ID NO: 3814416 - DNA, 25 bp, Homo sapien
gcttttcacttgctgcaagggccag

SEQ ID NO: 3814417 - DNA, 25 bp, Homo sapien
ggcttttcacttgctgcaagggcca

SEQ ID NO: 3814418 - DNA, 25 bp, Homo sapien
tttcacttgctgcaagggccagttc

SEQ ID NO: 3814419 - DNA, 25 bp, Homo sapien
gattcttattggactgttatctctg

SEQ ID NO: 3814420 - DNA, 25 bp, Homo sapien
ggccttgagaggatgttactttcga

SEQ ID NO: 3814421 - DNA, 25 bp, Homo sapien
tagtcattcaccactagggttgtat

SEQ ID NO: 3814422 - DNA, 25 bp, Homo sapien
tatctctgttatgagtaatccatct

SEQ ID NO: 3814423 - DNA, 25 bp, Homo sapien
tcatgtcacgacatactgccgctgc

SEQ ID NO: 3814424 - DNA, 25 bp, Homo sapien
tgtcatgtcacgacatactgccgct

SEQ ID NO: 3814425 - DNA, 25 bp, Homo sapien
gtatgtcatgtcacgacatactgcc

SEQ ID NO: 3814426 - DNA, 25 bp, Homo sapien
gtcacgacatactgccgctgcacga

SEQ ID NO: 3814427 - DNA, 25 bp, Homo sapien
tcccacgctgacagaggtcagcctg

SEQ ID NO: 3814428 - DNA, 25 bp, Homo sapien
cgctgacagaggtcagcctgagccc

SEQ ID NO: 3814429 - DNA, 25 bp, Homo sapien
cgctgacagaggtcagcgtgagccc

SEQ ID NO: 3814430 - DNA, 25 bp, Homo sapien
gcccctccctcgctgacagaggtca

SEQ ID NO: 3814431 - DNA, 25 bp, Homo sapien
gaagagcagcaagtcagcctctccg

SEQ ID NO: 3814432 - DNA, 25 bp, Homo sapien
gctccggcctcctggcggcctttgc

SEQ ID NO: 3814433 - DNA, 25 bp, Homo sapien
aacgtcccgaagttggcctctccag

SEQ ID NO: 3814434 - DNA, 25 bp, Homo sapien
gagcagcaagtcagcctctccgggc

SEQ ID NO: 3814435 - DNA, 25 bp, Homo sapien
ccctagtccacaggcgcctccatgt

SEQ ID NO: 3814436 - DNA, 25 bp, Homo sapien
gcgcctccatgtggcccaaggccct

SEQ ID NO: 3814437 - DNA, 25 bp, Homo sapien
cacaggcgcctccatgtggcccaag

SEQ ID NO: 3814438 - DNA, 25 bp, Homo sapien
tagtccacaggcgcctccatgtggc

SEQ ID NO: 3814439 - DNA, 25 bp, Homo sapien
ggatcttctttcgggtcagccacgt

SEQ ID NO: 3814440 - DNA, 25 bp, Homo sapien
gatcttctttcgggtcagccacgtg

SEQ ID NO: 3814441 - DNA, 25 bp, Homo sapien
ggcctggagggtggctgtggcctag

SEQ ID NO: 3814442 - DNA, 25 bp, Homo sapien
gagggtggctgtggcctagtggaca

SEQ ID NO: 3814443 - DNA, 25 bp, Homo sapien
ggtggctgtggcctagtggacagga

SEQ ID NO: 3814444 - DNA, 25 bp, Homo sapien
tggagggtggctgtggcctagtgga

SEQ ID NO: 3814445 - DNA, 25 bp, Homo sapien
ccagggcgcgtgcagtgaagaggac

SEQ ID NO: 3814446 - DNA, 25 bp, Homo sapien
aggacagtgccttctcggtctccgg

SEQ ID NO: 3814447 - DNA, 25 bp, Homo sapien
ggcactggtccagggcgcgtgcagt

SEQ ID NO: 3814448 - DNA, 25 bp, Homo sapien
cagtgaagaggacagtgccttctcg

SEQ ID NO: 3814449 - DNA, 25 bp, Homo sapien
ggagcctggtagctccaggtcgccc

SEQ ID NO: 3814450 - DNA, 25 bp, Homo sapien
cctgatgactgaggagcctggtagc

SEQ ID NO: 3814451 - DNA, 25 bp, Homo sapien
cctggtagctccaggtcgcccacac

SEQ ID NO: 3814452 - DNA, 25 bp, Homo sapien
gagcctggtagctccaggtcgccca

SEQ ID NO: 3814453 - DNA, 25 bp, Homo sapien
ttgcaccagaaggtggcgggatcca

SEQ ID NO: 3814454 - DNA, 25 bp, Homo sapien
tctcttgcaccagaaggtggcggga

SEQ ID NO: 3814455 - DNA, 25 bp, Homo sapien
aggtctcttgcaccagaaggtggcg

SEQ ID NO: 3814456 - DNA, 25 bp, Homo sapien
tcttgcaccagaaggtggcgggatc

SEQ ID NO: 3814457 - DNA, 25 bp, Homo sapien
ctcatggatgatcgtgtgcgcctca

SEQ ID NO: 3814458 - DNA, 25 bp, Homo sapien
gatcgtgtgcgcctcatcactcgct

SEQ ID NO: 3814459 - DNA, 25 bp, Homo sapien
catggatgatcgtgtgcgcctcatc

SEQ ID NO: 3814460 - DNA, 25 bp, Homo sapien
tcgtgtgcgcctcatcactcgctat

SEQ ID NO: 3814461 - DNA, 25 bp, Homo sapien
ttccctgccatccaggctgtgtacc

SEQ ID NO: 3814462 - DNA, 25 bp, Homo sapien
ttgggccaggctgagctaggttccc

SEQ ID NO: 3814463 - DNA, 25 bp, Homo sapien
gccaggctgagctaggttccctgac

SEQ ID NO: 3814464 - DNA, 25 bp, Homo sapien
atccaggctgtgtacccccctgtgg

SEQ ID NO: 3814465 - DNA, 25 bp, Homo sapien
agtgcccgtctctgatatgctccac

SEQ ID NO: 3814466 - DNA, 25 bp, Homo sapien
tgcaactgacaggaattcagaggac

SEQ ID NO: 3814467 - DNA, 25 bp, Homo sapien
gtgtttgggctgcaactgacaggaa

SEQ ID NO: 3814468 - DNA, 25 bp, Homo sapien
cccacgagcccttgttacactcctg

SEQ ID NO: 3814469 - DNA, 25 bp, Homo sapien
ccaggtcgtggtatttctgtgtctc

SEQ ID NO: 3814470 - DNA, 25 bp, Homo sapien
gaaggccaggtcgtggtatttctgt

SEQ ID NO: 3814471 - DNA, 25 bp, Homo sapien
ggccaggtcgtggtatttctgtgtc

SEQ ID NO: 3814472 - DNA, 25 bp, Homo sapien
aaggccaggtcgtggtatttctgtg

SEQ ID NO: 3814473 - DNA, 25 bp, Homo sapien
tgctgaagatcatgaccgccactca

SEQ ID NO: 3814474 - DNA, 25 bp, Homo sapien
ctggtgtgccctgccagggcctggt

SEQ ID NO: 3814475 - DNA, 25 bp, Homo sapien
accgccactcatgggccactggatg

SEQ ID NO: 3814476 - DNA, 25 bp, Homo sapien
cactggatgtggtccttgtcccatt

SEQ ID NO: 3814477 - DNA, 25 bp, Homo sapien
ccatggtgggaggtgagcttttacc

SEQ ID NO: 3814478 - DNA, 25 bp, Homo sapien
ggtggctccagggagccacccaggg

SEQ ID NO: 3814479 - DNA, 25 bp, Homo sapien
cgtcccacctggtggatgctcatga

SEQ ID NO: 3814480 - DNA, 25 bp, Homo sapien
cagggagccacccagggtcaacact

SEQ ID NO: 3814481 - DNA, 25 bp, Homo sapien
ggaacacggccacagagtgaccttc

SEQ ID NO: 3814482 - DNA, 25 bp, Homo sapien
ggggaacacggccacagagtgacct

SEQ ID NO: 3814483 - DNA, 25 bp, Homo sapien
ggccacagagtgaccttccacattc

SEQ ID NO: 3814484 - DNA, 25 bp, Homo sapien
acggccacagagtgaccttccacat

SEQ ID NO: 3814485 - DNA, 25 bp, Homo sapien
ttcctgaagccatttgtaacttact

SEQ ID NO: 3814486 - DNA, 25 bp, Homo sapien
ggcactcttacgtatctcatccact

SEQ ID NO: 3814487 - DNA, 25 bp, Homo sapien
ctgaagccatttgtaacttactcta

SEQ ID NO: 3814488 - DNA, 25 bp, Homo sapien
tcaggcactcttacgtatctcatcc

SEQ ID NO: 3814489 - DNA, 25 bp, Homo sapien
tgtatagttgtcattgtgacaaacc

SEQ ID NO: 3814490 - DNA, 25 bp, Homo sapien
tattgggagtgtatagttgtcattg

SEQ ID NO: 3814491 - DNA, 25 bp, Homo sapien
gggagtgtatagttgtcattgtgac

SEQ ID NO: 3814492 - DNA, 25 bp, Homo sapien
gtgatattgggagtgtatagttgtc

SEQ ID NO: 3814493 - DNA, 25 bp, Homo sapien
gtgcatttcccactgtcagcgtcat

SEQ ID NO: 3814494 - DNA, 25 bp, Homo sapien
tcagtatctaaagtggatggggaga

SEQ ID NO: 3814495 - DNA, 25 bp, Homo sapien
ggctttgccaatcatcatctccagt

SEQ ID NO: 3814496 - DNA, 25 bp, Homo sapien
ggagggctttgccaatcatcatctc

SEQ ID NO: 3814497 - DNA, 25 bp, Homo sapien
tgtctaatgctgtttgcatccacac

SEQ ID NO: 3814498 - DNA, 25 bp, Homo sapien
gtctaatgctgtttgcatccacaca

SEQ ID NO: 3814499 - DNA, 25 bp, Homo sapien
ctaatgctgtttgcatccacacagc

SEQ ID NO: 3814500 - DNA, 25 bp, Homo sapien
tctaatgctgtttgcatccacacag

SEQ ID NO: 3814501 - DNA, 25 bp, Homo sapien
ttagtcaagagaagcatctaatgtg

SEQ ID NO: 3814502 - DNA, 25 bp, Homo sapien
gaggacagctgataagtaagcatac

SEQ ID NO: 3814503 - DNA, 25 bp, Homo sapien
taagtaagcataccaagtagaatgg

SEQ ID NO: 3814504 - DNA, 25 bp, Homo sapien
gagaagcatctaatgtgaggcccct

SEQ ID NO: 3814505 - DNA, 25 bp, Homo sapien
tgggatattagtagtgatgcatgtg

SEQ ID NO: 3814506 - DNA, 25 bp, Homo sapien
cagcaatagcactgaagtgggatat

SEQ ID NO: 3814507 - DNA, 25 bp, Homo sapien
ggagcagcaatagcactgaagtggg

SEQ ID NO: 3814508 - DNA, 25 bp, Homo sapien
ggatattagtagtgatgcatgtgtt

SEQ ID NO: 3814509 - DNA, 25 bp, Homo sapien
atggaatggaaaggattcatcaagg

SEQ ID NO: 3814510 - DNA, 25 bp, Homo sapien
gaatggaaaggattcatcaaggaat

SEQ ID NO: 3814511 - DNA, 25 bp, Homo sapien
tggaatggaaaggattcatcaagga

SEQ ID NO: 3814512 - DNA, 25 bp, Homo sapien
tggaaaggattcatcaaggaatgga

SEQ ID NO: 3814513 - DNA, 25 bp, Homo sapien
atcacagaatgaattgaatggaatc

SEQ ID NO: 3814514 - DNA, 25 bp, Homo sapien
tcatcacagaatgaattgaatggaa

SEQ ID NO: 3814515 - DNA, 25 bp, Homo sapien
gaatcatcacagaatgaattgaatg

SEQ ID NO: 3814516 - DNA, 25 bp, Homo sapien
atggaatcatcacagaatgaattga

SEQ ID NO: 3814517 - DNA, 25 bp, Homo sapien
atcaacatcaaatggaattgaacgg

SEQ ID NO: 3814518 - DNA, 25 bp, Homo sapien
tagaatcgaatggaataatcatcaa

SEQ ID NO: 3814519 - DNA, 25 bp, Homo sapien
gaacggaattatcgaatggaatcaa

SEQ ID NO: 3814520 - DNA, 25 bp, Homo sapien
aattgaacggaattatcgaatggaa

SEQ ID NO: 3814521 - DNA, 25 bp, Homo sapien
gcagctttttgcctgccccggcttt

SEQ ID NO: 3814522 - DNA, 25 bp, Homo sapien
ccactattttgtcctccgccgccgc

SEQ ID NO: 3814523 - DNA, 25 bp, Homo sapien
actattttgtcctccgccgccgcag

SEQ ID NO: 3814524 - DNA, 25 bp, Homo sapien
atctccactattttgtcctccgccg

SEQ ID NO: 3814525 - DNA, 25 bp, Homo sapien
acacacacttgctacagttcgatgg

SEQ ID NO: 3814526 - DNA, 25 bp, Homo sapien
cacacacacttgctacagttcgatg

SEQ ID NO: 3814527 - DNA, 25 bp, Homo sapien
cacacacttgctacagttcgatggg

SEQ ID NO: 3814528 - DNA, 25 bp, Homo sapien
ctgaaatcacatgtttactaaatcc

SEQ ID NO: 3814529 - DNA, 25 bp, Homo sapien
tcacatgtttactaaatcctggatt

SEQ ID NO: 3814530 - DNA, 25 bp, Homo sapien
tgtactgaaatcacatgtttactaa

SEQ ID NO: 3814531 - DNA, 25 bp, Homo sapien
gaaatcacatgtttactaaatcctg

SEQ ID NO: 3814532 - DNA, 25 bp, Homo sapien
tggcaacagatatgcttacagcaga

SEQ ID NO: 3814533 - DNA, 25 bp, Homo sapien
caacagatatgcttacagcagatga

SEQ ID NO: 3814534 - DNA, 25 bp, Homo sapien
cagatatgcttacagcagatgaaaa

SEQ ID NO: 3814535 - DNA, 25 bp, Homo sapien
gatatgcttacagcagatgaaaaca

SEQ ID NO: 3814536 - DNA, 25 bp, Homo sapien
tacttctgctccaactaaaccaaaa

SEQ ID NO: 3814537 - DNA, 25 bp, Homo sapien
atacttctgctccaactaaaccaaa

SEQ ID NO: 3814538 - DNA, 25 bp, Homo sapien
agtcaaaacaaggaatcctctcttc

SEQ ID NO: 3814539 - DNA, 25 bp, Homo sapien
tgtgcataatcctccagatccatgt

SEQ ID NO: 3814540 - DNA, 25 bp, Homo sapien
tcctccagatccatgtaaaccaata

SEQ ID NO: 3814541 - DNA, 25 bp, Homo sapien
taatcctccagatccatgtaaacca

SEQ ID NO: 3814542 - DNA, 25 bp, Homo sapien
gtattgaatccagtgatagccagaa

SEQ ID NO: 3814543 - DNA, 25 bp, Homo sapien
gaagaagactatgctcaagcatgta

SEQ ID NO: 3814544 - DNA, 25 bp, Homo sapien
gatagccagaatgtcatccatactg

SEQ ID NO: 3814545 - DNA, 25 bp, Homo sapien
ccgagaagaagactatgctcaagca

SEQ ID NO: 3814546 - DNA, 25 bp, Homo sapien
ttcttgcaacaccatcatgtaaagg

SEQ ID NO: 3814547 - DNA, 25 bp, Homo sapien
tatccattttcttgcaacaccatca

SEQ ID NO: 3814548 - DNA, 25 bp, Homo sapien
ttgcaacaccatcatgtaaaggaca

SEQ ID NO: 3814549 - DNA, 25 bp, Homo sapien
ttttcttgcaacaccatcatgtaaa

SEQ ID NO: 3814550 - DNA, 25 bp, Homo sapien
tgagtggctgtcatattcatgaata

SEQ ID NO: 3814551 - DNA, 25 bp, Homo sapien
ttgagtggctgtcatattcatgaat

SEQ ID NO: 3814552 - DNA, 25 bp, Homo sapien
tttgagtggctgtcatattcatgaa

SEQ ID NO: 3814553 - DNA, 25 bp, Homo sapien
atttgagtggctgtcatattcatga

SEQ ID NO: 3814554 - DNA, 25 bp, Homo sapien
taaaattgaagaccatgcgttagga

SEQ ID NO: 3814555 - DNA, 25 bp, Homo sapien
gaacattcctaattgtaaaaccagc

SEQ ID NO: 3814556 - DNA, 25 bp, Homo sapien
caagcccagctcgtattagaataat

SEQ ID NO: 3814557 - DNA, 25 bp, Homo sapien
gttcattgatgaatggaacattcct

SEQ ID NO: 3814558 - DNA, 25 bp, Homo sapien
ctaaaggtattctaatgagttgtaa

SEQ ID NO: 3814559 - DNA, 25 bp, Homo sapien
ttttcccccaataatggcactataa

SEQ ID NO: 3814560 - DNA, 25 bp, Homo sapien
cttcagagcctaagattgaccaggt

SEQ ID NO: 3814561 - DNA, 25 bp, Homo sapien
ggcactaaaggtattctaatgagtt

SEQ ID NO: 3814562 - DNA, 25 bp, Homo sapien
gtaccatatcacaaacagtgtaact

SEQ ID NO: 3814563 - DNA, 25 bp, Homo sapien
taccatatcacaaacagtgtaactc

SEQ ID NO: 3814564 - DNA, 25 bp, Homo sapien
tgggagctactcgtatacacactgt

SEQ ID NO: 3814565 - DNA, 25 bp, Homo sapien
ccagagaggtgggagctactcgtat

SEQ ID NO: 3814566 - DNA, 25 bp, Homo sapien
gaggtgggagctactcgtatacaca

SEQ ID NO: 3814567 - DNA, 25 bp, Homo sapien
gagaggtgggagctactcgtataca

SEQ ID NO: 3814568 - DNA, 25 bp, Homo sapien
gaaccacgcgttcacccgccaagtc

SEQ ID NO: 3814569 - DNA, 25 bp, Homo sapien
gcgttcacccgccaagtcggacagg

SEQ ID NO: 3814570 - DNA, 25 bp, Homo sapien
ctccgcgttgtgggggaagcgaaag

SEQ ID NO: 3814571 - DNA, 25 bp, Homo sapien
ggcggcagttcggagccgggaacca

SEQ ID NO: 3814572 - DNA, 25 bp, Homo sapien
ctggggactggagtccaccagagca

SEQ ID NO: 3814573 - DNA, 25 bp, Homo sapien
agtcggcgcctaatgcgcgcagcgc

SEQ ID NO: 3814574 - DNA, 25 bp, Homo sapien
tcggtatacagtcggcgcctaatgc

SEQ ID NO: 3814575 - DNA, 25 bp, Homo sapien
gggtcggtatacagtcggcgcctaa

SEQ ID NO: 3814576 - DNA, 25 bp, Homo sapien
gccaagtttgaagaatcatttgagt

SEQ ID NO: 3814577 - DNA, 25 bp, Homo sapien
ccaagtttgaagaatcatttgagtc

SEQ ID NO: 3814578 - DNA, 25 bp, Homo sapien
tcctccacctgcttgaggagcacca

SEQ ID NO: 3814579 - DNA, 25 bp, Homo sapien
gaagagcagctggatggcagacacc

SEQ ID NO: 3814580 - DNA, 25 bp, Homo sapien
ccacctgcttgaggagcaccaaagc

SEQ ID NO: 3814581 - DNA, 25 bp, Homo sapien
ctccacctgcttgaggagcaccaaa

SEQ ID NO: 3814582 - DNA, 25 bp, Homo sapien
aagagaaaagtctgccacccttcac

SEQ ID NO: 3814583 - DNA, 25 bp, Homo sapien
gtgtggccctctgtattataaaatg

SEQ ID NO: 3814584 - DNA, 25 bp, Homo sapien
gtggccctctgtattataaaatgtt

SEQ ID NO: 3814585 - DNA, 25 bp, Homo sapien
tgtggccctctgtattataaaatgt

SEQ ID NO: 3814586 - DNA, 25 bp, Homo sapien
ggtgtggccctctgtattataaaat

SEQ ID NO: 3814587 - DNA, 25 bp, Homo sapien
tgtgctgccctccaactttcaaagt

SEQ ID NO: 3814588 - DNA, 25 bp, Homo sapien
gctctgagtcatcacttacacagtg

SEQ ID NO: 3814589 - DNA, 25 bp, Homo sapien
tcacttacacagtgttccttagctg

SEQ ID NO: 3814590 - DNA, 25 bp, Homo sapien
tgccccttcagtgggccagtgtttc

SEQ ID NO: 3814591 - DNA, 25 bp, Homo sapien
aatccatacagggatagggtaggag

SEQ ID NO: 3814592 - DNA, 25 bp, Homo sapien
ttccctaggttaatccatacaggga

SEQ ID NO: 3814593 - DNA, 25 bp, Homo sapien
gagtttccctaggttaatccataca

SEQ ID NO: 3814594 - DNA, 25 bp, Homo sapien
taggttaatccatacagggataggg

SEQ ID NO: 3814595 - DNA, 25 bp, Homo sapien
agggcagagactcagcaggaaaagt

SEQ ID NO: 3814596 - DNA, 25 bp, Homo sapien
cagagactcagcaggaaaagtgtct

SEQ ID NO: 3814597 - DNA, 25 bp, Homo sapien
aggagcagagggcagagactcagca

SEQ ID NO: 3814598 - DNA, 25 bp, Homo sapien
cagagggcagagactcagcaggaaa

SEQ ID NO: 3814599 - DNA, 25 bp, Homo sapien
tgggtccaggcaattcaggaagaag

SEQ ID NO: 3814600 - DNA, 25 bp, Homo sapien
tcggttcccaagtactagagatgct

SEQ ID NO: 3814601 - DNA, 25 bp, Homo sapien
gatgctgctatacgggactcccgaa

SEQ ID NO: 3814602 - DNA, 25 bp, Homo sapien
tctctgtcgtgttctccagaagggc

SEQ ID NO: 3814603 - DNA, 25 bp, Homo sapien
tcattttcccacagacatttcttct

SEQ ID NO: 3814604 - DNA, 25 bp, Homo sapien
agtgccaaccacctaaaacctctca

SEQ ID NO: 3814605 - DNA, 25 bp, Homo sapien
gagaatcttggccttgggccacgca

SEQ ID NO: 3814606 - DNA, 25 bp, Homo sapien
cctccaggacggaggtagagaatct

SEQ ID NO: 3814607 - DNA, 25 bp, Homo sapien
cagtgacggactcaggttctcacca

SEQ ID NO: 3814608 - DNA, 25 bp, Homo sapien
tctgcccttctctggggccacattc

SEQ ID NO: 3814609 - DNA, 25 bp, Homo sapien
cgagattctgaactgggtccccttt

SEQ ID NO: 3814610 - DNA, 25 bp, Homo sapien
tggggccacattctgagctctccat

SEQ ID NO: 3814611 - DNA, 25 bp, Homo sapien
tctctggggccacattctgagctct

SEQ ID NO: 3814612 - DNA, 25 bp, Homo sapien
ctttctattcgattccagtccattc

SEQ ID NO: 3814613 - DNA, 25 bp, Homo sapien
attcaattccattcctttcgattcc

SEQ ID NO: 3814614 - DNA, 25 bp, Homo sapien
cattcaattccattcctttcgattc

SEQ ID NO: 3814615 - DNA, 25 bp, Homo sapien
ccattccactcgattccactctgtt

SEQ ID NO: 3814616 - DNA, 25 bp, Homo sapien
cattctattccattctattgcattc

SEQ ID NO: 3814617 - DNA, 25 bp, Homo sapien
cattccactcgattccactctgttc

SEQ ID NO: 3814618 - DNA, 25 bp, Homo sapien
tccactcgattccactctgttccat

SEQ ID NO: 3814619 - DNA, 25 bp, Homo sapien
catttgattacattccattcgattc

SEQ ID NO: 3814620 - DNA, 25 bp, Homo sapien
tttgattacattccattcgattcca

SEQ ID NO: 3814621 - DNA, 25 bp, Homo sapien
gattacattccattcgattccattc

SEQ ID NO: 3814622 - DNA, 25 bp, Homo sapien
tgattacattccattcgattccatt

SEQ ID NO: 3814623 - DNA, 25 bp, Homo sapien
tccatactatttcattccattcgat

SEQ ID NO: 3814624 - DNA, 25 bp, Homo sapien
cattcgattccattctattcgacta

SEQ ID NO: 3814625 - DNA, 25 bp, Homo sapien
gattccattccatactatttcattc

SEQ ID NO: 3814626 - DNA, 25 bp, Homo sapien
attcgattccattctattcgactaa

SEQ ID NO: 3814627 - DNA, 25 bp, Homo sapien
tttcgagtccattctattttagtcc

SEQ ID NO: 3814628 - DNA, 25 bp, Homo sapien
ttcctttcgagtccattctatttta

SEQ ID NO: 3814629 - DNA, 25 bp, Homo sapien
tcgagtccattctattttagtccat

SEQ ID NO: 3814630 - DNA, 25 bp, Homo sapien
tcctttcgagtccattctattttag

SEQ ID NO: 3814631 - DNA, 25 bp, Homo sapien
tcctgtccttttcattccattccat

SEQ ID NO: 3814632 - DNA, 25 bp, Homo sapien
cctgtccttttcattccattccatt

SEQ ID NO: 3814633 - DNA, 25 bp, Homo sapien
cctttccattccattcctgtccttt

SEQ ID NO: 3814634 - DNA, 25 bp, Homo sapien
ttccattccattcctgtccttttca

SEQ ID NO: 3814635 - DNA, 25 bp, Homo sapien
ccactggtgtttattccattccaat

SEQ ID NO: 3814636 - DNA, 25 bp, Homo sapien
tccactggtgtttattccattccaa

SEQ ID NO: 3814637 - DNA, 25 bp, Homo sapien
cactggtgtttattccattccaatc

SEQ ID NO: 3814638 - DNA, 25 bp, Homo sapien
actggtgtttattccattccaatcc

SEQ ID NO: 3814639 - DNA, 25 bp, Homo sapien
attccatacccgtgcattccattgc

SEQ ID NO: 3814640 - DNA, 25 bp, Homo sapien
ctccattccatacccgtgcattcca

SEQ ID NO: 3814641 - DNA, 25 bp, Homo sapien
tccatacccgtgcattccattgcat

SEQ ID NO: 3814642 - DNA, 25 bp, Homo sapien
gactccattccatacccgtgcattc

SEQ ID NO: 3814643 - DNA, 25 bp, Homo sapien
aataatccatggactcgaatgcaat

SEQ ID NO: 3814644 - DNA, 25 bp, Homo sapien
acatcaaacggaatcaaacggaatt

SEQ ID NO: 3814645 - DNA, 25 bp, Homo sapien
atccatggactcgaatgcaatcatc

SEQ ID NO: 3814646 - DNA, 25 bp, Homo sapien
tcaaacggaatcaaacggaattatc

SEQ ID NO: 3814647 - DNA, 25 bp, Homo sapien
gaatcgaagggaattatctaatgca

SEQ ID NO: 3814648 - DNA, 25 bp, Homo sapien
tggaagctaatggaatcaaaatcgt

SEQ ID NO: 3814649 - DNA, 25 bp, Homo sapien
caaatggaatcgaagggaattatct

SEQ ID NO: 3814650 - DNA, 25 bp, Homo sapien
tggaatcgaagggaattatctaatg

SEQ ID NO: 3814651 - DNA, 25 bp, Homo sapien
gtcatcatctaatggaatcgcatgg

SEQ ID NO: 3814652 - DNA, 25 bp, Homo sapien
aataatccatggactcgaatgcaat

SEQ ID NO: 3814653 - DNA, 25 bp, Homo sapien
aatccatggactcgaatgcaatcat

SEQ ID NO: 3814654 - DNA, 25 bp, Homo sapien
atccatggactcgaatgcaatcatc

SEQ ID NO: 3814655 - DNA, 25 bp, Homo sapien
taatccatggactcgaatgcaatca

SEQ ID NO: 3814656 - DNA, 25 bp, Homo sapien
tcgaatgaaattgattgaaatcatc

SEQ ID NO: 3814657 - DNA, 25 bp, Homo sapien
cgaatggaattatcatgaaattgaa

SEQ ID NO: 3814658 - DNA, 25 bp, Homo sapien
gaatggaaacaccatcgaattgaaa

SEQ ID NO: 3814659 - DNA, 25 bp, Homo sapien
tgaaacgaatggaattatcatgaaa

SEQ ID NO: 3814660 - DNA, 25 bp, Homo sapien
gaatcatcgaatggtctcgaataga

SEQ ID NO: 3814661 - DNA, 25 bp, Homo sapien
tcattattgaatggaattcaatgga

SEQ ID NO: 3814662 - DNA, 25 bp, Homo sapien
catcgaatggtctcgaatagaatca

SEQ ID NO: 3814663 - DNA, 25 bp, Homo sapien
cgaatggtctcgaatagaatcatta

SEQ ID NO: 3814664 - DNA, 25 bp, Homo sapien
taaccatcatcagttggtattgaat

SEQ ID NO: 3814665 - DNA, 25 bp, Homo sapien
aaataaccatcatcagttggtattg

SEQ ID NO: 3814666 - DNA, 25 bp, Homo sapien
aataaccatcatcagttggtattga

SEQ ID NO: 3814667 - DNA, 25 bp, Homo sapien
aaaataaccatcatcagttggtatt

SEQ ID NO: 3814668 - DNA, 25 bp, Homo sapien
tcaaacggaatcaaacggaattatc

SEQ ID NO: 3814669 - DNA, 25 bp, Homo sapien
atcaaacggaatcaaacggaattat

SEQ ID NO: 3814670 - DNA, 25 bp, Homo sapien
acatcaaacggaatcaaacggaatt

SEQ ID NO: 3814671 - DNA, 25 bp, Homo sapien
catcaaacggaatcaaacggaatta

SEQ ID NO: 3814672 - DNA, 25 bp, Homo sapien
atggaatcatcatcaaatggaatca

SEQ ID NO: 3814673 - DNA, 25 bp, Homo sapien
gatggactcatcatcgaatggattc

SEQ ID NO: 3814674 - DNA, 25 bp, Homo sapien
aattgaaatggatggactcatcatc

SEQ ID NO: 3814675 - DNA, 25 bp, Homo sapien
tcgaatgaaattgattgaaatcatc

SEQ ID NO: 3814676 - DNA, 25 bp, Homo sapien
tgaaacgaatggaattatcatgaaa

SEQ ID NO: 3814677 - DNA, 25 bp, Homo sapien
cgaatggacttgaatggaatcattg

SEQ ID NO: 3814678 - DNA, 25 bp, Homo sapien
tcatcgaatggacttgaatggaatc

SEQ ID NO: 3814679 - DNA, 25 bp, Homo sapien
gaatcatcgaatggacttgaatgga

SEQ ID NO: 3814680 - DNA, 25 bp, Homo sapien
catcgaatggacttgaatggaatca

SEQ ID NO: 3814681 - DNA, 25 bp, Homo sapien
tggaatcgtcatcgaatgaattgaa

SEQ ID NO: 3814682 - DNA, 25 bp, Homo sapien
aatagaacccaatggaatcatcaaa

SEQ ID NO: 3814683 - DNA, 25 bp, Homo sapien
ggaataatcattgaacgggatcgaa

SEQ ID NO: 3814684 - DNA, 25 bp, Homo sapien
gaataatcattgaacgggatcgaat

SEQ ID NO: 3814685 - DNA, 25 bp, Homo sapien
tggaataatcattgaacgggatcga

SEQ ID NO: 3814686 - DNA, 25 bp, Homo sapien
aatggaaacatcatcgaatggaaat

SEQ ID NO: 3814687 - DNA, 25 bp, Homo sapien
tggaaacatcatcgaatggaaatga

SEQ ID NO: 3814688 - DNA, 25 bp, Homo sapien
ggaaacgaatggaaacatcatcgaa

SEQ ID NO: 3814689 - DNA, 25 bp, Homo sapien
aacatcatcgaatggaaatgaaagg

SEQ ID NO: 3814690 - DNA, 25 bp, Homo sapien
gactcgaatggaatcattattgaat

SEQ ID NO: 3814691 - DNA, 25 bp, Homo sapien
atggactcgaatggaatcattattg

SEQ ID NO: 3814692 - DNA, 25 bp, Homo sapien
tggaatcattattgaatggaataga

SEQ ID NO: 3814693 - DNA, 25 bp, Homo sapien
aatcattattgaatggaatagaatg

SEQ ID NO: 3814694 - DNA, 25 bp, Homo sapien
aatagtcaatgaactcgaatggaat

SEQ ID NO: 3814695 - DNA, 25 bp, Homo sapien
tggaatagtcaatgaactcgaatgg

SEQ ID NO: 3814696 - DNA, 25 bp, Homo sapien
ggaatagtcaatgaactcgaatgga

SEQ ID NO: 3814697 - DNA, 25 bp, Homo sapien
atggaatagtcaatgaactcgaatg

SEQ ID NO: 3814698 - DNA, 25 bp, Homo sapien
gatggactcatcatcgaatggattc

SEQ ID NO: 3814699 - DNA, 25 bp, Homo sapien
tcgaatgaaattgattgaaatcatc

SEQ ID NO: 3814700 - DNA, 25 bp, Homo sapien
tcgaatggaaacaccatcgaattga

SEQ ID NO: 3814701 - DNA, 25 bp, Homo sapien
tgaaacgaatggaattatcatgaaa

SEQ ID NO: 3814702 - DNA, 25 bp, Homo sapien
tgaaatggatggactcatcatcgaa

SEQ ID NO: 3814703 - DNA, 25 bp, Homo sapien
atcgaatggaaacaccatcgaattg

SEQ ID NO: 3814704 - DNA, 25 bp, Homo sapien
tcgaatgaaattgattgaaatcatc

SEQ ID NO: 3814705 - DNA, 25 bp, Homo sapien
gaatggaaacaccatcgaattgaaa

SEQ ID NO: 3814706 - DNA, 25 bp, Homo sapien
aaaatggaatcaacatcaaacggaa

SEQ ID NO: 3814707 - DNA, 25 bp, Homo sapien
catcaaacggaatcaaactgaatta

SEQ ID NO: 3814708 - DNA, 25 bp, Homo sapien
gaatcaaactgaattattgaatgga

SEQ ID NO: 3814709 - DNA, 25 bp, Homo sapien
ttgaatggaatcgaagataatcatc

SEQ ID NO: 3814710 - DNA, 25 bp, Homo sapien
aaattgaaatggatggactcatcat

SEQ ID NO: 3814711 - DNA, 25 bp, Homo sapien
aattgaaatggatggactcatcatc

SEQ ID NO: 3814712 - DNA, 25 bp, Homo sapien
tggaatagtcaatgaactcgaatgg

SEQ ID NO: 3814713 - DNA, 25 bp, Homo sapien
atggaatagtcaatgaactcgaatg

SEQ ID NO: 3814714 - DNA, 25 bp, Homo sapien
ggaatagtcaatgaactcgaatgga

SEQ ID NO: 3814715 - DNA, 25 bp, Homo sapien
aatagtcaatgaactcgaatggaat

SEQ ID NO: 3814716 - DNA, 25 bp, Homo sapien
gaaacgaatggaattatcatgaaat

SEQ ID NO: 3814717 - DNA, 25 bp, Homo sapien
aacgaatggaattatcatgaaattg

SEQ ID NO: 3814718 - DNA, 25 bp, Homo sapien
cgaatggaattatcatgaaattgaa

SEQ ID NO: 3814719 - DNA, 25 bp, Homo sapien
tgaaacgaatggaattatcatgaaa

SEQ ID NO: 3814720 - DNA, 25 bp, Homo sapien
tggaatttgcaagtggagatttcaa

SEQ ID NO: 3814721 - DNA, 25 bp, Homo sapien
tgtggaatttgcaagtggagatttc

SEQ ID NO: 3814722 - DNA, 25 bp, Homo sapien
ttagacagagcagatttgaaacact

SEQ ID NO: 3814723 - DNA, 25 bp, Homo sapien
tcctttagacagagcagatttgaaa

SEQ ID NO: 3814724 - DNA, 25 bp, Homo sapien
agagcggttttgaaatactctttgc

SEQ ID NO: 3814725 - DNA, 25 bp, Homo sapien
gagcggttttgaaatactctttgca

SEQ ID NO: 3814726 - DNA, 25 bp, Homo sapien
agcggttttgaaatactctttgcag

SEQ ID NO: 3814727 - DNA, 25 bp, Homo sapien
ttgcaagtggagattgaaagcgctt

SEQ ID NO: 3814728 - DNA, 25 bp, Homo sapien
agattgaaagcgctttgaggccaaa

SEQ ID NO: 3814729 - DNA, 25 bp, Homo sapien
gtggagattgaaagcgctttgaggc

SEQ ID NO: 3814730 - DNA, 25 bp, Homo sapien
attgaaagcgctttgaggccaaagg

SEQ ID NO: 3814731 - DNA, 25 bp, Homo sapien
aacttgtttgtgttgtgtgtattca

SEQ ID NO: 3814732 - DNA, 25 bp, Homo sapien
taacttgtttgtgttgtgtgtattc

SEQ ID NO: 3814733 - DNA, 25 bp, Homo sapien
ctcagtaacttgtttgtgttgtgtg

SEQ ID NO: 3814734 - DNA, 25 bp, Homo sapien
attctcagtaacttgtttgtgttgt

SEQ ID NO: 3814735 - DNA, 25 bp, Homo sapien
gttcaacattccttttgatagagcg

SEQ ID NO: 3814736 - DNA, 25 bp, Homo sapien
agagttcaacattccttttgataga

SEQ ID NO: 3814737 - DNA, 25 bp, Homo sapien
caacattccttttgatagagcggtt

SEQ ID NO: 3814738 - DNA, 25 bp, Homo sapien
cagagttcaacattccttttgatag

SEQ ID NO: 3814739 - DNA, 25 bp, Homo sapien
gctgaacgcacacatcacaaagtag

SEQ ID NO: 3814740 - DNA, 25 bp, Homo sapien
ctgaacgcacacatcacaaagtagt

SEQ ID NO: 3814741 - DNA, 25 bp, Homo sapien
agctgaacgcacacatcacaaagta

SEQ ID NO: 3814742 - DNA, 25 bp, Homo sapien
gagctgaacgcacacatcacaaagt

SEQ ID NO: 3814743 - DNA, 25 bp, Homo sapien
ctgagaatgattctgtctagttttt

SEQ ID NO: 3814744 - DNA, 25 bp, Homo sapien
gaatgattctgtctagtttttatac

SEQ ID NO: 3814745 - DNA, 25 bp, Homo sapien
gattctgtctagtttttatacgaag

SEQ ID NO: 3814746 - DNA, 25 bp, Homo sapien
aatgattctgtctagtttttatacg

SEQ ID NO: 3814747 - DNA, 25 bp, Homo sapien
tttctaagattggcctcaaatccct

SEQ ID NO: 3814748 - DNA, 25 bp, Homo sapien
tctaagattggcctcaaatcccttg

SEQ ID NO: 3814749 - DNA, 25 bp, Homo sapien
ccatttctaagattggcctcaaatc

SEQ ID NO: 3814750 - DNA, 25 bp, Homo sapien
catttctaagattggcctcaaatcc

SEQ ID NO: 3814751 - DNA, 25 bp, Homo sapien
tctaaaggaaggttcaaatctctga

SEQ ID NO: 3814752 - DNA, 25 bp, Homo sapien
tgactgggaattcttctgtctagca

SEQ ID NO: 3814753 - DNA, 25 bp, Homo sapien
taaaggaaggttcaaatctctgagt

SEQ ID NO: 3814754 - DNA, 25 bp, Homo sapien
acaacacaaagaagtgactgggaat

SEQ ID NO: 3814755 - DNA, 25 bp, Homo sapien
ctgaatgcaatcatcgaatggtctc

SEQ ID NO: 3814756 - DNA, 25 bp, Homo sapien
tcatcgaatgaactgaatgcaatca

SEQ ID NO: 3814757 - DNA, 25 bp, Homo sapien
gaattgaattgaatcgtcatcgaat

SEQ ID NO: 3814758 - DNA, 25 bp, Homo sapien
ctaatggaatcattgaacagaattg

SEQ ID NO: 3814759 - DNA, 25 bp, Homo sapien
gaatcatcatcagatggaaacgaat

SEQ ID NO: 3814760 - DNA, 25 bp, Homo sapien
tggaatcatcatcagatggaaacga

SEQ ID NO: 3814761 - DNA, 25 bp, Homo sapien
aatggaatcatcatcagatggaaac

SEQ ID NO: 3814762 - DNA, 25 bp, Homo sapien
acggaatcgaatggaatcatcatca

SEQ ID NO: 3814763 - DNA, 25 bp, Homo sapien
tcgaatggaaacaccatcgaattga

SEQ ID NO: 3814764 - DNA, 25 bp, Homo sapien
atcgaatggaaacaccatcgaattg

SEQ ID NO: 3814765 - DNA, 25 bp, Homo sapien
cgaatggaaacaccatcgaattgaa

SEQ ID NO: 3814766 - DNA, 25 bp, Homo sapien
gaatggaaacaccatcgaattgaaa

SEQ ID NO: 3814767 - DNA, 25 bp, Homo sapien
ggaatcgaatggattcattgaatgg

SEQ ID NO: 3814768 - DNA, 25 bp, Homo sapien
ggaatcatcatcagatggaaatgaa

SEQ ID NO: 3814769 - DNA, 25 bp, Homo sapien
atggaatcgaatggattcattgaat

SEQ ID NO: 3814770 - DNA, 25 bp, Homo sapien
tcatcatcagatggaaatgaatgga

SEQ ID NO: 3814771 - DNA, 25 bp, Homo sapien
tggaatagacaatgaatacgaatgg

SEQ ID NO: 3814772 - DNA, 25 bp, Homo sapien
gaatagacaatgaatacgaatggaa

SEQ ID NO: 3814773 - DNA, 25 bp, Homo sapien
atagacaatgaatacgaatggaatc

SEQ ID NO: 3814774 - DNA, 25 bp, Homo sapien
atggaatagacaatgaatacgaatg

SEQ ID NO: 3814775 - DNA, 25 bp, Homo sapien
gtcatcatctaatggaatcgcatgg

SEQ ID NO: 3814776 - DNA, 25 bp, Homo sapien
tggactcgaatcgaatcaacatcaa

SEQ ID NO: 3814777 - DNA, 25 bp, Homo sapien
caacatcaaatggaatcaaacggaa

SEQ ID NO: 3814778 - DNA, 25 bp, Homo sapien
tcaaacggaattatcgaatggaatc

SEQ ID NO: 3814779 - DNA, 25 bp, Homo sapien
ctcgaatcgaatcaacatcaaatgg

SEQ ID NO: 3814780 - DNA, 25 bp, Homo sapien
atcgaatggaaacaccatcgaattg

SEQ ID NO: 3814781 - DNA, 25 bp, Homo sapien
cgaatggaaacaccatcgaattgaa

SEQ ID NO: 3814782 - DNA, 25 bp, Homo sapien
tcgaatggaaacaccatcgaattga

SEQ ID NO: 3814783 - DNA, 25 bp, Homo sapien
gaatggaaacaccatcgaattgaaa

SEQ ID NO: 3814784 - DNA, 25 bp, Homo sapien
ggaatcaaatggaatcattgaatgg

SEQ ID NO: 3814785 - DNA, 25 bp, Homo sapien
gaatcaaatggaatcattgaatgga

SEQ ID NO: 3814786 - DNA, 25 bp, Homo sapien
ggaatcgaatggaatcatcatcaga

SEQ ID NO: 3814787 - DNA, 25 bp, Homo sapien
tggaatcatcatcagatggaaatga

SEQ ID NO: 3814788 - DNA, 25 bp, Homo sapien
aatcgaatggaatcaccgaatagaa

SEQ ID NO: 3814789 - DNA, 25 bp, Homo sapien
cgaatggaattatcgaatgcaatcg

SEQ ID NO: 3814790 - DNA, 25 bp, Homo sapien
caaatggaattatcgaatgcaatcg

SEQ ID NO: 3814791 - DNA, 25 bp, Homo sapien
ggaacaatcatcgaatggactcaaa

SEQ ID NO: 3814792 - DNA, 25 bp, Homo sapien
ggaatggagtcatcgcatagaatcg

SEQ ID NO: 3814793 - DNA, 25 bp, Homo sapien
cgtcatcgaatgaattgaatgcaat

SEQ ID NO: 3814794 - DNA, 25 bp, Homo sapien
atggaattatcattgaatggactcg

SEQ ID NO: 3814795 - DNA, 25 bp, Homo sapien
agaatcgaatggaattatcattgaa

SEQ ID NO: 3814796 - DNA, 25 bp, Homo sapien
aatccatggactcgaatgcaatcat

SEQ ID NO: 3814797 - DNA, 25 bp, Homo sapien
atccatggactcgaatgcaatcatc

SEQ ID NO: 3814798 - DNA, 25 bp, Homo sapien
ataatccatggactcgaatgcaatc

SEQ ID NO: 3814799 - DNA, 25 bp, Homo sapien
taatccatggactcgaatgcaatca

SEQ ID NO: 3814800 - DNA, 25 bp, Homo sapien
gtcatcatctaatggaatcgcatgg

SEQ ID NO: 3814801 - DNA, 25 bp, Homo sapien
aatcatcatcaaatggaatcgaata

SEQ ID NO: 3814802 - DNA, 25 bp, Homo sapien
catcatcaaatggaatcgaatagaa

SEQ ID NO: 3814803 - DNA, 25 bp, Homo sapien
tcatcaaatggaatcgaatagaatt

SEQ ID NO: 3814804 - DNA, 25 bp, Homo sapien
tcaaatggaatcgaatagaattatg

SEQ ID NO: 3814805 - DNA, 25 bp, Homo sapien
gatggactcatcatcgaatggattc

SEQ ID NO: 3814806 - DNA, 25 bp, Homo sapien
tggatggactcatcatcgaatggat

SEQ ID NO: 3814807 - DNA, 25 bp, Homo sapien
tcgaatgaaattgattgaaatcatc

SEQ ID NO: 3814808 - DNA, 25 bp, Homo sapien
cgaatggaattatcatgaaattgaa

SEQ ID NO: 3814809 - DNA, 25 bp, Homo sapien
actagaatggaatcatcgaatgtac

SEQ ID NO: 3814810 - DNA, 25 bp, Homo sapien
agaatggaatcatcgaatgtacccg

SEQ ID NO: 3814811 - DNA, 25 bp, Homo sapien
atggaatcatcgaatgtacccgaaa

SEQ ID NO: 3814812 - DNA, 25 bp, Homo sapien
gaatggactagaatggaatcatcga

SEQ ID NO: 3814813 - DNA, 25 bp, Homo sapien
gcctcggcagcgagggcaataagcc

SEQ ID NO: 3814814 - DNA, 25 bp, Homo sapien
gtcaaaaaccatggcttcggaggca

SEQ ID NO: 3814815 - DNA, 25 bp, Homo sapien
ggcagaaatccacgaggcagggaaa

SEQ ID NO: 3814816 - DNA, 25 bp, Homo sapien
aagccccagtggtgggtcaaagagc

SEQ ID NO: 3814817 - DNA, 25 bp, Homo sapien
aaggaaaagtgcagcggaagacgaa

SEQ ID NO: 3814818 - DNA, 25 bp, Homo sapien
gcagctaagaactcagatgttatct

SEQ ID NO: 3814819 - DNA, 25 bp, Homo sapien
tcagtgcagctaagaactcagatgt

SEQ ID NO: 3814820 - DNA, 25 bp, Homo sapien
gatgtaagtaggcttgactcagtgc

SEQ ID NO: 3814821 - DNA, 25 bp, Homo sapien
cttctcatcagccaaccctggatga

SEQ ID NO: 3814822 - DNA, 25 bp, Homo sapien
cttgtcctaactgaaggcagacccc

SEQ ID NO: 3814823 - DNA, 25 bp, Homo sapien
cttgttaacccgcttctcatcagcc

SEQ ID NO: 3814824 - DNA, 25 bp, Homo sapien
tctcatcagccaaccctggatgagt

SEQ ID NO: 3814825 - DNA, 25 bp, Homo sapien
tcaaatagcgcatttttttcacaga

SEQ ID NO: 3814826 - DNA, 25 bp, Homo sapien
caaatagcgcatttttttcacagac

SEQ ID NO: 3814827 - DNA, 25 bp, Homo sapien
ttttcaaatagcgcatttttttcac

SEQ ID NO: 3814828 - DNA, 25 bp, Homo sapien
ttcaaatagcgcatttttttcacag

SEQ ID NO: 3814829 - DNA, 25 bp, Homo sapien
tgtgatataattgctcattatgtgc

SEQ ID NO: 3814830 - DNA, 25 bp, Homo sapien
gctgaaactatcatgtgtgatataa

SEQ ID NO: 3814831 - DNA, 25 bp, Homo sapien
gagttccagctgttaacggataata

SEQ ID NO: 3814832 - DNA, 25 bp, Homo sapien
cggataatattttagtgctgaaact

SEQ ID NO: 3814833 - DNA, 25 bp, Homo sapien
ccccgagggagatgtccagtctggt

SEQ ID NO: 3814834 - DNA, 25 bp, Homo sapien
ggccccgagggagatgtccagtctg

SEQ ID NO: 3814835 - DNA, 25 bp, Homo sapien
ggagatgtccagtctggtgctggag

SEQ ID NO: 3814836 - DNA, 25 bp, Homo sapien
actggggccccgagggagatgtcca

SEQ ID NO: 3814837 - DNA, 25 bp, Homo sapien
tatctccactgtccgtatctcctgc

SEQ ID NO: 3814838 - DNA, 25 bp, Homo sapien
ttatctccactgtccgtatctcctg

SEQ ID NO: 3814839 - DNA, 25 bp, Homo sapien
tccctccgcgatagccgcgtcaccc

SEQ ID NO: 3814840 - DNA, 25 bp, Homo sapien
gcctccctccgcgatagccgcgtca

SEQ ID NO: 3814841 - DNA, 25 bp, Homo sapien
tgcctgcagggctgcagcgcccggc

SEQ ID NO: 3814842 - DNA, 25 bp, Homo sapien
cctgtgcctccctccgcgatagccg

SEQ ID NO: 3814843 - DNA, 25 bp, Homo sapien
gtaaaaagccgcatgggcaagaagc

SEQ ID NO: 3814844 - DNA, 25 bp, Homo sapien
aaaaagccgcggcatcgggtgccaa

SEQ ID NO: 3814845 - DNA, 25 bp, Homo sapien
gcatcgggtgccaaaagccgcaaaa

SEQ ID NO: 3814846 - DNA, 25 bp, Homo sapien
agcggtaaaaacctgccgcagcggc

SEQ ID NO: 3814847 - DNA, 25 bp, Homo sapien
aagcagcaaaaagcccaggcgtagg

SEQ ID NO: 3814848 - DNA, 25 bp, Homo sapien
cgacggcgggggcatgaaaccgcaa

SEQ ID NO: 3814849 - DNA, 25 bp, Homo sapien
aatcaacgggggcaggtgcaaaaag

SEQ ID NO: 3814850 - DNA, 25 bp, Homo sapien
gccgcaacggcgggggcaaaaatca

SEQ ID NO: 3814851 - DNA, 25 bp, Homo sapien
gcgaaaagctgtaaaatgccgcggt

SEQ ID NO: 3814852 - DNA, 25 bp, Homo sapien
aaagccacataaagccggggcggcg

SEQ ID NO: 3814853 - DNA, 25 bp, Homo sapien
gcggggcaagaagccgcagcgggag

SEQ ID NO: 3814854 - DNA, 25 bp, Homo sapien
aaagctgtaaaatgccgcggtggcg

SEQ ID NO: 3814855 - DNA, 25 bp, Homo sapien
aagccgtaaaaagctgcggtgctgg

SEQ ID NO: 3814856 - DNA, 25 bp, Homo sapien
agccgcaaaaaccgcggcagcgagg

SEQ ID NO: 3814857 - DNA, 25 bp, Homo sapien
agccgtaaaaagctgcggtgctggg

SEQ ID NO: 3814858 - DNA, 25 bp, Homo sapien
aaagccgtaaaaagctgcggtgctg

SEQ ID NO: 3814859 - DNA, 25 bp, Homo sapien
tctttctttgttcctgggcagcggt

SEQ ID NO: 3814860 - DNA, 25 bp, Homo sapien
gagcgcggaaggacagaattctttc

SEQ ID NO: 3814861 - DNA, 25 bp, Homo sapien
attgatctgagagcgcggaaggaca

SEQ ID NO: 3814862 - DNA, 25 bp, Homo sapien
ttggaaattgatctgagagcgcgga

SEQ ID NO: 3814863 - DNA, 25 bp, Homo sapien
atcatggaattgaatcgaatggaat

SEQ ID NO: 3814864 - DNA, 25 bp, Homo sapien
ggaatcatggaattgaatcgaatgg

SEQ ID NO: 3814865 - DNA, 25 bp, Homo sapien
aatcatggaattgaatcgaatggaa

SEQ ID NO: 3814866 - DNA, 25 bp, Homo sapien
gaatcatggaattgaatcgaatgga

SEQ ID NO: 3814867 - DNA, 25 bp, Homo sapien
tcgaatggaatcgaatggaatcatg

SEQ ID NO: 3814868 - DNA, 25 bp, Homo sapien
atcgaatggaatcgaatggaatcat

SEQ ID NO: 3814869 - DNA, 25 bp, Homo sapien
catcgaatggaatcgaatggaatca

SEQ ID NO: 3814870 - DNA, 25 bp, Homo sapien
gcagcggctttttgtcccaaggcca

SEQ ID NO: 3814871 - DNA, 25 bp, Homo sapien
tatttacccgccggagctttttgca

SEQ ID NO: 3814872 - DNA, 25 bp, Homo sapien
ggcattttgccacccgccaccgtgg

SEQ ID NO: 3814873 - DNA, 25 bp, Homo sapien
ttttgccggtcgcggcttgttgccc

SEQ ID NO: 3814874 - DNA, 25 bp, Homo sapien
gcatgccttggcctgagaaagcatt

SEQ ID NO: 3814875 - DNA, 25 bp, Homo sapien
ggcctgagaaagcattatatggtgg

SEQ ID NO: 3814876 - DNA, 25 bp, Homo sapien
caatatttgtaacattctcatcgcc

SEQ ID NO: 3814877 - DNA, 25 bp, Homo sapien
cgccatctggtggtggttcgaggta

SEQ ID NO: 3814878 - DNA, 25 bp, Homo sapien
gcagaaactaatcgagtccctatat

SEQ ID NO: 3814879 - DNA, 25 bp, Homo sapien
taatcgagtccctatattagggata

SEQ ID NO: 3814880 - DNA, 25 bp, Homo sapien
aactaatcgagtccctatattaggg

SEQ ID NO: 3814881 - DNA, 25 bp, Homo sapien
tagcagaaactaatcgagtccctat

SEQ ID NO: 3814882 - DNA, 25 bp, Homo sapien
tatacggccaatactttcattacag

SEQ ID NO: 3814883 - DNA, 25 bp, Homo sapien
tcatatacggccaatactttcatta

SEQ ID NO: 3814884 - DNA, 25 bp, Homo sapien
catatacggccaatactttcattac

SEQ ID NO: 3814885 - DNA, 25 bp, Homo sapien
tacggccaatactttcattacagcc

SEQ ID NO: 3814886 - DNA, 25 bp, Homo sapien
gaatcttcgtgagaccaggcatgag

SEQ ID NO: 3814887 - DNA, 25 bp, Homo sapien
ccaagggcataataaggaaggactc

SEQ ID NO: 3814888 - DNA, 25 bp, Homo sapien
taacaccggagtgatgaggtgccct

SEQ ID NO: 3814889 - DNA, 25 bp, Homo sapien
gggcaagtcaagctccatcctgaag

SEQ ID NO: 3814890 - DNA, 25 bp, Homo sapien
ttttcatatgcatagtcatagtgcc

SEQ ID NO: 3814891 - DNA, 25 bp, Homo sapien
catatgcatagtcatagtgccccat

SEQ ID NO: 3814892 - DNA, 25 bp, Homo sapien
tggtttaactcaagaggttccatgc

SEQ ID NO: 3814893 - DNA, 25 bp, Homo sapien
cactataagaggtggtaactgccaa

SEQ ID NO: 3814894 - DNA, 25 bp, Homo sapien
tccgggaccatgtagttctgacgtc

SEQ ID NO: 3814895 - DNA, 25 bp, Homo sapien
cactggccgaggtgaagtccgggac

SEQ ID NO: 3814896 - DNA, 25 bp, Homo sapien
gcaagctgggccctagtttggcaac

SEQ ID NO: 3814897 - DNA, 25 bp, Homo sapien
tctctctccttcactggccgaggtg

SEQ ID NO: 3814898 - DNA, 25 bp, Homo sapien
ggcagggttcaacactctgcctctg

SEQ ID NO: 3814899 - DNA, 25 bp, Homo sapien
gccacctgcttaggcagccagaagg

SEQ ID NO: 3814900 - DNA, 25 bp, Homo sapien
agccagaaggggttgtccagccagc

SEQ ID NO: 3814901 - DNA, 25 bp, Homo sapien
agaaggggttgtccagccagcacct

SEQ ID NO: 3814902 - DNA, 25 bp, Homo sapien
ctgctccaggggactccagtcccca

SEQ ID NO: 3814903 - DNA, 25 bp, Homo sapien
actgctccaggggactccagtcccc

SEQ ID NO: 3814904 - DNA, 25 bp, Homo sapien
cgccggagtctcacaaacaaagtct

SEQ ID NO: 3814905 - DNA, 25 bp, Homo sapien
gagtctcacaaacaaagtctcctgg

SEQ ID NO: 3814906 - DNA, 25 bp, Homo sapien
gtctcctggcccgagcccctcacgc

SEQ ID NO: 3814907 - DNA, 25 bp, Homo sapien
tggcccgagcccctcacgcactcac

SEQ ID NO: 3814908 - DNA, 25 bp, Homo sapien
gccgacgccggcggcgattcgggct

SEQ ID NO: 3814909 - DNA, 25 bp, Homo sapien
ctgcgccgacgccggcggcgattcg

SEQ ID NO: 3814910 - DNA, 25 bp, Homo sapien
tgcgccgacgccggcggcgattcgg

SEQ ID NO: 3814911 - DNA, 25 bp, Homo sapien
acgccggcggcgattcgggctccag

SEQ ID NO: 3814912 - DNA, 25 bp, Homo sapien
cttcagctccttgcgggggcccttg

SEQ ID NO: 3814913 - DNA, 25 bp, Homo sapien
ccttgggtcggctcgggcgccggcg

SEQ ID NO: 3814914 - DNA, 25 bp, Homo sapien
gcgccggcggcggcgactgctccat

SEQ ID NO: 3814915 - DNA, 25 bp, Homo sapien
cagctccttgcgggggcccttgggt

SEQ ID NO: 3814916 - DNA, 25 bp, Homo sapien
cagctccaaatggagctctacttat

SEQ ID NO: 3814917 - DNA, 25 bp, Homo sapien
gctccaaatggagctctacttatgg

SEQ ID NO: 3814918 - DNA, 25 bp, Homo sapien
ccaaatggagctctacttatgggca

SEQ ID NO: 3814919 - DNA, 25 bp, Homo sapien
tccaaatggagctctacttatgggc

SEQ ID NO: 3814920 - DNA, 25 bp, Homo sapien
gtacagctatacctttgtcaacctt

SEQ ID NO: 3814921 - DNA, 25 bp, Homo sapien
tggaacaccagtggcaccattaact

SEQ ID NO: 3814922 - DNA, 25 bp, Homo sapien
caccagtggcaccattaactgcttt

SEQ ID NO: 3814923 - DNA, 25 bp, Homo sapien
aattggaacaccagtggcaccatta

SEQ ID NO: 3814924 - DNA, 25 bp, Homo sapien
gattcaagcatatgaaggagttcta

SEQ ID NO: 3814925 - DNA, 25 bp, Homo sapien
cgactagggcatggcttgaagaaga

SEQ ID NO: 3814926 - DNA, 25 bp, Homo sapien
atgccaatgattttaccagcacgac

SEQ ID NO: 3814927 - DNA, 25 bp, Homo sapien
tcaagcatatgaaggagttctaaat

SEQ ID NO: 3814928 - DNA, 25 bp, Homo sapien
gaagtcaaaggttcttgaccttcta

SEQ ID NO: 3814929 - DNA, 25 bp, Homo sapien
ggagcagatgccatcatggaagtca

SEQ ID NO: 3814930 - DNA, 25 bp, Homo sapien
tttgaggaggagcagatgccatcat

SEQ ID NO: 3814931 - DNA, 25 bp, Homo sapien
atggaagtcaaaggttcttgacctt

SEQ ID NO: 3814932 - DNA, 25 bp, Homo sapien
aggcctcgggatcctgttccttctt

SEQ ID NO: 3814933 - DNA, 25 bp, Homo sapien
caggcctcgggatcctgttccttct

SEQ ID NO: 3814934 - DNA, 25 bp, Homo sapien
ggcctcgggatcctgttccttcttg

SEQ ID NO: 3814935 - DNA, 25 bp, Homo sapien
tcgctctcggctgcctcacgggtaa

SEQ ID NO: 3814936 - DNA, 25 bp, Homo sapien
tgggcgggtgggtcgctctcggctg

SEQ ID NO: 3814937 - DNA, 25 bp, Homo sapien
gtgggtcgctctcggctgcctcacg

SEQ ID NO: 3814938 - DNA, 25 bp, Homo sapien
gcgagtgggcgggtgggtcgctctc

SEQ ID NO: 3814939 - DNA, 25 bp, Homo sapien
atacaagaagaaaaggaaaatgtct

SEQ ID NO: 3814940 - DNA, 25 bp, Homo sapien
cttatacaagaagaaaaggaaaatg

SEQ ID NO: 3814941 - DNA, 25 bp, Homo sapien
tatacaagaagaaaaggaaaatgtc

SEQ ID NO: 3814942 - DNA, 25 bp, Homo sapien
cacagaagacactactctgtccatc

SEQ ID NO: 3814943 - DNA, 25 bp, Homo sapien
ctggagataggagaggagggtgtag

SEQ ID NO: 3814944 - DNA, 25 bp, Homo sapien
gataggagaggagggtgtagtagcc

SEQ ID NO: 3814945 - DNA, 25 bp, Homo sapien
taggagaggagggtgtagtagccat

SEQ ID NO: 3814946 - DNA, 25 bp, Homo sapien
gagataggagaggagggtgtagtag

SEQ ID NO: 3814947 - DNA, 25 bp, Homo sapien
tattcaataaaatcaaagcaatctt

SEQ ID NO: 3814948 - DNA, 25 bp, Homo sapien
atacaaaatgaccaagacagaaaaa

SEQ ID NO: 3814949 - DNA, 25 bp, Homo sapien
taaattatagtttccttgcagatga

SEQ ID NO: 3814950 - DNA, 25 bp, Homo sapien
ggcccaatttcttcgatcttactga

SEQ ID NO: 3814951 - DNA, 25 bp, Homo sapien
tgaatggctaggtcaacaggtgcat

SEQ ID NO: 3814952 - DNA, 25 bp, Homo sapien
ttttccacacattgtgttaattttg

SEQ ID NO: 3814953 - DNA, 25 bp, Homo sapien
atggctaggtcaacaggtgcatgcc

SEQ ID NO: 3814954 - DNA, 25 bp, Homo sapien
tttccacacattgtgttaattttgt

SEQ ID NO: 3814955 - DNA, 25 bp, Homo sapien
caagcattgtgtttgctacatttac

SEQ ID NO: 3814956 - DNA, 25 bp, Homo sapien
tgaagcctccccagtatttacttaa

SEQ ID NO: 3814957 - DNA, 25 bp, Homo sapien
taatggtgcctctattacagcaagc

SEQ ID NO: 3814958 - DNA, 25 bp, Homo sapien
actccagcagaaatatttatggcca

SEQ ID NO: 3814959 - DNA, 25 bp, Homo sapien
tatcaagacgataaaaaacctctgt

SEQ ID NO: 3814960 - DNA, 25 bp, Homo sapien
cagtctgcatgagtttacaggcaga

SEQ ID NO: 3814961 - DNA, 25 bp, Homo sapien
cattcaggacttagaaatgtgagat

SEQ ID NO: 3814962 - DNA, 25 bp, Homo sapien
caaattgtatgcctgtatgaaaata

SEQ ID NO: 3814963 - DNA, 25 bp, Homo sapien
ccactatgagttatcttacgttcat

SEQ ID NO: 3814964 - DNA, 25 bp, Homo sapien
atgagttatcttacgttcattcagg

SEQ ID NO: 3814965 - DNA, 25 bp, Homo sapien
gttatcttacgttcattcaggtttg

SEQ ID NO: 3814966 - DNA, 25 bp, Homo sapien
ttacgttcattcaggtttgaggatt

SEQ ID NO: 3814967 - DNA, 25 bp, Homo sapien
tcttatgtacattaaggtctaaaga

SEQ ID NO: 3814968 - DNA, 25 bp, Homo sapien
ttatgtacattaaggtctaaagact

SEQ ID NO: 3814969 - DNA, 25 bp, Homo sapien
ttatcttatgtacattaaggtctaa

SEQ ID NO: 3814970 - DNA, 25 bp, Homo sapien
tatgtacattaaggtctaaagactt

SEQ ID NO: 3814971 - DNA, 25 bp, Homo sapien
gcttaaaagctttgacgtattcttg

SEQ ID NO: 3814972 - DNA, 25 bp, Homo sapien
cgcttaaaagctttgacgtattctt

SEQ ID NO: 3814973 - DNA, 25 bp, Homo sapien
tttgtatagtaaggcccaaagactg

SEQ ID NO: 3814974 - DNA, 25 bp, Homo sapien
tcttttgtatagtaaggcccaaaga

SEQ ID NO: 3814975 - DNA, 25 bp, Homo sapien
ttctcttttgtatagtaaggcccaa

SEQ ID NO: 3814976 - DNA, 25 bp, Homo sapien
taaggaccagtaaaaggctttatca

SEQ ID NO: 3814977 - DNA, 25 bp, Homo sapien
tgtgtatagtaaggtttgaagacca

SEQ ID NO: 3814978 - DNA, 25 bp, Homo sapien
cttgtgtatagtaaggtttgaagac

SEQ ID NO: 3814979 - DNA, 25 bp, Homo sapien
ttgaagaccacttaaaagctttgcc

SEQ ID NO: 3814980 - DNA, 25 bp, Homo sapien
tctcttgtgtatagtaaggtttgaa

SEQ ID NO: 3814981 - DNA, 25 bp, Homo sapien
agagtaaggcctgaaggttgcttaa

SEQ ID NO: 3814982 - DNA, 25 bp, Homo sapien
cattcttcgaatttgtaagggttct

SEQ ID NO: 3814983 - DNA, 25 bp, Homo sapien
cacattcttcgaatttgtaagggtt

SEQ ID NO: 3814984 - DNA, 25 bp, Homo sapien
cttatgtagagtaaggcctgaaggt

SEQ ID NO: 3814985 - DNA, 25 bp, Homo sapien
cttcgcatttgtaggatttctctcc

SEQ ID NO: 3814986 - DNA, 25 bp, Homo sapien
ttcgcatttgtaggatttctctcca

SEQ ID NO: 3814987 - DNA, 25 bp, Homo sapien
atttctctccagtatgagttctcat

SEQ ID NO: 3814988 - DNA, 25 bp, Homo sapien
aggatttctctccagtatgagttct

SEQ ID NO: 3814989 - DNA, 25 bp, Homo sapien
ctctgatgtatagtaaggtctgaaa

SEQ ID NO: 3814990 - DNA, 25 bp, Homo sapien
aaaattttgccacaatctttatatt

SEQ ID NO: 3814991 - DNA, 25 bp, Homo sapien
gatgtatagtaaggtctgaaaacca

SEQ ID NO: 3814992 - DNA, 25 bp, Homo sapien
tgaactatgttatgttgagtaaggc

SEQ ID NO: 3814993 - DNA, 25 bp, Homo sapien
ttcaaagctttgccacagtcttcac

SEQ ID NO: 3814994 - DNA, 25 bp, Homo sapien
tgttatgttgagtaacggttgagga

SEQ ID NO: 3814995 - DNA, 25 bp, Homo sapien
tgagtaacggttgaggaataggaaa

SEQ ID NO: 3814996 - DNA, 25 bp, Homo sapien
ttgagtaacggttgaggaataggaa

SEQ ID NO: 3814997 - DNA, 25 bp, Homo sapien
atgttgagtaacggttgaggaatag

SEQ ID NO: 3814998 - DNA, 25 bp, Homo sapien
atgtcttctcctaagtctatttgaa

SEQ ID NO: 3814999 - DNA, 25 bp, Homo sapien
gatgggctctctatatgctgaccag

SEQ ID NO: 3815000 - DNA, 25 bp, Homo sapien
ctattgaaaatcagccaagaaggct

SEQ ID NO: 3815001 - DNA, 25 bp, Homo sapien
taaggcaggttctactctgtcccgc

SEQ ID NO: 3815002 - DNA, 25 bp, Homo sapien
gatgtgagtcatcgtaagtggtcaa

SEQ ID NO: 3815003 - DNA, 25 bp, Homo sapien
gcagctatatgtatatccccaaaag

SEQ ID NO: 3815004 - DNA, 25 bp, Homo sapien
tgtcagggactagatatgggagaaa

SEQ ID NO: 3815005 - DNA, 25 bp, Homo sapien
tagagtcgttagagagcatgggaca

SEQ ID NO: 3815006 - DNA, 25 bp, Homo sapien
gtaacccagttcaaaataggcacaa

SEQ ID NO: 3815007 - DNA, 25 bp, Homo sapien
ctggatgcttcatactccatggctt

SEQ ID NO: 3815008 - DNA, 25 bp, Homo sapien
gatgcttcatactccatggcttttt

SEQ ID NO: 3815009 - DNA, 25 bp, Homo sapien
tggctttttcctttgctccagacag

SEQ ID NO: 3815010 - DNA, 25 bp, Homo sapien
ggctttttcctttgctccagacagg

SEQ ID NO: 3815011 - DNA, 25 bp, Homo sapien
ctcctccggacagaattctatgtgg

SEQ ID NO: 3815012 - DNA, 25 bp, Homo sapien
tcctccggacagaattctatgtggc

SEQ ID NO: 3815013 - DNA, 25 bp, Homo sapien
gactgatgaccctatgttgatccag

SEQ ID NO: 3815014 - DNA, 25 bp, Homo sapien
agaattagacactcctgccagcctg

SEQ ID NO: 3815015 - DNA, 25 bp, Homo sapien
gagaggattcctagtgaccatggac

SEQ ID NO: 3815016 - DNA, 25 bp, Homo sapien
tctgggtaccaaccacggagaatct

SEQ ID NO: 3815017 - DNA, 25 bp, Homo sapien
tcttctgggcctaacagtctccaat

SEQ ID NO: 3815018 - DNA, 25 bp, Homo sapien
tctgggcctaacagtctccaattca

SEQ ID NO: 3815019 - DNA, 25 bp, Homo sapien
ggcctaacagtctccaattcagttt

SEQ ID NO: 3815020 - DNA, 25 bp, Homo sapien
gcacacgtcaccctaattgttcttc

SEQ ID NO: 3815021 - DNA, 25 bp, Homo sapien
tctgcttccaggaaatcctggcgtc

SEQ ID NO: 3815022 - DNA, 25 bp, Homo sapien
aactgaagactagatctgcagcccc

SEQ ID NO: 3815023 - DNA, 25 bp, Homo sapien
gcgtcttagctacgggtctgccagt

SEQ ID NO: 3815024 - DNA, 25 bp, Homo sapien
tgtaggagcagagtacgggggagca

SEQ ID NO: 3815025 - DNA, 25 bp, Homo sapien
tctattctgctcattgaagtactca

SEQ ID NO: 3815026 - DNA, 25 bp, Homo sapien
gtactcagtgaccaccctctggaga

SEQ ID NO: 3815027 - DNA, 25 bp, Homo sapien
ggccctgaatgtgcctggagtgcat

SEQ ID NO: 3815028 - DNA, 25 bp, Homo sapien
ctctggagagcctcttcactgtggc

SEQ ID NO: 3815029 - DNA, 25 bp, Homo sapien
cagaggcagtggtacacacccatgg

SEQ ID NO: 3815030 - DNA, 25 bp, Homo sapien
tatgaattaacatggatcctcctct

SEQ ID NO: 3815031 - DNA, 25 bp, Homo sapien
ctacgaagtgcaatcttagttgtcc

SEQ ID NO: 3815032 - DNA, 25 bp, Homo sapien
tctgtacgtgggcaggagtcttcac

SEQ ID NO: 3815033 - DNA, 25 bp, Homo sapien
gaagataaactggtgaatacaggcc

SEQ ID NO: 3815034 - DNA, 25 bp, Homo sapien
tacaggccgttgttgtgtgccaagg

SEQ ID NO: 3815035 - DNA, 25 bp, Homo sapien
caaggtgcgaagatcgaagtagaat

SEQ ID NO: 3815036 - DNA, 25 bp, Homo sapien
tgctataaacactgttagtaatgct

SEQ ID NO: 3815037 - DNA, 25 bp, Homo sapien
tgtcgatatcagcataacttacaag

SEQ ID NO: 3815038 - DNA, 25 bp, Homo sapien
tggctcccaagacaatcctcttcca

SEQ ID NO: 3815039 - DNA, 25 bp, Homo sapien
cagccatatcactccaaaccttgga

SEQ ID NO: 3815040 - DNA, 25 bp, Homo sapien
tcttaaagagcttgcagtagtcctc

SEQ ID NO: 3815041 - DNA, 25 bp, Homo sapien
cctcatggctttaaacagagtacga

SEQ ID NO: 3815042 - DNA, 25 bp, Homo sapien
gtacgaacaaatctgaagatcaatt

SEQ ID NO: 3815043 - DNA, 25 bp, Homo sapien
gaagatcaatttgtgttcaggatca

SEQ ID NO: 3815044 - DNA, 25 bp, Homo sapien
catggctttaaacagagtacgaaca

SEQ ID NO: 3815045 - DNA, 25 bp, Homo sapien
gaaaggatgcaatgtaagtatccat

SEQ ID NO: 3815046 - DNA, 25 bp, Homo sapien
aaggatgcaatgtaagtatccattg

SEQ ID NO: 3815047 - DNA, 25 bp, Homo sapien
gatgcaatgtaagtatccattgaag

SEQ ID NO: 3815048 - DNA, 25 bp, Homo sapien
gcaatgtaagtatccattgaagaaa

SEQ ID NO: 3815049 - DNA, 25 bp, Homo sapien
atcaaatatgcccaaagatctatgt

SEQ ID NO: 3815050 - DNA, 25 bp, Homo sapien
atatgcccaaagatctatgtgcatc

SEQ ID NO: 3815051 - DNA, 25 bp, Homo sapien
tgttcatcaaatatgcccaaagatc

SEQ ID NO: 3815052 - DNA, 25 bp, Homo sapien
caaatatgcccaaagatctatgtgc

SEQ ID NO: 3815053 - DNA, 25 bp, Homo sapien
tgatatgataatatagtgccaaggt

SEQ ID NO: 3815054 - DNA, 25 bp, Homo sapien
ctttgcttgatatgataatatagtg

SEQ ID NO: 3815055 - DNA, 25 bp, Homo sapien
tatgataatatagtgccaaggtcac

SEQ ID NO: 3815056 - DNA, 25 bp, Homo sapien
gcttgatatgataatatagtgccaa

SEQ ID NO: 3815057 - DNA, 25 bp, Homo sapien
tgtgtatcacaaaacaagaggttct

SEQ ID NO: 3815058 - DNA, 25 bp, Homo sapien
gaggttctcttacataagttatgtg

SEQ ID NO: 3815059 - DNA, 25 bp, Homo sapien
tctcttacataagttatgtgcttcc

SEQ ID NO: 3815060 - DNA, 25 bp, Homo sapien
gtatcacaaaacaagaggttctctt

SEQ ID NO: 3815061 - DNA, 25 bp, Homo sapien
tattttcctaaagggcttctcagtg

SEQ ID NO: 3815062 - DNA, 25 bp, Homo sapien
attttcctaaagggcttctcagtgc

SEQ ID NO: 3815063 - DNA, 25 bp, Homo sapien
tcctattttcctaaagggcttctca

SEQ ID NO: 3815064 - DNA, 25 bp, Homo sapien
cctattttcctaaagggcttctcag

SEQ ID NO: 3815065 - DNA, 25 bp, Homo sapien
catgaactgtattgttgagtaaaat

SEQ ID NO: 3815066 - DNA, 25 bp, Homo sapien
gattttagtgtcattgtaagatgag

SEQ ID NO: 3815067 - DNA, 25 bp, Homo sapien
ttttagtgtcattgtaagatgaggc

SEQ ID NO: 3815068 - DNA, 25 bp, Homo sapien
gttgagtaaaatgctcagtagatac

SEQ ID NO: 3815069 - DNA, 25 bp, Homo sapien
ctgaaggggaagggaagtataagat

SEQ ID NO: 3815070 - DNA, 25 bp, Homo sapien
tgaaggggaagggaagtataagata

SEQ ID NO: 3815071 - DNA, 25 bp, Homo sapien
caaccactgacttcttccgctgtac

SEQ ID NO: 3815072 - DNA, 25 bp, Homo sapien
ccaaccactgacttcttccgctgta

SEQ ID NO: 3815073 - DNA, 25 bp, Homo sapien
ctgttggacaccgatgcccaaccac

SEQ ID NO: 3815074 - DNA, 25 bp, Homo sapien
ttggacaccgatgcccaaccactga

SEQ ID NO: 3815075 - DNA, 25 bp, Homo sapien
gattttctcaggaatattgtgcttg

SEQ ID NO: 3815076 - DNA, 25 bp, Homo sapien
tctgtttgagattttctcaggaata

SEQ ID NO: 3815077 - DNA, 25 bp, Homo sapien
gtgcttgcctttggatggtcagaag

SEQ ID NO: 3815078 - DNA, 25 bp, Homo sapien
cagaagggttgggctccaaaggtat

SEQ ID NO: 3815079 - DNA, 25 bp, Homo sapien
agtgacacaccaatccctggtgctg

SEQ ID NO: 3815080 - DNA, 25 bp, Homo sapien
tcacagtgacacaccaatccctggt

SEQ ID NO: 3815081 - DNA, 25 bp, Homo sapien
ggccctcaccagctacaaaagtcac

SEQ ID NO: 3815082 - DNA, 25 bp, Homo sapien
agactcacagtgacacaccaatccc

SEQ ID NO: 3815083 - DNA, 25 bp, Homo sapien
gttcctgagtcattaggtgcctgca

SEQ ID NO: 3815084 - DNA, 25 bp, Homo sapien
tatttgcattaggtgcaggctgcct

SEQ ID NO: 3815085 - DNA, 25 bp, Homo sapien
tcaggccagccatgtgttgttggac

SEQ ID NO: 3815086 - DNA, 25 bp, Homo sapien
cctgcagactatgcccactgatatt

SEQ ID NO: 3815087 - DNA, 25 bp, Homo sapien
ctagtaaatctctccgggctctggg

SEQ ID NO: 3815088 - DNA, 25 bp, Homo sapien
actagtaaatctctccgggctctgg

SEQ ID NO: 3815089 - DNA, 25 bp, Homo sapien
cactagtaaatctctccgggctctg

SEQ ID NO: 3815090 - DNA, 25 bp, Homo sapien
ggagctggcactgatgtcatcacct

SEQ ID NO: 3815091 - DNA, 25 bp, Homo sapien
cacctccatgatgtagatcttgctt

SEQ ID NO: 3815092 - DNA, 25 bp, Homo sapien
tgtcatcacctccatgatgtagatc

SEQ ID NO: 3815093 - DNA, 25 bp, Homo sapien
catgatgtagatcttgcttatcaaa

SEQ ID NO: 3815094 - DNA, 25 bp, Homo sapien
cttggaacacgtccagggtctagga

SEQ ID NO: 3815095 - DNA, 25 bp, Homo sapien
cacatcttcactgcctgtttctttg

SEQ ID NO: 3815096 - DNA, 25 bp, Homo sapien
caatggccaatgttgagtgttggga

SEQ ID NO: 3815097 - DNA, 25 bp, Homo sapien
cacactagcattggctgcatggtcc

SEQ ID NO: 3815098 - DNA, 25 bp, Homo sapien
ccttgaatgcccacgagtttaattt

SEQ ID NO: 3815099 - DNA, 25 bp, Homo sapien
gtccttgaatgcccacgagtttaat

SEQ ID NO: 3815100 - DNA, 25 bp, Homo sapien
gaatgcccacgagtttaatttccat

SEQ ID NO: 3815101 - DNA, 25 bp, Homo sapien
ttgaatgcccacgagtttaatttcc

SEQ ID NO: 3815102 - DNA, 25 bp, Homo sapien
gcaggaggcaaagccaaaggcgaag

SEQ ID NO: 3815103 - DNA, 25 bp, Homo sapien
ggtattcagctggttggtgctgcat

SEQ ID NO: 3815104 - DNA, 25 bp, Homo sapien
ctgattcttgagtctggtattcagc

SEQ ID NO: 3815105 - DNA, 25 bp, Homo sapien
tggtattcagctggttggtgctgca

SEQ ID NO: 3815106 - DNA, 25 bp, Homo sapien
gattcttgagtctggtattcagctg

SEQ ID NO: 3815107 - DNA, 25 bp, Homo sapien
cagtgcatgtgattcctcccatcag

SEQ ID NO: 3815108 - DNA, 25 bp, Homo sapien
aacatattaataatggtcttcctaa

SEQ ID NO: 3815109 - DNA, 25 bp, Homo sapien
tattggaagctttattgaaattgta

SEQ ID NO: 3815110 - DNA, 25 bp, Homo sapien
gaaaacatattaataatggtcttcc

SEQ ID NO: 3815111 - DNA, 25 bp, Homo sapien
aattgtatcaaatttacagaaacat

SEQ ID NO: 3815112 - DNA, 25 bp, Homo sapien
gatatagttatagttacagctcctg

SEQ ID NO: 3815113 - DNA, 25 bp, Homo sapien
gcatgttcatgaaaggaccaaccca

SEQ ID NO: 3815114 - DNA, 25 bp, Homo sapien
tgtcctctcggtagaatgaatcaca

SEQ ID NO: 3815115 - DNA, 25 bp, Homo sapien
tggtatcaaggttgcactggcctga

SEQ ID NO: 3815116 - DNA, 25 bp, Homo sapien
taaacataatctatggcccaaatcc

SEQ ID NO: 3815117 - DNA, 25 bp, Homo sapien
taacctaaagtgtccacacattgga

SEQ ID NO: 3815118 - DNA, 25 bp, Homo sapien
caacttacggatgttgagccaggtt

SEQ ID NO: 3815119 - DNA, 25 bp, Homo sapien
tgtttactgaggtgtggcattgagc

SEQ ID NO: 3815120 - DNA, 25 bp, Homo sapien
tgtagtagcagcagaaaaattttcc

SEQ ID NO: 3815121 - DNA, 25 bp, Homo sapien
ctgtagtagcagcagaaaaattttc

SEQ ID NO: 3815122 - DNA, 25 bp, Homo sapien
gtagtagcagcagaaaaattttcca

SEQ ID NO: 3815123 - DNA, 25 bp, Homo sapien
tagtagcagcagaaaaattttccac

SEQ ID NO: 3815124 - DNA, 25 bp, Homo sapien
aagggttgacttctcggagaatgac

SEQ ID NO: 3815125 - DNA, 25 bp, Homo sapien
tgacttctcggagaatgacttccca

SEQ ID NO: 3815126 - DNA, 25 bp, Homo sapien
ccatctgtgtgttcttagatgttta

SEQ ID NO: 3815127 - DNA, 25 bp, Homo sapien
ttgaatacatgcataagatttccca

SEQ ID NO: 3815128 - DNA, 25 bp, Homo sapien
tgagaaaggtgttgccacatgcata

SEQ ID NO: 3815129 - DNA, 25 bp, Homo sapien
ctgagaaaggtgttgccacatgcat

SEQ ID NO: 3815130 - DNA, 25 bp, Homo sapien
gaaaggtgttgccacatgcatagca

SEQ ID NO: 3815131 - DNA, 25 bp, Homo sapien
ggtgttgccacatgcatagcattca

SEQ ID NO: 3815132 - DNA, 25 bp, Homo sapien
tgagtaagggatgacttttcactga

SEQ ID NO: 3815133 - DNA, 25 bp, Homo sapien
ggatttctccattcatgacatctgt

SEQ ID NO: 3815134 - DNA, 25 bp, Homo sapien
gacattcatgatttctccccacgtg

SEQ ID NO: 3815135 - DNA, 25 bp, Homo sapien
ccccacgtgtgttctctgattttga

SEQ ID NO: 3815136 - DNA, 25 bp, Homo sapien
tcataaggtttttcccctggatgtg

SEQ ID NO: 3815137 - DNA, 25 bp, Homo sapien
ctgttgtaaatgaagggctaatttt

SEQ ID NO: 3815138 - DNA, 25 bp, Homo sapien
tgtaaatgaagggctaatttttcac

SEQ ID NO: 3815139 - DNA, 25 bp, Homo sapien
ttgtaaatgaagggctaatttttca

SEQ ID NO: 3815140 - DNA, 25 bp, Homo sapien
ctctgttgtaaatgaagggctaatt

SEQ ID NO: 3815141 - DNA, 25 bp, Homo sapien
ctggctgaatgggtaaacattctga

SEQ ID NO: 3815142 - DNA, 25 bp, Homo sapien
agagtgggatttaaattctggctga

SEQ ID NO: 3815143 - DNA, 25 bp, Homo sapien
aattgagtgggttctctgaattaga

SEQ ID NO: 3815144 - DNA, 25 bp, Homo sapien
ctgaattagagtgggatttaaattc

SEQ ID NO: 3815145 - DNA, 25 bp, Homo sapien
gttttcccatgttcagtatatttgc

SEQ ID NO: 3815146 - DNA, 25 bp, Homo sapien
ttttcccatgttcagtatatttgca

SEQ ID NO: 3815147 - DNA, 25 bp, Homo sapien
agagtgaattctcagggaaagcttt

SEQ ID NO: 3815148 - DNA, 25 bp, Homo sapien
gaattctcagggaaagctttcccac

SEQ ID NO: 3815149 - DNA, 25 bp, Homo sapien
aagagtgaattctcagggaaagctt

SEQ ID NO: 3815150 - DNA, 25 bp, Homo sapien
ttgaatagtttctactggtattaat

SEQ ID NO: 3815151 - DNA, 25 bp, Homo sapien
tttgttaaactcattgaacttcatt

SEQ ID NO: 3815152 - DNA, 25 bp, Homo sapien
ctttaaattccatctggcactaact

SEQ ID NO: 3815153 - DNA, 25 bp, Homo sapien
ttaaattccatctggcactaactca

SEQ ID NO: 3815154 - DNA, 25 bp, Homo sapien
tttaaattccatctggcactaactc

SEQ ID NO: 3815155 - DNA, 25 bp, Homo sapien
taaattccatctggcactaactcac

SEQ ID NO: 3815156 - DNA, 25 bp, Homo sapien
tctggcttcgaaatttttcctctaa

SEQ ID NO: 3815157 - DNA, 25 bp, Homo sapien
tgactctggcttcgaaatttttcct

SEQ ID NO: 3815158 - DNA, 25 bp, Homo sapien
gactctggcttcgaaatttttcctc

SEQ ID NO: 3815159 - DNA, 25 bp, Homo sapien
gatgactctggcttcgaaatttttc

SEQ ID NO: 3815160 - DNA, 25 bp, Homo sapien
gtctccaatttgaggatcacttctg

SEQ ID NO: 3815161 - DNA, 25 bp, Homo sapien
tgtctccaatttgaggatcacttct

SEQ ID NO: 3815162 - DNA, 25 bp, Homo sapien
agacaaggtggctgtagttctccag

SEQ ID NO: 3815163 - DNA, 25 bp, Homo sapien
ctactgagacaaggtggctgtagtt

SEQ ID NO: 3815164 - DNA, 25 bp, Homo sapien
caaggtggctgtagttctccagcat

SEQ ID NO: 3815165 - DNA, 25 bp, Homo sapien
tactgagacaaggtggctgtagttc

SEQ ID NO: 3815166 - DNA, 25 bp, Homo sapien
agcccatagtcacatccctaaatga

SEQ ID NO: 3815167 - DNA, 25 bp, Homo sapien
cacattcctctacagggtcctctga

SEQ ID NO: 3815168 - DNA, 25 bp, Homo sapien
ccagatgatgccactcctcttgagt

SEQ ID NO: 3815169 - DNA, 25 bp, Homo sapien
ttgagtgaagcccatagtcacatcc

SEQ ID NO: 3815170 - DNA, 25 bp, Homo sapien
aaccctttgtcagataactaggttg

SEQ ID NO: 3815171 - DNA, 25 bp, Homo sapien
gtccttcacccacattttgataggg

SEQ ID NO: 3815172 - DNA, 25 bp, Homo sapien
atattaaccctttgtcagataacta

SEQ ID NO: 3815173 - DNA, 25 bp, Homo sapien
atgtccttcacccacattttgatag

SEQ ID NO: 3815174 - DNA, 25 bp, Homo sapien
cagcaaagtctagagaagaatgaga

SEQ ID NO: 3815175 - DNA, 25 bp, Homo sapien
tgaccacacataagactgcaaaaaa

SEQ ID NO: 3815176 - DNA, 25 bp, Homo sapien
tcagtgaccacacataagactgcaa

SEQ ID NO: 3815177 - DNA, 25 bp, Homo sapien
gaagacttcagtaattaagaacagc

SEQ ID NO: 3815178 - DNA, 25 bp, Homo sapien
ctggtagtatctggctgtgaatccg

SEQ ID NO: 3815179 - DNA, 25 bp, Homo sapien
atttgacttcttcctgctttagact

SEQ ID NO: 3815180 - DNA, 25 bp, Homo sapien
tgacttcttcctgctttagacttgg

SEQ ID NO: 3815181 - DNA, 25 bp, Homo sapien
ggatttgacttcttcctgctttaga

SEQ ID NO: 3815182 - DNA, 25 bp, Homo sapien
ccaaaagagtgctgggtagctacac

SEQ ID NO: 3815183 - DNA, 25 bp, Homo sapien
ggccatcttgacacaaatccccaaa

SEQ ID NO: 3815184 - DNA, 25 bp, Homo sapien
tcatagtagatccaaagccagtaag

SEQ ID NO: 3815185 - DNA, 25 bp, Homo sapien
gatctaaccataagctgtctccaag

SEQ ID NO: 3815186 - DNA, 25 bp, Homo sapien
tgtgaaagtaccaacaggcaataca

SEQ ID NO: 3815187 - DNA, 25 bp, Homo sapien
aagcccaccgacaaactgttttatg

SEQ ID NO: 3815188 - DNA, 25 bp, Homo sapien
tcaactctctatcagaaatcagcaa

SEQ ID NO: 3815189 - DNA, 25 bp, Homo sapien
caagatctgcattcacctatatgac

SEQ ID NO: 3815190 - DNA, 25 bp, Homo sapien
gtgatcatattccactagtgttggc

SEQ ID NO: 3815191 - DNA, 25 bp, Homo sapien
ttggcagagcagagaaaaccgagag

SEQ ID NO: 3815192 - DNA, 25 bp, Homo sapien
gtgttggcagagcagagaaaaccga

SEQ ID NO: 3815193 - DNA, 25 bp, Homo sapien
catattccactagtgttggcagagc

SEQ ID NO: 3815194 - DNA, 25 bp, Homo sapien
cttgctctaacttggtttcaggttc

SEQ ID NO: 3815195 - DNA, 25 bp, Homo sapien
acgaacttgctctaacttggtttca

SEQ ID NO: 3815196 - DNA, 25 bp, Homo sapien
ttggaaggaaaacgaacttgctcta

SEQ ID NO: 3815197 - DNA, 25 bp, Homo sapien
aggaaaacgaacttgctctaacttg

SEQ ID NO: 3815198 - DNA, 25 bp, Homo sapien
acctctgattctgtaagatcaagat

SEQ ID NO: 3815199 - DNA, 25 bp, Homo sapien
taagatcaagatgggggcatccgta

SEQ ID NO: 3815200 - DNA, 25 bp, Homo sapien
ctgtaagatcaagatgggggcatcc

SEQ ID NO: 3815201 - DNA, 25 bp, Homo sapien
tctgattctgtaagatcaagatggg

SEQ ID NO: 3815202 - DNA, 25 bp, Homo sapien
tgccagcagctcaacatcgagaacg

SEQ ID NO: 3815203 - DNA, 25 bp, Homo sapien
ttgtgctgcaatatgccagcagctc

SEQ ID NO: 3815204 - DNA, 25 bp, Homo sapien
tatgccagcagctcaacatcgagaa

SEQ ID NO: 3815205 - DNA, 25 bp, Homo sapien
tctagttgtgctgcaatatgccagc

SEQ ID NO: 3815206 - DNA, 25 bp, Homo sapien
caccgtctggaaatgcccactgcta

SEQ ID NO: 3815207 - DNA, 25 bp, Homo sapien
agttcgaatcctcatccaagactga

SEQ ID NO: 3815208 - DNA, 25 bp, Homo sapien
aggccggacagtgccggaggacccg

SEQ ID NO: 3815209 - DNA, 25 bp, Homo sapien
ctggaaatgcccactgctactaggg

SEQ ID NO: 3815210 - DNA, 25 bp, Homo sapien
caagcggggtgacgctgagcagagg

SEQ ID NO: 3815211 - DNA, 25 bp, Homo sapien
aggcttggtgtggagtccgcgcccg

SEQ ID NO: 3815212 - DNA, 25 bp, Homo sapien
ttggtgtggagtccgcgcccgcagg

SEQ ID NO: 3815213 - DNA, 25 bp, Homo sapien
cgaggacacagcaagcggggtgacg

SEQ ID NO: 3815214 - DNA, 25 bp, Homo sapien
gcagaaggcccgtttccgcacggtc

SEQ ID NO: 3815215 - DNA, 25 bp, Homo sapien
caacgcggggatgccgaccacaggt

SEQ ID NO: 3815216 - DNA, 25 bp, Homo sapien
ttggaaggagacagcgagattctga

SEQ ID NO: 3815217 - DNA, 25 bp, Homo sapien
ctctgcgtcgcagtgacaacgcggg

SEQ ID NO: 3815218 - DNA, 25 bp, Homo sapien
ctcagggaagagaaaatccaacctt

SEQ ID NO: 3815219 - DNA, 25 bp, Homo sapien
tcagggaagagaaaatccaacctta

SEQ ID NO: 3815220 - DNA, 25 bp, Homo sapien
atcacaggcgcgggacctacgttcc

SEQ ID NO: 3815221 - DNA, 25 bp, Homo sapien
tatcacaggcgcgggacctacgttc

SEQ ID NO: 3815222 - DNA, 25 bp, Homo sapien
ttatcacaggcgcgggacctacgtt

SEQ ID NO: 3815223 - DNA, 25 bp, Homo sapien
accaggacaggattaggacgcaggc

SEQ ID NO: 3815224 - DNA, 25 bp, Homo sapien
caggacaggattaggacgcaggcca

SEQ ID NO: 3815225 - DNA, 25 bp, Homo sapien
cggcacctccagtccaccctcgctc

SEQ ID NO: 3815226 - DNA, 25 bp, Homo sapien
ccaggcggcaaagccgctccctctc

SEQ ID NO: 3815227 - DNA, 25 bp, Homo sapien
cccgaagcagggagatgccgggagc

SEQ ID NO: 3815228 - DNA, 25 bp, Homo sapien
tgccccgaagcagggagatgccggg

SEQ ID NO: 3815229 - DNA, 25 bp, Homo sapien
ccccgaagcagggagatgccgggag

SEQ ID NO: 3815230 - DNA, 25 bp, Homo sapien
ctgccccgaagcagggagatgccgg

SEQ ID NO: 3815231 - DNA, 25 bp, Homo sapien
gcttccgtccttgaagttgagtctc

SEQ ID NO: 3815232 - DNA, 25 bp, Homo sapien
tccgtccttgaagttgagtctccag

SEQ ID NO: 3815233 - DNA, 25 bp, Homo sapien
caggcttccgtccttgaagttgagt

SEQ ID NO: 3815234 - DNA, 25 bp, Homo sapien
gtccttgaagttgagtctccagcag

SEQ ID NO: 3815235 - DNA, 25 bp, Homo sapien
tctgctgtaaataggtgaggcattt

SEQ ID NO: 3815236 - DNA, 25 bp, Homo sapien
tgtaaataggtgaggcatttagatc

SEQ ID NO: 3815237 - DNA, 25 bp, Homo sapien
ggctctgctgtaaataggtgaggca

SEQ ID NO: 3815238 - DNA, 25 bp, Homo sapien
atggctctgctgtaaataggtgagg

SEQ ID NO: 3815239 - DNA, 25 bp, Homo sapien
catccgtcggatccaaaaattggag

SEQ ID NO: 3815240 - DNA, 25 bp, Homo sapien
tcagcctcagaggttgacttctaca

SEQ ID NO: 3815241 - DNA, 25 bp, Homo sapien
tgataaggacatgatccacatcgcg

SEQ ID NO: 3815242 - DNA, 25 bp, Homo sapien
acaccaaggtctccaggcgctatgg

SEQ ID NO: 3815243 - DNA, 25 bp, Homo sapien
caggaagtgtttttgctaccgtgaa

SEQ ID NO: 3815244 - DNA, 25 bp, Homo sapien
gacagagaccctgatgacattcaca

SEQ ID NO: 3815245 - DNA, 25 bp, Homo sapien
taaggaccgacgtgtttcaagtgga

SEQ ID NO: 3815246 - DNA, 25 bp, Homo sapien
taatcgaaccctgaagaagatggga

SEQ ID NO: 3815247 - DNA, 25 bp, Homo sapien
tgaaattagacttctcacagaccag

SEQ ID NO: 3815248 - DNA, 25 bp, Homo sapien
ttagtgtaggcgacattacttctcc

SEQ ID NO: 3815249 - DNA, 25 bp, Homo sapien
gaaacacttcctgaacaatgctgcc

SEQ ID NO: 3815250 - DNA, 25 bp, Homo sapien
taatgaaagtctagagtttggcaca

SEQ ID NO: 3815251 - DNA, 25 bp, Homo sapien
cagcaagtttgtgtctcggtgagtt

SEQ ID NO: 3815252 - DNA, 25 bp, Homo sapien
tacagaatgggtatctgctccctgg

SEQ ID NO: 3815253 - DNA, 25 bp, Homo sapien
ccagcaggcttagagcttctacaga

SEQ ID NO: 3815254 - DNA, 25 bp, Homo sapien
ggtacataccactctctcctgaggc

SEQ ID NO: 3815255 - DNA, 25 bp, Homo sapien
aaagctaggacgacacagagtgact

SEQ ID NO: 3815256 - DNA, 25 bp, Homo sapien
tgattatggatcactcagggagctg

SEQ ID NO: 3815257 - DNA, 25 bp, Homo sapien
cagagtgactatcagtgccctggag

SEQ ID NO: 3815258 - DNA, 25 bp, Homo sapien
tgcactactagctccgagaactgag

SEQ ID NO: 3815259 - DNA, 25 bp, Homo sapien
tgcaagggtttaatccaaggtccag

SEQ ID NO: 3815260 - DNA, 25 bp, Homo sapien
caaggtccaggatcagtgcatgaac

SEQ ID NO: 3815261 - DNA, 25 bp, Homo sapien
tagccagtgtctcctaacccaggga

SEQ ID NO: 3815262 - DNA, 25 bp, Homo sapien
taagtgaattttgatcagaggtccc

SEQ ID NO: 3815263 - DNA, 25 bp, Homo sapien
gtgctgcgatttgttgagccactgc

SEQ ID NO: 3815264 - DNA, 25 bp, Homo sapien
tcaggccccgtgattccaaaattca

SEQ ID NO: 3815265 - DNA, 25 bp, Homo sapien
acctggcctcaacatgacttttgga

SEQ ID NO: 3815266 - DNA, 25 bp, Homo sapien
caaacactcaaagcacagtggatgt

SEQ ID NO: 3815267 - DNA, 25 bp, Homo sapien
cattcaggatgtcaacaggcccttc

SEQ ID NO: 3815268 - DNA, 25 bp, Homo sapien
tatcacttacgctgaaggctggagt

SEQ ID NO: 3815269 - DNA, 25 bp, Homo sapien
ggacacgacaaacacctgggatggg

SEQ ID NO: 3815270 - DNA, 25 bp, Homo sapien
gaggcaggcctagatcttcacacgt

SEQ ID NO: 3815271 - DNA, 25 bp, Homo sapien
gtggctggaaatttctaatatccaa

SEQ ID NO: 3815272 - DNA, 25 bp, Homo sapien
tggctggaaatttctaatatccaat

SEQ ID NO: 3815273 - DNA, 25 bp, Homo sapien
ttagcaaggtctgatttacggtaaa

SEQ ID NO: 3815274 - DNA, 25 bp, Homo sapien
tttagcaaggtctgatttacggtaa

SEQ ID NO: 3815275 - DNA, 25 bp, Homo sapien
tagcaaggtctgatttacggtaaaa

SEQ ID NO: 3815276 - DNA, 25 bp, Homo sapien
tgtgacttttgacaaaaggatttcc

SEQ ID NO: 3815277 - DNA, 25 bp, Homo sapien
gtaagatgtgacttttgacaaaagg

SEQ ID NO: 3815278 - DNA, 25 bp, Homo sapien
tctgatgctgtgtaagatgtgactt

SEQ ID NO: 3815279 - DNA, 25 bp, Homo sapien
tctctgatgctgtgtaagatgtgac

SEQ ID NO: 3815280 - DNA, 25 bp, Homo sapien
ggtgtgaattcatacagaaggattt

SEQ ID NO: 3815281 - DNA, 25 bp, Homo sapien
tgtgaattcatacagaaggattttc

SEQ ID NO: 3815282 - DNA, 25 bp, Homo sapien
aggtgtgaattcatacagaaggatt

SEQ ID NO: 3815283 - DNA, 25 bp, Homo sapien
tggtgtactgtaaggtgtgaattca

SEQ ID NO: 3815284 - DNA, 25 bp, Homo sapien
tcacaggtaccccatcatgtttaga

SEQ ID NO: 3815285 - DNA, 25 bp, Homo sapien
aggtaccccatcatgtttagaaagg

SEQ ID NO: 3815286 - DNA, 25 bp, Homo sapien
tttgatggaggtatctgatggaaca

SEQ ID NO: 3815287 - DNA, 25 bp, Homo sapien
gtcctttgatggaggtatctgatgg

SEQ ID NO: 3815288 - DNA, 25 bp, Homo sapien
ctgccttttcaaggagggtttcctg

SEQ ID NO: 3815289 - DNA, 25 bp, Homo sapien
cccacatgcattaaattcgtcagac

SEQ ID NO: 3815290 - DNA, 25 bp, Homo sapien
tctcacgatgactcagagtgttcct

SEQ ID NO: 3815291 - DNA, 25 bp, Homo sapien
ttgaatcttctcatgctgcaaagtg

SEQ ID NO: 3815292 - DNA, 25 bp, Homo sapien
ctctcgagtatgagtttcatcatgc

SEQ ID NO: 3815293 - DNA, 25 bp, Homo sapien
tccacgtgagtcatactgacagaac

SEQ ID NO: 3815294 - DNA, 25 bp, Homo sapien
cacgtgagtcatactgacagaacat

SEQ ID NO: 3815295 - DNA, 25 bp, Homo sapien
ccacgtgagtcatactgacagaaca

SEQ ID NO: 3815296 - DNA, 25 bp, Homo sapien
gttaaatggtattcctattacatta

SEQ ID NO: 3815297 - DNA, 25 bp, Homo sapien
ttaaatggtattcctattacattac

SEQ ID NO: 3815298 - DNA, 25 bp, Homo sapien
tcattattgatgaatacaacttccc

SEQ ID NO: 3815299 - DNA, 25 bp, Homo sapien
cccacaaatgtttagattgattttc

SEQ ID NO: 3815300 - DNA, 25 bp, Homo sapien
gatgaatacaacttcccacaaatgt

SEQ ID NO: 3815301 - DNA, 25 bp, Homo sapien
aacttcccacaaatgtttagattga

SEQ ID NO: 3815302 - DNA, 25 bp, Homo sapien
aataaaaatgtgaggtcagttactc

SEQ ID NO: 3815303 - DNA, 25 bp, Homo sapien
aatacagggcagagatgactacata

SEQ ID NO: 3815304 - DNA, 25 bp, Homo sapien
tgttaatatgataccttgattgatc

SEQ ID NO: 3815305 - DNA, 25 bp, Homo sapien
ggtcagttactcagaatgtataaaa

SEQ ID NO: 3815306 - DNA, 25 bp, Homo sapien
ccagagaatctacactccaaagaat

SEQ ID NO: 3815307 - DNA, 25 bp, Homo sapien
ggtatatatagacaaagactggagt

SEQ ID NO: 3815308 - DNA, 25 bp, Homo sapien
gttgcagcagttcttaacaccagag

SEQ ID NO: 3815309 - DNA, 25 bp, Homo sapien
aattctagtaactgcctagtgtgcc

SEQ ID NO: 3815310 - DNA, 25 bp, Homo sapien
taaagtcaatatcctttttagagac

SEQ ID NO: 3815311 - DNA, 25 bp, Homo sapien
ttaatcagtgtacttttcagtaaca

SEQ ID NO: 3815312 - DNA, 25 bp, Homo sapien
gtgattgtcatgtattttcaatata

SEQ ID NO: 3815313 - DNA, 25 bp, Homo sapien
aagctttaatcagtgtacttttcag

SEQ ID NO: 3815314 - DNA, 25 bp, Homo sapien
ttcttaggcaaatctggagcagtgc

SEQ ID NO: 3815315 - DNA, 25 bp, Homo sapien
tctaggatgcacttaagtcacttgg

SEQ ID NO: 3815316 - DNA, 25 bp, Homo sapien
gagtactgtgtactgttccctctga

SEQ ID NO: 3815317 - DNA, 25 bp, Homo sapien
ttctccaggccctatgtgagtactg

SEQ ID NO: 3815318 - DNA, 25 bp, Homo sapien
tcagtagcggctatcagcaaagtgt

SEQ ID NO: 3815319 - DNA, 25 bp, Homo sapien
tgttaacaccactgccatgctaaag

SEQ ID NO: 3815320 - DNA, 25 bp, Homo sapien
gcaactgcccttgagaagatccaga

SEQ ID NO: 3815321 - DNA, 25 bp, Homo sapien
tcatcagtgagaacccaatgggagt

SEQ ID NO: 3815322 - DNA, 25 bp, Homo sapien
gcacagtagctacacaagaaagaca

SEQ ID NO: 3815323 - DNA, 25 bp, Homo sapien
tcataatagaagtaccagaaggagg

SEQ ID NO: 3815324 - DNA, 25 bp, Homo sapien
tctgttgacgaagagaaaatcctga

SEQ ID NO: 3815325 - DNA, 25 bp, Homo sapien
gaatggctatgctcaccttgcaaca

SEQ ID NO: 3815326 - DNA, 25 bp, Homo sapien
ggaaaccaccatagccaagaggagc

SEQ ID NO: 3815327 - DNA, 25 bp, Homo sapien
tcaccaggattcctccaaactgtca

SEQ ID NO: 3815328 - DNA, 25 bp, Homo sapien
aggaaagtctgggaaaccaccatag

SEQ ID NO: 3815329 - DNA, 25 bp, Homo sapien
aggattcctccaaactgtcaaggtc

SEQ ID NO: 3815330 - DNA, 25 bp, Homo sapien
aattcatgcattgctggcaggactg

SEQ ID NO: 3815331 - DNA, 25 bp, Homo sapien
gctactatgagaaacaatcaggcag

SEQ ID NO: 3815332 - DNA, 25 bp, Homo sapien
caggactgtaaagtactgtggctac

SEQ ID NO: 3815333 - DNA, 25 bp, Homo sapien
cacagagacaccatataaccagcat

SEQ ID NO: 3815334 - DNA, 25 bp, Homo sapien
tggtggagtacacagctcccaactg

SEQ ID NO: 3815335 - DNA, 25 bp, Homo sapien
ttgttctcgaatggacaactggtcc

SEQ ID NO: 3815336 - DNA, 25 bp, Homo sapien
gagtttgttactactaggcctgcta

SEQ ID NO: 3815337 - DNA, 25 bp, Homo sapien
tatgggcgtttctgcgaattcttca

SEQ ID NO: 3815338 - DNA, 25 bp, Homo sapien
aaaaggacacgatcatctcagttga

SEQ ID NO: 3815339 - DNA, 25 bp, Homo sapien
gcacatatagaaaattcacagcttt

SEQ ID NO: 3815340 - DNA, 25 bp, Homo sapien
gcagtaaaggcagttgacaaaatcc

SEQ ID NO: 3815341 - DNA, 25 bp, Homo sapien
tgacaaaatccaacccctttcagga

SEQ ID NO: 3815342 - DNA, 25 bp, Homo sapien
gccagggtggttgcaaactcttgac

SEQ ID NO: 3815343 - DNA, 25 bp, Homo sapien
tgcaacctcccactccctgggttca

SEQ ID NO: 3815344 - DNA, 25 bp, Homo sapien
cttggcctcccaaagccctgggata

SEQ ID NO: 3815345 - DNA, 25 bp, Homo sapien
cctcccactccctgggttcaagcca

SEQ ID NO: 3815346 - DNA, 25 bp, Homo sapien
cccaagttacagtgtagtagcacaa

SEQ ID NO: 3815347 - DNA, 25 bp, Homo sapien
ttgctgtcctgttcttctatatctg

SEQ ID NO: 3815348 - DNA, 25 bp, Homo sapien
tatatctgctagtaatcatatggct

SEQ ID NO: 3815349 - DNA, 25 bp, Homo sapien
aattctatcaattgctaagagggaa

SEQ ID NO: 3815350 - DNA, 25 bp, Homo sapien
gggcaaagactgaactattggcagg

SEQ ID NO: 3815351 - DNA, 25 bp, Homo sapien
aacaacagtaaagttgaggtgggca

SEQ ID NO: 3815352 - DNA, 25 bp, Homo sapien
caggtgtaagaatggtaaaccttca

SEQ ID NO: 3815353 - DNA, 25 bp, Homo sapien
gaactattggcaggtgtaagaatgg

SEQ ID NO: 3815354 - DNA, 25 bp, Homo sapien
tccaaagttgccaaaccctgaatta

SEQ ID NO: 3815355 - DNA, 25 bp, Homo sapien
ctggaaagctctggcttgggaattc

SEQ ID NO: 3815356 - DNA, 25 bp, Homo sapien
gaagatcacctctggtttgtgagca

SEQ ID NO: 3815357 - DNA, 25 bp, Homo sapien
tgttccagcctgaagatcacctctg

SEQ ID NO: 3815358 - DNA, 25 bp, Homo sapien
acctctggtttgtgagcacaatacc

SEQ ID NO: 3815359 - DNA, 25 bp, Homo sapien
tttagaatgatacagtgaacagacc

SEQ ID NO: 3815360 - DNA, 25 bp, Homo sapien
atttagaatgatacagtgaacagac

SEQ ID NO: 3815361 - DNA, 25 bp, Homo sapien
gaatgatacagtgaacagaccttac

SEQ ID NO: 3815362 - DNA, 25 bp, Homo sapien
tagaatgatacagtgaacagacctt

SEQ ID NO: 3815363 - DNA, 25 bp, Homo sapien
tctgactagggtccaggtgctgcca

SEQ ID NO: 3815364 - DNA, 25 bp, Homo sapien
ctgactagggtccaggtgctgccac

SEQ ID NO: 3815365 - DNA, 25 bp, Homo sapien
cctctgactagggtccaggtgctgc

SEQ ID NO: 3815366 - DNA, 25 bp, Homo sapien
ctctgactagggtccaggtgctgcc

SEQ ID NO: 3815367 - DNA, 25 bp, Homo sapien
tctgtggagtacataggagaagaca

SEQ ID NO: 3815368 - DNA, 25 bp, Homo sapien
tctagggcacatcttttagggatca

SEQ ID NO: 3815369 - DNA, 25 bp, Homo sapien
gattgttctggatatcctctagggc

SEQ ID NO: 3815370 - DNA, 25 bp, Homo sapien
actgctgtgaaaaagggagagccaa

SEQ ID NO: 3815371 - DNA, 25 bp, Homo sapien
gatcaaacagtacatccaaaagaaa

SEQ ID NO: 3815372 - DNA, 25 bp, Homo sapien
gtttgactcaataggctgcactcat

SEQ ID NO: 3815373 - DNA, 25 bp, Homo sapien
tgcactcatttcagggctaacactg

SEQ ID NO: 3815374 - DNA, 25 bp, Homo sapien
gctaacactggaaggttattcacta

SEQ ID NO: 3815375 - DNA, 25 bp, Homo sapien
ctgactcttacaaatctcacaaagt

SEQ ID NO: 3815376 - DNA, 25 bp, Homo sapien
actgactcttacaaatctcacaaag

SEQ ID NO: 3815377 - DNA, 25 bp, Homo sapien
tgactcttacaaatctcacaaagtc

SEQ ID NO: 3815378 - DNA, 25 bp, Homo sapien
caaagtccaccgcaaaataaagtag

SEQ ID NO: 3815379 - DNA, 25 bp, Homo sapien
ggaaagacggagacaactctgaaga

SEQ ID NO: 3815380 - DNA, 25 bp, Homo sapien
gacggagacaactctgaagatacag

SEQ ID NO: 3815381 - DNA, 25 bp, Homo sapien
ttgttctgttcttggaaagacggag

SEQ ID NO: 3815382 - DNA, 25 bp, Homo sapien
gttctgttcttggaaagacggagac

SEQ ID NO: 3815383 - DNA, 25 bp, Homo sapien
accgcgctaggccaaaattatgtaa

SEQ ID NO: 3815384 - DNA, 25 bp, Homo sapien
tgactggagggcagttcgaaaccta

SEQ ID NO: 3815385 - DNA, 25 bp, Homo sapien
aggatgaacgcagaacgggcaacag

SEQ ID NO: 3815386 - DNA, 25 bp, Homo sapien
cctgagtgcaagatcaagttaggac

SEQ ID NO: 3815387 - DNA, 25 bp, Homo sapien
cagaggctgcgccttagaggaactg

SEQ ID NO: 3815388 - DNA, 25 bp, Homo sapien
gcgtagcgtcctggtagacatgctg

SEQ ID NO: 3815389 - DNA, 25 bp, Homo sapien
gggcgtagcccgctccctacagagg

SEQ ID NO: 3815390 - DNA, 25 bp, Homo sapien
ccttagaggaactggcgtagcgtcc

SEQ ID NO: 3815391 - DNA, 25 bp, Homo sapien
ttcgccataagagagccggtagacc

SEQ ID NO: 3815392 - DNA, 25 bp, Homo sapien
tcactctctcttcgggttgcattcg

SEQ ID NO: 3815393 - DNA, 25 bp, Homo sapien
gttgcattcgccataagagagccgg

SEQ ID NO: 3815394 - DNA, 25 bp, Homo sapien
tgcattcgccataagagagccggta

SEQ ID NO: 3815395 - DNA, 25 bp, Homo sapien
tatacggtgacaggtagggatcaag

SEQ ID NO: 3815396 - DNA, 25 bp, Homo sapien
taagtcttagtcataaaacttttgc

SEQ ID NO: 3815397 - DNA, 25 bp, Homo sapien
tggccctttacacaatgtacgttct

SEQ ID NO: 3815398 - DNA, 25 bp, Homo sapien
cccaaagtactaggagtgcatcacc

SEQ ID NO: 3815399 - DNA, 25 bp, Homo sapien
ggatgacaacatcaggtagcagcta

SEQ ID NO: 3815400 - DNA, 25 bp, Homo sapien
tgaaagtcgttactgtccagctggt

SEQ ID NO: 3815401 - DNA, 25 bp, Homo sapien
caggatcatgctggtacctcaggta

SEQ ID NO: 3815402 - DNA, 25 bp, Homo sapien
tagaattagacaagacagcggaggc

SEQ ID NO: 3815403 - DNA, 25 bp, Homo sapien
tgggacccaaatcaggcctaagggc

SEQ ID NO: 3815404 - DNA, 25 bp, Homo sapien
tgtcagaaagtatgctcagcaggct

SEQ ID NO: 3815405 - DNA, 25 bp, Homo sapien
ccagtaggcacaggagatgtcagaa

SEQ ID NO: 3815406 - DNA, 25 bp, Homo sapien
caagtggcttatcagtgactagaaa

SEQ ID NO: 3815407 - DNA, 25 bp, Homo sapien
tatctccatgcctagtcaaactttc

SEQ ID NO: 3815408 - DNA, 25 bp, Homo sapien
cactgctcatgaatctgcggtttcc

SEQ ID NO: 3815409 - DNA, 25 bp, Homo sapien
tggtacttgataataaggtgtgtct

SEQ ID NO: 3815410 - DNA, 25 bp, Homo sapien
gtttaatggcttacaatcttgccca

SEQ ID NO: 3815411 - DNA, 25 bp, Homo sapien
gactaagaaactcactcaaaaccgc

SEQ ID NO: 3815412 - DNA, 25 bp, Homo sapien
ctaagaaactcactcaaaaccgctc

SEQ ID NO: 3815413 - DNA, 25 bp, Homo sapien
tcaggactaagaaactcactcaaaa

SEQ ID NO: 3815414 - DNA, 25 bp, Homo sapien
ggacacattcaaagcagtgtgtaga

SEQ ID NO: 3815415 - DNA, 25 bp, Homo sapien
ctccagcaggatacaggagggtgat

SEQ ID NO: 3815416 - DNA, 25 bp, Homo sapien
tctacgtgggctttgttgcctgccc

SEQ ID NO: 3815417 - DNA, 25 bp, Homo sapien
gctccaaaatctccagcaggataca

SEQ ID NO: 3815418 - DNA, 25 bp, Homo sapien
ctgtaagggtctacgtgggctttgt

SEQ ID NO: 3815419 - DNA, 25 bp, Homo sapien
tgttaatgatctaggccagaagcgg

SEQ ID NO: 3815420 - DNA, 25 bp, Homo sapien
gatggcaccctattccagatccagg

SEQ ID NO: 3815421 - DNA, 25 bp, Homo sapien
gagaacaacgttagcatgagcaggg

SEQ ID NO: 3815422 - DNA, 25 bp, Homo sapien
gatggaagtccaatgtagtgcccga

SEQ ID NO: 3815423 - DNA, 25 bp, Homo sapien
gagagctgacatgaggaatgtcaca

SEQ ID NO: 3815424 - DNA, 25 bp, Homo sapien
catggactcgagagctgacatgagg

SEQ ID NO: 3815425 - DNA, 25 bp, Homo sapien
ctgacatgaggaatgtcacaaacat

SEQ ID NO: 3815426 - DNA, 25 bp, Homo sapien
gagctgacatgaggaatgtcacaaa

SEQ ID NO: 3815427 - DNA, 25 bp, Homo sapien
cggggggacactgcaactttggcca

SEQ ID NO: 3815428 - DNA, 25 bp, Homo sapien
cttcaacgagcggggggacactgca

SEQ ID NO: 3815429 - DNA, 25 bp, Homo sapien
gacactgcaactttggccatgatcc

SEQ ID NO: 3815430 - DNA, 25 bp, Homo sapien
aacgagcggggggacactgcaactt

SEQ ID NO: 3815431 - DNA, 25 bp, Homo sapien
tgttccgtcactgccttctacagaa

SEQ ID NO: 3815432 - DNA, 25 bp, Homo sapien
tccgtcactgccttctacagaatga

SEQ ID NO: 3815433 - DNA, 25 bp, Homo sapien
gtactgttccgtcactgccttctac

SEQ ID NO: 3815434 - DNA, 25 bp, Homo sapien
cgtcactgccttctacagaatgatg

SEQ ID NO: 3815435 - DNA, 25 bp, Homo sapien
aactggagactccaaggtggctggc

SEQ ID NO: 3815436 - DNA, 25 bp, Homo sapien
actggagactccaaggtggctggct

SEQ ID NO: 3815437 - DNA, 25 bp, Homo sapien
gctgcgcttcagtcgctgtcgtcgc

SEQ ID NO: 3815438 - DNA, 25 bp, Homo sapien
gcagctgctcgtccgccatcttacc

SEQ ID NO: 3815439 - DNA, 25 bp, Homo sapien
gcttgtgtcaggagaaaccaccttc

SEQ ID NO: 3815440 - DNA, 25 bp, Homo sapien
tttctaccactccagcagccgtgca

SEQ ID NO: 3815441 - DNA, 25 bp, Homo sapien
cattcacagtttaggtttctcgagt

SEQ ID NO: 3815442 - DNA, 25 bp, Homo sapien
cacagtttaggtttctcgagtaatt

SEQ ID NO: 3815443 - DNA, 25 bp, Homo sapien
ccattcacagtttaggtttctcgag

SEQ ID NO: 3815444 - DNA, 25 bp, Homo sapien
agtccattcacagtttaggtttctc

SEQ ID NO: 3815445 - DNA, 25 bp, Homo sapien
ggtagatggtttctttcagcaccaa

SEQ ID NO: 3815446 - DNA, 25 bp, Homo sapien
ttcagcaccaaataattgaccaagg

SEQ ID NO: 3815447 - DNA, 25 bp, Homo sapien
tcagcaccaaataattgaccaagga

SEQ ID NO: 3815448 - DNA, 25 bp, Homo sapien
cttctaggaggtagatggtttcttt

SEQ ID NO: 3815449 - DNA, 25 bp, Homo sapien
ctactacacagtttctctagctggg

SEQ ID NO: 3815450 - DNA, 25 bp, Homo sapien
actactacacagtttctctagctgg

SEQ ID NO: 3815451 - DNA, 25 bp, Homo sapien
tgcttacattcacactactacacag

SEQ ID NO: 3815452 - DNA, 25 bp, Homo sapien
cattcacactactacacagtttctc

SEQ ID NO: 3815453 - DNA, 25 bp, Homo sapien
gggcggtgattctccacttgtagat

SEQ ID NO: 3815454 - DNA, 25 bp, Homo sapien
cacatgctcactgttgcaggacgga

SEQ ID NO: 3815455 - DNA, 25 bp, Homo sapien
ctaaatgttagggtgatctgccttc

SEQ ID NO: 3815456 - DNA, 25 bp, Homo sapien
tgtagatccggccatgaggatttag

SEQ ID NO: 3815457 - DNA, 25 bp, Homo sapien
tctatgacaaacctgaccatggcag

SEQ ID NO: 3815458 - DNA, 25 bp, Homo sapien
ccatggcagtattgctagaagtctc

SEQ ID NO: 3815459 - DNA, 25 bp, Homo sapien
gaggcagtcagagagccatctatga

SEQ ID NO: 3815460 - DNA, 25 bp, Homo sapien
caaatcgcagtctgaatcctgaggc

SEQ ID NO: 3815461 - DNA, 25 bp, Homo sapien
gccagaggaattctgaaggttaaaa

SEQ ID NO: 3815462 - DNA, 25 bp, Homo sapien
gatagtcccaggtctccacaaagtc

SEQ ID NO: 3815463 - DNA, 25 bp, Homo sapien
cagaagtatgatagtcccaggtctc

SEQ ID NO: 3815464 - DNA, 25 bp, Homo sapien
caaaagagatggtgagatagtgtct

SEQ ID NO: 3815465 - DNA, 25 bp, Homo sapien
gagatgccaatcacagaataagttg

SEQ ID NO: 3815466 - DNA, 25 bp, Homo sapien
atgccaatcacagaataagttgtct

SEQ ID NO: 3815467 - DNA, 25 bp, Homo sapien
ctggagatgccaatcacagaataag

SEQ ID NO: 3815468 - DNA, 25 bp, Homo sapien
tggagatgccaatcacagaataagt

SEQ ID NO: 3815469 - DNA, 25 bp, Homo sapien
gaatcagctttatggatgtagatgt

SEQ ID NO: 3815470 - DNA, 25 bp, Homo sapien
cagaatcagctttatggatgtagat

SEQ ID NO: 3815471 - DNA, 25 bp, Homo sapien
agaatcagctttatggatgtagatg

SEQ ID NO: 3815472 - DNA, 25 bp, Homo sapien
aatcagctttatggatgtagatgtt

SEQ ID NO: 3815473 - DNA, 25 bp, Homo sapien
aaactgaacaaacatttgattatcc

SEQ ID NO: 3815474 - DNA, 25 bp, Homo sapien
aactgaacaaacatttgattatccg

SEQ ID NO: 3815475 - DNA, 25 bp, Homo sapien
actgaacaaacatttgattatccga

SEQ ID NO: 3815476 - DNA, 25 bp, Homo sapien
ctgaacaaacatttgattatccgag

SEQ ID NO: 3815477 - DNA, 25 bp, Homo sapien
tggacagcaatggtcaggccacttt

SEQ ID NO: 3815478 - DNA, 25 bp, Homo sapien
aatccccctggttgcaagaagaatc

SEQ ID NO: 3815479 - DNA, 25 bp, Homo sapien
atggacagcaatggtcaggccactt

SEQ ID NO: 3815480 - DNA, 25 bp, Homo sapien
agtaatccccctggttgcaagaaga

SEQ ID NO: 3815481 - DNA, 25 bp, Homo sapien
cactggagtccaaggtgaagcggat

SEQ ID NO: 3815482 - DNA, 25 bp, Homo sapien
acactggagtccaaggtgaagcgga

SEQ ID NO: 3815483 - DNA, 25 bp, Homo sapien
tggagtccaaggtgaagcggatgac

SEQ ID NO: 3815484 - DNA, 25 bp, Homo sapien
ttacactggagtccaaggtgaagcg

SEQ ID NO: 3815485 - DNA, 25 bp, Homo sapien
cacagagaactgctagcttctgggc

SEQ ID NO: 3815486 - DNA, 25 bp, Homo sapien
actctcagtagaccggatgggccca

SEQ ID NO: 3815487 - DNA, 25 bp, Homo sapien
cgtgtactctcagtagaccggatgg

SEQ ID NO: 3815488 - DNA, 25 bp, Homo sapien
agcttctgggccaagtcattttctc

SEQ ID NO: 3815489 - DNA, 25 bp, Homo sapien
tcagccatcagttcacttttttcaa

SEQ ID NO: 3815490 - DNA, 25 bp, Homo sapien
cagccatcagttcacttttttcaaa

SEQ ID NO: 3815491 - DNA, 25 bp, Homo sapien
agctcaggaatcactagttctaaaa

SEQ ID NO: 3815492 - DNA, 25 bp, Homo sapien
tagctcaggaatcactagttctaaa

SEQ ID NO: 3815493 - DNA, 25 bp, Homo sapien
ggaaagcgccatgtgttcagagcag

SEQ ID NO: 3815494 - DNA, 25 bp, Homo sapien
tcctggcagccgtaggtgtgcgtta

SEQ ID NO: 3815495 - DNA, 25 bp, Homo sapien
cgtgctgtggatggaaagcgccatg

SEQ ID NO: 3815496 - DNA, 25 bp, Homo sapien
tccagatttcatgcccgtgctgtgg

SEQ ID NO: 3815497 - DNA, 25 bp, Homo sapien
tatgaggctatcgtttgcgtccaca

SEQ ID NO: 3815498 - DNA, 25 bp, Homo sapien
ttgaatatgaggctatcgtttgcgt

SEQ ID NO: 3815499 - DNA, 25 bp, Homo sapien
gaggctatcgtttgcgtccacaaga

SEQ ID NO: 3815500 - DNA, 25 bp, Homo sapien
gctatcgtttgcgtccacaagacaa

SEQ ID NO: 3815501 - DNA, 25 bp, Homo sapien
cttggtatcagagtttacatgaacc

SEQ ID NO: 3815502 - DNA, 25 bp, Homo sapien
tggtatcagagtttacatgaaccat

SEQ ID NO: 3815503 - DNA, 25 bp, Homo sapien
ttggtatcagagtttacatgaacca

SEQ ID NO: 3815504 - DNA, 25 bp, Homo sapien
tgtcatggcagtagatagtcgtgga

SEQ ID NO: 3815505 - DNA, 25 bp, Homo sapien
tagtctgtctgggtcgttttctgcc

SEQ ID NO: 3815506 - DNA, 25 bp, Homo sapien
caaggtaatacaacaagccaagtac

SEQ ID NO: 3815507 - DNA, 25 bp, Homo sapien
ttttctgcctgagagcgggaaccca

SEQ ID NO: 3815508 - DNA, 25 bp, Homo sapien
acctgcttgttattattgggagccc

SEQ ID NO: 3815509 - DNA, 25 bp, Homo sapien
ccaagccagggttattaatcaaagc

SEQ ID NO: 3815510 - DNA, 25 bp, Homo sapien
gattttgaaatcctgccgccagata

SEQ ID NO: 3815511 - DNA, 25 bp, Homo sapien
ccgccagatattgggaagctcacaa

SEQ ID NO: 3815512 - DNA, 25 bp, Homo sapien
gaaatcttgcccctggtcttcttgt

SEQ ID NO: 3815513 - DNA, 25 bp, Homo sapien
aaatcttgcccctggtcttcttgtt

SEQ ID NO: 3815514 - DNA, 25 bp, Homo sapien
tcagaaatcttgcccctggtcttct

SEQ ID NO: 3815515 - DNA, 25 bp, Homo sapien
agaaatcttgcccctggtcttcttg

SEQ ID NO: 3815516 - DNA, 25 bp, Homo sapien
ctaagaacacaacagtttctctttt

SEQ ID NO: 3815517 - DNA, 25 bp, Homo sapien
tatagatctttgattttggaaccaa

SEQ ID NO: 3815518 - DNA, 25 bp, Homo sapien
gagcaccaatttcttcagcaagttg

SEQ ID NO: 3815519 - DNA, 25 bp, Homo sapien
ttgactctggagcaccaatttcttc

SEQ ID NO: 3815520 - DNA, 25 bp, Homo sapien
ctataggtggtatgacactgtctgg

SEQ ID NO: 3815521 - DNA, 25 bp, Homo sapien
taaagtcaggttctggtcttttctg

SEQ ID NO: 3815522 - DNA, 25 bp, Homo sapien
tggctgtggcttgaatctaaagtca

SEQ ID NO: 3815523 - DNA, 25 bp, Homo sapien
gagtgtgtaattgagaggcgctata

SEQ ID NO: 3815524 - DNA, 25 bp, Homo sapien
ttcaattgatcttctgtgaatttgg

SEQ ID NO: 3815525 - DNA, 25 bp, Homo sapien
tcaattgatcttctgtgaatttggt

SEQ ID NO: 3815526 - DNA, 25 bp, Homo sapien
caattgatcttctgtgaatttggtg

SEQ ID NO: 3815527 - DNA, 25 bp, Homo sapien
tttcaattgatcttctgtgaatttg

SEQ ID NO: 3815528 - DNA, 25 bp, Homo sapien
aaggtggaatccgactctggatcat

SEQ ID NO: 3815529 - DNA, 25 bp, Homo sapien
ctgccatttgagtggaaggtggaat

SEQ ID NO: 3815530 - DNA, 25 bp, Homo sapien
ctgtggctgccatttgagtggaagg

SEQ ID NO: 3815531 - DNA, 25 bp, Homo sapien
tgagtggaaggtggaatccgactct

SEQ ID NO: 3815532 - DNA, 25 bp, Homo sapien
gtggccacagcattaaagtgtcagt

SEQ ID NO: 3815533 - DNA, 25 bp, Homo sapien
aacaaattacgatgccgatcccgga

SEQ ID NO: 3815534 - DNA, 25 bp, Homo sapien
aagaccaactcaggttccagttaga

SEQ ID NO: 3815535 - DNA, 25 bp, Homo sapien
tctatggtccgtggcgtggtcagct

SEQ ID NO: 3815536 - DNA, 25 bp, Homo sapien
tgtttaggcaggttggtgtcgacct

SEQ ID NO: 3815537 - DNA, 25 bp, Homo sapien
tcaccatgtttaggcaggttggtgt

SEQ ID NO: 3815538 - DNA, 25 bp, Homo sapien
taggcaggttggtgtcgacctcctg

SEQ ID NO: 3815539 - DNA, 25 bp, Homo sapien
ccatgtttaggcaggttggtgtcga

SEQ ID NO: 3815540 - DNA, 25 bp, Homo sapien
caggacgcgacttccctgaggcgga

SEQ ID NO: 3815541 - DNA, 25 bp, Homo sapien
cagcgtcctgggtctctttggccca

SEQ ID NO: 3815542 - DNA, 25 bp, Homo sapien
cagctggtgggcgtagggctggcca

SEQ ID NO: 3815543 - DNA, 25 bp, Homo sapien
gctgaggacgaacaaggactgggct

SEQ ID NO: 3815544 - DNA, 25 bp, Homo sapien
cagttgttcatccacagtcacaggg

SEQ ID NO: 3815545 - DNA, 25 bp, Homo sapien
aattccacacgaaatttgggcaggg

SEQ ID NO: 3815546 - DNA, 25 bp, Homo sapien
gatgatgggatccagcagtccagtg

SEQ ID NO: 3815547 - DNA, 25 bp, Homo sapien
taagctggctcactagagagggtca

SEQ ID NO: 3815548 - DNA, 25 bp, Homo sapien
gaggaggaagtgtactccaaatcaa

SEQ ID NO: 3815549 - DNA, 25 bp, Homo sapien
tccaaatcaagcgatagtccatccg

SEQ ID NO: 3815550 - DNA, 25 bp, Homo sapien
tttgcaccacactaactaaccggcg

SEQ ID NO: 3815551 - DNA, 25 bp, Homo sapien
tccgtccttggcacggtgactgccg

SEQ ID NO: 3815552 - DNA, 25 bp, Homo sapien
cggctgcgagcaggttcggtgctgc

SEQ ID NO: 3815553 - DNA, 25 bp, Homo sapien
tccggcgagtcagcgcgactgtgaa

SEQ ID NO: 3815554 - DNA, 25 bp, Homo sapien
aagccgtccccatgccggtctcttt

SEQ ID NO: 3815555 - DNA, 25 bp, Homo sapien
gctgacctgaggagtcgcggctgcg

SEQ ID NO: 3815556 - DNA, 25 bp, Homo sapien
taactctcacttgatcatgaatgaa

SEQ ID NO: 3815557 - DNA, 25 bp, Homo sapien
agcgttaggtttacaggcaggagcc

SEQ ID NO: 3815558 - DNA, 25 bp, Homo sapien
ataactctcacttgatcatgaatga

SEQ ID NO: 3815559 - DNA, 25 bp, Homo sapien
tcccaagcgttaggtttacaggcag

SEQ ID NO: 3815560 - DNA, 25 bp, Homo sapien
gcatatcccacatacatgcatgaat

SEQ ID NO: 3815561 - DNA, 25 bp, Homo sapien
ctaatgttgtaacaagggtcaaggg

SEQ ID NO: 3815562 - DNA, 25 bp, Homo sapien
ggtggcatatcccacatacatgcat

SEQ ID NO: 3815563 - DNA, 25 bp, Homo sapien
gtcagatggttaatgtgctaatgtt

SEQ ID NO: 3815564 - DNA, 25 bp, Homo sapien
aatactctttaacggctgcaggagc

SEQ ID NO: 3815565 - DNA, 25 bp, Homo sapien
caaggtgtttcaagtcttgttaggg

SEQ ID NO: 3815566 - DNA, 25 bp, Homo sapien
gataacccctgttttattcgtgatg

SEQ ID NO: 3815567 - DNA, 25 bp, Homo sapien
cactgagtgccttcttgaagagacc

SEQ ID NO: 3815568 - DNA, 25 bp, Homo sapien
acctgtagttccagctgcttgggag

SEQ ID NO: 3815569 - DNA, 25 bp, Homo sapien
gcgacagggcaagaccctgtttcaa

SEQ ID NO: 3815570 - DNA, 25 bp, Homo sapien
gctgaggtaggaggatcacttgagc

SEQ ID NO: 3815571 - DNA, 25 bp, Homo sapien
aattcgccaggtgtggtgggtgcac

SEQ ID NO: 3815572 - DNA, 25 bp, Homo sapien
gtgttgtgccagttatagtatgtgt

SEQ ID NO: 3815573 - DNA, 25 bp, Homo sapien
tgttgtgccagttatagtatgtgtg

SEQ ID NO: 3815574 - DNA, 25 bp, Homo sapien
tgtgttgtgccagttatagtatgtg

SEQ ID NO: 3815575 - DNA, 25 bp, Homo sapien
ggttggcaggattatgagcagttgg

SEQ ID NO: 3815576 - DNA, 25 bp, Homo sapien
gagggttggcaggattatgagcagt

SEQ ID NO: 3815577 - DNA, 25 bp, Homo sapien
tgccacattgcctttacaacatcat

SEQ ID NO: 3815578 - DNA, 25 bp, Homo sapien
acattgcctttacaacatcataggg

SEQ ID NO: 3815579 - DNA, 25 bp, Homo sapien
tagagccactgagcttcgtgctgca

SEQ ID NO: 3815580 - DNA, 25 bp, Homo sapien
ccttgactgaacatcatgcggcatg

SEQ ID NO: 3815581 - DNA, 25 bp, Homo sapien
tccaggtaactgaagcattgctatg

SEQ ID NO: 3815582 - DNA, 25 bp, Homo sapien
gagtttgcatccatctcataggaag

SEQ ID NO: 3815583 - DNA, 25 bp, Homo sapien
catgagcccgcttggtttctgtaca

SEQ ID NO: 3815584 - DNA, 25 bp, Homo sapien
tcctttctttatcgcatgagcccgc

SEQ ID NO: 3815585 - DNA, 25 bp, Homo sapien
ttctgtacattttgtccgctggtgc

SEQ ID NO: 3815586 - DNA, 25 bp, Homo sapien
ggtgctgacggctggacaccctttc

SEQ ID NO: 3815587 - DNA, 25 bp, Homo sapien
ctgcggtgttatcacggccactgcc

SEQ ID NO: 3815588 - DNA, 25 bp, Homo sapien
tgcggtgttatcacggccactgccc

SEQ ID NO: 3815589 - DNA, 25 bp, Homo sapien
catgtcttggacactggaataaaca

SEQ ID NO: 3815590 - DNA, 25 bp, Homo sapien
aataaacaggatgtggcgaagcctt

SEQ ID NO: 3815591 - DNA, 25 bp, Homo sapien
cttgctggggctcccatagactgtt

SEQ ID NO: 3815592 - DNA, 25 bp, Homo sapien
tgatttttactgatgaagacagtgc

SEQ ID NO: 3815593 - DNA, 25 bp, Homo sapien
aaagaggcttgacagtttgtcctgt

SEQ ID NO: 3815594 - DNA, 25 bp, Homo sapien
gtcctgtctcgaggtttcctctata

SEQ ID NO: 3815595 - DNA, 25 bp, Homo sapien
aataagctcaatcagaaacgaaaca

SEQ ID NO: 3815596 - DNA, 25 bp, Homo sapien
cacaaccctccttgattaaaccagg

SEQ ID NO: 3815597 - DNA, 25 bp, Homo sapien
tacgaccagacgaattcacaactga

SEQ ID NO: 3815598 - DNA, 25 bp, Homo sapien
taaccaagataagagcagtactaaa

SEQ ID NO: 3815599 - DNA, 25 bp, Homo sapien
cctcctggtccatcaaggccttggg

SEQ ID NO: 3815600 - DNA, 25 bp, Homo sapien
gctgcggttgcgaagcctcctggtc

SEQ ID NO: 3815601 - DNA, 25 bp, Homo sapien
ccatctgcagatgcactaatggctg

SEQ ID NO: 3815602 - DNA, 25 bp, Homo sapien
tacttggataattgcttccttgggt

SEQ ID NO: 3815603 - DNA, 25 bp, Homo sapien
caatctcattgctctggaggtgcgc

SEQ ID NO: 3815604 - DNA, 25 bp, Homo sapien
gccagccataaatctccccaaaatg

SEQ ID NO: 3815605 - DNA, 25 bp, Homo sapien
gagacgacttgtcattctgcgtcct

SEQ ID NO: 3815606 - DNA, 25 bp, Homo sapien
aggtgcgctgcttgcccctggagac

SEQ ID NO: 3815607 - DNA, 25 bp, Homo sapien
tgtacccatttgttgctccatccat

SEQ ID NO: 3815608 - DNA, 25 bp, Homo sapien
tgcaggcaggacgtcactctggggc

SEQ ID NO: 3815609 - DNA, 25 bp, Homo sapien
atccatcccaatgcatgactgacaa

SEQ ID NO: 3815610 - DNA, 25 bp, Homo sapien
ggcaggacgtcactctggggctcct

SEQ ID NO: 3815611 - DNA, 25 bp, Homo sapien
cctgggcggagacaagatgatccat

SEQ ID NO: 3815612 - DNA, 25 bp, Homo sapien
gggcctgggcggagacaagatgatc

SEQ ID NO: 3815613 - DNA, 25 bp, Homo sapien
gcctgggcggagacaagatgatcca

SEQ ID NO: 3815614 - DNA, 25 bp, Homo sapien
tgggcctgggcggagacaagatgat

SEQ ID NO: 3815615 - DNA, 25 bp, Homo sapien
catgactcataggaaatctcaaggg

SEQ ID NO: 3815616 - DNA, 25 bp, Homo sapien
tctctgactgtaatggaattcaact

SEQ ID NO: 3815617 - DNA, 25 bp, Homo sapien
aagatggtggatagcactaaatgcc

SEQ ID NO: 3815618 - DNA, 25 bp, Homo sapien
ttcttttcaaatgcccgtggaacat

SEQ ID NO: 3815619 - DNA, 25 bp, Homo sapien
gcaagctgtagagggtgccgtgagg

SEQ ID NO: 3815620 - DNA, 25 bp, Homo sapien
gctctggtggcggagacttgagctt

SEQ ID NO: 3815621 - DNA, 25 bp, Homo sapien
ctggtggcggagacttgagctttct

SEQ ID NO: 3815622 - DNA, 25 bp, Homo sapien
gggcaagctgtagagggtgccgtga

SEQ ID NO: 3815623 - DNA, 25 bp, Homo sapien
ggtcccatccctgcatagggcttgg

SEQ ID NO: 3815624 - DNA, 25 bp, Homo sapien
cctaaactgagcattgctgcggctg

SEQ ID NO: 3815625 - DNA, 25 bp, Homo sapien
ctgaggcccgtgcacctggtcccat

SEQ ID NO: 3815626 - DNA, 25 bp, Homo sapien
tggaagaagacactggccctgccct

SEQ ID NO: 3815627 - DNA, 25 bp, Homo sapien
gagttgggtggcagttggagacccc

SEQ ID NO: 3815628 - DNA, 25 bp, Homo sapien
ccagcatactctggcaggcagtgtg

SEQ ID NO: 3815629 - DNA, 25 bp, Homo sapien
gggatgaccagcatactctggcagg

SEQ ID NO: 3815630 - DNA, 25 bp, Homo sapien
cgtccacttggatcctgggggacaa

SEQ ID NO: 3815631 - DNA, 25 bp, Homo sapien
ggtaggctgcggctgaaatggaggg

SEQ ID NO: 3815632 - DNA, 25 bp, Homo sapien
cccctgagctgtccaaagcagctcc

SEQ ID NO: 3815633 - DNA, 25 bp, Homo sapien
ctcctggtaggctgcggctgaaatg

SEQ ID NO: 3815634 - DNA, 25 bp, Homo sapien
cctgagctgtccaaagcagctcctg

SEQ ID NO: 3815635 - DNA, 25 bp, Homo sapien
ctcaagcttggggccagtccactgg

SEQ ID NO: 3815636 - DNA, 25 bp, Homo sapien
agtccactggggctccacgaatgac

SEQ ID NO: 3815637 - DNA, 25 bp, Homo sapien
agcagaggggctcaagcttggggcc

SEQ ID NO: 3815638 - DNA, 25 bp, Homo sapien
cagtccactggggctccacgaatga

SEQ ID NO: 3815639 - DNA, 25 bp, Homo sapien
gcagaaacaggttggagcattgctg

SEQ ID NO: 3815640 - DNA, 25 bp, Homo sapien
gtgcagaaacaggttggagcattgc

SEQ ID NO: 3815641 - DNA, 25 bp, Homo sapien
ctggtgcagaaacaggttggagcat

SEQ ID NO: 3815642 - DNA, 25 bp, Homo sapien
gagggggtgctctgcatcattttcc

SEQ ID NO: 3815643 - DNA, 25 bp, Homo sapien
cccgtatagctgaggaatgctgggc

SEQ ID NO: 3815644 - DNA, 25 bp, Homo sapien
tgcccaactgcaagggccgtagaga

SEQ ID NO: 3815645 - DNA, 25 bp, Homo sapien
tcttgcagagcttcgtggttgacca

SEQ ID NO: 3815646 - DNA, 25 bp, Homo sapien
gcaggattgctgtcgccgttgtaca

SEQ ID NO: 3815647 - DNA, 25 bp, Homo sapien
ctcagtttaaaaatagctgcagttc

SEQ ID NO: 3815648 - DNA, 25 bp, Homo sapien
gtttaaaaatagctgcagttcctac

SEQ ID NO: 3815649 - DNA, 25 bp, Homo sapien
ttcacacatactcaaagcaatttta

SEQ ID NO: 3815650 - DNA, 25 bp, Homo sapien
taatttgtaggaaatctcagtttaa

SEQ ID NO: 3815651 - DNA, 25 bp, Homo sapien
cacacaggggccaggtaaagggacg

SEQ ID NO: 3815652 - DNA, 25 bp, Homo sapien
ctcccacacaggggccaggtaaagg

SEQ ID NO: 3815653 - DNA, 25 bp, Homo sapien
cctcccacacaggggccaggtaaag

SEQ ID NO: 3815654 - DNA, 25 bp, Homo sapien
ctcccctcccacacaggggccaggt

SEQ ID NO: 3815655 - DNA, 25 bp, Homo sapien
cctcctgaagaggtaagccctttgt

SEQ ID NO: 3815656 - DNA, 25 bp, Homo sapien
gactcccaggctagacagagcagaa

SEQ ID NO: 3815657 - DNA, 25 bp, Homo sapien
gggaccaggacattccgagtcttga

SEQ ID NO: 3815658 - DNA, 25 bp, Homo sapien
tgactgtctgttgggacacccaggg

SEQ ID NO: 3815659 - DNA, 25 bp, Homo sapien
tcctcctgagagtcactgggcagcg

SEQ ID NO: 3815660 - DNA, 25 bp, Homo sapien
tctcctcctgagagtcactgggcag

SEQ ID NO: 3815661 - DNA, 25 bp, Homo sapien
cctgagagtcactgggcagcgtggg

SEQ ID NO: 3815662 - DNA, 25 bp, Homo sapien
ctcctgagagtcactgggcagcgtg

SEQ ID NO: 3815663 - DNA, 25 bp, Homo sapien
aaccatcgtcccctgtcactgcagc

SEQ ID NO: 3815664 - DNA, 25 bp, Homo sapien
agtgaggcgggctgtcctcgcccct

SEQ ID NO: 3815665 - DNA, 25 bp, Homo sapien
gagccttttaagcaaatcagcaatg

SEQ ID NO: 3815666 - DNA, 25 bp, Homo sapien
tggctgccgcagaggactagccaca

SEQ ID NO: 3815667 - DNA, 25 bp, Homo sapien
tgatgctctctagtcccaatctggg

SEQ ID NO: 3815668 - DNA, 25 bp, Homo sapien
tttcccacaatgttcaagtttgcag

SEQ ID NO: 3815669 - DNA, 25 bp, Homo sapien
tgaaggcaatgccttggggccctca

SEQ ID NO: 3815670 - DNA, 25 bp, Homo sapien
gttcaagtttgcagagggaccctgg

SEQ ID NO: 3815671 - DNA, 25 bp, Homo sapien
catttccaggtattggtgcctcccc

SEQ ID NO: 3815672 - DNA, 25 bp, Homo sapien
gggagcctgcccagagcccttgcgg

SEQ ID NO: 3815673 - DNA, 25 bp, Homo sapien
attcacacatttccaggtattggtg

SEQ ID NO: 3815674 - DNA, 25 bp, Homo sapien
caggtattggtgcctcccccgggag

SEQ ID NO: 3815675 - DNA, 25 bp, Homo sapien
ccactctctgcgtagctcttgggtg

SEQ ID NO: 3815676 - DNA, 25 bp, Homo sapien
tagctcttgggtgcaggctggcaag

SEQ ID NO: 3815677 - DNA, 25 bp, Homo sapien
tctgcgtagctcttgggtgcaggct

SEQ ID NO: 3815678 - DNA, 25 bp, Homo sapien
actctctgcgtagctcttgggtgca

SEQ ID NO: 3815679 - DNA, 25 bp, Homo sapien
tgacagcaggtaagggctttctccc

SEQ ID NO: 3815680 - DNA, 25 bp, Homo sapien
ggcctcaaaactttcgttatatgga

SEQ ID NO: 3815681 - DNA, 25 bp, Homo sapien
tatggaagcttgatgagtaaaagtt

SEQ ID NO: 3815682 - DNA, 25 bp, Homo sapien
agtaaaagttggtctggttgacagc

SEQ ID NO: 3815683 - DNA, 25 bp, Homo sapien
acctggggccatggaaggccaggac

SEQ ID NO: 3815684 - DNA, 25 bp, Homo sapien
aggccacctggggccatggaaggcc

SEQ ID NO: 3815685 - DNA, 25 bp, Homo sapien
cacctggggccatggaaggccagga

SEQ ID NO: 3815686 - DNA, 25 bp, Homo sapien
gccacctggggccatggaaggccag

SEQ ID NO: 3815687 - DNA, 25 bp, Homo sapien
ctggcaccctccttggcagcagaaa

SEQ ID NO: 3815688 - DNA, 25 bp, Homo sapien
ggcaccctccttggcagcagaaagg

SEQ ID NO: 3815689 - DNA, 25 bp, Homo sapien
cagagaaggtgccagttggaggcat

SEQ ID NO: 3815690 - DNA, 25 bp, Homo sapien
aaaggacagagaaggtgccagttgg

SEQ ID NO: 3815691 - DNA, 25 bp, Homo sapien
gaactatagagggctctgggttggg

SEQ ID NO: 3815692 - DNA, 25 bp, Homo sapien
aggaactatagagggctctgggttg

SEQ ID NO: 3815693 - DNA, 25 bp, Homo sapien
ctatagagggctctgggttgggatc

SEQ ID NO: 3815694 - DNA, 25 bp, Homo sapien
aactatagagggctctgggttggga

SEQ ID NO: 3815695 - DNA, 25 bp, Homo sapien
gagcgccgagacagaacacatgtgg

SEQ ID NO: 3815696 - DNA, 25 bp, Homo sapien
cagtggagcgccgagacagaacaca

SEQ ID NO: 3815697 - DNA, 25 bp, Homo sapien
gtccccagtggagcgccgagacaga

SEQ ID NO: 3815698 - DNA, 25 bp, Homo sapien
tggagcgccgagacagaacacatgt

SEQ ID NO: 3815699 - DNA, 25 bp, Homo sapien
tgggtgtagcactgacttcccccga

SEQ ID NO: 3815700 - DNA, 25 bp, Homo sapien
gtgtagcactgacttcccccgaagc

SEQ ID NO: 3815701 - DNA, 25 bp, Homo sapien
ctgtgggtgtagcactgacttcccc

SEQ ID NO: 3815702 - DNA, 25 bp, Homo sapien
cctgtgggtgtagcactgacttccc

SEQ ID NO: 3815703 - DNA, 25 bp, Homo sapien
gagggcgcaatgagactgctccact

SEQ ID NO: 3815704 - DNA, 25 bp, Homo sapien
aatgagactgctccactgtgactcc

SEQ ID NO: 3815705 - DNA, 25 bp, Homo sapien
ccccgagggcgcaatgagactgctc

SEQ ID NO: 3815706 - DNA, 25 bp, Homo sapien
ctgtgaggcatggtccactgttgga

SEQ ID NO: 3815707 - DNA, 25 bp, Homo sapien
gtaggccaacgctcctcaggaggcc

SEQ ID NO: 3815708 - DNA, 25 bp, Homo sapien
caacgctcctcaggaggccagcaga

SEQ ID NO: 3815709 - DNA, 25 bp, Homo sapien
ctcgggctgtgccaggtaggccaac

SEQ ID NO: 3815710 - DNA, 25 bp, Homo sapien
cttccaggcactgggctcgggctgt

SEQ ID NO: 3815711 - DNA, 25 bp, Homo sapien
tgcctctgcctgttacttccacagt

SEQ ID NO: 3815712 - DNA, 25 bp, Homo sapien
cgtggcctccacatggcccttctga

SEQ ID NO: 3815713 - DNA, 25 bp, Homo sapien
tggcctccacatggcccttctgagt

SEQ ID NO: 3815714 - DNA, 25 bp, Homo sapien
tccacatggcccttctgagtggggc

SEQ ID NO: 3815715 - DNA, 25 bp, Homo sapien
cacatggcccttctgagtggggccc

SEQ ID NO: 3815716 - DNA, 25 bp, Homo sapien
cctgctcccttaggagggtcactgc

SEQ ID NO: 3815717 - DNA, 25 bp, Homo sapien
tgctcccttaggagggtcactgcag

SEQ ID NO: 3815718 - DNA, 25 bp, Homo sapien
ctgctcccttaggagggtcactgca

SEQ ID NO: 3815719 - DNA, 25 bp, Homo sapien
tggggaggatgagcctgctccctta

SEQ ID NO: 3815720 - DNA, 25 bp, Homo sapien
cagagccgcatctgggtgcatcacc

SEQ ID NO: 3815721 - DNA, 25 bp, Homo sapien
atctacctctttatgtaaccagcag

SEQ ID NO: 3815722 - DNA, 25 bp, Homo sapien
acctctttatgtaaccagcagacag

SEQ ID NO: 3815723 - DNA, 25 bp, Homo sapien
tacctctttatgtaaccagcagaca

SEQ ID NO: 3815724 - DNA, 25 bp, Homo sapien
accgcatcgctgccttcaggaactt

SEQ ID NO: 3815725 - DNA, 25 bp, Homo sapien
tgcaccttccgagcactggaggcag

SEQ ID NO: 3815726 - DNA, 25 bp, Homo sapien
gtcagggttaatgccaacatgcaaa

SEQ ID NO: 3815727 - DNA, 25 bp, Homo sapien
acatgcaaataagaatgcaaacaca

SEQ ID NO: 3815728 - DNA, 25 bp, Homo sapien
ggtggctgcgcagatgccagggcac

SEQ ID NO: 3815729 - DNA, 25 bp, Homo sapien
ttcacacagcaatccgggtggctgc

SEQ ID NO: 3815730 - DNA, 25 bp, Homo sapien
agattgggaacatgtttcacacagc

SEQ ID NO: 3815731 - DNA, 25 bp, Homo sapien
ctatcacaggggtgtaaggaaggca

SEQ ID NO: 3815732 - DNA, 25 bp, Homo sapien
aactggtgctgataagacaccagcc

SEQ ID NO: 3815733 - DNA, 25 bp, Homo sapien
ctaactggtgctgataagacaccag

SEQ ID NO: 3815734 - DNA, 25 bp, Homo sapien
ctggtgctgataagacaccagcccc

SEQ ID NO: 3815735 - DNA, 25 bp, Homo sapien
tgataagacaccagcccccatgcac

SEQ ID NO: 3815736 - DNA, 25 bp, Homo sapien
gtgatagggcgttgctgcctgccag

SEQ ID NO: 3815737 - DNA, 25 bp, Homo sapien
ggtgtgatagggcgttgctgcctgc

SEQ ID NO: 3815738 - DNA, 25 bp, Homo sapien
ctggtgtgatagggcgttgctgcct

SEQ ID NO: 3815739 - DNA, 25 bp, Homo sapien
tgtgatagggcgttgctgcctgcca

SEQ ID NO: 3815740 - DNA, 25 bp, Homo sapien
tcaggtcctgtgaccccgaggtgct

SEQ ID NO: 3815741 - DNA, 25 bp, Homo sapien
ggtgctgaccaaggacctcgcatgt

SEQ ID NO: 3815742 - DNA, 25 bp, Homo sapien
attgctgcaaggtgggcgctgtcat

SEQ ID NO: 3815743 - DNA, 25 bp, Homo sapien
cctcgggtggcccacaataggcagt

SEQ ID NO: 3815744 - DNA, 25 bp, Homo sapien
cagagccacattcacggctgcagga

SEQ ID NO: 3815745 - DNA, 25 bp, Homo sapien
tccgatgggtcgagaacagctcctt

SEQ ID NO: 3815746 - DNA, 25 bp, Homo sapien
ctgcaggagtcatggatccgtggcc

SEQ ID NO: 3815747 - DNA, 25 bp, Homo sapien
tggttctgcatactgggcgggctcc

SEQ ID NO: 3815748 - DNA, 25 bp, Homo sapien
gcggggaggcttgatgctcccagca

SEQ ID NO: 3815749 - DNA, 25 bp, Homo sapien
cggggaggcttgatgctcccagcag

SEQ ID NO: 3815750 - DNA, 25 bp, Homo sapien
agccgcggggaggcttgatgctccc

SEQ ID NO: 3815751 - DNA, 25 bp, Homo sapien
ccgcggggaggcttgatgctcccag

SEQ ID NO: 3815752 - DNA, 25 bp, Homo sapien
cttgagggcatcagcagcacctaga

SEQ ID NO: 3815753 - DNA, 25 bp, Homo sapien
aactccttgagggcatcagcagcac

SEQ ID NO: 3815754 - DNA, 25 bp, Homo sapien
tccttgagggcatcagcagcaccta

SEQ ID NO: 3815755 - DNA, 25 bp, Homo sapien
ctccttgagggcatcagcagcacct

SEQ ID NO: 3815756 - DNA, 25 bp, Homo sapien
ggtaaatgtgtttatgcgcatcatt

SEQ ID NO: 3815757 - DNA, 25 bp, Homo sapien
tgtttatgcgcatcatttccatcat

SEQ ID NO: 3815758 - DNA, 25 bp, Homo sapien
gctgctccctattaggggtaaatgt

SEQ ID NO: 3815759 - DNA, 25 bp, Homo sapien
agttgctgctccctattaggggtaa

SEQ ID NO: 3815760 - DNA, 25 bp, Homo sapien
gagagttctcctgtgtaagggatgc

SEQ ID NO: 3815761 - DNA, 25 bp, Homo sapien
ctgagagttctcctgtgtaagggat

SEQ ID NO: 3815762 - DNA, 25 bp, Homo sapien
tcctgagagttctcctgtgtaaggg

SEQ ID NO: 3815763 - DNA, 25 bp, Homo sapien
agttctcctgtgtaagggatgcaag

SEQ ID NO: 3815764 - DNA, 25 bp, Homo sapien
tgaaaggacgccggagccagtttcc

SEQ ID NO: 3815765 - DNA, 25 bp, Homo sapien
ctgaaaggacgccggagccagtttc

SEQ ID NO: 3815766 - DNA, 25 bp, Homo sapien
tgcatcccgcgtagcatccctgccc

SEQ ID NO: 3815767 - DNA, 25 bp, Homo sapien
cagtcggccagacctgcatcccgcg

SEQ ID NO: 3815768 - DNA, 25 bp, Homo sapien
gccagacctgcatcccgcgtagcat

SEQ ID NO: 3815769 - DNA, 25 bp, Homo sapien
ccgagccagtcggccagacctgcat

SEQ ID NO: 3815770 - DNA, 25 bp, Homo sapien
agggcgcgcagcagcgctgagtgcc

SEQ ID NO: 3815771 - DNA, 25 bp, Homo sapien
ctgagtgccccggaacgtgcgtcgc

SEQ ID NO: 3815772 - DNA, 25 bp, Homo sapien
ggcggccagactgagcgccgcaccc

SEQ ID NO: 3815773 - DNA, 25 bp, Homo sapien
cttcagtcccgcgaccgaagcaggg

SEQ ID NO: 3815774 - DNA, 25 bp, Homo sapien
cgaaggcgacgtccggtgccgcggg

SEQ ID NO: 3815775 - DNA, 25 bp, Homo sapien
ccagcgcgcacgggcgatggcgaag

SEQ ID NO: 3815776 - DNA, 25 bp, Homo sapien
gcgatggcgaaggcgacgtccggtg

SEQ ID NO: 3815777 - DNA, 25 bp, Homo sapien
atggcgaaggcgacgtccggtgccg

SEQ ID NO: 3815778 - DNA, 25 bp, Homo sapien
atgcaggacagggccttcctcctca

SEQ ID NO: 3815779 - DNA, 25 bp, Homo sapien
tcatttttcccatcctccaggacag

SEQ ID NO: 3815780 - DNA, 25 bp, Homo sapien
acagctgtgtttcctcatgcaggac

SEQ ID NO: 3815781 - DNA, 25 bp, Homo sapien
tcagggatgggggtacagctgtgtt

SEQ ID NO: 3815782 - DNA, 25 bp, Homo sapien
gcctgaacctccatggagctctggt

SEQ ID NO: 3815783 - DNA, 25 bp, Homo sapien
ctggtcccgcagctgtgtgatcatg

SEQ ID NO: 3815784 - DNA, 25 bp, Homo sapien
ttggcgctgagacaatgaggcctga

SEQ ID NO: 3815785 - DNA, 25 bp, Homo sapien
gcctgggcacttggattggcgctga

SEQ ID NO: 3815786 - DNA, 25 bp, Homo sapien
gctgcgcttccactcctggcccttg

SEQ ID NO: 3815787 - DNA, 25 bp, Homo sapien
ccaggttctagaccccctcccagat

SEQ ID NO: 3815788 - DNA, 25 bp, Homo sapien
gattcgggtgctgcagctgcgcttc

SEQ ID NO: 3815789 - DNA, 25 bp, Homo sapien
tagaccccctcccagattcgggtgc

SEQ ID NO: 3815790 - DNA, 25 bp, Homo sapien
tccagaggattctcgcccttgtgtt

SEQ ID NO: 3815791 - DNA, 25 bp, Homo sapien
ccagaggattctcgcccttgtgttc

SEQ ID NO: 3815792 - DNA, 25 bp, Homo sapien
actccagaggattctcgcccttgtg

SEQ ID NO: 3815793 - DNA, 25 bp, Homo sapien
gactccagaggattctcgcccttgt

SEQ ID NO: 3815794 - DNA, 25 bp, Homo sapien
cacacctcccagcccttgtgcctgg

SEQ ID NO: 3815795 - DNA, 25 bp, Homo sapien
ccactgggtggccacacctcccagc

SEQ ID NO: 3815796 - DNA, 25 bp, Homo sapien
ggccacacctcccagcccttgtgcc

SEQ ID NO: 3815797 - DNA, 25 bp, Homo sapien
cactgggtggccacacctcccagcc

SEQ ID NO: 3815798 - DNA, 25 bp, Homo sapien
cagctctccatcccttgtcctggtc

SEQ ID NO: 3815799 - DNA, 25 bp, Homo sapien
ccttgtcctggtccacatagcaggg

SEQ ID NO: 3815800 - DNA, 25 bp, Homo sapien
tgtcctggtccacatagcaggggct

SEQ ID NO: 3815801 - DNA, 25 bp, Homo sapien
atcccttgtcctggtccacatagca

SEQ ID NO: 3815802 - DNA, 25 bp, Homo sapien
cttgaggacattctcggaagacctg

SEQ ID NO: 3815803 - DNA, 25 bp, Homo sapien
cattctcggaagacctggactctga

SEQ ID NO: 3815804 - DNA, 25 bp, Homo sapien
actgccctcgaggaccttgaggaca

SEQ ID NO: 3815805 - DNA, 25 bp, Homo sapien
gacattctcggaagacctggactct

SEQ ID NO: 3815806 - DNA, 25 bp, Homo sapien
cccaggggacattgtcaagaggcag

SEQ ID NO: 3815807 - DNA, 25 bp, Homo sapien
attgtcaagaggcagaaccagggtg

SEQ ID NO: 3815808 - DNA, 25 bp, Homo sapien
ggaccccaggggacattgtcaagag

SEQ ID NO: 3815809 - DNA, 25 bp, Homo sapien
ggacattgtcaagaggcagaaccag

SEQ ID NO: 3815810 - DNA, 25 bp, Homo sapien
ctgagccaggatgagtgaccacagc

SEQ ID NO: 3815811 - DNA, 25 bp, Homo sapien
aagaggtttattctgagccaggatg

SEQ ID NO: 3815812 - DNA, 25 bp, Homo sapien
aaagaggtttattctgagccaggat

SEQ ID NO: 3815813 - DNA, 25 bp, Homo sapien
attctgagccaggatgagtgaccac

SEQ ID NO: 3815814 - DNA, 25 bp, Homo sapien
cttgagtaagtggtccccaggtcca

SEQ ID NO: 3815815 - DNA, 25 bp, Homo sapien
gcaaggacataaatcaacacacaga

SEQ ID NO: 3815816 - DNA, 25 bp, Homo sapien
gcttacaggttagaggtagatgcag

SEQ ID NO: 3815817 - DNA, 25 bp, Homo sapien
gtttggccccaaaatgcagggtatc

SEQ ID NO: 3815818 - DNA, 25 bp, Homo sapien
tcaggccattacaggccggtccagc

SEQ ID NO: 3815819 - DNA, 25 bp, Homo sapien
cagtggcatcaacgtccagtacaag

SEQ ID NO: 3815820 - DNA, 25 bp, Homo sapien
tgcctggctaaggtgttcccctgtg

SEQ ID NO: 3815821 - DNA, 25 bp, Homo sapien
gaaagtctgtgtggaaaactgccag

SEQ ID NO: 3815822 - DNA, 25 bp, Homo sapien
tgtaacttcgcagaaaagagtcgga

SEQ ID NO: 3815823 - DNA, 25 bp, Homo sapien
tagcaatgacaatgaccaaggactg

SEQ ID NO: 3815824 - DNA, 25 bp, Homo sapien
tcacgtgttcggtactgagcagcca

SEQ ID NO: 3815825 - DNA, 25 bp, Homo sapien
gagtcccagaattgctgacagcaga

SEQ ID NO: 3815826 - DNA, 25 bp, Homo sapien
tatgagttcaagacgtaagtgattc

SEQ ID NO: 3815827 - DNA, 25 bp, Homo sapien
taccaaaaggatatgactgaaagtg

SEQ ID NO: 3815828 - DNA, 25 bp, Homo sapien
catttatgactgtcttctgtcggac

SEQ ID NO: 3815829 - DNA, 25 bp, Homo sapien
tagacaagtctgttagagctggtga

SEQ ID NO: 3815830 - DNA, 25 bp, Homo sapien
taatggcataggctatcagagcaac

SEQ ID NO: 3815831 - DNA, 25 bp, Homo sapien
gggcaaccagtctgaaacgccaaat

SEQ ID NO: 3815832 - DNA, 25 bp, Homo sapien
gaagatgcggtcactgcaagaaaga

SEQ ID NO: 3815833 - DNA, 25 bp, Homo sapien
gaagaacattatcagaccagggcaa

SEQ ID NO: 3815834 - DNA, 25 bp, Homo sapien
taagcaagtcatatagtacctggca

SEQ ID NO: 3815835 - DNA, 25 bp, Homo sapien
tcatgggcccaaagataacgactta

SEQ ID NO: 3815836 - DNA, 25 bp, Homo sapien
tgctaacaatgttgaggtctcccat

SEQ ID NO: 3815837 - DNA, 25 bp, Homo sapien
cgagacagtagttcatagctaagca

SEQ ID NO: 3815838 - DNA, 25 bp, Homo sapien
attatttgcaaaggtaagttacagc

SEQ ID NO: 3815839 - DNA, 25 bp, Homo sapien
tggaaatgctatacgtttttgacat

SEQ ID NO: 3815840 - DNA, 25 bp, Homo sapien
aatggaaatgctatacgtttttgac

SEQ ID NO: 3815841 - DNA, 25 bp, Homo sapien
tttgcaaaggtaagttacagcttgt

SEQ ID NO: 3815842 - DNA, 25 bp, Homo sapien
cacttttcccaaaaggtgctgtggc

SEQ ID NO: 3815843 - DNA, 25 bp, Homo sapien
tgtgctgacaatgaaccaggtgcct

SEQ ID NO: 3815844 - DNA, 25 bp, Homo sapien
agtctacagcgagcactgactgtgc

SEQ ID NO: 3815845 - DNA, 25 bp, Homo sapien
cggcaccaaggccagtctacagcga

SEQ ID NO: 3815846 - DNA, 25 bp, Homo sapien
ctgccccaggggacccatgtctccg

SEQ ID NO: 3815847 - DNA, 25 bp, Homo sapien
cccaggggacccatgtctccggcca

SEQ ID NO: 3815848 - DNA, 25 bp, Homo sapien
ggccagcagcaaggccaccccctca

SEQ ID NO: 3815849 - DNA, 25 bp, Homo sapien
aggggacccatgtctccggccagca

SEQ ID NO: 3815850 - DNA, 25 bp, Homo sapien
gtactagaactgatcacccgtgaag

SEQ ID NO: 3815851 - DNA, 25 bp, Homo sapien
tgcacgtgggtgtgtacagaaaccg

SEQ ID NO: 3815852 - DNA, 25 bp, Homo sapien
aaaacacctctcagtattgggcagt

SEQ ID NO: 3815853 - DNA, 25 bp, Homo sapien
cattgatcaaggctcctgcggaaac

SEQ ID NO: 3815854 - DNA, 25 bp, Homo sapien
tctaaaatgtagttgaagaatgatt

SEQ ID NO: 3815855 - DNA, 25 bp, Homo sapien
gatttgctggacacattgtcacaga

SEQ ID NO: 3815856 - DNA, 25 bp, Homo sapien
cacattgtcacagaaaatatgctgc

SEQ ID NO: 3815857 - DNA, 25 bp, Homo sapien
agaatgatttgctggacacattgtc

SEQ ID NO: 3815858 - DNA, 25 bp, Homo sapien
tatatacaaaatggaccccaaccag

SEQ ID NO: 3815859 - DNA, 25 bp, Homo sapien
taaacccagttagtgcacgtgcttc

SEQ ID NO: 3815860 - DNA, 25 bp, Homo sapien
actaaccccgacgtcagagacactg

SEQ ID NO: 3815861 - DNA, 25 bp, Homo sapien
taagtgccaaaggttgatgcgtgaa

SEQ ID NO: 3815862 - DNA, 25 bp, Homo sapien
tcaggctctgttcagaagggtggtc

SEQ ID NO: 3815863 - DNA, 25 bp, Homo sapien
tctcgggaccctcactttcaaagga

SEQ ID NO: 3815864 - DNA, 25 bp, Homo sapien
ctcgggaccctcactttcaaaggag

SEQ ID NO: 3815865 - DNA, 25 bp, Homo sapien
ggaccctcactttcaaaggaggcga

SEQ ID NO: 3815866 - DNA, 25 bp, Homo sapien
gaccctcactttcaaaggaggcgac

SEQ ID NO: 3815867 - DNA, 25 bp, Homo sapien
cagggcaaccccaaagagcaccggg

SEQ ID NO: 3815868 - DNA, 25 bp, Homo sapien
atctcccagggcaaccccaaagagc

SEQ ID NO: 3815869 - DNA, 25 bp, Homo sapien
cctcatgcacactcgcccctgcgag

SEQ ID NO: 3815870 - DNA, 25 bp, Homo sapien
actcgcccctgcgagcagagccagc

SEQ ID NO: 3815871 - DNA, 25 bp, Homo sapien
ggggtgggaggcatgctgcgttggg

SEQ ID NO: 3815872 - DNA, 25 bp, Homo sapien
ggtgggaggcatgctgcgttgggag

SEQ ID NO: 3815873 - DNA, 25 bp, Homo sapien
tgggaggcatgctgcgttgggaggc

SEQ ID NO: 3815874 - DNA, 25 bp, Homo sapien
gggaggcatgctgcgttgggaggca

SEQ ID NO: 3815875 - DNA, 25 bp, Homo sapien
ggcgccgtgagcaggtaactctgaa

SEQ ID NO: 3815876 - DNA, 25 bp, Homo sapien
tctcgaaaggacactctacctgtgt

SEQ ID NO: 3815877 - DNA, 25 bp, Homo sapien
tacctgtgtccatgtcatgaactca

SEQ ID NO: 3815878 - DNA, 25 bp, Homo sapien
tcctcgctgtagatgggcgccgtga

SEQ ID NO: 3815879 - DNA, 25 bp, Homo sapien
gatgacgatcttttcacggctgctg

SEQ ID NO: 3815880 - DNA, 25 bp, Homo sapien
ccctgcagggctgtacggtagttgc

SEQ ID NO: 3815881 - DNA, 25 bp, Homo sapien
ttaaagttaatgtgcccgttgggca

SEQ ID NO: 3815882 - DNA, 25 bp, Homo sapien
gaggttgaacacagggatgacgatc

SEQ ID NO: 3815883 - DNA, 25 bp, Homo sapien
tgccacaggactgaggttcatgcca

SEQ ID NO: 3815884 - DNA, 25 bp, Homo sapien
cttcagccttgccacaggactgagg

SEQ ID NO: 3815885 - DNA, 25 bp, Homo sapien
tgaccttggaccaagttttcttcag

SEQ ID NO: 3815886 - DNA, 25 bp, Homo sapien
acttggctgtcttgaccttggacca

SEQ ID NO: 3815887 - DNA, 25 bp, Homo sapien
tgcgggtccggtgtttcttcttcac

SEQ ID NO: 3815888 - DNA, 25 bp, Homo sapien
tgaagaactccaacatgcgggtccg

SEQ ID NO: 3815889 - DNA, 25 bp, Homo sapien
caacatgcgggtccggtgtttcttc

SEQ ID NO: 3815890 - DNA, 25 bp, Homo sapien
ttgaagcactcccgggccacatcaa

SEQ ID NO: 3815891 - DNA, 25 bp, Homo sapien
tggcaggtgacctcagcatggcgct

SEQ ID NO: 3815892 - DNA, 25 bp, Homo sapien
ctggaaggtggcaggtgacctcagc

SEQ ID NO: 3815893 - DNA, 25 bp, Homo sapien
gaaggtggcaggtgacctcagcatg

SEQ ID NO: 3815894 - DNA, 25 bp, Homo sapien
aggtgacctcagcatggcgctgccg

SEQ ID NO: 3815895 - DNA, 25 bp, Homo sapien
tgaaccagttgtcataggcctccag

SEQ ID NO: 3815896 - DNA, 25 bp, Homo sapien
ccagcatgctcaggcagttgaacca

SEQ ID NO: 3815897 - DNA, 25 bp, Homo sapien
ggctgtaggtcttggtcaggtcccc

SEQ ID NO: 3815898 - DNA, 25 bp, Homo sapien
aggtcttggtcaggtcccctcggca

SEQ ID NO: 3815899 - DNA, 25 bp, Homo sapien
aaggacacagcaggtcatagggggc

SEQ ID NO: 3815900 - DNA, 25 bp, Homo sapien
gaaaggacacagcaggtcatagggg

SEQ ID NO: 3815901 - DNA, 25 bp, Homo sapien
ctggaaaggacacagcaggtcatag

SEQ ID NO: 3815902 - DNA, 25 bp, Homo sapien
tggaaaggacacagcaggtcatagg

SEQ ID NO: 3815903 - DNA, 25 bp, Homo sapien
cctgtggttgtccaaggagtccatg

SEQ ID NO: 3815904 - DNA, 25 bp, Homo sapien
gtggctgacgatctgcatcaagtcc

SEQ ID NO: 3815905 - DNA, 25 bp, Homo sapien
catgtggctgacgatctgcatcaag

SEQ ID NO: 3815906 - DNA, 25 bp, Homo sapien
ggttgtccaaggagtccatgtggct

SEQ ID NO: 3815907 - DNA, 25 bp, Homo sapien
agcaccagggggtcgcagcacacgc

SEQ ID NO: 3815908 - DNA, 25 bp, Homo sapien
cccttgtctacagccggtggccgga

SEQ ID NO: 3815909 - DNA, 25 bp, Homo sapien
tggtcttgaggatgggccccttgtc

SEQ ID NO: 3815910 - DNA, 25 bp, Homo sapien
gaggatgggccccttgtctacagcc

SEQ ID NO: 3815911 - DNA, 25 bp, Homo sapien
gtcataggggaaggcctcggtccac

SEQ ID NO: 3815912 - DNA, 25 bp, Homo sapien
atcacactgggtgacacggtgtgtg

SEQ ID NO: 3815913 - DNA, 25 bp, Homo sapien
tctcatcctggaagtcataggggaa

SEQ ID NO: 3815914 - DNA, 25 bp, Homo sapien
tgtgtgatggctttcagctcggcca

SEQ ID NO: 3815915 - DNA, 25 bp, Homo sapien
gaaccgccacatgactcctgtttgg

SEQ ID NO: 3815916 - DNA, 25 bp, Homo sapien
ggatacagagtaaggccccacaggg

SEQ ID NO: 3815917 - DNA, 25 bp, Homo sapien
caactgcgtgccacctgcggtttgg

SEQ ID NO: 3815918 - DNA, 25 bp, Homo sapien
tggcaaatggtgcaagcttcccaca

SEQ ID NO: 3815919 - DNA, 25 bp, Homo sapien
ccagcaggtcatgagggggcataaa

SEQ ID NO: 3815920 - DNA, 25 bp, Homo sapien
tttcaggcccggcttccagctgctg

SEQ ID NO: 3815921 - DNA, 25 bp, Homo sapien
ctcaggagaaaggtgaagatgtacg

SEQ ID NO: 3815922 - DNA, 25 bp, Homo sapien
gctgcttctgctccacgcagatctg

SEQ ID NO: 3815923 - DNA, 25 bp, Homo sapien
gcacccaaggggagagcctgtgcat

SEQ ID NO: 3815924 - DNA, 25 bp, Homo sapien
gagagcctgtgcatctccaaggagg

SEQ ID NO: 3815925 - DNA, 25 bp, Homo sapien
cctgtgcatctccaaggaggagcat

SEQ ID NO: 3815926 - DNA, 25 bp, Homo sapien
acccaaggggagagcctgtgcatct

SEQ ID NO: 3815927 - DNA, 25 bp, Homo sapien
cagcagcagggaagtcacagcaggt

SEQ ID NO: 3815928 - DNA, 25 bp, Homo sapien
ggaagtcacagcaggttcccccagg

SEQ ID NO: 3815929 - DNA, 25 bp, Homo sapien
gcagggaagtcacagcaggttcccc

SEQ ID NO: 3815930 - DNA, 25 bp, Homo sapien
gcagcagggaagtcacagcaggttc

SEQ ID NO: 3815931 - DNA, 25 bp, Homo sapien
cactccacaaggccccacgtactca

SEQ ID NO: 3815932 - DNA, 25 bp, Homo sapien
actccacaaggccccacgtactcac

SEQ ID NO: 3815933 - DNA, 25 bp, Homo sapien
tcactccacaaggccccacgtactc

SEQ ID NO: 3815934 - DNA, 25 bp, Homo sapien
aatagtccaccgtgggaacaaggtg

SEQ ID NO: 3815935 - DNA, 25 bp, Homo sapien
agtccaccgtgggaacaaggtgctc

SEQ ID NO: 3815936 - DNA, 25 bp, Homo sapien
atagtccaccgtgggaacaaggtgc

SEQ ID NO: 3815937 - DNA, 25 bp, Homo sapien
tccaccgtgggaacaaggtgctcca

SEQ ID NO: 3815938 - DNA, 25 bp, Homo sapien
tcttggaagatgaggtccccggagc

SEQ ID NO: 3815939 - DNA, 25 bp, Homo sapien
caacggacgtctggggcatagtttc

SEQ ID NO: 3815940 - DNA, 25 bp, Homo sapien
tgctggagaagacaacggacgtctg

SEQ ID NO: 3815941 - DNA, 25 bp, Homo sapien
aggctgcacctgtccgctacagctg

SEQ ID NO: 3815942 - DNA, 25 bp, Homo sapien
ccacagcatggcccgctgtgatggg

SEQ ID NO: 3815943 - DNA, 25 bp, Homo sapien
cagggccactccacatggtgaaggt

SEQ ID NO: 3815944 - DNA, 25 bp, Homo sapien
tcaggcaggcggtagcaggagtggc

SEQ ID NO: 3815945 - DNA, 25 bp, Homo sapien
ctgtgagtctgagtgcccctgagct

SEQ ID NO: 3815946 - DNA, 25 bp, Homo sapien
agctgggagttcttgtgaagcctag

SEQ ID NO: 3815947 - DNA, 25 bp, Homo sapien
cagctgggagttcttgtgaagccta

SEQ ID NO: 3815948 - DNA, 25 bp, Homo sapien
tgcagctgggagttcttgtgaagcc

SEQ ID NO: 3815949 - DNA, 25 bp, Homo sapien
ctgggagttcttgtgaagcctaggg

SEQ ID NO: 3815950 - DNA, 25 bp, Homo sapien
gttcaaaaggcgaccagcaggtggt

SEQ ID NO: 3815951 - DNA, 25 bp, Homo sapien
tgtgtatcctatcgctggcccaggg

SEQ ID NO: 3815952 - DNA, 25 bp, Homo sapien
tacttcagtgccatgacaggaccgt

SEQ ID NO: 3815953 - DNA, 25 bp, Homo sapien
tgcaatgaagtcacgaaggcgggct

SEQ ID NO: 3815954 - DNA, 25 bp, Homo sapien
gctaggtctcctgcatccaacaaac

SEQ ID NO: 3815955 - DNA, 25 bp, Homo sapien
ccagggctaggtctcctgcatccaa

SEQ ID NO: 3815956 - DNA, 25 bp, Homo sapien
gtctcctgcatccaacaaaccaaga

SEQ ID NO: 3815957 - DNA, 25 bp, Homo sapien
cggcccagggctaggtctcctgcat

SEQ ID NO: 3815958 - DNA, 25 bp, Homo sapien
gatgatgacagcacttccactgcgg

SEQ ID NO: 3815959 - DNA, 25 bp, Homo sapien
gcttttcccgggcaggaatgccggc

SEQ ID NO: 3815960 - DNA, 25 bp, Homo sapien
gagaggcaggttccctacatggctt

SEQ ID NO: 3815961 - DNA, 25 bp, Homo sapien
ccacggagcacttcgaggagggtct

SEQ ID NO: 3815962 - DNA, 25 bp, Homo sapien
cagcaatagccatcatgatacaccg

SEQ ID NO: 3815963 - DNA, 25 bp, Homo sapien
gcaatagccatcatgatacaccgat

SEQ ID NO: 3815964 - DNA, 25 bp, Homo sapien
tagccatcatgatacaccgatggcc

SEQ ID NO: 3815965 - DNA, 25 bp, Homo sapien
catcatgatacaccgatggccaggg

SEQ ID NO: 3815966 - DNA, 25 bp, Homo sapien
cccaggcctccactactctgcctca

SEQ ID NO: 3815967 - DNA, 25 bp, Homo sapien
acagagggcaggcggcagacaacca

SEQ ID NO: 3815968 - DNA, 25 bp, Homo sapien
ccaggcctccactactctgcctcat

SEQ ID NO: 3815969 - DNA, 25 bp, Homo sapien
gcaggcggcagacaaccaggcacag

SEQ ID NO: 3815970 - DNA, 25 bp, Homo sapien
tagatgacttaatcaaagaatagag

SEQ ID NO: 3815971 - DNA, 25 bp, Homo sapien
cactttggggggctctagtgagaac

SEQ ID NO: 3815972 - DNA, 25 bp, Homo sapien
gaatagagtagaactccttataaac

SEQ ID NO: 3815973 - DNA, 25 bp, Homo sapien
agtagaactccttataaacttcaag

SEQ ID NO: 3815974 - DNA, 25 bp, Homo sapien
ctctgcccgcgagccaagcaagcac

SEQ ID NO: 3815975 - DNA, 25 bp, Homo sapien
tccaggaacattctggccgccggct

SEQ ID NO: 3815976 - DNA, 25 bp, Homo sapien
gtcctgcccggtccggcgtccagcg

SEQ ID NO: 3815977 - DNA, 25 bp, Homo sapien
cggtccggcgtccagcgagcggcgg

SEQ ID NO: 3815978 - DNA, 25 bp, Homo sapien
tctgcgcttgacaccagaggacaag

SEQ ID NO: 3815979 - DNA, 25 bp, Homo sapien
gtgcatttccttggggcaaagctgc

SEQ ID NO: 3815980 - DNA, 25 bp, Homo sapien
tgccactctgcgcttgacaccagag

SEQ ID NO: 3815981 - DNA, 25 bp, Homo sapien
ttgacaccagaggacaagtgcattt

SEQ ID NO: 3815982 - DNA, 25 bp, Homo sapien
gcaggtctaactcactccagcttgg

SEQ ID NO: 3815983 - DNA, 25 bp, Homo sapien
aggtacctgcaggtcacctcacagc

SEQ ID NO: 3815984 - DNA, 25 bp, Homo sapien
cagcttggtcaaggtaagcccagct

SEQ ID NO: 3815985 - DNA, 25 bp, Homo sapien
agctcccagaaacacctaggccaga

SEQ ID NO: 3815986 - DNA, 25 bp, Homo sapien
ctcccacggatgttcgctgaatctg

SEQ ID NO: 3815987 - DNA, 25 bp, Homo sapien
aggcctggtgcagactagaccccag

SEQ ID NO: 3815988 - DNA, 25 bp, Homo sapien
tgttcgctgaatctgccagcatagc

SEQ ID NO: 3815989 - DNA, 25 bp, Homo sapien
tagaccccaggggatcatagacaag

SEQ ID NO: 3815990 - DNA, 25 bp, Homo sapien
ctagagccgcttagagtccagggca

SEQ ID NO: 3815991 - DNA, 25 bp, Homo sapien
gcaccgaggtggacaggctgggctg

SEQ ID NO: 3815992 - DNA, 25 bp, Homo sapien
cgcttagagtccagggcaccgaggt

SEQ ID NO: 3815993 - DNA, 25 bp, Homo sapien
ctgggctggcaagactgcatccgga

SEQ ID NO: 3815994 - DNA, 25 bp, Homo sapien
ctgccccgttcctggggccggcaag

SEQ ID NO: 3815995 - DNA, 25 bp, Homo sapien
cgcagtcgggccccgagcagcgcgc

SEQ ID NO: 3815996 - DNA, 25 bp, Homo sapien
gcagtcgggccccgagcagcgcgcg

SEQ ID NO: 3815997 - DNA, 25 bp, Homo sapien
gccgccctcgcgccgcagtcgggcc

SEQ ID NO: 3815998 - DNA, 25 bp, Homo sapien
ccgcgccgccctcgcgccgcagtcg

SEQ ID NO: 3815999 - DNA, 25 bp, Homo sapien
ttctcttgaacggacaccctgtggc

SEQ ID NO: 3816000 - DNA, 25 bp, Homo sapien
acgagggccagtgagaaacaggtct

SEQ ID NO: 3816001 - DNA, 25 bp, Homo sapien
tcttgcaggcagtcagacgagggcc

SEQ ID NO: 3816002 - DNA, 25 bp, Homo sapien
cccagagtgactcttgcaggcagtc

SEQ ID NO: 3816003 - DNA, 25 bp, Homo sapien
tgcaggatggtgttctggccaccag

SEQ ID NO: 3816004 - DNA, 25 bp, Homo sapien
gatgggaggcacatctccaaggata

SEQ ID NO: 3816005 - DNA, 25 bp, Homo sapien
caggcactcttctgcaggatggtgt

SEQ ID NO: 3816006 - DNA, 25 bp, Homo sapien
ctggccaccagattcagggaaaggg

SEQ ID NO: 3816007 - DNA, 25 bp, Homo sapien
gcatagcaggacgcagcagtacttt

SEQ ID NO: 3816008 - DNA, 25 bp, Homo sapien
ttgcttcctttggggctttgaggta

SEQ ID NO: 3816009 - DNA, 25 bp, Homo sapien
tagcaggacgcagcagtactttgag

SEQ ID NO: 3816010 - DNA, 25 bp, Homo sapien
gcttcctttggggctttgaggtaga

SEQ ID NO: 3816011 - DNA, 25 bp, Homo sapien
agggtagaggctacacagccctgag

SEQ ID NO: 3816012 - DNA, 25 bp, Homo sapien
gtccagtgatagctccagcagaggg

SEQ ID NO: 3816013 - DNA, 25 bp, Homo sapien
tagaggctacacagccctgagttga

SEQ ID NO: 3816014 - DNA, 25 bp, Homo sapien
cctgagttgatatgtaggtggagac

SEQ ID NO: 3816015 - DNA, 25 bp, Homo sapien
ttccttcccatcataaagttgcaca

SEQ ID NO: 3816016 - DNA, 25 bp, Homo sapien
tccttcccatcataaagttgcacat

SEQ ID NO: 3816017 - DNA, 25 bp, Homo sapien
cttccttcccatcataaagttgcac

SEQ ID NO: 3816018 - DNA, 25 bp, Homo sapien
ggctgccggccacaaagacgtgcgc

SEQ ID NO: 3816019 - DNA, 25 bp, Homo sapien
gcgctgttggtcagcaccgaggaca

SEQ ID NO: 3816020 - DNA, 25 bp, Homo sapien
tctgcgaaagttggaacctctctct

SEQ ID NO: 3816021 - DNA, 25 bp, Homo sapien
aatccagctttctgcgaaagttgga

SEQ ID NO: 3816022 - DNA, 25 bp, Homo sapien
gccctgtccagggtactgagcaagg

SEQ ID NO: 3816023 - DNA, 25 bp, Homo sapien
cagggtactgagcaaggatcccact

SEQ ID NO: 3816024 - DNA, 25 bp, Homo sapien
ggtactgagcaaggatcccactgag

SEQ ID NO: 3816025 - DNA, 25 bp, Homo sapien
tgtccagggtactgagcaaggatcc

SEQ ID NO: 3816026 - DNA, 25 bp, Homo sapien
cacgcccagcctacgattagagttt

SEQ ID NO: 3816027 - DNA, 25 bp, Homo sapien
tgcctctgtcccaaaaagtactagg

SEQ ID NO: 3816028 - DNA, 25 bp, Homo sapien
tctggctcatcaggtcagggaaaga

SEQ ID NO: 3816029 - DNA, 25 bp, Homo sapien
tgtgtccctaatagaagcccctgca

SEQ ID NO: 3816030 - DNA, 25 bp, Homo sapien
gtctggccctctgtgtccctaatag

SEQ ID NO: 3816031 - DNA, 25 bp, Homo sapien
ctctggaggtggagttctctcagct

SEQ ID NO: 3816032 - DNA, 25 bp, Homo sapien
tctggccagcgttcttcctggtgac

SEQ ID NO: 3816033 - DNA, 25 bp, Homo sapien
tgactgagtcacaactgtcctgttg

SEQ ID NO: 3816034 - DNA, 25 bp, Homo sapien
caggactcttgtgacccagaagtgc

SEQ ID NO: 3816035 - DNA, 25 bp, Homo sapien
gaagtgcacatcacacgcgtgctgt

SEQ ID NO: 3816036 - DNA, 25 bp, Homo sapien
agctgagacaggcagggagccccta

SEQ ID NO: 3816037 - DNA, 25 bp, Homo sapien
gacaggcagggagcccctagcagga

SEQ ID NO: 3816038 - DNA, 25 bp, Homo sapien
cctagcaggaagagctcttcccttc

SEQ ID NO: 3816039 - DNA, 25 bp, Homo sapien
agggagcccctagcaggaagagctc

SEQ ID NO: 3816040 - DNA, 25 bp, Homo sapien
cccccacccgtaggccacattcagc

SEQ ID NO: 3816041 - DNA, 25 bp, Homo sapien
tatcttcccccacccgtaggccaca

SEQ ID NO: 3816042 - DNA, 25 bp, Homo sapien
atcttcccccacccgtaggccacat

SEQ ID NO: 3816043 - DNA, 25 bp, Homo sapien
ttcccccacccgtaggccacattca

SEQ ID NO: 3816044 - DNA, 25 bp, Homo sapien
caaatacatgtggagctctgattgc

SEQ ID NO: 3816045 - DNA, 25 bp, Homo sapien
ggtttggtaaacattgctctgagtc

SEQ ID NO: 3816046 - DNA, 25 bp, Homo sapien
tattagctactgctgtggagacaac

SEQ ID NO: 3816047 - DNA, 25 bp, Homo sapien
cctttccaaatcgtagtgtcgtggg

SEQ ID NO: 3816048 - DNA, 25 bp, Homo sapien
tgtgggaccacgtgggaaagagacc

SEQ ID NO: 3816049 - DNA, 25 bp, Homo sapien
catatgactgggtttagtggtggcc

SEQ ID NO: 3816050 - DNA, 25 bp, Homo sapien
taacttccctttggtggagtcagac

SEQ ID NO: 3816051 - DNA, 25 bp, Homo sapien
tcagactgtatgctgagcgctgtga

SEQ ID NO: 3816052 - DNA, 25 bp, Homo sapien
ctgagatgggaaattctgaaaggtc

SEQ ID NO: 3816053 - DNA, 25 bp, Homo sapien
agtttaacagttgttgactgtgaag

SEQ ID NO: 3816054 - DNA, 25 bp, Homo sapien
cagagatggtgggggaacggaaaag

SEQ ID NO: 3816055 - DNA, 25 bp, Homo sapien
gatgggaaattctgaaaggtcagag

SEQ ID NO: 3816056 - DNA, 25 bp, Homo sapien
catcttgaaccctttcggcttctct

SEQ ID NO: 3816057 - DNA, 25 bp, Homo sapien
ccctgcggggttgcaggcctcactc

SEQ ID NO: 3816058 - DNA, 25 bp, Homo sapien
cccctgcggggttgcaggcctcact

SEQ ID NO: 3816059 - DNA, 25 bp, Homo sapien
cctgcggggttgcaggcctcactct

SEQ ID NO: 3816060 - DNA, 25 bp, Homo sapien
actgagatgccttgagacttgatgc

SEQ ID NO: 3816061 - DNA, 25 bp, Homo sapien
aaactgataataaaactgagatgcc

SEQ ID NO: 3816062 - DNA, 25 bp, Homo sapien
gacttatctcccatactgctaagta

SEQ ID NO: 3816063 - DNA, 25 bp, Homo sapien
catgagggtggtcttagtgcaggtg

SEQ ID NO: 3816064 - DNA, 25 bp, Homo sapien
tgtgtgctgctagtcaccatttcca

SEQ ID NO: 3816065 - DNA, 25 bp, Homo sapien
ttctgaatggtttacaacagtgcac

SEQ ID NO: 3816066 - DNA, 25 bp, Homo sapien
cagctatcaacagatgtgactccag

SEQ ID NO: 3816067 - DNA, 25 bp, Homo sapien
tcaagggcctagcaggaaaattctg

SEQ ID NO: 3816068 - DNA, 25 bp, Homo sapien
aatgaattatcttcaaccacccgtt

SEQ ID NO: 3816069 - DNA, 25 bp, Homo sapien
cacactaaaatacattacgattaaa

SEQ ID NO: 3816070 - DNA, 25 bp, Homo sapien
atcttttgctgagtaatctgtgcca

SEQ ID NO: 3816071 - DNA, 25 bp, Homo sapien
tagcctcatcataagaatataaggg

SEQ ID NO: 3816072 - DNA, 25 bp, Homo sapien
actgtgatgtggtgtaaaagatcca

SEQ ID NO: 3816073 - DNA, 25 bp, Homo sapien
tactcattatcacatgctagaagaa

SEQ ID NO: 3816074 - DNA, 25 bp, Homo sapien
gcacgtctccccagtgtgttcactg

SEQ ID NO: 3816075 - DNA, 25 bp, Homo sapien
caccaattcctacagtattagtatt

SEQ ID NO: 3816076 - DNA, 25 bp, Homo sapien
ggtgcaaaatgggtcccccagcttc

SEQ ID NO: 3816077 - DNA, 25 bp, Homo sapien
agcttcctctattataactgctctt

SEQ ID NO: 3816078 - DNA, 25 bp, Homo sapien
tggctgcctgtgaaaatgattgaag

SEQ ID NO: 3816079 - DNA, 25 bp, Homo sapien
ttcacaaactcatggtgcaaaatgg

SEQ ID NO: 3816080 - DNA, 25 bp, Homo sapien
ggccccgtaacagccactcactgac

SEQ ID NO: 3816081 - DNA, 25 bp, Homo sapien
tgtgctgcatattggccctgtcttt

SEQ ID NO: 3816082 - DNA, 25 bp, Homo sapien
ctggctgctatacgccccattgctg

SEQ ID NO: 3816083 - DNA, 25 bp, Homo sapien
tagtcatagccacccatgctgttct

SEQ ID NO: 3816084 - DNA, 25 bp, Homo sapien
gacagtagctgaggtctctcccgaa

SEQ ID NO: 3816085 - DNA, 25 bp, Homo sapien
gaagccatcgttggcgctgtcggca

SEQ ID NO: 3816086 - DNA, 25 bp, Homo sapien
ttctcggtcgctttgtacggcaggc

SEQ ID NO: 3816087 - DNA, 25 bp, Homo sapien
gccgctgcacggacatgaacttcag

SEQ ID NO: 3816088 - DNA, 25 bp, Homo sapien
gcaggccacggagcttgaccacaaa

SEQ ID NO: 3816089 - DNA, 25 bp, Homo sapien
atcatgaatcgtgcagtcagagagg

SEQ ID NO: 3816090 - DNA, 25 bp, Homo sapien
gccccatcatgaatcgtgcagtcag

SEQ ID NO: 3816091 - DNA, 25 bp, Homo sapien
gagcttgaccacaaagccttcacct

SEQ ID NO: 3816092 - DNA, 25 bp, Homo sapien
tgtcaggtgatcttgggtgtggctt

SEQ ID NO: 3816093 - DNA, 25 bp, Homo sapien
tgggtgtcaggtgatcttgggtgtg

SEQ ID NO: 3816094 - DNA, 25 bp, Homo sapien
cagggtgggtgtcaggtgatcttgg

SEQ ID NO: 3816095 - DNA, 25 bp, Homo sapien
gtcagggtgggtgtcaggtgatctt

SEQ ID NO: 3816096 - DNA, 25 bp, Homo sapien
tgtgaagtcaagtcagagtccagga

SEQ ID NO: 3816097 - DNA, 25 bp, Homo sapien
tacagcggacatcgtgaacaacagc

SEQ ID NO: 3816098 - DNA, 25 bp, Homo sapien
tgaacagccatagagtaagcgggcc

SEQ ID NO: 3816099 - DNA, 25 bp, Homo sapien
gagtttgtaagcacgtagtgggccc

SEQ ID NO: 3816100 - DNA, 25 bp, Homo sapien
tgggagacacttctggatggtaatg

SEQ ID NO: 3816101 - DNA, 25 bp, Homo sapien
cagtgggagacacttctggatggta

SEQ ID NO: 3816102 - DNA, 25 bp, Homo sapien
gccttcagtgggagacacttctgga

SEQ ID NO: 3816103 - DNA, 25 bp, Homo sapien
gagacacttctggatggtaatgaaa

SEQ ID NO: 3816104 - DNA, 25 bp, Homo sapien
ccgaagctcaaccacgcagagggct

SEQ ID NO: 3816105 - DNA, 25 bp, Homo sapien
gctccggggaaactccaggtgcatg

SEQ ID NO: 3816106 - DNA, 25 bp, Homo sapien
agagccccgaaattccaccgaagct

SEQ ID NO: 3816107 - DNA, 25 bp, Homo sapien
tggtttctgttgctaccaggcaagc

SEQ ID NO: 3816108 - DNA, 25 bp, Homo sapien
gagacaaggtgacggcgacgttccc

SEQ ID NO: 3816109 - DNA, 25 bp, Homo sapien
ctgcaacagaaatccaagtggtggt

SEQ ID NO: 3816110 - DNA, 25 bp, Homo sapien
taaacgtgttttggcgggaagcagc

SEQ ID NO: 3816111 - DNA, 25 bp, Homo sapien
cgaggccccgagacaaggtgacggc

SEQ ID NO: 3816112 - DNA, 25 bp, Homo sapien
cggaggcctcgtgatccaagaccgg

SEQ ID NO: 3816113 - DNA, 25 bp, Homo sapien
ggaagcggaggcctcgtgatccaag

SEQ ID NO: 3816114 - DNA, 25 bp, Homo sapien
aagcggaggcctcgtgatccaagac

SEQ ID NO: 3816115 - DNA, 25 bp, Homo sapien
agcggaggcctcgtgatccaagacc

SEQ ID NO: 3816116 - DNA, 25 bp, Homo sapien
cacacccggctaatacaactgtttg

SEQ ID NO: 3816117 - DNA, 25 bp, Homo sapien
gagaaagcaagtctttagaatgcac

SEQ ID NO: 3816118 - DNA, 25 bp, Homo sapien
tgagagaaagcaagtctttagaatg

SEQ ID NO: 3816119 - DNA, 25 bp, Homo sapien
aagcaagtctttagaatgcacttac

SEQ ID NO: 3816120 - DNA, 25 bp, Homo sapien
tattgatcagtcaccatagggttcc

SEQ ID NO: 3816121 - DNA, 25 bp, Homo sapien
ggagatgacatagccttaaaggcct

SEQ ID NO: 3816122 - DNA, 25 bp, Homo sapien
tgagggaacaatgtgtgcagaagac

SEQ ID NO: 3816123 - DNA, 25 bp, Homo sapien
tattgtgcaactgcagctaggtctg

SEQ ID NO: 3816124 - DNA, 25 bp, Homo sapien
agtgttcgctatcatacctggctaa

SEQ ID NO: 3816125 - DNA, 25 bp, Homo sapien
actgcatcctctatgtctttacaag

SEQ ID NO: 3816126 - DNA, 25 bp, Homo sapien
cactgcatcctctatgtctttacaa

SEQ ID NO: 3816127 - DNA, 25 bp, Homo sapien
tctttacaagtgttcgctatcatac

SEQ ID NO: 3816128 - DNA, 25 bp, Homo sapien
gcaagacagcccgacaaatataacg

SEQ ID NO: 3816129 - DNA, 25 bp, Homo sapien
caatcagaaaaatgcgaagtgtggg

SEQ ID NO: 3816130 - DNA, 25 bp, Homo sapien
gacactcaaagaccaccacggaaaa

SEQ ID NO: 3816131 - DNA, 25 bp, Homo sapien
gggaacctctagatgatcacttaca

SEQ ID NO: 3816132 - DNA, 25 bp, Homo sapien
gaccttattggtctgggatttgctg

SEQ ID NO: 3816133 - DNA, 25 bp, Homo sapien
tatttttaggcatgacagcagtatc

SEQ ID NO: 3816134 - DNA, 25 bp, Homo sapien
tcagggcaactaagacagggcaagg

SEQ ID NO: 3816135 - DNA, 25 bp, Homo sapien
taaaataagccagggcggtcttggc

SEQ ID NO: 3816136 - DNA, 25 bp, Homo sapien
accctggtccacgactctgcggttg

SEQ ID NO: 3816137 - DNA, 25 bp, Homo sapien
agcgcccgcgagcagtttcgagaac

SEQ ID NO: 3816138 - DNA, 25 bp, Homo sapien
cctggtccacgactctgcggttggg

SEQ ID NO: 3816139 - DNA, 25 bp, Homo sapien
tcgagaactaaagaggcgcgtcagc

SEQ ID NO: 3816140 - DNA, 25 bp, Homo sapien
cgaggacacgcggcgcagccgagga

SEQ ID NO: 3816141 - DNA, 25 bp, Homo sapien
accaatacagggaccgcgctccgag

SEQ ID NO: 3816142 - DNA, 25 bp, Homo sapien
acagggaccgcgctccgaggacacg

SEQ ID NO: 3816143 - DNA, 25 bp, Homo sapien
gacacgcggcgcagccgaggaggaa

SEQ ID NO: 3816144 - DNA, 25 bp, Homo sapien
cagttcttgccggtcccacgtacgg

SEQ ID NO: 3816145 - DNA, 25 bp, Homo sapien
actgtctgggcgtgcggctctcgac

SEQ ID NO: 3816146 - DNA, 25 bp, Homo sapien
gtctcccgatcccagtgggtccagt

SEQ ID NO: 3816147 - DNA, 25 bp, Homo sapien
cgtcacccaaatctcagcgccacgg

SEQ ID NO: 3816148 - DNA, 25 bp, Homo sapien
agcgcacgcggctttgccggaagcc

SEQ ID NO: 3816149 - DNA, 25 bp, Homo sapien
gaggcttgttgaccatcaccatgga

SEQ ID NO: 3816150 - DNA, 25 bp, Homo sapien
tctcatatcaggcaccccggtggtc

SEQ ID NO: 3816151 - DNA, 25 bp, Homo sapien
tggtcccttggagcacctagaggag

SEQ ID NO: 3816152 - DNA, 25 bp, Homo sapien
gacagcgattcggtggccccccgaa

SEQ ID NO: 3816153 - DNA, 25 bp, Homo sapien
gcgtgacagcgattcggtggccccc

SEQ ID NO: 3816154 - DNA, 25 bp, Homo sapien
ctgccggcgtgacagcgattcggtg

SEQ ID NO: 3816155 - DNA, 25 bp, Homo sapien
cggcgtgacagcgattcggtggccc

SEQ ID NO: 3816156 - DNA, 25 bp, Homo sapien
cggagtttctgcgtccggcgtccgg

SEQ ID NO: 3816157 - DNA, 25 bp, Homo sapien
caaggaccgcggcagggcggagttt

SEQ ID NO: 3816158 - DNA, 25 bp, Homo sapien
aagacgcggcgcagtcctgcttcca

SEQ ID NO: 3816159 - DNA, 25 bp, Homo sapien
ctgcttccacgacggagccggaagg

SEQ ID NO: 3816160 - DNA, 25 bp, Homo sapien
ctttcacagaaagtactctagtagc

SEQ ID NO: 3816161 - DNA, 25 bp, Homo sapien
cggaggagaagaaacctcaatggcg

SEQ ID NO: 3816162 - DNA, 25 bp, Homo sapien
tccgggggctctacactttcacaga

SEQ ID NO: 3816163 - DNA, 25 bp, Homo sapien
tcaatggcgaaagcaacaccaagcg

SEQ ID NO: 3816164 - DNA, 25 bp, Homo sapien
tcctcttgcgccagtcttgaagcgg

SEQ ID NO: 3816165 - DNA, 25 bp, Homo sapien
gtcctttgggctcacgttgcggcgc

SEQ ID NO: 3816166 - DNA, 25 bp, Homo sapien
taagctaggtcagttctctggcccg

SEQ ID NO: 3816167 - DNA, 25 bp, Homo sapien
gctgcctgcgctccttaagctaggt

SEQ ID NO: 3816168 - DNA, 25 bp, Homo sapien
taagagtccggccagcggacaagag

SEQ ID NO: 3816169 - DNA, 25 bp, Homo sapien
ggtcccagcgaccttcgctttcgtg

SEQ ID NO: 3816170 - DNA, 25 bp, Homo sapien
gactgcgccgtgtcttcctgaagaa

SEQ ID NO: 3816171 - DNA, 25 bp, Homo sapien
atgcccgtggcatagggccgagccc

SEQ ID NO: 3816172 - DNA, 25 bp, Homo sapien
aggcctgagctatcctgctgggcct

SEQ ID NO: 3816173 - DNA, 25 bp, Homo sapien
caggcctgagctatcctgctgggcc

SEQ ID NO: 3816174 - DNA, 25 bp, Homo sapien
caggtaatccacctgcctcagcctc

SEQ ID NO: 3816175 - DNA, 25 bp, Homo sapien
tggagtgcaatggagcaatcacggc

SEQ ID NO: 3816176 - DNA, 25 bp, Homo sapien
tggagtcttgctctgtcacccaggc

SEQ ID NO: 3816177 - DNA, 25 bp, Homo sapien
atggagcaatcacggctcactgaaa

SEQ ID NO: 3816178 - DNA, 25 bp, Homo sapien
gttttctaacaaagctccttctctc

SEQ ID NO: 3816179 - DNA, 25 bp, Homo sapien
agttttctaacaaagctccttctct

SEQ ID NO: 3816180 - DNA, 25 bp, Homo sapien
ttcgtagagccatgtcaagaatgca

SEQ ID NO: 3816181 - DNA, 25 bp, Homo sapien
gtacacattgctcctatcactgctg

SEQ ID NO: 3816182 - DNA, 25 bp, Homo sapien
tgcagggagtgaatcatgccaagtc

SEQ ID NO: 3816183 - DNA, 25 bp, Homo sapien
cacattagtacttgattatgcaggg

SEQ ID NO: 3816184 - DNA, 25 bp, Homo sapien
tgagaagcgagcaccatcccattgg

SEQ ID NO: 3816185 - DNA, 25 bp, Homo sapien
cgtgcaggcgtcctttgcggtcttt

SEQ ID NO: 3816186 - DNA, 25 bp, Homo sapien
cggcgcacggcctagtttgcacttt

SEQ ID NO: 3816187 - DNA, 25 bp, Homo sapien
tttgctttccgggagaatccctgcg

SEQ ID NO: 3816188 - DNA, 25 bp, Homo sapien
gcatgcgcggcccatttccgagagt

SEQ ID NO: 3816189 - DNA, 25 bp, Homo sapien
ctggcagccggccttagcggcgttt

SEQ ID NO: 3816190 - DNA, 25 bp, Homo sapien
ccctttggcgcgtaggagacagcgc

SEQ ID NO: 3816191 - DNA, 25 bp, Homo sapien
cgtttgctgctcttgtgcggacgcc

SEQ ID NO: 3816192 - DNA, 25 bp, Homo sapien
ggaagtccagcgttgcatggttaca

SEQ ID NO: 3816193 - DNA, 25 bp, Homo sapien
tgcatggttacagtactgagcccca

SEQ ID NO: 3816194 - DNA, 25 bp, Homo sapien
ggttacagtactgagccccagacat

SEQ ID NO: 3816195 - DNA, 25 bp, Homo sapien
taaaagcccattcggcggaagtcca

SEQ ID NO: 3816196 - DNA, 25 bp, Homo sapien
cgttgccaagtataatgcaggctct

SEQ ID NO: 3816197 - DNA, 25 bp, Homo sapien
tctgaaccgtccagccagtgtgtcc

SEQ ID NO: 3816198 - DNA, 25 bp, Homo sapien
cagtgtgtcctcagtcgtcttggtt

SEQ ID NO: 3816199 - DNA, 25 bp, Homo sapien
acttcataatggagggctgcgggcc

SEQ ID NO: 3816200 - DNA, 25 bp, Homo sapien
agtttcacagcagcggaagacgagg

SEQ ID NO: 3816201 - DNA, 25 bp, Homo sapien
gagtttcacagcagcggaagacgag

SEQ ID NO: 3816202 - DNA, 25 bp, Homo sapien
aggtggccttgagagatgtgggtgc

SEQ ID NO: 3816203 - DNA, 25 bp, Homo sapien
cttgagagatgtgggtgcttccacc

SEQ ID NO: 3816204 - DNA, 25 bp, Homo sapien
gccttgagagatgtgggtgcttcca

SEQ ID NO: 3816205 - DNA, 25 bp, Homo sapien
cgcaggtggccttgagagatgtggg

SEQ ID NO: 3816206 - DNA, 25 bp, Homo sapien
gatcataactcacctctcccttgaa

SEQ ID NO: 3816207 - DNA, 25 bp, Homo sapien
gtgtgatgatcataactcacctctc

SEQ ID NO: 3816208 - DNA, 25 bp, Homo sapien
catgcccggcccagtcttttgtttt

SEQ ID NO: 3816209 - DNA, 25 bp, Homo sapien
gcatgtaccataatgcctggttact

SEQ ID NO: 3816210 - DNA, 25 bp, Homo sapien
cagtctttgcaaatggcacctggat

SEQ ID NO: 3816211 - DNA, 25 bp, Homo sapien
gacacttcgagcacaacatgtccga

SEQ ID NO: 3816212 - DNA, 25 bp, Homo sapien
cctggatttacctggaggctcataa

SEQ ID NO: 3816213 - DNA, 25 bp, Homo sapien
tcagcttcattacgggcttcccttc

SEQ ID NO: 3816214 - DNA, 25 bp, Homo sapien
tgatattgaccatcctttcaggtgc

SEQ ID NO: 3816215 - DNA, 25 bp, Homo sapien
gaagggtattgatctgtatcctgta

SEQ ID NO: 3816216 - DNA, 25 bp, Homo sapien
ttagtactactgtctgacaactttg

SEQ ID NO: 3816217 - DNA, 25 bp, Homo sapien
tgaggactttgtgtatgcaggatat

SEQ ID NO: 3816218 - DNA, 25 bp, Homo sapien
tactaagcatttctgagcctggtgc

SEQ ID NO: 3816219 - DNA, 25 bp, Homo sapien
tctggtcagccacgtacaggagttg

SEQ ID NO: 3816220 - DNA, 25 bp, Homo sapien
tcttgctggacgttaaacctctggt

SEQ ID NO: 3816221 - DNA, 25 bp, Homo sapien
tatgcaagcagcataactgtgcctg

SEQ ID NO: 3816222 - DNA, 25 bp, Homo sapien
tgagtgatttttcagtgagggaaca

SEQ ID NO: 3816223 - DNA, 25 bp, Homo sapien
ggaaacatgccctgcttgagaataa

SEQ ID NO: 3816224 - DNA, 25 bp, Homo sapien
cagtatgagcgctgtgaagacctga

SEQ ID NO: 3816225 - DNA, 25 bp, Homo sapien
aagttcttgccgttaaaatgctggg

SEQ ID NO: 3816226 - DNA, 25 bp, Homo sapien
tagcgaggatctttcttgtgaaccc

SEQ ID NO: 3816227 - DNA, 25 bp, Homo sapien
gtgaacccgctggtggatgtgaagg

SEQ ID NO: 3816228 - DNA, 25 bp, Homo sapien
cccgctggtggatgtgaaggttgga

SEQ ID NO: 3816229 - DNA, 25 bp, Homo sapien
ttagcgaggatctttcttgtgaacc

SEQ ID NO: 3816230 - DNA, 25 bp, Homo sapien
tcctgtgtggatgcaccggtgaatg

SEQ ID NO: 3816231 - DNA, 25 bp, Homo sapien
aggtttttcgcctgtatggacggca

SEQ ID NO: 3816232 - DNA, 25 bp, Homo sapien
tggatgcgaagatccgagctctggc

SEQ ID NO: 3816233 - DNA, 25 bp, Homo sapien
caggtttgagcgctgactgaagctc

SEQ ID NO: 3816234 - DNA, 25 bp, Homo sapien
cctgatggataagcagactcgagct

SEQ ID NO: 3816235 - DNA, 25 bp, Homo sapien
aagcagactcgagctccttgtgaag

SEQ ID NO: 3816236 - DNA, 25 bp, Homo sapien
ctgcctgatggataagcagactcga

SEQ ID NO: 3816237 - DNA, 25 bp, Homo sapien
tggataagcagactcgagctccttg

SEQ ID NO: 3816238 - DNA, 25 bp, Homo sapien
caatggcgaggccagttcttgtcca

SEQ ID NO: 3816239 - DNA, 25 bp, Homo sapien
tcttccattacaaagagacgtctgc

SEQ ID NO: 3816240 - DNA, 25 bp, Homo sapien
cacagttattatggtcacagggttt

SEQ ID NO: 3816241 - DNA, 25 bp, Homo sapien
cgtctgctttcctgatgatcctgag

SEQ ID NO: 3816242 - DNA, 25 bp, Homo sapien
caggaggaaagctcatgtaacagat

SEQ ID NO: 3816243 - DNA, 25 bp, Homo sapien
ggaaagctcatgtaacagatcctga

SEQ ID NO: 3816244 - DNA, 25 bp, Homo sapien
gccttccaaaactagccaggaggaa

SEQ ID NO: 3816245 - DNA, 25 bp, Homo sapien
cttccaaaactagccaggaggaaag

SEQ ID NO: 3816246 - DNA, 25 bp, Homo sapien
ccttcaacgccataactgagccagg

SEQ ID NO: 3816247 - DNA, 25 bp, Homo sapien
cagggccttcaacgccataactgag

SEQ ID NO: 3816248 - DNA, 25 bp, Homo sapien
ggccttcaacgccataactgagcca

SEQ ID NO: 3816249 - DNA, 25 bp, Homo sapien
caacgccataactgagccaggccat

SEQ ID NO: 3816250 - DNA, 25 bp, Homo sapien
ggtgacctcactcctcctcggtgaa

SEQ ID NO: 3816251 - DNA, 25 bp, Homo sapien
aggtgacctcactcctcctcggtga

SEQ ID NO: 3816252 - DNA, 25 bp, Homo sapien
tgtagttgcccagcatcacagctcc

SEQ ID NO: 3816253 - DNA, 25 bp, Homo sapien
caagtttctgtagttgcccagcatc

SEQ ID NO: 3816254 - DNA, 25 bp, Homo sapien
tgacaaccttaacactcgcaggaac

SEQ ID NO: 3816255 - DNA, 25 bp, Homo sapien
tacgctcaagttctcagctactgaa

SEQ ID NO: 3816256 - DNA, 25 bp, Homo sapien
aaggtatagaagaagtttgcagctc

SEQ ID NO: 3816257 - DNA, 25 bp, Homo sapien
gggatctgagtgagctaagccaagt

SEQ ID NO: 3816258 - DNA, 25 bp, Homo sapien
ccaagctttctgttcaaggtcactg

SEQ ID NO: 3816259 - DNA, 25 bp, Homo sapien
ctcccaagctttctgttcaaggtca

SEQ ID NO: 3816260 - DNA, 25 bp, Homo sapien
atgggtgctgtctcccaagctttct

SEQ ID NO: 3816261 - DNA, 25 bp, Homo sapien
ttcaaggtcactggtctccattctg

SEQ ID NO: 3816262 - DNA, 25 bp, Homo sapien
aggctcaagccccggagtaaaggtg

SEQ ID NO: 3816263 - DNA, 25 bp, Homo sapien
tcttcccaaccagaccttctcttca

SEQ ID NO: 3816264 - DNA, 25 bp, Homo sapien
caagctccatcaccacatcctttag

SEQ ID NO: 3816265 - DNA, 25 bp, Homo sapien
atcctttagcaaggcatgacccatg

SEQ ID NO: 3816266 - DNA, 25 bp, Homo sapien
tgaaagagaacaaatcaacctgagt

SEQ ID NO: 3816267 - DNA, 25 bp, Homo sapien
gagttagccgagttagagctctcca

SEQ ID NO: 3816268 - DNA, 25 bp, Homo sapien
caaacaccatgggattctaagtggg

SEQ ID NO: 3816269 - DNA, 25 bp, Homo sapien
gagctctccaccataaaacgccagg

SEQ ID NO: 3816270 - DNA, 25 bp, Homo sapien
taggagaaatggaacgccaactcac

SEQ ID NO: 3816271 - DNA, 25 bp, Homo sapien
gatgggccagtgaaaactctctgtg

SEQ ID NO: 3816272 - DNA, 25 bp, Homo sapien
cacagggacatttcagggagatggc

SEQ ID NO: 3816273 - DNA, 25 bp, Homo sapien
gaaaacaacacatggcacagggaca

SEQ ID NO: 3816274 - DNA, 25 bp, Homo sapien
ctggtcatttcttactcccagaggg

SEQ ID NO: 3816275 - DNA, 25 bp, Homo sapien
atttcttactcccagaggggatgga

SEQ ID NO: 3816276 - DNA, 25 bp, Homo sapien
tcttactcccagaggggatggattc

SEQ ID NO: 3816277 - DNA, 25 bp, Homo sapien
ggaccctggtcatttcttactccca

SEQ ID NO: 3816278 - DNA, 25 bp, Homo sapien
gaaaaagttactccgctcctgcctc

SEQ ID NO: 3816279 - DNA, 25 bp, Homo sapien
tccacagggctttcgattaaacaag

SEQ ID NO: 3816280 - DNA, 25 bp, Homo sapien
tgcctctgacgcttcttcagtcact

SEQ ID NO: 3816281 - DNA, 25 bp, Homo sapien
gtccagcaagactgcggggaaaaag

SEQ ID NO: 3816282 - DNA, 25 bp, Homo sapien
ctcccacgtggaaccccacgcctgc

SEQ ID NO: 3816283 - DNA, 25 bp, Homo sapien
tcccacgtggaaccccacgcctgca

SEQ ID NO: 3816284 - DNA, 25 bp, Homo sapien
cccacgtggaaccccacgcctgcag

SEQ ID NO: 3816285 - DNA, 25 bp, Homo sapien
tggaacgatttttacctcgccacaa

SEQ ID NO: 3816286 - DNA, 25 bp, Homo sapien
agcatgttaattctcttactcggtc

SEQ ID NO: 3816287 - DNA, 25 bp, Homo sapien
tatctcctgataatagaagtggctt

SEQ ID NO: 3816288 - DNA, 25 bp, Homo sapien
tttccccagtaagcaacacagtatc

SEQ ID NO: 3816289 - DNA, 25 bp, Homo sapien
catatcatcgaataccagaccaagt

SEQ ID NO: 3816290 - DNA, 25 bp, Homo sapien
ctgtggcgacaaacttctgcccatt

SEQ ID NO: 3816291 - DNA, 25 bp, Homo sapien
atatcatcgaataccagaccaagtt

SEQ ID NO: 3816292 - DNA, 25 bp, Homo sapien
caaacttctgcccattccagagggt

SEQ ID NO: 3816293 - DNA, 25 bp, Homo sapien
gcccttgatttgcaacatcgtgttg

SEQ ID NO: 3816294 - DNA, 25 bp, Homo sapien
tgcaacatcgtgttgacacacttgt

SEQ ID NO: 3816295 - DNA, 25 bp, Homo sapien
taagccgcctgtttcagctctgtgt

SEQ ID NO: 3816296 - DNA, 25 bp, Homo sapien
tgtcatcaatcaccagattggaaac

SEQ ID NO: 3816297 - DNA, 25 bp, Homo sapien
cttcttgccctccagttcaagtaca

SEQ ID NO: 3816298 - DNA, 25 bp, Homo sapien
tcttgccctccagttcaagtacagc

SEQ ID NO: 3816299 - DNA, 25 bp, Homo sapien
tgccctccagttcaagtacagctgg

SEQ ID NO: 3816300 - DNA, 25 bp, Homo sapien
ttgccctccagttcaagtacagctg

SEQ ID NO: 3816301 - DNA, 25 bp, Homo sapien
tttggggtttaggtgcagagaatgg

SEQ ID NO: 3816302 - DNA, 25 bp, Homo sapien
gtttggggtttaggtgcagagaatg

SEQ ID NO: 3816303 - DNA, 25 bp, Homo sapien
acgtttcagggcatgtgtgatgctc

SEQ ID NO: 3816304 - DNA, 25 bp, Homo sapien
tcagggtagggttcttgtgagtctt

SEQ ID NO: 3816305 - DNA, 25 bp, Homo sapien
tcagatacacgtttcagggcatgtg

SEQ ID NO: 3816306 - DNA, 25 bp, Homo sapien
tcatgtcatcagatacacgtttcag

SEQ ID NO: 3816307 - DNA, 25 bp, Homo sapien
ggaagcggactcatctgagcctgaa

SEQ ID NO: 3816308 - DNA, 25 bp, Homo sapien
gagggaagcggactcatctgagcct

SEQ ID NO: 3816309 - DNA, 25 bp, Homo sapien
gagagggaagcggactcatctgagc

SEQ ID NO: 3816310 - DNA, 25 bp, Homo sapien
ctgagagggaagcggactcatctga

SEQ ID NO: 3816311 - DNA, 25 bp, Homo sapien
tccagatggcagtccactcagttct

SEQ ID NO: 3816312 - DNA, 25 bp, Homo sapien
cagttcttttgtcacaggccccgtt

SEQ ID NO: 3816313 - DNA, 25 bp, Homo sapien
gtgggggaggagtagctgatccagc

SEQ ID NO: 3816314 - DNA, 25 bp, Homo sapien
agtagctgatccagcagagggtcca

SEQ ID NO: 3816315 - DNA, 25 bp, Homo sapien
ggaactccttaatgtaagcctgcag

SEQ ID NO: 3816316 - DNA, 25 bp, Homo sapien
gactcagtctacatgcttcttatcc

SEQ ID NO: 3816317 - DNA, 25 bp, Homo sapien
caggcagtccggtggtatggaactc

SEQ ID NO: 3816318 - DNA, 25 bp, Homo sapien
taaggactcagtttgtataaaacac

SEQ ID NO: 3816319 - DNA, 25 bp, Homo sapien
taagggccaggattgggagccatag

SEQ ID NO: 3816320 - DNA, 25 bp, Homo sapien
agggccaggattgggagccatagcc

SEQ ID NO: 3816321 - DNA, 25 bp, Homo sapien
ataagggccaggattgggagccata

SEQ ID NO: 3816322 - DNA, 25 bp, Homo sapien
ggccaggattgggagccatagccac

SEQ ID NO: 3816323 - DNA, 25 bp, Homo sapien
gatcggaaagcttattacctgccgg

SEQ ID NO: 3816324 - DNA, 25 bp, Homo sapien
cagatcggaaagcttattacctgcc

SEQ ID NO: 3816325 - DNA, 25 bp, Homo sapien
caacagatcggaaagcttattacct

SEQ ID NO: 3816326 - DNA, 25 bp, Homo sapien
gccaacagatcggaaagcttattac

SEQ ID NO: 3816327 - DNA, 25 bp, Homo sapien
actgagaagctgtaaccaagagagc

SEQ ID NO: 3816328 - DNA, 25 bp, Homo sapien
agaagctgtaaccaagagagctcac

SEQ ID NO: 3816329 - DNA, 25 bp, Homo sapien
ctattgacactgagaagctgtaacc

SEQ ID NO: 3816330 - DNA, 25 bp, Homo sapien
tgagaagctgtaaccaagagagctc

SEQ ID NO: 3816331 - DNA, 25 bp, Homo sapien
agggcaggcaagcagcgagtcaaat

SEQ ID NO: 3816332 - DNA, 25 bp, Homo sapien
gactatctccatatccacggtgcat

SEQ ID NO: 3816333 - DNA, 25 bp, Homo sapien
tcctgcttttgaaggactatctcca

SEQ ID NO: 3816334 - DNA, 25 bp, Homo sapien
gcctgcgcatatggagctgctcctg

SEQ ID NO: 3816335 - DNA, 25 bp, Homo sapien
cagaggtatgggatactgcctccag

SEQ ID NO: 3816336 - DNA, 25 bp, Homo sapien
tatgggatactgcctccaggcggcc

SEQ ID NO: 3816337 - DNA, 25 bp, Homo sapien
gtcagaggtatgggatactgcctcc

SEQ ID NO: 3816338 - DNA, 25 bp, Homo sapien
tgggatactgcctccaggcggccca

SEQ ID NO: 3816339 - DNA, 25 bp, Homo sapien
tcagtcataatgtatcacctcccga

SEQ ID NO: 3816340 - DNA, 25 bp, Homo sapien
ttttgcatgtcagtcataatgtatc

SEQ ID NO: 3816341 - DNA, 25 bp, Homo sapien
tgcatgtcagtcataatgtatcacc

SEQ ID NO: 3816342 - DNA, 25 bp, Homo sapien
ataatgtatcacctcccgactgcga

SEQ ID NO: 3816343 - DNA, 25 bp, Homo sapien
cccgagcgtacccacctggacctgt

SEQ ID NO: 3816344 - DNA, 25 bp, Homo sapien
ttcttcccgagcgtacccacctgga

SEQ ID NO: 3816345 - DNA, 25 bp, Homo sapien
gagcgtacccacctggacctgtctg

SEQ ID NO: 3816346 - DNA, 25 bp, Homo sapien
caaaagtgtttggcgtggagctggc

SEQ ID NO: 3816347 - DNA, 25 bp, Homo sapien
ctctcatggaagcttgctaactcac

SEQ ID NO: 3816348 - DNA, 25 bp, Homo sapien
ataccacttcctggtggtagttgca

SEQ ID NO: 3816349 - DNA, 25 bp, Homo sapien
tataccacttcctggtggtagttgc

SEQ ID NO: 3816350 - DNA, 25 bp, Homo sapien
atataccacttcctggtggtagttg

SEQ ID NO: 3816351 - DNA, 25 bp, Homo sapien
aatttgtctgagcaccaacaggtac

SEQ ID NO: 3816352 - DNA, 25 bp, Homo sapien
taacagcagttatctttgatgagga

SEQ ID NO: 3816353 - DNA, 25 bp, Homo sapien
gggcttgaacaaccttcccacttca

SEQ ID NO: 3816354 - DNA, 25 bp, Homo sapien
tataggttgagcatccataactgga

SEQ ID NO: 3816355 - DNA, 25 bp, Homo sapien
cttctaggccttttaggaagcatgg

SEQ ID NO: 3816356 - DNA, 25 bp, Homo sapien
ttctaggccttttaggaagcatgga

SEQ ID NO: 3816357 - DNA, 25 bp, Homo sapien
ctcctggtagatgtcttctaggcct

SEQ ID NO: 3816358 - DNA, 25 bp, Homo sapien
gaggctcctggtagatgtcttctag

SEQ ID NO: 3816359 - DNA, 25 bp, Homo sapien
cctcttccctatggattgattcatg

SEQ ID NO: 3816360 - DNA, 25 bp, Homo sapien
aagaaaattatgagcacccctccag

SEQ ID NO: 3816361 - DNA, 25 bp, Homo sapien
cagagaagcgcactgtgtgagaaca

SEQ ID NO: 3816362 - DNA, 25 bp, Homo sapien
agaagtgccagtctgctctgcccag

SEQ ID NO: 3816363 - DNA, 25 bp, Homo sapien
cacacgttcaaacctaaggagctct

SEQ ID NO: 3816364 - DNA, 25 bp, Homo sapien
caacaacaaccattaaagtatatat

SEQ ID NO: 3816365 - DNA, 25 bp, Homo sapien
tctacttctacgaatgtattttatg

SEQ ID NO: 3816366 - DNA, 25 bp, Homo sapien
gttaatgtttaatccacacgttcaa

SEQ ID NO: 3816367 - DNA, 25 bp, Homo sapien
ggataggttgcttcatctcagagga

SEQ ID NO: 3816368 - DNA, 25 bp, Homo sapien
cagaggattttgtactcttaattca

SEQ ID NO: 3816369 - DNA, 25 bp, Homo sapien
cagtttgccctacccaatgatggtc

SEQ ID NO: 3816370 - DNA, 25 bp, Homo sapien
cttaattcataaagagaacttctct

SEQ ID NO: 3816371 - DNA, 25 bp, Homo sapien
tgagcagcttcgctggtgcacagcc

SEQ ID NO: 3816372 - DNA, 25 bp, Homo sapien
cactggccgcacagatagggtgtct

SEQ ID NO: 3816373 - DNA, 25 bp, Homo sapien
tgacaaatagcacactcgtagggtt

SEQ ID NO: 3816374 - DNA, 25 bp, Homo sapien
cagtgtggagtctctcgtggacagc

SEQ ID NO: 3816375 - DNA, 25 bp, Homo sapien
tccacagtgggtgcactcaaaaggc

SEQ ID NO: 3816376 - DNA, 25 bp, Homo sapien
gaccctttgtctcactccaggtgaa

SEQ ID NO: 3816377 - DNA, 25 bp, Homo sapien
tgtaacaagattgcctttggccctg

SEQ ID NO: 3816378 - DNA, 25 bp, Homo sapien
tggattctctcatgtaacgttagac

SEQ ID NO: 3816379 - DNA, 25 bp, Homo sapien
aattttggatatcccagcttgagga

SEQ ID NO: 3816380 - DNA, 25 bp, Homo sapien
gaattttggatatcccagcttgagg

SEQ ID NO: 3816381 - DNA, 25 bp, Homo sapien
ttttggatatcccagcttgaggatc

SEQ ID NO: 3816382 - DNA, 25 bp, Homo sapien
aagaattttggatatcccagcttga

SEQ ID NO: 3816383 - DNA, 25 bp, Homo sapien
agagtggtcatatttgtggtgggct

SEQ ID NO: 3816384 - DNA, 25 bp, Homo sapien
ggtcatatttgtggtgggcttcagt

SEQ ID NO: 3816385 - DNA, 25 bp, Homo sapien
tggtcatatttgtggtgggcttcag

SEQ ID NO: 3816386 - DNA, 25 bp, Homo sapien
agtggtcatatttgtggtgggcttc

SEQ ID NO: 3816387 - DNA, 25 bp, Homo sapien
ggtcacagagctaggtaagttagag

SEQ ID NO: 3816388 - DNA, 25 bp, Homo sapien
gaagcaccaataatgctgagttaga

SEQ ID NO: 3816389 - DNA, 25 bp, Homo sapien
gccaggccttattctttgcatagac

SEQ ID NO: 3816390 - DNA, 25 bp, Homo sapien
agagggaagtcatataagaagcacc

SEQ ID NO: 3816391 - DNA, 25 bp, Homo sapien
tgagcgcatccagccatcaactgac

SEQ ID NO: 3816392 - DNA, 25 bp, Homo sapien
agactgccgaccagtgctgagaaca

SEQ ID NO: 3816393 - DNA, 25 bp, Homo sapien
tgcttcctcagactgccgaccagtg

SEQ ID NO: 3816394 - DNA, 25 bp, Homo sapien
aatatctgtgagctgagcgcatcca

SEQ ID NO: 3816395 - DNA, 25 bp, Homo sapien
agtccagcagggtagctgttggaaa

SEQ ID NO: 3816396 - DNA, 25 bp, Homo sapien
gacagtccagcagggtagctgttgg

SEQ ID NO: 3816397 - DNA, 25 bp, Homo sapien
tccagcagggtagctgttggaaatc

SEQ ID NO: 3816398 - DNA, 25 bp, Homo sapien
cagtccagcagggtagctgttggaa

SEQ ID NO: 3816399 - DNA, 25 bp, Homo sapien
agtcaccacctcttcatatgattct

SEQ ID NO: 3816400 - DNA, 25 bp, Homo sapien
tcaccacctcttcatatgattcttc

SEQ ID NO: 3816401 - DNA, 25 bp, Homo sapien
cactcctgcttacgacctcagtcac

SEQ ID NO: 3816402 - DNA, 25 bp, Homo sapien
tgcttacgacctcagtcaccacctc

SEQ ID NO: 3816403 - DNA, 25 bp, Homo sapien
aacaaacaggaaagggcagaataat

SEQ ID NO: 3816404 - DNA, 25 bp, Homo sapien
aacagaaacaaacaggaaagggcag

SEQ ID NO: 3816405 - DNA, 25 bp, Homo sapien
caggaaagggcagaataattgatat

SEQ ID NO: 3816406 - DNA, 25 bp, Homo sapien
acagaaacaaacaggaaagggcaga

SEQ ID NO: 3816407 - DNA, 25 bp, Homo sapien
ccgcctatcagggacctccgtgatt

SEQ ID NO: 3816408 - DNA, 25 bp, Homo sapien
tgaggtcttcaagttacaactccgc

SEQ ID NO: 3816409 - DNA, 25 bp, Homo sapien
aaggaattccctaccagcatgccag

SEQ ID NO: 3816410 - DNA, 25 bp, Homo sapien
tggaggactcacttccaacttggaa

SEQ ID NO: 3816411 - DNA, 25 bp, Homo sapien
ggaaggccggcaccggcttcccgca

SEQ ID NO: 3816412 - DNA, 25 bp, Homo sapien
aaggccggcaccggcttcccgcact

SEQ ID NO: 3816413 - DNA, 25 bp, Homo sapien
ggccggcaccggcttcccgcactcg

SEQ ID NO: 3816414 - DNA, 25 bp, Homo sapien
gaaggccggcaccggcttcccgcac

SEQ ID NO: 3816415 - DNA, 25 bp, Homo sapien
cggccgctggcataaggcggccaca

SEQ ID NO: 3816416 - DNA, 25 bp, Homo sapien
cataaggcggccacacggagggccc

SEQ ID NO: 3816417 - DNA, 25 bp, Homo sapien
tgctcatttccttggcggccgctgg

SEQ ID NO: 3816418 - DNA, 25 bp, Homo sapien
gacagcggtctgatggcgcagcccc

SEQ ID NO: 3816419 - DNA, 25 bp, Homo sapien
tcaagccgtcccgtttggactggta

SEQ ID NO: 3816420 - DNA, 25 bp, Homo sapien
ccccggcttcccaagagctctgtgg

SEQ ID NO: 3816421 - DNA, 25 bp, Homo sapien
aaatgtagttctctggcgcgccctg

SEQ ID NO: 3816422 - DNA, 25 bp, Homo sapien
ggcgccggcggaatggactacaact

SEQ ID NO: 3816423 - DNA, 25 bp, Homo sapien
acgcggagccgggacggagccacgg

SEQ ID NO: 3816424 - DNA, 25 bp, Homo sapien
cggacgcggagccgggacggagcca

SEQ ID NO: 3816425 - DNA, 25 bp, Homo sapien
ggagccgggacggagccacggccgc

SEQ ID NO: 3816426 - DNA, 25 bp, Homo sapien
gcggagccgggacggagccacggcc

SEQ ID NO: 3816427 - DNA, 25 bp, Homo sapien
ccttggcggcttcgaggtcatgtgt

SEQ ID NO: 3816428 - DNA, 25 bp, Homo sapien
tgcatgaacaaaagcgaagcccgct

SEQ ID NO: 3816429 - DNA, 25 bp, Homo sapien
aatacagggttcttgcagggcgtcg

SEQ ID NO: 3816430 - DNA, 25 bp, Homo sapien
gaaatccgtttgataaagccttggc

SEQ ID NO: 3816431 - DNA, 25 bp, Homo sapien
gtccagtcgtcctgagatactggga

SEQ ID NO: 3816432 - DNA, 25 bp, Homo sapien
ggcagtccagtcgtcctgagatact

SEQ ID NO: 3816433 - DNA, 25 bp, Homo sapien
caggcagtccagtcgtcctgagata

SEQ ID NO: 3816434 - DNA, 25 bp, Homo sapien
acacaggcagtccagtcgtcctgag

SEQ ID NO: 3816435 - DNA, 25 bp, Homo sapien
ctgttctgcctggccgggtgtatct

SEQ ID NO: 3816436 - DNA, 25 bp, Homo sapien
cctggccgggtgtatctctgggtcc

SEQ ID NO: 3816437 - DNA, 25 bp, Homo sapien
tctgcctggccgggtgtatctctgg

SEQ ID NO: 3816438 - DNA, 25 bp, Homo sapien
ttttccaggatcggggccacatcct

SEQ ID NO: 3816439 - DNA, 25 bp, Homo sapien
cgttcagttggcagagcccctcatg

SEQ ID NO: 3816440 - DNA, 25 bp, Homo sapien
tggtagcgcccctgacatctcttga

SEQ ID NO: 3816441 - DNA, 25 bp, Homo sapien
cataaaacatggcacgcagcagctg

SEQ ID NO: 3816442 - DNA, 25 bp, Homo sapien
tgaagggcaccataaggcagccgtt

SEQ ID NO: 3816443 - DNA, 25 bp, Homo sapien
gtctcagcgacttcctgcggctcag

SEQ ID NO: 3816444 - DNA, 25 bp, Homo sapien
tggtctcagcgacttcctgcggctc

SEQ ID NO: 3816445 - DNA, 25 bp, Homo sapien
gctggtctcagcgacttcctgcggc

SEQ ID NO: 3816446 - DNA, 25 bp, Homo sapien
tcagcgacttcctgcggctcagaag

SEQ ID NO: 3816447 - DNA, 25 bp, Homo sapien
ggccgagaggacagccgcggcggaa

SEQ ID NO: 3816448 - DNA, 25 bp, Homo sapien
aaaccactgtgctgatgcgccagca

SEQ ID NO: 3816449 - DNA, 25 bp, Homo sapien
tcggaaaaccactgtgctgatgcgc

SEQ ID NO: 3816450 - DNA, 25 bp, Homo sapien
cactgtgctgatgcgccagcagagg

SEQ ID NO: 3816451 - DNA, 25 bp, Homo sapien
agccctgtggacctgactccccggg

SEQ ID NO: 3816452 - DNA, 25 bp, Homo sapien
gagccctgtggacctgactccccgg

SEQ ID NO: 3816453 - DNA, 25 bp, Homo sapien
agagccctgtggacctgactccccg

SEQ ID NO: 3816454 - DNA, 25 bp, Homo sapien
gaggtttgcacatcatgtcgcccgc

SEQ ID NO: 3816455 - DNA, 25 bp, Homo sapien
gatcaagggcttggtcacttcatgt

SEQ ID NO: 3816456 - DNA, 25 bp, Homo sapien
aatctgctcgcttttccctgggaca

SEQ ID NO: 3816457 - DNA, 25 bp, Homo sapien
catgcagtgtctctttcccaagggt

SEQ ID NO: 3816458 - DNA, 25 bp, Homo sapien
gaactcttgacttggcttctgcctt

SEQ ID NO: 3816459 - DNA, 25 bp, Homo sapien
ttctgcctttgcctagagtcctgga

SEQ ID NO: 3816460 - DNA, 25 bp, Homo sapien
gctgtggaactcttgacttggcttc

SEQ ID NO: 3816461 - DNA, 25 bp, Homo sapien
gcctttgcctagagtcctggaaatg

SEQ ID NO: 3816462 - DNA, 25 bp, Homo sapien
gcaaagggtgttcgttccacggtca

SEQ ID NO: 3816463 - DNA, 25 bp, Homo sapien
tacctgggaaagcttagcagcactc

SEQ ID NO: 3816464 - DNA, 25 bp, Homo sapien
tcatagaaccctgcgctgtgtggac

SEQ ID NO: 3816465 - DNA, 25 bp, Homo sapien
tatgaggcagcaacgtctaggagtg

SEQ ID NO: 3816466 - DNA, 25 bp, Homo sapien
ctctagccatactctcttgggaggg

SEQ ID NO: 3816467 - DNA, 25 bp, Homo sapien
gacgcatcccggttcttgccatgga

SEQ ID NO: 3816468 - DNA, 25 bp, Homo sapien
tgcttgttggaacggtgagacctct

SEQ ID NO: 3816469 - DNA, 25 bp, Homo sapien
tctcctatctgggatgaagccgacg

SEQ ID NO: 3816470 - DNA, 25 bp, Homo sapien
tctgctcgcagccatcttcctccgt

SEQ ID NO: 3816471 - DNA, 25 bp, Homo sapien
cgtctgccatgttctctgctcgcag

SEQ ID NO: 3816472 - DNA, 25 bp, Homo sapien
catgttctctgctcgcagccatctt

SEQ ID NO: 3816473 - DNA, 25 bp, Homo sapien
agccatcttcctccgtctgccatgt

SEQ ID NO: 3816474 - DNA, 25 bp, Homo sapien
ggcagagcgccagccttgttattgg

SEQ ID NO: 3816475 - DNA, 25 bp, Homo sapien
cctgtcgcctgtagttttccaggaa

SEQ ID NO: 3816476 - DNA, 25 bp, Homo sapien
tcgtggactccctcatgagttgtgg

SEQ ID NO: 3816477 - DNA, 25 bp, Homo sapien
gggacaatcactggagccctttggg

SEQ ID NO: 3816478 - DNA, 25 bp, Homo sapien
tgcttggatctttcatcaggtccca

SEQ ID NO: 3816479 - DNA, 25 bp, Homo sapien
gagggtgcgctctctactcagcttc

SEQ ID NO: 3816480 - DNA, 25 bp, Homo sapien
tactcagcttcactccttgggacag

SEQ ID NO: 3816481 - DNA, 25 bp, Homo sapien
cttggatctttcatcaggtcccagg

SEQ ID NO: 3816482 - DNA, 25 bp, Homo sapien
cagagccccaaaggacgtgcttgcc

SEQ ID NO: 3816483 - DNA, 25 bp, Homo sapien
aactgctagaattttaaagggctgc

SEQ ID NO: 3816484 - DNA, 25 bp, Homo sapien
gataagggaacaaagactgctgcaa

SEQ ID NO: 3816485 - DNA, 25 bp, Homo sapien
atgcagagccccaaaggacgtgctt

SEQ ID NO: 3816486 - DNA, 25 bp, Homo sapien
caactgatggctggccaagaagata

SEQ ID NO: 3816487 - DNA, 25 bp, Homo sapien
caagaagataggagagttatgcgat

SEQ ID NO: 3816488 - DNA, 25 bp, Homo sapien
tgcaactgatggctggccaagaaga

SEQ ID NO: 3816489 - DNA, 25 bp, Homo sapien
tatgcgattggtcaaggactggtgt

SEQ ID NO: 3816490 - DNA, 25 bp, Homo sapien
tcaacttgcaggaagcttcctgccc

SEQ ID NO: 3816491 - DNA, 25 bp, Homo sapien
gctttcaacttgcaggaagcttcct

SEQ ID NO: 3816492 - DNA, 25 bp, Homo sapien
ctgcccgctcagtggtcaccgtaag

SEQ ID NO: 3816493 - DNA, 25 bp, Homo sapien
ccgctcagtggtcaccgtaagattg

SEQ ID NO: 3816494 - DNA, 25 bp, Homo sapien
tgggttttggtttcctggagccgca

SEQ ID NO: 3816495 - DNA, 25 bp, Homo sapien
caggccccacagttgcatggcattt

SEQ ID NO: 3816496 - DNA, 25 bp, Homo sapien
tggtttcctggagccgcatgcaggc

SEQ ID NO: 3816497 - DNA, 25 bp, Homo sapien
tgcctccatggcgtcctcagcctta

SEQ ID NO: 3816498 - DNA, 25 bp, Homo sapien
cctggtgggataagggcctgctctt

SEQ ID NO: 3816499 - DNA, 25 bp, Homo sapien
ggcagtcgcttctgtccctcggcag

SEQ ID NO: 3816500 - DNA, 25 bp, Homo sapien
tctctcaactgacttcttgtgggac

SEQ ID NO: 3816501 - DNA, 25 bp, Homo sapien
gcccttgcttttgctctgctggcag

SEQ ID NO: 3816502 - DNA, 25 bp, Homo sapien
gccacagtgagtacaacttcaatac

SEQ ID NO: 3816503 - DNA, 25 bp, Homo sapien
tctcattatcatgaaaacgctcagg

SEQ ID NO: 3816504 - DNA, 25 bp, Homo sapien
tgaaaacgctcaggcatgttccttg

SEQ ID NO: 3816505 - DNA, 25 bp, Homo sapien
taaactgtcccctcaagatttccag

SEQ ID NO: 3816506 - DNA, 25 bp, Homo sapien
ggcatatttgctagcgccttccagg

SEQ ID NO: 3816507 - DNA, 25 bp, Homo sapien
ccttccaggcatagaacggtggcag

SEQ ID NO: 3816508 - DNA, 25 bp, Homo sapien
tgcctgcggcccgtggcatatttgc

SEQ ID NO: 3816509 - DNA, 25 bp, Homo sapien
ttccaggcatagaacggtggcagtt

SEQ ID NO: 3816510 - DNA, 25 bp, Homo sapien
gaagctctgctttatgaagacaccg

SEQ ID NO: 3816511 - DNA, 25 bp, Homo sapien
ctttatgaagacaccgggcgcaggg

SEQ ID NO: 3816512 - DNA, 25 bp, Homo sapien
tctgctttatgaagacaccgggcgc

SEQ ID NO: 3816513 - DNA, 25 bp, Homo sapien
agctctgctttatgaagacaccggg

SEQ ID NO: 3816514 - DNA, 25 bp, Homo sapien
tgaacactggccgaatgacaggccg

SEQ ID NO: 3816515 - DNA, 25 bp, Homo sapien
tctgctgcacctgtacagctgggtc

SEQ ID NO: 3816516 - DNA, 25 bp, Homo sapien
tgttctcaacagctctataggctgc

SEQ ID NO: 3816517 - DNA, 25 bp, Homo sapien
tcgtagtgatcaccgcactgtgtgg

SEQ ID NO: 3816518 - DNA, 25 bp, Homo sapien
tcttaatttgttgatgtagcaaaca

SEQ ID NO: 3816519 - DNA, 25 bp, Homo sapien
ttctcaacttgtaaaaatattctta

SEQ ID NO: 3816520 - DNA, 25 bp, Homo sapien
aatattcttaatttgttgatgtagc

SEQ ID NO: 3816521 - DNA, 25 bp, Homo sapien
tgtagcaaacaaatttcaactctga

SEQ ID NO: 3816522 - DNA, 25 bp, Homo sapien
tctcacactattgtccaggacttca

SEQ ID NO: 3816523 - DNA, 25 bp, Homo sapien
ctattgtccaggacttcacactgct

SEQ ID NO: 3816524 - DNA, 25 bp, Homo sapien
aggatctcacactattgtccaggac

SEQ ID NO: 3816525 - DNA, 25 bp, Homo sapien
cacactattgtccaggacttcacac

SEQ ID NO: 3816526 - DNA, 25 bp, Homo sapien
aagtgtagaggttgtgggcaagagg

SEQ ID NO: 3816527 - DNA, 25 bp, Homo sapien
ctaagtgtagaggttgtgggcaaga

SEQ ID NO: 3816528 - DNA, 25 bp, Homo sapien
taagtgtagaggttgtgggcaagag

SEQ ID NO: 3816529 - DNA, 25 bp, Homo sapien
aaacacctgatcatcgttttgcata

SEQ ID NO: 3816530 - DNA, 25 bp, Homo sapien
attcggatgccgcagtgcaggagca

SEQ ID NO: 3816531 - DNA, 25 bp, Homo sapien
aggagcagcatctccggatcggtga

SEQ ID NO: 3816532 - DNA, 25 bp, Homo sapien
gcatctccggatcggtgaagcggtc

SEQ ID NO: 3816533 - DNA, 25 bp, Homo sapien
cacttaactggatcccttggctgat

SEQ ID NO: 3816534 - DNA, 25 bp, Homo sapien
caatcaaagtgtacggaaagacagt

SEQ ID NO: 3816535 - DNA, 25 bp, Homo sapien
ctcctcgtggtggaacaatcaaagt

SEQ ID NO: 3816536 - DNA, 25 bp, Homo sapien
ttactagggaccaaatccagagtct

SEQ ID NO: 3816537 - DNA, 25 bp, Homo sapien
ttgacctccacactgccggcccagc

SEQ ID NO: 3816538 - DNA, 25 bp, Homo sapien
gggcccgggatgctttgacctccac

SEQ ID NO: 3816539 - DNA, 25 bp, Homo sapien
gcagaagttccttgtaaatggcaaa

SEQ ID NO: 3816540 - DNA, 25 bp, Homo sapien
gcactgtgacggctgctaccactcc

SEQ ID NO: 3816541 - DNA, 25 bp, Homo sapien
ctgggcactgtgacggctgctacca

SEQ ID NO: 3816542 - DNA, 25 bp, Homo sapien
caaagggaataatcaatgcagaagt

SEQ ID NO: 3816543 - DNA, 25 bp, Homo sapien
tccctttgtgtctacacatatgcag

SEQ ID NO: 3816544 - DNA, 25 bp, Homo sapien
ggaataagcacaataccccatgggt

SEQ ID NO: 3816545 - DNA, 25 bp, Homo sapien
tttgtctctaataaggaataagcac

SEQ ID NO: 3816546 - DNA, 25 bp, Homo sapien
gatcagctcccacgtccatatgaga

SEQ ID NO: 3816547 - DNA, 25 bp, Homo sapien
cagtggtttcgtcccatggcctgtt

SEQ ID NO: 3816548 - DNA, 25 bp, Homo sapien
tggtttcgtcccatggcctgtttac

SEQ ID NO: 3816549 - DNA, 25 bp, Homo sapien
actctcagtggtttcgtcccatggc

SEQ ID NO: 3816550 - DNA, 25 bp, Homo sapien
tagtcttttgtccttatgttctttc

SEQ ID NO: 3816551 - DNA, 25 bp, Homo sapien
ttagttccttgattctatctgtctc

SEQ ID NO: 3816552 - DNA, 25 bp, Homo sapien
tagttccttgattctatctgtctca

SEQ ID NO: 3816553 - DNA, 25 bp, Homo sapien
agttccttgattctatctgtctcac

SEQ ID NO: 3816554 - DNA, 25 bp, Homo sapien
ctttagttccttgattctatctgtc

SEQ ID NO: 3816555 - DNA, 25 bp, Homo sapien
tctagagtagatctcatttccggga

SEQ ID NO: 3816556 - DNA, 25 bp, Homo sapien
tagagtagatctcatttccgggatg

SEQ ID NO: 3816557 - DNA, 25 bp, Homo sapien
attttctagagtagatctcatttcc

SEQ ID NO: 3816558 - DNA, 25 bp, Homo sapien
gagtagatctcatttccgggatgtg

SEQ ID NO: 3816559 - DNA, 25 bp, Homo sapien
gttcttccccctgtggctggctagg

SEQ ID NO: 3816560 - DNA, 25 bp, Homo sapien
tggtgaagtgggaacaacgtgaccc

SEQ ID NO: 3816561 - DNA, 25 bp, Homo sapien
gtgggaacaacgtgaccccacagcc

SEQ ID NO: 3816562 - DNA, 25 bp, Homo sapien
tcaaagagcacgctcaggacctggg

SEQ ID NO: 3816563 - DNA, 25 bp, Homo sapien
accacagcgttgaagaggagatcca

SEQ ID NO: 3816564 - DNA, 25 bp, Homo sapien
agacctgccccaaccacagcgttga

SEQ ID NO: 3816565 - DNA, 25 bp, Homo sapien
cccaaccacagcgttgaagaggaga

SEQ ID NO: 3816566 - DNA, 25 bp, Homo sapien
ctgccccaaccacagcgttgaagag

SEQ ID NO: 3816567 - DNA, 25 bp, Homo sapien
tgacacgggacctattcacaaggga

SEQ ID NO: 3816568 - DNA, 25 bp, Homo sapien
ttcctgcggtccacgaaaggctgtt

SEQ ID NO: 3816569 - DNA, 25 bp, Homo sapien
caggaattcggctgactgatggagc

SEQ ID NO: 3816570 - DNA, 25 bp, Homo sapien
tgcatgtctacagaacggctccctg

SEQ ID NO: 3816571 - DNA, 25 bp, Homo sapien
ctttggcaaaggtcttggtgggctg

SEQ ID NO: 3816572 - DNA, 25 bp, Homo sapien
gtgggctggcgcctgtatctgctta

SEQ ID NO: 3816573 - DNA, 25 bp, Homo sapien
tggaagaactggctcgtgcactgag

SEQ ID NO: 3816574 - DNA, 25 bp, Homo sapien
gctcgtgcactgagaatctgcttct

SEQ ID NO: 3816575 - DNA, 25 bp, Homo sapien
gcctctagatcagccgtgggctgct

SEQ ID NO: 3816576 - DNA, 25 bp, Homo sapien
aatgctcgcttgtgcctttggcctc

SEQ ID NO: 3816577 - DNA, 25 bp, Homo sapien
caggactactcatggggcctggtct

SEQ ID NO: 3816578 - DNA, 25 bp, Homo sapien
ggtgacggtgttgagcctctagatc

SEQ ID NO: 3816579 - DNA, 25 bp, Homo sapien
cagcaggacacatactcaggacttg

SEQ ID NO: 3816580 - DNA, 25 bp, Homo sapien
tatacagccttattatctaaaactc

SEQ ID NO: 3816581 - DNA, 25 bp, Homo sapien
ttcaaacactagcatgcgccattcc

SEQ ID NO: 3816582 - DNA, 25 bp, Homo sapien
catactcaggacttgaatgaaattg

SEQ ID NO: 3816583 - DNA, 25 bp, Homo sapien
atctgttctctccacatgtcggcgt

SEQ ID NO: 3816584 - DNA, 25 bp, Homo sapien
ggcgtccattcatatcatggtttgg

SEQ ID NO: 3816585 - DNA, 25 bp, Homo sapien
gttctctccacatgtcggcgtccat

SEQ ID NO: 3816586 - DNA, 25 bp, Homo sapien
tgtcggcgtccattcatatcatggt

SEQ ID NO: 3816587 - DNA, 25 bp, Homo sapien
gcaatatacctgatgtaatgaaaag

SEQ ID NO: 3816588 - DNA, 25 bp, Homo sapien
ccacaatttacagggcaatatacct

SEQ ID NO: 3816589 - DNA, 25 bp, Homo sapien
taccacaatttacagggcaatatac

SEQ ID NO: 3816590 - DNA, 25 bp, Homo sapien
cagggcaatatacctgatgtaatga

SEQ ID NO: 3816591 - DNA, 25 bp, Homo sapien
aaaactgccccctttcatgtgtcca

SEQ ID NO: 3816592 - DNA, 25 bp, Homo sapien
tgccccctttcatgtgtccataatt

SEQ ID NO: 3816593 - DNA, 25 bp, Homo sapien
atatcctccaacaccgccaccatat

SEQ ID NO: 3816594 - DNA, 25 bp, Homo sapien
ccaccatagttactaccgtcaaaat

SEQ ID NO: 3816595 - DNA, 25 bp, Homo sapien
caccatcacctcctaatccattata

SEQ ID NO: 3816596 - DNA, 25 bp, Homo sapien
ctcctaatccattatatccacatca

SEQ ID NO: 3816597 - DNA, 25 bp, Homo sapien
attatatccacatcacctcctccat

SEQ ID NO: 3816598 - DNA, 25 bp, Homo sapien
ccaccatacccgcctctactactat

SEQ ID NO: 3816599 - DNA, 25 bp, Homo sapien
ttccatcacggccaaaattacctcc

SEQ ID NO: 3816600 - DNA, 25 bp, Homo sapien
caaagtttccatcacggccaaaatt

SEQ ID NO: 3816601 - DNA, 25 bp, Homo sapien
tccaaagtttcctctgtgacccata

SEQ ID NO: 3816602 - DNA, 25 bp, Homo sapien
accacctccaaagtttcctctgtga

SEQ ID NO: 3816603 - DNA, 25 bp, Homo sapien
tctgtgatccagccggctgcatcac

SEQ ID NO: 3816604 - DNA, 25 bp, Homo sapien
gctgcatcacttgtttagcaagggc

SEQ ID NO: 3816605 - DNA, 25 bp, Homo sapien
tccagccggctgcatcacttgttta

SEQ ID NO: 3816606 - DNA, 25 bp, Homo sapien
gccggctgcatcacttgtttagcaa

SEQ ID NO: 3816607 - DNA, 25 bp, Homo sapien
atcaaccttgaatggtcgagcacgc

SEQ ID NO: 3816608 - DNA, 25 bp, Homo sapien
aatggtcgagcacgcattgctgcat

SEQ ID NO: 3816609 - DNA, 25 bp, Homo sapien
caaccttgaatggtcgagcacgcat

SEQ ID NO: 3816610 - DNA, 25 bp, Homo sapien
ccttgaatggtcgagcacgcattgc

SEQ ID NO: 3816611 - DNA, 25 bp, Homo sapien
tccccccagtggcgacggcgactgc

SEQ ID NO: 3816612 - DNA, 25 bp, Homo sapien
cccagtggcgacggcgactgccgga

SEQ ID NO: 3816613 - DNA, 25 bp, Homo sapien
cccccagtggcgacggcgactgccg

SEQ ID NO: 3816614 - DNA, 25 bp, Homo sapien
ccagtggcgacggcgactgccggag

SEQ ID NO: 3816615 - DNA, 25 bp, Homo sapien
tttgagacaggactcacctcttcca

SEQ ID NO: 3816616 - DNA, 25 bp, Homo sapien
ttgagacaggactcacctcttccaa

SEQ ID NO: 3816617 - DNA, 25 bp, Homo sapien
tcaagttgagaagctatctttgtgt

SEQ ID NO: 3816618 - DNA, 25 bp, Homo sapien
caagttgagaagctatctttgtgtt

SEQ ID NO: 3816619 - DNA, 25 bp, Homo sapien
ctcaagttgagaagctatctttgtg

SEQ ID NO: 3816620 - DNA, 25 bp, Homo sapien
cactcaagttgagaagctatctttg

SEQ ID NO: 3816621 - DNA, 25 bp, Homo sapien
tgtgaatgcatcctcactaccaggg

SEQ ID NO: 3816622 - DNA, 25 bp, Homo sapien
gattttgctgacatggtcttttctc

SEQ ID NO: 3816623 - DNA, 25 bp, Homo sapien
tctggttgtcaccttccatttcttc

SEQ ID NO: 3816624 - DNA, 25 bp, Homo sapien
tgaatgcatcctcactaccagggct

SEQ ID NO: 3816625 - DNA, 25 bp, Homo sapien
cttaatatctctcgcacaggtgcca

SEQ ID NO: 3816626 - DNA, 25 bp, Homo sapien
cattgctcctccttaatatctctcg

SEQ ID NO: 3816627 - DNA, 25 bp, Homo sapien
gggttcggtgccatggatctgcttc

SEQ ID NO: 3816628 - DNA, 25 bp, Homo sapien
cattgacctttagatgggctgtacg

SEQ ID NO: 3816629 - DNA, 25 bp, Homo sapien
ggcatggagctgcttttcctccttc

SEQ ID NO: 3816630 - DNA, 25 bp, Homo sapien
catggagctgcttttcctccttcat

SEQ ID NO: 3816631 - DNA, 25 bp, Homo sapien
gaggcatggagctgcttttcctcct

SEQ ID NO: 3816632 - DNA, 25 bp, Homo sapien
ggaggcatggagctgcttttcctcc

SEQ ID NO: 3816633 - DNA, 25 bp, Homo sapien
cctggatgccgggatcacagtgctg

SEQ ID NO: 3816634 - DNA, 25 bp, Homo sapien
gctccattccctcaagggtcatctt

SEQ ID NO: 3816635 - DNA, 25 bp, Homo sapien
gtagaccacccgcttggcactgatc

SEQ ID NO: 3816636 - DNA, 25 bp, Homo sapien
cttcaggccatgatttgcatgttgg

SEQ ID NO: 3816637 - DNA, 25 bp, Homo sapien
tgtagatcacaatgtaccccttggg

SEQ ID NO: 3816638 - DNA, 25 bp, Homo sapien
ggactaagggtagagctgtagatca

SEQ ID NO: 3816639 - DNA, 25 bp, Homo sapien
cttccttcaggactaagggtagagc

SEQ ID NO: 3816640 - DNA, 25 bp, Homo sapien
agagctgtagatcacaatgtacccc

SEQ ID NO: 3816641 - DNA, 25 bp, Homo sapien
acattctcactctcaggaccatgaa

SEQ ID NO: 3816642 - DNA, 25 bp, Homo sapien
cacattctcactctcaggaccatga

SEQ ID NO: 3816643 - DNA, 25 bp, Homo sapien
ttctcactctcaggaccatgaaaac

SEQ ID NO: 3816644 - DNA, 25 bp, Homo sapien
cattctcactctcaggaccatgaaa

SEQ ID NO: 3816645 - DNA, 25 bp, Homo sapien
tgctgacttgtagggcttgttagat

SEQ ID NO: 3816646 - DNA, 25 bp, Homo sapien
tgagatcctgttgctgacttgtagg

SEQ ID NO: 3816647 - DNA, 25 bp, Homo sapien
gatcctgttgctgacttgtagggct

SEQ ID NO: 3816648 - DNA, 25 bp, Homo sapien
tgttgctgacttgtagggcttgtta

SEQ ID NO: 3816649 - DNA, 25 bp, Homo sapien
cagctgactgtgtggcaataaccag

SEQ ID NO: 3816650 - DNA, 25 bp, Homo sapien
aaacaagctcccgtctccactagtg

SEQ ID NO: 3816651 - DNA, 25 bp, Homo sapien
gctgatctgggtagcttctggattt

SEQ ID NO: 3816652 - DNA, 25 bp, Homo sapien
caataaccagtgtttgcagacttct

SEQ ID NO: 3816653 - DNA, 25 bp, Homo sapien
caaagggtaccccaggaaatcactg

SEQ ID NO: 3816654 - DNA, 25 bp, Homo sapien
ccatcctcactggatatggaggcca

SEQ ID NO: 3816655 - DNA, 25 bp, Homo sapien
cagttccctcttgcctgttggttca

SEQ ID NO: 3816656 - DNA, 25 bp, Homo sapien
cattaggaagtggaaactctagctc

SEQ ID NO: 3816657 - DNA, 25 bp, Homo sapien
tttcgtcctccagggatttgtgagt

SEQ ID NO: 3816658 - DNA, 25 bp, Homo sapien
agtctacttttgctggttggtgctg

SEQ ID NO: 3816659 - DNA, 25 bp, Homo sapien
agcaggcatgggcagtctacttttg

SEQ ID NO: 3816660 - DNA, 25 bp, Homo sapien
ccagggatttgtgagtagcaggcat

SEQ ID NO: 3816661 - DNA, 25 bp, Homo sapien
tgagagcaaggtatcagtgcagcag

SEQ ID NO: 3816662 - DNA, 25 bp, Homo sapien
cctggaactggccaatgccagctga

SEQ ID NO: 3816663 - DNA, 25 bp, Homo sapien
gcagctaattgcagggaaaccctgg

SEQ ID NO: 3816664 - DNA, 25 bp, Homo sapien
ccatggcagctaattgcagggaaac

SEQ ID NO: 3816665 - DNA, 25 bp, Homo sapien
tggcacagggggcatccgactgcat

SEQ ID NO: 3816666 - DNA, 25 bp, Homo sapien
gatgtcgcagtggaagtattaggta

SEQ ID NO: 3816667 - DNA, 25 bp, Homo sapien
gctaaggatgtttgctgatgtcgca

SEQ ID NO: 3816668 - DNA, 25 bp, Homo sapien
gggatcctatcacttgtaaacctgg

SEQ ID NO: 3816669 - DNA, 25 bp, Homo sapien
tttgaccatggaaagttatatcccc

SEQ ID NO: 3816670 - DNA, 25 bp, Homo sapien
catgtgcgctgtccagaagagaggc

SEQ ID NO: 3816671 - DNA, 25 bp, Homo sapien
cgctcagcagagaacaagggcactt

SEQ ID NO: 3816672 - DNA, 25 bp, Homo sapien
tcccttgggtcggaataactcagac

SEQ ID NO: 3816673 - DNA, 25 bp, Homo sapien
tcagaccgggatccccactaatggt

SEQ ID NO: 3816674 - DNA, 25 bp, Homo sapien
cacagaatggagtccagttcacata

SEQ ID NO: 3816675 - DNA, 25 bp, Homo sapien
tgaagttgtcagagccccacttgtc

SEQ ID NO: 3816676 - DNA, 25 bp, Homo sapien
tcctcagccataaggcccctgaagt

SEQ ID NO: 3816677 - DNA, 25 bp, Homo sapien
tggagtccagttcacatactcccca

SEQ ID NO: 3816678 - DNA, 25 bp, Homo sapien
aacccagatttgaatcaatagcctc

SEQ ID NO: 3816679 - DNA, 25 bp, Homo sapien
taacccagatttgaatcaatagcct

SEQ ID NO: 3816680 - DNA, 25 bp, Homo sapien
ttaacccagatttgaatcaatagcc

SEQ ID NO: 3816681 - DNA, 25 bp, Homo sapien
cccagatttgaatcaatagcctcac

SEQ ID NO: 3816682 - DNA, 25 bp, Homo sapien
cattccagtgcagtgaagaacattc

SEQ ID NO: 3816683 - DNA, 25 bp, Homo sapien
gaagctccttgcatgattcagggat

SEQ ID NO: 3816684 - DNA, 25 bp, Homo sapien
gagcatctgttctggagacggccac

SEQ ID NO: 3816685 - DNA, 25 bp, Homo sapien
tgtcccttcgggcactgatttatgg

SEQ ID NO: 3816686 - DNA, 25 bp, Homo sapien
tttgactttaatgcatgcactctga

SEQ ID NO: 3816687 - DNA, 25 bp, Homo sapien
tgactttaatgcatgcactctgact

SEQ ID NO: 3816688 - DNA, 25 bp, Homo sapien
ttgactttaatgcatgcactctgac

SEQ ID NO: 3816689 - DNA, 25 bp, Homo sapien
tgcctttgcactcagcaacatcctc

SEQ ID NO: 3816690 - DNA, 25 bp, Homo sapien
ctgaatgactgacaggcctttcact

SEQ ID NO: 3816691 - DNA, 25 bp, Homo sapien
ccctgaatgactgacaggcctttca

SEQ ID NO: 3816692 - DNA, 25 bp, Homo sapien
gaatgactgacaggcctttcacttc

SEQ ID NO: 3816693 - DNA, 25 bp, Homo sapien
tatactcaagattcaggtcagtcat

SEQ ID NO: 3816694 - DNA, 25 bp, Homo sapien
cttatactcaagattcaggtcagtc

SEQ ID NO: 3816695 - DNA, 25 bp, Homo sapien
actcaagattcaggtcagtcatcca

SEQ ID NO: 3816696 - DNA, 25 bp, Homo sapien
caccttatactcaagattcaggtca

SEQ ID NO: 3816697 - DNA, 25 bp, Homo sapien
ccaaactggagggtcagaagacctt

SEQ ID NO: 3816698 - DNA, 25 bp, Homo sapien
agaccttctagaaggctggtttggg

SEQ ID NO: 3816699 - DNA, 25 bp, Homo sapien
cagaagaccttctagaaggctggtt

SEQ ID NO: 3816700 - DNA, 25 bp, Homo sapien
tggagggtcagaagaccttctagaa

SEQ ID NO: 3816701 - DNA, 25 bp, Homo sapien
gaacagagaatggagcccgagccct

SEQ ID NO: 3816702 - DNA, 25 bp, Homo sapien
caaatgtcaatctgtcccgcttctc

SEQ ID NO: 3816703 - DNA, 25 bp, Homo sapien
tacgagtgatctgaggctggtccat

SEQ ID NO: 3816704 - DNA, 25 bp, Homo sapien
gctttctctctgttgagtactcagg

SEQ ID NO: 3816705 - DNA, 25 bp, Homo sapien
tcagcagcgcaagctgtagaaggat

SEQ ID NO: 3816706 - DNA, 25 bp, Homo sapien
ctttggtcagtaatggcttcaccac

SEQ ID NO: 3816707 - DNA, 25 bp, Homo sapien
tggtcagtaatggcttcaccaccat

SEQ ID NO: 3816708 - DNA, 25 bp, Homo sapien
ttggtcagtaatggcttcaccacca

SEQ ID NO: 3816709 - DNA, 25 bp, Homo sapien
tttggtcagtaatggcttcaccacc

SEQ ID NO: 3816710 - DNA, 25 bp, Homo sapien
tttggaacagttgtgcttacactga

SEQ ID NO: 3816711 - DNA, 25 bp, Homo sapien
tgtgcttacactgaccactaccagc

SEQ ID NO: 3816712 - DNA, 25 bp, Homo sapien
taaaggatcagacagccatttggaa

SEQ ID NO: 3816713 - DNA, 25 bp, Homo sapien
agcccaatcgctcctttcatcagaa

SEQ ID NO: 3816714 - DNA, 25 bp, Homo sapien
cagggttgcttacagggactgatag

SEQ ID NO: 3816715 - DNA, 25 bp, Homo sapien
agggttgcttacagggactgatagc

SEQ ID NO: 3816716 - DNA, 25 bp, Homo sapien
ctccattcaggtgcttgactccagc

SEQ ID NO: 3816717 - DNA, 25 bp, Homo sapien
tgcatgtcctcaagttctccattca

SEQ ID NO: 3816718 - DNA, 25 bp, Homo sapien
tcaaatgcatgtcctcaagttctcc

SEQ ID NO: 3816719 - DNA, 25 bp, Homo sapien
tccattcaggtgcttgactccagcc

SEQ ID NO: 3816720 - DNA, 25 bp, Homo sapien
tggctaagcacagaccaagcatggc

SEQ ID NO: 3816721 - DNA, 25 bp, Homo sapien
ccctaggctctgatatttgcattca

SEQ ID NO: 3816722 - DNA, 25 bp, Homo sapien
cattgttattaacgttggctaagca

SEQ ID NO: 3816723 - DNA, 25 bp, Homo sapien
caagcatggcaaggaagctgtttct

SEQ ID NO: 3816724 - DNA, 25 bp, Homo sapien
tttgtggaccctaacgatgaagtct

SEQ ID NO: 3816725 - DNA, 25 bp, Homo sapien
gtttgtggaccctaacgatgaagtc

SEQ ID NO: 3816726 - DNA, 25 bp, Homo sapien
cttcacattttggatgccgctgctg

SEQ ID NO: 3816727 - DNA, 25 bp, Homo sapien
tcttcccgatgttcccagccttcca

SEQ ID NO: 3816728 - DNA, 25 bp, Homo sapien
ctctttcaacagttcctgtgattct

SEQ ID NO: 3816729 - DNA, 25 bp, Homo sapien
caccttcacattttggatgccgctg

SEQ ID NO: 3816730 - DNA, 25 bp, Homo sapien
tccactcagcaggtaccatctgggc

SEQ ID NO: 3816731 - DNA, 25 bp, Homo sapien
tcagcaggtaccatctgggctgcca

SEQ ID NO: 3816732 - DNA, 25 bp, Homo sapien
cttgcatgagctgcctccactcagc

SEQ ID NO: 3816733 - DNA, 25 bp, Homo sapien
actcagcaggtaccatctgggctgc

SEQ ID NO: 3816734 - DNA, 25 bp, Homo sapien
cttcctgagggatgattttgttcca

SEQ ID NO: 3816735 - DNA, 25 bp, Homo sapien
ttcctgagggatgattttgttccag

SEQ ID NO: 3816736 - DNA, 25 bp, Homo sapien
caggccttctggtcaaccgtggagc

SEQ ID NO: 3816737 - DNA, 25 bp, Homo sapien
caagcactggttggatcccatgctt

SEQ ID NO: 3816738 - DNA, 25 bp, Homo sapien
acaccaagcactggttggatcccat

SEQ ID NO: 3816739 - DNA, 25 bp, Homo sapien
ctggttggatcccatgcttgttggt

SEQ ID NO: 3816740 - DNA, 25 bp, Homo sapien
tgtgatgccagtcctgcgtcccctt

SEQ ID NO: 3816741 - DNA, 25 bp, Homo sapien
ggaagagggaggcatccaccaggag

SEQ ID NO: 3816742 - DNA, 25 bp, Homo sapien
aagagggaggcatccaccaggagga

SEQ ID NO: 3816743 - DNA, 25 bp, Homo sapien
tcacagaagagggtgcaggaagagg

SEQ ID NO: 3816744 - DNA, 25 bp, Homo sapien
caggaagagggaggcatccaccagg

SEQ ID NO: 3816745 - DNA, 25 bp, Homo sapien
ctggaacctgggcttgccccaggtg

SEQ ID NO: 3816746 - DNA, 25 bp, Homo sapien
gccttcacatagaccatctctattg

SEQ ID NO: 3816747 - DNA, 25 bp, Homo sapien
gggccttcacatagaccatctctat

SEQ ID NO: 3816748 - DNA, 25 bp, Homo sapien
gtgggccttcacatagaccatctct

SEQ ID NO: 3816749 - DNA, 25 bp, Homo sapien
ttcagcaaagacgaaggacagtgtg

SEQ ID NO: 3816750 - DNA, 25 bp, Homo sapien
cttcagcaaagacgaaggacagtgt

SEQ ID NO: 3816751 - DNA, 25 bp, Homo sapien
tcagcaaagacgaaggacagtgtgt

SEQ ID NO: 3816752 - DNA, 25 bp, Homo sapien
cccgggctctggaagtccgctgttc

SEQ ID NO: 3816753 - DNA, 25 bp, Homo sapien
ccgtgagtgtaaggacacaggtcca

SEQ ID NO: 3816754 - DNA, 25 bp, Homo sapien
aggcccttcccaacgctgtgctggg

SEQ ID NO: 3816755 - DNA, 25 bp, Homo sapien
tgctgaaccctaaagtcgtggggca

SEQ ID NO: 3816756 - DNA, 25 bp, Homo sapien
tgactgtgcaaagcgtgaacatgcg

SEQ ID NO: 3816757 - DNA, 25 bp, Homo sapien
gaacatgcgccgagtttatgaagcg

SEQ ID NO: 3816758 - DNA, 25 bp, Homo sapien
gggcagagccacgtttatcaagaag

SEQ ID NO: 3816759 - DNA, 25 bp, Homo sapien
taaatgaccccgcattcacggaggg

SEQ ID NO: 3816760 - DNA, 25 bp, Homo sapien
ggtcgccacattcagagacatcggg

SEQ ID NO: 3816761 - DNA, 25 bp, Homo sapien
tcactgctccttcttggtatgggag

SEQ ID NO: 3816762 - DNA, 25 bp, Homo sapien
ttggagaatggggtcaacagcttct

SEQ ID NO: 3816763 - DNA, 25 bp, Homo sapien
ttcttggtatgggagtactgatggt

SEQ ID NO: 3816764 - DNA, 25 bp, Homo sapien
cttgagaagcatggtcacatgtact

SEQ ID NO: 3816765 - DNA, 25 bp, Homo sapien
ttaattccaccgtgtttctctctgg

SEQ ID NO: 3816766 - DNA, 25 bp, Homo sapien
taattccaccgtgtttctctctggc

SEQ ID NO: 3816767 - DNA, 25 bp, Homo sapien
catggtcacatgtactttcagagcc

SEQ ID NO: 3816768 - DNA, 25 bp, Homo sapien
gctttcttctggcttgtggagtttc

SEQ ID NO: 3816769 - DNA, 25 bp, Homo sapien
ttatgatatcagctggttattttgt

SEQ ID NO: 3816770 - DNA, 25 bp, Homo sapien
ggcccccgctttcttctggcttgtg

SEQ ID NO: 3816771 - DNA, 25 bp, Homo sapien
atcagctggttattttgttcattag

SEQ ID NO: 3816772 - DNA, 25 bp, Homo sapien
aaccttccgataactcatccagaaa

SEQ ID NO: 3816773 - DNA, 25 bp, Homo sapien
ccgataactcatccagaaaatgatt

SEQ ID NO: 3816774 - DNA, 25 bp, Homo sapien
taaaaccttccgataactcatccag

SEQ ID NO: 3816775 - DNA, 25 bp, Homo sapien
gccataaaaccttccgataactcat

SEQ ID NO: 3816776 - DNA, 25 bp, Homo sapien
cctcttcttccagtgaacccatgat

SEQ ID NO: 3816777 - DNA, 25 bp, Homo sapien
ccattcctgaacctatggtcactac

SEQ ID NO: 3816778 - DNA, 25 bp, Homo sapien
aatccatggtcaccattcctgaacc

SEQ ID NO: 3816779 - DNA, 25 bp, Homo sapien
tccagtgaacccatgatcactgtcc

SEQ ID NO: 3816780 - DNA, 25 bp, Homo sapien
ggtcattgccatggacccatgttca

SEQ ID NO: 3816781 - DNA, 25 bp, Homo sapien
tgaactcatggtcactactcttgaa

SEQ ID NO: 3816782 - DNA, 25 bp, Homo sapien
tactcttgaatctatggtcactggc

SEQ ID NO: 3816783 - DNA, 25 bp, Homo sapien
ggctttgaagccatgatcaccatac

SEQ ID NO: 3816784 - DNA, 25 bp, Homo sapien
gaggctttgaagaactgggcgtggt

SEQ ID NO: 3816785 - DNA, 25 bp, Homo sapien
agggcagaggacgagcagaggatgg

SEQ ID NO: 3816786 - DNA, 25 bp, Homo sapien
aggacgagcagaggatgggagctca

SEQ ID NO: 3816787 - DNA, 25 bp, Homo sapien
tgctgaagtgaagtgaagggcgcca

SEQ ID NO: 3816788 - DNA, 25 bp, Homo sapien
tttttttccggcaatgacaattgtg

SEQ ID NO: 3816789 - DNA, 25 bp, Homo sapien
ccaggtgggctcttgaccaagaagc

SEQ ID NO: 3816790 - DNA, 25 bp, Homo sapien
ggtgggctcttgaccaagaagcctt

SEQ ID NO: 3816791 - DNA, 25 bp, Homo sapien
ggctcttgaccaagaagccttcctc

SEQ ID NO: 3816792 - DNA, 25 bp, Homo sapien
tattgggggcatctctctactggta

SEQ ID NO: 3816793 - DNA, 25 bp, Homo sapien
gcatctctctactggtactacccat

SEQ ID NO: 3816794 - DNA, 25 bp, Homo sapien
agaggcaaacacagcactagttgtc

SEQ ID NO: 3816795 - DNA, 25 bp, Homo sapien
ggaaagcagcataccttaggtccag

SEQ ID NO: 3816796 - DNA, 25 bp, Homo sapien
tctacgcatgcccacaagtaaaggc

SEQ ID NO: 3816797 - DNA, 25 bp, Homo sapien
ctgtctggacactctcactcaatgg

SEQ ID NO: 3816798 - DNA, 25 bp, Homo sapien
tctggaggtctaaggtacatgttac

SEQ ID NO: 3816799 - DNA, 25 bp, Homo sapien
caaccaaactcttttctgtccagga

SEQ ID NO: 3816800 - DNA, 25 bp, Homo sapien
aaggcctggcacaagatagacatca

SEQ ID NO: 3816801 - DNA, 25 bp, Homo sapien
cgccagccaagtctgaaaagcttgt

SEQ ID NO: 3816802 - DNA, 25 bp, Homo sapien
tggtgggtcccagcttgtacacaag

SEQ ID NO: 3816803 - DNA, 25 bp, Homo sapien
cacaagatagacatcaatgtgatga

SEQ ID NO: 3816804 - DNA, 25 bp, Homo sapien
caaggaaagcagagaactacggcca

SEQ ID NO: 3816805 - DNA, 25 bp, Homo sapien
catccgactggaggatgcccctcat

SEQ ID NO: 3816806 - DNA, 25 bp, Homo sapien
aaagcagagaactacggccatccga

SEQ ID NO: 3816807 - DNA, 25 bp, Homo sapien
agaactacggccatccgactggagg

SEQ ID NO: 3816808 - DNA, 25 bp, Homo sapien
gatcttcgtgcactttttggagcca

SEQ ID NO: 3816809 - DNA, 25 bp, Homo sapien
ttcgtgcactttttggagccatgac

SEQ ID NO: 3816810 - DNA, 25 bp, Homo sapien
gcactttttggagccatgacggtcc

SEQ ID NO: 3816811 - DNA, 25 bp, Homo sapien
tgatcttcgtgcactttttggagcc

SEQ ID NO: 3816812 - DNA, 25 bp, Homo sapien
cttctctctaggagactgcagagga

SEQ ID NO: 3816813 - DNA, 25 bp, Homo sapien
cagaggatgcaaagggaattttgcc

SEQ ID NO: 3816814 - DNA, 25 bp, Homo sapien
ggaccatttaccaagctgctcattg

SEQ ID NO: 3816815 - DNA, 25 bp, Homo sapien
ttaggtaattcacagctggggtagg

SEQ ID NO: 3816816 - DNA, 25 bp, Homo sapien
gctgtctcccttgggaaaaacagcc

SEQ ID NO: 3816817 - DNA, 25 bp, Homo sapien
ctcccttgggaaaaacagccagttg

SEQ ID NO: 3816818 - DNA, 25 bp, Homo sapien
tgtctcccttgggaaaaacagccag

SEQ ID NO: 3816819 - DNA, 25 bp, Homo sapien
ctgctgtctcccttgggaaaaacag

SEQ ID NO: 3816820 - DNA, 25 bp, Homo sapien
ggtcaacgtgaacagtgaccagggc

SEQ ID NO: 3816821 - DNA, 25 bp, Homo sapien
ctgttcagcccagcgcagggcacag

SEQ ID NO: 3816822 - DNA, 25 bp, Homo sapien
ctgggggtcaacgtgaacagtgacc

SEQ ID NO: 3816823 - DNA, 25 bp, Homo sapien
gcacaggcaggttctgagtccggat

SEQ ID NO: 3816824 - DNA, 25 bp, Homo sapien
cagtacagagttctttagatttcta

SEQ ID NO: 3816825 - DNA, 25 bp, Homo sapien
tattctattgatttacagtacagag

SEQ ID NO: 3816826 - DNA, 25 bp, Homo sapien
tgtatattctattgatttacagtac

SEQ ID NO: 3816827 - DNA, 25 bp, Homo sapien
agtacagagttctttagatttctac

SEQ ID NO: 3816828 - DNA, 25 bp, Homo sapien
atgggaacttgaaaggtgacgtgac

SEQ ID NO: 3816829 - DNA, 25 bp, Homo sapien
agctgtgtggtcgccagggcctcca

SEQ ID NO: 3816830 - DNA, 25 bp, Homo sapien
gtttgcctcgaagaccacgttctga

SEQ ID NO: 3816831 - DNA, 25 bp, Homo sapien
ttaaagttgggctgtcaaggtctcc

SEQ ID NO: 3816832 - DNA, 25 bp, Homo sapien
ccaagttccagggaactcctgccag

SEQ ID NO: 3816833 - DNA, 25 bp, Homo sapien
gctgtgcagtttgcctcgaagacca

SEQ ID NO: 3816834 - DNA, 25 bp, Homo sapien
tctaaaccactgttctctaaaccac

SEQ ID NO: 3816835 - DNA, 25 bp, Homo sapien
gtctcctttttgcatcgtgtttaca

SEQ ID NO: 3816836 - DNA, 25 bp, Homo sapien
ttttgcatcgtgtttacacttcaca

SEQ ID NO: 3816837 - DNA, 25 bp, Homo sapien
taattggtaatggttatgccaataa

SEQ ID NO: 3816838 - DNA, 25 bp, Homo sapien
tggttatgccaataattcttgatga

SEQ ID NO: 3816839 - DNA, 25 bp, Homo sapien
cacagacctgggagattgacacatg

SEQ ID NO: 3816840 - DNA, 25 bp, Homo sapien
gactcggaggaggttacttcacaca

SEQ ID NO: 3816841 - DNA, 25 bp, Homo sapien
tcacagcatcccaattaggtaggcg

SEQ ID NO: 3816842 - DNA, 25 bp, Homo sapien
tggattcaggactccctcagcgtaa

SEQ ID NO: 3816843 - DNA, 25 bp, Homo sapien
cagcagaggcgggcaaggggtctgg

SEQ ID NO: 3816844 - DNA, 25 bp, Homo sapien
cagaggcgggcaaggggtctggact

SEQ ID NO: 3816845 - DNA, 25 bp, Homo sapien
gccagcagaggcgggcaaggggtct

SEQ ID NO: 3816846 - DNA, 25 bp, Homo sapien
aggcgggcaaggggtctggactgtg

SEQ ID NO: 3816847 - DNA, 25 bp, Homo sapien
ttgacccgaaataccaacagtcgtg

SEQ ID NO: 3816848 - DNA, 25 bp, Homo sapien
cctccagctcaaggtgagttgaccc

SEQ ID NO: 3816849 - DNA, 25 bp, Homo sapien
caaggtgagttgacccgaaatacca

SEQ ID NO: 3816850 - DNA, 25 bp, Homo sapien
ccaacagtcgtgtcgctggctgtgt

SEQ ID NO: 3816851 - DNA, 25 bp, Homo sapien
gagctttgaaccctctgtccttgcc

SEQ ID NO: 3816852 - DNA, 25 bp, Homo sapien
caatgggggtcagagctttgaaccc

SEQ ID NO: 3816853 - DNA, 25 bp, Homo sapien
tggcagcagaacagaggcccacctt

SEQ ID NO: 3816854 - DNA, 25 bp, Homo sapien
tccttgccatcattggctgggctgg

SEQ ID NO: 3816855 - DNA, 25 bp, Homo sapien
ggcacagggcacaagtgggcatctg

SEQ ID NO: 3816856 - DNA, 25 bp, Homo sapien
ggcccctgcatgccctcgggaatcc

SEQ ID NO: 3816857 - DNA, 25 bp, Homo sapien
cacagggcacaagtgggcatctggc

SEQ ID NO: 3816858 - DNA, 25 bp, Homo sapien
acagggcacaagtgggcatctggcc

SEQ ID NO: 3816859 - DNA, 25 bp, Homo sapien
tagaagaagataggaggtgcccact

SEQ ID NO: 3816860 - DNA, 25 bp, Homo sapien
tttgccactttctcagattgggtag

SEQ ID NO: 3816861 - DNA, 25 bp, Homo sapien
aactgagtgggagctgagacttgac

SEQ ID NO: 3816862 - DNA, 25 bp, Homo sapien
gaggtgcccactgaatccctggaac

SEQ ID NO: 3816863 - DNA, 25 bp, Homo sapien
tatttccttccacgagcatctgtcc

SEQ ID NO: 3816864 - DNA, 25 bp, Homo sapien
ccttccacgagcatctgtccatgat

SEQ ID NO: 3816865 - DNA, 25 bp, Homo sapien
tttccttccacgagcatctgtccat

SEQ ID NO: 3816866 - DNA, 25 bp, Homo sapien
tccacgagcatctgtccatgatcaa

SEQ ID NO: 3816867 - DNA, 25 bp, Homo sapien
gccacgcaagctgacggcaaggtga

SEQ ID NO: 3816868 - DNA, 25 bp, Homo sapien
tgacggcaaggtgaccacgtggcat

SEQ ID NO: 3816869 - DNA, 25 bp, Homo sapien
agggccacgtctgccacgcaagctg

SEQ ID NO: 3816870 - DNA, 25 bp, Homo sapien
tcttctcacagtgtgtgccagggcc

SEQ ID NO: 3816871 - DNA, 25 bp, Homo sapien
cagcctggtttgtcagacacgagga

SEQ ID NO: 3816872 - DNA, 25 bp, Homo sapien
gcctggtttgtcagacacgaggagc

SEQ ID NO: 3816873 - DNA, 25 bp, Homo sapien
cctggtttgtcagacacgaggagcc

SEQ ID NO: 3816874 - DNA, 25 bp, Homo sapien
tcagaaacgacacttgtctccagaa

SEQ ID NO: 3816875 - DNA, 25 bp, Homo sapien
ctctgcaaagctgccttgacagtga

SEQ ID NO: 3816876 - DNA, 25 bp, Homo sapien
cccaggttcctgtggaggtctgtct

SEQ ID NO: 3816877 - DNA, 25 bp, Homo sapien
ggctttgatggtagagctctctgca

SEQ ID NO: 3816878 - DNA, 25 bp, Homo sapien
gtctgtcttcctggcggctttgatg

SEQ ID NO: 3816879 - DNA, 25 bp, Homo sapien
gagctctttttcacatgataactgc

SEQ ID NO: 3816880 - DNA, 25 bp, Homo sapien
tgcctaacattatgagttacagaag

SEQ ID NO: 3816881 - DNA, 25 bp, Homo sapien
gatgatgcctgactttgtttaacga

SEQ ID NO: 3816882 - DNA, 25 bp, Homo sapien
acaaagaaataactcgagatgatgc

SEQ ID NO: 3816883 - DNA, 25 bp, Homo sapien
ttttgtgtgtgagcaagttggctaa

SEQ ID NO: 3816884 - DNA, 25 bp, Homo sapien
aaccagcacctaatgttcctagtgg

SEQ ID NO: 3816885 - DNA, 25 bp, Homo sapien
gaatcccaatgcaaaaagagaaagt

SEQ ID NO: 3816886 - DNA, 25 bp, Homo sapien
tgtctaactacctgcagcactaaga

SEQ ID NO: 3816887 - DNA, 25 bp, Homo sapien
tactgacacaaatgtagaatatgct

SEQ ID NO: 3816888 - DNA, 25 bp, Homo sapien
caaaagtaacctctagaaatctaag

SEQ ID NO: 3816889 - DNA, 25 bp, Homo sapien
gatatactacccaaagtcaaatttc

SEQ ID NO: 3816890 - DNA, 25 bp, Homo sapien
cagtgaactgtgatcctaatttgat

SEQ ID NO: 3816891 - DNA, 25 bp, Homo sapien
tgaagccctgcaaactaaagttaga

SEQ ID NO: 3816892 - DNA, 25 bp, Homo sapien
tgcctgctgatgtatgggctactca

SEQ ID NO: 3816893 - DNA, 25 bp, Homo sapien
caagtacagtatgcctgttatcaga

SEQ ID NO: 3816894 - DNA, 25 bp, Homo sapien
ggctactcaggaagttcacatgaac

SEQ ID NO: 3816895 - DNA, 25 bp, Homo sapien
tcagactcccggacttggattcagc

SEQ ID NO: 3816896 - DNA, 25 bp, Homo sapien
gatgtacatctctgcgtgcctgggt

SEQ ID NO: 3816897 - DNA, 25 bp, Homo sapien
tataaggtgcctcatctttgccaaa

SEQ ID NO: 3816898 - DNA, 25 bp, Homo sapien
tgtttcactgtgagacggctgcgcg

SEQ ID NO: 3816899 - DNA, 25 bp, Homo sapien
cgcgggttggatccgggtcacaggc

SEQ ID NO: 3816900 - DNA, 25 bp, Homo sapien
agccggggtctgtgcgccgcgggtt

SEQ ID NO: 3816901 - DNA, 25 bp, Homo sapien
gagagcgcgggctggtgctgtacgg

SEQ ID NO: 3816902 - DNA, 25 bp, Homo sapien
tgctgtacggagctctggcgcagaa

SEQ ID NO: 3816903 - DNA, 25 bp, Homo sapien
atgggaaggcaacagggacttccct

SEQ ID NO: 3816904 - DNA, 25 bp, Homo sapien
tgtctgcgggtaccgctgttccagc

SEQ ID NO: 3816905 - DNA, 25 bp, Homo sapien
tgtaagcgccctacagtttgcatgg

SEQ ID NO: 3816906 - DNA, 25 bp, Homo sapien
ccttttgcactgtctgcgggtaccg

SEQ ID NO: 3816907 - DNA, 25 bp, Homo sapien
ggaggtgctgggatgcgctgctgtg

SEQ ID NO: 3816908 - DNA, 25 bp, Homo sapien
gaggtgctgggatgcgctgctgtgg

SEQ ID NO: 3816909 - DNA, 25 bp, Homo sapien
gcagagaaaggtcccgaggacgcaa

SEQ ID NO: 3816910 - DNA, 25 bp, Homo sapien
gcgttctgggtggtgaacgtcccca

SEQ ID NO: 3816911 - DNA, 25 bp, Homo sapien
tgctcactgcgaggtcgcgcaccgg

SEQ ID NO: 3816912 - DNA, 25 bp, Homo sapien
cagggtctcccggagggaggaacag

SEQ ID NO: 3816913 - DNA, 25 bp, Homo sapien
tctgggactgaatcgcgtgggtctc

SEQ ID NO: 3816914 - DNA, 25 bp, Homo sapien
ggacactcctcgctctctagttgga

SEQ ID NO: 3816915 - DNA, 25 bp, Homo sapien
tattctagagggttgcttgcggcag

SEQ ID NO: 3816916 - DNA, 25 bp, Homo sapien
cataagaatagcgaacccatgaggt

SEQ ID NO: 3816917 - DNA, 25 bp, Homo sapien
gagattcctggtgttgggtaaaatg

SEQ ID NO: 3816918 - DNA, 25 bp, Homo sapien
agattcctggtgttgggtaaaatga

SEQ ID NO: 3816919 - DNA, 25 bp, Homo sapien
ttgggtaaaatgagggcattcagcc

SEQ ID NO: 3816920 - DNA, 25 bp, Homo sapien
ctgtggccatggtctgatcagtcat

SEQ ID NO: 3816921 - DNA, 25 bp, Homo sapien
gagttaaaatccctgtggccatggt

SEQ ID NO: 3816922 - DNA, 25 bp, Homo sapien
tgcccgtcatcactggagttaaaat

SEQ ID NO: 3816923 - DNA, 25 bp, Homo sapien
gcccgtcatcactggagttaaaatc

SEQ ID NO: 3816924 - DNA, 25 bp, Homo sapien
taataaagcctctggtgaacttcag

SEQ ID NO: 3816925 - DNA, 25 bp, Homo sapien
cacttgagaagggatgtagacctgt

SEQ ID NO: 3816926 - DNA, 25 bp, Homo sapien
gcaccctgtgttgctctgtggcaaa

SEQ ID NO: 3816927 - DNA, 25 bp, Homo sapien
tggaagttgctgtgcctagccctgc

SEQ ID NO: 3816928 - DNA, 25 bp, Homo sapien
gaaatactccttaaatatccgtgac

SEQ ID NO: 3816929 - DNA, 25 bp, Homo sapien
tcacattcagtaagaactgccacat

SEQ ID NO: 3816930 - DNA, 25 bp, Homo sapien
tccagacaggcctctgttgctgaat

SEQ ID NO: 3816931 - DNA, 25 bp, Homo sapien
gaaaagtcctctatgctctggtacc

SEQ ID NO: 3816932 - DNA, 25 bp, Homo sapien
aatctgtatatttggtgtgttcact

SEQ ID NO: 3816933 - DNA, 25 bp, Homo sapien
tgttcactgaattagtcgtttggca

SEQ ID NO: 3816934 - DNA, 25 bp, Homo sapien
aagaagcaagttgttgacaaatctg

SEQ ID NO: 3816935 - DNA, 25 bp, Homo sapien
tcgtttggcaaattgatcgcttact

SEQ ID NO: 3816936 - DNA, 25 bp, Homo sapien
tccttctctgggaacgaatatttgg

SEQ ID NO: 3816937 - DNA, 25 bp, Homo sapien
tatttgggaaatgagaaccttggca

SEQ ID NO: 3816938 - DNA, 25 bp, Homo sapien
tctaacatgtagaaacatccacgga

SEQ ID NO: 3816939 - DNA, 25 bp, Homo sapien
gagaaccttggcacacctctaacat

SEQ ID NO: 3816940 - DNA, 25 bp, Homo sapien
tctggactgagggtcgtatctccca

SEQ ID NO: 3816941 - DNA, 25 bp, Homo sapien
gactgagggtcgtatctcccagcag

SEQ ID NO: 3816942 - DNA, 25 bp, Homo sapien
ggactgagggtcgtatctcccagca

SEQ ID NO: 3816943 - DNA, 25 bp, Homo sapien
tggactgagggtcgtatctcccagc

SEQ ID NO: 3816944 - DNA, 25 bp, Homo sapien
gagagctccatgccctggagaaagg

SEQ ID NO: 3816945 - DNA, 25 bp, Homo sapien
agctccatgccctggagaaaggcct

SEQ ID NO: 3816946 - DNA, 25 bp, Homo sapien
tgcactccctgagagctccatgccc

SEQ ID NO: 3816947 - DNA, 25 bp, Homo sapien
ctgcactccctgagagctccatgcc

SEQ ID NO: 3816948 - DNA, 25 bp, Homo sapien
tctgtttggcaatacttgctgctgc

SEQ ID NO: 3816949 - DNA, 25 bp, Homo sapien
ctctgtttggcaatacttgctgctg

SEQ ID NO: 3816950 - DNA, 25 bp, Homo sapien
tccaccaggccgtcctctctgctca

SEQ ID NO: 3816951 - DNA, 25 bp, Homo sapien
ccaccaggccgtcctctctgctcac

SEQ ID NO: 3816952 - DNA, 25 bp, Homo sapien
ctccaccaggccgtcctctctgctc

SEQ ID NO: 3816953 - DNA, 25 bp, Homo sapien
actccaccaggccgtcctctctgct

SEQ ID NO: 3816954 - DNA, 25 bp, Homo sapien
cttgtccagtctcagaactttcccc

SEQ ID NO: 3816955 - DNA, 25 bp, Homo sapien
agtctcagaactttccccatcaaga

SEQ ID NO: 3816956 - DNA, 25 bp, Homo sapien
tgtccagtctcagaactttccccat

SEQ ID NO: 3816957 - DNA, 25 bp, Homo sapien
ccagtctcagaactttccccatcaa

SEQ ID NO: 3816958 - DNA, 25 bp, Homo sapien
tgcaccgcttggatgtagacttcat

SEQ ID NO: 3816959 - DNA, 25 bp, Homo sapien
tcctggcatgatcctacgtagtcac

SEQ ID NO: 3816960 - DNA, 25 bp, Homo sapien
tcgatacatgcatcacgtcctggca

SEQ ID NO: 3816961 - DNA, 25 bp, Homo sapien
tcctttctgcatgcaccgcttggat

SEQ ID NO: 3816962 - DNA, 25 bp, Homo sapien
tgcatgtggcaagactgaagatttc

SEQ ID NO: 3816963 - DNA, 25 bp, Homo sapien
cagcctctgggcatatgggaactgt

SEQ ID NO: 3816964 - DNA, 25 bp, Homo sapien
cttcagggtcatatcgcagagggca

SEQ ID NO: 3816965 - DNA, 25 bp, Homo sapien
ggctttgccaccctaggcttcaggg

SEQ ID NO: 3816966 - DNA, 25 bp, Homo sapien
aggccagggattcagatgctccaga

SEQ ID NO: 3816967 - DNA, 25 bp, Homo sapien
gccagggattcagatgctccagaaa

SEQ ID NO: 3816968 - DNA, 25 bp, Homo sapien
gggattcagatgctccagaaagcag

SEQ ID NO: 3816969 - DNA, 25 bp, Homo sapien
cagggattcagatgctccagaaagc

SEQ ID NO: 3816970 - DNA, 25 bp, Homo sapien
cacatctggaaggccccagatgtgg

SEQ ID NO: 3816971 - DNA, 25 bp, Homo sapien
cagactgaccaaggccggagaacaa

SEQ ID NO: 3816972 - DNA, 25 bp, Homo sapien
tccagactgaccaaggccggagaac

SEQ ID NO: 3816973 - DNA, 25 bp, Homo sapien
tgtggccgcatctggggccttccag

SEQ ID NO: 3816974 - DNA, 25 bp, Homo sapien
gtgtgggcctggcaggcacaggctg

SEQ ID NO: 3816975 - DNA, 25 bp, Homo sapien
ctgtgtgggcctggcaggcacaggc

SEQ ID NO: 3816976 - DNA, 25 bp, Homo sapien
ctgaaagtcctgtgtgggcctggca

SEQ ID NO: 3816977 - DNA, 25 bp, Homo sapien
gtgggcctggcaggcacaggctgcc

SEQ ID NO: 3816978 - DNA, 25 bp, Homo sapien
cactgcctgggaaagctgagcacag

SEQ ID NO: 3816979 - DNA, 25 bp, Homo sapien
acagtcctgagctcttggcccttgc

SEQ ID NO: 3816980 - DNA, 25 bp, Homo sapien
tgcagcattgagtttggccactgcc

SEQ ID NO: 3816981 - DNA, 25 bp, Homo sapien
tcagctcctccccggaggttggcca

SEQ ID NO: 3816982 - DNA, 25 bp, Homo sapien
gaaaataagacaagctaggagcact

SEQ ID NO: 3816983 - DNA, 25 bp, Homo sapien
catggtaagctgtctagaggagaaa

SEQ ID NO: 3816984 - DNA, 25 bp, Homo sapien
gagcactgaaccctggacgctctca

SEQ ID NO: 3816985 - DNA, 25 bp, Homo sapien
gacgctctcatggtaagctgtctag

SEQ ID NO: 3816986 - DNA, 25 bp, Homo sapien
taactagtaaagatccctcaggctc

SEQ ID NO: 3816987 - DNA, 25 bp, Homo sapien
cctagtaaacagctcgtggacgcac

SEQ ID NO: 3816988 - DNA, 25 bp, Homo sapien
gtcagacgatcacaccatggaaggg

SEQ ID NO: 3816989 - DNA, 25 bp, Homo sapien
aaaggcgatcaactcccagtcaggg

SEQ ID NO: 3816990 - DNA, 25 bp, Homo sapien
tcttcacatagcacattgttctctt

SEQ ID NO: 3816991 - DNA, 25 bp, Homo sapien
cttcacatagcacattgttctctta

SEQ ID NO: 3816992 - DNA, 25 bp, Homo sapien
aattcccttgggctctgcccatgga

SEQ ID NO: 3816993 - DNA, 25 bp, Homo sapien
tactgacatgtgagggagcactgat

SEQ ID NO: 3816994 - DNA, 25 bp, Homo sapien
gcttggccctagtttgaaggtactg

SEQ ID NO: 3816995 - DNA, 25 bp, Homo sapien
gaagcacaggtgacacgcagagcag

SEQ ID NO: 3816996 - DNA, 25 bp, Homo sapien
tgcactcaaagggcccaaggagcat

SEQ ID NO: 3816997 - DNA, 25 bp, Homo sapien
caaggagcatctcctcgctcagcgg

SEQ ID NO: 3816998 - DNA, 25 bp, Homo sapien
cagtgcatgcatcaagacattggtc

SEQ ID NO: 3816999 - DNA, 25 bp, Homo sapien
aaggaccacggctctgatcaggact

SEQ ID NO: 3817000 - DNA, 25 bp, Homo sapien
taagggttcctcaggcgtctgaccc

SEQ ID NO: 3817001 - DNA, 25 bp, Homo sapien
gacccggctcccatgtggatggaga

SEQ ID NO: 3817002 - DNA, 25 bp, Homo sapien
tagtctaagctgctacgtgtcgcca

SEQ ID NO: 3817003 - DNA, 25 bp, Homo sapien
ggctccgtggaaagacactctaata

SEQ ID NO: 3817004 - DNA, 25 bp, Homo sapien
aaagcagaggacagacacgtggcaa

SEQ ID NO: 3817005 - DNA, 25 bp, Homo sapien
gaacagagggaaacaccattaaggc

SEQ ID NO: 3817006 - DNA, 25 bp, Homo sapien
gggccaatccctacttccaagttgc

SEQ ID NO: 3817007 - DNA, 25 bp, Homo sapien
cacagagaggcccatcagagtggtc

SEQ ID NO: 3817008 - DNA, 25 bp, Homo sapien
cggcaccggcgtggggctgaggctc

SEQ ID NO: 3817009 - DNA, 25 bp, Homo sapien
gctgaggctcaggatgctgctgccc

SEQ ID NO: 3817010 - DNA, 25 bp, Homo sapien
ggctcaggatgctgctgccctgcat

SEQ ID NO: 3817011 - DNA, 25 bp, Homo sapien
ccggcaccggcgtggggctgaggct

SEQ ID NO: 3817012 - DNA, 25 bp, Homo sapien
gccatgccaccgtaggtggccccag

SEQ ID NO: 3817013 - DNA, 25 bp, Homo sapien
ggcctcggctgtcccaagaggcact

SEQ ID NO: 3817014 - DNA, 25 bp, Homo sapien
gaggcactttcgtggcttccagtaa

SEQ ID NO: 3817015 - DNA, 25 bp, Homo sapien
tcggctgtcccaagaggcactttcg

SEQ ID NO: 3817016 - DNA, 25 bp, Homo sapien
gagaattgcccaaagaggagctccc

SEQ ID NO: 3817017 - DNA, 25 bp, Homo sapien
gcatgcgttctcaaggtgggaccca

SEQ ID NO: 3817018 - DNA, 25 bp, Homo sapien
catgtggagtccgaagaatgcaggc

SEQ ID NO: 3817019 - DNA, 25 bp, Homo sapien
cacatacatctacatgggcagggaa

SEQ ID NO: 3817020 - DNA, 25 bp, Homo sapien
cctggtctccacaggaatgcagact

SEQ ID NO: 3817021 - DNA, 25 bp, Homo sapien
ctggcgaggccacctctgctagcag

SEQ ID NO: 3817022 - DNA, 25 bp, Homo sapien
tgagctccccagtgagcgcaggcct

SEQ ID NO: 3817023 - DNA, 25 bp, Homo sapien
gaggccacctctgctagcaggttgc

SEQ ID NO: 3817024 - DNA, 25 bp, Homo sapien
gaggcccctggtcaaagcactgttt

SEQ ID NO: 3817025 - DNA, 25 bp, Homo sapien
cataaatacagaagccggtgtggct

SEQ ID NO: 3817026 - DNA, 25 bp, Homo sapien
gcaaatttacaaagcgccgagagca

SEQ ID NO: 3817027 - DNA, 25 bp, Homo sapien
gcataagatttaacactggcccgtg

SEQ ID NO: 3817028 - DNA, 25 bp, Homo sapien
tttcaggtaaataaattcccacata

SEQ ID NO: 3817029 - DNA, 25 bp, Homo sapien
cactaacaactaatgaattttattt

SEQ ID NO: 3817030 - DNA, 25 bp, Homo sapien
ataaattcccacatacagtaggacg

SEQ ID NO: 3817031 - DNA, 25 bp, Homo sapien
ggtaaataaattcccacatacagta

SEQ ID NO: 3817032 - DNA, 25 bp, Homo sapien
catggcatacataggcttcagaggc

SEQ ID NO: 3817033 - DNA, 25 bp, Homo sapien
cagagtttgttagtgcctccatggc

SEQ ID NO: 3817034 - DNA, 25 bp, Homo sapien
caggaccttctgtggatcgcattta

SEQ ID NO: 3817035 - DNA, 25 bp, Homo sapien
tggaaatgtcaccttgccaacagtt

SEQ ID NO: 3817036 - DNA, 25 bp, Homo sapien
tcactcaaagcgagctctcagattt

SEQ ID NO: 3817037 - DNA, 25 bp, Homo sapien
aagacttgtcttttgcgggtaagca

SEQ ID NO: 3817038 - DNA, 25 bp, Homo sapien
gtaagcagggggaccattacacatc

SEQ ID NO: 3817039 - DNA, 25 bp, Homo sapien
ggggaccattacacatccccaggag

SEQ ID NO: 3817040 - DNA, 25 bp, Homo sapien
aaagttccaacgtgcacaggtacag

SEQ ID NO: 3817041 - DNA, 25 bp, Homo sapien
ccaaagacggatctcacagagggcc

SEQ ID NO: 3817042 - DNA, 25 bp, Homo sapien
gattaagcatgctctcggagtcggg

SEQ ID NO: 3817043 - DNA, 25 bp, Homo sapien
tcgagtgggtctagcggaaagtcct

SEQ ID NO: 3817044 - DNA, 25 bp, Homo sapien
gggtcaatgcacacttgtctgttgt

SEQ ID NO: 3817045 - DNA, 25 bp, Homo sapien
caggtactcctgaatccactttagc

SEQ ID NO: 3817046 - DNA, 25 bp, Homo sapien
tcctgaatccactttagcttcgggt

SEQ ID NO: 3817047 - DNA, 25 bp, Homo sapien
ccactttagcttcgggtcaatgcac

SEQ ID NO: 3817048 - DNA, 25 bp, Homo sapien
gcttgacgttggctctggcaacatg

SEQ ID NO: 3817049 - DNA, 25 bp, Homo sapien
tcgaagaatcggcatgggcatctgt

SEQ ID NO: 3817050 - DNA, 25 bp, Homo sapien
tggcaacatggctttcgaagaatcg

SEQ ID NO: 3817051 - DNA, 25 bp, Homo sapien
gcacagtttggagtgttgagaattt

SEQ ID NO: 3817052 - DNA, 25 bp, Homo sapien
gtctaagaatatttggtccagagat

SEQ ID NO: 3817053 - DNA, 25 bp, Homo sapien
gattttatccaagccccacttaata

SEQ ID NO: 3817054 - DNA, 25 bp, Homo sapien
cctttcatcagagattaaatatatg

SEQ ID NO: 3817055 - DNA, 25 bp, Homo sapien
tgaagattttatccaagccccactt

SEQ ID NO: 3817056 - DNA, 25 bp, Homo sapien
aggaccagcacgaccacgaccttgg

SEQ ID NO: 3817057 - DNA, 25 bp, Homo sapien
cagagcgcggtcagcacgaggacca

SEQ ID NO: 3817058 - DNA, 25 bp, Homo sapien
agcacgaggaccagcacgaccacga

SEQ ID NO: 3817059 - DNA, 25 bp, Homo sapien
cgtcgctgaggcagagcgcggtcag

SEQ ID NO: 3817060 - DNA, 25 bp, Homo sapien
acgccgagcgggcaatgcggctgac

SEQ ID NO: 3817061 - DNA, 25 bp, Homo sapien
tgacggagagtgaaagtgcggcggt

SEQ ID NO: 3817062 - DNA, 25 bp, Homo sapien
cgggcaatgcggctgacggagagtg

SEQ ID NO: 3817063 - DNA, 25 bp, Homo sapien
gggccggacgccgagcgggcaatgc

SEQ ID NO: 3817064 - DNA, 25 bp, Homo sapien
ccgtctttgcagtcagcgtggctcg

SEQ ID NO: 3817065 - DNA, 25 bp, Homo sapien
agccgccggcagagctcgatctgcg

SEQ ID NO: 3817066 - DNA, 25 bp, Homo sapien
agtcagcgtggctcggactccaagc

SEQ ID NO: 3817067 - DNA, 25 bp, Homo sapien
tctgcgggaatgagacccgtctttg

SEQ ID NO: 3817068 - DNA, 25 bp, Homo sapien
aagaaaagctccgtgcgacccaaag

SEQ ID NO: 3817069 - DNA, 25 bp, Homo sapien
tttgggcctcgctttgtgaccgcag

SEQ ID NO: 3817070 - DNA, 25 bp, Homo sapien
tcggcggtgcttagccctccggata

SEQ ID NO: 3817071 - DNA, 25 bp, Homo sapien
gactcctaggacagtactactggcg

SEQ ID NO: 3817072 - DNA, 25 bp, Homo sapien
tctggtggcggcgcctccctccccg

SEQ ID NO: 3817073 - DNA, 25 bp, Homo sapien
ctctggtggcggcgcctccctcccc

SEQ ID NO: 3817074 - DNA, 25 bp, Homo sapien
gcagcctcgcttgcccttaaatctg

SEQ ID NO: 3817075 - DNA, 25 bp, Homo sapien
ctgcgcagctgatgaaacccgggag

SEQ ID NO: 3817076 - DNA, 25 bp, Homo sapien
cctggagctcggagatccgaccctg

SEQ ID NO: 3817077 - DNA, 25 bp, Homo sapien
taaatctggccaaagcaaacgccat

SEQ ID NO: 3817078 - DNA, 25 bp, Homo sapien
cattctcccgggtaacgatgttgat

SEQ ID NO: 3817079 - DNA, 25 bp, Homo sapien
ccattctcccgggtaacgatgttga

SEQ ID NO: 3817080 - DNA, 25 bp, Homo sapien
aaaatttcctgatatgctgagcagt

SEQ ID NO: 3817081 - DNA, 25 bp, Homo sapien
tctcccgggtaacgatgttgatggg

SEQ ID NO: 3817082 - DNA, 25 bp, Homo sapien
agtctgaaccatagccggttccttt

SEQ ID NO: 3817083 - DNA, 25 bp, Homo sapien
cacaagtgttgttaagccggagcct

SEQ ID NO: 3817084 - DNA, 25 bp, Homo sapien
aagtgttgttaagccggagcctctt

SEQ ID NO: 3817085 - DNA, 25 bp, Homo sapien
accacaagtgttgttaagccggagc

SEQ ID NO: 3817086 - DNA, 25 bp, Homo sapien
acaagtgttgttaagccggagcctc

SEQ ID NO: 3817087 - DNA, 25 bp, Homo sapien
taatgacattttccggaatatcaac

SEQ ID NO: 3817088 - DNA, 25 bp, Homo sapien
tcagagtaatgacattttccggaat

SEQ ID NO: 3817089 - DNA, 25 bp, Homo sapien
gagtaatgacattttccggaatatc

SEQ ID NO: 3817090 - DNA, 25 bp, Homo sapien
cagagtaatgacattttccggaata

SEQ ID NO: 3817091 - DNA, 25 bp, Homo sapien
gaagtagttatcacggaggaagtta

SEQ ID NO: 3817092 - DNA, 25 bp, Homo sapien
tggaatattgtctgaagtagttatc

SEQ ID NO: 3817093 - DNA, 25 bp, Homo sapien
ggtggtgattgtattccattttgga

SEQ ID NO: 3817094 - DNA, 25 bp, Homo sapien
tggagaggtggtgattgtattccat

SEQ ID NO: 3817095 - DNA, 25 bp, Homo sapien
caacttctcttagagccccctgccc

SEQ ID NO: 3817096 - DNA, 25 bp, Homo sapien
tcaacttctcttagagccccctgcc

SEQ ID NO: 3817097 - DNA, 25 bp, Homo sapien
cacagtgtcagacaagaactggttc

SEQ ID NO: 3817098 - DNA, 25 bp, Homo sapien
aactggttctcagcaaaggagagct

SEQ ID NO: 3817099 - DNA, 25 bp, Homo sapien
acaagaactggttctcagcaaagga

SEQ ID NO: 3817100 - DNA, 25 bp, Homo sapien
cagtgtcagacaagaactggttctc

SEQ ID NO: 3817101 - DNA, 25 bp, Homo sapien
gaggggacatttgttatgatttctt

SEQ ID NO: 3817102 - DNA, 25 bp, Homo sapien
gtctgaggggacatttgttatgatt

SEQ ID NO: 3817103 - DNA, 25 bp, Homo sapien
gggacatttgttatgatttcttttg

SEQ ID NO: 3817104 - DNA, 25 bp, Homo sapien
actgtggtctgaggggacatttgtt

SEQ ID NO: 3817105 - DNA, 25 bp, Homo sapien
tcttcttggccctaggccaagcatg

SEQ ID NO: 3817106 - DNA, 25 bp, Homo sapien
catttgaagtgcaatgtggatcagc

SEQ ID NO: 3817107 - DNA, 25 bp, Homo sapien
cagcagcaatctcgtgtctggaaga

SEQ ID NO: 3817108 - DNA, 25 bp, Homo sapien
cagaagcgaggtcgggccagcatca

SEQ ID NO: 3817109 - DNA, 25 bp, Homo sapien
tgagccagggcttgaagcagacaat

SEQ ID NO: 3817110 - DNA, 25 bp, Homo sapien
cagggcttgaagcagacaatccaag

SEQ ID NO: 3817111 - DNA, 25 bp, Homo sapien
tgaagcagacaatccaagcatcctt

SEQ ID NO: 3817112 - DNA, 25 bp, Homo sapien
tattttgagccagggcttgaagcag

SEQ ID NO: 3817113 - DNA, 25 bp, Homo sapien
tccagaggccttcactgaacatgtg

SEQ ID NO: 3817114 - DNA, 25 bp, Homo sapien
tatctgcagtgtatgctccagaggc

SEQ ID NO: 3817115 - DNA, 25 bp, Homo sapien
ttatctgcagtgtatgctccagagg

SEQ ID NO: 3817116 - DNA, 25 bp, Homo sapien
tctgcagtgtatgctccagaggcct

SEQ ID NO: 3817117 - DNA, 25 bp, Homo sapien
caaaggtgaaggcagccgtgaattc

SEQ ID NO: 3817118 - DNA, 25 bp, Homo sapien
gaagtcatgatgtggcctcactgga

SEQ ID NO: 3817119 - DNA, 25 bp, Homo sapien
tggaaccccagcctcgtgctgtaat

SEQ ID NO: 3817120 - DNA, 25 bp, Homo sapien
cagacattgacaggacaaaggtgaa

SEQ ID NO: 3817121 - DNA, 25 bp, Homo sapien
tggagtgaccaagtgagtccttcag

SEQ ID NO: 3817122 - DNA, 25 bp, Homo sapien
cccttcccaaggcagtggagtgacc

SEQ ID NO: 3817123 - DNA, 25 bp, Homo sapien
tccttcaggcagtggaacgactgag

SEQ ID NO: 3817124 - DNA, 25 bp, Homo sapien
cgactgagtgagaacacagctggcc

SEQ ID NO: 3817125 - DNA, 25 bp, Homo sapien
tggcttctcatcagcaggccctgag

SEQ ID NO: 3817126 - DNA, 25 bp, Homo sapien
catcatcatcagtcccaggtggtgc

SEQ ID NO: 3817127 - DNA, 25 bp, Homo sapien
ggatggacggctcataggctctgat

SEQ ID NO: 3817128 - DNA, 25 bp, Homo sapien
agctgcatgcagatcatggagatca

SEQ ID NO: 3817129 - DNA, 25 bp, Homo sapien
ggtatatgtcgatgttccctgggat

SEQ ID NO: 3817130 - DNA, 25 bp, Homo sapien
tgggccttgcccatgttaacatcct

SEQ ID NO: 3817131 - DNA, 25 bp, Homo sapien
caatagaccaaatataactcccagg

SEQ ID NO: 3817132 - DNA, 25 bp, Homo sapien
tgggagctaccgagctgggttttac

SEQ ID NO: 3817133 - DNA, 25 bp, Homo sapien
cgaccaccttattctgctgttgaga

SEQ ID NO: 3817134 - DNA, 25 bp, Homo sapien
tcatccaggttacgggcagagtgga

SEQ ID NO: 3817135 - DNA, 25 bp, Homo sapien
tgaaagcaaggtacttctccagcag

SEQ ID NO: 3817136 - DNA, 25 bp, Homo sapien
agcaaaaatgggagctgcccgacca

SEQ ID NO: 3817137 - DNA, 25 bp, Homo sapien
ctaaagaggcggggcctgccttctg

SEQ ID NO: 3817138 - DNA, 25 bp, Homo sapien
gaggcggggcctgccttctgcttac

SEQ ID NO: 3817139 - DNA, 25 bp, Homo sapien
taaagaggcggggcctgccttctgc

SEQ ID NO: 3817140 - DNA, 25 bp, Homo sapien
aagaggcggggcctgccttctgctt

SEQ ID NO: 3817141 - DNA, 25 bp, Homo sapien
tagttgggattgtggccaccctcat

SEQ ID NO: 3817142 - DNA, 25 bp, Homo sapien
tgggattgtggccaccctcatccct

SEQ ID NO: 3817143 - DNA, 25 bp, Homo sapien
aatggctccctgggcaggtagttgg

SEQ ID NO: 3817144 - DNA, 25 bp, Homo sapien
caggtagttgggattgtggccaccc

SEQ ID NO: 3817145 - DNA, 25 bp, Homo sapien
catcaacctggagtgaatcaggcct

SEQ ID NO: 3817146 - DNA, 25 bp, Homo sapien
catgagttgggtcaagaacatcaac

SEQ ID NO: 3817147 - DNA, 25 bp, Homo sapien
ccaagttttggaggcttggcctaca

SEQ ID NO: 3817148 - DNA, 25 bp, Homo sapien
catgtctcatgacctgaagggaaaa

SEQ ID NO: 3817149 - DNA, 25 bp, Homo sapien
cgtgctccttcgctcctggatgttg

SEQ ID NO: 3817150 - DNA, 25 bp, Homo sapien
atccgtgctccttcgctcctggatg

SEQ ID NO: 3817151 - DNA, 25 bp, Homo sapien
gctccttcgctcctggatgttggag

SEQ ID NO: 3817152 - DNA, 25 bp, Homo sapien
ctggcatccgtgctccttcgctcct

SEQ ID NO: 3817153 - DNA, 25 bp, Homo sapien
ctttccaaacaggagatgtatgcag

SEQ ID NO: 3817154 - DNA, 25 bp, Homo sapien
ccacaaggtgtcacttctgcagatt

SEQ ID NO: 3817155 - DNA, 25 bp, Homo sapien
ccaaacaggagatgtatgcaggcag

SEQ ID NO: 3817156 - DNA, 25 bp, Homo sapien
tttgtagtccagatgatctttccaa

SEQ ID NO: 3817157 - DNA, 25 bp, Homo sapien
ggataatggaaacacactccgtctt

SEQ ID NO: 3817158 - DNA, 25 bp, Homo sapien
gaaatggtgacagacagagcccttg

SEQ ID NO: 3817159 - DNA, 25 bp, Homo sapien
gaagctttcagtagcataccagaag

SEQ ID NO: 3817160 - DNA, 25 bp, Homo sapien
gagaacctgtctatgctgggcaccg

SEQ ID NO: 3817161 - DNA, 25 bp, Homo sapien
gtgcaggattgcctggacaagggag

SEQ ID NO: 3817162 - DNA, 25 bp, Homo sapien
tcaggaagtatgttggctcacaggc

SEQ ID NO: 3817163 - DNA, 25 bp, Homo sapien
accctggagaaccacgagaaatgga

SEQ ID NO: 3817164 - DNA, 25 bp, Homo sapien
cctggacaagggagaccgagcgtcc

SEQ ID NO: 3817165 - DNA, 25 bp, Homo sapien
agtggactggttctgcctcgtcagg

SEQ ID NO: 3817166 - DNA, 25 bp, Homo sapien
gggatactagcttgtctctgcacac

SEQ ID NO: 3817167 - DNA, 25 bp, Homo sapien
cacaggacggatgtgttgggatact

SEQ ID NO: 3817168 - DNA, 25 bp, Homo sapien
ggctggccatctgtgactctgtgac

SEQ ID NO: 3817169 - DNA, 25 bp, Homo sapien
tcctctgtgcgttaaacagggatgc

SEQ ID NO: 3817170 - DNA, 25 bp, Homo sapien
cttcattggaccaagtcatacactc

SEQ ID NO: 3817171 - DNA, 25 bp, Homo sapien
ttttctcctctgtgcgttaaacagg

SEQ ID NO: 3817172 - DNA, 25 bp, Homo sapien
caagtcatacactcagttacctggc

SEQ ID NO: 3817173 - DNA, 25 bp, Homo sapien
tcctcagcaacccccggaacaccac

SEQ ID NO: 3817174 - DNA, 25 bp, Homo sapien
aacaccactttctgattaatctgca

SEQ ID NO: 3817175 - DNA, 25 bp, Homo sapien
ctcagcaacccccggaacaccactt

SEQ ID NO: 3817176 - DNA, 25 bp, Homo sapien
cccggaacaccactttctgattaat

SEQ ID NO: 3817177 - DNA, 25 bp, Homo sapien
gagtctctgactttctacattttca

SEQ ID NO: 3817178 - DNA, 25 bp, Homo sapien
gatagcctcttgttgattggaagtc

SEQ ID NO: 3817179 - DNA, 25 bp, Homo sapien
tgaagtgaggagtctctgactttct

SEQ ID NO: 3817180 - DNA, 25 bp, Homo sapien
taagtattaatactgtagtcttaca

SEQ ID NO: 3817181 - DNA, 25 bp, Homo sapien
aacttctcctgaagtcctgttcctg

SEQ ID NO: 3817182 - DNA, 25 bp, Homo sapien
ttgcccagtatgagccccagggaga

SEQ ID NO: 3817183 - DNA, 25 bp, Homo sapien
cacagggatggttttgctgtgtgca

SEQ ID NO: 3817184 - DNA, 25 bp, Homo sapien
tttgcacaaaccaggaacatgtgca

SEQ ID NO: 3817185 - DNA, 25 bp, Homo sapien
gtgggtgcagcaacatccgtgggag

SEQ ID NO: 3817186 - DNA, 25 bp, Homo sapien
tttctttgaattcgctctatcctca

SEQ ID NO: 3817187 - DNA, 25 bp, Homo sapien
tccttctggtactggaatggttcca

SEQ ID NO: 3817188 - DNA, 25 bp, Homo sapien
cagcaacatccgtgggagtctgctt

SEQ ID NO: 3817189 - DNA, 25 bp, Homo sapien
tcctccggctatggtcatggaccgc

SEQ ID NO: 3817190 - DNA, 25 bp, Homo sapien
tcactggaatgcctctcgggacaga

SEQ ID NO: 3817191 - DNA, 25 bp, Homo sapien
tatggtcatggaccgcgtccttgac

SEQ ID NO: 3817192 - DNA, 25 bp, Homo sapien
gggacagactcctccggctatggtc

SEQ ID NO: 3817193 - DNA, 25 bp, Homo sapien
tctgtacctacattgctttgcaaga

SEQ ID NO: 3817194 - DNA, 25 bp, Homo sapien
ttatgcaagaaagatgatgcagcac

SEQ ID NO: 3817195 - DNA, 25 bp, Homo sapien
tgcagcacaacttggtctcatttac

SEQ ID NO: 3817196 - DNA, 25 bp, Homo sapien
ttacctgtctgaagttgaaagaaaa

SEQ ID NO: 3817197 - DNA, 25 bp, Homo sapien
tataggcctcgtggtatatttgtca

SEQ ID NO: 3817198 - DNA, 25 bp, Homo sapien
cctcgtggtatatttgtcatgcaac

SEQ ID NO: 3817199 - DNA, 25 bp, Homo sapien
cttgcagttggagttgaaagctgct

SEQ ID NO: 3817200 - DNA, 25 bp, Homo sapien
ttatccaaatataggcctcgtggta

SEQ ID NO: 3817201 - DNA, 25 bp, Homo sapien
actggtggagctcgagtgaagacac

SEQ ID NO: 3817202 - DNA, 25 bp, Homo sapien
tggtggagctcgagtgaagacacac

SEQ ID NO: 3817203 - DNA, 25 bp, Homo sapien
ggtggagctcgagtgaagacacact

SEQ ID NO: 3817204 - DNA, 25 bp, Homo sapien
gggactggtggagctcgagtgaaga

SEQ ID NO: 3817205 - DNA, 25 bp, Homo sapien
cacggtccagtgagttatgcaggct

SEQ ID NO: 3817206 - DNA, 25 bp, Homo sapien
tgagcatgcggcgagaagtcagtgc

SEQ ID NO: 3817207 - DNA, 25 bp, Homo sapien
agcatccccgaacacggtccagtga

SEQ ID NO: 3817208 - DNA, 25 bp, Homo sapien
agtgagttatgcaggctgagcatgc

SEQ ID NO: 3817209 - DNA, 25 bp, Homo sapien
ctcgggttggcagtactagccttct

SEQ ID NO: 3817210 - DNA, 25 bp, Homo sapien
gttcagcccggagtctacagatgcc

SEQ ID NO: 3817211 - DNA, 25 bp, Homo sapien
tttcatttggctcctcacgtaggtc

SEQ ID NO: 3817212 - DNA, 25 bp, Homo sapien
agaataagcgcccagctcgggttgg

SEQ ID NO: 3817213 - DNA, 25 bp, Homo sapien
tggccactcgcccatatttccaggg

SEQ ID NO: 3817214 - DNA, 25 bp, Homo sapien
ggccagctggccactcgcccatatt

SEQ ID NO: 3817215 - DNA, 25 bp, Homo sapien
ttgtaaggtaggggttggccagctg

SEQ ID NO: 3817216 - DNA, 25 bp, Homo sapien
cagctggccactcgcccatatttcc

SEQ ID NO: 3817217 - DNA, 25 bp, Homo sapien
tcttttggaagctgtttattgtatt

SEQ ID NO: 3817218 - DNA, 25 bp, Homo sapien
atcttttggaagctgtttattgtat

SEQ ID NO: 3817219 - DNA, 25 bp, Homo sapien
tccacgagttctggcaaacaagggt

SEQ ID NO: 3817220 - DNA, 25 bp, Homo sapien
ttttgacctttccacgagttctggc

SEQ ID NO: 3817221 - DNA, 25 bp, Homo sapien
caaacaagggtgtgtctagaatggt

SEQ ID NO: 3817222 - DNA, 25 bp, Homo sapien
gagttctggcaaacaagggtgtgtc

SEQ ID NO: 3817223 - DNA, 25 bp, Homo sapien
tctcctgcaaacagccgctgctgga

SEQ ID NO: 3817224 - DNA, 25 bp, Homo sapien
tggaaggtgccgctgggacgcaggt

SEQ ID NO: 3817225 - DNA, 25 bp, Homo sapien
gatccatctgtctgcggagggttcc

SEQ ID NO: 3817226 - DNA, 25 bp, Homo sapien
ctgcggagggttcctctggattctc

SEQ ID NO: 3817227 - DNA, 25 bp, Homo sapien
tccctcgatgttgagagaaatttgt

SEQ ID NO: 3817228 - DNA, 25 bp, Homo sapien
tcagcggtgtacctatgccttctga

SEQ ID NO: 3817229 - DNA, 25 bp, Homo sapien
ctttagcaacttcagcggtgtacct

SEQ ID NO: 3817230 - DNA, 25 bp, Homo sapien
ctcgggccgtctccctcgatgttga

SEQ ID NO: 3817231 - DNA, 25 bp, Homo sapien
caagctcatccacagaaagggttac

SEQ ID NO: 3817232 - DNA, 25 bp, Homo sapien
cagagccagttacagcaggacctac

SEQ ID NO: 3817233 - DNA, 25 bp, Homo sapien
taagctccttgtggaccagaggcgc

SEQ ID NO: 3817234 - DNA, 25 bp, Homo sapien
tctaggaaccgaagatgagaccatc

SEQ ID NO: 3817235 - DNA, 25 bp, Homo sapien
tcgctcatgccctcgaggaggcctg

SEQ ID NO: 3817236 - DNA, 25 bp, Homo sapien
tggacagaataaaatagcatgcttc

SEQ ID NO: 3817237 - DNA, 25 bp, Homo sapien
catgcttccaaagaggtgttcctgc

SEQ ID NO: 3817238 - DNA, 25 bp, Homo sapien
tggcagtggctcctgacctggaaac

SEQ ID NO: 3817239 - DNA, 25 bp, Homo sapien
tctgcccttgctccagaaggctggc

SEQ ID NO: 3817240 - DNA, 25 bp, Homo sapien
ctccagaaggctggcctcttcttct

SEQ ID NO: 3817241 - DNA, 25 bp, Homo sapien
cagaaggctggcctcttcttctgct

SEQ ID NO: 3817242 - DNA, 25 bp, Homo sapien
cttgctccagaaggctggcctcttc

SEQ ID NO: 3817243 - DNA, 25 bp, Homo sapien
aaataggaattattgtctatgagcg

SEQ ID NO: 3817244 - DNA, 25 bp, Homo sapien
tctatgagcgtgatgtcacagaggg

SEQ ID NO: 3817245 - DNA, 25 bp, Homo sapien
atatgactaaataggaattattgtc

SEQ ID NO: 3817246 - DNA, 25 bp, Homo sapien
agacttctagaccaatctcagcctt

SEQ ID NO: 3817247 - DNA, 25 bp, Homo sapien
tcctgagcaatcctgagtgggttgg

SEQ ID NO: 3817248 - DNA, 25 bp, Homo sapien
ccaacagtcgtgaattggctttcct

SEQ ID NO: 3817249 - DNA, 25 bp, Homo sapien
tggagtagccccggctacattttag

SEQ ID NO: 3817250 - DNA, 25 bp, Homo sapien
agcaatcctgagtgggttggatgct

SEQ ID NO: 3817251 - DNA, 25 bp, Homo sapien
agccaaaccatgcagcccatagtag

SEQ ID NO: 3817252 - DNA, 25 bp, Homo sapien
tatgtccccagccaaaccatgcagc

SEQ ID NO: 3817253 - DNA, 25 bp, Homo sapien
tcaggcctcctatgtccccagccaa

SEQ ID NO: 3817254 - DNA, 25 bp, Homo sapien
aaccatgcagcccatagtagaatcc

SEQ ID NO: 3817255 - DNA, 25 bp, Homo sapien
tctgggagggtttgtcaattctgca

SEQ ID NO: 3817256 - DNA, 25 bp, Homo sapien
gccttggcacgtctggaggatgaca

SEQ ID NO: 3817257 - DNA, 25 bp, Homo sapien
taggaggtcacatggcagggtctca

SEQ ID NO: 3817258 - DNA, 25 bp, Homo sapien
cataaagcatcatggatcctcctgg

SEQ ID NO: 3817259 - DNA, 25 bp, Homo sapien
ttaggttattggattgagcaagtaa

SEQ ID NO: 3817260 - DNA, 25 bp, Homo sapien
gagatgaggatatcagaagaatcag

SEQ ID NO: 3817261 - DNA, 25 bp, Homo sapien
agatgaggatatcagaagaatcagg

SEQ ID NO: 3817262 - DNA, 25 bp, Homo sapien
ttattggattgagcaagtaaaggat

SEQ ID NO: 3817263 - DNA, 25 bp, Homo sapien
tctctaagccgatgaggttacaacg

SEQ ID NO: 3817264 - DNA, 25 bp, Homo sapien
cagtttctctaagccgatgaggtta

SEQ ID NO: 3817265 - DNA, 25 bp, Homo sapien
cagcagtttctctaagccgatgagg

SEQ ID NO: 3817266 - DNA, 25 bp, Homo sapien
caacagcagtttctctaagccgatg

SEQ ID NO: 3817267 - DNA, 25 bp, Homo sapien
gaagaacttcctgctatggggaaca

SEQ ID NO: 3817268 - DNA, 25 bp, Homo sapien
tgctggcttgtaatagcgagaacag

SEQ ID NO: 3817269 - DNA, 25 bp, Homo sapien
gagaacagatgttgacaagagaaga

SEQ ID NO: 3817270 - DNA, 25 bp, Homo sapien
gccactgctggcttgtaatagcgag

SEQ ID NO: 3817271 - DNA, 25 bp, Homo sapien
tgtttcctgcaagctaatctttgtg

SEQ ID NO: 3817272 - DNA, 25 bp, Homo sapien
catgaaaattcccatgtggagtctg

SEQ ID NO: 3817273 - DNA, 25 bp, Homo sapien
tccagagggtagaggctccattcag

SEQ ID NO: 3817274 - DNA, 25 bp, Homo sapien
gcagataaagtaccagaatgagaaa

SEQ ID NO: 3817275 - DNA, 25 bp, Homo sapien
ctgcagctctctctaaggccgcagt

SEQ ID NO: 3817276 - DNA, 25 bp, Homo sapien
actgtggagagcacgtgagaagtcc

SEQ ID NO: 3817277 - DNA, 25 bp, Homo sapien
tggagagcacgtgagaagtcccatt

SEQ ID NO: 3817278 - DNA, 25 bp, Homo sapien
cagctctctctaaggccgcagtggc

SEQ ID NO: 3817279 - DNA, 25 bp, Homo sapien
taactctacattgatggtggccagg

SEQ ID NO: 3817280 - DNA, 25 bp, Homo sapien
gaccttaggtggagtcctggagaaa

SEQ ID NO: 3817281 - DNA, 25 bp, Homo sapien
tgcagattgtggagagggcactatc

SEQ ID NO: 3817282 - DNA, 25 bp, Homo sapien
gatgtttccacgcttgctcctgctg

SEQ ID NO: 3817283 - DNA, 25 bp, Homo sapien
tatggcttgaacacaccctctggct

SEQ ID NO: 3817284 - DNA, 25 bp, Homo sapien
gtactacactgacacttgatatggg

SEQ ID NO: 3817285 - DNA, 25 bp, Homo sapien
caggagttttgtccccactgaacaa

SEQ ID NO: 3817286 - DNA, 25 bp, Homo sapien
ttctctaactgaacaagggcccagg

SEQ ID NO: 3817287 - DNA, 25 bp, Homo sapien
tctgaaatctcaagcctactggttc

SEQ ID NO: 3817288 - DNA, 25 bp, Homo sapien
cccaagcttgtagaagcattgcttt

SEQ ID NO: 3817289 - DNA, 25 bp, Homo sapien
tcacaatggtatcactggtagattt

SEQ ID NO: 3817290 - DNA, 25 bp, Homo sapien
cttccaacattgctatcaagtcagc

SEQ ID NO: 3817291 - DNA, 25 bp, Homo sapien
ttttgtcagaacaaacagcttgaga

SEQ ID NO: 3817292 - DNA, 25 bp, Homo sapien
gcaagatcgtgactgaagggaagaa

SEQ ID NO: 3817293 - DNA, 25 bp, Homo sapien
gagaacaatatttgagactccattc

SEQ ID NO: 3817294 - DNA, 25 bp, Homo sapien
tcagttgagataaaaggcaagatcg

SEQ ID NO: 3817295 - DNA, 25 bp, Homo sapien
tgtcctgaaacgtcgggtgggagag

SEQ ID NO: 3817296 - DNA, 25 bp, Homo sapien
catgtcctgaaacgtcgggtgggag

SEQ ID NO: 3817297 - DNA, 25 bp, Homo sapien
agaaatcctcggtccccctatgtct

SEQ ID NO: 3817298 - DNA, 25 bp, Homo sapien
tcatagaaatcctcggtccccctat

SEQ ID NO: 3817299 - DNA, 25 bp, Homo sapien
cagaggtgagcacactaggccaagc

SEQ ID NO: 3817300 - DNA, 25 bp, Homo sapien
cacagaggtgagcacactaggccaa

SEQ ID NO: 3817301 - DNA, 25 bp, Homo sapien
tgcagcacagaggtgagcacactag

SEQ ID NO: 3817302 - DNA, 25 bp, Homo sapien
cagcacagaggtgagcacactaggc

SEQ ID NO: 3817303 - DNA, 25 bp, Homo sapien
tcagcctgcatctcaggagtacctg

SEQ ID NO: 3817304 - DNA, 25 bp, Homo sapien
ggagtacctgtctgcattttactag

SEQ ID NO: 3817305 - DNA, 25 bp, Homo sapien
cctttattatgtggtctgcccatag

SEQ ID NO: 3817306 - DNA, 25 bp, Homo sapien
gtctccttgggcaacctttattatg

SEQ ID NO: 3817307 - DNA, 25 bp, Homo sapien
cgacaggagttaagacaaaggcatc

SEQ ID NO: 3817308 - DNA, 25 bp, Homo sapien
caggagttaagacaaaggcatcact

SEQ ID NO: 3817309 - DNA, 25 bp, Homo sapien
ggagttaagacaaaggcatcactct

SEQ ID NO: 3817310 - DNA, 25 bp, Homo sapien
gacaggagttaagacaaaggcatca

SEQ ID NO: 3817311 - DNA, 25 bp, Homo sapien
cattctgatgatatccagactccag

SEQ ID NO: 3817312 - DNA, 25 bp, Homo sapien
ctgatgatatccagactccagaggg

SEQ ID NO: 3817313 - DNA, 25 bp, Homo sapien
ggtagacagtaatgtgcatctctgc

SEQ ID NO: 3817314 - DNA, 25 bp, Homo sapien
gcagttcacttcagcggtagacagt

SEQ ID NO: 3817315 - DNA, 25 bp, Homo sapien
tcccaggaggtgtatgtggtctctg

SEQ ID NO: 3817316 - DNA, 25 bp, Homo sapien
tcatttcatgttggtcgaaagacat

SEQ ID NO: 3817317 - DNA, 25 bp, Homo sapien
ttcccaggaggtgtatgtggtctct

SEQ ID NO: 3817318 - DNA, 25 bp, Homo sapien
tactcattcatttcatgttggtcga

SEQ ID NO: 3817319 - DNA, 25 bp, Homo sapien
gctggttgagcaccttagtcatcca

SEQ ID NO: 3817320 - DNA, 25 bp, Homo sapien
tggttgagcaccttagtcatccagt

SEQ ID NO: 3817321 - DNA, 25 bp, Homo sapien
cactcccaggctttggctggttgag

SEQ ID NO: 3817322 - DNA, 25 bp, Homo sapien
tttggctggttgagcaccttagtca

SEQ ID NO: 3817323 - DNA, 25 bp, Homo sapien
acaatgagtgagtgaccaacgggca

SEQ ID NO: 3817324 - DNA, 25 bp, Homo sapien
ccttcttgtgatctgtcgatcttat

SEQ ID NO: 3817325 - DNA, 25 bp, Homo sapien
tgtcgatcttatcatcagaacaatg

SEQ ID NO: 3817326 - DNA, 25 bp, Homo sapien
catcagaacaatgagtgagtgacca

SEQ ID NO: 3817327 - DNA, 25 bp, Homo sapien
gaacacatgacctcagaagcctctt

SEQ ID NO: 3817328 - DNA, 25 bp, Homo sapien
gggttcagacccacctaacacatca

SEQ ID NO: 3817329 - DNA, 25 bp, Homo sapien
tgagctgcagtctcggattacctgg

SEQ ID NO: 3817330 - DNA, 25 bp, Homo sapien
ctcagttgagccacactctgacagt

SEQ ID NO: 3817331 - DNA, 25 bp, Homo sapien
tatttgacggcaggtcttgcggaac

SEQ ID NO: 3817332 - DNA, 25 bp, Homo sapien
tcatttgacacttcaggtcacggca

SEQ ID NO: 3817333 - DNA, 25 bp, Homo sapien
ggtccctctagagtctgcacctgtg

SEQ ID NO: 3817334 - DNA, 25 bp, Homo sapien
gtcacggcatctgtctgaacctcca

SEQ ID NO: 3817335 - DNA, 25 bp, Homo sapien
gaatccacaatcagaccaacacagg

SEQ ID NO: 3817336 - DNA, 25 bp, Homo sapien
gataaataaaccaagtccctgaggc

SEQ ID NO: 3817337 - DNA, 25 bp, Homo sapien
gaaagttcccatagtcggactccga

SEQ ID NO: 3817338 - DNA, 25 bp, Homo sapien
tcatgtttcaggattcgggagagga

SEQ ID NO: 3817339 - DNA, 25 bp, Homo sapien
caccgctgggcctggggatcctcgt

SEQ ID NO: 3817340 - DNA, 25 bp, Homo sapien
tcctctctgggctaacaccgctggg

SEQ ID NO: 3817341 - DNA, 25 bp, Homo sapien
ggatcacatcccaaacgccgctcct

SEQ ID NO: 3817342 - DNA, 25 bp, Homo sapien
tcctcgtgtgcggaggaggacgaaa

SEQ ID NO: 3817343 - DNA, 25 bp, Homo sapien
agcagacatcccactgcactgccca

SEQ ID NO: 3817344 - DNA, 25 bp, Homo sapien
gcccaggaacctggtgggcatcaca

SEQ ID NO: 3817345 - DNA, 25 bp, Homo sapien
tgaggatcagcagaaaccaagcaga

SEQ ID NO: 3817346 - DNA, 25 bp, Homo sapien
gaggaagaagtcaccaggctctgtg

SEQ ID NO: 3817347 - DNA, 25 bp, Homo sapien
cttctcaaagttaagtggaggcact

SEQ ID NO: 3817348 - DNA, 25 bp, Homo sapien
tggaggcactgccttgattgtttca

SEQ ID NO: 3817349 - DNA, 25 bp, Homo sapien
tgattgtttcagcaggcccactcga

SEQ ID NO: 3817350 - DNA, 25 bp, Homo sapien
aaagttgccggtgaagggatgttct

SEQ ID NO: 3817351 - DNA, 25 bp, Homo sapien
gaatctctcatagtcatccacaagg

SEQ ID NO: 3817352 - DNA, 25 bp, Homo sapien
tctgtaggtgcattctccactgaag

SEQ ID NO: 3817353 - DNA, 25 bp, Homo sapien
tgtaggtgcattctccactgaagcc

SEQ ID NO: 3817354 - DNA, 25 bp, Homo sapien
ctctcatagtcatccacaagggttg

SEQ ID NO: 3817355 - DNA, 25 bp, Homo sapien
ccaaggagaataagatgcagcccct

SEQ ID NO: 3817356 - DNA, 25 bp, Homo sapien
ctgggccagacaccaaggagaataa

SEQ ID NO: 3817357 - DNA, 25 bp, Homo sapien
ggccagacaccaaggagaataagat

SEQ ID NO: 3817358 - DNA, 25 bp, Homo sapien
gacaccaaggagaataagatgcagc

SEQ ID NO: 3817359 - DNA, 25 bp, Homo sapien
tcctgcaaggtggtgctgtgctctg

SEQ ID NO: 3817360 - DNA, 25 bp, Homo sapien
ggtgctgtgctctgcaatagaggaa

SEQ ID NO: 3817361 - DNA, 25 bp, Homo sapien
tctgcaatagaggaatcttggagga

SEQ ID NO: 3817362 - DNA, 25 bp, Homo sapien
tgctctgcaatagaggaatcttgga

SEQ ID NO: 3817363 - DNA, 25 bp, Homo sapien
tggtcgtcaatgcacactggagggt

SEQ ID NO: 3817364 - DNA, 25 bp, Homo sapien
tgcagagggacgctaacaaacctgt

SEQ ID NO: 3817365 - DNA, 25 bp, Homo sapien
tgcctggcaacagcgaagaaatgct

SEQ ID NO: 3817366 - DNA, 25 bp, Homo sapien
tacagggtcaggatagagatgcaca

SEQ ID NO: 3817367 - DNA, 25 bp, Homo sapien
tctatttgcaagcagcccgtgatac

SEQ ID NO: 3817368 - DNA, 25 bp, Homo sapien
tgcaagcagcccgtgatacctggca

SEQ ID NO: 3817369 - DNA, 25 bp, Homo sapien
agcagcccgtgatacctggcaacat

SEQ ID NO: 3817370 - DNA, 25 bp, Homo sapien
tatttgcaagcagcccgtgatacct

SEQ ID NO: 3817371 - DNA, 25 bp, Homo sapien
cacaccgagtgctcgtcagcgcgca

SEQ ID NO: 3817372 - DNA, 25 bp, Homo sapien
acaccgagtgctcgtcagcgcgcat

SEQ ID NO: 3817373 - DNA, 25 bp, Homo sapien
gtcgcacaccgagtgctcgtcagcg

SEQ ID NO: 3817374 - DNA, 25 bp, Homo sapien
ctggtcgcacaccgagtgctcgtca

SEQ ID NO: 3817375 - DNA, 25 bp, Homo sapien
tgcgctcggccaatcttatgttatc

SEQ ID NO: 3817376 - DNA, 25 bp, Homo sapien
taagactagagcttaaggctgaggc

SEQ ID NO: 3817377 - DNA, 25 bp, Homo sapien
gctgacaggcctagataactttggg

SEQ ID NO: 3817378 - DNA, 25 bp, Homo sapien
tacagactccatcattttcgaaatg

SEQ ID NO: 3817379 - DNA, 25 bp, Homo sapien
gatggttctaggctatccacatgga

SEQ ID NO: 3817380 - DNA, 25 bp, Homo sapien
gagacaagcagagaattccgagtcc

SEQ ID NO: 3817381 - DNA, 25 bp, Homo sapien
cacatggaatattggaaagtgggac

SEQ ID NO: 3817382 - DNA, 25 bp, Homo sapien
cctgtggtttgcgatctgggtgcct

SEQ ID NO: 3817383 - DNA, 25 bp, Homo sapien
cacgtggtaataaactcgtgtctgt

SEQ ID NO: 3817384 - DNA, 25 bp, Homo sapien
ttcccatgggtgtgcgtgatgcacg

SEQ ID NO: 3817385 - DNA, 25 bp, Homo sapien
cgttaatctgcctttgtcagtctct

SEQ ID NO: 3817386 - DNA, 25 bp, Homo sapien
tctctcgttaatctgcctttgtcag

SEQ ID NO: 3817387 - DNA, 25 bp, Homo sapien
tgtggatcccaatctgaggatggct

SEQ ID NO: 3817388 - DNA, 25 bp, Homo sapien
tcgctagggcttgttctgactccat

SEQ ID NO: 3817389 - DNA, 25 bp, Homo sapien
tctcgattcagagggtggactctac

SEQ ID NO: 3817390 - DNA, 25 bp, Homo sapien
gatggctttaccaagcgtgcacaag

SEQ ID NO: 3817391 - DNA, 25 bp, Homo sapien
ttctcttccactcatcaatcttcct

SEQ ID NO: 3817392 - DNA, 25 bp, Homo sapien
ggccagcgcagaccagacaggcaca

SEQ ID NO: 3817393 - DNA, 25 bp, Homo sapien
tccactcatcaatcttcctggcctt

SEQ ID NO: 3817394 - DNA, 25 bp, Homo sapien
gcaggggtgtaactgggtccaccag

SEQ ID NO: 3817395 - DNA, 25 bp, Homo sapien
agtgactgcggacccagtacccgca

SEQ ID NO: 3817396 - DNA, 25 bp, Homo sapien
ttagcagtgactgcggacccagtac

SEQ ID NO: 3817397 - DNA, 25 bp, Homo sapien
agtacccgcacattccgacttcctt

SEQ ID NO: 3817398 - DNA, 25 bp, Homo sapien
tggtcctttgctttccgggctctag

SEQ ID NO: 3817399 - DNA, 25 bp, Homo sapien
tcgttcaggtcatcagttcccggct

SEQ ID NO: 3817400 - DNA, 25 bp, Homo sapien
tcagttcccggctcgcactgatgga

SEQ ID NO: 3817401 - DNA, 25 bp, Homo sapien
gttcaggtcatcagttcccggctcg

SEQ ID NO: 3817402 - DNA, 25 bp, Homo sapien
cggctcgcactgatggaactgctgg

SEQ ID NO: 3817403 - DNA, 25 bp, Homo sapien
caagactcagacaagcacttcagtg

SEQ ID NO: 3817404 - DNA, 25 bp, Homo sapien
agcaagactcagacaagcacttcag

SEQ ID NO: 3817405 - DNA, 25 bp, Homo sapien
gcaagactcagacaagcacttcagt

SEQ ID NO: 3817406 - DNA, 25 bp, Homo sapien
ggcctgagctaagtatgtctagtca

SEQ ID NO: 3817407 - DNA, 25 bp, Homo sapien
tcaaaatgatttcccacgtcccatg

SEQ ID NO: 3817408 - DNA, 25 bp, Homo sapien
tccgggacagatttgaaaagctttc

SEQ ID NO: 3817409 - DNA, 25 bp, Homo sapien
tgtctagtcagagtccaaatccggg

SEQ ID NO: 3817410 - DNA, 25 bp, Homo sapien
tcacaggtagggtggctggcatggc

SEQ ID NO: 3817411 - DNA, 25 bp, Homo sapien
ccagtctatgtcacatctgctggag

SEQ ID NO: 3817412 - DNA, 25 bp, Homo sapien
tctgattgttgtctgggtccatcac

SEQ ID NO: 3817413 - DNA, 25 bp, Homo sapien
ctgaggtggctcatctggtgctttg

SEQ ID NO: 3817414 - DNA, 25 bp, Homo sapien
tgctatgaacactcgcgtacatgtt

SEQ ID NO: 3817415 - DNA, 25 bp, Homo sapien
ctaccttctgtttatccgttcgtct

SEQ ID NO: 3817416 - DNA, 25 bp, Homo sapien
tccgttcgtctgttaacggacactg

SEQ ID NO: 3817417 - DNA, 25 bp, Homo sapien
aacactcgcgtacatgtttttgcat

SEQ ID NO: 3817418 - DNA, 25 bp, Homo sapien
catgtaattactggcctttgaatat

SEQ ID NO: 3817419 - DNA, 25 bp, Homo sapien
taatgaccaatggtgttgagcttct

SEQ ID NO: 3817420 - DNA, 25 bp, Homo sapien
ggctttgtagttccttaatgaccaa

SEQ ID NO: 3817421 - DNA, 25 bp, Homo sapien
tgtactctgaatactataccctttc

SEQ ID NO: 3817422 - DNA, 25 bp, Homo sapien
tgctagcctgctgatgaacagtcag

SEQ ID NO: 3817423 - DNA, 25 bp, Homo sapien
cagctgctagcctgctgatgaacag

SEQ ID NO: 3817424 - DNA, 25 bp, Homo sapien
gctgctagcctgctgatgaacagtc

SEQ ID NO: 3817425 - DNA, 25 bp, Homo sapien
tcagctgctagcctgctgatgaaca

SEQ ID NO: 3817426 - DNA, 25 bp, Homo sapien
gatgataatcactgagagcactgag

SEQ ID NO: 3817427 - DNA, 25 bp, Homo sapien
tgagacctcagtggattcagtgctt

SEQ ID NO: 3817428 - DNA, 25 bp, Homo sapien
tataaggcaagcaggcgtatcaaca

SEQ ID NO: 3817429 - DNA, 25 bp, Homo sapien
tatagatgggaaaccacagtgcgtg

SEQ ID NO: 3817430 - DNA, 25 bp, Homo sapien
gcctgtttgctatagtctcacgtgg

SEQ ID NO: 3817431 - DNA, 25 bp, Homo sapien
tgcaagagggttccatgcaaatgat

SEQ ID NO: 3817432 - DNA, 25 bp, Homo sapien
tacagaagcactaatcctatgcaag

SEQ ID NO: 3817433 - DNA, 25 bp, Homo sapien
ttgctatagtctcacgtggaggaaa

SEQ ID NO: 3817434 - DNA, 25 bp, Homo sapien
gcttgctgtgctctaatgcctggga

SEQ ID NO: 3817435 - DNA, 25 bp, Homo sapien
catgcatggtgctctcccgaggagc

SEQ ID NO: 3817436 - DNA, 25 bp, Homo sapien
cttaaaactcaggaacacagcatgg

SEQ ID NO: 3817437 - DNA, 25 bp, Homo sapien
gcaccctagtcgtggccaatgggaa

SEQ ID NO: 3817438 - DNA, 25 bp, Homo sapien
gccagactgtacaaaggtgcccctt

SEQ ID NO: 3817439 - DNA, 25 bp, Homo sapien
tggcaaatattcgtccaggaggcag

SEQ ID NO: 3817440 - DNA, 25 bp, Homo sapien
ggtgccccttgagcaataaatagca

SEQ ID NO: 3817441 - DNA, 25 bp, Homo sapien
gcagcggcccttgttggaagtccag

SEQ ID NO: 3817442 - DNA, 25 bp, Homo sapien
tcggggctgagtcgggctgctttct

SEQ ID NO: 3817443 - DNA, 25 bp, Homo sapien
gctgcccgcacaccgaacctctcgg

SEQ ID NO: 3817444 - DNA, 25 bp, Homo sapien
gggaactcgggagcgcgcggcgagc

SEQ ID NO: 3817445 - DNA, 25 bp, Homo sapien
tcgggaactcgggagcgcgcggcga

SEQ ID NO: 3817446 - DNA, 25 bp, Homo sapien
gcggacggggcggtgccattggccg

SEQ ID NO: 3817447 - DNA, 25 bp, Homo sapien
gggcggtgccattggccggtgcgga

SEQ ID NO: 3817448 - DNA, 25 bp, Homo sapien
gccattggccggtgcggagtgaggg

SEQ ID NO: 3817449 - DNA, 25 bp, Homo sapien
tgctcggggcgggacggagagaccg

SEQ ID NO: 3817450 - DNA, 25 bp, Homo sapien
aggccagggccagcactttcttaaa

SEQ ID NO: 3817451 - DNA, 25 bp, Homo sapien
ggccagggccagcactttcttaaaa

SEQ ID NO: 3817452 - DNA, 25 bp, Homo sapien
agtaaggacagcttcaggagcccca

SEQ ID NO: 3817453 - DNA, 25 bp, Homo sapien
ctttcttaaaacacagtaaggacag

SEQ ID NO: 3817454 - DNA, 25 bp, Homo sapien
gctgtcctccaccagcgggagcagc

SEQ ID NO: 3817455 - DNA, 25 bp, Homo sapien
cactttcgttatgacctatttgatt

SEQ ID NO: 3817456 - DNA, 25 bp, Homo sapien
tgcttcccaggtcactttcgttatg

SEQ ID NO: 3817457 - DNA, 25 bp, Homo sapien
ccaggtcactttcgttatgacctat

SEQ ID NO: 3817458 - DNA, 25 bp, Homo sapien
ctctaaagccctcggcggcctttgt

SEQ ID NO: 3817459 - DNA, 25 bp, Homo sapien
tgccactggcctgtaggaattgggc

SEQ ID NO: 3817460 - DNA, 25 bp, Homo sapien
ccctcagtagtgacagcagactgtc

SEQ ID NO: 3817461 - DNA, 25 bp, Homo sapien
ggcccatgcctagcagctctaaagc

SEQ ID NO: 3817462 - DNA, 25 bp, Homo sapien
agccatggctggcatgccgcctagg

SEQ ID NO: 3817463 - DNA, 25 bp, Homo sapien
ggtagccatggctggcatgccgcct

SEQ ID NO: 3817464 - DNA, 25 bp, Homo sapien
gctgcagctgatcactctggttggg

SEQ ID NO: 3817465 - DNA, 25 bp, Homo sapien
tggctgcagctgatcactctggttg

SEQ ID NO: 3817466 - DNA, 25 bp, Homo sapien
ggcgtggaggcctgagctatgtcct

SEQ ID NO: 3817467 - DNA, 25 bp, Homo sapien
aggcgtggaggcctgagctatgtcc

SEQ ID NO: 3817468 - DNA, 25 bp, Homo sapien
tcagaagtaagccttggtgtgcagg

SEQ ID NO: 3817469 - DNA, 25 bp, Homo sapien
caagtaacttctaggtctgcagaca

SEQ ID NO: 3817470 - DNA, 25 bp, Homo sapien
tgaaggaagactgtctgccgagttc

SEQ ID NO: 3817471 - DNA, 25 bp, Homo sapien
gagttctcacgtgcccatcagtgac

SEQ ID NO: 3817472 - DNA, 25 bp, Homo sapien
cacttgttcagagatctgatggggt

SEQ ID NO: 3817473 - DNA, 25 bp, Homo sapien
ctgagcacttgttcagagatctgat

SEQ ID NO: 3817474 - DNA, 25 bp, Homo sapien
ttgttcagagatctgatggggtgcc

SEQ ID NO: 3817475 - DNA, 25 bp, Homo sapien
taggtggaggggttctgagcacttg

SEQ ID NO: 3817476 - DNA, 25 bp, Homo sapien
tgggggacagtgatggggtgcttct

SEQ ID NO: 3817477 - DNA, 25 bp, Homo sapien
ctgggggacagtgatggggtgcttc

SEQ ID NO: 3817478 - DNA, 25 bp, Homo sapien
gacagtgatggggtgcttctttttg

SEQ ID NO: 3817479 - DNA, 25 bp, Homo sapien
agtgatggggtgcttctttttgagc

SEQ ID NO: 3817480 - DNA, 25 bp, Homo sapien
tcctccaacattagccagggctgtg

SEQ ID NO: 3817481 - DNA, 25 bp, Homo sapien
gacttcagggccttactcacagggc

SEQ ID NO: 3817482 - DNA, 25 bp, Homo sapien
cacagcaggccttgtaggaagtgat

SEQ ID NO: 3817483 - DNA, 25 bp, Homo sapien
gcatttactgtgaggaagcaacgca

SEQ ID NO: 3817484 - DNA, 25 bp, Homo sapien
tgaaagtgtcggcaccctggacatc

SEQ ID NO: 3817485 - DNA, 25 bp, Homo sapien
ctgtgatagtgaaagtgtcggcacc

SEQ ID NO: 3817486 - DNA, 25 bp, Homo sapien
tgatagtgaaagtgtcggcaccctg

SEQ ID NO: 3817487 - DNA, 25 bp, Homo sapien
tagtgaaagtgtcggcaccctggac

SEQ ID NO: 3817488 - DNA, 25 bp, Homo sapien
gcattgcgatggcagtctggtctcc

SEQ ID NO: 3817489 - DNA, 25 bp, Homo sapien
tctggttatgcctggccggcgagaa

SEQ ID NO: 3817490 - DNA, 25 bp, Homo sapien
ccggcgagaagggtgctgtcacact

SEQ ID NO: 3817491 - DNA, 25 bp, Homo sapien
ccatgtgcagaaccatccgggtgca

SEQ ID NO: 3817492 - DNA, 25 bp, Homo sapien
caggtcatctcccttgcagagggtc

SEQ ID NO: 3817493 - DNA, 25 bp, Homo sapien
gccaggtcatctcccttgcagaggg

SEQ ID NO: 3817494 - DNA, 25 bp, Homo sapien
gcagaaatcaccttgggggtcttcc

SEQ ID NO: 3817495 - DNA, 25 bp, Homo sapien
ggcagaaatcaccttgggggtcttc

SEQ ID NO: 3817496 - DNA, 25 bp, Homo sapien
gagacccccccgtgttgtcactgcc

SEQ ID NO: 3817497 - DNA, 25 bp, Homo sapien
cccccgtgttgtcactgcccctcac

SEQ ID NO: 3817498 - DNA, 25 bp, Homo sapien
tgaaagagacccccccgtgttgtca

SEQ ID NO: 3817499 - DNA, 25 bp, Homo sapien
ccccccgtgttgtcactgcccctca

SEQ ID NO: 3817500 - DNA, 25 bp, Homo sapien
tcatcccacttctccgaaggtgggc

SEQ ID NO: 3817501 - DNA, 25 bp, Homo sapien
gccctgggaccagcggctccttgtg

SEQ ID NO: 3817502 - DNA, 25 bp, Homo sapien
cggcagccttagcagtacggtttgg

SEQ ID NO: 3817503 - DNA, 25 bp, Homo sapien
ggctccttgtgagccttctccccgc

SEQ ID NO: 3817504 - DNA, 25 bp, Homo sapien
ggtgtgaagaacattgctgatgtcc

SEQ ID NO: 3817505 - DNA, 25 bp, Homo sapien
gacagatacaaacatttgtctacag

SEQ ID NO: 3817506 - DNA, 25 bp, Homo sapien
tacagtgctcataaatgcagctcca

SEQ ID NO: 3817507 - DNA, 25 bp, Homo sapien
tgcagctccaagttcacatgcgcag

SEQ ID NO: 3817508 - DNA, 25 bp, Homo sapien
caatgccaccacaggacgtatgagt

SEQ ID NO: 3817509 - DNA, 25 bp, Homo sapien
tgatggtagctactcagccagtggg

SEQ ID NO: 3817510 - DNA, 25 bp, Homo sapien
gccagtgggctcctatatgcggtta

SEQ ID NO: 3817511 - DNA, 25 bp, Homo sapien
tatgcggttacacgtcagaatggcc

SEQ ID NO: 3817512 - DNA, 25 bp, Homo sapien
cgggaggtgcgagtagagtgttctg

SEQ ID NO: 3817513 - DNA, 25 bp, Homo sapien
tgggcagactgcccaaaagtccagc

SEQ ID NO: 3817514 - DNA, 25 bp, Homo sapien
gaggtgcgagtagagtgttctgagg

SEQ ID NO: 3817515 - DNA, 25 bp, Homo sapien
gcagactgcccaaaagtccagcttc

SEQ ID NO: 3817516 - DNA, 25 bp, Homo sapien
tgcggtgatgtctcgcagggacaca

SEQ ID NO: 3817517 - DNA, 25 bp, Homo sapien
ctgctggccactgaaacgtgcggtg

SEQ ID NO: 3817518 - DNA, 25 bp, Homo sapien
tccacagtatcagccatgggcagtg

SEQ ID NO: 3817519 - DNA, 25 bp, Homo sapien
gggctgtgccagtcgagatatagac

SEQ ID NO: 3817520 - DNA, 25 bp, Homo sapien
tctcccgaattgtgggcagatgggc

SEQ ID NO: 3817521 - DNA, 25 bp, Homo sapien
atctcctccgtggtctcccgaattg

SEQ ID NO: 3817522 - DNA, 25 bp, Homo sapien
ctcacgtagtcatccaggctaggag

SEQ ID NO: 3817523 - DNA, 25 bp, Homo sapien
cacgtagtcatccaggctaggagag

SEQ ID NO: 3817524 - DNA, 25 bp, Homo sapien
cactctggcgagaggaggtggcaac

SEQ ID NO: 3817525 - DNA, 25 bp, Homo sapien
gaccagagctccgactgctgggatc

SEQ ID NO: 3817526 - DNA, 25 bp, Homo sapien
tggtgagggcctgccatgcgtccca

SEQ ID NO: 3817527 - DNA, 25 bp, Homo sapien
ccctgagagcaatttgaagtctaca

SEQ ID NO: 3817528 - DNA, 25 bp, Homo sapien
gagctccgactgctgggatcttttc

SEQ ID NO: 3817529 - DNA, 25 bp, Homo sapien
tgcatgaaataacccctgaatccct

SEQ ID NO: 3817530 - DNA, 25 bp, Homo sapien
gtttaaaaccaggatcggccacgca

SEQ ID NO: 3817531 - DNA, 25 bp, Homo sapien
tgtgttttgtctcaaacccaagggc

SEQ ID NO: 3817532 - DNA, 25 bp, Homo sapien
cacgcactgaccatgggacctttgg

SEQ ID NO: 3817533 - DNA, 25 bp, Homo sapien
gtgcactgagtctcacagtccaccg

SEQ ID NO: 3817534 - DNA, 25 bp, Homo sapien
actgagtctcacagtccaccgtagc

SEQ ID NO: 3817535 - DNA, 25 bp, Homo sapien
gacagtgcactgagtctcacagtcc

SEQ ID NO: 3817536 - DNA, 25 bp, Homo sapien
ggaggacagtgcactgagtctcaca

SEQ ID NO: 3817537 - DNA, 25 bp, Homo sapien
cattgaggagggtccacatggcatt

SEQ ID NO: 3817538 - DNA, 25 bp, Homo sapien
gcttgctgcaagaaacacggtcatt

SEQ ID NO: 3817539 - DNA, 25 bp, Homo sapien
tgtcccgtggatgcctgtgtacctc

SEQ ID NO: 3817540 - DNA, 25 bp, Homo sapien
cttcatcagagagacctaaagcgat

SEQ ID NO: 3817541 - DNA, 25 bp, Homo sapien
tctctaacattacgtgggaccgttg

SEQ ID NO: 3817542 - DNA, 25 bp, Homo sapien
gacatgctattctcaaggcagaggg

SEQ ID NO: 3817543 - DNA, 25 bp, Homo sapien
caaagtgcagggaccaaaaccagag

SEQ ID NO: 3817544 - DNA, 25 bp, Homo sapien
cagtcacatgcggtcagccaattca

SEQ ID NO: 3817545 - DNA, 25 bp, Homo sapien
taaaagtaacaacgactctcatttc

SEQ ID NO: 3817546 - DNA, 25 bp, Homo sapien
ataataaaagtaacaacgactctca

SEQ ID NO: 3817547 - DNA, 25 bp, Homo sapien
tttcttctgtgttatacattgtgct

SEQ ID NO: 3817548 - DNA, 25 bp, Homo sapien
ctgtgttatacattgtgctaagtgc

SEQ ID NO: 3817549 - DNA, 25 bp, Homo sapien
tgcaatagtccagatactctctaga

SEQ ID NO: 3817550 - DNA, 25 bp, Homo sapien
tctagattgcgagtggagcttcttt

SEQ ID NO: 3817551 - DNA, 25 bp, Homo sapien
cagatactctctagattgcgagtgg

SEQ ID NO: 3817552 - DNA, 25 bp, Homo sapien
agctttgtgctttgccatatgcaga

SEQ ID NO: 3817553 - DNA, 25 bp, Homo sapien
cagatcatgagaggcatcgggtgcc

SEQ ID NO: 3817554 - DNA, 25 bp, Homo sapien
ccgtgaatagactgtagggcaaccc

SEQ ID NO: 3817555 - DNA, 25 bp, Homo sapien
ccctgggaagaagactgttgcaaga

SEQ ID NO: 3817556 - DNA, 25 bp, Homo sapien
cgatgaagccgacagaatttgtgga

SEQ ID NO: 3817557 - DNA, 25 bp, Homo sapien
gcaatagcattggaagccaaaaggc

SEQ ID NO: 3817558 - DNA, 25 bp, Homo sapien
atagcattggaagccaaaaggcgga

SEQ ID NO: 3817559 - DNA, 25 bp, Homo sapien
ttggaagccaaaaggcggaggagct

SEQ ID NO: 3817560 - DNA, 25 bp, Homo sapien
tggaagccaaaaggcggaggagctc

SEQ ID NO: 3817561 - DNA, 25 bp, Homo sapien
agatgactgagcacggccaggatgg

SEQ ID NO: 3817562 - DNA, 25 bp, Homo sapien
atgactgagcacggccaggatggct

SEQ ID NO: 3817563 - DNA, 25 bp, Homo sapien
tcagatgactgagcacggccaggat

SEQ ID NO: 3817564 - DNA, 25 bp, Homo sapien
tgactgagcacggccaggatggctg

SEQ ID NO: 3817565 - DNA, 25 bp, Homo sapien
gtcacaggacgccttccgagttggg

SEQ ID NO: 3817566 - DNA, 25 bp, Homo sapien
cttcgtgaaaagtaccagggtctca

SEQ ID NO: 3817567 - DNA, 25 bp, Homo sapien
cacggtgaacggagcacatttcttc

SEQ ID NO: 3817568 - DNA, 25 bp, Homo sapien
tataaccactcccatcttgcaggag

SEQ ID NO: 3817569 - DNA, 25 bp, Homo sapien
agggtcgctccgccactttcctaga

SEQ ID NO: 3817570 - DNA, 25 bp, Homo sapien
agagggtcgctccgccactttccta

SEQ ID NO: 3817571 - DNA, 25 bp, Homo sapien
ggtcgctccgccactttcctagagc

SEQ ID NO: 3817572 - DNA, 25 bp, Homo sapien
gggtcgctccgccactttcctagag

SEQ ID NO: 3817573 - DNA, 25 bp, Homo sapien
tctaatctcattcagcatcgacgga

SEQ ID NO: 3817574 - DNA, 25 bp, Homo sapien
tagcaaagcctaaagcgggtatttc

SEQ ID NO: 3817575 - DNA, 25 bp, Homo sapien
tatttctcggagctcaagccaagga

SEQ ID NO: 3817576 - DNA, 25 bp, Homo sapien
gaagtctgtggctggtctccgttaa

SEQ ID NO: 3817577 - DNA, 25 bp, Homo sapien
gaaatcaattccactacttttgaag

SEQ ID NO: 3817578 - DNA, 25 bp, Homo sapien
tttgaggatacatttgtgaaagtgc

SEQ ID NO: 3817579 - DNA, 25 bp, Homo sapien
gcaggcatgccaatgactactcagt

SEQ ID NO: 3817580 - DNA, 25 bp, Homo sapien
tactcagttttaggactttctgtgg

SEQ ID NO: 3817581 - DNA, 25 bp, Homo sapien
taaggagtccggcaaacatgtttct

SEQ ID NO: 3817582 - DNA, 25 bp, Homo sapien
gagccagccttttagatctacatga

SEQ ID NO: 3817583 - DNA, 25 bp, Homo sapien
gatagccctgcttaaatgtttgtca

SEQ ID NO: 3817584 - DNA, 25 bp, Homo sapien
gaatggtgccaagtgtcagactcta

SEQ ID NO: 3817585 - DNA, 25 bp, Homo sapien
tgtccctccaccatgcagagtctga

SEQ ID NO: 3817586 - DNA, 25 bp, Homo sapien
gaatgtcctgtgatatcagccctgg

SEQ ID NO: 3817587 - DNA, 25 bp, Homo sapien
gagtctgagtgtgacaggacccatg

SEQ ID NO: 3817588 - DNA, 25 bp, Homo sapien
gaacttcccaattgcagtcatgatg

SEQ ID NO: 3817589 - DNA, 25 bp, Homo sapien
tatctgaaatgctggagaccggatg

SEQ ID NO: 3817590 - DNA, 25 bp, Homo sapien
aaatacttcagtccagtgagggcgc

SEQ ID NO: 3817591 - DNA, 25 bp, Homo sapien
agatcatggaaaacagcgtgtcctg

SEQ ID NO: 3817592 - DNA, 25 bp, Homo sapien
cacaaaactgtcactagatggcagc

SEQ ID NO: 3817593 - DNA, 25 bp, Homo sapien
gaacctcttcgtggtcagcagttga

SEQ ID NO: 3817594 - DNA, 25 bp, Homo sapien
cagcagttgagtacgtctctggtgg

SEQ ID NO: 3817595 - DNA, 25 bp, Homo sapien
actgagaagtcagttgtgagcactg

SEQ ID NO: 3817596 - DNA, 25 bp, Homo sapien
gaatttcataaagcgaccatctcat

SEQ ID NO: 3817597 - DNA, 25 bp, Homo sapien
gatctgtcagaggaatcaatatgga

SEQ ID NO: 3817598 - DNA, 25 bp, Homo sapien
tacagagtggatgttttattagcag

SEQ ID NO: 3817599 - DNA, 25 bp, Homo sapien
cactgaaatcctgaacttcttaaag

SEQ ID NO: 3817600 - DNA, 25 bp, Homo sapien
tacagaacagagtcagtagaattag

SEQ ID NO: 3817601 - DNA, 25 bp, Homo sapien
gatctgactcagaccgaaaatccaa

SEQ ID NO: 3817602 - DNA, 25 bp, Homo sapien
ctgactcagaccgaaaatccaaatt

SEQ ID NO: 3817603 - DNA, 25 bp, Homo sapien
gactcagaccgaaaatccaaattct

SEQ ID NO: 3817604 - DNA, 25 bp, Homo sapien
actcagaccgaaaatccaaattctg

SEQ ID NO: 3817605 - DNA, 25 bp, Homo sapien
ccacaagagtccgctgggatgccat

SEQ ID NO: 3817606 - DNA, 25 bp, Homo sapien
cagaatcggcagtagaattgaagct

SEQ ID NO: 3817607 - DNA, 25 bp, Homo sapien
ctccctcgctttagcagaatcggca

SEQ ID NO: 3817608 - DNA, 25 bp, Homo sapien
taaagccatcacgtggcaggcagtc

SEQ ID NO: 3817609 - DNA, 25 bp, Homo sapien
ctgggagtgttgtgtcttgatgtac

SEQ ID NO: 3817610 - DNA, 25 bp, Homo sapien
gagtgttgtgtcttgatgtacatca

SEQ ID NO: 3817611 - DNA, 25 bp, Homo sapien
gtttgctgggagtgttgtgtcttga

SEQ ID NO: 3817612 - DNA, 25 bp, Homo sapien
tttgctgggagtgttgtgtcttgat

SEQ ID NO: 3817613 - DNA, 25 bp, Homo sapien
tcaggtcagtcctggaaggtaaaca

SEQ ID NO: 3817614 - DNA, 25 bp, Homo sapien
acagaatacaaaggatccgaaacca

SEQ ID NO: 3817615 - DNA, 25 bp, Homo sapien
tcagtcctggaaggtaaacaagtgt

SEQ ID NO: 3817616 - DNA, 25 bp, Homo sapien
gaatacaaaggatccgaaaccagcc

SEQ ID NO: 3817617 - DNA, 25 bp, Homo sapien
gtagagaggtatttaagtctcaaac

SEQ ID NO: 3817618 - DNA, 25 bp, Homo sapien
agtagagaggtatttaagtctcaaa

SEQ ID NO: 3817619 - DNA, 25 bp, Homo sapien
tacaacttatgaaggctgctgcggt

SEQ ID NO: 3817620 - DNA, 25 bp, Homo sapien
caactgtaggtgactggtgattctt

SEQ ID NO: 3817621 - DNA, 25 bp, Homo sapien
tcaggaatttgaaggagggttctta

SEQ ID NO: 3817622 - DNA, 25 bp, Homo sapien
aaattcatttgtcttagttagcagc

SEQ ID NO: 3817623 - DNA, 25 bp, Homo sapien
gcaaattgggtatcagtttaagagt

SEQ ID NO: 3817624 - DNA, 25 bp, Homo sapien
taggaagttttaggctattagcaaa

SEQ ID NO: 3817625 - DNA, 25 bp, Homo sapien
tttaagagtgtgaggttccgctcca

SEQ ID NO: 3817626 - DNA, 25 bp, Homo sapien
caggtgtgctttcaccattggtcca

SEQ ID NO: 3817627 - DNA, 25 bp, Homo sapien
tgtcctggcatagtttccactcccc

SEQ ID NO: 3817628 - DNA, 25 bp, Homo sapien
tcccatatagactgcctgttggcaa

SEQ ID NO: 3817629 - DNA, 25 bp, Homo sapien
tataatcctcctccagaactagctg

SEQ ID NO: 3817630 - DNA, 25 bp, Homo sapien
tcctcacttaaaatgtaggtctcat

SEQ ID NO: 3817631 - DNA, 25 bp, Homo sapien
tgggctcgaacactggctgtatgac

SEQ ID NO: 3817632 - DNA, 25 bp, Homo sapien
aggcaaggtgcttcacctctctcag

SEQ ID NO: 3817633 - DNA, 25 bp, Homo sapien
gctgtatgaccttaggcaaggtgct

SEQ ID NO: 3817634 - DNA, 25 bp, Homo sapien
ctgggctcgaacactggctgtatga

SEQ ID NO: 3817635 - DNA, 25 bp, Homo sapien
cggcccttgtagatcttggtcatag

SEQ ID NO: 3817636 - DNA, 25 bp, Homo sapien
tctctgacggcccttgtagatcttg

SEQ ID NO: 3817637 - DNA, 25 bp, Homo sapien
tctgacggcccttgtagatcttggt

SEQ ID NO: 3817638 - DNA, 25 bp, Homo sapien
ccttgtagatcttggtcatagagcc

SEQ ID NO: 3817639 - DNA, 25 bp, Homo sapien
ctgtgcttggccggcttgatggtgt

SEQ ID NO: 3817640 - DNA, 25 bp, Homo sapien
ttcttatcgtaggcagcaagctctc

SEQ ID NO: 3817641 - DNA, 25 bp, Homo sapien
tctgtgcttggccggcttgatggtg

SEQ ID NO: 3817642 - DNA, 25 bp, Homo sapien
ctgatgaactcctgctggttcacgt

SEQ ID NO: 3817643 - DNA, 25 bp, Homo sapien
tgccagagctctgatgaactcctgc

SEQ ID NO: 3817644 - DNA, 25 bp, Homo sapien
gagaaaggctgccagagctctgatg

SEQ ID NO: 3817645 - DNA, 25 bp, Homo sapien
ctttttgagaaaggctgccagagct

SEQ ID NO: 3817646 - DNA, 25 bp, Homo sapien
tcagaagtggctatggaaggcaact

SEQ ID NO: 3817647 - DNA, 25 bp, Homo sapien
cttcaggagattcctgtgggtcttt

SEQ ID NO: 3817648 - DNA, 25 bp, Homo sapien
tctttcagaagtggctatggaaggc

SEQ ID NO: 3817649 - DNA, 25 bp, Homo sapien
tatggaaggcaacttcaggagattc

SEQ ID NO: 3817650 - DNA, 25 bp, Homo sapien
gtatattggcgagggttttcctgga

SEQ ID NO: 3817651 - DNA, 25 bp, Homo sapien
tatctgtatattggcgagggttttc

SEQ ID NO: 3817652 - DNA, 25 bp, Homo sapien
ttccatatctgtatattggcgaggg

SEQ ID NO: 3817653 - DNA, 25 bp, Homo sapien
agtcttccatatctgtatattggcg

SEQ ID NO: 3817654 - DNA, 25 bp, Homo sapien
ttccttagtgtacagaatatcagaa

SEQ ID NO: 3817655 - DNA, 25 bp, Homo sapien
atggaatttccttagtgtacagaat

SEQ ID NO: 3817656 - DNA, 25 bp, Homo sapien
cttgaatggaatttccttagtgtac

SEQ ID NO: 3817657 - DNA, 25 bp, Homo sapien
tagtgtacagaatatcagaagtggg

SEQ ID NO: 3817658 - DNA, 25 bp, Homo sapien
aatggcgaagtagataaagtttatt

SEQ ID NO: 3817659 - DNA, 25 bp, Homo sapien
tgttcctcaggctctatcccgtgtc

SEQ ID NO: 3817660 - DNA, 25 bp, Homo sapien
tatcccgtgtccaattcccaagggc

SEQ ID NO: 3817661 - DNA, 25 bp, Homo sapien
tcctggagttgttcctcaggctcta

SEQ ID NO: 3817662 - DNA, 25 bp, Homo sapien
cttccctctgcttgtaccccaattt

SEQ ID NO: 3817663 - DNA, 25 bp, Homo sapien
ctatcagagactcaggattttctgg

SEQ ID NO: 3817664 - DNA, 25 bp, Homo sapien
tcttacacttctttaaaactgtgga

SEQ ID NO: 3817665 - DNA, 25 bp, Homo sapien
tctggttgtggaacttgggaattct

SEQ ID NO: 3817666 - DNA, 25 bp, Homo sapien
ttattcagctatcagagactcagga

SEQ ID NO: 3817667 - DNA, 25 bp, Homo sapien
ggacagttataacgctgtttgagaa

SEQ ID NO: 3817668 - DNA, 25 bp, Homo sapien
agttataacgctgtttgagaagcca

SEQ ID NO: 3817669 - DNA, 25 bp, Homo sapien
ctatgggagtcggaactcagggaga

SEQ ID NO: 3817670 - DNA, 25 bp, Homo sapien
cttgaaggacagttataacgctgtt

SEQ ID NO: 3817671 - DNA, 25 bp, Homo sapien
tcgtagggcactaagctggctagcc

SEQ ID NO: 3817672 - DNA, 25 bp, Homo sapien
gattattggcacatatcgtagggca

SEQ ID NO: 3817673 - DNA, 25 bp, Homo sapien
caagcctagtgatgaagagtgcagc

SEQ ID NO: 3817674 - DNA, 25 bp, Homo sapien
caaatgcaggagaagaggtcccatc

SEQ ID NO: 3817675 - DNA, 25 bp, Homo sapien
gtttctaagacacgggacactacag

SEQ ID NO: 3817676 - DNA, 25 bp, Homo sapien
cagcagtttctaagacacgggacac

SEQ ID NO: 3817677 - DNA, 25 bp, Homo sapien
atcagcagtttctaagacacgggac

SEQ ID NO: 3817678 - DNA, 25 bp, Homo sapien
gcagtttctaagacacgggacacta

SEQ ID NO: 3817679 - DNA, 25 bp, Homo sapien
ccttaagcagtgagatcaggtcttt

SEQ ID NO: 3817680 - DNA, 25 bp, Homo sapien
tccttaagcagtgagatcaggtctt

SEQ ID NO: 3817681 - DNA, 25 bp, Homo sapien
ttccttaagcagtgagatcaggtct

SEQ ID NO: 3817682 - DNA, 25 bp, Homo sapien
gaaaacaaggagttgtcaacacatt

SEQ ID NO: 3817683 - DNA, 25 bp, Homo sapien
aaacaaggagttgtcaacacatttt

SEQ ID NO: 3817684 - DNA, 25 bp, Homo sapien
agaaaacaaggagttgtcaacacat

SEQ ID NO: 3817685 - DNA, 25 bp, Homo sapien
aagaaaacaaggagttgtcaacaca

SEQ ID NO: 3817686 - DNA, 25 bp, Homo sapien
tcccaatatctggtggcaggatttc

SEQ ID NO: 3817687 - DNA, 25 bp, Homo sapien
tgtgagcttcccaatatctggtggc

SEQ ID NO: 3817688 - DNA, 25 bp, Homo sapien
actttgtgagcttcccaatatctgg

SEQ ID NO: 3817689 - DNA, 25 bp, Homo sapien
atatctggtggcaggatttcaaaac

SEQ ID NO: 3817690 - DNA, 25 bp, Homo sapien
cttcagcggaatatcagcagtcaga

SEQ ID NO: 3817691 - DNA, 25 bp, Homo sapien
cagagtaaatcctaacttcagcgga

SEQ ID NO: 3817692 - DNA, 25 bp, Homo sapien
tggtgatggaggctataaccacagc

SEQ ID NO: 3817693 - DNA, 25 bp, Homo sapien
tacaattaacaacgtgggcactagc

SEQ ID NO: 3817694 - DNA, 25 bp, Homo sapien
agcctcgtggcaaagtgttcagcct

SEQ ID NO: 3817695 - DNA, 25 bp, Homo sapien
gcagagagcagaagcctcgtggcaa

SEQ ID NO: 3817696 - DNA, 25 bp, Homo sapien
tcaagagctggcagagagcagaagc

SEQ ID NO: 3817697 - DNA, 25 bp, Homo sapien
agcagaagcctcgtggcaaagtgtt

SEQ ID NO: 3817698 - DNA, 25 bp, Homo sapien
aatacaggcaagatggagcttgtaa

SEQ ID NO: 3817699 - DNA, 25 bp, Homo sapien
atacaggcaagatggagcttgtaat

SEQ ID NO: 3817700 - DNA, 25 bp, Homo sapien
gtaatacaggcaagatggagcttgt

SEQ ID NO: 3817701 - DNA, 25 bp, Homo sapien
taatacaggcaagatggagcttgta

SEQ ID NO: 3817702 - DNA, 25 bp, Homo sapien
taaaaatttgagcacttccaaattc

SEQ ID NO: 3817703 - DNA, 25 bp, Homo sapien
ctgatctgtgttggcagctcctcga

SEQ ID NO: 3817704 - DNA, 25 bp, Homo sapien
ttttgaagcctgctgatctgtgttg

SEQ ID NO: 3817705 - DNA, 25 bp, Homo sapien
caaggttcaggtgtttgagtttttg

SEQ ID NO: 3817706 - DNA, 25 bp, Homo sapien
ggaaacataaatgctgagtgtgaat

SEQ ID NO: 3817707 - DNA, 25 bp, Homo sapien
atggcacagacagaccggcttgggt

SEQ ID NO: 3817708 - DNA, 25 bp, Homo sapien
ttttgagcaaaagcatcttgtggcc

SEQ ID NO: 3817709 - DNA, 25 bp, Homo sapien
ccggcttgggtgcagctgattaggg

SEQ ID NO: 3817710 - DNA, 25 bp, Homo sapien
gaaccttaacggcaggatgctgggt

SEQ ID NO: 3817711 - DNA, 25 bp, Homo sapien
agcctgccaccgttctgaagttctc

SEQ ID NO: 3817712 - DNA, 25 bp, Homo sapien
cagcctgccaccgttctgaagttct

SEQ ID NO: 3817713 - DNA, 25 bp, Homo sapien
gcctgccaccgttctgaagttctca

SEQ ID NO: 3817714 - DNA, 25 bp, Homo sapien
tgcatgcagacacgggatcattacg

SEQ ID NO: 3817715 - DNA, 25 bp, Homo sapien
aaggctgcggcggatatttgcatgc

SEQ ID NO: 3817716 - DNA, 25 bp, Homo sapien
tcaactgttcttggcacgtcctggt

SEQ ID NO: 3817717 - DNA, 25 bp, Homo sapien
agtatccggagacctacccatccaa

SEQ ID NO: 3817718 - DNA, 25 bp, Homo sapien
cacaagccaccaccgaaagttctga

SEQ ID NO: 3817719 - DNA, 25 bp, Homo sapien
caagccaccaccgaaagttctgagc

SEQ ID NO: 3817720 - DNA, 25 bp, Homo sapien
gcacaagccaccaccgaaagttctg

SEQ ID NO: 3817721 - DNA, 25 bp, Homo sapien
agccaccaccgaaagttctgagcag

SEQ ID NO: 3817722 - DNA, 25 bp, Homo sapien
ctgacctccatgtcgccaacctcca

SEQ ID NO: 3817723 - DNA, 25 bp, Homo sapien
ccatgtcgccaacctccagtggttt

SEQ ID NO: 3817724 - DNA, 25 bp, Homo sapien
gatgtgccctcagcactctcagctt

SEQ ID NO: 3817725 - DNA, 25 bp, Homo sapien
ggtttcagatgtgccctcagcactc

SEQ ID NO: 3817726 - DNA, 25 bp, Homo sapien
gggcacagtggtgcatgcctgcaat

SEQ ID NO: 3817727 - DNA, 25 bp, Homo sapien
ctgggaggcagaggttgcagtgagc

SEQ ID NO: 3817728 - DNA, 25 bp, Homo sapien
cccagctacttgggagggtgaggca

SEQ ID NO: 3817729 - DNA, 25 bp, Homo sapien
ggagaaacgcttgaacctgggaggc

SEQ ID NO: 3817730 - DNA, 25 bp, Homo sapien
gaagaagctgctatggtgaatttaa

SEQ ID NO: 3817731 - DNA, 25 bp, Homo sapien
atttcaggaagaagctgctatggtg

SEQ ID NO: 3817732 - DNA, 25 bp, Homo sapien
aagaagctgctatggtgaatttaaa

SEQ ID NO: 3817733 - DNA, 25 bp, Homo sapien
tcaggaagaagctgctatggtgaat

SEQ ID NO: 3817734 - DNA, 25 bp, Homo sapien
caggtatggaggcatatggccagct

SEQ ID NO: 3817735 - DNA, 25 bp, Homo sapien
accgggtacttcttgagcattggga

SEQ ID NO: 3817736 - DNA, 25 bp, Homo sapien
taggtgcaccgggtacttcttgagc

SEQ ID NO: 3817737 - DNA, 25 bp, Homo sapien
tcacgtcaccataggtgcaccgggt

SEQ ID NO: 3817738 - DNA, 25 bp, Homo sapien
tgatgacagagttgtggttggtaca

SEQ ID NO: 3817739 - DNA, 25 bp, Homo sapien
acagagttgtggttggtacaggcca

SEQ ID NO: 3817740 - DNA, 25 bp, Homo sapien
ctcgtcgcagcagtatggtgatgac

SEQ ID NO: 3817741 - DNA, 25 bp, Homo sapien
cagcagtatggtgatgacagagttg

SEQ ID NO: 3817742 - DNA, 25 bp, Homo sapien
tcagccgccagcagcgatcttgcag

SEQ ID NO: 3817743 - DNA, 25 bp, Homo sapien
acctctttgcccgagccaccagtga

SEQ ID NO: 3817744 - DNA, 25 bp, Homo sapien
atcgttggcactggtagcattggca

SEQ ID NO: 3817745 - DNA, 25 bp, Homo sapien
gcagcgatcttgcagcacagctcct

SEQ ID NO: 3817746 - DNA, 25 bp, Homo sapien
ttgtatttaagtgatttatgtctcc

SEQ ID NO: 3817747 - DNA, 25 bp, Homo sapien
gattggactctgacaaagagaaaaa

SEQ ID NO: 3817748 - DNA, 25 bp, Homo sapien
ggagatagccccacaaagatgggat

SEQ ID NO: 3817749 - DNA, 25 bp, Homo sapien
aaaaatgctaggaagagtaccagga

SEQ ID NO: 3817750 - DNA, 25 bp, Homo sapien
ctctgcagtgttttagggtgaaggg

SEQ ID NO: 3817751 - DNA, 25 bp, Homo sapien
tctctgcagtgttttagggtgaagg

SEQ ID NO: 3817752 - DNA, 25 bp, Homo sapien
tttgtaggttcagcttttcaacatt

SEQ ID NO: 3817753 - DNA, 25 bp, Homo sapien
acatttgtaggttcagcttttcaac

SEQ ID NO: 3817754 - DNA, 25 bp, Homo sapien
tcaatgcaaacccagttaaataagg

SEQ ID NO: 3817755 - DNA, 25 bp, Homo sapien
tatacttagctttttgccacacaga

SEQ ID NO: 3817756 - DNA, 25 bp, Homo sapien
gaaacaacctatgctatttcaatgc

SEQ ID NO: 3817757 - DNA, 25 bp, Homo sapien
taaacatagagactacatgagagag

SEQ ID NO: 3817758 - DNA, 25 bp, Homo sapien
ggcgcccctcatgcgttcgcttata

SEQ ID NO: 3817759 - DNA, 25 bp, Homo sapien
tgtgatgccgccaatgcactggata

SEQ ID NO: 3817760 - DNA, 25 bp, Homo sapien
tggtcacgagggtgaagtaatttaa

SEQ ID NO: 3817761 - DNA, 25 bp, Homo sapien
caagataagggcatttatagcccca

SEQ ID NO: 3817762 - DNA, 25 bp, Homo sapien
cacgatgaaacagataaatgggaat

SEQ ID NO: 3817763 - DNA, 25 bp, Homo sapien
taggacaaatgtagtggattttagc

SEQ ID NO: 3817764 - DNA, 25 bp, Homo sapien
ggccacattttatgaccacgatgaa

SEQ ID NO: 3817765 - DNA, 25 bp, Homo sapien
ccagaggaactgaagtgtatttgaa

SEQ ID NO: 3817766 - DNA, 25 bp, Homo sapien
ctgtgggaggatcgccccttcagcg

SEQ ID NO: 3817767 - DNA, 25 bp, Homo sapien
atgcgaagaagaggcgccgtgccct

SEQ ID NO: 3817768 - DNA, 25 bp, Homo sapien
tgatgtgaagacgaggaccatcgac

SEQ ID NO: 3817769 - DNA, 25 bp, Homo sapien
gtcatccactatagggatatcagaa

SEQ ID NO: 3817770 - DNA, 25 bp, Homo sapien
tgaaaagtagcatagaggcttgctg

SEQ ID NO: 3817771 - DNA, 25 bp, Homo sapien
ggctggtgtactgaaggactctctt

SEQ ID NO: 3817772 - DNA, 25 bp, Homo sapien
cataaacgcttgctaaaaggcctgc

SEQ ID NO: 3817773 - DNA, 25 bp, Homo sapien
ggctgaatctggctaagagtcggaa

SEQ ID NO: 3817774 - DNA, 25 bp, Homo sapien
atgcaacacttcacagatttctgtg

SEQ ID NO: 3817775 - DNA, 25 bp, Homo sapien
tatgcaacacttcacagatttctgt

SEQ ID NO: 3817776 - DNA, 25 bp, Homo sapien
catgctgatcttctcgacattgttt

SEQ ID NO: 3817777 - DNA, 25 bp, Homo sapien
ctgatcttctcgacattgtttcaat

SEQ ID NO: 3817778 - DNA, 25 bp, Homo sapien
acaccgattaagtccacaagcaaca

SEQ ID NO: 3817779 - DNA, 25 bp, Homo sapien
tgtaaacaccgattaagtccacaag

SEQ ID NO: 3817780 - DNA, 25 bp, Homo sapien
taaacaccgattaagtccacaagca

SEQ ID NO: 3817781 - DNA, 25 bp, Homo sapien
taaatgtaaacaccgattaagtcca

SEQ ID NO: 3817782 - DNA, 25 bp, Homo sapien
tggttaacgtccaccttgttttgca

SEQ ID NO: 3817783 - DNA, 25 bp, Homo sapien
tttagatcggcaccagaatctgtga

SEQ ID NO: 3817784 - DNA, 25 bp, Homo sapien
actttgatgactgcaccatgggaca

SEQ ID NO: 3817785 - DNA, 25 bp, Homo sapien
tttgcactttgatgactgcaccatg

SEQ ID NO: 3817786 - DNA, 25 bp, Homo sapien
cgttgacacaggcccagtgtagagc

SEQ ID NO: 3817787 - DNA, 25 bp, Homo sapien
ttgacacaggcccagtgtagagcag

SEQ ID NO: 3817788 - DNA, 25 bp, Homo sapien
ctacttccgcatggccgttgacaca

SEQ ID NO: 3817789 - DNA, 25 bp, Homo sapien
gacacaggcccagtgtagagcagtc

SEQ ID NO: 3817790 - DNA, 25 bp, Homo sapien
tgctcccctcgtccccaggcctccc

SEQ ID NO: 3817791 - DNA, 25 bp, Homo sapien
ctgctcccctcgtccccaggcctcc

SEQ ID NO: 3817792 - DNA, 25 bp, Homo sapien
tcccctcgtccccaggcctcccagc

SEQ ID NO: 3817793 - DNA, 25 bp, Homo sapien
ccctcgtccccaggcctcccagcac

SEQ ID NO: 3817794 - DNA, 25 bp, Homo sapien
gggcctggtatctcttcgtcacatc

SEQ ID NO: 3817795 - DNA, 25 bp, Homo sapien
tgagatccccatagtggatcacgca

SEQ ID NO: 3817796 - DNA, 25 bp, Homo sapien
gatcacgcaagagtccttgttggta

SEQ ID NO: 3817797 - DNA, 25 bp, Homo sapien
tcctcatggttatcccctccagatt

SEQ ID NO: 3817798 - DNA, 25 bp, Homo sapien
gctcaaccgaaatagctaagccatt

SEQ ID NO: 3817799 - DNA, 25 bp, Homo sapien
agtctcctcttcaaaagctgaaggg

SEQ ID NO: 3817800 - DNA, 25 bp, Homo sapien
tataaagctcctctgctgaaagcag

SEQ ID NO: 3817801 - DNA, 25 bp, Homo sapien
ctcttctacccagtgagaacgagtg

SEQ ID NO: 3817802 - DNA, 25 bp, Homo sapien
gttattcggcttcgagaccccgcgc

SEQ ID NO: 3817803 - DNA, 25 bp, Homo sapien
cgtggcgaacactccgcggtttgga

SEQ ID NO: 3817804 - DNA, 25 bp, Homo sapien
gatgtttggcgcgtgttcagttgat

SEQ ID NO: 3817805 - DNA, 25 bp, Homo sapien
cccgcgccacgctgaggttaattta

SEQ ID NO: 3817806 - DNA, 25 bp, Homo sapien
ccatggcattggcaggggtcgtgta

SEQ ID NO: 3817807 - DNA, 25 bp, Homo sapien
taaagatgacaaagtcctgtctagc

SEQ ID NO: 3817808 - DNA, 25 bp, Homo sapien
caggggtcgtgtataaagatgacaa

SEQ ID NO: 3817809 - DNA, 25 bp, Homo sapien
agatgacaaagtcctgtctagcatg

SEQ ID NO: 3817810 - DNA, 25 bp, Homo sapien
cccaagttaattgcaatgtggatgg

SEQ ID NO: 3817811 - DNA, 25 bp, Homo sapien
ggatgccatgcataagcagcatgaa

SEQ ID NO: 3817812 - DNA, 25 bp, Homo sapien
ttaattgcaatgtggatggatgcca

SEQ ID NO: 3817813 - DNA, 25 bp, Homo sapien
gcaatgtggatggatgccatgcata

SEQ ID NO: 3817814 - DNA, 25 bp, Homo sapien
agttcgtgttgtttggataggtgcc

SEQ ID NO: 3817815 - DNA, 25 bp, Homo sapien
ttccagcaggagctaccagtgccca

SEQ ID NO: 3817816 - DNA, 25 bp, Homo sapien
cagtgcccactcgcagttcgtgttg

SEQ ID NO: 3817817 - DNA, 25 bp, Homo sapien
agtaaaagttgacagtgagaagcct

SEQ ID NO: 3817818 - DNA, 25 bp, Homo sapien
tgctttcccgtacaaagtacaaatg

SEQ ID NO: 3817819 - DNA, 25 bp, Homo sapien
agtacaaatgtcttaccagagggtg

SEQ ID NO: 3817820 - DNA, 25 bp, Homo sapien
ctacactgctttcccgtacaaagta

SEQ ID NO: 3817821 - DNA, 25 bp, Homo sapien
tacaaagtacaaatgtcttaccaga

SEQ ID NO: 3817822 - DNA, 25 bp, Homo sapien
ctagtagataggagggctgccatat

SEQ ID NO: 3817823 - DNA, 25 bp, Homo sapien
tatttaagaccttccagcaccatac

SEQ ID NO: 3817824 - DNA, 25 bp, Homo sapien
gggctgccatatttaagaccttcca

SEQ ID NO: 3817825 - DNA, 25 bp, Homo sapien
gccatatttaagaccttccagcacc

SEQ ID NO: 3817826 - DNA, 25 bp, Homo sapien
cttgagtttgggtgttttcacccag

SEQ ID NO: 3817827 - DNA, 25 bp, Homo sapien
ttattcactttcgtctcctaggagg

SEQ ID NO: 3817828 - DNA, 25 bp, Homo sapien
actttcgtctcctaggaggaatggg

SEQ ID NO: 3817829 - DNA, 25 bp, Homo sapien
gagagcagcgggcatccctgcgaca

SEQ ID NO: 3817830 - DNA, 25 bp, Homo sapien
gggcatccctgcgacatcagaggat

SEQ ID NO: 3817831 - DNA, 25 bp, Homo sapien
caggccgggcagaaggtgacagcag

SEQ ID NO: 3817832 - DNA, 25 bp, Homo sapien
aggccgggcagaaggtgacagcagc

SEQ ID NO: 3817833 - DNA, 25 bp, Homo sapien
ggccgggcagaaggtgacagcagcc

SEQ ID NO: 3817834 - DNA, 25 bp, Homo sapien
ttcaattgagttctcaatgccaaac

SEQ ID NO: 3817835 - DNA, 25 bp, Homo sapien
tggtgcaatccatgtcactgtcgta

SEQ ID NO: 3817836 - DNA, 25 bp, Homo sapien
tccagtactcctcaggttgccaaat

SEQ ID NO: 3817837 - DNA, 25 bp, Homo sapien
tatctggccatccagtactcctcag

SEQ ID NO: 3817838 - DNA, 25 bp, Homo sapien
gaagaataaaacaccggcatagcca

SEQ ID NO: 3817839 - DNA, 25 bp, Homo sapien
aagaataaaacaccggcatagccaa

SEQ ID NO: 3817840 - DNA, 25 bp, Homo sapien
aataaaacaccggcatagccaaagc

SEQ ID NO: 3817841 - DNA, 25 bp, Homo sapien
gaataaaacaccggcatagccaaag

SEQ ID NO: 3817842 - DNA, 25 bp, Homo sapien
ggccttggaactgatacaagtcgca

SEQ ID NO: 3817843 - DNA, 25 bp, Homo sapien
tggccttggaactgatacaagtcgc

SEQ ID NO: 3817844 - DNA, 25 bp, Homo sapien
gccttggaactgatacaagtcgcac

SEQ ID NO: 3817845 - DNA, 25 bp, Homo sapien
cagctgttaacacccacacagttat

SEQ ID NO: 3817846 - DNA, 25 bp, Homo sapien
gctgttaacacccacacagttatct

SEQ ID NO: 3817847 - DNA, 25 bp, Homo sapien
gcatgcagtcttatgagctcagctg

SEQ ID NO: 3817848 - DNA, 25 bp, Homo sapien
gtcttatgagctcagctgttaacac

SEQ ID NO: 3817849 - DNA, 25 bp, Homo sapien
gacatctgggtctgatgaattgggt

SEQ ID NO: 3817850 - DNA, 25 bp, Homo sapien
tggggtccaagttgcattgtatgtt

SEQ ID NO: 3817851 - DNA, 25 bp, Homo sapien
tcaatgacccaagtacagatggaaa

SEQ ID NO: 3817852 - DNA, 25 bp, Homo sapien
gcattgtatgttccaccacaaggca

SEQ ID NO: 3817853 - DNA, 25 bp, Homo sapien
gttggcactttcactaaccccatgg

SEQ ID NO: 3817854 - DNA, 25 bp, Homo sapien
cagccaagttggcactttcactaac

SEQ ID NO: 3817855 - DNA, 25 bp, Homo sapien
caagttggcactttcactaacccca

SEQ ID NO: 3817856 - DNA, 25 bp, Homo sapien
ggcactttcactaaccccatggtat

SEQ ID NO: 3817857 - DNA, 25 bp, Homo sapien
agtggtgaccccactgctgaacccg

SEQ ID NO: 3817858 - DNA, 25 bp, Homo sapien
tcatatatgtgaagccgaagcaaat

SEQ ID NO: 3817859 - DNA, 25 bp, Homo sapien
actgctgaacccgatcatttacact

SEQ ID NO: 3817860 - DNA, 25 bp, Homo sapien
agaaaggctgctcttgtgaacacag

SEQ ID NO: 3817861 - DNA, 25 bp, Homo sapien
gctacagtcagctacaattcatcaa

SEQ ID NO: 3817862 - DNA, 25 bp, Homo sapien
gaatctacgtgccaaagctacagtc

SEQ ID NO: 3817863 - DNA, 25 bp, Homo sapien
tgagaccactgagggtttcaacatg

SEQ ID NO: 3817864 - DNA, 25 bp, Homo sapien
gagtcaatgagcttctgatgaatga

SEQ ID NO: 3817865 - DNA, 25 bp, Homo sapien
tagaaggtttcctagaggccagtgg

SEQ ID NO: 3817866 - DNA, 25 bp, Homo sapien
tcgctccaggccaattaggtaggtc

SEQ ID NO: 3817867 - DNA, 25 bp, Homo sapien
gtccaagtggctccagaggaaacag

SEQ ID NO: 3817868 - DNA, 25 bp, Homo sapien
tggtcaccttaaaacaaagcttcag

SEQ ID NO: 3817869 - DNA, 25 bp, Homo sapien
tatgccgtagaaagcatccgccagg

SEQ ID NO: 3817870 - DNA, 25 bp, Homo sapien
cacgtgaggaaatagagctgggcca

SEQ ID NO: 3817871 - DNA, 25 bp, Homo sapien
cagagaccgggcttatgtaggcgta

SEQ ID NO: 3817872 - DNA, 25 bp, Homo sapien
tgtaatacatgcacaccacggtgag

SEQ ID NO: 3817873 - DNA, 25 bp, Homo sapien
gctgggacgggtttctgggactatc

SEQ ID NO: 3817874 - DNA, 25 bp, Homo sapien
tcactgtaaacacagcggcatagag

SEQ ID NO: 3817875 - DNA, 25 bp, Homo sapien
taaacacagcggcatagagctctct

SEQ ID NO: 3817876 - DNA, 25 bp, Homo sapien
gtaaacacagcggcatagagctctc

SEQ ID NO: 3817877 - DNA, 25 bp, Homo sapien
actgtaaacacagcggcatagagct

SEQ ID NO: 3817878 - DNA, 25 bp, Homo sapien
catggaaaggggcaacccataccag

SEQ ID NO: 3817879 - DNA, 25 bp, Homo sapien
gggcaacccataccagccaccacaa

SEQ ID NO: 3817880 - DNA, 25 bp, Homo sapien
ggaaaggggcaacccataccagcca

SEQ ID NO: 3817881 - DNA, 25 bp, Homo sapien
acccataccagccaccacaaaaaca

SEQ ID NO: 3817882 - DNA, 25 bp, Homo sapien
acatgcacccagtacaggggcaccc

SEQ ID NO: 3817883 - DNA, 25 bp, Homo sapien
agctaactatactaaacatacatgc

SEQ ID NO: 3817884 - DNA, 25 bp, Homo sapien
tctacaaagagaattagacacccac

SEQ ID NO: 3817885 - DNA, 25 bp, Homo sapien
agatctacaaagagaattagacacc

SEQ ID NO: 3817886 - DNA, 25 bp, Homo sapien
ttcccaggtggattcatacgacgtg

SEQ ID NO: 3817887 - DNA, 25 bp, Homo sapien
caagttgtacgtggcatgggagccc

SEQ ID NO: 3817888 - DNA, 25 bp, Homo sapien
tactggctgaatgacgactggtacc

SEQ ID NO: 3817889 - DNA, 25 bp, Homo sapien
tcatcgtgagatgtgataaggccaa

SEQ ID NO: 3817890 - DNA, 25 bp, Homo sapien
agggtgctgtagcactgagcaccta

SEQ ID NO: 3817891 - DNA, 25 bp, Homo sapien
cacctactgtatgcagcccatcaca

SEQ ID NO: 3817892 - DNA, 25 bp, Homo sapien
gaagatgatgctggtattattcgac

SEQ ID NO: 3817893 - DNA, 25 bp, Homo sapien
tggcaacttccagcagtacaccctc

SEQ ID NO: 3817894 - DNA, 25 bp, Homo sapien
ccacggccaggagaatggaatacac

SEQ ID NO: 3817895 - DNA, 25 bp, Homo sapien
gacagggactctagacaggcaaaaa

SEQ ID NO: 3817896 - DNA, 25 bp, Homo sapien
aatgctaactcatttgggaccaggg

SEQ ID NO: 3817897 - DNA, 25 bp, Homo sapien
tgtcagaactgaaaggtaggcccgc

SEQ ID NO: 3817898 - DNA, 25 bp, Homo sapien
agagtagatactgacccctccgcag

SEQ ID NO: 3817899 - DNA, 25 bp, Homo sapien
aggcttcagaaggagcggccatgcc

SEQ ID NO: 3817900 - DNA, 25 bp, Homo sapien
cgggcgcggtcggtggagctgcagg

SEQ ID NO: 3817901 - DNA, 25 bp, Homo sapien
ttctgtcctgcgtgccgccgggcag

SEQ ID NO: 3817902 - DNA, 25 bp, Homo sapien
ttaatgcacttccaagtaaaatttc

SEQ ID NO: 3817903 - DNA, 25 bp, Homo sapien
gaaatctagcatagtcaaaaatttt

SEQ ID NO: 3817904 - DNA, 25 bp, Homo sapien
aaaccacatagagaggcagggcaac

SEQ ID NO: 3817905 - DNA, 25 bp, Homo sapien
taacagtgatttgatattggggagg

SEQ ID NO: 3817906 - DNA, 25 bp, Homo sapien
cagttccaggaaaacgaggtgaagc

SEQ ID NO: 3817907 - DNA, 25 bp, Homo sapien
ggtgtctgagttgttcccggccaat

SEQ ID NO: 3817908 - DNA, 25 bp, Homo sapien
gcacatgtgttcagtatgaccgcac

SEQ ID NO: 3817909 - DNA, 25 bp, Homo sapien
ggttaagcggttcctcagcctcagg

SEQ ID NO: 3817910 - DNA, 25 bp, Homo sapien
ccccagcgcccctgatgggaggtga

SEQ ID NO: 3817911 - DNA, 25 bp, Homo sapien
cccgcagacatctgtgtgagaatgc

SEQ ID NO: 3817912 - DNA, 25 bp, Homo sapien
taaaatgatatctagctctgccccg

SEQ ID NO: 3817913 - DNA, 25 bp, Homo sapien
gaatattgatactgaattgccctcc

SEQ ID NO: 3817914 - DNA, 25 bp, Homo sapien
gaacctcgaggccattgtcagcgtg

SEQ ID NO: 3817915 - DNA, 25 bp, Homo sapien
cctgtgaaggaagccatggcccgat

SEQ ID NO: 3817916 - DNA, 25 bp, Homo sapien
gaccggattccgaacagtgtggcca

SEQ ID NO: 3817917 - DNA, 25 bp, Homo sapien
tattactacttgtccccagaccgga

SEQ ID NO: 3817918 - DNA, 25 bp, Homo sapien
ggagcaggaccttgtaacagagcct

SEQ ID NO: 3817919 - DNA, 25 bp, Homo sapien
ggctccgggagcaggaccttgtaac

SEQ ID NO: 3817920 - DNA, 25 bp, Homo sapien
tccgggagcaggaccttgtaacaga

SEQ ID NO: 3817921 - DNA, 25 bp, Homo sapien
caggaccttgtaacagagcctctgc

SEQ ID NO: 3817922 - DNA, 25 bp, Homo sapien
agaagctctccttagtgcttcatca

SEQ ID NO: 3817923 - DNA, 25 bp, Homo sapien
ttacagaagctctccttagtgcttc

SEQ ID NO: 3817924 - DNA, 25 bp, Homo sapien
cttacagaagctctccttagtgctt

SEQ ID NO: 3817925 - DNA, 25 bp, Homo sapien
ttagacatcccagtgtatagcacaa

SEQ ID NO: 3817926 - DNA, 25 bp, Homo sapien
tattgctgcaattagacatcccagt

SEQ ID NO: 3817927 - DNA, 25 bp, Homo sapien
ctataaacattgcatctaactgtgc

SEQ ID NO: 3817928 - DNA, 25 bp, Homo sapien
cacacatgccagtgtaaatttggtt

SEQ ID NO: 3817929 - DNA, 25 bp, Homo sapien
gatcaactgcacaacttcaacaatt

SEQ ID NO: 3817930 - DNA, 25 bp, Homo sapien
gtgaagtgccttttagaaactacac

SEQ ID NO: 3817931 - DNA, 25 bp, Homo sapien
tctttccttgggctagagacagaag

SEQ ID NO: 3817932 - DNA, 25 bp, Homo sapien
aacagaaagtacttcaattgtgtat

SEQ ID NO: 3817933 - DNA, 25 bp, Homo sapien
cagaagctgcatgtttcaaaccaga

SEQ ID NO: 3817934 - DNA, 25 bp, Homo sapien
cagattcaaaagggaaagcacttca

SEQ ID NO: 3817935 - DNA, 25 bp, Homo sapien
taggcctacaagactgaagagtgga

SEQ ID NO: 3817936 - DNA, 25 bp, Homo sapien
atcgtgcagacatcacccgaggctc

SEQ ID NO: 3817937 - DNA, 25 bp, Homo sapien
agaggcagccccagatcgtgcagac

SEQ ID NO: 3817938 - DNA, 25 bp, Homo sapien
aaactaggcctacaagactgaagag

SEQ ID NO: 3817939 - DNA, 25 bp, Homo sapien
caaagaccaaattgctgaggccaga

SEQ ID NO: 3817940 - DNA, 25 bp, Homo sapien
caaggctacaggaacattggcagag

SEQ ID NO: 3817941 - DNA, 25 bp, Homo sapien
gccacaccagatgggagtaccacat

SEQ ID NO: 3817942 - DNA, 25 bp, Homo sapien
cacccaaaagaaccgagagagcaag

SEQ ID NO: 3817943 - DNA, 25 bp, Homo sapien
tcatctactgctgggtggcaggaac

SEQ ID NO: 3817944 - DNA, 25 bp, Homo sapien
tacagggctcagttatcaaggcacc

SEQ ID NO: 3817945 - DNA, 25 bp, Homo sapien
cagctacattgggtgggatgcccag

SEQ ID NO: 3817946 - DNA, 25 bp, Homo sapien
cagttcctaagggacattggcaggg

SEQ ID NO: 3817947 - DNA, 25 bp, Homo sapien
attcagctcccctgagtggacagtc

SEQ ID NO: 3817948 - DNA, 25 bp, Homo sapien
gctcccctgagtggacagtctgtgg

SEQ ID NO: 3817949 - DNA, 25 bp, Homo sapien
aaggggtatgggtaattgcacttcg

SEQ ID NO: 3817950 - DNA, 25 bp, Homo sapien
gcacttcggggcacagtgaacacag

SEQ ID NO: 3817951 - DNA, 25 bp, Homo sapien
cagactttttagagggacaaggcca

SEQ ID NO: 3817952 - DNA, 25 bp, Homo sapien
tatgggccaggtctacaaagtaaca

SEQ ID NO: 3817953 - DNA, 25 bp, Homo sapien
cctggaaaggaagcatctgcgctac

SEQ ID NO: 3817954 - DNA, 25 bp, Homo sapien
cccttagcaggatgaacgaaacgcc

SEQ ID NO: 3817955 - DNA, 25 bp, Homo sapien
ctgtccagtctatgctattaaagga

SEQ ID NO: 3817956 - DNA, 25 bp, Homo sapien
atacaattggcagtaaacaatttcc

SEQ ID NO: 3817957 - DNA, 25 bp, Homo sapien
agctcttcatggatgtccaggaaaa

SEQ ID NO: 3817958 - DNA, 25 bp, Homo sapien
ttaaaggacataagaaaggtataca

SEQ ID NO: 3817959 - DNA, 25 bp, Homo sapien
agacgtgaatgatttctgctccagt

SEQ ID NO: 3817960 - DNA, 25 bp, Homo sapien
gaatgatttctgctccagtgtcttc

SEQ ID NO: 3817961 - DNA, 25 bp, Homo sapien
tcagacgtgaatgatttctgctcca

SEQ ID NO: 3817962 - DNA, 25 bp, Homo sapien
atgatttctgctccagtgtcttcag

SEQ ID NO: 3817963 - DNA, 25 bp, Homo sapien
ggctctgttagtggagatttttcaa

SEQ ID NO: 3817964 - DNA, 25 bp, Homo sapien
gtttgtgtcggaatgacagattcca

SEQ ID NO: 3817965 - DNA, 25 bp, Homo sapien
agttgggctctgttagtggagattt

SEQ ID NO: 3817966 - DNA, 25 bp, Homo sapien
ctgtgcaacaagaagagtttgtgtc

SEQ ID NO: 3817967 - DNA, 25 bp, Homo sapien
tctattataggccttgagtctcttc

SEQ ID NO: 3817968 - DNA, 25 bp, Homo sapien
tataggccttgagtctcttccacaa

SEQ ID NO: 3817969 - DNA, 25 bp, Homo sapien
ttataggccttgagtctcttccaca

SEQ ID NO: 3817970 - DNA, 25 bp, Homo sapien
tattataggccttgagtctcttcca

SEQ ID NO: 3817971 - DNA, 25 bp, Homo sapien
catacataaaaagaagtcctccggt

SEQ ID NO: 3817972 - DNA, 25 bp, Homo sapien
cggtgaagccgatggccacaaccac

SEQ ID NO: 3817973 - DNA, 25 bp, Homo sapien
cacaaccaccaatttagtccaaaag

SEQ ID NO: 3817974 - DNA, 25 bp, Homo sapien
agaagtcctccggtgaagccgatgg

SEQ ID NO: 3817975 - DNA, 25 bp, Homo sapien
tcttcctgcgctcgctggacgtcat

SEQ ID NO: 3817976 - DNA, 25 bp, Homo sapien
tacaaggaccagaccacacatgtga

SEQ ID NO: 3817977 - DNA, 25 bp, Homo sapien
gatctcctcagcagtacggtcaatg

SEQ ID NO: 3817978 - DNA, 25 bp, Homo sapien
ggcaatgacgtggaatgtcactgag

SEQ ID NO: 3817979 - DNA, 25 bp, Homo sapien
gaaatcgacgctaagagttcctggt

SEQ ID NO: 3817980 - DNA, 25 bp, Homo sapien
aaacagtatgttggcccaggaccca

SEQ ID NO: 3817981 - DNA, 25 bp, Homo sapien
tgatgccacaacacactagcagatg

SEQ ID NO: 3817982 - DNA, 25 bp, Homo sapien
tggcagcaacagctcgaaatcgacg

SEQ ID NO: 3817983 - DNA, 25 bp, Homo sapien
tcggagctcttgatccactgctgca

SEQ ID NO: 3817984 - DNA, 25 bp, Homo sapien
ttgcagagctcgcagcagcgcgtgt

SEQ ID NO: 3817985 - DNA, 25 bp, Homo sapien
agcgcgtgtcggagctcttgatcca

SEQ ID NO: 3817986 - DNA, 25 bp, Homo sapien
tcgcagcagcgcgtgtcggagctct

SEQ ID NO: 3817987 - DNA, 25 bp, Homo sapien
taaaaatgtctagcttaccgcacca

SEQ ID NO: 3817988 - DNA, 25 bp, Homo sapien
taccgcaccaacatggaaagtctgg

SEQ ID NO: 3817989 - DNA, 25 bp, Homo sapien
cattacagaagtgactatgggcaca

SEQ ID NO: 3817990 - DNA, 25 bp, Homo sapien
gtcgtctctcagcaagtaaacaaag

SEQ ID NO: 3817991 - DNA, 25 bp, Homo sapien
ggagaaggacaatccaggtcgctgt

SEQ ID NO: 3817992 - DNA, 25 bp, Homo sapien
tcaagccgtgcgagagtgagaacag

SEQ ID NO: 3817993 - DNA, 25 bp, Homo sapien
caggtactggagcagttgccggctt

SEQ ID NO: 3817994 - DNA, 25 bp, Homo sapien
catcccctgacgtggacacgggaga

SEQ ID NO: 3817995 - DNA, 25 bp, Homo sapien
ctgagacacgtatcttgagggagta

SEQ ID NO: 3817996 - DNA, 25 bp, Homo sapien
ttgagcgaccggcagaaaggcatga

SEQ ID NO: 3817997 - DNA, 25 bp, Homo sapien
caagaggtttgtggttcagggttct

SEQ ID NO: 3817998 - DNA, 25 bp, Homo sapien
tgaaacctgttagttctgagacacg

SEQ ID NO: 3817999 - DNA, 25 bp, Homo sapien
ataggcaaaactttctgaagtatcc

SEQ ID NO: 3818000 - DNA, 25 bp, Homo sapien
cataggcaaaactttctgaagtatc

SEQ ID NO: 3818001 - DNA, 25 bp, Homo sapien
cacataggcaaaactttctgaagta

SEQ ID NO: 3818002 - DNA, 25 bp, Homo sapien
tccacataggcaaaactttctgaag

SEQ ID NO: 3818003 - DNA, 25 bp, Homo sapien
tgagggaccttgagaactttagtgt

SEQ ID NO: 3818004 - DNA, 25 bp, Homo sapien
tcacccacatcattgagggaccttg

SEQ ID NO: 3818005 - DNA, 25 bp, Homo sapien
catcattgagggaccttgagaactt

SEQ ID NO: 3818006 - DNA, 25 bp, Homo sapien
ggtattcttagcaggcttcaaggcc

SEQ ID NO: 3818007 - DNA, 25 bp, Homo sapien
tacagataactgtcacagtgagccc

SEQ ID NO: 3818008 - DNA, 25 bp, Homo sapien
taactgtcacagtgagcccttgtgt

SEQ ID NO: 3818009 - DNA, 25 bp, Homo sapien
taatgtgtccttacagataactgtc

SEQ ID NO: 3818010 - DNA, 25 bp, Homo sapien
cagtgagcccttgtgtcagagaact

SEQ ID NO: 3818011 - DNA, 25 bp, Homo sapien
gaggagctttcgagacaacagcaga

SEQ ID NO: 3818012 - DNA, 25 bp, Homo sapien
tgaggagctttcgagacaacagcag

SEQ ID NO: 3818013 - DNA, 25 bp, Homo sapien
cagtgaggagctttcgagacaacag

SEQ ID NO: 3818014 - DNA, 25 bp, Homo sapien
gtgaggagctttcgagacaacagca

SEQ ID NO: 3818015 - DNA, 25 bp, Homo sapien
acactcagaaaacactgcactggaa

SEQ ID NO: 3818016 - DNA, 25 bp, Homo sapien
ggtgacaacactcagaaaacactgc

SEQ ID NO: 3818017 - DNA, 25 bp, Homo sapien
gacaacactcagaaaacactgcact

SEQ ID NO: 3818018 - DNA, 25 bp, Homo sapien
ctgtggtgacaacactcagaaaaca

SEQ ID NO: 3818019 - DNA, 25 bp, Homo sapien
ttaaaagagaatagacatcatagtg

SEQ ID NO: 3818020 - DNA, 25 bp, Homo sapien
aaagagaatagacatcatagtgaag

SEQ ID NO: 3818021 - DNA, 25 bp, Homo sapien
tttaaaagagaatagacatcatagt

SEQ ID NO: 3818022 - DNA, 25 bp, Homo sapien
taaaagagaatagacatcatagtga

SEQ ID NO: 3818023 - DNA, 25 bp, Homo sapien
tgcgagagaaggaggacaccggagc

SEQ ID NO: 3818024 - DNA, 25 bp, Homo sapien
gctggatggcgtgatagaagtgcga

SEQ ID NO: 3818025 - DNA, 25 bp, Homo sapien
gcgtgatagaagtgcgagagaagga

SEQ ID NO: 3818026 - DNA, 25 bp, Homo sapien
gatagaagtgcgagagaaggaggac

SEQ ID NO: 3818027 - DNA, 25 bp, Homo sapien
aatacccagcaatatccacatgctt

SEQ ID NO: 3818028 - DNA, 25 bp, Homo sapien
agaaatacccagcaatatccacatg

SEQ ID NO: 3818029 - DNA, 25 bp, Homo sapien
tacccagcaatatccacatgcttgc

SEQ ID NO: 3818030 - DNA, 25 bp, Homo sapien
gaagaaatacccagcaatatccaca

SEQ ID NO: 3818031 - DNA, 25 bp, Homo sapien
cctctgatacgtgacattctgctgt

SEQ ID NO: 3818032 - DNA, 25 bp, Homo sapien
aggaatgtccctctgatacgtgaca

SEQ ID NO: 3818033 - DNA, 25 bp, Homo sapien
ccaggtctgccctcgcgtaataaaa

SEQ ID NO: 3818034 - DNA, 25 bp, Homo sapien
cgcgtaataaaagtgggtcagcaag

SEQ ID NO: 3818035 - DNA, 25 bp, Homo sapien
catacatgtgttactgagcgttttt

SEQ ID NO: 3818036 - DNA, 25 bp, Homo sapien
cagaactgcccttggctactagggc

SEQ ID NO: 3818037 - DNA, 25 bp, Homo sapien
aacccaagccaggacaatagccttt

SEQ ID NO: 3818038 - DNA, 25 bp, Homo sapien
aagctcaaaatacccacaacccaag

SEQ ID NO: 3818039 - DNA, 25 bp, Homo sapien
tctagaaccttttgttcaaggaatg

SEQ ID NO: 3818040 - DNA, 25 bp, Homo sapien
aagcctactctagactgagcagctg

SEQ ID NO: 3818041 - DNA, 25 bp, Homo sapien
aaactcacgactgctccggccgact

SEQ ID NO: 3818042 - DNA, 25 bp, Homo sapien
aatgcagtcttgcaagcctactcta

SEQ ID NO: 3818043 - DNA, 25 bp, Homo sapien
atgttgcttgaatgactcatgaaat

SEQ ID NO: 3818044 - DNA, 25 bp, Homo sapien
aatgttgcttgaatgactcatgaaa

SEQ ID NO: 3818045 - DNA, 25 bp, Homo sapien
tggataccaccaccttgtgacccca

SEQ ID NO: 3818046 - DNA, 25 bp, Homo sapien
caggagagatggaagcctcgctgca

SEQ ID NO: 3818047 - DNA, 25 bp, Homo sapien
accccaggagagatggaagcctcgc

SEQ ID NO: 3818048 - DNA, 25 bp, Homo sapien
ccccaggagagatggaagcctcgct

SEQ ID NO: 3818049 - DNA, 25 bp, Homo sapien
cactgactagtctcggcgccattgt

SEQ ID NO: 3818050 - DNA, 25 bp, Homo sapien
ttgcctcttaatatccagacccctg

SEQ ID NO: 3818051 - DNA, 25 bp, Homo sapien
atctcccattccctaagtggccttt

SEQ ID NO: 3818052 - DNA, 25 bp, Homo sapien
gcgccattgtgggaaatcatttggc

SEQ ID NO: 3818053 - DNA, 25 bp, Homo sapien
agagagacactcaagaagcttccca

SEQ ID NO: 3818054 - DNA, 25 bp, Homo sapien
gaacgagaaagagggttgtctcagt

SEQ ID NO: 3818055 - DNA, 25 bp, Homo sapien
tctcagtctgttcgcattactataa

SEQ ID NO: 3818056 - DNA, 25 bp, Homo sapien
gctggttgttccagaacgagaaaga

SEQ ID NO: 3818057 - DNA, 25 bp, Homo sapien
cttttgggactaaaactgtctctga

SEQ ID NO: 3818058 - DNA, 25 bp, Homo sapien
tctgagatttataagagggcccatg

SEQ ID NO: 3818059 - DNA, 25 bp, Homo sapien
aggacccactccagacttactagat

SEQ ID NO: 3818060 - DNA, 25 bp, Homo sapien
taatatacagaagcttaggacccac

SEQ ID NO: 3818061 - DNA, 25 bp, Homo sapien
caacaagaatgcattggtgtgcgct

SEQ ID NO: 3818062 - DNA, 25 bp, Homo sapien
agtgcagcgcttccccgcaacatgg

SEQ ID NO: 3818063 - DNA, 25 bp, Homo sapien
attttccaacaagaatgcattggtg

SEQ ID NO: 3818064 - DNA, 25 bp, Homo sapien
cattggtgtgcgctcagtgcagcgc

SEQ ID NO: 3818065 - DNA, 25 bp, Homo sapien
gacatgacccatatcactgaaactg

SEQ ID NO: 3818066 - DNA, 25 bp, Homo sapien
aaaagtcattaaccctctgtagaag

SEQ ID NO: 3818067 - DNA, 25 bp, Homo sapien
gattagactaagcaaacaggtggat

SEQ ID NO: 3818068 - DNA, 25 bp, Homo sapien
gcttcagcgagggtgtgttaacaga

SEQ ID NO: 3818069 - DNA, 25 bp, Homo sapien
gactctagcagagatggcatcctgg

SEQ ID NO: 3818070 - DNA, 25 bp, Homo sapien
cagagatggcatcctgggatggaat

SEQ ID NO: 3818071 - DNA, 25 bp, Homo sapien
ttctgtagactctagcagagatggc

SEQ ID NO: 3818072 - DNA, 25 bp, Homo sapien
aatggcagagatctgatgcagtggc

SEQ ID NO: 3818073 - DNA, 25 bp, Homo sapien
tcacagaagagagtctccactggta

SEQ ID NO: 3818074 - DNA, 25 bp, Homo sapien
aagagagtctccactggtagagtca

SEQ ID NO: 3818075 - DNA, 25 bp, Homo sapien
ggtagagtcattttgggccatggat

SEQ ID NO: 3818076 - DNA, 25 bp, Homo sapien
caacctcttatctggtcgtcttctt

SEQ ID NO: 3818077 - DNA, 25 bp, Homo sapien
ggagctgccttatactccctgggag

SEQ ID NO: 3818078 - DNA, 25 bp, Homo sapien
tcatcactaatgcactaacgtcctc

SEQ ID NO: 3818079 - DNA, 25 bp, Homo sapien
tggtcaaactgacgatatccacagc

SEQ ID NO: 3818080 - DNA, 25 bp, Homo sapien
tccctgggagatcacaatagtcagt

SEQ ID NO: 3818081 - DNA, 25 bp, Homo sapien
tattgtgtgatttgttctaagaaga

SEQ ID NO: 3818082 - DNA, 25 bp, Homo sapien
agtaacacttcaaggaatcagcagc

SEQ ID NO: 3818083 - DNA, 25 bp, Homo sapien
cagcgtgggtaacaaggaacatcct

SEQ ID NO: 3818084 - DNA, 25 bp, Homo sapien
aagcaagggatgatagtggtattgt

SEQ ID NO: 3818085 - DNA, 25 bp, Homo sapien
tatgcttttcaccttacggctctgg

SEQ ID NO: 3818086 - DNA, 25 bp, Homo sapien
cagaacacattgaggcctaaaggga

SEQ ID NO: 3818087 - DNA, 25 bp, Homo sapien
taactttagccctgtcatcatctgg

SEQ ID NO: 3818088 - DNA, 25 bp, Homo sapien
tactgacagtgagaccggagagcat

SEQ ID NO: 3818089 - DNA, 25 bp, Homo sapien
cattatagagacctttcatttattt

SEQ ID NO: 3818090 - DNA, 25 bp, Homo sapien
tccaatctggataccctttatatcc

SEQ ID NO: 3818091 - DNA, 25 bp, Homo sapien
atacactaacactaagccaggtgca

SEQ ID NO: 3818092 - DNA, 25 bp, Homo sapien
ccatctgtaaacaacgataatttga

SEQ ID NO: 3818093 - DNA, 25 bp, Homo sapien
tagtattgtgcgctaggaccaccgg

SEQ ID NO: 3818094 - DNA, 25 bp, Homo sapien
tgtgcgctaggaccaccggtggtat

SEQ ID NO: 3818095 - DNA, 25 bp, Homo sapien
ctgattagtattgtgcgctaggacc

SEQ ID NO: 3818096 - DNA, 25 bp, Homo sapien
gtattgtgcgctaggaccaccggtg

SEQ ID NO: 3818097 - DNA, 25 bp, Homo sapien
gggtctcaagatttcacacaagagc

SEQ ID NO: 3818098 - DNA, 25 bp, Homo sapien
ttcggttggcctcaaaagtctccca

SEQ ID NO: 3818099 - DNA, 25 bp, Homo sapien
ccattcccattctgtatcggagcaa

SEQ ID NO: 3818100 - DNA, 25 bp, Homo sapien
gatatgtcctaacccattcggttgg

SEQ ID NO: 3818101 - DNA, 25 bp, Homo sapien
tctggcaccccgaatgtacgcaggt

SEQ ID NO: 3818102 - DNA, 25 bp, Homo sapien
aggtctctcgagatcacacgtcaga

SEQ ID NO: 3818103 - DNA, 25 bp, Homo sapien
gctgaccgtttctgcgattcctggt

SEQ ID NO: 3818104 - DNA, 25 bp, Homo sapien
cacgtcagacgtggaaggtcctcac

SEQ ID NO: 3818105 - DNA, 25 bp, Homo sapien
tattagtgtcagattttaagtcaac

SEQ ID NO: 3818106 - DNA, 25 bp, Homo sapien
ttattagtgtcagattttaagtcaa

SEQ ID NO: 3818107 - DNA, 25 bp, Homo sapien
tttattagtgtcagattttaagtca

SEQ ID NO: 3818108 - DNA, 25 bp, Homo sapien
cactaaaaagactttgtacattctt

SEQ ID NO: 3818109 - DNA, 25 bp, Homo sapien
aaaggctataatttaacagaacata

SEQ ID NO: 3818110 - DNA, 25 bp, Homo sapien
atggagtcttcgcacgatctcagct

SEQ ID NO: 3818111 - DNA, 25 bp, Homo sapien
tactacttaaagtggatagatcact

SEQ ID NO: 3818112 - DNA, 25 bp, Homo sapien
aattgtctccacaagttacacgtac

SEQ ID NO: 3818113 - DNA, 25 bp, Homo sapien
tcagcagtctaactctgtaaggcag

SEQ ID NO: 3818114 - DNA, 25 bp, Homo sapien
cacgtgtcttcttgatacaggagga

SEQ ID NO: 3818115 - DNA, 25 bp, Homo sapien
tgtttaaccagtacctacaggcaat

SEQ ID NO: 3818116 - DNA, 25 bp, Homo sapien
gcatagcacactacatcaagtaggc

SEQ ID NO: 3818117 - DNA, 25 bp, Homo sapien
tgtccgaatactaatctgaatgtgg

SEQ ID NO: 3818118 - DNA, 25 bp, Homo sapien
gccagtaaactttcacacgtgggat

SEQ ID NO: 3818119 - DNA, 25 bp, Homo sapien
cattataatacgaatcccgggcaga

SEQ ID NO: 3818120 - DNA, 25 bp, Homo sapien
acccatatggtcaatctgagtagag

SEQ ID NO: 3818121 - DNA, 25 bp, Homo sapien
cactcttgtaatcataggtacagcc

SEQ ID NO: 3818122 - DNA, 25 bp, Homo sapien
ccatgagtttctgcataacgatgag

SEQ ID NO: 3818123 - DNA, 25 bp, Homo sapien
gaagctttggtgcattaaccacagg

SEQ ID NO: 3818124 - DNA, 25 bp, Homo sapien
cacaggatttgcctcgtgcaagtat

SEQ ID NO: 3818125 - DNA, 25 bp, Homo sapien
cattcgaaccgaatacactctaaaa

SEQ ID NO: 3818126 - DNA, 25 bp, Homo sapien
gttgttttcattcgaaccgaataca

SEQ ID NO: 3818127 - DNA, 25 bp, Homo sapien
cctaactatgccatgaaaggatttt

SEQ ID NO: 3818128 - DNA, 25 bp, Homo sapien
ctctaaaaagcagggattgggatgg

SEQ ID NO: 3818129 - DNA, 25 bp, Homo sapien
atccaagcaggttcatcataagacg

SEQ ID NO: 3818130 - DNA, 25 bp, Homo sapien
tattttgcataatccccaagctggg

SEQ ID NO: 3818131 - DNA, 25 bp, Homo sapien
gggttcttccaaggtgccactcaaa

SEQ ID NO: 3818132 - DNA, 25 bp, Homo sapien
tggaaacccatgagctatctacttg

SEQ ID NO: 3818133 - DNA, 25 bp, Homo sapien
tactagccagtcctgttttctttcc

SEQ ID NO: 3818134 - DNA, 25 bp, Homo sapien
gtagctactagccagtcctgttttc

SEQ ID NO: 3818135 - DNA, 25 bp, Homo sapien
tcgtagctactagccagtcctgttt

SEQ ID NO: 3818136 - DNA, 25 bp, Homo sapien
gcattcgtagctactagccagtcct

SEQ ID NO: 3818137 - DNA, 25 bp, Homo sapien
aggtgggaggtgatgagtagtacat

SEQ ID NO: 3818138 - DNA, 25 bp, Homo sapien
gggaggtgatgagtagtacattctc

SEQ ID NO: 3818139 - DNA, 25 bp, Homo sapien
gtgggaggtgatgagtagtacattc

SEQ ID NO: 3818140 - DNA, 25 bp, Homo sapien
tgggaggtgatgagtagtacattct

SEQ ID NO: 3818141 - DNA, 25 bp, Homo sapien
attgagagactcctaatggtgcctg

SEQ ID NO: 3818142 - DNA, 25 bp, Homo sapien
tcaagtgcacttagagataccaaga

SEQ ID NO: 3818143 - DNA, 25 bp, Homo sapien
cagtactctatgagagcagcctcca

SEQ ID NO: 3818144 - DNA, 25 bp, Homo sapien
ttcagcctaatcaggtaacagggcg

SEQ ID NO: 3818145 - DNA, 25 bp, Homo sapien
ccgaaggatgtaccaagtccttcca

SEQ ID NO: 3818146 - DNA, 25 bp, Homo sapien
ctgcaatctcttctaaagtaaactc

SEQ ID NO: 3818147 - DNA, 25 bp, Homo sapien
aagtccttccacatctgcaatctct

SEQ ID NO: 3818148 - DNA, 25 bp, Homo sapien
gatgtaccaagtccttccacatctg

SEQ ID NO: 3818149 - DNA, 25 bp, Homo sapien
cttgtcaacccagtagaatttgact

SEQ ID NO: 3818150 - DNA, 25 bp, Homo sapien
tcaacccagtagaatttgacttatc

SEQ ID NO: 3818151 - DNA, 25 bp, Homo sapien
ttgtcaacccagtagaatttgactt

SEQ ID NO: 3818152 - DNA, 25 bp, Homo sapien
tgtcaacccagtagaatttgactta

SEQ ID NO: 3818153 - DNA, 25 bp, Homo sapien
tcaattatcaactcctctctgaagc

SEQ ID NO: 3818154 - DNA, 25 bp, Homo sapien
gtaagacatcatcaattatcaactc

SEQ ID NO: 3818155 - DNA, 25 bp, Homo sapien
caaatgtgtactgaacagatgaata

SEQ ID NO: 3818156 - DNA, 25 bp, Homo sapien
ccttctctcaaatgtgtactgaaca

SEQ ID NO: 3818157 - DNA, 25 bp, Homo sapien
ccccgttcagaacatcagatacttc

SEQ ID NO: 3818158 - DNA, 25 bp, Homo sapien
tccccgttcagaacatcagatactt

SEQ ID NO: 3818159 - DNA, 25 bp, Homo sapien
ctttccccgttcagaacatcagata

SEQ ID NO: 3818160 - DNA, 25 bp, Homo sapien
tttccccgttcagaacatcagatac

SEQ ID NO: 3818161 - DNA, 25 bp, Homo sapien
gaatttactctgtacatgccacaga

SEQ ID NO: 3818162 - DNA, 25 bp, Homo sapien
aaggtggttgggaactacatgttca

SEQ ID NO: 3818163 - DNA, 25 bp, Homo sapien
gtcctacagtccgttctcataatta

SEQ ID NO: 3818164 - DNA, 25 bp, Homo sapien
gacatagataacacctcttccaaga

SEQ ID NO: 3818165 - DNA, 25 bp, Homo sapien
tatttccattcattccaacaccatg

SEQ ID NO: 3818166 - DNA, 25 bp, Homo sapien
cattcattccaacaccatgggtaga

SEQ ID NO: 3818167 - DNA, 25 bp, Homo sapien
tccctgctgctgcattatttccatt

SEQ ID NO: 3818168 - DNA, 25 bp, Homo sapien
tacgcttttccctgctgctgcatta

SEQ ID NO: 3818169 - DNA, 25 bp, Homo sapien
ggataactactagagcatgttgaaa

SEQ ID NO: 3818170 - DNA, 25 bp, Homo sapien
acaaggataactactagagcatgtt

SEQ ID NO: 3818171 - DNA, 25 bp, Homo sapien
aagttgaatcactacaaggataact

SEQ ID NO: 3818172 - DNA, 25 bp, Homo sapien
gttgaatcactacaaggataactac

SEQ ID NO: 3818173 - DNA, 25 bp, Homo sapien
agacagcccagttccagagttctga

SEQ ID NO: 3818174 - DNA, 25 bp, Homo sapien
tggaggtttgtagacagcccagttc

SEQ ID NO: 3818175 - DNA, 25 bp, Homo sapien
tgctggaggtttgtagacagcccag

SEQ ID NO: 3818176 - DNA, 25 bp, Homo sapien
aatgctggaggtttgtagacagccc

SEQ ID NO: 3818177 - DNA, 25 bp, Homo sapien
cagtgagcccactttaggtagaagt

SEQ ID NO: 3818178 - DNA, 25 bp, Homo sapien
tattcttgtgaggacttaattcccg

SEQ ID NO: 3818179 - DNA, 25 bp, Homo sapien
tagcgacattggtgcagaacagcga

SEQ ID NO: 3818180 - DNA, 25 bp, Homo sapien
gatatcccgagcctcaactttggaa

SEQ ID NO: 3818181 - DNA, 25 bp, Homo sapien
ccactagaaggtcgaggagctacag

SEQ ID NO: 3818182 - DNA, 25 bp, Homo sapien
gaggacccttaacaatcggtggcga

SEQ ID NO: 3818183 - DNA, 25 bp, Homo sapien
tccattcctggagatttcgggcgga

SEQ ID NO: 3818184 - DNA, 25 bp, Homo sapien
tcgggcggatatgcattcccaaaag

SEQ ID NO: 3818185 - DNA, 25 bp, Homo sapien
aaaaaatacacccttacacattcat

SEQ ID NO: 3818186 - DNA, 25 bp, Homo sapien
ttcacttagtaattaggagtcaaag

SEQ ID NO: 3818187 - DNA, 25 bp, Homo sapien
gatcaagaacatgataaatagtatt

SEQ ID NO: 3818188 - DNA, 25 bp, Homo sapien
aatttttaatgagaggatgaagaga

SEQ ID NO: 3818189 - DNA, 25 bp, Homo sapien
ttacaaaggaccatgccaaatactg

SEQ ID NO: 3818190 - DNA, 25 bp, Homo sapien
tctgagagtaggaacaggtacgtat

SEQ ID NO: 3818191 - DNA, 25 bp, Homo sapien
aacattctggagtgaaaggtcctat

SEQ ID NO: 3818192 - DNA, 25 bp, Homo sapien
gaatatgggaaaatggcaactctca

SEQ ID NO: 3818193 - DNA, 25 bp, Homo sapien
ataattttttcacaatgaccaacag

SEQ ID NO: 3818194 - DNA, 25 bp, Homo sapien
aatactttataattttttcacaatg

SEQ ID NO: 3818195 - DNA, 25 bp, Homo sapien
aattttttcacaatgaccaacagac

SEQ ID NO: 3818196 - DNA, 25 bp, Homo sapien
ttataattttttcacaatgaccaac

SEQ ID NO: 3818197 - DNA, 25 bp, Homo sapien
tctgcaggggtaagctagagataag

SEQ ID NO: 3818198 - DNA, 25 bp, Homo sapien
gaagaagaaggctcagtttcttcat

SEQ ID NO: 3818199 - DNA, 25 bp, Homo sapien
tatctgaattatacatagaaccacc

SEQ ID NO: 3818200 - DNA, 25 bp, Homo sapien
cttcagcagcttcatcttattcata

SEQ ID NO: 3818201 - DNA, 25 bp, Homo sapien
tgttcttcatcttagccttcagcag

SEQ ID NO: 3818202 - DNA, 25 bp, Homo sapien
tgataattgtgcaacccagacaaca

SEQ ID NO: 3818203 - DNA, 25 bp, Homo sapien
ttaaatttggcacgggagagaagta

SEQ ID NO: 3818204 - DNA, 25 bp, Homo sapien
atttggcacgggagagaagtacaga

SEQ ID NO: 3818205 - DNA, 25 bp, Homo sapien
tcagccaaggctgataattgtgcaa

SEQ ID NO: 3818206 - DNA, 25 bp, Homo sapien
tacgcatgggtagcatctgaaggaa

SEQ ID NO: 3818207 - DNA, 25 bp, Homo sapien
taattacacgcactatacgcatggg

SEQ ID NO: 3818208 - DNA, 25 bp, Homo sapien
tacagcatggctaccacagtatgat

SEQ ID NO: 3818209 - DNA, 25 bp, Homo sapien
gaagaatgtaggactggtctccaca

SEQ ID NO: 3818210 - DNA, 25 bp, Homo sapien
aaggccaactatacaatacctgaag

SEQ ID NO: 3818211 - DNA, 25 bp, Homo sapien
ccagatgagtgccagaacttctact

SEQ ID NO: 3818212 - DNA, 25 bp, Homo sapien
aggcttttgtctcaaggccaactat

SEQ ID NO: 3818213 - DNA, 25 bp, Homo sapien
gcttgtgcacccagatgagtgccag

SEQ ID NO: 3818214 - DNA, 25 bp, Homo sapien
tttcatgcataataaaggccctgtc

SEQ ID NO: 3818215 - DNA, 25 bp, Homo sapien
tagcagactgcatgctccatgaagg

SEQ ID NO: 3818216 - DNA, 25 bp, Homo sapien
aactaactgagaggttgccttgtcc

SEQ ID NO: 3818217 - DNA, 25 bp, Homo sapien
aacatcagtgccttgctcagtgaat

SEQ ID NO: 3818218 - DNA, 25 bp, Homo sapien
taggcatcttagagtttcacagact

SEQ ID NO: 3818219 - DNA, 25 bp, Homo sapien
taacacactattatgacaggattct

SEQ ID NO: 3818220 - DNA, 25 bp, Homo sapien
tatgctaaggttgtataataacaca

SEQ ID NO: 3818221 - DNA, 25 bp, Homo sapien
ttatacgaaggacaatttcagactt

SEQ ID NO: 3818222 - DNA, 25 bp, Homo sapien
taacggtgttaaagtgccatctccc

SEQ ID NO: 3818223 - DNA, 25 bp, Homo sapien
catcttcctaagtggatcgtctgta

SEQ ID NO: 3818224 - DNA, 25 bp, Homo sapien
gacctcaactcgactggaatccaag

SEQ ID NO: 3818225 - DNA, 25 bp, Homo sapien
tttctccgtaggacatgcaaatgaa

SEQ ID NO: 3818226 - DNA, 25 bp, Homo sapien
aatcttataatatggtttagcttgc

SEQ ID NO: 3818227 - DNA, 25 bp, Homo sapien
aagatgcttccatagcctaaattca

SEQ ID NO: 3818228 - DNA, 25 bp, Homo sapien
tcaataacactattactaacataaa

SEQ ID NO: 3818229 - DNA, 25 bp, Homo sapien
ttagcttgctttatgaaaacagtta

SEQ ID NO: 3818230 - DNA, 25 bp, Homo sapien
taatgctccactttccatattacat

SEQ ID NO: 3818231 - DNA, 25 bp, Homo sapien
aatgctccactttccatattacatc

SEQ ID NO: 3818232 - DNA, 25 bp, Homo sapien
ttttgtaagttaatgctccactttc

SEQ ID NO: 3818233 - DNA, 25 bp, Homo sapien
gtaagttaatgctccactttccata

SEQ ID NO: 3818234 - DNA, 25 bp, Homo sapien
taatgtcatctttttcgagggccct

SEQ ID NO: 3818235 - DNA, 25 bp, Homo sapien
ccatacttggaacattgcactgacc

SEQ ID NO: 3818236 - DNA, 25 bp, Homo sapien
tcagggaccaatgtgaatactgccg

SEQ ID NO: 3818237 - DNA, 25 bp, Homo sapien
tggtatcaggagtgctaaaaggccc

SEQ ID NO: 3818238 - DNA, 25 bp, Homo sapien
gcatagccaaaactagcttcaaggt

SEQ ID NO: 3818239 - DNA, 25 bp, Homo sapien
agtatttataggtccgccacgcata

SEQ ID NO: 3818240 - DNA, 25 bp, Homo sapien
gtccgccacgcatagccaaaactag

SEQ ID NO: 3818241 - DNA, 25 bp, Homo sapien
caaaactagcttcaaggtacaccct

SEQ ID NO: 3818242 - DNA, 25 bp, Homo sapien
cattcaagcaataatcattttcaag

SEQ ID NO: 3818243 - DNA, 25 bp, Homo sapien
aatcattcaagcaataatcattttc

SEQ ID NO: 3818244 - DNA, 25 bp, Homo sapien
ttgtaatcattcaagcaataatcat

SEQ ID NO: 3818245 - DNA, 25 bp, Homo sapien
agcaataatcattttcaagttccat

SEQ ID NO: 3818246 - DNA, 25 bp, Homo sapien
aagtgttgtcgacagatgggaatac

SEQ ID NO: 3818247 - DNA, 25 bp, Homo sapien
gttattccaaattaagtgttgtcga

SEQ ID NO: 3818248 - DNA, 25 bp, Homo sapien
tccaaattaagtgttgtcgacagat

SEQ ID NO: 3818249 - DNA, 25 bp, Homo sapien
aattaagtgttgtcgacagatggga

SEQ ID NO: 3818250 - DNA, 25 bp, Homo sapien
gccactcacttcagtaggatctcct

SEQ ID NO: 3818251 - DNA, 25 bp, Homo sapien
catttagggcagacaaaagcttcaa

SEQ ID NO: 3818252 - DNA, 25 bp, Homo sapien
tcaagagtcattactgaatgtgctg

SEQ ID NO: 3818253 - DNA, 25 bp, Homo sapien
aatgtgctgatgtggtcactggact

SEQ ID NO: 3818254 - DNA, 25 bp, Homo sapien
ccaatcttcgaatttttgctttcac

SEQ ID NO: 3818255 - DNA, 25 bp, Homo sapien
gaaactctcagctcaaaacatgttc

SEQ ID NO: 3818256 - DNA, 25 bp, Homo sapien
cttccaatcttcgaatttttgcttt

SEQ ID NO: 3818257 - DNA, 25 bp, Homo sapien
agctcaaaacatgttccagttaatg

SEQ ID NO: 3818258 - DNA, 25 bp, Homo sapien
gaagaatggaggctcttttctgtta

SEQ ID NO: 3818259 - DNA, 25 bp, Homo sapien
ggtcccatgttatcatcattgaaga

SEQ ID NO: 3818260 - DNA, 25 bp, Homo sapien
aaatggtcccatgttatcatcattg

SEQ ID NO: 3818261 - DNA, 25 bp, Homo sapien
atgaagtctgtagtaaaatggtccc

SEQ ID NO: 3818262 - DNA, 25 bp, Homo sapien
ctaaaatatgtcgcaggcaactgta

SEQ ID NO: 3818263 - DNA, 25 bp, Homo sapien
taaaatatgtcgcaggcaactgtat

SEQ ID NO: 3818264 - DNA, 25 bp, Homo sapien
atatgtcgcaggcaactgtattcca

SEQ ID NO: 3818265 - DNA, 25 bp, Homo sapien
aaatatgtcgcaggcaactgtattc

SEQ ID NO: 3818266 - DNA, 25 bp, Homo sapien
ctaggcaaaccaggtttgaagattg

SEQ ID NO: 3818267 - DNA, 25 bp, Homo sapien
taggcaaaccaggtttgaagattgg

SEQ ID NO: 3818268 - DNA, 25 bp, Homo sapien
caaagaacttagacaaattttcaag

SEQ ID NO: 3818269 - DNA, 25 bp, Homo sapien
agcacggacttcatgactaaaacac

SEQ ID NO: 3818270 - DNA, 25 bp, Homo sapien
aaccgttgtggaaaacagtgtggca

SEQ ID NO: 3818271 - DNA, 25 bp, Homo sapien
gaaaaaacactcatcatcactggtc

SEQ ID NO: 3818272 - DNA, 25 bp, Homo sapien
tcgaaatacgagctacagaatcaca

SEQ ID NO: 3818273 - DNA, 25 bp, Homo sapien
catctgcaagcggaattgggaagta

SEQ ID NO: 3818274 - DNA, 25 bp, Homo sapien
ctgtagcctaaactctagtccggag

SEQ ID NO: 3818275 - DNA, 25 bp, Homo sapien
tcaaccgcctaacttgtctgtagcc

SEQ ID NO: 3818276 - DNA, 25 bp, Homo sapien
agatcagcacccgtcgggaaagccg

SEQ ID NO: 3818277 - DNA, 25 bp, Homo sapien
tggcgtcacgcccaaaggaacaaac

SEQ ID NO: 3818278 - DNA, 25 bp, Homo sapien
gaaagccgcgtacccgttgaagctg

SEQ ID NO: 3818279 - DNA, 25 bp, Homo sapien
aacgccagagcgtgtgtcctgggca

SEQ ID NO: 3818280 - DNA, 25 bp, Homo sapien
gcggcagcgcggctgggctcagcgg

SEQ ID NO: 3818281 - DNA, 25 bp, Homo sapien
cggccgctcgctagctcagcctcac

SEQ ID NO: 3818282 - DNA, 25 bp, Homo sapien
gcccgcgccactccggccttgcgcc

SEQ ID NO: 3818283 - DNA, 25 bp, Homo sapien
ggccttgcgccattccggccccacg

SEQ ID NO: 3818284 - DNA, 25 bp, Homo sapien
gcctacaggtcgacagggcccaacg

SEQ ID NO: 3818285 - DNA, 25 bp, Homo sapien
acggaaggcactggccgacaacgct

SEQ ID NO: 3818286 - DNA, 25 bp, Homo sapien
tacaggtcgacagggcccaacgacc

SEQ ID NO: 3818287 - DNA, 25 bp, Homo sapien
aacgacccggcgagcaacttcacgg

SEQ ID NO: 3818288 - DNA, 25 bp, Homo sapien
aggacagcgggagtgcgtggccaaa

SEQ ID NO: 3818289 - DNA, 25 bp, Homo sapien
gacagcgggagtgcgtggccaaagc

SEQ ID NO: 3818290 - DNA, 25 bp, Homo sapien
ctaggacagcgggagtgcgtggcca

SEQ ID NO: 3818291 - DNA, 25 bp, Homo sapien
agcgggagtgcgtggccaaagctgt

SEQ ID NO: 3818292 - DNA, 25 bp, Homo sapien
ctgtcgtgtgcaccctagcgtcagc

SEQ ID NO: 3818293 - DNA, 25 bp, Homo sapien
gataggtgccatctaccctcggttt

SEQ ID NO: 3818294 - DNA, 25 bp, Homo sapien
cacatgcaccacgttcgtgaccggg

SEQ ID NO: 3818295 - DNA, 25 bp, Homo sapien
tagcgtcagcctcgagtttgaccag

SEQ ID NO: 3818296 - DNA, 25 bp, Homo sapien
taaacagggcatgctcttaaagcga

SEQ ID NO: 3818297 - DNA, 25 bp, Homo sapien
ggaaagccccggagaatcatgctga

SEQ ID NO: 3818298 - DNA, 25 bp, Homo sapien
tacgtcaccctgtgttccaatggcg

SEQ ID NO: 3818299 - DNA, 25 bp, Homo sapien
cagagccatccccattaaacagggc

SEQ ID NO: 3818300 - DNA, 25 bp, Homo sapien
gcctttcccgtgtgcgatctctgga

SEQ ID NO: 3818301 - DNA, 25 bp, Homo sapien
aatgacctagccaacagcatctggg

SEQ ID NO: 3818302 - DNA, 25 bp, Homo sapien
gtcatctattggcaatgacctagcc

SEQ ID NO: 3818303 - DNA, 25 bp, Homo sapien
ccgtgtgcgatctctggagctggat

SEQ ID NO: 3818304 - DNA, 25 bp, Homo sapien
gtaaggactaatcatttaagggaca

SEQ ID NO: 3818305 - DNA, 25 bp, Homo sapien
taaggactaatcatttaagggacaa

SEQ ID NO: 3818306 - DNA, 25 bp, Homo sapien
gactcgaccatgaacctagcgatgg

SEQ ID NO: 3818307 - DNA, 25 bp, Homo sapien
tcatttgttctaagggactcgacca

SEQ ID NO: 3818308 - DNA, 25 bp, Homo sapien
cctagccggcctaactcatttgaag

SEQ ID NO: 3818309 - DNA, 25 bp, Homo sapien
gacaatcttgtgaacatcgcctttg

SEQ ID NO: 3818310 - DNA, 25 bp, Homo sapien
gcagatgctttctttttggagagct

SEQ ID NO: 3818311 - DNA, 25 bp, Homo sapien
tgctgaacaacagggcagatgcttt

SEQ ID NO: 3818312 - DNA, 25 bp, Homo sapien
aacagggcagatgctttctttttgg

SEQ ID NO: 3818313 - DNA, 25 bp, Homo sapien
acagggcagatgctttctttttgga

SEQ ID NO: 3818314 - DNA, 25 bp, Homo sapien
ctaatctaaattatctagtgttaca

SEQ ID NO: 3818315 - DNA, 25 bp, Homo sapien
tatctagtgttacaataacaatgtt

SEQ ID NO: 3818316 - DNA, 25 bp, Homo sapien
taaattatctagtgttacaataaca

SEQ ID NO: 3818317 - DNA, 25 bp, Homo sapien
tctaaattatctagtgttacaataa

SEQ ID NO: 3818318 - DNA, 25 bp, Homo sapien
agttactcgcactttgagaagaaaa

SEQ ID NO: 3818319 - DNA, 25 bp, Homo sapien
gagcttgccaggcagcagagacgca

SEQ ID NO: 3818320 - DNA, 25 bp, Homo sapien
catcaaacagggaaaccgacgtggg

SEQ ID NO: 3818321 - DNA, 25 bp, Homo sapien
agcagagacgcaccttttaagttac

SEQ ID NO: 3818322 - DNA, 25 bp, Homo sapien
caccaaagatatcagcagtggattg

SEQ ID NO: 3818323 - DNA, 25 bp, Homo sapien
cgatgctacggctttttctttgaac

SEQ ID NO: 3818324 - DNA, 25 bp, Homo sapien
tctttgaacagatctccttcttcat

SEQ ID NO: 3818325 - DNA, 25 bp, Homo sapien
cgtggcttctggcgatgctacggct

SEQ ID NO: 3818326 - DNA, 25 bp, Homo sapien
atcgttttccctcgtgctttggctt

SEQ ID NO: 3818327 - DNA, 25 bp, Homo sapien
gttttccctcgtgctttggcttcca

SEQ ID NO: 3818328 - DNA, 25 bp, Homo sapien
tttccctcgtgctttggcttccatc

SEQ ID NO: 3818329 - DNA, 25 bp, Homo sapien
ctatcgttttccctcgtgctttggc

SEQ ID NO: 3818330 - DNA, 25 bp, Homo sapien
aaatacagaaacagctcctgctagg

SEQ ID NO: 3818331 - DNA, 25 bp, Homo sapien
gaaacagctcctgctaggattttct

SEQ ID NO: 3818332 - DNA, 25 bp, Homo sapien
acagaaacagctcctgctaggattt

SEQ ID NO: 3818333 - DNA, 25 bp, Homo sapien
agctcctgctaggattttctttcca

SEQ ID NO: 3818334 - DNA, 25 bp, Homo sapien
cgtcatcaagccacagcagtgggtc

SEQ ID NO: 3818335 - DNA, 25 bp, Homo sapien
cttgccgatcctggggggcttccgt

SEQ ID NO: 3818336 - DNA, 25 bp, Homo sapien
tccagcttgccgatcctggggggct

SEQ ID NO: 3818337 - DNA, 25 bp, Homo sapien
aacagaggctccagcttgccgatcc

SEQ ID NO: 3818338 - DNA, 25 bp, Homo sapien
gaggctccagcttgccgatcctggg

SEQ ID NO: 3818339 - DNA, 25 bp, Homo sapien
gtcctcatcatcaaagagccccttg

SEQ ID NO: 3818340 - DNA, 25 bp, Homo sapien
tcctcatcatcaaagagccccttgc

SEQ ID NO: 3818341 - DNA, 25 bp, Homo sapien
tcatcatcaaagagccccttgcccc

SEQ ID NO: 3818342 - DNA, 25 bp, Homo sapien
ctcgtcctcatcatcaaagagcccc

SEQ ID NO: 3818343 - DNA, 25 bp, Homo sapien
caaatggcgagaagtcctcgtcggt

SEQ ID NO: 3818344 - DNA, 25 bp, Homo sapien
gagccaaatggcgagaagtcctcgt

SEQ ID NO: 3818345 - DNA, 25 bp, Homo sapien
agaagtcctcgtcggtcagcttggg

SEQ ID NO: 3818346 - DNA, 25 bp, Homo sapien
cacctccagagccaaatggcgagaa

SEQ ID NO: 3818347 - DNA, 25 bp, Homo sapien
tcttgagtgtcttccgaagttttgc

SEQ ID NO: 3818348 - DNA, 25 bp, Homo sapien
tccttcttctcttgagtgtcttccg

SEQ ID NO: 3818349 - DNA, 25 bp, Homo sapien
ttctcttgagtgtcttccgaagttt

SEQ ID NO: 3818350 - DNA, 25 bp, Homo sapien
ttccttcttctcttgagtgtcttcc

SEQ ID NO: 3818351 - DNA, 25 bp, Homo sapien
ctcagtatacgcatcctggttcttt

SEQ ID NO: 3818352 - DNA, 25 bp, Homo sapien
agtatacgcatcctggttctttcca

SEQ ID NO: 3818353 - DNA, 25 bp, Homo sapien
tctttccacgtctgtcatcctcata

SEQ ID NO: 3818354 - DNA, 25 bp, Homo sapien
ttaatagtactaagtcctccctcag

SEQ ID NO: 3818355 - DNA, 25 bp, Homo sapien
ccgcctttggtgaagccagcagagg

SEQ ID NO: 3818356 - DNA, 25 bp, Homo sapien
agagaaatccgcctttggtgaagcc

SEQ ID NO: 3818357 - DNA, 25 bp, Homo sapien
cctactccccatcaacgcggctggg

SEQ ID NO: 3818358 - DNA, 25 bp, Homo sapien
gaaatccgcctttggtgaagccagc

SEQ ID NO: 3818359 - DNA, 25 bp, Homo sapien
ttgtcggctcctcgtccactcggcc

SEQ ID NO: 3818360 - DNA, 25 bp, Homo sapien
tcggcccacggcatcccccttgatg

SEQ ID NO: 3818361 - DNA, 25 bp, Homo sapien
tcctcgtccactcggcccacggcat

SEQ ID NO: 3818362 - DNA, 25 bp, Homo sapien
ggcccacggcatcccccttgatgcg

SEQ ID NO: 3818363 - DNA, 25 bp, Homo sapien
gcaaacgatgtaggtctgcttcttt

SEQ ID NO: 3818364 - DNA, 25 bp, Homo sapien
caaacgatgtaggtctgcttctttt

SEQ ID NO: 3818365 - DNA, 25 bp, Homo sapien
ctgcaaacgatgtaggtctgcttct

SEQ ID NO: 3818366 - DNA, 25 bp, Homo sapien
tgcaaacgatgtaggtctgcttctt

SEQ ID NO: 3818367 - DNA, 25 bp, Homo sapien
tcctccttctcagagtcagcaaaaa

SEQ ID NO: 3818368 - DNA, 25 bp, Homo sapien
cctcatcactcacttgtgtgatgtg

SEQ ID NO: 3818369 - DNA, 25 bp, Homo sapien
cttctcagagtcagcaaaaaggtca

SEQ ID NO: 3818370 - DNA, 25 bp, Homo sapien
ttcaatgtcctcaatatctttctcc

SEQ ID NO: 3818371 - DNA, 25 bp, Homo sapien
taagagtataaaataccaaattaga

SEQ ID NO: 3818372 - DNA, 25 bp, Homo sapien
ataccaaattagaactactagttat

SEQ ID NO: 3818373 - DNA, 25 bp, Homo sapien
gaactactagttattaagctaaaga

SEQ ID NO: 3818374 - DNA, 25 bp, Homo sapien
taaagaagagatactgccacttagc

SEQ ID NO: 3818375 - DNA, 25 bp, Homo sapien
gatatatttataaaagcaaagaaaa

SEQ ID NO: 3818376 - DNA, 25 bp, Homo sapien
caaagaaaaagacgtggaaagacat

SEQ ID NO: 3818377 - DNA, 25 bp, Homo sapien
gcaaagaaaaagacgtggaaagaca

SEQ ID NO: 3818378 - DNA, 25 bp, Homo sapien
ttctatggaaacagatatatttata

SEQ ID NO: 3818379 - DNA, 25 bp, Homo sapien
gtactggaaggctcaaacttagcct

SEQ ID NO: 3818380 - DNA, 25 bp, Homo sapien
tactggaaggctcaaacttagcctc

SEQ ID NO: 3818381 - DNA, 25 bp, Homo sapien
agtactggaaggctcaaacttagcc

SEQ ID NO: 3818382 - DNA, 25 bp, Homo sapien
aaagtactggaaggctcaaacttag

SEQ ID NO: 3818383 - DNA, 25 bp, Homo sapien
tttgtcgtggtaacacagtaaatgc

SEQ ID NO: 3818384 - DNA, 25 bp, Homo sapien
ttttgtcgtggtaacacagtaaatg

SEQ ID NO: 3818385 - DNA, 25 bp, Homo sapien
tttctatcgtaagggggcagctggt

SEQ ID NO: 3818386 - DNA, 25 bp, Homo sapien
gccaacatttctatcgtaagggggc

SEQ ID NO: 3818387 - DNA, 25 bp, Homo sapien
ttaatgtccatattggtcgggatag

SEQ ID NO: 3818388 - DNA, 25 bp, Homo sapien
gcaggattgtccacgccactgattg

SEQ ID NO: 3818389 - DNA, 25 bp, Homo sapien
gctatcttgcaaccgattgtctctg

SEQ ID NO: 3818390 - DNA, 25 bp, Homo sapien
cgcaggattgtccacgccactgatt

SEQ ID NO: 3818391 - DNA, 25 bp, Homo sapien
tgtctgctatcttgcaaccgattgt

SEQ ID NO: 3818392 - DNA, 25 bp, Homo sapien
cagctctgctattccattcctcaac

SEQ ID NO: 3818393 - DNA, 25 bp, Homo sapien
agctctgctattccattcctcaaca

SEQ ID NO: 3818394 - DNA, 25 bp, Homo sapien
gaggtgataactgaggtgactacaa

SEQ ID NO: 3818395 - DNA, 25 bp, Homo sapien
catccttgcaagatatgtagcttcg

SEQ ID NO: 3818396 - DNA, 25 bp, Homo sapien
gcaccgtggcacctgttttacaata

SEQ ID NO: 3818397 - DNA, 25 bp, Homo sapien
ggttgaaggctcaccctaggccaag

SEQ ID NO: 3818398 - DNA, 25 bp, Homo sapien
tgatgcccaggcagatcagggattc

SEQ ID NO: 3818399 - DNA, 25 bp, Homo sapien
caaaggactttaagcaggccctaca

SEQ ID NO: 3818400 - DNA, 25 bp, Homo sapien
ttggtcaggcacaagggcgactcag

SEQ ID NO: 3818401 - DNA, 25 bp, Homo sapien
cataatgagaagcttgtccttgaac

SEQ ID NO: 3818402 - DNA, 25 bp, Homo sapien
gtcggatcacgtgcgggttctgtca

SEQ ID NO: 3818403 - DNA, 25 bp, Homo sapien
tgacatcaggtcacgtgaggccggt

SEQ ID NO: 3818404 - DNA, 25 bp, Homo sapien
ttttttcgctgcagatgaaccggac

SEQ ID NO: 3818405 - DNA, 25 bp, Homo sapien
cctcagcatcgcaggtcggatcacg

SEQ ID NO: 3818406 - DNA, 25 bp, Homo sapien
agccagagctggtcgctggcggccg

SEQ ID NO: 3818407 - DNA, 25 bp, Homo sapien
ttgcctgccctcttaggaacacacg

SEQ ID NO: 3818408 - DNA, 25 bp, Homo sapien
ggtgacgcttggcttgcgcgcagga

SEQ ID NO: 3818409 - DNA, 25 bp, Homo sapien
gccgacgcgggcgtgagaggcgggc

SEQ ID NO: 3818410 - DNA, 25 bp, Homo sapien
cttgaacgcgggaggtgcagtgagc

SEQ ID NO: 3818411 - DNA, 25 bp, Homo sapien
cgcttgaacgcgggaggtgcagtga

SEQ ID NO: 3818412 - DNA, 25 bp, Homo sapien
atcgcttgaacgcgggaggtgcagt

SEQ ID NO: 3818413 - DNA, 25 bp, Homo sapien
cgagatggcgccactgtactccagc

SEQ ID NO: 3818414 - DNA, 25 bp, Homo sapien
cccatgggtttaggtttcttagatg

SEQ ID NO: 3818415 - DNA, 25 bp, Homo sapien
gggtttaggtttcttagatgtcatg

SEQ ID NO: 3818416 - DNA, 25 bp, Homo sapien
catgggctttaggtcccatgggttt

SEQ ID NO: 3818417 - DNA, 25 bp, Homo sapien
ctgaaaagatcccatgggctttagg

SEQ ID NO: 3818418 - DNA, 25 bp, Homo sapien
gggagagatacttcaagactacata

SEQ ID NO: 3818419 - DNA, 25 bp, Homo sapien
gatggttttatcaagatctctgtga

SEQ ID NO: 3818420 - DNA, 25 bp, Homo sapien
tctctgtgatgctgttgtatggtgg

SEQ ID NO: 3818421 - DNA, 25 bp, Homo sapien
tatgaccctgacatctttaaagagt

SEQ ID NO: 3818422 - DNA, 25 bp, Homo sapien
tcacatgtttttgcggttctttttc

SEQ ID NO: 3818423 - DNA, 25 bp, Homo sapien
cccctttgctcttatgtctttattt

SEQ ID NO: 3818424 - DNA, 25 bp, Homo sapien
atgggtagaggtggaactgtttggg

SEQ ID NO: 3818425 - DNA, 25 bp, Homo sapien
tttttcacccgttcattctcatcca

SEQ ID NO: 3818426 - DNA, 25 bp, Homo sapien
acatgggaggccagttggtgagaag

SEQ ID NO: 3818427 - DNA, 25 bp, Homo sapien
gagaaggtggcaggcggcatagcca

SEQ ID NO: 3818428 - DNA, 25 bp, Homo sapien
catgggaggccagttggtgagaagg

SEQ ID NO: 3818429 - DNA, 25 bp, Homo sapien
ggtgagaaggtggcaggcggcatag

SEQ ID NO: 3818430 - DNA, 25 bp, Homo sapien
tcgtttctttggtggaaggcattcc

SEQ ID NO: 3818431 - DNA, 25 bp, Homo sapien
ggtctcgtttctttggtggaaggca

SEQ ID NO: 3818432 - DNA, 25 bp, Homo sapien
gtttctttggtggaaggcattcctg

SEQ ID NO: 3818433 - DNA, 25 bp, Homo sapien
tctcgtttctttggtggaaggcatt

SEQ ID NO: 3818434 - DNA, 25 bp, Homo sapien
agcccgtttcacagcgcttcctggg

SEQ ID NO: 3818435 - DNA, 25 bp, Homo sapien
gcccgtttcacagcgcttcctggga

SEQ ID NO: 3818436 - DNA, 25 bp, Homo sapien
cgtttcacagcgcttcctgggatcc

SEQ ID NO: 3818437 - DNA, 25 bp, Homo sapien
acacacccctgtgtatgcaatattt

SEQ ID NO: 3818438 - DNA, 25 bp, Homo sapien
acacccctgtgtatgcaatatttgt

SEQ ID NO: 3818439 - DNA, 25 bp, Homo sapien
cacacccctgtgtatgcaatatttg

SEQ ID NO: 3818440 - DNA, 25 bp, Homo sapien
ttgagacttgggaagggtgggccat

SEQ ID NO: 3818441 - DNA, 25 bp, Homo sapien
gggtgggccatggtagcaggtgcat

SEQ ID NO: 3818442 - DNA, 25 bp, Homo sapien
ttattgagacttgggaagggtgggc

SEQ ID NO: 3818443 - DNA, 25 bp, Homo sapien
gacttgggaagggtgggccatggta

SEQ ID NO: 3818444 - DNA, 25 bp, Homo sapien
atggcatttgtgactgtgttggtca

SEQ ID NO: 3818445 - DNA, 25 bp, Homo sapien
tgatggcatttgtgactgtgttggt

SEQ ID NO: 3818446 - DNA, 25 bp, Homo sapien
gatggcatttgtgactgtgttggtc

SEQ ID NO: 3818447 - DNA, 25 bp, Homo sapien
gtgatggcatttgtgactgtgttgg

SEQ ID NO: 3818448 - DNA, 25 bp, Homo sapien
ctccagtctccttggcatgtcccac

SEQ ID NO: 3818449 - DNA, 25 bp, Homo sapien
cagtctccttggcatgtcccaccac

SEQ ID NO: 3818450 - DNA, 25 bp, Homo sapien
gtctccttggcatgtcccaccacct

SEQ ID NO: 3818451 - DNA, 25 bp, Homo sapien
ttctctccagtctccttggcatgtc

SEQ ID NO: 3818452 - DNA, 25 bp, Homo sapien
tacgtccctggacatccaaggtggg

SEQ ID NO: 3818453 - DNA, 25 bp, Homo sapien
catttatcctcacaatggacctata

SEQ ID NO: 3818454 - DNA, 25 bp, Homo sapien
agagcaagcccaatgccctcccagt

SEQ ID NO: 3818455 - DNA, 25 bp, Homo sapien
ggtgagggctcagtgctgacccatt

SEQ ID NO: 3818456 - DNA, 25 bp, Homo sapien
tctctctacatctggaaccatcggc

SEQ ID NO: 3818457 - DNA, 25 bp, Homo sapien
tatctctctacatctggaaccatcg

SEQ ID NO: 3818458 - DNA, 25 bp, Homo sapien
tctctacatctggaaccatcggcag

SEQ ID NO: 3818459 - DNA, 25 bp, Homo sapien
tctacatctggaaccatcggcagct

SEQ ID NO: 3818460 - DNA, 25 bp, Homo sapien
tggcaaaaggacataaaatacgtct

SEQ ID NO: 3818461 - DNA, 25 bp, Homo sapien
ggacataaaatacgtcttatggtca

SEQ ID NO: 3818462 - DNA, 25 bp, Homo sapien
gcatatttatgaactttatttcaaa

SEQ ID NO: 3818463 - DNA, 25 bp, Homo sapien
ggcctgagactaacaaatccacctt

SEQ ID NO: 3818464 - DNA, 25 bp, Homo sapien
tcagtgcagggtagtggggccagaa

SEQ ID NO: 3818465 - DNA, 25 bp, Homo sapien
cagtgcagggtagtggggccagaaa

SEQ ID NO: 3818466 - DNA, 25 bp, Homo sapien
ccagctccagagatcgcacacggga

SEQ ID NO: 3818467 - DNA, 25 bp, Homo sapien
ctccagagatcgcacacgggaaagg

SEQ ID NO: 3818468 - DNA, 25 bp, Homo sapien
ctggcccacttaggattctgggtct

SEQ ID NO: 3818469 - DNA, 25 bp, Homo sapien
tggcccacttaggattctgggtctc

SEQ ID NO: 3818470 - DNA, 25 bp, Homo sapien
ggcccacttaggattctgggtctca

SEQ ID NO: 3818471 - DNA, 25 bp, Homo sapien
gcccacttaggattctgggtctcac

SEQ ID NO: 3818472 - DNA, 25 bp, Homo sapien
ttcccacgcatgttttggatcgact

SEQ ID NO: 3818473 - DNA, 25 bp, Homo sapien
tcccacgcatgttttggatcgactg

SEQ ID NO: 3818474 - DNA, 25 bp, Homo sapien
cccacgcatgttttggatcgactgc

SEQ ID NO: 3818475 - DNA, 25 bp, Homo sapien
gttcccacgcatgttttggatcgac

SEQ ID NO: 3818476 - DNA, 25 bp, Homo sapien
tcagctgggacttgcttttactgct

SEQ ID NO: 3818477 - DNA, 25 bp, Homo sapien
gggacttgcttttactgctctcgca

SEQ ID NO: 3818478 - DNA, 25 bp, Homo sapien
ctggtcagctgggacttgcttttac

SEQ ID NO: 3818479 - DNA, 25 bp, Homo sapien
ttttactgctctcgcatgactgcag

SEQ ID NO: 3818480 - DNA, 25 bp, Homo sapien
tcacccagcccggtgtccatgtcct

SEQ ID NO: 3818481 - DNA, 25 bp, Homo sapien
gagtcacccagcccggtgtccatgt

SEQ ID NO: 3818482 - DNA, 25 bp, Homo sapien
cacccagcccggtgtccatgtcctt

SEQ ID NO: 3818483 - DNA, 25 bp, Homo sapien
agtcacccagcccggtgtccatgtc

SEQ ID NO: 3818484 - DNA, 25 bp, Homo sapien
ggtgagcacgccattggaacacagg

SEQ ID NO: 3818485 - DNA, 25 bp, Homo sapien
ctaagcttgaataataggtgagcac

SEQ ID NO: 3818486 - DNA, 25 bp, Homo sapien
ttggaacacagggtgacgtatttct

SEQ ID NO: 3818487 - DNA, 25 bp, Homo sapien
taataggtgagcacgccattggaac

SEQ ID NO: 3818488 - DNA, 25 bp, Homo sapien
ttcgctttaagagcatgccctgttt

SEQ ID NO: 3818489 - DNA, 25 bp, Homo sapien
cttcgctttaagagcatgccctgtt

SEQ ID NO: 3818490 - DNA, 25 bp, Homo sapien
tcgctttaagagcatgccctgttta

SEQ ID NO: 3818491 - DNA, 25 bp, Homo sapien
tgttcatcaggtatgctcaaagatc

SEQ ID NO: 3818492 - DNA, 25 bp, Homo sapien
caggtatgctcaaagatctatctgc

SEQ ID NO: 3818493 - DNA, 25 bp, Homo sapien
tgtaactgttcatcaggtatgctca

SEQ ID NO: 3818494 - DNA, 25 bp, Homo sapien
cgcaaatgagtgtaactgttcatca

SEQ ID NO: 3818495 - DNA, 25 bp, Homo sapien
tgtgtgatatgatgaggtatctcca

SEQ ID NO: 3818496 - DNA, 25 bp, Homo sapien
ctttgtgtgatatgatgaggtatct

SEQ ID NO: 3818497 - DNA, 25 bp, Homo sapien
atatgatgaggtatctccaaggtca

SEQ ID NO: 3818498 - DNA, 25 bp, Homo sapien
tatgatgaggtatctccaaggtcac

SEQ ID NO: 3818499 - DNA, 25 bp, Homo sapien
aaaaaattcataacaatagatgtta

SEQ ID NO: 3818500 - DNA, 25 bp, Homo sapien
tattgttgactgaaacgcacagtag

SEQ ID NO: 3818501 - DNA, 25 bp, Homo sapien
tcaaggaatattgtcgaacacaagc

SEQ ID NO: 3818502 - DNA, 25 bp, Homo sapien
tattattgtcattgtaagataatgc

SEQ ID NO: 3818503 - DNA, 25 bp, Homo sapien
ttgtaagataatgctggatggctgt

SEQ ID NO: 3818504 - DNA, 25 bp, Homo sapien
gatgcggatgcccacgcactgactt

SEQ ID NO: 3818505 - DNA, 25 bp, Homo sapien
ccattggatgcggatgcccacgcac

SEQ ID NO: 3818506 - DNA, 25 bp, Homo sapien
tgcggatgcccacgcactgacttct

SEQ ID NO: 3818507 - DNA, 25 bp, Homo sapien
ttggatgcggatgcccacgcactga

SEQ ID NO: 3818508 - DNA, 25 bp, Homo sapien
tatatatgaggaataccacctcagc

SEQ ID NO: 3818509 - DNA, 25 bp, Homo sapien
gaacttagtcatgtcaccaaatgcc

SEQ ID NO: 3818510 - DNA, 25 bp, Homo sapien
gacaaccacagagtgggaggaaatc

SEQ ID NO: 3818511 - DNA, 25 bp, Homo sapien
ttcagcggatactgctcaggtgacg

SEQ ID NO: 3818512 - DNA, 25 bp, Homo sapien
tttgtacagttgcttcttcttattt

SEQ ID NO: 3818513 - DNA, 25 bp, Homo sapien
atggtttgtacagttgcttcttctt

SEQ ID NO: 3818514 - DNA, 25 bp, Homo sapien
cagttgcttcttcttatttctacaa

SEQ ID NO: 3818515 - DNA, 25 bp, Homo sapien
ggtttgtacagttgcttcttcttat

SEQ ID NO: 3818516 - DNA, 25 bp, Homo sapien
cttgcctctggattggcagaagggt

SEQ ID NO: 3818517 - DNA, 25 bp, Homo sapien
ggattggcagaagggttaaactcca

SEQ ID NO: 3818518 - DNA, 25 bp, Homo sapien
gagttcctctggaatattgtgcttg

SEQ ID NO: 3818519 - DNA, 25 bp, Homo sapien
tggaatattgtgcttgcctctggat

SEQ ID NO: 3818520 - DNA, 25 bp, Homo sapien
tgcctctggattggcagaaaggtta

SEQ ID NO: 3818521 - DNA, 25 bp, Homo sapien
gagttcctctggaatattgtgcttg

SEQ ID NO: 3818522 - DNA, 25 bp, Homo sapien
tattgtgcttgcctctggattggca

SEQ ID NO: 3818523 - DNA, 25 bp, Homo sapien
tgcttgcctctggattggcagaaag

SEQ ID NO: 3818524 - DNA, 25 bp, Homo sapien
aaaccgagggtagatggcacctatc

SEQ ID NO: 3818525 - DNA, 25 bp, Homo sapien
accgagggtagatggcacctatcac

SEQ ID NO: 3818526 - DNA, 25 bp, Homo sapien
caaaccgagggtagatggcacctat

SEQ ID NO: 3818527 - DNA, 25 bp, Homo sapien
ggcaaaccgagggtagatggcacct

SEQ ID NO: 3818528 - DNA, 25 bp, Homo sapien
catgtggaggtcctcaccaacttca

SEQ ID NO: 3818529 - DNA, 25 bp, Homo sapien
atgtggaggtcctcaccaacttcaa

SEQ ID NO: 3818530 - DNA, 25 bp, Homo sapien
tgtggaggtcctcaccaacttcaac

SEQ ID NO: 3818531 - DNA, 25 bp, Homo sapien
gcatgtggaggtcctcaccaacttc

SEQ ID NO: 3818532 - DNA, 25 bp, Homo sapien
tctcagattcagagggacacaccga

SEQ ID NO: 3818533 - DNA, 25 bp, Homo sapien
ctcagattcagagggacacaccgac

SEQ ID NO: 3818534 - DNA, 25 bp, Homo sapien
ctagggtgcacacgacaggtcagta

SEQ ID NO: 3818535 - DNA, 25 bp, Homo sapien
acacgacaggtcagtatgttcccca

SEQ ID NO: 3818536 - DNA, 25 bp, Homo sapien
tgcacacgacaggtcagtatgttcc

SEQ ID NO: 3818537 - DNA, 25 bp, Homo sapien
tagggtgcacacgacaggtcagtat

SEQ ID NO: 3818538 - DNA, 25 bp, Homo sapien
tcccgctgtcctaggccgaggctat

SEQ ID NO: 3818539 - DNA, 25 bp, Homo sapien
tgtcctaggccgaggctatgctgca

SEQ ID NO: 3818540 - DNA, 25 bp, Homo sapien
gggcgcctctactgtctgccaccac

SEQ ID NO: 3818541 - DNA, 25 bp, Homo sapien
cagctttggccacgcactcccgctg

SEQ ID NO: 3818542 - DNA, 25 bp, Homo sapien
tcgtgcagtgccattgggactaagg

SEQ ID NO: 3818543 - DNA, 25 bp, Homo sapien
ctggcccctcgtgcagtgccattgg

SEQ ID NO: 3818544 - DNA, 25 bp, Homo sapien
ccattgggactaaggttttcattca

SEQ ID NO: 3818545 - DNA, 25 bp, Homo sapien
gactaaggttttcattcatcaccag

SEQ ID NO: 3818546 - DNA, 25 bp, Homo sapien
cagaagggcaggtccgacttccatg

SEQ ID NO: 3818547 - DNA, 25 bp, Homo sapien
aagggcaggtccgacttccatggtg

SEQ ID NO: 3818548 - DNA, 25 bp, Homo sapien
aggtccgacttccatggtggccgca

SEQ ID NO: 3818549 - DNA, 25 bp, Homo sapien
gacttccatggtggccgcacagaga

SEQ ID NO: 3818550 - DNA, 25 bp, Homo sapien
tgaaggcatcttagacaagatcttg

SEQ ID NO: 3818551 - DNA, 25 bp, Homo sapien
tgtgaaggcatcttagacaagatct

SEQ ID NO: 3818552 - DNA, 25 bp, Homo sapien
aaggcatcttagacaagatcttgtc

SEQ ID NO: 3818553 - DNA, 25 bp, Homo sapien
ttgtgaaggcatcttagacaagatc

SEQ ID NO: 3818554 - DNA, 25 bp, Homo sapien
cgagaccaacttcgcctacgtagta

SEQ ID NO: 3818555 - DNA, 25 bp, Homo sapien
tgagggatttcctttctagaacctg

SEQ ID NO: 3818556 - DNA, 25 bp, Homo sapien
caaggtttgagtctgaactgttaac

SEQ ID NO: 3818557 - DNA, 25 bp, Homo sapien
tctcttaagagaataaacaggccag

SEQ ID NO: 3818558 - DNA, 25 bp, Homo sapien
atctcatccttggatgagcccgact

SEQ ID NO: 3818559 - DNA, 25 bp, Homo sapien
tctcatccttggatgagcccgactt

SEQ ID NO: 3818560 - DNA, 25 bp, Homo sapien
aatctcatccttggatgagcccgac

SEQ ID NO: 3818561 - DNA, 25 bp, Homo sapien
aaatctcatccttggatgagcccga

SEQ ID NO: 3818562 - DNA, 25 bp, Homo sapien
ggtttctattccattgagtgaaatg

SEQ ID NO: 3818563 - DNA, 25 bp, Homo sapien
tgccccagtgtatggcagattagaa

SEQ ID NO: 3818564 - DNA, 25 bp, Homo sapien
tgggtttctattccattgagtgaaa

SEQ ID NO: 3818565 - DNA, 25 bp, Homo sapien
gggtttctattccattgagtgaaat

SEQ ID NO: 3818566 - DNA, 25 bp, Homo sapien
ggagaaatctgagagccatgtgttc

SEQ ID NO: 3818567 - DNA, 25 bp, Homo sapien
tgggagaaatctgagagccatgtgt

SEQ ID NO: 3818568 - DNA, 25 bp, Homo sapien
aaatctgagagccatgtgttccaca

SEQ ID NO: 3818569 - DNA, 25 bp, Homo sapien
agaaatctgagagccatgtgttcca

SEQ ID NO: 3818570 - DNA, 25 bp, Homo sapien
cataggatgatggctcagtgtgcag

SEQ ID NO: 3818571 - DNA, 25 bp, Homo sapien
tgatggctcagtgtgcagagctgag

SEQ ID NO: 3818572 - DNA, 25 bp, Homo sapien
atgatggctcagtgtgcagagctga

SEQ ID NO: 3818573 - DNA, 25 bp, Homo sapien
aggatgatggctcagtgtgcagagc

SEQ ID NO: 3818574 - DNA, 25 bp, Homo sapien
cttttgtggcggaagcagaggcaca

SEQ ID NO: 3818575 - DNA, 25 bp, Homo sapien
tatatcctacccttcaaaattgaag

SEQ ID NO: 3818576 - DNA, 25 bp, Homo sapien
gctgacttttgtggcggaagcagag

SEQ ID NO: 3818577 - DNA, 25 bp, Homo sapien
atatcctacccttcaaaattgaagc

SEQ ID NO: 3818578 - DNA, 25 bp, Homo sapien
gcataacagaaatttcagggtgcag

SEQ ID NO: 3818579 - DNA, 25 bp, Homo sapien
tttataaaaatgaccttcaggccag

SEQ ID NO: 3818580 - DNA, 25 bp, Homo sapien
gaaatagatgatgccataattctcc

SEQ ID NO: 3818581 - DNA, 25 bp, Homo sapien
gaatcaaatctaagacgtggagaga

SEQ ID NO: 3818582 - DNA, 25 bp, Homo sapien
ttaaaatgtagctctgacagagact

SEQ ID NO: 3818583 - DNA, 25 bp, Homo sapien
taatactttgatgccttttgtgtag

SEQ ID NO: 3818584 - DNA, 25 bp, Homo sapien
gccagacagcagcacacagaatggg

SEQ ID NO: 3818585 - DNA, 25 bp, Homo sapien
tctcagtacttcaccagctgggatt

SEQ ID NO: 3818586 - DNA, 25 bp, Homo sapien
accagctgggattgacacacctcta

SEQ ID NO: 3818587 - DNA, 25 bp, Homo sapien
aacatattcacagctacattctcag

SEQ ID NO: 3818588 - DNA, 25 bp, Homo sapien
tctgcttttgatagtataattggtg

SEQ ID NO: 3818589 - DNA, 25 bp, Homo sapien
aagattccagagtcaagtaaaacat

SEQ ID NO: 3818590 - DNA, 25 bp, Homo sapien
taaatgtgagagtacaaggtaagat

SEQ ID NO: 3818591 - DNA, 25 bp, Homo sapien
ttctagtgcaacctgtgactcacgc

SEQ ID NO: 3818592 - DNA, 25 bp, Homo sapien
tcagcaggatttggatgatagagag

SEQ ID NO: 3818593 - DNA, 25 bp, Homo sapien
ggatgatagagagctttgtgtacaa

SEQ ID NO: 3818594 - DNA, 25 bp, Homo sapien
tagtgcaacctgtgactcacgctgt

SEQ ID NO: 3818595 - DNA, 25 bp, Homo sapien
tgccacaactaaaccaacgaaggga

SEQ ID NO: 3818596 - DNA, 25 bp, Homo sapien
tgctcaatggcaatacaggattcct

SEQ ID NO: 3818597 - DNA, 25 bp, Homo sapien
tgcagttatgccacagcacagaatg

SEQ ID NO: 3818598 - DNA, 25 bp, Homo sapien
gctgttacatccaagagactcgtga

SEQ ID NO: 3818599 - DNA, 25 bp, Homo sapien
gaagactcactctaccgcgcaagct

SEQ ID NO: 3818600 - DNA, 25 bp, Homo sapien
agactcactctaccgcgcaagctgg

SEQ ID NO: 3818601 - DNA, 25 bp, Homo sapien
aagactcactctaccgcgcaagctg

SEQ ID NO: 3818602 - DNA, 25 bp, Homo sapien
tttcctggacagtatatagtgatgt

SEQ ID NO: 3818603 - DNA, 25 bp, Homo sapien
ttacaaccccagtgatttaaagcag

SEQ ID NO: 3818604 - DNA, 25 bp, Homo sapien
agcttttgtcaggatgctagtggca

SEQ ID NO: 3818605 - DNA, 25 bp, Homo sapien
tagtggcatgtccttagtattagag

SEQ ID NO: 3818606 - DNA, 25 bp, Homo sapien
tctgttttctgcctagcggtagaca

SEQ ID NO: 3818607 - DNA, 25 bp, Homo sapien
cggtagacaagcctcgtttttcctg

SEQ ID NO: 3818608 - DNA, 25 bp, Homo sapien
ctgatctgttaactcggaaaacaaa

SEQ ID NO: 3818609 - DNA, 25 bp, Homo sapien
ctctgagaggaacaaggttagattt

SEQ ID NO: 3818610 - DNA, 25 bp, Homo sapien
gcctttaagacttcatagtcaaaga

SEQ ID NO: 3818611 - DNA, 25 bp, Homo sapien
cctttaagacttcatagtcaaagac

SEQ ID NO: 3818612 - DNA, 25 bp, Homo sapien
ggcctttaagacttcatagtcaaag

SEQ ID NO: 3818613 - DNA, 25 bp, Homo sapien
actcaggattgattaaaaagcggat

SEQ ID NO: 3818614 - DNA, 25 bp, Homo sapien
tgaagagccgtgaaataatcaactc

SEQ ID NO: 3818615 - DNA, 25 bp, Homo sapien
ctgcactggttacaccacctccaac

SEQ ID NO: 3818616 - DNA, 25 bp, Homo sapien
gacattcattgtgatccagcacctc

SEQ ID NO: 3818617 - DNA, 25 bp, Homo sapien
cttcgtaagtgacatgcaatcgtgt

SEQ ID NO: 3818618 - DNA, 25 bp, Homo sapien
ctgtagcatgcctcggccattttct

SEQ ID NO: 3818619 - DNA, 25 bp, Homo sapien
cttctatggtaccttcgtaagtgac

SEQ ID NO: 3818620 - DNA, 25 bp, Homo sapien
gcaatcgtgtcaagggtttttcaca

SEQ ID NO: 3818621 - DNA, 25 bp, Homo sapien
tgccacagaaattctgaacaatggt

SEQ ID NO: 3818622 - DNA, 25 bp, Homo sapien
ctgccacagaaattctgaacaatgg

SEQ ID NO: 3818623 - DNA, 25 bp, Homo sapien
ccacagaaattctgaacaatggtat

SEQ ID NO: 3818624 - DNA, 25 bp, Homo sapien
cagaaattctgaacaatggtatttt

SEQ ID NO: 3818625 - DNA, 25 bp, Homo sapien
tcttgtaaatgtcaccaacccagta

SEQ ID NO: 3818626 - DNA, 25 bp, Homo sapien
cttgtaaatgtcaccaacccagtag

SEQ ID NO: 3818627 - DNA, 25 bp, Homo sapien
tgtaaatgtcaccaacccagtaggt

SEQ ID NO: 3818628 - DNA, 25 bp, Homo sapien
ttgtaaatgtcaccaacccagtagg

SEQ ID NO: 3818629 - DNA, 25 bp, Homo sapien
taggtgtagactagaggtgaatttt

SEQ ID NO: 3818630 - DNA, 25 bp, Homo sapien
aggtgtagactagaggtgaattttc

SEQ ID NO: 3818631 - DNA, 25 bp, Homo sapien
cataggtgtagactagaggtgaatt

SEQ ID NO: 3818632 - DNA, 25 bp, Homo sapien
ataggtgtagactagaggtgaattt

SEQ ID NO: 3818633 - DNA, 25 bp, Homo sapien
gactcttctaaagtagcagaagagc

SEQ ID NO: 3818634 - DNA, 25 bp, Homo sapien
tcttctaaagtagcagaagagcgtt

SEQ ID NO: 3818635 - DNA, 25 bp, Homo sapien
cttctaaagtagcagaagagcgttt

SEQ ID NO: 3818636 - DNA, 25 bp, Homo sapien
tagcagaagagcgttttaagtttct

SEQ ID NO: 3818637 - DNA, 25 bp, Homo sapien
agatatcagggctcaacaatccttg

SEQ ID NO: 3818638 - DNA, 25 bp, Homo sapien
tactacgtagtttgataagtaacaa

SEQ ID NO: 3818639 - DNA, 25 bp, Homo sapien
tcagtcagtcagtgcacagctactt

SEQ ID NO: 3818640 - DNA, 25 bp, Homo sapien
caacctatcttccaccacagagaag

SEQ ID NO: 3818641 - DNA, 25 bp, Homo sapien
tttccatgcaaactcagaagcatcg

SEQ ID NO: 3818642 - DNA, 25 bp, Homo sapien
catctagtttccatgcaaactcaga

SEQ ID NO: 3818643 - DNA, 25 bp, Homo sapien
tgcaaactcagaagcatcgatgcta

SEQ ID NO: 3818644 - DNA, 25 bp, Homo sapien
cagaagcatcgatgctaatcacatt

SEQ ID NO: 3818645 - DNA, 25 bp, Homo sapien
tctcacagtgaaaggcaagtgcaga

SEQ ID NO: 3818646 - DNA, 25 bp, Homo sapien
ctcacagtgaaaggcaagtgcagac

SEQ ID NO: 3818647 - DNA, 25 bp, Homo sapien
cacagtgaaaggcaagtgcagacat

SEQ ID NO: 3818648 - DNA, 25 bp, Homo sapien
catctcacagtgaaaggcaagtgca

SEQ ID NO: 3818649 - DNA, 25 bp, Homo sapien
caaaaatgcatgacctcattccaat

SEQ ID NO: 3818650 - DNA, 25 bp, Homo sapien
ccagtaataagaagtatcatgatcc

SEQ ID NO: 3818651 - DNA, 25 bp, Homo sapien
tggtattctcccaaaaatgcatgac

SEQ ID NO: 3818652 - DNA, 25 bp, Homo sapien
atcatgatcccactgatatggtgca

SEQ ID NO: 3818653 - DNA, 25 bp, Homo sapien
cattagctaaaagactggcaatctg

SEQ ID NO: 3818654 - DNA, 25 bp, Homo sapien
catcgtggaaatgtgcagaagaaag

SEQ ID NO: 3818655 - DNA, 25 bp, Homo sapien
tctgttcctgcgacattgtgatgga

SEQ ID NO: 3818656 - DNA, 25 bp, Homo sapien
tgtctgggtaactagaatactccga

SEQ ID NO: 3818657 - DNA, 25 bp, Homo sapien
ccatatcaggcaagatggactgata

SEQ ID NO: 3818658 - DNA, 25 bp, Homo sapien
ttggcagacagagtgcaattttcac

SEQ ID NO: 3818659 - DNA, 25 bp, Homo sapien
ggcagacagagtgcaattttcacca

SEQ ID NO: 3818660 - DNA, 25 bp, Homo sapien
ggcaagatggactgatataaatgtt

SEQ ID NO: 3818661 - DNA, 25 bp, Homo sapien
gccacagggtgatctctcatgtgta

SEQ ID NO: 3818662 - DNA, 25 bp, Homo sapien
cagggtgatctctcatgtgtatcgc

SEQ ID NO: 3818663 - DNA, 25 bp, Homo sapien
gtgatctctcatgtgtatcgcccat

SEQ ID NO: 3818664 - DNA, 25 bp, Homo sapien
cacagggtgatctctcatgtgtatc

SEQ ID NO: 3818665 - DNA, 25 bp, Homo sapien
tgtatttctgaacatgtaagtggct

SEQ ID NO: 3818666 - DNA, 25 bp, Homo sapien
tctgaacatgtaagtggctttgagc

SEQ ID NO: 3818667 - DNA, 25 bp, Homo sapien
tcaaggtgaacaagaatagaaatat

SEQ ID NO: 3818668 - DNA, 25 bp, Homo sapien
tagaaatatggaaggcaccaacaga

SEQ ID NO: 3818669 - DNA, 25 bp, Homo sapien
ctcttgggatcaggcggcagacaaa

SEQ ID NO: 3818670 - DNA, 25 bp, Homo sapien
gtctaagcctggtgtctctgagcag

SEQ ID NO: 3818671 - DNA, 25 bp, Homo sapien
ctgttcctagctcttgttcttcaaa

SEQ ID NO: 3818672 - DNA, 25 bp, Homo sapien
cagaaggttctcagagagtacccct

SEQ ID NO: 3818673 - DNA, 25 bp, Homo sapien
ggttctcagagagtacccctgttcc

SEQ ID NO: 3818674 - DNA, 25 bp, Homo sapien
cagagagtacccctgttcctagctc

SEQ ID NO: 3818675 - DNA, 25 bp, Homo sapien
gagtcgtcccctcatgagtctgaag

SEQ ID NO: 3818676 - DNA, 25 bp, Homo sapien
acgccacattgaagggagctggtct

SEQ ID NO: 3818677 - DNA, 25 bp, Homo sapien
aagaaagagtcgtcccctcatgagt

SEQ ID NO: 3818678 - DNA, 25 bp, Homo sapien
ccagtgctccaaacgccacattgaa

SEQ ID NO: 3818679 - DNA, 25 bp, Homo sapien
tcggggctgtcggaaaagtgacagg

SEQ ID NO: 3818680 - DNA, 25 bp, Homo sapien
ctgctccatcggcagtgccgtgagg

SEQ ID NO: 3818681 - DNA, 25 bp, Homo sapien
agtgggcacagggttagggaggtga

SEQ ID NO: 3818682 - DNA, 25 bp, Homo sapien
gctccagcattctctcggggctgtc

SEQ ID NO: 3818683 - DNA, 25 bp, Homo sapien
caaagtccccatcggtaggagtaca

SEQ ID NO: 3818684 - DNA, 25 bp, Homo sapien
gctctagattttgctgtgcctcgca

SEQ ID NO: 3818685 - DNA, 25 bp, Homo sapien
cacagatgtggcagcgatcatggcc

SEQ ID NO: 3818686 - DNA, 25 bp, Homo sapien
cctgggaacctcatttggtgggaag

SEQ ID NO: 3818687 - DNA, 25 bp, Homo sapien
ctgacaattctgttgggatctgggg

SEQ ID NO: 3818688 - DNA, 25 bp, Homo sapien
catgttgaagcaggtcaccaaaggt

SEQ ID NO: 3818689 - DNA, 25 bp, Homo sapien
atgttgaagcaggtcaccaaaggtc

SEQ ID NO: 3818690 - DNA, 25 bp, Homo sapien
cctgcacccagaaccactcaagaag

SEQ ID NO: 3818691 - DNA, 25 bp, Homo sapien
gaaccactcaagaagcagcgggggt

SEQ ID NO: 3818692 - DNA, 25 bp, Homo sapien
gcgggggtgggatgaacctccagga

SEQ ID NO: 3818693 - DNA, 25 bp, Homo sapien
gcacccagaaccactcaagaagcag

SEQ ID NO: 3818694 - DNA, 25 bp, Homo sapien
actgggatacttaagaaggagacac

SEQ ID NO: 3818695 - DNA, 25 bp, Homo sapien
tcctccgtggatgggtgattgcaag

SEQ ID NO: 3818696 - DNA, 25 bp, Homo sapien
ggagacacatggaaatgccatcttc

SEQ ID NO: 3818697 - DNA, 25 bp, Homo sapien
aatgccatcttctgaccagggagtc

SEQ ID NO: 3818698 - DNA, 25 bp, Homo sapien
acttgggcacgccatgccagctgca

SEQ ID NO: 3818699 - DNA, 25 bp, Homo sapien
ccgcacacacttgggcacgccatgc

SEQ ID NO: 3818700 - DNA, 25 bp, Homo sapien
atctgctgtgagatgccgggaaacg

SEQ ID NO: 3818701 - DNA, 25 bp, Homo sapien
ccaatctgctgtgagatgccgggaa

SEQ ID NO: 3818702 - DNA, 25 bp, Homo sapien
ggtatgcaccattttgttagcatgg

SEQ ID NO: 3818703 - DNA, 25 bp, Homo sapien
tctccctatccctatctcagcagct

SEQ ID NO: 3818704 - DNA, 25 bp, Homo sapien
gttagcatggaactctctccctatc

SEQ ID NO: 3818705 - DNA, 25 bp, Homo sapien
atgcaccattttgttagcatggaac

SEQ ID NO: 3818706 - DNA, 25 bp, Homo sapien
ttcatcctggtcatggggctctgcc

SEQ ID NO: 3818707 - DNA, 25 bp, Homo sapien
gctggtcagccggtgtagacatctg

SEQ ID NO: 3818708 - DNA, 25 bp, Homo sapien
gcctccaggctggtcagccggtgta

SEQ ID NO: 3818709 - DNA, 25 bp, Homo sapien
ccggtgtagacatctggtcattctt

SEQ ID NO: 3818710 - DNA, 25 bp, Homo sapien
ggcaggagcccacctgcagtacagc

SEQ ID NO: 3818711 - DNA, 25 bp, Homo sapien
tgctgttacccactctcaagcaaac

SEQ ID NO: 3818712 - DNA, 25 bp, Homo sapien
ggccactgccttaacctgagggtcc

SEQ ID NO: 3818713 - DNA, 25 bp, Homo sapien
caacgctgagctgaggtaaggcagc

SEQ ID NO: 3818714 - DNA, 25 bp, Homo sapien
cgctgagctgaggtaaggcagctct

SEQ ID NO: 3818715 - DNA, 25 bp, Homo sapien
ctgtgttgcactttgcttttcccat

SEQ ID NO: 3818716 - DNA, 25 bp, Homo sapien
tctcgtcggggactctgcatgcctt

SEQ ID NO: 3818717 - DNA, 25 bp, Homo sapien
tcctcttgctttagtttcatgccca

SEQ ID NO: 3818718 - DNA, 25 bp, Homo sapien
cagctccgggtgtcttctcgtcggg

SEQ ID NO: 3818719 - DNA, 25 bp, Homo sapien
tccagtactcttgccaagaatgctc

SEQ ID NO: 3818720 - DNA, 25 bp, Homo sapien
caaccacgtggcctatctctgcact

SEQ ID NO: 3818721 - DNA, 25 bp, Homo sapien
caagaatgctcgagcattctcacca

SEQ ID NO: 3818722 - DNA, 25 bp, Homo sapien
tggcctatctctgcactctcctgca

SEQ ID NO: 3818723 - DNA, 25 bp, Homo sapien
attgcacatggacccaccaggccac

SEQ ID NO: 3818724 - DNA, 25 bp, Homo sapien
cgaggccctcgtccattcccattgc

SEQ ID NO: 3818725 - DNA, 25 bp, Homo sapien
ttcccattgcacatggacccaccag

SEQ ID NO: 3818726 - DNA, 25 bp, Homo sapien
gaggccctcgtccattcccattgca

SEQ ID NO: 3818727 - DNA, 25 bp, Homo sapien
agaagcacccatgccccaacaccct

SEQ ID NO: 3818728 - DNA, 25 bp, Homo sapien
caacaccctctgtggtatccaccct

SEQ ID NO: 3818729 - DNA, 25 bp, Homo sapien
catgccccaacaccctctgtggtat

SEQ ID NO: 3818730 - DNA, 25 bp, Homo sapien
tctgtggtatccaccctcccgccca

SEQ ID NO: 3818731 - DNA, 25 bp, Homo sapien
ggaggctcgggtctgtatacatgca

SEQ ID NO: 3818732 - DNA, 25 bp, Homo sapien
taagatgcaggtgttgagagctcgg

SEQ ID NO: 3818733 - DNA, 25 bp, Homo sapien
gctcggtgttgcctgtaaaggtccc

SEQ ID NO: 3818734 - DNA, 25 bp, Homo sapien
ccatgtcctcggagccttaagatgc

SEQ ID NO: 3818735 - DNA, 25 bp, Homo sapien
gcccagtccatgctcaggtgggcca

SEQ ID NO: 3818736 - DNA, 25 bp, Homo sapien
caacttgccccagattgtgccttgg

SEQ ID NO: 3818737 - DNA, 25 bp, Homo sapien
agctcccacattggactcagttctg

SEQ ID NO: 3818738 - DNA, 25 bp, Homo sapien
ctttgggcctctcagagcttatttc

SEQ ID NO: 3818739 - DNA, 25 bp, Homo sapien
ccatcagagggatggccatcactca

SEQ ID NO: 3818740 - DNA, 25 bp, Homo sapien
ggggccatcagagggatggccatca

SEQ ID NO: 3818741 - DNA, 25 bp, Homo sapien
ggccatcagagggatggccatcact

SEQ ID NO: 3818742 - DNA, 25 bp, Homo sapien
tgggggccatcagagggatggccat

SEQ ID NO: 3818743 - DNA, 25 bp, Homo sapien
aggtgagcgagtgtgcacatctgga

SEQ ID NO: 3818744 - DNA, 25 bp, Homo sapien
agcgagtgtgcacatctggattcat

SEQ ID NO: 3818745 - DNA, 25 bp, Homo sapien
gagcgagtgtgcacatctggattca

SEQ ID NO: 3818746 - DNA, 25 bp, Homo sapien
gtgagcgagtgtgcacatctggatt

SEQ ID NO: 3818747 - DNA, 25 bp, Homo sapien
catcacagacgtagtgtgggctcca

SEQ ID NO: 3818748 - DNA, 25 bp, Homo sapien
catccagatcacattgggcagaggt

SEQ ID NO: 3818749 - DNA, 25 bp, Homo sapien
cctgggtggaagaacgctctggtcc

SEQ ID NO: 3818750 - DNA, 25 bp, Homo sapien
ttcaaggaacctgcgtgtggcaccc

SEQ ID NO: 3818751 - DNA, 25 bp, Homo sapien
caccttcatgctccgcactcagcac

SEQ ID NO: 3818752 - DNA, 25 bp, Homo sapien
gcagcacatgtctaagatacttctg

SEQ ID NO: 3818753 - DNA, 25 bp, Homo sapien
cagaaaagcagcacatgtctaagat

SEQ ID NO: 3818754 - DNA, 25 bp, Homo sapien
gcacatgtctaagatacttctgatg

SEQ ID NO: 3818755 - DNA, 25 bp, Homo sapien
agactctgcggtgcccaggtcagac

SEQ ID NO: 3818756 - DNA, 25 bp, Homo sapien
cctgtctcccaacccgctagactct

SEQ ID NO: 3818757 - DNA, 25 bp, Homo sapien
tcccaacccgctagactctgcggtg

SEQ ID NO: 3818758 - DNA, 25 bp, Homo sapien
ccacccatcccacggacagcactgt

SEQ ID NO: 3818759 - DNA, 25 bp, Homo sapien
gagtcgtgattagcatgaagaagcc

SEQ ID NO: 3818760 - DNA, 25 bp, Homo sapien
gaccgtaactgtggagactccgtga

SEQ ID NO: 3818761 - DNA, 25 bp, Homo sapien
cagcatgtcccttctcgtgggcggg

SEQ ID NO: 3818762 - DNA, 25 bp, Homo sapien
tgtgaaagacccagaaagggccctg

SEQ ID NO: 3818763 - DNA, 25 bp, Homo sapien
tgaccagccccatgacccctgggtg

SEQ ID NO: 3818764 - DNA, 25 bp, Homo sapien
ggcaggtgtggcatcaggctggcag

SEQ ID NO: 3818765 - DNA, 25 bp, Homo sapien
cacaagtgtgttggggtactgacgc

SEQ ID NO: 3818766 - DNA, 25 bp, Homo sapien
catcaggctggcagcttctgaccag

SEQ ID NO: 3818767 - DNA, 25 bp, Homo sapien
agctggaccccatgaggagctcagg

SEQ ID NO: 3818768 - DNA, 25 bp, Homo sapien
ttcttcatgtgtgtggatggaggca

SEQ ID NO: 3818769 - DNA, 25 bp, Homo sapien
gcagctggaccccatgaggagctca

SEQ ID NO: 3818770 - DNA, 25 bp, Homo sapien
gaccccatgaggagctcaggtcaca

SEQ ID NO: 3818771 - DNA, 25 bp, Homo sapien
atgacatttgcaggcaatagtgtag

SEQ ID NO: 3818772 - DNA, 25 bp, Homo sapien
ggcaatagtgtagctctggctctct

SEQ ID NO: 3818773 - DNA, 25 bp, Homo sapien
gcacagtgaccggaggtggccttgg

SEQ ID NO: 3818774 - DNA, 25 bp, Homo sapien
catttgcaggcaatagtgtagctct

SEQ ID NO: 3818775 - DNA, 25 bp, Homo sapien
ctggcagggtcctgattgccgcgca

SEQ ID NO: 3818776 - DNA, 25 bp, Homo sapien
cctctggcagggtcctgattgccgc

SEQ ID NO: 3818777 - DNA, 25 bp, Homo sapien
ttcagcagctgagcgtgtgagttgg

SEQ ID NO: 3818778 - DNA, 25 bp, Homo sapien
gttcagcagctgagcgtgtgagttg

SEQ ID NO: 3818779 - DNA, 25 bp, Homo sapien
gcagccataaaaccatgcatccttc

SEQ ID NO: 3818780 - DNA, 25 bp, Homo sapien
tccaaaagccaatttggggattgtg

SEQ ID NO: 3818781 - DNA, 25 bp, Homo sapien
gatcctatcttggagctgagcatca

SEQ ID NO: 3818782 - DNA, 25 bp, Homo sapien
agcatcagcagccataaaaccatgc

SEQ ID NO: 3818783 - DNA, 25 bp, Homo sapien
ctggagcgtgggtctacagccttgg

SEQ ID NO: 3818784 - DNA, 25 bp, Homo sapien
gcgtgggtctacagccttggccaag

SEQ ID NO: 3818785 - DNA, 25 bp, Homo sapien
tgacatgtagatctttaagccgtgg

SEQ ID NO: 3818786 - DNA, 25 bp, Homo sapien
tgtagatctttaagccgtggctgga

SEQ ID NO: 3818787 - DNA, 25 bp, Homo sapien
cgccaatgatcaggctcccagactt

SEQ ID NO: 3818788 - DNA, 25 bp, Homo sapien
gtggaatgcctgagcgtgcactagc

SEQ ID NO: 3818789 - DNA, 25 bp, Homo sapien
tttctgagtccaggggatgccgcca

SEQ ID NO: 3818790 - DNA, 25 bp, Homo sapien
gcctgagcgtgcactagctgggcct

SEQ ID NO: 3818791 - DNA, 25 bp, Homo sapien
taagcccagccttaattaggtggac

SEQ ID NO: 3818792 - DNA, 25 bp, Homo sapien
ctgttagggtgactaagcccagcct

SEQ ID NO: 3818793 - DNA, 25 bp, Homo sapien
ccagccttaattaggtggactctga

SEQ ID NO: 3818794 - DNA, 25 bp, Homo sapien
tagggtgactaagcccagccttaat

SEQ ID NO: 3818795 - DNA, 25 bp, Homo sapien
tgagaaatacccttcctctttttga

SEQ ID NO: 3818796 - DNA, 25 bp, Homo sapien
tgtctcaaggccctgctacaaggct

SEQ ID NO: 3818797 - DNA, 25 bp, Homo sapien
tccacatgtcgaagacccagctgtc

SEQ ID NO: 3818798 - DNA, 25 bp, Homo sapien
tattttctcgttcacctggaatgcc

SEQ ID NO: 3818799 - DNA, 25 bp, Homo sapien
taagtttgtgtccttcgcctgctgg

SEQ ID NO: 3818800 - DNA, 25 bp, Homo sapien
ctttgatcatcattggcagcttctc

SEQ ID NO: 3818801 - DNA, 25 bp, Homo sapien
catgactatgaatctggttttccaa

SEQ ID NO: 3818802 - DNA, 25 bp, Homo sapien
gaatattctgatctccattgagtta

SEQ ID NO: 3818803 - DNA, 25 bp, Homo sapien
taattaggtatagcttgtcaccaga

SEQ ID NO: 3818804 - DNA, 25 bp, Homo sapien
tattaattgtacgaggcaaagtcct

SEQ ID NO: 3818805 - DNA, 25 bp, Homo sapien
ccaaatgatattgcccttcagggag

SEQ ID NO: 3818806 - DNA, 25 bp, Homo sapien
tctttatgaggaggtgcaaacccac

SEQ ID NO: 3818807 - DNA, 25 bp, Homo sapien
gaggagctctccctatccatgaaat

SEQ ID NO: 3818808 - DNA, 25 bp, Homo sapien
tagttttggactgttcaccgagagg

SEQ ID NO: 3818809 - DNA, 25 bp, Homo sapien
ttaatccaaagtcagaagtttccga

SEQ ID NO: 3818810 - DNA, 25 bp, Homo sapien
aatccaaagtcagaagtttccgaag

SEQ ID NO: 3818811 - DNA, 25 bp, Homo sapien
caaagtcagaagtttccgaagaact

SEQ ID NO: 3818812 - DNA, 25 bp, Homo sapien
tccaaagtcagaagtttccgaagaa

SEQ ID NO: 3818813 - DNA, 25 bp, Homo sapien
caatatcgtaacaaaagtgatactg

SEQ ID NO: 3818814 - DNA, 25 bp, Homo sapien
tcaagcacaatatcgtaacaaaagt

SEQ ID NO: 3818815 - DNA, 25 bp, Homo sapien
gcacaatatcgtaacaaaagtgata

SEQ ID NO: 3818816 - DNA, 25 bp, Homo sapien
tatcgtaacaaaagtgatactgctc

SEQ ID NO: 3818817 - DNA, 25 bp, Homo sapien
tcgtttgaaccatgccagaacgttg

SEQ ID NO: 3818818 - DNA, 25 bp, Homo sapien
tgaaccatgccagaacgttgttctc

SEQ ID NO: 3818819 - DNA, 25 bp, Homo sapien
tgccagaacgttgttctctcatttg

SEQ ID NO: 3818820 - DNA, 25 bp, Homo sapien
cttcgtttgaaccatgccagaacgt

SEQ ID NO: 3818821 - DNA, 25 bp, Homo sapien
tgaacagttctttacgatggcacag

SEQ ID NO: 3818822 - DNA, 25 bp, Homo sapien
actgcagtgaacaaccatgggtcct

SEQ ID NO: 3818823 - DNA, 25 bp, Homo sapien
tgtccggcctatgccggcactgcag

SEQ ID NO: 3818824 - DNA, 25 bp, Homo sapien
gaacacgacatccacacataggaac

SEQ ID NO: 3818825 - DNA, 25 bp, Homo sapien
aaagtcatctatggtgctcagcagt

SEQ ID NO: 3818826 - DNA, 25 bp, Homo sapien
ttccaagaggaacgcgtgttgaatc

SEQ ID NO: 3818827 - DNA, 25 bp, Homo sapien
tctccaggaatacacggaagtgttt

SEQ ID NO: 3818828 - DNA, 25 bp, Homo sapien
cagcagtggtccttgagtagcgata

SEQ ID NO: 3818829 - DNA, 25 bp, Homo sapien
gagtgatattatcctgcaaatctga

SEQ ID NO: 3818830 - DNA, 25 bp, Homo sapien
gaagtatcctatagtttgcaactga

SEQ ID NO: 3818831 - DNA, 25 bp, Homo sapien
gaatgatatcattagcatccaggta

SEQ ID NO: 3818832 - DNA, 25 bp, Homo sapien
aatttctgctagaagtggcatgggc

SEQ ID NO: 3818833 - DNA, 25 bp, Homo sapien
cttcactgctccaggagttccttct

SEQ ID NO: 3818834 - DNA, 25 bp, Homo sapien
actgctccaggagttccttcttcac

SEQ ID NO: 3818835 - DNA, 25 bp, Homo sapien
accttcactgctccaggagttcctt

SEQ ID NO: 3818836 - DNA, 25 bp, Homo sapien
taaccttcactgctccaggagttcc

SEQ ID NO: 3818837 - DNA, 25 bp, Homo sapien
atctgaagctctggttccaccacca

SEQ ID NO: 3818838 - DNA, 25 bp, Homo sapien
ctgacacagacatctgaagctctgg

SEQ ID NO: 3818839 - DNA, 25 bp, Homo sapien
acacagacatctgaagctctggttc

SEQ ID NO: 3818840 - DNA, 25 bp, Homo sapien
tctgaagctctggttccaccaccat

SEQ ID NO: 3818841 - DNA, 25 bp, Homo sapien
aagcagtctctaccaaggcccagta

SEQ ID NO: 3818842 - DNA, 25 bp, Homo sapien
ggcaactcctcatgagacaacaggt

SEQ ID NO: 3818843 - DNA, 25 bp, Homo sapien
tctaaaatcctacgtgcctgcactg

SEQ ID NO: 3818844 - DNA, 25 bp, Homo sapien
ggatctgctcaagcccaatgttgta

SEQ ID NO: 3818845 - DNA, 25 bp, Homo sapien
taatatgagtcttcaggaacctttt

SEQ ID NO: 3818846 - DNA, 25 bp, Homo sapien
gctttcttaatatgagtcttcagga

SEQ ID NO: 3818847 - DNA, 25 bp, Homo sapien
tttagctttcttaatatgagtcttc

SEQ ID NO: 3818848 - DNA, 25 bp, Homo sapien
ttcttaatatgagtcttcaggaacc

SEQ ID NO: 3818849 - DNA, 25 bp, Homo sapien
tggaagaatatctcggtatctgttt

SEQ ID NO: 3818850 - DNA, 25 bp, Homo sapien
atggaagaatatctcggtatctgtt

SEQ ID NO: 3818851 - DNA, 25 bp, Homo sapien
ggaagaatatctcggtatctgtttt

SEQ ID NO: 3818852 - DNA, 25 bp, Homo sapien
ctgttgcttggttgattcccagagt

SEQ ID NO: 3818853 - DNA, 25 bp, Homo sapien
caccaggcagattcttaagttctaa

SEQ ID NO: 3818854 - DNA, 25 bp, Homo sapien
actcaccaggcagattcttaagttc

SEQ ID NO: 3818855 - DNA, 25 bp, Homo sapien
gcttggttgattcccagagttgaac

SEQ ID NO: 3818856 - DNA, 25 bp, Homo sapien
tcacatatagactttcgttaagaaa

SEQ ID NO: 3818857 - DNA, 25 bp, Homo sapien
gccaactgatctagttctccttcag

SEQ ID NO: 3818858 - DNA, 25 bp, Homo sapien
gatggctgtctgctcatgaaaattg

SEQ ID NO: 3818859 - DNA, 25 bp, Homo sapien
ttgaatattaatggccgaatctgag

SEQ ID NO: 3818860 - DNA, 25 bp, Homo sapien
aattcctgcatgatatcatacgctg

SEQ ID NO: 3818861 - DNA, 25 bp, Homo sapien
gtgttccacctttgctagtacaaaa

SEQ ID NO: 3818862 - DNA, 25 bp, Homo sapien
tgttccacctttgctagtacaaaag

SEQ ID NO: 3818863 - DNA, 25 bp, Homo sapien
tagaaatatctttgtgcatatctct

SEQ ID NO: 3818864 - DNA, 25 bp, Homo sapien
tgctactacaaataggatgatgtca

SEQ ID NO: 3818865 - DNA, 25 bp, Homo sapien
aaaatagagcctcaacttgctacta

SEQ ID NO: 3818866 - DNA, 25 bp, Homo sapien
tatctttgtgcatatctctaaaata

SEQ ID NO: 3818867 - DNA, 25 bp, Homo sapien
ctgtccacatgctgggatcactgcc

SEQ ID NO: 3818868 - DNA, 25 bp, Homo sapien
tacttttaccttgcaaactagtcgc

SEQ ID NO: 3818869 - DNA, 25 bp, Homo sapien
ttgcaaactagtcgcctcagatcca

SEQ ID NO: 3818870 - DNA, 25 bp, Homo sapien
aaactagtcgcctcagatccatcca

SEQ ID NO: 3818871 - DNA, 25 bp, Homo sapien
ttaccttgcaaactagtcgcctcag

SEQ ID NO: 3818872 - DNA, 25 bp, Homo sapien
taatcattatgtgggaaattccgaa

SEQ ID NO: 3818873 - DNA, 25 bp, Homo sapien
ttctgaaggctcttcaaaaacatcc

SEQ ID NO: 3818874 - DNA, 25 bp, Homo sapien
tgaaggctcttcaaaaacatcctca

SEQ ID NO: 3818875 - DNA, 25 bp, Homo sapien
tatgtgggaaattccgaagagaaag

SEQ ID NO: 3818876 - DNA, 25 bp, Homo sapien
tgatctaggtgtgttttcctgactt

SEQ ID NO: 3818877 - DNA, 25 bp, Homo sapien
gcttcagagtcatttccctcataat

SEQ ID NO: 3818878 - DNA, 25 bp, Homo sapien
ggaaaaactgatcaaatagaaaaca

SEQ ID NO: 3818879 - DNA, 25 bp, Homo sapien
gtcaggccaaaggtctagttagtat

SEQ ID NO: 3818880 - DNA, 25 bp, Homo sapien
agtcaggccaaaggtctagttagta

SEQ ID NO: 3818881 - DNA, 25 bp, Homo sapien
aaaaggagccttagtgtcctgtgag

SEQ ID NO: 3818882 - DNA, 25 bp, Homo sapien
ccttagtgtcctgtgagtcaggcca

SEQ ID NO: 3818883 - DNA, 25 bp, Homo sapien
taatgacaggccatcccaaagatta

SEQ ID NO: 3818884 - DNA, 25 bp, Homo sapien
taaggcaaaagataagtggaatgtc

SEQ ID NO: 3818885 - DNA, 25 bp, Homo sapien
gccagtgaaaaacctagatcctcaa

SEQ ID NO: 3818886 - DNA, 25 bp, Homo sapien
tctaacattggttcaaaacgccagt

SEQ ID NO: 3818887 - DNA, 25 bp, Homo sapien
agccaatttgaaaggctgcatacta

SEQ ID NO: 3818888 - DNA, 25 bp, Homo sapien
ggttattttgcatatatggcccttt

SEQ ID NO: 3818889 - DNA, 25 bp, Homo sapien
gggttgagctagaataatgaacaga

SEQ ID NO: 3818890 - DNA, 25 bp, Homo sapien
caataagctatcaagctataataag

SEQ ID NO: 3818891 - DNA, 25 bp, Homo sapien
ctgtcccgctgcaaccccagcagcc

SEQ ID NO: 3818892 - DNA, 25 bp, Homo sapien
aactgtcccgctgcaaccccagcag

SEQ ID NO: 3818893 - DNA, 25 bp, Homo sapien
caactgtcccgctgcaaccccagca

SEQ ID NO: 3818894 - DNA, 25 bp, Homo sapien
actgtcccgctgcaaccccagcagc

SEQ ID NO: 3818895 - DNA, 25 bp, Homo sapien
tcaagattctgcactggtcatcatt

SEQ ID NO: 3818896 - DNA, 25 bp, Homo sapien
tcatttcacaaacatgagcagcatg

SEQ ID NO: 3818897 - DNA, 25 bp, Homo sapien
tttcacaaacatgagcagcatggct

SEQ ID NO: 3818898 - DNA, 25 bp, Homo sapien
gattctgcactggtcatcatttcac

SEQ ID NO: 3818899 - DNA, 25 bp, Homo sapien
caccaggaaatccttgcatggaggc

SEQ ID NO: 3818900 - DNA, 25 bp, Homo sapien
taagagtggaccctgaggtgtcatt

SEQ ID NO: 3818901 - DNA, 25 bp, Homo sapien
tggaggctaaatgaacagttggtaa

SEQ ID NO: 3818902 - DNA, 25 bp, Homo sapien
tgcttgaccacacaatattcccaga

SEQ ID NO: 3818903 - DNA, 25 bp, Homo sapien
acagggctgggaagtcgcttggttg

SEQ ID NO: 3818904 - DNA, 25 bp, Homo sapien
ggaagtcgcttggttgtcccctgcc

SEQ ID NO: 3818905 - DNA, 25 bp, Homo sapien
gcaggcccagtttcactctcaggtc

SEQ ID NO: 3818906 - DNA, 25 bp, Homo sapien
cagacaccgcctccttatttcctgc

SEQ ID NO: 3818907 - DNA, 25 bp, Homo sapien
gcagaagaagccaaatgacccataa

SEQ ID NO: 3818908 - DNA, 25 bp, Homo sapien
tgagagaatttagaacaaggctgtt

SEQ ID NO: 3818909 - DNA, 25 bp, Homo sapien
gtgaaactgtaatgatgcaccaggg

SEQ ID NO: 3818910 - DNA, 25 bp, Homo sapien
gaagccaaatgacccataagatttt

SEQ ID NO: 3818911 - DNA, 25 bp, Homo sapien
ttccaaggtgaactatgaagtgcac

SEQ ID NO: 3818912 - DNA, 25 bp, Homo sapien
cactgtatctgtcccggagagtgtg

SEQ ID NO: 3818913 - DNA, 25 bp, Homo sapien
ccttaacagagtccttccactgtga

SEQ ID NO: 3818914 - DNA, 25 bp, Homo sapien
tattacacccataaccttggagcca

SEQ ID NO: 3818915 - DNA, 25 bp, Homo sapien
tttgcaggagcctacaggtttcttt

SEQ ID NO: 3818916 - DNA, 25 bp, Homo sapien
gagctggtgggtacactctttggac

SEQ ID NO: 3818917 - DNA, 25 bp, Homo sapien
aggtcacctttgcaggagcctacag

SEQ ID NO: 3818918 - DNA, 25 bp, Homo sapien
gctcttaacaactgggccaggccct

SEQ ID NO: 3818919 - DNA, 25 bp, Homo sapien
tgcctcggaagacggctgttctctg

SEQ ID NO: 3818920 - DNA, 25 bp, Homo sapien
gtccaaaggacctccatgcagaaac

SEQ ID NO: 3818921 - DNA, 25 bp, Homo sapien
tctctgcctcggaagacggctgttc

SEQ ID NO: 3818922 - DNA, 25 bp, Homo sapien
aggacctccatgcagaaaccctcag

SEQ ID NO: 3818923 - DNA, 25 bp, Homo sapien
cagttccgtcctcttcttaatccca

SEQ ID NO: 3818924 - DNA, 25 bp, Homo sapien
gcagcttttaatgggtgacctcgtc

SEQ ID NO: 3818925 - DNA, 25 bp, Homo sapien
ctgagcaagggagttttccttagcc

SEQ ID NO: 3818926 - DNA, 25 bp, Homo sapien
ttttgccagtagccttccctaaaca

SEQ ID NO: 3818927 - DNA, 25 bp, Homo sapien
ccactctccttatcagctggcccac

SEQ ID NO: 3818928 - DNA, 25 bp, Homo sapien
tcaaatatccactctccttatcagc

SEQ ID NO: 3818929 - DNA, 25 bp, Homo sapien
atatccactctccttatcagctggc

SEQ ID NO: 3818930 - DNA, 25 bp, Homo sapien
aaatatccactctccttatcagctg

SEQ ID NO: 3818931 - DNA, 25 bp, Homo sapien
gctcaatcatttgtggtggctgagc

SEQ ID NO: 3818932 - DNA, 25 bp, Homo sapien
gagcttccttatgtacagccaggaa

SEQ ID NO: 3818933 - DNA, 25 bp, Homo sapien
cagctcaatcatttgtggtggctga

SEQ ID NO: 3818934 - DNA, 25 bp, Homo sapien
ctcaatcatttgtggtggctgagct

SEQ ID NO: 3818935 - DNA, 25 bp, Homo sapien
tgagggcaccgtattccagggccac

SEQ ID NO: 3818936 - DNA, 25 bp, Homo sapien
ctgagggcaccgtattccagggcca

SEQ ID NO: 3818937 - DNA, 25 bp, Homo sapien
agggcaccgtattccagggccacag

SEQ ID NO: 3818938 - DNA, 25 bp, Homo sapien
gcaccgtattccagggccacaggct

SEQ ID NO: 3818939 - DNA, 25 bp, Homo sapien
gtaagatactcttcatcctccgagg

SEQ ID NO: 3818940 - DNA, 25 bp, Homo sapien
catggatggtacatgtcaccttccc

SEQ ID NO: 3818941 - DNA, 25 bp, Homo sapien
ttcacagggtagctggccttggcat

SEQ ID NO: 3818942 - DNA, 25 bp, Homo sapien
catgtagagttgatggtaagatact

SEQ ID NO: 3818943 - DNA, 25 bp, Homo sapien
atacagaagcccatgtttcttccag

SEQ ID NO: 3818944 - DNA, 25 bp, Homo sapien
cagccttgataaaaaaaattcctca

SEQ ID NO: 3818945 - DNA, 25 bp, Homo sapien
ctagaatacagaagcccatgtttct

SEQ ID NO: 3818946 - DNA, 25 bp, Homo sapien
gaatacagaagcccatgtttcttcc

SEQ ID NO: 3818947 - DNA, 25 bp, Homo sapien
atactctgcacgacacaggcccgtg

SEQ ID NO: 3818948 - DNA, 25 bp, Homo sapien
agtgttcaaacagctcatgccagag

SEQ ID NO: 3818949 - DNA, 25 bp, Homo sapien
caggcccgtgagactcagccagtgt

SEQ ID NO: 3818950 - DNA, 25 bp, Homo sapien
tagaatactctgcacgacacaggcc

SEQ ID NO: 3818951 - DNA, 25 bp, Homo sapien
gaaatgttacagtccatgtaggaag

SEQ ID NO: 3818952 - DNA, 25 bp, Homo sapien
tggagcaccttaccgagctcaggag

SEQ ID NO: 3818953 - DNA, 25 bp, Homo sapien
gggcaatgacccagttctaagacag

SEQ ID NO: 3818954 - DNA, 25 bp, Homo sapien
tctaagacagactcgtcacatggca

SEQ ID NO: 3818955 - DNA, 25 bp, Homo sapien
gaagtgacatttactccccgcggaa

SEQ ID NO: 3818956 - DNA, 25 bp, Homo sapien
ttgggagtgactcaagcaggcaacc

SEQ ID NO: 3818957 - DNA, 25 bp, Homo sapien
cctatttagagatgcggcaagctga

SEQ ID NO: 3818958 - DNA, 25 bp, Homo sapien
tcattatctggtgatgcagccgcag

SEQ ID NO: 3818959 - DNA, 25 bp, Homo sapien
aatatctgtcgaaagtctggttaga

SEQ ID NO: 3818960 - DNA, 25 bp, Homo sapien
aaaatatctgtcgaaagtctggtta

SEQ ID NO: 3818961 - DNA, 25 bp, Homo sapien
aaatatctgtcgaaagtctggttag

SEQ ID NO: 3818962 - DNA, 25 bp, Homo sapien
tttgattctgagctccagctactgg

SEQ ID NO: 3818963 - DNA, 25 bp, Homo sapien
tccagctactggctctgcctggaca

SEQ ID NO: 3818964 - DNA, 25 bp, Homo sapien
ttgattctgagctccagctactggc

SEQ ID NO: 3818965 - DNA, 25 bp, Homo sapien
ccacctcttctaataagctccttgc

SEQ ID NO: 3818966 - DNA, 25 bp, Homo sapien
cccaagggtgaaatcgtggccatca

SEQ ID NO: 3818967 - DNA, 25 bp, Homo sapien
tctatccttttgcacgtgccatcag

SEQ ID NO: 3818968 - DNA, 25 bp, Homo sapien
ccttggagatttgacctggggctca

SEQ ID NO: 3818969 - DNA, 25 bp, Homo sapien
catcccaccacaagttgggagaacg

SEQ ID NO: 3818970 - DNA, 25 bp, Homo sapien
tccaacatcaggccccatactgatg

SEQ ID NO: 3818971 - DNA, 25 bp, Homo sapien
agttctccaacatcaggccccatac

SEQ ID NO: 3818972 - DNA, 25 bp, Homo sapien
tggggtttgtgtcccttcatgtctc

SEQ ID NO: 3818973 - DNA, 25 bp, Homo sapien
tccagttctccaacatcaggcccca

SEQ ID NO: 3818974 - DNA, 25 bp, Homo sapien
aaactgaatagcagttttgcctcac

SEQ ID NO: 3818975 - DNA, 25 bp, Homo sapien
tcacaaactgaatagcagttttgcc

SEQ ID NO: 3818976 - DNA, 25 bp, Homo sapien
ttccaagtctcatgatatcacaaac

SEQ ID NO: 3818977 - DNA, 25 bp, Homo sapien
catgatatcacaaactgaatagcag

SEQ ID NO: 3818978 - DNA, 25 bp, Homo sapien
tgagtcagtacatgttgccctggtg

SEQ ID NO: 3818979 - DNA, 25 bp, Homo sapien
gaatgtgtcaaggaactggcccaag

SEQ ID NO: 3818980 - DNA, 25 bp, Homo sapien
tctgatggccttttgggaagactct

SEQ ID NO: 3818981 - DNA, 25 bp, Homo sapien
caaagaggtcgccaatgttgattca

SEQ ID NO: 3818982 - DNA, 25 bp, Homo sapien
gcccctctcagtaaatgcagcacct

SEQ ID NO: 3818983 - DNA, 25 bp, Homo sapien
cagcgcacctggagggggtcggcaa

SEQ ID NO: 3818984 - DNA, 25 bp, Homo sapien
caaaggaggagcgtgacttcctgtg

SEQ ID NO: 3818985 - DNA, 25 bp, Homo sapien
gggtcggcaaaggaggagcgtgact

SEQ ID NO: 3818986 - DNA, 25 bp, Homo sapien
tcctccctgcaccttgatctatttc

SEQ ID NO: 3818987 - DNA, 25 bp, Homo sapien
gattcactgttagatttgggcttgc

SEQ ID NO: 3818988 - DNA, 25 bp, Homo sapien
tgctggggatgcagtgatgttctcc

SEQ ID NO: 3818989 - DNA, 25 bp, Homo sapien
ccactgcgtcccaggcactagctcc

SEQ ID NO: 3818990 - DNA, 25 bp, Homo sapien
cttttcaaagtgcaaggaaccaagg

SEQ ID NO: 3818991 - DNA, 25 bp, Homo sapien
agtgcaaggaaccaaggtcagtggc

SEQ ID NO: 3818992 - DNA, 25 bp, Homo sapien
tttcaaagtgcaaggaaccaaggtc

SEQ ID NO: 3818993 - DNA, 25 bp, Homo sapien
caaagtgcaaggaaccaaggtcagt

SEQ ID NO: 3818994 - DNA, 25 bp, Homo sapien
tgcacagagagctgcattgcccatg

SEQ ID NO: 3818995 - DNA, 25 bp, Homo sapien
acggcagcaggctagtaagaggcaa

SEQ ID NO: 3818996 - DNA, 25 bp, Homo sapien
cacggcagcaggctagtaagaggca

SEQ ID NO: 3818997 - DNA, 25 bp, Homo sapien
gcacagagagctgcattgcccatga

SEQ ID NO: 3818998 - DNA, 25 bp, Homo sapien
gtggaccttccattcacggccagga

SEQ ID NO: 3818999 - DNA, 25 bp, Homo sapien
cggccaggataatgtcaccagctgc

SEQ ID NO: 3819000 - DNA, 25 bp, Homo sapien
aactgaatcccaaaccattggcatt

SEQ ID NO: 3819001 - DNA, 25 bp, Homo sapien
gaagatgaggccttccgtggacctt

SEQ ID NO: 3819002 - DNA, 25 bp, Homo sapien
catctgtcaccgagacacagctcga

SEQ ID NO: 3819003 - DNA, 25 bp, Homo sapien
caggcaaggctgttaccaaggaaac

SEQ ID NO: 3819004 - DNA, 25 bp, Homo sapien
aaacagccgtgcgttcatctcccat

SEQ ID NO: 3819005 - DNA, 25 bp, Homo sapien
accgagacacagctcgaaggcctgc

SEQ ID NO: 3819006 - DNA, 25 bp, Homo sapien
gctgtcattagcagaaggacactgc

SEQ ID NO: 3819007 - DNA, 25 bp, Homo sapien
tgtcattagcagaaggacactgctg

SEQ ID NO: 3819008 - DNA, 25 bp, Homo sapien
ttctctctaagaccagtcttgcaac

SEQ ID NO: 3819009 - DNA, 25 bp, Homo sapien
ctgtcattagcagaaggacactgct

SEQ ID NO: 3819010 - DNA, 25 bp, Homo sapien
tgtctgcaaccttcttggtccaccc

SEQ ID NO: 3819011 - DNA, 25 bp, Homo sapien
tggctcgctggaccctgtctgcaac

SEQ ID NO: 3819012 - DNA, 25 bp, Homo sapien
cttggctcgctggaccctgtctgca

SEQ ID NO: 3819013 - DNA, 25 bp, Homo sapien
ctgcaaccttcttggtccaccccat

SEQ ID NO: 3819014 - DNA, 25 bp, Homo sapien
gcctgcttgtgggtgaggccgcaca

SEQ ID NO: 3819015 - DNA, 25 bp, Homo sapien
gtgaggccgcacagaatcactccat

SEQ ID NO: 3819016 - DNA, 25 bp, Homo sapien
acagcctgcttgtgggtgaggccgc

SEQ ID NO: 3819017 - DNA, 25 bp, Homo sapien
ttgtgggtgaggccgcacagaatca

SEQ ID NO: 3819018 - DNA, 25 bp, Homo sapien
ccccggatgtgcgagtgagtttacc

SEQ ID NO: 3819019 - DNA, 25 bp, Homo sapien
tatgttttcccatggaggccaaaga

SEQ ID NO: 3819020 - DNA, 25 bp, Homo sapien
tgagtttaccgaggcccacttgtcc

SEQ ID NO: 3819021 - DNA, 25 bp, Homo sapien
caacctatcaaatgggcagggcaga

SEQ ID NO: 3819022 - DNA, 25 bp, Homo sapien
tggatttcacatagataccaccata

SEQ ID NO: 3819023 - DNA, 25 bp, Homo sapien
tagataccaccatatggcacactgg

SEQ ID NO: 3819024 - DNA, 25 bp, Homo sapien
agataccaccatatggcacactggt

SEQ ID NO: 3819025 - DNA, 25 bp, Homo sapien
caatggatttcacatagataccacc

SEQ ID NO: 3819026 - DNA, 25 bp, Homo sapien
agattaggtgttcataagcttaaca

SEQ ID NO: 3819027 - DNA, 25 bp, Homo sapien
atccaagtgtcccatcttctttaac

SEQ ID NO: 3819028 - DNA, 25 bp, Homo sapien
agcactgatttctggaggtgatgga

SEQ ID NO: 3819029 - DNA, 25 bp, Homo sapien
atggaggacaagaagaaccagcacc

SEQ ID NO: 3819030 - DNA, 25 bp, Homo sapien
accagcactgatttctggaggtgat

SEQ ID NO: 3819031 - DNA, 25 bp, Homo sapien
aggaaagctgatgtctcagcctggg

SEQ ID NO: 3819032 - DNA, 25 bp, Homo sapien
tcagcctgggcactaagctctgcac

SEQ ID NO: 3819033 - DNA, 25 bp, Homo sapien
cagaaaggaaagctgatgtctcagc

SEQ ID NO: 3819034 - DNA, 25 bp, Homo sapien
gaaaggaaagctgatgtctcagcct

SEQ ID NO: 3819035 - DNA, 25 bp, Homo sapien
agctcaggatgtctgtagaggagac

SEQ ID NO: 3819036 - DNA, 25 bp, Homo sapien
gagaccccagaattggctgtgctat

SEQ ID NO: 3819037 - DNA, 25 bp, Homo sapien
tgtcctggtcttgtgtgtgtgacaa

SEQ ID NO: 3819038 - DNA, 25 bp, Homo sapien
aacttccctggtacccgaagctcag

SEQ ID NO: 3819039 - DNA, 25 bp, Homo sapien
tgactcctttggtaacacatgccga

SEQ ID NO: 3819040 - DNA, 25 bp, Homo sapien
taagtctcctagaaaacatttgcag

SEQ ID NO: 3819041 - DNA, 25 bp, Homo sapien
acatgccgatatataccactcaagg

SEQ ID NO: 3819042 - DNA, 25 bp, Homo sapien
cactcaaggcctgttggattaaact

SEQ ID NO: 3819043 - DNA, 25 bp, Homo sapien
tcactcccgagaagtagggatgggt

SEQ ID NO: 3819044 - DNA, 25 bp, Homo sapien
gtgtatgagaataagaaacggagcc

SEQ ID NO: 3819045 - DNA, 25 bp, Homo sapien
atgggttcggtgtatgagaataaga

SEQ ID NO: 3819046 - DNA, 25 bp, Homo sapien
tccagggttgagacaatttgcccaa

SEQ ID NO: 3819047 - DNA, 25 bp, Homo sapien
cttgcaggttcctgctctcccgtgg

SEQ ID NO: 3819048 - DNA, 25 bp, Homo sapien
aggtctcttgggcttgcaggttcct

SEQ ID NO: 3819049 - DNA, 25 bp, Homo sapien
tgtgggaagtacagttgcgatcccc

SEQ ID NO: 3819050 - DNA, 25 bp, Homo sapien
ctcttgtgggaagtacagttgcgat

SEQ ID NO: 3819051 - DNA, 25 bp, Homo sapien
ggcagaggttaacttttgccactcc

SEQ ID NO: 3819052 - DNA, 25 bp, Homo sapien
caaaagagggtattgaagccacgca

SEQ ID NO: 3819053 - DNA, 25 bp, Homo sapien
tgagcactgagtgctaggtcccttc

SEQ ID NO: 3819054 - DNA, 25 bp, Homo sapien
gagggtattgaagccacgcagtccc

SEQ ID NO: 3819055 - DNA, 25 bp, Homo sapien
caccagctttggagccggagagagc

SEQ ID NO: 3819056 - DNA, 25 bp, Homo sapien
tctgtagctctacatcagattcatg

SEQ ID NO: 3819057 - DNA, 25 bp, Homo sapien
ctgtagctctacatcagattcatgc

SEQ ID NO: 3819058 - DNA, 25 bp, Homo sapien
tgtagctctacatcagattcatgct

SEQ ID NO: 3819059 - DNA, 25 bp, Homo sapien
tctacatctggaaccatcggcagct

SEQ ID NO: 3819060 - DNA, 25 bp, Homo sapien
tatctctctacatctggaaccatcg

SEQ ID NO: 3819061 - DNA, 25 bp, Homo sapien
tctctacatctggaaccatcggcag

SEQ ID NO: 3819062 - DNA, 25 bp, Homo sapien
tctctctacatctggaaccatcggc

SEQ ID NO: 3819063 - DNA, 25 bp, Homo sapien
atatgatgaggtatctccaaggtca

SEQ ID NO: 3819064 - DNA, 25 bp, Homo sapien
tgtgtgatatgatgaggtatctcca

SEQ ID NO: 3819065 - DNA, 25 bp, Homo sapien
tatgatgaggtatctccaaggtcac

SEQ ID NO: 3819066 - DNA, 25 bp, Homo sapien
ctttgtgtgatatgatgaggtatct

SEQ ID NO: 3819067 - DNA, 25 bp, Homo sapien
tttgtacagttgcttcttcttattt

SEQ ID NO: 3819068 - DNA, 25 bp, Homo sapien
atggtttgtacagttgcttcttctt

SEQ ID NO: 3819069 - DNA, 25 bp, Homo sapien
ggtttgtacagttgcttcttcttat

SEQ ID NO: 3819070 - DNA, 25 bp, Homo sapien
cagttgcttcttcttatttctacaa

SEQ ID NO: 3819071 - DNA, 25 bp, Homo sapien
tgagagttcctctggaatattgtgt

SEQ ID NO: 3819072 - DNA, 25 bp, Homo sapien
gagttcctctggaatattgtgtttg

SEQ ID NO: 3819073 - DNA, 25 bp, Homo sapien
tgtttgcctctggattggcagaagg

SEQ ID NO: 3819074 - DNA, 25 bp, Homo sapien
tcctctggaatattgtgtttgcctc

SEQ ID NO: 3819075 - DNA, 25 bp, Homo sapien
gcatgtggaggtcctcaccaacttc

SEQ ID NO: 3819076 - DNA, 25 bp, Homo sapien
tgtggaggtcctcaccaacttcaac

SEQ ID NO: 3819077 - DNA, 25 bp, Homo sapien
tctcagattcagagggacacaccga

SEQ ID NO: 3819078 - DNA, 25 bp, Homo sapien
gccatgggcgctcctgccatcctgt

SEQ ID NO: 3819079 - DNA, 25 bp, Homo sapien
taaatcaagccattaagcgtaactg

SEQ ID NO: 3819080 - DNA, 25 bp, Homo sapien
tataaatctctgtaggctaagtcca

SEQ ID NO: 3819081 - DNA, 25 bp, Homo sapien
gactgccttgagaagttgtgtatag

SEQ ID NO: 3819082 - DNA, 25 bp, Homo sapien
gagcaactttgaatctatggttaca

SEQ ID NO: 3819083 - DNA, 25 bp, Homo sapien
aagtctacacttcttgatacaacta

SEQ ID NO: 3819084 - DNA, 25 bp, Homo sapien
tattatgtatagaaaagtctacact

SEQ ID NO: 3819085 - DNA, 25 bp, Homo sapien
cacttcttgatacaactaactaaaa

SEQ ID NO: 3819086 - DNA, 25 bp, Homo sapien
tactgtgggaaaaaggatattatgt

SEQ ID NO: 3819087 - DNA, 25 bp, Homo sapien
gttttacaaccctttgcaagcatat

SEQ ID NO: 3819088 - DNA, 25 bp, Homo sapien
ccctttgcaagcatatatgaaaaac

SEQ ID NO: 3819089 - DNA, 25 bp, Homo sapien
ttacaagacagtgcctgtatttctg

SEQ ID NO: 3819090 - DNA, 25 bp, Homo sapien
atttaaagttacaagacagtgcctg

SEQ ID NO: 3819091 - DNA, 25 bp, Homo sapien
gaaatccttaagagttctcatggac

SEQ ID NO: 3819092 - DNA, 25 bp, Homo sapien
tctggtgaaatccttaagagttctc

SEQ ID NO: 3819093 - DNA, 25 bp, Homo sapien
ggtgaaatccttaagagttctcatg

SEQ ID NO: 3819094 - DNA, 25 bp, Homo sapien
ggtctggtgaaatccttaagagttc

SEQ ID NO: 3819095 - DNA, 25 bp, Homo sapien
gatgagtgaccccattttaagacaa

SEQ ID NO: 3819096 - DNA, 25 bp, Homo sapien
tactggagatgagtgaccccatttt

SEQ ID NO: 3819097 - DNA, 25 bp, Homo sapien
cttaattctactggagatgagtgac

SEQ ID NO: 3819098 - DNA, 25 bp, Homo sapien
aattctactggagatgagtgacccc

SEQ ID NO: 3819099 - DNA, 25 bp, Homo sapien
tatacaggaattgagggcatatgag

SEQ ID NO: 3819100 - DNA, 25 bp, Homo sapien
caaagtggctctggtgtaggaggtt

SEQ ID NO: 3819101 - DNA, 25 bp, Homo sapien
ggagtgacccgagagtatacaggaa

SEQ ID NO: 3819102 - DNA, 25 bp, Homo sapien
tgctgtacactcaaaactactctaa

SEQ ID NO: 3819103 - DNA, 25 bp, Homo sapien
tctaagcaacgtcctcattggcagg

SEQ ID NO: 3819104 - DNA, 25 bp, Homo sapien
gaagctggcatccttacctgaaatt

SEQ ID NO: 3819105 - DNA, 25 bp, Homo sapien
caggacccttaagccagctgaatgt

SEQ ID NO: 3819106 - DNA, 25 bp, Homo sapien
tgcaaatatgacacagcgaggcccc

SEQ ID NO: 3819107 - DNA, 25 bp, Homo sapien
tgatgagtcatcaaatgggagaaat

SEQ ID NO: 3819108 - DNA, 25 bp, Homo sapien
agctgatgagtcatcaaatgggaga

SEQ ID NO: 3819109 - DNA, 25 bp, Homo sapien
gctagaaagccatgtgggggcagct

SEQ ID NO: 3819110 - DNA, 25 bp, Homo sapien
ctgtgagctagaaagccatgtgggg

SEQ ID NO: 3819111 - DNA, 25 bp, Homo sapien
ctctgatcgaccacaccacaatggt

SEQ ID NO: 3819112 - DNA, 25 bp, Homo sapien
cctcctgcccctctgatcgaccaca

SEQ ID NO: 3819113 - DNA, 25 bp, Homo sapien
ctgtcatccatgggcaaacaaacca

SEQ ID NO: 3819114 - DNA, 25 bp, Homo sapien
gatcgaccacaccacaatggtgtca

SEQ ID NO: 3819115 - DNA, 25 bp, Homo sapien
atagttcatgcatacataatctcag

SEQ ID NO: 3819116 - DNA, 25 bp, Homo sapien
aagttaattctatagttcatgcata

SEQ ID NO: 3819117 - DNA, 25 bp, Homo sapien
taattctatagttcatgcatacata

SEQ ID NO: 3819118 - DNA, 25 bp, Homo sapien
tctatagttcatgcatacataatct

SEQ ID NO: 3819119 - DNA, 25 bp, Homo sapien
gagccagacaggagcacacagaaca

SEQ ID NO: 3819120 - DNA, 25 bp, Homo sapien
ttgggattgacacacctctccagct

SEQ ID NO: 3819121 - DNA, 25 bp, Homo sapien
tattaacaccttgctgccttttgtg

SEQ ID NO: 3819122 - DNA, 25 bp, Homo sapien
tcagaggtacacttattaacacctt

SEQ ID NO: 3819123 - DNA, 25 bp, Homo sapien
aagacgttcgcacagaatcatctcc

SEQ ID NO: 3819124 - DNA, 25 bp, Homo sapien
aaaggagagaagacgttcgcacaga

SEQ ID NO: 3819125 - DNA, 25 bp, Homo sapien
gagagaagacgttcgcacagaatca

SEQ ID NO: 3819126 - DNA, 25 bp, Homo sapien
agaaaggagagaagacgttcgcaca

SEQ ID NO: 3819127 - DNA, 25 bp, Homo sapien
gcattcgaccagttttcaagtctat

SEQ ID NO: 3819128 - DNA, 25 bp, Homo sapien
cattcgaccagttttcaagtctatt

SEQ ID NO: 3819129 - DNA, 25 bp, Homo sapien
tttttcctcctttggcatcaacagc

SEQ ID NO: 3819130 - DNA, 25 bp, Homo sapien
ctatttgtttttcctcctttggcat

SEQ ID NO: 3819131 - DNA, 25 bp, Homo sapien
gaaacctacccatgggagataatac

SEQ ID NO: 3819132 - DNA, 25 bp, Homo sapien
aagatggcgtggtatttgaggaata

SEQ ID NO: 3819133 - DNA, 25 bp, Homo sapien
aaagcaacctatggaagatggcgtg

SEQ ID NO: 3819134 - DNA, 25 bp, Homo sapien
gactctgctctagtgtttcggccat

SEQ ID NO: 3819135 - DNA, 25 bp, Homo sapien
ctctgacccaagtggtttggaattg

SEQ ID NO: 3819136 - DNA, 25 bp, Homo sapien
ctgacccaagtggtttggaattgga

SEQ ID NO: 3819137 - DNA, 25 bp, Homo sapien
tctgacccaagtggtttggaattgg

SEQ ID NO: 3819138 - DNA, 25 bp, Homo sapien
cagcgtctttgtcatacagcacacc

SEQ ID NO: 3819139 - DNA, 25 bp, Homo sapien
agcgtctttgtcatacagcacaccc

SEQ ID NO: 3819140 - DNA, 25 bp, Homo sapien
ctccagaaacaggcgcataaaccag

SEQ ID NO: 3819141 - DNA, 25 bp, Homo sapien
tccagaaacaggcgcataaaccagc

SEQ ID NO: 3819142 - DNA, 25 bp, Homo sapien
gaaacaggcgcataaaccagctgct

SEQ ID NO: 3819143 - DNA, 25 bp, Homo sapien
cagaaacaggcgcataaaccagctg

SEQ ID NO: 3819144 - DNA, 25 bp, Homo sapien
aggcctacacatagctggcttactt

SEQ ID NO: 3819145 - DNA, 25 bp, Homo sapien
caggcctacacatagctggcttact

SEQ ID NO: 3819146 - DNA, 25 bp, Homo sapien
caagaatcctatgtgcaattctcgt

SEQ ID NO: 3819147 - DNA, 25 bp, Homo sapien
agaaatgaagccatcccaagaatcc

SEQ ID NO: 3819148 - DNA, 25 bp, Homo sapien
gaatcctatgtgcaattctcgtatg

SEQ ID NO: 3819149 - DNA, 25 bp, Homo sapien
atcctatgtgcaattctcgtatgtt

SEQ ID NO: 3819150 - DNA, 25 bp, Homo sapien
tgatgtttgtttggatatcctccgg

SEQ ID NO: 3819151 - DNA, 25 bp, Homo sapien
tgacacctgcaggtcacatttgatg

SEQ ID NO: 3819152 - DNA, 25 bp, Homo sapien
cacctgcaggtcacatttgatgttt

SEQ ID NO: 3819153 - DNA, 25 bp, Homo sapien
tttggatatcctccgggtttgtcaa

SEQ ID NO: 3819154 - DNA, 25 bp, Homo sapien
gtccattaagcacatcacttaggaa

SEQ ID NO: 3819155 - DNA, 25 bp, Homo sapien
cacactcttgtccattaagcacatc

SEQ ID NO: 3819156 - DNA, 25 bp, Homo sapien
tcacactcttgtccattaagcacat

SEQ ID NO: 3819157 - DNA, 25 bp, Homo sapien
cttgtccattaagcacatcacttag

SEQ ID NO: 3819158 - DNA, 25 bp, Homo sapien
ggatataagggtgaaaagtttgcca

SEQ ID NO: 3819159 - DNA, 25 bp, Homo sapien
taagggtgaaaagtttgccatgaga

SEQ ID NO: 3819160 - DNA, 25 bp, Homo sapien
tgccaggatataagggtgaaaagtt

SEQ ID NO: 3819161 - DNA, 25 bp, Homo sapien
ggtgaaaagtttgccatgagaggcc

SEQ ID NO: 3819162 - DNA, 25 bp, Homo sapien
taaaatggcccagattgtggatttc

SEQ ID NO: 3819163 - DNA, 25 bp, Homo sapien
ccattccagaaaggtagaacagttt

SEQ ID NO: 3819164 - DNA, 25 bp, Homo sapien
cagaaaggtagaacagtttggcaac

SEQ ID NO: 3819165 - DNA, 25 bp, Homo sapien
tccatgcaccattccagaaaggtag

SEQ ID NO: 3819166 - DNA, 25 bp, Homo sapien
tctgtccagaacctgtgttttaatc

SEQ ID NO: 3819167 - DNA, 25 bp, Homo sapien
ctgtccagaacctgtgttttaatca

SEQ ID NO: 3819168 - DNA, 25 bp, Homo sapien
tgtccagaacctgtgttttaatcac

SEQ ID NO: 3819169 - DNA, 25 bp, Homo sapien
cccaaagctggcatctataagcatc

SEQ ID NO: 3819170 - DNA, 25 bp, Homo sapien
caaagctggcatctataagcatcag

SEQ ID NO: 3819171 - DNA, 25 bp, Homo sapien
agctggcatctataagcatcagtac

SEQ ID NO: 3819172 - DNA, 25 bp, Homo sapien
caaacccaaagctggcatctataag

SEQ ID NO: 3819173 - DNA, 25 bp, Homo sapien
agttctgtttgtatctttccatgga

SEQ ID NO: 3819174 - DNA, 25 bp, Homo sapien
ttccatggataactaaaaataacac

SEQ ID NO: 3819175 - DNA, 25 bp, Homo sapien
aatttaagacacttcaaagatgcaa

SEQ ID NO: 3819176 - DNA, 25 bp, Homo sapien
gaactgattcctggaaacttgtaat

SEQ ID NO: 3819177 - DNA, 25 bp, Homo sapien
tcacaatgctgtaagtctccatcag

SEQ ID NO: 3819178 - DNA, 25 bp, Homo sapien
tttggaacacatttcattgtgcaca

SEQ ID NO: 3819179 - DNA, 25 bp, Homo sapien
tactatatccctgataatgaccatg

SEQ ID NO: 3819180 - DNA, 25 bp, Homo sapien
catcacggggtaaataacctatcac

SEQ ID NO: 3819181 - DNA, 25 bp, Homo sapien
tcatcatgttaatgtcacacccaca

SEQ ID NO: 3819182 - DNA, 25 bp, Homo sapien
gatcaatcatcatgttaatgtcaca

SEQ ID NO: 3819183 - DNA, 25 bp, Homo sapien
gccagatcaatcatcatgttaatgt

SEQ ID NO: 3819184 - DNA, 25 bp, Homo sapien
catgttaatgtcacacccacattca

SEQ ID NO: 3819185 - DNA, 25 bp, Homo sapien
cacgatcgtcacagggcctctgatc

SEQ ID NO: 3819186 - DNA, 25 bp, Homo sapien
cagggcctctgatctcggtgaactt

SEQ ID NO: 3819187 - DNA, 25 bp, Homo sapien
ctgacacgatcgtcacagggcctct

SEQ ID NO: 3819188 - DNA, 25 bp, Homo sapien
tcgtcacagggcctctgatctcggt

SEQ ID NO: 3819189 - DNA, 25 bp, Homo sapien
ccaggtgaagttccgaatgaggcat

SEQ ID NO: 3819190 - DNA, 25 bp, Homo sapien
gaggcattatatcaaagtgctcttt

SEQ ID NO: 3819191 - DNA, 25 bp, Homo sapien
ctgccaggtgaagttccgaatgagg

SEQ ID NO: 3819192 - DNA, 25 bp, Homo sapien
gcattatatcaaagtgctctttcca

SEQ ID NO: 3819193 - DNA, 25 bp, Homo sapien
gtggagttccatcaaccactggaat

SEQ ID NO: 3819194 - DNA, 25 bp, Homo sapien
taccgctattggtggcggctctagt

SEQ ID NO: 3819195 - DNA, 25 bp, Homo sapien
cactaccgctattggtggcggctct

SEQ ID NO: 3819196 - DNA, 25 bp, Homo sapien
cggctctagtggagttccatcaacc

SEQ ID NO: 3819197 - DNA, 25 bp, Homo sapien
aaaagcattggcatttctcttctgg

SEQ ID NO: 3819198 - DNA, 25 bp, Homo sapien
tctgggcattttcttcgtctcctag

SEQ ID NO: 3819199 - DNA, 25 bp, Homo sapien
gaaaggatcgagacatccacacagc

SEQ ID NO: 3819200 - DNA, 25 bp, Homo sapien
gactgaactgcaaaagcattggcat

SEQ ID NO: 3819201 - DNA, 25 bp, Homo sapien
gtggctatttaccaataacaagtaa

SEQ ID NO: 3819202 - DNA, 25 bp, Homo sapien
agtggctatttaccaataacaagta

SEQ ID NO: 3819203 - DNA, 25 bp, Homo sapien
tggctatttaccaataacaagtaac

SEQ ID NO: 3819204 - DNA, 25 bp, Homo sapien
ttcacaactgcgactccttaggtcc

SEQ ID NO: 3819205 - DNA, 25 bp, Homo sapien
acaactgcgactccttaggtccgct

SEQ ID NO: 3819206 - DNA, 25 bp, Homo sapien
actgcgactccttaggtccgcttgg

SEQ ID NO: 3819207 - DNA, 25 bp, Homo sapien
tgcgactccttaggtccgcttggac

SEQ ID NO: 3819208 - DNA, 25 bp, Homo sapien
gagaggtaatttgtgaaactgcttc

SEQ ID NO: 3819209 - DNA, 25 bp, Homo sapien
tctcttcactgtttagcaggttgag

SEQ ID NO: 3819210 - DNA, 25 bp, Homo sapien
aaatgcctgtggtgtgagaggtaat

SEQ ID NO: 3819211 - DNA, 25 bp, Homo sapien
cctttattggttcatagcctacaga

SEQ ID NO: 3819212 - DNA, 25 bp, Homo sapien
agtaagcagtgtctgtgccactacg

SEQ ID NO: 3819213 - DNA, 25 bp, Homo sapien
gttgaagctacagtaagcagtgtct

SEQ ID NO: 3819214 - DNA, 25 bp, Homo sapien
agctacagtaagcagtgtctgtgcc

SEQ ID NO: 3819215 - DNA, 25 bp, Homo sapien
taagcagtgtctgtgccactacgct

SEQ ID NO: 3819216 - DNA, 25 bp, Homo sapien
cagtggttggtaggtgatcgctttt

SEQ ID NO: 3819217 - DNA, 25 bp, Homo sapien
caccaccaggtatccgttatagcac

SEQ ID NO: 3819218 - DNA, 25 bp, Homo sapien
tacacacatgttactgttaagatgc

SEQ ID NO: 3819219 - DNA, 25 bp, Homo sapien
taagttgtactctttaagacctgca

SEQ ID NO: 3819220 - DNA, 25 bp, Homo sapien
ttattcccagtgcgaggccacactt

SEQ ID NO: 3819221 - DNA, 25 bp, Homo sapien
cacttgggccgtcggagcagcccct

SEQ ID NO: 3819222 - DNA, 25 bp, Homo sapien
gccacacttgggccgtcggagcagc

SEQ ID NO: 3819223 - DNA, 25 bp, Homo sapien
ttcccagtgcgaggccacacttggg

SEQ ID NO: 3819224 - DNA, 25 bp, Homo sapien
ccccatcatggccggggaccggctc

SEQ ID NO: 3819225 - DNA, 25 bp, Homo sapien
ggtcatcgacagtcactccttcctg

SEQ ID NO: 3819226 - DNA, 25 bp, Homo sapien
gcatgtgctcagctccgtcaacatc

SEQ ID NO: 3819227 - DNA, 25 bp, Homo sapien
ggcaaggtgaccattgtggagttca

SEQ ID NO: 3819228 - DNA, 25 bp, Homo sapien
aacatctgctgctccaagctggtga

SEQ ID NO: 3819229 - DNA, 25 bp, Homo sapien
cgacctctgcgagggcgagcctgct

SEQ ID NO: 3819230 - DNA, 25 bp, Homo sapien
cagagcacgcggccgcagacagctt

SEQ ID NO: 3819231 - DNA, 25 bp, Homo sapien
atcacggggggcttcgccaccttct

SEQ ID NO: 3819232 - DNA, 25 bp, Homo sapien
cctgcttccccgacctctgcgaggg

SEQ ID NO: 3819233 - DNA, 25 bp, Homo sapien
gaataagctacgtcctctatgccag

SEQ ID NO: 3819234 - DNA, 25 bp, Homo sapien
gagttcatcgataaagccaagctgt

SEQ ID NO: 3819235 - DNA, 25 bp, Homo sapien
tgtcctccgaagacgcctacaggtt

SEQ ID NO: 3819236 - DNA, 25 bp, Homo sapien
aggtttgtgaaggaccagcgcccgt

SEQ ID NO: 3819237 - DNA, 25 bp, Homo sapien
agagaccgctgccaccaggagtgcg

SEQ ID NO: 3819238 - DNA, 25 bp, Homo sapien
accgctgccaccaggagtgcggctg

SEQ ID NO: 3819239 - DNA, 25 bp, Homo sapien
cagcctgcgcctctcctcggaccac

SEQ ID NO: 3819240 - DNA, 25 bp, Homo sapien
ctcagagaccgctgccaccaggagt

SEQ ID NO: 3819241 - DNA, 25 bp, Homo sapien
tcgactccctgaagcgtcctcggtg

SEQ ID NO: 3819242 - DNA, 25 bp, Homo sapien
tgaacttcggctacgcggctgccgg

SEQ ID NO: 3819243 - DNA, 25 bp, Homo sapien
agggtgctgtttgcgcccttcggcc

SEQ ID NO: 3819244 - DNA, 25 bp, Homo sapien
agccccgagggcgtgcaagggccgg

SEQ ID NO: 3819245 - DNA, 25 bp, Homo sapien
aggggaggacatgcattgggcccca

SEQ ID NO: 3819246 - DNA, 25 bp, Homo sapien
ccccagagaggtgcggccagccctc

SEQ ID NO: 3819247 - DNA, 25 bp, Homo sapien
ccagagaggtgcggccagccctcca

SEQ ID NO: 3819248 - DNA, 25 bp, Homo sapien
tgccccagagaggtgcggccagccc

SEQ ID NO: 3819249 - DNA, 25 bp, Homo sapien
tcattgacccatgatgcagctaaat

SEQ ID NO: 3819250 - DNA, 25 bp, Homo sapien
taaattgacgtcttggcccagacag

SEQ ID NO: 3819251 - DNA, 25 bp, Homo sapien
gacccatgatgcagctaaattgacg

SEQ ID NO: 3819252 - DNA, 25 bp, Homo sapien
gatgcagctaaattgacgtcttggc

SEQ ID NO: 3819253 - DNA, 25 bp, Homo sapien
tctggtattgaaaaccattcatcac

SEQ ID NO: 3819254 - DNA, 25 bp, Homo sapien
ggatctcaagaagcaggcgttcctg

SEQ ID NO: 3819255 - DNA, 25 bp, Homo sapien
tgatccttcacaggagtcacgtagc

SEQ ID NO: 3819256 - DNA, 25 bp, Homo sapien
aagaagcaggcgttcctggaactgt

SEQ ID NO: 3819257 - DNA, 25 bp, Homo sapien
tgtctccaaaggcgttcatggccat

SEQ ID NO: 3819258 - DNA, 25 bp, Homo sapien
atgtctccaaaggcgttcatggcca

SEQ ID NO: 3819259 - DNA, 25 bp, Homo sapien
catgtctccaaaggcgttcatggcc

SEQ ID NO: 3819260 - DNA, 25 bp, Homo sapien
gctgtattcctgattgtgctgctca

SEQ ID NO: 3819261 - DNA, 25 bp, Homo sapien
tgtattcctgattgtgctgctcagt

SEQ ID NO: 3819262 - DNA, 25 bp, Homo sapien
tattcctgattgtgctgctcagtca

SEQ ID NO: 3819263 - DNA, 25 bp, Homo sapien
ccttggctgtattcctgattgtgct

SEQ ID NO: 3819264 - DNA, 25 bp, Homo sapien
cagtattctgaaaagtgttgtgacc

SEQ ID NO: 3819265 - DNA, 25 bp, Homo sapien
taaagctcagttaaaggtttctggc

SEQ ID NO: 3819266 - DNA, 25 bp, Homo sapien
ttttgctcatcccaggacaaacctg

SEQ ID NO: 3819267 - DNA, 25 bp, Homo sapien
cattctttaaggagggacccagaca

SEQ ID NO: 3819268 - DNA, 25 bp, Homo sapien
agcagttcgttcctcacacgcactg

SEQ ID NO: 3819269 - DNA, 25 bp, Homo sapien
tcaaacagcagttcgttcctcacac

SEQ ID NO: 3819270 - DNA, 25 bp, Homo sapien
aacagcagttcgttcctcacacgca

SEQ ID NO: 3819271 - DNA, 25 bp, Homo sapien
tttcctgcggggccttggccacgcg

SEQ ID NO: 3819272 - DNA, 25 bp, Homo sapien
ggtagctccgctctctggtctgaag

SEQ ID NO: 3819273 - DNA, 25 bp, Homo sapien
tgaggcactatcactaggaggaggc

SEQ ID NO: 3819274 - DNA, 25 bp, Homo sapien
ttggcatgccattcaacccatcggg

SEQ ID NO: 3819275 - DNA, 25 bp, Homo sapien
gccctgtcgggatgttgcatactga

SEQ ID NO: 3819276 - DNA, 25 bp, Homo sapien
caccagatcactaggagatattgca

SEQ ID NO: 3819277 - DNA, 25 bp, Homo sapien
ccctgccaccagatcactaggagat

SEQ ID NO: 3819278 - DNA, 25 bp, Homo sapien
gatcactaggagatattgcaatcat

SEQ ID NO: 3819279 - DNA, 25 bp, Homo sapien
tgccaccagatcactaggagatatt

SEQ ID NO: 3819280 - DNA, 25 bp, Homo sapien
aagcaagaagcaggcaacaactggc

SEQ ID NO: 3819281 - DNA, 25 bp, Homo sapien
aagaagcaggcaacaactggccatg

SEQ ID NO: 3819282 - DNA, 25 bp, Homo sapien
gcaagaagcaggcaacaactggcca

SEQ ID NO: 3819283 - DNA, 25 bp, Homo sapien
caagaagcaggcaacaactggccat

SEQ ID NO: 3819284 - DNA, 25 bp, Homo sapien
atagattgggatctttttctgacct

SEQ ID NO: 3819285 - DNA, 25 bp, Homo sapien
cactcattataaaattggtatctga

SEQ ID NO: 3819286 - DNA, 25 bp, Homo sapien
tatacaacaacaagacgtgggggaa

SEQ ID NO: 3819287 - DNA, 25 bp, Homo sapien
atttacctggtagttctgtccctcg

SEQ ID NO: 3819288 - DNA, 25 bp, Homo sapien
tgtccctcgttatcattctcactca

SEQ ID NO: 3819289 - DNA, 25 bp, Homo sapien
aattaggcccttgcttgcttgcata

SEQ ID NO: 3819290 - DNA, 25 bp, Homo sapien
tgtcaatacctcagcatttttagtg

SEQ ID NO: 3819291 - DNA, 25 bp, Homo sapien
cagcatttttagtgattgagataac

SEQ ID NO: 3819292 - DNA, 25 bp, Homo sapien
caaaaattcgaattaggcccttgct

SEQ ID NO: 3819293 - DNA, 25 bp, Homo sapien
tgactcctttggtaacacatgccga

SEQ ID NO: 3819294 - DNA, 25 bp, Homo sapien
taagtctcctagaaaacatttgcag

SEQ ID NO: 3819295 - DNA, 25 bp, Homo sapien
acatgccgatatataccactcaagg

SEQ ID NO: 3819296 - DNA, 25 bp, Homo sapien
cactcaaggcctgttggattaaact

SEQ ID NO: 3819297 - DNA, 25 bp, Homo sapien
cccaatagcagtacgtagcaggatc

SEQ ID NO: 3819298 - DNA, 25 bp, Homo sapien
tagcagtacgtagcaggatcccact

SEQ ID NO: 3819299 - DNA, 25 bp, Homo sapien
ctcccaatagcagtacgtagcagga

SEQ ID NO: 3819300 - DNA, 25 bp, Homo sapien
caatagcagtacgtagcaggatccc

SEQ ID NO: 3819301 - DNA, 25 bp, Homo sapien
tagaaatctttgacccattcatcag

SEQ ID NO: 3819302 - DNA, 25 bp, Homo sapien
gcggtaatggagatgtacttgcaag

SEQ ID NO: 3819303 - DNA, 25 bp, Homo sapien
tgtattggtttttccgactgaagcg

SEQ ID NO: 3819304 - DNA, 25 bp, Homo sapien
tcatcagactctgaccactctaaag

SEQ ID NO: 3819305 - DNA, 25 bp, Homo sapien
acacctgatcggctacaactctgaa

SEQ ID NO: 3819306 - DNA, 25 bp, Homo sapien
tagggaacctgtggtcctccactcc

SEQ ID NO: 3819307 - DNA, 25 bp, Homo sapien
actacaggcacgcatgccgctgcac

SEQ ID NO: 3819308 - DNA, 25 bp, Homo sapien
tccttagggaacctgtggtcctcca

SEQ ID NO: 3819309 - DNA, 25 bp, Homo sapien
tagtttacttgattagcagcatagc

SEQ ID NO: 3819310 - DNA, 25 bp, Homo sapien
gttgcaggcgggacaagcacctgtt

SEQ ID NO: 3819311 - DNA, 25 bp, Homo sapien
tagcatcaataaatgagttgggcgc

SEQ ID NO: 3819312 - DNA, 25 bp, Homo sapien
catgggcacatttaagcagcagagg

SEQ ID NO: 3819313 - DNA, 25 bp, Homo sapien
cgcgatcctgggctaccggtctgtg

SEQ ID NO: 3819314 - DNA, 25 bp, Homo sapien
ttgttgaaggccaatttgtggactc

SEQ ID NO: 3819315 - DNA, 25 bp, Homo sapien
ccgccgccgcggttgatgtggttgg

SEQ ID NO: 3819316 - DNA, 25 bp, Homo sapien
aagatgccgcagtcaaagtcccgga

SEQ ID NO: 3819317 - DNA, 25 bp, Homo sapien
tcacagtaaatggacaagaatatca

SEQ ID NO: 3819318 - DNA, 25 bp, Homo sapien
catggcaaattgttggatatggtgg

SEQ ID NO: 3819319 - DNA, 25 bp, Homo sapien
tttaacttgtagacacagccgggca

SEQ ID NO: 3819320 - DNA, 25 bp, Homo sapien
gaagtgattaaagttatccatggca

SEQ ID NO: 3819321 - DNA, 25 bp, Homo sapien
cggtgatgtgattctgctgcaaagc

SEQ ID NO: 3819322 - DNA, 25 bp, Homo sapien
ggtgatcagttatgaagaagggaaa

SEQ ID NO: 3819323 - DNA, 25 bp, Homo sapien
gctcccctcccttcagattatgtta

SEQ ID NO: 3819324 - DNA, 25 bp, Homo sapien
gattatgttaactctgagtctgtcc

SEQ ID NO: 3819325 - DNA, 25 bp, Homo sapien
aagatatcatttgggtcagagctcc

SEQ ID NO: 3819326 - DNA, 25 bp, Homo sapien
ttcagattatgttaactctgagtct

SEQ ID NO: 3819327 - DNA, 25 bp, Homo sapien
agttcagtatcacgcagtattccca

SEQ ID NO: 3819328 - DNA, 25 bp, Homo sapien
taccccaaagttcagtatcacgcag

SEQ ID NO: 3819329 - DNA, 25 bp, Homo sapien
cccaaagttcagtatcacgcagtat

SEQ ID NO: 3819330 - DNA, 25 bp, Homo sapien
caaagttcagtatcacgcagtattc

SEQ ID NO: 3819331 - DNA, 25 bp, Homo sapien
cagtctggtagtattacgtgtggtt

SEQ ID NO: 3819332 - DNA, 25 bp, Homo sapien
tctggtagtattacgtgtggtttta

SEQ ID NO: 3819333 - DNA, 25 bp, Homo sapien
aattcagtctggtagtattacgtgt

SEQ ID NO: 3819334 - DNA, 25 bp, Homo sapien
ttcagtctggtagtattacgtgtgg

SEQ ID NO: 3819335 - DNA, 25 bp, Homo sapien
caatgtagcacatgcttaaaagctc

SEQ ID NO: 3819336 - DNA, 25 bp, Homo sapien
tcagcaaaactcatcagcctgtaca

SEQ ID NO: 3819337 - DNA, 25 bp, Homo sapien
gtcggcaatcaatcacatactcaag

SEQ ID NO: 3819338 - DNA, 25 bp, Homo sapien
caatatcttattttggtcggcaatc

SEQ ID NO: 3819339 - DNA, 25 bp, Homo sapien
aaaccgtcaatgtgaaatcatttcc

SEQ ID NO: 3819340 - DNA, 25 bp, Homo sapien
gtttagacaagttcaagacaagcgt

SEQ ID NO: 3819341 - DNA, 25 bp, Homo sapien
gacaagcgtgtctttctataaaaag

SEQ ID NO: 3819342 - DNA, 25 bp, Homo sapien
gataatggattagtttatataaacc

SEQ ID NO: 3819343 - DNA, 25 bp, Homo sapien
atgacccagatattggtgttatcag

SEQ ID NO: 3819344 - DNA, 25 bp, Homo sapien
ttcctggagccactaaaatttatta

SEQ ID NO: 3819345 - DNA, 25 bp, Homo sapien
caacaaaacggagccactaatgacc

SEQ ID NO: 3819346 - DNA, 25 bp, Homo sapien
tagcattcaacaataagtgatcaaa

SEQ ID NO: 3819347 - DNA, 25 bp, Homo sapien
gaagtgagaagataatggagtgcca

SEQ ID NO: 3819348 - DNA, 25 bp, Homo sapien
caacctgtaatcctatattcacaaa

SEQ ID NO: 3819349 - DNA, 25 bp, Homo sapien
tggaagtgagaagataatggagtgc

SEQ ID NO: 3819350 - DNA, 25 bp, Homo sapien
aaaagtgtcaacctgtaatcctata

SEQ ID NO: 3819351 - DNA, 25 bp, Homo sapien
ttgaccaacctgattaacaaacttg

SEQ ID NO: 3819352 - DNA, 25 bp, Homo sapien
cataataaaggttcactctaccaga

SEQ ID NO: 3819353 - DNA, 25 bp, Homo sapien
taggaaagtctgtcataaacatagc

SEQ ID NO: 3819354 - DNA, 25 bp, Homo sapien
tacacataacacctgcacacaactg

SEQ ID NO: 3819355 - DNA, 25 bp, Homo sapien
caagcggccctagaaaagtcactgc

SEQ ID NO: 3819356 - DNA, 25 bp, Homo sapien
gataccagtctactctgtcctgcag

SEQ ID NO: 3819357 - DNA, 25 bp, Homo sapien
tggacaggatttgagacaacccagg

SEQ ID NO: 3819358 - DNA, 25 bp, Homo sapien
cagggatgagtcagagataccagtc

SEQ ID NO: 3819359 - DNA, 25 bp, Homo sapien
cttggaatgtgggggtggctggcat

SEQ ID NO: 3819360 - DNA, 25 bp, Homo sapien
aacagttccactgtagtagcctgct

SEQ ID NO: 3819361 - DNA, 25 bp, Homo sapien
agaaacagttccactgtagtagcct

SEQ ID NO: 3819362 - DNA, 25 bp, Homo sapien
gaaacagttccactgtagtagcctg

SEQ ID NO: 3819363 - DNA, 25 bp, Homo sapien
aaacagttccactgtagtagcctgc

SEQ ID NO: 3819364 - DNA, 25 bp, Homo sapien
cagagaacccctattacatgtgagc

SEQ ID NO: 3819365 - DNA, 25 bp, Homo sapien
ggcatttgacacagccccgtggagg

SEQ ID NO: 3819366 - DNA, 25 bp, Homo sapien
caacgtgttgacgtgcaggctgcac

SEQ ID NO: 3819367 - DNA, 25 bp, Homo sapien
gaaacactgcgaggcgacacttgtg

SEQ ID NO: 3819368 - DNA, 25 bp, Homo sapien
ggagtgtgtcggaaggctgtatggc

SEQ ID NO: 3819369 - DNA, 25 bp, Homo sapien
ctcttctctcctgcatatcagcact

SEQ ID NO: 3819370 - DNA, 25 bp, Homo sapien
agtgtgtcggaaggctgtatggcca

SEQ ID NO: 3819371 - DNA, 25 bp, Homo sapien
atatcagcactcacgtcctcctggc

SEQ ID NO: 3819372 - DNA, 25 bp, Homo sapien
gttggatgaaacgtccatgcgtgtg

SEQ ID NO: 3819373 - DNA, 25 bp, Homo sapien
tggatgaaacgtccatgcgtgtggc

SEQ ID NO: 3819374 - DNA, 25 bp, Homo sapien
gatgaaacgtccatgcgtgtggctg

SEQ ID NO: 3819375 - DNA, 25 bp, Homo sapien
atgaaacgtccatgcgtgtggctgt

SEQ ID NO: 3819376 - DNA, 25 bp, Homo sapien
tccgtggtgcggcagagcgcatgcc

SEQ ID NO: 3819377 - DNA, 25 bp, Homo sapien
ggcagagcgcatgccagcgcttcac

SEQ ID NO: 3819378 - DNA, 25 bp, Homo sapien
tcagggctccgtggtgcggcagagc

SEQ ID NO: 3819379 - DNA, 25 bp, Homo sapien
tgcggcagagcgcatgccagcgctt

SEQ ID NO: 3819380 - DNA, 25 bp, Homo sapien
cagctctctgccgcgggtgtacatg

SEQ ID NO: 3819381 - DNA, 25 bp, Homo sapien
tctctgccgcgggtgtacatgtagg

SEQ ID NO: 3819382 - DNA, 25 bp, Homo sapien
tgagcatctcgtcccagtgctccag

SEQ ID NO: 3819383 - DNA, 25 bp, Homo sapien
ggcttgctgagcatctcgtcccagt

SEQ ID NO: 3819384 - DNA, 25 bp, Homo sapien
caccactcggcccagctgctggctc

SEQ ID NO: 3819385 - DNA, 25 bp, Homo sapien
accactcggcccagctgctggctct

SEQ ID NO: 3819386 - DNA, 25 bp, Homo sapien
caggaggaagtagcaactcccctcc

SEQ ID NO: 3819387 - DNA, 25 bp, Homo sapien
ttctagggtgccacagacagagctc

SEQ ID NO: 3819388 - DNA, 25 bp, Homo sapien
ggctgcttaacctgtttctagggtg

SEQ ID NO: 3819389 - DNA, 25 bp, Homo sapien
tgaaacccaggccttgggcaatatt

SEQ ID NO: 3819390 - DNA, 25 bp, Homo sapien
actggactaaagctgggcctgaaac

SEQ ID NO: 3819391 - DNA, 25 bp, Homo sapien
agggagggagctcgtacagctcctt

SEQ ID NO: 3819392 - DNA, 25 bp, Homo sapien
tgaggtcaggacaggaggcactcac

SEQ ID NO: 3819393 - DNA, 25 bp, Homo sapien
gggagctcgtacagctccttctgag

SEQ ID NO: 3819394 - DNA, 25 bp, Homo sapien
gagggagctcgtacagctccttctg

SEQ ID NO: 3819395 - DNA, 25 bp, Homo sapien
gcctgaacactcggcagcccctcgt

SEQ ID NO: 3819396 - DNA, 25 bp, Homo sapien
cctgaacactcggcagcccctcgtg

SEQ ID NO: 3819397 - DNA, 25 bp, Homo sapien
gaagtcttcttgcacttgacaaact

SEQ ID NO: 3819398 - DNA, 25 bp, Homo sapien
aggctgaggctagcggtatccagct

SEQ ID NO: 3819399 - DNA, 25 bp, Homo sapien
tcaggctgaggctagcggtatccag

SEQ ID NO: 3819400 - DNA, 25 bp, Homo sapien
gtcaggctgaggctagcggtatcca

SEQ ID NO: 3819401 - DNA, 25 bp, Homo sapien
ggaggcccttggcacgcagcacaac

SEQ ID NO: 3819402 - DNA, 25 bp, Homo sapien
acaaccaccgtcaggcggctcaggt

SEQ ID NO: 3819403 - DNA, 25 bp, Homo sapien
tcaggtagtcgttgtagctgaggca

SEQ ID NO: 3819404 - DNA, 25 bp, Homo sapien
ctgaggcagaactggaggtcgccaa

SEQ ID NO: 3819405 - DNA, 25 bp, Homo sapien
agtcccccactagggtctcattctt

SEQ ID NO: 3819406 - DNA, 25 bp, Homo sapien
gtctctccagatgacacgccggcag

SEQ ID NO: 3819407 - DNA, 25 bp, Homo sapien
cgtggtagacggagaacttcagcac

SEQ ID NO: 3819408 - DNA, 25 bp, Homo sapien
tgcctgtccacgtggtagacggaga

SEQ ID NO: 3819409 - DNA, 25 bp, Homo sapien
tcccagcaacgcggagggcaccaga

SEQ ID NO: 3819410 - DNA, 25 bp, Homo sapien
ccagcaacgcggagggcaccagacc

SEQ ID NO: 3819411 - DNA, 25 bp, Homo sapien
cccagcaacgcggagggcaccagac

SEQ ID NO: 3819412 - DNA, 25 bp, Homo sapien
ttcccagcaacgcggagggcaccag

SEQ ID NO: 3819413 - DNA, 25 bp, Homo sapien
gctgtgccttgatcaagcccaccag

SEQ ID NO: 3819414 - DNA, 25 bp, Homo sapien
gatgaagtgctcgtcaaactgcggg

SEQ ID NO: 3819415 - DNA, 25 bp, Homo sapien
ttggattggaggaagcgccgctcat

SEQ ID NO: 3819416 - DNA, 25 bp, Homo sapien
gctcatattccaccgagaaccacag

SEQ ID NO: 3819417 - DNA, 25 bp, Homo sapien
ttgatggcccccaccatacatgcat

SEQ ID NO: 3819418 - DNA, 25 bp, Homo sapien
gttgatggcccccaccatacatgca

SEQ ID NO: 3819419 - DNA, 25 bp, Homo sapien
ggcagcagctctgatgccgggcagg

SEQ ID NO: 3819420 - DNA, 25 bp, Homo sapien
caccacgaatggcacagctggtggc

SEQ ID NO: 3819421 - DNA, 25 bp, Homo sapien
gggcacccaatctcggccttgaagg

SEQ ID NO: 3819422 - DNA, 25 bp, Homo sapien
ttgggggcaccacgaatggcacagc

SEQ ID NO: 3819423 - DNA, 25 bp, Homo sapien
cagggagacaacatgtaggtggcaa

SEQ ID NO: 3819424 - DNA, 25 bp, Homo sapien
atggtgtggtctcagagcgctcagc

SEQ ID NO: 3819425 - DNA, 25 bp, Homo sapien
agagtcagggagacaacatgtaggt

SEQ ID NO: 3819426 - DNA, 25 bp, Homo sapien
tcagccaggacggttgagcaccagg

SEQ ID NO: 3819427 - DNA, 25 bp, Homo sapien
tcagttgggtcctagcatgcggctg

SEQ ID NO: 3819428 - DNA, 25 bp, Homo sapien
agctcctcataggtgagggtggcac

SEQ ID NO: 3819429 - DNA, 25 bp, Homo sapien
caggcagctcctcataggtgagggt

SEQ ID NO: 3819430 - DNA, 25 bp, Homo sapien
tgtcccgctgcccactggaggcagc

SEQ ID NO: 3819431 - DNA, 25 bp, Homo sapien
agccccccgatggtgcccccaatca

SEQ ID NO: 3819432 - DNA, 25 bp, Homo sapien
gccccccgatggtgcccccaatcac

SEQ ID NO: 3819433 - DNA, 25 bp, Homo sapien
cagaacctccatatcccctgggctc

SEQ ID NO: 3819434 - DNA, 25 bp, Homo sapien
acgtccgcatttgcgggacctagga

SEQ ID NO: 3819435 - DNA, 25 bp, Homo sapien
ggtgctcagacgctgggttccaacc

SEQ ID NO: 3819436 - DNA, 25 bp, Homo sapien
ttgcgggacctaggaggcttcgccc

SEQ ID NO: 3819437 - DNA, 25 bp, Homo sapien
tcagacgctgggttccaaccgctgg

SEQ ID NO: 3819438 - DNA, 25 bp, Homo sapien
cgagcacaggggcggtccgtggtgc

SEQ ID NO: 3819439 - DNA, 25 bp, Homo sapien
tgggctgccaggccgtctcttaaag

SEQ ID NO: 3819440 - DNA, 25 bp, Homo sapien
gcacaggggcggtccgtggtgctgc

SEQ ID NO: 3819441 - DNA, 25 bp, Homo sapien
aggccgtctcttaaagcgccgcggg

SEQ ID NO: 3819442 - DNA, 25 bp, Homo sapien
tgcggcgcggggagccgcgcagtgc

SEQ ID NO: 3819443 - DNA, 25 bp, Homo sapien
cggcgcggggagccgcgcagtgcac

SEQ ID NO: 3819444 - DNA, 25 bp, Homo sapien
ctgcggcgcggggagccgcgcagtg

SEQ ID NO: 3819445 - DNA, 25 bp, Homo sapien
gcggcgcggggagccgcgcagtgca

SEQ ID NO: 3819446 - DNA, 25 bp, Homo sapien
cgaccgtgagctcccggaaaccgca

SEQ ID NO: 3819447 - DNA, 25 bp, Homo sapien
tggaggggcgcagagccgaccgtga

SEQ ID NO: 3819448 - DNA, 25 bp, Homo sapien
gtggaggggcgcagagccgaccgtg

SEQ ID NO: 3819449 - DNA, 25 bp, Homo sapien
gaggggcgcagagccgaccgtgagc

SEQ ID NO: 3819450 - DNA, 25 bp, Homo sapien
acacccccgcgtcacctgtgcctgt

SEQ ID NO: 3819451 - DNA, 25 bp, Homo sapien
agagtcatagcctgggtcccacacc

SEQ ID NO: 3819452 - DNA, 25 bp, Homo sapien
tctcgttttacagccttgaaggtta

SEQ ID NO: 3819453 - DNA, 25 bp, Homo sapien
cagccttgaaggttatgtccagagt

SEQ ID NO: 3819454 - DNA, 25 bp, Homo sapien
ccccacttctgcttaccccaggtcg

SEQ ID NO: 3819455 - DNA, 25 bp, Homo sapien
gcttaactggcgagatctccgctct

SEQ ID NO: 3819456 - DNA, 25 bp, Homo sapien
gagatctccgctctacttggagaca

SEQ ID NO: 3819457 - DNA, 25 bp, Homo sapien
tgtcctcagctgtgcgcttaactgg

SEQ ID NO: 3819458 - DNA, 25 bp, Homo sapien
gacccccatgctgtgcttttccaaa

SEQ ID NO: 3819459 - DNA, 25 bp, Homo sapien
agggaatcccttctggcacttcctg

SEQ ID NO: 3819460 - DNA, 25 bp, Homo sapien
agctgcctccatgattgcgcccgag

SEQ ID NO: 3819461 - DNA, 25 bp, Homo sapien
gcccgagctgtactcaggctgttct

SEQ ID NO: 3819462 - DNA, 25 bp, Homo sapien
cacgggaagataaaagcaggtggca

SEQ ID NO: 3819463 - DNA, 25 bp, Homo sapien
ttgagtcaatcttcctccacgggaa

SEQ ID NO: 3819464 - DNA, 25 bp, Homo sapien
gagttttgagtcaatcttcctccac

SEQ ID NO: 3819465 - DNA, 25 bp, Homo sapien
ttcctccacgggaagataaaagcag

SEQ ID NO: 3819466 - DNA, 25 bp, Homo sapien
cccgtgtctgtggagctgggaagcc

SEQ ID NO: 3819467 - DNA, 25 bp, Homo sapien
tcttccccgtgtctgtggagctggg

SEQ ID NO: 3819468 - DNA, 25 bp, Homo sapien
ttccccgtgtctgtggagctgggaa

SEQ ID NO: 3819469 - DNA, 25 bp, Homo sapien
gttcttccccgtgtctgtggagctg

SEQ ID NO: 3819470 - DNA, 25 bp, Homo sapien
cctggagtttgggaggcagacggac

SEQ ID NO: 3819471 - DNA, 25 bp, Homo sapien
gcttgctttctgtcccctggagttt

SEQ ID NO: 3819472 - DNA, 25 bp, Homo sapien
tcccctggagtttgggaggcagacg

SEQ ID NO: 3819473 - DNA, 25 bp, Homo sapien
tctgctctgagagcttgctttctgt

SEQ ID NO: 3819474 - DNA, 25 bp, Homo sapien
tgtgtgatcatctcagtcctgacca

SEQ ID NO: 3819475 - DNA, 25 bp, Homo sapien
ggatcttgggcacatgacacgccac

SEQ ID NO: 3819476 - DNA, 25 bp, Homo sapien
ggttctgatgaagacagtaggcagc

SEQ ID NO: 3819477 - DNA, 25 bp, Homo sapien
ttcccacaaccagacattggccatg

SEQ ID NO: 3819478 - DNA, 25 bp, Homo sapien
caactggttgagaacctgagttctg

SEQ ID NO: 3819479 - DNA, 25 bp, Homo sapien
ttctgaacctgaatgcagcaactgg

SEQ ID NO: 3819480 - DNA, 25 bp, Homo sapien
acctgaatgcagcaactggttgaga

SEQ ID NO: 3819481 - DNA, 25 bp, Homo sapien
gaatgcagcaactggttgagaacct

SEQ ID NO: 3819482 - DNA, 25 bp, Homo sapien
gttttggtggtatatggtataactg

SEQ ID NO: 3819483 - DNA, 25 bp, Homo sapien
tttggtggtatatggtataactgcc

SEQ ID NO: 3819484 - DNA, 25 bp, Homo sapien
tggtggtatatggtataactgcctt

SEQ ID NO: 3819485 - DNA, 25 bp, Homo sapien
ggtggtatatggtataactgcctta

SEQ ID NO: 3819486 - DNA, 25 bp, Homo sapien
cctctctccaggagtattccctggg

SEQ ID NO: 3819487 - DNA, 25 bp, Homo sapien
caggagtattccctgggatagacat

SEQ ID NO: 3819488 - DNA, 25 bp, Homo sapien
tgggatagacatctttggaccttgg

SEQ ID NO: 3819489 - DNA, 25 bp, Homo sapien
tattccctgggatagacatctttgg

SEQ ID NO: 3819490 - DNA, 25 bp, Homo sapien
ctttcagcactgctgtattctcttc

SEQ ID NO: 3819491 - DNA, 25 bp, Homo sapien
tcttcagtatctgccttcctcgggc

SEQ ID NO: 3819492 - DNA, 25 bp, Homo sapien
gcttctttcagcactgctgtattct

SEQ ID NO: 3819493 - DNA, 25 bp, Homo sapien
gtatctgccttcctcgggctagctc

SEQ ID NO: 3819494 - DNA, 25 bp, Homo sapien
gcatccagcaaacacctgcattctg

SEQ ID NO: 3819495 - DNA, 25 bp, Homo sapien
catccagcaaacacctgcattctga

SEQ ID NO: 3819496 - DNA, 25 bp, Homo sapien
ccagcaaacacctgcattctgaaat

SEQ ID NO: 3819497 - DNA, 25 bp, Homo sapien
tccagcaaacacctgcattctgaaa

SEQ ID NO: 3819498 - DNA, 25 bp, Homo sapien
gagtgcaccccacactcattcctct

SEQ ID NO: 3819499 - DNA, 25 bp, Homo sapien
tgtccacgtggtgcctcaaacatcc

SEQ ID NO: 3819500 - DNA, 25 bp, Homo sapien
gtgtgcccccgctggacccctgagt

SEQ ID NO: 3819501 - DNA, 25 bp, Homo sapien
ggtgcctcaaacatcccagtgtgcc

SEQ ID NO: 3819502 - DNA, 25 bp, Homo sapien
ccaaacggggagaattagagatact

SEQ ID NO: 3819503 - DNA, 25 bp, Homo sapien
gcagactgaggtcctttgctaccca

SEQ ID NO: 3819504 - DNA, 25 bp, Homo sapien
ctgaggtcctttgctacccaaacgg

SEQ ID NO: 3819505 - DNA, 25 bp, Homo sapien
gactgaggtcctttgctacccaaac

SEQ ID NO: 3819506 - DNA, 25 bp, Homo sapien
gtggaacctggcgatcccagggcct

SEQ ID NO: 3819507 - DNA, 25 bp, Homo sapien
acgggaccgggaaggcgctgtggtg

SEQ ID NO: 3819508 - DNA, 25 bp, Homo sapien
gcctcatagtgtggaacctggcgat

SEQ ID NO: 3819509 - DNA, 25 bp, Homo sapien
cagcaggaatctattgcgagtggcg

SEQ ID NO: 3819510 - DNA, 25 bp, Homo sapien
ggatcatggagttcaaaggactgga

SEQ ID NO: 3819511 - DNA, 25 bp, Homo sapien
gtctaccaggctgggctcttgaggg

SEQ ID NO: 3819512 - DNA, 25 bp, Homo sapien
ctcagaggatgggacggtgggtcca

SEQ ID NO: 3819513 - DNA, 25 bp, Homo sapien
gcaaccctagggaaggagtctacca

SEQ ID NO: 3819514 - DNA, 25 bp, Homo sapien
tgcgcctatacacccgggacggtgg

SEQ ID NO: 3819515 - DNA, 25 bp, Homo sapien
agaatcgtggggagctgcgcctata

SEQ ID NO: 3819516 - DNA, 25 bp, Homo sapien
gagtcttgggggttcgctgggcagc

SEQ ID NO: 3819517 - DNA, 25 bp, Homo sapien
tggggctacgaggaggtggacttga

SEQ ID NO: 3819518 - DNA, 25 bp, Homo sapien
tggccgcatcgcactccccgcgctc

SEQ ID NO: 3819519 - DNA, 25 bp, Homo sapien
ccgcatcgcactccccgcgctccgc

SEQ ID NO: 3819520 - DNA, 25 bp, Homo sapien
ggtggccgcatcgcactccccgcgc

SEQ ID NO: 3819521 - DNA, 25 bp, Homo sapien
tgcctgcgctcagacccccggcatc

SEQ ID NO: 3819522 - DNA, 25 bp, Homo sapien
ggactgagatccaaagccagggcca

SEQ ID NO: 3819523 - DNA, 25 bp, Homo sapien
aaggctgtagccgatgtgccccacg

SEQ ID NO: 3819524 - DNA, 25 bp, Homo sapien
gaggtgggactgagatccaaagcca

SEQ ID NO: 3819525 - DNA, 25 bp, Homo sapien
gtgccccacgctggacagcttgaag

SEQ ID NO: 3819526 - DNA, 25 bp, Homo sapien
cccaaagatttctcgaggcctgtga

SEQ ID NO: 3819527 - DNA, 25 bp, Homo sapien
aatccacccgtgtgagggaccagag

SEQ ID NO: 3819528 - DNA, 25 bp, Homo sapien
ggggtcatggcccacgacctggcct

SEQ ID NO: 3819529 - DNA, 25 bp, Homo sapien
agatcctaagatcccgtgacacagc

SEQ ID NO: 3819530 - DNA, 25 bp, Homo sapien
tttccaggttcctcgccccacagct

SEQ ID NO: 3819531 - DNA, 25 bp, Homo sapien
aggttcctcgccccacagctttgca

SEQ ID NO: 3819532 - DNA, 25 bp, Homo sapien
caggttcctcgccccacagctttgc

SEQ ID NO: 3819533 - DNA, 25 bp, Homo sapien
tccaggttcctcgccccacagcttt

SEQ ID NO: 3819534 - DNA, 25 bp, Homo sapien
agaagcttctgctgagatgaggatg

SEQ ID NO: 3819535 - DNA, 25 bp, Homo sapien
gggttccccagaagcttctgctgag

SEQ ID NO: 3819536 - DNA, 25 bp, Homo sapien
cccagaagcttctgctgagatgagg

SEQ ID NO: 3819537 - DNA, 25 bp, Homo sapien
cactcatcttgggctgggttcccca

SEQ ID NO: 3819538 - DNA, 25 bp, Homo sapien
tcttgtgaagatttcaattcttgaa

SEQ ID NO: 3819539 - DNA, 25 bp, Homo sapien
aattcttgaaggtgtggaagcctcc

SEQ ID NO: 3819540 - DNA, 25 bp, Homo sapien
gaagatttcaattcttgaaggtgtg

SEQ ID NO: 3819541 - DNA, 25 bp, Homo sapien
agatttcaattcttgaaggtgtgga

SEQ ID NO: 3819542 - DNA, 25 bp, Homo sapien
ccaggcgtggtcctgggcggcgcgg

SEQ ID NO: 3819543 - DNA, 25 bp, Homo sapien
gatcccgcggtctggtttgcggcta

SEQ ID NO: 3819544 - DNA, 25 bp, Homo sapien
gtgacaggacccgacgcctcctggt

SEQ ID NO: 3819545 - DNA, 25 bp, Homo sapien
tttgcggctaggtgtgtgtccccgg

SEQ ID NO: 3819546 - DNA, 25 bp, Homo sapien
cacccagatgcattctctactgtgg

SEQ ID NO: 3819547 - DNA, 25 bp, Homo sapien
gagagaggttggtagaattcttttc

SEQ ID NO: 3819548 - DNA, 25 bp, Homo sapien
tggcatgcctccacactacagaagc

SEQ ID NO: 3819549 - DNA, 25 bp, Homo sapien
tgtcgactattttgctcacacccca

SEQ ID NO: 3819550 - DNA, 25 bp, Homo sapien
aggacgggtgtccatagagctccca

SEQ ID NO: 3819551 - DNA, 25 bp, Homo sapien
gcctgcacagaggacgggtgtccat

SEQ ID NO: 3819552 - DNA, 25 bp, Homo sapien
gacagtggctgcgttcttgcctgca

SEQ ID NO: 3819553 - DNA, 25 bp, Homo sapien
cagtggctgcgttcttgcctgcaca

SEQ ID NO: 3819554 - DNA, 25 bp, Homo sapien
cttgggggctcaagatgcggctccc

SEQ ID NO: 3819555 - DNA, 25 bp, Homo sapien
gcaggcgggagcgtagcagccgctc

SEQ ID NO: 3819556 - DNA, 25 bp, Homo sapien
cgtgggcgggcgcaaggggcaggct

SEQ ID NO: 3819557 - DNA, 25 bp, Homo sapien
gctgcagttccgggcaggccttggg

SEQ ID NO: 3819558 - DNA, 25 bp, Homo sapien
gaacgccatgtgcatcatagcccag

SEQ ID NO: 3819559 - DNA, 25 bp, Homo sapien
tactctcggacccaaggcttatata

SEQ ID NO: 3819560 - DNA, 25 bp, Homo sapien
gtacatattcttacactcgggacag

SEQ ID NO: 3819561 - DNA, 25 bp, Homo sapien
ggatatacatgctccagcaagacag

SEQ ID NO: 3819562 - DNA, 25 bp, Homo sapien
caaccatgccttgggtgtcactgtc

SEQ ID NO: 3819563 - DNA, 25 bp, Homo sapien
tatcacacgatccagtcacagtcgg

SEQ ID NO: 3819564 - DNA, 25 bp, Homo sapien
ccaaacagggatacttgagcatgaa

SEQ ID NO: 3819565 - DNA, 25 bp, Homo sapien
ggttgcaggaccacataacttatcc

SEQ ID NO: 3819566 - DNA, 25 bp, Homo sapien
gaaacagcatccaattcagggtcag

SEQ ID NO: 3819567 - DNA, 25 bp, Homo sapien
tccactagaagctgagggacaggca

SEQ ID NO: 3819568 - DNA, 25 bp, Homo sapien
taacgctttgttgtggcaaccccag

SEQ ID NO: 3819569 - DNA, 25 bp, Homo sapien
caatctgaagatgcgctactgagct

SEQ ID NO: 3819570 - DNA, 25 bp, Homo sapien
ctggaagtcccccatagaagaaatc

SEQ ID NO: 3819571 - DNA, 25 bp, Homo sapien
caaggttctgatacacctcacaagc

SEQ ID NO: 3819572 - DNA, 25 bp, Homo sapien
tctgattcttacagcgctgcggaga

SEQ ID NO: 3819573 - DNA, 25 bp, Homo sapien
tcagggtcaagcttctcggctggaa

SEQ ID NO: 3819574 - DNA, 25 bp, Homo sapien
gttctgtggactgacccacttgtcc

SEQ ID NO: 3819575 - DNA, 25 bp, Homo sapien
ttgttctgtggactgacccacttgt

SEQ ID NO: 3819576 - DNA, 25 bp, Homo sapien
tctgtggactgacccacttgtccca

SEQ ID NO: 3819577 - DNA, 25 bp, Homo sapien
ctgacccacttgtcccacccacata

SEQ ID NO: 3819578 - DNA, 25 bp, Homo sapien
tttccccaaattcctgggtgctatc

SEQ ID NO: 3819579 - DNA, 25 bp, Homo sapien
gctgtgagcaccagtttttttcccc

SEQ ID NO: 3819580 - DNA, 25 bp, Homo sapien
cctgggtgctatctgagcatgctgc

SEQ ID NO: 3819581 - DNA, 25 bp, Homo sapien
gagagttgtgccttaactgggcagc

SEQ ID NO: 3819582 - DNA, 25 bp, Homo sapien
ttaaaacagttacatataacatgga

SEQ ID NO: 3819583 - DNA, 25 bp, Homo sapien
aagagagaggtttatagagggagat

SEQ ID NO: 3819584 - DNA, 25 bp, Homo sapien
catataacatggaacagtatgacat

SEQ ID NO: 3819585 - DNA, 25 bp, Homo sapien
gagatgggaatcgtgacagcccctg

SEQ ID NO: 3819586 - DNA, 25 bp, Homo sapien
tcgattcttggccttccagaaactg

SEQ ID NO: 3819587 - DNA, 25 bp, Homo sapien
gcagcttactacttcgattcttggc

SEQ ID NO: 3819588 - DNA, 25 bp, Homo sapien
cttgtctggaaaacggctgcagctt

SEQ ID NO: 3819589 - DNA, 25 bp, Homo sapien
ggagtttgcccctccagtcctgaat

SEQ ID NO: 3819590 - DNA, 25 bp, Homo sapien
tcttctggggccgtcatgcacatgg

SEQ ID NO: 3819591 - DNA, 25 bp, Homo sapien
cttctggggccgtcatgcacatgga

SEQ ID NO: 3819592 - DNA, 25 bp, Homo sapien
tctggggccgtcatgcacatggagc

SEQ ID NO: 3819593 - DNA, 25 bp, Homo sapien
ggtcttctggggccgtcatgcacat

SEQ ID NO: 3819594 - DNA, 25 bp, Homo sapien
aagtataggcctccattgccacagg

SEQ ID NO: 3819595 - DNA, 25 bp, Homo sapien
ttgcaaagtataggcctccattgcc

SEQ ID NO: 3819596 - DNA, 25 bp, Homo sapien
caaagtataggcctccattgccaca

SEQ ID NO: 3819597 - DNA, 25 bp, Homo sapien
atgatttcagtcaccattaaaaggg

SEQ ID NO: 3819598 - DNA, 25 bp, Homo sapien
caaaggccttatattctgggaccgt

SEQ ID NO: 3819599 - DNA, 25 bp, Homo sapien
gatcctgggcttggtctctggtaaa

SEQ ID NO: 3819600 - DNA, 25 bp, Homo sapien
gaacatgtggcgagcaggtgtccaa

SEQ ID NO: 3819601 - DNA, 25 bp, Homo sapien
gaccgtaatggacaaaacagccctg

SEQ ID NO: 3819602 - DNA, 25 bp, Homo sapien
gtagggaggaggcaggtacctcctc

SEQ ID NO: 3819603 - DNA, 25 bp, Homo sapien
gggaggaggcaggtacctcctccac

SEQ ID NO: 3819604 - DNA, 25 bp, Homo sapien
gttctaggtagggaggaggcaggta

SEQ ID NO: 3819605 - DNA, 25 bp, Homo sapien
taggtagggaggaggcaggtacctc

SEQ ID NO: 3819606 - DNA, 25 bp, Homo sapien
agcacatggactttgcagttggaca

SEQ ID NO: 3819607 - DNA, 25 bp, Homo sapien
tttgtgtgcatagaattactcacag

SEQ ID NO: 3819608 - DNA, 25 bp, Homo sapien
cttctggcagagcatttaggtgact

SEQ ID NO: 3819609 - DNA, 25 bp, Homo sapien
tatgccatactgttcaagcacatgg

SEQ ID NO: 3819610 - DNA, 25 bp, Homo sapien
tgagagatcttcttgatattagttt

SEQ ID NO: 3819611 - DNA, 25 bp, Homo sapien
tatcccagagactttgttaagttgt

SEQ ID NO: 3819612 - DNA, 25 bp, Homo sapien
atgttctgtgtacagataggaagaa

SEQ ID NO: 3819613 - DNA, 25 bp, Homo sapien
tttgattttcacctaggagttaatc

SEQ ID NO: 3819614 - DNA, 25 bp, Homo sapien
aagatttacaacactctagcacccc

SEQ ID NO: 3819615 - DNA, 25 bp, Homo sapien
cactgtaagatttacaacactctag

SEQ ID NO: 3819616 - DNA, 25 bp, Homo sapien
tttgtcaaatgcctgcactcctgtc

SEQ ID NO: 3819617 - DNA, 25 bp, Homo sapien
tcatgcccccttcagctaacctcta

SEQ ID NO: 3819618 - DNA, 25 bp, Homo sapien
actgctcagctgttaagaacacaca

SEQ ID NO: 3819619 - DNA, 25 bp, Homo sapien
tcagctgttaagaacacacagcgct

SEQ ID NO: 3819620 - DNA, 25 bp, Homo sapien
ctgctcagctgttaagaacacacag

SEQ ID NO: 3819621 - DNA, 25 bp, Homo sapien
ctcagctgttaagaacacacagcgc

SEQ ID NO: 3819622 - DNA, 25 bp, Homo sapien
ggtacccagtctcagttgccgttca

SEQ ID NO: 3819623 - DNA, 25 bp, Homo sapien
tgctgagggcatggtcacacccttc

SEQ ID NO: 3819624 - DNA, 25 bp, Homo sapien
gaatttttcgtccatttagagccta

SEQ ID NO: 3819625 - DNA, 25 bp, Homo sapien
ggagcccacgcctcttataacacag

SEQ ID NO: 3819626 - DNA, 25 bp, Homo sapien
gaagtgttttgtaagacgcttgtta

SEQ ID NO: 3819627 - DNA, 25 bp, Homo sapien
accctgtttcagtagatgggaatgg

SEQ ID NO: 3819628 - DNA, 25 bp, Homo sapien
agaagtgttttgtaagacgcttgtt

SEQ ID NO: 3819629 - DNA, 25 bp, Homo sapien
gaccctgtttcagtagatgggaatg

SEQ ID NO: 3819630 - DNA, 25 bp, Homo sapien
aaggaatgatccacaagtccccaag

SEQ ID NO: 3819631 - DNA, 25 bp, Homo sapien
gaaacactaaggttggcattgtgct

SEQ ID NO: 3819632 - DNA, 25 bp, Homo sapien
ttggcattgtgctcacactgggaaa

SEQ ID NO: 3819633 - DNA, 25 bp, Homo sapien
ggagactctgtgaccagcttgggaa

SEQ ID NO: 3819634 - DNA, 25 bp, Homo sapien
ctctgggtcagaaacccggctggaa

SEQ ID NO: 3819635 - DNA, 25 bp, Homo sapien
ccctctgggtcagaaacccggctgg

SEQ ID NO: 3819636 - DNA, 25 bp, Homo sapien
tcagaaacccggctggaaagcactg

SEQ ID NO: 3819637 - DNA, 25 bp, Homo sapien
ctgggtcagaaacccggctggaaag

SEQ ID NO: 3819638 - DNA, 25 bp, Homo sapien
tccatggccgaggttgagtgaggag

SEQ ID NO: 3819639 - DNA, 25 bp, Homo sapien
cgtccatggccgaggttgagtgagg

SEQ ID NO: 3819640 - DNA, 25 bp, Homo sapien
gcgtccatggccgaggttgagtgag

SEQ ID NO: 3819641 - DNA, 25 bp, Homo sapien
ctgcgtccatggccgaggttgagtg

SEQ ID NO: 3819642 - DNA, 25 bp, Homo sapien
cgttcttgtagtcgccgctggtgtc

SEQ ID NO: 3819643 - DNA, 25 bp, Homo sapien
tcagcagggcgttcttgtagtcgcc

SEQ ID NO: 3819644 - DNA, 25 bp, Homo sapien
caggctcagcagggcgttcttgtag

SEQ ID NO: 3819645 - DNA, 25 bp, Homo sapien
gcagggcgttcttgtagtcgccgct

SEQ ID NO: 3819646 - DNA, 25 bp, Homo sapien
gcaggaggcgcataagcgtgagaag

SEQ ID NO: 3819647 - DNA, 25 bp, Homo sapien
gggcaggaggcgcataagcgtgaga

SEQ ID NO: 3819648 - DNA, 25 bp, Homo sapien
gtgggcaggaggcgcataagcgtga

SEQ ID NO: 3819649 - DNA, 25 bp, Homo sapien
ctgtgggcaggaggcgcataagcgt

SEQ ID NO: 3819650 - DNA, 25 bp, Homo sapien
aactacatgcaggattgatgtggaa

SEQ ID NO: 3819651 - DNA, 25 bp, Homo sapien
caactacatgcaggattgatgtgga

SEQ ID NO: 3819652 - DNA, 25 bp, Homo sapien
cagcttgggaatcaaggctgagagt

SEQ ID NO: 3819653 - DNA, 25 bp, Homo sapien
aggctgagagtgaggcatcagcaca

SEQ ID NO: 3819654 - DNA, 25 bp, Homo sapien
gctgtggcagcttgggaatcaaggc

SEQ ID NO: 3819655 - DNA, 25 bp, Homo sapien
ctgagagtgaggcatcagcacacac

SEQ ID NO: 3819656 - DNA, 25 bp, Homo sapien
tctcgctccttgaaacgatgtttct

SEQ ID NO: 3819657 - DNA, 25 bp, Homo sapien
tgaaacgatgtttcttatcagggtc

SEQ ID NO: 3819658 - DNA, 25 bp, Homo sapien
aagtcaatctcgctccttgaaacga

SEQ ID NO: 3819659 - DNA, 25 bp, Homo sapien
tcttatcagggtcccatcacgcgtc

SEQ ID NO: 3819660 - DNA, 25 bp, Homo sapien
tgtccatctctgagtgatggacgga

SEQ ID NO: 3819661 - DNA, 25 bp, Homo sapien
catctctgagtgatggacggatctg

SEQ ID NO: 3819662 - DNA, 25 bp, Homo sapien
ctctgagtgatggacggatctgtgt

SEQ ID NO: 3819663 - DNA, 25 bp, Homo sapien
tcctgtccatctctgagtgatggac

SEQ ID NO: 3819664 - DNA, 25 bp, Homo sapien
tttagagggagggagatgtgggaag

SEQ ID NO: 3819665 - DNA, 25 bp, Homo sapien
tagagggagggagatgtgggaagga

SEQ ID NO: 3819666 - DNA, 25 bp, Homo sapien
gagggagggagatgtgggaaggagc

SEQ ID NO: 3819667 - DNA, 25 bp, Homo sapien
cttttagagggagggagatgtggga

SEQ ID NO: 3819668 - DNA, 25 bp, Homo sapien
tctctgcaaagtagctgtggaggtt

SEQ ID NO: 3819669 - DNA, 25 bp, Homo sapien
ctgtggaggttttgggtgcatttca

SEQ ID NO: 3819670 - DNA, 25 bp, Homo sapien
cttcatggcatagtagagtctctct

SEQ ID NO: 3819671 - DNA, 25 bp, Homo sapien
gagtctctctgcaaagtagctgtgg

SEQ ID NO: 3819672 - DNA, 25 bp, Homo sapien
gcaaacaagaaagctgtgttaatgt

SEQ ID NO: 3819673 - DNA, 25 bp, Homo sapien
acaagaaagctgtgttaatgtctgg

SEQ ID NO: 3819674 - DNA, 25 bp, Homo sapien
ctgtgttaatgtctggagctggtag

SEQ ID NO: 3819675 - DNA, 25 bp, Homo sapien
agaaagctgtgttaatgtctggagc

SEQ ID NO: 3819676 - DNA, 25 bp, Homo sapien
tcttgccttaggtcttaagagtcag

SEQ ID NO: 3819677 - DNA, 25 bp, Homo sapien
caactttatgtcttgccttaggtct

SEQ ID NO: 3819678 - DNA, 25 bp, Homo sapien
aggcttggcatatttctttgttccg

SEQ ID NO: 3819679 - DNA, 25 bp, Homo sapien
gtcagtgttgtgcaaggcttggcat

SEQ ID NO: 3819680 - DNA, 25 bp, Homo sapien
gcgtatgcatttgtgtgcgcacaca

SEQ ID NO: 3819681 - DNA, 25 bp, Homo sapien
aaagatgactttgtgctggccaggg

SEQ ID NO: 3819682 - DNA, 25 bp, Homo sapien
caggcccctggttcatgtccagaaa

SEQ ID NO: 3819683 - DNA, 25 bp, Homo sapien
tggctgccatgagtacacacagggt

SEQ ID NO: 3819684 - DNA, 25 bp, Homo sapien
cctcaatgctcttgttggcaatttt

SEQ ID NO: 3819685 - DNA, 25 bp, Homo sapien
ctgtcctcaatgctcttgttggcaa

SEQ ID NO: 3819686 - DNA, 25 bp, Homo sapien
caatgctcttgttggcaattttctc

SEQ ID NO: 3819687 - DNA, 25 bp, Homo sapien
gctcttgttggcaattttctcatac

SEQ ID NO: 3819688 - DNA, 25 bp, Homo sapien
tgcacaggatggtgatgaatttcat

SEQ ID NO: 3819689 - DNA, 25 bp, Homo sapien
gtgagtggcactgcgcgtgcacagg

SEQ ID NO: 3819690 - DNA, 25 bp, Homo sapien
tggcactgcgcgtgcacaggatggt

SEQ ID NO: 3819691 - DNA, 25 bp, Homo sapien
aggtgagtggcactgcgcgtgcaca

SEQ ID NO: 3819692 - DNA, 25 bp, Homo sapien
gcagaggagccggagtccagatggc

SEQ ID NO: 3819693 - DNA, 25 bp, Homo sapien
caaaggcctatagggagctgagctg

SEQ ID NO: 3819694 - DNA, 25 bp, Homo sapien
gtgtcagagaaagcccccgtgggca

SEQ ID NO: 3819695 - DNA, 25 bp, Homo sapien
acaggacaaaggcctatagggagct

SEQ ID NO: 3819696 - DNA, 25 bp, Homo sapien
tgcgtcttggagggccagtcctggg

SEQ ID NO: 3819697 - DNA, 25 bp, Homo sapien
agggccagtcctgggtccacaaagc

SEQ ID NO: 3819698 - DNA, 25 bp, Homo sapien
cttggagggccagtcctgggtccac

SEQ ID NO: 3819699 - DNA, 25 bp, Homo sapien
gccagtcctgggtccacaaagctgc

SEQ ID NO: 3819700 - DNA, 25 bp, Homo sapien
ggatcctctccaggtagccacttgt

SEQ ID NO: 3819701 - DNA, 25 bp, Homo sapien
ggtagccacttgtgtctgcttggat

SEQ ID NO: 3819702 - DNA, 25 bp, Homo sapien
tctccaggtagccacttgtgtctgc

SEQ ID NO: 3819703 - DNA, 25 bp, Homo sapien
tcctctccaggtagccacttgtgtc

SEQ ID NO: 3819704 - DNA, 25 bp, Homo sapien
ttcctcatacgccttcattatctcc

SEQ ID NO: 3819705 - DNA, 25 bp, Homo sapien
cagctggttcttggtccgagaggcc

SEQ ID NO: 3819706 - DNA, 25 bp, Homo sapien
ttcttggtccgagaggccaggatct

SEQ ID NO: 3819707 - DNA, 25 bp, Homo sapien
ctcccgcagctggttcttggtccga

SEQ ID NO: 3819708 - DNA, 25 bp, Homo sapien
tctgtccacaccttcttttctcaag

SEQ ID NO: 3819709 - DNA, 25 bp, Homo sapien
tttctcaagatgcctgagcctcagg

SEQ ID NO: 3819710 - DNA, 25 bp, Homo sapien
gccatgaccttctgctctgtccaca

SEQ ID NO: 3819711 - DNA, 25 bp, Homo sapien
ggagtgctctgccatgaccttctgc

SEQ ID NO: 3819712 - DNA, 25 bp, Homo sapien
tcatggcgtcatgcagctccttggc

SEQ ID NO: 3819713 - DNA, 25 bp, Homo sapien
tctcaaacttgccactgagctcaga

SEQ ID NO: 3819714 - DNA, 25 bp, Homo sapien
tctgtatggcgggtacataagggcc

SEQ ID NO: 3819715 - DNA, 25 bp, Homo sapien
cataagggccacaatgagcctctca

SEQ ID NO: 3819716 - DNA, 25 bp, Homo sapien
gtggggcctgttgggtgcatgagaa

SEQ ID NO: 3819717 - DNA, 25 bp, Homo sapien
ggcctgttgggtgcatgagaaggaa

SEQ ID NO: 3819718 - DNA, 25 bp, Homo sapien
ggggcctgttgggtgcatgagaagg

SEQ ID NO: 3819719 - DNA, 25 bp, Homo sapien
cctgttgggtgcatgagaaggaatg

SEQ ID NO: 3819720 - DNA, 25 bp, Homo sapien
cttgccgaactgagccttgaaggac

SEQ ID NO: 3819721 - DNA, 25 bp, Homo sapien
tgccgctgcgtgttgcttctcttgg

SEQ ID NO: 3819722 - DNA, 25 bp, Homo sapien
tcgatgatagcctgctcgttggtcc

SEQ ID NO: 3819723 - DNA, 25 bp, Homo sapien
tggtgagcacatcgatgatagcctg

SEQ ID NO: 3819724 - DNA, 25 bp, Homo sapien
ttctcttggtgagcacatcgatgat

SEQ ID NO: 3819725 - DNA, 25 bp, Homo sapien
ttcatggcttggtagagggtctctg

SEQ ID NO: 3819726 - DNA, 25 bp, Homo sapien
tctgcatcagggtctgggttgaagt

SEQ ID NO: 3819727 - DNA, 25 bp, Homo sapien
tctgggttgaagtgggagctgctct

SEQ ID NO: 3819728 - DNA, 25 bp, Homo sapien
cttggtagagggtctctgcatcagg

SEQ ID NO: 3819729 - DNA, 25 bp, Homo sapien
ttcccagggagatgaagagacacag

SEQ ID NO: 3819730 - DNA, 25 bp, Homo sapien
ctctgctgggactccacacgtctgg

SEQ ID NO: 3819731 - DNA, 25 bp, Homo sapien
aagagacacaggttggcctctgctg

SEQ ID NO: 3819732 - DNA, 25 bp, Homo sapien
atctctttcacctcgggggcacctt

SEQ ID NO: 3819733 - DNA, 25 bp, Homo sapien
tgtgggggtgcaagcccgcccaggg

SEQ ID NO: 3819734 - DNA, 25 bp, Homo sapien
agcaggccgctcacttgggtgtggg

SEQ ID NO: 3819735 - DNA, 25 bp, Homo sapien
gtgggggtgcaagcccgcccagggc

SEQ ID NO: 3819736 - DNA, 25 bp, Homo sapien
gatgggaggccagttggtgagaagg

SEQ ID NO: 3819737 - DNA, 25 bp, Homo sapien
tgagaaggtggcaggcggcacagcc

SEQ ID NO: 3819738 - DNA, 25 bp, Homo sapien
gagaaggtggcaggcggcacagcca

SEQ ID NO: 3819739 - DNA, 25 bp, Homo sapien
cacagatgggaggccagttggtgag

SEQ ID NO: 3819740 - DNA, 25 bp, Homo sapien
ccctcgggaccattcagaggcatca

SEQ ID NO: 3819741 - DNA, 25 bp, Homo sapien
tgtcagaccggtgatggcctcagct

SEQ ID NO: 3819742 - DNA, 25 bp, Homo sapien
catgccatactggtccactgtcaga

SEQ ID NO: 3819743 - DNA, 25 bp, Homo sapien
cttatacagcatgccatactggtcc

SEQ ID NO: 3819744 - DNA, 25 bp, Homo sapien
tcgtttctttggtggaaggcattcc

SEQ ID NO: 3819745 - DNA, 25 bp, Homo sapien
gtttctttggtggaaggcattcctg

SEQ ID NO: 3819746 - DNA, 25 bp, Homo sapien
tctcgtttctttggtggaaggcatt

SEQ ID NO: 3819747 - DNA, 25 bp, Homo sapien
ggtctcgtttctttggtggaaggca

SEQ ID NO: 3819748 - DNA, 25 bp, Homo sapien
gctttgtggtgttcctggagcctgg

SEQ ID NO: 3819749 - DNA, 25 bp, Homo sapien
attgctttgtggtgttcctggagcc

SEQ ID NO: 3819750 - DNA, 25 bp, Homo sapien
agcctggaaggagttggcttgctcc

SEQ ID NO: 3819751 - DNA, 25 bp, Homo sapien
ggagcctggaaggagttggcttgct

SEQ ID NO: 3819752 - DNA, 25 bp, Homo sapien
atggcatttgtgactgtgttggtca

SEQ ID NO: 3819753 - DNA, 25 bp, Homo sapien
gatggcatttgtgactgtgttggtc

SEQ ID NO: 3819754 - DNA, 25 bp, Homo sapien
tgatggcatttgtgactgtgttggt

SEQ ID NO: 3819755 - DNA, 25 bp, Homo sapien
gtgatggcatttgtgactgtgttgg

SEQ ID NO: 3819756 - DNA, 25 bp, Homo sapien
ctgaacttgtgtccccttgagtggc

SEQ ID NO: 3819757 - DNA, 25 bp, Homo sapien
aggaagaatgtcctagtgatccacc

SEQ ID NO: 3819758 - DNA, 25 bp, Homo sapien
cacctgctgaacttgtgtccccttg

SEQ ID NO: 3819759 - DNA, 25 bp, Homo sapien
ggaagaatgtcctagtgatccacct

SEQ ID NO: 3819760 - DNA, 25 bp, Homo sapien
ttcaccacttcctccacggcatgaa

SEQ ID NO: 3819761 - DNA, 25 bp, Homo sapien
cagtctccttggcatgtcccaccac

SEQ ID NO: 3819762 - DNA, 25 bp, Homo sapien
ctccagtctccttggcatgtcccac
